United States Patent Application Publication US 2015/0141320 A1 - sequence listing, part 45

SEQ ID NO: 1760272 - DNA, 15 bp, Homo sapiens
ttagaatttctcaat

SEQ ID NO: 1760273 - DNA, 15 bp, Homo sapiens
tagaatttctcaatt

SEQ ID NO: 1760274 - DNA, 15 bp, Homo sapiens
agaatttctcaattt

SEQ ID NO: 1760275 - DNA, 15 bp, Homo sapiens
gaatttctcaattta

SEQ ID NO: 1760276 - DNA, 15 bp, Homo sapiens
aatttctcaatttac

SEQ ID NO: 1760277 - DNA, 15 bp, Homo sapiens
atttctcaatttaca

SEQ ID NO: 1760278 - DNA, 15 bp, Homo sapiens
tttctcaatttacac

SEQ ID NO: 1760279 - DNA, 15 bp, Homo sapiens
ttctcaatttacaca

SEQ ID NO: 1760280 - DNA, 15 bp, Homo sapiens
tctcaatttacacat

SEQ ID NO: 1760281 - DNA, 15 bp, Homo sapiens
ctcaatttacacatg

SEQ ID NO: 1760282 - DNA, 15 bp, Homo sapiens
tcaatttacacatgg

SEQ ID NO: 1760283 - DNA, 15 bp, Homo sapiens
caatttacacatggc

SEQ ID NO: 1760284 - DNA, 15 bp, Homo sapiens
aatttacacatggcc

SEQ ID NO: 1760285 - DNA, 15 bp, Homo sapiens
atttacacatggcct

SEQ ID NO: 1760286 - DNA, 15 bp, Homo sapiens
tttacacatggcctt

SEQ ID NO: 1760287 - DNA, 15 bp, Homo sapiens
ttacacatggccttt

SEQ ID NO: 1760288 - DNA, 15 bp, Homo sapiens
tacacatggcctttc

SEQ ID NO: 1760289 - DNA, 15 bp, Homo sapiens
acacatggcctttca

SEQ ID NO: 1760290 - DNA, 15 bp, Homo sapiens
cacatggcctttcag

SEQ ID NO: 1760291 - DNA, 15 bp, Homo sapiens
acatggcctttcagg

SEQ ID NO: 1760292 - DNA, 15 bp, Homo sapiens
catggcctttcaggt

SEQ ID NO: 1760293 - DNA, 15 bp, Homo sapiens
atggcctttcaggtt

SEQ ID NO: 1760294 - DNA, 15 bp, Homo sapiens
tggcctttcaggttg

SEQ ID NO: 1760295 - DNA, 15 bp, Homo sapiens
ggcctttcaggttgt

SEQ ID NO: 1760296 - DNA, 15 bp, Homo sapiens
gcctttcaggttgtg

SEQ ID NO: 1760297 - DNA, 15 bp, Homo sapiens
cctttcaggttgtga

SEQ ID NO: 1760298 - DNA, 15 bp, Homo sapiens
ctttcaggttgtgag

SEQ ID NO: 1760299 - DNA, 15 bp, Homo sapiens
tttcaggttgtgagg

SEQ ID NO: 1760300 - DNA, 15 bp, Homo sapiens
ttcaggttgtgagga

SEQ ID NO: 1760301 - DNA, 15 bp, Homo sapiens
tcaggttgtgaggaa

SEQ ID NO: 1760302 - DNA, 15 bp, Homo sapiens
caggttgtgaggaag

SEQ ID NO: 1760303 - DNA, 15 bp, Homo sapiens
aggttgtgaggaaga

SEQ ID NO: 1760304 - DNA, 15 bp, Homo sapiens
ggttgtgaggaagat

SEQ ID NO: 1760305 - DNA, 15 bp, Homo sapiens
gttgtgaggaagata

SEQ ID NO: 1760306 - DNA, 15 bp, Homo sapiens
ttgtgaggaagatat

SEQ ID NO: 1760307 - DNA, 15 bp, Homo sapiens
tgtgaggaagatatg

SEQ ID NO: 1760308 - DNA, 15 bp, Homo sapiens
gtgaggaagatatgt

SEQ ID NO: 1760309 - DNA, 15 bp, Homo sapiens
tgaggaagatatgtc

SEQ ID NO: 1760310 - DNA, 15 bp, Homo sapiens
gaggaagatatgtca

SEQ ID NO: 1760311 - DNA, 15 bp, Homo sapiens
aggaagatatgtcaa

SEQ ID NO: 1760312 - DNA, 15 bp, Homo sapiens
ggaagatatgtcaag

SEQ ID NO: 1760313 - DNA, 15 bp, Homo sapiens
gaagatatgtcaaga

SEQ ID NO: 1760314 - DNA, 15 bp, Homo sapiens
aagatatgtcaagat

SEQ ID NO: 1760315 - DNA, 15 bp, Homo sapiens
agatatgtcaagata

SEQ ID NO: 1760316 - DNA, 15 bp, Homo sapiens
gatatgtcaagataa

SEQ ID NO: 1760317 - DNA, 15 bp, Homo sapiens
atatgtcaagataag

SEQ ID NO: 1760318 - DNA, 15 bp, Homo sapiens
tatgtcaagataaga

SEQ ID NO: 1760319 - DNA, 15 bp, Homo sapiens
atgtcaagataagag

SEQ ID NO: 1760320 - DNA, 15 bp, Homo sapiens
tgtcaagataagagg

SEQ ID NO: 1760321 - DNA, 15 bp, Homo sapiens
gtcaagataagagga

SEQ ID NO: 1760322 - DNA, 15 bp, Homo sapiens
tcaagataagaggat

SEQ ID NO: 1760323 - DNA, 15 bp, Homo sapiens
caagataagaggata

SEQ ID NO: 1760324 - DNA, 15 bp, Homo sapiens
aagataagaggatag

SEQ ID NO: 1760325 - DNA, 15 bp, Homo sapiens
agataagaggataga

SEQ ID NO: 1760326 - DNA, 15 bp, Homo sapiens
gataagaggatagaa

SEQ ID NO: 1760327 - DNA, 15 bp, Homo sapiens
ataagaggatagaaa

SEQ ID NO: 1760328 - DNA, 15 bp, Homo sapiens
taagaggatagaaac

SEQ ID NO: 1760329 - DNA, 15 bp, Homo sapiens
aagaggatagaaact

SEQ ID NO: 1760330 - DNA, 15 bp, Homo sapiens
agaggatagaaacta

SEQ ID NO: 1760331 - DNA, 15 bp, Homo sapiens
gaggatagaaactat

SEQ ID NO: 1760332 - DNA, 15 bp, Homo sapiens
aggatagaaactatt

SEQ ID NO: 1760333 - DNA, 15 bp, Homo sapiens
ggatagaaactattt

SEQ ID NO: 1760334 - DNA, 15 bp, Homo sapiens
gatagaaactatttt

SEQ ID NO: 1760335 - DNA, 15 bp, Homo sapiens
atagaaactatttta

SEQ ID NO: 1760336 - DNA, 15 bp, Homo sapiens
tagaaactattttat

SEQ ID NO: 1760337 - DNA, 15 bp, Homo sapiens
agaaactattttatt

SEQ ID NO: 1760338 - DNA, 15 bp, Homo sapiens
gaaactattttattt

SEQ ID NO: 1760339 - DNA, 15 bp, Homo sapiens
aaactattttattta

SEQ ID NO: 1760340 - DNA, 15 bp, Homo sapiens
aactattttatttaa

SEQ ID NO: 1760341 - DNA, 15 bp, Homo sapiens
actattttatttaac

SEQ ID NO: 1760342 - DNA, 15 bp, Homo sapiens
ctattttatttaact

SEQ ID NO: 1760343 - DNA, 15 bp, Homo sapiens
tattttatttaactg

SEQ ID NO: 1760344 - DNA, 15 bp, Homo sapiens
attttatttaactgt

SEQ ID NO: 1760345 - DNA, 15 bp, Homo sapiens
ttttatttaactgtt

SEQ ID NO: 1760346 - DNA, 15 bp, Homo sapiens
tttatttaactgttc

SEQ ID NO: 1760347 - DNA, 15 bp, Homo sapiens
ttatttaactgttct

SEQ ID NO: 1760348 - DNA, 15 bp, Homo sapiens
tatttaactgttctt

SEQ ID NO: 1760349 - DNA, 15 bp, Homo sapiens
atttaactgttctta

SEQ ID NO: 1760350 - DNA, 15 bp, Homo sapiens
tttaactgttcttat

SEQ ID NO: 1760351 - DNA, 15 bp, Homo sapiens
ttaactgttcttata

SEQ ID NO: 1760352 - DNA, 15 bp, Homo sapiens
taactgttcttatag

SEQ ID NO: 1760353 - DNA, 15 bp, Homo sapiens
aactgttcttatagc

SEQ ID NO: 1760354 - DNA, 15 bp, Homo sapiens
actgttcttatagct

SEQ ID NO: 1760355 - DNA, 15 bp, Homo sapiens
ctgttcttatagctt

SEQ ID NO: 1760356 - DNA, 15 bp, Homo sapiens
tgttcttatagcttg

SEQ ID NO: 1760357 - DNA, 15 bp, Homo sapiens
gttcttatagcttga

SEQ ID NO: 1760358 - DNA, 15 bp, Homo sapiens
ttcttatagcttgac

SEQ ID NO: 1760359 - DNA, 15 bp, Homo sapiens
tcttatagcttgact

SEQ ID NO: 1760360 - DNA, 15 bp, Homo sapiens
cttatagcttgactg

SEQ ID NO: 1760361 - DNA, 15 bp, Homo sapiens
ttatagcttgactga

SEQ ID NO: 1760362 - DNA, 15 bp, Homo sapiens
tatagcttgactgat

SEQ ID NO: 1760363 - DNA, 15 bp, Homo sapiens
atagcttgactgatg

SEQ ID NO: 1760364 - DNA, 15 bp, Homo sapiens
tagcttgactgatga

SEQ ID NO: 1760365 - DNA, 15 bp, Homo sapiens
agcttgactgatgac

SEQ ID NO: 1760366 - DNA, 15 bp, Homo sapiens
gcttgactgatgact

SEQ ID NO: 1760367 - DNA, 15 bp, Homo sapiens
cttgactgatgactt

SEQ ID NO: 1760368 - DNA, 15 bp, Homo sapiens
ttgactgatgacttt

SEQ ID NO: 1760369 - DNA, 15 bp, Homo sapiens
tgactgatgactttt

SEQ ID NO: 1760370 - DNA, 15 bp, Homo sapiens
gactgatgactttta

SEQ ID NO: 1760371 - DNA, 15 bp, Homo sapiens
actgatgacttttat

SEQ ID NO: 1760372 - DNA, 15 bp, Homo sapiens
ctgatgacttttata

SEQ ID NO: 1760373 - DNA, 15 bp, Homo sapiens
tgatgacttttatat

SEQ ID NO: 1760374 - DNA, 15 bp, Homo sapiens
gatgacttttatata

SEQ ID NO: 1760375 - DNA, 15 bp, Homo sapiens
atgacttttatatat

SEQ ID NO: 1760376 - DNA, 15 bp, Homo sapiens
tgacttttatatatc

SEQ ID NO: 1760377 - DNA, 15 bp, Homo sapiens
gacttttatatatct

SEQ ID NO: 1760378 - DNA, 15 bp, Homo sapiens
acttttatatatcta

SEQ ID NO: 1760379 - DNA, 15 bp, Homo sapiens
cttttatatatctag

SEQ ID NO: 1760380 - DNA, 15 bp, Homo sapiens
ttttatatatctaga

SEQ ID NO: 1760381 - DNA, 15 bp, Homo sapiens
tttatatatctagac

SEQ ID NO: 1760382 - DNA, 15 bp, Homo sapiens
ttatatatctagaca

SEQ ID NO: 1760383 - DNA, 15 bp, Homo sapiens
tatatatctagacat

SEQ ID NO: 1760384 - DNA, 15 bp, Homo sapiens
atatatctagacata

SEQ ID NO: 1760385 - DNA, 15 bp, Homo sapiens
tatatctagacatag

SEQ ID NO: 1760386 - DNA, 15 bp, Homo sapiens
atatctagacatagg

SEQ ID NO: 1760387 - DNA, 15 bp, Homo sapiens
tatctagacatagga

SEQ ID NO: 1760388 - DNA, 15 bp, Homo sapiens
atctagacataggaa

SEQ ID NO: 1760389 - DNA, 15 bp, Homo sapiens
tctagacataggaaa

SEQ ID NO: 1760390 - DNA, 15 bp, Homo sapiens
ctagacataggaaat

SEQ ID NO: 1760391 - DNA, 15 bp, Homo sapiens
tagacataggaaatg

SEQ ID NO: 1760392 - DNA, 15 bp, Homo sapiens
agacataggaaatgt

SEQ ID NO: 1760393 - DNA, 15 bp, Homo sapiens
gacataggaaatgtg

SEQ ID NO: 1760394 - DNA, 15 bp, Homo sapiens
acataggaaatgtga

SEQ ID NO: 1760395 - DNA, 15 bp, Homo sapiens
cataggaaatgtgac

SEQ ID NO: 1760396 - DNA, 15 bp, Homo sapiens
ataggaaatgtgacc

SEQ ID NO: 1760397 - DNA, 15 bp, Homo sapiens
taggaaatgtgaccc

SEQ ID NO: 1760398 - DNA, 15 bp, Homo sapiens
aggaaatgtgaccct

SEQ ID NO: 1760399 - DNA, 15 bp, Homo sapiens
ggaaatgtgaccctc

SEQ ID NO: 1760400 - DNA, 15 bp, Homo sapiens
gaaatgtgaccctca

SEQ ID NO: 1760401 - DNA, 15 bp, Homo sapiens
aaatgtgaccctcat

SEQ ID NO: 1760402 - DNA, 15 bp, Homo sapiens
aatgtgaccctcatc

SEQ ID NO: 1760403 - DNA, 15 bp, Homo sapiens
atgtgaccctcatcc

SEQ ID NO: 1760404 - DNA, 15 bp, Homo sapiens
tgtgaccctcatcct

SEQ ID NO: 1760405 - DNA, 15 bp, Homo sapiens
gtgaccctcatcctc

SEQ ID NO: 1760406 - DNA, 15 bp, Homo sapiens
tgaccctcatcctct

SEQ ID NO: 1760407 - DNA, 15 bp, Homo sapiens
gaccctcatcctctt

SEQ ID NO: 1760408 - DNA, 15 bp, Homo sapiens
accctcatcctcttg

SEQ ID NO: 1760409 - DNA, 15 bp, Homo sapiens
ccctcatcctcttgt

SEQ ID NO: 1760410 - DNA, 15 bp, Homo sapiens
cctcatcctcttgtt

SEQ ID NO: 1760411 - DNA, 15 bp, Homo sapiens
ctcatcctcttgttc

SEQ ID NO: 1760412 - DNA, 15 bp, Homo sapiens
tcatcctcttgttcc

SEQ ID NO: 1760413 - DNA, 15 bp, Homo sapiens
catcctcttgttcca

SEQ ID NO: 1760414 - DNA, 15 bp, Homo sapiens
atcctcttgttccaa

SEQ ID NO: 1760415 - DNA, 15 bp, Homo sapiens
tcctcttgttccaag

SEQ ID NO: 1760416 - DNA, 15 bp, Homo sapiens
cctcttgttccaaga

SEQ ID NO: 1760417 - DNA, 15 bp, Homo sapiens
ctcttgttccaagac

SEQ ID NO: 1760418 - DNA, 15 bp, Homo sapiens
tcttgttccaagacc

SEQ ID NO: 1760419 - DNA, 15 bp, Homo sapiens
cttgttccaagaccc

SEQ ID NO: 1760420 - DNA, 15 bp, Homo sapiens
ttgttccaagaccca

SEQ ID NO: 1760421 - DNA, 15 bp, Homo sapiens
tgttccaagacccac

SEQ ID NO: 1760422 - DNA, 15 bp, Homo sapiens
gttccaagacccaca

SEQ ID NO: 1760423 - DNA, 15 bp, Homo sapiens
ttccaagacccacag

SEQ ID NO: 1760424 - DNA, 15 bp, Homo sapiens
tccaagacccacagg

SEQ ID NO: 1760425 - DNA, 15 bp, Homo sapiens
ccaagacccacaggt

SEQ ID NO: 1760426 - DNA, 15 bp, Homo sapiens
caagacccacaggtg

SEQ ID NO: 1760427 - DNA, 15 bp, Homo sapiens
aagacccacaggtgt

SEQ ID NO: 1760428 - DNA, 15 bp, Homo sapiens
agacccacaggtgtt

SEQ ID NO: 1760429 - DNA, 15 bp, Homo sapiens
gacccacaggtgtta

SEQ ID NO: 1760430 - DNA, 15 bp, Homo sapiens
acccacaggtgttac

SEQ ID NO: 1760431 - DNA, 15 bp, Homo sapiens
cccacaggtgttacg

SEQ ID NO: 1760432 - DNA, 15 bp, Homo sapiens
ccacaggtgttacgg

SEQ ID NO: 1760433 - DNA, 15 bp, Homo sapiens
cacaggtgttacggg

SEQ ID NO: 1760434 - DNA, 15 bp, Homo sapiens
acaggtgttacgggc

SEQ ID NO: 1760435 - DNA, 15 bp, Homo sapiens
caggtgttacgggca

SEQ ID NO: 1760436 - DNA, 15 bp, Homo sapiens
aggtgttacgggcag

SEQ ID NO: 1760437 - DNA, 15 bp, Homo sapiens
ggtgttacgggcaga

SEQ ID NO: 1760438 - DNA, 15 bp, Homo sapiens
gtgttacgggcagac

SEQ ID NO: 1760439 - DNA, 15 bp, Homo sapiens
tgttacgggcagacc

SEQ ID NO: 1760440 - DNA, 15 bp, Homo sapiens
gttacgggcagaccg

SEQ ID NO: 1760441 - DNA, 15 bp, Homo sapiens
ttacgggcagaccgt

SEQ ID NO: 1760442 - DNA, 15 bp, Homo sapiens
tacgggcagaccgtc

SEQ ID NO: 1760443 - DNA, 15 bp, Homo sapiens
acgggcagaccgtca

SEQ ID NO: 1760444 - DNA, 15 bp, Homo sapiens
cgggcagaccgtcac

SEQ ID NO: 1760445 - DNA, 15 bp, Homo sapiens
gggcagaccgtcact

SEQ ID NO: 1760446 - DNA, 15 bp, Homo sapiens
ggcagaccgtcactc

SEQ ID NO: 1760447 - DNA, 15 bp, Homo sapiens
gcagaccgtcactca

SEQ ID NO: 1760448 - DNA, 15 bp, Homo sapiens
cagaccgtcactcag

SEQ ID NO: 1760449 - DNA, 15 bp, Homo sapiens
agaccgtcactcagc

SEQ ID NO: 1760450 - DNA, 15 bp, Homo sapiens
gaccgtcactcagca

SEQ ID NO: 1760451 - DNA, 15 bp, Homo sapiens
accgtcactcagcac

SEQ ID NO: 1760452 - DNA, 15 bp, Homo sapiens
ccgtcactcagcacc

SEQ ID NO: 1760453 - DNA, 15 bp, Homo sapiens
cgtcactcagcacct

SEQ ID NO: 1760454 - DNA, 15 bp, Homo sapiens
gtcactcagcacctg

SEQ ID NO: 1760455 - DNA, 15 bp, Homo sapiens
tcactcagcacctgg

SEQ ID NO: 1760456 - DNA, 15 bp, Homo sapiens
cactcagcacctgga

SEQ ID NO: 1760457 - DNA, 15 bp, Homo sapiens
actcagcacctggag

SEQ ID NO: 1760458 - DNA, 15 bp, Homo sapiens
ctcagcacctggagt

SEQ ID NO: 1760459 - DNA, 15 bp, Homo sapiens
tcagcacctggagtg

SEQ ID NO: 1760460 - DNA, 15 bp, Homo sapiens
cagcacctggagtga

SEQ ID NO: 1760461 - DNA, 15 bp, Homo sapiens
agcacctggagtgac

SEQ ID NO: 1760462 - DNA, 15 bp, Homo sapiens
gcacctggagtgaca

SEQ ID NO: 1760463 - DNA, 15 bp, Homo sapiens
cacctggagtgacag

SEQ ID NO: 1760464 - DNA, 15 bp, Homo sapiens
acctggagtgacagg

SEQ ID NO: 1760465 - DNA, 15 bp, Homo sapiens
cctggagtgacagga

SEQ ID NO: 1760466 - DNA, 15 bp, Homo sapiens
ctggagtgacaggat

SEQ ID NO: 1760467 - DNA, 15 bp, Homo sapiens
tggagtgacaggatc

SEQ ID NO: 1760468 - DNA, 15 bp, Homo sapiens
ggagtgacaggatcg

SEQ ID NO: 1760469 - DNA, 15 bp, Homo sapiens
gagtgacaggatcgg

SEQ ID NO: 1760470 - DNA, 15 bp, Homo sapiens
agtgacaggatcgga

SEQ ID NO: 1760471 - DNA, 15 bp, Homo sapiens
gtgacaggatcggac

SEQ ID NO: 1760472 - DNA, 15 bp, Homo sapiens
tgacaggatcggaca

SEQ ID NO: 1760473 - DNA, 15 bp, Homo sapiens
gacaggatcggacag

SEQ ID NO: 1760474 - DNA, 15 bp, Homo sapiens
acaggatcggacaga

SEQ ID NO: 1760475 - DNA, 15 bp, Homo sapiens
caggatcggacagaa

SEQ ID NO: 1760476 - DNA, 15 bp, Homo sapiens
aggatcggacagaag

SEQ ID NO: 1760477 - DNA, 15 bp, Homo sapiens
ggatcggacagaagg

SEQ ID NO: 1760478 - DNA, 15 bp, Homo sapiens
gatcggacagaaggg

SEQ ID NO: 1760479 - DNA, 15 bp, Homo sapiens
atcggacagaaggga

SEQ ID NO: 1760480 - DNA, 15 bp, Homo sapiens
tcggacagaagggaa

SEQ ID NO: 1760481 - DNA, 15 bp, Homo sapiens
cggacagaagggaag

SEQ ID NO: 1760482 - DNA, 15 bp, Homo sapiens
ggacagaagggaagc

SEQ ID NO: 1760483 - DNA, 15 bp, Homo sapiens
gacagaagggaagca

SEQ ID NO: 1760484 - DNA, 15 bp, Homo sapiens
acagaagggaagcag

SEQ ID NO: 1760485 - DNA, 15 bp, Homo sapiens
cagaagggaagcaga

SEQ ID NO: 1760486 - DNA, 15 bp, Homo sapiens
agaagggaagcagaa

SEQ ID NO: 1760487 - DNA, 15 bp, Homo sapiens
gaagggaagcagaaa

SEQ ID NO: 1760488 - DNA, 15 bp, Homo sapiens
aagggaagcagaaat

SEQ ID NO: 1760489 - DNA, 15 bp, Homo sapiens
agggaagcagaaatg

SEQ ID NO: 1760490 - DNA, 15 bp, Homo sapiens
gggaagcagaaatgg

SEQ ID NO: 1760491 - DNA, 15 bp, Homo sapiens
ggaagcagaaatggc

SEQ ID NO: 1760492 - DNA, 15 bp, Homo sapiens
gaagcagaaatggca

SEQ ID NO: 1760493 - DNA, 15 bp, Homo sapiens
aagcagaaatggcag

SEQ ID NO: 1760494 - DNA, 15 bp, Homo sapiens
agcagaaatggcagg

SEQ ID NO: 1760495 - DNA, 15 bp, Homo sapiens
gcagaaatggcaggg

SEQ ID NO: 1760496 - DNA, 15 bp, Homo sapiens
cagaaatggcagggc

SEQ ID NO: 1760497 - DNA, 15 bp, Homo sapiens
agaaatggcagggcc

SEQ ID NO: 1760498 - DNA, 15 bp, Homo sapiens
gaaatggcagggcct

SEQ ID NO: 1760499 - DNA, 15 bp, Homo sapiens
aaatggcagggcctg

SEQ ID NO: 1760500 - DNA, 15 bp, Homo sapiens
aatggcagggcctgc

SEQ ID NO: 1760501 - DNA, 15 bp, Homo sapiens
atggcagggcctgcg

SEQ ID NO: 1760502 - DNA, 15 bp, Homo sapiens
tggcagggcctgcgt

SEQ ID NO: 1760503 - DNA, 15 bp, Homo sapiens
ggcagggcctgcgtg

SEQ ID NO: 1760504 - DNA, 15 bp, Homo sapiens
gcagggcctgcgtgc

SEQ ID NO: 1760505 - DNA, 15 bp, Homo sapiens
cagggcctgcgtgca

SEQ ID NO: 1760506 - DNA, 15 bp, Homo sapiens
agggcctgcgtgcat

SEQ ID NO: 1760507 - DNA, 15 bp, Homo sapiens
gggcctgcgtgcatt

SEQ ID NO: 1760508 - DNA, 15 bp, Homo sapiens
ggcctgcgtgcattt

SEQ ID NO: 1760509 - DNA, 15 bp, Homo sapiens
gcctgcgtgcatttc

SEQ ID NO: 1760510 - DNA, 15 bp, Homo sapiens
cctgcgtgcatttct

SEQ ID NO: 1760511 - DNA, 15 bp, Homo sapiens
ctgcgtgcatttctg

SEQ ID NO: 1760512 - DNA, 15 bp, Homo sapiens
tgcgtgcatttctgg

SEQ ID NO: 1760513 - DNA, 15 bp, Homo sapiens
gcgtgcatttctggt

SEQ ID NO: 1760514 - DNA, 15 bp, Homo sapiens
cgtgcatttctggtg

SEQ ID NO: 1760515 - DNA, 15 bp, Homo sapiens
gtgcatttctggtgt

SEQ ID NO: 1760516 - DNA, 15 bp, Homo sapiens
tgcatttctggtgtg

SEQ ID NO: 1760517 - DNA, 15 bp, Homo sapiens
gcatttctggtgtgg

SEQ ID NO: 1760518 - DNA, 15 bp, Homo sapiens
catttctggtgtggt

SEQ ID NO: 1760519 - DNA, 15 bp, Homo sapiens
atttctggtgtggtc

SEQ ID NO: 1760520 - DNA, 15 bp, Homo sapiens
tttctggtgtggtcc

SEQ ID NO: 1760521 - DNA, 15 bp, Homo sapiens
ttctggtgtggtcct

SEQ ID NO: 1760522 - DNA, 15 bp, Homo sapiens
tctggtgtggtccta

SEQ ID NO: 1760523 - DNA, 15 bp, Homo sapiens
ctggtgtggtcctag

SEQ ID NO: 1760524 - DNA, 15 bp, Homo sapiens
tggtgtggtcctagc

SEQ ID NO: 1760525 - DNA, 15 bp, Homo sapiens
ggtgtggtcctagca

SEQ ID NO: 1760526 - DNA, 15 bp, Homo sapiens
gtgtggtcctagcat

SEQ ID NO: 1760527 - DNA, 15 bp, Homo sapiens
tgtggtcctagcatt

SEQ ID NO: 1760528 - DNA, 15 bp, Homo sapiens
gtggtcctagcattt

SEQ ID NO: 1760529 - DNA, 15 bp, Homo sapiens
tggtcctagcatttc

SEQ ID NO: 1760530 - DNA, 15 bp, Homo sapiens
ggtcctagcatttct

SEQ ID NO: 1760531 - DNA, 15 bp, Homo sapiens
gtcctagcatttctt

SEQ ID NO: 1760532 - DNA, 15 bp, Homo sapiens
tcctagcatttcttt

SEQ ID NO: 1760533 - DNA, 15 bp, Homo sapiens
cctagcatttctttg

SEQ ID NO: 1760534 - DNA, 15 bp, Homo sapiens
ctagcatttctttgc

SEQ ID NO: 1760535 - DNA, 15 bp, Homo sapiens
tagcatttctttgcc

SEQ ID NO: 1760536 - DNA, 15 bp, Homo sapiens
agcatttctttgcct

SEQ ID NO: 1760537 - DNA, 15 bp, Homo sapiens
gcatttctttgcctc

SEQ ID NO: 1760538 - DNA, 15 bp, Homo sapiens
catttctttgcctct

SEQ ID NO: 1760539 - DNA, 15 bp, Homo sapiens
atttctttgcctctc

SEQ ID NO: 1760540 - DNA, 15 bp, Homo sapiens
tttctttgcctctca

SEQ ID NO: 1760541 - DNA, 15 bp, Homo sapiens
ttctttgcctctcaa

SEQ ID NO: 1760542 - DNA, 15 bp, Homo sapiens
tctttgcctctcaag

SEQ ID NO: 1760543 - DNA, 15 bp, Homo sapiens
ctttgcctctcaagc

SEQ ID NO: 1760544 - DNA, 15 bp, Homo sapiens
tttgcctctcaagct

SEQ ID NO: 1760545 - DNA, 15 bp, Homo sapiens
ttgcctctcaagctg

SEQ ID NO: 1760546 - DNA, 15 bp, Homo sapiens
tgcctctcaagctgt

SEQ ID NO: 1760547 - DNA, 15 bp, Homo sapiens
gcctctcaagctgtg

SEQ ID NO: 1760548 - DNA, 15 bp, Homo sapiens
cctctcaagctgtgg

SEQ ID NO: 1760549 - DNA, 15 bp, Homo sapiens
ctctcaagctgtggt

SEQ ID NO: 1760550 - DNA, 15 bp, Homo sapiens
tctcaagctgtggtg

SEQ ID NO: 1760551 - DNA, 15 bp, Homo sapiens
ctcaagctgtggtgg

SEQ ID NO: 1760552 - DNA, 15 bp, Homo sapiens
tcaagctgtggtggc

SEQ ID NO: 1760553 - DNA, 15 bp, Homo sapiens
caagctgtggtggct

SEQ ID NO: 1760554 - DNA, 15 bp, Homo sapiens
aagctgtggtggctg

SEQ ID NO: 1760555 - DNA, 15 bp, Homo sapiens
agctgtggtggctga

SEQ ID NO: 1760556 - DNA, 15 bp, Homo sapiens
gctgtggtggctgaa

SEQ ID NO: 1760557 - DNA, 15 bp, Homo sapiens
ctgtggtggctgaat

SEQ ID NO: 1760558 - DNA, 15 bp, Homo sapiens
tgtggtggctgaatc

SEQ ID NO: 1760559 - DNA, 15 bp, Homo sapiens
gtggtggctgaatcg

SEQ ID NO: 1760560 - DNA, 15 bp, Homo sapiens
tggtggctgaatcgt

SEQ ID NO: 1760561 - DNA, 15 bp, Homo sapiens
ggtggctgaatcgtc

SEQ ID NO: 1760562 - DNA, 15 bp, Homo sapiens
gtggctgaatcgtca

SEQ ID NO: 1760563 - DNA, 15 bp, Homo sapiens
tggctgaatcgtcag

SEQ ID NO: 1760564 - DNA, 15 bp, Homo sapiens
ggctgaatcgtcagc

SEQ ID NO: 1760565 - DNA, 15 bp, Homo sapiens
gctgaatcgtcagcc

SEQ ID NO: 1760566 - DNA, 15 bp, Homo sapiens
ctgaatcgtcagccc

SEQ ID NO: 1760567 - DNA, 15 bp, Homo sapiens
tgaatcgtcagccct

SEQ ID NO: 1760568 - DNA, 15 bp, Homo sapiens
gaatcgtcagccctc

SEQ ID NO: 1760569 - DNA, 15 bp, Homo sapiens
aatcgtcagccctcc

SEQ ID NO: 1760570 - DNA, 15 bp, Homo sapiens
atcgtcagccctccc

SEQ ID NO: 1760571 - DNA, 15 bp, Homo sapiens
tcgtcagccctccca

SEQ ID NO: 1760572 - DNA, 15 bp, Homo sapiens
cgtcagccctcccag

SEQ ID NO: 1760573 - DNA, 15 bp, Homo sapiens
gtcagccctcccagg

SEQ ID NO: 1760574 - DNA, 15 bp, Homo sapiens
tcagccctcccaggc

SEQ ID NO: 1760575 - DNA, 15 bp, Homo sapiens
cagccctcccaggca

SEQ ID NO: 1760576 - DNA, 15 bp, Homo sapiens
agccctcccaggcag

SEQ ID NO: 1760577 - DNA, 15 bp, Homo sapiens
gccctcccaggcagg

SEQ ID NO: 1760578 - DNA, 15 bp, Homo sapiens
ccctcccaggcagga

SEQ ID NO: 1760579 - DNA, 15 bp, Homo sapiens
cctcccaggcaggaa

SEQ ID NO: 1760580 - DNA, 15 bp, Homo sapiens
ctcccaggcaggaag

SEQ ID NO: 1760581 - DNA, 15 bp, Homo sapiens
tcccaggcaggaagt

SEQ ID NO: 1760582 - DNA, 15 bp, Homo sapiens
cccaggcaggaagtg

SEQ ID NO: 1760583 - DNA, 15 bp, Homo sapiens
ccaggcaggaagtgt

SEQ ID NO: 1760584 - DNA, 15 bp, Homo sapiens
caggcaggaagtgtt

SEQ ID NO: 1760585 - DNA, 15 bp, Homo sapiens
aggcaggaagtgttc

SEQ ID NO: 1760586 - DNA, 15 bp, Homo sapiens
ggcaggaagtgttcc

SEQ ID NO: 1760587 - DNA, 15 bp, Homo sapiens
gcaggaagtgttccc

SEQ ID NO: 1760588 - DNA, 15 bp, Homo sapiens
caggaagtgttccca

SEQ ID NO: 1760589 - DNA, 15 bp, Homo sapiens
aggaagtgttcccaa

SEQ ID NO: 1760590 - DNA, 15 bp, Homo sapiens
ggaagtgttcccaaa

SEQ ID NO: 1760591 - DNA, 15 bp, Homo sapiens
gaagtgttcccaaag

SEQ ID NO: 1760592 - DNA, 15 bp, Homo sapiens
aagtgttcccaaagt

SEQ ID NO: 1760593 - DNA, 15 bp, Homo sapiens
agtgttcccaaagtc

SEQ ID NO: 1760594 - DNA, 15 bp, Homo sapiens
gtgttcccaaagtcc

SEQ ID NO: 1760595 - DNA, 15 bp, Homo sapiens
tgttcccaaagtccc

SEQ ID NO: 1760596 - DNA, 15 bp, Homo sapiens
gttcccaaagtcccg

SEQ ID NO: 1760597 - DNA, 15 bp, Homo sapiens
ttcccaaagtcccgc

SEQ ID NO: 1760598 - DNA, 15 bp, Homo sapiens
tcccaaagtcccgct

SEQ ID NO: 1760599 - DNA, 15 bp, Homo sapiens
cccaaagtcccgctg

SEQ ID NO: 1760600 - DNA, 15 bp, Homo sapiens
ccaaagtcccgctga

SEQ ID NO: 1760601 - DNA, 15 bp, Homo sapiens
caaagtcccgctgac

SEQ ID NO: 1760602 - DNA, 15 bp, Homo sapiens
aaagtcccgctgact

SEQ ID NO: 1760603 - DNA, 15 bp, Homo sapiens
aagtcccgctgactt

SEQ ID NO: 1760604 - DNA, 15 bp, Homo sapiens
agtcccgctgacttt

SEQ ID NO: 1760605 - DNA, 15 bp, Homo sapiens
gtcccgctgactttc

SEQ ID NO: 1760606 - DNA, 15 bp, Homo sapiens
tcccgctgactttct

SEQ ID NO: 1760607 - DNA, 15 bp, Homo sapiens
cccgctgactttcta

SEQ ID NO: 1760608 - DNA, 15 bp, Homo sapiens
ccgctgactttctat

SEQ ID NO: 1760609 - DNA, 15 bp, Homo sapiens
cgctgactttctatt

SEQ ID NO: 1760610 - DNA, 15 bp, Homo sapiens
gctgactttctattc

SEQ ID NO: 1760611 - DNA, 15 bp, Homo sapiens
ctgactttctattct

SEQ ID NO: 1760612 - DNA, 15 bp, Homo sapiens
tgactttctattcta

SEQ ID NO: 1760613 - DNA, 15 bp, Homo sapiens
gactttctattctat

SEQ ID NO: 1760614 - DNA, 15 bp, Homo sapiens
actttctattctatt

SEQ ID NO: 1760615 - DNA, 15 bp, Homo sapiens
ctttctattctattc

SEQ ID NO: 1760616 - DNA, 15 bp, Homo sapiens
tttctattctattca

SEQ ID NO: 1760617 - DNA, 15 bp, Homo sapiens
ttctattctattcag

SEQ ID NO: 1760618 - DNA, 15 bp, Homo sapiens
tctattctattcagg

SEQ ID NO: 1760619 - DNA, 15 bp, Homo sapiens
ctattctattcaggc

SEQ ID NO: 1760620 - DNA, 15 bp, Homo sapiens
tattctattcaggct

SEQ ID NO: 1760621 - DNA, 15 bp, Homo sapiens
attctattcaggctt

SEQ ID NO: 1760622 - DNA, 15 bp, Homo sapiens
ttctattcaggcttt

SEQ ID NO: 1760623 - DNA, 15 bp, Homo sapiens
tctattcaggcttta

SEQ ID NO: 1760624 - DNA, 15 bp, Homo sapiens
ctattcaggctttaa

SEQ ID NO: 1760625 - DNA, 15 bp, Homo sapiens
tattcaggctttaaa

SEQ ID NO: 1760626 - DNA, 15 bp, Homo sapiens
attcaggctttaaac

SEQ ID NO: 1760627 - DNA, 15 bp, Homo sapiens
ttcaggctttaaaca

SEQ ID NO: 1760628 - DNA, 15 bp, Homo sapiens
tcaggctttaaacat

SEQ ID NO: 1760629 - DNA, 15 bp, Homo sapiens
caggctttaaacatt

SEQ ID NO: 1760630 - DNA, 15 bp, Homo sapiens
aggctttaaacattt

SEQ ID NO: 1760631 - DNA, 15 bp, Homo sapiens
ggctttaaacatttc

SEQ ID NO: 1760632 - DNA, 15 bp, Homo sapiens
gctttaaacatttcc

SEQ ID NO: 1760633 - DNA, 15 bp, Homo sapiens
ctttaaacatttccc

SEQ ID NO: 1760634 - DNA, 15 bp, Homo sapiens
tttaaacatttcccg

SEQ ID NO: 1760635 - DNA, 15 bp, Homo sapiens
ttaaacatttcccga

SEQ ID NO: 1760636 - DNA, 15 bp, Homo sapiens
taaacatttcccgaa

SEQ ID NO: 1760637 - DNA, 15 bp, Homo sapiens
aaacatttcccgaag

SEQ ID NO: 1760638 - DNA, 15 bp, Homo sapiens
aacatttcccgaagt

SEQ ID NO: 1760639 - DNA, 15 bp, Homo sapiens
acatttcccgaagtg

SEQ ID NO: 1760640 - DNA, 15 bp, Homo sapiens
catttcccgaagtgg

SEQ ID NO: 1760641 - DNA, 15 bp, Homo sapiens
atttcccgaagtggt

SEQ ID NO: 1760642 - DNA, 15 bp, Homo sapiens
tttcccgaagtggtg

SEQ ID NO: 1760643 - DNA, 15 bp, Homo sapiens
ttcccgaagtggtgg

SEQ ID NO: 1760644 - DNA, 15 bp, Homo sapiens
tcccgaagtggtggg

SEQ ID NO: 1760645 - DNA, 15 bp, Homo sapiens
cccgaagtggtgggc

SEQ ID NO: 1760646 - DNA, 15 bp, Homo sapiens
ccgaagtggtgggcc

SEQ ID NO: 1760647 - DNA, 15 bp, Homo sapiens
cgaagtggtgggccc

SEQ ID NO: 1760648 - DNA, 15 bp, Homo sapiens
gaagtggtgggcccc

SEQ ID NO: 1760649 - DNA, 15 bp, Homo sapiens
aagtggtgggcccca

SEQ ID NO: 1760650 - DNA, 15 bp, Homo sapiens
agtggtgggccccac

SEQ ID NO: 1760651 - DNA, 15 bp, Homo sapiens
gtggtgggccccaca

SEQ ID NO: 1760652 - DNA, 15 bp, Homo sapiens
tggtgggccccacag

SEQ ID NO: 1760653 - DNA, 15 bp, Homo sapiens
ggtgggccccacagg

SEQ ID NO: 1760654 - DNA, 15 bp, Homo sapiens
gtgggccccacaggg

SEQ ID NO: 1760655 - DNA, 15 bp, Homo sapiens
tgggccccacagggt

SEQ ID NO: 1760656 - DNA, 15 bp, Homo sapiens
gggccccacagggta

SEQ ID NO: 1760657 - DNA, 15 bp, Homo sapiens
ggccccacagggtat

SEQ ID NO: 1760658 - DNA, 15 bp, Homo sapiens
gccccacagggtatt

SEQ ID NO: 1760659 - DNA, 15 bp, Homo sapiens
ccccacagggtattc

SEQ ID NO: 1760660 - DNA, 15 bp, Homo sapiens
cccacagggtattca

SEQ ID NO: 1760661 - DNA, 15 bp, Homo sapiens
ccacagggtattcag

SEQ ID NO: 1760662 - DNA, 15 bp, Homo sapiens
cacagggtattcaga

SEQ ID NO: 1760663 - DNA, 15 bp, Homo sapiens
acagggtattcagag

SEQ ID NO: 1760664 - DNA, 15 bp, Homo sapiens
cagggtattcagaga

SEQ ID NO: 1760665 - DNA, 15 bp, Homo sapiens
agggtattcagagag

SEQ ID NO: 1760666 - DNA, 15 bp, Homo sapiens
gggtattcagagagc

SEQ ID NO: 1760667 - DNA, 15 bp, Homo sapiens
ggtattcagagagca

SEQ ID NO: 1760668 - DNA, 15 bp, Homo sapiens
gtattcagagagcag

SEQ ID NO: 1760669 - DNA, 15 bp, Homo sapiens
tattcagagagcaga

SEQ ID NO: 1760670 - DNA, 15 bp, Homo sapiens
attcagagagcagag

SEQ ID NO: 1760671 - DNA, 15 bp, Homo sapiens
ttcagagagcagagc

SEQ ID NO: 1760672 - DNA, 15 bp, Homo sapiens
tcagagagcagagct

SEQ ID NO: 1760673 - DNA, 15 bp, Homo sapiens
cagagagcagagctg

SEQ ID NO: 1760674 - DNA, 15 bp, Homo sapiens
agagagcagagctgg

SEQ ID NO: 1760675 - DNA, 15 bp, Homo sapiens
gagagcagagctggt

SEQ ID NO: 1760676 - DNA, 15 bp, Homo sapiens
agagcagagctggtc

SEQ ID NO: 1760677 - DNA, 15 bp, Homo sapiens
gagcagagctggtca

SEQ ID NO: 1760678 - DNA, 15 bp, Homo sapiens
agcagagctggtcag

SEQ ID NO: 1760679 - DNA, 15 bp, Homo sapiens
gcagagctggtcaga

SEQ ID NO: 1760680 - DNA, 15 bp, Homo sapiens
cagagctggtcagat

SEQ ID NO: 1760681 - DNA, 15 bp, Homo sapiens
agagctggtcagatg

SEQ ID NO: 1760682 - DNA, 15 bp, Homo sapiens
gagctggtcagatgt

SEQ ID NO: 1760683 - DNA, 15 bp, Homo sapiens
agctggtcagatgtg

SEQ ID NO: 1760684 - DNA, 15 bp, Homo sapiens
gctggtcagatgtgg

SEQ ID NO: 1760685 - DNA, 15 bp, Homo sapiens
ctggtcagatgtggt

SEQ ID NO: 1760686 - DNA, 15 bp, Homo sapiens
tggtcagatgtggtg

SEQ ID NO: 1760687 - DNA, 15 bp, Homo sapiens
ggtcagatgtggtgg

SEQ ID NO: 1760688 - DNA, 15 bp, Homo sapiens
gtcagatgtggtggt

SEQ ID NO: 1760689 - DNA, 15 bp, Homo sapiens
tcagatgtggtggtt

SEQ ID NO: 1760690 - DNA, 15 bp, Homo sapiens
cagatgtggtggttg

SEQ ID NO: 1760691 - DNA, 15 bp, Homo sapiens
agatgtggtggttgc

SEQ ID NO: 1760692 - DNA, 15 bp, Homo sapiens
gatgtggtggttgca

SEQ ID NO: 1760693 - DNA, 15 bp, Homo sapiens
atgtggtggttgcag

SEQ ID NO: 1760694 - DNA, 15 bp, Homo sapiens
tgtggtggttgcaga

SEQ ID NO: 1760695 - DNA, 15 bp, Homo sapiens
gtggtggttgcagaa

SEQ ID NO: 1760696 - DNA, 15 bp, Homo sapiens
tggtggttgcagaac

SEQ ID NO: 1760697 - DNA, 15 bp, Homo sapiens
ggtggttgcagaact

SEQ ID NO: 1760698 - DNA, 15 bp, Homo sapiens
gtggttgcagaactg

SEQ ID NO: 1760699 - DNA, 15 bp, Homo sapiens
tggttgcagaactga

SEQ ID NO: 1760700 - DNA, 15 bp, Homo sapiens
ggttgcagaactgac

SEQ ID NO: 1760701 - DNA, 15 bp, Homo sapiens
gttgcagaactgact

SEQ ID NO: 1760702 - DNA, 15 bp, Homo sapiens
ttgcagaactgacta

SEQ ID NO: 1760703 - DNA, 15 bp, Homo sapiens
tgcagaactgactag

SEQ ID NO: 1760704 - DNA, 15 bp, Homo sapiens
gcagaactgactaga

SEQ ID NO: 1760705 - DNA, 15 bp, Homo sapiens
cagaactgactagaa

SEQ ID NO: 1760706 - DNA, 15 bp, Homo sapiens
agaactgactagaaa

SEQ ID NO: 1760707 - DNA, 15 bp, Homo sapiens
gaactgactagaaat

SEQ ID NO: 1760708 - DNA, 15 bp, Homo sapiens
aactgactagaaatg

SEQ ID NO: 1760709 - DNA, 15 bp, Homo sapiens
actgactagaaatgg

SEQ ID NO: 1760710 - DNA, 15 bp, Homo sapiens
ctgactagaaatggt

SEQ ID NO: 1760711 - DNA, 15 bp, Homo sapiens
tgactagaaatggtg

SEQ ID NO: 1760712 - DNA, 15 bp, Homo sapiens
gactagaaatggtgg

SEQ ID NO: 1760713 - DNA, 15 bp, Homo sapiens
actagaaatggtggg

SEQ ID NO: 1760714 - DNA, 15 bp, Homo sapiens
ctagaaatggtgggc

SEQ ID NO: 1760715 - DNA, 15 bp, Homo sapiens
tagaaatggtgggct

SEQ ID NO: 1760716 - DNA, 15 bp, Homo sapiens
agaaatggtgggctc

SEQ ID NO: 1760717 - DNA, 15 bp, Homo sapiens
gaaatggtgggctcc

SEQ ID NO: 1760718 - DNA, 15 bp, Homo sapiens
aaatggtgggctcct

SEQ ID NO: 1760719 - DNA, 15 bp, Homo sapiens
aatggtgggctcctt

SEQ ID NO: 1760720 - DNA, 15 bp, Homo sapiens
atggtgggctccttg

SEQ ID NO: 1760721 - DNA, 15 bp, Homo sapiens
tggtgggctccttgg

SEQ ID NO: 1760722 - DNA, 15 bp, Homo sapiens
ggtgggctccttggg

SEQ ID NO: 1760723 - DNA, 15 bp, Homo sapiens
gtgggctccttgggt

SEQ ID NO: 1760724 - DNA, 15 bp, Homo sapiens
tgggctccttgggtc

SEQ ID NO: 1760725 - DNA, 15 bp, Homo sapiens
gggctccttgggtct

SEQ ID NO: 1760726 - DNA, 15 bp, Homo sapiens
ggctccttgggtctg

SEQ ID NO: 1760727 - DNA, 15 bp, Homo sapiens
gctccttgggtctgg

SEQ ID NO: 1760728 - DNA, 15 bp, Homo sapiens
ctccttgggtctggc

SEQ ID NO: 1760729 - DNA, 15 bp, Homo sapiens
tccttgggtctggcc

SEQ ID NO: 1760730 - DNA, 15 bp, Homo sapiens
ccttgggtctggccg

SEQ ID NO: 1760731 - DNA, 15 bp, Homo sapiens
cttgggtctggccga

SEQ ID NO: 1760732 - DNA, 15 bp, Homo sapiens
ttgggtctggccgag

SEQ ID NO: 1760733 - DNA, 15 bp, Homo sapiens
tgggtctggccgagt

SEQ ID NO: 1760734 - DNA, 15 bp, Homo sapiens
gggtctggccgagtc

SEQ ID NO: 1760735 - DNA, 15 bp, Homo sapiens
ggtctggccgagtca

SEQ ID NO: 1760736 - DNA, 15 bp, Homo sapiens
gtctggccgagtcaa

SEQ ID NO: 1760737 - DNA, 15 bp, Homo sapiens
tctggccgagtcaag

SEQ ID NO: 1760738 - DNA, 15 bp, Homo sapiens
ctggccgagtcaagt

SEQ ID NO: 1760739 - DNA, 15 bp, Homo sapiens
tggccgagtcaagtc

SEQ ID NO: 1760740 - DNA, 15 bp, Homo sapiens
ggccgagtcaagtcc

SEQ ID NO: 1760741 - DNA, 15 bp, Homo sapiens
gccgagtcaagtcct

SEQ ID NO: 1760742 - DNA, 15 bp, Homo sapiens
ccgagtcaagtcctg

SEQ ID NO: 1760743 - DNA, 15 bp, Homo sapiens
cgagtcaagtcctgg

SEQ ID NO: 1760744 - DNA, 15 bp, Homo sapiens
gagtcaagtcctgga

SEQ ID NO: 1760745 - DNA, 15 bp, Homo sapiens
agtcaagtcctggaa

SEQ ID NO: 1760746 - DNA, 15 bp, Homo sapiens
gtcaagtcctggaaa

SEQ ID NO: 1760747 - DNA, 15 bp, Homo sapiens
tcaagtcctggaaac

SEQ ID NO: 1760748 - DNA, 15 bp, Homo sapiens
caagtcctggaaact

SEQ ID NO: 1760749 - DNA, 15 bp, Homo sapiens
aagtcctggaaactc

SEQ ID NO: 1760750 - DNA, 15 bp, Homo sapiens
agtcctggaaactca

SEQ ID NO: 1760751 - DNA, 15 bp, Homo sapiens
gtcctggaaactcaa

SEQ ID NO: 1760752 - DNA, 15 bp, Homo sapiens
tcctggaaactcaag

SEQ ID NO: 1760753 - DNA, 15 bp, Homo sapiens
cctggaaactcaagg

SEQ ID NO: 1760754 - DNA, 15 bp, Homo sapiens
ctggaaactcaaggc

SEQ ID NO: 1760755 - DNA, 15 bp, Homo sapiens
tggaaactcaaggcc

SEQ ID NO: 1760756 - DNA, 15 bp, Homo sapiens
ggaaactcaaggcca

SEQ ID NO: 1760757 - DNA, 15 bp, Homo sapiens
gaaactcaaggccag

SEQ ID NO: 1760758 - DNA, 15 bp, Homo sapiens
aaactcaaggccagt

SEQ ID NO: 1760759 - DNA, 15 bp, Homo sapiens
aactcaaggccagtc

SEQ ID NO: 1760760 - DNA, 15 bp, Homo sapiens
actcaaggccagtcc

SEQ ID NO: 1760761 - DNA, 15 bp, Homo sapiens
ctcaaggccagtcca

SEQ ID NO: 1760762 - DNA, 15 bp, Homo sapiens
tcaaggccagtccag

SEQ ID NO: 1760763 - DNA, 15 bp, Homo sapiens
caaggccagtccagg

SEQ ID NO: 1760764 - DNA, 15 bp, Homo sapiens
aaggccagtccaggt

SEQ ID NO: 1760765 - DNA, 15 bp, Homo sapiens
aggccagtccaggtt

SEQ ID NO: 1760766 - DNA, 15 bp, Homo sapiens
ggccagtccaggttg

SEQ ID NO: 1760767 - DNA, 15 bp, Homo sapiens
gccagtccaggttgt

SEQ ID NO: 1760768 - DNA, 15 bp, Homo sapiens
ccagtccaggttgtt

SEQ ID NO: 1760769 - DNA, 15 bp, Homo sapiens
cagtccaggttgttt

SEQ ID NO: 1760770 - DNA, 15 bp, Homo sapiens
agtccaggttgtttt

SEQ ID NO: 1760771 - DNA, 15 bp, Homo sapiens
gtccaggttgttttc

SEQ ID NO: 1760772 - DNA, 15 bp, Homo sapiens
tccaggttgttttcc

SEQ ID NO: 1760773 - DNA, 15 bp, Homo sapiens
ccaggttgttttccc

SEQ ID NO: 1760774 - DNA, 15 bp, Homo sapiens
caggttgttttcccc

SEQ ID NO: 1760775 - DNA, 15 bp, Homo sapiens
aggttgttttcccca

SEQ ID NO: 1760776 - DNA, 15 bp, Homo sapiens
ggttgttttccccat

SEQ ID NO: 1760777 - DNA, 15 bp, Homo sapiens
gttgttttccccatt

SEQ ID NO: 1760778 - DNA, 15 bp, Homo sapiens
ttgttttccccattg

SEQ ID NO: 1760779 - DNA, 15 bp, Homo sapiens
tgttttccccattgg

SEQ ID NO: 1760780 - DNA, 15 bp, Homo sapiens
gttttccccattggg

SEQ ID NO: 1760781 - DNA, 15 bp, Homo sapiens
ttttccccattgggt

SEQ ID NO: 1760782 - DNA, 15 bp, Homo sapiens
tttccccattgggtg

SEQ ID NO: 1760783 - DNA, 15 bp, Homo sapiens
ttccccattgggtgt

SEQ ID NO: 1760784 - DNA, 15 bp, Homo sapiens
tccccattgggtgtg

SEQ ID NO: 1760785 - DNA, 15 bp, Homo sapiens
ccccattgggtgtgg

SEQ ID NO: 1760786 - DNA, 15 bp, Homo sapiens
cccattgggtgtgga

SEQ ID NO: 1760787 - DNA, 15 bp, Homo sapiens
ccattgggtgtggaa

SEQ ID NO: 1760788 - DNA, 15 bp, Homo sapiens
cattgggtgtggaat

SEQ ID NO: 1760789 - DNA, 15 bp, Homo sapiens
attgggtgtggaatc

SEQ ID NO: 1760790 - DNA, 15 bp, Homo sapiens
ttgggtgtggaatcc

SEQ ID NO: 1760791 - DNA, 15 bp, Homo sapiens
tgggtgtggaatcct

SEQ ID NO: 1760792 - DNA, 15 bp, Homo sapiens
gggtgtggaatcctc

SEQ ID NO: 1760793 - DNA, 15 bp, Homo sapiens
ggtgtggaatcctcg

SEQ ID NO: 1760794 - DNA, 15 bp, Homo sapiens
gtgtggaatcctcga

SEQ ID NO: 1760795 - DNA, 15 bp, Homo sapiens
tgtggaatcctcgat

SEQ ID NO: 1760796 - DNA, 15 bp, Homo sapiens
gtggaatcctcgatc

SEQ ID NO: 1760797 - DNA, 15 bp, Homo sapiens
tggaatcctcgatca

SEQ ID NO: 1760798 - DNA, 15 bp, Homo sapiens
ggaatcctcgatcat

SEQ ID NO: 1760799 - DNA, 15 bp, Homo sapiens
gaatcctcgatcatg

SEQ ID NO: 1760800 - DNA, 15 bp, Homo sapiens
aatcctcgatcatgc

SEQ ID NO: 1760801 - DNA, 15 bp, Homo sapiens
atcctcgatcatgct

SEQ ID NO: 1760802 - DNA, 15 bp, Homo sapiens
tcctcgatcatgctt

SEQ ID NO: 1760803 - DNA, 15 bp, Homo sapiens
cctcgatcatgcttg

SEQ ID NO: 1760804 - DNA, 15 bp, Homo sapiens
ctcgatcatgcttgt

SEQ ID NO: 1760805 - DNA, 15 bp, Homo sapiens
tcgatcatgcttgtc

SEQ ID NO: 1760806 - DNA, 15 bp, Homo sapiens
cgatcatgcttgtct

SEQ ID NO: 1760807 - DNA, 15 bp, Homo sapiens
gatcatgcttgtctt

SEQ ID NO: 1760808 - DNA, 15 bp, Homo sapiens
atcatgcttgtcttt

SEQ ID NO: 1760809 - DNA, 15 bp, Homo sapiens
tcatgcttgtctttc

SEQ ID NO: 1760810 - DNA, 15 bp, Homo sapiens
catgcttgtctttct

SEQ ID NO: 1760811 - DNA, 15 bp, Homo sapiens
atgcttgtctttctc

SEQ ID NO: 1760812 - DNA, 15 bp, Homo sapiens
tgcttgtctttctct

SEQ ID NO: 1760813 - DNA, 15 bp, Homo sapiens
gcttgtctttctctc

SEQ ID NO: 1760814 - DNA, 15 bp, Homo sapiens
cttgtctttctctcc

SEQ ID NO: 1760815 - DNA, 15 bp, Homo sapiens
ttgtctttctctcct

SEQ ID NO: 1760816 - DNA, 15 bp, Homo sapiens
tgtctttctctcctc

SEQ ID NO: 1760817 - DNA, 15 bp, Homo sapiens
gtctttctctcctcc

SEQ ID NO: 1760818 - DNA, 15 bp, Homo sapiens
tctttctctcctccc

SEQ ID NO: 1760819 - DNA, 15 bp, Homo sapiens
ctttctctcctccct

SEQ ID NO: 1760820 - DNA, 15 bp, Homo sapiens
tttctctcctccctc

SEQ ID NO: 1760821 - DNA, 15 bp, Homo sapiens
ttctctcctccctcc

SEQ ID NO: 1760822 - DNA, 15 bp, Homo sapiens
tctctcctccctcct

SEQ ID NO: 1760823 - DNA, 15 bp, Homo sapiens
ctctcctccctccta

SEQ ID NO: 1760824 - DNA, 15 bp, Homo sapiens
tctcctccctcctac

SEQ ID NO: 1760825 - DNA, 15 bp, Homo sapiens
ctcctccctcctacc

SEQ ID NO: 1760826 - DNA, 15 bp, Homo sapiens
tcctccctcctaccc

SEQ ID NO: 1760827 - DNA, 15 bp, Homo sapiens
cctccctcctaccca

SEQ ID NO: 1760828 - DNA, 15 bp, Homo sapiens
ctccctcctacccac

SEQ ID NO: 1760829 - DNA, 15 bp, Homo sapiens
tccctcctacccaca

SEQ ID NO: 1760830 - DNA, 15 bp, Homo sapiens
ccctcctacccacaa

SEQ ID NO: 1760831 - DNA, 15 bp, Homo sapiens
cctcctacccacaac

SEQ ID NO: 1760832 - DNA, 15 bp, Homo sapiens
ctcctacccacaaca

SEQ ID NO: 1760833 - DNA, 15 bp, Homo sapiens
tcctacccacaacag

SEQ ID NO: 1760834 - DNA, 15 bp, Homo sapiens
cctacccacaacagg

SEQ ID NO: 1760835 - DNA, 15 bp, Homo sapiens
ctacccacaacaggc

SEQ ID NO: 1760836 - DNA, 15 bp, Homo sapiens
tacccacaacaggca

SEQ ID NO: 1760837 - DNA, 15 bp, Homo sapiens
acccacaacaggcaa

SEQ ID NO: 1760838 - DNA, 15 bp, Homo sapiens
cccacaacaggcaaa

SEQ ID NO: 1760839 - DNA, 15 bp, Homo sapiens
ccacaacaggcaaag

SEQ ID NO: 1760840 - DNA, 15 bp, Homo sapiens
cacaacaggcaaaga

SEQ ID NO: 1760841 - DNA, 15 bp, Homo sapiens
acaacaggcaaagat

SEQ ID NO: 1760842 - DNA, 15 bp, Homo sapiens
caacaggcaaagatg

SEQ ID NO: 1760843 - DNA, 15 bp, Homo sapiens
aacaggcaaagatgg

SEQ ID NO: 1760844 - DNA, 15 bp, Homo sapiens
acaggcaaagatgga

SEQ ID NO: 1760845 - DNA, 15 bp, Homo sapiens
caggcaaagatggaa

SEQ ID NO: 1760846 - DNA, 15 bp, Homo sapiens
aggcaaagatggaaa

SEQ ID NO: 1760847 - DNA, 15 bp, Homo sapiens
ggcaaagatggaaag

SEQ ID NO: 1760848 - DNA, 15 bp, Homo sapiens
gcaaagatggaaagg

SEQ ID NO: 1760849 - DNA, 15 bp, Homo sapiens
caaagatggaaaggt

SEQ ID NO: 1760850 - DNA, 15 bp, Homo sapiens
aaagatggaaaggta

SEQ ID NO: 1760851 - DNA, 15 bp, Homo sapiens
aagatggaaaggtag

SEQ ID NO: 1760852 - DNA, 15 bp, Homo sapiens
agatggaaaggtagg

SEQ ID NO: 1760853 - DNA, 15 bp, Homo sapiens
gatggaaaggtagga

SEQ ID NO: 1760854 - DNA, 15 bp, Homo sapiens
atggaaaggtaggat

SEQ ID NO: 1760855 - DNA, 15 bp, Homo sapiens
tggaaaggtaggatg

SEQ ID NO: 1760856 - DNA, 15 bp, Homo sapiens
ggaaaggtaggatgg

SEQ ID NO: 1760857 - DNA, 15 bp, Homo sapiens
gaaaggtaggatggg

SEQ ID NO: 1760858 - DNA, 15 bp, Homo sapiens
aaaggtaggatgggg

SEQ ID NO: 1760859 - DNA, 15 bp, Homo sapiens
aaggtaggatggggt

SEQ ID NO: 1760860 - DNA, 15 bp, Homo sapiens
aggtaggatggggtg

SEQ ID NO: 1760861 - DNA, 15 bp, Homo sapiens
ggtaggatggggtga

SEQ ID NO: 1760862 - DNA, 15 bp, Homo sapiens
gtaggatggggtgag

SEQ ID NO: 1760863 - DNA, 15 bp, Homo sapiens
taggatggggtgagg

SEQ ID NO: 1760864 - DNA, 15 bp, Homo sapiens
aggatggggtgaggt

SEQ ID NO: 1760865 - DNA, 15 bp, Homo sapiens
ggatggggtgaggtg

SEQ ID NO: 1760866 - DNA, 15 bp, Homo sapiens
gatggggtgaggtgg

SEQ ID NO: 1760867 - DNA, 15 bp, Homo sapiens
atggggtgaggtggt

SEQ ID NO: 1760868 - DNA, 15 bp, Homo sapiens
tggggtgaggtggtg

SEQ ID NO: 1760869 - DNA, 15 bp, Homo sapiens
ggggtgaggtggtgg

SEQ ID NO: 1760870 - DNA, 15 bp, Homo sapiens
gggtgaggtggtggg

SEQ ID NO: 1760871 - DNA, 15 bp, Homo sapiens
ggtgaggtggtggga

SEQ ID NO: 1760872 - DNA, 15 bp, Homo sapiens
gtgaggtggtgggag

SEQ ID NO: 1760873 - DNA, 15 bp, Homo sapiens
tgaggtggtgggagt

SEQ ID NO: 1760874 - DNA, 15 bp, Homo sapiens
gaggtggtgggagtg

SEQ ID NO: 1760875 - DNA, 15 bp, Homo sapiens
aggtggtgggagtgg

SEQ ID NO: 1760876 - DNA, 15 bp, Homo sapiens
ggtggtgggagtggg

SEQ ID NO: 1760877 - DNA, 15 bp, Homo sapiens
gtggtgggagtgggg

SEQ ID NO: 1760878 - DNA, 15 bp, Homo sapiens
tggtgggagtgggga

SEQ ID NO: 1760879 - DNA, 15 bp, Homo sapiens
ggtgggagtggggat

SEQ ID NO: 1760880 - DNA, 15 bp, Homo sapiens
gtgggagtggggatc

SEQ ID NO: 1760881 - DNA, 15 bp, Homo sapiens
tgggagtggggatct

SEQ ID NO: 1760882 - DNA, 15 bp, Homo sapiens
gggagtggggatctg

SEQ ID NO: 1760883 - DNA, 15 bp, Homo sapiens
ggagtggggatctgc

SEQ ID NO: 1760884 - DNA, 15 bp, Homo sapiens
gagtggggatctgct

SEQ ID NO: 1760885 - DNA, 15 bp, Homo sapiens
agtggggatctgctt

SEQ ID NO: 1760886 - DNA, 15 bp, Homo sapiens
gtggggatctgcttc

SEQ ID NO: 1760887 - DNA, 15 bp, Homo sapiens
tggggatctgcttct

SEQ ID NO: 1760888 - DNA, 15 bp, Homo sapiens
ggggatctgcttctc

SEQ ID NO: 1760889 - DNA, 15 bp, Homo sapiens
gggatctgcttctcg

SEQ ID NO: 1760890 - DNA, 15 bp, Homo sapiens
ggatctgcttctcgc

SEQ ID NO: 1760891 - DNA, 15 bp, Homo sapiens
gatctgcttctcgct

SEQ ID NO: 1760892 - DNA, 15 bp, Homo sapiens
atctgcttctcgctt

SEQ ID NO: 1760893 - DNA, 15 bp, Homo sapiens
tctgcttctcgcttg

SEQ ID NO: 1760894 - DNA, 15 bp, Homo sapiens
ctgcttctcgcttgt

SEQ ID NO: 1760895 - DNA, 15 bp, Homo sapiens
tgcttctcgcttgtc

SEQ ID NO: 1760896 - DNA, 15 bp, Homo sapiens
gcttctcgcttgtct

SEQ ID NO: 1760897 - DNA, 15 bp, Homo sapiens
cttctcgcttgtctt

SEQ ID NO: 1760898 - DNA, 15 bp, Homo sapiens
ttctcgcttgtcttc

SEQ ID NO: 1760899 - DNA, 15 bp, Homo sapiens
tctcgcttgtcttcc

SEQ ID NO: 1760900 - DNA, 15 bp, Homo sapiens
ctcgcttgtcttcca

SEQ ID NO: 1760901 - DNA, 15 bp, Homo sapiens
tcgcttgtcttccag

SEQ ID NO: 1760902 - DNA, 15 bp, Homo sapiens
cgcttgtcttccagt

SEQ ID NO: 1760903 - DNA, 15 bp, Homo sapiens
gcttgtcttccagtt

SEQ ID NO: 1760904 - DNA, 15 bp, Homo sapiens
cttgtcttccagttt

SEQ ID NO: 1760905 - DNA, 15 bp, Homo sapiens
ttgtcttccagttta

SEQ ID NO: 1760906 - DNA, 15 bp, Homo sapiens
tgtcttccagtttag

SEQ ID NO: 1760907 - DNA, 15 bp, Homo sapiens
gtcttccagtttagc

SEQ ID NO: 1760908 - DNA, 15 bp, Homo sapiens
tcttccagtttagcc

SEQ ID NO: 1760909 - DNA, 15 bp, Homo sapiens
cttccagtttagcct

SEQ ID NO: 1760910 - DNA, 15 bp, Homo sapiens
ttccagtttagcctc

SEQ ID NO: 1760911 - DNA, 15 bp, Homo sapiens
tccagtttagcctcc

SEQ ID NO: 1760912 - DNA, 15 bp, Homo sapiens
ccagtttagcctcct

SEQ ID NO: 1760913 - DNA, 15 bp, Homo sapiens
cagtttagcctcctg

SEQ ID NO: 1760914 - DNA, 15 bp, Homo sapiens
agtttagcctcctgc

SEQ ID NO: 1760915 - DNA, 15 bp, Homo sapiens
gtttagcctcctgct

SEQ ID NO: 1760916 - DNA, 15 bp, Homo sapiens
tttagcctcctgctt

SEQ ID NO: 1760917 - DNA, 15 bp, Homo sapiens
ttagcctcctgcttc

SEQ ID NO: 1760918 - DNA, 15 bp, Homo sapiens
tagcctcctgcttca

SEQ ID NO: 1760919 - DNA, 15 bp, Homo sapiens
agcctcctgcttcaa

SEQ ID NO: 1760920 - DNA, 15 bp, Homo sapiens
gcctcctgcttcaaa

SEQ ID NO: 1760921 - DNA, 15 bp, Homo sapiens
cctcctgcttcaaat

SEQ ID NO: 1760922 - DNA, 15 bp, Homo sapiens
ctcctgcttcaaatc

SEQ ID NO: 1760923 - DNA, 15 bp, Homo sapiens
tcctgcttcaaatcc

SEQ ID NO: 1760924 - DNA, 15 bp, Homo sapiens
cctgcttcaaatcct

SEQ ID NO: 1760925 - DNA, 15 bp, Homo sapiens
ctgcttcaaatcctg

SEQ ID NO: 1760926 - DNA, 15 bp, Homo sapiens
tgcttcaaatcctgc

SEQ ID NO: 1760927 - DNA, 15 bp, Homo sapiens
gcttcaaatcctgcc

SEQ ID NO: 1760928 - DNA, 15 bp, Homo sapiens
cttcaaatcctgcca

SEQ ID NO: 1760929 - DNA, 15 bp, Homo sapiens
ttcaaatcctgccac

SEQ ID NO: 1760930 - DNA, 15 bp, Homo sapiens
tcaaatcctgccaca

SEQ ID NO: 1760931 - DNA, 15 bp, Homo sapiens
caaatcctgccacat

SEQ ID NO: 1760932 - DNA, 15 bp, Homo sapiens
aaatcctgccacatc

SEQ ID NO: 1760933 - DNA, 15 bp, Homo sapiens
aatcctgccacatcc

SEQ ID NO: 1760934 - DNA, 15 bp, Homo sapiens
atcctgccacatccc

SEQ ID NO: 1760935 - DNA, 15 bp, Homo sapiens
tcctgccacatcccg

SEQ ID NO: 1760936 - DNA, 15 bp, Homo sapiens
cctgccacatcccga

SEQ ID NO: 1760937 - DNA, 15 bp, Homo sapiens
ctgccacatcccgaa

SEQ ID NO: 1760938 - DNA, 15 bp, Homo sapiens
tgccacatcccgaat

SEQ ID NO: 1760939 - DNA, 15 bp, Homo sapiens
gccacatcccgaatt

SEQ ID NO: 1760940 - DNA, 15 bp, Homo sapiens
ccacatcccgaattc

SEQ ID NO: 1760941 - DNA, 15 bp, Homo sapiens
cacatcccgaattca

SEQ ID NO: 1760942 - DNA, 15 bp, Homo sapiens
acatcccgaattcag

SEQ ID NO: 1760943 - DNA, 15 bp, Homo sapiens
catcccgaattcagt

SEQ ID NO: 1760944 - DNA, 15 bp, Homo sapiens
atcccgaattcagtc

SEQ ID NO: 1760945 - DNA, 15 bp, Homo sapiens
tcccgaattcagtca

SEQ ID NO: 1760946 - DNA, 15 bp, Homo sapiens
cccgaattcagtcaa

SEQ ID NO: 1760947 - DNA, 15 bp, Homo sapiens
ccgaattcagtcaaa

SEQ ID NO: 1760948 - DNA, 15 bp, Homo sapiens
cgaattcagtcaaag

SEQ ID NO: 1760949 - DNA, 15 bp, Homo sapiens
gaattcagtcaaagg

SEQ ID NO: 1760950 - DNA, 15 bp, Homo sapiens
aattcagtcaaaggc

SEQ ID NO: 1760951 - DNA, 15 bp, Homo sapiens
attcagtcaaaggct

SEQ ID NO: 1760952 - DNA, 15 bp, Homo sapiens
ttcagtcaaaggcta

SEQ ID NO: 1760953 - DNA, 15 bp, Homo sapiens
tcagtcaaaggctat

SEQ ID NO: 1760954 - DNA, 15 bp, Homo sapiens
cagtcaaaggctatt

SEQ ID NO: 1760955 - DNA, 15 bp, Homo sapiens
agtcaaaggctattt

SEQ ID NO: 1760956 - DNA, 15 bp, Homo sapiens
gtcaaaggctatttc

SEQ ID NO: 1760957 - DNA, 15 bp, Homo sapiens
tcaaaggctatttct

SEQ ID NO: 1760958 - DNA, 15 bp, Homo sapiens
caaaggctatttctt

SEQ ID NO: 1760959 - DNA, 15 bp, Homo sapiens
aaaggctatttcttg

SEQ ID NO: 1760960 - DNA, 15 bp, Homo sapiens
aaggctatttcttga

SEQ ID NO: 1760961 - DNA, 15 bp, Homo sapiens
aggctatttcttgag

SEQ ID NO: 1760962 - DNA, 15 bp, Homo sapiens
ggctatttcttgagt

SEQ ID NO: 1760963 - DNA, 15 bp, Homo sapiens
gctatttcttgagta

SEQ ID NO: 1760964 - DNA, 15 bp, Homo sapiens
ctatttcttgagtaa

SEQ ID NO: 1760965 - DNA, 15 bp, Homo sapiens
tatttcttgagtaaa

SEQ ID NO: 1760966 - DNA, 15 bp, Homo sapiens
atttcttgagtaaac

SEQ ID NO: 1760967 - DNA, 15 bp, Homo sapiens
tttcttgagtaaaca

SEQ ID NO: 1760968 - DNA, 15 bp, Homo sapiens
ttcttgagtaaacac

SEQ ID NO: 1760969 - DNA, 15 bp, Homo sapiens
tcttgagtaaacact

SEQ ID NO: 1760970 - DNA, 15 bp, Homo sapiens
cttgagtaaacactt

SEQ ID NO: 1760971 - DNA, 15 bp, Homo sapiens
ttgagtaaacacttc

SEQ ID NO: 1760972 - DNA, 15 bp, Homo sapiens
tgagtaaacacttct

SEQ ID NO: 1760973 - DNA, 15 bp, Homo sapiens
gagtaaacacttctc

SEQ ID NO: 1760974 - DNA, 15 bp, Homo sapiens
agtaaacacttctca

SEQ ID NO: 1760975 - DNA, 15 bp, Homo sapiens
gtaaacacttctcag

SEQ ID NO: 1760976 - DNA, 15 bp, Homo sapiens
taaacacttctcagg

SEQ ID NO: 1760977 - DNA, 15 bp, Homo sapiens
aaacacttctcaggt

SEQ ID NO: 1760978 - DNA, 15 bp, Homo sapiens
aacacttctcaggta

SEQ ID NO: 1760979 - DNA, 15 bp, Homo sapiens
acacttctcaggtaa

SEQ ID NO: 1760980 - DNA, 15 bp, Homo sapiens
cacttctcaggtaaa

SEQ ID NO: 1760981 - DNA, 15 bp, Homo sapiens
acttctcaggtaaaa

SEQ ID NO: 1760982 - DNA, 15 bp, Homo sapiens
cttctcaggtaaaat

SEQ ID NO: 1760983 - DNA, 15 bp, Homo sapiens
ttctcaggtaaaatg

SEQ ID NO: 1760984 - DNA, 15 bp, Homo sapiens
tctcaggtaaaatga

SEQ ID NO: 1760985 - DNA, 15 bp, Homo sapiens
ctcaggtaaaatgag

SEQ ID NO: 1760986 - DNA, 15 bp, Homo sapiens
tcaggtaaaatgagg

SEQ ID NO: 1760987 - DNA, 15 bp, Homo sapiens
caggtaaaatgagga

SEQ ID NO: 1760988 - DNA, 15 bp, Homo sapiens
aggtaaaatgaggaa

SEQ ID NO: 1760989 - DNA, 15 bp, Homo sapiens
ggtaaaatgaggaag

SEQ ID NO: 1760990 - DNA, 15 bp, Homo sapiens
gtaaaatgaggaagg

SEQ ID NO: 1760991 - DNA, 15 bp, Homo sapiens
taaaatgaggaagga

SEQ ID NO: 1760992 - DNA, 15 bp, Homo sapiens
aaaatgaggaaggaa

SEQ ID NO: 1760993 - DNA, 15 bp, Homo sapiens
aaatgaggaaggaaa

SEQ ID NO: 1760994 - DNA, 15 bp, Homo sapiens
aatgaggaaggaaac

SEQ ID NO: 1760995 - DNA, 15 bp, Homo sapiens
atgaggaaggaaaca

SEQ ID NO: 1760996 - DNA, 15 bp, Homo sapiens
tgaggaaggaaacat

SEQ ID NO: 1760997 - DNA, 15 bp, Homo sapiens
gaggaaggaaacata

SEQ ID NO: 1760998 - DNA, 15 bp, Homo sapiens
aggaaggaaacatac

SEQ ID NO: 1760999 - DNA, 15 bp, Homo sapiens
ggaaggaaacatacc

SEQ ID NO: 1761000 - DNA, 15 bp, Homo sapiens
gaaggaaacatacct

SEQ ID NO: 1761001 - DNA, 15 bp, Homo sapiens
aaggaaacatacctc

SEQ ID NO: 1761002 - DNA, 15 bp, Homo sapiens
aggaaacatacctcc

SEQ ID NO: 1761003 - DNA, 15 bp, Homo sapiens
ggaaacatacctcca

SEQ ID NO: 1761004 - DNA, 15 bp, Homo sapiens
gaaacatacctccac

SEQ ID NO: 1761005 - DNA, 15 bp, Homo sapiens
aaacatacctccacc

SEQ ID NO: 1761006 - DNA, 15 bp, Homo sapiens
aacatacctccacct

SEQ ID NO: 1761007 - DNA, 15 bp, Homo sapiens
acatacctccacctc

SEQ ID NO: 1761008 - DNA, 15 bp, Homo sapiens
catacctccacctcc

SEQ ID NO: 1761009 - DNA, 15 bp, Homo sapiens
atacctccacctcct

SEQ ID NO: 1761010 - DNA, 15 bp, Homo sapiens
tacctccacctcctg

SEQ ID NO: 1761011 - DNA, 15 bp, Homo sapiens
acctccacctcctgc

SEQ ID NO: 1761012 - DNA, 15 bp, Homo sapiens
cctccacctcctgcc

SEQ ID NO: 1761013 - DNA, 15 bp, Homo sapiens
ctccacctcctgcca

SEQ ID NO: 1761014 - DNA, 15 bp, Homo sapiens
tccacctcctgccac

SEQ ID NO: 1761015 - DNA, 15 bp, Homo sapiens
ccacctcctgccacc

SEQ ID NO: 1761016 - DNA, 15 bp, Homo sapiens
cacctcctgccacct

SEQ ID NO: 1761017 - DNA, 15 bp, Homo sapiens
acctcctgccacctg

SEQ ID NO: 1761018 - DNA, 15 bp, Homo sapiens
cctcctgccacctgg

SEQ ID NO: 1761019 - DNA, 15 bp, Homo sapiens
ctcctgccacctggc

SEQ ID NO: 1761020 - DNA, 15 bp, Homo sapiens
tcctgccacctggct

SEQ ID NO: 1761021 - DNA, 15 bp, Homo sapiens
cctgccacctggctg

SEQ ID NO: 1761022 - DNA, 15 bp, Homo sapiens
ctgccacctggctgc

SEQ ID NO: 1761023 - DNA, 15 bp, Homo sapiens
tgccacctggctgct

SEQ ID NO: 1761024 - DNA, 15 bp, Homo sapiens
gccacctggctgctt

SEQ ID NO: 1761025 - DNA, 15 bp, Homo sapiens
ccacctggctgcttc

SEQ ID NO: 1761026 - DNA, 15 bp, Homo sapiens
cacctggctgcttct

SEQ ID NO: 1761027 - DNA, 15 bp, Homo sapiens
acctggctgcttcta

SEQ ID NO: 1761028 - DNA, 15 bp, Homo sapiens
cctggctgcttctac

SEQ ID NO: 1761029 - DNA, 15 bp, Homo sapiens
ctggctgcttctact

SEQ ID NO: 1761030 - DNA, 15 bp, Homo sapiens
tggctgcttctactc

SEQ ID NO: 1761031 - DNA, 15 bp, Homo sapiens
ggctgcttctactcc

SEQ ID NO: 1761032 - DNA, 15 bp, Homo sapiens
gctgcttctactcct

SEQ ID NO: 1761033 - DNA, 15 bp, Homo sapiens
ctgcttctactcctt

SEQ ID NO: 1761034 - DNA, 15 bp, Homo sapiens
tgcttctactccttc

SEQ ID NO: 1761035 - DNA, 15 bp, Homo sapiens
gcttctactccttcc

SEQ ID NO: 1761036 - DNA, 15 bp, Homo sapiens
cttctactccttcca

SEQ ID NO: 1761037 - DNA, 15 bp, Homo sapiens
ttctactccttccag

SEQ ID NO: 1761038 - DNA, 15 bp, Homo sapiens
tctactccttccagc

SEQ ID NO: 1761039 - DNA, 15 bp, Homo sapiens
ctactccttccagct

SEQ ID NO: 1761040 - DNA, 15 bp, Homo sapiens
tactccttccagctt

SEQ ID NO: 1761041 - DNA, 15 bp, Homo sapiens
actccttccagcttt

SEQ ID NO: 1761042 - DNA, 15 bp, Homo sapiens
ctccttccagctttc

SEQ ID NO: 1761043 - DNA, 15 bp, Homo sapiens
tccttccagctttct

SEQ ID NO: 1761044 - DNA, 15 bp, Homo sapiens
ccttccagctttctc

SEQ ID NO: 1761045 - DNA, 15 bp, Homo sapiens
cttccagctttctcg

SEQ ID NO: 1761046 - DNA, 15 bp, Homo sapiens
ttccagctttctcgc

SEQ ID NO: 1761047 - DNA, 15 bp, Homo sapiens
tccagctttctcgca

SEQ ID NO: 1761048 - DNA, 15 bp, Homo sapiens
ccagctttctcgcag

SEQ ID NO: 1761049 - DNA, 15 bp, Homo sapiens
cagctttctcgcaga

SEQ ID NO: 1761050 - DNA, 15 bp, Homo sapiens
agctttctcgcagaa

SEQ ID NO: 1761051 - DNA, 15 bp, Homo sapiens
gctttctcgcagaac

SEQ ID NO: 1761052 - DNA, 15 bp, Homo sapiens
ctttctcgcagaact

SEQ ID NO: 1761053 - DNA, 15 bp, Homo sapiens
tttctcgcagaactt

SEQ ID NO: 1761054 - DNA, 15 bp, Homo sapiens
ttctcgcagaactta

SEQ ID NO: 1761055 - DNA, 15 bp, Homo sapiens
tctcgcagaacttac

SEQ ID NO: 1761056 - DNA, 15 bp, Homo sapiens
ctcgcagaacttacg

SEQ ID NO: 1761057 - DNA, 15 bp, Homo sapiens
tcgcagaacttacga

SEQ ID NO: 1761058 - DNA, 15 bp, Homo sapiens
cgcagaacttacgat

SEQ ID NO: 1761059 - DNA, 15 bp, Homo sapiens
gcagaacttacgatt

SEQ ID NO: 1761060 - DNA, 15 bp, Homo sapiens
cagaacttacgattg

SEQ ID NO: 1761061 - DNA, 15 bp, Homo sapiens
agaacttacgattgc

SEQ ID NO: 1761062 - DNA, 15 bp, Homo sapiens
gaacttacgattgcc

SEQ ID NO: 1761063 - DNA, 15 bp, Homo sapiens
aacttacgattgcct

SEQ ID NO: 1761064 - DNA, 15 bp, Homo sapiens
acttacgattgcctg

SEQ ID NO: 1761065 - DNA, 15 bp, Homo sapiens
cttacgattgcctgt

SEQ ID NO: 1761066 - DNA, 15 bp, Homo sapiens
ttacgattgcctgtt

SEQ ID NO: 1761067 - DNA, 15 bp, Homo sapiens
tacgattgcctgtta

SEQ ID NO: 1761068 - DNA, 15 bp, Homo sapiens
acgattgcctgttag

SEQ ID NO: 1761069 - DNA, 15 bp, Homo sapiens
cgattgcctgttaga

SEQ ID NO: 1761070 - DNA, 15 bp, Homo sapiens
gattgcctgttagag

SEQ ID NO: 1761071 - DNA, 15 bp, Homo sapiens
attgcctgttagagc

SEQ ID NO: 1761072 - DNA, 15 bp, Homo sapiens
ttgcctgttagagcc

SEQ ID NO: 1761073 - DNA, 15 bp, Homo sapiens
tgcctgttagagcca

SEQ ID NO: 1761074 - DNA, 15 bp, Homo sapiens
gcctgttagagccac

SEQ ID NO: 1761075 - DNA, 15 bp, Homo sapiens
cctgttagagccaca

SEQ ID NO: 1761076 - DNA, 15 bp, Homo sapiens
ctgttagagccacac

SEQ ID NO: 1761077 - DNA, 15 bp, Homo sapiens
tgttagagccacaca

SEQ ID NO: 1761078 - DNA, 15 bp, Homo sapiens
gttagagccacacat

SEQ ID NO: 1761079 - DNA, 15 bp, Homo sapiens
ttagagccacacatg

SEQ ID NO: 1761080 - DNA, 15 bp, Homo sapiens
tagagccacacatgc

SEQ ID NO: 1761081 - DNA, 15 bp, Homo sapiens
agagccacacatgct

SEQ ID NO: 1761082 - DNA, 15 bp, Homo sapiens
gagccacacatgctg

SEQ ID NO: 1761083 - DNA, 15 bp, Homo sapiens
agccacacatgctga

SEQ ID NO: 1761084 - DNA, 15 bp, Homo sapiens
gccacacatgctgat

SEQ ID NO: 1761085 - DNA, 15 bp, Homo sapiens
ccacacatgctgatg

SEQ ID NO: 1761086 - DNA, 15 bp, Homo sapiens
cacacatgctgatgt

SEQ ID NO: 1761087 - DNA, 15 bp, Homo sapiens
acacatgctgatgtt

SEQ ID NO: 1761088 - DNA, 15 bp, Homo sapiens
cacatgctgatgttc

SEQ ID NO: 1761089 - DNA, 15 bp, Homo sapiens
acatgctgatgttcc

SEQ ID NO: 1761090 - DNA, 15 bp, Homo sapiens
catgctgatgttccc

SEQ ID NO: 1761091 - DNA, 15 bp, Homo sapiens
atgctgatgttccca

SEQ ID NO: 1761092 - DNA, 15 bp, Homo sapiens
tgctgatgttcccac

SEQ ID NO: 1761093 - DNA, 15 bp, Homo sapiens
gctgatgttcccaca

SEQ ID NO: 1761094 - DNA, 15 bp, Homo sapiens
ctgatgttcccacaa

SEQ ID NO: 1761095 - DNA, 15 bp, Homo sapiens
tgatgttcccacaaa

SEQ ID NO: 1761096 - DNA, 15 bp, Homo sapiens
gatgttcccacaaaa

SEQ ID NO: 1761097 - DNA, 15 bp, Homo sapiens
atgttcccacaaaag

SEQ ID NO: 1761098 - DNA, 15 bp, Homo sapiens
tgttcccacaaaagc

SEQ ID NO: 1761099 - DNA, 15 bp, Homo sapiens
gttcccacaaaagcc

SEQ ID NO: 1761100 - DNA, 15 bp, Homo sapiens
ttcccacaaaagccg

SEQ ID NO: 1761101 - DNA, 15 bp, Homo sapiens
tcccacaaaagccgt

SEQ ID NO: 1761102 - DNA, 15 bp, Homo sapiens
cccacaaaagccgtc

SEQ ID NO: 1761103 - DNA, 15 bp, Homo sapiens
ccacaaaagccgtct

SEQ ID NO: 1761104 - DNA, 15 bp, Homo sapiens
cacaaaagccgtctg

SEQ ID NO: 1761105 - DNA, 15 bp, Homo sapiens
acaaaagccgtctgt

SEQ ID NO: 1761106 - DNA, 15 bp, Homo sapiens
caaaagccgtctgtc

SEQ ID NO: 1761107 - DNA, 15 bp, Homo sapiens
aaaagccgtctgtca

SEQ ID NO: 1761108 - DNA, 15 bp, Homo sapiens
aaagccgtctgtcac

SEQ ID NO: 1761109 - DNA, 15 bp, Homo sapiens
aagccgtctgtcacc

SEQ ID NO: 1761110 - DNA, 15 bp, Homo sapiens
agccgtctgtcaccc

SEQ ID NO: 1761111 - DNA, 15 bp, Homo sapiens
gccgtctgtcaccct

SEQ ID NO: 1761112 - DNA, 15 bp, Homo sapiens
ccgtctgtcaccctg

SEQ ID NO: 1761113 - DNA, 15 bp, Homo sapiens
cgtctgtcaccctgt

SEQ ID NO: 1761114 - DNA, 15 bp, Homo sapiens
gtctgtcaccctgtc

SEQ ID NO: 1761115 - DNA, 15 bp, Homo sapiens
tctgtcaccctgtct

SEQ ID NO: 1761116 - DNA, 15 bp, Homo sapiens
ctgtcaccctgtctc

SEQ ID NO: 1761117 - DNA, 15 bp, Homo sapiens
tgtcaccctgtctca

SEQ ID NO: 1761118 - DNA, 15 bp, Homo sapiens
gtcaccctgtctcac

SEQ ID NO: 1761119 - DNA, 15 bp, Homo sapiens
tcaccctgtctcacc

SEQ ID NO: 1761120 - DNA, 15 bp, Homo sapiens
caccctgtctcaccc

SEQ ID NO: 1761121 - DNA, 15 bp, Homo sapiens
accctgtctcaccca

SEQ ID NO: 1761122 - DNA, 15 bp, Homo sapiens
ccctgtctcacccat

SEQ ID NO: 1761123 - DNA, 15 bp, Homo sapiens
cctgtctcacccatc

SEQ ID NO: 1761124 - DNA, 15 bp, Homo sapiens
ctgtctcacccatca

SEQ ID NO: 1761125 - DNA, 15 bp, Homo sapiens
tgtctcacccatcac

SEQ ID NO: 1761126 - DNA, 15 bp, Homo sapiens
gtctcacccatcact

SEQ ID NO: 1761127 - DNA, 15 bp, Homo sapiens
tctcacccatcactt

SEQ ID NO: 1761128 - DNA, 15 bp, Homo sapiens
ctcacccatcacttc

SEQ ID NO: 1761129 - DNA, 15 bp, Homo sapiens
tcacccatcacttca

SEQ ID NO: 1761130 - DNA, 15 bp, Homo sapiens
cacccatcacttcat

SEQ ID NO: 1761131 - DNA, 15 bp, Homo sapiens
acccatcacttcatt

SEQ ID NO: 1761132 - DNA, 15 bp, Homo sapiens
cccatcacttcatta

SEQ ID NO: 1761133 - DNA, 15 bp, Homo sapiens
ccatcacttcattac

SEQ ID NO: 1761134 - DNA, 15 bp, Homo sapiens
catcacttcattact

SEQ ID NO: 1761135 - DNA, 15 bp, Homo sapiens
atcacttcattactg

SEQ ID NO: 1761136 - DNA, 15 bp, Homo sapiens
tcacttcattactga

SEQ ID NO: 1761137 - DNA, 15 bp, Homo sapiens
cacttcattactgag

SEQ ID NO: 1761138 - DNA, 15 bp, Homo sapiens
acttcattactgaga

SEQ ID NO: 1761139 - DNA, 15 bp, Homo sapiens
cttcattactgagac

SEQ ID NO: 1761140 - DNA, 15 bp, Homo sapiens
ttcattactgagacc

SEQ ID NO: 1761141 - DNA, 15 bp, Homo sapiens
tcattactgagacca

SEQ ID NO: 1761142 - DNA, 15 bp, Homo sapiens
cattactgagaccaa

SEQ ID NO: 1761143 - DNA, 15 bp, Homo sapiens
attactgagaccaac

SEQ ID NO: 1761144 - DNA, 15 bp, Homo sapiens
ttactgagaccaacc

SEQ ID NO: 1761145 - DNA, 15 bp, Homo sapiens
tactgagaccaacct

SEQ ID NO: 1761146 - DNA, 15 bp, Homo sapiens
actgagaccaacctg

SEQ ID NO: 1761147 - DNA, 15 bp, Homo sapiens
ctgagaccaacctga

SEQ ID NO: 1761148 - DNA, 15 bp, Homo sapiens
tgagaccaacctgac

SEQ ID NO: 1761149 - DNA, 15 bp, Homo sapiens
gagaccaacctgaca

SEQ ID NO: 1761150 - DNA, 15 bp, Homo sapiens
agaccaacctgacag

SEQ ID NO: 1761151 - DNA, 15 bp, Homo sapiens
gaccaacctgacagc

SEQ ID NO: 1761152 - DNA, 15 bp, Homo sapiens
accaacctgacagcc

SEQ ID NO: 1761153 - DNA, 15 bp, Homo sapiens
ccaacctgacagcca

SEQ ID NO: 1761154 - DNA, 15 bp, Homo sapiens
caacctgacagccac

SEQ ID NO: 1761155 - DNA, 15 bp, Homo sapiens
aacctgacagccaca

SEQ ID NO: 1761156 - DNA, 15 bp, Homo sapiens
acctgacagccacat

SEQ ID NO: 1761157 - DNA, 15 bp, Homo sapiens
cctgacagccacatg

SEQ ID NO: 1761158 - DNA, 15 bp, Homo sapiens
ctgacagccacatgg

SEQ ID NO: 1761159 - DNA, 15 bp, Homo sapiens
tgacagccacatgga

SEQ ID NO: 1761160 - DNA, 15 bp, Homo sapiens
gacagccacatggat

SEQ ID NO: 1761161 - DNA, 15 bp, Homo sapiens
acagccacatggatg

SEQ ID NO: 1761162 - DNA, 15 bp, Homo sapiens
cagccacatggatgg

SEQ ID NO: 1761163 - DNA, 15 bp, Homo sapiens
agccacatggatgga

SEQ ID NO: 1761164 - DNA, 15 bp, Homo sapiens
gccacatggatggag

SEQ ID NO: 1761165 - DNA, 15 bp, Homo sapiens
ccacatggatggagg

SEQ ID NO: 1761166 - DNA, 15 bp, Homo sapiens
cacatggatggagga

SEQ ID NO: 1761167 - DNA, 15 bp, Homo sapiens
acatggatggaggag

SEQ ID NO: 1761168 - DNA, 15 bp, Homo sapiens
catggatggaggaga

SEQ ID NO: 1761169 - DNA, 15 bp, Homo sapiens
atggatggaggagac

SEQ ID NO: 1761170 - DNA, 15 bp, Homo sapiens
tggatggaggagaca

SEQ ID NO: 1761171 - DNA, 15 bp, Homo sapiens
ggatggaggagacac

SEQ ID NO: 1761172 - DNA, 15 bp, Homo sapiens
gatggaggagacacc

SEQ ID NO: 1761173 - DNA, 15 bp, Homo sapiens
atggaggagacacca

SEQ ID NO: 1761174 - DNA, 15 bp, Homo sapiens
tggaggagacaccag

SEQ ID NO: 1761175 - DNA, 15 bp, Homo sapiens
ggaggagacaccagt

SEQ ID NO: 1761176 - DNA, 15 bp, Homo sapiens
gaggagacaccagtg

SEQ ID NO: 1761177 - DNA, 15 bp, Homo sapiens
aggagacaccagtgg

SEQ ID NO: 1761178 - DNA, 15 bp, Homo sapiens
ggagacaccagtgga

SEQ ID NO: 1761179 - DNA, 15 bp, Homo sapiens
gagacaccagtggag

SEQ ID NO: 1761180 - DNA, 15 bp, Homo sapiens
agacaccagtggagt

SEQ ID NO: 1761181 - DNA, 15 bp, Homo sapiens
gacaccagtggagtc

SEQ ID NO: 1761182 - DNA, 15 bp, Homo sapiens
acaccagtggagtcc

SEQ ID NO: 1761183 - DNA, 15 bp, Homo sapiens
caccagtggagtccc

SEQ ID NO: 1761184 - DNA, 15 bp, Homo sapiens
accagtggagtccct

SEQ ID NO: 1761185 - DNA, 15 bp, Homo sapiens
ccagtggagtccctg

SEQ ID NO: 1761186 - DNA, 15 bp, Homo sapiens
cagtggagtccctgg

SEQ ID NO: 1761187 - DNA, 15 bp, Homo sapiens
agtggagtccctggc

SEQ ID NO: 1761188 - DNA, 15 bp, Homo sapiens
gtggagtccctggca

SEQ ID NO: 1761189 - DNA, 15 bp, Homo sapiens
tggagtccctggcat

SEQ ID NO: 1761190 - DNA, 15 bp, Homo sapiens
ggagtccctggcatg

SEQ ID NO: 1761191 - DNA, 15 bp, Homo sapiens
gagtccctggcatgt

SEQ ID NO: 1761192 - DNA, 15 bp, Homo sapiens
agtccctggcatgtg

SEQ ID NO: 1761193 - DNA, 15 bp, Homo sapiens
gtccctggcatgtgt

SEQ ID NO: 1761194 - DNA, 15 bp, Homo sapiens
tccctggcatgtgtg

SEQ ID NO: 1761195 - DNA, 15 bp, Homo sapiens
ccctggcatgtgtga

SEQ ID NO: 1761196 - DNA, 15 bp, Homo sapiens
cctggcatgtgtgag

SEQ ID NO: 1761197 - DNA, 15 bp, Homo sapiens
ctggcatgtgtgagc

SEQ ID NO: 1761198 - DNA, 15 bp, Homo sapiens
tggcatgtgtgagca

SEQ ID NO: 1761199 - DNA, 15 bp, Homo sapiens
ggcatgtgtgagcac

SEQ ID NO: 1761200 - DNA, 15 bp, Homo sapiens
gcatgtgtgagcaca

SEQ ID NO: 1761201 - DNA, 15 bp, Homo sapiens
catgtgtgagcacat

SEQ ID NO: 1761202 - DNA, 15 bp, Homo sapiens
atgtgtgagcacatt

SEQ ID NO: 1761203 - DNA, 15 bp, Homo sapiens
tgtgtgagcacattt

SEQ ID NO: 1761204 - DNA, 15 bp, Homo sapiens
gtgtgagcacatttc

SEQ ID NO: 1761205 - DNA, 15 bp, Homo sapiens
tgtgagcacatttct

SEQ ID NO: 1761206 - DNA, 15 bp, Homo sapiens
gtgagcacatttcta

SEQ ID NO: 1761207 - DNA, 15 bp, Homo sapiens
tgagcacatttctat

SEQ ID NO: 1761208 - DNA, 15 bp, Homo sapiens
gagcacatttctatg

SEQ ID NO: 1761209 - DNA, 15 bp, Homo sapiens
agcacatttctatga

SEQ ID NO: 1761210 - DNA, 15 bp, Homo sapiens
gcacatttctatgat

SEQ ID NO: 1761211 - DNA, 15 bp, Homo sapiens
cacatttctatgatg

SEQ ID NO: 1761212 - DNA, 15 bp, Homo sapiens
acatttctatgatgg

SEQ ID NO: 1761213 - DNA, 15 bp, Homo sapiens
catttctatgatgga

SEQ ID NO: 1761214 - DNA, 15 bp, Homo sapiens
atttctatgatggag

SEQ ID NO: 1761215 - DNA, 15 bp, Homo sapiens
tttctatgatggagt

SEQ ID NO: 1761216 - DNA, 15 bp, Homo sapiens
ttctatgatggagtc

SEQ ID NO: 1761217 - DNA, 15 bp, Homo sapiens
tctatgatggagtct

SEQ ID NO: 1761218 - DNA, 15 bp, Homo sapiens
ctatgatggagtctc

SEQ ID NO: 1761219 - DNA, 15 bp, Homo sapiens
tatgatggagtctca

SEQ ID NO: 1761220 - DNA, 15 bp, Homo sapiens
atgatggagtctcat

SEQ ID NO: 1761221 - DNA, 15 bp, Homo sapiens
tgatggagtctcatt

SEQ ID NO: 1761222 - DNA, 15 bp, Homo sapiens
gatggagtctcattc

SEQ ID NO: 1761223 - DNA, 15 bp, Homo sapiens
atggagtctcattcg

SEQ ID NO: 1761224 - DNA, 15 bp, Homo sapiens
tggagtctcattcgg

SEQ ID NO: 1761225 - DNA, 15 bp, Homo sapiens
ggagtctcattcgga

SEQ ID NO: 1761226 - DNA, 15 bp, Homo sapiens
gagtctcattcggaa

SEQ ID NO: 1761227 - DNA, 15 bp, Homo sapiens
agtctcattcggaaa

SEQ ID NO: 1761228 - DNA, 15 bp, Homo sapiens
gtctcattcggaaaa

SEQ ID NO: 1761229 - DNA, 15 bp, Homo sapiens
tctcattcggaaaaa

SEQ ID NO: 1761230 - DNA, 15 bp, Homo sapiens
ctcattcggaaaaag

SEQ ID NO: 1761231 - DNA, 15 bp, Homo sapiens
tcattcggaaaaagc

SEQ ID NO: 1761232 - DNA, 15 bp, Homo sapiens
cattcggaaaaagcg

SEQ ID NO: 1761233 - DNA, 15 bp, Homo sapiens
attcggaaaaagcga

SEQ ID NO: 1761234 - DNA, 15 bp, Homo sapiens
ttcggaaaaagcgaa

SEQ ID NO: 1761235 - DNA, 15 bp, Homo sapiens
tcggaaaaagcgaaa

SEQ ID NO: 1761236 - DNA, 15 bp, Homo sapiens
cggaaaaagcgaaac

SEQ ID NO: 1761237 - DNA, 15 bp, Homo sapiens
ggaaaaagcgaaact

SEQ ID NO: 1761238 - DNA, 15 bp, Homo sapiens
gaaaaagcgaaactg

SEQ ID NO: 1761239 - DNA, 15 bp, Homo sapiens
aaaaagcgaaactgg

SEQ ID NO: 1761240 - DNA, 15 bp, Homo sapiens
aaaagcgaaactggc

SEQ ID NO: 1761241 - DNA, 15 bp, Homo sapiens
aaagcgaaactggcc

SEQ ID NO: 1761242 - DNA, 15 bp, Homo sapiens
aagcgaaactggcca

SEQ ID NO: 1761243 - DNA, 15 bp, Homo sapiens
agcgaaactggccag

SEQ ID NO: 1761244 - DNA, 15 bp, Homo sapiens
gcgaaactggccagg

SEQ ID NO: 1761245 - DNA, 15 bp, Homo sapiens
cgaaactggccaggc

SEQ ID NO: 1761246 - DNA, 15 bp, Homo sapiens
gaaactggccaggca

SEQ ID NO: 1761247 - DNA, 15 bp, Homo sapiens
aaactggccaggcac

SEQ ID NO: 1761248 - DNA, 15 bp, Homo sapiens
aactggccaggcacg

SEQ ID NO: 1761249 - DNA, 15 bp, Homo sapiens
actggccaggcacgg

SEQ ID NO: 1761250 - DNA, 15 bp, Homo sapiens
ctggccaggcacggt

SEQ ID NO: 1761251 - DNA, 15 bp, Homo sapiens
tggccaggcacggtg

SEQ ID NO: 1761252 - DNA, 15 bp, Homo sapiens
gccgaggagggtggg

SEQ ID NO: 1761253 - DNA, 15 bp, Homo sapiens
ccgaggagggtgggt

SEQ ID NO: 1761254 - DNA, 15 bp, Homo sapiens
cgaggagggtgggta

SEQ ID NO: 1761255 - DNA, 15 bp, Homo sapiens
gaggagggtgggtaa

SEQ ID NO: 1761256 - DNA, 15 bp, Homo sapiens
aggagggtgggtaac

SEQ ID NO: 1761257 - DNA, 15 bp, Homo sapiens
ggagggtgggtaacc

SEQ ID NO: 1761258 - DNA, 15 bp, Homo sapiens
gagggtgggtaacct

SEQ ID NO: 1761259 - DNA, 15 bp, Homo sapiens
agggtgggtaacctg

SEQ ID NO: 1761260 - DNA, 15 bp, Homo sapiens
gggtgggtaacctga

SEQ ID NO: 1761261 - DNA, 15 bp, Homo sapiens
ggtgggtaacctgag

SEQ ID NO: 1761262 - DNA, 15 bp, Homo sapiens
gtgggtaacctgagg

SEQ ID NO: 1761263 - DNA, 15 bp, Homo sapiens
tgggtaacctgaggt

SEQ ID NO: 1761264 - DNA, 15 bp, Homo sapiens
gggtaacctgaggtc

SEQ ID NO: 1761265 - DNA, 15 bp, Homo sapiens
ggtaacctgaggtca

SEQ ID NO: 1761266 - DNA, 15 bp, Homo sapiens
gtaacctgaggtcag

SEQ ID NO: 1761267 - DNA, 15 bp, Homo sapiens
taacctgaggtcagg

SEQ ID NO: 1761268 - DNA, 15 bp, Homo sapiens
aacctgaggtcagga

SEQ ID NO: 1761269 - DNA, 15 bp, Homo sapiens
gtcaggagtttgagc

SEQ ID NO: 1761270 - DNA, 15 bp, Homo sapiens
tcaggagtttgagcc

SEQ ID NO: 1761271 - DNA, 15 bp, Homo sapiens
caggagtttgagcct

SEQ ID NO: 1761272 - DNA, 15 bp, Homo sapiens
aggagtttgagcctg

SEQ ID NO: 1761273 - DNA, 15 bp, Homo sapiens
ggagtttgagcctga

SEQ ID NO: 1761274 - DNA, 15 bp, Homo sapiens
gagtttgagcctgac

SEQ ID NO: 1761275 - DNA, 15 bp, Homo sapiens
agtttgagcctgacc

SEQ ID NO: 1761276 - DNA, 15 bp, Homo sapiens
gtttgagcctgacca

SEQ ID NO: 1761277 - DNA, 15 bp, Homo sapiens
tttgagcctgaccaa

SEQ ID NO: 1761278 - DNA, 15 bp, Homo sapiens
ttgagcctgaccaac

SEQ ID NO: 1761279 - DNA, 15 bp, Homo sapiens
tgagcctgaccaaca

SEQ ID NO: 1761280 - DNA, 15 bp, Homo sapiens
gagcctgaccaacat

SEQ ID NO: 1761281 - DNA, 15 bp, Homo sapiens
caacatggtgaaaca

SEQ ID NO: 1761282 - DNA, 15 bp, Homo sapiens
aacatggtgaaacac

SEQ ID NO: 1761283 - DNA, 15 bp, Homo sapiens
acatggtgaaacact

SEQ ID NO: 1761284 - DNA, 15 bp, Homo sapiens
catggtgaaacactg

SEQ ID NO: 1761285 - DNA, 15 bp, Homo sapiens
atggtgaaacactgt

SEQ ID NO: 1761286 - DNA, 15 bp, Homo sapiens
tggtgaaacactgtc

SEQ ID NO: 1761287 - DNA, 15 bp, Homo sapiens
ggtgaaacactgtct

SEQ ID NO: 1761288 - DNA, 15 bp, Homo sapiens
gtgaaacactgtctc

SEQ ID NO: 1761289 - DNA, 15 bp, Homo sapiens
tgaaacactgtctct

SEQ ID NO: 1761290 - DNA, 15 bp, Homo sapiens
gaaacactgtctcta

SEQ ID NO: 1761291 - DNA, 15 bp, Homo sapiens
aaacactgtctctac

SEQ ID NO: 1761292 - DNA, 15 bp, Homo sapiens
aacactgtctctact

SEQ ID NO: 1761293 - DNA, 15 bp, Homo sapiens
acactgtctctacta

SEQ ID NO: 1761294 - DNA, 15 bp, Homo sapiens
cactgtctctactaa

SEQ ID NO: 1761295 - DNA, 15 bp, Homo sapiens
actgtctctactaaa

SEQ ID NO: 1761296 - DNA, 15 bp, Homo sapiens
taaaaaatacaaaat

SEQ ID NO: 1761297 - DNA, 15 bp, Homo sapiens
aaaaaatacaaaatt

SEQ ID NO: 1761298 - DNA, 15 bp, Homo sapiens
aaaaatacaaaattt

SEQ ID NO: 1761299 - DNA, 15 bp, Homo sapiens
aaaatacaaaatttg

SEQ ID NO: 1761300 - DNA, 15 bp, Homo sapiens
aaatacaaaatttgc

SEQ ID NO: 1761301 - DNA, 15 bp, Homo sapiens
aatacaaaatttgcc

SEQ ID NO: 1761302 - DNA, 15 bp, Homo sapiens
atacaaaatttgcca

SEQ ID NO: 1761303 - DNA, 15 bp, Homo sapiens
tacaaaatttgccag

SEQ ID NO: 1761304 - DNA, 15 bp, Homo sapiens
acaaaatttgccagg

SEQ ID NO: 1761305 - DNA, 15 bp, Homo sapiens
caaaatttgccaggt

SEQ ID NO: 1761306 - DNA, 15 bp, Homo sapiens
aaaatttgccaggtg

SEQ ID NO: 1761307 - DNA, 15 bp, Homo sapiens
aaatttgccaggtgt

SEQ ID NO: 1761308 - DNA, 15 bp, Homo sapiens
aatttgccaggtgtg

SEQ ID NO: 1761309 - DNA, 15 bp, Homo sapiens
atttgccaggtgtgg

SEQ ID NO: 1761310 - DNA, 15 bp, Homo sapiens
tttgccaggtgtggt

SEQ ID NO: 1761311 - DNA, 15 bp, Homo sapiens
tgccaggtgtggtgg

SEQ ID NO: 1761312 - DNA, 15 bp, Homo sapiens
ggtgtggtggcaggt

SEQ ID NO: 1761313 - DNA, 15 bp, Homo sapiens
gtgtggtggcaggtg

SEQ ID NO: 1761314 - DNA, 15 bp, Homo sapiens
tgtggtggcaggtgc

SEQ ID NO: 1761315 - DNA, 15 bp, Homo sapiens
aggtgcctgtaatct

SEQ ID NO: 1761316 - DNA, 15 bp, Homo sapiens
ggtgcctgtaatctc

SEQ ID NO: 1761317 - DNA, 15 bp, Homo sapiens
gtgcctgtaatctca

SEQ ID NO: 1761318 - DNA, 15 bp, Homo sapiens
cctgtaatctcagct

SEQ ID NO: 1761319 - DNA, 15 bp, Homo sapiens
ctgtaatctcagcta

SEQ ID NO: 1761320 - DNA, 15 bp, Homo sapiens
tgtaatctcagctac

SEQ ID NO: 1761321 - DNA, 15 bp, Homo sapiens
gtaatctcagctact

SEQ ID NO: 1761322 - DNA, 15 bp, Homo sapiens
taatctcagctactt

SEQ ID NO: 1761323 - DNA, 15 bp, Homo sapiens
aatctcagctacttg

SEQ ID NO: 1761324 - DNA, 15 bp, Homo sapiens
atctcagctacttgg

SEQ ID NO: 1761325 - DNA, 15 bp, Homo sapiens
aatcacttgaaccta

SEQ ID NO: 1761326 - DNA, 15 bp, Homo sapiens
atcacttgaacctag

SEQ ID NO: 1761327 - DNA, 15 bp, Homo sapiens
tcacttgaacctagg

SEQ ID NO: 1761328 - DNA, 15 bp, Homo sapiens
cacttgaacctagga

SEQ ID NO: 1761329 - DNA, 15 bp, Homo sapiens
acttgaacctaggag

SEQ ID NO: 1761330 - DNA, 15 bp, Homo sapiens
tgaacctaggaggca

SEQ ID NO: 1761331 - DNA, 15 bp, Homo sapiens
gaacctaggaggcag

SEQ ID NO: 1761332 - DNA, 15 bp, Homo sapiens
aacctaggaggcaga

SEQ ID NO: 1761333 - DNA, 15 bp, Homo sapiens
acctaggaggcagag

SEQ ID NO: 1761334 - DNA, 15 bp, Homo sapiens
cctaggaggcagagc

SEQ ID NO: 1761335 - DNA, 15 bp, Homo sapiens
ctaggaggcagagct

SEQ ID NO: 1761336 - DNA, 15 bp, Homo sapiens
taggaggcagagctt

SEQ ID NO: 1761337 - DNA, 15 bp, Homo sapiens
aggaggcagagcttg

SEQ ID NO: 1761338 - DNA, 15 bp, Homo sapiens
aaaaaaaaaagagaa

SEQ ID NO: 1761339 - DNA, 15 bp, Homo sapiens
aaaaaaaaagagaag

SEQ ID NO: 1761340 - DNA, 15 bp, Homo sapiens
aaaaaaaagagaaga

SEQ ID NO: 1761341 - DNA, 15 bp, Homo sapiens
aaaaaaagagaagaa

SEQ ID NO: 1761342 - DNA, 15 bp, Homo sapiens
aaaaaagagaagaaa

SEQ ID NO: 1761343 - DNA, 15 bp, Homo sapiens
aaaaagagaagaaaa

SEQ ID NO: 1761344 - DNA, 15 bp, Homo sapiens
aagagaagaaaagaa

SEQ ID NO: 1761345 - DNA, 15 bp, Homo sapiens
agaagaaaagaaaaa

SEQ ID NO: 1761346 - DNA, 15 bp, Homo sapiens
gaagaaaagaaaaaa

SEQ ID NO: 1761347 - DNA, 15 bp, Homo sapiens
gaaaaaagaaaaagt

SEQ ID NO: 1761348 - DNA, 15 bp, Homo sapiens
aaaaaagaaaaagtg

SEQ ID NO: 1761349 - DNA, 15 bp, Homo sapiens
aaaaagaaaaagtga

SEQ ID NO: 1761350 - DNA, 15 bp, Homo sapiens
aaaagaaaaagtgaa

SEQ ID NO: 1761351 - DNA, 15 bp, Homo sapiens
aaagaaaaagtgaaa

SEQ ID NO: 1761352 - DNA, 15 bp, Homo sapiens
aagaaaaagtgaaat

SEQ ID NO: 1761353 - DNA, 15 bp, Homo sapiens
agaaaaagtgaaatt

SEQ ID NO: 1761354 - DNA, 15 bp, Homo sapiens
gaaaaagtgaaattg

SEQ ID NO: 1761355 - DNA, 15 bp, Homo sapiens
aaaaagtgaaattgt

SEQ ID NO: 1761356 - DNA, 15 bp, Homo sapiens
aaaagtgaaattgtc

SEQ ID NO: 1761357 - DNA, 15 bp, Homo sapiens
aaagtgaaattgtcc

SEQ ID NO: 1761358 - DNA, 15 bp, Homo sapiens
aagtgaaattgtccc

SEQ ID NO: 1761359 - DNA, 15 bp, Homo sapiens
agtgaaattgtccca

SEQ ID NO: 1761360 - DNA, 15 bp, Homo sapiens
gtgaaattgtcccac

SEQ ID NO: 1761361 - DNA, 15 bp, Homo sapiens
tgaaattgtcccaca

SEQ ID NO: 1761362 - DNA, 15 bp, Homo sapiens
gaaattgtcccacat

SEQ ID NO: 1761363 - DNA, 15 bp, Homo sapiens
aaattgtcccacatc

SEQ ID NO: 1761364 - DNA, 15 bp, Homo sapiens
aattgtcccacatca

SEQ ID NO: 1761365 - DNA, 15 bp, Homo sapiens
attgtcccacatcac

SEQ ID NO: 1761366 - DNA, 15 bp, Homo sapiens
ttgtcccacatcaca

SEQ ID NO: 1761367 - DNA, 15 bp, Homo sapiens
tgtcccacatcacac

SEQ ID NO: 1761368 - DNA, 15 bp, Homo sapiens
gtcccacatcacaca

SEQ ID NO: 1761369 - DNA, 15 bp, Homo sapiens
tcccacatcacacaa

SEQ ID NO: 1761370 - DNA, 15 bp, Homo sapiens
cccacatcacacaaa

SEQ ID NO: 1761371 - DNA, 15 bp, Homo sapiens
ccacatcacacaaaa

SEQ ID NO: 1761372 - DNA, 15 bp, Homo sapiens
cacatcacacaaaag

SEQ ID NO: 1761373 - DNA, 15 bp, Homo sapiens
acatcacacaaaaga

SEQ ID NO: 1761374 - DNA, 15 bp, Homo sapiens
catcacacaaaagaa

SEQ ID NO: 1761375 - DNA, 15 bp, Homo sapiens
atcacacaaaagaac

SEQ ID NO: 1761376 - DNA, 15 bp, Homo sapiens
tcacacaaaagaaca

SEQ ID NO: 1761377 - DNA, 15 bp, Homo sapiens
cacacaaaagaacat

SEQ ID NO: 1761378 - DNA, 15 bp, Homo sapiens
acacaaaagaacatc

SEQ ID NO: 1761379 - DNA, 15 bp, Homo sapiens
cacaaaagaacatca

SEQ ID NO: 1761380 - DNA, 15 bp, Homo sapiens
acaaaagaacatcat

SEQ ID NO: 1761381 - DNA, 15 bp, Homo sapiens
caaaagaacatcatt

SEQ ID NO: 1761382 - DNA, 15 bp, Homo sapiens
aaaagaacatcattt

SEQ ID NO: 1761383 - DNA, 15 bp, Homo sapiens
aaagaacatcatttc

SEQ ID NO: 1761384 - DNA, 15 bp, Homo sapiens
aagaacatcatttcc

SEQ ID NO: 1761385 - DNA, 15 bp, Homo sapiens
agaacatcatttccc

SEQ ID NO: 1761386 - DNA, 15 bp, Homo sapiens
gaacatcatttccct

SEQ ID NO: 1761387 - DNA, 15 bp, Homo sapiens
aacatcatttcccta

SEQ ID NO: 1761388 - DNA, 15 bp, Homo sapiens
acatcatttccctaa

SEQ ID NO: 1761389 - DNA, 15 bp, Homo sapiens
catcatttccctaaa

SEQ ID NO: 1761390 - DNA, 15 bp, Homo sapiens
atcatttccctaaaa

SEQ ID NO: 1761391 - DNA, 15 bp, Homo sapiens
tcatttccctaaaag

SEQ ID NO: 1761392 - DNA, 15 bp, Homo sapiens
catttccctaaaaga

SEQ ID NO: 1761393 - DNA, 15 bp, Homo sapiens
atttccctaaaagag

SEQ ID NO: 1761394 - DNA, 15 bp, Homo sapiens
tttccctaaaagagc

SEQ ID NO: 1761395 - DNA, 15 bp, Homo sapiens
ttccctaaaagagca

SEQ ID NO: 1761396 - DNA, 15 bp, Homo sapiens
tccctaaaagagcat

SEQ ID NO: 1761397 - DNA, 15 bp, Homo sapiens
ccctaaaagagcatt

SEQ ID NO: 1761398 - DNA, 15 bp, Homo sapiens
cctaaaagagcattt

SEQ ID NO: 1761399 - DNA, 15 bp, Homo sapiens
ctaaaagagcatttc

SEQ ID NO: 1761400 - DNA, 15 bp, Homo sapiens
taaaagagcatttct

SEQ ID NO: 1761401 - DNA, 15 bp, Homo sapiens
aaaagagcatttctt

SEQ ID NO: 1761402 - DNA, 15 bp, Homo sapiens
aaagagcatttctta

SEQ ID NO: 1761403 - DNA, 15 bp, Homo sapiens
aagagcatttcttag

SEQ ID NO: 1761404 - DNA, 15 bp, Homo sapiens
agagcatttcttagg

SEQ ID NO: 1761405 - DNA, 15 bp, Homo sapiens
gagcatttcttaggg

SEQ ID NO: 1761406 - DNA, 15 bp, Homo sapiens
agcatttcttagggc

SEQ ID NO: 1761407 - DNA, 15 bp, Homo sapiens
gcatttcttagggca

SEQ ID NO: 1761408 - DNA, 15 bp, Homo sapiens
catttcttagggcag

SEQ ID NO: 1761409 - DNA, 15 bp, Homo sapiens
atttcttagggcagg

SEQ ID NO: 1761410 - DNA, 15 bp, Homo sapiens
tttcttagggcagga

SEQ ID NO: 1761411 - DNA, 15 bp, Homo sapiens
ttcttagggcaggaa

SEQ ID NO: 1761412 - DNA, 15 bp, Homo sapiens
tcttagggcaggaag

SEQ ID NO: 1761413 - DNA, 15 bp, Homo sapiens
cttagggcaggaagt

SEQ ID NO: 1761414 - DNA, 15 bp, Homo sapiens
ttagggcaggaagtg

SEQ ID NO: 1761415 - DNA, 15 bp, Homo sapiens
tagggcaggaagtga

SEQ ID NO: 1761416 - DNA, 15 bp, Homo sapiens
agggcaggaagtgac

SEQ ID NO: 1761417 - DNA, 15 bp, Homo sapiens
gggcaggaagtgacc

SEQ ID NO: 1761418 - DNA, 15 bp, Homo sapiens
ggcaggaagtgacct

SEQ ID NO: 1761419 - DNA, 15 bp, Homo sapiens
gcaggaagtgacctc

SEQ ID NO: 1761420 - DNA, 15 bp, Homo sapiens
caggaagtgacctca

SEQ ID NO: 1761421 - DNA, 15 bp, Homo sapiens
aggaagtgacctcag

SEQ ID NO: 1761422 - DNA, 15 bp, Homo sapiens
ggaagtgacctcaga

SEQ ID NO: 1761423 - DNA, 15 bp, Homo sapiens
gaagtgacctcagag

SEQ ID NO: 1761424 - DNA, 15 bp, Homo sapiens
aagtgacctcagagg

SEQ ID NO: 1761425 - DNA, 15 bp, Homo sapiens
agtgacctcagaggc

SEQ ID NO: 1761426 - DNA, 15 bp, Homo sapiens
gtgacctcagaggcc

SEQ ID NO: 1761427 - DNA, 15 bp, Homo sapiens
tgacctcagaggcct

SEQ ID NO: 1761428 - DNA, 15 bp, Homo sapiens
gacctcagaggcctc

SEQ ID NO: 1761429 - DNA, 15 bp, Homo sapiens
acctcagaggcctct

SEQ ID NO: 1761430 - DNA, 15 bp, Homo sapiens
cctcagaggcctctg

SEQ ID NO: 1761431 - DNA, 15 bp, Homo sapiens
ctcagaggcctctgg

SEQ ID NO: 1761432 - DNA, 15 bp, Homo sapiens
tcagaggcctctggg

SEQ ID NO: 1761433 - DNA, 15 bp, Homo sapiens
cagaggcctctggga

SEQ ID NO: 1761434 - DNA, 15 bp, Homo sapiens
agaggcctctgggac

SEQ ID NO: 1761435 - DNA, 15 bp, Homo sapiens
gaggcctctgggacc

SEQ ID NO: 1761436 - DNA, 15 bp, Homo sapiens
aggcctctgggaccc

SEQ ID NO: 1761437 - DNA, 15 bp, Homo sapiens
ggcctctgggaccct

SEQ ID NO: 1761438 - DNA, 15 bp, Homo sapiens
gcctctgggaccctg

SEQ ID NO: 1761439 - DNA, 15 bp, Homo sapiens
cctctgggaccctga

SEQ ID NO: 1761440 - DNA, 15 bp, Homo sapiens
ctctgggaccctgaa

SEQ ID NO: 1761441 - DNA, 15 bp, Homo sapiens
tctgggaccctgaat

SEQ ID NO: 1761442 - DNA, 15 bp, Homo sapiens
ctgggaccctgaatc

SEQ ID NO: 1761443 - DNA, 15 bp, Homo sapiens
tgggaccctgaatct

SEQ ID NO: 1761444 - DNA, 15 bp, Homo sapiens
gggaccctgaatctg

SEQ ID NO: 1761445 - DNA, 15 bp, Homo sapiens
ggaccctgaatctgt

SEQ ID NO: 1761446 - DNA, 15 bp, Homo sapiens
gaccctgaatctgtt

SEQ ID NO: 1761447 - DNA, 15 bp, Homo sapiens
accctgaatctgttc

SEQ ID NO: 1761448 - DNA, 15 bp, Homo sapiens
ccctgaatctgttcc

SEQ ID NO: 1761449 - DNA, 15 bp, Homo sapiens
cctgaatctgttccc

SEQ ID NO: 1761450 - DNA, 15 bp, Homo sapiens
ctgaatctgttcccc

SEQ ID NO: 1761451 - DNA, 15 bp, Homo sapiens
tgaatctgttcccct

SEQ ID NO: 1761452 - DNA, 15 bp, Homo sapiens
gaatctgttcccctc

SEQ ID NO: 1761453 - DNA, 15 bp, Homo sapiens
aatctgttcccctcc

SEQ ID NO: 1761454 - DNA, 15 bp, Homo sapiens
atctgttcccctccg

SEQ ID NO: 1761455 - DNA, 15 bp, Homo sapiens
tctgttcccctccgc

SEQ ID NO: 1761456 - DNA, 15 bp, Homo sapiens
ctgttcccctccgcc

SEQ ID NO: 1761457 - DNA, 15 bp, Homo sapiens
tgttcccctccgccc

SEQ ID NO: 1761458 - DNA, 15 bp, Homo sapiens
gttcccctccgccct

SEQ ID NO: 1761459 - DNA, 15 bp, Homo sapiens
ttcccctccgccctt

SEQ ID NO: 1761460 - DNA, 15 bp, Homo sapiens
tcccctccgcccttt

SEQ ID NO: 1761461 - DNA, 15 bp, Homo sapiens
cccctccgccctttg

SEQ ID NO: 1761462 - DNA, 15 bp, Homo sapiens
ccctccgccctttga

SEQ ID NO: 1761463 - DNA, 15 bp, Homo sapiens
cctccgccctttgac

SEQ ID NO: 1761464 - DNA, 15 bp, Homo sapiens
ctccgccctttgaca

SEQ ID NO: 1761465 - DNA, 15 bp, Homo sapiens
tccgccctttgacat

SEQ ID NO: 1761466 - DNA, 15 bp, Homo sapiens
ccgccctttgacatg

SEQ ID NO: 1761467 - DNA, 15 bp, Homo sapiens
cgccctttgacatgc

SEQ ID NO: 1761468 - DNA, 15 bp, Homo sapiens
gccctttgacatgca

SEQ ID NO: 1761469 - DNA, 15 bp, Homo sapiens
ccctttgacatgcag

SEQ ID NO: 1761470 - DNA, 15 bp, Homo sapiens
cctttgacatgcagg

SEQ ID NO: 1761471 - DNA, 15 bp, Homo sapiens
ctttgacatgcagga

SEQ ID NO: 1761472 - DNA, 15 bp, Homo sapiens
tttgacatgcaggaa

SEQ ID NO: 1761473 - DNA, 15 bp, Homo sapiens
ttgacatgcaggaaa

SEQ ID NO: 1761474 - DNA, 15 bp, Homo sapiens
tgacatgcaggaaac

SEQ ID NO: 1761475 - DNA, 15 bp, Homo sapiens
gacatgcaggaaaca

SEQ ID NO: 1761476 - DNA, 15 bp, Homo sapiens
acatgcaggaaacag

SEQ ID NO: 1761477 - DNA, 15 bp, Homo sapiens
catgcaggaaacagt

SEQ ID NO: 1761478 - DNA, 15 bp, Homo sapiens
atgcaggaaacagtc

SEQ ID NO: 1761479 - DNA, 15 bp, Homo sapiens
tgcaggaaacagtcc

SEQ ID NO: 1761480 - DNA, 15 bp, Homo sapiens
gcaggaaacagtcct

SEQ ID NO: 1761481 - DNA, 15 bp, Homo sapiens
caggaaacagtcctg

SEQ ID NO: 1761482 - DNA, 15 bp, Homo sapiens
aggaaacagtcctgc

SEQ ID NO: 1761483 - DNA, 15 bp, Homo sapiens
ggaaacagtcctgcg

SEQ ID NO: 1761484 - DNA, 15 bp, Homo sapiens
gaaacagtcctgcgg

SEQ ID NO: 1761485 - DNA, 15 bp, Homo sapiens
aaacagtcctgcggc

SEQ ID NO: 1761486 - DNA, 15 bp, Homo sapiens
aacagtcctgcggcc

SEQ ID NO: 1761487 - DNA, 15 bp, Homo sapiens
acagtcctgcggcca

SEQ ID NO: 1761488 - DNA, 15 bp, Homo sapiens
cagtcctgcggccat

SEQ ID NO: 1761489 - DNA, 15 bp, Homo sapiens
agtcctgcggccatg

SEQ ID NO: 1761490 - DNA, 15 bp, Homo sapiens
gtcctgcggccatgt

SEQ ID NO: 1761491 - DNA, 15 bp, Homo sapiens
tcctgcggccatgtc

SEQ ID NO: 1761492 - DNA, 15 bp, Homo sapiens
cctgcggccatgtcc

SEQ ID NO: 1761493 - DNA, 15 bp, Homo sapiens
ctgcggccatgtcct

SEQ ID NO: 1761494 - DNA, 15 bp, Homo sapiens
tgcggccatgtcctc

SEQ ID NO: 1761495 - DNA, 15 bp, Homo sapiens
gcggccatgtcctca

SEQ ID NO: 1761496 - DNA, 15 bp, Homo sapiens
cggccatgtcctcac

SEQ ID NO: 1761497 - DNA, 15 bp, Homo sapiens
ggccatgtcctcaca

SEQ ID NO: 1761498 - DNA, 15 bp, Homo sapiens
gccatgtcctcacac

SEQ ID NO: 1761499 - DNA, 15 bp, Homo sapiens
ccatgtcctcacact

SEQ ID NO: 1761500 - DNA, 15 bp, Homo sapiens
catgtcctcacactg

SEQ ID NO: 1761501 - DNA, 15 bp, Homo sapiens
atgtcctcacactgc

SEQ ID NO: 1761502 - DNA, 15 bp, Homo sapiens
tgtcctcacactgct

SEQ ID NO: 1761503 - DNA, 15 bp, Homo sapiens
gtcctcacactgctt

SEQ ID NO: 1761504 - DNA, 15 bp, Homo sapiens
tcctcacactgcttg

SEQ ID NO: 1761505 - DNA, 15 bp, Homo sapiens
cctcacactgcttga

SEQ ID NO: 1761506 - DNA, 15 bp, Homo sapiens
ctcacactgcttgat

SEQ ID NO: 1761507 - DNA, 15 bp, Homo sapiens
tcacactgcttgatg

SEQ ID NO: 1761508 - DNA, 15 bp, Homo sapiens
cacactgcttgatgt

SEQ ID NO: 1761509 - DNA, 15 bp, Homo sapiens
acactgcttgatgtc

SEQ ID NO: 1761510 - DNA, 15 bp, Homo sapiens
cactgcttgatgtcc

SEQ ID NO: 1761511 - DNA, 15 bp, Homo sapiens
actgcttgatgtccg

SEQ ID NO: 1761512 - DNA, 15 bp, Homo sapiens
ctgcttgatgtccgg

SEQ ID NO: 1761513 - DNA, 15 bp, Homo sapiens
tgcttgatgtccggg

SEQ ID NO: 1761514 - DNA, 15 bp, Homo sapiens
gcttgatgtccgggt

SEQ ID NO: 1761515 - DNA, 15 bp, Homo sapiens
cttgatgtccgggtg

SEQ ID NO: 1761516 - DNA, 15 bp, Homo sapiens
ttgatgtccgggtgg

SEQ ID NO: 1761517 - DNA, 15 bp, Homo sapiens
tgatgtccgggtggt

SEQ ID NO: 1761518 - DNA, 15 bp, Homo sapiens
gatgtccgggtggtg

SEQ ID NO: 1761519 - DNA, 15 bp, Homo sapiens
atgtccgggtggtgc

SEQ ID NO: 1761520 - DNA, 15 bp, Homo sapiens
tgtccgggtggtgct

SEQ ID NO: 1761521 - DNA, 15 bp, Homo sapiens
gtccgggtggtgcta

SEQ ID NO: 1761522 - DNA, 15 bp, Homo sapiens
tccgggtggtgctag

SEQ ID NO: 1761523 - DNA, 15 bp, Homo sapiens
ccgggtggtgctagg

SEQ ID NO: 1761524 - DNA, 15 bp, Homo sapiens
cgggtggtgctagga

SEQ ID NO: 1761525 - DNA, 15 bp, Homo sapiens
gggtggtgctaggac

SEQ ID NO: 1761526 - DNA, 15 bp, Homo sapiens
ggtggtgctaggaca

SEQ ID NO: 1761527 - DNA, 15 bp, Homo sapiens
gtggtgctaggacag

SEQ ID NO: 1761528 - DNA, 15 bp, Homo sapiens
tggtgctaggacaga

SEQ ID NO: 1761529 - DNA, 15 bp, Homo sapiens
ggtgctaggacagaa

SEQ ID NO: 1761530 - DNA, 15 bp, Homo sapiens
gtgctaggacagaag

SEQ ID NO: 1761531 - DNA, 15 bp, Homo sapiens
tgctaggacagaagg

SEQ ID NO: 1761532 - DNA, 15 bp, Homo sapiens
gctaggacagaaggc

SEQ ID NO: 1761533 - DNA, 15 bp, Homo sapiens
ctaggacagaaggct

SEQ ID NO: 1761534 - DNA, 15 bp, Homo sapiens
taggacagaaggctc

SEQ ID NO: 1761535 - DNA, 15 bp, Homo sapiens
aggacagaaggctcc

SEQ ID NO: 1761536 - DNA, 15 bp, Homo sapiens
ggacagaaggctcct

SEQ ID NO: 1761537 - DNA, 15 bp, Homo sapiens
gacagaaggctcctg

SEQ ID NO: 1761538 - DNA, 15 bp, Homo sapiens
acagaaggctcctga

SEQ ID NO: 1761539 - DNA, 15 bp, Homo sapiens
cagaaggctcctgag

SEQ ID NO: 1761540 - DNA, 15 bp, Homo sapiens
agaaggctcctgagg

SEQ ID NO: 1761541 - DNA, 15 bp, Homo sapiens
gaaggctcctgaggg

SEQ ID NO: 1761542 - DNA, 15 bp, Homo sapiens
aaggctcctgaggga

SEQ ID NO: 1761543 - DNA, 15 bp, Homo sapiens
aggctcctgagggaa

SEQ ID NO: 1761544 - DNA, 15 bp, Homo sapiens
ggctcctgagggaag

SEQ ID NO: 1761545 - DNA, 15 bp, Homo sapiens
gctcctgagggaaga

SEQ ID NO: 1761546 - DNA, 15 bp, Homo sapiens
ctcctgagggaagag

SEQ ID NO: 1761547 - DNA, 15 bp, Homo sapiens
tcctgagggaagaga

SEQ ID NO: 1761548 - DNA, 15 bp, Homo sapiens
cctgagggaagagag

SEQ ID NO: 1761549 - DNA, 15 bp, Homo sapiens
ctgagggaagagaga

SEQ ID NO: 1761550 - DNA, 15 bp, Homo sapiens
tgagggaagagagaa

SEQ ID NO: 1761551 - DNA, 15 bp, Homo sapiens
gagggaagagagaaa

SEQ ID NO: 1761552 - DNA, 15 bp, Homo sapiens
agggaagagagaaag

SEQ ID NO: 1761553 - DNA, 15 bp, Homo sapiens
gggaagagagaaagg

SEQ ID NO: 1761554 - DNA, 15 bp, Homo sapiens
ggaagagagaaaggt

SEQ ID NO: 1761555 - DNA, 15 bp, Homo sapiens
gaagagagaaaggtt

SEQ ID NO: 1761556 - DNA, 15 bp, Homo sapiens
aagagagaaaggttt

SEQ ID NO: 1761557 - DNA, 15 bp, Homo sapiens
agagagaaaggtttg

SEQ ID NO: 1761558 - DNA, 15 bp, Homo sapiens
gagagaaaggtttga

SEQ ID NO: 1761559 - DNA, 15 bp, Homo sapiens
agagaaaggtttgat

SEQ ID NO: 1761560 - DNA, 15 bp, Homo sapiens
gagaaaggtttgatt

SEQ ID NO: 1761561 - DNA, 15 bp, Homo sapiens
agaaaggtttgattt

SEQ ID NO: 1761562 - DNA, 15 bp, Homo sapiens
gaaaggtttgatttc

SEQ ID NO: 1761563 - DNA, 15 bp, Homo sapiens
aaaggtttgatttct

SEQ ID NO: 1761564 - DNA, 15 bp, Homo sapiens
aaggtttgatttctc

SEQ ID NO: 1761565 - DNA, 15 bp, Homo sapiens
aggtttgatttctcc

SEQ ID NO: 1761566 - DNA, 15 bp, Homo sapiens
ggtttgatttctcct

SEQ ID NO: 1761567 - DNA, 15 bp, Homo sapiens
gtttgatttctccta

SEQ ID NO: 1761568 - DNA, 15 bp, Homo sapiens
tttgatttctcctac

SEQ ID NO: 1761569 - DNA, 15 bp, Homo sapiens
ttgatttctcctacc

SEQ ID NO: 1761570 - DNA, 15 bp, Homo sapiens
tgatttctcctaccc

SEQ ID NO: 1761571 - DNA, 15 bp, Homo sapiens
gatttctcctacccg

SEQ ID NO: 1761572 - DNA, 15 bp, Homo sapiens
atttctcctacccgc

SEQ ID NO: 1761573 - DNA, 15 bp, Homo sapiens
tttctcctacccgcc

SEQ ID NO: 1761574 - DNA, 15 bp, Homo sapiens
ttctcctacccgccc

SEQ ID NO: 1761575 - DNA, 15 bp, Homo sapiens
tctcctacccgccca

SEQ ID NO: 1761576 - DNA, 15 bp, Homo sapiens
ctcctacccgcccac

SEQ ID NO: 1761577 - DNA, 15 bp, Homo sapiens
tcctacccgcccacc

SEQ ID NO: 1761578 - DNA, 15 bp, Homo sapiens
cctacccgcccacca

SEQ ID NO: 1761579 - DNA, 15 bp, Homo sapiens
ctacccgcccaccag

SEQ ID NO: 1761580 - DNA, 15 bp, Homo sapiens
tacccgcccaccagg

SEQ ID NO: 1761581 - DNA, 15 bp, Homo sapiens
acccgcccaccaggc

SEQ ID NO: 1761582 - DNA, 15 bp, Homo sapiens
cccgcccaccaggcc

SEQ ID NO: 1761583 - DNA, 15 bp, Homo sapiens
ccgcccaccaggcct

SEQ ID NO: 1761584 - DNA, 15 bp, Homo sapiens
cgcccaccaggcctg

SEQ ID NO: 1761585 - DNA, 15 bp, Homo sapiens
gcccaccaggcctgg

SEQ ID NO: 1761586 - DNA, 15 bp, Homo sapiens
cccaccaggcctggg

SEQ ID NO: 1761587 - DNA, 15 bp, Homo sapiens
ccaccaggcctgggc

SEQ ID NO: 1761588 - DNA, 15 bp, Homo sapiens
caccaggcctgggcc

SEQ ID NO: 1761589 - DNA, 15 bp, Homo sapiens
accaggcctgggccg

SEQ ID NO: 1761590 - DNA, 15 bp, Homo sapiens
ccaggcctgggccga

SEQ ID NO: 1761591 - DNA, 15 bp, Homo sapiens
caggcctgggccgac

SEQ ID NO: 1761592 - DNA, 15 bp, Homo sapiens
aggcctgggccgact

SEQ ID NO: 1761593 - DNA, 15 bp, Homo sapiens
ggcctgggccgactt

SEQ ID NO: 1761594 - DNA, 15 bp, Homo sapiens
gcctgggccgacttc

SEQ ID NO: 1761595 - DNA, 15 bp, Homo sapiens
cctgggccgacttcc

SEQ ID NO: 1761596 - DNA, 15 bp, Homo sapiens
ctgggccgacttccc

SEQ ID NO: 1761597 - DNA, 15 bp, Homo sapiens
tgggccgacttccca

SEQ ID NO: 1761598 - DNA, 15 bp, Homo sapiens
gggccgacttcccat

SEQ ID NO: 1761599 - DNA, 15 bp, Homo sapiens
ggccgacttcccatt

SEQ ID NO: 1761600 - DNA, 15 bp, Homo sapiens
gccgacttcccattg

SEQ ID NO: 1761601 - DNA, 15 bp, Homo sapiens
ccgacttcccattgc

SEQ ID NO: 1761602 - DNA, 15 bp, Homo sapiens
cgacttcccattgct

SEQ ID NO: 1761603 - DNA, 15 bp, Homo sapiens
gacttcccattgctc

SEQ ID NO: 1761604 - DNA, 15 bp, Homo sapiens
acttcccattgctca

SEQ ID NO: 1761605 - DNA, 15 bp, Homo sapiens
cttcccattgctcac

SEQ ID NO: 1761606 - DNA, 15 bp, Homo sapiens
ttcccattgctcact

SEQ ID NO: 1761607 - DNA, 15 bp, Homo sapiens
tcccattgctcactc

SEQ ID NO: 1761608 - DNA, 15 bp, Homo sapiens
cccattgctcactca

SEQ ID NO: 1761609 - DNA, 15 bp, Homo sapiens
ccattgctcactcac

SEQ ID NO: 1761610 - DNA, 15 bp, Homo sapiens
cattgctcactcacc

SEQ ID NO: 1761611 - DNA, 15 bp, Homo sapiens
attgctcactcaccg

SEQ ID NO: 1761612 - DNA, 15 bp, Homo sapiens
ttgctcactcaccga

SEQ ID NO: 1761613 - DNA, 15 bp, Homo sapiens
tgctcactcaccgag

SEQ ID NO: 1761614 - DNA, 15 bp, Homo sapiens
gctcactcaccgagg

SEQ ID NO: 1761615 - DNA, 15 bp, Homo sapiens
ctcactcaccgaggt

SEQ ID NO: 1761616 - DNA, 15 bp, Homo sapiens
tcactcaccgaggta

SEQ ID NO: 1761617 - DNA, 15 bp, Homo sapiens
cactcaccgaggtat

SEQ ID NO: 1761618 - DNA, 15 bp, Homo sapiens
actcaccgaggtatc

SEQ ID NO: 1761619 - DNA, 15 bp, Homo sapiens
ctcaccgaggtatcc

SEQ ID NO: 1761620 - DNA, 15 bp, Homo sapiens
tcaccgaggtatcct

SEQ ID NO: 1761621 - DNA, 15 bp, Homo sapiens
caccgaggtatcctg

SEQ ID NO: 1761622 - DNA, 15 bp, Homo sapiens
accgaggtatcctgg

SEQ ID NO: 1761623 - DNA, 15 bp, Homo sapiens
ccgaggtatcctggg

SEQ ID NO: 1761624 - DNA, 15 bp, Homo sapiens
cgaggtatcctgggg

SEQ ID NO: 1761625 - DNA, 15 bp, Homo sapiens
gaggtatcctgggga

SEQ ID NO: 1761626 - DNA, 15 bp, Homo sapiens
aggtatcctggggag

SEQ ID NO: 1761627 - DNA, 15 bp, Homo sapiens
ggtatcctggggagt

SEQ ID NO: 1761628 - DNA, 15 bp, Homo sapiens
gtatcctggggagtg

SEQ ID NO: 1761629 - DNA, 15 bp, Homo sapiens
tatcctggggagtgg

SEQ ID NO: 1761630 - DNA, 15 bp, Homo sapiens
atcctggggagtggc

SEQ ID NO: 1761631 - DNA, 15 bp, Homo sapiens
tcctggggagtggcc

SEQ ID NO: 1761632 - DNA, 15 bp, Homo sapiens
cctggggagtggccc

SEQ ID NO: 1761633 - DNA, 15 bp, Homo sapiens
ctggggagtggcccc

SEQ ID NO: 1761634 - DNA, 15 bp, Homo sapiens
tggggagtggcccct

SEQ ID NO: 1761635 - DNA, 15 bp, Homo sapiens
ggggagtggcccctt

SEQ ID NO: 1761636 - DNA, 15 bp, Homo sapiens
gggagtggccccttt

SEQ ID NO: 1761637 - DNA, 15 bp, Homo sapiens
ggagtggcccctttc

SEQ ID NO: 1761638 - DNA, 15 bp, Homo sapiens
gagtggcccctttcg

SEQ ID NO: 1761639 - DNA, 15 bp, Homo sapiens
agtggcccctttcgg

SEQ ID NO: 1761640 - DNA, 15 bp, Homo sapiens
gtggcccctttcggc

SEQ ID NO: 1761641 - DNA, 15 bp, Homo sapiens
tggcccctttcggca

SEQ ID NO: 1761642 - DNA, 15 bp, Homo sapiens
ggcccctttcggcag

SEQ ID NO: 1761643 - DNA, 15 bp, Homo sapiens
gcccctttcggcagc

SEQ ID NO: 1761644 - DNA, 15 bp, Homo sapiens
cccctttcggcagcc

SEQ ID NO: 1761645 - DNA, 15 bp, Homo sapiens
ccctttcggcagccc

SEQ ID NO: 1761646 - DNA, 15 bp, Homo sapiens
cctttcggcagccct

SEQ ID NO: 1761647 - DNA, 15 bp, Homo sapiens
ctttcggcagccctc

SEQ ID NO: 1761648 - DNA, 15 bp, Homo sapiens
tttcggcagccctct

SEQ ID NO: 1761649 - DNA, 15 bp, Homo sapiens
ttcggcagccctctc

SEQ ID NO: 1761650 - DNA, 15 bp, Homo sapiens
tcggcagccctctct

SEQ ID NO: 1761651 - DNA, 15 bp, Homo sapiens
cggcagccctctctc

SEQ ID NO: 1761652 - DNA, 15 bp, Homo sapiens
ggcagccctctctcc

SEQ ID NO: 1761653 - DNA, 15 bp, Homo sapiens
gcagccctctctcct

SEQ ID NO: 1761654 - DNA, 15 bp, Homo sapiens
cagccctctctcctc

SEQ ID NO: 1761655 - DNA, 15 bp, Homo sapiens
agccctctctcctct

SEQ ID NO: 1761656 - DNA, 15 bp, Homo sapiens
gccctctctcctctg

SEQ ID NO: 1761657 - DNA, 15 bp, Homo sapiens
ccctctctcctctgc

SEQ ID NO: 1761658 - DNA, 15 bp, Homo sapiens
cctctctcctctgcc

SEQ ID NO: 1761659 - DNA, 15 bp, Homo sapiens
ctctctcctctgccg

SEQ ID NO: 1761660 - DNA, 15 bp, Homo sapiens
tctctcctctgccgc

SEQ ID NO: 1761661 - DNA, 15 bp, Homo sapiens
ctctcctctgccgcc

SEQ ID NO: 1761662 - DNA, 15 bp, Homo sapiens
tctcctctgccgcct

SEQ ID NO: 1761663 - DNA, 15 bp, Homo sapiens
ctcctctgccgcctt

SEQ ID NO: 1761664 - DNA, 15 bp, Homo sapiens
tcctctgccgccttc

SEQ ID NO: 1761665 - DNA, 15 bp, Homo sapiens
cctctgccgccttcc

SEQ ID NO: 1761666 - DNA, 15 bp, Homo sapiens
ctctgccgccttccc

SEQ ID NO: 1761667 - DNA, 15 bp, Homo sapiens
tctgccgccttcccg

SEQ ID NO: 1761668 - DNA, 15 bp, Homo sapiens
ctgccgccttcccgg

SEQ ID NO: 1761669 - DNA, 15 bp, Homo sapiens
tgccgccttcccggc

SEQ ID NO: 1761670 - DNA, 15 bp, Homo sapiens
gccgccttcccggcc

SEQ ID NO: 1761671 - DNA, 15 bp, Homo sapiens
ccgccttcccggcca

SEQ ID NO: 1761672 - DNA, 15 bp, Homo sapiens
cgccttcccggccat

SEQ ID NO: 1761673 - DNA, 15 bp, Homo sapiens
gccttcccggccatg

SEQ ID NO: 1761674 - DNA, 15 bp, Homo sapiens
ccttcccggccatgg

SEQ ID NO: 1761675 - DNA, 15 bp, Homo sapiens
cttcccggccatggg

SEQ ID NO: 1761676 - DNA, 15 bp, Homo sapiens
ttcccggccatgggg

SEQ ID NO: 1761677 - DNA, 15 bp, Homo sapiens
tcccggccatggggc

SEQ ID NO: 1761678 - DNA, 15 bp, Homo sapiens
cccggccatggggcc

SEQ ID NO: 1761679 - DNA, 15 bp, Homo sapiens
ccggccatggggccc

SEQ ID NO: 1761680 - DNA, 15 bp, Homo sapiens
cggccatggggccca

SEQ ID NO: 1761681 - DNA, 15 bp, Homo sapiens
ggccatggggcccac

SEQ ID NO: 1761682 - DNA, 15 bp, Homo sapiens
gccatggggcccaca

SEQ ID NO: 1761683 - DNA, 15 bp, Homo sapiens
ccatggggcccacag

SEQ ID NO: 1761684 - DNA, 15 bp, Homo sapiens
catggggcccacagg

SEQ ID NO: 1761685 - DNA, 15 bp, Homo sapiens
atggggcccacaggt

SEQ ID NO: 1761686 - DNA, 15 bp, Homo sapiens
tggggcccacaggtc

SEQ ID NO: 1761687 - DNA, 15 bp, Homo sapiens
ggggcccacaggtct

SEQ ID NO: 1761688 - DNA, 15 bp, Homo sapiens
gggcccacaggtctg

SEQ ID NO: 1761689 - DNA, 15 bp, Homo sapiens
ggcccacaggtctgt

SEQ ID NO: 1761690 - DNA, 15 bp, Homo sapiens
gcccacaggtctgtg

SEQ ID NO: 1761691 - DNA, 15 bp, Homo sapiens
cccacaggtctgtga

SEQ ID NO: 1761692 - DNA, 15 bp, Homo sapiens
ccacaggtctgtgac

SEQ ID NO: 1761693 - DNA, 15 bp, Homo sapiens
cacaggtctgtgacc

SEQ ID NO: 1761694 - DNA, 15 bp, Homo sapiens
acaggtctgtgaccc

SEQ ID NO: 1761695 - DNA, 15 bp, Homo sapiens
caggtctgtgaccct

SEQ ID NO: 1761696 - DNA, 15 bp, Homo sapiens
aggtctgtgaccctg

SEQ ID NO: 1761697 - DNA, 15 bp, Homo sapiens
ggtctgtgaccctgg

SEQ ID NO: 1761698 - DNA, 15 bp, Homo sapiens
gtctgtgaccctggg

SEQ ID NO: 1761699 - DNA, 15 bp, Homo sapiens
tctgtgaccctgggc

SEQ ID NO: 1761700 - DNA, 15 bp, Homo sapiens
ctgtgaccctgggct

SEQ ID NO: 1761701 - DNA, 15 bp, Homo sapiens
tgtgaccctgggctg

SEQ ID NO: 1761702 - DNA, 15 bp, Homo sapiens
gtgaccctgggctgc

SEQ ID NO: 1761703 - DNA, 15 bp, Homo sapiens
tgaccctgggctgca

SEQ ID NO: 1761704 - DNA, 15 bp, Homo sapiens
gaccctgggctgcag

SEQ ID NO: 1761705 - DNA, 15 bp, Homo sapiens
accctgggctgcagc

SEQ ID NO: 1761706 - DNA, 15 bp, Homo sapiens
ccctgggctgcagct

SEQ ID NO: 1761707 - DNA, 15 bp, Homo sapiens
cctgggctgcagctc

SEQ ID NO: 1761708 - DNA, 15 bp, Homo sapiens
ctgggctgcagctct

SEQ ID NO: 1761709 - DNA, 15 bp, Homo sapiens
tgggctgcagctctc

SEQ ID NO: 1761710 - DNA, 15 bp, Homo sapiens
gggctgcagctctct

SEQ ID NO: 1761711 - DNA, 15 bp, Homo sapiens
ggctgcagctctctt

SEQ ID NO: 1761712 - DNA, 15 bp, Homo sapiens
gctgcagctctctta

SEQ ID NO: 1761713 - DNA, 15 bp, Homo sapiens
ctgcagctctcttag

SEQ ID NO: 1761714 - DNA, 15 bp, Homo sapiens
tgcagctctcttaga

SEQ ID NO: 1761715 - DNA, 15 bp, Homo sapiens
gcagctctcttagac

SEQ ID NO: 1761716 - DNA, 15 bp, Homo sapiens
cagctctcttagacc

SEQ ID NO: 1761717 - DNA, 15 bp, Homo sapiens
agctctcttagaccc

SEQ ID NO: 1761718 - DNA, 15 bp, Homo sapiens
gctctcttagaccca

SEQ ID NO: 1761719 - DNA, 15 bp, Homo sapiens
ctctcttagacccag

SEQ ID NO: 1761720 - DNA, 15 bp, Homo sapiens
tctcttagacccagc

SEQ ID NO: 1761721 - DNA, 15 bp, Homo sapiens
ctcttagacccagct

SEQ ID NO: 1761722 - DNA, 15 bp, Homo sapiens
tcttagacccagctg

SEQ ID NO: 1761723 - DNA, 15 bp, Homo sapiens
cttagacccagctgc

SEQ ID NO: 1761724 - DNA, 15 bp, Homo sapiens
ttagacccagctgct

SEQ ID NO: 1761725 - DNA, 15 bp, Homo sapiens
tagacccagctgctg

SEQ ID NO: 1761726 - DNA, 15 bp, Homo sapiens
agacccagctgctgc

SEQ ID NO: 1761727 - DNA, 15 bp, Homo sapiens
gacccagctgctgcc

SEQ ID NO: 1761728 - DNA, 15 bp, Homo sapiens
acccagctgctgcct

SEQ ID NO: 1761729 - DNA, 15 bp, Homo sapiens
cccagctgctgcctg

SEQ ID NO: 1761730 - DNA, 15 bp, Homo sapiens
ccagctgctgcctgc

SEQ ID NO: 1761731 - DNA, 15 bp, Homo sapiens
cagctgctgcctgcc

SEQ ID NO: 1761732 - DNA, 15 bp, Homo sapiens
agctgctgcctgcca

SEQ ID NO: 1761733 - DNA, 15 bp, Homo sapiens
gctgctgcctgccag

SEQ ID NO: 1761734 - DNA, 15 bp, Homo sapiens
ctgctgcctgccagg

SEQ ID NO: 1761735 - DNA, 15 bp, Homo sapiens
tgctgcctgccaggg

SEQ ID NO: 1761736 - DNA, 15 bp, Homo sapiens
gctgcctgccagggc

SEQ ID NO: 1761737 - DNA, 15 bp, Homo sapiens
ctgcctgccagggcc

SEQ ID NO: 1761738 - DNA, 15 bp, Homo sapiens
tgcctgccagggcca

SEQ ID NO: 1761739 - DNA, 15 bp, Homo sapiens
gcctgccagggccag

SEQ ID NO: 1761740 - DNA, 15 bp, Homo sapiens
cctgccagggccagt

SEQ ID NO: 1761741 - DNA, 15 bp, Homo sapiens
ctgccagggccagtg

SEQ ID NO: 1761742 - DNA, 15 bp, Homo sapiens
tgccagggccagtgt

SEQ ID NO: 1761743 - DNA, 15 bp, Homo sapiens
gccagggccagtgtc

SEQ ID NO: 1761744 - DNA, 15 bp, Homo sapiens
ccagggccagtgtct

SEQ ID NO: 1761745 - DNA, 15 bp, Homo sapiens
cagggccagtgtctt

SEQ ID NO: 1761746 - DNA, 15 bp, Homo sapiens
agggccagtgtcttc

SEQ ID NO: 1761747 - DNA, 15 bp, Homo sapiens
gggccagtgtcttca

SEQ ID NO: 1761748 - DNA, 15 bp, Homo sapiens
ggccagtgtcttcac

SEQ ID NO: 1761749 - DNA, 15 bp, Homo sapiens
gccagtgtcttcact

SEQ ID NO: 1761750 - DNA, 15 bp, Homo sapiens
ccagtgtcttcactc

SEQ ID NO: 1761751 - DNA, 15 bp, Homo sapiens
cagtgtcttcactct

SEQ ID NO: 1761752 - DNA, 15 bp, Homo sapiens
agtgtcttcactctg

SEQ ID NO: 1761753 - DNA, 15 bp, Homo sapiens
gtgtcttcactctgt

SEQ ID NO: 1761754 - DNA, 15 bp, Homo sapiens
tgtcttcactctgtt

SEQ ID NO: 1761755 - DNA, 15 bp, Homo sapiens
gtcttcactctgttt

SEQ ID NO: 1761756 - DNA, 15 bp, Homo sapiens
tcttcactctgtttc

SEQ ID NO: 1761757 - DNA, 15 bp, Homo sapiens
cttcactctgtttcc

SEQ ID NO: 1761758 - DNA, 15 bp, Homo sapiens
ttcactctgtttcct

SEQ ID NO: 1761759 - DNA, 15 bp, Homo sapiens
tcactctgtttcctg

SEQ ID NO: 1761760 - DNA, 15 bp, Homo sapiens
cactctgtttcctgg

SEQ ID NO: 1761761 - DNA, 15 bp, Homo sapiens
actctgtttcctgga

SEQ ID NO: 1761762 - DNA, 15 bp, Homo sapiens
ctctgtttcctggag

SEQ ID NO: 1761763 - DNA, 15 bp, Homo sapiens
tctgtttcctggagc

SEQ ID NO: 1761764 - DNA, 15 bp, Homo sapiens
ctgtttcctggagca

SEQ ID NO: 1761765 - DNA, 15 bp, Homo sapiens
tgtttcctggagcag

SEQ ID NO: 1761766 - DNA, 15 bp, Homo sapiens
gtttcctggagcagg

SEQ ID NO: 1761767 - DNA, 15 bp, Homo sapiens
tttcctggagcaggg

SEQ ID NO: 1761768 - DNA, 15 bp, Homo sapiens
ttcctggagcaggga

SEQ ID NO: 1761769 - DNA, 15 bp, Homo sapiens
tcctggagcagggac

SEQ ID NO: 1761770 - DNA, 15 bp, Homo sapiens
cctggagcagggaca

SEQ ID NO: 1761771 - DNA, 15 bp, Homo sapiens
ctggagcagggacac

SEQ ID NO: 1761772 - DNA, 15 bp, Homo sapiens
tggagcagggacacc

SEQ ID NO: 1761773 - DNA, 15 bp, Homo sapiens
ggagcagggacacct

SEQ ID NO: 1761774 - DNA, 15 bp, Homo sapiens
gagcagggacacctc

SEQ ID NO: 1761775 - DNA, 15 bp, Homo sapiens
agcagggacacctcg

SEQ ID NO: 1761776 - DNA, 15 bp, Homo sapiens
gcagggacacctcgg

SEQ ID NO: 1761777 - DNA, 15 bp, Homo sapiens
cagggacacctcggc

SEQ ID NO: 1761778 - DNA, 15 bp, Homo sapiens
agggacacctcggcc

SEQ ID NO: 1761779 - DNA, 15 bp, Homo sapiens
gggacacctcggcct

SEQ ID NO: 1761780 - DNA, 15 bp, Homo sapiens
ggacacctcggcctc

SEQ ID NO: 1761781 - DNA, 15 bp, Homo sapiens
gacacctcggcctcc

SEQ ID NO: 1761782 - DNA, 15 bp, Homo sapiens
acacctcggcctcct

SEQ ID NO: 1761783 - DNA, 15 bp, Homo sapiens
cacctcggcctcctg

SEQ ID NO: 1761784 - DNA, 15 bp, Homo sapiens
acctcggcctcctgc

SEQ ID NO: 1761785 - DNA, 15 bp, Homo sapiens
cctcggcctcctgcc

SEQ ID NO: 1761786 - DNA, 15 bp, Homo sapiens
ctcggcctcctgccc

SEQ ID NO: 1761787 - DNA, 15 bp, Homo sapiens
tcggcctcctgccct

SEQ ID NO: 1761788 - DNA, 15 bp, Homo sapiens
cggcctcctgccctg

SEQ ID NO: 1761789 - DNA, 15 bp, Homo sapiens
ggcctcctgccctgg

SEQ ID NO: 1761790 - DNA, 15 bp, Homo sapiens
gcctcctgccctggg

SEQ ID NO: 1761791 - DNA, 15 bp, Homo sapiens
cctcctgccctgggc

SEQ ID NO: 1761792 - DNA, 15 bp, Homo sapiens
ctcctgccctgggcc

SEQ ID NO: 1761793 - DNA, 15 bp, Homo sapiens
tcctgccctgggccc

SEQ ID NO: 1761794 - DNA, 15 bp, Homo sapiens
cctgccctgggcccg

SEQ ID NO: 1761795 - DNA, 15 bp, Homo sapiens
ctgccctgggcccgt

SEQ ID NO: 1761796 - DNA, 15 bp, Homo sapiens
tgccctgggcccgtc

SEQ ID NO: 1761797 - DNA, 15 bp, Homo sapiens
gccctgggcccgtct

SEQ ID NO: 1761798 - DNA, 15 bp, Homo sapiens
ccctgggcccgtctc

SEQ ID NO: 1761799 - DNA, 15 bp, Homo sapiens
cctgggcccgtctct

SEQ ID NO: 1761800 - DNA, 15 bp, Homo sapiens
ctgggcccgtctctc

SEQ ID NO: 1761801 - DNA, 15 bp, Homo sapiens
tgggcccgtctctcc

SEQ ID NO: 1761802 - DNA, 15 bp, Homo sapiens
gggcccgtctctccc

SEQ ID NO: 1761803 - DNA, 15 bp, Homo sapiens
ggcccgtctctccca

SEQ ID NO: 1761804 - DNA, 15 bp, Homo sapiens
gcccgtctctcccag

SEQ ID NO: 1761805 - DNA, 15 bp, Homo sapiens
cccgtctctcccagc

SEQ ID NO: 1761806 - DNA, 15 bp, Homo sapiens
ccgtctctcccagca

SEQ ID NO: 1761807 - DNA, 15 bp, Homo sapiens
cgtctctcccagcat

SEQ ID NO: 1761808 - DNA, 15 bp, Homo sapiens
gtctctcccagcatt

SEQ ID NO: 1761809 - DNA, 15 bp, Homo sapiens
tctctcccagcattc

SEQ ID NO: 1761810 - DNA, 15 bp, Homo sapiens
ctctcccagcattcc

SEQ ID NO: 1761811 - DNA, 15 bp, Homo sapiens
tctcccagcattcct

SEQ ID NO: 1761812 - DNA, 15 bp, Homo sapiens
ctcccagcattcctt

SEQ ID NO: 1761813 - DNA, 15 bp, Homo sapiens
tcccagcattccttg

SEQ ID NO: 1761814 - DNA, 15 bp, Homo sapiens
cccagcattccttgc

SEQ ID NO: 1761815 - DNA, 15 bp, Homo sapiens
ccagcattccttgct

SEQ ID NO: 1761816 - DNA, 15 bp, Homo sapiens
cagcattccttgctg

SEQ ID NO: 1761817 - DNA, 15 bp, Homo sapiens
agcattccttgctgg

SEQ ID NO: 1761818 - DNA, 15 bp, Homo sapiens
gcattccttgctggc

SEQ ID NO: 1761819 - DNA, 15 bp, Homo sapiens
cattccttgctggca

SEQ ID NO: 1761820 - DNA, 15 bp, Homo sapiens
attccttgctggcaa

SEQ ID NO: 1761821 - DNA, 15 bp, Homo sapiens
ttccttgctggcaag

SEQ ID NO: 1761822 - DNA, 15 bp, Homo sapiens
tccttgctggcaagc

SEQ ID NO: 1761823 - DNA, 15 bp, Homo sapiens
ccttgctggcaagcc

SEQ ID NO: 1761824 - DNA, 15 bp, Homo sapiens
cttgctggcaagccc

SEQ ID NO: 1761825 - DNA, 15 bp, Homo sapiens
ttgctggcaagccca

SEQ ID NO: 1761826 - DNA, 15 bp, Homo sapiens
tgctggcaagcccac

SEQ ID NO: 1761827 - DNA, 15 bp, Homo sapiens
gctggcaagcccacc

SEQ ID NO: 1761828 - DNA, 15 bp, Homo sapiens
ctggcaagcccacct

SEQ ID NO: 1761829 - DNA, 15 bp, Homo sapiens
tggcaagcccaccta

SEQ ID NO: 1761830 - DNA, 15 bp, Homo sapiens
ggcaagcccacctac

SEQ ID NO: 1761831 - DNA, 15 bp, Homo sapiens
gcaagcccacctaca

SEQ ID NO: 1761832 - DNA, 15 bp, Homo sapiens
caagcccacctacaa

SEQ ID NO: 1761833 - DNA, 15 bp, Homo sapiens
aagcccacctacaaa

SEQ ID NO: 1761834 - DNA, 15 bp, Homo sapiens
agcccacctacaaac

SEQ ID NO: 1761835 - DNA, 15 bp, Homo sapiens
gcccacctacaaacg

SEQ ID NO: 1761836 - DNA, 15 bp, Homo sapiens
cccacctacaaacgt

SEQ ID NO: 1761837 - DNA, 15 bp, Homo sapiens
ccacctacaaacgtg

SEQ ID NO: 1761838 - DNA, 15 bp, Homo sapiens
cacctacaaacgtgt

SEQ ID NO: 1761839 - DNA, 15 bp, Homo sapiens
acctacaaacgtgtg

SEQ ID NO: 1761840 - DNA, 15 bp, Homo sapiens
cctacaaacgtgtgt

SEQ ID NO: 1761841 - DNA, 15 bp, Homo sapiens
ctacaaacgtgtgtg

SEQ ID NO: 1761842 - DNA, 15 bp, Homo sapiens
tacaaacgtgtgtgt

SEQ ID NO: 1761843 - DNA, 15 bp, Homo sapiens
acaaacgtgtgtgtt

SEQ ID NO: 1761844 - DNA, 15 bp, Homo sapiens
caaacgtgtgtgttc

SEQ ID NO: 1761845 - DNA, 15 bp, Homo sapiens
aaacgtgtgtgttct

SEQ ID NO: 1761846 - DNA, 15 bp, Homo sapiens
aacgtgtgtgttctg

SEQ ID NO: 1761847 - DNA, 15 bp, Homo sapiens
acgtgtgtgttctgc

SEQ ID NO: 1761848 - DNA, 15 bp, Homo sapiens
cgtgtgtgttctgcc

SEQ ID NO: 1761849 - DNA, 15 bp, Homo sapiens
gtgtgtgttctgccc

SEQ ID NO: 1761850 - DNA, 15 bp, Homo sapiens
tgtgtgttctgccca

SEQ ID NO: 1761851 - DNA, 15 bp, Homo sapiens
gtgtgttctgcccac

SEQ ID NO: 1761852 - DNA, 15 bp, Homo sapiens
tgtgttctgcccact

SEQ ID NO: 1761853 - DNA, 15 bp, Homo sapiens
gtgttctgcccactg

SEQ ID NO: 1761854 - DNA, 15 bp, Homo sapiens
tgttctgcccactgt

SEQ ID NO: 1761855 - DNA, 15 bp, Homo sapiens
gttctgcccactgtc

SEQ ID NO: 1761856 - DNA, 15 bp, Homo sapiens
ttctgcccactgtca

SEQ ID NO: 1761857 - DNA, 15 bp, Homo sapiens
tctgcccactgtcaa

SEQ ID NO: 1761858 - DNA, 15 bp, Homo sapiens
ctgcccactgtcaag

SEQ ID NO: 1761859 - DNA, 15 bp, Homo sapiens
tgcccactgtcaaga

SEQ ID NO: 1761860 - DNA, 15 bp, Homo sapiens
gcccactgtcaagat

SEQ ID NO: 1761861 - DNA, 15 bp, Homo sapiens
cccactgtcaagata

SEQ ID NO: 1761862 - DNA, 15 bp, Homo sapiens
ccactgtcaagataa

SEQ ID NO: 1761863 - DNA, 15 bp, Homo sapiens
cactgtcaagataag

SEQ ID NO: 1761864 - DNA, 15 bp, Homo sapiens
actgtcaagataagg

SEQ ID NO: 1761865 - DNA, 15 bp, Homo sapiens
ctgtcaagataagga

SEQ ID NO: 1761866 - DNA, 15 bp, Homo sapiens
tgtcaagataaggac

SEQ ID NO: 1761867 - DNA, 15 bp, Homo sapiens
gtcaagataaggacg

SEQ ID NO: 1761868 - DNA, 15 bp, Homo sapiens
tcaagataaggacgc

SEQ ID NO: 1761869 - DNA, 15 bp, Homo sapiens
caagataaggacgcg

SEQ ID NO: 1761870 - DNA, 15 bp, Homo sapiens
aagataaggacgcgc

SEQ ID NO: 1761871 - DNA, 15 bp, Homo sapiens
agataaggacgcgct

SEQ ID NO: 1761872 - DNA, 15 bp, Homo sapiens
gataaggacgcgctg

SEQ ID NO: 1761873 - DNA, 15 bp, Homo sapiens
ataaggacgcgctgg

SEQ ID NO: 1761874 - DNA, 15 bp, Homo sapiens
taaggacgcgctggc

SEQ ID NO: 1761875 - DNA, 15 bp, Homo sapiens
aaggacgcgctggct

SEQ ID NO: 1761876 - DNA, 15 bp, Homo sapiens
aggacgcgctggcta

SEQ ID NO: 1761877 - DNA, 15 bp, Homo sapiens
ggacgcgctggctaa

SEQ ID NO: 1761878 - DNA, 15 bp, Homo sapiens
gacgcgctggctaaa

SEQ ID NO: 1761879 - DNA, 15 bp, Homo sapiens
acgcgctggctaaag

SEQ ID NO: 1761880 - DNA, 15 bp, Homo sapiens
cgcgctggctaaagg

SEQ ID NO: 1761881 - DNA, 15 bp, Homo sapiens
gcgctggctaaaggt

SEQ ID NO: 1761882 - DNA, 15 bp, Homo sapiens
cgctggctaaaggta

SEQ ID NO: 1761883 - DNA, 15 bp, Homo sapiens
gctggctaaaggtac

SEQ ID NO: 1761884 - DNA, 15 bp, Homo sapiens
ctggctaaaggtaca

SEQ ID NO: 1761885 - DNA, 15 bp, Homo sapiens
tggctaaaggtacat

SEQ ID NO: 1761886 - DNA, 15 bp, Homo sapiens
ggctaaaggtacatc

SEQ ID NO: 1761887 - DNA, 15 bp, Homo sapiens
gctaaaggtacatca

SEQ ID NO: 1761888 - DNA, 15 bp, Homo sapiens
ctaaaggtacatcag

SEQ ID NO: 1761889 - DNA, 15 bp, Homo sapiens
taaaggtacatcaga

SEQ ID NO: 1761890 - DNA, 15 bp, Homo sapiens
aaaggtacatcagat

SEQ ID NO: 1761891 - DNA, 15 bp, Homo sapiens
aaggtacatcagata

SEQ ID NO: 1761892 - DNA, 15 bp, Homo sapiens
aggtacatcagataa

SEQ ID NO: 1761893 - DNA, 15 bp, Homo sapiens
ggtacatcagataat

SEQ ID NO: 1761894 - DNA, 15 bp, Homo sapiens
gtacatcagataatg

SEQ ID NO: 1761895 - DNA, 15 bp, Homo sapiens
tacatcagataatgg

SEQ ID NO: 1761896 - DNA, 15 bp, Homo sapiens
acatcagataatggt

SEQ ID NO: 1761897 - DNA, 15 bp, Homo sapiens
catcagataatggtc

SEQ ID NO: 1761898 - DNA, 15 bp, Homo sapiens
atcagataatggtct

SEQ ID NO: 1761899 - DNA, 15 bp, Homo sapiens
tcagataatggtctc

SEQ ID NO: 1761900 - DNA, 15 bp, Homo sapiens
cagataatggtctcc

SEQ ID NO: 1761901 - DNA, 15 bp, Homo sapiens
agataatggtctccg

SEQ ID NO: 1761902 - DNA, 15 bp, Homo sapiens
gataatggtctccgt

SEQ ID NO: 1761903 - DNA, 15 bp, Homo sapiens
ataatggtctccgtg

SEQ ID NO: 1761904 - DNA, 15 bp, Homo sapiens
taatggtctccgtgg

SEQ ID NO: 1761905 - DNA, 15 bp, Homo sapiens
aatggtctccgtggc

SEQ ID NO: 1761906 - DNA, 15 bp, Homo sapiens
atggtctccgtggcc

SEQ ID NO: 1761907 - DNA, 15 bp, Homo sapiens
tggtctccgtggcca

SEQ ID NO: 1761908 - DNA, 15 bp, Homo sapiens
ggtctccgtggccaa

SEQ ID NO: 1761909 - DNA, 15 bp, Homo sapiens
gtctccgtggccaag

SEQ ID NO: 1761910 - DNA, 15 bp, Homo sapiens
tctccgtggccaagt

SEQ ID NO: 1761911 - DNA, 15 bp, Homo sapiens
ctccgtggccaagtc

SEQ ID NO: 1761912 - DNA, 15 bp, Homo sapiens
tccgtggccaagtcc

SEQ ID NO: 1761913 - DNA, 15 bp, Homo sapiens
ccgtggccaagtccc

SEQ ID NO: 1761914 - DNA, 15 bp, Homo sapiens
cgtggccaagtccca

SEQ ID NO: 1761915 - DNA, 15 bp, Homo sapiens
gtggccaagtcccag

SEQ ID NO: 1761916 - DNA, 15 bp, Homo sapiens
tggccaagtcccagt

SEQ ID NO: 1761917 - DNA, 15 bp, Homo sapiens
ggccaagtcccagtc

SEQ ID NO: 1761918 - DNA, 15 bp, Homo sapiens
gccaagtcccagtcc

SEQ ID NO: 1761919 - DNA, 15 bp, Homo sapiens
ccaagtcccagtcct

SEQ ID NO: 1761920 - DNA, 15 bp, Homo sapiens
caagtcccagtcctg

SEQ ID NO: 1761921 - DNA, 15 bp, Homo sapiens
aagtcccagtcctgc

SEQ ID NO: 1761922 - DNA, 15 bp, Homo sapiens
agtcccagtcctgct

SEQ ID NO: 1761923 - DNA, 15 bp, Homo sapiens
gtcccagtcctgctg

SEQ ID NO: 1761924 - DNA, 15 bp, Homo sapiens
tcccagtcctgctgt

SEQ ID NO: 1761925 - DNA, 15 bp, Homo sapiens
cccagtcctgctgtc

SEQ ID NO: 1761926 - DNA, 15 bp, Homo sapiens
ccagtcctgctgtcc

SEQ ID NO: 1761927 - DNA, 15 bp, Homo sapiens
cagtcctgctgtccc

SEQ ID NO: 1761928 - DNA, 15 bp, Homo sapiens
agtcctgctgtccca

SEQ ID NO: 1761929 - DNA, 15 bp, Homo sapiens
gtcctgctgtcccaa

SEQ ID NO: 1761930 - DNA, 15 bp, Homo sapiens
tcctgctgtcccaag

SEQ ID NO: 1761931 - DNA, 15 bp, Homo sapiens
cctgctgtcccaagg

SEQ ID NO: 1761932 - DNA, 15 bp, Homo sapiens
ctgctgtcccaaggg

SEQ ID NO: 1761933 - DNA, 15 bp, Homo sapiens
tgctgtcccaaggga

SEQ ID NO: 1761934 - DNA, 15 bp, Homo sapiens
gctgtcccaagggac

SEQ ID NO: 1761935 - DNA, 15 bp, Homo sapiens
ctgtcccaagggact

SEQ ID NO: 1761936 - DNA, 15 bp, Homo sapiens
tgtcccaagggactc

SEQ ID NO: 1761937 - DNA, 15 bp, Homo sapiens
gtcccaagggactcc

SEQ ID NO: 1761938 - DNA, 15 bp, Homo sapiens
tcccaagggactccg

SEQ ID NO: 1761939 - DNA, 15 bp, Homo sapiens
cccaagggactccgg

SEQ ID NO: 1761940 - DNA, 15 bp, Homo sapiens
ccaagggactccggg

SEQ ID NO: 1761941 - DNA, 15 bp, Homo sapiens
caagggactccgggg

SEQ ID NO: 1761942 - DNA, 15 bp, Homo sapiens
aagggactccggggt

SEQ ID NO: 1761943 - DNA, 15 bp, Homo sapiens
agggactccggggtc

SEQ ID NO: 1761944 - DNA, 15 bp, Homo sapiens
gggactccggggtca

SEQ ID NO: 1761945 - DNA, 15 bp, Homo sapiens
ggactccggggtcag

SEQ ID NO: 1761946 - DNA, 15 bp, Homo sapiens
gactccggggtcagg

SEQ ID NO: 1761947 - DNA, 15 bp, Homo sapiens
actccggggtcaggt

SEQ ID NO: 1761948 - DNA, 15 bp, Homo sapiens
ctccggggtcaggtg

SEQ ID NO: 1761949 - DNA, 15 bp, Homo sapiens
tccggggtcaggtgg

SEQ ID NO: 1761950 - DNA, 15 bp, Homo sapiens
ccggggtcaggtgga

SEQ ID NO: 1761951 - DNA, 15 bp, Homo sapiens
cggggtcaggtggag

SEQ ID NO: 1761952 - DNA, 15 bp, Homo sapiens
ggggtcaggtggagc

SEQ ID NO: 1761953 - DNA, 15 bp, Homo sapiens
gggtcaggtggagca

SEQ ID NO: 1761954 - DNA, 15 bp, Homo sapiens
ggtcaggtggagcag

SEQ ID NO: 1761955 - DNA, 15 bp, Homo sapiens
gtcaggtggagcagg

SEQ ID NO: 1761956 - DNA, 15 bp, Homo sapiens
tcaggtggagcaggc

SEQ ID NO: 1761957 - DNA, 15 bp, Homo sapiens
caggtggagcaggca

SEQ ID NO: 1761958 - DNA, 15 bp, Homo sapiens
aggtggagcaggcag

SEQ ID NO: 1761959 - DNA, 15 bp, Homo sapiens
ggtggagcaggcagg

SEQ ID NO: 1761960 - DNA, 15 bp, Homo sapiens
gtggagcaggcaggg

SEQ ID NO: 1761961 - DNA, 15 bp, Homo sapiens
tggagcaggcagggc

SEQ ID NO: 1761962 - DNA, 15 bp, Homo sapiens
ggagcaggcagggca

SEQ ID NO: 1761963 - DNA, 15 bp, Homo sapiens
gagcaggcagggcag

SEQ ID NO: 1761964 - DNA, 15 bp, Homo sapiens
agcaggcagggcagt

SEQ ID NO: 1761965 - DNA, 15 bp, Homo sapiens
gcaggcagggcagtc

SEQ ID NO: 1761966 - DNA, 15 bp, Homo sapiens
caggcagggcagtct

SEQ ID NO: 1761967 - DNA, 15 bp, Homo sapiens
aggcagggcagtctg

SEQ ID NO: 1761968 - DNA, 15 bp, Homo sapiens
ggcagggcagtctgc

SEQ ID NO: 1761969 - DNA, 15 bp, Homo sapiens
gcagggcagtctgcc

SEQ ID NO: 1761970 - DNA, 15 bp, Homo sapiens
cagggcagtctgcca

SEQ ID NO: 1761971 - DNA, 15 bp, Homo sapiens
agggcagtctgccac

SEQ ID NO: 1761972 - DNA, 15 bp, Homo sapiens
gggcagtctgccacg

SEQ ID NO: 1761973 - DNA, 15 bp, Homo sapiens
ggcagtctgccacgg

SEQ ID NO: 1761974 - DNA, 15 bp, Homo sapiens
gcagtctgccacggg

SEQ ID NO: 1761975 - DNA, 15 bp, Homo sapiens
cagtctgccacgggc

SEQ ID NO: 1761976 - DNA, 15 bp, Homo sapiens
agtctgccacgggct

SEQ ID NO: 1761977 - DNA, 15 bp, Homo sapiens
gtctgccacgggctc

SEQ ID NO: 1761978 - DNA, 15 bp, Homo sapiens
tctgccacgggctcc

SEQ ID NO: 1761979 - DNA, 15 bp, Homo sapiens
ctgccacgggctccc

SEQ ID NO: 1761980 - DNA, 15 bp, Homo sapiens
tgccacgggctcccc

SEQ ID NO: 1761981 - DNA, 15 bp, Homo sapiens
gccacgggctcccca

SEQ ID NO: 1761982 - DNA, 15 bp, Homo sapiens
ccacgggctccccaa

SEQ ID NO: 1761983 - DNA, 15 bp, Homo sapiens
cacgggctccccaac

SEQ ID NO: 1761984 - DNA, 15 bp, Homo sapiens
acgggctccccaact

SEQ ID NO: 1761985 - DNA, 15 bp, Homo sapiens
cgggctccccaactg

SEQ ID NO: 1761986 - DNA, 15 bp, Homo sapiens
gggctccccaactga

SEQ ID NO: 1761987 - DNA, 15 bp, Homo sapiens
ggctccccaactgaa

SEQ ID NO: 1761988 - DNA, 15 bp, Homo sapiens
gctccccaactgaag

SEQ ID NO: 1761989 - DNA, 15 bp, Homo sapiens
ctccccaactgaagc

SEQ ID NO: 1761990 - DNA, 15 bp, Homo sapiens
tccccaactgaagcc

SEQ ID NO: 1761991 - DNA, 15 bp, Homo sapiens
ccccaactgaagcca

SEQ ID NO: 1761992 - DNA, 15 bp, Homo sapiens
cccaactgaagccac

SEQ ID NO: 1761993 - DNA, 15 bp, Homo sapiens
ccaactgaagccact

SEQ ID NO: 1761994 - DNA, 15 bp, Homo sapiens
caactgaagccactc

SEQ ID NO: 1761995 - DNA, 15 bp, Homo sapiens
aactgaagccactct

SEQ ID NO: 1761996 - DNA, 15 bp, Homo sapiens
actgaagccactctg

SEQ ID NO: 1761997 - DNA, 15 bp, Homo sapiens
ctgaagccactctgg

SEQ ID NO: 1761998 - DNA, 15 bp, Homo sapiens
tgaagccactctggg

SEQ ID NO: 1761999 - DNA, 15 bp, Homo sapiens
gaagccactctgggg

SEQ ID NO: 1762000 - DNA, 15 bp, Homo sapiens
aagccactctgggga

SEQ ID NO: 1762001 - DNA, 15 bp, Homo sapiens
agccactctggggag

SEQ ID NO: 1762002 - DNA, 15 bp, Homo sapiens
gccactctggggagg

SEQ ID NO: 1762003 - DNA, 15 bp, Homo sapiens
ccactctggggaggg

SEQ ID NO: 1762004 - DNA, 15 bp, Homo sapiens
cactctggggagggt

SEQ ID NO: 1762005 - DNA, 15 bp, Homo sapiens
actctggggagggtc

SEQ ID NO: 1762006 - DNA, 15 bp, Homo sapiens
ctctggggagggtcc

SEQ ID NO: 1762007 - DNA, 15 bp, Homo sapiens
tctggggagggtccg

SEQ ID NO: 1762008 - DNA, 15 bp, Homo sapiens
ctggggagggtccgg

SEQ ID NO: 1762009 - DNA, 15 bp, Homo sapiens
tggggagggtccggc

SEQ ID NO: 1762010 - DNA, 15 bp, Homo sapiens
ggggagggtccggcc

SEQ ID NO: 1762011 - DNA, 15 bp, Homo sapiens
gggagggtccggcca

SEQ ID NO: 1762012 - DNA, 15 bp, Homo sapiens
ggagggtccggccac

SEQ ID NO: 1762013 - DNA, 15 bp, Homo sapiens
gagggtccggccacc

SEQ ID NO: 1762014 - DNA, 15 bp, Homo sapiens
agggtccggccacca

SEQ ID NO: 1762015 - DNA, 15 bp, Homo sapiens
gggtccggccaccag

SEQ ID NO: 1762016 - DNA, 15 bp, Homo sapiens
ggtccggccaccaga

SEQ ID NO: 1762017 - DNA, 15 bp, Homo sapiens
gtccggccaccagaa

SEQ ID NO: 1762018 - DNA, 15 bp, Homo sapiens
tccggccaccagaaa

SEQ ID NO: 1762019 - DNA, 15 bp, Homo sapiens
ccggccaccagaaaa

SEQ ID NO: 1762020 - DNA, 15 bp, Homo sapiens
cggccaccagaaaat

SEQ ID NO: 1762021 - DNA, 15 bp, Homo sapiens
ggccaccagaaaatt

SEQ ID NO: 1762022 - DNA, 15 bp, Homo sapiens
gccaccagaaaattt

SEQ ID NO: 1762023 - DNA, 15 bp, Homo sapiens
ccaccagaaaatttg

SEQ ID NO: 1762024 - DNA, 15 bp, Homo sapiens
caccagaaaatttgc

SEQ ID NO: 1762025 - DNA, 15 bp, Homo sapiens
accagaaaatttgcc

SEQ ID NO: 1762026 - DNA, 15 bp, Homo sapiens
ccagaaaatttgccc

SEQ ID NO: 1762027 - DNA, 15 bp, Homo sapiens
cagaaaatttgccca

SEQ ID NO: 1762028 - DNA, 15 bp, Homo sapiens
agaaaatttgcccag

SEQ ID NO: 1762029 - DNA, 15 bp, Homo sapiens
gaaaatttgcccagc

SEQ ID NO: 1762030 - DNA, 15 bp, Homo sapiens
aaaatttgcccagct

SEQ ID NO: 1762031 - DNA, 15 bp, Homo sapiens
aaatttgcccagctt

SEQ ID NO: 1762032 - DNA, 15 bp, Homo sapiens
aatttgcccagcttt

SEQ ID NO: 1762033 - DNA, 15 bp, Homo sapiens
atttgcccagctttg

SEQ ID NO: 1762034 - DNA, 15 bp, Homo sapiens
tttgcccagctttgc

SEQ ID NO: 1762035 - DNA, 15 bp, Homo sapiens
ttgcccagctttgct

SEQ ID NO: 1762036 - DNA, 15 bp, Homo sapiens
tgcccagctttgctg

SEQ ID NO: 1762037 - DNA, 15 bp, Homo sapiens
gcccagctttgctgc

SEQ ID NO: 1762038 - DNA, 15 bp, Homo sapiens
cccagctttgctgcc

SEQ ID NO: 1762039 - DNA, 15 bp, Homo sapiens
ccagctttgctgcct

SEQ ID NO: 1762040 - DNA, 15 bp, Homo sapiens
cagctttgctgcctg

SEQ ID NO: 1762041 - DNA, 15 bp, Homo sapiens
agctttgctgcctgt

SEQ ID NO: 1762042 - DNA, 15 bp, Homo sapiens
gctttgctgcctgtt

SEQ ID NO: 1762043 - DNA, 15 bp, Homo sapiens
ctttgctgcctgttg

SEQ ID NO: 1762044 - DNA, 15 bp, Homo sapiens
tttgctgcctgttgg

SEQ ID NO: 1762045 - DNA, 15 bp, Homo sapiens
ttgctgcctgttggc

SEQ ID NO: 1762046 - DNA, 15 bp, Homo sapiens
tgctgcctgttggcc

SEQ ID NO: 1762047 - DNA, 15 bp, Homo sapiens
gctgcctgttggcca

SEQ ID NO: 1762048 - DNA, 15 bp, Homo sapiens
ctgcctgttggccat

SEQ ID NO: 1762049 - DNA, 15 bp, Homo sapiens
tgcctgttggccatg

SEQ ID NO: 1762050 - DNA, 15 bp, Homo sapiens
gcctgttggccatgg

SEQ ID NO: 1762051 - DNA, 15 bp, Homo sapiens
cctgttggccatggg

SEQ ID NO: 1762052 - DNA, 15 bp, Homo sapiens
ctgttggccatgggt

SEQ ID NO: 1762053 - DNA, 15 bp, Homo sapiens
tgttggccatgggtg

SEQ ID NO: 1762054 - DNA, 15 bp, Homo sapiens
gttggccatgggtga

SEQ ID NO: 1762055 - DNA, 15 bp, Homo sapiens
ttggccatgggtgac

SEQ ID NO: 1762056 - DNA, 15 bp, Homo sapiens
tggccatgggtgacc

SEQ ID NO: 1762057 - DNA, 15 bp, Homo sapiens
ggccatgggtgacct

SEQ ID NO: 1762058 - DNA, 15 bp, Homo sapiens
gccatgggtgacctc

SEQ ID NO: 1762059 - DNA, 15 bp, Homo sapiens
ccatgggtgacctct

SEQ ID NO: 1762060 - DNA, 15 bp, Homo sapiens
catgggtgacctctc

SEQ ID NO: 1762061 - DNA, 15 bp, Homo sapiens
atgggtgacctctca

SEQ ID NO: 1762062 - DNA, 15 bp, Homo sapiens
tgggtgacctctcat

SEQ ID NO: 1762063 - DNA, 15 bp, Homo sapiens
gggtgacctctcatc

SEQ ID NO: 1762064 - DNA, 15 bp, Homo sapiens
ggtgacctctcatct

SEQ ID NO: 1762065 - DNA, 15 bp, Homo sapiens
gtgacctctcatctt

SEQ ID NO: 1762066 - DNA, 15 bp, Homo sapiens
tgacctctcatcttt

SEQ ID NO: 1762067 - DNA, 15 bp, Homo sapiens
gacctctcatctttg

SEQ ID NO: 1762068 - DNA, 15 bp, Homo sapiens
acctctcatctttga

SEQ ID NO: 1762069 - DNA, 15 bp, Homo sapiens
cctctcatctttgac

SEQ ID NO: 1762070 - DNA, 15 bp, Homo sapiens
ctctcatctttgacc

SEQ ID NO: 1762071 - DNA, 15 bp, Homo sapiens
tctcatctttgaccc

SEQ ID NO: 1762072 - DNA, 15 bp, Homo sapiens
ctcatctttgacccc

SEQ ID NO: 1762073 - DNA, 15 bp, Homo sapiens
tcatctttgaccccc

SEQ ID NO: 1762074 - DNA, 15 bp, Homo sapiens
catctttgacccccg

SEQ ID NO: 1762075 - DNA, 15 bp, Homo sapiens
atctttgacccccgg

SEQ ID NO: 1762076 - DNA, 15 bp, Homo sapiens
tctttgacccccgga

SEQ ID NO: 1762077 - DNA, 15 bp, Homo sapiens
ctttgacccccggag

SEQ ID NO: 1762078 - DNA, 15 bp, Homo sapiens
tttgacccccggagg

SEQ ID NO: 1762079 - DNA, 15 bp, Homo sapiens
ttgacccccggaggg

SEQ ID NO: 1762080 - DNA, 15 bp, Homo sapiens
tgacccccggagggt

SEQ ID NO: 1762081 - DNA, 15 bp, Homo sapiens
gacccccggagggtc

SEQ ID NO: 1762082 - DNA, 15 bp, Homo sapiens
acccccggagggtcc

SEQ ID NO: 1762083 - DNA, 15 bp, Homo sapiens
cccccggagggtcca

SEQ ID NO: 1762084 - DNA, 15 bp, Homo sapiens
ccccggagggtccat

SEQ ID NO: 1762085 - DNA, 15 bp, Homo sapiens
cccggagggtccatg

SEQ ID NO: 1762086 - DNA, 15 bp, Homo sapiens
ccggagggtccatgg

SEQ ID NO: 1762087 - DNA, 15 bp, Homo sapiens
cggagggtccatggg

SEQ ID NO: 1762088 - DNA, 15 bp, Homo sapiens
ggagggtccatgggt

SEQ ID NO: 1762089 - DNA, 15 bp, Homo sapiens
gagggtccatgggtc

SEQ ID NO: 1762090 - DNA, 15 bp, Homo sapiens
agggtccatgggtct

SEQ ID NO: 1762091 - DNA, 15 bp, Homo sapiens
gggtccatgggtctc

SEQ ID NO: 1762092 - DNA, 15 bp, Homo sapiens
ggtccatgggtctcc

SEQ ID NO: 1762093 - DNA, 15 bp, Homo sapiens
gtccatgggtctcca

SEQ ID NO: 1762094 - DNA, 15 bp, Homo sapiens
tccatgggtctccaa

SEQ ID NO: 1762095 - DNA, 15 bp, Homo sapiens
ccatgggtctccaag

SEQ ID NO: 1762096 - DNA, 15 bp, Homo sapiens
catgggtctccaagt

SEQ ID NO: 1762097 - DNA, 15 bp, Homo sapiens
atgggtctccaagta

SEQ ID NO: 1762098 - DNA, 15 bp, Homo sapiens
tgggtctccaagtaa

SEQ ID NO: 1762099 - DNA, 15 bp, Homo sapiens
gggtctccaagtaaa

SEQ ID NO: 1762100 - DNA, 15 bp, Homo sapiens
ggtctccaagtaaac

SEQ ID NO: 1762101 - DNA, 15 bp, Homo sapiens
gtctccaagtaaaca

SEQ ID NO: 1762102 - DNA, 15 bp, Homo sapiens
tctccaagtaaacag

SEQ ID NO: 1762103 - DNA, 15 bp, Homo sapiens
ctccaagtaaacaga

SEQ ID NO: 1762104 - DNA, 15 bp, Homo sapiens
tccaagtaaacagag

SEQ ID NO: 1762105 - DNA, 15 bp, Homo sapiens
ccaagtaaacagagg

SEQ ID NO: 1762106 - DNA, 15 bp, Homo sapiens
caagtaaacagaggc

SEQ ID NO: 1762107 - DNA, 15 bp, Homo sapiens
aagtaaacagaggct

SEQ ID NO: 1762108 - DNA, 15 bp, Homo sapiens
agtaaacagaggctc

SEQ ID NO: 1762109 - DNA, 15 bp, Homo sapiens
gtaaacagaggctcc

SEQ ID NO: 1762110 - DNA, 15 bp, Homo sapiens
taaacagaggctccc

SEQ ID NO: 1762111 - DNA, 15 bp, Homo sapiens
aaacagaggctccca

SEQ ID NO: 1762112 - DNA, 15 bp, Homo sapiens
aacagaggctcccag

SEQ ID NO: 1762113 - DNA, 15 bp, Homo sapiens
acagaggctcccaga

SEQ ID NO: 1762114 - DNA, 15 bp, Homo sapiens
cagaggctcccagag

SEQ ID NO: 1762115 - DNA, 15 bp, Homo sapiens
agaggctcccagagc

SEQ ID NO: 1762116 - DNA, 15 bp, Homo sapiens
gaggctcccagagct

SEQ ID NO: 1762117 - DNA, 15 bp, Homo sapiens
aggctcccagagctc

SEQ ID NO: 1762118 - DNA, 15 bp, Homo sapiens
ggctcccagagctcc

SEQ ID NO: 1762119 - DNA, 15 bp, Homo sapiens
gctcccagagctccc

SEQ ID NO: 1762120 - DNA, 15 bp, Homo sapiens
ctcccagagctccct

SEQ ID NO: 1762121 - DNA, 15 bp, Homo sapiens
tcccagagctccctg

SEQ ID NO: 1762122 - DNA, 15 bp, Homo sapiens
cccagagctccctgg

SEQ ID NO: 1762123 - DNA, 15 bp, Homo sapiens
ccagagctccctgga

SEQ ID NO: 1762124 - DNA, 15 bp, Homo sapiens
cagagctccctggag

SEQ ID NO: 1762125 - DNA, 15 bp, Homo sapiens
agagctccctggagg

SEQ ID NO: 1762126 - DNA, 15 bp, Homo sapiens
gagctccctggaggg

SEQ ID NO: 1762127 - DNA, 15 bp, Homo sapiens
agctccctggagggg

SEQ ID NO: 1762128 - DNA, 15 bp, Homo sapiens
gctccctggaggggg

SEQ ID NO: 1762129 - DNA, 15 bp, Homo sapiens
ctccctggagggggc

SEQ ID NO: 1762130 - DNA, 15 bp, Homo sapiens
tccctggagggggct

SEQ ID NO: 1762131 - DNA, 15 bp, Homo sapiens
ccctggagggggctc

SEQ ID NO: 1762132 - DNA, 15 bp, Homo sapiens
cctggagggggctcc

SEQ ID NO: 1762133 - DNA, 15 bp, Homo sapiens
ctggagggggctcct

SEQ ID NO: 1762134 - DNA, 15 bp, Homo sapiens
tggagggggctcctg

SEQ ID NO: 1762135 - DNA, 15 bp, Homo sapiens
ggagggggctcctgc

SEQ ID NO: 1762136 - DNA, 15 bp, Homo sapiens
gagggggctcctgcc

SEQ ID NO: 1762137 - DNA, 15 bp, Homo sapiens
agggggctcctgcca

SEQ ID NO: 1762138 - DNA, 15 bp, Homo sapiens
gggggctcctgccac

SEQ ID NO: 1762139 - DNA, 15 bp, Homo sapiens
ggggctcctgccacc

SEQ ID NO: 1762140 - DNA, 15 bp, Homo sapiens
gggctcctgccaccg

SEQ ID NO: 1762141 - DNA, 15 bp, Homo sapiens
ggctcctgccaccgc

SEQ ID NO: 1762142 - DNA, 15 bp, Homo sapiens
gctcctgccaccgcc

SEQ ID NO: 1762143 - DNA, 15 bp, Homo sapiens
ctcctgccaccgccc

SEQ ID NO: 1762144 - DNA, 15 bp, Homo sapiens
tcctgccaccgcccc

SEQ ID NO: 1762145 - DNA, 15 bp, Homo sapiens
cctgccaccgccccg

SEQ ID NO: 1762146 - DNA, 15 bp, Homo sapiens
ctgccaccgccccgg

SEQ ID NO: 1762147 - DNA, 15 bp, Homo sapiens
tgccaccgccccgga

SEQ ID NO: 1762148 - DNA, 15 bp, Homo sapiens
gccaccgccccggag

SEQ ID NO: 1762149 - DNA, 15 bp, Homo sapiens
ccaccgccccggagc

SEQ ID NO: 1762150 - DNA, 15 bp, Homo sapiens
caccgccccggagcc

SEQ ID NO: 1762151 - DNA, 15 bp, Homo sapiens
accgccccggagcct

SEQ ID NO: 1762152 - DNA, 15 bp, Homo sapiens
ccgccccggagcctc

SEQ ID NO: 1762153 - DNA, 15 bp, Homo sapiens
cgccccggagcctca

SEQ ID NO: 1762154 - DNA, 15 bp, Homo sapiens
gccccggagcctcac

SEQ ID NO: 1762155 - DNA, 15 bp, Homo sapiens
ccccggagcctcaca

SEQ ID NO: 1762156 - DNA, 15 bp, Homo sapiens
cccggagcctcacag

SEQ ID NO: 1762157 - DNA, 15 bp, Homo sapiens
ccggagcctcacagc

SEQ ID NO: 1762158 - DNA, 15 bp, Homo sapiens
cggagcctcacagcc

SEQ ID NO: 1762159 - DNA, 15 bp, Homo sapiens
ggagcctcacagcct

SEQ ID NO: 1762160 - DNA, 15 bp, Homo sapiens
gagcctcacagcctg

SEQ ID NO: 1762161 - DNA, 15 bp, Homo sapiens
agcctcacagcctgg

SEQ ID NO: 1762162 - DNA, 15 bp, Homo sapiens
gcctcacagcctggg

SEQ ID NO: 1762163 - DNA, 15 bp, Homo sapiens
cctcacagcctgggc

SEQ ID NO: 1762164 - DNA, 15 bp, Homo sapiens
ctcacagcctgggca

SEQ ID NO: 1762165 - DNA, 15 bp, Homo sapiens
tcacagcctgggcat

SEQ ID NO: 1762166 - DNA, 15 bp, Homo sapiens
cacagcctgggcatc

SEQ ID NO: 1762167 - DNA, 15 bp, Homo sapiens
acagcctgggcatcc

SEQ ID NO: 1762168 - DNA, 15 bp, Homo sapiens
cagcctgggcatcct

SEQ ID NO: 1762169 - DNA, 15 bp, Homo sapiens
agcctgggcatcctc

SEQ ID NO: 1762170 - DNA, 15 bp, Homo sapiens
gcctgggcatcctcc

SEQ ID NO: 1762171 - DNA, 15 bp, Homo sapiens
cctgggcatcctcca

SEQ ID NO: 1762172 - DNA, 15 bp, Homo sapiens
ctgggcatcctccat

SEQ ID NO: 1762173 - DNA, 15 bp, Homo sapiens
tgggcatcctccatg

SEQ ID NO: 1762174 - DNA, 15 bp, Homo sapiens
gggcatcctccatgc

SEQ ID NO: 1762175 - DNA, 15 bp, Homo sapiens
ggcatcctccatgcc

SEQ ID NO: 1762176 - DNA, 15 bp, Homo sapiens
gcatcctccatgcct

SEQ ID NO: 1762177 - DNA, 15 bp, Homo sapiens
catcctccatgcctc

SEQ ID NO: 1762178 - DNA, 15 bp, Homo sapiens
atcctccatgcctcc

SEQ ID NO: 1762179 - DNA, 15 bp, Homo sapiens
tcctccatgcctcct

SEQ ID NO: 1762180 - DNA, 15 bp, Homo sapiens
cctccatgcctccta

SEQ ID NO: 1762181 - DNA, 15 bp, Homo sapiens
ctccatgcctcctac

SEQ ID NO: 1762182 - DNA, 15 bp, Homo sapiens
tccatgcctcctaca

SEQ ID NO: 1762183 - DNA, 15 bp, Homo sapiens
ccatgcctcctacag

SEQ ID NO: 1762184 - DNA, 15 bp, Homo sapiens
catgcctcctacagc

SEQ ID NO: 1762185 - DNA, 15 bp, Homo sapiens
atgcctcctacagcg

SEQ ID NO: 1762186 - DNA, 15 bp, Homo sapiens
tgcctcctacagcgt

SEQ ID NO: 1762187 - DNA, 15 bp, Homo sapiens
gcctcctacagcgtc

SEQ ID NO: 1762188 - DNA, 15 bp, Homo sapiens
cctcctacagcgtca

SEQ ID NO: 1762189 - DNA, 15 bp, Homo sapiens
ctcctacagcgtcag

SEQ ID NO: 1762190 - DNA, 15 bp, Homo sapiens
tcctacagcgtcagg

SEQ ID NO: 1762191 - DNA, 15 bp, Homo sapiens
cctacagcgtcaggt

SEQ ID NO: 1762192 - DNA, 15 bp, Homo sapiens
ctacagcgtcaggta

SEQ ID NO: 1762193 - DNA, 15 bp, Homo sapiens
tacagcgtcaggtaa

SEQ ID NO: 1762194 - DNA, 15 bp, Homo sapiens
acagcgtcaggtaag

SEQ ID NO: 1762195 - DNA, 15 bp, Homo sapiens
cagcgtcaggtaagg

SEQ ID NO: 1762196 - DNA, 15 bp, Homo sapiens
agcgtcaggtaaggc

SEQ ID NO: 1762197 - DNA, 15 bp, Homo sapiens
gcgtcaggtaaggca

SEQ ID NO: 1762198 - DNA, 15 bp, Homo sapiens
cgtcaggtaaggcag

SEQ ID NO: 1762199 - DNA, 15 bp, Homo sapiens
gtcaggtaaggcaga

SEQ ID NO: 1762200 - DNA, 15 bp, Homo sapiens
tcaggtaaggcagag

SEQ ID NO: 1762201 - DNA, 15 bp, Homo sapiens
caggtaaggcagagc

SEQ ID NO: 1762202 - DNA, 15 bp, Homo sapiens
aggtaaggcagagcc

SEQ ID NO: 1762203 - DNA, 15 bp, Homo sapiens
ggtaaggcagagccc

SEQ ID NO: 1762204 - DNA, 15 bp, Homo sapiens
gtaaggcagagccct

SEQ ID NO: 1762205 - DNA, 15 bp, Homo sapiens
taaggcagagccctt

SEQ ID NO: 1762206 - DNA, 15 bp, Homo sapiens
aaggcagagcccttg

SEQ ID NO: 1762207 - DNA, 15 bp, Homo sapiens
aggcagagcccttgc

SEQ ID NO: 1762208 - DNA, 15 bp, Homo sapiens
ggcagagcccttgct

SEQ ID NO: 1762209 - DNA, 15 bp, Homo sapiens
gcagagcccttgctg

SEQ ID NO: 1762210 - DNA, 15 bp, Homo sapiens
cagagcccttgctgc

SEQ ID NO: 1762211 - DNA, 15 bp, Homo sapiens
agagcccttgctgct

SEQ ID NO: 1762212 - DNA, 15 bp, Homo sapiens
gagcccttgctgctg

SEQ ID NO: 1762213 - DNA, 15 bp, Homo sapiens
agcccttgctgctgc

SEQ ID NO: 1762214 - DNA, 15 bp, Homo sapiens
gcccttgctgctgct

SEQ ID NO: 1762215 - DNA, 15 bp, Homo sapiens
cccttgctgctgctg

SEQ ID NO: 1762216 - DNA, 15 bp, Homo sapiens
ccttgctgctgctgc

SEQ ID NO: 1762217 - DNA, 15 bp, Homo sapiens
cttgctgctgctgct

SEQ ID NO: 1762218 - DNA, 15 bp, Homo sapiens
ttgctgctgctgctc

SEQ ID NO: 1762219 - DNA, 15 bp, Homo sapiens
tgctgctgctgctcc

SEQ ID NO: 1762220 - DNA, 15 bp, Homo sapiens
gctgctgctgctccc

SEQ ID NO: 1762221 - DNA, 15 bp, Homo sapiens
ctgctgctgctcccc

SEQ ID NO: 1762222 - DNA, 15 bp, Homo sapiens
tgctgctgctccccc

SEQ ID NO: 1762223 - DNA, 15 bp, Homo sapiens
gctgctgctccccca

SEQ ID NO: 1762224 - DNA, 15 bp, Homo sapiens
ctgctgctcccccag

SEQ ID NO: 1762225 - DNA, 15 bp, Homo sapiens
tgctgctcccccagg

SEQ ID NO: 1762226 - DNA, 15 bp, Homo sapiens
gctgctcccccagga

SEQ ID NO: 1762227 - DNA, 15 bp, Homo sapiens
ctgctcccccaggag

SEQ ID NO: 1762228 - DNA, 15 bp, Homo sapiens
tgctcccccaggagt

SEQ ID NO: 1762229 - DNA, 15 bp, Homo sapiens
gctcccccaggagtg

SEQ ID NO: 1762230 - DNA, 15 bp, Homo sapiens
ctcccccaggagtgc

SEQ ID NO: 1762231 - DNA, 15 bp, Homo sapiens
tcccccaggagtgcg

SEQ ID NO: 1762232 - DNA, 15 bp, Homo sapiens
cccccaggagtgcgg

SEQ ID NO: 1762233 - DNA, 15 bp, Homo sapiens
ccccaggagtgcggg

SEQ ID NO: 1762234 - DNA, 15 bp, Homo sapiens
cccaggagtgcgggg

SEQ ID NO: 1762235 - DNA, 15 bp, Homo sapiens
ccaggagtgcggggc

SEQ ID NO: 1762236 - DNA, 15 bp, Homo sapiens
caggagtgcggggcc

SEQ ID NO: 1762237 - DNA, 15 bp, Homo sapiens
aggagtgcggggccc

SEQ ID NO: 1762238 - DNA, 15 bp, Homo sapiens
ggagtgcggggcccg

SEQ ID NO: 1762239 - DNA, 15 bp, Homo sapiens
gagtgcggggcccgg

SEQ ID NO: 1762240 - DNA, 15 bp, Homo sapiens
agtgcggggcccggc

SEQ ID NO: 1762241 - DNA, 15 bp, Homo sapiens
gtgcggggcccggcg

SEQ ID NO: 1762242 - DNA, 15 bp, Homo sapiens
tgcggggcccggcgc

SEQ ID NO: 1762243 - DNA, 15 bp, Homo sapiens
gcggggcccggcgct

SEQ ID NO: 1762244 - DNA, 15 bp, Homo sapiens
cggggcccggcgctc

SEQ ID NO: 1762245 - DNA, 15 bp, Homo sapiens
ggggcccggcgctca

SEQ ID NO: 1762246 - DNA, 15 bp, Homo sapiens
gggcccggcgctcac

SEQ ID NO: 1762247 - DNA, 15 bp, Homo sapiens
ggcccggcgctcacc

SEQ ID NO: 1762248 - DNA, 15 bp, Homo sapiens
gcccggcgctcaccc

SEQ ID NO: 1762249 - DNA, 15 bp, Homo sapiens
cccggcgctcacccc

SEQ ID NO: 1762250 - DNA, 15 bp, Homo sapiens
ccggcgctcacccct

SEQ ID NO: 1762251 - DNA, 15 bp, Homo sapiens
cggcgctcacccctc

SEQ ID NO: 1762252 - DNA, 15 bp, Homo sapiens
ggcgctcacccctct

SEQ ID NO: 1762253 - DNA, 15 bp, Homo sapiens
gcgctcacccctctg

SEQ ID NO: 1762254 - DNA, 15 bp, Homo sapiens
cgctcacccctctgc

SEQ ID NO: 1762255 - DNA, 15 bp, Homo sapiens
gctcacccctctgct

SEQ ID NO: 1762256 - DNA, 15 bp, Homo sapiens
ctcacccctctgctg

SEQ ID NO: 1762257 - DNA, 15 bp, Homo sapiens
tcacccctctgctgc

SEQ ID NO: 1762258 - DNA, 15 bp, Homo sapiens
cacccctctgctgcc

SEQ ID NO: 1762259 - DNA, 15 bp, Homo sapiens
acccctctgctgcct

SEQ ID NO: 1762260 - DNA, 15 bp, Homo sapiens
cccctctgctgcctt

SEQ ID NO: 1762261 - DNA, 15 bp, Homo sapiens
ccctctgctgccttt

SEQ ID NO: 1762262 - DNA, 15 bp, Homo sapiens
cctctgctgcctttc

SEQ ID NO: 1762263 - DNA, 15 bp, Homo sapiens
ctctgctgcctttct

SEQ ID NO: 1762264 - DNA, 15 bp, Homo sapiens
tctgctgcctttctt

SEQ ID NO: 1762265 - DNA, 15 bp, Homo sapiens
ctgctgcctttcttc

SEQ ID NO: 1762266 - DNA, 15 bp, Homo sapiens
tgctgcctttcttca

SEQ ID NO: 1762267 - DNA, 15 bp, Homo sapiens
gctgcctttcttcac

SEQ ID NO: 1762268 - DNA, 15 bp, Homo sapiens
ctgcctttcttcact

SEQ ID NO: 1762269 - DNA, 15 bp, Homo sapiens
tgcctttcttcactc

SEQ ID NO: 1762270 - DNA, 15 bp, Homo sapiens
gcctttcttcactct

SEQ ID NO: 1762271 - DNA, 15 bp, Homo sapiens
cctttcttcactctt

SEQ ID NO: 1762272 - DNA, 15 bp, Homo sapiens
ctttcttcactcttt

SEQ ID NO: 1762273 - DNA, 15 bp, Homo sapiens
tttcttcactcttta

SEQ ID NO: 1762274 - DNA, 15 bp, Homo sapiens
ttcttcactctttaa

SEQ ID NO: 1762275 - DNA, 15 bp, Homo sapiens
tcttcactctttaag

SEQ ID NO: 1762276 - DNA, 15 bp, Homo sapiens
cttcactctttaagt

SEQ ID NO: 1762277 - DNA, 15 bp, Homo sapiens
ttcactctttaagtg

SEQ ID NO: 1762278 - DNA, 15 bp, Homo sapiens
tcactctttaagtgc

SEQ ID NO: 1762279 - DNA, 15 bp, Homo sapiens
cactctttaagtgcc

SEQ ID NO: 1762280 - DNA, 15 bp, Homo sapiens
actctttaagtgcca

SEQ ID NO: 1762281 - DNA, 15 bp, Homo sapiens
ctctttaagtgccag

SEQ ID NO: 1762282 - DNA, 15 bp, Homo sapiens
tctttaagtgccagt

SEQ ID NO: 1762283 - DNA, 15 bp, Homo sapiens
ctttaagtgccagtc

SEQ ID NO: 1762284 - DNA, 15 bp, Homo sapiens
tttaagtgccagtct

SEQ ID NO: 1762285 - DNA, 15 bp, Homo sapiens
ttaagtgccagtctg

SEQ ID NO: 1762286 - DNA, 15 bp, Homo sapiens
taagtgccagtctgg

SEQ ID NO: 1762287 - DNA, 15 bp, Homo sapiens
aagtgccagtctggg

SEQ ID NO: 1762288 - DNA, 15 bp, Homo sapiens
agtgccagtctgggc

SEQ ID NO: 1762289 - DNA, 15 bp, Homo sapiens
gtgccagtctgggca

SEQ ID NO: 1762290 - DNA, 15 bp, Homo sapiens
tgccagtctgggcac

SEQ ID NO: 1762291 - DNA, 15 bp, Homo sapiens
gccagtctgggcact

SEQ ID NO: 1762292 - DNA, 15 bp, Homo sapiens
ccagtctgggcactt

SEQ ID NO: 1762293 - DNA, 15 bp, Homo sapiens
cagtctgggcacttc

SEQ ID NO: 1762294 - DNA, 15 bp, Homo sapiens
agtctgggcacttcg

SEQ ID NO: 1762295 - DNA, 15 bp, Homo sapiens
gtctgggcacttcgg

SEQ ID NO: 1762296 - DNA, 15 bp, Homo sapiens
tctgggcacttcggg

SEQ ID NO: 1762297 - DNA, 15 bp, Homo sapiens
ctgggcacttcgggc

SEQ ID NO: 1762298 - DNA, 15 bp, Homo sapiens
tgggcacttcgggct

SEQ ID NO: 1762299 - DNA, 15 bp, Homo sapiens
gggcacttcgggctc

SEQ ID NO: 1762300 - DNA, 15 bp, Homo sapiens
ggcacttcgggctcc

SEQ ID NO: 1762301 - DNA, 15 bp, Homo sapiens
gcacttcgggctccc

SEQ ID NO: 1762302 - DNA, 15 bp, Homo sapiens
cacttcgggctccct

SEQ ID NO: 1762303 - DNA, 15 bp, Homo sapiens
acttcgggctccctc

SEQ ID NO: 1762304 - DNA, 15 bp, Homo sapiens
cttcgggctccctct

SEQ ID NO: 1762305 - DNA, 15 bp, Homo sapiens
ttcgggctccctctt

SEQ ID NO: 1762306 - DNA, 15 bp, Homo sapiens
tcgggctccctcttt

SEQ ID NO: 1762307 - DNA, 15 bp, Homo sapiens
cgggctccctcttta

SEQ ID NO: 1762308 - DNA, 15 bp, Homo sapiens
gggctccctctttag

SEQ ID NO: 1762309 - DNA, 15 bp, Homo sapiens
ggctccctctttagt

SEQ ID NO: 1762310 - DNA, 15 bp, Homo sapiens
gctccctctttagtg

SEQ ID NO: 1762311 - DNA, 15 bp, Homo sapiens
ctccctctttagtgg

SEQ ID NO: 1762312 - DNA, 15 bp, Homo sapiens
tccctctttagtgga

SEQ ID NO: 1762313 - DNA, 15 bp, Homo sapiens
ccctctttagtggat

SEQ ID NO: 1762314 - DNA, 15 bp, Homo sapiens
cctctttagtggatc

SEQ ID NO: 1762315 - DNA, 15 bp, Homo sapiens
ctctttagtggatcg

SEQ ID NO: 1762316 - DNA, 15 bp, Homo sapiens
tctttagtggatcgg

SEQ ID NO: 1762317 - DNA, 15 bp, Homo sapiens
ctttagtggatcggg

SEQ ID NO: 1762318 - DNA, 15 bp, Homo sapiens
tttagtggatcgggt

SEQ ID NO: 1762319 - DNA, 15 bp, Homo sapiens
ttagtggatcgggtg

SEQ ID NO: 1762320 - DNA, 15 bp, Homo sapiens
tagtggatcgggtgg

SEQ ID NO: 1762321 - DNA, 15 bp, Homo sapiens
agtggatcgggtgga

SEQ ID NO: 1762322 - DNA, 15 bp, Homo sapiens
gtggatcgggtggag

SEQ ID NO: 1762323 - DNA, 15 bp, Homo sapiens
tggatcgggtggaga

SEQ ID NO: 1762324 - DNA, 15 bp, Homo sapiens
ggatcgggtggagag

SEQ ID NO: 1762325 - DNA, 15 bp, Homo sapiens
gatcgggtggagaga

SEQ ID NO: 1762326 - DNA, 15 bp, Homo sapiens
atcgggtggagagag

SEQ ID NO: 1762327 - DNA, 15 bp, Homo sapiens
tcgggtggagagagg

SEQ ID NO: 1762328 - DNA, 15 bp, Homo sapiens
cgggtggagagagga

SEQ ID NO: 1762329 - DNA, 15 bp, Homo sapiens
gggtggagagaggag

SEQ ID NO: 1762330 - DNA, 15 bp, Homo sapiens
ggtggagagaggaga

SEQ ID NO: 1762331 - DNA, 15 bp, Homo sapiens
gtggagagaggagag

SEQ ID NO: 1762332 - DNA, 15 bp, Homo sapiens
tggagagaggagagg

SEQ ID NO: 1762333 - DNA, 15 bp, Homo sapiens
ggagagaggagaggg

SEQ ID NO: 1762334 - DNA, 15 bp, Homo sapiens
gagagaggagaggga

SEQ ID NO: 1762335 - DNA, 15 bp, Homo sapiens
agagaggagagggag

SEQ ID NO: 1762336 - DNA, 15 bp, Homo sapiens
gagaggagagggaga

SEQ ID NO: 1762337 - DNA, 15 bp, Homo sapiens
agaggagagggagaa

SEQ ID NO: 1762338 - DNA, 15 bp, Homo sapiens
gaggagagggagaag

SEQ ID NO: 1762339 - DNA, 15 bp, Homo sapiens
aggagagggagaagg

SEQ ID NO: 1762340 - DNA, 15 bp, Homo sapiens
ggagagggagaaggg

SEQ ID NO: 1762341 - DNA, 15 bp, Homo sapiens
gagagggagaagggc

SEQ ID NO: 1762342 - DNA, 15 bp, Homo sapiens
agagggagaagggct

SEQ ID NO: 1762343 - DNA, 15 bp, Homo sapiens
gagggagaagggctg

SEQ ID NO: 1762344 - DNA, 15 bp, Homo sapiens
agggagaagggctgt

SEQ ID NO: 1762345 - DNA, 15 bp, Homo sapiens
gggagaagggctgtg

SEQ ID NO: 1762346 - DNA, 15 bp, Homo sapiens
ggagaagggctgtgc

SEQ ID NO: 1762347 - DNA, 15 bp, Homo sapiens
gagaagggctgtgct

SEQ ID NO: 1762348 - DNA, 15 bp, Homo sapiens
agaagggctgtgctg

SEQ ID NO: 1762349 - DNA, 15 bp, Homo sapiens
gaagggctgtgctgg

SEQ ID NO: 1762350 - DNA, 15 bp, Homo sapiens
aagggctgtgctggg

SEQ ID NO: 1762351 - DNA, 15 bp, Homo sapiens
agggctgtgctggga

SEQ ID NO: 1762352 - DNA, 15 bp, Homo sapiens
gggctgtgctgggaa

SEQ ID NO: 1762353 - DNA, 15 bp, Homo sapiens
ggctgtgctgggaaa

SEQ ID NO: 1762354 - DNA, 15 bp, Homo sapiens
gctgtgctgggaaac

SEQ ID NO: 1762355 - DNA, 15 bp, Homo sapiens
ctgtgctgggaaaca

SEQ ID NO: 1762356 - DNA, 15 bp, Homo sapiens
tgtgctgggaaacat

SEQ ID NO: 1762357 - DNA, 15 bp, Homo sapiens
gtgctgggaaacatg

SEQ ID NO: 1762358 - DNA, 15 bp, Homo sapiens
tgctgggaaacatgg

SEQ ID NO: 1762359 - DNA, 15 bp, Homo sapiens
gctgggaaacatgga

SEQ ID NO: 1762360 - DNA, 15 bp, Homo sapiens
ctgggaaacatggag

SEQ ID NO: 1762361 - DNA, 15 bp, Homo sapiens
tgggaaacatggagc

SEQ ID NO: 1762362 - DNA, 15 bp, Homo sapiens
gggaaacatggagcg

SEQ ID NO: 1762363 - DNA, 15 bp, Homo sapiens
ggaaacatggagcga

SEQ ID NO: 1762364 - DNA, 15 bp, Homo sapiens
gaaacatggagcgac

SEQ ID NO: 1762365 - DNA, 15 bp, Homo sapiens
aaacatggagcgaca

SEQ ID NO: 1762366 - DNA, 15 bp, Homo sapiens
aacatggagcgacag

SEQ ID NO: 1762367 - DNA, 15 bp, Homo sapiens
acatggagcgacagt

SEQ ID NO: 1762368 - DNA, 15 bp, Homo sapiens
catggagcgacagtg

SEQ ID NO: 1762369 - DNA, 15 bp, Homo sapiens
atggagcgacagtga

SEQ ID NO: 1762370 - DNA, 15 bp, Homo sapiens
tggagcgacagtgaa

SEQ ID NO: 1762371 - DNA, 15 bp, Homo sapiens
ggagcgacagtgaat

SEQ ID NO: 1762372 - DNA, 15 bp, Homo sapiens
gagcgacagtgaatg

SEQ ID NO: 1762373 - DNA, 15 bp, Homo sapiens
agcgacagtgaatgg

SEQ ID NO: 1762374 - DNA, 15 bp, Homo sapiens
gcgacagtgaatggc

SEQ ID NO: 1762375 - DNA, 15 bp, Homo sapiens
cgacagtgaatggcc

SEQ ID NO: 1762376 - DNA, 15 bp, Homo sapiens
gacagtgaatggccc

SEQ ID NO: 1762377 - DNA, 15 bp, Homo sapiens
acagtgaatggcccc

SEQ ID NO: 1762378 - DNA, 15 bp, Homo sapiens
cagtgaatggcccct

SEQ ID NO: 1762379 - DNA, 15 bp, Homo sapiens
agtgaatggcccctc

SEQ ID NO: 1762380 - DNA, 15 bp, Homo sapiens
gtgaatggcccctcc

SEQ ID NO: 1762381 - DNA, 15 bp, Homo sapiens
tgaatggcccctccc

SEQ ID NO: 1762382 - DNA, 15 bp, Homo sapiens
gaatggcccctcccc

SEQ ID NO: 1762383 - DNA, 15 bp, Homo sapiens
aatggcccctccccc

SEQ ID NO: 1762384 - DNA, 15 bp, Homo sapiens
atggcccctccccct

SEQ ID NO: 1762385 - DNA, 15 bp, Homo sapiens
tggcccctccccctg

SEQ ID NO: 1762386 - DNA, 15 bp, Homo sapiens
ggcccctccccctgc

SEQ ID NO: 1762387 - DNA, 15 bp, Homo sapiens
gcccctccccctgcc

SEQ ID NO: 1762388 - DNA, 15 bp, Homo sapiens
cccctccccctgccc

SEQ ID NO: 1762389 - DNA, 15 bp, Homo sapiens
ccctccccctgccca

SEQ ID NO: 1762390 - DNA, 15 bp, Homo sapiens
cctccccctgcccag

SEQ ID NO: 1762391 - DNA, 15 bp, Homo sapiens
ctccccctgcccagg

SEQ ID NO: 1762392 - DNA, 15 bp, Homo sapiens
tccccctgcccaggg

SEQ ID NO: 1762393 - DNA, 15 bp, Homo sapiens
ccccctgcccaggga

SEQ ID NO: 1762394 - DNA, 15 bp, Homo sapiens
cccctgcccagggaa

SEQ ID NO: 1762395 - DNA, 15 bp, Homo sapiens
ccctgcccagggaag

SEQ ID NO: 1762396 - DNA, 15 bp, Homo sapiens
cctgcccagggaagg

SEQ ID NO: 1762397 - DNA, 15 bp, Homo sapiens
ctgcccagggaaggg

SEQ ID NO: 1762398 - DNA, 15 bp, Homo sapiens
tgcccagggaagggc

SEQ ID NO: 1762399 - DNA, 15 bp, Homo sapiens
gcccagggaagggcc

SEQ ID NO: 1762400 - DNA, 15 bp, Homo sapiens
cccagggaagggcct

SEQ ID NO: 1762401 - DNA, 15 bp, Homo sapiens
ccagggaagggcctg

SEQ ID NO: 1762402 - DNA, 15 bp, Homo sapiens
cagggaagggcctgg

SEQ ID NO: 1762403 - DNA, 15 bp, Homo sapiens
agggaagggcctggg

SEQ ID NO: 1762404 - DNA, 15 bp, Homo sapiens
gggaagggcctgggc

SEQ ID NO: 1762405 - DNA, 15 bp, Homo sapiens
ggaagggcctgggca

SEQ ID NO: 1762406 - DNA, 15 bp, Homo sapiens
gaagggcctgggcat

SEQ ID NO: 1762407 - DNA, 15 bp, Homo sapiens
aagggcctgggcata

SEQ ID NO: 1762408 - DNA, 15 bp, Homo sapiens
agggcctgggcataa

SEQ ID NO: 1762409 - DNA, 15 bp, Homo sapiens
gggcctgggcataaa

SEQ ID NO: 1762410 - DNA, 15 bp, Homo sapiens
ggcctgggcataaac

SEQ ID NO: 1762411 - DNA, 15 bp, Homo sapiens
gcctgggcataaaca

SEQ ID NO: 1762412 - DNA, 15 bp, Homo sapiens
cctgggcataaacaa

SEQ ID NO: 1762413 - DNA, 15 bp, Homo sapiens
ctgggcataaacaaa

SEQ ID NO: 1762414 - DNA, 15 bp, Homo sapiens
tgggcataaacaaag

SEQ ID NO: 1762415 - DNA, 15 bp, Homo sapiens
gggcataaacaaagt

SEQ ID NO: 1762416 - DNA, 15 bp, Homo sapiens
ggcataaacaaagtg

SEQ ID NO: 1762417 - DNA, 15 bp, Homo sapiens
gcataaacaaagtgg

SEQ ID NO: 1762418 - DNA, 15 bp, Homo sapiens
cataaacaaagtggc

SEQ ID NO: 1762419 - DNA, 15 bp, Homo sapiens
ataaacaaagtggca

SEQ ID NO: 1762420 - DNA, 15 bp, Homo sapiens
taaacaaagtggcag

SEQ ID NO: 1762421 - DNA, 15 bp, Homo sapiens
aaacaaagtggcagc

SEQ ID NO: 1762422 - DNA, 15 bp, Homo sapiens
aacaaagtggcagca

SEQ ID NO: 1762423 - DNA, 15 bp, Homo sapiens
acaaagtggcagcag

SEQ ID NO: 1762424 - DNA, 15 bp, Homo sapiens
caaagtggcagcagt

SEQ ID NO: 1762425 - DNA, 15 bp, Homo sapiens
aaagtggcagcagtg

SEQ ID NO: 1762426 - DNA, 15 bp, Homo sapiens
aagtggcagcagtgc

SEQ ID NO: 1762427 - DNA, 15 bp, Homo sapiens
agtggcagcagtgcc

SEQ ID NO: 1762428 - DNA, 15 bp, Homo sapiens
gtggcagcagtgccc

SEQ ID NO: 1762429 - DNA, 15 bp, Homo sapiens
tggcagcagtgccct

SEQ ID NO: 1762430 - DNA, 15 bp, Homo sapiens
ggcagcagtgccctg

SEQ ID NO: 1762431 - DNA, 15 bp, Homo sapiens
gcagcagtgccctgc

SEQ ID NO: 1762432 - DNA, 15 bp, Homo sapiens
cagcagtgccctgcc

SEQ ID NO: 1762433 - DNA, 15 bp, Homo sapiens
agcagtgccctgcca

SEQ ID NO: 1762434 - DNA, 15 bp, Homo sapiens
gcagtgccctgccaa

SEQ ID NO: 1762435 - DNA, 15 bp, Homo sapiens
cagtgccctgccaac

SEQ ID NO: 1762436 - DNA, 15 bp, Homo sapiens
agtgccctgccaacc

SEQ ID NO: 1762437 - DNA, 15 bp, Homo sapiens
gtgccctgccaaccc

SEQ ID NO: 1762438 - DNA, 15 bp, Homo sapiens
tgccctgccaaccca

SEQ ID NO: 1762439 - DNA, 15 bp, Homo sapiens
gccctgccaacccag

SEQ ID NO: 1762440 - DNA, 15 bp, Homo sapiens
ccctgccaacccagt

SEQ ID NO: 1762441 - DNA, 15 bp, Homo sapiens
cctgccaacccagtg

SEQ ID NO: 1762442 - DNA, 15 bp, Homo sapiens
ctgccaacccagtgt

SEQ ID NO: 1762443 - DNA, 15 bp, Homo sapiens
tgccaacccagtgtc

SEQ ID NO: 1762444 - DNA, 15 bp, Homo sapiens
gccaacccagtgtct

SEQ ID NO: 1762445 - DNA, 15 bp, Homo sapiens
ccaacccagtgtcta

SEQ ID NO: 1762446 - DNA, 15 bp, Homo sapiens
caacccagtgtctac

SEQ ID NO: 1762447 - DNA, 15 bp, Homo sapiens
aacccagtgtctacg

SEQ ID NO: 1762448 - DNA, 15 bp, Homo sapiens
acccagtgtctacgg

SEQ ID NO: 1762449 - DNA, 15 bp, Homo sapiens
cccagtgtctacggc

SEQ ID NO: 1762450 - DNA, 15 bp, Homo sapiens
ccagtgtctacggcc

SEQ ID NO: 1762451 - DNA, 15 bp, Homo sapiens
cagtgtctacggcct

SEQ ID NO: 1762452 - DNA, 15 bp, Homo sapiens
agtgtctacggcctg

SEQ ID NO: 1762453 - DNA, 15 bp, Homo sapiens
gtgtctacggcctgc

SEQ ID NO: 1762454 - DNA, 15 bp, Homo sapiens
tgtctacggcctgcc

SEQ ID NO: 1762455 - DNA, 15 bp, Homo sapiens
gtctacggcctgccc

SEQ ID NO: 1762456 - DNA, 15 bp, Homo sapiens
tctacggcctgccct

SEQ ID NO: 1762457 - DNA, 15 bp, Homo sapiens
ctacggcctgccctc

SEQ ID NO: 1762458 - DNA, 15 bp, Homo sapiens
tacggcctgccctct

SEQ ID NO: 1762459 - DNA, 15 bp, Homo sapiens
acggcctgccctctg

SEQ ID NO: 1762460 - DNA, 15 bp, Homo sapiens
cggcctgccctctgt

SEQ ID NO: 1762461 - DNA, 15 bp, Homo sapiens
ggcctgccctctgtg

SEQ ID NO: 1762462 - DNA, 15 bp, Homo sapiens
gcctgccctctgtgg

SEQ ID NO: 1762463 - DNA, 15 bp, Homo sapiens
cctgccctctgtgga

SEQ ID NO: 1762464 - DNA, 15 bp, Homo sapiens
ctgccctctgtggat

SEQ ID NO: 1762465 - DNA, 15 bp, Homo sapiens
tgccctctgtggatg

SEQ ID NO: 1762466 - DNA, 15 bp, Homo sapiens
gccctctgtggatgg

SEQ ID NO: 1762467 - DNA, 15 bp, Homo sapiens
ccctctgtggatggg

SEQ ID NO: 1762468 - DNA, 15 bp, Homo sapiens
cctctgtggatggga

SEQ ID NO: 1762469 - DNA, 15 bp, Homo sapiens
ctctgtggatgggaa

SEQ ID NO: 1762470 - DNA, 15 bp, Homo sapiens
tctgtggatgggaat

SEQ ID NO: 1762471 - DNA, 15 bp, Homo sapiens
ctgtggatgggaatg

SEQ ID NO: 1762472 - DNA, 15 bp, Homo sapiens
tgtggatgggaatgg

SEQ ID NO: 1762473 - DNA, 15 bp, Homo sapiens
gtggatgggaatggg

SEQ ID NO: 1762474 - DNA, 15 bp, Homo sapiens
tggatgggaatgggg

SEQ ID NO: 1762475 - DNA, 15 bp, Homo sapiens
ggatgggaatggggg

SEQ ID NO: 1762476 - DNA, 15 bp, Homo sapiens
gatgggaatgggggt

SEQ ID NO: 1762477 - DNA, 15 bp, Homo sapiens
atgggaatgggggta

SEQ ID NO: 1762478 - DNA, 15 bp, Homo sapiens
tgggaatgggggtac

SEQ ID NO: 1762479 - DNA, 15 bp, Homo sapiens
gggaatgggggtact

SEQ ID NO: 1762480 - DNA, 15 bp, Homo sapiens
ggaatgggggtactg

SEQ ID NO: 1762481 - DNA, 15 bp, Homo sapiens
gaatgggggtactgc

SEQ ID NO: 1762482 - DNA, 15 bp, Homo sapiens
aatgggggtactgcg

SEQ ID NO: 1762483 - DNA, 15 bp, Homo sapiens
atgggggtactgcga

SEQ ID NO: 1762484 - DNA, 15 bp, Homo sapiens
tgggggtactgcgaa

SEQ ID NO: 1762485 - DNA, 15 bp, Homo sapiens
gggggtactgcgaat

SEQ ID NO: 1762486 - DNA, 15 bp, Homo sapiens
ggggtactgcgaatg

SEQ ID NO: 1762487 - DNA, 15 bp, Homo sapiens
gggtactgcgaatgc

SEQ ID NO: 1762488 - DNA, 15 bp, Homo sapiens
ggtactgcgaatgca

SEQ ID NO: 1762489 - DNA, 15 bp, Homo sapiens
gtactgcgaatgcaa

SEQ ID NO: 1762490 - DNA, 15 bp, Homo sapiens
tactgcgaatgcaag

SEQ ID NO: 1762491 - DNA, 15 bp, Homo sapiens
actgcgaatgcaagg

SEQ ID NO: 1762492 - DNA, 15 bp, Homo sapiens
ctgcgaatgcaagga

SEQ ID NO: 1762493 - DNA, 15 bp, Homo sapiens
tgcgaatgcaaggag

SEQ ID NO: 1762494 - DNA, 15 bp, Homo sapiens
gcgaatgcaaggagt

SEQ ID NO: 1762495 - DNA, 15 bp, Homo sapiens
cgaatgcaaggagtc

SEQ ID NO: 1762496 - DNA, 15 bp, Homo sapiens
gaatgcaaggagtct

SEQ ID NO: 1762497 - DNA, 15 bp, Homo sapiens
aatgcaaggagtctt

SEQ ID NO: 1762498 - DNA, 15 bp, Homo sapiens
atgcaaggagtcttg

SEQ ID NO: 1762499 - DNA, 15 bp, Homo sapiens
tgcaaggagtcttga

SEQ ID NO: 1762500 - DNA, 15 bp, Homo sapiens
gcaaggagtcttgaa

SEQ ID NO: 1762501 - DNA, 15 bp, Homo sapiens
caaggagtcttgaaa

SEQ ID NO: 1762502 - DNA, 15 bp, Homo sapiens
aaggagtcttgaaac

SEQ ID NO: 1762503 - DNA, 15 bp, Homo sapiens
aggagtcttgaaacc

SEQ ID NO: 1762504 - DNA, 15 bp, Homo sapiens
ggagtcttgaaacct

SEQ ID NO: 1762505 - DNA, 15 bp, Homo sapiens
gagtcttgaaacctg

SEQ ID NO: 1762506 - DNA, 15 bp, Homo sapiens
agtcttgaaacctgg

SEQ ID NO: 1762507 - DNA, 15 bp, Homo sapiens
gtcttgaaacctggt

SEQ ID NO: 1762508 - DNA, 15 bp, Homo sapiens
tcttgaaacctggtg

SEQ ID NO: 1762509 - DNA, 15 bp, Homo sapiens
cttgaaacctggtga

SEQ ID NO: 1762510 - DNA, 15 bp, Homo sapiens
ttgaaacctggtgaa

SEQ ID NO: 1762511 - DNA, 15 bp, Homo sapiens
tgaaacctggtgaaa

SEQ ID NO: 1762512 - DNA, 15 bp, Homo sapiens
gaaacctggtgaaag

SEQ ID NO: 1762513 - DNA, 15 bp, Homo sapiens
aaacctggtgaaaga

SEQ ID NO: 1762514 - DNA, 15 bp, Homo sapiens
aacctggtgaaagaa

SEQ ID NO: 1762515 - DNA, 15 bp, Homo sapiens
acctggtgaaagaat

SEQ ID NO: 1762516 - DNA, 15 bp, Homo sapiens
cctggtgaaagaatg

SEQ ID NO: 1762517 - DNA, 15 bp, Homo sapiens
ctggtgaaagaatgc

SEQ ID NO: 1762518 - DNA, 15 bp, Homo sapiens
tggtgaaagaatgca

SEQ ID NO: 1762519 - DNA, 15 bp, Homo sapiens
ggtgaaagaatgcag

SEQ ID NO: 1762520 - DNA, 15 bp, Homo sapiens
gtgaaagaatgcagg

SEQ ID NO: 1762521 - DNA, 15 bp, Homo sapiens
tgaaagaatgcaggg

SEQ ID NO: 1762522 - DNA, 15 bp, Homo sapiens
gaaagaatgcaggga

SEQ ID NO: 1762523 - DNA, 15 bp, Homo sapiens
aaagaatgcagggac

SEQ ID NO: 1762524 - DNA, 15 bp, Homo sapiens
aagaatgcagggaca

SEQ ID NO: 1762525 - DNA, 15 bp, Homo sapiens
agaatgcagggacag

SEQ ID NO: 1762526 - DNA, 15 bp, Homo sapiens
gaatgcagggacagc

SEQ ID NO: 1762527 - DNA, 15 bp, Homo sapiens
aatgcagggacagcc

SEQ ID NO: 1762528 - DNA, 15 bp, Homo sapiens
atgcagggacagcca

SEQ ID NO: 1762529 - DNA, 15 bp, Homo sapiens
tgcagggacagccac

SEQ ID NO: 1762530 - DNA, 15 bp, Homo sapiens
gcagggacagccacc

SEQ ID NO: 1762531 - DNA, 15 bp, Homo sapiens
cagggacagccacct

SEQ ID NO: 1762532 - DNA, 15 bp, Homo sapiens
agggacagccacctc

SEQ ID NO: 1762533 - DNA, 15 bp, Homo sapiens
gggacagccacctcg

SEQ ID NO: 1762534 - DNA, 15 bp, Homo sapiens
ggacagccacctcgc

SEQ ID NO: 1762535 - DNA, 15 bp, Homo sapiens
gacagccacctcgca

SEQ ID NO: 1762536 - DNA, 15 bp, Homo sapiens
acagccacctcgcag

SEQ ID NO: 1762537 - DNA, 15 bp, Homo sapiens
cagccacctcgcagc

SEQ ID NO: 1762538 - DNA, 15 bp, Homo sapiens
agccacctcgcagcc

SEQ ID NO: 1762539 - DNA, 15 bp, Homo sapiens
gccacctcgcagcca

SEQ ID NO: 1762540 - DNA, 15 bp, Homo sapiens
ccacctcgcagccaa

SEQ ID NO: 1762541 - DNA, 15 bp, Homo sapiens
cacctcgcagccaaa

SEQ ID NO: 1762542 - DNA, 15 bp, Homo sapiens
acctcgcagccaaac

SEQ ID NO: 1762543 - DNA, 15 bp, Homo sapiens
cctcgcagccaaacg

SEQ ID NO: 1762544 - DNA, 15 bp, Homo sapiens
ctcgcagccaaacgg

SEQ ID NO: 1762545 - DNA, 15 bp, Homo sapiens
tcgcagccaaacgga

SEQ ID NO: 1762546 - DNA, 15 bp, Homo sapiens
cgcagccaaacggac

SEQ ID NO: 1762547 - DNA, 15 bp, Homo sapiens
gcagccaaacggaca

SEQ ID NO: 1762548 - DNA, 15 bp, Homo sapiens
cagccaaacggacag

SEQ ID NO: 1762549 - DNA, 15 bp, Homo sapiens
agccaaacggacagg

SEQ ID NO: 1762550 - DNA, 15 bp, Homo sapiens
gccaaacggacagga

SEQ ID NO: 1762551 - DNA, 15 bp, Homo sapiens
ccaaacggacaggac

SEQ ID NO: 1762552 - DNA, 15 bp, Homo sapiens
caaacggacaggaca

SEQ ID NO: 1762553 - DNA, 15 bp, Homo sapiens
aaacggacaggacat

SEQ ID NO: 1762554 - DNA, 15 bp, Homo sapiens
aacggacaggacatt

SEQ ID NO: 1762555 - DNA, 15 bp, Homo sapiens
acggacaggacattc

SEQ ID NO: 1762556 - DNA, 15 bp, Homo sapiens
cggacaggacattca

SEQ ID NO: 1762557 - DNA, 15 bp, Homo sapiens
ggacaggacattcag

SEQ ID NO: 1762558 - DNA, 15 bp, Homo sapiens
gacaggacattcaga

SEQ ID NO: 1762559 - DNA, 15 bp, Homo sapiens
acaggacattcagag

SEQ ID NO: 1762560 - DNA, 15 bp, Homo sapiens
caggacattcagagc

SEQ ID NO: 1762561 - DNA, 15 bp, Homo sapiens
aggacattcagagca

SEQ ID NO: 1762562 - DNA, 15 bp, Homo sapiens
ggacattcagagcaa

SEQ ID NO: 1762563 - DNA, 15 bp, Homo sapiens
gacattcagagcaac

SEQ ID NO: 1762564 - DNA, 15 bp, Homo sapiens
acattcagagcaact

SEQ ID NO: 1762565 - DNA, 15 bp, Homo sapiens
cattcagagcaactc

SEQ ID NO: 1762566 - DNA, 15 bp, Homo sapiens
attcagagcaactcc

SEQ ID NO: 1762567 - DNA, 15 bp, Homo sapiens
ttcagagcaactcca

SEQ ID NO: 1762568 - DNA, 15 bp, Homo sapiens
tcagagcaactccag

SEQ ID NO: 1762569 - DNA, 15 bp, Homo sapiens
cagagcaactccagc

SEQ ID NO: 1762570 - DNA, 15 bp, Homo sapiens
agagcaactccagca

SEQ ID NO: 1762571 - DNA, 15 bp, Homo sapiens
gagcaactccagcac

SEQ ID NO: 1762572 - DNA, 15 bp, Homo sapiens
agcaactccagcaca

SEQ ID NO: 1762573 - DNA, 15 bp, Homo sapiens
gcaactccagcacag

SEQ ID NO: 1762574 - DNA, 15 bp, Homo sapiens
caactccagcacagg

SEQ ID NO: 1762575 - DNA, 15 bp, Homo sapiens
aactccagcacaggc

SEQ ID NO: 1762576 - DNA, 15 bp, Homo sapiens
actccagcacaggcc

SEQ ID NO: 1762577 - DNA, 15 bp, Homo sapiens
ctccagcacaggccc

SEQ ID NO: 1762578 - DNA, 15 bp, Homo sapiens
tccagcacaggcccc

SEQ ID NO: 1762579 - DNA, 15 bp, Homo sapiens
ccagcacaggccccc

SEQ ID NO: 1762580 - DNA, 15 bp, Homo sapiens
cagcacaggccccct

SEQ ID NO: 1762581 - DNA, 15 bp, Homo sapiens
agcacaggccccctc

SEQ ID NO: 1762582 - DNA, 15 bp, Homo sapiens
gcacaggccccctcc

SEQ ID NO: 1762583 - DNA, 15 bp, Homo sapiens
cacaggccccctccc

SEQ ID NO: 1762584 - DNA, 15 bp, Homo sapiens
acaggccccctccct

SEQ ID NO: 1762585 - DNA, 15 bp, Homo sapiens
caggccccctcccta

SEQ ID NO: 1762586 - DNA, 15 bp, Homo sapiens
aggccccctccctac

SEQ ID NO: 1762587 - DNA, 15 bp, Homo sapiens
ggccccctccctacg

SEQ ID NO: 1762588 - DNA, 15 bp, Homo sapiens
gccccctccctacgt

SEQ ID NO: 1762589 - DNA, 15 bp, Homo sapiens
ccccctccctacgtg

SEQ ID NO: 1762590 - DNA, 15 bp, Homo sapiens
cccctccctacgtgg

SEQ ID NO: 1762591 - DNA, 15 bp, Homo sapiens
ccctccctacgtggc

SEQ ID NO: 1762592 - DNA, 15 bp, Homo sapiens
cctccctacgtggca

SEQ ID NO: 1762593 - DNA, 15 bp, Homo sapiens
ctccctacgtggcag

SEQ ID NO: 1762594 - DNA, 15 bp, Homo sapiens
tccctacgtggcaga

SEQ ID NO: 1762595 - DNA, 15 bp, Homo sapiens
ccctacgtggcagac

SEQ ID NO: 1762596 - DNA, 15 bp, Homo sapiens
cctacgtggcagaca

SEQ ID NO: 1762597 - DNA, 15 bp, Homo sapiens
ctacgtggcagacag

SEQ ID NO: 1762598 - DNA, 15 bp, Homo sapiens
tacgtggcagacagc

SEQ ID NO: 1762599 - DNA, 15 bp, Homo sapiens
acgtggcagacagcc

SEQ ID NO: 1762600 - DNA, 15 bp, Homo sapiens
cgtggcagacagcct

SEQ ID NO: 1762601 - DNA, 15 bp, Homo sapiens
gtggcagacagcctc

SEQ ID NO: 1762602 - DNA, 15 bp, Homo sapiens
tggcagacagcctca

SEQ ID NO: 1762603 - DNA, 15 bp, Homo sapiens
ggcagacagcctcag

SEQ ID NO: 1762604 - DNA, 15 bp, Homo sapiens
gcagacagcctcagt

SEQ ID NO: 1762605 - DNA, 15 bp, Homo sapiens
cagacagcctcagtc

SEQ ID NO: 1762606 - DNA, 15 bp, Homo sapiens
agacagcctcagtcg

SEQ ID NO: 1762607 - DNA, 15 bp, Homo sapiens
gacagcctcagtcgc

SEQ ID NO: 1762608 - DNA, 15 bp, Homo sapiens
acagcctcagtcgct

SEQ ID NO: 1762609 - DNA, 15 bp, Homo sapiens
cagcctcagtcgcta

SEQ ID NO: 1762610 - DNA, 15 bp, Homo sapiens
agcctcagtcgctat

SEQ ID NO: 1762611 - DNA, 15 bp, Homo sapiens
gcctcagtcgctatc

SEQ ID NO: 1762612 - DNA, 15 bp, Homo sapiens
cctcagtcgctatct

SEQ ID NO: 1762613 - DNA, 15 bp, Homo sapiens
ctcagtcgctatctg

SEQ ID NO: 1762614 - DNA, 15 bp, Homo sapiens
tcagtcgctatctgc

SEQ ID NO: 1762615 - DNA, 15 bp, Homo sapiens
cagtcgctatctgcc

SEQ ID NO: 1762616 - DNA, 15 bp, Homo sapiens
agtcgctatctgcca

SEQ ID NO: 1762617 - DNA, 15 bp, Homo sapiens
gtcgctatctgccag

SEQ ID NO: 1762618 - DNA, 15 bp, Homo sapiens
tcgctatctgccagg

SEQ ID NO: 1762619 - DNA, 15 bp, Homo sapiens
cgctatctgccaggt

SEQ ID NO: 1762620 - DNA, 15 bp, Homo sapiens
gctatctgccaggtt

SEQ ID NO: 1762621 - DNA, 15 bp, Homo sapiens
ctatctgccaggttc

SEQ ID NO: 1762622 - DNA, 15 bp, Homo sapiens
tatctgccaggttct

SEQ ID NO: 1762623 - DNA, 15 bp, Homo sapiens
atctgccaggttcta

SEQ ID NO: 1762624 - DNA, 15 bp, Homo sapiens
tctgccaggttctac

SEQ ID NO: 1762625 - DNA, 15 bp, Homo sapiens
ctgccaggttctaca

SEQ ID NO: 1762626 - DNA, 15 bp, Homo sapiens
tgccaggttctacag

SEQ ID NO: 1762627 - DNA, 15 bp, Homo sapiens
gccaggttctacaga

SEQ ID NO: 1762628 - DNA, 15 bp, Homo sapiens
ccaggttctacagag

SEQ ID NO: 1762629 - DNA, 15 bp, Homo sapiens
caggttctacagagg

SEQ ID NO: 1762630 - DNA, 15 bp, Homo sapiens
aggttctacagagga

SEQ ID NO: 1762631 - DNA, 15 bp, Homo sapiens
ggttctacagaggag

SEQ ID NO: 1762632 - DNA, 15 bp, Homo sapiens
gttctacagaggagg

SEQ ID NO: 1762633 - DNA, 15 bp, Homo sapiens
ttctacagaggaggg

SEQ ID NO: 1762634 - DNA, 15 bp, Homo sapiens
tctacagaggagggc

SEQ ID NO: 1762635 - DNA, 15 bp, Homo sapiens
ctacagaggagggcg

SEQ ID NO: 1762636 - DNA, 15 bp, Homo sapiens
tacagaggagggcgc

SEQ ID NO: 1762637 - DNA, 15 bp, Homo sapiens
acagaggagggcgca

SEQ ID NO: 1762638 - DNA, 15 bp, Homo sapiens
cagaggagggcgcag

SEQ ID NO: 1762639 - DNA, 15 bp, Homo sapiens
agaggagggcgcaga

SEQ ID NO: 1762640 - DNA, 15 bp, Homo sapiens
gaggagggcgcagag

SEQ ID NO: 1762641 - DNA, 15 bp, Homo sapiens
aggagggcgcagaga

SEQ ID NO: 1762642 - DNA, 15 bp, Homo sapiens
ggagggcgcagagac

SEQ ID NO: 1762643 - DNA, 15 bp, Homo sapiens
gagggcgcagagact

SEQ ID NO: 1762644 - DNA, 15 bp, Homo sapiens
agggcgcagagactg

SEQ ID NO: 1762645 - DNA, 15 bp, Homo sapiens
gggcgcagagactga

SEQ ID NO: 1762646 - DNA, 15 bp, Homo sapiens
ggcgcagagactgaa

SEQ ID NO: 1762647 - DNA, 15 bp, Homo sapiens
gcgcagagactgaaa

SEQ ID NO: 1762648 - DNA, 15 bp, Homo sapiens
cgcagagactgaaac

SEQ ID NO: 1762649 - DNA, 15 bp, Homo sapiens
gcagagactgaaaca

SEQ ID NO: 1762650 - DNA, 15 bp, Homo sapiens
cagagactgaaacac

SEQ ID NO: 1762651 - DNA, 15 bp, Homo sapiens
agagactgaaacacg

SEQ ID NO: 1762652 - DNA, 15 bp, Homo sapiens
gagactgaaacacgt

SEQ ID NO: 1762653 - DNA, 15 bp, Homo sapiens
agactgaaacacgtt

SEQ ID NO: 1762654 - DNA, 15 bp, Homo sapiens
gactgaaacacgtta

SEQ ID NO: 1762655 - DNA, 15 bp, Homo sapiens
actgaaacacgttag

SEQ ID NO: 1762656 - DNA, 15 bp, Homo sapiens
ctgaaacacgttagg

SEQ ID NO: 1762657 - DNA, 15 bp, Homo sapiens
tgaaacacgttagga

SEQ ID NO: 1762658 - DNA, 15 bp, Homo sapiens
gaaacacgttaggag

SEQ ID NO: 1762659 - DNA, 15 bp, Homo sapiens
aaacacgttaggagc

SEQ ID NO: 1762660 - DNA, 15 bp, Homo sapiens
aacacgttaggagcc

SEQ ID NO: 1762661 - DNA, 15 bp, Homo sapiens
acacgttaggagcct

SEQ ID NO: 1762662 - DNA, 15 bp, Homo sapiens
acgttaggagcctgt

SEQ ID NO: 1762663 - DNA, 15 bp, Homo sapiens
cgttaggagcctgtc

SEQ ID NO: 1762664 - DNA, 15 bp, Homo sapiens
gttaggagcctgtcc

SEQ ID NO: 1762665 - DNA, 15 bp, Homo sapiens
ttaggagcctgtccg

SEQ ID NO: 1762666 - DNA, 15 bp, Homo sapiens
taggagcctgtccgg

SEQ ID NO: 1762667 - DNA, 15 bp, Homo sapiens
aggagcctgtccgga

SEQ ID NO: 1762668 - DNA, 15 bp, Homo sapiens
ggagcctgtccggag

SEQ ID NO: 1762669 - DNA, 15 bp, Homo sapiens
gagcctgtccggaga

SEQ ID NO: 1762670 - DNA, 15 bp, Homo sapiens
agcctgtccggagac

SEQ ID NO: 1762671 - DNA, 15 bp, Homo sapiens
gcctgtccggagact

SEQ ID NO: 1762672 - DNA, 15 bp, Homo sapiens
cctgtccggagacta

SEQ ID NO: 1762673 - DNA, 15 bp, Homo sapiens
ctgtccggagactac

SEQ ID NO: 1762674 - DNA, 15 bp, Homo sapiens
tgtccggagactact

SEQ ID NO: 1762675 - DNA, 15 bp, Homo sapiens
gtccggagactactg

SEQ ID NO: 1762676 - DNA, 15 bp, Homo sapiens
tccggagactactgg

SEQ ID NO: 1762677 - DNA, 15 bp, Homo sapiens
ccggagactactggg

SEQ ID NO: 1762678 - DNA, 15 bp, Homo sapiens
cggagactactgggg

SEQ ID NO: 1762679 - DNA, 15 bp, Homo sapiens
ggagactactggggt

SEQ ID NO: 1762680 - DNA, 15 bp, Homo sapiens
gagactactggggtg

SEQ ID NO: 1762681 - DNA, 15 bp, Homo sapiens
agactactggggtgg

SEQ ID NO: 1762682 - DNA, 15 bp, Homo sapiens
gactactggggtggg

SEQ ID NO: 1762683 - DNA, 15 bp, Homo sapiens
actactggggtgggg

SEQ ID NO: 1762684 - DNA, 15 bp, Homo sapiens
ctactggggtggggc

SEQ ID NO: 1762685 - DNA, 15 bp, Homo sapiens
tactggggtggggca

SEQ ID NO: 1762686 - DNA, 15 bp, Homo sapiens
actggggtggggcac

SEQ ID NO: 1762687 - DNA, 15 bp, Homo sapiens
ctggggtggggcaca

SEQ ID NO: 1762688 - DNA, 15 bp, Homo sapiens
tggggtggggcacag

SEQ ID NO: 1762689 - DNA, 15 bp, Homo sapiens
ggggtggggcacagg

SEQ ID NO: 1762690 - DNA, 15 bp, Homo sapiens
gggtggggcacaggt

SEQ ID NO: 1762691 - DNA, 15 bp, Homo sapiens
ggtggggcacaggta

SEQ ID NO: 1762692 - DNA, 15 bp, Homo sapiens
gtggggcacaggtag

SEQ ID NO: 1762693 - DNA, 15 bp, Homo sapiens
tggggcacaggtagg

SEQ ID NO: 1762694 - DNA, 15 bp, Homo sapiens
ggggcacaggtagga

SEQ ID NO: 1762695 - DNA, 15 bp, Homo sapiens
gggcacaggtaggat

SEQ ID NO: 1762696 - DNA, 15 bp, Homo sapiens
ggcacaggtaggatc

SEQ ID NO: 1762697 - DNA, 15 bp, Homo sapiens
gcacaggtaggatca

SEQ ID NO: 1762698 - DNA, 15 bp, Homo sapiens
cacaggtaggatcaa

SEQ ID NO: 1762699 - DNA, 15 bp, Homo sapiens
acaggtaggatcaat

SEQ ID NO: 1762700 - DNA, 15 bp, Homo sapiens
caggtaggatcaatg

SEQ ID NO: 1762701 - DNA, 15 bp, Homo sapiens
aggtaggatcaatgc

SEQ ID NO: 1762702 - DNA, 15 bp, Homo sapiens
ggtaggatcaatgct

SEQ ID NO: 1762703 - DNA, 15 bp, Homo sapiens
gtaggatcaatgctg

SEQ ID NO: 1762704 - DNA, 15 bp, Homo sapiens
taggatcaatgctgg

SEQ ID NO: 1762705 - DNA, 15 bp, Homo sapiens
aggatcaatgctggg

SEQ ID NO: 1762706 - DNA, 15 bp, Homo sapiens
ggatcaatgctgggg

SEQ ID NO: 1762707 - DNA, 15 bp, Homo sapiens
gatcaatgctgggga

SEQ ID NO: 1762708 - DNA, 15 bp, Homo sapiens
atcaatgctggggac

SEQ ID NO: 1762709 - DNA, 15 bp, Homo sapiens
tcaatgctggggacc

SEQ ID NO: 1762710 - DNA, 15 bp, Homo sapiens
caatgctggggacct

SEQ ID NO: 1762711 - DNA, 15 bp, Homo sapiens
aatgctggggacctg

SEQ ID NO: 1762712 - DNA, 15 bp, Homo sapiens
atgctggggacctgg

SEQ ID NO: 1762713 - DNA, 15 bp, Homo sapiens
tgctggggacctggg

SEQ ID NO: 1762714 - DNA, 15 bp, Homo sapiens
gctggggacctgggt

SEQ ID NO: 1762715 - DNA, 15 bp, Homo sapiens
ctggggacctgggtg

SEQ ID NO: 1762716 - DNA, 15 bp, Homo sapiens
tggggacctgggtgt

SEQ ID NO: 1762717 - DNA, 15 bp, Homo sapiens
ggggacctgggtgtg

SEQ ID NO: 1762718 - DNA, 15 bp, Homo sapiens
gggacctgggtgtgg

SEQ ID NO: 1762719 - DNA, 15 bp, Homo sapiens
ggacctgggtgtggc

SEQ ID NO: 1762720 - DNA, 15 bp, Homo sapiens
gacctgggtgtggcc

SEQ ID NO: 1762721 - DNA, 15 bp, Homo sapiens
acctgggtgtggccc

SEQ ID NO: 1762722 - DNA, 15 bp, Homo sapiens
cctgggtgtggcccc

SEQ ID NO: 1762723 - DNA, 15 bp, Homo sapiens
ctgggtgtggcccct

SEQ ID NO: 1762724 - DNA, 15 bp, Homo sapiens
tgggtgtggcccctt

SEQ ID NO: 1762725 - DNA, 15 bp, Homo sapiens
gggtgtggccccttc

SEQ ID NO: 1762726 - DNA, 15 bp, Homo sapiens
ggtgtggccccttcc

SEQ ID NO: 1762727 - DNA, 15 bp, Homo sapiens
gtgtggccccttcca

SEQ ID NO: 1762728 - DNA, 15 bp, Homo sapiens
tgtggccccttccag

SEQ ID NO: 1762729 - DNA, 15 bp, Homo sapiens
gtggccccttccagg

SEQ ID NO: 1762730 - DNA, 15 bp, Homo sapiens
tggccccttccaggg

SEQ ID NO: 1762731 - DNA, 15 bp, Homo sapiens
ggccccttccagggc

SEQ ID NO: 1762732 - DNA, 15 bp, Homo sapiens
gccccttccagggcc

SEQ ID NO: 1762733 - DNA, 15 bp, Homo sapiens
ccccttccagggccc

SEQ ID NO: 1762734 - DNA, 15 bp, Homo sapiens
cccttccagggcccc

SEQ ID NO: 1762735 - DNA, 15 bp, Homo sapiens
ccttccagggcccca

SEQ ID NO: 1762736 - DNA, 15 bp, Homo sapiens
cttccagggccccaa

SEQ ID NO: 1762737 - DNA, 15 bp, Homo sapiens
ttccagggccccaag

SEQ ID NO: 1762738 - DNA, 15 bp, Homo sapiens
tccagggccccaagc

SEQ ID NO: 1762739 - DNA, 15 bp, Homo sapiens
ccagggccccaagct

SEQ ID NO: 1762740 - DNA, 15 bp, Homo sapiens
cagggccccaagctg

SEQ ID NO: 1762741 - DNA, 15 bp, Homo sapiens
agggccccaagctgc

SEQ ID NO: 1762742 - DNA, 15 bp, Homo sapiens
gggccccaagctgcc

SEQ ID NO: 1762743 - DNA, 15 bp, Homo sapiens
ggccccaagctgcct

SEQ ID NO: 1762744 - DNA, 15 bp, Homo sapiens
gccccaagctgcctt

SEQ ID NO: 1762745 - DNA, 15 bp, Homo sapiens
ccccaagctgccttt

SEQ ID NO: 1762746 - DNA, 15 bp, Homo sapiens
cccaagctgcctttg

SEQ ID NO: 1762747 - DNA, 15 bp, Homo sapiens
ccaagctgcctttgc

SEQ ID NO: 1762748 - DNA, 15 bp, Homo sapiens
caagctgcctttgcc

SEQ ID NO: 1762749 - DNA, 15 bp, Homo sapiens
aagctgcctttgcct

SEQ ID NO: 1762750 - DNA, 15 bp, Homo sapiens
agctgcctttgcctt

SEQ ID NO: 1762751 - DNA, 15 bp, Homo sapiens
gctgcctttgccttc

SEQ ID NO: 1762752 - DNA, 15 bp, Homo sapiens
ctgcctttgccttcc

SEQ ID NO: 1762753 - DNA, 15 bp, Homo sapiens
tgcctttgccttcct

SEQ ID NO: 1762754 - DNA, 15 bp, Homo sapiens
gcctttgccttcctg

SEQ ID NO: 1762755 - DNA, 15 bp, Homo sapiens
cctttgccttcctgg

SEQ ID NO: 1762756 - DNA, 15 bp, Homo sapiens
ctttgccttcctggg

SEQ ID NO: 1762757 - DNA, 15 bp, Homo sapiens
tttgccttcctgggg

SEQ ID NO: 1762758 - DNA, 15 bp, Homo sapiens
ttgccttcctggggt

SEQ ID NO: 1762759 - DNA, 15 bp, Homo sapiens
tgccttcctggggtt

SEQ ID NO: 1762760 - DNA, 15 bp, Homo sapiens
gccttcctggggttt

SEQ ID NO: 1762761 - DNA, 15 bp, Homo sapiens
ccttcctggggtttc

SEQ ID NO: 1762762 - DNA, 15 bp, Homo sapiens
cttcctggggtttcc

SEQ ID NO: 1762763 - DNA, 15 bp, Homo sapiens
ttcctggggtttcct

SEQ ID NO: 1762764 - DNA, 15 bp, Homo sapiens
tcctggggtttcctt

SEQ ID NO: 1762765 - DNA, 15 bp, Homo sapiens
cctggggtttccttt

SEQ ID NO: 1762766 - DNA, 15 bp, Homo sapiens
ctggggtttccttta

SEQ ID NO: 1762767 - DNA, 15 bp, Homo sapiens
tggggtttcctttaa

SEQ ID NO: 1762768 - DNA, 15 bp, Homo sapiens
ggggtttcctttaaa

SEQ ID NO: 1762769 - DNA, 15 bp, Homo sapiens
gggtttcctttaaag

SEQ ID NO: 1762770 - DNA, 15 bp, Homo sapiens
ggtttcctttaaagc

SEQ ID NO: 1762771 - DNA, 15 bp, Homo sapiens
gtttcctttaaagcc

SEQ ID NO: 1762772 - DNA, 15 bp, Homo sapiens
tttcctttaaagcca

SEQ ID NO: 1762773 - DNA, 15 bp, Homo sapiens
ttcctttaaagccac

SEQ ID NO: 1762774 - DNA, 15 bp, Homo sapiens
tcctttaaagccacc

SEQ ID NO: 1762775 - DNA, 15 bp, Homo sapiens
cctttaaagccaccg

SEQ ID NO: 1762776 - DNA, 15 bp, Homo sapiens
ctttaaagccaccgc

SEQ ID NO: 1762777 - DNA, 15 bp, Homo sapiens
tttaaagccaccgcg

SEQ ID NO: 1762778 - DNA, 15 bp, Homo sapiens
ttaaagccaccgcgt

SEQ ID NO: 1762779 - DNA, 15 bp, Homo sapiens
taaagccaccgcgtg

SEQ ID NO: 1762780 - DNA, 15 bp, Homo sapiens
aaagccaccgcgtga

SEQ ID NO: 1762781 - DNA, 15 bp, Homo sapiens
aagccaccgcgtgag

SEQ ID NO: 1762782 - DNA, 15 bp, Homo sapiens
agccaccgcgtgagg

SEQ ID NO: 1762783 - DNA, 15 bp, Homo sapiens
gccaccgcgtgaggc

SEQ ID NO: 1762784 - DNA, 15 bp, Homo sapiens
ccaccgcgtgaggcc

SEQ ID NO: 1762785 - DNA, 15 bp, Homo sapiens
caccgcgtgaggccc

SEQ ID NO: 1762786 - DNA, 15 bp, Homo sapiens
accgcgtgaggccct

SEQ ID NO: 1762787 - DNA, 15 bp, Homo sapiens
ccgcgtgaggccctg

SEQ ID NO: 1762788 - DNA, 15 bp, Homo sapiens
cgcgtgaggccctgg

SEQ ID NO: 1762789 - DNA, 15 bp, Homo sapiens
gcgtgaggccctggt

SEQ ID NO: 1762790 - DNA, 15 bp, Homo sapiens
cgtgaggccctggtg

SEQ ID NO: 1762791 - DNA, 15 bp, Homo sapiens
gtgaggccctggtgg

SEQ ID NO: 1762792 - DNA, 15 bp, Homo sapiens
tgaggccctggtggg

SEQ ID NO: 1762793 - DNA, 15 bp, Homo sapiens
gaggccctggtggga

SEQ ID NO: 1762794 - DNA, 15 bp, Homo sapiens
aggccctggtgggac

SEQ ID NO: 1762795 - DNA, 15 bp, Homo sapiens
ggccctggtgggaca

SEQ ID NO: 1762796 - DNA, 15 bp, Homo sapiens
gccctggtgggacat

SEQ ID NO: 1762797 - DNA, 15 bp, Homo sapiens
ccctggtgggacatc

SEQ ID NO: 1762798 - DNA, 15 bp, Homo sapiens
cctggtgggacatca

SEQ ID NO: 1762799 - DNA, 15 bp, Homo sapiens
ctggtgggacatcac

SEQ ID NO: 1762800 - DNA, 15 bp, Homo sapiens
tggtgggacatcaca

SEQ ID NO: 1762801 - DNA, 15 bp, Homo sapiens
ggtgggacatcacat

SEQ ID NO: 1762802 - DNA, 15 bp, Homo sapiens
gtgggacatcacatc

SEQ ID NO: 1762803 - DNA, 15 bp, Homo sapiens
tgggacatcacatct

SEQ ID NO: 1762804 - DNA, 15 bp, Homo sapiens
gggacatcacatctt

SEQ ID NO: 1762805 - DNA, 15 bp, Homo sapiens
ggacatcacatcttg

SEQ ID NO: 1762806 - DNA, 15 bp, Homo sapiens
gacatcacatcttgc

SEQ ID NO: 1762807 - DNA, 15 bp, Homo sapiens
acatcacatcttgcc

SEQ ID NO: 1762808 - DNA, 15 bp, Homo sapiens
catcacatcttgccg

SEQ ID NO: 1762809 - DNA, 15 bp, Homo sapiens
atcacatcttgccgg

SEQ ID NO: 1762810 - DNA, 15 bp, Homo sapiens
tcacatcttgccggc

SEQ ID NO: 1762811 - DNA, 15 bp, Homo sapiens
cacatcttgccggca

SEQ ID NO: 1762812 - DNA, 15 bp, Homo sapiens
acatcttgccggcag

SEQ ID NO: 1762813 - DNA, 15 bp, Homo sapiens
catcttgccggcagc

SEQ ID NO: 1762814 - DNA, 15 bp, Homo sapiens
atcttgccggcagca

SEQ ID NO: 1762815 - DNA, 15 bp, Homo sapiens
tcttgccggcagcag

SEQ ID NO: 1762816 - DNA, 15 bp, Homo sapiens
cttgccggcagcagt

SEQ ID NO: 1762817 - DNA, 15 bp, Homo sapiens
ttgccggcagcagtg

SEQ ID NO: 1762818 - DNA, 15 bp, Homo sapiens
tgccggcagcagtgg

SEQ ID NO: 1762819 - DNA, 15 bp, Homo sapiens
gccggcagcagtgga

SEQ ID NO: 1762820 - DNA, 15 bp, Homo sapiens
ccggcagcagtggac

SEQ ID NO: 1762821 - DNA, 15 bp, Homo sapiens
cggcagcagtggacc

SEQ ID NO: 1762822 - DNA, 15 bp, Homo sapiens
ggcagcagtggacca

SEQ ID NO: 1762823 - DNA, 15 bp, Homo sapiens
gcagcagtggaccag

SEQ ID NO: 1762824 - DNA, 15 bp, Homo sapiens
cagcagtggaccagg

SEQ ID NO: 1762825 - DNA, 15 bp, Homo sapiens
agcagtggaccaggc

SEQ ID NO: 1762826 - DNA, 15 bp, Homo sapiens
gcagtggaccaggca

SEQ ID NO: 1762827 - DNA, 15 bp, Homo sapiens
cagtggaccaggcag

SEQ ID NO: 1762828 - DNA, 15 bp, Homo sapiens
agtggaccaggcaga

SEQ ID NO: 1762829 - DNA, 15 bp, Homo sapiens
gtggaccaggcagat

SEQ ID NO: 1762830 - DNA, 15 bp, Homo sapiens
tggaccaggcagatc

SEQ ID NO: 1762831 - DNA, 15 bp, Homo sapiens
ggaccaggcagatcc

SEQ ID NO: 1762832 - DNA, 15 bp, Homo sapiens
gaccaggcagatcct

SEQ ID NO: 1762833 - DNA, 15 bp, Homo sapiens
accaggcagatcctc

SEQ ID NO: 1762834 - DNA, 15 bp, Homo sapiens
ccaggcagatcctca

SEQ ID NO: 1762835 - DNA, 15 bp, Homo sapiens
caggcagatcctcaa

SEQ ID NO: 1762836 - DNA, 15 bp, Homo sapiens
aggcagatcctcaaa

SEQ ID NO: 1762837 - DNA, 15 bp, Homo sapiens
ggcagatcctcaaag

SEQ ID NO: 1762838 - DNA, 15 bp, Homo sapiens
gcagatcctcaaaga

SEQ ID NO: 1762839 - DNA, 15 bp, Homo sapiens
cagatcctcaaagat

SEQ ID NO: 1762840 - DNA, 15 bp, Homo sapiens
agatcctcaaagatg

SEQ ID NO: 1762841 - DNA, 15 bp, Homo sapiens
gatcctcaaagatgt

SEQ ID NO: 1762842 - DNA, 15 bp, Homo sapiens
atcctcaaagatgtc

SEQ ID NO: 1762843 - DNA, 15 bp, Homo sapiens
tcctcaaagatgtct

SEQ ID NO: 1762844 - DNA, 15 bp, Homo sapiens
cctcaaagatgtctc

SEQ ID NO: 1762845 - DNA, 15 bp, Homo sapiens
ctcaaagatgtctcc

SEQ ID NO: 1762846 - DNA, 15 bp, Homo sapiens
tcaaagatgtctcct

SEQ ID NO: 1762847 - DNA, 15 bp, Homo sapiens
caaagatgtctcctt

SEQ ID NO: 1762848 - DNA, 15 bp, Homo sapiens
aaagatgtctccttg

SEQ ID NO: 1762849 - DNA, 15 bp, Homo sapiens
aagatgtctccttgt

SEQ ID NO: 1762850 - DNA, 15 bp, Homo sapiens
agatgtctccttgta

SEQ ID NO: 1762851 - DNA, 15 bp, Homo sapiens
gatgtctccttgtac

SEQ ID NO: 1762852 - DNA, 15 bp, Homo sapiens
atgtctccttgtacg

SEQ ID NO: 1762853 - DNA, 15 bp, Homo sapiens
tgtctccttgtacgt

SEQ ID NO: 1762854 - DNA, 15 bp, Homo sapiens
gtctccttgtacgtg

SEQ ID NO: 1762855 - DNA, 15 bp, Homo sapiens
tctccttgtacgtgg

SEQ ID NO: 1762856 - DNA, 15 bp, Homo sapiens
ctccttgtacgtgga

SEQ ID NO: 1762857 - DNA, 15 bp, Homo sapiens
tccttgtacgtggag

SEQ ID NO: 1762858 - DNA, 15 bp, Homo sapiens
ccttgtacgtggaga

SEQ ID NO: 1762859 - DNA, 15 bp, Homo sapiens
cttgtacgtggagag

SEQ ID NO: 1762860 - DNA, 15 bp, Homo sapiens
ttgtacgtggagagc

SEQ ID NO: 1762861 - DNA, 15 bp, Homo sapiens
tgtacgtggagagcg

SEQ ID NO: 1762862 - DNA, 15 bp, Homo sapiens
gtacgtggagagcgg

SEQ ID NO: 1762863 - DNA, 15 bp, Homo sapiens
tacgtggagagcggg

SEQ ID NO: 1762864 - DNA, 15 bp, Homo sapiens
acgtggagagcgggc

SEQ ID NO: 1762865 - DNA, 15 bp, Homo sapiens
cgtggagagcgggca

SEQ ID NO: 1762866 - DNA, 15 bp, Homo sapiens
gtggagagcgggcag

SEQ ID NO: 1762867 - DNA, 15 bp, Homo sapiens
tggagagcgggcaga

SEQ ID NO: 1762868 - DNA, 15 bp, Homo sapiens
ggagagcgggcagat

SEQ ID NO: 1762869 - DNA, 15 bp, Homo sapiens
gagagcgggcagatc

SEQ ID NO: 1762870 - DNA, 15 bp, Homo sapiens
agagcgggcagatca

SEQ ID NO: 1762871 - DNA, 15 bp, Homo sapiens
gagcgggcagatcat

SEQ ID NO: 1762872 - DNA, 15 bp, Homo sapiens
agcgggcagatcatg

SEQ ID NO: 1762873 - DNA, 15 bp, Homo sapiens
gcgggcagatcatgt

SEQ ID NO: 1762874 - DNA, 15 bp, Homo sapiens
cgggcagatcatgtg

SEQ ID NO: 1762875 - DNA, 15 bp, Homo sapiens
gggcagatcatgtgc

SEQ ID NO: 1762876 - DNA, 15 bp, Homo sapiens
ggcagatcatgtgca

SEQ ID NO: 1762877 - DNA, 15 bp, Homo sapiens
gcagatcatgtgcat

SEQ ID NO: 1762878 - DNA, 15 bp, Homo sapiens
cagatcatgtgcatc

SEQ ID NO: 1762879 - DNA, 15 bp, Homo sapiens
agatcatgtgcatcc

SEQ ID NO: 1762880 - DNA, 15 bp, Homo sapiens
gatcatgtgcatcct

SEQ ID NO: 1762881 - DNA, 15 bp, Homo sapiens
atcatgtgcatccta

SEQ ID NO: 1762882 - DNA, 15 bp, Homo sapiens
tcatgtgcatcctag

SEQ ID NO: 1762883 - DNA, 15 bp, Homo sapiens
catgtgcatcctagg

SEQ ID NO: 1762884 - DNA, 15 bp, Homo sapiens
atgtgcatcctagga

SEQ ID NO: 1762885 - DNA, 15 bp, Homo sapiens
tgtgcatcctaggaa

SEQ ID NO: 1762886 - DNA, 15 bp, Homo sapiens
gtgcatcctaggaag

SEQ ID NO: 1762887 - DNA, 15 bp, Homo sapiens
tgcatcctaggaagc

SEQ ID NO: 1762888 - DNA, 15 bp, Homo sapiens
gcatcctaggaagct

SEQ ID NO: 1762889 - DNA, 15 bp, Homo sapiens
catcctaggaagctc

SEQ ID NO: 1762890 - DNA, 15 bp, Homo sapiens
atcctaggaagctca

SEQ ID NO: 1762891 - DNA, 15 bp, Homo sapiens
tcctaggaagctcag

SEQ ID NO: 1762892 - DNA, 15 bp, Homo sapiens
cctaggaagctcagg

SEQ ID NO: 1762893 - DNA, 15 bp, Homo sapiens
ctaggaagctcaggt

SEQ ID NO: 1762894 - DNA, 15 bp, Homo sapiens
taggaagctcaggta

SEQ ID NO: 1762895 - DNA, 15 bp, Homo sapiens
aggaagctcaggtaa

SEQ ID NO: 1762896 - DNA, 15 bp, Homo sapiens
ggaagctcaggtaag

SEQ ID NO: 1762897 - DNA, 15 bp, Homo sapiens
gaagctcaggtaagc

SEQ ID NO: 1762898 - DNA, 15 bp, Homo sapiens
aagctcaggtaagct

SEQ ID NO: 1762899 - DNA, 15 bp, Homo sapiens
agctcaggtaagctt

SEQ ID NO: 1762900 - DNA, 15 bp, Homo sapiens
gctcaggtaagcttg

SEQ ID NO: 1762901 - DNA, 15 bp, Homo sapiens
ctcaggtaagcttgg

SEQ ID NO: 1762902 - DNA, 15 bp, Homo sapiens
tcaggtaagcttggg

SEQ ID NO: 1762903 - DNA, 15 bp, Homo sapiens
caggtaagcttggga

SEQ ID NO: 1762904 - DNA, 15 bp, Homo sapiens
aggtaagcttgggaa

SEQ ID NO: 1762905 - DNA, 15 bp, Homo sapiens
ggtaagcttgggaag

SEQ ID NO: 1762906 - DNA, 15 bp, Homo sapiens
gtaagcttgggaagg

SEQ ID NO: 1762907 - DNA, 15 bp, Homo sapiens
taagcttgggaagga

SEQ ID NO: 1762908 - DNA, 15 bp, Homo sapiens
aagcttgggaaggag

SEQ ID NO: 1762909 - DNA, 15 bp, Homo sapiens
agcttgggaaggagg

SEQ ID NO: 1762910 - DNA, 15 bp, Homo sapiens
gcttgggaaggagga

SEQ ID NO: 1762911 - DNA, 15 bp, Homo sapiens
cttgggaaggaggat

SEQ ID NO: 1762912 - DNA, 15 bp, Homo sapiens
ttgggaaggaggatt

SEQ ID NO: 1762913 - DNA, 15 bp, Homo sapiens
tgggaaggaggattc

SEQ ID NO: 1762914 - DNA, 15 bp, Homo sapiens
gggaaggaggattct

SEQ ID NO: 1762915 - DNA, 15 bp, Homo sapiens
ggaaggaggattcta

SEQ ID NO: 1762916 - DNA, 15 bp, Homo sapiens
gaaggaggattctaa

SEQ ID NO: 1762917 - DNA, 15 bp, Homo sapiens
aaggaggattctaaa

SEQ ID NO: 1762918 - DNA, 15 bp, Homo sapiens
aggaggattctaaaa

SEQ ID NO: 1762919 - DNA, 15 bp, Homo sapiens
ggaggattctaaaaa

SEQ ID NO: 1762920 - DNA, 15 bp, Homo sapiens
gaggattctaaaaag

SEQ ID NO: 1762921 - DNA, 15 bp, Homo sapiens
aggattctaaaaagg

SEQ ID NO: 1762922 - DNA, 15 bp, Homo sapiens
ggattctaaaaagga

SEQ ID NO: 1762923 - DNA, 15 bp, Homo sapiens
gattctaaaaaggat

SEQ ID NO: 1762924 - DNA, 15 bp, Homo sapiens
attctaaaaaggatt

SEQ ID NO: 1762925 - DNA, 15 bp, Homo sapiens
ttctaaaaaggattt

SEQ ID NO: 1762926 - DNA, 15 bp, Homo sapiens
tctaaaaaggatttg

SEQ ID NO: 1762927 - DNA, 15 bp, Homo sapiens
ctaaaaaggatttgg

SEQ ID NO: 1762928 - DNA, 15 bp, Homo sapiens
taaaaaggatttggc

SEQ ID NO: 1762929 - DNA, 15 bp, Homo sapiens
aaaaaggatttggct

SEQ ID NO: 1762930 - DNA, 15 bp, Homo sapiens
aaaaggatttggctt

SEQ ID NO: 1762931 - DNA, 15 bp, Homo sapiens
aaaggatttggcttg

SEQ ID NO: 1762932 - DNA, 15 bp, Homo sapiens
aaggatttggcttga

SEQ ID NO: 1762933 - DNA, 15 bp, Homo sapiens
aggatttggcttgag

SEQ ID NO: 1762934 - DNA, 15 bp, Homo sapiens
ggatttggcttgagt

SEQ ID NO: 1762935 - DNA, 15 bp, Homo sapiens
gatttggcttgagtt

SEQ ID NO: 1762936 - DNA, 15 bp, Homo sapiens
atttggcttgagtta

SEQ ID NO: 1762937 - DNA, 15 bp, Homo sapiens
tttggcttgagttaa

SEQ ID NO: 1762938 - DNA, 15 bp, Homo sapiens
ttggcttgagttaaa

SEQ ID NO: 1762939 - DNA, 15 bp, Homo sapiens
tggcttgagttaaac

SEQ ID NO: 1762940 - DNA, 15 bp, Homo sapiens
ggcttgagttaaact

SEQ ID NO: 1762941 - DNA, 15 bp, Homo sapiens
gcttgagttaaactc

SEQ ID NO: 1762942 - DNA, 15 bp, Homo sapiens
cttgagttaaactcc

SEQ ID NO: 1762943 - DNA, 15 bp, Homo sapiens
ttgagttaaactcca

SEQ ID NO: 1762944 - DNA, 15 bp, Homo sapiens
tgagttaaactccac

SEQ ID NO: 1762945 - DNA, 15 bp, Homo sapiens
gagttaaactccaca

SEQ ID NO: 1762946 - DNA, 15 bp, Homo sapiens
agttaaactccacat

SEQ ID NO: 1762947 - DNA, 15 bp, Homo sapiens
gttaaactccacatt

SEQ ID NO: 1762948 - DNA, 15 bp, Homo sapiens
ttaaactccacattg

SEQ ID NO: 1762949 - DNA, 15 bp, Homo sapiens
taaactccacattga

SEQ ID NO: 1762950 - DNA, 15 bp, Homo sapiens
aaactccacattgaa

SEQ ID NO: 1762951 - DNA, 15 bp, Homo sapiens
aactccacattgaag

SEQ ID NO: 1762952 - DNA, 15 bp, Homo sapiens
actccacattgaaga

SEQ ID NO: 1762953 - DNA, 15 bp, Homo sapiens
ctccacattgaagaa

SEQ ID NO: 1762954 - DNA, 15 bp, Homo sapiens
tccacattgaagaaa

SEQ ID NO: 1762955 - DNA, 15 bp, Homo sapiens
ccacattgaagaaac

SEQ ID NO: 1762956 - DNA, 15 bp, Homo sapiens
cacattgaagaaaca

SEQ ID NO: 1762957 - DNA, 15 bp, Homo sapiens
acattgaagaaacag

SEQ ID NO: 1762958 - DNA, 15 bp, Homo sapiens
cattgaagaaacaga

SEQ ID NO: 1762959 - DNA, 15 bp, Homo sapiens
attgaagaaacagat

SEQ ID NO: 1762960 - DNA, 15 bp, Homo sapiens
ttgaagaaacagatt

SEQ ID NO: 1762961 - DNA, 15 bp, Homo sapiens
tgaagaaacagatta

SEQ ID NO: 1762962 - DNA, 15 bp, Homo sapiens
gaagaaacagattaa

SEQ ID NO: 1762963 - DNA, 15 bp, Homo sapiens
aagaaacagattaag

SEQ ID NO: 1762964 - DNA, 15 bp, Homo sapiens
agaaacagattaagt

SEQ ID NO: 1762965 - DNA, 15 bp, Homo sapiens
gaaacagattaagtt

SEQ ID NO: 1762966 - DNA, 15 bp, Homo sapiens
aaacagattaagttg

SEQ ID NO: 1762967 - DNA, 15 bp, Homo sapiens
aacagattaagttgt

SEQ ID NO: 1762968 - DNA, 15 bp, Homo sapiens
acagattaagttgta

SEQ ID NO: 1762969 - DNA, 15 bp, Homo sapiens
cagattaagttgtaa

SEQ ID NO: 1762970 - DNA, 15 bp, Homo sapiens
agattaagttgtaac

SEQ ID NO: 1762971 - DNA, 15 bp, Homo sapiens
gattaagttgtaaca

SEQ ID NO: 1762972 - DNA, 15 bp, Homo sapiens
attaagttgtaacaa

SEQ ID NO: 1762973 - DNA, 15 bp, Homo sapiens
ttaagttgtaacaag

SEQ ID NO: 1762974 - DNA, 15 bp, Homo sapiens
taagttgtaacaaga

SEQ ID NO: 1762975 - DNA, 15 bp, Homo sapiens
aagttgtaacaagaa

SEQ ID NO: 1762976 - DNA, 15 bp, Homo sapiens
agttgtaacaagaaa

SEQ ID NO: 1762977 - DNA, 15 bp, Homo sapiens
gttgtaacaagaaag

SEQ ID NO: 1762978 - DNA, 15 bp, Homo sapiens
ttgtaacaagaaagc

SEQ ID NO: 1762979 - DNA, 15 bp, Homo sapiens
tgtaacaagaaagcc

SEQ ID NO: 1762980 - DNA, 15 bp, Homo sapiens
gtaacaagaaagcca

SEQ ID NO: 1762981 - DNA, 15 bp, Homo sapiens
taacaagaaagccac

SEQ ID NO: 1762982 - DNA, 15 bp, Homo sapiens
aacaagaaagccaca

SEQ ID NO: 1762983 - DNA, 15 bp, Homo sapiens
acaagaaagccacag

SEQ ID NO: 1762984 - DNA, 15 bp, Homo sapiens
caagaaagccacagg

SEQ ID NO: 1762985 - DNA, 15 bp, Homo sapiens
aagaaagccacaggt

SEQ ID NO: 1762986 - DNA, 15 bp, Homo sapiens
agaaagccacaggtt

SEQ ID NO: 1762987 - DNA, 15 bp, Homo sapiens
gaaagccacaggttt

SEQ ID NO: 1762988 - DNA, 15 bp, Homo sapiens
aaagccacaggtttg

SEQ ID NO: 1762989 - DNA, 15 bp, Homo sapiens
aagccacaggtttga

SEQ ID NO: 1762990 - DNA, 15 bp, Homo sapiens
agccacaggtttgat

SEQ ID NO: 1762991 - DNA, 15 bp, Homo sapiens
gccacaggtttgata

SEQ ID NO: 1762992 - DNA, 15 bp, Homo sapiens
ccacaggtttgatat

SEQ ID NO: 1762993 - DNA, 15 bp, Homo sapiens
cacaggtttgatatt

SEQ ID NO: 1762994 - DNA, 15 bp, Homo sapiens
acaggtttgatatta

SEQ ID NO: 1762995 - DNA, 15 bp, Homo sapiens
caggtttgatattag

SEQ ID NO: 1762996 - DNA, 15 bp, Homo sapiens
aggtttgatattaga

SEQ ID NO: 1762997 - DNA, 15 bp, Homo sapiens
ggtttgatattagaa

SEQ ID NO: 1762998 - DNA, 15 bp, Homo sapiens
gtttgatattagaat

SEQ ID NO: 1762999 - DNA, 15 bp, Homo sapiens
tgatattagaatgaa

SEQ ID NO: 1763000 - DNA, 15 bp, Homo sapiens
gatattagaatgaat

SEQ ID NO: 1763001 - DNA, 15 bp, Homo sapiens
atattagaatgaatt

SEQ ID NO: 1763002 - DNA, 15 bp, Homo sapiens
tattagaatgaattc

SEQ ID NO: 1763003 - DNA, 15 bp, Homo sapiens
attagaatgaattct

SEQ ID NO: 1763004 - DNA, 15 bp, Homo sapiens
ttagaatgaattcta

SEQ ID NO: 1763005 - DNA, 15 bp, Homo sapiens
tagaatgaattctat

SEQ ID NO: 1763006 - DNA, 15 bp, Homo sapiens
agaatgaattctatt

SEQ ID NO: 1763007 - DNA, 15 bp, Homo sapiens
gaatgaattctattg

SEQ ID NO: 1763008 - DNA, 15 bp, Homo sapiens
aatgaattctattga

SEQ ID NO: 1763009 - DNA, 15 bp, Homo sapiens
atgaattctattgat

SEQ ID NO: 1763010 - DNA, 15 bp, Homo sapiens
tgaattctattgata

SEQ ID NO: 1763011 - DNA, 15 bp, Homo sapiens
gaattctattgatat

SEQ ID NO: 1763012 - DNA, 15 bp, Homo sapiens
aattctattgatatc

SEQ ID NO: 1763013 - DNA, 15 bp, Homo sapiens
attctattgatatct

SEQ ID NO: 1763014 - DNA, 15 bp, Homo sapiens
ttctattgatatctg

SEQ ID NO: 1763015 - DNA, 15 bp, Homo sapiens
tctattgatatctga

SEQ ID NO: 1763016 - DNA, 15 bp, Homo sapiens
ctattgatatctgac

SEQ ID NO: 1763017 - DNA, 15 bp, Homo sapiens
tattgatatctgact

SEQ ID NO: 1763018 - DNA, 15 bp, Homo sapiens
attgatatctgactg

SEQ ID NO: 1763019 - DNA, 15 bp, Homo sapiens
ttgatatctgactgt

SEQ ID NO: 1763020 - DNA, 15 bp, Homo sapiens
tgatatctgactgtg

SEQ ID NO: 1763021 - DNA, 15 bp, Homo sapiens
gatatctgactgtga

SEQ ID NO: 1763022 - DNA, 15 bp, Homo sapiens
atatctgactgtgaa

SEQ ID NO: 1763023 - DNA, 15 bp, Homo sapiens
tatctgactgtgaat

SEQ ID NO: 1763024 - DNA, 15 bp, Homo sapiens
atctgactgtgaatg

SEQ ID NO: 1763025 - DNA, 15 bp, Homo sapiens
tctgactgtgaatgg

SEQ ID NO: 1763026 - DNA, 15 bp, Homo sapiens
ctgactgtgaatgga

SEQ ID NO: 1763027 - DNA, 15 bp, Homo sapiens
tgactgtgaatggaa

SEQ ID NO: 1763028 - DNA, 15 bp, Homo sapiens
gactgtgaatggaac

SEQ ID NO: 1763029 - DNA, 15 bp, Homo sapiens
actgtgaatggaact

SEQ ID NO: 1763030 - DNA, 15 bp, Homo sapiens
ctgtgaatggaactg

SEQ ID NO: 1763031 - DNA, 15 bp, Homo sapiens
tgtgaatggaactgc

SEQ ID NO: 1763032 - DNA, 15 bp, Homo sapiens
gtgaatggaactgct

SEQ ID NO: 1763033 - DNA, 15 bp, Homo sapiens
tgaatggaactgcta

SEQ ID NO: 1763034 - DNA, 15 bp, Homo sapiens
gaatggaactgctac

SEQ ID NO: 1763035 - DNA, 15 bp, Homo sapiens
aatggaactgctacc

SEQ ID NO: 1763036 - DNA, 15 bp, Homo sapiens
atggaactgctacca

SEQ ID NO: 1763037 - DNA, 15 bp, Homo sapiens
tggaactgctaccaa

SEQ ID NO: 1763038 - DNA, 15 bp, Homo sapiens
ggaactgctaccaat

SEQ ID NO: 1763039 - DNA, 15 bp, Homo sapiens
gaactgctaccaatg

SEQ ID NO: 1763040 - DNA, 15 bp, Homo sapiens
aactgctaccaatgt

SEQ ID NO: 1763041 - DNA, 15 bp, Homo sapiens
actgctaccaatgtg

SEQ ID NO: 1763042 - DNA, 15 bp, Homo sapiens
ctgctaccaatgtga

SEQ ID NO: 1763043 - DNA, 15 bp, Homo sapiens
tgctaccaatgtgaa

SEQ ID NO: 1763044 - DNA, 15 bp, Homo sapiens
gctaccaatgtgaaa

SEQ ID NO: 1763045 - DNA, 15 bp, Homo sapiens
ctaccaatgtgaaat

SEQ ID NO: 1763046 - DNA, 15 bp, Homo sapiens
taccaatgtgaaatc

SEQ ID NO: 1763047 - DNA, 15 bp, Homo sapiens
accaatgtgaaatct

SEQ ID NO: 1763048 - DNA, 15 bp, Homo sapiens
ccaatgtgaaatctt

SEQ ID NO: 1763049 - DNA, 15 bp, Homo sapiens
caatgtgaaatcttt

SEQ ID NO: 1763050 - DNA, 15 bp, Homo sapiens
aatgtgaaatcttta

SEQ ID NO: 1763051 - DNA, 15 bp, Homo sapiens
atgtgaaatctttag

SEQ ID NO: 1763052 - DNA, 15 bp, Homo sapiens
tgtgaaatctttaga

SEQ ID NO: 1763053 - DNA, 15 bp, Homo sapiens
gtgaaatctttagaa

SEQ ID NO: 1763054 - DNA, 15 bp, Homo sapiens
tgaaatctttagaaa

SEQ ID NO: 1763055 - DNA, 15 bp, Homo sapiens
gaaatctttagaaag

SEQ ID NO: 1763056 - DNA, 15 bp, Homo sapiens
aaatctttagaaaga

SEQ ID NO: 1763057 - DNA, 15 bp, Homo sapiens
aatctttagaaagat

SEQ ID NO: 1763058 - DNA, 15 bp, Homo sapiens
atctttagaaagatc

SEQ ID NO: 1763059 - DNA, 15 bp, Homo sapiens
tctttagaaagatcc

SEQ ID NO: 1763060 - DNA, 15 bp, Homo sapiens
ctttagaaagatcct

SEQ ID NO: 1763061 - DNA, 15 bp, Homo sapiens
tttagaaagatcctt

SEQ ID NO: 1763062 - DNA, 15 bp, Homo sapiens
ttagaaagatccttg

SEQ ID NO: 1763063 - DNA, 15 bp, Homo sapiens
tagaaagatccttga

SEQ ID NO: 1763064 - DNA, 15 bp, Homo sapiens
agaaagatccttgaa

SEQ ID NO: 1763065 - DNA, 15 bp, Homo sapiens
gaaagatccttgaaa

SEQ ID NO: 1763066 - DNA, 15 bp, Homo sapiens
aaagatccttgaaag

SEQ ID NO: 1763067 - DNA, 15 bp, Homo sapiens
aagatccttgaaaga

SEQ ID NO: 1763068 - DNA, 15 bp, Homo sapiens
agatccttgaaagag

SEQ ID NO: 1763069 - DNA, 15 bp, Homo sapiens
gatccttgaaagagt

SEQ ID NO: 1763070 - DNA, 15 bp, Homo sapiens
atccttgaaagagta

SEQ ID NO: 1763071 - DNA, 15 bp, Homo sapiens
tccttgaaagagtat

SEQ ID NO: 1763072 - DNA, 15 bp, Homo sapiens
ccttgaaagagtata

SEQ ID NO: 1763073 - DNA, 15 bp, Homo sapiens
cttgaaagagtataa

SEQ ID NO: 1763074 - DNA, 15 bp, Homo sapiens
ttgaaagagtataaa

SEQ ID NO: 1763075 - DNA, 15 bp, Homo sapiens
tgaaagagtataaaa

SEQ ID NO: 1763076 - DNA, 15 bp, Homo sapiens
gaaagagtataaaat

SEQ ID NO: 1763077 - DNA, 15 bp, Homo sapiens
aaagagtataaaatt

SEQ ID NO: 1763078 - DNA, 15 bp, Homo sapiens
aagagtataaaattc

SEQ ID NO: 1763079 - DNA, 15 bp, Homo sapiens
agagtataaaattct

SEQ ID NO: 1763080 - DNA, 15 bp, Homo sapiens
gagtataaaattctg

SEQ ID NO: 1763081 - DNA, 15 bp, Homo sapiens
agtataaaattctgc

SEQ ID NO: 1763082 - DNA, 15 bp, Homo sapiens
gtataaaattctgcc

SEQ ID NO: 1763083 - DNA, 15 bp, Homo sapiens
tataaaattctgcct

SEQ ID NO: 1763084 - DNA, 15 bp, Homo sapiens
ataaaattctgccta

SEQ ID NO: 1763085 - DNA, 15 bp, Homo sapiens
taaaattctgcctaa

SEQ ID NO: 1763086 - DNA, 15 bp, Homo sapiens
aaaattctgcctaac

SEQ ID NO: 1763087 - DNA, 15 bp, Homo sapiens
aaattctgcctaaca

SEQ ID NO: 1763088 - DNA, 15 bp, Homo sapiens
aattctgcctaacat

SEQ ID NO: 1763089 - DNA, 15 bp, Homo sapiens
attctgcctaacatg

SEQ ID NO: 1763090 - DNA, 15 bp, Homo sapiens
ttctgcctaacatgt

SEQ ID NO: 1763091 - DNA, 15 bp, Homo sapiens
tctgcctaacatgta

SEQ ID NO: 1763092 - DNA, 15 bp, Homo sapiens
ctgcctaacatgtac

SEQ ID NO: 1763093 - DNA, 15 bp, Homo sapiens
tgcctaacatgtacg

SEQ ID NO: 1763094 - DNA, 15 bp, Homo sapiens
gcctaacatgtacgt

SEQ ID NO: 1763095 - DNA, 15 bp, Homo sapiens
cctaacatgtacgtg

SEQ ID NO: 1763096 - DNA, 15 bp, Homo sapiens
ctaacatgtacgtga

SEQ ID NO: 1763097 - DNA, 15 bp, Homo sapiens
taacatgtacgtgaa

SEQ ID NO: 1763098 - DNA, 15 bp, Homo sapiens
aacatgtacgtgaat

SEQ ID NO: 1763099 - DNA, 15 bp, Homo sapiens
acatgtacgtgaatt

SEQ ID NO: 1763100 - DNA, 15 bp, Homo sapiens
catgtacgtgaattc

SEQ ID NO: 1763101 - DNA, 15 bp, Homo sapiens
atgtacgtgaattca

SEQ ID NO: 1763102 - DNA, 15 bp, Homo sapiens
tgtacgtgaattcat

SEQ ID NO: 1763103 - DNA, 15 bp, Homo sapiens
gtacgtgaattcata

SEQ ID NO: 1763104 - DNA, 15 bp, Homo sapiens
tacgtgaattcatat

SEQ ID NO: 1763105 - DNA, 15 bp, Homo sapiens
acgtgaattcatatt

SEQ ID NO: 1763106 - DNA, 15 bp, Homo sapiens
cgtgaattcatattt

SEQ ID NO: 1763107 - DNA, 15 bp, Homo sapiens
gtgaattcatatttc

SEQ ID NO: 1763108 - DNA, 15 bp, Homo sapiens
tgaattcatatttca

SEQ ID NO: 1763109 - DNA, 15 bp, Homo sapiens
gaattcatatttcaa

SEQ ID NO: 1763110 - DNA, 15 bp, Homo sapiens
aattcatatttcaaa

SEQ ID NO: 1763111 - DNA, 15 bp, Homo sapiens
attcatatttcaaaa

SEQ ID NO: 1763112 - DNA, 15 bp, Homo sapiens
ttcatatttcaaaat

SEQ ID NO: 1763113 - DNA, 15 bp, Homo sapiens
tcatatttcaaaata

SEQ ID NO: 1763114 - DNA, 15 bp, Homo sapiens
catatttcaaaatat

SEQ ID NO: 1763115 - DNA, 15 bp, Homo sapiens
atatttcaaaatata

SEQ ID NO: 1763116 - DNA, 15 bp, Homo sapiens
tatttcaaaatataa

SEQ ID NO: 1763117 - DNA, 15 bp, Homo sapiens
atttcaaaatataaa

SEQ ID NO: 1763118 - DNA, 15 bp, Homo sapiens
tttcaaaatataaaa

SEQ ID NO: 1763119 - DNA, 15 bp, Homo sapiens
ttcaaaatataaaaa

SEQ ID NO: 1763120 - DNA, 15 bp, Homo sapiens
tcaaaatataaaaag

SEQ ID NO: 1763121 - DNA, 15 bp, Homo sapiens
caaaatataaaaagc

SEQ ID NO: 1763122 - DNA, 15 bp, Homo sapiens
aaaatataaaaagcc

SEQ ID NO: 1763123 - DNA, 15 bp, Homo sapiens
aaatataaaaagccc

SEQ ID NO: 1763124 - DNA, 15 bp, Homo sapiens
aatataaaaagcccc

SEQ ID NO: 1763125 - DNA, 15 bp, Homo sapiens
atataaaaagccccc

SEQ ID NO: 1763126 - DNA, 15 bp, Homo sapiens
tataaaaagccccca

SEQ ID NO: 1763127 - DNA, 15 bp, Homo sapiens
ataaaaagcccccac

SEQ ID NO: 1763128 - DNA, 15 bp, Homo sapiens
taaaaagcccccaca

SEQ ID NO: 1763129 - DNA, 15 bp, Homo sapiens
aaaaagcccccacag

SEQ ID NO: 1763130 - DNA, 15 bp, Homo sapiens
aaaagcccccacagt

SEQ ID NO: 1763131 - DNA, 15 bp, Homo sapiens
aaagcccccacagtt

SEQ ID NO: 1763132 - DNA, 15 bp, Homo sapiens
aagcccccacagttc

SEQ ID NO: 1763133 - DNA, 15 bp, Homo sapiens
agcccccacagttcc

SEQ ID NO: 1763134 - DNA, 15 bp, Homo sapiens
gcccccacagttcca

SEQ ID NO: 1763135 - DNA, 15 bp, Homo sapiens
cccccacagttccat

SEQ ID NO: 1763136 - DNA, 15 bp, Homo sapiens
ccccacagttccatg

SEQ ID NO: 1763137 - DNA, 15 bp, Homo sapiens
cccacagttccatgg

SEQ ID NO: 1763138 - DNA, 15 bp, Homo sapiens
ccacagttccatggc

SEQ ID NO: 1763139 - DNA, 15 bp, Homo sapiens
cacagttccatggca

SEQ ID NO: 1763140 - DNA, 15 bp, Homo sapiens
acagttccatggcat

SEQ ID NO: 1763141 - DNA, 15 bp, Homo sapiens
cagttccatggcata

SEQ ID NO: 1763142 - DNA, 15 bp, Homo sapiens
agttccatggcatat

SEQ ID NO: 1763143 - DNA, 15 bp, Homo sapiens
gttccatggcatata

SEQ ID NO: 1763144 - DNA, 15 bp, Homo sapiens
ttccatggcatataa

SEQ ID NO: 1763145 - DNA, 15 bp, Homo sapiens
tccatggcatataaa

SEQ ID NO: 1763146 - DNA, 15 bp, Homo sapiens
ccatggcatataaaa

SEQ ID NO: 1763147 - DNA, 15 bp, Homo sapiens
catggcatataaaag

SEQ ID NO: 1763148 - DNA, 15 bp, Homo sapiens
atggcatataaaagt

SEQ ID NO: 1763149 - DNA, 15 bp, Homo sapiens
tggcatataaaagta

SEQ ID NO: 1763150 - DNA, 15 bp, Homo sapiens
ggcatataaaagtac

SEQ ID NO: 1763151 - DNA, 15 bp, Homo sapiens
gcatataaaagtact

SEQ ID NO: 1763152 - DNA, 15 bp, Homo sapiens
catataaaagtactc

SEQ ID NO: 1763153 - DNA, 15 bp, Homo sapiens
atataaaagtactca

SEQ ID NO: 1763154 - DNA, 15 bp, Homo sapiens
tataaaagtactcag

SEQ ID NO: 1763155 - DNA, 15 bp, Homo sapiens
ataaaagtactcagg

SEQ ID NO: 1763156 - DNA, 15 bp, Homo sapiens
taaaagtactcagga

SEQ ID NO: 1763157 - DNA, 15 bp, Homo sapiens
aaaagtactcaggaa

SEQ ID NO: 1763158 - DNA, 15 bp, Homo sapiens
aaagtactcaggaaa

SEQ ID NO: 1763159 - DNA, 15 bp, Homo sapiens
aagtactcaggaaac

SEQ ID NO: 1763160 - DNA, 15 bp, Homo sapiens
agtactcaggaaaca

SEQ ID NO: 1763161 - DNA, 15 bp, Homo sapiens
gtactcaggaaacac

SEQ ID NO: 1763162 - DNA, 15 bp, Homo sapiens
tactcaggaaacaca

SEQ ID NO: 1763163 - DNA, 15 bp, Homo sapiens
actcaggaaacacaa

SEQ ID NO: 1763164 - DNA, 15 bp, Homo sapiens
ctcaggaaacacaat

SEQ ID NO: 1763165 - DNA, 15 bp, Homo sapiens
tcaggaaacacaatt

SEQ ID NO: 1763166 - DNA, 15 bp, Homo sapiens
caggaaacacaattt

SEQ ID NO: 1763167 - DNA, 15 bp, Homo sapiens
aggaaacacaatttc

SEQ ID NO: 1763168 - DNA, 15 bp, Homo sapiens
ggaaacacaatttcc

SEQ ID NO: 1763169 - DNA, 15 bp, Homo sapiens
gaaacacaatttccc

SEQ ID NO: 1763170 - DNA, 15 bp, Homo sapiens
aaacacaatttcccc

SEQ ID NO: 1763171 - DNA, 15 bp, Homo sapiens
aacacaatttcccct

SEQ ID NO: 1763172 - DNA, 15 bp, Homo sapiens
acacaatttccccta

SEQ ID NO: 1763173 - DNA, 15 bp, Homo sapiens
cacaatttcccctat

SEQ ID NO: 1763174 - DNA, 15 bp, Homo sapiens
acaatttcccctatc

SEQ ID NO: 1763175 - DNA, 15 bp, Homo sapiens
caatttcccctatct

SEQ ID NO: 1763176 - DNA, 15 bp, Homo sapiens
aatttcccctatctg

SEQ ID NO: 1763177 - DNA, 15 bp, Homo sapiens
atttcccctatctgt

SEQ ID NO: 1763178 - DNA, 15 bp, Homo sapiens
tttcccctatctgta

SEQ ID NO: 1763179 - DNA, 15 bp, Homo sapiens
ttcccctatctgtac

SEQ ID NO: 1763180 - DNA, 15 bp, Homo sapiens
tcccctatctgtaca

SEQ ID NO: 1763181 - DNA, 15 bp, Homo sapiens
cccctatctgtacac

SEQ ID NO: 1763182 - DNA, 15 bp, Homo sapiens
ccctatctgtacact

SEQ ID NO: 1763183 - DNA, 15 bp, Homo sapiens
cctatctgtacactg

SEQ ID NO: 1763184 - DNA, 15 bp, Homo sapiens
ctatctgtacactgc

SEQ ID NO: 1763185 - DNA, 15 bp, Homo sapiens
tatctgtacactgcc

SEQ ID NO: 1763186 - DNA, 15 bp, Homo sapiens
atctgtacactgcct

SEQ ID NO: 1763187 - DNA, 15 bp, Homo sapiens
tctgtacactgccta

SEQ ID NO: 1763188 - DNA, 15 bp, Homo sapiens
ctgtacactgcctag

SEQ ID NO: 1763189 - DNA, 15 bp, Homo sapiens
tgtacactgcctaga

SEQ ID NO: 1763190 - DNA, 15 bp, Homo sapiens
gtacactgcctagag

SEQ ID NO: 1763191 - DNA, 15 bp, Homo sapiens
tacactgcctagaga

SEQ ID NO: 1763192 - DNA, 15 bp, Homo sapiens
acactgcctagagac

SEQ ID NO: 1763193 - DNA, 15 bp, Homo sapiens
cactgcctagagaca

SEQ ID NO: 1763194 - DNA, 15 bp, Homo sapiens
actgcctagagacag

SEQ ID NO: 1763195 - DNA, 15 bp, Homo sapiens
ctgcctagagacagg

SEQ ID NO: 1763196 - DNA, 15 bp, Homo sapiens
tgcctagagacagga

SEQ ID NO: 1763197 - DNA, 15 bp, Homo sapiens
gcctagagacaggaa

SEQ ID NO: 1763198 - DNA, 15 bp, Homo sapiens
cctagagacaggaaa

SEQ ID NO: 1763199 - DNA, 15 bp, Homo sapiens
ctagagacaggaaaa

SEQ ID NO: 1763200 - DNA, 15 bp, Homo sapiens
tagagacaggaaaag

SEQ ID NO: 1763201 - DNA, 15 bp, Homo sapiens
agagacaggaaaagg

SEQ ID NO: 1763202 - DNA, 15 bp, Homo sapiens
gagacaggaaaagga

SEQ ID NO: 1763203 - DNA, 15 bp, Homo sapiens
agacaggaaaaggat

SEQ ID NO: 1763204 - DNA, 15 bp, Homo sapiens
gacaggaaaaggatt

SEQ ID NO: 1763205 - DNA, 15 bp, Homo sapiens
acaggaaaaggatta

SEQ ID NO: 1763206 - DNA, 15 bp, Homo sapiens
caggaaaaggattaa

SEQ ID NO: 1763207 - DNA, 15 bp, Homo sapiens
aggaaaaggattaaa

SEQ ID NO: 1763208 - DNA, 15 bp, Homo sapiens
ggaaaaggattaaat

SEQ ID NO: 1763209 - DNA, 15 bp, Homo sapiens
gaaaaggattaaata

SEQ ID NO: 1763210 - DNA, 15 bp, Homo sapiens
aaaaggattaaataa

SEQ ID NO: 1763211 - DNA, 15 bp, Homo sapiens
aaaggattaaataag

SEQ ID NO: 1763212 - DNA, 15 bp, Homo sapiens
aaggattaaataagc

SEQ ID NO: 1763213 - DNA, 15 bp, Homo sapiens
aggattaaataagca

SEQ ID NO: 1763214 - DNA, 15 bp, Homo sapiens
ggattaaataagcac

SEQ ID NO: 1763215 - DNA, 15 bp, Homo sapiens
gattaaataagcaca

SEQ ID NO: 1763216 - DNA, 15 bp, Homo sapiens
attaaataagcacaa

SEQ ID NO: 1763217 - DNA, 15 bp, Homo sapiens
ttaaataagcacaaa

SEQ ID NO: 1763218 - DNA, 15 bp, Homo sapiens
taaataagcacaaaa

SEQ ID NO: 1763219 - DNA, 15 bp, Homo sapiens
aaataagcacaaaaa

SEQ ID NO: 1763220 - DNA, 15 bp, Homo sapiens
aataagcacaaaaat

SEQ ID NO: 1763221 - DNA, 15 bp, Homo sapiens
ataagcacaaaaatg

SEQ ID NO: 1763222 - DNA, 15 bp, Homo sapiens
taagcacaaaaatgc

SEQ ID NO: 1763223 - DNA, 15 bp, Homo sapiens
aagcacaaaaatgcc

SEQ ID NO: 1763224 - DNA, 15 bp, Homo sapiens
agcacaaaaatgccc

SEQ ID NO: 1763225 - DNA, 15 bp, Homo sapiens
gcacaaaaatgccca

SEQ ID NO: 1763226 - DNA, 15 bp, Homo sapiens
cacaaaaatgcccat

SEQ ID NO: 1763227 - DNA, 15 bp, Homo sapiens
acaaaaatgcccatt

SEQ ID NO: 1763228 - DNA, 15 bp, Homo sapiens
caaaaatgcccatta

SEQ ID NO: 1763229 - DNA, 15 bp, Homo sapiens
aaaaatgcccattaa

SEQ ID NO: 1763230 - DNA, 15 bp, Homo sapiens
aaaatgcccattaag

SEQ ID NO: 1763231 - DNA, 15 bp, Homo sapiens
aaatgcccattaagc

SEQ ID NO: 1763232 - DNA, 15 bp, Homo sapiens
aatgcccattaagcc

SEQ ID NO: 1763233 - DNA, 15 bp, Homo sapiens
atgcccattaagccc

SEQ ID NO: 1763234 - DNA, 15 bp, Homo sapiens
tgcccattaagcccc

SEQ ID NO: 1763235 - DNA, 15 bp, Homo sapiens
gcccattaagcccct

SEQ ID NO: 1763236 - DNA, 15 bp, Homo sapiens
cccattaagccccta

SEQ ID NO: 1763237 - DNA, 15 bp, Homo sapiens
ccattaagcccctat

SEQ ID NO: 1763238 - DNA, 15 bp, Homo sapiens
cattaagcccctatc

SEQ ID NO: 1763239 - DNA, 15 bp, Homo sapiens
attaagcccctatct

SEQ ID NO: 1763240 - DNA, 15 bp, Homo sapiens
ttaagcccctatctt

SEQ ID NO: 1763241 - DNA, 15 bp, Homo sapiens
taagcccctatcttt

SEQ ID NO: 1763242 - DNA, 15 bp, Homo sapiens
aagcccctatctttg

SEQ ID NO: 1763243 - DNA, 15 bp, Homo sapiens
agcccctatctttga

SEQ ID NO: 1763244 - DNA, 15 bp, Homo sapiens
gcccctatctttgat

SEQ ID NO: 1763245 - DNA, 15 bp, Homo sapiens
cccctatctttgatt

SEQ ID NO: 1763246 - DNA, 15 bp, Homo sapiens
ccctatctttgattc

SEQ ID NO: 1763247 - DNA, 15 bp, Homo sapiens
cctatctttgattcc

SEQ ID NO: 1763248 - DNA, 15 bp, Homo sapiens
ctatctttgattcca

SEQ ID NO: 1763249 - DNA, 15 bp, Homo sapiens
tatctttgattccag

SEQ ID NO: 1763250 - DNA, 15 bp, Homo sapiens
atctttgattccagt

SEQ ID NO: 1763251 - DNA, 15 bp, Homo sapiens
tctttgattccagtg

SEQ ID NO: 1763252 - DNA, 15 bp, Homo sapiens
ctttgattccagtgg

SEQ ID NO: 1763253 - DNA, 15 bp, Homo sapiens
tttgattccagtggt

SEQ ID NO: 1763254 - DNA, 15 bp, Homo sapiens
ttgattccagtggtg

SEQ ID NO: 1763255 - DNA, 15 bp, Homo sapiens
tgattccagtggtgc

SEQ ID NO: 1763256 - DNA, 15 bp, Homo sapiens
gattccagtggtgct

SEQ ID NO: 1763257 - DNA, 15 bp, Homo sapiens
attccagtggtgctt

SEQ ID NO: 1763258 - DNA, 15 bp, Homo sapiens
ttccagtggtgcttt

SEQ ID NO: 1763259 - DNA, 15 bp, Homo sapiens
tccagtggtgctttt

SEQ ID NO: 1763260 - DNA, 15 bp, Homo sapiens
ccagtggtgcttttt

SEQ ID NO: 1763261 - DNA, 15 bp, Homo sapiens
cagtggtgctttttt

SEQ ID NO: 1763262 - DNA, 15 bp, Homo sapiens
agtggtgctttttta

SEQ ID NO: 1763263 - DNA, 15 bp, Homo sapiens
gtggtgcttttttat

SEQ ID NO: 1763264 - DNA, 15 bp, Homo sapiens
tggtgcttttttatg

SEQ ID NO: 1763265 - DNA, 15 bp, Homo sapiens
ggtgcttttttatga

SEQ ID NO: 1763266 - DNA, 15 bp, Homo sapiens
gtgcttttttatgat

SEQ ID NO: 1763267 - DNA, 15 bp, Homo sapiens
tgcttttttatgatg

SEQ ID NO: 1763268 - DNA, 15 bp, Homo sapiens
gcttttttatgatgg

SEQ ID NO: 1763269 - DNA, 15 bp, Homo sapiens
cttttttatgatggt

SEQ ID NO: 1763270 - DNA, 15 bp, Homo sapiens
ttttttatgatggta

SEQ ID NO: 1763271 - DNA, 15 bp, Homo sapiens
tttttatgatggtat

SEQ ID NO: 1763272 - DNA, 15 bp, Homo sapiens
ttttatgatggtata

SEQ ID NO: 1763273 - DNA, 15 bp, Homo sapiens
tttatgatggtatat

SEQ ID NO: 1763274 - DNA, 15 bp, Homo sapiens
ttatgatggtatatt

SEQ ID NO: 1763275 - DNA, 15 bp, Homo sapiens
tatgatggtatattt

SEQ ID NO: 1763276 - DNA, 15 bp, Homo sapiens
atgatggtatatttt

SEQ ID NO: 1763277 - DNA, 15 bp, Homo sapiens
tgatggtatattttg

SEQ ID NO: 1763278 - DNA, 15 bp, Homo sapiens
gatggtatattttgg

SEQ ID NO: 1763279 - DNA, 15 bp, Homo sapiens
atggtatattttgga

SEQ ID NO: 1763280 - DNA, 15 bp, Homo sapiens
tggtatattttggac

SEQ ID NO: 1763281 - DNA, 15 bp, Homo sapiens
ggtatattttggaca

SEQ ID NO: 1763282 - DNA, 15 bp, Homo sapiens
gtatattttggacat

SEQ ID NO: 1763283 - DNA, 15 bp, Homo sapiens
tatattttggacata

SEQ ID NO: 1763284 - DNA, 15 bp, Homo sapiens
atattttggacatac

SEQ ID NO: 1763285 - DNA, 15 bp, Homo sapiens
tattttggacataca

SEQ ID NO: 1763286 - DNA, 15 bp, Homo sapiens
attttggacatacaa

SEQ ID NO: 1763287 - DNA, 15 bp, Homo sapiens
ttttggacatacaat

SEQ ID NO: 1763288 - DNA, 15 bp, Homo sapiens
tttggacatacaatc

SEQ ID NO: 1763289 - DNA, 15 bp, Homo sapiens
ttggacatacaatca

SEQ ID NO: 1763290 - DNA, 15 bp, Homo sapiens
tggacatacaatcaa

SEQ ID NO: 1763291 - DNA, 15 bp, Homo sapiens
ggacatacaatcaag

SEQ ID NO: 1763292 - DNA, 15 bp, Homo sapiens
gacatacaatcaaga

SEQ ID NO: 1763293 - DNA, 15 bp, Homo sapiens
acatacaatcaagaa

SEQ ID NO: 1763294 - DNA, 15 bp, Homo sapiens
catacaatcaagaat

SEQ ID NO: 1763295 - DNA, 15 bp, Homo sapiens
atacaatcaagaata

SEQ ID NO: 1763296 - DNA, 15 bp, Homo sapiens
tacaatcaagaatag

SEQ ID NO: 1763297 - DNA, 15 bp, Homo sapiens
acaatcaagaataga

SEQ ID NO: 1763298 - DNA, 15 bp, Homo sapiens
caatcaagaatagag

SEQ ID NO: 1763299 - DNA, 15 bp, Homo sapiens
aatcaagaatagaga

SEQ ID NO: 1763300 - DNA, 15 bp, Homo sapiens
atcaagaatagagaa

SEQ ID NO: 1763301 - DNA, 15 bp, Homo sapiens
tcaagaatagagaat

SEQ ID NO: 1763302 - DNA, 15 bp, Homo sapiens
caagaatagagaata

SEQ ID NO: 1763303 - DNA, 15 bp, Homo sapiens
aagaatagagaatag

SEQ ID NO: 1763304 - DNA, 15 bp, Homo sapiens
agaatagagaatagg

SEQ ID NO: 1763305 - DNA, 15 bp, Homo sapiens
gaatagagaataggc

SEQ ID NO: 1763306 - DNA, 15 bp, Homo sapiens
aatagagaataggct

SEQ ID NO: 1763307 - DNA, 15 bp, Homo sapiens
atagagaataggctg

SEQ ID NO: 1763308 - DNA, 15 bp, Homo sapiens
tagagaataggctgg

SEQ ID NO: 1763309 - DNA, 15 bp, Homo sapiens
agagaataggctggt

SEQ ID NO: 1763310 - DNA, 15 bp, Homo sapiens
gagaataggctggtc

SEQ ID NO: 1763311 - DNA, 15 bp, Homo sapiens
agaataggctggtca

SEQ ID NO: 1763312 - DNA, 15 bp, Homo sapiens
gaataggctggtcac

SEQ ID NO: 1763313 - DNA, 15 bp, Homo sapiens
aataggctggtcaca

SEQ ID NO: 1763314 - DNA, 15 bp, Homo sapiens
ataggctggtcacag

SEQ ID NO: 1763315 - DNA, 15 bp, Homo sapiens
taggctggtcacagt

SEQ ID NO: 1763316 - DNA, 15 bp, Homo sapiens
aggctggtcacagtg

SEQ ID NO: 1763317 - DNA, 15 bp, Homo sapiens
ggctggtcacagtgg

SEQ ID NO: 1763318 - DNA, 15 bp, Homo sapiens
gctggtcacagtggc

SEQ ID NO: 1763319 - DNA, 15 bp, Homo sapiens
ctggtcacagtggct

SEQ ID NO: 1763320 - DNA, 15 bp, Homo sapiens
tggtcacagtggctt

SEQ ID NO: 1763321 - DNA, 15 bp, Homo sapiens
ggtcacagtggctta

SEQ ID NO: 1763322 - DNA, 15 bp, Homo sapiens
gtcacagtggcttat

SEQ ID NO: 1763323 - DNA, 15 bp, Homo sapiens
tcacagtggcttatg

SEQ ID NO: 1763324 - DNA, 15 bp, Homo sapiens
cacagtggcttatga

SEQ ID NO: 1763325 - DNA, 15 bp, Homo sapiens
acagtggcttatgac

SEQ ID NO: 1763326 - DNA, 15 bp, Homo sapiens
cagtggcttatgact

SEQ ID NO: 1763327 - DNA, 15 bp, Homo sapiens
agtggcttatgactg

SEQ ID NO: 1763328 - DNA, 15 bp, Homo sapiens
gtggcttatgactgt

SEQ ID NO: 1763329 - DNA, 15 bp, Homo sapiens
tggcttatgactgta

SEQ ID NO: 1763330 - DNA, 15 bp, Homo sapiens
ggcttatgactgtaa

SEQ ID NO: 1763331 - DNA, 15 bp, Homo sapiens
gcttatgactgtaat

SEQ ID NO: 1763332 - DNA, 15 bp, Homo sapiens
cttatgactgtaatc

SEQ ID NO: 1763333 - DNA, 15 bp, Homo sapiens
ttatgactgtaatcc

SEQ ID NO: 1763334 - DNA, 15 bp, Homo sapiens
tatgactgtaatccc

SEQ ID NO: 1763335 - DNA, 15 bp, Homo sapiens
actgtaatcccagca

SEQ ID NO: 1763336 - DNA, 15 bp, Homo sapiens
ctgtaatcccagcag

SEQ ID NO: 1763337 - DNA, 15 bp, Homo sapiens
tgtaatcccagcagc

SEQ ID NO: 1763338 - DNA, 15 bp, Homo sapiens
gtaatcccagcagct

SEQ ID NO: 1763339 - DNA, 15 bp, Homo sapiens
taatcccagcagctt

SEQ ID NO: 1763340 - DNA, 15 bp, Homo sapiens
aatcccagcagcttg

SEQ ID NO: 1763341 - DNA, 15 bp, Homo sapiens
atcccagcagcttga

SEQ ID NO: 1763342 - DNA, 15 bp, Homo sapiens
cccagcagcttgaga

SEQ ID NO: 1763343 - DNA, 15 bp, Homo sapiens
ccagcagcttgagag

SEQ ID NO: 1763344 - DNA, 15 bp, Homo sapiens
cagcagcttgagagg

SEQ ID NO: 1763345 - DNA, 15 bp, Homo sapiens
agcagcttgagaggc

SEQ ID NO: 1763346 - DNA, 15 bp, Homo sapiens
gcagcttgagaggct

SEQ ID NO: 1763347 - DNA, 15 bp, Homo sapiens
cagcttgagaggctg

SEQ ID NO: 1763348 - DNA, 15 bp, Homo sapiens
agcttgagaggctga

SEQ ID NO: 1763349 - DNA, 15 bp, Homo sapiens
gcttgagaggctgag

SEQ ID NO: 1763350 - DNA, 15 bp, Homo sapiens
cttgagaggctgagg

SEQ ID NO: 1763351 - DNA, 15 bp, Homo sapiens
ttgagaggctgaggt

SEQ ID NO: 1763352 - DNA, 15 bp, Homo sapiens
tgagaggctgaggtg

SEQ ID NO: 1763353 - DNA, 15 bp, Homo sapiens
gagaggctgaggtga

SEQ ID NO: 1763354 - DNA, 15 bp, Homo sapiens
agaggctgaggtgag

SEQ ID NO: 1763355 - DNA, 15 bp, Homo sapiens
tgaggtgagaggatt

SEQ ID NO: 1763356 - DNA, 15 bp, Homo sapiens
gaggtgagaggattg

SEQ ID NO: 1763357 - DNA, 15 bp, Homo sapiens
aggtgagaggattgc

SEQ ID NO: 1763358 - DNA, 15 bp, Homo sapiens
ggtgagaggattgct

SEQ ID NO: 1763359 - DNA, 15 bp, Homo sapiens
gtgagaggattgctt

SEQ ID NO: 1763360 - DNA, 15 bp, Homo sapiens
tgagaggattgcttg

SEQ ID NO: 1763361 - DNA, 15 bp, Homo sapiens
gagaggattgcttga

SEQ ID NO: 1763362 - DNA, 15 bp, Homo sapiens
agaggattgcttgag

SEQ ID NO: 1763363 - DNA, 15 bp, Homo sapiens
ccaggagttcgagag

SEQ ID NO: 1763364 - DNA, 15 bp, Homo sapiens
caggagttcgagagc

SEQ ID NO: 1763365 - DNA, 15 bp, Homo sapiens
aggagttcgagagca

SEQ ID NO: 1763366 - DNA, 15 bp, Homo sapiens
ggagttcgagagcaa

SEQ ID NO: 1763367 - DNA, 15 bp, Homo sapiens
gagttcgagagcaac

SEQ ID NO: 1763368 - DNA, 15 bp, Homo sapiens
agttcgagagcaacc

SEQ ID NO: 1763369 - DNA, 15 bp, Homo sapiens
gttcgagagcaacct

SEQ ID NO: 1763370 - DNA, 15 bp, Homo sapiens
ttcgagagcaaccta

SEQ ID NO: 1763371 - DNA, 15 bp, Homo sapiens
tcgagagcaacctaa

SEQ ID NO: 1763372 - DNA, 15 bp, Homo sapiens
cgagagcaacctaag

SEQ ID NO: 1763373 - DNA, 15 bp, Homo sapiens
gagagcaacctaagc

SEQ ID NO: 1763374 - DNA, 15 bp, Homo sapiens
agagcaacctaagca

SEQ ID NO: 1763375 - DNA, 15 bp, Homo sapiens
gagcaacctaagcaa

SEQ ID NO: 1763376 - DNA, 15 bp, Homo sapiens
agcaacctaagcaac

SEQ ID NO: 1763377 - DNA, 15 bp, Homo sapiens
gcaacctaagcaaca

SEQ ID NO: 1763378 - DNA, 15 bp, Homo sapiens
caacctaagcaacat

SEQ ID NO: 1763379 - DNA, 15 bp, Homo sapiens
aacctaagcaacata

SEQ ID NO: 1763380 - DNA, 15 bp, Homo sapiens
acctaagcaacatag

SEQ ID NO: 1763381 - DNA, 15 bp, Homo sapiens
cctaagcaacatagt

SEQ ID NO: 1763382 - DNA, 15 bp, Homo sapiens
ctaagcaacatagtg

SEQ ID NO: 1763383 - DNA, 15 bp, Homo sapiens
taagcaacatagtgg

SEQ ID NO: 1763384 - DNA, 15 bp, Homo sapiens
aagcaacatagtggg

SEQ ID NO: 1763385 - DNA, 15 bp, Homo sapiens
agcaacatagtggga

SEQ ID NO: 1763386 - DNA, 15 bp, Homo sapiens
gcaacatagtgggac

SEQ ID NO: 1763387 - DNA, 15 bp, Homo sapiens
caacatagtgggacc

SEQ ID NO: 1763388 - DNA, 15 bp, Homo sapiens
aacatagtgggaccc

SEQ ID NO: 1763389 - DNA, 15 bp, Homo sapiens
acatagtgggacccc

SEQ ID NO: 1763390 - DNA, 15 bp, Homo sapiens
catagtgggacccca

SEQ ID NO: 1763391 - DNA, 15 bp, Homo sapiens
atagtgggaccccat

SEQ ID NO: 1763392 - DNA, 15 bp, Homo sapiens
tagtgggaccccatc

SEQ ID NO: 1763393 - DNA, 15 bp, Homo sapiens
agtgggaccccatct

SEQ ID NO: 1763394 - DNA, 15 bp, Homo sapiens
gtgggaccccatctc

SEQ ID NO: 1763395 - DNA, 15 bp, Homo sapiens
tgggaccccatctct

SEQ ID NO: 1763396 - DNA, 15 bp, Homo sapiens
gggaccccatctcta

SEQ ID NO: 1763397 - DNA, 15 bp, Homo sapiens
ggaccccatctctac

SEQ ID NO: 1763398 - DNA, 15 bp, Homo sapiens
catctctacaaaaac

SEQ ID NO: 1763399 - DNA, 15 bp, Homo sapiens
atctctacaaaaaca

SEQ ID NO: 1763400 - DNA, 15 bp, Homo sapiens
tctctacaaaaacat

SEQ ID NO: 1763401 - DNA, 15 bp, Homo sapiens
ctctacaaaaacata

SEQ ID NO: 1763402 - DNA, 15 bp, Homo sapiens
tctacaaaaacatac

SEQ ID NO: 1763403 - DNA, 15 bp, Homo sapiens
ctacaaaaacataca

SEQ ID NO: 1763404 - DNA, 15 bp, Homo sapiens
tacaaaaacatacaa

SEQ ID NO: 1763405 - DNA, 15 bp, Homo sapiens
acaaaaacatacaaa

SEQ ID NO: 1763406 - DNA, 15 bp, Homo sapiens
caaaaacatacaaaa

SEQ ID NO: 1763407 - DNA, 15 bp, Homo sapiens
aaaaacatacaaaag

SEQ ID NO: 1763408 - DNA, 15 bp, Homo sapiens
aaaacatacaaaagt

SEQ ID NO: 1763409 - DNA, 15 bp, Homo sapiens
aaacatacaaaagtt

SEQ ID NO: 1763410 - DNA, 15 bp, Homo sapiens
aacatacaaaagtta

SEQ ID NO: 1763411 - DNA, 15 bp, Homo sapiens
acatacaaaagttag

SEQ ID NO: 1763412 - DNA, 15 bp, Homo sapiens
catacaaaagttagc

SEQ ID NO: 1763413 - DNA, 15 bp, Homo sapiens
atacaaaagttagcc

SEQ ID NO: 1763414 - DNA, 15 bp, Homo sapiens
tacaaaagttagcca

SEQ ID NO: 1763415 - DNA, 15 bp, Homo sapiens
acaaaagttagccag

SEQ ID NO: 1763416 - DNA, 15 bp, Homo sapiens
caaaagttagccagg

SEQ ID NO: 1763417 - DNA, 15 bp, Homo sapiens
aaaagttagccaggc

SEQ ID NO: 1763418 - DNA, 15 bp, Homo sapiens
aaagttagccaggca

SEQ ID NO: 1763419 - DNA, 15 bp, Homo sapiens
aagttagccaggcat

SEQ ID NO: 1763420 - DNA, 15 bp, Homo sapiens
agttagccaggcatg

SEQ ID NO: 1763421 - DNA, 15 bp, Homo sapiens
gttagccaggcatgg

SEQ ID NO: 1763422 - DNA, 15 bp, Homo sapiens
catggtggtgcatgt

SEQ ID NO: 1763423 - DNA, 15 bp, Homo sapiens
atggtggtgcatgtc

SEQ ID NO: 1763424 - DNA, 15 bp, Homo sapiens
tggtggtgcatgtct

SEQ ID NO: 1763425 - DNA, 15 bp, Homo sapiens
ggtggtgcatgtctg

SEQ ID NO: 1763426 - DNA, 15 bp, Homo sapiens
gtggtgcatgtctgc

SEQ ID NO: 1763427 - DNA, 15 bp, Homo sapiens
tggtgcatgtctgcg

SEQ ID NO: 1763428 - DNA, 15 bp, Homo sapiens
ggtgcatgtctgcgg

SEQ ID NO: 1763429 - DNA, 15 bp, Homo sapiens
gtgcatgtctgcggt

SEQ ID NO: 1763430 - DNA, 15 bp, Homo sapiens
tgcatgtctgcggtc

SEQ ID NO: 1763431 - DNA, 15 bp, Homo sapiens
gcatgtctgcggtcc

SEQ ID NO: 1763432 - DNA, 15 bp, Homo sapiens
catgtctgcggtccc

SEQ ID NO: 1763433 - DNA, 15 bp, Homo sapiens
atgtctgcggtccca

SEQ ID NO: 1763434 - DNA, 15 bp, Homo sapiens
tgtctgcggtcccag

SEQ ID NO: 1763435 - DNA, 15 bp, Homo sapiens
gtctgcggtcccagc

SEQ ID NO: 1763436 - DNA, 15 bp, Homo sapiens
tctgcggtcccagct

SEQ ID NO: 1763437 - DNA, 15 bp, Homo sapiens
cggtcccagctactt

SEQ ID NO: 1763438 - DNA, 15 bp, Homo sapiens
ggtcccagctacttg

SEQ ID NO: 1763439 - DNA, 15 bp, Homo sapiens
cttgagcccaggaga

SEQ ID NO: 1763440 - DNA, 15 bp, Homo sapiens
ttgagcccaggagat

SEQ ID NO: 1763441 - DNA, 15 bp, Homo sapiens
tgagcccaggagatt

SEQ ID NO: 1763442 - DNA, 15 bp, Homo sapiens
cccaggagattaaga

SEQ ID NO: 1763443 - DNA, 15 bp, Homo sapiens
ccaggagattaagac

SEQ ID NO: 1763444 - DNA, 15 bp, Homo sapiens
caggagattaagact

SEQ ID NO: 1763445 - DNA, 15 bp, Homo sapiens
aggagattaagactt

SEQ ID NO: 1763446 - DNA, 15 bp, Homo sapiens
ggagattaagacttc

SEQ ID NO: 1763447 - DNA, 15 bp, Homo sapiens
gagattaagacttca

SEQ ID NO: 1763448 - DNA, 15 bp, Homo sapiens
agattaagacttcag

SEQ ID NO: 1763449 - DNA, 15 bp, Homo sapiens
gattaagacttcagt

SEQ ID NO: 1763450 - DNA, 15 bp, Homo sapiens
attaagacttcagtg

SEQ ID NO: 1763451 - DNA, 15 bp, Homo sapiens
ttaagacttcagtga

SEQ ID NO: 1763452 - DNA, 15 bp, Homo sapiens
taagacttcagtgag

SEQ ID NO: 1763453 - DNA, 15 bp, Homo sapiens
aagacttcagtgagc

SEQ ID NO: 1763454 - DNA, 15 bp, Homo sapiens
agacttcagtgagct

SEQ ID NO: 1763455 - DNA, 15 bp, Homo sapiens
gacttcagtgagctg

SEQ ID NO: 1763456 - DNA, 15 bp, Homo sapiens
acttcagtgagctga

SEQ ID NO: 1763457 - DNA, 15 bp, Homo sapiens
cttcagtgagctgag

SEQ ID NO: 1763458 - DNA, 15 bp, Homo sapiens
cagtgagctgagata

SEQ ID NO: 1763459 - DNA, 15 bp, Homo sapiens
agtgagctgagatag

SEQ ID NO: 1763460 - DNA, 15 bp, Homo sapiens
gtgagctgagatagt

SEQ ID NO: 1763461 - DNA, 15 bp, Homo sapiens
tgagctgagatagtg

SEQ ID NO: 1763462 - DNA, 15 bp, Homo sapiens
gagctgagatagtgc

SEQ ID NO: 1763463 - DNA, 15 bp, Homo sapiens
agctgagatagtgcc

SEQ ID NO: 1763464 - DNA, 15 bp, Homo sapiens
gctgagatagtgcca

SEQ ID NO: 1763465 - DNA, 15 bp, Homo sapiens
ctgagatagtgccac

SEQ ID NO: 1763466 - DNA, 15 bp, Homo sapiens
tgagatagtgccact

SEQ ID NO: 1763467 - DNA, 15 bp, Homo sapiens
gtgccactgcactct

SEQ ID NO: 1763468 - DNA, 15 bp, Homo sapiens
aaaaaaaaaaagact

SEQ ID NO: 1763469 - DNA, 15 bp, Homo sapiens
aaaaaaaaaagactg

SEQ ID NO: 1763470 - DNA, 15 bp, Homo sapiens
aaaaaaaaagactgg

SEQ ID NO: 1763471 - DNA, 15 bp, Homo sapiens
aaaaaaaagactgga

SEQ ID NO: 1763472 - DNA, 15 bp, Homo sapiens
aaaaaaagactggag

SEQ ID NO: 1763473 - DNA, 15 bp, Homo sapiens
aaaaaagactggaga

SEQ ID NO: 1763474 - DNA, 15 bp, Homo sapiens
aaaaagactggagaa

SEQ ID NO: 1763475 - DNA, 15 bp, Homo sapiens
aaaagactggagaat

SEQ ID NO: 1763476 - DNA, 15 bp, Homo sapiens
agactggagaataat

SEQ ID NO: 1763477 - DNA, 15 bp, Homo sapiens
gactggagaataata

SEQ ID NO: 1763478 - DNA, 15 bp, Homo sapiens
actggagaataatat

SEQ ID NO: 1763479 - DNA, 15 bp, Homo sapiens
ctggagaataatatt

SEQ ID NO: 1763480 - DNA, 15 bp, Homo sapiens
tggagaataatattt

SEQ ID NO: 1763481 - DNA, 15 bp, Homo sapiens
ggagaataatattta

SEQ ID NO: 1763482 - DNA, 15 bp, Homo sapiens
gagaataatatttaa

SEQ ID NO: 1763483 - DNA, 15 bp, Homo sapiens
agaataatatttaaa

SEQ ID NO: 1763484 - DNA, 15 bp, Homo sapiens
gaataatatttaaaa

SEQ ID NO: 1763485 - DNA, 15 bp, Homo sapiens
aataatatttaaaag

SEQ ID NO: 1763486 - DNA, 15 bp, Homo sapiens
ataatatttaaaagt

SEQ ID NO: 1763487 - DNA, 15 bp, Homo sapiens
taatatttaaaagtt

SEQ ID NO: 1763488 - DNA, 15 bp, Homo sapiens
aatatttaaaagttc

SEQ ID NO: 1763489 - DNA, 15 bp, Homo sapiens
atatttaaaagttca

SEQ ID NO: 1763490 - DNA, 15 bp, Homo sapiens
tatttaaaagttcat

SEQ ID NO: 1763491 - DNA, 15 bp, Homo sapiens
atttaaaagttcatg

SEQ ID NO: 1763492 - DNA, 15 bp, Homo sapiens
tttaaaagttcatgt

SEQ ID NO: 1763493 - DNA, 15 bp, Homo sapiens
ttaaaagttcatgta

SEQ ID NO: 1763494 - DNA, 15 bp, Homo sapiens
taaaagttcatgtat

SEQ ID NO: 1763495 - DNA, 15 bp, Homo sapiens
aaaagttcatgtatt

SEQ ID NO: 1763496 - DNA, 15 bp, Homo sapiens
aaagttcatgtatta

SEQ ID NO: 1763497 - DNA, 15 bp, Homo sapiens
aagttcatgtattaa

SEQ ID NO: 1763498 - DNA, 15 bp, Homo sapiens
agttcatgtattaac

SEQ ID NO: 1763499 - DNA, 15 bp, Homo sapiens
gttcatgtattaaca

SEQ ID NO: 1763500 - DNA, 15 bp, Homo sapiens
ttcatgtattaacat

SEQ ID NO: 1763501 - DNA, 15 bp, Homo sapiens
tcatgtattaacatc

SEQ ID NO: 1763502 - DNA, 15 bp, Homo sapiens
catgtattaacatcg

SEQ ID NO: 1763503 - DNA, 15 bp, Homo sapiens
atgtattaacatcgg

SEQ ID NO: 1763504 - DNA, 15 bp, Homo sapiens
tgtattaacatcggg

SEQ ID NO: 1763505 - DNA, 15 bp, Homo sapiens
gtattaacatcgggc

SEQ ID NO: 1763506 - DNA, 15 bp, Homo sapiens
tattaacatcgggcc

SEQ ID NO: 1763507 - DNA, 15 bp, Homo sapiens
attaacatcgggcct

SEQ ID NO: 1763508 - DNA, 15 bp, Homo sapiens
ttaacatcgggcctt

SEQ ID NO: 1763509 - DNA, 15 bp, Homo sapiens
taacatcgggcctta

SEQ ID NO: 1763510 - DNA, 15 bp, Homo sapiens
aacatcgggccttat

SEQ ID NO: 1763511 - DNA, 15 bp, Homo sapiens
acatcgggccttatc

SEQ ID NO: 1763512 - DNA, 15 bp, Homo sapiens
catcgggccttatca

SEQ ID NO: 1763513 - DNA, 15 bp, Homo sapiens
atcgggccttatcag

SEQ ID NO: 1763514 - DNA, 15 bp, Homo sapiens
tcgggccttatcaga

SEQ ID NO: 1763515 - DNA, 15 bp, Homo sapiens
cgggccttatcagat

SEQ ID NO: 1763516 - DNA, 15 bp, Homo sapiens
gggccttatcagatc

SEQ ID NO: 1763517 - DNA, 15 bp, Homo sapiens
ggccttatcagatct

SEQ ID NO: 1763518 - DNA, 15 bp, Homo sapiens
gccttatcagatctt

SEQ ID NO: 1763519 - DNA, 15 bp, Homo sapiens
ccttatcagatctta

SEQ ID NO: 1763520 - DNA, 15 bp, Homo sapiens
cttatcagatcttat

SEQ ID NO: 1763521 - DNA, 15 bp, Homo sapiens
ttatcagatcttatc

SEQ ID NO: 1763522 - DNA, 15 bp, Homo sapiens
tatcagatcttatct

SEQ ID NO: 1763523 - DNA, 15 bp, Homo sapiens
atcagatcttatctg

SEQ ID NO: 1763524 - DNA, 15 bp, Homo sapiens
tcagatcttatctgg

SEQ ID NO: 1763525 - DNA, 15 bp, Homo sapiens
cagatcttatctggt

SEQ ID NO: 1763526 - DNA, 15 bp, Homo sapiens
agatcttatctggtc

SEQ ID NO: 1763527 - DNA, 15 bp, Homo sapiens
gatcttatctggtcg

SEQ ID NO: 1763528 - DNA, 15 bp, Homo sapiens
atcttatctggtcgt

SEQ ID NO: 1763529 - DNA, 15 bp, Homo sapiens
tcttatctggtcgtt

SEQ ID NO: 1763530 - DNA, 15 bp, Homo sapiens
cttatctggtcgttt

SEQ ID NO: 1763531 - DNA, 15 bp, Homo sapiens
ttatctggtcgtttt

SEQ ID NO: 1763532 - DNA, 15 bp, Homo sapiens
tatctggtcgttttt

SEQ ID NO: 1763533 - DNA, 15 bp, Homo sapiens
atctggtcgtttttc

SEQ ID NO: 1763534 - DNA, 15 bp, Homo sapiens
tctggtcgtttttct

SEQ ID NO: 1763535 - DNA, 15 bp, Homo sapiens
ctggtcgtttttctt

SEQ ID NO: 1763536 - DNA, 15 bp, Homo sapiens
tggtcgtttttcttt

SEQ ID NO: 1763537 - DNA, 15 bp, Homo sapiens
ggtcgtttttctttt

SEQ ID NO: 1763538 - DNA, 15 bp, Homo sapiens
gtcgtttttcttttc

SEQ ID NO: 1763539 - DNA, 15 bp, Homo sapiens
tcgtttttcttttct

SEQ ID NO: 1763540 - DNA, 15 bp, Homo sapiens
cgtttttcttttctt

SEQ ID NO: 1763541 - DNA, 15 bp, Homo sapiens
gtttttcttttcttt

SEQ ID NO: 1763542 - DNA, 15 bp, Homo sapiens
ttttctttttttttc

SEQ ID NO: 1763543 - DNA, 15 bp, Homo sapiens
tttctttttttttct

SEQ ID NO: 1763544 - DNA, 15 bp, Homo sapiens
ttctttttttttctt

SEQ ID NO: 1763545 - DNA, 15 bp, Homo sapiens
ctttttttttctttt

SEQ ID NO: 1763546 - DNA, 15 bp, Homo sapiens
ttttttcttttttga

SEQ ID NO: 1763547 - DNA, 15 bp, Homo sapiens
tctcactctgtcact

SEQ ID NO: 1763548 - DNA, 15 bp, Homo sapiens
ctcactctgtcactt

SEQ ID NO: 1763549 - DNA, 15 bp, Homo sapiens
tcactctgtcactta

SEQ ID NO: 1763550 - DNA, 15 bp, Homo sapiens
cactctgtcacttag

SEQ ID NO: 1763551 - DNA, 15 bp, Homo sapiens
actctgtcacttagg

SEQ ID NO: 1763552 - DNA, 15 bp, Homo sapiens
ctctgtcacttaggc

SEQ ID NO: 1763553 - DNA, 15 bp, Homo sapiens
tctgtcacttaggct

SEQ ID NO: 1763554 - DNA, 15 bp, Homo sapiens
ctgtcacttaggctg

SEQ ID NO: 1763555 - DNA, 15 bp, Homo sapiens
tgtcacttaggctgg

SEQ ID NO: 1763556 - DNA, 15 bp, Homo sapiens
gtcacttaggctgga

SEQ ID NO: 1763557 - DNA, 15 bp, Homo sapiens
tcacttaggctggag

SEQ ID NO: 1763558 - DNA, 15 bp, Homo sapiens
cacttaggctggagt

SEQ ID NO: 1763559 - DNA, 15 bp, Homo sapiens
acttaggctggagtg

SEQ ID NO: 1763560 - DNA, 15 bp, Homo sapiens
cttaggctggagtgc

SEQ ID NO: 1763561 - DNA, 15 bp, Homo sapiens
ttaggctggagtgca

SEQ ID NO: 1763562 - DNA, 15 bp, Homo sapiens
taggctggagtgcag

SEQ ID NO: 1763563 - DNA, 15 bp, Homo sapiens
gtgcgatcttggctc

SEQ ID NO: 1763564 - DNA, 15 bp, Homo sapiens
tgcgatcttggctca

SEQ ID NO: 1763565 - DNA, 15 bp, Homo sapiens
cttggctcactgcat

SEQ ID NO: 1763566 - DNA, 15 bp, Homo sapiens
ttggctcactgcatc

SEQ ID NO: 1763567 - DNA, 15 bp, Homo sapiens
tggctcactgcatcc

SEQ ID NO: 1763568 - DNA, 15 bp, Homo sapiens
ggctcactgcatcct

SEQ ID NO: 1763569 - DNA, 15 bp, Homo sapiens
gctcactgcatcctt

SEQ ID NO: 1763570 - DNA, 15 bp, Homo sapiens
ctcactgcatcctta

SEQ ID NO: 1763571 - DNA, 15 bp, Homo sapiens
tcactgcatccttaa

SEQ ID NO: 1763572 - DNA, 15 bp, Homo sapiens
cactgcatccttaac

SEQ ID NO: 1763573 - DNA, 15 bp, Homo sapiens
actgcatccttaacc

SEQ ID NO: 1763574 - DNA, 15 bp, Homo sapiens
ctgcatccttaacct

SEQ ID NO: 1763575 - DNA, 15 bp, Homo sapiens
tgcatccttaacctc

SEQ ID NO: 1763576 - DNA, 15 bp, Homo sapiens
gcatccttaacctcc

SEQ ID NO: 1763577 - DNA, 15 bp, Homo sapiens
catccttaacctcct

SEQ ID NO: 1763578 - DNA, 15 bp, Homo sapiens
atccttaacctcctg

SEQ ID NO: 1763579 - DNA, 15 bp, Homo sapiens
tccttaacctcctga

SEQ ID NO: 1763580 - DNA, 15 bp, Homo sapiens
ccttaacctcctgag

SEQ ID NO: 1763581 - DNA, 15 bp, Homo sapiens
cttaacctcctgagc

SEQ ID NO: 1763582 - DNA, 15 bp, Homo sapiens
ttaacctcctgagct

SEQ ID NO: 1763583 - DNA, 15 bp, Homo sapiens
taacctcctgagctc

SEQ ID NO: 1763584 - DNA, 15 bp, Homo sapiens
aacctcctgagctca

SEQ ID NO: 1763585 - DNA, 15 bp, Homo sapiens
acctcctgagctcaa

SEQ ID NO: 1763586 - DNA, 15 bp, Homo sapiens
cctcctgagctcaag

SEQ ID NO: 1763587 - DNA, 15 bp, Homo sapiens
cctcccacctcagct

SEQ ID NO: 1763588 - DNA, 15 bp, Homo sapiens
ctcccacctcagctg

SEQ ID NO: 1763589 - DNA, 15 bp, Homo sapiens
tcccacctcagctgg

SEQ ID NO: 1763590 - DNA, 15 bp, Homo sapiens
cccacctcagctggg

SEQ ID NO: 1763591 - DNA, 15 bp, Homo sapiens
ccacctcagctggga

SEQ ID NO: 1763592 - DNA, 15 bp, Homo sapiens
cacctcagctgggac

SEQ ID NO: 1763593 - DNA, 15 bp, Homo sapiens
acctcagctgggact

SEQ ID NO: 1763594 - DNA, 15 bp, Homo sapiens
cctcagctgggacta

SEQ ID NO: 1763595 - DNA, 15 bp, Homo sapiens
ctcagctgggactac

SEQ ID NO: 1763596 - DNA, 15 bp, Homo sapiens
tcagctgggactaca

SEQ ID NO: 1763597 - DNA, 15 bp, Homo sapiens
cagctgggactacag

SEQ ID NO: 1763598 - DNA, 15 bp, Homo sapiens
acaggtgcacaccac

SEQ ID NO: 1763599 - DNA, 15 bp, Homo sapiens
caggtgcacaccacc

SEQ ID NO: 1763600 - DNA, 15 bp, Homo sapiens
aggtgcacaccacca

SEQ ID NO: 1763601 - DNA, 15 bp, Homo sapiens
ggtgcacaccaccat

SEQ ID NO: 1763602 - DNA, 15 bp, Homo sapiens
gtgcacaccaccatg

SEQ ID NO: 1763603 - DNA, 15 bp, Homo sapiens
tgcacaccaccatgt

SEQ ID NO: 1763604 - DNA, 15 bp, Homo sapiens
gcacaccaccatgtc

SEQ ID NO: 1763605 - DNA, 15 bp, Homo sapiens
cacaccaccatgtcc

SEQ ID NO: 1763606 - DNA, 15 bp, Homo sapiens
acaccaccatgtccg

SEQ ID NO: 1763607 - DNA, 15 bp, Homo sapiens
caccaccatgtccgg

SEQ ID NO: 1763608 - DNA, 15 bp, Homo sapiens
accaccatgtccggc

SEQ ID NO: 1763609 - DNA, 15 bp, Homo sapiens
tgtccggctaattta

SEQ ID NO: 1763610 - DNA, 15 bp, Homo sapiens
gtccggctaatttat

SEQ ID NO: 1763611 - DNA, 15 bp, Homo sapiens
tccggctaatttatt

SEQ ID NO: 1763612 - DNA, 15 bp, Homo sapiens
ccggctaatttattt

SEQ ID NO: 1763613 - DNA, 15 bp, Homo sapiens
cggctaatttatttt

SEQ ID NO: 1763614 - DNA, 15 bp, Homo sapiens
ggctaatttattttt

SEQ ID NO: 1763615 - DNA, 15 bp, Homo sapiens
gctaatttattttta

SEQ ID NO: 1763616 - DNA, 15 bp, Homo sapiens
ctaatttatttttat

SEQ ID NO: 1763617 - DNA, 15 bp, Homo sapiens
taatttatttttatt

SEQ ID NO: 1763618 - DNA, 15 bp, Homo sapiens
aatttatttttattt

SEQ ID NO: 1763619 - DNA, 15 bp, Homo sapiens
atttatttttatttt

SEQ ID NO: 1763620 - DNA, 15 bp, Homo sapiens
atttttatttttatc

SEQ ID NO: 1763621 - DNA, 15 bp, Homo sapiens
tttttatttttatct

SEQ ID NO: 1763622 - DNA, 15 bp, Homo sapiens
ttttatttttatctt

SEQ ID NO: 1763623 - DNA, 15 bp, Homo sapiens
tttatttttatcttt

SEQ ID NO: 1763624 - DNA, 15 bp, Homo sapiens
ttatttttatctttt

SEQ ID NO: 1763625 - DNA, 15 bp, Homo sapiens
tatttttatcttttt

SEQ ID NO: 1763626 - DNA, 15 bp, Homo sapiens
atttttatctttttt

SEQ ID NO: 1763627 - DNA, 15 bp, Homo sapiens
tttttatcttttttt

SEQ ID NO: 1763628 - DNA, 15 bp, Homo sapiens
ttttatctttttttg

SEQ ID NO: 1763629 - DNA, 15 bp, Homo sapiens
ttatctttttttgta

SEQ ID NO: 1763630 - DNA, 15 bp, Homo sapiens
tatctttttttgtag

SEQ ID NO: 1763631 - DNA, 15 bp, Homo sapiens
atctttttttgtaga

SEQ ID NO: 1763632 - DNA, 15 bp, Homo sapiens
tctttttttgtagag

SEQ ID NO: 1763633 - DNA, 15 bp, Homo sapiens
ctttttttgtagaga

SEQ ID NO: 1763634 - DNA, 15 bp, Homo sapiens
tttttttgtagagac

SEQ ID NO: 1763635 - DNA, 15 bp, Homo sapiens
ttttgtagagacagc

SEQ ID NO: 1763636 - DNA, 15 bp, Homo sapiens
tttgtagagacagcg

SEQ ID NO: 1763637 - DNA, 15 bp, Homo sapiens
ttgtagagacagcgt

SEQ ID NO: 1763638 - DNA, 15 bp, Homo sapiens
tgtagagacagcgtt

SEQ ID NO: 1763639 - DNA, 15 bp, Homo sapiens
gtagagacagcgttc

SEQ ID NO: 1763640 - DNA, 15 bp, Homo sapiens
tagagacagcgttct

SEQ ID NO: 1763641 - DNA, 15 bp, Homo sapiens
agagacagcgttctt

SEQ ID NO: 1763642 - DNA, 15 bp, Homo sapiens
gagacagcgttcttg

SEQ ID NO: 1763643 - DNA, 15 bp, Homo sapiens
agacagcgttcttgc

SEQ ID NO: 1763644 - DNA, 15 bp, Homo sapiens
gacagcgttcttgct

SEQ ID NO: 1763645 - DNA, 15 bp, Homo sapiens
acagcgttcttgcta

SEQ ID NO: 1763646 - DNA, 15 bp, Homo sapiens
cagcgttcttgctat

SEQ ID NO: 1763647 - DNA, 15 bp, Homo sapiens
agcgttcttgctatg

SEQ ID NO: 1763648 - DNA, 15 bp, Homo sapiens
gcgttcttgctatgt

SEQ ID NO: 1763649 - DNA, 15 bp, Homo sapiens
cgttcttgctatgtt

SEQ ID NO: 1763650 - DNA, 15 bp, Homo sapiens
gttcttgctatgttt

SEQ ID NO: 1763651 - DNA, 15 bp, Homo sapiens
ttcttgctatgtttc

SEQ ID NO: 1763652 - DNA, 15 bp, Homo sapiens
gctatgtttcccaga

SEQ ID NO: 1763653 - DNA, 15 bp, Homo sapiens
ctatgtttcccagac

SEQ ID NO: 1763654 - DNA, 15 bp, Homo sapiens
tatgtttcccagact

SEQ ID NO: 1763655 - DNA, 15 bp, Homo sapiens
atgtttcccagactc

SEQ ID NO: 1763656 - DNA, 15 bp, Homo sapiens
tgtttcccagactct

SEQ ID NO: 1763657 - DNA, 15 bp, Homo sapiens
gtttcccagactctt

SEQ ID NO: 1763658 - DNA, 15 bp, Homo sapiens
tttcccagactcttt

SEQ ID NO: 1763659 - DNA, 15 bp, Homo sapiens
ttcccagactctttt

SEQ ID NO: 1763660 - DNA, 15 bp, Homo sapiens
tcccagactcttttt

SEQ ID NO: 1763661 - DNA, 15 bp, Homo sapiens
cccagactctttttc

SEQ ID NO: 1763662 - DNA, 15 bp, Homo sapiens
ccagactctttttct

SEQ ID NO: 1763663 - DNA, 15 bp, Homo sapiens
cagactctttttctt

SEQ ID NO: 1763664 - DNA, 15 bp, Homo sapiens
agactctttttcttt

SEQ ID NO: 1763665 - DNA, 15 bp, Homo sapiens
gactctttttctttt

SEQ ID NO: 1763666 - DNA, 15 bp, Homo sapiens
actctttttcttttt

SEQ ID NO: 1763667 - DNA, 15 bp, Homo sapiens
ctctttttctttttt

SEQ ID NO: 1763668 - DNA, 15 bp, Homo sapiens
tctttttctttttta

SEQ ID NO: 1763669 - DNA, 15 bp, Homo sapiens
ctttttcttttttaa

SEQ ID NO: 1763670 - DNA, 15 bp, Homo sapiens
tttttcttttttaag

SEQ ID NO: 1763671 - DNA, 15 bp, Homo sapiens
ttttcttttttaagg

SEQ ID NO: 1763672 - DNA, 15 bp, Homo sapiens
tttcttttttaagga

SEQ ID NO: 1763673 - DNA, 15 bp, Homo sapiens
ttcttttttaaggaa

SEQ ID NO: 1763674 - DNA, 15 bp, Homo sapiens
tcttttttaaggaat

SEQ ID NO: 1763675 - DNA, 15 bp, Homo sapiens
cttttttaaggaatt

SEQ ID NO: 1763676 - DNA, 15 bp, Homo sapiens
ttttttaaggaatta

SEQ ID NO: 1763677 - DNA, 15 bp, Homo sapiens
tttttaaggaattaa

SEQ ID NO: 1763678 - DNA, 15 bp, Homo sapiens
ttttaaggaattaaa

SEQ ID NO: 1763679 - DNA, 15 bp, Homo sapiens
tttaaggaattaaac

SEQ ID NO: 1763680 - DNA, 15 bp, Homo sapiens
ttaaggaattaaaca

SEQ ID NO: 1763681 - DNA, 15 bp, Homo sapiens
taaggaattaaacat

SEQ ID NO: 1763682 - DNA, 15 bp, Homo sapiens
aaggaattaaacatt

SEQ ID NO: 1763683 - DNA, 15 bp, Homo sapiens
aggaattaaacatta

SEQ ID NO: 1763684 - DNA, 15 bp, Homo sapiens
ggaattaaacattac

SEQ ID NO: 1763685 - DNA, 15 bp, Homo sapiens
gaattaaacattaca

SEQ ID NO: 1763686 - DNA, 15 bp, Homo sapiens
aattaaacattacaa

SEQ ID NO: 1763687 - DNA, 15 bp, Homo sapiens
attaaacattacaaa

SEQ ID NO: 1763688 - DNA, 15 bp, Homo sapiens
ttaaacattacaaat

SEQ ID NO: 1763689 - DNA, 15 bp, Homo sapiens
taaacattacaaatt

SEQ ID NO: 1763690 - DNA, 15 bp, Homo sapiens
aaacattacaaattg

SEQ ID NO: 1763691 - DNA, 15 bp, Homo sapiens
aacattacaaattgc

SEQ ID NO: 1763692 - DNA, 15 bp, Homo sapiens
acattacaaattgca

SEQ ID NO: 1763693 - DNA, 15 bp, Homo sapiens
cattacaaattgcac

SEQ ID NO: 1763694 - DNA, 15 bp, Homo sapiens
attacaaattgcact

SEQ ID NO: 1763695 - DNA, 15 bp, Homo sapiens
ttacaaattgcactg

SEQ ID NO: 1763696 - DNA, 15 bp, Homo sapiens
tacaaattgcactga

SEQ ID NO: 1763697 - DNA, 15 bp, Homo sapiens
acaaattgcactgag

SEQ ID NO: 1763698 - DNA, 15 bp, Homo sapiens
caaattgcactgagg

SEQ ID NO: 1763699 - DNA, 15 bp, Homo sapiens
aaattgcactgaggt

SEQ ID NO: 1763700 - DNA, 15 bp, Homo sapiens
aattgcactgaggtc

SEQ ID NO: 1763701 - DNA, 15 bp, Homo sapiens
attgcactgaggtca

SEQ ID NO: 1763702 - DNA, 15 bp, Homo sapiens
ttgcactgaggtcat

SEQ ID NO: 1763703 - DNA, 15 bp, Homo sapiens
tgcactgaggtcatc

SEQ ID NO: 1763704 - DNA, 15 bp, Homo sapiens
gcactgaggtcatcc

SEQ ID NO: 1763705 - DNA, 15 bp, Homo sapiens
cactgaggtcatcca

SEQ ID NO: 1763706 - DNA, 15 bp, Homo sapiens
actgaggtcatccac

SEQ ID NO: 1763707 - DNA, 15 bp, Homo sapiens
ctgaggtcatccact

SEQ ID NO: 1763708 - DNA, 15 bp, Homo sapiens
tgaggtcatccactg

SEQ ID NO: 1763709 - DNA, 15 bp, Homo sapiens
gaggtcatccactgc

SEQ ID NO: 1763710 - DNA, 15 bp, Homo sapiens
aggtcatccactgcc

SEQ ID NO: 1763711 - DNA, 15 bp, Homo sapiens
ggtcatccactgccc

SEQ ID NO: 1763712 - DNA, 15 bp, Homo sapiens
gtcatccactgcccg

SEQ ID NO: 1763713 - DNA, 15 bp, Homo sapiens
tcatccactgcccgt

SEQ ID NO: 1763714 - DNA, 15 bp, Homo sapiens
catccactgcccgtt

SEQ ID NO: 1763715 - DNA, 15 bp, Homo sapiens
atccactgcccgttc

SEQ ID NO: 1763716 - DNA, 15 bp, Homo sapiens
tccactgcccgttct

SEQ ID NO: 1763717 - DNA, 15 bp, Homo sapiens
ccactgcccgttctc

SEQ ID NO: 1763718 - DNA, 15 bp, Homo sapiens
cactgcccgttctcc

SEQ ID NO: 1763719 - DNA, 15 bp, Homo sapiens
actgcccgttctcca

SEQ ID NO: 1763720 - DNA, 15 bp, Homo sapiens
ctgcccgttctccac

SEQ ID NO: 1763721 - DNA, 15 bp, Homo sapiens
tgcccgttctccaca

SEQ ID NO: 1763722 - DNA, 15 bp, Homo sapiens
gcccgttctccacat

SEQ ID NO: 1763723 - DNA, 15 bp, Homo sapiens
cccgttctccacatc

SEQ ID NO: 1763724 - DNA, 15 bp, Homo sapiens
ccgttctccacatca

SEQ ID NO: 1763725 - DNA, 15 bp, Homo sapiens
cgttctccacatcat

SEQ ID NO: 1763726 - DNA, 15 bp, Homo sapiens
gttctccacatcatc

SEQ ID NO: 1763727 - DNA, 15 bp, Homo sapiens
ttctccacatcatcc

SEQ ID NO: 1763728 - DNA, 15 bp, Homo sapiens
tctccacatcatcct

SEQ ID NO: 1763729 - DNA, 15 bp, Homo sapiens
ctccacatcatcctt

SEQ ID NO: 1763730 - DNA, 15 bp, Homo sapiens
tccacatcatccttc

SEQ ID NO: 1763731 - DNA, 15 bp, Homo sapiens
ccacatcatccttct

SEQ ID NO: 1763732 - DNA, 15 bp, Homo sapiens
cacatcatccttctc

SEQ ID NO: 1763733 - DNA, 15 bp, Homo sapiens
acatcatccttctcc

SEQ ID NO: 1763734 - DNA, 15 bp, Homo sapiens
catcatccttctcct

SEQ ID NO: 1763735 - DNA, 15 bp, Homo sapiens
atcatccttctcctc

SEQ ID NO: 1763736 - DNA, 15 bp, Homo sapiens
tcatccttctcctcc

SEQ ID NO: 1763737 - DNA, 15 bp, Homo sapiens
catccttctcctcct

SEQ ID NO: 1763738 - DNA, 15 bp, Homo sapiens
atccttctcctcctc

SEQ ID NO: 1763739 - DNA, 15 bp, Homo sapiens
tccttctcctcctct

SEQ ID NO: 1763740 - DNA, 15 bp, Homo sapiens
ccttctcctcctctt

SEQ ID NO: 1763741 - DNA, 15 bp, Homo sapiens
cttctcctcctcttt

SEQ ID NO: 1763742 - DNA, 15 bp, Homo sapiens
ttctcctcctctttc

SEQ ID NO: 1763743 - DNA, 15 bp, Homo sapiens
tctcctcctctttcc

SEQ ID NO: 1763744 - DNA, 15 bp, Homo sapiens
ctcctcctctttccc

SEQ ID NO: 1763745 - DNA, 15 bp, Homo sapiens
tcctcctctttccca

SEQ ID NO: 1763746 - DNA, 15 bp, Homo sapiens
cctcctctttcccag

SEQ ID NO: 1763747 - DNA, 15 bp, Homo sapiens
ctcctctttcccagg

SEQ ID NO: 1763748 - DNA, 15 bp, Homo sapiens
tcctctttcccaggg

SEQ ID NO: 1763749 - DNA, 15 bp, Homo sapiens
cctctttcccagggt

SEQ ID NO: 1763750 - DNA, 15 bp, Homo sapiens
ctctttcccagggta

SEQ ID NO: 1763751 - DNA, 15 bp, Homo sapiens
tctttcccagggtag

SEQ ID NO: 1763752 - DNA, 15 bp, Homo sapiens
ctttcccagggtagc

SEQ ID NO: 1763753 - DNA, 15 bp, Homo sapiens
tttcccagggtagct

SEQ ID NO: 1763754 - DNA, 15 bp, Homo sapiens
ttcccagggtagctg

SEQ ID NO: 1763755 - DNA, 15 bp, Homo sapiens
tcccagggtagctgc

SEQ ID NO: 1763756 - DNA, 15 bp, Homo sapiens
cccagggtagctgca

SEQ ID NO: 1763757 - DNA, 15 bp, Homo sapiens
ccagggtagctgcat

SEQ ID NO: 1763758 - DNA, 15 bp, Homo sapiens
cagggtagctgcatt

SEQ ID NO: 1763759 - DNA, 15 bp, Homo sapiens
agggtagctgcattt

SEQ ID NO: 1763760 - DNA, 15 bp, Homo sapiens
gggtagctgcatttg

SEQ ID NO: 1763761 - DNA, 15 bp, Homo sapiens
ggtagctgcatttga

SEQ ID NO: 1763762 - DNA, 15 bp, Homo sapiens
gtagctgcatttgag

SEQ ID NO: 1763763 - DNA, 15 bp, Homo sapiens
tagctgcatttgagc

SEQ ID NO: 1763764 - DNA, 15 bp, Homo sapiens
agctgcatttgagcc

SEQ ID NO: 1763765 - DNA, 15 bp, Homo sapiens
gctgcatttgagcct

SEQ ID NO: 1763766 - DNA, 15 bp, Homo sapiens
ctgcatttgagccta

SEQ ID NO: 1763767 - DNA, 15 bp, Homo sapiens
tgcatttgagcctac

SEQ ID NO: 1763768 - DNA, 15 bp, Homo sapiens
gcatttgagcctaca

SEQ ID NO: 1763769 - DNA, 15 bp, Homo sapiens
catttgagcctacag

SEQ ID NO: 1763770 - DNA, 15 bp, Homo sapiens
atttgagcctacagt

SEQ ID NO: 1763771 - DNA, 15 bp, Homo sapiens
tttgagcctacagtc

SEQ ID NO: 1763772 - DNA, 15 bp, Homo sapiens
ttgagcctacagtcg

SEQ ID NO: 1763773 - DNA, 15 bp, Homo sapiens
tgagcctacagtcgg

SEQ ID NO: 1763774 - DNA, 15 bp, Homo sapiens
gagcctacagtcggt

SEQ ID NO: 1763775 - DNA, 15 bp, Homo sapiens
agcctacagtcggtg

SEQ ID NO: 1763776 - DNA, 15 bp, Homo sapiens
gcctacagtcggtgt

SEQ ID NO: 1763777 - DNA, 15 bp, Homo sapiens
cctacagtcggtgtt

SEQ ID NO: 1763778 - DNA, 15 bp, Homo sapiens
ctacagtcggtgttt

SEQ ID NO: 1763779 - DNA, 15 bp, Homo sapiens
tacagtcggtgtttg

SEQ ID NO: 1763780 - DNA, 15 bp, Homo sapiens
acagtcggtgtttgt

SEQ ID NO: 1763781 - DNA, 15 bp, Homo sapiens
cagtcggtgtttgtg

SEQ ID NO: 1763782 - DNA, 15 bp, Homo sapiens
agtcggtgtttgtgc

SEQ ID NO: 1763783 - DNA, 15 bp, Homo sapiens
gtcggtgtttgtgcc

SEQ ID NO: 1763784 - DNA, 15 bp, Homo sapiens
tcggtgtttgtgccc

SEQ ID NO: 1763785 - DNA, 15 bp, Homo sapiens
cggtgtttgtgcccc

SEQ ID NO: 1763786 - DNA, 15 bp, Homo sapiens
ggtgtttgtgcccct

SEQ ID NO: 1763787 - DNA, 15 bp, Homo sapiens
gtgtttgtgcccctg

SEQ ID NO: 1763788 - DNA, 15 bp, Homo sapiens
tgtttgtgcccctgc

SEQ ID NO: 1763789 - DNA, 15 bp, Homo sapiens
gtttgtgcccctgca

SEQ ID NO: 1763790 - DNA, 15 bp, Homo sapiens
tttgtgcccctgcat

SEQ ID NO: 1763791 - DNA, 15 bp, Homo sapiens
ttgtgcccctgcatc

SEQ ID NO: 1763792 - DNA, 15 bp, Homo sapiens
tgtgcccctgcatca

SEQ ID NO: 1763793 - DNA, 15 bp, Homo sapiens
gtgcccctgcatcag

SEQ ID NO: 1763794 - DNA, 15 bp, Homo sapiens
tgcccctgcatcagc

SEQ ID NO: 1763795 - DNA, 15 bp, Homo sapiens
gcccctgcatcagcc

SEQ ID NO: 1763796 - DNA, 15 bp, Homo sapiens
cccctgcatcagcca

SEQ ID NO: 1763797 - DNA, 15 bp, Homo sapiens
ccctgcatcagccag

SEQ ID NO: 1763798 - DNA, 15 bp, Homo sapiens
cctgcatcagccagt

SEQ ID NO: 1763799 - DNA, 15 bp, Homo sapiens
ctgcatcagccagtc

SEQ ID NO: 1763800 - DNA, 15 bp, Homo sapiens
tgcatcagccagtca

SEQ ID NO: 1763801 - DNA, 15 bp, Homo sapiens
gcatcagccagtcat

SEQ ID NO: 1763802 - DNA, 15 bp, Homo sapiens
catcagccagtcatt

SEQ ID NO: 1763803 - DNA, 15 bp, Homo sapiens
atcagccagtcattg

SEQ ID NO: 1763804 - DNA, 15 bp, Homo sapiens
tcagccagtcattgc

SEQ ID NO: 1763805 - DNA, 15 bp, Homo sapiens
cagccagtcattgcc

SEQ ID NO: 1763806 - DNA, 15 bp, Homo sapiens
agccagtcattgccc

SEQ ID NO: 1763807 - DNA, 15 bp, Homo sapiens
gccagtcattgcccc

SEQ ID NO: 1763808 - DNA, 15 bp, Homo sapiens
ccagtcattgcccca

SEQ ID NO: 1763809 - DNA, 15 bp, Homo sapiens
cagtcattgccccag

SEQ ID NO: 1763810 - DNA, 15 bp, Homo sapiens
agtcattgccccaga

SEQ ID NO: 1763811 - DNA, 15 bp, Homo sapiens
gtcattgccccagag

SEQ ID NO: 1763812 - DNA, 15 bp, Homo sapiens
tcattgccccagaga

SEQ ID NO: 1763813 - DNA, 15 bp, Homo sapiens
cattgccccagagag

SEQ ID NO: 1763814 - DNA, 15 bp, Homo sapiens
attgccccagagagt

SEQ ID NO: 1763815 - DNA, 15 bp, Homo sapiens
ttgccccagagagtc

SEQ ID NO: 1763816 - DNA, 15 bp, Homo sapiens
tgccccagagagtct

SEQ ID NO: 1763817 - DNA, 15 bp, Homo sapiens
gccccagagagtcta

SEQ ID NO: 1763818 - DNA, 15 bp, Homo sapiens
ccccagagagtctag

SEQ ID NO: 1763819 - DNA, 15 bp, Homo sapiens
cccagagagtctagc

SEQ ID NO: 1763820 - DNA, 15 bp, Homo sapiens
ccagagagtctagcc

SEQ ID NO: 1763821 - DNA, 15 bp, Homo sapiens
cagagagtctagcct

SEQ ID NO: 1763822 - DNA, 15 bp, Homo sapiens
agagagtctagcctt

SEQ ID NO: 1763823 - DNA, 15 bp, Homo sapiens
gagagtctagccttt

SEQ ID NO: 1763824 - DNA, 15 bp, Homo sapiens
agagtctagcctttg

SEQ ID NO: 1763825 - DNA, 15 bp, Homo sapiens
gagtctagcctttgg

SEQ ID NO: 1763826 - DNA, 15 bp, Homo sapiens
agtctagcctttggt

SEQ ID NO: 1763827 - DNA, 15 bp, Homo sapiens
gtctagcctttggtg

SEQ ID NO: 1763828 - DNA, 15 bp, Homo sapiens
tctagcctttggtga

SEQ ID NO: 1763829 - DNA, 15 bp, Homo sapiens
ctagcctttggtgag

SEQ ID NO: 1763830 - DNA, 15 bp, Homo sapiens
tagcctttggtgaga

SEQ ID NO: 1763831 - DNA, 15 bp, Homo sapiens
agcctttggtgagac

SEQ ID NO: 1763832 - DNA, 15 bp, Homo sapiens
gcctttggtgagaca

SEQ ID NO: 1763833 - DNA, 15 bp, Homo sapiens
cctttggtgagacag

SEQ ID NO: 1763834 - DNA, 15 bp, Homo sapiens
ctttggtgagacagc

SEQ ID NO: 1763835 - DNA, 15 bp, Homo sapiens
tttggtgagacagct

SEQ ID NO: 1763836 - DNA, 15 bp, Homo sapiens
ttggtgagacagctc

SEQ ID NO: 1763837 - DNA, 15 bp, Homo sapiens
tggtgagacagctcc

SEQ ID NO: 1763838 - DNA, 15 bp, Homo sapiens
ggtgagacagctcct

SEQ ID NO: 1763839 - DNA, 15 bp, Homo sapiens
gtgagacagctcctt

SEQ ID NO: 1763840 - DNA, 15 bp, Homo sapiens
tgagacagctccttg

SEQ ID NO: 1763841 - DNA, 15 bp, Homo sapiens
gagacagctccttgt

SEQ ID NO: 1763842 - DNA, 15 bp, Homo sapiens
acagctccttgtggc

SEQ ID NO: 1763843 - DNA, 15 bp, Homo sapiens
cagctccttgtggcc

SEQ ID NO: 1763844 - DNA, 15 bp, Homo sapiens
agctccttgtggccg

SEQ ID NO: 1763845 - DNA, 15 bp, Homo sapiens
gctccttgtggccga

SEQ ID NO: 1763846 - DNA, 15 bp, Homo sapiens
ctccttgtggccgag

SEQ ID NO: 1763847 - DNA, 15 bp, Homo sapiens
tccttgtggccgagg

SEQ ID NO: 1763848 - DNA, 15 bp, Homo sapiens
ccttgtggccgaggg

SEQ ID NO: 1763849 - DNA, 15 bp, Homo sapiens
cttgtggccgagggc

SEQ ID NO: 1763850 - DNA, 15 bp, Homo sapiens
ttgtggccgagggca

SEQ ID NO: 1763851 - DNA, 15 bp, Homo sapiens
tgtggccgagggcaa

SEQ ID NO: 1763852 - DNA, 15 bp, Homo sapiens
gtggccgagggcaat

SEQ ID NO: 1763853 - DNA, 15 bp, Homo sapiens
tggccgagggcaatt

SEQ ID NO: 1763854 - DNA, 15 bp, Homo sapiens
ggccgagggcaattc

SEQ ID NO: 1763855 - DNA, 15 bp, Homo sapiens
gccgagggcaattcc

SEQ ID NO: 1763856 - DNA, 15 bp, Homo sapiens
ccgagggcaattccc

SEQ ID NO: 1763857 - DNA, 15 bp, Homo sapiens
cgagggcaattccct

SEQ ID NO: 1763858 - DNA, 15 bp, Homo sapiens
gagggcaattccctg

SEQ ID NO: 1763859 - DNA, 15 bp, Homo sapiens
agggcaattccctgg

SEQ ID NO: 1763860 - DNA, 15 bp, Homo sapiens
gggcaattccctggg

SEQ ID NO: 1763861 - DNA, 15 bp, Homo sapiens
ggcaattccctggga

SEQ ID NO: 1763862 - DNA, 15 bp, Homo sapiens
gcaattccctgggag

SEQ ID NO: 1763863 - DNA, 15 bp, Homo sapiens
caattccctgggagg

SEQ ID NO: 1763864 - DNA, 15 bp, Homo sapiens
aattccctgggaggg

SEQ ID NO: 1763865 - DNA, 15 bp, Homo sapiens
attccctgggagggt

SEQ ID NO: 1763866 - DNA, 15 bp, Homo sapiens
ttccctgggagggtc

SEQ ID NO: 1763867 - DNA, 15 bp, Homo sapiens
tccctgggagggtcc

SEQ ID NO: 1763868 - DNA, 15 bp, Homo sapiens
ccctgggagggtccc

SEQ ID NO: 1763869 - DNA, 15 bp, Homo sapiens
cctgggagggtccct

SEQ ID NO: 1763870 - DNA, 15 bp, Homo sapiens
ctgggagggtccctg

SEQ ID NO: 1763871 - DNA, 15 bp, Homo sapiens
tgggagggtccctgt

SEQ ID NO: 1763872 - DNA, 15 bp, Homo sapiens
gggagggtccctgtg

SEQ ID NO: 1763873 - DNA, 15 bp, Homo sapiens
ggagggtccctgtgg

SEQ ID NO: 1763874 - DNA, 15 bp, Homo sapiens
gagggtccctgtggt

SEQ ID NO: 1763875 - DNA, 15 bp, Homo sapiens
agggtccctgtggtg

SEQ ID NO: 1763876 - DNA, 15 bp, Homo sapiens
gggtccctgtggtga

SEQ ID NO: 1763877 - DNA, 15 bp, Homo sapiens
ggtccctgtggtgaa

SEQ ID NO: 1763878 - DNA, 15 bp, Homo sapiens
gtccctgtggtgaat

SEQ ID NO: 1763879 - DNA, 15 bp, Homo sapiens
tccctgtggtgaatc

SEQ ID NO: 1763880 - DNA, 15 bp, Homo sapiens
ccctgtggtgaatct

SEQ ID NO: 1763881 - DNA, 15 bp, Homo sapiens
cctgtggtgaatctt

SEQ ID NO: 1763882 - DNA, 15 bp, Homo sapiens
ctgtggtgaatcttc

SEQ ID NO: 1763883 - DNA, 15 bp, Homo sapiens
tgtggtgaatcttct

SEQ ID NO: 1763884 - DNA, 15 bp, Homo sapiens
gtggtgaatcttctg

SEQ ID NO: 1763885 - DNA, 15 bp, Homo sapiens
tggtgaatcttctgc

SEQ ID NO: 1763886 - DNA, 15 bp, Homo sapiens
ggtgaatcttctgca

SEQ ID NO: 1763887 - DNA, 15 bp, Homo sapiens
gtgaatcttctgcag

SEQ ID NO: 1763888 - DNA, 15 bp, Homo sapiens
tgaatcttctgcagc

SEQ ID NO: 1763889 - DNA, 15 bp, Homo sapiens
gaatcttctgcagct

SEQ ID NO: 1763890 - DNA, 15 bp, Homo sapiens
aatcttctgcagctg

SEQ ID NO: 1763891 - DNA, 15 bp, Homo sapiens
atcttctgcagctga

SEQ ID NO: 1763892 - DNA, 15 bp, Homo sapiens
tcttctgcagctgac

SEQ ID NO: 1763893 - DNA, 15 bp, Homo sapiens
cttctgcagctgacg

SEQ ID NO: 1763894 - DNA, 15 bp, Homo sapiens
ttctgcagctgacgt

SEQ ID NO: 1763895 - DNA, 15 bp, Homo sapiens
tctgcagctgacgtt

SEQ ID NO: 1763896 - DNA, 15 bp, Homo sapiens
ctgcagctgacgttc

SEQ ID NO: 1763897 - DNA, 15 bp, Homo sapiens
tgcagctgacgttct

SEQ ID NO: 1763898 - DNA, 15 bp, Homo sapiens
gcagctgacgttctc

SEQ ID NO: 1763899 - DNA, 15 bp, Homo sapiens
cagctgacgttctca

SEQ ID NO: 1763900 - DNA, 15 bp, Homo sapiens
agctgacgttctcag

SEQ ID NO: 1763901 - DNA, 15 bp, Homo sapiens
gctgacgttctcagc

SEQ ID NO: 1763902 - DNA, 15 bp, Homo sapiens
ctgacgttctcagca

SEQ ID NO: 1763903 - DNA, 15 bp, Homo sapiens
tgacgttctcagcag

SEQ ID NO: 1763904 - DNA, 15 bp, Homo sapiens
gacgttctcagcagc

SEQ ID NO: 1763905 - DNA, 15 bp, Homo sapiens
acgttctcagcagct

SEQ ID NO: 1763906 - DNA, 15 bp, Homo sapiens
cgttctcagcagctg

SEQ ID NO: 1763907 - DNA, 15 bp, Homo sapiens
gttctcagcagctgg

SEQ ID NO: 1763908 - DNA, 15 bp, Homo sapiens
ttctcagcagctggg

SEQ ID NO: 1763909 - DNA, 15 bp, Homo sapiens
tctcagcagctgggg

SEQ ID NO: 1763910 - DNA, 15 bp, Homo sapiens
ctcagcagctggggg

SEQ ID NO: 1763911 - DNA, 15 bp, Homo sapiens
tcagcagctggggga

SEQ ID NO: 1763912 - DNA, 15 bp, Homo sapiens
cagcagctgggggat

SEQ ID NO: 1763913 - DNA, 15 bp, Homo sapiens
agcagctgggggatg

SEQ ID NO: 1763914 - DNA, 15 bp, Homo sapiens
gcagctgggggatgg

SEQ ID NO: 1763915 - DNA, 15 bp, Homo sapiens
cagctgggggatggc

SEQ ID NO: 1763916 - DNA, 15 bp, Homo sapiens
agctgggggatggct

SEQ ID NO: 1763917 - DNA, 15 bp, Homo sapiens
gctgggggatggctg

SEQ ID NO: 1763918 - DNA, 15 bp, Homo sapiens
ctgggggatggctgc

SEQ ID NO: 1763919 - DNA, 15 bp, Homo sapiens
tgggggatggctgca

SEQ ID NO: 1763920 - DNA, 15 bp, Homo sapiens
gggggatggctgcat

SEQ ID NO: 1763921 - DNA, 15 bp, Homo sapiens
ggggatggctgcatt

SEQ ID NO: 1763922 - DNA, 15 bp, Homo sapiens
gggatggctgcattg

SEQ ID NO: 1763923 - DNA, 15 bp, Homo sapiens
ggatggctgcattgg

SEQ ID NO: 1763924 - DNA, 15 bp, Homo sapiens
gatggctgcattggc

SEQ ID NO: 1763925 - DNA, 15 bp, Homo sapiens
atggctgcattggcc

SEQ ID NO: 1763926 - DNA, 15 bp, Homo sapiens
tggctgcattggccc

SEQ ID NO: 1763927 - DNA, 15 bp, Homo sapiens
ggctgcattggccct

SEQ ID NO: 1763928 - DNA, 15 bp, Homo sapiens
gctgcattggccctg

SEQ ID NO: 1763929 - DNA, 15 bp, Homo sapiens
ctgcattggccctga

SEQ ID NO: 1763930 - DNA, 15 bp, Homo sapiens
tgcattggccctgaa

SEQ ID NO: 1763931 - DNA, 15 bp, Homo sapiens
gcattggccctgaag

SEQ ID NO: 1763932 - DNA, 15 bp, Homo sapiens
cattggccctgaaga

SEQ ID NO: 1763933 - DNA, 15 bp, Homo sapiens
attggccctgaagag

SEQ ID NO: 1763934 - DNA, 15 bp, Homo sapiens
ttggccctgaagagg

SEQ ID NO: 1763935 - DNA, 15 bp, Homo sapiens
tggccctgaagaggg

SEQ ID NO: 1763936 - DNA, 15 bp, Homo sapiens
ggccctgaagagggg

SEQ ID NO: 1763937 - DNA, 15 bp, Homo sapiens
gccctgaagaggggt

SEQ ID NO: 1763938 - DNA, 15 bp, Homo sapiens
ccctgaagaggggtt

SEQ ID NO: 1763939 - DNA, 15 bp, Homo sapiens
cctgaagaggggttc

SEQ ID NO: 1763940 - DNA, 15 bp, Homo sapiens
ctgaagaggggttct

SEQ ID NO: 1763941 - DNA, 15 bp, Homo sapiens
tgaagaggggttctg

SEQ ID NO: 1763942 - DNA, 15 bp, Homo sapiens
gaagaggggttctgt

SEQ ID NO: 1763943 - DNA, 15 bp, Homo sapiens
aagaggggttctgtg

SEQ ID NO: 1763944 - DNA, 15 bp, Homo sapiens
agaggggttctgtgt

SEQ ID NO: 1763945 - DNA, 15 bp, Homo sapiens
gaggggttctgtgtg

SEQ ID NO: 1763946 - DNA, 15 bp, Homo sapiens
aggggttctgtgtgg

SEQ ID NO: 1763947 - DNA, 15 bp, Homo sapiens
ggggttctgtgtggc

SEQ ID NO: 1763948 - DNA, 15 bp, Homo sapiens
gggttctgtgtggca

SEQ ID NO: 1763949 - DNA, 15 bp, Homo sapiens
ggttctgtgtggcac

SEQ ID NO: 1763950 - DNA, 15 bp, Homo sapiens
gttctgtgtggcaca

SEQ ID NO: 1763951 - DNA, 15 bp, Homo sapiens
ttctgtgtggcacac

SEQ ID NO: 1763952 - DNA, 15 bp, Homo sapiens
tctgtgtggcacacc

SEQ ID NO: 1763953 - DNA, 15 bp, Homo sapiens
ctgtgtggcacacca

SEQ ID NO: 1763954 - DNA, 15 bp, Homo sapiens
tgtgtggcacaccac

SEQ ID NO: 1763955 - DNA, 15 bp, Homo sapiens
gtgtggcacaccaca

SEQ ID NO: 1763956 - DNA, 15 bp, Homo sapiens
tgtggcacaccacag

SEQ ID NO: 1763957 - DNA, 15 bp, Homo sapiens
gtggcacaccacagt

SEQ ID NO: 1763958 - DNA, 15 bp, Homo sapiens
tggcacaccacagtg

SEQ ID NO: 1763959 - DNA, 15 bp, Homo sapiens
ggcacaccacagtgt

SEQ ID NO: 1763960 - DNA, 15 bp, Homo sapiens
gcacaccacagtgtc

SEQ ID NO: 1763961 - DNA, 15 bp, Homo sapiens
cacaccacagtgtct

SEQ ID NO: 1763962 - DNA, 15 bp, Homo sapiens
acaccacagtgtctg

SEQ ID NO: 1763963 - DNA, 15 bp, Homo sapiens
caccacagtgtctgc

SEQ ID NO: 1763964 - DNA, 15 bp, Homo sapiens
accacagtgtctgct

SEQ ID NO: 1763965 - DNA, 15 bp, Homo sapiens
ccacagtgtctgcta

SEQ ID NO: 1763966 - DNA, 15 bp, Homo sapiens
cacagtgtctgctac

SEQ ID NO: 1763967 - DNA, 15 bp, Homo sapiens
acagtgtctgctaca

SEQ ID NO: 1763968 - DNA, 15 bp, Homo sapiens
cagtgtctgctacac

SEQ ID NO: 1763969 - DNA, 15 bp, Homo sapiens
agtgtctgctacact

SEQ ID NO: 1763970 - DNA, 15 bp, Homo sapiens
gtgtctgctacactg

SEQ ID NO: 1763971 - DNA, 15 bp, Homo sapiens
tgtctgctacactgg

SEQ ID NO: 1763972 - DNA, 15 bp, Homo sapiens
gtctgctacactgga

SEQ ID NO: 1763973 - DNA, 15 bp, Homo sapiens
tctgctacactggat

SEQ ID NO: 1763974 - DNA, 15 bp, Homo sapiens
ctgctacactggatt

SEQ ID NO: 1763975 - DNA, 15 bp, Homo sapiens
tgctacactggatta

SEQ ID NO: 1763976 - DNA, 15 bp, Homo sapiens
gctacactggattac

SEQ ID NO: 1763977 - DNA, 15 bp, Homo sapiens
ctacactggattacc

SEQ ID NO: 1763978 - DNA, 15 bp, Homo sapiens
tacactggattacca

SEQ ID NO: 1763979 - DNA, 15 bp, Homo sapiens
acactggattaccat

SEQ ID NO: 1763980 - DNA, 15 bp, Homo sapiens
cactggattaccatc

SEQ ID NO: 1763981 - DNA, 15 bp, Homo sapiens
actggattaccatct

SEQ ID NO: 1763982 - DNA, 15 bp, Homo sapiens
ctggattaccatcta

SEQ ID NO: 1763983 - DNA, 15 bp, Homo sapiens
tggattaccatctac

SEQ ID NO: 1763984 - DNA, 15 bp, Homo sapiens
ggattaccatctaca

SEQ ID NO: 1763985 - DNA, 15 bp, Homo sapiens
gattaccatctacat

SEQ ID NO: 1763986 - DNA, 15 bp, Homo sapiens
attaccatctacatt

SEQ ID NO: 1763987 - DNA, 15 bp, Homo sapiens
ttaccatctacattt

SEQ ID NO: 1763988 - DNA, 15 bp, Homo sapiens
taccatctacatttt

SEQ ID NO: 1763989 - DNA, 15 bp, Homo sapiens
accatctacatttta

SEQ ID NO: 1763990 - DNA, 15 bp, Homo sapiens
ccatctacattttaa

SEQ ID NO: 1763991 - DNA, 15 bp, Homo sapiens
catctacattttaag

SEQ ID NO: 1763992 - DNA, 15 bp, Homo sapiens
atctacattttaagg

SEQ ID NO: 1763993 - DNA, 15 bp, Homo sapiens
tctacattttaaggt

SEQ ID NO: 1763994 - DNA, 15 bp, Homo sapiens
ctacattttaaggtt

SEQ ID NO: 1763995 - DNA, 15 bp, Homo sapiens
tacattttaaggtta

SEQ ID NO: 1763996 - DNA, 15 bp, Homo sapiens
acattttaaggttaa

SEQ ID NO: 1763997 - DNA, 15 bp, Homo sapiens
cattttaaggttaaa

SEQ ID NO: 1763998 - DNA, 15 bp, Homo sapiens
attttaaggttaaaa

SEQ ID NO: 1763999 - DNA, 15 bp, Homo sapiens
ttttaaggttaaaag

SEQ ID NO: 1764000 - DNA, 15 bp, Homo sapiens
tttaaggttaaaagc

SEQ ID NO: 1764001 - DNA, 15 bp, Homo sapiens
ttaaggttaaaagct

SEQ ID NO: 1764002 - DNA, 15 bp, Homo sapiens
taaggttaaaagctt

SEQ ID NO: 1764003 - DNA, 15 bp, Homo sapiens
aaggttaaaagcttc

SEQ ID NO: 1764004 - DNA, 15 bp, Homo sapiens
aggttaaaagcttct

SEQ ID NO: 1764005 - DNA, 15 bp, Homo sapiens
ggttaaaagcttctg

SEQ ID NO: 1764006 - DNA, 15 bp, Homo sapiens
gttaaaagcttctga

SEQ ID NO: 1764007 - DNA, 15 bp, Homo sapiens
ttaaaagcttctgac

SEQ ID NO: 1764008 - DNA, 15 bp, Homo sapiens
taaaagcttctgaca

SEQ ID NO: 1764009 - DNA, 15 bp, Homo sapiens
aaaagcttctgacaa

SEQ ID NO: 1764010 - DNA, 15 bp, Homo sapiens
aaagcttctgacaaa

SEQ ID NO: 1764011 - DNA, 15 bp, Homo sapiens
aagcttctgacaaat

SEQ ID NO: 1764012 - DNA, 15 bp, Homo sapiens
agcttctgacaaatt

SEQ ID NO: 1764013 - DNA, 15 bp, Homo sapiens
gcttctgacaaattg

SEQ ID NO: 1764014 - DNA, 15 bp, Homo sapiens
cttctgacaaattgg

SEQ ID NO: 1764015 - DNA, 15 bp, Homo sapiens
ttctgacaaattggc

SEQ ID NO: 1764016 - DNA, 15 bp, Homo sapiens
tctgacaaattggct

SEQ ID NO: 1764017 - DNA, 15 bp, Homo sapiens
ctgacaaattggctc

SEQ ID NO: 1764018 - DNA, 15 bp, Homo sapiens
tgacaaattggctcc

SEQ ID NO: 1764019 - DNA, 15 bp, Homo sapiens
gacaaattggctcca

SEQ ID NO: 1764020 - DNA, 15 bp, Homo sapiens
acaaattggctccac

SEQ ID NO: 1764021 - DNA, 15 bp, Homo sapiens
caaattggctccaca

SEQ ID NO: 1764022 - DNA, 15 bp, Homo sapiens
aaattggctccacag

SEQ ID NO: 1764023 - DNA, 15 bp, Homo sapiens
aattggctccacaga

SEQ ID NO: 1764024 - DNA, 15 bp, Homo sapiens
attggctccacagaa

SEQ ID NO: 1764025 - DNA, 15 bp, Homo sapiens
ttggctccacagaag

SEQ ID NO: 1764026 - DNA, 15 bp, Homo sapiens
tggctccacagaagc

SEQ ID NO: 1764027 - DNA, 15 bp, Homo sapiens
ggctccacagaagcc

SEQ ID NO: 1764028 - DNA, 15 bp, Homo sapiens
gctccacagaagcct

SEQ ID NO: 1764029 - DNA, 15 bp, Homo sapiens
ctccacagaagcctc

SEQ ID NO: 1764030 - DNA, 15 bp, Homo sapiens
tccacagaagcctct

SEQ ID NO: 1764031 - DNA, 15 bp, Homo sapiens
ccacagaagcctctt

SEQ ID NO: 1764032 - DNA, 15 bp, Homo sapiens
cacagaagcctcttg

SEQ ID NO: 1764033 - DNA, 15 bp, Homo sapiens
acagaagcctcttga

SEQ ID NO: 1764034 - DNA, 15 bp, Homo sapiens
cagaagcctcttgat

SEQ ID NO: 1764035 - DNA, 15 bp, Homo sapiens
agaagcctcttgatt

SEQ ID NO: 1764036 - DNA, 15 bp, Homo sapiens
gaagcctcttgattg

SEQ ID NO: 1764037 - DNA, 15 bp, Homo sapiens
aagcctcttgattga

SEQ ID NO: 1764038 - DNA, 15 bp, Homo sapiens
agcctcttgattgag

SEQ ID NO: 1764039 - DNA, 15 bp, Homo sapiens
gcctcttgattgagc

SEQ ID NO: 1764040 - DNA, 15 bp, Homo sapiens
cctcttgattgagct

SEQ ID NO: 1764041 - DNA, 15 bp, Homo sapiens
ctcttgattgagcta

SEQ ID NO: 1764042 - DNA, 15 bp, Homo sapiens
tcttgattgagctat

SEQ ID NO: 1764043 - DNA, 15 bp, Homo sapiens
cttgattgagctatt

SEQ ID NO: 1764044 - DNA, 15 bp, Homo sapiens
ttgattgagctattg

SEQ ID NO: 1764045 - DNA, 15 bp, Homo sapiens
tgattgagctattgc

SEQ ID NO: 1764046 - DNA, 15 bp, Homo sapiens
gattgagctattgct

SEQ ID NO: 1764047 - DNA, 15 bp, Homo sapiens
attgagctattgctt

SEQ ID NO: 1764048 - DNA, 15 bp, Homo sapiens
ttgagctattgcttg

SEQ ID NO: 1764049 - DNA, 15 bp, Homo sapiens
tgagctattgcttgc

SEQ ID NO: 1764050 - DNA, 15 bp, Homo sapiens
gagctattgcttgca

SEQ ID NO: 1764051 - DNA, 15 bp, Homo sapiens
agctattgcttgcaa

SEQ ID NO: 1764052 - DNA, 15 bp, Homo sapiens
gctattgcttgcaaa

SEQ ID NO: 1764053 - DNA, 15 bp, Homo sapiens
ctattgcttgcaaat

SEQ ID NO: 1764054 - DNA, 15 bp, Homo sapiens
tattgcttgcaaatt

SEQ ID NO: 1764055 - DNA, 15 bp, Homo sapiens
tgcttgcaaattgtt

SEQ ID NO: 1764056 - DNA, 15 bp, Homo sapiens
gcttgcaaattgttg

SEQ ID NO: 1764057 - DNA, 15 bp, Homo sapiens
cttgcaaattgttga

SEQ ID NO: 1764058 - DNA, 15 bp, Homo sapiens
ttgcaaattgttgac

SEQ ID NO: 1764059 - DNA, 15 bp, Homo sapiens
tgcaaattgttgaca

SEQ ID NO: 1764060 - DNA, 15 bp, Homo sapiens
gcaaattgttgacat

SEQ ID NO: 1764061 - DNA, 15 bp, Homo sapiens
caaattgttgacatt

SEQ ID NO: 1764062 - DNA, 15 bp, Homo sapiens
aaattgttgacattc

SEQ ID NO: 1764063 - DNA, 15 bp, Homo sapiens
aattgttgacattca

SEQ ID NO: 1764064 - DNA, 15 bp, Homo sapiens
attgttgacattcac

SEQ ID NO: 1764065 - DNA, 15 bp, Homo sapiens
ttgttgacattcact

SEQ ID NO: 1764066 - DNA, 15 bp, Homo sapiens
tgttgacattcactg

SEQ ID NO: 1764067 - DNA, 15 bp, Homo sapiens
gttgacattcactgc

SEQ ID NO: 1764068 - DNA, 15 bp, Homo sapiens
ttgacattcactgcc

SEQ ID NO: 1764069 - DNA, 15 bp, Homo sapiens
tgacattcactgcca

SEQ ID NO: 1764070 - DNA, 15 bp, Homo sapiens
gacattcactgccac

SEQ ID NO: 1764071 - DNA, 15 bp, Homo sapiens
acattcactgccact

SEQ ID NO: 1764072 - DNA, 15 bp, Homo sapiens
cattcactgccactc

SEQ ID NO: 1764073 - DNA, 15 bp, Homo sapiens
attcactgccactct

SEQ ID NO: 1764074 - DNA, 15 bp, Homo sapiens
ttcactgccactctc

SEQ ID NO: 1764075 - DNA, 15 bp, Homo sapiens
tcactgccactctct

SEQ ID NO: 1764076 - DNA, 15 bp, Homo sapiens
cactgccactctcta

SEQ ID NO: 1764077 - DNA, 15 bp, Homo sapiens
actgccactctctac

SEQ ID NO: 1764078 - DNA, 15 bp, Homo sapiens
ctgccactctctact

SEQ ID NO: 1764079 - DNA, 15 bp, Homo sapiens
tgccactctctactt

SEQ ID NO: 1764080 - DNA, 15 bp, Homo sapiens
gccactctctacttg

SEQ ID NO: 1764081 - DNA, 15 bp, Homo sapiens
ccactctctacttgt

SEQ ID NO: 1764082 - DNA, 15 bp, Homo sapiens
cactctctacttgtg

SEQ ID NO: 1764083 - DNA, 15 bp, Homo sapiens
actctctacttgtgt

SEQ ID NO: 1764084 - DNA, 15 bp, Homo sapiens
ctctctacttgtgtt

SEQ ID NO: 1764085 - DNA, 15 bp, Homo sapiens
tctctacttgtgtta

SEQ ID NO: 1764086 - DNA, 15 bp, Homo sapiens
ctctacttgtgttat

SEQ ID NO: 1764087 - DNA, 15 bp, Homo sapiens
tctacttgtgttatt

SEQ ID NO: 1764088 - DNA, 15 bp, Homo sapiens
ctacttgtgttattc

SEQ ID NO: 1764089 - DNA, 15 bp, Homo sapiens
tacttgtgttattct

SEQ ID NO: 1764090 - DNA, 15 bp, Homo sapiens
acttgtgttattctc

SEQ ID NO: 1764091 - DNA, 15 bp, Homo sapiens
cttgtgttattctct

SEQ ID NO: 1764092 - DNA, 15 bp, Homo sapiens
ttgtgttattctctt

SEQ ID NO: 1764093 - DNA, 15 bp, Homo sapiens
tgtgttattctcttc

SEQ ID NO: 1764094 - DNA, 15 bp, Homo sapiens
gtgttattctcttca

SEQ ID NO: 1764095 - DNA, 15 bp, Homo sapiens
tgttattctcttcaa

SEQ ID NO: 1764096 - DNA, 15 bp, Homo sapiens
gttattctcttcaat

SEQ ID NO: 1764097 - DNA, 15 bp, Homo sapiens
ttattctcttcaatg

SEQ ID NO: 1764098 - DNA, 15 bp, Homo sapiens
tattctcttcaatgg

SEQ ID NO: 1764099 - DNA, 15 bp, Homo sapiens
attctcttcaatgga

SEQ ID NO: 1764100 - DNA, 15 bp, Homo sapiens
ttctcttcaatggag

SEQ ID NO: 1764101 - DNA, 15 bp, Homo sapiens
tctcttcaatggaga

SEQ ID NO: 1764102 - DNA, 15 bp, Homo sapiens
ctcttcaatggagat

SEQ ID NO: 1764103 - DNA, 15 bp, Homo sapiens
tcttcaatggagatg

SEQ ID NO: 1764104 - DNA, 15 bp, Homo sapiens
cttcaatggagatgg

SEQ ID NO: 1764105 - DNA, 15 bp, Homo sapiens
ttcaatggagatggg

SEQ ID NO: 1764106 - DNA, 15 bp, Homo sapiens
tcaatggagatgggg

SEQ ID NO: 1764107 - DNA, 15 bp, Homo sapiens
caatggagatgggga

SEQ ID NO: 1764108 - DNA, 15 bp, Homo sapiens
aatggagatggggac

SEQ ID NO: 1764109 - DNA, 15 bp, Homo sapiens
atggagatggggact

SEQ ID NO: 1764110 - DNA, 15 bp, Homo sapiens
tggagatggggactc

SEQ ID NO: 1764111 - DNA, 15 bp, Homo sapiens
ggagatggggactcc

SEQ ID NO: 1764112 - DNA, 15 bp, Homo sapiens
gagatggggactcca

SEQ ID NO: 1764113 - DNA, 15 bp, Homo sapiens
agatggggactccat

SEQ ID NO: 1764114 - DNA, 15 bp, Homo sapiens
gatggggactccatt

SEQ ID NO: 1764115 - DNA, 15 bp, Homo sapiens
atggggactccattg

SEQ ID NO: 1764116 - DNA, 15 bp, Homo sapiens
tggggactccattga

SEQ ID NO: 1764117 - DNA, 15 bp, Homo sapiens
ggggactccattgaa

SEQ ID NO: 1764118 - DNA, 15 bp, Homo sapiens
gggactccattgaag

SEQ ID NO: 1764119 - DNA, 15 bp, Homo sapiens
ggactccattgaagt

SEQ ID NO: 1764120 - DNA, 15 bp, Homo sapiens
gactccattgaagtc

SEQ ID NO: 1764121 - DNA, 15 bp, Homo sapiens
actccattgaagtct

SEQ ID NO: 1764122 - DNA, 15 bp, Homo sapiens
ctccattgaagtcta

SEQ ID NO: 1764123 - DNA, 15 bp, Homo sapiens
tccattgaagtctat

SEQ ID NO: 1764124 - DNA, 15 bp, Homo sapiens
ccattgaagtctatg

SEQ ID NO: 1764125 - DNA, 15 bp, Homo sapiens
cattgaagtctatga

SEQ ID NO: 1764126 - DNA, 15 bp, Homo sapiens
attgaagtctatgac

SEQ ID NO: 1764127 - DNA, 15 bp, Homo sapiens
ttgaagtctatgacc

SEQ ID NO: 1764128 - DNA, 15 bp, Homo sapiens
tgaagtctatgacca

SEQ ID NO: 1764129 - DNA, 15 bp, Homo sapiens
gaagtctatgaccaa

SEQ ID NO: 1764130 - DNA, 15 bp, Homo sapiens
aagtctatgaccaaa

SEQ ID NO: 1764131 - DNA, 15 bp, Homo sapiens
agtctatgaccaaat

SEQ ID NO: 1764132 - DNA, 15 bp, Homo sapiens
gtctatgaccaaatg

SEQ ID NO: 1764133 - DNA, 15 bp, Homo sapiens
tctatgaccaaatgt

SEQ ID NO: 1764134 - DNA, 15 bp, Homo sapiens
ctatgaccaaatgta

SEQ ID NO: 1764135 - DNA, 15 bp, Homo sapiens
tatgaccaaatgtag

SEQ ID NO: 1764136 - DNA, 15 bp, Homo sapiens
atgaccaaatgtagg

SEQ ID NO: 1764137 - DNA, 15 bp, Homo sapiens
tgaccaaatgtaggc

SEQ ID NO: 1764138 - DNA, 15 bp, Homo sapiens
gaccaaatgtaggca

SEQ ID NO: 1764139 - DNA, 15 bp, Homo sapiens
accaaatgtaggcat

SEQ ID NO: 1764140 - DNA, 15 bp, Homo sapiens
ccaaatgtaggcatg

SEQ ID NO: 1764141 - DNA, 15 bp, Homo sapiens
caaatgtaggcatgg

SEQ ID NO: 1764142 - DNA, 15 bp, Homo sapiens
aaatgtaggcatggt

SEQ ID NO: 1764143 - DNA, 15 bp, Homo sapiens
aatgtaggcatggtc

SEQ ID NO: 1764144 - DNA, 15 bp, Homo sapiens
atgtaggcatggtca

SEQ ID NO: 1764145 - DNA, 15 bp, Homo sapiens
tgtaggcatggtcag

SEQ ID NO: 1764146 - DNA, 15 bp, Homo sapiens
gtaggcatggtcagc

SEQ ID NO: 1764147 - DNA, 15 bp, Homo sapiens
taggcatggtcagcc

SEQ ID NO: 1764148 - DNA, 15 bp, Homo sapiens
aggcatggtcagcct

SEQ ID NO: 1764149 - DNA, 15 bp, Homo sapiens
ggcatggtcagcctc

SEQ ID NO: 1764150 - DNA, 15 bp, Homo sapiens
gcatggtcagcctcc

SEQ ID NO: 1764151 - DNA, 15 bp, Homo sapiens
catggtcagcctcct

SEQ ID NO: 1764152 - DNA, 15 bp, Homo sapiens
atggtcagcctcctt

SEQ ID NO: 1764153 - DNA, 15 bp, Homo sapiens
tggtcagcctcctta

SEQ ID NO: 1764154 - DNA, 15 bp, Homo sapiens
ggtcagcctccttag

SEQ ID NO: 1764155 - DNA, 15 bp, Homo sapiens
gtcagcctccttaga

SEQ ID NO: 1764156 - DNA, 15 bp, Homo sapiens
tcagcctccttagac

SEQ ID NO: 1764157 - DNA, 15 bp, Homo sapiens
cagcctccttagact

SEQ ID NO: 1764158 - DNA, 15 bp, Homo sapiens
agcctccttagactc

SEQ ID NO: 1764159 - DNA, 15 bp, Homo sapiens
gcctccttagactca

SEQ ID NO: 1764160 - DNA, 15 bp, Homo sapiens
cctccttagactcag

SEQ ID NO: 1764161 - DNA, 15 bp, Homo sapiens
ctccttagactcagg

SEQ ID NO: 1764162 - DNA, 15 bp, Homo sapiens
tccttagactcaggg

SEQ ID NO: 1764163 - DNA, 15 bp, Homo sapiens
ccttagactcaggga

SEQ ID NO: 1764164 - DNA, 15 bp, Homo sapiens
cttagactcagggaa

SEQ ID NO: 1764165 - DNA, 15 bp, Homo sapiens
ttagactcagggaat

SEQ ID NO: 1764166 - DNA, 15 bp, Homo sapiens
tagactcagggaatt

SEQ ID NO: 1764167 - DNA, 15 bp, Homo sapiens
agactcagggaattg

SEQ ID NO: 1764168 - DNA, 15 bp, Homo sapiens
gactcagggaattga

SEQ ID NO: 1764169 - DNA, 15 bp, Homo sapiens
actcagggaattgaa

SEQ ID NO: 1764170 - DNA, 15 bp, Homo sapiens
ctcagggaattgaat

SEQ ID NO: 1764171 - DNA, 15 bp, Homo sapiens
tcagggaattgaatc

SEQ ID NO: 1764172 - DNA, 15 bp, Homo sapiens
cagggaattgaatcc

SEQ ID NO: 1764173 - DNA, 15 bp, Homo sapiens
agggaattgaatcca

SEQ ID NO: 1764174 - DNA, 15 bp, Homo sapiens
gggaattgaatccat

SEQ ID NO: 1764175 - DNA, 15 bp, Homo sapiens
ggaattgaatccatg

SEQ ID NO: 1764176 - DNA, 15 bp, Homo sapiens
gaattgaatccatgg

SEQ ID NO: 1764177 - DNA, 15 bp, Homo sapiens
aattgaatccatggc

SEQ ID NO: 1764178 - DNA, 15 bp, Homo sapiens
attgaatccatggct

SEQ ID NO: 1764179 - DNA, 15 bp, Homo sapiens
ttgaatccatggcta

SEQ ID NO: 1764180 - DNA, 15 bp, Homo sapiens
tgaatccatggctat

SEQ ID NO: 1764181 - DNA, 15 bp, Homo sapiens
gaatccatggctatt

SEQ ID NO: 1764182 - DNA, 15 bp, Homo sapiens
aatccatggctattc

SEQ ID NO: 1764183 - DNA, 15 bp, Homo sapiens
atccatggctattca

SEQ ID NO: 1764184 - DNA, 15 bp, Homo sapiens
tccatggctattcac

SEQ ID NO: 1764185 - DNA, 15 bp, Homo sapiens
ccatggctattcacc

SEQ ID NO: 1764186 - DNA, 15 bp, Homo sapiens
catggctattcacct

SEQ ID NO: 1764187 - DNA, 15 bp, Homo sapiens
atggctattcacctg

SEQ ID NO: 1764188 - DNA, 15 bp, Homo sapiens
tggctattcacctgc

SEQ ID NO: 1764189 - DNA, 15 bp, Homo sapiens
ggctattcacctgct

SEQ ID NO: 1764190 - DNA, 15 bp, Homo sapiens
gctattcacctgcta

SEQ ID NO: 1764191 - DNA, 15 bp, Homo sapiens
ctattcacctgctac

SEQ ID NO: 1764192 - DNA, 15 bp, Homo sapiens
tattcacctgctaca

SEQ ID NO: 1764193 - DNA, 15 bp, Homo sapiens
attcacctgctacag

SEQ ID NO: 1764194 - DNA, 15 bp, Homo sapiens
ttcacctgctacagc

SEQ ID NO: 1764195 - DNA, 15 bp, Homo sapiens
tcacctgctacagca

SEQ ID NO: 1764196 - DNA, 15 bp, Homo sapiens
cacctgctacagcag

SEQ ID NO: 1764197 - DNA, 15 bp, Homo sapiens
acctgctacagcagg

SEQ ID NO: 1764198 - DNA, 15 bp, Homo sapiens
cctgctacagcaggt

SEQ ID NO: 1764199 - DNA, 15 bp, Homo sapiens
ctgctacagcaggtg

SEQ ID NO: 1764200 - DNA, 15 bp, Homo sapiens
tgctacagcaggtgc

SEQ ID NO: 1764201 - DNA, 15 bp, Homo sapiens
gctacagcaggtgca

SEQ ID NO: 1764202 - DNA, 15 bp, Homo sapiens
ctacagcaggtgcac

SEQ ID NO: 1764203 - DNA, 15 bp, Homo sapiens
tacagcaggtgcaca

SEQ ID NO: 1764204 - DNA, 15 bp, Homo sapiens
acagcaggtgcacaa

SEQ ID NO: 1764205 - DNA, 15 bp, Homo sapiens
cagcaggtgcacaac

SEQ ID NO: 1764206 - DNA, 15 bp, Homo sapiens
agcaggtgcacaacc

SEQ ID NO: 1764207 - DNA, 15 bp, Homo sapiens
gcaggtgcacaacca

SEQ ID NO: 1764208 - DNA, 15 bp, Homo sapiens
caggtgcacaaccag

SEQ ID NO: 1764209 - DNA, 15 bp, Homo sapiens
aggtgcacaaccaga

SEQ ID NO: 1764210 - DNA, 15 bp, Homo sapiens
ggtgcacaaccagat

SEQ ID NO: 1764211 - DNA, 15 bp, Homo sapiens
gtgcacaaccagatg

SEQ ID NO: 1764212 - DNA, 15 bp, Homo sapiens
tgcacaaccagatgc

SEQ ID NO: 1764213 - DNA, 15 bp, Homo sapiens
gcacaaccagatgcc

SEQ ID NO: 1764214 - DNA, 15 bp, Homo sapiens
cacaaccagatgcca

SEQ ID NO: 1764215 - DNA, 15 bp, Homo sapiens
acaaccagatgccaa

SEQ ID NO: 1764216 - DNA, 15 bp, Homo sapiens
caaccagatgccaac

SEQ ID NO: 1764217 - DNA, 15 bp, Homo sapiens
aaccagatgccaaca

SEQ ID NO: 1764218 - DNA, 15 bp, Homo sapiens
accagatgccaacag

SEQ ID NO: 1764219 - DNA, 15 bp, Homo sapiens
ccagatgccaacagt

SEQ ID NO: 1764220 - DNA, 15 bp, Homo sapiens
cagatgccaacagta

SEQ ID NO: 1764221 - DNA, 15 bp, Homo sapiens
agatgccaacagtag

SEQ ID NO: 1764222 - DNA, 15 bp, Homo sapiens
gatgccaacagtagt

SEQ ID NO: 1764223 - DNA, 15 bp, Homo sapiens
atgccaacagtagtg

SEQ ID NO: 1764224 - DNA, 15 bp, Homo sapiens
tgccaacagtagtgt

SEQ ID NO: 1764225 - DNA, 15 bp, Homo sapiens
gccaacagtagtgtt

SEQ ID NO: 1764226 - DNA, 15 bp, Homo sapiens
ccaacagtagtgttg

SEQ ID NO: 1764227 - DNA, 15 bp, Homo sapiens
caacagtagtgttgt

SEQ ID NO: 1764228 - DNA, 15 bp, Homo sapiens
aacagtagtgttgtt

SEQ ID NO: 1764229 - DNA, 15 bp, Homo sapiens
acagtagtgttgtta

SEQ ID NO: 1764230 - DNA, 15 bp, Homo sapiens
cagtagtgttgttaa

SEQ ID NO: 1764231 - DNA, 15 bp, Homo sapiens
agtagtgttgttaag

SEQ ID NO: 1764232 - DNA, 15 bp, Homo sapiens
gtagtgttgttaaga

SEQ ID NO: 1764233 - DNA, 15 bp, Homo sapiens
tagtgttgttaagag

SEQ ID NO: 1764234 - DNA, 15 bp, Homo sapiens
agtgttgttaagagg

SEQ ID NO: 1764235 - DNA, 15 bp, Homo sapiens
gtgttgttaagagga

SEQ ID NO: 1764236 - DNA, 15 bp, Homo sapiens
tgttgttaagaggaa

SEQ ID NO: 1764237 - DNA, 15 bp, Homo sapiens
gttgttaagaggaat

SEQ ID NO: 1764238 - DNA, 15 bp, Homo sapiens
ttgttaagaggaatt

SEQ ID NO: 1764239 - DNA, 15 bp, Homo sapiens
tgttaagaggaattc

SEQ ID NO: 1764240 - DNA, 15 bp, Homo sapiens
gttaagaggaattcc

SEQ ID NO: 1764241 - DNA, 15 bp, Homo sapiens
ttaagaggaattccc

SEQ ID NO: 1764242 - DNA, 15 bp, Homo sapiens
taagaggaattccca

SEQ ID NO: 1764243 - DNA, 15 bp, Homo sapiens
aagaggaattcccag

SEQ ID NO: 1764244 - DNA, 15 bp, Homo sapiens
agaggaattcccagg

SEQ ID NO: 1764245 - DNA, 15 bp, Homo sapiens
gaggaattcccaggc

SEQ ID NO: 1764246 - DNA, 15 bp, Homo sapiens
aggaattcccaggcc

SEQ ID NO: 1764247 - DNA, 15 bp, Homo sapiens
ggaattcccaggccg

SEQ ID NO: 1764248 - DNA, 15 bp, Homo sapiens
gaattcccaggccgg

SEQ ID NO: 1764249 - DNA, 15 bp, Homo sapiens
aattcccaggccggg

SEQ ID NO: 1764250 - DNA, 15 bp, Homo sapiens
attcccaggccgggc

SEQ ID NO: 1764251 - DNA, 15 bp, Homo sapiens
ttcccaggccgggca

SEQ ID NO: 1764252 - DNA, 15 bp, Homo sapiens
tcccaggccgggcac

SEQ ID NO: 1764253 - DNA, 15 bp, Homo sapiens
cccaggccgggcacg

SEQ ID NO: 1764254 - DNA, 15 bp, Homo sapiens
ccaggccgggcacgg

SEQ ID NO: 1764255 - DNA, 15 bp, Homo sapiens
caggccgggcacggt

SEQ ID NO: 1764256 - DNA, 15 bp, Homo sapiens
aggccgggcacggtg

SEQ ID NO: 1764257 - DNA, 15 bp, Homo sapiens
ggccgggcacggtgg

SEQ ID NO: 1764258 - DNA, 15 bp, Homo sapiens
gccgggcacggtggc

SEQ ID NO: 1764259 - DNA, 15 bp, Homo sapiens
ccgggcacggtggct

SEQ ID NO: 1764260 - DNA, 15 bp, Homo sapiens
cgggcacggtggctc

SEQ ID NO: 1764261 - DNA, 15 bp, Homo sapiens
cggtggctcatgctt

SEQ ID NO: 1764262 - DNA, 15 bp, Homo sapiens
cactttgggaggcag

SEQ ID NO: 1764263 - DNA, 15 bp, Homo sapiens
ctttgggaggcagag

SEQ ID NO: 1764264 - DNA, 15 bp, Homo sapiens
tttgggaggcagagg

SEQ ID NO: 1764265 - DNA, 15 bp, Homo sapiens
tgggaggcagaggcg

SEQ ID NO: 1764266 - DNA, 15 bp, Homo sapiens
gggaggcagaggcgg

SEQ ID NO: 1764267 - DNA, 15 bp, Homo sapiens
ggaggcagaggcggg

SEQ ID NO: 1764268 - DNA, 15 bp, Homo sapiens
gaggcagaggcgggc

SEQ ID NO: 1764269 - DNA, 15 bp, Homo sapiens
aggcagaggcgggcg

SEQ ID NO: 1764270 - DNA, 15 bp, Homo sapiens
ggcagaggcgggcgg

SEQ ID NO: 1764271 - DNA, 15 bp, Homo sapiens
gcagaggcgggcgga

SEQ ID NO: 1764272 - DNA, 15 bp, Homo sapiens
cagaggcgggcggat

SEQ ID NO: 1764273 - DNA, 15 bp, Homo sapiens
agaggcgggcggatc

SEQ ID NO: 1764274 - DNA, 15 bp, Homo sapiens
acttgaggtcaggaa

SEQ ID NO: 1764275 - DNA, 15 bp, Homo sapiens
cttgaggtcaggaat

SEQ ID NO: 1764276 - DNA, 15 bp, Homo sapiens
ttgaggtcaggaatt

SEQ ID NO: 1764277 - DNA, 15 bp, Homo sapiens
gaggtcaggaattcg

SEQ ID NO: 1764278 - DNA, 15 bp, Homo sapiens
cctggctaacatggc

SEQ ID NO: 1764279 - DNA, 15 bp, Homo sapiens
ctggctaacatggca

SEQ ID NO: 1764280 - DNA, 15 bp, Homo sapiens
tggctaacatggcaa

SEQ ID NO: 1764281 - DNA, 15 bp, Homo sapiens
ggctaacatggcaaa

SEQ ID NO: 1764282 - DNA, 15 bp, Homo sapiens
gctaacatggcaaaa

SEQ ID NO: 1764283 - DNA, 15 bp, Homo sapiens
ctaacatggcaaaac

SEQ ID NO: 1764284 - DNA, 15 bp, Homo sapiens
taacatggcaaaacc

SEQ ID NO: 1764285 - DNA, 15 bp, Homo sapiens
acatggcaaaacccg

SEQ ID NO: 1764286 - DNA, 15 bp, Homo sapiens
catggcaaaacccgt

SEQ ID NO: 1764287 - DNA, 15 bp, Homo sapiens
atggcaaaacccgtc

SEQ ID NO: 1764288 - DNA, 15 bp, Homo sapiens
tggcaaaacccgtct

SEQ ID NO: 1764289 - DNA, 15 bp, Homo sapiens
ggcaaaacccgtctc

SEQ ID NO: 1764290 - DNA, 15 bp, Homo sapiens
gcaaaacccgtctct

SEQ ID NO: 1764291 - DNA, 15 bp, Homo sapiens
caaaacccgtctcta

SEQ ID NO: 1764292 - DNA, 15 bp, Homo sapiens
aaaacccgtctctac

SEQ ID NO: 1764293 - DNA, 15 bp, Homo sapiens
aaacccgtctctact

SEQ ID NO: 1764294 - DNA, 15 bp, Homo sapiens
aacccgtctctacta

SEQ ID NO: 1764295 - DNA, 15 bp, Homo sapiens
acccgtctctactaa

SEQ ID NO: 1764296 - DNA, 15 bp, Homo sapiens
tctctactaaaaatg

SEQ ID NO: 1764297 - DNA, 15 bp, Homo sapiens
ctctactaaaaatgc

SEQ ID NO: 1764298 - DNA, 15 bp, Homo sapiens
tctactaaaaatgca

SEQ ID NO: 1764299 - DNA, 15 bp, Homo sapiens
ctactaaaaatgcaa

SEQ ID NO: 1764300 - DNA, 15 bp, Homo sapiens
tactaaaaatgcaaa

SEQ ID NO: 1764301 - DNA, 15 bp, Homo sapiens
actaaaaatgcaaaa

SEQ ID NO: 1764302 - DNA, 15 bp, Homo sapiens
ctaaaaatgcaaaaa

SEQ ID NO: 1764303 - DNA, 15 bp, Homo sapiens
taaaaatgcaaaaaa

SEQ ID NO: 1764304 - DNA, 15 bp, Homo sapiens
aaaaatgcaaaaaaa

SEQ ID NO: 1764305 - DNA, 15 bp, Homo sapiens
aaaatgcaaaaaaaa

SEQ ID NO: 1764306 - DNA, 15 bp, Homo sapiens
aaatgcaaaaaaaaa

SEQ ID NO: 1764307 - DNA, 15 bp, Homo sapiens
aatgcaaaaaaaaaa

SEQ ID NO: 1764308 - DNA, 15 bp, Homo sapiens
atgcaaaaaaaaaat

SEQ ID NO: 1764309 - DNA, 15 bp, Homo sapiens
tgcaaaaaaaaaatt

SEQ ID NO: 1764310 - DNA, 15 bp, Homo sapiens
gcaaaaaaaaaatta

SEQ ID NO: 1764311 - DNA, 15 bp, Homo sapiens
caaaaaaaaaattag

SEQ ID NO: 1764312 - DNA, 15 bp, Homo sapiens
aaaaaaaaaattagc

SEQ ID NO: 1764313 - DNA, 15 bp, Homo sapiens
aaaattagccaggcc

SEQ ID NO: 1764314 - DNA, 15 bp, Homo sapiens
aaattagccaggcct

SEQ ID NO: 1764315 - DNA, 15 bp, Homo sapiens
aattagccaggcctg

SEQ ID NO: 1764316 - DNA, 15 bp, Homo sapiens
attagccaggcctgg

SEQ ID NO: 1764317 - DNA, 15 bp, Homo sapiens
ttagccaggcctggt

SEQ ID NO: 1764318 - DNA, 15 bp, Homo sapiens
tagccaggcctggtg

SEQ ID NO: 1764319 - DNA, 15 bp, Homo sapiens
agccaggcctggtgg

SEQ ID NO: 1764320 - DNA, 15 bp, Homo sapiens
gccaggcctggtggc

SEQ ID NO: 1764321 - DNA, 15 bp, Homo sapiens
ccaggcctggtggca

SEQ ID NO: 1764322 - DNA, 15 bp, Homo sapiens
caggcctggtggcag

SEQ ID NO: 1764323 - DNA, 15 bp, Homo sapiens
aggcctggtggcagg

SEQ ID NO: 1764324 - DNA, 15 bp, Homo sapiens
ggcctggtggcaggt

SEQ ID NO: 1764325 - DNA, 15 bp, Homo sapiens
gcctggtggcaggtg

SEQ ID NO: 1764326 - DNA, 15 bp, Homo sapiens
cctggtggcaggtgc

SEQ ID NO: 1764327 - DNA, 15 bp, Homo sapiens
ctggtggcaggtgcc

SEQ ID NO: 1764328 - DNA, 15 bp, Homo sapiens
agaatcccttgaacc

SEQ ID NO: 1764329 - DNA, 15 bp, Homo sapiens
gaatcccttgaacct

SEQ ID NO: 1764330 - DNA, 15 bp, Homo sapiens
aatcccttgaacctg

SEQ ID NO: 1764331 - DNA, 15 bp, Homo sapiens
atcccttgaacctgg

SEQ ID NO: 1764332 - DNA, 15 bp, Homo sapiens
tcccttgaacctggg

SEQ ID NO: 1764333 - DNA, 15 bp, Homo sapiens
cccttgaacctggga

SEQ ID NO: 1764334 - DNA, 15 bp, Homo sapiens
ccttgaacctgggag

SEQ ID NO: 1764335 - DNA, 15 bp, Homo sapiens
ggaggtggaggttgt

SEQ ID NO: 1764336 - DNA, 15 bp, Homo sapiens
gaggtggaggttgta

SEQ ID NO: 1764337 - DNA, 15 bp, Homo sapiens
aggtggaggttgtag

SEQ ID NO: 1764338 - DNA, 15 bp, Homo sapiens
ggtggaggttgtagt

SEQ ID NO: 1764339 - DNA, 15 bp, Homo sapiens
gtggaggttgtagtg

SEQ ID NO: 1764340 - DNA, 15 bp, Homo sapiens
tggaggttgtagtga

SEQ ID NO: 1764341 - DNA, 15 bp, Homo sapiens
gaggttgtagtgagc

SEQ ID NO: 1764342 - DNA, 15 bp, Homo sapiens
aggttgtagtgagcc

SEQ ID NO: 1764343 - DNA, 15 bp, Homo sapiens
ctctagcctgggcag

SEQ ID NO: 1764344 - DNA, 15 bp, Homo sapiens
tctagcctgggcagc

SEQ ID NO: 1764345 - DNA, 15 bp, Homo sapiens
ctagcctgggcagca

SEQ ID NO: 1764346 - DNA, 15 bp, Homo sapiens
tagcctgggcagcag

SEQ ID NO: 1764347 - DNA, 15 bp, Homo sapiens
agcctgggcagcagt

SEQ ID NO: 1764348 - DNA, 15 bp, Homo sapiens
gcctgggcagcagtg

SEQ ID NO: 1764349 - DNA, 15 bp, Homo sapiens
cctgggcagcagtga

SEQ ID NO: 1764350 - DNA, 15 bp, Homo sapiens
ctgggcagcagtgag

SEQ ID NO: 1764351 - DNA, 15 bp, Homo sapiens
tgggcagcagtgaga

SEQ ID NO: 1764352 - DNA, 15 bp, Homo sapiens
gggcagcagtgagac

SEQ ID NO: 1764353 - DNA, 15 bp, Homo sapiens
ggcagcagtgagact

SEQ ID NO: 1764354 - DNA, 15 bp, Homo sapiens
gcagcagtgagactc

SEQ ID NO: 1764355 - DNA, 15 bp, Homo sapiens
cagcagtgagactcc

SEQ ID NO: 1764356 - DNA, 15 bp, Homo sapiens
agcagtgagactcca

SEQ ID NO: 1764357 - DNA, 15 bp, Homo sapiens
gcagtgagactccat

SEQ ID NO: 1764358 - DNA, 15 bp, Homo sapiens
cagtgagactccatc

SEQ ID NO: 1764359 - DNA, 15 bp, Homo sapiens
gtgagactccatctt

SEQ ID NO: 1764360 - DNA, 15 bp, Homo sapiens
tgagactccatctta

SEQ ID NO: 1764361 - DNA, 15 bp, Homo sapiens
gagactccatcttaa

SEQ ID NO: 1764362 - DNA, 15 bp, Homo sapiens
agactccatcttaaa

SEQ ID NO: 1764363 - DNA, 15 bp, Homo sapiens
gactccatcttaaaa

SEQ ID NO: 1764364 - DNA, 15 bp, Homo sapiens
actccatcttaaaaa

SEQ ID NO: 1764365 - DNA, 15 bp, Homo sapiens
ctccatcttaaaaaa

SEQ ID NO: 1764366 - DNA, 15 bp, Homo sapiens
tccatcttaaaaaaa

SEQ ID NO: 1764367 - DNA, 15 bp, Homo sapiens
ttaaaaaaaaaaaag

SEQ ID NO: 1764368 - DNA, 15 bp, Homo sapiens
taaaaaaaaaaaaga

SEQ ID NO: 1764369 - DNA, 15 bp, Homo sapiens
aaaaaaaaagaagag

SEQ ID NO: 1764370 - DNA, 15 bp, Homo sapiens
aaaaaaaagaagagg

SEQ ID NO: 1764371 - DNA, 15 bp, Homo sapiens
aaaaaaagaagagga

SEQ ID NO: 1764372 - DNA, 15 bp, Homo sapiens
aaaaaagaagaggaa

SEQ ID NO: 1764373 - DNA, 15 bp, Homo sapiens
aaaaagaagaggaat

SEQ ID NO: 1764374 - DNA, 15 bp, Homo sapiens
aaaagaagaggaatt

SEQ ID NO: 1764375 - DNA, 15 bp, Homo sapiens
aaagaagaggaattc

SEQ ID NO: 1764376 - DNA, 15 bp, Homo sapiens
aagaagaggaattcc

SEQ ID NO: 1764377 - DNA, 15 bp, Homo sapiens
agaagaggaattccc

SEQ ID NO: 1764378 - DNA, 15 bp, Homo sapiens
gaagaggaattccca

SEQ ID NO: 1764379 - DNA, 15 bp, Homo sapiens
agaggaattcccaga

SEQ ID NO: 1764380 - DNA, 15 bp, Homo sapiens
gaggaattcccagac

SEQ ID NO: 1764381 - DNA, 15 bp, Homo sapiens
aggaattcccagact

SEQ ID NO: 1764382 - DNA, 15 bp, Homo sapiens
ggaattcccagactg

SEQ ID NO: 1764383 - DNA, 15 bp, Homo sapiens
gaattcccagactgt

SEQ ID NO: 1764384 - DNA, 15 bp, Homo sapiens
aattcccagactgtc

SEQ ID NO: 1764385 - DNA, 15 bp, Homo sapiens
attcccagactgtct

SEQ ID NO: 1764386 - DNA, 15 bp, Homo sapiens
ttcccagactgtctc

SEQ ID NO: 1764387 - DNA, 15 bp, Homo sapiens
tcccagactgtctca

SEQ ID NO: 1764388 - DNA, 15 bp, Homo sapiens
cccagactgtctcag

SEQ ID NO: 1764389 - DNA, 15 bp, Homo sapiens
ccagactgtctcagt

SEQ ID NO: 1764390 - DNA, 15 bp, Homo sapiens
cagactgtctcagtc

SEQ ID NO: 1764391 - DNA, 15 bp, Homo sapiens
agactgtctcagtcc

SEQ ID NO: 1764392 - DNA, 15 bp, Homo sapiens
gactgtctcagtcca

SEQ ID NO: 1764393 - DNA, 15 bp, Homo sapiens
actgtctcagtccac

SEQ ID NO: 1764394 - DNA, 15 bp, Homo sapiens
ctgtctcagtccact

SEQ ID NO: 1764395 - DNA, 15 bp, Homo sapiens
tgtctcagtccactc

SEQ ID NO: 1764396 - DNA, 15 bp, Homo sapiens
gtctcagtccactca

SEQ ID NO: 1764397 - DNA, 15 bp, Homo sapiens
tctcagtccactcag

SEQ ID NO: 1764398 - DNA, 15 bp, Homo sapiens
ctcagtccactcagg

SEQ ID NO: 1764399 - DNA, 15 bp, Homo sapiens
tcagtccactcaggc

SEQ ID NO: 1764400 - DNA, 15 bp, Homo sapiens
cagtccactcaggct

SEQ ID NO: 1764401 - DNA, 15 bp, Homo sapiens
agtccactcaggctg

SEQ ID NO: 1764402 - DNA, 15 bp, Homo sapiens
gtccactcaggctgc

SEQ ID NO: 1764403 - DNA, 15 bp, Homo sapiens
tccactcaggctgct

SEQ ID NO: 1764404 - DNA, 15 bp, Homo sapiens
ccactcaggctgcta

SEQ ID NO: 1764405 - DNA, 15 bp, Homo sapiens
cactcaggctgctac

SEQ ID NO: 1764406 - DNA, 15 bp, Homo sapiens
actcaggctgctaca

SEQ ID NO: 1764407 - DNA, 15 bp, Homo sapiens
ctcaggctgctacaa

SEQ ID NO: 1764408 - DNA, 15 bp, Homo sapiens
tcaggctgctacaac

SEQ ID NO: 1764409 - DNA, 15 bp, Homo sapiens
caggctgctacaaca

SEQ ID NO: 1764410 - DNA, 15 bp, Homo sapiens
aggctgctacaacaa

SEQ ID NO: 1764411 - DNA, 15 bp, Homo sapiens
ggctgctacaacaaa

SEQ ID NO: 1764412 - DNA, 15 bp, Homo sapiens
gctgctacaacaaaa

SEQ ID NO: 1764413 - DNA, 15 bp, Homo sapiens
ctgctacaacaaaat

SEQ ID NO: 1764414 - DNA, 15 bp, Homo sapiens
tgctacaacaaaata

SEQ ID NO: 1764415 - DNA, 15 bp, Homo sapiens
gctacaacaaaatac

SEQ ID NO: 1764416 - DNA, 15 bp, Homo sapiens
ctacaacaaaatacc

SEQ ID NO: 1764417 - DNA, 15 bp, Homo sapiens
tacaacaaaatacca

SEQ ID NO: 1764418 - DNA, 15 bp, Homo sapiens
acaacaaaataccat

SEQ ID NO: 1764419 - DNA, 15 bp, Homo sapiens
caacaaaataccata

SEQ ID NO: 1764420 - DNA, 15 bp, Homo sapiens
aacaaaataccatag

SEQ ID NO: 1764421 - DNA, 15 bp, Homo sapiens
acaaaataccataga

SEQ ID NO: 1764422 - DNA, 15 bp, Homo sapiens
caaaataccatagac

SEQ ID NO: 1764423 - DNA, 15 bp, Homo sapiens
aaaataccatagact

SEQ ID NO: 1764424 - DNA, 15 bp, Homo sapiens
aaataccatagactg

SEQ ID NO: 1764425 - DNA, 15 bp, Homo sapiens
aataccatagactgg

SEQ ID NO: 1764426 - DNA, 15 bp, Homo sapiens
ataccatagactggg

SEQ ID NO: 1764427 - DNA, 15 bp, Homo sapiens
taccatagactgggt

SEQ ID NO: 1764428 - DNA, 15 bp, Homo sapiens
accatagactgggtg

SEQ ID NO: 1764429 - DNA, 15 bp, Homo sapiens
ccatagactgggtgg

SEQ ID NO: 1764430 - DNA, 15 bp, Homo sapiens
catagactgggtggc

SEQ ID NO: 1764431 - DNA, 15 bp, Homo sapiens
atagactgggtggct

SEQ ID NO: 1764432 - DNA, 15 bp, Homo sapiens
tagactgggtggctt

SEQ ID NO: 1764433 - DNA, 15 bp, Homo sapiens
agactgggtggctta

SEQ ID NO: 1764434 - DNA, 15 bp, Homo sapiens
gactgggtggcttat

SEQ ID NO: 1764435 - DNA, 15 bp, Homo sapiens
actgggtggcttata

SEQ ID NO: 1764436 - DNA, 15 bp, Homo sapiens
ctgggtggcttataa

SEQ ID NO: 1764437 - DNA, 15 bp, Homo sapiens
tgggtggcttataaa

SEQ ID NO: 1764438 - DNA, 15 bp, Homo sapiens
gggtggcttataaaa

SEQ ID NO: 1764439 - DNA, 15 bp, Homo sapiens
ggtggcttataaaaa

SEQ ID NO: 1764440 - DNA, 15 bp, Homo sapiens
gtggcttataaaaag

SEQ ID NO: 1764441 - DNA, 15 bp, Homo sapiens
tggcttataaaaagc

SEQ ID NO: 1764442 - DNA, 15 bp, Homo sapiens
ggcttataaaaagca

SEQ ID NO: 1764443 - DNA, 15 bp, Homo sapiens
gcttataaaaagcag

SEQ ID NO: 1764444 - DNA, 15 bp, Homo sapiens
cttataaaaagcaga

SEQ ID NO: 1764445 - DNA, 15 bp, Homo sapiens
ttataaaaagcagaa

SEQ ID NO: 1764446 - DNA, 15 bp, Homo sapiens
tataaaaagcagaaa

SEQ ID NO: 1764447 - DNA, 15 bp, Homo sapiens
ataaaaagcagaaat

SEQ ID NO: 1764448 - DNA, 15 bp, Homo sapiens
taaaaagcagaaatt

SEQ ID NO: 1764449 - DNA, 15 bp, Homo sapiens
aaaaagcagaaattt

SEQ ID NO: 1764450 - DNA, 15 bp, Homo sapiens
aaaagcagaaatttt

SEQ ID NO: 1764451 - DNA, 15 bp, Homo sapiens
aaagcagaaattttt

SEQ ID NO: 1764452 - DNA, 15 bp, Homo sapiens
aagcagaaatttttt

SEQ ID NO: 1764453 - DNA, 15 bp, Homo sapiens
agcagaaattttttt

SEQ ID NO: 1764454 - DNA, 15 bp, Homo sapiens
gcagaaatttttttc

SEQ ID NO: 1764455 - DNA, 15 bp, Homo sapiens
cagaaatttttttct

SEQ ID NO: 1764456 - DNA, 15 bp, Homo sapiens
agaaatttttttctc

SEQ ID NO: 1764457 - DNA, 15 bp, Homo sapiens
gaaatttttttctca

SEQ ID NO: 1764458 - DNA, 15 bp, Homo sapiens
aaatttttttctcac

SEQ ID NO: 1764459 - DNA, 15 bp, Homo sapiens
aatttttttctcaca

SEQ ID NO: 1764460 - DNA, 15 bp, Homo sapiens
atttttttctcacag

SEQ ID NO: 1764461 - DNA, 15 bp, Homo sapiens
tttttttctcacagt

SEQ ID NO: 1764462 - DNA, 15 bp, Homo sapiens
ttttttctcacagtt

SEQ ID NO: 1764463 - DNA, 15 bp, Homo sapiens
tttttctcacagttc

SEQ ID NO: 1764464 - DNA, 15 bp, Homo sapiens
tttctcacagttcta

SEQ ID NO: 1764465 - DNA, 15 bp, Homo sapiens
ttctcacagttctag

SEQ ID NO: 1764466 - DNA, 15 bp, Homo sapiens
tctcacagttctagg

SEQ ID NO: 1764467 - DNA, 15 bp, Homo sapiens
ctcacagttctaggg

SEQ ID NO: 1764468 - DNA, 15 bp, Homo sapiens
tcacagttctagggg

SEQ ID NO: 1764469 - DNA, 15 bp, Homo sapiens
cacagttctaggggc

SEQ ID NO: 1764470 - DNA, 15 bp, Homo sapiens
acagttctaggggct

SEQ ID NO: 1764471 - DNA, 15 bp, Homo sapiens
cagttctaggggctg

SEQ ID NO: 1764472 - DNA, 15 bp, Homo sapiens
agttctaggggctgg

SEQ ID NO: 1764473 - DNA, 15 bp, Homo sapiens
gttctaggggctggg

SEQ ID NO: 1764474 - DNA, 15 bp, Homo sapiens
ttctaggggctggga

SEQ ID NO: 1764475 - DNA, 15 bp, Homo sapiens
tctaggggctgggaa

SEQ ID NO: 1764476 - DNA, 15 bp, Homo sapiens
ctaggggctgggaag

SEQ ID NO: 1764477 - DNA, 15 bp, Homo sapiens
taggggctgggaagt

SEQ ID NO: 1764478 - DNA, 15 bp, Homo sapiens
aggggctgggaagtc

SEQ ID NO: 1764479 - DNA, 15 bp, Homo sapiens
ggggctgggaagtcc

SEQ ID NO: 1764480 - DNA, 15 bp, Homo sapiens
gggctgggaagtccg

SEQ ID NO: 1764481 - DNA, 15 bp, Homo sapiens
ggctgggaagtccga

SEQ ID NO: 1764482 - DNA, 15 bp, Homo sapiens
gctgggaagtccgag

SEQ ID NO: 1764483 - DNA, 15 bp, Homo sapiens
ctgggaagtccgaga

SEQ ID NO: 1764484 - DNA, 15 bp, Homo sapiens
tgggaagtccgagat

SEQ ID NO: 1764485 - DNA, 15 bp, Homo sapiens
gggaagtccgagatc

SEQ ID NO: 1764486 - DNA, 15 bp, Homo sapiens
ggaagtccgagatca

SEQ ID NO: 1764487 - DNA, 15 bp, Homo sapiens
gaagtccgagatcaa

SEQ ID NO: 1764488 - DNA, 15 bp, Homo sapiens
aagtccgagatcaag

SEQ ID NO: 1764489 - DNA, 15 bp, Homo sapiens
agtccgagatcaagg

SEQ ID NO: 1764490 - DNA, 15 bp, Homo sapiens
gtccgagatcaaggg

SEQ ID NO: 1764491 - DNA, 15 bp, Homo sapiens
tccgagatcaagggg

SEQ ID NO: 1764492 - DNA, 15 bp, Homo sapiens
ccgagatcaaggggg

SEQ ID NO: 1764493 - DNA, 15 bp, Homo sapiens
cgagatcaagggggt

SEQ ID NO: 1764494 - DNA, 15 bp, Homo sapiens
gagatcaagggggtc

SEQ ID NO: 1764495 - DNA, 15 bp, Homo sapiens
agatcaagggggtca

SEQ ID NO: 1764496 - DNA, 15 bp, Homo sapiens
gatcaagggggtcaa

SEQ ID NO: 1764497 - DNA, 15 bp, Homo sapiens
atcaagggggtcaac

SEQ ID NO: 1764498 - DNA, 15 bp, Homo sapiens
tcaagggggtcaaca

SEQ ID NO: 1764499 - DNA, 15 bp, Homo sapiens
caagggggtcaacag

SEQ ID NO: 1764500 - DNA, 15 bp, Homo sapiens
aagggggtcaacaga

SEQ ID NO: 1764501 - DNA, 15 bp, Homo sapiens
agggggtcaacagat

SEQ ID NO: 1764502 - DNA, 15 bp, Homo sapiens
gggggtcaacagatt

SEQ ID NO: 1764503 - DNA, 15 bp, Homo sapiens
ggggtcaacagattc

SEQ ID NO: 1764504 - DNA, 15 bp, Homo sapiens
gggtcaacagattca

SEQ ID NO: 1764505 - DNA, 15 bp, Homo sapiens
ggtcaacagattcag

SEQ ID NO: 1764506 - DNA, 15 bp, Homo sapiens
gtcaacagattcagt

SEQ ID NO: 1764507 - DNA, 15 bp, Homo sapiens
tcaacagattcagtg

SEQ ID NO: 1764508 - DNA, 15 bp, Homo sapiens
caacagattcagtgt

SEQ ID NO: 1764509 - DNA, 15 bp, Homo sapiens
aacagattcagtgtc

SEQ ID NO: 1764510 - DNA, 15 bp, Homo sapiens
acagattcagtgtct

SEQ ID NO: 1764511 - DNA, 15 bp, Homo sapiens
agtgtctggtgaggg

SEQ ID NO: 1764512 - DNA, 15 bp, Homo sapiens
gtgtctggtgaggga

SEQ ID NO: 1764513 - DNA, 15 bp, Homo sapiens
tgtctggtgagggag

SEQ ID NO: 1764514 - DNA, 15 bp, Homo sapiens
gtctggtgagggaga

SEQ ID NO: 1764515 - DNA, 15 bp, Homo sapiens
tctggtgagggagac

SEQ ID NO: 1764516 - DNA, 15 bp, Homo sapiens
ctggtgagggagact

SEQ ID NO: 1764517 - DNA, 15 bp, Homo sapiens
tggtgagggagactt

SEQ ID NO: 1764518 - DNA, 15 bp, Homo sapiens
ggtgagggagacttc

SEQ ID NO: 1764519 - DNA, 15 bp, Homo sapiens
gtgagggagacttcc

SEQ ID NO: 1764520 - DNA, 15 bp, Homo sapiens
tgagggagacttcct

SEQ ID NO: 1764521 - DNA, 15 bp, Homo sapiens
gagggagacttcctc

SEQ ID NO: 1764522 - DNA, 15 bp, Homo sapiens
agggagacttcctcc

SEQ ID NO: 1764523 - DNA, 15 bp, Homo sapiens
gggagacttcctcct

SEQ ID NO: 1764524 - DNA, 15 bp, Homo sapiens
ggagacttcctccta

SEQ ID NO: 1764525 - DNA, 15 bp, Homo sapiens
gagacttcctcctag

SEQ ID NO: 1764526 - DNA, 15 bp, Homo sapiens
agacttcctcctaga

SEQ ID NO: 1764527 - DNA, 15 bp, Homo sapiens
gacttcctcctagac

SEQ ID NO: 1764528 - DNA, 15 bp, Homo sapiens
acttcctcctagaca

SEQ ID NO: 1764529 - DNA, 15 bp, Homo sapiens
cttcctcctagacag

SEQ ID NO: 1764530 - DNA, 15 bp, Homo sapiens
ttcctcctagacagc

SEQ ID NO: 1764531 - DNA, 15 bp, Homo sapiens
tcctcctagacagcc

SEQ ID NO: 1764532 - DNA, 15 bp, Homo sapiens
cctcctagacagcca

SEQ ID NO: 1764533 - DNA, 15 bp, Homo sapiens
ctcctagacagccat

SEQ ID NO: 1764534 - DNA, 15 bp, Homo sapiens
tcctagacagccatt

SEQ ID NO: 1764535 - DNA, 15 bp, Homo sapiens
cctagacagccattt

SEQ ID NO: 1764536 - DNA, 15 bp, Homo sapiens
ctagacagccatttt

SEQ ID NO: 1764537 - DNA, 15 bp, Homo sapiens
tagacagccattttc

SEQ ID NO: 1764538 - DNA, 15 bp, Homo sapiens
agacagccattttct

SEQ ID NO: 1764539 - DNA, 15 bp, Homo sapiens
gacagccattttctc

SEQ ID NO: 1764540 - DNA, 15 bp, Homo sapiens
acagccattttctca

SEQ ID NO: 1764541 - DNA, 15 bp, Homo sapiens
cagccattttctcac

SEQ ID NO: 1764542 - DNA, 15 bp, Homo sapiens
agccattttctcacc

SEQ ID NO: 1764543 - DNA, 15 bp, Homo sapiens
gccattttctcaccc

SEQ ID NO: 1764544 - DNA, 15 bp, Homo sapiens
ccattttctcaccct

SEQ ID NO: 1764545 - DNA, 15 bp, Homo sapiens
cattttctcacccta

SEQ ID NO: 1764546 - DNA, 15 bp, Homo sapiens
attttctcaccctaa

SEQ ID NO: 1764547 - DNA, 15 bp, Homo sapiens
ttttctcaccctaac

SEQ ID NO: 1764548 - DNA, 15 bp, Homo sapiens
tttctcaccctaacc

SEQ ID NO: 1764549 - DNA, 15 bp, Homo sapiens
ttctcaccctaacct

SEQ ID NO: 1764550 - DNA, 15 bp, Homo sapiens
tctcaccctaacctt

SEQ ID NO: 1764551 - DNA, 15 bp, Homo sapiens
ctcaccctaaccttg

SEQ ID NO: 1764552 - DNA, 15 bp, Homo sapiens
tcaccctaaccttgc

SEQ ID NO: 1764553 - DNA, 15 bp, Homo sapiens
caccctaaccttgca

SEQ ID NO: 1764554 - DNA, 15 bp, Homo sapiens
accctaaccttgcat

SEQ ID NO: 1764555 - DNA, 15 bp, Homo sapiens
ccctaaccttgcatg

SEQ ID NO: 1764556 - DNA, 15 bp, Homo sapiens
cctaaccttgcatgg

SEQ ID NO: 1764557 - DNA, 15 bp, Homo sapiens
ctaaccttgcatggc

SEQ ID NO: 1764558 - DNA, 15 bp, Homo sapiens
taaccttgcatggca

SEQ ID NO: 1764559 - DNA, 15 bp, Homo sapiens
aaccttgcatggcag

SEQ ID NO: 1764560 - DNA, 15 bp, Homo sapiens
accttgcatggcaga

SEQ ID NO: 1764561 - DNA, 15 bp, Homo sapiens
ccttgcatggcagaa

SEQ ID NO: 1764562 - DNA, 15 bp, Homo sapiens
cttgcatggcagaag

SEQ ID NO: 1764563 - DNA, 15 bp, Homo sapiens
ttgcatggcagaagt

SEQ ID NO: 1764564 - DNA, 15 bp, Homo sapiens
tgcatggcagaagtg

SEQ ID NO: 1764565 - DNA, 15 bp, Homo sapiens
gcatggcagaagtgg

SEQ ID NO: 1764566 - DNA, 15 bp, Homo sapiens
catggcagaagtggg

SEQ ID NO: 1764567 - DNA, 15 bp, Homo sapiens
atggcagaagtgggg

SEQ ID NO: 1764568 - DNA, 15 bp, Homo sapiens
tggcagaagtgggga

SEQ ID NO: 1764569 - DNA, 15 bp, Homo sapiens
ggcagaagtggggag

SEQ ID NO: 1764570 - DNA, 15 bp, Homo sapiens
gcagaagtggggagg

SEQ ID NO: 1764571 - DNA, 15 bp, Homo sapiens
cagaagtggggaggg

SEQ ID NO: 1764572 - DNA, 15 bp, Homo sapiens
agaagtggggagggg

SEQ ID NO: 1764573 - DNA, 15 bp, Homo sapiens
gaagtggggaggggt

SEQ ID NO: 1764574 - DNA, 15 bp, Homo sapiens
aagtggggaggggtc

SEQ ID NO: 1764575 - DNA, 15 bp, Homo sapiens
agtggggaggggtct

SEQ ID NO: 1764576 - DNA, 15 bp, Homo sapiens
gtggggaggggtctc

SEQ ID NO: 1764577 - DNA, 15 bp, Homo sapiens
tggggaggggtctct

SEQ ID NO: 1764578 - DNA, 15 bp, Homo sapiens
ggggaggggtctctg

SEQ ID NO: 1764579 - DNA, 15 bp, Homo sapiens
gggaggggtctctga

SEQ ID NO: 1764580 - DNA, 15 bp, Homo sapiens
ggaggggtctctgag

SEQ ID NO: 1764581 - DNA, 15 bp, Homo sapiens
gaggggtctctgagg

SEQ ID NO: 1764582 - DNA, 15 bp, Homo sapiens
aggggtctctgaggc

SEQ ID NO: 1764583 - DNA, 15 bp, Homo sapiens
ggggtctctgaggca

SEQ ID NO: 1764584 - DNA, 15 bp, Homo sapiens
gggtctctgaggcat

SEQ ID NO: 1764585 - DNA, 15 bp, Homo sapiens
ggtctctgaggcatt

SEQ ID NO: 1764586 - DNA, 15 bp, Homo sapiens
gtctctgaggcattc

SEQ ID NO: 1764587 - DNA, 15 bp, Homo sapiens
tctctgaggcattca

SEQ ID NO: 1764588 - DNA, 15 bp, Homo sapiens
ctctgaggcattcat

SEQ ID NO: 1764589 - DNA, 15 bp, Homo sapiens
tctgaggcattcatc

SEQ ID NO: 1764590 - DNA, 15 bp, Homo sapiens
ctgaggcattcatct

SEQ ID NO: 1764591 - DNA, 15 bp, Homo sapiens
tgaggcattcatctg

SEQ ID NO: 1764592 - DNA, 15 bp, Homo sapiens
gaggcattcatctga

SEQ ID NO: 1764593 - DNA, 15 bp, Homo sapiens
aggcattcatctgaa

SEQ ID NO: 1764594 - DNA, 15 bp, Homo sapiens
ggcattcatctgaat

SEQ ID NO: 1764595 - DNA, 15 bp, Homo sapiens
gcattcatctgaatt

SEQ ID NO: 1764596 - DNA, 15 bp, Homo sapiens
cattcatctgaattg

SEQ ID NO: 1764597 - DNA, 15 bp, Homo sapiens
attcatctgaattgt

SEQ ID NO: 1764598 - DNA, 15 bp, Homo sapiens
ttcatctgaattgta

SEQ ID NO: 1764599 - DNA, 15 bp, Homo sapiens
tcatctgaattgtaa

SEQ ID NO: 1764600 - DNA, 15 bp, Homo sapiens
catctgaattgtaag

SEQ ID NO: 1764601 - DNA, 15 bp, Homo sapiens
atctgaattgtaaga

SEQ ID NO: 1764602 - DNA, 15 bp, Homo sapiens
tctgaattgtaagag

SEQ ID NO: 1764603 - DNA, 15 bp, Homo sapiens
ctgaattgtaagagc

SEQ ID NO: 1764604 - DNA, 15 bp, Homo sapiens
tgaattgtaagagct

SEQ ID NO: 1764605 - DNA, 15 bp, Homo sapiens
gaattgtaagagctc

SEQ ID NO: 1764606 - DNA, 15 bp, Homo sapiens
aattgtaagagctct

SEQ ID NO: 1764607 - DNA, 15 bp, Homo sapiens
attgtaagagctctc

SEQ ID NO: 1764608 - DNA, 15 bp, Homo sapiens
ttgtaagagctctcc

SEQ ID NO: 1764609 - DNA, 15 bp, Homo sapiens
tgtaagagctctcca

SEQ ID NO: 1764610 - DNA, 15 bp, Homo sapiens
gtaagagctctccat

SEQ ID NO: 1764611 - DNA, 15 bp, Homo sapiens
taagagctctccata

SEQ ID NO: 1764612 - DNA, 15 bp, Homo sapiens
aagagctctccataa

SEQ ID NO: 1764613 - DNA, 15 bp, Homo sapiens
agagctctccataac

SEQ ID NO: 1764614 - DNA, 15 bp, Homo sapiens
gagctctccataacc

SEQ ID NO: 1764615 - DNA, 15 bp, Homo sapiens
agctctccataacct

SEQ ID NO: 1764616 - DNA, 15 bp, Homo sapiens
gctctccataaccta

SEQ ID NO: 1764617 - DNA, 15 bp, Homo sapiens
ctctccataacctaa

SEQ ID NO: 1764618 - DNA, 15 bp, Homo sapiens
tctccataacctaat

SEQ ID NO: 1764619 - DNA, 15 bp, Homo sapiens
ctccataacctaatc

SEQ ID NO: 1764620 - DNA, 15 bp, Homo sapiens
tccataacctaatca

SEQ ID NO: 1764621 - DNA, 15 bp, Homo sapiens
ccataacctaatcat

SEQ ID NO: 1764622 - DNA, 15 bp, Homo sapiens
cataacctaatcatc

SEQ ID NO: 1764623 - DNA, 15 bp, Homo sapiens
ataacctaatcatct

SEQ ID NO: 1764624 - DNA, 15 bp, Homo sapiens
taacctaatcatctc

SEQ ID NO: 1764625 - DNA, 15 bp, Homo sapiens
aacctaatcatctcc

SEQ ID NO: 1764626 - DNA, 15 bp, Homo sapiens
acctaatcatctccc

SEQ ID NO: 1764627 - DNA, 15 bp, Homo sapiens
cctaatcatctccca

SEQ ID NO: 1764628 - DNA, 15 bp, Homo sapiens
ctaatcatctcccaa

SEQ ID NO: 1764629 - DNA, 15 bp, Homo sapiens
taatcatctcccaat

SEQ ID NO: 1764630 - DNA, 15 bp, Homo sapiens
aatcatctcccaata

SEQ ID NO: 1764631 - DNA, 15 bp, Homo sapiens
atcatctcccaatat

SEQ ID NO: 1764632 - DNA, 15 bp, Homo sapiens
tcatctcccaatatc

SEQ ID NO: 1764633 - DNA, 15 bp, Homo sapiens
catctcccaatatca

SEQ ID NO: 1764634 - DNA, 15 bp, Homo sapiens
atctcccaatatcac

SEQ ID NO: 1764635 - DNA, 15 bp, Homo sapiens
tctcccaatatcacc

SEQ ID NO: 1764636 - DNA, 15 bp, Homo sapiens
ctcccaatatcacct

SEQ ID NO: 1764637 - DNA, 15 bp, Homo sapiens
tcccaatatcacctc

SEQ ID NO: 1764638 - DNA, 15 bp, Homo sapiens
cccaatatcacctcc

SEQ ID NO: 1764639 - DNA, 15 bp, Homo sapiens
ccaatatcacctcct

SEQ ID NO: 1764640 - DNA, 15 bp, Homo sapiens
caatatcacctcctt

SEQ ID NO: 1764641 - DNA, 15 bp, Homo sapiens
aatatcacctccttg

SEQ ID NO: 1764642 - DNA, 15 bp, Homo sapiens
atatcacctccttgc

SEQ ID NO: 1764643 - DNA, 15 bp, Homo sapiens
tatcacctccttgca

SEQ ID NO: 1764644 - DNA, 15 bp, Homo sapiens
atcacctccttgcat

SEQ ID NO: 1764645 - DNA, 15 bp, Homo sapiens
tcacctccttgcatg

SEQ ID NO: 1764646 - DNA, 15 bp, Homo sapiens
cacctccttgcatgc

SEQ ID NO: 1764647 - DNA, 15 bp, Homo sapiens
acctccttgcatgcc

SEQ ID NO: 1764648 - DNA, 15 bp, Homo sapiens
cctccttgcatgccc

SEQ ID NO: 1764649 - DNA, 15 bp, Homo sapiens
ctccttgcatgcccc

SEQ ID NO: 1764650 - DNA, 15 bp, Homo sapiens
tccttgcatgcccca

SEQ ID NO: 1764651 - DNA, 15 bp, Homo sapiens
ccttgcatgccccac

SEQ ID NO: 1764652 - DNA, 15 bp, Homo sapiens
cttgcatgccccacc

SEQ ID NO: 1764653 - DNA, 15 bp, Homo sapiens
ttgcatgccccacct

SEQ ID NO: 1764654 - DNA, 15 bp, Homo sapiens
tgcatgccccacctc

SEQ ID NO: 1764655 - DNA, 15 bp, Homo sapiens
gcatgccccacctcg

SEQ ID NO: 1764656 - DNA, 15 bp, Homo sapiens
catgccccacctcgt

SEQ ID NO: 1764657 - DNA, 15 bp, Homo sapiens
atgccccacctcgta

SEQ ID NO: 1764658 - DNA, 15 bp, Homo sapiens
tgccccacctcgtaa

SEQ ID NO: 1764659 - DNA, 15 bp, Homo sapiens
gccccacctcgtaat

SEQ ID NO: 1764660 - DNA, 15 bp, Homo sapiens
ccccacctcgtaata

SEQ ID NO: 1764661 - DNA, 15 bp, Homo sapiens
cccacctcgtaatat

SEQ ID NO: 1764662 - DNA, 15 bp, Homo sapiens
ccacctcgtaatatc

SEQ ID NO: 1764663 - DNA, 15 bp, Homo sapiens
cacctcgtaatatca

SEQ ID NO: 1764664 - DNA, 15 bp, Homo sapiens
acctcgtaatatcat

SEQ ID NO: 1764665 - DNA, 15 bp, Homo sapiens
cctcgtaatatcata

SEQ ID NO: 1764666 - DNA, 15 bp, Homo sapiens
ctcgtaatatcataa

SEQ ID NO: 1764667 - DNA, 15 bp, Homo sapiens
tcgtaatatcataat

SEQ ID NO: 1764668 - DNA, 15 bp, Homo sapiens
cgtaatatcataatc

SEQ ID NO: 1764669 - DNA, 15 bp, Homo sapiens
gtaatatcataatct

SEQ ID NO: 1764670 - DNA, 15 bp, Homo sapiens
taatatcataatctt

SEQ ID NO: 1764671 - DNA, 15 bp, Homo sapiens
aatatcataatcttg

SEQ ID NO: 1764672 - DNA, 15 bp, Homo sapiens
atatcataatcttgg

SEQ ID NO: 1764673 - DNA, 15 bp, Homo sapiens
tatcataatcttggg

SEQ ID NO: 1764674 - DNA, 15 bp, Homo sapiens
atcataatcttgggt

SEQ ID NO: 1764675 - DNA, 15 bp, Homo sapiens
tcataatcttgggtg

SEQ ID NO: 1764676 - DNA, 15 bp, Homo sapiens
cataatcttgggtgt

SEQ ID NO: 1764677 - DNA, 15 bp, Homo sapiens
ataatcttgggtgtg

SEQ ID NO: 1764678 - DNA, 15 bp, Homo sapiens
taatcttgggtgtga

SEQ ID NO: 1764679 - DNA, 15 bp, Homo sapiens
aatcttgggtgtgaa

SEQ ID NO: 1764680 - DNA, 15 bp, Homo sapiens
atcttgggtgtgaag

SEQ ID NO: 1764681 - DNA, 15 bp, Homo sapiens
tcttgggtgtgaaga

SEQ ID NO: 1764682 - DNA, 15 bp, Homo sapiens
cttgggtgtgaagat

SEQ ID NO: 1764683 - DNA, 15 bp, Homo sapiens
ttgggtgtgaagatt

SEQ ID NO: 1764684 - DNA, 15 bp, Homo sapiens
tgggtgtgaagattt

SEQ ID NO: 1764685 - DNA, 15 bp, Homo sapiens
gggtgtgaagatttc

SEQ ID NO: 1764686 - DNA, 15 bp, Homo sapiens
ggtgtgaagatttca

SEQ ID NO: 1764687 - DNA, 15 bp, Homo sapiens
gtgtgaagatttcaa

SEQ ID NO: 1764688 - DNA, 15 bp, Homo sapiens
tgtgaagatttcaac

SEQ ID NO: 1764689 - DNA, 15 bp, Homo sapiens
gtgaagatttcaaca

SEQ ID NO: 1764690 - DNA, 15 bp, Homo sapiens
gaagatttcaacata

SEQ ID NO: 1764691 - DNA, 15 bp, Homo sapiens
aagatttcaacatat

SEQ ID NO: 1764692 - DNA, 15 bp, Homo sapiens
agatttcaacatatg

SEQ ID NO: 1764693 - DNA, 15 bp, Homo sapiens
gatttcaacatatga

SEQ ID NO: 1764694 - DNA, 15 bp, Homo sapiens
atttcaacatatgaa

SEQ ID NO: 1764695 - DNA, 15 bp, Homo sapiens
tttcaacatatgaat

SEQ ID NO: 1764696 - DNA, 15 bp, Homo sapiens
ttcaacatatgaatt

SEQ ID NO: 1764697 - DNA, 15 bp, Homo sapiens
tcaacatatgaattt

SEQ ID NO: 1764698 - DNA, 15 bp, Homo sapiens
aacatatgaatttta

SEQ ID NO: 1764699 - DNA, 15 bp, Homo sapiens
acatatgaattttag

SEQ ID NO: 1764700 - DNA, 15 bp, Homo sapiens
catatgaattttagg

SEQ ID NO: 1764701 - DNA, 15 bp, Homo sapiens
atatgaattttaggg

SEQ ID NO: 1764702 - DNA, 15 bp, Homo sapiens
tatgaattttaggga

SEQ ID NO: 1764703 - DNA, 15 bp, Homo sapiens
atgaattttagggag

SEQ ID NO: 1764704 - DNA, 15 bp, Homo sapiens
tgaattttagggaga

SEQ ID NO: 1764705 - DNA, 15 bp, Homo sapiens
gaattttagggagac

SEQ ID NO: 1764706 - DNA, 15 bp, Homo sapiens
aattttagggagaca

SEQ ID NO: 1764707 - DNA, 15 bp, Homo sapiens
attttagggagacat

SEQ ID NO: 1764708 - DNA, 15 bp, Homo sapiens
ttttagggagacata

SEQ ID NO: 1764709 - DNA, 15 bp, Homo sapiens
tttagggagacataa

SEQ ID NO: 1764710 - DNA, 15 bp, Homo sapiens
ttagggagacataaa

SEQ ID NO: 1764711 - DNA, 15 bp, Homo sapiens
tagggagacataaac

SEQ ID NO: 1764712 - DNA, 15 bp, Homo sapiens
agggagacataaaca

SEQ ID NO: 1764713 - DNA, 15 bp, Homo sapiens
gggagacataaacat

SEQ ID NO: 1764714 - DNA, 15 bp, Homo sapiens
ggagacataaacatt

SEQ ID NO: 1764715 - DNA, 15 bp, Homo sapiens
gagacataaacattg

SEQ ID NO: 1764716 - DNA, 15 bp, Homo sapiens
agacataaacattga

SEQ ID NO: 1764717 - DNA, 15 bp, Homo sapiens
gacataaacattgag

SEQ ID NO: 1764718 - DNA, 15 bp, Homo sapiens
acataaacattgaga

SEQ ID NO: 1764719 - DNA, 15 bp, Homo sapiens
cataaacattgagac

SEQ ID NO: 1764720 - DNA, 15 bp, Homo sapiens
ataaacattgagact

SEQ ID NO: 1764721 - DNA, 15 bp, Homo sapiens
taaacattgagacta

SEQ ID NO: 1764722 - DNA, 15 bp, Homo sapiens
aaacattgagactat

SEQ ID NO: 1764723 - DNA, 15 bp, Homo sapiens
aacattgagactata

SEQ ID NO: 1764724 - DNA, 15 bp, Homo sapiens
acattgagactatag

SEQ ID NO: 1764725 - DNA, 15 bp, Homo sapiens
cattgagactatagc

SEQ ID NO: 1764726 - DNA, 15 bp, Homo sapiens
attgagactatagca

SEQ ID NO: 1764727 - DNA, 15 bp, Homo sapiens
ttgagactatagcac

SEQ ID NO: 1764728 - DNA, 15 bp, Homo sapiens
tgagactatagcact

SEQ ID NO: 1764729 - DNA, 15 bp, Homo sapiens
gagactatagcactg

SEQ ID NO: 1764730 - DNA, 15 bp, Homo sapiens
agactatagcactga

SEQ ID NO: 1764731 - DNA, 15 bp, Homo sapiens
gactatagcactgac

SEQ ID NO: 1764732 - DNA, 15 bp, Homo sapiens
actatagcactgact

SEQ ID NO: 1764733 - DNA, 15 bp, Homo sapiens
ctatagcactgacta

SEQ ID NO: 1764734 - DNA, 15 bp, Homo sapiens
tatagcactgactaa

SEQ ID NO: 1764735 - DNA, 15 bp, Homo sapiens
atagcactgactaaa

SEQ ID NO: 1764736 - DNA, 15 bp, Homo sapiens
tagcactgactaaag

SEQ ID NO: 1764737 - DNA, 15 bp, Homo sapiens
agcactgactaaagc

SEQ ID NO: 1764738 - DNA, 15 bp, Homo sapiens
gcactgactaaagct

SEQ ID NO: 1764739 - DNA, 15 bp, Homo sapiens
cactgactaaagctg

SEQ ID NO: 1764740 - DNA, 15 bp, Homo sapiens
actgactaaagctgt

SEQ ID NO: 1764741 - DNA, 15 bp, Homo sapiens
ctgactaaagctgtt

SEQ ID NO: 1764742 - DNA, 15 bp, Homo sapiens
tgactaaagctgtta

SEQ ID NO: 1764743 - DNA, 15 bp, Homo sapiens
gactaaagctgttac

SEQ ID NO: 1764744 - DNA, 15 bp, Homo sapiens
actaaagctgttaca

SEQ ID NO: 1764745 - DNA, 15 bp, Homo sapiens
ctaaagctgttacac

SEQ ID NO: 1764746 - DNA, 15 bp, Homo sapiens
taaagctgttacact

SEQ ID NO: 1764747 - DNA, 15 bp, Homo sapiens
aaagctgttacactt

SEQ ID NO: 1764748 - DNA, 15 bp, Homo sapiens
aagctgttacacttt

SEQ ID NO: 1764749 - DNA, 15 bp, Homo sapiens
agctgttacactttt

SEQ ID NO: 1764750 - DNA, 15 bp, Homo sapiens
gctgttacacttttc

SEQ ID NO: 1764751 - DNA, 15 bp, Homo sapiens
ctgttacacttttca

SEQ ID NO: 1764752 - DNA, 15 bp, Homo sapiens
tgttacacttttcaa

SEQ ID NO: 1764753 - DNA, 15 bp, Homo sapiens
gttacacttttcaaa

SEQ ID NO: 1764754 - DNA, 15 bp, Homo sapiens
ttacacttttcaaag

SEQ ID NO: 1764755 - DNA, 15 bp, Homo sapiens
tacacttttcaaaga

SEQ ID NO: 1764756 - DNA, 15 bp, Homo sapiens
acacttttcaaagac

SEQ ID NO: 1764757 - DNA, 15 bp, Homo sapiens
cacttttcaaagact

SEQ ID NO: 1764758 - DNA, 15 bp, Homo sapiens
acttttcaaagactt

SEQ ID NO: 1764759 - DNA, 15 bp, Homo sapiens
cttttcaaagacttt

SEQ ID NO: 1764760 - DNA, 15 bp, Homo sapiens
ttttcaaagactttg

SEQ ID NO: 1764761 - DNA, 15 bp, Homo sapiens
tttcaaagactttgt

SEQ ID NO: 1764762 - DNA, 15 bp, Homo sapiens
ttcaaagactttgtc

SEQ ID NO: 1764763 - DNA, 15 bp, Homo sapiens
tcaaagactttgtca

SEQ ID NO: 1764764 - DNA, 15 bp, Homo sapiens
caaagactttgtcag

SEQ ID NO: 1764765 - DNA, 15 bp, Homo sapiens
aaagactttgtcagt

SEQ ID NO: 1764766 - DNA, 15 bp, Homo sapiens
aagactttgtcagtt

SEQ ID NO: 1764767 - DNA, 15 bp, Homo sapiens
agactttgtcagttc

SEQ ID NO: 1764768 - DNA, 15 bp, Homo sapiens
gactttgtcagttct

SEQ ID NO: 1764769 - DNA, 15 bp, Homo sapiens
actttgtcagttctt

SEQ ID NO: 1764770 - DNA, 15 bp, Homo sapiens
ctttgtcagttctta

SEQ ID NO: 1764771 - DNA, 15 bp, Homo sapiens
tttgtcagttcttat

SEQ ID NO: 1764772 - DNA, 15 bp, Homo sapiens
ttgtcagttcttatt

SEQ ID NO: 1764773 - DNA, 15 bp, Homo sapiens
tgtcagttcttattt

SEQ ID NO: 1764774 - DNA, 15 bp, Homo sapiens
gtcagttcttatttc

SEQ ID NO: 1764775 - DNA, 15 bp, Homo sapiens
tcagttcttatttcc

SEQ ID NO: 1764776 - DNA, 15 bp, Homo sapiens
cagttcttatttcca

SEQ ID NO: 1764777 - DNA, 15 bp, Homo sapiens
agttcttatttccat

SEQ ID NO: 1764778 - DNA, 15 bp, Homo sapiens
gttcttatttccatt

SEQ ID NO: 1764779 - DNA, 15 bp, Homo sapiens
ttcttatttccattt

SEQ ID NO: 1764780 - DNA, 15 bp, Homo sapiens
tcttatttccatttt

SEQ ID NO: 1764781 - DNA, 15 bp, Homo sapiens
cttatttccattttt

SEQ ID NO: 1764782 - DNA, 15 bp, Homo sapiens
ttatttccattttta

SEQ ID NO: 1764783 - DNA, 15 bp, Homo sapiens
tatttccatttttaa

SEQ ID NO: 1764784 - DNA, 15 bp, Homo sapiens
atttccatttttaac

SEQ ID NO: 1764785 - DNA, 15 bp, Homo sapiens
tttccatttttaacc

SEQ ID NO: 1764786 - DNA, 15 bp, Homo sapiens
ttccatttttaacca

SEQ ID NO: 1764787 - DNA, 15 bp, Homo sapiens
tccatttttaaccaa

SEQ ID NO: 1764788 - DNA, 15 bp, Homo sapiens
ccatttttaaccaac

SEQ ID NO: 1764789 - DNA, 15 bp, Homo sapiens
catttttaaccaaca

SEQ ID NO: 1764790 - DNA, 15 bp, Homo sapiens
atttttaaccaacat

SEQ ID NO: 1764791 - DNA, 15 bp, Homo sapiens
tttttaaccaacatc

SEQ ID NO: 1764792 - DNA, 15 bp, Homo sapiens
ttttaaccaacatct

SEQ ID NO: 1764793 - DNA, 15 bp, Homo sapiens
tttaaccaacatcta

SEQ ID NO: 1764794 - DNA, 15 bp, Homo sapiens
ttaaccaacatctag

SEQ ID NO: 1764795 - DNA, 15 bp, Homo sapiens
taaccaacatctagc

SEQ ID NO: 1764796 - DNA, 15 bp, Homo sapiens
aaccaacatctagct

SEQ ID NO: 1764797 - DNA, 15 bp, Homo sapiens
accaacatctagcta

SEQ ID NO: 1764798 - DNA, 15 bp, Homo sapiens
ccaacatctagctat

SEQ ID NO: 1764799 - DNA, 15 bp, Homo sapiens
caacatctagctata

SEQ ID NO: 1764800 - DNA, 15 bp, Homo sapiens
aacatctagctatac

SEQ ID NO: 1764801 - DNA, 15 bp, Homo sapiens
acatctagctataca

SEQ ID NO: 1764802 - DNA, 15 bp, Homo sapiens
catctagctatacac

SEQ ID NO: 1764803 - DNA, 15 bp, Homo sapiens
atctagctatacaca

SEQ ID NO: 1764804 - DNA, 15 bp, Homo sapiens
tctagctatacacat

SEQ ID NO: 1764805 - DNA, 15 bp, Homo sapiens
ctagctatacacatg

SEQ ID NO: 1764806 - DNA, 15 bp, Homo sapiens
tagctatacacatgt

SEQ ID NO: 1764807 - DNA, 15 bp, Homo sapiens
agctatacacatgta

SEQ ID NO: 1764808 - DNA, 15 bp, Homo sapiens
gctatacacatgtac

SEQ ID NO: 1764809 - DNA, 15 bp, Homo sapiens
ctatacacatgtacc

SEQ ID NO: 1764810 - DNA, 15 bp, Homo sapiens
tatacacatgtaccg

SEQ ID NO: 1764811 - DNA, 15 bp, Homo sapiens
atacacatgtaccgt

SEQ ID NO: 1764812 - DNA, 15 bp, Homo sapiens
tacacatgtaccgta

SEQ ID NO: 1764813 - DNA, 15 bp, Homo sapiens
acacatgtaccgtaa

SEQ ID NO: 1764814 - DNA, 15 bp, Homo sapiens
cacatgtaccgtaac

SEQ ID NO: 1764815 - DNA, 15 bp, Homo sapiens
acatgtaccgtaaca

SEQ ID NO: 1764816 - DNA, 15 bp, Homo sapiens
catgtaccgtaacat

SEQ ID NO: 1764817 - DNA, 15 bp, Homo sapiens
atgtaccgtaacatc

SEQ ID NO: 1764818 - DNA, 15 bp, Homo sapiens
tgtaccgtaacatcc

SEQ ID NO: 1764819 - DNA, 15 bp, Homo sapiens
gtaccgtaacatcca

SEQ ID NO: 1764820 - DNA, 15 bp, Homo sapiens
taccgtaacatccag

SEQ ID NO: 1764821 - DNA, 15 bp, Homo sapiens
accgtaacatccagg

SEQ ID NO: 1764822 - DNA, 15 bp, Homo sapiens
ccgtaacatccaggg

SEQ ID NO: 1764823 - DNA, 15 bp, Homo sapiens
cgtaacatccagggt

SEQ ID NO: 1764824 - DNA, 15 bp, Homo sapiens
gtaacatccagggtc

SEQ ID NO: 1764825 - DNA, 15 bp, Homo sapiens
taacatccagggtca

SEQ ID NO: 1764826 - DNA, 15 bp, Homo sapiens
aacatccagggtcat

SEQ ID NO: 1764827 - DNA, 15 bp, Homo sapiens
acatccagggtcatt

SEQ ID NO: 1764828 - DNA, 15 bp, Homo sapiens
catccagggtcattc

SEQ ID NO: 1764829 - DNA, 15 bp, Homo sapiens
atccagggtcattct

SEQ ID NO: 1764830 - DNA, 15 bp, Homo sapiens
tccagggtcattctc

SEQ ID NO: 1764831 - DNA, 15 bp, Homo sapiens
ccagggtcattctca

SEQ ID NO: 1764832 - DNA, 15 bp, Homo sapiens
cagggtcattctcag

SEQ ID NO: 1764833 - DNA, 15 bp, Homo sapiens
agggtcattctcagc

SEQ ID NO: 1764834 - DNA, 15 bp, Homo sapiens
gggtcattctcagct

SEQ ID NO: 1764835 - DNA, 15 bp, Homo sapiens
ggtcattctcagctt

SEQ ID NO: 1764836 - DNA, 15 bp, Homo sapiens
gtcattctcagcttc

SEQ ID NO: 1764837 - DNA, 15 bp, Homo sapiens
tcattctcagcttcc

SEQ ID NO: 1764838 - DNA, 15 bp, Homo sapiens
cattctcagcttcct

SEQ ID NO: 1764839 - DNA, 15 bp, Homo sapiens
attctcagcttcctt

SEQ ID NO: 1764840 - DNA, 15 bp, Homo sapiens
ttctcagcttccttt

SEQ ID NO: 1764841 - DNA, 15 bp, Homo sapiens
tctcagcttcctttt

SEQ ID NO: 1764842 - DNA, 15 bp, Homo sapiens
ctcagcttccttttg

SEQ ID NO: 1764843 - DNA, 15 bp, Homo sapiens
tcagcttccttttga

SEQ ID NO: 1764844 - DNA, 15 bp, Homo sapiens
cagcttccttttgat

SEQ ID NO: 1764845 - DNA, 15 bp, Homo sapiens
agcttccttttgata

SEQ ID NO: 1764846 - DNA, 15 bp, Homo sapiens
gcttccttttgataa

SEQ ID NO: 1764847 - DNA, 15 bp, Homo sapiens
cttccttttgataaa

SEQ ID NO: 1764848 - DNA, 15 bp, Homo sapiens
ttccttttgataaat

SEQ ID NO: 1764849 - DNA, 15 bp, Homo sapiens
tccttttgataaata

SEQ ID NO: 1764850 - DNA, 15 bp, Homo sapiens
ccttttgataaatac

SEQ ID NO: 1764851 - DNA, 15 bp, Homo sapiens
cttttgataaataca

SEQ ID NO: 1764852 - DNA, 15 bp, Homo sapiens
ttttgataaatacag

SEQ ID NO: 1764853 - DNA, 15 bp, Homo sapiens
tttgataaatacagt

SEQ ID NO: 1764854 - DNA, 15 bp, Homo sapiens
ttgataaatacagtg

SEQ ID NO: 1764855 - DNA, 15 bp, Homo sapiens
tgataaatacagtgt

SEQ ID NO: 1764856 - DNA, 15 bp, Homo sapiens
gataaatacagtgtg

SEQ ID NO: 1764857 - DNA, 15 bp, Homo sapiens
ataaatacagtgtgc

SEQ ID NO: 1764858 - DNA, 15 bp, Homo sapiens
taaatacagtgtgct

SEQ ID NO: 1764859 - DNA, 15 bp, Homo sapiens
aaatacagtgtgctt

SEQ ID NO: 1764860 - DNA, 15 bp, Homo sapiens
aatacagtgtgcttc

SEQ ID NO: 1764861 - DNA, 15 bp, Homo sapiens
atacagtgtgcttct

SEQ ID NO: 1764862 - DNA, 15 bp, Homo sapiens
tacagtgtgcttctt

SEQ ID NO: 1764863 - DNA, 15 bp, Homo sapiens
acagtgtgcttcttt

SEQ ID NO: 1764864 - DNA, 15 bp, Homo sapiens
cagtgtgcttcttta

SEQ ID NO: 1764865 - DNA, 15 bp, Homo sapiens
agtgtgcttctttaa

SEQ ID NO: 1764866 - DNA, 15 bp, Homo sapiens
gtgtgcttctttaaa

SEQ ID NO: 1764867 - DNA, 15 bp, Homo sapiens
tgtgcttctttaaaa

SEQ ID NO: 1764868 - DNA, 15 bp, Homo sapiens
gtgcttctttaaaaa

SEQ ID NO: 1764869 - DNA, 15 bp, Homo sapiens
tgcttctttaaaaag

SEQ ID NO: 1764870 - DNA, 15 bp, Homo sapiens
gcttctttaaaaaga

SEQ ID NO: 1764871 - DNA, 15 bp, Homo sapiens
cttctttaaaaagaa

SEQ ID NO: 1764872 - DNA, 15 bp, Homo sapiens
ttctttaaaaagaaa

SEQ ID NO: 1764873 - DNA, 15 bp, Homo sapiens
tctttaaaaagaaaa

SEQ ID NO: 1764874 - DNA, 15 bp, Homo sapiens
ctttaaaaagaaaaa

SEQ ID NO: 1764875 - DNA, 15 bp, Homo sapiens
aaaaagaaaaaaaac

SEQ ID NO: 1764876 - DNA, 15 bp, Homo sapiens
aaaagaaaaaaaact

SEQ ID NO: 1764877 - DNA, 15 bp, Homo sapiens
aaagaaaaaaaactg

SEQ ID NO: 1764878 - DNA, 15 bp, Homo sapiens
aagaaaaaaaactgc

SEQ ID NO: 1764879 - DNA, 15 bp, Homo sapiens
agaaaaaaaactgcc

SEQ ID NO: 1764880 - DNA, 15 bp, Homo sapiens
gaaaaaaaactgcct

SEQ ID NO: 1764881 - DNA, 15 bp, Homo sapiens
aaaaaaaactgcctc

SEQ ID NO: 1764882 - DNA, 15 bp, Homo sapiens
aaaaaaactgcctct

SEQ ID NO: 1764883 - DNA, 15 bp, Homo sapiens
aaaaaactgcctctt

SEQ ID NO: 1764884 - DNA, 15 bp, Homo sapiens
aaaaactgcctcttc

SEQ ID NO: 1764885 - DNA, 15 bp, Homo sapiens
aaaactgcctcttct

SEQ ID NO: 1764886 - DNA, 15 bp, Homo sapiens
aaactgcctcttctc

SEQ ID NO: 1764887 - DNA, 15 bp, Homo sapiens
aactgcctcttctcc

SEQ ID NO: 1764888 - DNA, 15 bp, Homo sapiens
actgcctcttctcct

SEQ ID NO: 1764889 - DNA, 15 bp, Homo sapiens
ctgcctcttctcctt

SEQ ID NO: 1764890 - DNA, 15 bp, Homo sapiens
tgcctcttctccttt

SEQ ID NO: 1764891 - DNA, 15 bp, Homo sapiens
gcctcttctccttta

SEQ ID NO: 1764892 - DNA, 15 bp, Homo sapiens
cctcttctcctttaa

SEQ ID NO: 1764893 - DNA, 15 bp, Homo sapiens
ctcttctcctttaac

SEQ ID NO: 1764894 - DNA, 15 bp, Homo sapiens
tcttctcctttaaca

SEQ ID NO: 1764895 - DNA, 15 bp, Homo sapiens
cttctcctttaacaa

SEQ ID NO: 1764896 - DNA, 15 bp, Homo sapiens
ttctcctttaacaaa

SEQ ID NO: 1764897 - DNA, 15 bp, Homo sapiens
tctcctttaacaaat

SEQ ID NO: 1764898 - DNA, 15 bp, Homo sapiens
ctcctttaacaaatt

SEQ ID NO: 1764899 - DNA, 15 bp, Homo sapiens
tcctttaacaaattt

SEQ ID NO: 1764900 - DNA, 15 bp, Homo sapiens
cctttaacaaatttt

SEQ ID NO: 1764901 - DNA, 15 bp, Homo sapiens
ctttaacaaattttc

SEQ ID NO: 1764902 - DNA, 15 bp, Homo sapiens
tttaacaaattttca

SEQ ID NO: 1764903 - DNA, 15 bp, Homo sapiens
ttaacaaattttcac

SEQ ID NO: 1764904 - DNA, 15 bp, Homo sapiens
taacaaattttcacc

SEQ ID NO: 1764905 - DNA, 15 bp, Homo sapiens
aacaaattttcacct

SEQ ID NO: 1764906 - DNA, 15 bp, Homo sapiens
acaaattttcacctg

SEQ ID NO: 1764907 - DNA, 15 bp, Homo sapiens
caaattttcacctgt

SEQ ID NO: 1764908 - DNA, 15 bp, Homo sapiens
aaattttcacctgtt

SEQ ID NO: 1764909 - DNA, 15 bp, Homo sapiens
aattttcacctgttg

SEQ ID NO: 1764910 - DNA, 15 bp, Homo sapiens
attttcacctgttgc

SEQ ID NO: 1764911 - DNA, 15 bp, Homo sapiens
ttttcacctgttgca

SEQ ID NO: 1764912 - DNA, 15 bp, Homo sapiens
tttcacctgttgcag

SEQ ID NO: 1764913 - DNA, 15 bp, Homo sapiens
ttcacctgttgcagt

SEQ ID NO: 1764914 - DNA, 15 bp, Homo sapiens
tcacctgttgcagtc

SEQ ID NO: 1764915 - DNA, 15 bp, Homo sapiens
cacctgttgcagtcc

SEQ ID NO: 1764916 - DNA, 15 bp, Homo sapiens
acctgttgcagtcct

SEQ ID NO: 1764917 - DNA, 15 bp, Homo sapiens
cctgttgcagtcctt

SEQ ID NO: 1764918 - DNA, 15 bp, Homo sapiens
ctgttgcagtcctta

SEQ ID NO: 1764919 - DNA, 15 bp, Homo sapiens
tgttgcagtccttat

SEQ ID NO: 1764920 - DNA, 15 bp, Homo sapiens
gttgcagtccttata

SEQ ID NO: 1764921 - DNA, 15 bp, Homo sapiens
ttgcagtccttataa

SEQ ID NO: 1764922 - DNA, 15 bp, Homo sapiens
tgcagtccttataaa

SEQ ID NO: 1764923 - DNA, 15 bp, Homo sapiens
gcagtccttataaag

SEQ ID NO: 1764924 - DNA, 15 bp, Homo sapiens
cagtccttataaaga

SEQ ID NO: 1764925 - DNA, 15 bp, Homo sapiens
agtccttataaagaa

SEQ ID NO: 1764926 - DNA, 15 bp, Homo sapiens
gtccttataaagaag

SEQ ID NO: 1764927 - DNA, 15 bp, Homo sapiens
tccttataaagaagt

SEQ ID NO: 1764928 - DNA, 15 bp, Homo sapiens
ccttataaagaagta

SEQ ID NO: 1764929 - DNA, 15 bp, Homo sapiens
cttataaagaagtaa

SEQ ID NO: 1764930 - DNA, 15 bp, Homo sapiens
ttataaagaagtaaa

SEQ ID NO: 1764931 - DNA, 15 bp, Homo sapiens
tataaagaagtaaac

SEQ ID NO: 1764932 - DNA, 15 bp, Homo sapiens
ataaagaagtaaaca

SEQ ID NO: 1764933 - DNA, 15 bp, Homo sapiens
taaagaagtaaacaa

SEQ ID NO: 1764934 - DNA, 15 bp, Homo sapiens
aaagaagtaaacaag

SEQ ID NO: 1764935 - DNA, 15 bp, Homo sapiens
aagaagtaaacaagg

SEQ ID NO: 1764936 - DNA, 15 bp, Homo sapiens
agaagtaaacaaggt

SEQ ID NO: 1764937 - DNA, 15 bp, Homo sapiens
gaagtaaacaaggtg

SEQ ID NO: 1764938 - DNA, 15 bp, Homo sapiens
aagtaaacaaggtgg

SEQ ID NO: 1764939 - DNA, 15 bp, Homo sapiens
agtaaacaaggtggc

SEQ ID NO: 1764940 - DNA, 15 bp, Homo sapiens
gtaaacaaggtggca

SEQ ID NO: 1764941 - DNA, 15 bp, Homo sapiens
taaacaaggtggcat

SEQ ID NO: 1764942 - DNA, 15 bp, Homo sapiens
aaacaaggtggcatt

SEQ ID NO: 1764943 - DNA, 15 bp, Homo sapiens
aacaaggtggcattt

SEQ ID NO: 1764944 - DNA, 15 bp, Homo sapiens
acaaggtggcattta

SEQ ID NO: 1764945 - DNA, 15 bp, Homo sapiens
caaggtggcatttag

SEQ ID NO: 1764946 - DNA, 15 bp, Homo sapiens
aaggtggcatttagc

SEQ ID NO: 1764947 - DNA, 15 bp, Homo sapiens
aggtggcatttagca

SEQ ID NO: 1764948 - DNA, 15 bp, Homo sapiens
ggtggcatttagcac

SEQ ID NO: 1764949 - DNA, 15 bp, Homo sapiens
gtggcatttagcacc

SEQ ID NO: 1764950 - DNA, 15 bp, Homo sapiens
tggcatttagcaccc

SEQ ID NO: 1764951 - DNA, 15 bp, Homo sapiens
ggcatttagcaccct

SEQ ID NO: 1764952 - DNA, 15 bp, Homo sapiens
gcatttagcaccctt

SEQ ID NO: 1764953 - DNA, 15 bp, Homo sapiens
catttagcacccttc

SEQ ID NO: 1764954 - DNA, 15 bp, Homo sapiens
atttagcacccttct

SEQ ID NO: 1764955 - DNA, 15 bp, Homo sapiens
tttagcacccttctc

SEQ ID NO: 1764956 - DNA, 15 bp, Homo sapiens
ttagcacccttctca

SEQ ID NO: 1764957 - DNA, 15 bp, Homo sapiens
tagcacccttctcag

SEQ ID NO: 1764958 - DNA, 15 bp, Homo sapiens
agcacccttctcaga

SEQ ID NO: 1764959 - DNA, 15 bp, Homo sapiens
gcacccttctcagaa

SEQ ID NO: 1764960 - DNA, 15 bp, Homo sapiens
cacccttctcagaag

SEQ ID NO: 1764961 - DNA, 15 bp, Homo sapiens
acccttctcagaagt

SEQ ID NO: 1764962 - DNA, 15 bp, Homo sapiens
cccttctcagaagtg

SEQ ID NO: 1764963 - DNA, 15 bp, Homo sapiens
ccttctcagaagtgt

SEQ ID NO: 1764964 - DNA, 15 bp, Homo sapiens
cttctcagaagtgtg

SEQ ID NO: 1764965 - DNA, 15 bp, Homo sapiens
ttctcagaagtgtgt

SEQ ID NO: 1764966 - DNA, 15 bp, Homo sapiens
tctcagaagtgtgtc

SEQ ID NO: 1764967 - DNA, 15 bp, Homo sapiens
ctcagaagtgtgtcc

SEQ ID NO: 1764968 - DNA, 15 bp, Homo sapiens
tcagaagtgtgtccc

SEQ ID NO: 1764969 - DNA, 15 bp, Homo sapiens
cagaagtgtgtccca

SEQ ID NO: 1764970 - DNA, 15 bp, Homo sapiens
agaagtgtgtcccac

SEQ ID NO: 1764971 - DNA, 15 bp, Homo sapiens
gaagtgtgtcccact

SEQ ID NO: 1764972 - DNA, 15 bp, Homo sapiens
aagtgtgtcccactt

SEQ ID NO: 1764973 - DNA, 15 bp, Homo sapiens
agtgtgtcccacttc

SEQ ID NO: 1764974 - DNA, 15 bp, Homo sapiens
gtgtgtcccacttct

SEQ ID NO: 1764975 - DNA, 15 bp, Homo sapiens
tgtgtcccacttcta

SEQ ID NO: 1764976 - DNA, 15 bp, Homo sapiens
gtgtcccacttctaa

SEQ ID NO: 1764977 - DNA, 15 bp, Homo sapiens
tgtcccacttctaag

SEQ ID NO: 1764978 - DNA, 15 bp, Homo sapiens
gtcccacttctaaga

SEQ ID NO: 1764979 - DNA, 15 bp, Homo sapiens
tcccacttctaagaa

SEQ ID NO: 1764980 - DNA, 15 bp, Homo sapiens
cccacttctaagaac

SEQ ID NO: 1764981 - DNA, 15 bp, Homo sapiens
ccacttctaagaaca

SEQ ID NO: 1764982 - DNA, 15 bp, Homo sapiens
cacttctaagaacaa

SEQ ID NO: 1764983 - DNA, 15 bp, Homo sapiens
acttctaagaacaac

SEQ ID NO: 1764984 - DNA, 15 bp, Homo sapiens
cttctaagaacaaca

SEQ ID NO: 1764985 - DNA, 15 bp, Homo sapiens
ttctaagaacaacaa

SEQ ID NO: 1764986 - DNA, 15 bp, Homo sapiens
tctaagaacaacaag

SEQ ID NO: 1764987 - DNA, 15 bp, Homo sapiens
ctaagaacaacaaga

SEQ ID NO: 1764988 - DNA, 15 bp, Homo sapiens
taagaacaacaagaa

SEQ ID NO: 1764989 - DNA, 15 bp, Homo sapiens
aagaacaacaagaaa

SEQ ID NO: 1764990 - DNA, 15 bp, Homo sapiens
agaacaacaagaaat

SEQ ID NO: 1764991 - DNA, 15 bp, Homo sapiens
gaacaacaagaaatg

SEQ ID NO: 1764992 - DNA, 15 bp, Homo sapiens
aacaacaagaaatgg

SEQ ID NO: 1764993 - DNA, 15 bp, Homo sapiens
acaacaagaaatgga

SEQ ID NO: 1764994 - DNA, 15 bp, Homo sapiens
caacaagaaatggaa

SEQ ID NO: 1764995 - DNA, 15 bp, Homo sapiens
aacaagaaatggaac

SEQ ID NO: 1764996 - DNA, 15 bp, Homo sapiens
acaagaaatggaacc

SEQ ID NO: 1764997 - DNA, 15 bp, Homo sapiens
caagaaatggaaccc

SEQ ID NO: 1764998 - DNA, 15 bp, Homo sapiens
aagaaatggaacccc

SEQ ID NO: 1764999 - DNA, 15 bp, Homo sapiens
agaaatggaaccccc

SEQ ID NO: 1765000 - DNA, 15 bp, Homo sapiens
gaaatggaacccccc

SEQ ID NO: 1765001 - DNA, 15 bp, Homo sapiens
aaatggaacccccca

SEQ ID NO: 1765002 - DNA, 15 bp, Homo sapiens
aatggaaccccccat

SEQ ID NO: 1765003 - DNA, 15 bp, Homo sapiens
atggaaccccccatc

SEQ ID NO: 1765004 - DNA, 15 bp, Homo sapiens
tggaaccccccatct

SEQ ID NO: 1765005 - DNA, 15 bp, Homo sapiens
ggaaccccccatctc

SEQ ID NO: 1765006 - DNA, 15 bp, Homo sapiens
gaaccccccatctca

SEQ ID NO: 1765007 - DNA, 15 bp, Homo sapiens
aaccccccatctcag

SEQ ID NO: 1765008 - DNA, 15 bp, Homo sapiens
accccccatctcaga

SEQ ID NO: 1765009 - DNA, 15 bp, Homo sapiens
ccccccatctcagaa

SEQ ID NO: 1765010 - DNA, 15 bp, Homo sapiens
cccccatctcagaag

SEQ ID NO: 1765011 - DNA, 15 bp, Homo sapiens
ccccatctcagaagt

SEQ ID NO: 1765012 - DNA, 15 bp, Homo sapiens
cccatctcagaagtg

SEQ ID NO: 1765013 - DNA, 15 bp, Homo sapiens
ccatctcagaagtgc

SEQ ID NO: 1765014 - DNA, 15 bp, Homo sapiens
catctcagaagtgca

SEQ ID NO: 1765015 - DNA, 15 bp, Homo sapiens
atctcagaagtgcac

SEQ ID NO: 1765016 - DNA, 15 bp, Homo sapiens
tctcagaagtgcacc

SEQ ID NO: 1765017 - DNA, 15 bp, Homo sapiens
ctcagaagtgcaccc

SEQ ID NO: 1765018 - DNA, 15 bp, Homo sapiens
tcagaagtgcacccc

SEQ ID NO: 1765019 - DNA, 15 bp, Homo sapiens
cagaagtgcacccca

SEQ ID NO: 1765020 - DNA, 15 bp, Homo sapiens
agaagtgcaccccaa

SEQ ID NO: 1765021 - DNA, 15 bp, Homo sapiens
gaagtgcaccccaaa

SEQ ID NO: 1765022 - DNA, 15 bp, Homo sapiens
aagtgcaccccaaag

SEQ ID NO: 1765023 - DNA, 15 bp, Homo sapiens
agtgcaccccaaagg

SEQ ID NO: 1765024 - DNA, 15 bp, Homo sapiens
gtgcaccccaaaggc

SEQ ID NO: 1765025 - DNA, 15 bp, Homo sapiens
tgcaccccaaaggcc

SEQ ID NO: 1765026 - DNA, 15 bp, Homo sapiens
gcaccccaaaggcca

SEQ ID NO: 1765027 - DNA, 15 bp, Homo sapiens
caccccaaaggccaa

SEQ ID NO: 1765028 - DNA, 15 bp, Homo sapiens
accccaaaggccaat

SEQ ID NO: 1765029 - DNA, 15 bp, Homo sapiens
ccccaaaggccaatg

SEQ ID NO: 1765030 - DNA, 15 bp, Homo sapiens
cccaaaggccaatgc

SEQ ID NO: 1765031 - DNA, 15 bp, Homo sapiens
ccaaaggccaatgct

SEQ ID NO: 1765032 - DNA, 15 bp, Homo sapiens
caaaggccaatgctc

SEQ ID NO: 1765033 - DNA, 15 bp, Homo sapiens
aaaggccaatgctca

SEQ ID NO: 1765034 - DNA, 15 bp, Homo sapiens
aaggccaatgctcag

SEQ ID NO: 1765035 - DNA, 15 bp, Homo sapiens
aggccaatgctcaga

SEQ ID NO: 1765036 - DNA, 15 bp, Homo sapiens
ggccaatgctcagaa

SEQ ID NO: 1765037 - DNA, 15 bp, Homo sapiens
gccaatgctcagaag

SEQ ID NO: 1765038 - DNA, 15 bp, Homo sapiens
ccaatgctcagaagt

SEQ ID NO: 1765039 - DNA, 15 bp, Homo sapiens
caatgctcagaagtg

SEQ ID NO: 1765040 - DNA, 15 bp, Homo sapiens
aatgctcagaagtgc

SEQ ID NO: 1765041 - DNA, 15 bp, Homo sapiens
atgctcagaagtgca

SEQ ID NO: 1765042 - DNA, 15 bp, Homo sapiens
tgctcagaagtgcac

SEQ ID NO: 1765043 - DNA, 15 bp, Homo sapiens
gctcagaagtgcacc

SEQ ID NO: 1765044 - DNA, 15 bp, Homo sapiens
cccaaaggccaatgt

SEQ ID NO: 1765045 - DNA, 15 bp, Homo sapiens
ccaaaggccaatgtt

SEQ ID NO: 1765046 - DNA, 15 bp, Homo sapiens
caaaggccaatgttg

SEQ ID NO: 1765047 - DNA, 15 bp, Homo sapiens
aaaggccaatgttgt

SEQ ID NO: 1765048 - DNA, 15 bp, Homo sapiens
aaggccaatgttgtg

SEQ ID NO: 1765049 - DNA, 15 bp, Homo sapiens
aggccaatgttgtgt

SEQ ID NO: 1765050 - DNA, 15 bp, Homo sapiens
ggccaatgttgtgtt

SEQ ID NO: 1765051 - DNA, 15 bp, Homo sapiens
gccaatgttgtgttt

SEQ ID NO: 1765052 - DNA, 15 bp, Homo sapiens
ccaatgttgtgtttc

SEQ ID NO: 1765053 - DNA, 15 bp, Homo sapiens
caatgttgtgtttca

SEQ ID NO: 1765054 - DNA, 15 bp, Homo sapiens
aatgttgtgtttcat

SEQ ID NO: 1765055 - DNA, 15 bp, Homo sapiens
atgttgtgtttcatg

SEQ ID NO: 1765056 - DNA, 15 bp, Homo sapiens
tgttgtgtttcatgc

SEQ ID NO: 1765057 - DNA, 15 bp, Homo sapiens
gttgtgtttcatgca

SEQ ID NO: 1765058 - DNA, 15 bp, Homo sapiens
ttgtgtttcatgcac

SEQ ID NO: 1765059 - DNA, 15 bp, Homo sapiens
tgtgtttcatgcaca

SEQ ID NO: 1765060 - DNA, 15 bp, Homo sapiens
gtgtttcatgcacat

SEQ ID NO: 1765061 - DNA, 15 bp, Homo sapiens
tgtttcatgcacata

SEQ ID NO: 1765062 - DNA, 15 bp, Homo sapiens
gtttcatgcacatac

SEQ ID NO: 1765063 - DNA, 15 bp, Homo sapiens
tttcatgcacataca

SEQ ID NO: 1765064 - DNA, 15 bp, Homo sapiens
ttcatgcacatacag

SEQ ID NO: 1765065 - DNA, 15 bp, Homo sapiens
tcatgcacatacagc

SEQ ID NO: 1765066 - DNA, 15 bp, Homo sapiens
catgcacatacagca

SEQ ID NO: 1765067 - DNA, 15 bp, Homo sapiens
atgcacatacagcag

SEQ ID NO: 1765068 - DNA, 15 bp, Homo sapiens
tgcacatacagcagg

SEQ ID NO: 1765069 - DNA, 15 bp, Homo sapiens
gcacatacagcagga

SEQ ID NO: 1765070 - DNA, 15 bp, Homo sapiens
cacatacagcaggac

SEQ ID NO: 1765071 - DNA, 15 bp, Homo sapiens
acatacagcaggaca

SEQ ID NO: 1765072 - DNA, 15 bp, Homo sapiens
catacagcaggacag

SEQ ID NO: 1765073 - DNA, 15 bp, Homo sapiens
atacagcaggacagc

SEQ ID NO: 1765074 - DNA, 15 bp, Homo sapiens
tacagcaggacagca

SEQ ID NO: 1765075 - DNA, 15 bp, Homo sapiens
acagcaggacagcag

SEQ ID NO: 1765076 - DNA, 15 bp, Homo sapiens
cagcaggacagcagg

SEQ ID NO: 1765077 - DNA, 15 bp, Homo sapiens
agcaggacagcagga

SEQ ID NO: 1765078 - DNA, 15 bp, Homo sapiens
gcaggacagcaggag

SEQ ID NO: 1765079 - DNA, 15 bp, Homo sapiens
caggacagcaggagg

SEQ ID NO: 1765080 - DNA, 15 bp, Homo sapiens
aggacagcaggaggg

SEQ ID NO: 1765081 - DNA, 15 bp, Homo sapiens
ggacagcaggagggg

SEQ ID NO: 1765082 - DNA, 15 bp, Homo sapiens
gacagcaggaggggc

SEQ ID NO: 1765083 - DNA, 15 bp, Homo sapiens
acagcaggaggggct

SEQ ID NO: 1765084 - DNA, 15 bp, Homo sapiens
cagcaggaggggctc

SEQ ID NO: 1765085 - DNA, 15 bp, Homo sapiens
gcaggaggggctctt

SEQ ID NO: 1765086 - DNA, 15 bp, Homo sapiens
caggaggggctcttg

SEQ ID NO: 1765087 - DNA, 15 bp, Homo sapiens
aggaggggctcttga

SEQ ID NO: 1765088 - DNA, 15 bp, Homo sapiens
ggaggggctcttgat

SEQ ID NO: 1765089 - DNA, 15 bp, Homo sapiens
gaggggctcttgatt

SEQ ID NO: 1765090 - DNA, 15 bp, Homo sapiens
aggggctcttgattg

SEQ ID NO: 1765091 - DNA, 15 bp, Homo sapiens
ggggctcttgattgg

SEQ ID NO: 1765092 - DNA, 15 bp, Homo sapiens
gggctcttgattggg

SEQ ID NO: 1765093 - DNA, 15 bp, Homo sapiens
ggctcttgattgggg

SEQ ID NO: 1765094 - DNA, 15 bp, Homo sapiens
gctcttgattggggt

SEQ ID NO: 1765095 - DNA, 15 bp, Homo sapiens
ctcttgattggggtg

SEQ ID NO: 1765096 - DNA, 15 bp, Homo sapiens
tcttgattggggtgg

SEQ ID NO: 1765097 - DNA, 15 bp, Homo sapiens
cttgattggggtggg

SEQ ID NO: 1765098 - DNA, 15 bp, Homo sapiens
ttgattggggtgggg

SEQ ID NO: 1765099 - DNA, 15 bp, Homo sapiens
tgattggggtggggg

SEQ ID NO: 1765100 - DNA, 15 bp, Homo sapiens
gattggggtggggga

SEQ ID NO: 1765101 - DNA, 15 bp, Homo sapiens
attggggtgggggag

SEQ ID NO: 1765102 - DNA, 15 bp, Homo sapiens
ttggggtgggggagt

SEQ ID NO: 1765103 - DNA, 15 bp, Homo sapiens
tggggtgggggagtg

SEQ ID NO: 1765104 - DNA, 15 bp, Homo sapiens
ggggtgggggagtgg

SEQ ID NO: 1765105 - DNA, 15 bp, Homo sapiens
gggtgggggagtggg

SEQ ID NO: 1765106 - DNA, 15 bp, Homo sapiens
ggtgggggagtgggc

SEQ ID NO: 1765107 - DNA, 15 bp, Homo sapiens
gtgggggagtgggct

SEQ ID NO: 1765108 - DNA, 15 bp, Homo sapiens
tgggggagtgggctg

SEQ ID NO: 1765109 - DNA, 15 bp, Homo sapiens
gggggagtgggctga

SEQ ID NO: 1765110 - DNA, 15 bp, Homo sapiens
ggggagtgggctgat

SEQ ID NO: 1765111 - DNA, 15 bp, Homo sapiens
gggagtgggctgatt

SEQ ID NO: 1765112 - DNA, 15 bp, Homo sapiens
ggagtgggctgattt

SEQ ID NO: 1765113 - DNA, 15 bp, Homo sapiens
gagtgggctgatttc

SEQ ID NO: 1765114 - DNA, 15 bp, Homo sapiens
agtgggctgatttct

SEQ ID NO: 1765115 - DNA, 15 bp, Homo sapiens
gtgggctgatttctg

SEQ ID NO: 1765116 - DNA, 15 bp, Homo sapiens
tgggctgatttctga

SEQ ID NO: 1765117 - DNA, 15 bp, Homo sapiens
gggctgatttctgat

SEQ ID NO: 1765118 - DNA, 15 bp, Homo sapiens
ggctgatttctgatg

SEQ ID NO: 1765119 - DNA, 15 bp, Homo sapiens
gctgatttctgatga

SEQ ID NO: 1765120 - DNA, 15 bp, Homo sapiens
ctgatttctgatgag

SEQ ID NO: 1765121 - DNA, 15 bp, Homo sapiens
tgatttctgatgaga

SEQ ID NO: 1765122 - DNA, 15 bp, Homo sapiens
gatttctgatgagat

SEQ ID NO: 1765123 - DNA, 15 bp, Homo sapiens
atttctgatgagatg

SEQ ID NO: 1765124 - DNA, 15 bp, Homo sapiens
tttctgatgagatgc

SEQ ID NO: 1765125 - DNA, 15 bp, Homo sapiens
ttctgatgagatgcc

SEQ ID NO: 1765126 - DNA, 15 bp, Homo sapiens
tctgatgagatgcct

SEQ ID NO: 1765127 - DNA, 15 bp, Homo sapiens
ctgatgagatgccta

SEQ ID NO: 1765128 - DNA, 15 bp, Homo sapiens
tgatgagatgcctaa

SEQ ID NO: 1765129 - DNA, 15 bp, Homo sapiens
gatgagatgcctaat

SEQ ID NO: 1765130 - DNA, 15 bp, Homo sapiens
atgagatgcctaatt

SEQ ID NO: 1765131 - DNA, 15 bp, Homo sapiens
tgagatgcctaatta

SEQ ID NO: 1765132 - DNA, 15 bp, Homo sapiens
gagatgcctaattac

SEQ ID NO: 1765133 - DNA, 15 bp, Homo sapiens
agatgcctaattacg

SEQ ID NO: 1765134 - DNA, 15 bp, Homo sapiens
gatgcctaattacgg

SEQ ID NO: 1765135 - DNA, 15 bp, Homo sapiens
atgcctaattacggc

SEQ ID NO: 1765136 - DNA, 15 bp, Homo sapiens
tgcctaattacggct

SEQ ID NO: 1765137 - DNA, 15 bp, Homo sapiens
gcctaattacggctt

SEQ ID NO: 1765138 - DNA, 15 bp, Homo sapiens
cctaattacggcttt

SEQ ID NO: 1765139 - DNA, 15 bp, Homo sapiens
ctaattacggctttg

SEQ ID NO: 1765140 - DNA, 15 bp, Homo sapiens
taattacggctttgg

SEQ ID NO: 1765141 - DNA, 15 bp, Homo sapiens
aattacggctttggg

SEQ ID NO: 1765142 - DNA, 15 bp, Homo sapiens
attacggctttggga

SEQ ID NO: 1765143 - DNA, 15 bp, Homo sapiens
ttacggctttgggac

SEQ ID NO: 1765144 - DNA, 15 bp, Homo sapiens
tacggctttgggaca

SEQ ID NO: 1765145 - DNA, 15 bp, Homo sapiens
acggctttgggacaa

SEQ ID NO: 1765146 - DNA, 15 bp, Homo sapiens
cggctttgggacaat

SEQ ID NO: 1765147 - DNA, 15 bp, Homo sapiens
ggctttgggacaatg

SEQ ID NO: 1765148 - DNA, 15 bp, Homo sapiens
gctttgggacaatgc

SEQ ID NO: 1765149 - DNA, 15 bp, Homo sapiens
ctttgggacaatgcc

SEQ ID NO: 1765150 - DNA, 15 bp, Homo sapiens
tttgggacaatgcct

SEQ ID NO: 1765151 - DNA, 15 bp, Homo sapiens
ttgggacaatgccta

SEQ ID NO: 1765152 - DNA, 15 bp, Homo sapiens
tgggacaatgcctac

SEQ ID NO: 1765153 - DNA, 15 bp, Homo sapiens
gggacaatgcctaca

SEQ ID NO: 1765154 - DNA, 15 bp, Homo sapiens
ggacaatgcctacac

SEQ ID NO: 1765155 - DNA, 15 bp, Homo sapiens
gacaatgcctacact

SEQ ID NO: 1765156 - DNA, 15 bp, Homo sapiens
acaatgcctacactt

SEQ ID NO: 1765157 - DNA, 15 bp, Homo sapiens
caatgcctacacttt

SEQ ID NO: 1765158 - DNA, 15 bp, Homo sapiens
aatgcctacacttta

SEQ ID NO: 1765159 - DNA, 15 bp, Homo sapiens
atgcctacactttat

SEQ ID NO: 1765160 - DNA, 15 bp, Homo sapiens
tgcctacactttata

SEQ ID NO: 1765161 - DNA, 15 bp, Homo sapiens
gcctacactttatac

SEQ ID NO: 1765162 - DNA, 15 bp, Homo sapiens
cctacactttatact

SEQ ID NO: 1765163 - DNA, 15 bp, Homo sapiens
ctacactttatactg

SEQ ID NO: 1765164 - DNA, 15 bp, Homo sapiens
tacactttatactga

SEQ ID NO: 1765165 - DNA, 15 bp, Homo sapiens
acactttatactgaa

SEQ ID NO: 1765166 - DNA, 15 bp, Homo sapiens
cactttatactgaaa

SEQ ID NO: 1765167 - DNA, 15 bp, Homo sapiens
actttatactgaaat

SEQ ID NO: 1765168 - DNA, 15 bp, Homo sapiens
ctttatactgaaatg

SEQ ID NO: 1765169 - DNA, 15 bp, Homo sapiens
tttatactgaaatga

SEQ ID NO: 1765170 - DNA, 15 bp, Homo sapiens
ttatactgaaatgaa

SEQ ID NO: 1765171 - DNA, 15 bp, Homo sapiens
tatactgaaatgaat

SEQ ID NO: 1765172 - DNA, 15 bp, Homo sapiens
atactgaaatgaatc

SEQ ID NO: 1765173 - DNA, 15 bp, Homo sapiens
tactgaaatgaatcc

SEQ ID NO: 1765174 - DNA, 15 bp, Homo sapiens
actgaaatgaatcca

SEQ ID NO: 1765175 - DNA, 15 bp, Homo sapiens
ctgaaatgaatccac

SEQ ID NO: 1765176 - DNA, 15 bp, Homo sapiens
tgaaatgaatccaca

SEQ ID NO: 1765177 - DNA, 15 bp, Homo sapiens
gaaatgaatccacag

SEQ ID NO: 1765178 - DNA, 15 bp, Homo sapiens
aaatgaatccacagt

SEQ ID NO: 1765179 - DNA, 15 bp, Homo sapiens
aatgaatccacagtg

SEQ ID NO: 1765180 - DNA, 15 bp, Homo sapiens
atgaatccacagtgg

SEQ ID NO: 1765181 - DNA, 15 bp, Homo sapiens
tgaatccacagtggg

SEQ ID NO: 1765182 - DNA, 15 bp, Homo sapiens
gaatccacagtgggc

SEQ ID NO: 1765183 - DNA, 15 bp, Homo sapiens
aatccacagtgggct

SEQ ID NO: 1765184 - DNA, 15 bp, Homo sapiens
atccacagtgggctg

SEQ ID NO: 1765185 - DNA, 15 bp, Homo sapiens
tccacagtgggctgc

SEQ ID NO: 1765186 - DNA, 15 bp, Homo sapiens
ccacagtgggctgca

SEQ ID NO: 1765187 - DNA, 15 bp, Homo sapiens
cacagtgggctgcaa

SEQ ID NO: 1765188 - DNA, 15 bp, Homo sapiens
acagtgggctgcaag

SEQ ID NO: 1765189 - DNA, 15 bp, Homo sapiens
cagtgggctgcaagt

SEQ ID NO: 1765190 - DNA, 15 bp, Homo sapiens
agtgggctgcaagtt

SEQ ID NO: 1765191 - DNA, 15 bp, Homo sapiens
gtgggctgcaagttc

SEQ ID NO: 1765192 - DNA, 15 bp, Homo sapiens
tgggctgcaagttct

SEQ ID NO: 1765193 - DNA, 15 bp, Homo sapiens
gggctgcaagttcta

SEQ ID NO: 1765194 - DNA, 15 bp, Homo sapiens
ggctgcaagttctac

SEQ ID NO: 1765195 - DNA, 15 bp, Homo sapiens
gctgcaagttctaca

SEQ ID NO: 1765196 - DNA, 15 bp, Homo sapiens
ctgcaagttctacaa

SEQ ID NO: 1765197 - DNA, 15 bp, Homo sapiens
tgcaagttctacaag

SEQ ID NO: 1765198 - DNA, 15 bp, Homo sapiens
gcaagttctacaagg

SEQ ID NO: 1765199 - DNA, 15 bp, Homo sapiens
caagttctacaaggg

SEQ ID NO: 1765200 - DNA, 15 bp, Homo sapiens
aagttctacaagggc

SEQ ID NO: 1765201 - DNA, 15 bp, Homo sapiens
agttctacaagggca

SEQ ID NO: 1765202 - DNA, 15 bp, Homo sapiens
gttctacaagggcag

SEQ ID NO: 1765203 - DNA, 15 bp, Homo sapiens
ttctacaagggcagg

SEQ ID NO: 1765204 - DNA, 15 bp, Homo sapiens
tctacaagggcaggg

SEQ ID NO: 1765205 - DNA, 15 bp, Homo sapiens
ctacaagggcaggga

SEQ ID NO: 1765206 - DNA, 15 bp, Homo sapiens
tacaagggcagggac

SEQ ID NO: 1765207 - DNA, 15 bp, Homo sapiens
acaagggcagggact

SEQ ID NO: 1765208 - DNA, 15 bp, Homo sapiens
caagggcagggactg

SEQ ID NO: 1765209 - DNA, 15 bp, Homo sapiens
aagggcagggactgt

SEQ ID NO: 1765210 - DNA, 15 bp, Homo sapiens
agggcagggactgta

SEQ ID NO: 1765211 - DNA, 15 bp, Homo sapiens
gggcagggactgtat

SEQ ID NO: 1765212 - DNA, 15 bp, Homo sapiens
ggcagggactgtatt

SEQ ID NO: 1765213 - DNA, 15 bp, Homo sapiens
gcagggactgtattc

SEQ ID NO: 1765214 - DNA, 15 bp, Homo sapiens
cagggactgtattct

SEQ ID NO: 1765215 - DNA, 15 bp, Homo sapiens
agggactgtattcta

SEQ ID NO: 1765216 - DNA, 15 bp, Homo sapiens
gggactgtattctac

SEQ ID NO: 1765217 - DNA, 15 bp, Homo sapiens
ggactgtattctact

SEQ ID NO: 1765218 - DNA, 15 bp, Homo sapiens
gactgtattctactg

SEQ ID NO: 1765219 - DNA, 15 bp, Homo sapiens
actgtattctactgt

SEQ ID NO: 1765220 - DNA, 15 bp, Homo sapiens
ctgtattctactgta

SEQ ID NO: 1765221 - DNA, 15 bp, Homo sapiens
tgtattctactgtat

SEQ ID NO: 1765222 - DNA, 15 bp, Homo sapiens
gtattctactgtatc

SEQ ID NO: 1765223 - DNA, 15 bp, Homo sapiens
tattctactgtatcc

SEQ ID NO: 1765224 - DNA, 15 bp, Homo sapiens
attctactgtatcct

SEQ ID NO: 1765225 - DNA, 15 bp, Homo sapiens
ttctactgtatcctt

SEQ ID NO: 1765226 - DNA, 15 bp, Homo sapiens
tctactgtatcctta

SEQ ID NO: 1765227 - DNA, 15 bp, Homo sapiens
ctactgtatccttat

SEQ ID NO: 1765228 - DNA, 15 bp, Homo sapiens
tactgtatccttatc

SEQ ID NO: 1765229 - DNA, 15 bp, Homo sapiens
actgtatccttatca

SEQ ID NO: 1765230 - DNA, 15 bp, Homo sapiens
ctgtatccttatcac

SEQ ID NO: 1765231 - DNA, 15 bp, Homo sapiens
tgtatccttatcacc

SEQ ID NO: 1765232 - DNA, 15 bp, Homo sapiens
gtatccttatcacct

SEQ ID NO: 1765233 - DNA, 15 bp, Homo sapiens
tatccttatcaccta

SEQ ID NO: 1765234 - DNA, 15 bp, Homo sapiens
atccttatcacctag

SEQ ID NO: 1765235 - DNA, 15 bp, Homo sapiens
tccttatcacctaga

SEQ ID NO: 1765236 - DNA, 15 bp, Homo sapiens
ccttatcacctagaa

SEQ ID NO: 1765237 - DNA, 15 bp, Homo sapiens
cttatcacctagaac

SEQ ID NO: 1765238 - DNA, 15 bp, Homo sapiens
ttatcacctagaaca

SEQ ID NO: 1765239 - DNA, 15 bp, Homo sapiens
tatcacctagaacag

SEQ ID NO: 1765240 - DNA, 15 bp, Homo sapiens
atcacctagaacagg

SEQ ID NO: 1765241 - DNA, 15 bp, Homo sapiens
tcacctagaacaggg

SEQ ID NO: 1765242 - DNA, 15 bp, Homo sapiens
cacctagaacagggt

SEQ ID NO: 1765243 - DNA, 15 bp, Homo sapiens
acctagaacagggtc

SEQ ID NO: 1765244 - DNA, 15 bp, Homo sapiens
cctagaacagggtcg

SEQ ID NO: 1765245 - DNA, 15 bp, Homo sapiens
ctagaacagggtcgg

SEQ ID NO: 1765246 - DNA, 15 bp, Homo sapiens
tagaacagggtcggt

SEQ ID NO: 1765247 - DNA, 15 bp, Homo sapiens
agaacagggtcggtc

SEQ ID NO: 1765248 - DNA, 15 bp, Homo sapiens
gaacagggtcggtca

SEQ ID NO: 1765249 - DNA, 15 bp, Homo sapiens
aacagggtcggtcac

SEQ ID NO: 1765250 - DNA, 15 bp, Homo sapiens
acagggtcggtcacg

SEQ ID NO: 1765251 - DNA, 15 bp, Homo sapiens
cagggtcggtcacgt

SEQ ID NO: 1765252 - DNA, 15 bp, Homo sapiens
agggtcggtcacgta

SEQ ID NO: 1765253 - DNA, 15 bp, Homo sapiens
gggtcggtcacgtag

SEQ ID NO: 1765254 - DNA, 15 bp, Homo sapiens
ggtcggtcacgtagt

SEQ ID NO: 1765255 - DNA, 15 bp, Homo sapiens
gtcggtcacgtagtg

SEQ ID NO: 1765256 - DNA, 15 bp, Homo sapiens
tcggtcacgtagtgg

SEQ ID NO: 1765257 - DNA, 15 bp, Homo sapiens
cggtcacgtagtggg

SEQ ID NO: 1765258 - DNA, 15 bp, Homo sapiens
ggtcacgtagtgggt

SEQ ID NO: 1765259 - DNA, 15 bp, Homo sapiens
gtcacgtagtgggtg

SEQ ID NO: 1765260 - DNA, 15 bp, Homo sapiens
tcacgtagtgggtgc

SEQ ID NO: 1765261 - DNA, 15 bp, Homo sapiens
cacgtagtgggtgct

SEQ ID NO: 1765262 - DNA, 15 bp, Homo sapiens
acgtagtgggtgctt

SEQ ID NO: 1765263 - DNA, 15 bp, Homo sapiens
cgtagtgggtgctta

SEQ ID NO: 1765264 - DNA, 15 bp, Homo sapiens
gtagtgggtgcttaa

SEQ ID NO: 1765265 - DNA, 15 bp, Homo sapiens
tagtgggtgcttaat

SEQ ID NO: 1765266 - DNA, 15 bp, Homo sapiens
agtgggtgcttaata

SEQ ID NO: 1765267 - DNA, 15 bp, Homo sapiens
gtgggtgcttaataa

SEQ ID NO: 1765268 - DNA, 15 bp, Homo sapiens
tgggtgcttaataaa

SEQ ID NO: 1765269 - DNA, 15 bp, Homo sapiens
gggtgcttaataaat

SEQ ID NO: 1765270 - DNA, 15 bp, Homo sapiens
gtgcttaataaatat

SEQ ID NO: 1765271 - DNA, 15 bp, Homo sapiens
tgcttaataaatatt

SEQ ID NO: 1765272 - DNA, 15 bp, Homo sapiens
gcttaataaatattt

SEQ ID NO: 1765273 - DNA, 15 bp, Homo sapiens
cttaataaatatttg

SEQ ID NO: 1765274 - DNA, 15 bp, Homo sapiens
ttaataaatatttgt

SEQ ID NO: 1765275 - DNA, 15 bp, Homo sapiens
taataaatatttgtt

SEQ ID NO: 1765276 - DNA, 15 bp, Homo sapiens
aataaatatttgttg

SEQ ID NO: 1765277 - DNA, 15 bp, Homo sapiens
ataaatatttgttga

SEQ ID NO: 1765278 - DNA, 15 bp, Homo sapiens
taaatatttgttgaa

SEQ ID NO: 1765279 - DNA, 15 bp, Homo sapiens
aaatatttgttgaat

SEQ ID NO: 1765280 - DNA, 15 bp, Homo sapiens
aatatttgttgaata

SEQ ID NO: 1765281 - DNA, 15 bp, Homo sapiens
atatttgttgaataa

SEQ ID NO: 1765282 - DNA, 15 bp, Homo sapiens
tatttgttgaataaa

SEQ ID NO: 1765283 - DNA, 15 bp, Homo sapiens
atttgttgaataaag

SEQ ID NO: 1765284 - DNA, 15 bp, Homo sapiens
tttgttgaataaagg

SEQ ID NO: 1765285 - DNA, 15 bp, Homo sapiens
ttgttgaataaagga

SEQ ID NO: 1765286 - DNA, 15 bp, Homo sapiens
tgttgaataaaggag

SEQ ID NO: 1765287 - DNA, 15 bp, Homo sapiens
gttgaataaaggagt

SEQ ID NO: 1765288 - DNA, 15 bp, Homo sapiens
ttgaataaaggagta

SEQ ID NO: 1765289 - DNA, 15 bp, Homo sapiens
tgaataaaggagtaa

SEQ ID NO: 1765290 - DNA, 15 bp, Homo sapiens
gaataaaggagtaaa

SEQ ID NO: 1765291 - DNA, 15 bp, Homo sapiens
aataaaggagtaaaa

SEQ ID NO: 1765292 - DNA, 15 bp, Homo sapiens
ataaaggagtaaaat

SEQ ID NO: 1765293 - DNA, 15 bp, Homo sapiens
taaaggagtaaaata

SEQ ID NO: 1765294 - DNA, 15 bp, Homo sapiens
aaaggagtaaaataa

SEQ ID NO: 1765295 - DNA, 15 bp, Homo sapiens
aaggagtaaaataat

SEQ ID NO: 1765296 - DNA, 15 bp, Homo sapiens
aggagtaaaataatt

SEQ ID NO: 1765297 - DNA, 15 bp, Homo sapiens
ggagtaaaataattt

SEQ ID NO: 1765298 - DNA, 15 bp, Homo sapiens
gagtaaaataatttt

SEQ ID NO: 1765299 - DNA, 15 bp, Homo sapiens
agtaaaataatttta

SEQ ID NO: 1765300 - DNA, 15 bp, Homo sapiens
gtaaaataattttat

SEQ ID NO: 1765301 - DNA, 15 bp, Homo sapiens
taaaataattttatg

SEQ ID NO: 1765302 - DNA, 15 bp, Homo sapiens
aaaataattttatga

SEQ ID NO: 1765303 - DNA, 15 bp, Homo sapiens
aaataattttatgaa

SEQ ID NO: 1765304 - DNA, 15 bp, Homo sapiens
aataattttatgaat

SEQ ID NO: 1765305 - DNA, 15 bp, Homo sapiens
ataattttatgaatt

SEQ ID NO: 1765306 - DNA, 15 bp, Homo sapiens
taattttatgaatta

SEQ ID NO: 1765307 - DNA, 15 bp, Homo sapiens
aattttatgaattac

SEQ ID NO: 1765308 - DNA, 15 bp, Homo sapiens
attttatgaattact

SEQ ID NO: 1765309 - DNA, 15 bp, Homo sapiens
ttttatgaattactc

SEQ ID NO: 1765310 - DNA, 15 bp, Homo sapiens
tttatgaattactcc

SEQ ID NO: 1765311 - DNA, 15 bp, Homo sapiens
ttatgaattactcca

SEQ ID NO: 1765312 - DNA, 15 bp, Homo sapiens
tatgaattactccat

SEQ ID NO: 1765313 - DNA, 15 bp, Homo sapiens
atgaattactccata

SEQ ID NO: 1765314 - DNA, 15 bp, Homo sapiens
tgaattactccatag

SEQ ID NO: 1765315 - DNA, 15 bp, Homo sapiens
gaattactccatagt

SEQ ID NO: 1765316 - DNA, 15 bp, Homo sapiens
aattactccatagta

SEQ ID NO: 1765317 - DNA, 15 bp, Homo sapiens
attactccatagtat

SEQ ID NO: 1765318 - DNA, 15 bp, Homo sapiens
ttactccatagtatt

SEQ ID NO: 1765319 - DNA, 15 bp, Homo sapiens
tactccatagtattg

SEQ ID NO: 1765320 - DNA, 15 bp, Homo sapiens
actccatagtattgc

SEQ ID NO: 1765321 - DNA, 15 bp, Homo sapiens
ctccatagtattgca

SEQ ID NO: 1765322 - DNA, 15 bp, Homo sapiens
tccatagtattgcat

SEQ ID NO: 1765323 - DNA, 15 bp, Homo sapiens
ccatagtattgcata

SEQ ID NO: 1765324 - DNA, 15 bp, Homo sapiens
catagtattgcataa

SEQ ID NO: 1765325 - DNA, 15 bp, Homo sapiens
atagtattgcataaa

SEQ ID NO: 1765326 - DNA, 15 bp, Homo sapiens
tagtattgcataaaa

SEQ ID NO: 1765327 - DNA, 15 bp, Homo sapiens
agtattgcataaaat

SEQ ID NO: 1765328 - DNA, 15 bp, Homo sapiens
gtattgcataaaatg

SEQ ID NO: 1765329 - DNA, 15 bp, Homo sapiens
tattgcataaaatga

SEQ ID NO: 1765330 - DNA, 15 bp, Homo sapiens
attgcataaaatgac

SEQ ID NO: 1765331 - DNA, 15 bp, Homo sapiens
ttgcataaaatgaca

SEQ ID NO: 1765332 - DNA, 15 bp, Homo sapiens
tgcataaaatgacaa

SEQ ID NO: 1765333 - DNA, 15 bp, Homo sapiens
gcataaaatgacaat

SEQ ID NO: 1765334 - DNA, 15 bp, Homo sapiens
cataaaatgacaatt

SEQ ID NO: 1765335 - DNA, 15 bp, Homo sapiens
ataaaatgacaattt

SEQ ID NO: 1765336 - DNA, 15 bp, Homo sapiens
taaaatgacaatttc

SEQ ID NO: 1765337 - DNA, 15 bp, Homo sapiens
aaaatgacaatttca

SEQ ID NO: 1765338 - DNA, 15 bp, Homo sapiens
aaatgacaatttcat

SEQ ID NO: 1765339 - DNA, 15 bp, Homo sapiens
aatgacaatttcatt

SEQ ID NO: 1765340 - DNA, 15 bp, Homo sapiens
atgacaatttcattg

SEQ ID NO: 1765341 - DNA, 15 bp, Homo sapiens
tgacaatttcattgg

SEQ ID NO: 1765342 - DNA, 15 bp, Homo sapiens
gacaatttcattggt

SEQ ID NO: 1765343 - DNA, 15 bp, Homo sapiens
acaatttcattggtg

SEQ ID NO: 1765344 - DNA, 15 bp, Homo sapiens
caatttcattggtgt

SEQ ID NO: 1765345 - DNA, 15 bp, Homo sapiens
aatttcattggtgtc

SEQ ID NO: 1765346 - DNA, 15 bp, Homo sapiens
atttcattggtgtct

SEQ ID NO: 1765347 - DNA, 15 bp, Homo sapiens
tttcattggtgtctt

SEQ ID NO: 1765348 - DNA, 15 bp, Homo sapiens
ttcattggtgtctta

SEQ ID NO: 1765349 - DNA, 15 bp, Homo sapiens
tcattggtgtcttat

SEQ ID NO: 1765350 - DNA, 15 bp, Homo sapiens
cattggtgtcttatc

SEQ ID NO: 1765351 - DNA, 15 bp, Homo sapiens
attggtgtcttatct

SEQ ID NO: 1765352 - DNA, 15 bp, Homo sapiens
ttggtgtcttatctc

SEQ ID NO: 1765353 - DNA, 15 bp, Homo sapiens
tggtgtcttatctca

SEQ ID NO: 1765354 - DNA, 15 bp, Homo sapiens
ggtgtcttatctcaa

SEQ ID NO: 1765355 - DNA, 15 bp, Homo sapiens
gtgtcttatctcaag

SEQ ID NO: 1765356 - DNA, 15 bp, Homo sapiens
tgtcttatctcaagc

SEQ ID NO: 1765357 - DNA, 15 bp, Homo sapiens
gtcttatctcaagca

SEQ ID NO: 1765358 - DNA, 15 bp, Homo sapiens
tcttatctcaagcag

SEQ ID NO: 1765359 - DNA, 15 bp, Homo sapiens
cttatctcaagcagt

SEQ ID NO: 1765360 - DNA, 15 bp, Homo sapiens
ttatctcaagcagta

SEQ ID NO: 1765361 - DNA, 15 bp, Homo sapiens
tatctcaagcagtat

SEQ ID NO: 1765362 - DNA, 15 bp, Homo sapiens
atctcaagcagtatt

SEQ ID NO: 1765363 - DNA, 15 bp, Homo sapiens
tctcaagcagtatta

SEQ ID NO: 1765364 - DNA, 15 bp, Homo sapiens
ctcaagcagtattat

SEQ ID NO: 1765365 - DNA, 15 bp, Homo sapiens
tcaagcagtattatc

SEQ ID NO: 1765366 - DNA, 15 bp, Homo sapiens
caagcagtattatct

SEQ ID NO: 1765367 - DNA, 15 bp, Homo sapiens
aagcagtattatcta

SEQ ID NO: 1765368 - DNA, 15 bp, Homo sapiens
agcagtattatctat

SEQ ID NO: 1765369 - DNA, 15 bp, Homo sapiens
gcagtattatctatc

SEQ ID NO: 1765370 - DNA, 15 bp, Homo sapiens
cagtattatctatca

SEQ ID NO: 1765371 - DNA, 15 bp, Homo sapiens
agtattatctatcaa

SEQ ID NO: 1765372 - DNA, 15 bp, Homo sapiens
gtattatctatcaaa

SEQ ID NO: 1765373 - DNA, 15 bp, Homo sapiens
tattatctatcaaat

SEQ ID NO: 1765374 - DNA, 15 bp, Homo sapiens
attatctatcaaatc

SEQ ID NO: 1765375 - DNA, 15 bp, Homo sapiens
ttatctatcaaatct

SEQ ID NO: 1765376 - DNA, 15 bp, Homo sapiens
tatctatcaaatctt

SEQ ID NO: 1765377 - DNA, 15 bp, Homo sapiens
atctatcaaatcttc

SEQ ID NO: 1765378 - DNA, 15 bp, Homo sapiens
tctatcaaatcttca

SEQ ID NO: 1765379 - DNA, 15 bp, Homo sapiens
ctatcaaatcttcat

SEQ ID NO: 1765380 - DNA, 15 bp, Homo sapiens
tatcaaatcttcatt

SEQ ID NO: 1765381 - DNA, 15 bp, Homo sapiens
atcaaatcttcatta

SEQ ID NO: 1765382 - DNA, 15 bp, Homo sapiens
tcaaatcttcattag

SEQ ID NO: 1765383 - DNA, 15 bp, Homo sapiens
caaatcttcattagc

SEQ ID NO: 1765384 - DNA, 15 bp, Homo sapiens
aaatcttcattagcg

SEQ ID NO: 1765385 - DNA, 15 bp, Homo sapiens
aatcttcattagcga

SEQ ID NO: 1765386 - DNA, 15 bp, Homo sapiens
atcttcattagcgag

SEQ ID NO: 1765387 - DNA, 15 bp, Homo sapiens
tcttcattagcgagg

SEQ ID NO: 1765388 - DNA, 15 bp, Homo sapiens
cttcattagcgaggc

SEQ ID NO: 1765389 - DNA, 15 bp, Homo sapiens
ttcattagcgaggca

SEQ ID NO: 1765390 - DNA, 15 bp, Homo sapiens
tcattagcgaggcaa

SEQ ID NO: 1765391 - DNA, 15 bp, Homo sapiens
cattagcgaggcaaa

SEQ ID NO: 1765392 - DNA, 15 bp, Homo sapiens
attagcgaggcaaaa

SEQ ID NO: 1765393 - DNA, 15 bp, Homo sapiens
ttagcgaggcaaaag

SEQ ID NO: 1765394 - DNA, 15 bp, Homo sapiens
tagcgaggcaaaaga

SEQ ID NO: 1765395 - DNA, 15 bp, Homo sapiens
agcgaggcaaaagat

SEQ ID NO: 1765396 - DNA, 15 bp, Homo sapiens
gcgaggcaaaagatg

SEQ ID NO: 1765397 - DNA, 15 bp, Homo sapiens
cgaggcaaaagatga

SEQ ID NO: 1765398 - DNA, 15 bp, Homo sapiens
gaggcaaaagatgat

SEQ ID NO: 1765399 - DNA, 15 bp, Homo sapiens
aggcaaaagatgatg

SEQ ID NO: 1765400 - DNA, 15 bp, Homo sapiens
ggcaaaagatgatga

SEQ ID NO: 1765401 - DNA, 15 bp, Homo sapiens
gcaaaagatgatgac

SEQ ID NO: 1765402 - DNA, 15 bp, Homo sapiens
caaaagatgatgaca

SEQ ID NO: 1765403 - DNA, 15 bp, Homo sapiens
aaaagatgatgacat

SEQ ID NO: 1765404 - DNA, 15 bp, Homo sapiens
aaagatgatgacata

SEQ ID NO: 1765405 - DNA, 15 bp, Homo sapiens
aagatgatgacatat

SEQ ID NO: 1765406 - DNA, 15 bp, Homo sapiens
agatgatgacatata

SEQ ID NO: 1765407 - DNA, 15 bp, Homo sapiens
gatgatgacatatac

SEQ ID NO: 1765408 - DNA, 15 bp, Homo sapiens
atgatgacatatacg

SEQ ID NO: 1765409 - DNA, 15 bp, Homo sapiens
tgatgacatatacgt

SEQ ID NO: 1765410 - DNA, 15 bp, Homo sapiens
gatgacatatacgtt

SEQ ID NO: 1765411 - DNA, 15 bp, Homo sapiens
atgacatatacgttc

SEQ ID NO: 1765412 - DNA, 15 bp, Homo sapiens
tgacatatacgttca

SEQ ID NO: 1765413 - DNA, 15 bp, Homo sapiens
gacatatacgttcaa

SEQ ID NO: 1765414 - DNA, 15 bp, Homo sapiens
acatatacgttcaaa

SEQ ID NO: 1765415 - DNA, 15 bp, Homo sapiens
catatacgttcaaag

SEQ ID NO: 1765416 - DNA, 15 bp, Homo sapiens
atatacgttcaaagt

SEQ ID NO: 1765417 - DNA, 15 bp, Homo sapiens
tatacgttcaaagtc

SEQ ID NO: 1765418 - DNA, 15 bp, Homo sapiens
atacgttcaaagtct

SEQ ID NO: 1765419 - DNA, 15 bp, Homo sapiens
tacgttcaaagtctc

SEQ ID NO: 1765420 - DNA, 15 bp, Homo sapiens
acgttcaaagtctca

SEQ ID NO: 1765421 - DNA, 15 bp, Homo sapiens
cgttcaaagtctcac

SEQ ID NO: 1765422 - DNA, 15 bp, Homo sapiens
gttcaaagtctcact

SEQ ID NO: 1765423 - DNA, 15 bp, Homo sapiens
ttcaaagtctcacta

SEQ ID NO: 1765424 - DNA, 15 bp, Homo sapiens
tcaaagtctcactag

SEQ ID NO: 1765425 - DNA, 15 bp, Homo sapiens
caaagtctcactaga

SEQ ID NO: 1765426 - DNA, 15 bp, Homo sapiens
aaagtctcactagag

SEQ ID NO: 1765427 - DNA, 15 bp, Homo sapiens
aagtctcactagagt

SEQ ID NO: 1765428 - DNA, 15 bp, Homo sapiens
agtctcactagagta

SEQ ID NO: 1765429 - DNA, 15 bp, Homo sapiens
gtctcactagagtat

SEQ ID NO: 1765430 - DNA, 15 bp, Homo sapiens
tctcactagagtata

SEQ ID NO: 1765431 - DNA, 15 bp, Homo sapiens
ctcactagagtatag

SEQ ID NO: 1765432 - DNA, 15 bp, Homo sapiens
tcactagagtatagt

SEQ ID NO: 1765433 - DNA, 15 bp, Homo sapiens
cactagagtatagtc

SEQ ID NO: 1765434 - DNA, 15 bp, Homo sapiens
actagagtatagtct

SEQ ID NO: 1765435 - DNA, 15 bp, Homo sapiens
ctagagtatagtcta

SEQ ID NO: 1765436 - DNA, 15 bp, Homo sapiens
tagagtatagtctaa

SEQ ID NO: 1765437 - DNA, 15 bp, Homo sapiens
agagtatagtctaaa

SEQ ID NO: 1765438 - DNA, 15 bp, Homo sapiens
gagtatagtctaaag

SEQ ID NO: 1765439 - DNA, 15 bp, Homo sapiens
agtatagtctaaagc

SEQ ID NO: 1765440 - DNA, 15 bp, Homo sapiens
gtatagtctaaagca

SEQ ID NO: 1765441 - DNA, 15 bp, Homo sapiens
tatagtctaaagcaa

SEQ ID NO: 1765442 - DNA, 15 bp, Homo sapiens
atagtctaaagcaag

SEQ ID NO: 1765443 - DNA, 15 bp, Homo sapiens
tagtctaaagcaagc

SEQ ID NO: 1765444 - DNA, 15 bp, Homo sapiens
agtctaaagcaagcc

SEQ ID NO: 1765445 - DNA, 15 bp, Homo sapiens
gtctaaagcaagcct

SEQ ID NO: 1765446 - DNA, 15 bp, Homo sapiens
tctaaagcaagcctg

SEQ ID NO: 1765447 - DNA, 15 bp, Homo sapiens
ctaaagcaagcctgc

SEQ ID NO: 1765448 - DNA, 15 bp, Homo sapiens
taaagcaagcctgca

SEQ ID NO: 1765449 - DNA, 15 bp, Homo sapiens
aaagcaagcctgcac

SEQ ID NO: 1765450 - DNA, 15 bp, Homo sapiens
aagcaagcctgcaca

SEQ ID NO: 1765451 - DNA, 15 bp, Homo sapiens
agcaagcctgcacag

SEQ ID NO: 1765452 - DNA, 15 bp, Homo sapiens
gcaagcctgcacaga

SEQ ID NO: 1765453 - DNA, 15 bp, Homo sapiens
caagcctgcacagag

SEQ ID NO: 1765454 - DNA, 15 bp, Homo sapiens
aagcctgcacagagc

SEQ ID NO: 1765455 - DNA, 15 bp, Homo sapiens
agcctgcacagagcc

SEQ ID NO: 1765456 - DNA, 15 bp, Homo sapiens
gcctgcacagagcca

SEQ ID NO: 1765457 - DNA, 15 bp, Homo sapiens
cctgcacagagccat

SEQ ID NO: 1765458 - DNA, 15 bp, Homo sapiens
ctgcacagagccatc

SEQ ID NO: 1765459 - DNA, 15 bp, Homo sapiens
tgcacagagccatcc

SEQ ID NO: 1765460 - DNA, 15 bp, Homo sapiens
gcacagagccatcca

SEQ ID NO: 1765461 - DNA, 15 bp, Homo sapiens
cacagagccatccaa

SEQ ID NO: 1765462 - DNA, 15 bp, Homo sapiens
acagagccatccaac

SEQ ID NO: 1765463 - DNA, 15 bp, Homo sapiens
cagagccatccaact

SEQ ID NO: 1765464 - DNA, 15 bp, Homo sapiens
agagccatccaactc

SEQ ID NO: 1765465 - DNA, 15 bp, Homo sapiens
gagccatccaactcc

SEQ ID NO: 1765466 - DNA, 15 bp, Homo sapiens
agccatccaactcca

SEQ ID NO: 1765467 - DNA, 15 bp, Homo sapiens
gccatccaactccag

SEQ ID NO: 1765468 - DNA, 15 bp, Homo sapiens
ccatccaactccagg

SEQ ID NO: 1765469 - DNA, 15 bp, Homo sapiens
catccaactccaggg

SEQ ID NO: 1765470 - DNA, 15 bp, Homo sapiens
atccaactccagggg

SEQ ID NO: 1765471 - DNA, 15 bp, Homo sapiens
tccaactccagggga

SEQ ID NO: 1765472 - DNA, 15 bp, Homo sapiens
ccaactccaggggaa

SEQ ID NO: 1765473 - DNA, 15 bp, Homo sapiens
caactccaggggaac

SEQ ID NO: 1765474 - DNA, 15 bp, Homo sapiens
aactccaggggaact

SEQ ID NO: 1765475 - DNA, 15 bp, Homo sapiens
actccaggggaactc

SEQ ID NO: 1765476 - DNA, 15 bp, Homo sapiens
ctccaggggaactcc

SEQ ID NO: 1765477 - DNA, 15 bp, Homo sapiens
tccaggggaactcca

SEQ ID NO: 1765478 - DNA, 15 bp, Homo sapiens
ccaggggaactccaa

SEQ ID NO: 1765479 - DNA, 15 bp, Homo sapiens
caggggaactccaac

SEQ ID NO: 1765480 - DNA, 15 bp, Homo sapiens
aggggaactccaact

SEQ ID NO: 1765481 - DNA, 15 bp, Homo sapiens
ggggaactccaactt

SEQ ID NO: 1765482 - DNA, 15 bp, Homo sapiens
gggaactccaactta

SEQ ID NO: 1765483 - DNA, 15 bp, Homo sapiens
ggaactccaacttat

SEQ ID NO: 1765484 - DNA, 15 bp, Homo sapiens
gaactccaacttatt

SEQ ID NO: 1765485 - DNA, 15 bp, Homo sapiens
aactccaacttattt

SEQ ID NO: 1765486 - DNA, 15 bp, Homo sapiens
actccaacttatttg

SEQ ID NO: 1765487 - DNA, 15 bp, Homo sapiens
ctccaacttatttga

SEQ ID NO: 1765488 - DNA, 15 bp, Homo sapiens
tccaacttatttgaa

SEQ ID NO: 1765489 - DNA, 15 bp, Homo sapiens
ccaacttatttgaat

SEQ ID NO: 1765490 - DNA, 15 bp, Homo sapiens
caacttatttgaatt

SEQ ID NO: 1765491 - DNA, 15 bp, Homo sapiens
aacttatttgaattg

SEQ ID NO: 1765492 - DNA, 15 bp, Homo sapiens
acttatttgaattgt

SEQ ID NO: 1765493 - DNA, 15 bp, Homo sapiens
cttatttgaattgtt

SEQ ID NO: 1765494 - DNA, 15 bp, Homo sapiens
ttatttgaattgtta

SEQ ID NO: 1765495 - DNA, 15 bp, Homo sapiens
tatttgaattgttat

SEQ ID NO: 1765496 - DNA, 15 bp, Homo sapiens
atttgaattgttatt

SEQ ID NO: 1765497 - DNA, 15 bp, Homo sapiens
tttgaattgttattt

SEQ ID NO: 1765498 - DNA, 15 bp, Homo sapiens
ttgaattgttatttg

SEQ ID NO: 1765499 - DNA, 15 bp, Homo sapiens
tgaattgttatttgc

SEQ ID NO: 1765500 - DNA, 15 bp, Homo sapiens
gaattgttatttgct

SEQ ID NO: 1765501 - DNA, 15 bp, Homo sapiens
aattgttatttgctg

SEQ ID NO: 1765502 - DNA, 15 bp, Homo sapiens
attgttatttgctgt

SEQ ID NO: 1765503 - DNA, 15 bp, Homo sapiens
ttgttatttgctgtt

SEQ ID NO: 1765504 - DNA, 15 bp, Homo sapiens
tgttatttgctgttg

SEQ ID NO: 1765505 - DNA, 15 bp, Homo sapiens
gttatttgctgttga

SEQ ID NO: 1765506 - DNA, 15 bp, Homo sapiens
ttatttgctgttgag

SEQ ID NO: 1765507 - DNA, 15 bp, Homo sapiens
tatttgctgttgagg

SEQ ID NO: 1765508 - DNA, 15 bp, Homo sapiens
atttgctgttgagga

SEQ ID NO: 1765509 - DNA, 15 bp, Homo sapiens
tttgctgttgaggag

SEQ ID NO: 1765510 - DNA, 15 bp, Homo sapiens
ttgctgttgaggagg

SEQ ID NO: 1765511 - DNA, 15 bp, Homo sapiens
tgctgttgaggaggg

SEQ ID NO: 1765512 - DNA, 15 bp, Homo sapiens
gctgttgaggagggc

SEQ ID NO: 1765513 - DNA, 15 bp, Homo sapiens
ctgttgaggagggcg

SEQ ID NO: 1765514 - DNA, 15 bp, Homo sapiens
tgttgaggagggcgt

SEQ ID NO: 1765515 - DNA, 15 bp, Homo sapiens
gttgaggagggcgta

SEQ ID NO: 1765516 - DNA, 15 bp, Homo sapiens
ttgaggagggcgtag

SEQ ID NO: 1765517 - DNA, 15 bp, Homo sapiens
tgaggagggcgtaga

SEQ ID NO: 1765518 - DNA, 15 bp, Homo sapiens
gaggagggcgtagac

SEQ ID NO: 1765519 - DNA, 15 bp, Homo sapiens
aggagggcgtagact

SEQ ID NO: 1765520 - DNA, 15 bp, Homo sapiens
ggagggcgtagactc

SEQ ID NO: 1765521 - DNA, 15 bp, Homo sapiens
gagggcgtagactct

SEQ ID NO: 1765522 - DNA, 15 bp, Homo sapiens
agggcgtagactctg

SEQ ID NO: 1765523 - DNA, 15 bp, Homo sapiens
gggcgtagactctgg

SEQ ID NO: 1765524 - DNA, 15 bp, Homo sapiens
ggcgtagactctggg

SEQ ID NO: 1765525 - DNA, 15 bp, Homo sapiens
gcgtagactctgggt

SEQ ID NO: 1765526 - DNA, 15 bp, Homo sapiens
cgtagactctgggtt

SEQ ID NO: 1765527 - DNA, 15 bp, Homo sapiens
gtagactctgggtta

SEQ ID NO: 1765528 - DNA, 15 bp, Homo sapiens
tagactctgggttag

SEQ ID NO: 1765529 - DNA, 15 bp, Homo sapiens
agactctgggttaga

SEQ ID NO: 1765530 - DNA, 15 bp, Homo sapiens
gactctgggttagat

SEQ ID NO: 1765531 - DNA, 15 bp, Homo sapiens
actctgggttagatg

SEQ ID NO: 1765532 - DNA, 15 bp, Homo sapiens
ctctgggttagatgc

SEQ ID NO: 1765533 - DNA, 15 bp, Homo sapiens
tctgggttagatgct

SEQ ID NO: 1765534 - DNA, 15 bp, Homo sapiens
ctgggttagatgctt

SEQ ID NO: 1765535 - DNA, 15 bp, Homo sapiens
tgggttagatgcttc

SEQ ID NO: 1765536 - DNA, 15 bp, Homo sapiens
gggttagatgcttct

SEQ ID NO: 1765537 - DNA, 15 bp, Homo sapiens
ggttagatgcttctt

SEQ ID NO: 1765538 - DNA, 15 bp, Homo sapiens
gttagatgcttcttt

SEQ ID NO: 1765539 - DNA, 15 bp, Homo sapiens
ttagatgcttctttg

SEQ ID NO: 1765540 - DNA, 15 bp, Homo sapiens
tagatgcttctttgc

SEQ ID NO: 1765541 - DNA, 15 bp, Homo sapiens
agatgcttctttgca

SEQ ID NO: 1765542 - DNA, 15 bp, Homo sapiens
gatgcttctttgcag

SEQ ID NO: 1765543 - DNA, 15 bp, Homo sapiens
atgcttctttgcaga

SEQ ID NO: 1765544 - DNA, 15 bp, Homo sapiens
tgcttctttgcagat

SEQ ID NO: 1765545 - DNA, 15 bp, Homo sapiens
gcttctttgcagatt

SEQ ID NO: 1765546 - DNA, 15 bp, Homo sapiens
cttctttgcagatta

SEQ ID NO: 1765547 - DNA, 15 bp, Homo sapiens
ttctttgcagattat

SEQ ID NO: 1765548 - DNA, 15 bp, Homo sapiens
tctttgcagattatt

SEQ ID NO: 1765549 - DNA, 15 bp, Homo sapiens
ctttgcagattattt

SEQ ID NO: 1765550 - DNA, 15 bp, Homo sapiens
tttgcagattattta

SEQ ID NO: 1765551 - DNA, 15 bp, Homo sapiens
ttgcagattatttag

SEQ ID NO: 1765552 - DNA, 15 bp, Homo sapiens
tgcagattatttagt

SEQ ID NO: 1765553 - DNA, 15 bp, Homo sapiens
gcagattatttagtt

SEQ ID NO: 1765554 - DNA, 15 bp, Homo sapiens
cagattatttagttg

SEQ ID NO: 1765555 - DNA, 15 bp, Homo sapiens
agattatttagttgc

SEQ ID NO: 1765556 - DNA, 15 bp, Homo sapiens
gattatttagttgca

SEQ ID NO: 1765557 - DNA, 15 bp, Homo sapiens
attatttagttgcaa

SEQ ID NO: 1765558 - DNA, 15 bp, Homo sapiens
ttatttagttgcaaa

SEQ ID NO: 1765559 - DNA, 15 bp, Homo sapiens
tatttagttgcaaat

SEQ ID NO: 1765560 - DNA, 15 bp, Homo sapiens
atttagttgcaaatg

SEQ ID NO: 1765561 - DNA, 15 bp, Homo sapiens
tttagttgcaaatgt

SEQ ID NO: 1765562 - DNA, 15 bp, Homo sapiens
ttagttgcaaatgtc

SEQ ID NO: 1765563 - DNA, 15 bp, Homo sapiens
tagttgcaaatgtca

SEQ ID NO: 1765564 - DNA, 15 bp, Homo sapiens
agttgcaaatgtcat

SEQ ID NO: 1765565 - DNA, 15 bp, Homo sapiens
gttgcaaatgtcata

SEQ ID NO: 1765566 - DNA, 15 bp, Homo sapiens
ttgcaaatgtcatag

SEQ ID NO: 1765567 - DNA, 15 bp, Homo sapiens
tgcaaatgtcatagt

SEQ ID NO: 1765568 - DNA, 15 bp, Homo sapiens
gcaaatgtcatagtt

SEQ ID NO: 1765569 - DNA, 15 bp, Homo sapiens
caaatgtcatagttt

SEQ ID NO: 1765570 - DNA, 15 bp, Homo sapiens
aaatgtcatagtttt

SEQ ID NO: 1765571 - DNA, 15 bp, Homo sapiens
aatgtcatagtttta

SEQ ID NO: 1765572 - DNA, 15 bp, Homo sapiens
atgtcatagttttat

SEQ ID NO: 1765573 - DNA, 15 bp, Homo sapiens
tgtcatagttttatc

SEQ ID NO: 1765574 - DNA, 15 bp, Homo sapiens
gtcatagttttatcg

SEQ ID NO: 1765575 - DNA, 15 bp, Homo sapiens
tcatagttttatcgc

SEQ ID NO: 1765576 - DNA, 15 bp, Homo sapiens
catagttttatcgcc

SEQ ID NO: 1765577 - DNA, 15 bp, Homo sapiens
atagttttatcgccc

SEQ ID NO: 1765578 - DNA, 15 bp, Homo sapiens
tagttttatcgccct

SEQ ID NO: 1765579 - DNA, 15 bp, Homo sapiens
agttttatcgccctt

SEQ ID NO: 1765580 - DNA, 15 bp, Homo sapiens
gttttatcgcccttt

SEQ ID NO: 1765581 - DNA, 15 bp, Homo sapiens
ttttatcgcccttta

SEQ ID NO: 1765582 - DNA, 15 bp, Homo sapiens
tttatcgccctttag

SEQ ID NO: 1765583 - DNA, 15 bp, Homo sapiens
ttatcgccctttagg

SEQ ID NO: 1765584 - DNA, 15 bp, Homo sapiens
tatcgccctttaggg

SEQ ID NO: 1765585 - DNA, 15 bp, Homo sapiens
atcgccctttagggc

SEQ ID NO: 1765586 - DNA, 15 bp, Homo sapiens
tcgccctttagggca

SEQ ID NO: 1765587 - DNA, 15 bp, Homo sapiens
cgccctttagggcat

SEQ ID NO: 1765588 - DNA, 15 bp, Homo sapiens
gccctttagggcatt

SEQ ID NO: 1765589 - DNA, 15 bp, Homo sapiens
ccctttagggcatta

SEQ ID NO: 1765590 - DNA, 15 bp, Homo sapiens
cctttagggcattaa

SEQ ID NO: 1765591 - DNA, 15 bp, Homo sapiens
ctttagggcattaac

SEQ ID NO: 1765592 - DNA, 15 bp, Homo sapiens
tttagggcattaacc

SEQ ID NO: 1765593 - DNA, 15 bp, Homo sapiens
ttagggcattaacct

SEQ ID NO: 1765594 - DNA, 15 bp, Homo sapiens
tagggcattaacctt

SEQ ID NO: 1765595 - DNA, 15 bp, Homo sapiens
agggcattaacctta

SEQ ID NO: 1765596 - DNA, 15 bp, Homo sapiens
gggcattaaccttat

SEQ ID NO: 1765597 - DNA, 15 bp, Homo sapiens
ggcattaaccttatg

SEQ ID NO: 1765598 - DNA, 15 bp, Homo sapiens
gcattaaccttatga

SEQ ID NO: 1765599 - DNA, 15 bp, Homo sapiens
cattaaccttatgat

SEQ ID NO: 1765600 - DNA, 15 bp, Homo sapiens
attaaccttatgatc

SEQ ID NO: 1765601 - DNA, 15 bp, Homo sapiens
ttaaccttatgatcc

SEQ ID NO: 1765602 - DNA, 15 bp, Homo sapiens
taaccttatgatcca

SEQ ID NO: 1765603 - DNA, 15 bp, Homo sapiens
aaccttatgatccat

SEQ ID NO: 1765604 - DNA, 15 bp, Homo sapiens
accttatgatccatc

SEQ ID NO: 1765605 - DNA, 15 bp, Homo sapiens
ccttatgatccatcc

SEQ ID NO: 1765606 - DNA, 15 bp, Homo sapiens
cttatgatccatccg

SEQ ID NO: 1765607 - DNA, 15 bp, Homo sapiens
ttatgatccatccgc

SEQ ID NO: 1765608 - DNA, 15 bp, Homo sapiens
tatgatccatccgcc

SEQ ID NO: 1765609 - DNA, 15 bp, Homo sapiens
atgatccatccgcct

SEQ ID NO: 1765610 - DNA, 15 bp, Homo sapiens
tgatccatccgcctt

SEQ ID NO: 1765611 - DNA, 15 bp, Homo sapiens
gatccatccgccttg

SEQ ID NO: 1765612 - DNA, 15 bp, Homo sapiens
atccatccgccttgg

SEQ ID NO: 1765613 - DNA, 15 bp, Homo sapiens
tccatccgccttggc

SEQ ID NO: 1765614 - DNA, 15 bp, Homo sapiens
ccatccgccttggcc

SEQ ID NO: 1765615 - DNA, 15 bp, Homo sapiens
catccgccttggcct

SEQ ID NO: 1765616 - DNA, 15 bp, Homo sapiens
atccgccttggcctc

SEQ ID NO: 1765617 - DNA, 15 bp, Homo sapiens
tccgccttggcctcc

SEQ ID NO: 1765618 - DNA, 15 bp, Homo sapiens
gcatgagccaccacg

SEQ ID NO: 1765619 - DNA, 15 bp, Homo sapiens
catgagccaccacgc

SEQ ID NO: 1765620 - DNA, 15 bp, Homo sapiens
atgagccaccacgcc

SEQ ID NO: 1765621 - DNA, 15 bp, Homo sapiens
accacgcccagcctc

SEQ ID NO: 1765622 - DNA, 15 bp, Homo sapiens
ccacgcccagcctct

SEQ ID NO: 1765623 - DNA, 15 bp, Homo sapiens
cacgcccagcctctc

SEQ ID NO: 1765624 - DNA, 15 bp, Homo sapiens
acgcccagcctctca

SEQ ID NO: 1765625 - DNA, 15 bp, Homo sapiens
cgcccagcctctcat

SEQ ID NO: 1765626 - DNA, 15 bp, Homo sapiens
gcccagcctctcata

SEQ ID NO: 1765627 - DNA, 15 bp, Homo sapiens
cccagcctctcatat

SEQ ID NO: 1765628 - DNA, 15 bp, Homo sapiens
ccagcctctcatatc

SEQ ID NO: 1765629 - DNA, 15 bp, Homo sapiens
cagcctctcatatcc

SEQ ID NO: 1765630 - DNA, 15 bp, Homo sapiens
agcctctcatatcct

SEQ ID NO: 1765631 - DNA, 15 bp, Homo sapiens
gcctctcatatcctc

SEQ ID NO: 1765632 - DNA, 15 bp, Homo sapiens
cctctcatatcctct

SEQ ID NO: 1765633 - DNA, 15 bp, Homo sapiens
ctctcatatcctctt

SEQ ID NO: 1765634 - DNA, 15 bp, Homo sapiens
tctcatatcctcttt

SEQ ID NO: 1765635 - DNA, 15 bp, Homo sapiens
ctcatatcctctttt

SEQ ID NO: 1765636 - DNA, 15 bp, Homo sapiens
tcatatcctcttttg

SEQ ID NO: 1765637 - DNA, 15 bp, Homo sapiens
catatcctcttttga

SEQ ID NO: 1765638 - DNA, 15 bp, Homo sapiens
atatcctcttttgaa

SEQ ID NO: 1765639 - DNA, 15 bp, Homo sapiens
tatcctcttttgaat

SEQ ID NO: 1765640 - DNA, 15 bp, Homo sapiens
atcctcttttgaatg

SEQ ID NO: 1765641 - DNA, 15 bp, Homo sapiens
tcctcttttgaatga

SEQ ID NO: 1765642 - DNA, 15 bp, Homo sapiens
cctcttttgaatgag

SEQ ID NO: 1765643 - DNA, 15 bp, Homo sapiens
ctcttttgaatgagc

SEQ ID NO: 1765644 - DNA, 15 bp, Homo sapiens
tcttttgaatgagct

SEQ ID NO: 1765645 - DNA, 15 bp, Homo sapiens
cttttgaatgagctt

SEQ ID NO: 1765646 - DNA, 15 bp, Homo sapiens
ttttgaatgagcttt

SEQ ID NO: 1765647 - DNA, 15 bp, Homo sapiens
tttgaatgagctttg

SEQ ID NO: 1765648 - DNA, 15 bp, Homo sapiens
ttgaatgagctttgt

SEQ ID NO: 1765649 - DNA, 15 bp, Homo sapiens
tgaatgagctttgtc

SEQ ID NO: 1765650 - DNA, 15 bp, Homo sapiens
gaatgagctttgtca

SEQ ID NO: 1765651 - DNA, 15 bp, Homo sapiens
aatgagctttgtcat

SEQ ID NO: 1765652 - DNA, 15 bp, Homo sapiens
atgagctttgtcatc

SEQ ID NO: 1765653 - DNA, 15 bp, Homo sapiens
tgagctttgtcatct

SEQ ID NO: 1765654 - DNA, 15 bp, Homo sapiens
gagctttgtcatctt

SEQ ID NO: 1765655 - DNA, 15 bp, Homo sapiens
agctttgtcatcttg

SEQ ID NO: 1765656 - DNA, 15 bp, Homo sapiens
gctttgtcatcttgc

SEQ ID NO: 1765657 - DNA, 15 bp, Homo sapiens
ctttgtcatcttgct

SEQ ID NO: 1765658 - DNA, 15 bp, Homo sapiens
tttgtcatcttgctg

SEQ ID NO: 1765659 - DNA, 15 bp, Homo sapiens
ttgtcatcttgctgg

SEQ ID NO: 1765660 - DNA, 15 bp, Homo sapiens
tgtcatcttgctggt

SEQ ID NO: 1765661 - DNA, 15 bp, Homo sapiens
gtcatcttgctggtt

SEQ ID NO: 1765662 - DNA, 15 bp, Homo sapiens
tcatcttgctggttc

SEQ ID NO: 1765663 - DNA, 15 bp, Homo sapiens
catcttgctggttcc

SEQ ID NO: 1765664 - DNA, 15 bp, Homo sapiens
atcttgctggttccc

SEQ ID NO: 1765665 - DNA, 15 bp, Homo sapiens
tcttgctggttccct

SEQ ID NO: 1765666 - DNA, 15 bp, Homo sapiens
cttgctggttccctc

SEQ ID NO: 1765667 - DNA, 15 bp, Homo sapiens
ttgctggttccctca

SEQ ID NO: 1765668 - DNA, 15 bp, Homo sapiens
tgctggttccctcat

SEQ ID NO: 1765669 - DNA, 15 bp, Homo sapiens
gctggttccctcatt

SEQ ID NO: 1765670 - DNA, 15 bp, Homo sapiens
ctggttccctcatta

SEQ ID NO: 1765671 - DNA, 15 bp, Homo sapiens
tggttccctcattaa

SEQ ID NO: 1765672 - DNA, 15 bp, Homo sapiens
ggttccctcattaat

SEQ ID NO: 1765673 - DNA, 15 bp, Homo sapiens
gttccctcattaatg

SEQ ID NO: 1765674 - DNA, 15 bp, Homo sapiens
ttccctcattaatga

SEQ ID NO: 1765675 - DNA, 15 bp, Homo sapiens
tccctcattaatgag

SEQ ID NO: 1765676 - DNA, 15 bp, Homo sapiens
ccctcattaatgagt

SEQ ID NO: 1765677 - DNA, 15 bp, Homo sapiens
cctcattaatgagtt

SEQ ID NO: 1765678 - DNA, 15 bp, Homo sapiens
ctcattaatgagtta

SEQ ID NO: 1765679 - DNA, 15 bp, Homo sapiens
tcattaatgagttaa

SEQ ID NO: 1765680 - DNA, 15 bp, Homo sapiens
cattaatgagttaac

SEQ ID NO: 1765681 - DNA, 15 bp, Homo sapiens
attaatgagttaaca

SEQ ID NO: 1765682 - DNA, 15 bp, Homo sapiens
ttaatgagttaacaa

SEQ ID NO: 1765683 - DNA, 15 bp, Homo sapiens
taatgagttaacaaa

SEQ ID NO: 1765684 - DNA, 15 bp, Homo sapiens
aatgagttaacaaat

SEQ ID NO: 1765685 - DNA, 15 bp, Homo sapiens
atgagttaacaaata

SEQ ID NO: 1765686 - DNA, 15 bp, Homo sapiens
tgagttaacaaatac

SEQ ID NO: 1765687 - DNA, 15 bp, Homo sapiens
gagttaacaaatact

SEQ ID NO: 1765688 - DNA, 15 bp, Homo sapiens
agttaacaaatactt

SEQ ID NO: 1765689 - DNA, 15 bp, Homo sapiens
gttaacaaatacttg

SEQ ID NO: 1765690 - DNA, 15 bp, Homo sapiens
ttaacaaatacttga

SEQ ID NO: 1765691 - DNA, 15 bp, Homo sapiens
taacaaatacttgac

SEQ ID NO: 1765692 - DNA, 15 bp, Homo sapiens
aacaaatacttgaca

SEQ ID NO: 1765693 - DNA, 15 bp, Homo sapiens
acaaatacttgacac

SEQ ID NO: 1765694 - DNA, 15 bp, Homo sapiens
caaatacttgacaca

SEQ ID NO: 1765695 - DNA, 15 bp, Homo sapiens
aaatacttgacacat

SEQ ID NO: 1765696 - DNA, 15 bp, Homo sapiens
aatacttgacacatt

SEQ ID NO: 1765697 - DNA, 15 bp, Homo sapiens
atacttgacacattt

SEQ ID NO: 1765698 - DNA, 15 bp, Homo sapiens
tacttgacacatttt

SEQ ID NO: 1765699 - DNA, 15 bp, Homo sapiens
acttgacacattttt

SEQ ID NO: 1765700 - DNA, 15 bp, Homo sapiens
cttgacacatttttt

SEQ ID NO: 1765701 - DNA, 15 bp, Homo sapiens
ttgacacattttttt

SEQ ID NO: 1765702 - DNA, 15 bp, Homo sapiens
tgacacattttttta

SEQ ID NO: 1765703 - DNA, 15 bp, Homo sapiens
gacacatttttttaa

SEQ ID NO: 1765704 - DNA, 15 bp, Homo sapiens
acacatttttttaaa

SEQ ID NO: 1765705 - DNA, 15 bp, Homo sapiens
cacatttttttaaaa

SEQ ID NO: 1765706 - DNA, 15 bp, Homo sapiens
acatttttttaaaaa

SEQ ID NO: 1765707 - DNA, 15 bp, Homo sapiens
atttttttaaaaaac

SEQ ID NO: 1765708 - DNA, 15 bp, Homo sapiens
tttttttaaaaaact

SEQ ID NO: 1765709 - DNA, 15 bp, Homo sapiens
ttttttaaaaaacta

SEQ ID NO: 1765710 - DNA, 15 bp, Homo sapiens
tttttaaaaaactaa

SEQ ID NO: 1765711 - DNA, 15 bp, Homo sapiens
ttttaaaaaactaaa

SEQ ID NO: 1765712 - DNA, 15 bp, Homo sapiens
tttaaaaaactaaat

SEQ ID NO: 1765713 - DNA, 15 bp, Homo sapiens
ttaaaaaactaaatt

SEQ ID NO: 1765714 - DNA, 15 bp, Homo sapiens
taaaaaactaaattc

SEQ ID NO: 1765715 - DNA, 15 bp, Homo sapiens
aaaaaactaaattca

SEQ ID NO: 1765716 - DNA, 15 bp, Homo sapiens
aaaaactaaattcat

SEQ ID NO: 1765717 - DNA, 15 bp, Homo sapiens
aaaactaaattcatt

SEQ ID NO: 1765718 - DNA, 15 bp, Homo sapiens
aaactaaattcatta

SEQ ID NO: 1765719 - DNA, 15 bp, Homo sapiens
aactaaattcattat

SEQ ID NO: 1765720 - DNA, 15 bp, Homo sapiens
actaaattcattatt

SEQ ID NO: 1765721 - DNA, 15 bp, Homo sapiens
ctaaattcattatta

SEQ ID NO: 1765722 - DNA, 15 bp, Homo sapiens
taaattcattattat

SEQ ID NO: 1765723 - DNA, 15 bp, Homo sapiens
aaattcattattata

SEQ ID NO: 1765724 - DNA, 15 bp, Homo sapiens
aattcattattataa

SEQ ID NO: 1765725 - DNA, 15 bp, Homo sapiens
attcattattataaa

SEQ ID NO: 1765726 - DNA, 15 bp, Homo sapiens
ttcattattataaaa

SEQ ID NO: 1765727 - DNA, 15 bp, Homo sapiens
tcattattataaaaa

SEQ ID NO: 1765728 - DNA, 15 bp, Homo sapiens
cattattataaaaaa

SEQ ID NO: 1765729 - DNA, 15 bp, Homo sapiens
attattataaaaaaa

SEQ ID NO: 1765730 - DNA, 15 bp, Homo sapiens
ttattataaaaaaaa

SEQ ID NO: 1765731 - DNA, 15 bp, Homo sapiens
tattataaaaaaaaa

SEQ ID NO: 1765732 - DNA, 15 bp, Homo sapiens
attataaaaaaaaaa

SEQ ID NO: 1765733 - DNA, 15 bp, Homo sapiens
ttataaaaaaaaaag

SEQ ID NO: 1765734 - DNA, 15 bp, Homo sapiens
tataaaaaaaaaagt

SEQ ID NO: 1765735 - DNA, 15 bp, Homo sapiens
ataaaaaaaaaagta

SEQ ID NO: 1765736 - DNA, 15 bp, Homo sapiens
taaaaaaaaaagtat

SEQ ID NO: 1765737 - DNA, 15 bp, Homo sapiens
aaaaaaaaaagtatc

SEQ ID NO: 1765738 - DNA, 15 bp, Homo sapiens
aaaaaaaaagtatcc

SEQ ID NO: 1765739 - DNA, 15 bp, Homo sapiens
aaaaaaaagtatccc

SEQ ID NO: 1765740 - DNA, 15 bp, Homo sapiens
aaaaaaagtatccca

SEQ ID NO: 1765741 - DNA, 15 bp, Homo sapiens
aaaaaagtatcccaa

SEQ ID NO: 1765742 - DNA, 15 bp, Homo sapiens
aaaaagtatcccaaa

SEQ ID NO: 1765743 - DNA, 15 bp, Homo sapiens
aaaagtatcccaaaa

SEQ ID NO: 1765744 - DNA, 15 bp, Homo sapiens
aaagtatcccaaaat

SEQ ID NO: 1765745 - DNA, 15 bp, Homo sapiens
aagtatcccaaaatt

SEQ ID NO: 1765746 - DNA, 15 bp, Homo sapiens
agtatcccaaaattt

SEQ ID NO: 1765747 - DNA, 15 bp, Homo sapiens
gtatcccaaaattta

SEQ ID NO: 1765748 - DNA, 15 bp, Homo sapiens
tatcccaaaatttag

SEQ ID NO: 1765749 - DNA, 15 bp, Homo sapiens
atcccaaaatttagt

SEQ ID NO: 1765750 - DNA, 15 bp, Homo sapiens
tcccaaaatttagtg

SEQ ID NO: 1765751 - DNA, 15 bp, Homo sapiens
cccaaaatttagtgg

SEQ ID NO: 1765752 - DNA, 15 bp, Homo sapiens
ccaaaatttagtggc

SEQ ID NO: 1765753 - DNA, 15 bp, Homo sapiens
caaaatttagtggct

SEQ ID NO: 1765754 - DNA, 15 bp, Homo sapiens
aaaatttagtggctt

SEQ ID NO: 1765755 - DNA, 15 bp, Homo sapiens
aaatttagtggctta

SEQ ID NO: 1765756 - DNA, 15 bp, Homo sapiens
aatttagtggcttaa

SEQ ID NO: 1765757 - DNA, 15 bp, Homo sapiens
atttagtggcttaaa

SEQ ID NO: 1765758 - DNA, 15 bp, Homo sapiens
tttagtggcttaaaa

SEQ ID NO: 1765759 - DNA, 15 bp, Homo sapiens
ttagtggcttaaaac

SEQ ID NO: 1765760 - DNA, 15 bp, Homo sapiens
gtggcttaaaacaac

SEQ ID NO: 1765761 - DNA, 15 bp, Homo sapiens
tggcttaaaacaaca

SEQ ID NO: 1765762 - DNA, 15 bp, Homo sapiens
ggcttaaaacaacac

SEQ ID NO: 1765763 - DNA, 15 bp, Homo sapiens
gcttaaaacaacacc

SEQ ID NO: 1765764 - DNA, 15 bp, Homo sapiens
cttaaaacaacacca

SEQ ID NO: 1765765 - DNA, 15 bp, Homo sapiens
ttaaaacaacaccat

SEQ ID NO: 1765766 - DNA, 15 bp, Homo sapiens
taaaacaacaccatt

SEQ ID NO: 1765767 - DNA, 15 bp, Homo sapiens
aaaacaacaccattc

SEQ ID NO: 1765768 - DNA, 15 bp, Homo sapiens
aaacaacaccattca

SEQ ID NO: 1765769 - DNA, 15 bp, Homo sapiens
aacaacaccattcat

SEQ ID NO: 1765770 - DNA, 15 bp, Homo sapiens
acaacaccattcatg

SEQ ID NO: 1765771 - DNA, 15 bp, Homo sapiens
caacaccattcatga

SEQ ID NO: 1765772 - DNA, 15 bp, Homo sapiens
aacaccattcatgat

SEQ ID NO: 1765773 - DNA, 15 bp, Homo sapiens
acaccattcatgatc

SEQ ID NO: 1765774 - DNA, 15 bp, Homo sapiens
caccattcatgatct

SEQ ID NO: 1765775 - DNA, 15 bp, Homo sapiens
accattcatgatctc

SEQ ID NO: 1765776 - DNA, 15 bp, Homo sapiens
ccattcatgatctct

SEQ ID NO: 1765777 - DNA, 15 bp, Homo sapiens
cattcatgatctctc

SEQ ID NO: 1765778 - DNA, 15 bp, Homo sapiens
attcatgatctctca

SEQ ID NO: 1765779 - DNA, 15 bp, Homo sapiens
ttcatgatctctcag

SEQ ID NO: 1765780 - DNA, 15 bp, Homo sapiens
tcatgatctctcaga

SEQ ID NO: 1765781 - DNA, 15 bp, Homo sapiens
catgatctctcagaa

SEQ ID NO: 1765782 - DNA, 15 bp, Homo sapiens
atgatctctcagaat

SEQ ID NO: 1765783 - DNA, 15 bp, Homo sapiens
tgatctctcagaatg

SEQ ID NO: 1765784 - DNA, 15 bp, Homo sapiens
gatctctcagaatgt

SEQ ID NO: 1765785 - DNA, 15 bp, Homo sapiens
atctctcagaatgtc

SEQ ID NO: 1765786 - DNA, 15 bp, Homo sapiens
tctctcagaatgtct

SEQ ID NO: 1765787 - DNA, 15 bp, Homo sapiens
ctctcagaatgtcta

SEQ ID NO: 1765788 - DNA, 15 bp, Homo sapiens
tctcagaatgtctat

SEQ ID NO: 1765789 - DNA, 15 bp, Homo sapiens
ctcagaatgtctatg

SEQ ID NO: 1765790 - DNA, 15 bp, Homo sapiens
tcagaatgtctatgg

SEQ ID NO: 1765791 - DNA, 15 bp, Homo sapiens
cagaatgtctatgga

SEQ ID NO: 1765792 - DNA, 15 bp, Homo sapiens
agaatgtctatggat

SEQ ID NO: 1765793 - DNA, 15 bp, Homo sapiens
gaatgtctatggatc

SEQ ID NO: 1765794 - DNA, 15 bp, Homo sapiens
aatgtctatggatca

SEQ ID NO: 1765795 - DNA, 15 bp, Homo sapiens
atgtctatggatcag

SEQ ID NO: 1765796 - DNA, 15 bp, Homo sapiens
tgtctatggatcaga

SEQ ID NO: 1765797 - DNA, 15 bp, Homo sapiens
gtctatggatcagaa

SEQ ID NO: 1765798 - DNA, 15 bp, Homo sapiens
tctatggatcagaac

SEQ ID NO: 1765799 - DNA, 15 bp, Homo sapiens
ctatggatcagaact

SEQ ID NO: 1765800 - DNA, 15 bp, Homo sapiens
tatggatcagaactc

SEQ ID NO: 1765801 - DNA, 15 bp, Homo sapiens
atggatcagaactct

SEQ ID NO: 1765802 - DNA, 15 bp, Homo sapiens
tggatcagaactctg

SEQ ID NO: 1765803 - DNA, 15 bp, Homo sapiens
ggatcagaactctgg

SEQ ID NO: 1765804 - DNA, 15 bp, Homo sapiens
gatcagaactctgga

SEQ ID NO: 1765805 - DNA, 15 bp, Homo sapiens
atcagaactctggaa

SEQ ID NO: 1765806 - DNA, 15 bp, Homo sapiens
tcagaactctggaag

SEQ ID NO: 1765807 - DNA, 15 bp, Homo sapiens
cagaactctggaagt

SEQ ID NO: 1765808 - DNA, 15 bp, Homo sapiens
agaactctggaagtg

SEQ ID NO: 1765809 - DNA, 15 bp, Homo sapiens
gaactctggaagtga

SEQ ID NO: 1765810 - DNA, 15 bp, Homo sapiens
aactctggaagtgac

SEQ ID NO: 1765811 - DNA, 15 bp, Homo sapiens
actctggaagtgact

SEQ ID NO: 1765812 - DNA, 15 bp, Homo sapiens
ctctggaagtgactt

SEQ ID NO: 1765813 - DNA, 15 bp, Homo sapiens
tctggaagtgacttg

SEQ ID NO: 1765814 - DNA, 15 bp, Homo sapiens
ctggaagtgacttgg

SEQ ID NO: 1765815 - DNA, 15 bp, Homo sapiens
tggaagtgacttggt

SEQ ID NO: 1765816 - DNA, 15 bp, Homo sapiens
ggaagtgacttggtt

SEQ ID NO: 1765817 - DNA, 15 bp, Homo sapiens
gaagtgacttggttg

SEQ ID NO: 1765818 - DNA, 15 bp, Homo sapiens
aagtgacttggttgg

SEQ ID NO: 1765819 - DNA, 15 bp, Homo sapiens
agtgacttggttggg

SEQ ID NO: 1765820 - DNA, 15 bp, Homo sapiens
gtgacttggttgggt

SEQ ID NO: 1765821 - DNA, 15 bp, Homo sapiens
tgacttggttgggta

SEQ ID NO: 1765822 - DNA, 15 bp, Homo sapiens
gacttggttgggtag

SEQ ID NO: 1765823 - DNA, 15 bp, Homo sapiens
acttggttgggtagt

SEQ ID NO: 1765824 - DNA, 15 bp, Homo sapiens
cttggttgggtagtc

SEQ ID NO: 1765825 - DNA, 15 bp, Homo sapiens
ttggttgggtagtcc

SEQ ID NO: 1765826 - DNA, 15 bp, Homo sapiens
tggttgggtagtcct

SEQ ID NO: 1765827 - DNA, 15 bp, Homo sapiens
ggttgggtagtcctg

SEQ ID NO: 1765828 - DNA, 15 bp, Homo sapiens
gttgggtagtcctgt

SEQ ID NO: 1765829 - DNA, 15 bp, Homo sapiens
ttgggtagtcctgtc

SEQ ID NO: 1765830 - DNA, 15 bp, Homo sapiens
tgggtagtcctgtct

SEQ ID NO: 1765831 - DNA, 15 bp, Homo sapiens
gggtagtcctgtctt

SEQ ID NO: 1765832 - DNA, 15 bp, Homo sapiens
ggtagtcctgtcttg

SEQ ID NO: 1765833 - DNA, 15 bp, Homo sapiens
gtagtcctgtcttgg

SEQ ID NO: 1765834 - DNA, 15 bp, Homo sapiens
tagtcctgtcttggg

SEQ ID NO: 1765835 - DNA, 15 bp, Homo sapiens
agtcctgtcttggga

SEQ ID NO: 1765836 - DNA, 15 bp, Homo sapiens
gtcctgtcttgggat

SEQ ID NO: 1765837 - DNA, 15 bp, Homo sapiens
tcctgtcttgggatc

SEQ ID NO: 1765838 - DNA, 15 bp, Homo sapiens
cctgtcttgggatcc

SEQ ID NO: 1765839 - DNA, 15 bp, Homo sapiens
ctgtcttgggatccc

SEQ ID NO: 1765840 - DNA, 15 bp, Homo sapiens
tgtcttgggatccct

SEQ ID NO: 1765841 - DNA, 15 bp, Homo sapiens
gtcttgggatccctc

SEQ ID NO: 1765842 - DNA, 15 bp, Homo sapiens
tcttgggatccctcc

SEQ ID NO: 1765843 - DNA, 15 bp, Homo sapiens
cttgggatccctccc

SEQ ID NO: 1765844 - DNA, 15 bp, Homo sapiens
ttgggatccctccca

SEQ ID NO: 1765845 - DNA, 15 bp, Homo sapiens
tgggatccctcccag

SEQ ID NO: 1765846 - DNA, 15 bp, Homo sapiens
gggatccctcccaga

SEQ ID NO: 1765847 - DNA, 15 bp, Homo sapiens
ggatccctcccagag

SEQ ID NO: 1765848 - DNA, 15 bp, Homo sapiens
gatccctcccagaga

SEQ ID NO: 1765849 - DNA, 15 bp, Homo sapiens
atccctcccagagaa

SEQ ID NO: 1765850 - DNA, 15 bp, Homo sapiens
tccctcccagagaag

SEQ ID NO: 1765851 - DNA, 15 bp, Homo sapiens
ccctcccagagaagt

SEQ ID NO: 1765852 - DNA, 15 bp, Homo sapiens
cctcccagagaagta

SEQ ID NO: 1765853 - DNA, 15 bp, Homo sapiens
ctcccagagaagtat

SEQ ID NO: 1765854 - DNA, 15 bp, Homo sapiens
tcccagagaagtata

SEQ ID NO: 1765855 - DNA, 15 bp, Homo sapiens
cccagagaagtatac

SEQ ID NO: 1765856 - DNA, 15 bp, Homo sapiens
ccagagaagtataca

SEQ ID NO: 1765857 - DNA, 15 bp, Homo sapiens
cagagaagtatacac

SEQ ID NO: 1765858 - DNA, 15 bp, Homo sapiens
agagaagtatacact

SEQ ID NO: 1765859 - DNA, 15 bp, Homo sapiens
gagaagtatacactg

SEQ ID NO: 1765860 - DNA, 15 bp, Homo sapiens
agaagtatacactgg

SEQ ID NO: 1765861 - DNA, 15 bp, Homo sapiens
gaagtatacactgga

SEQ ID NO: 1765862 - DNA, 15 bp, Homo sapiens
aagtatacactggat

SEQ ID NO: 1765863 - DNA, 15 bp, Homo sapiens
agtatacactggatt

SEQ ID NO: 1765864 - DNA, 15 bp, Homo sapiens
gtatacactggattt

SEQ ID NO: 1765865 - DNA, 15 bp, Homo sapiens
tatacactggatttg

SEQ ID NO: 1765866 - DNA, 15 bp, Homo sapiens
atacactggatttgg

SEQ ID NO: 1765867 - DNA, 15 bp, Homo sapiens
tacactggatttggc

SEQ ID NO: 1765868 - DNA, 15 bp, Homo sapiens
acactggatttggca

SEQ ID NO: 1765869 - DNA, 15 bp, Homo sapiens
cactggatttggcaa

SEQ ID NO: 1765870 - DNA, 15 bp, Homo sapiens
actggatttggcaac

SEQ ID NO: 1765871 - DNA, 15 bp, Homo sapiens
ctggatttggcaaca

SEQ ID NO: 1765872 - DNA, 15 bp, Homo sapiens
tggatttggcaacaa

SEQ ID NO: 1765873 - DNA, 15 bp, Homo sapiens
ggatttggcaacaat

SEQ ID NO: 1765874 - DNA, 15 bp, Homo sapiens
gatttggcaacaata

SEQ ID NO: 1765875 - DNA, 15 bp, Homo sapiens
atttggcaacaataa

SEQ ID NO: 1765876 - DNA, 15 bp, Homo sapiens
tttggcaacaataaa

SEQ ID NO: 1765877 - DNA, 15 bp, Homo sapiens
ttggcaacaataaag

SEQ ID NO: 1765878 - DNA, 15 bp, Homo sapiens
tggcaacaataaagt

SEQ ID NO: 1765879 - DNA, 15 bp, Homo sapiens
ggcaacaataaagtg

SEQ ID NO: 1765880 - DNA, 15 bp, Homo sapiens
gcaacaataaagtgg

SEQ ID NO: 1765881 - DNA, 15 bp, Homo sapiens
caacaataaagtggc

SEQ ID NO: 1765882 - DNA, 15 bp, Homo sapiens
aacaataaagtggct

SEQ ID NO: 1765883 - DNA, 15 bp, Homo sapiens
acaataaagtggctt

SEQ ID NO: 1765884 - DNA, 15 bp, Homo sapiens
caataaagtggcttt

SEQ ID NO: 1765885 - DNA, 15 bp, Homo sapiens
aataaagtggcttta

SEQ ID NO: 1765886 - DNA, 15 bp, Homo sapiens
ataaagtggctttaa

SEQ ID NO: 1765887 - DNA, 15 bp, Homo sapiens
taaagtggctttaat

SEQ ID NO: 1765888 - DNA, 15 bp, Homo sapiens
aaagtggctttaata

SEQ ID NO: 1765889 - DNA, 15 bp, Homo sapiens
aagtggctttaatat

SEQ ID NO: 1765890 - DNA, 15 bp, Homo sapiens
agtggctttaatatc

SEQ ID NO: 1765891 - DNA, 15 bp, Homo sapiens
gtggctttaatatcc

SEQ ID NO: 1765892 - DNA, 15 bp, Homo sapiens
tggctttaatatccc

SEQ ID NO: 1765893 - DNA, 15 bp, Homo sapiens
ggctttaatatccct

SEQ ID NO: 1765894 - DNA, 15 bp, Homo sapiens
gctttaatatccctg

SEQ ID NO: 1765895 - DNA, 15 bp, Homo sapiens
ctttaatatccctgg

SEQ ID NO: 1765896 - DNA, 15 bp, Homo sapiens
tttaatatccctggg

SEQ ID NO: 1765897 - DNA, 15 bp, Homo sapiens
ttaatatccctgggg

SEQ ID NO: 1765898 - DNA, 15 bp, Homo sapiens
taatatccctgggga

SEQ ID NO: 1765899 - DNA, 15 bp, Homo sapiens
aatatccctggggag

SEQ ID NO: 1765900 - DNA, 15 bp, Homo sapiens
atatccctggggagg

SEQ ID NO: 1765901 - DNA, 15 bp, Homo sapiens
tatccctggggaggc

SEQ ID NO: 1765902 - DNA, 15 bp, Homo sapiens
atccctggggaggcc

SEQ ID NO: 1765903 - DNA, 15 bp, Homo sapiens
tccctggggaggcca

SEQ ID NO: 1765904 - DNA, 15 bp, Homo sapiens
ccctggggaggccag

SEQ ID NO: 1765905 - DNA, 15 bp, Homo sapiens
cctggggaggccagt

SEQ ID NO: 1765906 - DNA, 15 bp, Homo sapiens
ctggggaggccagtt

SEQ ID NO: 1765907 - DNA, 15 bp, Homo sapiens
tggggaggccagttt

SEQ ID NO: 1765908 - DNA, 15 bp, Homo sapiens
ggggaggccagtttt

SEQ ID NO: 1765909 - DNA, 15 bp, Homo sapiens
gggaggccagttttg

SEQ ID NO: 1765910 - DNA, 15 bp, Homo sapiens
ggaggccagttttga

SEQ ID NO: 1765911 - DNA, 15 bp, Homo sapiens
gaggccagttttgat

SEQ ID NO: 1765912 - DNA, 15 bp, Homo sapiens
aggccagttttgatg

SEQ ID NO: 1765913 - DNA, 15 bp, Homo sapiens
ggccagttttgatga

SEQ ID NO: 1765914 - DNA, 15 bp, Homo sapiens
gccagttttgatgaa

SEQ ID NO: 1765915 - DNA, 15 bp, Homo sapiens
ccagttttgatgaag

SEQ ID NO: 1765916 - DNA, 15 bp, Homo sapiens
cagttttgatgaagt

SEQ ID NO: 1765917 - DNA, 15 bp, Homo sapiens
agttttgatgaagtg

SEQ ID NO: 1765918 - DNA, 15 bp, Homo sapiens
gttttgatgaagtgg

SEQ ID NO: 1765919 - DNA, 15 bp, Homo sapiens
ttttgatgaagtggt

SEQ ID NO: 1765920 - DNA, 15 bp, Homo sapiens
tttgatgaagtggtg

SEQ ID NO: 1765921 - DNA, 15 bp, Homo sapiens
ttgatgaagtggtgg

SEQ ID NO: 1765922 - DNA, 15 bp, Homo sapiens
tgatgaagtggtggg

SEQ ID NO: 1765923 - DNA, 15 bp, Homo sapiens
gatgaagtggtgggg

SEQ ID NO: 1765924 - DNA, 15 bp, Homo sapiens
atgaagtggtggggc

SEQ ID NO: 1765925 - DNA, 15 bp, Homo sapiens
tgaagtggtggggct

SEQ ID NO: 1765926 - DNA, 15 bp, Homo sapiens
gaagtggtggggctg

SEQ ID NO: 1765927 - DNA, 15 bp, Homo sapiens
aagtggtggggctgg

SEQ ID NO: 1765928 - DNA, 15 bp, Homo sapiens
agtggtggggctggg

SEQ ID NO: 1765929 - DNA, 15 bp, Homo sapiens
gtggtggggctggga

SEQ ID NO: 1765930 - DNA, 15 bp, Homo sapiens
tggtggggctgggac

SEQ ID NO: 1765931 - DNA, 15 bp, Homo sapiens
ggtggggctgggacc

SEQ ID NO: 1765932 - DNA, 15 bp, Homo sapiens
gtggggctgggaccc

SEQ ID NO: 1765933 - DNA, 15 bp, Homo sapiens
tggggctgggaccca

SEQ ID NO: 1765934 - DNA, 15 bp, Homo sapiens
ggggctgggacccag

SEQ ID NO: 1765935 - DNA, 15 bp, Homo sapiens
gggctgggacccagg

SEQ ID NO: 1765936 - DNA, 15 bp, Homo sapiens
ggctgggacccaggc

SEQ ID NO: 1765937 - DNA, 15 bp, Homo sapiens
gctgggacccaggct

SEQ ID NO: 1765938 - DNA, 15 bp, Homo sapiens
ctgggacccaggctg

SEQ ID NO: 1765939 - DNA, 15 bp, Homo sapiens
tgggacccaggctgc

SEQ ID NO: 1765940 - DNA, 15 bp, Homo sapiens
gggacccaggctgca

SEQ ID NO: 1765941 - DNA, 15 bp, Homo sapiens
ggacccaggctgcag

SEQ ID NO: 1765942 - DNA, 15 bp, Homo sapiens
gacccaggctgcagg

SEQ ID NO: 1765943 - DNA, 15 bp, Homo sapiens
acccaggctgcagga

SEQ ID NO: 1765944 - DNA, 15 bp, Homo sapiens
cccaggctgcaggat

SEQ ID NO: 1765945 - DNA, 15 bp, Homo sapiens
ccaggctgcaggata

SEQ ID NO: 1765946 - DNA, 15 bp, Homo sapiens
caggctgcaggatat

SEQ ID NO: 1765947 - DNA, 15 bp, Homo sapiens
aggctgcaggatatt

SEQ ID NO: 1765948 - DNA, 15 bp, Homo sapiens
ggctgcaggatattt

SEQ ID NO: 1765949 - DNA, 15 bp, Homo sapiens
gctgcaggatatttg

SEQ ID NO: 1765950 - DNA, 15 bp, Homo sapiens
ctgcaggatatttgc

SEQ ID NO: 1765951 - DNA, 15 bp, Homo sapiens
tgcaggatatttgca

SEQ ID NO: 1765952 - DNA, 15 bp, Homo sapiens
gcaggatatttgcag

SEQ ID NO: 1765953 - DNA, 15 bp, Homo sapiens
caggatatttgcagc

SEQ ID NO: 1765954 - DNA, 15 bp, Homo sapiens
aggatatttgcagct

SEQ ID NO: 1765955 - DNA, 15 bp, Homo sapiens
ggatatttgcagctt

SEQ ID NO: 1765956 - DNA, 15 bp, Homo sapiens
gatatttgcagcttc

SEQ ID NO: 1765957 - DNA, 15 bp, Homo sapiens
atatttgcagcttct

SEQ ID NO: 1765958 - DNA, 15 bp, Homo sapiens
tatttgcagcttctg

SEQ ID NO: 1765959 - DNA, 15 bp, Homo sapiens
atttgcagcttctgc

SEQ ID NO: 1765960 - DNA, 15 bp, Homo sapiens
tttgcagcttctgcc

SEQ ID NO: 1765961 - DNA, 15 bp, Homo sapiens
ttgcagcttctgcca

SEQ ID NO: 1765962 - DNA, 15 bp, Homo sapiens
tgcagcttctgccag

SEQ ID NO: 1765963 - DNA, 15 bp, Homo sapiens
gcagcttctgccaga

SEQ ID NO: 1765964 - DNA, 15 bp, Homo sapiens
cagcttctgccagag

SEQ ID NO: 1765965 - DNA, 15 bp, Homo sapiens
agcttctgccagagt

SEQ ID NO: 1765966 - DNA, 15 bp, Homo sapiens
gcttctgccagagtt

SEQ ID NO: 1765967 - DNA, 15 bp, Homo sapiens
cttctgccagagttc

SEQ ID NO: 1765968 - DNA, 15 bp, Homo sapiens
ttctgccagagttca

SEQ ID NO: 1765969 - DNA, 15 bp, Homo sapiens
tctgccagagttcag

SEQ ID NO: 1765970 - DNA, 15 bp, Homo sapiens
ctgccagagttcaga

SEQ ID NO: 1765971 - DNA, 15 bp, Homo sapiens
tgccagagttcagat

SEQ ID NO: 1765972 - DNA, 15 bp, Homo sapiens
gccagagttcagatt

SEQ ID NO: 1765973 - DNA, 15 bp, Homo sapiens
ccagagttcagattg

SEQ ID NO: 1765974 - DNA, 15 bp, Homo sapiens
cagagttcagattgg

SEQ ID NO: 1765975 - DNA, 15 bp, Homo sapiens
agagttcagattgga

SEQ ID NO: 1765976 - DNA, 15 bp, Homo sapiens
gagttcagattggat

SEQ ID NO: 1765977 - DNA, 15 bp, Homo sapiens
agttcagattggatc

SEQ ID NO: 1765978 - DNA, 15 bp, Homo sapiens
gttcagattggatcc

SEQ ID NO: 1765979 - DNA, 15 bp, Homo sapiens
ttcagattggatcca

SEQ ID NO: 1765980 - DNA, 15 bp, Homo sapiens
tcagattggatccaa

SEQ ID NO: 1765981 - DNA, 15 bp, Homo sapiens
cagattggatccaaa

SEQ ID NO: 1765982 - DNA, 15 bp, Homo sapiens
agattggatccaaaa

SEQ ID NO: 1765983 - DNA, 15 bp, Homo sapiens
gattggatccaaaaa

SEQ ID NO: 1765984 - DNA, 15 bp, Homo sapiens
attggatccaaaaaa

SEQ ID NO: 1765985 - DNA, 15 bp, Homo sapiens
ttggatccaaaaaat

SEQ ID NO: 1765986 - DNA, 15 bp, Homo sapiens
tggatccaaaaaatg

SEQ ID NO: 1765987 - DNA, 15 bp, Homo sapiens
ggatccaaaaaatgt

SEQ ID NO: 1765988 - DNA, 15 bp, Homo sapiens
gatccaaaaaatgta

SEQ ID NO: 1765989 - DNA, 15 bp, Homo sapiens
atccaaaaaatgtaa

SEQ ID NO: 1765990 - DNA, 15 bp, Homo sapiens
tccaaaaaatgtaaa

SEQ ID NO: 1765991 - DNA, 15 bp, Homo sapiens
ccaaaaaatgtaaag

SEQ ID NO: 1765992 - DNA, 15 bp, Homo sapiens
caaaaaatgtaaagc

SEQ ID NO: 1765993 - DNA, 15 bp, Homo sapiens
aaaaaatgtaaagcc

SEQ ID NO: 1765994 - DNA, 15 bp, Homo sapiens
aaaaatgtaaagcca

SEQ ID NO: 1765995 - DNA, 15 bp, Homo sapiens
aaaatgtaaagccag

SEQ ID NO: 1765996 - DNA, 15 bp, Homo sapiens
aaatgtaaagccagg

SEQ ID NO: 1765997 - DNA, 15 bp, Homo sapiens
aatgtaaagccagga

SEQ ID NO: 1765998 - DNA, 15 bp, Homo sapiens
atgtaaagccaggat

SEQ ID NO: 1765999 - DNA, 15 bp, Homo sapiens
tgtaaagccaggatg

SEQ ID NO: 1766000 - DNA, 15 bp, Homo sapiens
gtaaagccaggatgg

SEQ ID NO: 1766001 - DNA, 15 bp, Homo sapiens
taaagccaggatggc

SEQ ID NO: 1766002 - DNA, 15 bp, Homo sapiens
aaagccaggatggct

SEQ ID NO: 1766003 - DNA, 15 bp, Homo sapiens
aagccaggatggctc

SEQ ID NO: 1766004 - DNA, 15 bp, Homo sapiens
agccaggatggctct

SEQ ID NO: 1766005 - DNA, 15 bp, Homo sapiens
gccaggatggctctg

SEQ ID NO: 1766006 - DNA, 15 bp, Homo sapiens
ccaggatggctctgg

SEQ ID NO: 1766007 - DNA, 15 bp, Homo sapiens
caggatggctctggt

SEQ ID NO: 1766008 - DNA, 15 bp, Homo sapiens
aggatggctctggtt

SEQ ID NO: 1766009 - DNA, 15 bp, Homo sapiens
ggatggctctggtta

SEQ ID NO: 1766010 - DNA, 15 bp, Homo sapiens
gatggctctggttag

SEQ ID NO: 1766011 - DNA, 15 bp, Homo sapiens
atggctctggttaga

SEQ ID NO: 1766012 - DNA, 15 bp, Homo sapiens
tggctctggttagaa

SEQ ID NO: 1766013 - DNA, 15 bp, Homo sapiens
ggctctggttagaag

SEQ ID NO: 1766014 - DNA, 15 bp, Homo sapiens
gctctggttagaaga

SEQ ID NO: 1766015 - DNA, 15 bp, Homo sapiens
ctctggttagaagaa

SEQ ID NO: 1766016 - DNA, 15 bp, Homo sapiens
tctggttagaagaac

SEQ ID NO: 1766017 - DNA, 15 bp, Homo sapiens
ctggttagaagaacc

SEQ ID NO: 1766018 - DNA, 15 bp, Homo sapiens
tggttagaagaacca

SEQ ID NO: 1766019 - DNA, 15 bp, Homo sapiens
ggttagaagaaccac

SEQ ID NO: 1766020 - DNA, 15 bp, Homo sapiens
gttagaagaaccaca

SEQ ID NO: 1766021 - DNA, 15 bp, Homo sapiens
ttagaagaaccacac

SEQ ID NO: 1766022 - DNA, 15 bp, Homo sapiens
tagaagaaccacacg

SEQ ID NO: 1766023 - DNA, 15 bp, Homo sapiens
agaagaaccacacga

SEQ ID NO: 1766024 - DNA, 15 bp, Homo sapiens
gaagaaccacacgac

SEQ ID NO: 1766025 - DNA, 15 bp, Homo sapiens
aagaaccacacgact

SEQ ID NO: 1766026 - DNA, 15 bp, Homo sapiens
agaaccacacgactg

SEQ ID NO: 1766027 - DNA, 15 bp, Homo sapiens
gaaccacacgactgg

SEQ ID NO: 1766028 - DNA, 15 bp, Homo sapiens
aaccacacgactggg

SEQ ID NO: 1766029 - DNA, 15 bp, Homo sapiens
accacacgactggga

SEQ ID NO: 1766030 - DNA, 15 bp, Homo sapiens
ccacacgactgggaa

SEQ ID NO: 1766031 - DNA, 15 bp, Homo sapiens
cacacgactgggaaa

SEQ ID NO: 1766032 - DNA, 15 bp, Homo sapiens
acacgactgggaaat

SEQ ID NO: 1766033 - DNA, 15 bp, Homo sapiens
cacgactgggaaatt

SEQ ID NO: 1766034 - DNA, 15 bp, Homo sapiens
acgactgggaaatta

SEQ ID NO: 1766035 - DNA, 15 bp, Homo sapiens
cgactgggaaattac

SEQ ID NO: 1766036 - DNA, 15 bp, Homo sapiens
gactgggaaattaca

SEQ ID NO: 1766037 - DNA, 15 bp, Homo sapiens
actgggaaattacag

SEQ ID NO: 1766038 - DNA, 15 bp, Homo sapiens
ctgggaaattacagg

SEQ ID NO: 1766039 - DNA, 15 bp, Homo sapiens
tgggaaattacaggg

SEQ ID NO: 1766040 - DNA, 15 bp, Homo sapiens
gggaaattacagggc

SEQ ID NO: 1766041 - DNA, 15 bp, Homo sapiens
ggaaattacagggca

SEQ ID NO: 1766042 - DNA, 15 bp, Homo sapiens
gaaattacagggcac

SEQ ID NO: 1766043 - DNA, 15 bp, Homo sapiens
aaattacagggcaca

SEQ ID NO: 1766044 - DNA, 15 bp, Homo sapiens
aattacagggcacat

SEQ ID NO: 1766045 - DNA, 15 bp, Homo sapiens
attacagggcacatt

SEQ ID NO: 1766046 - DNA, 15 bp, Homo sapiens
ttacagggcacattt

SEQ ID NO: 1766047 - DNA, 15 bp, Homo sapiens
tacagggcacatttt

SEQ ID NO: 1766048 - DNA, 15 bp, Homo sapiens
acagggcacattttg

SEQ ID NO: 1766049 - DNA, 15 bp, Homo sapiens
cagggcacattttga

SEQ ID NO: 1766050 - DNA, 15 bp, Homo sapiens
agggcacattttgaa

SEQ ID NO: 1766051 - DNA, 15 bp, Homo sapiens
gggcacattttgaaa

SEQ ID NO: 1766052 - DNA, 15 bp, Homo sapiens
ggcacattttgaaag

SEQ ID NO: 1766053 - DNA, 15 bp, Homo sapiens
gcacattttgaaaga

SEQ ID NO: 1766054 - DNA, 15 bp, Homo sapiens
cacattttgaaagac

SEQ ID NO: 1766055 - DNA, 15 bp, Homo sapiens
acattttgaaagaca

SEQ ID NO: 1766056 - DNA, 15 bp, Homo sapiens
cattttgaaagacaa

SEQ ID NO: 1766057 - DNA, 15 bp, Homo sapiens
attttgaaagacaat

SEQ ID NO: 1766058 - DNA, 15 bp, Homo sapiens
ttttgaaagacaatc

SEQ ID NO: 1766059 - DNA, 15 bp, Homo sapiens
tttgaaagacaatcc

SEQ ID NO: 1766060 - DNA, 15 bp, Homo sapiens
ttgaaagacaatccc

SEQ ID NO: 1766061 - DNA, 15 bp, Homo sapiens
tgaaagacaatccca

SEQ ID NO: 1766062 - DNA, 15 bp, Homo sapiens
gaaagacaatcccaa

SEQ ID NO: 1766063 - DNA, 15 bp, Homo sapiens
aaagacaatcccaat

SEQ ID NO: 1766064 - DNA, 15 bp, Homo sapiens
aagacaatcccaatg

SEQ ID NO: 1766065 - DNA, 15 bp, Homo sapiens
agacaatcccaatga

SEQ ID NO: 1766066 - DNA, 15 bp, Homo sapiens
gacaatcccaatgaa

SEQ ID NO: 1766067 - DNA, 15 bp, Homo sapiens
acaatcccaatgaag

SEQ ID NO: 1766068 - DNA, 15 bp, Homo sapiens
caatcccaatgaagt

SEQ ID NO: 1766069 - DNA, 15 bp, Homo sapiens
aatcccaatgaagtc

SEQ ID NO: 1766070 - DNA, 15 bp, Homo sapiens
atcccaatgaagtca

SEQ ID NO: 1766071 - DNA, 15 bp, Homo sapiens
tcccaatgaagtcac

SEQ ID NO: 1766072 - DNA, 15 bp, Homo sapiens
cccaatgaagtcaca

SEQ ID NO: 1766073 - DNA, 15 bp, Homo sapiens
ccaatgaagtcacat

SEQ ID NO: 1766074 - DNA, 15 bp, Homo sapiens
caatgaagtcacatt

SEQ ID NO: 1766075 - DNA, 15 bp, Homo sapiens
aatgaagtcacattt

SEQ ID NO: 1766076 - DNA, 15 bp, Homo sapiens
atgaagtcacatttt

SEQ ID NO: 1766077 - DNA, 15 bp, Homo sapiens
tgaagtcacattttg

SEQ ID NO: 1766078 - DNA, 15 bp, Homo sapiens
gaagtcacattttgt

SEQ ID NO: 1766079 - DNA, 15 bp, Homo sapiens
aagtcacattttgtt

SEQ ID NO: 1766080 - DNA, 15 bp, Homo sapiens
agtcacattttgttt

SEQ ID NO: 1766081 - DNA, 15 bp, Homo sapiens
gtcacattttgtttc

SEQ ID NO: 1766082 - DNA, 15 bp, Homo sapiens
tcacattttgtttct

SEQ ID NO: 1766083 - DNA, 15 bp, Homo sapiens
cacattttgtttctt

SEQ ID NO: 1766084 - DNA, 15 bp, Homo sapiens
acattttgtttcttt

SEQ ID NO: 1766085 - DNA, 15 bp, Homo sapiens
cattttgtttcttta

SEQ ID NO: 1766086 - DNA, 15 bp, Homo sapiens
attttgtttctttat

SEQ ID NO: 1766087 - DNA, 15 bp, Homo sapiens
ttttgtttctttata

SEQ ID NO: 1766088 - DNA, 15 bp, Homo sapiens
tttgtttctttataa

SEQ ID NO: 1766089 - DNA, 15 bp, Homo sapiens
ttgtttctttataat

SEQ ID NO: 1766090 - DNA, 15 bp, Homo sapiens
tgtttctttataatg

SEQ ID NO: 1766091 - DNA, 15 bp, Homo sapiens
gtttctttataatgg

SEQ ID NO: 1766092 - DNA, 15 bp, Homo sapiens
tttctttataatggg

SEQ ID NO: 1766093 - DNA, 15 bp, Homo sapiens
ttctttataatgggt

SEQ ID NO: 1766094 - DNA, 15 bp, Homo sapiens
tctttataatgggtt

SEQ ID NO: 1766095 - DNA, 15 bp, Homo sapiens
ctttataatgggttt

SEQ ID NO: 1766096 - DNA, 15 bp, Homo sapiens
tttataatgggtttt

SEQ ID NO: 1766097 - DNA, 15 bp, Homo sapiens
ttataatgggttttc

SEQ ID NO: 1766098 - DNA, 15 bp, Homo sapiens
tataatgggttttcc

SEQ ID NO: 1766099 - DNA, 15 bp, Homo sapiens
ataatgggttttcct

SEQ ID NO: 1766100 - DNA, 15 bp, Homo sapiens
taatgggttttcctc

SEQ ID NO: 1766101 - DNA, 15 bp, Homo sapiens
aatgggttttcctct

SEQ ID NO: 1766102 - DNA, 15 bp, Homo sapiens
atgggttttcctctc

SEQ ID NO: 1766103 - DNA, 15 bp, Homo sapiens
tgggttttcctctct

SEQ ID NO: 1766104 - DNA, 15 bp, Homo sapiens
gggttttcctctctt

SEQ ID NO: 1766105 - DNA, 15 bp, Homo sapiens
ggttttcctctcttt

SEQ ID NO: 1766106 - DNA, 15 bp, Homo sapiens
gttttcctctctttc

SEQ ID NO: 1766107 - DNA, 15 bp, Homo sapiens
ttttcctctctttcc

SEQ ID NO: 1766108 - DNA, 15 bp, Homo sapiens
tttcctctctttccc

SEQ ID NO: 1766109 - DNA, 15 bp, Homo sapiens
ttcctctctttcccc

SEQ ID NO: 1766110 - DNA, 15 bp, Homo sapiens
tcctctctttcccca

SEQ ID NO: 1766111 - DNA, 15 bp, Homo sapiens
cctctctttccccac

SEQ ID NO: 1766112 - DNA, 15 bp, Homo sapiens
ctctctttccccact

SEQ ID NO: 1766113 - DNA, 15 bp, Homo sapiens
tctctttccccactc

SEQ ID NO: 1766114 - DNA, 15 bp, Homo sapiens
ctctttccccactct

SEQ ID NO: 1766115 - DNA, 15 bp, Homo sapiens
tctttccccactctg

SEQ ID NO: 1766116 - DNA, 15 bp, Homo sapiens
ctttccccactctgt

SEQ ID NO: 1766117 - DNA, 15 bp, Homo sapiens
tttccccactctgtc

SEQ ID NO: 1766118 - DNA, 15 bp, Homo sapiens
ttccccactctgtcc

SEQ ID NO: 1766119 - DNA, 15 bp, Homo sapiens
tccccactctgtcca

SEQ ID NO: 1766120 - DNA, 15 bp, Homo sapiens
ccccactctgtccac

SEQ ID NO: 1766121 - DNA, 15 bp, Homo sapiens
cccactctgtccacc

SEQ ID NO: 1766122 - DNA, 15 bp, Homo sapiens
ccactctgtccacct

SEQ ID NO: 1766123 - DNA, 15 bp, Homo sapiens
cactctgtccacctc

SEQ ID NO: 1766124 - DNA, 15 bp, Homo sapiens
actctgtccacctcc

SEQ ID NO: 1766125 - DNA, 15 bp, Homo sapiens
ctctgtccacctcct

SEQ ID NO: 1766126 - DNA, 15 bp, Homo sapiens
tctgtccacctcctg

SEQ ID NO: 1766127 - DNA, 15 bp, Homo sapiens
ctgtccacctcctga

SEQ ID NO: 1766128 - DNA, 15 bp, Homo sapiens
tgtccacctcctgaa

SEQ ID NO: 1766129 - DNA, 15 bp, Homo sapiens
gtccacctcctgaac

SEQ ID NO: 1766130 - DNA, 15 bp, Homo sapiens
tccacctcctgaaca

SEQ ID NO: 1766131 - DNA, 15 bp, Homo sapiens
ccacctcctgaacac

SEQ ID NO: 1766132 - DNA, 15 bp, Homo sapiens
cacctcctgaacacg

SEQ ID NO: 1766133 - DNA, 15 bp, Homo sapiens
acctcctgaacacgc

SEQ ID NO: 1766134 - DNA, 15 bp, Homo sapiens
cctcctgaacacgca

SEQ ID NO: 1766135 - DNA, 15 bp, Homo sapiens
ctcctgaacacgcag

SEQ ID NO: 1766136 - DNA, 15 bp, Homo sapiens
tcctgaacacgcagg

SEQ ID NO: 1766137 - DNA, 15 bp, Homo sapiens
cctgaacacgcaggg

SEQ ID NO: 1766138 - DNA, 15 bp, Homo sapiens
ctgaacacgcagggg

SEQ ID NO: 1766139 - DNA, 15 bp, Homo sapiens
tgaacacgcaggggc

SEQ ID NO: 1766140 - DNA, 15 bp, Homo sapiens
gaacacgcaggggct

SEQ ID NO: 1766141 - DNA, 15 bp, Homo sapiens
aacacgcaggggcta

SEQ ID NO: 1766142 - DNA, 15 bp, Homo sapiens
acacgcaggggctat

SEQ ID NO: 1766143 - DNA, 15 bp, Homo sapiens
cacgcaggggctatt

SEQ ID NO: 1766144 - DNA, 15 bp, Homo sapiens
acgcaggggctattt

SEQ ID NO: 1766145 - DNA, 15 bp, Homo sapiens
cgcaggggctatttc

SEQ ID NO: 1766146 - DNA, 15 bp, Homo sapiens
gcaggggctatttct

SEQ ID NO: 1766147 - DNA, 15 bp, Homo sapiens
caggggctatttctg

SEQ ID NO: 1766148 - DNA, 15 bp, Homo sapiens
aggggctatttctga

SEQ ID NO: 1766149 - DNA, 15 bp, Homo sapiens
ggggctatttctgag

SEQ ID NO: 1766150 - DNA, 15 bp, Homo sapiens
gggctatttctgagt

SEQ ID NO: 1766151 - DNA, 15 bp, Homo sapiens
ggctatttctgagtt

SEQ ID NO: 1766152 - DNA, 15 bp, Homo sapiens
gctatttctgagttt

SEQ ID NO: 1766153 - DNA, 15 bp, Homo sapiens
ctatttctgagtttt

SEQ ID NO: 1766154 - DNA, 15 bp, Homo sapiens
tatttctgagttttg

SEQ ID NO: 1766155 - DNA, 15 bp, Homo sapiens
atttctgagttttgt

SEQ ID NO: 1766156 - DNA, 15 bp, Homo sapiens
tttctgagttttgtc

SEQ ID NO: 1766157 - DNA, 15 bp, Homo sapiens
ttctgagttttgtca

SEQ ID NO: 1766158 - DNA, 15 bp, Homo sapiens
tctgagttttgtcaa

SEQ ID NO: 1766159 - DNA, 15 bp, Homo sapiens
ctgagttttgtcaat

SEQ ID NO: 1766160 - DNA, 15 bp, Homo sapiens
tgagttttgtcaatg

SEQ ID NO: 1766161 - DNA, 15 bp, Homo sapiens
gagttttgtcaatga

SEQ ID NO: 1766162 - DNA, 15 bp, Homo sapiens
agttttgtcaatgat

SEQ ID NO: 1766163 - DNA, 15 bp, Homo sapiens
gttttgtcaatgatg

SEQ ID NO: 1766164 - DNA, 15 bp, Homo sapiens
ttttgtcaatgatgc

SEQ ID NO: 1766165 - DNA, 15 bp, Homo sapiens
tttgtcaatgatgca

SEQ ID NO: 1766166 - DNA, 15 bp, Homo sapiens
ttgtcaatgatgcat

SEQ ID NO: 1766167 - DNA, 15 bp, Homo sapiens
tgtcaatgatgcatt

SEQ ID NO: 1766168 - DNA, 15 bp, Homo sapiens
gtcaatgatgcatta

SEQ ID NO: 1766169 - DNA, 15 bp, Homo sapiens
tcaatgatgcattag

SEQ ID NO: 1766170 - DNA, 15 bp, Homo sapiens
caatgatgcattaga

SEQ ID NO: 1766171 - DNA, 15 bp, Homo sapiens
aatgatgcattagaa

SEQ ID NO: 1766172 - DNA, 15 bp, Homo sapiens
atgatgcattagaaa

SEQ ID NO: 1766173 - DNA, 15 bp, Homo sapiens
tgatgcattagaaaa

SEQ ID NO: 1766174 - DNA, 15 bp, Homo sapiens
gatgcattagaaaag

SEQ ID NO: 1766175 - DNA, 15 bp, Homo sapiens
atgcattagaaaaga

SEQ ID NO: 1766176 - DNA, 15 bp, Homo sapiens
tgcattagaaaagaa

SEQ ID NO: 1766177 - DNA, 15 bp, Homo sapiens
gcattagaaaagaag

SEQ ID NO: 1766178 - DNA, 15 bp, Homo sapiens
cattagaaaagaaga

SEQ ID NO: 1766179 - DNA, 15 bp, Homo sapiens
attagaaaagaagac

SEQ ID NO: 1766180 - DNA, 15 bp, Homo sapiens
ttagaaaagaagaca

SEQ ID NO: 1766181 - DNA, 15 bp, Homo sapiens
tagaaaagaagacaa

SEQ ID NO: 1766182 - DNA, 15 bp, Homo sapiens
agaaaagaagacaac

SEQ ID NO: 1766183 - DNA, 15 bp, Homo sapiens
gaaaagaagacaact

SEQ ID NO: 1766184 - DNA, 15 bp, Homo sapiens
aaaagaagacaactg

SEQ ID NO: 1766185 - DNA, 15 bp, Homo sapiens
aaagaagacaactgc

SEQ ID NO: 1766186 - DNA, 15 bp, Homo sapiens
aagaagacaactgct

SEQ ID NO: 1766187 - DNA, 15 bp, Homo sapiens
agaagacaactgcta

SEQ ID NO: 1766188 - DNA, 15 bp, Homo sapiens
gaagacaactgctaa

SEQ ID NO: 1766189 - DNA, 15 bp, Homo sapiens
aagacaactgctaag

SEQ ID NO: 1766190 - DNA, 15 bp, Homo sapiens
agacaactgctaagg

SEQ ID NO: 1766191 - DNA, 15 bp, Homo sapiens
gacaactgctaaggg

SEQ ID NO: 1766192 - DNA, 15 bp, Homo sapiens
acaactgctaaggga

SEQ ID NO: 1766193 - DNA, 15 bp, Homo sapiens
caactgctaagggag

SEQ ID NO: 1766194 - DNA, 15 bp, Homo sapiens
aactgctaagggagt

SEQ ID NO: 1766195 - DNA, 15 bp, Homo sapiens
actgctaagggagtt

SEQ ID NO: 1766196 - DNA, 15 bp, Homo sapiens
ctgctaagggagttg

SEQ ID NO: 1766197 - DNA, 15 bp, Homo sapiens
tgctaagggagttga

SEQ ID NO: 1766198 - DNA, 15 bp, Homo sapiens
gctaagggagttgat

SEQ ID NO: 1766199 - DNA, 15 bp, Homo sapiens
ctaagggagttgatt

SEQ ID NO: 1766200 - DNA, 15 bp, Homo sapiens
taagggagttgattc

SEQ ID NO: 1766201 - DNA, 15 bp, Homo sapiens
aagggagttgattca

SEQ ID NO: 1766202 - DNA, 15 bp, Homo sapiens
agggagttgattcat

SEQ ID NO: 1766203 - DNA, 15 bp, Homo sapiens
gggagttgattcatc

SEQ ID NO: 1766204 - DNA, 15 bp, Homo sapiens
ggagttgattcatct

SEQ ID NO: 1766205 - DNA, 15 bp, Homo sapiens
gagttgattcatctt

SEQ ID NO: 1766206 - DNA, 15 bp, Homo sapiens
agttgattcatcttt

SEQ ID NO: 1766207 - DNA, 15 bp, Homo sapiens
gttgattcatctttg

SEQ ID NO: 1766208 - DNA, 15 bp, Homo sapiens
ttgattcatctttgt

SEQ ID NO: 1766209 - DNA, 15 bp, Homo sapiens
tgattcatctttgta

SEQ ID NO: 1766210 - DNA, 15 bp, Homo sapiens
gattcatctttgtac

SEQ ID NO: 1766211 - DNA, 15 bp, Homo sapiens
attcatctttgtacc

SEQ ID NO: 1766212 - DNA, 15 bp, Homo sapiens
ttcatctttgtacct

SEQ ID NO: 1766213 - DNA, 15 bp, Homo sapiens
tcatctttgtacctc

SEQ ID NO: 1766214 - DNA, 15 bp, Homo sapiens
catctttgtacctct

SEQ ID NO: 1766215 - DNA, 15 bp, Homo sapiens
atctttgtacctctc

SEQ ID NO: 1766216 - DNA, 15 bp, Homo sapiens
tctttgtacctctca

SEQ ID NO: 1766217 - DNA, 15 bp, Homo sapiens
ctttgtacctctcac

SEQ ID NO: 1766218 - DNA, 15 bp, Homo sapiens
tttgtacctctcaca

SEQ ID NO: 1766219 - DNA, 15 bp, Homo sapiens
ttgtacctctcacag

SEQ ID NO: 1766220 - DNA, 15 bp, Homo sapiens
tgtacctctcacagc

SEQ ID NO: 1766221 - DNA, 15 bp, Homo sapiens
gtacctctcacagca

SEQ ID NO: 1766222 - DNA, 15 bp, Homo sapiens
tacctctcacagcaa

SEQ ID NO: 1766223 - DNA, 15 bp, Homo sapiens
acctctcacagcaac

SEQ ID NO: 1766224 - DNA, 15 bp, Homo sapiens
cctctcacagcaaca

SEQ ID NO: 1766225 - DNA, 15 bp, Homo sapiens
ctctcacagcaacaa

SEQ ID NO: 1766226 - DNA, 15 bp, Homo sapiens
tctcacagcaacaag

SEQ ID NO: 1766227 - DNA, 15 bp, Homo sapiens
ctcacagcaacaagc

SEQ ID NO: 1766228 - DNA, 15 bp, Homo sapiens
tcacagcaacaagca

SEQ ID NO: 1766229 - DNA, 15 bp, Homo sapiens
cacagcaacaagcaa

SEQ ID NO: 1766230 - DNA, 15 bp, Homo sapiens
acagcaacaagcaag

SEQ ID NO: 1766231 - DNA, 15 bp, Homo sapiens
cagcaacaagcaagt

SEQ ID NO: 1766232 - DNA, 15 bp, Homo sapiens
agcaacaagcaagtt

SEQ ID NO: 1766233 - DNA, 15 bp, Homo sapiens
gcaacaagcaagttt

SEQ ID NO: 1766234 - DNA, 15 bp, Homo sapiens
caacaagcaagtttc

SEQ ID NO: 1766235 - DNA, 15 bp, Homo sapiens
aacaagcaagtttct

SEQ ID NO: 1766236 - DNA, 15 bp, Homo sapiens
acaagcaagtttctt

SEQ ID NO: 1766237 - DNA, 15 bp, Homo sapiens
caagcaagtttcttt

SEQ ID NO: 1766238 - DNA, 15 bp, Homo sapiens
aagcaagtttcttta

SEQ ID NO: 1766239 - DNA, 15 bp, Homo sapiens
agcaagtttctttaa

SEQ ID NO: 1766240 - DNA, 15 bp, Homo sapiens
gcaagtttctttaaa

SEQ ID NO: 1766241 - DNA, 15 bp, Homo sapiens
caagtttctttaaaa

SEQ ID NO: 1766242 - DNA, 15 bp, Homo sapiens
aagtttctttaaaat

SEQ ID NO: 1766243 - DNA, 15 bp, Homo sapiens
agtttctttaaaata

SEQ ID NO: 1766244 - DNA, 15 bp, Homo sapiens
gtttctttaaaatat

SEQ ID NO: 1766245 - DNA, 15 bp, Homo sapiens
tttctttaaaatatt

SEQ ID NO: 1766246 - DNA, 15 bp, Homo sapiens
ttctttaaaatattt

SEQ ID NO: 1766247 - DNA, 15 bp, Homo sapiens
tctttaaaatatttc

SEQ ID NO: 1766248 - DNA, 15 bp, Homo sapiens
ctttaaaatatttca

SEQ ID NO: 1766249 - DNA, 15 bp, Homo sapiens
ttaaaatatttcaac

SEQ ID NO: 1766250 - DNA, 15 bp, Homo sapiens
taaaatatttcaaca

SEQ ID NO: 1766251 - DNA, 15 bp, Homo sapiens
aaaatatttcaacaa

SEQ ID NO: 1766252 - DNA, 15 bp, Homo sapiens
aaatatttcaacaag

SEQ ID NO: 1766253 - DNA, 15 bp, Homo sapiens
aatatttcaacaagg

SEQ ID NO: 1766254 - DNA, 15 bp, Homo sapiens
atatttcaacaaggg

SEQ ID NO: 1766255 - DNA, 15 bp, Homo sapiens
tatttcaacaagggc

SEQ ID NO: 1766256 - DNA, 15 bp, Homo sapiens
atttcaacaagggcc

SEQ ID NO: 1766257 - DNA, 15 bp, Homo sapiens
tttcaacaagggcca

SEQ ID NO: 1766258 - DNA, 15 bp, Homo sapiens
ttcaacaagggccag

SEQ ID NO: 1766259 - DNA, 15 bp, Homo sapiens
tcaacaagggccagg

SEQ ID NO: 1766260 - DNA, 15 bp, Homo sapiens
caacaagggccaggt

SEQ ID NO: 1766261 - DNA, 15 bp, Homo sapiens
aacaagggccaggtg

SEQ ID NO: 1766262 - DNA, 15 bp, Homo sapiens
acaagggccaggtgc

SEQ ID NO: 1766263 - DNA, 15 bp, Homo sapiens
caagggccaggtgcg

SEQ ID NO: 1766264 - DNA, 15 bp, Homo sapiens
aagggccaggtgcgg

SEQ ID NO: 1766265 - DNA, 15 bp, Homo sapiens
agggccaggtgcggt

SEQ ID NO: 1766266 - DNA, 15 bp, Homo sapiens
gggccaggtgcggtc

SEQ ID NO: 1766267 - DNA, 15 bp, Homo sapiens
ggccaggtgcggtcg

SEQ ID NO: 1766268 - DNA, 15 bp, Homo sapiens
gccaggtgcggtcgc

SEQ ID NO: 1766269 - DNA, 15 bp, Homo sapiens
ccaggtgcggtcgct

SEQ ID NO: 1766270 - DNA, 15 bp, Homo sapiens
caggtgcggtcgctc

SEQ ID NO: 1766271 - DNA, 15 bp, Homo sapiens
aggtgcggtcgctca

SEQ ID NO: 1766272 - DNA, 15 bp, Homo sapiens
gtgcggtcgctcaca

SEQ ID NO: 1766273 - DNA, 15 bp, Homo sapiens
tgcggtcgctcacac

SEQ ID NO: 1766274 - DNA, 15 bp, Homo sapiens
gcggtcgctcacacc

SEQ ID NO: 1766275 - DNA, 15 bp, Homo sapiens
cggtcgctcacacct

SEQ ID NO: 1766276 - DNA, 15 bp, Homo sapiens
ggtcgctcacacctg

SEQ ID NO: 1766277 - DNA, 15 bp, Homo sapiens
gtcgctcacacctgt

SEQ ID NO: 1766278 - DNA, 15 bp, Homo sapiens
tcgctcacacctgta

SEQ ID NO: 1766279 - DNA, 15 bp, Homo sapiens
cgctcacacctgtaa

SEQ ID NO: 1766280 - DNA, 15 bp, Homo sapiens
tgtaatcccagcacc

SEQ ID NO: 1766281 - DNA, 15 bp, Homo sapiens
gtaatcccagcacct

SEQ ID NO: 1766282 - DNA, 15 bp, Homo sapiens
taatcccagcacctt

SEQ ID NO: 1766283 - DNA, 15 bp, Homo sapiens
aatcccagcaccttg

SEQ ID NO: 1766284 - DNA, 15 bp, Homo sapiens
atcccagcaccttgg

SEQ ID NO: 1766285 - DNA, 15 bp, Homo sapiens
tcccagcaccttggg

SEQ ID NO: 1766286 - DNA, 15 bp, Homo sapiens
cccagcaccttggga

SEQ ID NO: 1766287 - DNA, 15 bp, Homo sapiens
ccagcaccttgggag

SEQ ID NO: 1766288 - DNA, 15 bp, Homo sapiens
gcaccttgggaggcc

SEQ ID NO: 1766289 - DNA, 15 bp, Homo sapiens
caccttgggaggccg

SEQ ID NO: 1766290 - DNA, 15 bp, Homo sapiens
accttgggaggccga

SEQ ID NO: 1766291 - DNA, 15 bp, Homo sapiens
ccttgggaggccgag

SEQ ID NO: 1766292 - DNA, 15 bp, Homo sapiens
ggcgggcggatcacc

SEQ ID NO: 1766293 - DNA, 15 bp, Homo sapiens
gcgggcggatcacct

SEQ ID NO: 1766294 - DNA, 15 bp, Homo sapiens
cgggcggatcacctg

SEQ ID NO: 1766295 - DNA, 15 bp, Homo sapiens
gggcggatcacctgt

SEQ ID NO: 1766296 - DNA, 15 bp, Homo sapiens
ggcggatcacctgtg

SEQ ID NO: 1766297 - DNA, 15 bp, Homo sapiens
gcggatcacctgtgg

SEQ ID NO: 1766298 - DNA, 15 bp, Homo sapiens
cggatcacctgtggt

SEQ ID NO: 1766299 - DNA, 15 bp, Homo sapiens
ggatcacctgtggtc

SEQ ID NO: 1766300 - DNA, 15 bp, Homo sapiens
gatcacctgtggtca

SEQ ID NO: 1766301 - DNA, 15 bp, Homo sapiens
atcacctgtggtcag

SEQ ID NO: 1766302 - DNA, 15 bp, Homo sapiens
tcacctgtggtcagg

SEQ ID NO: 1766303 - DNA, 15 bp, Homo sapiens
cacctgtggtcagga

SEQ ID NO: 1766304 - DNA, 15 bp, Homo sapiens
acctgtggtcaggag

SEQ ID NO: 1766305 - DNA, 15 bp, Homo sapiens
cctgtggtcaggagt

SEQ ID NO: 1766306 - DNA, 15 bp, Homo sapiens
ctgtggtcaggagtt

SEQ ID NO: 1766307 - DNA, 15 bp, Homo sapiens
tgtggtcaggagttc

SEQ ID NO: 1766308 - DNA, 15 bp, Homo sapiens
gtggtcaggagttca

SEQ ID NO: 1766309 - DNA, 15 bp, Homo sapiens
tggtcaggagttcaa

SEQ ID NO: 1766310 - DNA, 15 bp, Homo sapiens
cgtggtgaaaccccg

SEQ ID NO: 1766311 - DNA, 15 bp, Homo sapiens
gtggtgaaaccccgt

SEQ ID NO: 1766312 - DNA, 15 bp, Homo sapiens
aaccccgtctctaca

SEQ ID NO: 1766313 - DNA, 15 bp, Homo sapiens
accccgtctctacaa

SEQ ID NO: 1766314 - DNA, 15 bp, Homo sapiens
ccccgtctctacaaa

SEQ ID NO: 1766315 - DNA, 15 bp, Homo sapiens
cccgtctctacaaaa

SEQ ID NO: 1766316 - DNA, 15 bp, Homo sapiens
ccgtctctacaaaaa

SEQ ID NO: 1766317 - DNA, 15 bp, Homo sapiens
cgtctctacaaaaat

SEQ ID NO: 1766318 - DNA, 15 bp, Homo sapiens
gtctctacaaaaata

SEQ ID NO: 1766319 - DNA, 15 bp, Homo sapiens
gtgtggtggcacacg

SEQ ID NO: 1766320 - DNA, 15 bp, Homo sapiens
tgtggtggcacacgc

SEQ ID NO: 1766321 - DNA, 15 bp, Homo sapiens
cacacgcctgtaatt

SEQ ID NO: 1766322 - DNA, 15 bp, Homo sapiens
acacgcctgtaattc

SEQ ID NO: 1766323 - DNA, 15 bp, Homo sapiens
cgcctgtaattccag

SEQ ID NO: 1766324 - DNA, 15 bp, Homo sapiens
gcctgtaattccagc

SEQ ID NO: 1766325 - DNA, 15 bp, Homo sapiens
tgtaattccagctat

SEQ ID NO: 1766326 - DNA, 15 bp, Homo sapiens
gtaattccagctatt

SEQ ID NO: 1766327 - DNA, 15 bp, Homo sapiens
taattccagctattc

SEQ ID NO: 1766328 - DNA, 15 bp, Homo sapiens
aattccagctattcg

SEQ ID NO: 1766329 - DNA, 15 bp, Homo sapiens
attccagctattcgg

SEQ ID NO: 1766330 - DNA, 15 bp, Homo sapiens
ttccagctattcggg

SEQ ID NO: 1766331 - DNA, 15 bp, Homo sapiens
tccagctattcggga

SEQ ID NO: 1766332 - DNA, 15 bp, Homo sapiens
ccagctattcgggag

SEQ ID NO: 1766333 - DNA, 15 bp, Homo sapiens
cagctattcgggaga

SEQ ID NO: 1766334 - DNA, 15 bp, Homo sapiens
agctattcgggagac

SEQ ID NO: 1766335 - DNA, 15 bp, Homo sapiens
gctattcgggagact

SEQ ID NO: 1766336 - DNA, 15 bp, Homo sapiens
ctattcgggagactg

SEQ ID NO: 1766337 - DNA, 15 bp, Homo sapiens
tattcgggagactga

SEQ ID NO: 1766338 - DNA, 15 bp, Homo sapiens
attcgggagactgag

SEQ ID NO: 1766339 - DNA, 15 bp, Homo sapiens
ttcgggagactgagg

SEQ ID NO: 1766340 - DNA, 15 bp, Homo sapiens
tcgggagactgaggc

SEQ ID NO: 1766341 - DNA, 15 bp, Homo sapiens
cgggagactgaggca

SEQ ID NO: 1766342 - DNA, 15 bp, Homo sapiens
gggagactgaggcaa

SEQ ID NO: 1766343 - DNA, 15 bp, Homo sapiens
ggagactgaggcaag

SEQ ID NO: 1766344 - DNA, 15 bp, Homo sapiens
gagactgaggcaaga

SEQ ID NO: 1766345 - DNA, 15 bp, Homo sapiens
agactgaggcaagat

SEQ ID NO: 1766346 - DNA, 15 bp, Homo sapiens
gactgaggcaagata

SEQ ID NO: 1766347 - DNA, 15 bp, Homo sapiens
actgaggcaagataa

SEQ ID NO: 1766348 - DNA, 15 bp, Homo sapiens
ctgaggcaagataat

SEQ ID NO: 1766349 - DNA, 15 bp, Homo sapiens
tgaggcaagataatt

SEQ ID NO: 1766350 - DNA, 15 bp, Homo sapiens
gaggcaagataattg

SEQ ID NO: 1766351 - DNA, 15 bp, Homo sapiens
aggcaagataattgt

SEQ ID NO: 1766352 - DNA, 15 bp, Homo sapiens
ggcaagataattgtt

SEQ ID NO: 1766353 - DNA, 15 bp, Homo sapiens
gcaagataattgttt

SEQ ID NO: 1766354 - DNA, 15 bp, Homo sapiens
caagataattgtttg

SEQ ID NO: 1766355 - DNA, 15 bp, Homo sapiens
aagataattgtttga

SEQ ID NO: 1766356 - DNA, 15 bp, Homo sapiens
agataattgtttgaa

SEQ ID NO: 1766357 - DNA, 15 bp, Homo sapiens
gataattgtttgaac

SEQ ID NO: 1766358 - DNA, 15 bp, Homo sapiens
ataattgtttgaacc

SEQ ID NO: 1766359 - DNA, 15 bp, Homo sapiens
taattgtttgaacct

SEQ ID NO: 1766360 - DNA, 15 bp, Homo sapiens
aattgtttgaacctg

SEQ ID NO: 1766361 - DNA, 15 bp, Homo sapiens
attgtttgaacctgg

SEQ ID NO: 1766362 - DNA, 15 bp, Homo sapiens
ttgtttgaacctggg

SEQ ID NO: 1766363 - DNA, 15 bp, Homo sapiens
tgtttgaacctggga

SEQ ID NO: 1766364 - DNA, 15 bp, Homo sapiens
gtttgaacctgggag

SEQ ID NO: 1766365 - DNA, 15 bp, Homo sapiens
tttgaacctgggaga

SEQ ID NO: 1766366 - DNA, 15 bp, Homo sapiens
ttgaacctgggagac

SEQ ID NO: 1766367 - DNA, 15 bp, Homo sapiens
tgaacctgggagaca

SEQ ID NO: 1766368 - DNA, 15 bp, Homo sapiens
gaacctgggagacag

SEQ ID NO: 1766369 - DNA, 15 bp, Homo sapiens
aacctgggagacagc

SEQ ID NO: 1766370 - DNA, 15 bp, Homo sapiens
acctgggagacagcg

SEQ ID NO: 1766371 - DNA, 15 bp, Homo sapiens
cctgggagacagcgg

SEQ ID NO: 1766372 - DNA, 15 bp, Homo sapiens
ctgggagacagcggt

SEQ ID NO: 1766373 - DNA, 15 bp, Homo sapiens
tgggagacagcggtt

SEQ ID NO: 1766374 - DNA, 15 bp, Homo sapiens
gggagacagcggttg

SEQ ID NO: 1766375 - DNA, 15 bp, Homo sapiens
ggagacagcggttgc

SEQ ID NO: 1766376 - DNA, 15 bp, Homo sapiens
gagacagcggttgca

SEQ ID NO: 1766377 - DNA, 15 bp, Homo sapiens
agacagcggttgcag

SEQ ID NO: 1766378 - DNA, 15 bp, Homo sapiens
gacagcggttgcagt

SEQ ID NO: 1766379 - DNA, 15 bp, Homo sapiens
acagcggttgcagtg

SEQ ID NO: 1766380 - DNA, 15 bp, Homo sapiens
cagcggttgcagtga

SEQ ID NO: 1766381 - DNA, 15 bp, Homo sapiens
agcggttgcagtgag

SEQ ID NO: 1766382 - DNA, 15 bp, Homo sapiens
gcggttgcagtgagc

SEQ ID NO: 1766383 - DNA, 15 bp, Homo sapiens
cggttgcagtgagct

SEQ ID NO: 1766384 - DNA, 15 bp, Homo sapiens
agtgagctgagatct

SEQ ID NO: 1766385 - DNA, 15 bp, Homo sapiens
gtgagctgagatctt

SEQ ID NO: 1766386 - DNA, 15 bp, Homo sapiens
tgagctgagatcttg

SEQ ID NO: 1766387 - DNA, 15 bp, Homo sapiens
gagctgagatcttgc

SEQ ID NO: 1766388 - DNA, 15 bp, Homo sapiens
agctgagatcttgcc

SEQ ID NO: 1766389 - DNA, 15 bp, Homo sapiens
gctgagatcttgcca

SEQ ID NO: 1766390 - DNA, 15 bp, Homo sapiens
ctgagatcttgccac

SEQ ID NO: 1766391 - DNA, 15 bp, Homo sapiens
tgagatcttgccact

SEQ ID NO: 1766392 - DNA, 15 bp, Homo sapiens
gagatcttgccactg

SEQ ID NO: 1766393 - DNA, 15 bp, Homo sapiens
agatcttgccactgt

SEQ ID NO: 1766394 - DNA, 15 bp, Homo sapiens
gatcttgccactgta

SEQ ID NO: 1766395 - DNA, 15 bp, Homo sapiens
atcttgccactgtac

SEQ ID NO: 1766396 - DNA, 15 bp, Homo sapiens
tcttgccactgtact

SEQ ID NO: 1766397 - DNA, 15 bp, Homo sapiens
cttgccactgtactc

SEQ ID NO: 1766398 - DNA, 15 bp, Homo sapiens
ttgccactgtactcc

SEQ ID NO: 1766399 - DNA, 15 bp, Homo sapiens
tgccactgtactcca

SEQ ID NO: 1766400 - DNA, 15 bp, Homo sapiens
cagcctgggcaatag

SEQ ID NO: 1766401 - DNA, 15 bp, Homo sapiens
agcctgggcaataga

SEQ ID NO: 1766402 - DNA, 15 bp, Homo sapiens
gcctgggcaatagag

SEQ ID NO: 1766403 - DNA, 15 bp, Homo sapiens
cctgggcaatagagt

SEQ ID NO: 1766404 - DNA, 15 bp, Homo sapiens
ctgggcaatagagtg

SEQ ID NO: 1766405 - DNA, 15 bp, Homo sapiens
tgggcaatagagtga

SEQ ID NO: 1766406 - DNA, 15 bp, Homo sapiens
gggcaatagagtgag

SEQ ID NO: 1766407 - DNA, 15 bp, Homo sapiens
ggcaatagagtgaga

SEQ ID NO: 1766408 - DNA, 15 bp, Homo sapiens
gcaatagagtgagac

SEQ ID NO: 1766409 - DNA, 15 bp, Homo sapiens
caatagagtgagact

SEQ ID NO: 1766410 - DNA, 15 bp, Homo sapiens
aatagagtgagactc

SEQ ID NO: 1766411 - DNA, 15 bp, Homo sapiens
atagagtgagactcc

SEQ ID NO: 1766412 - DNA, 15 bp, Homo sapiens
tagagtgagactcca

SEQ ID NO: 1766413 - DNA, 15 bp, Homo sapiens
agactccatctcaat

SEQ ID NO: 1766414 - DNA, 15 bp, Homo sapiens
gactccatctcaata

SEQ ID NO: 1766415 - DNA, 15 bp, Homo sapiens
actccatctcaataa

SEQ ID NO: 1766416 - DNA, 15 bp, Homo sapiens
ctccatctcaataaa

SEQ ID NO: 1766417 - DNA, 15 bp, Homo sapiens
tccatctcaataaat

SEQ ID NO: 1766418 - DNA, 15 bp, Homo sapiens
ccatctcaataaata

SEQ ID NO: 1766419 - DNA, 15 bp, Homo sapiens
catctcaataaataa

SEQ ID NO: 1766420 - DNA, 15 bp, Homo sapiens
atctcaataaataaa

SEQ ID NO: 1766421 - DNA, 15 bp, Homo sapiens
tctcaataaataaat

SEQ ID NO: 1766422 - DNA, 15 bp, Homo sapiens
ctcaataaataaata

SEQ ID NO: 1766423 - DNA, 15 bp, Homo sapiens
tcaataaataaataa

SEQ ID NO: 1766424 - DNA, 15 bp, Homo sapiens
ataaataaataaagg

SEQ ID NO: 1766425 - DNA, 15 bp, Homo sapiens
taaataaataaaggg

SEQ ID NO: 1766426 - DNA, 15 bp, Homo sapiens
aaataaataaagggc

SEQ ID NO: 1766427 - DNA, 15 bp, Homo sapiens
aataaataaagggct

SEQ ID NO: 1766428 - DNA, 15 bp, Homo sapiens
ataaataaagggctg

SEQ ID NO: 1766429 - DNA, 15 bp, Homo sapiens
taaataaagggctgg

SEQ ID NO: 1766430 - DNA, 15 bp, Homo sapiens
aaataaagggctggg

SEQ ID NO: 1766431 - DNA, 15 bp, Homo sapiens
aataaagggctgggc

SEQ ID NO: 1766432 - DNA, 15 bp, Homo sapiens
ataaagggctgggcc

SEQ ID NO: 1766433 - DNA, 15 bp, Homo sapiens
taaagggctgggccc

SEQ ID NO: 1766434 - DNA, 15 bp, Homo sapiens
aaagggctgggcccg

SEQ ID NO: 1766435 - DNA, 15 bp, Homo sapiens
aagggctgggcccgg

SEQ ID NO: 1766436 - DNA, 15 bp, Homo sapiens
agggctgggcccggt

SEQ ID NO: 1766437 - DNA, 15 bp, Homo sapiens
gggctgggcccggtg

SEQ ID NO: 1766438 - DNA, 15 bp, Homo sapiens
ggctgggcccggtgg

SEQ ID NO: 1766439 - DNA, 15 bp, Homo sapiens
gctgggcccggtggc

SEQ ID NO: 1766440 - DNA, 15 bp, Homo sapiens
ctgggcccggtggct

SEQ ID NO: 1766441 - DNA, 15 bp, Homo sapiens
tgggcccggtggctc

SEQ ID NO: 1766442 - DNA, 15 bp, Homo sapiens
gggcccggtggctca

SEQ ID NO: 1766443 - DNA, 15 bp, Homo sapiens
gcccggtggctcacg

SEQ ID NO: 1766444 - DNA, 15 bp, Homo sapiens
cccggtggctcacgc

SEQ ID NO: 1766445 - DNA, 15 bp, Homo sapiens
ccggtggctcacgcc

SEQ ID NO: 1766446 - DNA, 15 bp, Homo sapiens
gcactttgggaggtt

SEQ ID NO: 1766447 - DNA, 15 bp, Homo sapiens
gcgggcagatcacga

SEQ ID NO: 1766448 - DNA, 15 bp, Homo sapiens
cgggcagatcacgag

SEQ ID NO: 1766449 - DNA, 15 bp, Homo sapiens
ggcagatcacgaggt

SEQ ID NO: 1766450 - DNA, 15 bp, Homo sapiens
gcagatcacgaggtc

SEQ ID NO: 1766451 - DNA, 15 bp, Homo sapiens
cagatcacgaggtca

SEQ ID NO: 1766452 - DNA, 15 bp, Homo sapiens
aggtcaggagattgt

SEQ ID NO: 1766453 - DNA, 15 bp, Homo sapiens
ggtcaggagattgtg

SEQ ID NO: 1766454 - DNA, 15 bp, Homo sapiens
gtcaggagattgtga

SEQ ID NO: 1766455 - DNA, 15 bp, Homo sapiens
tcaggagattgtgac

SEQ ID NO: 1766456 - DNA, 15 bp, Homo sapiens
caggagattgtgacc

SEQ ID NO: 1766457 - DNA, 15 bp, Homo sapiens
aggagattgtgacca

SEQ ID NO: 1766458 - DNA, 15 bp, Homo sapiens
ggagattgtgaccat

SEQ ID NO: 1766459 - DNA, 15 bp, Homo sapiens
gagattgtgaccatc

SEQ ID NO: 1766460 - DNA, 15 bp, Homo sapiens
agattgtgaccatcc

SEQ ID NO: 1766461 - DNA, 15 bp, Homo sapiens
gattgtgaccatcct

SEQ ID NO: 1766462 - DNA, 15 bp, Homo sapiens
attgtgaccatcctg

SEQ ID NO: 1766463 - DNA, 15 bp, Homo sapiens
ttgtgaccatcctgg

SEQ ID NO: 1766464 - DNA, 15 bp, Homo sapiens
tgtgaccatcctggc

SEQ ID NO: 1766465 - DNA, 15 bp, Homo sapiens
gtgaccatcctggct

SEQ ID NO: 1766466 - DNA, 15 bp, Homo sapiens
tgaccatcctggcta

SEQ ID NO: 1766467 - DNA, 15 bp, Homo sapiens
accatcctggctaat

SEQ ID NO: 1766468 - DNA, 15 bp, Homo sapiens
ccatcctggctaatg

SEQ ID NO: 1766469 - DNA, 15 bp, Homo sapiens
catcctggctaatgc

SEQ ID NO: 1766470 - DNA, 15 bp, Homo sapiens
atcctggctaatgca

SEQ ID NO: 1766471 - DNA, 15 bp, Homo sapiens
tcctggctaatgcag

SEQ ID NO: 1766472 - DNA, 15 bp, Homo sapiens
cctggctaatgcagt

SEQ ID NO: 1766473 - DNA, 15 bp, Homo sapiens
ctggctaatgcagtg

SEQ ID NO: 1766474 - DNA, 15 bp, Homo sapiens
tggctaatgcagtga

SEQ ID NO: 1766475 - DNA, 15 bp, Homo sapiens
ggctaatgcagtgaa

SEQ ID NO: 1766476 - DNA, 15 bp, Homo sapiens
gctaatgcagtgaaa

SEQ ID NO: 1766477 - DNA, 15 bp, Homo sapiens
ctaatgcagtgaaac

SEQ ID NO: 1766478 - DNA, 15 bp, Homo sapiens
taatgcagtgaaacc

SEQ ID NO: 1766479 - DNA, 15 bp, Homo sapiens
aatgcagtgaaaccc

SEQ ID NO: 1766480 - DNA, 15 bp, Homo sapiens
atgcagtgaaacccc

SEQ ID NO: 1766481 - DNA, 15 bp, Homo sapiens
tgcagtgaaacccca

SEQ ID NO: 1766482 - DNA, 15 bp, Homo sapiens
gcagtgaaaccccat

SEQ ID NO: 1766483 - DNA, 15 bp, Homo sapiens
cagtgaaaccccatc

SEQ ID NO: 1766484 - DNA, 15 bp, Homo sapiens
aaatacaaaaaaaat

SEQ ID NO: 1766485 - DNA, 15 bp, Homo sapiens
aatacaaaaaaaatt

SEQ ID NO: 1766486 - DNA, 15 bp, Homo sapiens
atacaaaaaaaatta

SEQ ID NO: 1766487 - DNA, 15 bp, Homo sapiens
tacaaaaaaaattag

SEQ ID NO: 1766488 - DNA, 15 bp, Homo sapiens
acaaaaaaaattagt

SEQ ID NO: 1766489 - DNA, 15 bp, Homo sapiens
caaaaaaaattagtt

SEQ ID NO: 1766490 - DNA, 15 bp, Homo sapiens
aaaaaaaattagttg

SEQ ID NO: 1766491 - DNA, 15 bp, Homo sapiens
aaaaaaattagttgg

SEQ ID NO: 1766492 - DNA, 15 bp, Homo sapiens
aaaaaattagttggg

SEQ ID NO: 1766493 - DNA, 15 bp, Homo sapiens
aaaaattagttgggc

SEQ ID NO: 1766494 - DNA, 15 bp, Homo sapiens
gttgggcatggtggc

SEQ ID NO: 1766495 - DNA, 15 bp, Homo sapiens
ttgggcatggtggcc

SEQ ID NO: 1766496 - DNA, 15 bp, Homo sapiens
tgggcatggtggccg

SEQ ID NO: 1766497 - DNA, 15 bp, Homo sapiens
gggcatggtggccgg

SEQ ID NO: 1766498 - DNA, 15 bp, Homo sapiens
ggcatggtggccggc

SEQ ID NO: 1766499 - DNA, 15 bp, Homo sapiens
gcatggtggccggcg

SEQ ID NO: 1766500 - DNA, 15 bp, Homo sapiens
catggtggccggcgc

SEQ ID NO: 1766501 - DNA, 15 bp, Homo sapiens
atggtggccggcgcc

SEQ ID NO: 1766502 - DNA, 15 bp, Homo sapiens
tggtggccggcgcct

SEQ ID NO: 1766503 - DNA, 15 bp, Homo sapiens
ggtggccggcgcctg

SEQ ID NO: 1766504 - DNA, 15 bp, Homo sapiens
gtggccggcgcctgc

SEQ ID NO: 1766505 - DNA, 15 bp, Homo sapiens
tggccggcgcctgca

SEQ ID NO: 1766506 - DNA, 15 bp, Homo sapiens
ggccggcgcctgcag

SEQ ID NO: 1766507 - DNA, 15 bp, Homo sapiens
gccggcgcctgcagt

SEQ ID NO: 1766508 - DNA, 15 bp, Homo sapiens
ccggcgcctgcagtc

SEQ ID NO: 1766509 - DNA, 15 bp, Homo sapiens
cggcgcctgcagtcc

SEQ ID NO: 1766510 - DNA, 15 bp, Homo sapiens
ggcgcctgcagtccc

SEQ ID NO: 1766511 - DNA, 15 bp, Homo sapiens
gcgcctgcagtccca

SEQ ID NO: 1766512 - DNA, 15 bp, Homo sapiens
cgcctgcagtcccag

SEQ ID NO: 1766513 - DNA, 15 bp, Homo sapiens
gcctgcagtcccagc

SEQ ID NO: 1766514 - DNA, 15 bp, Homo sapiens
cctgcagtcccagct

SEQ ID NO: 1766515 - DNA, 15 bp, Homo sapiens
ctgcagtcccagcta

SEQ ID NO: 1766516 - DNA, 15 bp, Homo sapiens
tgcagtcccagctac

SEQ ID NO: 1766517 - DNA, 15 bp, Homo sapiens
aagctgaggcaggat

SEQ ID NO: 1766518 - DNA, 15 bp, Homo sapiens
agctgaggcaggata

SEQ ID NO: 1766519 - DNA, 15 bp, Homo sapiens
tgaggcaggataatg

SEQ ID NO: 1766520 - DNA, 15 bp, Homo sapiens
gaggcaggataatgg

SEQ ID NO: 1766521 - DNA, 15 bp, Homo sapiens
aggcaggataatggc

SEQ ID NO: 1766522 - DNA, 15 bp, Homo sapiens
ggcaggataatggca

SEQ ID NO: 1766523 - DNA, 15 bp, Homo sapiens
gcaggataatggcat

SEQ ID NO: 1766524 - DNA, 15 bp, Homo sapiens
caggataatggcatg

SEQ ID NO: 1766525 - DNA, 15 bp, Homo sapiens
aggataatggcatga

SEQ ID NO: 1766526 - DNA, 15 bp, Homo sapiens
ggataatggcatgaa

SEQ ID NO: 1766527 - DNA, 15 bp, Homo sapiens
gataatggcatgaac

SEQ ID NO: 1766528 - DNA, 15 bp, Homo sapiens
ataatggcatgaacc

SEQ ID NO: 1766529 - DNA, 15 bp, Homo sapiens
taatggcatgaacct

SEQ ID NO: 1766530 - DNA, 15 bp, Homo sapiens
aatggcatgaacctg

SEQ ID NO: 1766531 - DNA, 15 bp, Homo sapiens
atggcatgaacctgg

SEQ ID NO: 1766532 - DNA, 15 bp, Homo sapiens
tggcatgaacctggg

SEQ ID NO: 1766533 - DNA, 15 bp, Homo sapiens
ggcatgaacctggga

SEQ ID NO: 1766534 - DNA, 15 bp, Homo sapiens
gcatgaacctgggag

SEQ ID NO: 1766535 - DNA, 15 bp, Homo sapiens
catgaacctgggagg

SEQ ID NO: 1766536 - DNA, 15 bp, Homo sapiens
atgaacctgggaggt

SEQ ID NO: 1766537 - DNA, 15 bp, Homo sapiens
gcagtgagccgagac

SEQ ID NO: 1766538 - DNA, 15 bp, Homo sapiens
cagtgagccgagact

SEQ ID NO: 1766539 - DNA, 15 bp, Homo sapiens
agtgagccgagactg

SEQ ID NO: 1766540 - DNA, 15 bp, Homo sapiens
gtgagccgagactgc

SEQ ID NO: 1766541 - DNA, 15 bp, Homo sapiens
tgagccgagactgcg

SEQ ID NO: 1766542 - DNA, 15 bp, Homo sapiens
gagccgagactgcgc

SEQ ID NO: 1766543 - DNA, 15 bp, Homo sapiens
agccgagactgcgcc

SEQ ID NO: 1766544 - DNA, 15 bp, Homo sapiens
gccgagactgcgcca

SEQ ID NO: 1766545 - DNA, 15 bp, Homo sapiens
ccgagactgcgccac

SEQ ID NO: 1766546 - DNA, 15 bp, Homo sapiens
cgagactgcgccact

SEQ ID NO: 1766547 - DNA, 15 bp, Homo sapiens
gagactgcgccactg

SEQ ID NO: 1766548 - DNA, 15 bp, Homo sapiens
agactgcgccactgc

SEQ ID NO: 1766549 - DNA, 15 bp, Homo sapiens
gactgcgccactgca

SEQ ID NO: 1766550 - DNA, 15 bp, Homo sapiens
actgcgccactgcac

SEQ ID NO: 1766551 - DNA, 15 bp, Homo sapiens
ctgcgccactgcact

SEQ ID NO: 1766552 - DNA, 15 bp, Homo sapiens
gggcaacagagcgat

SEQ ID NO: 1766553 - DNA, 15 bp, Homo sapiens
ggcaacagagcgata

SEQ ID NO: 1766554 - DNA, 15 bp, Homo sapiens
gcaacagagcgatac

SEQ ID NO: 1766555 - DNA, 15 bp, Homo sapiens
caacagagcgatact

SEQ ID NO: 1766556 - DNA, 15 bp, Homo sapiens
aacagagcgatactt

SEQ ID NO: 1766557 - DNA, 15 bp, Homo sapiens
acagagcgatacttc

SEQ ID NO: 1766558 - DNA, 15 bp, Homo sapiens
cagagcgatacttcg

SEQ ID NO: 1766559 - DNA, 15 bp, Homo sapiens
agagcgatacttcgt

SEQ ID NO: 1766560 - DNA, 15 bp, Homo sapiens
gagcgatacttcgtc

SEQ ID NO: 1766561 - DNA, 15 bp, Homo sapiens
agcgatacttcgtct

SEQ ID NO: 1766562 - DNA, 15 bp, Homo sapiens
gcgatacttcgtctc

SEQ ID NO: 1766563 - DNA, 15 bp, Homo sapiens
cgatacttcgtctca

SEQ ID NO: 1766564 - DNA, 15 bp, Homo sapiens
gatacttcgtctcaa

SEQ ID NO: 1766565 - DNA, 15 bp, Homo sapiens
atacttcgtctcaat

SEQ ID NO: 1766566 - DNA, 15 bp, Homo sapiens
tacttcgtctcaata

SEQ ID NO: 1766567 - DNA, 15 bp, Homo sapiens
acttcgtctcaataa

SEQ ID NO: 1766568 - DNA, 15 bp, Homo sapiens
cttcgtctcaataat

SEQ ID NO: 1766569 - DNA, 15 bp, Homo sapiens
ttcgtctcaataata

SEQ ID NO: 1766570 - DNA, 15 bp, Homo sapiens
tcgtctcaataataa

SEQ ID NO: 1766571 - DNA, 15 bp, Homo sapiens
cgtctcaataataat

SEQ ID NO: 1766572 - DNA, 15 bp, Homo sapiens
gtctcaataataata

SEQ ID NO: 1766573 - DNA, 15 bp, Homo sapiens
tctcaataataataa

SEQ ID NO: 1766574 - DNA, 15 bp, Homo sapiens
ctcaataataataat

SEQ ID NO: 1766575 - DNA, 15 bp, Homo sapiens
tcaataataataata

SEQ ID NO: 1766576 - DNA, 15 bp, Homo sapiens
caataataataataa

SEQ ID NO: 1766577 - DNA, 15 bp, Homo sapiens
taataataataatat

SEQ ID NO: 1766578 - DNA, 15 bp, Homo sapiens
aataataataatatt

SEQ ID NO: 1766579 - DNA, 15 bp, Homo sapiens
ataataataatattt

SEQ ID NO: 1766580 - DNA, 15 bp, Homo sapiens
taataataatatttc

SEQ ID NO: 1766581 - DNA, 15 bp, Homo sapiens
aataataatatttca

SEQ ID NO: 1766582 - DNA, 15 bp, Homo sapiens
ataataatatttcaa

SEQ ID NO: 1766583 - DNA, 15 bp, Homo sapiens
taataatatttcaac

SEQ ID NO: 1766584 - DNA, 15 bp, Homo sapiens
aataatatttcaaca

SEQ ID NO: 1766585 - DNA, 15 bp, Homo sapiens
ataatatttcaacaa

SEQ ID NO: 1766586 - DNA, 15 bp, Homo sapiens
taatatttcaacaaa

SEQ ID NO: 1766587 - DNA, 15 bp, Homo sapiens
aatatttcaacaaaa

SEQ ID NO: 1766588 - DNA, 15 bp, Homo sapiens
atatttcaacaaaag

SEQ ID NO: 1766589 - DNA, 15 bp, Homo sapiens
tatttcaacaaaaga

SEQ ID NO: 1766590 - DNA, 15 bp, Homo sapiens
atttcaacaaaagat

SEQ ID NO: 1766591 - DNA, 15 bp, Homo sapiens
tttcaacaaaagatc

SEQ ID NO: 1766592 - DNA, 15 bp, Homo sapiens
ttcaacaaaagatct

SEQ ID NO: 1766593 - DNA, 15 bp, Homo sapiens
tcaacaaaagatctc

SEQ ID NO: 1766594 - DNA, 15 bp, Homo sapiens
caacaaaagatctct

SEQ ID NO: 1766595 - DNA, 15 bp, Homo sapiens
aacaaaagatctctt

SEQ ID NO: 1766596 - DNA, 15 bp, Homo sapiens
acaaaagatctcttt

SEQ ID NO: 1766597 - DNA, 15 bp, Homo sapiens
caaaagatctctttg

SEQ ID NO: 1766598 - DNA, 15 bp, Homo sapiens
aaaagatctctttgg

SEQ ID NO: 1766599 - DNA, 15 bp, Homo sapiens
aaagatctctttggc

SEQ ID NO: 1766600 - DNA, 15 bp, Homo sapiens
aagatctctttggct

SEQ ID NO: 1766601 - DNA, 15 bp, Homo sapiens
agatctctttggctc

SEQ ID NO: 1766602 - DNA, 15 bp, Homo sapiens
gatctctttggctct

SEQ ID NO: 1766603 - DNA, 15 bp, Homo sapiens
atctctttggctctg

SEQ ID NO: 1766604 - DNA, 15 bp, Homo sapiens
tctctttggctctgc

SEQ ID NO: 1766605 - DNA, 15 bp, Homo sapiens
ctctttggctctgca

SEQ ID NO: 1766606 - DNA, 15 bp, Homo sapiens
tctttggctctgcac

SEQ ID NO: 1766607 - DNA, 15 bp, Homo sapiens
ctttggctctgcaca

SEQ ID NO: 1766608 - DNA, 15 bp, Homo sapiens
tttggctctgcacaa

SEQ ID NO: 1766609 - DNA, 15 bp, Homo sapiens
ttggctctgcacaag

SEQ ID NO: 1766610 - DNA, 15 bp, Homo sapiens
tggctctgcacaagc

SEQ ID NO: 1766611 - DNA, 15 bp, Homo sapiens
ggctctgcacaagcc

SEQ ID NO: 1766612 - DNA, 15 bp, Homo sapiens
gctctgcacaagcca

SEQ ID NO: 1766613 - DNA, 15 bp, Homo sapiens
ctctgcacaagccat

SEQ ID NO: 1766614 - DNA, 15 bp, Homo sapiens
tctgcacaagccatc

SEQ ID NO: 1766615 - DNA, 15 bp, Homo sapiens
ctgcacaagccatct

SEQ ID NO: 1766616 - DNA, 15 bp, Homo sapiens
tgcacaagccatctc

SEQ ID NO: 1766617 - DNA, 15 bp, Homo sapiens
gcacaagccatctca

SEQ ID NO: 1766618 - DNA, 15 bp, Homo sapiens
cacaagccatctcat

SEQ ID NO: 1766619 - DNA, 15 bp, Homo sapiens
acaagccatctcatc

SEQ ID NO: 1766620 - DNA, 15 bp, Homo sapiens
caagccatctcatca

SEQ ID NO: 1766621 - DNA, 15 bp, Homo sapiens
aagccatctcatcag

SEQ ID NO: 1766622 - DNA, 15 bp, Homo sapiens
agccatctcatcagt

SEQ ID NO: 1766623 - DNA, 15 bp, Homo sapiens
gccatctcatcagta

SEQ ID NO: 1766624 - DNA, 15 bp, Homo sapiens
ccatctcatcagtag

SEQ ID NO: 1766625 - DNA, 15 bp, Homo sapiens
catctcatcagtaga

SEQ ID NO: 1766626 - DNA, 15 bp, Homo sapiens
atctcatcagtagat

SEQ ID NO: 1766627 - DNA, 15 bp, Homo sapiens
tctcatcagtagatt

SEQ ID NO: 1766628 - DNA, 15 bp, Homo sapiens
ctcatcagtagattt

SEQ ID NO: 1766629 - DNA, 15 bp, Homo sapiens
tcatcagtagatttc

SEQ ID NO: 1766630 - DNA, 15 bp, Homo sapiens
catcagtagatttct

SEQ ID NO: 1766631 - DNA, 15 bp, Homo sapiens
atcagtagatttctc

SEQ ID NO: 1766632 - DNA, 15 bp, Homo sapiens
tcagtagatttctct

SEQ ID NO: 1766633 - DNA, 15 bp, Homo sapiens
cagtagatttctctt

SEQ ID NO: 1766634 - DNA, 15 bp, Homo sapiens
agtagatttctcttg

SEQ ID NO: 1766635 - DNA, 15 bp, Homo sapiens
gtagatttctcttgc

SEQ ID NO: 1766636 - DNA, 15 bp, Homo sapiens
tagatttctcttgct

SEQ ID NO: 1766637 - DNA, 15 bp, Homo sapiens
agatttctcttgcta

SEQ ID NO: 1766638 - DNA, 15 bp, Homo sapiens
gatttctcttgctat

SEQ ID NO: 1766639 - DNA, 15 bp, Homo sapiens
atttctcttgctatc

SEQ ID NO: 1766640 - DNA, 15 bp, Homo sapiens
tttctcttgctatct

SEQ ID NO: 1766641 - DNA, 15 bp, Homo sapiens
ttctcttgctatctt

SEQ ID NO: 1766642 - DNA, 15 bp, Homo sapiens
tctcttgctatcttc

SEQ ID NO: 1766643 - DNA, 15 bp, Homo sapiens
ctcttgctatcttcc

SEQ ID NO: 1766644 - DNA, 15 bp, Homo sapiens
tcttgctatcttccc

SEQ ID NO: 1766645 - DNA, 15 bp, Homo sapiens
cttgctatcttccca

SEQ ID NO: 1766646 - DNA, 15 bp, Homo sapiens
ttgctatcttcccag

SEQ ID NO: 1766647 - DNA, 15 bp, Homo sapiens
tgctatcttcccaga

SEQ ID NO: 1766648 - DNA, 15 bp, Homo sapiens
gctatcttcccagat

SEQ ID NO: 1766649 - DNA, 15 bp, Homo sapiens
ctatcttcccagata

SEQ ID NO: 1766650 - DNA, 15 bp, Homo sapiens
tatcttcccagatag

SEQ ID NO: 1766651 - DNA, 15 bp, Homo sapiens
atcttcccagatagt

SEQ ID NO: 1766652 - DNA, 15 bp, Homo sapiens
tcttcccagatagtt

SEQ ID NO: 1766653 - DNA, 15 bp, Homo sapiens
cttcccagatagttc

SEQ ID NO: 1766654 - DNA, 15 bp, Homo sapiens
ttcccagatagttca

SEQ ID NO: 1766655 - DNA, 15 bp, Homo sapiens
tcccagatagttcag

SEQ ID NO: 1766656 - DNA, 15 bp, Homo sapiens
cccagatagttcaga

SEQ ID NO: 1766657 - DNA, 15 bp, Homo sapiens
ccagatagttcagaa

SEQ ID NO: 1766658 - DNA, 15 bp, Homo sapiens
cagatagttcagaac

SEQ ID NO: 1766659 - DNA, 15 bp, Homo sapiens
agatagttcagaact

SEQ ID NO: 1766660 - DNA, 15 bp, Homo sapiens
gatagttcagaactt

SEQ ID NO: 1766661 - DNA, 15 bp, Homo sapiens
atagttcagaacttc

SEQ ID NO: 1766662 - DNA, 15 bp, Homo sapiens
tagttcagaacttcc

SEQ ID NO: 1766663 - DNA, 15 bp, Homo sapiens
agttcagaacttcct

SEQ ID NO: 1766664 - DNA, 15 bp, Homo sapiens
gttcagaacttcctg

SEQ ID NO: 1766665 - DNA, 15 bp, Homo sapiens
ttcagaacttcctgc

SEQ ID NO: 1766666 - DNA, 15 bp, Homo sapiens
tcagaacttcctgcc

SEQ ID NO: 1766667 - DNA, 15 bp, Homo sapiens
cagaacttcctgcct

SEQ ID NO: 1766668 - DNA, 15 bp, Homo sapiens
agaacttcctgccta

SEQ ID NO: 1766669 - DNA, 15 bp, Homo sapiens
gaacttcctgcctat

SEQ ID NO: 1766670 - DNA, 15 bp, Homo sapiens
aacttcctgcctatt

SEQ ID NO: 1766671 - DNA, 15 bp, Homo sapiens
acttcctgcctattt

SEQ ID NO: 1766672 - DNA, 15 bp, Homo sapiens
cttcctgcctatttc

SEQ ID NO: 1766673 - DNA, 15 bp, Homo sapiens
ttcctgcctatttct

SEQ ID NO: 1766674 - DNA, 15 bp, Homo sapiens
tcctgcctatttctc

SEQ ID NO: 1766675 - DNA, 15 bp, Homo sapiens
cctgcctatttctct

SEQ ID NO: 1766676 - DNA, 15 bp, Homo sapiens
ctgcctatttctctg

SEQ ID NO: 1766677 - DNA, 15 bp, Homo sapiens
tgcctatttctctgt

SEQ ID NO: 1766678 - DNA, 15 bp, Homo sapiens
gcctatttctctgtt

SEQ ID NO: 1766679 - DNA, 15 bp, Homo sapiens
cctatttctctgtta

SEQ ID NO: 1766680 - DNA, 15 bp, Homo sapiens
ctatttctctgttat

SEQ ID NO: 1766681 - DNA, 15 bp, Homo sapiens
tatttctctgttatg

SEQ ID NO: 1766682 - DNA, 15 bp, Homo sapiens
atttctctgttatga

SEQ ID NO: 1766683 - DNA, 15 bp, Homo sapiens
tttctctgttatgag

SEQ ID NO: 1766684 - DNA, 15 bp, Homo sapiens
ttctctgttatgagt

SEQ ID NO: 1766685 - DNA, 15 bp, Homo sapiens
tctctgttatgagtc

SEQ ID NO: 1766686 - DNA, 15 bp, Homo sapiens
ctctgttatgagtcc

SEQ ID NO: 1766687 - DNA, 15 bp, Homo sapiens
tctgttatgagtccc

SEQ ID NO: 1766688 - DNA, 15 bp, Homo sapiens
ctgttatgagtccca

SEQ ID NO: 1766689 - DNA, 15 bp, Homo sapiens
tgttatgagtcccaa

SEQ ID NO: 1766690 - DNA, 15 bp, Homo sapiens
gttatgagtcccaac

SEQ ID NO: 1766691 - DNA, 15 bp, Homo sapiens
ttatgagtcccaact

SEQ ID NO: 1766692 - DNA, 15 bp, Homo sapiens
tatgagtcccaactt

SEQ ID NO: 1766693 - DNA, 15 bp, Homo sapiens
atgagtcccaacttc

SEQ ID NO: 1766694 - DNA, 15 bp, Homo sapiens
tgagtcccaacttct

SEQ ID NO: 1766695 - DNA, 15 bp, Homo sapiens
gagtcccaacttctc

SEQ ID NO: 1766696 - DNA, 15 bp, Homo sapiens
agtcccaacttctca

SEQ ID NO: 1766697 - DNA, 15 bp, Homo sapiens
gtcccaacttctcag

SEQ ID NO: 1766698 - DNA, 15 bp, Homo sapiens
tcccaacttctcagc

SEQ ID NO: 1766699 - DNA, 15 bp, Homo sapiens
cccaacttctcagcc

SEQ ID NO: 1766700 - DNA, 15 bp, Homo sapiens
ccaacttctcagcct

SEQ ID NO: 1766701 - DNA, 15 bp, Homo sapiens
caacttctcagcctc

SEQ ID NO: 1766702 - DNA, 15 bp, Homo sapiens
aacttctcagcctcc

SEQ ID NO: 1766703 - DNA, 15 bp, Homo sapiens
acttctcagcctcct

SEQ ID NO: 1766704 - DNA, 15 bp, Homo sapiens
cttctcagcctcctt

SEQ ID NO: 1766705 - DNA, 15 bp, Homo sapiens
ttctcagcctccttg

SEQ ID NO: 1766706 - DNA, 15 bp, Homo sapiens
tctcagcctccttgg

SEQ ID NO: 1766707 - DNA, 15 bp, Homo sapiens
ctcagcctccttgga

SEQ ID NO: 1766708 - DNA, 15 bp, Homo sapiens
tcagcctccttggat

SEQ ID NO: 1766709 - DNA, 15 bp, Homo sapiens
cagcctccttggata

SEQ ID NO: 1766710 - DNA, 15 bp, Homo sapiens
agcctccttggatag

SEQ ID NO: 1766711 - DNA, 15 bp, Homo sapiens
gcctccttggatagg

SEQ ID NO: 1766712 - DNA, 15 bp, Homo sapiens
cctccttggatagga

SEQ ID NO: 1766713 - DNA, 15 bp, Homo sapiens
ctccttggataggaa

SEQ ID NO: 1766714 - DNA, 15 bp, Homo sapiens
tccttggataggaaa

SEQ ID NO: 1766715 - DNA, 15 bp, Homo sapiens
ccttggataggaaag

SEQ ID NO: 1766716 - DNA, 15 bp, Homo sapiens
cttggataggaaagg

SEQ ID NO: 1766717 - DNA, 15 bp, Homo sapiens
ttggataggaaaggc

SEQ ID NO: 1766718 - DNA, 15 bp, Homo sapiens
tggataggaaaggcc

SEQ ID NO: 1766719 - DNA, 15 bp, Homo sapiens
ggataggaaaggcct

SEQ ID NO: 1766720 - DNA, 15 bp, Homo sapiens
gataggaaaggcctg

SEQ ID NO: 1766721 - DNA, 15 bp, Homo sapiens
ataggaaaggcctgg

SEQ ID NO: 1766722 - DNA, 15 bp, Homo sapiens
taggaaaggcctggg

SEQ ID NO: 1766723 - DNA, 15 bp, Homo sapiens
aggaaaggcctggga

SEQ ID NO: 1766724 - DNA, 15 bp, Homo sapiens
ggaaaggcctgggag

SEQ ID NO: 1766725 - DNA, 15 bp, Homo sapiens
gaaaggcctgggagg

SEQ ID NO: 1766726 - DNA, 15 bp, Homo sapiens
aaaggcctgggaggt

SEQ ID NO: 1766727 - DNA, 15 bp, Homo sapiens
aaggcctgggaggtc

SEQ ID NO: 1766728 - DNA, 15 bp, Homo sapiens
aggcctgggaggtct

SEQ ID NO: 1766729 - DNA, 15 bp, Homo sapiens
ggcctgggaggtcta

SEQ ID NO: 1766730 - DNA, 15 bp, Homo sapiens
gcctgggaggtctat

SEQ ID NO: 1766731 - DNA, 15 bp, Homo sapiens
cctgggaggtctatt

SEQ ID NO: 1766732 - DNA, 15 bp, Homo sapiens
ctgggaggtctattc

SEQ ID NO: 1766733 - DNA, 15 bp, Homo sapiens
tgggaggtctattct

SEQ ID NO: 1766734 - DNA, 15 bp, Homo sapiens
gggaggtctattctg

SEQ ID NO: 1766735 - DNA, 15 bp, Homo sapiens
ggaggtctattctgt

SEQ ID NO: 1766736 - DNA, 15 bp, Homo sapiens
gaggtctattctgtc

SEQ ID NO: 1766737 - DNA, 15 bp, Homo sapiens
aggtctattctgtct

SEQ ID NO: 1766738 - DNA, 15 bp, Homo sapiens
ggtctattctgtctc

SEQ ID NO: 1766739 - DNA, 15 bp, Homo sapiens
gtctattctgtctcc

SEQ ID NO: 1766740 - DNA, 15 bp, Homo sapiens
tctattctgtctcca

SEQ ID NO: 1766741 - DNA, 15 bp, Homo sapiens
ctattctgtctccat

SEQ ID NO: 1766742 - DNA, 15 bp, Homo sapiens
tattctgtctccatg

SEQ ID NO: 1766743 - DNA, 15 bp, Homo sapiens
attctgtctccatga

SEQ ID NO: 1766744 - DNA, 15 bp, Homo sapiens
ttctgtctccatgaa

SEQ ID NO: 1766745 - DNA, 15 bp, Homo sapiens
tctgtctccatgaac

SEQ ID NO: 1766746 - DNA, 15 bp, Homo sapiens
ctgtctccatgaact

SEQ ID NO: 1766747 - DNA, 15 bp, Homo sapiens
tgtctccatgaactc

SEQ ID NO: 1766748 - DNA, 15 bp, Homo sapiens
gtctccatgaactct

SEQ ID NO: 1766749 - DNA, 15 bp, Homo sapiens
tctccatgaactctg

SEQ ID NO: 1766750 - DNA, 15 bp, Homo sapiens
ctccatgaactctgg

SEQ ID NO: 1766751 - DNA, 15 bp, Homo sapiens
tccatgaactctggg

SEQ ID NO: 1766752 - DNA, 15 bp, Homo sapiens
ccatgaactctgggc

SEQ ID NO: 1766753 - DNA, 15 bp, Homo sapiens
catgaactctgggcc

SEQ ID NO: 1766754 - DNA, 15 bp, Homo sapiens
atgaactctgggcct

SEQ ID NO: 1766755 - DNA, 15 bp, Homo sapiens
tgaactctgggccta

SEQ ID NO: 1766756 - DNA, 15 bp, Homo sapiens
gaactctgggcctat

SEQ ID NO: 1766757 - DNA, 15 bp, Homo sapiens
aactctgggcctatg

SEQ ID NO: 1766758 - DNA, 15 bp, Homo sapiens
actctgggcctatgg

SEQ ID NO: 1766759 - DNA, 15 bp, Homo sapiens
ctctgggcctatggt

SEQ ID NO: 1766760 - DNA, 15 bp, Homo sapiens
tctgggcctatggta

SEQ ID NO: 1766761 - DNA, 15 bp, Homo sapiens
ctgggcctatggtaa

SEQ ID NO: 1766762 - DNA, 15 bp, Homo sapiens
tgggcctatggtaaa

SEQ ID NO: 1766763 - DNA, 15 bp, Homo sapiens
gggcctatggtaaac

SEQ ID NO: 1766764 - DNA, 15 bp, Homo sapiens
ggcctatggtaaact

SEQ ID NO: 1766765 - DNA, 15 bp, Homo sapiens
gcctatggtaaactt

SEQ ID NO: 1766766 - DNA, 15 bp, Homo sapiens
cctatggtaaacttg

SEQ ID NO: 1766767 - DNA, 15 bp, Homo sapiens
ctatggtaaacttgt

SEQ ID NO: 1766768 - DNA, 15 bp, Homo sapiens
tatggtaaacttgtg

SEQ ID NO: 1766769 - DNA, 15 bp, Homo sapiens
atggtaaacttgtgt

SEQ ID NO: 1766770 - DNA, 15 bp, Homo sapiens
tggtaaacttgtgtc

SEQ ID NO: 1766771 - DNA, 15 bp, Homo sapiens
ggtaaacttgtgtcc

SEQ ID NO: 1766772 - DNA, 15 bp, Homo sapiens
gtaaacttgtgtcca

SEQ ID NO: 1766773 - DNA, 15 bp, Homo sapiens
taaacttgtgtccaa

SEQ ID NO: 1766774 - DNA, 15 bp, Homo sapiens
aaacttgtgtccaat

SEQ ID NO: 1766775 - DNA, 15 bp, Homo sapiens
aacttgtgtccaata

SEQ ID NO: 1766776 - DNA, 15 bp, Homo sapiens
acttgtgtccaatat

SEQ ID NO: 1766777 - DNA, 15 bp, Homo sapiens
cttgtgtccaatatg

SEQ ID NO: 1766778 - DNA, 15 bp, Homo sapiens
ttgtgtccaatatga

SEQ ID NO: 1766779 - DNA, 15 bp, Homo sapiens
tgtgtccaatatgac

SEQ ID NO: 1766780 - DNA, 15 bp, Homo sapiens
gtgtccaatatgact

SEQ ID NO: 1766781 - DNA, 15 bp, Homo sapiens
tgtccaatatgactg

SEQ ID NO: 1766782 - DNA, 15 bp, Homo sapiens
gtccaatatgactga

SEQ ID NO: 1766783 - DNA, 15 bp, Homo sapiens
tccaatatgactgag

SEQ ID NO: 1766784 - DNA, 15 bp, Homo sapiens
ccaatatgactgagg

SEQ ID NO: 1766785 - DNA, 15 bp, Homo sapiens
caatatgactgaggg

SEQ ID NO: 1766786 - DNA, 15 bp, Homo sapiens
aatatgactgagggg

SEQ ID NO: 1766787 - DNA, 15 bp, Homo sapiens
atatgactgaggggc

SEQ ID NO: 1766788 - DNA, 15 bp, Homo sapiens
tatgactgaggggcc

SEQ ID NO: 1766789 - DNA, 15 bp, Homo sapiens
atgactgaggggcca

SEQ ID NO: 1766790 - DNA, 15 bp, Homo sapiens
tgactgaggggccat

SEQ ID NO: 1766791 - DNA, 15 bp, Homo sapiens
gactgaggggccatc

SEQ ID NO: 1766792 - DNA, 15 bp, Homo sapiens
actgaggggccatca

SEQ ID NO: 1766793 - DNA, 15 bp, Homo sapiens
ctgaggggccatcag

SEQ ID NO: 1766794 - DNA, 15 bp, Homo sapiens
tgaggggccatcagg

SEQ ID NO: 1766795 - DNA, 15 bp, Homo sapiens
gaggggccatcaggt

SEQ ID NO: 1766796 - DNA, 15 bp, Homo sapiens
aggggccatcaggtt

SEQ ID NO: 1766797 - DNA, 15 bp, Homo sapiens
ggggccatcaggttc

SEQ ID NO: 1766798 - DNA, 15 bp, Homo sapiens
gggccatcaggttct

SEQ ID NO: 1766799 - DNA, 15 bp, Homo sapiens
ggccatcaggttctt

SEQ ID NO: 1766800 - DNA, 15 bp, Homo sapiens
gccatcaggttcttg

SEQ ID NO: 1766801 - DNA, 15 bp, Homo sapiens
ccatcaggttcttgt

SEQ ID NO: 1766802 - DNA, 15 bp, Homo sapiens
catcaggttcttgtc

SEQ ID NO: 1766803 - DNA, 15 bp, Homo sapiens
atcaggttcttgtcc

SEQ ID NO: 1766804 - DNA, 15 bp, Homo sapiens
tcaggttcttgtcct

SEQ ID NO: 1766805 - DNA, 15 bp, Homo sapiens
caggttcttgtccta

SEQ ID NO: 1766806 - DNA, 15 bp, Homo sapiens
aggttcttgtcctaa

SEQ ID NO: 1766807 - DNA, 15 bp, Homo sapiens
ggttcttgtcctaaa

SEQ ID NO: 1766808 - DNA, 15 bp, Homo sapiens
gttcttgtcctaaag

SEQ ID NO: 1766809 - DNA, 15 bp, Homo sapiens
ttcttgtcctaaagg

SEQ ID NO: 1766810 - DNA, 15 bp, Homo sapiens
tcttgtcctaaaggc

SEQ ID NO: 1766811 - DNA, 15 bp, Homo sapiens
cttgtcctaaaggca

SEQ ID NO: 1766812 - DNA, 15 bp, Homo sapiens
tgtcctaaaggcatc

SEQ ID NO: 1766813 - DNA, 15 bp, Homo sapiens
gtcctaaaggcatca

SEQ ID NO: 1766814 - DNA, 15 bp, Homo sapiens
tcctaaaggcatcac

SEQ ID NO: 1766815 - DNA, 15 bp, Homo sapiens
cctaaaggcatcacc

SEQ ID NO: 1766816 - DNA, 15 bp, Homo sapiens
ctaaaggcatcacct

SEQ ID NO: 1766817 - DNA, 15 bp, Homo sapiens
taaaggcatcaccta

SEQ ID NO: 1766818 - DNA, 15 bp, Homo sapiens
aaaggcatcacctaa

SEQ ID NO: 1766819 - DNA, 15 bp, Homo sapiens
aaggcatcacctaac

SEQ ID NO: 1766820 - DNA, 15 bp, Homo sapiens
aggcatcacctaacc

SEQ ID NO: 1766821 - DNA, 15 bp, Homo sapiens
ggcatcacctaacct

SEQ ID NO: 1766822 - DNA, 15 bp, Homo sapiens
gcatcacctaacctt

SEQ ID NO: 1766823 - DNA, 15 bp, Homo sapiens
catcacctaaccttt

SEQ ID NO: 1766824 - DNA, 15 bp, Homo sapiens
atcacctaaccttta

SEQ ID NO: 1766825 - DNA, 15 bp, Homo sapiens
tcacctaacctttaa

SEQ ID NO: 1766826 - DNA, 15 bp, Homo sapiens
cacctaacctttaac

SEQ ID NO: 1766827 - DNA, 15 bp, Homo sapiens
acctaacctttaacc

SEQ ID NO: 1766828 - DNA, 15 bp, Homo sapiens
cctaacctttaacct

SEQ ID NO: 1766829 - DNA, 15 bp, Homo sapiens
ctaacctttaacctt

SEQ ID NO: 1766830 - DNA, 15 bp, Homo sapiens
taacctttaacctta

SEQ ID NO: 1766831 - DNA, 15 bp, Homo sapiens
aacctttaaccttag

SEQ ID NO: 1766832 - DNA, 15 bp, Homo sapiens
acctttaaccttaga

SEQ ID NO: 1766833 - DNA, 15 bp, Homo sapiens
cctttaaccttagaa

SEQ ID NO: 1766834 - DNA, 15 bp, Homo sapiens
ctttaaccttagaaa

SEQ ID NO: 1766835 - DNA, 15 bp, Homo sapiens
tttaaccttagaaaa

SEQ ID NO: 1766836 - DNA, 15 bp, Homo sapiens
ttaaccttagaaaaa

SEQ ID NO: 1766837 - DNA, 15 bp, Homo sapiens
taaccttagaaaaaa

SEQ ID NO: 1766838 - DNA, 15 bp, Homo sapiens
aaccttagaaaaaag

SEQ ID NO: 1766839 - DNA, 15 bp, Homo sapiens
accttagaaaaaagc

SEQ ID NO: 1766840 - DNA, 15 bp, Homo sapiens
ccttagaaaaaagca

SEQ ID NO: 1766841 - DNA, 15 bp, Homo sapiens
cttagaaaaaagcag

SEQ ID NO: 1766842 - DNA, 15 bp, Homo sapiens
ttagaaaaaagcagt

SEQ ID NO: 1766843 - DNA, 15 bp, Homo sapiens
tagaaaaaagcagtg

SEQ ID NO: 1766844 - DNA, 15 bp, Homo sapiens
agaaaaaagcagtgg

SEQ ID NO: 1766845 - DNA, 15 bp, Homo sapiens
gaaaaaagcagtggc

SEQ ID NO: 1766846 - DNA, 15 bp, Homo sapiens
aaaaaagcagtggct

SEQ ID NO: 1766847 - DNA, 15 bp, Homo sapiens
aaaaagcagtggctc

SEQ ID NO: 1766848 - DNA, 15 bp, Homo sapiens
aaaagcagtggctca

SEQ ID NO: 1766849 - DNA, 15 bp, Homo sapiens
aaagcagtggctcac

SEQ ID NO: 1766850 - DNA, 15 bp, Homo sapiens
aagcagtggctcacg

SEQ ID NO: 1766851 - DNA, 15 bp, Homo sapiens
agcagtggctcacgc

SEQ ID NO: 1766852 - DNA, 15 bp, Homo sapiens
cctgaggtcaggagg

SEQ ID NO: 1766853 - DNA, 15 bp, Homo sapiens
ctgaggtcaggaggt

SEQ ID NO: 1766854 - DNA, 15 bp, Homo sapiens
tgaggtcaggaggtc

SEQ ID NO: 1766855 - DNA, 15 bp, Homo sapiens
gaggtcaggaggtcg

SEQ ID NO: 1766856 - DNA, 15 bp, Homo sapiens
aggtcaggaggtcga

SEQ ID NO: 1766857 - DNA, 15 bp, Homo sapiens
ggtcaggaggtcgag

SEQ ID NO: 1766858 - DNA, 15 bp, Homo sapiens
gtcaggaggtcgaga

SEQ ID NO: 1766859 - DNA, 15 bp, Homo sapiens
tcaggaggtcgagac

SEQ ID NO: 1766860 - DNA, 15 bp, Homo sapiens
caggaggtcgagacc

SEQ ID NO: 1766861 - DNA, 15 bp, Homo sapiens
aggaggtcgagacca

SEQ ID NO: 1766862 - DNA, 15 bp, Homo sapiens
ggaggtcgagaccag

SEQ ID NO: 1766863 - DNA, 15 bp, Homo sapiens
gaggtcgagaccagc

SEQ ID NO: 1766864 - DNA, 15 bp, Homo sapiens
aggtcgagaccagcc

SEQ ID NO: 1766865 - DNA, 15 bp, Homo sapiens
ggtcgagaccagcct

SEQ ID NO: 1766866 - DNA, 15 bp, Homo sapiens
gtcgagaccagcctg

SEQ ID NO: 1766867 - DNA, 15 bp, Homo sapiens
catggtgaaacctca

SEQ ID NO: 1766868 - DNA, 15 bp, Homo sapiens
atggtgaaacctcat

SEQ ID NO: 1766869 - DNA, 15 bp, Homo sapiens
tggtgaaacctcatc

SEQ ID NO: 1766870 - DNA, 15 bp, Homo sapiens
ggtgaaacctcatct

SEQ ID NO: 1766871 - DNA, 15 bp, Homo sapiens
gtgaaacctcatctc

SEQ ID NO: 1766872 - DNA, 15 bp, Homo sapiens
tgaaacctcatctct

SEQ ID NO: 1766873 - DNA, 15 bp, Homo sapiens
aacctcatctctact

SEQ ID NO: 1766874 - DNA, 15 bp, Homo sapiens
acctcatctctacta

SEQ ID NO: 1766875 - DNA, 15 bp, Homo sapiens
cctcatctctactaa

SEQ ID NO: 1766876 - DNA, 15 bp, Homo sapiens
ctcatctctactaaa

SEQ ID NO: 1766877 - DNA, 15 bp, Homo sapiens
tcatctctactaaaa

SEQ ID NO: 1766878 - DNA, 15 bp, Homo sapiens
tctactaaaaatacg

SEQ ID NO: 1766879 - DNA, 15 bp, Homo sapiens
ctactaaaaatacga

SEQ ID NO: 1766880 - DNA, 15 bp, Homo sapiens
tactaaaaatacgaa

SEQ ID NO: 1766881 - DNA, 15 bp, Homo sapiens
actaaaaatacgaaa

SEQ ID NO: 1766882 - DNA, 15 bp, Homo sapiens
ctaaaaatacgaaaa

SEQ ID NO: 1766883 - DNA, 15 bp, Homo sapiens
taaaaatacgaaaat

SEQ ID NO: 1766884 - DNA, 15 bp, Homo sapiens
aaaaatacgaaaatt

SEQ ID NO: 1766885 - DNA, 15 bp, Homo sapiens
aaaatacgaaaatta

SEQ ID NO: 1766886 - DNA, 15 bp, Homo sapiens
aaatacgaaaattag

SEQ ID NO: 1766887 - DNA, 15 bp, Homo sapiens
aatacgaaaattagc

SEQ ID NO: 1766888 - DNA, 15 bp, Homo sapiens
atacgaaaattagcc

SEQ ID NO: 1766889 - DNA, 15 bp, Homo sapiens
tacgaaaattagccg

SEQ ID NO: 1766890 - DNA, 15 bp, Homo sapiens
acgaaaattagccgg

SEQ ID NO: 1766891 - DNA, 15 bp, Homo sapiens
cgaaaattagccggg

SEQ ID NO: 1766892 - DNA, 15 bp, Homo sapiens
gaaaattagccgggt

SEQ ID NO: 1766893 - DNA, 15 bp, Homo sapiens
aattagccgggtgta

SEQ ID NO: 1766894 - DNA, 15 bp, Homo sapiens
attagccgggtgtag

SEQ ID NO: 1766895 - DNA, 15 bp, Homo sapiens
ttagccgggtgtagt

SEQ ID NO: 1766896 - DNA, 15 bp, Homo sapiens
tagccgggtgtagtg

SEQ ID NO: 1766897 - DNA, 15 bp, Homo sapiens
agccgggtgtagtgg

SEQ ID NO: 1766898 - DNA, 15 bp, Homo sapiens
gccgggtgtagtggt

SEQ ID NO: 1766899 - DNA, 15 bp, Homo sapiens
ccgggtgtagtggtg

SEQ ID NO: 1766900 - DNA, 15 bp, Homo sapiens
cgggtgtagtggtgc

SEQ ID NO: 1766901 - DNA, 15 bp, Homo sapiens
gggtgtagtggtgca

SEQ ID NO: 1766902 - DNA, 15 bp, Homo sapiens
ggtgtagtggtgcat

SEQ ID NO: 1766903 - DNA, 15 bp, Homo sapiens
gtgtagtggtgcatg

SEQ ID NO: 1766904 - DNA, 15 bp, Homo sapiens
tgtagtggtgcatgc

SEQ ID NO: 1766905 - DNA, 15 bp, Homo sapiens
gaatggcttgaacct

SEQ ID NO: 1766906 - DNA, 15 bp, Homo sapiens
aatggcttgaacctg

SEQ ID NO: 1766907 - DNA, 15 bp, Homo sapiens
atggcttgaacctga

SEQ ID NO: 1766908 - DNA, 15 bp, Homo sapiens
tggcttgaacctgag

SEQ ID NO: 1766909 - DNA, 15 bp, Homo sapiens
ggcttgaacctgaga

SEQ ID NO: 1766910 - DNA, 15 bp, Homo sapiens
gcttgaacctgagag

SEQ ID NO: 1766911 - DNA, 15 bp, Homo sapiens
tgaacctgagaggcg

SEQ ID NO: 1766912 - DNA, 15 bp, Homo sapiens
gaacctgagaggcgg

SEQ ID NO: 1766913 - DNA, 15 bp, Homo sapiens
aacctgagaggcgga

SEQ ID NO: 1766914 - DNA, 15 bp, Homo sapiens
acctgagaggcggag

SEQ ID NO: 1766915 - DNA, 15 bp, Homo sapiens
cctgagaggcggagg

SEQ ID NO: 1766916 - DNA, 15 bp, Homo sapiens
ctgagaggcggaggt

SEQ ID NO: 1766917 - DNA, 15 bp, Homo sapiens
tgagaggcggaggtt

SEQ ID NO: 1766918 - DNA, 15 bp, Homo sapiens
agaggcggaggttgc

SEQ ID NO: 1766919 - DNA, 15 bp, Homo sapiens
cggaggttgcagtgt

SEQ ID NO: 1766920 - DNA, 15 bp, Homo sapiens
ggaggttgcagtgtg

SEQ ID NO: 1766921 - DNA, 15 bp, Homo sapiens
gaggttgcagtgtgc

SEQ ID NO: 1766922 - DNA, 15 bp, Homo sapiens
aggttgcagtgtgct

SEQ ID NO: 1766923 - DNA, 15 bp, Homo sapiens
ggttgcagtgtgctg

SEQ ID NO: 1766924 - DNA, 15 bp, Homo sapiens
gttgcagtgtgctga

SEQ ID NO: 1766925 - DNA, 15 bp, Homo sapiens
ttgcagtgtgctgag

SEQ ID NO: 1766926 - DNA, 15 bp, Homo sapiens
tgcagtgtgctgaga

SEQ ID NO: 1766927 - DNA, 15 bp, Homo sapiens
gcagtgtgctgagat

SEQ ID NO: 1766928 - DNA, 15 bp, Homo sapiens
cagtgtgctgagatt

SEQ ID NO: 1766929 - DNA, 15 bp, Homo sapiens
agtgtgctgagattg

SEQ ID NO: 1766930 - DNA, 15 bp, Homo sapiens
gtgtgctgagattgt

SEQ ID NO: 1766931 - DNA, 15 bp, Homo sapiens
tgtgctgagattgtg

SEQ ID NO: 1766932 - DNA, 15 bp, Homo sapiens
gtgctgagattgtgc

SEQ ID NO: 1766933 - DNA, 15 bp, Homo sapiens
tgctgagattgtgcc

SEQ ID NO: 1766934 - DNA, 15 bp, Homo sapiens
gggtgacagagtgac

SEQ ID NO: 1766935 - DNA, 15 bp, Homo sapiens
ggtgacagagtgaca

SEQ ID NO: 1766936 - DNA, 15 bp, Homo sapiens
gtgacagagtgacac

SEQ ID NO: 1766937 - DNA, 15 bp, Homo sapiens
tgacagagtgacact

SEQ ID NO: 1766938 - DNA, 15 bp, Homo sapiens
gacagagtgacactc

SEQ ID NO: 1766939 - DNA, 15 bp, Homo sapiens
acagagtgacactca

SEQ ID NO: 1766940 - DNA, 15 bp, Homo sapiens
cagagtgacactcag

SEQ ID NO: 1766941 - DNA, 15 bp, Homo sapiens
agagtgacactcagt

SEQ ID NO: 1766942 - DNA, 15 bp, Homo sapiens
gagtgacactcagtc

SEQ ID NO: 1766943 - DNA, 15 bp, Homo sapiens
agtgacactcagtct

SEQ ID NO: 1766944 - DNA, 15 bp, Homo sapiens
gtgacactcagtctc

SEQ ID NO: 1766945 - DNA, 15 bp, Homo sapiens
tgacactcagtctca

SEQ ID NO: 1766946 - DNA, 15 bp, Homo sapiens
gacactcagtctcac

SEQ ID NO: 1766947 - DNA, 15 bp, Homo sapiens
acactcagtctcact

SEQ ID NO: 1766948 - DNA, 15 bp, Homo sapiens
cactcagtctcactc

SEQ ID NO: 1766949 - DNA, 15 bp, Homo sapiens
actcagtctcactca

SEQ ID NO: 1766950 - DNA, 15 bp, Homo sapiens
ctcagtctcactcaa

SEQ ID NO: 1766951 - DNA, 15 bp, Homo sapiens
tcagtctcactcaag

SEQ ID NO: 1766952 - DNA, 15 bp, Homo sapiens
cagtctcactcaaga

SEQ ID NO: 1766953 - DNA, 15 bp, Homo sapiens
agtctcactcaagaa

SEQ ID NO: 1766954 - DNA, 15 bp, Homo sapiens
gtctcactcaagaaa

SEQ ID NO: 1766955 - DNA, 15 bp, Homo sapiens
tctcactcaagaaaa

SEQ ID NO: 1766956 - DNA, 15 bp, Homo sapiens
ctcactcaagaaaaa

SEQ ID NO: 1766957 - DNA, 15 bp, Homo sapiens
tcactcaagaaaaaa

SEQ ID NO: 1766958 - DNA, 15 bp, Homo sapiens
cactcaagaaaaaag

SEQ ID NO: 1766959 - DNA, 15 bp, Homo sapiens
actcaagaaaaaagc

SEQ ID NO: 1766960 - DNA, 15 bp, Homo sapiens
ctcaagaaaaaagca

SEQ ID NO: 1766961 - DNA, 15 bp, Homo sapiens
tcaagaaaaaagcaa

SEQ ID NO: 1766962 - DNA, 15 bp, Homo sapiens
caagaaaaaagcaaa

SEQ ID NO: 1766963 - DNA, 15 bp, Homo sapiens
aagaaaaaagcaaac

SEQ ID NO: 1766964 - DNA, 15 bp, Homo sapiens
agaaaaaagcaaacc

SEQ ID NO: 1766965 - DNA, 15 bp, Homo sapiens
gaaaaaagcaaacca

SEQ ID NO: 1766966 - DNA, 15 bp, Homo sapiens
aaaaaagcaaaccaa

SEQ ID NO: 1766967 - DNA, 15 bp, Homo sapiens
aaaaagcaaaccaag

SEQ ID NO: 1766968 - DNA, 15 bp, Homo sapiens
aaaagcaaaccaagg

SEQ ID NO: 1766969 - DNA, 15 bp, Homo sapiens
aaagcaaaccaaggg

SEQ ID NO: 1766970 - DNA, 15 bp, Homo sapiens
aagcaaaccaaggga

SEQ ID NO: 1766971 - DNA, 15 bp, Homo sapiens
agcaaaccaagggaa

SEQ ID NO: 1766972 - DNA, 15 bp, Homo sapiens
gcaaaccaagggaag

SEQ ID NO: 1766973 - DNA, 15 bp, Homo sapiens
caaaccaagggaagc

SEQ ID NO: 1766974 - DNA, 15 bp, Homo sapiens
aaaccaagggaagca

SEQ ID NO: 1766975 - DNA, 15 bp, Homo sapiens
aaccaagggaagcat

SEQ ID NO: 1766976 - DNA, 15 bp, Homo sapiens
accaagggaagcatc

SEQ ID NO: 1766977 - DNA, 15 bp, Homo sapiens
ccaagggaagcatca

SEQ ID NO: 1766978 - DNA, 15 bp, Homo sapiens
caagggaagcatcat

SEQ ID NO: 1766979 - DNA, 15 bp, Homo sapiens
aagggaagcatcatc

SEQ ID NO: 1766980 - DNA, 15 bp, Homo sapiens
agggaagcatcatcc

SEQ ID NO: 1766981 - DNA, 15 bp, Homo sapiens
gggaagcatcatccc

SEQ ID NO: 1766982 - DNA, 15 bp, Homo sapiens
ggaagcatcatcccc

SEQ ID NO: 1766983 - DNA, 15 bp, Homo sapiens
gaagcatcatccccc

SEQ ID NO: 1766984 - DNA, 15 bp, Homo sapiens
aagcatcatccccca

SEQ ID NO: 1766985 - DNA, 15 bp, Homo sapiens
agcatcatcccccag

SEQ ID NO: 1766986 - DNA, 15 bp, Homo sapiens
gcatcatcccccagt

SEQ ID NO: 1766987 - DNA, 15 bp, Homo sapiens
catcatcccccagtc

SEQ ID NO: 1766988 - DNA, 15 bp, Homo sapiens
atcatcccccagtca

SEQ ID NO: 1766989 - DNA, 15 bp, Homo sapiens
tcatcccccagtcac

SEQ ID NO: 1766990 - DNA, 15 bp, Homo sapiens
catcccccagtcacc

SEQ ID NO: 1766991 - DNA, 15 bp, Homo sapiens
atcccccagtcacct

SEQ ID NO: 1766992 - DNA, 15 bp, Homo sapiens
tcccccagtcacctc

SEQ ID NO: 1766993 - DNA, 15 bp, Homo sapiens
cccccagtcacctcc

SEQ ID NO: 1766994 - DNA, 15 bp, Homo sapiens
ccccagtcacctcca

SEQ ID NO: 1766995 - DNA, 15 bp, Homo sapiens
cccagtcacctccag

SEQ ID NO: 1766996 - DNA, 15 bp, Homo sapiens
ccagtcacctccagc

SEQ ID NO: 1766997 - DNA, 15 bp, Homo sapiens
cagtcacctccagca

SEQ ID NO: 1766998 - DNA, 15 bp, Homo sapiens
agtcacctccagcag

SEQ ID NO: 1766999 - DNA, 15 bp, Homo sapiens
gtcacctccagcagg

SEQ ID NO: 1767000 - DNA, 15 bp, Homo sapiens
tcacctccagcaggc

SEQ ID NO: 1767001 - DNA, 15 bp, Homo sapiens
cacctccagcaggca

SEQ ID NO: 1767002 - DNA, 15 bp, Homo sapiens
acctccagcaggcag

SEQ ID NO: 1767003 - DNA, 15 bp, Homo sapiens
cctccagcaggcagt

SEQ ID NO: 1767004 - DNA, 15 bp, Homo sapiens
ctccagcaggcagtt

SEQ ID NO: 1767005 - DNA, 15 bp, Homo sapiens
tccagcaggcagtta

SEQ ID NO: 1767006 - DNA, 15 bp, Homo sapiens
ccagcaggcagttag

SEQ ID NO: 1767007 - DNA, 15 bp, Homo sapiens
cagcaggcagttagt

SEQ ID NO: 1767008 - DNA, 15 bp, Homo sapiens
agcaggcagttagtt

SEQ ID NO: 1767009 - DNA, 15 bp, Homo sapiens
gcaggcagttagttc

SEQ ID NO: 1767010 - DNA, 15 bp, Homo sapiens
caggcagttagttca

SEQ ID NO: 1767011 - DNA, 15 bp, Homo sapiens
aggcagttagttcac

SEQ ID NO: 1767012 - DNA, 15 bp, Homo sapiens
ggcagttagttcacc

SEQ ID NO: 1767013 - DNA, 15 bp, Homo sapiens
gcagttagttcacca

SEQ ID NO: 1767014 - DNA, 15 bp, Homo sapiens
cagttagttcaccac

SEQ ID NO: 1767015 - DNA, 15 bp, Homo sapiens
agttagttcaccaca

SEQ ID NO: 1767016 - DNA, 15 bp, Homo sapiens
gttagttcaccacaa

SEQ ID NO: 1767017 - DNA, 15 bp, Homo sapiens
ttagttcaccacaac

SEQ ID NO: 1767018 - DNA, 15 bp, Homo sapiens
tagttcaccacaacc

SEQ ID NO: 1767019 - DNA, 15 bp, Homo sapiens
agttcaccacaaccc

SEQ ID NO: 1767020 - DNA, 15 bp, Homo sapiens
gttcaccacaacccc

SEQ ID NO: 1767021 - DNA, 15 bp, Homo sapiens
ttcaccacaacccct

SEQ ID NO: 1767022 - DNA, 15 bp, Homo sapiens
tcaccacaacccctc

SEQ ID NO: 1767023 - DNA, 15 bp, Homo sapiens
caccacaacccctct

SEQ ID NO: 1767024 - DNA, 15 bp, Homo sapiens
accacaacccctctg

SEQ ID NO: 1767025 - DNA, 15 bp, Homo sapiens
ccacaacccctctgt

SEQ ID NO: 1767026 - DNA, 15 bp, Homo sapiens
cacaacccctctgtg

SEQ ID NO: 1767027 - DNA, 15 bp, Homo sapiens
acaacccctctgtgg

SEQ ID NO: 1767028 - DNA, 15 bp, Homo sapiens
caacccctctgtggg

SEQ ID NO: 1767029 - DNA, 15 bp, Homo sapiens
aacccctctgtggga

SEQ ID NO: 1767030 - DNA, 15 bp, Homo sapiens
acccctctgtgggaa

SEQ ID NO: 1767031 - DNA, 15 bp, Homo sapiens
cccctctgtgggaac

SEQ ID NO: 1767032 - DNA, 15 bp, Homo sapiens
ccctctgtgggaact

SEQ ID NO: 1767033 - DNA, 15 bp, Homo sapiens
cctctgtgggaactt

SEQ ID NO: 1767034 - DNA, 15 bp, Homo sapiens
ctctgtgggaacttc

SEQ ID NO: 1767035 - DNA, 15 bp, Homo sapiens
tctgtgggaacttcc

SEQ ID NO: 1767036 - DNA, 15 bp, Homo sapiens
ctgtgggaacttcct

SEQ ID NO: 1767037 - DNA, 15 bp, Homo sapiens
tgtgggaacttccta

SEQ ID NO: 1767038 - DNA, 15 bp, Homo sapiens
gtgggaacttcctag

SEQ ID NO: 1767039 - DNA, 15 bp, Homo sapiens
tgggaacttcctagt

SEQ ID NO: 1767040 - DNA, 15 bp, Homo sapiens
gggaacttcctagtg

SEQ ID NO: 1767041 - DNA, 15 bp, Homo sapiens
ggaacttcctagtga

SEQ ID NO: 1767042 - DNA, 15 bp, Homo sapiens
gaacttcctagtgac

SEQ ID NO: 1767043 - DNA, 15 bp, Homo sapiens
aacttcctagtgaca

SEQ ID NO: 1767044 - DNA, 15 bp, Homo sapiens
acttcctagtgacat

SEQ ID NO: 1767045 - DNA, 15 bp, Homo sapiens
cttcctagtgacatc

SEQ ID NO: 1767046 - DNA, 15 bp, Homo sapiens
ttcctagtgacatcc

SEQ ID NO: 1767047 - DNA, 15 bp, Homo sapiens
tcctagtgacatcca

SEQ ID NO: 1767048 - DNA, 15 bp, Homo sapiens
cctagtgacatccag

SEQ ID NO: 1767049 - DNA, 15 bp, Homo sapiens
ctagtgacatccagc

SEQ ID NO: 1767050 - DNA, 15 bp, Homo sapiens
tagtgacatccagct

SEQ ID NO: 1767051 - DNA, 15 bp, Homo sapiens
agtgacatccagcta

SEQ ID NO: 1767052 - DNA, 15 bp, Homo sapiens
gtgacatccagctag

SEQ ID NO: 1767053 - DNA, 15 bp, Homo sapiens
tgacatccagctagg

SEQ ID NO: 1767054 - DNA, 15 bp, Homo sapiens
gacatccagctaggc

SEQ ID NO: 1767055 - DNA, 15 bp, Homo sapiens
acatccagctaggct

SEQ ID NO: 1767056 - DNA, 15 bp, Homo sapiens
catccagctaggcta

SEQ ID NO: 1767057 - DNA, 15 bp, Homo sapiens
atccagctaggctat

SEQ ID NO: 1767058 - DNA, 15 bp, Homo sapiens
tccagctaggctatg

SEQ ID NO: 1767059 - DNA, 15 bp, Homo sapiens
ccagctaggctatgc

SEQ ID NO: 1767060 - DNA, 15 bp, Homo sapiens
cagctaggctatgcc

SEQ ID NO: 1767061 - DNA, 15 bp, Homo sapiens
agctaggctatgccc

SEQ ID NO: 1767062 - DNA, 15 bp, Homo sapiens
gctaggctatgcccc

SEQ ID NO: 1767063 - DNA, 15 bp, Homo sapiens
ctaggctatgcccca

SEQ ID NO: 1767064 - DNA, 15 bp, Homo sapiens
taggctatgccccag

SEQ ID NO: 1767065 - DNA, 15 bp, Homo sapiens
aggctatgccccagg

SEQ ID NO: 1767066 - DNA, 15 bp, Homo sapiens
ggctatgccccaggc

SEQ ID NO: 1767067 - DNA, 15 bp, Homo sapiens
gctatgccccaggct

SEQ ID NO: 1767068 - DNA, 15 bp, Homo sapiens
ctatgccccaggctc

SEQ ID NO: 1767069 - DNA, 15 bp, Homo sapiens
tatgccccaggctct

SEQ ID NO: 1767070 - DNA, 15 bp, Homo sapiens
atgccccaggctcta

SEQ ID NO: 1767071 - DNA, 15 bp, Homo sapiens
tgccccaggctctag

SEQ ID NO: 1767072 - DNA, 15 bp, Homo sapiens
gccccaggctctagt

SEQ ID NO: 1767073 - DNA, 15 bp, Homo sapiens
ccccaggctctagtg

SEQ ID NO: 1767074 - DNA, 15 bp, Homo sapiens
cccaggctctagtgc

SEQ ID NO: 1767075 - DNA, 15 bp, Homo sapiens
ccaggctctagtgca

SEQ ID NO: 1767076 - DNA, 15 bp, Homo sapiens
caggctctagtgcag

SEQ ID NO: 1767077 - DNA, 15 bp, Homo sapiens
aggctctagtgcagg

SEQ ID NO: 1767078 - DNA, 15 bp, Homo sapiens
ggctctagtgcaggc

SEQ ID NO: 1767079 - DNA, 15 bp, Homo sapiens
gctctagtgcaggct

SEQ ID NO: 1767080 - DNA, 15 bp, Homo sapiens
ctctagtgcaggctg

SEQ ID NO: 1767081 - DNA, 15 bp, Homo sapiens
tctagtgcaggctgt

SEQ ID NO: 1767082 - DNA, 15 bp, Homo sapiens
ctagtgcaggctgtg

SEQ ID NO: 1767083 - DNA, 15 bp, Homo sapiens
tagtgcaggctgtgg

SEQ ID NO: 1767084 - DNA, 15 bp, Homo sapiens
agtgcaggctgtggc

SEQ ID NO: 1767085 - DNA, 15 bp, Homo sapiens
gtgcaggctgtggcc

SEQ ID NO: 1767086 - DNA, 15 bp, Homo sapiens
tgcaggctgtggcca

SEQ ID NO: 1767087 - DNA, 15 bp, Homo sapiens
gcaggctgtggccaa

SEQ ID NO: 1767088 - DNA, 15 bp, Homo sapiens
caggctgtggccaac

SEQ ID NO: 1767089 - DNA, 15 bp, Homo sapiens
aggctgtggccaact

SEQ ID NO: 1767090 - DNA, 15 bp, Homo sapiens
ggctgtggccaactt

SEQ ID NO: 1767091 - DNA, 15 bp, Homo sapiens
gctgtggccaacttg

SEQ ID NO: 1767092 - DNA, 15 bp, Homo sapiens
ctgtggccaacttgg

SEQ ID NO: 1767093 - DNA, 15 bp, Homo sapiens
tgtggccaacttggt

SEQ ID NO: 1767094 - DNA, 15 bp, Homo sapiens
gtggccaacttggtc

SEQ ID NO: 1767095 - DNA, 15 bp, Homo sapiens
tggccaacttggtct

SEQ ID NO: 1767096 - DNA, 15 bp, Homo sapiens
ggccaacttggtctt

SEQ ID NO: 1767097 - DNA, 15 bp, Homo sapiens
gccaacttggtctta

SEQ ID NO: 1767098 - DNA, 15 bp, Homo sapiens
ccaacttggtcttac

SEQ ID NO: 1767099 - DNA, 15 bp, Homo sapiens
caacttggtcttacc

SEQ ID NO: 1767100 - DNA, 15 bp, Homo sapiens
aacttggtcttacca

SEQ ID NO: 1767101 - DNA, 15 bp, Homo sapiens
acttggtcttaccaa

SEQ ID NO: 1767102 - DNA, 15 bp, Homo sapiens
cttggtcttaccaaa

SEQ ID NO: 1767103 - DNA, 15 bp, Homo sapiens
ttggtcttaccaaag

SEQ ID NO: 1767104 - DNA, 15 bp, Homo sapiens
tggtcttaccaaagg

SEQ ID NO: 1767105 - DNA, 15 bp, Homo sapiens
ggtcttaccaaagga

SEQ ID NO: 1767106 - DNA, 15 bp, Homo sapiens
gtcttaccaaaggac

SEQ ID NO: 1767107 - DNA, 15 bp, Homo sapiens
tcttaccaaaggact

SEQ ID NO: 1767108 - DNA, 15 bp, Homo sapiens
cttaccaaaggactt

SEQ ID NO: 1767109 - DNA, 15 bp, Homo sapiens
ttaccaaaggactta

SEQ ID NO: 1767110 - DNA, 15 bp, Homo sapiens
taccaaaggacttac

SEQ ID NO: 1767111 - DNA, 15 bp, Homo sapiens
accaaaggacttacc

SEQ ID NO: 1767112 - DNA, 15 bp, Homo sapiens
ccaaaggacttacca

SEQ ID NO: 1767113 - DNA, 15 bp, Homo sapiens
caaaggacttaccaa

SEQ ID NO: 1767114 - DNA, 15 bp, Homo sapiens
aaaggacttaccaag

SEQ ID NO: 1767115 - DNA, 15 bp, Homo sapiens
aaggacttaccaagc

SEQ ID NO: 1767116 - DNA, 15 bp, Homo sapiens
aggacttaccaagcc

SEQ ID NO: 1767117 - DNA, 15 bp, Homo sapiens
ggacttaccaagcca

SEQ ID NO: 1767118 - DNA, 15 bp, Homo sapiens
gacttaccaagccag

SEQ ID NO: 1767119 - DNA, 15 bp, Homo sapiens
acttaccaagccagt

SEQ ID NO: 1767120 - DNA, 15 bp, Homo sapiens
cttaccaagccagtg

SEQ ID NO: 1767121 - DNA, 15 bp, Homo sapiens
ttaccaagccagtgc

SEQ ID NO: 1767122 - DNA, 15 bp, Homo sapiens
taccaagccagtgct

SEQ ID NO: 1767123 - DNA, 15 bp, Homo sapiens
accaagccagtgctt

SEQ ID NO: 1767124 - DNA, 15 bp, Homo sapiens
ccaagccagtgcttc

SEQ ID NO: 1767125 - DNA, 15 bp, Homo sapiens
caagccagtgcttct

SEQ ID NO: 1767126 - DNA, 15 bp, Homo sapiens
aagccagtgcttctc

SEQ ID NO: 1767127 - DNA, 15 bp, Homo sapiens
agccagtgcttctca

SEQ ID NO: 1767128 - DNA, 15 bp, Homo sapiens
gccagtgcttctcaa

SEQ ID NO: 1767129 - DNA, 15 bp, Homo sapiens
ccagtgcttctcaaa

SEQ ID NO: 1767130 - DNA, 15 bp, Homo sapiens
cagtgcttctcaaac

SEQ ID NO: 1767131 - DNA, 15 bp, Homo sapiens
agtgcttctcaaact

SEQ ID NO: 1767132 - DNA, 15 bp, Homo sapiens
gtgcttctcaaactc

SEQ ID NO: 1767133 - DNA, 15 bp, Homo sapiens
tgcttctcaaactcg

SEQ ID NO: 1767134 - DNA, 15 bp, Homo sapiens
gcttctcaaactcga

SEQ ID NO: 1767135 - DNA, 15 bp, Homo sapiens
cttctcaaactcgac

SEQ ID NO: 1767136 - DNA, 15 bp, Homo sapiens
ttctcaaactcgact

SEQ ID NO: 1767137 - DNA, 15 bp, Homo sapiens
tctcaaactcgactg

SEQ ID NO: 1767138 - DNA, 15 bp, Homo sapiens
ctcaaactcgactga

SEQ ID NO: 1767139 - DNA, 15 bp, Homo sapiens
tcaaactcgactgaa

SEQ ID NO: 1767140 - DNA, 15 bp, Homo sapiens
caaactcgactgaag

SEQ ID NO: 1767141 - DNA, 15 bp, Homo sapiens
aaactcgactgaagc

SEQ ID NO: 1767142 - DNA, 15 bp, Homo sapiens
aactcgactgaagca

SEQ ID NO: 1767143 - DNA, 15 bp, Homo sapiens
actcgactgaagcag

SEQ ID NO: 1767144 - DNA, 15 bp, Homo sapiens
ctcgactgaagcaga

SEQ ID NO: 1767145 - DNA, 15 bp, Homo sapiens
tcgactgaagcagag

SEQ ID NO: 1767146 - DNA, 15 bp, Homo sapiens
cgactgaagcagagc

SEQ ID NO: 1767147 - DNA, 15 bp, Homo sapiens
gactgaagcagagct

SEQ ID NO: 1767148 - DNA, 15 bp, Homo sapiens
actgaagcagagctg

SEQ ID NO: 1767149 - DNA, 15 bp, Homo sapiens
ctgaagcagagctga

SEQ ID NO: 1767150 - DNA, 15 bp, Homo sapiens
tgaagcagagctgac

SEQ ID NO: 1767151 - DNA, 15 bp, Homo sapiens
gaagcagagctgact

SEQ ID NO: 1767152 - DNA, 15 bp, Homo sapiens
aagcagagctgactc

SEQ ID NO: 1767153 - DNA, 15 bp, Homo sapiens
agcagagctgactca

SEQ ID NO: 1767154 - DNA, 15 bp, Homo sapiens
gcagagctgactcag

SEQ ID NO: 1767155 - DNA, 15 bp, Homo sapiens
cagagctgactcagc

SEQ ID NO: 1767156 - DNA, 15 bp, Homo sapiens
agagctgactcagca

SEQ ID NO: 1767157 - DNA, 15 bp, Homo sapiens
gagctgactcagcag

SEQ ID NO: 1767158 - DNA, 15 bp, Homo sapiens
agctgactcagcagg

SEQ ID NO: 1767159 - DNA, 15 bp, Homo sapiens
gctgactcagcaggt

SEQ ID NO: 1767160 - DNA, 15 bp, Homo sapiens
ctgactcagcaggtc

SEQ ID NO: 1767161 - DNA, 15 bp, Homo sapiens
tgactcagcaggtct

SEQ ID NO: 1767162 - DNA, 15 bp, Homo sapiens
gactcagcaggtctt

SEQ ID NO: 1767163 - DNA, 15 bp, Homo sapiens
actcagcaggtcttg

SEQ ID NO: 1767164 - DNA, 15 bp, Homo sapiens
ctcagcaggtcttgg

SEQ ID NO: 1767165 - DNA, 15 bp, Homo sapiens
tcagcaggtcttggg

SEQ ID NO: 1767166 - DNA, 15 bp, Homo sapiens
cagcaggtcttgggt

SEQ ID NO: 1767167 - DNA, 15 bp, Homo sapiens
agcaggtcttgggtg

SEQ ID NO: 1767168 - DNA, 15 bp, Homo sapiens
gcaggtcttgggtgc

SEQ ID NO: 1767169 - DNA, 15 bp, Homo sapiens
caggtcttgggtgcg

SEQ ID NO: 1767170 - DNA, 15 bp, Homo sapiens
aggtcttgggtgcgg

SEQ ID NO: 1767171 - DNA, 15 bp, Homo sapiens
ggtcttgggtgcggc

SEQ ID NO: 1767172 - DNA, 15 bp, Homo sapiens
gtcttgggtgcggct

SEQ ID NO: 1767173 - DNA, 15 bp, Homo sapiens
tcttgggtgcggctt

SEQ ID NO: 1767174 - DNA, 15 bp, Homo sapiens
cttgggtgcggcttg

SEQ ID NO: 1767175 - DNA, 15 bp, Homo sapiens
ttgggtgcggcttga

SEQ ID NO: 1767176 - DNA, 15 bp, Homo sapiens
tgggtgcggcttgag

SEQ ID NO: 1767177 - DNA, 15 bp, Homo sapiens
gggtgcggcttgagg

SEQ ID NO: 1767178 - DNA, 15 bp, Homo sapiens
ggtgcggcttgaggc

SEQ ID NO: 1767179 - DNA, 15 bp, Homo sapiens
gtgcggcttgaggct

SEQ ID NO: 1767180 - DNA, 15 bp, Homo sapiens
tgcggcttgaggctc

SEQ ID NO: 1767181 - DNA, 15 bp, Homo sapiens
gcggcttgaggctct

SEQ ID NO: 1767182 - DNA, 15 bp, Homo sapiens
cggcttgaggctctg

SEQ ID NO: 1767183 - DNA, 15 bp, Homo sapiens
ggcttgaggctctgc

SEQ ID NO: 1767184 - DNA, 15 bp, Homo sapiens
gcttgaggctctgca

SEQ ID NO: 1767185 - DNA, 15 bp, Homo sapiens
cttgaggctctgcat

SEQ ID NO: 1767186 - DNA, 15 bp, Homo sapiens
ttgaggctctgcatt

SEQ ID NO: 1767187 - DNA, 15 bp, Homo sapiens
tgaggctctgcattt

SEQ ID NO: 1767188 - DNA, 15 bp, Homo sapiens
gaggctctgcatttc

SEQ ID NO: 1767189 - DNA, 15 bp, Homo sapiens
aggctctgcatttct

SEQ ID NO: 1767190 - DNA, 15 bp, Homo sapiens
ggctctgcatttctg

SEQ ID NO: 1767191 - DNA, 15 bp, Homo sapiens
gctctgcatttctgg

SEQ ID NO: 1767192 - DNA, 15 bp, Homo sapiens
ctctgcatttctggc

SEQ ID NO: 1767193 - DNA, 15 bp, Homo sapiens
tctgcatttctggca

SEQ ID NO: 1767194 - DNA, 15 bp, Homo sapiens
ctgcatttctggcaa

SEQ ID NO: 1767195 - DNA, 15 bp, Homo sapiens
tgcatttctggcaag

SEQ ID NO: 1767196 - DNA, 15 bp, Homo sapiens
gcatttctggcaagc

SEQ ID NO: 1767197 - DNA, 15 bp, Homo sapiens
catttctggcaagct

SEQ ID NO: 1767198 - DNA, 15 bp, Homo sapiens
atttctggcaagctc

SEQ ID NO: 1767199 - DNA, 15 bp, Homo sapiens
tttctggcaagctct

SEQ ID NO: 1767200 - DNA, 15 bp, Homo sapiens
ttctggcaagctctc

SEQ ID NO: 1767201 - DNA, 15 bp, Homo sapiens
tctggcaagctctca

SEQ ID NO: 1767202 - DNA, 15 bp, Homo sapiens
ctggcaagctctcag

SEQ ID NO: 1767203 - DNA, 15 bp, Homo sapiens
tggcaagctctcagg

SEQ ID NO: 1767204 - DNA, 15 bp, Homo sapiens
ggcaagctctcaggg

SEQ ID NO: 1767205 - DNA, 15 bp, Homo sapiens
gcaagctctcagggg

SEQ ID NO: 1767206 - DNA, 15 bp, Homo sapiens
caagctctcaggggt

SEQ ID NO: 1767207 - DNA, 15 bp, Homo sapiens
aagctctcaggggtt

SEQ ID NO: 1767208 - DNA, 15 bp, Homo sapiens
agctctcaggggttg

SEQ ID NO: 1767209 - DNA, 15 bp, Homo sapiens
gctctcaggggttgc

SEQ ID NO: 1767210 - DNA, 15 bp, Homo sapiens
ctctcaggggttgct

SEQ ID NO: 1767211 - DNA, 15 bp, Homo sapiens
tctcaggggttgctg

SEQ ID NO: 1767212 - DNA, 15 bp, Homo sapiens
ctcaggggttgctga

SEQ ID NO: 1767213 - DNA, 15 bp, Homo sapiens
tcaggggttgctgat

SEQ ID NO: 1767214 - DNA, 15 bp, Homo sapiens
caggggttgctgatg

SEQ ID NO: 1767215 - DNA, 15 bp, Homo sapiens
aggggttgctgatgc

SEQ ID NO: 1767216 - DNA, 15 bp, Homo sapiens
ggggttgctgatgct

SEQ ID NO: 1767217 - DNA, 15 bp, Homo sapiens
gggttgctgatgctg

SEQ ID NO: 1767218 - DNA, 15 bp, Homo sapiens
ggttgctgatgctgc

SEQ ID NO: 1767219 - DNA, 15 bp, Homo sapiens
gttgctgatgctgct

SEQ ID NO: 1767220 - DNA, 15 bp, Homo sapiens
ttgctgatgctgctt

SEQ ID NO: 1767221 - DNA, 15 bp, Homo sapiens
tgctgatgctgcttg

SEQ ID NO: 1767222 - DNA, 15 bp, Homo sapiens
gctgatgctgcttgc

SEQ ID NO: 1767223 - DNA, 15 bp, Homo sapiens
ctgatgctgcttgct

SEQ ID NO: 1767224 - DNA, 15 bp, Homo sapiens
tgatgctgcttgctt

SEQ ID NO: 1767225 - DNA, 15 bp, Homo sapiens
gatgctgcttgcttt

SEQ ID NO: 1767226 - DNA, 15 bp, Homo sapiens
atgctgcttgctttg

SEQ ID NO: 1767227 - DNA, 15 bp, Homo sapiens
tgctgcttgctttgt

SEQ ID NO: 1767228 - DNA, 15 bp, Homo sapiens
gctgcttgctttgtg

SEQ ID NO: 1767229 - DNA, 15 bp, Homo sapiens
ctgcttgctttgtga

SEQ ID NO: 1767230 - DNA, 15 bp, Homo sapiens
tgcttgctttgtgag

SEQ ID NO: 1767231 - DNA, 15 bp, Homo sapiens
gcttgctttgtgagc

SEQ ID NO: 1767232 - DNA, 15 bp, Homo sapiens
cttgctttgtgagca

SEQ ID NO: 1767233 - DNA, 15 bp, Homo sapiens
ttgctttgtgagcaa

SEQ ID NO: 1767234 - DNA, 15 bp, Homo sapiens
tgctttgtgagcaag

SEQ ID NO: 1767235 - DNA, 15 bp, Homo sapiens
gctttgtgagcaagg

SEQ ID NO: 1767236 - DNA, 15 bp, Homo sapiens
ctttgtgagcaaggc

SEQ ID NO: 1767237 - DNA, 15 bp, Homo sapiens
tttgtgagcaaggct

SEQ ID NO: 1767238 - DNA, 15 bp, Homo sapiens
ttgtgagcaaggctc

SEQ ID NO: 1767239 - DNA, 15 bp, Homo sapiens
tgtgagcaaggctct

SEQ ID NO: 1767240 - DNA, 15 bp, Homo sapiens
gtgagcaaggctcta

SEQ ID NO: 1767241 - DNA, 15 bp, Homo sapiens
tgagcaaggctctag

SEQ ID NO: 1767242 - DNA, 15 bp, Homo sapiens
gagcaaggctctaga

SEQ ID NO: 1767243 - DNA, 15 bp, Homo sapiens
agcaaggctctagac

SEQ ID NO: 1767244 - DNA, 15 bp, Homo sapiens
gcaaggctctagaca

SEQ ID NO: 1767245 - DNA, 15 bp, Homo sapiens
caaggctctagacaa

SEQ ID NO: 1767246 - DNA, 15 bp, Homo sapiens
aaggctctagacaat

SEQ ID NO: 1767247 - DNA, 15 bp, Homo sapiens
aggctctagacaatg

SEQ ID NO: 1767248 - DNA, 15 bp, Homo sapiens
ggctctagacaatgt

SEQ ID NO: 1767249 - DNA, 15 bp, Homo sapiens
gctctagacaatgtc

SEQ ID NO: 1767250 - DNA, 15 bp, Homo sapiens
ctctagacaatgtca

SEQ ID NO: 1767251 - DNA, 15 bp, Homo sapiens
tctagacaatgtcac

SEQ ID NO: 1767252 - DNA, 15 bp, Homo sapiens
ctagacaatgtcacc

SEQ ID NO: 1767253 - DNA, 15 bp, Homo sapiens
tagacaatgtcacct

SEQ ID NO: 1767254 - DNA, 15 bp, Homo sapiens
agacaatgtcaccta

SEQ ID NO: 1767255 - DNA, 15 bp, Homo sapiens
gacaatgtcacctac

SEQ ID NO: 1767256 - DNA, 15 bp, Homo sapiens
acaatgtcacctaca

SEQ ID NO: 1767257 - DNA, 15 bp, Homo sapiens
caatgtcacctacat

SEQ ID NO: 1767258 - DNA, 15 bp, Homo sapiens
aatgtcacctacatc

SEQ ID NO: 1767259 - DNA, 15 bp, Homo sapiens
atgtcacctacatcc

SEQ ID NO: 1767260 - DNA, 15 bp, Homo sapiens
tgtcacctacatcca

SEQ ID NO: 1767261 - DNA, 15 bp, Homo sapiens
gtcacctacatccag

SEQ ID NO: 1767262 - DNA, 15 bp, Homo sapiens
tcacctacatccagg

SEQ ID NO: 1767263 - DNA, 15 bp, Homo sapiens
cacctacatccaggt

SEQ ID NO: 1767264 - DNA, 15 bp, Homo sapiens
acctacatccaggta

SEQ ID NO: 1767265 - DNA, 15 bp, Homo sapiens
cctacatccaggtac

SEQ ID NO: 1767266 - DNA, 15 bp, Homo sapiens
ctacatccaggtaca

SEQ ID NO: 1767267 - DNA, 15 bp, Homo sapiens
tacatccaggtacaa

SEQ ID NO: 1767268 - DNA, 15 bp, Homo sapiens
acatccaggtacaac

SEQ ID NO: 1767269 - DNA, 15 bp, Homo sapiens
catccaggtacaacc

SEQ ID NO: 1767270 - DNA, 15 bp, Homo sapiens
atccaggtacaacca

SEQ ID NO: 1767271 - DNA, 15 bp, Homo sapiens
tccaggtacaaccag

SEQ ID NO: 1767272 - DNA, 15 bp, Homo sapiens
ccaggtacaaccaga

SEQ ID NO: 1767273 - DNA, 15 bp, Homo sapiens
caggtacaaccagac

SEQ ID NO: 1767274 - DNA, 15 bp, Homo sapiens
aggtacaaccagacc

SEQ ID NO: 1767275 - DNA, 15 bp, Homo sapiens
ggtacaaccagacca

SEQ ID NO: 1767276 - DNA, 15 bp, Homo sapiens
gtacaaccagaccac

SEQ ID NO: 1767277 - DNA, 15 bp, Homo sapiens
tacaaccagaccacc

SEQ ID NO: 1767278 - DNA, 15 bp, Homo sapiens
acaaccagaccaccc

SEQ ID NO: 1767279 - DNA, 15 bp, Homo sapiens
caaccagaccacccc

SEQ ID NO: 1767280 - DNA, 15 bp, Homo sapiens
aaccagaccacccca

SEQ ID NO: 1767281 - DNA, 15 bp, Homo sapiens
accagaccaccccag

SEQ ID NO: 1767282 - DNA, 15 bp, Homo sapiens
ccagaccaccccagg

SEQ ID NO: 1767283 - DNA, 15 bp, Homo sapiens
cagaccaccccaggg

SEQ ID NO: 1767284 - DNA, 15 bp, Homo sapiens
agaccaccccagggg

SEQ ID NO: 1767285 - DNA, 15 bp, Homo sapiens
gaccaccccaggggg

SEQ ID NO: 1767286 - DNA, 15 bp, Homo sapiens
accaccccagggggg

SEQ ID NO: 1767287 - DNA, 15 bp, Homo sapiens
ccaccccaggggggc

SEQ ID NO: 1767288 - DNA, 15 bp, Homo sapiens
caccccaggggggca

SEQ ID NO: 1767289 - DNA, 15 bp, Homo sapiens
accccaggggggcac

SEQ ID NO: 1767290 - DNA, 15 bp, Homo sapiens
ccccaggggggcaca

SEQ ID NO: 1767291 - DNA, 15 bp, Homo sapiens
cccaggggggcacaa

SEQ ID NO: 1767292 - DNA, 15 bp, Homo sapiens
ccaggggggcacaaa

SEQ ID NO: 1767293 - DNA, 15 bp, Homo sapiens
caggggggcacaaaa

SEQ ID NO: 1767294 - DNA, 15 bp, Homo sapiens
aggggggcacaaaaa

SEQ ID NO: 1767295 - DNA, 15 bp, Homo sapiens
ggggggcacaaaaag

SEQ ID NO: 1767296 - DNA, 15 bp, Homo sapiens
gggggcacaaaaaga

SEQ ID NO: 1767297 - DNA, 15 bp, Homo sapiens
ggggcacaaaaagaa

SEQ ID NO: 1767298 - DNA, 15 bp, Homo sapiens
gggcacaaaaagaaa

SEQ ID NO: 1767299 - DNA, 15 bp, Homo sapiens
ggcacaaaaagaaat

SEQ ID NO: 1767300 - DNA, 15 bp, Homo sapiens
gcacaaaaagaaatc

SEQ ID NO: 1767301 - DNA, 15 bp, Homo sapiens
cacaaaaagaaatcc

SEQ ID NO: 1767302 - DNA, 15 bp, Homo sapiens
acaaaaagaaatccg

SEQ ID NO: 1767303 - DNA, 15 bp, Homo sapiens
caaaaagaaatccgt

SEQ ID NO: 1767304 - DNA, 15 bp, Homo sapiens
aaaaagaaatccgtc

SEQ ID NO: 1767305 - DNA, 15 bp, Homo sapiens
aaaagaaatccgtcc

SEQ ID NO: 1767306 - DNA, 15 bp, Homo sapiens
aaagaaatccgtcct

SEQ ID NO: 1767307 - DNA, 15 bp, Homo sapiens
aagaaatccgtccta

SEQ ID NO: 1767308 - DNA, 15 bp, Homo sapiens
agaaatccgtcctag

SEQ ID NO: 1767309 - DNA, 15 bp, Homo sapiens
gaaatccgtcctagg

SEQ ID NO: 1767310 - DNA, 15 bp, Homo sapiens
aaatccgtcctagga

SEQ ID NO: 1767311 - DNA, 15 bp, Homo sapiens
aatccgtcctaggat

SEQ ID NO: 1767312 - DNA, 15 bp, Homo sapiens
atccgtcctaggatc

SEQ ID NO: 1767313 - DNA, 15 bp, Homo sapiens
tccgtcctaggatcc

SEQ ID NO: 1767314 - DNA, 15 bp, Homo sapiens
ccgtcctaggatcca

SEQ ID NO: 1767315 - DNA, 15 bp, Homo sapiens
cgtcctaggatccaa

SEQ ID NO: 1767316 - DNA, 15 bp, Homo sapiens
gtcctaggatccaaa

SEQ ID NO: 1767317 - DNA, 15 bp, Homo sapiens
tcctaggatccaaac

SEQ ID NO: 1767318 - DNA, 15 bp, Homo sapiens
cctaggatccaaacg

SEQ ID NO: 1767319 - DNA, 15 bp, Homo sapiens
ctaggatccaaacgt

SEQ ID NO: 1767320 - DNA, 15 bp, Homo sapiens
taggatccaaacgtt

SEQ ID NO: 1767321 - DNA, 15 bp, Homo sapiens
aggatccaaacgttt

SEQ ID NO: 1767322 - DNA, 15 bp, Homo sapiens
ggatccaaacgtttc

SEQ ID NO: 1767323 - DNA, 15 bp, Homo sapiens
gatccaaacgtttcc

SEQ ID NO: 1767324 - DNA, 15 bp, Homo sapiens
atccaaacgtttcca

SEQ ID NO: 1767325 - DNA, 15 bp, Homo sapiens
tccaaacgtttccaa

SEQ ID NO: 1767326 - DNA, 15 bp, Homo sapiens
ccaaacgtttccaag

SEQ ID NO: 1767327 - DNA, 15 bp, Homo sapiens
caaacgtttccaaga

SEQ ID NO: 1767328 - DNA, 15 bp, Homo sapiens
aaacgtttccaagag

SEQ ID NO: 1767329 - DNA, 15 bp, Homo sapiens
aacgtttccaagagt

SEQ ID NO: 1767330 - DNA, 15 bp, Homo sapiens
acgtttccaagagtc

SEQ ID NO: 1767331 - DNA, 15 bp, Homo sapiens
cgtttccaagagtct

SEQ ID NO: 1767332 - DNA, 15 bp, Homo sapiens
gtttccaagagtctt

SEQ ID NO: 1767333 - DNA, 15 bp, Homo sapiens
tttccaagagtcttg

SEQ ID NO: 1767334 - DNA, 15 bp, Homo sapiens
ttccaagagtcttgg

SEQ ID NO: 1767335 - DNA, 15 bp, Homo sapiens
tccaagagtcttggc

SEQ ID NO: 1767336 - DNA, 15 bp, Homo sapiens
ccaagagtcttggct

SEQ ID NO: 1767337 - DNA, 15 bp, Homo sapiens
caagagtcttggctt

SEQ ID NO: 1767338 - DNA, 15 bp, Homo sapiens
aagagtcttggcttt

SEQ ID NO: 1767339 - DNA, 15 bp, Homo sapiens
agagtcttggctttc

SEQ ID NO: 1767340 - DNA, 15 bp, Homo sapiens
gagtcttggctttcc

SEQ ID NO: 1767341 - DNA, 15 bp, Homo sapiens
agtcttggctttcct

SEQ ID NO: 1767342 - DNA, 15 bp, Homo sapiens
gtcttggctttcctc

SEQ ID NO: 1767343 - DNA, 15 bp, Homo sapiens
tcttggctttcctct

SEQ ID NO: 1767344 - DNA, 15 bp, Homo sapiens
cttggctttcctctt

SEQ ID NO: 1767345 - DNA, 15 bp, Homo sapiens
ttggctttcctctta

SEQ ID NO: 1767346 - DNA, 15 bp, Homo sapiens
tggctttcctcttat

SEQ ID NO: 1767347 - DNA, 15 bp, Homo sapiens
gctttcctcttattc

SEQ ID NO: 1767348 - DNA, 15 bp, Homo sapiens
ctttcctcttattct

SEQ ID NO: 1767349 - DNA, 15 bp, Homo sapiens
tttcctcttattctg

SEQ ID NO: 1767350 - DNA, 15 bp, Homo sapiens
ttcctcttattctga

SEQ ID NO: 1767351 - DNA, 15 bp, Homo sapiens
tcctcttattctgat

SEQ ID NO: 1767352 - DNA, 15 bp, Homo sapiens
cctcttattctgata

SEQ ID NO: 1767353 - DNA, 15 bp, Homo sapiens
ctcttattctgatac

SEQ ID NO: 1767354 - DNA, 15 bp, Homo sapiens
tcttattctgatacc

SEQ ID NO: 1767355 - DNA, 15 bp, Homo sapiens
cttattctgatacct

SEQ ID NO: 1767356 - DNA, 15 bp, Homo sapiens
ttattctgataccta

SEQ ID NO: 1767357 - DNA, 15 bp, Homo sapiens
tattctgatacctat

SEQ ID NO: 1767358 - DNA, 15 bp, Homo sapiens
attctgatacctata

SEQ ID NO: 1767359 - DNA, 15 bp, Homo sapiens
ttctgatacctataa

SEQ ID NO: 1767360 - DNA, 15 bp, Homo sapiens
tctgatacctataag

SEQ ID NO: 1767361 - DNA, 15 bp, Homo sapiens
ctgatacctataagt

SEQ ID NO: 1767362 - DNA, 15 bp, Homo sapiens
tgatacctataagta

SEQ ID NO: 1767363 - DNA, 15 bp, Homo sapiens
gatacctataagtat

SEQ ID NO: 1767364 - DNA, 15 bp, Homo sapiens
atacctataagtatt

SEQ ID NO: 1767365 - DNA, 15 bp, Homo sapiens
tacctataagtattt

SEQ ID NO: 1767366 - DNA, 15 bp, Homo sapiens
acctataagtatttt

SEQ ID NO: 1767367 - DNA, 15 bp, Homo sapiens
cctataagtattttg

SEQ ID NO: 1767368 - DNA, 15 bp, Homo sapiens
ctataagtattttgt

SEQ ID NO: 1767369 - DNA, 15 bp, Homo sapiens
tataagtattttgtt

SEQ ID NO: 1767370 - DNA, 15 bp, Homo sapiens
ataagtattttgttt

SEQ ID NO: 1767371 - DNA, 15 bp, Homo sapiens
taagtattttgtttt

SEQ ID NO: 1767372 - DNA, 15 bp, Homo sapiens
aagtattttgttttt

SEQ ID NO: 1767373 - DNA, 15 bp, Homo sapiens
agtattttgtttttc

SEQ ID NO: 1767374 - DNA, 15 bp, Homo sapiens
gtattttgtttttca

SEQ ID NO: 1767375 - DNA, 15 bp, Homo sapiens
tattttgtttttcaa

SEQ ID NO: 1767376 - DNA, 15 bp, Homo sapiens
attttgtttttcaat

SEQ ID NO: 1767377 - DNA, 15 bp, Homo sapiens
ttttgtttttcaatc

SEQ ID NO: 1767378 - DNA, 15 bp, Homo sapiens
tttgtttttcaatcc

SEQ ID NO: 1767379 - DNA, 15 bp, Homo sapiens
ttgtttttcaatcca

SEQ ID NO: 1767380 - DNA, 15 bp, Homo sapiens
tgtttttcaatccaa

SEQ ID NO: 1767381 - DNA, 15 bp, Homo sapiens
gtttttcaatccaaa

SEQ ID NO: 1767382 - DNA, 15 bp, Homo sapiens
tttttcaatccaaaa

SEQ ID NO: 1767383 - DNA, 15 bp, Homo sapiens
ttttcaatccaaaac

SEQ ID NO: 1767384 - DNA, 15 bp, Homo sapiens
tttcaatccaaaaca

SEQ ID NO: 1767385 - DNA, 15 bp, Homo sapiens
ttcaatccaaaacag

SEQ ID NO: 1767386 - DNA, 15 bp, Homo sapiens
tcaatccaaaacagt

SEQ ID NO: 1767387 - DNA, 15 bp, Homo sapiens
caatccaaaacagtt

SEQ ID NO: 1767388 - DNA, 15 bp, Homo sapiens
aatccaaaacagttt

SEQ ID NO: 1767389 - DNA, 15 bp, Homo sapiens
atccaaaacagtttt

SEQ ID NO: 1767390 - DNA, 15 bp, Homo sapiens
tccaaaacagtttta

SEQ ID NO: 1767391 - DNA, 15 bp, Homo sapiens
ccaaaacagttttaa

SEQ ID NO: 1767392 - DNA, 15 bp, Homo sapiens
caaaacagttttaaa

SEQ ID NO: 1767393 - DNA, 15 bp, Homo sapiens
aaaacagttttaaag

SEQ ID NO: 1767394 - DNA, 15 bp, Homo sapiens
aaacagttttaaaga

SEQ ID NO: 1767395 - DNA, 15 bp, Homo sapiens
aacagttttaaagac

SEQ ID NO: 1767396 - DNA, 15 bp, Homo sapiens
acagttttaaagaca

SEQ ID NO: 1767397 - DNA, 15 bp, Homo sapiens
cagttttaaagacaa

SEQ ID NO: 1767398 - DNA, 15 bp, Homo sapiens
agttttaaagacaaa

SEQ ID NO: 1767399 - DNA, 15 bp, Homo sapiens
gttttaaagacaaat

SEQ ID NO: 1767400 - DNA, 15 bp, Homo sapiens
ttttaaagacaaata

SEQ ID NO: 1767401 - DNA, 15 bp, Homo sapiens
ttaaagacaaataaa

SEQ ID NO: 1767402 - DNA, 15 bp, Homo sapiens
taaagacaaataaac

SEQ ID NO: 1767403 - DNA, 15 bp, Homo sapiens
aaagacaaataaaca

SEQ ID NO: 1767404 - DNA, 15 bp, Homo sapiens
aagacaaataaacaa

SEQ ID NO: 1767405 - DNA, 15 bp, Homo sapiens
agacaaataaacaag

SEQ ID NO: 1767406 - DNA, 15 bp, Homo sapiens
gacaaataaacaagc

SEQ ID NO: 1767407 - DNA, 15 bp, Homo sapiens
acaaataaacaagca

SEQ ID NO: 1767408 - DNA, 15 bp, Homo sapiens
caaataaacaagcag

SEQ ID NO: 1767409 - DNA, 15 bp, Homo sapiens
aaataaacaagcaga

SEQ ID NO: 1767410 - DNA, 15 bp, Homo sapiens
aataaacaagcagag

SEQ ID NO: 1767411 - DNA, 15 bp, Homo sapiens
ataaacaagcagaga

SEQ ID NO: 1767412 - DNA, 15 bp, Homo sapiens
taaacaagcagagaa

SEQ ID NO: 1767413 - DNA, 15 bp, Homo sapiens
aaacaagcagagaaa

SEQ ID NO: 1767414 - DNA, 15 bp, Homo sapiens
aacaagcagagaaag

SEQ ID NO: 1767415 - DNA, 15 bp, Homo sapiens
acaagcagagaaagc

SEQ ID NO: 1767416 - DNA, 15 bp, Homo sapiens
caagcagagaaagca

SEQ ID NO: 1767417 - DNA, 15 bp, Homo sapiens
aagcagagaaagcac

SEQ ID NO: 1767418 - DNA, 15 bp, Homo sapiens
agcagagaaagcacg

SEQ ID NO: 1767419 - DNA, 15 bp, Homo sapiens
gcagagaaagcacgt

SEQ ID NO: 1767420 - DNA, 15 bp, Homo sapiens
cagagaaagcacgtt

SEQ ID NO: 1767421 - DNA, 15 bp, Homo sapiens
agagaaagcacgttc

SEQ ID NO: 1767422 - DNA, 15 bp, Homo sapiens
gagaaagcacgttcg

SEQ ID NO: 1767423 - DNA, 15 bp, Homo sapiens
agaaagcacgttcgg

SEQ ID NO: 1767424 - DNA, 15 bp, Homo sapiens
gaaagcacgttcggt

SEQ ID NO: 1767425 - DNA, 15 bp, Homo sapiens
aaagcacgttcggtc

SEQ ID NO: 1767426 - DNA, 15 bp, Homo sapiens
aagcacgttcggtct

SEQ ID NO: 1767427 - DNA, 15 bp, Homo sapiens
agcacgttcggtctt

SEQ ID NO: 1767428 - DNA, 15 bp, Homo sapiens
gcacgttcggtcttg

SEQ ID NO: 1767429 - DNA, 15 bp, Homo sapiens
cacgttcggtcttga

SEQ ID NO: 1767430 - DNA, 15 bp, Homo sapiens
acgttcggtcttgac

SEQ ID NO: 1767431 - DNA, 15 bp, Homo sapiens
cgttcggtcttgacc

SEQ ID NO: 1767432 - DNA, 15 bp, Homo sapiens
gttcggtcttgaccc

SEQ ID NO: 1767433 - DNA, 15 bp, Homo sapiens
ttcggtcttgaccca

SEQ ID NO: 1767434 - DNA, 15 bp, Homo sapiens
tcggtcttgacccag

SEQ ID NO: 1767435 - DNA, 15 bp, Homo sapiens
cggtcttgacccaga

SEQ ID NO: 1767436 - DNA, 15 bp, Homo sapiens
ggtcttgacccagat

SEQ ID NO: 1767437 - DNA, 15 bp, Homo sapiens
gtcttgacccagatg

SEQ ID NO: 1767438 - DNA, 15 bp, Homo sapiens
tcttgacccagatga

SEQ ID NO: 1767439 - DNA, 15 bp, Homo sapiens
cttgacccagatgag

SEQ ID NO: 1767440 - DNA, 15 bp, Homo sapiens
ttgacccagatgaga

SEQ ID NO: 1767441 - DNA, 15 bp, Homo sapiens
tgacccagatgagag

SEQ ID NO: 1767442 - DNA, 15 bp, Homo sapiens
gacccagatgagaga

SEQ ID NO: 1767443 - DNA, 15 bp, Homo sapiens
acccagatgagagaa

SEQ ID NO: 1767444 - DNA, 15 bp, Homo sapiens
cccagatgagagaaa

SEQ ID NO: 1767445 - DNA, 15 bp, Homo sapiens
ccagatgagagaaat

SEQ ID NO: 1767446 - DNA, 15 bp, Homo sapiens
cagatgagagaaatg

SEQ ID NO: 1767447 - DNA, 15 bp, Homo sapiens
agatgagagaaatgg

SEQ ID NO: 1767448 - DNA, 15 bp, Homo sapiens
gatgagagaaatggc

SEQ ID NO: 1767449 - DNA, 15 bp, Homo sapiens
atgagagaaatggca

SEQ ID NO: 1767450 - DNA, 15 bp, Homo sapiens
tgagagaaatggcat

SEQ ID NO: 1767451 - DNA, 15 bp, Homo sapiens
gagagaaatggcatg

SEQ ID NO: 1767452 - DNA, 15 bp, Homo sapiens
agagaaatggcatgt

SEQ ID NO: 1767453 - DNA, 15 bp, Homo sapiens
gagaaatggcatgtc

SEQ ID NO: 1767454 - DNA, 15 bp, Homo sapiens
agaaatggcatgtcc

SEQ ID NO: 1767455 - DNA, 15 bp, Homo sapiens
gaaatggcatgtccc

SEQ ID NO: 1767456 - DNA, 15 bp, Homo sapiens
aaatggcatgtcccc

SEQ ID NO: 1767457 - DNA, 15 bp, Homo sapiens
aatggcatgtcccct

SEQ ID NO: 1767458 - DNA, 15 bp, Homo sapiens
atggcatgtcccctc

SEQ ID NO: 1767459 - DNA, 15 bp, Homo sapiens
tggcatgtcccctct

SEQ ID NO: 1767460 - DNA, 15 bp, Homo sapiens
ggcatgtcccctctc

SEQ ID NO: 1767461 - DNA, 15 bp, Homo sapiens
gcatgtcccctctca

SEQ ID NO: 1767462 - DNA, 15 bp, Homo sapiens
catgtcccctctcac

SEQ ID NO: 1767463 - DNA, 15 bp, Homo sapiens
atgtcccctctcact

SEQ ID NO: 1767464 - DNA, 15 bp, Homo sapiens
tgtcccctctcactc

SEQ ID NO: 1767465 - DNA, 15 bp, Homo sapiens
gtcccctctcactca

SEQ ID NO: 1767466 - DNA, 15 bp, Homo sapiens
tcccctctcactcag

SEQ ID NO: 1767467 - DNA, 15 bp, Homo sapiens
cccctctcactcagg

SEQ ID NO: 1767468 - DNA, 15 bp, Homo sapiens
ccctctcactcaggg

SEQ ID NO: 1767469 - DNA, 15 bp, Homo sapiens
cctctcactcagggg

SEQ ID NO: 1767470 - DNA, 15 bp, Homo sapiens
ctctcactcagggga

SEQ ID NO: 1767471 - DNA, 15 bp, Homo sapiens
tctcactcaggggac

SEQ ID NO: 1767472 - DNA, 15 bp, Homo sapiens
ctcactcaggggaca

SEQ ID NO: 1767473 - DNA, 15 bp, Homo sapiens
tcactcaggggacaa

SEQ ID NO: 1767474 - DNA, 15 bp, Homo sapiens
cactcaggggacaat

SEQ ID NO: 1767475 - DNA, 15 bp, Homo sapiens
actcaggggacaatc

SEQ ID NO: 1767476 - DNA, 15 bp, Homo sapiens
ctcaggggacaatcc

SEQ ID NO: 1767477 - DNA, 15 bp, Homo sapiens
tcaggggacaatcca

SEQ ID NO: 1767478 - DNA, 15 bp, Homo sapiens
caggggacaatccag

SEQ ID NO: 1767479 - DNA, 15 bp, Homo sapiens
aggggacaatccaga

SEQ ID NO: 1767480 - DNA, 15 bp, Homo sapiens
ggggacaatccagag

SEQ ID NO: 1767481 - DNA, 15 bp, Homo sapiens
gggacaatccagaga

SEQ ID NO: 1767482 - DNA, 15 bp, Homo sapiens
ggacaatccagagac

SEQ ID NO: 1767483 - DNA, 15 bp, Homo sapiens
gacaatccagagact

SEQ ID NO: 1767484 - DNA, 15 bp, Homo sapiens
acaatccagagactc

SEQ ID NO: 1767485 - DNA, 15 bp, Homo sapiens
caatccagagactca

SEQ ID NO: 1767486 - DNA, 15 bp, Homo sapiens
aatccagagactcac

SEQ ID NO: 1767487 - DNA, 15 bp, Homo sapiens
atccagagactcact

SEQ ID NO: 1767488 - DNA, 15 bp, Homo sapiens
tccagagactcactt

SEQ ID NO: 1767489 - DNA, 15 bp, Homo sapiens
ccagagactcacttg

SEQ ID NO: 1767490 - DNA, 15 bp, Homo sapiens
cagagactcacttgc

SEQ ID NO: 1767491 - DNA, 15 bp, Homo sapiens
agagactcacttgcg

SEQ ID NO: 1767492 - DNA, 15 bp, Homo sapiens
gagactcacttgcgc

SEQ ID NO: 1767493 - DNA, 15 bp, Homo sapiens
agactcacttgcgcg

SEQ ID NO: 1767494 - DNA, 15 bp, Homo sapiens
gactcacttgcgcgt

SEQ ID NO: 1767495 - DNA, 15 bp, Homo sapiens
actcacttgcgcgtg

SEQ ID NO: 1767496 - DNA, 15 bp, Homo sapiens
ctcacttgcgcgtga

SEQ ID NO: 1767497 - DNA, 15 bp, Homo sapiens
tcacttgcgcgtgag

SEQ ID NO: 1767498 - DNA, 15 bp, Homo sapiens
cacttgcgcgtgaga

SEQ ID NO: 1767499 - DNA, 15 bp, Homo sapiens
acttgcgcgtgagac

SEQ ID NO: 1767500 - DNA, 15 bp, Homo sapiens
cttgcgcgtgagact

SEQ ID NO: 1767501 - DNA, 15 bp, Homo sapiens
ttgcgcgtgagactg

SEQ ID NO: 1767502 - DNA, 15 bp, Homo sapiens
tgcgcgtgagactgc

SEQ ID NO: 1767503 - DNA, 15 bp, Homo sapiens
gcgcgtgagactgct

SEQ ID NO: 1767504 - DNA, 15 bp, Homo sapiens
cgcgtgagactgctg

SEQ ID NO: 1767505 - DNA, 15 bp, Homo sapiens
gcgtgagactgctgc

SEQ ID NO: 1767506 - DNA, 15 bp, Homo sapiens
cgtgagactgctgca

SEQ ID NO: 1767507 - DNA, 15 bp, Homo sapiens
gtgagactgctgcac

SEQ ID NO: 1767508 - DNA, 15 bp, Homo sapiens
tgagactgctgcacg

SEQ ID NO: 1767509 - DNA, 15 bp, Homo sapiens
gagactgctgcacgc

SEQ ID NO: 1767510 - DNA, 15 bp, Homo sapiens
agactgctgcacgca

SEQ ID NO: 1767511 - DNA, 15 bp, Homo sapiens
gactgctgcacgcac

SEQ ID NO: 1767512 - DNA, 15 bp, Homo sapiens
actgctgcacgcaca

SEQ ID NO: 1767513 - DNA, 15 bp, Homo sapiens
ctgctgcacgcacag

SEQ ID NO: 1767514 - DNA, 15 bp, Homo sapiens
tgctgcacgcacagt

SEQ ID NO: 1767515 - DNA, 15 bp, Homo sapiens
gctgcacgcacagtg

SEQ ID NO: 1767516 - DNA, 15 bp, Homo sapiens
ctgcacgcacagtgc

SEQ ID NO: 1767517 - DNA, 15 bp, Homo sapiens
tgcacgcacagtgcg

SEQ ID NO: 1767518 - DNA, 15 bp, Homo sapiens
gcacgcacagtgcgc

SEQ ID NO: 1767519 - DNA, 15 bp, Homo sapiens
cacgcacagtgcgcg

SEQ ID NO: 1767520 - DNA, 15 bp, Homo sapiens
acgcacagtgcgcgt

SEQ ID NO: 1767521 - DNA, 15 bp, Homo sapiens
cgcacagtgcgcgtt

SEQ ID NO: 1767522 - DNA, 15 bp, Homo sapiens
gcacagtgcgcgttc

SEQ ID NO: 1767523 - DNA, 15 bp, Homo sapiens
cacagtgcgcgttcc

SEQ ID NO: 1767524 - DNA, 15 bp, Homo sapiens
acagtgcgcgttcca

SEQ ID NO: 1767525 - DNA, 15 bp, Homo sapiens
cagtgcgcgttccat

SEQ ID NO: 1767526 - DNA, 15 bp, Homo sapiens
agtgcgcgttccata

SEQ ID NO: 1767527 - DNA, 15 bp, Homo sapiens
gtgcgcgttccatag

SEQ ID NO: 1767528 - DNA, 15 bp, Homo sapiens
tgcgcgttccatagg

SEQ ID NO: 1767529 - DNA, 15 bp, Homo sapiens
gcgcgttccataggg

SEQ ID NO: 1767530 - DNA, 15 bp, Homo sapiens
cgcgttccatagggc

SEQ ID NO: 1767531 - DNA, 15 bp, Homo sapiens
gcgttccatagggca

SEQ ID NO: 1767532 - DNA, 15 bp, Homo sapiens
cgttccatagggcag

SEQ ID NO: 1767533 - DNA, 15 bp, Homo sapiens
gttccatagggcagg

SEQ ID NO: 1767534 - DNA, 15 bp, Homo sapiens
ttccatagggcaggg

SEQ ID NO: 1767535 - DNA, 15 bp, Homo sapiens
tccatagggcagggc

SEQ ID NO: 1767536 - DNA, 15 bp, Homo sapiens
ccatagggcagggcc

SEQ ID NO: 1767537 - DNA, 15 bp, Homo sapiens
catagggcagggcct

SEQ ID NO: 1767538 - DNA, 15 bp, Homo sapiens
atagggcagggcctg

SEQ ID NO: 1767539 - DNA, 15 bp, Homo sapiens
tagggcagggcctgt

SEQ ID NO: 1767540 - DNA, 15 bp, Homo sapiens
agggcagggcctgta

SEQ ID NO: 1767541 - DNA, 15 bp, Homo sapiens
gggcagggcctgtat

SEQ ID NO: 1767542 - DNA, 15 bp, Homo sapiens
ggcagggcctgtatc

SEQ ID NO: 1767543 - DNA, 15 bp, Homo sapiens
gcagggcctgtatcc

SEQ ID NO: 1767544 - DNA, 15 bp, Homo sapiens
cagggcctgtatcct

SEQ ID NO: 1767545 - DNA, 15 bp, Homo sapiens
agggcctgtatcctg

SEQ ID NO: 1767546 - DNA, 15 bp, Homo sapiens
gggcctgtatcctgc

SEQ ID NO: 1767547 - DNA, 15 bp, Homo sapiens
ggcctgtatcctgct

SEQ ID NO: 1767548 - DNA, 15 bp, Homo sapiens
gcctgtatcctgctg

SEQ ID NO: 1767549 - DNA, 15 bp, Homo sapiens
cctgtatcctgctgt

SEQ ID NO: 1767550 - DNA, 15 bp, Homo sapiens
ctgtatcctgctgtg

SEQ ID NO: 1767551 - DNA, 15 bp, Homo sapiens
tgtatcctgctgtgt

SEQ ID NO: 1767552 - DNA, 15 bp, Homo sapiens
gtatcctgctgtgtc

SEQ ID NO: 1767553 - DNA, 15 bp, Homo sapiens
tatcctgctgtgtcc

SEQ ID NO: 1767554 - DNA, 15 bp, Homo sapiens
atcctgctgtgtcct

SEQ ID NO: 1767555 - DNA, 15 bp, Homo sapiens
tcctgctgtgtcctt

SEQ ID NO: 1767556 - DNA, 15 bp, Homo sapiens
cctgctgtgtcctta

SEQ ID NO: 1767557 - DNA, 15 bp, Homo sapiens
ctgctgtgtccttaa

SEQ ID NO: 1767558 - DNA, 15 bp, Homo sapiens
tgctgtgtccttaac

SEQ ID NO: 1767559 - DNA, 15 bp, Homo sapiens
gctgtgtccttaaca

SEQ ID NO: 1767560 - DNA, 15 bp, Homo sapiens
ctgtgtccttaacac

SEQ ID NO: 1767561 - DNA, 15 bp, Homo sapiens
tgtgtccttaacacc

SEQ ID NO: 1767562 - DNA, 15 bp, Homo sapiens
gtgtccttaacacct

SEQ ID NO: 1767563 - DNA, 15 bp, Homo sapiens
tgtccttaacaccta

SEQ ID NO: 1767564 - DNA, 15 bp, Homo sapiens
gtccttaacacctag

SEQ ID NO: 1767565 - DNA, 15 bp, Homo sapiens
tccttaacacctaga

SEQ ID NO: 1767566 - DNA, 15 bp, Homo sapiens
ccttaacacctagaa

SEQ ID NO: 1767567 - DNA, 15 bp, Homo sapiens
cttaacacctagaac

SEQ ID NO: 1767568 - DNA, 15 bp, Homo sapiens
ttaacacctagaaca

SEQ ID NO: 1767569 - DNA, 15 bp, Homo sapiens
taacacctagaacag

SEQ ID NO: 1767570 - DNA, 15 bp, Homo sapiens
aacacctagaacagg

SEQ ID NO: 1767571 - DNA, 15 bp, Homo sapiens
acacctagaacaggg

SEQ ID NO: 1767572 - DNA, 15 bp, Homo sapiens
cctagaacagggtcc

SEQ ID NO: 1767573 - DNA, 15 bp, Homo sapiens
ctagaacagggtccg

SEQ ID NO: 1767574 - DNA, 15 bp, Homo sapiens
tagaacagggtccgt

SEQ ID NO: 1767575 - DNA, 15 bp, Homo sapiens
agaacagggtccgtc

SEQ ID NO: 1767576 - DNA, 15 bp, Homo sapiens
gaacagggtccgtca

SEQ ID NO: 1767577 - DNA, 15 bp, Homo sapiens
aacagggtccgtcat

SEQ ID NO: 1767578 - DNA, 15 bp, Homo sapiens
acagggtccgtcatg

SEQ ID NO: 1767579 - DNA, 15 bp, Homo sapiens
cagggtccgtcatgt

SEQ ID NO: 1767580 - DNA, 15 bp, Homo sapiens
agggtccgtcatgta

SEQ ID NO: 1767581 - DNA, 15 bp, Homo sapiens
gggtccgtcatgtag

SEQ ID NO: 1767582 - DNA, 15 bp, Homo sapiens
ggtccgtcatgtagc

SEQ ID NO: 1767583 - DNA, 15 bp, Homo sapiens
gtccgtcatgtagca

SEQ ID NO: 1767584 - DNA, 15 bp, Homo sapiens
tccgtcatgtagcac

SEQ ID NO: 1767585 - DNA, 15 bp, Homo sapiens
ccgtcatgtagcact

SEQ ID NO: 1767586 - DNA, 15 bp, Homo sapiens
cgtcatgtagcactc

SEQ ID NO: 1767587 - DNA, 15 bp, Homo sapiens
gtcatgtagcactca

SEQ ID NO: 1767588 - DNA, 15 bp, Homo sapiens
tcatgtagcactcat

SEQ ID NO: 1767589 - DNA, 15 bp, Homo sapiens
catgtagcactcatg

SEQ ID NO: 1767590 - DNA, 15 bp, Homo sapiens
atgtagcactcatgg

SEQ ID NO: 1767591 - DNA, 15 bp, Homo sapiens
tgtagcactcatggc

SEQ ID NO: 1767592 - DNA, 15 bp, Homo sapiens
gtagcactcatggcc

SEQ ID NO: 1767593 - DNA, 15 bp, Homo sapiens
tagcactcatggccc

SEQ ID NO: 1767594 - DNA, 15 bp, Homo sapiens
agcactcatggcccg

SEQ ID NO: 1767595 - DNA, 15 bp, Homo sapiens
gcactcatggcccgc

SEQ ID NO: 1767596 - DNA, 15 bp, Homo sapiens
cactcatggcccgcg

SEQ ID NO: 1767597 - DNA, 15 bp, Homo sapiens
actcatggcccgcgg

SEQ ID NO: 1767598 - DNA, 15 bp, Homo sapiens
ctcatggcccgcggg

SEQ ID NO: 1767599 - DNA, 15 bp, Homo sapiens
tcatggcccgcgggg

SEQ ID NO: 1767600 - DNA, 15 bp, Homo sapiens
catggcccgcggggt

SEQ ID NO: 1767601 - DNA, 15 bp, Homo sapiens
atggcccgcggggtc

SEQ ID NO: 1767602 - DNA, 15 bp, Homo sapiens
tggcccgcggggtca

SEQ ID NO: 1767603 - DNA, 15 bp, Homo sapiens
ggcccgcggggtcat

SEQ ID NO: 1767604 - DNA, 15 bp, Homo sapiens
gcccgcggggtcatg

SEQ ID NO: 1767605 - DNA, 15 bp, Homo sapiens
cccgcggggtcatgc

SEQ ID NO: 1767606 - DNA, 15 bp, Homo sapiens
ccgcggggtcatgcc

SEQ ID NO: 1767607 - DNA, 15 bp, Homo sapiens
cgcggggtcatgcct

SEQ ID NO: 1767608 - DNA, 15 bp, Homo sapiens
gcggggtcatgcctg

SEQ ID NO: 1767609 - DNA, 15 bp, Homo sapiens
cggggtcatgcctgc

SEQ ID NO: 1767610 - DNA, 15 bp, Homo sapiens
ggggtcatgcctgca

SEQ ID NO: 1767611 - DNA, 15 bp, Homo sapiens
gggtcatgcctgcac

SEQ ID NO: 1767612 - DNA, 15 bp, Homo sapiens
ggtcatgcctgcaca

SEQ ID NO: 1767613 - DNA, 15 bp, Homo sapiens
gtcatgcctgcacag

SEQ ID NO: 1767614 - DNA, 15 bp, Homo sapiens
tcatgcctgcacaga

SEQ ID NO: 1767615 - DNA, 15 bp, Homo sapiens
catgcctgcacagag

SEQ ID NO: 1767616 - DNA, 15 bp, Homo sapiens
atgcctgcacagagg

SEQ ID NO: 1767617 - DNA, 15 bp, Homo sapiens
tgcctgcacagaggg

SEQ ID NO: 1767618 - DNA, 15 bp, Homo sapiens
gcctgcacagagggt

SEQ ID NO: 1767619 - DNA, 15 bp, Homo sapiens
cctgcacagagggtc

SEQ ID NO: 1767620 - DNA, 15 bp, Homo sapiens
ctgcacagagggtct

SEQ ID NO: 1767621 - DNA, 15 bp, Homo sapiens
tgcacagagggtctc

SEQ ID NO: 1767622 - DNA, 15 bp, Homo sapiens
gcacagagggtctcg

SEQ ID NO: 1767623 - DNA, 15 bp, Homo sapiens
cacagagggtctcgg

SEQ ID NO: 1767624 - DNA, 15 bp, Homo sapiens
acagagggtctcggg

SEQ ID NO: 1767625 - DNA, 15 bp, Homo sapiens
cagagggtctcggga

SEQ ID NO: 1767626 - DNA, 15 bp, Homo sapiens
agagggtctcgggaa

SEQ ID NO: 1767627 - DNA, 15 bp, Homo sapiens
gagggtctcgggaag

SEQ ID NO: 1767628 - DNA, 15 bp, Homo sapiens
agggtctcgggaagc

SEQ ID NO: 1767629 - DNA, 15 bp, Homo sapiens
gggtctcgggaagct

SEQ ID NO: 1767630 - DNA, 15 bp, Homo sapiens
ggtctcgggaagctc

SEQ ID NO: 1767631 - DNA, 15 bp, Homo sapiens
gtctcgggaagctcc

SEQ ID NO: 1767632 - DNA, 15 bp, Homo sapiens
tctcgggaagctcct

SEQ ID NO: 1767633 - DNA, 15 bp, Homo sapiens
ctcgggaagctcctc

SEQ ID NO: 1767634 - DNA, 15 bp, Homo sapiens
tcgggaagctcctcc

SEQ ID NO: 1767635 - DNA, 15 bp, Homo sapiens
cgggaagctcctcca

SEQ ID NO: 1767636 - DNA, 15 bp, Homo sapiens
gggaagctcctccaa

SEQ ID NO: 1767637 - DNA, 15 bp, Homo sapiens
ggaagctcctccaag

SEQ ID NO: 1767638 - DNA, 15 bp, Homo sapiens
gaagctcctccaagg

SEQ ID NO: 1767639 - DNA, 15 bp, Homo sapiens
aagctcctccaaggc

SEQ ID NO: 1767640 - DNA, 15 bp, Homo sapiens
agctcctccaaggcc

SEQ ID NO: 1767641 - DNA, 15 bp, Homo sapiens
gctcctccaaggccg

SEQ ID NO: 1767642 - DNA, 15 bp, Homo sapiens
ctcctccaaggccgg

SEQ ID NO: 1767643 - DNA, 15 bp, Homo sapiens
tcctccaaggccggc

SEQ ID NO: 1767644 - DNA, 15 bp, Homo sapiens
cctccaaggccggca

SEQ ID NO: 1767645 - DNA, 15 bp, Homo sapiens
ctccaaggccggcac

SEQ ID NO: 1767646 - DNA, 15 bp, Homo sapiens
tccaaggccggcaca

SEQ ID NO: 1767647 - DNA, 15 bp, Homo sapiens
ccaaggccggcacag

SEQ ID NO: 1767648 - DNA, 15 bp, Homo sapiens
caaggccggcacaga

SEQ ID NO: 1767649 - DNA, 15 bp, Homo sapiens
aaggccggcacagag

SEQ ID NO: 1767650 - DNA, 15 bp, Homo sapiens
aggccggcacagagt

SEQ ID NO: 1767651 - DNA, 15 bp, Homo sapiens
ggccggcacagagtg

SEQ ID NO: 1767652 - DNA, 15 bp, Homo sapiens
gccggcacagagtgg

SEQ ID NO: 1767653 - DNA, 15 bp, Homo sapiens
ccggcacagagtggt

SEQ ID NO: 1767654 - DNA, 15 bp, Homo sapiens
cggcacagagtggtt

SEQ ID NO: 1767655 - DNA, 15 bp, Homo sapiens
ggcacagagtggttc

SEQ ID NO: 1767656 - DNA, 15 bp, Homo sapiens
gcacagagtggttcc

SEQ ID NO: 1767657 - DNA, 15 bp, Homo sapiens
cacagagtggttcct

SEQ ID NO: 1767658 - DNA, 15 bp, Homo sapiens
acagagtggttcctc

SEQ ID NO: 1767659 - DNA, 15 bp, Homo sapiens
cagagtggttcctct

SEQ ID NO: 1767660 - DNA, 15 bp, Homo sapiens
agagtggttcctcta

SEQ ID NO: 1767661 - DNA, 15 bp, Homo sapiens
gagtggttcctctag

SEQ ID NO: 1767662 - DNA, 15 bp, Homo sapiens
agtggttcctctagg

SEQ ID NO: 1767663 - DNA, 15 bp, Homo sapiens
gtggttcctctaggg

SEQ ID NO: 1767664 - DNA, 15 bp, Homo sapiens
tggttcctctagggc

SEQ ID NO: 1767665 - DNA, 15 bp, Homo sapiens
ggttcctctagggcc

SEQ ID NO: 1767666 - DNA, 15 bp, Homo sapiens
gttcctctagggcct

SEQ ID NO: 1767667 - DNA, 15 bp, Homo sapiens
ttcctctagggcctt

SEQ ID NO: 1767668 - DNA, 15 bp, Homo sapiens
tcctctagggccttc

SEQ ID NO: 1767669 - DNA, 15 bp, Homo sapiens
cctctagggccttct

SEQ ID NO: 1767670 - DNA, 15 bp, Homo sapiens
ctctagggccttctg

SEQ ID NO: 1767671 - DNA, 15 bp, Homo sapiens
tctagggccttctgt

SEQ ID NO: 1767672 - DNA, 15 bp, Homo sapiens
ctagggccttctgtt

SEQ ID NO: 1767673 - DNA, 15 bp, Homo sapiens
tagggccttctgttg

SEQ ID NO: 1767674 - DNA, 15 bp, Homo sapiens
agggccttctgttgt

SEQ ID NO: 1767675 - DNA, 15 bp, Homo sapiens
gggccttctgttgtc

SEQ ID NO: 1767676 - DNA, 15 bp, Homo sapiens
ggccttctgttgtcg

SEQ ID NO: 1767677 - DNA, 15 bp, Homo sapiens
gccttctgttgtcgc

SEQ ID NO: 1767678 - DNA, 15 bp, Homo sapiens
ccttctgttgtcgcc

SEQ ID NO: 1767679 - DNA, 15 bp, Homo sapiens
cttctgttgtcgccc

SEQ ID NO: 1767680 - DNA, 15 bp, Homo sapiens
ttctgttgtcgcccc

SEQ ID NO: 1767681 - DNA, 15 bp, Homo sapiens
tctgttgtcgccccg

SEQ ID NO: 1767682 - DNA, 15 bp, Homo sapiens
ctgttgtcgccccgc

SEQ ID NO: 1767683 - DNA, 15 bp, Homo sapiens
tgttgtcgccccgca

SEQ ID NO: 1767684 - DNA, 15 bp, Homo sapiens
gttgtcgccccgcag

SEQ ID NO: 1767685 - DNA, 15 bp, Homo sapiens
ttgtcgccccgcagg

SEQ ID NO: 1767686 - DNA, 15 bp, Homo sapiens
tgtcgccccgcaggc

SEQ ID NO: 1767687 - DNA, 15 bp, Homo sapiens
gtcgccccgcaggct

SEQ ID NO: 1767688 - DNA, 15 bp, Homo sapiens
tcgccccgcaggctc

SEQ ID NO: 1767689 - DNA, 15 bp, Homo sapiens
cgccccgcaggctcc

SEQ ID NO: 1767690 - DNA, 15 bp, Homo sapiens
gccccgcaggctccg

SEQ ID NO: 1767691 - DNA, 15 bp, Homo sapiens
ccccgcaggctccgg

SEQ ID NO: 1767692 - DNA, 15 bp, Homo sapiens
cccgcaggctccggg

SEQ ID NO: 1767693 - DNA, 15 bp, Homo sapiens
ccgcaggctccggga

SEQ ID NO: 1767694 - DNA, 15 bp, Homo sapiens
cgcaggctccgggaa

SEQ ID NO: 1767695 - DNA, 15 bp, Homo sapiens
gcaggctccgggaaa

SEQ ID NO: 1767696 - DNA, 15 bp, Homo sapiens
caggctccgggaaaa

SEQ ID NO: 1767697 - DNA, 15 bp, Homo sapiens
aggctccgggaaaac

SEQ ID NO: 1767698 - DNA, 15 bp, Homo sapiens
ggctccgggaaaacc

SEQ ID NO: 1767699 - DNA, 15 bp, Homo sapiens
gctccgggaaaacca

SEQ ID NO: 1767700 - DNA, 15 bp, Homo sapiens
ctccgggaaaaccac

SEQ ID NO: 1767701 - DNA, 15 bp, Homo sapiens
tccgggaaaaccacg

SEQ ID NO: 1767702 - DNA, 15 bp, Homo sapiens
ccgggaaaaccacgc

SEQ ID NO: 1767703 - DNA, 15 bp, Homo sapiens
cgggaaaaccacgct

SEQ ID NO: 1767704 - DNA, 15 bp, Homo sapiens
gggaaaaccacgctg

SEQ ID NO: 1767705 - DNA, 15 bp, Homo sapiens
ggaaaaccacgctgc

SEQ ID NO: 1767706 - DNA, 15 bp, Homo sapiens
gaaaaccacgctgct

SEQ ID NO: 1767707 - DNA, 15 bp, Homo sapiens
aaaaccacgctgctg

SEQ ID NO: 1767708 - DNA, 15 bp, Homo sapiens
aaaccacgctgctgg

SEQ ID NO: 1767709 - DNA, 15 bp, Homo sapiens
aaccacgctgctgga

SEQ ID NO: 1767710 - DNA, 15 bp, Homo sapiens
accacgctgctggac

SEQ ID NO: 1767711 - DNA, 15 bp, Homo sapiens
ccacgctgctggacg

SEQ ID NO: 1767712 - DNA, 15 bp, Homo sapiens
cacgctgctggacgc

SEQ ID NO: 1767713 - DNA, 15 bp, Homo sapiens
acgctgctggacgcc

SEQ ID NO: 1767714 - DNA, 15 bp, Homo sapiens
cgctgctggacgcca

SEQ ID NO: 1767715 - DNA, 15 bp, Homo sapiens
gctgctggacgccat

SEQ ID NO: 1767716 - DNA, 15 bp, Homo sapiens
ctgctggacgccatg

SEQ ID NO: 1767717 - DNA, 15 bp, Homo sapiens
tgctggacgccatgt

SEQ ID NO: 1767718 - DNA, 15 bp, Homo sapiens
gctggacgccatgtc

SEQ ID NO: 1767719 - DNA, 15 bp, Homo sapiens
ctggacgccatgtcc

SEQ ID NO: 1767720 - DNA, 15 bp, Homo sapiens
tggacgccatgtccg

SEQ ID NO: 1767721 - DNA, 15 bp, Homo sapiens
ggacgccatgtccgg

SEQ ID NO: 1767722 - DNA, 15 bp, Homo sapiens
gacgccatgtccggg

SEQ ID NO: 1767723 - DNA, 15 bp, Homo sapiens
acgccatgtccggga

SEQ ID NO: 1767724 - DNA, 15 bp, Homo sapiens
cgccatgtccgggag

SEQ ID NO: 1767725 - DNA, 15 bp, Homo sapiens
gccatgtccgggagg

SEQ ID NO: 1767726 - DNA, 15 bp, Homo sapiens
ccatgtccgggaggc

SEQ ID NO: 1767727 - DNA, 15 bp, Homo sapiens
catgtccgggaggct

SEQ ID NO: 1767728 - DNA, 15 bp, Homo sapiens
atgtccgggaggctg

SEQ ID NO: 1767729 - DNA, 15 bp, Homo sapiens
tgtccgggaggctgg

SEQ ID NO: 1767730 - DNA, 15 bp, Homo sapiens
gtccgggaggctggg

SEQ ID NO: 1767731 - DNA, 15 bp, Homo sapiens
tccgggaggctgggg

SEQ ID NO: 1767732 - DNA, 15 bp, Homo sapiens
ccgggaggctggggc

SEQ ID NO: 1767733 - DNA, 15 bp, Homo sapiens
cgggaggctggggcg

SEQ ID NO: 1767734 - DNA, 15 bp, Homo sapiens
gggaggctggggcgc

SEQ ID NO: 1767735 - DNA, 15 bp, Homo sapiens
ggaggctggggcgcg

SEQ ID NO: 1767736 - DNA, 15 bp, Homo sapiens
gaggctggggcgcgc

SEQ ID NO: 1767737 - DNA, 15 bp, Homo sapiens
aggctggggcgcgcg

SEQ ID NO: 1767738 - DNA, 15 bp, Homo sapiens
ggctggggcgcgcgg

SEQ ID NO: 1767739 - DNA, 15 bp, Homo sapiens
gctggggcgcgcggg

SEQ ID NO: 1767740 - DNA, 15 bp, Homo sapiens
ctggggcgcgcgggg

SEQ ID NO: 1767741 - DNA, 15 bp, Homo sapiens
tggggcgcgcgggga

SEQ ID NO: 1767742 - DNA, 15 bp, Homo sapiens
ggggcgcgcggggac

SEQ ID NO: 1767743 - DNA, 15 bp, Homo sapiens
gggcgcgcggggacc

SEQ ID NO: 1767744 - DNA, 15 bp, Homo sapiens
ggcgcgcggggacct

SEQ ID NO: 1767745 - DNA, 15 bp, Homo sapiens
gcgcgcggggacctt

SEQ ID NO: 1767746 - DNA, 15 bp, Homo sapiens
cgcgcggggaccttc

SEQ ID NO: 1767747 - DNA, 15 bp, Homo sapiens
gcgcggggaccttcc

SEQ ID NO: 1767748 - DNA, 15 bp, Homo sapiens
cgcggggaccttcct

SEQ ID NO: 1767749 - DNA, 15 bp, Homo sapiens
gcggggaccttcctg

SEQ ID NO: 1767750 - DNA, 15 bp, Homo sapiens
cggggaccttcctgg

SEQ ID NO: 1767751 - DNA, 15 bp, Homo sapiens
ggggaccttcctggg

SEQ ID NO: 1767752 - DNA, 15 bp, Homo sapiens
gggaccttcctgggg

SEQ ID NO: 1767753 - DNA, 15 bp, Homo sapiens
ggaccttcctggggg

SEQ ID NO: 1767754 - DNA, 15 bp, Homo sapiens
gaccttcctggggga

SEQ ID NO: 1767755 - DNA, 15 bp, Homo sapiens
accttcctgggggag

SEQ ID NO: 1767756 - DNA, 15 bp, Homo sapiens
ccttcctgggggagg

SEQ ID NO: 1767757 - DNA, 15 bp, Homo sapiens
cttcctgggggaggt

SEQ ID NO: 1767758 - DNA, 15 bp, Homo sapiens
ttcctgggggaggtg

SEQ ID NO: 1767759 - DNA, 15 bp, Homo sapiens
tcctgggggaggtgt

SEQ ID NO: 1767760 - DNA, 15 bp, Homo sapiens
cctgggggaggtgta

SEQ ID NO: 1767761 - DNA, 15 bp, Homo sapiens
ctgggggaggtgtat

SEQ ID NO: 1767762 - DNA, 15 bp, Homo sapiens
tgggggaggtgtatg

SEQ ID NO: 1767763 - DNA, 15 bp, Homo sapiens
gggggaggtgtatgt

SEQ ID NO: 1767764 - DNA, 15 bp, Homo sapiens
ggggaggtgtatgtg

SEQ ID NO: 1767765 - DNA, 15 bp, Homo sapiens
gggaggtgtatgtga

SEQ ID NO: 1767766 - DNA, 15 bp, Homo sapiens
ggaggtgtatgtgaa

SEQ ID NO: 1767767 - DNA, 15 bp, Homo sapiens
gaggtgtatgtgaac

SEQ ID NO: 1767768 - DNA, 15 bp, Homo sapiens
aggtgtatgtgaacg

SEQ ID NO: 1767769 - DNA, 15 bp, Homo sapiens
ggtgtatgtgaacgg

SEQ ID NO: 1767770 - DNA, 15 bp, Homo sapiens
gtgtatgtgaacggc

SEQ ID NO: 1767771 - DNA, 15 bp, Homo sapiens
tgtatgtgaacggcc

SEQ ID NO: 1767772 - DNA, 15 bp, Homo sapiens
gtatgtgaacggccg

SEQ ID NO: 1767773 - DNA, 15 bp, Homo sapiens
tatgtgaacggccgg

SEQ ID NO: 1767774 - DNA, 15 bp, Homo sapiens
atgtgaacggccggg

SEQ ID NO: 1767775 - DNA, 15 bp, Homo sapiens
tgtgaacggccgggc

SEQ ID NO: 1767776 - DNA, 15 bp, Homo sapiens
gtgaacggccgggcg

SEQ ID NO: 1767777 - DNA, 15 bp, Homo sapiens
tgaacggccgggcgc

SEQ ID NO: 1767778 - DNA, 15 bp, Homo sapiens
gaacggccgggcgct

SEQ ID NO: 1767779 - DNA, 15 bp, Homo sapiens
aacggccgggcgctg

SEQ ID NO: 1767780 - DNA, 15 bp, Homo sapiens
acggccgggcgctgc

SEQ ID NO: 1767781 - DNA, 15 bp, Homo sapiens
cggccgggcgctgcg

SEQ ID NO: 1767782 - DNA, 15 bp, Homo sapiens
ggccgggcgctgcgc

SEQ ID NO: 1767783 - DNA, 15 bp, Homo sapiens
gccgggcgctgcgcc

SEQ ID NO: 1767784 - DNA, 15 bp, Homo sapiens
ccgggcgctgcgccg

SEQ ID NO: 1767785 - DNA, 15 bp, Homo sapiens
cgggcgctgcgccgg

SEQ ID NO: 1767786 - DNA, 15 bp, Homo sapiens
gggcgctgcgccggg

SEQ ID NO: 1767787 - DNA, 15 bp, Homo sapiens
ggcgctgcgccggga

SEQ ID NO: 1767788 - DNA, 15 bp, Homo sapiens
gcgctgcgccgggag

SEQ ID NO: 1767789 - DNA, 15 bp, Homo sapiens
cgctgcgccgggagc

SEQ ID NO: 1767790 - DNA, 15 bp, Homo sapiens
gctgcgccgggagca

SEQ ID NO: 1767791 - DNA, 15 bp, Homo sapiens
ctgcgccgggagcag

SEQ ID NO: 1767792 - DNA, 15 bp, Homo sapiens
tgcgccgggagcagt

SEQ ID NO: 1767793 - DNA, 15 bp, Homo sapiens
gcgccgggagcagtt

SEQ ID NO: 1767794 - DNA, 15 bp, Homo sapiens
cgccgggagcagttc

SEQ ID NO: 1767795 - DNA, 15 bp, Homo sapiens
gccgggagcagttcc

SEQ ID NO: 1767796 - DNA, 15 bp, Homo sapiens
ccgggagcagttcca

SEQ ID NO: 1767797 - DNA, 15 bp, Homo sapiens
cgggagcagttccag

SEQ ID NO: 1767798 - DNA, 15 bp, Homo sapiens
gggagcagttccagg

SEQ ID NO: 1767799 - DNA, 15 bp, Homo sapiens
ggagcagttccagga

SEQ ID NO: 1767800 - DNA, 15 bp, Homo sapiens
gagcagttccaggac

SEQ ID NO: 1767801 - DNA, 15 bp, Homo sapiens
agcagttccaggact

SEQ ID NO: 1767802 - DNA, 15 bp, Homo sapiens
gcagttccaggactg

SEQ ID NO: 1767803 - DNA, 15 bp, Homo sapiens
cagttccaggactgc

SEQ ID NO: 1767804 - DNA, 15 bp, Homo sapiens
agttccaggactgct

SEQ ID NO: 1767805 - DNA, 15 bp, Homo sapiens
gttccaggactgctt

SEQ ID NO: 1767806 - DNA, 15 bp, Homo sapiens
ttccaggactgcttc

SEQ ID NO: 1767807 - DNA, 15 bp, Homo sapiens
tccaggactgcttct

SEQ ID NO: 1767808 - DNA, 15 bp, Homo sapiens
ccaggactgcttctc

SEQ ID NO: 1767809 - DNA, 15 bp, Homo sapiens
caggactgcttctcc

SEQ ID NO: 1767810 - DNA, 15 bp, Homo sapiens
aggactgcttctcct

SEQ ID NO: 1767811 - DNA, 15 bp, Homo sapiens
ggactgcttctccta

SEQ ID NO: 1767812 - DNA, 15 bp, Homo sapiens
gactgcttctcctac

SEQ ID NO: 1767813 - DNA, 15 bp, Homo sapiens
actgcttctcctacg

SEQ ID NO: 1767814 - DNA, 15 bp, Homo sapiens
ctgcttctcctacgt

SEQ ID NO: 1767815 - DNA, 15 bp, Homo sapiens
tgcttctcctacgtc

SEQ ID NO: 1767816 - DNA, 15 bp, Homo sapiens
gcttctcctacgtcc

SEQ ID NO: 1767817 - DNA, 15 bp, Homo sapiens
cttctcctacgtcct

SEQ ID NO: 1767818 - DNA, 15 bp, Homo sapiens
ttctcctacgtcctg

SEQ ID NO: 1767819 - DNA, 15 bp, Homo sapiens
tctcctacgtcctgc

SEQ ID NO: 1767820 - DNA, 15 bp, Homo sapiens
ctcctacgtcctgca

SEQ ID NO: 1767821 - DNA, 15 bp, Homo sapiens
tcctacgtcctgcag

SEQ ID NO: 1767822 - DNA, 15 bp, Homo sapiens
cctacgtcctgcagg

SEQ ID NO: 1767823 - DNA, 15 bp, Homo sapiens
ctacgtcctgcaggt

SEQ ID NO: 1767824 - DNA, 15 bp, Homo sapiens
tacgtcctgcaggtg

SEQ ID NO: 1767825 - DNA, 15 bp, Homo sapiens
acgtcctgcaggtgg

SEQ ID NO: 1767826 - DNA, 15 bp, Homo sapiens
cgtcctgcaggtggg

SEQ ID NO: 1767827 - DNA, 15 bp, Homo sapiens
gtcctgcaggtgggc

SEQ ID NO: 1767828 - DNA, 15 bp, Homo sapiens
tcctgcaggtgggcg

SEQ ID NO: 1767829 - DNA, 15 bp, Homo sapiens
cctgcaggtgggcgc

SEQ ID NO: 1767830 - DNA, 15 bp, Homo sapiens
ctgcaggtgggcgcg

SEQ ID NO: 1767831 - DNA, 15 bp, Homo sapiens
tgcaggtgggcgcgt

SEQ ID NO: 1767832 - DNA, 15 bp, Homo sapiens
gcaggtgggcgcgtc

SEQ ID NO: 1767833 - DNA, 15 bp, Homo sapiens
caggtgggcgcgtcc

SEQ ID NO: 1767834 - DNA, 15 bp, Homo sapiens
aggtgggcgcgtccc

SEQ ID NO: 1767835 - DNA, 15 bp, Homo sapiens
ggtgggcgcgtcccc

SEQ ID NO: 1767836 - DNA, 15 bp, Homo sapiens
gtgggcgcgtccccc

SEQ ID NO: 1767837 - DNA, 15 bp, Homo sapiens
tgggcgcgtccccca

SEQ ID NO: 1767838 - DNA, 15 bp, Homo sapiens
gggcgcgtcccccac

SEQ ID NO: 1767839 - DNA, 15 bp, Homo sapiens
ggcgcgtcccccaca

SEQ ID NO: 1767840 - DNA, 15 bp, Homo sapiens
gcgcgtcccccacac

SEQ ID NO: 1767841 - DNA, 15 bp, Homo sapiens
cgcgtcccccacacc

SEQ ID NO: 1767842 - DNA, 15 bp, Homo sapiens
gcgtcccccacaccc

SEQ ID NO: 1767843 - DNA, 15 bp, Homo sapiens
cgtcccccacacccc

SEQ ID NO: 1767844 - DNA, 15 bp, Homo sapiens
tcccccacacccctg

SEQ ID NO: 1767845 - DNA, 15 bp, Homo sapiens
cccccacacccctgg

SEQ ID NO: 1767846 - DNA, 15 bp, Homo sapiens
ccccacacccctggc

SEQ ID NO: 1767847 - DNA, 15 bp, Homo sapiens
cccacacccctggcc

SEQ ID NO: 1767848 - DNA, 15 bp, Homo sapiens
ccacacccctggccc

SEQ ID NO: 1767849 - DNA, 15 bp, Homo sapiens
cacacccctggcccc

SEQ ID NO: 1767850 - DNA, 15 bp, Homo sapiens
acacccctggccccc

SEQ ID NO: 1767851 - DNA, 15 bp, Homo sapiens
cacccctggcccccc

SEQ ID NO: 1767852 - DNA, 15 bp, Homo sapiens
acccctggccccccc

SEQ ID NO: 1767853 - DNA, 15 bp, Homo sapiens
cccctggcccccccg

SEQ ID NO: 1767854 - DNA, 15 bp, Homo sapiens
ccctggcccccccgc

SEQ ID NO: 1767855 - DNA, 15 bp, Homo sapiens
cctggcccccccgcc

SEQ ID NO: 1767856 - DNA, 15 bp, Homo sapiens
ctggcccccccgccc

SEQ ID NO: 1767857 - DNA, 15 bp, Homo sapiens
tggcccccccgcccg

SEQ ID NO: 1767858 - DNA, 15 bp, Homo sapiens
ggcccccccgcccgc

SEQ ID NO: 1767859 - DNA, 15 bp, Homo sapiens
gcccccccgcccgcc

SEQ ID NO: 1767860 - DNA, 15 bp, Homo sapiens
cccccccgcccgccc

SEQ ID NO: 1767861 - DNA, 15 bp, Homo sapiens
ccccccgcccgcccc

SEQ ID NO: 1767862 - DNA, 15 bp, Homo sapiens
ccccgcccgccccgg

SEQ ID NO: 1767863 - DNA, 15 bp, Homo sapiens
cccgcccgccccggg

SEQ ID NO: 1767864 - DNA, 15 bp, Homo sapiens
ccgcccgccccgggg

SEQ ID NO: 1767865 - DNA, 15 bp, Homo sapiens
cgcccgccccggggg

SEQ ID NO: 1767866 - DNA, 15 bp, Homo sapiens
gcccgccccgggggc

SEQ ID NO: 1767867 - DNA, 15 bp, Homo sapiens
cccgccccgggggct

SEQ ID NO: 1767868 - DNA, 15 bp, Homo sapiens
ccgccccgggggctt

SEQ ID NO: 1767869 - DNA, 15 bp, Homo sapiens
cgccccgggggctta

SEQ ID NO: 1767870 - DNA, 15 bp, Homo sapiens
gccccgggggcttag

SEQ ID NO: 1767871 - DNA, 15 bp, Homo sapiens
ccccgggggcttagg

SEQ ID NO: 1767872 - DNA, 15 bp, Homo sapiens
cccgggggcttaggc

SEQ ID NO: 1767873 - DNA, 15 bp, Homo sapiens
ccgggggcttaggct

SEQ ID NO: 1767874 - DNA, 15 bp, Homo sapiens
cgggggcttaggcta

SEQ ID NO: 1767875 - DNA, 15 bp, Homo sapiens
gggggcttaggctac

SEQ ID NO: 1767876 - DNA, 15 bp, Homo sapiens
ggggcttaggctaca

SEQ ID NO: 1767877 - DNA, 15 bp, Homo sapiens
gggcttaggctacac

SEQ ID NO: 1767878 - DNA, 15 bp, Homo sapiens
ggcttaggctacact

SEQ ID NO: 1767879 - DNA, 15 bp, Homo sapiens
gcttaggctacactg

SEQ ID NO: 1767880 - DNA, 15 bp, Homo sapiens
cttaggctacactga

SEQ ID NO: 1767881 - DNA, 15 bp, Homo sapiens
ttaggctacactgac

SEQ ID NO: 1767882 - DNA, 15 bp, Homo sapiens
taggctacactgacg

SEQ ID NO: 1767883 - DNA, 15 bp, Homo sapiens
aggctacactgacgc

SEQ ID NO: 1767884 - DNA, 15 bp, Homo sapiens
ggctacactgacgcc

SEQ ID NO: 1767885 - DNA, 15 bp, Homo sapiens
gctacactgacgccc

SEQ ID NO: 1767886 - DNA, 15 bp, Homo sapiens
ctacactgacgcccg

SEQ ID NO: 1767887 - DNA, 15 bp, Homo sapiens
tacactgacgcccga

SEQ ID NO: 1767888 - DNA, 15 bp, Homo sapiens
acactgacgcccgag

SEQ ID NO: 1767889 - DNA, 15 bp, Homo sapiens
cactgacgcccgagt

SEQ ID NO: 1767890 - DNA, 15 bp, Homo sapiens
actgacgcccgagtc

SEQ ID NO: 1767891 - DNA, 15 bp, Homo sapiens
ctgacgcccgagtct

SEQ ID NO: 1767892 - DNA, 15 bp, Homo sapiens
tgacgcccgagtctc

SEQ ID NO: 1767893 - DNA, 15 bp, Homo sapiens
gacgcccgagtctcc

SEQ ID NO: 1767894 - DNA, 15 bp, Homo sapiens
acgcccgagtctcct

SEQ ID NO: 1767895 - DNA, 15 bp, Homo sapiens
cgcccgagtctcctg

SEQ ID NO: 1767896 - DNA, 15 bp, Homo sapiens
gcccgagtctcctgc

SEQ ID NO: 1767897 - DNA, 15 bp, Homo sapiens
cccgagtctcctgca

SEQ ID NO: 1767898 - DNA, 15 bp, Homo sapiens
ccgagtctcctgcag

SEQ ID NO: 1767899 - DNA, 15 bp, Homo sapiens
cgagtctcctgcaga

SEQ ID NO: 1767900 - DNA, 15 bp, Homo sapiens
gagtctcctgcagag

SEQ ID NO: 1767901 - DNA, 15 bp, Homo sapiens
agtctcctgcagagc

SEQ ID NO: 1767902 - DNA, 15 bp, Homo sapiens
gtctcctgcagagcg

SEQ ID NO: 1767903 - DNA, 15 bp, Homo sapiens
tctcctgcagagcga

SEQ ID NO: 1767904 - DNA, 15 bp, Homo sapiens
ctcctgcagagcgac

SEQ ID NO: 1767905 - DNA, 15 bp, Homo sapiens
tcctgcagagcgaca

SEQ ID NO: 1767906 - DNA, 15 bp, Homo sapiens
cctgcagagcgacac

SEQ ID NO: 1767907 - DNA, 15 bp, Homo sapiens
ctgcagagcgacacc

SEQ ID NO: 1767908 - DNA, 15 bp, Homo sapiens
tgcagagcgacaccc

SEQ ID NO: 1767909 - DNA, 15 bp, Homo sapiens
gcagagcgacaccct

SEQ ID NO: 1767910 - DNA, 15 bp, Homo sapiens
cagagcgacaccctg

SEQ ID NO: 1767911 - DNA, 15 bp, Homo sapiens
agagcgacaccctgc

SEQ ID NO: 1767912 - DNA, 15 bp, Homo sapiens
gagcgacaccctgct

SEQ ID NO: 1767913 - DNA, 15 bp, Homo sapiens
agcgacaccctgctg

SEQ ID NO: 1767914 - DNA, 15 bp, Homo sapiens
gcgacaccctgctga

SEQ ID NO: 1767915 - DNA, 15 bp, Homo sapiens
cgacaccctgctgag

SEQ ID NO: 1767916 - DNA, 15 bp, Homo sapiens
gacaccctgctgagc

SEQ ID NO: 1767917 - DNA, 15 bp, Homo sapiens
acaccctgctgagca

SEQ ID NO: 1767918 - DNA, 15 bp, Homo sapiens
caccctgctgagcag

SEQ ID NO: 1767919 - DNA, 15 bp, Homo sapiens
accctgctgagcagc

SEQ ID NO: 1767920 - DNA, 15 bp, Homo sapiens
ccctgctgagcagcc

SEQ ID NO: 1767921 - DNA, 15 bp, Homo sapiens
cctgctgagcagcct

SEQ ID NO: 1767922 - DNA, 15 bp, Homo sapiens
ctgctgagcagcctc

SEQ ID NO: 1767923 - DNA, 15 bp, Homo sapiens
tgctgagcagcctca

SEQ ID NO: 1767924 - DNA, 15 bp, Homo sapiens
gctgagcagcctcac

SEQ ID NO: 1767925 - DNA, 15 bp, Homo sapiens
ctgagcagcctcacc

SEQ ID NO: 1767926 - DNA, 15 bp, Homo sapiens
tgagcagcctcaccg

SEQ ID NO: 1767927 - DNA, 15 bp, Homo sapiens
gagcagcctcaccgt

SEQ ID NO: 1767928 - DNA, 15 bp, Homo sapiens
agcagcctcaccgtg

SEQ ID NO: 1767929 - DNA, 15 bp, Homo sapiens
gcagcctcaccgtgc

SEQ ID NO: 1767930 - DNA, 15 bp, Homo sapiens
cagcctcaccgtgcg

SEQ ID NO: 1767931 - DNA, 15 bp, Homo sapiens
agcctcaccgtgcgc

SEQ ID NO: 1767932 - DNA, 15 bp, Homo sapiens
gcctcaccgtgcgcg

SEQ ID NO: 1767933 - DNA, 15 bp, Homo sapiens
cctcaccgtgcgcga

SEQ ID NO: 1767934 - DNA, 15 bp, Homo sapiens
ctcaccgtgcgcgag

SEQ ID NO: 1767935 - DNA, 15 bp, Homo sapiens
tcaccgtgcgcgaga

SEQ ID NO: 1767936 - DNA, 15 bp, Homo sapiens
caccgtgcgcgagac

SEQ ID NO: 1767937 - DNA, 15 bp, Homo sapiens
accgtgcgcgagacg

SEQ ID NO: 1767938 - DNA, 15 bp, Homo sapiens
ccgtgcgcgagacgc

SEQ ID NO: 1767939 - DNA, 15 bp, Homo sapiens
cgtgcgcgagacgct

SEQ ID NO: 1767940 - DNA, 15 bp, Homo sapiens
gtgcgcgagacgctg

SEQ ID NO: 1767941 - DNA, 15 bp, Homo sapiens
tgcgcgagacgctgc

SEQ ID NO: 1767942 - DNA, 15 bp, Homo sapiens
gcgcgagacgctgca

SEQ ID NO: 1767943 - DNA, 15 bp, Homo sapiens
cgcgagacgctgcac

SEQ ID NO: 1767944 - DNA, 15 bp, Homo sapiens
gcgagacgctgcact

SEQ ID NO: 1767945 - DNA, 15 bp, Homo sapiens
cgagacgctgcacta

SEQ ID NO: 1767946 - DNA, 15 bp, Homo sapiens
gagacgctgcactac

SEQ ID NO: 1767947 - DNA, 15 bp, Homo sapiens
agacgctgcactaca

SEQ ID NO: 1767948 - DNA, 15 bp, Homo sapiens
gacgctgcactacac

SEQ ID NO: 1767949 - DNA, 15 bp, Homo sapiens
acgctgcactacacc

SEQ ID NO: 1767950 - DNA, 15 bp, Homo sapiens
cgctgcactacaccg

SEQ ID NO: 1767951 - DNA, 15 bp, Homo sapiens
gctgcactacaccgc

SEQ ID NO: 1767952 - DNA, 15 bp, Homo sapiens
ctgcactacaccgcg

SEQ ID NO: 1767953 - DNA, 15 bp, Homo sapiens
tgcactacaccgcgc

SEQ ID NO: 1767954 - DNA, 15 bp, Homo sapiens
gcactacaccgcgct

SEQ ID NO: 1767955 - DNA, 15 bp, Homo sapiens
cactacaccgcgctg

SEQ ID NO: 1767956 - DNA, 15 bp, Homo sapiens
actacaccgcgctgc

SEQ ID NO: 1767957 - DNA, 15 bp, Homo sapiens
ctacaccgcgctgct

SEQ ID NO: 1767958 - DNA, 15 bp, Homo sapiens
tacaccgcgctgctg

SEQ ID NO: 1767959 - DNA, 15 bp, Homo sapiens
acaccgcgctgctgg

SEQ ID NO: 1767960 - DNA, 15 bp, Homo sapiens
caccgcgctgctggc

SEQ ID NO: 1767961 - DNA, 15 bp, Homo sapiens
accgcgctgctggcc

SEQ ID NO: 1767962 - DNA, 15 bp, Homo sapiens
ccgcgctgctggcca

SEQ ID NO: 1767963 - DNA, 15 bp, Homo sapiens
cgcgctgctggccat

SEQ ID NO: 1767964 - DNA, 15 bp, Homo sapiens
gcgctgctggccatc

SEQ ID NO: 1767965 - DNA, 15 bp, Homo sapiens
cgctgctggccatcc

SEQ ID NO: 1767966 - DNA, 15 bp, Homo sapiens
gctgctggccatccg

SEQ ID NO: 1767967 - DNA, 15 bp, Homo sapiens
ctgctggccatccgc

SEQ ID NO: 1767968 - DNA, 15 bp, Homo sapiens
tgctggccatccgcc

SEQ ID NO: 1767969 - DNA, 15 bp, Homo sapiens
gctggccatccgccg

SEQ ID NO: 1767970 - DNA, 15 bp, Homo sapiens
ctggccatccgccgc

SEQ ID NO: 1767971 - DNA, 15 bp, Homo sapiens
tggccatccgccgcg

SEQ ID NO: 1767972 - DNA, 15 bp, Homo sapiens
ggccatccgccgcgg

SEQ ID NO: 1767973 - DNA, 15 bp, Homo sapiens
gccatccgccgcggc

SEQ ID NO: 1767974 - DNA, 15 bp, Homo sapiens
ccatccgccgcggca

SEQ ID NO: 1767975 - DNA, 15 bp, Homo sapiens
catccgccgcggcaa

SEQ ID NO: 1767976 - DNA, 15 bp, Homo sapiens
atccgccgcggcaat

SEQ ID NO: 1767977 - DNA, 15 bp, Homo sapiens
tccgccgcggcaatc

SEQ ID NO: 1767978 - DNA, 15 bp, Homo sapiens
ccgccgcggcaatcc

SEQ ID NO: 1767979 - DNA, 15 bp, Homo sapiens
cgccgcggcaatccc

SEQ ID NO: 1767980 - DNA, 15 bp, Homo sapiens
gccgcggcaatcccg

SEQ ID NO: 1767981 - DNA, 15 bp, Homo sapiens
ccgcggcaatcccgg

SEQ ID NO: 1767982 - DNA, 15 bp, Homo sapiens
cgcggcaatcccggc

SEQ ID NO: 1767983 - DNA, 15 bp, Homo sapiens
gcggcaatcccggct

SEQ ID NO: 1767984 - DNA, 15 bp, Homo sapiens
cggcaatcccggctc

SEQ ID NO: 1767985 - DNA, 15 bp, Homo sapiens
ggcaatcccggctcc

SEQ ID NO: 1767986 - DNA, 15 bp, Homo sapiens
gcaatcccggctcct

SEQ ID NO: 1767987 - DNA, 15 bp, Homo sapiens
caatcccggctcctt

SEQ ID NO: 1767988 - DNA, 15 bp, Homo sapiens
aatcccggctccttc

SEQ ID NO: 1767989 - DNA, 15 bp, Homo sapiens
atcccggctccttcc

SEQ ID NO: 1767990 - DNA, 15 bp, Homo sapiens
tcccggctccttcca

SEQ ID NO: 1767991 - DNA, 15 bp, Homo sapiens
cccggctccttccag

SEQ ID NO: 1767992 - DNA, 15 bp, Homo sapiens
ccggctccttccaga

SEQ ID NO: 1767993 - DNA, 15 bp, Homo sapiens
cggctccttccagaa

SEQ ID NO: 1767994 - DNA, 15 bp, Homo sapiens
ggctccttccagaag

SEQ ID NO: 1767995 - DNA, 15 bp, Homo sapiens
gctccttccagaaga

SEQ ID NO: 1767996 - DNA, 15 bp, Homo sapiens
ctccttccagaagaa

SEQ ID NO: 1767997 - DNA, 15 bp, Homo sapiens
tccttccagaagaag

SEQ ID NO: 1767998 - DNA, 15 bp, Homo sapiens
ccttccagaagaagg

SEQ ID NO: 1767999 - DNA, 15 bp, Homo sapiens
cttccagaagaaggt

SEQ ID NO: 1768000 - DNA, 15 bp, Homo sapiens
ttccagaagaaggtg

SEQ ID NO: 1768001 - DNA, 15 bp, Homo sapiens
tccagaagaaggtgg

SEQ ID NO: 1768002 - DNA, 15 bp, Homo sapiens
ccagaagaaggtggg

SEQ ID NO: 1768003 - DNA, 15 bp, Homo sapiens
cagaagaaggtgggt

SEQ ID NO: 1768004 - DNA, 15 bp, Homo sapiens
agaagaaggtgggtg

SEQ ID NO: 1768005 - DNA, 15 bp, Homo sapiens
gaagaaggtgggtgc

SEQ ID NO: 1768006 - DNA, 15 bp, Homo sapiens
aagaaggtgggtgca

SEQ ID NO: 1768007 - DNA, 15 bp, Homo sapiens
agaaggtgggtgcag

SEQ ID NO: 1768008 - DNA, 15 bp, Homo sapiens
gaaggtgggtgcagc

SEQ ID NO: 1768009 - DNA, 15 bp, Homo sapiens
aaggtgggtgcagcc

SEQ ID NO: 1768010 - DNA, 15 bp, Homo sapiens
aggtgggtgcagccc

SEQ ID NO: 1768011 - DNA, 15 bp, Homo sapiens
ggtgggtgcagcccc

SEQ ID NO: 1768012 - DNA, 15 bp, Homo sapiens
gtgggtgcagccccc

SEQ ID NO: 1768013 - DNA, 15 bp, Homo sapiens
tgggtgcagcccccc

SEQ ID NO: 1768014 - DNA, 15 bp, Homo sapiens
gggtgcagccccccg

SEQ ID NO: 1768015 - DNA, 15 bp, Homo sapiens
ggtgcagccccccgc

SEQ ID NO: 1768016 - DNA, 15 bp, Homo sapiens
gtgcagccccccgct

SEQ ID NO: 1768017 - DNA, 15 bp, Homo sapiens
tgcagccccccgctc

SEQ ID NO: 1768018 - DNA, 15 bp, Homo sapiens
gcagccccccgctca

SEQ ID NO: 1768019 - DNA, 15 bp, Homo sapiens
cagccccccgctcac

SEQ ID NO: 1768020 - DNA, 15 bp, Homo sapiens
agccccccgctcaca

SEQ ID NO: 1768021 - DNA, 15 bp, Homo sapiens
gccccccgctcacag

SEQ ID NO: 1768022 - DNA, 15 bp, Homo sapiens
ccccccgctcacaga

SEQ ID NO: 1768023 - DNA, 15 bp, Homo sapiens
cccccgctcacagag

SEQ ID NO: 1768024 - DNA, 15 bp, Homo sapiens
ccccgctcacagagg

SEQ ID NO: 1768025 - DNA, 15 bp, Homo sapiens
cccgctcacagaggg

SEQ ID NO: 1768026 - DNA, 15 bp, Homo sapiens
ccgctcacagagggc

SEQ ID NO: 1768027 - DNA, 15 bp, Homo sapiens
cgctcacagagggca

SEQ ID NO: 1768028 - DNA, 15 bp, Homo sapiens
gctcacagagggcaa

SEQ ID NO: 1768029 - DNA, 15 bp, Homo sapiens
ctcacagagggcaaa

SEQ ID NO: 1768030 - DNA, 15 bp, Homo sapiens
tcacagagggcaaac

SEQ ID NO: 1768031 - DNA, 15 bp, Homo sapiens
cacagagggcaaact

SEQ ID NO: 1768032 - DNA, 15 bp, Homo sapiens
acagagggcaaactg

SEQ ID NO: 1768033 - DNA, 15 bp, Homo sapiens
cagagggcaaactga

SEQ ID NO: 1768034 - DNA, 15 bp, Homo sapiens
agagggcaaactgag

SEQ ID NO: 1768035 - DNA, 15 bp, Homo sapiens
gagggcaaactgagt

SEQ ID NO: 1768036 - DNA, 15 bp, Homo sapiens
agggcaaactgagta

SEQ ID NO: 1768037 - DNA, 15 bp, Homo sapiens
gggcaaactgagtac

SEQ ID NO: 1768038 - DNA, 15 bp, Homo sapiens
ggcaaactgagtacc

SEQ ID NO: 1768039 - DNA, 15 bp, Homo sapiens
gcaaactgagtacct

SEQ ID NO: 1768040 - DNA, 15 bp, Homo sapiens
caaactgagtacctt

SEQ ID NO: 1768041 - DNA, 15 bp, Homo sapiens
aaactgagtaccttt

SEQ ID NO: 1768042 - DNA, 15 bp, Homo sapiens
aactgagtacctttg

SEQ ID NO: 1768043 - DNA, 15 bp, Homo sapiens
actgagtacctttgc

SEQ ID NO: 1768044 - DNA, 15 bp, Homo sapiens
ctgagtacctttgca

SEQ ID NO: 1768045 - DNA, 15 bp, Homo sapiens
tgagtacctttgcac

SEQ ID NO: 1768046 - DNA, 15 bp, Homo sapiens
gagtacctttgcacc

SEQ ID NO: 1768047 - DNA, 15 bp, Homo sapiens
agtacctttgcaccc

SEQ ID NO: 1768048 - DNA, 15 bp, Homo sapiens
gtacctttgcacccc

SEQ ID NO: 1768049 - DNA, 15 bp, Homo sapiens
tacctttgcaccccc

SEQ ID NO: 1768050 - DNA, 15 bp, Homo sapiens
acctttgcacccccc

SEQ ID NO: 1768051 - DNA, 15 bp, Homo sapiens
cctttgcaccccccg

SEQ ID NO: 1768052 - DNA, 15 bp, Homo sapiens
ctttgcaccccccgc

SEQ ID NO: 1768053 - DNA, 15 bp, Homo sapiens
tttgcaccccccgct

SEQ ID NO: 1768054 - DNA, 15 bp, Homo sapiens
ttgcaccccccgctg

SEQ ID NO: 1768055 - DNA, 15 bp, Homo sapiens
tgcaccccccgctgc

SEQ ID NO: 1768056 - DNA, 15 bp, Homo sapiens
gcaccccccgctgcc

SEQ ID NO: 1768057 - DNA, 15 bp, Homo sapiens
caccccccgctgccc

SEQ ID NO: 1768058 - DNA, 15 bp, Homo sapiens
accccccgctgccct

SEQ ID NO: 1768059 - DNA, 15 bp, Homo sapiens
ccccccgctgccctc

SEQ ID NO: 1768060 - DNA, 15 bp, Homo sapiens
cccccgctgccctcc

SEQ ID NO: 1768061 - DNA, 15 bp, Homo sapiens
ccccgctgccctcct

SEQ ID NO: 1768062 - DNA, 15 bp, Homo sapiens
cccgctgccctcctc

SEQ ID NO: 1768063 - DNA, 15 bp, Homo sapiens
ccgctgccctcctct

SEQ ID NO: 1768064 - DNA, 15 bp, Homo sapiens
cgctgccctcctctc

SEQ ID NO: 1768065 - DNA, 15 bp, Homo sapiens
gctgccctcctctct

SEQ ID NO: 1768066 - DNA, 15 bp, Homo sapiens
ctgccctcctctctt

SEQ ID NO: 1768067 - DNA, 15 bp, Homo sapiens
tgccctcctctcttc

SEQ ID NO: 1768068 - DNA, 15 bp, Homo sapiens
gccctcctctcttcg

SEQ ID NO: 1768069 - DNA, 15 bp, Homo sapiens
ccctcctctcttcgc

SEQ ID NO: 1768070 - DNA, 15 bp, Homo sapiens
cctcctctcttcgcc

SEQ ID NO: 1768071 - DNA, 15 bp, Homo sapiens
ctcctctcttcgcct

SEQ ID NO: 1768072 - DNA, 15 bp, Homo sapiens
tcctctcttcgccta

SEQ ID NO: 1768073 - DNA, 15 bp, Homo sapiens
cctctcttcgcctac

SEQ ID NO: 1768074 - DNA, 15 bp, Homo sapiens
ctctcttcgcctacg

SEQ ID NO: 1768075 - DNA, 15 bp, Homo sapiens
tctcttcgcctacgc

SEQ ID NO: 1768076 - DNA, 15 bp, Homo sapiens
ctcttcgcctacgct

SEQ ID NO: 1768077 - DNA, 15 bp, Homo sapiens
tcttcgcctacgctt

SEQ ID NO: 1768078 - DNA, 15 bp, Homo sapiens
cttcgcctacgcttg

SEQ ID NO: 1768079 - DNA, 15 bp, Homo sapiens
ttcgcctacgcttgc

SEQ ID NO: 1768080 - DNA, 15 bp, Homo sapiens
tcgcctacgcttgcc

SEQ ID NO: 1768081 - DNA, 15 bp, Homo sapiens
cgcctacgcttgccc

SEQ ID NO: 1768082 - DNA, 15 bp, Homo sapiens
gcctacgcttgccca

SEQ ID NO: 1768083 - DNA, 15 bp, Homo sapiens
cctacgcttgcccat

SEQ ID NO: 1768084 - DNA, 15 bp, Homo sapiens
ctacgcttgcccatt

SEQ ID NO: 1768085 - DNA, 15 bp, Homo sapiens
tacgcttgcccattc

SEQ ID NO: 1768086 - DNA, 15 bp, Homo sapiens
acgcttgcccattcc

SEQ ID NO: 1768087 - DNA, 15 bp, Homo sapiens
cgcttgcccattcct

SEQ ID NO: 1768088 - DNA, 15 bp, Homo sapiens
gcttgcccattcctt

SEQ ID NO: 1768089 - DNA, 15 bp, Homo sapiens
cttgcccattccttc

SEQ ID NO: 1768090 - DNA, 15 bp, Homo sapiens
ttgcccattccttcc

SEQ ID NO: 1768091 - DNA, 15 bp, Homo sapiens
tgcccattccttccc

SEQ ID NO: 1768092 - DNA, 15 bp, Homo sapiens
gcccattccttccct

SEQ ID NO: 1768093 - DNA, 15 bp, Homo sapiens
cccattccttccctt

SEQ ID NO: 1768094 - DNA, 15 bp, Homo sapiens
ccattccttcccttt

SEQ ID NO: 1768095 - DNA, 15 bp, Homo sapiens
cattccttccctttg

SEQ ID NO: 1768096 - DNA, 15 bp, Homo sapiens
attccttccctttgc

SEQ ID NO: 1768097 - DNA, 15 bp, Homo sapiens
ttccttccctttgct

SEQ ID NO: 1768098 - DNA, 15 bp, Homo sapiens
tccttccctttgctc

SEQ ID NO: 1768099 - DNA, 15 bp, Homo sapiens
ccttccctttgctcg

SEQ ID NO: 1768100 - DNA, 15 bp, Homo sapiens
cttccctttgctcgt

SEQ ID NO: 1768101 - DNA, 15 bp, Homo sapiens
ttccctttgctcgtc

SEQ ID NO: 1768102 - DNA, 15 bp, Homo sapiens
tccctttgctcgtca

SEQ ID NO: 1768103 - DNA, 15 bp, Homo sapiens
ccctttgctcgtcac

SEQ ID NO: 1768104 - DNA, 15 bp, Homo sapiens
cctttgctcgtcact

SEQ ID NO: 1768105 - DNA, 15 bp, Homo sapiens
ctttgctcgtcactc

SEQ ID NO: 1768106 - DNA, 15 bp, Homo sapiens
tttgctcgtcactcc

SEQ ID NO: 1768107 - DNA, 15 bp, Homo sapiens
ttgctcgtcactcct

SEQ ID NO: 1768108 - DNA, 15 bp, Homo sapiens
tgctcgtcactcctt

SEQ ID NO: 1768109 - DNA, 15 bp, Homo sapiens
gctcgtcactccttc

SEQ ID NO: 1768110 - DNA, 15 bp, Homo sapiens
ctcgtcactccttca

SEQ ID NO: 1768111 - DNA, 15 bp, Homo sapiens
tcgtcactccttcac

SEQ ID NO: 1768112 - DNA, 15 bp, Homo sapiens
cgtcactccttcact

SEQ ID NO: 1768113 - DNA, 15 bp, Homo sapiens
gtcactccttcactc

SEQ ID NO: 1768114 - DNA, 15 bp, Homo sapiens
tcactccttcactct

SEQ ID NO: 1768115 - DNA, 15 bp, Homo sapiens
cactccttcactcta

SEQ ID NO: 1768116 - DNA, 15 bp, Homo sapiens
actccttcactctag

SEQ ID NO: 1768117 - DNA, 15 bp, Homo sapiens
ctccttcactctaga

SEQ ID NO: 1768118 - DNA, 15 bp, Homo sapiens
tccttcactctagag

SEQ ID NO: 1768119 - DNA, 15 bp, Homo sapiens
ccttcactctagagc

SEQ ID NO: 1768120 - DNA, 15 bp, Homo sapiens
cttcactctagagcg

SEQ ID NO: 1768121 - DNA, 15 bp, Homo sapiens
ttcactctagagcgc

SEQ ID NO: 1768122 - DNA, 15 bp, Homo sapiens
tcactctagagcgcg

SEQ ID NO: 1768123 - DNA, 15 bp, Homo sapiens
cactctagagcgcgc

SEQ ID NO: 1768124 - DNA, 15 bp, Homo sapiens
actctagagcgcgcc

SEQ ID NO: 1768125 - DNA, 15 bp, Homo sapiens
ctctagagcgcgccc

SEQ ID NO: 1768126 - DNA, 15 bp, Homo sapiens
tctagagcgcgccct

SEQ ID NO: 1768127 - DNA, 15 bp, Homo sapiens
ctagagcgcgccctg

SEQ ID NO: 1768128 - DNA, 15 bp, Homo sapiens
tagagcgcgccctgc

SEQ ID NO: 1768129 - DNA, 15 bp, Homo sapiens
agagcgcgccctgcg

SEQ ID NO: 1768130 - DNA, 15 bp, Homo sapiens
gagcgcgccctgcgt

SEQ ID NO: 1768131 - DNA, 15 bp, Homo sapiens
agcgcgccctgcgtc

SEQ ID NO: 1768132 - DNA, 15 bp, Homo sapiens
gcgcgccctgcgtcc

SEQ ID NO: 1768133 - DNA, 15 bp, Homo sapiens
cgcgccctgcgtcct

SEQ ID NO: 1768134 - DNA, 15 bp, Homo sapiens
gcgccctgcgtcctg

SEQ ID NO: 1768135 - DNA, 15 bp, Homo sapiens
cgccctgcgtcctgc

SEQ ID NO: 1768136 - DNA, 15 bp, Homo sapiens
gccctgcgtcctgca

SEQ ID NO: 1768137 - DNA, 15 bp, Homo sapiens
ccctgcgtcctgcac

SEQ ID NO: 1768138 - DNA, 15 bp, Homo sapiens
cctgcgtcctgcacc

SEQ ID NO: 1768139 - DNA, 15 bp, Homo sapiens
ctgcgtcctgcaccg

SEQ ID NO: 1768140 - DNA, 15 bp, Homo sapiens
tgcgtcctgcaccgt

SEQ ID NO: 1768141 - DNA, 15 bp, Homo sapiens
gcgtcctgcaccgtg

SEQ ID NO: 1768142 - DNA, 15 bp, Homo sapiens
cgtcctgcaccgtgc

SEQ ID NO: 1768143 - DNA, 15 bp, Homo sapiens
gtcctgcaccgtgca

SEQ ID NO: 1768144 - DNA, 15 bp, Homo sapiens
tcctgcaccgtgcac

SEQ ID NO: 1768145 - DNA, 15 bp, Homo sapiens
cctgcaccgtgcacc

SEQ ID NO: 1768146 - DNA, 15 bp, Homo sapiens
ctgcaccgtgcaccc

SEQ ID NO: 1768147 - DNA, 15 bp, Homo sapiens
tgcaccgtgcaccct

SEQ ID NO: 1768148 - DNA, 15 bp, Homo sapiens
gcaccgtgcaccctg

SEQ ID NO: 1768149 - DNA, 15 bp, Homo sapiens
caccgtgcaccctgt

SEQ ID NO: 1768150 - DNA, 15 bp, Homo sapiens
accgtgcaccctgtg

SEQ ID NO: 1768151 - DNA, 15 bp, Homo sapiens
ccgtgcaccctgtgc

SEQ ID NO: 1768152 - DNA, 15 bp, Homo sapiens
cgtgcaccctgtgct

SEQ ID NO: 1768153 - DNA, 15 bp, Homo sapiens
gtgcaccctgtgctg

SEQ ID NO: 1768154 - DNA, 15 bp, Homo sapiens
tgcaccctgtgctgc

SEQ ID NO: 1768155 - DNA, 15 bp, Homo sapiens
gcaccctgtgctgcc

SEQ ID NO: 1768156 - DNA, 15 bp, Homo sapiens
caccctgtgctgccc

SEQ ID NO: 1768157 - DNA, 15 bp, Homo sapiens
accctgtgctgcccc

SEQ ID NO: 1768158 - DNA, 15 bp, Homo sapiens
ccctgtgctgcccct

SEQ ID NO: 1768159 - DNA, 15 bp, Homo sapiens
cctgtgctgccccta

SEQ ID NO: 1768160 - DNA, 15 bp, Homo sapiens
ctgtgctgcccctag

SEQ ID NO: 1768161 - DNA, 15 bp, Homo sapiens
tgtgctgcccctagt

SEQ ID NO: 1768162 - DNA, 15 bp, Homo sapiens
gtgctgcccctagtc

SEQ ID NO: 1768163 - DNA, 15 bp, Homo sapiens
tgctgcccctagtca

SEQ ID NO: 1768164 - DNA, 15 bp, Homo sapiens
gctgcccctagtcac

SEQ ID NO: 1768165 - DNA, 15 bp, Homo sapiens
ctgcccctagtcaca

SEQ ID NO: 1768166 - DNA, 15 bp, Homo sapiens
tgcccctagtcacat

SEQ ID NO: 1768167 - DNA, 15 bp, Homo sapiens
gcccctagtcacatg

SEQ ID NO: 1768168 - DNA, 15 bp, Homo sapiens
cccctagtcacatgt

SEQ ID NO: 1768169 - DNA, 15 bp, Homo sapiens
ccctagtcacatgtg

SEQ ID NO: 1768170 - DNA, 15 bp, Homo sapiens
cctagtcacatgtgc

SEQ ID NO: 1768171 - DNA, 15 bp, Homo sapiens
ctagtcacatgtgcc

SEQ ID NO: 1768172 - DNA, 15 bp, Homo sapiens
tagtcacatgtgcct

SEQ ID NO: 1768173 - DNA, 15 bp, Homo sapiens
agtcacatgtgcctt

SEQ ID NO: 1768174 - DNA, 15 bp, Homo sapiens
gtcacatgtgccttt

SEQ ID NO: 1768175 - DNA, 15 bp, Homo sapiens
tcacatgtgcctttg

SEQ ID NO: 1768176 - DNA, 15 bp, Homo sapiens
cacatgtgcctttgg

SEQ ID NO: 1768177 - DNA, 15 bp, Homo sapiens
acatgtgcctttgga

SEQ ID NO: 1768178 - DNA, 15 bp, Homo sapiens
catgtgcctttggag

SEQ ID NO: 1768179 - DNA, 15 bp, Homo sapiens
atgtgcctttggaga

SEQ ID NO: 1768180 - DNA, 15 bp, Homo sapiens
tgtgcctttggagac

SEQ ID NO: 1768181 - DNA, 15 bp, Homo sapiens
gtgcctttggagact

SEQ ID NO: 1768182 - DNA, 15 bp, Homo sapiens
tgcctttggagactt

SEQ ID NO: 1768183 - DNA, 15 bp, Homo sapiens
gcctttggagacttg

SEQ ID NO: 1768184 - DNA, 15 bp, Homo sapiens
cctttggagacttga

SEQ ID NO: 1768185 - DNA, 15 bp, Homo sapiens
ctttggagacttgaa

SEQ ID NO: 1768186 - DNA, 15 bp, Homo sapiens
tttggagacttgaaa

SEQ ID NO: 1768187 - DNA, 15 bp, Homo sapiens
ttggagacttgaaat

SEQ ID NO: 1768188 - DNA, 15 bp, Homo sapiens
tggagacttgaaatg

SEQ ID NO: 1768189 - DNA, 15 bp, Homo sapiens
ggagacttgaaatgt

SEQ ID NO: 1768190 - DNA, 15 bp, Homo sapiens
gagacttgaaatgtc

SEQ ID NO: 1768191 - DNA, 15 bp, Homo sapiens
agacttgaaatgtca

SEQ ID NO: 1768192 - DNA, 15 bp, Homo sapiens
gacttgaaatgtcac

SEQ ID NO: 1768193 - DNA, 15 bp, Homo sapiens
acttgaaatgtcact

SEQ ID NO: 1768194 - DNA, 15 bp, Homo sapiens
cttgaaatgtcacta

SEQ ID NO: 1768195 - DNA, 15 bp, Homo sapiens
ttgaaatgtcactag

SEQ ID NO: 1768196 - DNA, 15 bp, Homo sapiens
tgaaatgtcactagt

SEQ ID NO: 1768197 - DNA, 15 bp, Homo sapiens
gaaatgtcactagtc

SEQ ID NO: 1768198 - DNA, 15 bp, Homo sapiens
aaatgtcactagtcc

SEQ ID NO: 1768199 - DNA, 15 bp, Homo sapiens
aatgtcactagtcca

SEQ ID NO: 1768200 - DNA, 15 bp, Homo sapiens
atgtcactagtccag

SEQ ID NO: 1768201 - DNA, 15 bp, Homo sapiens
tgtcactagtccaga

SEQ ID NO: 1768202 - DNA, 15 bp, Homo sapiens
gtcactagtccagac

SEQ ID NO: 1768203 - DNA, 15 bp, Homo sapiens
tcactagtccagact

SEQ ID NO: 1768204 - DNA, 15 bp, Homo sapiens
cactagtccagactg

SEQ ID NO: 1768205 - DNA, 15 bp, Homo sapiens
actagtccagactga

SEQ ID NO: 1768206 - DNA, 15 bp, Homo sapiens
ctagtccagactgaa

SEQ ID NO: 1768207 - DNA, 15 bp, Homo sapiens
tagtccagactgaaa

SEQ ID NO: 1768208 - DNA, 15 bp, Homo sapiens
agtccagactgaaac

SEQ ID NO: 1768209 - DNA, 15 bp, Homo sapiens
gtccagactgaaacg

SEQ ID NO: 1768210 - DNA, 15 bp, Homo sapiens
tccagactgaaacgt

SEQ ID NO: 1768211 - DNA, 15 bp, Homo sapiens
ccagactgaaacgtg

SEQ ID NO: 1768212 - DNA, 15 bp, Homo sapiens
cagactgaaacgtgc

SEQ ID NO: 1768213 - DNA, 15 bp, Homo sapiens
agactgaaacgtgct

SEQ ID NO: 1768214 - DNA, 15 bp, Homo sapiens
gactgaaacgtgctc

SEQ ID NO: 1768215 - DNA, 15 bp, Homo sapiens
actgaaacgtgctct

SEQ ID NO: 1768216 - DNA, 15 bp, Homo sapiens
ctgaaacgtgctctg

SEQ ID NO: 1768217 - DNA, 15 bp, Homo sapiens
tgaaacgtgctctga

SEQ ID NO: 1768218 - DNA, 15 bp, Homo sapiens
gaaacgtgctctgag

SEQ ID NO: 1768219 - DNA, 15 bp, Homo sapiens
aaacgtgctctgagc

SEQ ID NO: 1768220 - DNA, 15 bp, Homo sapiens
aacgtgctctgagcg

SEQ ID NO: 1768221 - DNA, 15 bp, Homo sapiens
acgtgctctgagcgc

SEQ ID NO: 1768222 - DNA, 15 bp, Homo sapiens
cgtgctctgagcgca

SEQ ID NO: 1768223 - DNA, 15 bp, Homo sapiens
gtgctctgagcgcaa

SEQ ID NO: 1768224 - DNA, 15 bp, Homo sapiens
tgctctgagcgcaaa

SEQ ID NO: 1768225 - DNA, 15 bp, Homo sapiens
gctctgagcgcaaaa

SEQ ID NO: 1768226 - DNA, 15 bp, Homo sapiens
ctctgagcgcaaaat

SEQ ID NO: 1768227 - DNA, 15 bp, Homo sapiens
tctgagcgcaaaata

SEQ ID NO: 1768228 - DNA, 15 bp, Homo sapiens
ctgagcgcaaaatac

SEQ ID NO: 1768229 - DNA, 15 bp, Homo sapiens
tgagcgcaaaataca

SEQ ID NO: 1768230 - DNA, 15 bp, Homo sapiens
gagcgcaaaatacac

SEQ ID NO: 1768231 - DNA, 15 bp, Homo sapiens
agcgcaaaatacaca

SEQ ID NO: 1768232 - DNA, 15 bp, Homo sapiens
gcgcaaaatacacat

SEQ ID NO: 1768233 - DNA, 15 bp, Homo sapiens
cgcaaaatacacatc

SEQ ID NO: 1768234 - DNA, 15 bp, Homo sapiens
gcaaaatacacatca

SEQ ID NO: 1768235 - DNA, 15 bp, Homo sapiens
caaaatacacatcaa

SEQ ID NO: 1768236 - DNA, 15 bp, Homo sapiens
aaaatacacatcaaa

SEQ ID NO: 1768237 - DNA, 15 bp, Homo sapiens
aaatacacatcaaat

SEQ ID NO: 1768238 - DNA, 15 bp, Homo sapiens
aatacacatcaaatt

SEQ ID NO: 1768239 - DNA, 15 bp, Homo sapiens
atacacatcaaattt

SEQ ID NO: 1768240 - DNA, 15 bp, Homo sapiens
tacacatcaaatttc

SEQ ID NO: 1768241 - DNA, 15 bp, Homo sapiens
acacatcaaatttca

SEQ ID NO: 1768242 - DNA, 15 bp, Homo sapiens
cacatcaaatttcag

SEQ ID NO: 1768243 - DNA, 15 bp, Homo sapiens
acatcaaatttcaga

SEQ ID NO: 1768244 - DNA, 15 bp, Homo sapiens
catcaaatttcagac

SEQ ID NO: 1768245 - DNA, 15 bp, Homo sapiens
atcaaatttcagact

SEQ ID NO: 1768246 - DNA, 15 bp, Homo sapiens
tcaaatttcagactc

SEQ ID NO: 1768247 - DNA, 15 bp, Homo sapiens
caaatttcagactct

SEQ ID NO: 1768248 - DNA, 15 bp, Homo sapiens
aaatttcagactctt

SEQ ID NO: 1768249 - DNA, 15 bp, Homo sapiens
aatttcagactctta

SEQ ID NO: 1768250 - DNA, 15 bp, Homo sapiens
atttcagactcttag

SEQ ID NO: 1768251 - DNA, 15 bp, Homo sapiens
tttcagactcttagt

SEQ ID NO: 1768252 - DNA, 15 bp, Homo sapiens
ttcagactcttagtc

SEQ ID NO: 1768253 - DNA, 15 bp, Homo sapiens
tcagactcttagtct

SEQ ID NO: 1768254 - DNA, 15 bp, Homo sapiens
cagactcttagtctg

SEQ ID NO: 1768255 - DNA, 15 bp, Homo sapiens
agactcttagtctga

SEQ ID NO: 1768256 - DNA, 15 bp, Homo sapiens
gactcttagtctgag

SEQ ID NO: 1768257 - DNA, 15 bp, Homo sapiens
actcttagtctgagg

SEQ ID NO: 1768258 - DNA, 15 bp, Homo sapiens
ctcttagtctgagga

SEQ ID NO: 1768259 - DNA, 15 bp, Homo sapiens
tcttagtctgaggaa

SEQ ID NO: 1768260 - DNA, 15 bp, Homo sapiens
cttagtctgaggaaa

SEQ ID NO: 1768261 - DNA, 15 bp, Homo sapiens
ttagtctgaggaaaa

SEQ ID NO: 1768262 - DNA, 15 bp, Homo sapiens
tagtctgaggaaaac

SEQ ID NO: 1768263 - DNA, 15 bp, Homo sapiens
agtctgaggaaaaca

SEQ ID NO: 1768264 - DNA, 15 bp, Homo sapiens
gtctgaggaaaacag

SEQ ID NO: 1768265 - DNA, 15 bp, Homo sapiens
tctgaggaaaacaga

SEQ ID NO: 1768266 - DNA, 15 bp, Homo sapiens
ctgaggaaaacagaa

SEQ ID NO: 1768267 - DNA, 15 bp, Homo sapiens
tgaggaaaacagaac

SEQ ID NO: 1768268 - DNA, 15 bp, Homo sapiens
gaggaaaacagaacg

SEQ ID NO: 1768269 - DNA, 15 bp, Homo sapiens
aggaaaacagaacgt

SEQ ID NO: 1768270 - DNA, 15 bp, Homo sapiens
ggaaaacagaacgtg

SEQ ID NO: 1768271 - DNA, 15 bp, Homo sapiens
gaaaacagaacgtga

SEQ ID NO: 1768272 - DNA, 15 bp, Homo sapiens
aaaacagaacgtgaa

SEQ ID NO: 1768273 - DNA, 15 bp, Homo sapiens
aaacagaacgtgaaa

SEQ ID NO: 1768274 - DNA, 15 bp, Homo sapiens
aacagaacgtgaaaa

SEQ ID NO: 1768275 - DNA, 15 bp, Homo sapiens
acagaacgtgaaaaa

SEQ ID NO: 1768276 - DNA, 15 bp, Homo sapiens
cagaacgtgaaaaag

SEQ ID NO: 1768277 - DNA, 15 bp, Homo sapiens
agaacgtgaaaaagc

SEQ ID NO: 1768278 - DNA, 15 bp, Homo sapiens
gaacgtgaaaaagcc

SEQ ID NO: 1768279 - DNA, 15 bp, Homo sapiens
aacgtgaaaaagccc

SEQ ID NO: 1768280 - DNA, 15 bp, Homo sapiens
acgtgaaaaagccca

SEQ ID NO: 1768281 - DNA, 15 bp, Homo sapiens
cgtgaaaaagcccat

SEQ ID NO: 1768282 - DNA, 15 bp, Homo sapiens
gtgaaaaagcccatt

SEQ ID NO: 1768283 - DNA, 15 bp, Homo sapiens
tgaaaaagcccatta

SEQ ID NO: 1768284 - DNA, 15 bp, Homo sapiens
gaaaaagcccattaa

SEQ ID NO: 1768285 - DNA, 15 bp, Homo sapiens
aaaaagcccattaag

SEQ ID NO: 1768286 - DNA, 15 bp, Homo sapiens
aaaagcccattaaga

SEQ ID NO: 1768287 - DNA, 15 bp, Homo sapiens
aaagcccattaagaa

SEQ ID NO: 1768288 - DNA, 15 bp, Homo sapiens
aagcccattaagaat

SEQ ID NO: 1768289 - DNA, 15 bp, Homo sapiens
agcccattaagaatt

SEQ ID NO: 1768290 - DNA, 15 bp, Homo sapiens
gcccattaagaattt

SEQ ID NO: 1768291 - DNA, 15 bp, Homo sapiens
cccattaagaatttt

SEQ ID NO: 1768292 - DNA, 15 bp, Homo sapiens
ccattaagaattttt

SEQ ID NO: 1768293 - DNA, 15 bp, Homo sapiens
cattaagaattttta

SEQ ID NO: 1768294 - DNA, 15 bp, Homo sapiens
attaagaatttttag

SEQ ID NO: 1768295 - DNA, 15 bp, Homo sapiens
ttaagaatttttagg

SEQ ID NO: 1768296 - DNA, 15 bp, Homo sapiens
taagaatttttaggt

SEQ ID NO: 1768297 - DNA, 15 bp, Homo sapiens
aagaatttttaggtc

SEQ ID NO: 1768298 - DNA, 15 bp, Homo sapiens
agaatttttaggtcg

SEQ ID NO: 1768299 - DNA, 15 bp, Homo sapiens
gaatttttaggtcgg

SEQ ID NO: 1768300 - DNA, 15 bp, Homo sapiens
aatttttaggtcggg

SEQ ID NO: 1768301 - DNA, 15 bp, Homo sapiens
atttttaggtcgggc

SEQ ID NO: 1768302 - DNA, 15 bp, Homo sapiens
tttttaggtcgggca

SEQ ID NO: 1768303 - DNA, 15 bp, Homo sapiens
ttttaggtcgggcag

SEQ ID NO: 1768304 - DNA, 15 bp, Homo sapiens
tttaggtcgggcagg

SEQ ID NO: 1768305 - DNA, 15 bp, Homo sapiens
ttaggtcgggcaggg

SEQ ID NO: 1768306 - DNA, 15 bp, Homo sapiens
taggtcgggcagggt

SEQ ID NO: 1768307 - DNA, 15 bp, Homo sapiens
aggtcgggcagggtg

SEQ ID NO: 1768308 - DNA, 15 bp, Homo sapiens
ggtcgggcagggtgg

SEQ ID NO: 1768309 - DNA, 15 bp, Homo sapiens
gtcgggcagggtggc

SEQ ID NO: 1768310 - DNA, 15 bp, Homo sapiens
tcgggcagggtggct

SEQ ID NO: 1768311 - DNA, 15 bp, Homo sapiens
gcagggtggctcata

SEQ ID NO: 1768312 - DNA, 15 bp, Homo sapiens
cagggtggctcatac

SEQ ID NO: 1768313 - DNA, 15 bp, Homo sapiens
agggtggctcatacc

SEQ ID NO: 1768314 - DNA, 15 bp, Homo sapiens
gggtggctcatacct

SEQ ID NO: 1768315 - DNA, 15 bp, Homo sapiens
gcactttggaaggcc

SEQ ID NO: 1768316 - DNA, 15 bp, Homo sapiens
cactttggaaggcca

SEQ ID NO: 1768317 - DNA, 15 bp, Homo sapiens
tttggaaggccaaga

SEQ ID NO: 1768318 - DNA, 15 bp, Homo sapiens
ttggaaggccaagat

SEQ ID NO: 1768319 - DNA, 15 bp, Homo sapiens
tggaaggccaagatg

SEQ ID NO: 1768320 - DNA, 15 bp, Homo sapiens
ggaaggccaagatgg

SEQ ID NO: 1768321 - DNA, 15 bp, Homo sapiens
gaaggccaagatggg

SEQ ID NO: 1768322 - DNA, 15 bp, Homo sapiens
aaggccaagatggga

SEQ ID NO: 1768323 - DNA, 15 bp, Homo sapiens
aggccaagatgggag

SEQ ID NO: 1768324 - DNA, 15 bp, Homo sapiens
ggccaagatgggagg

SEQ ID NO: 1768325 - DNA, 15 bp, Homo sapiens
gccaagatgggagga

SEQ ID NO: 1768326 - DNA, 15 bp, Homo sapiens
ccaagatgggaggat

SEQ ID NO: 1768327 - DNA, 15 bp, Homo sapiens
caagatgggaggatt

SEQ ID NO: 1768328 - DNA, 15 bp, Homo sapiens
aagatgggaggattg

SEQ ID NO: 1768329 - DNA, 15 bp, Homo sapiens
agatgggaggattgc

SEQ ID NO: 1768330 - DNA, 15 bp, Homo sapiens
gatgggaggattgct

SEQ ID NO: 1768331 - DNA, 15 bp, Homo sapiens
atgggaggattgctt

SEQ ID NO: 1768332 - DNA, 15 bp, Homo sapiens
gaggattgcttgagt

SEQ ID NO: 1768333 - DNA, 15 bp, Homo sapiens
aggattgcttgagtc

SEQ ID NO: 1768334 - DNA, 15 bp, Homo sapiens
ggattgcttgagtct

SEQ ID NO: 1768335 - DNA, 15 bp, Homo sapiens
gattgcttgagtcta

SEQ ID NO: 1768336 - DNA, 15 bp, Homo sapiens
attgcttgagtctag

SEQ ID NO: 1768337 - DNA, 15 bp, Homo sapiens
ttgcttgagtctaga

SEQ ID NO: 1768338 - DNA, 15 bp, Homo sapiens
tgcttgagtctagaa

SEQ ID NO: 1768339 - DNA, 15 bp, Homo sapiens
gcttgagtctagaag

SEQ ID NO: 1768340 - DNA, 15 bp, Homo sapiens
cttgagtctagaagt

SEQ ID NO: 1768341 - DNA, 15 bp, Homo sapiens
ttgagtctagaagtt

SEQ ID NO: 1768342 - DNA, 15 bp, Homo sapiens
tgagtctagaagttt

SEQ ID NO: 1768343 - DNA, 15 bp, Homo sapiens
gagtctagaagtttg

SEQ ID NO: 1768344 - DNA, 15 bp, Homo sapiens
agtctagaagtttga

SEQ ID NO: 1768345 - DNA, 15 bp, Homo sapiens
gtctagaagtttgag

SEQ ID NO: 1768346 - DNA, 15 bp, Homo sapiens
tctagaagtttgaga

SEQ ID NO: 1768347 - DNA, 15 bp, Homo sapiens
ctagaagtttgagac

SEQ ID NO: 1768348 - DNA, 15 bp, Homo sapiens
tagaagtttgagacc

SEQ ID NO: 1768349 - DNA, 15 bp, Homo sapiens
agaagtttgagacca

SEQ ID NO: 1768350 - DNA, 15 bp, Homo sapiens
gaagtttgagaccag

SEQ ID NO: 1768351 - DNA, 15 bp, Homo sapiens
cctgggcaacatagc

SEQ ID NO: 1768352 - DNA, 15 bp, Homo sapiens
gcaacatagcgagac

SEQ ID NO: 1768353 - DNA, 15 bp, Homo sapiens
caacatagcgagact

SEQ ID NO: 1768354 - DNA, 15 bp, Homo sapiens
aacatagcgagactc

SEQ ID NO: 1768355 - DNA, 15 bp, Homo sapiens
acatagcgagactca

SEQ ID NO: 1768356 - DNA, 15 bp, Homo sapiens
catagcgagactcag

SEQ ID NO: 1768357 - DNA, 15 bp, Homo sapiens
atagcgagactcagt

SEQ ID NO: 1768358 - DNA, 15 bp, Homo sapiens
tagcgagactcagtc

SEQ ID NO: 1768359 - DNA, 15 bp, Homo sapiens
agcgagactcagtct

SEQ ID NO: 1768360 - DNA, 15 bp, Homo sapiens
gcgagactcagtctc

SEQ ID NO: 1768361 - DNA, 15 bp, Homo sapiens
cgagactcagtctct

SEQ ID NO: 1768362 - DNA, 15 bp, Homo sapiens
gagactcagtctcta

SEQ ID NO: 1768363 - DNA, 15 bp, Homo sapiens
agactcagtctctat

SEQ ID NO: 1768364 - DNA, 15 bp, Homo sapiens
gactcagtctctata

SEQ ID NO: 1768365 - DNA, 15 bp, Homo sapiens
actcagtctctataa

SEQ ID NO: 1768366 - DNA, 15 bp, Homo sapiens
ctcagtctctataaa

SEQ ID NO: 1768367 - DNA, 15 bp, Homo sapiens
tcagtctctataaaa

SEQ ID NO: 1768368 - DNA, 15 bp, Homo sapiens
cagtctctataaaaa

SEQ ID NO: 1768369 - DNA, 15 bp, Homo sapiens
agtctctataaaaaa

SEQ ID NO: 1768370 - DNA, 15 bp, Homo sapiens
gtctctataaaaaat

SEQ ID NO: 1768371 - DNA, 15 bp, Homo sapiens
tctctataaaaaata

SEQ ID NO: 1768372 - DNA, 15 bp, Homo sapiens
ctctataaaaaatac

SEQ ID NO: 1768373 - DNA, 15 bp, Homo sapiens
tctataaaaaataca

SEQ ID NO: 1768374 - DNA, 15 bp, Homo sapiens
ctataaaaaatacaa

SEQ ID NO: 1768375 - DNA, 15 bp, Homo sapiens
tataaaaaatacaaa

SEQ ID NO: 1768376 - DNA, 15 bp, Homo sapiens
ataaaaaatacaaaa

SEQ ID NO: 1768377 - DNA, 15 bp, Homo sapiens
aatacaaaaattagt

SEQ ID NO: 1768378 - DNA, 15 bp, Homo sapiens
atacaaaaattagtt

SEQ ID NO: 1768379 - DNA, 15 bp, Homo sapiens
tacaaaaattagttg

SEQ ID NO: 1768380 - DNA, 15 bp, Homo sapiens
acaaaaattagttgg

SEQ ID NO: 1768381 - DNA, 15 bp, Homo sapiens
caaaaattagttgga

SEQ ID NO: 1768382 - DNA, 15 bp, Homo sapiens
aaaaattagttggac

SEQ ID NO: 1768383 - DNA, 15 bp, Homo sapiens
aaaattagttggacg

SEQ ID NO: 1768384 - DNA, 15 bp, Homo sapiens
aaattagttggacgt

SEQ ID NO: 1768385 - DNA, 15 bp, Homo sapiens
aattagttggacgtg

SEQ ID NO: 1768386 - DNA, 15 bp, Homo sapiens
attagttggacgtgg

SEQ ID NO: 1768387 - DNA, 15 bp, Homo sapiens
ttagttggacgtggt

SEQ ID NO: 1768388 - DNA, 15 bp, Homo sapiens
tagttggacgtggtg

SEQ ID NO: 1768389 - DNA, 15 bp, Homo sapiens
agttggacgtggtga

SEQ ID NO: 1768390 - DNA, 15 bp, Homo sapiens
gttggacgtggtgat

SEQ ID NO: 1768391 - DNA, 15 bp, Homo sapiens
ttggacgtggtgatg

SEQ ID NO: 1768392 - DNA, 15 bp, Homo sapiens
tggacgtggtgatgt

SEQ ID NO: 1768393 - DNA, 15 bp, Homo sapiens
ggacgtggtgatgtg

SEQ ID NO: 1768394 - DNA, 15 bp, Homo sapiens
gacgtggtgatgtgc

SEQ ID NO: 1768395 - DNA, 15 bp, Homo sapiens
acgtggtgatgtgcg

SEQ ID NO: 1768396 - DNA, 15 bp, Homo sapiens
cgtggtgatgtgcgc

SEQ ID NO: 1768397 - DNA, 15 bp, Homo sapiens
gtggtgatgtgcgcc

SEQ ID NO: 1768398 - DNA, 15 bp, Homo sapiens
tggtgatgtgcgcct

SEQ ID NO: 1768399 - DNA, 15 bp, Homo sapiens
ggtgatgtgcgcctg

SEQ ID NO: 1768400 - DNA, 15 bp, Homo sapiens
gtgatgtgcgcctgc

SEQ ID NO: 1768401 - DNA, 15 bp, Homo sapiens
tgatgtgcgcctgca

SEQ ID NO: 1768402 - DNA, 15 bp, Homo sapiens
gatgtgcgcctgcac

SEQ ID NO: 1768403 - DNA, 15 bp, Homo sapiens
atgtgcgcctgcact

SEQ ID NO: 1768404 - DNA, 15 bp, Homo sapiens
tgtgcgcctgcactc

SEQ ID NO: 1768405 - DNA, 15 bp, Homo sapiens
gtgcgcctgcactcc

SEQ ID NO: 1768406 - DNA, 15 bp, Homo sapiens
tgcgcctgcactccc

SEQ ID NO: 1768407 - DNA, 15 bp, Homo sapiens
gcgcctgcactccca

SEQ ID NO: 1768408 - DNA, 15 bp, Homo sapiens
cgcctgcactcccag

SEQ ID NO: 1768409 - DNA, 15 bp, Homo sapiens
gcctgcactcccagc

SEQ ID NO: 1768410 - DNA, 15 bp, Homo sapiens
cctgcactcccagct

SEQ ID NO: 1768411 - DNA, 15 bp, Homo sapiens
ctgcactcccagctg

SEQ ID NO: 1768412 - DNA, 15 bp, Homo sapiens
tgcactcccagctgc

SEQ ID NO: 1768413 - DNA, 15 bp, Homo sapiens
gcactcccagctgct

SEQ ID NO: 1768414 - DNA, 15 bp, Homo sapiens
cactcccagctgcta

SEQ ID NO: 1768415 - DNA, 15 bp, Homo sapiens
actcccagctgctaa

SEQ ID NO: 1768416 - DNA, 15 bp, Homo sapiens
ctcccagctgctaag

SEQ ID NO: 1768417 - DNA, 15 bp, Homo sapiens
tcccagctgctaagg

SEQ ID NO: 1768418 - DNA, 15 bp, Homo sapiens
cccagctgctaagga

SEQ ID NO: 1768419 - DNA, 15 bp, Homo sapiens
ccagctgctaaggag

SEQ ID NO: 1768420 - DNA, 15 bp, Homo sapiens
cagctgctaaggagg

SEQ ID NO: 1768421 - DNA, 15 bp, Homo sapiens
agctgctaaggaggc

SEQ ID NO: 1768422 - DNA, 15 bp, Homo sapiens
gctgctaaggaggct

SEQ ID NO: 1768423 - DNA, 15 bp, Homo sapiens
ctgctaaggaggctg

SEQ ID NO: 1768424 - DNA, 15 bp, Homo sapiens
tgctaaggaggctga

SEQ ID NO: 1768425 - DNA, 15 bp, Homo sapiens
gctaaggaggctgag

SEQ ID NO: 1768426 - DNA, 15 bp, Homo sapiens
ctaaggaggctgagg

SEQ ID NO: 1768427 - DNA, 15 bp, Homo sapiens
taaggaggctgaggc

SEQ ID NO: 1768428 - DNA, 15 bp, Homo sapiens
aaggaggctgaggca

SEQ ID NO: 1768429 - DNA, 15 bp, Homo sapiens
gaggcaggaggatct

SEQ ID NO: 1768430 - DNA, 15 bp, Homo sapiens
aggcaggaggatctc

SEQ ID NO: 1768431 - DNA, 15 bp, Homo sapiens
ggcaggaggatctct

SEQ ID NO: 1768432 - DNA, 15 bp, Homo sapiens
gcaggaggatctctt

SEQ ID NO: 1768433 - DNA, 15 bp, Homo sapiens
caggaggatctcttg

SEQ ID NO: 1768434 - DNA, 15 bp, Homo sapiens
aggaggatctcttga

SEQ ID NO: 1768435 - DNA, 15 bp, Homo sapiens
ggaggatctcttgaa

SEQ ID NO: 1768436 - DNA, 15 bp, Homo sapiens
gaggatctcttgaac

SEQ ID NO: 1768437 - DNA, 15 bp, Homo sapiens
aggatctcttgaacc

SEQ ID NO: 1768438 - DNA, 15 bp, Homo sapiens
ggatctcttgaaccc

SEQ ID NO: 1768439 - DNA, 15 bp, Homo sapiens
gatctcttgaaccca

SEQ ID NO: 1768440 - DNA, 15 bp, Homo sapiens
ctcttgaacccagga

SEQ ID NO: 1768441 - DNA, 15 bp, Homo sapiens
tcttgaacccaggag

SEQ ID NO: 1768442 - DNA, 15 bp, Homo sapiens
gaacccaggaggtcg

SEQ ID NO: 1768443 - DNA, 15 bp, Homo sapiens
aacccaggaggtcga

SEQ ID NO: 1768444 - DNA, 15 bp, Homo sapiens
acccaggaggtcgag

SEQ ID NO: 1768445 - DNA, 15 bp, Homo sapiens
cccaggaggtcgagg

SEQ ID NO: 1768446 - DNA, 15 bp, Homo sapiens
ccaggaggtcgaggc

SEQ ID NO: 1768447 - DNA, 15 bp, Homo sapiens
caggaggtcgaggct

SEQ ID NO: 1768448 - DNA, 15 bp, Homo sapiens
aggaggtcgaggctg

SEQ ID NO: 1768449 - DNA, 15 bp, Homo sapiens
ggtcgaggctgcagc

SEQ ID NO: 1768450 - DNA, 15 bp, Homo sapiens
gtcgaggctgcagcg

SEQ ID NO: 1768451 - DNA, 15 bp, Homo sapiens
tcgaggctgcagcga

SEQ ID NO: 1768452 - DNA, 15 bp, Homo sapiens
cgaggctgcagcgag

SEQ ID NO: 1768453 - DNA, 15 bp, Homo sapiens
gaggctgcagcgagc

SEQ ID NO: 1768454 - DNA, 15 bp, Homo sapiens
aggctgcagcgagcc

SEQ ID NO: 1768455 - DNA, 15 bp, Homo sapiens
ggctgcagcgagcca

SEQ ID NO: 1768456 - DNA, 15 bp, Homo sapiens
gctgcagcgagccat

SEQ ID NO: 1768457 - DNA, 15 bp, Homo sapiens
ctgcagcgagccatg

SEQ ID NO: 1768458 - DNA, 15 bp, Homo sapiens
tgcagcgagccatga

SEQ ID NO: 1768459 - DNA, 15 bp, Homo sapiens
gcagcgagccatgat

SEQ ID NO: 1768460 - DNA, 15 bp, Homo sapiens
cagcgagccatgatt

SEQ ID NO: 1768461 - DNA, 15 bp, Homo sapiens
agcgagccatgattg

SEQ ID NO: 1768462 - DNA, 15 bp, Homo sapiens
gcgagccatgattgc

SEQ ID NO: 1768463 - DNA, 15 bp, Homo sapiens
cgagccatgattgca

SEQ ID NO: 1768464 - DNA, 15 bp, Homo sapiens
ccatgattgcaccat

SEQ ID NO: 1768465 - DNA, 15 bp, Homo sapiens
catgattgcaccatt

SEQ ID NO: 1768466 - DNA, 15 bp, Homo sapiens
atgattgcaccattg

SEQ ID NO: 1768467 - DNA, 15 bp, Homo sapiens
tgattgcaccattgc

SEQ ID NO: 1768468 - DNA, 15 bp, Homo sapiens
cactccagcctgaag

SEQ ID NO: 1768469 - DNA, 15 bp, Homo sapiens
actccagcctgaagg

SEQ ID NO: 1768470 - DNA, 15 bp, Homo sapiens
ctccagcctgaagga

SEQ ID NO: 1768471 - DNA, 15 bp, Homo sapiens
tccagcctgaaggac

SEQ ID NO: 1768472 - DNA, 15 bp, Homo sapiens
ccagcctgaaggaca

SEQ ID NO: 1768473 - DNA, 15 bp, Homo sapiens
cagcctgaaggacaa

SEQ ID NO: 1768474 - DNA, 15 bp, Homo sapiens
agcctgaaggacaaa

SEQ ID NO: 1768475 - DNA, 15 bp, Homo sapiens
gcctgaaggacaaaa

SEQ ID NO: 1768476 - DNA, 15 bp, Homo sapiens
cctgaaggacaaaaa

SEQ ID NO: 1768477 - DNA, 15 bp, Homo sapiens
ctgaaggacaaaaag

SEQ ID NO: 1768478 - DNA, 15 bp, Homo sapiens
tgaaggacaaaaaga

SEQ ID NO: 1768479 - DNA, 15 bp, Homo sapiens
gaaggacaaaaagag

SEQ ID NO: 1768480 - DNA, 15 bp, Homo sapiens
aaggacaaaaagaga

SEQ ID NO: 1768481 - DNA, 15 bp, Homo sapiens
aggacaaaaagagac

SEQ ID NO: 1768482 - DNA, 15 bp, Homo sapiens
ggacaaaaagagact

SEQ ID NO: 1768483 - DNA, 15 bp, Homo sapiens
gacaaaaagagactc

SEQ ID NO: 1768484 - DNA, 15 bp, Homo sapiens
acaaaaagagactct

SEQ ID NO: 1768485 - DNA, 15 bp, Homo sapiens
caaaaagagactctg

SEQ ID NO: 1768486 - DNA, 15 bp, Homo sapiens
aaaaagagactctgt

SEQ ID NO: 1768487 - DNA, 15 bp, Homo sapiens
aaaagagactctgtc

SEQ ID NO: 1768488 - DNA, 15 bp, Homo sapiens
aaagagactctgtct

SEQ ID NO: 1768489 - DNA, 15 bp, Homo sapiens
aagagactctgtctc

SEQ ID NO: 1768490 - DNA, 15 bp, Homo sapiens
agagactctgtctct

SEQ ID NO: 1768491 - DNA, 15 bp, Homo sapiens
gagactctgtctctc

SEQ ID NO: 1768492 - DNA, 15 bp, Homo sapiens
agactctgtctctcc

SEQ ID NO: 1768493 - DNA, 15 bp, Homo sapiens
gactctgtctctccc

SEQ ID NO: 1768494 - DNA, 15 bp, Homo sapiens
actctgtctctccca

SEQ ID NO: 1768495 - DNA, 15 bp, Homo sapiens
ctctgtctctcccaa

SEQ ID NO: 1768496 - DNA, 15 bp, Homo sapiens
tctgtctctcccaac

SEQ ID NO: 1768497 - DNA, 15 bp, Homo sapiens
ctgtctctcccaacc

SEQ ID NO: 1768498 - DNA, 15 bp, Homo sapiens
tgtctctcccaacca

SEQ ID NO: 1768499 - DNA, 15 bp, Homo sapiens
gtctctcccaaccaa

SEQ ID NO: 1768500 - DNA, 15 bp, Homo sapiens
tctctcccaaccaaa

SEQ ID NO: 1768501 - DNA, 15 bp, Homo sapiens
ctctcccaaccaaat

SEQ ID NO: 1768502 - DNA, 15 bp, Homo sapiens
tctcccaaccaaata

SEQ ID NO: 1768503 - DNA, 15 bp, Homo sapiens
ctcccaaccaaataa

SEQ ID NO: 1768504 - DNA, 15 bp, Homo sapiens
tcccaaccaaataaa

SEQ ID NO: 1768505 - DNA, 15 bp, Homo sapiens
cccaaccaaataaat

SEQ ID NO: 1768506 - DNA, 15 bp, Homo sapiens
ccaaccaaataaata

SEQ ID NO: 1768507 - DNA, 15 bp, Homo sapiens
caaccaaataaataa

SEQ ID NO: 1768508 - DNA, 15 bp, Homo sapiens
aaccaaataaataaa

SEQ ID NO: 1768509 - DNA, 15 bp, Homo sapiens
accaaataaataaat

SEQ ID NO: 1768510 - DNA, 15 bp, Homo sapiens
ccaaataaataaata

SEQ ID NO: 1768511 - DNA, 15 bp, Homo sapiens
caaataaataaataa

SEQ ID NO: 1768512 - DNA, 15 bp, Homo sapiens
ataaataaataaatt

SEQ ID NO: 1768513 - DNA, 15 bp, Homo sapiens
taaataaataaattt

SEQ ID NO: 1768514 - DNA, 15 bp, Homo sapiens
aaataaataaatttc

SEQ ID NO: 1768515 - DNA, 15 bp, Homo sapiens
aataaataaatttca

SEQ ID NO: 1768516 - DNA, 15 bp, Homo sapiens
ataaataaatttcaa

SEQ ID NO: 1768517 - DNA, 15 bp, Homo sapiens
taaataaatttcaaa

SEQ ID NO: 1768518 - DNA, 15 bp, Homo sapiens
aaataaatttcaaaa

SEQ ID NO: 1768519 - DNA, 15 bp, Homo sapiens
aataaatttcaaaaa

SEQ ID NO: 1768520 - DNA, 15 bp, Homo sapiens
ataaatttcaaaaag

SEQ ID NO: 1768521 - DNA, 15 bp, Homo sapiens
taaatttcaaaaagt

SEQ ID NO: 1768522 - DNA, 15 bp, Homo sapiens
aaatttcaaaaagta

SEQ ID NO: 1768523 - DNA, 15 bp, Homo sapiens
aatttcaaaaagtat

SEQ ID NO: 1768524 - DNA, 15 bp, Homo sapiens
atttcaaaaagtatt

SEQ ID NO: 1768525 - DNA, 15 bp, Homo sapiens
tttcaaaaagtattg

SEQ ID NO: 1768526 - DNA, 15 bp, Homo sapiens
ttcaaaaagtattga

SEQ ID NO: 1768527 - DNA, 15 bp, Homo sapiens
tcaaaaagtattgat

SEQ ID NO: 1768528 - DNA, 15 bp, Homo sapiens
caaaaagtattgatt

SEQ ID NO: 1768529 - DNA, 15 bp, Homo sapiens
aaaaagtattgatta

SEQ ID NO: 1768530 - DNA, 15 bp, Homo sapiens
aaaagtattgattac

SEQ ID NO: 1768531 - DNA, 15 bp, Homo sapiens
aaagtattgattaca

SEQ ID NO: 1768532 - DNA, 15 bp, Homo sapiens
aagtattgattacag

SEQ ID NO: 1768533 - DNA, 15 bp, Homo sapiens
agtattgattacagg

SEQ ID NO: 1768534 - DNA, 15 bp, Homo sapiens
gtattgattacaggt

SEQ ID NO: 1768535 - DNA, 15 bp, Homo sapiens
tattgattacaggtt

SEQ ID NO: 1768536 - DNA, 15 bp, Homo sapiens
attgattacaggttg

SEQ ID NO: 1768537 - DNA, 15 bp, Homo sapiens
ttgattacaggttga

SEQ ID NO: 1768538 - DNA, 15 bp, Homo sapiens
tgattacaggttgaa

SEQ ID NO: 1768539 - DNA, 15 bp, Homo sapiens
gattacaggttgaaa

SEQ ID NO: 1768540 - DNA, 15 bp, Homo sapiens
attacaggttgaaat

SEQ ID NO: 1768541 - DNA, 15 bp, Homo sapiens
ttacaggttgaaatg

SEQ ID NO: 1768542 - DNA, 15 bp, Homo sapiens
tacaggttgaaatgg

SEQ ID NO: 1768543 - DNA, 15 bp, Homo sapiens
acaggttgaaatggt

SEQ ID NO: 1768544 - DNA, 15 bp, Homo sapiens
caggttgaaatggta

SEQ ID NO: 1768545 - DNA, 15 bp, Homo sapiens
aggttgaaatggtat

SEQ ID NO: 1768546 - DNA, 15 bp, Homo sapiens
ggttgaaatggtatt

SEQ ID NO: 1768547 - DNA, 15 bp, Homo sapiens
gttgaaatggtattt

SEQ ID NO: 1768548 - DNA, 15 bp, Homo sapiens
ttgaaatggtatttt

SEQ ID NO: 1768549 - DNA, 15 bp, Homo sapiens
tgaaatggtattttt

SEQ ID NO: 1768550 - DNA, 15 bp, Homo sapiens
gaaatggtatttttg

SEQ ID NO: 1768551 - DNA, 15 bp, Homo sapiens
aaatggtatttttgg

SEQ ID NO: 1768552 - DNA, 15 bp, Homo sapiens
aatggtatttttggc

SEQ ID NO: 1768553 - DNA, 15 bp, Homo sapiens
atggtatttttggct

SEQ ID NO: 1768554 - DNA, 15 bp, Homo sapiens
tggtatttttggctg

SEQ ID NO: 1768555 - DNA, 15 bp, Homo sapiens
ggtatttttggctgt

SEQ ID NO: 1768556 - DNA, 15 bp, Homo sapiens
gtatttttggctgta

SEQ ID NO: 1768557 - DNA, 15 bp, Homo sapiens
tatttttggctgtaa

SEQ ID NO: 1768558 - DNA, 15 bp, Homo sapiens
atttttggctgtaaa

SEQ ID NO: 1768559 - DNA, 15 bp, Homo sapiens
tttttggctgtaaat

SEQ ID NO: 1768560 - DNA, 15 bp, Homo sapiens
ttttggctgtaaata

SEQ ID NO: 1768561 - DNA, 15 bp, Homo sapiens
tttggctgtaaataa

SEQ ID NO: 1768562 - DNA, 15 bp, Homo sapiens
ttggctgtaaataat

SEQ ID NO: 1768563 - DNA, 15 bp, Homo sapiens
tggctgtaaataata

SEQ ID NO: 1768564 - DNA, 15 bp, Homo sapiens
ggctgtaaataatat

SEQ ID NO: 1768565 - DNA, 15 bp, Homo sapiens
gctgtaaataatatg

SEQ ID NO: 1768566 - DNA, 15 bp, Homo sapiens
ctgtaaataatatgt

SEQ ID NO: 1768567 - DNA, 15 bp, Homo sapiens
tgtaaataatatgtt

SEQ ID NO: 1768568 - DNA, 15 bp, Homo sapiens
gtaaataatatgtta

SEQ ID NO: 1768569 - DNA, 15 bp, Homo sapiens
taaataatatgttat

SEQ ID NO: 1768570 - DNA, 15 bp, Homo sapiens
aaataatatgttatt

SEQ ID NO: 1768571 - DNA, 15 bp, Homo sapiens
aataatatgttatta

SEQ ID NO: 1768572 - DNA, 15 bp, Homo sapiens
ataatatgttattaa

SEQ ID NO: 1768573 - DNA, 15 bp, Homo sapiens
taatatgttattaaa

SEQ ID NO: 1768574 - DNA, 15 bp, Homo sapiens
aatatgttattaaaa

SEQ ID NO: 1768575 - DNA, 15 bp, Homo sapiens
atatgttattaaaat

SEQ ID NO: 1768576 - DNA, 15 bp, Homo sapiens
tatgttattaaaatt

SEQ ID NO: 1768577 - DNA, 15 bp, Homo sapiens
atgttattaaaatta

SEQ ID NO: 1768578 - DNA, 15 bp, Homo sapiens
tgttattaaaattaa

SEQ ID NO: 1768579 - DNA, 15 bp, Homo sapiens
gttattaaaattaat

SEQ ID NO: 1768580 - DNA, 15 bp, Homo sapiens
ttattaaaattaatt

SEQ ID NO: 1768581 - DNA, 15 bp, Homo sapiens
tattaaaattaattt

SEQ ID NO: 1768582 - DNA, 15 bp, Homo sapiens
attaaaattaatttc

SEQ ID NO: 1768583 - DNA, 15 bp, Homo sapiens
ttaaaattaatttca

SEQ ID NO: 1768584 - DNA, 15 bp, Homo sapiens
taaaattaatttcac

SEQ ID NO: 1768585 - DNA, 15 bp, Homo sapiens
aaaattaatttcacc

SEQ ID NO: 1768586 - DNA, 15 bp, Homo sapiens
aaattaatttcacct

SEQ ID NO: 1768587 - DNA, 15 bp, Homo sapiens
aattaatttcacctg

SEQ ID NO: 1768588 - DNA, 15 bp, Homo sapiens
attaatttcacctgt

SEQ ID NO: 1768589 - DNA, 15 bp, Homo sapiens
ttaatttcacctgtt

SEQ ID NO: 1768590 - DNA, 15 bp, Homo sapiens
taatttcacctgttt

SEQ ID NO: 1768591 - DNA, 15 bp, Homo sapiens
aatttcacctgtttc

SEQ ID NO: 1768592 - DNA, 15 bp, Homo sapiens
atttcacctgtttct

SEQ ID NO: 1768593 - DNA, 15 bp, Homo sapiens
tttcacctgtttctt

SEQ ID NO: 1768594 - DNA, 15 bp, Homo sapiens
ttcacctgtttcttt

SEQ ID NO: 1768595 - DNA, 15 bp, Homo sapiens
tcacctgtttctttt

SEQ ID NO: 1768596 - DNA, 15 bp, Homo sapiens
cacctgtttcttttt

SEQ ID NO: 1768597 - DNA, 15 bp, Homo sapiens
acctgtttcttttta

SEQ ID NO: 1768598 - DNA, 15 bp, Homo sapiens
cctgtttctttttac

SEQ ID NO: 1768599 - DNA, 15 bp, Homo sapiens
ctgtttctttttact

SEQ ID NO: 1768600 - DNA, 15 bp, Homo sapiens
tgtttctttttactt

SEQ ID NO: 1768601 - DNA, 15 bp, Homo sapiens
gtttctttttacttt

SEQ ID NO: 1768602 - DNA, 15 bp, Homo sapiens
tttctttttactttt

SEQ ID NO: 1768603 - DNA, 15 bp, Homo sapiens
ttctttttacttttc

SEQ ID NO: 1768604 - DNA, 15 bp, Homo sapiens
tctttttacttttca

SEQ ID NO: 1768605 - DNA, 15 bp, Homo sapiens
ctttttacttttcaa

SEQ ID NO: 1768606 - DNA, 15 bp, Homo sapiens
tttttacttttcaaa

SEQ ID NO: 1768607 - DNA, 15 bp, Homo sapiens
ttttacttttcaaaa

SEQ ID NO: 1768608 - DNA, 15 bp, Homo sapiens
tttacttttcaaaat

SEQ ID NO: 1768609 - DNA, 15 bp, Homo sapiens
ttacttttcaaaatt

SEQ ID NO: 1768610 - DNA, 15 bp, Homo sapiens
tacttttcaaaattt

SEQ ID NO: 1768611 - DNA, 15 bp, Homo sapiens
acttttcaaaatttg

SEQ ID NO: 1768612 - DNA, 15 bp, Homo sapiens
cttttcaaaatttgg

SEQ ID NO: 1768613 - DNA, 15 bp, Homo sapiens
ttttcaaaatttggc

SEQ ID NO: 1768614 - DNA, 15 bp, Homo sapiens
tttcaaaatttggct

SEQ ID NO: 1768615 - DNA, 15 bp, Homo sapiens
ttcaaaatttggcta

SEQ ID NO: 1768616 - DNA, 15 bp, Homo sapiens
tcaaaatttggctac

SEQ ID NO: 1768617 - DNA, 15 bp, Homo sapiens
caaaatttggctact

SEQ ID NO: 1768618 - DNA, 15 bp, Homo sapiens
aaaatttggctacta

SEQ ID NO: 1768619 - DNA, 15 bp, Homo sapiens
aaatttggctactaa

SEQ ID NO: 1768620 - DNA, 15 bp, Homo sapiens
aatttggctactaaa

SEQ ID NO: 1768621 - DNA, 15 bp, Homo sapiens
atttggctactaaaa

SEQ ID NO: 1768622 - DNA, 15 bp, Homo sapiens
tttggctactaaaat

SEQ ID NO: 1768623 - DNA, 15 bp, Homo sapiens
ttggctactaaaatt

SEQ ID NO: 1768624 - DNA, 15 bp, Homo sapiens
tggctactaaaattt

SEQ ID NO: 1768625 - DNA, 15 bp, Homo sapiens
ggctactaaaatttc

SEQ ID NO: 1768626 - DNA, 15 bp, Homo sapiens
gctactaaaatttca

SEQ ID NO: 1768627 - DNA, 15 bp, Homo sapiens
ctactaaaatttcac

SEQ ID NO: 1768628 - DNA, 15 bp, Homo sapiens
tactaaaatttcact

SEQ ID NO: 1768629 - DNA, 15 bp, Homo sapiens
actaaaatttcactt

SEQ ID NO: 1768630 - DNA, 15 bp, Homo sapiens
ctaaaatttcacttc

SEQ ID NO: 1768631 - DNA, 15 bp, Homo sapiens
taaaatttcacttct

SEQ ID NO: 1768632 - DNA, 15 bp, Homo sapiens
aaaatttcacttctg

SEQ ID NO: 1768633 - DNA, 15 bp, Homo sapiens
aaatttcacttctgt

SEQ ID NO: 1768634 - DNA, 15 bp, Homo sapiens
aatttcacttctgtc

SEQ ID NO: 1768635 - DNA, 15 bp, Homo sapiens
atttcacttctgtct

SEQ ID NO: 1768636 - DNA, 15 bp, Homo sapiens
tttcacttctgtctg

SEQ ID NO: 1768637 - DNA, 15 bp, Homo sapiens
ttcacttctgtctgt

SEQ ID NO: 1768638 - DNA, 15 bp, Homo sapiens
tcacttctgtctgtg

SEQ ID NO: 1768639 - DNA, 15 bp, Homo sapiens
cacttctgtctgtgg

SEQ ID NO: 1768640 - DNA, 15 bp, Homo sapiens
acttctgtctgtggc

SEQ ID NO: 1768641 - DNA, 15 bp, Homo sapiens
cttctgtctgtggct

SEQ ID NO: 1768642 - DNA, 15 bp, Homo sapiens
ttctgtctgtggctt

SEQ ID NO: 1768643 - DNA, 15 bp, Homo sapiens
tctgtctgtggcttg

SEQ ID NO: 1768644 - DNA, 15 bp, Homo sapiens
ctgtctgtggcttgc

SEQ ID NO: 1768645 - DNA, 15 bp, Homo sapiens
tgtctgtggcttgca

SEQ ID NO: 1768646 - DNA, 15 bp, Homo sapiens
gtctgtggcttgcat

SEQ ID NO: 1768647 - DNA, 15 bp, Homo sapiens
tctgtggcttgcatt

SEQ ID NO: 1768648 - DNA, 15 bp, Homo sapiens
ctgtggcttgcatta

SEQ ID NO: 1768649 - DNA, 15 bp, Homo sapiens
tgtggcttgcattac

SEQ ID NO: 1768650 - DNA, 15 bp, Homo sapiens
gtggcttgcattacc

SEQ ID NO: 1768651 - DNA, 15 bp, Homo sapiens
tggcttgcattaccc

SEQ ID NO: 1768652 - DNA, 15 bp, Homo sapiens
ggcttgcattaccct

SEQ ID NO: 1768653 - DNA, 15 bp, Homo sapiens
gcttgcattaccctt

SEQ ID NO: 1768654 - DNA, 15 bp, Homo sapiens
cttgcattacccttc

SEQ ID NO: 1768655 - DNA, 15 bp, Homo sapiens
ttgcattacccttct

SEQ ID NO: 1768656 - DNA, 15 bp, Homo sapiens
tgcattacccttctc

SEQ ID NO: 1768657 - DNA, 15 bp, Homo sapiens
gcattacccttctct

SEQ ID NO: 1768658 - DNA, 15 bp, Homo sapiens
cattacccttctctg

SEQ ID NO: 1768659 - DNA, 15 bp, Homo sapiens
attacccttctctgg

SEQ ID NO: 1768660 - DNA, 15 bp, Homo sapiens
ttacccttctctggg

SEQ ID NO: 1768661 - DNA, 15 bp, Homo sapiens
tacccttctctggga

SEQ ID NO: 1768662 - DNA, 15 bp, Homo sapiens
acccttctctgggac

SEQ ID NO: 1768663 - DNA, 15 bp, Homo sapiens
cccttctctgggacc

SEQ ID NO: 1768664 - DNA, 15 bp, Homo sapiens
ccttctctgggacca

SEQ ID NO: 1768665 - DNA, 15 bp, Homo sapiens
cttctctgggaccat

SEQ ID NO: 1768666 - DNA, 15 bp, Homo sapiens
ttctctgggaccatg

SEQ ID NO: 1768667 - DNA, 15 bp, Homo sapiens
tctctgggaccatgc

SEQ ID NO: 1768668 - DNA, 15 bp, Homo sapiens
ctctgggaccatgct

SEQ ID NO: 1768669 - DNA, 15 bp, Homo sapiens
tctgggaccatgctg

SEQ ID NO: 1768670 - DNA, 15 bp, Homo sapiens
ctgggaccatgctgt

SEQ ID NO: 1768671 - DNA, 15 bp, Homo sapiens
tgggaccatgctgtt

SEQ ID NO: 1768672 - DNA, 15 bp, Homo sapiens
gggaccatgctgttc

SEQ ID NO: 1768673 - DNA, 15 bp, Homo sapiens
ggaccatgctgttct

SEQ ID NO: 1768674 - DNA, 15 bp, Homo sapiens
gaccatgctgttcta

SEQ ID NO: 1768675 - DNA, 15 bp, Homo sapiens
accatgctgttctac

SEQ ID NO: 1768676 - DNA, 15 bp, Homo sapiens
ccatgctgttctaca

SEQ ID NO: 1768677 - DNA, 15 bp, Homo sapiens
catgctgttctacaa

SEQ ID NO: 1768678 - DNA, 15 bp, Homo sapiens
atgctgttctacaag

SEQ ID NO: 1768679 - DNA, 15 bp, Homo sapiens
tgctgttctacaagt

SEQ ID NO: 1768680 - DNA, 15 bp, Homo sapiens
gctgttctacaagtt

SEQ ID NO: 1768681 - DNA, 15 bp, Homo sapiens
ctgttctacaagttc

SEQ ID NO: 1768682 - DNA, 15 bp, Homo sapiens
tgttctacaagttcc

SEQ ID NO: 1768683 - DNA, 15 bp, Homo sapiens
gttctacaagttccc

SEQ ID NO: 1768684 - DNA, 15 bp, Homo sapiens
ttctacaagttccct

SEQ ID NO: 1768685 - DNA, 15 bp, Homo sapiens
tctacaagttccctg

SEQ ID NO: 1768686 - DNA, 15 bp, Homo sapiens
ctacaagttccctgt

SEQ ID NO: 1768687 - DNA, 15 bp, Homo sapiens
tacaagttccctgtt

SEQ ID NO: 1768688 - DNA, 15 bp, Homo sapiens
acaagttccctgttt

SEQ ID NO: 1768689 - DNA, 15 bp, Homo sapiens
caagttccctgtttg

SEQ ID NO: 1768690 - DNA, 15 bp, Homo sapiens
aagttccctgtttga

SEQ ID NO: 1768691 - DNA, 15 bp, Homo sapiens
agttccctgtttgaa

SEQ ID NO: 1768692 - DNA, 15 bp, Homo sapiens
gttccctgtttgaac

SEQ ID NO: 1768693 - DNA, 15 bp, Homo sapiens
ttccctgtttgaaca

SEQ ID NO: 1768694 - DNA, 15 bp, Homo sapiens
tccctgtttgaacag

SEQ ID NO: 1768695 - DNA, 15 bp, Homo sapiens
ccctgtttgaacaga

SEQ ID NO: 1768696 - DNA, 15 bp, Homo sapiens
cctgtttgaacagac

SEQ ID NO: 1768697 - DNA, 15 bp, Homo sapiens
ctgtttgaacagaca

SEQ ID NO: 1768698 - DNA, 15 bp, Homo sapiens
tgtttgaacagacat

SEQ ID NO: 1768699 - DNA, 15 bp, Homo sapiens
gtttgaacagacata

SEQ ID NO: 1768700 - DNA, 15 bp, Homo sapiens
tttgaacagacatag

SEQ ID NO: 1768701 - DNA, 15 bp, Homo sapiens
ttgaacagacatagt

SEQ ID NO: 1768702 - DNA, 15 bp, Homo sapiens
tgaacagacatagtt

SEQ ID NO: 1768703 - DNA, 15 bp, Homo sapiens
gaacagacatagtta

SEQ ID NO: 1768704 - DNA, 15 bp, Homo sapiens
aacagacatagttat

SEQ ID NO: 1768705 - DNA, 15 bp, Homo sapiens
acagacatagttatt

SEQ ID NO: 1768706 - DNA, 15 bp, Homo sapiens
cagacatagttattt

SEQ ID NO: 1768707 - DNA, 15 bp, Homo sapiens
agacatagttatttt

SEQ ID NO: 1768708 - DNA, 15 bp, Homo sapiens
gacatagttattttt

SEQ ID NO: 1768709 - DNA, 15 bp, Homo sapiens
acatagttatttttg

SEQ ID NO: 1768710 - DNA, 15 bp, Homo sapiens
catagttatttttgc

SEQ ID NO: 1768711 - DNA, 15 bp, Homo sapiens
atagttatttttgcc

SEQ ID NO: 1768712 - DNA, 15 bp, Homo sapiens
tagttatttttgcca

SEQ ID NO: 1768713 - DNA, 15 bp, Homo sapiens
agttatttttgccac

SEQ ID NO: 1768714 - DNA, 15 bp, Homo sapiens
gttatttttgccact

SEQ ID NO: 1768715 - DNA, 15 bp, Homo sapiens
ttatttttgccactg

SEQ ID NO: 1768716 - DNA, 15 bp, Homo sapiens
tatttttgccactga

SEQ ID NO: 1768717 - DNA, 15 bp, Homo sapiens
atttttgccactgat

SEQ ID NO: 1768718 - DNA, 15 bp, Homo sapiens
tttttgccactgatt

SEQ ID NO: 1768719 - DNA, 15 bp, Homo sapiens
ttttgccactgattt

SEQ ID NO: 1768720 - DNA, 15 bp, Homo sapiens
tttgccactgatttt

SEQ ID NO: 1768721 - DNA, 15 bp, Homo sapiens
ttgccactgattttt

SEQ ID NO: 1768722 - DNA, 15 bp, Homo sapiens
tgccactgatttttc

SEQ ID NO: 1768723 - DNA, 15 bp, Homo sapiens
gccactgatttttct

SEQ ID NO: 1768724 - DNA, 15 bp, Homo sapiens
ccactgatttttctc

SEQ ID NO: 1768725 - DNA, 15 bp, Homo sapiens
cactgatttttctca

SEQ ID NO: 1768726 - DNA, 15 bp, Homo sapiens
actgatttttctcag

SEQ ID NO: 1768727 - DNA, 15 bp, Homo sapiens
ctgatttttctcagc

SEQ ID NO: 1768728 - DNA, 15 bp, Homo sapiens
tgatttttctcagct

SEQ ID NO: 1768729 - DNA, 15 bp, Homo sapiens
gatttttctcagctt

SEQ ID NO: 1768730 - DNA, 15 bp, Homo sapiens
atttttctcagcttg

SEQ ID NO: 1768731 - DNA, 15 bp, Homo sapiens
tttttctcagcttgc

SEQ ID NO: 1768732 - DNA, 15 bp, Homo sapiens
ttttctcagcttgct

SEQ ID NO: 1768733 - DNA, 15 bp, Homo sapiens
tttctcagcttgctt

SEQ ID NO: 1768734 - DNA, 15 bp, Homo sapiens
ttctcagcttgcttg

SEQ ID NO: 1768735 - DNA, 15 bp, Homo sapiens
tctcagcttgcttgg

SEQ ID NO: 1768736 - DNA, 15 bp, Homo sapiens
ctcagcttgcttgga

SEQ ID NO: 1768737 - DNA, 15 bp, Homo sapiens
tcagcttgcttggag

SEQ ID NO: 1768738 - DNA, 15 bp, Homo sapiens
cagcttgcttggagg

SEQ ID NO: 1768739 - DNA, 15 bp, Homo sapiens
agcttgcttggaggc

SEQ ID NO: 1768740 - DNA, 15 bp, Homo sapiens
gcttgcttggaggca

SEQ ID NO: 1768741 - DNA, 15 bp, Homo sapiens
cttgcttggaggcat

SEQ ID NO: 1768742 - DNA, 15 bp, Homo sapiens
ttgcttggaggcatc

SEQ ID NO: 1768743 - DNA, 15 bp, Homo sapiens
tgcttggaggcatct

SEQ ID NO: 1768744 - DNA, 15 bp, Homo sapiens
gcttggaggcatctt

SEQ ID NO: 1768745 - DNA, 15 bp, Homo sapiens
cttggaggcatcttg

SEQ ID NO: 1768746 - DNA, 15 bp, Homo sapiens
ttggaggcatcttga

SEQ ID NO: 1768747 - DNA, 15 bp, Homo sapiens
tggaggcatcttgaa

SEQ ID NO: 1768748 - DNA, 15 bp, Homo sapiens
ggaggcatcttgaat

SEQ ID NO: 1768749 - DNA, 15 bp, Homo sapiens
gaggcatcttgaatg

SEQ ID NO: 1768750 - DNA, 15 bp, Homo sapiens
aggcatcttgaatgt

SEQ ID NO: 1768751 - DNA, 15 bp, Homo sapiens
ggcatcttgaatgtg

SEQ ID NO: 1768752 - DNA, 15 bp, Homo sapiens
gcatcttgaatgtgc

SEQ ID NO: 1768753 - DNA, 15 bp, Homo sapiens
catcttgaatgtgcc

SEQ ID NO: 1768754 - DNA, 15 bp, Homo sapiens
atcttgaatgtgcct

SEQ ID NO: 1768755 - DNA, 15 bp, Homo sapiens
tcttgaatgtgcctc

SEQ ID NO: 1768756 - DNA, 15 bp, Homo sapiens
cttgaatgtgcctca

SEQ ID NO: 1768757 - DNA, 15 bp, Homo sapiens
ttgaatgtgcctcat

SEQ ID NO: 1768758 - DNA, 15 bp, Homo sapiens
tgaatgtgcctcatc

SEQ ID NO: 1768759 - DNA, 15 bp, Homo sapiens
gaatgtgcctcatcc

SEQ ID NO: 1768760 - DNA, 15 bp, Homo sapiens
aatgtgcctcatcca

SEQ ID NO: 1768761 - DNA, 15 bp, Homo sapiens
atgtgcctcatccaa

SEQ ID NO: 1768762 - DNA, 15 bp, Homo sapiens
tgtgcctcatccaaa

SEQ ID NO: 1768763 - DNA, 15 bp, Homo sapiens
gtgcctcatccaaac

SEQ ID NO: 1768764 - DNA, 15 bp, Homo sapiens
tgcctcatccaaact

SEQ ID NO: 1768765 - DNA, 15 bp, Homo sapiens
gcctcatccaaactg

SEQ ID NO: 1768766 - DNA, 15 bp, Homo sapiens
cctcatccaaactgg

SEQ ID NO: 1768767 - DNA, 15 bp, Homo sapiens
ctcatccaaactgga

SEQ ID NO: 1768768 - DNA, 15 bp, Homo sapiens
tcatccaaactggac

SEQ ID NO: 1768769 - DNA, 15 bp, Homo sapiens
catccaaactggact

SEQ ID NO: 1768770 - DNA, 15 bp, Homo sapiens
atccaaactggactg

SEQ ID NO: 1768771 - DNA, 15 bp, Homo sapiens
tccaaactggactga

SEQ ID NO: 1768772 - DNA, 15 bp, Homo sapiens
ccaaactggactgag

SEQ ID NO: 1768773 - DNA, 15 bp, Homo sapiens
caaactggactgagt

SEQ ID NO: 1768774 - DNA, 15 bp, Homo sapiens
aaactggactgagtt

SEQ ID NO: 1768775 - DNA, 15 bp, Homo sapiens
aactggactgagtta

SEQ ID NO: 1768776 - DNA, 15 bp, Homo sapiens
actggactgagttaa

SEQ ID NO: 1768777 - DNA, 15 bp, Homo sapiens
ctggactgagttaat

SEQ ID NO: 1768778 - DNA, 15 bp, Homo sapiens
tggactgagttaatg

SEQ ID NO: 1768779 - DNA, 15 bp, Homo sapiens
ggactgagttaatga

SEQ ID NO: 1768780 - DNA, 15 bp, Homo sapiens
gactgagttaatgaa

SEQ ID NO: 1768781 - DNA, 15 bp, Homo sapiens
actgagttaatgaag

SEQ ID NO: 1768782 - DNA, 15 bp, Homo sapiens
ctgagttaatgaagg

SEQ ID NO: 1768783 - DNA, 15 bp, Homo sapiens
tgagttaatgaagga

SEQ ID NO: 1768784 - DNA, 15 bp, Homo sapiens
gagttaatgaaggaa

SEQ ID NO: 1768785 - DNA, 15 bp, Homo sapiens
agttaatgaaggaag

SEQ ID NO: 1768786 - DNA, 15 bp, Homo sapiens
gttaatgaaggaaga

SEQ ID NO: 1768787 - DNA, 15 bp, Homo sapiens
ttaatgaaggaagaa

SEQ ID NO: 1768788 - DNA, 15 bp, Homo sapiens
taatgaaggaagaaa

SEQ ID NO: 1768789 - DNA, 15 bp, Homo sapiens
aatgaaggaagaaat

SEQ ID NO: 1768790 - DNA, 15 bp, Homo sapiens
atgaaggaagaaatg

SEQ ID NO: 1768791 - DNA, 15 bp, Homo sapiens
tgaaggaagaaatga

SEQ ID NO: 1768792 - DNA, 15 bp, Homo sapiens
gaaggaagaaatgat

SEQ ID NO: 1768793 - DNA, 15 bp, Homo sapiens
aaggaagaaatgatt

SEQ ID NO: 1768794 - DNA, 15 bp, Homo sapiens
aggaagaaatgattg

SEQ ID NO: 1768795 - DNA, 15 bp, Homo sapiens
ggaagaaatgattga

SEQ ID NO: 1768796 - DNA, 15 bp, Homo sapiens
gaagaaatgattgaa

SEQ ID NO: 1768797 - DNA, 15 bp, Homo sapiens
aagaaatgattgaat

SEQ ID NO: 1768798 - DNA, 15 bp, Homo sapiens
agaaatgattgaatt

SEQ ID NO: 1768799 - DNA, 15 bp, Homo sapiens
gaaatgattgaattg

SEQ ID NO: 1768800 - DNA, 15 bp, Homo sapiens
aaatgattgaattgt

SEQ ID NO: 1768801 - DNA, 15 bp, Homo sapiens
aatgattgaattgtc

SEQ ID NO: 1768802 - DNA, 15 bp, Homo sapiens
atgattgaattgtca

SEQ ID NO: 1768803 - DNA, 15 bp, Homo sapiens
tgattgaattgtcaa

SEQ ID NO: 1768804 - DNA, 15 bp, Homo sapiens
gattgaattgtcaac

SEQ ID NO: 1768805 - DNA, 15 bp, Homo sapiens
attgaattgtcaact

SEQ ID NO: 1768806 - DNA, 15 bp, Homo sapiens
ttgaattgtcaactc

SEQ ID NO: 1768807 - DNA, 15 bp, Homo sapiens
tgaattgtcaactcc

SEQ ID NO: 1768808 - DNA, 15 bp, Homo sapiens
gaattgtcaactcct

SEQ ID NO: 1768809 - DNA, 15 bp, Homo sapiens
aattgtcaactcctt

SEQ ID NO: 1768810 - DNA, 15 bp, Homo sapiens
attgtcaactccttc

SEQ ID NO: 1768811 - DNA, 15 bp, Homo sapiens
ttgtcaactccttct

SEQ ID NO: 1768812 - DNA, 15 bp, Homo sapiens
tgtcaactccttcta

SEQ ID NO: 1768813 - DNA, 15 bp, Homo sapiens
gtcaactccttctag

SEQ ID NO: 1768814 - DNA, 15 bp, Homo sapiens
tcaactccttctagg

SEQ ID NO: 1768815 - DNA, 15 bp, Homo sapiens
caactccttctaggt

SEQ ID NO: 1768816 - DNA, 15 bp, Homo sapiens
aactccttctaggtt

SEQ ID NO: 1768817 - DNA, 15 bp, Homo sapiens
actccttctaggttc

SEQ ID NO: 1768818 - DNA, 15 bp, Homo sapiens
ctccttctaggttcc

SEQ ID NO: 1768819 - DNA, 15 bp, Homo sapiens
tccttctaggttcca

SEQ ID NO: 1768820 - DNA, 15 bp, Homo sapiens
ccttctaggttccaa

SEQ ID NO: 1768821 - DNA, 15 bp, Homo sapiens
cttctaggttccaat

SEQ ID NO: 1768822 - DNA, 15 bp, Homo sapiens
ttctaggttccaatc

SEQ ID NO: 1768823 - DNA, 15 bp, Homo sapiens
tctaggttccaatct

SEQ ID NO: 1768824 - DNA, 15 bp, Homo sapiens
ctaggttccaatctc

SEQ ID NO: 1768825 - DNA, 15 bp, Homo sapiens
taggttccaatctct

SEQ ID NO: 1768826 - DNA, 15 bp, Homo sapiens
aggttccaatctctt

SEQ ID NO: 1768827 - DNA, 15 bp, Homo sapiens
ggttccaatctcttt

SEQ ID NO: 1768828 - DNA, 15 bp, Homo sapiens
gttccaatctctttc

SEQ ID NO: 1768829 - DNA, 15 bp, Homo sapiens
ttccaatctctttct

SEQ ID NO: 1768830 - DNA, 15 bp, Homo sapiens
tccaatctctttctt

SEQ ID NO: 1768831 - DNA, 15 bp, Homo sapiens
ccaatctctttctta

SEQ ID NO: 1768832 - DNA, 15 bp, Homo sapiens
caatctctttcttaa

SEQ ID NO: 1768833 - DNA, 15 bp, Homo sapiens
aatctctttcttaat

SEQ ID NO: 1768834 - DNA, 15 bp, Homo sapiens
atctctttcttaatt

SEQ ID NO: 1768835 - DNA, 15 bp, Homo sapiens
tctctttcttaattg

SEQ ID NO: 1768836 - DNA, 15 bp, Homo sapiens
ctctttcttaattgt

SEQ ID NO: 1768837 - DNA, 15 bp, Homo sapiens
tctttcttaattgtc

SEQ ID NO: 1768838 - DNA, 15 bp, Homo sapiens
ctttcttaattgtct

SEQ ID NO: 1768839 - DNA, 15 bp, Homo sapiens
tttcttaattgtctc

SEQ ID NO: 1768840 - DNA, 15 bp, Homo sapiens
ttcttaattgtctcc

SEQ ID NO: 1768841 - DNA, 15 bp, Homo sapiens
tcttaattgtctcca

SEQ ID NO: 1768842 - DNA, 15 bp, Homo sapiens
cttaattgtctccag

SEQ ID NO: 1768843 - DNA, 15 bp, Homo sapiens
ttaattgtctccagt

SEQ ID NO: 1768844 - DNA, 15 bp, Homo sapiens
taattgtctccagtt

SEQ ID NO: 1768845 - DNA, 15 bp, Homo sapiens
aattgtctccagttt

SEQ ID NO: 1768846 - DNA, 15 bp, Homo sapiens
attgtctccagtttg

SEQ ID NO: 1768847 - DNA, 15 bp, Homo sapiens
ttgtctccagtttgg

SEQ ID NO: 1768848 - DNA, 15 bp, Homo sapiens
tgtctccagtttgga

SEQ ID NO: 1768849 - DNA, 15 bp, Homo sapiens
gtctccagtttggaa

SEQ ID NO: 1768850 - DNA, 15 bp, Homo sapiens
tctccagtttggaag

SEQ ID NO: 1768851 - DNA, 15 bp, Homo sapiens
ctccagtttggaagt

SEQ ID NO: 1768852 - DNA, 15 bp, Homo sapiens
tccagtttggaagta

SEQ ID NO: 1768853 - DNA, 15 bp, Homo sapiens
ccagtttggaagtag

SEQ ID NO: 1768854 - DNA, 15 bp, Homo sapiens
cagtttggaagtagc

SEQ ID NO: 1768855 - DNA, 15 bp, Homo sapiens
agtttggaagtagcc

SEQ ID NO: 1768856 - DNA, 15 bp, Homo sapiens
gtttggaagtagcca

SEQ ID NO: 1768857 - DNA, 15 bp, Homo sapiens
tttggaagtagccac

SEQ ID NO: 1768858 - DNA, 15 bp, Homo sapiens
ttggaagtagccaca

SEQ ID NO: 1768859 - DNA, 15 bp, Homo sapiens
tggaagtagccacag

SEQ ID NO: 1768860 - DNA, 15 bp, Homo sapiens
ggaagtagccacagg

SEQ ID NO: 1768861 - DNA, 15 bp, Homo sapiens
gaagtagccacaggt

SEQ ID NO: 1768862 - DNA, 15 bp, Homo sapiens
aagtagccacaggta

SEQ ID NO: 1768863 - DNA, 15 bp, Homo sapiens
agtagccacaggtaa

SEQ ID NO: 1768864 - DNA, 15 bp, Homo sapiens
gtagccacaggtaaa

SEQ ID NO: 1768865 - DNA, 15 bp, Homo sapiens
tagccacaggtaaac

SEQ ID NO: 1768866 - DNA, 15 bp, Homo sapiens
agccacaggtaaacc

SEQ ID NO: 1768867 - DNA, 15 bp, Homo sapiens
gccacaggtaaaccc

SEQ ID NO: 1768868 - DNA, 15 bp, Homo sapiens
ccacaggtaaaccca

SEQ ID NO: 1768869 - DNA, 15 bp, Homo sapiens
cacaggtaaacccac

SEQ ID NO: 1768870 - DNA, 15 bp, Homo sapiens
acaggtaaacccacc

SEQ ID NO: 1768871 - DNA, 15 bp, Homo sapiens
caggtaaacccaccg

SEQ ID NO: 1768872 - DNA, 15 bp, Homo sapiens
aggtaaacccaccgg

SEQ ID NO: 1768873 - DNA, 15 bp, Homo sapiens
ggtaaacccaccggg

SEQ ID NO: 1768874 - DNA, 15 bp, Homo sapiens
gtaaacccaccgggg

SEQ ID NO: 1768875 - DNA, 15 bp, Homo sapiens
taaacccaccgggga

SEQ ID NO: 1768876 - DNA, 15 bp, Homo sapiens
aaacccaccggggac

SEQ ID NO: 1768877 - DNA, 15 bp, Homo sapiens
aacccaccggggacc

SEQ ID NO: 1768878 - DNA, 15 bp, Homo sapiens
acccaccggggacct

SEQ ID NO: 1768879 - DNA, 15 bp, Homo sapiens
cccaccggggacctt

SEQ ID NO: 1768880 - DNA, 15 bp, Homo sapiens
ccaccggggacctta

SEQ ID NO: 1768881 - DNA, 15 bp, Homo sapiens
caccggggaccttac

SEQ ID NO: 1768882 - DNA, 15 bp, Homo sapiens
accggggaccttacc

SEQ ID NO: 1768883 - DNA, 15 bp, Homo sapiens
ccggggaccttacct

SEQ ID NO: 1768884 - DNA, 15 bp, Homo sapiens
cggggaccttacctg

SEQ ID NO: 1768885 - DNA, 15 bp, Homo sapiens
ggggaccttacctgg

SEQ ID NO: 1768886 - DNA, 15 bp, Homo sapiens
gggaccttacctgga

SEQ ID NO: 1768887 - DNA, 15 bp, Homo sapiens
ggaccttacctggaa

SEQ ID NO: 1768888 - DNA, 15 bp, Homo sapiens
gaccttacctggaaa

SEQ ID NO: 1768889 - DNA, 15 bp, Homo sapiens
accttacctggaaac

SEQ ID NO: 1768890 - DNA, 15 bp, Homo sapiens
ccttacctggaaact

SEQ ID NO: 1768891 - DNA, 15 bp, Homo sapiens
cttacctggaaactg

SEQ ID NO: 1768892 - DNA, 15 bp, Homo sapiens
ttacctggaaactgc

SEQ ID NO: 1768893 - DNA, 15 bp, Homo sapiens
tacctggaaactgct

SEQ ID NO: 1768894 - DNA, 15 bp, Homo sapiens
acctggaaactgctt

SEQ ID NO: 1768895 - DNA, 15 bp, Homo sapiens
cctggaaactgcttc

SEQ ID NO: 1768896 - DNA, 15 bp, Homo sapiens
ctggaaactgcttca

SEQ ID NO: 1768897 - DNA, 15 bp, Homo sapiens
tggaaactgcttcat

SEQ ID NO: 1768898 - DNA, 15 bp, Homo sapiens
ggaaactgcttcatt

SEQ ID NO: 1768899 - DNA, 15 bp, Homo sapiens
gaaactgcttcattt

SEQ ID NO: 1768900 - DNA, 15 bp, Homo sapiens
aaactgcttcatttc

SEQ ID NO: 1768901 - DNA, 15 bp, Homo sapiens
aactgcttcatttct

SEQ ID NO: 1768902 - DNA, 15 bp, Homo sapiens
actgcttcatttctc

SEQ ID NO: 1768903 - DNA, 15 bp, Homo sapiens
ctgcttcatttctct

SEQ ID NO: 1768904 - DNA, 15 bp, Homo sapiens
tgcttcatttctctc

SEQ ID NO: 1768905 - DNA, 15 bp, Homo sapiens
gcttcatttctctct

SEQ ID NO: 1768906 - DNA, 15 bp, Homo sapiens
cttcatttctctcta

SEQ ID NO: 1768907 - DNA, 15 bp, Homo sapiens
ttcatttctctctag

SEQ ID NO: 1768908 - DNA, 15 bp, Homo sapiens
tcatttctctctaga

SEQ ID NO: 1768909 - DNA, 15 bp, Homo sapiens
catttctctctagac

SEQ ID NO: 1768910 - DNA, 15 bp, Homo sapiens
atttctctctagact

SEQ ID NO: 1768911 - DNA, 15 bp, Homo sapiens
tttctctctagactg

SEQ ID NO: 1768912 - DNA, 15 bp, Homo sapiens
ttctctctagactgg

SEQ ID NO: 1768913 - DNA, 15 bp, Homo sapiens
tctctctagactggg

SEQ ID NO: 1768914 - DNA, 15 bp, Homo sapiens
ctctctagactggga

SEQ ID NO: 1768915 - DNA, 15 bp, Homo sapiens
tctctagactgggaa

SEQ ID NO: 1768916 - DNA, 15 bp, Homo sapiens
ctctagactgggaag

SEQ ID NO: 1768917 - DNA, 15 bp, Homo sapiens
tctagactgggaagg

SEQ ID NO: 1768918 - DNA, 15 bp, Homo sapiens
ctagactgggaaggc

SEQ ID NO: 1768919 - DNA, 15 bp, Homo sapiens
tagactgggaaggcc

SEQ ID NO: 1768920 - DNA, 15 bp, Homo sapiens
agactgggaaggccc

SEQ ID NO: 1768921 - DNA, 15 bp, Homo sapiens
gactgggaaggccca

SEQ ID NO: 1768922 - DNA, 15 bp, Homo sapiens
actgggaaggcccac

SEQ ID NO: 1768923 - DNA, 15 bp, Homo sapiens
ctgggaaggcccaca

SEQ ID NO: 1768924 - DNA, 15 bp, Homo sapiens
tgggaaggcccacaa

SEQ ID NO: 1768925 - DNA, 15 bp, Homo sapiens
gggaaggcccacaag

SEQ ID NO: 1768926 - DNA, 15 bp, Homo sapiens
ggaaggcccacaagc

SEQ ID NO: 1768927 - DNA, 15 bp, Homo sapiens
gaaggcccacaagca

SEQ ID NO: 1768928 - DNA, 15 bp, Homo sapiens
aaggcccacaagcac

SEQ ID NO: 1768929 - DNA, 15 bp, Homo sapiens
aggcccacaagcacc

SEQ ID NO: 1768930 - DNA, 15 bp, Homo sapiens
ggcccacaagcaccc

SEQ ID NO: 1768931 - DNA, 15 bp, Homo sapiens
gcccacaagcaccca

SEQ ID NO: 1768932 - DNA, 15 bp, Homo sapiens
cccacaagcacccag

SEQ ID NO: 1768933 - DNA, 15 bp, Homo sapiens
ccacaagcacccagg

SEQ ID NO: 1768934 - DNA, 15 bp, Homo sapiens
cacaagcacccaggg

SEQ ID NO: 1768935 - DNA, 15 bp, Homo sapiens
acaagcacccaggga

SEQ ID NO: 1768936 - DNA, 15 bp, Homo sapiens
caagcacccagggaa

SEQ ID NO: 1768937 - DNA, 15 bp, Homo sapiens
aagcacccagggaac

SEQ ID NO: 1768938 - DNA, 15 bp, Homo sapiens
agcacccagggaacc

SEQ ID NO: 1768939 - DNA, 15 bp, Homo sapiens
gcacccagggaacca

SEQ ID NO: 1768940 - DNA, 15 bp, Homo sapiens
cacccagggaaccaa

SEQ ID NO: 1768941 - DNA, 15 bp, Homo sapiens
acccagggaaccaat

SEQ ID NO: 1768942 - DNA, 15 bp, Homo sapiens
cccagggaaccaatg

SEQ ID NO: 1768943 - DNA, 15 bp, Homo sapiens
ccagggaaccaatga

SEQ ID NO: 1768944 - DNA, 15 bp, Homo sapiens
cagggaaccaatgac

SEQ ID NO: 1768945 - DNA, 15 bp, Homo sapiens
agggaaccaatgaca

SEQ ID NO: 1768946 - DNA, 15 bp, Homo sapiens
gggaaccaatgacag

SEQ ID NO: 1768947 - DNA, 15 bp, Homo sapiens
ggaaccaatgacagg

SEQ ID NO: 1768948 - DNA, 15 bp, Homo sapiens
gaaccaatgacaggt

SEQ ID NO: 1768949 - DNA, 15 bp, Homo sapiens
aaccaatgacaggtg

SEQ ID NO: 1768950 - DNA, 15 bp, Homo sapiens
accaatgacaggtgg

SEQ ID NO: 1768951 - DNA, 15 bp, Homo sapiens
ccaatgacaggtgga

SEQ ID NO: 1768952 - DNA, 15 bp, Homo sapiens
caatgacaggtggac

SEQ ID NO: 1768953 - DNA, 15 bp, Homo sapiens
aatgacaggtggaca

SEQ ID NO: 1768954 - DNA, 15 bp, Homo sapiens
atgacaggtggacat

SEQ ID NO: 1768955 - DNA, 15 bp, Homo sapiens
tgacaggtggacatg

SEQ ID NO: 1768956 - DNA, 15 bp, Homo sapiens
gacaggtggacatgc

SEQ ID NO: 1768957 - DNA, 15 bp, Homo sapiens
acaggtggacatgcc

SEQ ID NO: 1768958 - DNA, 15 bp, Homo sapiens
caggtggacatgcct

SEQ ID NO: 1768959 - DNA, 15 bp, Homo sapiens
aggtggacatgcctc

SEQ ID NO: 1768960 - DNA, 15 bp, Homo sapiens
ggtggacatgcctcc

SEQ ID NO: 1768961 - DNA, 15 bp, Homo sapiens
gtggacatgcctcct

SEQ ID NO: 1768962 - DNA, 15 bp, Homo sapiens
tggacatgcctcctt

SEQ ID NO: 1768963 - DNA, 15 bp, Homo sapiens
ggacatgcctccttc

SEQ ID NO: 1768964 - DNA, 15 bp, Homo sapiens
gacatgcctccttca

SEQ ID NO: 1768965 - DNA, 15 bp, Homo sapiens
acatgcctccttcaa

SEQ ID NO: 1768966 - DNA, 15 bp, Homo sapiens
catgcctccttcaag

SEQ ID NO: 1768967 - DNA, 15 bp, Homo sapiens
atgcctccttcaagg

SEQ ID NO: 1768968 - DNA, 15 bp, Homo sapiens
tgcctccttcaaggg

SEQ ID NO: 1768969 - DNA, 15 bp, Homo sapiens
gcctccttcaagggg

SEQ ID NO: 1768970 - DNA, 15 bp, Homo sapiens
cctccttcaaggggc

SEQ ID NO: 1768971 - DNA, 15 bp, Homo sapiens
ctccttcaaggggca

SEQ ID NO: 1768972 - DNA, 15 bp, Homo sapiens
tccttcaaggggcac

SEQ ID NO: 1768973 - DNA, 15 bp, Homo sapiens
ccttcaaggggcaca

SEQ ID NO: 1768974 - DNA, 15 bp, Homo sapiens
cttcaaggggcacag

SEQ ID NO: 1768975 - DNA, 15 bp, Homo sapiens
ttcaaggggcacagc

SEQ ID NO: 1768976 - DNA, 15 bp, Homo sapiens
tcaaggggcacagct

SEQ ID NO: 1768977 - DNA, 15 bp, Homo sapiens
caaggggcacagctc

SEQ ID NO: 1768978 - DNA, 15 bp, Homo sapiens
aaggggcacagctcc

SEQ ID NO: 1768979 - DNA, 15 bp, Homo sapiens
aggggcacagctccc

SEQ ID NO: 1768980 - DNA, 15 bp, Homo sapiens
ggggcacagctccct

SEQ ID NO: 1768981 - DNA, 15 bp, Homo sapiens
gggcacagctccctg

SEQ ID NO: 1768982 - DNA, 15 bp, Homo sapiens
ggcacagctccctgg

SEQ ID NO: 1768983 - DNA, 15 bp, Homo sapiens
gcacagctccctggg

SEQ ID NO: 1768984 - DNA, 15 bp, Homo sapiens
cacagctccctggga

SEQ ID NO: 1768985 - DNA, 15 bp, Homo sapiens
acagctccctgggag

SEQ ID NO: 1768986 - DNA, 15 bp, Homo sapiens
cagctccctgggagc

SEQ ID NO: 1768987 - DNA, 15 bp, Homo sapiens
agctccctgggagca

SEQ ID NO: 1768988 - DNA, 15 bp, Homo sapiens
gctccctgggagcag

SEQ ID NO: 1768989 - DNA, 15 bp, Homo sapiens
ctccctgggagcagg

SEQ ID NO: 1768990 - DNA, 15 bp, Homo sapiens
tccctgggagcagga

SEQ ID NO: 1768991 - DNA, 15 bp, Homo sapiens
ccctgggagcaggag

SEQ ID NO: 1768992 - DNA, 15 bp, Homo sapiens
cctgggagcaggaga

SEQ ID NO: 1768993 - DNA, 15 bp, Homo sapiens
ctgggagcaggagaa

SEQ ID NO: 1768994 - DNA, 15 bp, Homo sapiens
tgggagcaggagaac

SEQ ID NO: 1768995 - DNA, 15 bp, Homo sapiens
gggagcaggagaact

SEQ ID NO: 1768996 - DNA, 15 bp, Homo sapiens
ggagcaggagaactc

SEQ ID NO: 1768997 - DNA, 15 bp, Homo sapiens
gagcaggagaactcc

SEQ ID NO: 1768998 - DNA, 15 bp, Homo sapiens
agcaggagaactccc

SEQ ID NO: 1768999 - DNA, 15 bp, Homo sapiens
gcaggagaactcccg

SEQ ID NO: 1769000 - DNA, 15 bp, Homo sapiens
caggagaactcccga

SEQ ID NO: 1769001 - DNA, 15 bp, Homo sapiens
aggagaactcccgat

SEQ ID NO: 1769002 - DNA, 15 bp, Homo sapiens
ggagaactcccgata

SEQ ID NO: 1769003 - DNA, 15 bp, Homo sapiens
gagaactcccgatag

SEQ ID NO: 1769004 - DNA, 15 bp, Homo sapiens
agaactcccgatagc

SEQ ID NO: 1769005 - DNA, 15 bp, Homo sapiens
gaactcccgatagca

SEQ ID NO: 1769006 - DNA, 15 bp, Homo sapiens
aactcccgatagcag

SEQ ID NO: 1769007 - DNA, 15 bp, Homo sapiens
actcccgatagcaga

SEQ ID NO: 1769008 - DNA, 15 bp, Homo sapiens
ctcccgatagcagag

SEQ ID NO: 1769009 - DNA, 15 bp, Homo sapiens
tcccgatagcagagt

SEQ ID NO: 1769010 - DNA, 15 bp, Homo sapiens
cccgatagcagagtt

SEQ ID NO: 1769011 - DNA, 15 bp, Homo sapiens
ccgatagcagagttc

SEQ ID NO: 1769012 - DNA, 15 bp, Homo sapiens
cgatagcagagttct

SEQ ID NO: 1769013 - DNA, 15 bp, Homo sapiens
gatagcagagttctc

SEQ ID NO: 1769014 - DNA, 15 bp, Homo sapiens
atagcagagttctct

SEQ ID NO: 1769015 - DNA, 15 bp, Homo sapiens
tagcagagttctctc

SEQ ID NO: 1769016 - DNA, 15 bp, Homo sapiens
agcagagttctctcc

SEQ ID NO: 1769017 - DNA, 15 bp, Homo sapiens
gcagagttctctcca

SEQ ID NO: 1769018 - DNA, 15 bp, Homo sapiens
cagagttctctccaa

SEQ ID NO: 1769019 - DNA, 15 bp, Homo sapiens
agagttctctccaat

SEQ ID NO: 1769020 - DNA, 15 bp, Homo sapiens
gagttctctccaatt

SEQ ID NO: 1769021 - DNA, 15 bp, Homo sapiens
agttctctccaattg

SEQ ID NO: 1769022 - DNA, 15 bp, Homo sapiens
gttctctccaattga

SEQ ID NO: 1769023 - DNA, 15 bp, Homo sapiens
ttctctccaattgag

SEQ ID NO: 1769024 - DNA, 15 bp, Homo sapiens
tctctccaattgaga

SEQ ID NO: 1769025 - DNA, 15 bp, Homo sapiens
ctctccaattgagag

SEQ ID NO: 1769026 - DNA, 15 bp, Homo sapiens
tctccaattgagagt

SEQ ID NO: 1769027 - DNA, 15 bp, Homo sapiens
ctccaattgagagtc

SEQ ID NO: 1769028 - DNA, 15 bp, Homo sapiens
tccaattgagagtca

SEQ ID NO: 1769029 - DNA, 15 bp, Homo sapiens
ccaattgagagtcat

SEQ ID NO: 1769030 - DNA, 15 bp, Homo sapiens
caattgagagtcatt

SEQ ID NO: 1769031 - DNA, 15 bp, Homo sapiens
aattgagagtcattt

SEQ ID NO: 1769032 - DNA, 15 bp, Homo sapiens
attgagagtcatttc

SEQ ID NO: 1769033 - DNA, 15 bp, Homo sapiens
ttgagagtcatttct

SEQ ID NO: 1769034 - DNA, 15 bp, Homo sapiens
tgagagtcatttctg

SEQ ID NO: 1769035 - DNA, 15 bp, Homo sapiens
gagagtcatttctga

SEQ ID NO: 1769036 - DNA, 15 bp, Homo sapiens
agagtcatttctgag

SEQ ID NO: 1769037 - DNA, 15 bp, Homo sapiens
gagtcatttctgagc

SEQ ID NO: 1769038 - DNA, 15 bp, Homo sapiens
agtcatttctgagca

SEQ ID NO: 1769039 - DNA, 15 bp, Homo sapiens
gtcatttctgagcaa

SEQ ID NO: 1769040 - DNA, 15 bp, Homo sapiens
tcatttctgagcaaa

SEQ ID NO: 1769041 - DNA, 15 bp, Homo sapiens
catttctgagcaaat

SEQ ID NO: 1769042 - DNA, 15 bp, Homo sapiens
atttctgagcaaatc

SEQ ID NO: 1769043 - DNA, 15 bp, Homo sapiens
tttctgagcaaatcc

SEQ ID NO: 1769044 - DNA, 15 bp, Homo sapiens
ttctgagcaaatcca

SEQ ID NO: 1769045 - DNA, 15 bp, Homo sapiens
tctgagcaaatccag

SEQ ID NO: 1769046 - DNA, 15 bp, Homo sapiens
ctgagcaaatccagc

SEQ ID NO: 1769047 - DNA, 15 bp, Homo sapiens
tgagcaaatccagcc

SEQ ID NO: 1769048 - DNA, 15 bp, Homo sapiens
gagcaaatccagccc

SEQ ID NO: 1769049 - DNA, 15 bp, Homo sapiens
agcaaatccagccca

SEQ ID NO: 1769050 - DNA, 15 bp, Homo sapiens
gcaaatccagcccac

SEQ ID NO: 1769051 - DNA, 15 bp, Homo sapiens
caaatccagcccaca

SEQ ID NO: 1769052 - DNA, 15 bp, Homo sapiens
aaatccagcccacag

SEQ ID NO: 1769053 - DNA, 15 bp, Homo sapiens
aatccagcccacagc

SEQ ID NO: 1769054 - DNA, 15 bp, Homo sapiens
atccagcccacagcg

SEQ ID NO: 1769055 - DNA, 15 bp, Homo sapiens
tccagcccacagcgt

SEQ ID NO: 1769056 - DNA, 15 bp, Homo sapiens
ccagcccacagcgtg

SEQ ID NO: 1769057 - DNA, 15 bp, Homo sapiens
cagcccacagcgtgt

SEQ ID NO: 1769058 - DNA, 15 bp, Homo sapiens
agcccacagcgtgta

SEQ ID NO: 1769059 - DNA, 15 bp, Homo sapiens
gcccacagcgtgtaa

SEQ ID NO: 1769060 - DNA, 15 bp, Homo sapiens
cccacagcgtgtaaa

SEQ ID NO: 1769061 - DNA, 15 bp, Homo sapiens
ccacagcgtgtaaaa

SEQ ID NO: 1769062 - DNA, 15 bp, Homo sapiens
cacagcgtgtaaaat

SEQ ID NO: 1769063 - DNA, 15 bp, Homo sapiens
acagcgtgtaaaatc

SEQ ID NO: 1769064 - DNA, 15 bp, Homo sapiens
cagcgtgtaaaatcc

SEQ ID NO: 1769065 - DNA, 15 bp, Homo sapiens
agcgtgtaaaatcct

SEQ ID NO: 1769066 - DNA, 15 bp, Homo sapiens
gcgtgtaaaatcctg

SEQ ID NO: 1769067 - DNA, 15 bp, Homo sapiens
cgtgtaaaatcctga

SEQ ID NO: 1769068 - DNA, 15 bp, Homo sapiens
gtgtaaaatcctgat

SEQ ID NO: 1769069 - DNA, 15 bp, Homo sapiens
tgtaaaatcctgata

SEQ ID NO: 1769070 - DNA, 15 bp, Homo sapiens
gtaaaatcctgataa

SEQ ID NO: 1769071 - DNA, 15 bp, Homo sapiens
taaaatcctgataag

SEQ ID NO: 1769072 - DNA, 15 bp, Homo sapiens
aaaatcctgataagt

SEQ ID NO: 1769073 - DNA, 15 bp, Homo sapiens
aaatcctgataagta

SEQ ID NO: 1769074 - DNA, 15 bp, Homo sapiens
aatcctgataagtaa

SEQ ID NO: 1769075 - DNA, 15 bp, Homo sapiens
atcctgataagtaat

SEQ ID NO: 1769076 - DNA, 15 bp, Homo sapiens
tcctgataagtaatt

SEQ ID NO: 1769077 - DNA, 15 bp, Homo sapiens
cctgataagtaattc

SEQ ID NO: 1769078 - DNA, 15 bp, Homo sapiens
ctgataagtaattca

SEQ ID NO: 1769079 - DNA, 15 bp, Homo sapiens
tgataagtaattcag

SEQ ID NO: 1769080 - DNA, 15 bp, Homo sapiens
gataagtaattcagt

SEQ ID NO: 1769081 - DNA, 15 bp, Homo sapiens
ataagtaattcagtg

SEQ ID NO: 1769082 - DNA, 15 bp, Homo sapiens
taagtaattcagtgg

SEQ ID NO: 1769083 - DNA, 15 bp, Homo sapiens
aagtaattcagtggg

SEQ ID NO: 1769084 - DNA, 15 bp, Homo sapiens
agtaattcagtggga

SEQ ID NO: 1769085 - DNA, 15 bp, Homo sapiens
gtaattcagtgggaa

SEQ ID NO: 1769086 - DNA, 15 bp, Homo sapiens
taattcagtgggaag

SEQ ID NO: 1769087 - DNA, 15 bp, Homo sapiens
aattcagtgggaagg

SEQ ID NO: 1769088 - DNA, 15 bp, Homo sapiens
attcagtgggaagga

SEQ ID NO: 1769089 - DNA, 15 bp, Homo sapiens
ttcagtgggaaggaa

SEQ ID NO: 1769090 - DNA, 15 bp, Homo sapiens
tcagtgggaaggaag

SEQ ID NO: 1769091 - DNA, 15 bp, Homo sapiens
cagtgggaaggaagt

SEQ ID NO: 1769092 - DNA, 15 bp, Homo sapiens
agtgggaaggaagtg

SEQ ID NO: 1769093 - DNA, 15 bp, Homo sapiens
gtgggaaggaagtgc

SEQ ID NO: 1769094 - DNA, 15 bp, Homo sapiens
tgggaaggaagtgct

SEQ ID NO: 1769095 - DNA, 15 bp, Homo sapiens
gggaaggaagtgctg

SEQ ID NO: 1769096 - DNA, 15 bp, Homo sapiens
ggaaggaagtgctga

SEQ ID NO: 1769097 - DNA, 15 bp, Homo sapiens
gaaggaagtgctgat

SEQ ID NO: 1769098 - DNA, 15 bp, Homo sapiens
aaggaagtgctgatg

SEQ ID NO: 1769099 - DNA, 15 bp, Homo sapiens
aggaagtgctgatga

SEQ ID NO: 1769100 - DNA, 15 bp, Homo sapiens
ggaagtgctgatgat

SEQ ID NO: 1769101 - DNA, 15 bp, Homo sapiens
gaagtgctgatgata

SEQ ID NO: 1769102 - DNA, 15 bp, Homo sapiens
agtgctgatgataat

SEQ ID NO: 1769103 - DNA, 15 bp, Homo sapiens
gtgctgatgataata

SEQ ID NO: 1769104 - DNA, 15 bp, Homo sapiens
tgctgatgataataa

SEQ ID NO: 1769105 - DNA, 15 bp, Homo sapiens
gctgatgataataaa

SEQ ID NO: 1769106 - DNA, 15 bp, Homo sapiens
ctgatgataataaag

SEQ ID NO: 1769107 - DNA, 15 bp, Homo sapiens
tgatgataataaagg

SEQ ID NO: 1769108 - DNA, 15 bp, Homo sapiens
gatgataataaagga

SEQ ID NO: 1769109 - DNA, 15 bp, Homo sapiens
atgataataaaggag

SEQ ID NO: 1769110 - DNA, 15 bp, Homo sapiens
tgataataaaggaga

SEQ ID NO: 1769111 - DNA, 15 bp, Homo sapiens
gataataaaggagat

SEQ ID NO: 1769112 - DNA, 15 bp, Homo sapiens
ataataaaggagata

SEQ ID NO: 1769113 - DNA, 15 bp, Homo sapiens
taataaaggagatag

SEQ ID NO: 1769114 - DNA, 15 bp, Homo sapiens
aataaaggagatagc

SEQ ID NO: 1769115 - DNA, 15 bp, Homo sapiens
ataaaggagatagca

SEQ ID NO: 1769116 - DNA, 15 bp, Homo sapiens
taaaggagatagcat

SEQ ID NO: 1769117 - DNA, 15 bp, Homo sapiens
aaaggagatagcatg

SEQ ID NO: 1769118 - DNA, 15 bp, Homo sapiens
aaggagatagcatgg

SEQ ID NO: 1769119 - DNA, 15 bp, Homo sapiens
aggagatagcatggc

SEQ ID NO: 1769120 - DNA, 15 bp, Homo sapiens
ggagatagcatggca

SEQ ID NO: 1769121 - DNA, 15 bp, Homo sapiens
gagatagcatggcag

SEQ ID NO: 1769122 - DNA, 15 bp, Homo sapiens
agatagcatggcaga

SEQ ID NO: 1769123 - DNA, 15 bp, Homo sapiens
gatagcatggcagat

SEQ ID NO: 1769124 - DNA, 15 bp, Homo sapiens
atagcatggcagatc

SEQ ID NO: 1769125 - DNA, 15 bp, Homo sapiens
tagcatggcagatct

SEQ ID NO: 1769126 - DNA, 15 bp, Homo sapiens
agcatggcagatctg

SEQ ID NO: 1769127 - DNA, 15 bp, Homo sapiens
gcatggcagatctgc

SEQ ID NO: 1769128 - DNA, 15 bp, Homo sapiens
catggcagatctgct

SEQ ID NO: 1769129 - DNA, 15 bp, Homo sapiens
atggcagatctgctt

SEQ ID NO: 1769130 - DNA, 15 bp, Homo sapiens
tggcagatctgcttc

SEQ ID NO: 1769131 - DNA, 15 bp, Homo sapiens
ggcagatctgcttct

SEQ ID NO: 1769132 - DNA, 15 bp, Homo sapiens
gcagatctgcttctg

SEQ ID NO: 1769133 - DNA, 15 bp, Homo sapiens
cagatctgcttctgt

SEQ ID NO: 1769134 - DNA, 15 bp, Homo sapiens
agatctgcttctgtc

SEQ ID NO: 1769135 - DNA, 15 bp, Homo sapiens
gatctgcttctgtcc

SEQ ID NO: 1769136 - DNA, 15 bp, Homo sapiens
atctgcttctgtcct

SEQ ID NO: 1769137 - DNA, 15 bp, Homo sapiens
tctgcttctgtcctt

SEQ ID NO: 1769138 - DNA, 15 bp, Homo sapiens
ctgcttctgtccttg

SEQ ID NO: 1769139 - DNA, 15 bp, Homo sapiens
tgcttctgtccttgg

SEQ ID NO: 1769140 - DNA, 15 bp, Homo sapiens
gcttctgtccttgga

SEQ ID NO: 1769141 - DNA, 15 bp, Homo sapiens
cttctgtccttggaa

SEQ ID NO: 1769142 - DNA, 15 bp, Homo sapiens
ttctgtccttggaag

SEQ ID NO: 1769143 - DNA, 15 bp, Homo sapiens
tctgtccttggaaga

SEQ ID NO: 1769144 - DNA, 15 bp, Homo sapiens
ctgtccttggaagaa

SEQ ID NO: 1769145 - DNA, 15 bp, Homo sapiens
tgtccttggaagaac

SEQ ID NO: 1769146 - DNA, 15 bp, Homo sapiens
gtccttggaagaacc

SEQ ID NO: 1769147 - DNA, 15 bp, Homo sapiens
tccttggaagaacct

SEQ ID NO: 1769148 - DNA, 15 bp, Homo sapiens
ccttggaagaacctg

SEQ ID NO: 1769149 - DNA, 15 bp, Homo sapiens
cttggaagaacctgg

SEQ ID NO: 1769150 - DNA, 15 bp, Homo sapiens
ttggaagaacctgga

SEQ ID NO: 1769151 - DNA, 15 bp, Homo sapiens
tggaagaacctggaa

SEQ ID NO: 1769152 - DNA, 15 bp, Homo sapiens
ggaagaacctggaaa

SEQ ID NO: 1769153 - DNA, 15 bp, Homo sapiens
gaagaacctggaaat

SEQ ID NO: 1769154 - DNA, 15 bp, Homo sapiens
aagaacctggaaata

SEQ ID NO: 1769155 - DNA, 15 bp, Homo sapiens
agaacctggaaataa

SEQ ID NO: 1769156 - DNA, 15 bp, Homo sapiens
gaacctggaaataaa

SEQ ID NO: 1769157 - DNA, 15 bp, Homo sapiens
aacctggaaataaag

SEQ ID NO: 1769158 - DNA, 15 bp, Homo sapiens
acctggaaataaagc

SEQ ID NO: 1769159 - DNA, 15 bp, Homo sapiens
cctggaaataaagca

SEQ ID NO: 1769160 - DNA, 15 bp, Homo sapiens
ctggaaataaagcaa

SEQ ID NO: 1769161 - DNA, 15 bp, Homo sapiens
tggaaataaagcaag

SEQ ID NO: 1769162 - DNA, 15 bp, Homo sapiens
ggaaataaagcaagg

SEQ ID NO: 1769163 - DNA, 15 bp, Homo sapiens
gaaataaagcaaggc

SEQ ID NO: 1769164 - DNA, 15 bp, Homo sapiens
aaataaagcaaggcc

SEQ ID NO: 1769165 - DNA, 15 bp, Homo sapiens
aataaagcaaggcca

SEQ ID NO: 1769166 - DNA, 15 bp, Homo sapiens
ataaagcaaggccaa

SEQ ID NO: 1769167 - DNA, 15 bp, Homo sapiens
taaagcaaggccaat

SEQ ID NO: 1769168 - DNA, 15 bp, Homo sapiens
aaagcaaggccaatg

SEQ ID NO: 1769169 - DNA, 15 bp, Homo sapiens
aagcaaggccaatgt

SEQ ID NO: 1769170 - DNA, 15 bp, Homo sapiens
agcaaggccaatgtg

SEQ ID NO: 1769171 - DNA, 15 bp, Homo sapiens
gcaaggccaatgtga

SEQ ID NO: 1769172 - DNA, 15 bp, Homo sapiens
caaggccaatgtgag

SEQ ID NO: 1769173 - DNA, 15 bp, Homo sapiens
aaggccaatgtgagc

SEQ ID NO: 1769174 - DNA, 15 bp, Homo sapiens
aggccaatgtgagca

SEQ ID NO: 1769175 - DNA, 15 bp, Homo sapiens
ggccaatgtgagcag

SEQ ID NO: 1769176 - DNA, 15 bp, Homo sapiens
gccaatgtgagcagg

SEQ ID NO: 1769177 - DNA, 15 bp, Homo sapiens
ccaatgtgagcaggc

SEQ ID NO: 1769178 - DNA, 15 bp, Homo sapiens
caatgtgagcaggct

SEQ ID NO: 1769179 - DNA, 15 bp, Homo sapiens
aatgtgagcaggcta

SEQ ID NO: 1769180 - DNA, 15 bp, Homo sapiens
atgtgagcaggctat

SEQ ID NO: 1769181 - DNA, 15 bp, Homo sapiens
tgtgagcaggctatg

SEQ ID NO: 1769182 - DNA, 15 bp, Homo sapiens
gtgagcaggctatgt

SEQ ID NO: 1769183 - DNA, 15 bp, Homo sapiens
tgagcaggctatgtc

SEQ ID NO: 1769184 - DNA, 15 bp, Homo sapiens
gagcaggctatgtct

SEQ ID NO: 1769185 - DNA, 15 bp, Homo sapiens
agcaggctatgtctg

SEQ ID NO: 1769186 - DNA, 15 bp, Homo sapiens
gcaggctatgtctgc

SEQ ID NO: 1769187 - DNA, 15 bp, Homo sapiens
caggctatgtctgcg

SEQ ID NO: 1769188 - DNA, 15 bp, Homo sapiens
aggctatgtctgcgg

SEQ ID NO: 1769189 - DNA, 15 bp, Homo sapiens
ggctatgtctgcggg

SEQ ID NO: 1769190 - DNA, 15 bp, Homo sapiens
gctatgtctgcgggg

SEQ ID NO: 1769191 - DNA, 15 bp, Homo sapiens
ctatgtctgcggggc

SEQ ID NO: 1769192 - DNA, 15 bp, Homo sapiens
tatgtctgcggggct

SEQ ID NO: 1769193 - DNA, 15 bp, Homo sapiens
atgtctgcggggctg

SEQ ID NO: 1769194 - DNA, 15 bp, Homo sapiens
tgtctgcggggctgt

SEQ ID NO: 1769195 - DNA, 15 bp, Homo sapiens
gtctgcggggctgtt

SEQ ID NO: 1769196 - DNA, 15 bp, Homo sapiens
tctgcggggctgttg

SEQ ID NO: 1769197 - DNA, 15 bp, Homo sapiens
ctgcggggctgttgg

SEQ ID NO: 1769198 - DNA, 15 bp, Homo sapiens
tgcggggctgttggc

SEQ ID NO: 1769199 - DNA, 15 bp, Homo sapiens
gcggggctgttggct

SEQ ID NO: 1769200 - DNA, 15 bp, Homo sapiens
cggggctgttggcta

SEQ ID NO: 1769201 - DNA, 15 bp, Homo sapiens
ggggctgttggctaa

SEQ ID NO: 1769202 - DNA, 15 bp, Homo sapiens
gggctgttggctaag

SEQ ID NO: 1769203 - DNA, 15 bp, Homo sapiens
ggctgttggctaagg

SEQ ID NO: 1769204 - DNA, 15 bp, Homo sapiens
gctgttggctaaggc

SEQ ID NO: 1769205 - DNA, 15 bp, Homo sapiens
ctgttggctaaggct

SEQ ID NO: 1769206 - DNA, 15 bp, Homo sapiens
tgttggctaaggctc

SEQ ID NO: 1769207 - DNA, 15 bp, Homo sapiens
gttggctaaggctca

SEQ ID NO: 1769208 - DNA, 15 bp, Homo sapiens
ttggctaaggctcag

SEQ ID NO: 1769209 - DNA, 15 bp, Homo sapiens
tggctaaggctcagg

SEQ ID NO: 1769210 - DNA, 15 bp, Homo sapiens
ggctaaggctcaggc

SEQ ID NO: 1769211 - DNA, 15 bp, Homo sapiens
gctaaggctcaggct

SEQ ID NO: 1769212 - DNA, 15 bp, Homo sapiens
ctaaggctcaggctt

SEQ ID NO: 1769213 - DNA, 15 bp, Homo sapiens
taaggctcaggcttc

SEQ ID NO: 1769214 - DNA, 15 bp, Homo sapiens
aaggctcaggcttcc

SEQ ID NO: 1769215 - DNA, 15 bp, Homo sapiens
aggctcaggcttcct

SEQ ID NO: 1769216 - DNA, 15 bp, Homo sapiens
ggctcaggcttcctg

SEQ ID NO: 1769217 - DNA, 15 bp, Homo sapiens
gctcaggcttcctgg

SEQ ID NO: 1769218 - DNA, 15 bp, Homo sapiens
ctcaggcttcctgga

SEQ ID NO: 1769219 - DNA, 15 bp, Homo sapiens
tcaggcttcctggac

SEQ ID NO: 1769220 - DNA, 15 bp, Homo sapiens
caggcttcctggacc

SEQ ID NO: 1769221 - DNA, 15 bp, Homo sapiens
aggcttcctggacca

SEQ ID NO: 1769222 - DNA, 15 bp, Homo sapiens
ggcttcctggaccac

SEQ ID NO: 1769223 - DNA, 15 bp, Homo sapiens
gcttcctggaccact

SEQ ID NO: 1769224 - DNA, 15 bp, Homo sapiens
cttcctggaccactt

SEQ ID NO: 1769225 - DNA, 15 bp, Homo sapiens
ttcctggaccacttc

SEQ ID NO: 1769226 - DNA, 15 bp, Homo sapiens
tcctggaccacttca

SEQ ID NO: 1769227 - DNA, 15 bp, Homo sapiens
cctggaccacttcag

SEQ ID NO: 1769228 - DNA, 15 bp, Homo sapiens
ctggaccacttcaga

SEQ ID NO: 1769229 - DNA, 15 bp, Homo sapiens
tggaccacttcagag

SEQ ID NO: 1769230 - DNA, 15 bp, Homo sapiens
ggaccacttcagaga

SEQ ID NO: 1769231 - DNA, 15 bp, Homo sapiens
gaccacttcagagag

SEQ ID NO: 1769232 - DNA, 15 bp, Homo sapiens
accacttcagagagc

SEQ ID NO: 1769233 - DNA, 15 bp, Homo sapiens
ccacttcagagagcc

SEQ ID NO: 1769234 - DNA, 15 bp, Homo sapiens
cacttcagagagccc

SEQ ID NO: 1769235 - DNA, 15 bp, Homo sapiens
acttcagagagccca

SEQ ID NO: 1769236 - DNA, 15 bp, Homo sapiens
cttcagagagcccag

SEQ ID NO: 1769237 - DNA, 15 bp, Homo sapiens
ttcagagagcccaga

SEQ ID NO: 1769238 - DNA, 15 bp, Homo sapiens
tcagagagcccagag

SEQ ID NO: 1769239 - DNA, 15 bp, Homo sapiens
cagagagcccagaga

SEQ ID NO: 1769240 - DNA, 15 bp, Homo sapiens
agagagcccagagag

SEQ ID NO: 1769241 - DNA, 15 bp, Homo sapiens
gagagcccagagagt

SEQ ID NO: 1769242 - DNA, 15 bp, Homo sapiens
agagcccagagagtc

SEQ ID NO: 1769243 - DNA, 15 bp, Homo sapiens
gagcccagagagtcc

SEQ ID NO: 1769244 - DNA, 15 bp, Homo sapiens
agcccagagagtcct

SEQ ID NO: 1769245 - DNA, 15 bp, Homo sapiens
gcccagagagtcctc

SEQ ID NO: 1769246 - DNA, 15 bp, Homo sapiens
cccagagagtcctct

SEQ ID NO: 1769247 - DNA, 15 bp, Homo sapiens
ccagagagtcctctc

SEQ ID NO: 1769248 - DNA, 15 bp, Homo sapiens
cagagagtcctctca

SEQ ID NO: 1769249 - DNA, 15 bp, Homo sapiens
agagagtcctctcaa

SEQ ID NO: 1769250 - DNA, 15 bp, Homo sapiens
gagagtcctctcaat

SEQ ID NO: 1769251 - DNA, 15 bp, Homo sapiens
agagtcctctcaatc

SEQ ID NO: 1769252 - DNA, 15 bp, Homo sapiens
gagtcctctcaatcc

SEQ ID NO: 1769253 - DNA, 15 bp, Homo sapiens
agtcctctcaatcct

SEQ ID NO: 1769254 - DNA, 15 bp, Homo sapiens
gtcctctcaatcctg

SEQ ID NO: 1769255 - DNA, 15 bp, Homo sapiens
tcctctcaatcctgg

SEQ ID NO: 1769256 - DNA, 15 bp, Homo sapiens
cctctcaatcctggc

SEQ ID NO: 1769257 - DNA, 15 bp, Homo sapiens
ctctcaatcctggcc

SEQ ID NO: 1769258 - DNA, 15 bp, Homo sapiens
tctcaatcctggccc

SEQ ID NO: 1769259 - DNA, 15 bp, Homo sapiens
ctcaatcctggccct

SEQ ID NO: 1769260 - DNA, 15 bp, Homo sapiens
tcaatcctggccctg

SEQ ID NO: 1769261 - DNA, 15 bp, Homo sapiens
caatcctggccctgc

SEQ ID NO: 1769262 - DNA, 15 bp, Homo sapiens
aatcctggccctgcc

SEQ ID NO: 1769263 - DNA, 15 bp, Homo sapiens
atcctggccctgcca

SEQ ID NO: 1769264 - DNA, 15 bp, Homo sapiens
tcctggccctgccat

SEQ ID NO: 1769265 - DNA, 15 bp, Homo sapiens
cctggccctgccatt

SEQ ID NO: 1769266 - DNA, 15 bp, Homo sapiens
ctggccctgccattt

SEQ ID NO: 1769267 - DNA, 15 bp, Homo sapiens
tggccctgccatttg

SEQ ID NO: 1769268 - DNA, 15 bp, Homo sapiens
ggccctgccatttgc

SEQ ID NO: 1769269 - DNA, 15 bp, Homo sapiens
gccctgccatttgct

SEQ ID NO: 1769270 - DNA, 15 bp, Homo sapiens
ccctgccatttgcta

SEQ ID NO: 1769271 - DNA, 15 bp, Homo sapiens
cctgccatttgctaa

SEQ ID NO: 1769272 - DNA, 15 bp, Homo sapiens
ctgccatttgctaat

SEQ ID NO: 1769273 - DNA, 15 bp, Homo sapiens
tgccatttgctaatg

SEQ ID NO: 1769274 - DNA, 15 bp, Homo sapiens
gccatttgctaatgg

SEQ ID NO: 1769275 - DNA, 15 bp, Homo sapiens
ccatttgctaatggc

SEQ ID NO: 1769276 - DNA, 15 bp, Homo sapiens
catttgctaatggca

SEQ ID NO: 1769277 - DNA, 15 bp, Homo sapiens
atttgctaatggcat

SEQ ID NO: 1769278 - DNA, 15 bp, Homo sapiens
tttgctaatggcatt

SEQ ID NO: 1769279 - DNA, 15 bp, Homo sapiens
ttgctaatggcatta

SEQ ID NO: 1769280 - DNA, 15 bp, Homo sapiens
tgctaatggcattat

SEQ ID NO: 1769281 - DNA, 15 bp, Homo sapiens
gctaatggcattatc

SEQ ID NO: 1769282 - DNA, 15 bp, Homo sapiens
ctaatggcattatct

SEQ ID NO: 1769283 - DNA, 15 bp, Homo sapiens
taatggcattatctt

SEQ ID NO: 1769284 - DNA, 15 bp, Homo sapiens
aatggcattatcttg

SEQ ID NO: 1769285 - DNA, 15 bp, Homo sapiens
atggcattatcttgg

SEQ ID NO: 1769286 - DNA, 15 bp, Homo sapiens
tggcattatcttggg

SEQ ID NO: 1769287 - DNA, 15 bp, Homo sapiens
ggcattatcttgggc

SEQ ID NO: 1769288 - DNA, 15 bp, Homo sapiens
gcattatcttgggca

SEQ ID NO: 1769289 - DNA, 15 bp, Homo sapiens
cattatcttgggcaa

SEQ ID NO: 1769290 - DNA, 15 bp, Homo sapiens
attatcttgggcaag

SEQ ID NO: 1769291 - DNA, 15 bp, Homo sapiens
ttatcttgggcaagt

SEQ ID NO: 1769292 - DNA, 15 bp, Homo sapiens
tatcttgggcaagtt

SEQ ID NO: 1769293 - DNA, 15 bp, Homo sapiens
atcttgggcaagtta

SEQ ID NO: 1769294 - DNA, 15 bp, Homo sapiens
tcttgggcaagttat

SEQ ID NO: 1769295 - DNA, 15 bp, Homo sapiens
cttgggcaagttatg

SEQ ID NO: 1769296 - DNA, 15 bp, Homo sapiens
ttgggcaagttatgg

SEQ ID NO: 1769297 - DNA, 15 bp, Homo sapiens
tgggcaagttatgga

SEQ ID NO: 1769298 - DNA, 15 bp, Homo sapiens
gggcaagttatggaa

SEQ ID NO: 1769299 - DNA, 15 bp, Homo sapiens
ggcaagttatggaac

SEQ ID NO: 1769300 - DNA, 15 bp, Homo sapiens
gcaagttatggaact

SEQ ID NO: 1769301 - DNA, 15 bp, Homo sapiens
caagttatggaactt

SEQ ID NO: 1769302 - DNA, 15 bp, Homo sapiens
aagttatggaacttt

SEQ ID NO: 1769303 - DNA, 15 bp, Homo sapiens
agttatggaactttg

SEQ ID NO: 1769304 - DNA, 15 bp, Homo sapiens
gttatggaactttgt

SEQ ID NO: 1769305 - DNA, 15 bp, Homo sapiens
ttatggaactttgtt

SEQ ID NO: 1769306 - DNA, 15 bp, Homo sapiens
tatggaactttgttt

SEQ ID NO: 1769307 - DNA, 15 bp, Homo sapiens
atggaactttgtttt

SEQ ID NO: 1769308 - DNA, 15 bp, Homo sapiens
tggaactttgttttc

SEQ ID NO: 1769309 - DNA, 15 bp, Homo sapiens
ggaactttgttttct

SEQ ID NO: 1769310 - DNA, 15 bp, Homo sapiens
gaactttgttttctc

SEQ ID NO: 1769311 - DNA, 15 bp, Homo sapiens
aactttgttttctcc

SEQ ID NO: 1769312 - DNA, 15 bp, Homo sapiens
actttgttttctcct

SEQ ID NO: 1769313 - DNA, 15 bp, Homo sapiens
ctttgttttctcctc

SEQ ID NO: 1769314 - DNA, 15 bp, Homo sapiens
tttgttttctcctct

SEQ ID NO: 1769315 - DNA, 15 bp, Homo sapiens
ttgttttctcctcta

SEQ ID NO: 1769316 - DNA, 15 bp, Homo sapiens
tgttttctcctctat

SEQ ID NO: 1769317 - DNA, 15 bp, Homo sapiens
gttttctcctctata

SEQ ID NO: 1769318 - DNA, 15 bp, Homo sapiens
ttttctcctctataa

SEQ ID NO: 1769319 - DNA, 15 bp, Homo sapiens
tttctcctctataaa

SEQ ID NO: 1769320 - DNA, 15 bp, Homo sapiens
ttctcctctataaaa

SEQ ID NO: 1769321 - DNA, 15 bp, Homo sapiens
tctcctctataaaaa

SEQ ID NO: 1769322 - DNA, 15 bp, Homo sapiens
ctcctctataaaaaa

SEQ ID NO: 1769323 - DNA, 15 bp, Homo sapiens
tcctctataaaaaat

SEQ ID NO: 1769324 - DNA, 15 bp, Homo sapiens
cctctataaaaaata

SEQ ID NO: 1769325 - DNA, 15 bp, Homo sapiens
tataaaaaatacaat

SEQ ID NO: 1769326 - DNA, 15 bp, Homo sapiens
ataaaaaatacaata

SEQ ID NO: 1769327 - DNA, 15 bp, Homo sapiens
taaaaaatacaataa

SEQ ID NO: 1769328 - DNA, 15 bp, Homo sapiens
aaaaaatacaataag

SEQ ID NO: 1769329 - DNA, 15 bp, Homo sapiens
aaaaatacaataaga

SEQ ID NO: 1769330 - DNA, 15 bp, Homo sapiens
aaaatacaataagaa

SEQ ID NO: 1769331 - DNA, 15 bp, Homo sapiens
aaatacaataagaat

SEQ ID NO: 1769332 - DNA, 15 bp, Homo sapiens
aatacaataagaatg

SEQ ID NO: 1769333 - DNA, 15 bp, Homo sapiens
atacaataagaatgc

SEQ ID NO: 1769334 - DNA, 15 bp, Homo sapiens
tacaataagaatgca

SEQ ID NO: 1769335 - DNA, 15 bp, Homo sapiens
acaataagaatgcat

SEQ ID NO: 1769336 - DNA, 15 bp, Homo sapiens
caataagaatgcatt

SEQ ID NO: 1769337 - DNA, 15 bp, Homo sapiens
aataagaatgcattt

SEQ ID NO: 1769338 - DNA, 15 bp, Homo sapiens
ataagaatgcatttc

SEQ ID NO: 1769339 - DNA, 15 bp, Homo sapiens
taagaatgcatttct

SEQ ID NO: 1769340 - DNA, 15 bp, Homo sapiens
aagaatgcatttctc

SEQ ID NO: 1769341 - DNA, 15 bp, Homo sapiens
agaatgcatttctcc

SEQ ID NO: 1769342 - DNA, 15 bp, Homo sapiens
gaatgcatttctcct

SEQ ID NO: 1769343 - DNA, 15 bp, Homo sapiens
aatgcatttctcctg

SEQ ID NO: 1769344 - DNA, 15 bp, Homo sapiens
atgcatttctcctgg

SEQ ID NO: 1769345 - DNA, 15 bp, Homo sapiens
tgcatttctcctggg

SEQ ID NO: 1769346 - DNA, 15 bp, Homo sapiens
gcatttctcctgggt

SEQ ID NO: 1769347 - DNA, 15 bp, Homo sapiens
catttctcctgggtt

SEQ ID NO: 1769348 - DNA, 15 bp, Homo sapiens
atttctcctgggttt

SEQ ID NO: 1769349 - DNA, 15 bp, Homo sapiens
tttctcctgggtttg

SEQ ID NO: 1769350 - DNA, 15 bp, Homo sapiens
ttctcctgggtttga

SEQ ID NO: 1769351 - DNA, 15 bp, Homo sapiens
tctcctgggtttgat

SEQ ID NO: 1769352 - DNA, 15 bp, Homo sapiens
ctcctgggtttgatg

SEQ ID NO: 1769353 - DNA, 15 bp, Homo sapiens
tcctgggtttgatgt

SEQ ID NO: 1769354 - DNA, 15 bp, Homo sapiens
cctgggtttgatgtg

SEQ ID NO: 1769355 - DNA, 15 bp, Homo sapiens
ctgggtttgatgtga

SEQ ID NO: 1769356 - DNA, 15 bp, Homo sapiens
tgggtttgatgtgaa

SEQ ID NO: 1769357 - DNA, 15 bp, Homo sapiens
gggtttgatgtgaag

SEQ ID NO: 1769358 - DNA, 15 bp, Homo sapiens
ggtttgatgtgaaga

SEQ ID NO: 1769359 - DNA, 15 bp, Homo sapiens
gtttgatgtgaagaa

SEQ ID NO: 1769360 - DNA, 15 bp, Homo sapiens
tttgatgtgaagaat

SEQ ID NO: 1769361 - DNA, 15 bp, Homo sapiens
ttgatgtgaagaata

SEQ ID NO: 1769362 - DNA, 15 bp, Homo sapiens
tgatgtgaagaatac

SEQ ID NO: 1769363 - DNA, 15 bp, Homo sapiens
gatgtgaagaataca

SEQ ID NO: 1769364 - DNA, 15 bp, Homo sapiens
atgtgaagaatacat

SEQ ID NO: 1769365 - DNA, 15 bp, Homo sapiens
tgtgaagaatacatc

SEQ ID NO: 1769366 - DNA, 15 bp, Homo sapiens
gtgaagaatacatca

SEQ ID NO: 1769367 - DNA, 15 bp, Homo sapiens
tgaagaatacatcag

SEQ ID NO: 1769368 - DNA, 15 bp, Homo sapiens
gaagaatacatcaga

SEQ ID NO: 1769369 - DNA, 15 bp, Homo sapiens
aagaatacatcagat

SEQ ID NO: 1769370 - DNA, 15 bp, Homo sapiens
agaatacatcagatt

SEQ ID NO: 1769371 - DNA, 15 bp, Homo sapiens
gaatacatcagatta

SEQ ID NO: 1769372 - DNA, 15 bp, Homo sapiens
aatacatcagattac

SEQ ID NO: 1769373 - DNA, 15 bp, Homo sapiens
atacatcagattacg

SEQ ID NO: 1769374 - DNA, 15 bp, Homo sapiens
tacatcagattacgt

SEQ ID NO: 1769375 - DNA, 15 bp, Homo sapiens
acatcagattacgtg

SEQ ID NO: 1769376 - DNA, 15 bp, Homo sapiens
catcagattacgtga

SEQ ID NO: 1769377 - DNA, 15 bp, Homo sapiens
atcagattacgtgaa

SEQ ID NO: 1769378 - DNA, 15 bp, Homo sapiens
tcagattacgtgaaa

SEQ ID NO: 1769379 - DNA, 15 bp, Homo sapiens
cagattacgtgaaag

SEQ ID NO: 1769380 - DNA, 15 bp, Homo sapiens
agattacgtgaaagc

SEQ ID NO: 1769381 - DNA, 15 bp, Homo sapiens
gattacgtgaaagca

SEQ ID NO: 1769382 - DNA, 15 bp, Homo sapiens
attacgtgaaagcac

SEQ ID NO: 1769383 - DNA, 15 bp, Homo sapiens
ttacgtgaaagcaca

SEQ ID NO: 1769384 - DNA, 15 bp, Homo sapiens
tacgtgaaagcacag

SEQ ID NO: 1769385 - DNA, 15 bp, Homo sapiens
acgtgaaagcacaga

SEQ ID NO: 1769386 - DNA, 15 bp, Homo sapiens
cgtgaaagcacagag

SEQ ID NO: 1769387 - DNA, 15 bp, Homo sapiens
gtgaaagcacagagc

SEQ ID NO: 1769388 - DNA, 15 bp, Homo sapiens
tgaaagcacagagca

SEQ ID NO: 1769389 - DNA, 15 bp, Homo sapiens
gaaagcacagagcat

SEQ ID NO: 1769390 - DNA, 15 bp, Homo sapiens
aaagcacagagcatg

SEQ ID NO: 1769391 - DNA, 15 bp, Homo sapiens
aagcacagagcatgg

SEQ ID NO: 1769392 - DNA, 15 bp, Homo sapiens
agcacagagcatgga

SEQ ID NO: 1769393 - DNA, 15 bp, Homo sapiens
gcacagagcatggag

SEQ ID NO: 1769394 - DNA, 15 bp, Homo sapiens
cacagagcatggagg

SEQ ID NO: 1769395 - DNA, 15 bp, Homo sapiens
acagagcatggaggg

SEQ ID NO: 1769396 - DNA, 15 bp, Homo sapiens
cagagcatggagggt

SEQ ID NO: 1769397 - DNA, 15 bp, Homo sapiens
agagcatggagggtt

SEQ ID NO: 1769398 - DNA, 15 bp, Homo sapiens
gagcatggagggttg

SEQ ID NO: 1769399 - DNA, 15 bp, Homo sapiens
agcatggagggttgg

SEQ ID NO: 1769400 - DNA, 15 bp, Homo sapiens
gcatggagggttgga

SEQ ID NO: 1769401 - DNA, 15 bp, Homo sapiens
catggagggttggac

SEQ ID NO: 1769402 - DNA, 15 bp, Homo sapiens
atggagggttggact

SEQ ID NO: 1769403 - DNA, 15 bp, Homo sapiens
tggagggttggactt

SEQ ID NO: 1769404 - DNA, 15 bp, Homo sapiens
ggagggttggacttg

SEQ ID NO: 1769405 - DNA, 15 bp, Homo sapiens
gagggttggacttgc

SEQ ID NO: 1769406 - DNA, 15 bp, Homo sapiens
agggttggacttgct

SEQ ID NO: 1769407 - DNA, 15 bp, Homo sapiens
gggttggacttgctc

SEQ ID NO: 1769408 - DNA, 15 bp, Homo sapiens
ggttggacttgctca

SEQ ID NO: 1769409 - DNA, 15 bp, Homo sapiens
gttggacttgctcat

SEQ ID NO: 1769410 - DNA, 15 bp, Homo sapiens
ttggacttgctcatc

SEQ ID NO: 1769411 - DNA, 15 bp, Homo sapiens
tggacttgctcatcc

SEQ ID NO: 1769412 - DNA, 15 bp, Homo sapiens
ggacttgctcatccc

SEQ ID NO: 1769413 - DNA, 15 bp, Homo sapiens
gacttgctcatccca

SEQ ID NO: 1769414 - DNA, 15 bp, Homo sapiens
acttgctcatcccaa

SEQ ID NO: 1769415 - DNA, 15 bp, Homo sapiens
cttgctcatcccaat

SEQ ID NO: 1769416 - DNA, 15 bp, Homo sapiens
ttgctcatcccaata

SEQ ID NO: 1769417 - DNA, 15 bp, Homo sapiens
tgctcatcccaatag

SEQ ID NO: 1769418 - DNA, 15 bp, Homo sapiens
gctcatcccaatagt

SEQ ID NO: 1769419 - DNA, 15 bp, Homo sapiens
ctcatcccaatagtc

SEQ ID NO: 1769420 - DNA, 15 bp, Homo sapiens
tcatcccaatagtcc

SEQ ID NO: 1769421 - DNA, 15 bp, Homo sapiens
catcccaatagtcct

SEQ ID NO: 1769422 - DNA, 15 bp, Homo sapiens
atcccaatagtcctt

SEQ ID NO: 1769423 - DNA, 15 bp, Homo sapiens
tcccaatagtccttc

SEQ ID NO: 1769424 - DNA, 15 bp, Homo sapiens
cccaatagtccttcc

SEQ ID NO: 1769425 - DNA, 15 bp, Homo sapiens
ccaatagtccttcca

SEQ ID NO: 1769426 - DNA, 15 bp, Homo sapiens
caatagtccttccag

SEQ ID NO: 1769427 - DNA, 15 bp, Homo sapiens
aatagtccttccagg

SEQ ID NO: 1769428 - DNA, 15 bp, Homo sapiens
atagtccttccaggg

SEQ ID NO: 1769429 - DNA, 15 bp, Homo sapiens
tagtccttccaggga

SEQ ID NO: 1769430 - DNA, 15 bp, Homo sapiens
agtccttccagggac

SEQ ID NO: 1769431 - DNA, 15 bp, Homo sapiens
gtccttccagggact

SEQ ID NO: 1769432 - DNA, 15 bp, Homo sapiens
tccttccagggactc

SEQ ID NO: 1769433 - DNA, 15 bp, Homo sapiens
ccttccagggactct

SEQ ID NO: 1769434 - DNA, 15 bp, Homo sapiens
cttccagggactctg

SEQ ID NO: 1769435 - DNA, 15 bp, Homo sapiens
ttccagggactctga

SEQ ID NO: 1769436 - DNA, 15 bp, Homo sapiens
tccagggactctgaa

SEQ ID NO: 1769437 - DNA, 15 bp, Homo sapiens
ccagggactctgaat

SEQ ID NO: 1769438 - DNA, 15 bp, Homo sapiens
cagggactctgaatt

SEQ ID NO: 1769439 - DNA, 15 bp, Homo sapiens
agggactctgaattc

SEQ ID NO: 1769440 - DNA, 15 bp, Homo sapiens
gggactctgaattcc

SEQ ID NO: 1769441 - DNA, 15 bp, Homo sapiens
ggactctgaattcca

SEQ ID NO: 1769442 - DNA, 15 bp, Homo sapiens
gactctgaattccat

SEQ ID NO: 1769443 - DNA, 15 bp, Homo sapiens
actctgaattccatt

SEQ ID NO: 1769444 - DNA, 15 bp, Homo sapiens
ctctgaattccattt

SEQ ID NO: 1769445 - DNA, 15 bp, Homo sapiens
tctgaattccatttc

SEQ ID NO: 1769446 - DNA, 15 bp, Homo sapiens
ctgaattccatttcc

SEQ ID NO: 1769447 - DNA, 15 bp, Homo sapiens
tgaattccatttcca

SEQ ID NO: 1769448 - DNA, 15 bp, Homo sapiens
gaattccatttccaa

SEQ ID NO: 1769449 - DNA, 15 bp, Homo sapiens
aattccatttccaaa

SEQ ID NO: 1769450 - DNA, 15 bp, Homo sapiens
attccatttccaaaa

SEQ ID NO: 1769451 - DNA, 15 bp, Homo sapiens
ttccatttccaaaat

SEQ ID NO: 1769452 - DNA, 15 bp, Homo sapiens
tccatttccaaaatt

SEQ ID NO: 1769453 - DNA, 15 bp, Homo sapiens
ccatttccaaaattt

SEQ ID NO: 1769454 - DNA, 15 bp, Homo sapiens
catttccaaaatttg

SEQ ID NO: 1769455 - DNA, 15 bp, Homo sapiens
atttccaaaatttgt

SEQ ID NO: 1769456 - DNA, 15 bp, Homo sapiens
tttccaaaatttgtt

SEQ ID NO: 1769457 - DNA, 15 bp, Homo sapiens
ttccaaaatttgttt

SEQ ID NO: 1769458 - DNA, 15 bp, Homo sapiens
tccaaaatttgtttc

SEQ ID NO: 1769459 - DNA, 15 bp, Homo sapiens
ccaaaatttgtttcc

SEQ ID NO: 1769460 - DNA, 15 bp, Homo sapiens
caaaatttgtttcca

SEQ ID NO: 1769461 - DNA, 15 bp, Homo sapiens
aaaatttgtttccaa

SEQ ID NO: 1769462 - DNA, 15 bp, Homo sapiens
aaatttgtttccaaa

SEQ ID NO: 1769463 - DNA, 15 bp, Homo sapiens
aatttgtttccaaaa

SEQ ID NO: 1769464 - DNA, 15 bp, Homo sapiens
atttgtttccaaaat

SEQ ID NO: 1769465 - DNA, 15 bp, Homo sapiens
tttgtttccaaaatg

SEQ ID NO: 1769466 - DNA, 15 bp, Homo sapiens
ttgtttccaaaatgt

SEQ ID NO: 1769467 - DNA, 15 bp, Homo sapiens
tgtttccaaaatgtg

SEQ ID NO: 1769468 - DNA, 15 bp, Homo sapiens
gtttccaaaatgtgg

SEQ ID NO: 1769469 - DNA, 15 bp, Homo sapiens
tttccaaaatgtggg

SEQ ID NO: 1769470 - DNA, 15 bp, Homo sapiens
ttccaaaatgtggga

SEQ ID NO: 1769471 - DNA, 15 bp, Homo sapiens
tccaaaatgtgggag

SEQ ID NO: 1769472 - DNA, 15 bp, Homo sapiens
ccaaaatgtgggaga

SEQ ID NO: 1769473 - DNA, 15 bp, Homo sapiens
caaaatgtgggagag

SEQ ID NO: 1769474 - DNA, 15 bp, Homo sapiens
aaaatgtgggagagc

SEQ ID NO: 1769475 - DNA, 15 bp, Homo sapiens
aaatgtgggagagca

SEQ ID NO: 1769476 - DNA, 15 bp, Homo sapiens
aatgtgggagagcat

SEQ ID NO: 1769477 - DNA, 15 bp, Homo sapiens
atgtgggagagcatt

SEQ ID NO: 1769478 - DNA, 15 bp, Homo sapiens
tgtgggagagcattc

SEQ ID NO: 1769479 - DNA, 15 bp, Homo sapiens
gtgggagagcattcc

SEQ ID NO: 1769480 - DNA, 15 bp, Homo sapiens
tgggagagcattcct

SEQ ID NO: 1769481 - DNA, 15 bp, Homo sapiens
gggagagcattcctg

SEQ ID NO: 1769482 - DNA, 15 bp, Homo sapiens
ggagagcattcctgc

SEQ ID NO: 1769483 - DNA, 15 bp, Homo sapiens
gagagcattcctgct

SEQ ID NO: 1769484 - DNA, 15 bp, Homo sapiens
agagcattcctgctg

SEQ ID NO: 1769485 - DNA, 15 bp, Homo sapiens
gagcattcctgctgg

SEQ ID NO: 1769486 - DNA, 15 bp, Homo sapiens
agcattcctgctggg

SEQ ID NO: 1769487 - DNA, 15 bp, Homo sapiens
gcattcctgctgggg

SEQ ID NO: 1769488 - DNA, 15 bp, Homo sapiens
cattcctgctggggt

SEQ ID NO: 1769489 - DNA, 15 bp, Homo sapiens
attcctgctggggtg

SEQ ID NO: 1769490 - DNA, 15 bp, Homo sapiens
ttcctgctggggtgt

SEQ ID NO: 1769491 - DNA, 15 bp, Homo sapiens
tcctgctggggtgtg

SEQ ID NO: 1769492 - DNA, 15 bp, Homo sapiens
cctgctggggtgtga

SEQ ID NO: 1769493 - DNA, 15 bp, Homo sapiens
ctgctggggtgtgaa

SEQ ID NO: 1769494 - DNA, 15 bp, Homo sapiens
tgctggggtgtgaaa

SEQ ID NO: 1769495 - DNA, 15 bp, Homo sapiens
gctggggtgtgaaac

SEQ ID NO: 1769496 - DNA, 15 bp, Homo sapiens
ctggggtgtgaaacc

SEQ ID NO: 1769497 - DNA, 15 bp, Homo sapiens
tggggtgtgaaacct

SEQ ID NO: 1769498 - DNA, 15 bp, Homo sapiens
ggggtgtgaaacctc

SEQ ID NO: 1769499 - DNA, 15 bp, Homo sapiens
gggtgtgaaacctct

SEQ ID NO: 1769500 - DNA, 15 bp, Homo sapiens
ggtgtgaaacctctg

SEQ ID NO: 1769501 - DNA, 15 bp, Homo sapiens
gtgtgaaacctctga

SEQ ID NO: 1769502 - DNA, 15 bp, Homo sapiens
tgtgaaacctctgag

SEQ ID NO: 1769503 - DNA, 15 bp, Homo sapiens
gtgaaacctctgaga

SEQ ID NO: 1769504 - DNA, 15 bp, Homo sapiens
tgaaacctctgagac

SEQ ID NO: 1769505 - DNA, 15 bp, Homo sapiens
gaaacctctgagaca

SEQ ID NO: 1769506 - DNA, 15 bp, Homo sapiens
aaacctctgagacaa

SEQ ID NO: 1769507 - DNA, 15 bp, Homo sapiens
aacctctgagacaaa

SEQ ID NO: 1769508 - DNA, 15 bp, Homo sapiens
acctctgagacaaat

SEQ ID NO: 1769509 - DNA, 15 bp, Homo sapiens
cctctgagacaaatt

SEQ ID NO: 1769510 - DNA, 15 bp, Homo sapiens
ctctgagacaaatta

SEQ ID NO: 1769511 - DNA, 15 bp, Homo sapiens
tctgagacaaattaa

SEQ ID NO: 1769512 - DNA, 15 bp, Homo sapiens
ctgagacaaattaag

SEQ ID NO: 1769513 - DNA, 15 bp, Homo sapiens
tgagacaaattaagt

SEQ ID NO: 1769514 - DNA, 15 bp, Homo sapiens
gagacaaattaagta

SEQ ID NO: 1769515 - DNA, 15 bp, Homo sapiens
agacaaattaagtaa

SEQ ID NO: 1769516 - DNA, 15 bp, Homo sapiens
gacaaattaagtaaa

SEQ ID NO: 1769517 - DNA, 15 bp, Homo sapiens
acaaattaagtaaat

SEQ ID NO: 1769518 - DNA, 15 bp, Homo sapiens
caaattaagtaaatg

SEQ ID NO: 1769519 - DNA, 15 bp, Homo sapiens
aaattaagtaaatgt

SEQ ID NO: 1769520 - DNA, 15 bp, Homo sapiens
aattaagtaaatgtc

SEQ ID NO: 1769521 - DNA, 15 bp, Homo sapiens
attaagtaaatgtct

SEQ ID NO: 1769522 - DNA, 15 bp, Homo sapiens
ttaagtaaatgtctt

SEQ ID NO: 1769523 - DNA, 15 bp, Homo sapiens
taagtaaatgtcttc

SEQ ID NO: 1769524 - DNA, 15 bp, Homo sapiens
aagtaaatgtcttct

SEQ ID NO: 1769525 - DNA, 15 bp, Homo sapiens
agtaaatgtcttctc

SEQ ID NO: 1769526 - DNA, 15 bp, Homo sapiens
gtaaatgtcttctct

SEQ ID NO: 1769527 - DNA, 15 bp, Homo sapiens
taaatgtcttctctg

SEQ ID NO: 1769528 - DNA, 15 bp, Homo sapiens
aaatgtcttctctgt

SEQ ID NO: 1769529 - DNA, 15 bp, Homo sapiens
aatgtcttctctgtc

SEQ ID NO: 1769530 - DNA, 15 bp, Homo sapiens
atgtcttctctgtcc

SEQ ID NO: 1769531 - DNA, 15 bp, Homo sapiens
tgtcttctctgtcca

SEQ ID NO: 1769532 - DNA, 15 bp, Homo sapiens
gtcttctctgtccat

SEQ ID NO: 1769533 - DNA, 15 bp, Homo sapiens
tcttctctgtccatc

SEQ ID NO: 1769534 - DNA, 15 bp, Homo sapiens
cttctctgtccatct

SEQ ID NO: 1769535 - DNA, 15 bp, Homo sapiens
ttctctgtccatctc

SEQ ID NO: 1769536 - DNA, 15 bp, Homo sapiens
tctctgtccatctct

SEQ ID NO: 1769537 - DNA, 15 bp, Homo sapiens
ctctgtccatctctt

SEQ ID NO: 1769538 - DNA, 15 bp, Homo sapiens
tctgtccatctcttc

SEQ ID NO: 1769539 - DNA, 15 bp, Homo sapiens
ctgtccatctcttcc

SEQ ID NO: 1769540 - DNA, 15 bp, Homo sapiens
tgtccatctcttcca

SEQ ID NO: 1769541 - DNA, 15 bp, Homo sapiens
gtccatctcttccaa

SEQ ID NO: 1769542 - DNA, 15 bp, Homo sapiens
tccatctcttccaag

SEQ ID NO: 1769543 - DNA, 15 bp, Homo sapiens
ccatctcttccaagc

SEQ ID NO: 1769544 - DNA, 15 bp, Homo sapiens
catctcttccaagcc

SEQ ID NO: 1769545 - DNA, 15 bp, Homo sapiens
atctcttccaagcca

SEQ ID NO: 1769546 - DNA, 15 bp, Homo sapiens
tctcttccaagccag

SEQ ID NO: 1769547 - DNA, 15 bp, Homo sapiens
ctcttccaagccagg

SEQ ID NO: 1769548 - DNA, 15 bp, Homo sapiens
tcttccaagccagga

SEQ ID NO: 1769549 - DNA, 15 bp, Homo sapiens
cttccaagccaggag

SEQ ID NO: 1769550 - DNA, 15 bp, Homo sapiens
ttccaagccaggagg

SEQ ID NO: 1769551 - DNA, 15 bp, Homo sapiens
tccaagccaggaggg

SEQ ID NO: 1769552 - DNA, 15 bp, Homo sapiens
ccaagccaggagggg

SEQ ID NO: 1769553 - DNA, 15 bp, Homo sapiens
caagccaggaggggc

SEQ ID NO: 1769554 - DNA, 15 bp, Homo sapiens
aagccaggaggggca

SEQ ID NO: 1769555 - DNA, 15 bp, Homo sapiens
agccaggaggggcaa

SEQ ID NO: 1769556 - DNA, 15 bp, Homo sapiens
gccaggaggggcaag

SEQ ID NO: 1769557 - DNA, 15 bp, Homo sapiens
ccaggaggggcaagc

SEQ ID NO: 1769558 - DNA, 15 bp, Homo sapiens
caggaggggcaagct

SEQ ID NO: 1769559 - DNA, 15 bp, Homo sapiens
aggaggggcaagctt

SEQ ID NO: 1769560 - DNA, 15 bp, Homo sapiens
ggaggggcaagctta

SEQ ID NO: 1769561 - DNA, 15 bp, Homo sapiens
gaggggcaagcttac

SEQ ID NO: 1769562 - DNA, 15 bp, Homo sapiens
aggggcaagcttact

SEQ ID NO: 1769563 - DNA, 15 bp, Homo sapiens
ggggcaagcttactc

SEQ ID NO: 1769564 - DNA, 15 bp, Homo sapiens
gggcaagcttactcc

SEQ ID NO: 1769565 - DNA, 15 bp, Homo sapiens
ggcaagcttactcct

SEQ ID NO: 1769566 - DNA, 15 bp, Homo sapiens
gcaagcttactcctt

SEQ ID NO: 1769567 - DNA, 15 bp, Homo sapiens
caagcttactcctta

SEQ ID NO: 1769568 - DNA, 15 bp, Homo sapiens
aagcttactccttat

SEQ ID NO: 1769569 - DNA, 15 bp, Homo sapiens
agcttactccttatg

SEQ ID NO: 1769570 - DNA, 15 bp, Homo sapiens
gcttactccttatga

SEQ ID NO: 1769571 - DNA, 15 bp, Homo sapiens
cttactccttatgat

SEQ ID NO: 1769572 - DNA, 15 bp, Homo sapiens
ttactccttatgatg

SEQ ID NO: 1769573 - DNA, 15 bp, Homo sapiens
tactccttatgatgt

SEQ ID NO: 1769574 - DNA, 15 bp, Homo sapiens
actccttatgatgtt

SEQ ID NO: 1769575 - DNA, 15 bp, Homo sapiens
ctccttatgatgtta

SEQ ID NO: 1769576 - DNA, 15 bp, Homo sapiens
tccttatgatgttac

SEQ ID NO: 1769577 - DNA, 15 bp, Homo sapiens
ccttatgatgttaca

SEQ ID NO: 1769578 - DNA, 15 bp, Homo sapiens
cttatgatgttacag

SEQ ID NO: 1769579 - DNA, 15 bp, Homo sapiens
ttatgatgttacaga

SEQ ID NO: 1769580 - DNA, 15 bp, Homo sapiens
tatgatgttacagag

SEQ ID NO: 1769581 - DNA, 15 bp, Homo sapiens
atgatgttacagaga

SEQ ID NO: 1769582 - DNA, 15 bp, Homo sapiens
tgatgttacagagat

SEQ ID NO: 1769583 - DNA, 15 bp, Homo sapiens
gatgttacagagatg

SEQ ID NO: 1769584 - DNA, 15 bp, Homo sapiens
atgttacagagatga

SEQ ID NO: 1769585 - DNA, 15 bp, Homo sapiens
tgttacagagatgag

SEQ ID NO: 1769586 - DNA, 15 bp, Homo sapiens
gttacagagatgaga

SEQ ID NO: 1769587 - DNA, 15 bp, Homo sapiens
ttacagagatgagaa

SEQ ID NO: 1769588 - DNA, 15 bp, Homo sapiens
tacagagatgagaag

SEQ ID NO: 1769589 - DNA, 15 bp, Homo sapiens
acagagatgagaagg

SEQ ID NO: 1769590 - DNA, 15 bp, Homo sapiens
cagagatgagaagga

SEQ ID NO: 1769591 - DNA, 15 bp, Homo sapiens
agagatgagaaggag

SEQ ID NO: 1769592 - DNA, 15 bp, Homo sapiens
gagatgagaaggagg

SEQ ID NO: 1769593 - DNA, 15 bp, Homo sapiens
agatgagaaggaggc

SEQ ID NO: 1769594 - DNA, 15 bp, Homo sapiens
gatgagaaggaggct

SEQ ID NO: 1769595 - DNA, 15 bp, Homo sapiens
atgagaaggaggctc

SEQ ID NO: 1769596 - DNA, 15 bp, Homo sapiens
tgagaaggaggctcg

SEQ ID NO: 1769597 - DNA, 15 bp, Homo sapiens
gagaaggaggctcgg

SEQ ID NO: 1769598 - DNA, 15 bp, Homo sapiens
agaaggaggctcggg

SEQ ID NO: 1769599 - DNA, 15 bp, Homo sapiens
gaaggaggctcggga

SEQ ID NO: 1769600 - DNA, 15 bp, Homo sapiens
aaggaggctcgggaa

SEQ ID NO: 1769601 - DNA, 15 bp, Homo sapiens
aggaggctcgggaat

SEQ ID NO: 1769602 - DNA, 15 bp, Homo sapiens
ggaggctcgggaatc

SEQ ID NO: 1769603 - DNA, 15 bp, Homo sapiens
gaggctcgggaatct

SEQ ID NO: 1769604 - DNA, 15 bp, Homo sapiens
aggctcgggaatcta

SEQ ID NO: 1769605 - DNA, 15 bp, Homo sapiens
ggctcgggaatctac

SEQ ID NO: 1769606 - DNA, 15 bp, Homo sapiens
gctcgggaatctacc

SEQ ID NO: 1769607 - DNA, 15 bp, Homo sapiens
ctcgggaatctaccc

SEQ ID NO: 1769608 - DNA, 15 bp, Homo sapiens
tcgggaatctaccct

SEQ ID NO: 1769609 - DNA, 15 bp, Homo sapiens
cgggaatctaccctg

SEQ ID NO: 1769610 - DNA, 15 bp, Homo sapiens
gggaatctaccctgg

SEQ ID NO: 1769611 - DNA, 15 bp, Homo sapiens
ggaatctaccctggc

SEQ ID NO: 1769612 - DNA, 15 bp, Homo sapiens
gaatctaccctggct

SEQ ID NO: 1769613 - DNA, 15 bp, Homo sapiens
aatctaccctggctg

SEQ ID NO: 1769614 - DNA, 15 bp, Homo sapiens
atctaccctggctgg

SEQ ID NO: 1769615 - DNA, 15 bp, Homo sapiens
tctaccctggctggt

SEQ ID NO: 1769616 - DNA, 15 bp, Homo sapiens
ctaccctggctggtc

SEQ ID NO: 1769617 - DNA, 15 bp, Homo sapiens
taccctggctggtca

SEQ ID NO: 1769618 - DNA, 15 bp, Homo sapiens
accctggctggtcag

SEQ ID NO: 1769619 - DNA, 15 bp, Homo sapiens
ccctggctggtcagc

SEQ ID NO: 1769620 - DNA, 15 bp, Homo sapiens
cctggctggtcagca

SEQ ID NO: 1769621 - DNA, 15 bp, Homo sapiens
ctggctggtcagcac

SEQ ID NO: 1769622 - DNA, 15 bp, Homo sapiens
tggctggtcagcaca

SEQ ID NO: 1769623 - DNA, 15 bp, Homo sapiens
ggctggtcagcacag

SEQ ID NO: 1769624 - DNA, 15 bp, Homo sapiens
gctggtcagcacaga

SEQ ID NO: 1769625 - DNA, 15 bp, Homo sapiens
ctggtcagcacagaa

SEQ ID NO: 1769626 - DNA, 15 bp, Homo sapiens
tggtcagcacagaaa

SEQ ID NO: 1769627 - DNA, 15 bp, Homo sapiens
ggtcagcacagaaat

SEQ ID NO: 1769628 - DNA, 15 bp, Homo sapiens
gtcagcacagaaatc

SEQ ID NO: 1769629 - DNA, 15 bp, Homo sapiens
tcagcacagaaatct

SEQ ID NO: 1769630 - DNA, 15 bp, Homo sapiens
cagcacagaaatctc

SEQ ID NO: 1769631 - DNA, 15 bp, Homo sapiens
agcacagaaatctca

SEQ ID NO: 1769632 - DNA, 15 bp, Homo sapiens
gcacagaaatctcac

SEQ ID NO: 1769633 - DNA, 15 bp, Homo sapiens
cacagaaatctcact

SEQ ID NO: 1769634 - DNA, 15 bp, Homo sapiens
acagaaatctcactg

SEQ ID NO: 1769635 - DNA, 15 bp, Homo sapiens
cagaaatctcactgt

SEQ ID NO: 1769636 - DNA, 15 bp, Homo sapiens
agaaatctcactgtg

SEQ ID NO: 1769637 - DNA, 15 bp, Homo sapiens
gaaatctcactgtgt

SEQ ID NO: 1769638 - DNA, 15 bp, Homo sapiens
aaatctcactgtgtc

SEQ ID NO: 1769639 - DNA, 15 bp, Homo sapiens
aatctcactgtgtca

SEQ ID NO: 1769640 - DNA, 15 bp, Homo sapiens
atctcactgtgtcaa

SEQ ID NO: 1769641 - DNA, 15 bp, Homo sapiens
tctcactgtgtcaag

SEQ ID NO: 1769642 - DNA, 15 bp, Homo sapiens
ctcactgtgtcaagc

SEQ ID NO: 1769643 - DNA, 15 bp, Homo sapiens
tcactgtgtcaagca

SEQ ID NO: 1769644 - DNA, 15 bp, Homo sapiens
cactgtgtcaagcaa

SEQ ID NO: 1769645 - DNA, 15 bp, Homo sapiens
actgtgtcaagcaaa

SEQ ID NO: 1769646 - DNA, 15 bp, Homo sapiens
ctgtgtcaagcaaag

SEQ ID NO: 1769647 - DNA, 15 bp, Homo sapiens
tgtgtcaagcaaagc

SEQ ID NO: 1769648 - DNA, 15 bp, Homo sapiens
gtgtcaagcaaagct

SEQ ID NO: 1769649 - DNA, 15 bp, Homo sapiens
tgtcaagcaaagctt

SEQ ID NO: 1769650 - DNA, 15 bp, Homo sapiens
gtcaagcaaagctta

SEQ ID NO: 1769651 - DNA, 15 bp, Homo sapiens
tcaagcaaagcttaa

SEQ ID NO: 1769652 - DNA, 15 bp, Homo sapiens
caagcaaagcttaat

SEQ ID NO: 1769653 - DNA, 15 bp, Homo sapiens
aagcaaagcttaatt

SEQ ID NO: 1769654 - DNA, 15 bp, Homo sapiens
agcaaagcttaattc

SEQ ID NO: 1769655 - DNA, 15 bp, Homo sapiens
gcaaagcttaattct

SEQ ID NO: 1769656 - DNA, 15 bp, Homo sapiens
caaagcttaattcta

SEQ ID NO: 1769657 - DNA, 15 bp, Homo sapiens
aaagcttaattctag

SEQ ID NO: 1769658 - DNA, 15 bp, Homo sapiens
aagcttaattctagg

SEQ ID NO: 1769659 - DNA, 15 bp, Homo sapiens
agcttaattctagga

SEQ ID NO: 1769660 - DNA, 15 bp, Homo sapiens
gcttaattctaggat

SEQ ID NO: 1769661 - DNA, 15 bp, Homo sapiens
cttaattctaggatc

SEQ ID NO: 1769662 - DNA, 15 bp, Homo sapiens
ttaattctaggatcc

SEQ ID NO: 1769663 - DNA, 15 bp, Homo sapiens
taattctaggatcct

SEQ ID NO: 1769664 - DNA, 15 bp, Homo sapiens
aattctaggatcctt

SEQ ID NO: 1769665 - DNA, 15 bp, Homo sapiens
attctaggatccttc

SEQ ID NO: 1769666 - DNA, 15 bp, Homo sapiens
ttctaggatccttct

SEQ ID NO: 1769667 - DNA, 15 bp, Homo sapiens
tctaggatccttcta

SEQ ID NO: 1769668 - DNA, 15 bp, Homo sapiens
ctaggatccttctac

SEQ ID NO: 1769669 - DNA, 15 bp, Homo sapiens
taggatccttctacc

SEQ ID NO: 1769670 - DNA, 15 bp, Homo sapiens
aggatccttctaccc

SEQ ID NO: 1769671 - DNA, 15 bp, Homo sapiens
ggatccttctaccct

SEQ ID NO: 1769672 - DNA, 15 bp, Homo sapiens
gatccttctaccctg

SEQ ID NO: 1769673 - DNA, 15 bp, Homo sapiens
atccttctaccctga

SEQ ID NO: 1769674 - DNA, 15 bp, Homo sapiens
tccttctaccctgat

SEQ ID NO: 1769675 - DNA, 15 bp, Homo sapiens
ccttctaccctgatg

SEQ ID NO: 1769676 - DNA, 15 bp, Homo sapiens
cttctaccctgatgg

SEQ ID NO: 1769677 - DNA, 15 bp, Homo sapiens
ttctaccctgatggc

SEQ ID NO: 1769678 - DNA, 15 bp, Homo sapiens
tctaccctgatggca

SEQ ID NO: 1769679 - DNA, 15 bp, Homo sapiens
ctaccctgatggcaa

SEQ ID NO: 1769680 - DNA, 15 bp, Homo sapiens
taccctgatggcaag

SEQ ID NO: 1769681 - DNA, 15 bp, Homo sapiens
accctgatggcaaga

SEQ ID NO: 1769682 - DNA, 15 bp, Homo sapiens
ccctgatggcaagag

SEQ ID NO: 1769683 - DNA, 15 bp, Homo sapiens
cctgatggcaagaga

SEQ ID NO: 1769684 - DNA, 15 bp, Homo sapiens
ctgatggcaagagaa

SEQ ID NO: 1769685 - DNA, 15 bp, Homo sapiens
tgatggcaagagaag

SEQ ID NO: 1769686 - DNA, 15 bp, Homo sapiens
gatggcaagagaaga

SEQ ID NO: 1769687 - DNA, 15 bp, Homo sapiens
atggcaagagaagag

SEQ ID NO: 1769688 - DNA, 15 bp, Homo sapiens
tggcaagagaagagc

SEQ ID NO: 1769689 - DNA, 15 bp, Homo sapiens
ggcaagagaagagct

SEQ ID NO: 1769690 - DNA, 15 bp, Homo sapiens
gcaagagaagagctt

SEQ ID NO: 1769691 - DNA, 15 bp, Homo sapiens
caagagaagagcttt

SEQ ID NO: 1769692 - DNA, 15 bp, Homo sapiens
aagagaagagctttc

SEQ ID NO: 1769693 - DNA, 15 bp, Homo sapiens
agagaagagctttct

SEQ ID NO: 1769694 - DNA, 15 bp, Homo sapiens
gagaagagctttctt

SEQ ID NO: 1769695 - DNA, 15 bp, Homo sapiens
agaagagctttcttt

SEQ ID NO: 1769696 - DNA, 15 bp, Homo sapiens
gaagagctttctttt

SEQ ID NO: 1769697 - DNA, 15 bp, Homo sapiens
aagagctttcttttg

SEQ ID NO: 1769698 - DNA, 15 bp, Homo sapiens
agagctttcttttgt

SEQ ID NO: 1769699 - DNA, 15 bp, Homo sapiens
gagctttcttttgtt

SEQ ID NO: 1769700 - DNA, 15 bp, Homo sapiens
agctttcttttgttc

SEQ ID NO: 1769701 - DNA, 15 bp, Homo sapiens
gctttcttttgttcc

SEQ ID NO: 1769702 - DNA, 15 bp, Homo sapiens
ctttcttttgttcca

SEQ ID NO: 1769703 - DNA, 15 bp, Homo sapiens
tttcttttgttccag

SEQ ID NO: 1769704 - DNA, 15 bp, Homo sapiens
ttcttttgttccaga

SEQ ID NO: 1769705 - DNA, 15 bp, Homo sapiens
tcttttgttccagaa

SEQ ID NO: 1769706 - DNA, 15 bp, Homo sapiens
cttttgttccagaat

SEQ ID NO: 1769707 - DNA, 15 bp, Homo sapiens
ttttgttccagaata

SEQ ID NO: 1769708 - DNA, 15 bp, Homo sapiens
tttgttccagaatat

SEQ ID NO: 1769709 - DNA, 15 bp, Homo sapiens
ttgttccagaatata

SEQ ID NO: 1769710 - DNA, 15 bp, Homo sapiens
tgttccagaatatat

SEQ ID NO: 1769711 - DNA, 15 bp, Homo sapiens
gttccagaatatatc

SEQ ID NO: 1769712 - DNA, 15 bp, Homo sapiens
ttccagaatatatct

SEQ ID NO: 1769713 - DNA, 15 bp, Homo sapiens
tccagaatatatcta

SEQ ID NO: 1769714 - DNA, 15 bp, Homo sapiens
ccagaatatatctat

SEQ ID NO: 1769715 - DNA, 15 bp, Homo sapiens
cagaatatatctata

SEQ ID NO: 1769716 - DNA, 15 bp, Homo sapiens
agaatatatctatat

SEQ ID NO: 1769717 - DNA, 15 bp, Homo sapiens
gaatatatctatatc

SEQ ID NO: 1769718 - DNA, 15 bp, Homo sapiens
aatatatctatatct

SEQ ID NO: 1769719 - DNA, 15 bp, Homo sapiens
atatatctatatcta

SEQ ID NO: 1769720 - DNA, 15 bp, Homo sapiens
tatatctatatctag

SEQ ID NO: 1769721 - DNA, 15 bp, Homo sapiens
atatctatatctagt

SEQ ID NO: 1769722 - DNA, 15 bp, Homo sapiens
tatctatatctagtt

SEQ ID NO: 1769723 - DNA, 15 bp, Homo sapiens
atctatatctagttt

SEQ ID NO: 1769724 - DNA, 15 bp, Homo sapiens
tctatatctagttta

SEQ ID NO: 1769725 - DNA, 15 bp, Homo sapiens
ctatatctagtttat

SEQ ID NO: 1769726 - DNA, 15 bp, Homo sapiens
tatatctagtttatt

SEQ ID NO: 1769727 - DNA, 15 bp, Homo sapiens
atatctagtttattt

SEQ ID NO: 1769728 - DNA, 15 bp, Homo sapiens
tatctagtttattta

SEQ ID NO: 1769729 - DNA, 15 bp, Homo sapiens
atctagtttatttat

SEQ ID NO: 1769730 - DNA, 15 bp, Homo sapiens
tctagtttatttatg

SEQ ID NO: 1769731 - DNA, 15 bp, Homo sapiens
ctagtttatttatgc

SEQ ID NO: 1769732 - DNA, 15 bp, Homo sapiens
tagtttatttatgca

SEQ ID NO: 1769733 - DNA, 15 bp, Homo sapiens
agtttatttatgcat

SEQ ID NO: 1769734 - DNA, 15 bp, Homo sapiens
gtttatttatgcatt

SEQ ID NO: 1769735 - DNA, 15 bp, Homo sapiens
tttatttatgcattt

SEQ ID NO: 1769736 - DNA, 15 bp, Homo sapiens
ttatttatgcatttt

SEQ ID NO: 1769737 - DNA, 15 bp, Homo sapiens
tatttatgcattttt

SEQ ID NO: 1769738 - DNA, 15 bp, Homo sapiens
atttatgcattttta

SEQ ID NO: 1769739 - DNA, 15 bp, Homo sapiens
tttatgcatttttac

SEQ ID NO: 1769740 - DNA, 15 bp, Homo sapiens
ttatgcatttttacc

SEQ ID NO: 1769741 - DNA, 15 bp, Homo sapiens
tatgcatttttacct

SEQ ID NO: 1769742 - DNA, 15 bp, Homo sapiens
atgcatttttacctt

SEQ ID NO: 1769743 - DNA, 15 bp, Homo sapiens
tgcatttttaccttc

SEQ ID NO: 1769744 - DNA, 15 bp, Homo sapiens
gcatttttaccttct

SEQ ID NO: 1769745 - DNA, 15 bp, Homo sapiens
catttttaccttctc

SEQ ID NO: 1769746 - DNA, 15 bp, Homo sapiens
atttttaccttctca

SEQ ID NO: 1769747 - DNA, 15 bp, Homo sapiens
tttttaccttctcat

SEQ ID NO: 1769748 - DNA, 15 bp, Homo sapiens
ttttaccttctcatt

SEQ ID NO: 1769749 - DNA, 15 bp, Homo sapiens
tttaccttctcatta

SEQ ID NO: 1769750 - DNA, 15 bp, Homo sapiens
ttaccttctcattat

SEQ ID NO: 1769751 - DNA, 15 bp, Homo sapiens
taccttctcattatt

SEQ ID NO: 1769752 - DNA, 15 bp, Homo sapiens
accttctcattattc

SEQ ID NO: 1769753 - DNA, 15 bp, Homo sapiens
ccttctcattattcc

SEQ ID NO: 1769754 - DNA, 15 bp, Homo sapiens
cttctcattattcct

SEQ ID NO: 1769755 - DNA, 15 bp, Homo sapiens
ttctcattattcctt

SEQ ID NO: 1769756 - DNA, 15 bp, Homo sapiens
tctcattattccttt

SEQ ID NO: 1769757 - DNA, 15 bp, Homo sapiens
ctcattattcctttg

SEQ ID NO: 1769758 - DNA, 15 bp, Homo sapiens
tcattattcctttgt

SEQ ID NO: 1769759 - DNA, 15 bp, Homo sapiens
cattattcctttgta

SEQ ID NO: 1769760 - DNA, 15 bp, Homo sapiens
attattcctttgtac

SEQ ID NO: 1769761 - DNA, 15 bp, Homo sapiens
ttattcctttgtacc

SEQ ID NO: 1769762 - DNA, 15 bp, Homo sapiens
tattcctttgtacct

SEQ ID NO: 1769763 - DNA, 15 bp, Homo sapiens
attcctttgtaccta

SEQ ID NO: 1769764 - DNA, 15 bp, Homo sapiens
ttcctttgtacctat

SEQ ID NO: 1769765 - DNA, 15 bp, Homo sapiens
tcctttgtacctatt

SEQ ID NO: 1769766 - DNA, 15 bp, Homo sapiens
cctttgtacctattt

SEQ ID NO: 1769767 - DNA, 15 bp, Homo sapiens
ctttgtacctatttc

SEQ ID NO: 1769768 - DNA, 15 bp, Homo sapiens
tttgtacctatttca

SEQ ID NO: 1769769 - DNA, 15 bp, Homo sapiens
ttgtacctatttcag

SEQ ID NO: 1769770 - DNA, 15 bp, Homo sapiens
tgtacctatttcaga

SEQ ID NO: 1769771 - DNA, 15 bp, Homo sapiens
gtacctatttcagat

SEQ ID NO: 1769772 - DNA, 15 bp, Homo sapiens
tacctatttcagata

SEQ ID NO: 1769773 - DNA, 15 bp, Homo sapiens
acctatttcagatat

SEQ ID NO: 1769774 - DNA, 15 bp, Homo sapiens
cctatttcagatatg

SEQ ID NO: 1769775 - DNA, 15 bp, Homo sapiens
ctatttcagatatgt

SEQ ID NO: 1769776 - DNA, 15 bp, Homo sapiens
tatttcagatatgtc

SEQ ID NO: 1769777 - DNA, 15 bp, Homo sapiens
atttcagatatgtcc

SEQ ID NO: 1769778 - DNA, 15 bp, Homo sapiens
tttcagatatgtcca

SEQ ID NO: 1769779 - DNA, 15 bp, Homo sapiens
ttcagatatgtccat

SEQ ID NO: 1769780 - DNA, 15 bp, Homo sapiens
tcagatatgtccatt

SEQ ID NO: 1769781 - DNA, 15 bp, Homo sapiens
cagatatgtccattc

SEQ ID NO: 1769782 - DNA, 15 bp, Homo sapiens
agatatgtccattct

SEQ ID NO: 1769783 - DNA, 15 bp, Homo sapiens
gatatgtccattctt

SEQ ID NO: 1769784 - DNA, 15 bp, Homo sapiens
atatgtccattcttt

SEQ ID NO: 1769785 - DNA, 15 bp, Homo sapiens
tatgtccattctttg

SEQ ID NO: 1769786 - DNA, 15 bp, Homo sapiens
atgtccattctttgg

SEQ ID NO: 1769787 - DNA, 15 bp, Homo sapiens
tgtccattctttggg

SEQ ID NO: 1769788 - DNA, 15 bp, Homo sapiens
gtccattctttgggt

SEQ ID NO: 1769789 - DNA, 15 bp, Homo sapiens
tccattctttgggtg

SEQ ID NO: 1769790 - DNA, 15 bp, Homo sapiens
ccattctttgggtgg

SEQ ID NO: 1769791 - DNA, 15 bp, Homo sapiens
cattctttgggtggg

SEQ ID NO: 1769792 - DNA, 15 bp, Homo sapiens
attctttgggtgggt

SEQ ID NO: 1769793 - DNA, 15 bp, Homo sapiens
ttctttgggtgggtc

SEQ ID NO: 1769794 - DNA, 15 bp, Homo sapiens
tctttgggtgggtca

SEQ ID NO: 1769795 - DNA, 15 bp, Homo sapiens
ctttgggtgggtcaa

SEQ ID NO: 1769796 - DNA, 15 bp, Homo sapiens
tttgggtgggtcaaa

SEQ ID NO: 1769797 - DNA, 15 bp, Homo sapiens
ttgggtgggtcaaag

SEQ ID NO: 1769798 - DNA, 15 bp, Homo sapiens
tgggtgggtcaaagc

SEQ ID NO: 1769799 - DNA, 15 bp, Homo sapiens
gggtgggtcaaagct

SEQ ID NO: 1769800 - DNA, 15 bp, Homo sapiens
ggtgggtcaaagcta

SEQ ID NO: 1769801 - DNA, 15 bp, Homo sapiens
gtgggtcaaagctac

SEQ ID NO: 1769802 - DNA, 15 bp, Homo sapiens
tgggtcaaagctaca

SEQ ID NO: 1769803 - DNA, 15 bp, Homo sapiens
gggtcaaagctacat

SEQ ID NO: 1769804 - DNA, 15 bp, Homo sapiens
ggtcaaagctacatc

SEQ ID NO: 1769805 - DNA, 15 bp, Homo sapiens
gtcaaagctacatct

SEQ ID NO: 1769806 - DNA, 15 bp, Homo sapiens
tcaaagctacatcta

SEQ ID NO: 1769807 - DNA, 15 bp, Homo sapiens
caaagctacatctat

SEQ ID NO: 1769808 - DNA, 15 bp, Homo sapiens
aaagctacatctatg

SEQ ID NO: 1769809 - DNA, 15 bp, Homo sapiens
aagctacatctatgc

SEQ ID NO: 1769810 - DNA, 15 bp, Homo sapiens
agctacatctatgcc

SEQ ID NO: 1769811 - DNA, 15 bp, Homo sapiens
gctacatctatgccg

SEQ ID NO: 1769812 - DNA, 15 bp, Homo sapiens
ctacatctatgccgt

SEQ ID NO: 1769813 - DNA, 15 bp, Homo sapiens
tacatctatgccgtc

SEQ ID NO: 1769814 - DNA, 15 bp, Homo sapiens
acatctatgccgtca

SEQ ID NO: 1769815 - DNA, 15 bp, Homo sapiens
catctatgccgtcaa

SEQ ID NO: 1769816 - DNA, 15 bp, Homo sapiens
atctatgccgtcaac

SEQ ID NO: 1769817 - DNA, 15 bp, Homo sapiens
tctatgccgtcaacc

SEQ ID NO: 1769818 - DNA, 15 bp, Homo sapiens
ctatgccgtcaaccc

SEQ ID NO: 1769819 - DNA, 15 bp, Homo sapiens
tatgccgtcaacccc

SEQ ID NO: 1769820 - DNA, 15 bp, Homo sapiens
atgccgtcaacccca

SEQ ID NO: 1769821 - DNA, 15 bp, Homo sapiens
tgccgtcaaccccac

SEQ ID NO: 1769822 - DNA, 15 bp, Homo sapiens
gccgtcaaccccact

SEQ ID NO: 1769823 - DNA, 15 bp, Homo sapiens
ccgtcaaccccactc

SEQ ID NO: 1769824 - DNA, 15 bp, Homo sapiens
cgtcaaccccactcc

SEQ ID NO: 1769825 - DNA, 15 bp, Homo sapiens
gtcaaccccactccc

SEQ ID NO: 1769826 - DNA, 15 bp, Homo sapiens
tcaaccccactccct

SEQ ID NO: 1769827 - DNA, 15 bp, Homo sapiens
caaccccactccctg

SEQ ID NO: 1769828 - DNA, 15 bp, Homo sapiens
aaccccactccctga

SEQ ID NO: 1769829 - DNA, 15 bp, Homo sapiens
accccactccctgac

SEQ ID NO: 1769830 - DNA, 15 bp, Homo sapiens
ccccactccctgact

SEQ ID NO: 1769831 - DNA, 15 bp, Homo sapiens
cccactccctgactc

SEQ ID NO: 1769832 - DNA, 15 bp, Homo sapiens
ccactccctgactcc

SEQ ID NO: 1769833 - DNA, 15 bp, Homo sapiens
cactccctgactcct

SEQ ID NO: 1769834 - DNA, 15 bp, Homo sapiens
actccctgactcctc

SEQ ID NO: 1769835 - DNA, 15 bp, Homo sapiens
ctccctgactcctct

SEQ ID NO: 1769836 - DNA, 15 bp, Homo sapiens
tccctgactcctctt

SEQ ID NO: 1769837 - DNA, 15 bp, Homo sapiens
ccctgactcctcttg

SEQ ID NO: 1769838 - DNA, 15 bp, Homo sapiens
cctgactcctcttga

SEQ ID NO: 1769839 - DNA, 15 bp, Homo sapiens
ctgactcctcttgaa

SEQ ID NO: 1769840 - DNA, 15 bp, Homo sapiens
tgactcctcttgaat

SEQ ID NO: 1769841 - DNA, 15 bp, Homo sapiens
gactcctcttgaatg

SEQ ID NO: 1769842 - DNA, 15 bp, Homo sapiens
actcctcttgaatgt

SEQ ID NO: 1769843 - DNA, 15 bp, Homo sapiens
ctcctcttgaatgtt

SEQ ID NO: 1769844 - DNA, 15 bp, Homo sapiens
tcctcttgaatgttg

SEQ ID NO: 1769845 - DNA, 15 bp, Homo sapiens
cctcttgaatgttgg

SEQ ID NO: 1769846 - DNA, 15 bp, Homo sapiens
ctcttgaatgttggt

SEQ ID NO: 1769847 - DNA, 15 bp, Homo sapiens
tcttgaatgttggtc

SEQ ID NO: 1769848 - DNA, 15 bp, Homo sapiens
cttgaatgttggtcc

SEQ ID NO: 1769849 - DNA, 15 bp, Homo sapiens
ttgaatgttggtcca

SEQ ID NO: 1769850 - DNA, 15 bp, Homo sapiens
tgaatgttggtccac

SEQ ID NO: 1769851 - DNA, 15 bp, Homo sapiens
gaatgttggtccaca

SEQ ID NO: 1769852 - DNA, 15 bp, Homo sapiens
aatgttggtccacaa

SEQ ID NO: 1769853 - DNA, 15 bp, Homo sapiens
atgttggtccacaag

SEQ ID NO: 1769854 - DNA, 15 bp, Homo sapiens
tgttggtccacaagt

SEQ ID NO: 1769855 - DNA, 15 bp, Homo sapiens
gttggtccacaagtc

SEQ ID NO: 1769856 - DNA, 15 bp, Homo sapiens
ttggtccacaagtca

SEQ ID NO: 1769857 - DNA, 15 bp, Homo sapiens
tggtccacaagtcat

SEQ ID NO: 1769858 - DNA, 15 bp, Homo sapiens
ggtccacaagtcatt

SEQ ID NO: 1769859 - DNA, 15 bp, Homo sapiens
gtccacaagtcattc

SEQ ID NO: 1769860 - DNA, 15 bp, Homo sapiens
tccacaagtcattcc

SEQ ID NO: 1769861 - DNA, 15 bp, Homo sapiens
ccacaagtcattccc

SEQ ID NO: 1769862 - DNA, 15 bp, Homo sapiens
cacaagtcattccct

SEQ ID NO: 1769863 - DNA, 15 bp, Homo sapiens
acaagtcattccctc

SEQ ID NO: 1769864 - DNA, 15 bp, Homo sapiens
caagtcattccctct

SEQ ID NO: 1769865 - DNA, 15 bp, Homo sapiens
aagtcattccctctt

SEQ ID NO: 1769866 - DNA, 15 bp, Homo sapiens
agtcattccctcttc

SEQ ID NO: 1769867 - DNA, 15 bp, Homo sapiens
gtcattccctcttct

SEQ ID NO: 1769868 - DNA, 15 bp, Homo sapiens
tcattccctcttctt

SEQ ID NO: 1769869 - DNA, 15 bp, Homo sapiens
cattccctcttcttc

SEQ ID NO: 1769870 - DNA, 15 bp, Homo sapiens
attccctcttcttct

SEQ ID NO: 1769871 - DNA, 15 bp, Homo sapiens
ttccctcttcttctg

SEQ ID NO: 1769872 - DNA, 15 bp, Homo sapiens
tccctcttcttctgc

SEQ ID NO: 1769873 - DNA, 15 bp, Homo sapiens
ccctcttcttctgca

SEQ ID NO: 1769874 - DNA, 15 bp, Homo sapiens
cctcttcttctgcaa

SEQ ID NO: 1769875 - DNA, 15 bp, Homo sapiens
ctcttcttctgcaat

SEQ ID NO: 1769876 - DNA, 15 bp, Homo sapiens
tcttcttctgcaatc

SEQ ID NO: 1769877 - DNA, 15 bp, Homo sapiens
cttcttctgcaatct

SEQ ID NO: 1769878 - DNA, 15 bp, Homo sapiens
ttcttctgcaatcta

SEQ ID NO: 1769879 - DNA, 15 bp, Homo sapiens
tcttctgcaatctag

SEQ ID NO: 1769880 - DNA, 15 bp, Homo sapiens
cttctgcaatctagc

SEQ ID NO: 1769881 - DNA, 15 bp, Homo sapiens
ttctgcaatctagct

SEQ ID NO: 1769882 - DNA, 15 bp, Homo sapiens
tctgcaatctagctt

SEQ ID NO: 1769883 - DNA, 15 bp, Homo sapiens
ctgcaatctagctta

SEQ ID NO: 1769884 - DNA, 15 bp, Homo sapiens
tgcaatctagcttat

SEQ ID NO: 1769885 - DNA, 15 bp, Homo sapiens
gcaatctagcttatt

SEQ ID NO: 1769886 - DNA, 15 bp, Homo sapiens
caatctagcttattg

SEQ ID NO: 1769887 - DNA, 15 bp, Homo sapiens
aatctagcttattgt

SEQ ID NO: 1769888 - DNA, 15 bp, Homo sapiens
atctagcttattgtt

SEQ ID NO: 1769889 - DNA, 15 bp, Homo sapiens
tctagcttattgttt

SEQ ID NO: 1769890 - DNA, 15 bp, Homo sapiens
ctagcttattgtttt

SEQ ID NO: 1769891 - DNA, 15 bp, Homo sapiens
tagcttattgttttt

SEQ ID NO: 1769892 - DNA, 15 bp, Homo sapiens
agcttattgtttttt

SEQ ID NO: 1769893 - DNA, 15 bp, Homo sapiens
gcttattgtttttta

SEQ ID NO: 1769894 - DNA, 15 bp, Homo sapiens
cttattgttttttaa

SEQ ID NO: 1769895 - DNA, 15 bp, Homo sapiens
ttattgttttttaat

SEQ ID NO: 1769896 - DNA, 15 bp, Homo sapiens
tattgttttttaatg

SEQ ID NO: 1769897 - DNA, 15 bp, Homo sapiens
attgttttttaatgc

SEQ ID NO: 1769898 - DNA, 15 bp, Homo sapiens
ttgttttttaatgca

SEQ ID NO: 1769899 - DNA, 15 bp, Homo sapiens
tgttttttaatgcaa

SEQ ID NO: 1769900 - DNA, 15 bp, Homo sapiens
gttttttaatgcaat

SEQ ID NO: 1769901 - DNA, 15 bp, Homo sapiens
ttttttaatgcaatg

SEQ ID NO: 1769902 - DNA, 15 bp, Homo sapiens
tttttaatgcaatgg

SEQ ID NO: 1769903 - DNA, 15 bp, Homo sapiens
ttttaatgcaatggt

SEQ ID NO: 1769904 - DNA, 15 bp, Homo sapiens
tttaatgcaatggtt

SEQ ID NO: 1769905 - DNA, 15 bp, Homo sapiens
ttaatgcaatggttt

SEQ ID NO: 1769906 - DNA, 15 bp, Homo sapiens
taatgcaatggtttt

SEQ ID NO: 1769907 - DNA, 15 bp, Homo sapiens
aatgcaatggttttg

SEQ ID NO: 1769908 - DNA, 15 bp, Homo sapiens
atgcaatggttttgt

SEQ ID NO: 1769909 - DNA, 15 bp, Homo sapiens
tgcaatggttttgtt

SEQ ID NO: 1769910 - DNA, 15 bp, Homo sapiens
gcaatggttttgttt

SEQ ID NO: 1769911 - DNA, 15 bp, Homo sapiens
caatggttttgtttc

SEQ ID NO: 1769912 - DNA, 15 bp, Homo sapiens
aatggttttgtttcc

SEQ ID NO: 1769913 - DNA, 15 bp, Homo sapiens
atggttttgtttcca

SEQ ID NO: 1769914 - DNA, 15 bp, Homo sapiens
tggttttgtttccat

SEQ ID NO: 1769915 - DNA, 15 bp, Homo sapiens
ggttttgtttccatt

SEQ ID NO: 1769916 - DNA, 15 bp, Homo sapiens
gttttgtttccattt

SEQ ID NO: 1769917 - DNA, 15 bp, Homo sapiens
ttttgtttccatttt

SEQ ID NO: 1769918 - DNA, 15 bp, Homo sapiens
tttgtttccattttc

SEQ ID NO: 1769919 - DNA, 15 bp, Homo sapiens
ttgtttccattttca

SEQ ID NO: 1769920 - DNA, 15 bp, Homo sapiens
tgtttccattttcat

SEQ ID NO: 1769921 - DNA, 15 bp, Homo sapiens
gtttccattttcata

SEQ ID NO: 1769922 - DNA, 15 bp, Homo sapiens
tttccattttcataa

SEQ ID NO: 1769923 - DNA, 15 bp, Homo sapiens
ttccattttcataac

SEQ ID NO: 1769924 - DNA, 15 bp, Homo sapiens
tccattttcataaca

SEQ ID NO: 1769925 - DNA, 15 bp, Homo sapiens
ccattttcataacac

SEQ ID NO: 1769926 - DNA, 15 bp, Homo sapiens
cattttcataacacg

SEQ ID NO: 1769927 - DNA, 15 bp, Homo sapiens
attttcataacacgg

SEQ ID NO: 1769928 - DNA, 15 bp, Homo sapiens
ttttcataacacggc

SEQ ID NO: 1769929 - DNA, 15 bp, Homo sapiens
tttcataacacggcc

SEQ ID NO: 1769930 - DNA, 15 bp, Homo sapiens
ttcataacacggcct

SEQ ID NO: 1769931 - DNA, 15 bp, Homo sapiens
tcataacacggcctt

SEQ ID NO: 1769932 - DNA, 15 bp, Homo sapiens
cataacacggcctta

SEQ ID NO: 1769933 - DNA, 15 bp, Homo sapiens
ataacacggccttat

SEQ ID NO: 1769934 - DNA, 15 bp, Homo sapiens
taacacggccttatt

SEQ ID NO: 1769935 - DNA, 15 bp, Homo sapiens
aacacggccttatta

SEQ ID NO: 1769936 - DNA, 15 bp, Homo sapiens
acacggccttattag

SEQ ID NO: 1769937 - DNA, 15 bp, Homo sapiens
cacggccttattagg

SEQ ID NO: 1769938 - DNA, 15 bp, Homo sapiens
acggccttattaggg

SEQ ID NO: 1769939 - DNA, 15 bp, Homo sapiens
cggccttattagggg

SEQ ID NO: 1769940 - DNA, 15 bp, Homo sapiens
ggccttattaggggt

SEQ ID NO: 1769941 - DNA, 15 bp, Homo sapiens
gccttattaggggtg

SEQ ID NO: 1769942 - DNA, 15 bp, Homo sapiens
ccttattaggggtgt

SEQ ID NO: 1769943 - DNA, 15 bp, Homo sapiens
cttattaggggtgtc

SEQ ID NO: 1769944 - DNA, 15 bp, Homo sapiens
ttattaggggtgtct

SEQ ID NO: 1769945 - DNA, 15 bp, Homo sapiens
tattaggggtgtctg

SEQ ID NO: 1769946 - DNA, 15 bp, Homo sapiens
attaggggtgtctgg

SEQ ID NO: 1769947 - DNA, 15 bp, Homo sapiens
ttaggggtgtctgga

SEQ ID NO: 1769948 - DNA, 15 bp, Homo sapiens
taggggtgtctggaa

SEQ ID NO: 1769949 - DNA, 15 bp, Homo sapiens
aggggtgtctggaaa

SEQ ID NO: 1769950 - DNA, 15 bp, Homo sapiens
ggggtgtctggaaac

SEQ ID NO: 1769951 - DNA, 15 bp, Homo sapiens
gggtgtctggaaaca

SEQ ID NO: 1769952 - DNA, 15 bp, Homo sapiens
ggtgtctggaaacaa

SEQ ID NO: 1769953 - DNA, 15 bp, Homo sapiens
gtgtctggaaacaaa

SEQ ID NO: 1769954 - DNA, 15 bp, Homo sapiens
tgtctggaaacaaaa

SEQ ID NO: 1769955 - DNA, 15 bp, Homo sapiens
gtctggaaacaaaac

SEQ ID NO: 1769956 - DNA, 15 bp, Homo sapiens
tctggaaacaaaact

SEQ ID NO: 1769957 - DNA, 15 bp, Homo sapiens
ctggaaacaaaactt

SEQ ID NO: 1769958 - DNA, 15 bp, Homo sapiens
tggaaacaaaactta

SEQ ID NO: 1769959 - DNA, 15 bp, Homo sapiens
ggaaacaaaacttat

SEQ ID NO: 1769960 - DNA, 15 bp, Homo sapiens
gaaacaaaacttatt

SEQ ID NO: 1769961 - DNA, 15 bp, Homo sapiens
aaacaaaacttatta

SEQ ID NO: 1769962 - DNA, 15 bp, Homo sapiens
aacaaaacttattac

SEQ ID NO: 1769963 - DNA, 15 bp, Homo sapiens
acaaaacttattacc

SEQ ID NO: 1769964 - DNA, 15 bp, Homo sapiens
caaaacttattacca

SEQ ID NO: 1769965 - DNA, 15 bp, Homo sapiens
aaaacttattaccat

SEQ ID NO: 1769966 - DNA, 15 bp, Homo sapiens
aaacttattaccata

SEQ ID NO: 1769967 - DNA, 15 bp, Homo sapiens
aacttattaccatat

SEQ ID NO: 1769968 - DNA, 15 bp, Homo sapiens
acttattaccatatg

SEQ ID NO: 1769969 - DNA, 15 bp, Homo sapiens
cttattaccatatga

SEQ ID NO: 1769970 - DNA, 15 bp, Homo sapiens
ttattaccatatgag

SEQ ID NO: 1769971 - DNA, 15 bp, Homo sapiens
tattaccatatgagt

SEQ ID NO: 1769972 - DNA, 15 bp, Homo sapiens
attaccatatgagta

SEQ ID NO: 1769973 - DNA, 15 bp, Homo sapiens
ttaccatatgagtat

SEQ ID NO: 1769974 - DNA, 15 bp, Homo sapiens
taccatatgagtatc

SEQ ID NO: 1769975 - DNA, 15 bp, Homo sapiens
accatatgagtatct

SEQ ID NO: 1769976 - DNA, 15 bp, Homo sapiens
ccatatgagtatctt

SEQ ID NO: 1769977 - DNA, 15 bp, Homo sapiens
catatgagtatcttc

SEQ ID NO: 1769978 - DNA, 15 bp, Homo sapiens
atatgagtatcttct

SEQ ID NO: 1769979 - DNA, 15 bp, Homo sapiens
tatgagtatcttctg

SEQ ID NO: 1769980 - DNA, 15 bp, Homo sapiens
atgagtatcttctgt

SEQ ID NO: 1769981 - DNA, 15 bp, Homo sapiens
tgagtatcttctgtc

SEQ ID NO: 1769982 - DNA, 15 bp, Homo sapiens
gagtatcttctgtct

SEQ ID NO: 1769983 - DNA, 15 bp, Homo sapiens
agtatcttctgtctc

SEQ ID NO: 1769984 - DNA, 15 bp, Homo sapiens
gtatcttctgtctct

SEQ ID NO: 1769985 - DNA, 15 bp, Homo sapiens
tatcttctgtctctt

SEQ ID NO: 1769986 - DNA, 15 bp, Homo sapiens
atcttctgtctcttt

SEQ ID NO: 1769987 - DNA, 15 bp, Homo sapiens
tcttctgtctctttc

SEQ ID NO: 1769988 - DNA, 15 bp, Homo sapiens
cttctgtctctttct

SEQ ID NO: 1769989 - DNA, 15 bp, Homo sapiens
ttctgtctctttctg

SEQ ID NO: 1769990 - DNA, 15 bp, Homo sapiens
tctgtctctttctgc

SEQ ID NO: 1769991 - DNA, 15 bp, Homo sapiens
ctgtctctttctgct

SEQ ID NO: 1769992 - DNA, 15 bp, Homo sapiens
tgtctctttctgctt

SEQ ID NO: 1769993 - DNA, 15 bp, Homo sapiens
gtctctttctgcttt

SEQ ID NO: 1769994 - DNA, 15 bp, Homo sapiens
tctctttctgctttc

SEQ ID NO: 1769995 - DNA, 15 bp, Homo sapiens
ctctttctgctttcc

SEQ ID NO: 1769996 - DNA, 15 bp, Homo sapiens
tctttctgctttccc

SEQ ID NO: 1769997 - DNA, 15 bp, Homo sapiens
ctttctgctttcccc

SEQ ID NO: 1769998 - DNA, 15 bp, Homo sapiens
tttctgctttccccc

SEQ ID NO: 1769999 - DNA, 15 bp, Homo sapiens
ttctgctttccccct

SEQ ID NO: 1770000 - DNA, 15 bp, Homo sapiens
tctgctttccccctg

SEQ ID NO: 1770001 - DNA, 15 bp, Homo sapiens
ctgctttccccctgg

SEQ ID NO: 1770002 - DNA, 15 bp, Homo sapiens
tgctttccccctggg

SEQ ID NO: 1770003 - DNA, 15 bp, Homo sapiens
gctttccccctgggg

SEQ ID NO: 1770004 - DNA, 15 bp, Homo sapiens
ctttccccctggggt

SEQ ID NO: 1770005 - DNA, 15 bp, Homo sapiens
tttccccctggggtt

SEQ ID NO: 1770006 - DNA, 15 bp, Homo sapiens
ttccccctggggttt

SEQ ID NO: 1770007 - DNA, 15 bp, Homo sapiens
tccccctggggtttc

SEQ ID NO: 1770008 - DNA, 15 bp, Homo sapiens
ccccctggggtttct

SEQ ID NO: 1770009 - DNA, 15 bp, Homo sapiens
cccctggggtttctg

SEQ ID NO: 1770010 - DNA, 15 bp, Homo sapiens
ccctggggtttctgc

SEQ ID NO: 1770011 - DNA, 15 bp, Homo sapiens
cctggggtttctgca

SEQ ID NO: 1770012 - DNA, 15 bp, Homo sapiens
ctggggtttctgcag

SEQ ID NO: 1770013 - DNA, 15 bp, Homo sapiens
tggggtttctgcagt

SEQ ID NO: 1770014 - DNA, 15 bp, Homo sapiens
ggggtttctgcagtt

SEQ ID NO: 1770015 - DNA, 15 bp, Homo sapiens
gggtttctgcagtta

SEQ ID NO: 1770016 - DNA, 15 bp, Homo sapiens
ggtttctgcagttag

SEQ ID NO: 1770017 - DNA, 15 bp, Homo sapiens
gtttctgcagttaga

SEQ ID NO: 1770018 - DNA, 15 bp, Homo sapiens
tttctgcagttagag

SEQ ID NO: 1770019 - DNA, 15 bp, Homo sapiens
ttctgcagttagagg

SEQ ID NO: 1770020 - DNA, 15 bp, Homo sapiens
tctgcagttagaggt

SEQ ID NO: 1770021 - DNA, 15 bp, Homo sapiens
ctgcagttagaggta

SEQ ID NO: 1770022 - DNA, 15 bp, Homo sapiens
tgcagttagaggtaa

SEQ ID NO: 1770023 - DNA, 15 bp, Homo sapiens
gcagttagaggtaat

SEQ ID NO: 1770024 - DNA, 15 bp, Homo sapiens
cagttagaggtaatc

SEQ ID NO: 1770025 - DNA, 15 bp, Homo sapiens
agttagaggtaatca

SEQ ID NO: 1770026 - DNA, 15 bp, Homo sapiens
gttagaggtaatcag

SEQ ID NO: 1770027 - DNA, 15 bp, Homo sapiens
ttagaggtaatcagt

SEQ ID NO: 1770028 - DNA, 15 bp, Homo sapiens
tagaggtaatcagta

SEQ ID NO: 1770029 - DNA, 15 bp, Homo sapiens
agaggtaatcagtac

SEQ ID NO: 1770030 - DNA, 15 bp, Homo sapiens
gaggtaatcagtaca

SEQ ID NO: 1770031 - DNA, 15 bp, Homo sapiens
aggtaatcagtacag

SEQ ID NO: 1770032 - DNA, 15 bp, Homo sapiens
ggtaatcagtacagg

SEQ ID NO: 1770033 - DNA, 15 bp, Homo sapiens
gtaatcagtacaggg

SEQ ID NO: 1770034 - DNA, 15 bp, Homo sapiens
taatcagtacagggg

SEQ ID NO: 1770035 - DNA, 15 bp, Homo sapiens
aatcagtacaggggg

SEQ ID NO: 1770036 - DNA, 15 bp, Homo sapiens
atcagtacaggggga

SEQ ID NO: 1770037 - DNA, 15 bp, Homo sapiens
tcagtacagggggac

SEQ ID NO: 1770038 - DNA, 15 bp, Homo sapiens
cagtacagggggaca

SEQ ID NO: 1770039 - DNA, 15 bp, Homo sapiens
agtacagggggacag

SEQ ID NO: 1770040 - DNA, 15 bp, Homo sapiens
gtacagggggacaga

SEQ ID NO: 1770041 - DNA, 15 bp, Homo sapiens
tacagggggacagaa

SEQ ID NO: 1770042 - DNA, 15 bp, Homo sapiens
acagggggacagaaa

SEQ ID NO: 1770043 - DNA, 15 bp, Homo sapiens
cagggggacagaaac

SEQ ID NO: 1770044 - DNA, 15 bp, Homo sapiens
agggggacagaaaca

SEQ ID NO: 1770045 - DNA, 15 bp, Homo sapiens
gggggacagaaacag

SEQ ID NO: 1770046 - DNA, 15 bp, Homo sapiens
ggggacagaaacaga

SEQ ID NO: 1770047 - DNA, 15 bp, Homo sapiens
gggacagaaacagat

SEQ ID NO: 1770048 - DNA, 15 bp, Homo sapiens
ggacagaaacagatt

SEQ ID NO: 1770049 - DNA, 15 bp, Homo sapiens
gacagaaacagattt

SEQ ID NO: 1770050 - DNA, 15 bp, Homo sapiens
acagaaacagatttg

SEQ ID NO: 1770051 - DNA, 15 bp, Homo sapiens
cagaaacagatttgt

SEQ ID NO: 1770052 - DNA, 15 bp, Homo sapiens
agaaacagatttgtg

SEQ ID NO: 1770053 - DNA, 15 bp, Homo sapiens
gaaacagatttgtga

SEQ ID NO: 1770054 - DNA, 15 bp, Homo sapiens
aaacagatttgtgaa

SEQ ID NO: 1770055 - DNA, 15 bp, Homo sapiens
aacagatttgtgaac

SEQ ID NO: 1770056 - DNA, 15 bp, Homo sapiens
acagatttgtgaaca

SEQ ID NO: 1770057 - DNA, 15 bp, Homo sapiens
cagatttgtgaacag

SEQ ID NO: 1770058 - DNA, 15 bp, Homo sapiens
agatttgtgaacagg

SEQ ID NO: 1770059 - DNA, 15 bp, Homo sapiens
gatttgtgaacaggt

SEQ ID NO: 1770060 - DNA, 15 bp, Homo sapiens
atttgtgaacaggtc

SEQ ID NO: 1770061 - DNA, 15 bp, Homo sapiens
tttgtgaacaggtct

SEQ ID NO: 1770062 - DNA, 15 bp, Homo sapiens
ttgtgaacaggtctc

SEQ ID NO: 1770063 - DNA, 15 bp, Homo sapiens
tgtgaacaggtctct

SEQ ID NO: 1770064 - DNA, 15 bp, Homo sapiens
gtgaacaggtctctg

SEQ ID NO: 1770065 - DNA, 15 bp, Homo sapiens
tgaacaggtctctgg

SEQ ID NO: 1770066 - DNA, 15 bp, Homo sapiens
gaacaggtctctgga

SEQ ID NO: 1770067 - DNA, 15 bp, Homo sapiens
aacaggtctctggag

SEQ ID NO: 1770068 - DNA, 15 bp, Homo sapiens
acaggtctctggaga

SEQ ID NO: 1770069 - DNA, 15 bp, Homo sapiens
caggtctctggagag

SEQ ID NO: 1770070 - DNA, 15 bp, Homo sapiens
aggtctctggagagg

SEQ ID NO: 1770071 - DNA, 15 bp, Homo sapiens
ggtctctggagagga

SEQ ID NO: 1770072 - DNA, 15 bp, Homo sapiens
gtctctggagaggag

SEQ ID NO: 1770073 - DNA, 15 bp, Homo sapiens
tctctggagaggaga

SEQ ID NO: 1770074 - DNA, 15 bp, Homo sapiens
ctctggagaggagat

SEQ ID NO: 1770075 - DNA, 15 bp, Homo sapiens
tctggagaggagata

SEQ ID NO: 1770076 - DNA, 15 bp, Homo sapiens
ctggagaggagataa

SEQ ID NO: 1770077 - DNA, 15 bp, Homo sapiens
tggagaggagataag

SEQ ID NO: 1770078 - DNA, 15 bp, Homo sapiens
ggagaggagataagc

SEQ ID NO: 1770079 - DNA, 15 bp, Homo sapiens
gagaggagataagct

SEQ ID NO: 1770080 - DNA, 15 bp, Homo sapiens
agaggagataagctg

SEQ ID NO: 1770081 - DNA, 15 bp, Homo sapiens
gaggagataagctga

SEQ ID NO: 1770082 - DNA, 15 bp, Homo sapiens
aggagataagctgag

SEQ ID NO: 1770083 - DNA, 15 bp, Homo sapiens
ggagataagctgagg

SEQ ID NO: 1770084 - DNA, 15 bp, Homo sapiens
gagataagctgagga

SEQ ID NO: 1770085 - DNA, 15 bp, Homo sapiens
agataagctgaggaa

SEQ ID NO: 1770086 - DNA, 15 bp, Homo sapiens
gataagctgaggaag

SEQ ID NO: 1770087 - DNA, 15 bp, Homo sapiens
ataagctgaggaagg

SEQ ID NO: 1770088 - DNA, 15 bp, Homo sapiens
taagctgaggaagga

SEQ ID NO: 1770089 - DNA, 15 bp, Homo sapiens
aagctgaggaaggaa

SEQ ID NO: 1770090 - DNA, 15 bp, Homo sapiens
agctgaggaaggaaa

SEQ ID NO: 1770091 - DNA, 15 bp, Homo sapiens
gctgaggaaggaaag

SEQ ID NO: 1770092 - DNA, 15 bp, Homo sapiens
ctgaggaaggaaaga

SEQ ID NO: 1770093 - DNA, 15 bp, Homo sapiens
tgaggaaggaaagac

SEQ ID NO: 1770094 - DNA, 15 bp, Homo sapiens
gaggaaggaaagaca

SEQ ID NO: 1770095 - DNA, 15 bp, Homo sapiens
aggaaggaaagacag

SEQ ID NO: 1770096 - DNA, 15 bp, Homo sapiens
ggaaggaaagacagt

SEQ ID NO: 1770097 - DNA, 15 bp, Homo sapiens
gaaggaaagacagtg

SEQ ID NO: 1770098 - DNA, 15 bp, Homo sapiens
aaggaaagacagtga

SEQ ID NO: 1770099 - DNA, 15 bp, Homo sapiens
aggaaagacagtgag

SEQ ID NO: 1770100 - DNA, 15 bp, Homo sapiens
ggaaagacagtgagg

SEQ ID NO: 1770101 - DNA, 15 bp, Homo sapiens
gaaagacagtgaggg

SEQ ID NO: 1770102 - DNA, 15 bp, Homo sapiens
aaagacagtgaggga

SEQ ID NO: 1770103 - DNA, 15 bp, Homo sapiens
aagacagtgagggag

SEQ ID NO: 1770104 - DNA, 15 bp, Homo sapiens
agacagtgagggagg

SEQ ID NO: 1770105 - DNA, 15 bp, Homo sapiens
gacagtgagggagga

SEQ ID NO: 1770106 - DNA, 15 bp, Homo sapiens
acagtgagggaggaa

SEQ ID NO: 1770107 - DNA, 15 bp, Homo sapiens
cagtgagggaggaaa

SEQ ID NO: 1770108 - DNA, 15 bp, Homo sapiens
agtgagggaggaaaa

SEQ ID NO: 1770109 - DNA, 15 bp, Homo sapiens
gtgagggaggaaaaa

SEQ ID NO: 1770110 - DNA, 15 bp, Homo sapiens
tgagggaggaaaaaa

SEQ ID NO: 1770111 - DNA, 15 bp, Homo sapiens
gagggaggaaaaaag

SEQ ID NO: 1770112 - DNA, 15 bp, Homo sapiens
agggaggaaaaaagc

SEQ ID NO: 1770113 - DNA, 15 bp, Homo sapiens
gggaggaaaaaagcc

SEQ ID NO: 1770114 - DNA, 15 bp, Homo sapiens
ggaggaaaaaagcca

SEQ ID NO: 1770115 - DNA, 15 bp, Homo sapiens
gaggaaaaaagccaa

SEQ ID NO: 1770116 - DNA, 15 bp, Homo sapiens
aggaaaaaagccaag

SEQ ID NO: 1770117 - DNA, 15 bp, Homo sapiens
ggaaaaaagccaagc

SEQ ID NO: 1770118 - DNA, 15 bp, Homo sapiens
gaaaaaagccaagct

SEQ ID NO: 1770119 - DNA, 15 bp, Homo sapiens
aaaaaagccaagctt

SEQ ID NO: 1770120 - DNA, 15 bp, Homo sapiens
aaaaagccaagcttc

SEQ ID NO: 1770121 - DNA, 15 bp, Homo sapiens
aaaagccaagcttct

SEQ ID NO: 1770122 - DNA, 15 bp, Homo sapiens
aaagccaagcttctt

SEQ ID NO: 1770123 - DNA, 15 bp, Homo sapiens
aagccaagcttcttg

SEQ ID NO: 1770124 - DNA, 15 bp, Homo sapiens
agccaagcttcttga

SEQ ID NO: 1770125 - DNA, 15 bp, Homo sapiens
gccaagcttcttgat

SEQ ID NO: 1770126 - DNA, 15 bp, Homo sapiens
ccaagcttcttgatt

SEQ ID NO: 1770127 - DNA, 15 bp, Homo sapiens
caagcttcttgatta

SEQ ID NO: 1770128 - DNA, 15 bp, Homo sapiens
aagcttcttgattag

SEQ ID NO: 1770129 - DNA, 15 bp, Homo sapiens
agcttcttgattaga

SEQ ID NO: 1770130 - DNA, 15 bp, Homo sapiens
gcttcttgattagaa

SEQ ID NO: 1770131 - DNA, 15 bp, Homo sapiens
ttcttgattagaaat

SEQ ID NO: 1770132 - DNA, 15 bp, Homo sapiens
tcttgattagaaatt

SEQ ID NO: 1770133 - DNA, 15 bp, Homo sapiens
cttgattagaaattc

SEQ ID NO: 1770134 - DNA, 15 bp, Homo sapiens
ttgattagaaattca

SEQ ID NO: 1770135 - DNA, 15 bp, Homo sapiens
tgattagaaattcag

SEQ ID NO: 1770136 - DNA, 15 bp, Homo sapiens
gattagaaattcagt

SEQ ID NO: 1770137 - DNA, 15 bp, Homo sapiens
attagaaattcagta

SEQ ID NO: 1770138 - DNA, 15 bp, Homo sapiens
ttagaaattcagtaa

SEQ ID NO: 1770139 - DNA, 15 bp, Homo sapiens
tagaaattcagtaaa

SEQ ID NO: 1770140 - DNA, 15 bp, Homo sapiens
agaaattcagtaaag

SEQ ID NO: 1770141 - DNA, 15 bp, Homo sapiens
gaaattcagtaaaga

SEQ ID NO: 1770142 - DNA, 15 bp, Homo sapiens
aaattcagtaaagaa

SEQ ID NO: 1770143 - DNA, 15 bp, Homo sapiens
aattcagtaaagaat

SEQ ID NO: 1770144 - DNA, 15 bp, Homo sapiens
attcagtaaagaatt

SEQ ID NO: 1770145 - DNA, 15 bp, Homo sapiens
ttcagtaaagaattt

SEQ ID NO: 1770146 - DNA, 15 bp, Homo sapiens
tcagtaaagaatttt

SEQ ID NO: 1770147 - DNA, 15 bp, Homo sapiens
cagtaaagaattttt

SEQ ID NO: 1770148 - DNA, 15 bp, Homo sapiens
agtaaagaatttttt

SEQ ID NO: 1770149 - DNA, 15 bp, Homo sapiens
gtaaagaattttttt

SEQ ID NO: 1770150 - DNA, 15 bp, Homo sapiens
taaagaatttttttt

SEQ ID NO: 1770151 - DNA, 15 bp, Homo sapiens
aagaattttttttag

SEQ ID NO: 1770152 - DNA, 15 bp, Homo sapiens
agaattttttttagt

SEQ ID NO: 1770153 - DNA, 15 bp, Homo sapiens
gaattttttttagtc

SEQ ID NO: 1770154 - DNA, 15 bp, Homo sapiens
aattttttttagtcg

SEQ ID NO: 1770155 - DNA, 15 bp, Homo sapiens
attttttttagtcgt

SEQ ID NO: 1770156 - DNA, 15 bp, Homo sapiens
ttttttttagtcgtt

SEQ ID NO: 1770157 - DNA, 15 bp, Homo sapiens
tttttttagtcgtta

SEQ ID NO: 1770158 - DNA, 15 bp, Homo sapiens
ttttttagtcgttat

SEQ ID NO: 1770159 - DNA, 15 bp, Homo sapiens
tttttagtcgttatt

SEQ ID NO: 1770160 - DNA, 15 bp, Homo sapiens
ttttagtcgttattg

SEQ ID NO: 1770161 - DNA, 15 bp, Homo sapiens
tttagtcgttattgt

SEQ ID NO: 1770162 - DNA, 15 bp, Homo sapiens
ttagtcgttattgtt

SEQ ID NO: 1770163 - DNA, 15 bp, Homo sapiens
tagtcgttattgttt

SEQ ID NO: 1770164 - DNA, 15 bp, Homo sapiens
agtcgttattgtttt

SEQ ID NO: 1770165 - DNA, 15 bp, Homo sapiens
gtcgttattgttttg

SEQ ID NO: 1770166 - DNA, 15 bp, Homo sapiens
tcgttattgttttgg

SEQ ID NO: 1770167 - DNA, 15 bp, Homo sapiens
cgttattgttttggg

SEQ ID NO: 1770168 - DNA, 15 bp, Homo sapiens
gttattgttttggga

SEQ ID NO: 1770169 - DNA, 15 bp, Homo sapiens
ttattgttttgggag

SEQ ID NO: 1770170 - DNA, 15 bp, Homo sapiens
tattgttttgggaga

SEQ ID NO: 1770171 - DNA, 15 bp, Homo sapiens
attgttttgggagag

SEQ ID NO: 1770172 - DNA, 15 bp, Homo sapiens
ttgttttgggagagt

SEQ ID NO: 1770173 - DNA, 15 bp, Homo sapiens
tgttttgggagagtt

SEQ ID NO: 1770174 - DNA, 15 bp, Homo sapiens
gttttgggagagttg

SEQ ID NO: 1770175 - DNA, 15 bp, Homo sapiens
ttttgggagagttga

SEQ ID NO: 1770176 - DNA, 15 bp, Homo sapiens
tttgggagagttgag

SEQ ID NO: 1770177 - DNA, 15 bp, Homo sapiens
ttgggagagttgaga

SEQ ID NO: 1770178 - DNA, 15 bp, Homo sapiens
tgggagagttgagaa

SEQ ID NO: 1770179 - DNA, 15 bp, Homo sapiens
gggagagttgagaat

SEQ ID NO: 1770180 - DNA, 15 bp, Homo sapiens
ggagagttgagaatg

SEQ ID NO: 1770181 - DNA, 15 bp, Homo sapiens
gagagttgagaatga

SEQ ID NO: 1770182 - DNA, 15 bp, Homo sapiens
agagttgagaatgag

SEQ ID NO: 1770183 - DNA, 15 bp, Homo sapiens
gagttgagaatgagg

SEQ ID NO: 1770184 - DNA, 15 bp, Homo sapiens
agttgagaatgagga

SEQ ID NO: 1770185 - DNA, 15 bp, Homo sapiens
gttgagaatgaggag

SEQ ID NO: 1770186 - DNA, 15 bp, Homo sapiens
ttgagaatgaggagg

SEQ ID NO: 1770187 - DNA, 15 bp, Homo sapiens
tgagaatgaggagga

SEQ ID NO: 1770188 - DNA, 15 bp, Homo sapiens
gagaatgaggaggaa

SEQ ID NO: 1770189 - DNA, 15 bp, Homo sapiens
agaatgaggaggaaa

SEQ ID NO: 1770190 - DNA, 15 bp, Homo sapiens
gaatgaggaggaaaa

SEQ ID NO: 1770191 - DNA, 15 bp, Homo sapiens
aatgaggaggaaaaa

SEQ ID NO: 1770192 - DNA, 15 bp, Homo sapiens
atgaggaggaaaaac

SEQ ID NO: 1770193 - DNA, 15 bp, Homo sapiens
tgaggaggaaaaacg

SEQ ID NO: 1770194 - DNA, 15 bp, Homo sapiens
gaggaggaaaaacgg

SEQ ID NO: 1770195 - DNA, 15 bp, Homo sapiens
aggaggaaaaacggt

SEQ ID NO: 1770196 - DNA, 15 bp, Homo sapiens
ggaggaaaaacggtt

SEQ ID NO: 1770197 - DNA, 15 bp, Homo sapiens
gaggaaaaacggttt

SEQ ID NO: 1770198 - DNA, 15 bp, Homo sapiens
aggaaaaacggtttc

SEQ ID NO: 1770199 - DNA, 15 bp, Homo sapiens
ggaaaaacggtttca

SEQ ID NO: 1770200 - DNA, 15 bp, Homo sapiens
gaaaaacggtttcag

SEQ ID NO: 1770201 - DNA, 15 bp, Homo sapiens
aaaaacggtttcagg

SEQ ID NO: 1770202 - DNA, 15 bp, Homo sapiens
aaaacggtttcaggg

SEQ ID NO: 1770203 - DNA, 15 bp, Homo sapiens
aaacggtttcaggga

SEQ ID NO: 1770204 - DNA, 15 bp, Homo sapiens
aacggtttcagggag

SEQ ID NO: 1770205 - DNA, 15 bp, Homo sapiens
acggtttcagggagt

SEQ ID NO: 1770206 - DNA, 15 bp, Homo sapiens
cggtttcagggagtt

SEQ ID NO: 1770207 - DNA, 15 bp, Homo sapiens
ggtttcagggagtta

SEQ ID NO: 1770208 - DNA, 15 bp, Homo sapiens
gtttcagggagttac

SEQ ID NO: 1770209 - DNA, 15 bp, Homo sapiens
tttcagggagttaca

SEQ ID NO: 1770210 - DNA, 15 bp, Homo sapiens
ttcagggagttacag

SEQ ID NO: 1770211 - DNA, 15 bp, Homo sapiens
tcagggagttacagg

SEQ ID NO: 1770212 - DNA, 15 bp, Homo sapiens
cagggagttacaggc

SEQ ID NO: 1770213 - DNA, 15 bp, Homo sapiens
agggagttacaggct

SEQ ID NO: 1770214 - DNA, 15 bp, Homo sapiens
gggagttacaggctt

SEQ ID NO: 1770215 - DNA, 15 bp, Homo sapiens
ggagttacaggcttt

SEQ ID NO: 1770216 - DNA, 15 bp, Homo sapiens
gagttacaggcttta

SEQ ID NO: 1770217 - DNA, 15 bp, Homo sapiens
agttacaggctttaa

SEQ ID NO: 1770218 - DNA, 15 bp, Homo sapiens
gttacaggctttaag

SEQ ID NO: 1770219 - DNA, 15 bp, Homo sapiens
ttacaggctttaagt

SEQ ID NO: 1770220 - DNA, 15 bp, Homo sapiens
tacaggctttaagta

SEQ ID NO: 1770221 - DNA, 15 bp, Homo sapiens
acaggctttaagtac

SEQ ID NO: 1770222 - DNA, 15 bp, Homo sapiens
caggctttaagtaca

SEQ ID NO: 1770223 - DNA, 15 bp, Homo sapiens
aggctttaagtacag

SEQ ID NO: 1770224 - DNA, 15 bp, Homo sapiens
ggctttaagtacagc

SEQ ID NO: 1770225 - DNA, 15 bp, Homo sapiens
gctttaagtacagcg

SEQ ID NO: 1770226 - DNA, 15 bp, Homo sapiens
ctttaagtacagcga

SEQ ID NO: 1770227 - DNA, 15 bp, Homo sapiens
tttaagtacagcgaa

SEQ ID NO: 1770228 - DNA, 15 bp, Homo sapiens
ttaagtacagcgaag

SEQ ID NO: 1770229 - DNA, 15 bp, Homo sapiens
taagtacagcgaaga

SEQ ID NO: 1770230 - DNA, 15 bp, Homo sapiens
aagtacagcgaagag

SEQ ID NO: 1770231 - DNA, 15 bp, Homo sapiens
agtacagcgaagaga

SEQ ID NO: 1770232 - DNA, 15 bp, Homo sapiens
gtacagcgaagagaa

SEQ ID NO: 1770233 - DNA, 15 bp, Homo sapiens
tacagcgaagagaat

SEQ ID NO: 1770234 - DNA, 15 bp, Homo sapiens
acagcgaagagaatt

SEQ ID NO: 1770235 - DNA, 15 bp, Homo sapiens
cagcgaagagaattg

SEQ ID NO: 1770236 - DNA, 15 bp, Homo sapiens
agcgaagagaattgg

SEQ ID NO: 1770237 - DNA, 15 bp, Homo sapiens
gcgaagagaattgga

SEQ ID NO: 1770238 - DNA, 15 bp, Homo sapiens
cgaagagaattggaa

SEQ ID NO: 1770239 - DNA, 15 bp, Homo sapiens
gaagagaattggaag

SEQ ID NO: 1770240 - DNA, 15 bp, Homo sapiens
aagagaattggaaga

SEQ ID NO: 1770241 - DNA, 15 bp, Homo sapiens
agagaattggaagaa

SEQ ID NO: 1770242 - DNA, 15 bp, Homo sapiens
gagaattggaagaaa

SEQ ID NO: 1770243 - DNA, 15 bp, Homo sapiens
agaattggaagaaag

SEQ ID NO: 1770244 - DNA, 15 bp, Homo sapiens
gaattggaagaaagg

SEQ ID NO: 1770245 - DNA, 15 bp, Homo sapiens
aattggaagaaaggg

SEQ ID NO: 1770246 - DNA, 15 bp, Homo sapiens
attggaagaaaggga

SEQ ID NO: 1770247 - DNA, 15 bp, Homo sapiens
ttggaagaaagggaa

SEQ ID NO: 1770248 - DNA, 15 bp, Homo sapiens
tggaagaaagggaat

SEQ ID NO: 1770249 - DNA, 15 bp, Homo sapiens
ggaagaaagggaatt

SEQ ID NO: 1770250 - DNA, 15 bp, Homo sapiens
gaagaaagggaattt

SEQ ID NO: 1770251 - DNA, 15 bp, Homo sapiens
aagaaagggaatttt

SEQ ID NO: 1770252 - DNA, 15 bp, Homo sapiens
agaaagggaatttta

SEQ ID NO: 1770253 - DNA, 15 bp, Homo sapiens
gaaagggaattttaa

SEQ ID NO: 1770254 - DNA, 15 bp, Homo sapiens
aaagggaattttaaa

SEQ ID NO: 1770255 - DNA, 15 bp, Homo sapiens
aagggaattttaaat

SEQ ID NO: 1770256 - DNA, 15 bp, Homo sapiens
agggaattttaaatg

SEQ ID NO: 1770257 - DNA, 15 bp, Homo sapiens
gggaattttaaatgt

SEQ ID NO: 1770258 - DNA, 15 bp, Homo sapiens
ggaattttaaatgtg

SEQ ID NO: 1770259 - DNA, 15 bp, Homo sapiens
gaattttaaatgtgg

SEQ ID NO: 1770260 - DNA, 15 bp, Homo sapiens
aattttaaatgtggc

SEQ ID NO: 1770261 - DNA, 15 bp, Homo sapiens
attttaaatgtggct

SEQ ID NO: 1770262 - DNA, 15 bp, Homo sapiens
ttttaaatgtggctg

SEQ ID NO: 1770263 - DNA, 15 bp, Homo sapiens
tttaaatgtggctgg

SEQ ID NO: 1770264 - DNA, 15 bp, Homo sapiens
ttaaatgtggctggg

SEQ ID NO: 1770265 - DNA, 15 bp, Homo sapiens
taaatgtggctgggg

SEQ ID NO: 1770266 - DNA, 15 bp, Homo sapiens
aaatgtggctggggg

SEQ ID NO: 1770267 - DNA, 15 bp, Homo sapiens
aatgtggctgggggt

SEQ ID NO: 1770268 - DNA, 15 bp, Homo sapiens
atgtggctgggggtt

SEQ ID NO: 1770269 - DNA, 15 bp, Homo sapiens
tgtggctgggggtta

SEQ ID NO: 1770270 - DNA, 15 bp, Homo sapiens
gtggctgggggttat

SEQ ID NO: 1770271 - DNA, 15 bp, Homo sapiens
tggctgggggttata

SEQ ID NO: 1770272 - DNA, 15 bp, Homo sapiens
ggctgggggttataa

SEQ ID NO: 1770273 - DNA, 15 bp, Homo sapiens
gctgggggttataaa

SEQ ID NO: 1770274 - DNA, 15 bp, Homo sapiens
ctgggggttataaat

SEQ ID NO: 1770275 - DNA, 15 bp, Homo sapiens
tgggggttataaatt

SEQ ID NO: 1770276 - DNA, 15 bp, Homo sapiens
gggggttataaattg

SEQ ID NO: 1770277 - DNA, 15 bp, Homo sapiens
ggggttataaattgg

SEQ ID NO: 1770278 - DNA, 15 bp, Homo sapiens
gggttataaattggg

SEQ ID NO: 1770279 - DNA, 15 bp, Homo sapiens
ggttataaattgggt

SEQ ID NO: 1770280 - DNA, 15 bp, Homo sapiens
gttataaattgggtc

SEQ ID NO: 1770281 - DNA, 15 bp, Homo sapiens
ttataaattgggtcc

SEQ ID NO: 1770282 - DNA, 15 bp, Homo sapiens
tataaattgggtccc

SEQ ID NO: 1770283 - DNA, 15 bp, Homo sapiens
ataaattgggtcccc

SEQ ID NO: 1770284 - DNA, 15 bp, Homo sapiens
taaattgggtcccca

SEQ ID NO: 1770285 - DNA, 15 bp, Homo sapiens
aaattgggtccccat

SEQ ID NO: 1770286 - DNA, 15 bp, Homo sapiens
aattgggtccccatt

SEQ ID NO: 1770287 - DNA, 15 bp, Homo sapiens
attgggtccccatta

SEQ ID NO: 1770288 - DNA, 15 bp, Homo sapiens
ttgggtccccattaa

SEQ ID NO: 1770289 - DNA, 15 bp, Homo sapiens
tgggtccccattaaa

SEQ ID NO: 1770290 - DNA, 15 bp, Homo sapiens
gggtccccattaaag

SEQ ID NO: 1770291 - DNA, 15 bp, Homo sapiens
ggtccccattaaagt

SEQ ID NO: 1770292 - DNA, 15 bp, Homo sapiens
gtccccattaaagtc

SEQ ID NO: 1770293 - DNA, 15 bp, Homo sapiens
tccccattaaagtcc

SEQ ID NO: 1770294 - DNA, 15 bp, Homo sapiens
ccccattaaagtcct

SEQ ID NO: 1770295 - DNA, 15 bp, Homo sapiens
cccattaaagtcctt

SEQ ID NO: 1770296 - DNA, 15 bp, Homo sapiens
ccattaaagtcctta

SEQ ID NO: 1770297 - DNA, 15 bp, Homo sapiens
cattaaagtccttaa

SEQ ID NO: 1770298 - DNA, 15 bp, Homo sapiens
attaaagtccttaaa

SEQ ID NO: 1770299 - DNA, 15 bp, Homo sapiens
ttaaagtccttaaag

SEQ ID NO: 1770300 - DNA, 15 bp, Homo sapiens
taaagtccttaaaga

SEQ ID NO: 1770301 - DNA, 15 bp, Homo sapiens
aaagtccttaaagaa

SEQ ID NO: 1770302 - DNA, 15 bp, Homo sapiens
aagtccttaaagaaa

SEQ ID NO: 1770303 - DNA, 15 bp, Homo sapiens
agtccttaaagaaat

SEQ ID NO: 1770304 - DNA, 15 bp, Homo sapiens
gtccttaaagaaatt

SEQ ID NO: 1770305 - DNA, 15 bp, Homo sapiens
tccttaaagaaattc

SEQ ID NO: 1770306 - DNA, 15 bp, Homo sapiens
ccttaaagaaattca

SEQ ID NO: 1770307 - DNA, 15 bp, Homo sapiens
cttaaagaaattcaa

SEQ ID NO: 1770308 - DNA, 15 bp, Homo sapiens
ttaaagaaattcaag

SEQ ID NO: 1770309 - DNA, 15 bp, Homo sapiens
taaagaaattcaagt

SEQ ID NO: 1770310 - DNA, 15 bp, Homo sapiens
aaagaaattcaagta

SEQ ID NO: 1770311 - DNA, 15 bp, Homo sapiens
aagaaattcaagtaa

SEQ ID NO: 1770312 - DNA, 15 bp, Homo sapiens
agaaattcaagtaaa

SEQ ID NO: 1770313 - DNA, 15 bp, Homo sapiens
gaaattcaagtaaag

SEQ ID NO: 1770314 - DNA, 15 bp, Homo sapiens
aaattcaagtaaaga

SEQ ID NO: 1770315 - DNA, 15 bp, Homo sapiens
aattcaagtaaagat

SEQ ID NO: 1770316 - DNA, 15 bp, Homo sapiens
attcaagtaaagatt

SEQ ID NO: 1770317 - DNA, 15 bp, Homo sapiens
ttcaagtaaagattg

SEQ ID NO: 1770318 - DNA, 15 bp, Homo sapiens
tcaagtaaagattgg

SEQ ID NO: 1770319 - DNA, 15 bp, Homo sapiens
caagtaaagattgga

SEQ ID NO: 1770320 - DNA, 15 bp, Homo sapiens
aagtaaagattggaa

SEQ ID NO: 1770321 - DNA, 15 bp, Homo sapiens
agtaaagattggaat

SEQ ID NO: 1770322 - DNA, 15 bp, Homo sapiens
gtaaagattggaatt

SEQ ID NO: 1770323 - DNA, 15 bp, Homo sapiens
taaagattggaatta

SEQ ID NO: 1770324 - DNA, 15 bp, Homo sapiens
aaagattggaattat

SEQ ID NO: 1770325 - DNA, 15 bp, Homo sapiens
aagattggaattatt

SEQ ID NO: 1770326 - DNA, 15 bp, Homo sapiens
agattggaattattt

SEQ ID NO: 1770327 - DNA, 15 bp, Homo sapiens
gattggaattatttt

SEQ ID NO: 1770328 - DNA, 15 bp, Homo sapiens
attggaattattttt

SEQ ID NO: 1770329 - DNA, 15 bp, Homo sapiens
ttggaattattttta

SEQ ID NO: 1770330 - DNA, 15 bp, Homo sapiens
tggaattatttttaa

SEQ ID NO: 1770331 - DNA, 15 bp, Homo sapiens
ggaattatttttaat

SEQ ID NO: 1770332 - DNA, 15 bp, Homo sapiens
gaattatttttaatt

SEQ ID NO: 1770333 - DNA, 15 bp, Homo sapiens
aattatttttaatta

SEQ ID NO: 1770334 - DNA, 15 bp, Homo sapiens
attatttttaattac

SEQ ID NO: 1770335 - DNA, 15 bp, Homo sapiens
ttatttttaattact

SEQ ID NO: 1770336 - DNA, 15 bp, Homo sapiens
tatttttaattactt

SEQ ID NO: 1770337 - DNA, 15 bp, Homo sapiens
atttttaattacttc

SEQ ID NO: 1770338 - DNA, 15 bp, Homo sapiens
tttttaattacttct

SEQ ID NO: 1770339 - DNA, 15 bp, Homo sapiens
ttttaattacttctg

SEQ ID NO: 1770340 - DNA, 15 bp, Homo sapiens
tttaattacttctga

SEQ ID NO: 1770341 - DNA, 15 bp, Homo sapiens
ttaattacttctgaa

SEQ ID NO: 1770342 - DNA, 15 bp, Homo sapiens
taattacttctgaag

SEQ ID NO: 1770343 - DNA, 15 bp, Homo sapiens
aattacttctgaagg

SEQ ID NO: 1770344 - DNA, 15 bp, Homo sapiens
attacttctgaaggc

SEQ ID NO: 1770345 - DNA, 15 bp, Homo sapiens
ttacttctgaaggct

SEQ ID NO: 1770346 - DNA, 15 bp, Homo sapiens
tacttctgaaggctg

SEQ ID NO: 1770347 - DNA, 15 bp, Homo sapiens
acttctgaaggctgg

SEQ ID NO: 1770348 - DNA, 15 bp, Homo sapiens
cttctgaaggctgga

SEQ ID NO: 1770349 - DNA, 15 bp, Homo sapiens
ttctgaaggctggat

SEQ ID NO: 1770350 - DNA, 15 bp, Homo sapiens
tctgaaggctggatt

SEQ ID NO: 1770351 - DNA, 15 bp, Homo sapiens
ctgaaggctggatta

SEQ ID NO: 1770352 - DNA, 15 bp, Homo sapiens
tgaaggctggattat

SEQ ID NO: 1770353 - DNA, 15 bp, Homo sapiens
gaaggctggattata

SEQ ID NO: 1770354 - DNA, 15 bp, Homo sapiens
aaggctggattatat

SEQ ID NO: 1770355 - DNA, 15 bp, Homo sapiens
aggctggattatatg

SEQ ID NO: 1770356 - DNA, 15 bp, Homo sapiens
ggctggattatatgt

SEQ ID NO: 1770357 - DNA, 15 bp, Homo sapiens
gctggattatatgtc

SEQ ID NO: 1770358 - DNA, 15 bp, Homo sapiens
ctggattatatgtct

SEQ ID NO: 1770359 - DNA, 15 bp, Homo sapiens
tggattatatgtctt

SEQ ID NO: 1770360 - DNA, 15 bp, Homo sapiens
ggattatatgtcttt

SEQ ID NO: 1770361 - DNA, 15 bp, Homo sapiens
gattatatgtctttg

SEQ ID NO: 1770362 - DNA, 15 bp, Homo sapiens
attatatgtctttga

SEQ ID NO: 1770363 - DNA, 15 bp, Homo sapiens
ttatatgtctttgat

SEQ ID NO: 1770364 - DNA, 15 bp, Homo sapiens
tatatgtctttgatg

SEQ ID NO: 1770365 - DNA, 15 bp, Homo sapiens
atatgtctttgatgt

SEQ ID NO: 1770366 - DNA, 15 bp, Homo sapiens
tatgtctttgatgtg

SEQ ID NO: 1770367 - DNA, 15 bp, Homo sapiens
atgtctttgatgtgg

SEQ ID NO: 1770368 - DNA, 15 bp, Homo sapiens
tgtctttgatgtgga

SEQ ID NO: 1770369 - DNA, 15 bp, Homo sapiens
gtctttgatgtggac

SEQ ID NO: 1770370 - DNA, 15 bp, Homo sapiens
tctttgatgtggact

SEQ ID NO: 1770371 - DNA, 15 bp, Homo sapiens
ctttgatgtggactc

SEQ ID NO: 1770372 - DNA, 15 bp, Homo sapiens
tttgatgtggactca

SEQ ID NO: 1770373 - DNA, 15 bp, Homo sapiens
ttgatgtggactcac

SEQ ID NO: 1770374 - DNA, 15 bp, Homo sapiens
tgatgtggactcaca

SEQ ID NO: 1770375 - DNA, 15 bp, Homo sapiens
gatgtggactcacac

SEQ ID NO: 1770376 - DNA, 15 bp, Homo sapiens
atgtggactcacact

SEQ ID NO: 1770377 - DNA, 15 bp, Homo sapiens
tgtggactcacactg

SEQ ID NO: 1770378 - DNA, 15 bp, Homo sapiens
gtggactcacactga

SEQ ID NO: 1770379 - DNA, 15 bp, Homo sapiens
tggactcacactgag

SEQ ID NO: 1770380 - DNA, 15 bp, Homo sapiens
ggactcacactgaga

SEQ ID NO: 1770381 - DNA, 15 bp, Homo sapiens
gactcacactgagat

SEQ ID NO: 1770382 - DNA, 15 bp, Homo sapiens
actcacactgagatt

SEQ ID NO: 1770383 - DNA, 15 bp, Homo sapiens
ctcacactgagattg

SEQ ID NO: 1770384 - DNA, 15 bp, Homo sapiens
tcacactgagattgt

SEQ ID NO: 1770385 - DNA, 15 bp, Homo sapiens
cacactgagattgta

SEQ ID NO: 1770386 - DNA, 15 bp, Homo sapiens
acactgagattgtac

SEQ ID NO: 1770387 - DNA, 15 bp, Homo sapiens
cactgagattgtacc

SEQ ID NO: 1770388 - DNA, 15 bp, Homo sapiens
actgagattgtacca

SEQ ID NO: 1770389 - DNA, 15 bp, Homo sapiens
ctgagattgtaccac

SEQ ID NO: 1770390 - DNA, 15 bp, Homo sapiens
tgagattgtaccaca

SEQ ID NO: 1770391 - DNA, 15 bp, Homo sapiens
gagattgtaccacat

SEQ ID NO: 1770392 - DNA, 15 bp, Homo sapiens
agattgtaccacatg

SEQ ID NO: 1770393 - DNA, 15 bp, Homo sapiens
gattgtaccacatgg

SEQ ID NO: 1770394 - DNA, 15 bp, Homo sapiens
attgtaccacatggg

SEQ ID NO: 1770395 - DNA, 15 bp, Homo sapiens
ttgtaccacatggga

SEQ ID NO: 1770396 - DNA, 15 bp, Homo sapiens
tgtaccacatgggac

SEQ ID NO: 1770397 - DNA, 15 bp, Homo sapiens
gtaccacatgggacc

SEQ ID NO: 1770398 - DNA, 15 bp, Homo sapiens
taccacatgggaccc

SEQ ID NO: 1770399 - DNA, 15 bp, Homo sapiens
accacatgggacccc

SEQ ID NO: 1770400 - DNA, 15 bp, Homo sapiens
ccacatgggacccca

SEQ ID NO: 1770401 - DNA, 15 bp, Homo sapiens
cacatgggaccccag

SEQ ID NO: 1770402 - DNA, 15 bp, Homo sapiens
acatgggaccccagc

SEQ ID NO: 1770403 - DNA, 15 bp, Homo sapiens
catgggaccccagca

SEQ ID NO: 1770404 - DNA, 15 bp, Homo sapiens
atgggaccccagcac

SEQ ID NO: 1770405 - DNA, 15 bp, Homo sapiens
tgggaccccagcact

SEQ ID NO: 1770406 - DNA, 15 bp, Homo sapiens
gggaccccagcactt

SEQ ID NO: 1770407 - DNA, 15 bp, Homo sapiens
ggaccccagcactta

SEQ ID NO: 1770408 - DNA, 15 bp, Homo sapiens
gaccccagcacttat

SEQ ID NO: 1770409 - DNA, 15 bp, Homo sapiens
accccagcacttatt

SEQ ID NO: 1770410 - DNA, 15 bp, Homo sapiens
ccccagcacttattt

SEQ ID NO: 1770411 - DNA, 15 bp, Homo sapiens
cccagcacttatttg

SEQ ID NO: 1770412 - DNA, 15 bp, Homo sapiens
ccagcacttatttgg

SEQ ID NO: 1770413 - DNA, 15 bp, Homo sapiens
cagcacttatttggg

SEQ ID NO: 1770414 - DNA, 15 bp, Homo sapiens
agcacttatttgggt

SEQ ID NO: 1770415 - DNA, 15 bp, Homo sapiens
gcacttatttgggtt

SEQ ID NO: 1770416 - DNA, 15 bp, Homo sapiens
cacttatttgggtta

SEQ ID NO: 1770417 - DNA, 15 bp, Homo sapiens
acttatttgggttat

SEQ ID NO: 1770418 - DNA, 15 bp, Homo sapiens
cttatttgggttata

SEQ ID NO: 1770419 - DNA, 15 bp, Homo sapiens
ttatttgggttatac

SEQ ID NO: 1770420 - DNA, 15 bp, Homo sapiens
tatttgggttataca

SEQ ID NO: 1770421 - DNA, 15 bp, Homo sapiens
atttgggttatacag

SEQ ID NO: 1770422 - DNA, 15 bp, Homo sapiens
tttgggttatacagt

SEQ ID NO: 1770423 - DNA, 15 bp, Homo sapiens
ttgggttatacagtg

SEQ ID NO: 1770424 - DNA, 15 bp, Homo sapiens
tgggttatacagtgg

SEQ ID NO: 1770425 - DNA, 15 bp, Homo sapiens
gggttatacagtggg

SEQ ID NO: 1770426 - DNA, 15 bp, Homo sapiens
ggttatacagtggga

SEQ ID NO: 1770427 - DNA, 15 bp, Homo sapiens
gttatacagtgggaa

SEQ ID NO: 1770428 - DNA, 15 bp, Homo sapiens
ttatacagtgggaaa

SEQ ID NO: 1770429 - DNA, 15 bp, Homo sapiens
tatacagtgggaaac

SEQ ID NO: 1770430 - DNA, 15 bp, Homo sapiens
atacagtgggaaaca

SEQ ID NO: 1770431 - DNA, 15 bp, Homo sapiens
tacagtgggaaacag

SEQ ID NO: 1770432 - DNA, 15 bp, Homo sapiens
acagtgggaaacagg

SEQ ID NO: 1770433 - DNA, 15 bp, Homo sapiens
cagtgggaaacaggt

SEQ ID NO: 1770434 - DNA, 15 bp, Homo sapiens
agtgggaaacaggtt

SEQ ID NO: 1770435 - DNA, 15 bp, Homo sapiens
gtgggaaacaggttt

SEQ ID NO: 1770436 - DNA, 15 bp, Homo sapiens
tgggaaacaggttta

SEQ ID NO: 1770437 - DNA, 15 bp, Homo sapiens
gggaaacaggtttag

SEQ ID NO: 1770438 - DNA, 15 bp, Homo sapiens
ggaaacaggtttagt

SEQ ID NO: 1770439 - DNA, 15 bp, Homo sapiens
gaaacaggtttagtt

SEQ ID NO: 1770440 - DNA, 15 bp, Homo sapiens
aaacaggtttagttc

SEQ ID NO: 1770441 - DNA, 15 bp, Homo sapiens
aacaggtttagttca

SEQ ID NO: 1770442 - DNA, 15 bp, Homo sapiens
acaggtttagttcaa

SEQ ID NO: 1770443 - DNA, 15 bp, Homo sapiens
caggtttagttcaaa

SEQ ID NO: 1770444 - DNA, 15 bp, Homo sapiens
aggtttagttcaaat

SEQ ID NO: 1770445 - DNA, 15 bp, Homo sapiens
ggtttagttcaaatc

SEQ ID NO: 1770446 - DNA, 15 bp, Homo sapiens
gtttagttcaaatca

SEQ ID NO: 1770447 - DNA, 15 bp, Homo sapiens
tttagttcaaatcag

SEQ ID NO: 1770448 - DNA, 15 bp, Homo sapiens
ttagttcaaatcagg

SEQ ID NO: 1770449 - DNA, 15 bp, Homo sapiens
tagttcaaatcaggt

SEQ ID NO: 1770450 - DNA, 15 bp, Homo sapiens
agttcaaatcaggtt

SEQ ID NO: 1770451 - DNA, 15 bp, Homo sapiens
gttcaaatcaggttg

SEQ ID NO: 1770452 - DNA, 15 bp, Homo sapiens
ttcaaatcaggttgg

SEQ ID NO: 1770453 - DNA, 15 bp, Homo sapiens
tcaaatcaggttgga

SEQ ID NO: 1770454 - DNA, 15 bp, Homo sapiens
caaatcaggttggat

SEQ ID NO: 1770455 - DNA, 15 bp, Homo sapiens
aaatcaggttggatt

SEQ ID NO: 1770456 - DNA, 15 bp, Homo sapiens
aatcaggttggattt

SEQ ID NO: 1770457 - DNA, 15 bp, Homo sapiens
atcaggttggatttt

SEQ ID NO: 1770458 - DNA, 15 bp, Homo sapiens
tcaggttggattttt

SEQ ID NO: 1770459 - DNA, 15 bp, Homo sapiens
caggttggatttttg

SEQ ID NO: 1770460 - DNA, 15 bp, Homo sapiens
aggttggatttttgt

SEQ ID NO: 1770461 - DNA, 15 bp, Homo sapiens
ggttggatttttgta

SEQ ID NO: 1770462 - DNA, 15 bp, Homo sapiens
gttggatttttgtaa

SEQ ID NO: 1770463 - DNA, 15 bp, Homo sapiens
ttggatttttgtaaa

SEQ ID NO: 1770464 - DNA, 15 bp, Homo sapiens
tggatttttgtaaac

SEQ ID NO: 1770465 - DNA, 15 bp, Homo sapiens
ggatttttgtaaaca

SEQ ID NO: 1770466 - DNA, 15 bp, Homo sapiens
gatttttgtaaacac

SEQ ID NO: 1770467 - DNA, 15 bp, Homo sapiens
atttttgtaaacaca

SEQ ID NO: 1770468 - DNA, 15 bp, Homo sapiens
tttttgtaaacacat

SEQ ID NO: 1770469 - DNA, 15 bp, Homo sapiens
ttttgtaaacacata

SEQ ID NO: 1770470 - DNA, 15 bp, Homo sapiens
tttgtaaacacataa

SEQ ID NO: 1770471 - DNA, 15 bp, Homo sapiens
ttgtaaacacataaa

SEQ ID NO: 1770472 - DNA, 15 bp, Homo sapiens
tgtaaacacataaag

SEQ ID NO: 1770473 - DNA, 15 bp, Homo sapiens
gtaaacacataaagc

SEQ ID NO: 1770474 - DNA, 15 bp, Homo sapiens
taaacacataaagca

SEQ ID NO: 1770475 - DNA, 15 bp, Homo sapiens
aaacacataaagcat

SEQ ID NO: 1770476 - DNA, 15 bp, Homo sapiens
aacacataaagcatt

SEQ ID NO: 1770477 - DNA, 15 bp, Homo sapiens
acacataaagcattt

SEQ ID NO: 1770478 - DNA, 15 bp, Homo sapiens
cacataaagcattta

SEQ ID NO: 1770479 - DNA, 15 bp, Homo sapiens
acataaagcatttat

SEQ ID NO: 1770480 - DNA, 15 bp, Homo sapiens
cataaagcatttatg

SEQ ID NO: 1770481 - DNA, 15 bp, Homo sapiens
ataaagcatttatga

SEQ ID NO: 1770482 - DNA, 15 bp, Homo sapiens
taaagcatttatgat

SEQ ID NO: 1770483 - DNA, 15 bp, Homo sapiens
aaagcatttatgata

SEQ ID NO: 1770484 - DNA, 15 bp, Homo sapiens
aagcatttatgataa

SEQ ID NO: 1770485 - DNA, 15 bp, Homo sapiens
agcatttatgataat

SEQ ID NO: 1770486 - DNA, 15 bp, Homo sapiens
gcatttatgataata

SEQ ID NO: 1770487 - DNA, 15 bp, Homo sapiens
catttatgataataa

SEQ ID NO: 1770488 - DNA, 15 bp, Homo sapiens
atttatgataataaa

SEQ ID NO: 1770489 - DNA, 15 bp, Homo sapiens
tttatgataataaaa

SEQ ID NO: 1770490 - DNA, 15 bp, Homo sapiens
ttatgataataaaat

SEQ ID NO: 1770491 - DNA, 15 bp, Homo sapiens
tatgataataaaatt

SEQ ID NO: 1770492 - DNA, 15 bp, Homo sapiens
atgataataaaattt

SEQ ID NO: 1770493 - DNA, 15 bp, Homo sapiens
tgataataaaatttc

SEQ ID NO: 1770494 - DNA, 15 bp, Homo sapiens
gataataaaatttca

SEQ ID NO: 1770495 - DNA, 15 bp, Homo sapiens
ataataaaatttcaa

SEQ ID NO: 1770496 - DNA, 15 bp, Homo sapiens
taataaaatttcaaa

SEQ ID NO: 1770497 - DNA, 15 bp, Homo sapiens
aataaaatttcaaaa

SEQ ID NO: 1770498 - DNA, 15 bp, Homo sapiens
ataaaatttcaaaac

SEQ ID NO: 1770499 - DNA, 15 bp, Homo sapiens
taaaatttcaaaacc

SEQ ID NO: 1770500 - DNA, 15 bp, Homo sapiens
aaaatttcaaaaccc

SEQ ID NO: 1770501 - DNA, 15 bp, Homo sapiens
aaatttcaaaaccca

SEQ ID NO: 1770502 - DNA, 15 bp, Homo sapiens
aatttcaaaacccaa

SEQ ID NO: 1770503 - DNA, 15 bp, Homo sapiens
atttcaaaacccaaa

SEQ ID NO: 1770504 - DNA, 15 bp, Homo sapiens
tttcaaaacccaaac

SEQ ID NO: 1770505 - DNA, 15 bp, Homo sapiens
ttcaaaacccaaaca

SEQ ID NO: 1770506 - DNA, 15 bp, Homo sapiens
tcaaaacccaaacac

SEQ ID NO: 1770507 - DNA, 15 bp, Homo sapiens
caaaacccaaacact

SEQ ID NO: 1770508 - DNA, 15 bp, Homo sapiens
aaaacccaaacactt

SEQ ID NO: 1770509 - DNA, 15 bp, Homo sapiens
aaacccaaacactta

SEQ ID NO: 1770510 - DNA, 15 bp, Homo sapiens
aacccaaacacttat

SEQ ID NO: 1770511 - DNA, 15 bp, Homo sapiens
acccaaacacttatg

SEQ ID NO: 1770512 - DNA, 15 bp, Homo sapiens
cccaaacacttatga

SEQ ID NO: 1770513 - DNA, 15 bp, Homo sapiens
ccaaacacttatgaa

SEQ ID NO: 1770514 - DNA, 15 bp, Homo sapiens
caaacacttatgaaa

SEQ ID NO: 1770515 - DNA, 15 bp, Homo sapiens
aaacacttatgaaag

SEQ ID NO: 1770516 - DNA, 15 bp, Homo sapiens
aacacttatgaaagt

SEQ ID NO: 1770517 - DNA, 15 bp, Homo sapiens
acacttatgaaagta

SEQ ID NO: 1770518 - DNA, 15 bp, Homo sapiens
cacttatgaaagtaa

SEQ ID NO: 1770519 - DNA, 15 bp, Homo sapiens
acttatgaaagtaag

SEQ ID NO: 1770520 - DNA, 15 bp, Homo sapiens
cttatgaaagtaagc

SEQ ID NO: 1770521 - DNA, 15 bp, Homo sapiens
ttatgaaagtaagcg

SEQ ID NO: 1770522 - DNA, 15 bp, Homo sapiens
tatgaaagtaagcga

SEQ ID NO: 1770523 - DNA, 15 bp, Homo sapiens
atgaaagtaagcgat

SEQ ID NO: 1770524 - DNA, 15 bp, Homo sapiens
tgaaagtaagcgata

SEQ ID NO: 1770525 - DNA, 15 bp, Homo sapiens
gaaagtaagcgatat

SEQ ID NO: 1770526 - DNA, 15 bp, Homo sapiens
aaagtaagcgatatt

SEQ ID NO: 1770527 - DNA, 15 bp, Homo sapiens
aagtaagcgatattg

SEQ ID NO: 1770528 - DNA, 15 bp, Homo sapiens
agtaagcgatattgt

SEQ ID NO: 1770529 - DNA, 15 bp, Homo sapiens
gtaagcgatattgta

SEQ ID NO: 1770530 - DNA, 15 bp, Homo sapiens
taagcgatattgtaa

SEQ ID NO: 1770531 - DNA, 15 bp, Homo sapiens
aagcgatattgtaat

SEQ ID NO: 1770532 - DNA, 15 bp, Homo sapiens
agcgatattgtaatc

SEQ ID NO: 1770533 - DNA, 15 bp, Homo sapiens
gcgatattgtaatca

SEQ ID NO: 1770534 - DNA, 15 bp, Homo sapiens
cgatattgtaatcat

SEQ ID NO: 1770535 - DNA, 15 bp, Homo sapiens
gatattgtaatcatg

SEQ ID NO: 1770536 - DNA, 15 bp, Homo sapiens
atattgtaatcatga

SEQ ID NO: 1770537 - DNA, 15 bp, Homo sapiens
tattgtaatcatgaa

SEQ ID NO: 1770538 - DNA, 15 bp, Homo sapiens
attgtaatcatgaat

SEQ ID NO: 1770539 - DNA, 15 bp, Homo sapiens
ttgtaatcatgaatt

SEQ ID NO: 1770540 - DNA, 15 bp, Homo sapiens
tgtaatcatgaattt

SEQ ID NO: 1770541 - DNA, 15 bp, Homo sapiens
gtaatcatgaatttg

SEQ ID NO: 1770542 - DNA, 15 bp, Homo sapiens
taatcatgaatttgg

SEQ ID NO: 1770543 - DNA, 15 bp, Homo sapiens
aatcatgaatttggg

SEQ ID NO: 1770544 - DNA, 15 bp, Homo sapiens
atcatgaatttgggg

SEQ ID NO: 1770545 - DNA, 15 bp, Homo sapiens
tcatgaatttggggg

SEQ ID NO: 1770546 - DNA, 15 bp, Homo sapiens
catgaatttggggga

SEQ ID NO: 1770547 - DNA, 15 bp, Homo sapiens
atgaatttgggggat

SEQ ID NO: 1770548 - DNA, 15 bp, Homo sapiens
tgaatttgggggatt

SEQ ID NO: 1770549 - DNA, 15 bp, Homo sapiens
gaatttgggggattt

SEQ ID NO: 1770550 - DNA, 15 bp, Homo sapiens
aatttgggggatttt

SEQ ID NO: 1770551 - DNA, 15 bp, Homo sapiens
atttgggggattttt

SEQ ID NO: 1770552 - DNA, 15 bp, Homo sapiens
tttgggggatttttc

SEQ ID NO: 1770553 - DNA, 15 bp, Homo sapiens
ttgggggatttttct

SEQ ID NO: 1770554 - DNA, 15 bp, Homo sapiens
tgggggatttttctg

SEQ ID NO: 1770555 - DNA, 15 bp, Homo sapiens
gggggatttttctgt

SEQ ID NO: 1770556 - DNA, 15 bp, Homo sapiens
ggggatttttctgta

SEQ ID NO: 1770557 - DNA, 15 bp, Homo sapiens
gggatttttctgtat

SEQ ID NO: 1770558 - DNA, 15 bp, Homo sapiens
ggatttttctgtatg

SEQ ID NO: 1770559 - DNA, 15 bp, Homo sapiens
gatttttctgtatgg

SEQ ID NO: 1770560 - DNA, 15 bp, Homo sapiens
atttttctgtatggg

SEQ ID NO: 1770561 - DNA, 15 bp, Homo sapiens
tttttctgtatgggc

SEQ ID NO: 1770562 - DNA, 15 bp, Homo sapiens
ttttctgtatgggct

SEQ ID NO: 1770563 - DNA, 15 bp, Homo sapiens
tttctgtatgggctg

SEQ ID NO: 1770564 - DNA, 15 bp, Homo sapiens
ttctgtatgggctgc

SEQ ID NO: 1770565 - DNA, 15 bp, Homo sapiens
tctgtatgggctgca

SEQ ID NO: 1770566 - DNA, 15 bp, Homo sapiens
ctgtatgggctgcag

SEQ ID NO: 1770567 - DNA, 15 bp, Homo sapiens
tgtatgggctgcagt

SEQ ID NO: 1770568 - DNA, 15 bp, Homo sapiens
gtatgggctgcagtg

SEQ ID NO: 1770569 - DNA, 15 bp, Homo sapiens
tatgggctgcagtga

SEQ ID NO: 1770570 - DNA, 15 bp, Homo sapiens
atgggctgcagtgac

SEQ ID NO: 1770571 - DNA, 15 bp, Homo sapiens
tgggctgcagtgact

SEQ ID NO: 1770572 - DNA, 15 bp, Homo sapiens
gggctgcagtgacta

SEQ ID NO: 1770573 - DNA, 15 bp, Homo sapiens
ggctgcagtgactat

SEQ ID NO: 1770574 - DNA, 15 bp, Homo sapiens
gctgcagtgactatg

SEQ ID NO: 1770575 - DNA, 15 bp, Homo sapiens
ctgcagtgactatgg

SEQ ID NO: 1770576 - DNA, 15 bp, Homo sapiens
tgcagtgactatggc

SEQ ID NO: 1770577 - DNA, 15 bp, Homo sapiens
gcagtgactatggct

SEQ ID NO: 1770578 - DNA, 15 bp, Homo sapiens
cagtgactatggctc

SEQ ID NO: 1770579 - DNA, 15 bp, Homo sapiens
agtgactatggctcc

SEQ ID NO: 1770580 - DNA, 15 bp, Homo sapiens
gtgactatggctcct

SEQ ID NO: 1770581 - DNA, 15 bp, Homo sapiens
tgactatggctcctg

SEQ ID NO: 1770582 - DNA, 15 bp, Homo sapiens
gactatggctcctgc

SEQ ID NO: 1770583 - DNA, 15 bp, Homo sapiens
actatggctcctgca

SEQ ID NO: 1770584 - DNA, 15 bp, Homo sapiens
ctatggctcctgcaa

SEQ ID NO: 1770585 - DNA, 15 bp, Homo sapiens
tatggctcctgcaaa

SEQ ID NO: 1770586 - DNA, 15 bp, Homo sapiens
atggctcctgcaaat

SEQ ID NO: 1770587 - DNA, 15 bp, Homo sapiens
tggctcctgcaaata

SEQ ID NO: 1770588 - DNA, 15 bp, Homo sapiens
ggctcctgcaaatag

SEQ ID NO: 1770589 - DNA, 15 bp, Homo sapiens
gctcctgcaaatagg

SEQ ID NO: 1770590 - DNA, 15 bp, Homo sapiens
ctcctgcaaatagga

SEQ ID NO: 1770591 - DNA, 15 bp, Homo sapiens
tcctgcaaataggag

SEQ ID NO: 1770592 - DNA, 15 bp, Homo sapiens
cctgcaaataggagt

SEQ ID NO: 1770593 - DNA, 15 bp, Homo sapiens
ctgcaaataggagtt

SEQ ID NO: 1770594 - DNA, 15 bp, Homo sapiens
tgcaaataggagttt

SEQ ID NO: 1770595 - DNA, 15 bp, Homo sapiens
gcaaataggagttta

SEQ ID NO: 1770596 - DNA, 15 bp, Homo sapiens
caaataggagtttaa

SEQ ID NO: 1770597 - DNA, 15 bp, Homo sapiens
aaataggagtttaat

SEQ ID NO: 1770598 - DNA, 15 bp, Homo sapiens
aataggagtttaatg

SEQ ID NO: 1770599 - DNA, 15 bp, Homo sapiens
ataggagtttaatga

SEQ ID NO: 1770600 - DNA, 15 bp, Homo sapiens
taggagtttaatgaa

SEQ ID NO: 1770601 - DNA, 15 bp, Homo sapiens
aggagtttaatgaag

SEQ ID NO: 1770602 - DNA, 15 bp, Homo sapiens
ggagtttaatgaagt

SEQ ID NO: 1770603 - DNA, 15 bp, Homo sapiens
gagtttaatgaagta

SEQ ID NO: 1770604 - DNA, 15 bp, Homo sapiens
agtttaatgaagtat

SEQ ID NO: 1770605 - DNA, 15 bp, Homo sapiens
gtttaatgaagtatc

SEQ ID NO: 1770606 - DNA, 15 bp, Homo sapiens
tttaatgaagtatct

SEQ ID NO: 1770607 - DNA, 15 bp, Homo sapiens
ttaatgaagtatctg

SEQ ID NO: 1770608 - DNA, 15 bp, Homo sapiens
taatgaagtatctgt

SEQ ID NO: 1770609 - DNA, 15 bp, Homo sapiens
aatgaagtatctgtt

SEQ ID NO: 1770610 - DNA, 15 bp, Homo sapiens
atgaagtatctgttg

SEQ ID NO: 1770611 - DNA, 15 bp, Homo sapiens
tgaagtatctgttgt

SEQ ID NO: 1770612 - DNA, 15 bp, Homo sapiens
gaagtatctgttgtt

SEQ ID NO: 1770613 - DNA, 15 bp, Homo sapiens
aagtatctgttgttt

SEQ ID NO: 1770614 - DNA, 15 bp, Homo sapiens
agtatctgttgtttc

SEQ ID NO: 1770615 - DNA, 15 bp, Homo sapiens
gtatctgttgtttcc

SEQ ID NO: 1770616 - DNA, 15 bp, Homo sapiens
tatctgttgtttcct

SEQ ID NO: 1770617 - DNA, 15 bp, Homo sapiens
atctgttgtttcctg

SEQ ID NO: 1770618 - DNA, 15 bp, Homo sapiens
tctgttgtttcctgg

SEQ ID NO: 1770619 - DNA, 15 bp, Homo sapiens
ctgttgtttcctggt

SEQ ID NO: 1770620 - DNA, 15 bp, Homo sapiens
tgttgtttcctggtt

SEQ ID NO: 1770621 - DNA, 15 bp, Homo sapiens
gttgtttcctggtta

SEQ ID NO: 1770622 - DNA, 15 bp, Homo sapiens
ttgtttcctggttaa

SEQ ID NO: 1770623 - DNA, 15 bp, Homo sapiens
tgtttcctggttaat

SEQ ID NO: 1770624 - DNA, 15 bp, Homo sapiens
gtttcctggttaatt

SEQ ID NO: 1770625 - DNA, 15 bp, Homo sapiens
ttcctggttaatttt

SEQ ID NO: 1770626 - DNA, 15 bp, Homo sapiens
tcctggttaattttc

SEQ ID NO: 1770627 - DNA, 15 bp, Homo sapiens
cctggttaattttcc

SEQ ID NO: 1770628 - DNA, 15 bp, Homo sapiens
ctggttaattttcct

SEQ ID NO: 1770629 - DNA, 15 bp, Homo sapiens
tggttaattttcctg

SEQ ID NO: 1770630 - DNA, 15 bp, Homo sapiens
ggttaattttcctga

SEQ ID NO: 1770631 - DNA, 15 bp, Homo sapiens
gttaattttcctgaa

SEQ ID NO: 1770632 - DNA, 15 bp, Homo sapiens
ttaattttcctgaag

SEQ ID NO: 1770633 - DNA, 15 bp, Homo sapiens
taattttcctgaagc

SEQ ID NO: 1770634 - DNA, 15 bp, Homo sapiens
aattttcctgaagca

SEQ ID NO: 1770635 - DNA, 15 bp, Homo sapiens
attttcctgaagcaa

SEQ ID NO: 1770636 - DNA, 15 bp, Homo sapiens
ttttcctgaagcaag

SEQ ID NO: 1770637 - DNA, 15 bp, Homo sapiens
tttcctgaagcaagt

SEQ ID NO: 1770638 - DNA, 15 bp, Homo sapiens
ttcctgaagcaagtg

SEQ ID NO: 1770639 - DNA, 15 bp, Homo sapiens
tcctgaagcaagtgt

SEQ ID NO: 1770640 - DNA, 15 bp, Homo sapiens
cctgaagcaagtgta

SEQ ID NO: 1770641 - DNA, 15 bp, Homo sapiens
ctgaagcaagtgtaa

SEQ ID NO: 1770642 - DNA, 15 bp, Homo sapiens
tgaagcaagtgtaag

SEQ ID NO: 1770643 - DNA, 15 bp, Homo sapiens
gaagcaagtgtaagc

SEQ ID NO: 1770644 - DNA, 15 bp, Homo sapiens
aagcaagtgtaagca

SEQ ID NO: 1770645 - DNA, 15 bp, Homo sapiens
agcaagtgtaagcag

SEQ ID NO: 1770646 - DNA, 15 bp, Homo sapiens
gcaagtgtaagcagt

SEQ ID NO: 1770647 - DNA, 15 bp, Homo sapiens
caagtgtaagcagtt

SEQ ID NO: 1770648 - DNA, 15 bp, Homo sapiens
aagtgtaagcagttt

SEQ ID NO: 1770649 - DNA, 15 bp, Homo sapiens
agtgtaagcagtttg

SEQ ID NO: 1770650 - DNA, 15 bp, Homo sapiens
gtgtaagcagtttgt

SEQ ID NO: 1770651 - DNA, 15 bp, Homo sapiens
tgtaagcagtttgtg

SEQ ID NO: 1770652 - DNA, 15 bp, Homo sapiens
gtaagcagtttgtgt

SEQ ID NO: 1770653 - DNA, 15 bp, Homo sapiens
taagcagtttgtgtt

SEQ ID NO: 1770654 - DNA, 15 bp, Homo sapiens
aagcagtttgtgttc

SEQ ID NO: 1770655 - DNA, 15 bp, Homo sapiens
agcagtttgtgttct

SEQ ID NO: 1770656 - DNA, 15 bp, Homo sapiens
gcagtttgtgttcta

SEQ ID NO: 1770657 - DNA, 15 bp, Homo sapiens
cagtttgtgttctag

SEQ ID NO: 1770658 - DNA, 15 bp, Homo sapiens
agtttgtgttctagg

SEQ ID NO: 1770659 - DNA, 15 bp, Homo sapiens
gtttgtgttctaggg

SEQ ID NO: 1770660 - DNA, 15 bp, Homo sapiens
tttgtgttctaggga

SEQ ID NO: 1770661 - DNA, 15 bp, Homo sapiens
ttgtgttctagggaa

SEQ ID NO: 1770662 - DNA, 15 bp, Homo sapiens
tgtgttctagggaat

SEQ ID NO: 1770663 - DNA, 15 bp, Homo sapiens
gtgttctagggaatc

SEQ ID NO: 1770664 - DNA, 15 bp, Homo sapiens
tgttctagggaatct

SEQ ID NO: 1770665 - DNA, 15 bp, Homo sapiens
gttctagggaatctt

SEQ ID NO: 1770666 - DNA, 15 bp, Homo sapiens
ttctagggaatctta

SEQ ID NO: 1770667 - DNA, 15 bp, Homo sapiens
tctagggaatcttat

SEQ ID NO: 1770668 - DNA, 15 bp, Homo sapiens
ctagggaatcttatt

SEQ ID NO: 1770669 - DNA, 15 bp, Homo sapiens
tagggaatcttattt

SEQ ID NO: 1770670 - DNA, 15 bp, Homo sapiens
agggaatcttatttt

SEQ ID NO: 1770671 - DNA, 15 bp, Homo sapiens
gggaatcttatttta

SEQ ID NO: 1770672 - DNA, 15 bp, Homo sapiens
ggaatcttattttat

SEQ ID NO: 1770673 - DNA, 15 bp, Homo sapiens
gaatcttattttatt

SEQ ID NO: 1770674 - DNA, 15 bp, Homo sapiens
aatcttattttattt

SEQ ID NO: 1770675 - DNA, 15 bp, Homo sapiens
atcttattttatttt

SEQ ID NO: 1770676 - DNA, 15 bp, Homo sapiens
tcttattttatttta

SEQ ID NO: 1770677 - DNA, 15 bp, Homo sapiens
cttattttattttat

SEQ ID NO: 1770678 - DNA, 15 bp, Homo sapiens
tattttattttattt

SEQ ID NO: 1770679 - DNA, 15 bp, Homo sapiens
attttattttatttg

SEQ ID NO: 1770680 - DNA, 15 bp, Homo sapiens
ttttattttatttgt

SEQ ID NO: 1770681 - DNA, 15 bp, Homo sapiens
tttattttatttgtt

SEQ ID NO: 1770682 - DNA, 15 bp, Homo sapiens
ttattttatttgttt

SEQ ID NO: 1770683 - DNA, 15 bp, Homo sapiens
tattttatttgttta

SEQ ID NO: 1770684 - DNA, 15 bp, Homo sapiens
attttatttgtttat

SEQ ID NO: 1770685 - DNA, 15 bp, Homo sapiens
ttttatttgtttatt

SEQ ID NO: 1770686 - DNA, 15 bp, Homo sapiens
tttatttgtttattt

SEQ ID NO: 1770687 - DNA, 15 bp, Homo sapiens
ttatttgtttattta

SEQ ID NO: 1770688 - DNA, 15 bp, Homo sapiens
tatttgtttatttat

SEQ ID NO: 1770689 - DNA, 15 bp, Homo sapiens
atttgtttatttatt

SEQ ID NO: 1770690 - DNA, 15 bp, Homo sapiens
tttgtttatttattt

SEQ ID NO: 1770691 - DNA, 15 bp, Homo sapiens
ttgtttatttattta

SEQ ID NO: 1770692 - DNA, 15 bp, Homo sapiens
gtttatttatttatt

SEQ ID NO: 1770693 - DNA, 15 bp, Homo sapiens
tttatttattattat

SEQ ID NO: 1770694 - DNA, 15 bp, Homo sapiens
ttatttattattatt

SEQ ID NO: 1770695 - DNA, 15 bp, Homo sapiens
ttattattttttttg

SEQ ID NO: 1770696 - DNA, 15 bp, Homo sapiens
tattattttttttga

SEQ ID NO: 1770697 - DNA, 15 bp, Homo sapiens
attattttttttgaa

SEQ ID NO: 1770698 - DNA, 15 bp, Homo sapiens
ttattttttttgaat

SEQ ID NO: 1770699 - DNA, 15 bp, Homo sapiens
tattttttttgaatc

SEQ ID NO: 1770700 - DNA, 15 bp, Homo sapiens
attttttttgaatcg

SEQ ID NO: 1770701 - DNA, 15 bp, Homo sapiens
ttttttttgaatcgg

SEQ ID NO: 1770702 - DNA, 15 bp, Homo sapiens
tttttttgaatcgga

SEQ ID NO: 1770703 - DNA, 15 bp, Homo sapiens
ttttttgaatcggag

SEQ ID NO: 1770704 - DNA, 15 bp, Homo sapiens
tttttgaatcggagt

SEQ ID NO: 1770705 - DNA, 15 bp, Homo sapiens
ttttgaatcggagtc

SEQ ID NO: 1770706 - DNA, 15 bp, Homo sapiens
tttgaatcggagtct

SEQ ID NO: 1770707 - DNA, 15 bp, Homo sapiens
ttgaatcggagtctc

SEQ ID NO: 1770708 - DNA, 15 bp, Homo sapiens
tgaatcggagtctcg

SEQ ID NO: 1770709 - DNA, 15 bp, Homo sapiens
gaatcggagtctcgc

SEQ ID NO: 1770710 - DNA, 15 bp, Homo sapiens
aatcggagtctcgct

SEQ ID NO: 1770711 - DNA, 15 bp, Homo sapiens
atcggagtctcgctc

SEQ ID NO: 1770712 - DNA, 15 bp, Homo sapiens
tcggagtctcgctct

SEQ ID NO: 1770713 - DNA, 15 bp, Homo sapiens
ctctgtcacccaggt

SEQ ID NO: 1770714 - DNA, 15 bp, Homo sapiens
tctgtcacccaggtt

SEQ ID NO: 1770715 - DNA, 15 bp, Homo sapiens
ttggagtgcagtggt

SEQ ID NO: 1770716 - DNA, 15 bp, Homo sapiens
gtggtgccatcttgc

SEQ ID NO: 1770717 - DNA, 15 bp, Homo sapiens
tggtgccatcttgcc

SEQ ID NO: 1770718 - DNA, 15 bp, Homo sapiens
ggtgccatcttgcct

SEQ ID NO: 1770719 - DNA, 15 bp, Homo sapiens
gtgccatcttgcctc

SEQ ID NO: 1770720 - DNA, 15 bp, Homo sapiens
tgccatcttgcctca

SEQ ID NO: 1770721 - DNA, 15 bp, Homo sapiens
gccatcttgcctcac

SEQ ID NO: 1770722 - DNA, 15 bp, Homo sapiens
ccatcttgcctcact

SEQ ID NO: 1770723 - DNA, 15 bp, Homo sapiens
catcttgcctcactg

SEQ ID NO: 1770724 - DNA, 15 bp, Homo sapiens
atcttgcctcactgc

SEQ ID NO: 1770725 - DNA, 15 bp, Homo sapiens
tcttgcctcactgca

SEQ ID NO: 1770726 - DNA, 15 bp, Homo sapiens
cttgcctcactgcaa

SEQ ID NO: 1770727 - DNA, 15 bp, Homo sapiens
ttgcctcactgcaac

SEQ ID NO: 1770728 - DNA, 15 bp, Homo sapiens
tgcctcactgcaacc

SEQ ID NO: 1770729 - DNA, 15 bp, Homo sapiens
gcctcactgcaacct

SEQ ID NO: 1770730 - DNA, 15 bp, Homo sapiens
cctcactgcaacctt

SEQ ID NO: 1770731 - DNA, 15 bp, Homo sapiens
ctcactgcaaccttg

SEQ ID NO: 1770732 - DNA, 15 bp, Homo sapiens
tcactgcaaccttgg

SEQ ID NO: 1770733 - DNA, 15 bp, Homo sapiens
cactgcaaccttggc

SEQ ID NO: 1770734 - DNA, 15 bp, Homo sapiens
actgcaaccttggcc

SEQ ID NO: 1770735 - DNA, 15 bp, Homo sapiens
ctgcaaccttggcct

SEQ ID NO: 1770736 - DNA, 15 bp, Homo sapiens
tgcaaccttggcctc

SEQ ID NO: 1770737 - DNA, 15 bp, Homo sapiens
gcaaccttggcctcc

SEQ ID NO: 1770738 - DNA, 15 bp, Homo sapiens
caaccttggcctccc

SEQ ID NO: 1770739 - DNA, 15 bp, Homo sapiens
aaccttggcctcccg

SEQ ID NO: 1770740 - DNA, 15 bp, Homo sapiens
accttggcctcccgg

SEQ ID NO: 1770741 - DNA, 15 bp, Homo sapiens
ccttggcctcccggg

SEQ ID NO: 1770742 - DNA, 15 bp, Homo sapiens
cttggcctcccgggt

SEQ ID NO: 1770743 - DNA, 15 bp, Homo sapiens
ttggcctcccgggtt

SEQ ID NO: 1770744 - DNA, 15 bp, Homo sapiens
tggcctcccgggttc

SEQ ID NO: 1770745 - DNA, 15 bp, Homo sapiens
ggcctcccgggttca

SEQ ID NO: 1770746 - DNA, 15 bp, Homo sapiens
caattctcctgcctt

SEQ ID NO: 1770747 - DNA, 15 bp, Homo sapiens
aattctcctgcctta

SEQ ID NO: 1770748 - DNA, 15 bp, Homo sapiens
attctcctgccttag

SEQ ID NO: 1770749 - DNA, 15 bp, Homo sapiens
ttctcctgccttagc

SEQ ID NO: 1770750 - DNA, 15 bp, Homo sapiens
tctcctgccttagcc

SEQ ID NO: 1770751 - DNA, 15 bp, Homo sapiens
ctgccttagcctccg

SEQ ID NO: 1770752 - DNA, 15 bp, Homo sapiens
tgccttagcctccga

SEQ ID NO: 1770753 - DNA, 15 bp, Homo sapiens
gccttagcctccgag

SEQ ID NO: 1770754 - DNA, 15 bp, Homo sapiens
ccttagcctccgagt

SEQ ID NO: 1770755 - DNA, 15 bp, Homo sapiens
cttagcctccgagta

SEQ ID NO: 1770756 - DNA, 15 bp, Homo sapiens
ttagcctccgagtag

SEQ ID NO: 1770757 - DNA, 15 bp, Homo sapiens
tagcctccgagtagc

SEQ ID NO: 1770758 - DNA, 15 bp, Homo sapiens
agcctccgagtagct

SEQ ID NO: 1770759 - DNA, 15 bp, Homo sapiens
gcctccgagtagctg

SEQ ID NO: 1770760 - DNA, 15 bp, Homo sapiens
cctccgagtagctgg

SEQ ID NO: 1770761 - DNA, 15 bp, Homo sapiens
ctccgagtagctggg

SEQ ID NO: 1770762 - DNA, 15 bp, Homo sapiens
tccgagtagctggga

SEQ ID NO: 1770763 - DNA, 15 bp, Homo sapiens
gtagctgggattacc

SEQ ID NO: 1770764 - DNA, 15 bp, Homo sapiens
tagctgggattacca

SEQ ID NO: 1770765 - DNA, 15 bp, Homo sapiens
agctgggattaccag

SEQ ID NO: 1770766 - DNA, 15 bp, Homo sapiens
gctgggattaccagt

SEQ ID NO: 1770767 - DNA, 15 bp, Homo sapiens
ctgggattaccagtg

SEQ ID NO: 1770768 - DNA, 15 bp, Homo sapiens
tgggattaccagtgc

SEQ ID NO: 1770769 - DNA, 15 bp, Homo sapiens
gggattaccagtgcc

SEQ ID NO: 1770770 - DNA, 15 bp, Homo sapiens
ggattaccagtgcct

SEQ ID NO: 1770771 - DNA, 15 bp, Homo sapiens
gattaccagtgcctg

SEQ ID NO: 1770772 - DNA, 15 bp, Homo sapiens
attaccagtgcctgc

SEQ ID NO: 1770773 - DNA, 15 bp, Homo sapiens
ttaccagtgcctgcc

SEQ ID NO: 1770774 - DNA, 15 bp, Homo sapiens
taccagtgcctgcca

SEQ ID NO: 1770775 - DNA, 15 bp, Homo sapiens
accagtgcctgccac

SEQ ID NO: 1770776 - DNA, 15 bp, Homo sapiens
ccagtgcctgccacc

SEQ ID NO: 1770777 - DNA, 15 bp, Homo sapiens
cagtgcctgccacca

SEQ ID NO: 1770778 - DNA, 15 bp, Homo sapiens
agtgcctgccaccac

SEQ ID NO: 1770779 - DNA, 15 bp, Homo sapiens
gtgcctgccaccact

SEQ ID NO: 1770780 - DNA, 15 bp, Homo sapiens
tgcctgccaccactc

SEQ ID NO: 1770781 - DNA, 15 bp, Homo sapiens
gcctgccaccactcc

SEQ ID NO: 1770782 - DNA, 15 bp, Homo sapiens
cctgccaccactccc

SEQ ID NO: 1770783 - DNA, 15 bp, Homo sapiens
ctgccaccactccca

SEQ ID NO: 1770784 - DNA, 15 bp, Homo sapiens
tgccaccactcccag

SEQ ID NO: 1770785 - DNA, 15 bp, Homo sapiens
caccactcccagctc

SEQ ID NO: 1770786 - DNA, 15 bp, Homo sapiens
accactcccagctca

SEQ ID NO: 1770787 - DNA, 15 bp, Homo sapiens
ccactcccagctcat

SEQ ID NO: 1770788 - DNA, 15 bp, Homo sapiens
cactcccagctcatt

SEQ ID NO: 1770789 - DNA, 15 bp, Homo sapiens
actcccagctcattt

SEQ ID NO: 1770790 - DNA, 15 bp, Homo sapiens
ctcccagctcatttc

SEQ ID NO: 1770791 - DNA, 15 bp, Homo sapiens
tcccagctcatttct

SEQ ID NO: 1770792 - DNA, 15 bp, Homo sapiens
cccagctcatttctg

SEQ ID NO: 1770793 - DNA, 15 bp, Homo sapiens
ccagctcatttctgt

SEQ ID NO: 1770794 - DNA, 15 bp, Homo sapiens
cagctcatttctgta

SEQ ID NO: 1770795 - DNA, 15 bp, Homo sapiens
agctcatttctgtat

SEQ ID NO: 1770796 - DNA, 15 bp, Homo sapiens
gctcatttctgtatt

SEQ ID NO: 1770797 - DNA, 15 bp, Homo sapiens
ctcatttctgtattt

SEQ ID NO: 1770798 - DNA, 15 bp, Homo sapiens
tcatttctgtatttt

SEQ ID NO: 1770799 - DNA, 15 bp, Homo sapiens
catttctgtattttt

SEQ ID NO: 1770800 - DNA, 15 bp, Homo sapiens
atttctgtattttta

SEQ ID NO: 1770801 - DNA, 15 bp, Homo sapiens
tttctgtatttttag

SEQ ID NO: 1770802 - DNA, 15 bp, Homo sapiens
ttctgtatttttaga

SEQ ID NO: 1770803 - DNA, 15 bp, Homo sapiens
tctgtatttttagaa

SEQ ID NO: 1770804 - DNA, 15 bp, Homo sapiens
ctgtatttttagaac

SEQ ID NO: 1770805 - DNA, 15 bp, Homo sapiens
tgtatttttagaaca

SEQ ID NO: 1770806 - DNA, 15 bp, Homo sapiens
gtatttttagaacag

SEQ ID NO: 1770807 - DNA, 15 bp, Homo sapiens
tatttttagaacaga

SEQ ID NO: 1770808 - DNA, 15 bp, Homo sapiens
atttttagaacagac

SEQ ID NO: 1770809 - DNA, 15 bp, Homo sapiens
tttttagaacagaca

SEQ ID NO: 1770810 - DNA, 15 bp, Homo sapiens
ttttagaacagacag

SEQ ID NO: 1770811 - DNA, 15 bp, Homo sapiens
tttagaacagacagg

SEQ ID NO: 1770812 - DNA, 15 bp, Homo sapiens
ttagaacagacaggg

SEQ ID NO: 1770813 - DNA, 15 bp, Homo sapiens
tagaacagacagggt

SEQ ID NO: 1770814 - DNA, 15 bp, Homo sapiens
agaacagacagggtt

SEQ ID NO: 1770815 - DNA, 15 bp, Homo sapiens
gaacagacagggttt

SEQ ID NO: 1770816 - DNA, 15 bp, Homo sapiens
aacagacagggtttc

SEQ ID NO: 1770817 - DNA, 15 bp, Homo sapiens
cagacagggtttcac

SEQ ID NO: 1770818 - DNA, 15 bp, Homo sapiens
tttcaccgtgttggc

SEQ ID NO: 1770819 - DNA, 15 bp, Homo sapiens
ttcaccgtgttggct

SEQ ID NO: 1770820 - DNA, 15 bp, Homo sapiens
tcaccgtgttggcta

SEQ ID NO: 1770821 - DNA, 15 bp, Homo sapiens
caccgtgttggctag

SEQ ID NO: 1770822 - DNA, 15 bp, Homo sapiens
accgtgttggctagg

SEQ ID NO: 1770823 - DNA, 15 bp, Homo sapiens
ccgtgttggctaggc

SEQ ID NO: 1770824 - DNA, 15 bp, Homo sapiens
cgtgttggctaggct

SEQ ID NO: 1770825 - DNA, 15 bp, Homo sapiens
gtgttggctaggcta

SEQ ID NO: 1770826 - DNA, 15 bp, Homo sapiens
tgttggctaggctag

SEQ ID NO: 1770827 - DNA, 15 bp, Homo sapiens
gttggctaggctagt

SEQ ID NO: 1770828 - DNA, 15 bp, Homo sapiens
ttggctaggctagtc

SEQ ID NO: 1770829 - DNA, 15 bp, Homo sapiens
tggctaggctagtct

SEQ ID NO: 1770830 - DNA, 15 bp, Homo sapiens
ggctaggctagtctc

SEQ ID NO: 1770831 - DNA, 15 bp, Homo sapiens
gctaggctagtctcg

SEQ ID NO: 1770832 - DNA, 15 bp, Homo sapiens
ctaggctagtctcga

SEQ ID NO: 1770833 - DNA, 15 bp, Homo sapiens
taggctagtctcgaa

SEQ ID NO: 1770834 - DNA, 15 bp, Homo sapiens
atccacccacctcga

SEQ ID NO: 1770835 - DNA, 15 bp, Homo sapiens
tccacccacctcgac

SEQ ID NO: 1770836 - DNA, 15 bp, Homo sapiens
ccacccacctcgacc

SEQ ID NO: 1770837 - DNA, 15 bp, Homo sapiens
cacccacctcgacct

SEQ ID NO: 1770838 - DNA, 15 bp, Homo sapiens
acccacctcgacctc

SEQ ID NO: 1770839 - DNA, 15 bp, Homo sapiens
gggattacaggcata

SEQ ID NO: 1770840 - DNA, 15 bp, Homo sapiens
ggattacaggcataa

SEQ ID NO: 1770841 - DNA, 15 bp, Homo sapiens
gattacaggcataag

SEQ ID NO: 1770842 - DNA, 15 bp, Homo sapiens
attacaggcataagc

SEQ ID NO: 1770843 - DNA, 15 bp, Homo sapiens
ttacaggcataagcc

SEQ ID NO: 1770844 - DNA, 15 bp, Homo sapiens
tacaggcataagccg

SEQ ID NO: 1770845 - DNA, 15 bp, Homo sapiens
acaggcataagccgc

SEQ ID NO: 1770846 - DNA, 15 bp, Homo sapiens
caggcataagccgcc

SEQ ID NO: 1770847 - DNA, 15 bp, Homo sapiens
aggcataagccgcca

SEQ ID NO: 1770848 - DNA, 15 bp, Homo sapiens
ggcataagccgccat

SEQ ID NO: 1770849 - DNA, 15 bp, Homo sapiens
gcataagccgccatg

SEQ ID NO: 1770850 - DNA, 15 bp, Homo sapiens
cataagccgccatgc

SEQ ID NO: 1770851 - DNA, 15 bp, Homo sapiens
ataagccgccatgcc

SEQ ID NO: 1770852 - DNA, 15 bp, Homo sapiens
taagccgccatgcca

SEQ ID NO: 1770853 - DNA, 15 bp, Homo sapiens
aagccgccatgccag

SEQ ID NO: 1770854 - DNA, 15 bp, Homo sapiens
agccgccatgccagg

SEQ ID NO: 1770855 - DNA, 15 bp, Homo sapiens
gccgccatgccaggc

SEQ ID NO: 1770856 - DNA, 15 bp, Homo sapiens
ccgccatgccaggcc

SEQ ID NO: 1770857 - DNA, 15 bp, Homo sapiens
cgccatgccaggccc

SEQ ID NO: 1770858 - DNA, 15 bp, Homo sapiens
ccatgccaggcccat

SEQ ID NO: 1770859 - DNA, 15 bp, Homo sapiens
catgccaggcccatt

SEQ ID NO: 1770860 - DNA, 15 bp, Homo sapiens
atgccaggcccattt

SEQ ID NO: 1770861 - DNA, 15 bp, Homo sapiens
tgccaggcccatttt

SEQ ID NO: 1770862 - DNA, 15 bp, Homo sapiens
gccaggcccatttta

SEQ ID NO: 1770863 - DNA, 15 bp, Homo sapiens
ccaggcccattttat

SEQ ID NO: 1770864 - DNA, 15 bp, Homo sapiens
caggcccattttatt

SEQ ID NO: 1770865 - DNA, 15 bp, Homo sapiens
aggcccattttattt

SEQ ID NO: 1770866 - DNA, 15 bp, Homo sapiens
ggcccattttatttt

SEQ ID NO: 1770867 - DNA, 15 bp, Homo sapiens
gcccattttatttta

SEQ ID NO: 1770868 - DNA, 15 bp, Homo sapiens
cccattttattttat

SEQ ID NO: 1770869 - DNA, 15 bp, Homo sapiens
ccattttattttatt

SEQ ID NO: 1770870 - DNA, 15 bp, Homo sapiens
cattttattttattt

SEQ ID NO: 1770871 - DNA, 15 bp, Homo sapiens
tttattttattttag

SEQ ID NO: 1770872 - DNA, 15 bp, Homo sapiens
ttattttattttaga

SEQ ID NO: 1770873 - DNA, 15 bp, Homo sapiens
tattttattttagag

SEQ ID NO: 1770874 - DNA, 15 bp, Homo sapiens
attttattttagaga

SEQ ID NO: 1770875 - DNA, 15 bp, Homo sapiens
ttttattttagagac

SEQ ID NO: 1770876 - DNA, 15 bp, Homo sapiens
tttattttagagaca

SEQ ID NO: 1770877 - DNA, 15 bp, Homo sapiens
ttattttagagacag

SEQ ID NO: 1770878 - DNA, 15 bp, Homo sapiens
tattttagagacagg

SEQ ID NO: 1770879 - DNA, 15 bp, Homo sapiens
attttagagacaggg

SEQ ID NO: 1770880 - DNA, 15 bp, Homo sapiens
cttgctctgtcacct

SEQ ID NO: 1770881 - DNA, 15 bp, Homo sapiens
ttgctctgtcaccta

SEQ ID NO: 1770882 - DNA, 15 bp, Homo sapiens
tgctctgtcacctag

SEQ ID NO: 1770883 - DNA, 15 bp, Homo sapiens
gctctgtcacctagg

SEQ ID NO: 1770884 - DNA, 15 bp, Homo sapiens
ctctgtcacctaggc

SEQ ID NO: 1770885 - DNA, 15 bp, Homo sapiens
tctgtcacctaggct

SEQ ID NO: 1770886 - DNA, 15 bp, Homo sapiens
tgtcacctaggctgg

SEQ ID NO: 1770887 - DNA, 15 bp, Homo sapiens
gtcacctaggctgga

SEQ ID NO: 1770888 - DNA, 15 bp, Homo sapiens
tcacctaggctggag

SEQ ID NO: 1770889 - DNA, 15 bp, Homo sapiens
cacctaggctggagt

SEQ ID NO: 1770890 - DNA, 15 bp, Homo sapiens
acctaggctggagtg

SEQ ID NO: 1770891 - DNA, 15 bp, Homo sapiens
cctaggctggagtgc

SEQ ID NO: 1770892 - DNA, 15 bp, Homo sapiens
ctaggctggagtgca

SEQ ID NO: 1770893 - DNA, 15 bp, Homo sapiens
gtgccatcatggcta

SEQ ID NO: 1770894 - DNA, 15 bp, Homo sapiens
tgccatcatggctaa

SEQ ID NO: 1770895 - DNA, 15 bp, Homo sapiens
gccatcatggctaac

SEQ ID NO: 1770896 - DNA, 15 bp, Homo sapiens
ccatcatggctaact

SEQ ID NO: 1770897 - DNA, 15 bp, Homo sapiens
catcatggctaactg

SEQ ID NO: 1770898 - DNA, 15 bp, Homo sapiens
atcatggctaactgt

SEQ ID NO: 1770899 - DNA, 15 bp, Homo sapiens
tcatggctaactgtg

SEQ ID NO: 1770900 - DNA, 15 bp, Homo sapiens
catggctaactgtgg

SEQ ID NO: 1770901 - DNA, 15 bp, Homo sapiens
atggctaactgtggt

SEQ ID NO: 1770902 - DNA, 15 bp, Homo sapiens
tggctaactgtggtc

SEQ ID NO: 1770903 - DNA, 15 bp, Homo sapiens
ggctaactgtggtct

SEQ ID NO: 1770904 - DNA, 15 bp, Homo sapiens
gctaactgtggtctc

SEQ ID NO: 1770905 - DNA, 15 bp, Homo sapiens
ctaactgtggtctca

SEQ ID NO: 1770906 - DNA, 15 bp, Homo sapiens
taactgtggtctcaa

SEQ ID NO: 1770907 - DNA, 15 bp, Homo sapiens
aactgtggtctcaac

SEQ ID NO: 1770908 - DNA, 15 bp, Homo sapiens
actgtggtctcaacg

SEQ ID NO: 1770909 - DNA, 15 bp, Homo sapiens
ctgtggtctcaacgt

SEQ ID NO: 1770910 - DNA, 15 bp, Homo sapiens
tgtggtctcaacgtc

SEQ ID NO: 1770911 - DNA, 15 bp, Homo sapiens
gtggtctcaacgtcc

SEQ ID NO: 1770912 - DNA, 15 bp, Homo sapiens
tggtctcaacgtcct

SEQ ID NO: 1770913 - DNA, 15 bp, Homo sapiens
ggtctcaacgtcctg

SEQ ID NO: 1770914 - DNA, 15 bp, Homo sapiens
gtctcaacgtcctgg

SEQ ID NO: 1770915 - DNA, 15 bp, Homo sapiens
tctcaacgtcctggg

SEQ ID NO: 1770916 - DNA, 15 bp, Homo sapiens
ctcaacgtcctggga

SEQ ID NO: 1770917 - DNA, 15 bp, Homo sapiens
tcaacgtcctgggat

SEQ ID NO: 1770918 - DNA, 15 bp, Homo sapiens
caacgtcctgggatc

SEQ ID NO: 1770919 - DNA, 15 bp, Homo sapiens
aacgtcctgggatca

SEQ ID NO: 1770920 - DNA, 15 bp, Homo sapiens
acgtcctgggatcaa

SEQ ID NO: 1770921 - DNA, 15 bp, Homo sapiens
cgtcctgggatcaag

SEQ ID NO: 1770922 - DNA, 15 bp, Homo sapiens
gtcctgggatcaagc

SEQ ID NO: 1770923 - DNA, 15 bp, Homo sapiens
tcctgggatcaagcg

SEQ ID NO: 1770924 - DNA, 15 bp, Homo sapiens
cctgggatcaagcga

SEQ ID NO: 1770925 - DNA, 15 bp, Homo sapiens
ctgggatcaagcgat

SEQ ID NO: 1770926 - DNA, 15 bp, Homo sapiens
tgggatcaagcgatc

SEQ ID NO: 1770927 - DNA, 15 bp, Homo sapiens
gggatcaagcgatcc

SEQ ID NO: 1770928 - DNA, 15 bp, Homo sapiens
ggatcaagcgatcct

SEQ ID NO: 1770929 - DNA, 15 bp, Homo sapiens
gatcaagcgatcctc

SEQ ID NO: 1770930 - DNA, 15 bp, Homo sapiens
atcaagcgatcctcc

SEQ ID NO: 1770931 - DNA, 15 bp, Homo sapiens
cgatcctcctgccta

SEQ ID NO: 1770932 - DNA, 15 bp, Homo sapiens
gatcctcctgcctaa

SEQ ID NO: 1770933 - DNA, 15 bp, Homo sapiens
atcctcctgcctaag

SEQ ID NO: 1770934 - DNA, 15 bp, Homo sapiens
tcctcctgcctaagc

SEQ ID NO: 1770935 - DNA, 15 bp, Homo sapiens
cctcctgcctaagca

SEQ ID NO: 1770936 - DNA, 15 bp, Homo sapiens
ctcctgcctaagcat

SEQ ID NO: 1770937 - DNA, 15 bp, Homo sapiens
tcctgcctaagcatc

SEQ ID NO: 1770938 - DNA, 15 bp, Homo sapiens
cctgcctaagcatcc

SEQ ID NO: 1770939 - DNA, 15 bp, Homo sapiens
ctgcctaagcatcct

SEQ ID NO: 1770940 - DNA, 15 bp, Homo sapiens
tgcctaagcatcctg

SEQ ID NO: 1770941 - DNA, 15 bp, Homo sapiens
gcctaagcatcctga

SEQ ID NO: 1770942 - DNA, 15 bp, Homo sapiens
cctaagcatcctgag

SEQ ID NO: 1770943 - DNA, 15 bp, Homo sapiens
ctaagcatcctgagt

SEQ ID NO: 1770944 - DNA, 15 bp, Homo sapiens
taagcatcctgagta

SEQ ID NO: 1770945 - DNA, 15 bp, Homo sapiens
aagcatcctgagtag

SEQ ID NO: 1770946 - DNA, 15 bp, Homo sapiens
agcatcctgagtagc

SEQ ID NO: 1770947 - DNA, 15 bp, Homo sapiens
gcatcctgagtagct

SEQ ID NO: 1770948 - DNA, 15 bp, Homo sapiens
catcctgagtagctg

SEQ ID NO: 1770949 - DNA, 15 bp, Homo sapiens
atcctgagtagctgg

SEQ ID NO: 1770950 - DNA, 15 bp, Homo sapiens
gggactacaggcacg

SEQ ID NO: 1770951 - DNA, 15 bp, Homo sapiens
ggactacaggcacgt

SEQ ID NO: 1770952 - DNA, 15 bp, Homo sapiens
gactacaggcacgtg

SEQ ID NO: 1770953 - DNA, 15 bp, Homo sapiens
actacaggcacgtgc

SEQ ID NO: 1770954 - DNA, 15 bp, Homo sapiens
acaggcacgtgccag

SEQ ID NO: 1770955 - DNA, 15 bp, Homo sapiens
caggcacgtgccagc

SEQ ID NO: 1770956 - DNA, 15 bp, Homo sapiens
aggcacgtgccagca

SEQ ID NO: 1770957 - DNA, 15 bp, Homo sapiens
ggcacgtgccagcat

SEQ ID NO: 1770958 - DNA, 15 bp, Homo sapiens
gcacgtgccagcata

SEQ ID NO: 1770959 - DNA, 15 bp, Homo sapiens
cacgtgccagcatac

SEQ ID NO: 1770960 - DNA, 15 bp, Homo sapiens
acgtgccagcatacc

SEQ ID NO: 1770961 - DNA, 15 bp, Homo sapiens
cgtgccagcataccc

SEQ ID NO: 1770962 - DNA, 15 bp, Homo sapiens
gtgccagcatacccg

SEQ ID NO: 1770963 - DNA, 15 bp, Homo sapiens
tgccagcatacccgg

SEQ ID NO: 1770964 - DNA, 15 bp, Homo sapiens
gccagcatacccggc

SEQ ID NO: 1770965 - DNA, 15 bp, Homo sapiens
ccagcatacccggct

SEQ ID NO: 1770966 - DNA, 15 bp, Homo sapiens
cagcatacccggcta

SEQ ID NO: 1770967 - DNA, 15 bp, Homo sapiens
agcatacccggctaa

SEQ ID NO: 1770968 - DNA, 15 bp, Homo sapiens
gcatacccggctaat

SEQ ID NO: 1770969 - DNA, 15 bp, Homo sapiens
tacccggctaattta

SEQ ID NO: 1770970 - DNA, 15 bp, Homo sapiens
acccggctaatttat

SEQ ID NO: 1770971 - DNA, 15 bp, Homo sapiens
cccggctaatttatt

SEQ ID NO: 1770972 - DNA, 15 bp, Homo sapiens
ccggctaatttattg

SEQ ID NO: 1770973 - DNA, 15 bp, Homo sapiens
cggctaatttattgt

SEQ ID NO: 1770974 - DNA, 15 bp, Homo sapiens
ggctaatttattgtt

SEQ ID NO: 1770975 - DNA, 15 bp, Homo sapiens
gctaatttattgttt

SEQ ID NO: 1770976 - DNA, 15 bp, Homo sapiens
ctaatttattgtttt

SEQ ID NO: 1770977 - DNA, 15 bp, Homo sapiens
taatttattgttttt

SEQ ID NO: 1770978 - DNA, 15 bp, Homo sapiens
aatttattgtttttt

SEQ ID NO: 1770979 - DNA, 15 bp, Homo sapiens
atttattgttttttt

SEQ ID NO: 1770980 - DNA, 15 bp, Homo sapiens
tttattgtttttttc

SEQ ID NO: 1770981 - DNA, 15 bp, Homo sapiens
ttattgtttttttct

SEQ ID NO: 1770982 - DNA, 15 bp, Homo sapiens
tattgtttttttctt

SEQ ID NO: 1770983 - DNA, 15 bp, Homo sapiens
attgtttttttcttt

SEQ ID NO: 1770984 - DNA, 15 bp, Homo sapiens
ttgtttttttctttc

SEQ ID NO: 1770985 - DNA, 15 bp, Homo sapiens
tgtttttttctttct

SEQ ID NO: 1770986 - DNA, 15 bp, Homo sapiens
gtttttttctttctt

SEQ ID NO: 1770987 - DNA, 15 bp, Homo sapiens
gacagggtctctctt

SEQ ID NO: 1770988 - DNA, 15 bp, Homo sapiens
acagggtctctcttt

SEQ ID NO: 1770989 - DNA, 15 bp, Homo sapiens
cagggtctctctttg

SEQ ID NO: 1770990 - DNA, 15 bp, Homo sapiens
agggtctctctttgt

SEQ ID NO: 1770991 - DNA, 15 bp, Homo sapiens
gggtctctctttgtt

SEQ ID NO: 1770992 - DNA, 15 bp, Homo sapiens
ggtctctctttgttg

SEQ ID NO: 1770993 - DNA, 15 bp, Homo sapiens
gtctctctttgttgc

SEQ ID NO: 1770994 - DNA, 15 bp, Homo sapiens
tctctctttgttgcc

SEQ ID NO: 1770995 - DNA, 15 bp, Homo sapiens
ctctctttgttgccc

SEQ ID NO: 1770996 - DNA, 15 bp, Homo sapiens
tctctttgttgccca

SEQ ID NO: 1770997 - DNA, 15 bp, Homo sapiens
ctctttgttgcccaa

SEQ ID NO: 1770998 - DNA, 15 bp, Homo sapiens
tctttgttgcccaag

SEQ ID NO: 1770999 - DNA, 15 bp, Homo sapiens
ctttgttgcccaagc

SEQ ID NO: 1771000 - DNA, 15 bp, Homo sapiens
tttgttgcccaagct

SEQ ID NO: 1771001 - DNA, 15 bp, Homo sapiens
ttgttgcccaagctg

SEQ ID NO: 1771002 - DNA, 15 bp, Homo sapiens
gcccaagctggtctc

SEQ ID NO: 1771003 - DNA, 15 bp, Homo sapiens
cccaagctggtctca

SEQ ID NO: 1771004 - DNA, 15 bp, Homo sapiens
ccaagctggtctcaa

SEQ ID NO: 1771005 - DNA, 15 bp, Homo sapiens
caagctggtctcaaa

SEQ ID NO: 1771006 - DNA, 15 bp, Homo sapiens
aagctggtctcaaac

SEQ ID NO: 1771007 - DNA, 15 bp, Homo sapiens
agctggtctcaaact

SEQ ID NO: 1771008 - DNA, 15 bp, Homo sapiens
tggcctcaagcaatt

SEQ ID NO: 1771009 - DNA, 15 bp, Homo sapiens
ggcctcaagcaattc

SEQ ID NO: 1771010 - DNA, 15 bp, Homo sapiens
gcctcaagcaattct

SEQ ID NO: 1771011 - DNA, 15 bp, Homo sapiens
cctcaagcaattctc

SEQ ID NO: 1771012 - DNA, 15 bp, Homo sapiens
aagcaattctccctc

SEQ ID NO: 1771013 - DNA, 15 bp, Homo sapiens
agcaattctccctcc

SEQ ID NO: 1771014 - DNA, 15 bp, Homo sapiens
gcaattctccctcct

SEQ ID NO: 1771015 - DNA, 15 bp, Homo sapiens
caattctccctcctc

SEQ ID NO: 1771016 - DNA, 15 bp, Homo sapiens
aattctccctcctca

SEQ ID NO: 1771017 - DNA, 15 bp, Homo sapiens
attctccctcctcag

SEQ ID NO: 1771018 - DNA, 15 bp, Homo sapiens
ttctccctcctcagc

SEQ ID NO: 1771019 - DNA, 15 bp, Homo sapiens
tctccctcctcagcc

SEQ ID NO: 1771020 - DNA, 15 bp, Homo sapiens
ctccctcctcagcct

SEQ ID NO: 1771021 - DNA, 15 bp, Homo sapiens
tccctcctcagcctt

SEQ ID NO: 1771022 - DNA, 15 bp, Homo sapiens
ccctcctcagccttc

SEQ ID NO: 1771023 - DNA, 15 bp, Homo sapiens
cctcctcagccttcc

SEQ ID NO: 1771024 - DNA, 15 bp, Homo sapiens
ctcctcagccttcca

SEQ ID NO: 1771025 - DNA, 15 bp, Homo sapiens
tcctcagccttccaa

SEQ ID NO: 1771026 - DNA, 15 bp, Homo sapiens
cagccttccaaagta

SEQ ID NO: 1771027 - DNA, 15 bp, Homo sapiens
agccttccaaagtat

SEQ ID NO: 1771028 - DNA, 15 bp, Homo sapiens
gccttccaaagtatt

SEQ ID NO: 1771029 - DNA, 15 bp, Homo sapiens
ccttccaaagtattg

SEQ ID NO: 1771030 - DNA, 15 bp, Homo sapiens
cttccaaagtattgg

SEQ ID NO: 1771031 - DNA, 15 bp, Homo sapiens
ttccaaagtattggg

SEQ ID NO: 1771032 - DNA, 15 bp, Homo sapiens
tccaaagtattggga

SEQ ID NO: 1771033 - DNA, 15 bp, Homo sapiens
cactgcacccagcct

SEQ ID NO: 1771034 - DNA, 15 bp, Homo sapiens
actgcacccagcctc

SEQ ID NO: 1771035 - DNA, 15 bp, Homo sapiens
ctgcacccagcctct

SEQ ID NO: 1771036 - DNA, 15 bp, Homo sapiens
tgcacccagcctctg

SEQ ID NO: 1771037 - DNA, 15 bp, Homo sapiens
gcacccagcctctgg

SEQ ID NO: 1771038 - DNA, 15 bp, Homo sapiens
cacccagcctctggg

SEQ ID NO: 1771039 - DNA, 15 bp, Homo sapiens
acccagcctctgggg

SEQ ID NO: 1771040 - DNA, 15 bp, Homo sapiens
cccagcctctgggga

SEQ ID NO: 1771041 - DNA, 15 bp, Homo sapiens
ccagcctctggggac

SEQ ID NO: 1771042 - DNA, 15 bp, Homo sapiens
cagcctctggggacg

SEQ ID NO: 1771043 - DNA, 15 bp, Homo sapiens
agcctctggggacgt

SEQ ID NO: 1771044 - DNA, 15 bp, Homo sapiens
gcctctggggacgtt

SEQ ID NO: 1771045 - DNA, 15 bp, Homo sapiens
cctctggggacgttt

SEQ ID NO: 1771046 - DNA, 15 bp, Homo sapiens
ctctggggacgtttt

SEQ ID NO: 1771047 - DNA, 15 bp, Homo sapiens
tctggggacgtttta

SEQ ID NO: 1771048 - DNA, 15 bp, Homo sapiens
ctggggacgttttaa

SEQ ID NO: 1771049 - DNA, 15 bp, Homo sapiens
tggggacgttttaaa

SEQ ID NO: 1771050 - DNA, 15 bp, Homo sapiens
ggggacgttttaaaa

SEQ ID NO: 1771051 - DNA, 15 bp, Homo sapiens
gggacgttttaaaaa

SEQ ID NO: 1771052 - DNA, 15 bp, Homo sapiens
ggacgttttaaaaaa

SEQ ID NO: 1771053 - DNA, 15 bp, Homo sapiens
gacgttttaaaaaat

SEQ ID NO: 1771054 - DNA, 15 bp, Homo sapiens
acgttttaaaaaatt

SEQ ID NO: 1771055 - DNA, 15 bp, Homo sapiens
cgttttaaaaaattc

SEQ ID NO: 1771056 - DNA, 15 bp, Homo sapiens
gttttaaaaaattca

SEQ ID NO: 1771057 - DNA, 15 bp, Homo sapiens
ttttaaaaaattcat

SEQ ID NO: 1771058 - DNA, 15 bp, Homo sapiens
tttaaaaaattcata

SEQ ID NO: 1771059 - DNA, 15 bp, Homo sapiens
ttaaaaaattcatat

SEQ ID NO: 1771060 - DNA, 15 bp, Homo sapiens
taaaaaattcatatt

SEQ ID NO: 1771061 - DNA, 15 bp, Homo sapiens
aaaaaattcatatta

SEQ ID NO: 1771062 - DNA, 15 bp, Homo sapiens
aaaaattcatattat

SEQ ID NO: 1771063 - DNA, 15 bp, Homo sapiens
aaaattcatattatt

SEQ ID NO: 1771064 - DNA, 15 bp, Homo sapiens
aaattcatattattt

SEQ ID NO: 1771065 - DNA, 15 bp, Homo sapiens
aattcatattattta

SEQ ID NO: 1771066 - DNA, 15 bp, Homo sapiens
attcatattatttat

SEQ ID NO: 1771067 - DNA, 15 bp, Homo sapiens
ttcatattatttatt

SEQ ID NO: 1771068 - DNA, 15 bp, Homo sapiens
tcatattatttattt

SEQ ID NO: 1771069 - DNA, 15 bp, Homo sapiens
catattatttattta

SEQ ID NO: 1771070 - DNA, 15 bp, Homo sapiens
atattatttatttaa

SEQ ID NO: 1771071 - DNA, 15 bp, Homo sapiens
attatttatttaaat

SEQ ID NO: 1771072 - DNA, 15 bp, Homo sapiens
ttatttatttaaatc

SEQ ID NO: 1771073 - DNA, 15 bp, Homo sapiens
tatttatttaaatct

SEQ ID NO: 1771074 - DNA, 15 bp, Homo sapiens
atttatttaaatctg

SEQ ID NO: 1771075 - DNA, 15 bp, Homo sapiens
tttatttaaatctga

SEQ ID NO: 1771076 - DNA, 15 bp, Homo sapiens
ttatttaaatctgac

SEQ ID NO: 1771077 - DNA, 15 bp, Homo sapiens
tatttaaatctgaca

SEQ ID NO: 1771078 - DNA, 15 bp, Homo sapiens
atttaaatctgacac

SEQ ID NO: 1771079 - DNA, 15 bp, Homo sapiens
tttaaatctgacaca

SEQ ID NO: 1771080 - DNA, 15 bp, Homo sapiens
ttaaatctgacacat

SEQ ID NO: 1771081 - DNA, 15 bp, Homo sapiens
taaatctgacacatg

SEQ ID NO: 1771082 - DNA, 15 bp, Homo sapiens
aaatctgacacatgt

SEQ ID NO: 1771083 - DNA, 15 bp, Homo sapiens
aatctgacacatgta

SEQ ID NO: 1771084 - DNA, 15 bp, Homo sapiens
atctgacacatgtat

SEQ ID NO: 1771085 - DNA, 15 bp, Homo sapiens
tctgacacatgtatt

SEQ ID NO: 1771086 - DNA, 15 bp, Homo sapiens
ctgacacatgtatta

SEQ ID NO: 1771087 - DNA, 15 bp, Homo sapiens
tgacacatgtattac

SEQ ID NO: 1771088 - DNA, 15 bp, Homo sapiens
gacacatgtattacg

SEQ ID NO: 1771089 - DNA, 15 bp, Homo sapiens
acacatgtattacga

SEQ ID NO: 1771090 - DNA, 15 bp, Homo sapiens
cacatgtattacgat

SEQ ID NO: 1771091 - DNA, 15 bp, Homo sapiens
acatgtattacgatt

SEQ ID NO: 1771092 - DNA, 15 bp, Homo sapiens
catgtattacgattt

SEQ ID NO: 1771093 - DNA, 15 bp, Homo sapiens
atgtattacgattta

SEQ ID NO: 1771094 - DNA, 15 bp, Homo sapiens
tgtattacgatttaa

SEQ ID NO: 1771095 - DNA, 15 bp, Homo sapiens
gtattacgatttaag

SEQ ID NO: 1771096 - DNA, 15 bp, Homo sapiens
tattacgatttaagc

SEQ ID NO: 1771097 - DNA, 15 bp, Homo sapiens
attacgatttaagcc

SEQ ID NO: 1771098 - DNA, 15 bp, Homo sapiens
ttacgatttaagccg

SEQ ID NO: 1771099 - DNA, 15 bp, Homo sapiens
tacgatttaagccga

SEQ ID NO: 1771100 - DNA, 15 bp, Homo sapiens
acgatttaagccgaa

SEQ ID NO: 1771101 - DNA, 15 bp, Homo sapiens
cgatttaagccgaat

SEQ ID NO: 1771102 - DNA, 15 bp, Homo sapiens
gatttaagccgaatt

SEQ ID NO: 1771103 - DNA, 15 bp, Homo sapiens
atttaagccgaattg

SEQ ID NO: 1771104 - DNA, 15 bp, Homo sapiens
tttaagccgaattgg

SEQ ID NO: 1771105 - DNA, 15 bp, Homo sapiens
ttaagccgaattgga

SEQ ID NO: 1771106 - DNA, 15 bp, Homo sapiens
taagccgaattggat

SEQ ID NO: 1771107 - DNA, 15 bp, Homo sapiens
aagccgaattggatc

SEQ ID NO: 1771108 - DNA, 15 bp, Homo sapiens
agccgaattggatca

SEQ ID NO: 1771109 - DNA, 15 bp, Homo sapiens
gccgaattggatcat

SEQ ID NO: 1771110 - DNA, 15 bp, Homo sapiens
ccgaattggatcata

SEQ ID NO: 1771111 - DNA, 15 bp, Homo sapiens
cgaattggatcatat

SEQ ID NO: 1771112 - DNA, 15 bp, Homo sapiens
gaattggatcatatt

SEQ ID NO: 1771113 - DNA, 15 bp, Homo sapiens
aattggatcatatta

SEQ ID NO: 1771114 - DNA, 15 bp, Homo sapiens
attggatcatattat

SEQ ID NO: 1771115 - DNA, 15 bp, Homo sapiens
ttggatcatattatt

SEQ ID NO: 1771116 - DNA, 15 bp, Homo sapiens
tggatcatattatta

SEQ ID NO: 1771117 - DNA, 15 bp, Homo sapiens
ggatcatattattat

SEQ ID NO: 1771118 - DNA, 15 bp, Homo sapiens
gatcatattattatc

SEQ ID NO: 1771119 - DNA, 15 bp, Homo sapiens
atcatattattatca

SEQ ID NO: 1771120 - DNA, 15 bp, Homo sapiens
tcatattattatcaa

SEQ ID NO: 1771121 - DNA, 15 bp, Homo sapiens
catattattatcaaa

SEQ ID NO: 1771122 - DNA, 15 bp, Homo sapiens
atattattatcaaag

SEQ ID NO: 1771123 - DNA, 15 bp, Homo sapiens
tattattatcaaaga

SEQ ID NO: 1771124 - DNA, 15 bp, Homo sapiens
attattatcaaagac

SEQ ID NO: 1771125 - DNA, 15 bp, Homo sapiens
ttattatcaaagaca

SEQ ID NO: 1771126 - DNA, 15 bp, Homo sapiens
tattatcaaagacat

SEQ ID NO: 1771127 - DNA, 15 bp, Homo sapiens
attatcaaagacatg

SEQ ID NO: 1771128 - DNA, 15 bp, Homo sapiens
ttatcaaagacatgc

SEQ ID NO: 1771129 - DNA, 15 bp, Homo sapiens
tatcaaagacatgct

SEQ ID NO: 1771130 - DNA, 15 bp, Homo sapiens
atcaaagacatgctt

SEQ ID NO: 1771131 - DNA, 15 bp, Homo sapiens
tcaaagacatgcttt

SEQ ID NO: 1771132 - DNA, 15 bp, Homo sapiens
caaagacatgctttc

SEQ ID NO: 1771133 - DNA, 15 bp, Homo sapiens
aaagacatgctttcc

SEQ ID NO: 1771134 - DNA, 15 bp, Homo sapiens
aagacatgctttccc

SEQ ID NO: 1771135 - DNA, 15 bp, Homo sapiens
agacatgctttcccc

SEQ ID NO: 1771136 - DNA, 15 bp, Homo sapiens
gacatgctttcccca

SEQ ID NO: 1771137 - DNA, 15 bp, Homo sapiens
acatgctttccccag

SEQ ID NO: 1771138 - DNA, 15 bp, Homo sapiens
catgctttccccagg

SEQ ID NO: 1771139 - DNA, 15 bp, Homo sapiens
atgctttccccaggg

SEQ ID NO: 1771140 - DNA, 15 bp, Homo sapiens
tgctttccccagggt

SEQ ID NO: 1771141 - DNA, 15 bp, Homo sapiens
gctttccccagggtg

SEQ ID NO: 1771142 - DNA, 15 bp, Homo sapiens
ctttccccagggtgt

SEQ ID NO: 1771143 - DNA, 15 bp, Homo sapiens
tttccccagggtgtg

SEQ ID NO: 1771144 - DNA, 15 bp, Homo sapiens
ttccccagggtgtgg

SEQ ID NO: 1771145 - DNA, 15 bp, Homo sapiens
tccccagggtgtggt

SEQ ID NO: 1771146 - DNA, 15 bp, Homo sapiens
ccccagggtgtggtg

SEQ ID NO: 1771147 - DNA, 15 bp, Homo sapiens
cccagggtgtggtga

SEQ ID NO: 1771148 - DNA, 15 bp, Homo sapiens
ccagggtgtggtgag

SEQ ID NO: 1771149 - DNA, 15 bp, Homo sapiens
cagggtgtggtgagt

SEQ ID NO: 1771150 - DNA, 15 bp, Homo sapiens
agggtgtggtgagtc

SEQ ID NO: 1771151 - DNA, 15 bp, Homo sapiens
gggtgtggtgagtct

SEQ ID NO: 1771152 - DNA, 15 bp, Homo sapiens
ggtgtggtgagtctg

SEQ ID NO: 1771153 - DNA, 15 bp, Homo sapiens
gtgtggtgagtctgg

SEQ ID NO: 1771154 - DNA, 15 bp, Homo sapiens
tgtggtgagtctgga

SEQ ID NO: 1771155 - DNA, 15 bp, Homo sapiens
gtggtgagtctggaa

SEQ ID NO: 1771156 - DNA, 15 bp, Homo sapiens
tggtgagtctggaag

SEQ ID NO: 1771157 - DNA, 15 bp, Homo sapiens
ggtgagtctggaagt

SEQ ID NO: 1771158 - DNA, 15 bp, Homo sapiens
gtgagtctggaagtg

SEQ ID NO: 1771159 - DNA, 15 bp, Homo sapiens
tgagtctggaagtgg

SEQ ID NO: 1771160 - DNA, 15 bp, Homo sapiens
gagtctggaagtggc

SEQ ID NO: 1771161 - DNA, 15 bp, Homo sapiens
agtctggaagtggcc

SEQ ID NO: 1771162 - DNA, 15 bp, Homo sapiens
gtctggaagtggccc

SEQ ID NO: 1771163 - DNA, 15 bp, Homo sapiens
tctggaagtggccct

SEQ ID NO: 1771164 - DNA, 15 bp, Homo sapiens
ctggaagtggccctt

SEQ ID NO: 1771165 - DNA, 15 bp, Homo sapiens
tggaagtggcccttg

SEQ ID NO: 1771166 - DNA, 15 bp, Homo sapiens
ggaagtggcccttgg

SEQ ID NO: 1771167 - DNA, 15 bp, Homo sapiens
gaagtggcccttgga

SEQ ID NO: 1771168 - DNA, 15 bp, Homo sapiens
aagtggcccttggat

SEQ ID NO: 1771169 - DNA, 15 bp, Homo sapiens
agtggcccttggatt

SEQ ID NO: 1771170 - DNA, 15 bp, Homo sapiens
gtggcccttggattc

SEQ ID NO: 1771171 - DNA, 15 bp, Homo sapiens
tggcccttggattct

SEQ ID NO: 1771172 - DNA, 15 bp, Homo sapiens
ggcccttggattctt

SEQ ID NO: 1771173 - DNA, 15 bp, Homo sapiens
gcccttggattcttg

SEQ ID NO: 1771174 - DNA, 15 bp, Homo sapiens
cccttggattcttgg

SEQ ID NO: 1771175 - DNA, 15 bp, Homo sapiens
ccttggattcttggg

SEQ ID NO: 1771176 - DNA, 15 bp, Homo sapiens
cttggattcttgggc

SEQ ID NO: 1771177 - DNA, 15 bp, Homo sapiens
ttggattcttgggcg

SEQ ID NO: 1771178 - DNA, 15 bp, Homo sapiens
tggattcttgggcgg

SEQ ID NO: 1771179 - DNA, 15 bp, Homo sapiens
ggattcttgggcggt

SEQ ID NO: 1771180 - DNA, 15 bp, Homo sapiens
gattcttgggcggtg

SEQ ID NO: 1771181 - DNA, 15 bp, Homo sapiens
attcttgggcggtgt

SEQ ID NO: 1771182 - DNA, 15 bp, Homo sapiens
ttcttgggcggtgtg

SEQ ID NO: 1771183 - DNA, 15 bp, Homo sapiens
tcttgggcggtgtgc

SEQ ID NO: 1771184 - DNA, 15 bp, Homo sapiens
cttgggcggtgtgct

SEQ ID NO: 1771185 - DNA, 15 bp, Homo sapiens
ttgggcggtgtgctg

SEQ ID NO: 1771186 - DNA, 15 bp, Homo sapiens
tgggcggtgtgctgc

SEQ ID NO: 1771187 - DNA, 15 bp, Homo sapiens
gggcggtgtgctgcc

SEQ ID NO: 1771188 - DNA, 15 bp, Homo sapiens
ggcggtgtgctgcct

SEQ ID NO: 1771189 - DNA, 15 bp, Homo sapiens
gcggtgtgctgcctc

SEQ ID NO: 1771190 - DNA, 15 bp, Homo sapiens
cggtgtgctgcctct

SEQ ID NO: 1771191 - DNA, 15 bp, Homo sapiens
ggtgtgctgcctctt

SEQ ID NO: 1771192 - DNA, 15 bp, Homo sapiens
gtgtgctgcctcttt

SEQ ID NO: 1771193 - DNA, 15 bp, Homo sapiens
tgctgcctctttcat

SEQ ID NO: 1771194 - DNA, 15 bp, Homo sapiens
gctgcctctttcatg

SEQ ID NO: 1771195 - DNA, 15 bp, Homo sapiens
ctgcctctttcatgt

SEQ ID NO: 1771196 - DNA, 15 bp, Homo sapiens
tgcctctttcatgtc

SEQ ID NO: 1771197 - DNA, 15 bp, Homo sapiens
gcctctttcatgtcc

SEQ ID NO: 1771198 - DNA, 15 bp, Homo sapiens
cctctttcatgtcct

SEQ ID NO: 1771199 - DNA, 15 bp, Homo sapiens
ctctttcatgtcctc

SEQ ID NO: 1771200 - DNA, 15 bp, Homo sapiens
tctttcatgtcctcc

SEQ ID NO: 1771201 - DNA, 15 bp, Homo sapiens
ctttcatgtcctccc

SEQ ID NO: 1771202 - DNA, 15 bp, Homo sapiens
tttcatgtcctcccc

SEQ ID NO: 1771203 - DNA, 15 bp, Homo sapiens
ttcatgtcctcccca

SEQ ID NO: 1771204 - DNA, 15 bp, Homo sapiens
tcatgtcctccccag

SEQ ID NO: 1771205 - DNA, 15 bp, Homo sapiens
catgtcctccccagc

SEQ ID NO: 1771206 - DNA, 15 bp, Homo sapiens
atgtcctccccagcc

SEQ ID NO: 1771207 - DNA, 15 bp, Homo sapiens
tgtcctccccagccc

SEQ ID NO: 1771208 - DNA, 15 bp, Homo sapiens
gtcctccccagccca

SEQ ID NO: 1771209 - DNA, 15 bp, Homo sapiens
tcctccccagcccat

SEQ ID NO: 1771210 - DNA, 15 bp, Homo sapiens
cctccccagcccatg

SEQ ID NO: 1771211 - DNA, 15 bp, Homo sapiens
ctccccagcccatga

SEQ ID NO: 1771212 - DNA, 15 bp, Homo sapiens
tccccagcccatgaa

SEQ ID NO: 1771213 - DNA, 15 bp, Homo sapiens
ccccagcccatgaat

SEQ ID NO: 1771214 - DNA, 15 bp, Homo sapiens
cccagcccatgaatt

SEQ ID NO: 1771215 - DNA, 15 bp, Homo sapiens
ccagcccatgaattg

SEQ ID NO: 1771216 - DNA, 15 bp, Homo sapiens
cagcccatgaattga

SEQ ID NO: 1771217 - DNA, 15 bp, Homo sapiens
agcccatgaattgaa

SEQ ID NO: 1771218 - DNA, 15 bp, Homo sapiens
gcccatgaattgaaa

SEQ ID NO: 1771219 - DNA, 15 bp, Homo sapiens
ccatgaattgaaata

SEQ ID NO: 1771220 - DNA, 15 bp, Homo sapiens
catgaattgaaatag

SEQ ID NO: 1771221 - DNA, 15 bp, Homo sapiens
atgaattgaaatagc

SEQ ID NO: 1771222 - DNA, 15 bp, Homo sapiens
tgaattgaaatagca

SEQ ID NO: 1771223 - DNA, 15 bp, Homo sapiens
gaattgaaatagcag

SEQ ID NO: 1771224 - DNA, 15 bp, Homo sapiens
aattgaaatagcagc

SEQ ID NO: 1771225 - DNA, 15 bp, Homo sapiens
attgaaatagcagcc

SEQ ID NO: 1771226 - DNA, 15 bp, Homo sapiens
ttgaaatagcagcca

SEQ ID NO: 1771227 - DNA, 15 bp, Homo sapiens
tgaaatagcagccac

SEQ ID NO: 1771228 - DNA, 15 bp, Homo sapiens
gaaatagcagccaca

SEQ ID NO: 1771229 - DNA, 15 bp, Homo sapiens
aaatagcagccacag

SEQ ID NO: 1771230 - DNA, 15 bp, Homo sapiens
aatagcagccacaga

SEQ ID NO: 1771231 - DNA, 15 bp, Homo sapiens
atagcagccacagag

SEQ ID NO: 1771232 - DNA, 15 bp, Homo sapiens
tagcagccacagaga

SEQ ID NO: 1771233 - DNA, 15 bp, Homo sapiens
agcagccacagagac

SEQ ID NO: 1771234 - DNA, 15 bp, Homo sapiens
gcagccacagagact

SEQ ID NO: 1771235 - DNA, 15 bp, Homo sapiens
cagccacagagactc

SEQ ID NO: 1771236 - DNA, 15 bp, Homo sapiens
agccacagagactcc

SEQ ID NO: 1771237 - DNA, 15 bp, Homo sapiens
gccacagagactccc

SEQ ID NO: 1771238 - DNA, 15 bp, Homo sapiens
ccacagagactccca

SEQ ID NO: 1771239 - DNA, 15 bp, Homo sapiens
cacagagactcccag

SEQ ID NO: 1771240 - DNA, 15 bp, Homo sapiens
acagagactcccagc

SEQ ID NO: 1771241 - DNA, 15 bp, Homo sapiens
cagagactcccagcc

SEQ ID NO: 1771242 - DNA, 15 bp, Homo sapiens
agagactcccagcct

SEQ ID NO: 1771243 - DNA, 15 bp, Homo sapiens
gagactcccagcctt

SEQ ID NO: 1771244 - DNA, 15 bp, Homo sapiens
agactcccagccttc

SEQ ID NO: 1771245 - DNA, 15 bp, Homo sapiens
gactcccagccttcc

SEQ ID NO: 1771246 - DNA, 15 bp, Homo sapiens
actcccagccttcct

SEQ ID NO: 1771247 - DNA, 15 bp, Homo sapiens
ctcccagccttcctg

SEQ ID NO: 1771248 - DNA, 15 bp, Homo sapiens
tcccagccttcctgt

SEQ ID NO: 1771249 - DNA, 15 bp, Homo sapiens
cccagccttcctgta

SEQ ID NO: 1771250 - DNA, 15 bp, Homo sapiens
ccagccttcctgtaa

SEQ ID NO: 1771251 - DNA, 15 bp, Homo sapiens
cagccttcctgtaat

SEQ ID NO: 1771252 - DNA, 15 bp, Homo sapiens
agccttcctgtaatt

SEQ ID NO: 1771253 - DNA, 15 bp, Homo sapiens
gccttcctgtaattt

SEQ ID NO: 1771254 - DNA, 15 bp, Homo sapiens
ccttcctgtaatttg

SEQ ID NO: 1771255 - DNA, 15 bp, Homo sapiens
cttcctgtaatttgt

SEQ ID NO: 1771256 - DNA, 15 bp, Homo sapiens
ttcctgtaatttgtg

SEQ ID NO: 1771257 - DNA, 15 bp, Homo sapiens
tcctgtaatttgtgt

SEQ ID NO: 1771258 - DNA, 15 bp, Homo sapiens
cctgtaatttgtgtc

SEQ ID NO: 1771259 - DNA, 15 bp, Homo sapiens
ctgtaatttgtgtct

SEQ ID NO: 1771260 - DNA, 15 bp, Homo sapiens
tgtaatttgtgtctc

SEQ ID NO: 1771261 - DNA, 15 bp, Homo sapiens
gtaatttgtgtctcc

SEQ ID NO: 1771262 - DNA, 15 bp, Homo sapiens
taatttgtgtctcct

SEQ ID NO: 1771263 - DNA, 15 bp, Homo sapiens
aatttgtgtctcctg

SEQ ID NO: 1771264 - DNA, 15 bp, Homo sapiens
atttgtgtctcctgc

SEQ ID NO: 1771265 - DNA, 15 bp, Homo sapiens
tttgtgtctcctgca

SEQ ID NO: 1771266 - DNA, 15 bp, Homo sapiens
ttgtgtctcctgcag

SEQ ID NO: 1771267 - DNA, 15 bp, Homo sapiens
tgtgtctcctgcagg

SEQ ID NO: 1771268 - DNA, 15 bp, Homo sapiens
gtgtctcctgcaggt

SEQ ID NO: 1771269 - DNA, 15 bp, Homo sapiens
tgtctcctgcaggtg

SEQ ID NO: 1771270 - DNA, 15 bp, Homo sapiens
gtctcctgcaggtgg

SEQ ID NO: 1771271 - DNA, 15 bp, Homo sapiens
tctcctgcaggtgga

SEQ ID NO: 1771272 - DNA, 15 bp, Homo sapiens
ctcctgcaggtggag

SEQ ID NO: 1771273 - DNA, 15 bp, Homo sapiens
tcctgcaggtggagg

SEQ ID NO: 1771274 - DNA, 15 bp, Homo sapiens
cctgcaggtggaggc

SEQ ID NO: 1771275 - DNA, 15 bp, Homo sapiens
ctgcaggtggaggcc

SEQ ID NO: 1771276 - DNA, 15 bp, Homo sapiens
tgcaggtggaggccg

SEQ ID NO: 1771277 - DNA, 15 bp, Homo sapiens
gcaggtggaggccgt

SEQ ID NO: 1771278 - DNA, 15 bp, Homo sapiens
caggtggaggccgtc

SEQ ID NO: 1771279 - DNA, 15 bp, Homo sapiens
aggtggaggccgtca

SEQ ID NO: 1771280 - DNA, 15 bp, Homo sapiens
ggtggaggccgtcat

SEQ ID NO: 1771281 - DNA, 15 bp, Homo sapiens
gtggaggccgtcatg

SEQ ID NO: 1771282 - DNA, 15 bp, Homo sapiens
tggaggccgtcatgg

SEQ ID NO: 1771283 - DNA, 15 bp, Homo sapiens
ggaggccgtcatggc

SEQ ID NO: 1771284 - DNA, 15 bp, Homo sapiens
gaggccgtcatggca

SEQ ID NO: 1771285 - DNA, 15 bp, Homo sapiens
aggccgtcatggcag

SEQ ID NO: 1771286 - DNA, 15 bp, Homo sapiens
ggccgtcatggcaga

SEQ ID NO: 1771287 - DNA, 15 bp, Homo sapiens
gccgtcatggcagag

SEQ ID NO: 1771288 - DNA, 15 bp, Homo sapiens
ccgtcatggcagagc

SEQ ID NO: 1771289 - DNA, 15 bp, Homo sapiens
cgtcatggcagagct

SEQ ID NO: 1771290 - DNA, 15 bp, Homo sapiens
gtcatggcagagctg

SEQ ID NO: 1771291 - DNA, 15 bp, Homo sapiens
tcatggcagagctga

SEQ ID NO: 1771292 - DNA, 15 bp, Homo sapiens
catggcagagctgag

SEQ ID NO: 1771293 - DNA, 15 bp, Homo sapiens
atggcagagctgagt

SEQ ID NO: 1771294 - DNA, 15 bp, Homo sapiens
tggcagagctgagtc

SEQ ID NO: 1771295 - DNA, 15 bp, Homo sapiens
ggcagagctgagtct

SEQ ID NO: 1771296 - DNA, 15 bp, Homo sapiens
gcagagctgagtctg

SEQ ID NO: 1771297 - DNA, 15 bp, Homo sapiens
cagagctgagtctga

SEQ ID NO: 1771298 - DNA, 15 bp, Homo sapiens
agagctgagtctgag

SEQ ID NO: 1771299 - DNA, 15 bp, Homo sapiens
gagctgagtctgagc

SEQ ID NO: 1771300 - DNA, 15 bp, Homo sapiens
agctgagtctgagcc

SEQ ID NO: 1771301 - DNA, 15 bp, Homo sapiens
gctgagtctgagcca

SEQ ID NO: 1771302 - DNA, 15 bp, Homo sapiens
ctgagtctgagccat

SEQ ID NO: 1771303 - DNA, 15 bp, Homo sapiens
tgagtctgagccatg

SEQ ID NO: 1771304 - DNA, 15 bp, Homo sapiens
gagtctgagccatgt

SEQ ID NO: 1771305 - DNA, 15 bp, Homo sapiens
agtctgagccatgtg

SEQ ID NO: 1771306 - DNA, 15 bp, Homo sapiens
gtctgagccatgtgg

SEQ ID NO: 1771307 - DNA, 15 bp, Homo sapiens
tctgagccatgtggc

SEQ ID NO: 1771308 - DNA, 15 bp, Homo sapiens
ctgagccatgtggca

SEQ ID NO: 1771309 - DNA, 15 bp, Homo sapiens
tgagccatgtggcag

SEQ ID NO: 1771310 - DNA, 15 bp, Homo sapiens
gagccatgtggcaga

SEQ ID NO: 1771311 - DNA, 15 bp, Homo sapiens
agccatgtggcagac

SEQ ID NO: 1771312 - DNA, 15 bp, Homo sapiens
gccatgtggcagacc

SEQ ID NO: 1771313 - DNA, 15 bp, Homo sapiens
ccatgtggcagaccg

SEQ ID NO: 1771314 - DNA, 15 bp, Homo sapiens
catgtggcagaccga

SEQ ID NO: 1771315 - DNA, 15 bp, Homo sapiens
atgtggcagaccgac

SEQ ID NO: 1771316 - DNA, 15 bp, Homo sapiens
tgtggcagaccgact

SEQ ID NO: 1771317 - DNA, 15 bp, Homo sapiens
gtggcagaccgactg

SEQ ID NO: 1771318 - DNA, 15 bp, Homo sapiens
tggcagaccgactga

SEQ ID NO: 1771319 - DNA, 15 bp, Homo sapiens
ggcagaccgactgat

SEQ ID NO: 1771320 - DNA, 15 bp, Homo sapiens
gcagaccgactgatt

SEQ ID NO: 1771321 - DNA, 15 bp, Homo sapiens
cagaccgactgattg

SEQ ID NO: 1771322 - DNA, 15 bp, Homo sapiens
agaccgactgattgg

SEQ ID NO: 1771323 - DNA, 15 bp, Homo sapiens
gaccgactgattggc

SEQ ID NO: 1771324 - DNA, 15 bp, Homo sapiens
accgactgattggca

SEQ ID NO: 1771325 - DNA, 15 bp, Homo sapiens
ccgactgattggcaa

SEQ ID NO: 1771326 - DNA, 15 bp, Homo sapiens
cgactgattggcaac

SEQ ID NO: 1771327 - DNA, 15 bp, Homo sapiens
gactgattggcaact

SEQ ID NO: 1771328 - DNA, 15 bp, Homo sapiens
actgattggcaacta

SEQ ID NO: 1771329 - DNA, 15 bp, Homo sapiens
ctgattggcaactac

SEQ ID NO: 1771330 - DNA, 15 bp, Homo sapiens
tgattggcaactaca

SEQ ID NO: 1771331 - DNA, 15 bp, Homo sapiens
gattggcaactacag

SEQ ID NO: 1771332 - DNA, 15 bp, Homo sapiens
attggcaactacagc

SEQ ID NO: 1771333 - DNA, 15 bp, Homo sapiens
ttggcaactacagct

SEQ ID NO: 1771334 - DNA, 15 bp, Homo sapiens
tggcaactacagctt

SEQ ID NO: 1771335 - DNA, 15 bp, Homo sapiens
ggcaactacagcttg

SEQ ID NO: 1771336 - DNA, 15 bp, Homo sapiens
gcaactacagcttgg

SEQ ID NO: 1771337 - DNA, 15 bp, Homo sapiens
caactacagcttggg

SEQ ID NO: 1771338 - DNA, 15 bp, Homo sapiens
aactacagcttgggg

SEQ ID NO: 1771339 - DNA, 15 bp, Homo sapiens
actacagcttggggg

SEQ ID NO: 1771340 - DNA, 15 bp, Homo sapiens
ctacagcttgggggg

SEQ ID NO: 1771341 - DNA, 15 bp, Homo sapiens
tacagcttggggggc

SEQ ID NO: 1771342 - DNA, 15 bp, Homo sapiens
acagcttggggggca

SEQ ID NO: 1771343 - DNA, 15 bp, Homo sapiens
cagcttggggggcat

SEQ ID NO: 1771344 - DNA, 15 bp, Homo sapiens
agcttggggggcatt

SEQ ID NO: 1771345 - DNA, 15 bp, Homo sapiens
gcttggggggcattt

SEQ ID NO: 1771346 - DNA, 15 bp, Homo sapiens
cttggggggcatttc

SEQ ID NO: 1771347 - DNA, 15 bp, Homo sapiens
ttggggggcatttcc

SEQ ID NO: 1771348 - DNA, 15 bp, Homo sapiens
tggggggcatttcca

SEQ ID NO: 1771349 - DNA, 15 bp, Homo sapiens
ggggggcatttccac

SEQ ID NO: 1771350 - DNA, 15 bp, Homo sapiens
gggggcatttccacg

SEQ ID NO: 1771351 - DNA, 15 bp, Homo sapiens
ggggcatttccacgg

SEQ ID NO: 1771352 - DNA, 15 bp, Homo sapiens
gggcatttccacggg

SEQ ID NO: 1771353 - DNA, 15 bp, Homo sapiens
ggcatttccacgggt

SEQ ID NO: 1771354 - DNA, 15 bp, Homo sapiens
gcatttccacgggtg

SEQ ID NO: 1771355 - DNA, 15 bp, Homo sapiens
catttccacgggtga

SEQ ID NO: 1771356 - DNA, 15 bp, Homo sapiens
atttccacgggtgag

SEQ ID NO: 1771357 - DNA, 15 bp, Homo sapiens
tttccacgggtgagc

SEQ ID NO: 1771358 - DNA, 15 bp, Homo sapiens
ttccacgggtgagcg

SEQ ID NO: 1771359 - DNA, 15 bp, Homo sapiens
tccacgggtgagcgg

SEQ ID NO: 1771360 - DNA, 15 bp, Homo sapiens
ccacgggtgagcggc

SEQ ID NO: 1771361 - DNA, 15 bp, Homo sapiens
cacgggtgagcggcg

SEQ ID NO: 1771362 - DNA, 15 bp, Homo sapiens
acgggtgagcggcgc

SEQ ID NO: 1771363 - DNA, 15 bp, Homo sapiens
cgggtgagcggcgcc

SEQ ID NO: 1771364 - DNA, 15 bp, Homo sapiens
gggtgagcggcgccg

SEQ ID NO: 1771365 - DNA, 15 bp, Homo sapiens
ggtgagcggcgccgg

SEQ ID NO: 1771366 - DNA, 15 bp, Homo sapiens
gtgagcggcgccggg

SEQ ID NO: 1771367 - DNA, 15 bp, Homo sapiens
tgagcggcgccgggt

SEQ ID NO: 1771368 - DNA, 15 bp, Homo sapiens
gagcggcgccgggtc

SEQ ID NO: 1771369 - DNA, 15 bp, Homo sapiens
agcggcgccgggtct

SEQ ID NO: 1771370 - DNA, 15 bp, Homo sapiens
gcggcgccgggtctc

SEQ ID NO: 1771371 - DNA, 15 bp, Homo sapiens
cggcgccgggtctcc

SEQ ID NO: 1771372 - DNA, 15 bp, Homo sapiens
ggcgccgggtctcca

SEQ ID NO: 1771373 - DNA, 15 bp, Homo sapiens
gcgccgggtctccat

SEQ ID NO: 1771374 - DNA, 15 bp, Homo sapiens
cgccgggtctccatc

SEQ ID NO: 1771375 - DNA, 15 bp, Homo sapiens
gccgggtctccatcg

SEQ ID NO: 1771376 - DNA, 15 bp, Homo sapiens
ccgggtctccatcgc

SEQ ID NO: 1771377 - DNA, 15 bp, Homo sapiens
cgggtctccatcgca

SEQ ID NO: 1771378 - DNA, 15 bp, Homo sapiens
gggtctccatcgcag

SEQ ID NO: 1771379 - DNA, 15 bp, Homo sapiens
ggtctccatcgcagc

SEQ ID NO: 1771380 - DNA, 15 bp, Homo sapiens
gtctccatcgcagcc

SEQ ID NO: 1771381 - DNA, 15 bp, Homo sapiens
tctccatcgcagccc

SEQ ID NO: 1771382 - DNA, 15 bp, Homo sapiens
ctccatcgcagccca

SEQ ID NO: 1771383 - DNA, 15 bp, Homo sapiens
tccatcgcagcccag

SEQ ID NO: 1771384 - DNA, 15 bp, Homo sapiens
ccatcgcagcccagc

SEQ ID NO: 1771385 - DNA, 15 bp, Homo sapiens
catcgcagcccagct

SEQ ID NO: 1771386 - DNA, 15 bp, Homo sapiens
atcgcagcccagctg

SEQ ID NO: 1771387 - DNA, 15 bp, Homo sapiens
tcgcagcccagctgc

SEQ ID NO: 1771388 - DNA, 15 bp, Homo sapiens
cgcagcccagctgct

SEQ ID NO: 1771389 - DNA, 15 bp, Homo sapiens
gcagcccagctgctc

SEQ ID NO: 1771390 - DNA, 15 bp, Homo sapiens
cagcccagctgctcc

SEQ ID NO: 1771391 - DNA, 15 bp, Homo sapiens
agcccagctgctcca

SEQ ID NO: 1771392 - DNA, 15 bp, Homo sapiens
gcccagctgctccag

SEQ ID NO: 1771393 - DNA, 15 bp, Homo sapiens
cccagctgctccagg

SEQ ID NO: 1771394 - DNA, 15 bp, Homo sapiens
ccagctgctccagga

SEQ ID NO: 1771395 - DNA, 15 bp, Homo sapiens
cagctgctccaggat

SEQ ID NO: 1771396 - DNA, 15 bp, Homo sapiens
agctgctccaggatc

SEQ ID NO: 1771397 - DNA, 15 bp, Homo sapiens
gctgctccaggatcc

SEQ ID NO: 1771398 - DNA, 15 bp, Homo sapiens
ctgctccaggatcct

SEQ ID NO: 1771399 - DNA, 15 bp, Homo sapiens
tgctccaggatccta

SEQ ID NO: 1771400 - DNA, 15 bp, Homo sapiens
gctccaggatcctag

SEQ ID NO: 1771401 - DNA, 15 bp, Homo sapiens
ctccaggatcctagt

SEQ ID NO: 1771402 - DNA, 15 bp, Homo sapiens
tccaggatcctagta

SEQ ID NO: 1771403 - DNA, 15 bp, Homo sapiens
ccaggatcctagtaa

SEQ ID NO: 1771404 - DNA, 15 bp, Homo sapiens
caggatcctagtaag

SEQ ID NO: 1771405 - DNA, 15 bp, Homo sapiens
aggatcctagtaagt

SEQ ID NO: 1771406 - DNA, 15 bp, Homo sapiens
ggatcctagtaagtg

SEQ ID NO: 1771407 - DNA, 15 bp, Homo sapiens
gatcctagtaagtgg

SEQ ID NO: 1771408 - DNA, 15 bp, Homo sapiens
atcctagtaagtggc

SEQ ID NO: 1771409 - DNA, 15 bp, Homo sapiens
tcctagtaagtggca

SEQ ID NO: 1771410 - DNA, 15 bp, Homo sapiens
cctagtaagtggcac

SEQ ID NO: 1771411 - DNA, 15 bp, Homo sapiens
ctagtaagtggcacc

SEQ ID NO: 1771412 - DNA, 15 bp, Homo sapiens
tagtaagtggcaccc

SEQ ID NO: 1771413 - DNA, 15 bp, Homo sapiens
agtaagtggcaccca

SEQ ID NO: 1771414 - DNA, 15 bp, Homo sapiens
gtaagtggcacccag

SEQ ID NO: 1771415 - DNA, 15 bp, Homo sapiens
taagtggcacccaga

SEQ ID NO: 1771416 - DNA, 15 bp, Homo sapiens
aagtggcacccagaa

SEQ ID NO: 1771417 - DNA, 15 bp, Homo sapiens
agtggcacccagaac

SEQ ID NO: 1771418 - DNA, 15 bp, Homo sapiens
gtggcacccagaact

SEQ ID NO: 1771419 - DNA, 15 bp, Homo sapiens
tggcacccagaactg

SEQ ID NO: 1771420 - DNA, 15 bp, Homo sapiens
ggcacccagaactgt

SEQ ID NO: 1771421 - DNA, 15 bp, Homo sapiens
gcacccagaactgtt

SEQ ID NO: 1771422 - DNA, 15 bp, Homo sapiens
cacccagaactgtta

SEQ ID NO: 1771423 - DNA, 15 bp, Homo sapiens
acccagaactgttac

SEQ ID NO: 1771424 - DNA, 15 bp, Homo sapiens
cccagaactgttact

SEQ ID NO: 1771425 - DNA, 15 bp, Homo sapiens
ccagaactgttacta

SEQ ID NO: 1771426 - DNA, 15 bp, Homo sapiens
cagaactgttactag

SEQ ID NO: 1771427 - DNA, 15 bp, Homo sapiens
agaactgttactagc

SEQ ID NO: 1771428 - DNA, 15 bp, Homo sapiens
gaactgttactagct

SEQ ID NO: 1771429 - DNA, 15 bp, Homo sapiens
aactgttactagctg

SEQ ID NO: 1771430 - DNA, 15 bp, Homo sapiens
actgttactagctgc

SEQ ID NO: 1771431 - DNA, 15 bp, Homo sapiens
ctgttactagctgct

SEQ ID NO: 1771432 - DNA, 15 bp, Homo sapiens
tgttactagctgctg

SEQ ID NO: 1771433 - DNA, 15 bp, Homo sapiens
gttactagctgctgt

SEQ ID NO: 1771434 - DNA, 15 bp, Homo sapiens
ttactagctgctgtc

SEQ ID NO: 1771435 - DNA, 15 bp, Homo sapiens
tactagctgctgtct

SEQ ID NO: 1771436 - DNA, 15 bp, Homo sapiens
actagctgctgtctg

SEQ ID NO: 1771437 - DNA, 15 bp, Homo sapiens
ctagctgctgtctgg

SEQ ID NO: 1771438 - DNA, 15 bp, Homo sapiens
tagctgctgtctggg

SEQ ID NO: 1771439 - DNA, 15 bp, Homo sapiens
agctgctgtctgggc

SEQ ID NO: 1771440 - DNA, 15 bp, Homo sapiens
gctgctgtctgggca

SEQ ID NO: 1771441 - DNA, 15 bp, Homo sapiens
ctgctgtctgggcat

SEQ ID NO: 1771442 - DNA, 15 bp, Homo sapiens
tgctgtctgggcatc

SEQ ID NO: 1771443 - DNA, 15 bp, Homo sapiens
gctgtctgggcatct

SEQ ID NO: 1771444 - DNA, 15 bp, Homo sapiens
ctgtctgggcatctt

SEQ ID NO: 1771445 - DNA, 15 bp, Homo sapiens
tgtctgggcatcttc

SEQ ID NO: 1771446 - DNA, 15 bp, Homo sapiens
gtctgggcatcttct

SEQ ID NO: 1771447 - DNA, 15 bp, Homo sapiens
tctgggcatcttctg

SEQ ID NO: 1771448 - DNA, 15 bp, Homo sapiens
ctgggcatcttctgt

SEQ ID NO: 1771449 - DNA, 15 bp, Homo sapiens
tgggcatcttctgtg

SEQ ID NO: 1771450 - DNA, 15 bp, Homo sapiens
gggcatcttctgtgt

SEQ ID NO: 1771451 - DNA, 15 bp, Homo sapiens
ggcatcttctgtgtg

SEQ ID NO: 1771452 - DNA, 15 bp, Homo sapiens
gcatcttctgtgtgt

SEQ ID NO: 1771453 - DNA, 15 bp, Homo sapiens
catcttctgtgtgtg

SEQ ID NO: 1771454 - DNA, 15 bp, Homo sapiens
atcttctgtgtgtgt

SEQ ID NO: 1771455 - DNA, 15 bp, Homo sapiens
tcttctgtgtgtgtg

SEQ ID NO: 1771456 - DNA, 15 bp, Homo sapiens
cttctgtgtgtgtgc

SEQ ID NO: 1771457 - DNA, 15 bp, Homo sapiens
ttctgtgtgtgtgca

SEQ ID NO: 1771458 - DNA, 15 bp, Homo sapiens
tctgtgtgtgtgcag

SEQ ID NO: 1771459 - DNA, 15 bp, Homo sapiens
ctgtgtgtgtgcaga

SEQ ID NO: 1771460 - DNA, 15 bp, Homo sapiens
tgtgtgtgtgcagat

SEQ ID NO: 1771461 - DNA, 15 bp, Homo sapiens
gtgtgtgtgcagata

SEQ ID NO: 1771462 - DNA, 15 bp, Homo sapiens
tgtgtgtgcagatac

SEQ ID NO: 1771463 - DNA, 15 bp, Homo sapiens
gtgtgtgcagatact

SEQ ID NO: 1771464 - DNA, 15 bp, Homo sapiens
tgtgtgcagatactt

SEQ ID NO: 1771465 - DNA, 15 bp, Homo sapiens
gtgtgcagatacttt

SEQ ID NO: 1771466 - DNA, 15 bp, Homo sapiens
tgtgcagatactttg

SEQ ID NO: 1771467 - DNA, 15 bp, Homo sapiens
gtgcagatactttgg

SEQ ID NO: 1771468 - DNA, 15 bp, Homo sapiens
tgcagatactttggg

SEQ ID NO: 1771469 - DNA, 15 bp, Homo sapiens
gcagatactttgggc

SEQ ID NO: 1771470 - DNA, 15 bp, Homo sapiens
cagatactttgggcc

SEQ ID NO: 1771471 - DNA, 15 bp, Homo sapiens
agatactttgggccc

SEQ ID NO: 1771472 - DNA, 15 bp, Homo sapiens
gatactttgggccct

SEQ ID NO: 1771473 - DNA, 15 bp, Homo sapiens
atactttgggccctt

SEQ ID NO: 1771474 - DNA, 15 bp, Homo sapiens
tactttgggcccttt

SEQ ID NO: 1771475 - DNA, 15 bp, Homo sapiens
actttgggccctttc

SEQ ID NO: 1771476 - DNA, 15 bp, Homo sapiens
ctttgggccctttct

SEQ ID NO: 1771477 - DNA, 15 bp, Homo sapiens
tttgggccctttctt

SEQ ID NO: 1771478 - DNA, 15 bp, Homo sapiens
ttgggccctttcttc

SEQ ID NO: 1771479 - DNA, 15 bp, Homo sapiens
tgggccctttcttca

SEQ ID NO: 1771480 - DNA, 15 bp, Homo sapiens
gggccctttcttcac

SEQ ID NO: 1771481 - DNA, 15 bp, Homo sapiens
ggccctttcttcacg

SEQ ID NO: 1771482 - DNA, 15 bp, Homo sapiens
gccctttcttcacgg

SEQ ID NO: 1771483 - DNA, 15 bp, Homo sapiens
ccctttcttcacggt

SEQ ID NO: 1771484 - DNA, 15 bp, Homo sapiens
cctttcttcacggtc

SEQ ID NO: 1771485 - DNA, 15 bp, Homo sapiens
ctttcttcacggtcc

SEQ ID NO: 1771486 - DNA, 15 bp, Homo sapiens
tttcttcacggtcct

SEQ ID NO: 1771487 - DNA, 15 bp, Homo sapiens
ttcttcacggtcctc

SEQ ID NO: 1771488 - DNA, 15 bp, Homo sapiens
tcttcacggtcctca

SEQ ID NO: 1771489 - DNA, 15 bp, Homo sapiens
cttcacggtcctcat

SEQ ID NO: 1771490 - DNA, 15 bp, Homo sapiens
ttcacggtcctcatt

SEQ ID NO: 1771491 - DNA, 15 bp, Homo sapiens
tcacggtcctcattt

SEQ ID NO: 1771492 - DNA, 15 bp, Homo sapiens
cacggtcctcatttg

SEQ ID NO: 1771493 - DNA, 15 bp, Homo sapiens
acggtcctcatttgg

SEQ ID NO: 1771494 - DNA, 15 bp, Homo sapiens
cggtcctcatttgga

SEQ ID NO: 1771495 - DNA, 15 bp, Homo sapiens
ggtcctcatttggaa

SEQ ID NO: 1771496 - DNA, 15 bp, Homo sapiens
gtcctcatttggaaa

SEQ ID NO: 1771497 - DNA, 15 bp, Homo sapiens
tcctcatttggaaag

SEQ ID NO: 1771498 - DNA, 15 bp, Homo sapiens
cctcatttggaaagg

SEQ ID NO: 1771499 - DNA, 15 bp, Homo sapiens
ctcatttggaaaggg

SEQ ID NO: 1771500 - DNA, 15 bp, Homo sapiens
tcatttggaaagggg

SEQ ID NO: 1771501 - DNA, 15 bp, Homo sapiens
catttggaaaggggt

SEQ ID NO: 1771502 - DNA, 15 bp, Homo sapiens
atttggaaaggggtt

SEQ ID NO: 1771503 - DNA, 15 bp, Homo sapiens
tttggaaaggggttt

SEQ ID NO: 1771504 - DNA, 15 bp, Homo sapiens
ttggaaaggggtttg

SEQ ID NO: 1771505 - DNA, 15 bp, Homo sapiens
tggaaaggggtttgt

SEQ ID NO: 1771506 - DNA, 15 bp, Homo sapiens
ggaaaggggtttgtg

SEQ ID NO: 1771507 - DNA, 15 bp, Homo sapiens
gaaaggggtttgtgt

SEQ ID NO: 1771508 - DNA, 15 bp, Homo sapiens
aaaggggtttgtgta

SEQ ID NO: 1771509 - DNA, 15 bp, Homo sapiens
aaggggtttgtgtac

SEQ ID NO: 1771510 - DNA, 15 bp, Homo sapiens
aggggtttgtgtaca

SEQ ID NO: 1771511 - DNA, 15 bp, Homo sapiens
ggggtttgtgtacaa

SEQ ID NO: 1771512 - DNA, 15 bp, Homo sapiens
gggtttgtgtacaac

SEQ ID NO: 1771513 - DNA, 15 bp, Homo sapiens
ggtttgtgtacaact

SEQ ID NO: 1771514 - DNA, 15 bp, Homo sapiens
gtttgtgtacaactg

SEQ ID NO: 1771515 - DNA, 15 bp, Homo sapiens
tttgtgtacaactga

SEQ ID NO: 1771516 - DNA, 15 bp, Homo sapiens
ttgtgtacaactgaa

SEQ ID NO: 1771517 - DNA, 15 bp, Homo sapiens
tgtgtacaactgaaa

SEQ ID NO: 1771518 - DNA, 15 bp, Homo sapiens
gtgtacaactgaaat

SEQ ID NO: 1771519 - DNA, 15 bp, Homo sapiens
tgtacaactgaaatc

SEQ ID NO: 1771520 - DNA, 15 bp, Homo sapiens
gtacaactgaaatca

SEQ ID NO: 1771521 - DNA, 15 bp, Homo sapiens
tacaactgaaatcac

SEQ ID NO: 1771522 - DNA, 15 bp, Homo sapiens
acaactgaaatcaca

SEQ ID NO: 1771523 - DNA, 15 bp, Homo sapiens
caactgaaatcacag

SEQ ID NO: 1771524 - DNA, 15 bp, Homo sapiens
aactgaaatcacagg

SEQ ID NO: 1771525 - DNA, 15 bp, Homo sapiens
actgaaatcacaggt

SEQ ID NO: 1771526 - DNA, 15 bp, Homo sapiens
ctgaaatcacaggtt

SEQ ID NO: 1771527 - DNA, 15 bp, Homo sapiens
tgaaatcacaggttt

SEQ ID NO: 1771528 - DNA, 15 bp, Homo sapiens
gaaatcacaggtttt

SEQ ID NO: 1771529 - DNA, 15 bp, Homo sapiens
aaatcacaggttttt

SEQ ID NO: 1771530 - DNA, 15 bp, Homo sapiens
aatcacaggtttttc

SEQ ID NO: 1771531 - DNA, 15 bp, Homo sapiens
atcacaggtttttca

SEQ ID NO: 1771532 - DNA, 15 bp, Homo sapiens
tcacaggtttttcaa

SEQ ID NO: 1771533 - DNA, 15 bp, Homo sapiens
cacaggtttttcaaa

SEQ ID NO: 1771534 - DNA, 15 bp, Homo sapiens
acaggtttttcaaac

SEQ ID NO: 1771535 - DNA, 15 bp, Homo sapiens
caggtttttcaaact

SEQ ID NO: 1771536 - DNA, 15 bp, Homo sapiens
aggtttttcaaactg

SEQ ID NO: 1771537 - DNA, 15 bp, Homo sapiens
ggtttttcaaactga

SEQ ID NO: 1771538 - DNA, 15 bp, Homo sapiens
gtttttcaaactgag

SEQ ID NO: 1771539 - DNA, 15 bp, Homo sapiens
tttttcaaactgagg

SEQ ID NO: 1771540 - DNA, 15 bp, Homo sapiens
ttttcaaactgagga

SEQ ID NO: 1771541 - DNA, 15 bp, Homo sapiens
tttcaaactgaggac

SEQ ID NO: 1771542 - DNA, 15 bp, Homo sapiens
ttcaaactgaggacc

SEQ ID NO: 1771543 - DNA, 15 bp, Homo sapiens
tcaaactgaggaccc

SEQ ID NO: 1771544 - DNA, 15 bp, Homo sapiens
caaactgaggaccca

SEQ ID NO: 1771545 - DNA, 15 bp, Homo sapiens
aaactgaggacccag

SEQ ID NO: 1771546 - DNA, 15 bp, Homo sapiens
aactgaggacccagt

SEQ ID NO: 1771547 - DNA, 15 bp, Homo sapiens
actgaggacccagtt

SEQ ID NO: 1771548 - DNA, 15 bp, Homo sapiens
ctgaggacccagttt

SEQ ID NO: 1771549 - DNA, 15 bp, Homo sapiens
tgaggacccagtttt

SEQ ID NO: 1771550 - DNA, 15 bp, Homo sapiens
gaggacccagttttt

SEQ ID NO: 1771551 - DNA, 15 bp, Homo sapiens
aggacccagtttttt

SEQ ID NO: 1771552 - DNA, 15 bp, Homo sapiens
ggacccagttttttt

SEQ ID NO: 1771553 - DNA, 15 bp, Homo sapiens
gacccagtttttttg

SEQ ID NO: 1771554 - DNA, 15 bp, Homo sapiens
acccagtttttttgg

SEQ ID NO: 1771555 - DNA, 15 bp, Homo sapiens
cccagtttttttgga

SEQ ID NO: 1771556 - DNA, 15 bp, Homo sapiens
ccagtttttttggaa

SEQ ID NO: 1771557 - DNA, 15 bp, Homo sapiens
cagtttttttggaaa

SEQ ID NO: 1771558 - DNA, 15 bp, Homo sapiens
agtttttttggaaat

SEQ ID NO: 1771559 - DNA, 15 bp, Homo sapiens
gtttttttggaaatg

SEQ ID NO: 1771560 - DNA, 15 bp, Homo sapiens
tttttttggaaatgc

SEQ ID NO: 1771561 - DNA, 15 bp, Homo sapiens
ttttttggaaatgct

SEQ ID NO: 1771562 - DNA, 15 bp, Homo sapiens
tttttggaaatgctg

SEQ ID NO: 1771563 - DNA, 15 bp, Homo sapiens
ttttggaaatgctgt

SEQ ID NO: 1771564 - DNA, 15 bp, Homo sapiens
tttggaaatgctgta

SEQ ID NO: 1771565 - DNA, 15 bp, Homo sapiens
ttggaaatgctgtac

SEQ ID NO: 1771566 - DNA, 15 bp, Homo sapiens
tggaaatgctgtaca

SEQ ID NO: 1771567 - DNA, 15 bp, Homo sapiens
ggaaatgctgtacag

SEQ ID NO: 1771568 - DNA, 15 bp, Homo sapiens
gaaatgctgtacagt

SEQ ID NO: 1771569 - DNA, 15 bp, Homo sapiens
aaatgctgtacagtt

SEQ ID NO: 1771570 - DNA, 15 bp, Homo sapiens
aatgctgtacagttc

SEQ ID NO: 1771571 - DNA, 15 bp, Homo sapiens
atgctgtacagttca

SEQ ID NO: 1771572 - DNA, 15 bp, Homo sapiens
tgctgtacagttcat

SEQ ID NO: 1771573 - DNA, 15 bp, Homo sapiens
gctgtacagttcatt

SEQ ID NO: 1771574 - DNA, 15 bp, Homo sapiens
ctgtacagttcattt

SEQ ID NO: 1771575 - DNA, 15 bp, Homo sapiens
tgtacagttcatttc

SEQ ID NO: 1771576 - DNA, 15 bp, Homo sapiens
gtacagttcatttcc

SEQ ID NO: 1771577 - DNA, 15 bp, Homo sapiens
tacagttcatttcct

SEQ ID NO: 1771578 - DNA, 15 bp, Homo sapiens
acagttcatttcctg

SEQ ID NO: 1771579 - DNA, 15 bp, Homo sapiens
cagttcatttcctga

SEQ ID NO: 1771580 - DNA, 15 bp, Homo sapiens
agttcatttcctgat

SEQ ID NO: 1771581 - DNA, 15 bp, Homo sapiens
gttcatttcctgatg

SEQ ID NO: 1771582 - DNA, 15 bp, Homo sapiens
ttcatttcctgatgc

SEQ ID NO: 1771583 - DNA, 15 bp, Homo sapiens
tcatttcctgatgcg

SEQ ID NO: 1771584 - DNA, 15 bp, Homo sapiens
catttcctgatgcga

SEQ ID NO: 1771585 - DNA, 15 bp, Homo sapiens
atttcctgatgcgat

SEQ ID NO: 1771586 - DNA, 15 bp, Homo sapiens
tttcctgatgcgatt

SEQ ID NO: 1771587 - DNA, 15 bp, Homo sapiens
ttcctgatgcgattc

SEQ ID NO: 1771588 - DNA, 15 bp, Homo sapiens
tcctgatgcgattcc

SEQ ID NO: 1771589 - DNA, 15 bp, Homo sapiens
cctgatgcgattcca

SEQ ID NO: 1771590 - DNA, 15 bp, Homo sapiens
ctgatgcgattccat

SEQ ID NO: 1771591 - DNA, 15 bp, Homo sapiens
tgatgcgattccatc

SEQ ID NO: 1771592 - DNA, 15 bp, Homo sapiens
gatgcgattccatca

SEQ ID NO: 1771593 - DNA, 15 bp, Homo sapiens
atgcgattccatcat

SEQ ID NO: 1771594 - DNA, 15 bp, Homo sapiens
tgcgattccatcatc

SEQ ID NO: 1771595 - DNA, 15 bp, Homo sapiens
gcgattccatcatcc

SEQ ID NO: 1771596 - DNA, 15 bp, Homo sapiens
cgattccatcatcca

SEQ ID NO: 1771597 - DNA, 15 bp, Homo sapiens
gattccatcatccaa

SEQ ID NO: 1771598 - DNA, 15 bp, Homo sapiens
attccatcatccaaa

SEQ ID NO: 1771599 - DNA, 15 bp, Homo sapiens
ttccatcatccaaac

SEQ ID NO: 1771600 - DNA, 15 bp, Homo sapiens
tccatcatccaaaca

SEQ ID NO: 1771601 - DNA, 15 bp, Homo sapiens
ccatcatccaaacaa

SEQ ID NO: 1771602 - DNA, 15 bp, Homo sapiens
catcatccaaacaaa

SEQ ID NO: 1771603 - DNA, 15 bp, Homo sapiens
atcatccaaacaaaa

SEQ ID NO: 1771604 - DNA, 15 bp, Homo sapiens
catccaaacaaaaca

SEQ ID NO: 1771605 - DNA, 15 bp, Homo sapiens
atccaaacaaaacag

SEQ ID NO: 1771606 - DNA, 15 bp, Homo sapiens
tccaaacaaaacagc

SEQ ID NO: 1771607 - DNA, 15 bp, Homo sapiens
caaacaaaacagctc

SEQ ID NO: 1771608 - DNA, 15 bp, Homo sapiens
aaacaaaacagctcc

SEQ ID NO: 1771609 - DNA, 15 bp, Homo sapiens
aacaaaacagctcct

SEQ ID NO: 1771610 - DNA, 15 bp, Homo sapiens
acaaaacagctcctg

SEQ ID NO: 1771611 - DNA, 15 bp, Homo sapiens
caaaacagctcctgg

SEQ ID NO: 1771612 - DNA, 15 bp, Homo sapiens
aaaacagctcctgga

SEQ ID NO: 1771613 - DNA, 15 bp, Homo sapiens
aaacagctcctggac

SEQ ID NO: 1771614 - DNA, 15 bp, Homo sapiens
aacagctcctggacc

SEQ ID NO: 1771615 - DNA, 15 bp, Homo sapiens
acagctcctggaccc

SEQ ID NO: 1771616 - DNA, 15 bp, Homo sapiens
cagctcctggacccg

SEQ ID NO: 1771617 - DNA, 15 bp, Homo sapiens
agctcctggacccgg

SEQ ID NO: 1771618 - DNA, 15 bp, Homo sapiens
gctcctggacccgga

SEQ ID NO: 1771619 - DNA, 15 bp, Homo sapiens
ctcctggacccggaa

SEQ ID NO: 1771620 - DNA, 15 bp, Homo sapiens
tcctggacccggaag

SEQ ID NO: 1771621 - DNA, 15 bp, Homo sapiens
cctggacccggaagc

SEQ ID NO: 1771622 - DNA, 15 bp, Homo sapiens
ctggacccggaagcg

SEQ ID NO: 1771623 - DNA, 15 bp, Homo sapiens
tggacccggaagcgt

SEQ ID NO: 1771624 - DNA, 15 bp, Homo sapiens
ggacccggaagcgtt

SEQ ID NO: 1771625 - DNA, 15 bp, Homo sapiens
gacccggaagcgttg

SEQ ID NO: 1771626 - DNA, 15 bp, Homo sapiens
acccggaagcgttgc

SEQ ID NO: 1771627 - DNA, 15 bp, Homo sapiens
cccggaagcgttgca

SEQ ID NO: 1771628 - DNA, 15 bp, Homo sapiens
ccggaagcgttgcat

SEQ ID NO: 1771629 - DNA, 15 bp, Homo sapiens
cggaagcgttgcatt

SEQ ID NO: 1771630 - DNA, 15 bp, Homo sapiens
ggaagcgttgcattg

SEQ ID NO: 1771631 - DNA, 15 bp, Homo sapiens
gaagcgttgcattgg

SEQ ID NO: 1771632 - DNA, 15 bp, Homo sapiens
aagcgttgcattggt

SEQ ID NO: 1771633 - DNA, 15 bp, Homo sapiens
agcgttgcattggtg

SEQ ID NO: 1771634 - DNA, 15 bp, Homo sapiens
gcgttgcattggtgt

SEQ ID NO: 1771635 - DNA, 15 bp, Homo sapiens
cgttgcattggtgtt

SEQ ID NO: 1771636 - DNA, 15 bp, Homo sapiens
gttgcattggtgttg

SEQ ID NO: 1771637 - DNA, 15 bp, Homo sapiens
ttgcattggtgttga

SEQ ID NO: 1771638 - DNA, 15 bp, Homo sapiens
tgcattggtgttgaa

SEQ ID NO: 1771639 - DNA, 15 bp, Homo sapiens
gcattggtgttgaag

SEQ ID NO: 1771640 - DNA, 15 bp, Homo sapiens
cattggtgttgaagt

SEQ ID NO: 1771641 - DNA, 15 bp, Homo sapiens
attggtgttgaagtg

SEQ ID NO: 1771642 - DNA, 15 bp, Homo sapiens
ttggtgttgaagtgt

SEQ ID NO: 1771643 - DNA, 15 bp, Homo sapiens
tggtgttgaagtgtt

SEQ ID NO: 1771644 - DNA, 15 bp, Homo sapiens
ggtgttgaagtgttc

SEQ ID NO: 1771645 - DNA, 15 bp, Homo sapiens
gtgttgaagtgttcc

SEQ ID NO: 1771646 - DNA, 15 bp, Homo sapiens
tgttgaagtgttcca

SEQ ID NO: 1771647 - DNA, 15 bp, Homo sapiens
gttgaagtgttccat

SEQ ID NO: 1771648 - DNA, 15 bp, Homo sapiens
ttgaagtgttccatt

SEQ ID NO: 1771649 - DNA, 15 bp, Homo sapiens
tgaagtgttccattg

SEQ ID NO: 1771650 - DNA, 15 bp, Homo sapiens
gaagtgttccattgg

SEQ ID NO: 1771651 - DNA, 15 bp, Homo sapiens
aagtgttccattggg

SEQ ID NO: 1771652 - DNA, 15 bp, Homo sapiens
agtgttccattgggg

SEQ ID NO: 1771653 - DNA, 15 bp, Homo sapiens
gtgttccattggggt

SEQ ID NO: 1771654 - DNA, 15 bp, Homo sapiens
tgttccattggggtt

SEQ ID NO: 1771655 - DNA, 15 bp, Homo sapiens
gttccattggggttt

SEQ ID NO: 1771656 - DNA, 15 bp, Homo sapiens
ttccattggggtttt

SEQ ID NO: 1771657 - DNA, 15 bp, Homo sapiens
tccattggggttttc

SEQ ID NO: 1771658 - DNA, 15 bp, Homo sapiens
ccattggggttttcc

SEQ ID NO: 1771659 - DNA, 15 bp, Homo sapiens
cattggggttttcct

SEQ ID NO: 1771660 - DNA, 15 bp, Homo sapiens
attggggttttcctt

SEQ ID NO: 1771661 - DNA, 15 bp, Homo sapiens
ttggggttttccttg

SEQ ID NO: 1771662 - DNA, 15 bp, Homo sapiens
tggggttttccttga

SEQ ID NO: 1771663 - DNA, 15 bp, Homo sapiens
ggggttttccttgaa

SEQ ID NO: 1771664 - DNA, 15 bp, Homo sapiens
gggttttccttgaat

SEQ ID NO: 1771665 - DNA, 15 bp, Homo sapiens
ggttttccttgaata

SEQ ID NO: 1771666 - DNA, 15 bp, Homo sapiens
gttttccttgaatat

SEQ ID NO: 1771667 - DNA, 15 bp, Homo sapiens
ttttccttgaatatg

SEQ ID NO: 1771668 - DNA, 15 bp, Homo sapiens
tttccttgaatatgg

SEQ ID NO: 1771669 - DNA, 15 bp, Homo sapiens
ttccttgaatatgga

SEQ ID NO: 1771670 - DNA, 15 bp, Homo sapiens
tccttgaatatggag

SEQ ID NO: 1771671 - DNA, 15 bp, Homo sapiens
ccttgaatatggagc

SEQ ID NO: 1771672 - DNA, 15 bp, Homo sapiens
cttgaatatggagcc

SEQ ID NO: 1771673 - DNA, 15 bp, Homo sapiens
ttgaatatggagcct

SEQ ID NO: 1771674 - DNA, 15 bp, Homo sapiens
tgaatatggagcctt

SEQ ID NO: 1771675 - DNA, 15 bp, Homo sapiens
gaatatggagccttg

SEQ ID NO: 1771676 - DNA, 15 bp, Homo sapiens
aatatggagccttgc

SEQ ID NO: 1771677 - DNA, 15 bp, Homo sapiens
atatggagccttgcc

SEQ ID NO: 1771678 - DNA, 15 bp, Homo sapiens
tatggagccttgccc

SEQ ID NO: 1771679 - DNA, 15 bp, Homo sapiens
atggagccttgccct

SEQ ID NO: 1771680 - DNA, 15 bp, Homo sapiens
tggagccttgccctg

SEQ ID NO: 1771681 - DNA, 15 bp, Homo sapiens
ggagccttgccctgc

SEQ ID NO: 1771682 - DNA, 15 bp, Homo sapiens
gagccttgccctgcc

SEQ ID NO: 1771683 - DNA, 15 bp, Homo sapiens
agccttgccctgcca

SEQ ID NO: 1771684 - DNA, 15 bp, Homo sapiens
gccttgccctgccaa

SEQ ID NO: 1771685 - DNA, 15 bp, Homo sapiens
ccttgccctgccaat

SEQ ID NO: 1771686 - DNA, 15 bp, Homo sapiens
cttgccctgccaatc

SEQ ID NO: 1771687 - DNA, 15 bp, Homo sapiens
ttgccctgccaatca

SEQ ID NO: 1771688 - DNA, 15 bp, Homo sapiens
tgccctgccaatcat

SEQ ID NO: 1771689 - DNA, 15 bp, Homo sapiens
gccctgccaatcatt

SEQ ID NO: 1771690 - DNA, 15 bp, Homo sapiens
ccctgccaatcattt

SEQ ID NO: 1771691 - DNA, 15 bp, Homo sapiens
cctgccaatcatttc

SEQ ID NO: 1771692 - DNA, 15 bp, Homo sapiens
ctgccaatcatttct

SEQ ID NO: 1771693 - DNA, 15 bp, Homo sapiens
tgccaatcatttctt

SEQ ID NO: 1771694 - DNA, 15 bp, Homo sapiens
gccaatcatttcttc

SEQ ID NO: 1771695 - DNA, 15 bp, Homo sapiens
ccaatcatttcttct

SEQ ID NO: 1771696 - DNA, 15 bp, Homo sapiens
caatcatttcttctc

SEQ ID NO: 1771697 - DNA, 15 bp, Homo sapiens
aatcatttcttctca

SEQ ID NO: 1771698 - DNA, 15 bp, Homo sapiens
atcatttcttctcac

SEQ ID NO: 1771699 - DNA, 15 bp, Homo sapiens
tcatttcttctcacc

SEQ ID NO: 1771700 - DNA, 15 bp, Homo sapiens
catttcttctcacca

SEQ ID NO: 1771701 - DNA, 15 bp, Homo sapiens
atttcttctcaccag

SEQ ID NO: 1771702 - DNA, 15 bp, Homo sapiens
tttcttctcaccagg

SEQ ID NO: 1771703 - DNA, 15 bp, Homo sapiens
ttcttctcaccaggg

SEQ ID NO: 1771704 - DNA, 15 bp, Homo sapiens
tcttctcaccagggc

SEQ ID NO: 1771705 - DNA, 15 bp, Homo sapiens
cttctcaccagggca

SEQ ID NO: 1771706 - DNA, 15 bp, Homo sapiens
ttctcaccagggcaa

SEQ ID NO: 1771707 - DNA, 15 bp, Homo sapiens
tctcaccagggcaat

SEQ ID NO: 1771708 - DNA, 15 bp, Homo sapiens
ctcaccagggcaata

SEQ ID NO: 1771709 - DNA, 15 bp, Homo sapiens
tcaccagggcaatac

SEQ ID NO: 1771710 - DNA, 15 bp, Homo sapiens
caccagggcaatacc

SEQ ID NO: 1771711 - DNA, 15 bp, Homo sapiens
accagggcaatacca

SEQ ID NO: 1771712 - DNA, 15 bp, Homo sapiens
ccagggcaataccac

SEQ ID NO: 1771713 - DNA, 15 bp, Homo sapiens
cagggcaataccact

SEQ ID NO: 1771714 - DNA, 15 bp, Homo sapiens
agggcaataccactg

SEQ ID NO: 1771715 - DNA, 15 bp, Homo sapiens
gggcaataccactgt

SEQ ID NO: 1771716 - DNA, 15 bp, Homo sapiens
ggcaataccactgtg

SEQ ID NO: 1771717 - DNA, 15 bp, Homo sapiens
gcaataccactgtgt

SEQ ID NO: 1771718 - DNA, 15 bp, Homo sapiens
caataccactgtgtg

SEQ ID NO: 1771719 - DNA, 15 bp, Homo sapiens
aataccactgtgtgg

SEQ ID NO: 1771720 - DNA, 15 bp, Homo sapiens
ataccactgtgtggg

SEQ ID NO: 1771721 - DNA, 15 bp, Homo sapiens
taccactgtgtgggc

SEQ ID NO: 1771722 - DNA, 15 bp, Homo sapiens
ccactgtgtgggctg

SEQ ID NO: 1771723 - DNA, 15 bp, Homo sapiens
cactgtgtgggctgg

SEQ ID NO: 1771724 - DNA, 15 bp, Homo sapiens
actgtgtgggctggg

SEQ ID NO: 1771725 - DNA, 15 bp, Homo sapiens
ctgtgtgggctgggg

SEQ ID NO: 1771726 - DNA, 15 bp, Homo sapiens
tgtgtgggctgggga

SEQ ID NO: 1771727 - DNA, 15 bp, Homo sapiens
gtgtgggctggggaa

SEQ ID NO: 1771728 - DNA, 15 bp, Homo sapiens
tgtgggctggggaaa

SEQ ID NO: 1771729 - DNA, 15 bp, Homo sapiens
gtgggctggggaaag

SEQ ID NO: 1771730 - DNA, 15 bp, Homo sapiens
tgggctggggaaagc

SEQ ID NO: 1771731 - DNA, 15 bp, Homo sapiens
gggctggggaaagcc

SEQ ID NO: 1771732 - DNA, 15 bp, Homo sapiens
ggctggggaaagcca

SEQ ID NO: 1771733 - DNA, 15 bp, Homo sapiens
gctggggaaagccaa

SEQ ID NO: 1771734 - DNA, 15 bp, Homo sapiens
ctggggaaagccaat

SEQ ID NO: 1771735 - DNA, 15 bp, Homo sapiens
tggggaaagccaatg

SEQ ID NO: 1771736 - DNA, 15 bp, Homo sapiens
ggggaaagccaatga

SEQ ID NO: 1771737 - DNA, 15 bp, Homo sapiens
gggaaagccaatgag

SEQ ID NO: 1771738 - DNA, 15 bp, Homo sapiens
ggaaagccaatgagt

SEQ ID NO: 1771739 - DNA, 15 bp, Homo sapiens
gaaagccaatgagtt

SEQ ID NO: 1771740 - DNA, 15 bp, Homo sapiens
aaagccaatgagttt

SEQ ID NO: 1771741 - DNA, 15 bp, Homo sapiens
aagccaatgagtttt

SEQ ID NO: 1771742 - DNA, 15 bp, Homo sapiens
agccaatgagttttg

SEQ ID NO: 1771743 - DNA, 15 bp, Homo sapiens
gccaatgagttttga

SEQ ID NO: 1771744 - DNA, 15 bp, Homo sapiens
ccaatgagttttgat

SEQ ID NO: 1771745 - DNA, 15 bp, Homo sapiens
caatgagttttgata

SEQ ID NO: 1771746 - DNA, 15 bp, Homo sapiens
aatgagttttgatat

SEQ ID NO: 1771747 - DNA, 15 bp, Homo sapiens
atgagttttgatatg

SEQ ID NO: 1771748 - DNA, 15 bp, Homo sapiens
tgagttttgatatga

SEQ ID NO: 1771749 - DNA, 15 bp, Homo sapiens
gagttttgatatgac

SEQ ID NO: 1771750 - DNA, 15 bp, Homo sapiens
agttttgatatgacc

SEQ ID NO: 1771751 - DNA, 15 bp, Homo sapiens
gttttgatatgacca

SEQ ID NO: 1771752 - DNA, 15 bp, Homo sapiens
ttttgatatgaccac

SEQ ID NO: 1771753 - DNA, 15 bp, Homo sapiens
tttgatatgaccaca

SEQ ID NO: 1771754 - DNA, 15 bp, Homo sapiens
ttgatatgaccacag

SEQ ID NO: 1771755 - DNA, 15 bp, Homo sapiens
tgatatgaccacagg

SEQ ID NO: 1771756 - DNA, 15 bp, Homo sapiens
gatatgaccacaggt

SEQ ID NO: 1771757 - DNA, 15 bp, Homo sapiens
atatgaccacaggtg

SEQ ID NO: 1771758 - DNA, 15 bp, Homo sapiens
tatgaccacaggtgt

SEQ ID NO: 1771759 - DNA, 15 bp, Homo sapiens
atgaccacaggtgtt

SEQ ID NO: 1771760 - DNA, 15 bp, Homo sapiens
tgaccacaggtgttc

SEQ ID NO: 1771761 - DNA, 15 bp, Homo sapiens
gaccacaggtgttca

SEQ ID NO: 1771762 - DNA, 15 bp, Homo sapiens
accacaggtgttcat

SEQ ID NO: 1771763 - DNA, 15 bp, Homo sapiens
ccacaggtgttcatg

SEQ ID NO: 1771764 - DNA, 15 bp, Homo sapiens
cacaggtgttcatga

SEQ ID NO: 1771765 - DNA, 15 bp, Homo sapiens
acaggtgttcatgaa

SEQ ID NO: 1771766 - DNA, 15 bp, Homo sapiens
caggtgttcatgaaa

SEQ ID NO: 1771767 - DNA, 15 bp, Homo sapiens
aggtgttcatgaaat

SEQ ID NO: 1771768 - DNA, 15 bp, Homo sapiens
ggtgttcatgaaatg

SEQ ID NO: 1771769 - DNA, 15 bp, Homo sapiens
gtgttcatgaaatgg

SEQ ID NO: 1771770 - DNA, 15 bp, Homo sapiens
tgttcatgaaatggc

SEQ ID NO: 1771771 - DNA, 15 bp, Homo sapiens
gttcatgaaatggca

SEQ ID NO: 1771772 - DNA, 15 bp, Homo sapiens
ttcatgaaatggcag

SEQ ID NO: 1771773 - DNA, 15 bp, Homo sapiens
tcatgaaatggcagg

SEQ ID NO: 1771774 - DNA, 15 bp, Homo sapiens
catgaaatggcagga

SEQ ID NO: 1771775 - DNA, 15 bp, Homo sapiens
atgaaatggcaggaa

SEQ ID NO: 1771776 - DNA, 15 bp, Homo sapiens
tgaaatggcaggaat

SEQ ID NO: 1771777 - DNA, 15 bp, Homo sapiens
gaaatggcaggaatt

SEQ ID NO: 1771778 - DNA, 15 bp, Homo sapiens
aaatggcaggaatta

SEQ ID NO: 1771779 - DNA, 15 bp, Homo sapiens
aatggcaggaattaa

SEQ ID NO: 1771780 - DNA, 15 bp, Homo sapiens
atggcaggaattaaa

SEQ ID NO: 1771781 - DNA, 15 bp, Homo sapiens
tggcaggaattaaaa

SEQ ID NO: 1771782 - DNA, 15 bp, Homo sapiens
ggcaggaattaaaat

SEQ ID NO: 1771783 - DNA, 15 bp, Homo sapiens
gcaggaattaaaata

SEQ ID NO: 1771784 - DNA, 15 bp, Homo sapiens
caggaattaaaatag

SEQ ID NO: 1771785 - DNA, 15 bp, Homo sapiens
aggaattaaaatagg

SEQ ID NO: 1771786 - DNA, 15 bp, Homo sapiens
ggaattaaaatagga

SEQ ID NO: 1771787 - DNA, 15 bp, Homo sapiens
gaattaaaataggaa

SEQ ID NO: 1771788 - DNA, 15 bp, Homo sapiens
aattaaaataggaat

SEQ ID NO: 1771789 - DNA, 15 bp, Homo sapiens
attaaaataggaatt

SEQ ID NO: 1771790 - DNA, 15 bp, Homo sapiens
ttaaaataggaattt

SEQ ID NO: 1771791 - DNA, 15 bp, Homo sapiens
taaaataggaatttg

SEQ ID NO: 1771792 - DNA, 15 bp, Homo sapiens
aaaataggaatttga

SEQ ID NO: 1771793 - DNA, 15 bp, Homo sapiens
aaataggaatttgaa

SEQ ID NO: 1771794 - DNA, 15 bp, Homo sapiens
aataggaatttgaat

SEQ ID NO: 1771795 - DNA, 15 bp, Homo sapiens
ataggaatttgaatg

SEQ ID NO: 1771796 - DNA, 15 bp, Homo sapiens
taggaatttgaatga

SEQ ID NO: 1771797 - DNA, 15 bp, Homo sapiens
aggaatttgaatgat

SEQ ID NO: 1771798 - DNA, 15 bp, Homo sapiens
ggaatttgaatgata

SEQ ID NO: 1771799 - DNA, 15 bp, Homo sapiens
gaatttgaatgataa

SEQ ID NO: 1771800 - DNA, 15 bp, Homo sapiens
aatttgaatgataaa

SEQ ID NO: 1771801 - DNA, 15 bp, Homo sapiens
atttgaatgataaac

SEQ ID NO: 1771802 - DNA, 15 bp, Homo sapiens
tttgaatgataaact

SEQ ID NO: 1771803 - DNA, 15 bp, Homo sapiens
ttgaatgataaactc

SEQ ID NO: 1771804 - DNA, 15 bp, Homo sapiens
tgaatgataaactca

SEQ ID NO: 1771805 - DNA, 15 bp, Homo sapiens
gaatgataaactcaa

SEQ ID NO: 1771806 - DNA, 15 bp, Homo sapiens
aatgataaactcaaa

SEQ ID NO: 1771807 - DNA, 15 bp, Homo sapiens
atgataaactcaaaa

SEQ ID NO: 1771808 - DNA, 15 bp, Homo sapiens
tgataaactcaaaag

SEQ ID NO: 1771809 - DNA, 15 bp, Homo sapiens
gataaactcaaaagt

SEQ ID NO: 1771810 - DNA, 15 bp, Homo sapiens
ataaactcaaaagtg

SEQ ID NO: 1771811 - DNA, 15 bp, Homo sapiens
taaactcaaaagtgt

SEQ ID NO: 1771812 - DNA, 15 bp, Homo sapiens
aaactcaaaagtgta

SEQ ID NO: 1771813 - DNA, 15 bp, Homo sapiens
aactcaaaagtgtat

SEQ ID NO: 1771814 - DNA, 15 bp, Homo sapiens
actcaaaagtgtata

SEQ ID NO: 1771815 - DNA, 15 bp, Homo sapiens
ctcaaaagtgtatat

SEQ ID NO: 1771816 - DNA, 15 bp, Homo sapiens
tcaaaagtgtatatg

SEQ ID NO: 1771817 - DNA, 15 bp, Homo sapiens
caaaagtgtatatgt

SEQ ID NO: 1771818 - DNA, 15 bp, Homo sapiens
aaaagtgtatatgtt

SEQ ID NO: 1771819 - DNA, 15 bp, Homo sapiens
aaagtgtatatgttg

SEQ ID NO: 1771820 - DNA, 15 bp, Homo sapiens
aagtgtatatgttgt

SEQ ID NO: 1771821 - DNA, 15 bp, Homo sapiens
agtgtatatgttgtg

SEQ ID NO: 1771822 - DNA, 15 bp, Homo sapiens
gtgtatatgttgtgg

SEQ ID NO: 1771823 - DNA, 15 bp, Homo sapiens
tgtatatgttgtggg

SEQ ID NO: 1771824 - DNA, 15 bp, Homo sapiens
gtatatgttgtgggg

SEQ ID NO: 1771825 - DNA, 15 bp, Homo sapiens
tatatgttgtgggga

SEQ ID NO: 1771826 - DNA, 15 bp, Homo sapiens
atatgttgtggggaa

SEQ ID NO: 1771827 - DNA, 15 bp, Homo sapiens
tatgttgtggggaag

SEQ ID NO: 1771828 - DNA, 15 bp, Homo sapiens
atgttgtggggaagg

SEQ ID NO: 1771829 - DNA, 15 bp, Homo sapiens
tgttgtggggaaggg

SEQ ID NO: 1771830 - DNA, 15 bp, Homo sapiens
gttgtggggaaggga

SEQ ID NO: 1771831 - DNA, 15 bp, Homo sapiens
ttgtggggaagggag

SEQ ID NO: 1771832 - DNA, 15 bp, Homo sapiens
tgtggggaagggagt

SEQ ID NO: 1771833 - DNA, 15 bp, Homo sapiens
gtggggaagggagta

SEQ ID NO: 1771834 - DNA, 15 bp, Homo sapiens
tggggaagggagtat

SEQ ID NO: 1771835 - DNA, 15 bp, Homo sapiens
ggggaagggagtatc

SEQ ID NO: 1771836 - DNA, 15 bp, Homo sapiens
gggaagggagtatca

SEQ ID NO: 1771837 - DNA, 15 bp, Homo sapiens
ggaagggagtatcaa

SEQ ID NO: 1771838 - DNA, 15 bp, Homo sapiens
gaagggagtatcaaa

SEQ ID NO: 1771839 - DNA, 15 bp, Homo sapiens
aagggagtatcaaaa

SEQ ID NO: 1771840 - DNA, 15 bp, Homo sapiens
agggagtatcaaaac

SEQ ID NO: 1771841 - DNA, 15 bp, Homo sapiens
gggagtatcaaaaca

SEQ ID NO: 1771842 - DNA, 15 bp, Homo sapiens
ggagtatcaaaacag

SEQ ID NO: 1771843 - DNA, 15 bp, Homo sapiens
gagtatcaaaacaga

SEQ ID NO: 1771844 - DNA, 15 bp, Homo sapiens
agtatcaaaacagag

SEQ ID NO: 1771845 - DNA, 15 bp, Homo sapiens
gtatcaaaacagagt

SEQ ID NO: 1771846 - DNA, 15 bp, Homo sapiens
tatcaaaacagagta

SEQ ID NO: 1771847 - DNA, 15 bp, Homo sapiens
atcaaaacagagtag

SEQ ID NO: 1771848 - DNA, 15 bp, Homo sapiens
tcaaaacagagtagt

SEQ ID NO: 1771849 - DNA, 15 bp, Homo sapiens
caaaacagagtagtc

SEQ ID NO: 1771850 - DNA, 15 bp, Homo sapiens
aaaacagagtagtca

SEQ ID NO: 1771851 - DNA, 15 bp, Homo sapiens
aaacagagtagtcag

SEQ ID NO: 1771852 - DNA, 15 bp, Homo sapiens
aacagagtagtcagt

SEQ ID NO: 1771853 - DNA, 15 bp, Homo sapiens
acagagtagtcagtc

SEQ ID NO: 1771854 - DNA, 15 bp, Homo sapiens
cagagtagtcagtcc

SEQ ID NO: 1771855 - DNA, 15 bp, Homo sapiens
agagtagtcagtcct

SEQ ID NO: 1771856 - DNA, 15 bp, Homo sapiens
gagtagtcagtcctc

SEQ ID NO: 1771857 - DNA, 15 bp, Homo sapiens
agtagtcagtcctct

SEQ ID NO: 1771858 - DNA, 15 bp, Homo sapiens
gtagtcagtcctctg

SEQ ID NO: 1771859 - DNA, 15 bp, Homo sapiens
tagtcagtcctctgc

SEQ ID NO: 1771860 - DNA, 15 bp, Homo sapiens
agtcagtcctctgcc

SEQ ID NO: 1771861 - DNA, 15 bp, Homo sapiens
gtcagtcctctgcca

SEQ ID NO: 1771862 - DNA, 15 bp, Homo sapiens
tcagtcctctgccag

SEQ ID NO: 1771863 - DNA, 15 bp, Homo sapiens
cagtcctctgccagg

SEQ ID NO: 1771864 - DNA, 15 bp, Homo sapiens
agtcctctgccaggt

SEQ ID NO: 1771865 - DNA, 15 bp, Homo sapiens
gtcctctgccaggtt

SEQ ID NO: 1771866 - DNA, 15 bp, Homo sapiens
tcctctgccaggttt

SEQ ID NO: 1771867 - DNA, 15 bp, Homo sapiens
cctctgccaggtttg

SEQ ID NO: 1771868 - DNA, 15 bp, Homo sapiens
ctctgccaggtttgg

SEQ ID NO: 1771869 - DNA, 15 bp, Homo sapiens
tctgccaggtttggt

SEQ ID NO: 1771870 - DNA, 15 bp, Homo sapiens
ctgccaggtttggtc

SEQ ID NO: 1771871 - DNA, 15 bp, Homo sapiens
tgccaggtttggtca

SEQ ID NO: 1771872 - DNA, 15 bp, Homo sapiens
gccaggtttggtcat

SEQ ID NO: 1771873 - DNA, 15 bp, Homo sapiens
ccaggtttggtcatt

SEQ ID NO: 1771874 - DNA, 15 bp, Homo sapiens
caggtttggtcattt

SEQ ID NO: 1771875 - DNA, 15 bp, Homo sapiens
aggtttggtcatttt

SEQ ID NO: 1771876 - DNA, 15 bp, Homo sapiens
ggtttggtcattttc

SEQ ID NO: 1771877 - DNA, 15 bp, Homo sapiens
gtttggtcattttcc

SEQ ID NO: 1771878 - DNA, 15 bp, Homo sapiens
tttggtcattttccc

SEQ ID NO: 1771879 - DNA, 15 bp, Homo sapiens
ttggtcattttcccc

SEQ ID NO: 1771880 - DNA, 15 bp, Homo sapiens
tggtcattttcccca

SEQ ID NO: 1771881 - DNA, 15 bp, Homo sapiens
ggtcattttccccat

SEQ ID NO: 1771882 - DNA, 15 bp, Homo sapiens
gtcattttccccatc

SEQ ID NO: 1771883 - DNA, 15 bp, Homo sapiens
cattttccccatcac

SEQ ID NO: 1771884 - DNA, 15 bp, Homo sapiens
attttccccatcacc

SEQ ID NO: 1771885 - DNA, 15 bp, Homo sapiens
ttttccccatcacct

SEQ ID NO: 1771886 - DNA, 15 bp, Homo sapiens
tttccccatcacctg

SEQ ID NO: 1771887 - DNA, 15 bp, Homo sapiens
ttccccatcacctgg

SEQ ID NO: 1771888 - DNA, 15 bp, Homo sapiens
tccccatcacctggg

SEQ ID NO: 1771889 - DNA, 15 bp, Homo sapiens
ccccatcacctgggg

SEQ ID NO: 1771890 - DNA, 15 bp, Homo sapiens
cccatcacctgggga

SEQ ID NO: 1771891 - DNA, 15 bp, Homo sapiens
ccatcacctggggaa

SEQ ID NO: 1771892 - DNA, 15 bp, Homo sapiens
catcacctggggaaa

SEQ ID NO: 1771893 - DNA, 15 bp, Homo sapiens
atcacctggggaaac

SEQ ID NO: 1771894 - DNA, 15 bp, Homo sapiens
tcacctggggaaacc

SEQ ID NO: 1771895 - DNA, 15 bp, Homo sapiens
cacctggggaaacct

SEQ ID NO: 1771896 - DNA, 15 bp, Homo sapiens
acctggggaaacctc

SEQ ID NO: 1771897 - DNA, 15 bp, Homo sapiens
cctggggaaacctcg

SEQ ID NO: 1771898 - DNA, 15 bp, Homo sapiens
ctggggaaacctcgc

SEQ ID NO: 1771899 - DNA, 15 bp, Homo sapiens
tggggaaacctcgcc

SEQ ID NO: 1771900 - DNA, 15 bp, Homo sapiens
ggggaaacctcgcca

SEQ ID NO: 1771901 - DNA, 15 bp, Homo sapiens
gggaaacctcgccac

SEQ ID NO: 1771902 - DNA, 15 bp, Homo sapiens
ggaaacctcgccact

SEQ ID NO: 1771903 - DNA, 15 bp, Homo sapiens
gaaacctcgccactc

SEQ ID NO: 1771904 - DNA, 15 bp, Homo sapiens
aaacctcgccactca

SEQ ID NO: 1771905 - DNA, 15 bp, Homo sapiens
aacctcgccactcat

SEQ ID NO: 1771906 - DNA, 15 bp, Homo sapiens
acctcgccactcatg

SEQ ID NO: 1771907 - DNA, 15 bp, Homo sapiens
cctcgccactcatgc

SEQ ID NO: 1771908 - DNA, 15 bp, Homo sapiens
ctcgccactcatgca

SEQ ID NO: 1771909 - DNA, 15 bp, Homo sapiens
tcgccactcatgcag

SEQ ID NO: 1771910 - DNA, 15 bp, Homo sapiens
cgccactcatgcagc

SEQ ID NO: 1771911 - DNA, 15 bp, Homo sapiens
gccactcatgcagct

SEQ ID NO: 1771912 - DNA, 15 bp, Homo sapiens
ccactcatgcagctg

SEQ ID NO: 1771913 - DNA, 15 bp, Homo sapiens
cactcatgcagctgg

SEQ ID NO: 1771914 - DNA, 15 bp, Homo sapiens
actcatgcagctgga

SEQ ID NO: 1771915 - DNA, 15 bp, Homo sapiens
ctcatgcagctggag

SEQ ID NO: 1771916 - DNA, 15 bp, Homo sapiens
tcatgcagctggaga

SEQ ID NO: 1771917 - DNA, 15 bp, Homo sapiens
catgcagctggagag

SEQ ID NO: 1771918 - DNA, 15 bp, Homo sapiens
atgcagctggagagg

SEQ ID NO: 1771919 - DNA, 15 bp, Homo sapiens
tgcagctggagagga

SEQ ID NO: 1771920 - DNA, 15 bp, Homo sapiens
gcagctggagaggac

SEQ ID NO: 1771921 - DNA, 15 bp, Homo sapiens
cagctggagaggaca

SEQ ID NO: 1771922 - DNA, 15 bp, Homo sapiens
agctggagaggacaa

SEQ ID NO: 1771923 - DNA, 15 bp, Homo sapiens
gctggagaggacaaa

SEQ ID NO: 1771924 - DNA, 15 bp, Homo sapiens
ctggagaggacaaac

SEQ ID NO: 1771925 - DNA, 15 bp, Homo sapiens
tggagaggacaaact

SEQ ID NO: 1771926 - DNA, 15 bp, Homo sapiens
ggagaggacaaactg

SEQ ID NO: 1771927 - DNA, 15 bp, Homo sapiens
gagaggacaaactgc

SEQ ID NO: 1771928 - DNA, 15 bp, Homo sapiens
agaggacaaactgca

SEQ ID NO: 1771929 - DNA, 15 bp, Homo sapiens
gaggacaaactgcat

SEQ ID NO: 1771930 - DNA, 15 bp, Homo sapiens
aggacaaactgcatc

SEQ ID NO: 1771931 - DNA, 15 bp, Homo sapiens
ggacaaactgcatct

SEQ ID NO: 1771932 - DNA, 15 bp, Homo sapiens
gacaaactgcatctg

SEQ ID NO: 1771933 - DNA, 15 bp, Homo sapiens
acaaactgcatctgg

SEQ ID NO: 1771934 - DNA, 15 bp, Homo sapiens
caaactgcatctgga

SEQ ID NO: 1771935 - DNA, 15 bp, Homo sapiens
aaactgcatctggat

SEQ ID NO: 1771936 - DNA, 15 bp, Homo sapiens
aactgcatctggatc

SEQ ID NO: 1771937 - DNA, 15 bp, Homo sapiens
actgcatctggatcc

SEQ ID NO: 1771938 - DNA, 15 bp, Homo sapiens
ctgcatctggatcct

SEQ ID NO: 1771939 - DNA, 15 bp, Homo sapiens
tgcatctggatcctt

SEQ ID NO: 1771940 - DNA, 15 bp, Homo sapiens
gcatctggatccttt

SEQ ID NO: 1771941 - DNA, 15 bp, Homo sapiens
catctggatcctttc

SEQ ID NO: 1771942 - DNA, 15 bp, Homo sapiens
atctggatcctttct

SEQ ID NO: 1771943 - DNA, 15 bp, Homo sapiens
tctggatcctttctt

SEQ ID NO: 1771944 - DNA, 15 bp, Homo sapiens
ctggatcctttcttt

SEQ ID NO: 1771945 - DNA, 15 bp, Homo sapiens
tggatcctttctttg

SEQ ID NO: 1771946 - DNA, 15 bp, Homo sapiens
ggatcctttctttgc

SEQ ID NO: 1771947 - DNA, 15 bp, Homo sapiens
gatcctttctttgca

SEQ ID NO: 1771948 - DNA, 15 bp, Homo sapiens
atcctttctttgcac

SEQ ID NO: 1771949 - DNA, 15 bp, Homo sapiens
tcctttctttgcact

SEQ ID NO: 1771950 - DNA, 15 bp, Homo sapiens
cctttctttgcactg

SEQ ID NO: 1771951 - DNA, 15 bp, Homo sapiens
ctttctttgcactgt

SEQ ID NO: 1771952 - DNA, 15 bp, Homo sapiens
tttctttgcactgtg

SEQ ID NO: 1771953 - DNA, 15 bp, Homo sapiens
ttctttgcactgtgg

SEQ ID NO: 1771954 - DNA, 15 bp, Homo sapiens
tctttgcactgtggt

SEQ ID NO: 1771955 - DNA, 15 bp, Homo sapiens
ctttgcactgtggta

SEQ ID NO: 1771956 - DNA, 15 bp, Homo sapiens
tttgcactgtggtag

SEQ ID NO: 1771957 - DNA, 15 bp, Homo sapiens
ttgcactgtggtaga

SEQ ID NO: 1771958 - DNA, 15 bp, Homo sapiens
tgcactgtggtagac

SEQ ID NO: 1771959 - DNA, 15 bp, Homo sapiens
gcactgtggtagacc

SEQ ID NO: 1771960 - DNA, 15 bp, Homo sapiens
cactgtggtagacca

SEQ ID NO: 1771961 - DNA, 15 bp, Homo sapiens
actgtggtagaccag

SEQ ID NO: 1771962 - DNA, 15 bp, Homo sapiens
ctgtggtagaccagg

SEQ ID NO: 1771963 - DNA, 15 bp, Homo sapiens
tgtggtagaccagga

SEQ ID NO: 1771964 - DNA, 15 bp, Homo sapiens
gtggtagaccaggac

SEQ ID NO: 1771965 - DNA, 15 bp, Homo sapiens
tggtagaccaggacg

SEQ ID NO: 1771966 - DNA, 15 bp, Homo sapiens
ggtagaccaggacgg

SEQ ID NO: 1771967 - DNA, 15 bp, Homo sapiens
gtagaccaggacggc

SEQ ID NO: 1771968 - DNA, 15 bp, Homo sapiens
tagaccaggacggcc

SEQ ID NO: 1771969 - DNA, 15 bp, Homo sapiens
agaccaggacggcct

SEQ ID NO: 1771970 - DNA, 15 bp, Homo sapiens
gaccaggacggcctg

SEQ ID NO: 1771971 - DNA, 15 bp, Homo sapiens
accaggacggcctgt

SEQ ID NO: 1771972 - DNA, 15 bp, Homo sapiens
ccaggacggcctgtt

SEQ ID NO: 1771973 - DNA, 15 bp, Homo sapiens
caggacggcctgttc

SEQ ID NO: 1771974 - DNA, 15 bp, Homo sapiens
aggacggcctgttct

SEQ ID NO: 1771975 - DNA, 15 bp, Homo sapiens
ggacggcctgttctt

SEQ ID NO: 1771976 - DNA, 15 bp, Homo sapiens
gacggcctgttcttc

SEQ ID NO: 1771977 - DNA, 15 bp, Homo sapiens
acggcctgttcttca

SEQ ID NO: 1771978 - DNA, 15 bp, Homo sapiens
cggcctgttcttcaa

SEQ ID NO: 1771979 - DNA, 15 bp, Homo sapiens
ggcctgttcttcaaa

SEQ ID NO: 1771980 - DNA, 15 bp, Homo sapiens
gcctgttcttcaaat

SEQ ID NO: 1771981 - DNA, 15 bp, Homo sapiens
cctgttcttcaaatg

SEQ ID NO: 1771982 - DNA, 15 bp, Homo sapiens
ctgttcttcaaatgg

SEQ ID NO: 1771983 - DNA, 15 bp, Homo sapiens
tgttcttcaaatggt

SEQ ID NO: 1771984 - DNA, 15 bp, Homo sapiens
gttcttcaaatggtg

SEQ ID NO: 1771985 - DNA, 15 bp, Homo sapiens
ttcttcaaatggtgc

SEQ ID NO: 1771986 - DNA, 15 bp, Homo sapiens
tcttcaaatggtgct

SEQ ID NO: 1771987 - DNA, 15 bp, Homo sapiens
cttcaaatggtgctt

SEQ ID NO: 1771988 - DNA, 15 bp, Homo sapiens
ttcaaatggtgcttg

SEQ ID NO: 1771989 - DNA, 15 bp, Homo sapiens
tcaaatggtgcttgg

SEQ ID NO: 1771990 - DNA, 15 bp, Homo sapiens
caaatggtgcttggt

SEQ ID NO: 1771991 - DNA, 15 bp, Homo sapiens
aaatggtgcttggtc

SEQ ID NO: 1771992 - DNA, 15 bp, Homo sapiens
aatggtgcttggtca

SEQ ID NO: 1771993 - DNA, 15 bp, Homo sapiens
atggtgcttggtcac

SEQ ID NO: 1771994 - DNA, 15 bp, Homo sapiens
tggtgcttggtcact

SEQ ID NO: 1771995 - DNA, 15 bp, Homo sapiens
ggtgcttggtcacta

SEQ ID NO: 1771996 - DNA, 15 bp, Homo sapiens
gtgcttggtcactag

SEQ ID NO: 1771997 - DNA, 15 bp, Homo sapiens
tgcttggtcactaga

SEQ ID NO: 1771998 - DNA, 15 bp, Homo sapiens
gcttggtcactagaa

SEQ ID NO: 1771999 - DNA, 15 bp, Homo sapiens
cttggtcactagaag

SEQ ID NO: 1772000 - DNA, 15 bp, Homo sapiens
ttggtcactagaagg

SEQ ID NO: 1772001 - DNA, 15 bp, Homo sapiens
tggtcactagaaggc

SEQ ID NO: 1772002 - DNA, 15 bp, Homo sapiens
ggtcactagaaggca

SEQ ID NO: 1772003 - DNA, 15 bp, Homo sapiens
gtcactagaaggcaa

SEQ ID NO: 1772004 - DNA, 15 bp, Homo sapiens
tcactagaaggcaaa

SEQ ID NO: 1772005 - DNA, 15 bp, Homo sapiens
cactagaaggcaaat

SEQ ID NO: 1772006 - DNA, 15 bp, Homo sapiens
actagaaggcaaata

SEQ ID NO: 1772007 - DNA, 15 bp, Homo sapiens
ctagaaggcaaataa

SEQ ID NO: 1772008 - DNA, 15 bp, Homo sapiens
tagaaggcaaataag

SEQ ID NO: 1772009 - DNA, 15 bp, Homo sapiens
agaaggcaaataaga

SEQ ID NO: 1772010 - DNA, 15 bp, Homo sapiens
aaggcaaataagaga

SEQ ID NO: 1772011 - DNA, 15 bp, Homo sapiens
aggcaaataagagag

SEQ ID NO: 1772012 - DNA, 15 bp, Homo sapiens
ggcaaataagagaga

SEQ ID NO: 1772013 - DNA, 15 bp, Homo sapiens
gcaaataagagagat

SEQ ID NO: 1772014 - DNA, 15 bp, Homo sapiens
caaataagagagatg

SEQ ID NO: 1772015 - DNA, 15 bp, Homo sapiens
aaataagagagatgt

SEQ ID NO: 1772016 - DNA, 15 bp, Homo sapiens
aataagagagatgtt

SEQ ID NO: 1772017 - DNA, 15 bp, Homo sapiens
ataagagagatgttt

SEQ ID NO: 1772018 - DNA, 15 bp, Homo sapiens
taagagagatgtttt

SEQ ID NO: 1772019 - DNA, 15 bp, Homo sapiens
aagagagatgttttt

SEQ ID NO: 1772020 - DNA, 15 bp, Homo sapiens
agagagatgttttta

SEQ ID NO: 1772021 - DNA, 15 bp, Homo sapiens
gagagatgtttttaa

SEQ ID NO: 1772022 - DNA, 15 bp, Homo sapiens
agagatgtttttaac

SEQ ID NO: 1772023 - DNA, 15 bp, Homo sapiens
gagatgtttttaaca

SEQ ID NO: 1772024 - DNA, 15 bp, Homo sapiens
agatgtttttaacag

SEQ ID NO: 1772025 - DNA, 15 bp, Homo sapiens
gatgtttttaacagc

SEQ ID NO: 1772026 - DNA, 15 bp, Homo sapiens
atgtttttaacagct

SEQ ID NO: 1772027 - DNA, 15 bp, Homo sapiens
tgtttttaacagctc

SEQ ID NO: 1772028 - DNA, 15 bp, Homo sapiens
gtttttaacagctct

SEQ ID NO: 1772029 - DNA, 15 bp, Homo sapiens
tttttaacagctctt

SEQ ID NO: 1772030 - DNA, 15 bp, Homo sapiens
ttttaacagctcttg

SEQ ID NO: 1772031 - DNA, 15 bp, Homo sapiens
tttaacagctcttgt

SEQ ID NO: 1772032 - DNA, 15 bp, Homo sapiens
ttaacagctcttgtc

SEQ ID NO: 1772033 - DNA, 15 bp, Homo sapiens
taacagctcttgtca

SEQ ID NO: 1772034 - DNA, 15 bp, Homo sapiens
aacagctcttgtcac

SEQ ID NO: 1772035 - DNA, 15 bp, Homo sapiens
acagctcttgtcact

SEQ ID NO: 1772036 - DNA, 15 bp, Homo sapiens
cagctcttgtcactt

SEQ ID NO: 1772037 - DNA, 15 bp, Homo sapiens
agctcttgtcacttt

SEQ ID NO: 1772038 - DNA, 15 bp, Homo sapiens
gctcttgtcactttt

SEQ ID NO: 1772039 - DNA, 15 bp, Homo sapiens
ctcttgtcacttttt

SEQ ID NO: 1772040 - DNA, 15 bp, Homo sapiens
tcttgtcactttttt

SEQ ID NO: 1772041 - DNA, 15 bp, Homo sapiens
cttgtcacttttttt

SEQ ID NO: 1772042 - DNA, 15 bp, Homo sapiens
ttgtcactttttttt

SEQ ID NO: 1772043 - DNA, 15 bp, Homo sapiens
tgtcacttttttttt

SEQ ID NO: 1772044 - DNA, 15 bp, Homo sapiens
gtcactttttttttt

SEQ ID NO: 1772045 - DNA, 15 bp, Homo sapiens
tcacttttttttttt

SEQ ID NO: 1772046 - DNA, 15 bp, Homo sapiens
ttgagacagagtttc

SEQ ID NO: 1772047 - DNA, 15 bp, Homo sapiens
tgagacagagtttcg

SEQ ID NO: 1772048 - DNA, 15 bp, Homo sapiens
gagacagagtttcgc

SEQ ID NO: 1772049 - DNA, 15 bp, Homo sapiens
ccacctcccaggttg

SEQ ID NO: 1772050 - DNA, 15 bp, Homo sapiens
cacctcccaggttga

SEQ ID NO: 1772051 - DNA, 15 bp, Homo sapiens
acctcccaggttgaa

SEQ ID NO: 1772052 - DNA, 15 bp, Homo sapiens
cctcccaggttgaag

SEQ ID NO: 1772053 - DNA, 15 bp, Homo sapiens
ctcccaggttgaagc

SEQ ID NO: 1772054 - DNA, 15 bp, Homo sapiens
tcccaggttgaagcg

SEQ ID NO: 1772055 - DNA, 15 bp, Homo sapiens
cccaggttgaagcga

SEQ ID NO: 1772056 - DNA, 15 bp, Homo sapiens
ccaggttgaagcgat

SEQ ID NO: 1772057 - DNA, 15 bp, Homo sapiens
caggttgaagcgatt

SEQ ID NO: 1772058 - DNA, 15 bp, Homo sapiens
aggttgaagcgattc

SEQ ID NO: 1772059 - DNA, 15 bp, Homo sapiens
ggttgaagcgattct

SEQ ID NO: 1772060 - DNA, 15 bp, Homo sapiens
gttgaagcgattctc

SEQ ID NO: 1772061 - DNA, 15 bp, Homo sapiens
ttgaagcgattctcc

SEQ ID NO: 1772062 - DNA, 15 bp, Homo sapiens
tgaagcgattctcct

SEQ ID NO: 1772063 - DNA, 15 bp, Homo sapiens
gaagcgattctcctg

SEQ ID NO: 1772064 - DNA, 15 bp, Homo sapiens
gcgcctgccaccaca

SEQ ID NO: 1772065 - DNA, 15 bp, Homo sapiens
cgcctgccaccacac

SEQ ID NO: 1772066 - DNA, 15 bp, Homo sapiens
cggctaatttttgtt

SEQ ID NO: 1772067 - DNA, 15 bp, Homo sapiens
ggctaatttttgttc

SEQ ID NO: 1772068 - DNA, 15 bp, Homo sapiens
gctaatttttgttct

SEQ ID NO: 1772069 - DNA, 15 bp, Homo sapiens
ctaatttttgttctt

SEQ ID NO: 1772070 - DNA, 15 bp, Homo sapiens
taatttttgttcttt

SEQ ID NO: 1772071 - DNA, 15 bp, Homo sapiens
aatttttgttctttt

SEQ ID NO: 1772072 - DNA, 15 bp, Homo sapiens
atttttgttctttta

SEQ ID NO: 1772073 - DNA, 15 bp, Homo sapiens
tttttgttcttttag

SEQ ID NO: 1772074 - DNA, 15 bp, Homo sapiens
ttttgttcttttagt

SEQ ID NO: 1772075 - DNA, 15 bp, Homo sapiens
tttgttcttttagta

SEQ ID NO: 1772076 - DNA, 15 bp, Homo sapiens
ttgttcttttagtag

SEQ ID NO: 1772077 - DNA, 15 bp, Homo sapiens
tgttcttttagtaga

SEQ ID NO: 1772078 - DNA, 15 bp, Homo sapiens
gttcttttagtagag

SEQ ID NO: 1772079 - DNA, 15 bp, Homo sapiens
ttcttttagtagaga

SEQ ID NO: 1772080 - DNA, 15 bp, Homo sapiens
tcttttagtagagac

SEQ ID NO: 1772081 - DNA, 15 bp, Homo sapiens
ccatgttggccaggg

SEQ ID NO: 1772082 - DNA, 15 bp, Homo sapiens
catgttggccagggt

SEQ ID NO: 1772083 - DNA, 15 bp, Homo sapiens
atgttggccagggtg

SEQ ID NO: 1772084 - DNA, 15 bp, Homo sapiens
tgttggccagggtgg

SEQ ID NO: 1772085 - DNA, 15 bp, Homo sapiens
gttggccagggtggt

SEQ ID NO: 1772086 - DNA, 15 bp, Homo sapiens
ttggccagggtggtc

SEQ ID NO: 1772087 - DNA, 15 bp, Homo sapiens
tggccagggtggtct

SEQ ID NO: 1772088 - DNA, 15 bp, Homo sapiens
ggccagggtggtctc

SEQ ID NO: 1772089 - DNA, 15 bp, Homo sapiens
gccagggtggtctcg

SEQ ID NO: 1772090 - DNA, 15 bp, Homo sapiens
ccagggtggtctcga

SEQ ID NO: 1772091 - DNA, 15 bp, Homo sapiens
cagggtggtctcgaa

SEQ ID NO: 1772092 - DNA, 15 bp, Homo sapiens
agggtggtctcgaac

SEQ ID NO: 1772093 - DNA, 15 bp, Homo sapiens
gggtggtctcgaact

SEQ ID NO: 1772094 - DNA, 15 bp, Homo sapiens
ggtggtctcgaactc

SEQ ID NO: 1772095 - DNA, 15 bp, Homo sapiens
gtggtctcgaactcc

SEQ ID NO: 1772096 - DNA, 15 bp, Homo sapiens
ctcaggtgatctgcc

SEQ ID NO: 1772097 - DNA, 15 bp, Homo sapiens
tcaggtgatctgcct

SEQ ID NO: 1772098 - DNA, 15 bp, Homo sapiens
caggtgatctgcctg

SEQ ID NO: 1772099 - DNA, 15 bp, Homo sapiens
aggtgatctgcctgc

SEQ ID NO: 1772100 - DNA, 15 bp, Homo sapiens
ggtgatctgcctgcc

SEQ ID NO: 1772101 - DNA, 15 bp, Homo sapiens
gcctgccttgacctc

SEQ ID NO: 1772102 - DNA, 15 bp, Homo sapiens
cctgccttgacctcc

SEQ ID NO: 1772103 - DNA, 15 bp, Homo sapiens
ctgccttgacctccc

SEQ ID NO: 1772104 - DNA, 15 bp, Homo sapiens
tgccttgacctccca

SEQ ID NO: 1772105 - DNA, 15 bp, Homo sapiens
gccttgacctcccaa

SEQ ID NO: 1772106 - DNA, 15 bp, Homo sapiens
gacctcccaaagtgt

SEQ ID NO: 1772107 - DNA, 15 bp, Homo sapiens
acctcccaaagtgtt

SEQ ID NO: 1772108 - DNA, 15 bp, Homo sapiens
cctcccaaagtgttg

SEQ ID NO: 1772109 - DNA, 15 bp, Homo sapiens
ctcccaaagtgttgg

SEQ ID NO: 1772110 - DNA, 15 bp, Homo sapiens
tcccaaagtgttggc

SEQ ID NO: 1772111 - DNA, 15 bp, Homo sapiens
cccaaagtgttggca

SEQ ID NO: 1772112 - DNA, 15 bp, Homo sapiens
ccaaagtgttggcat

SEQ ID NO: 1772113 - DNA, 15 bp, Homo sapiens
caaagtgttggcatt

SEQ ID NO: 1772114 - DNA, 15 bp, Homo sapiens
aaagtgttggcatta

SEQ ID NO: 1772115 - DNA, 15 bp, Homo sapiens
aagtgttggcattac

SEQ ID NO: 1772116 - DNA, 15 bp, Homo sapiens
agtgttggcattaca

SEQ ID NO: 1772117 - DNA, 15 bp, Homo sapiens
gtgttggcattacag

SEQ ID NO: 1772118 - DNA, 15 bp, Homo sapiens
tgttggcattacagg

SEQ ID NO: 1772119 - DNA, 15 bp, Homo sapiens
gttggcattacaggc

SEQ ID NO: 1772120 - DNA, 15 bp, Homo sapiens
ttggcattacaggcg

SEQ ID NO: 1772121 - DNA, 15 bp, Homo sapiens
tggcattacaggcgt

SEQ ID NO: 1772122 - DNA, 15 bp, Homo sapiens
ggcattacaggcgtg

SEQ ID NO: 1772123 - DNA, 15 bp, Homo sapiens
gcattacaggcgtga

SEQ ID NO: 1772124 - DNA, 15 bp, Homo sapiens
cattacaggcgtgag

SEQ ID NO: 1772125 - DNA, 15 bp, Homo sapiens
accgcgcccggcccc

SEQ ID NO: 1772126 - DNA, 15 bp, Homo sapiens
ccgcgcccggccccc

SEQ ID NO: 1772127 - DNA, 15 bp, Homo sapiens
cgcgcccggccccct

SEQ ID NO: 1772128 - DNA, 15 bp, Homo sapiens
gcgcccggccccctt

SEQ ID NO: 1772129 - DNA, 15 bp, Homo sapiens
cgcccggcccccttg

SEQ ID NO: 1772130 - DNA, 15 bp, Homo sapiens
gcccggcccccttgt

SEQ ID NO: 1772131 - DNA, 15 bp, Homo sapiens
cccggcccccttgtc

SEQ ID NO: 1772132 - DNA, 15 bp, Homo sapiens
ccggcccccttgtca

SEQ ID NO: 1772133 - DNA, 15 bp, Homo sapiens
cggcccccttgtcac

SEQ ID NO: 1772134 - DNA, 15 bp, Homo sapiens
ggcccccttgtcact

SEQ ID NO: 1772135 - DNA, 15 bp, Homo sapiens
gcccccttgtcactt

SEQ ID NO: 1772136 - DNA, 15 bp, Homo sapiens
cccccttgtcacttt

SEQ ID NO: 1772137 - DNA, 15 bp, Homo sapiens
ccccttgtcactttt

SEQ ID NO: 1772138 - DNA, 15 bp, Homo sapiens
cccttgtcacttttt

SEQ ID NO: 1772139 - DNA, 15 bp, Homo sapiens
ccttgtcacttttta

SEQ ID NO: 1772140 - DNA, 15 bp, Homo sapiens
cttgtcactttttag

SEQ ID NO: 1772141 - DNA, 15 bp, Homo sapiens
ttgtcactttttagg

SEQ ID NO: 1772142 - DNA, 15 bp, Homo sapiens
tgtcactttttagga

SEQ ID NO: 1772143 - DNA, 15 bp, Homo sapiens
gtcactttttaggaa

SEQ ID NO: 1772144 - DNA, 15 bp, Homo sapiens
tcactttttaggaag

SEQ ID NO: 1772145 - DNA, 15 bp, Homo sapiens
cactttttaggaaga

SEQ ID NO: 1772146 - DNA, 15 bp, Homo sapiens
actttttaggaagaa

SEQ ID NO: 1772147 - DNA, 15 bp, Homo sapiens
ctttttaggaagaaa

SEQ ID NO: 1772148 - DNA, 15 bp, Homo sapiens
tttttaggaagaaat

SEQ ID NO: 1772149 - DNA, 15 bp, Homo sapiens
ttttaggaagaaata

SEQ ID NO: 1772150 - DNA, 15 bp, Homo sapiens
tttaggaagaaataa

SEQ ID NO: 1772151 - DNA, 15 bp, Homo sapiens
ttaggaagaaataag

SEQ ID NO: 1772152 - DNA, 15 bp, Homo sapiens
taggaagaaataagt

SEQ ID NO: 1772153 - DNA, 15 bp, Homo sapiens
aggaagaaataagtt

SEQ ID NO: 1772154 - DNA, 15 bp, Homo sapiens
ggaagaaataagtta

SEQ ID NO: 1772155 - DNA, 15 bp, Homo sapiens
gaagaaataagttac

SEQ ID NO: 1772156 - DNA, 15 bp, Homo sapiens
aagaaataagttact

SEQ ID NO: 1772157 - DNA, 15 bp, Homo sapiens
agaaataagttactt

SEQ ID NO: 1772158 - DNA, 15 bp, Homo sapiens
gaaataagttacttt

SEQ ID NO: 1772159 - DNA, 15 bp, Homo sapiens
aaataagttacttta

SEQ ID NO: 1772160 - DNA, 15 bp, Homo sapiens
aataagttactttaa

SEQ ID NO: 1772161 - DNA, 15 bp, Homo sapiens
ataagttactttaaa

SEQ ID NO: 1772162 - DNA, 15 bp, Homo sapiens
taagttactttaaac

SEQ ID NO: 1772163 - DNA, 15 bp, Homo sapiens
aagttactttaaacc

SEQ ID NO: 1772164 - DNA, 15 bp, Homo sapiens
agttactttaaaccc

SEQ ID NO: 1772165 - DNA, 15 bp, Homo sapiens
gttactttaaaccct

SEQ ID NO: 1772166 - DNA, 15 bp, Homo sapiens
ttactttaaaccctc

SEQ ID NO: 1772167 - DNA, 15 bp, Homo sapiens
tactttaaaccctct

SEQ ID NO: 1772168 - DNA, 15 bp, Homo sapiens
actttaaaccctcta

SEQ ID NO: 1772169 - DNA, 15 bp, Homo sapiens
ctttaaaccctctaa

SEQ ID NO: 1772170 - DNA, 15 bp, Homo sapiens
tttaaaccctctaaa

SEQ ID NO: 1772171 - DNA, 15 bp, Homo sapiens
ttaaaccctctaaag

SEQ ID NO: 1772172 - DNA, 15 bp, Homo sapiens
taaaccctctaaaga

SEQ ID NO: 1772173 - DNA, 15 bp, Homo sapiens
aaaccctctaaagaa

SEQ ID NO: 1772174 - DNA, 15 bp, Homo sapiens
aaccctctaaagaac

SEQ ID NO: 1772175 - DNA, 15 bp, Homo sapiens
accctctaaagaacc

SEQ ID NO: 1772176 - DNA, 15 bp, Homo sapiens
ccctctaaagaaccc

SEQ ID NO: 1772177 - DNA, 15 bp, Homo sapiens
cctctaaagaaccca

SEQ ID NO: 1772178 - DNA, 15 bp, Homo sapiens
ctctaaagaacccaa

SEQ ID NO: 1772179 - DNA, 15 bp, Homo sapiens
tctaaagaacccaaa

SEQ ID NO: 1772180 - DNA, 15 bp, Homo sapiens
ctaaagaacccaaat

SEQ ID NO: 1772181 - DNA, 15 bp, Homo sapiens
taaagaacccaaatg

SEQ ID NO: 1772182 - DNA, 15 bp, Homo sapiens
aaagaacccaaatgc

SEQ ID NO: 1772183 - DNA, 15 bp, Homo sapiens
aagaacccaaatgcc

SEQ ID NO: 1772184 - DNA, 15 bp, Homo sapiens
agaacccaaatgcct

SEQ ID NO: 1772185 - DNA, 15 bp, Homo sapiens
gaacccaaatgcctg

SEQ ID NO: 1772186 - DNA, 15 bp, Homo sapiens
aacccaaatgcctgc

SEQ ID NO: 1772187 - DNA, 15 bp, Homo sapiens
acccaaatgcctgcc

SEQ ID NO: 1772188 - DNA, 15 bp, Homo sapiens
cccaaatgcctgcca

SEQ ID NO: 1772189 - DNA, 15 bp, Homo sapiens
ccaaatgcctgccac

SEQ ID NO: 1772190 - DNA, 15 bp, Homo sapiens
caaatgcctgccaca

SEQ ID NO: 1772191 - DNA, 15 bp, Homo sapiens
aaatgcctgccacac

SEQ ID NO: 1772192 - DNA, 15 bp, Homo sapiens
aatgcctgccacact

SEQ ID NO: 1772193 - DNA, 15 bp, Homo sapiens
atgcctgccacactt

SEQ ID NO: 1772194 - DNA, 15 bp, Homo sapiens
tgcctgccacacttc

SEQ ID NO: 1772195 - DNA, 15 bp, Homo sapiens
gcctgccacacttca

SEQ ID NO: 1772196 - DNA, 15 bp, Homo sapiens
cctgccacacttcag

SEQ ID NO: 1772197 - DNA, 15 bp, Homo sapiens
ctgccacacttcagg

SEQ ID NO: 1772198 - DNA, 15 bp, Homo sapiens
tgccacacttcaggc

SEQ ID NO: 1772199 - DNA, 15 bp, Homo sapiens
gccacacttcaggcc

SEQ ID NO: 1772200 - DNA, 15 bp, Homo sapiens
ccacacttcaggcct

SEQ ID NO: 1772201 - DNA, 15 bp, Homo sapiens
cacacttcaggcctt

SEQ ID NO: 1772202 - DNA, 15 bp, Homo sapiens
acacttcaggccttg

SEQ ID NO: 1772203 - DNA, 15 bp, Homo sapiens
cacttcaggccttgt

SEQ ID NO: 1772204 - DNA, 15 bp, Homo sapiens
acttcaggccttgtt

SEQ ID NO: 1772205 - DNA, 15 bp, Homo sapiens
cttcaggccttgttt

SEQ ID NO: 1772206 - DNA, 15 bp, Homo sapiens
ttcaggccttgtttt

SEQ ID NO: 1772207 - DNA, 15 bp, Homo sapiens
tcaggccttgtttta

SEQ ID NO: 1772208 - DNA, 15 bp, Homo sapiens
caggccttgttttat

SEQ ID NO: 1772209 - DNA, 15 bp, Homo sapiens
aggccttgttttatt

SEQ ID NO: 1772210 - DNA, 15 bp, Homo sapiens
ggccttgttttattc

SEQ ID NO: 1772211 - DNA, 15 bp, Homo sapiens
gccttgttttattcg

SEQ ID NO: 1772212 - DNA, 15 bp, Homo sapiens
ccttgttttattcgt

SEQ ID NO: 1772213 - DNA, 15 bp, Homo sapiens
cttgttttattcgtc

SEQ ID NO: 1772214 - DNA, 15 bp, Homo sapiens
ttgttttattcgtca

SEQ ID NO: 1772215 - DNA, 15 bp, Homo sapiens
tgttttattcgtcag

SEQ ID NO: 1772216 - DNA, 15 bp, Homo sapiens
gttttattcgtcaga

SEQ ID NO: 1772217 - DNA, 15 bp, Homo sapiens
ttttattcgtcagat

SEQ ID NO: 1772218 - DNA, 15 bp, Homo sapiens
tttattcgtcagatt

SEQ ID NO: 1772219 - DNA, 15 bp, Homo sapiens
ttattcgtcagattt

SEQ ID NO: 1772220 - DNA, 15 bp, Homo sapiens
tattcgtcagatttt

SEQ ID NO: 1772221 - DNA, 15 bp, Homo sapiens
attcgtcagattttt

SEQ ID NO: 1772222 - DNA, 15 bp, Homo sapiens
ttcgtcagatttttt

SEQ ID NO: 1772223 - DNA, 15 bp, Homo sapiens
tcgtcagattttttt

SEQ ID NO: 1772224 - DNA, 15 bp, Homo sapiens
cgtcagatttttttc

SEQ ID NO: 1772225 - DNA, 15 bp, Homo sapiens
gtcagatttttttct

SEQ ID NO: 1772226 - DNA, 15 bp, Homo sapiens
tcagatttttttctt

SEQ ID NO: 1772227 - DNA, 15 bp, Homo sapiens
cagatttttttcttt

SEQ ID NO: 1772228 - DNA, 15 bp, Homo sapiens
agatttttttctttt

SEQ ID NO: 1772229 - DNA, 15 bp, Homo sapiens
gatttttttcttttc

SEQ ID NO: 1772230 - DNA, 15 bp, Homo sapiens
atttttttcttttct

SEQ ID NO: 1772231 - DNA, 15 bp, Homo sapiens
tttttttcttttctg

SEQ ID NO: 1772232 - DNA, 15 bp, Homo sapiens
ttttttcttttctgt

SEQ ID NO: 1772233 - DNA, 15 bp, Homo sapiens
tttttcttttctgtg

SEQ ID NO: 1772234 - DNA, 15 bp, Homo sapiens
ttttcttttctgtgc

SEQ ID NO: 1772235 - DNA, 15 bp, Homo sapiens
tttcttttctgtgca

SEQ ID NO: 1772236 - DNA, 15 bp, Homo sapiens
ttcttttctgtgcaa

SEQ ID NO: 1772237 - DNA, 15 bp, Homo sapiens
tcttttctgtgcaaa

SEQ ID NO: 1772238 - DNA, 15 bp, Homo sapiens
cttttctgtgcaaag

SEQ ID NO: 1772239 - DNA, 15 bp, Homo sapiens
ttttctgtgcaaaga

SEQ ID NO: 1772240 - DNA, 15 bp, Homo sapiens
tttctgtgcaaagac

SEQ ID NO: 1772241 - DNA, 15 bp, Homo sapiens
ttctgtgcaaagacc

SEQ ID NO: 1772242 - DNA, 15 bp, Homo sapiens
tctgtgcaaagaccc

SEQ ID NO: 1772243 - DNA, 15 bp, Homo sapiens
ctgtgcaaagaccct

SEQ ID NO: 1772244 - DNA, 15 bp, Homo sapiens
tgtgcaaagaccctg

SEQ ID NO: 1772245 - DNA, 15 bp, Homo sapiens
gtgcaaagaccctgc

SEQ ID NO: 1772246 - DNA, 15 bp, Homo sapiens
tgcaaagaccctgct

SEQ ID NO: 1772247 - DNA, 15 bp, Homo sapiens
gcaaagaccctgctg

SEQ ID NO: 1772248 - DNA, 15 bp, Homo sapiens
caaagaccctgctgg

SEQ ID NO: 1772249 - DNA, 15 bp, Homo sapiens
aaagaccctgctggt

SEQ ID NO: 1772250 - DNA, 15 bp, Homo sapiens
aagaccctgctggtg

SEQ ID NO: 1772251 - DNA, 15 bp, Homo sapiens
agaccctgctggtgt

SEQ ID NO: 1772252 - DNA, 15 bp, Homo sapiens
gaccctgctggtgtt

SEQ ID NO: 1772253 - DNA, 15 bp, Homo sapiens
accctgctggtgttg

SEQ ID NO: 1772254 - DNA, 15 bp, Homo sapiens
ccctgctggtgttgg

SEQ ID NO: 1772255 - DNA, 15 bp, Homo sapiens
cctgctggtgttgga

SEQ ID NO: 1772256 - DNA, 15 bp, Homo sapiens
ctgctggtgttggaa

SEQ ID NO: 1772257 - DNA, 15 bp, Homo sapiens
tgctggtgttggaaa

SEQ ID NO: 1772258 - DNA, 15 bp, Homo sapiens
gctggtgttggaaag

SEQ ID NO: 1772259 - DNA, 15 bp, Homo sapiens
ctggtgttggaaagt

SEQ ID NO: 1772260 - DNA, 15 bp, Homo sapiens
tggtgttggaaagtg

SEQ ID NO: 1772261 - DNA, 15 bp, Homo sapiens
ggtgttggaaagtgt

SEQ ID NO: 1772262 - DNA, 15 bp, Homo sapiens
gtgttggaaagtgtt

SEQ ID NO: 1772263 - DNA, 15 bp, Homo sapiens
tgttggaaagtgtta

SEQ ID NO: 1772264 - DNA, 15 bp, Homo sapiens
gttggaaagtgttac

SEQ ID NO: 1772265 - DNA, 15 bp, Homo sapiens
ttggaaagtgttaca

SEQ ID NO: 1772266 - DNA, 15 bp, Homo sapiens
tggaaagtgttacag

SEQ ID NO: 1772267 - DNA, 15 bp, Homo sapiens
ggaaagtgttacaga

SEQ ID NO: 1772268 - DNA, 15 bp, Homo sapiens
gaaagtgttacagac

SEQ ID NO: 1772269 - DNA, 15 bp, Homo sapiens
aaagtgttacagaca

SEQ ID NO: 1772270 - DNA, 15 bp, Homo sapiens
aagtgttacagacat

SEQ ID NO: 1772271 - DNA, 15 bp, Homo sapiens
agtgttacagacatg

SEQ ID NO: 1772272 - DNA, 15 bp, Homo sapiens
gtgttacagacatga

SEQ ID NO: 1772273 - DNA, 15 bp, Homo sapiens
tgttacagacatgaa

SEQ ID NO: 1772274 - DNA, 15 bp, Homo sapiens
gttacagacatgaaa

SEQ ID NO: 1772275 - DNA, 15 bp, Homo sapiens
ttacagacatgaaat

SEQ ID NO: 1772276 - DNA, 15 bp, Homo sapiens
tacagacatgaaatg

SEQ ID NO: 1772277 - DNA, 15 bp, Homo sapiens
acagacatgaaatgg

SEQ ID NO: 1772278 - DNA, 15 bp, Homo sapiens
cagacatgaaatggg

SEQ ID NO: 1772279 - DNA, 15 bp, Homo sapiens
agacatgaaatgggg

SEQ ID NO: 1772280 - DNA, 15 bp, Homo sapiens
gacatgaaatggggt

SEQ ID NO: 1772281 - DNA, 15 bp, Homo sapiens
acatgaaatggggtt

SEQ ID NO: 1772282 - DNA, 15 bp, Homo sapiens
catgaaatggggttg

SEQ ID NO: 1772283 - DNA, 15 bp, Homo sapiens
atgaaatggggttgt

SEQ ID NO: 1772284 - DNA, 15 bp, Homo sapiens
tgaaatggggttgtc

SEQ ID NO: 1772285 - DNA, 15 bp, Homo sapiens
gaaatggggttgtct

SEQ ID NO: 1772286 - DNA, 15 bp, Homo sapiens
aaatggggttgtctt

SEQ ID NO: 1772287 - DNA, 15 bp, Homo sapiens
aatggggttgtcttt

SEQ ID NO: 1772288 - DNA, 15 bp, Homo sapiens
atggggttgtctttt

SEQ ID NO: 1772289 - DNA, 15 bp, Homo sapiens
tggggttgtcttttt

SEQ ID NO: 1772290 - DNA, 15 bp, Homo sapiens
ggggttgtctttttg

SEQ ID NO: 1772291 - DNA, 15 bp, Homo sapiens
gggttgtctttttga

SEQ ID NO: 1772292 - DNA, 15 bp, Homo sapiens
ggttgtctttttgac

SEQ ID NO: 1772293 - DNA, 15 bp, Homo sapiens
gttgtctttttgacc

SEQ ID NO: 1772294 - DNA, 15 bp, Homo sapiens
ttgtctttttgacca

SEQ ID NO: 1772295 - DNA, 15 bp, Homo sapiens
tgtctttttgaccag

SEQ ID NO: 1772296 - DNA, 15 bp, Homo sapiens
gtctttttgaccagc

SEQ ID NO: 1772297 - DNA, 15 bp, Homo sapiens
tctttttgaccagcc

SEQ ID NO: 1772298 - DNA, 15 bp, Homo sapiens
ctttttgaccagcct

SEQ ID NO: 1772299 - DNA, 15 bp, Homo sapiens
tttttgaccagcctt

SEQ ID NO: 1772300 - DNA, 15 bp, Homo sapiens
ttttgaccagccttc

SEQ ID NO: 1772301 - DNA, 15 bp, Homo sapiens
tttgaccagccttct

SEQ ID NO: 1772302 - DNA, 15 bp, Homo sapiens
ttgaccagccttctc

SEQ ID NO: 1772303 - DNA, 15 bp, Homo sapiens
tgaccagccttctct

SEQ ID NO: 1772304 - DNA, 15 bp, Homo sapiens
gaccagccttctctc

SEQ ID NO: 1772305 - DNA, 15 bp, Homo sapiens
accagccttctctca

SEQ ID NO: 1772306 - DNA, 15 bp, Homo sapiens
ccagccttctctcag

SEQ ID NO: 1772307 - DNA, 15 bp, Homo sapiens
cagccttctctcagt

SEQ ID NO: 1772308 - DNA, 15 bp, Homo sapiens
agccttctctcagtc

SEQ ID NO: 1772309 - DNA, 15 bp, Homo sapiens
gccttctctcagtct

SEQ ID NO: 1772310 - DNA, 15 bp, Homo sapiens
ccttctctcagtctt

SEQ ID NO: 1772311 - DNA, 15 bp, Homo sapiens
cttctctcagtcttg

SEQ ID NO: 1772312 - DNA, 15 bp, Homo sapiens
ttctctcagtcttgt

SEQ ID NO: 1772313 - DNA, 15 bp, Homo sapiens
tctctcagtcttgtt

SEQ ID NO: 1772314 - DNA, 15 bp, Homo sapiens
ctctcagtcttgttt

SEQ ID NO: 1772315 - DNA, 15 bp, Homo sapiens
tctcagtcttgtttt

SEQ ID NO: 1772316 - DNA, 15 bp, Homo sapiens
ctcagtcttgtttta

SEQ ID NO: 1772317 - DNA, 15 bp, Homo sapiens
tcagtcttgttttaa

SEQ ID NO: 1772318 - DNA, 15 bp, Homo sapiens
cagtcttgttttaaa

SEQ ID NO: 1772319 - DNA, 15 bp, Homo sapiens
agtcttgttttaaaa

SEQ ID NO: 1772320 - DNA, 15 bp, Homo sapiens
gtcttgttttaaaac

SEQ ID NO: 1772321 - DNA, 15 bp, Homo sapiens
tcttgttttaaaaca

SEQ ID NO: 1772322 - DNA, 15 bp, Homo sapiens
cttgttttaaaacaa

SEQ ID NO: 1772323 - DNA, 15 bp, Homo sapiens
ttgttttaaaacaac

SEQ ID NO: 1772324 - DNA, 15 bp, Homo sapiens
tgttttaaaacaact

SEQ ID NO: 1772325 - DNA, 15 bp, Homo sapiens
gttttaaaacaactt

SEQ ID NO: 1772326 - DNA, 15 bp, Homo sapiens
ttttaaaacaacttg

SEQ ID NO: 1772327 - DNA, 15 bp, Homo sapiens
tttaaaacaacttga

SEQ ID NO: 1772328 - DNA, 15 bp, Homo sapiens
ttaaaacaacttgat

SEQ ID NO: 1772329 - DNA, 15 bp, Homo sapiens
taaaacaacttgatg

SEQ ID NO: 1772330 - DNA, 15 bp, Homo sapiens
aaaacaacttgatgc

SEQ ID NO: 1772331 - DNA, 15 bp, Homo sapiens
aaacaacttgatgcc

SEQ ID NO: 1772332 - DNA, 15 bp, Homo sapiens
aacaacttgatgcca

SEQ ID NO: 1772333 - DNA, 15 bp, Homo sapiens
acaacttgatgccag

SEQ ID NO: 1772334 - DNA, 15 bp, Homo sapiens
caacttgatgccagc

SEQ ID NO: 1772335 - DNA, 15 bp, Homo sapiens
aacttgatgccagcc

SEQ ID NO: 1772336 - DNA, 15 bp, Homo sapiens
acttgatgccagcct

SEQ ID NO: 1772337 - DNA, 15 bp, Homo sapiens
cttgatgccagcctg

SEQ ID NO: 1772338 - DNA, 15 bp, Homo sapiens
ttgatgccagcctgc

SEQ ID NO: 1772339 - DNA, 15 bp, Homo sapiens
tgatgccagcctgcc

SEQ ID NO: 1772340 - DNA, 15 bp, Homo sapiens
gatgccagcctgcca

SEQ ID NO: 1772341 - DNA, 15 bp, Homo sapiens
atgccagcctgccag

SEQ ID NO: 1772342 - DNA, 15 bp, Homo sapiens
tgccagcctgccagc

SEQ ID NO: 1772343 - DNA, 15 bp, Homo sapiens
gccagcctgccagcc

SEQ ID NO: 1772344 - DNA, 15 bp, Homo sapiens
ccagcctgccagccc

SEQ ID NO: 1772345 - DNA, 15 bp, Homo sapiens
cagcctgccagccct

SEQ ID NO: 1772346 - DNA, 15 bp, Homo sapiens
agcctgccagccctt

SEQ ID NO: 1772347 - DNA, 15 bp, Homo sapiens
gcctgccagcccttg

SEQ ID NO: 1772348 - DNA, 15 bp, Homo sapiens
cctgccagcccttgt

SEQ ID NO: 1772349 - DNA, 15 bp, Homo sapiens
ctgccagcccttgtt

SEQ ID NO: 1772350 - DNA, 15 bp, Homo sapiens
tgccagcccttgttc

SEQ ID NO: 1772351 - DNA, 15 bp, Homo sapiens
gccagcccttgttcc

SEQ ID NO: 1772352 - DNA, 15 bp, Homo sapiens
ccagcccttgttccc

SEQ ID NO: 1772353 - DNA, 15 bp, Homo sapiens
cagcccttgttccct

SEQ ID NO: 1772354 - DNA, 15 bp, Homo sapiens
agcccttgttccctg

SEQ ID NO: 1772355 - DNA, 15 bp, Homo sapiens
gcccttgttccctga

SEQ ID NO: 1772356 - DNA, 15 bp, Homo sapiens
cccttgttccctgac

SEQ ID NO: 1772357 - DNA, 15 bp, Homo sapiens
ccttgttccctgaca

SEQ ID NO: 1772358 - DNA, 15 bp, Homo sapiens
cttgttccctgacag

SEQ ID NO: 1772359 - DNA, 15 bp, Homo sapiens
ttgttccctgacagg

SEQ ID NO: 1772360 - DNA, 15 bp, Homo sapiens
tgttccctgacaggg

SEQ ID NO: 1772361 - DNA, 15 bp, Homo sapiens
gttccctgacagggt

SEQ ID NO: 1772362 - DNA, 15 bp, Homo sapiens
ttccctgacagggtg

SEQ ID NO: 1772363 - DNA, 15 bp, Homo sapiens
tccctgacagggtgc

SEQ ID NO: 1772364 - DNA, 15 bp, Homo sapiens
ccctgacagggtgcc

SEQ ID NO: 1772365 - DNA, 15 bp, Homo sapiens
cctgacagggtgccc

SEQ ID NO: 1772366 - DNA, 15 bp, Homo sapiens
ctgacagggtgccct

SEQ ID NO: 1772367 - DNA, 15 bp, Homo sapiens
tgacagggtgccctg

SEQ ID NO: 1772368 - DNA, 15 bp, Homo sapiens
gacagggtgccctga

SEQ ID NO: 1772369 - DNA, 15 bp, Homo sapiens
acagggtgccctgag

SEQ ID NO: 1772370 - DNA, 15 bp, Homo sapiens
cagggtgccctgagc

SEQ ID NO: 1772371 - DNA, 15 bp, Homo sapiens
agggtgccctgagca

SEQ ID NO: 1772372 - DNA, 15 bp, Homo sapiens
gggtgccctgagcag

SEQ ID NO: 1772373 - DNA, 15 bp, Homo sapiens
ggtgccctgagcaga

SEQ ID NO: 1772374 - DNA, 15 bp, Homo sapiens
gtgccctgagcagag

SEQ ID NO: 1772375 - DNA, 15 bp, Homo sapiens
tgccctgagcagagc

SEQ ID NO: 1772376 - DNA, 15 bp, Homo sapiens
gccctgagcagagcc

SEQ ID NO: 1772377 - DNA, 15 bp, Homo sapiens
ccctgagcagagccc

SEQ ID NO: 1772378 - DNA, 15 bp, Homo sapiens
cctgagcagagccca

SEQ ID NO: 1772379 - DNA, 15 bp, Homo sapiens
ctgagcagagcccag

SEQ ID NO: 1772380 - DNA, 15 bp, Homo sapiens
tgagcagagcccaga

SEQ ID NO: 1772381 - DNA, 15 bp, Homo sapiens
gagcagagcccagat

SEQ ID NO: 1772382 - DNA, 15 bp, Homo sapiens
agcagagcccagatg

SEQ ID NO: 1772383 - DNA, 15 bp, Homo sapiens
gcagagcccagatgg

SEQ ID NO: 1772384 - DNA, 15 bp, Homo sapiens
cagagcccagatggc

SEQ ID NO: 1772385 - DNA, 15 bp, Homo sapiens
agagcccagatggcc

SEQ ID NO: 1772386 - DNA, 15 bp, Homo sapiens
gagcccagatggccc

SEQ ID NO: 1772387 - DNA, 15 bp, Homo sapiens
agcccagatggcccg

SEQ ID NO: 1772388 - DNA, 15 bp, Homo sapiens
gcccagatggcccgt

SEQ ID NO: 1772389 - DNA, 15 bp, Homo sapiens
cccagatggcccgta

SEQ ID NO: 1772390 - DNA, 15 bp, Homo sapiens
ccagatggcccgtaa

SEQ ID NO: 1772391 - DNA, 15 bp, Homo sapiens
cagatggcccgtaag

SEQ ID NO: 1772392 - DNA, 15 bp, Homo sapiens
agatggcccgtaaga

SEQ ID NO: 1772393 - DNA, 15 bp, Homo sapiens
gatggcccgtaagag

SEQ ID NO: 1772394 - DNA, 15 bp, Homo sapiens
atggcccgtaagagg

SEQ ID NO: 1772395 - DNA, 15 bp, Homo sapiens
tggcccgtaagaggc

SEQ ID NO: 1772396 - DNA, 15 bp, Homo sapiens
ggcccgtaagaggcc

SEQ ID NO: 1772397 - DNA, 15 bp, Homo sapiens
gcccgtaagaggcct

SEQ ID NO: 1772398 - DNA, 15 bp, Homo sapiens
cccgtaagaggcctg

SEQ ID NO: 1772399 - DNA, 15 bp, Homo sapiens
ccgtaagaggcctga

SEQ ID NO: 1772400 - DNA, 15 bp, Homo sapiens
cgtaagaggcctgat

SEQ ID NO: 1772401 - DNA, 15 bp, Homo sapiens
gtaagaggcctgatc

SEQ ID NO: 1772402 - DNA, 15 bp, Homo sapiens
taagaggcctgatct

SEQ ID NO: 1772403 - DNA, 15 bp, Homo sapiens
aagaggcctgatctc

SEQ ID NO: 1772404 - DNA, 15 bp, Homo sapiens
agaggcctgatctcc

SEQ ID NO: 1772405 - DNA, 15 bp, Homo sapiens
gaggcctgatctcct

SEQ ID NO: 1772406 - DNA, 15 bp, Homo sapiens
aggcctgatctcctt

SEQ ID NO: 1772407 - DNA, 15 bp, Homo sapiens
ggcctgatctcctta

SEQ ID NO: 1772408 - DNA, 15 bp, Homo sapiens
gcctgatctccttac

SEQ ID NO: 1772409 - DNA, 15 bp, Homo sapiens
cctgatctccttact

SEQ ID NO: 1772410 - DNA, 15 bp, Homo sapiens
ctgatctccttactc

SEQ ID NO: 1772411 - DNA, 15 bp, Homo sapiens
tgatctccttactcc

SEQ ID NO: 1772412 - DNA, 15 bp, Homo sapiens
gatctccttactccc

SEQ ID NO: 1772413 - DNA, 15 bp, Homo sapiens
atctccttactccct

SEQ ID NO: 1772414 - DNA, 15 bp, Homo sapiens
tctccttactccctg

SEQ ID NO: 1772415 - DNA, 15 bp, Homo sapiens
ctccttactccctgt

SEQ ID NO: 1772416 - DNA, 15 bp, Homo sapiens
tccttactccctgtg

SEQ ID NO: 1772417 - DNA, 15 bp, Homo sapiens
ccttactccctgtgc

SEQ ID NO: 1772418 - DNA, 15 bp, Homo sapiens
cttactccctgtgcc

SEQ ID NO: 1772419 - DNA, 15 bp, Homo sapiens
ttactccctgtgccc

SEQ ID NO: 1772420 - DNA, 15 bp, Homo sapiens
tactccctgtgccct

SEQ ID NO: 1772421 - DNA, 15 bp, Homo sapiens
actccctgtgccctg

SEQ ID NO: 1772422 - DNA, 15 bp, Homo sapiens
ctccctgtgccctgg

SEQ ID NO: 1772423 - DNA, 15 bp, Homo sapiens
tccctgtgccctgga

SEQ ID NO: 1772424 - DNA, 15 bp, Homo sapiens
ccctgtgccctggag

SEQ ID NO: 1772425 - DNA, 15 bp, Homo sapiens
cctgtgccctggagg

SEQ ID NO: 1772426 - DNA, 15 bp, Homo sapiens
ctgtgccctggagga

SEQ ID NO: 1772427 - DNA, 15 bp, Homo sapiens
tgtgccctggaggat

SEQ ID NO: 1772428 - DNA, 15 bp, Homo sapiens
gtgccctggaggatt

SEQ ID NO: 1772429 - DNA, 15 bp, Homo sapiens
tgccctggaggattt

SEQ ID NO: 1772430 - DNA, 15 bp, Homo sapiens
gccctggaggatttg

SEQ ID NO: 1772431 - DNA, 15 bp, Homo sapiens
ccctggaggatttga

SEQ ID NO: 1772432 - DNA, 15 bp, Homo sapiens
cctggaggatttgag

SEQ ID NO: 1772433 - DNA, 15 bp, Homo sapiens
ctggaggatttgagc

SEQ ID NO: 1772434 - DNA, 15 bp, Homo sapiens
tggaggatttgagcc

SEQ ID NO: 1772435 - DNA, 15 bp, Homo sapiens
ggaggatttgagccc

SEQ ID NO: 1772436 - DNA, 15 bp, Homo sapiens
gaggatttgagccca

SEQ ID NO: 1772437 - DNA, 15 bp, Homo sapiens
aggatttgagcccac

SEQ ID NO: 1772438 - DNA, 15 bp, Homo sapiens
ggatttgagcccaca

SEQ ID NO: 1772439 - DNA, 15 bp, Homo sapiens
gatttgagcccacat

SEQ ID NO: 1772440 - DNA, 15 bp, Homo sapiens
atttgagcccacatg

SEQ ID NO: 1772441 - DNA, 15 bp, Homo sapiens
tttgagcccacatgt

SEQ ID NO: 1772442 - DNA, 15 bp, Homo sapiens
ttgagcccacatgtg

SEQ ID NO: 1772443 - DNA, 15 bp, Homo sapiens
tgagcccacatgtgc

SEQ ID NO: 1772444 - DNA, 15 bp, Homo sapiens
gagcccacatgtgct

SEQ ID NO: 1772445 - DNA, 15 bp, Homo sapiens
agcccacatgtgctc

SEQ ID NO: 1772446 - DNA, 15 bp, Homo sapiens
gcccacatgtgctcc

SEQ ID NO: 1772447 - DNA, 15 bp, Homo sapiens
cccacatgtgctcca

SEQ ID NO: 1772448 - DNA, 15 bp, Homo sapiens
ccacatgtgctccag

SEQ ID NO: 1772449 - DNA, 15 bp, Homo sapiens
cacatgtgctccaga

SEQ ID NO: 1772450 - DNA, 15 bp, Homo sapiens
acatgtgctccagag

SEQ ID NO: 1772451 - DNA, 15 bp, Homo sapiens
catgtgctccagagc

SEQ ID NO: 1772452 - DNA, 15 bp, Homo sapiens
atgtgctccagagct

SEQ ID NO: 1772453 - DNA, 15 bp, Homo sapiens
tgtgctccagagctg

SEQ ID NO: 1772454 - DNA, 15 bp, Homo sapiens
gtgctccagagctgg

SEQ ID NO: 1772455 - DNA, 15 bp, Homo sapiens
tgctccagagctggg

SEQ ID NO: 1772456 - DNA, 15 bp, Homo sapiens
gctccagagctggga

SEQ ID NO: 1772457 - DNA, 15 bp, Homo sapiens
ctccagagctgggaa

SEQ ID NO: 1772458 - DNA, 15 bp, Homo sapiens
tccagagctgggaac

SEQ ID NO: 1772459 - DNA, 15 bp, Homo sapiens
ccagagctgggaact

SEQ ID NO: 1772460 - DNA, 15 bp, Homo sapiens
cagagctgggaacta

SEQ ID NO: 1772461 - DNA, 15 bp, Homo sapiens
agagctgggaactag

SEQ ID NO: 1772462 - DNA, 15 bp, Homo sapiens
gagctgggaactagg

SEQ ID NO: 1772463 - DNA, 15 bp, Homo sapiens
agctgggaactaggc

SEQ ID NO: 1772464 - DNA, 15 bp, Homo sapiens
gctgggaactaggcc

SEQ ID NO: 1772465 - DNA, 15 bp, Homo sapiens
ctgggaactaggccc

SEQ ID NO: 1772466 - DNA, 15 bp, Homo sapiens
tgggaactaggccct

SEQ ID NO: 1772467 - DNA, 15 bp, Homo sapiens
gggaactaggccctt

SEQ ID NO: 1772468 - DNA, 15 bp, Homo sapiens
ggaactaggcccttc

SEQ ID NO: 1772469 - DNA, 15 bp, Homo sapiens
gaactaggcccttcc

SEQ ID NO: 1772470 - DNA, 15 bp, Homo sapiens
aactaggcccttcca

SEQ ID NO: 1772471 - DNA, 15 bp, Homo sapiens
actaggcccttccac

SEQ ID NO: 1772472 - DNA, 15 bp, Homo sapiens
ctaggcccttccaca

SEQ ID NO: 1772473 - DNA, 15 bp, Homo sapiens
taggcccttccacat

SEQ ID NO: 1772474 - DNA, 15 bp, Homo sapiens
aggcccttccacatc

SEQ ID NO: 1772475 - DNA, 15 bp, Homo sapiens
ggcccttccacatca

SEQ ID NO: 1772476 - DNA, 15 bp, Homo sapiens
gcccttccacatcag

SEQ ID NO: 1772477 - DNA, 15 bp, Homo sapiens
cccttccacatcagg

SEQ ID NO: 1772478 - DNA, 15 bp, Homo sapiens
ccttccacatcaggt

SEQ ID NO: 1772479 - DNA, 15 bp, Homo sapiens
cttccacatcaggtc

SEQ ID NO: 1772480 - DNA, 15 bp, Homo sapiens
ttccacatcaggtcc

SEQ ID NO: 1772481 - DNA, 15 bp, Homo sapiens
tccacatcaggtcct

SEQ ID NO: 1772482 - DNA, 15 bp, Homo sapiens
ccacatcaggtcctt

SEQ ID NO: 1772483 - DNA, 15 bp, Homo sapiens
cacatcaggtccttt

SEQ ID NO: 1772484 - DNA, 15 bp, Homo sapiens
acatcaggtcctttc

SEQ ID NO: 1772485 - DNA, 15 bp, Homo sapiens
catcaggtcctttct

SEQ ID NO: 1772486 - DNA, 15 bp, Homo sapiens
atcaggtcctttctc

SEQ ID NO: 1772487 - DNA, 15 bp, Homo sapiens
tcaggtcctttctcc

SEQ ID NO: 1772488 - DNA, 15 bp, Homo sapiens
caggtcctttctcct

SEQ ID NO: 1772489 - DNA, 15 bp, Homo sapiens
aggtcctttctcctg

SEQ ID NO: 1772490 - DNA, 15 bp, Homo sapiens
ggtcctttctcctga

SEQ ID NO: 1772491 - DNA, 15 bp, Homo sapiens
gtcctttctcctgag

SEQ ID NO: 1772492 - DNA, 15 bp, Homo sapiens
tcctttctcctgagc

SEQ ID NO: 1772493 - DNA, 15 bp, Homo sapiens
cctttctcctgagct

SEQ ID NO: 1772494 - DNA, 15 bp, Homo sapiens
ctttctcctgagctc

SEQ ID NO: 1772495 - DNA, 15 bp, Homo sapiens
tttctcctgagctca

SEQ ID NO: 1772496 - DNA, 15 bp, Homo sapiens
ttctcctgagctcag

SEQ ID NO: 1772497 - DNA, 15 bp, Homo sapiens
tctcctgagctcagg

SEQ ID NO: 1772498 - DNA, 15 bp, Homo sapiens
ctcctgagctcaggc

SEQ ID NO: 1772499 - DNA, 15 bp, Homo sapiens
tcctgagctcaggct

SEQ ID NO: 1772500 - DNA, 15 bp, Homo sapiens
cctgagctcaggctg

SEQ ID NO: 1772501 - DNA, 15 bp, Homo sapiens
ctgagctcaggctga

SEQ ID NO: 1772502 - DNA, 15 bp, Homo sapiens
tgagctcaggctgaa

SEQ ID NO: 1772503 - DNA, 15 bp, Homo sapiens
gagctcaggctgaaa

SEQ ID NO: 1772504 - DNA, 15 bp, Homo sapiens
agctcaggctgaaag

SEQ ID NO: 1772505 - DNA, 15 bp, Homo sapiens
gctcaggctgaaagc

SEQ ID NO: 1772506 - DNA, 15 bp, Homo sapiens
ctcaggctgaaagcc

SEQ ID NO: 1772507 - DNA, 15 bp, Homo sapiens
tcaggctgaaagcca

SEQ ID NO: 1772508 - DNA, 15 bp, Homo sapiens
caggctgaaagccag

SEQ ID NO: 1772509 - DNA, 15 bp, Homo sapiens
aggctgaaagccagt

SEQ ID NO: 1772510 - DNA, 15 bp, Homo sapiens
ggctgaaagccagtt

SEQ ID NO: 1772511 - DNA, 15 bp, Homo sapiens
gctgaaagccagttt

SEQ ID NO: 1772512 - DNA, 15 bp, Homo sapiens
ctgaaagccagttta

SEQ ID NO: 1772513 - DNA, 15 bp, Homo sapiens
tgaaagccagtttac

SEQ ID NO: 1772514 - DNA, 15 bp, Homo sapiens
gaaagccagtttaca

SEQ ID NO: 1772515 - DNA, 15 bp, Homo sapiens
aaagccagtttacat

SEQ ID NO: 1772516 - DNA, 15 bp, Homo sapiens
aagccagtttacatg

SEQ ID NO: 1772517 - DNA, 15 bp, Homo sapiens
agccagtttacatgt

SEQ ID NO: 1772518 - DNA, 15 bp, Homo sapiens
gccagtttacatgtt

SEQ ID NO: 1772519 - DNA, 15 bp, Homo sapiens
ccagtttacatgttt

SEQ ID NO: 1772520 - DNA, 15 bp, Homo sapiens
cagtttacatgttta

SEQ ID NO: 1772521 - DNA, 15 bp, Homo sapiens
agtttacatgtttac

SEQ ID NO: 1772522 - DNA, 15 bp, Homo sapiens
gtttacatgtttact

SEQ ID NO: 1772523 - DNA, 15 bp, Homo sapiens
tttacatgtttactt

SEQ ID NO: 1772524 - DNA, 15 bp, Homo sapiens
ttacatgtttacttc

SEQ ID NO: 1772525 - DNA, 15 bp, Homo sapiens
tacatgtttacttcc

SEQ ID NO: 1772526 - DNA, 15 bp, Homo sapiens
acatgtttacttccc

SEQ ID NO: 1772527 - DNA, 15 bp, Homo sapiens
catgtttacttccca

SEQ ID NO: 1772528 - DNA, 15 bp, Homo sapiens
atgtttacttcccac

SEQ ID NO: 1772529 - DNA, 15 bp, Homo sapiens
tgtttacttcccacc

SEQ ID NO: 1772530 - DNA, 15 bp, Homo sapiens
gtttacttcccaccg

SEQ ID NO: 1772531 - DNA, 15 bp, Homo sapiens
tttacttcccaccgc

SEQ ID NO: 1772532 - DNA, 15 bp, Homo sapiens
ttacttcccaccgca

SEQ ID NO: 1772533 - DNA, 15 bp, Homo sapiens
tacttcccaccgcac

SEQ ID NO: 1772534 - DNA, 15 bp, Homo sapiens
acttcccaccgcaca

SEQ ID NO: 1772535 - DNA, 15 bp, Homo sapiens
cttcccaccgcacac

SEQ ID NO: 1772536 - DNA, 15 bp, Homo sapiens
ttcccaccgcacact

SEQ ID NO: 1772537 - DNA, 15 bp, Homo sapiens
tcccaccgcacactg

SEQ ID NO: 1772538 - DNA, 15 bp, Homo sapiens
cccaccgcacactgt

SEQ ID NO: 1772539 - DNA, 15 bp, Homo sapiens
ccaccgcacactgtt

SEQ ID NO: 1772540 - DNA, 15 bp, Homo sapiens
caccgcacactgttt

SEQ ID NO: 1772541 - DNA, 15 bp, Homo sapiens
accgcacactgtttg

SEQ ID NO: 1772542 - DNA, 15 bp, Homo sapiens
ccgcacactgtttga

SEQ ID NO: 1772543 - DNA, 15 bp, Homo sapiens
cgcacactgtttgaa

SEQ ID NO: 1772544 - DNA, 15 bp, Homo sapiens
gcacactgtttgaat

SEQ ID NO: 1772545 - DNA, 15 bp, Homo sapiens
cacactgtttgaatg

SEQ ID NO: 1772546 - DNA, 15 bp, Homo sapiens
acactgtttgaatgg

SEQ ID NO: 1772547 - DNA, 15 bp, Homo sapiens
cactgtttgaatggg

SEQ ID NO: 1772548 - DNA, 15 bp, Homo sapiens
actgtttgaatgggg

SEQ ID NO: 1772549 - DNA, 15 bp, Homo sapiens
ctgtttgaatggggt

SEQ ID NO: 1772550 - DNA, 15 bp, Homo sapiens
tgtttgaatggggta

SEQ ID NO: 1772551 - DNA, 15 bp, Homo sapiens
gtttgaatggggtac

SEQ ID NO: 1772552 - DNA, 15 bp, Homo sapiens
tttgaatggggtaca

SEQ ID NO: 1772553 - DNA, 15 bp, Homo sapiens
ttgaatggggtacaa

SEQ ID NO: 1772554 - DNA, 15 bp, Homo sapiens
tgaatggggtacaaa

SEQ ID NO: 1772555 - DNA, 15 bp, Homo sapiens
gaatggggtacaaac

SEQ ID NO: 1772556 - DNA, 15 bp, Homo sapiens
aatggggtacaaact

SEQ ID NO: 1772557 - DNA, 15 bp, Homo sapiens
atggggtacaaactc

SEQ ID NO: 1772558 - DNA, 15 bp, Homo sapiens
tggggtacaaactca

SEQ ID NO: 1772559 - DNA, 15 bp, Homo sapiens
ggggtacaaactcaa

SEQ ID NO: 1772560 - DNA, 15 bp, Homo sapiens
gggtacaaactcaat

SEQ ID NO: 1772561 - DNA, 15 bp, Homo sapiens
tacaaactcaataag

SEQ ID NO: 1772562 - DNA, 15 bp, Homo sapiens
acaaactcaataagg

SEQ ID NO: 1772563 - DNA, 15 bp, Homo sapiens
caaactcaataagga

SEQ ID NO: 1772564 - DNA, 15 bp, Homo sapiens
aaactcaataaggaa

SEQ ID NO: 1772565 - DNA, 15 bp, Homo sapiens
aactcaataaggaac

SEQ ID NO: 1772566 - DNA, 15 bp, Homo sapiens
actcaataaggaaca

SEQ ID NO: 1772567 - DNA, 15 bp, Homo sapiens
ctcaataaggaacag

SEQ ID NO: 1772568 - DNA, 15 bp, Homo sapiens
tcaataaggaacagt

SEQ ID NO: 1772569 - DNA, 15 bp, Homo sapiens
caataaggaacagtt

SEQ ID NO: 1772570 - DNA, 15 bp, Homo sapiens
aataaggaacagttc

SEQ ID NO: 1772571 - DNA, 15 bp, Homo sapiens
ataaggaacagttca

SEQ ID NO: 1772572 - DNA, 15 bp, Homo sapiens
taaggaacagttcag

SEQ ID NO: 1772573 - DNA, 15 bp, Homo sapiens
aaggaacagttcaga

SEQ ID NO: 1772574 - DNA, 15 bp, Homo sapiens
aggaacagttcagaa

SEQ ID NO: 1772575 - DNA, 15 bp, Homo sapiens
ggaacagttcagaac

SEQ ID NO: 1772576 - DNA, 15 bp, Homo sapiens
gaacagttcagaact

SEQ ID NO: 1772577 - DNA, 15 bp, Homo sapiens
aacagttcagaactc

SEQ ID NO: 1772578 - DNA, 15 bp, Homo sapiens
acagttcagaactct

SEQ ID NO: 1772579 - DNA, 15 bp, Homo sapiens
cagttcagaactctg

SEQ ID NO: 1772580 - DNA, 15 bp, Homo sapiens
agttcagaactctga

SEQ ID NO: 1772581 - DNA, 15 bp, Homo sapiens
gttcagaactctgag

SEQ ID NO: 1772582 - DNA, 15 bp, Homo sapiens
ttcagaactctgagt

SEQ ID NO: 1772583 - DNA, 15 bp, Homo sapiens
tcagaactctgagtt

SEQ ID NO: 1772584 - DNA, 15 bp, Homo sapiens
cagaactctgagttt

SEQ ID NO: 1772585 - DNA, 15 bp, Homo sapiens
agaactctgagtttt

SEQ ID NO: 1772586 - DNA, 15 bp, Homo sapiens
gaactctgagtttta

SEQ ID NO: 1772587 - DNA, 15 bp, Homo sapiens
aactctgagttttaa

SEQ ID NO: 1772588 - DNA, 15 bp, Homo sapiens
actctgagttttaag

SEQ ID NO: 1772589 - DNA, 15 bp, Homo sapiens
ctctgagttttaagc

SEQ ID NO: 1772590 - DNA, 15 bp, Homo sapiens
tctgagttttaagca

SEQ ID NO: 1772591 - DNA, 15 bp, Homo sapiens
ctgagttttaagcac

SEQ ID NO: 1772592 - DNA, 15 bp, Homo sapiens
tgagttttaagcaca

SEQ ID NO: 1772593 - DNA, 15 bp, Homo sapiens
gagttttaagcacag

SEQ ID NO: 1772594 - DNA, 15 bp, Homo sapiens
agttttaagcacaga

SEQ ID NO: 1772595 - DNA, 15 bp, Homo sapiens
gttttaagcacagag

SEQ ID NO: 1772596 - DNA, 15 bp, Homo sapiens
ttttaagcacagagc

SEQ ID NO: 1772597 - DNA, 15 bp, Homo sapiens
tttaagcacagagcc

SEQ ID NO: 1772598 - DNA, 15 bp, Homo sapiens
ttaagcacagagcct

SEQ ID NO: 1772599 - DNA, 15 bp, Homo sapiens
taagcacagagcctg

SEQ ID NO: 1772600 - DNA, 15 bp, Homo sapiens
aagcacagagcctgg

SEQ ID NO: 1772601 - DNA, 15 bp, Homo sapiens
agcacagagcctggg

SEQ ID NO: 1772602 - DNA, 15 bp, Homo sapiens
gcacagagcctgggc

SEQ ID NO: 1772603 - DNA, 15 bp, Homo sapiens
cacagagcctgggct

SEQ ID NO: 1772604 - DNA, 15 bp, Homo sapiens
acagagcctgggctc

SEQ ID NO: 1772605 - DNA, 15 bp, Homo sapiens
cagagcctgggctct

SEQ ID NO: 1772606 - DNA, 15 bp, Homo sapiens
agagcctgggctctg

SEQ ID NO: 1772607 - DNA, 15 bp, Homo sapiens
gagcctgggctctgc

SEQ ID NO: 1772608 - DNA, 15 bp, Homo sapiens
agcctgggctctgca

SEQ ID NO: 1772609 - DNA, 15 bp, Homo sapiens
gcctgggctctgcac

SEQ ID NO: 1772610 - DNA, 15 bp, Homo sapiens
cctgggctctgcact

SEQ ID NO: 1772611 - DNA, 15 bp, Homo sapiens
ctgggctctgcacta

SEQ ID NO: 1772612 - DNA, 15 bp, Homo sapiens
tgggctctgcactac

SEQ ID NO: 1772613 - DNA, 15 bp, Homo sapiens
gggctctgcactacc

SEQ ID NO: 1772614 - DNA, 15 bp, Homo sapiens
ggctctgcactacct

SEQ ID NO: 1772615 - DNA, 15 bp, Homo sapiens
gctctgcactacctt

SEQ ID NO: 1772616 - DNA, 15 bp, Homo sapiens
ctctgcactacctta

SEQ ID NO: 1772617 - DNA, 15 bp, Homo sapiens
tctgcactaccttag

SEQ ID NO: 1772618 - DNA, 15 bp, Homo sapiens
ctgcactaccttaga

SEQ ID NO: 1772619 - DNA, 15 bp, Homo sapiens
tgcactaccttagaa

SEQ ID NO: 1772620 - DNA, 15 bp, Homo sapiens
gcactaccttagaag

SEQ ID NO: 1772621 - DNA, 15 bp, Homo sapiens
cactaccttagaagt

SEQ ID NO: 1772622 - DNA, 15 bp, Homo sapiens
actaccttagaagtc

SEQ ID NO: 1772623 - DNA, 15 bp, Homo sapiens
ctaccttagaagtct

SEQ ID NO: 1772624 - DNA, 15 bp, Homo sapiens
taccttagaagtctg

SEQ ID NO: 1772625 - DNA, 15 bp, Homo sapiens
accttagaagtctgg

SEQ ID NO: 1772626 - DNA, 15 bp, Homo sapiens
ccttagaagtctggc

SEQ ID NO: 1772627 - DNA, 15 bp, Homo sapiens
cttagaagtctggcc

SEQ ID NO: 1772628 - DNA, 15 bp, Homo sapiens
ttagaagtctggccc

SEQ ID NO: 1772629 - DNA, 15 bp, Homo sapiens
tagaagtctggccct

SEQ ID NO: 1772630 - DNA, 15 bp, Homo sapiens
agaagtctggccctt

SEQ ID NO: 1772631 - DNA, 15 bp, Homo sapiens
gaagtctggcccttc

SEQ ID NO: 1772632 - DNA, 15 bp, Homo sapiens
aagtctggcccttct

SEQ ID NO: 1772633 - DNA, 15 bp, Homo sapiens
agtctggcccttctt

SEQ ID NO: 1772634 - DNA, 15 bp, Homo sapiens
gtctggcccttcttt

SEQ ID NO: 1772635 - DNA, 15 bp, Homo sapiens
tctggcccttctttg

SEQ ID NO: 1772636 - DNA, 15 bp, Homo sapiens
ctggcccttctttgc

SEQ ID NO: 1772637 - DNA, 15 bp, Homo sapiens
tggcccttctttgct

SEQ ID NO: 1772638 - DNA, 15 bp, Homo sapiens
ggcccttctttgctg

SEQ ID NO: 1772639 - DNA, 15 bp, Homo sapiens
gcccttctttgctgg

SEQ ID NO: 1772640 - DNA, 15 bp, Homo sapiens
cccttctttgctggc

SEQ ID NO: 1772641 - DNA, 15 bp, Homo sapiens
ccttctttgctggca

SEQ ID NO: 1772642 - DNA, 15 bp, Homo sapiens
cttctttgctggcag

SEQ ID NO: 1772643 - DNA, 15 bp, Homo sapiens
ttctttgctggcaga

SEQ ID NO: 1772644 - DNA, 15 bp, Homo sapiens
ctttgctggcagagg

SEQ ID NO: 1772645 - DNA, 15 bp, Homo sapiens
tttgctggcagaggt

SEQ ID NO: 1772646 - DNA, 15 bp, Homo sapiens
ttgctggcagaggtc

SEQ ID NO: 1772647 - DNA, 15 bp, Homo sapiens
tgctggcagaggtca

SEQ ID NO: 1772648 - DNA, 15 bp, Homo sapiens
gctggcagaggtcat

SEQ ID NO: 1772649 - DNA, 15 bp, Homo sapiens
ctggcagaggtcatg

SEQ ID NO: 1772650 - DNA, 15 bp, Homo sapiens
tggcagaggtcatgc

SEQ ID NO: 1772651 - DNA, 15 bp, Homo sapiens
ggcagaggtcatgct

SEQ ID NO: 1772652 - DNA, 15 bp, Homo sapiens
gcagaggtcatgctg

SEQ ID NO: 1772653 - DNA, 15 bp, Homo sapiens
cagaggtcatgctgt

SEQ ID NO: 1772654 - DNA, 15 bp, Homo sapiens
agaggtcatgctgtt

SEQ ID NO: 1772655 - DNA, 15 bp, Homo sapiens
gaggtcatgctgttt

SEQ ID NO: 1772656 - DNA, 15 bp, Homo sapiens
aggtcatgctgtttg

SEQ ID NO: 1772657 - DNA, 15 bp, Homo sapiens
ggtcatgctgtttga

SEQ ID NO: 1772658 - DNA, 15 bp, Homo sapiens
gtcatgctgtttgat

SEQ ID NO: 1772659 - DNA, 15 bp, Homo sapiens
tcatgctgtttgatg

SEQ ID NO: 1772660 - DNA, 15 bp, Homo sapiens
catgctgtttgatga

SEQ ID NO: 1772661 - DNA, 15 bp, Homo sapiens
atgctgtttgatgag

SEQ ID NO: 1772662 - DNA, 15 bp, Homo sapiens
tgctgtttgatgagc

SEQ ID NO: 1772663 - DNA, 15 bp, Homo sapiens
gctgtttgatgagcc

SEQ ID NO: 1772664 - DNA, 15 bp, Homo sapiens
ctgtttgatgagcca

SEQ ID NO: 1772665 - DNA, 15 bp, Homo sapiens
tgtttgatgagccaa

SEQ ID NO: 1772666 - DNA, 15 bp, Homo sapiens
gtttgatgagccaac

SEQ ID NO: 1772667 - DNA, 15 bp, Homo sapiens
tttgatgagccaacc

SEQ ID NO: 1772668 - DNA, 15 bp, Homo sapiens
ttgatgagccaacca

SEQ ID NO: 1772669 - DNA, 15 bp, Homo sapiens
tgatgagccaaccac

SEQ ID NO: 1772670 - DNA, 15 bp, Homo sapiens
gatgagccaaccaca

SEQ ID NO: 1772671 - DNA, 15 bp, Homo sapiens
atgagccaaccacag

SEQ ID NO: 1772672 - DNA, 15 bp, Homo sapiens
tgagccaaccacagg

SEQ ID NO: 1772673 - DNA, 15 bp, Homo sapiens
gagccaaccacaggc

SEQ ID NO: 1772674 - DNA, 15 bp, Homo sapiens
agccaaccacaggcc

SEQ ID NO: 1772675 - DNA, 15 bp, Homo sapiens
gccaaccacaggcct

SEQ ID NO: 1772676 - DNA, 15 bp, Homo sapiens
ccaaccacaggcctg

SEQ ID NO: 1772677 - DNA, 15 bp, Homo sapiens
caaccacaggcctgg

SEQ ID NO: 1772678 - DNA, 15 bp, Homo sapiens
aaccacaggcctgga

SEQ ID NO: 1772679 - DNA, 15 bp, Homo sapiens
accacaggcctggac

SEQ ID NO: 1772680 - DNA, 15 bp, Homo sapiens
ccacaggcctggact

SEQ ID NO: 1772681 - DNA, 15 bp, Homo sapiens
cacaggcctggactg

SEQ ID NO: 1772682 - DNA, 15 bp, Homo sapiens
acaggcctggactgc

SEQ ID NO: 1772683 - DNA, 15 bp, Homo sapiens
caggcctggactgca

SEQ ID NO: 1772684 - DNA, 15 bp, Homo sapiens
aggcctggactgcat

SEQ ID NO: 1772685 - DNA, 15 bp, Homo sapiens
ggcctggactgcatg

SEQ ID NO: 1772686 - DNA, 15 bp, Homo sapiens
gcctggactgcatga

SEQ ID NO: 1772687 - DNA, 15 bp, Homo sapiens
cctggactgcatgac

SEQ ID NO: 1772688 - DNA, 15 bp, Homo sapiens
ctggactgcatgact

SEQ ID NO: 1772689 - DNA, 15 bp, Homo sapiens
tggactgcatgactg

SEQ ID NO: 1772690 - DNA, 15 bp, Homo sapiens
ggactgcatgactgc

SEQ ID NO: 1772691 - DNA, 15 bp, Homo sapiens
gactgcatgactgct

SEQ ID NO: 1772692 - DNA, 15 bp, Homo sapiens
actgcatgactgcta

SEQ ID NO: 1772693 - DNA, 15 bp, Homo sapiens
ctgcatgactgctaa

SEQ ID NO: 1772694 - DNA, 15 bp, Homo sapiens
tgcatgactgctaat

SEQ ID NO: 1772695 - DNA, 15 bp, Homo sapiens
gcatgactgctaatc

SEQ ID NO: 1772696 - DNA, 15 bp, Homo sapiens
catgactgctaatca

SEQ ID NO: 1772697 - DNA, 15 bp, Homo sapiens
atgactgctaatcag

SEQ ID NO: 1772698 - DNA, 15 bp, Homo sapiens
tgactgctaatcaga

SEQ ID NO: 1772699 - DNA, 15 bp, Homo sapiens
gactgctaatcagat

SEQ ID NO: 1772700 - DNA, 15 bp, Homo sapiens
actgctaatcagatt

SEQ ID NO: 1772701 - DNA, 15 bp, Homo sapiens
ctgctaatcagattg

SEQ ID NO: 1772702 - DNA, 15 bp, Homo sapiens
tgctaatcagattgt

SEQ ID NO: 1772703 - DNA, 15 bp, Homo sapiens
gctaatcagattgtc

SEQ ID NO: 1772704 - DNA, 15 bp, Homo sapiens
ctaatcagattgtcg

SEQ ID NO: 1772705 - DNA, 15 bp, Homo sapiens
taatcagattgtcgt

SEQ ID NO: 1772706 - DNA, 15 bp, Homo sapiens
aatcagattgtcgtc

SEQ ID NO: 1772707 - DNA, 15 bp, Homo sapiens
atcagattgtcgtcc

SEQ ID NO: 1772708 - DNA, 15 bp, Homo sapiens
tcagattgtcgtcct

SEQ ID NO: 1772709 - DNA, 15 bp, Homo sapiens
cagattgtcgtcctc

SEQ ID NO: 1772710 - DNA, 15 bp, Homo sapiens
agattgtcgtcctcc

SEQ ID NO: 1772711 - DNA, 15 bp, Homo sapiens
gattgtcgtcctcct

SEQ ID NO: 1772712 - DNA, 15 bp, Homo sapiens
attgtcgtcctcctg

SEQ ID NO: 1772713 - DNA, 15 bp, Homo sapiens
ttgtcgtcctcctgg

SEQ ID NO: 1772714 - DNA, 15 bp, Homo sapiens
tgtcgtcctcctggt

SEQ ID NO: 1772715 - DNA, 15 bp, Homo sapiens
gtcgtcctcctggtg

SEQ ID NO: 1772716 - DNA, 15 bp, Homo sapiens
tcgtcctcctggtgg

SEQ ID NO: 1772717 - DNA, 15 bp, Homo sapiens
cgtcctcctggtgga

SEQ ID NO: 1772718 - DNA, 15 bp, Homo sapiens
gtcctcctggtggaa

SEQ ID NO: 1772719 - DNA, 15 bp, Homo sapiens
tcctcctggtggaac

SEQ ID NO: 1772720 - DNA, 15 bp, Homo sapiens
cctcctggtggaact

SEQ ID NO: 1772721 - DNA, 15 bp, Homo sapiens
ctcctggtggaactg

SEQ ID NO: 1772722 - DNA, 15 bp, Homo sapiens
tcctggtggaactgg

SEQ ID NO: 1772723 - DNA, 15 bp, Homo sapiens
cctggtggaactggc

SEQ ID NO: 1772724 - DNA, 15 bp, Homo sapiens
ctggtggaactggct

SEQ ID NO: 1772725 - DNA, 15 bp, Homo sapiens
tggtggaactggctc

SEQ ID NO: 1772726 - DNA, 15 bp, Homo sapiens
ggtggaactggctcg

SEQ ID NO: 1772727 - DNA, 15 bp, Homo sapiens
gtggaactggctcgc

SEQ ID NO: 1772728 - DNA, 15 bp, Homo sapiens
tggaactggctcgca

SEQ ID NO: 1772729 - DNA, 15 bp, Homo sapiens
ggaactggctcgcag

SEQ ID NO: 1772730 - DNA, 15 bp, Homo sapiens
gaactggctcgcagg

SEQ ID NO: 1772731 - DNA, 15 bp, Homo sapiens
aactggctcgcagga

SEQ ID NO: 1772732 - DNA, 15 bp, Homo sapiens
actggctcgcaggaa

SEQ ID NO: 1772733 - DNA, 15 bp, Homo sapiens
ctggctcgcaggaac

SEQ ID NO: 1772734 - DNA, 15 bp, Homo sapiens
tggctcgcaggaacc

SEQ ID NO: 1772735 - DNA, 15 bp, Homo sapiens
ggctcgcaggaaccg

SEQ ID NO: 1772736 - DNA, 15 bp, Homo sapiens
gctcgcaggaaccga

SEQ ID NO: 1772737 - DNA, 15 bp, Homo sapiens
ctcgcaggaaccgaa

SEQ ID NO: 1772738 - DNA, 15 bp, Homo sapiens
tcgcaggaaccgaat

SEQ ID NO: 1772739 - DNA, 15 bp, Homo sapiens
cgcaggaaccgaatt

SEQ ID NO: 1772740 - DNA, 15 bp, Homo sapiens
gcaggaaccgaattg

SEQ ID NO: 1772741 - DNA, 15 bp, Homo sapiens
caggaaccgaattgt

SEQ ID NO: 1772742 - DNA, 15 bp, Homo sapiens
aggaaccgaattgtg

SEQ ID NO: 1772743 - DNA, 15 bp, Homo sapiens
ggaaccgaattgtgg

SEQ ID NO: 1772744 - DNA, 15 bp, Homo sapiens
gaaccgaattgtggt

SEQ ID NO: 1772745 - DNA, 15 bp, Homo sapiens
aaccgaattgtggtt

SEQ ID NO: 1772746 - DNA, 15 bp, Homo sapiens
accgaattgtggttc

SEQ ID NO: 1772747 - DNA, 15 bp, Homo sapiens
ccgaattgtggttct

SEQ ID NO: 1772748 - DNA, 15 bp, Homo sapiens
cgaattgtggttctc

SEQ ID NO: 1772749 - DNA, 15 bp, Homo sapiens
gaattgtggttctca

SEQ ID NO: 1772750 - DNA, 15 bp, Homo sapiens
aattgtggttctcac

SEQ ID NO: 1772751 - DNA, 15 bp, Homo sapiens
attgtggttctcacc

SEQ ID NO: 1772752 - DNA, 15 bp, Homo sapiens
ttgtggttctcacca

SEQ ID NO: 1772753 - DNA, 15 bp, Homo sapiens
tgtggttctcaccat

SEQ ID NO: 1772754 - DNA, 15 bp, Homo sapiens
gtggttctcaccatt

SEQ ID NO: 1772755 - DNA, 15 bp, Homo sapiens
tggttctcaccattc

SEQ ID NO: 1772756 - DNA, 15 bp, Homo sapiens
ggttctcaccattca

SEQ ID NO: 1772757 - DNA, 15 bp, Homo sapiens
gttctcaccattcac

SEQ ID NO: 1772758 - DNA, 15 bp, Homo sapiens
ttctcaccattcacc

SEQ ID NO: 1772759 - DNA, 15 bp, Homo sapiens
tctcaccattcacca

SEQ ID NO: 1772760 - DNA, 15 bp, Homo sapiens
ctcaccattcaccag

SEQ ID NO: 1772761 - DNA, 15 bp, Homo sapiens
tcaccattcaccagc

SEQ ID NO: 1772762 - DNA, 15 bp, Homo sapiens
caccattcaccagcc

SEQ ID NO: 1772763 - DNA, 15 bp, Homo sapiens
accattcaccagccc

SEQ ID NO: 1772764 - DNA, 15 bp, Homo sapiens
ccattcaccagcccc

SEQ ID NO: 1772765 - DNA, 15 bp, Homo sapiens
cattcaccagccccg

SEQ ID NO: 1772766 - DNA, 15 bp, Homo sapiens
attcaccagccccgt

SEQ ID NO: 1772767 - DNA, 15 bp, Homo sapiens
ttcaccagccccgtt

SEQ ID NO: 1772768 - DNA, 15 bp, Homo sapiens
tcaccagccccgttc

SEQ ID NO: 1772769 - DNA, 15 bp, Homo sapiens
caccagccccgttct

SEQ ID NO: 1772770 - DNA, 15 bp, Homo sapiens
accagccccgttctg

SEQ ID NO: 1772771 - DNA, 15 bp, Homo sapiens
ccagccccgttctga

SEQ ID NO: 1772772 - DNA, 15 bp, Homo sapiens
cagccccgttctgag

SEQ ID NO: 1772773 - DNA, 15 bp, Homo sapiens
agccccgttctgagc

SEQ ID NO: 1772774 - DNA, 15 bp, Homo sapiens
gccccgttctgagct

SEQ ID NO: 1772775 - DNA, 15 bp, Homo sapiens
ccccgttctgagctt

SEQ ID NO: 1772776 - DNA, 15 bp, Homo sapiens
cccgttctgagcttt

SEQ ID NO: 1772777 - DNA, 15 bp, Homo sapiens
ccgttctgagctttt

SEQ ID NO: 1772778 - DNA, 15 bp, Homo sapiens
cgttctgagcttttt

SEQ ID NO: 1772779 - DNA, 15 bp, Homo sapiens
gttctgagctttttc

SEQ ID NO: 1772780 - DNA, 15 bp, Homo sapiens
ttctgagctttttca

SEQ ID NO: 1772781 - DNA, 15 bp, Homo sapiens
tctgagctttttcag

SEQ ID NO: 1772782 - DNA, 15 bp, Homo sapiens
ctgagctttttcagg

SEQ ID NO: 1772783 - DNA, 15 bp, Homo sapiens
tgagctttttcaggt

SEQ ID NO: 1772784 - DNA, 15 bp, Homo sapiens
gagctttttcaggta

SEQ ID NO: 1772785 - DNA, 15 bp, Homo sapiens
agctttttcaggtaa

SEQ ID NO: 1772786 - DNA, 15 bp, Homo sapiens
gctttttcaggtaag

SEQ ID NO: 1772787 - DNA, 15 bp, Homo sapiens
ctttttcaggtaaga

SEQ ID NO: 1772788 - DNA, 15 bp, Homo sapiens
tttttcaggtaagag

SEQ ID NO: 1772789 - DNA, 15 bp, Homo sapiens
ttttcaggtaagagg

SEQ ID NO: 1772790 - DNA, 15 bp, Homo sapiens
tttcaggtaagaggt

SEQ ID NO: 1772791 - DNA, 15 bp, Homo sapiens
ttcaggtaagaggtt

SEQ ID NO: 1772792 - DNA, 15 bp, Homo sapiens
tcaggtaagaggttc

SEQ ID NO: 1772793 - DNA, 15 bp, Homo sapiens
caggtaagaggttca

SEQ ID NO: 1772794 - DNA, 15 bp, Homo sapiens
aggtaagaggttcaa

SEQ ID NO: 1772795 - DNA, 15 bp, Homo sapiens
ggtaagaggttcaac

SEQ ID NO: 1772796 - DNA, 15 bp, Homo sapiens
gtaagaggttcaact

SEQ ID NO: 1772797 - DNA, 15 bp, Homo sapiens
taagaggttcaactc

SEQ ID NO: 1772798 - DNA, 15 bp, Homo sapiens
aagaggttcaactcg

SEQ ID NO: 1772799 - DNA, 15 bp, Homo sapiens
agaggttcaactcgt

SEQ ID NO: 1772800 - DNA, 15 bp, Homo sapiens
gaggttcaactcgta

SEQ ID NO: 1772801 - DNA, 15 bp, Homo sapiens
aggttcaactcgtaa

SEQ ID NO: 1772802 - DNA, 15 bp, Homo sapiens
ggttcaactcgtaaa

SEQ ID NO: 1772803 - DNA, 15 bp, Homo sapiens
gttcaactcgtaaag

SEQ ID NO: 1772804 - DNA, 15 bp, Homo sapiens
ttcaactcgtaaagg

SEQ ID NO: 1772805 - DNA, 15 bp, Homo sapiens
tcaactcgtaaaggc

SEQ ID NO: 1772806 - DNA, 15 bp, Homo sapiens
caactcgtaaaggcc

SEQ ID NO: 1772807 - DNA, 15 bp, Homo sapiens
aactcgtaaaggccg

SEQ ID NO: 1772808 - DNA, 15 bp, Homo sapiens
actcgtaaaggccgg

SEQ ID NO: 1772809 - DNA, 15 bp, Homo sapiens
ctcgtaaaggccggg

SEQ ID NO: 1772810 - DNA, 15 bp, Homo sapiens
tcgtaaaggccgggt

SEQ ID NO: 1772811 - DNA, 15 bp, Homo sapiens
cgtaaaggccgggtc

SEQ ID NO: 1772812 - DNA, 15 bp, Homo sapiens
gtaaaggccgggtct

SEQ ID NO: 1772813 - DNA, 15 bp, Homo sapiens
taaaggccgggtcta

SEQ ID NO: 1772814 - DNA, 15 bp, Homo sapiens
aaaggccgggtctat

SEQ ID NO: 1772815 - DNA, 15 bp, Homo sapiens
aaggccgggtctatg

SEQ ID NO: 1772816 - DNA, 15 bp, Homo sapiens
aggccgggtctatgg

SEQ ID NO: 1772817 - DNA, 15 bp, Homo sapiens
ggccgggtctatggt

SEQ ID NO: 1772818 - DNA, 15 bp, Homo sapiens
gccgggtctatggtg

SEQ ID NO: 1772819 - DNA, 15 bp, Homo sapiens
ccgggtctatggtgt

SEQ ID NO: 1772820 - DNA, 15 bp, Homo sapiens
cgggtctatggtgtg

SEQ ID NO: 1772821 - DNA, 15 bp, Homo sapiens
gggtctatggtgtgt

SEQ ID NO: 1772822 - DNA, 15 bp, Homo sapiens
ggtctatggtgtgtt

SEQ ID NO: 1772823 - DNA, 15 bp, Homo sapiens
gtctatggtgtgttg

SEQ ID NO: 1772824 - DNA, 15 bp, Homo sapiens
tctatggtgtgttga

SEQ ID NO: 1772825 - DNA, 15 bp, Homo sapiens
ctatggtgtgttgag

SEQ ID NO: 1772826 - DNA, 15 bp, Homo sapiens
tatggtgtgttgagc

SEQ ID NO: 1772827 - DNA, 15 bp, Homo sapiens
atggtgtgttgagct

SEQ ID NO: 1772828 - DNA, 15 bp, Homo sapiens
tggtgtgttgagctg

SEQ ID NO: 1772829 - DNA, 15 bp, Homo sapiens
ggtgtgttgagctgg

SEQ ID NO: 1772830 - DNA, 15 bp, Homo sapiens
gtgtgttgagctggg

SEQ ID NO: 1772831 - DNA, 15 bp, Homo sapiens
tgtgttgagctggga

SEQ ID NO: 1772832 - DNA, 15 bp, Homo sapiens
gtgttgagctgggaa

SEQ ID NO: 1772833 - DNA, 15 bp, Homo sapiens
tgttgagctgggaat

SEQ ID NO: 1772834 - DNA, 15 bp, Homo sapiens
gttgagctgggaatc

SEQ ID NO: 1772835 - DNA, 15 bp, Homo sapiens
ttgagctgggaatca

SEQ ID NO: 1772836 - DNA, 15 bp, Homo sapiens
tgagctgggaatcac

SEQ ID NO: 1772837 - DNA, 15 bp, Homo sapiens
gagctgggaatcaca

SEQ ID NO: 1772838 - DNA, 15 bp, Homo sapiens
agctgggaatcacag

SEQ ID NO: 1772839 - DNA, 15 bp, Homo sapiens
gctgggaatcacagg

SEQ ID NO: 1772840 - DNA, 15 bp, Homo sapiens
ctgggaatcacaggg

SEQ ID NO: 1772841 - DNA, 15 bp, Homo sapiens
tgggaatcacagggg

SEQ ID NO: 1772842 - DNA, 15 bp, Homo sapiens
gggaatcacaggggc

SEQ ID NO: 1772843 - DNA, 15 bp, Homo sapiens
ggaatcacaggggca

SEQ ID NO: 1772844 - DNA, 15 bp, Homo sapiens
gaatcacaggggcag

SEQ ID NO: 1772845 - DNA, 15 bp, Homo sapiens
aatcacaggggcagg

SEQ ID NO: 1772846 - DNA, 15 bp, Homo sapiens
atcacaggggcaggg

SEQ ID NO: 1772847 - DNA, 15 bp, Homo sapiens
tcacaggggcagggg

SEQ ID NO: 1772848 - DNA, 15 bp, Homo sapiens
cacaggggcaggggc

SEQ ID NO: 1772849 - DNA, 15 bp, Homo sapiens
acaggggcaggggca

SEQ ID NO: 1772850 - DNA, 15 bp, Homo sapiens
caggggcaggggcaa

SEQ ID NO: 1772851 - DNA, 15 bp, Homo sapiens
aggggcaggggcaag

SEQ ID NO: 1772852 - DNA, 15 bp, Homo sapiens
ggggcaggggcaaga

SEQ ID NO: 1772853 - DNA, 15 bp, Homo sapiens
gggcaggggcaagat

SEQ ID NO: 1772854 - DNA, 15 bp, Homo sapiens
ggcaggggcaagatt

SEQ ID NO: 1772855 - DNA, 15 bp, Homo sapiens
gcaggggcaagattt

SEQ ID NO: 1772856 - DNA, 15 bp, Homo sapiens
caggggcaagatttg

SEQ ID NO: 1772857 - DNA, 15 bp, Homo sapiens
aggggcaagatttgt

SEQ ID NO: 1772858 - DNA, 15 bp, Homo sapiens
ggggcaagatttgta

SEQ ID NO: 1772859 - DNA, 15 bp, Homo sapiens
gggcaagatttgtac

SEQ ID NO: 1772860 - DNA, 15 bp, Homo sapiens
ggcaagatttgtacc

SEQ ID NO: 1772861 - DNA, 15 bp, Homo sapiens
gcaagatttgtacca

SEQ ID NO: 1772862 - DNA, 15 bp, Homo sapiens
caagatttgtaccag

SEQ ID NO: 1772863 - DNA, 15 bp, Homo sapiens
aagatttgtaccagt

SEQ ID NO: 1772864 - DNA, 15 bp, Homo sapiens
agatttgtaccagtg

SEQ ID NO: 1772865 - DNA, 15 bp, Homo sapiens
gatttgtaccagtgg

SEQ ID NO: 1772866 - DNA, 15 bp, Homo sapiens
atttgtaccagtggc

SEQ ID NO: 1772867 - DNA, 15 bp, Homo sapiens
tttgtaccagtggcc

SEQ ID NO: 1772868 - DNA, 15 bp, Homo sapiens
ttgtaccagtggcca

SEQ ID NO: 1772869 - DNA, 15 bp, Homo sapiens
tgtaccagtggccag

SEQ ID NO: 1772870 - DNA, 15 bp, Homo sapiens
gtaccagtggccagg

SEQ ID NO: 1772871 - DNA, 15 bp, Homo sapiens
taccagtggccaggc

SEQ ID NO: 1772872 - DNA, 15 bp, Homo sapiens
accagtggccaggca

SEQ ID NO: 1772873 - DNA, 15 bp, Homo sapiens
ccagtggccaggcac

SEQ ID NO: 1772874 - DNA, 15 bp, Homo sapiens
cagtggccaggcaca

SEQ ID NO: 1772875 - DNA, 15 bp, Homo sapiens
acagtggctcacact

SEQ ID NO: 1772876 - DNA, 15 bp, Homo sapiens
ctcacacttgtaatt

SEQ ID NO: 1772877 - DNA, 15 bp, Homo sapiens
tcacacttgtaattc

SEQ ID NO: 1772878 - DNA, 15 bp, Homo sapiens
cacacttgtaattcc

SEQ ID NO: 1772879 - DNA, 15 bp, Homo sapiens
acacttgtaattcca

SEQ ID NO: 1772880 - DNA, 15 bp, Homo sapiens
cacttgtaattccag

SEQ ID NO: 1772881 - DNA, 15 bp, Homo sapiens
acttgtaattccagc

SEQ ID NO: 1772882 - DNA, 15 bp, Homo sapiens
cttgtaattccagca

SEQ ID NO: 1772883 - DNA, 15 bp, Homo sapiens
ttgtaattccagcac

SEQ ID NO: 1772884 - DNA, 15 bp, Homo sapiens
tgtaattccagcact

SEQ ID NO: 1772885 - DNA, 15 bp, Homo sapiens
gtaattccagcactt

SEQ ID NO: 1772886 - DNA, 15 bp, Homo sapiens
ttccagcactttggg

SEQ ID NO: 1772887 - DNA, 15 bp, Homo sapiens
tccagcactttggga

SEQ ID NO: 1772888 - DNA, 15 bp, Homo sapiens
tgaggcaggaggagc

SEQ ID NO: 1772889 - DNA, 15 bp, Homo sapiens
gaggcaggaggagca

SEQ ID NO: 1772890 - DNA, 15 bp, Homo sapiens
aggcaggaggagcac

SEQ ID NO: 1772891 - DNA, 15 bp, Homo sapiens
ggcaggaggagcact

SEQ ID NO: 1772892 - DNA, 15 bp, Homo sapiens
gcaggaggagcactt

SEQ ID NO: 1772893 - DNA, 15 bp, Homo sapiens
caggaggagcacttg

SEQ ID NO: 1772894 - DNA, 15 bp, Homo sapiens
aggaggagcacttga

SEQ ID NO: 1772895 - DNA, 15 bp, Homo sapiens
ggaggagcacttgag

SEQ ID NO: 1772896 - DNA, 15 bp, Homo sapiens
gaggagcacttgagg

SEQ ID NO: 1772897 - DNA, 15 bp, Homo sapiens
aggagcacttgaggc

SEQ ID NO: 1772898 - DNA, 15 bp, Homo sapiens
ggagcacttgaggcc

SEQ ID NO: 1772899 - DNA, 15 bp, Homo sapiens
gagcacttgaggcca

SEQ ID NO: 1772900 - DNA, 15 bp, Homo sapiens
agcacttgaggccag

SEQ ID NO: 1772901 - DNA, 15 bp, Homo sapiens
gcacttgaggccagg

SEQ ID NO: 1772902 - DNA, 15 bp, Homo sapiens
gccaggagtttgagt

SEQ ID NO: 1772903 - DNA, 15 bp, Homo sapiens
ccaggagtttgagtc

SEQ ID NO: 1772904 - DNA, 15 bp, Homo sapiens
caggagtttgagtcc

SEQ ID NO: 1772905 - DNA, 15 bp, Homo sapiens
aggagtttgagtcca

SEQ ID NO: 1772906 - DNA, 15 bp, Homo sapiens
ggagtttgagtccat

SEQ ID NO: 1772907 - DNA, 15 bp, Homo sapiens
gagtttgagtccatc

SEQ ID NO: 1772908 - DNA, 15 bp, Homo sapiens
agtttgagtccatcc

SEQ ID NO: 1772909 - DNA, 15 bp, Homo sapiens
gtttgagtccatcct

SEQ ID NO: 1772910 - DNA, 15 bp, Homo sapiens
tttgagtccatcctg

SEQ ID NO: 1772911 - DNA, 15 bp, Homo sapiens
ttgagtccatcctga

SEQ ID NO: 1772912 - DNA, 15 bp, Homo sapiens
tgagtccatcctgag

SEQ ID NO: 1772913 - DNA, 15 bp, Homo sapiens
gagtccatcctgagc

SEQ ID NO: 1772914 - DNA, 15 bp, Homo sapiens
agtccatcctgagca

SEQ ID NO: 1772915 - DNA, 15 bp, Homo sapiens
gtccatcctgagcaa

SEQ ID NO: 1772916 - DNA, 15 bp, Homo sapiens
tccatcctgagcaat

SEQ ID NO: 1772917 - DNA, 15 bp, Homo sapiens
ccatcctgagcaata

SEQ ID NO: 1772918 - DNA, 15 bp, Homo sapiens
catcctgagcaataa

SEQ ID NO: 1772919 - DNA, 15 bp, Homo sapiens
atcctgagcaataaa

SEQ ID NO: 1772920 - DNA, 15 bp, Homo sapiens
tcctgagcaataaag

SEQ ID NO: 1772921 - DNA, 15 bp, Homo sapiens
cctgagcaataaagt

SEQ ID NO: 1772922 - DNA, 15 bp, Homo sapiens
ctgagcaataaagtg

SEQ ID NO: 1772923 - DNA, 15 bp, Homo sapiens
tgagcaataaagtga

SEQ ID NO: 1772924 - DNA, 15 bp, Homo sapiens
gagcaataaagtgag

SEQ ID NO: 1772925 - DNA, 15 bp, Homo sapiens
agcaataaagtgaga

SEQ ID NO: 1772926 - DNA, 15 bp, Homo sapiens
gcaataaagtgagac

SEQ ID NO: 1772927 - DNA, 15 bp, Homo sapiens
caataaagtgagact

SEQ ID NO: 1772928 - DNA, 15 bp, Homo sapiens
aataaagtgagactc

SEQ ID NO: 1772929 - DNA, 15 bp, Homo sapiens
ataaagtgagactcc

SEQ ID NO: 1772930 - DNA, 15 bp, Homo sapiens
taaagtgagactccc

SEQ ID NO: 1772931 - DNA, 15 bp, Homo sapiens
aaagtgagactcccc

SEQ ID NO: 1772932 - DNA, 15 bp, Homo sapiens
aagtgagactcccca

SEQ ID NO: 1772933 - DNA, 15 bp, Homo sapiens
agtgagactccccat

SEQ ID NO: 1772934 - DNA, 15 bp, Homo sapiens
gtgagactccccatc

SEQ ID NO: 1772935 - DNA, 15 bp, Homo sapiens
tgagactccccatct

SEQ ID NO: 1772936 - DNA, 15 bp, Homo sapiens
gagactccccatctc

SEQ ID NO: 1772937 - DNA, 15 bp, Homo sapiens
agactccccatctct

SEQ ID NO: 1772938 - DNA, 15 bp, Homo sapiens
gactccccatctcta

SEQ ID NO: 1772939 - DNA, 15 bp, Homo sapiens
actccccatctctaa

SEQ ID NO: 1772940 - DNA, 15 bp, Homo sapiens
ctccccatctctaaa

SEQ ID NO: 1772941 - DNA, 15 bp, Homo sapiens
cccatctctaaaaaa

SEQ ID NO: 1772942 - DNA, 15 bp, Homo sapiens
ccatctctaaaaaaa

SEQ ID NO: 1772943 - DNA, 15 bp, Homo sapiens
catctctaaaaaaaa

SEQ ID NO: 1772944 - DNA, 15 bp, Homo sapiens
atctctaaaaaaaaa

SEQ ID NO: 1772945 - DNA, 15 bp, Homo sapiens
gaaagaaaaagaaaa

SEQ ID NO: 1772946 - DNA, 15 bp, Homo sapiens
aaagaaaaagaaaaa

SEQ ID NO: 1772947 - DNA, 15 bp, Homo sapiens
aagaaaaagaaaaat

SEQ ID NO: 1772948 - DNA, 15 bp, Homo sapiens
agaaaaagaaaaatt

SEQ ID NO: 1772949 - DNA, 15 bp, Homo sapiens
gaaaaagaaaaatta

SEQ ID NO: 1772950 - DNA, 15 bp, Homo sapiens
aaaaagaaaaattag

SEQ ID NO: 1772951 - DNA, 15 bp, Homo sapiens
aaaagaaaaattagc

SEQ ID NO: 1772952 - DNA, 15 bp, Homo sapiens
aaagaaaaattagcc

SEQ ID NO: 1772953 - DNA, 15 bp, Homo sapiens
aagaaaaattagcca

SEQ ID NO: 1772954 - DNA, 15 bp, Homo sapiens
agaaaaattagccag

SEQ ID NO: 1772955 - DNA, 15 bp, Homo sapiens
gaaaaattagccagg

SEQ ID NO: 1772956 - DNA, 15 bp, Homo sapiens
gcatggtggtgcata

SEQ ID NO: 1772957 - DNA, 15 bp, Homo sapiens
catggtggtgcatat

SEQ ID NO: 1772958 - DNA, 15 bp, Homo sapiens
atggtggtgcatatc

SEQ ID NO: 1772959 - DNA, 15 bp, Homo sapiens
tggtggtgcatatct

SEQ ID NO: 1772960 - DNA, 15 bp, Homo sapiens
ggtggtgcatatctg

SEQ ID NO: 1772961 - DNA, 15 bp, Homo sapiens
gtggtgcatatctgt

SEQ ID NO: 1772962 - DNA, 15 bp, Homo sapiens
tggtgcatatctgtg

SEQ ID NO: 1772963 - DNA, 15 bp, Homo sapiens
ggtgcatatctgtgg

SEQ ID NO: 1772964 - DNA, 15 bp, Homo sapiens
gtgcatatctgtggt

SEQ ID NO: 1772965 - DNA, 15 bp, Homo sapiens
tgcatatctgtggtc

SEQ ID NO: 1772966 - DNA, 15 bp, Homo sapiens
gcatatctgtggtcc

SEQ ID NO: 1772967 - DNA, 15 bp, Homo sapiens
catatctgtggtccc

SEQ ID NO: 1772968 - DNA, 15 bp, Homo sapiens
atatctgtggtccca

SEQ ID NO: 1772969 - DNA, 15 bp, Homo sapiens
tatctgtggtcccag

SEQ ID NO: 1772970 - DNA, 15 bp, Homo sapiens
ccagctacttggaag

SEQ ID NO: 1772971 - DNA, 15 bp, Homo sapiens
cagctacttggaagg

SEQ ID NO: 1772972 - DNA, 15 bp, Homo sapiens
agctacttggaaggc

SEQ ID NO: 1772973 - DNA, 15 bp, Homo sapiens
gctacttggaaggct

SEQ ID NO: 1772974 - DNA, 15 bp, Homo sapiens
ctacttggaaggctg

SEQ ID NO: 1772975 - DNA, 15 bp, Homo sapiens
tacttggaaggctga

SEQ ID NO: 1772976 - DNA, 15 bp, Homo sapiens
acttggaaggctgag

SEQ ID NO: 1772977 - DNA, 15 bp, Homo sapiens
cttggaaggctgagg

SEQ ID NO: 1772978 - DNA, 15 bp, Homo sapiens
tggaaggctgaggtg

SEQ ID NO: 1772979 - DNA, 15 bp, Homo sapiens
ggaaggctgaggtga

SEQ ID NO: 1772980 - DNA, 15 bp, Homo sapiens
gaaggctgaggtgag

SEQ ID NO: 1772981 - DNA, 15 bp, Homo sapiens
aaggctgaggtgaga

SEQ ID NO: 1772982 - DNA, 15 bp, Homo sapiens
gaggtgagaggatcg

SEQ ID NO: 1772983 - DNA, 15 bp, Homo sapiens
aggtgagaggatcgc

SEQ ID NO: 1772984 - DNA, 15 bp, Homo sapiens
ggtgagaggatcgct

SEQ ID NO: 1772985 - DNA, 15 bp, Homo sapiens
gtgagaggatcgctt

SEQ ID NO: 1772986 - DNA, 15 bp, Homo sapiens
tgagaggatcgcttg

SEQ ID NO: 1772987 - DNA, 15 bp, Homo sapiens
gagaggatcgcttga

SEQ ID NO: 1772988 - DNA, 15 bp, Homo sapiens
agaggatcgcttgag

SEQ ID NO: 1772989 - DNA, 15 bp, Homo sapiens
tcgcttgagcccagt

SEQ ID NO: 1772990 - DNA, 15 bp, Homo sapiens
cgcttgagcccagta

SEQ ID NO: 1772991 - DNA, 15 bp, Homo sapiens
gcttgagcccagtag

SEQ ID NO: 1772992 - DNA, 15 bp, Homo sapiens
tgagcccagtaggtc

SEQ ID NO: 1772993 - DNA, 15 bp, Homo sapiens
gagcccagtaggtca

SEQ ID NO: 1772994 - DNA, 15 bp, Homo sapiens
agcccagtaggtcaa

SEQ ID NO: 1772995 - DNA, 15 bp, Homo sapiens
gcccagtaggtcaag

SEQ ID NO: 1772996 - DNA, 15 bp, Homo sapiens
cccagtaggtcaagg

SEQ ID NO: 1772997 - DNA, 15 bp, Homo sapiens
ccagtaggtcaaggc

SEQ ID NO: 1772998 - DNA, 15 bp, Homo sapiens
cagtaggtcaaggct

SEQ ID NO: 1772999 - DNA, 15 bp, Homo sapiens
agtaggtcaaggctg

SEQ ID NO: 1773000 - DNA, 15 bp, Homo sapiens
gtaggtcaaggctgc

SEQ ID NO: 1773001 - DNA, 15 bp, Homo sapiens
taggtcaaggctgca

SEQ ID NO: 1773002 - DNA, 15 bp, Homo sapiens
ggtcaaggctgcagg

SEQ ID NO: 1773003 - DNA, 15 bp, Homo sapiens
gtcaaggctgcaggg

SEQ ID NO: 1773004 - DNA, 15 bp, Homo sapiens
tcaaggctgcaggga

SEQ ID NO: 1773005 - DNA, 15 bp, Homo sapiens
caaggctgcagggag

SEQ ID NO: 1773006 - DNA, 15 bp, Homo sapiens
aaggctgcagggagt

SEQ ID NO: 1773007 - DNA, 15 bp, Homo sapiens
aggctgcagggagtc

SEQ ID NO: 1773008 - DNA, 15 bp, Homo sapiens
ggctgcagggagtcg

SEQ ID NO: 1773009 - DNA, 15 bp, Homo sapiens
gctgcagggagtcgt

SEQ ID NO: 1773010 - DNA, 15 bp, Homo sapiens
ctgcagggagtcgtg

SEQ ID NO: 1773011 - DNA, 15 bp, Homo sapiens
tgcagggagtcgtga

SEQ ID NO: 1773012 - DNA, 15 bp, Homo sapiens
gcagggagtcgtgat

SEQ ID NO: 1773013 - DNA, 15 bp, Homo sapiens
cagggagtcgtgatc

SEQ ID NO: 1773014 - DNA, 15 bp, Homo sapiens
agggagtcgtgatca

SEQ ID NO: 1773015 - DNA, 15 bp, Homo sapiens
gggagtcgtgatcat

SEQ ID NO: 1773016 - DNA, 15 bp, Homo sapiens
ggagtcgtgatcatg

SEQ ID NO: 1773017 - DNA, 15 bp, Homo sapiens
gagtcgtgatcatgc

SEQ ID NO: 1773018 - DNA, 15 bp, Homo sapiens
agtcgtgatcatgcc

SEQ ID NO: 1773019 - DNA, 15 bp, Homo sapiens
gtcgtgatcatgcca

SEQ ID NO: 1773020 - DNA, 15 bp, Homo sapiens
tcgtgatcatgccat

SEQ ID NO: 1773021 - DNA, 15 bp, Homo sapiens
cgtgatcatgccatt

SEQ ID NO: 1773022 - DNA, 15 bp, Homo sapiens
gtgatcatgccattg

SEQ ID NO: 1773023 - DNA, 15 bp, Homo sapiens
tgatcatgccattgc

SEQ ID NO: 1773024 - DNA, 15 bp, Homo sapiens
atgccattgcactct

SEQ ID NO: 1773025 - DNA, 15 bp, Homo sapiens
cctgggtgacagagg

SEQ ID NO: 1773026 - DNA, 15 bp, Homo sapiens
ctgggtgacagagga

SEQ ID NO: 1773027 - DNA, 15 bp, Homo sapiens
tgggtgacagaggaa

SEQ ID NO: 1773028 - DNA, 15 bp, Homo sapiens
gggtgacagaggaag

SEQ ID NO: 1773029 - DNA, 15 bp, Homo sapiens
ggtgacagaggaaga

SEQ ID NO: 1773030 - DNA, 15 bp, Homo sapiens
gtgacagaggaagac

SEQ ID NO: 1773031 - DNA, 15 bp, Homo sapiens
tgacagaggaagacc

SEQ ID NO: 1773032 - DNA, 15 bp, Homo sapiens
gacagaggaagacct

SEQ ID NO: 1773033 - DNA, 15 bp, Homo sapiens
acagaggaagacctc

SEQ ID NO: 1773034 - DNA, 15 bp, Homo sapiens
cagaggaagacctca

SEQ ID NO: 1773035 - DNA, 15 bp, Homo sapiens
agaggaagacctcat

SEQ ID NO: 1773036 - DNA, 15 bp, Homo sapiens
gaggaagacctcatc

SEQ ID NO: 1773037 - DNA, 15 bp, Homo sapiens
aggaagacctcatct

SEQ ID NO: 1773038 - DNA, 15 bp, Homo sapiens
ggaagacctcatctc

SEQ ID NO: 1773039 - DNA, 15 bp, Homo sapiens
gaagacctcatctca

SEQ ID NO: 1773040 - DNA, 15 bp, Homo sapiens
aagacctcatctcaa

SEQ ID NO: 1773041 - DNA, 15 bp, Homo sapiens
agacctcatctcaaa

SEQ ID NO: 1773042 - DNA, 15 bp, Homo sapiens
gacctcatctcaaac

SEQ ID NO: 1773043 - DNA, 15 bp, Homo sapiens
acctcatctcaaaca

SEQ ID NO: 1773044 - DNA, 15 bp, Homo sapiens
cctcatctcaaacaa

SEQ ID NO: 1773045 - DNA, 15 bp, Homo sapiens
ctcatctcaaacaaa

SEQ ID NO: 1773046 - DNA, 15 bp, Homo sapiens
tcatctcaaacaaac

SEQ ID NO: 1773047 - DNA, 15 bp, Homo sapiens
catctcaaacaaaca

SEQ ID NO: 1773048 - DNA, 15 bp, Homo sapiens
atctcaaacaaacaa

SEQ ID NO: 1773049 - DNA, 15 bp, Homo sapiens
tctcaaacaaacaaa

SEQ ID NO: 1773050 - DNA, 15 bp, Homo sapiens
ctcaaacaaacaaac

SEQ ID NO: 1773051 - DNA, 15 bp, Homo sapiens
acaaacaaaaaaccg

SEQ ID NO: 1773052 - DNA, 15 bp, Homo sapiens
caaacaaaaaaccgt

SEQ ID NO: 1773053 - DNA, 15 bp, Homo sapiens
aaacaaaaaaccgtt

SEQ ID NO: 1773054 - DNA, 15 bp, Homo sapiens
aacaaaaaaccgtta

SEQ ID NO: 1773055 - DNA, 15 bp, Homo sapiens
acaaaaaaccgttag

SEQ ID NO: 1773056 - DNA, 15 bp, Homo sapiens
caaaaaaccgttagt

SEQ ID NO: 1773057 - DNA, 15 bp, Homo sapiens
aaaaaaccgttagtg

SEQ ID NO: 1773058 - DNA, 15 bp, Homo sapiens
aaaaaccgttagtgc

SEQ ID NO: 1773059 - DNA, 15 bp, Homo sapiens
aaaaccgttagtgct

SEQ ID NO: 1773060 - DNA, 15 bp, Homo sapiens
aaaccgttagtgcta

SEQ ID NO: 1773061 - DNA, 15 bp, Homo sapiens
aaccgttagtgctag

SEQ ID NO: 1773062 - DNA, 15 bp, Homo sapiens
accgttagtgctaga

SEQ ID NO: 1773063 - DNA, 15 bp, Homo sapiens
ccgttagtgctagag

SEQ ID NO: 1773064 - DNA, 15 bp, Homo sapiens
cgttagtgctagaga

SEQ ID NO: 1773065 - DNA, 15 bp, Homo sapiens
gttagtgctagagaa

SEQ ID NO: 1773066 - DNA, 15 bp, Homo sapiens
ttagtgctagagaat

SEQ ID NO: 1773067 - DNA, 15 bp, Homo sapiens
tagtgctagagaatt

SEQ ID NO: 1773068 - DNA, 15 bp, Homo sapiens
agtgctagagaattg

SEQ ID NO: 1773069 - DNA, 15 bp, Homo sapiens
gtgctagagaattgg

SEQ ID NO: 1773070 - DNA, 15 bp, Homo sapiens
tgctagagaattgga

SEQ ID NO: 1773071 - DNA, 15 bp, Homo sapiens
gctagagaattggag

SEQ ID NO: 1773072 - DNA, 15 bp, Homo sapiens
ctagagaattggagc

SEQ ID NO: 1773073 - DNA, 15 bp, Homo sapiens
tagagaattggagcc

SEQ ID NO: 1773074 - DNA, 15 bp, Homo sapiens
agagaattggagcca

SEQ ID NO: 1773075 - DNA, 15 bp, Homo sapiens
gagaattggagccaa

SEQ ID NO: 1773076 - DNA, 15 bp, Homo sapiens
agaattggagccaac

SEQ ID NO: 1773077 - DNA, 15 bp, Homo sapiens
gaattggagccaaca

SEQ ID NO: 1773078 - DNA, 15 bp, Homo sapiens
aattggagccaacag

SEQ ID NO: 1773079 - DNA, 15 bp, Homo sapiens
attggagccaacagc

SEQ ID NO: 1773080 - DNA, 15 bp, Homo sapiens
ttggagccaacagct

SEQ ID NO: 1773081 - DNA, 15 bp, Homo sapiens
tggagccaacagctc

SEQ ID NO: 1773082 - DNA, 15 bp, Homo sapiens
ggagccaacagctcc

SEQ ID NO: 1773083 - DNA, 15 bp, Homo sapiens
gagccaacagctcct

SEQ ID NO: 1773084 - DNA, 15 bp, Homo sapiens
agccaacagctcctg

SEQ ID NO: 1773085 - DNA, 15 bp, Homo sapiens
gccaacagctcctga

SEQ ID NO: 1773086 - DNA, 15 bp, Homo sapiens
ccaacagctcctgag

SEQ ID NO: 1773087 - DNA, 15 bp, Homo sapiens
caacagctcctgaga

SEQ ID NO: 1773088 - DNA, 15 bp, Homo sapiens
aacagctcctgagag

SEQ ID NO: 1773089 - DNA, 15 bp, Homo sapiens
acagctcctgagagg

SEQ ID NO: 1773090 - DNA, 15 bp, Homo sapiens
cagctcctgagaggg

SEQ ID NO: 1773091 - DNA, 15 bp, Homo sapiens
agctcctgagagggg

SEQ ID NO: 1773092 - DNA, 15 bp, Homo sapiens
gctcctgagagggga

SEQ ID NO: 1773093 - DNA, 15 bp, Homo sapiens
ctcctgagaggggaa

SEQ ID NO: 1773094 - DNA, 15 bp, Homo sapiens
tcctgagaggggaag

SEQ ID NO: 1773095 - DNA, 15 bp, Homo sapiens
cctgagaggggaaga

SEQ ID NO: 1773096 - DNA, 15 bp, Homo sapiens
ctgagaggggaagag

SEQ ID NO: 1773097 - DNA, 15 bp, Homo sapiens
tgagaggggaagagc

SEQ ID NO: 1773098 - DNA, 15 bp, Homo sapiens
gagaggggaagagca

SEQ ID NO: 1773099 - DNA, 15 bp, Homo sapiens
agaggggaagagcaa

SEQ ID NO: 1773100 - DNA, 15 bp, Homo sapiens
gaggggaagagcaaa

SEQ ID NO: 1773101 - DNA, 15 bp, Homo sapiens
aggggaagagcaaag

SEQ ID NO: 1773102 - DNA, 15 bp, Homo sapiens
ggggaagagcaaagg

SEQ ID NO: 1773103 - DNA, 15 bp, Homo sapiens
gggaagagcaaagga

SEQ ID NO: 1773104 - DNA, 15 bp, Homo sapiens
ggaagagcaaaggat

SEQ ID NO: 1773105 - DNA, 15 bp, Homo sapiens
gaagagcaaaggatg

SEQ ID NO: 1773106 - DNA, 15 bp, Homo sapiens
aagagcaaaggatga

SEQ ID NO: 1773107 - DNA, 15 bp, Homo sapiens
agagcaaaggatgaa

SEQ ID NO: 1773108 - DNA, 15 bp, Homo sapiens
gagcaaaggatgaaa

SEQ ID NO: 1773109 - DNA, 15 bp, Homo sapiens
agcaaaggatgaaaa

SEQ ID NO: 1773110 - DNA, 15 bp, Homo sapiens
gcaaaggatgaaaac

SEQ ID NO: 1773111 - DNA, 15 bp, Homo sapiens
caaaggatgaaaact

SEQ ID NO: 1773112 - DNA, 15 bp, Homo sapiens
aaaggatgaaaactc

SEQ ID NO: 1773113 - DNA, 15 bp, Homo sapiens
aaggatgaaaactca

SEQ ID NO: 1773114 - DNA, 15 bp, Homo sapiens
aggatgaaaactcac

SEQ ID NO: 1773115 - DNA, 15 bp, Homo sapiens
ggatgaaaactcact

SEQ ID NO: 1773116 - DNA, 15 bp, Homo sapiens
gatgaaaactcactt

SEQ ID NO: 1773117 - DNA, 15 bp, Homo sapiens
atgaaaactcacttc

SEQ ID NO: 1773118 - DNA, 15 bp, Homo sapiens
tgaaaactcacttct

SEQ ID NO: 1773119 - DNA, 15 bp, Homo sapiens
gaaaactcacttctt

SEQ ID NO: 1773120 - DNA, 15 bp, Homo sapiens
aaaactcacttcttt

SEQ ID NO: 1773121 - DNA, 15 bp, Homo sapiens
aaactcacttctttc

SEQ ID NO: 1773122 - DNA, 15 bp, Homo sapiens
aactcacttctttca

SEQ ID NO: 1773123 - DNA, 15 bp, Homo sapiens
actcacttctttcag

SEQ ID NO: 1773124 - DNA, 15 bp, Homo sapiens
ctcacttctttcagc

SEQ ID NO: 1773125 - DNA, 15 bp, Homo sapiens
tcacttctttcagca

SEQ ID NO: 1773126 - DNA, 15 bp, Homo sapiens
cacttctttcagcac

SEQ ID NO: 1773127 - DNA, 15 bp, Homo sapiens
acttctttcagcacc

SEQ ID NO: 1773128 - DNA, 15 bp, Homo sapiens
cttctttcagcacct

SEQ ID NO: 1773129 - DNA, 15 bp, Homo sapiens
ttctttcagcaccta

SEQ ID NO: 1773130 - DNA, 15 bp, Homo sapiens
tctttcagcacctac

SEQ ID NO: 1773131 - DNA, 15 bp, Homo sapiens
ctttcagcacctacc

SEQ ID NO: 1773132 - DNA, 15 bp, Homo sapiens
tttcagcacctacca

SEQ ID NO: 1773133 - DNA, 15 bp, Homo sapiens
ttcagcacctaccat

SEQ ID NO: 1773134 - DNA, 15 bp, Homo sapiens
tcagcacctaccatg

SEQ ID NO: 1773135 - DNA, 15 bp, Homo sapiens
cagcacctaccatgt

SEQ ID NO: 1773136 - DNA, 15 bp, Homo sapiens
agcacctaccatgtt

SEQ ID NO: 1773137 - DNA, 15 bp, Homo sapiens
gcacctaccatgttc

SEQ ID NO: 1773138 - DNA, 15 bp, Homo sapiens
cacctaccatgttcc

SEQ ID NO: 1773139 - DNA, 15 bp, Homo sapiens
acctaccatgttcca

SEQ ID NO: 1773140 - DNA, 15 bp, Homo sapiens
cctaccatgttccaa

SEQ ID NO: 1773141 - DNA, 15 bp, Homo sapiens
ctaccatgttccaaa

SEQ ID NO: 1773142 - DNA, 15 bp, Homo sapiens
taccatgttccaaat

SEQ ID NO: 1773143 - DNA, 15 bp, Homo sapiens
accatgttccaaata

SEQ ID NO: 1773144 - DNA, 15 bp, Homo sapiens
ccatgttccaaatac

SEQ ID NO: 1773145 - DNA, 15 bp, Homo sapiens
catgttccaaatact

SEQ ID NO: 1773146 - DNA, 15 bp, Homo sapiens
atgttccaaatactt

SEQ ID NO: 1773147 - DNA, 15 bp, Homo sapiens
tgttccaaatacttt

SEQ ID NO: 1773148 - DNA, 15 bp, Homo sapiens
gttccaaatactttc

SEQ ID NO: 1773149 - DNA, 15 bp, Homo sapiens
ttccaaatactttct

SEQ ID NO: 1773150 - DNA, 15 bp, Homo sapiens
tccaaatactttctg

SEQ ID NO: 1773151 - DNA, 15 bp, Homo sapiens
ccaaatactttctgt

SEQ ID NO: 1773152 - DNA, 15 bp, Homo sapiens
caaatactttctgta

SEQ ID NO: 1773153 - DNA, 15 bp, Homo sapiens
aaatactttctgtac

SEQ ID NO: 1773154 - DNA, 15 bp, Homo sapiens
aatactttctgtaca

SEQ ID NO: 1773155 - DNA, 15 bp, Homo sapiens
atactttctgtacat

SEQ ID NO: 1773156 - DNA, 15 bp, Homo sapiens
tactttctgtacata

SEQ ID NO: 1773157 - DNA, 15 bp, Homo sapiens
actttctgtacatag

SEQ ID NO: 1773158 - DNA, 15 bp, Homo sapiens
ctttctgtacatagc

SEQ ID NO: 1773159 - DNA, 15 bp, Homo sapiens
tttctgtacatagct

SEQ ID NO: 1773160 - DNA, 15 bp, Homo sapiens
ttctgtacatagctc

SEQ ID NO: 1773161 - DNA, 15 bp, Homo sapiens
tctgtacatagctca

SEQ ID NO: 1773162 - DNA, 15 bp, Homo sapiens
ctgtacatagctcat

SEQ ID NO: 1773163 - DNA, 15 bp, Homo sapiens
tgtacatagctcatt

SEQ ID NO: 1773164 - DNA, 15 bp, Homo sapiens
gtacatagctcattt

SEQ ID NO: 1773165 - DNA, 15 bp, Homo sapiens
tacatagctcatttc

SEQ ID NO: 1773166 - DNA, 15 bp, Homo sapiens
acatagctcatttca

SEQ ID NO: 1773167 - DNA, 15 bp, Homo sapiens
catagctcatttcat

SEQ ID NO: 1773168 - DNA, 15 bp, Homo sapiens
atagctcatttcatc

SEQ ID NO: 1773169 - DNA, 15 bp, Homo sapiens
tagctcatttcatct

SEQ ID NO: 1773170 - DNA, 15 bp, Homo sapiens
agctcatttcatctg

SEQ ID NO: 1773171 - DNA, 15 bp, Homo sapiens
gctcatttcatctgc

SEQ ID NO: 1773172 - DNA, 15 bp, Homo sapiens
ctcatttcatctgca

SEQ ID NO: 1773173 - DNA, 15 bp, Homo sapiens
tcatttcatctgcac

SEQ ID NO: 1773174 - DNA, 15 bp, Homo sapiens
catttcatctgcaca

SEQ ID NO: 1773175 - DNA, 15 bp, Homo sapiens
atttcatctgcacaa

SEQ ID NO: 1773176 - DNA, 15 bp, Homo sapiens
tttcatctgcacaac

SEQ ID NO: 1773177 - DNA, 15 bp, Homo sapiens
ttcatctgcacaaca

SEQ ID NO: 1773178 - DNA, 15 bp, Homo sapiens
tcatctgcacaacac

SEQ ID NO: 1773179 - DNA, 15 bp, Homo sapiens
catctgcacaacact

SEQ ID NO: 1773180 - DNA, 15 bp, Homo sapiens
atctgcacaacactc

SEQ ID NO: 1773181 - DNA, 15 bp, Homo sapiens
tctgcacaacactcc

SEQ ID NO: 1773182 - DNA, 15 bp, Homo sapiens
ctgcacaacactcct

SEQ ID NO: 1773183 - DNA, 15 bp, Homo sapiens
tgcacaacactccta

SEQ ID NO: 1773184 - DNA, 15 bp, Homo sapiens
gcacaacactcctat

SEQ ID NO: 1773185 - DNA, 15 bp, Homo sapiens
cacaacactcctatg

SEQ ID NO: 1773186 - DNA, 15 bp, Homo sapiens
acaacactcctatga

SEQ ID NO: 1773187 - DNA, 15 bp, Homo sapiens
caacactcctatgag

SEQ ID NO: 1773188 - DNA, 15 bp, Homo sapiens
aacactcctatgagg

SEQ ID NO: 1773189 - DNA, 15 bp, Homo sapiens
acactcctatgaggt

SEQ ID NO: 1773190 - DNA, 15 bp, Homo sapiens
cactcctatgaggtg

SEQ ID NO: 1773191 - DNA, 15 bp, Homo sapiens
actcctatgaggtgt

SEQ ID NO: 1773192 - DNA, 15 bp, Homo sapiens
ctcctatgaggtgtg

SEQ ID NO: 1773193 - DNA, 15 bp, Homo sapiens
tcctatgaggtgtgt

SEQ ID NO: 1773194 - DNA, 15 bp, Homo sapiens
cctatgaggtgtgtt

SEQ ID NO: 1773195 - DNA, 15 bp, Homo sapiens
ctatgaggtgtgttt

SEQ ID NO: 1773196 - DNA, 15 bp, Homo sapiens
tatgaggtgtgtttc

SEQ ID NO: 1773197 - DNA, 15 bp, Homo sapiens
atgaggtgtgtttca

SEQ ID NO: 1773198 - DNA, 15 bp, Homo sapiens
tgaggtgtgtttcag

SEQ ID NO: 1773199 - DNA, 15 bp, Homo sapiens
gaggtgtgtttcagt

SEQ ID NO: 1773200 - DNA, 15 bp, Homo sapiens
aggtgtgtttcagtg

SEQ ID NO: 1773201 - DNA, 15 bp, Homo sapiens
ggtgtgtttcagtgt

SEQ ID NO: 1773202 - DNA, 15 bp, Homo sapiens
gtgtgtttcagtgta

SEQ ID NO: 1773203 - DNA, 15 bp, Homo sapiens
tgtgtttcagtgtat

SEQ ID NO: 1773204 - DNA, 15 bp, Homo sapiens
gtgtttcagtgtatt

SEQ ID NO: 1773205 - DNA, 15 bp, Homo sapiens
tgtttcagtgtattc

SEQ ID NO: 1773206 - DNA, 15 bp, Homo sapiens
gtttcagtgtattca

SEQ ID NO: 1773207 - DNA, 15 bp, Homo sapiens
tttcagtgtattcac

SEQ ID NO: 1773208 - DNA, 15 bp, Homo sapiens
ttcagtgtattcacc

SEQ ID NO: 1773209 - DNA, 15 bp, Homo sapiens
tcagtgtattcacct

SEQ ID NO: 1773210 - DNA, 15 bp, Homo sapiens
cagtgtattcacctt

SEQ ID NO: 1773211 - DNA, 15 bp, Homo sapiens
agtgtattcacctta

SEQ ID NO: 1773212 - DNA, 15 bp, Homo sapiens
gtgtattcaccttac

SEQ ID NO: 1773213 - DNA, 15 bp, Homo sapiens
tgtattcaccttaca

SEQ ID NO: 1773214 - DNA, 15 bp, Homo sapiens
gtattcaccttacag

SEQ ID NO: 1773215 - DNA, 15 bp, Homo sapiens
tattcaccttacaga

SEQ ID NO: 1773216 - DNA, 15 bp, Homo sapiens
attcaccttacagag

SEQ ID NO: 1773217 - DNA, 15 bp, Homo sapiens
ttcaccttacagagg

SEQ ID NO: 1773218 - DNA, 15 bp, Homo sapiens
tcaccttacagagga

SEQ ID NO: 1773219 - DNA, 15 bp, Homo sapiens
caccttacagaggaa

SEQ ID NO: 1773220 - DNA, 15 bp, Homo sapiens
accttacagaggaaa

SEQ ID NO: 1773221 - DNA, 15 bp, Homo sapiens
ccttacagaggaaaa

SEQ ID NO: 1773222 - DNA, 15 bp, Homo sapiens
cttacagaggaaaag

SEQ ID NO: 1773223 - DNA, 15 bp, Homo sapiens
ttacagaggaaaaga

SEQ ID NO: 1773224 - DNA, 15 bp, Homo sapiens
tacagaggaaaagag

SEQ ID NO: 1773225 - DNA, 15 bp, Homo sapiens
acagaggaaaagagt

SEQ ID NO: 1773226 - DNA, 15 bp, Homo sapiens
agaggaaaagagtga

SEQ ID NO: 1773227 - DNA, 15 bp, Homo sapiens
gaggaaaagagtgaa

SEQ ID NO: 1773228 - DNA, 15 bp, Homo sapiens
aggaaaagagtgaaa

SEQ ID NO: 1773229 - DNA, 15 bp, Homo sapiens
ggaaaagagtgaaac

SEQ ID NO: 1773230 - DNA, 15 bp, Homo sapiens
gaaaagagtgaaact

SEQ ID NO: 1773231 - DNA, 15 bp, Homo sapiens
aaaagagtgaaactt

SEQ ID NO: 1773232 - DNA, 15 bp, Homo sapiens
aaagagtgaaactta

SEQ ID NO: 1773233 - DNA, 15 bp, Homo sapiens
aagagtgaaacttag

SEQ ID NO: 1773234 - DNA, 15 bp, Homo sapiens
agagtgaaacttagc

SEQ ID NO: 1773235 - DNA, 15 bp, Homo sapiens
gagtgaaacttagca

SEQ ID NO: 1773236 - DNA, 15 bp, Homo sapiens
agtgaaacttagcaa

SEQ ID NO: 1773237 - DNA, 15 bp, Homo sapiens
gtgaaacttagcaat

SEQ ID NO: 1773238 - DNA, 15 bp, Homo sapiens
tgaaacttagcaatg

SEQ ID NO: 1773239 - DNA, 15 bp, Homo sapiens
gaaacttagcaatga

SEQ ID NO: 1773240 - DNA, 15 bp, Homo sapiens
aaacttagcaatgat

SEQ ID NO: 1773241 - DNA, 15 bp, Homo sapiens
aacttagcaatgatt

SEQ ID NO: 1773242 - DNA, 15 bp, Homo sapiens
acttagcaatgattc

SEQ ID NO: 1773243 - DNA, 15 bp, Homo sapiens
cttagcaatgattca

SEQ ID NO: 1773244 - DNA, 15 bp, Homo sapiens
ttagcaatgattcaa

SEQ ID NO: 1773245 - DNA, 15 bp, Homo sapiens
tagcaatgattcaaa

SEQ ID NO: 1773246 - DNA, 15 bp, Homo sapiens
agcaatgattcaaaa

SEQ ID NO: 1773247 - DNA, 15 bp, Homo sapiens
gcaatgattcaaaat

SEQ ID NO: 1773248 - DNA, 15 bp, Homo sapiens
caatgattcaaaatt

SEQ ID NO: 1773249 - DNA, 15 bp, Homo sapiens
aatgattcaaaattg

SEQ ID NO: 1773250 - DNA, 15 bp, Homo sapiens
atgattcaaaattga

SEQ ID NO: 1773251 - DNA, 15 bp, Homo sapiens
tgattcaaaattgat

SEQ ID NO: 1773252 - DNA, 15 bp, Homo sapiens
gattcaaaattgata

SEQ ID NO: 1773253 - DNA, 15 bp, Homo sapiens
attcaaaattgatag

SEQ ID NO: 1773254 - DNA, 15 bp, Homo sapiens
ttcaaaattgatagt

SEQ ID NO: 1773255 - DNA, 15 bp, Homo sapiens
tcaaaattgatagtt

SEQ ID NO: 1773256 - DNA, 15 bp, Homo sapiens
caaaattgatagttg

SEQ ID NO: 1773257 - DNA, 15 bp, Homo sapiens
aaaattgatagttgg

SEQ ID NO: 1773258 - DNA, 15 bp, Homo sapiens
aaattgatagttggg

SEQ ID NO: 1773259 - DNA, 15 bp, Homo sapiens
aattgatagttgggc

SEQ ID NO: 1773260 - DNA, 15 bp, Homo sapiens
attgatagttgggcg

SEQ ID NO: 1773261 - DNA, 15 bp, Homo sapiens
ttgatagttgggcgt

SEQ ID NO: 1773262 - DNA, 15 bp, Homo sapiens
tgatagttgggcgtg

SEQ ID NO: 1773263 - DNA, 15 bp, Homo sapiens
gatagttgggcgtgg

SEQ ID NO: 1773264 - DNA, 15 bp, Homo sapiens
atagttgggcgtggt

SEQ ID NO: 1773265 - DNA, 15 bp, Homo sapiens
tagttgggcgtggtg

SEQ ID NO: 1773266 - DNA, 15 bp, Homo sapiens
agttgggcgtggtgg

SEQ ID NO: 1773267 - DNA, 15 bp, Homo sapiens
gttgggcgtggtggt

SEQ ID NO: 1773268 - DNA, 15 bp, Homo sapiens
ttgggcgtggtggtg

SEQ ID NO: 1773269 - DNA, 15 bp, Homo sapiens
tgggcgtggtggtgt

SEQ ID NO: 1773270 - DNA, 15 bp, Homo sapiens
gggcgtggtggtgtg

SEQ ID NO: 1773271 - DNA, 15 bp, Homo sapiens
gcgtggtggtgtgcg

SEQ ID NO: 1773272 - DNA, 15 bp, Homo sapiens
cgtggtggtgtgcgc

SEQ ID NO: 1773273 - DNA, 15 bp, Homo sapiens
gtggtggtgtgcgcc

SEQ ID NO: 1773274 - DNA, 15 bp, Homo sapiens
tggtggtgtgcgcct

SEQ ID NO: 1773275 - DNA, 15 bp, Homo sapiens
ggtggtgtgcgcctg

SEQ ID NO: 1773276 - DNA, 15 bp, Homo sapiens
gtggtgtgcgcctgt

SEQ ID NO: 1773277 - DNA, 15 bp, Homo sapiens
tggtgtgcgcctgta

SEQ ID NO: 1773278 - DNA, 15 bp, Homo sapiens
ggtgtgcgcctgtaa

SEQ ID NO: 1773279 - DNA, 15 bp, Homo sapiens
gtgtgcgcctgtaat

SEQ ID NO: 1773280 - DNA, 15 bp, Homo sapiens
tgtgcgcctgtaatc

SEQ ID NO: 1773281 - DNA, 15 bp, Homo sapiens
gtgcgcctgtaatcc

SEQ ID NO: 1773282 - DNA, 15 bp, Homo sapiens
tgcgcctgtaatccc

SEQ ID NO: 1773283 - DNA, 15 bp, Homo sapiens
aatcccagctattcg

SEQ ID NO: 1773284 - DNA, 15 bp, Homo sapiens
atcccagctattcgg

SEQ ID NO: 1773285 - DNA, 15 bp, Homo sapiens
tcccagctattcggg

SEQ ID NO: 1773286 - DNA, 15 bp, Homo sapiens
cccagctattcggga

SEQ ID NO: 1773287 - DNA, 15 bp, Homo sapiens
ccagctattcgggaa

SEQ ID NO: 1773288 - DNA, 15 bp, Homo sapiens
cagctattcgggaag

SEQ ID NO: 1773289 - DNA, 15 bp, Homo sapiens
agctattcgggaagc

SEQ ID NO: 1773290 - DNA, 15 bp, Homo sapiens
gctattcgggaagct

SEQ ID NO: 1773291 - DNA, 15 bp, Homo sapiens
ctattcgggaagctg

SEQ ID NO: 1773292 - DNA, 15 bp, Homo sapiens
tattcgggaagctga

SEQ ID NO: 1773293 - DNA, 15 bp, Homo sapiens
attcgggaagctgag

SEQ ID NO: 1773294 - DNA, 15 bp, Homo sapiens
ttcgggaagctgagg

SEQ ID NO: 1773295 - DNA, 15 bp, Homo sapiens
tcgggaagctgaggc

SEQ ID NO: 1773296 - DNA, 15 bp, Homo sapiens
cgggaagctgaggca

SEQ ID NO: 1773297 - DNA, 15 bp, Homo sapiens
tgaacccaggaggtt

SEQ ID NO: 1773298 - DNA, 15 bp, Homo sapiens
gaacccaggaggttg

SEQ ID NO: 1773299 - DNA, 15 bp, Homo sapiens
aacccaggaggttgc

SEQ ID NO: 1773300 - DNA, 15 bp, Homo sapiens
acccaggaggttgca

SEQ ID NO: 1773301 - DNA, 15 bp, Homo sapiens
cccaggaggttgcag

SEQ ID NO: 1773302 - DNA, 15 bp, Homo sapiens
ccaggaggttgcaga

SEQ ID NO: 1773303 - DNA, 15 bp, Homo sapiens
caggaggttgcagag

SEQ ID NO: 1773304 - DNA, 15 bp, Homo sapiens
aggaggttgcagaga

SEQ ID NO: 1773305 - DNA, 15 bp, Homo sapiens
ggaggttgcagagag

SEQ ID NO: 1773306 - DNA, 15 bp, Homo sapiens
gaggttgcagagagc

SEQ ID NO: 1773307 - DNA, 15 bp, Homo sapiens
aggttgcagagagct

SEQ ID NO: 1773308 - DNA, 15 bp, Homo sapiens
ggttgcagagagctg

SEQ ID NO: 1773309 - DNA, 15 bp, Homo sapiens
gttgcagagagctgg

SEQ ID NO: 1773310 - DNA, 15 bp, Homo sapiens
ttgcagagagctggg

SEQ ID NO: 1773311 - DNA, 15 bp, Homo sapiens
tgcagagagctggga

SEQ ID NO: 1773312 - DNA, 15 bp, Homo sapiens
gcagagagctgggat

SEQ ID NO: 1773313 - DNA, 15 bp, Homo sapiens
cagagagctgggatt

SEQ ID NO: 1773314 - DNA, 15 bp, Homo sapiens
agagagctgggattg

SEQ ID NO: 1773315 - DNA, 15 bp, Homo sapiens
gagagctgggattgt

SEQ ID NO: 1773316 - DNA, 15 bp, Homo sapiens
agagctgggattgtg

SEQ ID NO: 1773317 - DNA, 15 bp, Homo sapiens
gagctgggattgtgc

SEQ ID NO: 1773318 - DNA, 15 bp, Homo sapiens
agctgggattgtgcc

SEQ ID NO: 1773319 - DNA, 15 bp, Homo sapiens
gctgggattgtgcca

SEQ ID NO: 1773320 - DNA, 15 bp, Homo sapiens
ctgggattgtgccac

SEQ ID NO: 1773321 - DNA, 15 bp, Homo sapiens
tgggattgtgccact

SEQ ID NO: 1773322 - DNA, 15 bp, Homo sapiens
gggattgtgccactg

SEQ ID NO: 1773323 - DNA, 15 bp, Homo sapiens
ggattgtgccactgc

SEQ ID NO: 1773324 - DNA, 15 bp, Homo sapiens
gtgacagagtgagat

SEQ ID NO: 1773325 - DNA, 15 bp, Homo sapiens
tgacagagtgagatt

SEQ ID NO: 1773326 - DNA, 15 bp, Homo sapiens
gacagagtgagattc

SEQ ID NO: 1773327 - DNA, 15 bp, Homo sapiens
acagagtgagattcg

SEQ ID NO: 1773328 - DNA, 15 bp, Homo sapiens
cagagtgagattcgg

SEQ ID NO: 1773329 - DNA, 15 bp, Homo sapiens
agagtgagattcggt

SEQ ID NO: 1773330 - DNA, 15 bp, Homo sapiens
gagtgagattcggtc

SEQ ID NO: 1773331 - DNA, 15 bp, Homo sapiens
agtgagattcggtct

SEQ ID NO: 1773332 - DNA, 15 bp, Homo sapiens
gtgagattcggtctc

SEQ ID NO: 1773333 - DNA, 15 bp, Homo sapiens
tgagattcggtctca

SEQ ID NO: 1773334 - DNA, 15 bp, Homo sapiens
gagattcggtctcag

SEQ ID NO: 1773335 - DNA, 15 bp, Homo sapiens
agattcggtctcaga

SEQ ID NO: 1773336 - DNA, 15 bp, Homo sapiens
gattcggtctcagaa

SEQ ID NO: 1773337 - DNA, 15 bp, Homo sapiens
attcggtctcagaaa

SEQ ID NO: 1773338 - DNA, 15 bp, Homo sapiens
ttcggtctcagaaac

SEQ ID NO: 1773339 - DNA, 15 bp, Homo sapiens
tcggtctcagaaaca

SEQ ID NO: 1773340 - DNA, 15 bp, Homo sapiens
cggtctcagaaacaa

SEQ ID NO: 1773341 - DNA, 15 bp, Homo sapiens
ggtctcagaaacaac

SEQ ID NO: 1773342 - DNA, 15 bp, Homo sapiens
gtctcagaaacaaca

SEQ ID NO: 1773343 - DNA, 15 bp, Homo sapiens
tctcagaaacaacaa

SEQ ID NO: 1773344 - DNA, 15 bp, Homo sapiens
ctcagaaacaacaac

SEQ ID NO: 1773345 - DNA, 15 bp, Homo sapiens
tcagaaacaacaaca

SEQ ID NO: 1773346 - DNA, 15 bp, Homo sapiens
cagaaacaacaacaa

SEQ ID NO: 1773347 - DNA, 15 bp, Homo sapiens
agaaacaacaacaac

SEQ ID NO: 1773348 - DNA, 15 bp, Homo sapiens
gaaacaacaacaaca

SEQ ID NO: 1773349 - DNA, 15 bp, Homo sapiens
aacaacaacaacaac

SEQ ID NO: 1773350 - DNA, 15 bp, Homo sapiens
acaacaacaacaaca

SEQ ID NO: 1773351 - DNA, 15 bp, Homo sapiens
caacaacaacaacaa

SEQ ID NO: 1773352 - DNA, 15 bp, Homo sapiens
aacaacaacaacaat

SEQ ID NO: 1773353 - DNA, 15 bp, Homo sapiens
acaacaacaacaata

SEQ ID NO: 1773354 - DNA, 15 bp, Homo sapiens
caacaacaacaataa

SEQ ID NO: 1773355 - DNA, 15 bp, Homo sapiens
aacaacaacaataac

SEQ ID NO: 1773356 - DNA, 15 bp, Homo sapiens
acaacaacaataaca

SEQ ID NO: 1773357 - DNA, 15 bp, Homo sapiens
caacaacaataacaa

SEQ ID NO: 1773358 - DNA, 15 bp, Homo sapiens
aacaacaataacaac

SEQ ID NO: 1773359 - DNA, 15 bp, Homo sapiens
acaacaataacaaca

SEQ ID NO: 1773360 - DNA, 15 bp, Homo sapiens
caacaataacaacaa

SEQ ID NO: 1773361 - DNA, 15 bp, Homo sapiens
aacaataacaacaaa

SEQ ID NO: 1773362 - DNA, 15 bp, Homo sapiens
acaataacaacaaaa

SEQ ID NO: 1773363 - DNA, 15 bp, Homo sapiens
caataacaacaaaac

SEQ ID NO: 1773364 - DNA, 15 bp, Homo sapiens
aataacaacaaaaca

SEQ ID NO: 1773365 - DNA, 15 bp, Homo sapiens
ataacaacaaaacaa

SEQ ID NO: 1773366 - DNA, 15 bp, Homo sapiens
taacaacaaaacaac

SEQ ID NO: 1773367 - DNA, 15 bp, Homo sapiens
aacaacaaaacaaca

SEQ ID NO: 1773368 - DNA, 15 bp, Homo sapiens
acaacaaaacaacaa

SEQ ID NO: 1773369 - DNA, 15 bp, Homo sapiens
caacaaaacaacaac

SEQ ID NO: 1773370 - DNA, 15 bp, Homo sapiens
caaaacaacaacaaa

SEQ ID NO: 1773371 - DNA, 15 bp, Homo sapiens
aaaacaacaacaaat

SEQ ID NO: 1773372 - DNA, 15 bp, Homo sapiens
aaacaacaacaaatt

SEQ ID NO: 1773373 - DNA, 15 bp, Homo sapiens
aacaacaacaaatta

SEQ ID NO: 1773374 - DNA, 15 bp, Homo sapiens
acaacaacaaattaa

SEQ ID NO: 1773375 - DNA, 15 bp, Homo sapiens
caacaacaaattaag

SEQ ID NO: 1773376 - DNA, 15 bp, Homo sapiens
aacaacaaattaagc

SEQ ID NO: 1773377 - DNA, 15 bp, Homo sapiens
acaacaaattaagcc

SEQ ID NO: 1773378 - DNA, 15 bp, Homo sapiens
caacaaattaagcca

SEQ ID NO: 1773379 - DNA, 15 bp, Homo sapiens
aacaaattaagccaa

SEQ ID NO: 1773380 - DNA, 15 bp, Homo sapiens
acaaattaagccaag

SEQ ID NO: 1773381 - DNA, 15 bp, Homo sapiens
caaattaagccaaga

SEQ ID NO: 1773382 - DNA, 15 bp, Homo sapiens
aaattaagccaagat

SEQ ID NO: 1773383 - DNA, 15 bp, Homo sapiens
aattaagccaagatc

SEQ ID NO: 1773384 - DNA, 15 bp, Homo sapiens
attaagccaagatca

SEQ ID NO: 1773385 - DNA, 15 bp, Homo sapiens
ttaagccaagatcac

SEQ ID NO: 1773386 - DNA, 15 bp, Homo sapiens
taagccaagatcaca

SEQ ID NO: 1773387 - DNA, 15 bp, Homo sapiens
aagccaagatcacac

SEQ ID NO: 1773388 - DNA, 15 bp, Homo sapiens
agccaagatcacaca

SEQ ID NO: 1773389 - DNA, 15 bp, Homo sapiens
gccaagatcacacag

SEQ ID NO: 1773390 - DNA, 15 bp, Homo sapiens
ccaagatcacacagt

SEQ ID NO: 1773391 - DNA, 15 bp, Homo sapiens
caagatcacacagtt

SEQ ID NO: 1773392 - DNA, 15 bp, Homo sapiens
aagatcacacagttg

SEQ ID NO: 1773393 - DNA, 15 bp, Homo sapiens
agatcacacagttgt

SEQ ID NO: 1773394 - DNA, 15 bp, Homo sapiens
gatcacacagttgtt

SEQ ID NO: 1773395 - DNA, 15 bp, Homo sapiens
atcacacagttgtta

SEQ ID NO: 1773396 - DNA, 15 bp, Homo sapiens
tcacacagttgttaa

SEQ ID NO: 1773397 - DNA, 15 bp, Homo sapiens
cacacagttgttaat

SEQ ID NO: 1773398 - DNA, 15 bp, Homo sapiens
acacagttgttaata

SEQ ID NO: 1773399 - DNA, 15 bp, Homo sapiens
cacagttgttaatag

SEQ ID NO: 1773400 - DNA, 15 bp, Homo sapiens
acagttgttaatagt

SEQ ID NO: 1773401 - DNA, 15 bp, Homo sapiens
cagttgttaatagta

SEQ ID NO: 1773402 - DNA, 15 bp, Homo sapiens
agttgttaatagtaa

SEQ ID NO: 1773403 - DNA, 15 bp, Homo sapiens
gttgttaatagtaaa

SEQ ID NO: 1773404 - DNA, 15 bp, Homo sapiens
ttgttaatagtaaaa

SEQ ID NO: 1773405 - DNA, 15 bp, Homo sapiens
tgttaatagtaaaaa

SEQ ID NO: 1773406 - DNA, 15 bp, Homo sapiens
gttaatagtaaaaag

SEQ ID NO: 1773407 - DNA, 15 bp, Homo sapiens
ttaatagtaaaaagc

SEQ ID NO: 1773408 - DNA, 15 bp, Homo sapiens
taatagtaaaaagct

SEQ ID NO: 1773409 - DNA, 15 bp, Homo sapiens
aatagtaaaaagcta

SEQ ID NO: 1773410 - DNA, 15 bp, Homo sapiens
atagtaaaaagctag

SEQ ID NO: 1773411 - DNA, 15 bp, Homo sapiens
tagtaaaaagctagc

SEQ ID NO: 1773412 - DNA, 15 bp, Homo sapiens
agtaaaaagctagca

SEQ ID NO: 1773413 - DNA, 15 bp, Homo sapiens
gtaaaaagctagcat

SEQ ID NO: 1773414 - DNA, 15 bp, Homo sapiens
taaaaagctagcatt

SEQ ID NO: 1773415 - DNA, 15 bp, Homo sapiens
aaaaagctagcatta

SEQ ID NO: 1773416 - DNA, 15 bp, Homo sapiens
aaaagctagcattag

SEQ ID NO: 1773417 - DNA, 15 bp, Homo sapiens
aaagctagcattagc

SEQ ID NO: 1773418 - DNA, 15 bp, Homo sapiens
aagctagcattagcc

SEQ ID NO: 1773419 - DNA, 15 bp, Homo sapiens
agctagcattagcct

SEQ ID NO: 1773420 - DNA, 15 bp, Homo sapiens
gctagcattagcctt

SEQ ID NO: 1773421 - DNA, 15 bp, Homo sapiens
ctagcattagccttt

SEQ ID NO: 1773422 - DNA, 15 bp, Homo sapiens
tagcattagcctttc

SEQ ID NO: 1773423 - DNA, 15 bp, Homo sapiens
agcattagcctttca

SEQ ID NO: 1773424 - DNA, 15 bp, Homo sapiens
gcattagcctttcac

SEQ ID NO: 1773425 - DNA, 15 bp, Homo sapiens
cattagcctttcaca

SEQ ID NO: 1773426 - DNA, 15 bp, Homo sapiens
attagcctttcacag

SEQ ID NO: 1773427 - DNA, 15 bp, Homo sapiens
ttagcctttcacagc

SEQ ID NO: 1773428 - DNA, 15 bp, Homo sapiens
tagcctttcacagcc

SEQ ID NO: 1773429 - DNA, 15 bp, Homo sapiens
agcctttcacagcca

SEQ ID NO: 1773430 - DNA, 15 bp, Homo sapiens
gcctttcacagccaa

SEQ ID NO: 1773431 - DNA, 15 bp, Homo sapiens
cctttcacagccaag

SEQ ID NO: 1773432 - DNA, 15 bp, Homo sapiens
ctttcacagccaagt

SEQ ID NO: 1773433 - DNA, 15 bp, Homo sapiens
tttcacagccaagtt

SEQ ID NO: 1773434 - DNA, 15 bp, Homo sapiens
ttcacagccaagttg

SEQ ID NO: 1773435 - DNA, 15 bp, Homo sapiens
tcacagccaagttgg

SEQ ID NO: 1773436 - DNA, 15 bp, Homo sapiens
cacagccaagttggc

SEQ ID NO: 1773437 - DNA, 15 bp, Homo sapiens
acagccaagttggct

SEQ ID NO: 1773438 - DNA, 15 bp, Homo sapiens
cagccaagttggctt

SEQ ID NO: 1773439 - DNA, 15 bp, Homo sapiens
agccaagttggcttc

SEQ ID NO: 1773440 - DNA, 15 bp, Homo sapiens
gccaagttggcttca

SEQ ID NO: 1773441 - DNA, 15 bp, Homo sapiens
ccaagttggcttcaa

SEQ ID NO: 1773442 - DNA, 15 bp, Homo sapiens
caagttggcttcaaa

SEQ ID NO: 1773443 - DNA, 15 bp, Homo sapiens
aagttggcttcaaag

SEQ ID NO: 1773444 - DNA, 15 bp, Homo sapiens
agttggcttcaaagg

SEQ ID NO: 1773445 - DNA, 15 bp, Homo sapiens
gttggcttcaaaggc

SEQ ID NO: 1773446 - DNA, 15 bp, Homo sapiens
ttggcttcaaaggct

SEQ ID NO: 1773447 - DNA, 15 bp, Homo sapiens
tggcttcaaaggctg

SEQ ID NO: 1773448 - DNA, 15 bp, Homo sapiens
ggcttcaaaggctgt

SEQ ID NO: 1773449 - DNA, 15 bp, Homo sapiens
gcttcaaaggctgtg

SEQ ID NO: 1773450 - DNA, 15 bp, Homo sapiens
cttcaaaggctgtgt

SEQ ID NO: 1773451 - DNA, 15 bp, Homo sapiens
ttcaaaggctgtgtt

SEQ ID NO: 1773452 - DNA, 15 bp, Homo sapiens
tcaaaggctgtgttt

SEQ ID NO: 1773453 - DNA, 15 bp, Homo sapiens
caaaggctgtgtttt

SEQ ID NO: 1773454 - DNA, 15 bp, Homo sapiens
aaaggctgtgttttt

SEQ ID NO: 1773455 - DNA, 15 bp, Homo sapiens
aaggctgtgtttttc

SEQ ID NO: 1773456 - DNA, 15 bp, Homo sapiens
aggctgtgtttttcc

SEQ ID NO: 1773457 - DNA, 15 bp, Homo sapiens
ggctgtgtttttcca

SEQ ID NO: 1773458 - DNA, 15 bp, Homo sapiens
gctgtgtttttccac

SEQ ID NO: 1773459 - DNA, 15 bp, Homo sapiens
ctgtgtttttccacg

SEQ ID NO: 1773460 - DNA, 15 bp, Homo sapiens
tgtgtttttccacga

SEQ ID NO: 1773461 - DNA, 15 bp, Homo sapiens
gtgtttttccacgaa

SEQ ID NO: 1773462 - DNA, 15 bp, Homo sapiens
tgtttttccacgaaa

SEQ ID NO: 1773463 - DNA, 15 bp, Homo sapiens
gtttttccacgaaat

SEQ ID NO: 1773464 - DNA, 15 bp, Homo sapiens
tttttccacgaaatc

SEQ ID NO: 1773465 - DNA, 15 bp, Homo sapiens
ttttccacgaaatca

SEQ ID NO: 1773466 - DNA, 15 bp, Homo sapiens
tttccacgaaatcat

SEQ ID NO: 1773467 - DNA, 15 bp, Homo sapiens
ttccacgaaatcata

SEQ ID NO: 1773468 - DNA, 15 bp, Homo sapiens
tccacgaaatcatac

SEQ ID NO: 1773469 - DNA, 15 bp, Homo sapiens
ccacgaaatcatact

SEQ ID NO: 1773470 - DNA, 15 bp, Homo sapiens
cacgaaatcatactg

SEQ ID NO: 1773471 - DNA, 15 bp, Homo sapiens
acgaaatcatactga

SEQ ID NO: 1773472 - DNA, 15 bp, Homo sapiens
cgaaatcatactgat

SEQ ID NO: 1773473 - DNA, 15 bp, Homo sapiens
gaaatcatactgatt

SEQ ID NO: 1773474 - DNA, 15 bp, Homo sapiens
aaatcatactgattt

SEQ ID NO: 1773475 - DNA, 15 bp, Homo sapiens
aatcatactgatttc

SEQ ID NO: 1773476 - DNA, 15 bp, Homo sapiens
atcatactgatttcc

SEQ ID NO: 1773477 - DNA, 15 bp, Homo sapiens
tcatactgatttcct

SEQ ID NO: 1773478 - DNA, 15 bp, Homo sapiens
catactgatttcctt

SEQ ID NO: 1773479 - DNA, 15 bp, Homo sapiens
atactgatttccttc

SEQ ID NO: 1773480 - DNA, 15 bp, Homo sapiens
tactgatttccttcc

SEQ ID NO: 1773481 - DNA, 15 bp, Homo sapiens
actgatttccttcca

SEQ ID NO: 1773482 - DNA, 15 bp, Homo sapiens
ctgatttccttccaa

SEQ ID NO: 1773483 - DNA, 15 bp, Homo sapiens
tgatttccttccaaa

SEQ ID NO: 1773484 - DNA, 15 bp, Homo sapiens
gatttccttccaaaa

SEQ ID NO: 1773485 - DNA, 15 bp, Homo sapiens
atttccttccaaaaa

SEQ ID NO: 1773486 - DNA, 15 bp, Homo sapiens
tttccttccaaaaaa

SEQ ID NO: 1773487 - DNA, 15 bp, Homo sapiens
ttccttccaaaaaaa

SEQ ID NO: 1773488 - DNA, 15 bp, Homo sapiens
tccttccaaaaaaac

SEQ ID NO: 1773489 - DNA, 15 bp, Homo sapiens
ccttccaaaaaaact

SEQ ID NO: 1773490 - DNA, 15 bp, Homo sapiens
cttccaaaaaaactc

SEQ ID NO: 1773491 - DNA, 15 bp, Homo sapiens
ttccaaaaaaactca

SEQ ID NO: 1773492 - DNA, 15 bp, Homo sapiens
tccaaaaaaactcac

SEQ ID NO: 1773493 - DNA, 15 bp, Homo sapiens
ccaaaaaaactcact

SEQ ID NO: 1773494 - DNA, 15 bp, Homo sapiens
caaaaaaactcactt

SEQ ID NO: 1773495 - DNA, 15 bp, Homo sapiens
aaaaaaactcacttt

SEQ ID NO: 1773496 - DNA, 15 bp, Homo sapiens
aaaaaactcactttc

SEQ ID NO: 1773497 - DNA, 15 bp, Homo sapiens
aaaaactcactttct

SEQ ID NO: 1773498 - DNA, 15 bp, Homo sapiens
aaaactcactttctc

SEQ ID NO: 1773499 - DNA, 15 bp, Homo sapiens
aaactcactttctcc

SEQ ID NO: 1773500 - DNA, 15 bp, Homo sapiens
aactcactttctccg

SEQ ID NO: 1773501 - DNA, 15 bp, Homo sapiens
actcactttctccgc

SEQ ID NO: 1773502 - DNA, 15 bp, Homo sapiens
ctcactttctccgcc

SEQ ID NO: 1773503 - DNA, 15 bp, Homo sapiens
tcactttctccgccc

SEQ ID NO: 1773504 - DNA, 15 bp, Homo sapiens
cactttctccgccca

SEQ ID NO: 1773505 - DNA, 15 bp, Homo sapiens
actttctccgcccag

SEQ ID NO: 1773506 - DNA, 15 bp, Homo sapiens
ctttctccgcccagt

SEQ ID NO: 1773507 - DNA, 15 bp, Homo sapiens
tttctccgcccagta

SEQ ID NO: 1773508 - DNA, 15 bp, Homo sapiens
ttctccgcccagtat

SEQ ID NO: 1773509 - DNA, 15 bp, Homo sapiens
tctccgcccagtatc

SEQ ID NO: 1773510 - DNA, 15 bp, Homo sapiens
ctccgcccagtatcc

SEQ ID NO: 1773511 - DNA, 15 bp, Homo sapiens
tccgcccagtatccc

SEQ ID NO: 1773512 - DNA, 15 bp, Homo sapiens
ccgcccagtatccct

SEQ ID NO: 1773513 - DNA, 15 bp, Homo sapiens
cgcccagtatccctt

SEQ ID NO: 1773514 - DNA, 15 bp, Homo sapiens
gcccagtatcccttt

SEQ ID NO: 1773515 - DNA, 15 bp, Homo sapiens
cccagtatcccttta

SEQ ID NO: 1773516 - DNA, 15 bp, Homo sapiens
ccagtatccctttag

SEQ ID NO: 1773517 - DNA, 15 bp, Homo sapiens
cagtatccctttagt

SEQ ID NO: 1773518 - DNA, 15 bp, Homo sapiens
agtatccctttagtt

SEQ ID NO: 1773519 - DNA, 15 bp, Homo sapiens
gtatccctttagtta

SEQ ID NO: 1773520 - DNA, 15 bp, Homo sapiens
tatccctttagttag

SEQ ID NO: 1773521 - DNA, 15 bp, Homo sapiens
atccctttagttagc

SEQ ID NO: 1773522 - DNA, 15 bp, Homo sapiens
tccctttagttagct

SEQ ID NO: 1773523 - DNA, 15 bp, Homo sapiens
ccctttagttagcta

SEQ ID NO: 1773524 - DNA, 15 bp, Homo sapiens
cctttagttagctat

SEQ ID NO: 1773525 - DNA, 15 bp, Homo sapiens
ctttagttagctatt

SEQ ID NO: 1773526 - DNA, 15 bp, Homo sapiens
tttagttagctatta

SEQ ID NO: 1773527 - DNA, 15 bp, Homo sapiens
ttagttagctattat

SEQ ID NO: 1773528 - DNA, 15 bp, Homo sapiens
tagttagctattatt

SEQ ID NO: 1773529 - DNA, 15 bp, Homo sapiens
agttagctattattt

SEQ ID NO: 1773530 - DNA, 15 bp, Homo sapiens
gttagctattatttg

SEQ ID NO: 1773531 - DNA, 15 bp, Homo sapiens
ttagctattatttgc

SEQ ID NO: 1773532 - DNA, 15 bp, Homo sapiens
tagctattatttgct

SEQ ID NO: 1773533 - DNA, 15 bp, Homo sapiens
agctattatttgctt

SEQ ID NO: 1773534 - DNA, 15 bp, Homo sapiens
gctattatttgcttt

SEQ ID NO: 1773535 - DNA, 15 bp, Homo sapiens
ctattatttgctttt

SEQ ID NO: 1773536 - DNA, 15 bp, Homo sapiens
tattatttgcttttt

SEQ ID NO: 1773537 - DNA, 15 bp, Homo sapiens
attatttgcttttta

SEQ ID NO: 1773538 - DNA, 15 bp, Homo sapiens
ttatttgctttttac

SEQ ID NO: 1773539 - DNA, 15 bp, Homo sapiens
tatttgctttttaca

SEQ ID NO: 1773540 - DNA, 15 bp, Homo sapiens
atttgctttttacag

SEQ ID NO: 1773541 - DNA, 15 bp, Homo sapiens
tttgctttttacaga

SEQ ID NO: 1773542 - DNA, 15 bp, Homo sapiens
ttgctttttacagag

SEQ ID NO: 1773543 - DNA, 15 bp, Homo sapiens
gctttttacagagga

SEQ ID NO: 1773544 - DNA, 15 bp, Homo sapiens
ctttttacagaggag

SEQ ID NO: 1773545 - DNA, 15 bp, Homo sapiens
tttttacagaggagg

SEQ ID NO: 1773546 - DNA, 15 bp, Homo sapiens
ttttacagaggagga

SEQ ID NO: 1773547 - DNA, 15 bp, Homo sapiens
tttacagaggaggag

SEQ ID NO: 1773548 - DNA, 15 bp, Homo sapiens
ttacagaggaggagc

SEQ ID NO: 1773549 - DNA, 15 bp, Homo sapiens
tacagaggaggagct

SEQ ID NO: 1773550 - DNA, 15 bp, Homo sapiens
acagaggaggagctg

SEQ ID NO: 1773551 - DNA, 15 bp, Homo sapiens
cagaggaggagctga

SEQ ID NO: 1773552 - DNA, 15 bp, Homo sapiens
agaggaggagctgag

SEQ ID NO: 1773553 - DNA, 15 bp, Homo sapiens
gaggaggagctgaga

SEQ ID NO: 1773554 - DNA, 15 bp, Homo sapiens
aggaggagctgagat

SEQ ID NO: 1773555 - DNA, 15 bp, Homo sapiens
ggaggagctgagatt

SEQ ID NO: 1773556 - DNA, 15 bp, Homo sapiens
gaggagctgagattt

SEQ ID NO: 1773557 - DNA, 15 bp, Homo sapiens
aggagctgagattta

SEQ ID NO: 1773558 - DNA, 15 bp, Homo sapiens
ggagctgagatttaa

SEQ ID NO: 1773559 - DNA, 15 bp, Homo sapiens
gagctgagatttaaa

SEQ ID NO: 1773560 - DNA, 15 bp, Homo sapiens
agctgagatttaaaa

SEQ ID NO: 1773561 - DNA, 15 bp, Homo sapiens
gctgagatttaaaat

SEQ ID NO: 1773562 - DNA, 15 bp, Homo sapiens
ctgagatttaaaatg

SEQ ID NO: 1773563 - DNA, 15 bp, Homo sapiens
tgagatttaaaatga

SEQ ID NO: 1773564 - DNA, 15 bp, Homo sapiens
gagatttaaaatgaa

SEQ ID NO: 1773565 - DNA, 15 bp, Homo sapiens
agatttaaaatgaaa

SEQ ID NO: 1773566 - DNA, 15 bp, Homo sapiens
gatttaaaatgaaaa

SEQ ID NO: 1773567 - DNA, 15 bp, Homo sapiens
atttaaaatgaaaac

SEQ ID NO: 1773568 - DNA, 15 bp, Homo sapiens
tttaaaatgaaaaca

SEQ ID NO: 1773569 - DNA, 15 bp, Homo sapiens
ttaaaatgaaaacaa

SEQ ID NO: 1773570 - DNA, 15 bp, Homo sapiens
taaaatgaaaacaaa

SEQ ID NO: 1773571 - DNA, 15 bp, Homo sapiens
aaaatgaaaacaaaa

SEQ ID NO: 1773572 - DNA, 15 bp, Homo sapiens
aaatgaaaacaaaaa

SEQ ID NO: 1773573 - DNA, 15 bp, Homo sapiens
aatgaaaacaaaaaa

SEQ ID NO: 1773574 - DNA, 15 bp, Homo sapiens
atgaaaacaaaaaaa

SEQ ID NO: 1773575 - DNA, 15 bp, Homo sapiens
tgaaaacaaaaaaac

SEQ ID NO: 1773576 - DNA, 15 bp, Homo sapiens
gaaaacaaaaaaaca

SEQ ID NO: 1773577 - DNA, 15 bp, Homo sapiens
aacaaaaaaacaaac

SEQ ID NO: 1773578 - DNA, 15 bp, Homo sapiens
acaaaaaaacaaact

SEQ ID NO: 1773579 - DNA, 15 bp, Homo sapiens
caaaaaaacaaacta

SEQ ID NO: 1773580 - DNA, 15 bp, Homo sapiens
aaaaaaacaaactaa

SEQ ID NO: 1773581 - DNA, 15 bp, Homo sapiens
aaaaaacaaactaag

SEQ ID NO: 1773582 - DNA, 15 bp, Homo sapiens
aaaaacaaactaaga

SEQ ID NO: 1773583 - DNA, 15 bp, Homo sapiens
aaaacaaactaagac

SEQ ID NO: 1773584 - DNA, 15 bp, Homo sapiens
aaacaaactaagacc

SEQ ID NO: 1773585 - DNA, 15 bp, Homo sapiens
aacaaactaagaccc

SEQ ID NO: 1773586 - DNA, 15 bp, Homo sapiens
acaaactaagaccca

SEQ ID NO: 1773587 - DNA, 15 bp, Homo sapiens
caaactaagacccac

SEQ ID NO: 1773588 - DNA, 15 bp, Homo sapiens
aaactaagacccacc

SEQ ID NO: 1773589 - DNA, 15 bp, Homo sapiens
aactaagacccaccc

SEQ ID NO: 1773590 - DNA, 15 bp, Homo sapiens
actaagacccacccc

SEQ ID NO: 1773591 - DNA, 15 bp, Homo sapiens
ctaagacccacccct

SEQ ID NO: 1773592 - DNA, 15 bp, Homo sapiens
taagacccacccctg

SEQ ID NO: 1773593 - DNA, 15 bp, Homo sapiens
aagacccacccctgc

SEQ ID NO: 1773594 - DNA, 15 bp, Homo sapiens
agacccacccctgct

SEQ ID NO: 1773595 - DNA, 15 bp, Homo sapiens
gacccacccctgctc

SEQ ID NO: 1773596 - DNA, 15 bp, Homo sapiens
acccacccctgctcg

SEQ ID NO: 1773597 - DNA, 15 bp, Homo sapiens
cccacccctgctcgc

SEQ ID NO: 1773598 - DNA, 15 bp, Homo sapiens
ccacccctgctcgcc

SEQ ID NO: 1773599 - DNA, 15 bp, Homo sapiens
cacccctgctcgccc

SEQ ID NO: 1773600 - DNA, 15 bp, Homo sapiens
acccctgctcgcccg

SEQ ID NO: 1773601 - DNA, 15 bp, Homo sapiens
cccctgctcgcccga

SEQ ID NO: 1773602 - DNA, 15 bp, Homo sapiens
ccctgctcgcccgag

SEQ ID NO: 1773603 - DNA, 15 bp, Homo sapiens
cctgctcgcccgagg

SEQ ID NO: 1773604 - DNA, 15 bp, Homo sapiens
ctgctcgcccgaggt

SEQ ID NO: 1773605 - DNA, 15 bp, Homo sapiens
tgctcgcccgaggtc

SEQ ID NO: 1773606 - DNA, 15 bp, Homo sapiens
gctcgcccgaggtca

SEQ ID NO: 1773607 - DNA, 15 bp, Homo sapiens
ctcgcccgaggtcac

SEQ ID NO: 1773608 - DNA, 15 bp, Homo sapiens
tcgcccgaggtcact

SEQ ID NO: 1773609 - DNA, 15 bp, Homo sapiens
cgcccgaggtcactc

SEQ ID NO: 1773610 - DNA, 15 bp, Homo sapiens
gcccgaggtcactca

SEQ ID NO: 1773611 - DNA, 15 bp, Homo sapiens
cccgaggtcactcac

SEQ ID NO: 1773612 - DNA, 15 bp, Homo sapiens
ccgaggtcactcact

SEQ ID NO: 1773613 - DNA, 15 bp, Homo sapiens
cgaggtcactcactt

SEQ ID NO: 1773614 - DNA, 15 bp, Homo sapiens
gaggtcactcacttg

SEQ ID NO: 1773615 - DNA, 15 bp, Homo sapiens
aggtcactcacttgg

SEQ ID NO: 1773616 - DNA, 15 bp, Homo sapiens
ggtcactcacttggc

SEQ ID NO: 1773617 - DNA, 15 bp, Homo sapiens
gtcactcacttggct

SEQ ID NO: 1773618 - DNA, 15 bp, Homo sapiens
tcactcacttggctt

SEQ ID NO: 1773619 - DNA, 15 bp, Homo sapiens
cactcacttggcttg

SEQ ID NO: 1773620 - DNA, 15 bp, Homo sapiens
actcacttggcttgg

SEQ ID NO: 1773621 - DNA, 15 bp, Homo sapiens
ctcacttggcttggc

SEQ ID NO: 1773622 - DNA, 15 bp, Homo sapiens
tcacttggcttggct

SEQ ID NO: 1773623 - DNA, 15 bp, Homo sapiens
cacttggcttggctg

SEQ ID NO: 1773624 - DNA, 15 bp, Homo sapiens
acttggcttggctgg

SEQ ID NO: 1773625 - DNA, 15 bp, Homo sapiens
cttggcttggctggg

SEQ ID NO: 1773626 - DNA, 15 bp, Homo sapiens
ttggcttggctggga

SEQ ID NO: 1773627 - DNA, 15 bp, Homo sapiens
tggcttggctgggac

SEQ ID NO: 1773628 - DNA, 15 bp, Homo sapiens
ggcttggctgggact

SEQ ID NO: 1773629 - DNA, 15 bp, Homo sapiens
gcttggctgggactt

SEQ ID NO: 1773630 - DNA, 15 bp, Homo sapiens
cttggctgggactta

SEQ ID NO: 1773631 - DNA, 15 bp, Homo sapiens
ttggctgggacttac

SEQ ID NO: 1773632 - DNA, 15 bp, Homo sapiens
tggctgggacttacg

SEQ ID NO: 1773633 - DNA, 15 bp, Homo sapiens
ggctgggacttacgc

SEQ ID NO: 1773634 - DNA, 15 bp, Homo sapiens
gctgggacttacgcc

SEQ ID NO: 1773635 - DNA, 15 bp, Homo sapiens
ctgggacttacgccc

SEQ ID NO: 1773636 - DNA, 15 bp, Homo sapiens
tgggacttacgccca

SEQ ID NO: 1773637 - DNA, 15 bp, Homo sapiens
gggacttacgcccag

SEQ ID NO: 1773638 - DNA, 15 bp, Homo sapiens
ggacttacgcccagg

SEQ ID NO: 1773639 - DNA, 15 bp, Homo sapiens
gacttacgcccaggt

SEQ ID NO: 1773640 - DNA, 15 bp, Homo sapiens
acttacgcccaggtc

SEQ ID NO: 1773641 - DNA, 15 bp, Homo sapiens
cttacgcccaggtcc

SEQ ID NO: 1773642 - DNA, 15 bp, Homo sapiens
ttacgcccaggtcca

SEQ ID NO: 1773643 - DNA, 15 bp, Homo sapiens
tacgcccaggtccag

SEQ ID NO: 1773644 - DNA, 15 bp, Homo sapiens
acgcccaggtccagt

SEQ ID NO: 1773645 - DNA, 15 bp, Homo sapiens
cgcccaggtccagtc

SEQ ID NO: 1773646 - DNA, 15 bp, Homo sapiens
gcccaggtccagtca

SEQ ID NO: 1773647 - DNA, 15 bp, Homo sapiens
cccaggtccagtcat

SEQ ID NO: 1773648 - DNA, 15 bp, Homo sapiens
ccaggtccagtcatg

SEQ ID NO: 1773649 - DNA, 15 bp, Homo sapiens
caggtccagtcatgc

SEQ ID NO: 1773650 - DNA, 15 bp, Homo sapiens
aggtccagtcatgct

SEQ ID NO: 1773651 - DNA, 15 bp, Homo sapiens
ggtccagtcatgctt

SEQ ID NO: 1773652 - DNA, 15 bp, Homo sapiens
gtccagtcatgcttg

SEQ ID NO: 1773653 - DNA, 15 bp, Homo sapiens
tccagtcatgcttgt

SEQ ID NO: 1773654 - DNA, 15 bp, Homo sapiens
ccagtcatgcttgtc

SEQ ID NO: 1773655 - DNA, 15 bp, Homo sapiens
cagtcatgcttgtct

SEQ ID NO: 1773656 - DNA, 15 bp, Homo sapiens
agtcatgcttgtcta

SEQ ID NO: 1773657 - DNA, 15 bp, Homo sapiens
gtcatgcttgtctat

SEQ ID NO: 1773658 - DNA, 15 bp, Homo sapiens
tcatgcttgtctatc

SEQ ID NO: 1773659 - DNA, 15 bp, Homo sapiens
catgcttgtctatcc

SEQ ID NO: 1773660 - DNA, 15 bp, Homo sapiens
atgcttgtctatccc

SEQ ID NO: 1773661 - DNA, 15 bp, Homo sapiens
tgcttgtctatccca

SEQ ID NO: 1773662 - DNA, 15 bp, Homo sapiens
gcttgtctatcccag

SEQ ID NO: 1773663 - DNA, 15 bp, Homo sapiens
cttgtctatcccaga

SEQ ID NO: 1773664 - DNA, 15 bp, Homo sapiens
ttgtctatcccagat

SEQ ID NO: 1773665 - DNA, 15 bp, Homo sapiens
tgtctatcccagata

SEQ ID NO: 1773666 - DNA, 15 bp, Homo sapiens
gtctatcccagatat

SEQ ID NO: 1773667 - DNA, 15 bp, Homo sapiens
tctatcccagatatg

SEQ ID NO: 1773668 - DNA, 15 bp, Homo sapiens
ctatcccagatatga

SEQ ID NO: 1773669 - DNA, 15 bp, Homo sapiens
tatcccagatatgaa

SEQ ID NO: 1773670 - DNA, 15 bp, Homo sapiens
atcccagatatgaag

SEQ ID NO: 1773671 - DNA, 15 bp, Homo sapiens
tcccagatatgaagc

SEQ ID NO: 1773672 - DNA, 15 bp, Homo sapiens
cccagatatgaagct

SEQ ID NO: 1773673 - DNA, 15 bp, Homo sapiens
ccagatatgaagctg

SEQ ID NO: 1773674 - DNA, 15 bp, Homo sapiens
cagatatgaagctgg

SEQ ID NO: 1773675 - DNA, 15 bp, Homo sapiens
agatatgaagctggg

SEQ ID NO: 1773676 - DNA, 15 bp, Homo sapiens
gatatgaagctgggc

SEQ ID NO: 1773677 - DNA, 15 bp, Homo sapiens
atatgaagctgggcg

SEQ ID NO: 1773678 - DNA, 15 bp, Homo sapiens
tatgaagctgggcgt

SEQ ID NO: 1773679 - DNA, 15 bp, Homo sapiens
atgaagctgggcgtc

SEQ ID NO: 1773680 - DNA, 15 bp, Homo sapiens
tgaagctgggcgtca

SEQ ID NO: 1773681 - DNA, 15 bp, Homo sapiens
gaagctgggcgtcag

SEQ ID NO: 1773682 - DNA, 15 bp, Homo sapiens
aagctgggcgtcagg

SEQ ID NO: 1773683 - DNA, 15 bp, Homo sapiens
agctgggcgtcagga

SEQ ID NO: 1773684 - DNA, 15 bp, Homo sapiens
gctgggcgtcaggat

SEQ ID NO: 1773685 - DNA, 15 bp, Homo sapiens
ctgggcgtcaggatg

SEQ ID NO: 1773686 - DNA, 15 bp, Homo sapiens
tgggcgtcaggatgg

SEQ ID NO: 1773687 - DNA, 15 bp, Homo sapiens
gggcgtcaggatggg

SEQ ID NO: 1773688 - DNA, 15 bp, Homo sapiens
ggcgtcaggatggga

SEQ ID NO: 1773689 - DNA, 15 bp, Homo sapiens
gcgtcaggatgggag

SEQ ID NO: 1773690 - DNA, 15 bp, Homo sapiens
cgtcaggatgggagg

SEQ ID NO: 1773691 - DNA, 15 bp, Homo sapiens
gtcaggatgggaggc

SEQ ID NO: 1773692 - DNA, 15 bp, Homo sapiens
tcaggatgggaggca

SEQ ID NO: 1773693 - DNA, 15 bp, Homo sapiens
caggatgggaggcag

SEQ ID NO: 1773694 - DNA, 15 bp, Homo sapiens
aggatgggaggcagc

SEQ ID NO: 1773695 - DNA, 15 bp, Homo sapiens
ggatgggaggcagca

SEQ ID NO: 1773696 - DNA, 15 bp, Homo sapiens
gatgggaggcagcat

SEQ ID NO: 1773697 - DNA, 15 bp, Homo sapiens
atgggaggcagcatg

SEQ ID NO: 1773698 - DNA, 15 bp, Homo sapiens
tgggaggcagcatga

SEQ ID NO: 1773699 - DNA, 15 bp, Homo sapiens
gggaggcagcatgac

SEQ ID NO: 1773700 - DNA, 15 bp, Homo sapiens
ggaggcagcatgacc

SEQ ID NO: 1773701 - DNA, 15 bp, Homo sapiens
gaggcagcatgaccc

SEQ ID NO: 1773702 - DNA, 15 bp, Homo sapiens
aggcagcatgaccca

SEQ ID NO: 1773703 - DNA, 15 bp, Homo sapiens
ggcagcatgacccac

SEQ ID NO: 1773704 - DNA, 15 bp, Homo sapiens
gcagcatgacccaca

SEQ ID NO: 1773705 - DNA, 15 bp, Homo sapiens
cagcatgacccacag

SEQ ID NO: 1773706 - DNA, 15 bp, Homo sapiens
agcatgacccacagt

SEQ ID NO: 1773707 - DNA, 15 bp, Homo sapiens
gcatgacccacagtg

SEQ ID NO: 1773708 - DNA, 15 bp, Homo sapiens
catgacccacagtgg

SEQ ID NO: 1773709 - DNA, 15 bp, Homo sapiens
atgacccacagtggt

SEQ ID NO: 1773710 - DNA, 15 bp, Homo sapiens
tgacccacagtggta

SEQ ID NO: 1773711 - DNA, 15 bp, Homo sapiens
gacccacagtggtag

SEQ ID NO: 1773712 - DNA, 15 bp, Homo sapiens
acccacagtggtagc

SEQ ID NO: 1773713 - DNA, 15 bp, Homo sapiens
cccacagtggtagcc

SEQ ID NO: 1773714 - DNA, 15 bp, Homo sapiens
ccacagtggtagcct

SEQ ID NO: 1773715 - DNA, 15 bp, Homo sapiens
cacagtggtagccta

SEQ ID NO: 1773716 - DNA, 15 bp, Homo sapiens
acagtggtagcctag

SEQ ID NO: 1773717 - DNA, 15 bp, Homo sapiens
cagtggtagcctagg

SEQ ID NO: 1773718 - DNA, 15 bp, Homo sapiens
agtggtagcctaggc

SEQ ID NO: 1773719 - DNA, 15 bp, Homo sapiens
gtggtagcctaggct

SEQ ID NO: 1773720 - DNA, 15 bp, Homo sapiens
tggtagcctaggctc

SEQ ID NO: 1773721 - DNA, 15 bp, Homo sapiens
ggtagcctaggctca

SEQ ID NO: 1773722 - DNA, 15 bp, Homo sapiens
gtagcctaggctcac

SEQ ID NO: 1773723 - DNA, 15 bp, Homo sapiens
tagcctaggctcaca

SEQ ID NO: 1773724 - DNA, 15 bp, Homo sapiens
agcctaggctcacaa

SEQ ID NO: 1773725 - DNA, 15 bp, Homo sapiens
gcctaggctcacaag

SEQ ID NO: 1773726 - DNA, 15 bp, Homo sapiens
cctaggctcacaagg

SEQ ID NO: 1773727 - DNA, 15 bp, Homo sapiens
ctaggctcacaaggg

SEQ ID NO: 1773728 - DNA, 15 bp, Homo sapiens
taggctcacaagggt

SEQ ID NO: 1773729 - DNA, 15 bp, Homo sapiens
aggctcacaagggta

SEQ ID NO: 1773730 - DNA, 15 bp, Homo sapiens
ggctcacaagggtag

SEQ ID NO: 1773731 - DNA, 15 bp, Homo sapiens
gctcacaagggtagg

SEQ ID NO: 1773732 - DNA, 15 bp, Homo sapiens
ctcacaagggtaggg

SEQ ID NO: 1773733 - DNA, 15 bp, Homo sapiens
tcacaagggtaggga

SEQ ID NO: 1773734 - DNA, 15 bp, Homo sapiens
cacaagggtagggat

SEQ ID NO: 1773735 - DNA, 15 bp, Homo sapiens
acaagggtagggatg

SEQ ID NO: 1773736 - DNA, 15 bp, Homo sapiens
caagggtagggatgc

SEQ ID NO: 1773737 - DNA, 15 bp, Homo sapiens
aagggtagggatgca

SEQ ID NO: 1773738 - DNA, 15 bp, Homo sapiens
agggtagggatgcat

SEQ ID NO: 1773739 - DNA, 15 bp, Homo sapiens
gggtagggatgcatt

SEQ ID NO: 1773740 - DNA, 15 bp, Homo sapiens
ggtagggatgcattt

SEQ ID NO: 1773741 - DNA, 15 bp, Homo sapiens
gtagggatgcatttc

SEQ ID NO: 1773742 - DNA, 15 bp, Homo sapiens
tagggatgcatttcg

SEQ ID NO: 1773743 - DNA, 15 bp, Homo sapiens
agggatgcatttcga

SEQ ID NO: 1773744 - DNA, 15 bp, Homo sapiens
gggatgcatttcgaa

SEQ ID NO: 1773745 - DNA, 15 bp, Homo sapiens
ggatgcatttcgaat

SEQ ID NO: 1773746 - DNA, 15 bp, Homo sapiens
gatgcatttcgaatg

SEQ ID NO: 1773747 - DNA, 15 bp, Homo sapiens
atgcatttcgaatgt

SEQ ID NO: 1773748 - DNA, 15 bp, Homo sapiens
tgcatttcgaatgtc

SEQ ID NO: 1773749 - DNA, 15 bp, Homo sapiens
gcatttcgaatgtct

SEQ ID NO: 1773750 - DNA, 15 bp, Homo sapiens
catttcgaatgtctc

SEQ ID NO: 1773751 - DNA, 15 bp, Homo sapiens
atttcgaatgtctcc

SEQ ID NO: 1773752 - DNA, 15 bp, Homo sapiens
tttcgaatgtctcca

SEQ ID NO: 1773753 - DNA, 15 bp, Homo sapiens
ttcgaatgtctccaa

SEQ ID NO: 1773754 - DNA, 15 bp, Homo sapiens
tcgaatgtctccaag

SEQ ID NO: 1773755 - DNA, 15 bp, Homo sapiens
cgaatgtctccaaga

SEQ ID NO: 1773756 - DNA, 15 bp, Homo sapiens
gaatgtctccaagaa

SEQ ID NO: 1773757 - DNA, 15 bp, Homo sapiens
aatgtctccaagaat

SEQ ID NO: 1773758 - DNA, 15 bp, Homo sapiens
atgtctccaagaata

SEQ ID NO: 1773759 - DNA, 15 bp, Homo sapiens
tgtctccaagaatac

SEQ ID NO: 1773760 - DNA, 15 bp, Homo sapiens
gtctccaagaatact

SEQ ID NO: 1773761 - DNA, 15 bp, Homo sapiens
tctccaagaatactg

SEQ ID NO: 1773762 - DNA, 15 bp, Homo sapiens
ctccaagaatactga

SEQ ID NO: 1773763 - DNA, 15 bp, Homo sapiens
tccaagaatactgat

SEQ ID NO: 1773764 - DNA, 15 bp, Homo sapiens
ccaagaatactgatg

SEQ ID NO: 1773765 - DNA, 15 bp, Homo sapiens
caagaatactgatgc

SEQ ID NO: 1773766 - DNA, 15 bp, Homo sapiens
aagaatactgatgca

SEQ ID NO: 1773767 - DNA, 15 bp, Homo sapiens
agaatactgatgcag

SEQ ID NO: 1773768 - DNA, 15 bp, Homo sapiens
gaatactgatgcagg

SEQ ID NO: 1773769 - DNA, 15 bp, Homo sapiens
aatactgatgcaggg

SEQ ID NO: 1773770 - DNA, 15 bp, Homo sapiens
atactgatgcagggc

SEQ ID NO: 1773771 - DNA, 15 bp, Homo sapiens
tactgatgcagggcc

SEQ ID NO: 1773772 - DNA, 15 bp, Homo sapiens
actgatgcagggcca

SEQ ID NO: 1773773 - DNA, 15 bp, Homo sapiens
ctgatgcagggccaa

SEQ ID NO: 1773774 - DNA, 15 bp, Homo sapiens
tgatgcagggccaag

SEQ ID NO: 1773775 - DNA, 15 bp, Homo sapiens
gatgcagggccaagg

SEQ ID NO: 1773776 - DNA, 15 bp, Homo sapiens
atgcagggccaaggt

SEQ ID NO: 1773777 - DNA, 15 bp, Homo sapiens
tgcagggccaaggtc

SEQ ID NO: 1773778 - DNA, 15 bp, Homo sapiens
gcagggccaaggtca

SEQ ID NO: 1773779 - DNA, 15 bp, Homo sapiens
cagggccaaggtcat

SEQ ID NO: 1773780 - DNA, 15 bp, Homo sapiens
agggccaaggtcatc

SEQ ID NO: 1773781 - DNA, 15 bp, Homo sapiens
gggccaaggtcatcg

SEQ ID NO: 1773782 - DNA, 15 bp, Homo sapiens
ggccaaggtcatcga

SEQ ID NO: 1773783 - DNA, 15 bp, Homo sapiens
gccaaggtcatcgaa

SEQ ID NO: 1773784 - DNA, 15 bp, Homo sapiens
ccaaggtcatcgaag

SEQ ID NO: 1773785 - DNA, 15 bp, Homo sapiens
caaggtcatcgaagg

SEQ ID NO: 1773786 - DNA, 15 bp, Homo sapiens
aaggtcatcgaagga

SEQ ID NO: 1773787 - DNA, 15 bp, Homo sapiens
aggtcatcgaaggac

SEQ ID NO: 1773788 - DNA, 15 bp, Homo sapiens
ggtcatcgaaggact

SEQ ID NO: 1773789 - DNA, 15 bp, Homo sapiens
gtcatcgaaggactg

SEQ ID NO: 1773790 - DNA, 15 bp, Homo sapiens
tcatcgaaggactga

SEQ ID NO: 1773791 - DNA, 15 bp, Homo sapiens
catcgaaggactgac

SEQ ID NO: 1773792 - DNA, 15 bp, Homo sapiens
atcgaaggactgact

SEQ ID NO: 1773793 - DNA, 15 bp, Homo sapiens
tcgaaggactgactg

SEQ ID NO: 1773794 - DNA, 15 bp, Homo sapiens
cgaaggactgactgc

SEQ ID NO: 1773795 - DNA, 15 bp, Homo sapiens
gaaggactgactgct

SEQ ID NO: 1773796 - DNA, 15 bp, Homo sapiens
aaggactgactgctt

SEQ ID NO: 1773797 - DNA, 15 bp, Homo sapiens
aggactgactgctta

SEQ ID NO: 1773798 - DNA, 15 bp, Homo sapiens
ggactgactgcttat

SEQ ID NO: 1773799 - DNA, 15 bp, Homo sapiens
gactgactgcttatg

SEQ ID NO: 1773800 - DNA, 15 bp, Homo sapiens
actgactgcttatgg

SEQ ID NO: 1773801 - DNA, 15 bp, Homo sapiens
ctgactgcttatggg

SEQ ID NO: 1773802 - DNA, 15 bp, Homo sapiens
tgactgcttatggga

SEQ ID NO: 1773803 - DNA, 15 bp, Homo sapiens
gactgcttatgggaa

SEQ ID NO: 1773804 - DNA, 15 bp, Homo sapiens
actgcttatgggaaa

SEQ ID NO: 1773805 - DNA, 15 bp, Homo sapiens
ctgcttatgggaaat

SEQ ID NO: 1773806 - DNA, 15 bp, Homo sapiens
tgcttatgggaaatg

SEQ ID NO: 1773807 - DNA, 15 bp, Homo sapiens
gcttatgggaaatgc

SEQ ID NO: 1773808 - DNA, 15 bp, Homo sapiens
cttatgggaaatgca

SEQ ID NO: 1773809 - DNA, 15 bp, Homo sapiens
ttatgggaaatgcat

SEQ ID NO: 1773810 - DNA, 15 bp, Homo sapiens
tatgggaaatgcatt

SEQ ID NO: 1773811 - DNA, 15 bp, Homo sapiens
atgggaaatgcattt

SEQ ID NO: 1773812 - DNA, 15 bp, Homo sapiens
tgggaaatgcatttc

SEQ ID NO: 1773813 - DNA, 15 bp, Homo sapiens
gggaaatgcatttcc

SEQ ID NO: 1773814 - DNA, 15 bp, Homo sapiens
ggaaatgcatttccc

SEQ ID NO: 1773815 - DNA, 15 bp, Homo sapiens
gaaatgcatttccca

SEQ ID NO: 1773816 - DNA, 15 bp, Homo sapiens
aaatgcatttcccat

SEQ ID NO: 1773817 - DNA, 15 bp, Homo sapiens
aatgcatttcccata

SEQ ID NO: 1773818 - DNA, 15 bp, Homo sapiens
atgcatttcccataa

SEQ ID NO: 1773819 - DNA, 15 bp, Homo sapiens
tgcatttcccataag

SEQ ID NO: 1773820 - DNA, 15 bp, Homo sapiens
gcatttcccataagg

SEQ ID NO: 1773821 - DNA, 15 bp, Homo sapiens
catttcccataagga

SEQ ID NO: 1773822 - DNA, 15 bp, Homo sapiens
atttcccataaggac

SEQ ID NO: 1773823 - DNA, 15 bp, Homo sapiens
tttcccataaggact

SEQ ID NO: 1773824 - DNA, 15 bp, Homo sapiens
ttcccataaggactt

SEQ ID NO: 1773825 - DNA, 15 bp, Homo sapiens
tcccataaggacttg

SEQ ID NO: 1773826 - DNA, 15 bp, Homo sapiens
cccataaggacttgg

SEQ ID NO: 1773827 - DNA, 15 bp, Homo sapiens
ccataaggacttggt

SEQ ID NO: 1773828 - DNA, 15 bp, Homo sapiens
cataaggacttggtg

SEQ ID NO: 1773829 - DNA, 15 bp, Homo sapiens
ataaggacttggtga

SEQ ID NO: 1773830 - DNA, 15 bp, Homo sapiens
taaggacttggtgac

SEQ ID NO: 1773831 - DNA, 15 bp, Homo sapiens
aaggacttggtgacc

SEQ ID NO: 1773832 - DNA, 15 bp, Homo sapiens
aggacttggtgacca

SEQ ID NO: 1773833 - DNA, 15 bp, Homo sapiens
ggacttggtgaccat

SEQ ID NO: 1773834 - DNA, 15 bp, Homo sapiens
gacttggtgaccata

SEQ ID NO: 1773835 - DNA, 15 bp, Homo sapiens
acttggtgaccataa

SEQ ID NO: 1773836 - DNA, 15 bp, Homo sapiens
cttggtgaccataag

SEQ ID NO: 1773837 - DNA, 15 bp, Homo sapiens
ttggtgaccataagg

SEQ ID NO: 1773838 - DNA, 15 bp, Homo sapiens
tggtgaccataagga

SEQ ID NO: 1773839 - DNA, 15 bp, Homo sapiens
ggtgaccataaggaa

SEQ ID NO: 1773840 - DNA, 15 bp, Homo sapiens
gtgaccataaggaat

SEQ ID NO: 1773841 - DNA, 15 bp, Homo sapiens
tgaccataaggaata

SEQ ID NO: 1773842 - DNA, 15 bp, Homo sapiens
gaccataaggaatac

SEQ ID NO: 1773843 - DNA, 15 bp, Homo sapiens
accataaggaatacc

SEQ ID NO: 1773844 - DNA, 15 bp, Homo sapiens
ccataaggaatacct

SEQ ID NO: 1773845 - DNA, 15 bp, Homo sapiens
cataaggaatacctg

SEQ ID NO: 1773846 - DNA, 15 bp, Homo sapiens
ataaggaatacctga

SEQ ID NO: 1773847 - DNA, 15 bp, Homo sapiens
taaggaatacctgac

SEQ ID NO: 1773848 - DNA, 15 bp, Homo sapiens
aaggaatacctgacc

SEQ ID NO: 1773849 - DNA, 15 bp, Homo sapiens
aggaatacctgacct

SEQ ID NO: 1773850 - DNA, 15 bp, Homo sapiens
ggaatacctgacctt

SEQ ID NO: 1773851 - DNA, 15 bp, Homo sapiens
gaatacctgaccttg

SEQ ID NO: 1773852 - DNA, 15 bp, Homo sapiens
aatacctgaccttgg

SEQ ID NO: 1773853 - DNA, 15 bp, Homo sapiens
atacctgaccttggc

SEQ ID NO: 1773854 - DNA, 15 bp, Homo sapiens
tacctgaccttggcc

SEQ ID NO: 1773855 - DNA, 15 bp, Homo sapiens
acctgaccttggccc

SEQ ID NO: 1773856 - DNA, 15 bp, Homo sapiens
cctgaccttggccct

SEQ ID NO: 1773857 - DNA, 15 bp, Homo sapiens
ctgaccttggccctg

SEQ ID NO: 1773858 - DNA, 15 bp, Homo sapiens
tgaccttggccctgc

SEQ ID NO: 1773859 - DNA, 15 bp, Homo sapiens
gaccttggccctgca

SEQ ID NO: 1773860 - DNA, 15 bp, Homo sapiens
accttggccctgcat

SEQ ID NO: 1773861 - DNA, 15 bp, Homo sapiens
ccttggccctgcatc

SEQ ID NO: 1773862 - DNA, 15 bp, Homo sapiens
cttggccctgcatca

SEQ ID NO: 1773863 - DNA, 15 bp, Homo sapiens
ttggccctgcatcag

SEQ ID NO: 1773864 - DNA, 15 bp, Homo sapiens
tggccctgcatcagt

SEQ ID NO: 1773865 - DNA, 15 bp, Homo sapiens
ggccctgcatcagtg

SEQ ID NO: 1773866 - DNA, 15 bp, Homo sapiens
gccctgcatcagtgt

SEQ ID NO: 1773867 - DNA, 15 bp, Homo sapiens
ccctgcatcagtgtt

SEQ ID NO: 1773868 - DNA, 15 bp, Homo sapiens
cctgcatcagtgttc

SEQ ID NO: 1773869 - DNA, 15 bp, Homo sapiens
ctgcatcagtgttcc

SEQ ID NO: 1773870 - DNA, 15 bp, Homo sapiens
tgcatcagtgttccc

SEQ ID NO: 1773871 - DNA, 15 bp, Homo sapiens
gcatcagtgttccca

SEQ ID NO: 1773872 - DNA, 15 bp, Homo sapiens
catcagtgttcccag

SEQ ID NO: 1773873 - DNA, 15 bp, Homo sapiens
atcagtgttcccaga

SEQ ID NO: 1773874 - DNA, 15 bp, Homo sapiens
tcagtgttcccagag

SEQ ID NO: 1773875 - DNA, 15 bp, Homo sapiens
cagtgttcccagaga

SEQ ID NO: 1773876 - DNA, 15 bp, Homo sapiens
agtgttcccagagac

SEQ ID NO: 1773877 - DNA, 15 bp, Homo sapiens
gtgttcccagagaca

SEQ ID NO: 1773878 - DNA, 15 bp, Homo sapiens
tgttcccagagacat

SEQ ID NO: 1773879 - DNA, 15 bp, Homo sapiens
gttcccagagacatt

SEQ ID NO: 1773880 - DNA, 15 bp, Homo sapiens
ttcccagagacattc

SEQ ID NO: 1773881 - DNA, 15 bp, Homo sapiens
tcccagagacattca

SEQ ID NO: 1773882 - DNA, 15 bp, Homo sapiens
cccagagacattcaa

SEQ ID NO: 1773883 - DNA, 15 bp, Homo sapiens
ccagagacattcaaa

SEQ ID NO: 1773884 - DNA, 15 bp, Homo sapiens
cagagacattcaaag

SEQ ID NO: 1773885 - DNA, 15 bp, Homo sapiens
agagacattcaaagt

SEQ ID NO: 1773886 - DNA, 15 bp, Homo sapiens
gagacattcaaagtg

SEQ ID NO: 1773887 - DNA, 15 bp, Homo sapiens
agacattcaaagtgc

SEQ ID NO: 1773888 - DNA, 15 bp, Homo sapiens
gacattcaaagtgca

SEQ ID NO: 1773889 - DNA, 15 bp, Homo sapiens
acattcaaagtgcat

SEQ ID NO: 1773890 - DNA, 15 bp, Homo sapiens
cattcaaagtgcatc

SEQ ID NO: 1773891 - DNA, 15 bp, Homo sapiens
attcaaagtgcatcg

SEQ ID NO: 1773892 - DNA, 15 bp, Homo sapiens
ttcaaagtgcatcgc

SEQ ID NO: 1773893 - DNA, 15 bp, Homo sapiens
tcaaagtgcatcgct

SEQ ID NO: 1773894 - DNA, 15 bp, Homo sapiens
caaagtgcatcgcta

SEQ ID NO: 1773895 - DNA, 15 bp, Homo sapiens
aaagtgcatcgctac

SEQ ID NO: 1773896 - DNA, 15 bp, Homo sapiens
aagtgcatcgctacc

SEQ ID NO: 1773897 - DNA, 15 bp, Homo sapiens
agtgcatcgctaccc

SEQ ID NO: 1773898 - DNA, 15 bp, Homo sapiens
gtgcatcgctaccct

SEQ ID NO: 1773899 - DNA, 15 bp, Homo sapiens
tgcatcgctaccctt

SEQ ID NO: 1773900 - DNA, 15 bp, Homo sapiens
gcatcgctacccttg

SEQ ID NO: 1773901 - DNA, 15 bp, Homo sapiens
catcgctacccttgt

SEQ ID NO: 1773902 - DNA, 15 bp, Homo sapiens
atcgctacccttgtg

SEQ ID NO: 1773903 - DNA, 15 bp, Homo sapiens
tcgctacccttgtga

SEQ ID NO: 1773904 - DNA, 15 bp, Homo sapiens
cgctacccttgtgat

SEQ ID NO: 1773905 - DNA, 15 bp, Homo sapiens
gctacccttgtgatc

SEQ ID NO: 1773906 - DNA, 15 bp, Homo sapiens
ctacccttgtgatca

SEQ ID NO: 1773907 - DNA, 15 bp, Homo sapiens
tacccttgtgatcac

SEQ ID NO: 1773908 - DNA, 15 bp, Homo sapiens
acccttgtgatcaca

SEQ ID NO: 1773909 - DNA, 15 bp, Homo sapiens
cccttgtgatcacac

SEQ ID NO: 1773910 - DNA, 15 bp, Homo sapiens
ccttgtgatcacaca

SEQ ID NO: 1773911 - DNA, 15 bp, Homo sapiens
cttgtgatcacacac

SEQ ID NO: 1773912 - DNA, 15 bp, Homo sapiens
ttgtgatcacacact

SEQ ID NO: 1773913 - DNA, 15 bp, Homo sapiens
tgtgatcacacacta

SEQ ID NO: 1773914 - DNA, 15 bp, Homo sapiens
gtgatcacacactaa

SEQ ID NO: 1773915 - DNA, 15 bp, Homo sapiens
tgatcacacactaac

SEQ ID NO: 1773916 - DNA, 15 bp, Homo sapiens
gatcacacactaact

SEQ ID NO: 1773917 - DNA, 15 bp, Homo sapiens
atcacacactaacta

SEQ ID NO: 1773918 - DNA, 15 bp, Homo sapiens
tcacacactaactac

SEQ ID NO: 1773919 - DNA, 15 bp, Homo sapiens
cacacactaactacg

SEQ ID NO: 1773920 - DNA, 15 bp, Homo sapiens
acacactaactacgt

SEQ ID NO: 1773921 - DNA, 15 bp, Homo sapiens
cacactaactacgtc

SEQ ID NO: 1773922 - DNA, 15 bp, Homo sapiens
acactaactacgtct

SEQ ID NO: 1773923 - DNA, 15 bp, Homo sapiens
cactaactacgtctg

SEQ ID NO: 1773924 - DNA, 15 bp, Homo sapiens
actaactacgtctgt

SEQ ID NO: 1773925 - DNA, 15 bp, Homo sapiens
ctaactacgtctgtt

SEQ ID NO: 1773926 - DNA, 15 bp, Homo sapiens
taactacgtctgttg

SEQ ID NO: 1773927 - DNA, 15 bp, Homo sapiens
aactacgtctgttgt

SEQ ID NO: 1773928 - DNA, 15 bp, Homo sapiens
actacgtctgttgtc

SEQ ID NO: 1773929 - DNA, 15 bp, Homo sapiens
ctacgtctgttgtct

SEQ ID NO: 1773930 - DNA, 15 bp, Homo sapiens
tacgtctgttgtctg

SEQ ID NO: 1773931 - DNA, 15 bp, Homo sapiens
acgtctgttgtctgg

SEQ ID NO: 1773932 - DNA, 15 bp, Homo sapiens
cgtctgttgtctggt

SEQ ID NO: 1773933 - DNA, 15 bp, Homo sapiens
gtctgttgtctggtc

SEQ ID NO: 1773934 - DNA, 15 bp, Homo sapiens
tctgttgtctggtca

SEQ ID NO: 1773935 - DNA, 15 bp, Homo sapiens
ctgttgtctggtcag

SEQ ID NO: 1773936 - DNA, 15 bp, Homo sapiens
tgttgtctggtcagc

SEQ ID NO: 1773937 - DNA, 15 bp, Homo sapiens
gttgtctggtcagct

SEQ ID NO: 1773938 - DNA, 15 bp, Homo sapiens
ttgtctggtcagctc

SEQ ID NO: 1773939 - DNA, 15 bp, Homo sapiens
tgtctggtcagctct

SEQ ID NO: 1773940 - DNA, 15 bp, Homo sapiens
gtctggtcagctctt

SEQ ID NO: 1773941 - DNA, 15 bp, Homo sapiens
tctggtcagctcttt

SEQ ID NO: 1773942 - DNA, 15 bp, Homo sapiens
ctggtcagctctttg

SEQ ID NO: 1773943 - DNA, 15 bp, Homo sapiens
tggtcagctctttga

SEQ ID NO: 1773944 - DNA, 15 bp, Homo sapiens
ggtcagctctttgac

SEQ ID NO: 1773945 - DNA, 15 bp, Homo sapiens
gtcagctctttgaca

SEQ ID NO: 1773946 - DNA, 15 bp, Homo sapiens
tcagctctttgacaa

SEQ ID NO: 1773947 - DNA, 15 bp, Homo sapiens
cagctctttgacaaa

SEQ ID NO: 1773948 - DNA, 15 bp, Homo sapiens
agctctttgacaaaa

SEQ ID NO: 1773949 - DNA, 15 bp, Homo sapiens
gctctttgacaaaat

SEQ ID NO: 1773950 - DNA, 15 bp, Homo sapiens
ctctttgacaaaatt

SEQ ID NO: 1773951 - DNA, 15 bp, Homo sapiens
tctttgacaaaattg

SEQ ID NO: 1773952 - DNA, 15 bp, Homo sapiens
ctttgacaaaattgc

SEQ ID NO: 1773953 - DNA, 15 bp, Homo sapiens
tttgacaaaattgcc

SEQ ID NO: 1773954 - DNA, 15 bp, Homo sapiens
ttgacaaaattgcca

SEQ ID NO: 1773955 - DNA, 15 bp, Homo sapiens
tgacaaaattgccat

SEQ ID NO: 1773956 - DNA, 15 bp, Homo sapiens
gacaaaattgccatc

SEQ ID NO: 1773957 - DNA, 15 bp, Homo sapiens
acaaaattgccatcc

SEQ ID NO: 1773958 - DNA, 15 bp, Homo sapiens
caaaattgccatcct

SEQ ID NO: 1773959 - DNA, 15 bp, Homo sapiens
aaaattgccatcctg

SEQ ID NO: 1773960 - DNA, 15 bp, Homo sapiens
aaattgccatcctga

SEQ ID NO: 1773961 - DNA, 15 bp, Homo sapiens
aattgccatcctgag

SEQ ID NO: 1773962 - DNA, 15 bp, Homo sapiens
attgccatcctgagc

SEQ ID NO: 1773963 - DNA, 15 bp, Homo sapiens
ttgccatcctgagct

SEQ ID NO: 1773964 - DNA, 15 bp, Homo sapiens
tgccatcctgagctt

SEQ ID NO: 1773965 - DNA, 15 bp, Homo sapiens
gccatcctgagcttc

SEQ ID NO: 1773966 - DNA, 15 bp, Homo sapiens
ccatcctgagcttcg

SEQ ID NO: 1773967 - DNA, 15 bp, Homo sapiens
catcctgagcttcgg

SEQ ID NO: 1773968 - DNA, 15 bp, Homo sapiens
atcctgagcttcgga

SEQ ID NO: 1773969 - DNA, 15 bp, Homo sapiens
tcctgagcttcggag

SEQ ID NO: 1773970 - DNA, 15 bp, Homo sapiens
cctgagcttcggaga

SEQ ID NO: 1773971 - DNA, 15 bp, Homo sapiens
ctgagcttcggagag

SEQ ID NO: 1773972 - DNA, 15 bp, Homo sapiens
tgagcttcggagagc

SEQ ID NO: 1773973 - DNA, 15 bp, Homo sapiens
gagcttcggagagct

SEQ ID NO: 1773974 - DNA, 15 bp, Homo sapiens
agcttcggagagctg

SEQ ID NO: 1773975 - DNA, 15 bp, Homo sapiens
gcttcggagagctga

SEQ ID NO: 1773976 - DNA, 15 bp, Homo sapiens
cttcggagagctgat

SEQ ID NO: 1773977 - DNA, 15 bp, Homo sapiens
ttcggagagctgatt

SEQ ID NO: 1773978 - DNA, 15 bp, Homo sapiens
tcggagagctgattt

SEQ ID NO: 1773979 - DNA, 15 bp, Homo sapiens
cggagagctgatttt

SEQ ID NO: 1773980 - DNA, 15 bp, Homo sapiens
ggagagctgattttc

SEQ ID NO: 1773981 - DNA, 15 bp, Homo sapiens
gagagctgattttct

SEQ ID NO: 1773982 - DNA, 15 bp, Homo sapiens
agagctgattttctg

SEQ ID NO: 1773983 - DNA, 15 bp, Homo sapiens
gagctgattttctgt

SEQ ID NO: 1773984 - DNA, 15 bp, Homo sapiens
agctgattttctgtg

SEQ ID NO: 1773985 - DNA, 15 bp, Homo sapiens
gctgattttctgtgg

SEQ ID NO: 1773986 - DNA, 15 bp, Homo sapiens
ctgattttctgtggc

SEQ ID NO: 1773987 - DNA, 15 bp, Homo sapiens
tgattttctgtggca

SEQ ID NO: 1773988 - DNA, 15 bp, Homo sapiens
gattttctgtggcac

SEQ ID NO: 1773989 - DNA, 15 bp, Homo sapiens
attttctgtggcacg

SEQ ID NO: 1773990 - DNA, 15 bp, Homo sapiens
ttttctgtggcacgc

SEQ ID NO: 1773991 - DNA, 15 bp, Homo sapiens
tttctgtggcacgcc

SEQ ID NO: 1773992 - DNA, 15 bp, Homo sapiens
ttctgtggcacgcca

SEQ ID NO: 1773993 - DNA, 15 bp, Homo sapiens
tctgtggcacgccag

SEQ ID NO: 1773994 - DNA, 15 bp, Homo sapiens
ctgtggcacgccagc

SEQ ID NO: 1773995 - DNA, 15 bp, Homo sapiens
tgtggcacgccagcg

SEQ ID NO: 1773996 - DNA, 15 bp, Homo sapiens
gtggcacgccagcgg

SEQ ID NO: 1773997 - DNA, 15 bp, Homo sapiens
tggcacgccagcgga

SEQ ID NO: 1773998 - DNA, 15 bp, Homo sapiens
ggcacgccagcggaa

SEQ ID NO: 1773999 - DNA, 15 bp, Homo sapiens
gcacgccagcggaaa

SEQ ID NO: 1774000 - DNA, 15 bp, Homo sapiens
cacgccagcggaaat

SEQ ID NO: 1774001 - DNA, 15 bp, Homo sapiens
acgccagcggaaatg

SEQ ID NO: 1774002 - DNA, 15 bp, Homo sapiens
cgccagcggaaatgc

SEQ ID NO: 1774003 - DNA, 15 bp, Homo sapiens
gccagcggaaatgct

SEQ ID NO: 1774004 - DNA, 15 bp, Homo sapiens
ccagcggaaatgctt

SEQ ID NO: 1774005 - DNA, 15 bp, Homo sapiens
cagcggaaatgcttg

SEQ ID NO: 1774006 - DNA, 15 bp, Homo sapiens
agcggaaatgcttga

SEQ ID NO: 1774007 - DNA, 15 bp, Homo sapiens
gcggaaatgcttgat

SEQ ID NO: 1774008 - DNA, 15 bp, Homo sapiens
cggaaatgcttgatt

SEQ ID NO: 1774009 - DNA, 15 bp, Homo sapiens
ggaaatgcttgattt

SEQ ID NO: 1774010 - DNA, 15 bp, Homo sapiens
gaaatgcttgatttc

SEQ ID NO: 1774011 - DNA, 15 bp, Homo sapiens
aaatgcttgatttct

SEQ ID NO: 1774012 - DNA, 15 bp, Homo sapiens
aatgcttgatttctt

SEQ ID NO: 1774013 - DNA, 15 bp, Homo sapiens
atgcttgatttcttc

SEQ ID NO: 1774014 - DNA, 15 bp, Homo sapiens
tgcttgatttcttca

SEQ ID NO: 1774015 - DNA, 15 bp, Homo sapiens
gcttgatttcttcaa

SEQ ID NO: 1774016 - DNA, 15 bp, Homo sapiens
cttgatttcttcaat

SEQ ID NO: 1774017 - DNA, 15 bp, Homo sapiens
ttgatttcttcaatg

SEQ ID NO: 1774018 - DNA, 15 bp, Homo sapiens
tgatttcttcaatga

SEQ ID NO: 1774019 - DNA, 15 bp, Homo sapiens
gatttcttcaatgac

SEQ ID NO: 1774020 - DNA, 15 bp, Homo sapiens
atttcttcaatgact

SEQ ID NO: 1774021 - DNA, 15 bp, Homo sapiens
tttcttcaatgactg

SEQ ID NO: 1774022 - DNA, 15 bp, Homo sapiens
ttcttcaatgactgc

SEQ ID NO: 1774023 - DNA, 15 bp, Homo sapiens
tcttcaatgactgcg

SEQ ID NO: 1774024 - DNA, 15 bp, Homo sapiens
cttcaatgactgcgg

SEQ ID NO: 1774025 - DNA, 15 bp, Homo sapiens
ttcaatgactgcggt

SEQ ID NO: 1774026 - DNA, 15 bp, Homo sapiens
tcaatgactgcggtt

SEQ ID NO: 1774027 - DNA, 15 bp, Homo sapiens
caatgactgcggtta

SEQ ID NO: 1774028 - DNA, 15 bp, Homo sapiens
aatgactgcggttac

SEQ ID NO: 1774029 - DNA, 15 bp, Homo sapiens
atgactgcggttacc

SEQ ID NO: 1774030 - DNA, 15 bp, Homo sapiens
tgactgcggttaccc

SEQ ID NO: 1774031 - DNA, 15 bp, Homo sapiens
gactgcggttaccct

SEQ ID NO: 1774032 - DNA, 15 bp, Homo sapiens
actgcggttaccctt

SEQ ID NO: 1774033 - DNA, 15 bp, Homo sapiens
ctgcggttacccttg

SEQ ID NO: 1774034 - DNA, 15 bp, Homo sapiens
tgcggttacccttgt

SEQ ID NO: 1774035 - DNA, 15 bp, Homo sapiens
gcggttacccttgtc

SEQ ID NO: 1774036 - DNA, 15 bp, Homo sapiens
cggttacccttgtcc

SEQ ID NO: 1774037 - DNA, 15 bp, Homo sapiens
ggttacccttgtcct

SEQ ID NO: 1774038 - DNA, 15 bp, Homo sapiens
gttacccttgtcctg

SEQ ID NO: 1774039 - DNA, 15 bp, Homo sapiens
ttacccttgtcctga

SEQ ID NO: 1774040 - DNA, 15 bp, Homo sapiens
tacccttgtcctgaa

SEQ ID NO: 1774041 - DNA, 15 bp, Homo sapiens
acccttgtcctgaac

SEQ ID NO: 1774042 - DNA, 15 bp, Homo sapiens
cccttgtcctgaaca

SEQ ID NO: 1774043 - DNA, 15 bp, Homo sapiens
ccttgtcctgaacat

SEQ ID NO: 1774044 - DNA, 15 bp, Homo sapiens
cttgtcctgaacatt

SEQ ID NO: 1774045 - DNA, 15 bp, Homo sapiens
ttgtcctgaacattc

SEQ ID NO: 1774046 - DNA, 15 bp, Homo sapiens
tgtcctgaacattca

SEQ ID NO: 1774047 - DNA, 15 bp, Homo sapiens
gtcctgaacattcaa

SEQ ID NO: 1774048 - DNA, 15 bp, Homo sapiens
tcctgaacattcaaa

SEQ ID NO: 1774049 - DNA, 15 bp, Homo sapiens
cctgaacattcaaac

SEQ ID NO: 1774050 - DNA, 15 bp, Homo sapiens
ctgaacattcaaacc

SEQ ID NO: 1774051 - DNA, 15 bp, Homo sapiens
tgaacattcaaaccc

SEQ ID NO: 1774052 - DNA, 15 bp, Homo sapiens
gaacattcaaaccct

SEQ ID NO: 1774053 - DNA, 15 bp, Homo sapiens
aacattcaaaccctt

SEQ ID NO: 1774054 - DNA, 15 bp, Homo sapiens
acattcaaacccttt

SEQ ID NO: 1774055 - DNA, 15 bp, Homo sapiens
cattcaaaccctttt

SEQ ID NO: 1774056 - DNA, 15 bp, Homo sapiens
attcaaacccttttg

SEQ ID NO: 1774057 - DNA, 15 bp, Homo sapiens
ttcaaacccttttga

SEQ ID NO: 1774058 - DNA, 15 bp, Homo sapiens
tcaaacccttttgac

SEQ ID NO: 1774059 - DNA, 15 bp, Homo sapiens
caaacccttttgact

SEQ ID NO: 1774060 - DNA, 15 bp, Homo sapiens
aaacccttttgactt

SEQ ID NO: 1774061 - DNA, 15 bp, Homo sapiens
aacccttttgacttc

SEQ ID NO: 1774062 - DNA, 15 bp, Homo sapiens
acccttttgacttct

SEQ ID NO: 1774063 - DNA, 15 bp, Homo sapiens
cccttttgacttcta

SEQ ID NO: 1774064 - DNA, 15 bp, Homo sapiens
ccttttgacttctat

SEQ ID NO: 1774065 - DNA, 15 bp, Homo sapiens
cttttgacttctata

SEQ ID NO: 1774066 - DNA, 15 bp, Homo sapiens
ttttgacttctatag

SEQ ID NO: 1774067 - DNA, 15 bp, Homo sapiens
tttgacttctatagt

SEQ ID NO: 1774068 - DNA, 15 bp, Homo sapiens
ttgacttctatagta

SEQ ID NO: 1774069 - DNA, 15 bp, Homo sapiens
tgacttctatagtaa

SEQ ID NO: 1774070 - DNA, 15 bp, Homo sapiens
gacttctatagtaag

SEQ ID NO: 1774071 - DNA, 15 bp, Homo sapiens
acttctatagtaagt

SEQ ID NO: 1774072 - DNA, 15 bp, Homo sapiens
cttctatagtaagtt

SEQ ID NO: 1774073 - DNA, 15 bp, Homo sapiens
ttctatagtaagttt

SEQ ID NO: 1774074 - DNA, 15 bp, Homo sapiens
tctatagtaagtttt

SEQ ID NO: 1774075 - DNA, 15 bp, Homo sapiens
ctatagtaagttttt

SEQ ID NO: 1774076 - DNA, 15 bp, Homo sapiens
tatagtaagtttttc

SEQ ID NO: 1774077 - DNA, 15 bp, Homo sapiens
atagtaagtttttct

SEQ ID NO: 1774078 - DNA, 15 bp, Homo sapiens
tagtaagtttttctt

SEQ ID NO: 1774079 - DNA, 15 bp, Homo sapiens
agtaagtttttcttt

SEQ ID NO: 1774080 - DNA, 15 bp, Homo sapiens
gtaagtttttctttc

SEQ ID NO: 1774081 - DNA, 15 bp, Homo sapiens
taagtttttctttca

SEQ ID NO: 1774082 - DNA, 15 bp, Homo sapiens
aagtttttctttcac

SEQ ID NO: 1774083 - DNA, 15 bp, Homo sapiens
agtttttctttcaca

SEQ ID NO: 1774084 - DNA, 15 bp, Homo sapiens
gtttttctttcacat

SEQ ID NO: 1774085 - DNA, 15 bp, Homo sapiens
tttttctttcacatt

SEQ ID NO: 1774086 - DNA, 15 bp, Homo sapiens
ttttctttcacattc

SEQ ID NO: 1774087 - DNA, 15 bp, Homo sapiens
tttctttcacattcc

SEQ ID NO: 1774088 - DNA, 15 bp, Homo sapiens
ttctttcacattccc

SEQ ID NO: 1774089 - DNA, 15 bp, Homo sapiens
tctttcacattcccc

SEQ ID NO: 1774090 - DNA, 15 bp, Homo sapiens
ctttcacattcccca

SEQ ID NO: 1774091 - DNA, 15 bp, Homo sapiens
tttcacattccccat

SEQ ID NO: 1774092 - DNA, 15 bp, Homo sapiens
ttcacattccccatc

SEQ ID NO: 1774093 - DNA, 15 bp, Homo sapiens
tcacattccccatca

SEQ ID NO: 1774094 - DNA, 15 bp, Homo sapiens
cacattccccatcat

SEQ ID NO: 1774095 - DNA, 15 bp, Homo sapiens
acattccccatcatg

SEQ ID NO: 1774096 - DNA, 15 bp, Homo sapiens
cattccccatcatga

SEQ ID NO: 1774097 - DNA, 15 bp, Homo sapiens
attccccatcatgaa

SEQ ID NO: 1774098 - DNA, 15 bp, Homo sapiens
ttccccatcatgaat

SEQ ID NO: 1774099 - DNA, 15 bp, Homo sapiens
tccccatcatgaatg

SEQ ID NO: 1774100 - DNA, 15 bp, Homo sapiens
ccccatcatgaatgt

SEQ ID NO: 1774101 - DNA, 15 bp, Homo sapiens
cccatcatgaatgtt

SEQ ID NO: 1774102 - DNA, 15 bp, Homo sapiens
ccatcatgaatgttt

SEQ ID NO: 1774103 - DNA, 15 bp, Homo sapiens
catcatgaatgtttt

SEQ ID NO: 1774104 - DNA, 15 bp, Homo sapiens
atcatgaatgttttt

SEQ ID NO: 1774105 - DNA, 15 bp, Homo sapiens
tcatgaatgtttttt

SEQ ID NO: 1774106 - DNA, 15 bp, Homo sapiens
catgaatgtttttta

SEQ ID NO: 1774107 - DNA, 15 bp, Homo sapiens
atgaatgttttttaa

SEQ ID NO: 1774108 - DNA, 15 bp, Homo sapiens
tgaatgttttttaaa

SEQ ID NO: 1774109 - DNA, 15 bp, Homo sapiens
gaatgttttttaaac

SEQ ID NO: 1774110 - DNA, 15 bp, Homo sapiens
aatgttttttaaact

SEQ ID NO: 1774111 - DNA, 15 bp, Homo sapiens
atgttttttaaactt

SEQ ID NO: 1774112 - DNA, 15 bp, Homo sapiens
tgttttttaaacttt

SEQ ID NO: 1774113 - DNA, 15 bp, Homo sapiens
gttttttaaactttc

SEQ ID NO: 1774114 - DNA, 15 bp, Homo sapiens
ttttttaaactttct

SEQ ID NO: 1774115 - DNA, 15 bp, Homo sapiens
tttttaaactttctc

SEQ ID NO: 1774116 - DNA, 15 bp, Homo sapiens
ttttaaactttctca

SEQ ID NO: 1774117 - DNA, 15 bp, Homo sapiens
tttaaactttctcat

SEQ ID NO: 1774118 - DNA, 15 bp, Homo sapiens
ttaaactttctcatc

SEQ ID NO: 1774119 - DNA, 15 bp, Homo sapiens
taaactttctcatct

SEQ ID NO: 1774120 - DNA, 15 bp, Homo sapiens
aaactttctcatctc

SEQ ID NO: 1774121 - DNA, 15 bp, Homo sapiens
aactttctcatctca

SEQ ID NO: 1774122 - DNA, 15 bp, Homo sapiens
actttctcatctcag

SEQ ID NO: 1774123 - DNA, 15 bp, Homo sapiens
ctttctcatctcaga

SEQ ID NO: 1774124 - DNA, 15 bp, Homo sapiens
tttctcatctcagac

SEQ ID NO: 1774125 - DNA, 15 bp, Homo sapiens
ttctcatctcagact

SEQ ID NO: 1774126 - DNA, 15 bp, Homo sapiens
tctcatctcagactt

SEQ ID NO: 1774127 - DNA, 15 bp, Homo sapiens
ctcatctcagacttc

SEQ ID NO: 1774128 - DNA, 15 bp, Homo sapiens
tcatctcagacttct

SEQ ID NO: 1774129 - DNA, 15 bp, Homo sapiens
catctcagacttctg

SEQ ID NO: 1774130 - DNA, 15 bp, Homo sapiens
atctcagacttctgc

SEQ ID NO: 1774131 - DNA, 15 bp, Homo sapiens
tctcagacttctgcc

SEQ ID NO: 1774132 - DNA, 15 bp, Homo sapiens
ctcagacttctgcct

SEQ ID NO: 1774133 - DNA, 15 bp, Homo sapiens
tcagacttctgcctg

SEQ ID NO: 1774134 - DNA, 15 bp, Homo sapiens
cagacttctgcctgg

SEQ ID NO: 1774135 - DNA, 15 bp, Homo sapiens
agacttctgcctgga

SEQ ID NO: 1774136 - DNA, 15 bp, Homo sapiens
gacttctgcctggat

SEQ ID NO: 1774137 - DNA, 15 bp, Homo sapiens
acttctgcctggatg

SEQ ID NO: 1774138 - DNA, 15 bp, Homo sapiens
cttctgcctggatga

SEQ ID NO: 1774139 - DNA, 15 bp, Homo sapiens
ttctgcctggatgac

SEQ ID NO: 1774140 - DNA, 15 bp, Homo sapiens
tctgcctggatgaca

SEQ ID NO: 1774141 - DNA, 15 bp, Homo sapiens
ctgcctggatgacac

SEQ ID NO: 1774142 - DNA, 15 bp, Homo sapiens
tgcctggatgacacc

SEQ ID NO: 1774143 - DNA, 15 bp, Homo sapiens
gcctggatgacacca

SEQ ID NO: 1774144 - DNA, 15 bp, Homo sapiens
cctggatgacaccag

SEQ ID NO: 1774145 - DNA, 15 bp, Homo sapiens
ctggatgacaccagt

SEQ ID NO: 1774146 - DNA, 15 bp, Homo sapiens
tggatgacaccagtc

SEQ ID NO: 1774147 - DNA, 15 bp, Homo sapiens
ggatgacaccagtct

SEQ ID NO: 1774148 - DNA, 15 bp, Homo sapiens
gatgacaccagtcta

SEQ ID NO: 1774149 - DNA, 15 bp, Homo sapiens
atgacaccagtctag

SEQ ID NO: 1774150 - DNA, 15 bp, Homo sapiens
tgacaccagtctagt

SEQ ID NO: 1774151 - DNA, 15 bp, Homo sapiens
gacaccagtctagtg

SEQ ID NO: 1774152 - DNA, 15 bp, Homo sapiens
acaccagtctagtgg

SEQ ID NO: 1774153 - DNA, 15 bp, Homo sapiens
caccagtctagtgga

SEQ ID NO: 1774154 - DNA, 15 bp, Homo sapiens
accagtctagtggat

SEQ ID NO: 1774155 - DNA, 15 bp, Homo sapiens
ccagtctagtggatt

SEQ ID NO: 1774156 - DNA, 15 bp, Homo sapiens
cagtctagtggattt

SEQ ID NO: 1774157 - DNA, 15 bp, Homo sapiens
agtctagtggatttg

SEQ ID NO: 1774158 - DNA, 15 bp, Homo sapiens
gtctagtggatttga

SEQ ID NO: 1774159 - DNA, 15 bp, Homo sapiens
tctagtggatttgat

SEQ ID NO: 1774160 - DNA, 15 bp, Homo sapiens
ctagtggatttgatt

SEQ ID NO: 1774161 - DNA, 15 bp, Homo sapiens
tagtggatttgattt

SEQ ID NO: 1774162 - DNA, 15 bp, Homo sapiens
agtggatttgatttt

SEQ ID NO: 1774163 - DNA, 15 bp, Homo sapiens
gtggatttgattttt

SEQ ID NO: 1774164 - DNA, 15 bp, Homo sapiens
tggatttgatttttg

SEQ ID NO: 1774165 - DNA, 15 bp, Homo sapiens
ggatttgatttttgc

SEQ ID NO: 1774166 - DNA, 15 bp, Homo sapiens
gatttgatttttgct

SEQ ID NO: 1774167 - DNA, 15 bp, Homo sapiens
atttgatttttgctt

SEQ ID NO: 1774168 - DNA, 15 bp, Homo sapiens
tttgatttttgcttt

SEQ ID NO: 1774169 - DNA, 15 bp, Homo sapiens
ttgatttttgctttt

SEQ ID NO: 1774170 - DNA, 15 bp, Homo sapiens
tgatttttgcttttg

SEQ ID NO: 1774171 - DNA, 15 bp, Homo sapiens
gatttttgcttttgt

SEQ ID NO: 1774172 - DNA, 15 bp, Homo sapiens
tttttgcttttgttt

SEQ ID NO: 1774173 - DNA, 15 bp, Homo sapiens
ttttgcttttgtttt

SEQ ID NO: 1774174 - DNA, 15 bp, Homo sapiens
tttgcttttgttttt

SEQ ID NO: 1774175 - DNA, 15 bp, Homo sapiens
ttgcttttgtttttg

SEQ ID NO: 1774176 - DNA, 15 bp, Homo sapiens
tgcttttgtttttgt

SEQ ID NO: 1774177 - DNA, 15 bp, Homo sapiens
gcttttgtttttgtg

SEQ ID NO: 1774178 - DNA, 15 bp, Homo sapiens
cttttgtttttgtgt

SEQ ID NO: 1774179 - DNA, 15 bp, Homo sapiens
ttttgtttttgtgtt

SEQ ID NO: 1774180 - DNA, 15 bp, Homo sapiens
tttgtttttgtgttt

SEQ ID NO: 1774181 - DNA, 15 bp, Homo sapiens
ttgtttttgtgtttt

SEQ ID NO: 1774182 - DNA, 15 bp, Homo sapiens
tgtttttgtgtttta

SEQ ID NO: 1774183 - DNA, 15 bp, Homo sapiens
gtttttgtgttttat

SEQ ID NO: 1774184 - DNA, 15 bp, Homo sapiens
tttttgtgttttata

SEQ ID NO: 1774185 - DNA, 15 bp, Homo sapiens
ttttgtgttttatac

SEQ ID NO: 1774186 - DNA, 15 bp, Homo sapiens
tttgtgttttatact

SEQ ID NO: 1774187 - DNA, 15 bp, Homo sapiens
ttgtgttttatactc

SEQ ID NO: 1774188 - DNA, 15 bp, Homo sapiens
tgtgttttatactct

SEQ ID NO: 1774189 - DNA, 15 bp, Homo sapiens
gtgttttatactctt

SEQ ID NO: 1774190 - DNA, 15 bp, Homo sapiens
tgttttatactcttc

SEQ ID NO: 1774191 - DNA, 15 bp, Homo sapiens
gttttatactcttca

SEQ ID NO: 1774192 - DNA, 15 bp, Homo sapiens
ttttatactcttcaa

SEQ ID NO: 1774193 - DNA, 15 bp, Homo sapiens
tttatactcttcaag

SEQ ID NO: 1774194 - DNA, 15 bp, Homo sapiens
ttatactcttcaagg

SEQ ID NO: 1774195 - DNA, 15 bp, Homo sapiens
tatactcttcaagga

SEQ ID NO: 1774196 - DNA, 15 bp, Homo sapiens
atactcttcaaggaa

SEQ ID NO: 1774197 - DNA, 15 bp, Homo sapiens
tactcttcaaggaat

SEQ ID NO: 1774198 - DNA, 15 bp, Homo sapiens
actcttcaaggaatc

SEQ ID NO: 1774199 - DNA, 15 bp, Homo sapiens
ctcttcaaggaatca

SEQ ID NO: 1774200 - DNA, 15 bp, Homo sapiens
tcttcaaggaatcaa

SEQ ID NO: 1774201 - DNA, 15 bp, Homo sapiens
cttcaaggaatcaat

SEQ ID NO: 1774202 - DNA, 15 bp, Homo sapiens
ttcaaggaatcaatt

SEQ ID NO: 1774203 - DNA, 15 bp, Homo sapiens
tcaaggaatcaattt

SEQ ID NO: 1774204 - DNA, 15 bp, Homo sapiens
caaggaatcaatttg

SEQ ID NO: 1774205 - DNA, 15 bp, Homo sapiens
aaggaatcaatttgg

SEQ ID NO: 1774206 - DNA, 15 bp, Homo sapiens
aggaatcaatttggc

SEQ ID NO: 1774207 - DNA, 15 bp, Homo sapiens
ggaatcaatttggcc

SEQ ID NO: 1774208 - DNA, 15 bp, Homo sapiens
gaatcaatttggccg

SEQ ID NO: 1774209 - DNA, 15 bp, Homo sapiens
aatcaatttggccgg

SEQ ID NO: 1774210 - DNA, 15 bp, Homo sapiens
atcaatttggccggg

SEQ ID NO: 1774211 - DNA, 15 bp, Homo sapiens
tcaatttggccgggt

SEQ ID NO: 1774212 - DNA, 15 bp, Homo sapiens
caatttggccgggtc

SEQ ID NO: 1774213 - DNA, 15 bp, Homo sapiens
aatttggccgggtca

SEQ ID NO: 1774214 - DNA, 15 bp, Homo sapiens
atttggccgggtcaa

SEQ ID NO: 1774215 - DNA, 15 bp, Homo sapiens
tttggccgggtcaat

SEQ ID NO: 1774216 - DNA, 15 bp, Homo sapiens
ttggccgggtcaatg

SEQ ID NO: 1774217 - DNA, 15 bp, Homo sapiens
tggccgggtcaatga

SEQ ID NO: 1774218 - DNA, 15 bp, Homo sapiens
ggccgggtcaatgaa

SEQ ID NO: 1774219 - DNA, 15 bp, Homo sapiens
gccgggtcaatgaac

SEQ ID NO: 1774220 - DNA, 15 bp, Homo sapiens
ccgggtcaatgaact

SEQ ID NO: 1774221 - DNA, 15 bp, Homo sapiens
cgggtcaatgaactt

SEQ ID NO: 1774222 - DNA, 15 bp, Homo sapiens
gggtcaatgaacttg

SEQ ID NO: 1774223 - DNA, 15 bp, Homo sapiens
ggtcaatgaacttgc

SEQ ID NO: 1774224 - DNA, 15 bp, Homo sapiens
gtcaatgaacttgcc

SEQ ID NO: 1774225 - DNA, 15 bp, Homo sapiens
tcaatgaacttgcca

SEQ ID NO: 1774226 - DNA, 15 bp, Homo sapiens
caatgaacttgccag

SEQ ID NO: 1774227 - DNA, 15 bp, Homo sapiens
aatgaacttgccaga

SEQ ID NO: 1774228 - DNA, 15 bp, Homo sapiens
atgaacttgccagag

SEQ ID NO: 1774229 - DNA, 15 bp, Homo sapiens
tgaacttgccagaga

SEQ ID NO: 1774230 - DNA, 15 bp, Homo sapiens
gaacttgccagagat

SEQ ID NO: 1774231 - DNA, 15 bp, Homo sapiens
aacttgccagagatg

SEQ ID NO: 1774232 - DNA, 15 bp, Homo sapiens
acttgccagagatga

SEQ ID NO: 1774233 - DNA, 15 bp, Homo sapiens
cttgccagagatgac

SEQ ID NO: 1774234 - DNA, 15 bp, Homo sapiens
ttgccagagatgact

SEQ ID NO: 1774235 - DNA, 15 bp, Homo sapiens
tgccagagatgacta

SEQ ID NO: 1774236 - DNA, 15 bp, Homo sapiens
gccagagatgactat

SEQ ID NO: 1774237 - DNA, 15 bp, Homo sapiens
ccagagatgactatc

SEQ ID NO: 1774238 - DNA, 15 bp, Homo sapiens
cagagatgactatca

SEQ ID NO: 1774239 - DNA, 15 bp, Homo sapiens
agagatgactatcag

SEQ ID NO: 1774240 - DNA, 15 bp, Homo sapiens
gagatgactatcaga

SEQ ID NO: 1774241 - DNA, 15 bp, Homo sapiens
agatgactatcagaa

SEQ ID NO: 1774242 - DNA, 15 bp, Homo sapiens
gatgactatcagaat

SEQ ID NO: 1774243 - DNA, 15 bp, Homo sapiens
atgactatcagaatg

SEQ ID NO: 1774244 - DNA, 15 bp, Homo sapiens
tgactatcagaatga

SEQ ID NO: 1774245 - DNA, 15 bp, Homo sapiens
gactatcagaatgag

SEQ ID NO: 1774246 - DNA, 15 bp, Homo sapiens
actatcagaatgagg

SEQ ID NO: 1774247 - DNA, 15 bp, Homo sapiens
ctatcagaatgaggt

SEQ ID NO: 1774248 - DNA, 15 bp, Homo sapiens
tatcagaatgaggtc

SEQ ID NO: 1774249 - DNA, 15 bp, Homo sapiens
atcagaatgaggtca

SEQ ID NO: 1774250 - DNA, 15 bp, Homo sapiens
tcagaatgaggtcag

SEQ ID NO: 1774251 - DNA, 15 bp, Homo sapiens
cagaatgaggtcagg

SEQ ID NO: 1774252 - DNA, 15 bp, Homo sapiens
agaatgaggtcaggg

SEQ ID NO: 1774253 - DNA, 15 bp, Homo sapiens
gaatgaggtcaggga

SEQ ID NO: 1774254 - DNA, 15 bp, Homo sapiens
aatgaggtcagggat

SEQ ID NO: 1774255 - DNA, 15 bp, Homo sapiens
atgaggtcagggatc

SEQ ID NO: 1774256 - DNA, 15 bp, Homo sapiens
tgaggtcagggatct

SEQ ID NO: 1774257 - DNA, 15 bp, Homo sapiens
gaggtcagggatctc

SEQ ID NO: 1774258 - DNA, 15 bp, Homo sapiens
aggtcagggatctct

SEQ ID NO: 1774259 - DNA, 15 bp, Homo sapiens
ggtcagggatctctc

SEQ ID NO: 1774260 - DNA, 15 bp, Homo sapiens
gtcagggatctctct

SEQ ID NO: 1774261 - DNA, 15 bp, Homo sapiens
tcagggatctctctc

SEQ ID NO: 1774262 - DNA, 15 bp, Homo sapiens
cagggatctctctca

SEQ ID NO: 1774263 - DNA, 15 bp, Homo sapiens
agggatctctctcaa

SEQ ID NO: 1774264 - DNA, 15 bp, Homo sapiens
gggatctctctcaaa

SEQ ID NO: 1774265 - DNA, 15 bp, Homo sapiens
ggatctctctcaaac

SEQ ID NO: 1774266 - DNA, 15 bp, Homo sapiens
gatctctctcaaaca

SEQ ID NO: 1774267 - DNA, 15 bp, Homo sapiens
atctctctcaaacaa

SEQ ID NO: 1774268 - DNA, 15 bp, Homo sapiens
tctctctcaaacaaa

SEQ ID NO: 1774269 - DNA, 15 bp, Homo sapiens
ctctctcaaacaaac

SEQ ID NO: 1774270 - DNA, 15 bp, Homo sapiens
tctctcaaacaaact

SEQ ID NO: 1774271 - DNA, 15 bp, Homo sapiens
ctctcaaacaaactg

SEQ ID NO: 1774272 - DNA, 15 bp, Homo sapiens
tctcaaacaaactgg

SEQ ID NO: 1774273 - DNA, 15 bp, Homo sapiens
ctcaaacaaactggc

SEQ ID NO: 1774274 - DNA, 15 bp, Homo sapiens
tcaaacaaactggcg

SEQ ID NO: 1774275 - DNA, 15 bp, Homo sapiens
caaacaaactggcgc

SEQ ID NO: 1774276 - DNA, 15 bp, Homo sapiens
aaacaaactggcgca

SEQ ID NO: 1774277 - DNA, 15 bp, Homo sapiens
aacaaactggcgcac

SEQ ID NO: 1774278 - DNA, 15 bp, Homo sapiens
acaaactggcgcact

SEQ ID NO: 1774279 - DNA, 15 bp, Homo sapiens
caaactggcgcactg

SEQ ID NO: 1774280 - DNA, 15 bp, Homo sapiens
aaactggcgcactgc

SEQ ID NO: 1774281 - DNA, 15 bp, Homo sapiens
aactggcgcactgct

SEQ ID NO: 1774282 - DNA, 15 bp, Homo sapiens
actggcgcactgcta

SEQ ID NO: 1774283 - DNA, 15 bp, Homo sapiens
ctggcgcactgctac

SEQ ID NO: 1774284 - DNA, 15 bp, Homo sapiens
tggcgcactgctact

SEQ ID NO: 1774285 - DNA, 15 bp, Homo sapiens
ggcgcactgctacta

SEQ ID NO: 1774286 - DNA, 15 bp, Homo sapiens
gcgcactgctactac

SEQ ID NO: 1774287 - DNA, 15 bp, Homo sapiens
cgcactgctactact

SEQ ID NO: 1774288 - DNA, 15 bp, Homo sapiens
gcactgctactactt

SEQ ID NO: 1774289 - DNA, 15 bp, Homo sapiens
cactgctactacttt

SEQ ID NO: 1774290 - DNA, 15 bp, Homo sapiens
actgctactacttta

SEQ ID NO: 1774291 - DNA, 15 bp, Homo sapiens
ctgctactactttat

SEQ ID NO: 1774292 - DNA, 15 bp, Homo sapiens
tgctactactttatc

SEQ ID NO: 1774293 - DNA, 15 bp, Homo sapiens
gctactactttatca

SEQ ID NO: 1774294 - DNA, 15 bp, Homo sapiens
ctactactttatcag

SEQ ID NO: 1774295 - DNA, 15 bp, Homo sapiens
tactactttatcaga

SEQ ID NO: 1774296 - DNA, 15 bp, Homo sapiens
actactttatcagag

SEQ ID NO: 1774297 - DNA, 15 bp, Homo sapiens
ctactttatcagagc

SEQ ID NO: 1774298 - DNA, 15 bp, Homo sapiens
tactttatcagagca

SEQ ID NO: 1774299 - DNA, 15 bp, Homo sapiens
actttatcagagcat

SEQ ID NO: 1774300 - DNA, 15 bp, Homo sapiens
ctttatcagagcata

SEQ ID NO: 1774301 - DNA, 15 bp, Homo sapiens
tttatcagagcataa

SEQ ID NO: 1774302 - DNA, 15 bp, Homo sapiens
ttatcagagcataat

SEQ ID NO: 1774303 - DNA, 15 bp, Homo sapiens
tatcagagcataatt

SEQ ID NO: 1774304 - DNA, 15 bp, Homo sapiens
atcagagcataatta

SEQ ID NO: 1774305 - DNA, 15 bp, Homo sapiens
tcagagcataattag

SEQ ID NO: 1774306 - DNA, 15 bp, Homo sapiens
cagagcataattagc

SEQ ID NO: 1774307 - DNA, 15 bp, Homo sapiens
agagcataattagct

SEQ ID NO: 1774308 - DNA, 15 bp, Homo sapiens
gagcataattagctg

SEQ ID NO: 1774309 - DNA, 15 bp, Homo sapiens
agcataattagctga

SEQ ID NO: 1774310 - DNA, 15 bp, Homo sapiens
gcataattagctgag

SEQ ID NO: 1774311 - DNA, 15 bp, Homo sapiens
cataattagctgagc

SEQ ID NO: 1774312 - DNA, 15 bp, Homo sapiens
ataattagctgagct

SEQ ID NO: 1774313 - DNA, 15 bp, Homo sapiens
taattagctgagctt

SEQ ID NO: 1774314 - DNA, 15 bp, Homo sapiens
aattagctgagcttc

SEQ ID NO: 1774315 - DNA, 15 bp, Homo sapiens
attagctgagcttct

SEQ ID NO: 1774316 - DNA, 15 bp, Homo sapiens
ttagctgagcttctg

SEQ ID NO: 1774317 - DNA, 15 bp, Homo sapiens
tagctgagcttctga

SEQ ID NO: 1774318 - DNA, 15 bp, Homo sapiens
agctgagcttctgaa

SEQ ID NO: 1774319 - DNA, 15 bp, Homo sapiens
gctgagcttctgaat

SEQ ID NO: 1774320 - DNA, 15 bp, Homo sapiens
ctgagcttctgaatt

SEQ ID NO: 1774321 - DNA, 15 bp, Homo sapiens
tgagcttctgaattc

SEQ ID NO: 1774322 - DNA, 15 bp, Homo sapiens
gagcttctgaattct

SEQ ID NO: 1774323 - DNA, 15 bp, Homo sapiens
agcttctgaattctc

SEQ ID NO: 1774324 - DNA, 15 bp, Homo sapiens
gcttctgaattctcc

SEQ ID NO: 1774325 - DNA, 15 bp, Homo sapiens
cttctgaattctccc

SEQ ID NO: 1774326 - DNA, 15 bp, Homo sapiens
ttctgaattctccca

SEQ ID NO: 1774327 - DNA, 15 bp, Homo sapiens
tctgaattctcccag

SEQ ID NO: 1774328 - DNA, 15 bp, Homo sapiens
ctgaattctcccaga

SEQ ID NO: 1774329 - DNA, 15 bp, Homo sapiens
tgaattctcccagac

SEQ ID NO: 1774330 - DNA, 15 bp, Homo sapiens
gaattctcccagaca

SEQ ID NO: 1774331 - DNA, 15 bp, Homo sapiens
aattctcccagacaa

SEQ ID NO: 1774332 - DNA, 15 bp, Homo sapiens
attctcccagacaat

SEQ ID NO: 1774333 - DNA, 15 bp, Homo sapiens
ttctcccagacaatc

SEQ ID NO: 1774334 - DNA, 15 bp, Homo sapiens
tctcccagacaatcc

SEQ ID NO: 1774335 - DNA, 15 bp, Homo sapiens
ctcccagacaatccc

SEQ ID NO: 1774336 - DNA, 15 bp, Homo sapiens
tcccagacaatccca

SEQ ID NO: 1774337 - DNA, 15 bp, Homo sapiens
cccagacaatcccaa

SEQ ID NO: 1774338 - DNA, 15 bp, Homo sapiens
ccagacaatcccaat

SEQ ID NO: 1774339 - DNA, 15 bp, Homo sapiens
cagacaatcccaatg

SEQ ID NO: 1774340 - DNA, 15 bp, Homo sapiens
agacaatcccaatgg

SEQ ID NO: 1774341 - DNA, 15 bp, Homo sapiens
gacaatcccaatggg

SEQ ID NO: 1774342 - DNA, 15 bp, Homo sapiens
acaatcccaatggga

SEQ ID NO: 1774343 - DNA, 15 bp, Homo sapiens
caatcccaatgggat

SEQ ID NO: 1774344 - DNA, 15 bp, Homo sapiens
aatcccaatgggatc

SEQ ID NO: 1774345 - DNA, 15 bp, Homo sapiens
atcccaatgggatcc

SEQ ID NO: 1774346 - DNA, 15 bp, Homo sapiens
tcccaatgggatcct

SEQ ID NO: 1774347 - DNA, 15 bp, Homo sapiens
cccaatgggatcctc

SEQ ID NO: 1774348 - DNA, 15 bp, Homo sapiens
ccaatgggatcctca

SEQ ID NO: 1774349 - DNA, 15 bp, Homo sapiens
caatgggatcctcaa

SEQ ID NO: 1774350 - DNA, 15 bp, Homo sapiens
aatgggatcctcaag

SEQ ID NO: 1774351 - DNA, 15 bp, Homo sapiens
atgggatcctcaagg

SEQ ID NO: 1774352 - DNA, 15 bp, Homo sapiens
tgggatcctcaaggc

SEQ ID NO: 1774353 - DNA, 15 bp, Homo sapiens
gggatcctcaaggcc

SEQ ID NO: 1774354 - DNA, 15 bp, Homo sapiens
ggatcctcaaggccc

SEQ ID NO: 1774355 - DNA, 15 bp, Homo sapiens
gatcctcaaggccct

SEQ ID NO: 1774356 - DNA, 15 bp, Homo sapiens
atcctcaaggccctg

SEQ ID NO: 1774357 - DNA, 15 bp, Homo sapiens
tcctcaaggccctgc

SEQ ID NO: 1774358 - DNA, 15 bp, Homo sapiens
cctcaaggccctgct

SEQ ID NO: 1774359 - DNA, 15 bp, Homo sapiens
ctcaaggccctgctg

SEQ ID NO: 1774360 - DNA, 15 bp, Homo sapiens
tcaaggccctgctgg

SEQ ID NO: 1774361 - DNA, 15 bp, Homo sapiens
caaggccctgctggg

SEQ ID NO: 1774362 - DNA, 15 bp, Homo sapiens
aaggccctgctggga

SEQ ID NO: 1774363 - DNA, 15 bp, Homo sapiens
aggccctgctgggat

SEQ ID NO: 1774364 - DNA, 15 bp, Homo sapiens
ggccctgctgggatg

SEQ ID NO: 1774365 - DNA, 15 bp, Homo sapiens
gccctgctgggatgc

SEQ ID NO: 1774366 - DNA, 15 bp, Homo sapiens
ccctgctgggatgct

SEQ ID NO: 1774367 - DNA, 15 bp, Homo sapiens
cctgctgggatgctt

SEQ ID NO: 1774368 - DNA, 15 bp, Homo sapiens
ctgctgggatgcttt

SEQ ID NO: 1774369 - DNA, 15 bp, Homo sapiens
tgctgggatgcttta

SEQ ID NO: 1774370 - DNA, 15 bp, Homo sapiens
gctgggatgctttaa

SEQ ID NO: 1774371 - DNA, 15 bp, Homo sapiens
ctgggatgctttaaa

SEQ ID NO: 1774372 - DNA, 15 bp, Homo sapiens
tgggatgctttaaag

SEQ ID NO: 1774373 - DNA, 15 bp, Homo sapiens
gggatgctttaaagt

SEQ ID NO: 1774374 - DNA, 15 bp, Homo sapiens
ggatgctttaaagta

SEQ ID NO: 1774375 - DNA, 15 bp, Homo sapiens
gatgctttaaagtat

SEQ ID NO: 1774376 - DNA, 15 bp, Homo sapiens
atgctttaaagtatt

SEQ ID NO: 1774377 - DNA, 15 bp, Homo sapiens
tgctttaaagtattc

SEQ ID NO: 1774378 - DNA, 15 bp, Homo sapiens
gctttaaagtattct

SEQ ID NO: 1774379 - DNA, 15 bp, Homo sapiens
ctttaaagtattctg

SEQ ID NO: 1774380 - DNA, 15 bp, Homo sapiens
tttaaagtattctga

SEQ ID NO: 1774381 - DNA, 15 bp, Homo sapiens
ttaaagtattctgat

SEQ ID NO: 1774382 - DNA, 15 bp, Homo sapiens
taaagtattctgatt

SEQ ID NO: 1774383 - DNA, 15 bp, Homo sapiens
aaagtattctgattt

SEQ ID NO: 1774384 - DNA, 15 bp, Homo sapiens
aagtattctgatttt

SEQ ID NO: 1774385 - DNA, 15 bp, Homo sapiens
agtattctgatttta

SEQ ID NO: 1774386 - DNA, 15 bp, Homo sapiens
tattctgattttata

SEQ ID NO: 1774387 - DNA, 15 bp, Homo sapiens
attctgattttatag

SEQ ID NO: 1774388 - DNA, 15 bp, Homo sapiens
ttctgattttatagg

SEQ ID NO: 1774389 - DNA, 15 bp, Homo sapiens
tctgattttataggt

SEQ ID NO: 1774390 - DNA, 15 bp, Homo sapiens
ctgattttataggtg

SEQ ID NO: 1774391 - DNA, 15 bp, Homo sapiens
tgattttataggtgg

SEQ ID NO: 1774392 - DNA, 15 bp, Homo sapiens
gattttataggtggg

SEQ ID NO: 1774393 - DNA, 15 bp, Homo sapiens
attttataggtgggc

SEQ ID NO: 1774394 - DNA, 15 bp, Homo sapiens
ttttataggtgggca

SEQ ID NO: 1774395 - DNA, 15 bp, Homo sapiens
tttataggtgggcat

SEQ ID NO: 1774396 - DNA, 15 bp, Homo sapiens
ttataggtgggcatt

SEQ ID NO: 1774397 - DNA, 15 bp, Homo sapiens
tataggtgggcatta

SEQ ID NO: 1774398 - DNA, 15 bp, Homo sapiens
ataggtgggcattaa

SEQ ID NO: 1774399 - DNA, 15 bp, Homo sapiens
taggtgggcattaac

SEQ ID NO: 1774400 - DNA, 15 bp, Homo sapiens
aggtgggcattaacc

SEQ ID NO: 1774401 - DNA, 15 bp, Homo sapiens
ggtgggcattaacca

SEQ ID NO: 1774402 - DNA, 15 bp, Homo sapiens
gtgggcattaaccac

SEQ ID NO: 1774403 - DNA, 15 bp, Homo sapiens
tgggcattaaccaca

SEQ ID NO: 1774404 - DNA, 15 bp, Homo sapiens
gggcattaaccacaa

SEQ ID NO: 1774405 - DNA, 15 bp, Homo sapiens
ggcattaaccacaaa

SEQ ID NO: 1774406 - DNA, 15 bp, Homo sapiens
gcattaaccacaaat

SEQ ID NO: 1774407 - DNA, 15 bp, Homo sapiens
cattaaccacaaatt

SEQ ID NO: 1774408 - DNA, 15 bp, Homo sapiens
attaaccacaaattt

SEQ ID NO: 1774409 - DNA, 15 bp, Homo sapiens
ttaaccacaaatttt

SEQ ID NO: 1774410 - DNA, 15 bp, Homo sapiens
taaccacaaatttta

SEQ ID NO: 1774411 - DNA, 15 bp, Homo sapiens
aaccacaaattttat

SEQ ID NO: 1774412 - DNA, 15 bp, Homo sapiens
accacaaattttatc

SEQ ID NO: 1774413 - DNA, 15 bp, Homo sapiens
ccacaaattttatct

SEQ ID NO: 1774414 - DNA, 15 bp, Homo sapiens
cacaaattttatctt

SEQ ID NO: 1774415 - DNA, 15 bp, Homo sapiens
acaaattttatcttg

SEQ ID NO: 1774416 - DNA, 15 bp, Homo sapiens
caaattttatcttga

SEQ ID NO: 1774417 - DNA, 15 bp, Homo sapiens
aaattttatcttgat

SEQ ID NO: 1774418 - DNA, 15 bp, Homo sapiens
aattttatcttgatg

SEQ ID NO: 1774419 - DNA, 15 bp, Homo sapiens
attttatcttgatgg

SEQ ID NO: 1774420 - DNA, 15 bp, Homo sapiens
ttttatcttgatggg

SEQ ID NO: 1774421 - DNA, 15 bp, Homo sapiens
tttatcttgatggga

SEQ ID NO: 1774422 - DNA, 15 bp, Homo sapiens
ttatcttgatgggat

SEQ ID NO: 1774423 - DNA, 15 bp, Homo sapiens
tatcttgatgggatg

SEQ ID NO: 1774424 - DNA, 15 bp, Homo sapiens
atcttgatgggatga

SEQ ID NO: 1774425 - DNA, 15 bp, Homo sapiens
tcttgatgggatgag

SEQ ID NO: 1774426 - DNA, 15 bp, Homo sapiens
cttgatgggatgagg

SEQ ID NO: 1774427 - DNA, 15 bp, Homo sapiens
ttgatgggatgaggt

SEQ ID NO: 1774428 - DNA, 15 bp, Homo sapiens
tgatgggatgaggta

SEQ ID NO: 1774429 - DNA, 15 bp, Homo sapiens
gatgggatgaggtat

SEQ ID NO: 1774430 - DNA, 15 bp, Homo sapiens
atgggatgaggtatt

SEQ ID NO: 1774431 - DNA, 15 bp, Homo sapiens
tgggatgaggtatta

SEQ ID NO: 1774432 - DNA, 15 bp, Homo sapiens
gggatgaggtattat

SEQ ID NO: 1774433 - DNA, 15 bp, Homo sapiens
ggatgaggtattatg

SEQ ID NO: 1774434 - DNA, 15 bp, Homo sapiens
gatgaggtattatgg

SEQ ID NO: 1774435 - DNA, 15 bp, Homo sapiens
atgaggtattatggc

SEQ ID NO: 1774436 - DNA, 15 bp, Homo sapiens
tgaggtattatggcc

SEQ ID NO: 1774437 - DNA, 15 bp, Homo sapiens
gaggtattatggcca

SEQ ID NO: 1774438 - DNA, 15 bp, Homo sapiens
aggtattatggccag

SEQ ID NO: 1774439 - DNA, 15 bp, Homo sapiens
ggtattatggccagt

SEQ ID NO: 1774440 - DNA, 15 bp, Homo sapiens
gtattatggccagta

SEQ ID NO: 1774441 - DNA, 15 bp, Homo sapiens
tattatggccagtac

SEQ ID NO: 1774442 - DNA, 15 bp, Homo sapiens
attatggccagtact

SEQ ID NO: 1774443 - DNA, 15 bp, Homo sapiens
ttatggccagtactc

SEQ ID NO: 1774444 - DNA, 15 bp, Homo sapiens
tatggccagtactcc

SEQ ID NO: 1774445 - DNA, 15 bp, Homo sapiens
atggccagtactcct

SEQ ID NO: 1774446 - DNA, 15 bp, Homo sapiens
tggccagtactcctg

SEQ ID NO: 1774447 - DNA, 15 bp, Homo sapiens
ggccagtactcctgt

SEQ ID NO: 1774448 - DNA, 15 bp, Homo sapiens
gccagtactcctgta

SEQ ID NO: 1774449 - DNA, 15 bp, Homo sapiens
ccagtactcctgtac

SEQ ID NO: 1774450 - DNA, 15 bp, Homo sapiens
cagtactcctgtacc

SEQ ID NO: 1774451 - DNA, 15 bp, Homo sapiens
agtactcctgtacca

SEQ ID NO: 1774452 - DNA, 15 bp, Homo sapiens
gtactcctgtaccaa

SEQ ID NO: 1774453 - DNA, 15 bp, Homo sapiens
tactcctgtaccaat

SEQ ID NO: 1774454 - DNA, 15 bp, Homo sapiens
actcctgtaccaatt

SEQ ID NO: 1774455 - DNA, 15 bp, Homo sapiens
ctcctgtaccaattg

SEQ ID NO: 1774456 - DNA, 15 bp, Homo sapiens
tcctgtaccaattgt

SEQ ID NO: 1774457 - DNA, 15 bp, Homo sapiens
cctgtaccaattgta

SEQ ID NO: 1774458 - DNA, 15 bp, Homo sapiens
ctgtaccaattgtat

SEQ ID NO: 1774459 - DNA, 15 bp, Homo sapiens
tgtaccaattgtata

SEQ ID NO: 1774460 - DNA, 15 bp, Homo sapiens
gtaccaattgtatat

SEQ ID NO: 1774461 - DNA, 15 bp, Homo sapiens
taccaattgtatatc

SEQ ID NO: 1774462 - DNA, 15 bp, Homo sapiens
accaattgtatatcc

SEQ ID NO: 1774463 - DNA, 15 bp, Homo sapiens
ccaattgtatatcca

SEQ ID NO: 1774464 - DNA, 15 bp, Homo sapiens
caattgtatatccat

SEQ ID NO: 1774465 - DNA, 15 bp, Homo sapiens
aattgtatatccatg

SEQ ID NO: 1774466 - DNA, 15 bp, Homo sapiens
attgtatatccatgt

SEQ ID NO: 1774467 - DNA, 15 bp, Homo sapiens
ttgtatatccatgta

SEQ ID NO: 1774468 - DNA, 15 bp, Homo sapiens
tgtatatccatgtac

SEQ ID NO: 1774469 - DNA, 15 bp, Homo sapiens
gtatatccatgtaca

SEQ ID NO: 1774470 - DNA, 15 bp, Homo sapiens
tatatccatgtacat

SEQ ID NO: 1774471 - DNA, 15 bp, Homo sapiens
atatccatgtacata

SEQ ID NO: 1774472 - DNA, 15 bp, Homo sapiens
tatccatgtacatac

SEQ ID NO: 1774473 - DNA, 15 bp, Homo sapiens
atccatgtacataca

SEQ ID NO: 1774474 - DNA, 15 bp, Homo sapiens
tccatgtacatacat

SEQ ID NO: 1774475 - DNA, 15 bp, Homo sapiens
ccatgtacatacatg

SEQ ID NO: 1774476 - DNA, 15 bp, Homo sapiens
catgtacatacatgc

SEQ ID NO: 1774477 - DNA, 15 bp, Homo sapiens
atgtacatacatgca

SEQ ID NO: 1774478 - DNA, 15 bp, Homo sapiens
tgtacatacatgcat

SEQ ID NO: 1774479 - DNA, 15 bp, Homo sapiens
gtacatacatgcatt

SEQ ID NO: 1774480 - DNA, 15 bp, Homo sapiens
tacatacatgcattt

SEQ ID NO: 1774481 - DNA, 15 bp, Homo sapiens
acatacatgcattta

SEQ ID NO: 1774482 - DNA, 15 bp, Homo sapiens
catacatgcatttaa

SEQ ID NO: 1774483 - DNA, 15 bp, Homo sapiens
atacatgcatttaaa

SEQ ID NO: 1774484 - DNA, 15 bp, Homo sapiens
tacatgcatttaaaa

SEQ ID NO: 1774485 - DNA, 15 bp, Homo sapiens
acatgcatttaaaaa

SEQ ID NO: 1774486 - DNA, 15 bp, Homo sapiens
catgcatttaaaaac

SEQ ID NO: 1774487 - DNA, 15 bp, Homo sapiens
atgcatttaaaaaca

SEQ ID NO: 1774488 - DNA, 15 bp, Homo sapiens
tgcatttaaaaacac

SEQ ID NO: 1774489 - DNA, 15 bp, Homo sapiens
gcatttaaaaacaca

SEQ ID NO: 1774490 - DNA, 15 bp, Homo sapiens
catttaaaaacacat

SEQ ID NO: 1774491 - DNA, 15 bp, Homo sapiens
atttaaaaacacatg

SEQ ID NO: 1774492 - DNA, 15 bp, Homo sapiens
tttaaaaacacatgg

SEQ ID NO: 1774493 - DNA, 15 bp, Homo sapiens
ttaaaaacacatggg

SEQ ID NO: 1774494 - DNA, 15 bp, Homo sapiens
taaaaacacatgggt

SEQ ID NO: 1774495 - DNA, 15 bp, Homo sapiens
aaaaacacatgggtg

SEQ ID NO: 1774496 - DNA, 15 bp, Homo sapiens
aaaacacatgggtga

SEQ ID NO: 1774497 - DNA, 15 bp, Homo sapiens
aaacacatgggtgac

SEQ ID NO: 1774498 - DNA, 15 bp, Homo sapiens
aacacatgggtgaca

SEQ ID NO: 1774499 - DNA, 15 bp, Homo sapiens
acacatgggtgacat

SEQ ID NO: 1774500 - DNA, 15 bp, Homo sapiens
cacatgggtgacatc

SEQ ID NO: 1774501 - DNA, 15 bp, Homo sapiens
acatgggtgacatct

SEQ ID NO: 1774502 - DNA, 15 bp, Homo sapiens
catgggtgacatctt

SEQ ID NO: 1774503 - DNA, 15 bp, Homo sapiens
atgggtgacatcttt

SEQ ID NO: 1774504 - DNA, 15 bp, Homo sapiens
tgggtgacatctttt

SEQ ID NO: 1774505 - DNA, 15 bp, Homo sapiens
gggtgacatcttttg

SEQ ID NO: 1774506 - DNA, 15 bp, Homo sapiens
ggtgacatcttttgg

SEQ ID NO: 1774507 - DNA, 15 bp, Homo sapiens
gtgacatcttttggg

SEQ ID NO: 1774508 - DNA, 15 bp, Homo sapiens
tgacatcttttggga

SEQ ID NO: 1774509 - DNA, 15 bp, Homo sapiens
gacatcttttgggaa

SEQ ID NO: 1774510 - DNA, 15 bp, Homo sapiens
acatcttttgggaaa

SEQ ID NO: 1774511 - DNA, 15 bp, Homo sapiens
catcttttgggaaaa

SEQ ID NO: 1774512 - DNA, 15 bp, Homo sapiens
atcttttgggaaaaa

SEQ ID NO: 1774513 - DNA, 15 bp, Homo sapiens
tcttttgggaaaaac

SEQ ID NO: 1774514 - DNA, 15 bp, Homo sapiens
cttttgggaaaaact

SEQ ID NO: 1774515 - DNA, 15 bp, Homo sapiens
ttttgggaaaaactt

SEQ ID NO: 1774516 - DNA, 15 bp, Homo sapiens
tttgggaaaaacttt

SEQ ID NO: 1774517 - DNA, 15 bp, Homo sapiens
ttgggaaaaactttt

SEQ ID NO: 1774518 - DNA, 15 bp, Homo sapiens
tgggaaaaactttta

SEQ ID NO: 1774519 - DNA, 15 bp, Homo sapiens
gggaaaaacttttag

SEQ ID NO: 1774520 - DNA, 15 bp, Homo sapiens
ggaaaaacttttagt

SEQ ID NO: 1774521 - DNA, 15 bp, Homo sapiens
gaaaaacttttagtg

SEQ ID NO: 1774522 - DNA, 15 bp, Homo sapiens
aaaaacttttagtgg

SEQ ID NO: 1774523 - DNA, 15 bp, Homo sapiens
aaaacttttagtgga

SEQ ID NO: 1774524 - DNA, 15 bp, Homo sapiens
aaacttttagtggac

SEQ ID NO: 1774525 - DNA, 15 bp, Homo sapiens
aacttttagtggacc

SEQ ID NO: 1774526 - DNA, 15 bp, Homo sapiens
acttttagtggacct

SEQ ID NO: 1774527 - DNA, 15 bp, Homo sapiens
cttttagtggacctg

SEQ ID NO: 1774528 - DNA, 15 bp, Homo sapiens
ttttagtggacctga

SEQ ID NO: 1774529 - DNA, 15 bp, Homo sapiens
tttagtggacctgac

SEQ ID NO: 1774530 - DNA, 15 bp, Homo sapiens
ttagtggacctgacg

SEQ ID NO: 1774531 - DNA, 15 bp, Homo sapiens
tagtggacctgacgt

SEQ ID NO: 1774532 - DNA, 15 bp, Homo sapiens
agtggacctgacgtc

SEQ ID NO: 1774533 - DNA, 15 bp, Homo sapiens
gtggacctgacgtca

SEQ ID NO: 1774534 - DNA, 15 bp, Homo sapiens
tggacctgacgtcag

SEQ ID NO: 1774535 - DNA, 15 bp, Homo sapiens
ggacctgacgtcagt

SEQ ID NO: 1774536 - DNA, 15 bp, Homo sapiens
gacctgacgtcagtg

SEQ ID NO: 1774537 - DNA, 15 bp, Homo sapiens
acctgacgtcagtgg

SEQ ID NO: 1774538 - DNA, 15 bp, Homo sapiens
cctgacgtcagtgga

SEQ ID NO: 1774539 - DNA, 15 bp, Homo sapiens
ctgacgtcagtggat

SEQ ID NO: 1774540 - DNA, 15 bp, Homo sapiens
tgacgtcagtggata

SEQ ID NO: 1774541 - DNA, 15 bp, Homo sapiens
gacgtcagtggatac

SEQ ID NO: 1774542 - DNA, 15 bp, Homo sapiens
acgtcagtggatacc

SEQ ID NO: 1774543 - DNA, 15 bp, Homo sapiens
cgtcagtggataccc

SEQ ID NO: 1774544 - DNA, 15 bp, Homo sapiens
gtcagtggataccca

SEQ ID NO: 1774545 - DNA, 15 bp, Homo sapiens
tcagtggatacccaa

SEQ ID NO: 1774546 - DNA, 15 bp, Homo sapiens
cagtggatacccaaa

SEQ ID NO: 1774547 - DNA, 15 bp, Homo sapiens
agtggatacccaaag

SEQ ID NO: 1774548 - DNA, 15 bp, Homo sapiens
gtggatacccaaagc

SEQ ID NO: 1774549 - DNA, 15 bp, Homo sapiens
tggatacccaaagca

SEQ ID NO: 1774550 - DNA, 15 bp, Homo sapiens
ggatacccaaagcaa

SEQ ID NO: 1774551 - DNA, 15 bp, Homo sapiens
gatacccaaagcaag

SEQ ID NO: 1774552 - DNA, 15 bp, Homo sapiens
atacccaaagcaagg

SEQ ID NO: 1774553 - DNA, 15 bp, Homo sapiens
tacccaaagcaagga

SEQ ID NO: 1774554 - DNA, 15 bp, Homo sapiens
acccaaagcaaggaa

SEQ ID NO: 1774555 - DNA, 15 bp, Homo sapiens
cccaaagcaaggaac

SEQ ID NO: 1774556 - DNA, 15 bp, Homo sapiens
ccaaagcaaggaacg

SEQ ID NO: 1774557 - DNA, 15 bp, Homo sapiens
caaagcaaggaacgg

SEQ ID NO: 1774558 - DNA, 15 bp, Homo sapiens
aaagcaaggaacggg

SEQ ID NO: 1774559 - DNA, 15 bp, Homo sapiens
aagcaaggaacggga

SEQ ID NO: 1774560 - DNA, 15 bp, Homo sapiens
agcaaggaacgggaa

SEQ ID NO: 1774561 - DNA, 15 bp, Homo sapiens
gcaaggaacgggaaa

SEQ ID NO: 1774562 - DNA, 15 bp, Homo sapiens
caaggaacgggaaat

SEQ ID NO: 1774563 - DNA, 15 bp, Homo sapiens
aaggaacgggaaata

SEQ ID NO: 1774564 - DNA, 15 bp, Homo sapiens
aggaacgggaaatag

SEQ ID NO: 1774565 - DNA, 15 bp, Homo sapiens
ggaacgggaaataga

SEQ ID NO: 1774566 - DNA, 15 bp, Homo sapiens
gaacgggaaatagaa

SEQ ID NO: 1774567 - DNA, 15 bp, Homo sapiens
aacgggaaatagaaa

SEQ ID NO: 1774568 - DNA, 15 bp, Homo sapiens
acgggaaatagaaac

SEQ ID NO: 1774569 - DNA, 15 bp, Homo sapiens
cgggaaatagaaacc

SEQ ID NO: 1774570 - DNA, 15 bp, Homo sapiens
gggaaatagaaacct

SEQ ID NO: 1774571 - DNA, 15 bp, Homo sapiens
ggaaatagaaacctc

SEQ ID NO: 1774572 - DNA, 15 bp, Homo sapiens
gaaatagaaacctcc

SEQ ID NO: 1774573 - DNA, 15 bp, Homo sapiens
aaatagaaacctcca

SEQ ID NO: 1774574 - DNA, 15 bp, Homo sapiens
aatagaaacctccaa

SEQ ID NO: 1774575 - DNA, 15 bp, Homo sapiens
atagaaacctccaag

SEQ ID NO: 1774576 - DNA, 15 bp, Homo sapiens
tagaaacctccaaga

SEQ ID NO: 1774577 - DNA, 15 bp, Homo sapiens
agaaacctccaagag

SEQ ID NO: 1774578 - DNA, 15 bp, Homo sapiens
gaaacctccaagaga

SEQ ID NO: 1774579 - DNA, 15 bp, Homo sapiens
aaacctccaagagag

SEQ ID NO: 1774580 - DNA, 15 bp, Homo sapiens
aacctccaagagagt

SEQ ID NO: 1774581 - DNA, 15 bp, Homo sapiens
acctccaagagagtc

SEQ ID NO: 1774582 - DNA, 15 bp, Homo sapiens
cctccaagagagtcc

SEQ ID NO: 1774583 - DNA, 15 bp, Homo sapiens
ctccaagagagtcca

SEQ ID NO: 1774584 - DNA, 15 bp, Homo sapiens
tccaagagagtccag

SEQ ID NO: 1774585 - DNA, 15 bp, Homo sapiens
ccaagagagtccaga

SEQ ID NO: 1774586 - DNA, 15 bp, Homo sapiens
caagagagtccagat

SEQ ID NO: 1774587 - DNA, 15 bp, Homo sapiens
aagagagtccagatg

SEQ ID NO: 1774588 - DNA, 15 bp, Homo sapiens
agagagtccagatga

SEQ ID NO: 1774589 - DNA, 15 bp, Homo sapiens
gagagtccagatgat

SEQ ID NO: 1774590 - DNA, 15 bp, Homo sapiens
agagtccagatgata

SEQ ID NO: 1774591 - DNA, 15 bp, Homo sapiens
gagtccagatgatag

SEQ ID NO: 1774592 - DNA, 15 bp, Homo sapiens
agtccagatgataga

SEQ ID NO: 1774593 - DNA, 15 bp, Homo sapiens
gtccagatgatagaa

SEQ ID NO: 1774594 - DNA, 15 bp, Homo sapiens
tccagatgatagaat

SEQ ID NO: 1774595 - DNA, 15 bp, Homo sapiens
ccagatgatagaatc

SEQ ID NO: 1774596 - DNA, 15 bp, Homo sapiens
cagatgatagaatct

SEQ ID NO: 1774597 - DNA, 15 bp, Homo sapiens
agatgatagaatctg

SEQ ID NO: 1774598 - DNA, 15 bp, Homo sapiens
gatgatagaatctgc

SEQ ID NO: 1774599 - DNA, 15 bp, Homo sapiens
atgatagaatctgcc

SEQ ID NO: 1774600 - DNA, 15 bp, Homo sapiens
tgatagaatctgcct

SEQ ID NO: 1774601 - DNA, 15 bp, Homo sapiens
gatagaatctgccta

SEQ ID NO: 1774602 - DNA, 15 bp, Homo sapiens
atagaatctgcctac

SEQ ID NO: 1774603 - DNA, 15 bp, Homo sapiens
tagaatctgcctaca

SEQ ID NO: 1774604 - DNA, 15 bp, Homo sapiens
agaatctgcctacaa

SEQ ID NO: 1774605 - DNA, 15 bp, Homo sapiens
gaatctgcctacaag

SEQ ID NO: 1774606 - DNA, 15 bp, Homo sapiens
aatctgcctacaaga

SEQ ID NO: 1774607 - DNA, 15 bp, Homo sapiens
atctgcctacaagaa

SEQ ID NO: 1774608 - DNA, 15 bp, Homo sapiens
tctgcctacaagaaa

SEQ ID NO: 1774609 - DNA, 15 bp, Homo sapiens
ctgcctacaagaaat

SEQ ID NO: 1774610 - DNA, 15 bp, Homo sapiens
tgcctacaagaaatc

SEQ ID NO: 1774611 - DNA, 15 bp, Homo sapiens
gcctacaagaaatca

SEQ ID NO: 1774612 - DNA, 15 bp, Homo sapiens
cctacaagaaatcag

SEQ ID NO: 1774613 - DNA, 15 bp, Homo sapiens
ctacaagaaatcagc

SEQ ID NO: 1774614 - DNA, 15 bp, Homo sapiens
tacaagaaatcagca

SEQ ID NO: 1774615 - DNA, 15 bp, Homo sapiens
acaagaaatcagcaa

SEQ ID NO: 1774616 - DNA, 15 bp, Homo sapiens
caagaaatcagcaat

SEQ ID NO: 1774617 - DNA, 15 bp, Homo sapiens
aagaaatcagcaatt

SEQ ID NO: 1774618 - DNA, 15 bp, Homo sapiens
agaaatcagcaattt

SEQ ID NO: 1774619 - DNA, 15 bp, Homo sapiens
gaaatcagcaatttg

SEQ ID NO: 1774620 - DNA, 15 bp, Homo sapiens
aaatcagcaatttgt

SEQ ID NO: 1774621 - DNA, 15 bp, Homo sapiens
aatcagcaatttgtc

SEQ ID NO: 1774622 - DNA, 15 bp, Homo sapiens
atcagcaatttgtca

SEQ ID NO: 1774623 - DNA, 15 bp, Homo sapiens
tcagcaatttgtcat

SEQ ID NO: 1774624 - DNA, 15 bp, Homo sapiens
cagcaatttgtcata

SEQ ID NO: 1774625 - DNA, 15 bp, Homo sapiens
agcaatttgtcataa

SEQ ID NO: 1774626 - DNA, 15 bp, Homo sapiens
gcaatttgtcataaa

SEQ ID NO: 1774627 - DNA, 15 bp, Homo sapiens
caatttgtcataaaa

SEQ ID NO: 1774628 - DNA, 15 bp, Homo sapiens
aatttgtcataaaac

SEQ ID NO: 1774629 - DNA, 15 bp, Homo sapiens
atttgtcataaaact

SEQ ID NO: 1774630 - DNA, 15 bp, Homo sapiens
tttgtcataaaactt

SEQ ID NO: 1774631 - DNA, 15 bp, Homo sapiens
ttgtcataaaacttt

SEQ ID NO: 1774632 - DNA, 15 bp, Homo sapiens
tgtcataaaactttg

SEQ ID NO: 1774633 - DNA, 15 bp, Homo sapiens
gtcataaaactttga

SEQ ID NO: 1774634 - DNA, 15 bp, Homo sapiens
tcataaaactttgaa

SEQ ID NO: 1774635 - DNA, 15 bp, Homo sapiens
cataaaactttgaag

SEQ ID NO: 1774636 - DNA, 15 bp, Homo sapiens
ataaaactttgaaga

SEQ ID NO: 1774637 - DNA, 15 bp, Homo sapiens
taaaactttgaagaa

SEQ ID NO: 1774638 - DNA, 15 bp, Homo sapiens
aaaactttgaagaat

SEQ ID NO: 1774639 - DNA, 15 bp, Homo sapiens
aaactttgaagaata

SEQ ID NO: 1774640 - DNA, 15 bp, Homo sapiens
aactttgaagaatat

SEQ ID NO: 1774641 - DNA, 15 bp, Homo sapiens
actttgaagaatatt

SEQ ID NO: 1774642 - DNA, 15 bp, Homo sapiens
ctttgaagaatattg

SEQ ID NO: 1774643 - DNA, 15 bp, Homo sapiens
tttgaagaatattga

SEQ ID NO: 1774644 - DNA, 15 bp, Homo sapiens
ttgaagaatattgaa

SEQ ID NO: 1774645 - DNA, 15 bp, Homo sapiens
tgaagaatattgaaa

SEQ ID NO: 1774646 - DNA, 15 bp, Homo sapiens
gaagaatattgaaag

SEQ ID NO: 1774647 - DNA, 15 bp, Homo sapiens
aagaatattgaaaga

SEQ ID NO: 1774648 - DNA, 15 bp, Homo sapiens
agaatattgaaagaa

SEQ ID NO: 1774649 - DNA, 15 bp, Homo sapiens
gaatattgaaagaat

SEQ ID NO: 1774650 - DNA, 15 bp, Homo sapiens
aatattgaaagaatg

SEQ ID NO: 1774651 - DNA, 15 bp, Homo sapiens
atattgaaagaatga

SEQ ID NO: 1774652 - DNA, 15 bp, Homo sapiens
tattgaaagaatgaa

SEQ ID NO: 1774653 - DNA, 15 bp, Homo sapiens
attgaaagaatgaaa

SEQ ID NO: 1774654 - DNA, 15 bp, Homo sapiens
ttgaaagaatgaaac

SEQ ID NO: 1774655 - DNA, 15 bp, Homo sapiens
tgaaagaatgaaaca

SEQ ID NO: 1774656 - DNA, 15 bp, Homo sapiens
gaaagaatgaaacac

SEQ ID NO: 1774657 - DNA, 15 bp, Homo sapiens
aaagaatgaaacacc

SEQ ID NO: 1774658 - DNA, 15 bp, Homo sapiens
aagaatgaaacacct

SEQ ID NO: 1774659 - DNA, 15 bp, Homo sapiens
agaatgaaacacctg

SEQ ID NO: 1774660 - DNA, 15 bp, Homo sapiens
gaatgaaacacctga

SEQ ID NO: 1774661 - DNA, 15 bp, Homo sapiens
aatgaaacacctgaa

SEQ ID NO: 1774662 - DNA, 15 bp, Homo sapiens
atgaaacacctgaaa

SEQ ID NO: 1774663 - DNA, 15 bp, Homo sapiens
tgaaacacctgaaaa

SEQ ID NO: 1774664 - DNA, 15 bp, Homo sapiens
gaaacacctgaaaac

SEQ ID NO: 1774665 - DNA, 15 bp, Homo sapiens
aaacacctgaaaacg

SEQ ID NO: 1774666 - DNA, 15 bp, Homo sapiens
aacacctgaaaacgt

SEQ ID NO: 1774667 - DNA, 15 bp, Homo sapiens
acacctgaaaacgtt

SEQ ID NO: 1774668 - DNA, 15 bp, Homo sapiens
cacctgaaaacgtta

SEQ ID NO: 1774669 - DNA, 15 bp, Homo sapiens
acctgaaaacgttac

SEQ ID NO: 1774670 - DNA, 15 bp, Homo sapiens
cctgaaaacgttacc

SEQ ID NO: 1774671 - DNA, 15 bp, Homo sapiens
ctgaaaacgttacca

SEQ ID NO: 1774672 - DNA, 15 bp, Homo sapiens
tgaaaacgttaccaa

SEQ ID NO: 1774673 - DNA, 15 bp, Homo sapiens
gaaaacgttaccaat

SEQ ID NO: 1774674 - DNA, 15 bp, Homo sapiens
aaaacgttaccaatg

SEQ ID NO: 1774675 - DNA, 15 bp, Homo sapiens
aaacgttaccaatgg

SEQ ID NO: 1774676 - DNA, 15 bp, Homo sapiens
aacgttaccaatggt

SEQ ID NO: 1774677 - DNA, 15 bp, Homo sapiens
acgttaccaatggtt

SEQ ID NO: 1774678 - DNA, 15 bp, Homo sapiens
cgttaccaatggttc

SEQ ID NO: 1774679 - DNA, 15 bp, Homo sapiens
gttaccaatggttcc

SEQ ID NO: 1774680 - DNA, 15 bp, Homo sapiens
ttaccaatggttcct

SEQ ID NO: 1774681 - DNA, 15 bp, Homo sapiens
taccaatggttcctt

SEQ ID NO: 1774682 - DNA, 15 bp, Homo sapiens
accaatggttccttt

SEQ ID NO: 1774683 - DNA, 15 bp, Homo sapiens
ccaatggttcctttc

SEQ ID NO: 1774684 - DNA, 15 bp, Homo sapiens
caatggttcctttca

SEQ ID NO: 1774685 - DNA, 15 bp, Homo sapiens
aatggttcctttcaa

SEQ ID NO: 1774686 - DNA, 15 bp, Homo sapiens
atggttcctttcaaa

SEQ ID NO: 1774687 - DNA, 15 bp, Homo sapiens
tggttcctttcaaaa

SEQ ID NO: 1774688 - DNA, 15 bp, Homo sapiens
ggttcctttcaaaac

SEQ ID NO: 1774689 - DNA, 15 bp, Homo sapiens
gttcctttcaaaacc

SEQ ID NO: 1774690 - DNA, 15 bp, Homo sapiens
ttcctttcaaaacca

SEQ ID NO: 1774691 - DNA, 15 bp, Homo sapiens
tcctttcaaaaccaa

SEQ ID NO: 1774692 - DNA, 15 bp, Homo sapiens
cctttcaaaaccaaa

SEQ ID NO: 1774693 - DNA, 15 bp, Homo sapiens
ctttcaaaaccaaag

SEQ ID NO: 1774694 - DNA, 15 bp, Homo sapiens
tttcaaaaccaaaga

SEQ ID NO: 1774695 - DNA, 15 bp, Homo sapiens
ttcaaaaccaaagat

SEQ ID NO: 1774696 - DNA, 15 bp, Homo sapiens
tcaaaaccaaagatt

SEQ ID NO: 1774697 - DNA, 15 bp, Homo sapiens
caaaaccaaagattc

SEQ ID NO: 1774698 - DNA, 15 bp, Homo sapiens
aaaaccaaagattct

SEQ ID NO: 1774699 - DNA, 15 bp, Homo sapiens
aaaccaaagattctc

SEQ ID NO: 1774700 - DNA, 15 bp, Homo sapiens
aaccaaagattctcc

SEQ ID NO: 1774701 - DNA, 15 bp, Homo sapiens
accaaagattctcct

SEQ ID NO: 1774702 - DNA, 15 bp, Homo sapiens
ccaaagattctcctg

SEQ ID NO: 1774703 - DNA, 15 bp, Homo sapiens
caaagattctcctgg

SEQ ID NO: 1774704 - DNA, 15 bp, Homo sapiens
aaagattctcctgga

SEQ ID NO: 1774705 - DNA, 15 bp, Homo sapiens
aagattctcctggag

SEQ ID NO: 1774706 - DNA, 15 bp, Homo sapiens
agattctcctggagt

SEQ ID NO: 1774707 - DNA, 15 bp, Homo sapiens
gattctcctggagtt

SEQ ID NO: 1774708 - DNA, 15 bp, Homo sapiens
attctcctggagttt

SEQ ID NO: 1774709 - DNA, 15 bp, Homo sapiens
ttctcctggagtttt

SEQ ID NO: 1774710 - DNA, 15 bp, Homo sapiens
tctcctggagttttc

SEQ ID NO: 1774711 - DNA, 15 bp, Homo sapiens
ctcctggagttttct

SEQ ID NO: 1774712 - DNA, 15 bp, Homo sapiens
tcctggagttttctc

SEQ ID NO: 1774713 - DNA, 15 bp, Homo sapiens
cctggagttttctct

SEQ ID NO: 1774714 - DNA, 15 bp, Homo sapiens
ctggagttttctcta

SEQ ID NO: 1774715 - DNA, 15 bp, Homo sapiens
tggagttttctctaa

SEQ ID NO: 1774716 - DNA, 15 bp, Homo sapiens
ggagttttctctaaa

SEQ ID NO: 1774717 - DNA, 15 bp, Homo sapiens
gagttttctctaaac

SEQ ID NO: 1774718 - DNA, 15 bp, Homo sapiens
agttttctctaaact

SEQ ID NO: 1774719 - DNA, 15 bp, Homo sapiens
gttttctctaaactg

SEQ ID NO: 1774720 - DNA, 15 bp, Homo sapiens
ttttctctaaactgg

SEQ ID NO: 1774721 - DNA, 15 bp, Homo sapiens
tttctctaaactggg

SEQ ID NO: 1774722 - DNA, 15 bp, Homo sapiens
ttctctaaactgggt

SEQ ID NO: 1774723 - DNA, 15 bp, Homo sapiens
tctctaaactgggtg

SEQ ID NO: 1774724 - DNA, 15 bp, Homo sapiens
ctctaaactgggtgt

SEQ ID NO: 1774725 - DNA, 15 bp, Homo sapiens
tctaaactgggtgtt

SEQ ID NO: 1774726 - DNA, 15 bp, Homo sapiens
ctaaactgggtgttc

SEQ ID NO: 1774727 - DNA, 15 bp, Homo sapiens
taaactgggtgttct

SEQ ID NO: 1774728 - DNA, 15 bp, Homo sapiens
aaactgggtgttctc

SEQ ID NO: 1774729 - DNA, 15 bp, Homo sapiens
aactgggtgttctcc

SEQ ID NO: 1774730 - DNA, 15 bp, Homo sapiens
actgggtgttctcct

SEQ ID NO: 1774731 - DNA, 15 bp, Homo sapiens
ctgggtgttctcctg

SEQ ID NO: 1774732 - DNA, 15 bp, Homo sapiens
tgggtgttctcctga

SEQ ID NO: 1774733 - DNA, 15 bp, Homo sapiens
gggtgttctcctgag

SEQ ID NO: 1774734 - DNA, 15 bp, Homo sapiens
ggtgttctcctgagg

SEQ ID NO: 1774735 - DNA, 15 bp, Homo sapiens
gtgttctcctgaggt

SEQ ID NO: 1774736 - DNA, 15 bp, Homo sapiens
tgttctcctgaggta

SEQ ID NO: 1774737 - DNA, 15 bp, Homo sapiens
gttctcctgaggtaa

SEQ ID NO: 1774738 - DNA, 15 bp, Homo sapiens
ttctcctgaggtaag

SEQ ID NO: 1774739 - DNA, 15 bp, Homo sapiens
tctcctgaggtaaga

SEQ ID NO: 1774740 - DNA, 15 bp, Homo sapiens
ctcctgaggtaagag

SEQ ID NO: 1774741 - DNA, 15 bp, Homo sapiens
tcctgaggtaagagg

SEQ ID NO: 1774742 - DNA, 15 bp, Homo sapiens
cctgaggtaagaggc

SEQ ID NO: 1774743 - DNA, 15 bp, Homo sapiens
ctgaggtaagaggct

SEQ ID NO: 1774744 - DNA, 15 bp, Homo sapiens
tgaggtaagaggctc

SEQ ID NO: 1774745 - DNA, 15 bp, Homo sapiens
gaggtaagaggctca

SEQ ID NO: 1774746 - DNA, 15 bp, Homo sapiens
aggtaagaggctcac

SEQ ID NO: 1774747 - DNA, 15 bp, Homo sapiens
ggtaagaggctcaca

SEQ ID NO: 1774748 - DNA, 15 bp, Homo sapiens
gtaagaggctcacaa

SEQ ID NO: 1774749 - DNA, 15 bp, Homo sapiens
taagaggctcacaaa

SEQ ID NO: 1774750 - DNA, 15 bp, Homo sapiens
aagaggctcacaaat

SEQ ID NO: 1774751 - DNA, 15 bp, Homo sapiens
agaggctcacaaatg

SEQ ID NO: 1774752 - DNA, 15 bp, Homo sapiens
gaggctcacaaatgt

SEQ ID NO: 1774753 - DNA, 15 bp, Homo sapiens
aggctcacaaatgtg

SEQ ID NO: 1774754 - DNA, 15 bp, Homo sapiens
ggctcacaaatgtga

SEQ ID NO: 1774755 - DNA, 15 bp, Homo sapiens
gctcacaaatgtgag

SEQ ID NO: 1774756 - DNA, 15 bp, Homo sapiens
ctcacaaatgtgaga

SEQ ID NO: 1774757 - DNA, 15 bp, Homo sapiens
tcacaaatgtgagaa

SEQ ID NO: 1774758 - DNA, 15 bp, Homo sapiens
cacaaatgtgagaaa

SEQ ID NO: 1774759 - DNA, 15 bp, Homo sapiens
acaaatgtgagaaat

SEQ ID NO: 1774760 - DNA, 15 bp, Homo sapiens
caaatgtgagaaatg

SEQ ID NO: 1774761 - DNA, 15 bp, Homo sapiens
aaatgtgagaaatgc

SEQ ID NO: 1774762 - DNA, 15 bp, Homo sapiens
aatgtgagaaatgcc

SEQ ID NO: 1774763 - DNA, 15 bp, Homo sapiens
atgtgagaaatgcct

SEQ ID NO: 1774764 - DNA, 15 bp, Homo sapiens
tgtgagaaatgcctg

SEQ ID NO: 1774765 - DNA, 15 bp, Homo sapiens
gtgagaaatgcctgt

SEQ ID NO: 1774766 - DNA, 15 bp, Homo sapiens
tgagaaatgcctgtt

SEQ ID NO: 1774767 - DNA, 15 bp, Homo sapiens
gagaaatgcctgtta

SEQ ID NO: 1774768 - DNA, 15 bp, Homo sapiens
agaaatgcctgttag

SEQ ID NO: 1774769 - DNA, 15 bp, Homo sapiens
gaaatgcctgttaga

SEQ ID NO: 1774770 - DNA, 15 bp, Homo sapiens
aaatgcctgttagag

SEQ ID NO: 1774771 - DNA, 15 bp, Homo sapiens
aatgcctgttagagg

SEQ ID NO: 1774772 - DNA, 15 bp, Homo sapiens
atgcctgttagaggt

SEQ ID NO: 1774773 - DNA, 15 bp, Homo sapiens
tgcctgttagaggtc

SEQ ID NO: 1774774 - DNA, 15 bp, Homo sapiens
gcctgttagaggtct

SEQ ID NO: 1774775 - DNA, 15 bp, Homo sapiens
cctgttagaggtctt

SEQ ID NO: 1774776 - DNA, 15 bp, Homo sapiens
ctgttagaggtcttt

SEQ ID NO: 1774777 - DNA, 15 bp, Homo sapiens
tgttagaggtcttta

SEQ ID NO: 1774778 - DNA, 15 bp, Homo sapiens
gttagaggtctttag

SEQ ID NO: 1774779 - DNA, 15 bp, Homo sapiens
ttagaggtctttagc

SEQ ID NO: 1774780 - DNA, 15 bp, Homo sapiens
tagaggtctttagcc

SEQ ID NO: 1774781 - DNA, 15 bp, Homo sapiens
agaggtctttagcca

SEQ ID NO: 1774782 - DNA, 15 bp, Homo sapiens
gaggtctttagccat

SEQ ID NO: 1774783 - DNA, 15 bp, Homo sapiens
aggtctttagccatc

SEQ ID NO: 1774784 - DNA, 15 bp, Homo sapiens
ggtctttagccatcc

SEQ ID NO: 1774785 - DNA, 15 bp, Homo sapiens
gtctttagccatccc

SEQ ID NO: 1774786 - DNA, 15 bp, Homo sapiens
tctttagccatcccc

SEQ ID NO: 1774787 - DNA, 15 bp, Homo sapiens
ctttagccatccccc

SEQ ID NO: 1774788 - DNA, 15 bp, Homo sapiens
tttagccatccccca

SEQ ID NO: 1774789 - DNA, 15 bp, Homo sapiens
ttagccatcccccaa

SEQ ID NO: 1774790 - DNA, 15 bp, Homo sapiens
tagccatcccccaat

SEQ ID NO: 1774791 - DNA, 15 bp, Homo sapiens
agccatcccccaata

SEQ ID NO: 1774792 - DNA, 15 bp, Homo sapiens
gccatcccccaataa

SEQ ID NO: 1774793 - DNA, 15 bp, Homo sapiens
ccatcccccaataac

SEQ ID NO: 1774794 - DNA, 15 bp, Homo sapiens
catcccccaataaca

SEQ ID NO: 1774795 - DNA, 15 bp, Homo sapiens
atcccccaataacaa

SEQ ID NO: 1774796 - DNA, 15 bp, Homo sapiens
tcccccaataacaat

SEQ ID NO: 1774797 - DNA, 15 bp, Homo sapiens
cccccaataacaatt

SEQ ID NO: 1774798 - DNA, 15 bp, Homo sapiens
ccccaataacaattc

SEQ ID NO: 1774799 - DNA, 15 bp, Homo sapiens
cccaataacaattct

SEQ ID NO: 1774800 - DNA, 15 bp, Homo sapiens
ccaataacaattctg

SEQ ID NO: 1774801 - DNA, 15 bp, Homo sapiens
caataacaattctga

SEQ ID NO: 1774802 - DNA, 15 bp, Homo sapiens
aataacaattctgaa

SEQ ID NO: 1774803 - DNA, 15 bp, Homo sapiens
ataacaattctgaaa

SEQ ID NO: 1774804 - DNA, 15 bp, Homo sapiens
taacaattctgaaaa

SEQ ID NO: 1774805 - DNA, 15 bp, Homo sapiens
aacaattctgaaaag

SEQ ID NO: 1774806 - DNA, 15 bp, Homo sapiens
acaattctgaaaagg

SEQ ID NO: 1774807 - DNA, 15 bp, Homo sapiens
caattctgaaaagga

SEQ ID NO: 1774808 - DNA, 15 bp, Homo sapiens
aattctgaaaaggaa

SEQ ID NO: 1774809 - DNA, 15 bp, Homo sapiens
attctgaaaaggaat

SEQ ID NO: 1774810 - DNA, 15 bp, Homo sapiens
ttctgaaaaggaatt

SEQ ID NO: 1774811 - DNA, 15 bp, Homo sapiens
tctgaaaaggaatta

SEQ ID NO: 1774812 - DNA, 15 bp, Homo sapiens
ctgaaaaggaattaa

SEQ ID NO: 1774813 - DNA, 15 bp, Homo sapiens
tgaaaaggaattaaa

SEQ ID NO: 1774814 - DNA, 15 bp, Homo sapiens
gaaaaggaattaaaa

SEQ ID NO: 1774815 - DNA, 15 bp, Homo sapiens
aaaaggaattaaaac

SEQ ID NO: 1774816 - DNA, 15 bp, Homo sapiens
aaaggaattaaaaca

SEQ ID NO: 1774817 - DNA, 15 bp, Homo sapiens
aaggaattaaaacag

SEQ ID NO: 1774818 - DNA, 15 bp, Homo sapiens
aggaattaaaacagg

SEQ ID NO: 1774819 - DNA, 15 bp, Homo sapiens
ggaattaaaacaggg

SEQ ID NO: 1774820 - DNA, 15 bp, Homo sapiens
gaattaaaacagggt

SEQ ID NO: 1774821 - DNA, 15 bp, Homo sapiens
aattaaaacagggtt

SEQ ID NO: 1774822 - DNA, 15 bp, Homo sapiens
attaaaacagggttg

SEQ ID NO: 1774823 - DNA, 15 bp, Homo sapiens
ttaaaacagggttgt

SEQ ID NO: 1774824 - DNA, 15 bp, Homo sapiens
taaaacagggttgtt

SEQ ID NO: 1774825 - DNA, 15 bp, Homo sapiens
aaaacagggttgttt

SEQ ID NO: 1774826 - DNA, 15 bp, Homo sapiens
aaacagggttgtttg

SEQ ID NO: 1774827 - DNA, 15 bp, Homo sapiens
aacagggttgtttgt

SEQ ID NO: 1774828 - DNA, 15 bp, Homo sapiens
acagggttgtttgtt

SEQ ID NO: 1774829 - DNA, 15 bp, Homo sapiens
cagggttgtttgttt

SEQ ID NO: 1774830 - DNA, 15 bp, Homo sapiens
agggttgtttgtttt

SEQ ID NO: 1774831 - DNA, 15 bp, Homo sapiens
gggttgtttgttttc

SEQ ID NO: 1774832 - DNA, 15 bp, Homo sapiens
ggttgtttgttttca

SEQ ID NO: 1774833 - DNA, 15 bp, Homo sapiens
gttgtttgttttcag

SEQ ID NO: 1774834 - DNA, 15 bp, Homo sapiens
ttgtttgttttcagg

SEQ ID NO: 1774835 - DNA, 15 bp, Homo sapiens
tgtttgttttcagga

SEQ ID NO: 1774836 - DNA, 15 bp, Homo sapiens
gtttgttttcaggag

SEQ ID NO: 1774837 - DNA, 15 bp, Homo sapiens
tttgttttcaggaga

SEQ ID NO: 1774838 - DNA, 15 bp, Homo sapiens
ttgttttcaggagag

SEQ ID NO: 1774839 - DNA, 15 bp, Homo sapiens
tgttttcaggagagt

SEQ ID NO: 1774840 - DNA, 15 bp, Homo sapiens
gttttcaggagagtg

SEQ ID NO: 1774841 - DNA, 15 bp, Homo sapiens
ttttcaggagagtga

SEQ ID NO: 1774842 - DNA, 15 bp, Homo sapiens
tttcaggagagtgac

SEQ ID NO: 1774843 - DNA, 15 bp, Homo sapiens
ttcaggagagtgaca

SEQ ID NO: 1774844 - DNA, 15 bp, Homo sapiens
tcaggagagtgacaa

SEQ ID NO: 1774845 - DNA, 15 bp, Homo sapiens
caggagagtgacaag

SEQ ID NO: 1774846 - DNA, 15 bp, Homo sapiens
aggagagtgacaaga

SEQ ID NO: 1774847 - DNA, 15 bp, Homo sapiens
ggagagtgacaagaa

SEQ ID NO: 1774848 - DNA, 15 bp, Homo sapiens
gagagtgacaagaaa

SEQ ID NO: 1774849 - DNA, 15 bp, Homo sapiens
agagtgacaagaaac

SEQ ID NO: 1774850 - DNA, 15 bp, Homo sapiens
gagtgacaagaaact

SEQ ID NO: 1774851 - DNA, 15 bp, Homo sapiens
agtgacaagaaactt

SEQ ID NO: 1774852 - DNA, 15 bp, Homo sapiens
gtgacaagaaacttg

SEQ ID NO: 1774853 - DNA, 15 bp, Homo sapiens
tgacaagaaacttgg

SEQ ID NO: 1774854 - DNA, 15 bp, Homo sapiens
gacaagaaacttggt

SEQ ID NO: 1774855 - DNA, 15 bp, Homo sapiens
acaagaaacttggtg

SEQ ID NO: 1774856 - DNA, 15 bp, Homo sapiens
caagaaacttggtga

SEQ ID NO: 1774857 - DNA, 15 bp, Homo sapiens
aagaaacttggtgag

SEQ ID NO: 1774858 - DNA, 15 bp, Homo sapiens
agaaacttggtgaga

SEQ ID NO: 1774859 - DNA, 15 bp, Homo sapiens
gaaacttggtgagaa

SEQ ID NO: 1774860 - DNA, 15 bp, Homo sapiens
aaacttggtgagaaa

SEQ ID NO: 1774861 - DNA, 15 bp, Homo sapiens
aacttggtgagaaat

SEQ ID NO: 1774862 - DNA, 15 bp, Homo sapiens
acttggtgagaaata

SEQ ID NO: 1774863 - DNA, 15 bp, Homo sapiens
cttggtgagaaataa

SEQ ID NO: 1774864 - DNA, 15 bp, Homo sapiens
ttggtgagaaataag

SEQ ID NO: 1774865 - DNA, 15 bp, Homo sapiens
tggtgagaaataagc

SEQ ID NO: 1774866 - DNA, 15 bp, Homo sapiens
ggtgagaaataagct

SEQ ID NO: 1774867 - DNA, 15 bp, Homo sapiens
gtgagaaataagctg

SEQ ID NO: 1774868 - DNA, 15 bp, Homo sapiens
tgagaaataagctgg

SEQ ID NO: 1774869 - DNA, 15 bp, Homo sapiens
gagaaataagctggc

SEQ ID NO: 1774870 - DNA, 15 bp, Homo sapiens
agaaataagctggca

SEQ ID NO: 1774871 - DNA, 15 bp, Homo sapiens
gaaataagctggcag

SEQ ID NO: 1774872 - DNA, 15 bp, Homo sapiens
aaataagctggcagt

SEQ ID NO: 1774873 - DNA, 15 bp, Homo sapiens
aataagctggcagtg

SEQ ID NO: 1774874 - DNA, 15 bp, Homo sapiens
ataagctggcagtga

SEQ ID NO: 1774875 - DNA, 15 bp, Homo sapiens
taagctggcagtgat

SEQ ID NO: 1774876 - DNA, 15 bp, Homo sapiens
aagctggcagtgatt

SEQ ID NO: 1774877 - DNA, 15 bp, Homo sapiens
agctggcagtgatta

SEQ ID NO: 1774878 - DNA, 15 bp, Homo sapiens
gctggcagtgattac

SEQ ID NO: 1774879 - DNA, 15 bp, Homo sapiens
ctggcagtgattacg

SEQ ID NO: 1774880 - DNA, 15 bp, Homo sapiens
tggcagtgattacgc

SEQ ID NO: 1774881 - DNA, 15 bp, Homo sapiens
ggcagtgattacgcg

SEQ ID NO: 1774882 - DNA, 15 bp, Homo sapiens
gcagtgattacgcgt

SEQ ID NO: 1774883 - DNA, 15 bp, Homo sapiens
cagtgattacgcgtc

SEQ ID NO: 1774884 - DNA, 15 bp, Homo sapiens
agtgattacgcgtct

SEQ ID NO: 1774885 - DNA, 15 bp, Homo sapiens
gtgattacgcgtctc

SEQ ID NO: 1774886 - DNA, 15 bp, Homo sapiens
tgattacgcgtctcc

SEQ ID NO: 1774887 - DNA, 15 bp, Homo sapiens
gattacgcgtctcct

SEQ ID NO: 1774888 - DNA, 15 bp, Homo sapiens
attacgcgtctcctt

SEQ ID NO: 1774889 - DNA, 15 bp, Homo sapiens
ttacgcgtctccttc

SEQ ID NO: 1774890 - DNA, 15 bp, Homo sapiens
tacgcgtctccttca

SEQ ID NO: 1774891 - DNA, 15 bp, Homo sapiens
acgcgtctccttcag

SEQ ID NO: 1774892 - DNA, 15 bp, Homo sapiens
cgcgtctccttcaga

SEQ ID NO: 1774893 - DNA, 15 bp, Homo sapiens
gcgtctccttcagaa

SEQ ID NO: 1774894 - DNA, 15 bp, Homo sapiens
cgtctccttcagaat

SEQ ID NO: 1774895 - DNA, 15 bp, Homo sapiens
gtctccttcagaatc

SEQ ID NO: 1774896 - DNA, 15 bp, Homo sapiens
tctccttcagaatct

SEQ ID NO: 1774897 - DNA, 15 bp, Homo sapiens
ctccttcagaatctg

SEQ ID NO: 1774898 - DNA, 15 bp, Homo sapiens
tccttcagaatctga

SEQ ID NO: 1774899 - DNA, 15 bp, Homo sapiens
ccttcagaatctgat

SEQ ID NO: 1774900 - DNA, 15 bp, Homo sapiens
cttcagaatctgatc

SEQ ID NO: 1774901 - DNA, 15 bp, Homo sapiens
ttcagaatctgatca

SEQ ID NO: 1774902 - DNA, 15 bp, Homo sapiens
tcagaatctgatcat

SEQ ID NO: 1774903 - DNA, 15 bp, Homo sapiens
cagaatctgatcatg

SEQ ID NO: 1774904 - DNA, 15 bp, Homo sapiens
agaatctgatcatgg

SEQ ID NO: 1774905 - DNA, 15 bp, Homo sapiens
gaatctgatcatggg

SEQ ID NO: 1774906 - DNA, 15 bp, Homo sapiens
aatctgatcatgggt

SEQ ID NO: 1774907 - DNA, 15 bp, Homo sapiens
atctgatcatgggtt

SEQ ID NO: 1774908 - DNA, 15 bp, Homo sapiens
tctgatcatgggttt

SEQ ID NO: 1774909 - DNA, 15 bp, Homo sapiens
ctgatcatgggtttg

SEQ ID NO: 1774910 - DNA, 15 bp, Homo sapiens
tgatcatgggtttgt

SEQ ID NO: 1774911 - DNA, 15 bp, Homo sapiens
gatcatgggtttgtt

SEQ ID NO: 1774912 - DNA, 15 bp, Homo sapiens
atcatgggtttgttc

SEQ ID NO: 1774913 - DNA, 15 bp, Homo sapiens
tcatgggtttgttcc

SEQ ID NO: 1774914 - DNA, 15 bp, Homo sapiens
catgggtttgttcct

SEQ ID NO: 1774915 - DNA, 15 bp, Homo sapiens
atgggtttgttcctc

SEQ ID NO: 1774916 - DNA, 15 bp, Homo sapiens
tgggtttgttcctcc

SEQ ID NO: 1774917 - DNA, 15 bp, Homo sapiens
gggtttgttcctcct

SEQ ID NO: 1774918 - DNA, 15 bp, Homo sapiens
ggtttgttcctcctt

SEQ ID NO: 1774919 - DNA, 15 bp, Homo sapiens
gtttgttcctccttt

SEQ ID NO: 1774920 - DNA, 15 bp, Homo sapiens
tttgttcctcctttt

SEQ ID NO: 1774921 - DNA, 15 bp, Homo sapiens
ttgttcctccttttc

SEQ ID NO: 1774922 - DNA, 15 bp, Homo sapiens
tgttcctccttttct

SEQ ID NO: 1774923 - DNA, 15 bp, Homo sapiens
gttcctccttttctt

SEQ ID NO: 1774924 - DNA, 15 bp, Homo sapiens
ttcctccttttcttc

SEQ ID NO: 1774925 - DNA, 15 bp, Homo sapiens
tcctccttttcttcg

SEQ ID NO: 1774926 - DNA, 15 bp, Homo sapiens
cctccttttcttcgt

SEQ ID NO: 1774927 - DNA, 15 bp, Homo sapiens
ctccttttcttcgtt

SEQ ID NO: 1774928 - DNA, 15 bp, Homo sapiens
tccttttcttcgttc

SEQ ID NO: 1774929 - DNA, 15 bp, Homo sapiens
ccttttcttcgttct

SEQ ID NO: 1774930 - DNA, 15 bp, Homo sapiens
cttttcttcgttctg

SEQ ID NO: 1774931 - DNA, 15 bp, Homo sapiens
ttttcttcgttctgc

SEQ ID NO: 1774932 - DNA, 15 bp, Homo sapiens
tttcttcgttctgcg

SEQ ID NO: 1774933 - DNA, 15 bp, Homo sapiens
ttcttcgttctgcgg

SEQ ID NO: 1774934 - DNA, 15 bp, Homo sapiens
tcttcgttctgcggg

SEQ ID NO: 1774935 - DNA, 15 bp, Homo sapiens
cttcgttctgcgggt

SEQ ID NO: 1774936 - DNA, 15 bp, Homo sapiens
ttcgttctgcgggtc

SEQ ID NO: 1774937 - DNA, 15 bp, Homo sapiens
tcgttctgcgggtcc

SEQ ID NO: 1774938 - DNA, 15 bp, Homo sapiens
cgttctgcgggtccg

SEQ ID NO: 1774939 - DNA, 15 bp, Homo sapiens
gttctgcgggtccga

SEQ ID NO: 1774940 - DNA, 15 bp, Homo sapiens
ttctgcgggtccgaa

SEQ ID NO: 1774941 - DNA, 15 bp, Homo sapiens
tctgcgggtccgaag

SEQ ID NO: 1774942 - DNA, 15 bp, Homo sapiens
ctgcgggtccgaagc

SEQ ID NO: 1774943 - DNA, 15 bp, Homo sapiens
tgcgggtccgaagca

SEQ ID NO: 1774944 - DNA, 15 bp, Homo sapiens
gcgggtccgaagcaa

SEQ ID NO: 1774945 - DNA, 15 bp, Homo sapiens
cgggtccgaagcaat

SEQ ID NO: 1774946 - DNA, 15 bp, Homo sapiens
gggtccgaagcaatg

SEQ ID NO: 1774947 - DNA, 15 bp, Homo sapiens
ggtccgaagcaatgt

SEQ ID NO: 1774948 - DNA, 15 bp, Homo sapiens
gtccgaagcaatgtg

SEQ ID NO: 1774949 - DNA, 15 bp, Homo sapiens
tccgaagcaatgtgc

SEQ ID NO: 1774950 - DNA, 15 bp, Homo sapiens
ccgaagcaatgtgct

SEQ ID NO: 1774951 - DNA, 15 bp, Homo sapiens
cgaagcaatgtgcta

SEQ ID NO: 1774952 - DNA, 15 bp, Homo sapiens
gaagcaatgtgctaa

SEQ ID NO: 1774953 - DNA, 15 bp, Homo sapiens
aagcaatgtgctaaa

SEQ ID NO: 1774954 - DNA, 15 bp, Homo sapiens
agcaatgtgctaaag

SEQ ID NO: 1774955 - DNA, 15 bp, Homo sapiens
gcaatgtgctaaagg

SEQ ID NO: 1774956 - DNA, 15 bp, Homo sapiens
caatgtgctaaaggg

SEQ ID NO: 1774957 - DNA, 15 bp, Homo sapiens
aatgtgctaaagggt

SEQ ID NO: 1774958 - DNA, 15 bp, Homo sapiens
atgtgctaaagggtg

SEQ ID NO: 1774959 - DNA, 15 bp, Homo sapiens
tgtgctaaagggtgc

SEQ ID NO: 1774960 - DNA, 15 bp, Homo sapiens
gtgctaaagggtgct

SEQ ID NO: 1774961 - DNA, 15 bp, Homo sapiens
tgctaaagggtgcta

SEQ ID NO: 1774962 - DNA, 15 bp, Homo sapiens
gctaaagggtgctat

SEQ ID NO: 1774963 - DNA, 15 bp, Homo sapiens
ctaaagggtgctatc

SEQ ID NO: 1774964 - DNA, 15 bp, Homo sapiens
taaagggtgctatcc

SEQ ID NO: 1774965 - DNA, 15 bp, Homo sapiens
aaagggtgctatcca

SEQ ID NO: 1774966 - DNA, 15 bp, Homo sapiens
aagggtgctatccag

SEQ ID NO: 1774967 - DNA, 15 bp, Homo sapiens
agggtgctatccagg

SEQ ID NO: 1774968 - DNA, 15 bp, Homo sapiens
gggtgctatccagga

SEQ ID NO: 1774969 - DNA, 15 bp, Homo sapiens
ggtgctatccaggac

SEQ ID NO: 1774970 - DNA, 15 bp, Homo sapiens
gtgctatccaggacc

SEQ ID NO: 1774971 - DNA, 15 bp, Homo sapiens
tgctatccaggaccg

SEQ ID NO: 1774972 - DNA, 15 bp, Homo sapiens
gctatccaggaccgc

SEQ ID NO: 1774973 - DNA, 15 bp, Homo sapiens
ctatccaggaccgcg

SEQ ID NO: 1774974 - DNA, 15 bp, Homo sapiens
tatccaggaccgcgt

SEQ ID NO: 1774975 - DNA, 15 bp, Homo sapiens
atccaggaccgcgta

SEQ ID NO: 1774976 - DNA, 15 bp, Homo sapiens
tccaggaccgcgtag

SEQ ID NO: 1774977 - DNA, 15 bp, Homo sapiens
ccaggaccgcgtagg

SEQ ID NO: 1774978 - DNA, 15 bp, Homo sapiens
caggaccgcgtaggt

SEQ ID NO: 1774979 - DNA, 15 bp, Homo sapiens
aggaccgcgtaggtc

SEQ ID NO: 1774980 - DNA, 15 bp, Homo sapiens
ggaccgcgtaggtct

SEQ ID NO: 1774981 - DNA, 15 bp, Homo sapiens
gaccgcgtaggtctc

SEQ ID NO: 1774982 - DNA, 15 bp, Homo sapiens
accgcgtaggtctcc

SEQ ID NO: 1774983 - DNA, 15 bp, Homo sapiens
ccgcgtaggtctcct

SEQ ID NO: 1774984 - DNA, 15 bp, Homo sapiens
cgcgtaggtctcctt

SEQ ID NO: 1774985 - DNA, 15 bp, Homo sapiens
gcgtaggtctccttt

SEQ ID NO: 1774986 - DNA, 15 bp, Homo sapiens
cgtaggtctccttta

SEQ ID NO: 1774987 - DNA, 15 bp, Homo sapiens
gtaggtctcctttac

SEQ ID NO: 1774988 - DNA, 15 bp, Homo sapiens
taggtctcctttacc

SEQ ID NO: 1774989 - DNA, 15 bp, Homo sapiens
aggtctcctttacca

SEQ ID NO: 1774990 - DNA, 15 bp, Homo sapiens
ggtctcctttaccag

SEQ ID NO: 1774991 - DNA, 15 bp, Homo sapiens
gtctcctttaccagt

SEQ ID NO: 1774992 - DNA, 15 bp, Homo sapiens
tctcctttaccagtt

SEQ ID NO: 1774993 - DNA, 15 bp, Homo sapiens
ctcctttaccagttt

SEQ ID NO: 1774994 - DNA, 15 bp, Homo sapiens
tcctttaccagtttg

SEQ ID NO: 1774995 - DNA, 15 bp, Homo sapiens
cctttaccagtttgt

SEQ ID NO: 1774996 - DNA, 15 bp, Homo sapiens
ctttaccagtttgtg

SEQ ID NO: 1774997 - DNA, 15 bp, Homo sapiens
tttaccagtttgtgg

SEQ ID NO: 1774998 - DNA, 15 bp, Homo sapiens
ttaccagtttgtggg

SEQ ID NO: 1774999 - DNA, 15 bp, Homo sapiens
taccagtttgtgggc

SEQ ID NO: 1775000 - DNA, 15 bp, Homo sapiens
accagtttgtgggcg

SEQ ID NO: 1775001 - DNA, 15 bp, Homo sapiens
ccagtttgtgggcgc

SEQ ID NO: 1775002 - DNA, 15 bp, Homo sapiens
cagtttgtgggcgcc

SEQ ID NO: 1775003 - DNA, 15 bp, Homo sapiens
agtttgtgggcgcca

SEQ ID NO: 1775004 - DNA, 15 bp, Homo sapiens
gtttgtgggcgccac

SEQ ID NO: 1775005 - DNA, 15 bp, Homo sapiens
tttgtgggcgccacc

SEQ ID NO: 1775006 - DNA, 15 bp, Homo sapiens
ttgtgggcgccaccc

SEQ ID NO: 1775007 - DNA, 15 bp, Homo sapiens
tgtgggcgccacccc

SEQ ID NO: 1775008 - DNA, 15 bp, Homo sapiens
gtgggcgccaccccg

SEQ ID NO: 1775009 - DNA, 15 bp, Homo sapiens
tgggcgccaccccgt

SEQ ID NO: 1775010 - DNA, 15 bp, Homo sapiens
gggcgccaccccgta

SEQ ID NO: 1775011 - DNA, 15 bp, Homo sapiens
ggcgccaccccgtac

SEQ ID NO: 1775012 - DNA, 15 bp, Homo sapiens
gcgccaccccgtaca

SEQ ID NO: 1775013 - DNA, 15 bp, Homo sapiens
cgccaccccgtacac

SEQ ID NO: 1775014 - DNA, 15 bp, Homo sapiens
gccaccccgtacaca

SEQ ID NO: 1775015 - DNA, 15 bp, Homo sapiens
ccaccccgtacacag

SEQ ID NO: 1775016 - DNA, 15 bp, Homo sapiens
caccccgtacacagg

SEQ ID NO: 1775017 - DNA, 15 bp, Homo sapiens
accccgtacacaggc

SEQ ID NO: 1775018 - DNA, 15 bp, Homo sapiens
ccccgtacacaggca

SEQ ID NO: 1775019 - DNA, 15 bp, Homo sapiens
cccgtacacaggcat

SEQ ID NO: 1775020 - DNA, 15 bp, Homo sapiens
ccgtacacaggcatg

SEQ ID NO: 1775021 - DNA, 15 bp, Homo sapiens
cgtacacaggcatgc

SEQ ID NO: 1775022 - DNA, 15 bp, Homo sapiens
gtacacaggcatgct

SEQ ID NO: 1775023 - DNA, 15 bp, Homo sapiens
tacacaggcatgctg

SEQ ID NO: 1775024 - DNA, 15 bp, Homo sapiens
acacaggcatgctga

SEQ ID NO: 1775025 - DNA, 15 bp, Homo sapiens
cacaggcatgctgaa

SEQ ID NO: 1775026 - DNA, 15 bp, Homo sapiens
acaggcatgctgaac

SEQ ID NO: 1775027 - DNA, 15 bp, Homo sapiens
caggcatgctgaacg

SEQ ID NO: 1775028 - DNA, 15 bp, Homo sapiens
aggcatgctgaacgc

SEQ ID NO: 1775029 - DNA, 15 bp, Homo sapiens
ggcatgctgaacgct

SEQ ID NO: 1775030 - DNA, 15 bp, Homo sapiens
gcatgctgaacgctg

SEQ ID NO: 1775031 - DNA, 15 bp, Homo sapiens
catgctgaacgctgt

SEQ ID NO: 1775032 - DNA, 15 bp, Homo sapiens
atgctgaacgctgtg

SEQ ID NO: 1775033 - DNA, 15 bp, Homo sapiens
tgctgaacgctgtga

SEQ ID NO: 1775034 - DNA, 15 bp, Homo sapiens
gctgaacgctgtgaa

SEQ ID NO: 1775035 - DNA, 15 bp, Homo sapiens
ctgaacgctgtgaat

SEQ ID NO: 1775036 - DNA, 15 bp, Homo sapiens
tgaacgctgtgaatc

SEQ ID NO: 1775037 - DNA, 15 bp, Homo sapiens
gaacgctgtgaatct

SEQ ID NO: 1775038 - DNA, 15 bp, Homo sapiens
aacgctgtgaatctg

SEQ ID NO: 1775039 - DNA, 15 bp, Homo sapiens
acgctgtgaatctgt

SEQ ID NO: 1775040 - DNA, 15 bp, Homo sapiens
cgctgtgaatctgtg

SEQ ID NO: 1775041 - DNA, 15 bp, Homo sapiens
gctgtgaatctgtgt

SEQ ID NO: 1775042 - DNA, 15 bp, Homo sapiens
ctgtgaatctgtgta

SEQ ID NO: 1775043 - DNA, 15 bp, Homo sapiens
tgtgaatctgtgtaa

SEQ ID NO: 1775044 - DNA, 15 bp, Homo sapiens
gtgaatctgtgtaag

SEQ ID NO: 1775045 - DNA, 15 bp, Homo sapiens
tgaatctgtgtaagt

SEQ ID NO: 1775046 - DNA, 15 bp, Homo sapiens
gaatctgtgtaagtg

SEQ ID NO: 1775047 - DNA, 15 bp, Homo sapiens
aatctgtgtaagtgc

SEQ ID NO: 1775048 - DNA, 15 bp, Homo sapiens
atctgtgtaagtgcc

SEQ ID NO: 1775049 - DNA, 15 bp, Homo sapiens
tctgtgtaagtgccc

SEQ ID NO: 1775050 - DNA, 15 bp, Homo sapiens
ctgtgtaagtgccca

SEQ ID NO: 1775051 - DNA, 15 bp, Homo sapiens
tgtgtaagtgcccac

SEQ ID NO: 1775052 - DNA, 15 bp, Homo sapiens
gtgtaagtgcccacg

SEQ ID NO: 1775053 - DNA, 15 bp, Homo sapiens
tgtaagtgcccacgt

SEQ ID NO: 1775054 - DNA, 15 bp, Homo sapiens
gtaagtgcccacgtg

SEQ ID NO: 1775055 - DNA, 15 bp, Homo sapiens
taagtgcccacgtgc

SEQ ID NO: 1775056 - DNA, 15 bp, Homo sapiens
aagtgcccacgtgct

SEQ ID NO: 1775057 - DNA, 15 bp, Homo sapiens
agtgcccacgtgctg

SEQ ID NO: 1775058 - DNA, 15 bp, Homo sapiens
gtgcccacgtgctgg

SEQ ID NO: 1775059 - DNA, 15 bp, Homo sapiens
tgcccacgtgctgga

SEQ ID NO: 1775060 - DNA, 15 bp, Homo sapiens
gcccacgtgctggag

SEQ ID NO: 1775061 - DNA, 15 bp, Homo sapiens
cccacgtgctggagg

SEQ ID NO: 1775062 - DNA, 15 bp, Homo sapiens
ccacgtgctggaggt

SEQ ID NO: 1775063 - DNA, 15 bp, Homo sapiens
cacgtgctggaggtg

SEQ ID NO: 1775064 - DNA, 15 bp, Homo sapiens
acgtgctggaggtgc

SEQ ID NO: 1775065 - DNA, 15 bp, Homo sapiens
cgtgctggaggtgca

SEQ ID NO: 1775066 - DNA, 15 bp, Homo sapiens
gtgctggaggtgcac

SEQ ID NO: 1775067 - DNA, 15 bp, Homo sapiens
tgctggaggtgcacc

SEQ ID NO: 1775068 - DNA, 15 bp, Homo sapiens
gctggaggtgcacct

SEQ ID NO: 1775069 - DNA, 15 bp, Homo sapiens
ctggaggtgcacctc

SEQ ID NO: 1775070 - DNA, 15 bp, Homo sapiens
tggaggtgcacctct

SEQ ID NO: 1775071 - DNA, 15 bp, Homo sapiens
ggaggtgcacctctt

SEQ ID NO: 1775072 - DNA, 15 bp, Homo sapiens
gaggtgcacctcttt

SEQ ID NO: 1775073 - DNA, 15 bp, Homo sapiens
aggtgcacctctttc

SEQ ID NO: 1775074 - DNA, 15 bp, Homo sapiens
ggtgcacctctttct

SEQ ID NO: 1775075 - DNA, 15 bp, Homo sapiens
gtgcacctctttctc

SEQ ID NO: 1775076 - DNA, 15 bp, Homo sapiens
tgcacctctttctcc

SEQ ID NO: 1775077 - DNA, 15 bp, Homo sapiens
gcacctctttctccc

SEQ ID NO: 1775078 - DNA, 15 bp, Homo sapiens
cctctttctccctaa

SEQ ID NO: 1775079 - DNA, 15 bp, Homo sapiens
ctctttctccctaaa

SEQ ID NO: 1775080 - DNA, 15 bp, Homo sapiens
tctttctccctaaat

SEQ ID NO: 1775081 - DNA, 15 bp, Homo sapiens
ctttctccctaaata

SEQ ID NO: 1775082 - DNA, 15 bp, Homo sapiens
tttctccctaaatac

SEQ ID NO: 1775083 - DNA, 15 bp, Homo sapiens
ttctccctaaatacc

SEQ ID NO: 1775084 - DNA, 15 bp, Homo sapiens
tctccctaaatacct

SEQ ID NO: 1775085 - DNA, 15 bp, Homo sapiens
ctccctaaatacctc

SEQ ID NO: 1775086 - DNA, 15 bp, Homo sapiens
tccctaaatacctcc

SEQ ID NO: 1775087 - DNA, 15 bp, Homo sapiens
ccctaaatacctccc

SEQ ID NO: 1775088 - DNA, 15 bp, Homo sapiens
cctaaatacctccct

SEQ ID NO: 1775089 - DNA, 15 bp, Homo sapiens
ctaaatacctccctt

SEQ ID NO: 1775090 - DNA, 15 bp, Homo sapiens
taaatacctcccttc

SEQ ID NO: 1775091 - DNA, 15 bp, Homo sapiens
aaatacctcccttct

SEQ ID NO: 1775092 - DNA, 15 bp, Homo sapiens
aatacctcccttctc

SEQ ID NO: 1775093 - DNA, 15 bp, Homo sapiens
atacctcccttctcc

SEQ ID NO: 1775094 - DNA, 15 bp, Homo sapiens
tacctcccttctcca

SEQ ID NO: 1775095 - DNA, 15 bp, Homo sapiens
acctcccttctccag

SEQ ID NO: 1775096 - DNA, 15 bp, Homo sapiens
cctcccttctccagc

SEQ ID NO: 1775097 - DNA, 15 bp, Homo sapiens
ctcccttctccagct

SEQ ID NO: 1775098 - DNA, 15 bp, Homo sapiens
tcccttctccagctg

SEQ ID NO: 1775099 - DNA, 15 bp, Homo sapiens
cccttctccagctgt

SEQ ID NO: 1775100 - DNA, 15 bp, Homo sapiens
ccttctccagctgta

SEQ ID NO: 1775101 - DNA, 15 bp, Homo sapiens
cttctccagctgtaa

SEQ ID NO: 1775102 - DNA, 15 bp, Homo sapiens
ttctccagctgtaac

SEQ ID NO: 1775103 - DNA, 15 bp, Homo sapiens
tctccagctgtaacc

SEQ ID NO: 1775104 - DNA, 15 bp, Homo sapiens
ctccagctgtaacct

SEQ ID NO: 1775105 - DNA, 15 bp, Homo sapiens
tccagctgtaacctt

SEQ ID NO: 1775106 - DNA, 15 bp, Homo sapiens
ccagctgtaacctta

SEQ ID NO: 1775107 - DNA, 15 bp, Homo sapiens
cagctgtaaccttac

SEQ ID NO: 1775108 - DNA, 15 bp, Homo sapiens
agctgtaaccttaca

SEQ ID NO: 1775109 - DNA, 15 bp, Homo sapiens
gctgtaaccttacaa

SEQ ID NO: 1775110 - DNA, 15 bp, Homo sapiens
ctgtaaccttacaaa

SEQ ID NO: 1775111 - DNA, 15 bp, Homo sapiens
tgtaaccttacaaaa

SEQ ID NO: 1775112 - DNA, 15 bp, Homo sapiens
gtaaccttacaaaag

SEQ ID NO: 1775113 - DNA, 15 bp, Homo sapiens
taaccttacaaaagt

SEQ ID NO: 1775114 - DNA, 15 bp, Homo sapiens
aaccttacaaaagtc

SEQ ID NO: 1775115 - DNA, 15 bp, Homo sapiens
accttacaaaagtct

SEQ ID NO: 1775116 - DNA, 15 bp, Homo sapiens
ccttacaaaagtcta

SEQ ID NO: 1775117 - DNA, 15 bp, Homo sapiens
cttacaaaagtctac

SEQ ID NO: 1775118 - DNA, 15 bp, Homo sapiens
ttacaaaagtctacc

SEQ ID NO: 1775119 - DNA, 15 bp, Homo sapiens
tacaaaagtctacca

SEQ ID NO: 1775120 - DNA, 15 bp, Homo sapiens
acaaaagtctaccat

SEQ ID NO: 1775121 - DNA, 15 bp, Homo sapiens
caaaagtctaccatt

SEQ ID NO: 1775122 - DNA, 15 bp, Homo sapiens
aaaagtctaccatta

SEQ ID NO: 1775123 - DNA, 15 bp, Homo sapiens
aaagtctaccattat

SEQ ID NO: 1775124 - DNA, 15 bp, Homo sapiens
aagtctaccattata

SEQ ID NO: 1775125 - DNA, 15 bp, Homo sapiens
agtctaccattataa

SEQ ID NO: 1775126 - DNA, 15 bp, Homo sapiens
gtctaccattataag

SEQ ID NO: 1775127 - DNA, 15 bp, Homo sapiens
tctaccattataagg

SEQ ID NO: 1775128 - DNA, 15 bp, Homo sapiens
ctaccattataaggg

SEQ ID NO: 1775129 - DNA, 15 bp, Homo sapiens
taccattataagggt

SEQ ID NO: 1775130 - DNA, 15 bp, Homo sapiens
accattataagggtt

SEQ ID NO: 1775131 - DNA, 15 bp, Homo sapiens
ccattataagggttt

SEQ ID NO: 1775132 - DNA, 15 bp, Homo sapiens
cattataagggtttt

SEQ ID NO: 1775133 - DNA, 15 bp, Homo sapiens
attataagggttttt

SEQ ID NO: 1775134 - DNA, 15 bp, Homo sapiens
ttataagggtttttc

SEQ ID NO: 1775135 - DNA, 15 bp, Homo sapiens
tataagggtttttct

SEQ ID NO: 1775136 - DNA, 15 bp, Homo sapiens
ataagggtttttctc

SEQ ID NO: 1775137 - DNA, 15 bp, Homo sapiens
taagggtttttctct

SEQ ID NO: 1775138 - DNA, 15 bp, Homo sapiens
aagggtttttctctg

SEQ ID NO: 1775139 - DNA, 15 bp, Homo sapiens
agggtttttctctga

SEQ ID NO: 1775140 - DNA, 15 bp, Homo sapiens
gggtttttctctgag

SEQ ID NO: 1775141 - DNA, 15 bp, Homo sapiens
ggtttttctctgagc

SEQ ID NO: 1775142 - DNA, 15 bp, Homo sapiens
gtttttctctgagct

SEQ ID NO: 1775143 - DNA, 15 bp, Homo sapiens
tttttctctgagcta

SEQ ID NO: 1775144 - DNA, 15 bp, Homo sapiens
ttttctctgagctaa

SEQ ID NO: 1775145 - DNA, 15 bp, Homo sapiens
tttctctgagctaaa

SEQ ID NO: 1775146 - DNA, 15 bp, Homo sapiens
ttctctgagctaaac

SEQ ID NO: 1775147 - DNA, 15 bp, Homo sapiens
tctctgagctaaacc

SEQ ID NO: 1775148 - DNA, 15 bp, Homo sapiens
ctctgagctaaaccc

SEQ ID NO: 1775149 - DNA, 15 bp, Homo sapiens
tctgagctaaaccca

SEQ ID NO: 1775150 - DNA, 15 bp, Homo sapiens
ctgagctaaacccag

SEQ ID NO: 1775151 - DNA, 15 bp, Homo sapiens
tgagctaaacccagc

SEQ ID NO: 1775152 - DNA, 15 bp, Homo sapiens
gagctaaacccagcc

SEQ ID NO: 1775153 - DNA, 15 bp, Homo sapiens
agctaaacccagccc

SEQ ID NO: 1775154 - DNA, 15 bp, Homo sapiens
gctaaacccagccct

SEQ ID NO: 1775155 - DNA, 15 bp, Homo sapiens
ctaaacccagccctc

SEQ ID NO: 1775156 - DNA, 15 bp, Homo sapiens
taaacccagccctct

SEQ ID NO: 1775157 - DNA, 15 bp, Homo sapiens
aaacccagccctctc

SEQ ID NO: 1775158 - DNA, 15 bp, Homo sapiens
aacccagccctctcc

SEQ ID NO: 1775159 - DNA, 15 bp, Homo sapiens
acccagccctctcca

SEQ ID NO: 1775160 - DNA, 15 bp, Homo sapiens
cccagccctctccag

SEQ ID NO: 1775161 - DNA, 15 bp, Homo sapiens
ccagccctctccagg

SEQ ID NO: 1775162 - DNA, 15 bp, Homo sapiens
cagccctctccaggt

SEQ ID NO: 1775163 - DNA, 15 bp, Homo sapiens
agccctctccaggtt

SEQ ID NO: 1775164 - DNA, 15 bp, Homo sapiens
gccctctccaggttc

SEQ ID NO: 1775165 - DNA, 15 bp, Homo sapiens
ccctctccaggttcc

SEQ ID NO: 1775166 - DNA, 15 bp, Homo sapiens
cctctccaggttccc

SEQ ID NO: 1775167 - DNA, 15 bp, Homo sapiens
ctctccaggttccct

SEQ ID NO: 1775168 - DNA, 15 bp, Homo sapiens
tctccaggttccctc

SEQ ID NO: 1775169 - DNA, 15 bp, Homo sapiens
ctccaggttccctct

SEQ ID NO: 1775170 - DNA, 15 bp, Homo sapiens
tccaggttccctctc

SEQ ID NO: 1775171 - DNA, 15 bp, Homo sapiens
ccaggttccctctct

SEQ ID NO: 1775172 - DNA, 15 bp, Homo sapiens
caggttccctctctg

SEQ ID NO: 1775173 - DNA, 15 bp, Homo sapiens
aggttccctctctgg

SEQ ID NO: 1775174 - DNA, 15 bp, Homo sapiens
ggttccctctctggg

SEQ ID NO: 1775175 - DNA, 15 bp, Homo sapiens
gttccctctctgggg

SEQ ID NO: 1775176 - DNA, 15 bp, Homo sapiens
ttccctctctgggga

SEQ ID NO: 1775177 - DNA, 15 bp, Homo sapiens
tccctctctggggaa

SEQ ID NO: 1775178 - DNA, 15 bp, Homo sapiens
ccctctctggggaaa

SEQ ID NO: 1775179 - DNA, 15 bp, Homo sapiens
cctctctggggaaag

SEQ ID NO: 1775180 - DNA, 15 bp, Homo sapiens
ctctctggggaaagg

SEQ ID NO: 1775181 - DNA, 15 bp, Homo sapiens
tctctggggaaaggc

SEQ ID NO: 1775182 - DNA, 15 bp, Homo sapiens
ctctggggaaaggca

SEQ ID NO: 1775183 - DNA, 15 bp, Homo sapiens
tctggggaaaggcaa

SEQ ID NO: 1775184 - DNA, 15 bp, Homo sapiens
ctggggaaaggcaac

SEQ ID NO: 1775185 - DNA, 15 bp, Homo sapiens
tggggaaaggcaact

SEQ ID NO: 1775186 - DNA, 15 bp, Homo sapiens
ggggaaaggcaacta

SEQ ID NO: 1775187 - DNA, 15 bp, Homo sapiens
gggaaaggcaactat

SEQ ID NO: 1775188 - DNA, 15 bp, Homo sapiens
ggaaaggcaactatt

SEQ ID NO: 1775189 - DNA, 15 bp, Homo sapiens
gaaaggcaactattg

SEQ ID NO: 1775190 - DNA, 15 bp, Homo sapiens
aaaggcaactattga

SEQ ID NO: 1775191 - DNA, 15 bp, Homo sapiens
aaggcaactattgag

SEQ ID NO: 1775192 - DNA, 15 bp, Homo sapiens
aggcaactattgagt

SEQ ID NO: 1775193 - DNA, 15 bp, Homo sapiens
ggcaactattgagtt

SEQ ID NO: 1775194 - DNA, 15 bp, Homo sapiens
gcaactattgagtta

SEQ ID NO: 1775195 - DNA, 15 bp, Homo sapiens
caactattgagttac

SEQ ID NO: 1775196 - DNA, 15 bp, Homo sapiens
aactattgagttacc

SEQ ID NO: 1775197 - DNA, 15 bp, Homo sapiens
actattgagttacca

SEQ ID NO: 1775198 - DNA, 15 bp, Homo sapiens
ctattgagttaccaa

SEQ ID NO: 1775199 - DNA, 15 bp, Homo sapiens
tattgagttaccaac

SEQ ID NO: 1775200 - DNA, 15 bp, Homo sapiens
attgagttaccaaca

SEQ ID NO: 1775201 - DNA, 15 bp, Homo sapiens
aacacattataaatt

SEQ ID NO: 1775202 - DNA, 15 bp, Homo sapiens
acacattataaattg

SEQ ID NO: 1775203 - DNA, 15 bp, Homo sapiens
cacattataaattgc

SEQ ID NO: 1775204 - DNA, 15 bp, Homo sapiens
acattataaattgca

SEQ ID NO: 1775205 - DNA, 15 bp, Homo sapiens
cattataaattgcag

SEQ ID NO: 1775206 - DNA, 15 bp, Homo sapiens
attataaattgcagt

SEQ ID NO: 1775207 - DNA, 15 bp, Homo sapiens
ttataaattgcagtg

SEQ ID NO: 1775208 - DNA, 15 bp, Homo sapiens
tataaattgcagtga

SEQ ID NO: 1775209 - DNA, 15 bp, Homo sapiens
ataaattgcagtgag

SEQ ID NO: 1775210 - DNA, 15 bp, Homo sapiens
taaattgcagtgagt

SEQ ID NO: 1775211 - DNA, 15 bp, Homo sapiens
aaattgcagtgagtt

SEQ ID NO: 1775212 - DNA, 15 bp, Homo sapiens
aattgcagtgagtta

SEQ ID NO: 1775213 - DNA, 15 bp, Homo sapiens
attgcagtgagttat

SEQ ID NO: 1775214 - DNA, 15 bp, Homo sapiens
ttgcagtgagttata

SEQ ID NO: 1775215 - DNA, 15 bp, Homo sapiens
tgcagtgagttatac

SEQ ID NO: 1775216 - DNA, 15 bp, Homo sapiens
gcagtgagttatacg

SEQ ID NO: 1775217 - DNA, 15 bp, Homo sapiens
cagtgagttatacga

SEQ ID NO: 1775218 - DNA, 15 bp, Homo sapiens
agtgagttatacgaa

SEQ ID NO: 1775219 - DNA, 15 bp, Homo sapiens
gtgagttatacgaag

SEQ ID NO: 1775220 - DNA, 15 bp, Homo sapiens
tgagttatacgaagt

SEQ ID NO: 1775221 - DNA, 15 bp, Homo sapiens
gagttatacgaagtg

SEQ ID NO: 1775222 - DNA, 15 bp, Homo sapiens
agttatacgaagtga

SEQ ID NO: 1775223 - DNA, 15 bp, Homo sapiens
gttatacgaagtgag

SEQ ID NO: 1775224 - DNA, 15 bp, Homo sapiens
ttatacgaagtgaga

SEQ ID NO: 1775225 - DNA, 15 bp, Homo sapiens
tatacgaagtgagat

SEQ ID NO: 1775226 - DNA, 15 bp, Homo sapiens
atacgaagtgagata

SEQ ID NO: 1775227 - DNA, 15 bp, Homo sapiens
tacgaagtgagatat

SEQ ID NO: 1775228 - DNA, 15 bp, Homo sapiens
acgaagtgagatatt

SEQ ID NO: 1775229 - DNA, 15 bp, Homo sapiens
cgaagtgagatatta

SEQ ID NO: 1775230 - DNA, 15 bp, Homo sapiens
gaagtgagatattat

SEQ ID NO: 1775231 - DNA, 15 bp, Homo sapiens
aagtgagatattata

SEQ ID NO: 1775232 - DNA, 15 bp, Homo sapiens
agtgagatattataa

SEQ ID NO: 1775233 - DNA, 15 bp, Homo sapiens
gtgagatattataaa

SEQ ID NO: 1775234 - DNA, 15 bp, Homo sapiens
tgagatattataaag

SEQ ID NO: 1775235 - DNA, 15 bp, Homo sapiens
gagatattataaagc

SEQ ID NO: 1775236 - DNA, 15 bp, Homo sapiens
agatattataaagca

SEQ ID NO: 1775237 - DNA, 15 bp, Homo sapiens
gatattataaagcaa

SEQ ID NO: 1775238 - DNA, 15 bp, Homo sapiens
atattataaagcaaa

SEQ ID NO: 1775239 - DNA, 15 bp, Homo sapiens
tattataaagcaaag

SEQ ID NO: 1775240 - DNA, 15 bp, Homo sapiens
attataaagcaaagt

SEQ ID NO: 1775241 - DNA, 15 bp, Homo sapiens
ttataaagcaaagtg

SEQ ID NO: 1775242 - DNA, 15 bp, Homo sapiens
tataaagcaaagtga

SEQ ID NO: 1775243 - DNA, 15 bp, Homo sapiens
ataaagcaaagtgaa

SEQ ID NO: 1775244 - DNA, 15 bp, Homo sapiens
taaagcaaagtgaat

SEQ ID NO: 1775245 - DNA, 15 bp, Homo sapiens
aaagcaaagtgaatt

SEQ ID NO: 1775246 - DNA, 15 bp, Homo sapiens
aagcaaagtgaatta

SEQ ID NO: 1775247 - DNA, 15 bp, Homo sapiens
agcaaagtgaattag

SEQ ID NO: 1775248 - DNA, 15 bp, Homo sapiens
gcaaagtgaattagg

SEQ ID NO: 1775249 - DNA, 15 bp, Homo sapiens
caaagtgaattaggc

SEQ ID NO: 1775250 - DNA, 15 bp, Homo sapiens
aaagtgaattaggct

SEQ ID NO: 1775251 - DNA, 15 bp, Homo sapiens
aagtgaattaggctt

SEQ ID NO: 1775252 - DNA, 15 bp, Homo sapiens
agtgaattaggcttt

SEQ ID NO: 1775253 - DNA, 15 bp, Homo sapiens
gtgaattaggctttg

SEQ ID NO: 1775254 - DNA, 15 bp, Homo sapiens
tgaattaggctttga

SEQ ID NO: 1775255 - DNA, 15 bp, Homo sapiens
gaattaggctttgat

SEQ ID NO: 1775256 - DNA, 15 bp, Homo sapiens
aattaggctttgata

SEQ ID NO: 1775257 - DNA, 15 bp, Homo sapiens
attaggctttgataa

SEQ ID NO: 1775258 - DNA, 15 bp, Homo sapiens
ttaggctttgataaa

SEQ ID NO: 1775259 - DNA, 15 bp, Homo sapiens
taggctttgataaat

SEQ ID NO: 1775260 - DNA, 15 bp, Homo sapiens
aggctttgataaatc

SEQ ID NO: 1775261 - DNA, 15 bp, Homo sapiens
ggctttgataaatca

SEQ ID NO: 1775262 - DNA, 15 bp, Homo sapiens
gctttgataaatcaa

SEQ ID NO: 1775263 - DNA, 15 bp, Homo sapiens
ctttgataaatcaag

SEQ ID NO: 1775264 - DNA, 15 bp, Homo sapiens
tttgataaatcaagg

SEQ ID NO: 1775265 - DNA, 15 bp, Homo sapiens
ttgataaatcaagga

SEQ ID NO: 1775266 - DNA, 15 bp, Homo sapiens
tgataaatcaaggag

SEQ ID NO: 1775267 - DNA, 15 bp, Homo sapiens
gataaatcaaggagg

SEQ ID NO: 1775268 - DNA, 15 bp, Homo sapiens
ataaatcaaggagga

SEQ ID NO: 1775269 - DNA, 15 bp, Homo sapiens
taaatcaaggaggat

SEQ ID NO: 1775270 - DNA, 15 bp, Homo sapiens
aaatcaaggaggata

SEQ ID NO: 1775271 - DNA, 15 bp, Homo sapiens
aatcaaggaggatat

SEQ ID NO: 1775272 - DNA, 15 bp, Homo sapiens
atcaaggaggatatt

SEQ ID NO: 1775273 - DNA, 15 bp, Homo sapiens
tcaaggaggatattt

SEQ ID NO: 1775274 - DNA, 15 bp, Homo sapiens
caaggaggatatttt

SEQ ID NO: 1775275 - DNA, 15 bp, Homo sapiens
aaggaggatattttt

SEQ ID NO: 1775276 - DNA, 15 bp, Homo sapiens
aggaggatatttttt

SEQ ID NO: 1775277 - DNA, 15 bp, Homo sapiens
ggaggatattttttc

SEQ ID NO: 1775278 - DNA, 15 bp, Homo sapiens
gaggatattttttca

SEQ ID NO: 1775279 - DNA, 15 bp, Homo sapiens
aggatattttttcac

SEQ ID NO: 1775280 - DNA, 15 bp, Homo sapiens
ggatattttttcaca

SEQ ID NO: 1775281 - DNA, 15 bp, Homo sapiens
gatattttttcacac

SEQ ID NO: 1775282 - DNA, 15 bp, Homo sapiens
atattttttcacacg

SEQ ID NO: 1775283 - DNA, 15 bp, Homo sapiens
tattttttcacacga

SEQ ID NO: 1775284 - DNA, 15 bp, Homo sapiens
attttttcacacgaa

SEQ ID NO: 1775285 - DNA, 15 bp, Homo sapiens
ttttttcacacgaag

SEQ ID NO: 1775286 - DNA, 15 bp, Homo sapiens
tttttcacacgaaga

SEQ ID NO: 1775287 - DNA, 15 bp, Homo sapiens
ttttcacacgaagac

SEQ ID NO: 1775288 - DNA, 15 bp, Homo sapiens
tttcacacgaagacc

SEQ ID NO: 1775289 - DNA, 15 bp, Homo sapiens
ttcacacgaagacca

SEQ ID NO: 1775290 - DNA, 15 bp, Homo sapiens
tcacacgaagaccat

SEQ ID NO: 1775291 - DNA, 15 bp, Homo sapiens
cacacgaagaccatg

SEQ ID NO: 1775292 - DNA, 15 bp, Homo sapiens
acacgaagaccatga

SEQ ID NO: 1775293 - DNA, 15 bp, Homo sapiens
cacgaagaccatgat

SEQ ID NO: 1775294 - DNA, 15 bp, Homo sapiens
acgaagaccatgata

SEQ ID NO: 1775295 - DNA, 15 bp, Homo sapiens
cgaagaccatgatat

SEQ ID NO: 1775296 - DNA, 15 bp, Homo sapiens
gaagaccatgatatt

SEQ ID NO: 1775297 - DNA, 15 bp, Homo sapiens
aagaccatgatattg

SEQ ID NO: 1775298 - DNA, 15 bp, Homo sapiens
agaccatgatattgt

SEQ ID NO: 1775299 - DNA, 15 bp, Homo sapiens
gaccatgatattgta

SEQ ID NO: 1775300 - DNA, 15 bp, Homo sapiens
accatgatattgtat

SEQ ID NO: 1775301 - DNA, 15 bp, Homo sapiens
ccatgatattgtatt

SEQ ID NO: 1775302 - DNA, 15 bp, Homo sapiens
catgatattgtattt

SEQ ID NO: 1775303 - DNA, 15 bp, Homo sapiens
atgatattgtatttg

SEQ ID NO: 1775304 - DNA, 15 bp, Homo sapiens
tgatattgtatttgt

SEQ ID NO: 1775305 - DNA, 15 bp, Homo sapiens
gatattgtatttgtc

SEQ ID NO: 1775306 - DNA, 15 bp, Homo sapiens
atattgtatttgtcc

SEQ ID NO: 1775307 - DNA, 15 bp, Homo sapiens
tattgtatttgtccg

SEQ ID NO: 1775308 - DNA, 15 bp, Homo sapiens
attgtatttgtccgt

SEQ ID NO: 1775309 - DNA, 15 bp, Homo sapiens
ttgtatttgtccgtg

SEQ ID NO: 1775310 - DNA, 15 bp, Homo sapiens
tgtatttgtccgtgt

SEQ ID NO: 1775311 - DNA, 15 bp, Homo sapiens
gtatttgtccgtgtt

SEQ ID NO: 1775312 - DNA, 15 bp, Homo sapiens
tatttgtccgtgttg

SEQ ID NO: 1775313 - DNA, 15 bp, Homo sapiens
atttgtccgtgttgc

SEQ ID NO: 1775314 - DNA, 15 bp, Homo sapiens
tttgtccgtgttgct

SEQ ID NO: 1775315 - DNA, 15 bp, Homo sapiens
ttgtccgtgttgctt

SEQ ID NO: 1775316 - DNA, 15 bp, Homo sapiens
tgtccgtgttgctta

SEQ ID NO: 1775317 - DNA, 15 bp, Homo sapiens
gtccgtgttgcttaa

SEQ ID NO: 1775318 - DNA, 15 bp, Homo sapiens
tccgtgttgcttaag

SEQ ID NO: 1775319 - DNA, 15 bp, Homo sapiens
ccgtgttgcttaagt

SEQ ID NO: 1775320 - DNA, 15 bp, Homo sapiens
cgtgttgcttaagtg

SEQ ID NO: 1775321 - DNA, 15 bp, Homo sapiens
gtgttgcttaagtgg

SEQ ID NO: 1775322 - DNA, 15 bp, Homo sapiens
tgttgcttaagtgga

SEQ ID NO: 1775323 - DNA, 15 bp, Homo sapiens
gttgcttaagtggat

SEQ ID NO: 1775324 - DNA, 15 bp, Homo sapiens
ttgcttaagtggatt

SEQ ID NO: 1775325 - DNA, 15 bp, Homo sapiens
tgcttaagtggattg

SEQ ID NO: 1775326 - DNA, 15 bp, Homo sapiens
gcttaagtggattgt

SEQ ID NO: 1775327 - DNA, 15 bp, Homo sapiens
cttaagtggattgtt

SEQ ID NO: 1775328 - DNA, 15 bp, Homo sapiens
ttaagtggattgtta

SEQ ID NO: 1775329 - DNA, 15 bp, Homo sapiens
taagtggattgttaa

SEQ ID NO: 1775330 - DNA, 15 bp, Homo sapiens
aagtggattgttaat

SEQ ID NO: 1775331 - DNA, 15 bp, Homo sapiens
agtggattgttaata

SEQ ID NO: 1775332 - DNA, 15 bp, Homo sapiens
gtggattgttaatat

SEQ ID NO: 1775333 - DNA, 15 bp, Homo sapiens
tggattgttaatatt

SEQ ID NO: 1775334 - DNA, 15 bp, Homo sapiens
ggattgttaatattt

SEQ ID NO: 1775335 - DNA, 15 bp, Homo sapiens
gattgttaatattta

SEQ ID NO: 1775336 - DNA, 15 bp, Homo sapiens
attgttaatatttat

SEQ ID NO: 1775337 - DNA, 15 bp, Homo sapiens
ttgttaatatttatg

SEQ ID NO: 1775338 - DNA, 15 bp, Homo sapiens
tgttaatatttatga

SEQ ID NO: 1775339 - DNA, 15 bp, Homo sapiens
gttaatatttatgaa

SEQ ID NO: 1775340 - DNA, 15 bp, Homo sapiens
ttaatatttatgaaa

SEQ ID NO: 1775341 - DNA, 15 bp, Homo sapiens
taatatttatgaaaa

SEQ ID NO: 1775342 - DNA, 15 bp, Homo sapiens
aatatttatgaaaaa

SEQ ID NO: 1775343 - DNA, 15 bp, Homo sapiens
atatttatgaaaaat

SEQ ID NO: 1775344 - DNA, 15 bp, Homo sapiens
tatttatgaaaaatg

SEQ ID NO: 1775345 - DNA, 15 bp, Homo sapiens
atttatgaaaaatgc

SEQ ID NO: 1775346 - DNA, 15 bp, Homo sapiens
tttatgaaaaatgca

SEQ ID NO: 1775347 - DNA, 15 bp, Homo sapiens
ttatgaaaaatgcag

SEQ ID NO: 1775348 - DNA, 15 bp, Homo sapiens
tatgaaaaatgcaga

SEQ ID NO: 1775349 - DNA, 15 bp, Homo sapiens
atgaaaaatgcagaa

SEQ ID NO: 1775350 - DNA, 15 bp, Homo sapiens
tgaaaaatgcagaaa

SEQ ID NO: 1775351 - DNA, 15 bp, Homo sapiens
gaaaaatgcagaaat

SEQ ID NO: 1775352 - DNA, 15 bp, Homo sapiens
aaaaatgcagaaatc

SEQ ID NO: 1775353 - DNA, 15 bp, Homo sapiens
aaaatgcagaaatca

SEQ ID NO: 1775354 - DNA, 15 bp, Homo sapiens
aaatgcagaaatcaa

SEQ ID NO: 1775355 - DNA, 15 bp, Homo sapiens
aatgcagaaatcaaa

SEQ ID NO: 1775356 - DNA, 15 bp, Homo sapiens
atgcagaaatcaaat

SEQ ID NO: 1775357 - DNA, 15 bp, Homo sapiens
tgcagaaatcaaatc

SEQ ID NO: 1775358 - DNA, 15 bp, Homo sapiens
gcagaaatcaaatca

SEQ ID NO: 1775359 - DNA, 15 bp, Homo sapiens
cagaaatcaaatcac

SEQ ID NO: 1775360 - DNA, 15 bp, Homo sapiens
agaaatcaaatcaca

SEQ ID NO: 1775361 - DNA, 15 bp, Homo sapiens
gaaatcaaatcacac

SEQ ID NO: 1775362 - DNA, 15 bp, Homo sapiens
aaatcaaatcacacc

SEQ ID NO: 1775363 - DNA, 15 bp, Homo sapiens
aatcaaatcacacca

SEQ ID NO: 1775364 - DNA, 15 bp, Homo sapiens
atcaaatcacaccaa

SEQ ID NO: 1775365 - DNA, 15 bp, Homo sapiens
tcaaatcacaccaag

SEQ ID NO: 1775366 - DNA, 15 bp, Homo sapiens
caaatcacaccaaga

SEQ ID NO: 1775367 - DNA, 15 bp, Homo sapiens
aaatcacaccaagag

SEQ ID NO: 1775368 - DNA, 15 bp, Homo sapiens
aatcacaccaagagt

SEQ ID NO: 1775369 - DNA, 15 bp, Homo sapiens
atcacaccaagagta

SEQ ID NO: 1775370 - DNA, 15 bp, Homo sapiens
tcacaccaagagtac

SEQ ID NO: 1775371 - DNA, 15 bp, Homo sapiens
cacaccaagagtaca

SEQ ID NO: 1775372 - DNA, 15 bp, Homo sapiens
acaccaagagtacag

SEQ ID NO: 1775373 - DNA, 15 bp, Homo sapiens
caccaagagtacaga

SEQ ID NO: 1775374 - DNA, 15 bp, Homo sapiens
accaagagtacagaa

SEQ ID NO: 1775375 - DNA, 15 bp, Homo sapiens
ccaagagtacagaat

SEQ ID NO: 1775376 - DNA, 15 bp, Homo sapiens
caagagtacagaatc

SEQ ID NO: 1775377 - DNA, 15 bp, Homo sapiens
aagagtacagaatca

SEQ ID NO: 1775378 - DNA, 15 bp, Homo sapiens
agagtacagaatcaa

SEQ ID NO: 1775379 - DNA, 15 bp, Homo sapiens
gagtacagaatcaag

SEQ ID NO: 1775380 - DNA, 15 bp, Homo sapiens
agtacagaatcaagc

SEQ ID NO: 1775381 - DNA, 15 bp, Homo sapiens
gtacagaatcaagcc

SEQ ID NO: 1775382 - DNA, 15 bp, Homo sapiens
tacagaatcaagcca

SEQ ID NO: 1775383 - DNA, 15 bp, Homo sapiens
acagaatcaagccag

SEQ ID NO: 1775384 - DNA, 15 bp, Homo sapiens
cagaatcaagccagc

SEQ ID NO: 1775385 - DNA, 15 bp, Homo sapiens
agaatcaagccagca

SEQ ID NO: 1775386 - DNA, 15 bp, Homo sapiens
gaatcaagccagcaa

SEQ ID NO: 1775387 - DNA, 15 bp, Homo sapiens
aatcaagccagcaat

SEQ ID NO: 1775388 - DNA, 15 bp, Homo sapiens
atcaagccagcaatg

SEQ ID NO: 1775389 - DNA, 15 bp, Homo sapiens
tcaagccagcaatgt

SEQ ID NO: 1775390 - DNA, 15 bp, Homo sapiens
caagccagcaatgta

SEQ ID NO: 1775391 - DNA, 15 bp, Homo sapiens
aagccagcaatgtac

SEQ ID NO: 1775392 - DNA, 15 bp, Homo sapiens
agccagcaatgtaca

SEQ ID NO: 1775393 - DNA, 15 bp, Homo sapiens
gccagcaatgtacag

SEQ ID NO: 1775394 - DNA, 15 bp, Homo sapiens
ccagcaatgtacaga

SEQ ID NO: 1775395 - DNA, 15 bp, Homo sapiens
cagcaatgtacagag

SEQ ID NO: 1775396 - DNA, 15 bp, Homo sapiens
agcaatgtacagagc

SEQ ID NO: 1775397 - DNA, 15 bp, Homo sapiens
gcaatgtacagagcc

SEQ ID NO: 1775398 - DNA, 15 bp, Homo sapiens
caatgtacagagcca

SEQ ID NO: 1775399 - DNA, 15 bp, Homo sapiens
aatgtacagagccaa

SEQ ID NO: 1775400 - DNA, 15 bp, Homo sapiens
atgtacagagccaac

SEQ ID NO: 1775401 - DNA, 15 bp, Homo sapiens
tgtacagagccaacc

SEQ ID NO: 1775402 - DNA, 15 bp, Homo sapiens
gtacagagccaacct

SEQ ID NO: 1775403 - DNA, 15 bp, Homo sapiens
tacagagccaacctt

SEQ ID NO: 1775404 - DNA, 15 bp, Homo sapiens
acagagccaaccttg

SEQ ID NO: 1775405 - DNA, 15 bp, Homo sapiens
cagagccaaccttgg

SEQ ID NO: 1775406 - DNA, 15 bp, Homo sapiens
agagccaaccttggg

SEQ ID NO: 1775407 - DNA, 15 bp, Homo sapiens
gagccaaccttgggc

SEQ ID NO: 1775408 - DNA, 15 bp, Homo sapiens
agccaaccttgggca

SEQ ID NO: 1775409 - DNA, 15 bp, Homo sapiens
gccaaccttgggcag

SEQ ID NO: 1775410 - DNA, 15 bp, Homo sapiens
ccaaccttgggcagc

SEQ ID NO: 1775411 - DNA, 15 bp, Homo sapiens
caaccttgggcagca

SEQ ID NO: 1775412 - DNA, 15 bp, Homo sapiens
aaccttgggcagcat

SEQ ID NO: 1775413 - DNA, 15 bp, Homo sapiens
accttgggcagcatt

SEQ ID NO: 1775414 - DNA, 15 bp, Homo sapiens
ccttgggcagcattt

SEQ ID NO: 1775415 - DNA, 15 bp, Homo sapiens
cttgggcagcatttc

SEQ ID NO: 1775416 - DNA, 15 bp, Homo sapiens
ttgggcagcatttcc

SEQ ID NO: 1775417 - DNA, 15 bp, Homo sapiens
tgggcagcatttcct

SEQ ID NO: 1775418 - DNA, 15 bp, Homo sapiens
gggcagcatttcctc

SEQ ID NO: 1775419 - DNA, 15 bp, Homo sapiens
ggcagcatttcctct

SEQ ID NO: 1775420 - DNA, 15 bp, Homo sapiens
gcagcatttcctctt

SEQ ID NO: 1775421 - DNA, 15 bp, Homo sapiens
cagcatttcctcttt

SEQ ID NO: 1775422 - DNA, 15 bp, Homo sapiens
agcatttcctctttt

SEQ ID NO: 1775423 - DNA, 15 bp, Homo sapiens
gcatttcctctttta

SEQ ID NO: 1775424 - DNA, 15 bp, Homo sapiens
catttcctcttttat

SEQ ID NO: 1775425 - DNA, 15 bp, Homo sapiens
atttcctcttttata

SEQ ID NO: 1775426 - DNA, 15 bp, Homo sapiens
tttcctcttttatat

SEQ ID NO: 1775427 - DNA, 15 bp, Homo sapiens
ttcctcttttatatt

SEQ ID NO: 1775428 - DNA, 15 bp, Homo sapiens
tcctcttttatatta

SEQ ID NO: 1775429 - DNA, 15 bp, Homo sapiens
cctcttttatattat

SEQ ID NO: 1775430 - DNA, 15 bp, Homo sapiens
ctcttttatattatt

SEQ ID NO: 1775431 - DNA, 15 bp, Homo sapiens
tcttttatattattt

SEQ ID NO: 1775432 - DNA, 15 bp, Homo sapiens
cttttatattatttg

SEQ ID NO: 1775433 - DNA, 15 bp, Homo sapiens
ttttatattatttga

SEQ ID NO: 1775434 - DNA, 15 bp, Homo sapiens
tttatattatttgaa

SEQ ID NO: 1775435 - DNA, 15 bp, Homo sapiens
ttatattatttgaat

SEQ ID NO: 1775436 - DNA, 15 bp, Homo sapiens
tatattatttgaatc

SEQ ID NO: 1775437 - DNA, 15 bp, Homo sapiens
atattatttgaatca

SEQ ID NO: 1775438 - DNA, 15 bp, Homo sapiens
tattatttgaatcat

SEQ ID NO: 1775439 - DNA, 15 bp, Homo sapiens
attatttgaatcatt

SEQ ID NO: 1775440 - DNA, 15 bp, Homo sapiens
ttatttgaatcattg

SEQ ID NO: 1775441 - DNA, 15 bp, Homo sapiens
tatttgaatcattgt

SEQ ID NO: 1775442 - DNA, 15 bp, Homo sapiens
atttgaatcattgtt

SEQ ID NO: 1775443 - DNA, 15 bp, Homo sapiens
tttgaatcattgttt

SEQ ID NO: 1775444 - DNA, 15 bp, Homo sapiens
ttgaatcattgtttc

SEQ ID NO: 1775445 - DNA, 15 bp, Homo sapiens
tgaatcattgtttca

SEQ ID NO: 1775446 - DNA, 15 bp, Homo sapiens
gaatcattgtttcag

SEQ ID NO: 1775447 - DNA, 15 bp, Homo sapiens
aatcattgtttcagt

SEQ ID NO: 1775448 - DNA, 15 bp, Homo sapiens
atcattgtttcagtt

SEQ ID NO: 1775449 - DNA, 15 bp, Homo sapiens
tcattgtttcagtta

SEQ ID NO: 1775450 - DNA, 15 bp, Homo sapiens
cattgtttcagttaa

SEQ ID NO: 1775451 - DNA, 15 bp, Homo sapiens
attgtttcagttaat

SEQ ID NO: 1775452 - DNA, 15 bp, Homo sapiens
ttgtttcagttaatc

SEQ ID NO: 1775453 - DNA, 15 bp, Homo sapiens
tgtttcagttaatct

SEQ ID NO: 1775454 - DNA, 15 bp, Homo sapiens
gtttcagttaatctg

SEQ ID NO: 1775455 - DNA, 15 bp, Homo sapiens
tttcagttaatctgg

SEQ ID NO: 1775456 - DNA, 15 bp, Homo sapiens
ttcagttaatctggt

SEQ ID NO: 1775457 - DNA, 15 bp, Homo sapiens
tcagttaatctggtg

SEQ ID NO: 1775458 - DNA, 15 bp, Homo sapiens
cagttaatctggtgc

SEQ ID NO: 1775459 - DNA, 15 bp, Homo sapiens
agttaatctggtgcc

SEQ ID NO: 1775460 - DNA, 15 bp, Homo sapiens
gttaatctggtgcca

SEQ ID NO: 1775461 - DNA, 15 bp, Homo sapiens
ttaatctggtgccat

SEQ ID NO: 1775462 - DNA, 15 bp, Homo sapiens
taatctggtgccatt

SEQ ID NO: 1775463 - DNA, 15 bp, Homo sapiens
aatctggtgccattt

SEQ ID NO: 1775464 - DNA, 15 bp, Homo sapiens
atctggtgccatttc

SEQ ID NO: 1775465 - DNA, 15 bp, Homo sapiens
tctggtgccatttca

SEQ ID NO: 1775466 - DNA, 15 bp, Homo sapiens
ctggtgccatttcat

SEQ ID NO: 1775467 - DNA, 15 bp, Homo sapiens
tggtgccatttcatg

SEQ ID NO: 1775468 - DNA, 15 bp, Homo sapiens
ggtgccatttcatgt

SEQ ID NO: 1775469 - DNA, 15 bp, Homo sapiens
gtgccatttcatgta

SEQ ID NO: 1775470 - DNA, 15 bp, Homo sapiens
tgccatttcatgtac

SEQ ID NO: 1775471 - DNA, 15 bp, Homo sapiens
gccatttcatgtaca

SEQ ID NO: 1775472 - DNA, 15 bp, Homo sapiens
ccatttcatgtacag

SEQ ID NO: 1775473 - DNA, 15 bp, Homo sapiens
catttcatgtacaga

SEQ ID NO: 1775474 - DNA, 15 bp, Homo sapiens
atttcatgtacagat

SEQ ID NO: 1775475 - DNA, 15 bp, Homo sapiens
tttcatgtacagatg

SEQ ID NO: 1775476 - DNA, 15 bp, Homo sapiens
ttcatgtacagatga

SEQ ID NO: 1775477 - DNA, 15 bp, Homo sapiens
tcatgtacagatgat

SEQ ID NO: 1775478 - DNA, 15 bp, Homo sapiens
catgtacagatgatc

SEQ ID NO: 1775479 - DNA, 15 bp, Homo sapiens
atgtacagatgatcc

SEQ ID NO: 1775480 - DNA, 15 bp, Homo sapiens
tgtacagatgatccc

SEQ ID NO: 1775481 - DNA, 15 bp, Homo sapiens
gtacagatgatcccc

SEQ ID NO: 1775482 - DNA, 15 bp, Homo sapiens
tacagatgatccccg

SEQ ID NO: 1775483 - DNA, 15 bp, Homo sapiens
acagatgatccccga

SEQ ID NO: 1775484 - DNA, 15 bp, Homo sapiens
cagatgatccccgac

SEQ ID NO: 1775485 - DNA, 15 bp, Homo sapiens
agatgatccccgact

SEQ ID NO: 1775486 - DNA, 15 bp, Homo sapiens
gatgatccccgactt

SEQ ID NO: 1775487 - DNA, 15 bp, Homo sapiens
atgatccccgactta

SEQ ID NO: 1775488 - DNA, 15 bp, Homo sapiens
tgatccccgacttat

SEQ ID NO: 1775489 - DNA, 15 bp, Homo sapiens
gatccccgacttatg

SEQ ID NO: 1775490 - DNA, 15 bp, Homo sapiens
atccccgacttatga

SEQ ID NO: 1775491 - DNA, 15 bp, Homo sapiens
tccccgacttatgat

SEQ ID NO: 1775492 - DNA, 15 bp, Homo sapiens
ccccgacttatgatt

SEQ ID NO: 1775493 - DNA, 15 bp, Homo sapiens
cccgacttatgattt

SEQ ID NO: 1775494 - DNA, 15 bp, Homo sapiens
ccgacttatgatttt

SEQ ID NO: 1775495 - DNA, 15 bp, Homo sapiens
cgacttatgattttt

SEQ ID NO: 1775496 - DNA, 15 bp, Homo sapiens
gacttatgatttttt

SEQ ID NO: 1775497 - DNA, 15 bp, Homo sapiens
tatgattttttgaga

SEQ ID NO: 1775498 - DNA, 15 bp, Homo sapiens
atgattttttgagaa

SEQ ID NO: 1775499 - DNA, 15 bp, Homo sapiens
tgattttttgagaaa

SEQ ID NO: 1775500 - DNA, 15 bp, Homo sapiens
gattttttgagaaag

SEQ ID NO: 1775501 - DNA, 15 bp, Homo sapiens
attttttgagaaagt

SEQ ID NO: 1775502 - DNA, 15 bp, Homo sapiens
ttttttgagaaagtg

SEQ ID NO: 1775503 - DNA, 15 bp, Homo sapiens
tttttgagaaagtga

SEQ ID NO: 1775504 - DNA, 15 bp, Homo sapiens
ttttgagaaagtgat

SEQ ID NO: 1775505 - DNA, 15 bp, Homo sapiens
tttgagaaagtgata

SEQ ID NO: 1775506 - DNA, 15 bp, Homo sapiens
ttgagaaagtgatac

SEQ ID NO: 1775507 - DNA, 15 bp, Homo sapiens
tgagaaagtgatact

SEQ ID NO: 1775508 - DNA, 15 bp, Homo sapiens
gagaaagtgatactc

SEQ ID NO: 1775509 - DNA, 15 bp, Homo sapiens
agaaagtgatactcg

SEQ ID NO: 1775510 - DNA, 15 bp, Homo sapiens
gaaagtgatactcgt

SEQ ID NO: 1775511 - DNA, 15 bp, Homo sapiens
aaagtgatactcgtt

SEQ ID NO: 1775512 - DNA, 15 bp, Homo sapiens
aagtgatactcgttc

SEQ ID NO: 1775513 - DNA, 15 bp, Homo sapiens
agtgatactcgttct

SEQ ID NO: 1775514 - DNA, 15 bp, Homo sapiens
gtgatactcgttctg

SEQ ID NO: 1775515 - DNA, 15 bp, Homo sapiens
tgatactcgttctgt

SEQ ID NO: 1775516 - DNA, 15 bp, Homo sapiens
gatactcgttctgta

SEQ ID NO: 1775517 - DNA, 15 bp, Homo sapiens
atactcgttctgtag

SEQ ID NO: 1775518 - DNA, 15 bp, Homo sapiens
tactcgttctgtaga

SEQ ID NO: 1775519 - DNA, 15 bp, Homo sapiens
actcgttctgtagaa

SEQ ID NO: 1775520 - DNA, 15 bp, Homo sapiens
ctcgttctgtagaaa

SEQ ID NO: 1775521 - DNA, 15 bp, Homo sapiens
tcgttctgtagaaac

SEQ ID NO: 1775522 - DNA, 15 bp, Homo sapiens
cgttctgtagaaacc

SEQ ID NO: 1775523 - DNA, 15 bp, Homo sapiens
gttctgtagaaaccg

SEQ ID NO: 1775524 - DNA, 15 bp, Homo sapiens
ttctgtagaaaccgt

SEQ ID NO: 1775525 - DNA, 15 bp, Homo sapiens
tctgtagaaaccgta

SEQ ID NO: 1775526 - DNA, 15 bp, Homo sapiens
ctgtagaaaccgtat

SEQ ID NO: 1775527 - DNA, 15 bp, Homo sapiens
tgtagaaaccgtatt

SEQ ID NO: 1775528 - DNA, 15 bp, Homo sapiens
gtagaaaccgtattt

SEQ ID NO: 1775529 - DNA, 15 bp, Homo sapiens
tagaaaccgtatttt

SEQ ID NO: 1775530 - DNA, 15 bp, Homo sapiens
agaaaccgtattttg

SEQ ID NO: 1775531 - DNA, 15 bp, Homo sapiens
gaaaccgtattttgt

SEQ ID NO: 1775532 - DNA, 15 bp, Homo sapiens
aaaccgtattttgtt

SEQ ID NO: 1775533 - DNA, 15 bp, Homo sapiens
aaccgtattttgttt

SEQ ID NO: 1775534 - DNA, 15 bp, Homo sapiens
accgtattttgtttt

SEQ ID NO: 1775535 - DNA, 15 bp, Homo sapiens
ccgtattttgttttt

SEQ ID NO: 1775536 - DNA, 15 bp, Homo sapiens
cgtattttgtttttg

SEQ ID NO: 1775537 - DNA, 15 bp, Homo sapiens
gtattttgtttttgt

SEQ ID NO: 1775538 - DNA, 15 bp, Homo sapiens
tattttgtttttgtt

SEQ ID NO: 1775539 - DNA, 15 bp, Homo sapiens
attttgtttttgttt

SEQ ID NO: 1775540 - DNA, 15 bp, Homo sapiens
tttttgtttttttga

SEQ ID NO: 1775541 - DNA, 15 bp, Homo sapiens
ttttgtttttttgaa

SEQ ID NO: 1775542 - DNA, 15 bp, Homo sapiens
tttgtttttttgaaa

SEQ ID NO: 1775543 - DNA, 15 bp, Homo sapiens
ttgtttttttgaaac

SEQ ID NO: 1775544 - DNA, 15 bp, Homo sapiens
tgtttttttgaaaca

SEQ ID NO: 1775545 - DNA, 15 bp, Homo sapiens
gtttttttgaaacac

SEQ ID NO: 1775546 - DNA, 15 bp, Homo sapiens
tttttttgaaacaca

SEQ ID NO: 1775547 - DNA, 15 bp, Homo sapiens
ttttttgaaacacag

SEQ ID NO: 1775548 - DNA, 15 bp, Homo sapiens
tttttgaaacacagt

SEQ ID NO: 1775549 - DNA, 15 bp, Homo sapiens
ttttgaaacacagtt

SEQ ID NO: 1775550 - DNA, 15 bp, Homo sapiens
tttgaaacacagttt

SEQ ID NO: 1775551 - DNA, 15 bp, Homo sapiens
ttgaaacacagtttc

SEQ ID NO: 1775552 - DNA, 15 bp, Homo sapiens
tgaaacacagtttca

SEQ ID NO: 1775553 - DNA, 15 bp, Homo sapiens
gaaacacagtttcac

SEQ ID NO: 1775554 - DNA, 15 bp, Homo sapiens
aaacacagtttcact

SEQ ID NO: 1775555 - DNA, 15 bp, Homo sapiens
aacacagtttcactc

SEQ ID NO: 1775556 - DNA, 15 bp, Homo sapiens
acacagtttcactct

SEQ ID NO: 1775557 - DNA, 15 bp, Homo sapiens
cacagtttcactctg

SEQ ID NO: 1775558 - DNA, 15 bp, Homo sapiens
acagtttcactctgc

SEQ ID NO: 1775559 - DNA, 15 bp, Homo sapiens
cagtttcactctgcc

SEQ ID NO: 1775560 - DNA, 15 bp, Homo sapiens
agtttcactctgccg

SEQ ID NO: 1775561 - DNA, 15 bp, Homo sapiens
gtttcactctgccgc

SEQ ID NO: 1775562 - DNA, 15 bp, Homo sapiens
tttcactctgccgcc

SEQ ID NO: 1775563 - DNA, 15 bp, Homo sapiens
ttcactctgccgccc

SEQ ID NO: 1775564 - DNA, 15 bp, Homo sapiens
tcactctgccgccca

SEQ ID NO: 1775565 - DNA, 15 bp, Homo sapiens
cactctgccgcccag

SEQ ID NO: 1775566 - DNA, 15 bp, Homo sapiens
actctgccgcccagg

SEQ ID NO: 1775567 - DNA, 15 bp, Homo sapiens
ctctgccgcccaggc

SEQ ID NO: 1775568 - DNA, 15 bp, Homo sapiens
tctgccgcccaggct

SEQ ID NO: 1775569 - DNA, 15 bp, Homo sapiens
ctgccgcccaggctg

SEQ ID NO: 1775570 - DNA, 15 bp, Homo sapiens
tgccgcccaggctga

SEQ ID NO: 1775571 - DNA, 15 bp, Homo sapiens
gccgcccaggctgaa

SEQ ID NO: 1775572 - DNA, 15 bp, Homo sapiens
ccgcccaggctgaag

SEQ ID NO: 1775573 - DNA, 15 bp, Homo sapiens
cgcccaggctgaagt

SEQ ID NO: 1775574 - DNA, 15 bp, Homo sapiens
gcccaggctgaagtg

SEQ ID NO: 1775575 - DNA, 15 bp, Homo sapiens
caggctgaagtgcaa

SEQ ID NO: 1775576 - DNA, 15 bp, Homo sapiens
aggctgaagtgcaat

SEQ ID NO: 1775577 - DNA, 15 bp, Homo sapiens
ggctgaagtgcaatg

SEQ ID NO: 1775578 - DNA, 15 bp, Homo sapiens
gctgaagtgcaatgg

SEQ ID NO: 1775579 - DNA, 15 bp, Homo sapiens
ctgaagtgcaatggc

SEQ ID NO: 1775580 - DNA, 15 bp, Homo sapiens
tgaagtgcaatggcg

SEQ ID NO: 1775581 - DNA, 15 bp, Homo sapiens
gaagtgcaatggcgc

SEQ ID NO: 1775582 - DNA, 15 bp, Homo sapiens
aagtgcaatggcgcg

SEQ ID NO: 1775583 - DNA, 15 bp, Homo sapiens
agtgcaatggcgcga

SEQ ID NO: 1775584 - DNA, 15 bp, Homo sapiens
gtgcaatggcgcgat

SEQ ID NO: 1775585 - DNA, 15 bp, Homo sapiens
tgcaatggcgcgatc

SEQ ID NO: 1775586 - DNA, 15 bp, Homo sapiens
gcaatggcgcgatct

SEQ ID NO: 1775587 - DNA, 15 bp, Homo sapiens
caatggcgcgatctc

SEQ ID NO: 1775588 - DNA, 15 bp, Homo sapiens
aatggcgcgatctca

SEQ ID NO: 1775589 - DNA, 15 bp, Homo sapiens
atggcgcgatctcag

SEQ ID NO: 1775590 - DNA, 15 bp, Homo sapiens
gttcaagtgattctt

SEQ ID NO: 1775591 - DNA, 15 bp, Homo sapiens
ttcaagtgattcttg

SEQ ID NO: 1775592 - DNA, 15 bp, Homo sapiens
tcaagtgattcttgt

SEQ ID NO: 1775593 - DNA, 15 bp, Homo sapiens
caagtgattcttgtg

SEQ ID NO: 1775594 - DNA, 15 bp, Homo sapiens
aagtgattcttgtgc

SEQ ID NO: 1775595 - DNA, 15 bp, Homo sapiens
ttcttgtgcctcagt

SEQ ID NO: 1775596 - DNA, 15 bp, Homo sapiens
tcttgtgcctcagtc

SEQ ID NO: 1775597 - DNA, 15 bp, Homo sapiens
cttgtgcctcagtct

SEQ ID NO: 1775598 - DNA, 15 bp, Homo sapiens
ttgtgcctcagtctc

SEQ ID NO: 1775599 - DNA, 15 bp, Homo sapiens
tgtgcctcagtctcc

SEQ ID NO: 1775600 - DNA, 15 bp, Homo sapiens
gtgcctcagtctcct

SEQ ID NO: 1775601 - DNA, 15 bp, Homo sapiens
cctcagtctcctgaa

SEQ ID NO: 1775602 - DNA, 15 bp, Homo sapiens
ctcagtctcctgaat

SEQ ID NO: 1775603 - DNA, 15 bp, Homo sapiens
tcagtctcctgaata

SEQ ID NO: 1775604 - DNA, 15 bp, Homo sapiens
cagtctcctgaatag

SEQ ID NO: 1775605 - DNA, 15 bp, Homo sapiens
agtctcctgaatagc

SEQ ID NO: 1775606 - DNA, 15 bp, Homo sapiens
gtctcctgaatagct

SEQ ID NO: 1775607 - DNA, 15 bp, Homo sapiens
tctcctgaatagctg

SEQ ID NO: 1775608 - DNA, 15 bp, Homo sapiens
ctcctgaatagctgg

SEQ ID NO: 1775609 - DNA, 15 bp, Homo sapiens
tcctgaatagctggg

SEQ ID NO: 1775610 - DNA, 15 bp, Homo sapiens
cctgaatagctggga

SEQ ID NO: 1775611 - DNA, 15 bp, Homo sapiens
ctgaatagctgggat

SEQ ID NO: 1775612 - DNA, 15 bp, Homo sapiens
tgaatagctgggatt

SEQ ID NO: 1775613 - DNA, 15 bp, Homo sapiens
ggtgtgcgccaccat

SEQ ID NO: 1775614 - DNA, 15 bp, Homo sapiens
gtgtgcgccaccatg

SEQ ID NO: 1775615 - DNA, 15 bp, Homo sapiens
tgtgcgccaccatgc

SEQ ID NO: 1775616 - DNA, 15 bp, Homo sapiens
gtgcgccaccatgct

SEQ ID NO: 1775617 - DNA, 15 bp, Homo sapiens
tgcgccaccatgctc

SEQ ID NO: 1775618 - DNA, 15 bp, Homo sapiens
gcgccaccatgctcg

SEQ ID NO: 1775619 - DNA, 15 bp, Homo sapiens
cgccaccatgctcgg

SEQ ID NO: 1775620 - DNA, 15 bp, Homo sapiens
gccaccatgctcggc

SEQ ID NO: 1775621 - DNA, 15 bp, Homo sapiens
ccaccatgctcggct

SEQ ID NO: 1775622 - DNA, 15 bp, Homo sapiens
caccatgctcggcta

SEQ ID NO: 1775623 - DNA, 15 bp, Homo sapiens
accatgctcggctaa

SEQ ID NO: 1775624 - DNA, 15 bp, Homo sapiens
ccatgctcggctaat

SEQ ID NO: 1775625 - DNA, 15 bp, Homo sapiens
catgctcggctaatt

SEQ ID NO: 1775626 - DNA, 15 bp, Homo sapiens
atgctcggctaattt

SEQ ID NO: 1775627 - DNA, 15 bp, Homo sapiens
tgctcggctaatttt

SEQ ID NO: 1775628 - DNA, 15 bp, Homo sapiens
gctcggctaattttt

SEQ ID NO: 1775629 - DNA, 15 bp, Homo sapiens
ctcggctaatttttg

SEQ ID NO: 1775630 - DNA, 15 bp, Homo sapiens
tcggctaatttttgt

SEQ ID NO: 1775631 - DNA, 15 bp, Homo sapiens
gagatggggtttcgc

SEQ ID NO: 1775632 - DNA, 15 bp, Homo sapiens
agatggggtttcgcc

SEQ ID NO: 1775633 - DNA, 15 bp, Homo sapiens
gatggggtttcgcca

SEQ ID NO: 1775634 - DNA, 15 bp, Homo sapiens
atggggtttcgccat

SEQ ID NO: 1775635 - DNA, 15 bp, Homo sapiens
tggggtttcgccatg

SEQ ID NO: 1775636 - DNA, 15 bp, Homo sapiens
gccaggctagtctcg

SEQ ID NO: 1775637 - DNA, 15 bp, Homo sapiens
ccaggctagtctcga

SEQ ID NO: 1775638 - DNA, 15 bp, Homo sapiens
caggctagtctcgac

SEQ ID NO: 1775639 - DNA, 15 bp, Homo sapiens
aggctagtctcgacc

SEQ ID NO: 1775640 - DNA, 15 bp, Homo sapiens
ggctagtctcgacct

SEQ ID NO: 1775641 - DNA, 15 bp, Homo sapiens
gctagtctcgacctc

SEQ ID NO: 1775642 - DNA, 15 bp, Homo sapiens
ctagtctcgacctca

SEQ ID NO: 1775643 - DNA, 15 bp, Homo sapiens
tagtctcgacctcaa

SEQ ID NO: 1775644 - DNA, 15 bp, Homo sapiens
agtctcgacctcaag

SEQ ID NO: 1775645 - DNA, 15 bp, Homo sapiens
gtctcgacctcaagt

SEQ ID NO: 1775646 - DNA, 15 bp, Homo sapiens
tctcgacctcaagtg

SEQ ID NO: 1775647 - DNA, 15 bp, Homo sapiens
ctcgacctcaagtga

SEQ ID NO: 1775648 - DNA, 15 bp, Homo sapiens
tcgacctcaagtgat

SEQ ID NO: 1775649 - DNA, 15 bp, Homo sapiens
cgacctcaagtgatt

SEQ ID NO: 1775650 - DNA, 15 bp, Homo sapiens
gacctcaagtgattc

SEQ ID NO: 1775651 - DNA, 15 bp, Homo sapiens
acctcaagtgattcg

SEQ ID NO: 1775652 - DNA, 15 bp, Homo sapiens
cctcaagtgattcgc

SEQ ID NO: 1775653 - DNA, 15 bp, Homo sapiens
ctcaagtgattcgcc

SEQ ID NO: 1775654 - DNA, 15 bp, Homo sapiens
tcaagtgattcgccc

SEQ ID NO: 1775655 - DNA, 15 bp, Homo sapiens
caagtgattcgccca

SEQ ID NO: 1775656 - DNA, 15 bp, Homo sapiens
agtgattcgcccacc

SEQ ID NO: 1775657 - DNA, 15 bp, Homo sapiens
tgattcgcccacctc

SEQ ID NO: 1775658 - DNA, 15 bp, Homo sapiens
gattcgcccacctcg

SEQ ID NO: 1775659 - DNA, 15 bp, Homo sapiens
attcgcccacctcgg

SEQ ID NO: 1775660 - DNA, 15 bp, Homo sapiens
ttcgcccacctcggc

SEQ ID NO: 1775661 - DNA, 15 bp, Homo sapiens
tcgcccacctcggcc

SEQ ID NO: 1775662 - DNA, 15 bp, Homo sapiens
cgcccacctcggcct

SEQ ID NO: 1775663 - DNA, 15 bp, Homo sapiens
gcccacctcggcctc

SEQ ID NO: 1775664 - DNA, 15 bp, Homo sapiens
tgtgagccaccgcag

SEQ ID NO: 1775665 - DNA, 15 bp, Homo sapiens
gtgagccaccgcagc

SEQ ID NO: 1775666 - DNA, 15 bp, Homo sapiens
tgagccaccgcagcc

SEQ ID NO: 1775667 - DNA, 15 bp, Homo sapiens
gagccaccgcagcca

SEQ ID NO: 1775668 - DNA, 15 bp, Homo sapiens
agccaccgcagccaa

SEQ ID NO: 1775669 - DNA, 15 bp, Homo sapiens
gccaccgcagccaac

SEQ ID NO: 1775670 - DNA, 15 bp, Homo sapiens
ccaccgcagccaacc

SEQ ID NO: 1775671 - DNA, 15 bp, Homo sapiens
caccgcagccaacct

SEQ ID NO: 1775672 - DNA, 15 bp, Homo sapiens
accgcagccaaccta

SEQ ID NO: 1775673 - DNA, 15 bp, Homo sapiens
ccgcagccaacctag

SEQ ID NO: 1775674 - DNA, 15 bp, Homo sapiens
cgcagccaacctaga

SEQ ID NO: 1775675 - DNA, 15 bp, Homo sapiens
gcagccaacctagaa

SEQ ID NO: 1775676 - DNA, 15 bp, Homo sapiens
cagccaacctagaaa

SEQ ID NO: 1775677 - DNA, 15 bp, Homo sapiens
agccaacctagaaac

SEQ ID NO: 1775678 - DNA, 15 bp, Homo sapiens
gccaacctagaaact

SEQ ID NO: 1775679 - DNA, 15 bp, Homo sapiens
ccaacctagaaactg

SEQ ID NO: 1775680 - DNA, 15 bp, Homo sapiens
caacctagaaactgt

SEQ ID NO: 1775681 - DNA, 15 bp, Homo sapiens
aacctagaaactgta

SEQ ID NO: 1775682 - DNA, 15 bp, Homo sapiens
acctagaaactgtat

SEQ ID NO: 1775683 - DNA, 15 bp, Homo sapiens
cctagaaactgtatt

SEQ ID NO: 1775684 - DNA, 15 bp, Homo sapiens
ctagaaactgtattt

SEQ ID NO: 1775685 - DNA, 15 bp, Homo sapiens
tagaaactgtatttt

SEQ ID NO: 1775686 - DNA, 15 bp, Homo sapiens
agaaactgtattttg

SEQ ID NO: 1775687 - DNA, 15 bp, Homo sapiens
gaaactgtattttga

SEQ ID NO: 1775688 - DNA, 15 bp, Homo sapiens
aaactgtattttgag

SEQ ID NO: 1775689 - DNA, 15 bp, Homo sapiens
aactgtattttgagt

SEQ ID NO: 1775690 - DNA, 15 bp, Homo sapiens
actgtattttgagta

SEQ ID NO: 1775691 - DNA, 15 bp, Homo sapiens
ctgtattttgagtag

SEQ ID NO: 1775692 - DNA, 15 bp, Homo sapiens
tgtattttgagtagc

SEQ ID NO: 1775693 - DNA, 15 bp, Homo sapiens
gtattttgagtagcc

SEQ ID NO: 1775694 - DNA, 15 bp, Homo sapiens
tattttgagtagcca

SEQ ID NO: 1775695 - DNA, 15 bp, Homo sapiens
attttgagtagccat

SEQ ID NO: 1775696 - DNA, 15 bp, Homo sapiens
ttttgagtagccata

SEQ ID NO: 1775697 - DNA, 15 bp, Homo sapiens
tttgagtagccatac

SEQ ID NO: 1775698 - DNA, 15 bp, Homo sapiens
ttgagtagccataca

SEQ ID NO: 1775699 - DNA, 15 bp, Homo sapiens
tgagtagccatacaa

SEQ ID NO: 1775700 - DNA, 15 bp, Homo sapiens
gagtagccatacaat

SEQ ID NO: 1775701 - DNA, 15 bp, Homo sapiens
agtagccatacaatc

SEQ ID NO: 1775702 - DNA, 15 bp, Homo sapiens
gtagccatacaatca

SEQ ID NO: 1775703 - DNA, 15 bp, Homo sapiens
tagccatacaatcat

SEQ ID NO: 1775704 - DNA, 15 bp, Homo sapiens
agccatacaatcatc

SEQ ID NO: 1775705 - DNA, 15 bp, Homo sapiens
gccatacaatcatcc

SEQ ID NO: 1775706 - DNA, 15 bp, Homo sapiens
ccatacaatcatcct

SEQ ID NO: 1775707 - DNA, 15 bp, Homo sapiens
catacaatcatcctg

SEQ ID NO: 1775708 - DNA, 15 bp, Homo sapiens
atacaatcatcctgt

SEQ ID NO: 1775709 - DNA, 15 bp, Homo sapiens
tacaatcatcctgtt

SEQ ID NO: 1775710 - DNA, 15 bp, Homo sapiens
acaatcatcctgttt

SEQ ID NO: 1775711 - DNA, 15 bp, Homo sapiens
caatcatcctgtttt

SEQ ID NO: 1775712 - DNA, 15 bp, Homo sapiens
aatcatcctgttttt

SEQ ID NO: 1775713 - DNA, 15 bp, Homo sapiens
atcatcctgtttttt

SEQ ID NO: 1775714 - DNA, 15 bp, Homo sapiens
tcatcctgtttttta

SEQ ID NO: 1775715 - DNA, 15 bp, Homo sapiens
catcctgttttttac

SEQ ID NO: 1775716 - DNA, 15 bp, Homo sapiens
atcctgttttttact

SEQ ID NO: 1775717 - DNA, 15 bp, Homo sapiens
tcctgttttttactt

SEQ ID NO: 1775718 - DNA, 15 bp, Homo sapiens
cctgttttttacttt

SEQ ID NO: 1775719 - DNA, 15 bp, Homo sapiens
ctgttttttactttc

SEQ ID NO: 1775720 - DNA, 15 bp, Homo sapiens
tgttttttactttca

SEQ ID NO: 1775721 - DNA, 15 bp, Homo sapiens
gttttttactttcag

SEQ ID NO: 1775722 - DNA, 15 bp, Homo sapiens
ttttttactttcaga

SEQ ID NO: 1775723 - DNA, 15 bp, Homo sapiens
tttttactttcagaa

SEQ ID NO: 1775724 - DNA, 15 bp, Homo sapiens
ttttactttcagaac

SEQ ID NO: 1775725 - DNA, 15 bp, Homo sapiens
tttactttcagaaca

SEQ ID NO: 1775726 - DNA, 15 bp, Homo sapiens
ttactttcagaacag

SEQ ID NO: 1775727 - DNA, 15 bp, Homo sapiens
tactttcagaacagg

SEQ ID NO: 1775728 - DNA, 15 bp, Homo sapiens
actttcagaacagga

SEQ ID NO: 1775729 - DNA, 15 bp, Homo sapiens
ctttcagaacaggat

SEQ ID NO: 1775730 - DNA, 15 bp, Homo sapiens
tttcagaacaggatt

SEQ ID NO: 1775731 - DNA, 15 bp, Homo sapiens
ttcagaacaggattc

SEQ ID NO: 1775732 - DNA, 15 bp, Homo sapiens
tcagaacaggattca

SEQ ID NO: 1775733 - DNA, 15 bp, Homo sapiens
cagaacaggattcaa

SEQ ID NO: 1775734 - DNA, 15 bp, Homo sapiens
agaacaggattcaat

SEQ ID NO: 1775735 - DNA, 15 bp, Homo sapiens
gaacaggattcaata

SEQ ID NO: 1775736 - DNA, 15 bp, Homo sapiens
aacaggattcaataa

SEQ ID NO: 1775737 - DNA, 15 bp, Homo sapiens
acaggattcaataaa

SEQ ID NO: 1775738 - DNA, 15 bp, Homo sapiens
caggattcaataaat

SEQ ID NO: 1775739 - DNA, 15 bp, Homo sapiens
aggattcaataaatt

SEQ ID NO: 1775740 - DNA, 15 bp, Homo sapiens
ggattcaataaatta

SEQ ID NO: 1775741 - DNA, 15 bp, Homo sapiens
gattcaataaattac

SEQ ID NO: 1775742 - DNA, 15 bp, Homo sapiens
tcaataaattacatt

SEQ ID NO: 1775743 - DNA, 15 bp, Homo sapiens
caataaattacatta

SEQ ID NO: 1775744 - DNA, 15 bp, Homo sapiens
aataaattacattaa

SEQ ID NO: 1775745 - DNA, 15 bp, Homo sapiens
ataaattacattaaa

SEQ ID NO: 1775746 - DNA, 15 bp, Homo sapiens
taaattacattaaat

SEQ ID NO: 1775747 - DNA, 15 bp, Homo sapiens
aaattacattaaata

SEQ ID NO: 1775748 - DNA, 15 bp, Homo sapiens
aattacattaaatat

SEQ ID NO: 1775749 - DNA, 15 bp, Homo sapiens
attacattaaatatt

SEQ ID NO: 1775750 - DNA, 15 bp, Homo sapiens
ttacattaaatattc

SEQ ID NO: 1775751 - DNA, 15 bp, Homo sapiens
tacattaaatattca

SEQ ID NO: 1775752 - DNA, 15 bp, Homo sapiens
acattaaatattcaa

SEQ ID NO: 1775753 - DNA, 15 bp, Homo sapiens
cattaaatattcaac

SEQ ID NO: 1775754 - DNA, 15 bp, Homo sapiens
attaaatattcaaca

SEQ ID NO: 1775755 - DNA, 15 bp, Homo sapiens
ttaaatattcaacaa

SEQ ID NO: 1775756 - DNA, 15 bp, Homo sapiens
taaatattcaacaaa

SEQ ID NO: 1775757 - DNA, 15 bp, Homo sapiens
aaatattcaacaaat

SEQ ID NO: 1775758 - DNA, 15 bp, Homo sapiens
aatattcaacaaatt

SEQ ID NO: 1775759 - DNA, 15 bp, Homo sapiens
atattcaacaaatta

SEQ ID NO: 1775760 - DNA, 15 bp, Homo sapiens
tattcaacaaattac

SEQ ID NO: 1775761 - DNA, 15 bp, Homo sapiens
attcaacaaattaca

SEQ ID NO: 1775762 - DNA, 15 bp, Homo sapiens
ttcaacaaattacat

SEQ ID NO: 1775763 - DNA, 15 bp, Homo sapiens
tcaacaaattacatt

SEQ ID NO: 1775764 - DNA, 15 bp, Homo sapiens
caacaaattacatta

SEQ ID NO: 1775765 - DNA, 15 bp, Homo sapiens
aacaaattacattaa

SEQ ID NO: 1775766 - DNA, 15 bp, Homo sapiens
acaaattacattaaa

SEQ ID NO: 1775767 - DNA, 15 bp, Homo sapiens
caaattacattaaat

SEQ ID NO: 1775768 - DNA, 15 bp, Homo sapiens
taaatattcaacaat

SEQ ID NO: 1775769 - DNA, 15 bp, Homo sapiens
aaatattcaacaatt

SEQ ID NO: 1775770 - DNA, 15 bp, Homo sapiens
aatattcaacaattt

SEQ ID NO: 1775771 - DNA, 15 bp, Homo sapiens
atattcaacaattta

SEQ ID NO: 1775772 - DNA, 15 bp, Homo sapiens
tattcaacaatttat

SEQ ID NO: 1775773 - DNA, 15 bp, Homo sapiens
attcaacaatttatt

SEQ ID NO: 1775774 - DNA, 15 bp, Homo sapiens
ttcaacaatttatta

SEQ ID NO: 1775775 - DNA, 15 bp, Homo sapiens
tcaacaatttattat

SEQ ID NO: 1775776 - DNA, 15 bp, Homo sapiens
caacaatttattata

SEQ ID NO: 1775777 - DNA, 15 bp, Homo sapiens
aacaatttattataa

SEQ ID NO: 1775778 - DNA, 15 bp, Homo sapiens
acaatttattataaa

SEQ ID NO: 1775779 - DNA, 15 bp, Homo sapiens
caatttattataaaa

SEQ ID NO: 1775780 - DNA, 15 bp, Homo sapiens
aatttattataaaat

SEQ ID NO: 1775781 - DNA, 15 bp, Homo sapiens
atttattataaaata

SEQ ID NO: 1775782 - DNA, 15 bp, Homo sapiens
tttattataaaatag

SEQ ID NO: 1775783 - DNA, 15 bp, Homo sapiens
ttattataaaatagg

SEQ ID NO: 1775784 - DNA, 15 bp, Homo sapiens
tattataaaataggc

SEQ ID NO: 1775785 - DNA, 15 bp, Homo sapiens
attataaaataggct

SEQ ID NO: 1775786 - DNA, 15 bp, Homo sapiens
ttataaaataggctt

SEQ ID NO: 1775787 - DNA, 15 bp, Homo sapiens
tataaaataggcttt

SEQ ID NO: 1775788 - DNA, 15 bp, Homo sapiens
ataaaataggctttg

SEQ ID NO: 1775789 - DNA, 15 bp, Homo sapiens
taaaataggctttgt

SEQ ID NO: 1775790 - DNA, 15 bp, Homo sapiens
aaaataggctttgtg

SEQ ID NO: 1775791 - DNA, 15 bp, Homo sapiens
aaataggctttgtgt

SEQ ID NO: 1775792 - DNA, 15 bp, Homo sapiens
aataggctttgtgtt

SEQ ID NO: 1775793 - DNA, 15 bp, Homo sapiens
ataggctttgtgtta

SEQ ID NO: 1775794 - DNA, 15 bp, Homo sapiens
taggctttgtgttag

SEQ ID NO: 1775795 - DNA, 15 bp, Homo sapiens
aggctttgtgttaga

SEQ ID NO: 1775796 - DNA, 15 bp, Homo sapiens
ggctttgtgttagat

SEQ ID NO: 1775797 - DNA, 15 bp, Homo sapiens
gctttgtgttagatg

SEQ ID NO: 1775798 - DNA, 15 bp, Homo sapiens
ctttgtgttagatga

SEQ ID NO: 1775799 - DNA, 15 bp, Homo sapiens
tttgtgttagatgat

SEQ ID NO: 1775800 - DNA, 15 bp, Homo sapiens
ttgtgttagatgatt

SEQ ID NO: 1775801 - DNA, 15 bp, Homo sapiens
tgtgttagatgattt

SEQ ID NO: 1775802 - DNA, 15 bp, Homo sapiens
gtgttagatgatttt

SEQ ID NO: 1775803 - DNA, 15 bp, Homo sapiens
tgttagatgattttt

SEQ ID NO: 1775804 - DNA, 15 bp, Homo sapiens
gttagatgatttttc

SEQ ID NO: 1775805 - DNA, 15 bp, Homo sapiens
ttagatgatttttcc

SEQ ID NO: 1775806 - DNA, 15 bp, Homo sapiens
tagatgatttttccc

SEQ ID NO: 1775807 - DNA, 15 bp, Homo sapiens
agatgatttttccca

SEQ ID NO: 1775808 - DNA, 15 bp, Homo sapiens
gatgatttttcccaa

SEQ ID NO: 1775809 - DNA, 15 bp, Homo sapiens
atgatttttcccaac

SEQ ID NO: 1775810 - DNA, 15 bp, Homo sapiens
tgatttttcccaact

SEQ ID NO: 1775811 - DNA, 15 bp, Homo sapiens
gatttttcccaactg

SEQ ID NO: 1775812 - DNA, 15 bp, Homo sapiens
atttttcccaactgt

SEQ ID NO: 1775813 - DNA, 15 bp, Homo sapiens
tttttcccaactgta

SEQ ID NO: 1775814 - DNA, 15 bp, Homo sapiens
ttttcccaactgtag

SEQ ID NO: 1775815 - DNA, 15 bp, Homo sapiens
tttcccaactgtagg

SEQ ID NO: 1775816 - DNA, 15 bp, Homo sapiens
ttcccaactgtaggt

SEQ ID NO: 1775817 - DNA, 15 bp, Homo sapiens
tcccaactgtaggtt

SEQ ID NO: 1775818 - DNA, 15 bp, Homo sapiens
cccaactgtaggtta

SEQ ID NO: 1775819 - DNA, 15 bp, Homo sapiens
ccaactgtaggttaa

SEQ ID NO: 1775820 - DNA, 15 bp, Homo sapiens
caactgtaggttaac

SEQ ID NO: 1775821 - DNA, 15 bp, Homo sapiens
aactgtaggttaacg

SEQ ID NO: 1775822 - DNA, 15 bp, Homo sapiens
actgtaggttaacgt

SEQ ID NO: 1775823 - DNA, 15 bp, Homo sapiens
ctgtaggttaacgtt

SEQ ID NO: 1775824 - DNA, 15 bp, Homo sapiens
tgtaggttaacgtta

SEQ ID NO: 1775825 - DNA, 15 bp, Homo sapiens
gtaggttaacgttaa

SEQ ID NO: 1775826 - DNA, 15 bp, Homo sapiens
taggttaacgttaag

SEQ ID NO: 1775827 - DNA, 15 bp, Homo sapiens
aggttaacgttaagc

SEQ ID NO: 1775828 - DNA, 15 bp, Homo sapiens
ggttaacgttaagct

SEQ ID NO: 1775829 - DNA, 15 bp, Homo sapiens
gttaacgttaagctt

SEQ ID NO: 1775830 - DNA, 15 bp, Homo sapiens
ttaacgttaagcttt

SEQ ID NO: 1775831 - DNA, 15 bp, Homo sapiens
taacgttaagctttc

SEQ ID NO: 1775832 - DNA, 15 bp, Homo sapiens
aacgttaagctttct

SEQ ID NO: 1775833 - DNA, 15 bp, Homo sapiens
acgttaagctttctg

SEQ ID NO: 1775834 - DNA, 15 bp, Homo sapiens
cgttaagctttctga

SEQ ID NO: 1775835 - DNA, 15 bp, Homo sapiens
gttaagctttctgag

SEQ ID NO: 1775836 - DNA, 15 bp, Homo sapiens
ttaagctttctgagc

SEQ ID NO: 1775837 - DNA, 15 bp, Homo sapiens
taagctttctgagca

SEQ ID NO: 1775838 - DNA, 15 bp, Homo sapiens
aagctttctgagcac

SEQ ID NO: 1775839 - DNA, 15 bp, Homo sapiens
agctttctgagcaca

SEQ ID NO: 1775840 - DNA, 15 bp, Homo sapiens
gctttctgagcacat

SEQ ID NO: 1775841 - DNA, 15 bp, Homo sapiens
ctttctgagcacatt

SEQ ID NO: 1775842 - DNA, 15 bp, Homo sapiens
tttctgagcacattt

SEQ ID NO: 1775843 - DNA, 15 bp, Homo sapiens
agcacatttaaggta

SEQ ID NO: 1775844 - DNA, 15 bp, Homo sapiens
gcacatttaaggtag

SEQ ID NO: 1775845 - DNA, 15 bp, Homo sapiens
cacatttaaggtaga

SEQ ID NO: 1775846 - DNA, 15 bp, Homo sapiens
acatttaaggtagac

SEQ ID NO: 1775847 - DNA, 15 bp, Homo sapiens
catttaaggtagacc

SEQ ID NO: 1775848 - DNA, 15 bp, Homo sapiens
atttaaggtagacca

SEQ ID NO: 1775849 - DNA, 15 bp, Homo sapiens
tttaaggtagaccag

SEQ ID NO: 1775850 - DNA, 15 bp, Homo sapiens
ttaaggtagaccagg

SEQ ID NO: 1775851 - DNA, 15 bp, Homo sapiens
taaggtagaccaggc

SEQ ID NO: 1775852 - DNA, 15 bp, Homo sapiens
aaggtagaccaggct

SEQ ID NO: 1775853 - DNA, 15 bp, Homo sapiens
aggtagaccaggcta

SEQ ID NO: 1775854 - DNA, 15 bp, Homo sapiens
ggtagaccaggctaa

SEQ ID NO: 1775855 - DNA, 15 bp, Homo sapiens
gtagaccaggctaag

SEQ ID NO: 1775856 - DNA, 15 bp, Homo sapiens
tagaccaggctaagc

SEQ ID NO: 1775857 - DNA, 15 bp, Homo sapiens
agaccaggctaagct

SEQ ID NO: 1775858 - DNA, 15 bp, Homo sapiens
gaccaggctaagctg

SEQ ID NO: 1775859 - DNA, 15 bp, Homo sapiens
accaggctaagctgt

SEQ ID NO: 1775860 - DNA, 15 bp, Homo sapiens
ccaggctaagctgta

SEQ ID NO: 1775861 - DNA, 15 bp, Homo sapiens
caggctaagctgtaa

SEQ ID NO: 1775862 - DNA, 15 bp, Homo sapiens
aggctaagctgtaat

SEQ ID NO: 1775863 - DNA, 15 bp, Homo sapiens
ggctaagctgtaatg

SEQ ID NO: 1775864 - DNA, 15 bp, Homo sapiens
gctaagctgtaatgt

SEQ ID NO: 1775865 - DNA, 15 bp, Homo sapiens
ctaagctgtaatgtt

SEQ ID NO: 1775866 - DNA, 15 bp, Homo sapiens
taagctgtaatgttt

SEQ ID NO: 1775867 - DNA, 15 bp, Homo sapiens
aagctgtaatgtttg

SEQ ID NO: 1775868 - DNA, 15 bp, Homo sapiens
agctgtaatgtttgg

SEQ ID NO: 1775869 - DNA, 15 bp, Homo sapiens
gctgtaatgtttggt

SEQ ID NO: 1775870 - DNA, 15 bp, Homo sapiens
ctgtaatgtttggtg

SEQ ID NO: 1775871 - DNA, 15 bp, Homo sapiens
tgtaatgtttggtgg

SEQ ID NO: 1775872 - DNA, 15 bp, Homo sapiens
gtaatgtttggtggg

SEQ ID NO: 1775873 - DNA, 15 bp, Homo sapiens
taatgtttggtgggc

SEQ ID NO: 1775874 - DNA, 15 bp, Homo sapiens
aatgtttggtgggct

SEQ ID NO: 1775875 - DNA, 15 bp, Homo sapiens
atgtttggtgggcta

SEQ ID NO: 1775876 - DNA, 15 bp, Homo sapiens
tgtttggtgggctag

SEQ ID NO: 1775877 - DNA, 15 bp, Homo sapiens
gtttggtgggctagg

SEQ ID NO: 1775878 - DNA, 15 bp, Homo sapiens
tttggtgggctaggt

SEQ ID NO: 1775879 - DNA, 15 bp, Homo sapiens
ttggtgggctaggtg

SEQ ID NO: 1775880 - DNA, 15 bp, Homo sapiens
tggtgggctaggtgt

SEQ ID NO: 1775881 - DNA, 15 bp, Homo sapiens
ggtgggctaggtgtc

SEQ ID NO: 1775882 - DNA, 15 bp, Homo sapiens
gtgggctaggtgtct

SEQ ID NO: 1775883 - DNA, 15 bp, Homo sapiens
tgggctaggtgtctt

SEQ ID NO: 1775884 - DNA, 15 bp, Homo sapiens
gggctaggtgtctta

SEQ ID NO: 1775885 - DNA, 15 bp, Homo sapiens
ggctaggtgtcttac

SEQ ID NO: 1775886 - DNA, 15 bp, Homo sapiens
gctaggtgtcttaca

SEQ ID NO: 1775887 - DNA, 15 bp, Homo sapiens
ctaggtgtcttacat

SEQ ID NO: 1775888 - DNA, 15 bp, Homo sapiens
taggtgtcttacatg

SEQ ID NO: 1775889 - DNA, 15 bp, Homo sapiens
aggtgtcttacatgt

SEQ ID NO: 1775890 - DNA, 15 bp, Homo sapiens
ggtgtcttacatgtg

SEQ ID NO: 1775891 - DNA, 15 bp, Homo sapiens
gtgtcttacatgtgt

SEQ ID NO: 1775892 - DNA, 15 bp, Homo sapiens
tgtcttacatgtgtt

SEQ ID NO: 1775893 - DNA, 15 bp, Homo sapiens
gtcttacatgtgttt

SEQ ID NO: 1775894 - DNA, 15 bp, Homo sapiens
tcttacatgtgtttt

SEQ ID NO: 1775895 - DNA, 15 bp, Homo sapiens
cttacatgtgttttt

SEQ ID NO: 1775896 - DNA, 15 bp, Homo sapiens
ttacatgtgtttttt

SEQ ID NO: 1775897 - DNA, 15 bp, Homo sapiens
tacatgtgttttttt

SEQ ID NO: 1775898 - DNA, 15 bp, Homo sapiens
acatgtgtttttttg

SEQ ID NO: 1775899 - DNA, 15 bp, Homo sapiens
catgtgtttttttgt

SEQ ID NO: 1775900 - DNA, 15 bp, Homo sapiens
atgtgtttttttgtt

SEQ ID NO: 1775901 - DNA, 15 bp, Homo sapiens
tgtgtttttttgttt

SEQ ID NO: 1775902 - DNA, 15 bp, Homo sapiens
tgtttttttgtttgt

SEQ ID NO: 1775903 - DNA, 15 bp, Homo sapiens
ccacagtaaaattct

SEQ ID NO: 1775904 - DNA, 15 bp, Homo sapiens
cacagtaaaattcta

SEQ ID NO: 1775905 - DNA, 15 bp, Homo sapiens
acagtaaaattctat

SEQ ID NO: 1775906 - DNA, 15 bp, Homo sapiens
cagtaaaattctatt

SEQ ID NO: 1775907 - DNA, 15 bp, Homo sapiens
agtaaaattctattt

SEQ ID NO: 1775908 - DNA, 15 bp, Homo sapiens
gtaaaattctatttc

SEQ ID NO: 1775909 - DNA, 15 bp, Homo sapiens
taaaattctatttct

SEQ ID NO: 1775910 - DNA, 15 bp, Homo sapiens
aaaattctatttctt

SEQ ID NO: 1775911 - DNA, 15 bp, Homo sapiens
aaattctatttctta

SEQ ID NO: 1775912 - DNA, 15 bp, Homo sapiens
aattctatttcttag

SEQ ID NO: 1775913 - DNA, 15 bp, Homo sapiens
attctatttcttaga

SEQ ID NO: 1775914 - DNA, 15 bp, Homo sapiens
ttctatttcttagaa

SEQ ID NO: 1775915 - DNA, 15 bp, Homo sapiens
tctatttcttagaac

SEQ ID NO: 1775916 - DNA, 15 bp, Homo sapiens
ctatttcttagaaca

SEQ ID NO: 1775917 - DNA, 15 bp, Homo sapiens
tatttcttagaacag

SEQ ID NO: 1775918 - DNA, 15 bp, Homo sapiens
atttcttagaacagt

SEQ ID NO: 1775919 - DNA, 15 bp, Homo sapiens
tttcttagaacagta

SEQ ID NO: 1775920 - DNA, 15 bp, Homo sapiens
ttcttagaacagtat

SEQ ID NO: 1775921 - DNA, 15 bp, Homo sapiens
tcttagaacagtatt

SEQ ID NO: 1775922 - DNA, 15 bp, Homo sapiens
cttagaacagtattt

SEQ ID NO: 1775923 - DNA, 15 bp, Homo sapiens
ttagaacagtattta

SEQ ID NO: 1775924 - DNA, 15 bp, Homo sapiens
tagaacagtatttaa

SEQ ID NO: 1775925 - DNA, 15 bp, Homo sapiens
agaacagtatttaag

SEQ ID NO: 1775926 - DNA, 15 bp, Homo sapiens
gaacagtatttaagg

SEQ ID NO: 1775927 - DNA, 15 bp, Homo sapiens
aacagtatttaagga

SEQ ID NO: 1775928 - DNA, 15 bp, Homo sapiens
acagtatttaaggat

SEQ ID NO: 1775929 - DNA, 15 bp, Homo sapiens
cagtatttaaggatg

SEQ ID NO: 1775930 - DNA, 15 bp, Homo sapiens
agtatttaaggatgt

SEQ ID NO: 1775931 - DNA, 15 bp, Homo sapiens
gtatttaaggatgtg

SEQ ID NO: 1775932 - DNA, 15 bp, Homo sapiens
tatttaaggatgtgg

SEQ ID NO: 1775933 - DNA, 15 bp, Homo sapiens
atttaaggatgtgga

SEQ ID NO: 1775934 - DNA, 15 bp, Homo sapiens
tttaaggatgtggag

SEQ ID NO: 1775935 - DNA, 15 bp, Homo sapiens
ttaaggatgtggagg

SEQ ID NO: 1775936 - DNA, 15 bp, Homo sapiens
taaggatgtggaggc

SEQ ID NO: 1775937 - DNA, 15 bp, Homo sapiens
aaggatgtggaggca

SEQ ID NO: 1775938 - DNA, 15 bp, Homo sapiens
aggatgtggaggcat

SEQ ID NO: 1775939 - DNA, 15 bp, Homo sapiens
ggatgtggaggcatt

SEQ ID NO: 1775940 - DNA, 15 bp, Homo sapiens
gatgtggaggcattg

SEQ ID NO: 1775941 - DNA, 15 bp, Homo sapiens
atgtggaggcattgg

SEQ ID NO: 1775942 - DNA, 15 bp, Homo sapiens
tgtggaggcattggt

SEQ ID NO: 1775943 - DNA, 15 bp, Homo sapiens
gtggaggcattggta

SEQ ID NO: 1775944 - DNA, 15 bp, Homo sapiens
tggaggcattggtaa

SEQ ID NO: 1775945 - DNA, 15 bp, Homo sapiens
ggaggcattggtaaa

SEQ ID NO: 1775946 - DNA, 15 bp, Homo sapiens
gaggcattggtaaat

SEQ ID NO: 1775947 - DNA, 15 bp, Homo sapiens
aggcattggtaaatt

SEQ ID NO: 1775948 - DNA, 15 bp, Homo sapiens
ggcattggtaaatta

SEQ ID NO: 1775949 - DNA, 15 bp, Homo sapiens
gcattggtaaattat

SEQ ID NO: 1775950 - DNA, 15 bp, Homo sapiens
cattggtaaattatc

SEQ ID NO: 1775951 - DNA, 15 bp, Homo sapiens
attggtaaattatca

SEQ ID NO: 1775952 - DNA, 15 bp, Homo sapiens
ttggtaaattatcag

SEQ ID NO: 1775953 - DNA, 15 bp, Homo sapiens
tggtaaattatcaga

SEQ ID NO: 1775954 - DNA, 15 bp, Homo sapiens
ggtaaattatcagac

SEQ ID NO: 1775955 - DNA, 15 bp, Homo sapiens
gtaaattatcagact

SEQ ID NO: 1775956 - DNA, 15 bp, Homo sapiens
taaattatcagacta

SEQ ID NO: 1775957 - DNA, 15 bp, Homo sapiens
aaattatcagactag

SEQ ID NO: 1775958 - DNA, 15 bp, Homo sapiens
aattatcagactagt

SEQ ID NO: 1775959 - DNA, 15 bp, Homo sapiens
attatcagactagta

SEQ ID NO: 1775960 - DNA, 15 bp, Homo sapiens
ttatcagactagtat

SEQ ID NO: 1775961 - DNA, 15 bp, Homo sapiens
tatcagactagtatt

SEQ ID NO: 1775962 - DNA, 15 bp, Homo sapiens
atcagactagtattg

SEQ ID NO: 1775963 - DNA, 15 bp, Homo sapiens
tcagactagtattgt

SEQ ID NO: 1775964 - DNA, 15 bp, Homo sapiens
cagactagtattgtc

SEQ ID NO: 1775965 - DNA, 15 bp, Homo sapiens
agactagtattgtca

SEQ ID NO: 1775966 - DNA, 15 bp, Homo sapiens
gactagtattgtcaa

SEQ ID NO: 1775967 - DNA, 15 bp, Homo sapiens
actagtattgtcaat

SEQ ID NO: 1775968 - DNA, 15 bp, Homo sapiens
ctagtattgtcaatt

SEQ ID NO: 1775969 - DNA, 15 bp, Homo sapiens
tagtattgtcaattt

SEQ ID NO: 1775970 - DNA, 15 bp, Homo sapiens
agtattgtcaatttt

SEQ ID NO: 1775971 - DNA, 15 bp, Homo sapiens
gtattgtcaattttt

SEQ ID NO: 1775972 - DNA, 15 bp, Homo sapiens
tattgtcaattttta

SEQ ID NO: 1775973 - DNA, 15 bp, Homo sapiens
attgtcaatttttat

SEQ ID NO: 1775974 - DNA, 15 bp, Homo sapiens
ttgtcaatttttata

SEQ ID NO: 1775975 - DNA, 15 bp, Homo sapiens
tgtcaatttttataa

SEQ ID NO: 1775976 - DNA, 15 bp, Homo sapiens
gtcaatttttataaa

SEQ ID NO: 1775977 - DNA, 15 bp, Homo sapiens
tcaatttttataaaa

SEQ ID NO: 1775978 - DNA, 15 bp, Homo sapiens
caatttttataaaag

SEQ ID NO: 1775979 - DNA, 15 bp, Homo sapiens
aatttttataaaagg

SEQ ID NO: 1775980 - DNA, 15 bp, Homo sapiens
atttttataaaaggt

SEQ ID NO: 1775981 - DNA, 15 bp, Homo sapiens
tttttataaaaggtc

SEQ ID NO: 1775982 - DNA, 15 bp, Homo sapiens
ttttataaaaggtct

SEQ ID NO: 1775983 - DNA, 15 bp, Homo sapiens
tttataaaaggtctt

SEQ ID NO: 1775984 - DNA, 15 bp, Homo sapiens
ttataaaaggtcttt

SEQ ID NO: 1775985 - DNA, 15 bp, Homo sapiens
tataaaaggtctttg

SEQ ID NO: 1775986 - DNA, 15 bp, Homo sapiens
ataaaaggtctttga

SEQ ID NO: 1775987 - DNA, 15 bp, Homo sapiens
taaaaggtctttgac

SEQ ID NO: 1775988 - DNA, 15 bp, Homo sapiens
aaaaggtctttgaca

SEQ ID NO: 1775989 - DNA, 15 bp, Homo sapiens
aaaggtctttgacat

SEQ ID NO: 1775990 - DNA, 15 bp, Homo sapiens
aaggtctttgacatg

SEQ ID NO: 1775991 - DNA, 15 bp, Homo sapiens
aggtctttgacatgg

SEQ ID NO: 1775992 - DNA, 15 bp, Homo sapiens
ggtctttgacatgga

SEQ ID NO: 1775993 - DNA, 15 bp, Homo sapiens
gtctttgacatggat

SEQ ID NO: 1775994 - DNA, 15 bp, Homo sapiens
tctttgacatggatg

SEQ ID NO: 1775995 - DNA, 15 bp, Homo sapiens
ctttgacatggatga

SEQ ID NO: 1775996 - DNA, 15 bp, Homo sapiens
tttgacatggatgat

SEQ ID NO: 1775997 - DNA, 15 bp, Homo sapiens
ttgacatggatgatt

SEQ ID NO: 1775998 - DNA, 15 bp, Homo sapiens
tgacatggatgatta

SEQ ID NO: 1775999 - DNA, 15 bp, Homo sapiens
gacatggatgattat

SEQ ID NO: 1776000 - DNA, 15 bp, Homo sapiens
acatggatgattatg

SEQ ID NO: 1776001 - DNA, 15 bp, Homo sapiens
catggatgattatgg

SEQ ID NO: 1776002 - DNA, 15 bp, Homo sapiens
atggatgattatggt

SEQ ID NO: 1776003 - DNA, 15 bp, Homo sapiens
tggatgattatggtg

SEQ ID NO: 1776004 - DNA, 15 bp, Homo sapiens
ggatgattatggtgt

SEQ ID NO: 1776005 - DNA, 15 bp, Homo sapiens
gatgattatggtgta

SEQ ID NO: 1776006 - DNA, 15 bp, Homo sapiens
atgattatggtgtaa

SEQ ID NO: 1776007 - DNA, 15 bp, Homo sapiens
tgattatggtgtaat

SEQ ID NO: 1776008 - DNA, 15 bp, Homo sapiens
gattatggtgtaata

SEQ ID NO: 1776009 - DNA, 15 bp, Homo sapiens
attatggtgtaatag

SEQ ID NO: 1776010 - DNA, 15 bp, Homo sapiens
ttatggtgtaatagt

SEQ ID NO: 1776011 - DNA, 15 bp, Homo sapiens
tatggtgtaatagtt

SEQ ID NO: 1776012 - DNA, 15 bp, Homo sapiens
atggtgtaatagtta

SEQ ID NO: 1776013 - DNA, 15 bp, Homo sapiens
tggtgtaatagttac

SEQ ID NO: 1776014 - DNA, 15 bp, Homo sapiens
ggtgtaatagttaca

SEQ ID NO: 1776015 - DNA, 15 bp, Homo sapiens
gtgtaatagttacac

SEQ ID NO: 1776016 - DNA, 15 bp, Homo sapiens
tgtaatagttacaca

SEQ ID NO: 1776017 - DNA, 15 bp, Homo sapiens
gtaatagttacacaa

SEQ ID NO: 1776018 - DNA, 15 bp, Homo sapiens
taatagttacacaat

SEQ ID NO: 1776019 - DNA, 15 bp, Homo sapiens
aatagttacacaatg

SEQ ID NO: 1776020 - DNA, 15 bp, Homo sapiens
atagttacacaatgt

SEQ ID NO: 1776021 - DNA, 15 bp, Homo sapiens
tagttacacaatgtc

SEQ ID NO: 1776022 - DNA, 15 bp, Homo sapiens
agttacacaatgtct

SEQ ID NO: 1776023 - DNA, 15 bp, Homo sapiens
gttacacaatgtctt

SEQ ID NO: 1776024 - DNA, 15 bp, Homo sapiens
ttacacaatgtctta

SEQ ID NO: 1776025 - DNA, 15 bp, Homo sapiens
tacacaatgtcttac

SEQ ID NO: 1776026 - DNA, 15 bp, Homo sapiens
acacaatgtcttaca

SEQ ID NO: 1776027 - DNA, 15 bp, Homo sapiens
cacaatgtcttacag

SEQ ID NO: 1776028 - DNA, 15 bp, Homo sapiens
acaatgtcttacaga

SEQ ID NO: 1776029 - DNA, 15 bp, Homo sapiens
caatgtcttacagat

SEQ ID NO: 1776030 - DNA, 15 bp, Homo sapiens
aatgtcttacagatt

SEQ ID NO: 1776031 - DNA, 15 bp, Homo sapiens
atgtcttacagatta

SEQ ID NO: 1776032 - DNA, 15 bp, Homo sapiens
tgtcttacagattat

SEQ ID NO: 1776033 - DNA, 15 bp, Homo sapiens
gtcttacagattata

SEQ ID NO: 1776034 - DNA, 15 bp, Homo sapiens
tcttacagattatat

SEQ ID NO: 1776035 - DNA, 15 bp, Homo sapiens
cttacagattatata

SEQ ID NO: 1776036 - DNA, 15 bp, Homo sapiens
ttacagattatatat

SEQ ID NO: 1776037 - DNA, 15 bp, Homo sapiens
tacagattatatatg

SEQ ID NO: 1776038 - DNA, 15 bp, Homo sapiens
acagattatatatgt

SEQ ID NO: 1776039 - DNA, 15 bp, Homo sapiens
cagattatatatgtc

SEQ ID NO: 1776040 - DNA, 15 bp, Homo sapiens
agattatatatgtca

SEQ ID NO: 1776041 - DNA, 15 bp, Homo sapiens
gattatatatgtcac

SEQ ID NO: 1776042 - DNA, 15 bp, Homo sapiens
attatatatgtcaca

SEQ ID NO: 1776043 - DNA, 15 bp, Homo sapiens
ttatatatgtcacat

SEQ ID NO: 1776044 - DNA, 15 bp, Homo sapiens
tatatatgtcacatc

SEQ ID NO: 1776045 - DNA, 15 bp, Homo sapiens
atatatgtcacatca

SEQ ID NO: 1776046 - DNA, 15 bp, Homo sapiens
tatatgtcacatcag

SEQ ID NO: 1776047 - DNA, 15 bp, Homo sapiens
atatgtcacatcagt

SEQ ID NO: 1776048 - DNA, 15 bp, Homo sapiens
tatgtcacatcagtt

SEQ ID NO: 1776049 - DNA, 15 bp, Homo sapiens
atgtcacatcagtta

SEQ ID NO: 1776050 - DNA, 15 bp, Homo sapiens
tgtcacatcagttat

SEQ ID NO: 1776051 - DNA, 15 bp, Homo sapiens
gtcacatcagttata

SEQ ID NO: 1776052 - DNA, 15 bp, Homo sapiens
tcacatcagttatag

SEQ ID NO: 1776053 - DNA, 15 bp, Homo sapiens
cacatcagttataga

SEQ ID NO: 1776054 - DNA, 15 bp, Homo sapiens
acatcagttatagac

SEQ ID NO: 1776055 - DNA, 15 bp, Homo sapiens
catcagttatagaca

SEQ ID NO: 1776056 - DNA, 15 bp, Homo sapiens
atcagttatagacaa

SEQ ID NO: 1776057 - DNA, 15 bp, Homo sapiens
tcagttatagacaat

SEQ ID NO: 1776058 - DNA, 15 bp, Homo sapiens
cagttatagacaatt

SEQ ID NO: 1776059 - DNA, 15 bp, Homo sapiens
agttatagacaattc

SEQ ID NO: 1776060 - DNA, 15 bp, Homo sapiens
gttatagacaattct

SEQ ID NO: 1776061 - DNA, 15 bp, Homo sapiens
ttatagacaattctg

SEQ ID NO: 1776062 - DNA, 15 bp, Homo sapiens
tatagacaattctgg

SEQ ID NO: 1776063 - DNA, 15 bp, Homo sapiens
atagacaattctgga

SEQ ID NO: 1776064 - DNA, 15 bp, Homo sapiens
tagacaattctggag

SEQ ID NO: 1776065 - DNA, 15 bp, Homo sapiens
agacaattctggaga

SEQ ID NO: 1776066 - DNA, 15 bp, Homo sapiens
gacaattctggagat

SEQ ID NO: 1776067 - DNA, 15 bp, Homo sapiens
acaattctggagatg

SEQ ID NO: 1776068 - DNA, 15 bp, Homo sapiens
caattctggagatga

SEQ ID NO: 1776069 - DNA, 15 bp, Homo sapiens
aattctggagatgat

SEQ ID NO: 1776070 - DNA, 15 bp, Homo sapiens
attctggagatgata

SEQ ID NO: 1776071 - DNA, 15 bp, Homo sapiens
ttctggagatgataa

SEQ ID NO: 1776072 - DNA, 15 bp, Homo sapiens
tctggagatgataat

SEQ ID NO: 1776073 - DNA, 15 bp, Homo sapiens
ctggagatgataatc

SEQ ID NO: 1776074 - DNA, 15 bp, Homo sapiens
tggagatgataatct

SEQ ID NO: 1776075 - DNA, 15 bp, Homo sapiens
ggagatgataatcta

SEQ ID NO: 1776076 - DNA, 15 bp, Homo sapiens
gagatgataatctat

SEQ ID NO: 1776077 - DNA, 15 bp, Homo sapiens
agatgataatctatt

SEQ ID NO: 1776078 - DNA, 15 bp, Homo sapiens
gatgataatctatta

SEQ ID NO: 1776079 - DNA, 15 bp, Homo sapiens
atgataatctattaa

SEQ ID NO: 1776080 - DNA, 15 bp, Homo sapiens
tgataatctattaaa

SEQ ID NO: 1776081 - DNA, 15 bp, Homo sapiens
gataatctattaaag

SEQ ID NO: 1776082 - DNA, 15 bp, Homo sapiens
ataatctattaaagt

SEQ ID NO: 1776083 - DNA, 15 bp, Homo sapiens
taatctattaaagta

SEQ ID NO: 1776084 - DNA, 15 bp, Homo sapiens
aatctattaaagtag

SEQ ID NO: 1776085 - DNA, 15 bp, Homo sapiens
atctattaaagtagt

SEQ ID NO: 1776086 - DNA, 15 bp, Homo sapiens
tctattaaagtagtt

SEQ ID NO: 1776087 - DNA, 15 bp, Homo sapiens
ctattaaagtagttc

SEQ ID NO: 1776088 - DNA, 15 bp, Homo sapiens
tattaaagtagttca

SEQ ID NO: 1776089 - DNA, 15 bp, Homo sapiens
attaaagtagttcaa

SEQ ID NO: 1776090 - DNA, 15 bp, Homo sapiens
ttaaagtagttcaaa

SEQ ID NO: 1776091 - DNA, 15 bp, Homo sapiens
taaagtagttcaaag

SEQ ID NO: 1776092 - DNA, 15 bp, Homo sapiens
aaagtagttcaaaga

SEQ ID NO: 1776093 - DNA, 15 bp, Homo sapiens
aagtagttcaaagag

SEQ ID NO: 1776094 - DNA, 15 bp, Homo sapiens
agtagttcaaagaga

SEQ ID NO: 1776095 - DNA, 15 bp, Homo sapiens
gtagttcaaagagag

SEQ ID NO: 1776096 - DNA, 15 bp, Homo sapiens
tagttcaaagagagt

SEQ ID NO: 1776097 - DNA, 15 bp, Homo sapiens
agttcaaagagagtc

SEQ ID NO: 1776098 - DNA, 15 bp, Homo sapiens
gttcaaagagagtcc

SEQ ID NO: 1776099 - DNA, 15 bp, Homo sapiens
ttcaaagagagtccc

SEQ ID NO: 1776100 - DNA, 15 bp, Homo sapiens
tcaaagagagtccca

SEQ ID NO: 1776101 - DNA, 15 bp, Homo sapiens
caaagagagtcccac

SEQ ID NO: 1776102 - DNA, 15 bp, Homo sapiens
aaagagagtcccaca

SEQ ID NO: 1776103 - DNA, 15 bp, Homo sapiens
aagagagtcccacag

SEQ ID NO: 1776104 - DNA, 15 bp, Homo sapiens
agagagtcccacagg

SEQ ID NO: 1776105 - DNA, 15 bp, Homo sapiens
gagagtcccacagga

SEQ ID NO: 1776106 - DNA, 15 bp, Homo sapiens
agagtcccacaggaa

SEQ ID NO: 1776107 - DNA, 15 bp, Homo sapiens
gagtcccacaggaac

SEQ ID NO: 1776108 - DNA, 15 bp, Homo sapiens
agtcccacaggaacc

SEQ ID NO: 1776109 - DNA, 15 bp, Homo sapiens
gtcccacaggaacct

SEQ ID NO: 1776110 - DNA, 15 bp, Homo sapiens
tcccacaggaacctc

SEQ ID NO: 1776111 - DNA, 15 bp, Homo sapiens
cccacaggaacctct

SEQ ID NO: 1776112 - DNA, 15 bp, Homo sapiens
ccacaggaacctctt

SEQ ID NO: 1776113 - DNA, 15 bp, Homo sapiens
cacaggaacctcttt

SEQ ID NO: 1776114 - DNA, 15 bp, Homo sapiens
acaggaacctctttt

SEQ ID NO: 1776115 - DNA, 15 bp, Homo sapiens
caggaacctcttttg

SEQ ID NO: 1776116 - DNA, 15 bp, Homo sapiens
aggaacctcttttga

SEQ ID NO: 1776117 - DNA, 15 bp, Homo sapiens
ggaacctcttttgaa

SEQ ID NO: 1776118 - DNA, 15 bp, Homo sapiens
gaacctcttttgaaa

SEQ ID NO: 1776119 - DNA, 15 bp, Homo sapiens
aacctcttttgaaat

SEQ ID NO: 1776120 - DNA, 15 bp, Homo sapiens
acctcttttgaaatc

SEQ ID NO: 1776121 - DNA, 15 bp, Homo sapiens
cctcttttgaaatca

SEQ ID NO: 1776122 - DNA, 15 bp, Homo sapiens
ctcttttgaaatcac

SEQ ID NO: 1776123 - DNA, 15 bp, Homo sapiens
tcttttgaaatcact

SEQ ID NO: 1776124 - DNA, 15 bp, Homo sapiens
cttttgaaatcactg

SEQ ID NO: 1776125 - DNA, 15 bp, Homo sapiens
ttttgaaatcactga

SEQ ID NO: 1776126 - DNA, 15 bp, Homo sapiens
tttgaaatcactgat

SEQ ID NO: 1776127 - DNA, 15 bp, Homo sapiens
ttgaaatcactgatt

SEQ ID NO: 1776128 - DNA, 15 bp, Homo sapiens
tgaaatcactgattt

SEQ ID NO: 1776129 - DNA, 15 bp, Homo sapiens
gaaatcactgatttc

SEQ ID NO: 1776130 - DNA, 15 bp, Homo sapiens
aaatcactgatttca

SEQ ID NO: 1776131 - DNA, 15 bp, Homo sapiens
aatcactgatttcaa

SEQ ID NO: 1776132 - DNA, 15 bp, Homo sapiens
atcactgatttcaac

SEQ ID NO: 1776133 - DNA, 15 bp, Homo sapiens
tcactgatttcaact

SEQ ID NO: 1776134 - DNA, 15 bp, Homo sapiens
cactgatttcaactt

SEQ ID NO: 1776135 - DNA, 15 bp, Homo sapiens
actgatttcaactta

SEQ ID NO: 1776136 - DNA, 15 bp, Homo sapiens
ctgatttcaacttac

SEQ ID NO: 1776137 - DNA, 15 bp, Homo sapiens
tgatttcaacttact

SEQ ID NO: 1776138 - DNA, 15 bp, Homo sapiens
gatttcaacttacta

SEQ ID NO: 1776139 - DNA, 15 bp, Homo sapiens
atttcaacttactaa

SEQ ID NO: 1776140 - DNA, 15 bp, Homo sapiens
tttcaacttactaaa

SEQ ID NO: 1776141 - DNA, 15 bp, Homo sapiens
ttcaacttactaaag

SEQ ID NO: 1776142 - DNA, 15 bp, Homo sapiens
tcaacttactaaaga

SEQ ID NO: 1776143 - DNA, 15 bp, Homo sapiens
caacttactaaagat

SEQ ID NO: 1776144 - DNA, 15 bp, Homo sapiens
aacttactaaagata

SEQ ID NO: 1776145 - DNA, 15 bp, Homo sapiens
acttactaaagatat

SEQ ID NO: 1776146 - DNA, 15 bp, Homo sapiens
cttactaaagatatg

SEQ ID NO: 1776147 - DNA, 15 bp, Homo sapiens
ttactaaagatatgg

SEQ ID NO: 1776148 - DNA, 15 bp, Homo sapiens
tactaaagatatggg

SEQ ID NO: 1776149 - DNA, 15 bp, Homo sapiens
actaaagatatgggt

SEQ ID NO: 1776150 - DNA, 15 bp, Homo sapiens
ctaaagatatgggtg

SEQ ID NO: 1776151 - DNA, 15 bp, Homo sapiens
taaagatatgggtgt

SEQ ID NO: 1776152 - DNA, 15 bp, Homo sapiens
aaagatatgggtgta

SEQ ID NO: 1776153 - DNA, 15 bp, Homo sapiens
aagatatgggtgtac

SEQ ID NO: 1776154 - DNA, 15 bp, Homo sapiens
agatatgggtgtaca

SEQ ID NO: 1776155 - DNA, 15 bp, Homo sapiens
gatatgggtgtacaa

SEQ ID NO: 1776156 - DNA, 15 bp, Homo sapiens
atatgggtgtacaac

SEQ ID NO: 1776157 - DNA, 15 bp, Homo sapiens
tatgggtgtacaaca

SEQ ID NO: 1776158 - DNA, 15 bp, Homo sapiens
atgggtgtacaacat

SEQ ID NO: 1776159 - DNA, 15 bp, Homo sapiens
tgggtgtacaacata

SEQ ID NO: 1776160 - DNA, 15 bp, Homo sapiens
gggtgtacaacataa

SEQ ID NO: 1776161 - DNA, 15 bp, Homo sapiens
ggtgtacaacataag

SEQ ID NO: 1776162 - DNA, 15 bp, Homo sapiens
gtgtacaacataagt

SEQ ID NO: 1776163 - DNA, 15 bp, Homo sapiens
tgtacaacataagtg

SEQ ID NO: 1776164 - DNA, 15 bp, Homo sapiens
gtacaacataagtgg

SEQ ID NO: 1776165 - DNA, 15 bp, Homo sapiens
tacaacataagtgga

SEQ ID NO: 1776166 - DNA, 15 bp, Homo sapiens
acaacataagtggaa

SEQ ID NO: 1776167 - DNA, 15 bp, Homo sapiens
caacataagtggaaa

SEQ ID NO: 1776168 - DNA, 15 bp, Homo sapiens
aacataagtggaaac

SEQ ID NO: 1776169 - DNA, 15 bp, Homo sapiens
acataagtggaaaca

SEQ ID NO: 1776170 - DNA, 15 bp, Homo sapiens
cataagtggaaacat

SEQ ID NO: 1776171 - DNA, 15 bp, Homo sapiens
ataagtggaaacatt

SEQ ID NO: 1776172 - DNA, 15 bp, Homo sapiens
taagtggaaacattt

SEQ ID NO: 1776173 - DNA, 15 bp, Homo sapiens
aagtggaaacatttt

SEQ ID NO: 1776174 - DNA, 15 bp, Homo sapiens
agtggaaacattttc

SEQ ID NO: 1776175 - DNA, 15 bp, Homo sapiens
ggaaacattttctac

SEQ ID NO: 1776176 - DNA, 15 bp, Homo sapiens
gaaacattttctact

SEQ ID NO: 1776177 - DNA, 15 bp, Homo sapiens
aaacattttctacta

SEQ ID NO: 1776178 - DNA, 15 bp, Homo sapiens
aacattttctactat

SEQ ID NO: 1776179 - DNA, 15 bp, Homo sapiens
acattttctactatt

SEQ ID NO: 1776180 - DNA, 15 bp, Homo sapiens
cattttctactattc

SEQ ID NO: 1776181 - DNA, 15 bp, Homo sapiens
attttctactattca

SEQ ID NO: 1776182 - DNA, 15 bp, Homo sapiens
ttttctactattcat

SEQ ID NO: 1776183 - DNA, 15 bp, Homo sapiens
tttctactattcata

SEQ ID NO: 1776184 - DNA, 15 bp, Homo sapiens
ttctactattcatat

SEQ ID NO: 1776185 - DNA, 15 bp, Homo sapiens
tctactattcatatg

SEQ ID NO: 1776186 - DNA, 15 bp, Homo sapiens
ctactattcatatgc

SEQ ID NO: 1776187 - DNA, 15 bp, Homo sapiens
tactattcatatgca

SEQ ID NO: 1776188 - DNA, 15 bp, Homo sapiens
actattcatatgcag

SEQ ID NO: 1776189 - DNA, 15 bp, Homo sapiens
ctattcatatgcaga

SEQ ID NO: 1776190 - DNA, 15 bp, Homo sapiens
tattcatatgcagat

SEQ ID NO: 1776191 - DNA, 15 bp, Homo sapiens
attcatatgcagatg

SEQ ID NO: 1776192 - DNA, 15 bp, Homo sapiens
ttcatatgcagatga

SEQ ID NO: 1776193 - DNA, 15 bp, Homo sapiens
tcatatgcagatgaa

SEQ ID NO: 1776194 - DNA, 15 bp, Homo sapiens
catatgcagatgaat

SEQ ID NO: 1776195 - DNA, 15 bp, Homo sapiens
atatgcagatgaatt

SEQ ID NO: 1776196 - DNA, 15 bp, Homo sapiens
tatgcagatgaattt

SEQ ID NO: 1776197 - DNA, 15 bp, Homo sapiens
atgcagatgaatttc

SEQ ID NO: 1776198 - DNA, 15 bp, Homo sapiens
tgcagatgaatttca

SEQ ID NO: 1776199 - DNA, 15 bp, Homo sapiens
gcagatgaatttcat

SEQ ID NO: 1776200 - DNA, 15 bp, Homo sapiens
cagatgaatttcatt

SEQ ID NO: 1776201 - DNA, 15 bp, Homo sapiens
agatgaatttcattc

SEQ ID NO: 1776202 - DNA, 15 bp, Homo sapiens
gatgaatttcattct

SEQ ID NO: 1776203 - DNA, 15 bp, Homo sapiens
atgaatttcattcta

SEQ ID NO: 1776204 - DNA, 15 bp, Homo sapiens
tgaatttcattctag

SEQ ID NO: 1776205 - DNA, 15 bp, Homo sapiens
gaatttcattctagc

SEQ ID NO: 1776206 - DNA, 15 bp, Homo sapiens
aatttcattctagct

SEQ ID NO: 1776207 - DNA, 15 bp, Homo sapiens
atttcattctagctc

SEQ ID NO: 1776208 - DNA, 15 bp, Homo sapiens
tttcattctagctca

SEQ ID NO: 1776209 - DNA, 15 bp, Homo sapiens
ttcattctagctcag

SEQ ID NO: 1776210 - DNA, 15 bp, Homo sapiens
tcattctagctcaga

SEQ ID NO: 1776211 - DNA, 15 bp, Homo sapiens
cattctagctcagaa

SEQ ID NO: 1776212 - DNA, 15 bp, Homo sapiens
attctagctcagaaa

SEQ ID NO: 1776213 - DNA, 15 bp, Homo sapiens
ttctagctcagaaac

SEQ ID NO: 1776214 - DNA, 15 bp, Homo sapiens
tctagctcagaaaca

SEQ ID NO: 1776215 - DNA, 15 bp, Homo sapiens
ctagctcagaaacat

SEQ ID NO: 1776216 - DNA, 15 bp, Homo sapiens
tagctcagaaacatt

SEQ ID NO: 1776217 - DNA, 15 bp, Homo sapiens
agctcagaaacattt

SEQ ID NO: 1776218 - DNA, 15 bp, Homo sapiens
gctcagaaacatttg

SEQ ID NO: 1776219 - DNA, 15 bp, Homo sapiens
ctcagaaacatttgg

SEQ ID NO: 1776220 - DNA, 15 bp, Homo sapiens
tcagaaacatttgga

SEQ ID NO: 1776221 - DNA, 15 bp, Homo sapiens
cagaaacatttggaa

SEQ ID NO: 1776222 - DNA, 15 bp, Homo sapiens
agaaacatttggaaa

SEQ ID NO: 1776223 - DNA, 15 bp, Homo sapiens
gaaacatttggaaaa

SEQ ID NO: 1776224 - DNA, 15 bp, Homo sapiens
aaacatttggaaaac

SEQ ID NO: 1776225 - DNA, 15 bp, Homo sapiens
aacatttggaaaact

SEQ ID NO: 1776226 - DNA, 15 bp, Homo sapiens
acatttggaaaactg

SEQ ID NO: 1776227 - DNA, 15 bp, Homo sapiens
catttggaaaactga

SEQ ID NO: 1776228 - DNA, 15 bp, Homo sapiens
atttggaaaactgac

SEQ ID NO: 1776229 - DNA, 15 bp, Homo sapiens
tttggaaaactgaca

SEQ ID NO: 1776230 - DNA, 15 bp, Homo sapiens
ttggaaaactgacat

SEQ ID NO: 1776231 - DNA, 15 bp, Homo sapiens
tggaaaactgacatc

SEQ ID NO: 1776232 - DNA, 15 bp, Homo sapiens
ggaaaactgacatca

SEQ ID NO: 1776233 - DNA, 15 bp, Homo sapiens
gaaaactgacatcac

SEQ ID NO: 1776234 - DNA, 15 bp, Homo sapiens
aaaactgacatcaca

SEQ ID NO: 1776235 - DNA, 15 bp, Homo sapiens
aaactgacatcacac

SEQ ID NO: 1776236 - DNA, 15 bp, Homo sapiens
aactgacatcacacg

SEQ ID NO: 1776237 - DNA, 15 bp, Homo sapiens
actgacatcacacgt

SEQ ID NO: 1776238 - DNA, 15 bp, Homo sapiens
ctgacatcacacgtg

SEQ ID NO: 1776239 - DNA, 15 bp, Homo sapiens
tgacatcacacgtga

SEQ ID NO: 1776240 - DNA, 15 bp, Homo sapiens
gacatcacacgtgac

SEQ ID NO: 1776241 - DNA, 15 bp, Homo sapiens
acatcacacgtgact

SEQ ID NO: 1776242 - DNA, 15 bp, Homo sapiens
catcacacgtgactt

SEQ ID NO: 1776243 - DNA, 15 bp, Homo sapiens
atcacacgtgacttc

SEQ ID NO: 1776244 - DNA, 15 bp, Homo sapiens
tcacacgtgacttca

SEQ ID NO: 1776245 - DNA, 15 bp, Homo sapiens
cacacgtgacttcaa

SEQ ID NO: 1776246 - DNA, 15 bp, Homo sapiens
acacgtgacttcaag

SEQ ID NO: 1776247 - DNA, 15 bp, Homo sapiens
cacgtgacttcaagc

SEQ ID NO: 1776248 - DNA, 15 bp, Homo sapiens
acgtgacttcaagct

SEQ ID NO: 1776249 - DNA, 15 bp, Homo sapiens
cgtgacttcaagcta

SEQ ID NO: 1776250 - DNA, 15 bp, Homo sapiens
gtgacttcaagctat

SEQ ID NO: 1776251 - DNA, 15 bp, Homo sapiens
tgacttcaagctatt

SEQ ID NO: 1776252 - DNA, 15 bp, Homo sapiens
gacttcaagctatta

SEQ ID NO: 1776253 - DNA, 15 bp, Homo sapiens
acttcaagctattaa

SEQ ID NO: 1776254 - DNA, 15 bp, Homo sapiens
cttcaagctattaaa

SEQ ID NO: 1776255 - DNA, 15 bp, Homo sapiens
ttcaagctattaaat

SEQ ID NO: 1776256 - DNA, 15 bp, Homo sapiens
tcaagctattaaatg

SEQ ID NO: 1776257 - DNA, 15 bp, Homo sapiens
caagctattaaatgt

SEQ ID NO: 1776258 - DNA, 15 bp, Homo sapiens
aagctattaaatgtt

SEQ ID NO: 1776259 - DNA, 15 bp, Homo sapiens
agctattaaatgtta

SEQ ID NO: 1776260 - DNA, 15 bp, Homo sapiens
gctattaaatgttag

SEQ ID NO: 1776261 - DNA, 15 bp, Homo sapiens
ctattaaatgttagt

SEQ ID NO: 1776262 - DNA, 15 bp, Homo sapiens
tattaaatgttagtg

SEQ ID NO: 1776263 - DNA, 15 bp, Homo sapiens
attaaatgttagtga

SEQ ID NO: 1776264 - DNA, 15 bp, Homo sapiens
ttaaatgttagtgat

SEQ ID NO: 1776265 - DNA, 15 bp, Homo sapiens
taaatgttagtgata

SEQ ID NO: 1776266 - DNA, 15 bp, Homo sapiens
aaatgttagtgatag

SEQ ID NO: 1776267 - DNA, 15 bp, Homo sapiens
aatgttagtgatagc

SEQ ID NO: 1776268 - DNA, 15 bp, Homo sapiens
atgttagtgatagca

SEQ ID NO: 1776269 - DNA, 15 bp, Homo sapiens
tgttagtgatagcac

SEQ ID NO: 1776270 - DNA, 15 bp, Homo sapiens
gttagtgatagcacc

SEQ ID NO: 1776271 - DNA, 15 bp, Homo sapiens
ttagtgatagcacct

SEQ ID NO: 1776272 - DNA, 15 bp, Homo sapiens
tagtgatagcacctt

SEQ ID NO: 1776273 - DNA, 15 bp, Homo sapiens
agtgatagcacctta

SEQ ID NO: 1776274 - DNA, 15 bp, Homo sapiens
gtgatagcaccttag

SEQ ID NO: 1776275 - DNA, 15 bp, Homo sapiens
tgatagcaccttaga

SEQ ID NO: 1776276 - DNA, 15 bp, Homo sapiens
gatagcaccttagaa

SEQ ID NO: 1776277 - DNA, 15 bp, Homo sapiens
atagcaccttagaaa

SEQ ID NO: 1776278 - DNA, 15 bp, Homo sapiens
tagcaccttagaaaa

SEQ ID NO: 1776279 - DNA, 15 bp, Homo sapiens
agcaccttagaaaaa

SEQ ID NO: 1776280 - DNA, 15 bp, Homo sapiens
gcaccttagaaaaac

SEQ ID NO: 1776281 - DNA, 15 bp, Homo sapiens
caccttagaaaaaca

SEQ ID NO: 1776282 - DNA, 15 bp, Homo sapiens
accttagaaaaacac

SEQ ID NO: 1776283 - DNA, 15 bp, Homo sapiens
ccttagaaaaacaca

SEQ ID NO: 1776284 - DNA, 15 bp, Homo sapiens
cttagaaaaacacaa

SEQ ID NO: 1776285 - DNA, 15 bp, Homo sapiens
ttagaaaaacacaat

SEQ ID NO: 1776286 - DNA, 15 bp, Homo sapiens
tagaaaaacacaatg

SEQ ID NO: 1776287 - DNA, 15 bp, Homo sapiens
agaaaaacacaatgg

SEQ ID NO: 1776288 - DNA, 15 bp, Homo sapiens
gaaaaacacaatggc

SEQ ID NO: 1776289 - DNA, 15 bp, Homo sapiens
aaaaacacaatggct

SEQ ID NO: 1776290 - DNA, 15 bp, Homo sapiens
aaaacacaatggctt

SEQ ID NO: 1776291 - DNA, 15 bp, Homo sapiens
aaacacaatggcttt

SEQ ID NO: 1776292 - DNA, 15 bp, Homo sapiens
aacacaatggctttc

SEQ ID NO: 1776293 - DNA, 15 bp, Homo sapiens
acacaatggctttca

SEQ ID NO: 1776294 - DNA, 15 bp, Homo sapiens
cacaatggctttcaa

SEQ ID NO: 1776295 - DNA, 15 bp, Homo sapiens
acaatggctttcaac

SEQ ID NO: 1776296 - DNA, 15 bp, Homo sapiens
caatggctttcaaca

SEQ ID NO: 1776297 - DNA, 15 bp, Homo sapiens
aatggctttcaacat

SEQ ID NO: 1776298 - DNA, 15 bp, Homo sapiens
atggctttcaacatg

SEQ ID NO: 1776299 - DNA, 15 bp, Homo sapiens
tggctttcaacatgt

SEQ ID NO: 1776300 - DNA, 15 bp, Homo sapiens
ggctttcaacatgtg

SEQ ID NO: 1776301 - DNA, 15 bp, Homo sapiens
gctttcaacatgtga

SEQ ID NO: 1776302 - DNA, 15 bp, Homo sapiens
ctttcaacatgtgac

SEQ ID NO: 1776303 - DNA, 15 bp, Homo sapiens
tttcaacatgtgaca

SEQ ID NO: 1776304 - DNA, 15 bp, Homo sapiens
ttcaacatgtgacag

SEQ ID NO: 1776305 - DNA, 15 bp, Homo sapiens
tcaacatgtgacagt

SEQ ID NO: 1776306 - DNA, 15 bp, Homo sapiens
caacatgtgacagtt

SEQ ID NO: 1776307 - DNA, 15 bp, Homo sapiens
aacatgtgacagttt

SEQ ID NO: 1776308 - DNA, 15 bp, Homo sapiens
acatgtgacagtttg

SEQ ID NO: 1776309 - DNA, 15 bp, Homo sapiens
catgtgacagtttgt

SEQ ID NO: 1776310 - DNA, 15 bp, Homo sapiens
atgtgacagtttgtg

SEQ ID NO: 1776311 - DNA, 15 bp, Homo sapiens
tgtgacagtttgtgt

SEQ ID NO: 1776312 - DNA, 15 bp, Homo sapiens
gtgacagtttgtgtc

SEQ ID NO: 1776313 - DNA, 15 bp, Homo sapiens
tgacagtttgtgtct

SEQ ID NO: 1776314 - DNA, 15 bp, Homo sapiens
gacagtttgtgtctc

SEQ ID NO: 1776315 - DNA, 15 bp, Homo sapiens
acagtttgtgtctca

SEQ ID NO: 1776316 - DNA, 15 bp, Homo sapiens
cagtttgtgtctcaa

SEQ ID NO: 1776317 - DNA, 15 bp, Homo sapiens
agtttgtgtctcaag

SEQ ID NO: 1776318 - DNA, 15 bp, Homo sapiens
gtttgtgtctcaagt

SEQ ID NO: 1776319 - DNA, 15 bp, Homo sapiens
tttgtgtctcaagtc

SEQ ID NO: 1776320 - DNA, 15 bp, Homo sapiens
ttgtgtctcaagtca

SEQ ID NO: 1776321 - DNA, 15 bp, Homo sapiens
tgtgtctcaagtcaa

SEQ ID NO: 1776322 - DNA, 15 bp, Homo sapiens
gtgtctcaagtcaaa

SEQ ID NO: 1776323 - DNA, 15 bp, Homo sapiens
tgtctcaagtcaaaa

SEQ ID NO: 1776324 - DNA, 15 bp, Homo sapiens
gtctcaagtcaaaaa

SEQ ID NO: 1776325 - DNA, 15 bp, Homo sapiens
tctcaagtcaaaaat

SEQ ID NO: 1776326 - DNA, 15 bp, Homo sapiens
ctcaagtcaaaaatg

SEQ ID NO: 1776327 - DNA, 15 bp, Homo sapiens
tcaagtcaaaaatgg

SEQ ID NO: 1776328 - DNA, 15 bp, Homo sapiens
caagtcaaaaatgga

SEQ ID NO: 1776329 - DNA, 15 bp, Homo sapiens
aagtcaaaaatggac

SEQ ID NO: 1776330 - DNA, 15 bp, Homo sapiens
agtcaaaaatggaca

SEQ ID NO: 1776331 - DNA, 15 bp, Homo sapiens
gtcaaaaatggacag

SEQ ID NO: 1776332 - DNA, 15 bp, Homo sapiens
tcaaaaatggacagt

SEQ ID NO: 1776333 - DNA, 15 bp, Homo sapiens
caaaaatggacagtg

SEQ ID NO: 1776334 - DNA, 15 bp, Homo sapiens
aaaaatggacagtga

SEQ ID NO: 1776335 - DNA, 15 bp, Homo sapiens
aaaatggacagtgat

SEQ ID NO: 1776336 - DNA, 15 bp, Homo sapiens
aaatggacagtgatg

SEQ ID NO: 1776337 - DNA, 15 bp, Homo sapiens
aatggacagtgatgt

SEQ ID NO: 1776338 - DNA, 15 bp, Homo sapiens
atggacagtgatgtg

SEQ ID NO: 1776339 - DNA, 15 bp, Homo sapiens
tggacagtgatgtgt

SEQ ID NO: 1776340 - DNA, 15 bp, Homo sapiens
ggacagtgatgtgta

SEQ ID NO: 1776341 - DNA, 15 bp, Homo sapiens
gacagtgatgtgtaa

SEQ ID NO: 1776342 - DNA, 15 bp, Homo sapiens
acagtgatgtgtaag

SEQ ID NO: 1776343 - DNA, 15 bp, Homo sapiens
cagtgatgtgtaaga

SEQ ID NO: 1776344 - DNA, 15 bp, Homo sapiens
agtgatgtgtaagaa

SEQ ID NO: 1776345 - DNA, 15 bp, Homo sapiens
gtgatgtgtaagaaa

SEQ ID NO: 1776346 - DNA, 15 bp, Homo sapiens
tgatgtgtaagaaaa

SEQ ID NO: 1776347 - DNA, 15 bp, Homo sapiens
gatgtgtaagaaaat

SEQ ID NO: 1776348 - DNA, 15 bp, Homo sapiens
atgtgtaagaaaatc

SEQ ID NO: 1776349 - DNA, 15 bp, Homo sapiens
tgtgtaagaaaatca

SEQ ID NO: 1776350 - DNA, 15 bp, Homo sapiens
gtgtaagaaaatcaa

SEQ ID NO: 1776351 - DNA, 15 bp, Homo sapiens
tgtaagaaaatcaaa

SEQ ID NO: 1776352 - DNA, 15 bp, Homo sapiens
gtaagaaaatcaaat

SEQ ID NO: 1776353 - DNA, 15 bp, Homo sapiens
taagaaaatcaaatt

SEQ ID NO: 1776354 - DNA, 15 bp, Homo sapiens
aagaaaatcaaatta

SEQ ID NO: 1776355 - DNA, 15 bp, Homo sapiens
agaaaatcaaattac

SEQ ID NO: 1776356 - DNA, 15 bp, Homo sapiens
gaaaatcaaattaca

SEQ ID NO: 1776357 - DNA, 15 bp, Homo sapiens
aaaatcaaattacat

SEQ ID NO: 1776358 - DNA, 15 bp, Homo sapiens
aaatcaaattacata

SEQ ID NO: 1776359 - DNA, 15 bp, Homo sapiens
aatcaaattacataa

SEQ ID NO: 1776360 - DNA, 15 bp, Homo sapiens
atcaaattacataat

SEQ ID NO: 1776361 - DNA, 15 bp, Homo sapiens
tcaaattacataata

SEQ ID NO: 1776362 - DNA, 15 bp, Homo sapiens
caaattacataataa

SEQ ID NO: 1776363 - DNA, 15 bp, Homo sapiens
aaattacataataac

SEQ ID NO: 1776364 - DNA, 15 bp, Homo sapiens
aattacataataaca

SEQ ID NO: 1776365 - DNA, 15 bp, Homo sapiens
attacataataacaa

SEQ ID NO: 1776366 - DNA, 15 bp, Homo sapiens
ttacataataacaat

SEQ ID NO: 1776367 - DNA, 15 bp, Homo sapiens
tacataataacaatt

SEQ ID NO: 1776368 - DNA, 15 bp, Homo sapiens
acataataacaattc

SEQ ID NO: 1776369 - DNA, 15 bp, Homo sapiens
cataataacaattcc

SEQ ID NO: 1776370 - DNA, 15 bp, Homo sapiens
ataataacaattcct

SEQ ID NO: 1776371 - DNA, 15 bp, Homo sapiens
taataacaattccta

SEQ ID NO: 1776372 - DNA, 15 bp, Homo sapiens
aataacaattcctat

SEQ ID NO: 1776373 - DNA, 15 bp, Homo sapiens
ataacaattcctatt

SEQ ID NO: 1776374 - DNA, 15 bp, Homo sapiens
taacaattcctatta

SEQ ID NO: 1776375 - DNA, 15 bp, Homo sapiens
aacaattcctattac

SEQ ID NO: 1776376 - DNA, 15 bp, Homo sapiens
acaattcctattact

SEQ ID NO: 1776377 - DNA, 15 bp, Homo sapiens
caattcctattactc

SEQ ID NO: 1776378 - DNA, 15 bp, Homo sapiens
aattcctattactct

SEQ ID NO: 1776379 - DNA, 15 bp, Homo sapiens
attcctattactctt

SEQ ID NO: 1776380 - DNA, 15 bp, Homo sapiens
ttcctattactcttg

SEQ ID NO: 1776381 - DNA, 15 bp, Homo sapiens
tcctattactcttgt

SEQ ID NO: 1776382 - DNA, 15 bp, Homo sapiens
cctattactcttgtg

SEQ ID NO: 1776383 - DNA, 15 bp, Homo sapiens
ctattactcttgtgg

SEQ ID NO: 1776384 - DNA, 15 bp, Homo sapiens
tattactcttgtgga

SEQ ID NO: 1776385 - DNA, 15 bp, Homo sapiens
attactcttgtggaa

SEQ ID NO: 1776386 - DNA, 15 bp, Homo sapiens
ttactcttgtggaat

SEQ ID NO: 1776387 - DNA, 15 bp, Homo sapiens
tactcttgtggaata

SEQ ID NO: 1776388 - DNA, 15 bp, Homo sapiens
actcttgtggaatag

SEQ ID NO: 1776389 - DNA, 15 bp, Homo sapiens
ctcttgtggaatagg

SEQ ID NO: 1776390 - DNA, 15 bp, Homo sapiens
tcttgtggaataggc

SEQ ID NO: 1776391 - DNA, 15 bp, Homo sapiens
cttgtggaataggct

SEQ ID NO: 1776392 - DNA, 15 bp, Homo sapiens
ttgtggaataggctg

SEQ ID NO: 1776393 - DNA, 15 bp, Homo sapiens
tgtggaataggctgt

SEQ ID NO: 1776394 - DNA, 15 bp, Homo sapiens
gtggaataggctgtt

SEQ ID NO: 1776395 - DNA, 15 bp, Homo sapiens
tggaataggctgttt

SEQ ID NO: 1776396 - DNA, 15 bp, Homo sapiens
ggaataggctgtttc

SEQ ID NO: 1776397 - DNA, 15 bp, Homo sapiens
gaataggctgtttct

SEQ ID NO: 1776398 - DNA, 15 bp, Homo sapiens
aataggctgtttctt

SEQ ID NO: 1776399 - DNA, 15 bp, Homo sapiens
ataggctgtttcttc

SEQ ID NO: 1776400 - DNA, 15 bp, Homo sapiens
taggctgtttcttcc

SEQ ID NO: 1776401 - DNA, 15 bp, Homo sapiens
aggctgtttcttccc

SEQ ID NO: 1776402 - DNA, 15 bp, Homo sapiens
ggctgtttcttccca

SEQ ID NO: 1776403 - DNA, 15 bp, Homo sapiens
gctgtttcttcccac

SEQ ID NO: 1776404 - DNA, 15 bp, Homo sapiens
ctgtttcttcccacc

SEQ ID NO: 1776405 - DNA, 15 bp, Homo sapiens
tgtttcttcccacca

SEQ ID NO: 1776406 - DNA, 15 bp, Homo sapiens
gtttcttcccaccaa

SEQ ID NO: 1776407 - DNA, 15 bp, Homo sapiens
tttcttcccaccaag

SEQ ID NO: 1776408 - DNA, 15 bp, Homo sapiens
ttcttcccaccaagt

SEQ ID NO: 1776409 - DNA, 15 bp, Homo sapiens
tcttcccaccaagtc

SEQ ID NO: 1776410 - DNA, 15 bp, Homo sapiens
cttcccaccaagtca

SEQ ID NO: 1776411 - DNA, 15 bp, Homo sapiens
ttcccaccaagtcag

SEQ ID NO: 1776412 - DNA, 15 bp, Homo sapiens
tcccaccaagtcagt

SEQ ID NO: 1776413 - DNA, 15 bp, Homo sapiens
cccaccaagtcagtg

SEQ ID NO: 1776414 - DNA, 15 bp, Homo sapiens
ccaccaagtcagtga

SEQ ID NO: 1776415 - DNA, 15 bp, Homo sapiens
caccaagtcagtgat

SEQ ID NO: 1776416 - DNA, 15 bp, Homo sapiens
accaagtcagtgatg

SEQ ID NO: 1776417 - DNA, 15 bp, Homo sapiens
ccaagtcagtgatgt

SEQ ID NO: 1776418 - DNA, 15 bp, Homo sapiens
caagtcagtgatgtt

SEQ ID NO: 1776419 - DNA, 15 bp, Homo sapiens
aagtcagtgatgttt

SEQ ID NO: 1776420 - DNA, 15 bp, Homo sapiens
agtcagtgatgtttc

SEQ ID NO: 1776421 - DNA, 15 bp, Homo sapiens
gtcagtgatgtttct

SEQ ID NO: 1776422 - DNA, 15 bp, Homo sapiens
tcagtgatgtttctg

SEQ ID NO: 1776423 - DNA, 15 bp, Homo sapiens
cagtgatgtttctga

SEQ ID NO: 1776424 - DNA, 15 bp, Homo sapiens
agtgatgtttctgag

SEQ ID NO: 1776425 - DNA, 15 bp, Homo sapiens
gtgatgtttctgaga

SEQ ID NO: 1776426 - DNA, 15 bp, Homo sapiens
tgatgtttctgagat

SEQ ID NO: 1776427 - DNA, 15 bp, Homo sapiens
gatgtttctgagatc

SEQ ID NO: 1776428 - DNA, 15 bp, Homo sapiens
atgtttctgagatca

SEQ ID NO: 1776429 - DNA, 15 bp, Homo sapiens
tgtttctgagatcat

SEQ ID NO: 1776430 - DNA, 15 bp, Homo sapiens
gtttctgagatcata

SEQ ID NO: 1776431 - DNA, 15 bp, Homo sapiens
tttctgagatcataa

SEQ ID NO: 1776432 - DNA, 15 bp, Homo sapiens
ttctgagatcataat

SEQ ID NO: 1776433 - DNA, 15 bp, Homo sapiens
tctgagatcataatg

SEQ ID NO: 1776434 - DNA, 15 bp, Homo sapiens
ctgagatcataatgt

SEQ ID NO: 1776435 - DNA, 15 bp, Homo sapiens
tgagatcataatgtt

SEQ ID NO: 1776436 - DNA, 15 bp, Homo sapiens
gagatcataatgttc

SEQ ID NO: 1776437 - DNA, 15 bp, Homo sapiens
agatcataatgttca

SEQ ID NO: 1776438 - DNA, 15 bp, Homo sapiens
gatcataatgttcac

SEQ ID NO: 1776439 - DNA, 15 bp, Homo sapiens
atcataatgttcact

SEQ ID NO: 1776440 - DNA, 15 bp, Homo sapiens
tcataatgttcactg

SEQ ID NO: 1776441 - DNA, 15 bp, Homo sapiens
cataatgttcactgt

SEQ ID NO: 1776442 - DNA, 15 bp, Homo sapiens
ataatgttcactgta

SEQ ID NO: 1776443 - DNA, 15 bp, Homo sapiens
taatgttcactgtaa

SEQ ID NO: 1776444 - DNA, 15 bp, Homo sapiens
aatgttcactgtaaa

SEQ ID NO: 1776445 - DNA, 15 bp, Homo sapiens
atgttcactgtaaat

SEQ ID NO: 1776446 - DNA, 15 bp, Homo sapiens
tgttcactgtaaatt

SEQ ID NO: 1776447 - DNA, 15 bp, Homo sapiens
gttcactgtaaattt

SEQ ID NO: 1776448 - DNA, 15 bp, Homo sapiens
ttcactgtaaattta

SEQ ID NO: 1776449 - DNA, 15 bp, Homo sapiens
tcactgtaaatttaa

SEQ ID NO: 1776450 - DNA, 15 bp, Homo sapiens
cactgtaaatttaaa

SEQ ID NO: 1776451 - DNA, 15 bp, Homo sapiens
actgtaaatttaaag

SEQ ID NO: 1776452 - DNA, 15 bp, Homo sapiens
ctgtaaatttaaagg

SEQ ID NO: 1776453 - DNA, 15 bp, Homo sapiens
tgtaaatttaaaggg

SEQ ID NO: 1776454 - DNA, 15 bp, Homo sapiens
gtaaatttaaaggga

SEQ ID NO: 1776455 - DNA, 15 bp, Homo sapiens
taaatttaaagggat

SEQ ID NO: 1776456 - DNA, 15 bp, Homo sapiens
aaatttaaagggatt

SEQ ID NO: 1776457 - DNA, 15 bp, Homo sapiens
aatttaaagggattt

SEQ ID NO: 1776458 - DNA, 15 bp, Homo sapiens
atttaaagggatttc

SEQ ID NO: 1776459 - DNA, 15 bp, Homo sapiens
tttaaagggatttct

SEQ ID NO: 1776460 - DNA, 15 bp, Homo sapiens
ttaaagggatttctt

SEQ ID NO: 1776461 - DNA, 15 bp, Homo sapiens
taaagggatttcttt

SEQ ID NO: 1776462 - DNA, 15 bp, Homo sapiens
aaagggatttctttt

SEQ ID NO: 1776463 - DNA, 15 bp, Homo sapiens
aagggatttcttttt

SEQ ID NO: 1776464 - DNA, 15 bp, Homo sapiens
agggatttctttttc

SEQ ID NO: 1776465 - DNA, 15 bp, Homo sapiens
gggatttctttttcc

SEQ ID NO: 1776466 - DNA, 15 bp, Homo sapiens
ggatttctttttcca

SEQ ID NO: 1776467 - DNA, 15 bp, Homo sapiens
gatttctttttccat

SEQ ID NO: 1776468 - DNA, 15 bp, Homo sapiens
atttctttttccata

SEQ ID NO: 1776469 - DNA, 15 bp, Homo sapiens
tttctttttccatag

SEQ ID NO: 1776470 - DNA, 15 bp, Homo sapiens
ttctttttccatagc

SEQ ID NO: 1776471 - DNA, 15 bp, Homo sapiens
tctttttccatagca

SEQ ID NO: 1776472 - DNA, 15 bp, Homo sapiens
ctttttccatagcac

SEQ ID NO: 1776473 - DNA, 15 bp, Homo sapiens
tttttccatagcact

SEQ ID NO: 1776474 - DNA, 15 bp, Homo sapiens
ttttccatagcactc

SEQ ID NO: 1776475 - DNA, 15 bp, Homo sapiens
tttccatagcactca

SEQ ID NO: 1776476 - DNA, 15 bp, Homo sapiens
ttccatagcactcag

SEQ ID NO: 1776477 - DNA, 15 bp, Homo sapiens
tccatagcactcagc

SEQ ID NO: 1776478 - DNA, 15 bp, Homo sapiens
ccatagcactcagca

SEQ ID NO: 1776479 - DNA, 15 bp, Homo sapiens
catagcactcagcaa

SEQ ID NO: 1776480 - DNA, 15 bp, Homo sapiens
atagcactcagcaag

SEQ ID NO: 1776481 - DNA, 15 bp, Homo sapiens
tagcactcagcaaga

SEQ ID NO: 1776482 - DNA, 15 bp, Homo sapiens
agcactcagcaagaa

SEQ ID NO: 1776483 - DNA, 15 bp, Homo sapiens
gcactcagcaagaaa

SEQ ID NO: 1776484 - DNA, 15 bp, Homo sapiens
cactcagcaagaaac

SEQ ID NO: 1776485 - DNA, 15 bp, Homo sapiens
actcagcaagaaacg

SEQ ID NO: 1776486 - DNA, 15 bp, Homo sapiens
ctcagcaagaaacgt

SEQ ID NO: 1776487 - DNA, 15 bp, Homo sapiens
tcagcaagaaacgtg

SEQ ID NO: 1776488 - DNA, 15 bp, Homo sapiens
cagcaagaaacgtgt

SEQ ID NO: 1776489 - DNA, 15 bp, Homo sapiens
agcaagaaacgtgtg

SEQ ID NO: 1776490 - DNA, 15 bp, Homo sapiens
gcaagaaacgtgtgc

SEQ ID NO: 1776491 - DNA, 15 bp, Homo sapiens
caagaaacgtgtgct

SEQ ID NO: 1776492 - DNA, 15 bp, Homo sapiens
aagaaacgtgtgcta

SEQ ID NO: 1776493 - DNA, 15 bp, Homo sapiens
agaaacgtgtgctaa

SEQ ID NO: 1776494 - DNA, 15 bp, Homo sapiens
gaaacgtgtgctaaa

SEQ ID NO: 1776495 - DNA, 15 bp, Homo sapiens
aaacgtgtgctaaag

SEQ ID NO: 1776496 - DNA, 15 bp, Homo sapiens
aacgtgtgctaaaga

SEQ ID NO: 1776497 - DNA, 15 bp, Homo sapiens
acgtgtgctaaagac

SEQ ID NO: 1776498 - DNA, 15 bp, Homo sapiens
cgtgtgctaaagact

SEQ ID NO: 1776499 - DNA, 15 bp, Homo sapiens
gtgtgctaaagactg

SEQ ID NO: 1776500 - DNA, 15 bp, Homo sapiens
tgtgctaaagactga

SEQ ID NO: 1776501 - DNA, 15 bp, Homo sapiens
gtgctaaagactgag

SEQ ID NO: 1776502 - DNA, 15 bp, Homo sapiens
tgctaaagactgagg

SEQ ID NO: 1776503 - DNA, 15 bp, Homo sapiens
gctaaagactgaggt

SEQ ID NO: 1776504 - DNA, 15 bp, Homo sapiens
ctaaagactgaggtt

SEQ ID NO: 1776505 - DNA, 15 bp, Homo sapiens
taaagactgaggttc

SEQ ID NO: 1776506 - DNA, 15 bp, Homo sapiens
aaagactgaggttcc

SEQ ID NO: 1776507 - DNA, 15 bp, Homo sapiens
aagactgaggttcct

SEQ ID NO: 1776508 - DNA, 15 bp, Homo sapiens
agactgaggttcctt

SEQ ID NO: 1776509 - DNA, 15 bp, Homo sapiens
gactgaggttccttg

SEQ ID NO: 1776510 - DNA, 15 bp, Homo sapiens
actgaggttccttgg

SEQ ID NO: 1776511 - DNA, 15 bp, Homo sapiens
ctgaggttccttgga

SEQ ID NO: 1776512 - DNA, 15 bp, Homo sapiens
tgaggttccttggaa

SEQ ID NO: 1776513 - DNA, 15 bp, Homo sapiens
gaggttccttggaaa

SEQ ID NO: 1776514 - DNA, 15 bp, Homo sapiens
aggttccttggaaac

SEQ ID NO: 1776515 - DNA, 15 bp, Homo sapiens
ggttccttggaaaca

SEQ ID NO: 1776516 - DNA, 15 bp, Homo sapiens
gttccttggaaacat

SEQ ID NO: 1776517 - DNA, 15 bp, Homo sapiens
ttccttggaaacatg

SEQ ID NO: 1776518 - DNA, 15 bp, Homo sapiens
tccttggaaacatgc

SEQ ID NO: 1776519 - DNA, 15 bp, Homo sapiens
ccttggaaacatgct

SEQ ID NO: 1776520 - DNA, 15 bp, Homo sapiens
cttggaaacatgctg

SEQ ID NO: 1776521 - DNA, 15 bp, Homo sapiens
ttggaaacatgctga

SEQ ID NO: 1776522 - DNA, 15 bp, Homo sapiens
tggaaacatgctgaa

SEQ ID NO: 1776523 - DNA, 15 bp, Homo sapiens
ggaaacatgctgaaa

SEQ ID NO: 1776524 - DNA, 15 bp, Homo sapiens
gaaacatgctgaaaa

SEQ ID NO: 1776525 - DNA, 15 bp, Homo sapiens
aaacatgctgaaaat

SEQ ID NO: 1776526 - DNA, 15 bp, Homo sapiens
aacatgctgaaaatt

SEQ ID NO: 1776527 - DNA, 15 bp, Homo sapiens
acatgctgaaaattc

SEQ ID NO: 1776528 - DNA, 15 bp, Homo sapiens
catgctgaaaattct

SEQ ID NO: 1776529 - DNA, 15 bp, Homo sapiens
atgctgaaaattctg

SEQ ID NO: 1776530 - DNA, 15 bp, Homo sapiens
tgctgaaaattctgt

SEQ ID NO: 1776531 - DNA, 15 bp, Homo sapiens
gctgaaaattctgtt

SEQ ID NO: 1776532 - DNA, 15 bp, Homo sapiens
ctgaaaattctgttc

SEQ ID NO: 1776533 - DNA, 15 bp, Homo sapiens
tgaaaattctgttct

SEQ ID NO: 1776534 - DNA, 15 bp, Homo sapiens
gaaaattctgttctc

SEQ ID NO: 1776535 - DNA, 15 bp, Homo sapiens
aaaattctgttctca

SEQ ID NO: 1776536 - DNA, 15 bp, Homo sapiens
aaattctgttctcaa

SEQ ID NO: 1776537 - DNA, 15 bp, Homo sapiens
aattctgttctcaag

SEQ ID NO: 1776538 - DNA, 15 bp, Homo sapiens
attctgttctcaagg

SEQ ID NO: 1776539 - DNA, 15 bp, Homo sapiens
ttctgttctcaaggg

SEQ ID NO: 1776540 - DNA, 15 bp, Homo sapiens
tctgttctcaagggt

SEQ ID NO: 1776541 - DNA, 15 bp, Homo sapiens
ctgttctcaagggtg

SEQ ID NO: 1776542 - DNA, 15 bp, Homo sapiens
tgttctcaagggtgt

SEQ ID NO: 1776543 - DNA, 15 bp, Homo sapiens
gttctcaagggtgtc

SEQ ID NO: 1776544 - DNA, 15 bp, Homo sapiens
ttctcaagggtgtca

SEQ ID NO: 1776545 - DNA, 15 bp, Homo sapiens
tctcaagggtgtcag

SEQ ID NO: 1776546 - DNA, 15 bp, Homo sapiens
ctcaagggtgtcaga

SEQ ID NO: 1776547 - DNA, 15 bp, Homo sapiens
tcaagggtgtcagaa

SEQ ID NO: 1776548 - DNA, 15 bp, Homo sapiens
caagggtgtcagaac

SEQ ID NO: 1776549 - DNA, 15 bp, Homo sapiens
aagggtgtcagaacc

SEQ ID NO: 1776550 - DNA, 15 bp, Homo sapiens
agggtgtcagaacca

SEQ ID NO: 1776551 - DNA, 15 bp, Homo sapiens
gggtgtcagaaccat

SEQ ID NO: 1776552 - DNA, 15 bp, Homo sapiens
ggtgtcagaaccata

SEQ ID NO: 1776553 - DNA, 15 bp, Homo sapiens
gtgtcagaaccatac

SEQ ID NO: 1776554 - DNA, 15 bp, Homo sapiens
tgtcagaaccatacg

SEQ ID NO: 1776555 - DNA, 15 bp, Homo sapiens
gtcagaaccatacgt

SEQ ID NO: 1776556 - DNA, 15 bp, Homo sapiens
tcagaaccatacgta

SEQ ID NO: 1776557 - DNA, 15 bp, Homo sapiens
cagaaccatacgtac

SEQ ID NO: 1776558 - DNA, 15 bp, Homo sapiens
agaaccatacgtact

SEQ ID NO: 1776559 - DNA, 15 bp, Homo sapiens
gaaccatacgtactg

SEQ ID NO: 1776560 - DNA, 15 bp, Homo sapiens
aaccatacgtactgc

SEQ ID NO: 1776561 - DNA, 15 bp, Homo sapiens
accatacgtactgca

SEQ ID NO: 1776562 - DNA, 15 bp, Homo sapiens
ccatacgtactgcaa

SEQ ID NO: 1776563 - DNA, 15 bp, Homo sapiens
catacgtactgcaaa

SEQ ID NO: 1776564 - DNA, 15 bp, Homo sapiens
atacgtactgcaaat

SEQ ID NO: 1776565 - DNA, 15 bp, Homo sapiens
tacgtactgcaaata

SEQ ID NO: 1776566 - DNA, 15 bp, Homo sapiens
acgtactgcaaataa

SEQ ID NO: 1776567 - DNA, 15 bp, Homo sapiens
cgtactgcaaataat

SEQ ID NO: 1776568 - DNA, 15 bp, Homo sapiens
gtactgcaaataatt

SEQ ID NO: 1776569 - DNA, 15 bp, Homo sapiens
tactgcaaataattt

SEQ ID NO: 1776570 - DNA, 15 bp, Homo sapiens
actgcaaataattta

SEQ ID NO: 1776571 - DNA, 15 bp, Homo sapiens
ctgcaaataatttat

SEQ ID NO: 1776572 - DNA, 15 bp, Homo sapiens
tgcaaataatttatg

SEQ ID NO: 1776573 - DNA, 15 bp, Homo sapiens
gcaaataatttatga

SEQ ID NO: 1776574 - DNA, 15 bp, Homo sapiens
caaataatttatgaa

SEQ ID NO: 1776575 - DNA, 15 bp, Homo sapiens
aaataatttatgaag

SEQ ID NO: 1776576 - DNA, 15 bp, Homo sapiens
aataatttatgaagt

SEQ ID NO: 1776577 - DNA, 15 bp, Homo sapiens
ataatttatgaagtc

SEQ ID NO: 1776578 - DNA, 15 bp, Homo sapiens
taatttatgaagtcc

SEQ ID NO: 1776579 - DNA, 15 bp, Homo sapiens
aatttatgaagtcct

SEQ ID NO: 1776580 - DNA, 15 bp, Homo sapiens
atttatgaagtccta

SEQ ID NO: 1776581 - DNA, 15 bp, Homo sapiens
tttatgaagtcctag

SEQ ID NO: 1776582 - DNA, 15 bp, Homo sapiens
ttatgaagtcctagt

SEQ ID NO: 1776583 - DNA, 15 bp, Homo sapiens
tatgaagtcctagtt

SEQ ID NO: 1776584 - DNA, 15 bp, Homo sapiens
atgaagtcctagttc

SEQ ID NO: 1776585 - DNA, 15 bp, Homo sapiens
tgaagtcctagttca

SEQ ID NO: 1776586 - DNA, 15 bp, Homo sapiens
gaagtcctagttcat

SEQ ID NO: 1776587 - DNA, 15 bp, Homo sapiens
aagtcctagttcatt

SEQ ID NO: 1776588 - DNA, 15 bp, Homo sapiens
agtcctagttcattg

SEQ ID NO: 1776589 - DNA, 15 bp, Homo sapiens
gtcctagttcattgc

SEQ ID NO: 1776590 - DNA, 15 bp, Homo sapiens
tcctagttcattgca

SEQ ID NO: 1776591 - DNA, 15 bp, Homo sapiens
cctagttcattgcaa

SEQ ID NO: 1776592 - DNA, 15 bp, Homo sapiens
ctagttcattgcaat

SEQ ID NO: 1776593 - DNA, 15 bp, Homo sapiens
tagttcattgcaata

SEQ ID NO: 1776594 - DNA, 15 bp, Homo sapiens
agttcattgcaataa

SEQ ID NO: 1776595 - DNA, 15 bp, Homo sapiens
gttcattgcaataag

SEQ ID NO: 1776596 - DNA, 15 bp, Homo sapiens
ttcattgcaataagc

SEQ ID NO: 1776597 - DNA, 15 bp, Homo sapiens
tcattgcaataagca

SEQ ID NO: 1776598 - DNA, 15 bp, Homo sapiens
cattgcaataagcag

SEQ ID NO: 1776599 - DNA, 15 bp, Homo sapiens
attgcaataagcaga

SEQ ID NO: 1776600 - DNA, 15 bp, Homo sapiens
ttgcaataagcagat

SEQ ID NO: 1776601 - DNA, 15 bp, Homo sapiens
tgcaataagcagatg

SEQ ID NO: 1776602 - DNA, 15 bp, Homo sapiens
gcaataagcagatgg

SEQ ID NO: 1776603 - DNA, 15 bp, Homo sapiens
caataagcagatggc

SEQ ID NO: 1776604 - DNA, 15 bp, Homo sapiens
aataagcagatggct

SEQ ID NO: 1776605 - DNA, 15 bp, Homo sapiens
ataagcagatggctt

SEQ ID NO: 1776606 - DNA, 15 bp, Homo sapiens
taagcagatggcttg

SEQ ID NO: 1776607 - DNA, 15 bp, Homo sapiens
aagcagatggcttgc

SEQ ID NO: 1776608 - DNA, 15 bp, Homo sapiens
agcagatggcttgct

SEQ ID NO: 1776609 - DNA, 15 bp, Homo sapiens
gcagatggcttgcta

SEQ ID NO: 1776610 - DNA, 15 bp, Homo sapiens
cagatggcttgctat

SEQ ID NO: 1776611 - DNA, 15 bp, Homo sapiens
agatggcttgctatc

SEQ ID NO: 1776612 - DNA, 15 bp, Homo sapiens
gatggcttgctatct

SEQ ID NO: 1776613 - DNA, 15 bp, Homo sapiens
atggcttgctatctg

SEQ ID NO: 1776614 - DNA, 15 bp, Homo sapiens
tggcttgctatctgc

SEQ ID NO: 1776615 - DNA, 15 bp, Homo sapiens
ggcttgctatctgct

SEQ ID NO: 1776616 - DNA, 15 bp, Homo sapiens
gcttgctatctgctc

SEQ ID NO: 1776617 - DNA, 15 bp, Homo sapiens
cttgctatctgctca

SEQ ID NO: 1776618 - DNA, 15 bp, Homo sapiens
ttgctatctgctcag

SEQ ID NO: 1776619 - DNA, 15 bp, Homo sapiens
tgctatctgctcaga

SEQ ID NO: 1776620 - DNA, 15 bp, Homo sapiens
gctatctgctcagac

SEQ ID NO: 1776621 - DNA, 15 bp, Homo sapiens
ctatctgctcagaca

SEQ ID NO: 1776622 - DNA, 15 bp, Homo sapiens
tatctgctcagacag

SEQ ID NO: 1776623 - DNA, 15 bp, Homo sapiens
atctgctcagacagt

SEQ ID NO: 1776624 - DNA, 15 bp, Homo sapiens
tctgctcagacagta

SEQ ID NO: 1776625 - DNA, 15 bp, Homo sapiens
ctgctcagacagtac

SEQ ID NO: 1776626 - DNA, 15 bp, Homo sapiens
tgctcagacagtact

SEQ ID NO: 1776627 - DNA, 15 bp, Homo sapiens
gctcagacagtactc

SEQ ID NO: 1776628 - DNA, 15 bp, Homo sapiens
ctcagacagtactcc

SEQ ID NO: 1776629 - DNA, 15 bp, Homo sapiens
tcagacagtactccc

SEQ ID NO: 1776630 - DNA, 15 bp, Homo sapiens
cagacagtactccct

SEQ ID NO: 1776631 - DNA, 15 bp, Homo sapiens
agacagtactccctt

SEQ ID NO: 1776632 - DNA, 15 bp, Homo sapiens
gacagtactcccttg

SEQ ID NO: 1776633 - DNA, 15 bp, Homo sapiens
acagtactcccttgg

SEQ ID NO: 1776634 - DNA, 15 bp, Homo sapiens
cagtactcccttggg

SEQ ID NO: 1776635 - DNA, 15 bp, Homo sapiens
agtactcccttgggg

SEQ ID NO: 1776636 - DNA, 15 bp, Homo sapiens
gtactcccttggggt

SEQ ID NO: 1776637 - DNA, 15 bp, Homo sapiens
tactcccttggggta

SEQ ID NO: 1776638 - DNA, 15 bp, Homo sapiens
actcccttggggtag

SEQ ID NO: 1776639 - DNA, 15 bp, Homo sapiens
ctcccttggggtagt

SEQ ID NO: 1776640 - DNA, 15 bp, Homo sapiens
tcccttggggtagta

SEQ ID NO: 1776641 - DNA, 15 bp, Homo sapiens
cccttggggtagtaa

SEQ ID NO: 1776642 - DNA, 15 bp, Homo sapiens
ccttggggtagtaaa

SEQ ID NO: 1776643 - DNA, 15 bp, Homo sapiens
cttggggtagtaaat

SEQ ID NO: 1776644 - DNA, 15 bp, Homo sapiens
ttggggtagtaaatg

SEQ ID NO: 1776645 - DNA, 15 bp, Homo sapiens
tggggtagtaaatgt

SEQ ID NO: 1776646 - DNA, 15 bp, Homo sapiens
ggggtagtaaatgtg

SEQ ID NO: 1776647 - DNA, 15 bp, Homo sapiens
gggtagtaaatgtgc

SEQ ID NO: 1776648 - DNA, 15 bp, Homo sapiens
ggtagtaaatgtgct

SEQ ID NO: 1776649 - DNA, 15 bp, Homo sapiens
gtagtaaatgtgctt

SEQ ID NO: 1776650 - DNA, 15 bp, Homo sapiens
tagtaaatgtgctta

SEQ ID NO: 1776651 - DNA, 15 bp, Homo sapiens
agtaaatgtgcttat

SEQ ID NO: 1776652 - DNA, 15 bp, Homo sapiens
gtaaatgtgcttatc

SEQ ID NO: 1776653 - DNA, 15 bp, Homo sapiens
taaatgtgcttatct

SEQ ID NO: 1776654 - DNA, 15 bp, Homo sapiens
aaatgtgcttatctg

SEQ ID NO: 1776655 - DNA, 15 bp, Homo sapiens
aatgtgcttatctga

SEQ ID NO: 1776656 - DNA, 15 bp, Homo sapiens
atgtgcttatctgaa

SEQ ID NO: 1776657 - DNA, 15 bp, Homo sapiens
tgtgcttatctgaag

SEQ ID NO: 1776658 - DNA, 15 bp, Homo sapiens
gtgcttatctgaagc

SEQ ID NO: 1776659 - DNA, 15 bp, Homo sapiens
tgcttatctgaagct

SEQ ID NO: 1776660 - DNA, 15 bp, Homo sapiens
gcttatctgaagctg

SEQ ID NO: 1776661 - DNA, 15 bp, Homo sapiens
cttatctgaagctgg

SEQ ID NO: 1776662 - DNA, 15 bp, Homo sapiens
ttatctgaagctggg

SEQ ID NO: 1776663 - DNA, 15 bp, Homo sapiens
tatctgaagctggga

SEQ ID NO: 1776664 - DNA, 15 bp, Homo sapiens
atctgaagctgggag

SEQ ID NO: 1776665 - DNA, 15 bp, Homo sapiens
tctgaagctgggagt

SEQ ID NO: 1776666 - DNA, 15 bp, Homo sapiens
ctgaagctgggagtc

SEQ ID NO: 1776667 - DNA, 15 bp, Homo sapiens
tgaagctgggagtca

SEQ ID NO: 1776668 - DNA, 15 bp, Homo sapiens
gaagctgggagtcaa

SEQ ID NO: 1776669 - DNA, 15 bp, Homo sapiens
aagctgggagtcaat

SEQ ID NO: 1776670 - DNA, 15 bp, Homo sapiens
agctgggagtcaata

SEQ ID NO: 1776671 - DNA, 15 bp, Homo sapiens
gctgggagtcaatat

SEQ ID NO: 1776672 - DNA, 15 bp, Homo sapiens
ctgggagtcaatata

SEQ ID NO: 1776673 - DNA, 15 bp, Homo sapiens
tgggagtcaatatat

SEQ ID NO: 1776674 - DNA, 15 bp, Homo sapiens
gggagtcaatatatt

SEQ ID NO: 1776675 - DNA, 15 bp, Homo sapiens
ggagtcaatatattt

SEQ ID NO: 1776676 - DNA, 15 bp, Homo sapiens
gagtcaatatatttt

SEQ ID NO: 1776677 - DNA, 15 bp, Homo sapiens
agtcaatatattttg

SEQ ID NO: 1776678 - DNA, 15 bp, Homo sapiens
gtcaatatattttgt

SEQ ID NO: 1776679 - DNA, 15 bp, Homo sapiens
tcaatatattttgta

SEQ ID NO: 1776680 - DNA, 15 bp, Homo sapiens
caatatattttgtat

SEQ ID NO: 1776681 - DNA, 15 bp, Homo sapiens
aatatattttgtatg

SEQ ID NO: 1776682 - DNA, 15 bp, Homo sapiens
atatattttgtatgt

SEQ ID NO: 1776683 - DNA, 15 bp, Homo sapiens
tatattttgtatgtg

SEQ ID NO: 1776684 - DNA, 15 bp, Homo sapiens
atattttgtatgtgg

SEQ ID NO: 1776685 - DNA, 15 bp, Homo sapiens
tattttgtatgtgga

SEQ ID NO: 1776686 - DNA, 15 bp, Homo sapiens
attttgtatgtggac

SEQ ID NO: 1776687 - DNA, 15 bp, Homo sapiens
ttttgtatgtggaca

SEQ ID NO: 1776688 - DNA, 15 bp, Homo sapiens
tttgtatgtggacat

SEQ ID NO: 1776689 - DNA, 15 bp, Homo sapiens
ttgtatgtggacatg

SEQ ID NO: 1776690 - DNA, 15 bp, Homo sapiens
tgtatgtggacatgg

SEQ ID NO: 1776691 - DNA, 15 bp, Homo sapiens
gtatgtggacatgga

SEQ ID NO: 1776692 - DNA, 15 bp, Homo sapiens
tatgtggacatggaa

SEQ ID NO: 1776693 - DNA, 15 bp, Homo sapiens
atgtggacatggaag

SEQ ID NO: 1776694 - DNA, 15 bp, Homo sapiens
tgtggacatggaaga

SEQ ID NO: 1776695 - DNA, 15 bp, Homo sapiens
gtggacatggaagaa

SEQ ID NO: 1776696 - DNA, 15 bp, Homo sapiens
tggacatggaagaac

SEQ ID NO: 1776697 - DNA, 15 bp, Homo sapiens
ggacatggaagaaca

SEQ ID NO: 1776698 - DNA, 15 bp, Homo sapiens
gacatggaagaacat

SEQ ID NO: 1776699 - DNA, 15 bp, Homo sapiens
acatggaagaacata

SEQ ID NO: 1776700 - DNA, 15 bp, Homo sapiens
catggaagaacatag

SEQ ID NO: 1776701 - DNA, 15 bp, Homo sapiens
atggaagaacataga

SEQ ID NO: 1776702 - DNA, 15 bp, Homo sapiens
tggaagaacatagaa

SEQ ID NO: 1776703 - DNA, 15 bp, Homo sapiens
ggaagaacatagaat

SEQ ID NO: 1776704 - DNA, 15 bp, Homo sapiens
gaagaacatagaata

SEQ ID NO: 1776705 - DNA, 15 bp, Homo sapiens
aagaacatagaataa

SEQ ID NO: 1776706 - DNA, 15 bp, Homo sapiens
agaacatagaataaa

SEQ ID NO: 1776707 - DNA, 15 bp, Homo sapiens
gaacatagaataaat

SEQ ID NO: 1776708 - DNA, 15 bp, Homo sapiens
aacatagaataaatc

SEQ ID NO: 1776709 - DNA, 15 bp, Homo sapiens
acatagaataaatca

SEQ ID NO: 1776710 - DNA, 15 bp, Homo sapiens
catagaataaatcat

SEQ ID NO: 1776711 - DNA, 15 bp, Homo sapiens
tagaataaatcattt

SEQ ID NO: 1776712 - DNA, 15 bp, Homo sapiens
agaataaatcatttt

SEQ ID NO: 1776713 - DNA, 15 bp, Homo sapiens
gaataaatcattttt

SEQ ID NO: 1776714 - DNA, 15 bp, Homo sapiens
aataaatcattttta

SEQ ID NO: 1776715 - DNA, 15 bp, Homo sapiens
ataaatcatttttaa

SEQ ID NO: 1776716 - DNA, 15 bp, Homo sapiens
taaatcatttttaat

SEQ ID NO: 1776717 - DNA, 15 bp, Homo sapiens
aaatcatttttaatc

SEQ ID NO: 1776718 - DNA, 15 bp, Homo sapiens
aatcatttttaatca

SEQ ID NO: 1776719 - DNA, 15 bp, Homo sapiens
atcatttttaatcat

SEQ ID NO: 1776720 - DNA, 15 bp, Homo sapiens
tcatttttaatcata

SEQ ID NO: 1776721 - DNA, 15 bp, Homo sapiens
catttttaatcatag

SEQ ID NO: 1776722 - DNA, 15 bp, Homo sapiens
atttttaatcatagc

SEQ ID NO: 1776723 - DNA, 15 bp, Homo sapiens
tttttaatcatagca

SEQ ID NO: 1776724 - DNA, 15 bp, Homo sapiens
ttttaatcatagcaa

SEQ ID NO: 1776725 - DNA, 15 bp, Homo sapiens
tttaatcatagcaat

SEQ ID NO: 1776726 - DNA, 15 bp, Homo sapiens
ttaatcatagcaatt

SEQ ID NO: 1776727 - DNA, 15 bp, Homo sapiens
taatcatagcaatta

SEQ ID NO: 1776728 - DNA, 15 bp, Homo sapiens
aatcatagcaattat

SEQ ID NO: 1776729 - DNA, 15 bp, Homo sapiens
atcatagcaattata

SEQ ID NO: 1776730 - DNA, 15 bp, Homo sapiens
tcatagcaattatac

SEQ ID NO: 1776731 - DNA, 15 bp, Homo sapiens
catagcaattatact

SEQ ID NO: 1776732 - DNA, 15 bp, Homo sapiens
atagcaattatactt

SEQ ID NO: 1776733 - DNA, 15 bp, Homo sapiens
tagcaattatactta

SEQ ID NO: 1776734 - DNA, 15 bp, Homo sapiens
agcaattatacttac

SEQ ID NO: 1776735 - DNA, 15 bp, Homo sapiens
gcaattatacttact

SEQ ID NO: 1776736 - DNA, 15 bp, Homo sapiens
caattatacttactc

SEQ ID NO: 1776737 - DNA, 15 bp, Homo sapiens
aattatacttactca

SEQ ID NO: 1776738 - DNA, 15 bp, Homo sapiens
attatacttactcaa

SEQ ID NO: 1776739 - DNA, 15 bp, Homo sapiens
ttatacttactcaaa

SEQ ID NO: 1776740 - DNA, 15 bp, Homo sapiens
tatacttactcaaaa

SEQ ID NO: 1776741 - DNA, 15 bp, Homo sapiens
atacttactcaaaat

SEQ ID NO: 1776742 - DNA, 15 bp, Homo sapiens
tacttactcaaaatg

SEQ ID NO: 1776743 - DNA, 15 bp, Homo sapiens
acttactcaaaatga

SEQ ID NO: 1776744 - DNA, 15 bp, Homo sapiens
cttactcaaaatgaa

SEQ ID NO: 1776745 - DNA, 15 bp, Homo sapiens
ttactcaaaatgaac

SEQ ID NO: 1776746 - DNA, 15 bp, Homo sapiens
tactcaaaatgaact

SEQ ID NO: 1776747 - DNA, 15 bp, Homo sapiens
actcaaaatgaactt

SEQ ID NO: 1776748 - DNA, 15 bp, Homo sapiens
ctcaaaatgaacttg

SEQ ID NO: 1776749 - DNA, 15 bp, Homo sapiens
tcaaaatgaacttgg

SEQ ID NO: 1776750 - DNA, 15 bp, Homo sapiens
caaaatgaacttggc

SEQ ID NO: 1776751 - DNA, 15 bp, Homo sapiens
aaaatgaacttggct

SEQ ID NO: 1776752 - DNA, 15 bp, Homo sapiens
aaatgaacttggcta

SEQ ID NO: 1776753 - DNA, 15 bp, Homo sapiens
aatgaacttggctag

SEQ ID NO: 1776754 - DNA, 15 bp, Homo sapiens
atgaacttggctagc

SEQ ID NO: 1776755 - DNA, 15 bp, Homo sapiens
tgaacttggctagca

SEQ ID NO: 1776756 - DNA, 15 bp, Homo sapiens
gaacttggctagcag

SEQ ID NO: 1776757 - DNA, 15 bp, Homo sapiens
aacttggctagcagg

SEQ ID NO: 1776758 - DNA, 15 bp, Homo sapiens
acttggctagcaggt

SEQ ID NO: 1776759 - DNA, 15 bp, Homo sapiens
cttggctagcaggta

SEQ ID NO: 1776760 - DNA, 15 bp, Homo sapiens
ttggctagcaggtac

SEQ ID NO: 1776761 - DNA, 15 bp, Homo sapiens
tggctagcaggtaca

SEQ ID NO: 1776762 - DNA, 15 bp, Homo sapiens
ggctagcaggtacac

SEQ ID NO: 1776763 - DNA, 15 bp, Homo sapiens
gctagcaggtacaca

SEQ ID NO: 1776764 - DNA, 15 bp, Homo sapiens
ctagcaggtacacac

SEQ ID NO: 1776765 - DNA, 15 bp, Homo sapiens
tagcaggtacacaca

SEQ ID NO: 1776766 - DNA, 15 bp, Homo sapiens
agcaggtacacacat

SEQ ID NO: 1776767 - DNA, 15 bp, Homo sapiens
gcaggtacacacatc

SEQ ID NO: 1776768 - DNA, 15 bp, Homo sapiens
caggtacacacatct

SEQ ID NO: 1776769 - DNA, 15 bp, Homo sapiens
aggtacacacatcta

SEQ ID NO: 1776770 - DNA, 15 bp, Homo sapiens
ggtacacacatctac

SEQ ID NO: 1776771 - DNA, 15 bp, Homo sapiens
gtacacacatctaca

SEQ ID NO: 1776772 - DNA, 15 bp, Homo sapiens
tacacacatctacag

SEQ ID NO: 1776773 - DNA, 15 bp, Homo sapiens
acacacatctacaga

SEQ ID NO: 1776774 - DNA, 15 bp, Homo sapiens
cacacatctacagat

SEQ ID NO: 1776775 - DNA, 15 bp, Homo sapiens
acacatctacagatt

SEQ ID NO: 1776776 - DNA, 15 bp, Homo sapiens
cacatctacagattg

SEQ ID NO: 1776777 - DNA, 15 bp, Homo sapiens
acatctacagattgg

SEQ ID NO: 1776778 - DNA, 15 bp, Homo sapiens
catctacagattgga

SEQ ID NO: 1776779 - DNA, 15 bp, Homo sapiens
atctacagattggaa

SEQ ID NO: 1776780 - DNA, 15 bp, Homo sapiens
tctacagattggaat

SEQ ID NO: 1776781 - DNA, 15 bp, Homo sapiens
ctacagattggaatg

SEQ ID NO: 1776782 - DNA, 15 bp, Homo sapiens
tacagattggaatgg

SEQ ID NO: 1776783 - DNA, 15 bp, Homo sapiens
acagattggaatggc

SEQ ID NO: 1776784 - DNA, 15 bp, Homo sapiens
cagattggaatggct

SEQ ID NO: 1776785 - DNA, 15 bp, Homo sapiens
agattggaatggctt

SEQ ID NO: 1776786 - DNA, 15 bp, Homo sapiens
gattggaatggcttc

SEQ ID NO: 1776787 - DNA, 15 bp, Homo sapiens
attggaatggcttct

SEQ ID NO: 1776788 - DNA, 15 bp, Homo sapiens
ttggaatggcttctt

SEQ ID NO: 1776789 - DNA, 15 bp, Homo sapiens
tggaatggcttctta

SEQ ID NO: 1776790 - DNA, 15 bp, Homo sapiens
ggaatggcttcttaa

SEQ ID NO: 1776791 - DNA, 15 bp, Homo sapiens
gaatggcttcttaaa

SEQ ID NO: 1776792 - DNA, 15 bp, Homo sapiens
aatggcttcttaaag

SEQ ID NO: 1776793 - DNA, 15 bp, Homo sapiens
gcttcttaaaggcta

SEQ ID NO: 1776794 - DNA, 15 bp, Homo sapiens
cttcttaaaggctat

SEQ ID NO: 1776795 - DNA, 15 bp, Homo sapiens
ttcttaaaggctatc

SEQ ID NO: 1776796 - DNA, 15 bp, Homo sapiens
tcttaaaggctatcc

SEQ ID NO: 1776797 - DNA, 15 bp, Homo sapiens
cttaaaggctatccc

SEQ ID NO: 1776798 - DNA, 15 bp, Homo sapiens
ttaaaggctatccca

SEQ ID NO: 1776799 - DNA, 15 bp, Homo sapiens
taaaggctatcccac

SEQ ID NO: 1776800 - DNA, 15 bp, Homo sapiens
aaaggctatcccacc

SEQ ID NO: 1776801 - DNA, 15 bp, Homo sapiens
aaggctatcccacct

SEQ ID NO: 1776802 - DNA, 15 bp, Homo sapiens
aggctatcccacctt

SEQ ID NO: 1776803 - DNA, 15 bp, Homo sapiens
ggctatcccaccttg

SEQ ID NO: 1776804 - DNA, 15 bp, Homo sapiens
gctatcccaccttgg

SEQ ID NO: 1776805 - DNA, 15 bp, Homo sapiens
ctatcccaccttgga

SEQ ID NO: 1776806 - DNA, 15 bp, Homo sapiens
tatcccaccttggaa

SEQ ID NO: 1776807 - DNA, 15 bp, Homo sapiens
atcccaccttggaaa

SEQ ID NO: 1776808 - DNA, 15 bp, Homo sapiens
tcccaccttggaaat

SEQ ID NO: 1776809 - DNA, 15 bp, Homo sapiens
cccaccttggaaata

SEQ ID NO: 1776810 - DNA, 15 bp, Homo sapiens
ccaccttggaaataa

SEQ ID NO: 1776811 - DNA, 15 bp, Homo sapiens
caccttggaaataat

SEQ ID NO: 1776812 - DNA, 15 bp, Homo sapiens
accttggaaataatc

SEQ ID NO: 1776813 - DNA, 15 bp, Homo sapiens
ccttggaaataatcc

SEQ ID NO: 1776814 - DNA, 15 bp, Homo sapiens
cttggaaataatcct

SEQ ID NO: 1776815 - DNA, 15 bp, Homo sapiens
ttggaaataatcctg

SEQ ID NO: 1776816 - DNA, 15 bp, Homo sapiens
tggaaataatcctgg

SEQ ID NO: 1776817 - DNA, 15 bp, Homo sapiens
ggaaataatcctggt

SEQ ID NO: 1776818 - DNA, 15 bp, Homo sapiens
gaaataatcctggtt

SEQ ID NO: 1776819 - DNA, 15 bp, Homo sapiens
aaataatcctggtta

SEQ ID NO: 1776820 - DNA, 15 bp, Homo sapiens
aataatcctggttat

SEQ ID NO: 1776821 - DNA, 15 bp, Homo sapiens
ataatcctggttatc

SEQ ID NO: 1776822 - DNA, 15 bp, Homo sapiens
taatcctggttatcc

SEQ ID NO: 1776823 - DNA, 15 bp, Homo sapiens
aatcctggttatccg

SEQ ID NO: 1776824 - DNA, 15 bp, Homo sapiens
atcctggttatccgc

SEQ ID NO: 1776825 - DNA, 15 bp, Homo sapiens
tcctggttatccgca

SEQ ID NO: 1776826 - DNA, 15 bp, Homo sapiens
cctggttatccgcaa

SEQ ID NO: 1776827 - DNA, 15 bp, Homo sapiens
ctggttatccgcaac

SEQ ID NO: 1776828 - DNA, 15 bp, Homo sapiens
tggttatccgcaaca

SEQ ID NO: 1776829 - DNA, 15 bp, Homo sapiens
ggttatccgcaacac

SEQ ID NO: 1776830 - DNA, 15 bp, Homo sapiens
gttatccgcaacaca

SEQ ID NO: 1776831 - DNA, 15 bp, Homo sapiens
ttatccgcaacacat

SEQ ID NO: 1776832 - DNA, 15 bp, Homo sapiens
tatccgcaacacatg

SEQ ID NO: 1776833 - DNA, 15 bp, Homo sapiens
atccgcaacacatga

SEQ ID NO: 1776834 - DNA, 15 bp, Homo sapiens
tccgcaacacatgat

SEQ ID NO: 1776835 - DNA, 15 bp, Homo sapiens
ccgcaacacatgatg

SEQ ID NO: 1776836 - DNA, 15 bp, Homo sapiens
cgcaacacatgatgt

SEQ ID NO: 1776837 - DNA, 15 bp, Homo sapiens
gcaacacatgatgtt

SEQ ID NO: 1776838 - DNA, 15 bp, Homo sapiens
caacacatgatgttt

SEQ ID NO: 1776839 - DNA, 15 bp, Homo sapiens
aacacatgatgtttt

SEQ ID NO: 1776840 - DNA, 15 bp, Homo sapiens
acacatgatgttttg

SEQ ID NO: 1776841 - DNA, 15 bp, Homo sapiens
cacatgatgttttgt

SEQ ID NO: 1776842 - DNA, 15 bp, Homo sapiens
acatgatgttttgtc

SEQ ID NO: 1776843 - DNA, 15 bp, Homo sapiens
catgatgttttgtcc

SEQ ID NO: 1776844 - DNA, 15 bp, Homo sapiens
atgatgttttgtcct

SEQ ID NO: 1776845 - DNA, 15 bp, Homo sapiens
tgatgttttgtcctg

SEQ ID NO: 1776846 - DNA, 15 bp, Homo sapiens
gatgttttgtcctgc

SEQ ID NO: 1776847 - DNA, 15 bp, Homo sapiens
atgttttgtcctgct

SEQ ID NO: 1776848 - DNA, 15 bp, Homo sapiens
tgttttgtcctgctt

SEQ ID NO: 1776849 - DNA, 15 bp, Homo sapiens
gttttgtcctgcttc

SEQ ID NO: 1776850 - DNA, 15 bp, Homo sapiens
ttttgtcctgcttct

SEQ ID NO: 1776851 - DNA, 15 bp, Homo sapiens
tttgtcctgcttctt

SEQ ID NO: 1776852 - DNA, 15 bp, Homo sapiens
ttgtcctgcttcttg

SEQ ID NO: 1776853 - DNA, 15 bp, Homo sapiens
tgtcctgcttcttga

SEQ ID NO: 1776854 - DNA, 15 bp, Homo sapiens
gtcctgcttcttgat

SEQ ID NO: 1776855 - DNA, 15 bp, Homo sapiens
tcctgcttcttgata

SEQ ID NO: 1776856 - DNA, 15 bp, Homo sapiens
cctgcttcttgatag

SEQ ID NO: 1776857 - DNA, 15 bp, Homo sapiens
ctgcttcttgatagg

SEQ ID NO: 1776858 - DNA, 15 bp, Homo sapiens
tgcttcttgatagga

SEQ ID NO: 1776859 - DNA, 15 bp, Homo sapiens
gcttcttgataggat

SEQ ID NO: 1776860 - DNA, 15 bp, Homo sapiens
cttcttgataggata

SEQ ID NO: 1776861 - DNA, 15 bp, Homo sapiens
ttcttgataggatat

SEQ ID NO: 1776862 - DNA, 15 bp, Homo sapiens
tcttgataggatatc

SEQ ID NO: 1776863 - DNA, 15 bp, Homo sapiens
cttgataggatatct

SEQ ID NO: 1776864 - DNA, 15 bp, Homo sapiens
ttgataggatatctc

SEQ ID NO: 1776865 - DNA, 15 bp, Homo sapiens
tgataggatatctcc

SEQ ID NO: 1776866 - DNA, 15 bp, Homo sapiens
gataggatatctcct

SEQ ID NO: 1776867 - DNA, 15 bp, Homo sapiens
ataggatatctcctt

SEQ ID NO: 1776868 - DNA, 15 bp, Homo sapiens
taggatatctcctta

SEQ ID NO: 1776869 - DNA, 15 bp, Homo sapiens
aggatatctccttag

SEQ ID NO: 1776870 - DNA, 15 bp, Homo sapiens
ggatatctccttaga

SEQ ID NO: 1776871 - DNA, 15 bp, Homo sapiens
gatatctccttagat

SEQ ID NO: 1776872 - DNA, 15 bp, Homo sapiens
atatctccttagatg

SEQ ID NO: 1776873 - DNA, 15 bp, Homo sapiens
tatctccttagatgt

SEQ ID NO: 1776874 - DNA, 15 bp, Homo sapiens
atctccttagatgtg

SEQ ID NO: 1776875 - DNA, 15 bp, Homo sapiens
tctccttagatgtgc

SEQ ID NO: 1776876 - DNA, 15 bp, Homo sapiens
ctccttagatgtgcc

SEQ ID NO: 1776877 - DNA, 15 bp, Homo sapiens
tccttagatgtgcct

SEQ ID NO: 1776878 - DNA, 15 bp, Homo sapiens
ccttagatgtgcctg

SEQ ID NO: 1776879 - DNA, 15 bp, Homo sapiens
cttagatgtgcctgt

SEQ ID NO: 1776880 - DNA, 15 bp, Homo sapiens
ttagatgtgcctgtt

SEQ ID NO: 1776881 - DNA, 15 bp, Homo sapiens
tagatgtgcctgttc

SEQ ID NO: 1776882 - DNA, 15 bp, Homo sapiens
agatgtgcctgttct

SEQ ID NO: 1776883 - DNA, 15 bp, Homo sapiens
gatgtgcctgttctt

SEQ ID NO: 1776884 - DNA, 15 bp, Homo sapiens
atgtgcctgttcttc

SEQ ID NO: 1776885 - DNA, 15 bp, Homo sapiens
tgtgcctgttcttca

SEQ ID NO: 1776886 - DNA, 15 bp, Homo sapiens
gtgcctgttcttcaa

SEQ ID NO: 1776887 - DNA, 15 bp, Homo sapiens
tgcctgttcttcaaa

SEQ ID NO: 1776888 - DNA, 15 bp, Homo sapiens
gcctgttcttcaaaa

SEQ ID NO: 1776889 - DNA, 15 bp, Homo sapiens
cctgttcttcaaaaa

SEQ ID NO: 1776890 - DNA, 15 bp, Homo sapiens
ctgttcttcaaaaag

SEQ ID NO: 1776891 - DNA, 15 bp, Homo sapiens
tgttcttcaaaaagt

SEQ ID NO: 1776892 - DNA, 15 bp, Homo sapiens
gttcttcaaaaagtg

SEQ ID NO: 1776893 - DNA, 15 bp, Homo sapiens
ttcttcaaaaagtgg

SEQ ID NO: 1776894 - DNA, 15 bp, Homo sapiens
tcttcaaaaagtggt

SEQ ID NO: 1776895 - DNA, 15 bp, Homo sapiens
cttcaaaaagtggta

SEQ ID NO: 1776896 - DNA, 15 bp, Homo sapiens
ttcaaaaagtggtat

SEQ ID NO: 1776897 - DNA, 15 bp, Homo sapiens
tcaaaaagtggtatt

SEQ ID NO: 1776898 - DNA, 15 bp, Homo sapiens
caaaaagtggtattt

SEQ ID NO: 1776899 - DNA, 15 bp, Homo sapiens
aaaaagtggtattta

SEQ ID NO: 1776900 - DNA, 15 bp, Homo sapiens
aaaagtggtatttaa

SEQ ID NO: 1776901 - DNA, 15 bp, Homo sapiens
aaagtggtatttaaa

SEQ ID NO: 1776902 - DNA, 15 bp, Homo sapiens
aagtggtatttaaaa

SEQ ID NO: 1776903 - DNA, 15 bp, Homo sapiens
agtggtatttaaaat

SEQ ID NO: 1776904 - DNA, 15 bp, Homo sapiens
gtggtatttaaaata

SEQ ID NO: 1776905 - DNA, 15 bp, Homo sapiens
tggtatttaaaataa

SEQ ID NO: 1776906 - DNA, 15 bp, Homo sapiens
ggtatttaaaataaa

SEQ ID NO: 1776907 - DNA, 15 bp, Homo sapiens
gtatttaaaataaat

SEQ ID NO: 1776908 - DNA, 15 bp, Homo sapiens
tatttaaaataaatg

SEQ ID NO: 1776909 - DNA, 15 bp, Homo sapiens
atttaaaataaatgt

SEQ ID NO: 1776910 - DNA, 15 bp, Homo sapiens
tttaaaataaatgtg

SEQ ID NO: 1776911 - DNA, 15 bp, Homo sapiens
ttaaaataaatgtgt

SEQ ID NO: 1776912 - DNA, 15 bp, Homo sapiens
taaaataaatgtgtc

SEQ ID NO: 1776913 - DNA, 15 bp, Homo sapiens
aaaataaatgtgtca

SEQ ID NO: 1776914 - DNA, 15 bp, Homo sapiens
aaataaatgtgtcag

SEQ ID NO: 1776915 - DNA, 15 bp, Homo sapiens
aataaatgtgtcagt

SEQ ID NO: 1776916 - DNA, 15 bp, Homo sapiens
ataaatgtgtcagtc

SEQ ID NO: 1776917 - DNA, 15 bp, Homo sapiens
taaatgtgtcagtct

SEQ ID NO: 1776918 - DNA, 15 bp, Homo sapiens
aaatgtgtcagtctc

SEQ ID NO: 1776919 - DNA, 15 bp, Homo sapiens
aatgtgtcagtctca

SEQ ID NO: 1776920 - DNA, 15 bp, Homo sapiens
atgtgtcagtctcac

SEQ ID NO: 1776921 - DNA, 15 bp, Homo sapiens
tgtgtcagtctcaca

SEQ ID NO: 1776922 - DNA, 15 bp, Homo sapiens
gtgtcagtctcacag

SEQ ID NO: 1776923 - DNA, 15 bp, Homo sapiens
tgtcagtctcacagc

SEQ ID NO: 1776924 - DNA, 15 bp, Homo sapiens
gtcagtctcacagca

SEQ ID NO: 1776925 - DNA, 15 bp, Homo sapiens
tcagtctcacagcag

SEQ ID NO: 1776926 - DNA, 15 bp, Homo sapiens
cagtctcacagcagg

SEQ ID NO: 1776927 - DNA, 15 bp, Homo sapiens
agtctcacagcaggg

SEQ ID NO: 1776928 - DNA, 15 bp, Homo sapiens
gtctcacagcagggt

SEQ ID NO: 1776929 - DNA, 15 bp, Homo sapiens
tctcacagcagggtg

SEQ ID NO: 1776930 - DNA, 15 bp, Homo sapiens
ctcacagcagggtga

SEQ ID NO: 1776931 - DNA, 15 bp, Homo sapiens
tcacagcagggtgaa

SEQ ID NO: 1776932 - DNA, 15 bp, Homo sapiens
cacagcagggtgaaa

SEQ ID NO: 1776933 - DNA, 15 bp, Homo sapiens
acagcagggtgaaat

SEQ ID NO: 1776934 - DNA, 15 bp, Homo sapiens
cagcagggtgaaatt

SEQ ID NO: 1776935 - DNA, 15 bp, Homo sapiens
agcagggtgaaattg

SEQ ID NO: 1776936 - DNA, 15 bp, Homo sapiens
gcagggtgaaattgg

SEQ ID NO: 1776937 - DNA, 15 bp, Homo sapiens
cagggtgaaattggt

SEQ ID NO: 1776938 - DNA, 15 bp, Homo sapiens
agggtgaaattggtg

SEQ ID NO: 1776939 - DNA, 15 bp, Homo sapiens
gggtgaaattggtgc

SEQ ID NO: 1776940 - DNA, 15 bp, Homo sapiens
ggtgaaattggtgct

SEQ ID NO: 1776941 - DNA, 15 bp, Homo sapiens
gtgaaattggtgctg

SEQ ID NO: 1776942 - DNA, 15 bp, Homo sapiens
tgaaattggtgctga

SEQ ID NO: 1776943 - DNA, 15 bp, Homo sapiens
gaaattggtgctgat

SEQ ID NO: 1776944 - DNA, 15 bp, Homo sapiens
aaattggtgctgatt

SEQ ID NO: 1776945 - DNA, 15 bp, Homo sapiens
aattggtgctgatta

SEQ ID NO: 1776946 - DNA, 15 bp, Homo sapiens
attggtgctgattaa

SEQ ID NO: 1776947 - DNA, 15 bp, Homo sapiens
ttggtgctgattaaa

SEQ ID NO: 1776948 - DNA, 15 bp, Homo sapiens
tggtgctgattaaaa

SEQ ID NO: 1776949 - DNA, 15 bp, Homo sapiens
ggtgctgattaaaaa

SEQ ID NO: 1776950 - DNA, 15 bp, Homo sapiens
gtgctgattaaaaat

SEQ ID NO: 1776951 - DNA, 15 bp, Homo sapiens
tgctgattaaaaatg

SEQ ID NO: 1776952 - DNA, 15 bp, Homo sapiens
gctgattaaaaatgc

SEQ ID NO: 1776953 - DNA, 15 bp, Homo sapiens
ctgattaaaaatgcc

SEQ ID NO: 1776954 - DNA, 15 bp, Homo sapiens
tgattaaaaatgccc

SEQ ID NO: 1776955 - DNA, 15 bp, Homo sapiens
gattaaaaatgcccc

SEQ ID NO: 1776956 - DNA, 15 bp, Homo sapiens
attaaaaatgcccca

SEQ ID NO: 1776957 - DNA, 15 bp, Homo sapiens
ttaaaaatgccccat

SEQ ID NO: 1776958 - DNA, 15 bp, Homo sapiens
taaaaatgccccatt

SEQ ID NO: 1776959 - DNA, 15 bp, Homo sapiens
aaaaatgccccattc

SEQ ID NO: 1776960 - DNA, 15 bp, Homo sapiens
aaaatgccccattcc

SEQ ID NO: 1776961 - DNA, 15 bp, Homo sapiens
aaatgccccattcca

SEQ ID NO: 1776962 - DNA, 15 bp, Homo sapiens
aatgccccattccag

SEQ ID NO: 1776963 - DNA, 15 bp, Homo sapiens
atgccccattccaga

SEQ ID NO: 1776964 - DNA, 15 bp, Homo sapiens
tgccccattccagac

SEQ ID NO: 1776965 - DNA, 15 bp, Homo sapiens
gccccattccagacc

SEQ ID NO: 1776966 - DNA, 15 bp, Homo sapiens
ccccattccagacca

SEQ ID NO: 1776967 - DNA, 15 bp, Homo sapiens
cccattccagaccac

SEQ ID NO: 1776968 - DNA, 15 bp, Homo sapiens
ccattccagaccact

SEQ ID NO: 1776969 - DNA, 15 bp, Homo sapiens
cattccagaccactg

SEQ ID NO: 1776970 - DNA, 15 bp, Homo sapiens
attccagaccactga

SEQ ID NO: 1776971 - DNA, 15 bp, Homo sapiens
ttccagaccactgat

SEQ ID NO: 1776972 - DNA, 15 bp, Homo sapiens
tccagaccactgatg

SEQ ID NO: 1776973 - DNA, 15 bp, Homo sapiens
ccagaccactgatgg

SEQ ID NO: 1776974 - DNA, 15 bp, Homo sapiens
cagaccactgatggc

SEQ ID NO: 1776975 - DNA, 15 bp, Homo sapiens
agaccactgatggcg

SEQ ID NO: 1776976 - DNA, 15 bp, Homo sapiens
gaccactgatggcga

SEQ ID NO: 1776977 - DNA, 15 bp, Homo sapiens
accactgatggcgac

SEQ ID NO: 1776978 - DNA, 15 bp, Homo sapiens
ccactgatggcgaca

SEQ ID NO: 1776979 - DNA, 15 bp, Homo sapiens
cactgatggcgacac

SEQ ID NO: 1776980 - DNA, 15 bp, Homo sapiens
actgatggcgacact

SEQ ID NO: 1776981 - DNA, 15 bp, Homo sapiens
ctgatggcgacactc

SEQ ID NO: 1776982 - DNA, 15 bp, Homo sapiens
tgatggcgacactct

SEQ ID NO: 1776983 - DNA, 15 bp, Homo sapiens
gatggcgacactcta

SEQ ID NO: 1776984 - DNA, 15 bp, Homo sapiens
atggcgacactctag

SEQ ID NO: 1776985 - DNA, 15 bp, Homo sapiens
tggcgacactctagg

SEQ ID NO: 1776986 - DNA, 15 bp, Homo sapiens
ggcgacactctaggt

SEQ ID NO: 1776987 - DNA, 15 bp, Homo sapiens
gcgacactctaggtg

SEQ ID NO: 1776988 - DNA, 15 bp, Homo sapiens
cgacactctaggtgt

SEQ ID NO: 1776989 - DNA, 15 bp, Homo sapiens
gacactctaggtgtg

SEQ ID NO: 1776990 - DNA, 15 bp, Homo sapiens
acactctaggtgtgg

SEQ ID NO: 1776991 - DNA, 15 bp, Homo sapiens
cactctaggtgtggg

SEQ ID NO: 1776992 - DNA, 15 bp, Homo sapiens
actctaggtgtgggg

SEQ ID NO: 1776993 - DNA, 15 bp, Homo sapiens
ctctaggtgtgggga

SEQ ID NO: 1776994 - DNA, 15 bp, Homo sapiens
tctaggtgtggggac

SEQ ID NO: 1776995 - DNA, 15 bp, Homo sapiens
ctaggtgtggggacc

SEQ ID NO: 1776996 - DNA, 15 bp, Homo sapiens
taggtgtggggacct

SEQ ID NO: 1776997 - DNA, 15 bp, Homo sapiens
aggtgtggggacctg

SEQ ID NO: 1776998 - DNA, 15 bp, Homo sapiens
ggtgtggggacctgg

SEQ ID NO: 1776999 - DNA, 15 bp, Homo sapiens
gtgtggggacctggg

SEQ ID NO: 1777000 - DNA, 15 bp, Homo sapiens
tgtggggacctggga

SEQ ID NO: 1777001 - DNA, 15 bp, Homo sapiens
gtggggacctgggaa

SEQ ID NO: 1777002 - DNA, 15 bp, Homo sapiens
tggggacctgggaat

SEQ ID NO: 1777003 - DNA, 15 bp, Homo sapiens
ggggacctgggaatg

SEQ ID NO: 1777004 - DNA, 15 bp, Homo sapiens
gggacctgggaatgt

SEQ ID NO: 1777005 - DNA, 15 bp, Homo sapiens
ggacctgggaatgtg

SEQ ID NO: 1777006 - DNA, 15 bp, Homo sapiens
gacctgggaatgtgc

SEQ ID NO: 1777007 - DNA, 15 bp, Homo sapiens
acctgggaatgtgca

SEQ ID NO: 1777008 - DNA, 15 bp, Homo sapiens
cctgggaatgtgcat

SEQ ID NO: 1777009 - DNA, 15 bp, Homo sapiens
ctgggaatgtgcatc

SEQ ID NO: 1777010 - DNA, 15 bp, Homo sapiens
tgggaatgtgcatct

SEQ ID NO: 1777011 - DNA, 15 bp, Homo sapiens
gggaatgtgcatctc

SEQ ID NO: 1777012 - DNA, 15 bp, Homo sapiens
ggaatgtgcatctcc

SEQ ID NO: 1777013 - DNA, 15 bp, Homo sapiens
gaatgtgcatctcct

SEQ ID NO: 1777014 - DNA, 15 bp, Homo sapiens
aatgtgcatctccta

SEQ ID NO: 1777015 - DNA, 15 bp, Homo sapiens
atgtgcatctcctat

SEQ ID NO: 1777016 - DNA, 15 bp, Homo sapiens
tgtgcatctcctatt

SEQ ID NO: 1777017 - DNA, 15 bp, Homo sapiens
gtgcatctcctattt

SEQ ID NO: 1777018 - DNA, 15 bp, Homo sapiens
tgcatctcctatttc

SEQ ID NO: 1777019 - DNA, 15 bp, Homo sapiens
gcatctcctatttca

SEQ ID NO: 1777020 - DNA, 15 bp, Homo sapiens
catctcctatttcag

SEQ ID NO: 1777021 - DNA, 15 bp, Homo sapiens
atctcctatttcagg

SEQ ID NO: 1777022 - DNA, 15 bp, Homo sapiens
tctcctatttcaggt

SEQ ID NO: 1777023 - DNA, 15 bp, Homo sapiens
ctcctatttcaggtg

SEQ ID NO: 1777024 - DNA, 15 bp, Homo sapiens
tcctatttcaggtgc

SEQ ID NO: 1777025 - DNA, 15 bp, Homo sapiens
cctatttcaggtgct

SEQ ID NO: 1777026 - DNA, 15 bp, Homo sapiens
ctatttcaggtgctt

SEQ ID NO: 1777027 - DNA, 15 bp, Homo sapiens
tatttcaggtgcttc

SEQ ID NO: 1777028 - DNA, 15 bp, Homo sapiens
atttcaggtgcttct

SEQ ID NO: 1777029 - DNA, 15 bp, Homo sapiens
tttcaggtgcttctt

SEQ ID NO: 1777030 - DNA, 15 bp, Homo sapiens
ttcaggtgcttcttg

SEQ ID NO: 1777031 - DNA, 15 bp, Homo sapiens
tcaggtgcttcttgc

SEQ ID NO: 1777032 - DNA, 15 bp, Homo sapiens
caggtgcttcttgcg

SEQ ID NO: 1777033 - DNA, 15 bp, Homo sapiens
aggtgcttcttgcgc

SEQ ID NO: 1777034 - DNA, 15 bp, Homo sapiens
ggtgcttcttgcgcc

SEQ ID NO: 1777035 - DNA, 15 bp, Homo sapiens
gtgcttcttgcgcct

SEQ ID NO: 1777036 - DNA, 15 bp, Homo sapiens
tgcttcttgcgcctc

SEQ ID NO: 1777037 - DNA, 15 bp, Homo sapiens
gcttcttgcgcctca

SEQ ID NO: 1777038 - DNA, 15 bp, Homo sapiens
cttcttgcgcctcac

SEQ ID NO: 1777039 - DNA, 15 bp, Homo sapiens
ttcttgcgcctcact

SEQ ID NO: 1777040 - DNA, 15 bp, Homo sapiens
tcttgcgcctcactg

SEQ ID NO: 1777041 - DNA, 15 bp, Homo sapiens
cttgcgcctcactgt

SEQ ID NO: 1777042 - DNA, 15 bp, Homo sapiens
ttgcgcctcactgtt

SEQ ID NO: 1777043 - DNA, 15 bp, Homo sapiens
tgcgcctcactgtta

SEQ ID NO: 1777044 - DNA, 15 bp, Homo sapiens
gcgcctcactgttaa

SEQ ID NO: 1777045 - DNA, 15 bp, Homo sapiens
cgcctcactgttaag

SEQ ID NO: 1777046 - DNA, 15 bp, Homo sapiens
gcctcactgttaaga

SEQ ID NO: 1777047 - DNA, 15 bp, Homo sapiens
cctcactgttaagag

SEQ ID NO: 1777048 - DNA, 15 bp, Homo sapiens
ctcactgttaagagt

SEQ ID NO: 1777049 - DNA, 15 bp, Homo sapiens
tcactgttaagagta

SEQ ID NO: 1777050 - DNA, 15 bp, Homo sapiens
cactgttaagagtaa

SEQ ID NO: 1777051 - DNA, 15 bp, Homo sapiens
actgttaagagtaaa

SEQ ID NO: 1777052 - DNA, 15 bp, Homo sapiens
ctgttaagagtaaaa

SEQ ID NO: 1777053 - DNA, 15 bp, Homo sapiens
tgttaagagtaaaat

SEQ ID NO: 1777054 - DNA, 15 bp, Homo sapiens
gttaagagtaaaatt

SEQ ID NO: 1777055 - DNA, 15 bp, Homo sapiens
ttaagagtaaaattt

SEQ ID NO: 1777056 - DNA, 15 bp, Homo sapiens
taagagtaaaatttt

SEQ ID NO: 1777057 - DNA, 15 bp, Homo sapiens
aagagtaaaattttg

SEQ ID NO: 1777058 - DNA, 15 bp, Homo sapiens
agagtaaaattttga

SEQ ID NO: 1777059 - DNA, 15 bp, Homo sapiens
gagtaaaattttgac

SEQ ID NO: 1777060 - DNA, 15 bp, Homo sapiens
agtaaaattttgaca

SEQ ID NO: 1777061 - DNA, 15 bp, Homo sapiens
gtaaaattttgacat

SEQ ID NO: 1777062 - DNA, 15 bp, Homo sapiens
taaaattttgacatc

SEQ ID NO: 1777063 - DNA, 15 bp, Homo sapiens
aaaattttgacatct

SEQ ID NO: 1777064 - DNA, 15 bp, Homo sapiens
aaattttgacatctg

SEQ ID NO: 1777065 - DNA, 15 bp, Homo sapiens
aattttgacatctgt

SEQ ID NO: 1777066 - DNA, 15 bp, Homo sapiens
attttgacatctgtg

SEQ ID NO: 1777067 - DNA, 15 bp, Homo sapiens
ttttgacatctgtga

SEQ ID NO: 1777068 - DNA, 15 bp, Homo sapiens
tttgacatctgtgaa

SEQ ID NO: 1777069 - DNA, 15 bp, Homo sapiens
ttgacatctgtgaac

SEQ ID NO: 1777070 - DNA, 15 bp, Homo sapiens
tgacatctgtgaacc

SEQ ID NO: 1777071 - DNA, 15 bp, Homo sapiens
gacatctgtgaaccc

SEQ ID NO: 1777072 - DNA, 15 bp, Homo sapiens
acatctgtgaaccca

SEQ ID NO: 1777073 - DNA, 15 bp, Homo sapiens
catctgtgaacccaa

SEQ ID NO: 1777074 - DNA, 15 bp, Homo sapiens
atctgtgaacccaat

SEQ ID NO: 1777075 - DNA, 15 bp, Homo sapiens
tctgtgaacccaatt

SEQ ID NO: 1777076 - DNA, 15 bp, Homo sapiens
ctgtgaacccaattc

SEQ ID NO: 1777077 - DNA, 15 bp, Homo sapiens
tgtgaacccaattcc

SEQ ID NO: 1777078 - DNA, 15 bp, Homo sapiens
gtgaacccaattccg

SEQ ID NO: 1777079 - DNA, 15 bp, Homo sapiens
tgaacccaattccgg

SEQ ID NO: 1777080 - DNA, 15 bp, Homo sapiens
gaacccaattccggt

SEQ ID NO: 1777081 - DNA, 15 bp, Homo sapiens
aacccaattccggtt

SEQ ID NO: 1777082 - DNA, 15 bp, Homo sapiens
acccaattccggttt

SEQ ID NO: 1777083 - DNA, 15 bp, Homo sapiens
cccaattccggtttc

SEQ ID NO: 1777084 - DNA, 15 bp, Homo sapiens
ccaattccggtttcc

SEQ ID NO: 1777085 - DNA, 15 bp, Homo sapiens
caattccggtttcct

SEQ ID NO: 1777086 - DNA, 15 bp, Homo sapiens
aattccggtttcctc

SEQ ID NO: 1777087 - DNA, 15 bp, Homo sapiens
attccggtttcctcc

SEQ ID NO: 1777088 - DNA, 15 bp, Homo sapiens
ttccggtttcctccc

SEQ ID NO: 1777089 - DNA, 15 bp, Homo sapiens
tccggtttcctccca

SEQ ID NO: 1777090 - DNA, 15 bp, Homo sapiens
ccggtttcctcccag

SEQ ID NO: 1777091 - DNA, 15 bp, Homo sapiens
cggtttcctcccagc

SEQ ID NO: 1777092 - DNA, 15 bp, Homo sapiens
ggtttcctcccagct

SEQ ID NO: 1777093 - DNA, 15 bp, Homo sapiens
gtttcctcccagcta

SEQ ID NO: 1777094 - DNA, 15 bp, Homo sapiens
tttcctcccagctac

SEQ ID NO: 1777095 - DNA, 15 bp, Homo sapiens
ttcctcccagctaca

SEQ ID NO: 1777096 - DNA, 15 bp, Homo sapiens
tcctcccagctacag

SEQ ID NO: 1777097 - DNA, 15 bp, Homo sapiens
cctcccagctacagc

SEQ ID NO: 1777098 - DNA, 15 bp, Homo sapiens
ctcccagctacagct

SEQ ID NO: 1777099 - DNA, 15 bp, Homo sapiens
tcccagctacagctg

SEQ ID NO: 1777100 - DNA, 15 bp, Homo sapiens
cccagctacagctga

SEQ ID NO: 1777101 - DNA, 15 bp, Homo sapiens
ccagctacagctgag

SEQ ID NO: 1777102 - DNA, 15 bp, Homo sapiens
cagctacagctgaga

SEQ ID NO: 1777103 - DNA, 15 bp, Homo sapiens
agctacagctgagaa

SEQ ID NO: 1777104 - DNA, 15 bp, Homo sapiens
gctacagctgagaat

SEQ ID NO: 1777105 - DNA, 15 bp, Homo sapiens
ctacagctgagaatg

SEQ ID NO: 1777106 - DNA, 15 bp, Homo sapiens
tacagctgagaatgc

SEQ ID NO: 1777107 - DNA, 15 bp, Homo sapiens
acagctgagaatgcc

SEQ ID NO: 1777108 - DNA, 15 bp, Homo sapiens
cagctgagaatgcct

SEQ ID NO: 1777109 - DNA, 15 bp, Homo sapiens
agctgagaatgcctt

SEQ ID NO: 1777110 - DNA, 15 bp, Homo sapiens
gctgagaatgccttt

SEQ ID NO: 1777111 - DNA, 15 bp, Homo sapiens
ctgagaatgcctttt

SEQ ID NO: 1777112 - DNA, 15 bp, Homo sapiens
tgagaatgcctttta

SEQ ID NO: 1777113 - DNA, 15 bp, Homo sapiens
gagaatgccttttag

SEQ ID NO: 1777114 - DNA, 15 bp, Homo sapiens
agaatgccttttaga

SEQ ID NO: 1777115 - DNA, 15 bp, Homo sapiens
gaatgccttttagaa

SEQ ID NO: 1777116 - DNA, 15 bp, Homo sapiens
aatgccttttagaaa

SEQ ID NO: 1777117 - DNA, 15 bp, Homo sapiens
atgccttttagaaag

SEQ ID NO: 1777118 - DNA, 15 bp, Homo sapiens
tgccttttagaaaga

SEQ ID NO: 1777119 - DNA, 15 bp, Homo sapiens
gccttttagaaagaa

SEQ ID NO: 1777120 - DNA, 15 bp, Homo sapiens
ccttttagaaagaat

SEQ ID NO: 1777121 - DNA, 15 bp, Homo sapiens
cttttagaaagaatg

SEQ ID NO: 1777122 - DNA, 15 bp, Homo sapiens
ttttagaaagaatgt

SEQ ID NO: 1777123 - DNA, 15 bp, Homo sapiens
tttagaaagaatgtg

SEQ ID NO: 1777124 - DNA, 15 bp, Homo sapiens
ttagaaagaatgtgt

SEQ ID NO: 1777125 - DNA, 15 bp, Homo sapiens
tagaaagaatgtgtc

SEQ ID NO: 1777126 - DNA, 15 bp, Homo sapiens
agaaagaatgtgtct

SEQ ID NO: 1777127 - DNA, 15 bp, Homo sapiens
gaaagaatgtgtcta

SEQ ID NO: 1777128 - DNA, 15 bp, Homo sapiens
aaagaatgtgtctaa

SEQ ID NO: 1777129 - DNA, 15 bp, Homo sapiens
aagaatgtgtctaac

SEQ ID NO: 1777130 - DNA, 15 bp, Homo sapiens
agaatgtgtctaacg

SEQ ID NO: 1777131 - DNA, 15 bp, Homo sapiens
gaatgtgtctaacgt

SEQ ID NO: 1777132 - DNA, 15 bp, Homo sapiens
aatgtgtctaacgtg

SEQ ID NO: 1777133 - DNA, 15 bp, Homo sapiens
atgtgtctaacgtgg

SEQ ID NO: 1777134 - DNA, 15 bp, Homo sapiens
tgtgtctaacgtggg

SEQ ID NO: 1777135 - DNA, 15 bp, Homo sapiens
gtgtctaacgtgggc

SEQ ID NO: 1777136 - DNA, 15 bp, Homo sapiens
tgtctaacgtgggca

SEQ ID NO: 1777137 - DNA, 15 bp, Homo sapiens
gtctaacgtgggcac

SEQ ID NO: 1777138 - DNA, 15 bp, Homo sapiens
tctaacgtgggcact

SEQ ID NO: 1777139 - DNA, 15 bp, Homo sapiens
ctaacgtgggcactt

SEQ ID NO: 1777140 - DNA, 15 bp, Homo sapiens
taacgtgggcactta

SEQ ID NO: 1777141 - DNA, 15 bp, Homo sapiens
aacgtgggcacttaa

SEQ ID NO: 1777142 - DNA, 15 bp, Homo sapiens
acgtgggcacttaac

SEQ ID NO: 1777143 - DNA, 15 bp, Homo sapiens
cgtgggcacttaacc

SEQ ID NO: 1777144 - DNA, 15 bp, Homo sapiens
gtgggcacttaacct

SEQ ID NO: 1777145 - DNA, 15 bp, Homo sapiens
tgggcacttaacctt

SEQ ID NO: 1777146 - DNA, 15 bp, Homo sapiens
gggcacttaaccttg

SEQ ID NO: 1777147 - DNA, 15 bp, Homo sapiens
ggcacttaaccttgc

SEQ ID NO: 1777148 - DNA, 15 bp, Homo sapiens
gcacttaaccttgca

SEQ ID NO: 1777149 - DNA, 15 bp, Homo sapiens
cacttaaccttgcat

SEQ ID NO: 1777150 - DNA, 15 bp, Homo sapiens
acttaaccttgcatt

SEQ ID NO: 1777151 - DNA, 15 bp, Homo sapiens
cttaaccttgcattt

SEQ ID NO: 1777152 - DNA, 15 bp, Homo sapiens
ttaaccttgcattta

SEQ ID NO: 1777153 - DNA, 15 bp, Homo sapiens
taaccttgcatttaa

SEQ ID NO: 1777154 - DNA, 15 bp, Homo sapiens
aaccttgcatttaaa

SEQ ID NO: 1777155 - DNA, 15 bp, Homo sapiens
accttgcatttaaaa

SEQ ID NO: 1777156 - DNA, 15 bp, Homo sapiens
ccttgcatttaaaac

SEQ ID NO: 1777157 - DNA, 15 bp, Homo sapiens
cttgcatttaaaact

SEQ ID NO: 1777158 - DNA, 15 bp, Homo sapiens
ttgcatttaaaactg

SEQ ID NO: 1777159 - DNA, 15 bp, Homo sapiens
tgcatttaaaactgt

SEQ ID NO: 1777160 - DNA, 15 bp, Homo sapiens
gcatttaaaactgta

SEQ ID NO: 1777161 - DNA, 15 bp, Homo sapiens
catttaaaactgtaa

SEQ ID NO: 1777162 - DNA, 15 bp, Homo sapiens
atttaaaactgtaac

SEQ ID NO: 1777163 - DNA, 15 bp, Homo sapiens
tttaaaactgtaacc

SEQ ID NO: 1777164 - DNA, 15 bp, Homo sapiens
ttaaaactgtaacca

SEQ ID NO: 1777165 - DNA, 15 bp, Homo sapiens
taaaactgtaaccaa

SEQ ID NO: 1777166 - DNA, 15 bp, Homo sapiens
aaaactgtaaccaaa

SEQ ID NO: 1777167 - DNA, 15 bp, Homo sapiens
aaactgtaaccaaat

SEQ ID NO: 1777168 - DNA, 15 bp, Homo sapiens
aactgtaaccaaata

SEQ ID NO: 1777169 - DNA, 15 bp, Homo sapiens
actgtaaccaaatac

SEQ ID NO: 1777170 - DNA, 15 bp, Homo sapiens
ctgtaaccaaatact

SEQ ID NO: 1777171 - DNA, 15 bp, Homo sapiens
tgtaaccaaatactc

SEQ ID NO: 1777172 - DNA, 15 bp, Homo sapiens
gtaaccaaatactct

SEQ ID NO: 1777173 - DNA, 15 bp, Homo sapiens
taaccaaatactctt

SEQ ID NO: 1777174 - DNA, 15 bp, Homo sapiens
aaccaaatactctta

SEQ ID NO: 1777175 - DNA, 15 bp, Homo sapiens
accaaatactcttac

SEQ ID NO: 1777176 - DNA, 15 bp, Homo sapiens
ccaaatactcttact

SEQ ID NO: 1777177 - DNA, 15 bp, Homo sapiens
caaatactcttactt

SEQ ID NO: 1777178 - DNA, 15 bp, Homo sapiens
aaatactcttacttt

SEQ ID NO: 1777179 - DNA, 15 bp, Homo sapiens
aatactcttactttt

SEQ ID NO: 1777180 - DNA, 15 bp, Homo sapiens
atactcttactttta

SEQ ID NO: 1777181 - DNA, 15 bp, Homo sapiens
tactcttacttttat

SEQ ID NO: 1777182 - DNA, 15 bp, Homo sapiens
actcttacttttata

SEQ ID NO: 1777183 - DNA, 15 bp, Homo sapiens
ctcttacttttatat

SEQ ID NO: 1777184 - DNA, 15 bp, Homo sapiens
tcttacttttatatt

SEQ ID NO: 1777185 - DNA, 15 bp, Homo sapiens
cttacttttatattc

SEQ ID NO: 1777186 - DNA, 15 bp, Homo sapiens
ttacttttatattcc

SEQ ID NO: 1777187 - DNA, 15 bp, Homo sapiens
tacttttatattcct

SEQ ID NO: 1777188 - DNA, 15 bp, Homo sapiens
acttttatattccta

SEQ ID NO: 1777189 - DNA, 15 bp, Homo sapiens
cttttatattcctaa

SEQ ID NO: 1777190 - DNA, 15 bp, Homo sapiens
ttttatattcctaaa

SEQ ID NO: 1777191 - DNA, 15 bp, Homo sapiens
tttatattcctaaaa

SEQ ID NO: 1777192 - DNA, 15 bp, Homo sapiens
ttatattcctaaaaa

SEQ ID NO: 1777193 - DNA, 15 bp, Homo sapiens
tatattcctaaaaac

SEQ ID NO: 1777194 - DNA, 15 bp, Homo sapiens
atattcctaaaaaca

SEQ ID NO: 1777195 - DNA, 15 bp, Homo sapiens
tattcctaaaaacat

SEQ ID NO: 1777196 - DNA, 15 bp, Homo sapiens
attcctaaaaacata

SEQ ID NO: 1777197 - DNA, 15 bp, Homo sapiens
ttcctaaaaacatat

SEQ ID NO: 1777198 - DNA, 15 bp, Homo sapiens
tcctaaaaacatata

SEQ ID NO: 1777199 - DNA, 15 bp, Homo sapiens
cctaaaaacatataa

SEQ ID NO: 1777200 - DNA, 15 bp, Homo sapiens
ctaaaaacatataag

SEQ ID NO: 1777201 - DNA, 15 bp, Homo sapiens
taaaaacatataagc

SEQ ID NO: 1777202 - DNA, 15 bp, Homo sapiens
aaaaacatataagca

SEQ ID NO: 1777203 - DNA, 15 bp, Homo sapiens
aaaacatataagcag

SEQ ID NO: 1777204 - DNA, 15 bp, Homo sapiens
aaacatataagcaga

SEQ ID NO: 1777205 - DNA, 15 bp, Homo sapiens
aacatataagcagaa

SEQ ID NO: 1777206 - DNA, 15 bp, Homo sapiens
acatataagcagaaa

SEQ ID NO: 1777207 - DNA, 15 bp, Homo sapiens
catataagcagaaac

SEQ ID NO: 1777208 - DNA, 15 bp, Homo sapiens
atataagcagaaact

SEQ ID NO: 1777209 - DNA, 15 bp, Homo sapiens
tataagcagaaactt

SEQ ID NO: 1777210 - DNA, 15 bp, Homo sapiens
ataagcagaaactta

SEQ ID NO: 1777211 - DNA, 15 bp, Homo sapiens
taagcagaaacttat

SEQ ID NO: 1777212 - DNA, 15 bp, Homo sapiens
aagcagaaacttata

SEQ ID NO: 1777213 - DNA, 15 bp, Homo sapiens
agcagaaacttatac

SEQ ID NO: 1777214 - DNA, 15 bp, Homo sapiens
gcagaaacttataca

SEQ ID NO: 1777215 - DNA, 15 bp, Homo sapiens
cagaaacttatacat

SEQ ID NO: 1777216 - DNA, 15 bp, Homo sapiens
agaaacttatacatg

SEQ ID NO: 1777217 - DNA, 15 bp, Homo sapiens
gaaacttatacatgc

SEQ ID NO: 1777218 - DNA, 15 bp, Homo sapiens
aaacttatacatgct

SEQ ID NO: 1777219 - DNA, 15 bp, Homo sapiens
aacttatacatgctg

SEQ ID NO: 1777220 - DNA, 15 bp, Homo sapiens
acttatacatgctga

SEQ ID NO: 1777221 - DNA, 15 bp, Homo sapiens
cttatacatgctgaa

SEQ ID NO: 1777222 - DNA, 15 bp, Homo sapiens
ttatacatgctgaat

SEQ ID NO: 1777223 - DNA, 15 bp, Homo sapiens
tatacatgctgaatt

SEQ ID NO: 1777224 - DNA, 15 bp, Homo sapiens
atacatgctgaattg

SEQ ID NO: 1777225 - DNA, 15 bp, Homo sapiens
tacatgctgaattga

SEQ ID NO: 1777226 - DNA, 15 bp, Homo sapiens
acatgctgaattgag

SEQ ID NO: 1777227 - DNA, 15 bp, Homo sapiens
catgctgaattgagt

SEQ ID NO: 1777228 - DNA, 15 bp, Homo sapiens
atgctgaattgagta

SEQ ID NO: 1777229 - DNA, 15 bp, Homo sapiens
tgctgaattgagtat

SEQ ID NO: 1777230 - DNA, 15 bp, Homo sapiens
gctgaattgagtata

SEQ ID NO: 1777231 - DNA, 15 bp, Homo sapiens
ctgaattgagtatat

SEQ ID NO: 1777232 - DNA, 15 bp, Homo sapiens
tgaattgagtatata

SEQ ID NO: 1777233 - DNA, 15 bp, Homo sapiens
gaattgagtatatac

SEQ ID NO: 1777234 - DNA, 15 bp, Homo sapiens
aattgagtatatacc

SEQ ID NO: 1777235 - DNA, 15 bp, Homo sapiens
attgagtatatacca

SEQ ID NO: 1777236 - DNA, 15 bp, Homo sapiens
ttgagtatataccac

SEQ ID NO: 1777237 - DNA, 15 bp, Homo sapiens
tgagtatataccact

SEQ ID NO: 1777238 - DNA, 15 bp, Homo sapiens
gagtatataccactt

SEQ ID NO: 1777239 - DNA, 15 bp, Homo sapiens
agtatataccactta

SEQ ID NO: 1777240 - DNA, 15 bp, Homo sapiens
gtatataccacttaa

SEQ ID NO: 1777241 - DNA, 15 bp, Homo sapiens
tatataccacttaaa

SEQ ID NO: 1777242 - DNA, 15 bp, Homo sapiens
atataccacttaaac

SEQ ID NO: 1777243 - DNA, 15 bp, Homo sapiens
tataccacttaaaca

SEQ ID NO: 1777244 - DNA, 15 bp, Homo sapiens
ataccacttaaacat

SEQ ID NO: 1777245 - DNA, 15 bp, Homo sapiens
taccacttaaacatg

SEQ ID NO: 1777246 - DNA, 15 bp, Homo sapiens
accacttaaacatgt

SEQ ID NO: 1777247 - DNA, 15 bp, Homo sapiens
ccacttaaacatgtt

SEQ ID NO: 1777248 - DNA, 15 bp, Homo sapiens
cacttaaacatgtta

SEQ ID NO: 1777249 - DNA, 15 bp, Homo sapiens
acttaaacatgttag

SEQ ID NO: 1777250 - DNA, 15 bp, Homo sapiens
cttaaacatgttaga

SEQ ID NO: 1777251 - DNA, 15 bp, Homo sapiens
ttaaacatgttagag

SEQ ID NO: 1777252 - DNA, 15 bp, Homo sapiens
taaacatgttagagg

SEQ ID NO: 1777253 - DNA, 15 bp, Homo sapiens
aaacatgttagaggt

SEQ ID NO: 1777254 - DNA, 15 bp, Homo sapiens
aacatgttagaggta

SEQ ID NO: 1777255 - DNA, 15 bp, Homo sapiens
acatgttagaggtag

SEQ ID NO: 1777256 - DNA, 15 bp, Homo sapiens
catgttagaggtagg

SEQ ID NO: 1777257 - DNA, 15 bp, Homo sapiens
atgttagaggtaggt

SEQ ID NO: 1777258 - DNA, 15 bp, Homo sapiens
tgttagaggtaggta

SEQ ID NO: 1777259 - DNA, 15 bp, Homo sapiens
gttagaggtaggtag

SEQ ID NO: 1777260 - DNA, 15 bp, Homo sapiens
ttagaggtaggtagt

SEQ ID NO: 1777261 - DNA, 15 bp, Homo sapiens
tagaggtaggtagta

SEQ ID NO: 1777262 - DNA, 15 bp, Homo sapiens
agaggtaggtagtag

SEQ ID NO: 1777263 - DNA, 15 bp, Homo sapiens
gaggtaggtagtaga

SEQ ID NO: 1777264 - DNA, 15 bp, Homo sapiens
aggtaggtagtagaa

SEQ ID NO: 1777265 - DNA, 15 bp, Homo sapiens
ggtaggtagtagaag

SEQ ID NO: 1777266 - DNA, 15 bp, Homo sapiens
gtaggtagtagaaga

SEQ ID NO: 1777267 - DNA, 15 bp, Homo sapiens
taggtagtagaagat

SEQ ID NO: 1777268 - DNA, 15 bp, Homo sapiens
aggtagtagaagatt

SEQ ID NO: 1777269 - DNA, 15 bp, Homo sapiens
ggtagtagaagattc

SEQ ID NO: 1777270 - DNA, 15 bp, Homo sapiens
gtagtagaagattct

SEQ ID NO: 1777271 - DNA, 15 bp, Homo sapiens
tagtagaagattctt

SEQ ID NO: 1777272 - DNA, 15 bp, Homo sapiens
agtagaagattcttt

SEQ ID NO: 1777273 - DNA, 15 bp, Homo sapiens
gtagaagattctttt

SEQ ID NO: 1777274 - DNA, 15 bp, Homo sapiens
tagaagattctttta

SEQ ID NO: 1777275 - DNA, 15 bp, Homo sapiens
agaagattcttttat

SEQ ID NO: 1777276 - DNA, 15 bp, Homo sapiens
gaagattcttttatt

SEQ ID NO: 1777277 - DNA, 15 bp, Homo sapiens
aagattcttttattt

SEQ ID NO: 1777278 - DNA, 15 bp, Homo sapiens
agattcttttatttt

SEQ ID NO: 1777279 - DNA, 15 bp, Homo sapiens
attcttttattttaa

SEQ ID NO: 1777280 - DNA, 15 bp, Homo sapiens
ttcttttattttaaa

SEQ ID NO: 1777281 - DNA, 15 bp, Homo sapiens
tcttttattttaaaa

SEQ ID NO: 1777282 - DNA, 15 bp, Homo sapiens
cttttattttaaaaa

SEQ ID NO: 1777283 - DNA, 15 bp, Homo sapiens
ttttattttaaaaaa

SEQ ID NO: 1777284 - DNA, 15 bp, Homo sapiens
tttattttaaaaaaa

SEQ ID NO: 1777285 - DNA, 15 bp, Homo sapiens
ttattttaaaaaaaa

SEQ ID NO: 1777286 - DNA, 15 bp, Homo sapiens
tattttaaaaaaaat

SEQ ID NO: 1777287 - DNA, 15 bp, Homo sapiens
attttaaaaaaaatt

SEQ ID NO: 1777288 - DNA, 15 bp, Homo sapiens
ttttaaaaaaaatta

SEQ ID NO: 1777289 - DNA, 15 bp, Homo sapiens
tttaaaaaaaattac

SEQ ID NO: 1777290 - DNA, 15 bp, Homo sapiens
ttaaaaaaaattaca

SEQ ID NO: 1777291 - DNA, 15 bp, Homo sapiens
taaaaaaaattacac

SEQ ID NO: 1777292 - DNA, 15 bp, Homo sapiens
aaaaaaaattacacg

SEQ ID NO: 1777293 - DNA, 15 bp, Homo sapiens
aaaaaaattacacgt

SEQ ID NO: 1777294 - DNA, 15 bp, Homo sapiens
aaaaaattacacgtg

SEQ ID NO: 1777295 - DNA, 15 bp, Homo sapiens
aaaaattacacgtgg

SEQ ID NO: 1777296 - DNA, 15 bp, Homo sapiens
aaaattacacgtggt

SEQ ID NO: 1777297 - DNA, 15 bp, Homo sapiens
aaattacacgtggtt

SEQ ID NO: 1777298 - DNA, 15 bp, Homo sapiens
aattacacgtggttc

SEQ ID NO: 1777299 - DNA, 15 bp, Homo sapiens
attacacgtggttct

SEQ ID NO: 1777300 - DNA, 15 bp, Homo sapiens
ttacacgtggttcta

SEQ ID NO: 1777301 - DNA, 15 bp, Homo sapiens
tacacgtggttctac

SEQ ID NO: 1777302 - DNA, 15 bp, Homo sapiens
acacgtggttctaca

SEQ ID NO: 1777303 - DNA, 15 bp, Homo sapiens
cacgtggttctacaa

SEQ ID NO: 1777304 - DNA, 15 bp, Homo sapiens
acgtggttctacaat

SEQ ID NO: 1777305 - DNA, 15 bp, Homo sapiens
cgtggttctacaata

SEQ ID NO: 1777306 - DNA, 15 bp, Homo sapiens
gtggttctacaataa

SEQ ID NO: 1777307 - DNA, 15 bp, Homo sapiens
tggttctacaataat

SEQ ID NO: 1777308 - DNA, 15 bp, Homo sapiens
ggttctacaataatt

SEQ ID NO: 1777309 - DNA, 15 bp, Homo sapiens
gttctacaataattt

SEQ ID NO: 1777310 - DNA, 15 bp, Homo sapiens
ttctacaataatttt

SEQ ID NO: 1777311 - DNA, 15 bp, Homo sapiens
ctacaataatttttc

SEQ ID NO: 1777312 - DNA, 15 bp, Homo sapiens
tacaataatttttcc

SEQ ID NO: 1777313 - DNA, 15 bp, Homo sapiens
acaataatttttcct

SEQ ID NO: 1777314 - DNA, 15 bp, Homo sapiens
caataatttttcctt

SEQ ID NO: 1777315 - DNA, 15 bp, Homo sapiens
aataatttttccttt

SEQ ID NO: 1777316 - DNA, 15 bp, Homo sapiens
ataatttttcctttt

SEQ ID NO: 1777317 - DNA, 15 bp, Homo sapiens
taatttttcctttta

SEQ ID NO: 1777318 - DNA, 15 bp, Homo sapiens
aatttttccttttaa

SEQ ID NO: 1777319 - DNA, 15 bp, Homo sapiens
atttttccttttaaa

SEQ ID NO: 1777320 - DNA, 15 bp, Homo sapiens
tttttccttttaaaa

SEQ ID NO: 1777321 - DNA, 15 bp, Homo sapiens
ttttccttttaaaaa

SEQ ID NO: 1777322 - DNA, 15 bp, Homo sapiens
tttccttttaaaaag

SEQ ID NO: 1777323 - DNA, 15 bp, Homo sapiens
ttccttttaaaaagc

SEQ ID NO: 1777324 - DNA, 15 bp, Homo sapiens
tccttttaaaaagct

SEQ ID NO: 1777325 - DNA, 15 bp, Homo sapiens
ccttttaaaaagctt

SEQ ID NO: 1777326 - DNA, 15 bp, Homo sapiens
cttttaaaaagcttc

SEQ ID NO: 1777327 - DNA, 15 bp, Homo sapiens
ttttaaaaagcttca

SEQ ID NO: 1777328 - DNA, 15 bp, Homo sapiens
tttaaaaagcttcaa

SEQ ID NO: 1777329 - DNA, 15 bp, Homo sapiens
ttaaaaagcttcaag

SEQ ID NO: 1777330 - DNA, 15 bp, Homo sapiens
taaaaagcttcaaga

SEQ ID NO: 1777331 - DNA, 15 bp, Homo sapiens
aaaaagcttcaagat

SEQ ID NO: 1777332 - DNA, 15 bp, Homo sapiens
aaaagcttcaagata

SEQ ID NO: 1777333 - DNA, 15 bp, Homo sapiens
aaagcttcaagatat

SEQ ID NO: 1777334 - DNA, 15 bp, Homo sapiens
aagcttcaagatata

SEQ ID NO: 1777335 - DNA, 15 bp, Homo sapiens
agcttcaagatatac

SEQ ID NO: 1777336 - DNA, 15 bp, Homo sapiens
gcttcaagatataca

SEQ ID NO: 1777337 - DNA, 15 bp, Homo sapiens
cttcaagatatacag

SEQ ID NO: 1777338 - DNA, 15 bp, Homo sapiens
ttcaagatatacagg

SEQ ID NO: 1777339 - DNA, 15 bp, Homo sapiens
tcaagatatacaggg

SEQ ID NO: 1777340 - DNA, 15 bp, Homo sapiens
caagatatacaggga

SEQ ID NO: 1777341 - DNA, 15 bp, Homo sapiens
aagatatacagggag

SEQ ID NO: 1777342 - DNA, 15 bp, Homo sapiens
agatatacagggaga

SEQ ID NO: 1777343 - DNA, 15 bp, Homo sapiens
gatatacagggagat

SEQ ID NO: 1777344 - DNA, 15 bp, Homo sapiens
atatacagggagatg

SEQ ID NO: 1777345 - DNA, 15 bp, Homo sapiens
tatacagggagatgc

SEQ ID NO: 1777346 - DNA, 15 bp, Homo sapiens
atacagggagatgca

SEQ ID NO: 1777347 - DNA, 15 bp, Homo sapiens
tacagggagatgcac

SEQ ID NO: 1777348 - DNA, 15 bp, Homo sapiens
acagggagatgcact

SEQ ID NO: 1777349 - DNA, 15 bp, Homo sapiens
cagggagatgcacta

SEQ ID NO: 1777350 - DNA, 15 bp, Homo sapiens
agggagatgcactag

SEQ ID NO: 1777351 - DNA, 15 bp, Homo sapiens
gggagatgcactagt

SEQ ID NO: 1777352 - DNA, 15 bp, Homo sapiens
ggagatgcactagtc

SEQ ID NO: 1777353 - DNA, 15 bp, Homo sapiens
gagatgcactagtcc

SEQ ID NO: 1777354 - DNA, 15 bp, Homo sapiens
agatgcactagtcca

SEQ ID NO: 1777355 - DNA, 15 bp, Homo sapiens
gatgcactagtccaa

SEQ ID NO: 1777356 - DNA, 15 bp, Homo sapiens
atgcactagtccaag

SEQ ID NO: 1777357 - DNA, 15 bp, Homo sapiens
tgcactagtccaaga

SEQ ID NO: 1777358 - DNA, 15 bp, Homo sapiens
gcactagtccaagaa

SEQ ID NO: 1777359 - DNA, 15 bp, Homo sapiens
cactagtccaagaaa

SEQ ID NO: 1777360 - DNA, 15 bp, Homo sapiens
actagtccaagaaat

SEQ ID NO: 1777361 - DNA, 15 bp, Homo sapiens
ctagtccaagaaatc

SEQ ID NO: 1777362 - DNA, 15 bp, Homo sapiens
tagtccaagaaatcc

SEQ ID NO: 1777363 - DNA, 15 bp, Homo sapiens
agtccaagaaatcca

SEQ ID NO: 1777364 - DNA, 15 bp, Homo sapiens
gtccaagaaatccag

SEQ ID NO: 1777365 - DNA, 15 bp, Homo sapiens
tccaagaaatccagc

SEQ ID NO: 1777366 - DNA, 15 bp, Homo sapiens
ccaagaaatccagct

SEQ ID NO: 1777367 - DNA, 15 bp, Homo sapiens
caagaaatccagctt

SEQ ID NO: 1777368 - DNA, 15 bp, Homo sapiens
aagaaatccagcttg

SEQ ID NO: 1777369 - DNA, 15 bp, Homo sapiens
agaaatccagcttgt

SEQ ID NO: 1777370 - DNA, 15 bp, Homo sapiens
gaaatccagcttgtc

SEQ ID NO: 1777371 - DNA, 15 bp, Homo sapiens
aaatccagcttgtcc

SEQ ID NO: 1777372 - DNA, 15 bp, Homo sapiens
aatccagcttgtcct

SEQ ID NO: 1777373 - DNA, 15 bp, Homo sapiens
atccagcttgtcctt

SEQ ID NO: 1777374 - DNA, 15 bp, Homo sapiens
tccagcttgtccttt

SEQ ID NO: 1777375 - DNA, 15 bp, Homo sapiens
ccagcttgtccttta

SEQ ID NO: 1777376 - DNA, 15 bp, Homo sapiens
cagcttgtcctttaa

SEQ ID NO: 1777377 - DNA, 15 bp, Homo sapiens
agcttgtcctttaac

SEQ ID NO: 1777378 - DNA, 15 bp, Homo sapiens
gcttgtcctttaaca

SEQ ID NO: 1777379 - DNA, 15 bp, Homo sapiens
cttgtcctttaacaa

SEQ ID NO: 1777380 - DNA, 15 bp, Homo sapiens
ttgtcctttaacaaa

SEQ ID NO: 1777381 - DNA, 15 bp, Homo sapiens
tgtcctttaacaaat

SEQ ID NO: 1777382 - DNA, 15 bp, Homo sapiens
gtcctttaacaaatt

SEQ ID NO: 1777383 - DNA, 15 bp, Homo sapiens
tcctttaacaaatta

SEQ ID NO: 1777384 - DNA, 15 bp, Homo sapiens
cctttaacaaattat

SEQ ID NO: 1777385 - DNA, 15 bp, Homo sapiens
ctttaacaaattata

SEQ ID NO: 1777386 - DNA, 15 bp, Homo sapiens
tttaacaaattatac

SEQ ID NO: 1777387 - DNA, 15 bp, Homo sapiens
ttaacaaattataca

SEQ ID NO: 1777388 - DNA, 15 bp, Homo sapiens
taacaaattatacag

SEQ ID NO: 1777389 - DNA, 15 bp, Homo sapiens
aacaaattatacagt

SEQ ID NO: 1777390 - DNA, 15 bp, Homo sapiens
acaaattatacagtt

SEQ ID NO: 1777391 - DNA, 15 bp, Homo sapiens
caaattatacagttt

SEQ ID NO: 1777392 - DNA, 15 bp, Homo sapiens
aaattatacagttta

SEQ ID NO: 1777393 - DNA, 15 bp, Homo sapiens
aattatacagtttaa

SEQ ID NO: 1777394 - DNA, 15 bp, Homo sapiens
attatacagtttaac

SEQ ID NO: 1777395 - DNA, 15 bp, Homo sapiens
ttatacagtttaact

SEQ ID NO: 1777396 - DNA, 15 bp, Homo sapiens
tatacagtttaactt

SEQ ID NO: 1777397 - DNA, 15 bp, Homo sapiens
atacagtttaacttt

SEQ ID NO: 1777398 - DNA, 15 bp, Homo sapiens
tacagtttaactttc

SEQ ID NO: 1777399 - DNA, 15 bp, Homo sapiens
acagtttaactttct

SEQ ID NO: 1777400 - DNA, 15 bp, Homo sapiens
cagtttaactttctt

SEQ ID NO: 1777401 - DNA, 15 bp, Homo sapiens
agtttaactttcttc

SEQ ID NO: 1777402 - DNA, 15 bp, Homo sapiens
gtttaactttcttca

SEQ ID NO: 1777403 - DNA, 15 bp, Homo sapiens
tttaactttcttcac

SEQ ID NO: 1777404 - DNA, 15 bp, Homo sapiens
ttaactttcttcaca

SEQ ID NO: 1777405 - DNA, 15 bp, Homo sapiens
taactttcttcacat

SEQ ID NO: 1777406 - DNA, 15 bp, Homo sapiens
aactttcttcacata

SEQ ID NO: 1777407 - DNA, 15 bp, Homo sapiens
actttcttcacatat

SEQ ID NO: 1777408 - DNA, 15 bp, Homo sapiens
ctttcttcacatatt

SEQ ID NO: 1777409 - DNA, 15 bp, Homo sapiens
tttcttcacatattg

SEQ ID NO: 1777410 - DNA, 15 bp, Homo sapiens
ttcttcacatattgc

SEQ ID NO: 1777411 - DNA, 15 bp, Homo sapiens
tcttcacatattgcc

SEQ ID NO: 1777412 - DNA, 15 bp, Homo sapiens
cttcacatattgcca

SEQ ID NO: 1777413 - DNA, 15 bp, Homo sapiens
ttcacatattgccac

SEQ ID NO: 1777414 - DNA, 15 bp, Homo sapiens
tcacatattgccaca

SEQ ID NO: 1777415 - DNA, 15 bp, Homo sapiens
cacatattgccacaa

SEQ ID NO: 1777416 - DNA, 15 bp, Homo sapiens
acatattgccacaat

SEQ ID NO: 1777417 - DNA, 15 bp, Homo sapiens
catattgccacaata

SEQ ID NO: 1777418 - DNA, 15 bp, Homo sapiens
atattgccacaatag

SEQ ID NO: 1777419 - DNA, 15 bp, Homo sapiens
tattgccacaatagt

SEQ ID NO: 1777420 - DNA, 15 bp, Homo sapiens
attgccacaatagtt

SEQ ID NO: 1777421 - DNA, 15 bp, Homo sapiens
ttgccacaatagtta

SEQ ID NO: 1777422 - DNA, 15 bp, Homo sapiens
tgccacaatagttaa

SEQ ID NO: 1777423 - DNA, 15 bp, Homo sapiens
gccacaatagttaat

SEQ ID NO: 1777424 - DNA, 15 bp, Homo sapiens
ccacaatagttaatt

SEQ ID NO: 1777425 - DNA, 15 bp, Homo sapiens
cacaatagttaattc

SEQ ID NO: 1777426 - DNA, 15 bp, Homo sapiens
acaatagttaattca

SEQ ID NO: 1777427 - DNA, 15 bp, Homo sapiens
caatagttaattcac

SEQ ID NO: 1777428 - DNA, 15 bp, Homo sapiens
aatagttaattcaca

SEQ ID NO: 1777429 - DNA, 15 bp, Homo sapiens
atagttaattcacag

SEQ ID NO: 1777430 - DNA, 15 bp, Homo sapiens
tagttaattcacagt

SEQ ID NO: 1777431 - DNA, 15 bp, Homo sapiens
agttaattcacagta

SEQ ID NO: 1777432 - DNA, 15 bp, Homo sapiens
gttaattcacagtat

SEQ ID NO: 1777433 - DNA, 15 bp, Homo sapiens
ttaattcacagtata

SEQ ID NO: 1777434 - DNA, 15 bp, Homo sapiens
taattcacagtataa

SEQ ID NO: 1777435 - DNA, 15 bp, Homo sapiens
aattcacagtataat

SEQ ID NO: 1777436 - DNA, 15 bp, Homo sapiens
attcacagtataatc

SEQ ID NO: 1777437 - DNA, 15 bp, Homo sapiens
ttcacagtataatct

SEQ ID NO: 1777438 - DNA, 15 bp, Homo sapiens
tcacagtataatctt

SEQ ID NO: 1777439 - DNA, 15 bp, Homo sapiens
cacagtataatctta

SEQ ID NO: 1777440 - DNA, 15 bp, Homo sapiens
acagtataatcttat

SEQ ID NO: 1777441 - DNA, 15 bp, Homo sapiens
cagtataatcttatt

SEQ ID NO: 1777442 - DNA, 15 bp, Homo sapiens
agtataatcttattt

SEQ ID NO: 1777443 - DNA, 15 bp, Homo sapiens
gtataatcttatttg

SEQ ID NO: 1777444 - DNA, 15 bp, Homo sapiens
tataatcttatttgt

SEQ ID NO: 1777445 - DNA, 15 bp, Homo sapiens
ataatcttatttgta

SEQ ID NO: 1777446 - DNA, 15 bp, Homo sapiens
taatcttatttgtat

SEQ ID NO: 1777447 - DNA, 15 bp, Homo sapiens
aatcttatttgtatt

SEQ ID NO: 1777448 - DNA, 15 bp, Homo sapiens
atcttatttgtattt

SEQ ID NO: 1777449 - DNA, 15 bp, Homo sapiens
tcttatttgtatttg

SEQ ID NO: 1777450 - DNA, 15 bp, Homo sapiens
cttatttgtatttgg

SEQ ID NO: 1777451 - DNA, 15 bp, Homo sapiens
ttatttgtatttgga

SEQ ID NO: 1777452 - DNA, 15 bp, Homo sapiens
tatttgtatttggaa

SEQ ID NO: 1777453 - DNA, 15 bp, Homo sapiens
atttgtatttggaaa

SEQ ID NO: 1777454 - DNA, 15 bp, Homo sapiens
tttgtatttggaaaa

SEQ ID NO: 1777455 - DNA, 15 bp, Homo sapiens
ttgtatttggaaaag

SEQ ID NO: 1777456 - DNA, 15 bp, Homo sapiens
tgtatttggaaaaga

SEQ ID NO: 1777457 - DNA, 15 bp, Homo sapiens
gtatttggaaaagaa

SEQ ID NO: 1777458 - DNA, 15 bp, Homo sapiens
tatttggaaaagaag

SEQ ID NO: 1777459 - DNA, 15 bp, Homo sapiens
atttggaaaagaaga

SEQ ID NO: 1777460 - DNA, 15 bp, Homo sapiens
tttggaaaagaagaa

SEQ ID NO: 1777461 - DNA, 15 bp, Homo sapiens
ttggaaaagaagaaa

SEQ ID NO: 1777462 - DNA, 15 bp, Homo sapiens
tggaaaagaagaaat

SEQ ID NO: 1777463 - DNA, 15 bp, Homo sapiens
ggaaaagaagaaata

SEQ ID NO: 1777464 - DNA, 15 bp, Homo sapiens
gaaaagaagaaataa

SEQ ID NO: 1777465 - DNA, 15 bp, Homo sapiens
aaaagaagaaataaa

SEQ ID NO: 1777466 - DNA, 15 bp, Homo sapiens
aaagaagaaataaat

SEQ ID NO: 1777467 - DNA, 15 bp, Homo sapiens
aagaagaaataaata

SEQ ID NO: 1777468 - DNA, 15 bp, Homo sapiens
agaagaaataaatat

SEQ ID NO: 1777469 - DNA, 15 bp, Homo sapiens
gaagaaataaatata

SEQ ID NO: 1777470 - DNA, 15 bp, Homo sapiens
aagaaataaatatac

SEQ ID NO: 1777471 - DNA, 15 bp, Homo sapiens
agaaataaatataca

SEQ ID NO: 1777472 - DNA, 15 bp, Homo sapiens
gaaataaatatacaa

SEQ ID NO: 1777473 - DNA, 15 bp, Homo sapiens
aaataaatatacaat

SEQ ID NO: 1777474 - DNA, 15 bp, Homo sapiens
aataaatatacaata

SEQ ID NO: 1777475 - DNA, 15 bp, Homo sapiens
ataaatatacaataa

SEQ ID NO: 1777476 - DNA, 15 bp, Homo sapiens
taaatatacaataat

SEQ ID NO: 1777477 - DNA, 15 bp, Homo sapiens
aaatatacaataatt

SEQ ID NO: 1777478 - DNA, 15 bp, Homo sapiens
aatatacaataattg

SEQ ID NO: 1777479 - DNA, 15 bp, Homo sapiens
atatacaataattga

SEQ ID NO: 1777480 - DNA, 15 bp, Homo sapiens
tatacaataattgaa

SEQ ID NO: 1777481 - DNA, 15 bp, Homo sapiens
atacaataattgaaa

SEQ ID NO: 1777482 - DNA, 15 bp, Homo sapiens
tacaataattgaaat

SEQ ID NO: 1777483 - DNA, 15 bp, Homo sapiens
acaataattgaaata

SEQ ID NO: 1777484 - DNA, 15 bp, Homo sapiens
caataattgaaatag

SEQ ID NO: 1777485 - DNA, 15 bp, Homo sapiens
aataattgaaatagg

SEQ ID NO: 1777486 - DNA, 15 bp, Homo sapiens
ataattgaaataggt

SEQ ID NO: 1777487 - DNA, 15 bp, Homo sapiens
taattgaaataggtt

SEQ ID NO: 1777488 - DNA, 15 bp, Homo sapiens
aattgaaataggttc

SEQ ID NO: 1777489 - DNA, 15 bp, Homo sapiens
attgaaataggttca

SEQ ID NO: 1777490 - DNA, 15 bp, Homo sapiens
ttgaaataggttcaa

SEQ ID NO: 1777491 - DNA, 15 bp, Homo sapiens
tgaaataggttcaag

SEQ ID NO: 1777492 - DNA, 15 bp, Homo sapiens
gaaataggttcaaga

SEQ ID NO: 1777493 - DNA, 15 bp, Homo sapiens
aaataggttcaagaa

SEQ ID NO: 1777494 - DNA, 15 bp, Homo sapiens
aataggttcaagaat

SEQ ID NO: 1777495 - DNA, 15 bp, Homo sapiens
ataggttcaagaatc

SEQ ID NO: 1777496 - DNA, 15 bp, Homo sapiens
taggttcaagaatca

SEQ ID NO: 1777497 - DNA, 15 bp, Homo sapiens
gttcaagaatcaagc

SEQ ID NO: 1777498 - DNA, 15 bp, Homo sapiens
ttcaagaatcaagct

SEQ ID NO: 1777499 - DNA, 15 bp, Homo sapiens
tcaagaatcaagctc

SEQ ID NO: 1777500 - DNA, 15 bp, Homo sapiens
caagaatcaagctcg

SEQ ID NO: 1777501 - DNA, 15 bp, Homo sapiens
aagaatcaagctcga

SEQ ID NO: 1777502 - DNA, 15 bp, Homo sapiens
agaatcaagctcgat

SEQ ID NO: 1777503 - DNA, 15 bp, Homo sapiens
gaatcaagctcgatt

SEQ ID NO: 1777504 - DNA, 15 bp, Homo sapiens
aatcaagctcgattt

SEQ ID NO: 1777505 - DNA, 15 bp, Homo sapiens
atcaagctcgatttg

SEQ ID NO: 1777506 - DNA, 15 bp, Homo sapiens
tcaagctcgatttgt

SEQ ID NO: 1777507 - DNA, 15 bp, Homo sapiens
caagctcgatttgtt

SEQ ID NO: 1777508 - DNA, 15 bp, Homo sapiens
aagctcgatttgttt

SEQ ID NO: 1777509 - DNA, 15 bp, Homo sapiens
agctcgatttgtttc

SEQ ID NO: 1777510 - DNA, 15 bp, Homo sapiens
gctcgatttgtttcc

SEQ ID NO: 1777511 - DNA, 15 bp, Homo sapiens
ctcgatttgtttcca

SEQ ID NO: 1777512 - DNA, 15 bp, Homo sapiens
tcgatttgtttccaa

SEQ ID NO: 1777513 - DNA, 15 bp, Homo sapiens
cgatttgtttccaag

SEQ ID NO: 1777514 - DNA, 15 bp, Homo sapiens
gatttgtttccaaga

SEQ ID NO: 1777515 - DNA, 15 bp, Homo sapiens
atttgtttccaagac

SEQ ID NO: 1777516 - DNA, 15 bp, Homo sapiens
tttgtttccaagact

SEQ ID NO: 1777517 - DNA, 15 bp, Homo sapiens
ttgtttccaagactt

SEQ ID NO: 1777518 - DNA, 15 bp, Homo sapiens
tgtttccaagacttg

SEQ ID NO: 1777519 - DNA, 15 bp, Homo sapiens
gtttccaagacttgg

SEQ ID NO: 1777520 - DNA, 15 bp, Homo sapiens
tttccaagacttgga

SEQ ID NO: 1777521 - DNA, 15 bp, Homo sapiens
ttccaagacttggaa

SEQ ID NO: 1777522 - DNA, 15 bp, Homo sapiens
tccaagacttggaag

SEQ ID NO: 1777523 - DNA, 15 bp, Homo sapiens
ccaagacttggaaga

SEQ ID NO: 1777524 - DNA, 15 bp, Homo sapiens
caagacttggaagaa

SEQ ID NO: 1777525 - DNA, 15 bp, Homo sapiens
aagacttggaagaac

SEQ ID NO: 1777526 - DNA, 15 bp, Homo sapiens
agacttggaagaact

SEQ ID NO: 1777527 - DNA, 15 bp, Homo sapiens
gacttggaagaactt

SEQ ID NO: 1777528 - DNA, 15 bp, Homo sapiens
acttggaagaacttc

SEQ ID NO: 1777529 - DNA, 15 bp, Homo sapiens
cttggaagaacttct

SEQ ID NO: 1777530 - DNA, 15 bp, Homo sapiens
ttggaagaacttctt

SEQ ID NO: 1777531 - DNA, 15 bp, Homo sapiens
tggaagaacttcttt

SEQ ID NO: 1777532 - DNA, 15 bp, Homo sapiens
ggaagaacttctttt

SEQ ID NO: 1777533 - DNA, 15 bp, Homo sapiens
gaagaacttcttttg

SEQ ID NO: 1777534 - DNA, 15 bp, Homo sapiens
aagaacttcttttgt

SEQ ID NO: 1777535 - DNA, 15 bp, Homo sapiens
agaacttcttttgta

SEQ ID NO: 1777536 - DNA, 15 bp, Homo sapiens
gaacttcttttgtac

SEQ ID NO: 1777537 - DNA, 15 bp, Homo sapiens
aacttcttttgtact

SEQ ID NO: 1777538 - DNA, 15 bp, Homo sapiens
acttcttttgtactg

SEQ ID NO: 1777539 - DNA, 15 bp, Homo sapiens
cttcttttgtactgt

SEQ ID NO: 1777540 - DNA, 15 bp, Homo sapiens
tcttttgtactgttc

SEQ ID NO: 1777541 - DNA, 15 bp, Homo sapiens
cttttgtactgttcc

SEQ ID NO: 1777542 - DNA, 15 bp, Homo sapiens
ttttgtactgttcca

SEQ ID NO: 1777543 - DNA, 15 bp, Homo sapiens
tttgtactgttccag

SEQ ID NO: 1777544 - DNA, 15 bp, Homo sapiens
ttgtactgttccagt

SEQ ID NO: 1777545 - DNA, 15 bp, Homo sapiens
tgtactgttccagtt

SEQ ID NO: 1777546 - DNA, 15 bp, Homo sapiens
gtactgttccagttc

SEQ ID NO: 1777547 - DNA, 15 bp, Homo sapiens
tactgttccagttcc

SEQ ID NO: 1777548 - DNA, 15 bp, Homo sapiens
actgttccagttcct

SEQ ID NO: 1777549 - DNA, 15 bp, Homo sapiens
ctgttccagttccta

SEQ ID NO: 1777550 - DNA, 15 bp, Homo sapiens
tgttccagttcctaa

SEQ ID NO: 1777551 - DNA, 15 bp, Homo sapiens
gttccagttcctaaa

SEQ ID NO: 1777552 - DNA, 15 bp, Homo sapiens
ttccagttcctaaaa

SEQ ID NO: 1777553 - DNA, 15 bp, Homo sapiens
tccagttcctaaaac

SEQ ID NO: 1777554 - DNA, 15 bp, Homo sapiens
ccagttcctaaaaca

SEQ ID NO: 1777555 - DNA, 15 bp, Homo sapiens
cagttcctaaaacaa

SEQ ID NO: 1777556 - DNA, 15 bp, Homo sapiens
agttcctaaaacaaa

SEQ ID NO: 1777557 - DNA, 15 bp, Homo sapiens
gttcctaaaacaaaa

SEQ ID NO: 1777558 - DNA, 15 bp, Homo sapiens
ttcctaaaacaaaaa

SEQ ID NO: 1777559 - DNA, 15 bp, Homo sapiens
tcctaaaacaaaaat

SEQ ID NO: 1777560 - DNA, 15 bp, Homo sapiens
cctaaaacaaaaata

SEQ ID NO: 1777561 - DNA, 15 bp, Homo sapiens
ctaaaacaaaaatat

SEQ ID NO: 1777562 - DNA, 15 bp, Homo sapiens
taaaacaaaaatatg

SEQ ID NO: 1777563 - DNA, 15 bp, Homo sapiens
aaaacaaaaatatgt

SEQ ID NO: 1777564 - DNA, 15 bp, Homo sapiens
aaacaaaaatatgta

SEQ ID NO: 1777565 - DNA, 15 bp, Homo sapiens
aacaaaaatatgtat

SEQ ID NO: 1777566 - DNA, 15 bp, Homo sapiens
acaaaaatatgtatc

SEQ ID NO: 1777567 - DNA, 15 bp, Homo sapiens
caaaaatatgtatca

SEQ ID NO: 1777568 - DNA, 15 bp, Homo sapiens
aaaaatatgtatcac

SEQ ID NO: 1777569 - DNA, 15 bp, Homo sapiens
aaaatatgtatcact

SEQ ID NO: 1777570 - DNA, 15 bp, Homo sapiens
aaatatgtatcactt

SEQ ID NO: 1777571 - DNA, 15 bp, Homo sapiens
aatatgtatcacttt

SEQ ID NO: 1777572 - DNA, 15 bp, Homo sapiens
atatgtatcacttta

SEQ ID NO: 1777573 - DNA, 15 bp, Homo sapiens
tatgtatcactttaa

SEQ ID NO: 1777574 - DNA, 15 bp, Homo sapiens
atgtatcactttaag

SEQ ID NO: 1777575 - DNA, 15 bp, Homo sapiens
tgtatcactttaaga

SEQ ID NO: 1777576 - DNA, 15 bp, Homo sapiens
gtatcactttaagaa

SEQ ID NO: 1777577 - DNA, 15 bp, Homo sapiens
tatcactttaagaaa

SEQ ID NO: 1777578 - DNA, 15 bp, Homo sapiens
atcactttaagaaaa

SEQ ID NO: 1777579 - DNA, 15 bp, Homo sapiens
tcactttaagaaaaa

SEQ ID NO: 1777580 - DNA, 15 bp, Homo sapiens
cactttaagaaaaat

SEQ ID NO: 1777581 - DNA, 15 bp, Homo sapiens
actttaagaaaaatc

SEQ ID NO: 1777582 - DNA, 15 bp, Homo sapiens
ctttaagaaaaatca

SEQ ID NO: 1777583 - DNA, 15 bp, Homo sapiens
tttaagaaaaatcaa

SEQ ID NO: 1777584 - DNA, 15 bp, Homo sapiens
ttaagaaaaatcaac

SEQ ID NO: 1777585 - DNA, 15 bp, Homo sapiens
taagaaaaatcaact

SEQ ID NO: 1777586 - DNA, 15 bp, Homo sapiens
aagaaaaatcaactt

SEQ ID NO: 1777587 - DNA, 15 bp, Homo sapiens
agaaaaatcaacttt

SEQ ID NO: 1777588 - DNA, 15 bp, Homo sapiens
gaaaaatcaacttta

SEQ ID NO: 1777589 - DNA, 15 bp, Homo sapiens
aaaaatcaactttac

SEQ ID NO: 1777590 - DNA, 15 bp, Homo sapiens
aaaatcaactttact

SEQ ID NO: 1777591 - DNA, 15 bp, Homo sapiens
aaatcaactttacta

SEQ ID NO: 1777592 - DNA, 15 bp, Homo sapiens
aatcaactttactaa

SEQ ID NO: 1777593 - DNA, 15 bp, Homo sapiens
atcaactttactaat

SEQ ID NO: 1777594 - DNA, 15 bp, Homo sapiens
tcaactttactaatt

SEQ ID NO: 1777595 - DNA, 15 bp, Homo sapiens
caactttactaattc

SEQ ID NO: 1777596 - DNA, 15 bp, Homo sapiens
aactttactaattca

SEQ ID NO: 1777597 - DNA, 15 bp, Homo sapiens
actttactaattcaa

SEQ ID NO: 1777598 - DNA, 15 bp, Homo sapiens
ctttactaattcaag

SEQ ID NO: 1777599 - DNA, 15 bp, Homo sapiens
tttactaattcaagg

SEQ ID NO: 1777600 - DNA, 15 bp, Homo sapiens
ttactaattcaagga

SEQ ID NO: 1777601 - DNA, 15 bp, Homo sapiens
tactaattcaaggag

SEQ ID NO: 1777602 - DNA, 15 bp, Homo sapiens
actaattcaaggagg

SEQ ID NO: 1777603 - DNA, 15 bp, Homo sapiens
ctaattcaaggaggc

SEQ ID NO: 1777604 - DNA, 15 bp, Homo sapiens
taattcaaggaggca

SEQ ID NO: 1777605 - DNA, 15 bp, Homo sapiens
aattcaaggaggcac

SEQ ID NO: 1777606 - DNA, 15 bp, Homo sapiens
attcaaggaggcacc

SEQ ID NO: 1777607 - DNA, 15 bp, Homo sapiens
ttcaaggaggcacct

SEQ ID NO: 1777608 - DNA, 15 bp, Homo sapiens
tcaaggaggcacctt

SEQ ID NO: 1777609 - DNA, 15 bp, Homo sapiens
caaggaggcacctta

SEQ ID NO: 1777610 - DNA, 15 bp, Homo sapiens
aaggaggcaccttaa

SEQ ID NO: 1777611 - DNA, 15 bp, Homo sapiens
aggaggcaccttaaa

SEQ ID NO: 1777612 - DNA, 15 bp, Homo sapiens
ggaggcaccttaaaa

SEQ ID NO: 1777613 - DNA, 15 bp, Homo sapiens
gaggcaccttaaaac

SEQ ID NO: 1777614 - DNA, 15 bp, Homo sapiens
aggcaccttaaaact

SEQ ID NO: 1777615 - DNA, 15 bp, Homo sapiens
ggcaccttaaaactg

SEQ ID NO: 1777616 - DNA, 15 bp, Homo sapiens
gcaccttaaaactgc

SEQ ID NO: 1777617 - DNA, 15 bp, Homo sapiens
caccttaaaactgcc

SEQ ID NO: 1777618 - DNA, 15 bp, Homo sapiens
accttaaaactgcct

SEQ ID NO: 1777619 - DNA, 15 bp, Homo sapiens
ccttaaaactgcctt

SEQ ID NO: 1777620 - DNA, 15 bp, Homo sapiens
cttaaaactgccttc

SEQ ID NO: 1777621 - DNA, 15 bp, Homo sapiens
ttaaaactgccttct

SEQ ID NO: 1777622 - DNA, 15 bp, Homo sapiens
taaaactgccttctc

SEQ ID NO: 1777623 - DNA, 15 bp, Homo sapiens
aaaactgccttctca

SEQ ID NO: 1777624 - DNA, 15 bp, Homo sapiens
aaactgccttctcat

SEQ ID NO: 1777625 - DNA, 15 bp, Homo sapiens
aactgccttctcatt

SEQ ID NO: 1777626 - DNA, 15 bp, Homo sapiens
actgccttctcattt

SEQ ID NO: 1777627 - DNA, 15 bp, Homo sapiens
ctgccttctcatttt

SEQ ID NO: 1777628 - DNA, 15 bp, Homo sapiens
tgccttctcattttt

SEQ ID NO: 1777629 - DNA, 15 bp, Homo sapiens
gccttctcatttttt

SEQ ID NO: 1777630 - DNA, 15 bp, Homo sapiens
ccttctcatttttta

SEQ ID NO: 1777631 - DNA, 15 bp, Homo sapiens
cttctcattttttag

SEQ ID NO: 1777632 - DNA, 15 bp, Homo sapiens
ttctcattttttaga

SEQ ID NO: 1777633 - DNA, 15 bp, Homo sapiens
tctcattttttagat

SEQ ID NO: 1777634 - DNA, 15 bp, Homo sapiens
ctcattttttagata

SEQ ID NO: 1777635 - DNA, 15 bp, Homo sapiens
tcattttttagatat

SEQ ID NO: 1777636 - DNA, 15 bp, Homo sapiens
cattttttagatata

SEQ ID NO: 1777637 - DNA, 15 bp, Homo sapiens
attttttagatatat

SEQ ID NO: 1777638 - DNA, 15 bp, Homo sapiens
ttttttagatatatc

SEQ ID NO: 1777639 - DNA, 15 bp, Homo sapiens
tttttagatatatca

SEQ ID NO: 1777640 - DNA, 15 bp, Homo sapiens
ttttagatatatcaa

SEQ ID NO: 1777641 - DNA, 15 bp, Homo sapiens
tttagatatatcaat

SEQ ID NO: 1777642 - DNA, 15 bp, Homo sapiens
ttagatatatcaatg

SEQ ID NO: 1777643 - DNA, 15 bp, Homo sapiens
tagatatatcaatga

SEQ ID NO: 1777644 - DNA, 15 bp, Homo sapiens
agatatatcaatgaa

SEQ ID NO: 1777645 - DNA, 15 bp, Homo sapiens
gatatatcaatgaat

SEQ ID NO: 1777646 - DNA, 15 bp, Homo sapiens
atatatcaatgaatc

SEQ ID NO: 1777647 - DNA, 15 bp, Homo sapiens
tatatcaatgaatcc

SEQ ID NO: 1777648 - DNA, 15 bp, Homo sapiens
atatcaatgaatcct

SEQ ID NO: 1777649 - DNA, 15 bp, Homo sapiens
tatcaatgaatcctt

SEQ ID NO: 1777650 - DNA, 15 bp, Homo sapiens
atcaatgaatcctta

SEQ ID NO: 1777651 - DNA, 15 bp, Homo sapiens
tcaatgaatccttag

SEQ ID NO: 1777652 - DNA, 15 bp, Homo sapiens
caatgaatccttagt

SEQ ID NO: 1777653 - DNA, 15 bp, Homo sapiens
aatgaatccttagta

SEQ ID NO: 1777654 - DNA, 15 bp, Homo sapiens
atgaatccttagtag

SEQ ID NO: 1777655 - DNA, 15 bp, Homo sapiens
tgaatccttagtagc

SEQ ID NO: 1777656 - DNA, 15 bp, Homo sapiens
gaatccttagtagca

SEQ ID NO: 1777657 - DNA, 15 bp, Homo sapiens
aatccttagtagcat

SEQ ID NO: 1777658 - DNA, 15 bp, Homo sapiens
atccttagtagcatt

SEQ ID NO: 1777659 - DNA, 15 bp, Homo sapiens
tccttagtagcatta

SEQ ID NO: 1777660 - DNA, 15 bp, Homo sapiens
ccttagtagcattat

SEQ ID NO: 1777661 - DNA, 15 bp, Homo sapiens
cttagtagcattatc

SEQ ID NO: 1777662 - DNA, 15 bp, Homo sapiens
ttagtagcattatca

SEQ ID NO: 1777663 - DNA, 15 bp, Homo sapiens
tagtagcattatcat

SEQ ID NO: 1777664 - DNA, 15 bp, Homo sapiens
agtagcattatcatt

SEQ ID NO: 1777665 - DNA, 15 bp, Homo sapiens
gtagcattatcattc

SEQ ID NO: 1777666 - DNA, 15 bp, Homo sapiens
tagcattatcattct

SEQ ID NO: 1777667 - DNA, 15 bp, Homo sapiens
agcattatcattcta

SEQ ID NO: 1777668 - DNA, 15 bp, Homo sapiens
gcattatcattctaa

SEQ ID NO: 1777669 - DNA, 15 bp, Homo sapiens
cattatcattctaaa

SEQ ID NO: 1777670 - DNA, 15 bp, Homo sapiens
attatcattctaaat

SEQ ID NO: 1777671 - DNA, 15 bp, Homo sapiens
ttatcattctaaata

SEQ ID NO: 1777672 - DNA, 15 bp, Homo sapiens
tatcattctaaatat

SEQ ID NO: 1777673 - DNA, 15 bp, Homo sapiens
atcattctaaatatt

SEQ ID NO: 1777674 - DNA, 15 bp, Homo sapiens
tcattctaaatattt

SEQ ID NO: 1777675 - DNA, 15 bp, Homo sapiens
cattctaaatatttc

SEQ ID NO: 1777676 - DNA, 15 bp, Homo sapiens
attctaaatatttct

SEQ ID NO: 1777677 - DNA, 15 bp, Homo sapiens
ttctaaatatttctt

SEQ ID NO: 1777678 - DNA, 15 bp, Homo sapiens
tctaaatatttcttg

SEQ ID NO: 1777679 - DNA, 15 bp, Homo sapiens
ctaaatatttcttgc

SEQ ID NO: 1777680 - DNA, 15 bp, Homo sapiens
taaatatttcttgcc

SEQ ID NO: 1777681 - DNA, 15 bp, Homo sapiens
aaatatttcttgcca

SEQ ID NO: 1777682 - DNA, 15 bp, Homo sapiens
aatatttcttgccaa

SEQ ID NO: 1777683 - DNA, 15 bp, Homo sapiens
atatttcttgccaat

SEQ ID NO: 1777684 - DNA, 15 bp, Homo sapiens
tatttcttgccaatt

SEQ ID NO: 1777685 - DNA, 15 bp, Homo sapiens
atttcttgccaatta

SEQ ID NO: 1777686 - DNA, 15 bp, Homo sapiens
tttcttgccaattat

SEQ ID NO: 1777687 - DNA, 15 bp, Homo sapiens
ttcttgccaattatt

SEQ ID NO: 1777688 - DNA, 15 bp, Homo sapiens
tcttgccaattattt

SEQ ID NO: 1777689 - DNA, 15 bp, Homo sapiens
cttgccaattatttt

SEQ ID NO: 1777690 - DNA, 15 bp, Homo sapiens
ttgccaattattttg

SEQ ID NO: 1777691 - DNA, 15 bp, Homo sapiens
tgccaattattttgt

SEQ ID NO: 1777692 - DNA, 15 bp, Homo sapiens
gccaattattttgta

SEQ ID NO: 1777693 - DNA, 15 bp, Homo sapiens
ccaattattttgtaa

SEQ ID NO: 1777694 - DNA, 15 bp, Homo sapiens
caattattttgtaaa

SEQ ID NO: 1777695 - DNA, 15 bp, Homo sapiens
aattattttgtaaat

SEQ ID NO: 1777696 - DNA, 15 bp, Homo sapiens
attattttgtaaatg

SEQ ID NO: 1777697 - DNA, 15 bp, Homo sapiens
ttattttgtaaatga

SEQ ID NO: 1777698 - DNA, 15 bp, Homo sapiens
tattttgtaaatgat

SEQ ID NO: 1777699 - DNA, 15 bp, Homo sapiens
attttgtaaatgatt

SEQ ID NO: 1777700 - DNA, 15 bp, Homo sapiens
ttttgtaaatgatta

SEQ ID NO: 1777701 - DNA, 15 bp, Homo sapiens
tttgtaaatgattat

SEQ ID NO: 1777702 - DNA, 15 bp, Homo sapiens
ttgtaaatgattatg

SEQ ID NO: 1777703 - DNA, 15 bp, Homo sapiens
tgtaaatgattatgc

SEQ ID NO: 1777704 - DNA, 15 bp, Homo sapiens
gtaaatgattatgct

SEQ ID NO: 1777705 - DNA, 15 bp, Homo sapiens
taaatgattatgctt

SEQ ID NO: 1777706 - DNA, 15 bp, Homo sapiens
aaatgattatgctta

SEQ ID NO: 1777707 - DNA, 15 bp, Homo sapiens
aatgattatgcttag

SEQ ID NO: 1777708 - DNA, 15 bp, Homo sapiens
atgattatgcttagg

SEQ ID NO: 1777709 - DNA, 15 bp, Homo sapiens
tgattatgcttagga

SEQ ID NO: 1777710 - DNA, 15 bp, Homo sapiens
gattatgcttaggac

SEQ ID NO: 1777711 - DNA, 15 bp, Homo sapiens
attatgcttaggact

SEQ ID NO: 1777712 - DNA, 15 bp, Homo sapiens
ttatgcttaggactt

SEQ ID NO: 1777713 - DNA, 15 bp, Homo sapiens
tatgcttaggactta

SEQ ID NO: 1777714 - DNA, 15 bp, Homo sapiens
atgcttaggacttat

SEQ ID NO: 1777715 - DNA, 15 bp, Homo sapiens
tgcttaggacttatt

SEQ ID NO: 1777716 - DNA, 15 bp, Homo sapiens
gcttaggacttattt

SEQ ID NO: 1777717 - DNA, 15 bp, Homo sapiens
cttaggacttatttt

SEQ ID NO: 1777718 - DNA, 15 bp, Homo sapiens
ttaggacttattttc

SEQ ID NO: 1777719 - DNA, 15 bp, Homo sapiens
taggacttattttct

SEQ ID NO: 1777720 - DNA, 15 bp, Homo sapiens
aggacttattttcta

SEQ ID NO: 1777721 - DNA, 15 bp, Homo sapiens
ggacttattttctag

SEQ ID NO: 1777722 - DNA, 15 bp, Homo sapiens
gacttattttctaga

SEQ ID NO: 1777723 - DNA, 15 bp, Homo sapiens
acttattttctagaa

SEQ ID NO: 1777724 - DNA, 15 bp, Homo sapiens
cttattttctagaaa

SEQ ID NO: 1777725 - DNA, 15 bp, Homo sapiens
ttattttctagaaat

SEQ ID NO: 1777726 - DNA, 15 bp, Homo sapiens
tattttctagaaata

SEQ ID NO: 1777727 - DNA, 15 bp, Homo sapiens
attttctagaaatac

SEQ ID NO: 1777728 - DNA, 15 bp, Homo sapiens
ttttctagaaatact

SEQ ID NO: 1777729 - DNA, 15 bp, Homo sapiens
tttctagaaatactg

SEQ ID NO: 1777730 - DNA, 15 bp, Homo sapiens
ttctagaaatactgt

SEQ ID NO: 1777731 - DNA, 15 bp, Homo sapiens
tctagaaatactgtc

SEQ ID NO: 1777732 - DNA, 15 bp, Homo sapiens
ctagaaatactgtct

SEQ ID NO: 1777733 - DNA, 15 bp, Homo sapiens
tagaaatactgtctt

SEQ ID NO: 1777734 - DNA, 15 bp, Homo sapiens
agaaatactgtcttc

SEQ ID NO: 1777735 - DNA, 15 bp, Homo sapiens
gaaatactgtcttca

SEQ ID NO: 1777736 - DNA, 15 bp, Homo sapiens
aaatactgtcttcag

SEQ ID NO: 1777737 - DNA, 15 bp, Homo sapiens
aatactgtcttcaga

SEQ ID NO: 1777738 - DNA, 15 bp, Homo sapiens
atactgtcttcagag

SEQ ID NO: 1777739 - DNA, 15 bp, Homo sapiens
tactgtcttcagagt

SEQ ID NO: 1777740 - DNA, 15 bp, Homo sapiens
actgtcttcagagtt

SEQ ID NO: 1777741 - DNA, 15 bp, Homo sapiens
ctgtcttcagagttt

SEQ ID NO: 1777742 - DNA, 15 bp, Homo sapiens
tgtcttcagagtttc

SEQ ID NO: 1777743 - DNA, 15 bp, Homo sapiens
gtcttcagagtttct

SEQ ID NO: 1777744 - DNA, 15 bp, Homo sapiens
tcttcagagtttctg

SEQ ID NO: 1777745 - DNA, 15 bp, Homo sapiens
cttcagagtttctgt

SEQ ID NO: 1777746 - DNA, 15 bp, Homo sapiens
ttcagagtttctgtg

SEQ ID NO: 1777747 - DNA, 15 bp, Homo sapiens
tcagagtttctgtgt

SEQ ID NO: 1777748 - DNA, 15 bp, Homo sapiens
cagagtttctgtgtg

SEQ ID NO: 1777749 - DNA, 15 bp, Homo sapiens
agagtttctgtgtgg

SEQ ID NO: 1777750 - DNA, 15 bp, Homo sapiens
gagtttctgtgtggc

SEQ ID NO: 1777751 - DNA, 15 bp, Homo sapiens
agtttctgtgtggct

SEQ ID NO: 1777752 - DNA, 15 bp, Homo sapiens
gtttctgtgtggcta

SEQ ID NO: 1777753 - DNA, 15 bp, Homo sapiens
tttctgtgtggctaa

SEQ ID NO: 1777754 - DNA, 15 bp, Homo sapiens
ttctgtgtggctaag

SEQ ID NO: 1777755 - DNA, 15 bp, Homo sapiens
tctgtgtggctaagc

SEQ ID NO: 1777756 - DNA, 15 bp, Homo sapiens
ctgtgtggctaagca

SEQ ID NO: 1777757 - DNA, 15 bp, Homo sapiens
tgtgtggctaagcag

SEQ ID NO: 1777758 - DNA, 15 bp, Homo sapiens
gtgtggctaagcagc

SEQ ID NO: 1777759 - DNA, 15 bp, Homo sapiens
tgtggctaagcagca

SEQ ID NO: 1777760 - DNA, 15 bp, Homo sapiens
gtggctaagcagcac

SEQ ID NO: 1777761 - DNA, 15 bp, Homo sapiens
tggctaagcagcact

SEQ ID NO: 1777762 - DNA, 15 bp, Homo sapiens
ggctaagcagcactc

SEQ ID NO: 1777763 - DNA, 15 bp, Homo sapiens
gctaagcagcactca

SEQ ID NO: 1777764 - DNA, 15 bp, Homo sapiens
ctaagcagcactcag

SEQ ID NO: 1777765 - DNA, 15 bp, Homo sapiens
taagcagcactcaga

SEQ ID NO: 1777766 - DNA, 15 bp, Homo sapiens
aagcagcactcagag

SEQ ID NO: 1777767 - DNA, 15 bp, Homo sapiens
agcagcactcagaga

SEQ ID NO: 1777768 - DNA, 15 bp, Homo sapiens
gcagcactcagagat

SEQ ID NO: 1777769 - DNA, 15 bp, Homo sapiens
cagcactcagagatg

SEQ ID NO: 1777770 - DNA, 15 bp, Homo sapiens
agcactcagagatga

SEQ ID NO: 1777771 - DNA, 15 bp, Homo sapiens
gcactcagagatgaa

SEQ ID NO: 1777772 - DNA, 15 bp, Homo sapiens
cactcagagatgaat

SEQ ID NO: 1777773 - DNA, 15 bp, Homo sapiens
actcagagatgaatt

SEQ ID NO: 1777774 - DNA, 15 bp, Homo sapiens
ctcagagatgaattt

SEQ ID NO: 1777775 - DNA, 15 bp, Homo sapiens
tcagagatgaattta

SEQ ID NO: 1777776 - DNA, 15 bp, Homo sapiens
cagagatgaatttat

SEQ ID NO: 1777777 - DNA, 15 bp, Homo sapiens
agagatgaatttatt

SEQ ID NO: 1777778 - DNA, 15 bp, Homo sapiens
gagatgaatttatta

SEQ ID NO: 1777779 - DNA, 15 bp, Homo sapiens
agatgaatttattaa

SEQ ID NO: 1777780 - DNA, 15 bp, Homo sapiens
gatgaatttattaaa

SEQ ID NO: 1777781 - DNA, 15 bp, Homo sapiens
atgaatttattaaac

SEQ ID NO: 1777782 - DNA, 15 bp, Homo sapiens
tgaatttattaaact

SEQ ID NO: 1777783 - DNA, 15 bp, Homo sapiens
gaatttattaaactt

SEQ ID NO: 1777784 - DNA, 15 bp, Homo sapiens
aatttattaaacttt

SEQ ID NO: 1777785 - DNA, 15 bp, Homo sapiens
atttattaaactttc

SEQ ID NO: 1777786 - DNA, 15 bp, Homo sapiens
tttattaaactttca

SEQ ID NO: 1777787 - DNA, 15 bp, Homo sapiens
ttattaaactttcag

SEQ ID NO: 1777788 - DNA, 15 bp, Homo sapiens
tattaaactttcaga

SEQ ID NO: 1777789 - DNA, 15 bp, Homo sapiens
attaaactttcagac

SEQ ID NO: 1777790 - DNA, 15 bp, Homo sapiens
ttaaactttcagaca

SEQ ID NO: 1777791 - DNA, 15 bp, Homo sapiens
taaactttcagacaa

SEQ ID NO: 1777792 - DNA, 15 bp, Homo sapiens
aaactttcagacaaa

SEQ ID NO: 1777793 - DNA, 15 bp, Homo sapiens
aactttcagacaaaa

SEQ ID NO: 1777794 - DNA, 15 bp, Homo sapiens
actttcagacaaaat

SEQ ID NO: 1777795 - DNA, 15 bp, Homo sapiens
ctttcagacaaaatt

SEQ ID NO: 1777796 - DNA, 15 bp, Homo sapiens
tttcagacaaaatta

SEQ ID NO: 1777797 - DNA, 15 bp, Homo sapiens
ttcagacaaaattat

SEQ ID NO: 1777798 - DNA, 15 bp, Homo sapiens
tcagacaaaattatg

SEQ ID NO: 1777799 - DNA, 15 bp, Homo sapiens
cagacaaaattatgt

SEQ ID NO: 1777800 - DNA, 15 bp, Homo sapiens
agacaaaattatgta

SEQ ID NO: 1777801 - DNA, 15 bp, Homo sapiens
gacaaaattatgtac

SEQ ID NO: 1777802 - DNA, 15 bp, Homo sapiens
acaaaattatgtaca

SEQ ID NO: 1777803 - DNA, 15 bp, Homo sapiens
caaaattatgtacat

SEQ ID NO: 1777804 - DNA, 15 bp, Homo sapiens
aaaattatgtacata

SEQ ID NO: 1777805 - DNA, 15 bp, Homo sapiens
aaattatgtacataa

SEQ ID NO: 1777806 - DNA, 15 bp, Homo sapiens
aattatgtacataaa

SEQ ID NO: 1777807 - DNA, 15 bp, Homo sapiens
attatgtacataaac

SEQ ID NO: 1777808 - DNA, 15 bp, Homo sapiens
ttatgtacataaact

SEQ ID NO: 1777809 - DNA, 15 bp, Homo sapiens
tatgtacataaacta

SEQ ID NO: 1777810 - DNA, 15 bp, Homo sapiens
atgtacataaactac

SEQ ID NO: 1777811 - DNA, 15 bp, Homo sapiens
tgtacataaactaca

SEQ ID NO: 1777812 - DNA, 15 bp, Homo sapiens
gtacataaactacat

SEQ ID NO: 1777813 - DNA, 15 bp, Homo sapiens
tacataaactacata

SEQ ID NO: 1777814 - DNA, 15 bp, Homo sapiens
acataaactacataa

SEQ ID NO: 1777815 - DNA, 15 bp, Homo sapiens
cataaactacataat

SEQ ID NO: 1777816 - DNA, 15 bp, Homo sapiens
ataaactacataata

SEQ ID NO: 1777817 - DNA, 15 bp, Homo sapiens
taaactacataatac

SEQ ID NO: 1777818 - DNA, 15 bp, Homo sapiens
aaactacataataca

SEQ ID NO: 1777819 - DNA, 15 bp, Homo sapiens
aactacataatacat

SEQ ID NO: 1777820 - DNA, 15 bp, Homo sapiens
actacataatacata

SEQ ID NO: 1777821 - DNA, 15 bp, Homo sapiens
ctacataatacatat

SEQ ID NO: 1777822 - DNA, 15 bp, Homo sapiens
tacataatacatatg

SEQ ID NO: 1777823 - DNA, 15 bp, Homo sapiens
acataatacatatga

SEQ ID NO: 1777824 - DNA, 15 bp, Homo sapiens
cataatacatatgaa

SEQ ID NO: 1777825 - DNA, 15 bp, Homo sapiens
ataatacatatgaat

SEQ ID NO: 1777826 - DNA, 15 bp, Homo sapiens
taatacatatgaatt

SEQ ID NO: 1777827 - DNA, 15 bp, Homo sapiens
atacatatgaattgt

SEQ ID NO: 1777828 - DNA, 15 bp, Homo sapiens
tacatatgaattgtc

SEQ ID NO: 1777829 - DNA, 15 bp, Homo sapiens
acatatgaattgtct

SEQ ID NO: 1777830 - DNA, 15 bp, Homo sapiens
catatgaattgtctt

SEQ ID NO: 1777831 - DNA, 15 bp, Homo sapiens
atatgaattgtcttt

SEQ ID NO: 1777832 - DNA, 15 bp, Homo sapiens
tatgaattgtctttc

SEQ ID NO: 1777833 - DNA, 15 bp, Homo sapiens
atgaattgtctttca

SEQ ID NO: 1777834 - DNA, 15 bp, Homo sapiens
tgaattgtctttcaa

SEQ ID NO: 1777835 - DNA, 15 bp, Homo sapiens
gaattgtctttcaac

SEQ ID NO: 1777836 - DNA, 15 bp, Homo sapiens
aattgtctttcaact

SEQ ID NO: 1777837 - DNA, 15 bp, Homo sapiens
attgtctttcaacta

SEQ ID NO: 1777838 - DNA, 15 bp, Homo sapiens
ttgtctttcaactaa

SEQ ID NO: 1777839 - DNA, 15 bp, Homo sapiens
tgtctttcaactaat

SEQ ID NO: 1777840 - DNA, 15 bp, Homo sapiens
gtctttcaactaatg

SEQ ID NO: 1777841 - DNA, 15 bp, Homo sapiens
tctttcaactaatga

SEQ ID NO: 1777842 - DNA, 15 bp, Homo sapiens
ctttcaactaatgaa

SEQ ID NO: 1777843 - DNA, 15 bp, Homo sapiens
tttcaactaatgaac

SEQ ID NO: 1777844 - DNA, 15 bp, Homo sapiens
ttcaactaatgaact

SEQ ID NO: 1777845 - DNA, 15 bp, Homo sapiens
tcaactaatgaacta

SEQ ID NO: 1777846 - DNA, 15 bp, Homo sapiens
caactaatgaactag

SEQ ID NO: 1777847 - DNA, 15 bp, Homo sapiens
aactaatgaactaga

SEQ ID NO: 1777848 - DNA, 15 bp, Homo sapiens
actaatgaactagac

SEQ ID NO: 1777849 - DNA, 15 bp, Homo sapiens
ctaatgaactagaca

SEQ ID NO: 1777850 - DNA, 15 bp, Homo sapiens
taatgaactagacat

SEQ ID NO: 1777851 - DNA, 15 bp, Homo sapiens
aatgaactagacatc

SEQ ID NO: 1777852 - DNA, 15 bp, Homo sapiens
atgaactagacatct

SEQ ID NO: 1777853 - DNA, 15 bp, Homo sapiens
tgaactagacatctg

SEQ ID NO: 1777854 - DNA, 15 bp, Homo sapiens
gaactagacatctgt

SEQ ID NO: 1777855 - DNA, 15 bp, Homo sapiens
aactagacatctgtc

SEQ ID NO: 1777856 - DNA, 15 bp, Homo sapiens
actagacatctgtca

SEQ ID NO: 1777857 - DNA, 15 bp, Homo sapiens
ctagacatctgtcat

SEQ ID NO: 1777858 - DNA, 15 bp, Homo sapiens
tagacatctgtcatc

SEQ ID NO: 1777859 - DNA, 15 bp, Homo sapiens
acatctgtcatcctt

SEQ ID NO: 1777860 - DNA, 15 bp, Homo sapiens
catctgtcatccttc

SEQ ID NO: 1777861 - DNA, 15 bp, Homo sapiens
atctgtcatccttca

SEQ ID NO: 1777862 - DNA, 15 bp, Homo sapiens
tctgtcatccttcaa

SEQ ID NO: 1777863 - DNA, 15 bp, Homo sapiens
ctgtcatccttcaag

SEQ ID NO: 1777864 - DNA, 15 bp, Homo sapiens
tgtcatccttcaagt

SEQ ID NO: 1777865 - DNA, 15 bp, Homo sapiens
gtcatccttcaagta

SEQ ID NO: 1777866 - DNA, 15 bp, Homo sapiens
tcatccttcaagtat

SEQ ID NO: 1777867 - DNA, 15 bp, Homo sapiens
catccttcaagtatt

SEQ ID NO: 1777868 - DNA, 15 bp, Homo sapiens
atccttcaagtattc

SEQ ID NO: 1777869 - DNA, 15 bp, Homo sapiens
tccttcaagtattca

SEQ ID NO: 1777870 - DNA, 15 bp, Homo sapiens
ccttcaagtattcaa

SEQ ID NO: 1777871 - DNA, 15 bp, Homo sapiens
cttcaagtattcaaa

SEQ ID NO: 1777872 - DNA, 15 bp, Homo sapiens
ttcaagtattcaaaa

SEQ ID NO: 1777873 - DNA, 15 bp, Homo sapiens
tcaagtattcaaaag

SEQ ID NO: 1777874 - DNA, 15 bp, Homo sapiens
caagtattcaaaagt

SEQ ID NO: 1777875 - DNA, 15 bp, Homo sapiens
aagtattcaaaagtg

SEQ ID NO: 1777876 - DNA, 15 bp, Homo sapiens
agtattcaaaagtga

SEQ ID NO: 1777877 - DNA, 15 bp, Homo sapiens
gtattcaaaagtgat

SEQ ID NO: 1777878 - DNA, 15 bp, Homo sapiens
tattcaaaagtgatc

SEQ ID NO: 1777879 - DNA, 15 bp, Homo sapiens
attcaaaagtgatct

SEQ ID NO: 1777880 - DNA, 15 bp, Homo sapiens
ttcaaaagtgatctt

SEQ ID NO: 1777881 - DNA, 15 bp, Homo sapiens
tcaaaagtgatctta

SEQ ID NO: 1777882 - DNA, 15 bp, Homo sapiens
caaaagtgatcttat

SEQ ID NO: 1777883 - DNA, 15 bp, Homo sapiens
aaaagtgatcttatt

SEQ ID NO: 1777884 - DNA, 15 bp, Homo sapiens
aaagtgatcttattt

SEQ ID NO: 1777885 - DNA, 15 bp, Homo sapiens
aagtgatcttatttt

SEQ ID NO: 1777886 - DNA, 15 bp, Homo sapiens
agtgatcttatttta

SEQ ID NO: 1777887 - DNA, 15 bp, Homo sapiens
gtgatcttattttaa

SEQ ID NO: 1777888 - DNA, 15 bp, Homo sapiens
tgatcttattttaat

SEQ ID NO: 1777889 - DNA, 15 bp, Homo sapiens
gatcttattttaatt

SEQ ID NO: 1777890 - DNA, 15 bp, Homo sapiens
atcttattttaattg

SEQ ID NO: 1777891 - DNA, 15 bp, Homo sapiens
tcttattttaattgt

SEQ ID NO: 1777892 - DNA, 15 bp, Homo sapiens
cttattttaattgtt

SEQ ID NO: 1777893 - DNA, 15 bp, Homo sapiens
ttattttaattgttt

SEQ ID NO: 1777894 - DNA, 15 bp, Homo sapiens
tattttaattgtttg

SEQ ID NO: 1777895 - DNA, 15 bp, Homo sapiens
attttaattgtttgc

SEQ ID NO: 1777896 - DNA, 15 bp, Homo sapiens
ttttaattgtttgct

SEQ ID NO: 1777897 - DNA, 15 bp, Homo sapiens
tttaattgtttgctg

SEQ ID NO: 1777898 - DNA, 15 bp, Homo sapiens
ttaattgtttgctgt

SEQ ID NO: 1777899 - DNA, 15 bp, Homo sapiens
taattgtttgctgtt

SEQ ID NO: 1777900 - DNA, 15 bp, Homo sapiens
aattgtttgctgttc

SEQ ID NO: 1777901 - DNA, 15 bp, Homo sapiens
attgtttgctgttca

SEQ ID NO: 1777902 - DNA, 15 bp, Homo sapiens
ttgtttgctgttcag

SEQ ID NO: 1777903 - DNA, 15 bp, Homo sapiens
tgtttgctgttcagc

SEQ ID NO: 1777904 - DNA, 15 bp, Homo sapiens
gtttgctgttcagct

SEQ ID NO: 1777905 - DNA, 15 bp, Homo sapiens
tttgctgttcagctc

SEQ ID NO: 1777906 - DNA, 15 bp, Homo sapiens
ttgctgttcagctct

SEQ ID NO: 1777907 - DNA, 15 bp, Homo sapiens
tgctgttcagctcta

SEQ ID NO: 1777908 - DNA, 15 bp, Homo sapiens
gctgttcagctctaa

SEQ ID NO: 1777909 - DNA, 15 bp, Homo sapiens
ctgttcagctctaat

SEQ ID NO: 1777910 - DNA, 15 bp, Homo sapiens
tgttcagctctaatc

SEQ ID NO: 1777911 - DNA, 15 bp, Homo sapiens
gttcagctctaatca

SEQ ID NO: 1777912 - DNA, 15 bp, Homo sapiens
ttcagctctaatcaa

SEQ ID NO: 1777913 - DNA, 15 bp, Homo sapiens
tcagctctaatcaaa

SEQ ID NO: 1777914 - DNA, 15 bp, Homo sapiens
cagctctaatcaaaa

SEQ ID NO: 1777915 - DNA, 15 bp, Homo sapiens
agctctaatcaaaaa

SEQ ID NO: 1777916 - DNA, 15 bp, Homo sapiens
gctctaatcaaaaac

SEQ ID NO: 1777917 - DNA, 15 bp, Homo sapiens
ctctaatcaaaaact

SEQ ID NO: 1777918 - DNA, 15 bp, Homo sapiens
tctaatcaaaaactt

SEQ ID NO: 1777919 - DNA, 15 bp, Homo sapiens
ctaatcaaaaacttg

SEQ ID NO: 1777920 - DNA, 15 bp, Homo sapiens
taatcaaaaacttgg

SEQ ID NO: 1777921 - DNA, 15 bp, Homo sapiens
aatcaaaaacttggt

SEQ ID NO: 1777922 - DNA, 15 bp, Homo sapiens
atcaaaaacttggtt

SEQ ID NO: 1777923 - DNA, 15 bp, Homo sapiens
tcaaaaacttggttg

SEQ ID NO: 1777924 - DNA, 15 bp, Homo sapiens
caaaaacttggttga

SEQ ID NO: 1777925 - DNA, 15 bp, Homo sapiens
aaaaacttggttgaa

SEQ ID NO: 1777926 - DNA, 15 bp, Homo sapiens
aaaacttggttgaag

SEQ ID NO: 1777927 - DNA, 15 bp, Homo sapiens
aaacttggttgaagt

SEQ ID NO: 1777928 - DNA, 15 bp, Homo sapiens
aacttggttgaagtt

SEQ ID NO: 1777929 - DNA, 15 bp, Homo sapiens
acttggttgaagtta

SEQ ID NO: 1777930 - DNA, 15 bp, Homo sapiens
cttggttgaagttag

SEQ ID NO: 1777931 - DNA, 15 bp, Homo sapiens
ttggttgaagttagc

SEQ ID NO: 1777932 - DNA, 15 bp, Homo sapiens
tggttgaagttagca

SEQ ID NO: 1777933 - DNA, 15 bp, Homo sapiens
ggttgaagttagcaa

SEQ ID NO: 1777934 - DNA, 15 bp, Homo sapiens
gttgaagttagcaaa

SEQ ID NO: 1777935 - DNA, 15 bp, Homo sapiens
ttgaagttagcaaaa

SEQ ID NO: 1777936 - DNA, 15 bp, Homo sapiens
tgaagttagcaaaat

SEQ ID NO: 1777937 - DNA, 15 bp, Homo sapiens
gaagttagcaaaata

SEQ ID NO: 1777938 - DNA, 15 bp, Homo sapiens
aagttagcaaaatat

SEQ ID NO: 1777939 - DNA, 15 bp, Homo sapiens
agttagcaaaatatt

SEQ ID NO: 1777940 - DNA, 15 bp, Homo sapiens
gttagcaaaatattt

SEQ ID NO: 1777941 - DNA, 15 bp, Homo sapiens
ttagcaaaatattta

SEQ ID NO: 1777942 - DNA, 15 bp, Homo sapiens
tagcaaaatatttaa

SEQ ID NO: 1777943 - DNA, 15 bp, Homo sapiens
agcaaaatatttaaa

SEQ ID NO: 1777944 - DNA, 15 bp, Homo sapiens
gcaaaatatttaaaa

SEQ ID NO: 1777945 - DNA, 15 bp, Homo sapiens
caaaatatttaaaaa

SEQ ID NO: 1777946 - DNA, 15 bp, Homo sapiens
aaaatatttaaaaaa

SEQ ID NO: 1777947 - DNA, 15 bp, Homo sapiens
aaatatttaaaaaat

SEQ ID NO: 1777948 - DNA, 15 bp, Homo sapiens
aatatttaaaaaata

SEQ ID NO: 1777949 - DNA, 15 bp, Homo sapiens
atatttaaaaaatac

SEQ ID NO: 1777950 - DNA, 15 bp, Homo sapiens
tatttaaaaaataca

SEQ ID NO: 1777951 - DNA, 15 bp, Homo sapiens
atttaaaaaatacat

SEQ ID NO: 1777952 - DNA, 15 bp, Homo sapiens
tttaaaaaatacata

SEQ ID NO: 1777953 - DNA, 15 bp, Homo sapiens
ttaaaaaatacatac

SEQ ID NO: 1777954 - DNA, 15 bp, Homo sapiens
taaaaaatacatacc

SEQ ID NO: 1777955 - DNA, 15 bp, Homo sapiens
aaaaaatacataccc

SEQ ID NO: 1777956 - DNA, 15 bp, Homo sapiens
aaaaatacataccca

SEQ ID NO: 1777957 - DNA, 15 bp, Homo sapiens
aaaatacatacccag

SEQ ID NO: 1777958 - DNA, 15 bp, Homo sapiens
aaatacatacccagg

SEQ ID NO: 1777959 - DNA, 15 bp, Homo sapiens
aatacatacccaggc

SEQ ID NO: 1777960 - DNA, 15 bp, Homo sapiens
atacatacccaggct

SEQ ID NO: 1777961 - DNA, 15 bp, Homo sapiens
tacatacccaggctg

SEQ ID NO: 1777962 - DNA, 15 bp, Homo sapiens
acatacccaggctgg

SEQ ID NO: 1777963 - DNA, 15 bp, Homo sapiens
catacccaggctggg

SEQ ID NO: 1777964 - DNA, 15 bp, Homo sapiens
atacccaggctgggt

SEQ ID NO: 1777965 - DNA, 15 bp, Homo sapiens
tacccaggctgggtg

SEQ ID NO: 1777966 - DNA, 15 bp, Homo sapiens
acccaggctgggtgc

SEQ ID NO: 1777967 - DNA, 15 bp, Homo sapiens
cccaggctgggtgcg

SEQ ID NO: 1777968 - DNA, 15 bp, Homo sapiens
ccaggctgggtgcgg

SEQ ID NO: 1777969 - DNA, 15 bp, Homo sapiens
gtgcggtggctcatt

SEQ ID NO: 1777970 - DNA, 15 bp, Homo sapiens
tgcggtggctcattc

SEQ ID NO: 1777971 - DNA, 15 bp, Homo sapiens
gcggtggctcattcc

SEQ ID NO: 1777972 - DNA, 15 bp, Homo sapiens
cggtggctcattcct

SEQ ID NO: 1777973 - DNA, 15 bp, Homo sapiens
ggtggctcattccta

SEQ ID NO: 1777974 - DNA, 15 bp, Homo sapiens
gtggctcattcctat

SEQ ID NO: 1777975 - DNA, 15 bp, Homo sapiens
tggctcattcctata

SEQ ID NO: 1777976 - DNA, 15 bp, Homo sapiens
ggctcattcctatag

SEQ ID NO: 1777977 - DNA, 15 bp, Homo sapiens
gctcattcctatagt

SEQ ID NO: 1777978 - DNA, 15 bp, Homo sapiens
ctcattcctatagtc

SEQ ID NO: 1777979 - DNA, 15 bp, Homo sapiens
tcattcctatagtcc

SEQ ID NO: 1777980 - DNA, 15 bp, Homo sapiens
cattcctatagtccc

SEQ ID NO: 1777981 - DNA, 15 bp, Homo sapiens
attcctatagtccca

SEQ ID NO: 1777982 - DNA, 15 bp, Homo sapiens
ttcctatagtcccag

SEQ ID NO: 1777983 - DNA, 15 bp, Homo sapiens
tcctatagtcccagc

SEQ ID NO: 1777984 - DNA, 15 bp, Homo sapiens
cctatagtcccagca

SEQ ID NO: 1777985 - DNA, 15 bp, Homo sapiens
ctatagtcccagcac

SEQ ID NO: 1777986 - DNA, 15 bp, Homo sapiens
tatagtcccagcact

SEQ ID NO: 1777987 - DNA, 15 bp, Homo sapiens
atagtcccagcactt

SEQ ID NO: 1777988 - DNA, 15 bp, Homo sapiens
tagtcccagcacttt

SEQ ID NO: 1777989 - DNA, 15 bp, Homo sapiens
agtcccagcactttg

SEQ ID NO: 1777990 - DNA, 15 bp, Homo sapiens
gtcccagcactttgg

SEQ ID NO: 1777991 - DNA, 15 bp, Homo sapiens
actttgggaggctgg

SEQ ID NO: 1777992 - DNA, 15 bp, Homo sapiens
ctttgggaggctggg

SEQ ID NO: 1777993 - DNA, 15 bp, Homo sapiens
tttgggaggctgggg

SEQ ID NO: 1777994 - DNA, 15 bp, Homo sapiens
ttgggaggctggggc

SEQ ID NO: 1777995 - DNA, 15 bp, Homo sapiens
tgggaggctggggca

SEQ ID NO: 1777996 - DNA, 15 bp, Homo sapiens
gggaggctggggcag

SEQ ID NO: 1777997 - DNA, 15 bp, Homo sapiens
ggaggctggggcagg

SEQ ID NO: 1777998 - DNA, 15 bp, Homo sapiens
gaggctggggcagga

SEQ ID NO: 1777999 - DNA, 15 bp, Homo sapiens
aggctggggcaggag

SEQ ID NO: 1778000 - DNA, 15 bp, Homo sapiens
ggctggggcaggaga

SEQ ID NO: 1778001 - DNA, 15 bp, Homo sapiens
gctggggcaggagaa

SEQ ID NO: 1778002 - DNA, 15 bp, Homo sapiens
ctggggcaggagaat

SEQ ID NO: 1778003 - DNA, 15 bp, Homo sapiens
tggggcaggagaatt

SEQ ID NO: 1778004 - DNA, 15 bp, Homo sapiens
ggggcaggagaattg

SEQ ID NO: 1778005 - DNA, 15 bp, Homo sapiens
gggcaggagaattgc

SEQ ID NO: 1778006 - DNA, 15 bp, Homo sapiens
aattgcttgagccca

SEQ ID NO: 1778007 - DNA, 15 bp, Homo sapiens
cccaggaatttgaga

SEQ ID NO: 1778008 - DNA, 15 bp, Homo sapiens
gaatttgagaccagc

SEQ ID NO: 1778009 - DNA, 15 bp, Homo sapiens
aatttgagaccagcc

SEQ ID NO: 1778010 - DNA, 15 bp, Homo sapiens
atttgagaccagcct

SEQ ID NO: 1778011 - DNA, 15 bp, Homo sapiens
ggcaacatagggaga

SEQ ID NO: 1778012 - DNA, 15 bp, Homo sapiens
gcaacatagggagac

SEQ ID NO: 1778013 - DNA, 15 bp, Homo sapiens
aacatagggagaccg

SEQ ID NO: 1778014 - DNA, 15 bp, Homo sapiens
acatagggagaccgt

SEQ ID NO: 1778015 - DNA, 15 bp, Homo sapiens
catagggagaccgtg

SEQ ID NO: 1778016 - DNA, 15 bp, Homo sapiens
atagggagaccgtgt

SEQ ID NO: 1778017 - DNA, 15 bp, Homo sapiens
tagggagaccgtgtc

SEQ ID NO: 1778018 - DNA, 15 bp, Homo sapiens
agggagaccgtgtct

SEQ ID NO: 1778019 - DNA, 15 bp, Homo sapiens
gggagaccgtgtctc

SEQ ID NO: 1778020 - DNA, 15 bp, Homo sapiens
ggagaccgtgtctct

SEQ ID NO: 1778021 - DNA, 15 bp, Homo sapiens
agaccgtgtctctac

SEQ ID NO: 1778022 - DNA, 15 bp, Homo sapiens
gaccgtgtctctaca

SEQ ID NO: 1778023 - DNA, 15 bp, Homo sapiens
accgtgtctctacaa

SEQ ID NO: 1778024 - DNA, 15 bp, Homo sapiens
ccgtgtctctacaaa

SEQ ID NO: 1778025 - DNA, 15 bp, Homo sapiens
cgtgtctctacaaaa

SEQ ID NO: 1778026 - DNA, 15 bp, Homo sapiens
gtgtctctacaaaaa

SEQ ID NO: 1778027 - DNA, 15 bp, Homo sapiens
tgtctctacaaaaac

SEQ ID NO: 1778028 - DNA, 15 bp, Homo sapiens
gtctctacaaaaact

SEQ ID NO: 1778029 - DNA, 15 bp, Homo sapiens
tctctacaaaaactg

SEQ ID NO: 1778030 - DNA, 15 bp, Homo sapiens
ctctacaaaaactga

SEQ ID NO: 1778031 - DNA, 15 bp, Homo sapiens
tctacaaaaactgag

SEQ ID NO: 1778032 - DNA, 15 bp, Homo sapiens
ctacaaaaactgaga

SEQ ID NO: 1778033 - DNA, 15 bp, Homo sapiens
tacaaaaactgagaa

SEQ ID NO: 1778034 - DNA, 15 bp, Homo sapiens
acaaaaactgagaaa

SEQ ID NO: 1778035 - DNA, 15 bp, Homo sapiens
caaaaactgagaaaa

SEQ ID NO: 1778036 - DNA, 15 bp, Homo sapiens
aaaaactgagaaaaa

SEQ ID NO: 1778037 - DNA, 15 bp, Homo sapiens
aaaactgagaaaaat

SEQ ID NO: 1778038 - DNA, 15 bp, Homo sapiens
aaactgagaaaaata

SEQ ID NO: 1778039 - DNA, 15 bp, Homo sapiens
aactgagaaaaataa

SEQ ID NO: 1778040 - DNA, 15 bp, Homo sapiens
actgagaaaaataat

SEQ ID NO: 1778041 - DNA, 15 bp, Homo sapiens
ctgagaaaaataatt

SEQ ID NO: 1778042 - DNA, 15 bp, Homo sapiens
tgagaaaaataatta

SEQ ID NO: 1778043 - DNA, 15 bp, Homo sapiens
gagaaaaataattat

SEQ ID NO: 1778044 - DNA, 15 bp, Homo sapiens
agaaaaataattatc

SEQ ID NO: 1778045 - DNA, 15 bp, Homo sapiens
gaaaaataattatcc

SEQ ID NO: 1778046 - DNA, 15 bp, Homo sapiens
aaaaataattatcca

SEQ ID NO: 1778047 - DNA, 15 bp, Homo sapiens
aaaataattatccag

SEQ ID NO: 1778048 - DNA, 15 bp, Homo sapiens
aaataattatccagg

SEQ ID NO: 1778049 - DNA, 15 bp, Homo sapiens
aataattatccaggc

SEQ ID NO: 1778050 - DNA, 15 bp, Homo sapiens
ataattatccaggca

SEQ ID NO: 1778051 - DNA, 15 bp, Homo sapiens
taattatccaggcat

SEQ ID NO: 1778052 - DNA, 15 bp, Homo sapiens
aattatccaggcatg

SEQ ID NO: 1778053 - DNA, 15 bp, Homo sapiens
attatccaggcatgg

SEQ ID NO: 1778054 - DNA, 15 bp, Homo sapiens
ttatccaggcatggt

SEQ ID NO: 1778055 - DNA, 15 bp, Homo sapiens
tatccaggcatggtg

SEQ ID NO: 1778056 - DNA, 15 bp, Homo sapiens
tccaggcatggtggt

SEQ ID NO: 1778057 - DNA, 15 bp, Homo sapiens
caggcatggtggtgt

SEQ ID NO: 1778058 - DNA, 15 bp, Homo sapiens
aggcatggtggtgtg

SEQ ID NO: 1778059 - DNA, 15 bp, Homo sapiens
gcatggtggtgtgcg

SEQ ID NO: 1778060 - DNA, 15 bp, Homo sapiens
catggtggtgtgcgc

SEQ ID NO: 1778061 - DNA, 15 bp, Homo sapiens
atggtggtgtgcgct

SEQ ID NO: 1778062 - DNA, 15 bp, Homo sapiens
tggtggtgtgcgctg

SEQ ID NO: 1778063 - DNA, 15 bp, Homo sapiens
ggtggtgtgcgctgt

SEQ ID NO: 1778064 - DNA, 15 bp, Homo sapiens
gtggtgtgcgctgtg

SEQ ID NO: 1778065 - DNA, 15 bp, Homo sapiens
tggtgtgcgctgtgg

SEQ ID NO: 1778066 - DNA, 15 bp, Homo sapiens
ggtgtgcgctgtggt

SEQ ID NO: 1778067 - DNA, 15 bp, Homo sapiens
gtgtgcgctgtggtc

SEQ ID NO: 1778068 - DNA, 15 bp, Homo sapiens
tgtgcgctgtggtcc

SEQ ID NO: 1778069 - DNA, 15 bp, Homo sapiens
gtgcgctgtggtccc

SEQ ID NO: 1778070 - DNA, 15 bp, Homo sapiens
tgcgctgtggtccca

SEQ ID NO: 1778071 - DNA, 15 bp, Homo sapiens
gcgctgtggtcccag

SEQ ID NO: 1778072 - DNA, 15 bp, Homo sapiens
cgctgtggtcccagc

SEQ ID NO: 1778073 - DNA, 15 bp, Homo sapiens
gctgtggtcccagct

SEQ ID NO: 1778074 - DNA, 15 bp, Homo sapiens
cagctacttgggagt

SEQ ID NO: 1778075 - DNA, 15 bp, Homo sapiens
agctacttgggagtc

SEQ ID NO: 1778076 - DNA, 15 bp, Homo sapiens
gctacttgggagtct

SEQ ID NO: 1778077 - DNA, 15 bp, Homo sapiens
ctacttgggagtctg

SEQ ID NO: 1778078 - DNA, 15 bp, Homo sapiens
tacttgggagtctga

SEQ ID NO: 1778079 - DNA, 15 bp, Homo sapiens
acttgggagtctgag

SEQ ID NO: 1778080 - DNA, 15 bp, Homo sapiens
cttgggagtctgagg

SEQ ID NO: 1778081 - DNA, 15 bp, Homo sapiens
ttgggagtctgaggt

SEQ ID NO: 1778082 - DNA, 15 bp, Homo sapiens
tgggagtctgaggtg

SEQ ID NO: 1778083 - DNA, 15 bp, Homo sapiens
gggagtctgaggtgg

SEQ ID NO: 1778084 - DNA, 15 bp, Homo sapiens
ggagtctgaggtggg

SEQ ID NO: 1778085 - DNA, 15 bp, Homo sapiens
gagtctgaggtggga

SEQ ID NO: 1778086 - DNA, 15 bp, Homo sapiens
agtctgaggtgggag

SEQ ID NO: 1778087 - DNA, 15 bp, Homo sapiens
gtctgaggtgggagg

SEQ ID NO: 1778088 - DNA, 15 bp, Homo sapiens
tctgaggtgggagga

SEQ ID NO: 1778089 - DNA, 15 bp, Homo sapiens
gaggtgggaggatcg

SEQ ID NO: 1778090 - DNA, 15 bp, Homo sapiens
aggtgggaggatcgc

SEQ ID NO: 1778091 - DNA, 15 bp, Homo sapiens
ggtgggaggatcgct

SEQ ID NO: 1778092 - DNA, 15 bp, Homo sapiens
gtgggaggatcgctt

SEQ ID NO: 1778093 - DNA, 15 bp, Homo sapiens
tgggaggatcgcttg

SEQ ID NO: 1778094 - DNA, 15 bp, Homo sapiens
ggaggatcgcttgaa

SEQ ID NO: 1778095 - DNA, 15 bp, Homo sapiens
gaggatcgcttgaac

SEQ ID NO: 1778096 - DNA, 15 bp, Homo sapiens
aggatcgcttgaacc

SEQ ID NO: 1778097 - DNA, 15 bp, Homo sapiens
ggatcgcttgaacct

SEQ ID NO: 1778098 - DNA, 15 bp, Homo sapiens
gatcgcttgaacctg

SEQ ID NO: 1778099 - DNA, 15 bp, Homo sapiens
tgaacctgggaggcc

SEQ ID NO: 1778100 - DNA, 15 bp, Homo sapiens
gaacctgggaggcca

SEQ ID NO: 1778101 - DNA, 15 bp, Homo sapiens
aacctgggaggccaa

SEQ ID NO: 1778102 - DNA, 15 bp, Homo sapiens
acctgggaggccaag

SEQ ID NO: 1778103 - DNA, 15 bp, Homo sapiens
cctgggaggccaagg

SEQ ID NO: 1778104 - DNA, 15 bp, Homo sapiens
ctgggaggccaaggc

SEQ ID NO: 1778105 - DNA, 15 bp, Homo sapiens
tgggaggccaaggct

SEQ ID NO: 1778106 - DNA, 15 bp, Homo sapiens
gggaggccaaggctg

SEQ ID NO: 1778107 - DNA, 15 bp, Homo sapiens
ggaggccaaggctgc

SEQ ID NO: 1778108 - DNA, 15 bp, Homo sapiens
gaggccaaggctgca

SEQ ID NO: 1778109 - DNA, 15 bp, Homo sapiens
aggccaaggctgcag

SEQ ID NO: 1778110 - DNA, 15 bp, Homo sapiens
ggccaaggctgcagt

SEQ ID NO: 1778111 - DNA, 15 bp, Homo sapiens
gccaaggctgcagta

SEQ ID NO: 1778112 - DNA, 15 bp, Homo sapiens
ccaaggctgcagtaa

SEQ ID NO: 1778113 - DNA, 15 bp, Homo sapiens
caaggctgcagtaaa

SEQ ID NO: 1778114 - DNA, 15 bp, Homo sapiens
aaggctgcagtaaac

SEQ ID NO: 1778115 - DNA, 15 bp, Homo sapiens
aggctgcagtaaact

SEQ ID NO: 1778116 - DNA, 15 bp, Homo sapiens
ggctgcagtaaactg

SEQ ID NO: 1778117 - DNA, 15 bp, Homo sapiens
gctgcagtaaactgt

SEQ ID NO: 1778118 - DNA, 15 bp, Homo sapiens
ctgcagtaaactgtg

SEQ ID NO: 1778119 - DNA, 15 bp, Homo sapiens
tgcagtaaactgtga

SEQ ID NO: 1778120 - DNA, 15 bp, Homo sapiens
gcagtaaactgtgat

SEQ ID NO: 1778121 - DNA, 15 bp, Homo sapiens
cagtaaactgtgatt

SEQ ID NO: 1778122 - DNA, 15 bp, Homo sapiens
agtaaactgtgattg

SEQ ID NO: 1778123 - DNA, 15 bp, Homo sapiens
gtaaactgtgattgc

SEQ ID NO: 1778124 - DNA, 15 bp, Homo sapiens
taaactgtgattgcg

SEQ ID NO: 1778125 - DNA, 15 bp, Homo sapiens
aaactgtgattgcgc

SEQ ID NO: 1778126 - DNA, 15 bp, Homo sapiens
aactgtgattgcgcc

SEQ ID NO: 1778127 - DNA, 15 bp, Homo sapiens
actgtgattgcgcca

SEQ ID NO: 1778128 - DNA, 15 bp, Homo sapiens
ctgtgattgcgccac

SEQ ID NO: 1778129 - DNA, 15 bp, Homo sapiens
tgtgattgcgccact

SEQ ID NO: 1778130 - DNA, 15 bp, Homo sapiens
gtgattgcgccactg

SEQ ID NO: 1778131 - DNA, 15 bp, Homo sapiens
tgattgcgccactgc

SEQ ID NO: 1778132 - DNA, 15 bp, Homo sapiens
tgacagagtgagatc

SEQ ID NO: 1778133 - DNA, 15 bp, Homo sapiens
gacagagtgagatcc

SEQ ID NO: 1778134 - DNA, 15 bp, Homo sapiens
acagagtgagatcct

SEQ ID NO: 1778135 - DNA, 15 bp, Homo sapiens
cagagtgagatcctg

SEQ ID NO: 1778136 - DNA, 15 bp, Homo sapiens
agagtgagatcctgt

SEQ ID NO: 1778137 - DNA, 15 bp, Homo sapiens
gagtgagatcctgtc

SEQ ID NO: 1778138 - DNA, 15 bp, Homo sapiens
agtgagatcctgtca

SEQ ID NO: 1778139 - DNA, 15 bp, Homo sapiens
gtgagatcctgtcac

SEQ ID NO: 1778140 - DNA, 15 bp, Homo sapiens
tgagatcctgtcaca

SEQ ID NO: 1778141 - DNA, 15 bp, Homo sapiens
gagatcctgtcacaa

SEQ ID NO: 1778142 - DNA, 15 bp, Homo sapiens
agatcctgtcacaaa

SEQ ID NO: 1778143 - DNA, 15 bp, Homo sapiens
gatcctgtcacaaaa

SEQ ID NO: 1778144 - DNA, 15 bp, Homo sapiens
atcctgtcacaaaaa

SEQ ID NO: 1778145 - DNA, 15 bp, Homo sapiens
tcctgtcacaaaaaa

SEQ ID NO: 1778146 - DNA, 15 bp, Homo sapiens
cctgtcacaaaaaag

SEQ ID NO: 1778147 - DNA, 15 bp, Homo sapiens
ctgtcacaaaaaagt

SEQ ID NO: 1778148 - DNA, 15 bp, Homo sapiens
tgtcacaaaaaagtg

SEQ ID NO: 1778149 - DNA, 15 bp, Homo sapiens
gtcacaaaaaagtgt

SEQ ID NO: 1778150 - DNA, 15 bp, Homo sapiens
tcacaaaaaagtgtg

SEQ ID NO: 1778151 - DNA, 15 bp, Homo sapiens
cacaaaaaagtgtgt

SEQ ID NO: 1778152 - DNA, 15 bp, Homo sapiens
acaaaaaagtgtgtg

SEQ ID NO: 1778153 - DNA, 15 bp, Homo sapiens
caaaaaagtgtgtgt

SEQ ID NO: 1778154 - DNA, 15 bp, Homo sapiens
aaaaaagtgtgtgtg

SEQ ID NO: 1778155 - DNA, 15 bp, Homo sapiens
aaaaagtgtgtgtgt

SEQ ID NO: 1778156 - DNA, 15 bp, Homo sapiens
aaaagtgtgtgtgtg

SEQ ID NO: 1778157 - DNA, 15 bp, Homo sapiens
aaagtgtgtgtgtgt

SEQ ID NO: 1778158 - DNA, 15 bp, Homo sapiens
aagtgtgtgtgtgtg

SEQ ID NO: 1778159 - DNA, 15 bp, Homo sapiens
gtgtgtgtgtgtatc

SEQ ID NO: 1778160 - DNA, 15 bp, Homo sapiens
tgtgtgtgtgtatcc

SEQ ID NO: 1778161 - DNA, 15 bp, Homo sapiens
gtgtgtgtgtatcct

SEQ ID NO: 1778162 - DNA, 15 bp, Homo sapiens
tgtgtgtgtatcctt

SEQ ID NO: 1778163 - DNA, 15 bp, Homo sapiens
gtgtgtgtatccttt

SEQ ID NO: 1778164 - DNA, 15 bp, Homo sapiens
tgtgtgtatcctttg

SEQ ID NO: 1778165 - DNA, 15 bp, Homo sapiens
gtgtgtatcctttgt

SEQ ID NO: 1778166 - DNA, 15 bp, Homo sapiens
tgtgtatcctttgtc

SEQ ID NO: 1778167 - DNA, 15 bp, Homo sapiens
gtgtatcctttgtcc

SEQ ID NO: 1778168 - DNA, 15 bp, Homo sapiens
tgtatcctttgtccc

SEQ ID NO: 1778169 - DNA, 15 bp, Homo sapiens
gtatcctttgtccca

SEQ ID NO: 1778170 - DNA, 15 bp, Homo sapiens
tatcctttgtcccag

SEQ ID NO: 1778171 - DNA, 15 bp, Homo sapiens
atcctttgtcccagt

SEQ ID NO: 1778172 - DNA, 15 bp, Homo sapiens
tcctttgtcccagtg

SEQ ID NO: 1778173 - DNA, 15 bp, Homo sapiens
cctttgtcccagtga

SEQ ID NO: 1778174 - DNA, 15 bp, Homo sapiens
ctttgtcccagtgat

SEQ ID NO: 1778175 - DNA, 15 bp, Homo sapiens
tttgtcccagtgatt

SEQ ID NO: 1778176 - DNA, 15 bp, Homo sapiens
ttgtcccagtgattt

SEQ ID NO: 1778177 - DNA, 15 bp, Homo sapiens
tgtcccagtgatttt

SEQ ID NO: 1778178 - DNA, 15 bp, Homo sapiens
gtcccagtgatttta

SEQ ID NO: 1778179 - DNA, 15 bp, Homo sapiens
tcccagtgattttac

SEQ ID NO: 1778180 - DNA, 15 bp, Homo sapiens
ccagtgattttactt

SEQ ID NO: 1778181 - DNA, 15 bp, Homo sapiens
cagtgattttacttt

SEQ ID NO: 1778182 - DNA, 15 bp, Homo sapiens
agtgattttactttt

SEQ ID NO: 1778183 - DNA, 15 bp, Homo sapiens
gtgattttactttta

SEQ ID NO: 1778184 - DNA, 15 bp, Homo sapiens
tgattttacttttag

SEQ ID NO: 1778185 - DNA, 15 bp, Homo sapiens
gattttacttttaga

SEQ ID NO: 1778186 - DNA, 15 bp, Homo sapiens
attttacttttagaa

SEQ ID NO: 1778187 - DNA, 15 bp, Homo sapiens
ttttacttttagaaa

SEQ ID NO: 1778188 - DNA, 15 bp, Homo sapiens
tttacttttagaaat

SEQ ID NO: 1778189 - DNA, 15 bp, Homo sapiens
ttacttttagaaatt

SEQ ID NO: 1778190 - DNA, 15 bp, Homo sapiens
tacttttagaaattt

SEQ ID NO: 1778191 - DNA, 15 bp, Homo sapiens
acttttagaaattta

SEQ ID NO: 1778192 - DNA, 15 bp, Homo sapiens
cttttagaaatttat

SEQ ID NO: 1778193 - DNA, 15 bp, Homo sapiens
ttttagaaatttatc

SEQ ID NO: 1778194 - DNA, 15 bp, Homo sapiens
tttagaaatttatca

SEQ ID NO: 1778195 - DNA, 15 bp, Homo sapiens
ttagaaatttatcat

SEQ ID NO: 1778196 - DNA, 15 bp, Homo sapiens
tagaaatttatcatc

SEQ ID NO: 1778197 - DNA, 15 bp, Homo sapiens
agaaatttatcatcc

SEQ ID NO: 1778198 - DNA, 15 bp, Homo sapiens
gaaatttatcatcca

SEQ ID NO: 1778199 - DNA, 15 bp, Homo sapiens
aaatttatcatccat

SEQ ID NO: 1778200 - DNA, 15 bp, Homo sapiens
aatttatcatccata

SEQ ID NO: 1778201 - DNA, 15 bp, Homo sapiens
atttatcatccataa

SEQ ID NO: 1778202 - DNA, 15 bp, Homo sapiens
tttatcatccataac

SEQ ID NO: 1778203 - DNA, 15 bp, Homo sapiens
ttatcatccataaca

SEQ ID NO: 1778204 - DNA, 15 bp, Homo sapiens
tatcatccataacaa

SEQ ID NO: 1778205 - DNA, 15 bp, Homo sapiens
atcatccataacaat

SEQ ID NO: 1778206 - DNA, 15 bp, Homo sapiens
tcatccataacaata

SEQ ID NO: 1778207 - DNA, 15 bp, Homo sapiens
catccataacaatag

SEQ ID NO: 1778208 - DNA, 15 bp, Homo sapiens
atccataacaataga

SEQ ID NO: 1778209 - DNA, 15 bp, Homo sapiens
tccataacaatagag

SEQ ID NO: 1778210 - DNA, 15 bp, Homo sapiens
ccataacaatagagc

SEQ ID NO: 1778211 - DNA, 15 bp, Homo sapiens
cataacaatagagca

SEQ ID NO: 1778212 - DNA, 15 bp, Homo sapiens
ataacaatagagcaa

SEQ ID NO: 1778213 - DNA, 15 bp, Homo sapiens
taacaatagagcaat

SEQ ID NO: 1778214 - DNA, 15 bp, Homo sapiens
aacaatagagcaatg

SEQ ID NO: 1778215 - DNA, 15 bp, Homo sapiens
acaatagagcaatgc

SEQ ID NO: 1778216 - DNA, 15 bp, Homo sapiens
caatagagcaatgca

SEQ ID NO: 1778217 - DNA, 15 bp, Homo sapiens
aatagagcaatgcac

SEQ ID NO: 1778218 - DNA, 15 bp, Homo sapiens
atagagcaatgcaca

SEQ ID NO: 1778219 - DNA, 15 bp, Homo sapiens
tagagcaatgcacaa

SEQ ID NO: 1778220 - DNA, 15 bp, Homo sapiens
agagcaatgcacaag

SEQ ID NO: 1778221 - DNA, 15 bp, Homo sapiens
gagcaatgcacaagg

SEQ ID NO: 1778222 - DNA, 15 bp, Homo sapiens
agcaatgcacaagga

SEQ ID NO: 1778223 - DNA, 15 bp, Homo sapiens
gcaatgcacaaggat

SEQ ID NO: 1778224 - DNA, 15 bp, Homo sapiens
caatgcacaaggatg

SEQ ID NO: 1778225 - DNA, 15 bp, Homo sapiens
aatgcacaaggatgt

SEQ ID NO: 1778226 - DNA, 15 bp, Homo sapiens
atgcacaaggatgta

SEQ ID NO: 1778227 - DNA, 15 bp, Homo sapiens
tgcacaaggatgtaa

SEQ ID NO: 1778228 - DNA, 15 bp, Homo sapiens
gcacaaggatgtaaa

SEQ ID NO: 1778229 - DNA, 15 bp, Homo sapiens
cacaaggatgtaaaa

SEQ ID NO: 1778230 - DNA, 15 bp, Homo sapiens
acaaggatgtaaaag

SEQ ID NO: 1778231 - DNA, 15 bp, Homo sapiens
caaggatgtaaaaga

SEQ ID NO: 1778232 - DNA, 15 bp, Homo sapiens
aggatgtaaaagaag

SEQ ID NO: 1778233 - DNA, 15 bp, Homo sapiens
ggatgtaaaagaagg

SEQ ID NO: 1778234 - DNA, 15 bp, Homo sapiens
gatgtaaaagaagga

SEQ ID NO: 1778235 - DNA, 15 bp, Homo sapiens
atgtaaaagaaggaa

SEQ ID NO: 1778236 - DNA, 15 bp, Homo sapiens
tgtaaaagaaggaaa

SEQ ID NO: 1778237 - DNA, 15 bp, Homo sapiens
gtaaaagaaggaaac

SEQ ID NO: 1778238 - DNA, 15 bp, Homo sapiens
taaaagaaggaaacc

SEQ ID NO: 1778239 - DNA, 15 bp, Homo sapiens
aaaagaaggaaaccc

SEQ ID NO: 1778240 - DNA, 15 bp, Homo sapiens
aaagaaggaaaccca

SEQ ID NO: 1778241 - DNA, 15 bp, Homo sapiens
aagaaggaaacccat

SEQ ID NO: 1778242 - DNA, 15 bp, Homo sapiens
agaaggaaacccatt

SEQ ID NO: 1778243 - DNA, 15 bp, Homo sapiens
gaaggaaacccattg

SEQ ID NO: 1778244 - DNA, 15 bp, Homo sapiens
aaggaaacccattgc

SEQ ID NO: 1778245 - DNA, 15 bp, Homo sapiens
aggaaacccattgct

SEQ ID NO: 1778246 - DNA, 15 bp, Homo sapiens
ggaaacccattgctc

SEQ ID NO: 1778247 - DNA, 15 bp, Homo sapiens
gaaacccattgctct

SEQ ID NO: 1778248 - DNA, 15 bp, Homo sapiens
aaacccattgctctg

SEQ ID NO: 1778249 - DNA, 15 bp, Homo sapiens
aacccattgctctgt

SEQ ID NO: 1778250 - DNA, 15 bp, Homo sapiens
acccattgctctgtc

SEQ ID NO: 1778251 - DNA, 15 bp, Homo sapiens
cccattgctctgtct

SEQ ID NO: 1778252 - DNA, 15 bp, Homo sapiens
ccattgctctgtctc

SEQ ID NO: 1778253 - DNA, 15 bp, Homo sapiens
cattgctctgtctca

SEQ ID NO: 1778254 - DNA, 15 bp, Homo sapiens
attgctctgtctcag

SEQ ID NO: 1778255 - DNA, 15 bp, Homo sapiens
ttgctctgtctcagc

SEQ ID NO: 1778256 - DNA, 15 bp, Homo sapiens
tgctctgtctcagca

SEQ ID NO: 1778257 - DNA, 15 bp, Homo sapiens
gctctgtctcagcac

SEQ ID NO: 1778258 - DNA, 15 bp, Homo sapiens
ctctgtctcagcaca

SEQ ID NO: 1778259 - DNA, 15 bp, Homo sapiens
tctgtctcagcacaa

SEQ ID NO: 1778260 - DNA, 15 bp, Homo sapiens
ctgtctcagcacaac

SEQ ID NO: 1778261 - DNA, 15 bp, Homo sapiens
tgtctcagcacaact

SEQ ID NO: 1778262 - DNA, 15 bp, Homo sapiens
gtctcagcacaactg

SEQ ID NO: 1778263 - DNA, 15 bp, Homo sapiens
tctcagcacaactgg

SEQ ID NO: 1778264 - DNA, 15 bp, Homo sapiens
ctcagcacaactgga

SEQ ID NO: 1778265 - DNA, 15 bp, Homo sapiens
tcagcacaactggaa

SEQ ID NO: 1778266 - DNA, 15 bp, Homo sapiens
cagcacaactggaaa

SEQ ID NO: 1778267 - DNA, 15 bp, Homo sapiens
agcacaactggaaac

SEQ ID NO: 1778268 - DNA, 15 bp, Homo sapiens
gcacaactggaaaca

SEQ ID NO: 1778269 - DNA, 15 bp, Homo sapiens
cacaactggaaacaa

SEQ ID NO: 1778270 - DNA, 15 bp, Homo sapiens
acaactggaaacaac

SEQ ID NO: 1778271 - DNA, 15 bp, Homo sapiens
caactggaaacaact

SEQ ID NO: 1778272 - DNA, 15 bp, Homo sapiens
aactggaaacaactt

SEQ ID NO: 1778273 - DNA, 15 bp, Homo sapiens
actggaaacaacttt

SEQ ID NO: 1778274 - DNA, 15 bp, Homo sapiens
ctggaaacaactttg

SEQ ID NO: 1778275 - DNA, 15 bp, Homo sapiens
tggaaacaactttga

SEQ ID NO: 1778276 - DNA, 15 bp, Homo sapiens
ggaaacaactttgat

SEQ ID NO: 1778277 - DNA, 15 bp, Homo sapiens
gaaacaactttgatg

SEQ ID NO: 1778278 - DNA, 15 bp, Homo sapiens
aaacaactttgatgt

SEQ ID NO: 1778279 - DNA, 15 bp, Homo sapiens
aacaactttgatgtc

SEQ ID NO: 1778280 - DNA, 15 bp, Homo sapiens
acaactttgatgtcc

SEQ ID NO: 1778281 - DNA, 15 bp, Homo sapiens
caactttgatgtccc

SEQ ID NO: 1778282 - DNA, 15 bp, Homo sapiens
aactttgatgtcccc

SEQ ID NO: 1778283 - DNA, 15 bp, Homo sapiens
actttgatgtccccc

SEQ ID NO: 1778284 - DNA, 15 bp, Homo sapiens
ctttgatgtccccca

SEQ ID NO: 1778285 - DNA, 15 bp, Homo sapiens
tttgatgtcccccag

SEQ ID NO: 1778286 - DNA, 15 bp, Homo sapiens
ttgatgtcccccagt

SEQ ID NO: 1778287 - DNA, 15 bp, Homo sapiens
tgatgtcccccagta

SEQ ID NO: 1778288 - DNA, 15 bp, Homo sapiens
gatgtcccccagtaa

SEQ ID NO: 1778289 - DNA, 15 bp, Homo sapiens
atgtcccccagtaag

SEQ ID NO: 1778290 - DNA, 15 bp, Homo sapiens
tgtcccccagtaagg

SEQ ID NO: 1778291 - DNA, 15 bp, Homo sapiens
gtcccccagtaagga

SEQ ID NO: 1778292 - DNA, 15 bp, Homo sapiens
tcccccagtaaggac

SEQ ID NO: 1778293 - DNA, 15 bp, Homo sapiens
cccccagtaaggact

SEQ ID NO: 1778294 - DNA, 15 bp, Homo sapiens
ccccagtaaggactg

SEQ ID NO: 1778295 - DNA, 15 bp, Homo sapiens
cccagtaaggactga

SEQ ID NO: 1778296 - DNA, 15 bp, Homo sapiens
ccagtaaggactgat

SEQ ID NO: 1778297 - DNA, 15 bp, Homo sapiens
cagtaaggactgatt

SEQ ID NO: 1778298 - DNA, 15 bp, Homo sapiens
agtaaggactgatta

SEQ ID NO: 1778299 - DNA, 15 bp, Homo sapiens
gtaaggactgattaa

SEQ ID NO: 1778300 - DNA, 15 bp, Homo sapiens
taaggactgattaaa

SEQ ID NO: 1778301 - DNA, 15 bp, Homo sapiens
aaggactgattaaat

SEQ ID NO: 1778302 - DNA, 15 bp, Homo sapiens
aggactgattaaata

SEQ ID NO: 1778303 - DNA, 15 bp, Homo sapiens
ggactgattaaataa

SEQ ID NO: 1778304 - DNA, 15 bp, Homo sapiens
gactgattaaataat

SEQ ID NO: 1778305 - DNA, 15 bp, Homo sapiens
actgattaaataatt

SEQ ID NO: 1778306 - DNA, 15 bp, Homo sapiens
ctgattaaataatta

SEQ ID NO: 1778307 - DNA, 15 bp, Homo sapiens
tgattaaataattag

SEQ ID NO: 1778308 - DNA, 15 bp, Homo sapiens
gattaaataattagc

SEQ ID NO: 1778309 - DNA, 15 bp, Homo sapiens
attaaataattagcg

SEQ ID NO: 1778310 - DNA, 15 bp, Homo sapiens
ttaaataattagcgt

SEQ ID NO: 1778311 - DNA, 15 bp, Homo sapiens
taaataattagcgtt

SEQ ID NO: 1778312 - DNA, 15 bp, Homo sapiens
aaataattagcgttc

SEQ ID NO: 1778313 - DNA, 15 bp, Homo sapiens
aataattagcgttca

SEQ ID NO: 1778314 - DNA, 15 bp, Homo sapiens
ataattagcgttcat

SEQ ID NO: 1778315 - DNA, 15 bp, Homo sapiens
taattagcgttcatt

SEQ ID NO: 1778316 - DNA, 15 bp, Homo sapiens
aattagcgttcattc

SEQ ID NO: 1778317 - DNA, 15 bp, Homo sapiens
attagcgttcattca

SEQ ID NO: 1778318 - DNA, 15 bp, Homo sapiens
ttagcgttcattcac

SEQ ID NO: 1778319 - DNA, 15 bp, Homo sapiens
tagcgttcattcaca

SEQ ID NO: 1778320 - DNA, 15 bp, Homo sapiens
agcgttcattcacag

SEQ ID NO: 1778321 - DNA, 15 bp, Homo sapiens
gcgttcattcacagg

SEQ ID NO: 1778322 - DNA, 15 bp, Homo sapiens
cgttcattcacaggt

SEQ ID NO: 1778323 - DNA, 15 bp, Homo sapiens
gttcattcacaggtg

SEQ ID NO: 1778324 - DNA, 15 bp, Homo sapiens
ttcattcacaggtgg

SEQ ID NO: 1778325 - DNA, 15 bp, Homo sapiens
tcattcacaggtggc

SEQ ID NO: 1778326 - DNA, 15 bp, Homo sapiens
cattcacaggtggct

SEQ ID NO: 1778327 - DNA, 15 bp, Homo sapiens
attcacaggtggctt

SEQ ID NO: 1778328 - DNA, 15 bp, Homo sapiens
ttcacaggtggcttc

SEQ ID NO: 1778329 - DNA, 15 bp, Homo sapiens
tcacaggtggcttcc

SEQ ID NO: 1778330 - DNA, 15 bp, Homo sapiens
cacaggtggcttcca

SEQ ID NO: 1778331 - DNA, 15 bp, Homo sapiens
acaggtggcttccaa

SEQ ID NO: 1778332 - DNA, 15 bp, Homo sapiens
caggtggcttccaag

SEQ ID NO: 1778333 - DNA, 15 bp, Homo sapiens
aggtggcttccaagg

SEQ ID NO: 1778334 - DNA, 15 bp, Homo sapiens
ggtggcttccaaggc

SEQ ID NO: 1778335 - DNA, 15 bp, Homo sapiens
gtggcttccaaggca

SEQ ID NO: 1778336 - DNA, 15 bp, Homo sapiens
tggcttccaaggcag

SEQ ID NO: 1778337 - DNA, 15 bp, Homo sapiens
cttccaaggcagcca

SEQ ID NO: 1778338 - DNA, 15 bp, Homo sapiens
ttccaaggcagccag

SEQ ID NO: 1778339 - DNA, 15 bp, Homo sapiens
tccaaggcagccagc

SEQ ID NO: 1778340 - DNA, 15 bp, Homo sapiens
ccaaggcagccagca

SEQ ID NO: 1778341 - DNA, 15 bp, Homo sapiens
caaggcagccagcaa

SEQ ID NO: 1778342 - DNA, 15 bp, Homo sapiens
aaggcagccagcaaa

SEQ ID NO: 1778343 - DNA, 15 bp, Homo sapiens
aggcagccagcaaaa

SEQ ID NO: 1778344 - DNA, 15 bp, Homo sapiens
ggcagccagcaaaaa

SEQ ID NO: 1778345 - DNA, 15 bp, Homo sapiens
gcagccagcaaaaat

SEQ ID NO: 1778346 - DNA, 15 bp, Homo sapiens
cagccagcaaaaata

SEQ ID NO: 1778347 - DNA, 15 bp, Homo sapiens
agccagcaaaaataa

SEQ ID NO: 1778348 - DNA, 15 bp, Homo sapiens
gccagcaaaaataac

SEQ ID NO: 1778349 - DNA, 15 bp, Homo sapiens
ccagcaaaaataaca

SEQ ID NO: 1778350 - DNA, 15 bp, Homo sapiens
cagcaaaaataacag

SEQ ID NO: 1778351 - DNA, 15 bp, Homo sapiens
agcaaaaataacagt

SEQ ID NO: 1778352 - DNA, 15 bp, Homo sapiens
gcaaaaataacagtg

SEQ ID NO: 1778353 - DNA, 15 bp, Homo sapiens
caaaaataacagtgg

SEQ ID NO: 1778354 - DNA, 15 bp, Homo sapiens
aaaaataacagtggc

SEQ ID NO: 1778355 - DNA, 15 bp, Homo sapiens
aaaataacagtggcc

SEQ ID NO: 1778356 - DNA, 15 bp, Homo sapiens
aaataacagtggcca

SEQ ID NO: 1778357 - DNA, 15 bp, Homo sapiens
aataacagtggccac

SEQ ID NO: 1778358 - DNA, 15 bp, Homo sapiens
ataacagtggccaca

SEQ ID NO: 1778359 - DNA, 15 bp, Homo sapiens
taacagtggccacat

SEQ ID NO: 1778360 - DNA, 15 bp, Homo sapiens
aacagtggccacatg

SEQ ID NO: 1778361 - DNA, 15 bp, Homo sapiens
acagtggccacatga

SEQ ID NO: 1778362 - DNA, 15 bp, Homo sapiens
cagtggccacatgaa

SEQ ID NO: 1778363 - DNA, 15 bp, Homo sapiens
agtggccacatgaaa

SEQ ID NO: 1778364 - DNA, 15 bp, Homo sapiens
gtggccacatgaaaa

SEQ ID NO: 1778365 - DNA, 15 bp, Homo sapiens
tggccacatgaaaac

SEQ ID NO: 1778366 - DNA, 15 bp, Homo sapiens
ggccacatgaaaaca

SEQ ID NO: 1778367 - DNA, 15 bp, Homo sapiens
gccacatgaaaacat

SEQ ID NO: 1778368 - DNA, 15 bp, Homo sapiens
ccacatgaaaacata

SEQ ID NO: 1778369 - DNA, 15 bp, Homo sapiens
cacatgaaaacataa

SEQ ID NO: 1778370 - DNA, 15 bp, Homo sapiens
acatgaaaacataat

SEQ ID NO: 1778371 - DNA, 15 bp, Homo sapiens
catgaaaacataatg

SEQ ID NO: 1778372 - DNA, 15 bp, Homo sapiens
atgaaaacataatgt

SEQ ID NO: 1778373 - DNA, 15 bp, Homo sapiens
tgaaaacataatgtg

SEQ ID NO: 1778374 - DNA, 15 bp, Homo sapiens
gaaaacataatgtgt

SEQ ID NO: 1778375 - DNA, 15 bp, Homo sapiens
aaaacataatgtgtg

SEQ ID NO: 1778376 - DNA, 15 bp, Homo sapiens
aaacataatgtgtgc

SEQ ID NO: 1778377 - DNA, 15 bp, Homo sapiens
aacataatgtgtgcc

SEQ ID NO: 1778378 - DNA, 15 bp, Homo sapiens
acataatgtgtgcca

SEQ ID NO: 1778379 - DNA, 15 bp, Homo sapiens
cataatgtgtgccac

SEQ ID NO: 1778380 - DNA, 15 bp, Homo sapiens
ataatgtgtgccaca

SEQ ID NO: 1778381 - DNA, 15 bp, Homo sapiens
taatgtgtgccacat

SEQ ID NO: 1778382 - DNA, 15 bp, Homo sapiens
aatgtgtgccacatg

SEQ ID NO: 1778383 - DNA, 15 bp, Homo sapiens
atgtgtgccacatga

SEQ ID NO: 1778384 - DNA, 15 bp, Homo sapiens
tgtgtgccacatgaa

SEQ ID NO: 1778385 - DNA, 15 bp, Homo sapiens
gtgtgccacatgaaa

SEQ ID NO: 1778386 - DNA, 15 bp, Homo sapiens
tgtgccacatgaaaa

SEQ ID NO: 1778387 - DNA, 15 bp, Homo sapiens
gtgccacatgaaaaa

SEQ ID NO: 1778388 - DNA, 15 bp, Homo sapiens
tgccacatgaaaaaa

SEQ ID NO: 1778389 - DNA, 15 bp, Homo sapiens
gccacatgaaaaaag

SEQ ID NO: 1778390 - DNA, 15 bp, Homo sapiens
ccacatgaaaaaagc

SEQ ID NO: 1778391 - DNA, 15 bp, Homo sapiens
cacatgaaaaaagca

SEQ ID NO: 1778392 - DNA, 15 bp, Homo sapiens
acatgaaaaaagcac

SEQ ID NO: 1778393 - DNA, 15 bp, Homo sapiens
catgaaaaaagcaca

SEQ ID NO: 1778394 - DNA, 15 bp, Homo sapiens
atgaaaaaagcacac

SEQ ID NO: 1778395 - DNA, 15 bp, Homo sapiens
tgaaaaaagcacaca

SEQ ID NO: 1778396 - DNA, 15 bp, Homo sapiens
gaaaaaagcacacag

SEQ ID NO: 1778397 - DNA, 15 bp, Homo sapiens
aaaaaagcacacaga

SEQ ID NO: 1778398 - DNA, 15 bp, Homo sapiens
aaaaagcacacagat

SEQ ID NO: 1778399 - DNA, 15 bp, Homo sapiens
aaaagcacacagata

SEQ ID NO: 1778400 - DNA, 15 bp, Homo sapiens
aaagcacacagatag

SEQ ID NO: 1778401 - DNA, 15 bp, Homo sapiens
aagcacacagatagg

SEQ ID NO: 1778402 - DNA, 15 bp, Homo sapiens
agcacacagataggg

SEQ ID NO: 1778403 - DNA, 15 bp, Homo sapiens
gcacacagataggga

SEQ ID NO: 1778404 - DNA, 15 bp, Homo sapiens
cacacagatagggag

SEQ ID NO: 1778405 - DNA, 15 bp, Homo sapiens
acacagatagggaga

SEQ ID NO: 1778406 - DNA, 15 bp, Homo sapiens
cacagatagggagag

SEQ ID NO: 1778407 - DNA, 15 bp, Homo sapiens
acagatagggagagg

SEQ ID NO: 1778408 - DNA, 15 bp, Homo sapiens
cagatagggagaggg

SEQ ID NO: 1778409 - DNA, 15 bp, Homo sapiens
agatagggagagggc

SEQ ID NO: 1778410 - DNA, 15 bp, Homo sapiens
gatagggagagggca

SEQ ID NO: 1778411 - DNA, 15 bp, Homo sapiens
atagggagagggcag

SEQ ID NO: 1778412 - DNA, 15 bp, Homo sapiens
tagggagagggcagg

SEQ ID NO: 1778413 - DNA, 15 bp, Homo sapiens
agggagagggcagga

SEQ ID NO: 1778414 - DNA, 15 bp, Homo sapiens
gggagagggcaggat

SEQ ID NO: 1778415 - DNA, 15 bp, Homo sapiens
ggagagggcaggata

SEQ ID NO: 1778416 - DNA, 15 bp, Homo sapiens
gagagggcaggatac

SEQ ID NO: 1778417 - DNA, 15 bp, Homo sapiens
agagggcaggatact

SEQ ID NO: 1778418 - DNA, 15 bp, Homo sapiens
gagggcaggatactt

SEQ ID NO: 1778419 - DNA, 15 bp, Homo sapiens
agggcaggatacttc

SEQ ID NO: 1778420 - DNA, 15 bp, Homo sapiens
gggcaggatacttcc

SEQ ID NO: 1778421 - DNA, 15 bp, Homo sapiens
ggcaggatacttcca

SEQ ID NO: 1778422 - DNA, 15 bp, Homo sapiens
gcaggatacttccat

SEQ ID NO: 1778423 - DNA, 15 bp, Homo sapiens
caggatacttccatt

SEQ ID NO: 1778424 - DNA, 15 bp, Homo sapiens
aggatacttccattt

SEQ ID NO: 1778425 - DNA, 15 bp, Homo sapiens
ggatacttccatttt

SEQ ID NO: 1778426 - DNA, 15 bp, Homo sapiens
gatacttccattttc

SEQ ID NO: 1778427 - DNA, 15 bp, Homo sapiens
atacttccattttct

SEQ ID NO: 1778428 - DNA, 15 bp, Homo sapiens
tacttccattttcta

SEQ ID NO: 1778429 - DNA, 15 bp, Homo sapiens
acttccattttctat

SEQ ID NO: 1778430 - DNA, 15 bp, Homo sapiens
cttccattttctatt

SEQ ID NO: 1778431 - DNA, 15 bp, Homo sapiens
ttccattttctattt

SEQ ID NO: 1778432 - DNA, 15 bp, Homo sapiens
attttctattttata

SEQ ID NO: 1778433 - DNA, 15 bp, Homo sapiens
ttttctattttatat

SEQ ID NO: 1778434 - DNA, 15 bp, Homo sapiens
tttctattttatata

SEQ ID NO: 1778435 - DNA, 15 bp, Homo sapiens
ttctattttatatac

SEQ ID NO: 1778436 - DNA, 15 bp, Homo sapiens
tctattttatataca

SEQ ID NO: 1778437 - DNA, 15 bp, Homo sapiens
ctattttatatacat

SEQ ID NO: 1778438 - DNA, 15 bp, Homo sapiens
tattttatatacatc

SEQ ID NO: 1778439 - DNA, 15 bp, Homo sapiens
attttatatacatct

SEQ ID NO: 1778440 - DNA, 15 bp, Homo sapiens
ttttatatacatcta

SEQ ID NO: 1778441 - DNA, 15 bp, Homo sapiens
tttatatacatctat

SEQ ID NO: 1778442 - DNA, 15 bp, Homo sapiens
ttatatacatctatc

SEQ ID NO: 1778443 - DNA, 15 bp, Homo sapiens
tatatacatctatct

SEQ ID NO: 1778444 - DNA, 15 bp, Homo sapiens
atatacatctatcta

SEQ ID NO: 1778445 - DNA, 15 bp, Homo sapiens
tatacatctatctat

SEQ ID NO: 1778446 - DNA, 15 bp, Homo sapiens
atacatctatctata

SEQ ID NO: 1778447 - DNA, 15 bp, Homo sapiens
tacatctatctatag

SEQ ID NO: 1778448 - DNA, 15 bp, Homo sapiens
acatctatctatagc

SEQ ID NO: 1778449 - DNA, 15 bp, Homo sapiens
catctatctatagct

SEQ ID NO: 1778450 - DNA, 15 bp, Homo sapiens
atctatctatagctc

SEQ ID NO: 1778451 - DNA, 15 bp, Homo sapiens
tctatctatagctct

SEQ ID NO: 1778452 - DNA, 15 bp, Homo sapiens
ctatctatagctctt

SEQ ID NO: 1778453 - DNA, 15 bp, Homo sapiens
tatctatagctcttg

SEQ ID NO: 1778454 - DNA, 15 bp, Homo sapiens
atctatagctcttga

SEQ ID NO: 1778455 - DNA, 15 bp, Homo sapiens
tctatagctcttgaa

SEQ ID NO: 1778456 - DNA, 15 bp, Homo sapiens
ctatagctcttgaat

SEQ ID NO: 1778457 - DNA, 15 bp, Homo sapiens
tatagctcttgaatt

SEQ ID NO: 1778458 - DNA, 15 bp, Homo sapiens
atagctcttgaattt

SEQ ID NO: 1778459 - DNA, 15 bp, Homo sapiens
tagctcttgaatttt

SEQ ID NO: 1778460 - DNA, 15 bp, Homo sapiens
agctcttgaattttt

SEQ ID NO: 1778461 - DNA, 15 bp, Homo sapiens
gctcttgaatttttt

SEQ ID NO: 1778462 - DNA, 15 bp, Homo sapiens
ctcttgaattttttc

SEQ ID NO: 1778463 - DNA, 15 bp, Homo sapiens
tcttgaattttttca

SEQ ID NO: 1778464 - DNA, 15 bp, Homo sapiens
cttgaattttttcac

SEQ ID NO: 1778465 - DNA, 15 bp, Homo sapiens
ttgaattttttcaca

SEQ ID NO: 1778466 - DNA, 15 bp, Homo sapiens
tgaattttttcacaa

SEQ ID NO: 1778467 - DNA, 15 bp, Homo sapiens
gaattttttcacaag

SEQ ID NO: 1778468 - DNA, 15 bp, Homo sapiens
aattttttcacaagg

SEQ ID NO: 1778469 - DNA, 15 bp, Homo sapiens
attttttcacaagga

SEQ ID NO: 1778470 - DNA, 15 bp, Homo sapiens
ttttttcacaaggag

SEQ ID NO: 1778471 - DNA, 15 bp, Homo sapiens
tttttcacaaggagt

SEQ ID NO: 1778472 - DNA, 15 bp, Homo sapiens
ttttcacaaggagta

SEQ ID NO: 1778473 - DNA, 15 bp, Homo sapiens
tttcacaaggagtat

SEQ ID NO: 1778474 - DNA, 15 bp, Homo sapiens
ttcacaaggagtata

SEQ ID NO: 1778475 - DNA, 15 bp, Homo sapiens
tcacaaggagtatat

SEQ ID NO: 1778476 - DNA, 15 bp, Homo sapiens
cacaaggagtatatc

SEQ ID NO: 1778477 - DNA, 15 bp, Homo sapiens
acaaggagtatatct

SEQ ID NO: 1778478 - DNA, 15 bp, Homo sapiens
caaggagtatatctt

SEQ ID NO: 1778479 - DNA, 15 bp, Homo sapiens
aaggagtatatctta

SEQ ID NO: 1778480 - DNA, 15 bp, Homo sapiens
aggagtatatcttac

SEQ ID NO: 1778481 - DNA, 15 bp, Homo sapiens
ggagtatatcttacc

SEQ ID NO: 1778482 - DNA, 15 bp, Homo sapiens
gagtatatcttacct

SEQ ID NO: 1778483 - DNA, 15 bp, Homo sapiens
agtatatcttacctt

SEQ ID NO: 1778484 - DNA, 15 bp, Homo sapiens
gtatatcttaccttt

SEQ ID NO: 1778485 - DNA, 15 bp, Homo sapiens
tatatcttaccttta

SEQ ID NO: 1778486 - DNA, 15 bp, Homo sapiens
atatcttacctttac

SEQ ID NO: 1778487 - DNA, 15 bp, Homo sapiens
tatcttacctttaca

SEQ ID NO: 1778488 - DNA, 15 bp, Homo sapiens
atcttacctttacaa

SEQ ID NO: 1778489 - DNA, 15 bp, Homo sapiens
tcttacctttacaat

SEQ ID NO: 1778490 - DNA, 15 bp, Homo sapiens
cttacctttacaatt

SEQ ID NO: 1778491 - DNA, 15 bp, Homo sapiens
ttacctttacaattc

SEQ ID NO: 1778492 - DNA, 15 bp, Homo sapiens
tacctttacaattca

SEQ ID NO: 1778493 - DNA, 15 bp, Homo sapiens
acctttacaattcat

SEQ ID NO: 1778494 - DNA, 15 bp, Homo sapiens
cctttacaattcata

SEQ ID NO: 1778495 - DNA, 15 bp, Homo sapiens
ctttacaattcataa

SEQ ID NO: 1778496 - DNA, 15 bp, Homo sapiens
tttacaattcataaa

SEQ ID NO: 1778497 - DNA, 15 bp, Homo sapiens
ttacaattcataaat

SEQ ID NO: 1778498 - DNA, 15 bp, Homo sapiens
tacaattcataaata

SEQ ID NO: 1778499 - DNA, 15 bp, Homo sapiens
acaattcataaataa

SEQ ID NO: 1778500 - DNA, 15 bp, Homo sapiens
caattcataaataaa

SEQ ID NO: 1778501 - DNA, 15 bp, Homo sapiens
aattcataaataaat

SEQ ID NO: 1778502 - DNA, 15 bp, Homo sapiens
attcataaataaatt

SEQ ID NO: 1778503 - DNA, 15 bp, Homo sapiens
ttcataaataaattt

SEQ ID NO: 1778504 - DNA, 15 bp, Homo sapiens
tcataaataaatttt

SEQ ID NO: 1778505 - DNA, 15 bp, Homo sapiens
cataaataaatttta

SEQ ID NO: 1778506 - DNA, 15 bp, Homo sapiens
ataaataaattttag

SEQ ID NO: 1778507 - DNA, 15 bp, Homo sapiens
taaataaattttagt

SEQ ID NO: 1778508 - DNA, 15 bp, Homo sapiens
aaataaattttagtg

SEQ ID NO: 1778509 - DNA, 15 bp, Homo sapiens
aataaattttagtgg

SEQ ID NO: 1778510 - DNA, 15 bp, Homo sapiens
ataaattttagtgga

SEQ ID NO: 1778511 - DNA, 15 bp, Homo sapiens
taaattttagtggag

SEQ ID NO: 1778512 - DNA, 15 bp, Homo sapiens
aaattttagtggagg

SEQ ID NO: 1778513 - DNA, 15 bp, Homo sapiens
aattttagtggaggt

SEQ ID NO: 1778514 - DNA, 15 bp, Homo sapiens
attttagtggaggtg

SEQ ID NO: 1778515 - DNA, 15 bp, Homo sapiens
ttttagtggaggtgg

SEQ ID NO: 1778516 - DNA, 15 bp, Homo sapiens
tttagtggaggtggc

SEQ ID NO: 1778517 - DNA, 15 bp, Homo sapiens
ttagtggaggtggct

SEQ ID NO: 1778518 - DNA, 15 bp, Homo sapiens
tagtggaggtggcta

SEQ ID NO: 1778519 - DNA, 15 bp, Homo sapiens
agtggaggtggctat

SEQ ID NO: 1778520 - DNA, 15 bp, Homo sapiens
gtggaggtggctatc

SEQ ID NO: 1778521 - DNA, 15 bp, Homo sapiens
tggaggtggctatcc

SEQ ID NO: 1778522 - DNA, 15 bp, Homo sapiens
ggaggtggctatcct

SEQ ID NO: 1778523 - DNA, 15 bp, Homo sapiens
gaggtggctatcctg

SEQ ID NO: 1778524 - DNA, 15 bp, Homo sapiens
aggtggctatcctgc

SEQ ID NO: 1778525 - DNA, 15 bp, Homo sapiens
ggtggctatcctgca

SEQ ID NO: 1778526 - DNA, 15 bp, Homo sapiens
gtggctatcctgcac

SEQ ID NO: 1778527 - DNA, 15 bp, Homo sapiens
tggctatcctgcaca

SEQ ID NO: 1778528 - DNA, 15 bp, Homo sapiens
ggctatcctgcacaa

SEQ ID NO: 1778529 - DNA, 15 bp, Homo sapiens
gctatcctgcacaag

SEQ ID NO: 1778530 - DNA, 15 bp, Homo sapiens
ctatcctgcacaagg

SEQ ID NO: 1778531 - DNA, 15 bp, Homo sapiens
tatcctgcacaaggc

SEQ ID NO: 1778532 - DNA, 15 bp, Homo sapiens
atcctgcacaaggca

SEQ ID NO: 1778533 - DNA, 15 bp, Homo sapiens
tcctgcacaaggcaa

SEQ ID NO: 1778534 - DNA, 15 bp, Homo sapiens
cctgcacaaggcaac

SEQ ID NO: 1778535 - DNA, 15 bp, Homo sapiens
ctgcacaaggcaact

SEQ ID NO: 1778536 - DNA, 15 bp, Homo sapiens
tgcacaaggcaactg

SEQ ID NO: 1778537 - DNA, 15 bp, Homo sapiens
gcacaaggcaactga

SEQ ID NO: 1778538 - DNA, 15 bp, Homo sapiens
cacaaggcaactgac

SEQ ID NO: 1778539 - DNA, 15 bp, Homo sapiens
acaaggcaactgaca

SEQ ID NO: 1778540 - DNA, 15 bp, Homo sapiens
caaggcaactgacat

SEQ ID NO: 1778541 - DNA, 15 bp, Homo sapiens
aaggcaactgacatg

SEQ ID NO: 1778542 - DNA, 15 bp, Homo sapiens
aggcaactgacatgt

SEQ ID NO: 1778543 - DNA, 15 bp, Homo sapiens
ggcaactgacatgta

SEQ ID NO: 1778544 - DNA, 15 bp, Homo sapiens
gcaactgacatgtaa

SEQ ID NO: 1778545 - DNA, 15 bp, Homo sapiens
caactgacatgtaaa

SEQ ID NO: 1778546 - DNA, 15 bp, Homo sapiens
aactgacatgtaaaa

SEQ ID NO: 1778547 - DNA, 15 bp, Homo sapiens
actgacatgtaaaag

SEQ ID NO: 1778548 - DNA, 15 bp, Homo sapiens
ctgacatgtaaaagg

SEQ ID NO: 1778549 - DNA, 15 bp, Homo sapiens
tgacatgtaaaaggg

SEQ ID NO: 1778550 - DNA, 15 bp, Homo sapiens
gacatgtaaaaggga

SEQ ID NO: 1778551 - DNA, 15 bp, Homo sapiens
acatgtaaaagggac

SEQ ID NO: 1778552 - DNA, 15 bp, Homo sapiens
catgtaaaagggacc

SEQ ID NO: 1778553 - DNA, 15 bp, Homo sapiens
atgtaaaagggacca

SEQ ID NO: 1778554 - DNA, 15 bp, Homo sapiens
tgtaaaagggaccat

SEQ ID NO: 1778555 - DNA, 15 bp, Homo sapiens
gtaaaagggaccatc

SEQ ID NO: 1778556 - DNA, 15 bp, Homo sapiens
taaaagggaccatct

SEQ ID NO: 1778557 - DNA, 15 bp, Homo sapiens
aaaagggaccatcta

SEQ ID NO: 1778558 - DNA, 15 bp, Homo sapiens
aaagggaccatctaa

SEQ ID NO: 1778559 - DNA, 15 bp, Homo sapiens
aagggaccatctaag

SEQ ID NO: 1778560 - DNA, 15 bp, Homo sapiens
agggaccatctaagg

SEQ ID NO: 1778561 - DNA, 15 bp, Homo sapiens
gggaccatctaaggg

SEQ ID NO: 1778562 - DNA, 15 bp, Homo sapiens
ggaccatctaagggg

SEQ ID NO: 1778563 - DNA, 15 bp, Homo sapiens
gaccatctaagggga

SEQ ID NO: 1778564 - DNA, 15 bp, Homo sapiens
accatctaaggggat

SEQ ID NO: 1778565 - DNA, 15 bp, Homo sapiens
ccatctaaggggatg

SEQ ID NO: 1778566 - DNA, 15 bp, Homo sapiens
catctaaggggatgc

SEQ ID NO: 1778567 - DNA, 15 bp, Homo sapiens
atctaaggggatgcc

SEQ ID NO: 1778568 - DNA, 15 bp, Homo sapiens
tctaaggggatgcct

SEQ ID NO: 1778569 - DNA, 15 bp, Homo sapiens
ctaaggggatgcctc

SEQ ID NO: 1778570 - DNA, 15 bp, Homo sapiens
taaggggatgcctct

SEQ ID NO: 1778571 - DNA, 15 bp, Homo sapiens
aaggggatgcctctt

SEQ ID NO: 1778572 - DNA, 15 bp, Homo sapiens
aggggatgcctcttg

SEQ ID NO: 1778573 - DNA, 15 bp, Homo sapiens
ggggatgcctcttgg

SEQ ID NO: 1778574 - DNA, 15 bp, Homo sapiens
gggatgcctcttggc

SEQ ID NO: 1778575 - DNA, 15 bp, Homo sapiens
ggatgcctcttggcc

SEQ ID NO: 1778576 - DNA, 15 bp, Homo sapiens
gatgcctcttggcct

SEQ ID NO: 1778577 - DNA, 15 bp, Homo sapiens
atgcctcttggcctc

SEQ ID NO: 1778578 - DNA, 15 bp, Homo sapiens
gcctcttggcctcct

SEQ ID NO: 1778579 - DNA, 15 bp, Homo sapiens
cctcttggcctccta

SEQ ID NO: 1778580 - DNA, 15 bp, Homo sapiens
ctcttggcctcctac

SEQ ID NO: 1778581 - DNA, 15 bp, Homo sapiens
tcttggcctcctaca

SEQ ID NO: 1778582 - DNA, 15 bp, Homo sapiens
cttggcctcctacat

SEQ ID NO: 1778583 - DNA, 15 bp, Homo sapiens
ttggcctcctacatg

SEQ ID NO: 1778584 - DNA, 15 bp, Homo sapiens
tggcctcctacatgt

SEQ ID NO: 1778585 - DNA, 15 bp, Homo sapiens
ggcctcctacatgtt

SEQ ID NO: 1778586 - DNA, 15 bp, Homo sapiens
gcctcctacatgttg

SEQ ID NO: 1778587 - DNA, 15 bp, Homo sapiens
cctcctacatgttgt

SEQ ID NO: 1778588 - DNA, 15 bp, Homo sapiens
ctcctacatgttgtt

SEQ ID NO: 1778589 - DNA, 15 bp, Homo sapiens
tcctacatgttgttc

SEQ ID NO: 1778590 - DNA, 15 bp, Homo sapiens
cctacatgttgttca

SEQ ID NO: 1778591 - DNA, 15 bp, Homo sapiens
ctacatgttgttcaa

SEQ ID NO: 1778592 - DNA, 15 bp, Homo sapiens
tacatgttgttcaat

SEQ ID NO: 1778593 - DNA, 15 bp, Homo sapiens
acatgttgttcaatg

SEQ ID NO: 1778594 - DNA, 15 bp, Homo sapiens
catgttgttcaatgt

SEQ ID NO: 1778595 - DNA, 15 bp, Homo sapiens
atgttgttcaatgtc

SEQ ID NO: 1778596 - DNA, 15 bp, Homo sapiens
tgttgttcaatgtct

SEQ ID NO: 1778597 - DNA, 15 bp, Homo sapiens
gttgttcaatgtcta

SEQ ID NO: 1778598 - DNA, 15 bp, Homo sapiens
ttgttcaatgtctaa

SEQ ID NO: 1778599 - DNA, 15 bp, Homo sapiens
tgttcaatgtctaaa

SEQ ID NO: 1778600 - DNA, 15 bp, Homo sapiens
gttcaatgtctaaat

SEQ ID NO: 1778601 - DNA, 15 bp, Homo sapiens
ttcaatgtctaaata

SEQ ID NO: 1778602 - DNA, 15 bp, Homo sapiens
tcaatgtctaaataa

SEQ ID NO: 1778603 - DNA, 15 bp, Homo sapiens
caatgtctaaataac

SEQ ID NO: 1778604 - DNA, 15 bp, Homo sapiens
aatgtctaaataact

SEQ ID NO: 1778605 - DNA, 15 bp, Homo sapiens
atgtctaaataactg

SEQ ID NO: 1778606 - DNA, 15 bp, Homo sapiens
tgtctaaataactgt

SEQ ID NO: 1778607 - DNA, 15 bp, Homo sapiens
gtctaaataactgta

SEQ ID NO: 1778608 - DNA, 15 bp, Homo sapiens
tctaaataactgtac

SEQ ID NO: 1778609 - DNA, 15 bp, Homo sapiens
ctaaataactgtaca

SEQ ID NO: 1778610 - DNA, 15 bp, Homo sapiens
taaataactgtacaa

SEQ ID NO: 1778611 - DNA, 15 bp, Homo sapiens
aaataactgtacaaa

SEQ ID NO: 1778612 - DNA, 15 bp, Homo sapiens
aataactgtacaaag

SEQ ID NO: 1778613 - DNA, 15 bp, Homo sapiens
ataactgtacaaagg

SEQ ID NO: 1778614 - DNA, 15 bp, Homo sapiens
taactgtacaaaggt

SEQ ID NO: 1778615 - DNA, 15 bp, Homo sapiens
aactgtacaaaggtt

SEQ ID NO: 1778616 - DNA, 15 bp, Homo sapiens
actgtacaaaggttg

SEQ ID NO: 1778617 - DNA, 15 bp, Homo sapiens
ctgtacaaaggttgt

SEQ ID NO: 1778618 - DNA, 15 bp, Homo sapiens
tgtacaaaggttgtc

SEQ ID NO: 1778619 - DNA, 15 bp, Homo sapiens
gtacaaaggttgtca

SEQ ID NO: 1778620 - DNA, 15 bp, Homo sapiens
tacaaaggttgtcac

SEQ ID NO: 1778621 - DNA, 15 bp, Homo sapiens
acaaaggttgtcact

SEQ ID NO: 1778622 - DNA, 15 bp, Homo sapiens
caaaggttgtcacta

SEQ ID NO: 1778623 - DNA, 15 bp, Homo sapiens
aaaggttgtcactac

SEQ ID NO: 1778624 - DNA, 15 bp, Homo sapiens
aaggttgtcactact

SEQ ID NO: 1778625 - DNA, 15 bp, Homo sapiens
aggttgtcactactt

SEQ ID NO: 1778626 - DNA, 15 bp, Homo sapiens
ggttgtcactacttc

SEQ ID NO: 1778627 - DNA, 15 bp, Homo sapiens
gttgtcactacttca

SEQ ID NO: 1778628 - DNA, 15 bp, Homo sapiens
ttgtcactacttcaa

SEQ ID NO: 1778629 - DNA, 15 bp, Homo sapiens
tgtcactacttcaaa

SEQ ID NO: 1778630 - DNA, 15 bp, Homo sapiens
gtcactacttcaaat

SEQ ID NO: 1778631 - DNA, 15 bp, Homo sapiens
tcactacttcaaata

SEQ ID NO: 1778632 - DNA, 15 bp, Homo sapiens
cactacttcaaataa

SEQ ID NO: 1778633 - DNA, 15 bp, Homo sapiens
actacttcaaataaa

SEQ ID NO: 1778634 - DNA, 15 bp, Homo sapiens
ctacttcaaataaaa

SEQ ID NO: 1778635 - DNA, 15 bp, Homo sapiens
tacttcaaataaaac

SEQ ID NO: 1778636 - DNA, 15 bp, Homo sapiens
acttcaaataaaacg

SEQ ID NO: 1778637 - DNA, 15 bp, Homo sapiens
cttcaaataaaacgt

SEQ ID NO: 1778638 - DNA, 15 bp, Homo sapiens
ttcaaataaaacgtg

SEQ ID NO: 1778639 - DNA, 15 bp, Homo sapiens
tcaaataaaacgtgg

SEQ ID NO: 1778640 - DNA, 15 bp, Homo sapiens
caaataaaacgtggt

SEQ ID NO: 1778641 - DNA, 15 bp, Homo sapiens
aaataaaacgtggtt

SEQ ID NO: 1778642 - DNA, 15 bp, Homo sapiens
aataaaacgtggtta

SEQ ID NO: 1778643 - DNA, 15 bp, Homo sapiens
ataaaacgtggttac

SEQ ID NO: 1778644 - DNA, 15 bp, Homo sapiens
taaaacgtggttact

SEQ ID NO: 1778645 - DNA, 15 bp, Homo sapiens
aaaacgtggttactc

SEQ ID NO: 1778646 - DNA, 15 bp, Homo sapiens
aaacgtggttactct

SEQ ID NO: 1778647 - DNA, 15 bp, Homo sapiens
aacgtggttactctg

SEQ ID NO: 1778648 - DNA, 15 bp, Homo sapiens
acgtggttactctgc

SEQ ID NO: 1778649 - DNA, 15 bp, Homo sapiens
cgtggttactctgca

SEQ ID NO: 1778650 - DNA, 15 bp, Homo sapiens
gtggttactctgcaa

SEQ ID NO: 1778651 - DNA, 15 bp, Homo sapiens
tggttactctgcaag

SEQ ID NO: 1778652 - DNA, 15 bp, Homo sapiens
ggttactctgcaaga

SEQ ID NO: 1778653 - DNA, 15 bp, Homo sapiens
gttactctgcaagat

SEQ ID NO: 1778654 - DNA, 15 bp, Homo sapiens
ttactctgcaagatg

SEQ ID NO: 1778655 - DNA, 15 bp, Homo sapiens
tactctgcaagatga

SEQ ID NO: 1778656 - DNA, 15 bp, Homo sapiens
actctgcaagatgag

SEQ ID NO: 1778657 - DNA, 15 bp, Homo sapiens
ctctgcaagatgagg

SEQ ID NO: 1778658 - DNA, 15 bp, Homo sapiens
tctgcaagatgaggc

SEQ ID NO: 1778659 - DNA, 15 bp, Homo sapiens
ctgcaagatgaggca

SEQ ID NO: 1778660 - DNA, 15 bp, Homo sapiens
tgcaagatgaggcaa

SEQ ID NO: 1778661 - DNA, 15 bp, Homo sapiens
gcaagatgaggcaat

SEQ ID NO: 1778662 - DNA, 15 bp, Homo sapiens
caagatgaggcaatc

SEQ ID NO: 1778663 - DNA, 15 bp, Homo sapiens
aagatgaggcaatca

SEQ ID NO: 1778664 - DNA, 15 bp, Homo sapiens
agatgaggcaatcaa

SEQ ID NO: 1778665 - DNA, 15 bp, Homo sapiens
gatgaggcaatcaat

SEQ ID NO: 1778666 - DNA, 15 bp, Homo sapiens
atgaggcaatcaatg

SEQ ID NO: 1778667 - DNA, 15 bp, Homo sapiens
tgaggcaatcaatgc

SEQ ID NO: 1778668 - DNA, 15 bp, Homo sapiens
gaggcaatcaatgcc

SEQ ID NO: 1778669 - DNA, 15 bp, Homo sapiens
aggcaatcaatgccc

SEQ ID NO: 1778670 - DNA, 15 bp, Homo sapiens
ggcaatcaatgccct

SEQ ID NO: 1778671 - DNA, 15 bp, Homo sapiens
gcaatcaatgccctt

SEQ ID NO: 1778672 - DNA, 15 bp, Homo sapiens
caatcaatgcccttt

SEQ ID NO: 1778673 - DNA, 15 bp, Homo sapiens
aatcaatgccctttg

SEQ ID NO: 1778674 - DNA, 15 bp, Homo sapiens
atcaatgccctttgg

SEQ ID NO: 1778675 - DNA, 15 bp, Homo sapiens
tcaatgccctttggc

SEQ ID NO: 1778676 - DNA, 15 bp, Homo sapiens
caatgccctttggct

SEQ ID NO: 1778677 - DNA, 15 bp, Homo sapiens
aatgccctttggcta

SEQ ID NO: 1778678 - DNA, 15 bp, Homo sapiens
atgccctttggctaa

SEQ ID NO: 1778679 - DNA, 15 bp, Homo sapiens
tgccctttggctaac

SEQ ID NO: 1778680 - DNA, 15 bp, Homo sapiens
gccctttggctaaca

SEQ ID NO: 1778681 - DNA, 15 bp, Homo sapiens
ccctttggctaacat

SEQ ID NO: 1778682 - DNA, 15 bp, Homo sapiens
cctttggctaacata

SEQ ID NO: 1778683 - DNA, 15 bp, Homo sapiens
ctttggctaacataa

SEQ ID NO: 1778684 - DNA, 15 bp, Homo sapiens
tttggctaacataac

SEQ ID NO: 1778685 - DNA, 15 bp, Homo sapiens
ttggctaacataact

SEQ ID NO: 1778686 - DNA, 15 bp, Homo sapiens
tggctaacataactg

SEQ ID NO: 1778687 - DNA, 15 bp, Homo sapiens
ggctaacataactga

SEQ ID NO: 1778688 - DNA, 15 bp, Homo sapiens
gctaacataactgaa

SEQ ID NO: 1778689 - DNA, 15 bp, Homo sapiens
ctaacataactgaag

SEQ ID NO: 1778690 - DNA, 15 bp, Homo sapiens
taacataactgaagt

SEQ ID NO: 1778691 - DNA, 15 bp, Homo sapiens
aacataactgaagtt

SEQ ID NO: 1778692 - DNA, 15 bp, Homo sapiens
acataactgaagttc

SEQ ID NO: 1778693 - DNA, 15 bp, Homo sapiens
cataactgaagttca

SEQ ID NO: 1778694 - DNA, 15 bp, Homo sapiens
ataactgaagttcac

SEQ ID NO: 1778695 - DNA, 15 bp, Homo sapiens
taactgaagttcaca

SEQ ID NO: 1778696 - DNA, 15 bp, Homo sapiens
aactgaagttcacag

SEQ ID NO: 1778697 - DNA, 15 bp, Homo sapiens
actgaagttcacagt

SEQ ID NO: 1778698 - DNA, 15 bp, Homo sapiens
ctgaagttcacagtt

SEQ ID NO: 1778699 - DNA, 15 bp, Homo sapiens
tgaagttcacagttg

SEQ ID NO: 1778700 - DNA, 15 bp, Homo sapiens
gaagttcacagttgc

SEQ ID NO: 1778701 - DNA, 15 bp, Homo sapiens
aagttcacagttgct

SEQ ID NO: 1778702 - DNA, 15 bp, Homo sapiens
agttcacagttgcta

SEQ ID NO: 1778703 - DNA, 15 bp, Homo sapiens
gttcacagttgctat

SEQ ID NO: 1778704 - DNA, 15 bp, Homo sapiens
ttcacagttgctatg

SEQ ID NO: 1778705 - DNA, 15 bp, Homo sapiens
tcacagttgctatga

SEQ ID NO: 1778706 - DNA, 15 bp, Homo sapiens
cacagttgctatgaa

SEQ ID NO: 1778707 - DNA, 15 bp, Homo sapiens
acagttgctatgaaa

SEQ ID NO: 1778708 - DNA, 15 bp, Homo sapiens
cagttgctatgaaaa

SEQ ID NO: 1778709 - DNA, 15 bp, Homo sapiens
agttgctatgaaaag

SEQ ID NO: 1778710 - DNA, 15 bp, Homo sapiens
gttgctatgaaaaga

SEQ ID NO: 1778711 - DNA, 15 bp, Homo sapiens
ttgctatgaaaagaa

SEQ ID NO: 1778712 - DNA, 15 bp, Homo sapiens
tgctatgaaaagaaa

SEQ ID NO: 1778713 - DNA, 15 bp, Homo sapiens
gctatgaaaagaaaa

SEQ ID NO: 1778714 - DNA, 15 bp, Homo sapiens
ctatgaaaagaaaat

SEQ ID NO: 1778715 - DNA, 15 bp, Homo sapiens
tatgaaaagaaaatc

SEQ ID NO: 1778716 - DNA, 15 bp, Homo sapiens
atgaaaagaaaatcc

SEQ ID NO: 1778717 - DNA, 15 bp, Homo sapiens
tgaaaagaaaatcca

SEQ ID NO: 1778718 - DNA, 15 bp, Homo sapiens
gaaaagaaaatccat

SEQ ID NO: 1778719 - DNA, 15 bp, Homo sapiens
aaaagaaaatccatt

SEQ ID NO: 1778720 - DNA, 15 bp, Homo sapiens
aaagaaaatccattc

SEQ ID NO: 1778721 - DNA, 15 bp, Homo sapiens
aagaaaatccattct

SEQ ID NO: 1778722 - DNA, 15 bp, Homo sapiens
agaaaatccattcta

SEQ ID NO: 1778723 - DNA, 15 bp, Homo sapiens
gaaaatccattctaa

SEQ ID NO: 1778724 - DNA, 15 bp, Homo sapiens
aaaatccattctaat

SEQ ID NO: 1778725 - DNA, 15 bp, Homo sapiens
aaatccattctaatt

SEQ ID NO: 1778726 - DNA, 15 bp, Homo sapiens
aatccattctaattt

SEQ ID NO: 1778727 - DNA, 15 bp, Homo sapiens
atccattctaatttt

SEQ ID NO: 1778728 - DNA, 15 bp, Homo sapiens
tccattctaattttc

SEQ ID NO: 1778729 - DNA, 15 bp, Homo sapiens
ccattctaattttca

SEQ ID NO: 1778730 - DNA, 15 bp, Homo sapiens
cattctaattttcag

SEQ ID NO: 1778731 - DNA, 15 bp, Homo sapiens
attctaattttcaga

SEQ ID NO: 1778732 - DNA, 15 bp, Homo sapiens
ttctaattttcagaa

SEQ ID NO: 1778733 - DNA, 15 bp, Homo sapiens
tctaattttcagaaa

SEQ ID NO: 1778734 - DNA, 15 bp, Homo sapiens
ctaattttcagaaaa

SEQ ID NO: 1778735 - DNA, 15 bp, Homo sapiens
taattttcagaaaaa

SEQ ID NO: 1778736 - DNA, 15 bp, Homo sapiens
aattttcagaaaaat

SEQ ID NO: 1778737 - DNA, 15 bp, Homo sapiens
attttcagaaaaatt

SEQ ID NO: 1778738 - DNA, 15 bp, Homo sapiens
ttttcagaaaaattg

SEQ ID NO: 1778739 - DNA, 15 bp, Homo sapiens
tttcagaaaaattgc

SEQ ID NO: 1778740 - DNA, 15 bp, Homo sapiens
ttcagaaaaattgca

SEQ ID NO: 1778741 - DNA, 15 bp, Homo sapiens
tcagaaaaattgcag

SEQ ID NO: 1778742 - DNA, 15 bp, Homo sapiens
cagaaaaattgcaga

SEQ ID NO: 1778743 - DNA, 15 bp, Homo sapiens
agaaaaattgcagag

SEQ ID NO: 1778744 - DNA, 15 bp, Homo sapiens
gaaaaattgcagagc

SEQ ID NO: 1778745 - DNA, 15 bp, Homo sapiens
aaaaattgcagagcg

SEQ ID NO: 1778746 - DNA, 15 bp, Homo sapiens
aaaattgcagagcgt

SEQ ID NO: 1778747 - DNA, 15 bp, Homo sapiens
aaattgcagagcgta

SEQ ID NO: 1778748 - DNA, 15 bp, Homo sapiens
aattgcagagcgtac

SEQ ID NO: 1778749 - DNA, 15 bp, Homo sapiens
attgcagagcgtacc

SEQ ID NO: 1778750 - DNA, 15 bp, Homo sapiens
ttgcagagcgtacct

SEQ ID NO: 1778751 - DNA, 15 bp, Homo sapiens
tgcagagcgtacctt

SEQ ID NO: 1778752 - DNA, 15 bp, Homo sapiens
gcagagcgtaccttt

SEQ ID NO: 1778753 - DNA, 15 bp, Homo sapiens
cagagcgtacctttc

SEQ ID NO: 1778754 - DNA, 15 bp, Homo sapiens
agagcgtacctttca

SEQ ID NO: 1778755 - DNA, 15 bp, Homo sapiens
gagcgtacctttcat

SEQ ID NO: 1778756 - DNA, 15 bp, Homo sapiens
agcgtacctttcata

SEQ ID NO: 1778757 - DNA, 15 bp, Homo sapiens
gcgtacctttcatac

SEQ ID NO: 1778758 - DNA, 15 bp, Homo sapiens
cgtacctttcatacc

SEQ ID NO: 1778759 - DNA, 15 bp, Homo sapiens
gtacctttcatacct

SEQ ID NO: 1778760 - DNA, 15 bp, Homo sapiens
tacctttcataccta

SEQ ID NO: 1778761 - DNA, 15 bp, Homo sapiens
acctttcatacctat

SEQ ID NO: 1778762 - DNA, 15 bp, Homo sapiens
cctttcatacctata

SEQ ID NO: 1778763 - DNA, 15 bp, Homo sapiens
ctttcatacctatac

SEQ ID NO: 1778764 - DNA, 15 bp, Homo sapiens
tttcatacctatacc

SEQ ID NO: 1778765 - DNA, 15 bp, Homo sapiens
ttcatacctataccc

SEQ ID NO: 1778766 - DNA, 15 bp, Homo sapiens
tcatacctataccct

SEQ ID NO: 1778767 - DNA, 15 bp, Homo sapiens
catacctatacccta

SEQ ID NO: 1778768 - DNA, 15 bp, Homo sapiens
atacctataccctaa

SEQ ID NO: 1778769 - DNA, 15 bp, Homo sapiens
tacctataccctaag

SEQ ID NO: 1778770 - DNA, 15 bp, Homo sapiens
acctataccctaagt

SEQ ID NO: 1778771 - DNA, 15 bp, Homo sapiens
cctataccctaagtt

SEQ ID NO: 1778772 - DNA, 15 bp, Homo sapiens
ctataccctaagtta

SEQ ID NO: 1778773 - DNA, 15 bp, Homo sapiens
tataccctaagttac

SEQ ID NO: 1778774 - DNA, 15 bp, Homo sapiens
ataccctaagttact

SEQ ID NO: 1778775 - DNA, 15 bp, Homo sapiens
taccctaagttacta

SEQ ID NO: 1778776 - DNA, 15 bp, Homo sapiens
accctaagttactaa

SEQ ID NO: 1778777 - DNA, 15 bp, Homo sapiens
ccctaagttactaaa

SEQ ID NO: 1778778 - DNA, 15 bp, Homo sapiens
cctaagttactaaaa

SEQ ID NO: 1778779 - DNA, 15 bp, Homo sapiens
ctaagttactaaaat

SEQ ID NO: 1778780 - DNA, 15 bp, Homo sapiens
taagttactaaaatt

SEQ ID NO: 1778781 - DNA, 15 bp, Homo sapiens
aagttactaaaattt

SEQ ID NO: 1778782 - DNA, 15 bp, Homo sapiens
agttactaaaattta

SEQ ID NO: 1778783 - DNA, 15 bp, Homo sapiens
gttactaaaatttaa

SEQ ID NO: 1778784 - DNA, 15 bp, Homo sapiens
ttactaaaatttaaa

SEQ ID NO: 1778785 - DNA, 15 bp, Homo sapiens
tactaaaatttaaat

SEQ ID NO: 1778786 - DNA, 15 bp, Homo sapiens
actaaaatttaaatg

SEQ ID NO: 1778787 - DNA, 15 bp, Homo sapiens
ctaaaatttaaatgt

SEQ ID NO: 1778788 - DNA, 15 bp, Homo sapiens
taaaatttaaatgtt

SEQ ID NO: 1778789 - DNA, 15 bp, Homo sapiens
aaaatttaaatgtta

SEQ ID NO: 1778790 - DNA, 15 bp, Homo sapiens
aaatttaaatgttaa

SEQ ID NO: 1778791 - DNA, 15 bp, Homo sapiens
aatttaaatgttaaa

SEQ ID NO: 1778792 - DNA, 15 bp, Homo sapiens
atttaaatgttaaat

SEQ ID NO: 1778793 - DNA, 15 bp, Homo sapiens
tttaaatgttaaatg

SEQ ID NO: 1778794 - DNA, 15 bp, Homo sapiens
ttaaatgttaaatgt

SEQ ID NO: 1778795 - DNA, 15 bp, Homo sapiens
taaatgttaaatgtt

SEQ ID NO: 1778796 - DNA, 15 bp, Homo sapiens
aaatgttaaatgttt

SEQ ID NO: 1778797 - DNA, 15 bp, Homo sapiens
aatgttaaatgtttc

SEQ ID NO: 1778798 - DNA, 15 bp, Homo sapiens
atgttaaatgtttca

SEQ ID NO: 1778799 - DNA, 15 bp, Homo sapiens
tgttaaatgtttcaa

SEQ ID NO: 1778800 - DNA, 15 bp, Homo sapiens
gttaaatgtttcaaa

SEQ ID NO: 1778801 - DNA, 15 bp, Homo sapiens
ttaaatgtttcaaaa

SEQ ID NO: 1778802 - DNA, 15 bp, Homo sapiens
taaatgtttcaaaat

SEQ ID NO: 1778803 - DNA, 15 bp, Homo sapiens
aaatgtttcaaaatg

SEQ ID NO: 1778804 - DNA, 15 bp, Homo sapiens
aatgtttcaaaatgg

SEQ ID NO: 1778805 - DNA, 15 bp, Homo sapiens
atgtttcaaaatggt

SEQ ID NO: 1778806 - DNA, 15 bp, Homo sapiens
tgtttcaaaatggta

SEQ ID NO: 1778807 - DNA, 15 bp, Homo sapiens
gtttcaaaatggtat

SEQ ID NO: 1778808 - DNA, 15 bp, Homo sapiens
tttcaaaatggtata

SEQ ID NO: 1778809 - DNA, 15 bp, Homo sapiens
ttcaaaatggtatat

SEQ ID NO: 1778810 - DNA, 15 bp, Homo sapiens
tcaaaatggtatata

SEQ ID NO: 1778811 - DNA, 15 bp, Homo sapiens
aaaatggtatataga

SEQ ID NO: 1778812 - DNA, 15 bp, Homo sapiens
aaatggtatatagac

SEQ ID NO: 1778813 - DNA, 15 bp, Homo sapiens
aatggtatatagact

SEQ ID NO: 1778814 - DNA, 15 bp, Homo sapiens
atggtatatagactt

SEQ ID NO: 1778815 - DNA, 15 bp, Homo sapiens
tggtatatagactta

SEQ ID NO: 1778816 - DNA, 15 bp, Homo sapiens
ggtatatagacttag

SEQ ID NO: 1778817 - DNA, 15 bp, Homo sapiens
gtatatagacttagg

SEQ ID NO: 1778818 - DNA, 15 bp, Homo sapiens
tatatagacttagga

SEQ ID NO: 1778819 - DNA, 15 bp, Homo sapiens
atatagacttaggaa

SEQ ID NO: 1778820 - DNA, 15 bp, Homo sapiens
tatagacttaggaag

SEQ ID NO: 1778821 - DNA, 15 bp, Homo sapiens
atagacttaggaaga

SEQ ID NO: 1778822 - DNA, 15 bp, Homo sapiens
tagacttaggaagaa

SEQ ID NO: 1778823 - DNA, 15 bp, Homo sapiens
agacttaggaagaat

SEQ ID NO: 1778824 - DNA, 15 bp, Homo sapiens
gacttaggaagaatt

SEQ ID NO: 1778825 - DNA, 15 bp, Homo sapiens
acttaggaagaattt

SEQ ID NO: 1778826 - DNA, 15 bp, Homo sapiens
cttaggaagaatttt

SEQ ID NO: 1778827 - DNA, 15 bp, Homo sapiens
ttaggaagaattttt

SEQ ID NO: 1778828 - DNA, 15 bp, Homo sapiens
taggaagaatttttc

SEQ ID NO: 1778829 - DNA, 15 bp, Homo sapiens
aggaagaatttttcc

SEQ ID NO: 1778830 - DNA, 15 bp, Homo sapiens
ggaagaatttttcct

SEQ ID NO: 1778831 - DNA, 15 bp, Homo sapiens
gaagaatttttcctt

SEQ ID NO: 1778832 - DNA, 15 bp, Homo sapiens
aagaatttttccttg

SEQ ID NO: 1778833 - DNA, 15 bp, Homo sapiens
agaatttttccttgt

SEQ ID NO: 1778834 - DNA, 15 bp, Homo sapiens
gaatttttccttgtg

SEQ ID NO: 1778835 - DNA, 15 bp, Homo sapiens
aatttttccttgtgt

SEQ ID NO: 1778836 - DNA, 15 bp, Homo sapiens
atttttccttgtgtg

SEQ ID NO: 1778837 - DNA, 15 bp, Homo sapiens
tttttccttgtgtgt

SEQ ID NO: 1778838 - DNA, 15 bp, Homo sapiens
ttttccttgtgtgtt

SEQ ID NO: 1778839 - DNA, 15 bp, Homo sapiens
tttccttgtgtgttt

SEQ ID NO: 1778840 - DNA, 15 bp, Homo sapiens
ttccttgtgtgtttt

SEQ ID NO: 1778841 - DNA, 15 bp, Homo sapiens
tccttgtgtgttttt

SEQ ID NO: 1778842 - DNA, 15 bp, Homo sapiens
ccttgtgtgtttttt

SEQ ID NO: 1778843 - DNA, 15 bp, Homo sapiens
cttgtgtgttttttt

SEQ ID NO: 1778844 - DNA, 15 bp, Homo sapiens
ttgtgtgtttttttt

SEQ ID NO: 1778845 - DNA, 15 bp, Homo sapiens
tgtgtgttttttttt

SEQ ID NO: 1778846 - DNA, 15 bp, Homo sapiens
gtgtgtttttttttt

SEQ ID NO: 1778847 - DNA, 15 bp, Homo sapiens
tgtgttttttttttt

SEQ ID NO: 1778848 - DNA, 15 bp, Homo sapiens
gtgtttttttttttc

SEQ ID NO: 1778849 - DNA, 15 bp, Homo sapiens
tgtttttttttttcc

SEQ ID NO: 1778850 - DNA, 15 bp, Homo sapiens
tttttttttccttta

SEQ ID NO: 1778851 - DNA, 15 bp, Homo sapiens
ttttttttcctttaa

SEQ ID NO: 1778852 - DNA, 15 bp, Homo sapiens
tttttttcctttaac

SEQ ID NO: 1778853 - DNA, 15 bp, Homo sapiens
ttttttcctttaact

SEQ ID NO: 1778854 - DNA, 15 bp, Homo sapiens
tttttcctttaactt

SEQ ID NO: 1778855 - DNA, 15 bp, Homo sapiens
ttttcctttaacttc

SEQ ID NO: 1778856 - DNA, 15 bp, Homo sapiens
tttcctttaacttcc

SEQ ID NO: 1778857 - DNA, 15 bp, Homo sapiens
ttcctttaacttcct

SEQ ID NO: 1778858 - DNA, 15 bp, Homo sapiens
tcctttaacttcctc

SEQ ID NO: 1778859 - DNA, 15 bp, Homo sapiens
cctttaacttcctca

SEQ ID NO: 1778860 - DNA, 15 bp, Homo sapiens
ctttaacttcctcat

SEQ ID NO: 1778861 - DNA, 15 bp, Homo sapiens
tttaacttcctcatt

SEQ ID NO: 1778862 - DNA, 15 bp, Homo sapiens
ttaacttcctcattg

SEQ ID NO: 1778863 - DNA, 15 bp, Homo sapiens
taacttcctcattgg

SEQ ID NO: 1778864 - DNA, 15 bp, Homo sapiens
aacttcctcattgga

SEQ ID NO: 1778865 - DNA, 15 bp, Homo sapiens
acttcctcattggat

SEQ ID NO: 1778866 - DNA, 15 bp, Homo sapiens
cttcctcattggatt

SEQ ID NO: 1778867 - DNA, 15 bp, Homo sapiens
ttcctcattggattc

SEQ ID NO: 1778868 - DNA, 15 bp, Homo sapiens
tcctcattggattct

SEQ ID NO: 1778869 - DNA, 15 bp, Homo sapiens
cctcattggattcta

SEQ ID NO: 1778870 - DNA, 15 bp, Homo sapiens
ctcattggattctag

SEQ ID NO: 1778871 - DNA, 15 bp, Homo sapiens
tcattggattctagg

SEQ ID NO: 1778872 - DNA, 15 bp, Homo sapiens
cattggattctagga

SEQ ID NO: 1778873 - DNA, 15 bp, Homo sapiens
attggattctaggaa

SEQ ID NO: 1778874 - DNA, 15 bp, Homo sapiens
ttggattctaggaag

SEQ ID NO: 1778875 - DNA, 15 bp, Homo sapiens
tggattctaggaaga

SEQ ID NO: 1778876 - DNA, 15 bp, Homo sapiens
ggattctaggaagaa

SEQ ID NO: 1778877 - DNA, 15 bp, Homo sapiens
gattctaggaagaat

SEQ ID NO: 1778878 - DNA, 15 bp, Homo sapiens
attctaggaagaatt

SEQ ID NO: 1778879 - DNA, 15 bp, Homo sapiens
ttctaggaagaattt

SEQ ID NO: 1778880 - DNA, 15 bp, Homo sapiens
tctaggaagaatttt

SEQ ID NO: 1778881 - DNA, 15 bp, Homo sapiens
ctaggaagaattttc

SEQ ID NO: 1778882 - DNA, 15 bp, Homo sapiens
taggaagaattttca

SEQ ID NO: 1778883 - DNA, 15 bp, Homo sapiens
aggaagaattttcat

SEQ ID NO: 1778884 - DNA, 15 bp, Homo sapiens
ggaagaattttcatg

SEQ ID NO: 1778885 - DNA, 15 bp, Homo sapiens
gaagaattttcatgg

SEQ ID NO: 1778886 - DNA, 15 bp, Homo sapiens
aagaattttcatggt

SEQ ID NO: 1778887 - DNA, 15 bp, Homo sapiens
agaattttcatggta

SEQ ID NO: 1778888 - DNA, 15 bp, Homo sapiens
gaattttcatggtaa

SEQ ID NO: 1778889 - DNA, 15 bp, Homo sapiens
aattttcatggtaat

SEQ ID NO: 1778890 - DNA, 15 bp, Homo sapiens
attttcatggtaata

SEQ ID NO: 1778891 - DNA, 15 bp, Homo sapiens
ttttcatggtaataa

SEQ ID NO: 1778892 - DNA, 15 bp, Homo sapiens
tttcatggtaataat

SEQ ID NO: 1778893 - DNA, 15 bp, Homo sapiens
ttcatggtaataatc

SEQ ID NO: 1778894 - DNA, 15 bp, Homo sapiens
tcatggtaataatca

SEQ ID NO: 1778895 - DNA, 15 bp, Homo sapiens
catggtaataatcat

SEQ ID NO: 1778896 - DNA, 15 bp, Homo sapiens
atggtaataatcata

SEQ ID NO: 1778897 - DNA, 15 bp, Homo sapiens
tggtaataatcatat

SEQ ID NO: 1778898 - DNA, 15 bp, Homo sapiens
ggtaataatcatatg

SEQ ID NO: 1778899 - DNA, 15 bp, Homo sapiens
gtaataatcatatgt

SEQ ID NO: 1778900 - DNA, 15 bp, Homo sapiens
taataatcatatgta

SEQ ID NO: 1778901 - DNA, 15 bp, Homo sapiens
aataatcatatgtag

SEQ ID NO: 1778902 - DNA, 15 bp, Homo sapiens
ataatcatatgtagt

SEQ ID NO: 1778903 - DNA, 15 bp, Homo sapiens
taatcatatgtagtc

SEQ ID NO: 1778904 - DNA, 15 bp, Homo sapiens
aatcatatgtagtct

SEQ ID NO: 1778905 - DNA, 15 bp, Homo sapiens
atcatatgtagtctt

SEQ ID NO: 1778906 - DNA, 15 bp, Homo sapiens
tcatatgtagtcttt

SEQ ID NO: 1778907 - DNA, 15 bp, Homo sapiens
catatgtagtcttta

SEQ ID NO: 1778908 - DNA, 15 bp, Homo sapiens
atatgtagtctttac

SEQ ID NO: 1778909 - DNA, 15 bp, Homo sapiens
tatgtagtctttaca

SEQ ID NO: 1778910 - DNA, 15 bp, Homo sapiens
atgtagtctttacag

SEQ ID NO: 1778911 - DNA, 15 bp, Homo sapiens
tgtagtctttacagc

SEQ ID NO: 1778912 - DNA, 15 bp, Homo sapiens
gtagtctttacagct

SEQ ID NO: 1778913 - DNA, 15 bp, Homo sapiens
tagtctttacagctt

SEQ ID NO: 1778914 - DNA, 15 bp, Homo sapiens
agtctttacagcttg

SEQ ID NO: 1778915 - DNA, 15 bp, Homo sapiens
gtctttacagcttgt

SEQ ID NO: 1778916 - DNA, 15 bp, Homo sapiens
tctttacagcttgtt

SEQ ID NO: 1778917 - DNA, 15 bp, Homo sapiens
ctttacagcttgttt

SEQ ID NO: 1778918 - DNA, 15 bp, Homo sapiens
tttacagcttgtttt

SEQ ID NO: 1778919 - DNA, 15 bp, Homo sapiens
ttacagcttgtttta

SEQ ID NO: 1778920 - DNA, 15 bp, Homo sapiens
tacagcttgttttat

SEQ ID NO: 1778921 - DNA, 15 bp, Homo sapiens
acagcttgttttatt

SEQ ID NO: 1778922 - DNA, 15 bp, Homo sapiens
cagcttgttttattt

SEQ ID NO: 1778923 - DNA, 15 bp, Homo sapiens
gcttgttttattttt

SEQ ID NO: 1778924 - DNA, 15 bp, Homo sapiens
cttgttttatttttt

SEQ ID NO: 1778925 - DNA, 15 bp, Homo sapiens
ttgttttattttttt

SEQ ID NO: 1778926 - DNA, 15 bp, Homo sapiens
tgttttatttttttc

SEQ ID NO: 1778927 - DNA, 15 bp, Homo sapiens
gttttatttttttct

SEQ ID NO: 1778928 - DNA, 15 bp, Homo sapiens
ttttatttttttcta

SEQ ID NO: 1778929 - DNA, 15 bp, Homo sapiens
tttatttttttctaa

SEQ ID NO: 1778930 - DNA, 15 bp, Homo sapiens
tatttttttctaata

SEQ ID NO: 1778931 - DNA, 15 bp, Homo sapiens
atttttttctaataa

SEQ ID NO: 1778932 - DNA, 15 bp, Homo sapiens
tttttttctaataaa

SEQ ID NO: 1778933 - DNA, 15 bp, Homo sapiens
ttttttctaataaag

SEQ ID NO: 1778934 - DNA, 15 bp, Homo sapiens
tttttctaataaagc

SEQ ID NO: 1778935 - DNA, 15 bp, Homo sapiens
ttttctaataaagct

SEQ ID NO: 1778936 - DNA, 15 bp, Homo sapiens
tttctaataaagcta

SEQ ID NO: 1778937 - DNA, 15 bp, Homo sapiens
ttctaataaagctaa

SEQ ID NO: 1778938 - DNA, 15 bp, Homo sapiens
tctaataaagctaat

SEQ ID NO: 1778939 - DNA, 15 bp, Homo sapiens
ctaataaagctaatt

SEQ ID NO: 1778940 - DNA, 15 bp, Homo sapiens
taataaagctaattc

SEQ ID NO: 1778941 - DNA, 15 bp, Homo sapiens
aataaagctaattca

SEQ ID NO: 1778942 - DNA, 15 bp, Homo sapiens
ataaagctaattcag

SEQ ID NO: 1778943 - DNA, 15 bp, Homo sapiens
taaagctaattcagt

SEQ ID NO: 1778944 - DNA, 15 bp, Homo sapiens
aaagctaattcagtt

SEQ ID NO: 1778945 - DNA, 15 bp, Homo sapiens
aagctaattcagttc

SEQ ID NO: 1778946 - DNA, 15 bp, Homo sapiens
agctaattcagttca

SEQ ID NO: 1778947 - DNA, 15 bp, Homo sapiens
gctaattcagttcac

SEQ ID NO: 1778948 - DNA, 15 bp, Homo sapiens
ctaattcagttcacc

SEQ ID NO: 1778949 - DNA, 15 bp, Homo sapiens
taattcagttcacca

SEQ ID NO: 1778950 - DNA, 15 bp, Homo sapiens
aattcagttcaccag

SEQ ID NO: 1778951 - DNA, 15 bp, Homo sapiens
attcagttcaccagt

SEQ ID NO: 1778952 - DNA, 15 bp, Homo sapiens
ttcagttcaccagtt

SEQ ID NO: 1778953 - DNA, 15 bp, Homo sapiens
tcagttcaccagtta

SEQ ID NO: 1778954 - DNA, 15 bp, Homo sapiens
cagttcaccagttat

SEQ ID NO: 1778955 - DNA, 15 bp, Homo sapiens
agttcaccagttatc

SEQ ID NO: 1778956 - DNA, 15 bp, Homo sapiens
gttcaccagttatct

SEQ ID NO: 1778957 - DNA, 15 bp, Homo sapiens
ttcaccagttatcta

SEQ ID NO: 1778958 - DNA, 15 bp, Homo sapiens
tcaccagttatctac

SEQ ID NO: 1778959 - DNA, 15 bp, Homo sapiens
caccagttatctacc

SEQ ID NO: 1778960 - DNA, 15 bp, Homo sapiens
accagttatctacca

SEQ ID NO: 1778961 - DNA, 15 bp, Homo sapiens
ccagttatctaccac

SEQ ID NO: 1778962 - DNA, 15 bp, Homo sapiens
cagttatctaccact

SEQ ID NO: 1778963 - DNA, 15 bp, Homo sapiens
agttatctaccactt

SEQ ID NO: 1778964 - DNA, 15 bp, Homo sapiens
gttatctaccacttg

SEQ ID NO: 1778965 - DNA, 15 bp, Homo sapiens
ttatctaccacttgc

SEQ ID NO: 1778966 - DNA, 15 bp, Homo sapiens
tatctaccacttgcg

SEQ ID NO: 1778967 - DNA, 15 bp, Homo sapiens
atctaccacttgcgg

SEQ ID NO: 1778968 - DNA, 15 bp, Homo sapiens
tctaccacttgcggt

SEQ ID NO: 1778969 - DNA, 15 bp, Homo sapiens
ctaccacttgcggtt

SEQ ID NO: 1778970 - DNA, 15 bp, Homo sapiens
taccacttgcggttt

SEQ ID NO: 1778971 - DNA, 15 bp, Homo sapiens
accacttgcggtttt

SEQ ID NO: 1778972 - DNA, 15 bp, Homo sapiens
ccacttgcggtttta

SEQ ID NO: 1778973 - DNA, 15 bp, Homo sapiens
cacttgcggttttaa

SEQ ID NO: 1778974 - DNA, 15 bp, Homo sapiens
acttgcggttttaaa

SEQ ID NO: 1778975 - DNA, 15 bp, Homo sapiens
cttgcggttttaaag

SEQ ID NO: 1778976 - DNA, 15 bp, Homo sapiens
ttgcggttttaaaga

SEQ ID NO: 1778977 - DNA, 15 bp, Homo sapiens
tgcggttttaaagat

SEQ ID NO: 1778978 - DNA, 15 bp, Homo sapiens
gcggttttaaagatt

SEQ ID NO: 1778979 - DNA, 15 bp, Homo sapiens
cggttttaaagatta

SEQ ID NO: 1778980 - DNA, 15 bp, Homo sapiens
ggttttaaagattaa

SEQ ID NO: 1778981 - DNA, 15 bp, Homo sapiens
gttttaaagattaac

SEQ ID NO: 1778982 - DNA, 15 bp, Homo sapiens
ttttaaagattaact

SEQ ID NO: 1778983 - DNA, 15 bp, Homo sapiens
tttaaagattaactc

SEQ ID NO: 1778984 - DNA, 15 bp, Homo sapiens
ttaaagattaactca

SEQ ID NO: 1778985 - DNA, 15 bp, Homo sapiens
taaagattaactcat

SEQ ID NO: 1778986 - DNA, 15 bp, Homo sapiens
aaagattaactcata

SEQ ID NO: 1778987 - DNA, 15 bp, Homo sapiens
aagattaactcataa

SEQ ID NO: 1778988 - DNA, 15 bp, Homo sapiens
agattaactcataaa

SEQ ID NO: 1778989 - DNA, 15 bp, Homo sapiens
gattaactcataaag

SEQ ID NO: 1778990 - DNA, 15 bp, Homo sapiens
attaactcataaaga

SEQ ID NO: 1778991 - DNA, 15 bp, Homo sapiens
ttaactcataaagaa

SEQ ID NO: 1778992 - DNA, 15 bp, Homo sapiens
taactcataaagaat

SEQ ID NO: 1778993 - DNA, 15 bp, Homo sapiens
aactcataaagaata

SEQ ID NO: 1778994 - DNA, 15 bp, Homo sapiens
actcataaagaataa

SEQ ID NO: 1778995 - DNA, 15 bp, Homo sapiens
ctcataaagaataaa

SEQ ID NO: 1778996 - DNA, 15 bp, Homo sapiens
tcataaagaataaac

SEQ ID NO: 1778997 - DNA, 15 bp, Homo sapiens
cataaagaataaaca

SEQ ID NO: 1778998 - DNA, 15 bp, Homo sapiens
ataaagaataaacaa

SEQ ID NO: 1778999 - DNA, 15 bp, Homo sapiens
taaagaataaacaaa

SEQ ID NO: 1779000 - DNA, 15 bp, Homo sapiens
aaagaataaacaaat

SEQ ID NO: 1779001 - DNA, 15 bp, Homo sapiens
aagaataaacaaatt

SEQ ID NO: 1779002 - DNA, 15 bp, Homo sapiens
agaataaacaaattg

SEQ ID NO: 1779003 - DNA, 15 bp, Homo sapiens
gaataaacaaattgt

SEQ ID NO: 1779004 - DNA, 15 bp, Homo sapiens
aataaacaaattgtt

SEQ ID NO: 1779005 - DNA, 15 bp, Homo sapiens
ataaacaaattgttt

SEQ ID NO: 1779006 - DNA, 15 bp, Homo sapiens
taaacaaattgttta

SEQ ID NO: 1779007 - DNA, 15 bp, Homo sapiens
aaacaaattgtttac

SEQ ID NO: 1779008 - DNA, 15 bp, Homo sapiens
aacaaattgtttact

SEQ ID NO: 1779009 - DNA, 15 bp, Homo sapiens
acaaattgtttactg

SEQ ID NO: 1779010 - DNA, 15 bp, Homo sapiens
caaattgtttactgc

SEQ ID NO: 1779011 - DNA, 15 bp, Homo sapiens
aaattgtttactgca

SEQ ID NO: 1779012 - DNA, 15 bp, Homo sapiens
aattgtttactgcaa

SEQ ID NO: 1779013 - DNA, 15 bp, Homo sapiens
attgtttactgcaaa

SEQ ID NO: 1779014 - DNA, 15 bp, Homo sapiens
ttgtttactgcaaac

SEQ ID NO: 1779015 - DNA, 15 bp, Homo sapiens
tgtttactgcaaact

SEQ ID NO: 1779016 - DNA, 15 bp, Homo sapiens
gtttactgcaaactt

SEQ ID NO: 1779017 - DNA, 15 bp, Homo sapiens
tttactgcaaacttt

SEQ ID NO: 1779018 - DNA, 15 bp, Homo sapiens
ttactgcaaactttg

SEQ ID NO: 1779019 - DNA, 15 bp, Homo sapiens
tactgcaaactttgt

SEQ ID NO: 1779020 - DNA, 15 bp, Homo sapiens
actgcaaactttgtc

SEQ ID NO: 1779021 - DNA, 15 bp, Homo sapiens
ctgcaaactttgtct

SEQ ID NO: 1779022 - DNA, 15 bp, Homo sapiens
tgcaaactttgtctt

SEQ ID NO: 1779023 - DNA, 15 bp, Homo sapiens
gcaaactttgtcttt

SEQ ID NO: 1779024 - DNA, 15 bp, Homo sapiens
caaactttgtcttta

SEQ ID NO: 1779025 - DNA, 15 bp, Homo sapiens
aaactttgtctttaa

SEQ ID NO: 1779026 - DNA, 15 bp, Homo sapiens
aactttgtctttaac

SEQ ID NO: 1779027 - DNA, 15 bp, Homo sapiens
actttgtctttaact

SEQ ID NO: 1779028 - DNA, 15 bp, Homo sapiens
ctttgtctttaactg

SEQ ID NO: 1779029 - DNA, 15 bp, Homo sapiens
tttgtctttaactgg

SEQ ID NO: 1779030 - DNA, 15 bp, Homo sapiens
ttgtctttaactgga

SEQ ID NO: 1779031 - DNA, 15 bp, Homo sapiens
tgtctttaactggaa

SEQ ID NO: 1779032 - DNA, 15 bp, Homo sapiens
gtctttaactggaag

SEQ ID NO: 1779033 - DNA, 15 bp, Homo sapiens
tctttaactggaagt

SEQ ID NO: 1779034 - DNA, 15 bp, Homo sapiens
ctttaactggaagtt

SEQ ID NO: 1779035 - DNA, 15 bp, Homo sapiens
tttaactggaagtta

SEQ ID NO: 1779036 - DNA, 15 bp, Homo sapiens
ttaactggaagttaa

SEQ ID NO: 1779037 - DNA, 15 bp, Homo sapiens
taactggaagttaaa

SEQ ID NO: 1779038 - DNA, 15 bp, Homo sapiens
aactggaagttaaat

SEQ ID NO: 1779039 - DNA, 15 bp, Homo sapiens
actggaagttaaatt

SEQ ID NO: 1779040 - DNA, 15 bp, Homo sapiens
ctggaagttaaatta

SEQ ID NO: 1779041 - DNA, 15 bp, Homo sapiens
tggaagttaaattat

SEQ ID NO: 1779042 - DNA, 15 bp, Homo sapiens
ggaagttaaattatt

SEQ ID NO: 1779043 - DNA, 15 bp, Homo sapiens
gaagttaaattattt

SEQ ID NO: 1779044 - DNA, 15 bp, Homo sapiens
aagttaaattatttt

SEQ ID NO: 1779045 - DNA, 15 bp, Homo sapiens
agttaaattattttt

SEQ ID NO: 1779046 - DNA, 15 bp, Homo sapiens
gttaaattattttta

SEQ ID NO: 1779047 - DNA, 15 bp, Homo sapiens
ttaaattatttttac

SEQ ID NO: 1779048 - DNA, 15 bp, Homo sapiens
taaattatttttacc

SEQ ID NO: 1779049 - DNA, 15 bp, Homo sapiens
aaattatttttacca

SEQ ID NO: 1779050 - DNA, 15 bp, Homo sapiens
aattatttttaccaa

SEQ ID NO: 1779051 - DNA, 15 bp, Homo sapiens
attatttttaccaat

SEQ ID NO: 1779052 - DNA, 15 bp, Homo sapiens
ttatttttaccaatg

SEQ ID NO: 1779053 - DNA, 15 bp, Homo sapiens
tatttttaccaatga

SEQ ID NO: 1779054 - DNA, 15 bp, Homo sapiens
atttttaccaatgac

SEQ ID NO: 1779055 - DNA, 15 bp, Homo sapiens
tttttaccaatgaca

SEQ ID NO: 1779056 - DNA, 15 bp, Homo sapiens
ttttaccaatgacaa

SEQ ID NO: 1779057 - DNA, 15 bp, Homo sapiens
tttaccaatgacaaa

SEQ ID NO: 1779058 - DNA, 15 bp, Homo sapiens
ttaccaatgacaaag

SEQ ID NO: 1779059 - DNA, 15 bp, Homo sapiens
taccaatgacaaagg

SEQ ID NO: 1779060 - DNA, 15 bp, Homo sapiens
accaatgacaaaggt

SEQ ID NO: 1779061 - DNA, 15 bp, Homo sapiens
ccaatgacaaaggtg

SEQ ID NO: 1779062 - DNA, 15 bp, Homo sapiens
caatgacaaaggtga

SEQ ID NO: 1779063 - DNA, 15 bp, Homo sapiens
aatgacaaaggtgaa

SEQ ID NO: 1779064 - DNA, 15 bp, Homo sapiens
atgacaaaggtgaaa

SEQ ID NO: 1779065 - DNA, 15 bp, Homo sapiens
tgacaaaggtgaaaa

SEQ ID NO: 1779066 - DNA, 15 bp, Homo sapiens
gacaaaggtgaaaat

SEQ ID NO: 1779067 - DNA, 15 bp, Homo sapiens
acaaaggtgaaaatg

SEQ ID NO: 1779068 - DNA, 15 bp, Homo sapiens
caaaggtgaaaatgt

SEQ ID NO: 1779069 - DNA, 15 bp, Homo sapiens
aaaggtgaaaatgtt

SEQ ID NO: 1779070 - DNA, 15 bp, Homo sapiens
aaggtgaaaatgttg

SEQ ID NO: 1779071 - DNA, 15 bp, Homo sapiens
aggtgaaaatgttgt

SEQ ID NO: 1779072 - DNA, 15 bp, Homo sapiens
ggtgaaaatgttgtt

SEQ ID NO: 1779073 - DNA, 15 bp, Homo sapiens
gtgaaaatgttgttt

SEQ ID NO: 1779074 - DNA, 15 bp, Homo sapiens
tgaaaatgttgtttt

SEQ ID NO: 1779075 - DNA, 15 bp, Homo sapiens
gaaaatgttgttttg

SEQ ID NO: 1779076 - DNA, 15 bp, Homo sapiens
aaaatgttgttttga

SEQ ID NO: 1779077 - DNA, 15 bp, Homo sapiens
aaatgttgttttgag

SEQ ID NO: 1779078 - DNA, 15 bp, Homo sapiens
aatgttgttttgaga

SEQ ID NO: 1779079 - DNA, 15 bp, Homo sapiens
atgttgttttgagat

SEQ ID NO: 1779080 - DNA, 15 bp, Homo sapiens
tgttgttttgagatt

SEQ ID NO: 1779081 - DNA, 15 bp, Homo sapiens
gttgttttgagattc

SEQ ID NO: 1779082 - DNA, 15 bp, Homo sapiens
ttgttttgagattct

SEQ ID NO: 1779083 - DNA, 15 bp, Homo sapiens
tgttttgagattctt

SEQ ID NO: 1779084 - DNA, 15 bp, Homo sapiens
gttttgagattcttt

SEQ ID NO: 1779085 - DNA, 15 bp, Homo sapiens
ttttgagattctttg

SEQ ID NO: 1779086 - DNA, 15 bp, Homo sapiens
tttgagattctttgc

SEQ ID NO: 1779087 - DNA, 15 bp, Homo sapiens
ttgagattctttgct

SEQ ID NO: 1779088 - DNA, 15 bp, Homo sapiens
tgagattctttgctg

SEQ ID NO: 1779089 - DNA, 15 bp, Homo sapiens
gagattctttgctgg

SEQ ID NO: 1779090 - DNA, 15 bp, Homo sapiens
agattctttgctggt

SEQ ID NO: 1779091 - DNA, 15 bp, Homo sapiens
gattctttgctggta

SEQ ID NO: 1779092 - DNA, 15 bp, Homo sapiens
attctttgctggtag

SEQ ID NO: 1779093 - DNA, 15 bp, Homo sapiens
ttctttgctggtagt

SEQ ID NO: 1779094 - DNA, 15 bp, Homo sapiens
tctttgctggtagta

SEQ ID NO: 1779095 - DNA, 15 bp, Homo sapiens
ctttgctggtagtat

SEQ ID NO: 1779096 - DNA, 15 bp, Homo sapiens
tttgctggtagtatc

SEQ ID NO: 1779097 - DNA, 15 bp, Homo sapiens
ttgctggtagtatct

SEQ ID NO: 1779098 - DNA, 15 bp, Homo sapiens
tgctggtagtatctc

SEQ ID NO: 1779099 - DNA, 15 bp, Homo sapiens
gctggtagtatctcc

SEQ ID NO: 1779100 - DNA, 15 bp, Homo sapiens
ctggtagtatctccc

SEQ ID NO: 1779101 - DNA, 15 bp, Homo sapiens
tggtagtatctccct

SEQ ID NO: 1779102 - DNA, 15 bp, Homo sapiens
ggtagtatctccctt

SEQ ID NO: 1779103 - DNA, 15 bp, Homo sapiens
gtagtatctcccttt

SEQ ID NO: 1779104 - DNA, 15 bp, Homo sapiens
tagtatctccctttt

SEQ ID NO: 1779105 - DNA, 15 bp, Homo sapiens
agtatctcccttttg

SEQ ID NO: 1779106 - DNA, 15 bp, Homo sapiens
gtatctcccttttgc

SEQ ID NO: 1779107 - DNA, 15 bp, Homo sapiens
tatctcccttttgca

SEQ ID NO: 1779108 - DNA, 15 bp, Homo sapiens
atctcccttttgcag

SEQ ID NO: 1779109 - DNA, 15 bp, Homo sapiens
tctcccttttgcaga

SEQ ID NO: 1779110 - DNA, 15 bp, Homo sapiens
ctcccttttgcagac

SEQ ID NO: 1779111 - DNA, 15 bp, Homo sapiens
tcccttttgcagaca

SEQ ID NO: 1779112 - DNA, 15 bp, Homo sapiens
cccttttgcagacag

SEQ ID NO: 1779113 - DNA, 15 bp, Homo sapiens
ccttttgcagacagc

SEQ ID NO: 1779114 - DNA, 15 bp, Homo sapiens
cttttgcagacagca

SEQ ID NO: 1779115 - DNA, 15 bp, Homo sapiens
ttttgcagacagcag

SEQ ID NO: 1779116 - DNA, 15 bp, Homo sapiens
tttgcagacagcaga

SEQ ID NO: 1779117 - DNA, 15 bp, Homo sapiens
ttgcagacagcagac

SEQ ID NO: 1779118 - DNA, 15 bp, Homo sapiens
tgcagacagcagact

SEQ ID NO: 1779119 - DNA, 15 bp, Homo sapiens
gcagacagcagactg

SEQ ID NO: 1779120 - DNA, 15 bp, Homo sapiens
cagacagcagactgt

SEQ ID NO: 1779121 - DNA, 15 bp, Homo sapiens
agacagcagactgtg

SEQ ID NO: 1779122 - DNA, 15 bp, Homo sapiens
gacagcagactgtga

SEQ ID NO: 1779123 - DNA, 15 bp, Homo sapiens
acagcagactgtgag

SEQ ID NO: 1779124 - DNA, 15 bp, Homo sapiens
cagcagactgtgaga

SEQ ID NO: 1779125 - DNA, 15 bp, Homo sapiens
agcagactgtgagaa

SEQ ID NO: 1779126 - DNA, 15 bp, Homo sapiens
gcagactgtgagaaa

SEQ ID NO: 1779127 - DNA, 15 bp, Homo sapiens
cagactgtgagaaaa

SEQ ID NO: 1779128 - DNA, 15 bp, Homo sapiens
agactgtgagaaaac

SEQ ID NO: 1779129 - DNA, 15 bp, Homo sapiens
gactgtgagaaaact

SEQ ID NO: 1779130 - DNA, 15 bp, Homo sapiens
actgtgagaaaacta

SEQ ID NO: 1779131 - DNA, 15 bp, Homo sapiens
ctgtgagaaaactag

SEQ ID NO: 1779132 - DNA, 15 bp, Homo sapiens
tgtgagaaaactagg

SEQ ID NO: 1779133 - DNA, 15 bp, Homo sapiens
gagaaaactagggct

SEQ ID NO: 1779134 - DNA, 15 bp, Homo sapiens
agaaaactagggcta

SEQ ID NO: 1779135 - DNA, 15 bp, Homo sapiens
gaaaactagggctat

SEQ ID NO: 1779136 - DNA, 15 bp, Homo sapiens
aaaactagggctatc

SEQ ID NO: 1779137 - DNA, 15 bp, Homo sapiens
aaactagggctatca

SEQ ID NO: 1779138 - DNA, 15 bp, Homo sapiens
aactagggctatcac

SEQ ID NO: 1779139 - DNA, 15 bp, Homo sapiens
actagggctatcaca

SEQ ID NO: 1779140 - DNA, 15 bp, Homo sapiens
ctagggctatcacac

SEQ ID NO: 1779141 - DNA, 15 bp, Homo sapiens
tagggctatcacaca

SEQ ID NO: 1779142 - DNA, 15 bp, Homo sapiens
agggctatcacacag

SEQ ID NO: 1779143 - DNA, 15 bp, Homo sapiens
gggctatcacacagg

SEQ ID NO: 1779144 - DNA, 15 bp, Homo sapiens
ggctatcacacaggc

SEQ ID NO: 1779145 - DNA, 15 bp, Homo sapiens
gctatcacacaggcc

SEQ ID NO: 1779146 - DNA, 15 bp, Homo sapiens
ctatcacacaggcca

SEQ ID NO: 1779147 - DNA, 15 bp, Homo sapiens
tatcacacaggccat

SEQ ID NO: 1779148 - DNA, 15 bp, Homo sapiens
atcacacaggccatg

SEQ ID NO: 1779149 - DNA, 15 bp, Homo sapiens
tcacacaggccatgc

SEQ ID NO: 1779150 - DNA, 15 bp, Homo sapiens
cacacaggccatgcc

SEQ ID NO: 1779151 - DNA, 15 bp, Homo sapiens
acacaggccatgcca

SEQ ID NO: 1779152 - DNA, 15 bp, Homo sapiens
cacaggccatgccag

SEQ ID NO: 1779153 - DNA, 15 bp, Homo sapiens
acaggccatgccaga

SEQ ID NO: 1779154 - DNA, 15 bp, Homo sapiens
caggccatgccagag

SEQ ID NO: 1779155 - DNA, 15 bp, Homo sapiens
aggccatgccagagg

SEQ ID NO: 1779156 - DNA, 15 bp, Homo sapiens
ggccatgccagaggg

SEQ ID NO: 1779157 - DNA, 15 bp, Homo sapiens
gccatgccagaggga

SEQ ID NO: 1779158 - DNA, 15 bp, Homo sapiens
ccatgccagagggag

SEQ ID NO: 1779159 - DNA, 15 bp, Homo sapiens
catgccagagggaga

SEQ ID NO: 1779160 - DNA, 15 bp, Homo sapiens
atgccagagggagaa

SEQ ID NO: 1779161 - DNA, 15 bp, Homo sapiens
tgccagagggagaaa

SEQ ID NO: 1779162 - DNA, 15 bp, Homo sapiens
gccagagggagaaaa

SEQ ID NO: 1779163 - DNA, 15 bp, Homo sapiens
ccagagggagaaaaa

SEQ ID NO: 1779164 - DNA, 15 bp, Homo sapiens
cagagggagaaaaag

SEQ ID NO: 1779165 - DNA, 15 bp, Homo sapiens
agagggagaaaaagg

SEQ ID NO: 1779166 - DNA, 15 bp, Homo sapiens
gagggagaaaaagga

SEQ ID NO: 1779167 - DNA, 15 bp, Homo sapiens
agggagaaaaaggaa

SEQ ID NO: 1779168 - DNA, 15 bp, Homo sapiens
gggagaaaaaggaat

SEQ ID NO: 1779169 - DNA, 15 bp, Homo sapiens
ggagaaaaaggaata

SEQ ID NO: 1779170 - DNA, 15 bp, Homo sapiens
gagaaaaaggaataa

SEQ ID NO: 1779171 - DNA, 15 bp, Homo sapiens
agaaaaaggaataac

SEQ ID NO: 1779172 - DNA, 15 bp, Homo sapiens
gaaaaaggaataacc

SEQ ID NO: 1779173 - DNA, 15 bp, Homo sapiens
aaaaaggaataacca

SEQ ID NO: 1779174 - DNA, 15 bp, Homo sapiens
aaaaggaataaccaa

SEQ ID NO: 1779175 - DNA, 15 bp, Homo sapiens
aaaggaataaccaat

SEQ ID NO: 1779176 - DNA, 15 bp, Homo sapiens
aaggaataaccaata

SEQ ID NO: 1779177 - DNA, 15 bp, Homo sapiens
aggaataaccaatat

SEQ ID NO: 1779178 - DNA, 15 bp, Homo sapiens
ggaataaccaatatg

SEQ ID NO: 1779179 - DNA, 15 bp, Homo sapiens
gaataaccaatatga

SEQ ID NO: 1779180 - DNA, 15 bp, Homo sapiens
aataaccaatatgag

SEQ ID NO: 1779181 - DNA, 15 bp, Homo sapiens
ataaccaatatgaga

SEQ ID NO: 1779182 - DNA, 15 bp, Homo sapiens
taaccaatatgagac

SEQ ID NO: 1779183 - DNA, 15 bp, Homo sapiens
aaccaatatgagaca

SEQ ID NO: 1779184 - DNA, 15 bp, Homo sapiens
accaatatgagacaa

SEQ ID NO: 1779185 - DNA, 15 bp, Homo sapiens
ccaatatgagacaaa

SEQ ID NO: 1779186 - DNA, 15 bp, Homo sapiens
caatatgagacaaaa

SEQ ID NO: 1779187 - DNA, 15 bp, Homo sapiens
aatatgagacaaaaa

SEQ ID NO: 1779188 - DNA, 15 bp, Homo sapiens
atatgagacaaaaac

SEQ ID NO: 1779189 - DNA, 15 bp, Homo sapiens
tatgagacaaaaacc

SEQ ID NO: 1779190 - DNA, 15 bp, Homo sapiens
atgagacaaaaacca

SEQ ID NO: 1779191 - DNA, 15 bp, Homo sapiens
tgagacaaaaaccac

SEQ ID NO: 1779192 - DNA, 15 bp, Homo sapiens
gagacaaaaaccacc

SEQ ID NO: 1779193 - DNA, 15 bp, Homo sapiens
agacaaaaaccacca

SEQ ID NO: 1779194 - DNA, 15 bp, Homo sapiens
gacaaaaaccaccaa

SEQ ID NO: 1779195 - DNA, 15 bp, Homo sapiens
acaaaaaccaccaag

SEQ ID NO: 1779196 - DNA, 15 bp, Homo sapiens
caaaaaccaccaagt

SEQ ID NO: 1779197 - DNA, 15 bp, Homo sapiens
aaaaaccaccaagtc

SEQ ID NO: 1779198 - DNA, 15 bp, Homo sapiens
aaaaccaccaagtcc

SEQ ID NO: 1779199 - DNA, 15 bp, Homo sapiens
aaaccaccaagtcca

SEQ ID NO: 1779200 - DNA, 15 bp, Homo sapiens
aaccaccaagtccac

SEQ ID NO: 1779201 - DNA, 15 bp, Homo sapiens
accaccaagtccact

SEQ ID NO: 1779202 - DNA, 15 bp, Homo sapiens
ccaccaagtccacta

SEQ ID NO: 1779203 - DNA, 15 bp, Homo sapiens
caccaagtccactag

SEQ ID NO: 1779204 - DNA, 15 bp, Homo sapiens
accaagtccactaga

SEQ ID NO: 1779205 - DNA, 15 bp, Homo sapiens
ccaagtccactagat

SEQ ID NO: 1779206 - DNA, 15 bp, Homo sapiens
caagtccactagatc

SEQ ID NO: 1779207 - DNA, 15 bp, Homo sapiens
aagtccactagatct

SEQ ID NO: 1779208 - DNA, 15 bp, Homo sapiens
agtccactagatctt

SEQ ID NO: 1779209 - DNA, 15 bp, Homo sapiens
gtccactagatcttc

SEQ ID NO: 1779210 - DNA, 15 bp, Homo sapiens
tccactagatcttca

SEQ ID NO: 1779211 - DNA, 15 bp, Homo sapiens
ccactagatcttcaa

SEQ ID NO: 1779212 - DNA, 15 bp, Homo sapiens
cactagatcttcaac

SEQ ID NO: 1779213 - DNA, 15 bp, Homo sapiens
actagatcttcaaca

SEQ ID NO: 1779214 - DNA, 15 bp, Homo sapiens
ctagatcttcaacat

SEQ ID NO: 1779215 - DNA, 15 bp, Homo sapiens
tagatcttcaacatg

SEQ ID NO: 1779216 - DNA, 15 bp, Homo sapiens
agatcttcaacatga

SEQ ID NO: 1779217 - DNA, 15 bp, Homo sapiens
gatcttcaacatgac

SEQ ID NO: 1779218 - DNA, 15 bp, Homo sapiens
atcttcaacatgaca

SEQ ID NO: 1779219 - DNA, 15 bp, Homo sapiens
tcttcaacatgacaa

SEQ ID NO: 1779220 - DNA, 15 bp, Homo sapiens
cttcaacatgacaat

SEQ ID NO: 1779221 - DNA, 15 bp, Homo sapiens
ttcaacatgacaatg

SEQ ID NO: 1779222 - DNA, 15 bp, Homo sapiens
tcaacatgacaatga

SEQ ID NO: 1779223 - DNA, 15 bp, Homo sapiens
caacatgacaatgat

SEQ ID NO: 1779224 - DNA, 15 bp, Homo sapiens
aacatgacaatgata

SEQ ID NO: 1779225 - DNA, 15 bp, Homo sapiens
acatgacaatgatac

SEQ ID NO: 1779226 - DNA, 15 bp, Homo sapiens
catgacaatgatacg

SEQ ID NO: 1779227 - DNA, 15 bp, Homo sapiens
atgacaatgatacgg

SEQ ID NO: 1779228 - DNA, 15 bp, Homo sapiens
tgacaatgatacggc

SEQ ID NO: 1779229 - DNA, 15 bp, Homo sapiens
gacaatgatacggcc

SEQ ID NO: 1779230 - DNA, 15 bp, Homo sapiens
acaatgatacggcct

SEQ ID NO: 1779231 - DNA, 15 bp, Homo sapiens
caatgatacggcctc

SEQ ID NO: 1779232 - DNA, 15 bp, Homo sapiens
aatgatacggcctca

SEQ ID NO: 1779233 - DNA, 15 bp, Homo sapiens
atgatacggcctcaa

SEQ ID NO: 1779234 - DNA, 15 bp, Homo sapiens
tgatacggcctcaaa

SEQ ID NO: 1779235 - DNA, 15 bp, Homo sapiens
gatacggcctcaaaa

SEQ ID NO: 1779236 - DNA, 15 bp, Homo sapiens
atacggcctcaaaat

SEQ ID NO: 1779237 - DNA, 15 bp, Homo sapiens
tacggcctcaaaata

SEQ ID NO: 1779238 - DNA, 15 bp, Homo sapiens
acggcctcaaaataa

SEQ ID NO: 1779239 - DNA, 15 bp, Homo sapiens
cggcctcaaaataat

SEQ ID NO: 1779240 - DNA, 15 bp, Homo sapiens
ggcctcaaaataatg

SEQ ID NO: 1779241 - DNA, 15 bp, Homo sapiens
gcctcaaaataatgc

SEQ ID NO: 1779242 - DNA, 15 bp, Homo sapiens
cctcaaaataatgca

SEQ ID NO: 1779243 - DNA, 15 bp, Homo sapiens
ctcaaaataatgcat

SEQ ID NO: 1779244 - DNA, 15 bp, Homo sapiens
tcaaaataatgcatt

SEQ ID NO: 1779245 - DNA, 15 bp, Homo sapiens
caaaataatgcattg

SEQ ID NO: 1779246 - DNA, 15 bp, Homo sapiens
aaaataatgcattga

SEQ ID NO: 1779247 - DNA, 15 bp, Homo sapiens
aaataatgcattgat

SEQ ID NO: 1779248 - DNA, 15 bp, Homo sapiens
aataatgcattgatg

SEQ ID NO: 1779249 - DNA, 15 bp, Homo sapiens
ataatgcattgatgt

SEQ ID NO: 1779250 - DNA, 15 bp, Homo sapiens
taatgcattgatgtt

SEQ ID NO: 1779251 - DNA, 15 bp, Homo sapiens
aatgcattgatgttt

SEQ ID NO: 1779252 - DNA, 15 bp, Homo sapiens
atgcattgatgtttt

SEQ ID NO: 1779253 - DNA, 15 bp, Homo sapiens
tgcattgatgtttta

SEQ ID NO: 1779254 - DNA, 15 bp, Homo sapiens
gcattgatgttttaa

SEQ ID NO: 1779255 - DNA, 15 bp, Homo sapiens
cattgatgttttaaa

SEQ ID NO: 1779256 - DNA, 15 bp, Homo sapiens
attgatgttttaaag

SEQ ID NO: 1779257 - DNA, 15 bp, Homo sapiens
ttgatgttttaaagg

SEQ ID NO: 1779258 - DNA, 15 bp, Homo sapiens
tgatgttttaaaggg

SEQ ID NO: 1779259 - DNA, 15 bp, Homo sapiens
gatgttttaaaggga

SEQ ID NO: 1779260 - DNA, 15 bp, Homo sapiens
atgttttaaagggat

SEQ ID NO: 1779261 - DNA, 15 bp, Homo sapiens
tgttttaaagggata

SEQ ID NO: 1779262 - DNA, 15 bp, Homo sapiens
gttttaaagggatag

SEQ ID NO: 1779263 - DNA, 15 bp, Homo sapiens
ttttaaagggatagc

SEQ ID NO: 1779264 - DNA, 15 bp, Homo sapiens
tttaaagggatagca

SEQ ID NO: 1779265 - DNA, 15 bp, Homo sapiens
ttaaagggatagcaa

SEQ ID NO: 1779266 - DNA, 15 bp, Homo sapiens
taaagggatagcaag

SEQ ID NO: 1779267 - DNA, 15 bp, Homo sapiens
aaagggatagcaagt

SEQ ID NO: 1779268 - DNA, 15 bp, Homo sapiens
aagggatagcaagta

SEQ ID NO: 1779269 - DNA, 15 bp, Homo sapiens
agggatagcaagtaa

SEQ ID NO: 1779270 - DNA, 15 bp, Homo sapiens
gggatagcaagtaaa

SEQ ID NO: 1779271 - DNA, 15 bp, Homo sapiens
ggatagcaagtaaag

SEQ ID NO: 1779272 - DNA, 15 bp, Homo sapiens
gatagcaagtaaagt

SEQ ID NO: 1779273 - DNA, 15 bp, Homo sapiens
atagcaagtaaagtt

SEQ ID NO: 1779274 - DNA, 15 bp, Homo sapiens
tagcaagtaaagttt

SEQ ID NO: 1779275 - DNA, 15 bp, Homo sapiens
agcaagtaaagtttt

SEQ ID NO: 1779276 - DNA, 15 bp, Homo sapiens
gcaagtaaagttttc

SEQ ID NO: 1779277 - DNA, 15 bp, Homo sapiens
caagtaaagttttcc

SEQ ID NO: 1779278 - DNA, 15 bp, Homo sapiens
aagtaaagttttccg

SEQ ID NO: 1779279 - DNA, 15 bp, Homo sapiens
agtaaagttttccga

SEQ ID NO: 1779280 - DNA, 15 bp, Homo sapiens
gtaaagttttccgaa

SEQ ID NO: 1779281 - DNA, 15 bp, Homo sapiens
taaagttttccgaag

SEQ ID NO: 1779282 - DNA, 15 bp, Homo sapiens
aaagttttccgaaga

SEQ ID NO: 1779283 - DNA, 15 bp, Homo sapiens
aagttttccgaagat

SEQ ID NO: 1779284 - DNA, 15 bp, Homo sapiens
agttttccgaagata

SEQ ID NO: 1779285 - DNA, 15 bp, Homo sapiens
gttttccgaagataa

SEQ ID NO: 1779286 - DNA, 15 bp, Homo sapiens
ttttccgaagataac

SEQ ID NO: 1779287 - DNA, 15 bp, Homo sapiens
tttccgaagataact

SEQ ID NO: 1779288 - DNA, 15 bp, Homo sapiens
ttccgaagataactg

SEQ ID NO: 1779289 - DNA, 15 bp, Homo sapiens
tccgaagataactgt

SEQ ID NO: 1779290 - DNA, 15 bp, Homo sapiens
ccgaagataactgtg

SEQ ID NO: 1779291 - DNA, 15 bp, Homo sapiens
cgaagataactgtgg

SEQ ID NO: 1779292 - DNA, 15 bp, Homo sapiens
gaagataactgtggt

SEQ ID NO: 1779293 - DNA, 15 bp, Homo sapiens
aagataactgtggtt

SEQ ID NO: 1779294 - DNA, 15 bp, Homo sapiens
agataactgtggttg

SEQ ID NO: 1779295 - DNA, 15 bp, Homo sapiens
gataactgtggttgg

SEQ ID NO: 1779296 - DNA, 15 bp, Homo sapiens
ataactgtggttggc

SEQ ID NO: 1779297 - DNA, 15 bp, Homo sapiens
taactgtggttggcc

SEQ ID NO: 1779298 - DNA, 15 bp, Homo sapiens
aactgtggttggcca

SEQ ID NO: 1779299 - DNA, 15 bp, Homo sapiens
actgtggttggccaa

SEQ ID NO: 1779300 - DNA, 15 bp, Homo sapiens
ctgtggttggccaag

SEQ ID NO: 1779301 - DNA, 15 bp, Homo sapiens
tgtggttggccaaga

SEQ ID NO: 1779302 - DNA, 15 bp, Homo sapiens
gtggttggccaagaa

SEQ ID NO: 1779303 - DNA, 15 bp, Homo sapiens
tggttggccaagaag

SEQ ID NO: 1779304 - DNA, 15 bp, Homo sapiens
ggttggccaagaaga

SEQ ID NO: 1779305 - DNA, 15 bp, Homo sapiens
gttggccaagaagac

SEQ ID NO: 1779306 - DNA, 15 bp, Homo sapiens
ttggccaagaagacc

SEQ ID NO: 1779307 - DNA, 15 bp, Homo sapiens
tggccaagaagacct

SEQ ID NO: 1779308 - DNA, 15 bp, Homo sapiens
ggccaagaagacctt

SEQ ID NO: 1779309 - DNA, 15 bp, Homo sapiens
gccaagaagacctta

SEQ ID NO: 1779310 - DNA, 15 bp, Homo sapiens
ccaagaagaccttaa

SEQ ID NO: 1779311 - DNA, 15 bp, Homo sapiens
caagaagaccttaaa

SEQ ID NO: 1779312 - DNA, 15 bp, Homo sapiens
aagaagaccttaaaa

SEQ ID NO: 1779313 - DNA, 15 bp, Homo sapiens
agaagaccttaaaaa

SEQ ID NO: 1779314 - DNA, 15 bp, Homo sapiens
gaagaccttaaaaat

SEQ ID NO: 1779315 - DNA, 15 bp, Homo sapiens
aagaccttaaaaata

SEQ ID NO: 1779316 - DNA, 15 bp, Homo sapiens
agaccttaaaaataa

SEQ ID NO: 1779317 - DNA, 15 bp, Homo sapiens
gaccttaaaaataaa

SEQ ID NO: 1779318 - DNA, 15 bp, Homo sapiens
accttaaaaataaat

SEQ ID NO: 1779319 - DNA, 15 bp, Homo sapiens
ccttaaaaataaatg

SEQ ID NO: 1779320 - DNA, 15 bp, Homo sapiens
cttaaaaataaatgt

SEQ ID NO: 1779321 - DNA, 15 bp, Homo sapiens
ttaaaaataaatgtt

SEQ ID NO: 1779322 - DNA, 15 bp, Homo sapiens
taaaaataaatgtta

SEQ ID NO: 1779323 - DNA, 15 bp, Homo sapiens
aaaaataaatgttaa

SEQ ID NO: 1779324 - DNA, 15 bp, Homo sapiens
aaaataaatgttaac

SEQ ID NO: 1779325 - DNA, 15 bp, Homo sapiens
aaataaatgttaact

SEQ ID NO: 1779326 - DNA, 15 bp, Homo sapiens
aataaatgttaactg

SEQ ID NO: 1779327 - DNA, 15 bp, Homo sapiens
ataaatgttaactgt

SEQ ID NO: 1779328 - DNA, 15 bp, Homo sapiens
taaatgttaactgta

SEQ ID NO: 1779329 - DNA, 15 bp, Homo sapiens
aaatgttaactgtaa

SEQ ID NO: 1779330 - DNA, 15 bp, Homo sapiens
aatgttaactgtaac

SEQ ID NO: 1779331 - DNA, 15 bp, Homo sapiens
atgttaactgtaacc

SEQ ID NO: 1779332 - DNA, 15 bp, Homo sapiens
tgttaactgtaacct

SEQ ID NO: 1779333 - DNA, 15 bp, Homo sapiens
gttaactgtaacctt

SEQ ID NO: 1779334 - DNA, 15 bp, Homo sapiens
ttaactgtaaccttt

SEQ ID NO: 1779335 - DNA, 15 bp, Homo sapiens
taactgtaacctttt

SEQ ID NO: 1779336 - DNA, 15 bp, Homo sapiens
aactgtaaccttttt

SEQ ID NO: 1779337 - DNA, 15 bp, Homo sapiens
actgtaacctttttt

SEQ ID NO: 1779338 - DNA, 15 bp, Homo sapiens
ctgtaaccttttttt

SEQ ID NO: 1779339 - DNA, 15 bp, Homo sapiens
tgtaacctttttttt

SEQ ID NO: 1779340 - DNA, 15 bp, Homo sapiens
gtaaccttttttttt

SEQ ID NO: 1779341 - DNA, 15 bp, Homo sapiens
taacctttttttttt

SEQ ID NO: 1779342 - DNA, 15 bp, Homo sapiens
aaccttttttttttt

SEQ ID NO: 1779343 - DNA, 15 bp, Homo sapiens
tttttttttgcttta

SEQ ID NO: 1779344 - DNA, 15 bp, Homo sapiens
ttttttttgctttaa

SEQ ID NO: 1779345 - DNA, 15 bp, Homo sapiens
tttttttgctttaac

SEQ ID NO: 1779346 - DNA, 15 bp, Homo sapiens
ttttttgctttaaca

SEQ ID NO: 1779347 - DNA, 15 bp, Homo sapiens
tttttgctttaacaa

SEQ ID NO: 1779348 - DNA, 15 bp, Homo sapiens
ttttgctttaacaaa

SEQ ID NO: 1779349 - DNA, 15 bp, Homo sapiens
tttgctttaacaaaa

SEQ ID NO: 1779350 - DNA, 15 bp, Homo sapiens
ttgctttaacaaaaa

SEQ ID NO: 1779351 - DNA, 15 bp, Homo sapiens
tgctttaacaaaaat

SEQ ID NO: 1779352 - DNA, 15 bp, Homo sapiens
gctttaacaaaaata

SEQ ID NO: 1779353 - DNA, 15 bp, Homo sapiens
ctttaacaaaaataa

SEQ ID NO: 1779354 - DNA, 15 bp, Homo sapiens
tttaacaaaaataat

SEQ ID NO: 1779355 - DNA, 15 bp, Homo sapiens
ttaacaaaaataata

SEQ ID NO: 1779356 - DNA, 15 bp, Homo sapiens
taacaaaaataatag

SEQ ID NO: 1779357 - DNA, 15 bp, Homo sapiens
aacaaaaataataga

SEQ ID NO: 1779358 - DNA, 15 bp, Homo sapiens
aataatagaaaagaa

SEQ ID NO: 1779359 - DNA, 15 bp, Homo sapiens
ataatagaaaagaag

SEQ ID NO: 1779360 - DNA, 15 bp, Homo sapiens
taatagaaaagaagc

SEQ ID NO: 1779361 - DNA, 15 bp, Homo sapiens
aatagaaaagaagct

SEQ ID NO: 1779362 - DNA, 15 bp, Homo sapiens
atagaaaagaagctg

SEQ ID NO: 1779363 - DNA, 15 bp, Homo sapiens
tagaaaagaagctgg

SEQ ID NO: 1779364 - DNA, 15 bp, Homo sapiens
agaaaagaagctggg

SEQ ID NO: 1779365 - DNA, 15 bp, Homo sapiens
gaaaagaagctgggc

SEQ ID NO: 1779366 - DNA, 15 bp, Homo sapiens
aaaagaagctgggca

SEQ ID NO: 1779367 - DNA, 15 bp, Homo sapiens
aaagaagctgggcac

SEQ ID NO: 1779368 - DNA, 15 bp, Homo sapiens
aagaagctgggcaca

SEQ ID NO: 1779369 - DNA, 15 bp, Homo sapiens
agaagctgggcacag

SEQ ID NO: 1779370 - DNA, 15 bp, Homo sapiens
gaagctgggcacagt

SEQ ID NO: 1779371 - DNA, 15 bp, Homo sapiens
aagctgggcacagtg

SEQ ID NO: 1779372 - DNA, 15 bp, Homo sapiens
agctgggcacagtgg

SEQ ID NO: 1779373 - DNA, 15 bp, Homo sapiens
ctttgggaggccaac

SEQ ID NO: 1779374 - DNA, 15 bp, Homo sapiens
tttgggaggccaact

SEQ ID NO: 1779375 - DNA, 15 bp, Homo sapiens
ttgggaggccaactc

SEQ ID NO: 1779376 - DNA, 15 bp, Homo sapiens
tgggaggccaactca

SEQ ID NO: 1779377 - DNA, 15 bp, Homo sapiens
gggaggccaactcag

SEQ ID NO: 1779378 - DNA, 15 bp, Homo sapiens
ggaggccaactcagg

SEQ ID NO: 1779379 - DNA, 15 bp, Homo sapiens
gaggccaactcagga

SEQ ID NO: 1779380 - DNA, 15 bp, Homo sapiens
aggccaactcaggag

SEQ ID NO: 1779381 - DNA, 15 bp, Homo sapiens
ggccaactcaggagg

SEQ ID NO: 1779382 - DNA, 15 bp, Homo sapiens
gccaactcaggagga

SEQ ID NO: 1779383 - DNA, 15 bp, Homo sapiens
ccaactcaggaggat

SEQ ID NO: 1779384 - DNA, 15 bp, Homo sapiens
caactcaggaggatt

SEQ ID NO: 1779385 - DNA, 15 bp, Homo sapiens
aactcaggaggattg

SEQ ID NO: 1779386 - DNA, 15 bp, Homo sapiens
actcaggaggattgc

SEQ ID NO: 1779387 - DNA, 15 bp, Homo sapiens
ctcaggaggattgct

SEQ ID NO: 1779388 - DNA, 15 bp, Homo sapiens
tcaggaggattgctt

SEQ ID NO: 1779389 - DNA, 15 bp, Homo sapiens
caggaggattgcttt

SEQ ID NO: 1779390 - DNA, 15 bp, Homo sapiens
aggaggattgcttta

SEQ ID NO: 1779391 - DNA, 15 bp, Homo sapiens
ggaggattgctttag

SEQ ID NO: 1779392 - DNA, 15 bp, Homo sapiens
gaggattgctttagg

SEQ ID NO: 1779393 - DNA, 15 bp, Homo sapiens
aggattgctttaggc

SEQ ID NO: 1779394 - DNA, 15 bp, Homo sapiens
ggattgctttaggcg

SEQ ID NO: 1779395 - DNA, 15 bp, Homo sapiens
gattgctttaggcga

SEQ ID NO: 1779396 - DNA, 15 bp, Homo sapiens
attgctttaggcgag

SEQ ID NO: 1779397 - DNA, 15 bp, Homo sapiens
ttgctttaggcgagg

SEQ ID NO: 1779398 - DNA, 15 bp, Homo sapiens
tgctttaggcgagga

SEQ ID NO: 1779399 - DNA, 15 bp, Homo sapiens
gctttaggcgaggag

SEQ ID NO: 1779400 - DNA, 15 bp, Homo sapiens
ctttaggcgaggagt

SEQ ID NO: 1779401 - DNA, 15 bp, Homo sapiens
tttaggcgaggagtt

SEQ ID NO: 1779402 - DNA, 15 bp, Homo sapiens
ttaggcgaggagttg

SEQ ID NO: 1779403 - DNA, 15 bp, Homo sapiens
taggcgaggagttga

SEQ ID NO: 1779404 - DNA, 15 bp, Homo sapiens
aggcgaggagttgaa

SEQ ID NO: 1779405 - DNA, 15 bp, Homo sapiens
ggcgaggagttgaag

SEQ ID NO: 1779406 - DNA, 15 bp, Homo sapiens
gcgaggagttgaaga

SEQ ID NO: 1779407 - DNA, 15 bp, Homo sapiens
cgaggagttgaagac

SEQ ID NO: 1779408 - DNA, 15 bp, Homo sapiens
gaggagttgaagacc

SEQ ID NO: 1779409 - DNA, 15 bp, Homo sapiens
aggagttgaagacca

SEQ ID NO: 1779410 - DNA, 15 bp, Homo sapiens
ggagttgaagaccag

SEQ ID NO: 1779411 - DNA, 15 bp, Homo sapiens
gagttgaagaccagc

SEQ ID NO: 1779412 - DNA, 15 bp, Homo sapiens
agttgaagaccagcc

SEQ ID NO: 1779413 - DNA, 15 bp, Homo sapiens
gttgaagaccagcct

SEQ ID NO: 1779414 - DNA, 15 bp, Homo sapiens
ttgaagaccagcctg

SEQ ID NO: 1779415 - DNA, 15 bp, Homo sapiens
tgaagaccagcctgg

SEQ ID NO: 1779416 - DNA, 15 bp, Homo sapiens
gaagaccagcctggg

SEQ ID NO: 1779417 - DNA, 15 bp, Homo sapiens
agcctgggcaacaaa

SEQ ID NO: 1779418 - DNA, 15 bp, Homo sapiens
gcctgggcaacaaaa

SEQ ID NO: 1779419 - DNA, 15 bp, Homo sapiens
cctgggcaacaaaaa

SEQ ID NO: 1779420 - DNA, 15 bp, Homo sapiens
ctgggcaacaaaaaa

SEQ ID NO: 1779421 - DNA, 15 bp, Homo sapiens
tgggcaacaaaaaac

SEQ ID NO: 1779422 - DNA, 15 bp, Homo sapiens
gggcaacaaaaaaca

SEQ ID NO: 1779423 - DNA, 15 bp, Homo sapiens
ggcaacaaaaaacaa

SEQ ID NO: 1779424 - DNA, 15 bp, Homo sapiens
gcaacaaaaaacaaa

SEQ ID NO: 1779425 - DNA, 15 bp, Homo sapiens
caacaaaaaacaaaa

SEQ ID NO: 1779426 - DNA, 15 bp, Homo sapiens
aaacaaaaaaattac

SEQ ID NO: 1779427 - DNA, 15 bp, Homo sapiens
aacaaaaaaattacc

SEQ ID NO: 1779428 - DNA, 15 bp, Homo sapiens
acaaaaaaattaccc

SEQ ID NO: 1779429 - DNA, 15 bp, Homo sapiens
caaaaaaattacccg

SEQ ID NO: 1779430 - DNA, 15 bp, Homo sapiens
aaaaaaattacccgg

SEQ ID NO: 1779431 - DNA, 15 bp, Homo sapiens
aaaaaattacccggg

SEQ ID NO: 1779432 - DNA, 15 bp, Homo sapiens
aaaaattacccgggc

SEQ ID NO: 1779433 - DNA, 15 bp, Homo sapiens
aaaattacccgggca

SEQ ID NO: 1779434 - DNA, 15 bp, Homo sapiens
aaattacccgggcat

SEQ ID NO: 1779435 - DNA, 15 bp, Homo sapiens
aattacccgggcatg

SEQ ID NO: 1779436 - DNA, 15 bp, Homo sapiens
attacccgggcatgg

SEQ ID NO: 1779437 - DNA, 15 bp, Homo sapiens
ttacccgggcatggt

SEQ ID NO: 1779438 - DNA, 15 bp, Homo sapiens
tacccgggcatggtg

SEQ ID NO: 1779439 - DNA, 15 bp, Homo sapiens
acccgggcatggtga

SEQ ID NO: 1779440 - DNA, 15 bp, Homo sapiens
cccgggcatggtgat

SEQ ID NO: 1779441 - DNA, 15 bp, Homo sapiens
ccgggcatggtgatg

SEQ ID NO: 1779442 - DNA, 15 bp, Homo sapiens
cgggcatggtgatgt

SEQ ID NO: 1779443 - DNA, 15 bp, Homo sapiens
gggcatggtgatgtg

SEQ ID NO: 1779444 - DNA, 15 bp, Homo sapiens
ggcatggtgatgtgt

SEQ ID NO: 1779445 - DNA, 15 bp, Homo sapiens
gcatggtgatgtgtg

SEQ ID NO: 1779446 - DNA, 15 bp, Homo sapiens
catggtgatgtgtgc

SEQ ID NO: 1779447 - DNA, 15 bp, Homo sapiens
gatgtgtgcctgtag

SEQ ID NO: 1779448 - DNA, 15 bp, Homo sapiens
atgtgtgcctgtagt

SEQ ID NO: 1779449 - DNA, 15 bp, Homo sapiens
gtcccagctacttga

SEQ ID NO: 1779450 - DNA, 15 bp, Homo sapiens
tgagatgggaggatc

SEQ ID NO: 1779451 - DNA, 15 bp, Homo sapiens
gagatgggaggatcc

SEQ ID NO: 1779452 - DNA, 15 bp, Homo sapiens
agatgggaggatccc

SEQ ID NO: 1779453 - DNA, 15 bp, Homo sapiens
gatgggaggatccct

SEQ ID NO: 1779454 - DNA, 15 bp, Homo sapiens
atgggaggatccctt

SEQ ID NO: 1779455 - DNA, 15 bp, Homo sapiens
tgggaggatcccttg

SEQ ID NO: 1779456 - DNA, 15 bp, Homo sapiens
gggaggatcccttga

SEQ ID NO: 1779457 - DNA, 15 bp, Homo sapiens
ggaggatcccttgag

SEQ ID NO: 1779458 - DNA, 15 bp, Homo sapiens
gaggatcccttgagc

SEQ ID NO: 1779459 - DNA, 15 bp, Homo sapiens
gatcccttgagccct

SEQ ID NO: 1779460 - DNA, 15 bp, Homo sapiens
atcccttgagccctg

SEQ ID NO: 1779461 - DNA, 15 bp, Homo sapiens
tcccttgagccctgg

SEQ ID NO: 1779462 - DNA, 15 bp, Homo sapiens
cccttgagccctgga

SEQ ID NO: 1779463 - DNA, 15 bp, Homo sapiens
ccttgagccctggag

SEQ ID NO: 1779464 - DNA, 15 bp, Homo sapiens
tgagccctggagttc

SEQ ID NO: 1779465 - DNA, 15 bp, Homo sapiens
gagccctggagttca

SEQ ID NO: 1779466 - DNA, 15 bp, Homo sapiens
agccctggagttcaa

SEQ ID NO: 1779467 - DNA, 15 bp, Homo sapiens
gccctggagttcaag

SEQ ID NO: 1779468 - DNA, 15 bp, Homo sapiens
ccctggagttcaagg

SEQ ID NO: 1779469 - DNA, 15 bp, Homo sapiens
cctggagttcaaggt

SEQ ID NO: 1779470 - DNA, 15 bp, Homo sapiens
ctggagttcaaggtt

SEQ ID NO: 1779471 - DNA, 15 bp, Homo sapiens
tggagttcaaggttg

SEQ ID NO: 1779472 - DNA, 15 bp, Homo sapiens
ggagttcaaggttgc

SEQ ID NO: 1779473 - DNA, 15 bp, Homo sapiens
gagttcaaggttgca

SEQ ID NO: 1779474 - DNA, 15 bp, Homo sapiens
agttcaaggttgcag

SEQ ID NO: 1779475 - DNA, 15 bp, Homo sapiens
gttcaaggttgcagt

SEQ ID NO: 1779476 - DNA, 15 bp, Homo sapiens
ttcaaggttgcagtg

SEQ ID NO: 1779477 - DNA, 15 bp, Homo sapiens
tcaaggttgcagtga

SEQ ID NO: 1779478 - DNA, 15 bp, Homo sapiens
caaggttgcagtgag

SEQ ID NO: 1779479 - DNA, 15 bp, Homo sapiens
aaggttgcagtgagc

SEQ ID NO: 1779480 - DNA, 15 bp, Homo sapiens
gttgcagtgagccat

SEQ ID NO: 1779481 - DNA, 15 bp, Homo sapiens
ttgcagtgagccatg

SEQ ID NO: 1779482 - DNA, 15 bp, Homo sapiens
tgcagtgagccatga

SEQ ID NO: 1779483 - DNA, 15 bp, Homo sapiens
gcagtgagccatgat

SEQ ID NO: 1779484 - DNA, 15 bp, Homo sapiens
cagtgagccatgatc

SEQ ID NO: 1779485 - DNA, 15 bp, Homo sapiens
agtgagccatgatct

SEQ ID NO: 1779486 - DNA, 15 bp, Homo sapiens
gtgagccatgatctc

SEQ ID NO: 1779487 - DNA, 15 bp, Homo sapiens
tgagccatgatctcc

SEQ ID NO: 1779488 - DNA, 15 bp, Homo sapiens
gagccatgatctccc

SEQ ID NO: 1779489 - DNA, 15 bp, Homo sapiens
agccatgatctcccc

SEQ ID NO: 1779490 - DNA, 15 bp, Homo sapiens
gccatgatctcccca

SEQ ID NO: 1779491 - DNA, 15 bp, Homo sapiens
ccatgatctccccat

SEQ ID NO: 1779492 - DNA, 15 bp, Homo sapiens
catgatctccccatt

SEQ ID NO: 1779493 - DNA, 15 bp, Homo sapiens
atgatctccccattg

SEQ ID NO: 1779494 - DNA, 15 bp, Homo sapiens
tgatctccccattgc

SEQ ID NO: 1779495 - DNA, 15 bp, Homo sapiens
cactccagcctggat

SEQ ID NO: 1779496 - DNA, 15 bp, Homo sapiens
ctccagcctggatgc

SEQ ID NO: 1779497 - DNA, 15 bp, Homo sapiens
tccagcctggatgcc

SEQ ID NO: 1779498 - DNA, 15 bp, Homo sapiens
ccagcctggatgcca

SEQ ID NO: 1779499 - DNA, 15 bp, Homo sapiens
cagcctggatgccag

SEQ ID NO: 1779500 - DNA, 15 bp, Homo sapiens
agcctggatgccaga

SEQ ID NO: 1779501 - DNA, 15 bp, Homo sapiens
gcctggatgccagag

SEQ ID NO: 1779502 - DNA, 15 bp, Homo sapiens
cctggatgccagagc

SEQ ID NO: 1779503 - DNA, 15 bp, Homo sapiens
ctggatgccagagca

SEQ ID NO: 1779504 - DNA, 15 bp, Homo sapiens
tggatgccagagcaa

SEQ ID NO: 1779505 - DNA, 15 bp, Homo sapiens
ggatgccagagcaag

SEQ ID NO: 1779506 - DNA, 15 bp, Homo sapiens
gatgccagagcaaga

SEQ ID NO: 1779507 - DNA, 15 bp, Homo sapiens
atgccagagcaagac

SEQ ID NO: 1779508 - DNA, 15 bp, Homo sapiens
tgccagagcaagaca

SEQ ID NO: 1779509 - DNA, 15 bp, Homo sapiens
gccagagcaagacac

SEQ ID NO: 1779510 - DNA, 15 bp, Homo sapiens
ccagagcaagacaca

SEQ ID NO: 1779511 - DNA, 15 bp, Homo sapiens
cagagcaagacacag

SEQ ID NO: 1779512 - DNA, 15 bp, Homo sapiens
agagcaagacacagt

SEQ ID NO: 1779513 - DNA, 15 bp, Homo sapiens
gagcaagacacagta

SEQ ID NO: 1779514 - DNA, 15 bp, Homo sapiens
agcaagacacagtat

SEQ ID NO: 1779515 - DNA, 15 bp, Homo sapiens
gcaagacacagtatc

SEQ ID NO: 1779516 - DNA, 15 bp, Homo sapiens
caagacacagtatca

SEQ ID NO: 1779517 - DNA, 15 bp, Homo sapiens
aagacacagtatcaa

SEQ ID NO: 1779518 - DNA, 15 bp, Homo sapiens
agacacagtatcaaa

SEQ ID NO: 1779519 - DNA, 15 bp, Homo sapiens
gacacagtatcaaag

SEQ ID NO: 1779520 - DNA, 15 bp, Homo sapiens
acacagtatcaaaga

SEQ ID NO: 1779521 - DNA, 15 bp, Homo sapiens
cacagtatcaaagaa

SEQ ID NO: 1779522 - DNA, 15 bp, Homo sapiens
acagtatcaaagaaa

SEQ ID NO: 1779523 - DNA, 15 bp, Homo sapiens
cagtatcaaagaaaa

SEQ ID NO: 1779524 - DNA, 15 bp, Homo sapiens
agtatcaaagaaaaa

SEQ ID NO: 1779525 - DNA, 15 bp, Homo sapiens
gtatcaaagaaaaag

SEQ ID NO: 1779526 - DNA, 15 bp, Homo sapiens
tatcaaagaaaaaga

SEQ ID NO: 1779527 - DNA, 15 bp, Homo sapiens
atcaaagaaaaagaa

SEQ ID NO: 1779528 - DNA, 15 bp, Homo sapiens
tcaaagaaaaagaaa

SEQ ID NO: 1779529 - DNA, 15 bp, Homo sapiens
caaagaaaaagaaaa

SEQ ID NO: 1779530 - DNA, 15 bp, Homo sapiens
aagaaaaagaaaaaa

SEQ ID NO: 1779531 - DNA, 15 bp, Homo sapiens
agaaaaagaaaaaaa

SEQ ID NO: 1779532 - DNA, 15 bp, Homo sapiens
gaaaaagaaaaaaac

SEQ ID NO: 1779533 - DNA, 15 bp, Homo sapiens
aaaaagaaaaaaaca

SEQ ID NO: 1779534 - DNA, 15 bp, Homo sapiens
aaaagaaaaaaacac

SEQ ID NO: 1779535 - DNA, 15 bp, Homo sapiens
aaagaaaaaaacaca

SEQ ID NO: 1779536 - DNA, 15 bp, Homo sapiens
aagaaaaaaacacaa

SEQ ID NO: 1779537 - DNA, 15 bp, Homo sapiens
agaaaaaaacacaaa

SEQ ID NO: 1779538 - DNA, 15 bp, Homo sapiens
gaaaaaaacacaaaa

SEQ ID NO: 1779539 - DNA, 15 bp, Homo sapiens
aaaaaaacacaaaag

SEQ ID NO: 1779540 - DNA, 15 bp, Homo sapiens
aaaaaacacaaaaga

SEQ ID NO: 1779541 - DNA, 15 bp, Homo sapiens
aaaaacacaaaagag

SEQ ID NO: 1779542 - DNA, 15 bp, Homo sapiens
aaaacacaaaagagg

SEQ ID NO: 1779543 - DNA, 15 bp, Homo sapiens
aaacacaaaagaggt

SEQ ID NO: 1779544 - DNA, 15 bp, Homo sapiens
aacacaaaagaggta

SEQ ID NO: 1779545 - DNA, 15 bp, Homo sapiens
acacaaaagaggtag

SEQ ID NO: 1779546 - DNA, 15 bp, Homo sapiens
cacaaaagaggtaga

SEQ ID NO: 1779547 - DNA, 15 bp, Homo sapiens
acaaaagaggtagaa

SEQ ID NO: 1779548 - DNA, 15 bp, Homo sapiens
caaaagaggtagaag

SEQ ID NO: 1779549 - DNA, 15 bp, Homo sapiens
aaaagaggtagaagg

SEQ ID NO: 1779550 - DNA, 15 bp, Homo sapiens
aaagaggtagaaggg

SEQ ID NO: 1779551 - DNA, 15 bp, Homo sapiens
aagaggtagaagggc

SEQ ID NO: 1779552 - DNA, 15 bp, Homo sapiens
agaggtagaagggct

SEQ ID NO: 1779553 - DNA, 15 bp, Homo sapiens
gaggtagaagggctc

SEQ ID NO: 1779554 - DNA, 15 bp, Homo sapiens
aggtagaagggctca

SEQ ID NO: 1779555 - DNA, 15 bp, Homo sapiens
ggtagaagggctcag

SEQ ID NO: 1779556 - DNA, 15 bp, Homo sapiens
gtagaagggctcagc

SEQ ID NO: 1779557 - DNA, 15 bp, Homo sapiens
tagaagggctcagca

SEQ ID NO: 1779558 - DNA, 15 bp, Homo sapiens
agaagggctcagcaa

SEQ ID NO: 1779559 - DNA, 15 bp, Homo sapiens
gaagggctcagcaag

SEQ ID NO: 1779560 - DNA, 15 bp, Homo sapiens
aagggctcagcaagt

SEQ ID NO: 1779561 - DNA, 15 bp, Homo sapiens
agggctcagcaagtg

SEQ ID NO: 1779562 - DNA, 15 bp, Homo sapiens
gggctcagcaagtgc

SEQ ID NO: 1779563 - DNA, 15 bp, Homo sapiens
ggctcagcaagtgct

SEQ ID NO: 1779564 - DNA, 15 bp, Homo sapiens
gctcagcaagtgctt

SEQ ID NO: 1779565 - DNA, 15 bp, Homo sapiens
ctcagcaagtgcttt

SEQ ID NO: 1779566 - DNA, 15 bp, Homo sapiens
tcagcaagtgctttc

SEQ ID NO: 1779567 - DNA, 15 bp, Homo sapiens
cagcaagtgctttcc

SEQ ID NO: 1779568 - DNA, 15 bp, Homo sapiens
agcaagtgctttcca

SEQ ID NO: 1779569 - DNA, 15 bp, Homo sapiens
gcaagtgctttccac

SEQ ID NO: 1779570 - DNA, 15 bp, Homo sapiens
caagtgctttccaca

SEQ ID NO: 1779571 - DNA, 15 bp, Homo sapiens
aagtgctttccacat

SEQ ID NO: 1779572 - DNA, 15 bp, Homo sapiens
agtgctttccacatt

SEQ ID NO: 1779573 - DNA, 15 bp, Homo sapiens
gtgctttccacattc

SEQ ID NO: 1779574 - DNA, 15 bp, Homo sapiens
tgctttccacattcg

SEQ ID NO: 1779575 - DNA, 15 bp, Homo sapiens
gctttccacattcgc

SEQ ID NO: 1779576 - DNA, 15 bp, Homo sapiens
ctttccacattcgca

SEQ ID NO: 1779577 - DNA, 15 bp, Homo sapiens
tttccacattcgcat

SEQ ID NO: 1779578 - DNA, 15 bp, Homo sapiens
ttccacattcgcatt

SEQ ID NO: 1779579 - DNA, 15 bp, Homo sapiens
tccacattcgcattc

SEQ ID NO: 1779580 - DNA, 15 bp, Homo sapiens
ccacattcgcattcc

SEQ ID NO: 1779581 - DNA, 15 bp, Homo sapiens
cacattcgcattccc

SEQ ID NO: 1779582 - DNA, 15 bp, Homo sapiens
acattcgcattccct

SEQ ID NO: 1779583 - DNA, 15 bp, Homo sapiens
cattcgcattccctt

SEQ ID NO: 1779584 - DNA, 15 bp, Homo sapiens
attcgcattccctta

SEQ ID NO: 1779585 - DNA, 15 bp, Homo sapiens
ttcgcattcccttaa

SEQ ID NO: 1779586 - DNA, 15 bp, Homo sapiens
tcgcattcccttaaa

SEQ ID NO: 1779587 - DNA, 15 bp, Homo sapiens
cgcattcccttaaaa

SEQ ID NO: 1779588 - DNA, 15 bp, Homo sapiens
gcattcccttaaaat

SEQ ID NO: 1779589 - DNA, 15 bp, Homo sapiens
cattcccttaaaatc

SEQ ID NO: 1779590 - DNA, 15 bp, Homo sapiens
attcccttaaaatcg

SEQ ID NO: 1779591 - DNA, 15 bp, Homo sapiens
ttcccttaaaatcgg

SEQ ID NO: 1779592 - DNA, 15 bp, Homo sapiens
tcccttaaaatcggg

SEQ ID NO: 1779593 - DNA, 15 bp, Homo sapiens
cccttaaaatcggga

SEQ ID NO: 1779594 - DNA, 15 bp, Homo sapiens
ccttaaaatcgggaa

SEQ ID NO: 1779595 - DNA, 15 bp, Homo sapiens
cttaaaatcgggaat

SEQ ID NO: 1779596 - DNA, 15 bp, Homo sapiens
ttaaaatcgggaatg

SEQ ID NO: 1779597 - DNA, 15 bp, Homo sapiens
taaaatcgggaatgc

SEQ ID NO: 1779598 - DNA, 15 bp, Homo sapiens
aaaatcgggaatgct

SEQ ID NO: 1779599 - DNA, 15 bp, Homo sapiens
aaatcgggaatgctc

SEQ ID NO: 1779600 - DNA, 15 bp, Homo sapiens
aatcgggaatgctct

SEQ ID NO: 1779601 - DNA, 15 bp, Homo sapiens
atcgggaatgctcta

SEQ ID NO: 1779602 - DNA, 15 bp, Homo sapiens
tcgggaatgctctaa

SEQ ID NO: 1779603 - DNA, 15 bp, Homo sapiens
cgggaatgctctaaa

SEQ ID NO: 1779604 - DNA, 15 bp, Homo sapiens
gggaatgctctaaag

SEQ ID NO: 1779605 - DNA, 15 bp, Homo sapiens
ggaatgctctaaagc

SEQ ID NO: 1779606 - DNA, 15 bp, Homo sapiens
gaatgctctaaagct

SEQ ID NO: 1779607 - DNA, 15 bp, Homo sapiens
aatgctctaaagcta

SEQ ID NO: 1779608 - DNA, 15 bp, Homo sapiens
atgctctaaagctag

SEQ ID NO: 1779609 - DNA, 15 bp, Homo sapiens
tgctctaaagctaga

SEQ ID NO: 1779610 - DNA, 15 bp, Homo sapiens
gctctaaagctagag

SEQ ID NO: 1779611 - DNA, 15 bp, Homo sapiens
ctctaaagctagagg

SEQ ID NO: 1779612 - DNA, 15 bp, Homo sapiens
tctaaagctagagga

SEQ ID NO: 1779613 - DNA, 15 bp, Homo sapiens
ctaaagctagaggac

SEQ ID NO: 1779614 - DNA, 15 bp, Homo sapiens
taaagctagaggact

SEQ ID NO: 1779615 - DNA, 15 bp, Homo sapiens
aaagctagaggactt

SEQ ID NO: 1779616 - DNA, 15 bp, Homo sapiens
aagctagaggacttt

SEQ ID NO: 1779617 - DNA, 15 bp, Homo sapiens
agctagaggactttt

SEQ ID NO: 1779618 - DNA, 15 bp, Homo sapiens
gctagaggactttta

SEQ ID NO: 1779619 - DNA, 15 bp, Homo sapiens
ctagaggacttttaa

SEQ ID NO: 1779620 - DNA, 15 bp, Homo sapiens
tagaggacttttaaa

SEQ ID NO: 1779621 - DNA, 15 bp, Homo sapiens
agaggacttttaaaa

SEQ ID NO: 1779622 - DNA, 15 bp, Homo sapiens
gaggacttttaaaaa

SEQ ID NO: 1779623 - DNA, 15 bp, Homo sapiens
aggacttttaaaaaa

SEQ ID NO: 1779624 - DNA, 15 bp, Homo sapiens
ggacttttaaaaaac

SEQ ID NO: 1779625 - DNA, 15 bp, Homo sapiens
gacttttaaaaaaca

SEQ ID NO: 1779626 - DNA, 15 bp, Homo sapiens
acttttaaaaaacag

SEQ ID NO: 1779627 - DNA, 15 bp, Homo sapiens
cttttaaaaaacaga

SEQ ID NO: 1779628 - DNA, 15 bp, Homo sapiens
ttaaaaaacagaaaa

SEQ ID NO: 1779629 - DNA, 15 bp, Homo sapiens
taaaaaacagaaaat

SEQ ID NO: 1779630 - DNA, 15 bp, Homo sapiens
aaaaaacagaaaata

SEQ ID NO: 1779631 - DNA, 15 bp, Homo sapiens
aaaaacagaaaatac

SEQ ID NO: 1779632 - DNA, 15 bp, Homo sapiens
aaaacagaaaatact

SEQ ID NO: 1779633 - DNA, 15 bp, Homo sapiens
aaacagaaaatacta

SEQ ID NO: 1779634 - DNA, 15 bp, Homo sapiens
aacagaaaatactac

SEQ ID NO: 1779635 - DNA, 15 bp, Homo sapiens
acagaaaatactact

SEQ ID NO: 1779636 - DNA, 15 bp, Homo sapiens
cagaaaatactactt

SEQ ID NO: 1779637 - DNA, 15 bp, Homo sapiens
agaaaatactactta

SEQ ID NO: 1779638 - DNA, 15 bp, Homo sapiens
gaaaatactacttaa

SEQ ID NO: 1779639 - DNA, 15 bp, Homo sapiens
aaaatactacttaag

SEQ ID NO: 1779640 - DNA, 15 bp, Homo sapiens
aaatactacttaagt

SEQ ID NO: 1779641 - DNA, 15 bp, Homo sapiens
aatactacttaagta

SEQ ID NO: 1779642 - DNA, 15 bp, Homo sapiens
atactacttaagtat

SEQ ID NO: 1779643 - DNA, 15 bp, Homo sapiens
tactacttaagtatt

SEQ ID NO: 1779644 - DNA, 15 bp, Homo sapiens
actacttaagtattt

SEQ ID NO: 1779645 - DNA, 15 bp, Homo sapiens
ctacttaagtatttt

SEQ ID NO: 1779646 - DNA, 15 bp, Homo sapiens
tacttaagtattttc

SEQ ID NO: 1779647 - DNA, 15 bp, Homo sapiens
acttaagtattttct

SEQ ID NO: 1779648 - DNA, 15 bp, Homo sapiens
cttaagtattttctg

SEQ ID NO: 1779649 - DNA, 15 bp, Homo sapiens
ttaagtattttctgg

SEQ ID NO: 1779650 - DNA, 15 bp, Homo sapiens
taagtattttctggt

SEQ ID NO: 1779651 - DNA, 15 bp, Homo sapiens
aagtattttctggtg

SEQ ID NO: 1779652 - DNA, 15 bp, Homo sapiens
agtattttctggtgc

SEQ ID NO: 1779653 - DNA, 15 bp, Homo sapiens
gtattttctggtgcc

SEQ ID NO: 1779654 - DNA, 15 bp, Homo sapiens
tattttctggtgccc

SEQ ID NO: 1779655 - DNA, 15 bp, Homo sapiens
attttctggtgccca

SEQ ID NO: 1779656 - DNA, 15 bp, Homo sapiens
ttttctggtgcccat

SEQ ID NO: 1779657 - DNA, 15 bp, Homo sapiens
tttctggtgcccatg

SEQ ID NO: 1779658 - DNA, 15 bp, Homo sapiens
ttctggtgcccatgt

SEQ ID NO: 1779659 - DNA, 15 bp, Homo sapiens
tctggtgcccatgtg

SEQ ID NO: 1779660 - DNA, 15 bp, Homo sapiens
ctggtgcccatgtga

SEQ ID NO: 1779661 - DNA, 15 bp, Homo sapiens
tggtgcccatgtgaa

SEQ ID NO: 1779662 - DNA, 15 bp, Homo sapiens
ggtgcccatgtgaag

SEQ ID NO: 1779663 - DNA, 15 bp, Homo sapiens
gtgcccatgtgaagt

SEQ ID NO: 1779664 - DNA, 15 bp, Homo sapiens
tgcccatgtgaagtc

SEQ ID NO: 1779665 - DNA, 15 bp, Homo sapiens
gcccatgtgaagtct

SEQ ID NO: 1779666 - DNA, 15 bp, Homo sapiens
cccatgtgaagtctg

SEQ ID NO: 1779667 - DNA, 15 bp, Homo sapiens
ccatgtgaagtctgg

SEQ ID NO: 1779668 - DNA, 15 bp, Homo sapiens
catgtgaagtctggc

SEQ ID NO: 1779669 - DNA, 15 bp, Homo sapiens
atgtgaagtctggca

SEQ ID NO: 1779670 - DNA, 15 bp, Homo sapiens
tgtgaagtctggcaa

SEQ ID NO: 1779671 - DNA, 15 bp, Homo sapiens
gtgaagtctggcaaa

SEQ ID NO: 1779672 - DNA, 15 bp, Homo sapiens
tacaatataaacaga

SEQ ID NO: 1779673 - DNA, 15 bp, Homo sapiens
acaatataaacagat

SEQ ID NO: 1779674 - DNA, 15 bp, Homo sapiens
caatataaacagata

SEQ ID NO: 1779675 - DNA, 15 bp, Homo sapiens
aatataaacagatat

SEQ ID NO: 1779676 - DNA, 15 bp, Homo sapiens
atataaacagatatt

SEQ ID NO: 1779677 - DNA, 15 bp, Homo sapiens
tataaacagatattc

SEQ ID NO: 1779678 - DNA, 15 bp, Homo sapiens
ataaacagatattct

SEQ ID NO: 1779679 - DNA, 15 bp, Homo sapiens
taaacagatattctt

SEQ ID NO: 1779680 - DNA, 15 bp, Homo sapiens
aaacagatattctta

SEQ ID NO: 1779681 - DNA, 15 bp, Homo sapiens
aacagatattcttat

SEQ ID NO: 1779682 - DNA, 15 bp, Homo sapiens
acagatattcttatc

SEQ ID NO: 1779683 - DNA, 15 bp, Homo sapiens
cagatattcttatca

SEQ ID NO: 1779684 - DNA, 15 bp, Homo sapiens
agatattcttatcaa

SEQ ID NO: 1779685 - DNA, 15 bp, Homo sapiens
gatattcttatcaac

SEQ ID NO: 1779686 - DNA, 15 bp, Homo sapiens
atattcttatcaaca

SEQ ID NO: 1779687 - DNA, 15 bp, Homo sapiens
tattcttatcaacaa

SEQ ID NO: 1779688 - DNA, 15 bp, Homo sapiens
attcttatcaacaac

SEQ ID NO: 1779689 - DNA, 15 bp, Homo sapiens
ttcttatcaacaaca

SEQ ID NO: 1779690 - DNA, 15 bp, Homo sapiens
tcttatcaacaacaa

SEQ ID NO: 1779691 - DNA, 15 bp, Homo sapiens
cttatcaacaacaac

SEQ ID NO: 1779692 - DNA, 15 bp, Homo sapiens
ttatcaacaacaaca

SEQ ID NO: 1779693 - DNA, 15 bp, Homo sapiens
tatcaacaacaacag

SEQ ID NO: 1779694 - DNA, 15 bp, Homo sapiens
atcaacaacaacagt

SEQ ID NO: 1779695 - DNA, 15 bp, Homo sapiens
tcaacaacaacagtt

SEQ ID NO: 1779696 - DNA, 15 bp, Homo sapiens
caacaacaacagtta

SEQ ID NO: 1779697 - DNA, 15 bp, Homo sapiens
aacaacaacagttaa

SEQ ID NO: 1779698 - DNA, 15 bp, Homo sapiens
acaacaacagttaat

SEQ ID NO: 1779699 - DNA, 15 bp, Homo sapiens
caacaacagttaatc

SEQ ID NO: 1779700 - DNA, 15 bp, Homo sapiens
aacaacagttaatca

SEQ ID NO: 1779701 - DNA, 15 bp, Homo sapiens
acaacagttaatcat

SEQ ID NO: 1779702 - DNA, 15 bp, Homo sapiens
caacagttaatcatt

SEQ ID NO: 1779703 - DNA, 15 bp, Homo sapiens
aacagttaatcattg

SEQ ID NO: 1779704 - DNA, 15 bp, Homo sapiens
acagttaatcattga

SEQ ID NO: 1779705 - DNA, 15 bp, Homo sapiens
cagttaatcattgac

SEQ ID NO: 1779706 - DNA, 15 bp, Homo sapiens
agttaatcattgact

SEQ ID NO: 1779707 - DNA, 15 bp, Homo sapiens
gttaatcattgactc

SEQ ID NO: 1779708 - DNA, 15 bp, Homo sapiens
ttaatcattgactcc

SEQ ID NO: 1779709 - DNA, 15 bp, Homo sapiens
taatcattgactcct

SEQ ID NO: 1779710 - DNA, 15 bp, Homo sapiens
aatcattgactccta

SEQ ID NO: 1779711 - DNA, 15 bp, Homo sapiens
atcattgactcctag

SEQ ID NO: 1779712 - DNA, 15 bp, Homo sapiens
tcattgactcctaga

SEQ ID NO: 1779713 - DNA, 15 bp, Homo sapiens
cattgactcctagat

SEQ ID NO: 1779714 - DNA, 15 bp, Homo sapiens
attgactcctagata

SEQ ID NO: 1779715 - DNA, 15 bp, Homo sapiens
ttgactcctagataa

SEQ ID NO: 1779716 - DNA, 15 bp, Homo sapiens
tgactcctagataaa

SEQ ID NO: 1779717 - DNA, 15 bp, Homo sapiens
gactcctagataaat

SEQ ID NO: 1779718 - DNA, 15 bp, Homo sapiens
actcctagataaata

SEQ ID NO: 1779719 - DNA, 15 bp, Homo sapiens
ctcctagataaatat

SEQ ID NO: 1779720 - DNA, 15 bp, Homo sapiens
tcctagataaatatt

SEQ ID NO: 1779721 - DNA, 15 bp, Homo sapiens
cctagataaatatta

SEQ ID NO: 1779722 - DNA, 15 bp, Homo sapiens
ctagataaatattaa

SEQ ID NO: 1779723 - DNA, 15 bp, Homo sapiens
tagataaatattaat

SEQ ID NO: 1779724 - DNA, 15 bp, Homo sapiens
agataaatattaatc

SEQ ID NO: 1779725 - DNA, 15 bp, Homo sapiens
gataaatattaatca

SEQ ID NO: 1779726 - DNA, 15 bp, Homo sapiens
ataaatattaatcag

SEQ ID NO: 1779727 - DNA, 15 bp, Homo sapiens
taaatattaatcagg

SEQ ID NO: 1779728 - DNA, 15 bp, Homo sapiens
aaatattaatcaggg

SEQ ID NO: 1779729 - DNA, 15 bp, Homo sapiens
aatattaatcaggga

SEQ ID NO: 1779730 - DNA, 15 bp, Homo sapiens
atattaatcagggat

SEQ ID NO: 1779731 - DNA, 15 bp, Homo sapiens
tattaatcagggatg

SEQ ID NO: 1779732 - DNA, 15 bp, Homo sapiens
attaatcagggatga

SEQ ID NO: 1779733 - DNA, 15 bp, Homo sapiens
ttaatcagggatgac

SEQ ID NO: 1779734 - DNA, 15 bp, Homo sapiens
taatcagggatgact

SEQ ID NO: 1779735 - DNA, 15 bp, Homo sapiens
aatcagggatgactt

SEQ ID NO: 1779736 - DNA, 15 bp, Homo sapiens
atcagggatgacttc

SEQ ID NO: 1779737 - DNA, 15 bp, Homo sapiens
tcagggatgacttcc

SEQ ID NO: 1779738 - DNA, 15 bp, Homo sapiens
cagggatgacttcca

SEQ ID NO: 1779739 - DNA, 15 bp, Homo sapiens
agggatgacttccaa

SEQ ID NO: 1779740 - DNA, 15 bp, Homo sapiens
gggatgacttccaac

SEQ ID NO: 1779741 - DNA, 15 bp, Homo sapiens
ggatgacttccaact

SEQ ID NO: 1779742 - DNA, 15 bp, Homo sapiens
gatgacttccaacta

SEQ ID NO: 1779743 - DNA, 15 bp, Homo sapiens
atgacttccaactaa

SEQ ID NO: 1779744 - DNA, 15 bp, Homo sapiens
tgacttccaactaat

SEQ ID NO: 1779745 - DNA, 15 bp, Homo sapiens
gacttccaactaatc

SEQ ID NO: 1779746 - DNA, 15 bp, Homo sapiens
acttccaactaatcc

SEQ ID NO: 1779747 - DNA, 15 bp, Homo sapiens
cttccaactaatcct

SEQ ID NO: 1779748 - DNA, 15 bp, Homo sapiens
ttccaactaatcctt

SEQ ID NO: 1779749 - DNA, 15 bp, Homo sapiens
tccaactaatcctta

SEQ ID NO: 1779750 - DNA, 15 bp, Homo sapiens
ccaactaatccttat

SEQ ID NO: 1779751 - DNA, 15 bp, Homo sapiens
caactaatccttata

SEQ ID NO: 1779752 - DNA, 15 bp, Homo sapiens
aactaatccttatag

SEQ ID NO: 1779753 - DNA, 15 bp, Homo sapiens
actaatccttatagc

SEQ ID NO: 1779754 - DNA, 15 bp, Homo sapiens
ctaatccttatagcc

SEQ ID NO: 1779755 - DNA, 15 bp, Homo sapiens
taatccttatagcca

SEQ ID NO: 1779756 - DNA, 15 bp, Homo sapiens
aatccttatagccag

SEQ ID NO: 1779757 - DNA, 15 bp, Homo sapiens
atccttatagccagg

SEQ ID NO: 1779758 - DNA, 15 bp, Homo sapiens
tccttatagccaggc

SEQ ID NO: 1779759 - DNA, 15 bp, Homo sapiens
ccttatagccaggct

SEQ ID NO: 1779760 - DNA, 15 bp, Homo sapiens
cttatagccaggctg

SEQ ID NO: 1779761 - DNA, 15 bp, Homo sapiens
ttatagccaggctgc

SEQ ID NO: 1779762 - DNA, 15 bp, Homo sapiens
tatagccaggctgca

SEQ ID NO: 1779763 - DNA, 15 bp, Homo sapiens
atagccaggctgcaa

SEQ ID NO: 1779764 - DNA, 15 bp, Homo sapiens
tagccaggctgcaaa

SEQ ID NO: 1779765 - DNA, 15 bp, Homo sapiens
agccaggctgcaaac

SEQ ID NO: 1779766 - DNA, 15 bp, Homo sapiens
gccaggctgcaaaca

SEQ ID NO: 1779767 - DNA, 15 bp, Homo sapiens
ccaggctgcaaacat

SEQ ID NO: 1779768 - DNA, 15 bp, Homo sapiens
caggctgcaaacata

SEQ ID NO: 1779769 - DNA, 15 bp, Homo sapiens
aggctgcaaacataa

SEQ ID NO: 1779770 - DNA, 15 bp, Homo sapiens
ggctgcaaacataat

SEQ ID NO: 1779771 - DNA, 15 bp, Homo sapiens
gctgcaaacataata

SEQ ID NO: 1779772 - DNA, 15 bp, Homo sapiens
ctgcaaacataataa

SEQ ID NO: 1779773 - DNA, 15 bp, Homo sapiens
tgcaaacataataag

SEQ ID NO: 1779774 - DNA, 15 bp, Homo sapiens
gcaaacataataagg

SEQ ID NO: 1779775 - DNA, 15 bp, Homo sapiens
caaacataataaggg

SEQ ID NO: 1779776 - DNA, 15 bp, Homo sapiens
aaacataataagggt

SEQ ID NO: 1779777 - DNA, 15 bp, Homo sapiens
aacataataagggtt

SEQ ID NO: 1779778 - DNA, 15 bp, Homo sapiens
acataataagggtta

SEQ ID NO: 1779779 - DNA, 15 bp, Homo sapiens
cataataagggttac

SEQ ID NO: 1779780 - DNA, 15 bp, Homo sapiens
ataataagggttaca

SEQ ID NO: 1779781 - DNA, 15 bp, Homo sapiens
taataagggttacat

SEQ ID NO: 1779782 - DNA, 15 bp, Homo sapiens
aataagggttacata

SEQ ID NO: 1779783 - DNA, 15 bp, Homo sapiens
ataagggttacataa

SEQ ID NO: 1779784 - DNA, 15 bp, Homo sapiens
taagggttacataag

SEQ ID NO: 1779785 - DNA, 15 bp, Homo sapiens
aagggttacataagg

SEQ ID NO: 1779786 - DNA, 15 bp, Homo sapiens
agggttacataaggt

SEQ ID NO: 1779787 - DNA, 15 bp, Homo sapiens
gggttacataaggtc

SEQ ID NO: 1779788 - DNA, 15 bp, Homo sapiens
ggttacataaggtca

SEQ ID NO: 1779789 - DNA, 15 bp, Homo sapiens
gttacataaggtcat

SEQ ID NO: 1779790 - DNA, 15 bp, Homo sapiens
ttacataaggtcatt

SEQ ID NO: 1779791 - DNA, 15 bp, Homo sapiens
tacataaggtcattt

SEQ ID NO: 1779792 - DNA, 15 bp, Homo sapiens
acataaggtcatttt

SEQ ID NO: 1779793 - DNA, 15 bp, Homo sapiens
cataaggtcattttc

SEQ ID NO: 1779794 - DNA, 15 bp, Homo sapiens
ataaggtcattttcc

SEQ ID NO: 1779795 - DNA, 15 bp, Homo sapiens
aaggtcattttcctg

SEQ ID NO: 1779796 - DNA, 15 bp, Homo sapiens
tacaaagatttctat

SEQ ID NO: 1779797 - DNA, 15 bp, Homo sapiens
acaaagatttctata

SEQ ID NO: 1779798 - DNA, 15 bp, Homo sapiens
caaagatttctatat

SEQ ID NO: 1779799 - DNA, 15 bp, Homo sapiens
aaagatttctatatt

SEQ ID NO: 1779800 - DNA, 15 bp, Homo sapiens
aagatttctatattt

SEQ ID NO: 1779801 - DNA, 15 bp, Homo sapiens
agatttctatatttg

SEQ ID NO: 1779802 - DNA, 15 bp, Homo sapiens
gatttctatatttga

SEQ ID NO: 1779803 - DNA, 15 bp, Homo sapiens
atttctatatttgaa

SEQ ID NO: 1779804 - DNA, 15 bp, Homo sapiens
tttctatatttgaag

SEQ ID NO: 1779805 - DNA, 15 bp, Homo sapiens
ttctatatttgaagt

SEQ ID NO: 1779806 - DNA, 15 bp, Homo sapiens
tctatatttgaagtc

SEQ ID NO: 1779807 - DNA, 15 bp, Homo sapiens
ctatatttgaagtca

SEQ ID NO: 1779808 - DNA, 15 bp, Homo sapiens
tatatttgaagtcaa

SEQ ID NO: 1779809 - DNA, 15 bp, Homo sapiens
atatttgaagtcaag

SEQ ID NO: 1779810 - DNA, 15 bp, Homo sapiens
tatttgaagtcaagt

SEQ ID NO: 1779811 - DNA, 15 bp, Homo sapiens
atttgaagtcaagtc

SEQ ID NO: 1779812 - DNA, 15 bp, Homo sapiens
tttgaagtcaagtca

SEQ ID NO: 1779813 - DNA, 15 bp, Homo sapiens
ttgaagtcaagtcac

SEQ ID NO: 1779814 - DNA, 15 bp, Homo sapiens
tgaagtcaagtcacc

SEQ ID NO: 1779815 - DNA, 15 bp, Homo sapiens
gaagtcaagtcacct

SEQ ID NO: 1779816 - DNA, 15 bp, Homo sapiens
aagtcaagtcacctt

SEQ ID NO: 1779817 - DNA, 15 bp, Homo sapiens
agtcaagtcaccttt

SEQ ID NO: 1779818 - DNA, 15 bp, Homo sapiens
gtcaagtcaccttta

SEQ ID NO: 1779819 - DNA, 15 bp, Homo sapiens
tcaagtcacctttag

SEQ ID NO: 1779820 - DNA, 15 bp, Homo sapiens
caagtcacctttagc

SEQ ID NO: 1779821 - DNA, 15 bp, Homo sapiens
aagtcacctttagct

SEQ ID NO: 1779822 - DNA, 15 bp, Homo sapiens
agtcacctttagctt

SEQ ID NO: 1779823 - DNA, 15 bp, Homo sapiens
gtcacctttagcttg

SEQ ID NO: 1779824 - DNA, 15 bp, Homo sapiens
tcacctttagcttgt

SEQ ID NO: 1779825 - DNA, 15 bp, Homo sapiens
cacctttagcttgta

SEQ ID NO: 1779826 - DNA, 15 bp, Homo sapiens
acctttagcttgtaa

SEQ ID NO: 1779827 - DNA, 15 bp, Homo sapiens
cctttagcttgtaag

SEQ ID NO: 1779828 - DNA, 15 bp, Homo sapiens
ctttagcttgtaaga

SEQ ID NO: 1779829 - DNA, 15 bp, Homo sapiens
tttagcttgtaagac

SEQ ID NO: 1779830 - DNA, 15 bp, Homo sapiens
ttagcttgtaagact

SEQ ID NO: 1779831 - DNA, 15 bp, Homo sapiens
tagcttgtaagacta

SEQ ID NO: 1779832 - DNA, 15 bp, Homo sapiens
agcttgtaagactaa

SEQ ID NO: 1779833 - DNA, 15 bp, Homo sapiens
gcttgtaagactaac

SEQ ID NO: 1779834 - DNA, 15 bp, Homo sapiens
cttgtaagactaaca

SEQ ID NO: 1779835 - DNA, 15 bp, Homo sapiens
ttgtaagactaacag

SEQ ID NO: 1779836 - DNA, 15 bp, Homo sapiens
tgtaagactaacaga

SEQ ID NO: 1779837 - DNA, 15 bp, Homo sapiens
gtaagactaacagag

SEQ ID NO: 1779838 - DNA, 15 bp, Homo sapiens
taagactaacagagg

SEQ ID NO: 1779839 - DNA, 15 bp, Homo sapiens
aagactaacagagga

SEQ ID NO: 1779840 - DNA, 15 bp, Homo sapiens
agactaacagaggat

SEQ ID NO: 1779841 - DNA, 15 bp, Homo sapiens
gactaacagaggatg

SEQ ID NO: 1779842 - DNA, 15 bp, Homo sapiens
actaacagaggatgg

SEQ ID NO: 1779843 - DNA, 15 bp, Homo sapiens
ctaacagaggatggg

SEQ ID NO: 1779844 - DNA, 15 bp, Homo sapiens
taacagaggatggga

SEQ ID NO: 1779845 - DNA, 15 bp, Homo sapiens
aacagaggatgggaa

SEQ ID NO: 1779846 - DNA, 15 bp, Homo sapiens
acagaggatgggaaa

SEQ ID NO: 1779847 - DNA, 15 bp, Homo sapiens
cagaggatgggaaat

SEQ ID NO: 1779848 - DNA, 15 bp, Homo sapiens
agaggatgggaaata

SEQ ID NO: 1779849 - DNA, 15 bp, Homo sapiens
gaggatgggaaatac

SEQ ID NO: 1779850 - DNA, 15 bp, Homo sapiens
aggatgggaaataca

SEQ ID NO: 1779851 - DNA, 15 bp, Homo sapiens
ggatgggaaatacaa

SEQ ID NO: 1779852 - DNA, 15 bp, Homo sapiens
gatgggaaatacaaa

SEQ ID NO: 1779853 - DNA, 15 bp, Homo sapiens
atgggaaatacaaaa

SEQ ID NO: 1779854 - DNA, 15 bp, Homo sapiens
tgggaaatacaaaaa

SEQ ID NO: 1779855 - DNA, 15 bp, Homo sapiens
gggaaatacaaaaaa

SEQ ID NO: 1779856 - DNA, 15 bp, Homo sapiens
ggaaatacaaaaaaa

SEQ ID NO: 1779857 - DNA, 15 bp, Homo sapiens
gaaatacaaaaaaaa

SEQ ID NO: 1779858 - DNA, 15 bp, Homo sapiens
aaaaaaaaaaaaccc

SEQ ID NO: 1779859 - DNA, 15 bp, Homo sapiens
aaaaaaaaaacccta

SEQ ID NO: 1779860 - DNA, 15 bp, Homo sapiens
aaaaaaaaaccctac

SEQ ID NO: 1779861 - DNA, 15 bp, Homo sapiens
aaaaaaaaccctact

SEQ ID NO: 1779862 - DNA, 15 bp, Homo sapiens
aaaaaaaccctactg

SEQ ID NO: 1779863 - DNA, 15 bp, Homo sapiens
aaaaaaccctactgc

SEQ ID NO: 1779864 - DNA, 15 bp, Homo sapiens
aaaaaccctactgcc

SEQ ID NO: 1779865 - DNA, 15 bp, Homo sapiens
aaaaccctactgccc

SEQ ID NO: 1779866 - DNA, 15 bp, Homo sapiens
aaaccctactgccca

SEQ ID NO: 1779867 - DNA, 15 bp, Homo sapiens
aaccctactgcccat

SEQ ID NO: 1779868 - DNA, 15 bp, Homo sapiens
accctactgcccatt

SEQ ID NO: 1779869 - DNA, 15 bp, Homo sapiens
ccctactgcccatta

SEQ ID NO: 1779870 - DNA, 15 bp, Homo sapiens
cctactgcccattag

SEQ ID NO: 1779871 - DNA, 15 bp, Homo sapiens
ctactgcccattaga

SEQ ID NO: 1779872 - DNA, 15 bp, Homo sapiens
tactgcccattagag

SEQ ID NO: 1779873 - DNA, 15 bp, Homo sapiens
actgcccattagagt

SEQ ID NO: 1779874 - DNA, 15 bp, Homo sapiens
ctgcccattagagtt

SEQ ID NO: 1779875 - DNA, 15 bp, Homo sapiens
tgcccattagagttt

SEQ ID NO: 1779876 - DNA, 15 bp, Homo sapiens
gcccattagagtttt

SEQ ID NO: 1779877 - DNA, 15 bp, Homo sapiens
cccattagagtttta

SEQ ID NO: 1779878 - DNA, 15 bp, Homo sapiens
ccattagagttttaa

SEQ ID NO: 1779879 - DNA, 15 bp, Homo sapiens
cattagagttttaaa

SEQ ID NO: 1779880 - DNA, 15 bp, Homo sapiens
attagagttttaaaa

SEQ ID NO: 1779881 - DNA, 15 bp, Homo sapiens
ttagagttttaaaag

SEQ ID NO: 1779882 - DNA, 15 bp, Homo sapiens
tagagttttaaaagc

SEQ ID NO: 1779883 - DNA, 15 bp, Homo sapiens
agagttttaaaagca

SEQ ID NO: 1779884 - DNA, 15 bp, Homo sapiens
gagttttaaaagcaa

SEQ ID NO: 1779885 - DNA, 15 bp, Homo sapiens
agttttaaaagcaaa

SEQ ID NO: 1779886 - DNA, 15 bp, Homo sapiens
gttttaaaagcaaac

SEQ ID NO: 1779887 - DNA, 15 bp, Homo sapiens
ttttaaaagcaaact

SEQ ID NO: 1779888 - DNA, 15 bp, Homo sapiens
tttaaaagcaaacta

SEQ ID NO: 1779889 - DNA, 15 bp, Homo sapiens
ttaaaagcaaactac

SEQ ID NO: 1779890 - DNA, 15 bp, Homo sapiens
taaaagcaaactacg

SEQ ID NO: 1779891 - DNA, 15 bp, Homo sapiens
aaaagcaaactacgc

SEQ ID NO: 1779892 - DNA, 15 bp, Homo sapiens
aaagcaaactacgcc

SEQ ID NO: 1779893 - DNA, 15 bp, Homo sapiens
aagcaaactacgcca

SEQ ID NO: 1779894 - DNA, 15 bp, Homo sapiens
agcaaactacgccac

SEQ ID NO: 1779895 - DNA, 15 bp, Homo sapiens
gcaaactacgccacc

SEQ ID NO: 1779896 - DNA, 15 bp, Homo sapiens
caaactacgccacct

SEQ ID NO: 1779897 - DNA, 15 bp, Homo sapiens
aaactacgccacctg

SEQ ID NO: 1779898 - DNA, 15 bp, Homo sapiens
aactacgccacctgc

SEQ ID NO: 1779899 - DNA, 15 bp, Homo sapiens
actacgccacctgca

SEQ ID NO: 1779900 - DNA, 15 bp, Homo sapiens
ctacgccacctgcag

SEQ ID NO: 1779901 - DNA, 15 bp, Homo sapiens
tacgccacctgcaga

SEQ ID NO: 1779902 - DNA, 15 bp, Homo sapiens
acgccacctgcagag

SEQ ID NO: 1779903 - DNA, 15 bp, Homo sapiens
cgccacctgcagagg

SEQ ID NO: 1779904 - DNA, 15 bp, Homo sapiens
gccacctgcagagga

SEQ ID NO: 1779905 - DNA, 15 bp, Homo sapiens
ccacctgcagaggat

SEQ ID NO: 1779906 - DNA, 15 bp, Homo sapiens
cacctgcagaggata

SEQ ID NO: 1779907 - DNA, 15 bp, Homo sapiens
acctgcagaggataa

SEQ ID NO: 1779908 - DNA, 15 bp, Homo sapiens
cctgcagaggataaa

SEQ ID NO: 1779909 - DNA, 15 bp, Homo sapiens
ctgcagaggataaag

SEQ ID NO: 1779910 - DNA, 15 bp, Homo sapiens
tgcagaggataaaga

SEQ ID NO: 1779911 - DNA, 15 bp, Homo sapiens
gcagaggataaagaa

SEQ ID NO: 1779912 - DNA, 15 bp, Homo sapiens
cagaggataaagaag

SEQ ID NO: 1779913 - DNA, 15 bp, Homo sapiens
agaggataaagaagt

SEQ ID NO: 1779914 - DNA, 15 bp, Homo sapiens
gaggataaagaagtg

SEQ ID NO: 1779915 - DNA, 15 bp, Homo sapiens
aggataaagaagtgc

SEQ ID NO: 1779916 - DNA, 15 bp, Homo sapiens
ggataaagaagtgcg

SEQ ID NO: 1779917 - DNA, 15 bp, Homo sapiens
gataaagaagtgcga

SEQ ID NO: 1779918 - DNA, 15 bp, Homo sapiens
ataaagaagtgcgag

SEQ ID NO: 1779919 - DNA, 15 bp, Homo sapiens
taaagaagtgcgagg

SEQ ID NO: 1779920 - DNA, 15 bp, Homo sapiens
aaagaagtgcgaggc

SEQ ID NO: 1779921 - DNA, 15 bp, Homo sapiens
aagaagtgcgaggct

SEQ ID NO: 1779922 - DNA, 15 bp, Homo sapiens
agaagtgcgaggctc

SEQ ID NO: 1779923 - DNA, 15 bp, Homo sapiens
gaagtgcgaggctca

SEQ ID NO: 1779924 - DNA, 15 bp, Homo sapiens
aagtgcgaggctcaa

SEQ ID NO: 1779925 - DNA, 15 bp, Homo sapiens
agtgcgaggctcaaa

SEQ ID NO: 1779926 - DNA, 15 bp, Homo sapiens
gtgcgaggctcaaag

SEQ ID NO: 1779927 - DNA, 15 bp, Homo sapiens
tgcgaggctcaaaga

SEQ ID NO: 1779928 - DNA, 15 bp, Homo sapiens
gcgaggctcaaagat

SEQ ID NO: 1779929 - DNA, 15 bp, Homo sapiens
cgaggctcaaagatc

SEQ ID NO: 1779930 - DNA, 15 bp, Homo sapiens
gaggctcaaagatct

SEQ ID NO: 1779931 - DNA, 15 bp, Homo sapiens
aggctcaaagatctt

SEQ ID NO: 1779932 - DNA, 15 bp, Homo sapiens
ggctcaaagatcttc

SEQ ID NO: 1779933 - DNA, 15 bp, Homo sapiens
gctcaaagatcttca

SEQ ID NO: 1779934 - DNA, 15 bp, Homo sapiens
ctcaaagatcttcac

SEQ ID NO: 1779935 - DNA, 15 bp, Homo sapiens
tcaaagatcttcaca

SEQ ID NO: 1779936 - DNA, 15 bp, Homo sapiens
caaagatcttcacaa

SEQ ID NO: 1779937 - DNA, 15 bp, Homo sapiens
aaagatcttcacaat

SEQ ID NO: 1779938 - DNA, 15 bp, Homo sapiens
aagatcttcacaatg

SEQ ID NO: 1779939 - DNA, 15 bp, Homo sapiens
agatcttcacaatga

SEQ ID NO: 1779940 - DNA, 15 bp, Homo sapiens
gatcttcacaatgaa

SEQ ID NO: 1779941 - DNA, 15 bp, Homo sapiens
atcttcacaatgaaa

SEQ ID NO: 1779942 - DNA, 15 bp, Homo sapiens
tcttcacaatgaaaa

SEQ ID NO: 1779943 - DNA, 15 bp, Homo sapiens
cttcacaatgaaaac

SEQ ID NO: 1779944 - DNA, 15 bp, Homo sapiens
ttcacaatgaaaaca

SEQ ID NO: 1779945 - DNA, 15 bp, Homo sapiens
tcacaatgaaaacag

SEQ ID NO: 1779946 - DNA, 15 bp, Homo sapiens
cacaatgaaaacagt

SEQ ID NO: 1779947 - DNA, 15 bp, Homo sapiens
acaatgaaaacagtt

SEQ ID NO: 1779948 - DNA, 15 bp, Homo sapiens
caatgaaaacagttt

SEQ ID NO: 1779949 - DNA, 15 bp, Homo sapiens
aatgaaaacagtttc

SEQ ID NO: 1779950 - DNA, 15 bp, Homo sapiens
atgaaaacagtttct

SEQ ID NO: 1779951 - DNA, 15 bp, Homo sapiens
tgaaaacagtttctg

SEQ ID NO: 1779952 - DNA, 15 bp, Homo sapiens
gaaaacagtttctgt

SEQ ID NO: 1779953 - DNA, 15 bp, Homo sapiens
aaaacagtttctgtg

SEQ ID NO: 1779954 - DNA, 15 bp, Homo sapiens
aaacagtttctgtgg

SEQ ID NO: 1779955 - DNA, 15 bp, Homo sapiens
aacagtttctgtggg

SEQ ID NO: 1779956 - DNA, 15 bp, Homo sapiens
acagtttctgtggga

SEQ ID NO: 1779957 - DNA, 15 bp, Homo sapiens
cagtttctgtgggaa

SEQ ID NO: 1779958 - DNA, 15 bp, Homo sapiens
agtttctgtgggaag

SEQ ID NO: 1779959 - DNA, 15 bp, Homo sapiens
gtttctgtgggaagg

SEQ ID NO: 1779960 - DNA, 15 bp, Homo sapiens
tttctgtgggaaggt

SEQ ID NO: 1779961 - DNA, 15 bp, Homo sapiens
ttctgtgggaaggta

SEQ ID NO: 1779962 - DNA, 15 bp, Homo sapiens
tctgtgggaaggtaa

SEQ ID NO: 1779963 - DNA, 15 bp, Homo sapiens
ctgtgggaaggtaag

SEQ ID NO: 1779964 - DNA, 15 bp, Homo sapiens
tgtgggaaggtaagg

SEQ ID NO: 1779965 - DNA, 15 bp, Homo sapiens
gtgggaaggtaaggg

SEQ ID NO: 1779966 - DNA, 15 bp, Homo sapiens
tgggaaggtaagggc

SEQ ID NO: 1779967 - DNA, 15 bp, Homo sapiens
gggaaggtaagggcc

SEQ ID NO: 1779968 - DNA, 15 bp, Homo sapiens
ggaaggtaagggcct

SEQ ID NO: 1779969 - DNA, 15 bp, Homo sapiens
gaaggtaagggcctt

SEQ ID NO: 1779970 - DNA, 15 bp, Homo sapiens
aaggtaagggccttg

SEQ ID NO: 1779971 - DNA, 15 bp, Homo sapiens
aggtaagggccttga

SEQ ID NO: 1779972 - DNA, 15 bp, Homo sapiens
ggtaagggccttgag

SEQ ID NO: 1779973 - DNA, 15 bp, Homo sapiens
gtaagggccttgaga

SEQ ID NO: 1779974 - DNA, 15 bp, Homo sapiens
taagggccttgagat

SEQ ID NO: 1779975 - DNA, 15 bp, Homo sapiens
aagggccttgagata

SEQ ID NO: 1779976 - DNA, 15 bp, Homo sapiens
agggccttgagatat

SEQ ID NO: 1779977 - DNA, 15 bp, Homo sapiens
gggccttgagatata

SEQ ID NO: 1779978 - DNA, 15 bp, Homo sapiens
ggccttgagatataa

SEQ ID NO: 1779979 - DNA, 15 bp, Homo sapiens
gccttgagatataaa

SEQ ID NO: 1779980 - DNA, 15 bp, Homo sapiens
ccttgagatataaac

SEQ ID NO: 1779981 - DNA, 15 bp, Homo sapiens
cttgagatataaact

SEQ ID NO: 1779982 - DNA, 15 bp, Homo sapiens
ttgagatataaactc

SEQ ID NO: 1779983 - DNA, 15 bp, Homo sapiens
tgagatataaactct

SEQ ID NO: 1779984 - DNA, 15 bp, Homo sapiens
gagatataaactctt

SEQ ID NO: 1779985 - DNA, 15 bp, Homo sapiens
agatataaactctta

SEQ ID NO: 1779986 - DNA, 15 bp, Homo sapiens
gatataaactcttaa

SEQ ID NO: 1779987 - DNA, 15 bp, Homo sapiens
atataaactcttaaa

SEQ ID NO: 1779988 - DNA, 15 bp, Homo sapiens
tataaactcttaaac

SEQ ID NO: 1779989 - DNA, 15 bp, Homo sapiens
ataaactcttaaact

SEQ ID NO: 1779990 - DNA, 15 bp, Homo sapiens
taaactcttaaactt

SEQ ID NO: 1779991 - DNA, 15 bp, Homo sapiens
aaactcttaaacttc

SEQ ID NO: 1779992 - DNA, 15 bp, Homo sapiens
aactcttaaacttcc

SEQ ID NO: 1779993 - DNA, 15 bp, Homo sapiens
actcttaaacttcct

SEQ ID NO: 1779994 - DNA, 15 bp, Homo sapiens
ctcttaaacttcctt

SEQ ID NO: 1779995 - DNA, 15 bp, Homo sapiens
tcttaaacttccttt

SEQ ID NO: 1779996 - DNA, 15 bp, Homo sapiens
cttaaacttcctttt

SEQ ID NO: 1779997 - DNA, 15 bp, Homo sapiens
ttaaacttccttttg

SEQ ID NO: 1779998 - DNA, 15 bp, Homo sapiens
taaacttccttttga

SEQ ID NO: 1779999 - DNA, 15 bp, Homo sapiens
aaacttccttttgat

SEQ ID NO: 1780000 - DNA, 15 bp, Homo sapiens
aacttccttttgatt

SEQ ID NO: 1780001 - DNA, 15 bp, Homo sapiens
acttccttttgattc

SEQ ID NO: 1780002 - DNA, 15 bp, Homo sapiens
cttccttttgattca

SEQ ID NO: 1780003 - DNA, 15 bp, Homo sapiens
ttccttttgattcag

SEQ ID NO: 1780004 - DNA, 15 bp, Homo sapiens
tccttttgattcaga

SEQ ID NO: 1780005 - DNA, 15 bp, Homo sapiens
ccttttgattcagaa

SEQ ID NO: 1780006 - DNA, 15 bp, Homo sapiens
cttttgattcagaag

SEQ ID NO: 1780007 - DNA, 15 bp, Homo sapiens
ttttgattcagaagc

SEQ ID NO: 1780008 - DNA, 15 bp, Homo sapiens
tttgattcagaagcc

SEQ ID NO: 1780009 - DNA, 15 bp, Homo sapiens
ttgattcagaagcct

SEQ ID NO: 1780010 - DNA, 15 bp, Homo sapiens
tgattcagaagccta

SEQ ID NO: 1780011 - DNA, 15 bp, Homo sapiens
gattcagaagcctat

SEQ ID NO: 1780012 - DNA, 15 bp, Homo sapiens
attcagaagcctata

SEQ ID NO: 1780013 - DNA, 15 bp, Homo sapiens
ttcagaagcctatag

SEQ ID NO: 1780014 - DNA, 15 bp, Homo sapiens
tcagaagcctataga

SEQ ID NO: 1780015 - DNA, 15 bp, Homo sapiens
cagaagcctatagag

SEQ ID NO: 1780016 - DNA, 15 bp, Homo sapiens
agaagcctatagagt

SEQ ID NO: 1780017 - DNA, 15 bp, Homo sapiens
gaagcctatagagtc

SEQ ID NO: 1780018 - DNA, 15 bp, Homo sapiens
aagcctatagagtct

SEQ ID NO: 1780019 - DNA, 15 bp, Homo sapiens
agcctatagagtcta

SEQ ID NO: 1780020 - DNA, 15 bp, Homo sapiens
gcctatagagtctat

SEQ ID NO: 1780021 - DNA, 15 bp, Homo sapiens
cctatagagtctatg

SEQ ID NO: 1780022 - DNA, 15 bp, Homo sapiens
ctatagagtctatga

SEQ ID NO: 1780023 - DNA, 15 bp, Homo sapiens
tatagagtctatgag

SEQ ID NO: 1780024 - DNA, 15 bp, Homo sapiens
atagagtctatgagt

SEQ ID NO: 1780025 - DNA, 15 bp, Homo sapiens
tagagtctatgagtt

SEQ ID NO: 1780026 - DNA, 15 bp, Homo sapiens
agagtctatgagttt

SEQ ID NO: 1780027 - DNA, 15 bp, Homo sapiens
gagtctatgagttta

SEQ ID NO: 1780028 - DNA, 15 bp, Homo sapiens
agtctatgagtttag

SEQ ID NO: 1780029 - DNA, 15 bp, Homo sapiens
gtctatgagtttagg

SEQ ID NO: 1780030 - DNA, 15 bp, Homo sapiens
tctatgagtttagga

SEQ ID NO: 1780031 - DNA, 15 bp, Homo sapiens
ctatgagtttaggaa

SEQ ID NO: 1780032 - DNA, 15 bp, Homo sapiens
tatgagtttaggaaa

SEQ ID NO: 1780033 - DNA, 15 bp, Homo sapiens
atgagtttaggaaat

SEQ ID NO: 1780034 - DNA, 15 bp, Homo sapiens
tgagtttaggaaata

SEQ ID NO: 1780035 - DNA, 15 bp, Homo sapiens
gagtttaggaaatac

SEQ ID NO: 1780036 - DNA, 15 bp, Homo sapiens
agtttaggaaataca

SEQ ID NO: 1780037 - DNA, 15 bp, Homo sapiens
gtttaggaaatacat

SEQ ID NO: 1780038 - DNA, 15 bp, Homo sapiens
tttaggaaatacatt

SEQ ID NO: 1780039 - DNA, 15 bp, Homo sapiens
ttaggaaatacattc

SEQ ID NO: 1780040 - DNA, 15 bp, Homo sapiens
taggaaatacattcc

SEQ ID NO: 1780041 - DNA, 15 bp, Homo sapiens
aggaaatacattcca

SEQ ID NO: 1780042 - DNA, 15 bp, Homo sapiens
ggaaatacattccat

SEQ ID NO: 1780043 - DNA, 15 bp, Homo sapiens
gaaatacattccatt

SEQ ID NO: 1780044 - DNA, 15 bp, Homo sapiens
aaatacattccatta

SEQ ID NO: 1780045 - DNA, 15 bp, Homo sapiens
aatacattccattag

SEQ ID NO: 1780046 - DNA, 15 bp, Homo sapiens
atacattccattaga

SEQ ID NO: 1780047 - DNA, 15 bp, Homo sapiens
tacattccattagat

SEQ ID NO: 1780048 - DNA, 15 bp, Homo sapiens
acattccattagatg

SEQ ID NO: 1780049 - DNA, 15 bp, Homo sapiens
cattccattagatga

SEQ ID NO: 1780050 - DNA, 15 bp, Homo sapiens
attccattagatgag

SEQ ID NO: 1780051 - DNA, 15 bp, Homo sapiens
ttccattagatgagg

SEQ ID NO: 1780052 - DNA, 15 bp, Homo sapiens
tccattagatgaggc

SEQ ID NO: 1780053 - DNA, 15 bp, Homo sapiens
ccattagatgaggca

SEQ ID NO: 1780054 - DNA, 15 bp, Homo sapiens
cattagatgaggcat

SEQ ID NO: 1780055 - DNA, 15 bp, Homo sapiens
attagatgaggcatg

SEQ ID NO: 1780056 - DNA, 15 bp, Homo sapiens
ttagatgaggcatgc

SEQ ID NO: 1780057 - DNA, 15 bp, Homo sapiens
tagatgaggcatgct

SEQ ID NO: 1780058 - DNA, 15 bp, Homo sapiens
agatgaggcatgcta

SEQ ID NO: 1780059 - DNA, 15 bp, Homo sapiens
gatgaggcatgctat

SEQ ID NO: 1780060 - DNA, 15 bp, Homo sapiens
atgaggcatgctatt

SEQ ID NO: 1780061 - DNA, 15 bp, Homo sapiens
tgaggcatgctattt

SEQ ID NO: 1780062 - DNA, 15 bp, Homo sapiens
gaggcatgctatttc

SEQ ID NO: 1780063 - DNA, 15 bp, Homo sapiens
aggcatgctatttca

SEQ ID NO: 1780064 - DNA, 15 bp, Homo sapiens
ggcatgctatttcat

SEQ ID NO: 1780065 - DNA, 15 bp, Homo sapiens
gcatgctatttcata

SEQ ID NO: 1780066 - DNA, 15 bp, Homo sapiens
catgctatttcataa

SEQ ID NO: 1780067 - DNA, 15 bp, Homo sapiens
atgctatttcataac

SEQ ID NO: 1780068 - DNA, 15 bp, Homo sapiens
tgctatttcataaca

SEQ ID NO: 1780069 - DNA, 15 bp, Homo sapiens
gctatttcataacaa

SEQ ID NO: 1780070 - DNA, 15 bp, Homo sapiens
ctatttcataacaaa

SEQ ID NO: 1780071 - DNA, 15 bp, Homo sapiens
tatttcataacaaaa

SEQ ID NO: 1780072 - DNA, 15 bp, Homo sapiens
atttcataacaaaaa

SEQ ID NO: 1780073 - DNA, 15 bp, Homo sapiens
tttcataacaaaaaa

SEQ ID NO: 1780074 - DNA, 15 bp, Homo sapiens
ttcataacaaaaaat

SEQ ID NO: 1780075 - DNA, 15 bp, Homo sapiens
tcataacaaaaaatc

SEQ ID NO: 1780076 - DNA, 15 bp, Homo sapiens
cataacaaaaaatca

SEQ ID NO: 1780077 - DNA, 15 bp, Homo sapiens
ataacaaaaaatcaa

SEQ ID NO: 1780078 - DNA, 15 bp, Homo sapiens
taacaaaaaatcaaa

SEQ ID NO: 1780079 - DNA, 15 bp, Homo sapiens
aacaaaaaatcaaat

SEQ ID NO: 1780080 - DNA, 15 bp, Homo sapiens
acaaaaaatcaaatc

SEQ ID NO: 1780081 - DNA, 15 bp, Homo sapiens
caaaaaatcaaatca

SEQ ID NO: 1780082 - DNA, 15 bp, Homo sapiens
aaaaaatcaaatcat

SEQ ID NO: 1780083 - DNA, 15 bp, Homo sapiens
aaaaatcaaatcata

SEQ ID NO: 1780084 - DNA, 15 bp, Homo sapiens
aaaatcaaatcatac

SEQ ID NO: 1780085 - DNA, 15 bp, Homo sapiens
aaatcaaatcatacc

SEQ ID NO: 1780086 - DNA, 15 bp, Homo sapiens
aatcaaatcatacct

SEQ ID NO: 1780087 - DNA, 15 bp, Homo sapiens
atcaaatcataccta

SEQ ID NO: 1780088 - DNA, 15 bp, Homo sapiens
tcaaatcatacctaa

SEQ ID NO: 1780089 - DNA, 15 bp, Homo sapiens
caaatcatacctaat

SEQ ID NO: 1780090 - DNA, 15 bp, Homo sapiens
aaatcatacctaatt

SEQ ID NO: 1780091 - DNA, 15 bp, Homo sapiens
aatcatacctaattg

SEQ ID NO: 1780092 - DNA, 15 bp, Homo sapiens
atcatacctaattgt

SEQ ID NO: 1780093 - DNA, 15 bp, Homo sapiens
tcatacctaattgtt

SEQ ID NO: 1780094 - DNA, 15 bp, Homo sapiens
catacctaattgtta

SEQ ID NO: 1780095 - DNA, 15 bp, Homo sapiens
atacctaattgttac

SEQ ID NO: 1780096 - DNA, 15 bp, Homo sapiens
tacctaattgttaca

SEQ ID NO: 1780097 - DNA, 15 bp, Homo sapiens
acctaattgttacaa

SEQ ID NO: 1780098 - DNA, 15 bp, Homo sapiens
cctaattgttacaac

SEQ ID NO: 1780099 - DNA, 15 bp, Homo sapiens
ctaattgttacaact

SEQ ID NO: 1780100 - DNA, 15 bp, Homo sapiens
ttgttacaactgtgt

SEQ ID NO: 1780101 - DNA, 15 bp, Homo sapiens
tgttacaactgtgtt

SEQ ID NO: 1780102 - DNA, 15 bp, Homo sapiens
gttacaactgtgttc

SEQ ID NO: 1780103 - DNA, 15 bp, Homo sapiens
ttacaactgtgttct

SEQ ID NO: 1780104 - DNA, 15 bp, Homo sapiens
tacaactgtgttctt

SEQ ID NO: 1780105 - DNA, 15 bp, Homo sapiens
acaactgtgttcttt

SEQ ID NO: 1780106 - DNA, 15 bp, Homo sapiens
caactgtgttctttt

SEQ ID NO: 1780107 - DNA, 15 bp, Homo sapiens
aactgtgttcttttt

SEQ ID NO: 1780108 - DNA, 15 bp, Homo sapiens
actgtgttctttttg

SEQ ID NO: 1780109 - DNA, 15 bp, Homo sapiens
ctgtgttctttttgg

SEQ ID NO: 1780110 - DNA, 15 bp, Homo sapiens
tgtgttctttttggt

SEQ ID NO: 1780111 - DNA, 15 bp, Homo sapiens
gtgttctttttggtt

SEQ ID NO: 1780112 - DNA, 15 bp, Homo sapiens
tgttctttttggttt

SEQ ID NO: 1780113 - DNA, 15 bp, Homo sapiens
gttctttttggttta

SEQ ID NO: 1780114 - DNA, 15 bp, Homo sapiens
ttctttttggtttac

SEQ ID NO: 1780115 - DNA, 15 bp, Homo sapiens
tctttttggtttact

SEQ ID NO: 1780116 - DNA, 15 bp, Homo sapiens
ctttttggtttactc

SEQ ID NO: 1780117 - DNA, 15 bp, Homo sapiens
tttttggtttactct

SEQ ID NO: 1780118 - DNA, 15 bp, Homo sapiens
ttttggtttactcta

SEQ ID NO: 1780119 - DNA, 15 bp, Homo sapiens
tttggtttactctac

SEQ ID NO: 1780120 - DNA, 15 bp, Homo sapiens
ttggtttactctacc

SEQ ID NO: 1780121 - DNA, 15 bp, Homo sapiens
tggtttactctacca

SEQ ID NO: 1780122 - DNA, 15 bp, Homo sapiens
ggtttactctaccac

SEQ ID NO: 1780123 - DNA, 15 bp, Homo sapiens
gtttactctaccact

SEQ ID NO: 1780124 - DNA, 15 bp, Homo sapiens
tttactctaccactt

SEQ ID NO: 1780125 - DNA, 15 bp, Homo sapiens
ttactctaccacttc

SEQ ID NO: 1780126 - DNA, 15 bp, Homo sapiens
tactctaccacttca

SEQ ID NO: 1780127 - DNA, 15 bp, Homo sapiens
actctaccacttcag

SEQ ID NO: 1780128 - DNA, 15 bp, Homo sapiens
ctctaccacttcagt

SEQ ID NO: 1780129 - DNA, 15 bp, Homo sapiens
tctaccacttcagtc

SEQ ID NO: 1780130 - DNA, 15 bp, Homo sapiens
ctaccacttcagtct

SEQ ID NO: 1780131 - DNA, 15 bp, Homo sapiens
taccacttcagtctc

SEQ ID NO: 1780132 - DNA, 15 bp, Homo sapiens
accacttcagtctct

SEQ ID NO: 1780133 - DNA, 15 bp, Homo sapiens
ccacttcagtctctc

SEQ ID NO: 1780134 - DNA, 15 bp, Homo sapiens
cacttcagtctctca

SEQ ID NO: 1780135 - DNA, 15 bp, Homo sapiens
acttcagtctctcat

SEQ ID NO: 1780136 - DNA, 15 bp, Homo sapiens
cttcagtctctcata

SEQ ID NO: 1780137 - DNA, 15 bp, Homo sapiens
ttcagtctctcatat

SEQ ID NO: 1780138 - DNA, 15 bp, Homo sapiens
tcagtctctcatata

SEQ ID NO: 1780139 - DNA, 15 bp, Homo sapiens
cagtctctcatatac

SEQ ID NO: 1780140 - DNA, 15 bp, Homo sapiens
agtctctcatatact

SEQ ID NO: 1780141 - DNA, 15 bp, Homo sapiens
gtctctcatatactt

SEQ ID NO: 1780142 - DNA, 15 bp, Homo sapiens
tctctcatatacttg

SEQ ID NO: 1780143 - DNA, 15 bp, Homo sapiens
ctctcatatacttgc

SEQ ID NO: 1780144 - DNA, 15 bp, Homo sapiens
tctcatatacttgct

SEQ ID NO: 1780145 - DNA, 15 bp, Homo sapiens
ctcatatacttgcta

SEQ ID NO: 1780146 - DNA, 15 bp, Homo sapiens
tcatatacttgctaa

SEQ ID NO: 1780147 - DNA, 15 bp, Homo sapiens
catatacttgctaat

SEQ ID NO: 1780148 - DNA, 15 bp, Homo sapiens
atatacttgctaatt

SEQ ID NO: 1780149 - DNA, 15 bp, Homo sapiens
tatacttgctaattg

SEQ ID NO: 1780150 - DNA, 15 bp, Homo sapiens
atacttgctaattgc

SEQ ID NO: 1780151 - DNA, 15 bp, Homo sapiens
tacttgctaattgcc

SEQ ID NO: 1780152 - DNA, 15 bp, Homo sapiens
acttgctaattgcct

SEQ ID NO: 1780153 - DNA, 15 bp, Homo sapiens
cttgctaattgcctg

SEQ ID NO: 1780154 - DNA, 15 bp, Homo sapiens
ttgctaattgcctgt

SEQ ID NO: 1780155 - DNA, 15 bp, Homo sapiens
tgctaattgcctgta

SEQ ID NO: 1780156 - DNA, 15 bp, Homo sapiens
gctaattgcctgtaa

SEQ ID NO: 1780157 - DNA, 15 bp, Homo sapiens
ctaattgcctgtaat

SEQ ID NO: 1780158 - DNA, 15 bp, Homo sapiens
taattgcctgtaata

SEQ ID NO: 1780159 - DNA, 15 bp, Homo sapiens
aattgcctgtaatat

SEQ ID NO: 1780160 - DNA, 15 bp, Homo sapiens
attgcctgtaatatg

SEQ ID NO: 1780161 - DNA, 15 bp, Homo sapiens
ttgcctgtaatatgt

SEQ ID NO: 1780162 - DNA, 15 bp, Homo sapiens
tgcctgtaatatgta

SEQ ID NO: 1780163 - DNA, 15 bp, Homo sapiens
gcctgtaatatgtag

SEQ ID NO: 1780164 - DNA, 15 bp, Homo sapiens
cctgtaatatgtagc

SEQ ID NO: 1780165 - DNA, 15 bp, Homo sapiens
ctgtaatatgtagct

SEQ ID NO: 1780166 - DNA, 15 bp, Homo sapiens
tgtaatatgtagctt

SEQ ID NO: 1780167 - DNA, 15 bp, Homo sapiens
gtaatatgtagcttt

SEQ ID NO: 1780168 - DNA, 15 bp, Homo sapiens
taatatgtagctttg

SEQ ID NO: 1780169 - DNA, 15 bp, Homo sapiens
aatatgtagctttga

SEQ ID NO: 1780170 - DNA, 15 bp, Homo sapiens
atatgtagctttgaa

SEQ ID NO: 1780171 - DNA, 15 bp, Homo sapiens
tatgtagctttgaat

SEQ ID NO: 1780172 - DNA, 15 bp, Homo sapiens
atgtagctttgaatt

SEQ ID NO: 1780173 - DNA, 15 bp, Homo sapiens
tgtagctttgaattt

SEQ ID NO: 1780174 - DNA, 15 bp, Homo sapiens
gtagctttgaatttc

SEQ ID NO: 1780175 - DNA, 15 bp, Homo sapiens
tagctttgaatttcc

SEQ ID NO: 1780176 - DNA, 15 bp, Homo sapiens
agctttgaatttcct

SEQ ID NO: 1780177 - DNA, 15 bp, Homo sapiens
gctttgaatttcctc

SEQ ID NO: 1780178 - DNA, 15 bp, Homo sapiens
ctttgaatttcctca

SEQ ID NO: 1780179 - DNA, 15 bp, Homo sapiens
tttgaatttcctcac

SEQ ID NO: 1780180 - DNA, 15 bp, Homo sapiens
ttgaatttcctcact

SEQ ID NO: 1780181 - DNA, 15 bp, Homo sapiens
tgaatttcctcacta

SEQ ID NO: 1780182 - DNA, 15 bp, Homo sapiens
gaatttcctcactac

SEQ ID NO: 1780183 - DNA, 15 bp, Homo sapiens
aatttcctcactact

SEQ ID NO: 1780184 - DNA, 15 bp, Homo sapiens
atttcctcactactc

SEQ ID NO: 1780185 - DNA, 15 bp, Homo sapiens
tttcctcactactct

SEQ ID NO: 1780186 - DNA, 15 bp, Homo sapiens
ttcctcactactcta

SEQ ID NO: 1780187 - DNA, 15 bp, Homo sapiens
tcctcactactctat

SEQ ID NO: 1780188 - DNA, 15 bp, Homo sapiens
cctcactactctatg

SEQ ID NO: 1780189 - DNA, 15 bp, Homo sapiens
ctcactactctatgc

SEQ ID NO: 1780190 - DNA, 15 bp, Homo sapiens
tcactactctatgct

SEQ ID NO: 1780191 - DNA, 15 bp, Homo sapiens
cactactctatgctc

SEQ ID NO: 1780192 - DNA, 15 bp, Homo sapiens
actactctatgctcc

SEQ ID NO: 1780193 - DNA, 15 bp, Homo sapiens
ctactctatgctcct

SEQ ID NO: 1780194 - DNA, 15 bp, Homo sapiens
tactctatgctccta

SEQ ID NO: 1780195 - DNA, 15 bp, Homo sapiens
actctatgctcctag

SEQ ID NO: 1780196 - DNA, 15 bp, Homo sapiens
ctctatgctcctagc

SEQ ID NO: 1780197 - DNA, 15 bp, Homo sapiens
tctatgctcctagct

SEQ ID NO: 1780198 - DNA, 15 bp, Homo sapiens
ctatgctcctagctt

SEQ ID NO: 1780199 - DNA, 15 bp, Homo sapiens
tatgctcctagcttc

SEQ ID NO: 1780200 - DNA, 15 bp, Homo sapiens
atgctcctagcttct

SEQ ID NO: 1780201 - DNA, 15 bp, Homo sapiens
tgctcctagcttctt

SEQ ID NO: 1780202 - DNA, 15 bp, Homo sapiens
gctcctagcttcttt

SEQ ID NO: 1780203 - DNA, 15 bp, Homo sapiens
ctcctagcttcttta

SEQ ID NO: 1780204 - DNA, 15 bp, Homo sapiens
tcctagcttctttaa

SEQ ID NO: 1780205 - DNA, 15 bp, Homo sapiens
cctagcttctttaaa

SEQ ID NO: 1780206 - DNA, 15 bp, Homo sapiens
ctagcttctttaaag

SEQ ID NO: 1780207 - DNA, 15 bp, Homo sapiens
tagcttctttaaagc

SEQ ID NO: 1780208 - DNA, 15 bp, Homo sapiens
agcttctttaaagcc

SEQ ID NO: 1780209 - DNA, 15 bp, Homo sapiens
gcttctttaaagcca

SEQ ID NO: 1780210 - DNA, 15 bp, Homo sapiens
cttctttaaagccaa

SEQ ID NO: 1780211 - DNA, 15 bp, Homo sapiens
ttctttaaagccaag

SEQ ID NO: 1780212 - DNA, 15 bp, Homo sapiens
tctttaaagccaagg

SEQ ID NO: 1780213 - DNA, 15 bp, Homo sapiens
ctttaaagccaagga

SEQ ID NO: 1780214 - DNA, 15 bp, Homo sapiens
tttaaagccaaggag

SEQ ID NO: 1780215 - DNA, 15 bp, Homo sapiens
ttaaagccaaggagc

SEQ ID NO: 1780216 - DNA, 15 bp, Homo sapiens
taaagccaaggagct

SEQ ID NO: 1780217 - DNA, 15 bp, Homo sapiens
aaagccaaggagcta

SEQ ID NO: 1780218 - DNA, 15 bp, Homo sapiens
aagccaaggagctaa

SEQ ID NO: 1780219 - DNA, 15 bp, Homo sapiens
agccaaggagctaaa

SEQ ID NO: 1780220 - DNA, 15 bp, Homo sapiens
gccaaggagctaaaa

SEQ ID NO: 1780221 - DNA, 15 bp, Homo sapiens
ccaaggagctaaaat

SEQ ID NO: 1780222 - DNA, 15 bp, Homo sapiens
caaggagctaaaatt

SEQ ID NO: 1780223 - DNA, 15 bp, Homo sapiens
aaggagctaaaattt

SEQ ID NO: 1780224 - DNA, 15 bp, Homo sapiens
aggagctaaaattta

SEQ ID NO: 1780225 - DNA, 15 bp, Homo sapiens
ggagctaaaatttaa

SEQ ID NO: 1780226 - DNA, 15 bp, Homo sapiens
gagctaaaatttaaa

SEQ ID NO: 1780227 - DNA, 15 bp, Homo sapiens
agctaaaatttaaaa

SEQ ID NO: 1780228 - DNA, 15 bp, Homo sapiens
taaaatttaaaagta

SEQ ID NO: 1780229 - DNA, 15 bp, Homo sapiens
aaaatttaaaagtac

SEQ ID NO: 1780230 - DNA, 15 bp, Homo sapiens
aaatttaaaagtacc

SEQ ID NO: 1780231 - DNA, 15 bp, Homo sapiens
aatttaaaagtacct

SEQ ID NO: 1780232 - DNA, 15 bp, Homo sapiens
atttaaaagtacctg

SEQ ID NO: 1780233 - DNA, 15 bp, Homo sapiens
tttaaaagtacctgg

SEQ ID NO: 1780234 - DNA, 15 bp, Homo sapiens
ttaaaagtacctgga

SEQ ID NO: 1780235 - DNA, 15 bp, Homo sapiens
taaaagtacctggaa

SEQ ID NO: 1780236 - DNA, 15 bp, Homo sapiens
aaaagtacctggaaa

SEQ ID NO: 1780237 - DNA, 15 bp, Homo sapiens
aaagtacctggaaat

SEQ ID NO: 1780238 - DNA, 15 bp, Homo sapiens
aagtacctggaaatc

SEQ ID NO: 1780239 - DNA, 15 bp, Homo sapiens
agtacctggaaatca

SEQ ID NO: 1780240 - DNA, 15 bp, Homo sapiens
gtacctggaaatcag

SEQ ID NO: 1780241 - DNA, 15 bp, Homo sapiens
tacctggaaatcagt

SEQ ID NO: 1780242 - DNA, 15 bp, Homo sapiens
acctggaaatcagtt

SEQ ID NO: 1780243 - DNA, 15 bp, Homo sapiens
cctggaaatcagttg

SEQ ID NO: 1780244 - DNA, 15 bp, Homo sapiens
ctggaaatcagttgg

SEQ ID NO: 1780245 - DNA, 15 bp, Homo sapiens
tggaaatcagttggg

SEQ ID NO: 1780246 - DNA, 15 bp, Homo sapiens
ggaaatcagttgggg

SEQ ID NO: 1780247 - DNA, 15 bp, Homo sapiens
gaaatcagttgggga

SEQ ID NO: 1780248 - DNA, 15 bp, Homo sapiens
aaatcagttggggaa

SEQ ID NO: 1780249 - DNA, 15 bp, Homo sapiens
aatcagttggggaaa

SEQ ID NO: 1780250 - DNA, 15 bp, Homo sapiens
atcagttggggaaag

SEQ ID NO: 1780251 - DNA, 15 bp, Homo sapiens
tcagttggggaaaga

SEQ ID NO: 1780252 - DNA, 15 bp, Homo sapiens
cagttggggaaagaa

SEQ ID NO: 1780253 - DNA, 15 bp, Homo sapiens
agttggggaaagaaa

SEQ ID NO: 1780254 - DNA, 15 bp, Homo sapiens
gttggggaaagaaaa

SEQ ID NO: 1780255 - DNA, 15 bp, Homo sapiens
ttggggaaagaaaat

SEQ ID NO: 1780256 - DNA, 15 bp, Homo sapiens
tggggaaagaaaata

SEQ ID NO: 1780257 - DNA, 15 bp, Homo sapiens
ggggaaagaaaatac

SEQ ID NO: 1780258 - DNA, 15 bp, Homo sapiens
gggaaagaaaatact

SEQ ID NO: 1780259 - DNA, 15 bp, Homo sapiens
ggaaagaaaatactt

SEQ ID NO: 1780260 - DNA, 15 bp, Homo sapiens
gaaagaaaatacttg

SEQ ID NO: 1780261 - DNA, 15 bp, Homo sapiens
aaagaaaatacttgc

SEQ ID NO: 1780262 - DNA, 15 bp, Homo sapiens
aagaaaatacttgca

SEQ ID NO: 1780263 - DNA, 15 bp, Homo sapiens
agaaaatacttgcaa

SEQ ID NO: 1780264 - DNA, 15 bp, Homo sapiens
gaaaatacttgcaat

SEQ ID NO: 1780265 - DNA, 15 bp, Homo sapiens
aaaatacttgcaatt

SEQ ID NO: 1780266 - DNA, 15 bp, Homo sapiens
aaatacttgcaattt

SEQ ID NO: 1780267 - DNA, 15 bp, Homo sapiens
aatacttgcaatttg

SEQ ID NO: 1780268 - DNA, 15 bp, Homo sapiens
atacttgcaatttgt

SEQ ID NO: 1780269 - DNA, 15 bp, Homo sapiens
tacttgcaatttgtt

SEQ ID NO: 1780270 - DNA, 15 bp, Homo sapiens
acttgcaatttgttt

SEQ ID NO: 1780271 - DNA, 15 bp, Homo sapiens
cttgcaatttgtttt

SEQ ID NO: 1780272 - DNA, 15 bp, Homo sapiens
ttgcaatttgttttt

SEQ ID NO: 1780273 - DNA, 15 bp, Homo sapiens
tgcaatttgtttttc

SEQ ID NO: 1780274 - DNA, 15 bp, Homo sapiens
gcaatttgtttttca

SEQ ID NO: 1780275 - DNA, 15 bp, Homo sapiens
caatttgtttttcag

SEQ ID NO: 1780276 - DNA, 15 bp, Homo sapiens
aatttgtttttcagt

SEQ ID NO: 1780277 - DNA, 15 bp, Homo sapiens
atttgtttttcagtg

SEQ ID NO: 1780278 - DNA, 15 bp, Homo sapiens
tttgtttttcagtgg

SEQ ID NO: 1780279 - DNA, 15 bp, Homo sapiens
ttgtttttcagtgga

SEQ ID NO: 1780280 - DNA, 15 bp, Homo sapiens
tgtttttcagtggaa

SEQ ID NO: 1780281 - DNA, 15 bp, Homo sapiens
gtttttcagtggaat

SEQ ID NO: 1780282 - DNA, 15 bp, Homo sapiens
tttttcagtggaata

SEQ ID NO: 1780283 - DNA, 15 bp, Homo sapiens
ttttcagtggaatag

SEQ ID NO: 1780284 - DNA, 15 bp, Homo sapiens
tttcagtggaataga

SEQ ID NO: 1780285 - DNA, 15 bp, Homo sapiens
ttcagtggaatagag

SEQ ID NO: 1780286 - DNA, 15 bp, Homo sapiens
tcagtggaatagaga

SEQ ID NO: 1780287 - DNA, 15 bp, Homo sapiens
cagtggaatagagat

SEQ ID NO: 1780288 - DNA, 15 bp, Homo sapiens
agtggaatagagatc

SEQ ID NO: 1780289 - DNA, 15 bp, Homo sapiens
gtggaatagagatca

SEQ ID NO: 1780290 - DNA, 15 bp, Homo sapiens
tggaatagagatcag

SEQ ID NO: 1780291 - DNA, 15 bp, Homo sapiens
ggaatagagatcaga

SEQ ID NO: 1780292 - DNA, 15 bp, Homo sapiens
gaatagagatcagaa

SEQ ID NO: 1780293 - DNA, 15 bp, Homo sapiens
aatagagatcagaaa

SEQ ID NO: 1780294 - DNA, 15 bp, Homo sapiens
atagagatcagaaat

SEQ ID NO: 1780295 - DNA, 15 bp, Homo sapiens
tagagatcagaaatg

SEQ ID NO: 1780296 - DNA, 15 bp, Homo sapiens
agagatcagaaatga

SEQ ID NO: 1780297 - DNA, 15 bp, Homo sapiens
gagatcagaaatgaa

SEQ ID NO: 1780298 - DNA, 15 bp, Homo sapiens
agatcagaaatgaaa

SEQ ID NO: 1780299 - DNA, 15 bp, Homo sapiens
gatcagaaatgaaaa

SEQ ID NO: 1780300 - DNA, 15 bp, Homo sapiens
atcagaaatgaaaaa

SEQ ID NO: 1780301 - DNA, 15 bp, Homo sapiens
tcagaaatgaaaaat

SEQ ID NO: 1780302 - DNA, 15 bp, Homo sapiens
cagaaatgaaaaatc

SEQ ID NO: 1780303 - DNA, 15 bp, Homo sapiens
agaaatgaaaaatca

SEQ ID NO: 1780304 - DNA, 15 bp, Homo sapiens
gaaatgaaaaatcag

SEQ ID NO: 1780305 - DNA, 15 bp, Homo sapiens
aaatgaaaaatcagt

SEQ ID NO: 1780306 - DNA, 15 bp, Homo sapiens
aatgaaaaatcagtc

SEQ ID NO: 1780307 - DNA, 15 bp, Homo sapiens
atgaaaaatcagtct

SEQ ID NO: 1780308 - DNA, 15 bp, Homo sapiens
tgaaaaatcagtctc

SEQ ID NO: 1780309 - DNA, 15 bp, Homo sapiens
gaaaaatcagtctct

SEQ ID NO: 1780310 - DNA, 15 bp, Homo sapiens
aaaaatcagtctctt

SEQ ID NO: 1780311 - DNA, 15 bp, Homo sapiens
aaaatcagtctctta

SEQ ID NO: 1780312 - DNA, 15 bp, Homo sapiens
aaatcagtctcttat

SEQ ID NO: 1780313 - DNA, 15 bp, Homo sapiens
aatcagtctcttatg

SEQ ID NO: 1780314 - DNA, 15 bp, Homo sapiens
atcagtctcttatgt

SEQ ID NO: 1780315 - DNA, 15 bp, Homo sapiens
tcagtctcttatgtg

SEQ ID NO: 1780316 - DNA, 15 bp, Homo sapiens
cagtctcttatgtgg

SEQ ID NO: 1780317 - DNA, 15 bp, Homo sapiens
agtctcttatgtggt

SEQ ID NO: 1780318 - DNA, 15 bp, Homo sapiens
gtctcttatgtggtg

SEQ ID NO: 1780319 - DNA, 15 bp, Homo sapiens
tctcttatgtggtga

SEQ ID NO: 1780320 - DNA, 15 bp, Homo sapiens
ctcttatgtggtgac

SEQ ID NO: 1780321 - DNA, 15 bp, Homo sapiens
tcttatgtggtgaca

SEQ ID NO: 1780322 - DNA, 15 bp, Homo sapiens
cttatgtggtgacat

SEQ ID NO: 1780323 - DNA, 15 bp, Homo sapiens
ttatgtggtgacatc

SEQ ID NO: 1780324 - DNA, 15 bp, Homo sapiens
tatgtggtgacatca

SEQ ID NO: 1780325 - DNA, 15 bp, Homo sapiens
atgtggtgacatcac

SEQ ID NO: 1780326 - DNA, 15 bp, Homo sapiens
tgtggtgacatcact

SEQ ID NO: 1780327 - DNA, 15 bp, Homo sapiens
gtggtgacatcactt

SEQ ID NO: 1780328 - DNA, 15 bp, Homo sapiens
tggtgacatcacttc

SEQ ID NO: 1780329 - DNA, 15 bp, Homo sapiens
ggtgacatcacttcc

SEQ ID NO: 1780330 - DNA, 15 bp, Homo sapiens
gtgacatcacttcca

SEQ ID NO: 1780331 - DNA, 15 bp, Homo sapiens
tgacatcacttccat

SEQ ID NO: 1780332 - DNA, 15 bp, Homo sapiens
gacatcacttccatc

SEQ ID NO: 1780333 - DNA, 15 bp, Homo sapiens
acatcacttccatca

SEQ ID NO: 1780334 - DNA, 15 bp, Homo sapiens
catcacttccatcac

SEQ ID NO: 1780335 - DNA, 15 bp, Homo sapiens
atcacttccatcaca

SEQ ID NO: 1780336 - DNA, 15 bp, Homo sapiens
tcacttccatcacaa

SEQ ID NO: 1780337 - DNA, 15 bp, Homo sapiens
cacttccatcacaaa

SEQ ID NO: 1780338 - DNA, 15 bp, Homo sapiens
acttccatcacaaac

SEQ ID NO: 1780339 - DNA, 15 bp, Homo sapiens
cttccatcacaaaca

SEQ ID NO: 1780340 - DNA, 15 bp, Homo sapiens
ttccatcacaaacat

SEQ ID NO: 1780341 - DNA, 15 bp, Homo sapiens
tccatcacaaacatg

SEQ ID NO: 1780342 - DNA, 15 bp, Homo sapiens
ccatcacaaacatgt

SEQ ID NO: 1780343 - DNA, 15 bp, Homo sapiens
catcacaaacatgtc

SEQ ID NO: 1780344 - DNA, 15 bp, Homo sapiens
atcacaaacatgtca

SEQ ID NO: 1780345 - DNA, 15 bp, Homo sapiens
tcacaaacatgtcaa

SEQ ID NO: 1780346 - DNA, 15 bp, Homo sapiens
cacaaacatgtcaat

SEQ ID NO: 1780347 - DNA, 15 bp, Homo sapiens
acaaacatgtcaatg

SEQ ID NO: 1780348 - DNA, 15 bp, Homo sapiens
caaacatgtcaatgt

SEQ ID NO: 1780349 - DNA, 15 bp, Homo sapiens
aaacatgtcaatgtg

SEQ ID NO: 1780350 - DNA, 15 bp, Homo sapiens
aacatgtcaatgtga

SEQ ID NO: 1780351 - DNA, 15 bp, Homo sapiens
acatgtcaatgtgat

SEQ ID NO: 1780352 - DNA, 15 bp, Homo sapiens
catgtcaatgtgatg

SEQ ID NO: 1780353 - DNA, 15 bp, Homo sapiens
atgtcaatgtgatgc

SEQ ID NO: 1780354 - DNA, 15 bp, Homo sapiens
tgtcaatgtgatgca

SEQ ID NO: 1780355 - DNA, 15 bp, Homo sapiens
gtcaatgtgatgcat

SEQ ID NO: 1780356 - DNA, 15 bp, Homo sapiens
tcaatgtgatgcatg

SEQ ID NO: 1780357 - DNA, 15 bp, Homo sapiens
caatgtgatgcatgt

SEQ ID NO: 1780358 - DNA, 15 bp, Homo sapiens
aatgtgatgcatgtt

SEQ ID NO: 1780359 - DNA, 15 bp, Homo sapiens
atgtgatgcatgtta

SEQ ID NO: 1780360 - DNA, 15 bp, Homo sapiens
tgtgatgcatgttac

SEQ ID NO: 1780361 - DNA, 15 bp, Homo sapiens
gtgatgcatgttaca

SEQ ID NO: 1780362 - DNA, 15 bp, Homo sapiens
tgatgcatgttacat

SEQ ID NO: 1780363 - DNA, 15 bp, Homo sapiens
gatgcatgttacatt

SEQ ID NO: 1780364 - DNA, 15 bp, Homo sapiens
atgcatgttacatta

SEQ ID NO: 1780365 - DNA, 15 bp, Homo sapiens
tgcatgttacattaa

SEQ ID NO: 1780366 - DNA, 15 bp, Homo sapiens
gcatgttacattaat

SEQ ID NO: 1780367 - DNA, 15 bp, Homo sapiens
catgttacattaata

SEQ ID NO: 1780368 - DNA, 15 bp, Homo sapiens
atgttacattaatac

SEQ ID NO: 1780369 - DNA, 15 bp, Homo sapiens
tgttacattaatact

SEQ ID NO: 1780370 - DNA, 15 bp, Homo sapiens
gttacattaatactg

SEQ ID NO: 1780371 - DNA, 15 bp, Homo sapiens
ttacattaatactgg

SEQ ID NO: 1780372 - DNA, 15 bp, Homo sapiens
tacattaatactggg

SEQ ID NO: 1780373 - DNA, 15 bp, Homo sapiens
acattaatactgggc

SEQ ID NO: 1780374 - DNA, 15 bp, Homo sapiens
cattaatactgggca

SEQ ID NO: 1780375 - DNA, 15 bp, Homo sapiens
attaatactgggcat

SEQ ID NO: 1780376 - DNA, 15 bp, Homo sapiens
ttaatactgggcata

SEQ ID NO: 1780377 - DNA, 15 bp, Homo sapiens
taatactgggcatat

SEQ ID NO: 1780378 - DNA, 15 bp, Homo sapiens
aatactgggcatata

SEQ ID NO: 1780379 - DNA, 15 bp, Homo sapiens
atactgggcatataa

SEQ ID NO: 1780380 - DNA, 15 bp, Homo sapiens
tactgggcatataaa

SEQ ID NO: 1780381 - DNA, 15 bp, Homo sapiens
actgggcatataaac

SEQ ID NO: 1780382 - DNA, 15 bp, Homo sapiens
tgggcatataaacaa

SEQ ID NO: 1780383 - DNA, 15 bp, Homo sapiens
gggcatataaacaaa

SEQ ID NO: 1780384 - DNA, 15 bp, Homo sapiens
ggcatataaacaaac

SEQ ID NO: 1780385 - DNA, 15 bp, Homo sapiens
gcatataaacaaaca

SEQ ID NO: 1780386 - DNA, 15 bp, Homo sapiens
catataaacaaacac

SEQ ID NO: 1780387 - DNA, 15 bp, Homo sapiens
atataaacaaacaca

SEQ ID NO: 1780388 - DNA, 15 bp, Homo sapiens
tataaacaaacacac

SEQ ID NO: 1780389 - DNA, 15 bp, Homo sapiens
ataaacaaacacaca

SEQ ID NO: 1780390 - DNA, 15 bp, Homo sapiens
taaacaaacacacag

SEQ ID NO: 1780391 - DNA, 15 bp, Homo sapiens
aaacaaacacacagg

SEQ ID NO: 1780392 - DNA, 15 bp, Homo sapiens
aacaaacacacagga

SEQ ID NO: 1780393 - DNA, 15 bp, Homo sapiens
acaaacacacaggaa

SEQ ID NO: 1780394 - DNA, 15 bp, Homo sapiens
aacacacaggaaata

SEQ ID NO: 1780395 - DNA, 15 bp, Homo sapiens
acacacaggaaataa

SEQ ID NO: 1780396 - DNA, 15 bp, Homo sapiens
cacacaggaaataac

SEQ ID NO: 1780397 - DNA, 15 bp, Homo sapiens
acacaggaaataaca

SEQ ID NO: 1780398 - DNA, 15 bp, Homo sapiens
cacaggaaataacag

SEQ ID NO: 1780399 - DNA, 15 bp, Homo sapiens
acaggaaataacagc

SEQ ID NO: 1780400 - DNA, 15 bp, Homo sapiens
caggaaataacagca

SEQ ID NO: 1780401 - DNA, 15 bp, Homo sapiens
aggaaataacagcaa

SEQ ID NO: 1780402 - DNA, 15 bp, Homo sapiens
ggaaataacagcaat

SEQ ID NO: 1780403 - DNA, 15 bp, Homo sapiens
gaaataacagcaatg

SEQ ID NO: 1780404 - DNA, 15 bp, Homo sapiens
aaataacagcaatga

SEQ ID NO: 1780405 - DNA, 15 bp, Homo sapiens
aataacagcaatgat

SEQ ID NO: 1780406 - DNA, 15 bp, Homo sapiens
ataacagcaatgata

SEQ ID NO: 1780407 - DNA, 15 bp, Homo sapiens
taacagcaatgataa

SEQ ID NO: 1780408 - DNA, 15 bp, Homo sapiens
aacagcaatgataat

SEQ ID NO: 1780409 - DNA, 15 bp, Homo sapiens
acagcaatgataatg

SEQ ID NO: 1780410 - DNA, 15 bp, Homo sapiens
cagcaatgataatga

SEQ ID NO: 1780411 - DNA, 15 bp, Homo sapiens
agcaatgataatgaa

SEQ ID NO: 1780412 - DNA, 15 bp, Homo sapiens
gcaatgataatgaaa

SEQ ID NO: 1780413 - DNA, 15 bp, Homo sapiens
caatgataatgaaac

SEQ ID NO: 1780414 - DNA, 15 bp, Homo sapiens
aatgataatgaaacc

SEQ ID NO: 1780415 - DNA, 15 bp, Homo sapiens
atgataatgaaacca

SEQ ID NO: 1780416 - DNA, 15 bp, Homo sapiens
tgataatgaaaccag

SEQ ID NO: 1780417 - DNA, 15 bp, Homo sapiens
gataatgaaaccaga

SEQ ID NO: 1780418 - DNA, 15 bp, Homo sapiens
ataatgaaaccagaa

SEQ ID NO: 1780419 - DNA, 15 bp, Homo sapiens
taatgaaaccagaaa

SEQ ID NO: 1780420 - DNA, 15 bp, Homo sapiens
aatgaaaccagaaat

SEQ ID NO: 1780421 - DNA, 15 bp, Homo sapiens
atgaaaccagaaata

SEQ ID NO: 1780422 - DNA, 15 bp, Homo sapiens
tgaaaccagaaatag

SEQ ID NO: 1780423 - DNA, 15 bp, Homo sapiens
gaaaccagaaatagg

SEQ ID NO: 1780424 - DNA, 15 bp, Homo sapiens
aaaccagaaatagga

SEQ ID NO: 1780425 - DNA, 15 bp, Homo sapiens
aaccagaaataggag

SEQ ID NO: 1780426 - DNA, 15 bp, Homo sapiens
accagaaataggagt

SEQ ID NO: 1780427 - DNA, 15 bp, Homo sapiens
ccagaaataggagta

SEQ ID NO: 1780428 - DNA, 15 bp, Homo sapiens
cagaaataggagtat

SEQ ID NO: 1780429 - DNA, 15 bp, Homo sapiens
agaaataggagtatg

SEQ ID NO: 1780430 - DNA, 15 bp, Homo sapiens
gaaataggagtatgt

SEQ ID NO: 1780431 - DNA, 15 bp, Homo sapiens
aaataggagtatgtt

SEQ ID NO: 1780432 - DNA, 15 bp, Homo sapiens
aataggagtatgttg

SEQ ID NO: 1780433 - DNA, 15 bp, Homo sapiens
ataggagtatgttgg

SEQ ID NO: 1780434 - DNA, 15 bp, Homo sapiens
taggagtatgttgga

SEQ ID NO: 1780435 - DNA, 15 bp, Homo sapiens
aggagtatgttggag

SEQ ID NO: 1780436 - DNA, 15 bp, Homo sapiens
ggagtatgttggaga

SEQ ID NO: 1780437 - DNA, 15 bp, Homo sapiens
gagtatgttggagac

SEQ ID NO: 1780438 - DNA, 15 bp, Homo sapiens
agtatgttggagaca

SEQ ID NO: 1780439 - DNA, 15 bp, Homo sapiens
gtatgttggagacaa

SEQ ID NO: 1780440 - DNA, 15 bp, Homo sapiens
tatgttggagacaaa

SEQ ID NO: 1780441 - DNA, 15 bp, Homo sapiens
atgttggagacaaag

SEQ ID NO: 1780442 - DNA, 15 bp, Homo sapiens
tgttggagacaaagt

SEQ ID NO: 1780443 - DNA, 15 bp, Homo sapiens
gttggagacaaagtg

SEQ ID NO: 1780444 - DNA, 15 bp, Homo sapiens
ttggagacaaagtga

SEQ ID NO: 1780445 - DNA, 15 bp, Homo sapiens
tggagacaaagtgaa

SEQ ID NO: 1780446 - DNA, 15 bp, Homo sapiens
ggagacaaagtgaac

SEQ ID NO: 1780447 - DNA, 15 bp, Homo sapiens
gagacaaagtgaaca

SEQ ID NO: 1780448 - DNA, 15 bp, Homo sapiens
agacaaagtgaacat

SEQ ID NO: 1780449 - DNA, 15 bp, Homo sapiens
gacaaagtgaacatg

SEQ ID NO: 1780450 - DNA, 15 bp, Homo sapiens
acaaagtgaacatgg

SEQ ID NO: 1780451 - DNA, 15 bp, Homo sapiens
caaagtgaacatgga

SEQ ID NO: 1780452 - DNA, 15 bp, Homo sapiens
aaagtgaacatggag

SEQ ID NO: 1780453 - DNA, 15 bp, Homo sapiens
aagtgaacatggagt

SEQ ID NO: 1780454 - DNA, 15 bp, Homo sapiens
agtgaacatggagta

SEQ ID NO: 1780455 - DNA, 15 bp, Homo sapiens
gtgaacatggagtag

SEQ ID NO: 1780456 - DNA, 15 bp, Homo sapiens
tgaacatggagtagg

SEQ ID NO: 1780457 - DNA, 15 bp, Homo sapiens
gaacatggagtagga

SEQ ID NO: 1780458 - DNA, 15 bp, Homo sapiens
aacatggagtaggac

SEQ ID NO: 1780459 - DNA, 15 bp, Homo sapiens
acatggagtaggaca

SEQ ID NO: 1780460 - DNA, 15 bp, Homo sapiens
catggagtaggacaa

SEQ ID NO: 1780461 - DNA, 15 bp, Homo sapiens
atggagtaggacaaa

SEQ ID NO: 1780462 - DNA, 15 bp, Homo sapiens
tggagtaggacaaaa

SEQ ID NO: 1780463 - DNA, 15 bp, Homo sapiens
ggagtaggacaaaat

SEQ ID NO: 1780464 - DNA, 15 bp, Homo sapiens
gagtaggacaaaatc

SEQ ID NO: 1780465 - DNA, 15 bp, Homo sapiens
agtaggacaaaatca

SEQ ID NO: 1780466 - DNA, 15 bp, Homo sapiens
gtaggacaaaatcaa

SEQ ID NO: 1780467 - DNA, 15 bp, Homo sapiens
taggacaaaatcaat

SEQ ID NO: 1780468 - DNA, 15 bp, Homo sapiens
aggacaaaatcaata

SEQ ID NO: 1780469 - DNA, 15 bp, Homo sapiens
ggacaaaatcaataa

SEQ ID NO: 1780470 - DNA, 15 bp, Homo sapiens
gacaaaatcaataag

SEQ ID NO: 1780471 - DNA, 15 bp, Homo sapiens
acaaaatcaataagc

SEQ ID NO: 1780472 - DNA, 15 bp, Homo sapiens
caaaatcaataagca

SEQ ID NO: 1780473 - DNA, 15 bp, Homo sapiens
aaaatcaataagcaa

SEQ ID NO: 1780474 - DNA, 15 bp, Homo sapiens
aaatcaataagcaat

SEQ ID NO: 1780475 - DNA, 15 bp, Homo sapiens
aatcaataagcaatt

SEQ ID NO: 1780476 - DNA, 15 bp, Homo sapiens
atcaataagcaatta

SEQ ID NO: 1780477 - DNA, 15 bp, Homo sapiens
tcaataagcaattaa

SEQ ID NO: 1780478 - DNA, 15 bp, Homo sapiens
caataagcaattaaa

SEQ ID NO: 1780479 - DNA, 15 bp, Homo sapiens
ataagcaattaaaaa

SEQ ID NO: 1780480 - DNA, 15 bp, Homo sapiens
taagcaattaaaaaa

SEQ ID NO: 1780481 - DNA, 15 bp, Homo sapiens
aagcaattaaaaaaa

SEQ ID NO: 1780482 - DNA, 15 bp, Homo sapiens
agcaattaaaaaaag

SEQ ID NO: 1780483 - DNA, 15 bp, Homo sapiens
gcaattaaaaaaaga

SEQ ID NO: 1780484 - DNA, 15 bp, Homo sapiens
caattaaaaaaagat

SEQ ID NO: 1780485 - DNA, 15 bp, Homo sapiens
aattaaaaaaagatt

SEQ ID NO: 1780486 - DNA, 15 bp, Homo sapiens
attaaaaaaagattg

SEQ ID NO: 1780487 - DNA, 15 bp, Homo sapiens
ttaaaaaaagattga

SEQ ID NO: 1780488 - DNA, 15 bp, Homo sapiens
taaaaaaagattgaa

SEQ ID NO: 1780489 - DNA, 15 bp, Homo sapiens
aaaaaaagattgaac

SEQ ID NO: 1780490 - DNA, 15 bp, Homo sapiens
aaaaaagattgaaca

SEQ ID NO: 1780491 - DNA, 15 bp, Homo sapiens
aaaaagattgaacaa

SEQ ID NO: 1780492 - DNA, 15 bp, Homo sapiens
aaaagattgaacaat

SEQ ID NO: 1780493 - DNA, 15 bp, Homo sapiens
aaagattgaacaatc

SEQ ID NO: 1780494 - DNA, 15 bp, Homo sapiens
aagattgaacaatct

SEQ ID NO: 1780495 - DNA, 15 bp, Homo sapiens
agattgaacaatctt

SEQ ID NO: 1780496 - DNA, 15 bp, Homo sapiens
gattgaacaatctta

SEQ ID NO: 1780497 - DNA, 15 bp, Homo sapiens
attgaacaatcttaa

SEQ ID NO: 1780498 - DNA, 15 bp, Homo sapiens
ttgaacaatcttaat

SEQ ID NO: 1780499 - DNA, 15 bp, Homo sapiens
tgaacaatcttaata

SEQ ID NO: 1780500 - DNA, 15 bp, Homo sapiens
gaacaatcttaataa

SEQ ID NO: 1780501 - DNA, 15 bp, Homo sapiens
aacaatcttaataag

SEQ ID NO: 1780502 - DNA, 15 bp, Homo sapiens
acaatcttaataagt

SEQ ID NO: 1780503 - DNA, 15 bp, Homo sapiens
caatcttaataagtt

SEQ ID NO: 1780504 - DNA, 15 bp, Homo sapiens
aatcttaataagttc

SEQ ID NO: 1780505 - DNA, 15 bp, Homo sapiens
atcttaataagttca

SEQ ID NO: 1780506 - DNA, 15 bp, Homo sapiens
tcttaataagttcac

SEQ ID NO: 1780507 - DNA, 15 bp, Homo sapiens
cttaataagttcact

SEQ ID NO: 1780508 - DNA, 15 bp, Homo sapiens
ttaataagttcacta

SEQ ID NO: 1780509 - DNA, 15 bp, Homo sapiens
taataagttcactaa

SEQ ID NO: 1780510 - DNA, 15 bp, Homo sapiens
aataagttcactaac

SEQ ID NO: 1780511 - DNA, 15 bp, Homo sapiens
ataagttcactaacc

SEQ ID NO: 1780512 - DNA, 15 bp, Homo sapiens
taagttcactaacct

SEQ ID NO: 1780513 - DNA, 15 bp, Homo sapiens
aagttcactaaccta

SEQ ID NO: 1780514 - DNA, 15 bp, Homo sapiens
agttcactaacctat

SEQ ID NO: 1780515 - DNA, 15 bp, Homo sapiens
gttcactaacctatt

SEQ ID NO: 1780516 - DNA, 15 bp, Homo sapiens
ttcactaacctattt

SEQ ID NO: 1780517 - DNA, 15 bp, Homo sapiens
tcactaacctatttg

SEQ ID NO: 1780518 - DNA, 15 bp, Homo sapiens
cactaacctatttga

SEQ ID NO: 1780519 - DNA, 15 bp, Homo sapiens
actaacctatttgac

SEQ ID NO: 1780520 - DNA, 15 bp, Homo sapiens
ctaacctatttgacc

SEQ ID NO: 1780521 - DNA, 15 bp, Homo sapiens
taacctatttgaccg

SEQ ID NO: 1780522 - DNA, 15 bp, Homo sapiens
aacctatttgaccga

SEQ ID NO: 1780523 - DNA, 15 bp, Homo sapiens
acctatttgaccgaa

SEQ ID NO: 1780524 - DNA, 15 bp, Homo sapiens
cctatttgaccgaaa

SEQ ID NO: 1780525 - DNA, 15 bp, Homo sapiens
ctatttgaccgaaag

SEQ ID NO: 1780526 - DNA, 15 bp, Homo sapiens
tatttgaccgaaaga

SEQ ID NO: 1780527 - DNA, 15 bp, Homo sapiens
atttgaccgaaagaa

SEQ ID NO: 1780528 - DNA, 15 bp, Homo sapiens
tttgaccgaaagaat

SEQ ID NO: 1780529 - DNA, 15 bp, Homo sapiens
ttgaccgaaagaatc

SEQ ID NO: 1780530 - DNA, 15 bp, Homo sapiens
tgaccgaaagaatcc

SEQ ID NO: 1780531 - DNA, 15 bp, Homo sapiens
gaccgaaagaatcca

SEQ ID NO: 1780532 - DNA, 15 bp, Homo sapiens
accgaaagaatccaa

SEQ ID NO: 1780533 - DNA, 15 bp, Homo sapiens
ccgaaagaatccaat

SEQ ID NO: 1780534 - DNA, 15 bp, Homo sapiens
cgaaagaatccaatc

SEQ ID NO: 1780535 - DNA, 15 bp, Homo sapiens
gaaagaatccaatcc

SEQ ID NO: 1780536 - DNA, 15 bp, Homo sapiens
aaagaatccaatcct

SEQ ID NO: 1780537 - DNA, 15 bp, Homo sapiens
aagaatccaatcctg

SEQ ID NO: 1780538 - DNA, 15 bp, Homo sapiens
agaatccaatcctgc

SEQ ID NO: 1780539 - DNA, 15 bp, Homo sapiens
gaatccaatcctgct

SEQ ID NO: 1780540 - DNA, 15 bp, Homo sapiens
aatccaatcctgctg

SEQ ID NO: 1780541 - DNA, 15 bp, Homo sapiens
atccaatcctgctgt

SEQ ID NO: 1780542 - DNA, 15 bp, Homo sapiens
tccaatcctgctgtg

SEQ ID NO: 1780543 - DNA, 15 bp, Homo sapiens
ccaatcctgctgtga

SEQ ID NO: 1780544 - DNA, 15 bp, Homo sapiens
caatcctgctgtgat

SEQ ID NO: 1780545 - DNA, 15 bp, Homo sapiens
aatcctgctgtgata

SEQ ID NO: 1780546 - DNA, 15 bp, Homo sapiens
atcctgctgtgataa

SEQ ID NO: 1780547 - DNA, 15 bp, Homo sapiens
tcctgctgtgataaa

SEQ ID NO: 1780548 - DNA, 15 bp, Homo sapiens
cctgctgtgataaac

SEQ ID NO: 1780549 - DNA, 15 bp, Homo sapiens
ctgctgtgataaaca

SEQ ID NO: 1780550 - DNA, 15 bp, Homo sapiens
tgctgtgataaacag

SEQ ID NO: 1780551 - DNA, 15 bp, Homo sapiens
gctgtgataaacagc

SEQ ID NO: 1780552 - DNA, 15 bp, Homo sapiens
ctgtgataaacagcg

SEQ ID NO: 1780553 - DNA, 15 bp, Homo sapiens
tgtgataaacagcgg

SEQ ID NO: 1780554 - DNA, 15 bp, Homo sapiens
gtgataaacagcggt

SEQ ID NO: 1780555 - DNA, 15 bp, Homo sapiens
tgataaacagcggtt

SEQ ID NO: 1780556 - DNA, 15 bp, Homo sapiens
gataaacagcggttt

SEQ ID NO: 1780557 - DNA, 15 bp, Homo sapiens
ataaacagcggttta

SEQ ID NO: 1780558 - DNA, 15 bp, Homo sapiens
taaacagcggtttat

SEQ ID NO: 1780559 - DNA, 15 bp, Homo sapiens
aaacagcggtttatt

SEQ ID NO: 1780560 - DNA, 15 bp, Homo sapiens
aacagcggtttattc

SEQ ID NO: 1780561 - DNA, 15 bp, Homo sapiens
acagcggtttattct

SEQ ID NO: 1780562 - DNA, 15 bp, Homo sapiens
cagcggtttattctg

SEQ ID NO: 1780563 - DNA, 15 bp, Homo sapiens
agcggtttattctga

SEQ ID NO: 1780564 - DNA, 15 bp, Homo sapiens
gcggtttattctgat

SEQ ID NO: 1780565 - DNA, 15 bp, Homo sapiens
cggtttattctgatc

SEQ ID NO: 1780566 - DNA, 15 bp, Homo sapiens
ggtttattctgatcc

SEQ ID NO: 1780567 - DNA, 15 bp, Homo sapiens
gtttattctgatcca

SEQ ID NO: 1780568 - DNA, 15 bp, Homo sapiens
tttattctgatccac

SEQ ID NO: 1780569 - DNA, 15 bp, Homo sapiens
ttattctgatccaca

SEQ ID NO: 1780570 - DNA, 15 bp, Homo sapiens
tattctgatccacac

SEQ ID NO: 1780571 - DNA, 15 bp, Homo sapiens
attctgatccacaca

SEQ ID NO: 1780572 - DNA, 15 bp, Homo sapiens
ttctgatccacacat

SEQ ID NO: 1780573 - DNA, 15 bp, Homo sapiens
tctgatccacacata

SEQ ID NO: 1780574 - DNA, 15 bp, Homo sapiens
ctgatccacacatat

SEQ ID NO: 1780575 - DNA, 15 bp, Homo sapiens
tgatccacacatatt

SEQ ID NO: 1780576 - DNA, 15 bp, Homo sapiens
gatccacacatattg

SEQ ID NO: 1780577 - DNA, 15 bp, Homo sapiens
atccacacatattga

SEQ ID NO: 1780578 - DNA, 15 bp, Homo sapiens
tccacacatattgat

SEQ ID NO: 1780579 - DNA, 15 bp, Homo sapiens
ccacacatattgatt

SEQ ID NO: 1780580 - DNA, 15 bp, Homo sapiens
cacacatattgattt

SEQ ID NO: 1780581 - DNA, 15 bp, Homo sapiens
acacatattgatttg

SEQ ID NO: 1780582 - DNA, 15 bp, Homo sapiens
cacatattgatttgc

SEQ ID NO: 1780583 - DNA, 15 bp, Homo sapiens
acatattgatttgct

SEQ ID NO: 1780584 - DNA, 15 bp, Homo sapiens
catattgatttgcta

SEQ ID NO: 1780585 - DNA, 15 bp, Homo sapiens
atattgatttgctac

SEQ ID NO: 1780586 - DNA, 15 bp, Homo sapiens
tattgatttgctacg

SEQ ID NO: 1780587 - DNA, 15 bp, Homo sapiens
attgatttgctacgt

SEQ ID NO: 1780588 - DNA, 15 bp, Homo sapiens
ttgatttgctacgtg

SEQ ID NO: 1780589 - DNA, 15 bp, Homo sapiens
tgatttgctacgtgg

SEQ ID NO: 1780590 - DNA, 15 bp, Homo sapiens
gatttgctacgtgga

SEQ ID NO: 1780591 - DNA, 15 bp, Homo sapiens
atttgctacgtggag

SEQ ID NO: 1780592 - DNA, 15 bp, Homo sapiens
tttgctacgtggaga

SEQ ID NO: 1780593 - DNA, 15 bp, Homo sapiens
ttgctacgtggagaa

SEQ ID NO: 1780594 - DNA, 15 bp, Homo sapiens
tgctacgtggagaag

SEQ ID NO: 1780595 - DNA, 15 bp, Homo sapiens
gctacgtggagaaga

SEQ ID NO: 1780596 - DNA, 15 bp, Homo sapiens
ctacgtggagaagag

SEQ ID NO: 1780597 - DNA, 15 bp, Homo sapiens
tacgtggagaagaga

SEQ ID NO: 1780598 - DNA, 15 bp, Homo sapiens
acgtggagaagagaa

SEQ ID NO: 1780599 - DNA, 15 bp, Homo sapiens
cgtggagaagagaaa

SEQ ID NO: 1780600 - DNA, 15 bp, Homo sapiens
gtggagaagagaaag

SEQ ID NO: 1780601 - DNA, 15 bp, Homo sapiens
tggagaagagaaaga

SEQ ID NO: 1780602 - DNA, 15 bp, Homo sapiens
ggagaagagaaagat

SEQ ID NO: 1780603 - DNA, 15 bp, Homo sapiens
gagaagagaaagatt

SEQ ID NO: 1780604 - DNA, 15 bp, Homo sapiens
agaagagaaagattc

SEQ ID NO: 1780605 - DNA, 15 bp, Homo sapiens
gaagagaaagattct

SEQ ID NO: 1780606 - DNA, 15 bp, Homo sapiens
aagagaaagattcta

SEQ ID NO: 1780607 - DNA, 15 bp, Homo sapiens
agagaaagattctaa

SEQ ID NO: 1780608 - DNA, 15 bp, Homo sapiens
gagaaagattctaaa

SEQ ID NO: 1780609 - DNA, 15 bp, Homo sapiens
agaaagattctaaat

SEQ ID NO: 1780610 - DNA, 15 bp, Homo sapiens
gaaagattctaaatt

SEQ ID NO: 1780611 - DNA, 15 bp, Homo sapiens
aaagattctaaatta

SEQ ID NO: 1780612 - DNA, 15 bp, Homo sapiens
aagattctaaattag

SEQ ID NO: 1780613 - DNA, 15 bp, Homo sapiens
agattctaaattagt

SEQ ID NO: 1780614 - DNA, 15 bp, Homo sapiens
gattctaaattagtt

SEQ ID NO: 1780615 - DNA, 15 bp, Homo sapiens
attctaaattagttt

SEQ ID NO: 1780616 - DNA, 15 bp, Homo sapiens
ttctaaattagttta

SEQ ID NO: 1780617 - DNA, 15 bp, Homo sapiens
tctaaattagtttag

SEQ ID NO: 1780618 - DNA, 15 bp, Homo sapiens
ctaaattagtttagc

SEQ ID NO: 1780619 - DNA, 15 bp, Homo sapiens
taaattagtttagca

SEQ ID NO: 1780620 - DNA, 15 bp, Homo sapiens
aaattagtttagcaa

SEQ ID NO: 1780621 - DNA, 15 bp, Homo sapiens
aattagtttagcaat

SEQ ID NO: 1780622 - DNA, 15 bp, Homo sapiens
attagtttagcaatt

SEQ ID NO: 1780623 - DNA, 15 bp, Homo sapiens
ttagtttagcaatta

SEQ ID NO: 1780624 - DNA, 15 bp, Homo sapiens
tagtttagcaattag

SEQ ID NO: 1780625 - DNA, 15 bp, Homo sapiens
agtttagcaattaga

SEQ ID NO: 1780626 - DNA, 15 bp, Homo sapiens
gtttagcaattagat

SEQ ID NO: 1780627 - DNA, 15 bp, Homo sapiens
tttagcaattagatt

SEQ ID NO: 1780628 - DNA, 15 bp, Homo sapiens
ttagcaattagattt

SEQ ID NO: 1780629 - DNA, 15 bp, Homo sapiens
tagcaattagatttg

SEQ ID NO: 1780630 - DNA, 15 bp, Homo sapiens
agcaattagatttgc

SEQ ID NO: 1780631 - DNA, 15 bp, Homo sapiens
gcaattagatttgct

SEQ ID NO: 1780632 - DNA, 15 bp, Homo sapiens
caattagatttgctg

SEQ ID NO: 1780633 - DNA, 15 bp, Homo sapiens
aattagatttgctgc

SEQ ID NO: 1780634 - DNA, 15 bp, Homo sapiens
attagatttgctgcc

SEQ ID NO: 1780635 - DNA, 15 bp, Homo sapiens
ttagatttgctgcca

SEQ ID NO: 1780636 - DNA, 15 bp, Homo sapiens
tagatttgctgccac

SEQ ID NO: 1780637 - DNA, 15 bp, Homo sapiens
agatttgctgccacg

SEQ ID NO: 1780638 - DNA, 15 bp, Homo sapiens
gatttgctgccacgc

SEQ ID NO: 1780639 - DNA, 15 bp, Homo sapiens
atttgctgccacgct

SEQ ID NO: 1780640 - DNA, 15 bp, Homo sapiens
tttgctgccacgctc

SEQ ID NO: 1780641 - DNA, 15 bp, Homo sapiens
ttgctgccacgctct

SEQ ID NO: 1780642 - DNA, 15 bp, Homo sapiens
tgctgccacgctctc

SEQ ID NO: 1780643 - DNA, 15 bp, Homo sapiens
gctgccacgctctcc

SEQ ID NO: 1780644 - DNA, 15 bp, Homo sapiens
ctgccacgctctcct

SEQ ID NO: 1780645 - DNA, 15 bp, Homo sapiens
tgccacgctctcctg

SEQ ID NO: 1780646 - DNA, 15 bp, Homo sapiens
gccacgctctcctgt

SEQ ID NO: 1780647 - DNA, 15 bp, Homo sapiens
ccacgctctcctgta

SEQ ID NO: 1780648 - DNA, 15 bp, Homo sapiens
cacgctctcctgtaa

SEQ ID NO: 1780649 - DNA, 15 bp, Homo sapiens
acgctctcctgtaaa

SEQ ID NO: 1780650 - DNA, 15 bp, Homo sapiens
cgctctcctgtaaat

SEQ ID NO: 1780651 - DNA, 15 bp, Homo sapiens
gctctcctgtaaata

SEQ ID NO: 1780652 - DNA, 15 bp, Homo sapiens
ctctcctgtaaatat

SEQ ID NO: 1780653 - DNA, 15 bp, Homo sapiens
tctcctgtaaatatg

SEQ ID NO: 1780654 - DNA, 15 bp, Homo sapiens
ctcctgtaaatatga

SEQ ID NO: 1780655 - DNA, 15 bp, Homo sapiens
tcctgtaaatatgac

SEQ ID NO: 1780656 - DNA, 15 bp, Homo sapiens
cctgtaaatatgaca

SEQ ID NO: 1780657 - DNA, 15 bp, Homo sapiens
ctgtaaatatgacag

SEQ ID NO: 1780658 - DNA, 15 bp, Homo sapiens
tgtaaatatgacagc

SEQ ID NO: 1780659 - DNA, 15 bp, Homo sapiens
gtaaatatgacagca

SEQ ID NO: 1780660 - DNA, 15 bp, Homo sapiens
taaatatgacagcaa

SEQ ID NO: 1780661 - DNA, 15 bp, Homo sapiens
aaatatgacagcaat

SEQ ID NO: 1780662 - DNA, 15 bp, Homo sapiens
aatatgacagcaata

SEQ ID NO: 1780663 - DNA, 15 bp, Homo sapiens
atatgacagcaatat

SEQ ID NO: 1780664 - DNA, 15 bp, Homo sapiens
tatgacagcaatatt

SEQ ID NO: 1780665 - DNA, 15 bp, Homo sapiens
atgacagcaatatta

SEQ ID NO: 1780666 - DNA, 15 bp, Homo sapiens
tgacagcaatattat

SEQ ID NO: 1780667 - DNA, 15 bp, Homo sapiens
gacagcaatattatc

SEQ ID NO: 1780668 - DNA, 15 bp, Homo sapiens
acagcaatattatcg

SEQ ID NO: 1780669 - DNA, 15 bp, Homo sapiens
cagcaatattatcgg

SEQ ID NO: 1780670 - DNA, 15 bp, Homo sapiens
agcaatattatcggc

SEQ ID NO: 1780671 - DNA, 15 bp, Homo sapiens
gcaatattatcggct

SEQ ID NO: 1780672 - DNA, 15 bp, Homo sapiens
caatattatcggcta

SEQ ID NO: 1780673 - DNA, 15 bp, Homo sapiens
aatattatcggctag

SEQ ID NO: 1780674 - DNA, 15 bp, Homo sapiens
atattatcggctagt

SEQ ID NO: 1780675 - DNA, 15 bp, Homo sapiens
tattatcggctagtt

SEQ ID NO: 1780676 - DNA, 15 bp, Homo sapiens
attatcggctagttt

SEQ ID NO: 1780677 - DNA, 15 bp, Homo sapiens
ttatcggctagtttt

SEQ ID NO: 1780678 - DNA, 15 bp, Homo sapiens
tatcggctagtttta

SEQ ID NO: 1780679 - DNA, 15 bp, Homo sapiens
atcggctagttttac

SEQ ID NO: 1780680 - DNA, 15 bp, Homo sapiens
tcggctagttttaca

SEQ ID NO: 1780681 - DNA, 15 bp, Homo sapiens
cggctagttttacat

SEQ ID NO: 1780682 - DNA, 15 bp, Homo sapiens
ggctagttttacatt

SEQ ID NO: 1780683 - DNA, 15 bp, Homo sapiens
gctagttttacattt

SEQ ID NO: 1780684 - DNA, 15 bp, Homo sapiens
ctagttttacattta

SEQ ID NO: 1780685 - DNA, 15 bp, Homo sapiens
tagttttacatttag

SEQ ID NO: 1780686 - DNA, 15 bp, Homo sapiens
agttttacatttagc

SEQ ID NO: 1780687 - DNA, 15 bp, Homo sapiens
gttttacatttagcc

SEQ ID NO: 1780688 - DNA, 15 bp, Homo sapiens
ttttacatttagcca

SEQ ID NO: 1780689 - DNA, 15 bp, Homo sapiens
tttacatttagccac

SEQ ID NO: 1780690 - DNA, 15 bp, Homo sapiens
ttacatttagccact

SEQ ID NO: 1780691 - DNA, 15 bp, Homo sapiens
tacatttagccacta

SEQ ID NO: 1780692 - DNA, 15 bp, Homo sapiens
acatttagccactaa

SEQ ID NO: 1780693 - DNA, 15 bp, Homo sapiens
catttagccactaat

SEQ ID NO: 1780694 - DNA, 15 bp, Homo sapiens
atttagccactaatg

SEQ ID NO: 1780695 - DNA, 15 bp, Homo sapiens
tttagccactaatga

SEQ ID NO: 1780696 - DNA, 15 bp, Homo sapiens
ttagccactaatgag

SEQ ID NO: 1780697 - DNA, 15 bp, Homo sapiens
tagccactaatgaga

SEQ ID NO: 1780698 - DNA, 15 bp, Homo sapiens
agccactaatgagag

SEQ ID NO: 1780699 - DNA, 15 bp, Homo sapiens
gccactaatgagagc

SEQ ID NO: 1780700 - DNA, 15 bp, Homo sapiens
ccactaatgagagca

SEQ ID NO: 1780701 - DNA, 15 bp, Homo sapiens
cactaatgagagcat

SEQ ID NO: 1780702 - DNA, 15 bp, Homo sapiens
actaatgagagcatt

SEQ ID NO: 1780703 - DNA, 15 bp, Homo sapiens
aatgagagcattgcc

SEQ ID NO: 1780704 - DNA, 15 bp, Homo sapiens
atgagagcattgccc

SEQ ID NO: 1780705 - DNA, 15 bp, Homo sapiens
tgagagcattgcccc

SEQ ID NO: 1780706 - DNA, 15 bp, Homo sapiens
gagagcattgccccg

SEQ ID NO: 1780707 - DNA, 15 bp, Homo sapiens
agagcattgccccga

SEQ ID NO: 1780708 - DNA, 15 bp, Homo sapiens
gagcattgccccgaa

SEQ ID NO: 1780709 - DNA, 15 bp, Homo sapiens
agcattgccccgaat

SEQ ID NO: 1780710 - DNA, 15 bp, Homo sapiens
gcattgccccgaatg

SEQ ID NO: 1780711 - DNA, 15 bp, Homo sapiens
cattgccccgaatga

SEQ ID NO: 1780712 - DNA, 15 bp, Homo sapiens
attgccccgaatgaa

SEQ ID NO: 1780713 - DNA, 15 bp, Homo sapiens
ttgccccgaatgaat

SEQ ID NO: 1780714 - DNA, 15 bp, Homo sapiens
tgccccgaatgaatg

SEQ ID NO: 1780715 - DNA, 15 bp, Homo sapiens
gccccgaatgaatga

SEQ ID NO: 1780716 - DNA, 15 bp, Homo sapiens
ccccgaatgaatgag

SEQ ID NO: 1780717 - DNA, 15 bp, Homo sapiens
cccgaatgaatgagt

SEQ ID NO: 1780718 - DNA, 15 bp, Homo sapiens
ccgaatgaatgagtg

SEQ ID NO: 1780719 - DNA, 15 bp, Homo sapiens
gaatgaatgagtgac

SEQ ID NO: 1780720 - DNA, 15 bp, Homo sapiens
aatgaatgagtgact

SEQ ID NO: 1780721 - DNA, 15 bp, Homo sapiens
atgaatgagtgacta

SEQ ID NO: 1780722 - DNA, 15 bp, Homo sapiens
tgaatgagtgactat

SEQ ID NO: 1780723 - DNA, 15 bp, Homo sapiens
gaatgagtgactatc

SEQ ID NO: 1780724 - DNA, 15 bp, Homo sapiens
aatgagtgactatca

SEQ ID NO: 1780725 - DNA, 15 bp, Homo sapiens
atgagtgactatcaa

SEQ ID NO: 1780726 - DNA, 15 bp, Homo sapiens
tgagtgactatcaat

SEQ ID NO: 1780727 - DNA, 15 bp, Homo sapiens
gagtgactatcaatt

SEQ ID NO: 1780728 - DNA, 15 bp, Homo sapiens
agtgactatcaattt

SEQ ID NO: 1780729 - DNA, 15 bp, Homo sapiens
gtgactatcaattta

SEQ ID NO: 1780730 - DNA, 15 bp, Homo sapiens
tgactatcaatttaa

SEQ ID NO: 1780731 - DNA, 15 bp, Homo sapiens
gactatcaatttaag

SEQ ID NO: 1780732 - DNA, 15 bp, Homo sapiens
actatcaatttaagt

SEQ ID NO: 1780733 - DNA, 15 bp, Homo sapiens
ctatcaatttaagtg

SEQ ID NO: 1780734 - DNA, 15 bp, Homo sapiens
tatcaatttaagtga

SEQ ID NO: 1780735 - DNA, 15 bp, Homo sapiens
atcaatttaagtgat

SEQ ID NO: 1780736 - DNA, 15 bp, Homo sapiens
tcaatttaagtgatt

SEQ ID NO: 1780737 - DNA, 15 bp, Homo sapiens
caatttaagtgattt

SEQ ID NO: 1780738 - DNA, 15 bp, Homo sapiens
aatttaagtgatttc

SEQ ID NO: 1780739 - DNA, 15 bp, Homo sapiens
atttaagtgatttca

SEQ ID NO: 1780740 - DNA, 15 bp, Homo sapiens
tttaagtgatttcaa

SEQ ID NO: 1780741 - DNA, 15 bp, Homo sapiens
ttaagtgatttcaaa

SEQ ID NO: 1780742 - DNA, 15 bp, Homo sapiens
taagtgatttcaaaa

SEQ ID NO: 1780743 - DNA, 15 bp, Homo sapiens
aagtgatttcaaaaa

SEQ ID NO: 1780744 - DNA, 15 bp, Homo sapiens
agtgatttcaaaaat

SEQ ID NO: 1780745 - DNA, 15 bp, Homo sapiens
gtgatttcaaaaatt

SEQ ID NO: 1780746 - DNA, 15 bp, Homo sapiens
tgatttcaaaaatta

SEQ ID NO: 1780747 - DNA, 15 bp, Homo sapiens
gatttcaaaaattaa

SEQ ID NO: 1780748 - DNA, 15 bp, Homo sapiens
atttcaaaaattaac

SEQ ID NO: 1780749 - DNA, 15 bp, Homo sapiens
tttcaaaaattaaca

SEQ ID NO: 1780750 - DNA, 15 bp, Homo sapiens
ttcaaaaattaacat

SEQ ID NO: 1780751 - DNA, 15 bp, Homo sapiens
tcaaaaattaacata

SEQ ID NO: 1780752 - DNA, 15 bp, Homo sapiens
caaaaattaacatat

SEQ ID NO: 1780753 - DNA, 15 bp, Homo sapiens
aaaaattaacatata

SEQ ID NO: 1780754 - DNA, 15 bp, Homo sapiens
aaaattaacatatag

SEQ ID NO: 1780755 - DNA, 15 bp, Homo sapiens
aaattaacatatagc

SEQ ID NO: 1780756 - DNA, 15 bp, Homo sapiens
aattaacatatagca

SEQ ID NO: 1780757 - DNA, 15 bp, Homo sapiens
attaacatatagcat

SEQ ID NO: 1780758 - DNA, 15 bp, Homo sapiens
ttaacatatagcata

SEQ ID NO: 1780759 - DNA, 15 bp, Homo sapiens
taacatatagcataa

SEQ ID NO: 1780760 - DNA, 15 bp, Homo sapiens
aacatatagcataaa

SEQ ID NO: 1780761 - DNA, 15 bp, Homo sapiens
acatatagcataaat

SEQ ID NO: 1780762 - DNA, 15 bp, Homo sapiens
catatagcataaata

SEQ ID NO: 1780763 - DNA, 15 bp, Homo sapiens
atatagcataaataa

SEQ ID NO: 1780764 - DNA, 15 bp, Homo sapiens
tatagcataaataaa

SEQ ID NO: 1780765 - DNA, 15 bp, Homo sapiens
atagcataaataaac

SEQ ID NO: 1780766 - DNA, 15 bp, Homo sapiens
tagcataaataaaca

SEQ ID NO: 1780767 - DNA, 15 bp, Homo sapiens
agcataaataaacat

SEQ ID NO: 1780768 - DNA, 15 bp, Homo sapiens
gcataaataaacatt

SEQ ID NO: 1780769 - DNA, 15 bp, Homo sapiens
cataaataaacattt

SEQ ID NO: 1780770 - DNA, 15 bp, Homo sapiens
ataaataaacatttt

SEQ ID NO: 1780771 - DNA, 15 bp, Homo sapiens
taaataaacatttta

SEQ ID NO: 1780772 - DNA, 15 bp, Homo sapiens
aaataaacattttat

SEQ ID NO: 1780773 - DNA, 15 bp, Homo sapiens
aataaacattttata

SEQ ID NO: 1780774 - DNA, 15 bp, Homo sapiens
ataaacattttatag

SEQ ID NO: 1780775 - DNA, 15 bp, Homo sapiens
taaacattttatagg

SEQ ID NO: 1780776 - DNA, 15 bp, Homo sapiens
aaacattttatagga

SEQ ID NO: 1780777 - DNA, 15 bp, Homo sapiens
aacattttataggaa

SEQ ID NO: 1780778 - DNA, 15 bp, Homo sapiens
cattttataggaaaa

SEQ ID NO: 1780779 - DNA, 15 bp, Homo sapiens
attttataggaaaaa

SEQ ID NO: 1780780 - DNA, 15 bp, Homo sapiens
ttttataggaaaaaa

SEQ ID NO: 1780781 - DNA, 15 bp, Homo sapiens
tttataggaaaaaaa

SEQ ID NO: 1780782 - DNA, 15 bp, Homo sapiens
ttataggaaaaaaag

SEQ ID NO: 1780783 - DNA, 15 bp, Homo sapiens
tataggaaaaaaagt

SEQ ID NO: 1780784 - DNA, 15 bp, Homo sapiens
ataggaaaaaaagtg

SEQ ID NO: 1780785 - DNA, 15 bp, Homo sapiens
taggaaaaaaagtga

SEQ ID NO: 1780786 - DNA, 15 bp, Homo sapiens
aggaaaaaaagtgac

SEQ ID NO: 1780787 - DNA, 15 bp, Homo sapiens
ggaaaaaaagtgaca

SEQ ID NO: 1780788 - DNA, 15 bp, Homo sapiens
gaaaaaaagtgacag

SEQ ID NO: 1780789 - DNA, 15 bp, Homo sapiens
aaaaaaagtgacaga

SEQ ID NO: 1780790 - DNA, 15 bp, Homo sapiens
aaaaaagtgacagac

SEQ ID NO: 1780791 - DNA, 15 bp, Homo sapiens
aaaaagtgacagacc

SEQ ID NO: 1780792 - DNA, 15 bp, Homo sapiens
aaaagtgacagaccc

SEQ ID NO: 1780793 - DNA, 15 bp, Homo sapiens
aaagtgacagaccct

SEQ ID NO: 1780794 - DNA, 15 bp, Homo sapiens
aagtgacagacccta

SEQ ID NO: 1780795 - DNA, 15 bp, Homo sapiens
agtgacagaccctat

SEQ ID NO: 1780796 - DNA, 15 bp, Homo sapiens
gtgacagaccctatt

SEQ ID NO: 1780797 - DNA, 15 bp, Homo sapiens
tgacagaccctatta

SEQ ID NO: 1780798 - DNA, 15 bp, Homo sapiens
gacagaccctattac

SEQ ID NO: 1780799 - DNA, 15 bp, Homo sapiens
acagaccctattacc

SEQ ID NO: 1780800 - DNA, 15 bp, Homo sapiens
cagaccctattacct

SEQ ID NO: 1780801 - DNA, 15 bp, Homo sapiens
agaccctattacctt

SEQ ID NO: 1780802 - DNA, 15 bp, Homo sapiens
gaccctattacctta

SEQ ID NO: 1780803 - DNA, 15 bp, Homo sapiens
accctattaccttaa

SEQ ID NO: 1780804 - DNA, 15 bp, Homo sapiens
ccctattaccttaaa

SEQ ID NO: 1780805 - DNA, 15 bp, Homo sapiens
cctattaccttaaat

SEQ ID NO: 1780806 - DNA, 15 bp, Homo sapiens
ctattaccttaaatc

SEQ ID NO: 1780807 - DNA, 15 bp, Homo sapiens
tattaccttaaatca

SEQ ID NO: 1780808 - DNA, 15 bp, Homo sapiens
attaccttaaatcaa

SEQ ID NO: 1780809 - DNA, 15 bp, Homo sapiens
ttaccttaaatcaaa

SEQ ID NO: 1780810 - DNA, 15 bp, Homo sapiens
taccttaaatcaaaa

SEQ ID NO: 1780811 - DNA, 15 bp, Homo sapiens
accttaaatcaaaac

SEQ ID NO: 1780812 - DNA, 15 bp, Homo sapiens
ccttaaatcaaaacc

SEQ ID NO: 1780813 - DNA, 15 bp, Homo sapiens
cttaaatcaaaacca

SEQ ID NO: 1780814 - DNA, 15 bp, Homo sapiens
ttaaatcaaaaccaa

SEQ ID NO: 1780815 - DNA, 15 bp, Homo sapiens
taaatcaaaaccaag

SEQ ID NO: 1780816 - DNA, 15 bp, Homo sapiens
aaatcaaaaccaaga

SEQ ID NO: 1780817 - DNA, 15 bp, Homo sapiens
aatcaaaaccaagag

SEQ ID NO: 1780818 - DNA, 15 bp, Homo sapiens
atcaaaaccaagaga

SEQ ID NO: 1780819 - DNA, 15 bp, Homo sapiens
tcaaaaccaagagaa

SEQ ID NO: 1780820 - DNA, 15 bp, Homo sapiens
caaaaccaagagaag

SEQ ID NO: 1780821 - DNA, 15 bp, Homo sapiens
aaaaccaagagaagt

SEQ ID NO: 1780822 - DNA, 15 bp, Homo sapiens
aaaccaagagaagta

SEQ ID NO: 1780823 - DNA, 15 bp, Homo sapiens
aaccaagagaagtag

SEQ ID NO: 1780824 - DNA, 15 bp, Homo sapiens
accaagagaagtagc

SEQ ID NO: 1780825 - DNA, 15 bp, Homo sapiens
ccaagagaagtagca

SEQ ID NO: 1780826 - DNA, 15 bp, Homo sapiens
caagagaagtagcaa

SEQ ID NO: 1780827 - DNA, 15 bp, Homo sapiens
aagagaagtagcaag

SEQ ID NO: 1780828 - DNA, 15 bp, Homo sapiens
agagaagtagcaagg

SEQ ID NO: 1780829 - DNA, 15 bp, Homo sapiens
gagaagtagcaaggc

SEQ ID NO: 1780830 - DNA, 15 bp, Homo sapiens
agaagtagcaaggct

SEQ ID NO: 1780831 - DNA, 15 bp, Homo sapiens
gaagtagcaaggcta

SEQ ID NO: 1780832 - DNA, 15 bp, Homo sapiens
aagtagcaaggctaa

SEQ ID NO: 1780833 - DNA, 15 bp, Homo sapiens
agtagcaaggctaag

SEQ ID NO: 1780834 - DNA, 15 bp, Homo sapiens
gtagcaaggctaaga

SEQ ID NO: 1780835 - DNA, 15 bp, Homo sapiens
tagcaaggctaagaa

SEQ ID NO: 1780836 - DNA, 15 bp, Homo sapiens
agcaaggctaagaag

SEQ ID NO: 1780837 - DNA, 15 bp, Homo sapiens
gcaaggctaagaaga

SEQ ID NO: 1780838 - DNA, 15 bp, Homo sapiens
caaggctaagaagat

SEQ ID NO: 1780839 - DNA, 15 bp, Homo sapiens
aaggctaagaagata

SEQ ID NO: 1780840 - DNA, 15 bp, Homo sapiens
aggctaagaagatac

SEQ ID NO: 1780841 - DNA, 15 bp, Homo sapiens
ggctaagaagataca

SEQ ID NO: 1780842 - DNA, 15 bp, Homo sapiens
gctaagaagatacat

SEQ ID NO: 1780843 - DNA, 15 bp, Homo sapiens
ctaagaagatacata

SEQ ID NO: 1780844 - DNA, 15 bp, Homo sapiens
taagaagatacatac

SEQ ID NO: 1780845 - DNA, 15 bp, Homo sapiens
aagaagatacatacc

SEQ ID NO: 1780846 - DNA, 15 bp, Homo sapiens
agaagatacatacca

SEQ ID NO: 1780847 - DNA, 15 bp, Homo sapiens
gaagatacataccaa

SEQ ID NO: 1780848 - DNA, 15 bp, Homo sapiens
aagatacataccaaa

SEQ ID NO: 1780849 - DNA, 15 bp, Homo sapiens
agatacataccaaaa

SEQ ID NO: 1780850 - DNA, 15 bp, Homo sapiens
gatacataccaaaat

SEQ ID NO: 1780851 - DNA, 15 bp, Homo sapiens
atacataccaaaatt

SEQ ID NO: 1780852 - DNA, 15 bp, Homo sapiens
tacataccaaaattt

SEQ ID NO: 1780853 - DNA, 15 bp, Homo sapiens
acataccaaaatttt

SEQ ID NO: 1780854 - DNA, 15 bp, Homo sapiens
cataccaaaattttc

SEQ ID NO: 1780855 - DNA, 15 bp, Homo sapiens
ataccaaaattttca

SEQ ID NO: 1780856 - DNA, 15 bp, Homo sapiens
taccaaaattttcaa

SEQ ID NO: 1780857 - DNA, 15 bp, Homo sapiens
accaaaattttcaat

SEQ ID NO: 1780858 - DNA, 15 bp, Homo sapiens
ccaaaattttcaatt

SEQ ID NO: 1780859 - DNA, 15 bp, Homo sapiens
caaaattttcaattc

SEQ ID NO: 1780860 - DNA, 15 bp, Homo sapiens
aaaattttcaattcc

SEQ ID NO: 1780861 - DNA, 15 bp, Homo sapiens
aaattttcaattcca

SEQ ID NO: 1780862 - DNA, 15 bp, Homo sapiens
aattttcaattccat

SEQ ID NO: 1780863 - DNA, 15 bp, Homo sapiens
attttcaattccatt

SEQ ID NO: 1780864 - DNA, 15 bp, Homo sapiens
ttttcaattccattt

SEQ ID NO: 1780865 - DNA, 15 bp, Homo sapiens
tttcaattccatttc

SEQ ID NO: 1780866 - DNA, 15 bp, Homo sapiens
ttcaattccatttca

SEQ ID NO: 1780867 - DNA, 15 bp, Homo sapiens
tcaattccatttcaa

SEQ ID NO: 1780868 - DNA, 15 bp, Homo sapiens
caattccatttcaaa

SEQ ID NO: 1780869 - DNA, 15 bp, Homo sapiens
aattccatttcaaat

SEQ ID NO: 1780870 - DNA, 15 bp, Homo sapiens
attccatttcaaatc

SEQ ID NO: 1780871 - DNA, 15 bp, Homo sapiens
ttccatttcaaatca

SEQ ID NO: 1780872 - DNA, 15 bp, Homo sapiens
tccatttcaaatcag

SEQ ID NO: 1780873 - DNA, 15 bp, Homo sapiens
ccatttcaaatcagt

SEQ ID NO: 1780874 - DNA, 15 bp, Homo sapiens
catttcaaatcagta

SEQ ID NO: 1780875 - DNA, 15 bp, Homo sapiens
atttcaaatcagtaa

SEQ ID NO: 1780876 - DNA, 15 bp, Homo sapiens
tttcaaatcagtaaa

SEQ ID NO: 1780877 - DNA, 15 bp, Homo sapiens
ttcaaatcagtaaaa

SEQ ID NO: 1780878 - DNA, 15 bp, Homo sapiens
tcaaatcagtaaaag

SEQ ID NO: 1780879 - DNA, 15 bp, Homo sapiens
caaatcagtaaaaga

SEQ ID NO: 1780880 - DNA, 15 bp, Homo sapiens
aaatcagtaaaagaa

SEQ ID NO: 1780881 - DNA, 15 bp, Homo sapiens
aatcagtaaaagaaa

SEQ ID NO: 1780882 - DNA, 15 bp, Homo sapiens
atcagtaaaagaaag

SEQ ID NO: 1780883 - DNA, 15 bp, Homo sapiens
tcagtaaaagaaagt

SEQ ID NO: 1780884 - DNA, 15 bp, Homo sapiens
cagtaaaagaaagtg

SEQ ID NO: 1780885 - DNA, 15 bp, Homo sapiens
agtaaaagaaagtga

SEQ ID NO: 1780886 - DNA, 15 bp, Homo sapiens
gtaaaagaaagtgat

SEQ ID NO: 1780887 - DNA, 15 bp, Homo sapiens
taaaagaaagtgata

SEQ ID NO: 1780888 - DNA, 15 bp, Homo sapiens
aaaagaaagtgatag

SEQ ID NO: 1780889 - DNA, 15 bp, Homo sapiens
aaagaaagtgatagt

SEQ ID NO: 1780890 - DNA, 15 bp, Homo sapiens
aagaaagtgatagta

SEQ ID NO: 1780891 - DNA, 15 bp, Homo sapiens
agaaagtgatagtag

SEQ ID NO: 1780892 - DNA, 15 bp, Homo sapiens
gaaagtgatagtaga

SEQ ID NO: 1780893 - DNA, 15 bp, Homo sapiens
aaagtgatagtagag

SEQ ID NO: 1780894 - DNA, 15 bp, Homo sapiens
aagtgatagtagagg

SEQ ID NO: 1780895 - DNA, 15 bp, Homo sapiens
agtgatagtagaggg

SEQ ID NO: 1780896 - DNA, 15 bp, Homo sapiens
gtgatagtagaggga

SEQ ID NO: 1780897 - DNA, 15 bp, Homo sapiens
tgatagtagagggaa

SEQ ID NO: 1780898 - DNA, 15 bp, Homo sapiens
gatagtagagggaag

SEQ ID NO: 1780899 - DNA, 15 bp, Homo sapiens
atagtagagggaagc

SEQ ID NO: 1780900 - DNA, 15 bp, Homo sapiens
tagtagagggaagct

SEQ ID NO: 1780901 - DNA, 15 bp, Homo sapiens
agtagagggaagcta

SEQ ID NO: 1780902 - DNA, 15 bp, Homo sapiens
gtagagggaagctac

SEQ ID NO: 1780903 - DNA, 15 bp, Homo sapiens
tagagggaagctact

SEQ ID NO: 1780904 - DNA, 15 bp, Homo sapiens
agagggaagctactg

SEQ ID NO: 1780905 - DNA, 15 bp, Homo sapiens
gagggaagctactga

SEQ ID NO: 1780906 - DNA, 15 bp, Homo sapiens
agggaagctactgaa

SEQ ID NO: 1780907 - DNA, 15 bp, Homo sapiens
gggaagctactgaag

SEQ ID NO: 1780908 - DNA, 15 bp, Homo sapiens
ggaagctactgaagt

SEQ ID NO: 1780909 - DNA, 15 bp, Homo sapiens
gaagctactgaagtg

SEQ ID NO: 1780910 - DNA, 15 bp, Homo sapiens
aagctactgaagtgt

SEQ ID NO: 1780911 - DNA, 15 bp, Homo sapiens
agctactgaagtgtg

SEQ ID NO: 1780912 - DNA, 15 bp, Homo sapiens
gctactgaagtgtgg

SEQ ID NO: 1780913 - DNA, 15 bp, Homo sapiens
ctactgaagtgtggg

SEQ ID NO: 1780914 - DNA, 15 bp, Homo sapiens
tactgaagtgtggga

SEQ ID NO: 1780915 - DNA, 15 bp, Homo sapiens
actgaagtgtgggaa

SEQ ID NO: 1780916 - DNA, 15 bp, Homo sapiens
ctgaagtgtgggaaa

SEQ ID NO: 1780917 - DNA, 15 bp, Homo sapiens
tgaagtgtgggaaag

SEQ ID NO: 1780918 - DNA, 15 bp, Homo sapiens
gaagtgtgggaaagg

SEQ ID NO: 1780919 - DNA, 15 bp, Homo sapiens
aagtgtgggaaagga

SEQ ID NO: 1780920 - DNA, 15 bp, Homo sapiens
agtgtgggaaaggaa

SEQ ID NO: 1780921 - DNA, 15 bp, Homo sapiens
gtgtgggaaaggaag

SEQ ID NO: 1780922 - DNA, 15 bp, Homo sapiens
tgtgggaaaggaagt

SEQ ID NO: 1780923 - DNA, 15 bp, Homo sapiens
gtgggaaaggaagta

SEQ ID NO: 1780924 - DNA, 15 bp, Homo sapiens
tgggaaaggaagtaa

SEQ ID NO: 1780925 - DNA, 15 bp, Homo sapiens
gggaaaggaagtaaa

SEQ ID NO: 1780926 - DNA, 15 bp, Homo sapiens
ggaaaggaagtaaaa

SEQ ID NO: 1780927 - DNA, 15 bp, Homo sapiens
gaaaggaagtaaaag

SEQ ID NO: 1780928 - DNA, 15 bp, Homo sapiens
aaaggaagtaaaaga

SEQ ID NO: 1780929 - DNA, 15 bp, Homo sapiens
aaggaagtaaaagaa

SEQ ID NO: 1780930 - DNA, 15 bp, Homo sapiens
aggaagtaaaagaaa

SEQ ID NO: 1780931 - DNA, 15 bp, Homo sapiens
ggaagtaaaagaaat

SEQ ID NO: 1780932 - DNA, 15 bp, Homo sapiens
gaagtaaaagaaatc

SEQ ID NO: 1780933 - DNA, 15 bp, Homo sapiens
aagtaaaagaaatca

SEQ ID NO: 1780934 - DNA, 15 bp, Homo sapiens
agtaaaagaaatcag

SEQ ID NO: 1780935 - DNA, 15 bp, Homo sapiens
gtaaaagaaatcagg

SEQ ID NO: 1780936 - DNA, 15 bp, Homo sapiens
taaaagaaatcaggg

SEQ ID NO: 1780937 - DNA, 15 bp, Homo sapiens
aaaagaaatcaggga

SEQ ID NO: 1780938 - DNA, 15 bp, Homo sapiens
aaagaaatcagggag

SEQ ID NO: 1780939 - DNA, 15 bp, Homo sapiens
aagaaatcagggagc

SEQ ID NO: 1780940 - DNA, 15 bp, Homo sapiens
agaaatcagggagct

SEQ ID NO: 1780941 - DNA, 15 bp, Homo sapiens
gaaatcagggagcta

SEQ ID NO: 1780942 - DNA, 15 bp, Homo sapiens
aaatcagggagctag

SEQ ID NO: 1780943 - DNA, 15 bp, Homo sapiens
aatcagggagctagt

SEQ ID NO: 1780944 - DNA, 15 bp, Homo sapiens
atcagggagctagta

SEQ ID NO: 1780945 - DNA, 15 bp, Homo sapiens
tcagggagctagtat

SEQ ID NO: 1780946 - DNA, 15 bp, Homo sapiens
cagggagctagtata

SEQ ID NO: 1780947 - DNA, 15 bp, Homo sapiens
agggagctagtataa

SEQ ID NO: 1780948 - DNA, 15 bp, Homo sapiens
gggagctagtataat

SEQ ID NO: 1780949 - DNA, 15 bp, Homo sapiens
ggagctagtataata

SEQ ID NO: 1780950 - DNA, 15 bp, Homo sapiens
gagctagtataatat

SEQ ID NO: 1780951 - DNA, 15 bp, Homo sapiens
agctagtataatatt

SEQ ID NO: 1780952 - DNA, 15 bp, Homo sapiens
gctagtataatatta

SEQ ID NO: 1780953 - DNA, 15 bp, Homo sapiens
ctagtataatattat

SEQ ID NO: 1780954 - DNA, 15 bp, Homo sapiens
tagtataatattatc

SEQ ID NO: 1780955 - DNA, 15 bp, Homo sapiens
agtataatattatca

SEQ ID NO: 1780956 - DNA, 15 bp, Homo sapiens
gtataatattatcat

SEQ ID NO: 1780957 - DNA, 15 bp, Homo sapiens
tataatattatcatt

SEQ ID NO: 1780958 - DNA, 15 bp, Homo sapiens
ataatattatcatta

SEQ ID NO: 1780959 - DNA, 15 bp, Homo sapiens
taatattatcattat

SEQ ID NO: 1780960 - DNA, 15 bp, Homo sapiens
aatattatcattatt

SEQ ID NO: 1780961 - DNA, 15 bp, Homo sapiens
atattatcattattt

SEQ ID NO: 1780962 - DNA, 15 bp, Homo sapiens
tattatcattatttt

SEQ ID NO: 1780963 - DNA, 15 bp, Homo sapiens
attatcattatttta

SEQ ID NO: 1780964 - DNA, 15 bp, Homo sapiens
ttatcattattttat

SEQ ID NO: 1780965 - DNA, 15 bp, Homo sapiens
tatcattattttatt

SEQ ID NO: 1780966 - DNA, 15 bp, Homo sapiens
atcattattttattc

SEQ ID NO: 1780967 - DNA, 15 bp, Homo sapiens
tcattattttattcc

SEQ ID NO: 1780968 - DNA, 15 bp, Homo sapiens
cattattttattcca

SEQ ID NO: 1780969 - DNA, 15 bp, Homo sapiens
attattttattccag

SEQ ID NO: 1780970 - DNA, 15 bp, Homo sapiens
ttattttattccagc

SEQ ID NO: 1780971 - DNA, 15 bp, Homo sapiens
tattttattccagcc

SEQ ID NO: 1780972 - DNA, 15 bp, Homo sapiens
attttattccagcct

SEQ ID NO: 1780973 - DNA, 15 bp, Homo sapiens
ttttattccagcctc

SEQ ID NO: 1780974 - DNA, 15 bp, Homo sapiens
tttattccagcctca

SEQ ID NO: 1780975 - DNA, 15 bp, Homo sapiens
ttattccagcctcaa

SEQ ID NO: 1780976 - DNA, 15 bp, Homo sapiens
tattccagcctcaaa

SEQ ID NO: 1780977 - DNA, 15 bp, Homo sapiens
attccagcctcaaac

SEQ ID NO: 1780978 - DNA, 15 bp, Homo sapiens
ttccagcctcaaact

SEQ ID NO: 1780979 - DNA, 15 bp, Homo sapiens
tccagcctcaaacta

SEQ ID NO: 1780980 - DNA, 15 bp, Homo sapiens
ccagcctcaaactaa

SEQ ID NO: 1780981 - DNA, 15 bp, Homo sapiens
cagcctcaaactaaa

SEQ ID NO: 1780982 - DNA, 15 bp, Homo sapiens
agcctcaaactaaat

SEQ ID NO: 1780983 - DNA, 15 bp, Homo sapiens
gcctcaaactaaatg

SEQ ID NO: 1780984 - DNA, 15 bp, Homo sapiens
cctcaaactaaatgt

SEQ ID NO: 1780985 - DNA, 15 bp, Homo sapiens
ctcaaactaaatgtt

SEQ ID NO: 1780986 - DNA, 15 bp, Homo sapiens
tcaaactaaatgtta

SEQ ID NO: 1780987 - DNA, 15 bp, Homo sapiens
caaactaaatgttat

SEQ ID NO: 1780988 - DNA, 15 bp, Homo sapiens
aaactaaatgttatg

SEQ ID NO: 1780989 - DNA, 15 bp, Homo sapiens
aactaaatgttatgt

SEQ ID NO: 1780990 - DNA, 15 bp, Homo sapiens
actaaatgttatgta

SEQ ID NO: 1780991 - DNA, 15 bp, Homo sapiens
ctaaatgttatgtaa

SEQ ID NO: 1780992 - DNA, 15 bp, Homo sapiens
taaatgttatgtaac

SEQ ID NO: 1780993 - DNA, 15 bp, Homo sapiens
aaatgttatgtaaca

SEQ ID NO: 1780994 - DNA, 15 bp, Homo sapiens
aatgttatgtaacat

SEQ ID NO: 1780995 - DNA, 15 bp, Homo sapiens
atgttatgtaacatt

SEQ ID NO: 1780996 - DNA, 15 bp, Homo sapiens
tgttatgtaacattt

SEQ ID NO: 1780997 - DNA, 15 bp, Homo sapiens
gttatgtaacatttt

SEQ ID NO: 1780998 - DNA, 15 bp, Homo sapiens
ttatgtaacattttg

SEQ ID NO: 1780999 - DNA, 15 bp, Homo sapiens
tatgtaacattttgg

SEQ ID NO: 1781000 - DNA, 15 bp, Homo sapiens
atgtaacattttggt

SEQ ID NO: 1781001 - DNA, 15 bp, Homo sapiens
tgtaacattttggtt

SEQ ID NO: 1781002 - DNA, 15 bp, Homo sapiens
gtaacattttggttg

SEQ ID NO: 1781003 - DNA, 15 bp, Homo sapiens
taacattttggttgt

SEQ ID NO: 1781004 - DNA, 15 bp, Homo sapiens
aacattttggttgta

SEQ ID NO: 1781005 - DNA, 15 bp, Homo sapiens
acattttggttgtaa

SEQ ID NO: 1781006 - DNA, 15 bp, Homo sapiens
cattttggttgtaaa

SEQ ID NO: 1781007 - DNA, 15 bp, Homo sapiens
attttggttgtaaaa

SEQ ID NO: 1781008 - DNA, 15 bp, Homo sapiens
ttttggttgtaaaat

SEQ ID NO: 1781009 - DNA, 15 bp, Homo sapiens
tttggttgtaaaatt

SEQ ID NO: 1781010 - DNA, 15 bp, Homo sapiens
ttggttgtaaaattt

SEQ ID NO: 1781011 - DNA, 15 bp, Homo sapiens
tggttgtaaaattta

SEQ ID NO: 1781012 - DNA, 15 bp, Homo sapiens
ggttgtaaaatttaa

SEQ ID NO: 1781013 - DNA, 15 bp, Homo sapiens
gttgtaaaatttaag

SEQ ID NO: 1781014 - DNA, 15 bp, Homo sapiens
ttgtaaaatttaaga

SEQ ID NO: 1781015 - DNA, 15 bp, Homo sapiens
tgtaaaatttaagaa

SEQ ID NO: 1781016 - DNA, 15 bp, Homo sapiens
gtaaaatttaagaaa

SEQ ID NO: 1781017 - DNA, 15 bp, Homo sapiens
taaaatttaagaaat

SEQ ID NO: 1781018 - DNA, 15 bp, Homo sapiens
aaaatttaagaaata

SEQ ID NO: 1781019 - DNA, 15 bp, Homo sapiens
aaatttaagaaatat

SEQ ID NO: 1781020 - DNA, 15 bp, Homo sapiens
aatttaagaaatatt

SEQ ID NO: 1781021 - DNA, 15 bp, Homo sapiens
atttaagaaatattt

SEQ ID NO: 1781022 - DNA, 15 bp, Homo sapiens
tttaagaaatattta

SEQ ID NO: 1781023 - DNA, 15 bp, Homo sapiens
ttaagaaatatttaa

SEQ ID NO: 1781024 - DNA, 15 bp, Homo sapiens
aagaaatatttaaag

SEQ ID NO: 1781025 - DNA, 15 bp, Homo sapiens
agaaatatttaaaga

SEQ ID NO: 1781026 - DNA, 15 bp, Homo sapiens
gaaatatttaaagaa

SEQ ID NO: 1781027 - DNA, 15 bp, Homo sapiens
aaatatttaaagaat

SEQ ID NO: 1781028 - DNA, 15 bp, Homo sapiens
aatatttaaagaata

SEQ ID NO: 1781029 - DNA, 15 bp, Homo sapiens
atatttaaagaatat

SEQ ID NO: 1781030 - DNA, 15 bp, Homo sapiens
tatttaaagaatata

SEQ ID NO: 1781031 - DNA, 15 bp, Homo sapiens
atttaaagaatataa

SEQ ID NO: 1781032 - DNA, 15 bp, Homo sapiens
tttaaagaatataag

SEQ ID NO: 1781033 - DNA, 15 bp, Homo sapiens
ttaaagaatataaga

SEQ ID NO: 1781034 - DNA, 15 bp, Homo sapiens
taaagaatataagaa

SEQ ID NO: 1781035 - DNA, 15 bp, Homo sapiens
aaagaatataagaag

SEQ ID NO: 1781036 - DNA, 15 bp, Homo sapiens
aagaatataagaagc

SEQ ID NO: 1781037 - DNA, 15 bp, Homo sapiens
agaatataagaagca

SEQ ID NO: 1781038 - DNA, 15 bp, Homo sapiens
gaatataagaagcag

SEQ ID NO: 1781039 - DNA, 15 bp, Homo sapiens
aatataagaagcagg

SEQ ID NO: 1781040 - DNA, 15 bp, Homo sapiens
atataagaagcagga

SEQ ID NO: 1781041 - DNA, 15 bp, Homo sapiens
tataagaagcaggaa

SEQ ID NO: 1781042 - DNA, 15 bp, Homo sapiens
ataagaagcaggaaa

SEQ ID NO: 1781043 - DNA, 15 bp, Homo sapiens
taagaagcaggaaat

SEQ ID NO: 1781044 - DNA, 15 bp, Homo sapiens
aagaagcaggaaata

SEQ ID NO: 1781045 - DNA, 15 bp, Homo sapiens
agaagcaggaaataa

SEQ ID NO: 1781046 - DNA, 15 bp, Homo sapiens
gaagcaggaaataat

SEQ ID NO: 1781047 - DNA, 15 bp, Homo sapiens
aagcaggaaataata

SEQ ID NO: 1781048 - DNA, 15 bp, Homo sapiens
agcaggaaataatat

SEQ ID NO: 1781049 - DNA, 15 bp, Homo sapiens
gcaggaaataatatg

SEQ ID NO: 1781050 - DNA, 15 bp, Homo sapiens
caggaaataatatga

SEQ ID NO: 1781051 - DNA, 15 bp, Homo sapiens
aggaaataatatgaa

SEQ ID NO: 1781052 - DNA, 15 bp, Homo sapiens
ggaaataatatgaaa

SEQ ID NO: 1781053 - DNA, 15 bp, Homo sapiens
gaaataatatgaaat

SEQ ID NO: 1781054 - DNA, 15 bp, Homo sapiens
aaataatatgaaatt

SEQ ID NO: 1781055 - DNA, 15 bp, Homo sapiens
aataatatgaaatta

SEQ ID NO: 1781056 - DNA, 15 bp, Homo sapiens
ataatatgaaattat

SEQ ID NO: 1781057 - DNA, 15 bp, Homo sapiens
taatatgaaattatc

SEQ ID NO: 1781058 - DNA, 15 bp, Homo sapiens
aatatgaaattatcc

SEQ ID NO: 1781059 - DNA, 15 bp, Homo sapiens
atatgaaattatccc

SEQ ID NO: 1781060 - DNA, 15 bp, Homo sapiens
tatgaaattatcccc

SEQ ID NO: 1781061 - DNA, 15 bp, Homo sapiens
atgaaattatcccct

SEQ ID NO: 1781062 - DNA, 15 bp, Homo sapiens
tgaaattatcccctt

SEQ ID NO: 1781063 - DNA, 15 bp, Homo sapiens
gaaattatccccttt

SEQ ID NO: 1781064 - DNA, 15 bp, Homo sapiens
aaattatccccttta

SEQ ID NO: 1781065 - DNA, 15 bp, Homo sapiens
aattatcccctttat

SEQ ID NO: 1781066 - DNA, 15 bp, Homo sapiens
attatcccctttatg

SEQ ID NO: 1781067 - DNA, 15 bp, Homo sapiens
ttatcccctttatgt

SEQ ID NO: 1781068 - DNA, 15 bp, Homo sapiens
tatcccctttatgtt

SEQ ID NO: 1781069 - DNA, 15 bp, Homo sapiens
atcccctttatgttg

SEQ ID NO: 1781070 - DNA, 15 bp, Homo sapiens
tcccctttatgttga

SEQ ID NO: 1781071 - DNA, 15 bp, Homo sapiens
cccctttatgttgag

SEQ ID NO: 1781072 - DNA, 15 bp, Homo sapiens
ccctttatgttgagt

SEQ ID NO: 1781073 - DNA, 15 bp, Homo sapiens
cctttatgttgagtc

SEQ ID NO: 1781074 - DNA, 15 bp, Homo sapiens
ctttatgttgagtct

SEQ ID NO: 1781075 - DNA, 15 bp, Homo sapiens
tttatgttgagtctt

SEQ ID NO: 1781076 - DNA, 15 bp, Homo sapiens
ttatgttgagtcttg

SEQ ID NO: 1781077 - DNA, 15 bp, Homo sapiens
tatgttgagtcttga

SEQ ID NO: 1781078 - DNA, 15 bp, Homo sapiens
atgttgagtcttgac

SEQ ID NO: 1781079 - DNA, 15 bp, Homo sapiens
tgttgagtcttgaca

SEQ ID NO: 1781080 - DNA, 15 bp, Homo sapiens
gttgagtcttgacaa

SEQ ID NO: 1781081 - DNA, 15 bp, Homo sapiens
ttgagtcttgacaaa

SEQ ID NO: 1781082 - DNA, 15 bp, Homo sapiens
tgagtcttgacaaaa

SEQ ID NO: 1781083 - DNA, 15 bp, Homo sapiens
gagtcttgacaaaat

SEQ ID NO: 1781084 - DNA, 15 bp, Homo sapiens
agtcttgacaaaata

SEQ ID NO: 1781085 - DNA, 15 bp, Homo sapiens
gtcttgacaaaataa

SEQ ID NO: 1781086 - DNA, 15 bp, Homo sapiens
tcttgacaaaataaa

SEQ ID NO: 1781087 - DNA, 15 bp, Homo sapiens
cttgacaaaataaat

SEQ ID NO: 1781088 - DNA, 15 bp, Homo sapiens
ttgacaaaataaata

SEQ ID NO: 1781089 - DNA, 15 bp, Homo sapiens
tgacaaaataaataa

SEQ ID NO: 1781090 - DNA, 15 bp, Homo sapiens
gacaaaataaataat

SEQ ID NO: 1781091 - DNA, 15 bp, Homo sapiens
acaaaataaataata

SEQ ID NO: 1781092 - DNA, 15 bp, Homo sapiens
caaaataaataataa

SEQ ID NO: 1781093 - DNA, 15 bp, Homo sapiens
aaaataaataataat

SEQ ID NO: 1781094 - DNA, 15 bp, Homo sapiens
aaataaataataata

SEQ ID NO: 1781095 - DNA, 15 bp, Homo sapiens
aataaataataatat

SEQ ID NO: 1781096 - DNA, 15 bp, Homo sapiens
ataaataataatatt

SEQ ID NO: 1781097 - DNA, 15 bp, Homo sapiens
taaataataatatta

SEQ ID NO: 1781098 - DNA, 15 bp, Homo sapiens
aaataataatattaa

SEQ ID NO: 1781099 - DNA, 15 bp, Homo sapiens
aataataatattaat

SEQ ID NO: 1781100 - DNA, 15 bp, Homo sapiens
ataataatattaata

SEQ ID NO: 1781101 - DNA, 15 bp, Homo sapiens
taataatattaataa

SEQ ID NO: 1781102 - DNA, 15 bp, Homo sapiens
aataatattaataat

SEQ ID NO: 1781103 - DNA, 15 bp, Homo sapiens
ataatattaataatt

SEQ ID NO: 1781104 - DNA, 15 bp, Homo sapiens
taatattaataatta

SEQ ID NO: 1781105 - DNA, 15 bp, Homo sapiens
aatattaataattaa

SEQ ID NO: 1781106 - DNA, 15 bp, Homo sapiens
atattaataattaaa

SEQ ID NO: 1781107 - DNA, 15 bp, Homo sapiens
tattaataattaaaa

SEQ ID NO: 1781108 - DNA, 15 bp, Homo sapiens
attaataattaaaaa

SEQ ID NO: 1781109 - DNA, 15 bp, Homo sapiens
ttaataattaaaaat

SEQ ID NO: 1781110 - DNA, 15 bp, Homo sapiens
taataattaaaaata

SEQ ID NO: 1781111 - DNA, 15 bp, Homo sapiens
aataattaaaaataa

SEQ ID NO: 1781112 - DNA, 15 bp, Homo sapiens
ataattaaaaataat

SEQ ID NO: 1781113 - DNA, 15 bp, Homo sapiens
taattaaaaataata

SEQ ID NO: 1781114 - DNA, 15 bp, Homo sapiens
aattaaaaataataa

SEQ ID NO: 1781115 - DNA, 15 bp, Homo sapiens
attaaaaataataat

SEQ ID NO: 1781116 - DNA, 15 bp, Homo sapiens
ttaaaaataataata

SEQ ID NO: 1781117 - DNA, 15 bp, Homo sapiens
taaaaataataataa

SEQ ID NO: 1781118 - DNA, 15 bp, Homo sapiens
aataataaaataaat

SEQ ID NO: 1781119 - DNA, 15 bp, Homo sapiens
ataataaaataaata

SEQ ID NO: 1781120 - DNA, 15 bp, Homo sapiens
aataaaataaataat

SEQ ID NO: 1781121 - DNA, 15 bp, Homo sapiens
ataaaataaataata

SEQ ID NO: 1781122 - DNA, 15 bp, Homo sapiens
taaaataaataataa

SEQ ID NO: 1781123 - DNA, 15 bp, Homo sapiens
aaaataaataataaa

SEQ ID NO: 1781124 - DNA, 15 bp, Homo sapiens
aaataaataataaaa

SEQ ID NO: 1781125 - DNA, 15 bp, Homo sapiens
ataaataataaaata

SEQ ID NO: 1781126 - DNA, 15 bp, Homo sapiens
taaataataaaataa

SEQ ID NO: 1781127 - DNA, 15 bp, Homo sapiens
aaataataaaataaa

SEQ ID NO: 1781128 - DNA, 15 bp, Homo sapiens
ataaaataaataaaa

SEQ ID NO: 1781129 - DNA, 15 bp, Homo sapiens
taaaataaataaaat

SEQ ID NO: 1781130 - DNA, 15 bp, Homo sapiens
aaaataaataaaata

SEQ ID NO: 1781131 - DNA, 15 bp, Homo sapiens
aataaataaaataat

SEQ ID NO: 1781132 - DNA, 15 bp, Homo sapiens
ataaataaaataata

SEQ ID NO: 1781133 - DNA, 15 bp, Homo sapiens
taaataaaataataa

SEQ ID NO: 1781134 - DNA, 15 bp, Homo sapiens
aaataaaataataat

SEQ ID NO: 1781135 - DNA, 15 bp, Homo sapiens
aataaaataataata

SEQ ID NO: 1781136 - DNA, 15 bp, Homo sapiens
ataaaataataataa

SEQ ID NO: 1781137 - DNA, 15 bp, Homo sapiens
taaaataataataat

SEQ ID NO: 1781138 - DNA, 15 bp, Homo sapiens
aaaataataataatt

SEQ ID NO: 1781139 - DNA, 15 bp, Homo sapiens
aaataataataattt

SEQ ID NO: 1781140 - DNA, 15 bp, Homo sapiens
aataataataattta

SEQ ID NO: 1781141 - DNA, 15 bp, Homo sapiens
ataataataatttaa

SEQ ID NO: 1781142 - DNA, 15 bp, Homo sapiens
taataataatttaaa

SEQ ID NO: 1781143 - DNA, 15 bp, Homo sapiens
aataataatttaaaa

SEQ ID NO: 1781144 - DNA, 15 bp, Homo sapiens
ataataatttaaaaa

SEQ ID NO: 1781145 - DNA, 15 bp, Homo sapiens
taataatttaaaaag

SEQ ID NO: 1781146 - DNA, 15 bp, Homo sapiens
aataatttaaaaaga

SEQ ID NO: 1781147 - DNA, 15 bp, Homo sapiens
ataatttaaaaagaa

SEQ ID NO: 1781148 - DNA, 15 bp, Homo sapiens
taatttaaaaagaaa

SEQ ID NO: 1781149 - DNA, 15 bp, Homo sapiens
aatttaaaaagaaat

SEQ ID NO: 1781150 - DNA, 15 bp, Homo sapiens
atttaaaaagaaatt

SEQ ID NO: 1781151 - DNA, 15 bp, Homo sapiens
ttaaaaagaaattat

SEQ ID NO: 1781152 - DNA, 15 bp, Homo sapiens
taaaaagaaattatc

SEQ ID NO: 1781153 - DNA, 15 bp, Homo sapiens
aaaaagaaattatcc

SEQ ID NO: 1781154 - DNA, 15 bp, Homo sapiens
aaaagaaattatccc

SEQ ID NO: 1781155 - DNA, 15 bp, Homo sapiens
aaagaaattatccct

SEQ ID NO: 1781156 - DNA, 15 bp, Homo sapiens
aagaaattatccctt

SEQ ID NO: 1781157 - DNA, 15 bp, Homo sapiens
agaaattatcccttt

SEQ ID NO: 1781158 - DNA, 15 bp, Homo sapiens
gaaattatcccttta

SEQ ID NO: 1781159 - DNA, 15 bp, Homo sapiens
aaattatccctttaa

SEQ ID NO: 1781160 - DNA, 15 bp, Homo sapiens
aattatccctttaag

SEQ ID NO: 1781161 - DNA, 15 bp, Homo sapiens
attatccctttaaga

SEQ ID NO: 1781162 - DNA, 15 bp, Homo sapiens
ttatccctttaagaa

SEQ ID NO: 1781163 - DNA, 15 bp, Homo sapiens
tatccctttaagaaa

SEQ ID NO: 1781164 - DNA, 15 bp, Homo sapiens
atccctttaagaaaa

SEQ ID NO: 1781165 - DNA, 15 bp, Homo sapiens
tccctttaagaaaag

SEQ ID NO: 1781166 - DNA, 15 bp, Homo sapiens
ccctttaagaaaagc

SEQ ID NO: 1781167 - DNA, 15 bp, Homo sapiens
cctttaagaaaagcc

SEQ ID NO: 1781168 - DNA, 15 bp, Homo sapiens
ctttaagaaaagcca

SEQ ID NO: 1781169 - DNA, 15 bp, Homo sapiens
tttaagaaaagccat

SEQ ID NO: 1781170 - DNA, 15 bp, Homo sapiens
ttaagaaaagccatc

SEQ ID NO: 1781171 - DNA, 15 bp, Homo sapiens
taagaaaagccatct

SEQ ID NO: 1781172 - DNA, 15 bp, Homo sapiens
aagaaaagccatctg

SEQ ID NO: 1781173 - DNA, 15 bp, Homo sapiens
agaaaagccatctgg

SEQ ID NO: 1781174 - DNA, 15 bp, Homo sapiens
gaaaagccatctggg

SEQ ID NO: 1781175 - DNA, 15 bp, Homo sapiens
aaaagccatctgggt

SEQ ID NO: 1781176 - DNA, 15 bp, Homo sapiens
aaagccatctgggtc

SEQ ID NO: 1781177 - DNA, 15 bp, Homo sapiens
aagccatctgggtca

SEQ ID NO: 1781178 - DNA, 15 bp, Homo sapiens
agccatctgggtcac

SEQ ID NO: 1781179 - DNA, 15 bp, Homo sapiens
gccatctgggtcact

SEQ ID NO: 1781180 - DNA, 15 bp, Homo sapiens
ccatctgggtcactt

SEQ ID NO: 1781181 - DNA, 15 bp, Homo sapiens
catctgggtcacttt

SEQ ID NO: 1781182 - DNA, 15 bp, Homo sapiens
atctgggtcactttc

SEQ ID NO: 1781183 - DNA, 15 bp, Homo sapiens
tctgggtcactttcc

SEQ ID NO: 1781184 - DNA, 15 bp, Homo sapiens
ctgggtcactttcct

SEQ ID NO: 1781185 - DNA, 15 bp, Homo sapiens
tgggtcactttcctg

SEQ ID NO: 1781186 - DNA, 15 bp, Homo sapiens
gggtcactttcctgg

SEQ ID NO: 1781187 - DNA, 15 bp, Homo sapiens
ggtcactttcctggt

SEQ ID NO: 1781188 - DNA, 15 bp, Homo sapiens
gtcactttcctggtc

SEQ ID NO: 1781189 - DNA, 15 bp, Homo sapiens
tcactttcctggtca

SEQ ID NO: 1781190 - DNA, 15 bp, Homo sapiens
cactttcctggtcaa

SEQ ID NO: 1781191 - DNA, 15 bp, Homo sapiens
actttcctggtcaag

SEQ ID NO: 1781192 - DNA, 15 bp, Homo sapiens
ctttcctggtcaaga

SEQ ID NO: 1781193 - DNA, 15 bp, Homo sapiens
tttcctggtcaagac

SEQ ID NO: 1781194 - DNA, 15 bp, Homo sapiens
ttcctggtcaagaca

SEQ ID NO: 1781195 - DNA, 15 bp, Homo sapiens
tcctggtcaagacac

SEQ ID NO: 1781196 - DNA, 15 bp, Homo sapiens
cctggtcaagacaca

SEQ ID NO: 1781197 - DNA, 15 bp, Homo sapiens
ctggtcaagacacaa

SEQ ID NO: 1781198 - DNA, 15 bp, Homo sapiens
tggtcaagacacaag

SEQ ID NO: 1781199 - DNA, 15 bp, Homo sapiens
ggtcaagacacaaga

SEQ ID NO: 1781200 - DNA, 15 bp, Homo sapiens
gtcaagacacaagag

SEQ ID NO: 1781201 - DNA, 15 bp, Homo sapiens
tcaagacacaagaga

SEQ ID NO: 1781202 - DNA, 15 bp, Homo sapiens
caagacacaagagac

SEQ ID NO: 1781203 - DNA, 15 bp, Homo sapiens
aagacacaagagact

SEQ ID NO: 1781204 - DNA, 15 bp, Homo sapiens
agacacaagagactg

SEQ ID NO: 1781205 - DNA, 15 bp, Homo sapiens
gacacaagagactga

SEQ ID NO: 1781206 - DNA, 15 bp, Homo sapiens
acacaagagactgag

SEQ ID NO: 1781207 - DNA, 15 bp, Homo sapiens
cacaagagactgagt

SEQ ID NO: 1781208 - DNA, 15 bp, Homo sapiens
acaagagactgagta

SEQ ID NO: 1781209 - DNA, 15 bp, Homo sapiens
caagagactgagtag

SEQ ID NO: 1781210 - DNA, 15 bp, Homo sapiens
aagagactgagtaga

SEQ ID NO: 1781211 - DNA, 15 bp, Homo sapiens
agagactgagtagaa

SEQ ID NO: 1781212 - DNA, 15 bp, Homo sapiens
gagactgagtagaac

SEQ ID NO: 1781213 - DNA, 15 bp, Homo sapiens
agactgagtagaaca

SEQ ID NO: 1781214 - DNA, 15 bp, Homo sapiens
gactgagtagaacaa

SEQ ID NO: 1781215 - DNA, 15 bp, Homo sapiens
actgagtagaacaat

SEQ ID NO: 1781216 - DNA, 15 bp, Homo sapiens
ctgagtagaacaata

SEQ ID NO: 1781217 - DNA, 15 bp, Homo sapiens
tgagtagaacaataa

SEQ ID NO: 1781218 - DNA, 15 bp, Homo sapiens
gagtagaacaataat

SEQ ID NO: 1781219 - DNA, 15 bp, Homo sapiens
agtagaacaataatc

SEQ ID NO: 1781220 - DNA, 15 bp, Homo sapiens
gtagaacaataatca

SEQ ID NO: 1781221 - DNA, 15 bp, Homo sapiens
tagaacaataatcag

SEQ ID NO: 1781222 - DNA, 15 bp, Homo sapiens
agaacaataatcaga

SEQ ID NO: 1781223 - DNA, 15 bp, Homo sapiens
gaacaataatcagat

SEQ ID NO: 1781224 - DNA, 15 bp, Homo sapiens
aacaataatcagatg

SEQ ID NO: 1781225 - DNA, 15 bp, Homo sapiens
acaataatcagatga

SEQ ID NO: 1781226 - DNA, 15 bp, Homo sapiens
caataatcagatgag

SEQ ID NO: 1781227 - DNA, 15 bp, Homo sapiens
aataatcagatgaga

SEQ ID NO: 1781228 - DNA, 15 bp, Homo sapiens
ataatcagatgagac

SEQ ID NO: 1781229 - DNA, 15 bp, Homo sapiens
taatcagatgagaca

SEQ ID NO: 1781230 - DNA, 15 bp, Homo sapiens
aatcagatgagacaa

SEQ ID NO: 1781231 - DNA, 15 bp, Homo sapiens
atcagatgagacaac

SEQ ID NO: 1781232 - DNA, 15 bp, Homo sapiens
tcagatgagacaaca

SEQ ID NO: 1781233 - DNA, 15 bp, Homo sapiens
cagatgagacaacat

SEQ ID NO: 1781234 - DNA, 15 bp, Homo sapiens
agatgagacaacatt

SEQ ID NO: 1781235 - DNA, 15 bp, Homo sapiens
gatgagacaacattg

SEQ ID NO: 1781236 - DNA, 15 bp, Homo sapiens
atgagacaacattgg

SEQ ID NO: 1781237 - DNA, 15 bp, Homo sapiens
tgagacaacattggc

SEQ ID NO: 1781238 - DNA, 15 bp, Homo sapiens
gagacaacattggct

SEQ ID NO: 1781239 - DNA, 15 bp, Homo sapiens
agacaacattggcta

SEQ ID NO: 1781240 - DNA, 15 bp, Homo sapiens
gacaacattggctaa

SEQ ID NO: 1781241 - DNA, 15 bp, Homo sapiens
acaacattggctaaa

SEQ ID NO: 1781242 - DNA, 15 bp, Homo sapiens
caacattggctaaat

SEQ ID NO: 1781243 - DNA, 15 bp, Homo sapiens
aacattggctaaatc

SEQ ID NO: 1781244 - DNA, 15 bp, Homo sapiens
acattggctaaatca

SEQ ID NO: 1781245 - DNA, 15 bp, Homo sapiens
cattggctaaatcaa

SEQ ID NO: 1781246 - DNA, 15 bp, Homo sapiens
attggctaaatcaat

SEQ ID NO: 1781247 - DNA, 15 bp, Homo sapiens
ttggctaaatcaatc

SEQ ID NO: 1781248 - DNA, 15 bp, Homo sapiens
tggctaaatcaatca

SEQ ID NO: 1781249 - DNA, 15 bp, Homo sapiens
ggctaaatcaatcac

SEQ ID NO: 1781250 - DNA, 15 bp, Homo sapiens
gctaaatcaatcact

SEQ ID NO: 1781251 - DNA, 15 bp, Homo sapiens
ctaaatcaatcactc

SEQ ID NO: 1781252 - DNA, 15 bp, Homo sapiens
taaatcaatcactca

SEQ ID NO: 1781253 - DNA, 15 bp, Homo sapiens
aaatcaatcactcaa

SEQ ID NO: 1781254 - DNA, 15 bp, Homo sapiens
aatcaatcactcaat

SEQ ID NO: 1781255 - DNA, 15 bp, Homo sapiens
atcaatcactcaata

SEQ ID NO: 1781256 - DNA, 15 bp, Homo sapiens
tcaatcactcaataa

SEQ ID NO: 1781257 - DNA, 15 bp, Homo sapiens
caatcactcaataaa

SEQ ID NO: 1781258 - DNA, 15 bp, Homo sapiens
aatcactcaataaat

SEQ ID NO: 1781259 - DNA, 15 bp, Homo sapiens
atcactcaataaatg

SEQ ID NO: 1781260 - DNA, 15 bp, Homo sapiens
tcactcaataaatga

SEQ ID NO: 1781261 - DNA, 15 bp, Homo sapiens
cactcaataaatgat

SEQ ID NO: 1781262 - DNA, 15 bp, Homo sapiens
actcaataaatgata

SEQ ID NO: 1781263 - DNA, 15 bp, Homo sapiens
ctcaataaatgatat

SEQ ID NO: 1781264 - DNA, 15 bp, Homo sapiens
tcaataaatgatata

SEQ ID NO: 1781265 - DNA, 15 bp, Homo sapiens
caataaatgatataa

SEQ ID NO: 1781266 - DNA, 15 bp, Homo sapiens
aataaatgatataaa

SEQ ID NO: 1781267 - DNA, 15 bp, Homo sapiens
ataaatgatataaaa

SEQ ID NO: 1781268 - DNA, 15 bp, Homo sapiens
taaatgatataaaaa

SEQ ID NO: 1781269 - DNA, 15 bp, Homo sapiens
aaatgatataaaaaa

SEQ ID NO: 1781270 - DNA, 15 bp, Homo sapiens
aatgatataaaaaat

SEQ ID NO: 1781271 - DNA, 15 bp, Homo sapiens
atgatataaaaaata

SEQ ID NO: 1781272 - DNA, 15 bp, Homo sapiens
tgatataaaaaatat

SEQ ID NO: 1781273 - DNA, 15 bp, Homo sapiens
gatataaaaaatatc

SEQ ID NO: 1781274 - DNA, 15 bp, Homo sapiens
atataaaaaatatct

SEQ ID NO: 1781275 - DNA, 15 bp, Homo sapiens
tataaaaaatatctt

SEQ ID NO: 1781276 - DNA, 15 bp, Homo sapiens
ataaaaaatatctta

SEQ ID NO: 1781277 - DNA, 15 bp, Homo sapiens
taaaaaatatcttag

SEQ ID NO: 1781278 - DNA, 15 bp, Homo sapiens
aaaaaatatcttagc

SEQ ID NO: 1781279 - DNA, 15 bp, Homo sapiens
aaaaatatcttagca

SEQ ID NO: 1781280 - DNA, 15 bp, Homo sapiens
aaaatatcttagcag

SEQ ID NO: 1781281 - DNA, 15 bp, Homo sapiens
aaatatcttagcagt

SEQ ID NO: 1781282 - DNA, 15 bp, Homo sapiens
aatatcttagcagta

SEQ ID NO: 1781283 - DNA, 15 bp, Homo sapiens
atatcttagcagtac

SEQ ID NO: 1781284 - DNA, 15 bp, Homo sapiens
tatcttagcagtacc

SEQ ID NO: 1781285 - DNA, 15 bp, Homo sapiens
atcttagcagtacct

SEQ ID NO: 1781286 - DNA, 15 bp, Homo sapiens
tcttagcagtacctt

SEQ ID NO: 1781287 - DNA, 15 bp, Homo sapiens
cttagcagtaccttt

SEQ ID NO: 1781288 - DNA, 15 bp, Homo sapiens
ttagcagtacctttt

SEQ ID NO: 1781289 - DNA, 15 bp, Homo sapiens
tagcagtaccttttg

SEQ ID NO: 1781290 - DNA, 15 bp, Homo sapiens
agcagtaccttttgt

SEQ ID NO: 1781291 - DNA, 15 bp, Homo sapiens
gcagtaccttttgtc

SEQ ID NO: 1781292 - DNA, 15 bp, Homo sapiens
cagtaccttttgtca

SEQ ID NO: 1781293 - DNA, 15 bp, Homo sapiens
agtaccttttgtcaa

SEQ ID NO: 1781294 - DNA, 15 bp, Homo sapiens
gtaccttttgtcaat

SEQ ID NO: 1781295 - DNA, 15 bp, Homo sapiens
taccttttgtcaatg

SEQ ID NO: 1781296 - DNA, 15 bp, Homo sapiens
accttttgtcaatgc

SEQ ID NO: 1781297 - DNA, 15 bp, Homo sapiens
ccttttgtcaatgcc

SEQ ID NO: 1781298 - DNA, 15 bp, Homo sapiens
cttttgtcaatgcca

SEQ ID NO: 1781299 - DNA, 15 bp, Homo sapiens
ttttgtcaatgccaa

SEQ ID NO: 1781300 - DNA, 15 bp, Homo sapiens
tttgtcaatgccaaa

SEQ ID NO: 1781301 - DNA, 15 bp, Homo sapiens
ttgtcaatgccaaat

SEQ ID NO: 1781302 - DNA, 15 bp, Homo sapiens
tgtcaatgccaaatg

SEQ ID NO: 1781303 - DNA, 15 bp, Homo sapiens
gtcaatgccaaatgc

SEQ ID NO: 1781304 - DNA, 15 bp, Homo sapiens
tcaatgccaaatgcc

SEQ ID NO: 1781305 - DNA, 15 bp, Homo sapiens
caatgccaaatgcca

SEQ ID NO: 1781306 - DNA, 15 bp, Homo sapiens
aatgccaaatgccaa

SEQ ID NO: 1781307 - DNA, 15 bp, Homo sapiens
atgccaaatgccaac

SEQ ID NO: 1781308 - DNA, 15 bp, Homo sapiens
tgccaaatgccaact

SEQ ID NO: 1781309 - DNA, 15 bp, Homo sapiens
gccaaatgccaactg

SEQ ID NO: 1781310 - DNA, 15 bp, Homo sapiens
ccaaatgccaactgg

SEQ ID NO: 1781311 - DNA, 15 bp, Homo sapiens
caaatgccaactggt

SEQ ID NO: 1781312 - DNA, 15 bp, Homo sapiens
aaatgccaactggtt

SEQ ID NO: 1781313 - DNA, 15 bp, Homo sapiens
aatgccaactggttg

SEQ ID NO: 1781314 - DNA, 15 bp, Homo sapiens
atgccaactggttga

SEQ ID NO: 1781315 - DNA, 15 bp, Homo sapiens
tgccaactggttgat

SEQ ID NO: 1781316 - DNA, 15 bp, Homo sapiens
gccaactggttgata

SEQ ID NO: 1781317 - DNA, 15 bp, Homo sapiens
ccaactggttgataa

SEQ ID NO: 1781318 - DNA, 15 bp, Homo sapiens
caactggttgataac

SEQ ID NO: 1781319 - DNA, 15 bp, Homo sapiens
aactggttgataact

SEQ ID NO: 1781320 - DNA, 15 bp, Homo sapiens
actggttgataactc

SEQ ID NO: 1781321 - DNA, 15 bp, Homo sapiens
ctggttgataactcc

SEQ ID NO: 1781322 - DNA, 15 bp, Homo sapiens
tggttgataactcca

SEQ ID NO: 1781323 - DNA, 15 bp, Homo sapiens
ggttgataactccac

SEQ ID NO: 1781324 - DNA, 15 bp, Homo sapiens
gttgataactccacg

SEQ ID NO: 1781325 - DNA, 15 bp, Homo sapiens
ttgataactccacgt

SEQ ID NO: 1781326 - DNA, 15 bp, Homo sapiens
tgataactccacgta

SEQ ID NO: 1781327 - DNA, 15 bp, Homo sapiens
gataactccacgtat

SEQ ID NO: 1781328 - DNA, 15 bp, Homo sapiens
ataactccacgtatt

SEQ ID NO: 1781329 - DNA, 15 bp, Homo sapiens
taactccacgtattt

SEQ ID NO: 1781330 - DNA, 15 bp, Homo sapiens
aactccacgtatttt

SEQ ID NO: 1781331 - DNA, 15 bp, Homo sapiens
actccacgtattttt

SEQ ID NO: 1781332 - DNA, 15 bp, Homo sapiens
ctccacgtattttta

SEQ ID NO: 1781333 - DNA, 15 bp, Homo sapiens
tccacgtatttttag

SEQ ID NO: 1781334 - DNA, 15 bp, Homo sapiens
ccacgtatttttagt

SEQ ID NO: 1781335 - DNA, 15 bp, Homo sapiens
cacgtatttttagta

SEQ ID NO: 1781336 - DNA, 15 bp, Homo sapiens
acgtatttttagtaa

SEQ ID NO: 1781337 - DNA, 15 bp, Homo sapiens
cgtatttttagtaat

SEQ ID NO: 1781338 - DNA, 15 bp, Homo sapiens
gtatttttagtaata

SEQ ID NO: 1781339 - DNA, 15 bp, Homo sapiens
tatttttagtaatag

SEQ ID NO: 1781340 - DNA, 15 bp, Homo sapiens
atttttagtaataga

SEQ ID NO: 1781341 - DNA, 15 bp, Homo sapiens
tttttagtaatagag

SEQ ID NO: 1781342 - DNA, 15 bp, Homo sapiens
ttttagtaatagagc

SEQ ID NO: 1781343 - DNA, 15 bp, Homo sapiens
tttagtaatagagct

SEQ ID NO: 1781344 - DNA, 15 bp, Homo sapiens
ttagtaatagagctt

SEQ ID NO: 1781345 - DNA, 15 bp, Homo sapiens
tagtaatagagcttc

SEQ ID NO: 1781346 - DNA, 15 bp, Homo sapiens
agtaatagagcttct

SEQ ID NO: 1781347 - DNA, 15 bp, Homo sapiens
gtaatagagcttctg

SEQ ID NO: 1781348 - DNA, 15 bp, Homo sapiens
taatagagcttctga

SEQ ID NO: 1781349 - DNA, 15 bp, Homo sapiens
aatagagcttctgat

SEQ ID NO: 1781350 - DNA, 15 bp, Homo sapiens
atagagcttctgatt

SEQ ID NO: 1781351 - DNA, 15 bp, Homo sapiens
tagagcttctgattt

SEQ ID NO: 1781352 - DNA, 15 bp, Homo sapiens
agagcttctgattta

SEQ ID NO: 1781353 - DNA, 15 bp, Homo sapiens
gagcttctgatttac

SEQ ID NO: 1781354 - DNA, 15 bp, Homo sapiens
agcttctgatttact

SEQ ID NO: 1781355 - DNA, 15 bp, Homo sapiens
gcttctgatttactg

SEQ ID NO: 1781356 - DNA, 15 bp, Homo sapiens
cttctgatttactgg

SEQ ID NO: 1781357 - DNA, 15 bp, Homo sapiens
ttctgatttactggt

SEQ ID NO: 1781358 - DNA, 15 bp, Homo sapiens
tctgatttactggta

SEQ ID NO: 1781359 - DNA, 15 bp, Homo sapiens
ctgatttactggtaa

SEQ ID NO: 1781360 - DNA, 15 bp, Homo sapiens
tgatttactggtaaa

SEQ ID NO: 1781361 - DNA, 15 bp, Homo sapiens
gatttactggtaaac

SEQ ID NO: 1781362 - DNA, 15 bp, Homo sapiens
atttactggtaaact

SEQ ID NO: 1781363 - DNA, 15 bp, Homo sapiens
tttactggtaaactt

SEQ ID NO: 1781364 - DNA, 15 bp, Homo sapiens
ttactggtaaacttt

SEQ ID NO: 1781365 - DNA, 15 bp, Homo sapiens
tactggtaaacttta

SEQ ID NO: 1781366 - DNA, 15 bp, Homo sapiens
actggtaaactttaa

SEQ ID NO: 1781367 - DNA, 15 bp, Homo sapiens
ctggtaaactttaaa

SEQ ID NO: 1781368 - DNA, 15 bp, Homo sapiens
tggtaaactttaaac

SEQ ID NO: 1781369 - DNA, 15 bp, Homo sapiens
ggtaaactttaaaca

SEQ ID NO: 1781370 - DNA, 15 bp, Homo sapiens
gtaaactttaaacaa

SEQ ID NO: 1781371 - DNA, 15 bp, Homo sapiens
taaactttaaacaaa

SEQ ID NO: 1781372 - DNA, 15 bp, Homo sapiens
aaactttaaacaaat

SEQ ID NO: 1781373 - DNA, 15 bp, Homo sapiens
aactttaaacaaatc

SEQ ID NO: 1781374 - DNA, 15 bp, Homo sapiens
actttaaacaaatca

SEQ ID NO: 1781375 - DNA, 15 bp, Homo sapiens
ctttaaacaaatcag

SEQ ID NO: 1781376 - DNA, 15 bp, Homo sapiens
tttaaacaaatcagg

SEQ ID NO: 1781377 - DNA, 15 bp, Homo sapiens
ttaaacaaatcagga

SEQ ID NO: 1781378 - DNA, 15 bp, Homo sapiens
taaacaaatcaggag

SEQ ID NO: 1781379 - DNA, 15 bp, Homo sapiens
aaacaaatcaggaga

SEQ ID NO: 1781380 - DNA, 15 bp, Homo sapiens
aacaaatcaggagaa

SEQ ID NO: 1781381 - DNA, 15 bp, Homo sapiens
acaaatcaggagaac

SEQ ID NO: 1781382 - DNA, 15 bp, Homo sapiens
caaatcaggagaaca

SEQ ID NO: 1781383 - DNA, 15 bp, Homo sapiens
aaatcaggagaacaa

SEQ ID NO: 1781384 - DNA, 15 bp, Homo sapiens
aatcaggagaacaaa

SEQ ID NO: 1781385 - DNA, 15 bp, Homo sapiens
atcaggagaacaaat

SEQ ID NO: 1781386 - DNA, 15 bp, Homo sapiens
tcaggagaacaaatt

SEQ ID NO: 1781387 - DNA, 15 bp, Homo sapiens
caggagaacaaatta

SEQ ID NO: 1781388 - DNA, 15 bp, Homo sapiens
aggagaacaaattac

SEQ ID NO: 1781389 - DNA, 15 bp, Homo sapiens
ggagaacaaattaca

SEQ ID NO: 1781390 - DNA, 15 bp, Homo sapiens
gagaacaaattacat

SEQ ID NO: 1781391 - DNA, 15 bp, Homo sapiens
agaacaaattacatg

SEQ ID NO: 1781392 - DNA, 15 bp, Homo sapiens
gaacaaattacatgc

SEQ ID NO: 1781393 - DNA, 15 bp, Homo sapiens
aacaaattacatgct

SEQ ID NO: 1781394 - DNA, 15 bp, Homo sapiens
acaaattacatgctc

SEQ ID NO: 1781395 - DNA, 15 bp, Homo sapiens
caaattacatgctct

SEQ ID NO: 1781396 - DNA, 15 bp, Homo sapiens
aaattacatgctcta

SEQ ID NO: 1781397 - DNA, 15 bp, Homo sapiens
aattacatgctctat

SEQ ID NO: 1781398 - DNA, 15 bp, Homo sapiens
attacatgctctatt

SEQ ID NO: 1781399 - DNA, 15 bp, Homo sapiens
ttacatgctctattt

SEQ ID NO: 1781400 - DNA, 15 bp, Homo sapiens
tacatgctctatttt

SEQ ID NO: 1781401 - DNA, 15 bp, Homo sapiens
acatgctctattttc

SEQ ID NO: 1781402 - DNA, 15 bp, Homo sapiens
catgctctattttcc

SEQ ID NO: 1781403 - DNA, 15 bp, Homo sapiens
atgctctattttcca

SEQ ID NO: 1781404 - DNA, 15 bp, Homo sapiens
tgctctattttccaa

SEQ ID NO: 1781405 - DNA, 15 bp, Homo sapiens
gctctattttccaat

SEQ ID NO: 1781406 - DNA, 15 bp, Homo sapiens
ctctattttccaatc

SEQ ID NO: 1781407 - DNA, 15 bp, Homo sapiens
tctattttccaatca

SEQ ID NO: 1781408 - DNA, 15 bp, Homo sapiens
ctattttccaatcac

SEQ ID NO: 1781409 - DNA, 15 bp, Homo sapiens
tattttccaatcaca

SEQ ID NO: 1781410 - DNA, 15 bp, Homo sapiens
attttccaatcacag

SEQ ID NO: 1781411 - DNA, 15 bp, Homo sapiens
ttttccaatcacaga

SEQ ID NO: 1781412 - DNA, 15 bp, Homo sapiens
tttccaatcacagaa

SEQ ID NO: 1781413 - DNA, 15 bp, Homo sapiens
ttccaatcacagaaa

SEQ ID NO: 1781414 - DNA, 15 bp, Homo sapiens
tccaatcacagaaac

SEQ ID NO: 1781415 - DNA, 15 bp, Homo sapiens
ccaatcacagaaaca

SEQ ID NO: 1781416 - DNA, 15 bp, Homo sapiens
caatcacagaaacag

SEQ ID NO: 1781417 - DNA, 15 bp, Homo sapiens
aatcacagaaacagg

SEQ ID NO: 1781418 - DNA, 15 bp, Homo sapiens
atcacagaaacaggt

SEQ ID NO: 1781419 - DNA, 15 bp, Homo sapiens
tcacagaaacaggta

SEQ ID NO: 1781420 - DNA, 15 bp, Homo sapiens
cacagaaacaggtaa

SEQ ID NO: 1781421 - DNA, 15 bp, Homo sapiens
acagaaacaggtaaa

SEQ ID NO: 1781422 - DNA, 15 bp, Homo sapiens
cagaaacaggtaaaa

SEQ ID NO: 1781423 - DNA, 15 bp, Homo sapiens
agaaacaggtaaaat

SEQ ID NO: 1781424 - DNA, 15 bp, Homo sapiens
gaaacaggtaaaata

SEQ ID NO: 1781425 - DNA, 15 bp, Homo sapiens
aaacaggtaaaataa

SEQ ID NO: 1781426 - DNA, 15 bp, Homo sapiens
aacaggtaaaataaa

SEQ ID NO: 1781427 - DNA, 15 bp, Homo sapiens
acaggtaaaataaat

SEQ ID NO: 1781428 - DNA, 15 bp, Homo sapiens
caggtaaaataaata

SEQ ID NO: 1781429 - DNA, 15 bp, Homo sapiens
aggtaaaataaatat

SEQ ID NO: 1781430 - DNA, 15 bp, Homo sapiens
ggtaaaataaatatg

SEQ ID NO: 1781431 - DNA, 15 bp, Homo sapiens
gtaaaataaatatgg

SEQ ID NO: 1781432 - DNA, 15 bp, Homo sapiens
taaaataaatatggc

SEQ ID NO: 1781433 - DNA, 15 bp, Homo sapiens
aaaataaatatggct

SEQ ID NO: 1781434 - DNA, 15 bp, Homo sapiens
aaataaatatggctt

SEQ ID NO: 1781435 - DNA, 15 bp, Homo sapiens
aataaatatggcttt

SEQ ID NO: 1781436 - DNA, 15 bp, Homo sapiens
ataaatatggctttg

SEQ ID NO: 1781437 - DNA, 15 bp, Homo sapiens
taaatatggctttga

SEQ ID NO: 1781438 - DNA, 15 bp, Homo sapiens
aaatatggctttgaa

SEQ ID NO: 1781439 - DNA, 15 bp, Homo sapiens
aatatggctttgaac

SEQ ID NO: 1781440 - DNA, 15 bp, Homo sapiens
atatggctttgaaca

SEQ ID NO: 1781441 - DNA, 15 bp, Homo sapiens
tatggctttgaacaa

SEQ ID NO: 1781442 - DNA, 15 bp, Homo sapiens
atggctttgaacaaa

SEQ ID NO: 1781443 - DNA, 15 bp, Homo sapiens
tggctttgaacaaat

SEQ ID NO: 1781444 - DNA, 15 bp, Homo sapiens
ggctttgaacaaata

SEQ ID NO: 1781445 - DNA, 15 bp, Homo sapiens
gctttgaacaaatac

SEQ ID NO: 1781446 - DNA, 15 bp, Homo sapiens
ctttgaacaaataca

SEQ ID NO: 1781447 - DNA, 15 bp, Homo sapiens
tttgaacaaatacag

SEQ ID NO: 1781448 - DNA, 15 bp, Homo sapiens
ttgaacaaatacaga

SEQ ID NO: 1781449 - DNA, 15 bp, Homo sapiens
tgaacaaatacagat

SEQ ID NO: 1781450 - DNA, 15 bp, Homo sapiens
gaacaaatacagatt

SEQ ID NO: 1781451 - DNA, 15 bp, Homo sapiens
aacaaatacagatta

SEQ ID NO: 1781452 - DNA, 15 bp, Homo sapiens
acaaatacagattac

SEQ ID NO: 1781453 - DNA, 15 bp, Homo sapiens
caaatacagattaca

SEQ ID NO: 1781454 - DNA, 15 bp, Homo sapiens
aaatacagattacaa

SEQ ID NO: 1781455 - DNA, 15 bp, Homo sapiens
aatacagattacaaa

SEQ ID NO: 1781456 - DNA, 15 bp, Homo sapiens
atacagattacaaag

SEQ ID NO: 1781457 - DNA, 15 bp, Homo sapiens
tacagattacaaaga

SEQ ID NO: 1781458 - DNA, 15 bp, Homo sapiens
acagattacaaagag

SEQ ID NO: 1781459 - DNA, 15 bp, Homo sapiens
cagattacaaagaga

SEQ ID NO: 1781460 - DNA, 15 bp, Homo sapiens
agattacaaagagaa

SEQ ID NO: 1781461 - DNA, 15 bp, Homo sapiens
gattacaaagagaat

SEQ ID NO: 1781462 - DNA, 15 bp, Homo sapiens
attacaaagagaatc

SEQ ID NO: 1781463 - DNA, 15 bp, Homo sapiens
ttacaaagagaatca

SEQ ID NO: 1781464 - DNA, 15 bp, Homo sapiens
tacaaagagaatcac

SEQ ID NO: 1781465 - DNA, 15 bp, Homo sapiens
acaaagagaatcact

SEQ ID NO: 1781466 - DNA, 15 bp, Homo sapiens
caaagagaatcactg

SEQ ID NO: 1781467 - DNA, 15 bp, Homo sapiens
aaagagaatcactgt

SEQ ID NO: 1781468 - DNA, 15 bp, Homo sapiens
aagagaatcactgtt

SEQ ID NO: 1781469 - DNA, 15 bp, Homo sapiens
agagaatcactgttt

SEQ ID NO: 1781470 - DNA, 15 bp, Homo sapiens
gagaatcactgtttt

SEQ ID NO: 1781471 - DNA, 15 bp, Homo sapiens
agaatcactgttttg

SEQ ID NO: 1781472 - DNA, 15 bp, Homo sapiens
gaatcactgttttgt

SEQ ID NO: 1781473 - DNA, 15 bp, Homo sapiens
aatcactgttttgtt

SEQ ID NO: 1781474 - DNA, 15 bp, Homo sapiens
atcactgttttgttg

SEQ ID NO: 1781475 - DNA, 15 bp, Homo sapiens
tcactgttttgttgc

SEQ ID NO: 1781476 - DNA, 15 bp, Homo sapiens
cactgttttgttgcc

SEQ ID NO: 1781477 - DNA, 15 bp, Homo sapiens
actgttttgttgccc

SEQ ID NO: 1781478 - DNA, 15 bp, Homo sapiens
ctgttttgttgccca

SEQ ID NO: 1781479 - DNA, 15 bp, Homo sapiens
tgttttgttgcccag

SEQ ID NO: 1781480 - DNA, 15 bp, Homo sapiens
gttttgttgcccagc

SEQ ID NO: 1781481 - DNA, 15 bp, Homo sapiens
ttttgttgcccagca

SEQ ID NO: 1781482 - DNA, 15 bp, Homo sapiens
tttgttgcccagcaa

SEQ ID NO: 1781483 - DNA, 15 bp, Homo sapiens
ttgttgcccagcaaa

SEQ ID NO: 1781484 - DNA, 15 bp, Homo sapiens
tgttgcccagcaaat

SEQ ID NO: 1781485 - DNA, 15 bp, Homo sapiens
gttgcccagcaaata

SEQ ID NO: 1781486 - DNA, 15 bp, Homo sapiens
ttgcccagcaaatac

SEQ ID NO: 1781487 - DNA, 15 bp, Homo sapiens
tgcccagcaaatact

SEQ ID NO: 1781488 - DNA, 15 bp, Homo sapiens
gcccagcaaatactt

SEQ ID NO: 1781489 - DNA, 15 bp, Homo sapiens
cccagcaaatacttc

SEQ ID NO: 1781490 - DNA, 15 bp, Homo sapiens
ccagcaaatacttct

SEQ ID NO: 1781491 - DNA, 15 bp, Homo sapiens
cagcaaatacttctg

SEQ ID NO: 1781492 - DNA, 15 bp, Homo sapiens
agcaaatacttctgt

SEQ ID NO: 1781493 - DNA, 15 bp, Homo sapiens
gcaaatacttctgtt

SEQ ID NO: 1781494 - DNA, 15 bp, Homo sapiens
caaatacttctgttt

SEQ ID NO: 1781495 - DNA, 15 bp, Homo sapiens
aaatacttctgtttg

SEQ ID NO: 1781496 - DNA, 15 bp, Homo sapiens
aatacttctgtttga

SEQ ID NO: 1781497 - DNA, 15 bp, Homo sapiens
atacttctgtttgag

SEQ ID NO: 1781498 - DNA, 15 bp, Homo sapiens
tacttctgtttgagt

SEQ ID NO: 1781499 - DNA, 15 bp, Homo sapiens
acttctgtttgagta

SEQ ID NO: 1781500 - DNA, 15 bp, Homo sapiens
cttctgtttgagtag

SEQ ID NO: 1781501 - DNA, 15 bp, Homo sapiens
ttctgtttgagtaga

SEQ ID NO: 1781502 - DNA, 15 bp, Homo sapiens
tctgtttgagtagac

SEQ ID NO: 1781503 - DNA, 15 bp, Homo sapiens
ctgtttgagtagaca

SEQ ID NO: 1781504 - DNA, 15 bp, Homo sapiens
tgtttgagtagacaa

SEQ ID NO: 1781505 - DNA, 15 bp, Homo sapiens
gtttgagtagacaaa

SEQ ID NO: 1781506 - DNA, 15 bp, Homo sapiens
tttgagtagacaaaa

SEQ ID NO: 1781507 - DNA, 15 bp, Homo sapiens
ttgagtagacaaaac

SEQ ID NO: 1781508 - DNA, 15 bp, Homo sapiens
tgagtagacaaaaca

SEQ ID NO: 1781509 - DNA, 15 bp, Homo sapiens
gagtagacaaaacaa

SEQ ID NO: 1781510 - DNA, 15 bp, Homo sapiens
agtagacaaaacaaa

SEQ ID NO: 1781511 - DNA, 15 bp, Homo sapiens
gtagacaaaacaaaa

SEQ ID NO: 1781512 - DNA, 15 bp, Homo sapiens
tagacaaaacaaaac

SEQ ID NO: 1781513 - DNA, 15 bp, Homo sapiens
agacaaaacaaaacc

SEQ ID NO: 1781514 - DNA, 15 bp, Homo sapiens
gacaaaacaaaacct

SEQ ID NO: 1781515 - DNA, 15 bp, Homo sapiens
acaaaacaaaacctg

SEQ ID NO: 1781516 - DNA, 15 bp, Homo sapiens
caaaacaaaacctga

SEQ ID NO: 1781517 - DNA, 15 bp, Homo sapiens
aaaacaaaacctgaa

SEQ ID NO: 1781518 - DNA, 15 bp, Homo sapiens
aaacaaaacctgaat

SEQ ID NO: 1781519 - DNA, 15 bp, Homo sapiens
aacaaaacctgaata

SEQ ID NO: 1781520 - DNA, 15 bp, Homo sapiens
acaaaacctgaataa

SEQ ID NO: 1781521 - DNA, 15 bp, Homo sapiens
caaaacctgaataaa

SEQ ID NO: 1781522 - DNA, 15 bp, Homo sapiens
aaaacctgaataaag

SEQ ID NO: 1781523 - DNA, 15 bp, Homo sapiens
aaacctgaataaaga

SEQ ID NO: 1781524 - DNA, 15 bp, Homo sapiens
aacctgaataaagaa

SEQ ID NO: 1781525 - DNA, 15 bp, Homo sapiens
acctgaataaagaaa

SEQ ID NO: 1781526 - DNA, 15 bp, Homo sapiens
cctgaataaagaaat

SEQ ID NO: 1781527 - DNA, 15 bp, Homo sapiens
ctgaataaagaaatc

SEQ ID NO: 1781528 - DNA, 15 bp, Homo sapiens
tgaataaagaaatct

SEQ ID NO: 1781529 - DNA, 15 bp, Homo sapiens
gaataaagaaatctt

SEQ ID NO: 1781530 - DNA, 15 bp, Homo sapiens
aataaagaaatcttg

SEQ ID NO: 1781531 - DNA, 15 bp, Homo sapiens
ataaagaaatcttgg

SEQ ID NO: 1781532 - DNA, 15 bp, Homo sapiens
taaagaaatcttggt

SEQ ID NO: 1781533 - DNA, 15 bp, Homo sapiens
aaagaaatcttggta

SEQ ID NO: 1781534 - DNA, 15 bp, Homo sapiens
aagaaatcttggtaa

SEQ ID NO: 1781535 - DNA, 15 bp, Homo sapiens
agaaatcttggtaac

SEQ ID NO: 1781536 - DNA, 15 bp, Homo sapiens
gaaatcttggtaact

SEQ ID NO: 1781537 - DNA, 15 bp, Homo sapiens
aaatcttggtaactt

SEQ ID NO: 1781538 - DNA, 15 bp, Homo sapiens
aatcttggtaacttt

SEQ ID NO: 1781539 - DNA, 15 bp, Homo sapiens
atcttggtaacttta

SEQ ID NO: 1781540 - DNA, 15 bp, Homo sapiens
tcttggtaactttaa

SEQ ID NO: 1781541 - DNA, 15 bp, Homo sapiens
ggtaactttaactcg

SEQ ID NO: 1781542 - DNA, 15 bp, Homo sapiens
gtaactttaactcgt

SEQ ID NO: 1781543 - DNA, 15 bp, Homo sapiens
taactttaactcgtt

SEQ ID NO: 1781544 - DNA, 15 bp, Homo sapiens
aactttaactcgttc

SEQ ID NO: 1781545 - DNA, 15 bp, Homo sapiens
actttaactcgttct

SEQ ID NO: 1781546 - DNA, 15 bp, Homo sapiens
ctttaactcgttctt

SEQ ID NO: 1781547 - DNA, 15 bp, Homo sapiens
tttaactcgttcttc

SEQ ID NO: 1781548 - DNA, 15 bp, Homo sapiens
ttaactcgttcttca

SEQ ID NO: 1781549 - DNA, 15 bp, Homo sapiens
taactcgttcttcaa

SEQ ID NO: 1781550 - DNA, 15 bp, Homo sapiens
aactcgttcttcaaa

SEQ ID NO: 1781551 - DNA, 15 bp, Homo sapiens
actcgttcttcaaac

SEQ ID NO: 1781552 - DNA, 15 bp, Homo sapiens
ctcgttcttcaaact

SEQ ID NO: 1781553 - DNA, 15 bp, Homo sapiens
tcgttcttcaaactt

SEQ ID NO: 1781554 - DNA, 15 bp, Homo sapiens
cgttcttcaaactta

SEQ ID NO: 1781555 - DNA, 15 bp, Homo sapiens
gttcttcaaacttaa

SEQ ID NO: 1781556 - DNA, 15 bp, Homo sapiens
ttcttcaaacttaat

SEQ ID NO: 1781557 - DNA, 15 bp, Homo sapiens
tcttcaaacttaatg

SEQ ID NO: 1781558 - DNA, 15 bp, Homo sapiens
cttcaaacttaatga

SEQ ID NO: 1781559 - DNA, 15 bp, Homo sapiens
ttcaaacttaatgag

SEQ ID NO: 1781560 - DNA, 15 bp, Homo sapiens
tcaaacttaatgagt

SEQ ID NO: 1781561 - DNA, 15 bp, Homo sapiens
caaacttaatgagta

SEQ ID NO: 1781562 - DNA, 15 bp, Homo sapiens
aaacttaatgagtac

SEQ ID NO: 1781563 - DNA, 15 bp, Homo sapiens
aacttaatgagtaca

SEQ ID NO: 1781564 - DNA, 15 bp, Homo sapiens
acttaatgagtacat

SEQ ID NO: 1781565 - DNA, 15 bp, Homo sapiens
cttaatgagtacatg

SEQ ID NO: 1781566 - DNA, 15 bp, Homo sapiens
ttaatgagtacatga

SEQ ID NO: 1781567 - DNA, 15 bp, Homo sapiens
taatgagtacatgat

SEQ ID NO: 1781568 - DNA, 15 bp, Homo sapiens
aatgagtacatgatg

SEQ ID NO: 1781569 - DNA, 15 bp, Homo sapiens
atgagtacatgatgt

SEQ ID NO: 1781570 - DNA, 15 bp, Homo sapiens
tgagtacatgatgtg

SEQ ID NO: 1781571 - DNA, 15 bp, Homo sapiens
gagtacatgatgtgg

SEQ ID NO: 1781572 - DNA, 15 bp, Homo sapiens
agtacatgatgtgga

SEQ ID NO: 1781573 - DNA, 15 bp, Homo sapiens
gtacatgatgtggaa

SEQ ID NO: 1781574 - DNA, 15 bp, Homo sapiens
tacatgatgtggaaa

SEQ ID NO: 1781575 - DNA, 15 bp, Homo sapiens
acatgatgtggaaag

SEQ ID NO: 1781576 - DNA, 15 bp, Homo sapiens
catgatgtggaaagg

SEQ ID NO: 1781577 - DNA, 15 bp, Homo sapiens
atgatgtggaaagga

SEQ ID NO: 1781578 - DNA, 15 bp, Homo sapiens
tgatgtggaaaggac

SEQ ID NO: 1781579 - DNA, 15 bp, Homo sapiens
gatgtggaaaggact

SEQ ID NO: 1781580 - DNA, 15 bp, Homo sapiens
atgtggaaaggactt

SEQ ID NO: 1781581 - DNA, 15 bp, Homo sapiens
tgtggaaaggacttg

SEQ ID NO: 1781582 - DNA, 15 bp, Homo sapiens
gtggaaaggacttgt

SEQ ID NO: 1781583 - DNA, 15 bp, Homo sapiens
tggaaaggacttgtg

SEQ ID NO: 1781584 - DNA, 15 bp, Homo sapiens
ggaaaggacttgtgt

SEQ ID NO: 1781585 - DNA, 15 bp, Homo sapiens
gaaaggacttgtgtt

SEQ ID NO: 1781586 - DNA, 15 bp, Homo sapiens
aaaggacttgtgttt

SEQ ID NO: 1781587 - DNA, 15 bp, Homo sapiens
aaggacttgtgttta

SEQ ID NO: 1781588 - DNA, 15 bp, Homo sapiens
aggacttgtgtttat

SEQ ID NO: 1781589 - DNA, 15 bp, Homo sapiens
ggacttgtgtttatg

SEQ ID NO: 1781590 - DNA, 15 bp, Homo sapiens
gacttgtgtttatgt

SEQ ID NO: 1781591 - DNA, 15 bp, Homo sapiens
acttgtgtttatgta

SEQ ID NO: 1781592 - DNA, 15 bp, Homo sapiens
cttgtgtttatgtac

SEQ ID NO: 1781593 - DNA, 15 bp, Homo sapiens
ttgtgtttatgtact

SEQ ID NO: 1781594 - DNA, 15 bp, Homo sapiens
tgtgtttatgtactc

SEQ ID NO: 1781595 - DNA, 15 bp, Homo sapiens
gtgtttatgtactca

SEQ ID NO: 1781596 - DNA, 15 bp, Homo sapiens
tgtttatgtactcat

SEQ ID NO: 1781597 - DNA, 15 bp, Homo sapiens
gtttatgtactcatc

SEQ ID NO: 1781598 - DNA, 15 bp, Homo sapiens
tttatgtactcatca

SEQ ID NO: 1781599 - DNA, 15 bp, Homo sapiens
ttatgtactcatcat

SEQ ID NO: 1781600 - DNA, 15 bp, Homo sapiens
tatgtactcatcatt

SEQ ID NO: 1781601 - DNA, 15 bp, Homo sapiens
atgtactcatcattt

SEQ ID NO: 1781602 - DNA, 15 bp, Homo sapiens
tgtactcatcatttc

SEQ ID NO: 1781603 - DNA, 15 bp, Homo sapiens
gtactcatcatttca

SEQ ID NO: 1781604 - DNA, 15 bp, Homo sapiens
tactcatcatttcag

SEQ ID NO: 1781605 - DNA, 15 bp, Homo sapiens
actcatcatttcagc

SEQ ID NO: 1781606 - DNA, 15 bp, Homo sapiens
ctcatcatttcagct

SEQ ID NO: 1781607 - DNA, 15 bp, Homo sapiens
tcatcatttcagcta

SEQ ID NO: 1781608 - DNA, 15 bp, Homo sapiens
catcatttcagctac

SEQ ID NO: 1781609 - DNA, 15 bp, Homo sapiens
atcatttcagctact

SEQ ID NO: 1781610 - DNA, 15 bp, Homo sapiens
tcatttcagctactc

SEQ ID NO: 1781611 - DNA, 15 bp, Homo sapiens
catttcagctactca

SEQ ID NO: 1781612 - DNA, 15 bp, Homo sapiens
atttcagctactcac

SEQ ID NO: 1781613 - DNA, 15 bp, Homo sapiens
tttcagctactcaca

SEQ ID NO: 1781614 - DNA, 15 bp, Homo sapiens
ttcagctactcacac

SEQ ID NO: 1781615 - DNA, 15 bp, Homo sapiens
tcagctactcacaca

SEQ ID NO: 1781616 - DNA, 15 bp, Homo sapiens
cagctactcacacaa

SEQ ID NO: 1781617 - DNA, 15 bp, Homo sapiens
agctactcacacaaa

SEQ ID NO: 1781618 - DNA, 15 bp, Homo sapiens
gctactcacacaaat

SEQ ID NO: 1781619 - DNA, 15 bp, Homo sapiens
ctactcacacaaatg

SEQ ID NO: 1781620 - DNA, 15 bp, Homo sapiens
tactcacacaaatgg

SEQ ID NO: 1781621 - DNA, 15 bp, Homo sapiens
actcacacaaatgga

SEQ ID NO: 1781622 - DNA, 15 bp, Homo sapiens
ctcacacaaatggac

SEQ ID NO: 1781623 - DNA, 15 bp, Homo sapiens
tcacacaaatggacc

SEQ ID NO: 1781624 - DNA, 15 bp, Homo sapiens
cacacaaatggacca

SEQ ID NO: 1781625 - DNA, 15 bp, Homo sapiens
acacaaatggaccat

SEQ ID NO: 1781626 - DNA, 15 bp, Homo sapiens
cacaaatggaccata

SEQ ID NO: 1781627 - DNA, 15 bp, Homo sapiens
acaaatggaccataa

SEQ ID NO: 1781628 - DNA, 15 bp, Homo sapiens
caaatggaccataat

SEQ ID NO: 1781629 - DNA, 15 bp, Homo sapiens
aaatggaccataatc

SEQ ID NO: 1781630 - DNA, 15 bp, Homo sapiens
aatggaccataatca

SEQ ID NO: 1781631 - DNA, 15 bp, Homo sapiens
atggaccataatcac

SEQ ID NO: 1781632 - DNA, 15 bp, Homo sapiens
tggaccataatcact

SEQ ID NO: 1781633 - DNA, 15 bp, Homo sapiens
ggaccataatcactg

SEQ ID NO: 1781634 - DNA, 15 bp, Homo sapiens
gaccataatcactgt

SEQ ID NO: 1781635 - DNA, 15 bp, Homo sapiens
accataatcactgtc

SEQ ID NO: 1781636 - DNA, 15 bp, Homo sapiens
ccataatcactgtca

SEQ ID NO: 1781637 - DNA, 15 bp, Homo sapiens
cataatcactgtcaa

SEQ ID NO: 1781638 - DNA, 15 bp, Homo sapiens
ataatcactgtcaaa

SEQ ID NO: 1781639 - DNA, 15 bp, Homo sapiens
taatcactgtcaaat

SEQ ID NO: 1781640 - DNA, 15 bp, Homo sapiens
aatcactgtcaaata

SEQ ID NO: 1781641 - DNA, 15 bp, Homo sapiens
atcactgtcaaataa

SEQ ID NO: 1781642 - DNA, 15 bp, Homo sapiens
tcactgtcaaataat

SEQ ID NO: 1781643 - DNA, 15 bp, Homo sapiens
cactgtcaaataatt

SEQ ID NO: 1781644 - DNA, 15 bp, Homo sapiens
actgtcaaataattt

SEQ ID NO: 1781645 - DNA, 15 bp, Homo sapiens
ctgtcaaataatttc

SEQ ID NO: 1781646 - DNA, 15 bp, Homo sapiens
tgtcaaataatttct

SEQ ID NO: 1781647 - DNA, 15 bp, Homo sapiens
gtcaaataatttctt

SEQ ID NO: 1781648 - DNA, 15 bp, Homo sapiens
tcaaataatttcttt

SEQ ID NO: 1781649 - DNA, 15 bp, Homo sapiens
caaataatttcttta

SEQ ID NO: 1781650 - DNA, 15 bp, Homo sapiens
aaataatttctttaa

SEQ ID NO: 1781651 - DNA, 15 bp, Homo sapiens
aataatttctttaaa

SEQ ID NO: 1781652 - DNA, 15 bp, Homo sapiens
ataatttctttaaaa

SEQ ID NO: 1781653 - DNA, 15 bp, Homo sapiens
taatttctttaaaat

SEQ ID NO: 1781654 - DNA, 15 bp, Homo sapiens
aatttctttaaaata

SEQ ID NO: 1781655 - DNA, 15 bp, Homo sapiens
atttctttaaaatat

SEQ ID NO: 1781656 - DNA, 15 bp, Homo sapiens
tttctttaaaatata

SEQ ID NO: 1781657 - DNA, 15 bp, Homo sapiens
ttctttaaaatatat

SEQ ID NO: 1781658 - DNA, 15 bp, Homo sapiens
tctttaaaatatata

SEQ ID NO: 1781659 - DNA, 15 bp, Homo sapiens
ctttaaaatatatat

SEQ ID NO: 1781660 - DNA, 15 bp, Homo sapiens
tttaaaatatatata

SEQ ID NO: 1781661 - DNA, 15 bp, Homo sapiens
ttaaaatatatatat

SEQ ID NO: 1781662 - DNA, 15 bp, Homo sapiens
taaaatatatatata

SEQ ID NO: 1781663 - DNA, 15 bp, Homo sapiens
aaatatatatatatg

SEQ ID NO: 1781664 - DNA, 15 bp, Homo sapiens
aatatatatatatga

SEQ ID NO: 1781665 - DNA, 15 bp, Homo sapiens
atatatatatatgaa

SEQ ID NO: 1781666 - DNA, 15 bp, Homo sapiens
tatatatatatgaat

SEQ ID NO: 1781667 - DNA, 15 bp, Homo sapiens
atatatatatgaatg

SEQ ID NO: 1781668 - DNA, 15 bp, Homo sapiens
tatatatatgaatgt

SEQ ID NO: 1781669 - DNA, 15 bp, Homo sapiens
atatatatgaatgta

SEQ ID NO: 1781670 - DNA, 15 bp, Homo sapiens
tatatatgaatgtat

SEQ ID NO: 1781671 - DNA, 15 bp, Homo sapiens
atatatgaatgtatg

SEQ ID NO: 1781672 - DNA, 15 bp, Homo sapiens
tatatgaatgtatgt

SEQ ID NO: 1781673 - DNA, 15 bp, Homo sapiens
atatgaatgtatgtt

SEQ ID NO: 1781674 - DNA, 15 bp, Homo sapiens
tatgaatgtatgttt

SEQ ID NO: 1781675 - DNA, 15 bp, Homo sapiens
atgaatgtatgttta

SEQ ID NO: 1781676 - DNA, 15 bp, Homo sapiens
tgaatgtatgtttat

SEQ ID NO: 1781677 - DNA, 15 bp, Homo sapiens
gaatgtatgtttatg

SEQ ID NO: 1781678 - DNA, 15 bp, Homo sapiens
aatgtatgtttatgg

SEQ ID NO: 1781679 - DNA, 15 bp, Homo sapiens
atgtatgtttatggg

SEQ ID NO: 1781680 - DNA, 15 bp, Homo sapiens
tgtatgtttatgggc

SEQ ID NO: 1781681 - DNA, 15 bp, Homo sapiens
gtatgtttatgggct

SEQ ID NO: 1781682 - DNA, 15 bp, Homo sapiens
tatgtttatgggctg

SEQ ID NO: 1781683 - DNA, 15 bp, Homo sapiens
atgtttatgggctgt

SEQ ID NO: 1781684 - DNA, 15 bp, Homo sapiens
tgtttatgggctgta

SEQ ID NO: 1781685 - DNA, 15 bp, Homo sapiens
gtttatgggctgtat

SEQ ID NO: 1781686 - DNA, 15 bp, Homo sapiens
tttatgggctgtatg

SEQ ID NO: 1781687 - DNA, 15 bp, Homo sapiens
ttatgggctgtatgt

SEQ ID NO: 1781688 - DNA, 15 bp, Homo sapiens
tatgggctgtatgtg

SEQ ID NO: 1781689 - DNA, 15 bp, Homo sapiens
atgggctgtatgtgt

SEQ ID NO: 1781690 - DNA, 15 bp, Homo sapiens
tgggctgtatgtgtg

SEQ ID NO: 1781691 - DNA, 15 bp, Homo sapiens
gggctgtatgtgtgt

SEQ ID NO: 1781692 - DNA, 15 bp, Homo sapiens
ggctgtatgtgtgta

SEQ ID NO: 1781693 - DNA, 15 bp, Homo sapiens
gctgtatgtgtgtaa

SEQ ID NO: 1781694 - DNA, 15 bp, Homo sapiens
ctgtatgtgtgtaaa

SEQ ID NO: 1781695 - DNA, 15 bp, Homo sapiens
tgtatgtgtgtaaac

SEQ ID NO: 1781696 - DNA, 15 bp, Homo sapiens
gtatgtgtgtaaaca

SEQ ID NO: 1781697 - DNA, 15 bp, Homo sapiens
tatgtgtgtaaacat

SEQ ID NO: 1781698 - DNA, 15 bp, Homo sapiens
atgtgtgtaaacata

SEQ ID NO: 1781699 - DNA, 15 bp, Homo sapiens
tgtgtgtaaacatac

SEQ ID NO: 1781700 - DNA, 15 bp, Homo sapiens
gtgtgtaaacatact

SEQ ID NO: 1781701 - DNA, 15 bp, Homo sapiens
tgtgtaaacatactc

SEQ ID NO: 1781702 - DNA, 15 bp, Homo sapiens
gtgtaaacatactca

SEQ ID NO: 1781703 - DNA, 15 bp, Homo sapiens
tgtaaacatactcat

SEQ ID NO: 1781704 - DNA, 15 bp, Homo sapiens
gtaaacatactcatt

SEQ ID NO: 1781705 - DNA, 15 bp, Homo sapiens
taaacatactcatta

SEQ ID NO: 1781706 - DNA, 15 bp, Homo sapiens
aaacatactcattat

SEQ ID NO: 1781707 - DNA, 15 bp, Homo sapiens
aacatactcattatg

SEQ ID NO: 1781708 - DNA, 15 bp, Homo sapiens
acatactcattatgg

SEQ ID NO: 1781709 - DNA, 15 bp, Homo sapiens
catactcattatggt

SEQ ID NO: 1781710 - DNA, 15 bp, Homo sapiens
atactcattatggtc

SEQ ID NO: 1781711 - DNA, 15 bp, Homo sapiens
tactcattatggtct

SEQ ID NO: 1781712 - DNA, 15 bp, Homo sapiens
actcattatggtcta

SEQ ID NO: 1781713 - DNA, 15 bp, Homo sapiens
ctcattatggtctaa

SEQ ID NO: 1781714 - DNA, 15 bp, Homo sapiens
tcattatggtctaaa

SEQ ID NO: 1781715 - DNA, 15 bp, Homo sapiens
cattatggtctaaaa

SEQ ID NO: 1781716 - DNA, 15 bp, Homo sapiens
attatggtctaaaag

SEQ ID NO: 1781717 - DNA, 15 bp, Homo sapiens
ttatggtctaaaaga

SEQ ID NO: 1781718 - DNA, 15 bp, Homo sapiens
tatggtctaaaagaa

SEQ ID NO: 1781719 - DNA, 15 bp, Homo sapiens
atggtctaaaagaaa

SEQ ID NO: 1781720 - DNA, 15 bp, Homo sapiens
tggtctaaaagaaaa

SEQ ID NO: 1781721 - DNA, 15 bp, Homo sapiens
ggtctaaaagaaaat

SEQ ID NO: 1781722 - DNA, 15 bp, Homo sapiens
gtctaaaagaaaatt

SEQ ID NO: 1781723 - DNA, 15 bp, Homo sapiens
tctaaaagaaaattt

SEQ ID NO: 1781724 - DNA, 15 bp, Homo sapiens
ctaaaagaaaatttt

SEQ ID NO: 1781725 - DNA, 15 bp, Homo sapiens
aaggcctgaagtgtg

SEQ ID NO: 1781726 - DNA, 15 bp, Homo sapiens
aggcctgaagtgtgg

SEQ ID NO: 1781727 - DNA, 15 bp, Homo sapiens
ggcctgaagtgtggc

SEQ ID NO: 1781728 - DNA, 15 bp, Homo sapiens
gcctgaagtgtggca

SEQ ID NO: 1781729 - DNA, 15 bp, Homo sapiens
cctgaagtgtggcag

SEQ ID NO: 1781730 - DNA, 15 bp, Homo sapiens
ctgaagtgtggcagg

SEQ ID NO: 1781731 - DNA, 15 bp, Homo sapiens
tgaagtgtggcaggc

SEQ ID NO: 1781732 - DNA, 15 bp, Homo sapiens
gaagtgtggcaggca

SEQ ID NO: 1781733 - DNA, 15 bp, Homo sapiens
aagtgtggcaggcat

SEQ ID NO: 1781734 - DNA, 15 bp, Homo sapiens
agtgtggcaggcatt

SEQ ID NO: 1781735 - DNA, 15 bp, Homo sapiens
gtgtggcaggcattt

SEQ ID NO: 1781736 - DNA, 15 bp, Homo sapiens
tgtggcaggcatttg

SEQ ID NO: 1781737 - DNA, 15 bp, Homo sapiens
gtggcaggcatttgg

SEQ ID NO: 1781738 - DNA, 15 bp, Homo sapiens
tggcaggcatttggg

SEQ ID NO: 1781739 - DNA, 15 bp, Homo sapiens
ggcaggcatttgggt

SEQ ID NO: 1781740 - DNA, 15 bp, Homo sapiens
gcaggcatttgggtt

SEQ ID NO: 1781741 - DNA, 15 bp, Homo sapiens
caggcatttgggttc

SEQ ID NO: 1781742 - DNA, 15 bp, Homo sapiens
aggcatttgggttct

SEQ ID NO: 1781743 - DNA, 15 bp, Homo sapiens
ggcatttgggttctt

SEQ ID NO: 1781744 - DNA, 15 bp, Homo sapiens
gcatttgggttcttt

SEQ ID NO: 1781745 - DNA, 15 bp, Homo sapiens
catttgggttcttta

SEQ ID NO: 1781746 - DNA, 15 bp, Homo sapiens
atttgggttctttag

SEQ ID NO: 1781747 - DNA, 15 bp, Homo sapiens
tttgggttctttaga

SEQ ID NO: 1781748 - DNA, 15 bp, Homo sapiens
ttgggttctttagag

SEQ ID NO: 1781749 - DNA, 15 bp, Homo sapiens
tgggttctttagagg

SEQ ID NO: 1781750 - DNA, 15 bp, Homo sapiens
gggttctttagaggg

SEQ ID NO: 1781751 - DNA, 15 bp, Homo sapiens
ggttctttagagggt

SEQ ID NO: 1781752 - DNA, 15 bp, Homo sapiens
gttctttagagggtt

SEQ ID NO: 1781753 - DNA, 15 bp, Homo sapiens
ttctttagagggttt

SEQ ID NO: 1781754 - DNA, 15 bp, Homo sapiens
tctttagagggttta

SEQ ID NO: 1781755 - DNA, 15 bp, Homo sapiens
ctttagagggtttaa

SEQ ID NO: 1781756 - DNA, 15 bp, Homo sapiens
tttagagggtttaaa

SEQ ID NO: 1781757 - DNA, 15 bp, Homo sapiens
ttagagggtttaaag

SEQ ID NO: 1781758 - DNA, 15 bp, Homo sapiens
tagagggtttaaagt

SEQ ID NO: 1781759 - DNA, 15 bp, Homo sapiens
agagggtttaaagta

SEQ ID NO: 1781760 - DNA, 15 bp, Homo sapiens
gagggtttaaagtaa

SEQ ID NO: 1781761 - DNA, 15 bp, Homo sapiens
agggtttaaagtaac

SEQ ID NO: 1781762 - DNA, 15 bp, Homo sapiens
gggtttaaagtaact

SEQ ID NO: 1781763 - DNA, 15 bp, Homo sapiens
ggtttaaagtaactt

SEQ ID NO: 1781764 - DNA, 15 bp, Homo sapiens
gtttaaagtaactta

SEQ ID NO: 1781765 - DNA, 15 bp, Homo sapiens
tttaaagtaacttat

SEQ ID NO: 1781766 - DNA, 15 bp, Homo sapiens
ttaaagtaacttatt

SEQ ID NO: 1781767 - DNA, 15 bp, Homo sapiens
taaagtaacttattt

SEQ ID NO: 1781768 - DNA, 15 bp, Homo sapiens
aaagtaacttatttc

SEQ ID NO: 1781769 - DNA, 15 bp, Homo sapiens
aagtaacttatttct

SEQ ID NO: 1781770 - DNA, 15 bp, Homo sapiens
agtaacttatttctt

SEQ ID NO: 1781771 - DNA, 15 bp, Homo sapiens
gtaacttatttcttc

SEQ ID NO: 1781772 - DNA, 15 bp, Homo sapiens
taacttatttcttcc

SEQ ID NO: 1781773 - DNA, 15 bp, Homo sapiens
aacttatttcttcct

SEQ ID NO: 1781774 - DNA, 15 bp, Homo sapiens
acttatttcttccta

SEQ ID NO: 1781775 - DNA, 15 bp, Homo sapiens
cttatttcttcctaa

SEQ ID NO: 1781776 - DNA, 15 bp, Homo sapiens
ttatttcttcctaaa

SEQ ID NO: 1781777 - DNA, 15 bp, Homo sapiens
tatttcttcctaaaa

SEQ ID NO: 1781778 - DNA, 15 bp, Homo sapiens
atttcttcctaaaaa

SEQ ID NO: 1781779 - DNA, 15 bp, Homo sapiens
tttcttcctaaaaag

SEQ ID NO: 1781780 - DNA, 15 bp, Homo sapiens
ttcttcctaaaaagt

SEQ ID NO: 1781781 - DNA, 15 bp, Homo sapiens
tcttcctaaaaagtg

SEQ ID NO: 1781782 - DNA, 15 bp, Homo sapiens
cttcctaaaaagtga

SEQ ID NO: 1781783 - DNA, 15 bp, Homo sapiens
ttcctaaaaagtgac

SEQ ID NO: 1781784 - DNA, 15 bp, Homo sapiens
tcctaaaaagtgaca

SEQ ID NO: 1781785 - DNA, 15 bp, Homo sapiens
cctaaaaagtgacaa

SEQ ID NO: 1781786 - DNA, 15 bp, Homo sapiens
ctaaaaagtgacaag

SEQ ID NO: 1781787 - DNA, 15 bp, Homo sapiens
taaaaagtgacaagg

SEQ ID NO: 1781788 - DNA, 15 bp, Homo sapiens
aaaaagtgacaaggg

SEQ ID NO: 1781789 - DNA, 15 bp, Homo sapiens
aaaagtgacaagggg

SEQ ID NO: 1781790 - DNA, 15 bp, Homo sapiens
aaagtgacaaggggg

SEQ ID NO: 1781791 - DNA, 15 bp, Homo sapiens
aagtgacaagggggc

SEQ ID NO: 1781792 - DNA, 15 bp, Homo sapiens
agtgacaagggggcc

SEQ ID NO: 1781793 - DNA, 15 bp, Homo sapiens
gtgacaagggggccg

SEQ ID NO: 1781794 - DNA, 15 bp, Homo sapiens
tgacaagggggccgg

SEQ ID NO: 1781795 - DNA, 15 bp, Homo sapiens
gacaagggggccggg

SEQ ID NO: 1781796 - DNA, 15 bp, Homo sapiens
acaagggggccgggc

SEQ ID NO: 1781797 - DNA, 15 bp, Homo sapiens
caagggggccgggcg

SEQ ID NO: 1781798 - DNA, 15 bp, Homo sapiens
aagggggccgggcgc

SEQ ID NO: 1781799 - DNA, 15 bp, Homo sapiens
agggggccgggcgcg

SEQ ID NO: 1781800 - DNA, 15 bp, Homo sapiens
gggggccgggcgcgg

SEQ ID NO: 1781801 - DNA, 15 bp, Homo sapiens
ggggccgggcgcggt

SEQ ID NO: 1781802 - DNA, 15 bp, Homo sapiens
cgcctgtaatgccaa

SEQ ID NO: 1781803 - DNA, 15 bp, Homo sapiens
gcctgtaatgccaac

SEQ ID NO: 1781804 - DNA, 15 bp, Homo sapiens
cctgtaatgccaaca

SEQ ID NO: 1781805 - DNA, 15 bp, Homo sapiens
ctgtaatgccaacac

SEQ ID NO: 1781806 - DNA, 15 bp, Homo sapiens
tgtaatgccaacact

SEQ ID NO: 1781807 - DNA, 15 bp, Homo sapiens
gtaatgccaacactt

SEQ ID NO: 1781808 - DNA, 15 bp, Homo sapiens
taatgccaacacttt

SEQ ID NO: 1781809 - DNA, 15 bp, Homo sapiens
acactttgggaggtc

SEQ ID NO: 1781810 - DNA, 15 bp, Homo sapiens
cactttgggaggtca

SEQ ID NO: 1781811 - DNA, 15 bp, Homo sapiens
actttgggaggtcaa

SEQ ID NO: 1781812 - DNA, 15 bp, Homo sapiens
ctttgggaggtcaag

SEQ ID NO: 1781813 - DNA, 15 bp, Homo sapiens
tttgggaggtcaagg

SEQ ID NO: 1781814 - DNA, 15 bp, Homo sapiens
ttgggaggtcaaggc

SEQ ID NO: 1781815 - DNA, 15 bp, Homo sapiens
tgggaggtcaaggca

SEQ ID NO: 1781816 - DNA, 15 bp, Homo sapiens
gggaggtcaaggcag

SEQ ID NO: 1781817 - DNA, 15 bp, Homo sapiens
ggaggtcaaggcagg

SEQ ID NO: 1781818 - DNA, 15 bp, Homo sapiens
gaggtcaaggcaggc

SEQ ID NO: 1781819 - DNA, 15 bp, Homo sapiens
aggtcaaggcaggca

SEQ ID NO: 1781820 - DNA, 15 bp, Homo sapiens
ggtcaaggcaggcag

SEQ ID NO: 1781821 - DNA, 15 bp, Homo sapiens
gtcaaggcaggcaga

SEQ ID NO: 1781822 - DNA, 15 bp, Homo sapiens
tcaaggcaggcagat

SEQ ID NO: 1781823 - DNA, 15 bp, Homo sapiens
ggagttcgagaccac

SEQ ID NO: 1781824 - DNA, 15 bp, Homo sapiens
gagttcgagaccacc

SEQ ID NO: 1781825 - DNA, 15 bp, Homo sapiens
agttcgagaccaccc

SEQ ID NO: 1781826 - DNA, 15 bp, Homo sapiens
gttcgagaccaccct

SEQ ID NO: 1781827 - DNA, 15 bp, Homo sapiens
ttcgagaccaccctg

SEQ ID NO: 1781828 - DNA, 15 bp, Homo sapiens
tcgagaccaccctgg

SEQ ID NO: 1781829 - DNA, 15 bp, Homo sapiens
cgagaccaccctggc

SEQ ID NO: 1781830 - DNA, 15 bp, Homo sapiens
gagaccaccctggcc

SEQ ID NO: 1781831 - DNA, 15 bp, Homo sapiens
agaccaccctggcca

SEQ ID NO: 1781832 - DNA, 15 bp, Homo sapiens
gaccaccctggccaa

SEQ ID NO: 1781833 - DNA, 15 bp, Homo sapiens
accaccctggccaac

SEQ ID NO: 1781834 - DNA, 15 bp, Homo sapiens
ccaccctggccaaca

SEQ ID NO: 1781835 - DNA, 15 bp, Homo sapiens
caccctggccaacat

SEQ ID NO: 1781836 - DNA, 15 bp, Homo sapiens
accctggccaacatg

SEQ ID NO: 1781837 - DNA, 15 bp, Homo sapiens
ccctggccaacatgg

SEQ ID NO: 1781838 - DNA, 15 bp, Homo sapiens
tctctactaaaagaa

SEQ ID NO: 1781839 - DNA, 15 bp, Homo sapiens
ctctactaaaagaac

SEQ ID NO: 1781840 - DNA, 15 bp, Homo sapiens
tctactaaaagaaca

SEQ ID NO: 1781841 - DNA, 15 bp, Homo sapiens
ctactaaaagaacaa

SEQ ID NO: 1781842 - DNA, 15 bp, Homo sapiens
tactaaaagaacaaa

SEQ ID NO: 1781843 - DNA, 15 bp, Homo sapiens
actaaaagaacaaaa

SEQ ID NO: 1781844 - DNA, 15 bp, Homo sapiens
ctaaaagaacaaaaa

SEQ ID NO: 1781845 - DNA, 15 bp, Homo sapiens
taaaagaacaaaaat

SEQ ID NO: 1781846 - DNA, 15 bp, Homo sapiens
aaaagaacaaaaatt

SEQ ID NO: 1781847 - DNA, 15 bp, Homo sapiens
aaagaacaaaaatta

SEQ ID NO: 1781848 - DNA, 15 bp, Homo sapiens
aagaacaaaaattag

SEQ ID NO: 1781849 - DNA, 15 bp, Homo sapiens
agaacaaaaattagc

SEQ ID NO: 1781850 - DNA, 15 bp, Homo sapiens
gaacaaaaattagcc

SEQ ID NO: 1781851 - DNA, 15 bp, Homo sapiens
aacaaaaattagccg

SEQ ID NO: 1781852 - DNA, 15 bp, Homo sapiens
ccgggtgtggtggca

SEQ ID NO: 1781853 - DNA, 15 bp, Homo sapiens
cgggtgtggtggcag

SEQ ID NO: 1781854 - DNA, 15 bp, Homo sapiens
caggagaatcgcttc

SEQ ID NO: 1781855 - DNA, 15 bp, Homo sapiens
aggagaatcgcttca

SEQ ID NO: 1781856 - DNA, 15 bp, Homo sapiens
ggagaatcgcttcaa

SEQ ID NO: 1781857 - DNA, 15 bp, Homo sapiens
gagaatcgcttcaac

SEQ ID NO: 1781858 - DNA, 15 bp, Homo sapiens
agaatcgcttcaacc

SEQ ID NO: 1781859 - DNA, 15 bp, Homo sapiens
gaatcgcttcaacct

SEQ ID NO: 1781860 - DNA, 15 bp, Homo sapiens
aatcgcttcaacctg

SEQ ID NO: 1781861 - DNA, 15 bp, Homo sapiens
atcgcttcaacctgg

SEQ ID NO: 1781862 - DNA, 15 bp, Homo sapiens
tcgcttcaacctggg

SEQ ID NO: 1781863 - DNA, 15 bp, Homo sapiens
cgcttcaacctggga

SEQ ID NO: 1781864 - DNA, 15 bp, Homo sapiens
gcttcaacctgggag

SEQ ID NO: 1781865 - DNA, 15 bp, Homo sapiens
cttcaacctgggagg

SEQ ID NO: 1781866 - DNA, 15 bp, Homo sapiens
ttcaacctgggaggt

SEQ ID NO: 1781867 - DNA, 15 bp, Homo sapiens
tcaacctgggaggtg

SEQ ID NO: 1781868 - DNA, 15 bp, Homo sapiens
caacctgggaggtgg

SEQ ID NO: 1781869 - DNA, 15 bp, Homo sapiens
aaaaaaaaaagtgac

SEQ ID NO: 1781870 - DNA, 15 bp, Homo sapiens
aaaaaaaaagtgaca

SEQ ID NO: 1781871 - DNA, 15 bp, Homo sapiens
aaaaaaaagtgacaa

SEQ ID NO: 1781872 - DNA, 15 bp, Homo sapiens
aaaaaaagtgacaag

SEQ ID NO: 1781873 - DNA, 15 bp, Homo sapiens
aaaaaagtgacaaga

SEQ ID NO: 1781874 - DNA, 15 bp, Homo sapiens
aaaaagtgacaagag

SEQ ID NO: 1781875 - DNA, 15 bp, Homo sapiens
aaaagtgacaagagc

SEQ ID NO: 1781876 - DNA, 15 bp, Homo sapiens
aaagtgacaagagct

SEQ ID NO: 1781877 - DNA, 15 bp, Homo sapiens
aagtgacaagagctg

SEQ ID NO: 1781878 - DNA, 15 bp, Homo sapiens
agtgacaagagctgt

SEQ ID NO: 1781879 - DNA, 15 bp, Homo sapiens
gtgacaagagctgtt

SEQ ID NO: 1781880 - DNA, 15 bp, Homo sapiens
tgacaagagctgtta

SEQ ID NO: 1781881 - DNA, 15 bp, Homo sapiens
gacaagagctgttaa

SEQ ID NO: 1781882 - DNA, 15 bp, Homo sapiens
acaagagctgttaaa

SEQ ID NO: 1781883 - DNA, 15 bp, Homo sapiens
caagagctgttaaaa

SEQ ID NO: 1781884 - DNA, 15 bp, Homo sapiens
aagagctgttaaaaa

SEQ ID NO: 1781885 - DNA, 15 bp, Homo sapiens
agagctgttaaaaac

SEQ ID NO: 1781886 - DNA, 15 bp, Homo sapiens
gagctgttaaaaaca

SEQ ID NO: 1781887 - DNA, 15 bp, Homo sapiens
agctgttaaaaacat

SEQ ID NO: 1781888 - DNA, 15 bp, Homo sapiens
gctgttaaaaacatc

SEQ ID NO: 1781889 - DNA, 15 bp, Homo sapiens
ctgttaaaaacatct

SEQ ID NO: 1781890 - DNA, 15 bp, Homo sapiens
tgttaaaaacatctc

SEQ ID NO: 1781891 - DNA, 15 bp, Homo sapiens
gttaaaaacatctct

SEQ ID NO: 1781892 - DNA, 15 bp, Homo sapiens
ttaaaaacatctctc

SEQ ID NO: 1781893 - DNA, 15 bp, Homo sapiens
taaaaacatctctct

SEQ ID NO: 1781894 - DNA, 15 bp, Homo sapiens
aaaaacatctctctt

SEQ ID NO: 1781895 - DNA, 15 bp, Homo sapiens
aaaacatctctctta

SEQ ID NO: 1781896 - DNA, 15 bp, Homo sapiens
aaacatctctcttat

SEQ ID NO: 1781897 - DNA, 15 bp, Homo sapiens
aacatctctcttatt

SEQ ID NO: 1781898 - DNA, 15 bp, Homo sapiens
acatctctcttattt

SEQ ID NO: 1781899 - DNA, 15 bp, Homo sapiens
catctctcttatttg

SEQ ID NO: 1781900 - DNA, 15 bp, Homo sapiens
atctctcttatttgc

SEQ ID NO: 1781901 - DNA, 15 bp, Homo sapiens
tctctcttatttgcc

SEQ ID NO: 1781902 - DNA, 15 bp, Homo sapiens
ctctcttatttgcct

SEQ ID NO: 1781903 - DNA, 15 bp, Homo sapiens
tctcttatttgcctt

SEQ ID NO: 1781904 - DNA, 15 bp, Homo sapiens
ctcttatttgccttc

SEQ ID NO: 1781905 - DNA, 15 bp, Homo sapiens
tcttatttgccttct

SEQ ID NO: 1781906 - DNA, 15 bp, Homo sapiens
cttatttgccttcta

SEQ ID NO: 1781907 - DNA, 15 bp, Homo sapiens
ttatttgccttctag

SEQ ID NO: 1781908 - DNA, 15 bp, Homo sapiens
tatttgccttctagt

SEQ ID NO: 1781909 - DNA, 15 bp, Homo sapiens
atttgccttctagtg

SEQ ID NO: 1781910 - DNA, 15 bp, Homo sapiens
tttgccttctagtga

SEQ ID NO: 1781911 - DNA, 15 bp, Homo sapiens
ttgccttctagtgac

SEQ ID NO: 1781912 - DNA, 15 bp, Homo sapiens
tgccttctagtgacc

SEQ ID NO: 1781913 - DNA, 15 bp, Homo sapiens
gccttctagtgacca

SEQ ID NO: 1781914 - DNA, 15 bp, Homo sapiens
ccttctagtgaccaa

SEQ ID NO: 1781915 - DNA, 15 bp, Homo sapiens
cttctagtgaccaag

SEQ ID NO: 1781916 - DNA, 15 bp, Homo sapiens
ttctagtgaccaagc

SEQ ID NO: 1781917 - DNA, 15 bp, Homo sapiens
tctagtgaccaagca

SEQ ID NO: 1781918 - DNA, 15 bp, Homo sapiens
ctagtgaccaagcac

SEQ ID NO: 1781919 - DNA, 15 bp, Homo sapiens
tagtgaccaagcacc

SEQ ID NO: 1781920 - DNA, 15 bp, Homo sapiens
agtgaccaagcacca

SEQ ID NO: 1781921 - DNA, 15 bp, Homo sapiens
gtgaccaagcaccat

SEQ ID NO: 1781922 - DNA, 15 bp, Homo sapiens
tgaccaagcaccatt

SEQ ID NO: 1781923 - DNA, 15 bp, Homo sapiens
gaccaagcaccattt

SEQ ID NO: 1781924 - DNA, 15 bp, Homo sapiens
accaagcaccatttg

SEQ ID NO: 1781925 - DNA, 15 bp, Homo sapiens
ccaagcaccatttga

SEQ ID NO: 1781926 - DNA, 15 bp, Homo sapiens
caagcaccatttgaa

SEQ ID NO: 1781927 - DNA, 15 bp, Homo sapiens
aagcaccatttgaag

SEQ ID NO: 1781928 - DNA, 15 bp, Homo sapiens
agcaccatttgaaga

SEQ ID NO: 1781929 - DNA, 15 bp, Homo sapiens
gcaccatttgaagaa

SEQ ID NO: 1781930 - DNA, 15 bp, Homo sapiens
caccatttgaagaac

SEQ ID NO: 1781931 - DNA, 15 bp, Homo sapiens
accatttgaagaaca

SEQ ID NO: 1781932 - DNA, 15 bp, Homo sapiens
ccatttgaagaacag

SEQ ID NO: 1781933 - DNA, 15 bp, Homo sapiens
catttgaagaacagg

SEQ ID NO: 1781934 - DNA, 15 bp, Homo sapiens
atttgaagaacaggc

SEQ ID NO: 1781935 - DNA, 15 bp, Homo sapiens
tttgaagaacaggcc

SEQ ID NO: 1781936 - DNA, 15 bp, Homo sapiens
ttgaagaacaggccg

SEQ ID NO: 1781937 - DNA, 15 bp, Homo sapiens
tgaagaacaggccgt

SEQ ID NO: 1781938 - DNA, 15 bp, Homo sapiens
gaagaacaggccgtc

SEQ ID NO: 1781939 - DNA, 15 bp, Homo sapiens
aagaacaggccgtcc

SEQ ID NO: 1781940 - DNA, 15 bp, Homo sapiens
agaacaggccgtcct

SEQ ID NO: 1781941 - DNA, 15 bp, Homo sapiens
gaacaggccgtcctg

SEQ ID NO: 1781942 - DNA, 15 bp, Homo sapiens
aacaggccgtcctgg

SEQ ID NO: 1781943 - DNA, 15 bp, Homo sapiens
acaggccgtcctggt

SEQ ID NO: 1781944 - DNA, 15 bp, Homo sapiens
caggccgtcctggtc

SEQ ID NO: 1781945 - DNA, 15 bp, Homo sapiens
aggccgtcctggtct

SEQ ID NO: 1781946 - DNA, 15 bp, Homo sapiens
ggccgtcctggtcta

SEQ ID NO: 1781947 - DNA, 15 bp, Homo sapiens
gccgtcctggtctac

SEQ ID NO: 1781948 - DNA, 15 bp, Homo sapiens
ccgtcctggtctacc

SEQ ID NO: 1781949 - DNA, 15 bp, Homo sapiens
cgtcctggtctacca

SEQ ID NO: 1781950 - DNA, 15 bp, Homo sapiens
gtcctggtctaccac

SEQ ID NO: 1781951 - DNA, 15 bp, Homo sapiens
tcctggtctaccaca

SEQ ID NO: 1781952 - DNA, 15 bp, Homo sapiens
cctggtctaccacag

SEQ ID NO: 1781953 - DNA, 15 bp, Homo sapiens
ctggtctaccacagt

SEQ ID NO: 1781954 - DNA, 15 bp, Homo sapiens
tggtctaccacagtg

SEQ ID NO: 1781955 - DNA, 15 bp, Homo sapiens
ggtctaccacagtgc

SEQ ID NO: 1781956 - DNA, 15 bp, Homo sapiens
gtctaccacagtgca

SEQ ID NO: 1781957 - DNA, 15 bp, Homo sapiens
tctaccacagtgcaa

SEQ ID NO: 1781958 - DNA, 15 bp, Homo sapiens
ctaccacagtgcaaa

SEQ ID NO: 1781959 - DNA, 15 bp, Homo sapiens
taccacagtgcaaag

SEQ ID NO: 1781960 - DNA, 15 bp, Homo sapiens
accacagtgcaaaga

SEQ ID NO: 1781961 - DNA, 15 bp, Homo sapiens
ccacagtgcaaagaa

SEQ ID NO: 1781962 - DNA, 15 bp, Homo sapiens
cacagtgcaaagaaa

SEQ ID NO: 1781963 - DNA, 15 bp, Homo sapiens
acagtgcaaagaaag

SEQ ID NO: 1781964 - DNA, 15 bp, Homo sapiens
cagtgcaaagaaagg

SEQ ID NO: 1781965 - DNA, 15 bp, Homo sapiens
agtgcaaagaaagga

SEQ ID NO: 1781966 - DNA, 15 bp, Homo sapiens
gtgcaaagaaaggat

SEQ ID NO: 1781967 - DNA, 15 bp, Homo sapiens
tgcaaagaaaggatc

SEQ ID NO: 1781968 - DNA, 15 bp, Homo sapiens
gcaaagaaaggatcc

SEQ ID NO: 1781969 - DNA, 15 bp, Homo sapiens
caaagaaaggatcca

SEQ ID NO: 1781970 - DNA, 15 bp, Homo sapiens
aaagaaaggatccag

SEQ ID NO: 1781971 - DNA, 15 bp, Homo sapiens
aagaaaggatccaga

SEQ ID NO: 1781972 - DNA, 15 bp, Homo sapiens
agaaaggatccagat

SEQ ID NO: 1781973 - DNA, 15 bp, Homo sapiens
gaaaggatccagatg

SEQ ID NO: 1781974 - DNA, 15 bp, Homo sapiens
aaaggatccagatgc

SEQ ID NO: 1781975 - DNA, 15 bp, Homo sapiens
aaggatccagatgca

SEQ ID NO: 1781976 - DNA, 15 bp, Homo sapiens
aggatccagatgcag

SEQ ID NO: 1781977 - DNA, 15 bp, Homo sapiens
ggatccagatgcagt

SEQ ID NO: 1781978 - DNA, 15 bp, Homo sapiens
gatccagatgcagtt

SEQ ID NO: 1781979 - DNA, 15 bp, Homo sapiens
atccagatgcagttt

SEQ ID NO: 1781980 - DNA, 15 bp, Homo sapiens
tccagatgcagtttg

SEQ ID NO: 1781981 - DNA, 15 bp, Homo sapiens
ccagatgcagtttgt

SEQ ID NO: 1781982 - DNA, 15 bp, Homo sapiens
cagatgcagtttgtc

SEQ ID NO: 1781983 - DNA, 15 bp, Homo sapiens
agatgcagtttgtcc

SEQ ID NO: 1781984 - DNA, 15 bp, Homo sapiens
gatgcagtttgtcct

SEQ ID NO: 1781985 - DNA, 15 bp, Homo sapiens
atgcagtttgtcctc

SEQ ID NO: 1781986 - DNA, 15 bp, Homo sapiens
tgcagtttgtcctct

SEQ ID NO: 1781987 - DNA, 15 bp, Homo sapiens
gcagtttgtcctctc

SEQ ID NO: 1781988 - DNA, 15 bp, Homo sapiens
cagtttgtcctctcc

SEQ ID NO: 1781989 - DNA, 15 bp, Homo sapiens
agtttgtcctctcca

SEQ ID NO: 1781990 - DNA, 15 bp, Homo sapiens
gtttgtcctctccag

SEQ ID NO: 1781991 - DNA, 15 bp, Homo sapiens
tttgtcctctccagc

SEQ ID NO: 1781992 - DNA, 15 bp, Homo sapiens
ttgtcctctccagct

SEQ ID NO: 1781993 - DNA, 15 bp, Homo sapiens
tgtcctctccagctg

SEQ ID NO: 1781994 - DNA, 15 bp, Homo sapiens
gtcctctccagctgc

SEQ ID NO: 1781995 - DNA, 15 bp, Homo sapiens
tcctctccagctgca

SEQ ID NO: 1781996 - DNA, 15 bp, Homo sapiens
cctctccagctgcat

SEQ ID NO: 1781997 - DNA, 15 bp, Homo sapiens
ctctccagctgcatg

SEQ ID NO: 1781998 - DNA, 15 bp, Homo sapiens
tctccagctgcatga

SEQ ID NO: 1781999 - DNA, 15 bp, Homo sapiens
ctccagctgcatgag

SEQ ID NO: 1782000 - DNA, 15 bp, Homo sapiens
tccagctgcatgagt

SEQ ID NO: 1782001 - DNA, 15 bp, Homo sapiens
ccagctgcatgagtg

SEQ ID NO: 1782002 - DNA, 15 bp, Homo sapiens
cagctgcatgagtgg

SEQ ID NO: 1782003 - DNA, 15 bp, Homo sapiens
agctgcatgagtggc

SEQ ID NO: 1782004 - DNA, 15 bp, Homo sapiens
gctgcatgagtggcg

SEQ ID NO: 1782005 - DNA, 15 bp, Homo sapiens
ctgcatgagtggcga

SEQ ID NO: 1782006 - DNA, 15 bp, Homo sapiens
tgcatgagtggcgag

SEQ ID NO: 1782007 - DNA, 15 bp, Homo sapiens
gcatgagtggcgagg

SEQ ID NO: 1782008 - DNA, 15 bp, Homo sapiens
catgagtggcgaggt

SEQ ID NO: 1782009 - DNA, 15 bp, Homo sapiens
atgagtggcgaggtt

SEQ ID NO: 1782010 - DNA, 15 bp, Homo sapiens
tgagtggcgaggttt

SEQ ID NO: 1782011 - DNA, 15 bp, Homo sapiens
gagtggcgaggtttc

SEQ ID NO: 1782012 - DNA, 15 bp, Homo sapiens
agtggcgaggtttcc

SEQ ID NO: 1782013 - DNA, 15 bp, Homo sapiens
gtggcgaggtttccc

SEQ ID NO: 1782014 - DNA, 15 bp, Homo sapiens
tggcgaggtttcccc

SEQ ID NO: 1782015 - DNA, 15 bp, Homo sapiens
ggcgaggtttcccca

SEQ ID NO: 1782016 - DNA, 15 bp, Homo sapiens
gcgaggtttccccag

SEQ ID NO: 1782017 - DNA, 15 bp, Homo sapiens
cgaggtttccccagg

SEQ ID NO: 1782018 - DNA, 15 bp, Homo sapiens
gaggtttccccaggt

SEQ ID NO: 1782019 - DNA, 15 bp, Homo sapiens
aggtttccccaggtg

SEQ ID NO: 1782020 - DNA, 15 bp, Homo sapiens
ggtttccccaggtga

SEQ ID NO: 1782021 - DNA, 15 bp, Homo sapiens
gtttccccaggtgat

SEQ ID NO: 1782022 - DNA, 15 bp, Homo sapiens
tttccccaggtgatg

SEQ ID NO: 1782023 - DNA, 15 bp, Homo sapiens
ttccccaggtgatgg

SEQ ID NO: 1782024 - DNA, 15 bp, Homo sapiens
tccccaggtgatggg

SEQ ID NO: 1782025 - DNA, 15 bp, Homo sapiens
ccccaggtgatgggg

SEQ ID NO: 1782026 - DNA, 15 bp, Homo sapiens
cccaggtgatgggga

SEQ ID NO: 1782027 - DNA, 15 bp, Homo sapiens
ccaggtgatggggaa

SEQ ID NO: 1782028 - DNA, 15 bp, Homo sapiens
caggtgatggggaaa

SEQ ID NO: 1782029 - DNA, 15 bp, Homo sapiens
aggtgatggggaaaa

SEQ ID NO: 1782030 - DNA, 15 bp, Homo sapiens
ggtgatggggaaaat

SEQ ID NO: 1782031 - DNA, 15 bp, Homo sapiens
gtgatggggaaaatg

SEQ ID NO: 1782032 - DNA, 15 bp, Homo sapiens
tgatggggaaaatga

SEQ ID NO: 1782033 - DNA, 15 bp, Homo sapiens
gatggggaaaatgac

SEQ ID NO: 1782034 - DNA, 15 bp, Homo sapiens
atggggaaaatgacc

SEQ ID NO: 1782035 - DNA, 15 bp, Homo sapiens
tggggaaaatgacca

SEQ ID NO: 1782036 - DNA, 15 bp, Homo sapiens
ggggaaaatgaccaa

SEQ ID NO: 1782037 - DNA, 15 bp, Homo sapiens
gggaaaatgaccaaa

SEQ ID NO: 1782038 - DNA, 15 bp, Homo sapiens
ggaaaatgaccaaac

SEQ ID NO: 1782039 - DNA, 15 bp, Homo sapiens
gaaaatgaccaaacc

SEQ ID NO: 1782040 - DNA, 15 bp, Homo sapiens
aaaatgaccaaacct

SEQ ID NO: 1782041 - DNA, 15 bp, Homo sapiens
aaatgaccaaacctg

SEQ ID NO: 1782042 - DNA, 15 bp, Homo sapiens
aatgaccaaacctgg

SEQ ID NO: 1782043 - DNA, 15 bp, Homo sapiens
atgaccaaacctggc

SEQ ID NO: 1782044 - DNA, 15 bp, Homo sapiens
tgaccaaacctggca

SEQ ID NO: 1782045 - DNA, 15 bp, Homo sapiens
gaccaaacctggcag

SEQ ID NO: 1782046 - DNA, 15 bp, Homo sapiens
accaaacctggcaga

SEQ ID NO: 1782047 - DNA, 15 bp, Homo sapiens
ccaaacctggcagag

SEQ ID NO: 1782048 - DNA, 15 bp, Homo sapiens
caaacctggcagagg

SEQ ID NO: 1782049 - DNA, 15 bp, Homo sapiens
aaacctggcagagga

SEQ ID NO: 1782050 - DNA, 15 bp, Homo sapiens
aacctggcagaggac

SEQ ID NO: 1782051 - DNA, 15 bp, Homo sapiens
acctggcagaggact

SEQ ID NO: 1782052 - DNA, 15 bp, Homo sapiens
cctggcagaggactg

SEQ ID NO: 1782053 - DNA, 15 bp, Homo sapiens
ctggcagaggactga

SEQ ID NO: 1782054 - DNA, 15 bp, Homo sapiens
tggcagaggactgac

SEQ ID NO: 1782055 - DNA, 15 bp, Homo sapiens
ggcagaggactgact

SEQ ID NO: 1782056 - DNA, 15 bp, Homo sapiens
gcagaggactgacta

SEQ ID NO: 1782057 - DNA, 15 bp, Homo sapiens
cagaggactgactac

SEQ ID NO: 1782058 - DNA, 15 bp, Homo sapiens
agaggactgactact

SEQ ID NO: 1782059 - DNA, 15 bp, Homo sapiens
gaggactgactactc

SEQ ID NO: 1782060 - DNA, 15 bp, Homo sapiens
aggactgactactct

SEQ ID NO: 1782061 - DNA, 15 bp, Homo sapiens
ggactgactactctg

SEQ ID NO: 1782062 - DNA, 15 bp, Homo sapiens
gactgactactctgt

SEQ ID NO: 1782063 - DNA, 15 bp, Homo sapiens
actgactactctgtt

SEQ ID NO: 1782064 - DNA, 15 bp, Homo sapiens
ctgactactctgttt

SEQ ID NO: 1782065 - DNA, 15 bp, Homo sapiens
tgactactctgtttt

SEQ ID NO: 1782066 - DNA, 15 bp, Homo sapiens
gactactctgttttg

SEQ ID NO: 1782067 - DNA, 15 bp, Homo sapiens
actactctgttttga

SEQ ID NO: 1782068 - DNA, 15 bp, Homo sapiens
ctactctgttttgat

SEQ ID NO: 1782069 - DNA, 15 bp, Homo sapiens
tactctgttttgata

SEQ ID NO: 1782070 - DNA, 15 bp, Homo sapiens
actctgttttgatac

SEQ ID NO: 1782071 - DNA, 15 bp, Homo sapiens
ctctgttttgatact

SEQ ID NO: 1782072 - DNA, 15 bp, Homo sapiens
tctgttttgatactc

SEQ ID NO: 1782073 - DNA, 15 bp, Homo sapiens
ctgttttgatactcc

SEQ ID NO: 1782074 - DNA, 15 bp, Homo sapiens
tgttttgatactccc

SEQ ID NO: 1782075 - DNA, 15 bp, Homo sapiens
gttttgatactccct

SEQ ID NO: 1782076 - DNA, 15 bp, Homo sapiens
ttttgatactccctt

SEQ ID NO: 1782077 - DNA, 15 bp, Homo sapiens
tttgatactcccttc

SEQ ID NO: 1782078 - DNA, 15 bp, Homo sapiens
ttgatactcccttcc

SEQ ID NO: 1782079 - DNA, 15 bp, Homo sapiens
tgatactcccttccc

SEQ ID NO: 1782080 - DNA, 15 bp, Homo sapiens
gatactcccttcccc

SEQ ID NO: 1782081 - DNA, 15 bp, Homo sapiens
atactcccttcccca

SEQ ID NO: 1782082 - DNA, 15 bp, Homo sapiens
tactcccttccccac

SEQ ID NO: 1782083 - DNA, 15 bp, Homo sapiens
actcccttccccaca

SEQ ID NO: 1782084 - DNA, 15 bp, Homo sapiens
cccttccccacaaca

SEQ ID NO: 1782085 - DNA, 15 bp, Homo sapiens
ccttccccacaacat

SEQ ID NO: 1782086 - DNA, 15 bp, Homo sapiens
cttccccacaacata

SEQ ID NO: 1782087 - DNA, 15 bp, Homo sapiens
ttccccacaacatat

SEQ ID NO: 1782088 - DNA, 15 bp, Homo sapiens
tccccacaacatata

SEQ ID NO: 1782089 - DNA, 15 bp, Homo sapiens
ccccacaacatatac

SEQ ID NO: 1782090 - DNA, 15 bp, Homo sapiens
cccacaacatataca

SEQ ID NO: 1782091 - DNA, 15 bp, Homo sapiens
ccacaacatatacac

SEQ ID NO: 1782092 - DNA, 15 bp, Homo sapiens
cacaacatatacact

SEQ ID NO: 1782093 - DNA, 15 bp, Homo sapiens
acaacatatacactt

SEQ ID NO: 1782094 - DNA, 15 bp, Homo sapiens
caacatatacacttt

SEQ ID NO: 1782095 - DNA, 15 bp, Homo sapiens
aacatatacactttt

SEQ ID NO: 1782096 - DNA, 15 bp, Homo sapiens
acatatacacttttg

SEQ ID NO: 1782097 - DNA, 15 bp, Homo sapiens
catatacacttttga

SEQ ID NO: 1782098 - DNA, 15 bp, Homo sapiens
atatacacttttgag

SEQ ID NO: 1782099 - DNA, 15 bp, Homo sapiens
tatacacttttgagt

SEQ ID NO: 1782100 - DNA, 15 bp, Homo sapiens
atacacttttgagtt

SEQ ID NO: 1782101 - DNA, 15 bp, Homo sapiens
tacacttttgagttt

SEQ ID NO: 1782102 - DNA, 15 bp, Homo sapiens
acacttttgagttta

SEQ ID NO: 1782103 - DNA, 15 bp, Homo sapiens
cacttttgagtttat

SEQ ID NO: 1782104 - DNA, 15 bp, Homo sapiens
acttttgagtttatc

SEQ ID NO: 1782105 - DNA, 15 bp, Homo sapiens
cttttgagtttatca

SEQ ID NO: 1782106 - DNA, 15 bp, Homo sapiens
ttttgagtttatcat

SEQ ID NO: 1782107 - DNA, 15 bp, Homo sapiens
tttgagtttatcatt

SEQ ID NO: 1782108 - DNA, 15 bp, Homo sapiens
ttgagtttatcattc

SEQ ID NO: 1782109 - DNA, 15 bp, Homo sapiens
tgagtttatcattca

SEQ ID NO: 1782110 - DNA, 15 bp, Homo sapiens
gagtttatcattcaa

SEQ ID NO: 1782111 - DNA, 15 bp, Homo sapiens
agtttatcattcaaa

SEQ ID NO: 1782112 - DNA, 15 bp, Homo sapiens
gtttatcattcaaat

SEQ ID NO: 1782113 - DNA, 15 bp, Homo sapiens
tttatcattcaaatt

SEQ ID NO: 1782114 - DNA, 15 bp, Homo sapiens
ttatcattcaaattc

SEQ ID NO: 1782115 - DNA, 15 bp, Homo sapiens
tatcattcaaattcc

SEQ ID NO: 1782116 - DNA, 15 bp, Homo sapiens
atcattcaaattcct

SEQ ID NO: 1782117 - DNA, 15 bp, Homo sapiens
tcattcaaattccta

SEQ ID NO: 1782118 - DNA, 15 bp, Homo sapiens
cattcaaattcctat

SEQ ID NO: 1782119 - DNA, 15 bp, Homo sapiens
attcaaattcctatt

SEQ ID NO: 1782120 - DNA, 15 bp, Homo sapiens
ttcaaattcctattt

SEQ ID NO: 1782121 - DNA, 15 bp, Homo sapiens
tcaaattcctatttt

SEQ ID NO: 1782122 - DNA, 15 bp, Homo sapiens
caaattcctatttta

SEQ ID NO: 1782123 - DNA, 15 bp, Homo sapiens
aaattcctattttaa

SEQ ID NO: 1782124 - DNA, 15 bp, Homo sapiens
aattcctattttaat

SEQ ID NO: 1782125 - DNA, 15 bp, Homo sapiens
attcctattttaatt

SEQ ID NO: 1782126 - DNA, 15 bp, Homo sapiens
ttcctattttaattc

SEQ ID NO: 1782127 - DNA, 15 bp, Homo sapiens
tcctattttaattcc

SEQ ID NO: 1782128 - DNA, 15 bp, Homo sapiens
cctattttaattcct

SEQ ID NO: 1782129 - DNA, 15 bp, Homo sapiens
ctattttaattcctg

SEQ ID NO: 1782130 - DNA, 15 bp, Homo sapiens
tattttaattcctgc

SEQ ID NO: 1782131 - DNA, 15 bp, Homo sapiens
attttaattcctgcc

SEQ ID NO: 1782132 - DNA, 15 bp, Homo sapiens
ttttaattcctgcca

SEQ ID NO: 1782133 - DNA, 15 bp, Homo sapiens
tttaattcctgccat

SEQ ID NO: 1782134 - DNA, 15 bp, Homo sapiens
ttaattcctgccatt

SEQ ID NO: 1782135 - DNA, 15 bp, Homo sapiens
taattcctgccattt

SEQ ID NO: 1782136 - DNA, 15 bp, Homo sapiens
aattcctgccatttc

SEQ ID NO: 1782137 - DNA, 15 bp, Homo sapiens
attcctgccatttca

SEQ ID NO: 1782138 - DNA, 15 bp, Homo sapiens
ttcctgccatttcat

SEQ ID NO: 1782139 - DNA, 15 bp, Homo sapiens
tcctgccatttcatg

SEQ ID NO: 1782140 - DNA, 15 bp, Homo sapiens
cctgccatttcatga

SEQ ID NO: 1782141 - DNA, 15 bp, Homo sapiens
ctgccatttcatgaa

SEQ ID NO: 1782142 - DNA, 15 bp, Homo sapiens
tgccatttcatgaac

SEQ ID NO: 1782143 - DNA, 15 bp, Homo sapiens
gccatttcatgaaca

SEQ ID NO: 1782144 - DNA, 15 bp, Homo sapiens
ccatttcatgaacac

SEQ ID NO: 1782145 - DNA, 15 bp, Homo sapiens
catttcatgaacacc

SEQ ID NO: 1782146 - DNA, 15 bp, Homo sapiens
atttcatgaacacct

SEQ ID NO: 1782147 - DNA, 15 bp, Homo sapiens
tttcatgaacacctg

SEQ ID NO: 1782148 - DNA, 15 bp, Homo sapiens
ttcatgaacacctgt

SEQ ID NO: 1782149 - DNA, 15 bp, Homo sapiens
tcatgaacacctgtg

SEQ ID NO: 1782150 - DNA, 15 bp, Homo sapiens
catgaacacctgtgg

SEQ ID NO: 1782151 - DNA, 15 bp, Homo sapiens
atgaacacctgtggt

SEQ ID NO: 1782152 - DNA, 15 bp, Homo sapiens
tgaacacctgtggtc

SEQ ID NO: 1782153 - DNA, 15 bp, Homo sapiens
gaacacctgtggtca

SEQ ID NO: 1782154 - DNA, 15 bp, Homo sapiens
aacacctgtggtcat

SEQ ID NO: 1782155 - DNA, 15 bp, Homo sapiens
acacctgtggtcata

SEQ ID NO: 1782156 - DNA, 15 bp, Homo sapiens
cacctgtggtcatat

SEQ ID NO: 1782157 - DNA, 15 bp, Homo sapiens
acctgtggtcatatc

SEQ ID NO: 1782158 - DNA, 15 bp, Homo sapiens
cctgtggtcatatca

SEQ ID NO: 1782159 - DNA, 15 bp, Homo sapiens
ctgtggtcatatcaa

SEQ ID NO: 1782160 - DNA, 15 bp, Homo sapiens
gtggtcatatcaaaa

SEQ ID NO: 1782161 - DNA, 15 bp, Homo sapiens
tggtcatatcaaaac

SEQ ID NO: 1782162 - DNA, 15 bp, Homo sapiens
ggtcatatcaaaact

SEQ ID NO: 1782163 - DNA, 15 bp, Homo sapiens
gtcatatcaaaactc

SEQ ID NO: 1782164 - DNA, 15 bp, Homo sapiens
tcatatcaaaactca

SEQ ID NO: 1782165 - DNA, 15 bp, Homo sapiens
catatcaaaactcat

SEQ ID NO: 1782166 - DNA, 15 bp, Homo sapiens
atatcaaaactcatt

SEQ ID NO: 1782167 - DNA, 15 bp, Homo sapiens
tatcaaaactcattg

SEQ ID NO: 1782168 - DNA, 15 bp, Homo sapiens
atcaaaactcattgg

SEQ ID NO: 1782169 - DNA, 15 bp, Homo sapiens
tcaaaactcattggc

SEQ ID NO: 1782170 - DNA, 15 bp, Homo sapiens
caaaactcattggct

SEQ ID NO: 1782171 - DNA, 15 bp, Homo sapiens
aaaactcattggctt

SEQ ID NO: 1782172 - DNA, 15 bp, Homo sapiens
aaactcattggcttt

SEQ ID NO: 1782173 - DNA, 15 bp, Homo sapiens
aactcattggctttc

SEQ ID NO: 1782174 - DNA, 15 bp, Homo sapiens
actcattggctttcc

SEQ ID NO: 1782175 - DNA, 15 bp, Homo sapiens
ctcattggctttccc

SEQ ID NO: 1782176 - DNA, 15 bp, Homo sapiens
tcattggctttcccc

SEQ ID NO: 1782177 - DNA, 15 bp, Homo sapiens
cattggctttcccca

SEQ ID NO: 1782178 - DNA, 15 bp, Homo sapiens
attggctttccccag

SEQ ID NO: 1782179 - DNA, 15 bp, Homo sapiens
ttggctttccccagc

SEQ ID NO: 1782180 - DNA, 15 bp, Homo sapiens
tggctttccccagcc

SEQ ID NO: 1782181 - DNA, 15 bp, Homo sapiens
ggctttccccagccc

SEQ ID NO: 1782182 - DNA, 15 bp, Homo sapiens
gctttccccagccca

SEQ ID NO: 1782183 - DNA, 15 bp, Homo sapiens
ctttccccagcccac

SEQ ID NO: 1782184 - DNA, 15 bp, Homo sapiens
tttccccagcccaca

SEQ ID NO: 1782185 - DNA, 15 bp, Homo sapiens
ttccccagcccacac

SEQ ID NO: 1782186 - DNA, 15 bp, Homo sapiens
tccccagcccacaca

SEQ ID NO: 1782187 - DNA, 15 bp, Homo sapiens
ccccagcccacacag

SEQ ID NO: 1782188 - DNA, 15 bp, Homo sapiens
cccagcccacacagt

SEQ ID NO: 1782189 - DNA, 15 bp, Homo sapiens
ccagcccacacagtg

SEQ ID NO: 1782190 - DNA, 15 bp, Homo sapiens
cagcccacacagtgg

SEQ ID NO: 1782191 - DNA, 15 bp, Homo sapiens
agcccacacagtggt

SEQ ID NO: 1782192 - DNA, 15 bp, Homo sapiens
gcccacacagtggta

SEQ ID NO: 1782193 - DNA, 15 bp, Homo sapiens
cccacacagtggtat

SEQ ID NO: 1782194 - DNA, 15 bp, Homo sapiens
ccacacagtggtatt

SEQ ID NO: 1782195 - DNA, 15 bp, Homo sapiens
cacacagtggtattg

SEQ ID NO: 1782196 - DNA, 15 bp, Homo sapiens
acacagtggtattgc

SEQ ID NO: 1782197 - DNA, 15 bp, Homo sapiens
cacagtggtattgcc

SEQ ID NO: 1782198 - DNA, 15 bp, Homo sapiens
acagtggtattgccc

SEQ ID NO: 1782199 - DNA, 15 bp, Homo sapiens
cagtggtattgccct

SEQ ID NO: 1782200 - DNA, 15 bp, Homo sapiens
agtggtattgccctg

SEQ ID NO: 1782201 - DNA, 15 bp, Homo sapiens
gtggtattgccctgg

SEQ ID NO: 1782202 - DNA, 15 bp, Homo sapiens
tggtattgccctggt

SEQ ID NO: 1782203 - DNA, 15 bp, Homo sapiens
ggtattgccctggtg

SEQ ID NO: 1782204 - DNA, 15 bp, Homo sapiens
gtattgccctggtga

SEQ ID NO: 1782205 - DNA, 15 bp, Homo sapiens
tattgccctggtgag

SEQ ID NO: 1782206 - DNA, 15 bp, Homo sapiens
attgccctggtgaga

SEQ ID NO: 1782207 - DNA, 15 bp, Homo sapiens
ttgccctggtgagaa

SEQ ID NO: 1782208 - DNA, 15 bp, Homo sapiens
tgccctggtgagaag

SEQ ID NO: 1782209 - DNA, 15 bp, Homo sapiens
gccctggtgagaaga

SEQ ID NO: 1782210 - DNA, 15 bp, Homo sapiens
ccctggtgagaagaa

SEQ ID NO: 1782211 - DNA, 15 bp, Homo sapiens
cctggtgagaagaaa

SEQ ID NO: 1782212 - DNA, 15 bp, Homo sapiens
ctggtgagaagaaat

SEQ ID NO: 1782213 - DNA, 15 bp, Homo sapiens
tggtgagaagaaatg

SEQ ID NO: 1782214 - DNA, 15 bp, Homo sapiens
ggtgagaagaaatga

SEQ ID NO: 1782215 - DNA, 15 bp, Homo sapiens
gtgagaagaaatgat

SEQ ID NO: 1782216 - DNA, 15 bp, Homo sapiens
tgagaagaaatgatt

SEQ ID NO: 1782217 - DNA, 15 bp, Homo sapiens
gagaagaaatgattg

SEQ ID NO: 1782218 - DNA, 15 bp, Homo sapiens
agaagaaatgattgg

SEQ ID NO: 1782219 - DNA, 15 bp, Homo sapiens
gaagaaatgattggc

SEQ ID NO: 1782220 - DNA, 15 bp, Homo sapiens
aagaaatgattggca

SEQ ID NO: 1782221 - DNA, 15 bp, Homo sapiens
agaaatgattggcag

SEQ ID NO: 1782222 - DNA, 15 bp, Homo sapiens
gaaatgattggcagg

SEQ ID NO: 1782223 - DNA, 15 bp, Homo sapiens
aaatgattggcaggg

SEQ ID NO: 1782224 - DNA, 15 bp, Homo sapiens
aatgattggcagggc

SEQ ID NO: 1782225 - DNA, 15 bp, Homo sapiens
atgattggcagggca

SEQ ID NO: 1782226 - DNA, 15 bp, Homo sapiens
tgattggcagggcaa

SEQ ID NO: 1782227 - DNA, 15 bp, Homo sapiens
gattggcagggcaag

SEQ ID NO: 1782228 - DNA, 15 bp, Homo sapiens
attggcagggcaagg

SEQ ID NO: 1782229 - DNA, 15 bp, Homo sapiens
ttggcagggcaaggc

SEQ ID NO: 1782230 - DNA, 15 bp, Homo sapiens
tggcagggcaaggct

SEQ ID NO: 1782231 - DNA, 15 bp, Homo sapiens
ggcagggcaaggctc

SEQ ID NO: 1782232 - DNA, 15 bp, Homo sapiens
gcagggcaaggctcc

SEQ ID NO: 1782233 - DNA, 15 bp, Homo sapiens
cagggcaaggctcca

SEQ ID NO: 1782234 - DNA, 15 bp, Homo sapiens
agggcaaggctccat

SEQ ID NO: 1782235 - DNA, 15 bp, Homo sapiens
gggcaaggctccata

SEQ ID NO: 1782236 - DNA, 15 bp, Homo sapiens
ggcaaggctccatat

SEQ ID NO: 1782237 - DNA, 15 bp, Homo sapiens
gcaaggctccatatt

SEQ ID NO: 1782238 - DNA, 15 bp, Homo sapiens
caaggctccatattc

SEQ ID NO: 1782239 - DNA, 15 bp, Homo sapiens
aaggctccatattca

SEQ ID NO: 1782240 - DNA, 15 bp, Homo sapiens
aggctccatattcaa

SEQ ID NO: 1782241 - DNA, 15 bp, Homo sapiens
ggctccatattcaag

SEQ ID NO: 1782242 - DNA, 15 bp, Homo sapiens
gctccatattcaagg

SEQ ID NO: 1782243 - DNA, 15 bp, Homo sapiens
ctccatattcaagga

SEQ ID NO: 1782244 - DNA, 15 bp, Homo sapiens
tccatattcaaggaa

SEQ ID NO: 1782245 - DNA, 15 bp, Homo sapiens
ccatattcaaggaaa

SEQ ID NO: 1782246 - DNA, 15 bp, Homo sapiens
catattcaaggaaaa

SEQ ID NO: 1782247 - DNA, 15 bp, Homo sapiens
atattcaaggaaaac

SEQ ID NO: 1782248 - DNA, 15 bp, Homo sapiens
tattcaaggaaaacc

SEQ ID NO: 1782249 - DNA, 15 bp, Homo sapiens
attcaaggaaaaccc

SEQ ID NO: 1782250 - DNA, 15 bp, Homo sapiens
ttcaaggaaaacccc

SEQ ID NO: 1782251 - DNA, 15 bp, Homo sapiens
tcaaggaaaacccca

SEQ ID NO: 1782252 - DNA, 15 bp, Homo sapiens
caaggaaaaccccaa

SEQ ID NO: 1782253 - DNA, 15 bp, Homo sapiens
aaggaaaaccccaat

SEQ ID NO: 1782254 - DNA, 15 bp, Homo sapiens
aggaaaaccccaatg

SEQ ID NO: 1782255 - DNA, 15 bp, Homo sapiens
ggaaaaccccaatgg

SEQ ID NO: 1782256 - DNA, 15 bp, Homo sapiens
gaaaaccccaatgga

SEQ ID NO: 1782257 - DNA, 15 bp, Homo sapiens
aaaaccccaatggaa

SEQ ID NO: 1782258 - DNA, 15 bp, Homo sapiens
aaaccccaatggaac

SEQ ID NO: 1782259 - DNA, 15 bp, Homo sapiens
aaccccaatggaaca

SEQ ID NO: 1782260 - DNA, 15 bp, Homo sapiens
accccaatggaacac

SEQ ID NO: 1782261 - DNA, 15 bp, Homo sapiens
ccccaatggaacact

SEQ ID NO: 1782262 - DNA, 15 bp, Homo sapiens
cccaatggaacactt

SEQ ID NO: 1782263 - DNA, 15 bp, Homo sapiens
ccaatggaacacttc

SEQ ID NO: 1782264 - DNA, 15 bp, Homo sapiens
caatggaacacttca

SEQ ID NO: 1782265 - DNA, 15 bp, Homo sapiens
aatggaacacttcaa

SEQ ID NO: 1782266 - DNA, 15 bp, Homo sapiens
atggaacacttcaac

SEQ ID NO: 1782267 - DNA, 15 bp, Homo sapiens
tggaacacttcaaca

SEQ ID NO: 1782268 - DNA, 15 bp, Homo sapiens
ggaacacttcaacac

SEQ ID NO: 1782269 - DNA, 15 bp, Homo sapiens
gaacacttcaacacc

SEQ ID NO: 1782270 - DNA, 15 bp, Homo sapiens
aacacttcaacacca

SEQ ID NO: 1782271 - DNA, 15 bp, Homo sapiens
acacttcaacaccaa

SEQ ID NO: 1782272 - DNA, 15 bp, Homo sapiens
cacttcaacaccaat

SEQ ID NO: 1782273 - DNA, 15 bp, Homo sapiens
acttcaacaccaatg

SEQ ID NO: 1782274 - DNA, 15 bp, Homo sapiens
cttcaacaccaatgc

SEQ ID NO: 1782275 - DNA, 15 bp, Homo sapiens
ttcaacaccaatgca

SEQ ID NO: 1782276 - DNA, 15 bp, Homo sapiens
tcaacaccaatgcaa

SEQ ID NO: 1782277 - DNA, 15 bp, Homo sapiens
caacaccaatgcaac

SEQ ID NO: 1782278 - DNA, 15 bp, Homo sapiens
aacaccaatgcaacg

SEQ ID NO: 1782279 - DNA, 15 bp, Homo sapiens
acaccaatgcaacgc

SEQ ID NO: 1782280 - DNA, 15 bp, Homo sapiens
caccaatgcaacgct

SEQ ID NO: 1782281 - DNA, 15 bp, Homo sapiens
accaatgcaacgctt

SEQ ID NO: 1782282 - DNA, 15 bp, Homo sapiens
ccaatgcaacgcttc

SEQ ID NO: 1782283 - DNA, 15 bp, Homo sapiens
caatgcaacgcttcc

SEQ ID NO: 1782284 - DNA, 15 bp, Homo sapiens
aatgcaacgcttccg

SEQ ID NO: 1782285 - DNA, 15 bp, Homo sapiens
atgcaacgcttccgg

SEQ ID NO: 1782286 - DNA, 15 bp, Homo sapiens
tgcaacgcttccggg

SEQ ID NO: 1782287 - DNA, 15 bp, Homo sapiens
gcaacgcttccgggt

SEQ ID NO: 1782288 - DNA, 15 bp, Homo sapiens
caacgcttccgggtc

SEQ ID NO: 1782289 - DNA, 15 bp, Homo sapiens
aacgcttccgggtcc

SEQ ID NO: 1782290 - DNA, 15 bp, Homo sapiens
acgcttccgggtcca

SEQ ID NO: 1782291 - DNA, 15 bp, Homo sapiens
cgcttccgggtccag

SEQ ID NO: 1782292 - DNA, 15 bp, Homo sapiens
gcttccgggtccagg

SEQ ID NO: 1782293 - DNA, 15 bp, Homo sapiens
cttccgggtccagga

SEQ ID NO: 1782294 - DNA, 15 bp, Homo sapiens
ttccgggtccaggag

SEQ ID NO: 1782295 - DNA, 15 bp, Homo sapiens
tccgggtccaggagc

SEQ ID NO: 1782296 - DNA, 15 bp, Homo sapiens
ccgggtccaggagct

SEQ ID NO: 1782297 - DNA, 15 bp, Homo sapiens
cgggtccaggagctg

SEQ ID NO: 1782298 - DNA, 15 bp, Homo sapiens
gggtccaggagctgt

SEQ ID NO: 1782299 - DNA, 15 bp, Homo sapiens
ggtccaggagctgtt

SEQ ID NO: 1782300 - DNA, 15 bp, Homo sapiens
gtccaggagctgttt

SEQ ID NO: 1782301 - DNA, 15 bp, Homo sapiens
tccaggagctgtttt

SEQ ID NO: 1782302 - DNA, 15 bp, Homo sapiens
ccaggagctgttttg

SEQ ID NO: 1782303 - DNA, 15 bp, Homo sapiens
caggagctgttttgt

SEQ ID NO: 1782304 - DNA, 15 bp, Homo sapiens
aggagctgttttgtt

SEQ ID NO: 1782305 - DNA, 15 bp, Homo sapiens
ggagctgttttgttt

SEQ ID NO: 1782306 - DNA, 15 bp, Homo sapiens
gagctgttttgtttg

SEQ ID NO: 1782307 - DNA, 15 bp, Homo sapiens
agctgttttgtttgg

SEQ ID NO: 1782308 - DNA, 15 bp, Homo sapiens
gctgttttgtttgga

SEQ ID NO: 1782309 - DNA, 15 bp, Homo sapiens
ctgttttgtttggat

SEQ ID NO: 1782310 - DNA, 15 bp, Homo sapiens
tgttttgtttggatg

SEQ ID NO: 1782311 - DNA, 15 bp, Homo sapiens
gttttgtttggatga

SEQ ID NO: 1782312 - DNA, 15 bp, Homo sapiens
ttttgtttggatgat

SEQ ID NO: 1782313 - DNA, 15 bp, Homo sapiens
tttgtttggatgatg

SEQ ID NO: 1782314 - DNA, 15 bp, Homo sapiens
ttgtttggatgatgg

SEQ ID NO: 1782315 - DNA, 15 bp, Homo sapiens
tgtttggatgatgga

SEQ ID NO: 1782316 - DNA, 15 bp, Homo sapiens
gtttggatgatggaa

SEQ ID NO: 1782317 - DNA, 15 bp, Homo sapiens
tttggatgatggaat

SEQ ID NO: 1782318 - DNA, 15 bp, Homo sapiens
ttggatgatggaatc

SEQ ID NO: 1782319 - DNA, 15 bp, Homo sapiens
tggatgatggaatcg

SEQ ID NO: 1782320 - DNA, 15 bp, Homo sapiens
ggatgatggaatcgc

SEQ ID NO: 1782321 - DNA, 15 bp, Homo sapiens
gatgatggaatcgca

SEQ ID NO: 1782322 - DNA, 15 bp, Homo sapiens
atgatggaatcgcat

SEQ ID NO: 1782323 - DNA, 15 bp, Homo sapiens
tgatggaatcgcatc

SEQ ID NO: 1782324 - DNA, 15 bp, Homo sapiens
gatggaatcgcatca

SEQ ID NO: 1782325 - DNA, 15 bp, Homo sapiens
atggaatcgcatcag

SEQ ID NO: 1782326 - DNA, 15 bp, Homo sapiens
tggaatcgcatcagg

SEQ ID NO: 1782327 - DNA, 15 bp, Homo sapiens
ggaatcgcatcagga

SEQ ID NO: 1782328 - DNA, 15 bp, Homo sapiens
gaatcgcatcaggaa

SEQ ID NO: 1782329 - DNA, 15 bp, Homo sapiens
aatcgcatcaggaaa

SEQ ID NO: 1782330 - DNA, 15 bp, Homo sapiens
atcgcatcaggaaat

SEQ ID NO: 1782331 - DNA, 15 bp, Homo sapiens
tcgcatcaggaaatg

SEQ ID NO: 1782332 - DNA, 15 bp, Homo sapiens
cgcatcaggaaatga

SEQ ID NO: 1782333 - DNA, 15 bp, Homo sapiens
gcatcaggaaatgaa

SEQ ID NO: 1782334 - DNA, 15 bp, Homo sapiens
catcaggaaatgaac

SEQ ID NO: 1782335 - DNA, 15 bp, Homo sapiens
atcaggaaatgaact

SEQ ID NO: 1782336 - DNA, 15 bp, Homo sapiens
tcaggaaatgaactg

SEQ ID NO: 1782337 - DNA, 15 bp, Homo sapiens
caggaaatgaactgt

SEQ ID NO: 1782338 - DNA, 15 bp, Homo sapiens
aggaaatgaactgta

SEQ ID NO: 1782339 - DNA, 15 bp, Homo sapiens
ggaaatgaactgtac

SEQ ID NO: 1782340 - DNA, 15 bp, Homo sapiens
gaaatgaactgtaca

SEQ ID NO: 1782341 - DNA, 15 bp, Homo sapiens
aaatgaactgtacag

SEQ ID NO: 1782342 - DNA, 15 bp, Homo sapiens
aatgaactgtacagc

SEQ ID NO: 1782343 - DNA, 15 bp, Homo sapiens
atgaactgtacagca

SEQ ID NO: 1782344 - DNA, 15 bp, Homo sapiens
tgaactgtacagcat

SEQ ID NO: 1782345 - DNA, 15 bp, Homo sapiens
gaactgtacagcatt

SEQ ID NO: 1782346 - DNA, 15 bp, Homo sapiens
aactgtacagcattt

SEQ ID NO: 1782347 - DNA, 15 bp, Homo sapiens
actgtacagcatttc

SEQ ID NO: 1782348 - DNA, 15 bp, Homo sapiens
ctgtacagcatttcc

SEQ ID NO: 1782349 - DNA, 15 bp, Homo sapiens
tgtacagcatttcca

SEQ ID NO: 1782350 - DNA, 15 bp, Homo sapiens
gtacagcatttccaa

SEQ ID NO: 1782351 - DNA, 15 bp, Homo sapiens
tacagcatttccaaa

SEQ ID NO: 1782352 - DNA, 15 bp, Homo sapiens
acagcatttccaaaa

SEQ ID NO: 1782353 - DNA, 15 bp, Homo sapiens
cagcatttccaaaaa

SEQ ID NO: 1782354 - DNA, 15 bp, Homo sapiens
agcatttccaaaaaa

SEQ ID NO: 1782355 - DNA, 15 bp, Homo sapiens
gcatttccaaaaaaa

SEQ ID NO: 1782356 - DNA, 15 bp, Homo sapiens
catttccaaaaaaac

SEQ ID NO: 1782357 - DNA, 15 bp, Homo sapiens
atttccaaaaaaact

SEQ ID NO: 1782358 - DNA, 15 bp, Homo sapiens
tttccaaaaaaactg

SEQ ID NO: 1782359 - DNA, 15 bp, Homo sapiens
ttccaaaaaaactgg

SEQ ID NO: 1782360 - DNA, 15 bp, Homo sapiens
tccaaaaaaactggg

SEQ ID NO: 1782361 - DNA, 15 bp, Homo sapiens
ccaaaaaaactgggt

SEQ ID NO: 1782362 - DNA, 15 bp, Homo sapiens
caaaaaaactgggtc

SEQ ID NO: 1782363 - DNA, 15 bp, Homo sapiens
aaaaaaactgggtcc

SEQ ID NO: 1782364 - DNA, 15 bp, Homo sapiens
aaaaaactgggtcct

SEQ ID NO: 1782365 - DNA, 15 bp, Homo sapiens
aaaaactgggtcctc

SEQ ID NO: 1782366 - DNA, 15 bp, Homo sapiens
aaaactgggtcctca

SEQ ID NO: 1782367 - DNA, 15 bp, Homo sapiens
aaactgggtcctcag

SEQ ID NO: 1782368 - DNA, 15 bp, Homo sapiens
aactgggtcctcagt

SEQ ID NO: 1782369 - DNA, 15 bp, Homo sapiens
actgggtcctcagtt

SEQ ID NO: 1782370 - DNA, 15 bp, Homo sapiens
ctgggtcctcagttt

SEQ ID NO: 1782371 - DNA, 15 bp, Homo sapiens
tgggtcctcagtttg

SEQ ID NO: 1782372 - DNA, 15 bp, Homo sapiens
gggtcctcagtttga

SEQ ID NO: 1782373 - DNA, 15 bp, Homo sapiens
ggtcctcagtttgaa

SEQ ID NO: 1782374 - DNA, 15 bp, Homo sapiens
gtcctcagtttgaaa

SEQ ID NO: 1782375 - DNA, 15 bp, Homo sapiens
tcctcagtttgaaaa

SEQ ID NO: 1782376 - DNA, 15 bp, Homo sapiens
cctcagtttgaaaaa

SEQ ID NO: 1782377 - DNA, 15 bp, Homo sapiens
ctcagtttgaaaaac

SEQ ID NO: 1782378 - DNA, 15 bp, Homo sapiens
tcagtttgaaaaacc

SEQ ID NO: 1782379 - DNA, 15 bp, Homo sapiens
cagtttgaaaaacct

SEQ ID NO: 1782380 - DNA, 15 bp, Homo sapiens
agtttgaaaaacctg

SEQ ID NO: 1782381 - DNA, 15 bp, Homo sapiens
gtttgaaaaacctgt

SEQ ID NO: 1782382 - DNA, 15 bp, Homo sapiens
tttgaaaaacctgtg

SEQ ID NO: 1782383 - DNA, 15 bp, Homo sapiens
ttgaaaaacctgtga

SEQ ID NO: 1782384 - DNA, 15 bp, Homo sapiens
tgaaaaacctgtgat

SEQ ID NO: 1782385 - DNA, 15 bp, Homo sapiens
gaaaaacctgtgatt

SEQ ID NO: 1782386 - DNA, 15 bp, Homo sapiens
aaaaacctgtgattt

SEQ ID NO: 1782387 - DNA, 15 bp, Homo sapiens
aaaacctgtgatttc

SEQ ID NO: 1782388 - DNA, 15 bp, Homo sapiens
aaacctgtgatttca

SEQ ID NO: 1782389 - DNA, 15 bp, Homo sapiens
aacctgtgatttcag

SEQ ID NO: 1782390 - DNA, 15 bp, Homo sapiens
acctgtgatttcagt

SEQ ID NO: 1782391 - DNA, 15 bp, Homo sapiens
cctgtgatttcagtt

SEQ ID NO: 1782392 - DNA, 15 bp, Homo sapiens
ctgtgatttcagttg

SEQ ID NO: 1782393 - DNA, 15 bp, Homo sapiens
tgtgatttcagttgt

SEQ ID NO: 1782394 - DNA, 15 bp, Homo sapiens
gtgatttcagttgta

SEQ ID NO: 1782395 - DNA, 15 bp, Homo sapiens
tgatttcagttgtac

SEQ ID NO: 1782396 - DNA, 15 bp, Homo sapiens
gatttcagttgtaca

SEQ ID NO: 1782397 - DNA, 15 bp, Homo sapiens
atttcagttgtacac

SEQ ID NO: 1782398 - DNA, 15 bp, Homo sapiens
tttcagttgtacaca

SEQ ID NO: 1782399 - DNA, 15 bp, Homo sapiens
ttcagttgtacacaa

SEQ ID NO: 1782400 - DNA, 15 bp, Homo sapiens
tcagttgtacacaaa

SEQ ID NO: 1782401 - DNA, 15 bp, Homo sapiens
cagttgtacacaaac

SEQ ID NO: 1782402 - DNA, 15 bp, Homo sapiens
agttgtacacaaacc

SEQ ID NO: 1782403 - DNA, 15 bp, Homo sapiens
gttgtacacaaaccc

SEQ ID NO: 1782404 - DNA, 15 bp, Homo sapiens
ttgtacacaaacccc

SEQ ID NO: 1782405 - DNA, 15 bp, Homo sapiens
tgtacacaaacccct

SEQ ID NO: 1782406 - DNA, 15 bp, Homo sapiens
gtacacaaacccctt

SEQ ID NO: 1782407 - DNA, 15 bp, Homo sapiens
tacacaaaccccttt

SEQ ID NO: 1782408 - DNA, 15 bp, Homo sapiens
acacaaacccctttc

SEQ ID NO: 1782409 - DNA, 15 bp, Homo sapiens
cacaaacccctttcc

SEQ ID NO: 1782410 - DNA, 15 bp, Homo sapiens
acaaacccctttcca

SEQ ID NO: 1782411 - DNA, 15 bp, Homo sapiens
caaacccctttccaa

SEQ ID NO: 1782412 - DNA, 15 bp, Homo sapiens
aaacccctttccaaa

SEQ ID NO: 1782413 - DNA, 15 bp, Homo sapiens
aacccctttccaaat

SEQ ID NO: 1782414 - DNA, 15 bp, Homo sapiens
acccctttccaaatg

SEQ ID NO: 1782415 - DNA, 15 bp, Homo sapiens
cccctttccaaatga

SEQ ID NO: 1782416 - DNA, 15 bp, Homo sapiens
ccctttccaaatgag

SEQ ID NO: 1782417 - DNA, 15 bp, Homo sapiens
cctttccaaatgagg

SEQ ID NO: 1782418 - DNA, 15 bp, Homo sapiens
ctttccaaatgagga

SEQ ID NO: 1782419 - DNA, 15 bp, Homo sapiens
tttccaaatgaggac

SEQ ID NO: 1782420 - DNA, 15 bp, Homo sapiens
ttccaaatgaggacc

SEQ ID NO: 1782421 - DNA, 15 bp, Homo sapiens
tccaaatgaggaccg

SEQ ID NO: 1782422 - DNA, 15 bp, Homo sapiens
ccaaatgaggaccgt

SEQ ID NO: 1782423 - DNA, 15 bp, Homo sapiens
caaatgaggaccgtg

SEQ ID NO: 1782424 - DNA, 15 bp, Homo sapiens
aaatgaggaccgtga

SEQ ID NO: 1782425 - DNA, 15 bp, Homo sapiens
aatgaggaccgtgaa

SEQ ID NO: 1782426 - DNA, 15 bp, Homo sapiens
atgaggaccgtgaag

SEQ ID NO: 1782427 - DNA, 15 bp, Homo sapiens
tgaggaccgtgaaga

SEQ ID NO: 1782428 - DNA, 15 bp, Homo sapiens
gaggaccgtgaagaa

SEQ ID NO: 1782429 - DNA, 15 bp, Homo sapiens
aggaccgtgaagaaa

SEQ ID NO: 1782430 - DNA, 15 bp, Homo sapiens
ggaccgtgaagaaag

SEQ ID NO: 1782431 - DNA, 15 bp, Homo sapiens
gaccgtgaagaaagg

SEQ ID NO: 1782432 - DNA, 15 bp, Homo sapiens
accgtgaagaaaggg

SEQ ID NO: 1782433 - DNA, 15 bp, Homo sapiens
ccgtgaagaaagggc

SEQ ID NO: 1782434 - DNA, 15 bp, Homo sapiens
cgtgaagaaagggcc

SEQ ID NO: 1782435 - DNA, 15 bp, Homo sapiens
gtgaagaaagggccc

SEQ ID NO: 1782436 - DNA, 15 bp, Homo sapiens
tgaagaaagggccca

SEQ ID NO: 1782437 - DNA, 15 bp, Homo sapiens
gaagaaagggcccaa

SEQ ID NO: 1782438 - DNA, 15 bp, Homo sapiens
aagaaagggcccaaa

SEQ ID NO: 1782439 - DNA, 15 bp, Homo sapiens
agaaagggcccaaag

SEQ ID NO: 1782440 - DNA, 15 bp, Homo sapiens
gaaagggcccaaagt

SEQ ID NO: 1782441 - DNA, 15 bp, Homo sapiens
aaagggcccaaagta

SEQ ID NO: 1782442 - DNA, 15 bp, Homo sapiens
aagggcccaaagtat

SEQ ID NO: 1782443 - DNA, 15 bp, Homo sapiens
agggcccaaagtatc

SEQ ID NO: 1782444 - DNA, 15 bp, Homo sapiens
gggcccaaagtatct

SEQ ID NO: 1782445 - DNA, 15 bp, Homo sapiens
ggcccaaagtatctg

SEQ ID NO: 1782446 - DNA, 15 bp, Homo sapiens
gcccaaagtatctgc

SEQ ID NO: 1782447 - DNA, 15 bp, Homo sapiens
cccaaagtatctgca

SEQ ID NO: 1782448 - DNA, 15 bp, Homo sapiens
ccaaagtatctgcac

SEQ ID NO: 1782449 - DNA, 15 bp, Homo sapiens
caaagtatctgcaca

SEQ ID NO: 1782450 - DNA, 15 bp, Homo sapiens
aaagtatctgcacac

SEQ ID NO: 1782451 - DNA, 15 bp, Homo sapiens
aagtatctgcacaca

SEQ ID NO: 1782452 - DNA, 15 bp, Homo sapiens
agtatctgcacacac

SEQ ID NO: 1782453 - DNA, 15 bp, Homo sapiens
gtatctgcacacaca

SEQ ID NO: 1782454 - DNA, 15 bp, Homo sapiens
tatctgcacacacac

SEQ ID NO: 1782455 - DNA, 15 bp, Homo sapiens
atctgcacacacaca

SEQ ID NO: 1782456 - DNA, 15 bp, Homo sapiens
tctgcacacacacag

SEQ ID NO: 1782457 - DNA, 15 bp, Homo sapiens
ctgcacacacacaga

SEQ ID NO: 1782458 - DNA, 15 bp, Homo sapiens
tgcacacacacagaa

SEQ ID NO: 1782459 - DNA, 15 bp, Homo sapiens
gcacacacacagaag

SEQ ID NO: 1782460 - DNA, 15 bp, Homo sapiens
cacacacacagaaga

SEQ ID NO: 1782461 - DNA, 15 bp, Homo sapiens
acacacacagaagat

SEQ ID NO: 1782462 - DNA, 15 bp, Homo sapiens
cacacacagaagatg

SEQ ID NO: 1782463 - DNA, 15 bp, Homo sapiens
acacacagaagatgc

SEQ ID NO: 1782464 - DNA, 15 bp, Homo sapiens
cacacagaagatgcc

SEQ ID NO: 1782465 - DNA, 15 bp, Homo sapiens
acacagaagatgccc

SEQ ID NO: 1782466 - DNA, 15 bp, Homo sapiens
cacagaagatgccca

SEQ ID NO: 1782467 - DNA, 15 bp, Homo sapiens
acagaagatgcccag

SEQ ID NO: 1782468 - DNA, 15 bp, Homo sapiens
cagaagatgcccaga

SEQ ID NO: 1782469 - DNA, 15 bp, Homo sapiens
agaagatgcccagac

SEQ ID NO: 1782470 - DNA, 15 bp, Homo sapiens
gaagatgcccagaca

SEQ ID NO: 1782471 - DNA, 15 bp, Homo sapiens
aagatgcccagacag

SEQ ID NO: 1782472 - DNA, 15 bp, Homo sapiens
gatgcccagacagca

SEQ ID NO: 1782473 - DNA, 15 bp, Homo sapiens
atgcccagacagcag

SEQ ID NO: 1782474 - DNA, 15 bp, Homo sapiens
tgcccagacagcagc

SEQ ID NO: 1782475 - DNA, 15 bp, Homo sapiens
gcccagacagcagct

SEQ ID NO: 1782476 - DNA, 15 bp, Homo sapiens
cccagacagcagcta

SEQ ID NO: 1782477 - DNA, 15 bp, Homo sapiens
ccagacagcagctag

SEQ ID NO: 1782478 - DNA, 15 bp, Homo sapiens
cagacagcagctagt

SEQ ID NO: 1782479 - DNA, 15 bp, Homo sapiens
agacagcagctagta

SEQ ID NO: 1782480 - DNA, 15 bp, Homo sapiens
gacagcagctagtaa

SEQ ID NO: 1782481 - DNA, 15 bp, Homo sapiens
acagcagctagtaac

SEQ ID NO: 1782482 - DNA, 15 bp, Homo sapiens
cagcagctagtaaca

SEQ ID NO: 1782483 - DNA, 15 bp, Homo sapiens
agcagctagtaacag

SEQ ID NO: 1782484 - DNA, 15 bp, Homo sapiens
gcagctagtaacagt

SEQ ID NO: 1782485 - DNA, 15 bp, Homo sapiens
cagctagtaacagtt

SEQ ID NO: 1782486 - DNA, 15 bp, Homo sapiens
agctagtaacagttc

SEQ ID NO: 1782487 - DNA, 15 bp, Homo sapiens
gctagtaacagttct

SEQ ID NO: 1782488 - DNA, 15 bp, Homo sapiens
ctagtaacagttctg

SEQ ID NO: 1782489 - DNA, 15 bp, Homo sapiens
tagtaacagttctgg

SEQ ID NO: 1782490 - DNA, 15 bp, Homo sapiens
agtaacagttctggg

SEQ ID NO: 1782491 - DNA, 15 bp, Homo sapiens
gtaacagttctgggt

SEQ ID NO: 1782492 - DNA, 15 bp, Homo sapiens
taacagttctgggtg

SEQ ID NO: 1782493 - DNA, 15 bp, Homo sapiens
aacagttctgggtgc

SEQ ID NO: 1782494 - DNA, 15 bp, Homo sapiens
acagttctgggtgcc

SEQ ID NO: 1782495 - DNA, 15 bp, Homo sapiens
cagttctgggtgcca

SEQ ID NO: 1782496 - DNA, 15 bp, Homo sapiens
agttctgggtgccac

SEQ ID NO: 1782497 - DNA, 15 bp, Homo sapiens
gttctgggtgccact

SEQ ID NO: 1782498 - DNA, 15 bp, Homo sapiens
ttctgggtgccactt

SEQ ID NO: 1782499 - DNA, 15 bp, Homo sapiens
tctgggtgccactta

SEQ ID NO: 1782500 - DNA, 15 bp, Homo sapiens
ctgggtgccacttac

SEQ ID NO: 1782501 - DNA, 15 bp, Homo sapiens
tgggtgccacttact

SEQ ID NO: 1782502 - DNA, 15 bp, Homo sapiens
gggtgccacttacta

SEQ ID NO: 1782503 - DNA, 15 bp, Homo sapiens
ggtgccacttactag

SEQ ID NO: 1782504 - DNA, 15 bp, Homo sapiens
gtgccacttactagg

SEQ ID NO: 1782505 - DNA, 15 bp, Homo sapiens
tgccacttactagga

SEQ ID NO: 1782506 - DNA, 15 bp, Homo sapiens
gccacttactaggat

SEQ ID NO: 1782507 - DNA, 15 bp, Homo sapiens
ccacttactaggatc

SEQ ID NO: 1782508 - DNA, 15 bp, Homo sapiens
cacttactaggatcc

SEQ ID NO: 1782509 - DNA, 15 bp, Homo sapiens
acttactaggatcct

SEQ ID NO: 1782510 - DNA, 15 bp, Homo sapiens
cttactaggatcctg

SEQ ID NO: 1782511 - DNA, 15 bp, Homo sapiens
ttactaggatcctgg

SEQ ID NO: 1782512 - DNA, 15 bp, Homo sapiens
tactaggatcctgga

SEQ ID NO: 1782513 - DNA, 15 bp, Homo sapiens
actaggatcctggag

SEQ ID NO: 1782514 - DNA, 15 bp, Homo sapiens
ctaggatcctggagc

SEQ ID NO: 1782515 - DNA, 15 bp, Homo sapiens
taggatcctggagca

SEQ ID NO: 1782516 - DNA, 15 bp, Homo sapiens
aggatcctggagcag

SEQ ID NO: 1782517 - DNA, 15 bp, Homo sapiens
ggatcctggagcagc

SEQ ID NO: 1782518 - DNA, 15 bp, Homo sapiens
gatcctggagcagct

SEQ ID NO: 1782519 - DNA, 15 bp, Homo sapiens
atcctggagcagctg

SEQ ID NO: 1782520 - DNA, 15 bp, Homo sapiens
tcctggagcagctgg

SEQ ID NO: 1782521 - DNA, 15 bp, Homo sapiens
cctggagcagctggg

SEQ ID NO: 1782522 - DNA, 15 bp, Homo sapiens
ctggagcagctgggc

SEQ ID NO: 1782523 - DNA, 15 bp, Homo sapiens
tggagcagctgggct

SEQ ID NO: 1782524 - DNA, 15 bp, Homo sapiens
ggagcagctgggctg

SEQ ID NO: 1782525 - DNA, 15 bp, Homo sapiens
gagcagctgggctgc

SEQ ID NO: 1782526 - DNA, 15 bp, Homo sapiens
agcagctgggctgcg

SEQ ID NO: 1782527 - DNA, 15 bp, Homo sapiens
gcagctgggctgcga

SEQ ID NO: 1782528 - DNA, 15 bp, Homo sapiens
cagctgggctgcgat

SEQ ID NO: 1782529 - DNA, 15 bp, Homo sapiens
agctgggctgcgatg

SEQ ID NO: 1782530 - DNA, 15 bp, Homo sapiens
gctgggctgcgatgg

SEQ ID NO: 1782531 - DNA, 15 bp, Homo sapiens
ctgggctgcgatgga

SEQ ID NO: 1782532 - DNA, 15 bp, Homo sapiens
tgggctgcgatggag

SEQ ID NO: 1782533 - DNA, 15 bp, Homo sapiens
gggctgcgatggaga

SEQ ID NO: 1782534 - DNA, 15 bp, Homo sapiens
ggctgcgatggagac

SEQ ID NO: 1782535 - DNA, 15 bp, Homo sapiens
gctgcgatggagacc

SEQ ID NO: 1782536 - DNA, 15 bp, Homo sapiens
ctgcgatggagaccc

SEQ ID NO: 1782537 - DNA, 15 bp, Homo sapiens
tgcgatggagacccg

SEQ ID NO: 1782538 - DNA, 15 bp, Homo sapiens
gcgatggagacccgg

SEQ ID NO: 1782539 - DNA, 15 bp, Homo sapiens
cgatggagacccggc

SEQ ID NO: 1782540 - DNA, 15 bp, Homo sapiens
gatggagacccggcg

SEQ ID NO: 1782541 - DNA, 15 bp, Homo sapiens
atggagacccggcgc

SEQ ID NO: 1782542 - DNA, 15 bp, Homo sapiens
tggagacccggcgcc

SEQ ID NO: 1782543 - DNA, 15 bp, Homo sapiens
ggagacccggcgccg

SEQ ID NO: 1782544 - DNA, 15 bp, Homo sapiens
gagacccggcgccgc

SEQ ID NO: 1782545 - DNA, 15 bp, Homo sapiens
agacccggcgccgct

SEQ ID NO: 1782546 - DNA, 15 bp, Homo sapiens
gacccggcgccgctc

SEQ ID NO: 1782547 - DNA, 15 bp, Homo sapiens
acccggcgccgctca

SEQ ID NO: 1782548 - DNA, 15 bp, Homo sapiens
cccggcgccgctcac

SEQ ID NO: 1782549 - DNA, 15 bp, Homo sapiens
ccggcgccgctcacc

SEQ ID NO: 1782550 - DNA, 15 bp, Homo sapiens
cggcgccgctcaccc

SEQ ID NO: 1782551 - DNA, 15 bp, Homo sapiens
ggcgccgctcacccg

SEQ ID NO: 1782552 - DNA, 15 bp, Homo sapiens
gcgccgctcacccgt

SEQ ID NO: 1782553 - DNA, 15 bp, Homo sapiens
cgccgctcacccgtg

SEQ ID NO: 1782554 - DNA, 15 bp, Homo sapiens
gccgctcacccgtgg

SEQ ID NO: 1782555 - DNA, 15 bp, Homo sapiens
ccgctcacccgtgga

SEQ ID NO: 1782556 - DNA, 15 bp, Homo sapiens
cgctcacccgtggaa

SEQ ID NO: 1782557 - DNA, 15 bp, Homo sapiens
gctcacccgtggaaa

SEQ ID NO: 1782558 - DNA, 15 bp, Homo sapiens
ctcacccgtggaaat

SEQ ID NO: 1782559 - DNA, 15 bp, Homo sapiens
tcacccgtggaaatg

SEQ ID NO: 1782560 - DNA, 15 bp, Homo sapiens
cacccgtggaaatgc

SEQ ID NO: 1782561 - DNA, 15 bp, Homo sapiens
acccgtggaaatgcc

SEQ ID NO: 1782562 - DNA, 15 bp, Homo sapiens
cccgtggaaatgccc

SEQ ID NO: 1782563 - DNA, 15 bp, Homo sapiens
ccgtggaaatgcccc

SEQ ID NO: 1782564 - DNA, 15 bp, Homo sapiens
cgtggaaatgccccc

SEQ ID NO: 1782565 - DNA, 15 bp, Homo sapiens
gtggaaatgcccccc

SEQ ID NO: 1782566 - DNA, 15 bp, Homo sapiens
tggaaatgcccccca

SEQ ID NO: 1782567 - DNA, 15 bp, Homo sapiens
ggaaatgccccccaa

SEQ ID NO: 1782568 - DNA, 15 bp, Homo sapiens
gaaatgccccccaag

SEQ ID NO: 1782569 - DNA, 15 bp, Homo sapiens
aaatgccccccaagc

SEQ ID NO: 1782570 - DNA, 15 bp, Homo sapiens
aatgccccccaagct

SEQ ID NO: 1782571 - DNA, 15 bp, Homo sapiens
atgccccccaagctg

SEQ ID NO: 1782572 - DNA, 15 bp, Homo sapiens
tgccccccaagctgt

SEQ ID NO: 1782573 - DNA, 15 bp, Homo sapiens
gccccccaagctgta

SEQ ID NO: 1782574 - DNA, 15 bp, Homo sapiens
ccccccaagctgtag

SEQ ID NO: 1782575 - DNA, 15 bp, Homo sapiens
cccccaagctgtagt

SEQ ID NO: 1782576 - DNA, 15 bp, Homo sapiens
ccccaagctgtagtt

SEQ ID NO: 1782577 - DNA, 15 bp, Homo sapiens
cccaagctgtagttg

SEQ ID NO: 1782578 - DNA, 15 bp, Homo sapiens
ccaagctgtagttgc

SEQ ID NO: 1782579 - DNA, 15 bp, Homo sapiens
caagctgtagttgcc

SEQ ID NO: 1782580 - DNA, 15 bp, Homo sapiens
aagctgtagttgcca

SEQ ID NO: 1782581 - DNA, 15 bp, Homo sapiens
agctgtagttgccaa

SEQ ID NO: 1782582 - DNA, 15 bp, Homo sapiens
gctgtagttgccaat

SEQ ID NO: 1782583 - DNA, 15 bp, Homo sapiens
ctgtagttgccaatc

SEQ ID NO: 1782584 - DNA, 15 bp, Homo sapiens
tgtagttgccaatca

SEQ ID NO: 1782585 - DNA, 15 bp, Homo sapiens
gtagttgccaatcag

SEQ ID NO: 1782586 - DNA, 15 bp, Homo sapiens
tagttgccaatcagt

SEQ ID NO: 1782587 - DNA, 15 bp, Homo sapiens
agttgccaatcagtc

SEQ ID NO: 1782588 - DNA, 15 bp, Homo sapiens
gttgccaatcagtcg

SEQ ID NO: 1782589 - DNA, 15 bp, Homo sapiens
ttgccaatcagtcgg

SEQ ID NO: 1782590 - DNA, 15 bp, Homo sapiens
tgccaatcagtcggt

SEQ ID NO: 1782591 - DNA, 15 bp, Homo sapiens
gccaatcagtcggtc

SEQ ID NO: 1782592 - DNA, 15 bp, Homo sapiens
ccaatcagtcggtct

SEQ ID NO: 1782593 - DNA, 15 bp, Homo sapiens
caatcagtcggtctg

SEQ ID NO: 1782594 - DNA, 15 bp, Homo sapiens
aatcagtcggtctgc

SEQ ID NO: 1782595 - DNA, 15 bp, Homo sapiens
atcagtcggtctgcc

SEQ ID NO: 1782596 - DNA, 15 bp, Homo sapiens
tcagtcggtctgcca

SEQ ID NO: 1782597 - DNA, 15 bp, Homo sapiens
cagtcggtctgccac

SEQ ID NO: 1782598 - DNA, 15 bp, Homo sapiens
agtcggtctgccaca

SEQ ID NO: 1782599 - DNA, 15 bp, Homo sapiens
gtcggtctgccacat

SEQ ID NO: 1782600 - DNA, 15 bp, Homo sapiens
tcggtctgccacatg

SEQ ID NO: 1782601 - DNA, 15 bp, Homo sapiens
cggtctgccacatgg

SEQ ID NO: 1782602 - DNA, 15 bp, Homo sapiens
ggtctgccacatggc

SEQ ID NO: 1782603 - DNA, 15 bp, Homo sapiens
gtctgccacatggct

SEQ ID NO: 1782604 - DNA, 15 bp, Homo sapiens
tctgccacatggctc

SEQ ID NO: 1782605 - DNA, 15 bp, Homo sapiens
ctgccacatggctca

SEQ ID NO: 1782606 - DNA, 15 bp, Homo sapiens
tgccacatggctcag

SEQ ID NO: 1782607 - DNA, 15 bp, Homo sapiens
gccacatggctcaga

SEQ ID NO: 1782608 - DNA, 15 bp, Homo sapiens
ccacatggctcagac

SEQ ID NO: 1782609 - DNA, 15 bp, Homo sapiens
cacatggctcagact

SEQ ID NO: 1782610 - DNA, 15 bp, Homo sapiens
acatggctcagactc

SEQ ID NO: 1782611 - DNA, 15 bp, Homo sapiens
catggctcagactca

SEQ ID NO: 1782612 - DNA, 15 bp, Homo sapiens
atggctcagactcag

SEQ ID NO: 1782613 - DNA, 15 bp, Homo sapiens
tggctcagactcagc

SEQ ID NO: 1782614 - DNA, 15 bp, Homo sapiens
ggctcagactcagct

SEQ ID NO: 1782615 - DNA, 15 bp, Homo sapiens
gctcagactcagctc

SEQ ID NO: 1782616 - DNA, 15 bp, Homo sapiens
ctcagactcagctct

SEQ ID NO: 1782617 - DNA, 15 bp, Homo sapiens
tcagactcagctctg

SEQ ID NO: 1782618 - DNA, 15 bp, Homo sapiens
cagactcagctctgc

SEQ ID NO: 1782619 - DNA, 15 bp, Homo sapiens
agactcagctctgcc

SEQ ID NO: 1782620 - DNA, 15 bp, Homo sapiens
gactcagctctgcca

SEQ ID NO: 1782621 - DNA, 15 bp, Homo sapiens
actcagctctgccat

SEQ ID NO: 1782622 - DNA, 15 bp, Homo sapiens
ctcagctctgccatg

SEQ ID NO: 1782623 - DNA, 15 bp, Homo sapiens
tcagctctgccatga

SEQ ID NO: 1782624 - DNA, 15 bp, Homo sapiens
cagctctgccatgac

SEQ ID NO: 1782625 - DNA, 15 bp, Homo sapiens
agctctgccatgacg

SEQ ID NO: 1782626 - DNA, 15 bp, Homo sapiens
gctctgccatgacgg

SEQ ID NO: 1782627 - DNA, 15 bp, Homo sapiens
ctctgccatgacggc

SEQ ID NO: 1782628 - DNA, 15 bp, Homo sapiens
tctgccatgacggcc

SEQ ID NO: 1782629 - DNA, 15 bp, Homo sapiens
ctgccatgacggcct

SEQ ID NO: 1782630 - DNA, 15 bp, Homo sapiens
tgccatgacggcctc

SEQ ID NO: 1782631 - DNA, 15 bp, Homo sapiens
gccatgacggcctcc

SEQ ID NO: 1782632 - DNA, 15 bp, Homo sapiens
ccatgacggcctcca

SEQ ID NO: 1782633 - DNA, 15 bp, Homo sapiens
catgacggcctccac

SEQ ID NO: 1782634 - DNA, 15 bp, Homo sapiens
atgacggcctccacc

SEQ ID NO: 1782635 - DNA, 15 bp, Homo sapiens
tgacggcctccacct

SEQ ID NO: 1782636 - DNA, 15 bp, Homo sapiens
gacggcctccacctg

SEQ ID NO: 1782637 - DNA, 15 bp, Homo sapiens
acggcctccacctgc

SEQ ID NO: 1782638 - DNA, 15 bp, Homo sapiens
cggcctccacctgca

SEQ ID NO: 1782639 - DNA, 15 bp, Homo sapiens
ggcctccacctgcag

SEQ ID NO: 1782640 - DNA, 15 bp, Homo sapiens
gcctccacctgcagg

SEQ ID NO: 1782641 - DNA, 15 bp, Homo sapiens
cctccacctgcagga

SEQ ID NO: 1782642 - DNA, 15 bp, Homo sapiens
ctccacctgcaggag

SEQ ID NO: 1782643 - DNA, 15 bp, Homo sapiens
tccacctgcaggaga

SEQ ID NO: 1782644 - DNA, 15 bp, Homo sapiens
ccacctgcaggagac

SEQ ID NO: 1782645 - DNA, 15 bp, Homo sapiens
cacctgcaggagaca

SEQ ID NO: 1782646 - DNA, 15 bp, Homo sapiens
acctgcaggagacac

SEQ ID NO: 1782647 - DNA, 15 bp, Homo sapiens
cctgcaggagacaca

SEQ ID NO: 1782648 - DNA, 15 bp, Homo sapiens
ctgcaggagacacaa

SEQ ID NO: 1782649 - DNA, 15 bp, Homo sapiens
tgcaggagacacaaa

SEQ ID NO: 1782650 - DNA, 15 bp, Homo sapiens
gcaggagacacaaat

SEQ ID NO: 1782651 - DNA, 15 bp, Homo sapiens
caggagacacaaatt

SEQ ID NO: 1782652 - DNA, 15 bp, Homo sapiens
aggagacacaaatta

SEQ ID NO: 1782653 - DNA, 15 bp, Homo sapiens
ggagacacaaattac

SEQ ID NO: 1782654 - DNA, 15 bp, Homo sapiens
gagacacaaattaca

SEQ ID NO: 1782655 - DNA, 15 bp, Homo sapiens
agacacaaattacag

SEQ ID NO: 1782656 - DNA, 15 bp, Homo sapiens
gacacaaattacagg

SEQ ID NO: 1782657 - DNA, 15 bp, Homo sapiens
acacaaattacagga

SEQ ID NO: 1782658 - DNA, 15 bp, Homo sapiens
cacaaattacaggaa

SEQ ID NO: 1782659 - DNA, 15 bp, Homo sapiens
acaaattacaggaag

SEQ ID NO: 1782660 - DNA, 15 bp, Homo sapiens
caaattacaggaagg

SEQ ID NO: 1782661 - DNA, 15 bp, Homo sapiens
aaattacaggaaggc

SEQ ID NO: 1782662 - DNA, 15 bp, Homo sapiens
aattacaggaaggct

SEQ ID NO: 1782663 - DNA, 15 bp, Homo sapiens
attacaggaaggctg

SEQ ID NO: 1782664 - DNA, 15 bp, Homo sapiens
ttacaggaaggctgg

SEQ ID NO: 1782665 - DNA, 15 bp, Homo sapiens
tacaggaaggctggg

SEQ ID NO: 1782666 - DNA, 15 bp, Homo sapiens
acaggaaggctggga

SEQ ID NO: 1782667 - DNA, 15 bp, Homo sapiens
caggaaggctgggag

SEQ ID NO: 1782668 - DNA, 15 bp, Homo sapiens
aggaaggctgggagt

SEQ ID NO: 1782669 - DNA, 15 bp, Homo sapiens
ggaaggctgggagtc

SEQ ID NO: 1782670 - DNA, 15 bp, Homo sapiens
gaaggctgggagtct

SEQ ID NO: 1782671 - DNA, 15 bp, Homo sapiens
aaggctgggagtctc

SEQ ID NO: 1782672 - DNA, 15 bp, Homo sapiens
aggctgggagtctct

SEQ ID NO: 1782673 - DNA, 15 bp, Homo sapiens
ggctgggagtctctg

SEQ ID NO: 1782674 - DNA, 15 bp, Homo sapiens
gctgggagtctctgt

SEQ ID NO: 1782675 - DNA, 15 bp, Homo sapiens
ctgggagtctctgtg

SEQ ID NO: 1782676 - DNA, 15 bp, Homo sapiens
tgggagtctctgtgg

SEQ ID NO: 1782677 - DNA, 15 bp, Homo sapiens
gggagtctctgtggc

SEQ ID NO: 1782678 - DNA, 15 bp, Homo sapiens
ggagtctctgtggct

SEQ ID NO: 1782679 - DNA, 15 bp, Homo sapiens
gagtctctgtggctg

SEQ ID NO: 1782680 - DNA, 15 bp, Homo sapiens
agtctctgtggctgc

SEQ ID NO: 1782681 - DNA, 15 bp, Homo sapiens
gtctctgtggctgct

SEQ ID NO: 1782682 - DNA, 15 bp, Homo sapiens
tctctgtggctgcta

SEQ ID NO: 1782683 - DNA, 15 bp, Homo sapiens
ctctgtggctgctat

SEQ ID NO: 1782684 - DNA, 15 bp, Homo sapiens
tctgtggctgctatt

SEQ ID NO: 1782685 - DNA, 15 bp, Homo sapiens
ctgtggctgctattt

SEQ ID NO: 1782686 - DNA, 15 bp, Homo sapiens
tgtggctgctatttc

SEQ ID NO: 1782687 - DNA, 15 bp, Homo sapiens
gtggctgctatttca

SEQ ID NO: 1782688 - DNA, 15 bp, Homo sapiens
tggctgctatttcaa

SEQ ID NO: 1782689 - DNA, 15 bp, Homo sapiens
ggctgctatttcaat

SEQ ID NO: 1782690 - DNA, 15 bp, Homo sapiens
gctgctatttcaatt

SEQ ID NO: 1782691 - DNA, 15 bp, Homo sapiens
ctgctatttcaattc

SEQ ID NO: 1782692 - DNA, 15 bp, Homo sapiens
tgctatttcaattca

SEQ ID NO: 1782693 - DNA, 15 bp, Homo sapiens
gctatttcaattcat

SEQ ID NO: 1782694 - DNA, 15 bp, Homo sapiens
ctatttcaattcatg

SEQ ID NO: 1782695 - DNA, 15 bp, Homo sapiens
tatttcaattcatgg

SEQ ID NO: 1782696 - DNA, 15 bp, Homo sapiens
atttcaattcatggg

SEQ ID NO: 1782697 - DNA, 15 bp, Homo sapiens
tttcaattcatgggc

SEQ ID NO: 1782698 - DNA, 15 bp, Homo sapiens
ttcaattcatgggct

SEQ ID NO: 1782699 - DNA, 15 bp, Homo sapiens
tcaattcatgggctg

SEQ ID NO: 1782700 - DNA, 15 bp, Homo sapiens
caattcatgggctgg

SEQ ID NO: 1782701 - DNA, 15 bp, Homo sapiens
aattcatgggctggg

SEQ ID NO: 1782702 - DNA, 15 bp, Homo sapiens
attcatgggctgggg

SEQ ID NO: 1782703 - DNA, 15 bp, Homo sapiens
ttcatgggctgggga

SEQ ID NO: 1782704 - DNA, 15 bp, Homo sapiens
tcatgggctggggag

SEQ ID NO: 1782705 - DNA, 15 bp, Homo sapiens
catgggctggggagg

SEQ ID NO: 1782706 - DNA, 15 bp, Homo sapiens
atgggctggggagga

SEQ ID NO: 1782707 - DNA, 15 bp, Homo sapiens
tgggctggggaggac

SEQ ID NO: 1782708 - DNA, 15 bp, Homo sapiens
gggctggggaggaca

SEQ ID NO: 1782709 - DNA, 15 bp, Homo sapiens
ggctggggaggacat

SEQ ID NO: 1782710 - DNA, 15 bp, Homo sapiens
gctggggaggacatg

SEQ ID NO: 1782711 - DNA, 15 bp, Homo sapiens
ctggggaggacatga

SEQ ID NO: 1782712 - DNA, 15 bp, Homo sapiens
tggggaggacatgaa

SEQ ID NO: 1782713 - DNA, 15 bp, Homo sapiens
ggggaggacatgaaa

SEQ ID NO: 1782714 - DNA, 15 bp, Homo sapiens
gggaggacatgaaag

SEQ ID NO: 1782715 - DNA, 15 bp, Homo sapiens
ggaggacatgaaaga

SEQ ID NO: 1782716 - DNA, 15 bp, Homo sapiens
gaggacatgaaagag

SEQ ID NO: 1782717 - DNA, 15 bp, Homo sapiens
aggacatgaaagagg

SEQ ID NO: 1782718 - DNA, 15 bp, Homo sapiens
ggacatgaaagaggc

SEQ ID NO: 1782719 - DNA, 15 bp, Homo sapiens
gacatgaaagaggca

SEQ ID NO: 1782720 - DNA, 15 bp, Homo sapiens
acatgaaagaggcag

SEQ ID NO: 1782721 - DNA, 15 bp, Homo sapiens
catgaaagaggcagc

SEQ ID NO: 1782722 - DNA, 15 bp, Homo sapiens
atgaaagaggcagca

SEQ ID NO: 1782723 - DNA, 15 bp, Homo sapiens
tgaaagaggcagcac

SEQ ID NO: 1782724 - DNA, 15 bp, Homo sapiens
gaaagaggcagcaca

SEQ ID NO: 1782725 - DNA, 15 bp, Homo sapiens
aaagaggcagcacac

SEQ ID NO: 1782726 - DNA, 15 bp, Homo sapiens
aagaggcagcacacc

SEQ ID NO: 1782727 - DNA, 15 bp, Homo sapiens
agaggcagcacaccg

SEQ ID NO: 1782728 - DNA, 15 bp, Homo sapiens
gaggcagcacaccgc

SEQ ID NO: 1782729 - DNA, 15 bp, Homo sapiens
aggcagcacaccgcc

SEQ ID NO: 1782730 - DNA, 15 bp, Homo sapiens
ggcagcacaccgccc

SEQ ID NO: 1782731 - DNA, 15 bp, Homo sapiens
gcagcacaccgccca

SEQ ID NO: 1782732 - DNA, 15 bp, Homo sapiens
cagcacaccgcccaa

SEQ ID NO: 1782733 - DNA, 15 bp, Homo sapiens
agcacaccgcccaag

SEQ ID NO: 1782734 - DNA, 15 bp, Homo sapiens
gcacaccgcccaaga

SEQ ID NO: 1782735 - DNA, 15 bp, Homo sapiens
cacaccgcccaagaa

SEQ ID NO: 1782736 - DNA, 15 bp, Homo sapiens
acaccgcccaagaat

SEQ ID NO: 1782737 - DNA, 15 bp, Homo sapiens
caccgcccaagaatc

SEQ ID NO: 1782738 - DNA, 15 bp, Homo sapiens
accgcccaagaatcc

SEQ ID NO: 1782739 - DNA, 15 bp, Homo sapiens
ccgcccaagaatcca

SEQ ID NO: 1782740 - DNA, 15 bp, Homo sapiens
cgcccaagaatccaa

SEQ ID NO: 1782741 - DNA, 15 bp, Homo sapiens
gcccaagaatccaag

SEQ ID NO: 1782742 - DNA, 15 bp, Homo sapiens
cccaagaatccaagg

SEQ ID NO: 1782743 - DNA, 15 bp, Homo sapiens
ccaagaatccaaggg

SEQ ID NO: 1782744 - DNA, 15 bp, Homo sapiens
caagaatccaagggc

SEQ ID NO: 1782745 - DNA, 15 bp, Homo sapiens
aagaatccaagggcc

SEQ ID NO: 1782746 - DNA, 15 bp, Homo sapiens
agaatccaagggcca

SEQ ID NO: 1782747 - DNA, 15 bp, Homo sapiens
gaatccaagggccac

SEQ ID NO: 1782748 - DNA, 15 bp, Homo sapiens
aatccaagggccact

SEQ ID NO: 1782749 - DNA, 15 bp, Homo sapiens
atccaagggccactt

SEQ ID NO: 1782750 - DNA, 15 bp, Homo sapiens
tccaagggccacttc

SEQ ID NO: 1782751 - DNA, 15 bp, Homo sapiens
ccaagggccacttcc

SEQ ID NO: 1782752 - DNA, 15 bp, Homo sapiens
caagggccacttcca

SEQ ID NO: 1782753 - DNA, 15 bp, Homo sapiens
aagggccacttccag

SEQ ID NO: 1782754 - DNA, 15 bp, Homo sapiens
agggccacttccaga

SEQ ID NO: 1782755 - DNA, 15 bp, Homo sapiens
gggccacttccagac

SEQ ID NO: 1782756 - DNA, 15 bp, Homo sapiens
ggccacttccagact

SEQ ID NO: 1782757 - DNA, 15 bp, Homo sapiens
gccacttccagactc

SEQ ID NO: 1782758 - DNA, 15 bp, Homo sapiens
ccacttccagactca

SEQ ID NO: 1782759 - DNA, 15 bp, Homo sapiens
cacttccagactcac

SEQ ID NO: 1782760 - DNA, 15 bp, Homo sapiens
acttccagactcacc

SEQ ID NO: 1782761 - DNA, 15 bp, Homo sapiens
cttccagactcacca

SEQ ID NO: 1782762 - DNA, 15 bp, Homo sapiens
ttccagactcaccac

SEQ ID NO: 1782763 - DNA, 15 bp, Homo sapiens
tccagactcaccaca

SEQ ID NO: 1782764 - DNA, 15 bp, Homo sapiens
ccagactcaccacac

SEQ ID NO: 1782765 - DNA, 15 bp, Homo sapiens
cagactcaccacacc

SEQ ID NO: 1782766 - DNA, 15 bp, Homo sapiens
agactcaccacaccc

SEQ ID NO: 1782767 - DNA, 15 bp, Homo sapiens
gactcaccacaccct

SEQ ID NO: 1782768 - DNA, 15 bp, Homo sapiens
actcaccacaccctg

SEQ ID NO: 1782769 - DNA, 15 bp, Homo sapiens
ctcaccacaccctgg

SEQ ID NO: 1782770 - DNA, 15 bp, Homo sapiens
tcaccacaccctggg

SEQ ID NO: 1782771 - DNA, 15 bp, Homo sapiens
caccacaccctgggg

SEQ ID NO: 1782772 - DNA, 15 bp, Homo sapiens
accacaccctgggga

SEQ ID NO: 1782773 - DNA, 15 bp, Homo sapiens
ccacaccctggggaa

SEQ ID NO: 1782774 - DNA, 15 bp, Homo sapiens
cacaccctggggaaa

SEQ ID NO: 1782775 - DNA, 15 bp, Homo sapiens
acaccctggggaaag

SEQ ID NO: 1782776 - DNA, 15 bp, Homo sapiens
caccctggggaaagc

SEQ ID NO: 1782777 - DNA, 15 bp, Homo sapiens
accctggggaaagca

SEQ ID NO: 1782778 - DNA, 15 bp, Homo sapiens
ccctggggaaagcat

SEQ ID NO: 1782779 - DNA, 15 bp, Homo sapiens
cctggggaaagcatg

SEQ ID NO: 1782780 - DNA, 15 bp, Homo sapiens
ctggggaaagcatgt

SEQ ID NO: 1782781 - DNA, 15 bp, Homo sapiens
tggggaaagcatgtc

SEQ ID NO: 1782782 - DNA, 15 bp, Homo sapiens
ggggaaagcatgtct

SEQ ID NO: 1782783 - DNA, 15 bp, Homo sapiens
gggaaagcatgtctt

SEQ ID NO: 1782784 - DNA, 15 bp, Homo sapiens
ggaaagcatgtcttt

SEQ ID NO: 1782785 - DNA, 15 bp, Homo sapiens
gaaagcatgtctttg

SEQ ID NO: 1782786 - DNA, 15 bp, Homo sapiens
aaagcatgtctttga

SEQ ID NO: 1782787 - DNA, 15 bp, Homo sapiens
aagcatgtctttgat

SEQ ID NO: 1782788 - DNA, 15 bp, Homo sapiens
agcatgtctttgata

SEQ ID NO: 1782789 - DNA, 15 bp, Homo sapiens
gcatgtctttgataa

SEQ ID NO: 1782790 - DNA, 15 bp, Homo sapiens
catgtctttgataat

SEQ ID NO: 1782791 - DNA, 15 bp, Homo sapiens
atgtctttgataata

SEQ ID NO: 1782792 - DNA, 15 bp, Homo sapiens
tgtctttgataataa

SEQ ID NO: 1782793 - DNA, 15 bp, Homo sapiens
gtctttgataataat

SEQ ID NO: 1782794 - DNA, 15 bp, Homo sapiens
tctttgataataata

SEQ ID NO: 1782795 - DNA, 15 bp, Homo sapiens
ctttgataataatat

SEQ ID NO: 1782796 - DNA, 15 bp, Homo sapiens
tttgataataatatg

SEQ ID NO: 1782797 - DNA, 15 bp, Homo sapiens
ttgataataatatga

SEQ ID NO: 1782798 - DNA, 15 bp, Homo sapiens
tgataataatatgat

SEQ ID NO: 1782799 - DNA, 15 bp, Homo sapiens
gataataatatgatc

SEQ ID NO: 1782800 - DNA, 15 bp, Homo sapiens
ataataatatgatcc

SEQ ID NO: 1782801 - DNA, 15 bp, Homo sapiens
taataatatgatcca

SEQ ID NO: 1782802 - DNA, 15 bp, Homo sapiens
aataatatgatccaa

SEQ ID NO: 1782803 - DNA, 15 bp, Homo sapiens
ataatatgatccaat

SEQ ID NO: 1782804 - DNA, 15 bp, Homo sapiens
taatatgatccaatt

SEQ ID NO: 1782805 - DNA, 15 bp, Homo sapiens
aatatgatccaattc

SEQ ID NO: 1782806 - DNA, 15 bp, Homo sapiens
atatgatccaattcg

SEQ ID NO: 1782807 - DNA, 15 bp, Homo sapiens
tatgatccaattcgg

SEQ ID NO: 1782808 - DNA, 15 bp, Homo sapiens
atgatccaattcggc

SEQ ID NO: 1782809 - DNA, 15 bp, Homo sapiens
tgatccaattcggct

SEQ ID NO: 1782810 - DNA, 15 bp, Homo sapiens
gatccaattcggctt

SEQ ID NO: 1782811 - DNA, 15 bp, Homo sapiens
atccaattcggctta

SEQ ID NO: 1782812 - DNA, 15 bp, Homo sapiens
tccaattcggcttaa

SEQ ID NO: 1782813 - DNA, 15 bp, Homo sapiens
ccaattcggcttaaa

SEQ ID NO: 1782814 - DNA, 15 bp, Homo sapiens
caattcggcttaaat

SEQ ID NO: 1782815 - DNA, 15 bp, Homo sapiens
aattcggcttaaatc

SEQ ID NO: 1782816 - DNA, 15 bp, Homo sapiens
attcggcttaaatcg

SEQ ID NO: 1782817 - DNA, 15 bp, Homo sapiens
ttcggcttaaatcgt

SEQ ID NO: 1782818 - DNA, 15 bp, Homo sapiens
tcggcttaaatcgta

SEQ ID NO: 1782819 - DNA, 15 bp, Homo sapiens
cggcttaaatcgtaa

SEQ ID NO: 1782820 - DNA, 15 bp, Homo sapiens
ggcttaaatcgtaat

SEQ ID NO: 1782821 - DNA, 15 bp, Homo sapiens
gcttaaatcgtaata

SEQ ID NO: 1782822 - DNA, 15 bp, Homo sapiens
cttaaatcgtaatac

SEQ ID NO: 1782823 - DNA, 15 bp, Homo sapiens
ttaaatcgtaataca

SEQ ID NO: 1782824 - DNA, 15 bp, Homo sapiens
taaatcgtaatacat

SEQ ID NO: 1782825 - DNA, 15 bp, Homo sapiens
aaatcgtaatacatg

SEQ ID NO: 1782826 - DNA, 15 bp, Homo sapiens
aatcgtaatacatgt

SEQ ID NO: 1782827 - DNA, 15 bp, Homo sapiens
atcgtaatacatgtg

SEQ ID NO: 1782828 - DNA, 15 bp, Homo sapiens
tcgtaatacatgtgt

SEQ ID NO: 1782829 - DNA, 15 bp, Homo sapiens
cgtaatacatgtgtc

SEQ ID NO: 1782830 - DNA, 15 bp, Homo sapiens
gtaatacatgtgtca

SEQ ID NO: 1782831 - DNA, 15 bp, Homo sapiens
taatacatgtgtcag

SEQ ID NO: 1782832 - DNA, 15 bp, Homo sapiens
aatacatgtgtcaga

SEQ ID NO: 1782833 - DNA, 15 bp, Homo sapiens
atacatgtgtcagat

SEQ ID NO: 1782834 - DNA, 15 bp, Homo sapiens
tacatgtgtcagatt

SEQ ID NO: 1782835 - DNA, 15 bp, Homo sapiens
acatgtgtcagattt

SEQ ID NO: 1782836 - DNA, 15 bp, Homo sapiens
catgtgtcagattta

SEQ ID NO: 1782837 - DNA, 15 bp, Homo sapiens
atgtgtcagatttaa

SEQ ID NO: 1782838 - DNA, 15 bp, Homo sapiens
tgtgtcagatttaaa

SEQ ID NO: 1782839 - DNA, 15 bp, Homo sapiens
gtgtcagatttaaat

SEQ ID NO: 1782840 - DNA, 15 bp, Homo sapiens
tgtcagatttaaata

SEQ ID NO: 1782841 - DNA, 15 bp, Homo sapiens
gtcagatttaaataa

SEQ ID NO: 1782842 - DNA, 15 bp, Homo sapiens
tcagatttaaataaa

SEQ ID NO: 1782843 - DNA, 15 bp, Homo sapiens
cagatttaaataaat

SEQ ID NO: 1782844 - DNA, 15 bp, Homo sapiens
agatttaaataaata

SEQ ID NO: 1782845 - DNA, 15 bp, Homo sapiens
gatttaaataaataa

SEQ ID NO: 1782846 - DNA, 15 bp, Homo sapiens
atttaaataaataat

SEQ ID NO: 1782847 - DNA, 15 bp, Homo sapiens
tttaaataaataata

SEQ ID NO: 1782848 - DNA, 15 bp, Homo sapiens
ttaaataaataatat

SEQ ID NO: 1782849 - DNA, 15 bp, Homo sapiens
taaataaataatatg

SEQ ID NO: 1782850 - DNA, 15 bp, Homo sapiens
aaataaataatatga

SEQ ID NO: 1782851 - DNA, 15 bp, Homo sapiens
aataaataatatgaa

SEQ ID NO: 1782852 - DNA, 15 bp, Homo sapiens
ataaataatatgaat

SEQ ID NO: 1782853 - DNA, 15 bp, Homo sapiens
taaataatatgaatt

SEQ ID NO: 1782854 - DNA, 15 bp, Homo sapiens
aaataatatgaattt

SEQ ID NO: 1782855 - DNA, 15 bp, Homo sapiens
aataatatgaatttt

SEQ ID NO: 1782856 - DNA, 15 bp, Homo sapiens
ataatatgaattttt

SEQ ID NO: 1782857 - DNA, 15 bp, Homo sapiens
taatatgaatttttt

SEQ ID NO: 1782858 - DNA, 15 bp, Homo sapiens
aatatgaatttttta

SEQ ID NO: 1782859 - DNA, 15 bp, Homo sapiens
atatgaattttttaa

SEQ ID NO: 1782860 - DNA, 15 bp, Homo sapiens
tatgaattttttaaa

SEQ ID NO: 1782861 - DNA, 15 bp, Homo sapiens
atgaattttttaaaa

SEQ ID NO: 1782862 - DNA, 15 bp, Homo sapiens
tgaattttttaaaac

SEQ ID NO: 1782863 - DNA, 15 bp, Homo sapiens
gaattttttaaaacg

SEQ ID NO: 1782864 - DNA, 15 bp, Homo sapiens
aattttttaaaacgt

SEQ ID NO: 1782865 - DNA, 15 bp, Homo sapiens
attttttaaaacgtc

SEQ ID NO: 1782866 - DNA, 15 bp, Homo sapiens
ttttttaaaacgtcc

SEQ ID NO: 1782867 - DNA, 15 bp, Homo sapiens
tttttaaaacgtccc

SEQ ID NO: 1782868 - DNA, 15 bp, Homo sapiens
ttttaaaacgtcccc

SEQ ID NO: 1782869 - DNA, 15 bp, Homo sapiens
tttaaaacgtcccca

SEQ ID NO: 1782870 - DNA, 15 bp, Homo sapiens
ttaaaacgtccccag

SEQ ID NO: 1782871 - DNA, 15 bp, Homo sapiens
taaaacgtccccaga

SEQ ID NO: 1782872 - DNA, 15 bp, Homo sapiens
aaaacgtccccagag

SEQ ID NO: 1782873 - DNA, 15 bp, Homo sapiens
aaacgtccccagagg

SEQ ID NO: 1782874 - DNA, 15 bp, Homo sapiens
aacgtccccagaggc

SEQ ID NO: 1782875 - DNA, 15 bp, Homo sapiens
acgtccccagaggct

SEQ ID NO: 1782876 - DNA, 15 bp, Homo sapiens
cgtccccagaggctg

SEQ ID NO: 1782877 - DNA, 15 bp, Homo sapiens
gtccccagaggctgg

SEQ ID NO: 1782878 - DNA, 15 bp, Homo sapiens
tccccagaggctggg

SEQ ID NO: 1782879 - DNA, 15 bp, Homo sapiens
ccccagaggctgggt

SEQ ID NO: 1782880 - DNA, 15 bp, Homo sapiens
cccagaggctgggtg

SEQ ID NO: 1782881 - DNA, 15 bp, Homo sapiens
ccagaggctgggtgc

SEQ ID NO: 1782882 - DNA, 15 bp, Homo sapiens
cagaggctgggtgca

SEQ ID NO: 1782883 - DNA, 15 bp, Homo sapiens
agaggctgggtgcag

SEQ ID NO: 1782884 - DNA, 15 bp, Homo sapiens
gaggctgggtgcagt

SEQ ID NO: 1782885 - DNA, 15 bp, Homo sapiens
aggctgggtgcagtg

SEQ ID NO: 1782886 - DNA, 15 bp, Homo sapiens
ggctgggtgcagtgg

SEQ ID NO: 1782887 - DNA, 15 bp, Homo sapiens
gctgggtgcagtggc

SEQ ID NO: 1782888 - DNA, 15 bp, Homo sapiens
ctgggtgcagtggct

SEQ ID NO: 1782889 - DNA, 15 bp, Homo sapiens
tgggtgcagtggctc

SEQ ID NO: 1782890 - DNA, 15 bp, Homo sapiens
ggtgcagtggctcat

SEQ ID NO: 1782891 - DNA, 15 bp, Homo sapiens
gtgcagtggctcatg

SEQ ID NO: 1782892 - DNA, 15 bp, Homo sapiens
tgcagtggctcatgc

SEQ ID NO: 1782893 - DNA, 15 bp, Homo sapiens
gcctgtaatcccaat

SEQ ID NO: 1782894 - DNA, 15 bp, Homo sapiens
cctgtaatcccaata

SEQ ID NO: 1782895 - DNA, 15 bp, Homo sapiens
ctgtaatcccaatac

SEQ ID NO: 1782896 - DNA, 15 bp, Homo sapiens
tgtaatcccaatact

SEQ ID NO: 1782897 - DNA, 15 bp, Homo sapiens
gtaatcccaatactt

SEQ ID NO: 1782898 - DNA, 15 bp, Homo sapiens
taatcccaatacttt

SEQ ID NO: 1782899 - DNA, 15 bp, Homo sapiens
aatcccaatactttg

SEQ ID NO: 1782900 - DNA, 15 bp, Homo sapiens
atcccaatactttgg

SEQ ID NO: 1782901 - DNA, 15 bp, Homo sapiens
tcccaatactttgga

SEQ ID NO: 1782902 - DNA, 15 bp, Homo sapiens
cccaatactttggaa

SEQ ID NO: 1782903 - DNA, 15 bp, Homo sapiens
ccaatactttggaag

SEQ ID NO: 1782904 - DNA, 15 bp, Homo sapiens
caatactttggaagg

SEQ ID NO: 1782905 - DNA, 15 bp, Homo sapiens
aatactttggaaggc

SEQ ID NO: 1782906 - DNA, 15 bp, Homo sapiens
atactttggaaggct

SEQ ID NO: 1782907 - DNA, 15 bp, Homo sapiens
tactttggaaggctg

SEQ ID NO: 1782908 - DNA, 15 bp, Homo sapiens
ttggaaggctgagga

SEQ ID NO: 1782909 - DNA, 15 bp, Homo sapiens
tggaaggctgaggag

SEQ ID NO: 1782910 - DNA, 15 bp, Homo sapiens
ggaaggctgaggagg

SEQ ID NO: 1782911 - DNA, 15 bp, Homo sapiens
gaaggctgaggaggg

SEQ ID NO: 1782912 - DNA, 15 bp, Homo sapiens
aaggctgaggaggga

SEQ ID NO: 1782913 - DNA, 15 bp, Homo sapiens
aggctgaggagggag

SEQ ID NO: 1782914 - DNA, 15 bp, Homo sapiens
ggctgaggagggaga

SEQ ID NO: 1782915 - DNA, 15 bp, Homo sapiens
gctgaggagggagaa

SEQ ID NO: 1782916 - DNA, 15 bp, Homo sapiens
ctgaggagggagaat

SEQ ID NO: 1782917 - DNA, 15 bp, Homo sapiens
tgaggagggagaatt

SEQ ID NO: 1782918 - DNA, 15 bp, Homo sapiens
gaggagggagaattg

SEQ ID NO: 1782919 - DNA, 15 bp, Homo sapiens
aggagggagaattgc

SEQ ID NO: 1782920 - DNA, 15 bp, Homo sapiens
ggagggagaattgct

SEQ ID NO: 1782921 - DNA, 15 bp, Homo sapiens
gagggagaattgctt

SEQ ID NO: 1782922 - DNA, 15 bp, Homo sapiens
agggagaattgcttg

SEQ ID NO: 1782923 - DNA, 15 bp, Homo sapiens
gagaattgcttgagg

SEQ ID NO: 1782924 - DNA, 15 bp, Homo sapiens
agaattgcttgaggc

SEQ ID NO: 1782925 - DNA, 15 bp, Homo sapiens
gaattgcttgaggcc

SEQ ID NO: 1782926 - DNA, 15 bp, Homo sapiens
aattgcttgaggcca

SEQ ID NO: 1782927 - DNA, 15 bp, Homo sapiens
ttgagaccagcttgg

SEQ ID NO: 1782928 - DNA, 15 bp, Homo sapiens
tgagaccagcttggg

SEQ ID NO: 1782929 - DNA, 15 bp, Homo sapiens
gagaccagcttgggc

SEQ ID NO: 1782930 - DNA, 15 bp, Homo sapiens
agaccagcttgggca

SEQ ID NO: 1782931 - DNA, 15 bp, Homo sapiens
gaccagcttgggcaa

SEQ ID NO: 1782932 - DNA, 15 bp, Homo sapiens
accagcttgggcaac

SEQ ID NO: 1782933 - DNA, 15 bp, Homo sapiens
agcttgggcaacaaa

SEQ ID NO: 1782934 - DNA, 15 bp, Homo sapiens
gcttgggcaacaaag

SEQ ID NO: 1782935 - DNA, 15 bp, Homo sapiens
cttgggcaacaaaga

SEQ ID NO: 1782936 - DNA, 15 bp, Homo sapiens
ttgggcaacaaagag

SEQ ID NO: 1782937 - DNA, 15 bp, Homo sapiens
tgggcaacaaagaga

SEQ ID NO: 1782938 - DNA, 15 bp, Homo sapiens
gggcaacaaagagag

SEQ ID NO: 1782939 - DNA, 15 bp, Homo sapiens
ggcaacaaagagaga

SEQ ID NO: 1782940 - DNA, 15 bp, Homo sapiens
gcaacaaagagagac

SEQ ID NO: 1782941 - DNA, 15 bp, Homo sapiens
caacaaagagagacc

SEQ ID NO: 1782942 - DNA, 15 bp, Homo sapiens
aacaaagagagaccc

SEQ ID NO: 1782943 - DNA, 15 bp, Homo sapiens
acaaagagagaccct

SEQ ID NO: 1782944 - DNA, 15 bp, Homo sapiens
caaagagagaccctg

SEQ ID NO: 1782945 - DNA, 15 bp, Homo sapiens
aaagagagaccctgt

SEQ ID NO: 1782946 - DNA, 15 bp, Homo sapiens
aagagagaccctgtc

SEQ ID NO: 1782947 - DNA, 15 bp, Homo sapiens
agagagaccctgtct

SEQ ID NO: 1782948 - DNA, 15 bp, Homo sapiens
gagagaccctgtctc

SEQ ID NO: 1782949 - DNA, 15 bp, Homo sapiens
agagaccctgtctct

SEQ ID NO: 1782950 - DNA, 15 bp, Homo sapiens
aagaaagaaaaaaac

SEQ ID NO: 1782951 - DNA, 15 bp, Homo sapiens
agaaagaaaaaaaca

SEQ ID NO: 1782952 - DNA, 15 bp, Homo sapiens
gaaagaaaaaaacaa

SEQ ID NO: 1782953 - DNA, 15 bp, Homo sapiens
aaagaaaaaaacaat

SEQ ID NO: 1782954 - DNA, 15 bp, Homo sapiens
aagaaaaaaacaata

SEQ ID NO: 1782955 - DNA, 15 bp, Homo sapiens
agaaaaaaacaataa

SEQ ID NO: 1782956 - DNA, 15 bp, Homo sapiens
gaaaaaaacaataaa

SEQ ID NO: 1782957 - DNA, 15 bp, Homo sapiens
aaaaaaacaataaat

SEQ ID NO: 1782958 - DNA, 15 bp, Homo sapiens
aaaaaacaataaatt

SEQ ID NO: 1782959 - DNA, 15 bp, Homo sapiens
aaaaacaataaatta

SEQ ID NO: 1782960 - DNA, 15 bp, Homo sapiens
aaaacaataaattag

SEQ ID NO: 1782961 - DNA, 15 bp, Homo sapiens
aaacaataaattagc

SEQ ID NO: 1782962 - DNA, 15 bp, Homo sapiens
aacaataaattagcc

SEQ ID NO: 1782963 - DNA, 15 bp, Homo sapiens
acaataaattagccg

SEQ ID NO: 1782964 - DNA, 15 bp, Homo sapiens
caataaattagccgg

SEQ ID NO: 1782965 - DNA, 15 bp, Homo sapiens
aataaattagccggg

SEQ ID NO: 1782966 - DNA, 15 bp, Homo sapiens
ataaattagccgggt

SEQ ID NO: 1782967 - DNA, 15 bp, Homo sapiens
taaattagccgggta

SEQ ID NO: 1782968 - DNA, 15 bp, Homo sapiens
aaattagccgggtat

SEQ ID NO: 1782969 - DNA, 15 bp, Homo sapiens
aattagccgggtatg

SEQ ID NO: 1782970 - DNA, 15 bp, Homo sapiens
attagccgggtatgc

SEQ ID NO: 1782971 - DNA, 15 bp, Homo sapiens
ttagccgggtatgct

SEQ ID NO: 1782972 - DNA, 15 bp, Homo sapiens
tagccgggtatgctg

SEQ ID NO: 1782973 - DNA, 15 bp, Homo sapiens
agccgggtatgctgg

SEQ ID NO: 1782974 - DNA, 15 bp, Homo sapiens
gccgggtatgctggc

SEQ ID NO: 1782975 - DNA, 15 bp, Homo sapiens
ccgggtatgctggca

SEQ ID NO: 1782976 - DNA, 15 bp, Homo sapiens
cgggtatgctggcac

SEQ ID NO: 1782977 - DNA, 15 bp, Homo sapiens
gggtatgctggcacg

SEQ ID NO: 1782978 - DNA, 15 bp, Homo sapiens
ggtatgctggcacgt

SEQ ID NO: 1782979 - DNA, 15 bp, Homo sapiens
gtatgctggcacgtg

SEQ ID NO: 1782980 - DNA, 15 bp, Homo sapiens
tatgctggcacgtgc

SEQ ID NO: 1782981 - DNA, 15 bp, Homo sapiens
atgctggcacgtgcc

SEQ ID NO: 1782982 - DNA, 15 bp, Homo sapiens
tgctggcacgtgcct

SEQ ID NO: 1782983 - DNA, 15 bp, Homo sapiens
gctggcacgtgcctg

SEQ ID NO: 1782984 - DNA, 15 bp, Homo sapiens
ctggcacgtgcctgt

SEQ ID NO: 1782985 - DNA, 15 bp, Homo sapiens
tggcacgtgcctgta

SEQ ID NO: 1782986 - DNA, 15 bp, Homo sapiens
ggcacgtgcctgtag

SEQ ID NO: 1782987 - DNA, 15 bp, Homo sapiens
gcacgtgcctgtagt

SEQ ID NO: 1782988 - DNA, 15 bp, Homo sapiens
cacgtgcctgtagtc

SEQ ID NO: 1782989 - DNA, 15 bp, Homo sapiens
ccagctactcaggat

SEQ ID NO: 1782990 - DNA, 15 bp, Homo sapiens
cagctactcaggatg

SEQ ID NO: 1782991 - DNA, 15 bp, Homo sapiens
agctactcaggatgc

SEQ ID NO: 1782992 - DNA, 15 bp, Homo sapiens
gctactcaggatgct

SEQ ID NO: 1782993 - DNA, 15 bp, Homo sapiens
ctactcaggatgctt

SEQ ID NO: 1782994 - DNA, 15 bp, Homo sapiens
tactcaggatgctta

SEQ ID NO: 1782995 - DNA, 15 bp, Homo sapiens
actcaggatgcttag

SEQ ID NO: 1782996 - DNA, 15 bp, Homo sapiens
ctcaggatgcttagg

SEQ ID NO: 1782997 - DNA, 15 bp, Homo sapiens
tcaggatgcttaggc

SEQ ID NO: 1782998 - DNA, 15 bp, Homo sapiens
caggatgcttaggca

SEQ ID NO: 1782999 - DNA, 15 bp, Homo sapiens
aggatgcttaggcag

SEQ ID NO: 1783000 - DNA, 15 bp, Homo sapiens
ggatgcttaggcagg

SEQ ID NO: 1783001 - DNA, 15 bp, Homo sapiens
gatgcttaggcagga

SEQ ID NO: 1783002 - DNA, 15 bp, Homo sapiens
atgcttaggcaggag

SEQ ID NO: 1783003 - DNA, 15 bp, Homo sapiens
tgcttaggcaggagg

SEQ ID NO: 1783004 - DNA, 15 bp, Homo sapiens
gcttaggcaggagga

SEQ ID NO: 1783005 - DNA, 15 bp, Homo sapiens
cttaggcaggaggat

SEQ ID NO: 1783006 - DNA, 15 bp, Homo sapiens
ttaggcaggaggatc

SEQ ID NO: 1783007 - DNA, 15 bp, Homo sapiens
taggcaggaggatcg

SEQ ID NO: 1783008 - DNA, 15 bp, Homo sapiens
ggaggatcgcttgat

SEQ ID NO: 1783009 - DNA, 15 bp, Homo sapiens
gaggatcgcttgatc

SEQ ID NO: 1783010 - DNA, 15 bp, Homo sapiens
aggatcgcttgatcc

SEQ ID NO: 1783011 - DNA, 15 bp, Homo sapiens
ggatcgcttgatccc

SEQ ID NO: 1783012 - DNA, 15 bp, Homo sapiens
gatcgcttgatccca

SEQ ID NO: 1783013 - DNA, 15 bp, Homo sapiens
atcgcttgatcccag

SEQ ID NO: 1783014 - DNA, 15 bp, Homo sapiens
tcgcttgatcccagg

SEQ ID NO: 1783015 - DNA, 15 bp, Homo sapiens
cgcttgatcccagga

SEQ ID NO: 1783016 - DNA, 15 bp, Homo sapiens
gcttgatcccaggac

SEQ ID NO: 1783017 - DNA, 15 bp, Homo sapiens
cttgatcccaggacg

SEQ ID NO: 1783018 - DNA, 15 bp, Homo sapiens
ttgatcccaggacgt

SEQ ID NO: 1783019 - DNA, 15 bp, Homo sapiens
tgatcccaggacgtt

SEQ ID NO: 1783020 - DNA, 15 bp, Homo sapiens
gatcccaggacgttg

SEQ ID NO: 1783021 - DNA, 15 bp, Homo sapiens
atcccaggacgttga

SEQ ID NO: 1783022 - DNA, 15 bp, Homo sapiens
tcccaggacgttgag

SEQ ID NO: 1783023 - DNA, 15 bp, Homo sapiens
cccaggacgttgaga

SEQ ID NO: 1783024 - DNA, 15 bp, Homo sapiens
ccaggacgttgagac

SEQ ID NO: 1783025 - DNA, 15 bp, Homo sapiens
caggacgttgagacc

SEQ ID NO: 1783026 - DNA, 15 bp, Homo sapiens
aggacgttgagacca

SEQ ID NO: 1783027 - DNA, 15 bp, Homo sapiens
ggacgttgagaccac

SEQ ID NO: 1783028 - DNA, 15 bp, Homo sapiens
gacgttgagaccaca

SEQ ID NO: 1783029 - DNA, 15 bp, Homo sapiens
acgttgagaccacag

SEQ ID NO: 1783030 - DNA, 15 bp, Homo sapiens
cgttgagaccacagt

SEQ ID NO: 1783031 - DNA, 15 bp, Homo sapiens
gttgagaccacagtt

SEQ ID NO: 1783032 - DNA, 15 bp, Homo sapiens
ttgagaccacagtta

SEQ ID NO: 1783033 - DNA, 15 bp, Homo sapiens
tgagaccacagttag

SEQ ID NO: 1783034 - DNA, 15 bp, Homo sapiens
gagaccacagttagc

SEQ ID NO: 1783035 - DNA, 15 bp, Homo sapiens
agaccacagttagcc

SEQ ID NO: 1783036 - DNA, 15 bp, Homo sapiens
gaccacagttagcca

SEQ ID NO: 1783037 - DNA, 15 bp, Homo sapiens
accacagttagccat

SEQ ID NO: 1783038 - DNA, 15 bp, Homo sapiens
ccacagttagccatg

SEQ ID NO: 1783039 - DNA, 15 bp, Homo sapiens
cacagttagccatga

SEQ ID NO: 1783040 - DNA, 15 bp, Homo sapiens
acagttagccatgat

SEQ ID NO: 1783041 - DNA, 15 bp, Homo sapiens
cagttagccatgatg

SEQ ID NO: 1783042 - DNA, 15 bp, Homo sapiens
agttagccatgatgg

SEQ ID NO: 1783043 - DNA, 15 bp, Homo sapiens
gttagccatgatggc

SEQ ID NO: 1783044 - DNA, 15 bp, Homo sapiens
ttagccatgatggca

SEQ ID NO: 1783045 - DNA, 15 bp, Homo sapiens
tagccatgatggcac

SEQ ID NO: 1783046 - DNA, 15 bp, Homo sapiens
agccatgatggcacc

SEQ ID NO: 1783047 - DNA, 15 bp, Homo sapiens
gccatgatggcacca

SEQ ID NO: 1783048 - DNA, 15 bp, Homo sapiens
ccatgatggcaccac

SEQ ID NO: 1783049 - DNA, 15 bp, Homo sapiens
catgatggcaccact

SEQ ID NO: 1783050 - DNA, 15 bp, Homo sapiens
atgatggcaccactg

SEQ ID NO: 1783051 - DNA, 15 bp, Homo sapiens
tgatggcaccactgc

SEQ ID NO: 1783052 - DNA, 15 bp, Homo sapiens
atggcaccactgcac

SEQ ID NO: 1783053 - DNA, 15 bp, Homo sapiens
tggcaccactgcact

SEQ ID NO: 1783054 - DNA, 15 bp, Homo sapiens
ggcaccactgcactc

SEQ ID NO: 1783055 - DNA, 15 bp, Homo sapiens
tgacagagcaagacc

SEQ ID NO: 1783056 - DNA, 15 bp, Homo sapiens
gacagagcaagaccc

SEQ ID NO: 1783057 - DNA, 15 bp, Homo sapiens
ccctgtctctaaaat

SEQ ID NO: 1783058 - DNA, 15 bp, Homo sapiens
cctgtctctaaaata

SEQ ID NO: 1783059 - DNA, 15 bp, Homo sapiens
ctgtctctaaaataa

SEQ ID NO: 1783060 - DNA, 15 bp, Homo sapiens
tgtctctaaaataaa

SEQ ID NO: 1783061 - DNA, 15 bp, Homo sapiens
gtctctaaaataaaa

SEQ ID NO: 1783062 - DNA, 15 bp, Homo sapiens
tctctaaaataaaat

SEQ ID NO: 1783063 - DNA, 15 bp, Homo sapiens
ctctaaaataaaata

SEQ ID NO: 1783064 - DNA, 15 bp, Homo sapiens
tctaaaataaaataa

SEQ ID NO: 1783065 - DNA, 15 bp, Homo sapiens
ctaaaataaaataaa

SEQ ID NO: 1783066 - DNA, 15 bp, Homo sapiens
aaataaaataaaatg

SEQ ID NO: 1783067 - DNA, 15 bp, Homo sapiens
aataaaataaaatgg

SEQ ID NO: 1783068 - DNA, 15 bp, Homo sapiens
ataaaataaaatggg

SEQ ID NO: 1783069 - DNA, 15 bp, Homo sapiens
taaaataaaatgggc

SEQ ID NO: 1783070 - DNA, 15 bp, Homo sapiens
aaaataaaatgggcc

SEQ ID NO: 1783071 - DNA, 15 bp, Homo sapiens
aaataaaatgggcct

SEQ ID NO: 1783072 - DNA, 15 bp, Homo sapiens
aataaaatgggcctg

SEQ ID NO: 1783073 - DNA, 15 bp, Homo sapiens
ataaaatgggcctgg

SEQ ID NO: 1783074 - DNA, 15 bp, Homo sapiens
taaaatgggcctggc

SEQ ID NO: 1783075 - DNA, 15 bp, Homo sapiens
aaaatgggcctggca

SEQ ID NO: 1783076 - DNA, 15 bp, Homo sapiens
aaatgggcctggcat

SEQ ID NO: 1783077 - DNA, 15 bp, Homo sapiens
aatgggcctggcatg

SEQ ID NO: 1783078 - DNA, 15 bp, Homo sapiens
atgggcctggcatgg

SEQ ID NO: 1783079 - DNA, 15 bp, Homo sapiens
tgggcctggcatggc

SEQ ID NO: 1783080 - DNA, 15 bp, Homo sapiens
gggcctggcatggcg

SEQ ID NO: 1783081 - DNA, 15 bp, Homo sapiens
ggcctggcatggcgg

SEQ ID NO: 1783082 - DNA, 15 bp, Homo sapiens
gcctggcatggcggc

SEQ ID NO: 1783083 - DNA, 15 bp, Homo sapiens
cctggcatggcggct

SEQ ID NO: 1783084 - DNA, 15 bp, Homo sapiens
ctggcatggcggctt

SEQ ID NO: 1783085 - DNA, 15 bp, Homo sapiens
tggcatggcggctta

SEQ ID NO: 1783086 - DNA, 15 bp, Homo sapiens
ggcatggcggcttat

SEQ ID NO: 1783087 - DNA, 15 bp, Homo sapiens
gcatggcggcttatg

SEQ ID NO: 1783088 - DNA, 15 bp, Homo sapiens
catggcggcttatgc

SEQ ID NO: 1783089 - DNA, 15 bp, Homo sapiens
atggcggcttatgcc

SEQ ID NO: 1783090 - DNA, 15 bp, Homo sapiens
tggcggcttatgcct

SEQ ID NO: 1783091 - DNA, 15 bp, Homo sapiens
ggcggcttatgcctg

SEQ ID NO: 1783092 - DNA, 15 bp, Homo sapiens
gcggcttatgcctgt

SEQ ID NO: 1783093 - DNA, 15 bp, Homo sapiens
cggcttatgcctgta

SEQ ID NO: 1783094 - DNA, 15 bp, Homo sapiens
ttgggaggtcgaggt

SEQ ID NO: 1783095 - DNA, 15 bp, Homo sapiens
tgggaggtcgaggtg

SEQ ID NO: 1783096 - DNA, 15 bp, Homo sapiens
gggaggtcgaggtgg

SEQ ID NO: 1783097 - DNA, 15 bp, Homo sapiens
ggaggtcgaggtggg

SEQ ID NO: 1783098 - DNA, 15 bp, Homo sapiens
gaggtcgaggtgggt

SEQ ID NO: 1783099 - DNA, 15 bp, Homo sapiens
aggtcgaggtgggtg

SEQ ID NO: 1783100 - DNA, 15 bp, Homo sapiens
ggtcgaggtgggtgg

SEQ ID NO: 1783101 - DNA, 15 bp, Homo sapiens
gtcgaggtgggtgga

SEQ ID NO: 1783102 - DNA, 15 bp, Homo sapiens
tcgaggtgggtggat

SEQ ID NO: 1783103 - DNA, 15 bp, Homo sapiens
ggtgggtggatcact

SEQ ID NO: 1783104 - DNA, 15 bp, Homo sapiens
gtgggtggatcactt

SEQ ID NO: 1783105 - DNA, 15 bp, Homo sapiens
tgggtggatcacttg

SEQ ID NO: 1783106 - DNA, 15 bp, Homo sapiens
cgagactagcctagc

SEQ ID NO: 1783107 - DNA, 15 bp, Homo sapiens
gagactagcctagcc

SEQ ID NO: 1783108 - DNA, 15 bp, Homo sapiens
agactagcctagcca

SEQ ID NO: 1783109 - DNA, 15 bp, Homo sapiens
gactagcctagccaa

SEQ ID NO: 1783110 - DNA, 15 bp, Homo sapiens
actagcctagccaac

SEQ ID NO: 1783111 - DNA, 15 bp, Homo sapiens
ctagcctagccaaca

SEQ ID NO: 1783112 - DNA, 15 bp, Homo sapiens
tagcctagccaacac

SEQ ID NO: 1783113 - DNA, 15 bp, Homo sapiens
agcctagccaacacg

SEQ ID NO: 1783114 - DNA, 15 bp, Homo sapiens
gcctagccaacacgg

SEQ ID NO: 1783115 - DNA, 15 bp, Homo sapiens
cctagccaacacggt

SEQ ID NO: 1783116 - DNA, 15 bp, Homo sapiens
ctagccaacacggtg

SEQ ID NO: 1783117 - DNA, 15 bp, Homo sapiens
tagccaacacggtga

SEQ ID NO: 1783118 - DNA, 15 bp, Homo sapiens
agccaacacggtgaa

SEQ ID NO: 1783119 - DNA, 15 bp, Homo sapiens
gaaaccctgtctgtt

SEQ ID NO: 1783120 - DNA, 15 bp, Homo sapiens
aaaccctgtctgttc

SEQ ID NO: 1783121 - DNA, 15 bp, Homo sapiens
aaccctgtctgttct

SEQ ID NO: 1783122 - DNA, 15 bp, Homo sapiens
accctgtctgttcta

SEQ ID NO: 1783123 - DNA, 15 bp, Homo sapiens
ccctgtctgttctaa

SEQ ID NO: 1783124 - DNA, 15 bp, Homo sapiens
cctgtctgttctaaa

SEQ ID NO: 1783125 - DNA, 15 bp, Homo sapiens
ctgtctgttctaaaa

SEQ ID NO: 1783126 - DNA, 15 bp, Homo sapiens
tgtctgttctaaaaa

SEQ ID NO: 1783127 - DNA, 15 bp, Homo sapiens
gtctgttctaaaaat

SEQ ID NO: 1783128 - DNA, 15 bp, Homo sapiens
tctgttctaaaaata

SEQ ID NO: 1783129 - DNA, 15 bp, Homo sapiens
ctgttctaaaaatac

SEQ ID NO: 1783130 - DNA, 15 bp, Homo sapiens
tgttctaaaaataca

SEQ ID NO: 1783131 - DNA, 15 bp, Homo sapiens
gttctaaaaatacag

SEQ ID NO: 1783132 - DNA, 15 bp, Homo sapiens
ttctaaaaatacaga

SEQ ID NO: 1783133 - DNA, 15 bp, Homo sapiens
tctaaaaatacagaa

SEQ ID NO: 1783134 - DNA, 15 bp, Homo sapiens
ctaaaaatacagaaa

SEQ ID NO: 1783135 - DNA, 15 bp, Homo sapiens
taaaaatacagaaat

SEQ ID NO: 1783136 - DNA, 15 bp, Homo sapiens
aaaaatacagaaatg

SEQ ID NO: 1783137 - DNA, 15 bp, Homo sapiens
aaaatacagaaatga

SEQ ID NO: 1783138 - DNA, 15 bp, Homo sapiens
aaatacagaaatgag

SEQ ID NO: 1783139 - DNA, 15 bp, Homo sapiens
aatacagaaatgagc

SEQ ID NO: 1783140 - DNA, 15 bp, Homo sapiens
atacagaaatgagct

SEQ ID NO: 1783141 - DNA, 15 bp, Homo sapiens
tacagaaatgagctg

SEQ ID NO: 1783142 - DNA, 15 bp, Homo sapiens
acagaaatgagctgg

SEQ ID NO: 1783143 - DNA, 15 bp, Homo sapiens
cagaaatgagctggg

SEQ ID NO: 1783144 - DNA, 15 bp, Homo sapiens
agaaatgagctggga

SEQ ID NO: 1783145 - DNA, 15 bp, Homo sapiens
gaaatgagctgggag

SEQ ID NO: 1783146 - DNA, 15 bp, Homo sapiens
aaatgagctgggagt

SEQ ID NO: 1783147 - DNA, 15 bp, Homo sapiens
aatgagctgggagtg

SEQ ID NO: 1783148 - DNA, 15 bp, Homo sapiens
atgagctgggagtgg

SEQ ID NO: 1783149 - DNA, 15 bp, Homo sapiens
tgagctgggagtggt

SEQ ID NO: 1783150 - DNA, 15 bp, Homo sapiens
gagctgggagtggtg

SEQ ID NO: 1783151 - DNA, 15 bp, Homo sapiens
agctgggagtggtgg

SEQ ID NO: 1783152 - DNA, 15 bp, Homo sapiens
gctgggagtggtggc

SEQ ID NO: 1783153 - DNA, 15 bp, Homo sapiens
ctgggagtggtggca

SEQ ID NO: 1783154 - DNA, 15 bp, Homo sapiens
tgggagtggtggcag

SEQ ID NO: 1783155 - DNA, 15 bp, Homo sapiens
gggagtggtggcagg

SEQ ID NO: 1783156 - DNA, 15 bp, Homo sapiens
gagtggtggcaggca

SEQ ID NO: 1783157 - DNA, 15 bp, Homo sapiens
agtggtggcaggcac

SEQ ID NO: 1783158 - DNA, 15 bp, Homo sapiens
gtggtggcaggcact

SEQ ID NO: 1783159 - DNA, 15 bp, Homo sapiens
tggtggcaggcactg

SEQ ID NO: 1783160 - DNA, 15 bp, Homo sapiens
ggtggcaggcactgg

SEQ ID NO: 1783161 - DNA, 15 bp, Homo sapiens
gtggcaggcactggt

SEQ ID NO: 1783162 - DNA, 15 bp, Homo sapiens
tggcaggcactggta

SEQ ID NO: 1783163 - DNA, 15 bp, Homo sapiens
ggcaggcactggtaa

SEQ ID NO: 1783164 - DNA, 15 bp, Homo sapiens
gcaggcactggtaat

SEQ ID NO: 1783165 - DNA, 15 bp, Homo sapiens
caggcactggtaatc

SEQ ID NO: 1783166 - DNA, 15 bp, Homo sapiens
aggcactggtaatcc

SEQ ID NO: 1783167 - DNA, 15 bp, Homo sapiens
ggcactggtaatccc

SEQ ID NO: 1783168 - DNA, 15 bp, Homo sapiens
gcactggtaatccca

SEQ ID NO: 1783169 - DNA, 15 bp, Homo sapiens
cactggtaatcccag

SEQ ID NO: 1783170 - DNA, 15 bp, Homo sapiens
actggtaatcccagc

SEQ ID NO: 1783171 - DNA, 15 bp, Homo sapiens
ctggtaatcccagct

SEQ ID NO: 1783172 - DNA, 15 bp, Homo sapiens
tggtaatcccagcta

SEQ ID NO: 1783173 - DNA, 15 bp, Homo sapiens
ggtaatcccagctac

SEQ ID NO: 1783174 - DNA, 15 bp, Homo sapiens
cccagctactcggag

SEQ ID NO: 1783175 - DNA, 15 bp, Homo sapiens
ccagctactcggagg

SEQ ID NO: 1783176 - DNA, 15 bp, Homo sapiens
cagctactcggaggc

SEQ ID NO: 1783177 - DNA, 15 bp, Homo sapiens
agctactcggaggct

SEQ ID NO: 1783178 - DNA, 15 bp, Homo sapiens
gctactcggaggcta

SEQ ID NO: 1783179 - DNA, 15 bp, Homo sapiens
ctactcggaggctaa

SEQ ID NO: 1783180 - DNA, 15 bp, Homo sapiens
tactcggaggctaag

SEQ ID NO: 1783181 - DNA, 15 bp, Homo sapiens
actcggaggctaagg

SEQ ID NO: 1783182 - DNA, 15 bp, Homo sapiens
ctcggaggctaaggc

SEQ ID NO: 1783183 - DNA, 15 bp, Homo sapiens
tcggaggctaaggca

SEQ ID NO: 1783184 - DNA, 15 bp, Homo sapiens
cggaggctaaggcag

SEQ ID NO: 1783185 - DNA, 15 bp, Homo sapiens
taaggcaggagaatt

SEQ ID NO: 1783186 - DNA, 15 bp, Homo sapiens
aaggcaggagaattg

SEQ ID NO: 1783187 - DNA, 15 bp, Homo sapiens
tgaacccgggaggcc

SEQ ID NO: 1783188 - DNA, 15 bp, Homo sapiens
gaacccgggaggcca

SEQ ID NO: 1783189 - DNA, 15 bp, Homo sapiens
aacccgggaggccaa

SEQ ID NO: 1783190 - DNA, 15 bp, Homo sapiens
acccgggaggccaag

SEQ ID NO: 1783191 - DNA, 15 bp, Homo sapiens
cccgggaggccaagg

SEQ ID NO: 1783192 - DNA, 15 bp, Homo sapiens
ccgggaggccaaggt

SEQ ID NO: 1783193 - DNA, 15 bp, Homo sapiens
cgggaggccaaggtt

SEQ ID NO: 1783194 - DNA, 15 bp, Homo sapiens
ggaggccaaggttgc

SEQ ID NO: 1783195 - DNA, 15 bp, Homo sapiens
gaggccaaggttgca

SEQ ID NO: 1783196 - DNA, 15 bp, Homo sapiens
aggccaaggttgcag

SEQ ID NO: 1783197 - DNA, 15 bp, Homo sapiens
ggccaaggttgcagt

SEQ ID NO: 1783198 - DNA, 15 bp, Homo sapiens
gccaaggttgcagtg

SEQ ID NO: 1783199 - DNA, 15 bp, Homo sapiens
ccaaggttgcagtga

SEQ ID NO: 1783200 - DNA, 15 bp, Homo sapiens
caaggttgcagtgag

SEQ ID NO: 1783201 - DNA, 15 bp, Homo sapiens
aaggttgcagtgagg

SEQ ID NO: 1783202 - DNA, 15 bp, Homo sapiens
aggttgcagtgaggc

SEQ ID NO: 1783203 - DNA, 15 bp, Homo sapiens
ggttgcagtgaggca

SEQ ID NO: 1783204 - DNA, 15 bp, Homo sapiens
gttgcagtgaggcaa

SEQ ID NO: 1783205 - DNA, 15 bp, Homo sapiens
ttgcagtgaggcaag

SEQ ID NO: 1783206 - DNA, 15 bp, Homo sapiens
tgcagtgaggcaaga

SEQ ID NO: 1783207 - DNA, 15 bp, Homo sapiens
gcagtgaggcaagat

SEQ ID NO: 1783208 - DNA, 15 bp, Homo sapiens
cagtgaggcaagatg

SEQ ID NO: 1783209 - DNA, 15 bp, Homo sapiens
agtgaggcaagatgg

SEQ ID NO: 1783210 - DNA, 15 bp, Homo sapiens
gtgaggcaagatggc

SEQ ID NO: 1783211 - DNA, 15 bp, Homo sapiens
tgaggcaagatggca

SEQ ID NO: 1783212 - DNA, 15 bp, Homo sapiens
gaggcaagatggcac

SEQ ID NO: 1783213 - DNA, 15 bp, Homo sapiens
aggcaagatggcacc

SEQ ID NO: 1783214 - DNA, 15 bp, Homo sapiens
ggcaagatggcacca

SEQ ID NO: 1783215 - DNA, 15 bp, Homo sapiens
gcaagatggcaccac

SEQ ID NO: 1783216 - DNA, 15 bp, Homo sapiens
accactgcactccaa

SEQ ID NO: 1783217 - DNA, 15 bp, Homo sapiens
tgcactccaacctgg

SEQ ID NO: 1783218 - DNA, 15 bp, Homo sapiens
gcactccaacctggg

SEQ ID NO: 1783219 - DNA, 15 bp, Homo sapiens
cactccaacctgggt

SEQ ID NO: 1783220 - DNA, 15 bp, Homo sapiens
actccaacctgggtg

SEQ ID NO: 1783221 - DNA, 15 bp, Homo sapiens
ctccaacctgggtga

SEQ ID NO: 1783222 - DNA, 15 bp, Homo sapiens
tccaacctgggtgac

SEQ ID NO: 1783223 - DNA, 15 bp, Homo sapiens
ccaacctgggtgaca

SEQ ID NO: 1783224 - DNA, 15 bp, Homo sapiens
caacctgggtgacag

SEQ ID NO: 1783225 - DNA, 15 bp, Homo sapiens
aacctgggtgacaga

SEQ ID NO: 1783226 - DNA, 15 bp, Homo sapiens
acctgggtgacagag

SEQ ID NO: 1783227 - DNA, 15 bp, Homo sapiens
agagcgagactccga

SEQ ID NO: 1783228 - DNA, 15 bp, Homo sapiens
gagcgagactccgat

SEQ ID NO: 1783229 - DNA, 15 bp, Homo sapiens
agcgagactccgatt

SEQ ID NO: 1783230 - DNA, 15 bp, Homo sapiens
gcgagactccgattc

SEQ ID NO: 1783231 - DNA, 15 bp, Homo sapiens
cgagactccgattca

SEQ ID NO: 1783232 - DNA, 15 bp, Homo sapiens
gagactccgattcaa

SEQ ID NO: 1783233 - DNA, 15 bp, Homo sapiens
agactccgattcaaa

SEQ ID NO: 1783234 - DNA, 15 bp, Homo sapiens
gactccgattcaaaa

SEQ ID NO: 1783235 - DNA, 15 bp, Homo sapiens
actccgattcaaaaa

SEQ ID NO: 1783236 - DNA, 15 bp, Homo sapiens
ctccgattcaaaaaa

SEQ ID NO: 1783237 - DNA, 15 bp, Homo sapiens
tccgattcaaaaaaa

SEQ ID NO: 1783238 - DNA, 15 bp, Homo sapiens
ccgattcaaaaaaaa

SEQ ID NO: 1783239 - DNA, 15 bp, Homo sapiens
cgattcaaaaaaaat

SEQ ID NO: 1783240 - DNA, 15 bp, Homo sapiens
gattcaaaaaaaata

SEQ ID NO: 1783241 - DNA, 15 bp, Homo sapiens
attcaaaaaaaataa

SEQ ID NO: 1783242 - DNA, 15 bp, Homo sapiens
ttcaaaaaaaataat

SEQ ID NO: 1783243 - DNA, 15 bp, Homo sapiens
ataataataaataaa

SEQ ID NO: 1783244 - DNA, 15 bp, Homo sapiens
taataataaataaat

SEQ ID NO: 1783245 - DNA, 15 bp, Homo sapiens
aataataaataaata

SEQ ID NO: 1783246 - DNA, 15 bp, Homo sapiens
ataataaataaataa

SEQ ID NO: 1783247 - DNA, 15 bp, Homo sapiens
taataaataaataaa

SEQ ID NO: 1783248 - DNA, 15 bp, Homo sapiens
aataaataaataaac

SEQ ID NO: 1783249 - DNA, 15 bp, Homo sapiens
ataaataaataaaca

SEQ ID NO: 1783250 - DNA, 15 bp, Homo sapiens
taaataaataaacaa

SEQ ID NO: 1783251 - DNA, 15 bp, Homo sapiens
ataaacaaataaaat

SEQ ID NO: 1783252 - DNA, 15 bp, Homo sapiens
taaacaaataaaata

SEQ ID NO: 1783253 - DNA, 15 bp, Homo sapiens
aaacaaataaaataa

SEQ ID NO: 1783254 - DNA, 15 bp, Homo sapiens
aacaaataaaataaa

SEQ ID NO: 1783255 - DNA, 15 bp, Homo sapiens
acaaataaaataaaa

SEQ ID NO: 1783256 - DNA, 15 bp, Homo sapiens
caaataaaataaaat

SEQ ID NO: 1783257 - DNA, 15 bp, Homo sapiens
ataaaataaaataag

SEQ ID NO: 1783258 - DNA, 15 bp, Homo sapiens
taaaataaaataaga

SEQ ID NO: 1783259 - DNA, 15 bp, Homo sapiens
aaaataaaataagat

SEQ ID NO: 1783260 - DNA, 15 bp, Homo sapiens
aaataaaataagatt

SEQ ID NO: 1783261 - DNA, 15 bp, Homo sapiens
aataaaataagattc

SEQ ID NO: 1783262 - DNA, 15 bp, Homo sapiens
ataaaataagattcc

SEQ ID NO: 1783263 - DNA, 15 bp, Homo sapiens
taaaataagattccc

SEQ ID NO: 1783264 - DNA, 15 bp, Homo sapiens
aaaataagattccct

SEQ ID NO: 1783265 - DNA, 15 bp, Homo sapiens
aaataagattcccta

SEQ ID NO: 1783266 - DNA, 15 bp, Homo sapiens
aataagattccctag

SEQ ID NO: 1783267 - DNA, 15 bp, Homo sapiens
ataagattccctaga

SEQ ID NO: 1783268 - DNA, 15 bp, Homo sapiens
taagattccctagaa

SEQ ID NO: 1783269 - DNA, 15 bp, Homo sapiens
aagattccctagaac

SEQ ID NO: 1783270 - DNA, 15 bp, Homo sapiens
agattccctagaaca

SEQ ID NO: 1783271 - DNA, 15 bp, Homo sapiens
gattccctagaacac

SEQ ID NO: 1783272 - DNA, 15 bp, Homo sapiens
attccctagaacaca

SEQ ID NO: 1783273 - DNA, 15 bp, Homo sapiens
ttccctagaacacaa

SEQ ID NO: 1783274 - DNA, 15 bp, Homo sapiens
tccctagaacacaaa

SEQ ID NO: 1783275 - DNA, 15 bp, Homo sapiens
ccctagaacacaaac

SEQ ID NO: 1783276 - DNA, 15 bp, Homo sapiens
cctagaacacaaact

SEQ ID NO: 1783277 - DNA, 15 bp, Homo sapiens
ctagaacacaaactg

SEQ ID NO: 1783278 - DNA, 15 bp, Homo sapiens
tagaacacaaactgc

SEQ ID NO: 1783279 - DNA, 15 bp, Homo sapiens
agaacacaaactgct

SEQ ID NO: 1783280 - DNA, 15 bp, Homo sapiens
gaacacaaactgctt

SEQ ID NO: 1783281 - DNA, 15 bp, Homo sapiens
aacacaaactgctta

SEQ ID NO: 1783282 - DNA, 15 bp, Homo sapiens
acacaaactgcttac

SEQ ID NO: 1783283 - DNA, 15 bp, Homo sapiens
cacaaactgcttaca

SEQ ID NO: 1783284 - DNA, 15 bp, Homo sapiens
acaaactgcttacac

SEQ ID NO: 1783285 - DNA, 15 bp, Homo sapiens
caaactgcttacact

SEQ ID NO: 1783286 - DNA, 15 bp, Homo sapiens
aaactgcttacactt

SEQ ID NO: 1783287 - DNA, 15 bp, Homo sapiens
aactgcttacacttg

SEQ ID NO: 1783288 - DNA, 15 bp, Homo sapiens
actgcttacacttgc

SEQ ID NO: 1783289 - DNA, 15 bp, Homo sapiens
ctgcttacacttgct

SEQ ID NO: 1783290 - DNA, 15 bp, Homo sapiens
tgcttacacttgctt

SEQ ID NO: 1783291 - DNA, 15 bp, Homo sapiens
gcttacacttgcttc

SEQ ID NO: 1783292 - DNA, 15 bp, Homo sapiens
cttacacttgcttca

SEQ ID NO: 1783293 - DNA, 15 bp, Homo sapiens
ttacacttgcttcag

SEQ ID NO: 1783294 - DNA, 15 bp, Homo sapiens
tacacttgcttcagg

SEQ ID NO: 1783295 - DNA, 15 bp, Homo sapiens
acacttgcttcagga

SEQ ID NO: 1783296 - DNA, 15 bp, Homo sapiens
cacttgcttcaggaa

SEQ ID NO: 1783297 - DNA, 15 bp, Homo sapiens
acttgcttcaggaaa

SEQ ID NO: 1783298 - DNA, 15 bp, Homo sapiens
cttgcttcaggaaaa

SEQ ID NO: 1783299 - DNA, 15 bp, Homo sapiens
ttgcttcaggaaaat

SEQ ID NO: 1783300 - DNA, 15 bp, Homo sapiens
tgcttcaggaaaatt

SEQ ID NO: 1783301 - DNA, 15 bp, Homo sapiens
gcttcaggaaaatta

SEQ ID NO: 1783302 - DNA, 15 bp, Homo sapiens
cttcaggaaaattaa

SEQ ID NO: 1783303 - DNA, 15 bp, Homo sapiens
ttcaggaaaattaac

SEQ ID NO: 1783304 - DNA, 15 bp, Homo sapiens
tcaggaaaattaacc

SEQ ID NO: 1783305 - DNA, 15 bp, Homo sapiens
caggaaaattaacca

SEQ ID NO: 1783306 - DNA, 15 bp, Homo sapiens
aggaaaattaaccag

SEQ ID NO: 1783307 - DNA, 15 bp, Homo sapiens
ggaaaattaaccagg

SEQ ID NO: 1783308 - DNA, 15 bp, Homo sapiens
gaaaattaaccagga

SEQ ID NO: 1783309 - DNA, 15 bp, Homo sapiens
aaaattaaccaggaa

SEQ ID NO: 1783310 - DNA, 15 bp, Homo sapiens
aaattaaccaggaaa

SEQ ID NO: 1783311 - DNA, 15 bp, Homo sapiens
aattaaccaggaaac

SEQ ID NO: 1783312 - DNA, 15 bp, Homo sapiens
attaaccaggaaaca

SEQ ID NO: 1783313 - DNA, 15 bp, Homo sapiens
ttaaccaggaaacaa

SEQ ID NO: 1783314 - DNA, 15 bp, Homo sapiens
taaccaggaaacaac

SEQ ID NO: 1783315 - DNA, 15 bp, Homo sapiens
aaccaggaaacaaca

SEQ ID NO: 1783316 - DNA, 15 bp, Homo sapiens
accaggaaacaacag

SEQ ID NO: 1783317 - DNA, 15 bp, Homo sapiens
ccaggaaacaacaga

SEQ ID NO: 1783318 - DNA, 15 bp, Homo sapiens
caggaaacaacagat

SEQ ID NO: 1783319 - DNA, 15 bp, Homo sapiens
aggaaacaacagata

SEQ ID NO: 1783320 - DNA, 15 bp, Homo sapiens
ggaaacaacagatac

SEQ ID NO: 1783321 - DNA, 15 bp, Homo sapiens
gaaacaacagatact

SEQ ID NO: 1783322 - DNA, 15 bp, Homo sapiens
aaacaacagatactt

SEQ ID NO: 1783323 - DNA, 15 bp, Homo sapiens
aacaacagatacttc

SEQ ID NO: 1783324 - DNA, 15 bp, Homo sapiens
acaacagatacttca

SEQ ID NO: 1783325 - DNA, 15 bp, Homo sapiens
caacagatacttcat

SEQ ID NO: 1783326 - DNA, 15 bp, Homo sapiens
aacagatacttcatt

SEQ ID NO: 1783327 - DNA, 15 bp, Homo sapiens
acagatacttcatta

SEQ ID NO: 1783328 - DNA, 15 bp, Homo sapiens
cagatacttcattaa

SEQ ID NO: 1783329 - DNA, 15 bp, Homo sapiens
agatacttcattaaa

SEQ ID NO: 1783330 - DNA, 15 bp, Homo sapiens
gatacttcattaaac

SEQ ID NO: 1783331 - DNA, 15 bp, Homo sapiens
atacttcattaaact

SEQ ID NO: 1783332 - DNA, 15 bp, Homo sapiens
tacttcattaaactc

SEQ ID NO: 1783333 - DNA, 15 bp, Homo sapiens
acttcattaaactcc

SEQ ID NO: 1783334 - DNA, 15 bp, Homo sapiens
cttcattaaactcct

SEQ ID NO: 1783335 - DNA, 15 bp, Homo sapiens
ttcattaaactccta

SEQ ID NO: 1783336 - DNA, 15 bp, Homo sapiens
tcattaaactcctat

SEQ ID NO: 1783337 - DNA, 15 bp, Homo sapiens
cattaaactcctatt

SEQ ID NO: 1783338 - DNA, 15 bp, Homo sapiens
attaaactcctattt

SEQ ID NO: 1783339 - DNA, 15 bp, Homo sapiens
ttaaactcctatttg

SEQ ID NO: 1783340 - DNA, 15 bp, Homo sapiens
taaactcctatttgc

SEQ ID NO: 1783341 - DNA, 15 bp, Homo sapiens
aaactcctatttgca

SEQ ID NO: 1783342 - DNA, 15 bp, Homo sapiens
aactcctatttgcag

SEQ ID NO: 1783343 - DNA, 15 bp, Homo sapiens
actcctatttgcagg

SEQ ID NO: 1783344 - DNA, 15 bp, Homo sapiens
ctcctatttgcagga

SEQ ID NO: 1783345 - DNA, 15 bp, Homo sapiens
tcctatttgcaggag

SEQ ID NO: 1783346 - DNA, 15 bp, Homo sapiens
cctatttgcaggagc

SEQ ID NO: 1783347 - DNA, 15 bp, Homo sapiens
ctatttgcaggagcc

SEQ ID NO: 1783348 - DNA, 15 bp, Homo sapiens
tatttgcaggagcca

SEQ ID NO: 1783349 - DNA, 15 bp, Homo sapiens
atttgcaggagccat

SEQ ID NO: 1783350 - DNA, 15 bp, Homo sapiens
tttgcaggagccata

SEQ ID NO: 1783351 - DNA, 15 bp, Homo sapiens
ttgcaggagccatag

SEQ ID NO: 1783352 - DNA, 15 bp, Homo sapiens
tgcaggagccatagt

SEQ ID NO: 1783353 - DNA, 15 bp, Homo sapiens
gcaggagccatagtc

SEQ ID NO: 1783354 - DNA, 15 bp, Homo sapiens
caggagccatagtca

SEQ ID NO: 1783355 - DNA, 15 bp, Homo sapiens
aggagccatagtcac

SEQ ID NO: 1783356 - DNA, 15 bp, Homo sapiens
ggagccatagtcact

SEQ ID NO: 1783357 - DNA, 15 bp, Homo sapiens
gagccatagtcactg

SEQ ID NO: 1783358 - DNA, 15 bp, Homo sapiens
agccatagtcactgc

SEQ ID NO: 1783359 - DNA, 15 bp, Homo sapiens
gccatagtcactgca

SEQ ID NO: 1783360 - DNA, 15 bp, Homo sapiens
ccatagtcactgcag

SEQ ID NO: 1783361 - DNA, 15 bp, Homo sapiens
catagtcactgcagc

SEQ ID NO: 1783362 - DNA, 15 bp, Homo sapiens
atagtcactgcagcc

SEQ ID NO: 1783363 - DNA, 15 bp, Homo sapiens
tagtcactgcagccc

SEQ ID NO: 1783364 - DNA, 15 bp, Homo sapiens
agtcactgcagccca

SEQ ID NO: 1783365 - DNA, 15 bp, Homo sapiens
gtcactgcagcccat

SEQ ID NO: 1783366 - DNA, 15 bp, Homo sapiens
tcactgcagcccata

SEQ ID NO: 1783367 - DNA, 15 bp, Homo sapiens
cactgcagcccatac

SEQ ID NO: 1783368 - DNA, 15 bp, Homo sapiens
actgcagcccataca

SEQ ID NO: 1783369 - DNA, 15 bp, Homo sapiens
ctgcagcccatacag

SEQ ID NO: 1783370 - DNA, 15 bp, Homo sapiens
tgcagcccatacaga

SEQ ID NO: 1783371 - DNA, 15 bp, Homo sapiens
gcagcccatacagaa

SEQ ID NO: 1783372 - DNA, 15 bp, Homo sapiens
cagcccatacagaaa

SEQ ID NO: 1783373 - DNA, 15 bp, Homo sapiens
agcccatacagaaaa

SEQ ID NO: 1783374 - DNA, 15 bp, Homo sapiens
gcccatacagaaaaa

SEQ ID NO: 1783375 - DNA, 15 bp, Homo sapiens
cccatacagaaaaat

SEQ ID NO: 1783376 - DNA, 15 bp, Homo sapiens
ccatacagaaaaatc

SEQ ID NO: 1783377 - DNA, 15 bp, Homo sapiens
catacagaaaaatcc

SEQ ID NO: 1783378 - DNA, 15 bp, Homo sapiens
atacagaaaaatccc

SEQ ID NO: 1783379 - DNA, 15 bp, Homo sapiens
tacagaaaaatcccc

SEQ ID NO: 1783380 - DNA, 15 bp, Homo sapiens
acagaaaaatccccc

SEQ ID NO: 1783381 - DNA, 15 bp, Homo sapiens
cagaaaaatccccca

SEQ ID NO: 1783382 - DNA, 15 bp, Homo sapiens
agaaaaatcccccaa

SEQ ID NO: 1783383 - DNA, 15 bp, Homo sapiens
gaaaaatcccccaaa

SEQ ID NO: 1783384 - DNA, 15 bp, Homo sapiens
aaaatcccccaaatt

SEQ ID NO: 1783385 - DNA, 15 bp, Homo sapiens
aaatcccccaaattc

SEQ ID NO: 1783386 - DNA, 15 bp, Homo sapiens
aatcccccaaattca

SEQ ID NO: 1783387 - DNA, 15 bp, Homo sapiens
atcccccaaattcat

SEQ ID NO: 1783388 - DNA, 15 bp, Homo sapiens
tcccccaaattcatg

SEQ ID NO: 1783389 - DNA, 15 bp, Homo sapiens
cccccaaattcatga

SEQ ID NO: 1783390 - DNA, 15 bp, Homo sapiens
ccccaaattcatgat

SEQ ID NO: 1783391 - DNA, 15 bp, Homo sapiens
cccaaattcatgatt

SEQ ID NO: 1783392 - DNA, 15 bp, Homo sapiens
ccaaattcatgatta

SEQ ID NO: 1783393 - DNA, 15 bp, Homo sapiens
caaattcatgattac

SEQ ID NO: 1783394 - DNA, 15 bp, Homo sapiens
aaattcatgattaca

SEQ ID NO: 1783395 - DNA, 15 bp, Homo sapiens
aattcatgattacaa

SEQ ID NO: 1783396 - DNA, 15 bp, Homo sapiens
attcatgattacaat

SEQ ID NO: 1783397 - DNA, 15 bp, Homo sapiens
ttcatgattacaata

SEQ ID NO: 1783398 - DNA, 15 bp, Homo sapiens
tcatgattacaatat

SEQ ID NO: 1783399 - DNA, 15 bp, Homo sapiens
catgattacaatatc

SEQ ID NO: 1783400 - DNA, 15 bp, Homo sapiens
atgattacaatatcg

SEQ ID NO: 1783401 - DNA, 15 bp, Homo sapiens
tgattacaatatcgc

SEQ ID NO: 1783402 - DNA, 15 bp, Homo sapiens
gattacaatatcgct

SEQ ID NO: 1783403 - DNA, 15 bp, Homo sapiens
attacaatatcgctt

SEQ ID NO: 1783404 - DNA, 15 bp, Homo sapiens
ttacaatatcgctta

SEQ ID NO: 1783405 - DNA, 15 bp, Homo sapiens
tacaatatcgcttac

SEQ ID NO: 1783406 - DNA, 15 bp, Homo sapiens
acaatatcgcttact

SEQ ID NO: 1783407 - DNA, 15 bp, Homo sapiens
caatatcgcttactt

SEQ ID NO: 1783408 - DNA, 15 bp, Homo sapiens
aatatcgcttacttt

SEQ ID NO: 1783409 - DNA, 15 bp, Homo sapiens
atatcgcttactttc

SEQ ID NO: 1783410 - DNA, 15 bp, Homo sapiens
tatcgcttactttca

SEQ ID NO: 1783411 - DNA, 15 bp, Homo sapiens
atcgcttactttcat

SEQ ID NO: 1783412 - DNA, 15 bp, Homo sapiens
tcgcttactttcata

SEQ ID NO: 1783413 - DNA, 15 bp, Homo sapiens
cgcttactttcataa

SEQ ID NO: 1783414 - DNA, 15 bp, Homo sapiens
gcttactttcataag

SEQ ID NO: 1783415 - DNA, 15 bp, Homo sapiens
cttactttcataagt

SEQ ID NO: 1783416 - DNA, 15 bp, Homo sapiens
ttactttcataagtg

SEQ ID NO: 1783417 - DNA, 15 bp, Homo sapiens
tactttcataagtgt

SEQ ID NO: 1783418 - DNA, 15 bp, Homo sapiens
actttcataagtgtt

SEQ ID NO: 1783419 - DNA, 15 bp, Homo sapiens
ctttcataagtgttt

SEQ ID NO: 1783420 - DNA, 15 bp, Homo sapiens
tttcataagtgtttg

SEQ ID NO: 1783421 - DNA, 15 bp, Homo sapiens
ttcataagtgtttgg

SEQ ID NO: 1783422 - DNA, 15 bp, Homo sapiens
tcataagtgtttggg

SEQ ID NO: 1783423 - DNA, 15 bp, Homo sapiens
cataagtgtttgggt

SEQ ID NO: 1783424 - DNA, 15 bp, Homo sapiens
ataagtgtttgggtt

SEQ ID NO: 1783425 - DNA, 15 bp, Homo sapiens
taagtgtttgggttt

SEQ ID NO: 1783426 - DNA, 15 bp, Homo sapiens
aagtgtttgggtttt

SEQ ID NO: 1783427 - DNA, 15 bp, Homo sapiens
agtgtttgggttttg

SEQ ID NO: 1783428 - DNA, 15 bp, Homo sapiens
gtgtttgggttttga

SEQ ID NO: 1783429 - DNA, 15 bp, Homo sapiens
tgtttgggttttgaa

SEQ ID NO: 1783430 - DNA, 15 bp, Homo sapiens
gtttgggttttgaaa

SEQ ID NO: 1783431 - DNA, 15 bp, Homo sapiens
tttgggttttgaaat

SEQ ID NO: 1783432 - DNA, 15 bp, Homo sapiens
ttgggttttgaaatt

SEQ ID NO: 1783433 - DNA, 15 bp, Homo sapiens
tgggttttgaaattt

SEQ ID NO: 1783434 - DNA, 15 bp, Homo sapiens
gggttttgaaatttt

SEQ ID NO: 1783435 - DNA, 15 bp, Homo sapiens
ggttttgaaatttta

SEQ ID NO: 1783436 - DNA, 15 bp, Homo sapiens
gttttgaaattttat

SEQ ID NO: 1783437 - DNA, 15 bp, Homo sapiens
ttttgaaattttatt

SEQ ID NO: 1783438 - DNA, 15 bp, Homo sapiens
tttgaaattttatta

SEQ ID NO: 1783439 - DNA, 15 bp, Homo sapiens
ttgaaattttattat

SEQ ID NO: 1783440 - DNA, 15 bp, Homo sapiens
tgaaattttattatc

SEQ ID NO: 1783441 - DNA, 15 bp, Homo sapiens
gaaattttattatca

SEQ ID NO: 1783442 - DNA, 15 bp, Homo sapiens
aaattttattatcat

SEQ ID NO: 1783443 - DNA, 15 bp, Homo sapiens
tttattatcataaat

SEQ ID NO: 1783444 - DNA, 15 bp, Homo sapiens
ttattatcataaatg

SEQ ID NO: 1783445 - DNA, 15 bp, Homo sapiens
tattatcataaatgc

SEQ ID NO: 1783446 - DNA, 15 bp, Homo sapiens
attatcataaatgct

SEQ ID NO: 1783447 - DNA, 15 bp, Homo sapiens
ttatcataaatgctt

SEQ ID NO: 1783448 - DNA, 15 bp, Homo sapiens
tatcataaatgcttt

SEQ ID NO: 1783449 - DNA, 15 bp, Homo sapiens
atcataaatgcttta

SEQ ID NO: 1783450 - DNA, 15 bp, Homo sapiens
tcataaatgctttat

SEQ ID NO: 1783451 - DNA, 15 bp, Homo sapiens
cataaatgctttatg

SEQ ID NO: 1783452 - DNA, 15 bp, Homo sapiens
ataaatgctttatgt

SEQ ID NO: 1783453 - DNA, 15 bp, Homo sapiens
taaatgctttatgtg

SEQ ID NO: 1783454 - DNA, 15 bp, Homo sapiens
aaatgctttatgtgt

SEQ ID NO: 1783455 - DNA, 15 bp, Homo sapiens
aatgctttatgtgtt

SEQ ID NO: 1783456 - DNA, 15 bp, Homo sapiens
atgctttatgtgttt

SEQ ID NO: 1783457 - DNA, 15 bp, Homo sapiens
tgctttatgtgttta

SEQ ID NO: 1783458 - DNA, 15 bp, Homo sapiens
gctttatgtgtttac

SEQ ID NO: 1783459 - DNA, 15 bp, Homo sapiens
ctttatgtgtttaca

SEQ ID NO: 1783460 - DNA, 15 bp, Homo sapiens
tttatgtgtttacaa

SEQ ID NO: 1783461 - DNA, 15 bp, Homo sapiens
ttatgtgtttacaaa

SEQ ID NO: 1783462 - DNA, 15 bp, Homo sapiens
tatgtgtttacaaaa

SEQ ID NO: 1783463 - DNA, 15 bp, Homo sapiens
atgtgtttacaaaaa

SEQ ID NO: 1783464 - DNA, 15 bp, Homo sapiens
tgtgtttacaaaaat

SEQ ID NO: 1783465 - DNA, 15 bp, Homo sapiens
gtgtttacaaaaatc

SEQ ID NO: 1783466 - DNA, 15 bp, Homo sapiens
tgtttacaaaaatcc

SEQ ID NO: 1783467 - DNA, 15 bp, Homo sapiens
gtttacaaaaatcca

SEQ ID NO: 1783468 - DNA, 15 bp, Homo sapiens
tttacaaaaatccaa

SEQ ID NO: 1783469 - DNA, 15 bp, Homo sapiens
ttacaaaaatccaac

SEQ ID NO: 1783470 - DNA, 15 bp, Homo sapiens
tacaaaaatccaacc

SEQ ID NO: 1783471 - DNA, 15 bp, Homo sapiens
acaaaaatccaacct

SEQ ID NO: 1783472 - DNA, 15 bp, Homo sapiens
caaaaatccaacctg

SEQ ID NO: 1783473 - DNA, 15 bp, Homo sapiens
aaaaatccaacctga

SEQ ID NO: 1783474 - DNA, 15 bp, Homo sapiens
aaaatccaacctgat

SEQ ID NO: 1783475 - DNA, 15 bp, Homo sapiens
aaatccaacctgatt

SEQ ID NO: 1783476 - DNA, 15 bp, Homo sapiens
aatccaacctgattt

SEQ ID NO: 1783477 - DNA, 15 bp, Homo sapiens
atccaacctgatttg

SEQ ID NO: 1783478 - DNA, 15 bp, Homo sapiens
tccaacctgatttga

SEQ ID NO: 1783479 - DNA, 15 bp, Homo sapiens
ccaacctgatttgaa

SEQ ID NO: 1783480 - DNA, 15 bp, Homo sapiens
caacctgatttgaac

SEQ ID NO: 1783481 - DNA, 15 bp, Homo sapiens
aacctgatttgaact

SEQ ID NO: 1783482 - DNA, 15 bp, Homo sapiens
acctgatttgaacta

SEQ ID NO: 1783483 - DNA, 15 bp, Homo sapiens
cctgatttgaactaa

SEQ ID NO: 1783484 - DNA, 15 bp, Homo sapiens
ctgatttgaactaaa

SEQ ID NO: 1783485 - DNA, 15 bp, Homo sapiens
tgatttgaactaaac

SEQ ID NO: 1783486 - DNA, 15 bp, Homo sapiens
gatttgaactaaacc

SEQ ID NO: 1783487 - DNA, 15 bp, Homo sapiens
atttgaactaaacct

SEQ ID NO: 1783488 - DNA, 15 bp, Homo sapiens
tttgaactaaacctg

SEQ ID NO: 1783489 - DNA, 15 bp, Homo sapiens
ttgaactaaacctgt

SEQ ID NO: 1783490 - DNA, 15 bp, Homo sapiens
tgaactaaacctgtt

SEQ ID NO: 1783491 - DNA, 15 bp, Homo sapiens
gaactaaacctgttt

SEQ ID NO: 1783492 - DNA, 15 bp, Homo sapiens
aactaaacctgtttc

SEQ ID NO: 1783493 - DNA, 15 bp, Homo sapiens
actaaacctgtttcc

SEQ ID NO: 1783494 - DNA, 15 bp, Homo sapiens
ctaaacctgtttccc

SEQ ID NO: 1783495 - DNA, 15 bp, Homo sapiens
taaacctgtttccca

SEQ ID NO: 1783496 - DNA, 15 bp, Homo sapiens
aaacctgtttcccac

SEQ ID NO: 1783497 - DNA, 15 bp, Homo sapiens
aacctgtttcccact

SEQ ID NO: 1783498 - DNA, 15 bp, Homo sapiens
acctgtttcccactg

SEQ ID NO: 1783499 - DNA, 15 bp, Homo sapiens
cctgtttcccactgt

SEQ ID NO: 1783500 - DNA, 15 bp, Homo sapiens
ctgtttcccactgta

SEQ ID NO: 1783501 - DNA, 15 bp, Homo sapiens
tgtttcccactgtat

SEQ ID NO: 1783502 - DNA, 15 bp, Homo sapiens
gtttcccactgtata

SEQ ID NO: 1783503 - DNA, 15 bp, Homo sapiens
tttcccactgtataa

SEQ ID NO: 1783504 - DNA, 15 bp, Homo sapiens
ttcccactgtataac

SEQ ID NO: 1783505 - DNA, 15 bp, Homo sapiens
tcccactgtataacc

SEQ ID NO: 1783506 - DNA, 15 bp, Homo sapiens
cccactgtataaccc

SEQ ID NO: 1783507 - DNA, 15 bp, Homo sapiens
ccactgtataaccca

SEQ ID NO: 1783508 - DNA, 15 bp, Homo sapiens
cactgtataacccaa

SEQ ID NO: 1783509 - DNA, 15 bp, Homo sapiens
actgtataacccaaa

SEQ ID NO: 1783510 - DNA, 15 bp, Homo sapiens
ctgtataacccaaat

SEQ ID NO: 1783511 - DNA, 15 bp, Homo sapiens
tgtataacccaaata

SEQ ID NO: 1783512 - DNA, 15 bp, Homo sapiens
gtataacccaaataa

SEQ ID NO: 1783513 - DNA, 15 bp, Homo sapiens
tataacccaaataag

SEQ ID NO: 1783514 - DNA, 15 bp, Homo sapiens
ataacccaaataagt

SEQ ID NO: 1783515 - DNA, 15 bp, Homo sapiens
taacccaaataagtg

SEQ ID NO: 1783516 - DNA, 15 bp, Homo sapiens
aacccaaataagtgc

SEQ ID NO: 1783517 - DNA, 15 bp, Homo sapiens
acccaaataagtgct

SEQ ID NO: 1783518 - DNA, 15 bp, Homo sapiens
cccaaataagtgctg

SEQ ID NO: 1783519 - DNA, 15 bp, Homo sapiens
ccaaataagtgctgg

SEQ ID NO: 1783520 - DNA, 15 bp, Homo sapiens
caaataagtgctggg

SEQ ID NO: 1783521 - DNA, 15 bp, Homo sapiens
aaataagtgctgggg

SEQ ID NO: 1783522 - DNA, 15 bp, Homo sapiens
aataagtgctggggt

SEQ ID NO: 1783523 - DNA, 15 bp, Homo sapiens
ataagtgctggggtc

SEQ ID NO: 1783524 - DNA, 15 bp, Homo sapiens
taagtgctggggtcc

SEQ ID NO: 1783525 - DNA, 15 bp, Homo sapiens
aagtgctggggtccc

SEQ ID NO: 1783526 - DNA, 15 bp, Homo sapiens
agtgctggggtccca

SEQ ID NO: 1783527 - DNA, 15 bp, Homo sapiens
gtgctggggtcccat

SEQ ID NO: 1783528 - DNA, 15 bp, Homo sapiens
tgctggggtcccatg

SEQ ID NO: 1783529 - DNA, 15 bp, Homo sapiens
gctggggtcccatgt

SEQ ID NO: 1783530 - DNA, 15 bp, Homo sapiens
ctggggtcccatgtg

SEQ ID NO: 1783531 - DNA, 15 bp, Homo sapiens
tggggtcccatgtgg

SEQ ID NO: 1783532 - DNA, 15 bp, Homo sapiens
ggggtcccatgtggt

SEQ ID NO: 1783533 - DNA, 15 bp, Homo sapiens
gggtcccatgtggta

SEQ ID NO: 1783534 - DNA, 15 bp, Homo sapiens
ggtcccatgtggtac

SEQ ID NO: 1783535 - DNA, 15 bp, Homo sapiens
gtcccatgtggtaca

SEQ ID NO: 1783536 - DNA, 15 bp, Homo sapiens
tcccatgtggtacaa

SEQ ID NO: 1783537 - DNA, 15 bp, Homo sapiens
cccatgtggtacaat

SEQ ID NO: 1783538 - DNA, 15 bp, Homo sapiens
ccatgtggtacaatc

SEQ ID NO: 1783539 - DNA, 15 bp, Homo sapiens
catgtggtacaatct

SEQ ID NO: 1783540 - DNA, 15 bp, Homo sapiens
atgtggtacaatctc

SEQ ID NO: 1783541 - DNA, 15 bp, Homo sapiens
tgtggtacaatctca

SEQ ID NO: 1783542 - DNA, 15 bp, Homo sapiens
gtggtacaatctcag

SEQ ID NO: 1783543 - DNA, 15 bp, Homo sapiens
tggtacaatctcagt

SEQ ID NO: 1783544 - DNA, 15 bp, Homo sapiens
ggtacaatctcagtg

SEQ ID NO: 1783545 - DNA, 15 bp, Homo sapiens
gtacaatctcagtgt

SEQ ID NO: 1783546 - DNA, 15 bp, Homo sapiens
tacaatctcagtgtg

SEQ ID NO: 1783547 - DNA, 15 bp, Homo sapiens
acaatctcagtgtga

SEQ ID NO: 1783548 - DNA, 15 bp, Homo sapiens
caatctcagtgtgag

SEQ ID NO: 1783549 - DNA, 15 bp, Homo sapiens
aatctcagtgtgagt

SEQ ID NO: 1783550 - DNA, 15 bp, Homo sapiens
atctcagtgtgagtc

SEQ ID NO: 1783551 - DNA, 15 bp, Homo sapiens
tctcagtgtgagtcc

SEQ ID NO: 1783552 - DNA, 15 bp, Homo sapiens
ctcagtgtgagtcca

SEQ ID NO: 1783553 - DNA, 15 bp, Homo sapiens
tcagtgtgagtccac

SEQ ID NO: 1783554 - DNA, 15 bp, Homo sapiens
cagtgtgagtccaca

SEQ ID NO: 1783555 - DNA, 15 bp, Homo sapiens
agtgtgagtccacat

SEQ ID NO: 1783556 - DNA, 15 bp, Homo sapiens
gtgtgagtccacatc

SEQ ID NO: 1783557 - DNA, 15 bp, Homo sapiens
tgtgagtccacatca

SEQ ID NO: 1783558 - DNA, 15 bp, Homo sapiens
gtgagtccacatcaa

SEQ ID NO: 1783559 - DNA, 15 bp, Homo sapiens
tgagtccacatcaaa

SEQ ID NO: 1783560 - DNA, 15 bp, Homo sapiens
gagtccacatcaaag

SEQ ID NO: 1783561 - DNA, 15 bp, Homo sapiens
agtccacatcaaaga

SEQ ID NO: 1783562 - DNA, 15 bp, Homo sapiens
gtccacatcaaagac

SEQ ID NO: 1783563 - DNA, 15 bp, Homo sapiens
tccacatcaaagaca

SEQ ID NO: 1783564 - DNA, 15 bp, Homo sapiens
ccacatcaaagacat

SEQ ID NO: 1783565 - DNA, 15 bp, Homo sapiens
cacatcaaagacata

SEQ ID NO: 1783566 - DNA, 15 bp, Homo sapiens
acatcaaagacatat

SEQ ID NO: 1783567 - DNA, 15 bp, Homo sapiens
catcaaagacatata

SEQ ID NO: 1783568 - DNA, 15 bp, Homo sapiens
atcaaagacatataa

SEQ ID NO: 1783569 - DNA, 15 bp, Homo sapiens
tcaaagacatataat

SEQ ID NO: 1783570 - DNA, 15 bp, Homo sapiens
caaagacatataatc

SEQ ID NO: 1783571 - DNA, 15 bp, Homo sapiens
aaagacatataatcc

SEQ ID NO: 1783572 - DNA, 15 bp, Homo sapiens
aagacatataatcca

SEQ ID NO: 1783573 - DNA, 15 bp, Homo sapiens
agacatataatccag

SEQ ID NO: 1783574 - DNA, 15 bp, Homo sapiens
gacatataatccagc

SEQ ID NO: 1783575 - DNA, 15 bp, Homo sapiens
acatataatccagcc

SEQ ID NO: 1783576 - DNA, 15 bp, Homo sapiens
catataatccagcct

SEQ ID NO: 1783577 - DNA, 15 bp, Homo sapiens
atataatccagcctt

SEQ ID NO: 1783578 - DNA, 15 bp, Homo sapiens
tataatccagccttc

SEQ ID NO: 1783579 - DNA, 15 bp, Homo sapiens
ataatccagccttca

SEQ ID NO: 1783580 - DNA, 15 bp, Homo sapiens
taatccagccttcag

SEQ ID NO: 1783581 - DNA, 15 bp, Homo sapiens
aatccagccttcaga

SEQ ID NO: 1783582 - DNA, 15 bp, Homo sapiens
atccagccttcagaa

SEQ ID NO: 1783583 - DNA, 15 bp, Homo sapiens
tccagccttcagaag

SEQ ID NO: 1783584 - DNA, 15 bp, Homo sapiens
ccagccttcagaagt

SEQ ID NO: 1783585 - DNA, 15 bp, Homo sapiens
cagccttcagaagta

SEQ ID NO: 1783586 - DNA, 15 bp, Homo sapiens
agccttcagaagtaa

SEQ ID NO: 1783587 - DNA, 15 bp, Homo sapiens
gccttcagaagtaat

SEQ ID NO: 1783588 - DNA, 15 bp, Homo sapiens
ccttcagaagtaatt

SEQ ID NO: 1783589 - DNA, 15 bp, Homo sapiens
cttcagaagtaatta

SEQ ID NO: 1783590 - DNA, 15 bp, Homo sapiens
ttcagaagtaattaa

SEQ ID NO: 1783591 - DNA, 15 bp, Homo sapiens
tcagaagtaattaaa

SEQ ID NO: 1783592 - DNA, 15 bp, Homo sapiens
cagaagtaattaaaa

SEQ ID NO: 1783593 - DNA, 15 bp, Homo sapiens
agaagtaattaaaaa

SEQ ID NO: 1783594 - DNA, 15 bp, Homo sapiens
gaagtaattaaaaat

SEQ ID NO: 1783595 - DNA, 15 bp, Homo sapiens
aagtaattaaaaata

SEQ ID NO: 1783596 - DNA, 15 bp, Homo sapiens
agtaattaaaaataa

SEQ ID NO: 1783597 - DNA, 15 bp, Homo sapiens
gtaattaaaaataat

SEQ ID NO: 1783598 - DNA, 15 bp, Homo sapiens
taattaaaaataatt

SEQ ID NO: 1783599 - DNA, 15 bp, Homo sapiens
aattaaaaataattc

SEQ ID NO: 1783600 - DNA, 15 bp, Homo sapiens
attaaaaataattcc

SEQ ID NO: 1783601 - DNA, 15 bp, Homo sapiens
ttaaaaataattcca

SEQ ID NO: 1783602 - DNA, 15 bp, Homo sapiens
taaaaataattccaa

SEQ ID NO: 1783603 - DNA, 15 bp, Homo sapiens
aaaaataattccaat

SEQ ID NO: 1783604 - DNA, 15 bp, Homo sapiens
aaaataattccaatc

SEQ ID NO: 1783605 - DNA, 15 bp, Homo sapiens
aaataattccaatct

SEQ ID NO: 1783606 - DNA, 15 bp, Homo sapiens
aataattccaatctt

SEQ ID NO: 1783607 - DNA, 15 bp, Homo sapiens
ataattccaatcttt

SEQ ID NO: 1783608 - DNA, 15 bp, Homo sapiens
taattccaatcttta

SEQ ID NO: 1783609 - DNA, 15 bp, Homo sapiens
aattccaatctttac

SEQ ID NO: 1783610 - DNA, 15 bp, Homo sapiens
attccaatctttact

SEQ ID NO: 1783611 - DNA, 15 bp, Homo sapiens
ttccaatctttactt

SEQ ID NO: 1783612 - DNA, 15 bp, Homo sapiens
tccaatctttacttg

SEQ ID NO: 1783613 - DNA, 15 bp, Homo sapiens
ccaatctttacttga

SEQ ID NO: 1783614 - DNA, 15 bp, Homo sapiens
caatctttacttgaa

SEQ ID NO: 1783615 - DNA, 15 bp, Homo sapiens
aatctttacttgaat

SEQ ID NO: 1783616 - DNA, 15 bp, Homo sapiens
atctttacttgaatt

SEQ ID NO: 1783617 - DNA, 15 bp, Homo sapiens
tctttacttgaattt

SEQ ID NO: 1783618 - DNA, 15 bp, Homo sapiens
ctttacttgaatttc

SEQ ID NO: 1783619 - DNA, 15 bp, Homo sapiens
tttacttgaatttct

SEQ ID NO: 1783620 - DNA, 15 bp, Homo sapiens
ttacttgaatttctt

SEQ ID NO: 1783621 - DNA, 15 bp, Homo sapiens
tacttgaatttcttt

SEQ ID NO: 1783622 - DNA, 15 bp, Homo sapiens
acttgaatttcttta

SEQ ID NO: 1783623 - DNA, 15 bp, Homo sapiens
cttgaatttctttaa

SEQ ID NO: 1783624 - DNA, 15 bp, Homo sapiens
ttgaatttctttaag

SEQ ID NO: 1783625 - DNA, 15 bp, Homo sapiens
tgaatttctttaagg

SEQ ID NO: 1783626 - DNA, 15 bp, Homo sapiens
gaatttctttaagga

SEQ ID NO: 1783627 - DNA, 15 bp, Homo sapiens
aatttctttaaggac

SEQ ID NO: 1783628 - DNA, 15 bp, Homo sapiens
atttctttaaggact

SEQ ID NO: 1783629 - DNA, 15 bp, Homo sapiens
tttctttaaggactt

SEQ ID NO: 1783630 - DNA, 15 bp, Homo sapiens
ttctttaaggacttt

SEQ ID NO: 1783631 - DNA, 15 bp, Homo sapiens
tctttaaggacttta

SEQ ID NO: 1783632 - DNA, 15 bp, Homo sapiens
ctttaaggactttaa

SEQ ID NO: 1783633 - DNA, 15 bp, Homo sapiens
tttaaggactttaat

SEQ ID NO: 1783634 - DNA, 15 bp, Homo sapiens
ttaaggactttaatg

SEQ ID NO: 1783635 - DNA, 15 bp, Homo sapiens
taaggactttaatgg

SEQ ID NO: 1783636 - DNA, 15 bp, Homo sapiens
aaggactttaatggg

SEQ ID NO: 1783637 - DNA, 15 bp, Homo sapiens
aggactttaatgggg

SEQ ID NO: 1783638 - DNA, 15 bp, Homo sapiens
ggactttaatgggga

SEQ ID NO: 1783639 - DNA, 15 bp, Homo sapiens
gactttaatggggac

SEQ ID NO: 1783640 - DNA, 15 bp, Homo sapiens
actttaatggggacc

SEQ ID NO: 1783641 - DNA, 15 bp, Homo sapiens
ctttaatggggaccc

SEQ ID NO: 1783642 - DNA, 15 bp, Homo sapiens
tttaatggggaccca

SEQ ID NO: 1783643 - DNA, 15 bp, Homo sapiens
ttaatggggacccaa

SEQ ID NO: 1783644 - DNA, 15 bp, Homo sapiens
taatggggacccaat

SEQ ID NO: 1783645 - DNA, 15 bp, Homo sapiens
aatggggacccaatt

SEQ ID NO: 1783646 - DNA, 15 bp, Homo sapiens
atggggacccaattt

SEQ ID NO: 1783647 - DNA, 15 bp, Homo sapiens
tggggacccaattta

SEQ ID NO: 1783648 - DNA, 15 bp, Homo sapiens
ggggacccaatttat

SEQ ID NO: 1783649 - DNA, 15 bp, Homo sapiens
gggacccaatttata

SEQ ID NO: 1783650 - DNA, 15 bp, Homo sapiens
ggacccaatttataa

SEQ ID NO: 1783651 - DNA, 15 bp, Homo sapiens
gacccaatttataac

SEQ ID NO: 1783652 - DNA, 15 bp, Homo sapiens
acccaatttataacc

SEQ ID NO: 1783653 - DNA, 15 bp, Homo sapiens
cccaatttataaccc

SEQ ID NO: 1783654 - DNA, 15 bp, Homo sapiens
ccaatttataacccc

SEQ ID NO: 1783655 - DNA, 15 bp, Homo sapiens
caatttataaccccc

SEQ ID NO: 1783656 - DNA, 15 bp, Homo sapiens
aatttataaccccca

SEQ ID NO: 1783657 - DNA, 15 bp, Homo sapiens
atttataacccccag

SEQ ID NO: 1783658 - DNA, 15 bp, Homo sapiens
tttataacccccagc

SEQ ID NO: 1783659 - DNA, 15 bp, Homo sapiens
ttataacccccagcc

SEQ ID NO: 1783660 - DNA, 15 bp, Homo sapiens
tataacccccagcca

SEQ ID NO: 1783661 - DNA, 15 bp, Homo sapiens
ataacccccagccac

SEQ ID NO: 1783662 - DNA, 15 bp, Homo sapiens
taacccccagccaca

SEQ ID NO: 1783663 - DNA, 15 bp, Homo sapiens
aacccccagccacat

SEQ ID NO: 1783664 - DNA, 15 bp, Homo sapiens
acccccagccacatt

SEQ ID NO: 1783665 - DNA, 15 bp, Homo sapiens
cccccagccacattt

SEQ ID NO: 1783666 - DNA, 15 bp, Homo sapiens
ccccagccacattta

SEQ ID NO: 1783667 - DNA, 15 bp, Homo sapiens
cccagccacatttaa

SEQ ID NO: 1783668 - DNA, 15 bp, Homo sapiens
ccagccacatttaaa

SEQ ID NO: 1783669 - DNA, 15 bp, Homo sapiens
cagccacatttaaaa

SEQ ID NO: 1783670 - DNA, 15 bp, Homo sapiens
agccacatttaaaat

SEQ ID NO: 1783671 - DNA, 15 bp, Homo sapiens
gccacatttaaaatt

SEQ ID NO: 1783672 - DNA, 15 bp, Homo sapiens
ccacatttaaaattc

SEQ ID NO: 1783673 - DNA, 15 bp, Homo sapiens
cacatttaaaattcc

SEQ ID NO: 1783674 - DNA, 15 bp, Homo sapiens
acatttaaaattccc

SEQ ID NO: 1783675 - DNA, 15 bp, Homo sapiens
catttaaaattccct

SEQ ID NO: 1783676 - DNA, 15 bp, Homo sapiens
atttaaaattccctt

SEQ ID NO: 1783677 - DNA, 15 bp, Homo sapiens
tttaaaattcccttt

SEQ ID NO: 1783678 - DNA, 15 bp, Homo sapiens
ttaaaattccctttc

SEQ ID NO: 1783679 - DNA, 15 bp, Homo sapiens
taaaattccctttct

SEQ ID NO: 1783680 - DNA, 15 bp, Homo sapiens
aaaattccctttctt

SEQ ID NO: 1783681 - DNA, 15 bp, Homo sapiens
aaattccctttcttc

SEQ ID NO: 1783682 - DNA, 15 bp, Homo sapiens
aattccctttcttcc

SEQ ID NO: 1783683 - DNA, 15 bp, Homo sapiens
attccctttcttcca

SEQ ID NO: 1783684 - DNA, 15 bp, Homo sapiens
ttccctttcttccaa

SEQ ID NO: 1783685 - DNA, 15 bp, Homo sapiens
tccctttcttccaat

SEQ ID NO: 1783686 - DNA, 15 bp, Homo sapiens
ccctttcttccaatt

SEQ ID NO: 1783687 - DNA, 15 bp, Homo sapiens
cctttcttccaattc

SEQ ID NO: 1783688 - DNA, 15 bp, Homo sapiens
ctttcttccaattct

SEQ ID NO: 1783689 - DNA, 15 bp, Homo sapiens
tttcttccaattctc

SEQ ID NO: 1783690 - DNA, 15 bp, Homo sapiens
ttcttccaattctct

SEQ ID NO: 1783691 - DNA, 15 bp, Homo sapiens
tcttccaattctctt

SEQ ID NO: 1783692 - DNA, 15 bp, Homo sapiens
cttccaattctcttc

SEQ ID NO: 1783693 - DNA, 15 bp, Homo sapiens
ttccaattctcttcg

SEQ ID NO: 1783694 - DNA, 15 bp, Homo sapiens
tccaattctcttcgc

SEQ ID NO: 1783695 - DNA, 15 bp, Homo sapiens
ccaattctcttcgct

SEQ ID NO: 1783696 - DNA, 15 bp, Homo sapiens
caattctcttcgctg

SEQ ID NO: 1783697 - DNA, 15 bp, Homo sapiens
aattctcttcgctgt

SEQ ID NO: 1783698 - DNA, 15 bp, Homo sapiens
attctcttcgctgta

SEQ ID NO: 1783699 - DNA, 15 bp, Homo sapiens
ttctcttcgctgtac

SEQ ID NO: 1783700 - DNA, 15 bp, Homo sapiens
tctcttcgctgtact

SEQ ID NO: 1783701 - DNA, 15 bp, Homo sapiens
ctcttcgctgtactt

SEQ ID NO: 1783702 - DNA, 15 bp, Homo sapiens
tcttcgctgtactta

SEQ ID NO: 1783703 - DNA, 15 bp, Homo sapiens
cttcgctgtacttaa

SEQ ID NO: 1783704 - DNA, 15 bp, Homo sapiens
ttcgctgtacttaaa

SEQ ID NO: 1783705 - DNA, 15 bp, Homo sapiens
tcgctgtacttaaag

SEQ ID NO: 1783706 - DNA, 15 bp, Homo sapiens
cgctgtacttaaagc

SEQ ID NO: 1783707 - DNA, 15 bp, Homo sapiens
gctgtacttaaagcc

SEQ ID NO: 1783708 - DNA, 15 bp, Homo sapiens
ctgtacttaaagcct

SEQ ID NO: 1783709 - DNA, 15 bp, Homo sapiens
tgtacttaaagcctg

SEQ ID NO: 1783710 - DNA, 15 bp, Homo sapiens
gtacttaaagcctgt

SEQ ID NO: 1783711 - DNA, 15 bp, Homo sapiens
tacttaaagcctgta

SEQ ID NO: 1783712 - DNA, 15 bp, Homo sapiens
acttaaagcctgtaa

SEQ ID NO: 1783713 - DNA, 15 bp, Homo sapiens
cttaaagcctgtaac

SEQ ID NO: 1783714 - DNA, 15 bp, Homo sapiens
ttaaagcctgtaact

SEQ ID NO: 1783715 - DNA, 15 bp, Homo sapiens
taaagcctgtaactc

SEQ ID NO: 1783716 - DNA, 15 bp, Homo sapiens
aaagcctgtaactcc

SEQ ID NO: 1783717 - DNA, 15 bp, Homo sapiens
aagcctgtaactccc

SEQ ID NO: 1783718 - DNA, 15 bp, Homo sapiens
agcctgtaactccct

SEQ ID NO: 1783719 - DNA, 15 bp, Homo sapiens
gcctgtaactccctg

SEQ ID NO: 1783720 - DNA, 15 bp, Homo sapiens
cctgtaactccctga

SEQ ID NO: 1783721 - DNA, 15 bp, Homo sapiens
ctgtaactccctgaa

SEQ ID NO: 1783722 - DNA, 15 bp, Homo sapiens
tgtaactccctgaaa

SEQ ID NO: 1783723 - DNA, 15 bp, Homo sapiens
gtaactccctgaaac

SEQ ID NO: 1783724 - DNA, 15 bp, Homo sapiens
taactccctgaaacc

SEQ ID NO: 1783725 - DNA, 15 bp, Homo sapiens
aactccctgaaaccg

SEQ ID NO: 1783726 - DNA, 15 bp, Homo sapiens
actccctgaaaccgt

SEQ ID NO: 1783727 - DNA, 15 bp, Homo sapiens
ctccctgaaaccgtt

SEQ ID NO: 1783728 - DNA, 15 bp, Homo sapiens
tccctgaaaccgttt

SEQ ID NO: 1783729 - DNA, 15 bp, Homo sapiens
ccctgaaaccgtttt

SEQ ID NO: 1783730 - DNA, 15 bp, Homo sapiens
cctgaaaccgttttt

SEQ ID NO: 1783731 - DNA, 15 bp, Homo sapiens
ctgaaaccgtttttc

SEQ ID NO: 1783732 - DNA, 15 bp, Homo sapiens
tgaaaccgtttttcc

SEQ ID NO: 1783733 - DNA, 15 bp, Homo sapiens
gaaaccgtttttcct

SEQ ID NO: 1783734 - DNA, 15 bp, Homo sapiens
aaaccgtttttcctc

SEQ ID NO: 1783735 - DNA, 15 bp, Homo sapiens
aaccgtttttcctcc

SEQ ID NO: 1783736 - DNA, 15 bp, Homo sapiens
accgtttttcctcct

SEQ ID NO: 1783737 - DNA, 15 bp, Homo sapiens
ccgtttttcctcctc

SEQ ID NO: 1783738 - DNA, 15 bp, Homo sapiens
cgtttttcctcctca

SEQ ID NO: 1783739 - DNA, 15 bp, Homo sapiens
gtttttcctcctcat

SEQ ID NO: 1783740 - DNA, 15 bp, Homo sapiens
tttttcctcctcatt

SEQ ID NO: 1783741 - DNA, 15 bp, Homo sapiens
ttttcctcctcattc

SEQ ID NO: 1783742 - DNA, 15 bp, Homo sapiens
tttcctcctcattct

SEQ ID NO: 1783743 - DNA, 15 bp, Homo sapiens
ttcctcctcattctc

SEQ ID NO: 1783744 - DNA, 15 bp, Homo sapiens
tcctcctcattctca

SEQ ID NO: 1783745 - DNA, 15 bp, Homo sapiens
cctcctcattctcaa

SEQ ID NO: 1783746 - DNA, 15 bp, Homo sapiens
ctcctcattctcaac

SEQ ID NO: 1783747 - DNA, 15 bp, Homo sapiens
tcctcattctcaact

SEQ ID NO: 1783748 - DNA, 15 bp, Homo sapiens
cctcattctcaactc

SEQ ID NO: 1783749 - DNA, 15 bp, Homo sapiens
ctcattctcaactct

SEQ ID NO: 1783750 - DNA, 15 bp, Homo sapiens
tcattctcaactctc

SEQ ID NO: 1783751 - DNA, 15 bp, Homo sapiens
cattctcaactctcc

SEQ ID NO: 1783752 - DNA, 15 bp, Homo sapiens
attctcaactctccc

SEQ ID NO: 1783753 - DNA, 15 bp, Homo sapiens
ttctcaactctccca

SEQ ID NO: 1783754 - DNA, 15 bp, Homo sapiens
tctcaactctcccaa

SEQ ID NO: 1783755 - DNA, 15 bp, Homo sapiens
ctcaactctcccaaa

SEQ ID NO: 1783756 - DNA, 15 bp, Homo sapiens
tcaactctcccaaaa

SEQ ID NO: 1783757 - DNA, 15 bp, Homo sapiens
caactctcccaaaac

SEQ ID NO: 1783758 - DNA, 15 bp, Homo sapiens
aactctcccaaaaca

SEQ ID NO: 1783759 - DNA, 15 bp, Homo sapiens
actctcccaaaacaa

SEQ ID NO: 1783760 - DNA, 15 bp, Homo sapiens
ctctcccaaaacaat

SEQ ID NO: 1783761 - DNA, 15 bp, Homo sapiens
tctcccaaaacaata

SEQ ID NO: 1783762 - DNA, 15 bp, Homo sapiens
ctcccaaaacaataa

SEQ ID NO: 1783763 - DNA, 15 bp, Homo sapiens
tcccaaaacaataac

SEQ ID NO: 1783764 - DNA, 15 bp, Homo sapiens
cccaaaacaataacg

SEQ ID NO: 1783765 - DNA, 15 bp, Homo sapiens
ccaaaacaataacga

SEQ ID NO: 1783766 - DNA, 15 bp, Homo sapiens
caaaacaataacgac

SEQ ID NO: 1783767 - DNA, 15 bp, Homo sapiens
aaaacaataacgact

SEQ ID NO: 1783768 - DNA, 15 bp, Homo sapiens
aaacaataacgacta

SEQ ID NO: 1783769 - DNA, 15 bp, Homo sapiens
aacaataacgactaa

SEQ ID NO: 1783770 - DNA, 15 bp, Homo sapiens
acaataacgactaaa

SEQ ID NO: 1783771 - DNA, 15 bp, Homo sapiens
caataacgactaaaa

SEQ ID NO: 1783772 - DNA, 15 bp, Homo sapiens
aataacgactaaaaa

SEQ ID NO: 1783773 - DNA, 15 bp, Homo sapiens
ataacgactaaaaaa

SEQ ID NO: 1783774 - DNA, 15 bp, Homo sapiens
taacgactaaaaaaa

SEQ ID NO: 1783775 - DNA, 15 bp, Homo sapiens
aacgactaaaaaaaa

SEQ ID NO: 1783776 - DNA, 15 bp, Homo sapiens
acgactaaaaaaaat

SEQ ID NO: 1783777 - DNA, 15 bp, Homo sapiens
cgactaaaaaaaatt

SEQ ID NO: 1783778 - DNA, 15 bp, Homo sapiens
gactaaaaaaaattc

SEQ ID NO: 1783779 - DNA, 15 bp, Homo sapiens
actaaaaaaaattct

SEQ ID NO: 1783780 - DNA, 15 bp, Homo sapiens
ctaaaaaaaattctt

SEQ ID NO: 1783781 - DNA, 15 bp, Homo sapiens
taaaaaaaattcttt

SEQ ID NO: 1783782 - DNA, 15 bp, Homo sapiens
aaaaaaaattcttta

SEQ ID NO: 1783783 - DNA, 15 bp, Homo sapiens
aaaaaaattctttac

SEQ ID NO: 1783784 - DNA, 15 bp, Homo sapiens
aaaaaattctttact

SEQ ID NO: 1783785 - DNA, 15 bp, Homo sapiens
aaaaattctttactg

SEQ ID NO: 1783786 - DNA, 15 bp, Homo sapiens
aaaattctttactga

SEQ ID NO: 1783787 - DNA, 15 bp, Homo sapiens
aaattctttactgaa

SEQ ID NO: 1783788 - DNA, 15 bp, Homo sapiens
aattctttactgaat

SEQ ID NO: 1783789 - DNA, 15 bp, Homo sapiens
attctttactgaatt

SEQ ID NO: 1783790 - DNA, 15 bp, Homo sapiens
ttctttactgaattt

SEQ ID NO: 1783791 - DNA, 15 bp, Homo sapiens
tctttactgaatttc

SEQ ID NO: 1783792 - DNA, 15 bp, Homo sapiens
ctttactgaatttct

SEQ ID NO: 1783793 - DNA, 15 bp, Homo sapiens
tttactgaatttcta

SEQ ID NO: 1783794 - DNA, 15 bp, Homo sapiens
ttactgaatttctaa

SEQ ID NO: 1783795 - DNA, 15 bp, Homo sapiens
tactgaatttctaat

SEQ ID NO: 1783796 - DNA, 15 bp, Homo sapiens
actgaatttctaatc

SEQ ID NO: 1783797 - DNA, 15 bp, Homo sapiens
ctgaatttctaatca

SEQ ID NO: 1783798 - DNA, 15 bp, Homo sapiens
tgaatttctaatcaa

SEQ ID NO: 1783799 - DNA, 15 bp, Homo sapiens
gaatttctaatcaag

SEQ ID NO: 1783800 - DNA, 15 bp, Homo sapiens
aatttctaatcaaga

SEQ ID NO: 1783801 - DNA, 15 bp, Homo sapiens
atttctaatcaagaa

SEQ ID NO: 1783802 - DNA, 15 bp, Homo sapiens
tttctaatcaagaag

SEQ ID NO: 1783803 - DNA, 15 bp, Homo sapiens
ttctaatcaagaagc

SEQ ID NO: 1783804 - DNA, 15 bp, Homo sapiens
tctaatcaagaagct

SEQ ID NO: 1783805 - DNA, 15 bp, Homo sapiens
ctaatcaagaagctt

SEQ ID NO: 1783806 - DNA, 15 bp, Homo sapiens
taatcaagaagcttg

SEQ ID NO: 1783807 - DNA, 15 bp, Homo sapiens
aatcaagaagcttgg

SEQ ID NO: 1783808 - DNA, 15 bp, Homo sapiens
atcaagaagcttggc

SEQ ID NO: 1783809 - DNA, 15 bp, Homo sapiens
tcaagaagcttggct

SEQ ID NO: 1783810 - DNA, 15 bp, Homo sapiens
caagaagcttggctt

SEQ ID NO: 1783811 - DNA, 15 bp, Homo sapiens
aagaagcttggcttt

SEQ ID NO: 1783812 - DNA, 15 bp, Homo sapiens
agaagcttggctttt

SEQ ID NO: 1783813 - DNA, 15 bp, Homo sapiens
gaagcttggcttttt

SEQ ID NO: 1783814 - DNA, 15 bp, Homo sapiens
aagcttggctttttt

SEQ ID NO: 1783815 - DNA, 15 bp, Homo sapiens
agcttggcttttttc

SEQ ID NO: 1783816 - DNA, 15 bp, Homo sapiens
gcttggcttttttcc

SEQ ID NO: 1783817 - DNA, 15 bp, Homo sapiens
cttggcttttttcct

SEQ ID NO: 1783818 - DNA, 15 bp, Homo sapiens
ttggcttttttcctc

SEQ ID NO: 1783819 - DNA, 15 bp, Homo sapiens
tggcttttttcctcc

SEQ ID NO: 1783820 - DNA, 15 bp, Homo sapiens
ggcttttttcctccc

SEQ ID NO: 1783821 - DNA, 15 bp, Homo sapiens
gcttttttcctccct

SEQ ID NO: 1783822 - DNA, 15 bp, Homo sapiens
cttttttcctccctc

SEQ ID NO: 1783823 - DNA, 15 bp, Homo sapiens
ttttttcctccctca

SEQ ID NO: 1783824 - DNA, 15 bp, Homo sapiens
tttttcctccctcac

SEQ ID NO: 1783825 - DNA, 15 bp, Homo sapiens
ttttcctccctcact

SEQ ID NO: 1783826 - DNA, 15 bp, Homo sapiens
tttcctccctcactg

SEQ ID NO: 1783827 - DNA, 15 bp, Homo sapiens
ttcctccctcactgt

SEQ ID NO: 1783828 - DNA, 15 bp, Homo sapiens
tcctccctcactgtc

SEQ ID NO: 1783829 - DNA, 15 bp, Homo sapiens
cctccctcactgtct

SEQ ID NO: 1783830 - DNA, 15 bp, Homo sapiens
ctccctcactgtctt

SEQ ID NO: 1783831 - DNA, 15 bp, Homo sapiens
tccctcactgtcttt

SEQ ID NO: 1783832 - DNA, 15 bp, Homo sapiens
ccctcactgtctttc

SEQ ID NO: 1783833 - DNA, 15 bp, Homo sapiens
cctcactgtctttcc

SEQ ID NO: 1783834 - DNA, 15 bp, Homo sapiens
ctcactgtctttcct

SEQ ID NO: 1783835 - DNA, 15 bp, Homo sapiens
tcactgtctttcctt

SEQ ID NO: 1783836 - DNA, 15 bp, Homo sapiens
cactgtctttccttc

SEQ ID NO: 1783837 - DNA, 15 bp, Homo sapiens
actgtctttccttcc

SEQ ID NO: 1783838 - DNA, 15 bp, Homo sapiens
ctgtctttccttcct

SEQ ID NO: 1783839 - DNA, 15 bp, Homo sapiens
tgtctttccttcctc

SEQ ID NO: 1783840 - DNA, 15 bp, Homo sapiens
gtctttccttcctca

SEQ ID NO: 1783841 - DNA, 15 bp, Homo sapiens
tctttccttcctcag

SEQ ID NO: 1783842 - DNA, 15 bp, Homo sapiens
ctttccttcctcagc

SEQ ID NO: 1783843 - DNA, 15 bp, Homo sapiens
tttccttcctcagct

SEQ ID NO: 1783844 - DNA, 15 bp, Homo sapiens
ttccttcctcagctt

SEQ ID NO: 1783845 - DNA, 15 bp, Homo sapiens
tccttcctcagctta

SEQ ID NO: 1783846 - DNA, 15 bp, Homo sapiens
ccttcctcagcttat

SEQ ID NO: 1783847 - DNA, 15 bp, Homo sapiens
cttcctcagcttatc

SEQ ID NO: 1783848 - DNA, 15 bp, Homo sapiens
ttcctcagcttatct

SEQ ID NO: 1783849 - DNA, 15 bp, Homo sapiens
tcctcagcttatctc

SEQ ID NO: 1783850 - DNA, 15 bp, Homo sapiens
cctcagcttatctcc

SEQ ID NO: 1783851 - DNA, 15 bp, Homo sapiens
ctcagcttatctcct

SEQ ID NO: 1783852 - DNA, 15 bp, Homo sapiens
tcagcttatctcctc

SEQ ID NO: 1783853 - DNA, 15 bp, Homo sapiens
cagcttatctcctct

SEQ ID NO: 1783854 - DNA, 15 bp, Homo sapiens
agcttatctcctctc

SEQ ID NO: 1783855 - DNA, 15 bp, Homo sapiens
gcttatctcctctcc

SEQ ID NO: 1783856 - DNA, 15 bp, Homo sapiens
cttatctcctctcca

SEQ ID NO: 1783857 - DNA, 15 bp, Homo sapiens
ttatctcctctccag

SEQ ID NO: 1783858 - DNA, 15 bp, Homo sapiens
tatctcctctccaga

SEQ ID NO: 1783859 - DNA, 15 bp, Homo sapiens
atctcctctccagag

SEQ ID NO: 1783860 - DNA, 15 bp, Homo sapiens
tctcctctccagaga

SEQ ID NO: 1783861 - DNA, 15 bp, Homo sapiens
ctcctctccagagac

SEQ ID NO: 1783862 - DNA, 15 bp, Homo sapiens
tcctctccagagacc

SEQ ID NO: 1783863 - DNA, 15 bp, Homo sapiens
cctctccagagacct

SEQ ID NO: 1783864 - DNA, 15 bp, Homo sapiens
ctctccagagacctg

SEQ ID NO: 1783865 - DNA, 15 bp, Homo sapiens
tctccagagacctgt

SEQ ID NO: 1783866 - DNA, 15 bp, Homo sapiens
ctccagagacctgtt

SEQ ID NO: 1783867 - DNA, 15 bp, Homo sapiens
tccagagacctgttc

SEQ ID NO: 1783868 - DNA, 15 bp, Homo sapiens
ccagagacctgttca

SEQ ID NO: 1783869 - DNA, 15 bp, Homo sapiens
cagagacctgttcac

SEQ ID NO: 1783870 - DNA, 15 bp, Homo sapiens
agagacctgttcaca

SEQ ID NO: 1783871 - DNA, 15 bp, Homo sapiens
gagacctgttcacaa

SEQ ID NO: 1783872 - DNA, 15 bp, Homo sapiens
agacctgttcacaaa

SEQ ID NO: 1783873 - DNA, 15 bp, Homo sapiens
gacctgttcacaaat

SEQ ID NO: 1783874 - DNA, 15 bp, Homo sapiens
acctgttcacaaatc

SEQ ID NO: 1783875 - DNA, 15 bp, Homo sapiens
cctgttcacaaatct

SEQ ID NO: 1783876 - DNA, 15 bp, Homo sapiens
ctgttcacaaatctg

SEQ ID NO: 1783877 - DNA, 15 bp, Homo sapiens
tgttcacaaatctgt

SEQ ID NO: 1783878 - DNA, 15 bp, Homo sapiens
gttcacaaatctgtt

SEQ ID NO: 1783879 - DNA, 15 bp, Homo sapiens
ttcacaaatctgttt

SEQ ID NO: 1783880 - DNA, 15 bp, Homo sapiens
tcacaaatctgtttc

SEQ ID NO: 1783881 - DNA, 15 bp, Homo sapiens
cacaaatctgtttct

SEQ ID NO: 1783882 - DNA, 15 bp, Homo sapiens
acaaatctgtttctg

SEQ ID NO: 1783883 - DNA, 15 bp, Homo sapiens
caaatctgtttctgt

SEQ ID NO: 1783884 - DNA, 15 bp, Homo sapiens
aaatctgtttctgtc

SEQ ID NO: 1783885 - DNA, 15 bp, Homo sapiens
aatctgtttctgtcc

SEQ ID NO: 1783886 - DNA, 15 bp, Homo sapiens
atctgtttctgtccc

SEQ ID NO: 1783887 - DNA, 15 bp, Homo sapiens
tctgtttctgtcccc

SEQ ID NO: 1783888 - DNA, 15 bp, Homo sapiens
ctgtttctgtccccc

SEQ ID NO: 1783889 - DNA, 15 bp, Homo sapiens
tgtttctgtccccct

SEQ ID NO: 1783890 - DNA, 15 bp, Homo sapiens
gtttctgtccccctg

SEQ ID NO: 1783891 - DNA, 15 bp, Homo sapiens
tttctgtccccctgt

SEQ ID NO: 1783892 - DNA, 15 bp, Homo sapiens
ttctgtccccctgta

SEQ ID NO: 1783893 - DNA, 15 bp, Homo sapiens
tctgtccccctgtac

SEQ ID NO: 1783894 - DNA, 15 bp, Homo sapiens
ctgtccccctgtact

SEQ ID NO: 1783895 - DNA, 15 bp, Homo sapiens
tgtccccctgtactg

SEQ ID NO: 1783896 - DNA, 15 bp, Homo sapiens
gtccccctgtactga

SEQ ID NO: 1783897 - DNA, 15 bp, Homo sapiens
tccccctgtactgat

SEQ ID NO: 1783898 - DNA, 15 bp, Homo sapiens
ccccctgtactgatt

SEQ ID NO: 1783899 - DNA, 15 bp, Homo sapiens
cccctgtactgatta

SEQ ID NO: 1783900 - DNA, 15 bp, Homo sapiens
ccctgtactgattac

SEQ ID NO: 1783901 - DNA, 15 bp, Homo sapiens
cctgtactgattacc

SEQ ID NO: 1783902 - DNA, 15 bp, Homo sapiens
ctgtactgattacct

SEQ ID NO: 1783903 - DNA, 15 bp, Homo sapiens
tgtactgattacctc

SEQ ID NO: 1783904 - DNA, 15 bp, Homo sapiens
gtactgattacctct

SEQ ID NO: 1783905 - DNA, 15 bp, Homo sapiens
tactgattacctcta

SEQ ID NO: 1783906 - DNA, 15 bp, Homo sapiens
actgattacctctaa

SEQ ID NO: 1783907 - DNA, 15 bp, Homo sapiens
ctgattacctctaac

SEQ ID NO: 1783908 - DNA, 15 bp, Homo sapiens
tgattacctctaact

SEQ ID NO: 1783909 - DNA, 15 bp, Homo sapiens
gattacctctaactg

SEQ ID NO: 1783910 - DNA, 15 bp, Homo sapiens
attacctctaactgc

SEQ ID NO: 1783911 - DNA, 15 bp, Homo sapiens
ttacctctaactgca

SEQ ID NO: 1783912 - DNA, 15 bp, Homo sapiens
tacctctaactgcag

SEQ ID NO: 1783913 - DNA, 15 bp, Homo sapiens
acctctaactgcaga

SEQ ID NO: 1783914 - DNA, 15 bp, Homo sapiens
cctctaactgcagaa

SEQ ID NO: 1783915 - DNA, 15 bp, Homo sapiens
ctctaactgcagaaa

SEQ ID NO: 1783916 - DNA, 15 bp, Homo sapiens
tctaactgcagaaac

SEQ ID NO: 1783917 - DNA, 15 bp, Homo sapiens
ctaactgcagaaacc

SEQ ID NO: 1783918 - DNA, 15 bp, Homo sapiens
taactgcagaaaccc

SEQ ID NO: 1783919 - DNA, 15 bp, Homo sapiens
aactgcagaaacccc

SEQ ID NO: 1783920 - DNA, 15 bp, Homo sapiens
actgcagaaacccca

SEQ ID NO: 1783921 - DNA, 15 bp, Homo sapiens
ctgcagaaaccccag

SEQ ID NO: 1783922 - DNA, 15 bp, Homo sapiens
tgcagaaaccccagg

SEQ ID NO: 1783923 - DNA, 15 bp, Homo sapiens
gcagaaaccccaggg

SEQ ID NO: 1783924 - DNA, 15 bp, Homo sapiens
cagaaaccccagggg

SEQ ID NO: 1783925 - DNA, 15 bp, Homo sapiens
agaaaccccaggggg

SEQ ID NO: 1783926 - DNA, 15 bp, Homo sapiens
gaaaccccaggggga

SEQ ID NO: 1783927 - DNA, 15 bp, Homo sapiens
aaaccccagggggaa

SEQ ID NO: 1783928 - DNA, 15 bp, Homo sapiens
aaccccagggggaaa

SEQ ID NO: 1783929 - DNA, 15 bp, Homo sapiens
accccagggggaaag

SEQ ID NO: 1783930 - DNA, 15 bp, Homo sapiens
ccccagggggaaagc

SEQ ID NO: 1783931 - DNA, 15 bp, Homo sapiens
cccagggggaaagca

SEQ ID NO: 1783932 - DNA, 15 bp, Homo sapiens
ccagggggaaagcag

SEQ ID NO: 1783933 - DNA, 15 bp, Homo sapiens
cagggggaaagcaga

SEQ ID NO: 1783934 - DNA, 15 bp, Homo sapiens
agggggaaagcagaa

SEQ ID NO: 1783935 - DNA, 15 bp, Homo sapiens
gggggaaagcagaaa

SEQ ID NO: 1783936 - DNA, 15 bp, Homo sapiens
ggggaaagcagaaag

SEQ ID NO: 1783937 - DNA, 15 bp, Homo sapiens
gggaaagcagaaaga

SEQ ID NO: 1783938 - DNA, 15 bp, Homo sapiens
ggaaagcagaaagag

SEQ ID NO: 1783939 - DNA, 15 bp, Homo sapiens
gaaagcagaaagaga

SEQ ID NO: 1783940 - DNA, 15 bp, Homo sapiens
aaagcagaaagagac

SEQ ID NO: 1783941 - DNA, 15 bp, Homo sapiens
aagcagaaagagaca

SEQ ID NO: 1783942 - DNA, 15 bp, Homo sapiens
agcagaaagagacag

SEQ ID NO: 1783943 - DNA, 15 bp, Homo sapiens
gcagaaagagacaga

SEQ ID NO: 1783944 - DNA, 15 bp, Homo sapiens
cagaaagagacagaa

SEQ ID NO: 1783945 - DNA, 15 bp, Homo sapiens
agaaagagacagaag

SEQ ID NO: 1783946 - DNA, 15 bp, Homo sapiens
gaaagagacagaaga

SEQ ID NO: 1783947 - DNA, 15 bp, Homo sapiens
aaagagacagaagat

SEQ ID NO: 1783948 - DNA, 15 bp, Homo sapiens
aagagacagaagata

SEQ ID NO: 1783949 - DNA, 15 bp, Homo sapiens
agagacagaagatac

SEQ ID NO: 1783950 - DNA, 15 bp, Homo sapiens
gagacagaagatact

SEQ ID NO: 1783951 - DNA, 15 bp, Homo sapiens
agacagaagatactc

SEQ ID NO: 1783952 - DNA, 15 bp, Homo sapiens
gacagaagatactca

SEQ ID NO: 1783953 - DNA, 15 bp, Homo sapiens
acagaagatactcat

SEQ ID NO: 1783954 - DNA, 15 bp, Homo sapiens
cagaagatactcata

SEQ ID NO: 1783955 - DNA, 15 bp, Homo sapiens
agaagatactcatat

SEQ ID NO: 1783956 - DNA, 15 bp, Homo sapiens
gaagatactcatatg

SEQ ID NO: 1783957 - DNA, 15 bp, Homo sapiens
aagatactcatatgg

SEQ ID NO: 1783958 - DNA, 15 bp, Homo sapiens
agatactcatatggt

SEQ ID NO: 1783959 - DNA, 15 bp, Homo sapiens
gatactcatatggta

SEQ ID NO: 1783960 - DNA, 15 bp, Homo sapiens
atactcatatggtaa

SEQ ID NO: 1783961 - DNA, 15 bp, Homo sapiens
tactcatatggtaat

SEQ ID NO: 1783962 - DNA, 15 bp, Homo sapiens
actcatatggtaata

SEQ ID NO: 1783963 - DNA, 15 bp, Homo sapiens
ctcatatggtaataa

SEQ ID NO: 1783964 - DNA, 15 bp, Homo sapiens
tcatatggtaataag

SEQ ID NO: 1783965 - DNA, 15 bp, Homo sapiens
catatggtaataagt

SEQ ID NO: 1783966 - DNA, 15 bp, Homo sapiens
atatggtaataagtt

SEQ ID NO: 1783967 - DNA, 15 bp, Homo sapiens
tatggtaataagttt

SEQ ID NO: 1783968 - DNA, 15 bp, Homo sapiens
atggtaataagtttt

SEQ ID NO: 1783969 - DNA, 15 bp, Homo sapiens
tggtaataagttttg

SEQ ID NO: 1783970 - DNA, 15 bp, Homo sapiens
ggtaataagttttgt

SEQ ID NO: 1783971 - DNA, 15 bp, Homo sapiens
gtaataagttttgtt

SEQ ID NO: 1783972 - DNA, 15 bp, Homo sapiens
taataagttttgttt

SEQ ID NO: 1783973 - DNA, 15 bp, Homo sapiens
aataagttttgtttc

SEQ ID NO: 1783974 - DNA, 15 bp, Homo sapiens
ataagttttgtttcc

SEQ ID NO: 1783975 - DNA, 15 bp, Homo sapiens
taagttttgtttcca

SEQ ID NO: 1783976 - DNA, 15 bp, Homo sapiens
aagttttgtttccag

SEQ ID NO: 1783977 - DNA, 15 bp, Homo sapiens
agttttgtttccaga

SEQ ID NO: 1783978 - DNA, 15 bp, Homo sapiens
gttttgtttccagac

SEQ ID NO: 1783979 - DNA, 15 bp, Homo sapiens
ttttgtttccagaca

SEQ ID NO: 1783980 - DNA, 15 bp, Homo sapiens
tttgtttccagacac

SEQ ID NO: 1783981 - DNA, 15 bp, Homo sapiens
ttgtttccagacacc

SEQ ID NO: 1783982 - DNA, 15 bp, Homo sapiens
tgtttccagacaccc

SEQ ID NO: 1783983 - DNA, 15 bp, Homo sapiens
gtttccagacacccc

SEQ ID NO: 1783984 - DNA, 15 bp, Homo sapiens
tttccagacacccct

SEQ ID NO: 1783985 - DNA, 15 bp, Homo sapiens
ttccagacaccccta

SEQ ID NO: 1783986 - DNA, 15 bp, Homo sapiens
tccagacacccctaa

SEQ ID NO: 1783987 - DNA, 15 bp, Homo sapiens
ccagacacccctaat

SEQ ID NO: 1783988 - DNA, 15 bp, Homo sapiens
cagacacccctaata

SEQ ID NO: 1783989 - DNA, 15 bp, Homo sapiens
agacacccctaataa

SEQ ID NO: 1783990 - DNA, 15 bp, Homo sapiens
gacacccctaataag

SEQ ID NO: 1783991 - DNA, 15 bp, Homo sapiens
acacccctaataagg

SEQ ID NO: 1783992 - DNA, 15 bp, Homo sapiens
cacccctaataaggc

SEQ ID NO: 1783993 - DNA, 15 bp, Homo sapiens
acccctaataaggcc

SEQ ID NO: 1783994 - DNA, 15 bp, Homo sapiens
cccctaataaggccg

SEQ ID NO: 1783995 - DNA, 15 bp, Homo sapiens
ccctaataaggccgt

SEQ ID NO: 1783996 - DNA, 15 bp, Homo sapiens
cctaataaggccgtg

SEQ ID NO: 1783997 - DNA, 15 bp, Homo sapiens
ctaataaggccgtgt

SEQ ID NO: 1783998 - DNA, 15 bp, Homo sapiens
taataaggccgtgtt

SEQ ID NO: 1783999 - DNA, 15 bp, Homo sapiens
aataaggccgtgtta

SEQ ID NO: 1784000 - DNA, 15 bp, Homo sapiens
ataaggccgtgttat

SEQ ID NO: 1784001 - DNA, 15 bp, Homo sapiens
taaggccgtgttatg

SEQ ID NO: 1784002 - DNA, 15 bp, Homo sapiens
aaggccgtgttatga

SEQ ID NO: 1784003 - DNA, 15 bp, Homo sapiens
aggccgtgttatgaa

SEQ ID NO: 1784004 - DNA, 15 bp, Homo sapiens
ggccgtgttatgaaa

SEQ ID NO: 1784005 - DNA, 15 bp, Homo sapiens
gccgtgttatgaaaa

SEQ ID NO: 1784006 - DNA, 15 bp, Homo sapiens
ccgtgttatgaaaat

SEQ ID NO: 1784007 - DNA, 15 bp, Homo sapiens
cgtgttatgaaaatg

SEQ ID NO: 1784008 - DNA, 15 bp, Homo sapiens
gtgttatgaaaatgg

SEQ ID NO: 1784009 - DNA, 15 bp, Homo sapiens
tgttatgaaaatgga

SEQ ID NO: 1784010 - DNA, 15 bp, Homo sapiens
gttatgaaaatggaa

SEQ ID NO: 1784011 - DNA, 15 bp, Homo sapiens
ttatgaaaatggaaa

SEQ ID NO: 1784012 - DNA, 15 bp, Homo sapiens
tatgaaaatggaaac

SEQ ID NO: 1784013 - DNA, 15 bp, Homo sapiens
atgaaaatggaaaca

SEQ ID NO: 1784014 - DNA, 15 bp, Homo sapiens
tgaaaatggaaacaa

SEQ ID NO: 1784015 - DNA, 15 bp, Homo sapiens
gaaaatggaaacaaa

SEQ ID NO: 1784016 - DNA, 15 bp, Homo sapiens
aaaatggaaacaaaa

SEQ ID NO: 1784017 - DNA, 15 bp, Homo sapiens
aaatggaaacaaaac

SEQ ID NO: 1784018 - DNA, 15 bp, Homo sapiens
aatggaaacaaaacc

SEQ ID NO: 1784019 - DNA, 15 bp, Homo sapiens
atggaaacaaaacca

SEQ ID NO: 1784020 - DNA, 15 bp, Homo sapiens
tggaaacaaaaccat

SEQ ID NO: 1784021 - DNA, 15 bp, Homo sapiens
ggaaacaaaaccatt

SEQ ID NO: 1784022 - DNA, 15 bp, Homo sapiens
gaaacaaaaccattg

SEQ ID NO: 1784023 - DNA, 15 bp, Homo sapiens
aaacaaaaccattgc

SEQ ID NO: 1784024 - DNA, 15 bp, Homo sapiens
aacaaaaccattgca

SEQ ID NO: 1784025 - DNA, 15 bp, Homo sapiens
acaaaaccattgcat

SEQ ID NO: 1784026 - DNA, 15 bp, Homo sapiens
caaaaccattgcatt

SEQ ID NO: 1784027 - DNA, 15 bp, Homo sapiens
aaaaccattgcatta

SEQ ID NO: 1784028 - DNA, 15 bp, Homo sapiens
aaaccattgcattaa

SEQ ID NO: 1784029 - DNA, 15 bp, Homo sapiens
aaccattgcattaaa

SEQ ID NO: 1784030 - DNA, 15 bp, Homo sapiens
accattgcattaaaa

SEQ ID NO: 1784031 - DNA, 15 bp, Homo sapiens
ccattgcattaaaaa

SEQ ID NO: 1784032 - DNA, 15 bp, Homo sapiens
cattgcattaaaaaa

SEQ ID NO: 1784033 - DNA, 15 bp, Homo sapiens
attgcattaaaaaac

SEQ ID NO: 1784034 - DNA, 15 bp, Homo sapiens
ttgcattaaaaaaca

SEQ ID NO: 1784035 - DNA, 15 bp, Homo sapiens
tgcattaaaaaacaa

SEQ ID NO: 1784036 - DNA, 15 bp, Homo sapiens
gcattaaaaaacaat

SEQ ID NO: 1784037 - DNA, 15 bp, Homo sapiens
cattaaaaaacaata

SEQ ID NO: 1784038 - DNA, 15 bp, Homo sapiens
attaaaaaacaataa

SEQ ID NO: 1784039 - DNA, 15 bp, Homo sapiens
ttaaaaaacaataag

SEQ ID NO: 1784040 - DNA, 15 bp, Homo sapiens
taaaaaacaataagc

SEQ ID NO: 1784041 - DNA, 15 bp, Homo sapiens
aaaaaacaataagct

SEQ ID NO: 1784042 - DNA, 15 bp, Homo sapiens
aaaaacaataagcta

SEQ ID NO: 1784043 - DNA, 15 bp, Homo sapiens
aaaacaataagctag

SEQ ID NO: 1784044 - DNA, 15 bp, Homo sapiens
aaacaataagctaga

SEQ ID NO: 1784045 - DNA, 15 bp, Homo sapiens
aacaataagctagat

SEQ ID NO: 1784046 - DNA, 15 bp, Homo sapiens
acaataagctagatt

SEQ ID NO: 1784047 - DNA, 15 bp, Homo sapiens
caataagctagattg

SEQ ID NO: 1784048 - DNA, 15 bp, Homo sapiens
aataagctagattgc

SEQ ID NO: 1784049 - DNA, 15 bp, Homo sapiens
ataagctagattgca

SEQ ID NO: 1784050 - DNA, 15 bp, Homo sapiens
taagctagattgcag

SEQ ID NO: 1784051 - DNA, 15 bp, Homo sapiens
aagctagattgcaga

SEQ ID NO: 1784052 - DNA, 15 bp, Homo sapiens
agctagattgcagaa

SEQ ID NO: 1784053 - DNA, 15 bp, Homo sapiens
gctagattgcagaag

SEQ ID NO: 1784054 - DNA, 15 bp, Homo sapiens
ctagattgcagaaga

SEQ ID NO: 1784055 - DNA, 15 bp, Homo sapiens
tagattgcagaagaa

SEQ ID NO: 1784056 - DNA, 15 bp, Homo sapiens
agattgcagaagaag

SEQ ID NO: 1784057 - DNA, 15 bp, Homo sapiens
gattgcagaagaaga

SEQ ID NO: 1784058 - DNA, 15 bp, Homo sapiens
attgcagaagaagag

SEQ ID NO: 1784059 - DNA, 15 bp, Homo sapiens
ttgcagaagaagagg

SEQ ID NO: 1784060 - DNA, 15 bp, Homo sapiens
tgcagaagaagaggg

SEQ ID NO: 1784061 - DNA, 15 bp, Homo sapiens
gcagaagaagaggga

SEQ ID NO: 1784062 - DNA, 15 bp, Homo sapiens
cagaagaagagggaa

SEQ ID NO: 1784063 - DNA, 15 bp, Homo sapiens
agaagaagagggaat

SEQ ID NO: 1784064 - DNA, 15 bp, Homo sapiens
gaagaagagggaatg

SEQ ID NO: 1784065 - DNA, 15 bp, Homo sapiens
aagaagagggaatga

SEQ ID NO: 1784066 - DNA, 15 bp, Homo sapiens
agaagagggaatgac

SEQ ID NO: 1784067 - DNA, 15 bp, Homo sapiens
gaagagggaatgact

SEQ ID NO: 1784068 - DNA, 15 bp, Homo sapiens
aagagggaatgactt

SEQ ID NO: 1784069 - DNA, 15 bp, Homo sapiens
agagggaatgacttg

SEQ ID NO: 1784070 - DNA, 15 bp, Homo sapiens
gagggaatgacttgt

SEQ ID NO: 1784071 - DNA, 15 bp, Homo sapiens
agggaatgacttgtg

SEQ ID NO: 1784072 - DNA, 15 bp, Homo sapiens
gggaatgacttgtgg

SEQ ID NO: 1784073 - DNA, 15 bp, Homo sapiens
ggaatgacttgtgga

SEQ ID NO: 1784074 - DNA, 15 bp, Homo sapiens
gaatgacttgtggac

SEQ ID NO: 1784075 - DNA, 15 bp, Homo sapiens
aatgacttgtggacc

SEQ ID NO: 1784076 - DNA, 15 bp, Homo sapiens
atgacttgtggacca

SEQ ID NO: 1784077 - DNA, 15 bp, Homo sapiens
tgacttgtggaccaa

SEQ ID NO: 1784078 - DNA, 15 bp, Homo sapiens
gacttgtggaccaac

SEQ ID NO: 1784079 - DNA, 15 bp, Homo sapiens
acttgtggaccaaca

SEQ ID NO: 1784080 - DNA, 15 bp, Homo sapiens
cttgtggaccaacat

SEQ ID NO: 1784081 - DNA, 15 bp, Homo sapiens
ttgtggaccaacatt

SEQ ID NO: 1784082 - DNA, 15 bp, Homo sapiens
tgtggaccaacattc

SEQ ID NO: 1784083 - DNA, 15 bp, Homo sapiens
gtggaccaacattca

SEQ ID NO: 1784084 - DNA, 15 bp, Homo sapiens
tggaccaacattcaa

SEQ ID NO: 1784085 - DNA, 15 bp, Homo sapiens
ggaccaacattcaag

SEQ ID NO: 1784086 - DNA, 15 bp, Homo sapiens
gaccaacattcaaga

SEQ ID NO: 1784087 - DNA, 15 bp, Homo sapiens
accaacattcaagag

SEQ ID NO: 1784088 - DNA, 15 bp, Homo sapiens
ccaacattcaagagg

SEQ ID NO: 1784089 - DNA, 15 bp, Homo sapiens
caacattcaagagga

SEQ ID NO: 1784090 - DNA, 15 bp, Homo sapiens
aacattcaagaggag

SEQ ID NO: 1784091 - DNA, 15 bp, Homo sapiens
acattcaagaggagt

SEQ ID NO: 1784092 - DNA, 15 bp, Homo sapiens
cattcaagaggagtc

SEQ ID NO: 1784093 - DNA, 15 bp, Homo sapiens
attcaagaggagtca

SEQ ID NO: 1784094 - DNA, 15 bp, Homo sapiens
ttcaagaggagtcag

SEQ ID NO: 1784095 - DNA, 15 bp, Homo sapiens
tcaagaggagtcagg

SEQ ID NO: 1784096 - DNA, 15 bp, Homo sapiens
caagaggagtcaggg

SEQ ID NO: 1784097 - DNA, 15 bp, Homo sapiens
aagaggagtcaggga

SEQ ID NO: 1784098 - DNA, 15 bp, Homo sapiens
agaggagtcagggag

SEQ ID NO: 1784099 - DNA, 15 bp, Homo sapiens
gaggagtcagggagt

SEQ ID NO: 1784100 - DNA, 15 bp, Homo sapiens
aggagtcagggagtg

SEQ ID NO: 1784101 - DNA, 15 bp, Homo sapiens
ggagtcagggagtgg

SEQ ID NO: 1784102 - DNA, 15 bp, Homo sapiens
gagtcagggagtggg

SEQ ID NO: 1784103 - DNA, 15 bp, Homo sapiens
agtcagggagtgggg

SEQ ID NO: 1784104 - DNA, 15 bp, Homo sapiens
gtcagggagtggggt

SEQ ID NO: 1784105 - DNA, 15 bp, Homo sapiens
tcagggagtggggtt

SEQ ID NO: 1784106 - DNA, 15 bp, Homo sapiens
cagggagtggggttg

SEQ ID NO: 1784107 - DNA, 15 bp, Homo sapiens
agggagtggggttga

SEQ ID NO: 1784108 - DNA, 15 bp, Homo sapiens
gggagtggggttgac

SEQ ID NO: 1784109 - DNA, 15 bp, Homo sapiens
ggagtggggttgacg

SEQ ID NO: 1784110 - DNA, 15 bp, Homo sapiens
gagtggggttgacgg

SEQ ID NO: 1784111 - DNA, 15 bp, Homo sapiens
agtggggttgacggc

SEQ ID NO: 1784112 - DNA, 15 bp, Homo sapiens
gtggggttgacggca

SEQ ID NO: 1784113 - DNA, 15 bp, Homo sapiens
tggggttgacggcat

SEQ ID NO: 1784114 - DNA, 15 bp, Homo sapiens
ggggttgacggcata

SEQ ID NO: 1784115 - DNA, 15 bp, Homo sapiens
gggttgacggcatag

SEQ ID NO: 1784116 - DNA, 15 bp, Homo sapiens
ggttgacggcataga

SEQ ID NO: 1784117 - DNA, 15 bp, Homo sapiens
gttgacggcatagat

SEQ ID NO: 1784118 - DNA, 15 bp, Homo sapiens
ttgacggcatagatg

SEQ ID NO: 1784119 - DNA, 15 bp, Homo sapiens
tgacggcatagatgt

SEQ ID NO: 1784120 - DNA, 15 bp, Homo sapiens
gacggcatagatgta

SEQ ID NO: 1784121 - DNA, 15 bp, Homo sapiens
acggcatagatgtag

SEQ ID NO: 1784122 - DNA, 15 bp, Homo sapiens
cggcatagatgtagc

SEQ ID NO: 1784123 - DNA, 15 bp, Homo sapiens
ggcatagatgtagct

SEQ ID NO: 1784124 - DNA, 15 bp, Homo sapiens
gcatagatgtagctt

SEQ ID NO: 1784125 - DNA, 15 bp, Homo sapiens
catagatgtagcttt

SEQ ID NO: 1784126 - DNA, 15 bp, Homo sapiens
atagatgtagctttg

SEQ ID NO: 1784127 - DNA, 15 bp, Homo sapiens
tagatgtagctttga

SEQ ID NO: 1784128 - DNA, 15 bp, Homo sapiens
agatgtagctttgac

SEQ ID NO: 1784129 - DNA, 15 bp, Homo sapiens
gatgtagctttgacc

SEQ ID NO: 1784130 - DNA, 15 bp, Homo sapiens
atgtagctttgaccc

SEQ ID NO: 1784131 - DNA, 15 bp, Homo sapiens
tgtagctttgaccca

SEQ ID NO: 1784132 - DNA, 15 bp, Homo sapiens
gtagctttgacccac

SEQ ID NO: 1784133 - DNA, 15 bp, Homo sapiens
tagctttgacccacc

SEQ ID NO: 1784134 - DNA, 15 bp, Homo sapiens
agctttgacccaccc

SEQ ID NO: 1784135 - DNA, 15 bp, Homo sapiens
gctttgacccaccca

SEQ ID NO: 1784136 - DNA, 15 bp, Homo sapiens
ctttgacccacccaa

SEQ ID NO: 1784137 - DNA, 15 bp, Homo sapiens
tttgacccacccaaa

SEQ ID NO: 1784138 - DNA, 15 bp, Homo sapiens
ttgacccacccaaag

SEQ ID NO: 1784139 - DNA, 15 bp, Homo sapiens
tgacccacccaaaga

SEQ ID NO: 1784140 - DNA, 15 bp, Homo sapiens
gacccacccaaagaa

SEQ ID NO: 1784141 - DNA, 15 bp, Homo sapiens
acccacccaaagaat

SEQ ID NO: 1784142 - DNA, 15 bp, Homo sapiens
cccacccaaagaatg

SEQ ID NO: 1784143 - DNA, 15 bp, Homo sapiens
ccacccaaagaatgg

SEQ ID NO: 1784144 - DNA, 15 bp, Homo sapiens
cacccaaagaatgga

SEQ ID NO: 1784145 - DNA, 15 bp, Homo sapiens
acccaaagaatggac

SEQ ID NO: 1784146 - DNA, 15 bp, Homo sapiens
cccaaagaatggaca

SEQ ID NO: 1784147 - DNA, 15 bp, Homo sapiens
ccaaagaatggacat

SEQ ID NO: 1784148 - DNA, 15 bp, Homo sapiens
caaagaatggacata

SEQ ID NO: 1784149 - DNA, 15 bp, Homo sapiens
aaagaatggacatat

SEQ ID NO: 1784150 - DNA, 15 bp, Homo sapiens
aagaatggacatatc

SEQ ID NO: 1784151 - DNA, 15 bp, Homo sapiens
agaatggacatatct

SEQ ID NO: 1784152 - DNA, 15 bp, Homo sapiens
gaatggacatatctg

SEQ ID NO: 1784153 - DNA, 15 bp, Homo sapiens
aatggacatatctga

SEQ ID NO: 1784154 - DNA, 15 bp, Homo sapiens
atggacatatctgaa

SEQ ID NO: 1784155 - DNA, 15 bp, Homo sapiens
tggacatatctgaaa

SEQ ID NO: 1784156 - DNA, 15 bp, Homo sapiens
ggacatatctgaaat

SEQ ID NO: 1784157 - DNA, 15 bp, Homo sapiens
gacatatctgaaata

SEQ ID NO: 1784158 - DNA, 15 bp, Homo sapiens
acatatctgaaatag

SEQ ID NO: 1784159 - DNA, 15 bp, Homo sapiens
catatctgaaatagg

SEQ ID NO: 1784160 - DNA, 15 bp, Homo sapiens
atatctgaaataggt

SEQ ID NO: 1784161 - DNA, 15 bp, Homo sapiens
tatctgaaataggta

SEQ ID NO: 1784162 - DNA, 15 bp, Homo sapiens
atctgaaataggtac

SEQ ID NO: 1784163 - DNA, 15 bp, Homo sapiens
tctgaaataggtaca

SEQ ID NO: 1784164 - DNA, 15 bp, Homo sapiens
ctgaaataggtacaa

SEQ ID NO: 1784165 - DNA, 15 bp, Homo sapiens
tgaaataggtacaaa

SEQ ID NO: 1784166 - DNA, 15 bp, Homo sapiens
gaaataggtacaaag

SEQ ID NO: 1784167 - DNA, 15 bp, Homo sapiens
aaataggtacaaagg

SEQ ID NO: 1784168 - DNA, 15 bp, Homo sapiens
aataggtacaaagga

SEQ ID NO: 1784169 - DNA, 15 bp, Homo sapiens
ataggtacaaaggaa

SEQ ID NO: 1784170 - DNA, 15 bp, Homo sapiens
taggtacaaaggaat

SEQ ID NO: 1784171 - DNA, 15 bp, Homo sapiens
aggtacaaaggaata

SEQ ID NO: 1784172 - DNA, 15 bp, Homo sapiens
ggtacaaaggaataa

SEQ ID NO: 1784173 - DNA, 15 bp, Homo sapiens
gtacaaaggaataat

SEQ ID NO: 1784174 - DNA, 15 bp, Homo sapiens
tacaaaggaataatg

SEQ ID NO: 1784175 - DNA, 15 bp, Homo sapiens
acaaaggaataatga

SEQ ID NO: 1784176 - DNA, 15 bp, Homo sapiens
caaaggaataatgag

SEQ ID NO: 1784177 - DNA, 15 bp, Homo sapiens
aaaggaataatgaga

SEQ ID NO: 1784178 - DNA, 15 bp, Homo sapiens
aaggaataatgagaa

SEQ ID NO: 1784179 - DNA, 15 bp, Homo sapiens
aggaataatgagaag

SEQ ID NO: 1784180 - DNA, 15 bp, Homo sapiens
ggaataatgagaagg

SEQ ID NO: 1784181 - DNA, 15 bp, Homo sapiens
gaataatgagaaggt

SEQ ID NO: 1784182 - DNA, 15 bp, Homo sapiens
aataatgagaaggta

SEQ ID NO: 1784183 - DNA, 15 bp, Homo sapiens
ataatgagaaggtaa

SEQ ID NO: 1784184 - DNA, 15 bp, Homo sapiens
taatgagaaggtaaa

SEQ ID NO: 1784185 - DNA, 15 bp, Homo sapiens
aatgagaaggtaaaa

SEQ ID NO: 1784186 - DNA, 15 bp, Homo sapiens
atgagaaggtaaaaa

SEQ ID NO: 1784187 - DNA, 15 bp, Homo sapiens
tgagaaggtaaaaat

SEQ ID NO: 1784188 - DNA, 15 bp, Homo sapiens
gagaaggtaaaaatg

SEQ ID NO: 1784189 - DNA, 15 bp, Homo sapiens
agaaggtaaaaatgc

SEQ ID NO: 1784190 - DNA, 15 bp, Homo sapiens
gaaggtaaaaatgca

SEQ ID NO: 1784191 - DNA, 15 bp, Homo sapiens
aaggtaaaaatgcat

SEQ ID NO: 1784192 - DNA, 15 bp, Homo sapiens
aggtaaaaatgcata

SEQ ID NO: 1784193 - DNA, 15 bp, Homo sapiens
ggtaaaaatgcataa

SEQ ID NO: 1784194 - DNA, 15 bp, Homo sapiens
gtaaaaatgcataaa

SEQ ID NO: 1784195 - DNA, 15 bp, Homo sapiens
taaaaatgcataaat

SEQ ID NO: 1784196 - DNA, 15 bp, Homo sapiens
aaaaatgcataaata

SEQ ID NO: 1784197 - DNA, 15 bp, Homo sapiens
aaaatgcataaataa

SEQ ID NO: 1784198 - DNA, 15 bp, Homo sapiens
aaatgcataaataaa

SEQ ID NO: 1784199 - DNA, 15 bp, Homo sapiens
aatgcataaataaac

SEQ ID NO: 1784200 - DNA, 15 bp, Homo sapiens
atgcataaataaact

SEQ ID NO: 1784201 - DNA, 15 bp, Homo sapiens
tgcataaataaacta

SEQ ID NO: 1784202 - DNA, 15 bp, Homo sapiens
gcataaataaactag

SEQ ID NO: 1784203 - DNA, 15 bp, Homo sapiens
cataaataaactaga

SEQ ID NO: 1784204 - DNA, 15 bp, Homo sapiens
ataaataaactagat

SEQ ID NO: 1784205 - DNA, 15 bp, Homo sapiens
taaataaactagata

SEQ ID NO: 1784206 - DNA, 15 bp, Homo sapiens
aaataaactagatat

SEQ ID NO: 1784207 - DNA, 15 bp, Homo sapiens
aataaactagatata

SEQ ID NO: 1784208 - DNA, 15 bp, Homo sapiens
ataaactagatatag

SEQ ID NO: 1784209 - DNA, 15 bp, Homo sapiens
taaactagatataga

SEQ ID NO: 1784210 - DNA, 15 bp, Homo sapiens
aaactagatatagat

SEQ ID NO: 1784211 - DNA, 15 bp, Homo sapiens
aactagatatagata

SEQ ID NO: 1784212 - DNA, 15 bp, Homo sapiens
actagatatagatat

SEQ ID NO: 1784213 - DNA, 15 bp, Homo sapiens
ctagatatagatata

SEQ ID NO: 1784214 - DNA, 15 bp, Homo sapiens
tagatatagatatat

SEQ ID NO: 1784215 - DNA, 15 bp, Homo sapiens
agatatagatatatt

SEQ ID NO: 1784216 - DNA, 15 bp, Homo sapiens
gatatagatatattc

SEQ ID NO: 1784217 - DNA, 15 bp, Homo sapiens
atatagatatattct

SEQ ID NO: 1784218 - DNA, 15 bp, Homo sapiens
tatagatatattctg

SEQ ID NO: 1784219 - DNA, 15 bp, Homo sapiens
atagatatattctgg

SEQ ID NO: 1784220 - DNA, 15 bp, Homo sapiens
tagatatattctgga

SEQ ID NO: 1784221 - DNA, 15 bp, Homo sapiens
agatatattctggaa

SEQ ID NO: 1784222 - DNA, 15 bp, Homo sapiens
gatatattctggaac

SEQ ID NO: 1784223 - DNA, 15 bp, Homo sapiens
atatattctggaaca

SEQ ID NO: 1784224 - DNA, 15 bp, Homo sapiens
tatattctggaacaa

SEQ ID NO: 1784225 - DNA, 15 bp, Homo sapiens
atattctggaacaaa

SEQ ID NO: 1784226 - DNA, 15 bp, Homo sapiens
tattctggaacaaaa

SEQ ID NO: 1784227 - DNA, 15 bp, Homo sapiens
attctggaacaaaag

SEQ ID NO: 1784228 - DNA, 15 bp, Homo sapiens
ttctggaacaaaaga

SEQ ID NO: 1784229 - DNA, 15 bp, Homo sapiens
tctggaacaaaagaa

SEQ ID NO: 1784230 - DNA, 15 bp, Homo sapiens
ctggaacaaaagaaa

SEQ ID NO: 1784231 - DNA, 15 bp, Homo sapiens
tggaacaaaagaaag

SEQ ID NO: 1784232 - DNA, 15 bp, Homo sapiens
ggaacaaaagaaagc

SEQ ID NO: 1784233 - DNA, 15 bp, Homo sapiens
gaacaaaagaaagct

SEQ ID NO: 1784234 - DNA, 15 bp, Homo sapiens
aacaaaagaaagctc

SEQ ID NO: 1784235 - DNA, 15 bp, Homo sapiens
acaaaagaaagctct

SEQ ID NO: 1784236 - DNA, 15 bp, Homo sapiens
caaaagaaagctctt

SEQ ID NO: 1784237 - DNA, 15 bp, Homo sapiens
aaaagaaagctcttc

SEQ ID NO: 1784238 - DNA, 15 bp, Homo sapiens
aaagaaagctcttct

SEQ ID NO: 1784239 - DNA, 15 bp, Homo sapiens
aagaaagctcttctc

SEQ ID NO: 1784240 - DNA, 15 bp, Homo sapiens
agaaagctcttctct

SEQ ID NO: 1784241 - DNA, 15 bp, Homo sapiens
gaaagctcttctctt

SEQ ID NO: 1784242 - DNA, 15 bp, Homo sapiens
aaagctcttctcttg

SEQ ID NO: 1784243 - DNA, 15 bp, Homo sapiens
aagctcttctcttgc

SEQ ID NO: 1784244 - DNA, 15 bp, Homo sapiens
agctcttctcttgcc

SEQ ID NO: 1784245 - DNA, 15 bp, Homo sapiens
gctcttctcttgcca

SEQ ID NO: 1784246 - DNA, 15 bp, Homo sapiens
ctcttctcttgccat

SEQ ID NO: 1784247 - DNA, 15 bp, Homo sapiens
tcttctcttgccatc

SEQ ID NO: 1784248 - DNA, 15 bp, Homo sapiens
cttctcttgccatca

SEQ ID NO: 1784249 - DNA, 15 bp, Homo sapiens
ttctcttgccatcag

SEQ ID NO: 1784250 - DNA, 15 bp, Homo sapiens
tctcttgccatcagg

SEQ ID NO: 1784251 - DNA, 15 bp, Homo sapiens
ctcttgccatcaggg

SEQ ID NO: 1784252 - DNA, 15 bp, Homo sapiens
tcttgccatcagggt

SEQ ID NO: 1784253 - DNA, 15 bp, Homo sapiens
cttgccatcagggta

SEQ ID NO: 1784254 - DNA, 15 bp, Homo sapiens
ttgccatcagggtag

SEQ ID NO: 1784255 - DNA, 15 bp, Homo sapiens
tgccatcagggtaga

SEQ ID NO: 1784256 - DNA, 15 bp, Homo sapiens
gccatcagggtagaa

SEQ ID NO: 1784257 - DNA, 15 bp, Homo sapiens
ccatcagggtagaag

SEQ ID NO: 1784258 - DNA, 15 bp, Homo sapiens
catcagggtagaagg

SEQ ID NO: 1784259 - DNA, 15 bp, Homo sapiens
atcagggtagaagga

SEQ ID NO: 1784260 - DNA, 15 bp, Homo sapiens
tcagggtagaaggat

SEQ ID NO: 1784261 - DNA, 15 bp, Homo sapiens
cagggtagaaggatc

SEQ ID NO: 1784262 - DNA, 15 bp, Homo sapiens
agggtagaaggatcc

SEQ ID NO: 1784263 - DNA, 15 bp, Homo sapiens
gggtagaaggatcct

SEQ ID NO: 1784264 - DNA, 15 bp, Homo sapiens
ggtagaaggatccta

SEQ ID NO: 1784265 - DNA, 15 bp, Homo sapiens
gtagaaggatcctag

SEQ ID NO: 1784266 - DNA, 15 bp, Homo sapiens
tagaaggatcctaga

SEQ ID NO: 1784267 - DNA, 15 bp, Homo sapiens
agaaggatcctagaa

SEQ ID NO: 1784268 - DNA, 15 bp, Homo sapiens
gaaggatcctagaat

SEQ ID NO: 1784269 - DNA, 15 bp, Homo sapiens
aaggatcctagaatt

SEQ ID NO: 1784270 - DNA, 15 bp, Homo sapiens
aggatcctagaatta

SEQ ID NO: 1784271 - DNA, 15 bp, Homo sapiens
ggatcctagaattaa

SEQ ID NO: 1784272 - DNA, 15 bp, Homo sapiens
gatcctagaattaag

SEQ ID NO: 1784273 - DNA, 15 bp, Homo sapiens
atcctagaattaagc

SEQ ID NO: 1784274 - DNA, 15 bp, Homo sapiens
tcctagaattaagct

SEQ ID NO: 1784275 - DNA, 15 bp, Homo sapiens
cctagaattaagctt

SEQ ID NO: 1784276 - DNA, 15 bp, Homo sapiens
ctagaattaagcttt

SEQ ID NO: 1784277 - DNA, 15 bp, Homo sapiens
tagaattaagctttg

SEQ ID NO: 1784278 - DNA, 15 bp, Homo sapiens
agaattaagctttgc

SEQ ID NO: 1784279 - DNA, 15 bp, Homo sapiens
gaattaagctttgct

SEQ ID NO: 1784280 - DNA, 15 bp, Homo sapiens
aattaagctttgctt

SEQ ID NO: 1784281 - DNA, 15 bp, Homo sapiens
attaagctttgcttg

SEQ ID NO: 1784282 - DNA, 15 bp, Homo sapiens
ttaagctttgcttga

SEQ ID NO: 1784283 - DNA, 15 bp, Homo sapiens
taagctttgcttgac

SEQ ID NO: 1784284 - DNA, 15 bp, Homo sapiens
aagctttgcttgaca

SEQ ID NO: 1784285 - DNA, 15 bp, Homo sapiens
agctttgcttgacac

SEQ ID NO: 1784286 - DNA, 15 bp, Homo sapiens
gctttgcttgacaca

SEQ ID NO: 1784287 - DNA, 15 bp, Homo sapiens
ctttgcttgacacag

SEQ ID NO: 1784288 - DNA, 15 bp, Homo sapiens
tttgcttgacacagt

SEQ ID NO: 1784289 - DNA, 15 bp, Homo sapiens
ttgcttgacacagtg

SEQ ID NO: 1784290 - DNA, 15 bp, Homo sapiens
tgcttgacacagtga

SEQ ID NO: 1784291 - DNA, 15 bp, Homo sapiens
gcttgacacagtgag

SEQ ID NO: 1784292 - DNA, 15 bp, Homo sapiens
cttgacacagtgaga

SEQ ID NO: 1784293 - DNA, 15 bp, Homo sapiens
ttgacacagtgagat

SEQ ID NO: 1784294 - DNA, 15 bp, Homo sapiens
tgacacagtgagatt

SEQ ID NO: 1784295 - DNA, 15 bp, Homo sapiens
gacacagtgagattt

SEQ ID NO: 1784296 - DNA, 15 bp, Homo sapiens
acacagtgagatttc

SEQ ID NO: 1784297 - DNA, 15 bp, Homo sapiens
cacagtgagatttct

SEQ ID NO: 1784298 - DNA, 15 bp, Homo sapiens
acagtgagatttctg

SEQ ID NO: 1784299 - DNA, 15 bp, Homo sapiens
cagtgagatttctgt

SEQ ID NO: 1784300 - DNA, 15 bp, Homo sapiens
agtgagatttctgtg

SEQ ID NO: 1784301 - DNA, 15 bp, Homo sapiens
gtgagatttctgtgc

SEQ ID NO: 1784302 - DNA, 15 bp, Homo sapiens
tgagatttctgtgct

SEQ ID NO: 1784303 - DNA, 15 bp, Homo sapiens
gagatttctgtgctg

SEQ ID NO: 1784304 - DNA, 15 bp, Homo sapiens
agatttctgtgctga

SEQ ID NO: 1784305 - DNA, 15 bp, Homo sapiens
gatttctgtgctgac

SEQ ID NO: 1784306 - DNA, 15 bp, Homo sapiens
atttctgtgctgacc

SEQ ID NO: 1784307 - DNA, 15 bp, Homo sapiens
tttctgtgctgacca

SEQ ID NO: 1784308 - DNA, 15 bp, Homo sapiens
ttctgtgctgaccag

SEQ ID NO: 1784309 - DNA, 15 bp, Homo sapiens
tctgtgctgaccagc

SEQ ID NO: 1784310 - DNA, 15 bp, Homo sapiens
ctgtgctgaccagcc

SEQ ID NO: 1784311 - DNA, 15 bp, Homo sapiens
tgtgctgaccagcca

SEQ ID NO: 1784312 - DNA, 15 bp, Homo sapiens
gtgctgaccagccag

SEQ ID NO: 1784313 - DNA, 15 bp, Homo sapiens
tgctgaccagccagg

SEQ ID NO: 1784314 - DNA, 15 bp, Homo sapiens
gctgaccagccaggg

SEQ ID NO: 1784315 - DNA, 15 bp, Homo sapiens
ctgaccagccagggt

SEQ ID NO: 1784316 - DNA, 15 bp, Homo sapiens
tgaccagccagggta

SEQ ID NO: 1784317 - DNA, 15 bp, Homo sapiens
gaccagccagggtag

SEQ ID NO: 1784318 - DNA, 15 bp, Homo sapiens
accagccagggtaga

SEQ ID NO: 1784319 - DNA, 15 bp, Homo sapiens
ccagccagggtagat

SEQ ID NO: 1784320 - DNA, 15 bp, Homo sapiens
cagccagggtagatt

SEQ ID NO: 1784321 - DNA, 15 bp, Homo sapiens
agccagggtagattc

SEQ ID NO: 1784322 - DNA, 15 bp, Homo sapiens
gccagggtagattcc

SEQ ID NO: 1784323 - DNA, 15 bp, Homo sapiens
ccagggtagattccc

SEQ ID NO: 1784324 - DNA, 15 bp, Homo sapiens
cagggtagattcccg

SEQ ID NO: 1784325 - DNA, 15 bp, Homo sapiens
agggtagattcccga

SEQ ID NO: 1784326 - DNA, 15 bp, Homo sapiens
gggtagattcccgag

SEQ ID NO: 1784327 - DNA, 15 bp, Homo sapiens
ggtagattcccgagc

SEQ ID NO: 1784328 - DNA, 15 bp, Homo sapiens
gtagattcccgagcc

SEQ ID NO: 1784329 - DNA, 15 bp, Homo sapiens
tagattcccgagcct

SEQ ID NO: 1784330 - DNA, 15 bp, Homo sapiens
agattcccgagcctc

SEQ ID NO: 1784331 - DNA, 15 bp, Homo sapiens
gattcccgagcctcc

SEQ ID NO: 1784332 - DNA, 15 bp, Homo sapiens
attcccgagcctcct

SEQ ID NO: 1784333 - DNA, 15 bp, Homo sapiens
ttcccgagcctcctt

SEQ ID NO: 1784334 - DNA, 15 bp, Homo sapiens
tcccgagcctccttc

SEQ ID NO: 1784335 - DNA, 15 bp, Homo sapiens
cccgagcctccttct

SEQ ID NO: 1784336 - DNA, 15 bp, Homo sapiens
ccgagcctccttctc

SEQ ID NO: 1784337 - DNA, 15 bp, Homo sapiens
cgagcctccttctca

SEQ ID NO: 1784338 - DNA, 15 bp, Homo sapiens
gagcctccttctcat

SEQ ID NO: 1784339 - DNA, 15 bp, Homo sapiens
agcctccttctcatc

SEQ ID NO: 1784340 - DNA, 15 bp, Homo sapiens
gcctccttctcatct

SEQ ID NO: 1784341 - DNA, 15 bp, Homo sapiens
cctccttctcatctc

SEQ ID NO: 1784342 - DNA, 15 bp, Homo sapiens
ctccttctcatctct

SEQ ID NO: 1784343 - DNA, 15 bp, Homo sapiens
tccttctcatctctg

SEQ ID NO: 1784344 - DNA, 15 bp, Homo sapiens
ccttctcatctctgt

SEQ ID NO: 1784345 - DNA, 15 bp, Homo sapiens
cttctcatctctgta

SEQ ID NO: 1784346 - DNA, 15 bp, Homo sapiens
ttctcatctctgtaa

SEQ ID NO: 1784347 - DNA, 15 bp, Homo sapiens
tctcatctctgtaac

SEQ ID NO: 1784348 - DNA, 15 bp, Homo sapiens
ctcatctctgtaaca

SEQ ID NO: 1784349 - DNA, 15 bp, Homo sapiens
tcatctctgtaacat

SEQ ID NO: 1784350 - DNA, 15 bp, Homo sapiens
catctctgtaacatc

SEQ ID NO: 1784351 - DNA, 15 bp, Homo sapiens
atctctgtaacatca

SEQ ID NO: 1784352 - DNA, 15 bp, Homo sapiens
tctctgtaacatcat

SEQ ID NO: 1784353 - DNA, 15 bp, Homo sapiens
ctctgtaacatcata

SEQ ID NO: 1784354 - DNA, 15 bp, Homo sapiens
tctgtaacatcataa

SEQ ID NO: 1784355 - DNA, 15 bp, Homo sapiens
ctgtaacatcataag

SEQ ID NO: 1784356 - DNA, 15 bp, Homo sapiens
tgtaacatcataagg

SEQ ID NO: 1784357 - DNA, 15 bp, Homo sapiens
gtaacatcataagga

SEQ ID NO: 1784358 - DNA, 15 bp, Homo sapiens
taacatcataaggag

SEQ ID NO: 1784359 - DNA, 15 bp, Homo sapiens
aacatcataaggagt

SEQ ID NO: 1784360 - DNA, 15 bp, Homo sapiens
acatcataaggagta

SEQ ID NO: 1784361 - DNA, 15 bp, Homo sapiens
catcataaggagtaa

SEQ ID NO: 1784362 - DNA, 15 bp, Homo sapiens
atcataaggagtaag

SEQ ID NO: 1784363 - DNA, 15 bp, Homo sapiens
tcataaggagtaagc

SEQ ID NO: 1784364 - DNA, 15 bp, Homo sapiens
cataaggagtaagct

SEQ ID NO: 1784365 - DNA, 15 bp, Homo sapiens
ataaggagtaagctt

SEQ ID NO: 1784366 - DNA, 15 bp, Homo sapiens
taaggagtaagcttg

SEQ ID NO: 1784367 - DNA, 15 bp, Homo sapiens
aaggagtaagcttgc

SEQ ID NO: 1784368 - DNA, 15 bp, Homo sapiens
aggagtaagcttgcc

SEQ ID NO: 1784369 - DNA, 15 bp, Homo sapiens
ggagtaagcttgccc

SEQ ID NO: 1784370 - DNA, 15 bp, Homo sapiens
gagtaagcttgcccc

SEQ ID NO: 1784371 - DNA, 15 bp, Homo sapiens
agtaagcttgcccct

SEQ ID NO: 1784372 - DNA, 15 bp, Homo sapiens
gtaagcttgcccctc

SEQ ID NO: 1784373 - DNA, 15 bp, Homo sapiens
taagcttgcccctcc

SEQ ID NO: 1784374 - DNA, 15 bp, Homo sapiens
aagcttgcccctcct

SEQ ID NO: 1784375 - DNA, 15 bp, Homo sapiens
agcttgcccctcctg

SEQ ID NO: 1784376 - DNA, 15 bp, Homo sapiens
gcttgcccctcctgg

SEQ ID NO: 1784377 - DNA, 15 bp, Homo sapiens
cttgcccctcctggc

SEQ ID NO: 1784378 - DNA, 15 bp, Homo sapiens
ttgcccctcctggct

SEQ ID NO: 1784379 - DNA, 15 bp, Homo sapiens
tgcccctcctggctt

SEQ ID NO: 1784380 - DNA, 15 bp, Homo sapiens
gcccctcctggcttg

SEQ ID NO: 1784381 - DNA, 15 bp, Homo sapiens
cccctcctggcttgg

SEQ ID NO: 1784382 - DNA, 15 bp, Homo sapiens
ccctcctggcttgga

SEQ ID NO: 1784383 - DNA, 15 bp, Homo sapiens
cctcctggcttggaa

SEQ ID NO: 1784384 - DNA, 15 bp, Homo sapiens
ctcctggcttggaag

SEQ ID NO: 1784385 - DNA, 15 bp, Homo sapiens
tcctggcttggaaga

SEQ ID NO: 1784386 - DNA, 15 bp, Homo sapiens
cctggcttggaagag

SEQ ID NO: 1784387 - DNA, 15 bp, Homo sapiens
ctggcttggaagaga

SEQ ID NO: 1784388 - DNA, 15 bp, Homo sapiens
tggcttggaagagat

SEQ ID NO: 1784389 - DNA, 15 bp, Homo sapiens
ggcttggaagagatg

SEQ ID NO: 1784390 - DNA, 15 bp, Homo sapiens
gcttggaagagatgg

SEQ ID NO: 1784391 - DNA, 15 bp, Homo sapiens
cttggaagagatgga

SEQ ID NO: 1784392 - DNA, 15 bp, Homo sapiens
ttggaagagatggac

SEQ ID NO: 1784393 - DNA, 15 bp, Homo sapiens
tggaagagatggaca

SEQ ID NO: 1784394 - DNA, 15 bp, Homo sapiens
ggaagagatggacag

SEQ ID NO: 1784395 - DNA, 15 bp, Homo sapiens
gaagagatggacaga

SEQ ID NO: 1784396 - DNA, 15 bp, Homo sapiens
aagagatggacagag

SEQ ID NO: 1784397 - DNA, 15 bp, Homo sapiens
agagatggacagaga

SEQ ID NO: 1784398 - DNA, 15 bp, Homo sapiens
gagatggacagagaa

SEQ ID NO: 1784399 - DNA, 15 bp, Homo sapiens
agatggacagagaag

SEQ ID NO: 1784400 - DNA, 15 bp, Homo sapiens
gatggacagagaaga

SEQ ID NO: 1784401 - DNA, 15 bp, Homo sapiens
atggacagagaagac

SEQ ID NO: 1784402 - DNA, 15 bp, Homo sapiens
tggacagagaagaca

SEQ ID NO: 1784403 - DNA, 15 bp, Homo sapiens
ggacagagaagacat

SEQ ID NO: 1784404 - DNA, 15 bp, Homo sapiens
gacagagaagacatt

SEQ ID NO: 1784405 - DNA, 15 bp, Homo sapiens
acagagaagacattt

SEQ ID NO: 1784406 - DNA, 15 bp, Homo sapiens
cagagaagacattta

SEQ ID NO: 1784407 - DNA, 15 bp, Homo sapiens
agagaagacatttac

SEQ ID NO: 1784408 - DNA, 15 bp, Homo sapiens
gagaagacatttact

SEQ ID NO: 1784409 - DNA, 15 bp, Homo sapiens
agaagacatttactt

SEQ ID NO: 1784410 - DNA, 15 bp, Homo sapiens
gaagacatttactta

SEQ ID NO: 1784411 - DNA, 15 bp, Homo sapiens
aagacatttacttaa

SEQ ID NO: 1784412 - DNA, 15 bp, Homo sapiens
agacatttacttaat

SEQ ID NO: 1784413 - DNA, 15 bp, Homo sapiens
gacatttacttaatt

SEQ ID NO: 1784414 - DNA, 15 bp, Homo sapiens
acatttacttaattt

SEQ ID NO: 1784415 - DNA, 15 bp, Homo sapiens
catttacttaatttg

SEQ ID NO: 1784416 - DNA, 15 bp, Homo sapiens
atttacttaatttgt

SEQ ID NO: 1784417 - DNA, 15 bp, Homo sapiens
tttacttaatttgtc

SEQ ID NO: 1784418 - DNA, 15 bp, Homo sapiens
ttacttaatttgtct

SEQ ID NO: 1784419 - DNA, 15 bp, Homo sapiens
tacttaatttgtctc

SEQ ID NO: 1784420 - DNA, 15 bp, Homo sapiens
acttaatttgtctca

SEQ ID NO: 1784421 - DNA, 15 bp, Homo sapiens
cttaatttgtctcag

SEQ ID NO: 1784422 - DNA, 15 bp, Homo sapiens
ttaatttgtctcaga

SEQ ID NO: 1784423 - DNA, 15 bp, Homo sapiens
taatttgtctcagag

SEQ ID NO: 1784424 - DNA, 15 bp, Homo sapiens
aatttgtctcagagg

SEQ ID NO: 1784425 - DNA, 15 bp, Homo sapiens
atttgtctcagaggt

SEQ ID NO: 1784426 - DNA, 15 bp, Homo sapiens
tttgtctcagaggtt

SEQ ID NO: 1784427 - DNA, 15 bp, Homo sapiens
ttgtctcagaggttt

SEQ ID NO: 1784428 - DNA, 15 bp, Homo sapiens
tgtctcagaggtttc

SEQ ID NO: 1784429 - DNA, 15 bp, Homo sapiens
gtctcagaggtttca

SEQ ID NO: 1784430 - DNA, 15 bp, Homo sapiens
tctcagaggtttcac

SEQ ID NO: 1784431 - DNA, 15 bp, Homo sapiens
ctcagaggtttcaca

SEQ ID NO: 1784432 - DNA, 15 bp, Homo sapiens
tcagaggtttcacac

SEQ ID NO: 1784433 - DNA, 15 bp, Homo sapiens
cagaggtttcacacc

SEQ ID NO: 1784434 - DNA, 15 bp, Homo sapiens
agaggtttcacaccc

SEQ ID NO: 1784435 - DNA, 15 bp, Homo sapiens
gaggtttcacacccc

SEQ ID NO: 1784436 - DNA, 15 bp, Homo sapiens
aggtttcacacccca

SEQ ID NO: 1784437 - DNA, 15 bp, Homo sapiens
ggtttcacaccccag

SEQ ID NO: 1784438 - DNA, 15 bp, Homo sapiens
gtttcacaccccagc

SEQ ID NO: 1784439 - DNA, 15 bp, Homo sapiens
tttcacaccccagca

SEQ ID NO: 1784440 - DNA, 15 bp, Homo sapiens
ttcacaccccagcag

SEQ ID NO: 1784441 - DNA, 15 bp, Homo sapiens
tcacaccccagcagg

SEQ ID NO: 1784442 - DNA, 15 bp, Homo sapiens
cacaccccagcagga

SEQ ID NO: 1784443 - DNA, 15 bp, Homo sapiens
acaccccagcaggaa

SEQ ID NO: 1784444 - DNA, 15 bp, Homo sapiens
caccccagcaggaat

SEQ ID NO: 1784445 - DNA, 15 bp, Homo sapiens
accccagcaggaatg

SEQ ID NO: 1784446 - DNA, 15 bp, Homo sapiens
ccccagcaggaatgc

SEQ ID NO: 1784447 - DNA, 15 bp, Homo sapiens
cccagcaggaatgct

SEQ ID NO: 1784448 - DNA, 15 bp, Homo sapiens
ccagcaggaatgctc

SEQ ID NO: 1784449 - DNA, 15 bp, Homo sapiens
cagcaggaatgctct

SEQ ID NO: 1784450 - DNA, 15 bp, Homo sapiens
agcaggaatgctctc

SEQ ID NO: 1784451 - DNA, 15 bp, Homo sapiens
gcaggaatgctctcc

SEQ ID NO: 1784452 - DNA, 15 bp, Homo sapiens
caggaatgctctccc

SEQ ID NO: 1784453 - DNA, 15 bp, Homo sapiens
aggaatgctctccca

SEQ ID NO: 1784454 - DNA, 15 bp, Homo sapiens
ggaatgctctcccac

SEQ ID NO: 1784455 - DNA, 15 bp, Homo sapiens
gaatgctctcccaca

SEQ ID NO: 1784456 - DNA, 15 bp, Homo sapiens
aatgctctcccacat

SEQ ID NO: 1784457 - DNA, 15 bp, Homo sapiens
atgctctcccacatt

SEQ ID NO: 1784458 - DNA, 15 bp, Homo sapiens
tgctctcccacattt

SEQ ID NO: 1784459 - DNA, 15 bp, Homo sapiens
gctctcccacatttt

SEQ ID NO: 1784460 - DNA, 15 bp, Homo sapiens
ctctcccacattttg

SEQ ID NO: 1784461 - DNA, 15 bp, Homo sapiens
tctcccacattttgg

SEQ ID NO: 1784462 - DNA, 15 bp, Homo sapiens
ctcccacattttgga

SEQ ID NO: 1784463 - DNA, 15 bp, Homo sapiens
tcccacattttggaa

SEQ ID NO: 1784464 - DNA, 15 bp, Homo sapiens
cccacattttggaaa

SEQ ID NO: 1784465 - DNA, 15 bp, Homo sapiens
ccacattttggaaac

SEQ ID NO: 1784466 - DNA, 15 bp, Homo sapiens
cacattttggaaaca

SEQ ID NO: 1784467 - DNA, 15 bp, Homo sapiens
acattttggaaacaa

SEQ ID NO: 1784468 - DNA, 15 bp, Homo sapiens
cattttggaaacaaa

SEQ ID NO: 1784469 - DNA, 15 bp, Homo sapiens
attttggaaacaaat

SEQ ID NO: 1784470 - DNA, 15 bp, Homo sapiens
ttttggaaacaaatt

SEQ ID NO: 1784471 - DNA, 15 bp, Homo sapiens
tttggaaacaaattt

SEQ ID NO: 1784472 - DNA, 15 bp, Homo sapiens
ttggaaacaaatttt

SEQ ID NO: 1784473 - DNA, 15 bp, Homo sapiens
tggaaacaaattttg

SEQ ID NO: 1784474 - DNA, 15 bp, Homo sapiens
ggaaacaaattttgg

SEQ ID NO: 1784475 - DNA, 15 bp, Homo sapiens
gaaacaaattttgga

SEQ ID NO: 1784476 - DNA, 15 bp, Homo sapiens
aaacaaattttggaa

SEQ ID NO: 1784477 - DNA, 15 bp, Homo sapiens
aacaaattttggaaa

SEQ ID NO: 1784478 - DNA, 15 bp, Homo sapiens
acaaattttggaaat

SEQ ID NO: 1784479 - DNA, 15 bp, Homo sapiens
caaattttggaaatg

SEQ ID NO: 1784480 - DNA, 15 bp, Homo sapiens
aaattttggaaatgg

SEQ ID NO: 1784481 - DNA, 15 bp, Homo sapiens
aattttggaaatgga

SEQ ID NO: 1784482 - DNA, 15 bp, Homo sapiens
attttggaaatggaa

SEQ ID NO: 1784483 - DNA, 15 bp, Homo sapiens
ttttggaaatggaat

SEQ ID NO: 1784484 - DNA, 15 bp, Homo sapiens
tttggaaatggaatt

SEQ ID NO: 1784485 - DNA, 15 bp, Homo sapiens
ttggaaatggaattc

SEQ ID NO: 1784486 - DNA, 15 bp, Homo sapiens
tggaaatggaattca

SEQ ID NO: 1784487 - DNA, 15 bp, Homo sapiens
ggaaatggaattcag

SEQ ID NO: 1784488 - DNA, 15 bp, Homo sapiens
gaaatggaattcaga

SEQ ID NO: 1784489 - DNA, 15 bp, Homo sapiens
aaatggaattcagag

SEQ ID NO: 1784490 - DNA, 15 bp, Homo sapiens
aatggaattcagagt

SEQ ID NO: 1784491 - DNA, 15 bp, Homo sapiens
atggaattcagagtc

SEQ ID NO: 1784492 - DNA, 15 bp, Homo sapiens
tggaattcagagtcc

SEQ ID NO: 1784493 - DNA, 15 bp, Homo sapiens
ggaattcagagtccc

SEQ ID NO: 1784494 - DNA, 15 bp, Homo sapiens
gaattcagagtccct

SEQ ID NO: 1784495 - DNA, 15 bp, Homo sapiens
aattcagagtccctg

SEQ ID NO: 1784496 - DNA, 15 bp, Homo sapiens
attcagagtccctgg

SEQ ID NO: 1784497 - DNA, 15 bp, Homo sapiens
ttcagagtccctgga

SEQ ID NO: 1784498 - DNA, 15 bp, Homo sapiens
tcagagtccctggaa

SEQ ID NO: 1784499 - DNA, 15 bp, Homo sapiens
cagagtccctggaag

SEQ ID NO: 1784500 - DNA, 15 bp, Homo sapiens
agagtccctggaagg

SEQ ID NO: 1784501 - DNA, 15 bp, Homo sapiens
gagtccctggaagga

SEQ ID NO: 1784502 - DNA, 15 bp, Homo sapiens
agtccctggaaggac

SEQ ID NO: 1784503 - DNA, 15 bp, Homo sapiens
gtccctggaaggact

SEQ ID NO: 1784504 - DNA, 15 bp, Homo sapiens
tccctggaaggacta

SEQ ID NO: 1784505 - DNA, 15 bp, Homo sapiens
ccctggaaggactat

SEQ ID NO: 1784506 - DNA, 15 bp, Homo sapiens
cctggaaggactatt

SEQ ID NO: 1784507 - DNA, 15 bp, Homo sapiens
ctggaaggactattg

SEQ ID NO: 1784508 - DNA, 15 bp, Homo sapiens
tggaaggactattgg

SEQ ID NO: 1784509 - DNA, 15 bp, Homo sapiens
ggaaggactattggg

SEQ ID NO: 1784510 - DNA, 15 bp, Homo sapiens
gaaggactattggga

SEQ ID NO: 1784511 - DNA, 15 bp, Homo sapiens
aaggactattgggat

SEQ ID NO: 1784512 - DNA, 15 bp, Homo sapiens
aggactattgggatg

SEQ ID NO: 1784513 - DNA, 15 bp, Homo sapiens
ggactattgggatga

SEQ ID NO: 1784514 - DNA, 15 bp, Homo sapiens
gactattgggatgag

SEQ ID NO: 1784515 - DNA, 15 bp, Homo sapiens
actattgggatgagc

SEQ ID NO: 1784516 - DNA, 15 bp, Homo sapiens
ctattgggatgagca

SEQ ID NO: 1784517 - DNA, 15 bp, Homo sapiens
tattgggatgagcaa

SEQ ID NO: 1784518 - DNA, 15 bp, Homo sapiens
attgggatgagcaag

SEQ ID NO: 1784519 - DNA, 15 bp, Homo sapiens
ttgggatgagcaagt

SEQ ID NO: 1784520 - DNA, 15 bp, Homo sapiens
tgggatgagcaagtc

SEQ ID NO: 1784521 - DNA, 15 bp, Homo sapiens
gggatgagcaagtcc

SEQ ID NO: 1784522 - DNA, 15 bp, Homo sapiens
ggatgagcaagtcca

SEQ ID NO: 1784523 - DNA, 15 bp, Homo sapiens
gatgagcaagtccaa

SEQ ID NO: 1784524 - DNA, 15 bp, Homo sapiens
atgagcaagtccaac

SEQ ID NO: 1784525 - DNA, 15 bp, Homo sapiens
tgagcaagtccaacc

SEQ ID NO: 1784526 - DNA, 15 bp, Homo sapiens
gagcaagtccaaccc

SEQ ID NO: 1784527 - DNA, 15 bp, Homo sapiens
agcaagtccaaccct

SEQ ID NO: 1784528 - DNA, 15 bp, Homo sapiens
gcaagtccaaccctc

SEQ ID NO: 1784529 - DNA, 15 bp, Homo sapiens
caagtccaaccctcc

SEQ ID NO: 1784530 - DNA, 15 bp, Homo sapiens
aagtccaaccctcca

SEQ ID NO: 1784531 - DNA, 15 bp, Homo sapiens
agtccaaccctccat

SEQ ID NO: 1784532 - DNA, 15 bp, Homo sapiens
gtccaaccctccatg

SEQ ID NO: 1784533 - DNA, 15 bp, Homo sapiens
tccaaccctccatgc

SEQ ID NO: 1784534 - DNA, 15 bp, Homo sapiens
ccaaccctccatgct

SEQ ID NO: 1784535 - DNA, 15 bp, Homo sapiens
caaccctccatgctc

SEQ ID NO: 1784536 - DNA, 15 bp, Homo sapiens
aaccctccatgctct

SEQ ID NO: 1784537 - DNA, 15 bp, Homo sapiens
accctccatgctctg

SEQ ID NO: 1784538 - DNA, 15 bp, Homo sapiens
ccctccatgctctgt

SEQ ID NO: 1784539 - DNA, 15 bp, Homo sapiens
cctccatgctctgtg

SEQ ID NO: 1784540 - DNA, 15 bp, Homo sapiens
ctccatgctctgtgc

SEQ ID NO: 1784541 - DNA, 15 bp, Homo sapiens
tccatgctctgtgct

SEQ ID NO: 1784542 - DNA, 15 bp, Homo sapiens
ccatgctctgtgctt

SEQ ID NO: 1784543 - DNA, 15 bp, Homo sapiens
catgctctgtgcttt

SEQ ID NO: 1784544 - DNA, 15 bp, Homo sapiens
atgctctgtgctttc

SEQ ID NO: 1784545 - DNA, 15 bp, Homo sapiens
tgctctgtgctttca

SEQ ID NO: 1784546 - DNA, 15 bp, Homo sapiens
gctctgtgctttcac

SEQ ID NO: 1784547 - DNA, 15 bp, Homo sapiens
ctctgtgctttcacg

SEQ ID NO: 1784548 - DNA, 15 bp, Homo sapiens
tctgtgctttcacgt

SEQ ID NO: 1784549 - DNA, 15 bp, Homo sapiens
ctgtgctttcacgta

SEQ ID NO: 1784550 - DNA, 15 bp, Homo sapiens
tgtgctttcacgtaa

SEQ ID NO: 1784551 - DNA, 15 bp, Homo sapiens
gtgctttcacgtaat

SEQ ID NO: 1784552 - DNA, 15 bp, Homo sapiens
tgctttcacgtaatc

SEQ ID NO: 1784553 - DNA, 15 bp, Homo sapiens
gctttcacgtaatct

SEQ ID NO: 1784554 - DNA, 15 bp, Homo sapiens
ctttcacgtaatctg

SEQ ID NO: 1784555 - DNA, 15 bp, Homo sapiens
tttcacgtaatctga

SEQ ID NO: 1784556 - DNA, 15 bp, Homo sapiens
ttcacgtaatctgat

SEQ ID NO: 1784557 - DNA, 15 bp, Homo sapiens
tcacgtaatctgatg

SEQ ID NO: 1784558 - DNA, 15 bp, Homo sapiens
cacgtaatctgatgt

SEQ ID NO: 1784559 - DNA, 15 bp, Homo sapiens
acgtaatctgatgta

SEQ ID NO: 1784560 - DNA, 15 bp, Homo sapiens
cgtaatctgatgtat

SEQ ID NO: 1784561 - DNA, 15 bp, Homo sapiens
gtaatctgatgtatt

SEQ ID NO: 1784562 - DNA, 15 bp, Homo sapiens
taatctgatgtattc

SEQ ID NO: 1784563 - DNA, 15 bp, Homo sapiens
aatctgatgtattct

SEQ ID NO: 1784564 - DNA, 15 bp, Homo sapiens
atctgatgtattctt

SEQ ID NO: 1784565 - DNA, 15 bp, Homo sapiens
tctgatgtattcttc

SEQ ID NO: 1784566 - DNA, 15 bp, Homo sapiens
ctgatgtattcttca

SEQ ID NO: 1784567 - DNA, 15 bp, Homo sapiens
tgatgtattcttcac

SEQ ID NO: 1784568 - DNA, 15 bp, Homo sapiens
gatgtattcttcaca

SEQ ID NO: 1784569 - DNA, 15 bp, Homo sapiens
atgtattcttcacat

SEQ ID NO: 1784570 - DNA, 15 bp, Homo sapiens
tgtattcttcacatc

SEQ ID NO: 1784571 - DNA, 15 bp, Homo sapiens
gtattcttcacatca

SEQ ID NO: 1784572 - DNA, 15 bp, Homo sapiens
tattcttcacatcaa

SEQ ID NO: 1784573 - DNA, 15 bp, Homo sapiens
attcttcacatcaaa

SEQ ID NO: 1784574 - DNA, 15 bp, Homo sapiens
ttcttcacatcaaac

SEQ ID NO: 1784575 - DNA, 15 bp, Homo sapiens
tcttcacatcaaacc

SEQ ID NO: 1784576 - DNA, 15 bp, Homo sapiens
cttcacatcaaaccc

SEQ ID NO: 1784577 - DNA, 15 bp, Homo sapiens
ttcacatcaaaccca

SEQ ID NO: 1784578 - DNA, 15 bp, Homo sapiens
tcacatcaaacccag

SEQ ID NO: 1784579 - DNA, 15 bp, Homo sapiens
cacatcaaacccagg

SEQ ID NO: 1784580 - DNA, 15 bp, Homo sapiens
acatcaaacccagga

SEQ ID NO: 1784581 - DNA, 15 bp, Homo sapiens
catcaaacccaggag

SEQ ID NO: 1784582 - DNA, 15 bp, Homo sapiens
atcaaacccaggaga

SEQ ID NO: 1784583 - DNA, 15 bp, Homo sapiens
tcaaacccaggagaa

SEQ ID NO: 1784584 - DNA, 15 bp, Homo sapiens
caaacccaggagaaa

SEQ ID NO: 1784585 - DNA, 15 bp, Homo sapiens
aaacccaggagaaat

SEQ ID NO: 1784586 - DNA, 15 bp, Homo sapiens
aacccaggagaaatg

SEQ ID NO: 1784587 - DNA, 15 bp, Homo sapiens
acccaggagaaatgc

SEQ ID NO: 1784588 - DNA, 15 bp, Homo sapiens
cccaggagaaatgca

SEQ ID NO: 1784589 - DNA, 15 bp, Homo sapiens
ccaggagaaatgcat

SEQ ID NO: 1784590 - DNA, 15 bp, Homo sapiens
caggagaaatgcatt

SEQ ID NO: 1784591 - DNA, 15 bp, Homo sapiens
aggagaaatgcattc

SEQ ID NO: 1784592 - DNA, 15 bp, Homo sapiens
ggagaaatgcattct

SEQ ID NO: 1784593 - DNA, 15 bp, Homo sapiens
gagaaatgcattctt

SEQ ID NO: 1784594 - DNA, 15 bp, Homo sapiens
agaaatgcattctta

SEQ ID NO: 1784595 - DNA, 15 bp, Homo sapiens
gaaatgcattcttat

SEQ ID NO: 1784596 - DNA, 15 bp, Homo sapiens
aaatgcattcttatt

SEQ ID NO: 1784597 - DNA, 15 bp, Homo sapiens
aatgcattcttattg

SEQ ID NO: 1784598 - DNA, 15 bp, Homo sapiens
atgcattcttattgt

SEQ ID NO: 1784599 - DNA, 15 bp, Homo sapiens
tgcattcttattgta

SEQ ID NO: 1784600 - DNA, 15 bp, Homo sapiens
gcattcttattgtat

SEQ ID NO: 1784601 - DNA, 15 bp, Homo sapiens
cattcttattgtatt

SEQ ID NO: 1784602 - DNA, 15 bp, Homo sapiens
attcttattgtattt

SEQ ID NO: 1784603 - DNA, 15 bp, Homo sapiens
ttcttattgtatttt

SEQ ID NO: 1784604 - DNA, 15 bp, Homo sapiens
tcttattgtattttt

SEQ ID NO: 1784605 - DNA, 15 bp, Homo sapiens
cttattgtatttttt

SEQ ID NO: 1784606 - DNA, 15 bp, Homo sapiens
ttattgtatttttta

SEQ ID NO: 1784607 - DNA, 15 bp, Homo sapiens
tattgtattttttat

SEQ ID NO: 1784608 - DNA, 15 bp, Homo sapiens
attgtattttttata

SEQ ID NO: 1784609 - DNA, 15 bp, Homo sapiens
ttgtattttttatag

SEQ ID NO: 1784610 - DNA, 15 bp, Homo sapiens
tgtattttttataga

SEQ ID NO: 1784611 - DNA, 15 bp, Homo sapiens
gtattttttatagag

SEQ ID NO: 1784612 - DNA, 15 bp, Homo sapiens
tattttttatagagg

SEQ ID NO: 1784613 - DNA, 15 bp, Homo sapiens
attttttatagagga

SEQ ID NO: 1784614 - DNA, 15 bp, Homo sapiens
ttttttatagaggag

SEQ ID NO: 1784615 - DNA, 15 bp, Homo sapiens
tttttatagaggaga

SEQ ID NO: 1784616 - DNA, 15 bp, Homo sapiens
ttttatagaggagaa

SEQ ID NO: 1784617 - DNA, 15 bp, Homo sapiens
tttatagaggagaaa

SEQ ID NO: 1784618 - DNA, 15 bp, Homo sapiens
ttatagaggagaaaa

SEQ ID NO: 1784619 - DNA, 15 bp, Homo sapiens
tatagaggagaaaac

SEQ ID NO: 1784620 - DNA, 15 bp, Homo sapiens
atagaggagaaaaca

SEQ ID NO: 1784621 - DNA, 15 bp, Homo sapiens
tagaggagaaaacaa

SEQ ID NO: 1784622 - DNA, 15 bp, Homo sapiens
agaggagaaaacaaa

SEQ ID NO: 1784623 - DNA, 15 bp, Homo sapiens
gaggagaaaacaaag

SEQ ID NO: 1784624 - DNA, 15 bp, Homo sapiens
aggagaaaacaaagt

SEQ ID NO: 1784625 - DNA, 15 bp, Homo sapiens
ggagaaaacaaagtt

SEQ ID NO: 1784626 - DNA, 15 bp, Homo sapiens
gagaaaacaaagttc

SEQ ID NO: 1784627 - DNA, 15 bp, Homo sapiens
agaaaacaaagttcc

SEQ ID NO: 1784628 - DNA, 15 bp, Homo sapiens
gaaaacaaagttcca

SEQ ID NO: 1784629 - DNA, 15 bp, Homo sapiens
aaaacaaagttccat

SEQ ID NO: 1784630 - DNA, 15 bp, Homo sapiens
aaacaaagttccata

SEQ ID NO: 1784631 - DNA, 15 bp, Homo sapiens
aacaaagttccataa

SEQ ID NO: 1784632 - DNA, 15 bp, Homo sapiens
acaaagttccataac

SEQ ID NO: 1784633 - DNA, 15 bp, Homo sapiens
caaagttccataact

SEQ ID NO: 1784634 - DNA, 15 bp, Homo sapiens
aaagttccataactt

SEQ ID NO: 1784635 - DNA, 15 bp, Homo sapiens
aagttccataacttg

SEQ ID NO: 1784636 - DNA, 15 bp, Homo sapiens
agttccataacttgc

SEQ ID NO: 1784637 - DNA, 15 bp, Homo sapiens
gttccataacttgcc

SEQ ID NO: 1784638 - DNA, 15 bp, Homo sapiens
ttccataacttgccc

SEQ ID NO: 1784639 - DNA, 15 bp, Homo sapiens
tccataacttgccca

SEQ ID NO: 1784640 - DNA, 15 bp, Homo sapiens
ccataacttgcccaa

SEQ ID NO: 1784641 - DNA, 15 bp, Homo sapiens
cataacttgcccaag

SEQ ID NO: 1784642 - DNA, 15 bp, Homo sapiens
ataacttgcccaaga

SEQ ID NO: 1784643 - DNA, 15 bp, Homo sapiens
aacttgcccaagata

SEQ ID NO: 1784644 - DNA, 15 bp, Homo sapiens
acttgcccaagataa

SEQ ID NO: 1784645 - DNA, 15 bp, Homo sapiens
cttgcccaagataat

SEQ ID NO: 1784646 - DNA, 15 bp, Homo sapiens
ttgcccaagataatg

SEQ ID NO: 1784647 - DNA, 15 bp, Homo sapiens
tgcccaagataatgc

SEQ ID NO: 1784648 - DNA, 15 bp, Homo sapiens
gcccaagataatgcc

SEQ ID NO: 1784649 - DNA, 15 bp, Homo sapiens
cccaagataatgcca

SEQ ID NO: 1784650 - DNA, 15 bp, Homo sapiens
ccaagataatgccat

SEQ ID NO: 1784651 - DNA, 15 bp, Homo sapiens
caagataatgccatt

SEQ ID NO: 1784652 - DNA, 15 bp, Homo sapiens
aagataatgccatta

SEQ ID NO: 1784653 - DNA, 15 bp, Homo sapiens
agataatgccattag

SEQ ID NO: 1784654 - DNA, 15 bp, Homo sapiens
gataatgccattagc

SEQ ID NO: 1784655 - DNA, 15 bp, Homo sapiens
ataatgccattagca

SEQ ID NO: 1784656 - DNA, 15 bp, Homo sapiens
taatgccattagcaa

SEQ ID NO: 1784657 - DNA, 15 bp, Homo sapiens
aatgccattagcaaa

SEQ ID NO: 1784658 - DNA, 15 bp, Homo sapiens
atgccattagcaaat

SEQ ID NO: 1784659 - DNA, 15 bp, Homo sapiens
tgccattagcaaatg

SEQ ID NO: 1784660 - DNA, 15 bp, Homo sapiens
gccattagcaaatgg

SEQ ID NO: 1784661 - DNA, 15 bp, Homo sapiens
ccattagcaaatggc

SEQ ID NO: 1784662 - DNA, 15 bp, Homo sapiens
cattagcaaatggca

SEQ ID NO: 1784663 - DNA, 15 bp, Homo sapiens
attagcaaatggcag

SEQ ID NO: 1784664 - DNA, 15 bp, Homo sapiens
ttagcaaatggcagg

SEQ ID NO: 1784665 - DNA, 15 bp, Homo sapiens
tagcaaatggcaggg

SEQ ID NO: 1784666 - DNA, 15 bp, Homo sapiens
agcaaatggcagggc

SEQ ID NO: 1784667 - DNA, 15 bp, Homo sapiens
gcaaatggcagggcc

SEQ ID NO: 1784668 - DNA, 15 bp, Homo sapiens
caaatggcagggcca

SEQ ID NO: 1784669 - DNA, 15 bp, Homo sapiens
aaatggcagggccag

SEQ ID NO: 1784670 - DNA, 15 bp, Homo sapiens
aatggcagggccagg

SEQ ID NO: 1784671 - DNA, 15 bp, Homo sapiens
atggcagggccagga

SEQ ID NO: 1784672 - DNA, 15 bp, Homo sapiens
tggcagggccaggat

SEQ ID NO: 1784673 - DNA, 15 bp, Homo sapiens
ggcagggccaggatt

SEQ ID NO: 1784674 - DNA, 15 bp, Homo sapiens
gcagggccaggattg

SEQ ID NO: 1784675 - DNA, 15 bp, Homo sapiens
cagggccaggattga

SEQ ID NO: 1784676 - DNA, 15 bp, Homo sapiens
agggccaggattgag

SEQ ID NO: 1784677 - DNA, 15 bp, Homo sapiens
gggccaggattgaga

SEQ ID NO: 1784678 - DNA, 15 bp, Homo sapiens
ggccaggattgagag

SEQ ID NO: 1784679 - DNA, 15 bp, Homo sapiens
gccaggattgagagg

SEQ ID NO: 1784680 - DNA, 15 bp, Homo sapiens
ccaggattgagagga

SEQ ID NO: 1784681 - DNA, 15 bp, Homo sapiens
caggattgagaggac

SEQ ID NO: 1784682 - DNA, 15 bp, Homo sapiens
aggattgagaggact

SEQ ID NO: 1784683 - DNA, 15 bp, Homo sapiens
ggattgagaggactc

SEQ ID NO: 1784684 - DNA, 15 bp, Homo sapiens
gattgagaggactct

SEQ ID NO: 1784685 - DNA, 15 bp, Homo sapiens
attgagaggactctc

SEQ ID NO: 1784686 - DNA, 15 bp, Homo sapiens
ttgagaggactctct

SEQ ID NO: 1784687 - DNA, 15 bp, Homo sapiens
tgagaggactctctg

SEQ ID NO: 1784688 - DNA, 15 bp, Homo sapiens
gagaggactctctgg

SEQ ID NO: 1784689 - DNA, 15 bp, Homo sapiens
agaggactctctggg

SEQ ID NO: 1784690 - DNA, 15 bp, Homo sapiens
gaggactctctgggc

SEQ ID NO: 1784691 - DNA, 15 bp, Homo sapiens
aggactctctgggct

SEQ ID NO: 1784692 - DNA, 15 bp, Homo sapiens
ggactctctgggctc

SEQ ID NO: 1784693 - DNA, 15 bp, Homo sapiens
gactctctgggctct

SEQ ID NO: 1784694 - DNA, 15 bp, Homo sapiens
actctctgggctctc

SEQ ID NO: 1784695 - DNA, 15 bp, Homo sapiens
ctctctgggctctct

SEQ ID NO: 1784696 - DNA, 15 bp, Homo sapiens
tctctgggctctctg

SEQ ID NO: 1784697 - DNA, 15 bp, Homo sapiens
ctctgggctctctga

SEQ ID NO: 1784698 - DNA, 15 bp, Homo sapiens
tctgggctctctgaa

SEQ ID NO: 1784699 - DNA, 15 bp, Homo sapiens
ctgggctctctgaag

SEQ ID NO: 1784700 - DNA, 15 bp, Homo sapiens
tgggctctctgaagt

SEQ ID NO: 1784701 - DNA, 15 bp, Homo sapiens
gggctctctgaagtg

SEQ ID NO: 1784702 - DNA, 15 bp, Homo sapiens
ggctctctgaagtgg

SEQ ID NO: 1784703 - DNA, 15 bp, Homo sapiens
gctctctgaagtggt

SEQ ID NO: 1784704 - DNA, 15 bp, Homo sapiens
ctctctgaagtggtc

SEQ ID NO: 1784705 - DNA, 15 bp, Homo sapiens
tctctgaagtggtcc

SEQ ID NO: 1784706 - DNA, 15 bp, Homo sapiens
ctctgaagtggtcca

SEQ ID NO: 1784707 - DNA, 15 bp, Homo sapiens
tctgaagtggtccag

SEQ ID NO: 1784708 - DNA, 15 bp, Homo sapiens
ctgaagtggtccagg

SEQ ID NO: 1784709 - DNA, 15 bp, Homo sapiens
tgaagtggtccagga

SEQ ID NO: 1784710 - DNA, 15 bp, Homo sapiens
aagtggtccaggaag

SEQ ID NO: 1784711 - DNA, 15 bp, Homo sapiens
agtggtccaggaagc

SEQ ID NO: 1784712 - DNA, 15 bp, Homo sapiens
gtggtccaggaagcc

SEQ ID NO: 1784713 - DNA, 15 bp, Homo sapiens
tggtccaggaagcct

SEQ ID NO: 1784714 - DNA, 15 bp, Homo sapiens
ggtccaggaagcctg

SEQ ID NO: 1784715 - DNA, 15 bp, Homo sapiens
gtccaggaagcctga

SEQ ID NO: 1784716 - DNA, 15 bp, Homo sapiens
tccaggaagcctgag

SEQ ID NO: 1784717 - DNA, 15 bp, Homo sapiens
ccaggaagcctgagc

SEQ ID NO: 1784718 - DNA, 15 bp, Homo sapiens
caggaagcctgagcc

SEQ ID NO: 1784719 - DNA, 15 bp, Homo sapiens
aggaagcctgagcct

SEQ ID NO: 1784720 - DNA, 15 bp, Homo sapiens
ggaagcctgagcctt

SEQ ID NO: 1784721 - DNA, 15 bp, Homo sapiens
gaagcctgagcctta

SEQ ID NO: 1784722 - DNA, 15 bp, Homo sapiens
aagcctgagccttag

SEQ ID NO: 1784723 - DNA, 15 bp, Homo sapiens
agcctgagccttagc

SEQ ID NO: 1784724 - DNA, 15 bp, Homo sapiens
gcctgagccttagcc

SEQ ID NO: 1784725 - DNA, 15 bp, Homo sapiens
cctgagccttagcca

SEQ ID NO: 1784726 - DNA, 15 bp, Homo sapiens
ctgagccttagccaa

SEQ ID NO: 1784727 - DNA, 15 bp, Homo sapiens
tgagccttagccaac

SEQ ID NO: 1784728 - DNA, 15 bp, Homo sapiens
gagccttagccaaca

SEQ ID NO: 1784729 - DNA, 15 bp, Homo sapiens
agccttagccaacag

SEQ ID NO: 1784730 - DNA, 15 bp, Homo sapiens
gccttagccaacagc

SEQ ID NO: 1784731 - DNA, 15 bp, Homo sapiens
ccttagccaacagcc

SEQ ID NO: 1784732 - DNA, 15 bp, Homo sapiens
cttagccaacagccc

SEQ ID NO: 1784733 - DNA, 15 bp, Homo sapiens
ttagccaacagcccc

SEQ ID NO: 1784734 - DNA, 15 bp, Homo sapiens
tagccaacagccccg

SEQ ID NO: 1784735 - DNA, 15 bp, Homo sapiens
agccaacagccccgc

SEQ ID NO: 1784736 - DNA, 15 bp, Homo sapiens
gccaacagccccgca

SEQ ID NO: 1784737 - DNA, 15 bp, Homo sapiens
ccaacagccccgcag

SEQ ID NO: 1784738 - DNA, 15 bp, Homo sapiens
caacagccccgcaga

SEQ ID NO: 1784739 - DNA, 15 bp, Homo sapiens
aacagccccgcagac

SEQ ID NO: 1784740 - DNA, 15 bp, Homo sapiens
acagccccgcagaca

SEQ ID NO: 1784741 - DNA, 15 bp, Homo sapiens
cagccccgcagacat

SEQ ID NO: 1784742 - DNA, 15 bp, Homo sapiens
agccccgcagacata

SEQ ID NO: 1784743 - DNA, 15 bp, Homo sapiens
gccccgcagacatag

SEQ ID NO: 1784744 - DNA, 15 bp, Homo sapiens
ccccgcagacatagc

SEQ ID NO: 1784745 - DNA, 15 bp, Homo sapiens
cccgcagacatagcc

SEQ ID NO: 1784746 - DNA, 15 bp, Homo sapiens
ccgcagacatagcct

SEQ ID NO: 1784747 - DNA, 15 bp, Homo sapiens
cgcagacatagcctg

SEQ ID NO: 1784748 - DNA, 15 bp, Homo sapiens
gcagacatagcctgc

SEQ ID NO: 1784749 - DNA, 15 bp, Homo sapiens
cagacatagcctgct

SEQ ID NO: 1784750 - DNA, 15 bp, Homo sapiens
agacatagcctgctc

SEQ ID NO: 1784751 - DNA, 15 bp, Homo sapiens
gacatagcctgctca

SEQ ID NO: 1784752 - DNA, 15 bp, Homo sapiens
acatagcctgctcac

SEQ ID NO: 1784753 - DNA, 15 bp, Homo sapiens
catagcctgctcaca

SEQ ID NO: 1784754 - DNA, 15 bp, Homo sapiens
atagcctgctcacat

SEQ ID NO: 1784755 - DNA, 15 bp, Homo sapiens
tagcctgctcacatt

SEQ ID NO: 1784756 - DNA, 15 bp, Homo sapiens
agcctgctcacattg

SEQ ID NO: 1784757 - DNA, 15 bp, Homo sapiens
gcctgctcacattgg

SEQ ID NO: 1784758 - DNA, 15 bp, Homo sapiens
cctgctcacattggc

SEQ ID NO: 1784759 - DNA, 15 bp, Homo sapiens
ctgctcacattggcc

SEQ ID NO: 1784760 - DNA, 15 bp, Homo sapiens
tgctcacattggcct

SEQ ID NO: 1784761 - DNA, 15 bp, Homo sapiens
gctcacattggcctt

SEQ ID NO: 1784762 - DNA, 15 bp, Homo sapiens
ctcacattggccttg

SEQ ID NO: 1784763 - DNA, 15 bp, Homo sapiens
tcacattggccttgc

SEQ ID NO: 1784764 - DNA, 15 bp, Homo sapiens
cacattggccttgct

SEQ ID NO: 1784765 - DNA, 15 bp, Homo sapiens
acattggccttgctt

SEQ ID NO: 1784766 - DNA, 15 bp, Homo sapiens
cattggccttgcttt

SEQ ID NO: 1784767 - DNA, 15 bp, Homo sapiens
attggccttgcttta

SEQ ID NO: 1784768 - DNA, 15 bp, Homo sapiens
ttggccttgctttat

SEQ ID NO: 1784769 - DNA, 15 bp, Homo sapiens
tggccttgctttatt

SEQ ID NO: 1784770 - DNA, 15 bp, Homo sapiens
ggccttgctttattt

SEQ ID NO: 1784771 - DNA, 15 bp, Homo sapiens
gccttgctttatttc

SEQ ID NO: 1784772 - DNA, 15 bp, Homo sapiens
ccttgctttatttcc

SEQ ID NO: 1784773 - DNA, 15 bp, Homo sapiens
cttgctttatttcca

SEQ ID NO: 1784774 - DNA, 15 bp, Homo sapiens
ttgctttatttccag

SEQ ID NO: 1784775 - DNA, 15 bp, Homo sapiens
tgctttatttccagg

SEQ ID NO: 1784776 - DNA, 15 bp, Homo sapiens
gctttatttccaggt

SEQ ID NO: 1784777 - DNA, 15 bp, Homo sapiens
ctttatttccaggtt

SEQ ID NO: 1784778 - DNA, 15 bp, Homo sapiens
tttatttccaggttc

SEQ ID NO: 1784779 - DNA, 15 bp, Homo sapiens
tatttccaggttctt

SEQ ID NO: 1784780 - DNA, 15 bp, Homo sapiens
atttccaggttcttc

SEQ ID NO: 1784781 - DNA, 15 bp, Homo sapiens
tttccaggttcttcc

SEQ ID NO: 1784782 - DNA, 15 bp, Homo sapiens
ttccaggttcttcca

SEQ ID NO: 1784783 - DNA, 15 bp, Homo sapiens
tccaggttcttccaa

SEQ ID NO: 1784784 - DNA, 15 bp, Homo sapiens
ccaggttcttccaag

SEQ ID NO: 1784785 - DNA, 15 bp, Homo sapiens
caggttcttccaagg

SEQ ID NO: 1784786 - DNA, 15 bp, Homo sapiens
aggttcttccaagga

SEQ ID NO: 1784787 - DNA, 15 bp, Homo sapiens
ggttcttccaaggac

SEQ ID NO: 1784788 - DNA, 15 bp, Homo sapiens
gttcttccaaggaca

SEQ ID NO: 1784789 - DNA, 15 bp, Homo sapiens
ttcttccaaggacag

SEQ ID NO: 1784790 - DNA, 15 bp, Homo sapiens
tcttccaaggacaga

SEQ ID NO: 1784791 - DNA, 15 bp, Homo sapiens
cttccaaggacagaa

SEQ ID NO: 1784792 - DNA, 15 bp, Homo sapiens
ttccaaggacagaag

SEQ ID NO: 1784793 - DNA, 15 bp, Homo sapiens
tccaaggacagaagc

SEQ ID NO: 1784794 - DNA, 15 bp, Homo sapiens
ccaaggacagaagca

SEQ ID NO: 1784795 - DNA, 15 bp, Homo sapiens
caaggacagaagcag

SEQ ID NO: 1784796 - DNA, 15 bp, Homo sapiens
aaggacagaagcaga

SEQ ID NO: 1784797 - DNA, 15 bp, Homo sapiens
aggacagaagcagat

SEQ ID NO: 1784798 - DNA, 15 bp, Homo sapiens
ggacagaagcagatc

SEQ ID NO: 1784799 - DNA, 15 bp, Homo sapiens
gacagaagcagatct

SEQ ID NO: 1784800 - DNA, 15 bp, Homo sapiens
acagaagcagatctg

SEQ ID NO: 1784801 - DNA, 15 bp, Homo sapiens
cagaagcagatctgc

SEQ ID NO: 1784802 - DNA, 15 bp, Homo sapiens
agaagcagatctgcc

SEQ ID NO: 1784803 - DNA, 15 bp, Homo sapiens
gaagcagatctgcca

SEQ ID NO: 1784804 - DNA, 15 bp, Homo sapiens
aagcagatctgccat

SEQ ID NO: 1784805 - DNA, 15 bp, Homo sapiens
agcagatctgccatg

SEQ ID NO: 1784806 - DNA, 15 bp, Homo sapiens
gcagatctgccatgc

SEQ ID NO: 1784807 - DNA, 15 bp, Homo sapiens
cagatctgccatgct

SEQ ID NO: 1784808 - DNA, 15 bp, Homo sapiens
agatctgccatgcta

SEQ ID NO: 1784809 - DNA, 15 bp, Homo sapiens
gatctgccatgctat

SEQ ID NO: 1784810 - DNA, 15 bp, Homo sapiens
atctgccatgctatc

SEQ ID NO: 1784811 - DNA, 15 bp, Homo sapiens
tctgccatgctatct

SEQ ID NO: 1784812 - DNA, 15 bp, Homo sapiens
ctgccatgctatctc

SEQ ID NO: 1784813 - DNA, 15 bp, Homo sapiens
tgccatgctatctcc

SEQ ID NO: 1784814 - DNA, 15 bp, Homo sapiens
gccatgctatctcct

SEQ ID NO: 1784815 - DNA, 15 bp, Homo sapiens
ccatgctatctcctt

SEQ ID NO: 1784816 - DNA, 15 bp, Homo sapiens
catgctatctccttt

SEQ ID NO: 1784817 - DNA, 15 bp, Homo sapiens
atgctatctccttta

SEQ ID NO: 1784818 - DNA, 15 bp, Homo sapiens
tgctatctcctttat

SEQ ID NO: 1784819 - DNA, 15 bp, Homo sapiens
gctatctcctttatt

SEQ ID NO: 1784820 - DNA, 15 bp, Homo sapiens
ctatctcctttatta

SEQ ID NO: 1784821 - DNA, 15 bp, Homo sapiens
tatctcctttattat

SEQ ID NO: 1784822 - DNA, 15 bp, Homo sapiens
atctcctttattatc

SEQ ID NO: 1784823 - DNA, 15 bp, Homo sapiens
tctcctttattatca

SEQ ID NO: 1784824 - DNA, 15 bp, Homo sapiens
ctcctttattatcat

SEQ ID NO: 1784825 - DNA, 15 bp, Homo sapiens
tcctttattatcatc

SEQ ID NO: 1784826 - DNA, 15 bp, Homo sapiens
cctttattatcatca

SEQ ID NO: 1784827 - DNA, 15 bp, Homo sapiens
ctttattatcatcag

SEQ ID NO: 1784828 - DNA, 15 bp, Homo sapiens
tttattatcatcagc

SEQ ID NO: 1784829 - DNA, 15 bp, Homo sapiens
ttattatcatcagca

SEQ ID NO: 1784830 - DNA, 15 bp, Homo sapiens
tattatcatcagcac

SEQ ID NO: 1784831 - DNA, 15 bp, Homo sapiens
attatcatcagcact

SEQ ID NO: 1784832 - DNA, 15 bp, Homo sapiens
ttatcatcagcactt

SEQ ID NO: 1784833 - DNA, 15 bp, Homo sapiens
tatcatcagcacttc

SEQ ID NO: 1784834 - DNA, 15 bp, Homo sapiens
atcatcagcacttcc

SEQ ID NO: 1784835 - DNA, 15 bp, Homo sapiens
tcatcagcacttcct

SEQ ID NO: 1784836 - DNA, 15 bp, Homo sapiens
catcagcacttcctt

SEQ ID NO: 1784837 - DNA, 15 bp, Homo sapiens
atcagcacttccttc

SEQ ID NO: 1784838 - DNA, 15 bp, Homo sapiens
tcagcacttccttcc

SEQ ID NO: 1784839 - DNA, 15 bp, Homo sapiens
cagcacttccttccc

SEQ ID NO: 1784840 - DNA, 15 bp, Homo sapiens
agcacttccttccca

SEQ ID NO: 1784841 - DNA, 15 bp, Homo sapiens
gcacttccttcccac

SEQ ID NO: 1784842 - DNA, 15 bp, Homo sapiens
cacttccttcccact

SEQ ID NO: 1784843 - DNA, 15 bp, Homo sapiens
acttccttcccactg

SEQ ID NO: 1784844 - DNA, 15 bp, Homo sapiens
cttccttcccactga

SEQ ID NO: 1784845 - DNA, 15 bp, Homo sapiens
ttccttcccactgaa

SEQ ID NO: 1784846 - DNA, 15 bp, Homo sapiens
tccttcccactgaat

SEQ ID NO: 1784847 - DNA, 15 bp, Homo sapiens
ccttcccactgaatt

SEQ ID NO: 1784848 - DNA, 15 bp, Homo sapiens
cttcccactgaatta

SEQ ID NO: 1784849 - DNA, 15 bp, Homo sapiens
ttcccactgaattac

SEQ ID NO: 1784850 - DNA, 15 bp, Homo sapiens
tcccactgaattact

SEQ ID NO: 1784851 - DNA, 15 bp, Homo sapiens
cccactgaattactt

SEQ ID NO: 1784852 - DNA, 15 bp, Homo sapiens
ccactgaattactta

SEQ ID NO: 1784853 - DNA, 15 bp, Homo sapiens
cactgaattacttat

SEQ ID NO: 1784854 - DNA, 15 bp, Homo sapiens
actgaattacttatc

SEQ ID NO: 1784855 - DNA, 15 bp, Homo sapiens
ctgaattacttatca

SEQ ID NO: 1784856 - DNA, 15 bp, Homo sapiens
tgaattacttatcag

SEQ ID NO: 1784857 - DNA, 15 bp, Homo sapiens
gaattacttatcagg

SEQ ID NO: 1784858 - DNA, 15 bp, Homo sapiens
aattacttatcagga

SEQ ID NO: 1784859 - DNA, 15 bp, Homo sapiens
attacttatcaggat

SEQ ID NO: 1784860 - DNA, 15 bp, Homo sapiens
ttacttatcaggatt

SEQ ID NO: 1784861 - DNA, 15 bp, Homo sapiens
tacttatcaggattt

SEQ ID NO: 1784862 - DNA, 15 bp, Homo sapiens
acttatcaggatttt

SEQ ID NO: 1784863 - DNA, 15 bp, Homo sapiens
cttatcaggatttta

SEQ ID NO: 1784864 - DNA, 15 bp, Homo sapiens
ttatcaggattttac

SEQ ID NO: 1784865 - DNA, 15 bp, Homo sapiens
tatcaggattttaca

SEQ ID NO: 1784866 - DNA, 15 bp, Homo sapiens
atcaggattttacac

SEQ ID NO: 1784867 - DNA, 15 bp, Homo sapiens
tcaggattttacacg

SEQ ID NO: 1784868 - DNA, 15 bp, Homo sapiens
caggattttacacgc

SEQ ID NO: 1784869 - DNA, 15 bp, Homo sapiens
aggattttacacgct

SEQ ID NO: 1784870 - DNA, 15 bp, Homo sapiens
ggattttacacgctg

SEQ ID NO: 1784871 - DNA, 15 bp, Homo sapiens
gattttacacgctgt

SEQ ID NO: 1784872 - DNA, 15 bp, Homo sapiens
attttacacgctgtg

SEQ ID NO: 1784873 - DNA, 15 bp, Homo sapiens
ttttacacgctgtgg

SEQ ID NO: 1784874 - DNA, 15 bp, Homo sapiens
tttacacgctgtggg

SEQ ID NO: 1784875 - DNA, 15 bp, Homo sapiens
ttacacgctgtgggc

SEQ ID NO: 1784876 - DNA, 15 bp, Homo sapiens
tacacgctgtgggct

SEQ ID NO: 1784877 - DNA, 15 bp, Homo sapiens
acacgctgtgggctg

SEQ ID NO: 1784878 - DNA, 15 bp, Homo sapiens
cacgctgtgggctgg

SEQ ID NO: 1784879 - DNA, 15 bp, Homo sapiens
acgctgtgggctgga

SEQ ID NO: 1784880 - DNA, 15 bp, Homo sapiens
cgctgtgggctggat

SEQ ID NO: 1784881 - DNA, 15 bp, Homo sapiens
gctgtgggctggatt

SEQ ID NO: 1784882 - DNA, 15 bp, Homo sapiens
ctgtgggctggattt

SEQ ID NO: 1784883 - DNA, 15 bp, Homo sapiens
tgtgggctggatttg

SEQ ID NO: 1784884 - DNA, 15 bp, Homo sapiens
gtgggctggatttgc

SEQ ID NO: 1784885 - DNA, 15 bp, Homo sapiens
tgggctggatttgct

SEQ ID NO: 1784886 - DNA, 15 bp, Homo sapiens
gggctggatttgctc

SEQ ID NO: 1784887 - DNA, 15 bp, Homo sapiens
ggctggatttgctca

SEQ ID NO: 1784888 - DNA, 15 bp, Homo sapiens
gctggatttgctcag

SEQ ID NO: 1784889 - DNA, 15 bp, Homo sapiens
ctggatttgctcaga

SEQ ID NO: 1784890 - DNA, 15 bp, Homo sapiens
tggatttgctcagaa

SEQ ID NO: 1784891 - DNA, 15 bp, Homo sapiens
ggatttgctcagaaa

SEQ ID NO: 1784892 - DNA, 15 bp, Homo sapiens
gatttgctcagaaat

SEQ ID NO: 1784893 - DNA, 15 bp, Homo sapiens
atttgctcagaaatg

SEQ ID NO: 1784894 - DNA, 15 bp, Homo sapiens
tttgctcagaaatga

SEQ ID NO: 1784895 - DNA, 15 bp, Homo sapiens
ttgctcagaaatgac

SEQ ID NO: 1784896 - DNA, 15 bp, Homo sapiens
tgctcagaaatgact

SEQ ID NO: 1784897 - DNA, 15 bp, Homo sapiens
gctcagaaatgactc

SEQ ID NO: 1784898 - DNA, 15 bp, Homo sapiens
ctcagaaatgactct

SEQ ID NO: 1784899 - DNA, 15 bp, Homo sapiens
tcagaaatgactctc

SEQ ID NO: 1784900 - DNA, 15 bp, Homo sapiens
cagaaatgactctca

SEQ ID NO: 1784901 - DNA, 15 bp, Homo sapiens
agaaatgactctcaa

SEQ ID NO: 1784902 - DNA, 15 bp, Homo sapiens
gaaatgactctcaat

SEQ ID NO: 1784903 - DNA, 15 bp, Homo sapiens
aaatgactctcaatt

SEQ ID NO: 1784904 - DNA, 15 bp, Homo sapiens
aatgactctcaattg

SEQ ID NO: 1784905 - DNA, 15 bp, Homo sapiens
atgactctcaattgg

SEQ ID NO: 1784906 - DNA, 15 bp, Homo sapiens
tgactctcaattgga

SEQ ID NO: 1784907 - DNA, 15 bp, Homo sapiens
gactctcaattggag

SEQ ID NO: 1784908 - DNA, 15 bp, Homo sapiens
actctcaattggaga

SEQ ID NO: 1784909 - DNA, 15 bp, Homo sapiens
ctctcaattggagag

SEQ ID NO: 1784910 - DNA, 15 bp, Homo sapiens
tctcaattggagaga

SEQ ID NO: 1784911 - DNA, 15 bp, Homo sapiens
ctcaattggagagaa

SEQ ID NO: 1784912 - DNA, 15 bp, Homo sapiens
tcaattggagagaac

SEQ ID NO: 1784913 - DNA, 15 bp, Homo sapiens
caattggagagaact

SEQ ID NO: 1784914 - DNA, 15 bp, Homo sapiens
aattggagagaactc

SEQ ID NO: 1784915 - DNA, 15 bp, Homo sapiens
attggagagaactct

SEQ ID NO: 1784916 - DNA, 15 bp, Homo sapiens
ttggagagaactctg

SEQ ID NO: 1784917 - DNA, 15 bp, Homo sapiens
tggagagaactctgc

SEQ ID NO: 1784918 - DNA, 15 bp, Homo sapiens
ggagagaactctgct

SEQ ID NO: 1784919 - DNA, 15 bp, Homo sapiens
gagagaactctgcta

SEQ ID NO: 1784920 - DNA, 15 bp, Homo sapiens
agagaactctgctat

SEQ ID NO: 1784921 - DNA, 15 bp, Homo sapiens
gagaactctgctatc

SEQ ID NO: 1784922 - DNA, 15 bp, Homo sapiens
agaactctgctatcg

SEQ ID NO: 1784923 - DNA, 15 bp, Homo sapiens
gaactctgctatcgg

SEQ ID NO: 1784924 - DNA, 15 bp, Homo sapiens
aactctgctatcggg

SEQ ID NO: 1784925 - DNA, 15 bp, Homo sapiens
actctgctatcggga

SEQ ID NO: 1784926 - DNA, 15 bp, Homo sapiens
ctctgctatcgggag

SEQ ID NO: 1784927 - DNA, 15 bp, Homo sapiens
tctgctatcgggagt

SEQ ID NO: 1784928 - DNA, 15 bp, Homo sapiens
ctgctatcgggagtt

SEQ ID NO: 1784929 - DNA, 15 bp, Homo sapiens
tgctatcgggagttc

SEQ ID NO: 1784930 - DNA, 15 bp, Homo sapiens
gctatcgggagttct

SEQ ID NO: 1784931 - DNA, 15 bp, Homo sapiens
ctatcgggagttctc

SEQ ID NO: 1784932 - DNA, 15 bp, Homo sapiens
tatcgggagttctcc

SEQ ID NO: 1784933 - DNA, 15 bp, Homo sapiens
atcgggagttctcct

SEQ ID NO: 1784934 - DNA, 15 bp, Homo sapiens
tcgggagttctcctg

SEQ ID NO: 1784935 - DNA, 15 bp, Homo sapiens
cgggagttctcctgc

SEQ ID NO: 1784936 - DNA, 15 bp, Homo sapiens
gggagttctcctgct

SEQ ID NO: 1784937 - DNA, 15 bp, Homo sapiens
ggagttctcctgctc

SEQ ID NO: 1784938 - DNA, 15 bp, Homo sapiens
gagttctcctgctcc

SEQ ID NO: 1784939 - DNA, 15 bp, Homo sapiens
agttctcctgctccc

SEQ ID NO: 1784940 - DNA, 15 bp, Homo sapiens
gttctcctgctccca

SEQ ID NO: 1784941 - DNA, 15 bp, Homo sapiens
ttctcctgctcccag

SEQ ID NO: 1784942 - DNA, 15 bp, Homo sapiens
tctcctgctcccagg

SEQ ID NO: 1784943 - DNA, 15 bp, Homo sapiens
ctcctgctcccaggg

SEQ ID NO: 1784944 - DNA, 15 bp, Homo sapiens
tcctgctcccaggga

SEQ ID NO: 1784945 - DNA, 15 bp, Homo sapiens
cctgctcccagggag

SEQ ID NO: 1784946 - DNA, 15 bp, Homo sapiens
ctgctcccagggagc

SEQ ID NO: 1784947 - DNA, 15 bp, Homo sapiens
tgctcccagggagct

SEQ ID NO: 1784948 - DNA, 15 bp, Homo sapiens
gctcccagggagctg

SEQ ID NO: 1784949 - DNA, 15 bp, Homo sapiens
ctcccagggagctgt

SEQ ID NO: 1784950 - DNA, 15 bp, Homo sapiens
tcccagggagctgtg

SEQ ID NO: 1784951 - DNA, 15 bp, Homo sapiens
cccagggagctgtgc

SEQ ID NO: 1784952 - DNA, 15 bp, Homo sapiens
ccagggagctgtgcc

SEQ ID NO: 1784953 - DNA, 15 bp, Homo sapiens
cagggagctgtgccc

SEQ ID NO: 1784954 - DNA, 15 bp, Homo sapiens
agggagctgtgcccc

SEQ ID NO: 1784955 - DNA, 15 bp, Homo sapiens
gggagctgtgcccct

SEQ ID NO: 1784956 - DNA, 15 bp, Homo sapiens
ggagctgtgcccctt

SEQ ID NO: 1784957 - DNA, 15 bp, Homo sapiens
gagctgtgccccttg

SEQ ID NO: 1784958 - DNA, 15 bp, Homo sapiens
agctgtgccccttga

SEQ ID NO: 1784959 - DNA, 15 bp, Homo sapiens
gctgtgccccttgaa

SEQ ID NO: 1784960 - DNA, 15 bp, Homo sapiens
ctgtgccccttgaag

SEQ ID NO: 1784961 - DNA, 15 bp, Homo sapiens
tgtgccccttgaagg

SEQ ID NO: 1784962 - DNA, 15 bp, Homo sapiens
gtgccccttgaagga

SEQ ID NO: 1784963 - DNA, 15 bp, Homo sapiens
tgccccttgaaggag

SEQ ID NO: 1784964 - DNA, 15 bp, Homo sapiens
gccccttgaaggagg

SEQ ID NO: 1784965 - DNA, 15 bp, Homo sapiens
ccccttgaaggaggc

SEQ ID NO: 1784966 - DNA, 15 bp, Homo sapiens
cccttgaaggaggca

SEQ ID NO: 1784967 - DNA, 15 bp, Homo sapiens
ccttgaaggaggcat

SEQ ID NO: 1784968 - DNA, 15 bp, Homo sapiens
cttgaaggaggcatg

SEQ ID NO: 1784969 - DNA, 15 bp, Homo sapiens
ttgaaggaggcatgt

SEQ ID NO: 1784970 - DNA, 15 bp, Homo sapiens
tgaaggaggcatgtc

SEQ ID NO: 1784971 - DNA, 15 bp, Homo sapiens
gaaggaggcatgtcc

SEQ ID NO: 1784972 - DNA, 15 bp, Homo sapiens
aaggaggcatgtcca

SEQ ID NO: 1784973 - DNA, 15 bp, Homo sapiens
aggaggcatgtccac

SEQ ID NO: 1784974 - DNA, 15 bp, Homo sapiens
ggaggcatgtccacc

SEQ ID NO: 1784975 - DNA, 15 bp, Homo sapiens
gaggcatgtccacct

SEQ ID NO: 1784976 - DNA, 15 bp, Homo sapiens
aggcatgtccacctg

SEQ ID NO: 1784977 - DNA, 15 bp, Homo sapiens
ggcatgtccacctgt

SEQ ID NO: 1784978 - DNA, 15 bp, Homo sapiens
gcatgtccacctgtc

SEQ ID NO: 1784979 - DNA, 15 bp, Homo sapiens
catgtccacctgtca

SEQ ID NO: 1784980 - DNA, 15 bp, Homo sapiens
atgtccacctgtcat

SEQ ID NO: 1784981 - DNA, 15 bp, Homo sapiens
tgtccacctgtcatt

SEQ ID NO: 1784982 - DNA, 15 bp, Homo sapiens
gtccacctgtcattg

SEQ ID NO: 1784983 - DNA, 15 bp, Homo sapiens
tccacctgtcattgg

SEQ ID NO: 1784984 - DNA, 15 bp, Homo sapiens
ccacctgtcattggt

SEQ ID NO: 1784985 - DNA, 15 bp, Homo sapiens
cacctgtcattggtt

SEQ ID NO: 1784986 - DNA, 15 bp, Homo sapiens
acctgtcattggttc

SEQ ID NO: 1784987 - DNA, 15 bp, Homo sapiens
cctgtcattggttcc

SEQ ID NO: 1784988 - DNA, 15 bp, Homo sapiens
ctgtcattggttccc

SEQ ID NO: 1784989 - DNA, 15 bp, Homo sapiens
tgtcattggttccct

SEQ ID NO: 1784990 - DNA, 15 bp, Homo sapiens
gtcattggttccctg

SEQ ID NO: 1784991 - DNA, 15 bp, Homo sapiens
tcattggttccctgg

SEQ ID NO: 1784992 - DNA, 15 bp, Homo sapiens
cattggttccctggg

SEQ ID NO: 1784993 - DNA, 15 bp, Homo sapiens
attggttccctgggt

SEQ ID NO: 1784994 - DNA, 15 bp, Homo sapiens
ttggttccctgggtg

SEQ ID NO: 1784995 - DNA, 15 bp, Homo sapiens
tggttccctgggtgc

SEQ ID NO: 1784996 - DNA, 15 bp, Homo sapiens
ggttccctgggtgct

SEQ ID NO: 1784997 - DNA, 15 bp, Homo sapiens
gttccctgggtgctt

SEQ ID NO: 1784998 - DNA, 15 bp, Homo sapiens
ttccctgggtgcttg

SEQ ID NO: 1784999 - DNA, 15 bp, Homo sapiens
tccctgggtgcttgt

SEQ ID NO: 1785000 - DNA, 15 bp, Homo sapiens
ccctgggtgcttgtg

SEQ ID NO: 1785001 - DNA, 15 bp, Homo sapiens
cctgggtgcttgtgg

SEQ ID NO: 1785002 - DNA, 15 bp, Homo sapiens
ctgggtgcttgtggg

SEQ ID NO: 1785003 - DNA, 15 bp, Homo sapiens
tgggtgcttgtgggc

SEQ ID NO: 1785004 - DNA, 15 bp, Homo sapiens
gggtgcttgtgggcc

SEQ ID NO: 1785005 - DNA, 15 bp, Homo sapiens
ggtgcttgtgggcct

SEQ ID NO: 1785006 - DNA, 15 bp, Homo sapiens
gtgcttgtgggcctt

SEQ ID NO: 1785007 - DNA, 15 bp, Homo sapiens
tgcttgtgggccttc

SEQ ID NO: 1785008 - DNA, 15 bp, Homo sapiens
gcttgtgggccttcc

SEQ ID NO: 1785009 - DNA, 15 bp, Homo sapiens
cttgtgggccttccc

SEQ ID NO: 1785010 - DNA, 15 bp, Homo sapiens
ttgtgggccttccca

SEQ ID NO: 1785011 - DNA, 15 bp, Homo sapiens
tgtgggccttcccag

SEQ ID NO: 1785012 - DNA, 15 bp, Homo sapiens
gtgggccttcccagt

SEQ ID NO: 1785013 - DNA, 15 bp, Homo sapiens
tgggccttcccagtc

SEQ ID NO: 1785014 - DNA, 15 bp, Homo sapiens
gggccttcccagtct

SEQ ID NO: 1785015 - DNA, 15 bp, Homo sapiens
ggccttcccagtcta

SEQ ID NO: 1785016 - DNA, 15 bp, Homo sapiens
gccttcccagtctag

SEQ ID NO: 1785017 - DNA, 15 bp, Homo sapiens
ccttcccagtctaga

SEQ ID NO: 1785018 - DNA, 15 bp, Homo sapiens
cttcccagtctagag

SEQ ID NO: 1785019 - DNA, 15 bp, Homo sapiens
ttcccagtctagaga

SEQ ID NO: 1785020 - DNA, 15 bp, Homo sapiens
tcccagtctagagag

SEQ ID NO: 1785021 - DNA, 15 bp, Homo sapiens
cccagtctagagaga

SEQ ID NO: 1785022 - DNA, 15 bp, Homo sapiens
ccagtctagagagaa

SEQ ID NO: 1785023 - DNA, 15 bp, Homo sapiens
cagtctagagagaaa

SEQ ID NO: 1785024 - DNA, 15 bp, Homo sapiens
agtctagagagaaat

SEQ ID NO: 1785025 - DNA, 15 bp, Homo sapiens
gtctagagagaaatg

SEQ ID NO: 1785026 - DNA, 15 bp, Homo sapiens
tctagagagaaatga

SEQ ID NO: 1785027 - DNA, 15 bp, Homo sapiens
ctagagagaaatgaa

SEQ ID NO: 1785028 - DNA, 15 bp, Homo sapiens
tagagagaaatgaag

SEQ ID NO: 1785029 - DNA, 15 bp, Homo sapiens
agagagaaatgaagc

SEQ ID NO: 1785030 - DNA, 15 bp, Homo sapiens
gagagaaatgaagca

SEQ ID NO: 1785031 - DNA, 15 bp, Homo sapiens
agagaaatgaagcag

SEQ ID NO: 1785032 - DNA, 15 bp, Homo sapiens
gagaaatgaagcagt

SEQ ID NO: 1785033 - DNA, 15 bp, Homo sapiens
agaaatgaagcagtt

SEQ ID NO: 1785034 - DNA, 15 bp, Homo sapiens
gaaatgaagcagttt

SEQ ID NO: 1785035 - DNA, 15 bp, Homo sapiens
aaatgaagcagtttc

SEQ ID NO: 1785036 - DNA, 15 bp, Homo sapiens
aatgaagcagtttcc

SEQ ID NO: 1785037 - DNA, 15 bp, Homo sapiens
atgaagcagtttcca

SEQ ID NO: 1785038 - DNA, 15 bp, Homo sapiens
tgaagcagtttccag

SEQ ID NO: 1785039 - DNA, 15 bp, Homo sapiens
gaagcagtttccagg

SEQ ID NO: 1785040 - DNA, 15 bp, Homo sapiens
aagcagtttccaggt

SEQ ID NO: 1785041 - DNA, 15 bp, Homo sapiens
agcagtttccaggta

SEQ ID NO: 1785042 - DNA, 15 bp, Homo sapiens
gcagtttccaggtaa

SEQ ID NO: 1785043 - DNA, 15 bp, Homo sapiens
cagtttccaggtaag

SEQ ID NO: 1785044 - DNA, 15 bp, Homo sapiens
agtttccaggtaagg

SEQ ID NO: 1785045 - DNA, 15 bp, Homo sapiens
gtttccaggtaaggt

SEQ ID NO: 1785046 - DNA, 15 bp, Homo sapiens
tttccaggtaaggtc

SEQ ID NO: 1785047 - DNA, 15 bp, Homo sapiens
ttccaggtaaggtcc

SEQ ID NO: 1785048 - DNA, 15 bp, Homo sapiens
tccaggtaaggtccc

SEQ ID NO: 1785049 - DNA, 15 bp, Homo sapiens
ccaggtaaggtcccc

SEQ ID NO: 1785050 - DNA, 15 bp, Homo sapiens
caggtaaggtccccg

SEQ ID NO: 1785051 - DNA, 15 bp, Homo sapiens
aggtaaggtccccgg

SEQ ID NO: 1785052 - DNA, 15 bp, Homo sapiens
ggtaaggtccccggt

SEQ ID NO: 1785053 - DNA, 15 bp, Homo sapiens
gtaaggtccccggtg

SEQ ID NO: 1785054 - DNA, 15 bp, Homo sapiens
taaggtccccggtgg

SEQ ID NO: 1785055 - DNA, 15 bp, Homo sapiens
aaggtccccggtggg

SEQ ID NO: 1785056 - DNA, 15 bp, Homo sapiens
aggtccccggtgggt

SEQ ID NO: 1785057 - DNA, 15 bp, Homo sapiens
ggtccccggtgggtt

SEQ ID NO: 1785058 - DNA, 15 bp, Homo sapiens
gtccccggtgggttt

SEQ ID NO: 1785059 - DNA, 15 bp, Homo sapiens
tccccggtgggttta

SEQ ID NO: 1785060 - DNA, 15 bp, Homo sapiens
ccccggtgggtttac

SEQ ID NO: 1785061 - DNA, 15 bp, Homo sapiens
cccggtgggtttacc

SEQ ID NO: 1785062 - DNA, 15 bp, Homo sapiens
ccggtgggtttacct

SEQ ID NO: 1785063 - DNA, 15 bp, Homo sapiens
cggtgggtttacctg

SEQ ID NO: 1785064 - DNA, 15 bp, Homo sapiens
ggtgggtttacctgt

SEQ ID NO: 1785065 - DNA, 15 bp, Homo sapiens
gtgggtttacctgtg

SEQ ID NO: 1785066 - DNA, 15 bp, Homo sapiens
tgggtttacctgtgg

SEQ ID NO: 1785067 - DNA, 15 bp, Homo sapiens
gggtttacctgtggc

SEQ ID NO: 1785068 - DNA, 15 bp, Homo sapiens
ggtttacctgtggct

SEQ ID NO: 1785069 - DNA, 15 bp, Homo sapiens
gtttacctgtggcta

SEQ ID NO: 1785070 - DNA, 15 bp, Homo sapiens
tttacctgtggctac

SEQ ID NO: 1785071 - DNA, 15 bp, Homo sapiens
ttacctgtggctact

SEQ ID NO: 1785072 - DNA, 15 bp, Homo sapiens
tacctgtggctactt

SEQ ID NO: 1785073 - DNA, 15 bp, Homo sapiens
acctgtggctacttc

SEQ ID NO: 1785074 - DNA, 15 bp, Homo sapiens
cctgtggctacttcc

SEQ ID NO: 1785075 - DNA, 15 bp, Homo sapiens
ctgtggctacttcca

SEQ ID NO: 1785076 - DNA, 15 bp, Homo sapiens
tgtggctacttccaa

SEQ ID NO: 1785077 - DNA, 15 bp, Homo sapiens
gtggctacttccaaa

SEQ ID NO: 1785078 - DNA, 15 bp, Homo sapiens
tggctacttccaaac

SEQ ID NO: 1785079 - DNA, 15 bp, Homo sapiens
ggctacttccaaact

SEQ ID NO: 1785080 - DNA, 15 bp, Homo sapiens
gctacttccaaactg

SEQ ID NO: 1785081 - DNA, 15 bp, Homo sapiens
ctacttccaaactgg

SEQ ID NO: 1785082 - DNA, 15 bp, Homo sapiens
tacttccaaactgga

SEQ ID NO: 1785083 - DNA, 15 bp, Homo sapiens
acttccaaactggag

SEQ ID NO: 1785084 - DNA, 15 bp, Homo sapiens
cttccaaactggaga

SEQ ID NO: 1785085 - DNA, 15 bp, Homo sapiens
ttccaaactggagac

SEQ ID NO: 1785086 - DNA, 15 bp, Homo sapiens
tccaaactggagaca

SEQ ID NO: 1785087 - DNA, 15 bp, Homo sapiens
ccaaactggagacaa

SEQ ID NO: 1785088 - DNA, 15 bp, Homo sapiens
caaactggagacaat

SEQ ID NO: 1785089 - DNA, 15 bp, Homo sapiens
aaactggagacaatt

SEQ ID NO: 1785090 - DNA, 15 bp, Homo sapiens
aactggagacaatta

SEQ ID NO: 1785091 - DNA, 15 bp, Homo sapiens
actggagacaattaa

SEQ ID NO: 1785092 - DNA, 15 bp, Homo sapiens
ctggagacaattaag

SEQ ID NO: 1785093 - DNA, 15 bp, Homo sapiens
tggagacaattaaga

SEQ ID NO: 1785094 - DNA, 15 bp, Homo sapiens
ggagacaattaagaa

SEQ ID NO: 1785095 - DNA, 15 bp, Homo sapiens
gagacaattaagaaa

SEQ ID NO: 1785096 - DNA, 15 bp, Homo sapiens
agacaattaagaaag

SEQ ID NO: 1785097 - DNA, 15 bp, Homo sapiens
gacaattaagaaaga

SEQ ID NO: 1785098 - DNA, 15 bp, Homo sapiens
acaattaagaaagag

SEQ ID NO: 1785099 - DNA, 15 bp, Homo sapiens
caattaagaaagaga

SEQ ID NO: 1785100 - DNA, 15 bp, Homo sapiens
aattaagaaagagat

SEQ ID NO: 1785101 - DNA, 15 bp, Homo sapiens
attaagaaagagatt

SEQ ID NO: 1785102 - DNA, 15 bp, Homo sapiens
ttaagaaagagattg

SEQ ID NO: 1785103 - DNA, 15 bp, Homo sapiens
taagaaagagattgg

SEQ ID NO: 1785104 - DNA, 15 bp, Homo sapiens
aagaaagagattgga

SEQ ID NO: 1785105 - DNA, 15 bp, Homo sapiens
agaaagagattggaa

SEQ ID NO: 1785106 - DNA, 15 bp, Homo sapiens
gaaagagattggaac

SEQ ID NO: 1785107 - DNA, 15 bp, Homo sapiens
aaagagattggaacc

SEQ ID NO: 1785108 - DNA, 15 bp, Homo sapiens
aagagattggaacct

SEQ ID NO: 1785109 - DNA, 15 bp, Homo sapiens
agagattggaaccta

SEQ ID NO: 1785110 - DNA, 15 bp, Homo sapiens
gagattggaacctag

SEQ ID NO: 1785111 - DNA, 15 bp, Homo sapiens
agattggaacctaga

SEQ ID NO: 1785112 - DNA, 15 bp, Homo sapiens
gattggaacctagaa

SEQ ID NO: 1785113 - DNA, 15 bp, Homo sapiens
attggaacctagaag

SEQ ID NO: 1785114 - DNA, 15 bp, Homo sapiens
ttggaacctagaagg

SEQ ID NO: 1785115 - DNA, 15 bp, Homo sapiens
tggaacctagaagga

SEQ ID NO: 1785116 - DNA, 15 bp, Homo sapiens
ggaacctagaaggag

SEQ ID NO: 1785117 - DNA, 15 bp, Homo sapiens
gaacctagaaggagt

SEQ ID NO: 1785118 - DNA, 15 bp, Homo sapiens
aacctagaaggagtt

SEQ ID NO: 1785119 - DNA, 15 bp, Homo sapiens
acctagaaggagttg

SEQ ID NO: 1785120 - DNA, 15 bp, Homo sapiens
cctagaaggagttga

SEQ ID NO: 1785121 - DNA, 15 bp, Homo sapiens
ctagaaggagttgac

SEQ ID NO: 1785122 - DNA, 15 bp, Homo sapiens
tagaaggagttgaca

SEQ ID NO: 1785123 - DNA, 15 bp, Homo sapiens
agaaggagttgacaa

SEQ ID NO: 1785124 - DNA, 15 bp, Homo sapiens
gaaggagttgacaat

SEQ ID NO: 1785125 - DNA, 15 bp, Homo sapiens
aaggagttgacaatt

SEQ ID NO: 1785126 - DNA, 15 bp, Homo sapiens
aggagttgacaattc

SEQ ID NO: 1785127 - DNA, 15 bp, Homo sapiens
ggagttgacaattca

SEQ ID NO: 1785128 - DNA, 15 bp, Homo sapiens
gagttgacaattcaa

SEQ ID NO: 1785129 - DNA, 15 bp, Homo sapiens
agttgacaattcaat

SEQ ID NO: 1785130 - DNA, 15 bp, Homo sapiens
gttgacaattcaatc

SEQ ID NO: 1785131 - DNA, 15 bp, Homo sapiens
ttgacaattcaatca

SEQ ID NO: 1785132 - DNA, 15 bp, Homo sapiens
tgacaattcaatcat

SEQ ID NO: 1785133 - DNA, 15 bp, Homo sapiens
gacaattcaatcatt

SEQ ID NO: 1785134 - DNA, 15 bp, Homo sapiens
acaattcaatcattt

SEQ ID NO: 1785135 - DNA, 15 bp, Homo sapiens
caattcaatcatttc

SEQ ID NO: 1785136 - DNA, 15 bp, Homo sapiens
aattcaatcatttct

SEQ ID NO: 1785137 - DNA, 15 bp, Homo sapiens
attcaatcatttctt

SEQ ID NO: 1785138 - DNA, 15 bp, Homo sapiens
ttcaatcatttcttc

SEQ ID NO: 1785139 - DNA, 15 bp, Homo sapiens
tcaatcatttcttcc

SEQ ID NO: 1785140 - DNA, 15 bp, Homo sapiens
caatcatttcttcct

SEQ ID NO: 1785141 - DNA, 15 bp, Homo sapiens
aatcatttcttcctt

SEQ ID NO: 1785142 - DNA, 15 bp, Homo sapiens
atcatttcttccttc

SEQ ID NO: 1785143 - DNA, 15 bp, Homo sapiens
tcatttcttccttca

SEQ ID NO: 1785144 - DNA, 15 bp, Homo sapiens
catttcttccttcat

SEQ ID NO: 1785145 - DNA, 15 bp, Homo sapiens
atttcttccttcatt

SEQ ID NO: 1785146 - DNA, 15 bp, Homo sapiens
tttcttccttcatta

SEQ ID NO: 1785147 - DNA, 15 bp, Homo sapiens
ttcttccttcattaa

SEQ ID NO: 1785148 - DNA, 15 bp, Homo sapiens
tcttccttcattaac

SEQ ID NO: 1785149 - DNA, 15 bp, Homo sapiens
cttccttcattaact

SEQ ID NO: 1785150 - DNA, 15 bp, Homo sapiens
ttccttcattaactc

SEQ ID NO: 1785151 - DNA, 15 bp, Homo sapiens
tccttcattaactca

SEQ ID NO: 1785152 - DNA, 15 bp, Homo sapiens
ccttcattaactcag

SEQ ID NO: 1785153 - DNA, 15 bp, Homo sapiens
cttcattaactcagt

SEQ ID NO: 1785154 - DNA, 15 bp, Homo sapiens
ttcattaactcagtc

SEQ ID NO: 1785155 - DNA, 15 bp, Homo sapiens
tcattaactcagtcc

SEQ ID NO: 1785156 - DNA, 15 bp, Homo sapiens
cattaactcagtcca

SEQ ID NO: 1785157 - DNA, 15 bp, Homo sapiens
attaactcagtccag

SEQ ID NO: 1785158 - DNA, 15 bp, Homo sapiens
ttaactcagtccagt

SEQ ID NO: 1785159 - DNA, 15 bp, Homo sapiens
taactcagtccagtt

SEQ ID NO: 1785160 - DNA, 15 bp, Homo sapiens
aactcagtccagttt

SEQ ID NO: 1785161 - DNA, 15 bp, Homo sapiens
actcagtccagtttg

SEQ ID NO: 1785162 - DNA, 15 bp, Homo sapiens
ctcagtccagtttgg

SEQ ID NO: 1785163 - DNA, 15 bp, Homo sapiens
tcagtccagtttgga

SEQ ID NO: 1785164 - DNA, 15 bp, Homo sapiens
cagtccagtttggat

SEQ ID NO: 1785165 - DNA, 15 bp, Homo sapiens
agtccagtttggatg

SEQ ID NO: 1785166 - DNA, 15 bp, Homo sapiens
gtccagtttggatga

SEQ ID NO: 1785167 - DNA, 15 bp, Homo sapiens
tccagtttggatgag

SEQ ID NO: 1785168 - DNA, 15 bp, Homo sapiens
ccagtttggatgagg

SEQ ID NO: 1785169 - DNA, 15 bp, Homo sapiens
cagtttggatgaggc

SEQ ID NO: 1785170 - DNA, 15 bp, Homo sapiens
agtttggatgaggca

SEQ ID NO: 1785171 - DNA, 15 bp, Homo sapiens
gtttggatgaggcac

SEQ ID NO: 1785172 - DNA, 15 bp, Homo sapiens
tttggatgaggcaca

SEQ ID NO: 1785173 - DNA, 15 bp, Homo sapiens
ttggatgaggcacat

SEQ ID NO: 1785174 - DNA, 15 bp, Homo sapiens
tggatgaggcacatt

SEQ ID NO: 1785175 - DNA, 15 bp, Homo sapiens
ggatgaggcacattc

SEQ ID NO: 1785176 - DNA, 15 bp, Homo sapiens
gatgaggcacattca

SEQ ID NO: 1785177 - DNA, 15 bp, Homo sapiens
atgaggcacattcaa

SEQ ID NO: 1785178 - DNA, 15 bp, Homo sapiens
tgaggcacattcaag

SEQ ID NO: 1785179 - DNA, 15 bp, Homo sapiens
gaggcacattcaaga

SEQ ID NO: 1785180 - DNA, 15 bp, Homo sapiens
aggcacattcaagat

SEQ ID NO: 1785181 - DNA, 15 bp, Homo sapiens
ggcacattcaagatg

SEQ ID NO: 1785182 - DNA, 15 bp, Homo sapiens
gcacattcaagatgc

SEQ ID NO: 1785183 - DNA, 15 bp, Homo sapiens
cacattcaagatgcc

SEQ ID NO: 1785184 - DNA, 15 bp, Homo sapiens
acattcaagatgcct

SEQ ID NO: 1785185 - DNA, 15 bp, Homo sapiens
cattcaagatgcctc

SEQ ID NO: 1785186 - DNA, 15 bp, Homo sapiens
attcaagatgcctcc

SEQ ID NO: 1785187 - DNA, 15 bp, Homo sapiens
ttcaagatgcctcca

SEQ ID NO: 1785188 - DNA, 15 bp, Homo sapiens
tcaagatgcctccaa

SEQ ID NO: 1785189 - DNA, 15 bp, Homo sapiens
caagatgcctccaag

SEQ ID NO: 1785190 - DNA, 15 bp, Homo sapiens
aagatgcctccaagc

SEQ ID NO: 1785191 - DNA, 15 bp, Homo sapiens
agatgcctccaagca

SEQ ID NO: 1785192 - DNA, 15 bp, Homo sapiens
gatgcctccaagcaa

SEQ ID NO: 1785193 - DNA, 15 bp, Homo sapiens
atgcctccaagcaag

SEQ ID NO: 1785194 - DNA, 15 bp, Homo sapiens
tgcctccaagcaagc

SEQ ID NO: 1785195 - DNA, 15 bp, Homo sapiens
gcctccaagcaagct

SEQ ID NO: 1785196 - DNA, 15 bp, Homo sapiens
cctccaagcaagctg

SEQ ID NO: 1785197 - DNA, 15 bp, Homo sapiens
ctccaagcaagctga

SEQ ID NO: 1785198 - DNA, 15 bp, Homo sapiens
tccaagcaagctgag

SEQ ID NO: 1785199 - DNA, 15 bp, Homo sapiens
ccaagcaagctgaga

SEQ ID NO: 1785200 - DNA, 15 bp, Homo sapiens
caagcaagctgagaa

SEQ ID NO: 1785201 - DNA, 15 bp, Homo sapiens
aagcaagctgagaaa

SEQ ID NO: 1785202 - DNA, 15 bp, Homo sapiens
agcaagctgagaaaa

SEQ ID NO: 1785203 - DNA, 15 bp, Homo sapiens
gcaagctgagaaaaa

SEQ ID NO: 1785204 - DNA, 15 bp, Homo sapiens
caagctgagaaaaat

SEQ ID NO: 1785205 - DNA, 15 bp, Homo sapiens
aagctgagaaaaatc

SEQ ID NO: 1785206 - DNA, 15 bp, Homo sapiens
agctgagaaaaatca

SEQ ID NO: 1785207 - DNA, 15 bp, Homo sapiens
gctgagaaaaatcag

SEQ ID NO: 1785208 - DNA, 15 bp, Homo sapiens
ctgagaaaaatcagt

SEQ ID NO: 1785209 - DNA, 15 bp, Homo sapiens
tgagaaaaatcagtg

SEQ ID NO: 1785210 - DNA, 15 bp, Homo sapiens
gagaaaaatcagtgg

SEQ ID NO: 1785211 - DNA, 15 bp, Homo sapiens
agaaaaatcagtggc

SEQ ID NO: 1785212 - DNA, 15 bp, Homo sapiens
gaaaaatcagtggca

SEQ ID NO: 1785213 - DNA, 15 bp, Homo sapiens
aaaaatcagtggcaa

SEQ ID NO: 1785214 - DNA, 15 bp, Homo sapiens
aaaatcagtggcaaa

SEQ ID NO: 1785215 - DNA, 15 bp, Homo sapiens
aaatcagtggcaaaa

SEQ ID NO: 1785216 - DNA, 15 bp, Homo sapiens
aatcagtggcaaaaa

SEQ ID NO: 1785217 - DNA, 15 bp, Homo sapiens
atcagtggcaaaaat

SEQ ID NO: 1785218 - DNA, 15 bp, Homo sapiens
tcagtggcaaaaata

SEQ ID NO: 1785219 - DNA, 15 bp, Homo sapiens
cagtggcaaaaataa

SEQ ID NO: 1785220 - DNA, 15 bp, Homo sapiens
agtggcaaaaataac

SEQ ID NO: 1785221 - DNA, 15 bp, Homo sapiens
gtggcaaaaataact

SEQ ID NO: 1785222 - DNA, 15 bp, Homo sapiens
tggcaaaaataacta

SEQ ID NO: 1785223 - DNA, 15 bp, Homo sapiens
ggcaaaaataactat

SEQ ID NO: 1785224 - DNA, 15 bp, Homo sapiens
gcaaaaataactatg

SEQ ID NO: 1785225 - DNA, 15 bp, Homo sapiens
caaaaataactatgt

SEQ ID NO: 1785226 - DNA, 15 bp, Homo sapiens
aaaaataactatgtc

SEQ ID NO: 1785227 - DNA, 15 bp, Homo sapiens
aaaataactatgtct

SEQ ID NO: 1785228 - DNA, 15 bp, Homo sapiens
aaataactatgtctg

SEQ ID NO: 1785229 - DNA, 15 bp, Homo sapiens
aataactatgtctgt

SEQ ID NO: 1785230 - DNA, 15 bp, Homo sapiens
ataactatgtctgtt

SEQ ID NO: 1785231 - DNA, 15 bp, Homo sapiens
taactatgtctgttc

SEQ ID NO: 1785232 - DNA, 15 bp, Homo sapiens
aactatgtctgttca

SEQ ID NO: 1785233 - DNA, 15 bp, Homo sapiens
actatgtctgttcaa

SEQ ID NO: 1785234 - DNA, 15 bp, Homo sapiens
ctatgtctgttcaaa

SEQ ID NO: 1785235 - DNA, 15 bp, Homo sapiens
tatgtctgttcaaac

SEQ ID NO: 1785236 - DNA, 15 bp, Homo sapiens
atgtctgttcaaaca

SEQ ID NO: 1785237 - DNA, 15 bp, Homo sapiens
tgtctgttcaaacag

SEQ ID NO: 1785238 - DNA, 15 bp, Homo sapiens
gtctgttcaaacagg

SEQ ID NO: 1785239 - DNA, 15 bp, Homo sapiens
tctgttcaaacaggg

SEQ ID NO: 1785240 - DNA, 15 bp, Homo sapiens
ctgttcaaacaggga

SEQ ID NO: 1785241 - DNA, 15 bp, Homo sapiens
tgttcaaacagggaa

SEQ ID NO: 1785242 - DNA, 15 bp, Homo sapiens
gttcaaacagggaac

SEQ ID NO: 1785243 - DNA, 15 bp, Homo sapiens
ttcaaacagggaact

SEQ ID NO: 1785244 - DNA, 15 bp, Homo sapiens
tcaaacagggaactt

SEQ ID NO: 1785245 - DNA, 15 bp, Homo sapiens
caaacagggaacttg

SEQ ID NO: 1785246 - DNA, 15 bp, Homo sapiens
aaacagggaacttgt

SEQ ID NO: 1785247 - DNA, 15 bp, Homo sapiens
aacagggaacttgta

SEQ ID NO: 1785248 - DNA, 15 bp, Homo sapiens
acagggaacttgtag

SEQ ID NO: 1785249 - DNA, 15 bp, Homo sapiens
cagggaacttgtaga

SEQ ID NO: 1785250 - DNA, 15 bp, Homo sapiens
agggaacttgtagaa

SEQ ID NO: 1785251 - DNA, 15 bp, Homo sapiens
gggaacttgtagaac

SEQ ID NO: 1785252 - DNA, 15 bp, Homo sapiens
ggaacttgtagaaca

SEQ ID NO: 1785253 - DNA, 15 bp, Homo sapiens
gaacttgtagaacag

SEQ ID NO: 1785254 - DNA, 15 bp, Homo sapiens
aacttgtagaacagc

SEQ ID NO: 1785255 - DNA, 15 bp, Homo sapiens
acttgtagaacagca

SEQ ID NO: 1785256 - DNA, 15 bp, Homo sapiens
cttgtagaacagcat

SEQ ID NO: 1785257 - DNA, 15 bp, Homo sapiens
ttgtagaacagcatg

SEQ ID NO: 1785258 - DNA, 15 bp, Homo sapiens
tgtagaacagcatgg

SEQ ID NO: 1785259 - DNA, 15 bp, Homo sapiens
gtagaacagcatggt

SEQ ID NO: 1785260 - DNA, 15 bp, Homo sapiens
tagaacagcatggtc

SEQ ID NO: 1785261 - DNA, 15 bp, Homo sapiens
agaacagcatggtcc

SEQ ID NO: 1785262 - DNA, 15 bp, Homo sapiens
gaacagcatggtccc

SEQ ID NO: 1785263 - DNA, 15 bp, Homo sapiens
aacagcatggtccca

SEQ ID NO: 1785264 - DNA, 15 bp, Homo sapiens
acagcatggtcccag

SEQ ID NO: 1785265 - DNA, 15 bp, Homo sapiens
cagcatggtcccaga

SEQ ID NO: 1785266 - DNA, 15 bp, Homo sapiens
agcatggtcccagag

SEQ ID NO: 1785267 - DNA, 15 bp, Homo sapiens
gcatggtcccagaga

SEQ ID NO: 1785268 - DNA, 15 bp, Homo sapiens
catggtcccagagaa

SEQ ID NO: 1785269 - DNA, 15 bp, Homo sapiens
atggtcccagagaag

SEQ ID NO: 1785270 - DNA, 15 bp, Homo sapiens
tggtcccagagaagg

SEQ ID NO: 1785271 - DNA, 15 bp, Homo sapiens
ggtcccagagaaggg

SEQ ID NO: 1785272 - DNA, 15 bp, Homo sapiens
gtcccagagaagggt

SEQ ID NO: 1785273 - DNA, 15 bp, Homo sapiens
tcccagagaagggta

SEQ ID NO: 1785274 - DNA, 15 bp, Homo sapiens
cccagagaagggtaa

SEQ ID NO: 1785275 - DNA, 15 bp, Homo sapiens
ccagagaagggtaat

SEQ ID NO: 1785276 - DNA, 15 bp, Homo sapiens
cagagaagggtaatg

SEQ ID NO: 1785277 - DNA, 15 bp, Homo sapiens
agagaagggtaatgc

SEQ ID NO: 1785278 - DNA, 15 bp, Homo sapiens
gagaagggtaatgca

SEQ ID NO: 1785279 - DNA, 15 bp, Homo sapiens
agaagggtaatgcaa

SEQ ID NO: 1785280 - DNA, 15 bp, Homo sapiens
gaagggtaatgcaag

SEQ ID NO: 1785281 - DNA, 15 bp, Homo sapiens
aagggtaatgcaagc

SEQ ID NO: 1785282 - DNA, 15 bp, Homo sapiens
agggtaatgcaagcc

SEQ ID NO: 1785283 - DNA, 15 bp, Homo sapiens
gggtaatgcaagcca

SEQ ID NO: 1785284 - DNA, 15 bp, Homo sapiens
ggtaatgcaagccac

SEQ ID NO: 1785285 - DNA, 15 bp, Homo sapiens
gtaatgcaagccaca

SEQ ID NO: 1785286 - DNA, 15 bp, Homo sapiens
taatgcaagccacag

SEQ ID NO: 1785287 - DNA, 15 bp, Homo sapiens
aatgcaagccacaga

SEQ ID NO: 1785288 - DNA, 15 bp, Homo sapiens
atgcaagccacagac

SEQ ID NO: 1785289 - DNA, 15 bp, Homo sapiens
tgcaagccacagaca

SEQ ID NO: 1785290 - DNA, 15 bp, Homo sapiens
gcaagccacagacag

SEQ ID NO: 1785291 - DNA, 15 bp, Homo sapiens
caagccacagacaga

SEQ ID NO: 1785292 - DNA, 15 bp, Homo sapiens
aagccacagacagaa

SEQ ID NO: 1785293 - DNA, 15 bp, Homo sapiens
agccacagacagaag

SEQ ID NO: 1785294 - DNA, 15 bp, Homo sapiens
gccacagacagaagt

SEQ ID NO: 1785295 - DNA, 15 bp, Homo sapiens
ccacagacagaagtg

SEQ ID NO: 1785296 - DNA, 15 bp, Homo sapiens
cacagacagaagtga

SEQ ID NO: 1785297 - DNA, 15 bp, Homo sapiens
acagacagaagtgaa

SEQ ID NO: 1785298 - DNA, 15 bp, Homo sapiens
cagacagaagtgaaa

SEQ ID NO: 1785299 - DNA, 15 bp, Homo sapiens
agacagaagtgaaat

SEQ ID NO: 1785300 - DNA, 15 bp, Homo sapiens
gacagaagtgaaatt

SEQ ID NO: 1785301 - DNA, 15 bp, Homo sapiens
acagaagtgaaattt

SEQ ID NO: 1785302 - DNA, 15 bp, Homo sapiens
cagaagtgaaatttt

SEQ ID NO: 1785303 - DNA, 15 bp, Homo sapiens
agaagtgaaatttta

SEQ ID NO: 1785304 - DNA, 15 bp, Homo sapiens
gaagtgaaattttag

SEQ ID NO: 1785305 - DNA, 15 bp, Homo sapiens
aagtgaaattttagt

SEQ ID NO: 1785306 - DNA, 15 bp, Homo sapiens
agtgaaattttagta

SEQ ID NO: 1785307 - DNA, 15 bp, Homo sapiens
gtgaaattttagtag

SEQ ID NO: 1785308 - DNA, 15 bp, Homo sapiens
tgaaattttagtagc

SEQ ID NO: 1785309 - DNA, 15 bp, Homo sapiens
gaaattttagtagcc

SEQ ID NO: 1785310 - DNA, 15 bp, Homo sapiens
aaattttagtagcca

SEQ ID NO: 1785311 - DNA, 15 bp, Homo sapiens
aattttagtagccaa

SEQ ID NO: 1785312 - DNA, 15 bp, Homo sapiens
attttagtagccaaa

SEQ ID NO: 1785313 - DNA, 15 bp, Homo sapiens
ttttagtagccaaat

SEQ ID NO: 1785314 - DNA, 15 bp, Homo sapiens
tttagtagccaaatt

SEQ ID NO: 1785315 - DNA, 15 bp, Homo sapiens
ttagtagccaaattt

SEQ ID NO: 1785316 - DNA, 15 bp, Homo sapiens
tagtagccaaatttt

SEQ ID NO: 1785317 - DNA, 15 bp, Homo sapiens
agtagccaaattttg

SEQ ID NO: 1785318 - DNA, 15 bp, Homo sapiens
gtagccaaattttga

SEQ ID NO: 1785319 - DNA, 15 bp, Homo sapiens
tagccaaattttgaa

SEQ ID NO: 1785320 - DNA, 15 bp, Homo sapiens
agccaaattttgaaa

SEQ ID NO: 1785321 - DNA, 15 bp, Homo sapiens
gccaaattttgaaaa

SEQ ID NO: 1785322 - DNA, 15 bp, Homo sapiens
ccaaattttgaaaag

SEQ ID NO: 1785323 - DNA, 15 bp, Homo sapiens
caaattttgaaaagt

SEQ ID NO: 1785324 - DNA, 15 bp, Homo sapiens
aaattttgaaaagta

SEQ ID NO: 1785325 - DNA, 15 bp, Homo sapiens
aattttgaaaagtaa

SEQ ID NO: 1785326 - DNA, 15 bp, Homo sapiens
attttgaaaagtaaa

SEQ ID NO: 1785327 - DNA, 15 bp, Homo sapiens
ttttgaaaagtaaaa

SEQ ID NO: 1785328 - DNA, 15 bp, Homo sapiens
tttgaaaagtaaaaa

SEQ ID NO: 1785329 - DNA, 15 bp, Homo sapiens
ttgaaaagtaaaaag

SEQ ID NO: 1785330 - DNA, 15 bp, Homo sapiens
tgaaaagtaaaaaga

SEQ ID NO: 1785331 - DNA, 15 bp, Homo sapiens
aaagtaaaaagaaac

SEQ ID NO: 1785332 - DNA, 15 bp, Homo sapiens
aagtaaaaagaaaca

SEQ ID NO: 1785333 - DNA, 15 bp, Homo sapiens
agtaaaaagaaacag

SEQ ID NO: 1785334 - DNA, 15 bp, Homo sapiens
gtaaaaagaaacagg

SEQ ID NO: 1785335 - DNA, 15 bp, Homo sapiens
taaaaagaaacaggt

SEQ ID NO: 1785336 - DNA, 15 bp, Homo sapiens
aaaagaaacaggtga

SEQ ID NO: 1785337 - DNA, 15 bp, Homo sapiens
aaagaaacaggtgaa

SEQ ID NO: 1785338 - DNA, 15 bp, Homo sapiens
aagaaacaggtgaaa

SEQ ID NO: 1785339 - DNA, 15 bp, Homo sapiens
agaaacaggtgaaat

SEQ ID NO: 1785340 - DNA, 15 bp, Homo sapiens
gaaacaggtgaaatt

SEQ ID NO: 1785341 - DNA, 15 bp, Homo sapiens
aaacaggtgaaatta

SEQ ID NO: 1785342 - DNA, 15 bp, Homo sapiens
aacaggtgaaattaa

SEQ ID NO: 1785343 - DNA, 15 bp, Homo sapiens
acaggtgaaattaat

SEQ ID NO: 1785344 - DNA, 15 bp, Homo sapiens
caggtgaaattaatt

SEQ ID NO: 1785345 - DNA, 15 bp, Homo sapiens
aggtgaaattaattt

SEQ ID NO: 1785346 - DNA, 15 bp, Homo sapiens
ggtgaaattaatttt

SEQ ID NO: 1785347 - DNA, 15 bp, Homo sapiens
attaattttaataac

SEQ ID NO: 1785348 - DNA, 15 bp, Homo sapiens
ttaattttaataaca

SEQ ID NO: 1785349 - DNA, 15 bp, Homo sapiens
taattttaataacat

SEQ ID NO: 1785350 - DNA, 15 bp, Homo sapiens
aattttaataacata

SEQ ID NO: 1785351 - DNA, 15 bp, Homo sapiens
attttaataacatat

SEQ ID NO: 1785352 - DNA, 15 bp, Homo sapiens
ttttaataacatatt

SEQ ID NO: 1785353 - DNA, 15 bp, Homo sapiens
tttaataacatatta

SEQ ID NO: 1785354 - DNA, 15 bp, Homo sapiens
ttaataacatattat

SEQ ID NO: 1785355 - DNA, 15 bp, Homo sapiens
taataacatattatt

SEQ ID NO: 1785356 - DNA, 15 bp, Homo sapiens
aataacatattattt

SEQ ID NO: 1785357 - DNA, 15 bp, Homo sapiens
ataacatattattta

SEQ ID NO: 1785358 - DNA, 15 bp, Homo sapiens
taacatattatttac

SEQ ID NO: 1785359 - DNA, 15 bp, Homo sapiens
aacatattatttaca

SEQ ID NO: 1785360 - DNA, 15 bp, Homo sapiens
acatattatttacag

SEQ ID NO: 1785361 - DNA, 15 bp, Homo sapiens
catattatttacagc

SEQ ID NO: 1785362 - DNA, 15 bp, Homo sapiens
atattatttacagcc

SEQ ID NO: 1785363 - DNA, 15 bp, Homo sapiens
tattatttacagcca

SEQ ID NO: 1785364 - DNA, 15 bp, Homo sapiens
attatttacagccaa

SEQ ID NO: 1785365 - DNA, 15 bp, Homo sapiens
ttatttacagccaaa

SEQ ID NO: 1785366 - DNA, 15 bp, Homo sapiens
tatttacagccaaaa

SEQ ID NO: 1785367 - DNA, 15 bp, Homo sapiens
atttacagccaaaaa

SEQ ID NO: 1785368 - DNA, 15 bp, Homo sapiens
tttacagccaaaaat

SEQ ID NO: 1785369 - DNA, 15 bp, Homo sapiens
ttacagccaaaaata

SEQ ID NO: 1785370 - DNA, 15 bp, Homo sapiens
tacagccaaaaatac

SEQ ID NO: 1785371 - DNA, 15 bp, Homo sapiens
acagccaaaaatacc

SEQ ID NO: 1785372 - DNA, 15 bp, Homo sapiens
cagccaaaaatacca

SEQ ID NO: 1785373 - DNA, 15 bp, Homo sapiens
agccaaaaataccat

SEQ ID NO: 1785374 - DNA, 15 bp, Homo sapiens
gccaaaaataccatt

SEQ ID NO: 1785375 - DNA, 15 bp, Homo sapiens
ccaaaaataccattt

SEQ ID NO: 1785376 - DNA, 15 bp, Homo sapiens
caaaaataccatttc

SEQ ID NO: 1785377 - DNA, 15 bp, Homo sapiens
aaaaataccatttca

SEQ ID NO: 1785378 - DNA, 15 bp, Homo sapiens
aaaataccatttcaa

SEQ ID NO: 1785379 - DNA, 15 bp, Homo sapiens
aaataccatttcaac

SEQ ID NO: 1785380 - DNA, 15 bp, Homo sapiens
aataccatttcaacc

SEQ ID NO: 1785381 - DNA, 15 bp, Homo sapiens
ataccatttcaacct

SEQ ID NO: 1785382 - DNA, 15 bp, Homo sapiens
taccatttcaacctg

SEQ ID NO: 1785383 - DNA, 15 bp, Homo sapiens
accatttcaacctgt

SEQ ID NO: 1785384 - DNA, 15 bp, Homo sapiens
ccatttcaacctgta

SEQ ID NO: 1785385 - DNA, 15 bp, Homo sapiens
catttcaacctgtaa

SEQ ID NO: 1785386 - DNA, 15 bp, Homo sapiens
atttcaacctgtaat

SEQ ID NO: 1785387 - DNA, 15 bp, Homo sapiens
tttcaacctgtaatc

SEQ ID NO: 1785388 - DNA, 15 bp, Homo sapiens
ttcaacctgtaatca

SEQ ID NO: 1785389 - DNA, 15 bp, Homo sapiens
tcaacctgtaatcaa

SEQ ID NO: 1785390 - DNA, 15 bp, Homo sapiens
caacctgtaatcaat

SEQ ID NO: 1785391 - DNA, 15 bp, Homo sapiens
aacctgtaatcaata

SEQ ID NO: 1785392 - DNA, 15 bp, Homo sapiens
acctgtaatcaatac

SEQ ID NO: 1785393 - DNA, 15 bp, Homo sapiens
cctgtaatcaatact

SEQ ID NO: 1785394 - DNA, 15 bp, Homo sapiens
ctgtaatcaatactt

SEQ ID NO: 1785395 - DNA, 15 bp, Homo sapiens
tgtaatcaatacttt

SEQ ID NO: 1785396 - DNA, 15 bp, Homo sapiens
gtaatcaatactttt

SEQ ID NO: 1785397 - DNA, 15 bp, Homo sapiens
taatcaatacttttt

SEQ ID NO: 1785398 - DNA, 15 bp, Homo sapiens
aatcaatactttttg

SEQ ID NO: 1785399 - DNA, 15 bp, Homo sapiens
atcaatactttttga

SEQ ID NO: 1785400 - DNA, 15 bp, Homo sapiens
tcaatactttttgaa

SEQ ID NO: 1785401 - DNA, 15 bp, Homo sapiens
caatactttttgaaa

SEQ ID NO: 1785402 - DNA, 15 bp, Homo sapiens
aatactttttgaaat

SEQ ID NO: 1785403 - DNA, 15 bp, Homo sapiens
atactttttgaaatt

SEQ ID NO: 1785404 - DNA, 15 bp, Homo sapiens
tactttttgaaattt

SEQ ID NO: 1785405 - DNA, 15 bp, Homo sapiens
actttttgaaattta

SEQ ID NO: 1785406 - DNA, 15 bp, Homo sapiens
ctttttgaaatttat

SEQ ID NO: 1785407 - DNA, 15 bp, Homo sapiens
tttttgaaatttatt

SEQ ID NO: 1785408 - DNA, 15 bp, Homo sapiens
ttttgaaatttattt

SEQ ID NO: 1785409 - DNA, 15 bp, Homo sapiens
tttgaaatttattta

SEQ ID NO: 1785410 - DNA, 15 bp, Homo sapiens
ttgaaatttatttat

SEQ ID NO: 1785411 - DNA, 15 bp, Homo sapiens
tgaaatttatttatt

SEQ ID NO: 1785412 - DNA, 15 bp, Homo sapiens
gaaatttatttattt

SEQ ID NO: 1785413 - DNA, 15 bp, Homo sapiens
aaatttatttattta

SEQ ID NO: 1785414 - DNA, 15 bp, Homo sapiens
aatttatttatttat

SEQ ID NO: 1785415 - DNA, 15 bp, Homo sapiens
tatttatttatttgg

SEQ ID NO: 1785416 - DNA, 15 bp, Homo sapiens
atttatttatttggt

SEQ ID NO: 1785417 - DNA, 15 bp, Homo sapiens
tttatttatttggtt

SEQ ID NO: 1785418 - DNA, 15 bp, Homo sapiens
ttatttatttggttg

SEQ ID NO: 1785419 - DNA, 15 bp, Homo sapiens
tatttatttggttgg

SEQ ID NO: 1785420 - DNA, 15 bp, Homo sapiens
atttatttggttggg

SEQ ID NO: 1785421 - DNA, 15 bp, Homo sapiens
tttatttggttggga

SEQ ID NO: 1785422 - DNA, 15 bp, Homo sapiens
ttatttggttgggag

SEQ ID NO: 1785423 - DNA, 15 bp, Homo sapiens
tatttggttgggaga

SEQ ID NO: 1785424 - DNA, 15 bp, Homo sapiens
atttggttgggagag

SEQ ID NO: 1785425 - DNA, 15 bp, Homo sapiens
tttggttgggagaga

SEQ ID NO: 1785426 - DNA, 15 bp, Homo sapiens
ttggttgggagagac

SEQ ID NO: 1785427 - DNA, 15 bp, Homo sapiens
tggttgggagagaca

SEQ ID NO: 1785428 - DNA, 15 bp, Homo sapiens
ggttgggagagacag

SEQ ID NO: 1785429 - DNA, 15 bp, Homo sapiens
gttgggagagacaga

SEQ ID NO: 1785430 - DNA, 15 bp, Homo sapiens
ttgggagagacagag

SEQ ID NO: 1785431 - DNA, 15 bp, Homo sapiens
tgggagagacagagt

SEQ ID NO: 1785432 - DNA, 15 bp, Homo sapiens
gggagagacagagtc

SEQ ID NO: 1785433 - DNA, 15 bp, Homo sapiens
ggagagacagagtct

SEQ ID NO: 1785434 - DNA, 15 bp, Homo sapiens
gagagacagagtctc

SEQ ID NO: 1785435 - DNA, 15 bp, Homo sapiens
agagacagagtctct

SEQ ID NO: 1785436 - DNA, 15 bp, Homo sapiens
gagacagagtctctt

SEQ ID NO: 1785437 - DNA, 15 bp, Homo sapiens
agacagagtctcttt

SEQ ID NO: 1785438 - DNA, 15 bp, Homo sapiens
gacagagtctctttt

SEQ ID NO: 1785439 - DNA, 15 bp, Homo sapiens
acagagtctcttttt

SEQ ID NO: 1785440 - DNA, 15 bp, Homo sapiens
cagagtctctttttg

SEQ ID NO: 1785441 - DNA, 15 bp, Homo sapiens
agagtctctttttgt

SEQ ID NO: 1785442 - DNA, 15 bp, Homo sapiens
gagtctctttttgtc

SEQ ID NO: 1785443 - DNA, 15 bp, Homo sapiens
agtctctttttgtcc

SEQ ID NO: 1785444 - DNA, 15 bp, Homo sapiens
gtctctttttgtcct

SEQ ID NO: 1785445 - DNA, 15 bp, Homo sapiens
tctctttttgtcctt

SEQ ID NO: 1785446 - DNA, 15 bp, Homo sapiens
tctttttgtccttca

SEQ ID NO: 1785447 - DNA, 15 bp, Homo sapiens
ctttttgtccttcag

SEQ ID NO: 1785448 - DNA, 15 bp, Homo sapiens
tttttgtccttcagg

SEQ ID NO: 1785449 - DNA, 15 bp, Homo sapiens
ttttgtccttcaggc

SEQ ID NO: 1785450 - DNA, 15 bp, Homo sapiens
tttgtccttcaggct

SEQ ID NO: 1785451 - DNA, 15 bp, Homo sapiens
ttgtccttcaggctg

SEQ ID NO: 1785452 - DNA, 15 bp, Homo sapiens
tgtccttcaggctgg

SEQ ID NO: 1785453 - DNA, 15 bp, Homo sapiens
gtccttcaggctgga

SEQ ID NO: 1785454 - DNA, 15 bp, Homo sapiens
tccttcaggctggag

SEQ ID NO: 1785455 - DNA, 15 bp, Homo sapiens
ccttcaggctggagt

SEQ ID NO: 1785456 - DNA, 15 bp, Homo sapiens
cttcaggctggagtg

SEQ ID NO: 1785457 - DNA, 15 bp, Homo sapiens
ttcaggctggagtgc

SEQ ID NO: 1785458 - DNA, 15 bp, Homo sapiens
gcaatggtgcaatca

SEQ ID NO: 1785459 - DNA, 15 bp, Homo sapiens
caatggtgcaatcat

SEQ ID NO: 1785460 - DNA, 15 bp, Homo sapiens
aatggtgcaatcatg

SEQ ID NO: 1785461 - DNA, 15 bp, Homo sapiens
atggtgcaatcatgg

SEQ ID NO: 1785462 - DNA, 15 bp, Homo sapiens
tggtgcaatcatggc

SEQ ID NO: 1785463 - DNA, 15 bp, Homo sapiens
ggtgcaatcatggct

SEQ ID NO: 1785464 - DNA, 15 bp, Homo sapiens
gtgcaatcatggctc

SEQ ID NO: 1785465 - DNA, 15 bp, Homo sapiens
tgcaatcatggctcg

SEQ ID NO: 1785466 - DNA, 15 bp, Homo sapiens
gcaatcatggctcgc

SEQ ID NO: 1785467 - DNA, 15 bp, Homo sapiens
caatcatggctcgct

SEQ ID NO: 1785468 - DNA, 15 bp, Homo sapiens
aatcatggctcgctg

SEQ ID NO: 1785469 - DNA, 15 bp, Homo sapiens
atcatggctcgctgc

SEQ ID NO: 1785470 - DNA, 15 bp, Homo sapiens
tcatggctcgctgca

SEQ ID NO: 1785471 - DNA, 15 bp, Homo sapiens
catggctcgctgcag

SEQ ID NO: 1785472 - DNA, 15 bp, Homo sapiens
atggctcgctgcagc

SEQ ID NO: 1785473 - DNA, 15 bp, Homo sapiens
tggctcgctgcagcc

SEQ ID NO: 1785474 - DNA, 15 bp, Homo sapiens
ggctcgctgcagcct

SEQ ID NO: 1785475 - DNA, 15 bp, Homo sapiens
gctcgctgcagcctc

SEQ ID NO: 1785476 - DNA, 15 bp, Homo sapiens
ctcgctgcagcctcg

SEQ ID NO: 1785477 - DNA, 15 bp, Homo sapiens
tcgctgcagcctcga

SEQ ID NO: 1785478 - DNA, 15 bp, Homo sapiens
cgctgcagcctcgac

SEQ ID NO: 1785479 - DNA, 15 bp, Homo sapiens
gctgcagcctcgacc

SEQ ID NO: 1785480 - DNA, 15 bp, Homo sapiens
ctcgacctcctgggt

SEQ ID NO: 1785481 - DNA, 15 bp, Homo sapiens
tcgacctcctgggtt

SEQ ID NO: 1785482 - DNA, 15 bp, Homo sapiens
cgacctcctgggttc

SEQ ID NO: 1785483 - DNA, 15 bp, Homo sapiens
gacctcctgggttca

SEQ ID NO: 1785484 - DNA, 15 bp, Homo sapiens
tcctgggttcaagag

SEQ ID NO: 1785485 - DNA, 15 bp, Homo sapiens
cctgggttcaagaga

SEQ ID NO: 1785486 - DNA, 15 bp, Homo sapiens
ctgggttcaagagat

SEQ ID NO: 1785487 - DNA, 15 bp, Homo sapiens
tgggttcaagagatc

SEQ ID NO: 1785488 - DNA, 15 bp, Homo sapiens
gggttcaagagatcc

SEQ ID NO: 1785489 - DNA, 15 bp, Homo sapiens
ggttcaagagatcct

SEQ ID NO: 1785490 - DNA, 15 bp, Homo sapiens
gttcaagagatcctc

SEQ ID NO: 1785491 - DNA, 15 bp, Homo sapiens
ttcaagagatcctcc

SEQ ID NO: 1785492 - DNA, 15 bp, Homo sapiens
tcaagagatcctcct

SEQ ID NO: 1785493 - DNA, 15 bp, Homo sapiens
caagagatcctcctg

SEQ ID NO: 1785494 - DNA, 15 bp, Homo sapiens
aagagatcctcctgc

SEQ ID NO: 1785495 - DNA, 15 bp, Homo sapiens
agagatcctcctgcc

SEQ ID NO: 1785496 - DNA, 15 bp, Homo sapiens
gagatcctcctgcct

SEQ ID NO: 1785497 - DNA, 15 bp, Homo sapiens
agatcctcctgcctc

SEQ ID NO: 1785498 - DNA, 15 bp, Homo sapiens
tgcctcagcctcctt

SEQ ID NO: 1785499 - DNA, 15 bp, Homo sapiens
gcctcagcctcctta

SEQ ID NO: 1785500 - DNA, 15 bp, Homo sapiens
cctcagcctccttag

SEQ ID NO: 1785501 - DNA, 15 bp, Homo sapiens
ctcagcctccttagc

SEQ ID NO: 1785502 - DNA, 15 bp, Homo sapiens
tcagcctccttagca

SEQ ID NO: 1785503 - DNA, 15 bp, Homo sapiens
cagcctccttagcag

SEQ ID NO: 1785504 - DNA, 15 bp, Homo sapiens
agcctccttagcagc

SEQ ID NO: 1785505 - DNA, 15 bp, Homo sapiens
gcctccttagcagct

SEQ ID NO: 1785506 - DNA, 15 bp, Homo sapiens
cctccttagcagctg

SEQ ID NO: 1785507 - DNA, 15 bp, Homo sapiens
ctccttagcagctgg

SEQ ID NO: 1785508 - DNA, 15 bp, Homo sapiens
tccttagcagctggg

SEQ ID NO: 1785509 - DNA, 15 bp, Homo sapiens
ccttagcagctggga

SEQ ID NO: 1785510 - DNA, 15 bp, Homo sapiens
cttagcagctgggag

SEQ ID NO: 1785511 - DNA, 15 bp, Homo sapiens
ttagcagctgggagt

SEQ ID NO: 1785512 - DNA, 15 bp, Homo sapiens
tagcagctgggagtg

SEQ ID NO: 1785513 - DNA, 15 bp, Homo sapiens
agcagctgggagtgc

SEQ ID NO: 1785514 - DNA, 15 bp, Homo sapiens
gcagctgggagtgca

SEQ ID NO: 1785515 - DNA, 15 bp, Homo sapiens
cagctgggagtgcag

SEQ ID NO: 1785516 - DNA, 15 bp, Homo sapiens
agctgggagtgcagg

SEQ ID NO: 1785517 - DNA, 15 bp, Homo sapiens
gctgggagtgcaggc

SEQ ID NO: 1785518 - DNA, 15 bp, Homo sapiens
ctgggagtgcaggcg

SEQ ID NO: 1785519 - DNA, 15 bp, Homo sapiens
tgggagtgcaggcgc

SEQ ID NO: 1785520 - DNA, 15 bp, Homo sapiens
gggagtgcaggcgca

SEQ ID NO: 1785521 - DNA, 15 bp, Homo sapiens
ggagtgcaggcgcac

SEQ ID NO: 1785522 - DNA, 15 bp, Homo sapiens
gagtgcaggcgcaca

SEQ ID NO: 1785523 - DNA, 15 bp, Homo sapiens
agtgcaggcgcacat

SEQ ID NO: 1785524 - DNA, 15 bp, Homo sapiens
gtgcaggcgcacatc

SEQ ID NO: 1785525 - DNA, 15 bp, Homo sapiens
tgcaggcgcacatca

SEQ ID NO: 1785526 - DNA, 15 bp, Homo sapiens
gcaggcgcacatcac

SEQ ID NO: 1785527 - DNA, 15 bp, Homo sapiens
caggcgcacatcacc

SEQ ID NO: 1785528 - DNA, 15 bp, Homo sapiens
aggcgcacatcacca

SEQ ID NO: 1785529 - DNA, 15 bp, Homo sapiens
ggcgcacatcaccac

SEQ ID NO: 1785530 - DNA, 15 bp, Homo sapiens
gcgcacatcaccacg

SEQ ID NO: 1785531 - DNA, 15 bp, Homo sapiens
cgcacatcaccacgt

SEQ ID NO: 1785532 - DNA, 15 bp, Homo sapiens
gcacatcaccacgtc

SEQ ID NO: 1785533 - DNA, 15 bp, Homo sapiens
cacatcaccacgtcc

SEQ ID NO: 1785534 - DNA, 15 bp, Homo sapiens
acatcaccacgtcca

SEQ ID NO: 1785535 - DNA, 15 bp, Homo sapiens
catcaccacgtccaa

SEQ ID NO: 1785536 - DNA, 15 bp, Homo sapiens
atcaccacgtccaac

SEQ ID NO: 1785537 - DNA, 15 bp, Homo sapiens
tcaccacgtccaact

SEQ ID NO: 1785538 - DNA, 15 bp, Homo sapiens
caccacgtccaacta

SEQ ID NO: 1785539 - DNA, 15 bp, Homo sapiens
accacgtccaactaa

SEQ ID NO: 1785540 - DNA, 15 bp, Homo sapiens
ccacgtccaactaat

SEQ ID NO: 1785541 - DNA, 15 bp, Homo sapiens
cacgtccaactaatt

SEQ ID NO: 1785542 - DNA, 15 bp, Homo sapiens
acgtccaactaattt

SEQ ID NO: 1785543 - DNA, 15 bp, Homo sapiens
cgtccaactaatttt

SEQ ID NO: 1785544 - DNA, 15 bp, Homo sapiens
gtccaactaattttt

SEQ ID NO: 1785545 - DNA, 15 bp, Homo sapiens
tccaactaatttttg

SEQ ID NO: 1785546 - DNA, 15 bp, Homo sapiens
ccaactaatttttgt

SEQ ID NO: 1785547 - DNA, 15 bp, Homo sapiens
caactaatttttgta

SEQ ID NO: 1785548 - DNA, 15 bp, Homo sapiens
aactaatttttgtat

SEQ ID NO: 1785549 - DNA, 15 bp, Homo sapiens
actaatttttgtatt

SEQ ID NO: 1785550 - DNA, 15 bp, Homo sapiens
tttgtattttttata

SEQ ID NO: 1785551 - DNA, 15 bp, Homo sapiens
tattttttatagaga

SEQ ID NO: 1785552 - DNA, 15 bp, Homo sapiens
attttttatagagac

SEQ ID NO: 1785553 - DNA, 15 bp, Homo sapiens
ttttttatagagact

SEQ ID NO: 1785554 - DNA, 15 bp, Homo sapiens
tttttatagagactg

SEQ ID NO: 1785555 - DNA, 15 bp, Homo sapiens
ttttatagagactga

SEQ ID NO: 1785556 - DNA, 15 bp, Homo sapiens
tttatagagactgag

SEQ ID NO: 1785557 - DNA, 15 bp, Homo sapiens
ttatagagactgagt

SEQ ID NO: 1785558 - DNA, 15 bp, Homo sapiens
tatagagactgagtc

SEQ ID NO: 1785559 - DNA, 15 bp, Homo sapiens
atagagactgagtct

SEQ ID NO: 1785560 - DNA, 15 bp, Homo sapiens
tagagactgagtctc

SEQ ID NO: 1785561 - DNA, 15 bp, Homo sapiens
agagactgagtctcg

SEQ ID NO: 1785562 - DNA, 15 bp, Homo sapiens
gagactgagtctcgc

SEQ ID NO: 1785563 - DNA, 15 bp, Homo sapiens
agactgagtctcgct

SEQ ID NO: 1785564 - DNA, 15 bp, Homo sapiens
gactgagtctcgcta

SEQ ID NO: 1785565 - DNA, 15 bp, Homo sapiens
actgagtctcgctat

SEQ ID NO: 1785566 - DNA, 15 bp, Homo sapiens
ctgagtctcgctatg

SEQ ID NO: 1785567 - DNA, 15 bp, Homo sapiens
tgagtctcgctatgt

SEQ ID NO: 1785568 - DNA, 15 bp, Homo sapiens
gagtctcgctatgtt

SEQ ID NO: 1785569 - DNA, 15 bp, Homo sapiens
agtctcgctatgttg

SEQ ID NO: 1785570 - DNA, 15 bp, Homo sapiens
gtctcgctatgttgc

SEQ ID NO: 1785571 - DNA, 15 bp, Homo sapiens
tctcgctatgttgcc

SEQ ID NO: 1785572 - DNA, 15 bp, Homo sapiens
ctcgctatgttgccc

SEQ ID NO: 1785573 - DNA, 15 bp, Homo sapiens
gctggtctcaaactt

SEQ ID NO: 1785574 - DNA, 15 bp, Homo sapiens
ctggtctcaaacttc

SEQ ID NO: 1785575 - DNA, 15 bp, Homo sapiens
tggtctcaaacttct

SEQ ID NO: 1785576 - DNA, 15 bp, Homo sapiens
ggtctcaaacttcta

SEQ ID NO: 1785577 - DNA, 15 bp, Homo sapiens
gtctcaaacttctag

SEQ ID NO: 1785578 - DNA, 15 bp, Homo sapiens
tctcaaacttctaga

SEQ ID NO: 1785579 - DNA, 15 bp, Homo sapiens
ctcaaacttctagac

SEQ ID NO: 1785580 - DNA, 15 bp, Homo sapiens
tcaaacttctagact

SEQ ID NO: 1785581 - DNA, 15 bp, Homo sapiens
caaacttctagactc

SEQ ID NO: 1785582 - DNA, 15 bp, Homo sapiens
aaacttctagactca

SEQ ID NO: 1785583 - DNA, 15 bp, Homo sapiens
aacttctagactcaa

SEQ ID NO: 1785584 - DNA, 15 bp, Homo sapiens
acttctagactcaag

SEQ ID NO: 1785585 - DNA, 15 bp, Homo sapiens
cttctagactcaagc

SEQ ID NO: 1785586 - DNA, 15 bp, Homo sapiens
ttctagactcaagca

SEQ ID NO: 1785587 - DNA, 15 bp, Homo sapiens
tctagactcaagcaa

SEQ ID NO: 1785588 - DNA, 15 bp, Homo sapiens
ctagactcaagcaat

SEQ ID NO: 1785589 - DNA, 15 bp, Homo sapiens
tagactcaagcaatc

SEQ ID NO: 1785590 - DNA, 15 bp, Homo sapiens
agactcaagcaatcc

SEQ ID NO: 1785591 - DNA, 15 bp, Homo sapiens
gactcaagcaatcct

SEQ ID NO: 1785592 - DNA, 15 bp, Homo sapiens
actcaagcaatcctc

SEQ ID NO: 1785593 - DNA, 15 bp, Homo sapiens
aagcaatcctcccat

SEQ ID NO: 1785594 - DNA, 15 bp, Homo sapiens
agcaatcctcccatc

SEQ ID NO: 1785595 - DNA, 15 bp, Homo sapiens
gcaatcctcccatct

SEQ ID NO: 1785596 - DNA, 15 bp, Homo sapiens
caatcctcccatctt

SEQ ID NO: 1785597 - DNA, 15 bp, Homo sapiens
aatcctcccatcttg

SEQ ID NO: 1785598 - DNA, 15 bp, Homo sapiens
atcctcccatcttgg

SEQ ID NO: 1785599 - DNA, 15 bp, Homo sapiens
tcctcccatcttggc

SEQ ID NO: 1785600 - DNA, 15 bp, Homo sapiens
cctcccatcttggcc

SEQ ID NO: 1785601 - DNA, 15 bp, Homo sapiens
ctcccatcttggcct

SEQ ID NO: 1785602 - DNA, 15 bp, Homo sapiens
tcccatcttggcctt

SEQ ID NO: 1785603 - DNA, 15 bp, Homo sapiens
cccatcttggccttc

SEQ ID NO: 1785604 - DNA, 15 bp, Homo sapiens
ccatcttggccttcc

SEQ ID NO: 1785605 - DNA, 15 bp, Homo sapiens
catcttggccttcca

SEQ ID NO: 1785606 - DNA, 15 bp, Homo sapiens
atcttggccttccaa

SEQ ID NO: 1785607 - DNA, 15 bp, Homo sapiens
tcttggccttccaaa

SEQ ID NO: 1785608 - DNA, 15 bp, Homo sapiens
cttggccttccaaag

SEQ ID NO: 1785609 - DNA, 15 bp, Homo sapiens
ttggccttccaaagt

SEQ ID NO: 1785610 - DNA, 15 bp, Homo sapiens
tggccttccaaagtg

SEQ ID NO: 1785611 - DNA, 15 bp, Homo sapiens
ggccttccaaagtgc

SEQ ID NO: 1785612 - DNA, 15 bp, Homo sapiens
gccttccaaagtgct

SEQ ID NO: 1785613 - DNA, 15 bp, Homo sapiens
ctgggattacaggta

SEQ ID NO: 1785614 - DNA, 15 bp, Homo sapiens
tgggattacaggtat

SEQ ID NO: 1785615 - DNA, 15 bp, Homo sapiens
gggattacaggtatg

SEQ ID NO: 1785616 - DNA, 15 bp, Homo sapiens
caggtatgagccacc

SEQ ID NO: 1785617 - DNA, 15 bp, Homo sapiens
aggtatgagccaccc

SEQ ID NO: 1785618 - DNA, 15 bp, Homo sapiens
ggtatgagccaccct

SEQ ID NO: 1785619 - DNA, 15 bp, Homo sapiens
gtatgagccaccctg

SEQ ID NO: 1785620 - DNA, 15 bp, Homo sapiens
tatgagccaccctgc

SEQ ID NO: 1785621 - DNA, 15 bp, Homo sapiens
atgagccaccctgcc

SEQ ID NO: 1785622 - DNA, 15 bp, Homo sapiens
gagccaccctgcccg

SEQ ID NO: 1785623 - DNA, 15 bp, Homo sapiens
agccaccctgcccga

SEQ ID NO: 1785624 - DNA, 15 bp, Homo sapiens
gccaccctgcccgac

SEQ ID NO: 1785625 - DNA, 15 bp, Homo sapiens
ccaccctgcccgacc

SEQ ID NO: 1785626 - DNA, 15 bp, Homo sapiens
caccctgcccgacct

SEQ ID NO: 1785627 - DNA, 15 bp, Homo sapiens
accctgcccgaccta

SEQ ID NO: 1785628 - DNA, 15 bp, Homo sapiens
ccctgcccgacctaa

SEQ ID NO: 1785629 - DNA, 15 bp, Homo sapiens
cctgcccgacctaaa

SEQ ID NO: 1785630 - DNA, 15 bp, Homo sapiens
ctgcccgacctaaaa

SEQ ID NO: 1785631 - DNA, 15 bp, Homo sapiens
tgcccgacctaaaaa

SEQ ID NO: 1785632 - DNA, 15 bp, Homo sapiens
gcccgacctaaaaat

SEQ ID NO: 1785633 - DNA, 15 bp, Homo sapiens
cccgacctaaaaatt

SEQ ID NO: 1785634 - DNA, 15 bp, Homo sapiens
ccgacctaaaaattc

SEQ ID NO: 1785635 - DNA, 15 bp, Homo sapiens
cgacctaaaaattct

SEQ ID NO: 1785636 - DNA, 15 bp, Homo sapiens
gacctaaaaattctt

SEQ ID NO: 1785637 - DNA, 15 bp, Homo sapiens
acctaaaaattctta

SEQ ID NO: 1785638 - DNA, 15 bp, Homo sapiens
cctaaaaattcttaa

SEQ ID NO: 1785639 - DNA, 15 bp, Homo sapiens
ctaaaaattcttaat

SEQ ID NO: 1785640 - DNA, 15 bp, Homo sapiens
taaaaattcttaatg

SEQ ID NO: 1785641 - DNA, 15 bp, Homo sapiens
aaaaattcttaatgg

SEQ ID NO: 1785642 - DNA, 15 bp, Homo sapiens
aaaattcttaatggg

SEQ ID NO: 1785643 - DNA, 15 bp, Homo sapiens
aaattcttaatgggc

SEQ ID NO: 1785644 - DNA, 15 bp, Homo sapiens
aattcttaatgggct

SEQ ID NO: 1785645 - DNA, 15 bp, Homo sapiens
attcttaatgggctt

SEQ ID NO: 1785646 - DNA, 15 bp, Homo sapiens
ttcttaatgggcttt

SEQ ID NO: 1785647 - DNA, 15 bp, Homo sapiens
tcttaatgggctttt

SEQ ID NO: 1785648 - DNA, 15 bp, Homo sapiens
cttaatgggcttttt

SEQ ID NO: 1785649 - DNA, 15 bp, Homo sapiens
ttaatgggctttttc

SEQ ID NO: 1785650 - DNA, 15 bp, Homo sapiens
taatgggctttttca

SEQ ID NO: 1785651 - DNA, 15 bp, Homo sapiens
aatgggctttttcac

SEQ ID NO: 1785652 - DNA, 15 bp, Homo sapiens
atgggctttttcacg

SEQ ID NO: 1785653 - DNA, 15 bp, Homo sapiens
tgggctttttcacgt

SEQ ID NO: 1785654 - DNA, 15 bp, Homo sapiens
gggctttttcacgtt

SEQ ID NO: 1785655 - DNA, 15 bp, Homo sapiens
ggctttttcacgttc

SEQ ID NO: 1785656 - DNA, 15 bp, Homo sapiens
gctttttcacgttct

SEQ ID NO: 1785657 - DNA, 15 bp, Homo sapiens
ctttttcacgttctg

SEQ ID NO: 1785658 - DNA, 15 bp, Homo sapiens
tttttcacgttctgt

SEQ ID NO: 1785659 - DNA, 15 bp, Homo sapiens
ttttcacgttctgtt

SEQ ID NO: 1785660 - DNA, 15 bp, Homo sapiens
tttcacgttctgttt

SEQ ID NO: 1785661 - DNA, 15 bp, Homo sapiens
ttcacgttctgtttt

SEQ ID NO: 1785662 - DNA, 15 bp, Homo sapiens
tcacgttctgttttc

SEQ ID NO: 1785663 - DNA, 15 bp, Homo sapiens
cacgttctgttttcc

SEQ ID NO: 1785664 - DNA, 15 bp, Homo sapiens
acgttctgttttcct

SEQ ID NO: 1785665 - DNA, 15 bp, Homo sapiens
cgttctgttttcctc

SEQ ID NO: 1785666 - DNA, 15 bp, Homo sapiens
gttctgttttcctca

SEQ ID NO: 1785667 - DNA, 15 bp, Homo sapiens
ttctgttttcctcag

SEQ ID NO: 1785668 - DNA, 15 bp, Homo sapiens
tctgttttcctcaga

SEQ ID NO: 1785669 - DNA, 15 bp, Homo sapiens
ctgttttcctcagac

SEQ ID NO: 1785670 - DNA, 15 bp, Homo sapiens
tgttttcctcagact

SEQ ID NO: 1785671 - DNA, 15 bp, Homo sapiens
gttttcctcagacta

SEQ ID NO: 1785672 - DNA, 15 bp, Homo sapiens
ttttcctcagactaa

SEQ ID NO: 1785673 - DNA, 15 bp, Homo sapiens
tttcctcagactaag

SEQ ID NO: 1785674 - DNA, 15 bp, Homo sapiens
ttcctcagactaaga

SEQ ID NO: 1785675 - DNA, 15 bp, Homo sapiens
tcctcagactaagag

SEQ ID NO: 1785676 - DNA, 15 bp, Homo sapiens
cctcagactaagagt

SEQ ID NO: 1785677 - DNA, 15 bp, Homo sapiens
ctcagactaagagtc

SEQ ID NO: 1785678 - DNA, 15 bp, Homo sapiens
tcagactaagagtct

SEQ ID NO: 1785679 - DNA, 15 bp, Homo sapiens
cagactaagagtctg

SEQ ID NO: 1785680 - DNA, 15 bp, Homo sapiens
agactaagagtctga

SEQ ID NO: 1785681 - DNA, 15 bp, Homo sapiens
gactaagagtctgaa

SEQ ID NO: 1785682 - DNA, 15 bp, Homo sapiens
actaagagtctgaaa

SEQ ID NO: 1785683 - DNA, 15 bp, Homo sapiens
ctaagagtctgaaat

SEQ ID NO: 1785684 - DNA, 15 bp, Homo sapiens
taagagtctgaaatt

SEQ ID NO: 1785685 - DNA, 15 bp, Homo sapiens
aagagtctgaaattt

SEQ ID NO: 1785686 - DNA, 15 bp, Homo sapiens
agagtctgaaatttg

SEQ ID NO: 1785687 - DNA, 15 bp, Homo sapiens
gagtctgaaatttga

SEQ ID NO: 1785688 - DNA, 15 bp, Homo sapiens
agtctgaaatttgat

SEQ ID NO: 1785689 - DNA, 15 bp, Homo sapiens
gtctgaaatttgatg

SEQ ID NO: 1785690 - DNA, 15 bp, Homo sapiens
tctgaaatttgatgt

SEQ ID NO: 1785691 - DNA, 15 bp, Homo sapiens
ctgaaatttgatgtg

SEQ ID NO: 1785692 - DNA, 15 bp, Homo sapiens
tgaaatttgatgtgt

SEQ ID NO: 1785693 - DNA, 15 bp, Homo sapiens
gaaatttgatgtgta

SEQ ID NO: 1785694 - DNA, 15 bp, Homo sapiens
aaatttgatgtgtat

SEQ ID NO: 1785695 - DNA, 15 bp, Homo sapiens
aatttgatgtgtatt

SEQ ID NO: 1785696 - DNA, 15 bp, Homo sapiens
atttgatgtgtattt

SEQ ID NO: 1785697 - DNA, 15 bp, Homo sapiens
tttgatgtgtatttt

SEQ ID NO: 1785698 - DNA, 15 bp, Homo sapiens
ttgatgtgtattttg

SEQ ID NO: 1785699 - DNA, 15 bp, Homo sapiens
tgatgtgtattttgc

SEQ ID NO: 1785700 - DNA, 15 bp, Homo sapiens
gatgtgtattttgcg

SEQ ID NO: 1785701 - DNA, 15 bp, Homo sapiens
atgtgtattttgcgc

SEQ ID NO: 1785702 - DNA, 15 bp, Homo sapiens
tgtgtattttgcgct

SEQ ID NO: 1785703 - DNA, 15 bp, Homo sapiens
gtgtattttgcgctc

SEQ ID NO: 1785704 - DNA, 15 bp, Homo sapiens
tgtattttgcgctca

SEQ ID NO: 1785705 - DNA, 15 bp, Homo sapiens
gtattttgcgctcag

SEQ ID NO: 1785706 - DNA, 15 bp, Homo sapiens
tattttgcgctcaga

SEQ ID NO: 1785707 - DNA, 15 bp, Homo sapiens
attttgcgctcagag

SEQ ID NO: 1785708 - DNA, 15 bp, Homo sapiens
ttttgcgctcagagc

SEQ ID NO: 1785709 - DNA, 15 bp, Homo sapiens
tttgcgctcagagca

SEQ ID NO: 1785710 - DNA, 15 bp, Homo sapiens
ttgcgctcagagcac

SEQ ID NO: 1785711 - DNA, 15 bp, Homo sapiens
tgcgctcagagcacg

SEQ ID NO: 1785712 - DNA, 15 bp, Homo sapiens
gcgctcagagcacgt

SEQ ID NO: 1785713 - DNA, 15 bp, Homo sapiens
cgctcagagcacgtt

SEQ ID NO: 1785714 - DNA, 15 bp, Homo sapiens
gctcagagcacgttt

SEQ ID NO: 1785715 - DNA, 15 bp, Homo sapiens
ctcagagcacgtttc

SEQ ID NO: 1785716 - DNA, 15 bp, Homo sapiens
tcagagcacgtttca

SEQ ID NO: 1785717 - DNA, 15 bp, Homo sapiens
cagagcacgtttcag

SEQ ID NO: 1785718 - DNA, 15 bp, Homo sapiens
agagcacgtttcagt

SEQ ID NO: 1785719 - DNA, 15 bp, Homo sapiens
gagcacgtttcagtc

SEQ ID NO: 1785720 - DNA, 15 bp, Homo sapiens
agcacgtttcagtct

SEQ ID NO: 1785721 - DNA, 15 bp, Homo sapiens
gcacgtttcagtctg

SEQ ID NO: 1785722 - DNA, 15 bp, Homo sapiens
cacgtttcagtctgg

SEQ ID NO: 1785723 - DNA, 15 bp, Homo sapiens
acgtttcagtctgga

SEQ ID NO: 1785724 - DNA, 15 bp, Homo sapiens
cgtttcagtctggac

SEQ ID NO: 1785725 - DNA, 15 bp, Homo sapiens
gtttcagtctggact

SEQ ID NO: 1785726 - DNA, 15 bp, Homo sapiens
tttcagtctggacta

SEQ ID NO: 1785727 - DNA, 15 bp, Homo sapiens
ttcagtctggactag

SEQ ID NO: 1785728 - DNA, 15 bp, Homo sapiens
tcagtctggactagt

SEQ ID NO: 1785729 - DNA, 15 bp, Homo sapiens
cagtctggactagtg

SEQ ID NO: 1785730 - DNA, 15 bp, Homo sapiens
agtctggactagtga

SEQ ID NO: 1785731 - DNA, 15 bp, Homo sapiens
gtctggactagtgac

SEQ ID NO: 1785732 - DNA, 15 bp, Homo sapiens
tctggactagtgaca

SEQ ID NO: 1785733 - DNA, 15 bp, Homo sapiens
ctggactagtgacat

SEQ ID NO: 1785734 - DNA, 15 bp, Homo sapiens
tggactagtgacatt

SEQ ID NO: 1785735 - DNA, 15 bp, Homo sapiens
ggactagtgacattt

SEQ ID NO: 1785736 - DNA, 15 bp, Homo sapiens
gactagtgacatttc

SEQ ID NO: 1785737 - DNA, 15 bp, Homo sapiens
actagtgacatttca

SEQ ID NO: 1785738 - DNA, 15 bp, Homo sapiens
ctagtgacatttcaa

SEQ ID NO: 1785739 - DNA, 15 bp, Homo sapiens
tagtgacatttcaag

SEQ ID NO: 1785740 - DNA, 15 bp, Homo sapiens
agtgacatttcaagt

SEQ ID NO: 1785741 - DNA, 15 bp, Homo sapiens
gtgacatttcaagtc

SEQ ID NO: 1785742 - DNA, 15 bp, Homo sapiens
tgacatttcaagtct

SEQ ID NO: 1785743 - DNA, 15 bp, Homo sapiens
gacatttcaagtctc

SEQ ID NO: 1785744 - DNA, 15 bp, Homo sapiens
acatttcaagtctcc

SEQ ID NO: 1785745 - DNA, 15 bp, Homo sapiens
catttcaagtctcca

SEQ ID NO: 1785746 - DNA, 15 bp, Homo sapiens
atttcaagtctccaa

SEQ ID NO: 1785747 - DNA, 15 bp, Homo sapiens
tttcaagtctccaaa

SEQ ID NO: 1785748 - DNA, 15 bp, Homo sapiens
ttcaagtctccaaag

SEQ ID NO: 1785749 - DNA, 15 bp, Homo sapiens
tcaagtctccaaagg

SEQ ID NO: 1785750 - DNA, 15 bp, Homo sapiens
caagtctccaaaggc

SEQ ID NO: 1785751 - DNA, 15 bp, Homo sapiens
aagtctccaaaggca

SEQ ID NO: 1785752 - DNA, 15 bp, Homo sapiens
agtctccaaaggcac

SEQ ID NO: 1785753 - DNA, 15 bp, Homo sapiens
gtctccaaaggcaca

SEQ ID NO: 1785754 - DNA, 15 bp, Homo sapiens
tctccaaaggcacat

SEQ ID NO: 1785755 - DNA, 15 bp, Homo sapiens
ctccaaaggcacatg

SEQ ID NO: 1785756 - DNA, 15 bp, Homo sapiens
tccaaaggcacatgt

SEQ ID NO: 1785757 - DNA, 15 bp, Homo sapiens
ccaaaggcacatgtg

SEQ ID NO: 1785758 - DNA, 15 bp, Homo sapiens
caaaggcacatgtga

SEQ ID NO: 1785759 - DNA, 15 bp, Homo sapiens
aaaggcacatgtgac

SEQ ID NO: 1785760 - DNA, 15 bp, Homo sapiens
aaggcacatgtgact

SEQ ID NO: 1785761 - DNA, 15 bp, Homo sapiens
aggcacatgtgacta

SEQ ID NO: 1785762 - DNA, 15 bp, Homo sapiens
ggcacatgtgactag

SEQ ID NO: 1785763 - DNA, 15 bp, Homo sapiens
gcacatgtgactagg

SEQ ID NO: 1785764 - DNA, 15 bp, Homo sapiens
cacatgtgactaggg

SEQ ID NO: 1785765 - DNA, 15 bp, Homo sapiens
acatgtgactagggg

SEQ ID NO: 1785766 - DNA, 15 bp, Homo sapiens
catgtgactaggggc

SEQ ID NO: 1785767 - DNA, 15 bp, Homo sapiens
atgtgactaggggca

SEQ ID NO: 1785768 - DNA, 15 bp, Homo sapiens
tgtgactaggggcag

SEQ ID NO: 1785769 - DNA, 15 bp, Homo sapiens
gtgactaggggcagc

SEQ ID NO: 1785770 - DNA, 15 bp, Homo sapiens
tgactaggggcagca

SEQ ID NO: 1785771 - DNA, 15 bp, Homo sapiens
gactaggggcagcac

SEQ ID NO: 1785772 - DNA, 15 bp, Homo sapiens
actaggggcagcaca

SEQ ID NO: 1785773 - DNA, 15 bp, Homo sapiens
ctaggggcagcacag

SEQ ID NO: 1785774 - DNA, 15 bp, Homo sapiens
taggggcagcacagg

SEQ ID NO: 1785775 - DNA, 15 bp, Homo sapiens
aggggcagcacaggg

SEQ ID NO: 1785776 - DNA, 15 bp, Homo sapiens
ggggcagcacagggt

SEQ ID NO: 1785777 - DNA, 15 bp, Homo sapiens
gggcagcacagggtg

SEQ ID NO: 1785778 - DNA, 15 bp, Homo sapiens
ggcagcacagggtgc

SEQ ID NO: 1785779 - DNA, 15 bp, Homo sapiens
gcagcacagggtgca

SEQ ID NO: 1785780 - DNA, 15 bp, Homo sapiens
cagcacagggtgcac

SEQ ID NO: 1785781 - DNA, 15 bp, Homo sapiens
agcacagggtgcacg

SEQ ID NO: 1785782 - DNA, 15 bp, Homo sapiens
gcacagggtgcacgg

SEQ ID NO: 1785783 - DNA, 15 bp, Homo sapiens
cacagggtgcacggt

SEQ ID NO: 1785784 - DNA, 15 bp, Homo sapiens
acagggtgcacggtg

SEQ ID NO: 1785785 - DNA, 15 bp, Homo sapiens
cagggtgcacggtgc

SEQ ID NO: 1785786 - DNA, 15 bp, Homo sapiens
agggtgcacggtgca

SEQ ID NO: 1785787 - DNA, 15 bp, Homo sapiens
gggtgcacggtgcag

SEQ ID NO: 1785788 - DNA, 15 bp, Homo sapiens
ggtgcacggtgcagg

SEQ ID NO: 1785789 - DNA, 15 bp, Homo sapiens
gtgcacggtgcagga

SEQ ID NO: 1785790 - DNA, 15 bp, Homo sapiens
tgcacggtgcaggac

SEQ ID NO: 1785791 - DNA, 15 bp, Homo sapiens
gcacggtgcaggacg

SEQ ID NO: 1785792 - DNA, 15 bp, Homo sapiens
cacggtgcaggacgc

SEQ ID NO: 1785793 - DNA, 15 bp, Homo sapiens
acggtgcaggacgca

SEQ ID NO: 1785794 - DNA, 15 bp, Homo sapiens
cggtgcaggacgcag

SEQ ID NO: 1785795 - DNA, 15 bp, Homo sapiens
ggtgcaggacgcagg

SEQ ID NO: 1785796 - DNA, 15 bp, Homo sapiens
gtgcaggacgcaggg

SEQ ID NO: 1785797 - DNA, 15 bp, Homo sapiens
tgcaggacgcagggc

SEQ ID NO: 1785798 - DNA, 15 bp, Homo sapiens
gcaggacgcagggcg

SEQ ID NO: 1785799 - DNA, 15 bp, Homo sapiens
caggacgcagggcgc

SEQ ID NO: 1785800 - DNA, 15 bp, Homo sapiens
aggacgcagggcgcg

SEQ ID NO: 1785801 - DNA, 15 bp, Homo sapiens
ggacgcagggcgcgc

SEQ ID NO: 1785802 - DNA, 15 bp, Homo sapiens
gacgcagggcgcgct

SEQ ID NO: 1785803 - DNA, 15 bp, Homo sapiens
acgcagggcgcgctc

SEQ ID NO: 1785804 - DNA, 15 bp, Homo sapiens
cgcagggcgcgctct

SEQ ID NO: 1785805 - DNA, 15 bp, Homo sapiens
gcagggcgcgctcta

SEQ ID NO: 1785806 - DNA, 15 bp, Homo sapiens
cagggcgcgctctag

SEQ ID NO: 1785807 - DNA, 15 bp, Homo sapiens
agggcgcgctctaga

SEQ ID NO: 1785808 - DNA, 15 bp, Homo sapiens
gggcgcgctctagag

SEQ ID NO: 1785809 - DNA, 15 bp, Homo sapiens
ggcgcgctctagagt

SEQ ID NO: 1785810 - DNA, 15 bp, Homo sapiens
gcgcgctctagagtg

SEQ ID NO: 1785811 - DNA, 15 bp, Homo sapiens
cgcgctctagagtga

SEQ ID NO: 1785812 - DNA, 15 bp, Homo sapiens
gcgctctagagtgaa

SEQ ID NO: 1785813 - DNA, 15 bp, Homo sapiens
cgctctagagtgaag

SEQ ID NO: 1785814 - DNA, 15 bp, Homo sapiens
gctctagagtgaagg

SEQ ID NO: 1785815 - DNA, 15 bp, Homo sapiens
ctctagagtgaagga

SEQ ID NO: 1785816 - DNA, 15 bp, Homo sapiens
tctagagtgaaggag

SEQ ID NO: 1785817 - DNA, 15 bp, Homo sapiens
ctagagtgaaggagt

SEQ ID NO: 1785818 - DNA, 15 bp, Homo sapiens
tagagtgaaggagtg

SEQ ID NO: 1785819 - DNA, 15 bp, Homo sapiens
agagtgaaggagtga

SEQ ID NO: 1785820 - DNA, 15 bp, Homo sapiens
gagtgaaggagtgac

SEQ ID NO: 1785821 - DNA, 15 bp, Homo sapiens
agtgaaggagtgacg

SEQ ID NO: 1785822 - DNA, 15 bp, Homo sapiens
gtgaaggagtgacga

SEQ ID NO: 1785823 - DNA, 15 bp, Homo sapiens
tgaaggagtgacgag

SEQ ID NO: 1785824 - DNA, 15 bp, Homo sapiens
gaaggagtgacgagc

SEQ ID NO: 1785825 - DNA, 15 bp, Homo sapiens
aaggagtgacgagca

SEQ ID NO: 1785826 - DNA, 15 bp, Homo sapiens
aggagtgacgagcaa

SEQ ID NO: 1785827 - DNA, 15 bp, Homo sapiens
ggagtgacgagcaaa

SEQ ID NO: 1785828 - DNA, 15 bp, Homo sapiens
gagtgacgagcaaag

SEQ ID NO: 1785829 - DNA, 15 bp, Homo sapiens
agtgacgagcaaagg

SEQ ID NO: 1785830 - DNA, 15 bp, Homo sapiens
gtgacgagcaaaggg

SEQ ID NO: 1785831 - DNA, 15 bp, Homo sapiens
tgacgagcaaaggga

SEQ ID NO: 1785832 - DNA, 15 bp, Homo sapiens
gacgagcaaagggaa

SEQ ID NO: 1785833 - DNA, 15 bp, Homo sapiens
acgagcaaagggaag

SEQ ID NO: 1785834 - DNA, 15 bp, Homo sapiens
cgagcaaagggaagg

SEQ ID NO: 1785835 - DNA, 15 bp, Homo sapiens
gagcaaagggaagga

SEQ ID NO: 1785836 - DNA, 15 bp, Homo sapiens
agcaaagggaaggaa

SEQ ID NO: 1785837 - DNA, 15 bp, Homo sapiens
gcaaagggaaggaat

SEQ ID NO: 1785838 - DNA, 15 bp, Homo sapiens
caaagggaaggaatg

SEQ ID NO: 1785839 - DNA, 15 bp, Homo sapiens
aaagggaaggaatgg

SEQ ID NO: 1785840 - DNA, 15 bp, Homo sapiens
aagggaaggaatggg

SEQ ID NO: 1785841 - DNA, 15 bp, Homo sapiens
agggaaggaatgggc

SEQ ID NO: 1785842 - DNA, 15 bp, Homo sapiens
gggaaggaatgggca

SEQ ID NO: 1785843 - DNA, 15 bp, Homo sapiens
ggaaggaatgggcaa

SEQ ID NO: 1785844 - DNA, 15 bp, Homo sapiens
gaaggaatgggcaag

SEQ ID NO: 1785845 - DNA, 15 bp, Homo sapiens
aaggaatgggcaagc

SEQ ID NO: 1785846 - DNA, 15 bp, Homo sapiens
aggaatgggcaagcg

SEQ ID NO: 1785847 - DNA, 15 bp, Homo sapiens
ggaatgggcaagcgt

SEQ ID NO: 1785848 - DNA, 15 bp, Homo sapiens
gaatgggcaagcgta

SEQ ID NO: 1785849 - DNA, 15 bp, Homo sapiens
aatgggcaagcgtag

SEQ ID NO: 1785850 - DNA, 15 bp, Homo sapiens
atgggcaagcgtagg

SEQ ID NO: 1785851 - DNA, 15 bp, Homo sapiens
tgggcaagcgtaggc

SEQ ID NO: 1785852 - DNA, 15 bp, Homo sapiens
gggcaagcgtaggcg

SEQ ID NO: 1785853 - DNA, 15 bp, Homo sapiens
ggcaagcgtaggcga

SEQ ID NO: 1785854 - DNA, 15 bp, Homo sapiens
gcaagcgtaggcgaa

SEQ ID NO: 1785855 - DNA, 15 bp, Homo sapiens
caagcgtaggcgaag

SEQ ID NO: 1785856 - DNA, 15 bp, Homo sapiens
aagcgtaggcgaaga

SEQ ID NO: 1785857 - DNA, 15 bp, Homo sapiens
agcgtaggcgaagag

SEQ ID NO: 1785858 - DNA, 15 bp, Homo sapiens
gcgtaggcgaagaga

SEQ ID NO: 1785859 - DNA, 15 bp, Homo sapiens
cgtaggcgaagagag

SEQ ID NO: 1785860 - DNA, 15 bp, Homo sapiens
gtaggcgaagagagg

SEQ ID NO: 1785861 - DNA, 15 bp, Homo sapiens
taggcgaagagagga

SEQ ID NO: 1785862 - DNA, 15 bp, Homo sapiens
aggcgaagagaggag

SEQ ID NO: 1785863 - DNA, 15 bp, Homo sapiens
ggcgaagagaggagg

SEQ ID NO: 1785864 - DNA, 15 bp, Homo sapiens
gcgaagagaggaggg

SEQ ID NO: 1785865 - DNA, 15 bp, Homo sapiens
cgaagagaggagggc

SEQ ID NO: 1785866 - DNA, 15 bp, Homo sapiens
gaagagaggagggca

SEQ ID NO: 1785867 - DNA, 15 bp, Homo sapiens
aagagaggagggcag

SEQ ID NO: 1785868 - DNA, 15 bp, Homo sapiens
agagaggagggcagc

SEQ ID NO: 1785869 - DNA, 15 bp, Homo sapiens
gagaggagggcagcg

SEQ ID NO: 1785870 - DNA, 15 bp, Homo sapiens
agaggagggcagcgg

SEQ ID NO: 1785871 - DNA, 15 bp, Homo sapiens
gaggagggcagcggg

SEQ ID NO: 1785872 - DNA, 15 bp, Homo sapiens
aggagggcagcgggg

SEQ ID NO: 1785873 - DNA, 15 bp, Homo sapiens
ggagggcagcggggg

SEQ ID NO: 1785874 - DNA, 15 bp, Homo sapiens
gagggcagcgggggg

SEQ ID NO: 1785875 - DNA, 15 bp, Homo sapiens
agggcagcggggggt

SEQ ID NO: 1785876 - DNA, 15 bp, Homo sapiens
gggcagcggggggtg

SEQ ID NO: 1785877 - DNA, 15 bp, Homo sapiens
ggcagcggggggtgc

SEQ ID NO: 1785878 - DNA, 15 bp, Homo sapiens
gcagcggggggtgca

SEQ ID NO: 1785879 - DNA, 15 bp, Homo sapiens
cagcggggggtgcaa

SEQ ID NO: 1785880 - DNA, 15 bp, Homo sapiens
agcggggggtgcaaa

SEQ ID NO: 1785881 - DNA, 15 bp, Homo sapiens
gcggggggtgcaaag

SEQ ID NO: 1785882 - DNA, 15 bp, Homo sapiens
cggggggtgcaaagg

SEQ ID NO: 1785883 - DNA, 15 bp, Homo sapiens
ggggggtgcaaaggt

SEQ ID NO: 1785884 - DNA, 15 bp, Homo sapiens
gggggtgcaaaggta

SEQ ID NO: 1785885 - DNA, 15 bp, Homo sapiens
ggggtgcaaaggtac

SEQ ID NO: 1785886 - DNA, 15 bp, Homo sapiens
gggtgcaaaggtact

SEQ ID NO: 1785887 - DNA, 15 bp, Homo sapiens
ggtgcaaaggtactc

SEQ ID NO: 1785888 - DNA, 15 bp, Homo sapiens
gtgcaaaggtactca

SEQ ID NO: 1785889 - DNA, 15 bp, Homo sapiens
tgcaaaggtactcag

SEQ ID NO: 1785890 - DNA, 15 bp, Homo sapiens
gcaaaggtactcagt

SEQ ID NO: 1785891 - DNA, 15 bp, Homo sapiens
caaaggtactcagtt

SEQ ID NO: 1785892 - DNA, 15 bp, Homo sapiens
aaaggtactcagttt

SEQ ID NO: 1785893 - DNA, 15 bp, Homo sapiens
aaggtactcagtttg

SEQ ID NO: 1785894 - DNA, 15 bp, Homo sapiens
aggtactcagtttgc

SEQ ID NO: 1785895 - DNA, 15 bp, Homo sapiens
ggtactcagtttgcc

SEQ ID NO: 1785896 - DNA, 15 bp, Homo sapiens
gtactcagtttgccc

SEQ ID NO: 1785897 - DNA, 15 bp, Homo sapiens
tactcagtttgccct

SEQ ID NO: 1785898 - DNA, 15 bp, Homo sapiens
actcagtttgccctc

SEQ ID NO: 1785899 - DNA, 15 bp, Homo sapiens
ctcagtttgccctct

SEQ ID NO: 1785900 - DNA, 15 bp, Homo sapiens
tcagtttgccctctg

SEQ ID NO: 1785901 - DNA, 15 bp, Homo sapiens
cagtttgccctctgt

SEQ ID NO: 1785902 - DNA, 15 bp, Homo sapiens
agtttgccctctgtg

SEQ ID NO: 1785903 - DNA, 15 bp, Homo sapiens
gtttgccctctgtga

SEQ ID NO: 1785904 - DNA, 15 bp, Homo sapiens
tttgccctctgtgag

SEQ ID NO: 1785905 - DNA, 15 bp, Homo sapiens
ttgccctctgtgagc

SEQ ID NO: 1785906 - DNA, 15 bp, Homo sapiens
tgccctctgtgagcg

SEQ ID NO: 1785907 - DNA, 15 bp, Homo sapiens
gccctctgtgagcgg

SEQ ID NO: 1785908 - DNA, 15 bp, Homo sapiens
ccctctgtgagcggg

SEQ ID NO: 1785909 - DNA, 15 bp, Homo sapiens
cctctgtgagcgggg

SEQ ID NO: 1785910 - DNA, 15 bp, Homo sapiens
ctctgtgagcggggg

SEQ ID NO: 1785911 - DNA, 15 bp, Homo sapiens
tctgtgagcgggggg

SEQ ID NO: 1785912 - DNA, 15 bp, Homo sapiens
ctgtgagcggggggc

SEQ ID NO: 1785913 - DNA, 15 bp, Homo sapiens
tgtgagcggggggct

SEQ ID NO: 1785914 - DNA, 15 bp, Homo sapiens
gtgagcggggggctg

SEQ ID NO: 1785915 - DNA, 15 bp, Homo sapiens
tgagcggggggctgc

SEQ ID NO: 1785916 - DNA, 15 bp, Homo sapiens
gagcggggggctgca

SEQ ID NO: 1785917 - DNA, 15 bp, Homo sapiens
agcggggggctgcac

SEQ ID NO: 1785918 - DNA, 15 bp, Homo sapiens
gcggggggctgcacc

SEQ ID NO: 1785919 - DNA, 15 bp, Homo sapiens
cggggggctgcaccc

SEQ ID NO: 1785920 - DNA, 15 bp, Homo sapiens
ggggggctgcaccca

SEQ ID NO: 1785921 - DNA, 15 bp, Homo sapiens
gggggctgcacccac

SEQ ID NO: 1785922 - DNA, 15 bp, Homo sapiens
ggggctgcacccacc

SEQ ID NO: 1785923 - DNA, 15 bp, Homo sapiens
gggctgcacccacct

SEQ ID NO: 1785924 - DNA, 15 bp, Homo sapiens
ggctgcacccacctt

SEQ ID NO: 1785925 - DNA, 15 bp, Homo sapiens
gctgcacccaccttc

SEQ ID NO: 1785926 - DNA, 15 bp, Homo sapiens
ctgcacccaccttct

SEQ ID NO: 1785927 - DNA, 15 bp, Homo sapiens
tgcacccaccttctt

SEQ ID NO: 1785928 - DNA, 15 bp, Homo sapiens
gcacccaccttcttc

SEQ ID NO: 1785929 - DNA, 15 bp, Homo sapiens
cacccaccttcttct

SEQ ID NO: 1785930 - DNA, 15 bp, Homo sapiens
acccaccttcttctg

SEQ ID NO: 1785931 - DNA, 15 bp, Homo sapiens
cccaccttcttctgg

SEQ ID NO: 1785932 - DNA, 15 bp, Homo sapiens
ccaccttcttctgga

SEQ ID NO: 1785933 - DNA, 15 bp, Homo sapiens
caccttcttctggaa

SEQ ID NO: 1785934 - DNA, 15 bp, Homo sapiens
accttcttctggaag

SEQ ID NO: 1785935 - DNA, 15 bp, Homo sapiens
ccttcttctggaagg

SEQ ID NO: 1785936 - DNA, 15 bp, Homo sapiens
cttcttctggaagga

SEQ ID NO: 1785937 - DNA, 15 bp, Homo sapiens
ttcttctggaaggag

SEQ ID NO: 1785938 - DNA, 15 bp, Homo sapiens
tcttctggaaggagc

SEQ ID NO: 1785939 - DNA, 15 bp, Homo sapiens
cttctggaaggagcc

SEQ ID NO: 1785940 - DNA, 15 bp, Homo sapiens
ttctggaaggagccg

SEQ ID NO: 1785941 - DNA, 15 bp, Homo sapiens
tctggaaggagccgg

SEQ ID NO: 1785942 - DNA, 15 bp, Homo sapiens
ctggaaggagccggg

SEQ ID NO: 1785943 - DNA, 15 bp, Homo sapiens
tggaaggagccggga

SEQ ID NO: 1785944 - DNA, 15 bp, Homo sapiens
ggaaggagccgggat

SEQ ID NO: 1785945 - DNA, 15 bp, Homo sapiens
gaaggagccgggatt

SEQ ID NO: 1785946 - DNA, 15 bp, Homo sapiens
aaggagccgggattg

SEQ ID NO: 1785947 - DNA, 15 bp, Homo sapiens
aggagccgggattgc

SEQ ID NO: 1785948 - DNA, 15 bp, Homo sapiens
ggagccgggattgcc

SEQ ID NO: 1785949 - DNA, 15 bp, Homo sapiens
gagccgggattgccg

SEQ ID NO: 1785950 - DNA, 15 bp, Homo sapiens
agccgggattgccgc

SEQ ID NO: 1785951 - DNA, 15 bp, Homo sapiens
gccgggattgccgcg

SEQ ID NO: 1785952 - DNA, 15 bp, Homo sapiens
ccgggattgccgcgg

SEQ ID NO: 1785953 - DNA, 15 bp, Homo sapiens
cgggattgccgcggc

SEQ ID NO: 1785954 - DNA, 15 bp, Homo sapiens
gggattgccgcggcg

SEQ ID NO: 1785955 - DNA, 15 bp, Homo sapiens
ggattgccgcggcgg

SEQ ID NO: 1785956 - DNA, 15 bp, Homo sapiens
gattgccgcggcgga

SEQ ID NO: 1785957 - DNA, 15 bp, Homo sapiens
attgccgcggcggat

SEQ ID NO: 1785958 - DNA, 15 bp, Homo sapiens
ttgccgcggcggatg

SEQ ID NO: 1785959 - DNA, 15 bp, Homo sapiens
tgccgcggcggatgg

SEQ ID NO: 1785960 - DNA, 15 bp, Homo sapiens
gccgcggcggatggc

SEQ ID NO: 1785961 - DNA, 15 bp, Homo sapiens
ccgcggcggatggcc

SEQ ID NO: 1785962 - DNA, 15 bp, Homo sapiens
cgcggcggatggcca

SEQ ID NO: 1785963 - DNA, 15 bp, Homo sapiens
gcggcggatggccag

SEQ ID NO: 1785964 - DNA, 15 bp, Homo sapiens
cggcggatggccagc

SEQ ID NO: 1785965 - DNA, 15 bp, Homo sapiens
ggcggatggccagca

SEQ ID NO: 1785966 - DNA, 15 bp, Homo sapiens
gcggatggccagcag

SEQ ID NO: 1785967 - DNA, 15 bp, Homo sapiens
cggatggccagcagc

SEQ ID NO: 1785968 - DNA, 15 bp, Homo sapiens
ggatggccagcagcg

SEQ ID NO: 1785969 - DNA, 15 bp, Homo sapiens
gatggccagcagcgc

SEQ ID NO: 1785970 - DNA, 15 bp, Homo sapiens
atggccagcagcgcg

SEQ ID NO: 1785971 - DNA, 15 bp, Homo sapiens
tggccagcagcgcgg

SEQ ID NO: 1785972 - DNA, 15 bp, Homo sapiens
ggccagcagcgcggt

SEQ ID NO: 1785973 - DNA, 15 bp, Homo sapiens
gccagcagcgcggtg

SEQ ID NO: 1785974 - DNA, 15 bp, Homo sapiens
ccagcagcgcggtgt

SEQ ID NO: 1785975 - DNA, 15 bp, Homo sapiens
cagcagcgcggtgta

SEQ ID NO: 1785976 - DNA, 15 bp, Homo sapiens
agcagcgcggtgtag

SEQ ID NO: 1785977 - DNA, 15 bp, Homo sapiens
gcagcgcggtgtagt

SEQ ID NO: 1785978 - DNA, 15 bp, Homo sapiens
cagcgcggtgtagtg

SEQ ID NO: 1785979 - DNA, 15 bp, Homo sapiens
agcgcggtgtagtgc

SEQ ID NO: 1785980 - DNA, 15 bp, Homo sapiens
gcgcggtgtagtgca

SEQ ID NO: 1785981 - DNA, 15 bp, Homo sapiens
cgcggtgtagtgcag

SEQ ID NO: 1785982 - DNA, 15 bp, Homo sapiens
gcggtgtagtgcagc

SEQ ID NO: 1785983 - DNA, 15 bp, Homo sapiens
cggtgtagtgcagcg

SEQ ID NO: 1785984 - DNA, 15 bp, Homo sapiens
ggtgtagtgcagcgt

SEQ ID NO: 1785985 - DNA, 15 bp, Homo sapiens
gtgtagtgcagcgtc

SEQ ID NO: 1785986 - DNA, 15 bp, Homo sapiens
tgtagtgcagcgtct

SEQ ID NO: 1785987 - DNA, 15 bp, Homo sapiens
gtagtgcagcgtctc

SEQ ID NO: 1785988 - DNA, 15 bp, Homo sapiens
tagtgcagcgtctcg

SEQ ID NO: 1785989 - DNA, 15 bp, Homo sapiens
agtgcagcgtctcgc

SEQ ID NO: 1785990 - DNA, 15 bp, Homo sapiens
gtgcagcgtctcgcg

SEQ ID NO: 1785991 - DNA, 15 bp, Homo sapiens
tgcagcgtctcgcgc

SEQ ID NO: 1785992 - DNA, 15 bp, Homo sapiens
gcagcgtctcgcgca

SEQ ID NO: 1785993 - DNA, 15 bp, Homo sapiens
cagcgtctcgcgcac

SEQ ID NO: 1785994 - DNA, 15 bp, Homo sapiens
agcgtctcgcgcacg

SEQ ID NO: 1785995 - DNA, 15 bp, Homo sapiens
gcgtctcgcgcacgg

SEQ ID NO: 1785996 - DNA, 15 bp, Homo sapiens
cgtctcgcgcacggt

SEQ ID NO: 1785997 - DNA, 15 bp, Homo sapiens
gtctcgcgcacggtg

SEQ ID NO: 1785998 - DNA, 15 bp, Homo sapiens
tctcgcgcacggtga

SEQ ID NO: 1785999 - DNA, 15 bp, Homo sapiens
ctcgcgcacggtgag

SEQ ID NO: 1786000 - DNA, 15 bp, Homo sapiens
tcgcgcacggtgagg

SEQ ID NO: 1786001 - DNA, 15 bp, Homo sapiens
cgcgcacggtgaggc

SEQ ID NO: 1786002 - DNA, 15 bp, Homo sapiens
gcgcacggtgaggct

SEQ ID NO: 1786003 - DNA, 15 bp, Homo sapiens
cgcacggtgaggctg

SEQ ID NO: 1786004 - DNA, 15 bp, Homo sapiens
gcacggtgaggctgc

SEQ ID NO: 1786005 - DNA, 15 bp, Homo sapiens
cacggtgaggctgct

SEQ ID NO: 1786006 - DNA, 15 bp, Homo sapiens
acggtgaggctgctc

SEQ ID NO: 1786007 - DNA, 15 bp, Homo sapiens
cggtgaggctgctca

SEQ ID NO: 1786008 - DNA, 15 bp, Homo sapiens
ggtgaggctgctcag

SEQ ID NO: 1786009 - DNA, 15 bp, Homo sapiens
gtgaggctgctcagc

SEQ ID NO: 1786010 - DNA, 15 bp, Homo sapiens
tgaggctgctcagca

SEQ ID NO: 1786011 - DNA, 15 bp, Homo sapiens
gaggctgctcagcag

SEQ ID NO: 1786012 - DNA, 15 bp, Homo sapiens
aggctgctcagcagg

SEQ ID NO: 1786013 - DNA, 15 bp, Homo sapiens
ggctgctcagcaggg

SEQ ID NO: 1786014 - DNA, 15 bp, Homo sapiens
gctgctcagcagggt

SEQ ID NO: 1786015 - DNA, 15 bp, Homo sapiens
ctgctcagcagggtg

SEQ ID NO: 1786016 - DNA, 15 bp, Homo sapiens
tgctcagcagggtgt

SEQ ID NO: 1786017 - DNA, 15 bp, Homo sapiens
gctcagcagggtgtc

SEQ ID NO: 1786018 - DNA, 15 bp, Homo sapiens
ctcagcagggtgtcg

SEQ ID NO: 1786019 - DNA, 15 bp, Homo sapiens
tcagcagggtgtcgc

SEQ ID NO: 1786020 - DNA, 15 bp, Homo sapiens
cagcagggtgtcgct

SEQ ID NO: 1786021 - DNA, 15 bp, Homo sapiens
agcagggtgtcgctc

SEQ ID NO: 1786022 - DNA, 15 bp, Homo sapiens
gcagggtgtcgctct

SEQ ID NO: 1786023 - DNA, 15 bp, Homo sapiens
cagggtgtcgctctg

SEQ ID NO: 1786024 - DNA, 15 bp, Homo sapiens
agggtgtcgctctgc

SEQ ID NO: 1786025 - DNA, 15 bp, Homo sapiens
gggtgtcgctctgca

SEQ ID NO: 1786026 - DNA, 15 bp, Homo sapiens
ggtgtcgctctgcag

SEQ ID NO: 1786027 - DNA, 15 bp, Homo sapiens
gtgtcgctctgcagg

SEQ ID NO: 1786028 - DNA, 15 bp, Homo sapiens
tgtcgctctgcagga

SEQ ID NO: 1786029 - DNA, 15 bp, Homo sapiens
gtcgctctgcaggag

SEQ ID NO: 1786030 - DNA, 15 bp, Homo sapiens
tcgctctgcaggaga

SEQ ID NO: 1786031 - DNA, 15 bp, Homo sapiens
cgctctgcaggagac

SEQ ID NO: 1786032 - DNA, 15 bp, Homo sapiens
gctctgcaggagact

SEQ ID NO: 1786033 - DNA, 15 bp, Homo sapiens
ctctgcaggagactc

SEQ ID NO: 1786034 - DNA, 15 bp, Homo sapiens
tctgcaggagactcg

SEQ ID NO: 1786035 - DNA, 15 bp, Homo sapiens
ctgcaggagactcgg

SEQ ID NO: 1786036 - DNA, 15 bp, Homo sapiens
tgcaggagactcggg

SEQ ID NO: 1786037 - DNA, 15 bp, Homo sapiens
gcaggagactcgggc

SEQ ID NO: 1786038 - DNA, 15 bp, Homo sapiens
caggagactcgggcg

SEQ ID NO: 1786039 - DNA, 15 bp, Homo sapiens
aggagactcgggcgt

SEQ ID NO: 1786040 - DNA, 15 bp, Homo sapiens
ggagactcgggcgtc

SEQ ID NO: 1786041 - DNA, 15 bp, Homo sapiens
gagactcgggcgtca

SEQ ID NO: 1786042 - DNA, 15 bp, Homo sapiens
agactcgggcgtcag

SEQ ID NO: 1786043 - DNA, 15 bp, Homo sapiens
gactcgggcgtcagt

SEQ ID NO: 1786044 - DNA, 15 bp, Homo sapiens
actcgggcgtcagtg

SEQ ID NO: 1786045 - DNA, 15 bp, Homo sapiens
ctcgggcgtcagtgt

SEQ ID NO: 1786046 - DNA, 15 bp, Homo sapiens
tcgggcgtcagtgta

SEQ ID NO: 1786047 - DNA, 15 bp, Homo sapiens
cgggcgtcagtgtag

SEQ ID NO: 1786048 - DNA, 15 bp, Homo sapiens
gggcgtcagtgtagc

SEQ ID NO: 1786049 - DNA, 15 bp, Homo sapiens
ggcgtcagtgtagcc

SEQ ID NO: 1786050 - DNA, 15 bp, Homo sapiens
gcgtcagtgtagcct

SEQ ID NO: 1786051 - DNA, 15 bp, Homo sapiens
cgtcagtgtagccta

SEQ ID NO: 1786052 - DNA, 15 bp, Homo sapiens
gtcagtgtagcctaa

SEQ ID NO: 1786053 - DNA, 15 bp, Homo sapiens
tcagtgtagcctaag

SEQ ID NO: 1786054 - DNA, 15 bp, Homo sapiens
cagtgtagcctaagc

SEQ ID NO: 1786055 - DNA, 15 bp, Homo sapiens
agtgtagcctaagcc

SEQ ID NO: 1786056 - DNA, 15 bp, Homo sapiens
gtgtagcctaagccc

SEQ ID NO: 1786057 - DNA, 15 bp, Homo sapiens
tgtagcctaagcccc

SEQ ID NO: 1786058 - DNA, 15 bp, Homo sapiens
gtagcctaagccccc

SEQ ID NO: 1786059 - DNA, 15 bp, Homo sapiens
tagcctaagcccccg

SEQ ID NO: 1786060 - DNA, 15 bp, Homo sapiens
agcctaagcccccgg

SEQ ID NO: 1786061 - DNA, 15 bp, Homo sapiens
gcctaagcccccggg

SEQ ID NO: 1786062 - DNA, 15 bp, Homo sapiens
cctaagcccccgggg

SEQ ID NO: 1786063 - DNA, 15 bp, Homo sapiens
ctaagcccccggggc

SEQ ID NO: 1786064 - DNA, 15 bp, Homo sapiens
taagcccccggggcg

SEQ ID NO: 1786065 - DNA, 15 bp, Homo sapiens
aagcccccggggcgg

SEQ ID NO: 1786066 - DNA, 15 bp, Homo sapiens
agcccccggggcggg

SEQ ID NO: 1786067 - DNA, 15 bp, Homo sapiens
gcccccggggcgggc

SEQ ID NO: 1786068 - DNA, 15 bp, Homo sapiens
cccccggggcgggcg

SEQ ID NO: 1786069 - DNA, 15 bp, Homo sapiens
ccccggggcgggcgg

SEQ ID NO: 1786070 - DNA, 15 bp, Homo sapiens
cccggggcgggcggg

SEQ ID NO: 1786071 - DNA, 15 bp, Homo sapiens
ccggggcgggcgggg

SEQ ID NO: 1786072 - DNA, 15 bp, Homo sapiens
cggggcgggcggggg

SEQ ID NO: 1786073 - DNA, 15 bp, Homo sapiens
ggggcgggcgggggg

SEQ ID NO: 1786074 - DNA, 15 bp, Homo sapiens
gggcgggcggggggg

SEQ ID NO: 1786075 - DNA, 15 bp, Homo sapiens
ggcgggcgggggggc

SEQ ID NO: 1786076 - DNA, 15 bp, Homo sapiens
gcgggcgggggggcc

SEQ ID NO: 1786077 - DNA, 15 bp, Homo sapiens
cgggcgggggggcca

SEQ ID NO: 1786078 - DNA, 15 bp, Homo sapiens
gggcgggggggccag

SEQ ID NO: 1786079 - DNA, 15 bp, Homo sapiens
ggcgggggggccagg

SEQ ID NO: 1786080 - DNA, 15 bp, Homo sapiens
gcgggggggccaggg

SEQ ID NO: 1786081 - DNA, 15 bp, Homo sapiens
cgggggggccagggg

SEQ ID NO: 1786082 - DNA, 15 bp, Homo sapiens
gggggggccaggggt

SEQ ID NO: 1786083 - DNA, 15 bp, Homo sapiens
ggggggccaggggtg

SEQ ID NO: 1786084 - DNA, 15 bp, Homo sapiens
gggggccaggggtgt

SEQ ID NO: 1786085 - DNA, 15 bp, Homo sapiens
ggggccaggggtgtg

SEQ ID NO: 1786086 - DNA, 15 bp, Homo sapiens
gggccaggggtgtgg

SEQ ID NO: 1786087 - DNA, 15 bp, Homo sapiens
ggccaggggtgtggg

SEQ ID NO: 1786088 - DNA, 15 bp, Homo sapiens
gccaggggtgtgggg

SEQ ID NO: 1786089 - DNA, 15 bp, Homo sapiens
ccaggggtgtggggg

SEQ ID NO: 1786090 - DNA, 15 bp, Homo sapiens
caggggtgtggggga

SEQ ID NO: 1786091 - DNA, 15 bp, Homo sapiens
aggggtgtgggggac

SEQ ID NO: 1786092 - DNA, 15 bp, Homo sapiens
ggggtgtgggggacg

SEQ ID NO: 1786093 - DNA, 15 bp, Homo sapiens
gggtgtgggggacgc

SEQ ID NO: 1786094 - DNA, 15 bp, Homo sapiens
ggtgtgggggacgcg

SEQ ID NO: 1786095 - DNA, 15 bp, Homo sapiens
gtgtgggggacgcgc

SEQ ID NO: 1786096 - DNA, 15 bp, Homo sapiens
tgtgggggacgcgcc

SEQ ID NO: 1786097 - DNA, 15 bp, Homo sapiens
gtgggggacgcgccc

SEQ ID NO: 1786098 - DNA, 15 bp, Homo sapiens
tgggggacgcgccca

SEQ ID NO: 1786099 - DNA, 15 bp, Homo sapiens
gggggacgcgcccac

SEQ ID NO: 1786100 - DNA, 15 bp, Homo sapiens
ggggacgcgcccacc

SEQ ID NO: 1786101 - DNA, 15 bp, Homo sapiens
gggacgcgcccacct

SEQ ID NO: 1786102 - DNA, 15 bp, Homo sapiens
ggacgcgcccacctg

SEQ ID NO: 1786103 - DNA, 15 bp, Homo sapiens
gacgcgcccacctgc

SEQ ID NO: 1786104 - DNA, 15 bp, Homo sapiens
acgcgcccacctgca

SEQ ID NO: 1786105 - DNA, 15 bp, Homo sapiens
cgcgcccacctgcag

SEQ ID NO: 1786106 - DNA, 15 bp, Homo sapiens
gcgcccacctgcagg

SEQ ID NO: 1786107 - DNA, 15 bp, Homo sapiens
cgcccacctgcagga

SEQ ID NO: 1786108 - DNA, 15 bp, Homo sapiens
gcccacctgcaggac

SEQ ID NO: 1786109 - DNA, 15 bp, Homo sapiens
cccacctgcaggacg

SEQ ID NO: 1786110 - DNA, 15 bp, Homo sapiens
ccacctgcaggacgt

SEQ ID NO: 1786111 - DNA, 15 bp, Homo sapiens
cacctgcaggacgta

SEQ ID NO: 1786112 - DNA, 15 bp, Homo sapiens
acctgcaggacgtag

SEQ ID NO: 1786113 - DNA, 15 bp, Homo sapiens
cctgcaggacgtagg

SEQ ID NO: 1786114 - DNA, 15 bp, Homo sapiens
ctgcaggacgtagga

SEQ ID NO: 1786115 - DNA, 15 bp, Homo sapiens
tgcaggacgtaggag

SEQ ID NO: 1786116 - DNA, 15 bp, Homo sapiens
gcaggacgtaggaga

SEQ ID NO: 1786117 - DNA, 15 bp, Homo sapiens
caggacgtaggagaa

SEQ ID NO: 1786118 - DNA, 15 bp, Homo sapiens
aggacgtaggagaag

SEQ ID NO: 1786119 - DNA, 15 bp, Homo sapiens
ggacgtaggagaagc

SEQ ID NO: 1786120 - DNA, 15 bp, Homo sapiens
gacgtaggagaagca

SEQ ID NO: 1786121 - DNA, 15 bp, Homo sapiens
acgtaggagaagcag

SEQ ID NO: 1786122 - DNA, 15 bp, Homo sapiens
cgtaggagaagcagt

SEQ ID NO: 1786123 - DNA, 15 bp, Homo sapiens
gtaggagaagcagtc

SEQ ID NO: 1786124 - DNA, 15 bp, Homo sapiens
taggagaagcagtcc

SEQ ID NO: 1786125 - DNA, 15 bp, Homo sapiens
aggagaagcagtcct

SEQ ID NO: 1786126 - DNA, 15 bp, Homo sapiens
ggagaagcagtcctg

SEQ ID NO: 1786127 - DNA, 15 bp, Homo sapiens
gagaagcagtcctgg

SEQ ID NO: 1786128 - DNA, 15 bp, Homo sapiens
agaagcagtcctgga

SEQ ID NO: 1786129 - DNA, 15 bp, Homo sapiens
gaagcagtcctggaa

SEQ ID NO: 1786130 - DNA, 15 bp, Homo sapiens
aagcagtcctggaac

SEQ ID NO: 1786131 - DNA, 15 bp, Homo sapiens
agcagtcctggaact

SEQ ID NO: 1786132 - DNA, 15 bp, Homo sapiens
gcagtcctggaactg

SEQ ID NO: 1786133 - DNA, 15 bp, Homo sapiens
cagtcctggaactgc

SEQ ID NO: 1786134 - DNA, 15 bp, Homo sapiens
agtcctggaactgct

SEQ ID NO: 1786135 - DNA, 15 bp, Homo sapiens
gtcctggaactgctc

SEQ ID NO: 1786136 - DNA, 15 bp, Homo sapiens
tcctggaactgctcc

SEQ ID NO: 1786137 - DNA, 15 bp, Homo sapiens
cctggaactgctccc

SEQ ID NO: 1786138 - DNA, 15 bp, Homo sapiens
ctggaactgctcccg

SEQ ID NO: 1786139 - DNA, 15 bp, Homo sapiens
tggaactgctcccgg

SEQ ID NO: 1786140 - DNA, 15 bp, Homo sapiens
ggaactgctcccggc

SEQ ID NO: 1786141 - DNA, 15 bp, Homo sapiens
gaactgctcccggcg

SEQ ID NO: 1786142 - DNA, 15 bp, Homo sapiens
aactgctcccggcgc

SEQ ID NO: 1786143 - DNA, 15 bp, Homo sapiens
actgctcccggcgca

SEQ ID NO: 1786144 - DNA, 15 bp, Homo sapiens
ctgctcccggcgcag

SEQ ID NO: 1786145 - DNA, 15 bp, Homo sapiens
tgctcccggcgcagc

SEQ ID NO: 1786146 - DNA, 15 bp, Homo sapiens
gctcccggcgcagcg

SEQ ID NO: 1786147 - DNA, 15 bp, Homo sapiens
ctcccggcgcagcgc

SEQ ID NO: 1786148 - DNA, 15 bp, Homo sapiens
tcccggcgcagcgcc

SEQ ID NO: 1786149 - DNA, 15 bp, Homo sapiens
cccggcgcagcgccc

SEQ ID NO: 1786150 - DNA, 15 bp, Homo sapiens
ccggcgcagcgcccg

SEQ ID NO: 1786151 - DNA, 15 bp, Homo sapiens
cggcgcagcgcccgg

SEQ ID NO: 1786152 - DNA, 15 bp, Homo sapiens
ggcgcagcgcccggc

SEQ ID NO: 1786153 - DNA, 15 bp, Homo sapiens
gcgcagcgcccggcc

SEQ ID NO: 1786154 - DNA, 15 bp, Homo sapiens
cgcagcgcccggccg

SEQ ID NO: 1786155 - DNA, 15 bp, Homo sapiens
gcagcgcccggccgt

SEQ ID NO: 1786156 - DNA, 15 bp, Homo sapiens
cagcgcccggccgtt

SEQ ID NO: 1786157 - DNA, 15 bp, Homo sapiens
agcgcccggccgttc

SEQ ID NO: 1786158 - DNA, 15 bp, Homo sapiens
gcgcccggccgttca

SEQ ID NO: 1786159 - DNA, 15 bp, Homo sapiens
cgcccggccgttcac

SEQ ID NO: 1786160 - DNA, 15 bp, Homo sapiens
gcccggccgttcaca

SEQ ID NO: 1786161 - DNA, 15 bp, Homo sapiens
cccggccgttcacat

SEQ ID NO: 1786162 - DNA, 15 bp, Homo sapiens
ccggccgttcacata

SEQ ID NO: 1786163 - DNA, 15 bp, Homo sapiens
cggccgttcacatac

SEQ ID NO: 1786164 - DNA, 15 bp, Homo sapiens
ggccgttcacataca

SEQ ID NO: 1786165 - DNA, 15 bp, Homo sapiens
gccgttcacatacac

SEQ ID NO: 1786166 - DNA, 15 bp, Homo sapiens
ccgttcacatacacc

SEQ ID NO: 1786167 - DNA, 15 bp, Homo sapiens
cgttcacatacacct

SEQ ID NO: 1786168 - DNA, 15 bp, Homo sapiens
gttcacatacacctc

SEQ ID NO: 1786169 - DNA, 15 bp, Homo sapiens
ttcacatacacctcc

SEQ ID NO: 1786170 - DNA, 15 bp, Homo sapiens
tcacatacacctccc

SEQ ID NO: 1786171 - DNA, 15 bp, Homo sapiens
cacatacacctcccc

SEQ ID NO: 1786172 - DNA, 15 bp, Homo sapiens
acatacacctccccc

SEQ ID NO: 1786173 - DNA, 15 bp, Homo sapiens
catacacctccccca

SEQ ID NO: 1786174 - DNA, 15 bp, Homo sapiens
atacacctcccccag

SEQ ID NO: 1786175 - DNA, 15 bp, Homo sapiens
tacacctcccccagg

SEQ ID NO: 1786176 - DNA, 15 bp, Homo sapiens
acacctcccccagga

SEQ ID NO: 1786177 - DNA, 15 bp, Homo sapiens
cacctcccccaggaa

SEQ ID NO: 1786178 - DNA, 15 bp, Homo sapiens
acctcccccaggaag

SEQ ID NO: 1786179 - DNA, 15 bp, Homo sapiens
cctcccccaggaagg

SEQ ID NO: 1786180 - DNA, 15 bp, Homo sapiens
ctcccccaggaaggt

SEQ ID NO: 1786181 - DNA, 15 bp, Homo sapiens
tcccccaggaaggtc

SEQ ID NO: 1786182 - DNA, 15 bp, Homo sapiens
cccccaggaaggtcc

SEQ ID NO: 1786183 - DNA, 15 bp, Homo sapiens
ccccaggaaggtccc

SEQ ID NO: 1786184 - DNA, 15 bp, Homo sapiens
cccaggaaggtcccc

SEQ ID NO: 1786185 - DNA, 15 bp, Homo sapiens
ccaggaaggtccccg

SEQ ID NO: 1786186 - DNA, 15 bp, Homo sapiens
caggaaggtccccgc

SEQ ID NO: 1786187 - DNA, 15 bp, Homo sapiens
aggaaggtccccgcg

SEQ ID NO: 1786188 - DNA, 15 bp, Homo sapiens
ggaaggtccccgcgc

SEQ ID NO: 1786189 - DNA, 15 bp, Homo sapiens
gaaggtccccgcgcg

SEQ ID NO: 1786190 - DNA, 15 bp, Homo sapiens
aaggtccccgcgcgc

SEQ ID NO: 1786191 - DNA, 15 bp, Homo sapiens
aggtccccgcgcgcc

SEQ ID NO: 1786192 - DNA, 15 bp, Homo sapiens
ggtccccgcgcgccc

SEQ ID NO: 1786193 - DNA, 15 bp, Homo sapiens
gtccccgcgcgcccc

SEQ ID NO: 1786194 - DNA, 15 bp, Homo sapiens
tccccgcgcgcccca

SEQ ID NO: 1786195 - DNA, 15 bp, Homo sapiens
ccccgcgcgccccag

SEQ ID NO: 1786196 - DNA, 15 bp, Homo sapiens
cccgcgcgccccagc

SEQ ID NO: 1786197 - DNA, 15 bp, Homo sapiens
ccgcgcgccccagcc

SEQ ID NO: 1786198 - DNA, 15 bp, Homo sapiens
cgcgcgccccagcct

SEQ ID NO: 1786199 - DNA, 15 bp, Homo sapiens
gcgcgccccagcctc

SEQ ID NO: 1786200 - DNA, 15 bp, Homo sapiens
cgcgccccagcctcc

SEQ ID NO: 1786201 - DNA, 15 bp, Homo sapiens
gcgccccagcctccc

SEQ ID NO: 1786202 - DNA, 15 bp, Homo sapiens
cgccccagcctcccg

SEQ ID NO: 1786203 - DNA, 15 bp, Homo sapiens
gccccagcctcccgg

SEQ ID NO: 1786204 - DNA, 15 bp, Homo sapiens
ccccagcctcccgga

SEQ ID NO: 1786205 - DNA, 15 bp, Homo sapiens
cccagcctcccggac

SEQ ID NO: 1786206 - DNA, 15 bp, Homo sapiens
ccagcctcccggaca

SEQ ID NO: 1786207 - DNA, 15 bp, Homo sapiens
cagcctcccggacat

SEQ ID NO: 1786208 - DNA, 15 bp, Homo sapiens
agcctcccggacatg

SEQ ID NO: 1786209 - DNA, 15 bp, Homo sapiens
gcctcccggacatgg

SEQ ID NO: 1786210 - DNA, 15 bp, Homo sapiens
cctcccggacatggc

SEQ ID NO: 1786211 - DNA, 15 bp, Homo sapiens
ctcccggacatggcg

SEQ ID NO: 1786212 - DNA, 15 bp, Homo sapiens
tcccggacatggcgt

SEQ ID NO: 1786213 - DNA, 15 bp, Homo sapiens
cccggacatggcgtc

SEQ ID NO: 1786214 - DNA, 15 bp, Homo sapiens
ccggacatggcgtcc

SEQ ID NO: 1786215 - DNA, 15 bp, Homo sapiens
cggacatggcgtcca

SEQ ID NO: 1786216 - DNA, 15 bp, Homo sapiens
ggacatggcgtccag

SEQ ID NO: 1786217 - DNA, 15 bp, Homo sapiens
gacatggcgtccagc

SEQ ID NO: 1786218 - DNA, 15 bp, Homo sapiens
acatggcgtccagca

SEQ ID NO: 1786219 - DNA, 15 bp, Homo sapiens
catggcgtccagcag

SEQ ID NO: 1786220 - DNA, 15 bp, Homo sapiens
atggcgtccagcagc

SEQ ID NO: 1786221 - DNA, 15 bp, Homo sapiens
tggcgtccagcagcg

SEQ ID NO: 1786222 - DNA, 15 bp, Homo sapiens
ggcgtccagcagcgt

SEQ ID NO: 1786223 - DNA, 15 bp, Homo sapiens
gcgtccagcagcgtg

SEQ ID NO: 1786224 - DNA, 15 bp, Homo sapiens
cgtccagcagcgtgg

SEQ ID NO: 1786225 - DNA, 15 bp, Homo sapiens
gtccagcagcgtggt

SEQ ID NO: 1786226 - DNA, 15 bp, Homo sapiens
tccagcagcgtggtt

SEQ ID NO: 1786227 - DNA, 15 bp, Homo sapiens
ccagcagcgtggttt

SEQ ID NO: 1786228 - DNA, 15 bp, Homo sapiens
cagcagcgtggtttt

SEQ ID NO: 1786229 - DNA, 15 bp, Homo sapiens
agcagcgtggttttc

SEQ ID NO: 1786230 - DNA, 15 bp, Homo sapiens
gcagcgtggttttcc

SEQ ID NO: 1786231 - DNA, 15 bp, Homo sapiens
cagcgtggttttccc

SEQ ID NO: 1786232 - DNA, 15 bp, Homo sapiens
agcgtggttttcccg

SEQ ID NO: 1786233 - DNA, 15 bp, Homo sapiens
gcgtggttttcccgg

SEQ ID NO: 1786234 - DNA, 15 bp, Homo sapiens
cgtggttttcccgga

SEQ ID NO: 1786235 - DNA, 15 bp, Homo sapiens
gtggttttcccggag

SEQ ID NO: 1786236 - DNA, 15 bp, Homo sapiens
tggttttcccggagc

SEQ ID NO: 1786237 - DNA, 15 bp, Homo sapiens
ggttttcccggagcc

SEQ ID NO: 1786238 - DNA, 15 bp, Homo sapiens
gttttcccggagcct

SEQ ID NO: 1786239 - DNA, 15 bp, Homo sapiens
ttttcccggagcctg

SEQ ID NO: 1786240 - DNA, 15 bp, Homo sapiens
tttcccggagcctgc

SEQ ID NO: 1786241 - DNA, 15 bp, Homo sapiens
ttcccggagcctgcg

SEQ ID NO: 1786242 - DNA, 15 bp, Homo sapiens
tcccggagcctgcgg

SEQ ID NO: 1786243 - DNA, 15 bp, Homo sapiens
cccggagcctgcggg

SEQ ID NO: 1786244 - DNA, 15 bp, Homo sapiens
ccggagcctgcgggg

SEQ ID NO: 1786245 - DNA, 15 bp, Homo sapiens
cggagcctgcggggc

SEQ ID NO: 1786246 - DNA, 15 bp, Homo sapiens
ggagcctgcggggcg

SEQ ID NO: 1786247 - DNA, 15 bp, Homo sapiens
gagcctgcggggcga

SEQ ID NO: 1786248 - DNA, 15 bp, Homo sapiens
agcctgcggggcgac

SEQ ID NO: 1786249 - DNA, 15 bp, Homo sapiens
gcctgcggggcgaca

SEQ ID NO: 1786250 - DNA, 15 bp, Homo sapiens
cctgcggggcgacaa

SEQ ID NO: 1786251 - DNA, 15 bp, Homo sapiens
ctgcggggcgacaac

SEQ ID NO: 1786252 - DNA, 15 bp, Homo sapiens
tgcggggcgacaaca

SEQ ID NO: 1786253 - DNA, 15 bp, Homo sapiens
gcggggcgacaacag

SEQ ID NO: 1786254 - DNA, 15 bp, Homo sapiens
cggggcgacaacaga

SEQ ID NO: 1786255 - DNA, 15 bp, Homo sapiens
ggggcgacaacagaa

SEQ ID NO: 1786256 - DNA, 15 bp, Homo sapiens
gggcgacaacagaag

SEQ ID NO: 1786257 - DNA, 15 bp, Homo sapiens
ggcgacaacagaagg

SEQ ID NO: 1786258 - DNA, 15 bp, Homo sapiens
gcgacaacagaaggc

SEQ ID NO: 1786259 - DNA, 15 bp, Homo sapiens
cgacaacagaaggcc

SEQ ID NO: 1786260 - DNA, 15 bp, Homo sapiens
gacaacagaaggccc

SEQ ID NO: 1786261 - DNA, 15 bp, Homo sapiens
acaacagaaggccct

SEQ ID NO: 1786262 - DNA, 15 bp, Homo sapiens
caacagaaggcccta

SEQ ID NO: 1786263 - DNA, 15 bp, Homo sapiens
aacagaaggccctag

SEQ ID NO: 1786264 - DNA, 15 bp, Homo sapiens
acagaaggccctaga

SEQ ID NO: 1786265 - DNA, 15 bp, Homo sapiens
cagaaggccctagag

SEQ ID NO: 1786266 - DNA, 15 bp, Homo sapiens
agaaggccctagagg

SEQ ID NO: 1786267 - DNA, 15 bp, Homo sapiens
gaaggccctagagga

SEQ ID NO: 1786268 - DNA, 15 bp, Homo sapiens
aaggccctagaggaa

SEQ ID NO: 1786269 - DNA, 15 bp, Homo sapiens
aggccctagaggaac

SEQ ID NO: 1786270 - DNA, 15 bp, Homo sapiens
ggccctagaggaacc

SEQ ID NO: 1786271 - DNA, 15 bp, Homo sapiens
gccctagaggaacca

SEQ ID NO: 1786272 - DNA, 15 bp, Homo sapiens
ccctagaggaaccac

SEQ ID NO: 1786273 - DNA, 15 bp, Homo sapiens
cctagaggaaccact

SEQ ID NO: 1786274 - DNA, 15 bp, Homo sapiens
ctagaggaaccactc

SEQ ID NO: 1786275 - DNA, 15 bp, Homo sapiens
tagaggaaccactct

SEQ ID NO: 1786276 - DNA, 15 bp, Homo sapiens
agaggaaccactctg

SEQ ID NO: 1786277 - DNA, 15 bp, Homo sapiens
gaggaaccactctgt

SEQ ID NO: 1786278 - DNA, 15 bp, Homo sapiens
aggaaccactctgtg

SEQ ID NO: 1786279 - DNA, 15 bp, Homo sapiens
ggaaccactctgtgc

SEQ ID NO: 1786280 - DNA, 15 bp, Homo sapiens
gaaccactctgtgcc

SEQ ID NO: 1786281 - DNA, 15 bp, Homo sapiens
aaccactctgtgccg

SEQ ID NO: 1786282 - DNA, 15 bp, Homo sapiens
accactctgtgccgg

SEQ ID NO: 1786283 - DNA, 15 bp, Homo sapiens
ccactctgtgccggc

SEQ ID NO: 1786284 - DNA, 15 bp, Homo sapiens
cactctgtgccggcc

SEQ ID NO: 1786285 - DNA, 15 bp, Homo sapiens
actctgtgccggcct

SEQ ID NO: 1786286 - DNA, 15 bp, Homo sapiens
ctctgtgccggcctt

SEQ ID NO: 1786287 - DNA, 15 bp, Homo sapiens
tctgtgccggccttg

SEQ ID NO: 1786288 - DNA, 15 bp, Homo sapiens
ctgtgccggccttgg

SEQ ID NO: 1786289 - DNA, 15 bp, Homo sapiens
tgtgccggccttgga

SEQ ID NO: 1786290 - DNA, 15 bp, Homo sapiens
gtgccggccttggag

SEQ ID NO: 1786291 - DNA, 15 bp, Homo sapiens
tgccggccttggagg

SEQ ID NO: 1786292 - DNA, 15 bp, Homo sapiens
gccggccttggagga

SEQ ID NO: 1786293 - DNA, 15 bp, Homo sapiens
ccggccttggaggag

SEQ ID NO: 1786294 - DNA, 15 bp, Homo sapiens
cggccttggaggagc

SEQ ID NO: 1786295 - DNA, 15 bp, Homo sapiens
ggccttggaggagct

SEQ ID NO: 1786296 - DNA, 15 bp, Homo sapiens
gccttggaggagctt

SEQ ID NO: 1786297 - DNA, 15 bp, Homo sapiens
ccttggaggagcttc

SEQ ID NO: 1786298 - DNA, 15 bp, Homo sapiens
cttggaggagcttcc

SEQ ID NO: 1786299 - DNA, 15 bp, Homo sapiens
ttggaggagcttccc

SEQ ID NO: 1786300 - DNA, 15 bp, Homo sapiens
tggaggagcttcccg

SEQ ID NO: 1786301 - DNA, 15 bp, Homo sapiens
ggaggagcttcccga

SEQ ID NO: 1786302 - DNA, 15 bp, Homo sapiens
gaggagcttcccgag

SEQ ID NO: 1786303 - DNA, 15 bp, Homo sapiens
aggagcttcccgaga

SEQ ID NO: 1786304 - DNA, 15 bp, Homo sapiens
ggagcttcccgagac

SEQ ID NO: 1786305 - DNA, 15 bp, Homo sapiens
gagcttcccgagacc

SEQ ID NO: 1786306 - DNA, 15 bp, Homo sapiens
agcttcccgagaccc

SEQ ID NO: 1786307 - DNA, 15 bp, Homo sapiens
gcttcccgagaccct

SEQ ID NO: 1786308 - DNA, 15 bp, Homo sapiens
cttcccgagaccctc

SEQ ID NO: 1786309 - DNA, 15 bp, Homo sapiens
ttcccgagaccctct

SEQ ID NO: 1786310 - DNA, 15 bp, Homo sapiens
tcccgagaccctctg

SEQ ID NO: 1786311 - DNA, 15 bp, Homo sapiens
cccgagaccctctgt

SEQ ID NO: 1786312 - DNA, 15 bp, Homo sapiens
ccgagaccctctgtg

SEQ ID NO: 1786313 - DNA, 15 bp, Homo sapiens
cgagaccctctgtgc

SEQ ID NO: 1786314 - DNA, 15 bp, Homo sapiens
gagaccctctgtgca

SEQ ID NO: 1786315 - DNA, 15 bp, Homo sapiens
agaccctctgtgcag

SEQ ID NO: 1786316 - DNA, 15 bp, Homo sapiens
gaccctctgtgcagg

SEQ ID NO: 1786317 - DNA, 15 bp, Homo sapiens
accctctgtgcaggc

SEQ ID NO: 1786318 - DNA, 15 bp, Homo sapiens
ccctctgtgcaggca

SEQ ID NO: 1786319 - DNA, 15 bp, Homo sapiens
cctctgtgcaggcat

SEQ ID NO: 1786320 - DNA, 15 bp, Homo sapiens
ctctgtgcaggcatg

SEQ ID NO: 1786321 - DNA, 15 bp, Homo sapiens
tctgtgcaggcatga

SEQ ID NO: 1786322 - DNA, 15 bp, Homo sapiens
ctgtgcaggcatgac

SEQ ID NO: 1786323 - DNA, 15 bp, Homo sapiens
tgtgcaggcatgacc

SEQ ID NO: 1786324 - DNA, 15 bp, Homo sapiens
gtgcaggcatgaccc

SEQ ID NO: 1786325 - DNA, 15 bp, Homo sapiens
tgcaggcatgacccc

SEQ ID NO: 1786326 - DNA, 15 bp, Homo sapiens
gcaggcatgaccccg

SEQ ID NO: 1786327 - DNA, 15 bp, Homo sapiens
caggcatgaccccgc

SEQ ID NO: 1786328 - DNA, 15 bp, Homo sapiens
aggcatgaccccgcg

SEQ ID NO: 1786329 - DNA, 15 bp, Homo sapiens
ggcatgaccccgcgg

SEQ ID NO: 1786330 - DNA, 15 bp, Homo sapiens
gcatgaccccgcggg

SEQ ID NO: 1786331 - DNA, 15 bp, Homo sapiens
catgaccccgcgggc

SEQ ID NO: 1786332 - DNA, 15 bp, Homo sapiens
atgaccccgcgggcc

SEQ ID NO: 1786333 - DNA, 15 bp, Homo sapiens
tgaccccgcgggcca

SEQ ID NO: 1786334 - DNA, 15 bp, Homo sapiens
gaccccgcgggccat

SEQ ID NO: 1786335 - DNA, 15 bp, Homo sapiens
accccgcgggccatg

SEQ ID NO: 1786336 - DNA, 15 bp, Homo sapiens
ccccgcgggccatga

SEQ ID NO: 1786337 - DNA, 15 bp, Homo sapiens
cccgcgggccatgag

SEQ ID NO: 1786338 - DNA, 15 bp, Homo sapiens
ccgcgggccatgagt

SEQ ID NO: 1786339 - DNA, 15 bp, Homo sapiens
cgcgggccatgagtg

SEQ ID NO: 1786340 - DNA, 15 bp, Homo sapiens
gcgggccatgagtgc

SEQ ID NO: 1786341 - DNA, 15 bp, Homo sapiens
cgggccatgagtgct

SEQ ID NO: 1786342 - DNA, 15 bp, Homo sapiens
gggccatgagtgcta

SEQ ID NO: 1786343 - DNA, 15 bp, Homo sapiens
ggccatgagtgctac

SEQ ID NO: 1786344 - DNA, 15 bp, Homo sapiens
gccatgagtgctaca

SEQ ID NO: 1786345 - DNA, 15 bp, Homo sapiens
ccatgagtgctacat

SEQ ID NO: 1786346 - DNA, 15 bp, Homo sapiens
catgagtgctacatg

SEQ ID NO: 1786347 - DNA, 15 bp, Homo sapiens
atgagtgctacatga

SEQ ID NO: 1786348 - DNA, 15 bp, Homo sapiens
tgagtgctacatgac

SEQ ID NO: 1786349 - DNA, 15 bp, Homo sapiens
gagtgctacatgacg

SEQ ID NO: 1786350 - DNA, 15 bp, Homo sapiens
agtgctacatgacgg

SEQ ID NO: 1786351 - DNA, 15 bp, Homo sapiens
gtgctacatgacgga

SEQ ID NO: 1786352 - DNA, 15 bp, Homo sapiens
tgctacatgacggac

SEQ ID NO: 1786353 - DNA, 15 bp, Homo sapiens
gctacatgacggacc

SEQ ID NO: 1786354 - DNA, 15 bp, Homo sapiens
ctacatgacggaccc

SEQ ID NO: 1786355 - DNA, 15 bp, Homo sapiens
tacatgacggaccct

SEQ ID NO: 1786356 - DNA, 15 bp, Homo sapiens
acatgacggaccctg

SEQ ID NO: 1786357 - DNA, 15 bp, Homo sapiens
catgacggaccctgt

SEQ ID NO: 1786358 - DNA, 15 bp, Homo sapiens
atgacggaccctgtt

SEQ ID NO: 1786359 - DNA, 15 bp, Homo sapiens
tgacggaccctgttc

SEQ ID NO: 1786360 - DNA, 15 bp, Homo sapiens
gacggaccctgttct

SEQ ID NO: 1786361 - DNA, 15 bp, Homo sapiens
acggaccctgttcta

SEQ ID NO: 1786362 - DNA, 15 bp, Homo sapiens
cggaccctgttctag

SEQ ID NO: 1786363 - DNA, 15 bp, Homo sapiens
ggaccctgttctagg

SEQ ID NO: 1786364 - DNA, 15 bp, Homo sapiens
gaccctgttctaggt

SEQ ID NO: 1786365 - DNA, 15 bp, Homo sapiens
accctgttctaggtg

SEQ ID NO: 1786366 - DNA, 15 bp, Homo sapiens
ccctgttctaggtgt

SEQ ID NO: 1786367 - DNA, 15 bp, Homo sapiens
cctgttctaggtgtt

SEQ ID NO: 1786368 - DNA, 15 bp, Homo sapiens
ctgttctaggtgtta

SEQ ID NO: 1786369 - DNA, 15 bp, Homo sapiens
tgttctaggtgttaa

SEQ ID NO: 1786370 - DNA, 15 bp, Homo sapiens
gttctaggtgttaag

SEQ ID NO: 1786371 - DNA, 15 bp, Homo sapiens
ttctaggtgttaagg

SEQ ID NO: 1786372 - DNA, 15 bp, Homo sapiens
tctaggtgttaagga

SEQ ID NO: 1786373 - DNA, 15 bp, Homo sapiens
ctaggtgttaaggac

SEQ ID NO: 1786374 - DNA, 15 bp, Homo sapiens
taggtgttaaggaca

SEQ ID NO: 1786375 - DNA, 15 bp, Homo sapiens
aggtgttaaggacac

SEQ ID NO: 1786376 - DNA, 15 bp, Homo sapiens
ggtgttaaggacaca

SEQ ID NO: 1786377 - DNA, 15 bp, Homo sapiens
gtgttaaggacacag

SEQ ID NO: 1786378 - DNA, 15 bp, Homo sapiens
tgttaaggacacagc

SEQ ID NO: 1786379 - DNA, 15 bp, Homo sapiens
gttaaggacacagca

SEQ ID NO: 1786380 - DNA, 15 bp, Homo sapiens
ttaaggacacagcag

SEQ ID NO: 1786381 - DNA, 15 bp, Homo sapiens
taaggacacagcagg

SEQ ID NO: 1786382 - DNA, 15 bp, Homo sapiens
aaggacacagcagga

SEQ ID NO: 1786383 - DNA, 15 bp, Homo sapiens
aggacacagcaggat

SEQ ID NO: 1786384 - DNA, 15 bp, Homo sapiens
ggacacagcaggata

SEQ ID NO: 1786385 - DNA, 15 bp, Homo sapiens
gacacagcaggatac

SEQ ID NO: 1786386 - DNA, 15 bp, Homo sapiens
acacagcaggataca

SEQ ID NO: 1786387 - DNA, 15 bp, Homo sapiens
cacagcaggatacag

SEQ ID NO: 1786388 - DNA, 15 bp, Homo sapiens
acagcaggatacagg

SEQ ID NO: 1786389 - DNA, 15 bp, Homo sapiens
cagcaggatacaggc

SEQ ID NO: 1786390 - DNA, 15 bp, Homo sapiens
agcaggatacaggcc

SEQ ID NO: 1786391 - DNA, 15 bp, Homo sapiens
gcaggatacaggccc

SEQ ID NO: 1786392 - DNA, 15 bp, Homo sapiens
caggatacaggccct

SEQ ID NO: 1786393 - DNA, 15 bp, Homo sapiens
aggatacaggccctg

SEQ ID NO: 1786394 - DNA, 15 bp, Homo sapiens
ggatacaggccctgc

SEQ ID NO: 1786395 - DNA, 15 bp, Homo sapiens
gatacaggccctgcc

SEQ ID NO: 1786396 - DNA, 15 bp, Homo sapiens
atacaggccctgccc

SEQ ID NO: 1786397 - DNA, 15 bp, Homo sapiens
tacaggccctgccct

SEQ ID NO: 1786398 - DNA, 15 bp, Homo sapiens
acaggccctgcccta

SEQ ID NO: 1786399 - DNA, 15 bp, Homo sapiens
caggccctgccctat

SEQ ID NO: 1786400 - DNA, 15 bp, Homo sapiens
aggccctgccctatg

SEQ ID NO: 1786401 - DNA, 15 bp, Homo sapiens
ggccctgccctatgg

SEQ ID NO: 1786402 - DNA, 15 bp, Homo sapiens
gccctgccctatgga

SEQ ID NO: 1786403 - DNA, 15 bp, Homo sapiens
ccctgccctatggaa

SEQ ID NO: 1786404 - DNA, 15 bp, Homo sapiens
cctgccctatggaac

SEQ ID NO: 1786405 - DNA, 15 bp, Homo sapiens
ctgccctatggaacg

SEQ ID NO: 1786406 - DNA, 15 bp, Homo sapiens
tgccctatggaacgc

SEQ ID NO: 1786407 - DNA, 15 bp, Homo sapiens
gccctatggaacgcg

SEQ ID NO: 1786408 - DNA, 15 bp, Homo sapiens
ccctatggaacgcgc

SEQ ID NO: 1786409 - DNA, 15 bp, Homo sapiens
cctatggaacgcgca

SEQ ID NO: 1786410 - DNA, 15 bp, Homo sapiens
ctatggaacgcgcac

SEQ ID NO: 1786411 - DNA, 15 bp, Homo sapiens
tatggaacgcgcact

SEQ ID NO: 1786412 - DNA, 15 bp, Homo sapiens
atggaacgcgcactg

SEQ ID NO: 1786413 - DNA, 15 bp, Homo sapiens
tggaacgcgcactgt

SEQ ID NO: 1786414 - DNA, 15 bp, Homo sapiens
ggaacgcgcactgtg

SEQ ID NO: 1786415 - DNA, 15 bp, Homo sapiens
gaacgcgcactgtgc

SEQ ID NO: 1786416 - DNA, 15 bp, Homo sapiens
aacgcgcactgtgcg

SEQ ID NO: 1786417 - DNA, 15 bp, Homo sapiens
acgcgcactgtgcgt

SEQ ID NO: 1786418 - DNA, 15 bp, Homo sapiens
cgcgcactgtgcgtg

SEQ ID NO: 1786419 - DNA, 15 bp, Homo sapiens
gcgcactgtgcgtgc

SEQ ID NO: 1786420 - DNA, 15 bp, Homo sapiens
cgcactgtgcgtgca

SEQ ID NO: 1786421 - DNA, 15 bp, Homo sapiens
gcactgtgcgtgcag

SEQ ID NO: 1786422 - DNA, 15 bp, Homo sapiens
cactgtgcgtgcagc

SEQ ID NO: 1786423 - DNA, 15 bp, Homo sapiens
actgtgcgtgcagca

SEQ ID NO: 1786424 - DNA, 15 bp, Homo sapiens
ctgtgcgtgcagcag

SEQ ID NO: 1786425 - DNA, 15 bp, Homo sapiens
tgtgcgtgcagcagt

SEQ ID NO: 1786426 - DNA, 15 bp, Homo sapiens
gtgcgtgcagcagtc

SEQ ID NO: 1786427 - DNA, 15 bp, Homo sapiens
tgcgtgcagcagtct

SEQ ID NO: 1786428 - DNA, 15 bp, Homo sapiens
gcgtgcagcagtctc

SEQ ID NO: 1786429 - DNA, 15 bp, Homo sapiens
cgtgcagcagtctca

SEQ ID NO: 1786430 - DNA, 15 bp, Homo sapiens
gtgcagcagtctcac

SEQ ID NO: 1786431 - DNA, 15 bp, Homo sapiens
tgcagcagtctcacg

SEQ ID NO: 1786432 - DNA, 15 bp, Homo sapiens
gcagcagtctcacgc

SEQ ID NO: 1786433 - DNA, 15 bp, Homo sapiens
cagcagtctcacgcg

SEQ ID NO: 1786434 - DNA, 15 bp, Homo sapiens
agcagtctcacgcgc

SEQ ID NO: 1786435 - DNA, 15 bp, Homo sapiens
gcagtctcacgcgca

SEQ ID NO: 1786436 - DNA, 15 bp, Homo sapiens
cagtctcacgcgcaa

SEQ ID NO: 1786437 - DNA, 15 bp, Homo sapiens
agtctcacgcgcaag

SEQ ID NO: 1786438 - DNA, 15 bp, Homo sapiens
gtctcacgcgcaagt

SEQ ID NO: 1786439 - DNA, 15 bp, Homo sapiens
tctcacgcgcaagtg

SEQ ID NO: 1786440 - DNA, 15 bp, Homo sapiens
ctcacgcgcaagtga

SEQ ID NO: 1786441 - DNA, 15 bp, Homo sapiens
tcacgcgcaagtgag

SEQ ID NO: 1786442 - DNA, 15 bp, Homo sapiens
cacgcgcaagtgagt

SEQ ID NO: 1786443 - DNA, 15 bp, Homo sapiens
acgcgcaagtgagtc

SEQ ID NO: 1786444 - DNA, 15 bp, Homo sapiens
cgcgcaagtgagtct

SEQ ID NO: 1786445 - DNA, 15 bp, Homo sapiens
gcgcaagtgagtctc

SEQ ID NO: 1786446 - DNA, 15 bp, Homo sapiens
cgcaagtgagtctct

SEQ ID NO: 1786447 - DNA, 15 bp, Homo sapiens
gcaagtgagtctctg

SEQ ID NO: 1786448 - DNA, 15 bp, Homo sapiens
caagtgagtctctgg

SEQ ID NO: 1786449 - DNA, 15 bp, Homo sapiens
aagtgagtctctgga

SEQ ID NO: 1786450 - DNA, 15 bp, Homo sapiens
agtgagtctctggat

SEQ ID NO: 1786451 - DNA, 15 bp, Homo sapiens
gtgagtctctggatt

SEQ ID NO: 1786452 - DNA, 15 bp, Homo sapiens
tgagtctctggattg

SEQ ID NO: 1786453 - DNA, 15 bp, Homo sapiens
gagtctctggattgt

SEQ ID NO: 1786454 - DNA, 15 bp, Homo sapiens
agtctctggattgtc

SEQ ID NO: 1786455 - DNA, 15 bp, Homo sapiens
gtctctggattgtcc

SEQ ID NO: 1786456 - DNA, 15 bp, Homo sapiens
tctctggattgtccc

SEQ ID NO: 1786457 - DNA, 15 bp, Homo sapiens
ctctggattgtcccc

SEQ ID NO: 1786458 - DNA, 15 bp, Homo sapiens
tctggattgtcccct

SEQ ID NO: 1786459 - DNA, 15 bp, Homo sapiens
ctggattgtcccctg

SEQ ID NO: 1786460 - DNA, 15 bp, Homo sapiens
tggattgtcccctga

SEQ ID NO: 1786461 - DNA, 15 bp, Homo sapiens
ggattgtcccctgag

SEQ ID NO: 1786462 - DNA, 15 bp, Homo sapiens
gattgtcccctgagt

SEQ ID NO: 1786463 - DNA, 15 bp, Homo sapiens
attgtcccctgagtg

SEQ ID NO: 1786464 - DNA, 15 bp, Homo sapiens
ttgtcccctgagtga

SEQ ID NO: 1786465 - DNA, 15 bp, Homo sapiens
tgtcccctgagtgag

SEQ ID NO: 1786466 - DNA, 15 bp, Homo sapiens
gtcccctgagtgaga

SEQ ID NO: 1786467 - DNA, 15 bp, Homo sapiens
tcccctgagtgagag

SEQ ID NO: 1786468 - DNA, 15 bp, Homo sapiens
cccctgagtgagagg

SEQ ID NO: 1786469 - DNA, 15 bp, Homo sapiens
ccctgagtgagaggg

SEQ ID NO: 1786470 - DNA, 15 bp, Homo sapiens
cctgagtgagagggg

SEQ ID NO: 1786471 - DNA, 15 bp, Homo sapiens
ctgagtgagagggga

SEQ ID NO: 1786472 - DNA, 15 bp, Homo sapiens
tgagtgagaggggac

SEQ ID NO: 1786473 - DNA, 15 bp, Homo sapiens
gagtgagaggggaca

SEQ ID NO: 1786474 - DNA, 15 bp, Homo sapiens
agtgagaggggacat

SEQ ID NO: 1786475 - DNA, 15 bp, Homo sapiens
gtgagaggggacatg

SEQ ID NO: 1786476 - DNA, 15 bp, Homo sapiens
tgagaggggacatgc

SEQ ID NO: 1786477 - DNA, 15 bp, Homo sapiens
gagaggggacatgcc

SEQ ID NO: 1786478 - DNA, 15 bp, Homo sapiens
agaggggacatgcca

SEQ ID NO: 1786479 - DNA, 15 bp, Homo sapiens
gaggggacatgccat

SEQ ID NO: 1786480 - DNA, 15 bp, Homo sapiens
aggggacatgccatt

SEQ ID NO: 1786481 - DNA, 15 bp, Homo sapiens
ggggacatgccattt

SEQ ID NO: 1786482 - DNA, 15 bp, Homo sapiens
gggacatgccatttc

SEQ ID NO: 1786483 - DNA, 15 bp, Homo sapiens
ggacatgccatttct

SEQ ID NO: 1786484 - DNA, 15 bp, Homo sapiens
gacatgccatttctc

SEQ ID NO: 1786485 - DNA, 15 bp, Homo sapiens
acatgccatttctct

SEQ ID NO: 1786486 - DNA, 15 bp, Homo sapiens
catgccatttctctc

SEQ ID NO: 1786487 - DNA, 15 bp, Homo sapiens
atgccatttctctca

SEQ ID NO: 1786488 - DNA, 15 bp, Homo sapiens
tgccatttctctcat

SEQ ID NO: 1786489 - DNA, 15 bp, Homo sapiens
gccatttctctcatc

SEQ ID NO: 1786490 - DNA, 15 bp, Homo sapiens
ccatttctctcatct

SEQ ID NO: 1786491 - DNA, 15 bp, Homo sapiens
catttctctcatctg

SEQ ID NO: 1786492 - DNA, 15 bp, Homo sapiens
atttctctcatctgg

SEQ ID NO: 1786493 - DNA, 15 bp, Homo sapiens
tttctctcatctggg

SEQ ID NO: 1786494 - DNA, 15 bp, Homo sapiens
ttctctcatctgggt

SEQ ID NO: 1786495 - DNA, 15 bp, Homo sapiens
tctctcatctgggtc

SEQ ID NO: 1786496 - DNA, 15 bp, Homo sapiens
ctctcatctgggtca

SEQ ID NO: 1786497 - DNA, 15 bp, Homo sapiens
tctcatctgggtcaa

SEQ ID NO: 1786498 - DNA, 15 bp, Homo sapiens
ctcatctgggtcaag

SEQ ID NO: 1786499 - DNA, 15 bp, Homo sapiens
tcatctgggtcaaga

SEQ ID NO: 1786500 - DNA, 15 bp, Homo sapiens
catctgggtcaagac

SEQ ID NO: 1786501 - DNA, 15 bp, Homo sapiens
atctgggtcaagacc

SEQ ID NO: 1786502 - DNA, 15 bp, Homo sapiens
tctgggtcaagaccg

SEQ ID NO: 1786503 - DNA, 15 bp, Homo sapiens
ctgggtcaagaccga

SEQ ID NO: 1786504 - DNA, 15 bp, Homo sapiens
tgggtcaagaccgaa

SEQ ID NO: 1786505 - DNA, 15 bp, Homo sapiens
gggtcaagaccgaac

SEQ ID NO: 1786506 - DNA, 15 bp, Homo sapiens
ggtcaagaccgaacg

SEQ ID NO: 1786507 - DNA, 15 bp, Homo sapiens
gtcaagaccgaacgt

SEQ ID NO: 1786508 - DNA, 15 bp, Homo sapiens
tcaagaccgaacgtg

SEQ ID NO: 1786509 - DNA, 15 bp, Homo sapiens
caagaccgaacgtgc

SEQ ID NO: 1786510 - DNA, 15 bp, Homo sapiens
aagaccgaacgtgct

SEQ ID NO: 1786511 - DNA, 15 bp, Homo sapiens
agaccgaacgtgctt

SEQ ID NO: 1786512 - DNA, 15 bp, Homo sapiens
gaccgaacgtgcttt

SEQ ID NO: 1786513 - DNA, 15 bp, Homo sapiens
accgaacgtgctttc

SEQ ID NO: 1786514 - DNA, 15 bp, Homo sapiens
ccgaacgtgctttct

SEQ ID NO: 1786515 - DNA, 15 bp, Homo sapiens
cgaacgtgctttctc

SEQ ID NO: 1786516 - DNA, 15 bp, Homo sapiens
gaacgtgctttctct

SEQ ID NO: 1786517 - DNA, 15 bp, Homo sapiens
aacgtgctttctctg

SEQ ID NO: 1786518 - DNA, 15 bp, Homo sapiens
acgtgctttctctgc

SEQ ID NO: 1786519 - DNA, 15 bp, Homo sapiens
cgtgctttctctgct

SEQ ID NO: 1786520 - DNA, 15 bp, Homo sapiens
gtgctttctctgctt

SEQ ID NO: 1786521 - DNA, 15 bp, Homo sapiens
tgctttctctgcttg

SEQ ID NO: 1786522 - DNA, 15 bp, Homo sapiens
gctttctctgcttgt

SEQ ID NO: 1786523 - DNA, 15 bp, Homo sapiens
ctttctctgcttgtt

SEQ ID NO: 1786524 - DNA, 15 bp, Homo sapiens
tttctctgcttgttt

SEQ ID NO: 1786525 - DNA, 15 bp, Homo sapiens
ttctctgcttgttta

SEQ ID NO: 1786526 - DNA, 15 bp, Homo sapiens
tctctgcttgtttat

SEQ ID NO: 1786527 - DNA, 15 bp, Homo sapiens
ctctgcttgtttatt

SEQ ID NO: 1786528 - DNA, 15 bp, Homo sapiens
tctgcttgtttattt

SEQ ID NO: 1786529 - DNA, 15 bp, Homo sapiens
ctgcttgtttatttg

SEQ ID NO: 1786530 - DNA, 15 bp, Homo sapiens
tgcttgtttatttgt

SEQ ID NO: 1786531 - DNA, 15 bp, Homo sapiens
gcttgtttatttgtc

SEQ ID NO: 1786532 - DNA, 15 bp, Homo sapiens
cttgtttatttgtct

SEQ ID NO: 1786533 - DNA, 15 bp, Homo sapiens
ttgtttatttgtctt

SEQ ID NO: 1786534 - DNA, 15 bp, Homo sapiens
tgtttatttgtcttt

SEQ ID NO: 1786535 - DNA, 15 bp, Homo sapiens
gtttatttgtcttta

SEQ ID NO: 1786536 - DNA, 15 bp, Homo sapiens
tttatttgtctttaa

SEQ ID NO: 1786537 - DNA, 15 bp, Homo sapiens
ttatttgtctttaaa

SEQ ID NO: 1786538 - DNA, 15 bp, Homo sapiens
tatttgtctttaaaa

SEQ ID NO: 1786539 - DNA, 15 bp, Homo sapiens
atttgtctttaaaac

SEQ ID NO: 1786540 - DNA, 15 bp, Homo sapiens
tttgtctttaaaact

SEQ ID NO: 1786541 - DNA, 15 bp, Homo sapiens
ttgtctttaaaactg

SEQ ID NO: 1786542 - DNA, 15 bp, Homo sapiens
tgtctttaaaactgt

SEQ ID NO: 1786543 - DNA, 15 bp, Homo sapiens
gtctttaaaactgtt

SEQ ID NO: 1786544 - DNA, 15 bp, Homo sapiens
tctttaaaactgttt

SEQ ID NO: 1786545 - DNA, 15 bp, Homo sapiens
ctttaaaactgtttt

SEQ ID NO: 1786546 - DNA, 15 bp, Homo sapiens
tttaaaactgttttg

SEQ ID NO: 1786547 - DNA, 15 bp, Homo sapiens
ttaaaactgttttgg

SEQ ID NO: 1786548 - DNA, 15 bp, Homo sapiens
taaaactgttttgga

SEQ ID NO: 1786549 - DNA, 15 bp, Homo sapiens
aaaactgttttggat

SEQ ID NO: 1786550 - DNA, 15 bp, Homo sapiens
aaactgttttggatt

SEQ ID NO: 1786551 - DNA, 15 bp, Homo sapiens
aactgttttggattg

SEQ ID NO: 1786552 - DNA, 15 bp, Homo sapiens
actgttttggattga

SEQ ID NO: 1786553 - DNA, 15 bp, Homo sapiens
ctgttttggattgaa

SEQ ID NO: 1786554 - DNA, 15 bp, Homo sapiens
tgttttggattgaaa

SEQ ID NO: 1786555 - DNA, 15 bp, Homo sapiens
gttttggattgaaaa

SEQ ID NO: 1786556 - DNA, 15 bp, Homo sapiens
ttttggattgaaaaa

SEQ ID NO: 1786557 - DNA, 15 bp, Homo sapiens
tttggattgaaaaac

SEQ ID NO: 1786558 - DNA, 15 bp, Homo sapiens
ttggattgaaaaaca

SEQ ID NO: 1786559 - DNA, 15 bp, Homo sapiens
tggattgaaaaacaa

SEQ ID NO: 1786560 - DNA, 15 bp, Homo sapiens
ggattgaaaaacaaa

SEQ ID NO: 1786561 - DNA, 15 bp, Homo sapiens
gattgaaaaacaaaa

SEQ ID NO: 1786562 - DNA, 15 bp, Homo sapiens
attgaaaaacaaaat

SEQ ID NO: 1786563 - DNA, 15 bp, Homo sapiens
ttgaaaaacaaaata

SEQ ID NO: 1786564 - DNA, 15 bp, Homo sapiens
tgaaaaacaaaatac

SEQ ID NO: 1786565 - DNA, 15 bp, Homo sapiens
gaaaaacaaaatact

SEQ ID NO: 1786566 - DNA, 15 bp, Homo sapiens
aaaaacaaaatactt

SEQ ID NO: 1786567 - DNA, 15 bp, Homo sapiens
aaaacaaaatactta

SEQ ID NO: 1786568 - DNA, 15 bp, Homo sapiens
aaacaaaatacttat

SEQ ID NO: 1786569 - DNA, 15 bp, Homo sapiens
aacaaaatacttata

SEQ ID NO: 1786570 - DNA, 15 bp, Homo sapiens
acaaaatacttatag

SEQ ID NO: 1786571 - DNA, 15 bp, Homo sapiens
caaaatacttatagg

SEQ ID NO: 1786572 - DNA, 15 bp, Homo sapiens
aaaatacttataggt

SEQ ID NO: 1786573 - DNA, 15 bp, Homo sapiens
aaatacttataggta

SEQ ID NO: 1786574 - DNA, 15 bp, Homo sapiens
aatacttataggtat

SEQ ID NO: 1786575 - DNA, 15 bp, Homo sapiens
atacttataggtatc

SEQ ID NO: 1786576 - DNA, 15 bp, Homo sapiens
tacttataggtatca

SEQ ID NO: 1786577 - DNA, 15 bp, Homo sapiens
acttataggtatcag

SEQ ID NO: 1786578 - DNA, 15 bp, Homo sapiens
cttataggtatcaga

SEQ ID NO: 1786579 - DNA, 15 bp, Homo sapiens
ttataggtatcagaa

SEQ ID NO: 1786580 - DNA, 15 bp, Homo sapiens
tataggtatcagaat

SEQ ID NO: 1786581 - DNA, 15 bp, Homo sapiens
ataggtatcagaata

SEQ ID NO: 1786582 - DNA, 15 bp, Homo sapiens
taggtatcagaataa

SEQ ID NO: 1786583 - DNA, 15 bp, Homo sapiens
aggtatcagaataag

SEQ ID NO: 1786584 - DNA, 15 bp, Homo sapiens
ggtatcagaataaga

SEQ ID NO: 1786585 - DNA, 15 bp, Homo sapiens
gtatcagaataagag

SEQ ID NO: 1786586 - DNA, 15 bp, Homo sapiens
tatcagaataagagg

SEQ ID NO: 1786587 - DNA, 15 bp, Homo sapiens
atcagaataagagga

SEQ ID NO: 1786588 - DNA, 15 bp, Homo sapiens
tcagaataagaggaa

SEQ ID NO: 1786589 - DNA, 15 bp, Homo sapiens
cagaataagaggaaa

SEQ ID NO: 1786590 - DNA, 15 bp, Homo sapiens
agaataagaggaaag

SEQ ID NO: 1786591 - DNA, 15 bp, Homo sapiens
gaataagaggaaagc

SEQ ID NO: 1786592 - DNA, 15 bp, Homo sapiens
aataagaggaaagcc

SEQ ID NO: 1786593 - DNA, 15 bp, Homo sapiens
ataagaggaaagcca

SEQ ID NO: 1786594 - DNA, 15 bp, Homo sapiens
taagaggaaagccaa

SEQ ID NO: 1786595 - DNA, 15 bp, Homo sapiens
aagaggaaagccaag

SEQ ID NO: 1786596 - DNA, 15 bp, Homo sapiens
agaggaaagccaaga

SEQ ID NO: 1786597 - DNA, 15 bp, Homo sapiens
gaggaaagccaagac

SEQ ID NO: 1786598 - DNA, 15 bp, Homo sapiens
aggaaagccaagact

SEQ ID NO: 1786599 - DNA, 15 bp, Homo sapiens
ggaaagccaagactc

SEQ ID NO: 1786600 - DNA, 15 bp, Homo sapiens
gaaagccaagactct

SEQ ID NO: 1786601 - DNA, 15 bp, Homo sapiens
aaagccaagactctt

SEQ ID NO: 1786602 - DNA, 15 bp, Homo sapiens
aagccaagactcttg

SEQ ID NO: 1786603 - DNA, 15 bp, Homo sapiens
agccaagactcttgg

SEQ ID NO: 1786604 - DNA, 15 bp, Homo sapiens
gccaagactcttgga

SEQ ID NO: 1786605 - DNA, 15 bp, Homo sapiens
ccaagactcttggaa

SEQ ID NO: 1786606 - DNA, 15 bp, Homo sapiens
caagactcttggaaa

SEQ ID NO: 1786607 - DNA, 15 bp, Homo sapiens
aagactcttggaaac

SEQ ID NO: 1786608 - DNA, 15 bp, Homo sapiens
agactcttggaaacg

SEQ ID NO: 1786609 - DNA, 15 bp, Homo sapiens
gactcttggaaacgt

SEQ ID NO: 1786610 - DNA, 15 bp, Homo sapiens
actcttggaaacgtt

SEQ ID NO: 1786611 - DNA, 15 bp, Homo sapiens
ctcttggaaacgttt

SEQ ID NO: 1786612 - DNA, 15 bp, Homo sapiens
tcttggaaacgtttg

SEQ ID NO: 1786613 - DNA, 15 bp, Homo sapiens
cttggaaacgtttgg

SEQ ID NO: 1786614 - DNA, 15 bp, Homo sapiens
ttggaaacgtttgga

SEQ ID NO: 1786615 - DNA, 15 bp, Homo sapiens
tggaaacgtttggat

SEQ ID NO: 1786616 - DNA, 15 bp, Homo sapiens
ggaaacgtttggatc

SEQ ID NO: 1786617 - DNA, 15 bp, Homo sapiens
gaaacgtttggatcc

SEQ ID NO: 1786618 - DNA, 15 bp, Homo sapiens
aaacgtttggatcct

SEQ ID NO: 1786619 - DNA, 15 bp, Homo sapiens
aacgtttggatccta

SEQ ID NO: 1786620 - DNA, 15 bp, Homo sapiens
acgtttggatcctag

SEQ ID NO: 1786621 - DNA, 15 bp, Homo sapiens
cgtttggatcctagg

SEQ ID NO: 1786622 - DNA, 15 bp, Homo sapiens
gtttggatcctagga

SEQ ID NO: 1786623 - DNA, 15 bp, Homo sapiens
tttggatcctaggac

SEQ ID NO: 1786624 - DNA, 15 bp, Homo sapiens
ttggatcctaggacg

SEQ ID NO: 1786625 - DNA, 15 bp, Homo sapiens
tggatcctaggacgg

SEQ ID NO: 1786626 - DNA, 15 bp, Homo sapiens
ggatcctaggacgga

SEQ ID NO: 1786627 - DNA, 15 bp, Homo sapiens
gatcctaggacggat

SEQ ID NO: 1786628 - DNA, 15 bp, Homo sapiens
atcctaggacggatt

SEQ ID NO: 1786629 - DNA, 15 bp, Homo sapiens
tcctaggacggattt

SEQ ID NO: 1786630 - DNA, 15 bp, Homo sapiens
cctaggacggatttc

SEQ ID NO: 1786631 - DNA, 15 bp, Homo sapiens
ctaggacggatttct

SEQ ID NO: 1786632 - DNA, 15 bp, Homo sapiens
taggacggatttctt

SEQ ID NO: 1786633 - DNA, 15 bp, Homo sapiens
aggacggatttcttt

SEQ ID NO: 1786634 - DNA, 15 bp, Homo sapiens
ggacggatttctttt

SEQ ID NO: 1786635 - DNA, 15 bp, Homo sapiens
gacggatttcttttt

SEQ ID NO: 1786636 - DNA, 15 bp, Homo sapiens
acggatttctttttg

SEQ ID NO: 1786637 - DNA, 15 bp, Homo sapiens
cggatttctttttgt

SEQ ID NO: 1786638 - DNA, 15 bp, Homo sapiens
ggatttctttttgtg

SEQ ID NO: 1786639 - DNA, 15 bp, Homo sapiens
gatttctttttgtgc

SEQ ID NO: 1786640 - DNA, 15 bp, Homo sapiens
atttctttttgtgcc

SEQ ID NO: 1786641 - DNA, 15 bp, Homo sapiens
tttctttttgtgccc

SEQ ID NO: 1786642 - DNA, 15 bp, Homo sapiens
ttctttttgtgcccc

SEQ ID NO: 1786643 - DNA, 15 bp, Homo sapiens
tctttttgtgccccc

SEQ ID NO: 1786644 - DNA, 15 bp, Homo sapiens
ctttttgtgcccccc

SEQ ID NO: 1786645 - DNA, 15 bp, Homo sapiens
tttttgtgcccccct

SEQ ID NO: 1786646 - DNA, 15 bp, Homo sapiens
ttttgtgcccccctg

SEQ ID NO: 1786647 - DNA, 15 bp, Homo sapiens
tttgtgcccccctgg

SEQ ID NO: 1786648 - DNA, 15 bp, Homo sapiens
ttgtgcccccctggg

SEQ ID NO: 1786649 - DNA, 15 bp, Homo sapiens
tgtgcccccctgggg

SEQ ID NO: 1786650 - DNA, 15 bp, Homo sapiens
gtgcccccctggggt

SEQ ID NO: 1786651 - DNA, 15 bp, Homo sapiens
tgcccccctggggtg

SEQ ID NO: 1786652 - DNA, 15 bp, Homo sapiens
gcccccctggggtgg

SEQ ID NO: 1786653 - DNA, 15 bp, Homo sapiens
cccccctggggtggt

SEQ ID NO: 1786654 - DNA, 15 bp, Homo sapiens
ccccctggggtggtc

SEQ ID NO: 1786655 - DNA, 15 bp, Homo sapiens
cccctggggtggtct

SEQ ID NO: 1786656 - DNA, 15 bp, Homo sapiens
ccctggggtggtctg

SEQ ID NO: 1786657 - DNA, 15 bp, Homo sapiens
cctggggtggtctgg

SEQ ID NO: 1786658 - DNA, 15 bp, Homo sapiens
ctggggtggtctggt

SEQ ID NO: 1786659 - DNA, 15 bp, Homo sapiens
tggggtggtctggtt

SEQ ID NO: 1786660 - DNA, 15 bp, Homo sapiens
ggggtggtctggttg

SEQ ID NO: 1786661 - DNA, 15 bp, Homo sapiens
gggtggtctggttgt

SEQ ID NO: 1786662 - DNA, 15 bp, Homo sapiens
ggtggtctggttgta

SEQ ID NO: 1786663 - DNA, 15 bp, Homo sapiens
gtggtctggttgtac

SEQ ID NO: 1786664 - DNA, 15 bp, Homo sapiens
tggtctggttgtacc

SEQ ID NO: 1786665 - DNA, 15 bp, Homo sapiens
ggtctggttgtacct

SEQ ID NO: 1786666 - DNA, 15 bp, Homo sapiens
gtctggttgtacctg

SEQ ID NO: 1786667 - DNA, 15 bp, Homo sapiens
tctggttgtacctgg

SEQ ID NO: 1786668 - DNA, 15 bp, Homo sapiens
ctggttgtacctgga

SEQ ID NO: 1786669 - DNA, 15 bp, Homo sapiens
tggttgtacctggat

SEQ ID NO: 1786670 - DNA, 15 bp, Homo sapiens
ggttgtacctggatg

SEQ ID NO: 1786671 - DNA, 15 bp, Homo sapiens
gttgtacctggatgt

SEQ ID NO: 1786672 - DNA, 15 bp, Homo sapiens
ttgtacctggatgta

SEQ ID NO: 1786673 - DNA, 15 bp, Homo sapiens
tgtacctggatgtag

SEQ ID NO: 1786674 - DNA, 15 bp, Homo sapiens
gtacctggatgtagg

SEQ ID NO: 1786675 - DNA, 15 bp, Homo sapiens
tacctggatgtaggt

SEQ ID NO: 1786676 - DNA, 15 bp, Homo sapiens
acctggatgtaggtg

SEQ ID NO: 1786677 - DNA, 15 bp, Homo sapiens
cctggatgtaggtga

SEQ ID NO: 1786678 - DNA, 15 bp, Homo sapiens
ctggatgtaggtgac

SEQ ID NO: 1786679 - DNA, 15 bp, Homo sapiens
tggatgtaggtgaca

SEQ ID NO: 1786680 - DNA, 15 bp, Homo sapiens
ggatgtaggtgacat

SEQ ID NO: 1786681 - DNA, 15 bp, Homo sapiens
gatgtaggtgacatt

SEQ ID NO: 1786682 - DNA, 15 bp, Homo sapiens
atgtaggtgacattg

SEQ ID NO: 1786683 - DNA, 15 bp, Homo sapiens
tgtaggtgacattgt

SEQ ID NO: 1786684 - DNA, 15 bp, Homo sapiens
gtaggtgacattgtc

SEQ ID NO: 1786685 - DNA, 15 bp, Homo sapiens
taggtgacattgtct

SEQ ID NO: 1786686 - DNA, 15 bp, Homo sapiens
aggtgacattgtcta

SEQ ID NO: 1786687 - DNA, 15 bp, Homo sapiens
ggtgacattgtctag

SEQ ID NO: 1786688 - DNA, 15 bp, Homo sapiens
gtgacattgtctaga

SEQ ID NO: 1786689 - DNA, 15 bp, Homo sapiens
tgacattgtctagag

SEQ ID NO: 1786690 - DNA, 15 bp, Homo sapiens
gacattgtctagagc

SEQ ID NO: 1786691 - DNA, 15 bp, Homo sapiens
acattgtctagagcc

SEQ ID NO: 1786692 - DNA, 15 bp, Homo sapiens
cattgtctagagcct

SEQ ID NO: 1786693 - DNA, 15 bp, Homo sapiens
attgtctagagcctt

SEQ ID NO: 1786694 - DNA, 15 bp, Homo sapiens
ttgtctagagccttg

SEQ ID NO: 1786695 - DNA, 15 bp, Homo sapiens
tgtctagagccttgc

SEQ ID NO: 1786696 - DNA, 15 bp, Homo sapiens
gtctagagccttgct

SEQ ID NO: 1786697 - DNA, 15 bp, Homo sapiens
tctagagccttgctc

SEQ ID NO: 1786698 - DNA, 15 bp, Homo sapiens
ctagagccttgctca

SEQ ID NO: 1786699 - DNA, 15 bp, Homo sapiens
tagagccttgctcac

SEQ ID NO: 1786700 - DNA, 15 bp, Homo sapiens
agagccttgctcaca

SEQ ID NO: 1786701 - DNA, 15 bp, Homo sapiens
gagccttgctcacaa

SEQ ID NO: 1786702 - DNA, 15 bp, Homo sapiens
agccttgctcacaaa

SEQ ID NO: 1786703 - DNA, 15 bp, Homo sapiens
gccttgctcacaaag

SEQ ID NO: 1786704 - DNA, 15 bp, Homo sapiens
ccttgctcacaaagc

SEQ ID NO: 1786705 - DNA, 15 bp, Homo sapiens
cttgctcacaaagca

SEQ ID NO: 1786706 - DNA, 15 bp, Homo sapiens
ttgctcacaaagcaa

SEQ ID NO: 1786707 - DNA, 15 bp, Homo sapiens
tgctcacaaagcaag

SEQ ID NO: 1786708 - DNA, 15 bp, Homo sapiens
gctcacaaagcaagc

SEQ ID NO: 1786709 - DNA, 15 bp, Homo sapiens
ctcacaaagcaagca

SEQ ID NO: 1786710 - DNA, 15 bp, Homo sapiens
tcacaaagcaagcag

SEQ ID NO: 1786711 - DNA, 15 bp, Homo sapiens
cacaaagcaagcagc

SEQ ID NO: 1786712 - DNA, 15 bp, Homo sapiens
acaaagcaagcagca

SEQ ID NO: 1786713 - DNA, 15 bp, Homo sapiens
caaagcaagcagcat

SEQ ID NO: 1786714 - DNA, 15 bp, Homo sapiens
aaagcaagcagcatc

SEQ ID NO: 1786715 - DNA, 15 bp, Homo sapiens
aagcaagcagcatca

SEQ ID NO: 1786716 - DNA, 15 bp, Homo sapiens
agcaagcagcatcag

SEQ ID NO: 1786717 - DNA, 15 bp, Homo sapiens
gcaagcagcatcagc

SEQ ID NO: 1786718 - DNA, 15 bp, Homo sapiens
caagcagcatcagca

SEQ ID NO: 1786719 - DNA, 15 bp, Homo sapiens
aagcagcatcagcaa

SEQ ID NO: 1786720 - DNA, 15 bp, Homo sapiens
agcagcatcagcaac

SEQ ID NO: 1786721 - DNA, 15 bp, Homo sapiens
gcagcatcagcaacc

SEQ ID NO: 1786722 - DNA, 15 bp, Homo sapiens
cagcatcagcaaccc

SEQ ID NO: 1786723 - DNA, 15 bp, Homo sapiens
agcatcagcaacccc

SEQ ID NO: 1786724 - DNA, 15 bp, Homo sapiens
gcatcagcaacccct

SEQ ID NO: 1786725 - DNA, 15 bp, Homo sapiens
catcagcaacccctg

SEQ ID NO: 1786726 - DNA, 15 bp, Homo sapiens
atcagcaacccctga

SEQ ID NO: 1786727 - DNA, 15 bp, Homo sapiens
tcagcaacccctgag

SEQ ID NO: 1786728 - DNA, 15 bp, Homo sapiens
cagcaacccctgaga

SEQ ID NO: 1786729 - DNA, 15 bp, Homo sapiens
agcaacccctgagag

SEQ ID NO: 1786730 - DNA, 15 bp, Homo sapiens
gcaacccctgagagc

SEQ ID NO: 1786731 - DNA, 15 bp, Homo sapiens
caacccctgagagct

SEQ ID NO: 1786732 - DNA, 15 bp, Homo sapiens
aacccctgagagctt

SEQ ID NO: 1786733 - DNA, 15 bp, Homo sapiens
acccctgagagcttg

SEQ ID NO: 1786734 - DNA, 15 bp, Homo sapiens
cccctgagagcttgc

SEQ ID NO: 1786735 - DNA, 15 bp, Homo sapiens
ccctgagagcttgcc

SEQ ID NO: 1786736 - DNA, 15 bp, Homo sapiens
cctgagagcttgcca

SEQ ID NO: 1786737 - DNA, 15 bp, Homo sapiens
ctgagagcttgccag

SEQ ID NO: 1786738 - DNA, 15 bp, Homo sapiens
tgagagcttgccaga

SEQ ID NO: 1786739 - DNA, 15 bp, Homo sapiens
gagagcttgccagaa

SEQ ID NO: 1786740 - DNA, 15 bp, Homo sapiens
agagcttgccagaaa

SEQ ID NO: 1786741 - DNA, 15 bp, Homo sapiens
gagcttgccagaaat

SEQ ID NO: 1786742 - DNA, 15 bp, Homo sapiens
agcttgccagaaatg

SEQ ID NO: 1786743 - DNA, 15 bp, Homo sapiens
gcttgccagaaatgc

SEQ ID NO: 1786744 - DNA, 15 bp, Homo sapiens
cttgccagaaatgca

SEQ ID NO: 1786745 - DNA, 15 bp, Homo sapiens
ttgccagaaatgcag

SEQ ID NO: 1786746 - DNA, 15 bp, Homo sapiens
tgccagaaatgcaga

SEQ ID NO: 1786747 - DNA, 15 bp, Homo sapiens
gccagaaatgcagag

SEQ ID NO: 1786748 - DNA, 15 bp, Homo sapiens
ccagaaatgcagagc

SEQ ID NO: 1786749 - DNA, 15 bp, Homo sapiens
cagaaatgcagagcc

SEQ ID NO: 1786750 - DNA, 15 bp, Homo sapiens
agaaatgcagagcct

SEQ ID NO: 1786751 - DNA, 15 bp, Homo sapiens
gaaatgcagagcctc

SEQ ID NO: 1786752 - DNA, 15 bp, Homo sapiens
aaatgcagagcctca

SEQ ID NO: 1786753 - DNA, 15 bp, Homo sapiens
aatgcagagcctcaa

SEQ ID NO: 1786754 - DNA, 15 bp, Homo sapiens
atgcagagcctcaag

SEQ ID NO: 1786755 - DNA, 15 bp, Homo sapiens
tgcagagcctcaagc

SEQ ID NO: 1786756 - DNA, 15 bp, Homo sapiens
gcagagcctcaagcc

SEQ ID NO: 1786757 - DNA, 15 bp, Homo sapiens
cagagcctcaagccg

SEQ ID NO: 1786758 - DNA, 15 bp, Homo sapiens
agagcctcaagccgc

SEQ ID NO: 1786759 - DNA, 15 bp, Homo sapiens
gagcctcaagccgca

SEQ ID NO: 1786760 - DNA, 15 bp, Homo sapiens
agcctcaagccgcac

SEQ ID NO: 1786761 - DNA, 15 bp, Homo sapiens
gcctcaagccgcacc

SEQ ID NO: 1786762 - DNA, 15 bp, Homo sapiens
cctcaagccgcaccc

SEQ ID NO: 1786763 - DNA, 15 bp, Homo sapiens
ctcaagccgcaccca

SEQ ID NO: 1786764 - DNA, 15 bp, Homo sapiens
tcaagccgcacccaa

SEQ ID NO: 1786765 - DNA, 15 bp, Homo sapiens
caagccgcacccaag

SEQ ID NO: 1786766 - DNA, 15 bp, Homo sapiens
aagccgcacccaaga

SEQ ID NO: 1786767 - DNA, 15 bp, Homo sapiens
agccgcacccaagac

SEQ ID NO: 1786768 - DNA, 15 bp, Homo sapiens
gccgcacccaagacc

SEQ ID NO: 1786769 - DNA, 15 bp, Homo sapiens
ccgcacccaagacct

SEQ ID NO: 1786770 - DNA, 15 bp, Homo sapiens
cgcacccaagacctg

SEQ ID NO: 1786771 - DNA, 15 bp, Homo sapiens
gcacccaagacctgc

SEQ ID NO: 1786772 - DNA, 15 bp, Homo sapiens
cacccaagacctgct

SEQ ID NO: 1786773 - DNA, 15 bp, Homo sapiens
acccaagacctgctg

SEQ ID NO: 1786774 - DNA, 15 bp, Homo sapiens
aagacctgctgagtc

SEQ ID NO: 1786775 - DNA, 15 bp, Homo sapiens
agacctgctgagtca

SEQ ID NO: 1786776 - DNA, 15 bp, Homo sapiens
gacctgctgagtcag

SEQ ID NO: 1786777 - DNA, 15 bp, Homo sapiens
acctgctgagtcagc

SEQ ID NO: 1786778 - DNA, 15 bp, Homo sapiens
cctgctgagtcagct

SEQ ID NO: 1786779 - DNA, 15 bp, Homo sapiens
ctgctgagtcagctc

SEQ ID NO: 1786780 - DNA, 15 bp, Homo sapiens
tgctgagtcagctct

SEQ ID NO: 1786781 - DNA, 15 bp, Homo sapiens
gctgagtcagctctg

SEQ ID NO: 1786782 - DNA, 15 bp, Homo sapiens
ctgagtcagctctgc

SEQ ID NO: 1786783 - DNA, 15 bp, Homo sapiens
tgagtcagctctgct

SEQ ID NO: 1786784 - DNA, 15 bp, Homo sapiens
gagtcagctctgctt

SEQ ID NO: 1786785 - DNA, 15 bp, Homo sapiens
agtcagctctgcttc

SEQ ID NO: 1786786 - DNA, 15 bp, Homo sapiens
gtcagctctgcttca

SEQ ID NO: 1786787 - DNA, 15 bp, Homo sapiens
tcagctctgcttcag

SEQ ID NO: 1786788 - DNA, 15 bp, Homo sapiens
cagctctgcttcagt

SEQ ID NO: 1786789 - DNA, 15 bp, Homo sapiens
agctctgcttcagtc

SEQ ID NO: 1786790 - DNA, 15 bp, Homo sapiens
gctctgcttcagtcg

SEQ ID NO: 1786791 - DNA, 15 bp, Homo sapiens
ctctgcttcagtcga

SEQ ID NO: 1786792 - DNA, 15 bp, Homo sapiens
tctgcttcagtcgag

SEQ ID NO: 1786793 - DNA, 15 bp, Homo sapiens
ctgcttcagtcgagt

SEQ ID NO: 1786794 - DNA, 15 bp, Homo sapiens
tgcttcagtcgagtt

SEQ ID NO: 1786795 - DNA, 15 bp, Homo sapiens
gcttcagtcgagttt

SEQ ID NO: 1786796 - DNA, 15 bp, Homo sapiens
cttcagtcgagtttg

SEQ ID NO: 1786797 - DNA, 15 bp, Homo sapiens
ttcagtcgagtttga

SEQ ID NO: 1786798 - DNA, 15 bp, Homo sapiens
tcagtcgagtttgag

SEQ ID NO: 1786799 - DNA, 15 bp, Homo sapiens
cagtcgagtttgaga

SEQ ID NO: 1786800 - DNA, 15 bp, Homo sapiens
agtcgagtttgagaa

SEQ ID NO: 1786801 - DNA, 15 bp, Homo sapiens
gtcgagtttgagaag

SEQ ID NO: 1786802 - DNA, 15 bp, Homo sapiens
tcgagtttgagaagc

SEQ ID NO: 1786803 - DNA, 15 bp, Homo sapiens
cgagtttgagaagca

SEQ ID NO: 1786804 - DNA, 15 bp, Homo sapiens
gagtttgagaagcac

SEQ ID NO: 1786805 - DNA, 15 bp, Homo sapiens
agtttgagaagcact

SEQ ID NO: 1786806 - DNA, 15 bp, Homo sapiens
gtttgagaagcactg

SEQ ID NO: 1786807 - DNA, 15 bp, Homo sapiens
tttgagaagcactgg

SEQ ID NO: 1786808 - DNA, 15 bp, Homo sapiens
ttgagaagcactggc

SEQ ID NO: 1786809 - DNA, 15 bp, Homo sapiens
tgagaagcactggct

SEQ ID NO: 1786810 - DNA, 15 bp, Homo sapiens
gagaagcactggctt

SEQ ID NO: 1786811 - DNA, 15 bp, Homo sapiens
agaagcactggcttg

SEQ ID NO: 1786812 - DNA, 15 bp, Homo sapiens
gaagcactggcttgg

SEQ ID NO: 1786813 - DNA, 15 bp, Homo sapiens
aagcactggcttggt

SEQ ID NO: 1786814 - DNA, 15 bp, Homo sapiens
agcactggcttggta

SEQ ID NO: 1786815 - DNA, 15 bp, Homo sapiens
gcactggcttggtaa

SEQ ID NO: 1786816 - DNA, 15 bp, Homo sapiens
cactggcttggtaag

SEQ ID NO: 1786817 - DNA, 15 bp, Homo sapiens
actggcttggtaagt

SEQ ID NO: 1786818 - DNA, 15 bp, Homo sapiens
ctggcttggtaagtc

SEQ ID NO: 1786819 - DNA, 15 bp, Homo sapiens
tggcttggtaagtcc

SEQ ID NO: 1786820 - DNA, 15 bp, Homo sapiens
ggcttggtaagtcct

SEQ ID NO: 1786821 - DNA, 15 bp, Homo sapiens
gcttggtaagtcctt

SEQ ID NO: 1786822 - DNA, 15 bp, Homo sapiens
cttggtaagtccttt

SEQ ID NO: 1786823 - DNA, 15 bp, Homo sapiens
ttggtaagtcctttg

SEQ ID NO: 1786824 - DNA, 15 bp, Homo sapiens
tggtaagtcctttgg

SEQ ID NO: 1786825 - DNA, 15 bp, Homo sapiens
ggtaagtcctttggt

SEQ ID NO: 1786826 - DNA, 15 bp, Homo sapiens
gtaagtcctttggta

SEQ ID NO: 1786827 - DNA, 15 bp, Homo sapiens
taagtcctttggtaa

SEQ ID NO: 1786828 - DNA, 15 bp, Homo sapiens
aagtcctttggtaag

SEQ ID NO: 1786829 - DNA, 15 bp, Homo sapiens
agtcctttggtaaga

SEQ ID NO: 1786830 - DNA, 15 bp, Homo sapiens
gtcctttggtaagac

SEQ ID NO: 1786831 - DNA, 15 bp, Homo sapiens
tcctttggtaagacc

SEQ ID NO: 1786832 - DNA, 15 bp, Homo sapiens
cctttggtaagacca

SEQ ID NO: 1786833 - DNA, 15 bp, Homo sapiens
ctttggtaagaccaa

SEQ ID NO: 1786834 - DNA, 15 bp, Homo sapiens
tttggtaagaccaag

SEQ ID NO: 1786835 - DNA, 15 bp, Homo sapiens
ttggtaagaccaagt

SEQ ID NO: 1786836 - DNA, 15 bp, Homo sapiens
tggtaagaccaagtt

SEQ ID NO: 1786837 - DNA, 15 bp, Homo sapiens
ggtaagaccaagttg

SEQ ID NO: 1786838 - DNA, 15 bp, Homo sapiens
gtaagaccaagttgg

SEQ ID NO: 1786839 - DNA, 15 bp, Homo sapiens
taagaccaagttggc

SEQ ID NO: 1786840 - DNA, 15 bp, Homo sapiens
aagaccaagttggcc

SEQ ID NO: 1786841 - DNA, 15 bp, Homo sapiens
agaccaagttggcca

SEQ ID NO: 1786842 - DNA, 15 bp, Homo sapiens
gaccaagttggccac

SEQ ID NO: 1786843 - DNA, 15 bp, Homo sapiens
accaagttggccaca

SEQ ID NO: 1786844 - DNA, 15 bp, Homo sapiens
ccaagttggccacag

SEQ ID NO: 1786845 - DNA, 15 bp, Homo sapiens
caagttggccacagc

SEQ ID NO: 1786846 - DNA, 15 bp, Homo sapiens
aagttggccacagcc

SEQ ID NO: 1786847 - DNA, 15 bp, Homo sapiens
agttggccacagcct

SEQ ID NO: 1786848 - DNA, 15 bp, Homo sapiens
gttggccacagcctg

SEQ ID NO: 1786849 - DNA, 15 bp, Homo sapiens
ttggccacagcctgc

SEQ ID NO: 1786850 - DNA, 15 bp, Homo sapiens
tggccacagcctgca

SEQ ID NO: 1786851 - DNA, 15 bp, Homo sapiens
ggccacagcctgcac

SEQ ID NO: 1786852 - DNA, 15 bp, Homo sapiens
gccacagcctgcact

SEQ ID NO: 1786853 - DNA, 15 bp, Homo sapiens
ccacagcctgcacta

SEQ ID NO: 1786854 - DNA, 15 bp, Homo sapiens
cacagcctgcactag

SEQ ID NO: 1786855 - DNA, 15 bp, Homo sapiens
acagcctgcactaga

SEQ ID NO: 1786856 - DNA, 15 bp, Homo sapiens
cagcctgcactagag

SEQ ID NO: 1786857 - DNA, 15 bp, Homo sapiens
agcctgcactagagc

SEQ ID NO: 1786858 - DNA, 15 bp, Homo sapiens
gcctgcactagagcc

SEQ ID NO: 1786859 - DNA, 15 bp, Homo sapiens
cctgcactagagcct

SEQ ID NO: 1786860 - DNA, 15 bp, Homo sapiens
ctgcactagagcctg

SEQ ID NO: 1786861 - DNA, 15 bp, Homo sapiens
tgcactagagcctgg

SEQ ID NO: 1786862 - DNA, 15 bp, Homo sapiens
gcactagagcctggg

SEQ ID NO: 1786863 - DNA, 15 bp, Homo sapiens
cactagagcctgggg

SEQ ID NO: 1786864 - DNA, 15 bp, Homo sapiens
actagagcctggggc

SEQ ID NO: 1786865 - DNA, 15 bp, Homo sapiens
ctagagcctggggca

SEQ ID NO: 1786866 - DNA, 15 bp, Homo sapiens
tagagcctggggcat

SEQ ID NO: 1786867 - DNA, 15 bp, Homo sapiens
agagcctggggcata

SEQ ID NO: 1786868 - DNA, 15 bp, Homo sapiens
gagcctggggcatag

SEQ ID NO: 1786869 - DNA, 15 bp, Homo sapiens
agcctggggcatagc

SEQ ID NO: 1786870 - DNA, 15 bp, Homo sapiens
gcctggggcatagcc

SEQ ID NO: 1786871 - DNA, 15 bp, Homo sapiens
cctggggcatagcct

SEQ ID NO: 1786872 - DNA, 15 bp, Homo sapiens
ctggggcatagccta

SEQ ID NO: 1786873 - DNA, 15 bp, Homo sapiens
tggggcatagcctag

SEQ ID NO: 1786874 - DNA, 15 bp, Homo sapiens
ggggcatagcctagc

SEQ ID NO: 1786875 - DNA, 15 bp, Homo sapiens
gggcatagcctagct

SEQ ID NO: 1786876 - DNA, 15 bp, Homo sapiens
ggcatagcctagctg

SEQ ID NO: 1786877 - DNA, 15 bp, Homo sapiens
gcatagcctagctgg

SEQ ID NO: 1786878 - DNA, 15 bp, Homo sapiens
catagcctagctgga

SEQ ID NO: 1786879 - DNA, 15 bp, Homo sapiens
atagcctagctggat

SEQ ID NO: 1786880 - DNA, 15 bp, Homo sapiens
tagcctagctggatg

SEQ ID NO: 1786881 - DNA, 15 bp, Homo sapiens
agcctagctggatgt

SEQ ID NO: 1786882 - DNA, 15 bp, Homo sapiens
gcctagctggatgtc

SEQ ID NO: 1786883 - DNA, 15 bp, Homo sapiens
cctagctggatgtca

SEQ ID NO: 1786884 - DNA, 15 bp, Homo sapiens
ctagctggatgtcac

SEQ ID NO: 1786885 - DNA, 15 bp, Homo sapiens
tagctggatgtcact

SEQ ID NO: 1786886 - DNA, 15 bp, Homo sapiens
agctggatgtcacta

SEQ ID NO: 1786887 - DNA, 15 bp, Homo sapiens
gctggatgtcactag

SEQ ID NO: 1786888 - DNA, 15 bp, Homo sapiens
ctggatgtcactagg

SEQ ID NO: 1786889 - DNA, 15 bp, Homo sapiens
tggatgtcactagga

SEQ ID NO: 1786890 - DNA, 15 bp, Homo sapiens
ggatgtcactaggaa

SEQ ID NO: 1786891 - DNA, 15 bp, Homo sapiens
gatgtcactaggaag

SEQ ID NO: 1786892 - DNA, 15 bp, Homo sapiens
atgtcactaggaagt

SEQ ID NO: 1786893 - DNA, 15 bp, Homo sapiens
tgtcactaggaagtt

SEQ ID NO: 1786894 - DNA, 15 bp, Homo sapiens
gtcactaggaagttc

SEQ ID NO: 1786895 - DNA, 15 bp, Homo sapiens
tcactaggaagttcc

SEQ ID NO: 1786896 - DNA, 15 bp, Homo sapiens
cactaggaagttccc

SEQ ID NO: 1786897 - DNA, 15 bp, Homo sapiens
actaggaagttccca

SEQ ID NO: 1786898 - DNA, 15 bp, Homo sapiens
ctaggaagttcccac

SEQ ID NO: 1786899 - DNA, 15 bp, Homo sapiens
taggaagttcccaca

SEQ ID NO: 1786900 - DNA, 15 bp, Homo sapiens
aggaagttcccacag

SEQ ID NO: 1786901 - DNA, 15 bp, Homo sapiens
ggaagttcccacaga

SEQ ID NO: 1786902 - DNA, 15 bp, Homo sapiens
gaagttcccacagag

SEQ ID NO: 1786903 - DNA, 15 bp, Homo sapiens
aagttcccacagagg

SEQ ID NO: 1786904 - DNA, 15 bp, Homo sapiens
agttcccacagaggg

SEQ ID NO: 1786905 - DNA, 15 bp, Homo sapiens
gttcccacagagggg

SEQ ID NO: 1786906 - DNA, 15 bp, Homo sapiens
ttcccacagaggggt

SEQ ID NO: 1786907 - DNA, 15 bp, Homo sapiens
tcccacagaggggtt

SEQ ID NO: 1786908 - DNA, 15 bp, Homo sapiens
cccacagaggggttg

SEQ ID NO: 1786909 - DNA, 15 bp, Homo sapiens
ccacagaggggttgt

SEQ ID NO: 1786910 - DNA, 15 bp, Homo sapiens
cacagaggggttgtg

SEQ ID NO: 1786911 - DNA, 15 bp, Homo sapiens
acagaggggttgtgg

SEQ ID NO: 1786912 - DNA, 15 bp, Homo sapiens
cagaggggttgtggt

SEQ ID NO: 1786913 - DNA, 15 bp, Homo sapiens
agaggggttgtggtg

SEQ ID NO: 1786914 - DNA, 15 bp, Homo sapiens
gaggggttgtggtga

SEQ ID NO: 1786915 - DNA, 15 bp, Homo sapiens
aggggttgtggtgaa

SEQ ID NO: 1786916 - DNA, 15 bp, Homo sapiens
ggggttgtggtgaac

SEQ ID NO: 1786917 - DNA, 15 bp, Homo sapiens
gggttgtggtgaact

SEQ ID NO: 1786918 - DNA, 15 bp, Homo sapiens
ggttgtggtgaacta

SEQ ID NO: 1786919 - DNA, 15 bp, Homo sapiens
gttgtggtgaactaa

SEQ ID NO: 1786920 - DNA, 15 bp, Homo sapiens
ttgtggtgaactaac

SEQ ID NO: 1786921 - DNA, 15 bp, Homo sapiens
tgtggtgaactaact

SEQ ID NO: 1786922 - DNA, 15 bp, Homo sapiens
gtggtgaactaactg

SEQ ID NO: 1786923 - DNA, 15 bp, Homo sapiens
tggtgaactaactgc

SEQ ID NO: 1786924 - DNA, 15 bp, Homo sapiens
ggtgaactaactgcc

SEQ ID NO: 1786925 - DNA, 15 bp, Homo sapiens
gtgaactaactgcct

SEQ ID NO: 1786926 - DNA, 15 bp, Homo sapiens
tgaactaactgcctg

SEQ ID NO: 1786927 - DNA, 15 bp, Homo sapiens
gaactaactgcctgc

SEQ ID NO: 1786928 - DNA, 15 bp, Homo sapiens
aactaactgcctgct

SEQ ID NO: 1786929 - DNA, 15 bp, Homo sapiens
actaactgcctgctg

SEQ ID NO: 1786930 - DNA, 15 bp, Homo sapiens
ctaactgcctgctgg

SEQ ID NO: 1786931 - DNA, 15 bp, Homo sapiens
taactgcctgctgga

SEQ ID NO: 1786932 - DNA, 15 bp, Homo sapiens
aactgcctgctggag

SEQ ID NO: 1786933 - DNA, 15 bp, Homo sapiens
actgcctgctggagg

SEQ ID NO: 1786934 - DNA, 15 bp, Homo sapiens
ctgcctgctggaggt

SEQ ID NO: 1786935 - DNA, 15 bp, Homo sapiens
tgcctgctggaggtg

SEQ ID NO: 1786936 - DNA, 15 bp, Homo sapiens
gcctgctggaggtga

SEQ ID NO: 1786937 - DNA, 15 bp, Homo sapiens
cctgctggaggtgac

SEQ ID NO: 1786938 - DNA, 15 bp, Homo sapiens
ctgctggaggtgact

SEQ ID NO: 1786939 - DNA, 15 bp, Homo sapiens
tgctggaggtgactg

SEQ ID NO: 1786940 - DNA, 15 bp, Homo sapiens
gctggaggtgactgg

SEQ ID NO: 1786941 - DNA, 15 bp, Homo sapiens
ctggaggtgactggg

SEQ ID NO: 1786942 - DNA, 15 bp, Homo sapiens
tggaggtgactgggg

SEQ ID NO: 1786943 - DNA, 15 bp, Homo sapiens
ggaggtgactggggg

SEQ ID NO: 1786944 - DNA, 15 bp, Homo sapiens
gaggtgactggggga

SEQ ID NO: 1786945 - DNA, 15 bp, Homo sapiens
aggtgactgggggat

SEQ ID NO: 1786946 - DNA, 15 bp, Homo sapiens
ggtgactgggggatg

SEQ ID NO: 1786947 - DNA, 15 bp, Homo sapiens
gtgactgggggatga

SEQ ID NO: 1786948 - DNA, 15 bp, Homo sapiens
tgactgggggatgat

SEQ ID NO: 1786949 - DNA, 15 bp, Homo sapiens
gactgggggatgatg

SEQ ID NO: 1786950 - DNA, 15 bp, Homo sapiens
actgggggatgatgc

SEQ ID NO: 1786951 - DNA, 15 bp, Homo sapiens
ctgggggatgatgct

SEQ ID NO: 1786952 - DNA, 15 bp, Homo sapiens
tgggggatgatgctt

SEQ ID NO: 1786953 - DNA, 15 bp, Homo sapiens
gggggatgatgcttc

SEQ ID NO: 1786954 - DNA, 15 bp, Homo sapiens
ggggatgatgcttcc

SEQ ID NO: 1786955 - DNA, 15 bp, Homo sapiens
gggatgatgcttccc

SEQ ID NO: 1786956 - DNA, 15 bp, Homo sapiens
ggatgatgcttccct

SEQ ID NO: 1786957 - DNA, 15 bp, Homo sapiens
gatgatgcttccctt

SEQ ID NO: 1786958 - DNA, 15 bp, Homo sapiens
atgatgcttcccttg

SEQ ID NO: 1786959 - DNA, 15 bp, Homo sapiens
tgatgcttcccttgg

SEQ ID NO: 1786960 - DNA, 15 bp, Homo sapiens
gatgcttcccttggt

SEQ ID NO: 1786961 - DNA, 15 bp, Homo sapiens
atgcttcccttggtt

SEQ ID NO: 1786962 - DNA, 15 bp, Homo sapiens
tgcttcccttggttt

SEQ ID NO: 1786963 - DNA, 15 bp, Homo sapiens
gcttcccttggtttg

SEQ ID NO: 1786964 - DNA, 15 bp, Homo sapiens
cttcccttggtttgc

SEQ ID NO: 1786965 - DNA, 15 bp, Homo sapiens
ttcccttggtttgct

SEQ ID NO: 1786966 - DNA, 15 bp, Homo sapiens
tcccttggtttgctt

SEQ ID NO: 1786967 - DNA, 15 bp, Homo sapiens
cccttggtttgcttt

SEQ ID NO: 1786968 - DNA, 15 bp, Homo sapiens
ccttggtttgctttt

SEQ ID NO: 1786969 - DNA, 15 bp, Homo sapiens
cttggtttgcttttt

SEQ ID NO: 1786970 - DNA, 15 bp, Homo sapiens
ttggtttgctttttt

SEQ ID NO: 1786971 - DNA, 15 bp, Homo sapiens
tggtttgcttttttc

SEQ ID NO: 1786972 - DNA, 15 bp, Homo sapiens
ggtttgcttttttct

SEQ ID NO: 1786973 - DNA, 15 bp, Homo sapiens
gtttgcttttttctt

SEQ ID NO: 1786974 - DNA, 15 bp, Homo sapiens
tttgcttttttcttg

SEQ ID NO: 1786975 - DNA, 15 bp, Homo sapiens
ttgcttttttcttga

SEQ ID NO: 1786976 - DNA, 15 bp, Homo sapiens
tgcttttttcttgag

SEQ ID NO: 1786977 - DNA, 15 bp, Homo sapiens
gcttttttcttgagt

SEQ ID NO: 1786978 - DNA, 15 bp, Homo sapiens
cttttttcttgagtg

SEQ ID NO: 1786979 - DNA, 15 bp, Homo sapiens
ttttttcttgagtga

SEQ ID NO: 1786980 - DNA, 15 bp, Homo sapiens
tttttcttgagtgag

SEQ ID NO: 1786981 - DNA, 15 bp, Homo sapiens
ttttcttgagtgaga

SEQ ID NO: 1786982 - DNA, 15 bp, Homo sapiens
tttcttgagtgagac

SEQ ID NO: 1786983 - DNA, 15 bp, Homo sapiens
ttcttgagtgagact

SEQ ID NO: 1786984 - DNA, 15 bp, Homo sapiens
tcttgagtgagactg

SEQ ID NO: 1786985 - DNA, 15 bp, Homo sapiens
cttgagtgagactga

SEQ ID NO: 1786986 - DNA, 15 bp, Homo sapiens
ttgagtgagactgag

SEQ ID NO: 1786987 - DNA, 15 bp, Homo sapiens
tgagtgagactgagt

SEQ ID NO: 1786988 - DNA, 15 bp, Homo sapiens
gagtgagactgagtg

SEQ ID NO: 1786989 - DNA, 15 bp, Homo sapiens
agtgagactgagtgt

SEQ ID NO: 1786990 - DNA, 15 bp, Homo sapiens
gtgagactgagtgtc

SEQ ID NO: 1786991 - DNA, 15 bp, Homo sapiens
tgagactgagtgtca

SEQ ID NO: 1786992 - DNA, 15 bp, Homo sapiens
gagactgagtgtcac

SEQ ID NO: 1786993 - DNA, 15 bp, Homo sapiens
agactgagtgtcact

SEQ ID NO: 1786994 - DNA, 15 bp, Homo sapiens
gactgagtgtcactc

SEQ ID NO: 1786995 - DNA, 15 bp, Homo sapiens
actgagtgtcactct

SEQ ID NO: 1786996 - DNA, 15 bp, Homo sapiens
ctgagtgtcactctg

SEQ ID NO: 1786997 - DNA, 15 bp, Homo sapiens
tgagtgtcactctgt

SEQ ID NO: 1786998 - DNA, 15 bp, Homo sapiens
gagtgtcactctgtc

SEQ ID NO: 1786999 - DNA, 15 bp, Homo sapiens
agtgtcactctgtca

SEQ ID NO: 1787000 - DNA, 15 bp, Homo sapiens
cagtggcacaatctc

SEQ ID NO: 1787001 - DNA, 15 bp, Homo sapiens
agtggcacaatctca

SEQ ID NO: 1787002 - DNA, 15 bp, Homo sapiens
gtggcacaatctcag

SEQ ID NO: 1787003 - DNA, 15 bp, Homo sapiens
tggcacaatctcagc

SEQ ID NO: 1787004 - DNA, 15 bp, Homo sapiens
ggcacaatctcagca

SEQ ID NO: 1787005 - DNA, 15 bp, Homo sapiens
gcacaatctcagcac

SEQ ID NO: 1787006 - DNA, 15 bp, Homo sapiens
cacaatctcagcaca

SEQ ID NO: 1787007 - DNA, 15 bp, Homo sapiens
acaatctcagcacac

SEQ ID NO: 1787008 - DNA, 15 bp, Homo sapiens
caatctcagcacact

SEQ ID NO: 1787009 - DNA, 15 bp, Homo sapiens
aatctcagcacactg

SEQ ID NO: 1787010 - DNA, 15 bp, Homo sapiens
atctcagcacactgc

SEQ ID NO: 1787011 - DNA, 15 bp, Homo sapiens
tctcagcacactgca

SEQ ID NO: 1787012 - DNA, 15 bp, Homo sapiens
ctcagcacactgcaa

SEQ ID NO: 1787013 - DNA, 15 bp, Homo sapiens
tcagcacactgcaac

SEQ ID NO: 1787014 - DNA, 15 bp, Homo sapiens
cagcacactgcaacc

SEQ ID NO: 1787015 - DNA, 15 bp, Homo sapiens
agcacactgcaacct

SEQ ID NO: 1787016 - DNA, 15 bp, Homo sapiens
cacactgcaacctcc

SEQ ID NO: 1787017 - DNA, 15 bp, Homo sapiens
acactgcaacctccg

SEQ ID NO: 1787018 - DNA, 15 bp, Homo sapiens
gcaacctccgcctct

SEQ ID NO: 1787019 - DNA, 15 bp, Homo sapiens
caacctccgcctctc

SEQ ID NO: 1787020 - DNA, 15 bp, Homo sapiens
aacctccgcctctca

SEQ ID NO: 1787021 - DNA, 15 bp, Homo sapiens
acctccgcctctcag

SEQ ID NO: 1787022 - DNA, 15 bp, Homo sapiens
cctccgcctctcagg

SEQ ID NO: 1787023 - DNA, 15 bp, Homo sapiens
ctccgcctctcaggt

SEQ ID NO: 1787024 - DNA, 15 bp, Homo sapiens
tccgcctctcaggtt

SEQ ID NO: 1787025 - DNA, 15 bp, Homo sapiens
ccgcctctcaggttc

SEQ ID NO: 1787026 - DNA, 15 bp, Homo sapiens
cgcctctcaggttca

SEQ ID NO: 1787027 - DNA, 15 bp, Homo sapiens
gcctctcaggttcaa

SEQ ID NO: 1787028 - DNA, 15 bp, Homo sapiens
cctctcaggttcaag

SEQ ID NO: 1787029 - DNA, 15 bp, Homo sapiens
tctcaggttcaagcc

SEQ ID NO: 1787030 - DNA, 15 bp, Homo sapiens
ctcaggttcaagcca

SEQ ID NO: 1787031 - DNA, 15 bp, Homo sapiens
tcaggttcaagccat

SEQ ID NO: 1787032 - DNA, 15 bp, Homo sapiens
caggcatgcaccact

SEQ ID NO: 1787033 - DNA, 15 bp, Homo sapiens
aggcatgcaccacta

SEQ ID NO: 1787034 - DNA, 15 bp, Homo sapiens
ggcatgcaccactac

SEQ ID NO: 1787035 - DNA, 15 bp, Homo sapiens
gcatgcaccactaca

SEQ ID NO: 1787036 - DNA, 15 bp, Homo sapiens
catgcaccactacac

SEQ ID NO: 1787037 - DNA, 15 bp, Homo sapiens
atgcaccactacacc

SEQ ID NO: 1787038 - DNA, 15 bp, Homo sapiens
tgcaccactacaccc

SEQ ID NO: 1787039 - DNA, 15 bp, Homo sapiens
gcaccactacacccg

SEQ ID NO: 1787040 - DNA, 15 bp, Homo sapiens
acccggctaattttc

SEQ ID NO: 1787041 - DNA, 15 bp, Homo sapiens
cccggctaattttcg

SEQ ID NO: 1787042 - DNA, 15 bp, Homo sapiens
ccggctaattttcgt

SEQ ID NO: 1787043 - DNA, 15 bp, Homo sapiens
cggctaattttcgta

SEQ ID NO: 1787044 - DNA, 15 bp, Homo sapiens
ggctaattttcgtat

SEQ ID NO: 1787045 - DNA, 15 bp, Homo sapiens
gctaattttcgtatt

SEQ ID NO: 1787046 - DNA, 15 bp, Homo sapiens
ctaattttcgtattt

SEQ ID NO: 1787047 - DNA, 15 bp, Homo sapiens
taattttcgtatttt

SEQ ID NO: 1787048 - DNA, 15 bp, Homo sapiens
aattttcgtattttt

SEQ ID NO: 1787049 - DNA, 15 bp, Homo sapiens
attttcgtattttta

SEQ ID NO: 1787050 - DNA, 15 bp, Homo sapiens
ttttcgtatttttag

SEQ ID NO: 1787051 - DNA, 15 bp, Homo sapiens
tttcgtatttttagt

SEQ ID NO: 1787052 - DNA, 15 bp, Homo sapiens
ttcgtatttttagta

SEQ ID NO: 1787053 - DNA, 15 bp, Homo sapiens
tcgtatttttagtag

SEQ ID NO: 1787054 - DNA, 15 bp, Homo sapiens
cgtatttttagtaga

SEQ ID NO: 1787055 - DNA, 15 bp, Homo sapiens
caggctggtctcgac

SEQ ID NO: 1787056 - DNA, 15 bp, Homo sapiens
aggctggtctcgacc

SEQ ID NO: 1787057 - DNA, 15 bp, Homo sapiens
ggctggtctcgacct

SEQ ID NO: 1787058 - DNA, 15 bp, Homo sapiens
gctggtctcgacctc

SEQ ID NO: 1787059 - DNA, 15 bp, Homo sapiens
ctggtctcgacctcc

SEQ ID NO: 1787060 - DNA, 15 bp, Homo sapiens
tggtctcgacctcct

SEQ ID NO: 1787061 - DNA, 15 bp, Homo sapiens
ggtctcgacctcctg

SEQ ID NO: 1787062 - DNA, 15 bp, Homo sapiens
gtctcgacctcctga

SEQ ID NO: 1787063 - DNA, 15 bp, Homo sapiens
tctcgacctcctgac

SEQ ID NO: 1787064 - DNA, 15 bp, Homo sapiens
ctcgacctcctgacc

SEQ ID NO: 1787065 - DNA, 15 bp, Homo sapiens
tcgacctcctgacct

SEQ ID NO: 1787066 - DNA, 15 bp, Homo sapiens
cgacctcctgacctc

SEQ ID NO: 1787067 - DNA, 15 bp, Homo sapiens
gacctcctgacctca

SEQ ID NO: 1787068 - DNA, 15 bp, Homo sapiens
acctcctgacctcag

SEQ ID NO: 1787069 - DNA, 15 bp, Homo sapiens
cctcctgacctcagg

SEQ ID NO: 1787070 - DNA, 15 bp, Homo sapiens
caggtgatcctcccg

SEQ ID NO: 1787071 - DNA, 15 bp, Homo sapiens
aggtgatcctcccgc

SEQ ID NO: 1787072 - DNA, 15 bp, Homo sapiens
ggtgatcctcccgcc

SEQ ID NO: 1787073 - DNA, 15 bp, Homo sapiens
aggcgtgagccactg

SEQ ID NO: 1787074 - DNA, 15 bp, Homo sapiens
ggcgtgagccactgc

SEQ ID NO: 1787075 - DNA, 15 bp, Homo sapiens
gcgtgagccactgct

SEQ ID NO: 1787076 - DNA, 15 bp, Homo sapiens
cgtgagccactgctt

SEQ ID NO: 1787077 - DNA, 15 bp, Homo sapiens
gtgagccactgcttt

SEQ ID NO: 1787078 - DNA, 15 bp, Homo sapiens
tgagccactgctttt

SEQ ID NO: 1787079 - DNA, 15 bp, Homo sapiens
gagccactgcttttt

SEQ ID NO: 1787080 - DNA, 15 bp, Homo sapiens
agccactgctttttt

SEQ ID NO: 1787081 - DNA, 15 bp, Homo sapiens
gccactgcttttttc

SEQ ID NO: 1787082 - DNA, 15 bp, Homo sapiens
ccactgcttttttct

SEQ ID NO: 1787083 - DNA, 15 bp, Homo sapiens
cactgcttttttcta

SEQ ID NO: 1787084 - DNA, 15 bp, Homo sapiens
actgcttttttctaa

SEQ ID NO: 1787085 - DNA, 15 bp, Homo sapiens
ctgcttttttctaag

SEQ ID NO: 1787086 - DNA, 15 bp, Homo sapiens
tgcttttttctaagg

SEQ ID NO: 1787087 - DNA, 15 bp, Homo sapiens
gcttttttctaaggt

SEQ ID NO: 1787088 - DNA, 15 bp, Homo sapiens
cttttttctaaggtt

SEQ ID NO: 1787089 - DNA, 15 bp, Homo sapiens
ttttttctaaggtta

SEQ ID NO: 1787090 - DNA, 15 bp, Homo sapiens
tttttctaaggttaa

SEQ ID NO: 1787091 - DNA, 15 bp, Homo sapiens
ttttctaaggttaaa

SEQ ID NO: 1787092 - DNA, 15 bp, Homo sapiens
tttctaaggttaaag

SEQ ID NO: 1787093 - DNA, 15 bp, Homo sapiens
ttctaaggttaaagg

SEQ ID NO: 1787094 - DNA, 15 bp, Homo sapiens
tctaaggttaaaggt

SEQ ID NO: 1787095 - DNA, 15 bp, Homo sapiens
ctaaggttaaaggtt

SEQ ID NO: 1787096 - DNA, 15 bp, Homo sapiens
taaggttaaaggtta

SEQ ID NO: 1787097 - DNA, 15 bp, Homo sapiens
aaggttaaaggttag

SEQ ID NO: 1787098 - DNA, 15 bp, Homo sapiens
aggttaaaggttagg

SEQ ID NO: 1787099 - DNA, 15 bp, Homo sapiens
ggttaaaggttaggt

SEQ ID NO: 1787100 - DNA, 15 bp, Homo sapiens
gttaaaggttaggtg

SEQ ID NO: 1787101 - DNA, 15 bp, Homo sapiens
ttaaaggttaggtga

SEQ ID NO: 1787102 - DNA, 15 bp, Homo sapiens
taaaggttaggtgat

SEQ ID NO: 1787103 - DNA, 15 bp, Homo sapiens
aaaggttaggtgatg

SEQ ID NO: 1787104 - DNA, 15 bp, Homo sapiens
aaggttaggtgatgc

SEQ ID NO: 1787105 - DNA, 15 bp, Homo sapiens
aggttaggtgatgcc

SEQ ID NO: 1787106 - DNA, 15 bp, Homo sapiens
ggttaggtgatgcct

SEQ ID NO: 1787107 - DNA, 15 bp, Homo sapiens
gttaggtgatgcctt

SEQ ID NO: 1787108 - DNA, 15 bp, Homo sapiens
ttaggtgatgccttt

SEQ ID NO: 1787109 - DNA, 15 bp, Homo sapiens
taggtgatgccttta

SEQ ID NO: 1787110 - DNA, 15 bp, Homo sapiens
aggtgatgcctttag

SEQ ID NO: 1787111 - DNA, 15 bp, Homo sapiens
ggtgatgcctttagg

SEQ ID NO: 1787112 - DNA, 15 bp, Homo sapiens
gtgatgcctttagga

SEQ ID NO: 1787113 - DNA, 15 bp, Homo sapiens
tgatgcctttaggac

SEQ ID NO: 1787114 - DNA, 15 bp, Homo sapiens
gatgcctttaggaca

SEQ ID NO: 1787115 - DNA, 15 bp, Homo sapiens
atgcctttaggacaa

SEQ ID NO: 1787116 - DNA, 15 bp, Homo sapiens
tgcctttaggacaag

SEQ ID NO: 1787117 - DNA, 15 bp, Homo sapiens
gcctttaggacaaga

SEQ ID NO: 1787118 - DNA, 15 bp, Homo sapiens
cctttaggacaagaa

SEQ ID NO: 1787119 - DNA, 15 bp, Homo sapiens
ctttaggacaagaac

SEQ ID NO: 1787120 - DNA, 15 bp, Homo sapiens
tttaggacaagaacc

SEQ ID NO: 1787121 - DNA, 15 bp, Homo sapiens
ttaggacaagaacct

SEQ ID NO: 1787122 - DNA, 15 bp, Homo sapiens
taggacaagaacctg

SEQ ID NO: 1787123 - DNA, 15 bp, Homo sapiens
aggacaagaacctga

SEQ ID NO: 1787124 - DNA, 15 bp, Homo sapiens
ggacaagaacctgat

SEQ ID NO: 1787125 - DNA, 15 bp, Homo sapiens
gacaagaacctgatg

SEQ ID NO: 1787126 - DNA, 15 bp, Homo sapiens
acaagaacctgatgg

SEQ ID NO: 1787127 - DNA, 15 bp, Homo sapiens
caagaacctgatggc

SEQ ID NO: 1787128 - DNA, 15 bp, Homo sapiens
aagaacctgatggcc

SEQ ID NO: 1787129 - DNA, 15 bp, Homo sapiens
agaacctgatggccc

SEQ ID NO: 1787130 - DNA, 15 bp, Homo sapiens
gaacctgatggcccc

SEQ ID NO: 1787131 - DNA, 15 bp, Homo sapiens
aacctgatggcccct

SEQ ID NO: 1787132 - DNA, 15 bp, Homo sapiens
acctgatggcccctc

SEQ ID NO: 1787133 - DNA, 15 bp, Homo sapiens
cctgatggcccctca

SEQ ID NO: 1787134 - DNA, 15 bp, Homo sapiens
ctgatggcccctcag

SEQ ID NO: 1787135 - DNA, 15 bp, Homo sapiens
tgatggcccctcagt

SEQ ID NO: 1787136 - DNA, 15 bp, Homo sapiens
gatggcccctcagtc

SEQ ID NO: 1787137 - DNA, 15 bp, Homo sapiens
atggcccctcagtca

SEQ ID NO: 1787138 - DNA, 15 bp, Homo sapiens
tggcccctcagtcat

SEQ ID NO: 1787139 - DNA, 15 bp, Homo sapiens
ggcccctcagtcata

SEQ ID NO: 1787140 - DNA, 15 bp, Homo sapiens
gcccctcagtcatat

SEQ ID NO: 1787141 - DNA, 15 bp, Homo sapiens
cccctcagtcatatt

SEQ ID NO: 1787142 - DNA, 15 bp, Homo sapiens
ccctcagtcatattg

SEQ ID NO: 1787143 - DNA, 15 bp, Homo sapiens
cctcagtcatattgg

SEQ ID NO: 1787144 - DNA, 15 bp, Homo sapiens
ctcagtcatattgga

SEQ ID NO: 1787145 - DNA, 15 bp, Homo sapiens
tcagtcatattggac

SEQ ID NO: 1787146 - DNA, 15 bp, Homo sapiens
cagtcatattggaca

SEQ ID NO: 1787147 - DNA, 15 bp, Homo sapiens
agtcatattggacac

SEQ ID NO: 1787148 - DNA, 15 bp, Homo sapiens
gtcatattggacaca

SEQ ID NO: 1787149 - DNA, 15 bp, Homo sapiens
tcatattggacacaa

SEQ ID NO: 1787150 - DNA, 15 bp, Homo sapiens
catattggacacaag

SEQ ID NO: 1787151 - DNA, 15 bp, Homo sapiens
atattggacacaagt

SEQ ID NO: 1787152 - DNA, 15 bp, Homo sapiens
tattggacacaagtt

SEQ ID NO: 1787153 - DNA, 15 bp, Homo sapiens
attggacacaagttt

SEQ ID NO: 1787154 - DNA, 15 bp, Homo sapiens
ttggacacaagttta

SEQ ID NO: 1787155 - DNA, 15 bp, Homo sapiens
tggacacaagtttac

SEQ ID NO: 1787156 - DNA, 15 bp, Homo sapiens
ggacacaagtttacc

SEQ ID NO: 1787157 - DNA, 15 bp, Homo sapiens
gacacaagtttacca

SEQ ID NO: 1787158 - DNA, 15 bp, Homo sapiens
acacaagtttaccat

SEQ ID NO: 1787159 - DNA, 15 bp, Homo sapiens
cacaagtttaccata

SEQ ID NO: 1787160 - DNA, 15 bp, Homo sapiens
acaagtttaccatag

SEQ ID NO: 1787161 - DNA, 15 bp, Homo sapiens
caagtttaccatagg

SEQ ID NO: 1787162 - DNA, 15 bp, Homo sapiens
aagtttaccataggc

SEQ ID NO: 1787163 - DNA, 15 bp, Homo sapiens
agtttaccataggcc

SEQ ID NO: 1787164 - DNA, 15 bp, Homo sapiens
gtttaccataggccc

SEQ ID NO: 1787165 - DNA, 15 bp, Homo sapiens
tttaccataggccca

SEQ ID NO: 1787166 - DNA, 15 bp, Homo sapiens
ttaccataggcccag

SEQ ID NO: 1787167 - DNA, 15 bp, Homo sapiens
taccataggcccaga

SEQ ID NO: 1787168 - DNA, 15 bp, Homo sapiens
accataggcccagag

SEQ ID NO: 1787169 - DNA, 15 bp, Homo sapiens
ccataggcccagagt

SEQ ID NO: 1787170 - DNA, 15 bp, Homo sapiens
cataggcccagagtt

SEQ ID NO: 1787171 - DNA, 15 bp, Homo sapiens
ataggcccagagttc

SEQ ID NO: 1787172 - DNA, 15 bp, Homo sapiens
taggcccagagttca

SEQ ID NO: 1787173 - DNA, 15 bp, Homo sapiens
aggcccagagttcat

SEQ ID NO: 1787174 - DNA, 15 bp, Homo sapiens
ggcccagagttcatg

SEQ ID NO: 1787175 - DNA, 15 bp, Homo sapiens
gcccagagttcatgg

SEQ ID NO: 1787176 - DNA, 15 bp, Homo sapiens
cccagagttcatgga

SEQ ID NO: 1787177 - DNA, 15 bp, Homo sapiens
ccagagttcatggag

SEQ ID NO: 1787178 - DNA, 15 bp, Homo sapiens
cagagttcatggaga

SEQ ID NO: 1787179 - DNA, 15 bp, Homo sapiens
agagttcatggagac

SEQ ID NO: 1787180 - DNA, 15 bp, Homo sapiens
gagttcatggagaca

SEQ ID NO: 1787181 - DNA, 15 bp, Homo sapiens
agttcatggagacag

SEQ ID NO: 1787182 - DNA, 15 bp, Homo sapiens
gttcatggagacaga

SEQ ID NO: 1787183 - DNA, 15 bp, Homo sapiens
ttcatggagacagaa

SEQ ID NO: 1787184 - DNA, 15 bp, Homo sapiens
tcatggagacagaat

SEQ ID NO: 1787185 - DNA, 15 bp, Homo sapiens
catggagacagaata

SEQ ID NO: 1787186 - DNA, 15 bp, Homo sapiens
atggagacagaatag

SEQ ID NO: 1787187 - DNA, 15 bp, Homo sapiens
tggagacagaataga

SEQ ID NO: 1787188 - DNA, 15 bp, Homo sapiens
ggagacagaatagac

SEQ ID NO: 1787189 - DNA, 15 bp, Homo sapiens
gagacagaatagacc

SEQ ID NO: 1787190 - DNA, 15 bp, Homo sapiens
agacagaatagacct

SEQ ID NO: 1787191 - DNA, 15 bp, Homo sapiens
gacagaatagacctc

SEQ ID NO: 1787192 - DNA, 15 bp, Homo sapiens
acagaatagacctcc

SEQ ID NO: 1787193 - DNA, 15 bp, Homo sapiens
cagaatagacctccc

SEQ ID NO: 1787194 - DNA, 15 bp, Homo sapiens
agaatagacctccca

SEQ ID NO: 1787195 - DNA, 15 bp, Homo sapiens
gaatagacctcccag

SEQ ID NO: 1787196 - DNA, 15 bp, Homo sapiens
aatagacctcccagg

SEQ ID NO: 1787197 - DNA, 15 bp, Homo sapiens
atagacctcccaggc

SEQ ID NO: 1787198 - DNA, 15 bp, Homo sapiens
tagacctcccaggcc

SEQ ID NO: 1787199 - DNA, 15 bp, Homo sapiens
agacctcccaggcct

SEQ ID NO: 1787200 - DNA, 15 bp, Homo sapiens
gacctcccaggcctt

SEQ ID NO: 1787201 - DNA, 15 bp, Homo sapiens
acctcccaggccttt

SEQ ID NO: 1787202 - DNA, 15 bp, Homo sapiens
cctcccaggcctttc

SEQ ID NO: 1787203 - DNA, 15 bp, Homo sapiens
ctcccaggcctttcc

SEQ ID NO: 1787204 - DNA, 15 bp, Homo sapiens
tcccaggcctttcct

SEQ ID NO: 1787205 - DNA, 15 bp, Homo sapiens
cccaggcctttccta

SEQ ID NO: 1787206 - DNA, 15 bp, Homo sapiens
ccaggcctttcctat

SEQ ID NO: 1787207 - DNA, 15 bp, Homo sapiens
caggcctttcctatc

SEQ ID NO: 1787208 - DNA, 15 bp, Homo sapiens
aggcctttcctatcc

SEQ ID NO: 1787209 - DNA, 15 bp, Homo sapiens
ggcctttcctatcca

SEQ ID NO: 1787210 - DNA, 15 bp, Homo sapiens
gcctttcctatccaa

SEQ ID NO: 1787211 - DNA, 15 bp, Homo sapiens
cctttcctatccaag

SEQ ID NO: 1787212 - DNA, 15 bp, Homo sapiens
ctttcctatccaagg

SEQ ID NO: 1787213 - DNA, 15 bp, Homo sapiens
tttcctatccaagga

SEQ ID NO: 1787214 - DNA, 15 bp, Homo sapiens
ttcctatccaaggag

SEQ ID NO: 1787215 - DNA, 15 bp, Homo sapiens
tcctatccaaggagg

SEQ ID NO: 1787216 - DNA, 15 bp, Homo sapiens
cctatccaaggaggc

SEQ ID NO: 1787217 - DNA, 15 bp, Homo sapiens
ctatccaaggaggct

SEQ ID NO: 1787218 - DNA, 15 bp, Homo sapiens
tatccaaggaggctg

SEQ ID NO: 1787219 - DNA, 15 bp, Homo sapiens
atccaaggaggctga

SEQ ID NO: 1787220 - DNA, 15 bp, Homo sapiens
tccaaggaggctgag

SEQ ID NO: 1787221 - DNA, 15 bp, Homo sapiens
ccaaggaggctgaga

SEQ ID NO: 1787222 - DNA, 15 bp, Homo sapiens
caaggaggctgagaa

SEQ ID NO: 1787223 - DNA, 15 bp, Homo sapiens
aaggaggctgagaag

SEQ ID NO: 1787224 - DNA, 15 bp, Homo sapiens
aggaggctgagaagt

SEQ ID NO: 1787225 - DNA, 15 bp, Homo sapiens
ggaggctgagaagtt

SEQ ID NO: 1787226 - DNA, 15 bp, Homo sapiens
gaggctgagaagttg

SEQ ID NO: 1787227 - DNA, 15 bp, Homo sapiens
aggctgagaagttgg

SEQ ID NO: 1787228 - DNA, 15 bp, Homo sapiens
ggctgagaagttggg

SEQ ID NO: 1787229 - DNA, 15 bp, Homo sapiens
gctgagaagttggga

SEQ ID NO: 1787230 - DNA, 15 bp, Homo sapiens
ctgagaagttgggac

SEQ ID NO: 1787231 - DNA, 15 bp, Homo sapiens
tgagaagttgggact

SEQ ID NO: 1787232 - DNA, 15 bp, Homo sapiens
gagaagttgggactc

SEQ ID NO: 1787233 - DNA, 15 bp, Homo sapiens
agaagttgggactca

SEQ ID NO: 1787234 - DNA, 15 bp, Homo sapiens
gaagttgggactcat

SEQ ID NO: 1787235 - DNA, 15 bp, Homo sapiens
aagttgggactcata

SEQ ID NO: 1787236 - DNA, 15 bp, Homo sapiens
agttgggactcataa

SEQ ID NO: 1787237 - DNA, 15 bp, Homo sapiens
gttgggactcataac

SEQ ID NO: 1787238 - DNA, 15 bp, Homo sapiens
ttgggactcataaca

SEQ ID NO: 1787239 - DNA, 15 bp, Homo sapiens
tgggactcataacag

SEQ ID NO: 1787240 - DNA, 15 bp, Homo sapiens
gggactcataacaga

SEQ ID NO: 1787241 - DNA, 15 bp, Homo sapiens
ggactcataacagag

SEQ ID NO: 1787242 - DNA, 15 bp, Homo sapiens
gactcataacagaga

SEQ ID NO: 1787243 - DNA, 15 bp, Homo sapiens
actcataacagagaa

SEQ ID NO: 1787244 - DNA, 15 bp, Homo sapiens
ctcataacagagaaa

SEQ ID NO: 1787245 - DNA, 15 bp, Homo sapiens
tcataacagagaaat

SEQ ID NO: 1787246 - DNA, 15 bp, Homo sapiens
cataacagagaaata

SEQ ID NO: 1787247 - DNA, 15 bp, Homo sapiens
ataacagagaaatag

SEQ ID NO: 1787248 - DNA, 15 bp, Homo sapiens
taacagagaaatagg

SEQ ID NO: 1787249 - DNA, 15 bp, Homo sapiens
aacagagaaataggc

SEQ ID NO: 1787250 - DNA, 15 bp, Homo sapiens
acagagaaataggca

SEQ ID NO: 1787251 - DNA, 15 bp, Homo sapiens
cagagaaataggcag

SEQ ID NO: 1787252 - DNA, 15 bp, Homo sapiens
agagaaataggcagg

SEQ ID NO: 1787253 - DNA, 15 bp, Homo sapiens
gagaaataggcagga

SEQ ID NO: 1787254 - DNA, 15 bp, Homo sapiens
agaaataggcaggaa

SEQ ID NO: 1787255 - DNA, 15 bp, Homo sapiens
gaaataggcaggaag

SEQ ID NO: 1787256 - DNA, 15 bp, Homo sapiens
aaataggcaggaagt

SEQ ID NO: 1787257 - DNA, 15 bp, Homo sapiens
aataggcaggaagtt

SEQ ID NO: 1787258 - DNA, 15 bp, Homo sapiens
ataggcaggaagttc

SEQ ID NO: 1787259 - DNA, 15 bp, Homo sapiens
taggcaggaagttct

SEQ ID NO: 1787260 - DNA, 15 bp, Homo sapiens
aggcaggaagttctg

SEQ ID NO: 1787261 - DNA, 15 bp, Homo sapiens
ggcaggaagttctga

SEQ ID NO: 1787262 - DNA, 15 bp, Homo sapiens
gcaggaagttctgaa

SEQ ID NO: 1787263 - DNA, 15 bp, Homo sapiens
caggaagttctgaac

SEQ ID NO: 1787264 - DNA, 15 bp, Homo sapiens
aggaagttctgaact

SEQ ID NO: 1787265 - DNA, 15 bp, Homo sapiens
ggaagttctgaacta

SEQ ID NO: 1787266 - DNA, 15 bp, Homo sapiens
gaagttctgaactat

SEQ ID NO: 1787267 - DNA, 15 bp, Homo sapiens
aagttctgaactatc

SEQ ID NO: 1787268 - DNA, 15 bp, Homo sapiens
agttctgaactatct

SEQ ID NO: 1787269 - DNA, 15 bp, Homo sapiens
gttctgaactatctg

SEQ ID NO: 1787270 - DNA, 15 bp, Homo sapiens
ttctgaactatctgg

SEQ ID NO: 1787271 - DNA, 15 bp, Homo sapiens
tctgaactatctggg

SEQ ID NO: 1787272 - DNA, 15 bp, Homo sapiens
ctgaactatctggga

SEQ ID NO: 1787273 - DNA, 15 bp, Homo sapiens
tgaactatctgggaa

SEQ ID NO: 1787274 - DNA, 15 bp, Homo sapiens
gaactatctgggaag

SEQ ID NO: 1787275 - DNA, 15 bp, Homo sapiens
aactatctgggaaga

SEQ ID NO: 1787276 - DNA, 15 bp, Homo sapiens
actatctgggaagat

SEQ ID NO: 1787277 - DNA, 15 bp, Homo sapiens
ctatctgggaagata

SEQ ID NO: 1787278 - DNA, 15 bp, Homo sapiens
tatctgggaagatag

SEQ ID NO: 1787279 - DNA, 15 bp, Homo sapiens
atctgggaagatagc

SEQ ID NO: 1787280 - DNA, 15 bp, Homo sapiens
tctgggaagatagca

SEQ ID NO: 1787281 - DNA, 15 bp, Homo sapiens
ctgggaagatagcaa

SEQ ID NO: 1787282 - DNA, 15 bp, Homo sapiens
tgggaagatagcaag

SEQ ID NO: 1787283 - DNA, 15 bp, Homo sapiens
gggaagatagcaaga

SEQ ID NO: 1787284 - DNA, 15 bp, Homo sapiens
ggaagatagcaagag

SEQ ID NO: 1787285 - DNA, 15 bp, Homo sapiens
gaagatagcaagaga

SEQ ID NO: 1787286 - DNA, 15 bp, Homo sapiens
aagatagcaagagaa

SEQ ID NO: 1787287 - DNA, 15 bp, Homo sapiens
agatagcaagagaaa

SEQ ID NO: 1787288 - DNA, 15 bp, Homo sapiens
gatagcaagagaaat

SEQ ID NO: 1787289 - DNA, 15 bp, Homo sapiens
atagcaagagaaatc

SEQ ID NO: 1787290 - DNA, 15 bp, Homo sapiens
tagcaagagaaatct

SEQ ID NO: 1787291 - DNA, 15 bp, Homo sapiens
agcaagagaaatcta

SEQ ID NO: 1787292 - DNA, 15 bp, Homo sapiens
gcaagagaaatctac

SEQ ID NO: 1787293 - DNA, 15 bp, Homo sapiens
caagagaaatctact

SEQ ID NO: 1787294 - DNA, 15 bp, Homo sapiens
aagagaaatctactg

SEQ ID NO: 1787295 - DNA, 15 bp, Homo sapiens
agagaaatctactga

SEQ ID NO: 1787296 - DNA, 15 bp, Homo sapiens
gagaaatctactgat

SEQ ID NO: 1787297 - DNA, 15 bp, Homo sapiens
agaaatctactgatg

SEQ ID NO: 1787298 - DNA, 15 bp, Homo sapiens
gaaatctactgatga

SEQ ID NO: 1787299 - DNA, 15 bp, Homo sapiens
aaatctactgatgag

SEQ ID NO: 1787300 - DNA, 15 bp, Homo sapiens
aatctactgatgaga

SEQ ID NO: 1787301 - DNA, 15 bp, Homo sapiens
atctactgatgagat

SEQ ID NO: 1787302 - DNA, 15 bp, Homo sapiens
tctactgatgagatg

SEQ ID NO: 1787303 - DNA, 15 bp, Homo sapiens
ctactgatgagatgg

SEQ ID NO: 1787304 - DNA, 15 bp, Homo sapiens
tactgatgagatggc

SEQ ID NO: 1787305 - DNA, 15 bp, Homo sapiens
actgatgagatggct

SEQ ID NO: 1787306 - DNA, 15 bp, Homo sapiens
ctgatgagatggctt

SEQ ID NO: 1787307 - DNA, 15 bp, Homo sapiens
tgatgagatggcttg

SEQ ID NO: 1787308 - DNA, 15 bp, Homo sapiens
gatgagatggcttgt

SEQ ID NO: 1787309 - DNA, 15 bp, Homo sapiens
atgagatggcttgtg

SEQ ID NO: 1787310 - DNA, 15 bp, Homo sapiens
tgagatggcttgtgc

SEQ ID NO: 1787311 - DNA, 15 bp, Homo sapiens
gagatggcttgtgca

SEQ ID NO: 1787312 - DNA, 15 bp, Homo sapiens
agatggcttgtgcag

SEQ ID NO: 1787313 - DNA, 15 bp, Homo sapiens
gatggcttgtgcaga

SEQ ID NO: 1787314 - DNA, 15 bp, Homo sapiens
atggcttgtgcagag

SEQ ID NO: 1787315 - DNA, 15 bp, Homo sapiens
tggcttgtgcagagc

SEQ ID NO: 1787316 - DNA, 15 bp, Homo sapiens
ggcttgtgcagagcc

SEQ ID NO: 1787317 - DNA, 15 bp, Homo sapiens
gcttgtgcagagcca

SEQ ID NO: 1787318 - DNA, 15 bp, Homo sapiens
cttgtgcagagccaa

SEQ ID NO: 1787319 - DNA, 15 bp, Homo sapiens
ttgtgcagagccaaa

SEQ ID NO: 1787320 - DNA, 15 bp, Homo sapiens
tgtgcagagccaaag

SEQ ID NO: 1787321 - DNA, 15 bp, Homo sapiens
gtgcagagccaaaga

SEQ ID NO: 1787322 - DNA, 15 bp, Homo sapiens
tgcagagccaaagag

SEQ ID NO: 1787323 - DNA, 15 bp, Homo sapiens
gcagagccaaagaga

SEQ ID NO: 1787324 - DNA, 15 bp, Homo sapiens
cagagccaaagagat

SEQ ID NO: 1787325 - DNA, 15 bp, Homo sapiens
agagccaaagagatc

SEQ ID NO: 1787326 - DNA, 15 bp, Homo sapiens
gagccaaagagatct

SEQ ID NO: 1787327 - DNA, 15 bp, Homo sapiens
agccaaagagatctt

SEQ ID NO: 1787328 - DNA, 15 bp, Homo sapiens
gccaaagagatcttt

SEQ ID NO: 1787329 - DNA, 15 bp, Homo sapiens
ccaaagagatctttt

SEQ ID NO: 1787330 - DNA, 15 bp, Homo sapiens
caaagagatcttttg

SEQ ID NO: 1787331 - DNA, 15 bp, Homo sapiens
aaagagatcttttgt

SEQ ID NO: 1787332 - DNA, 15 bp, Homo sapiens
aagagatcttttgtt

SEQ ID NO: 1787333 - DNA, 15 bp, Homo sapiens
agagatcttttgttg

SEQ ID NO: 1787334 - DNA, 15 bp, Homo sapiens
gagatcttttgttga

SEQ ID NO: 1787335 - DNA, 15 bp, Homo sapiens
agatcttttgttgaa

SEQ ID NO: 1787336 - DNA, 15 bp, Homo sapiens
gatcttttgttgaaa

SEQ ID NO: 1787337 - DNA, 15 bp, Homo sapiens
atcttttgttgaaat

SEQ ID NO: 1787338 - DNA, 15 bp, Homo sapiens
tcttttgttgaaata

SEQ ID NO: 1787339 - DNA, 15 bp, Homo sapiens
cttttgttgaaatat

SEQ ID NO: 1787340 - DNA, 15 bp, Homo sapiens
ttttgttgaaatatt

SEQ ID NO: 1787341 - DNA, 15 bp, Homo sapiens
tttgttgaaatatta

SEQ ID NO: 1787342 - DNA, 15 bp, Homo sapiens
ttgttgaaatattat

SEQ ID NO: 1787343 - DNA, 15 bp, Homo sapiens
tgttgaaatattatt

SEQ ID NO: 1787344 - DNA, 15 bp, Homo sapiens
gttgaaatattatta

SEQ ID NO: 1787345 - DNA, 15 bp, Homo sapiens
ttgaaatattattat

SEQ ID NO: 1787346 - DNA, 15 bp, Homo sapiens
tgaaatattattatt

SEQ ID NO: 1787347 - DNA, 15 bp, Homo sapiens
gaaatattattatta

SEQ ID NO: 1787348 - DNA, 15 bp, Homo sapiens
aaatattattattat

SEQ ID NO: 1787349 - DNA, 15 bp, Homo sapiens
tattattattattga

SEQ ID NO: 1787350 - DNA, 15 bp, Homo sapiens
attattattattgag

SEQ ID NO: 1787351 - DNA, 15 bp, Homo sapiens
ttattattattgaga

SEQ ID NO: 1787352 - DNA, 15 bp, Homo sapiens
tattattattgagac

SEQ ID NO: 1787353 - DNA, 15 bp, Homo sapiens
attattattgagacg

SEQ ID NO: 1787354 - DNA, 15 bp, Homo sapiens
ttattattgagacga

SEQ ID NO: 1787355 - DNA, 15 bp, Homo sapiens
tattattgagacgaa

SEQ ID NO: 1787356 - DNA, 15 bp, Homo sapiens
attattgagacgaag

SEQ ID NO: 1787357 - DNA, 15 bp, Homo sapiens
ttattgagacgaagt

SEQ ID NO: 1787358 - DNA, 15 bp, Homo sapiens
tattgagacgaagta

SEQ ID NO: 1787359 - DNA, 15 bp, Homo sapiens
attgagacgaagtat

SEQ ID NO: 1787360 - DNA, 15 bp, Homo sapiens
ttgagacgaagtatc

SEQ ID NO: 1787361 - DNA, 15 bp, Homo sapiens
tgagacgaagtatcg

SEQ ID NO: 1787362 - DNA, 15 bp, Homo sapiens
gagacgaagtatcgc

SEQ ID NO: 1787363 - DNA, 15 bp, Homo sapiens
agacgaagtatcgct

SEQ ID NO: 1787364 - DNA, 15 bp, Homo sapiens
gacgaagtatcgctc

SEQ ID NO: 1787365 - DNA, 15 bp, Homo sapiens
acgaagtatcgctct

SEQ ID NO: 1787366 - DNA, 15 bp, Homo sapiens
cgaagtatcgctctg

SEQ ID NO: 1787367 - DNA, 15 bp, Homo sapiens
gaagtatcgctctgt

SEQ ID NO: 1787368 - DNA, 15 bp, Homo sapiens
aagtatcgctctgtt

SEQ ID NO: 1787369 - DNA, 15 bp, Homo sapiens
agtatcgctctgttg

SEQ ID NO: 1787370 - DNA, 15 bp, Homo sapiens
gtatcgctctgttgc

SEQ ID NO: 1787371 - DNA, 15 bp, Homo sapiens
tatcgctctgttgcc

SEQ ID NO: 1787372 - DNA, 15 bp, Homo sapiens
atcgctctgttgccc

SEQ ID NO: 1787373 - DNA, 15 bp, Homo sapiens
cgctctgttgcccag

SEQ ID NO: 1787374 - DNA, 15 bp, Homo sapiens
agtgcagtggcgcag

SEQ ID NO: 1787375 - DNA, 15 bp, Homo sapiens
gtgcagtggcgcagt

SEQ ID NO: 1787376 - DNA, 15 bp, Homo sapiens
tgcagtggcgcagtc

SEQ ID NO: 1787377 - DNA, 15 bp, Homo sapiens
gcagtggcgcagtct

SEQ ID NO: 1787378 - DNA, 15 bp, Homo sapiens
cagtggcgcagtctc

SEQ ID NO: 1787379 - DNA, 15 bp, Homo sapiens
agtggcgcagtctcg

SEQ ID NO: 1787380 - DNA, 15 bp, Homo sapiens
gtggcgcagtctcgg

SEQ ID NO: 1787381 - DNA, 15 bp, Homo sapiens
tggcgcagtctcggc

SEQ ID NO: 1787382 - DNA, 15 bp, Homo sapiens
ggcgcagtctcggct

SEQ ID NO: 1787383 - DNA, 15 bp, Homo sapiens
gcgcagtctcggctc

SEQ ID NO: 1787384 - DNA, 15 bp, Homo sapiens
cgcagtctcggctca

SEQ ID NO: 1787385 - DNA, 15 bp, Homo sapiens
gcagtctcggctcac

SEQ ID NO: 1787386 - DNA, 15 bp, Homo sapiens
cagtctcggctcact

SEQ ID NO: 1787387 - DNA, 15 bp, Homo sapiens
agtctcggctcactg

SEQ ID NO: 1787388 - DNA, 15 bp, Homo sapiens
ctcactgcaacctcc

SEQ ID NO: 1787389 - DNA, 15 bp, Homo sapiens
acctcccaggttcat

SEQ ID NO: 1787390 - DNA, 15 bp, Homo sapiens
cctcccaggttcatg

SEQ ID NO: 1787391 - DNA, 15 bp, Homo sapiens
ctcccaggttcatgc

SEQ ID NO: 1787392 - DNA, 15 bp, Homo sapiens
tcccaggttcatgcc

SEQ ID NO: 1787393 - DNA, 15 bp, Homo sapiens
cccaggttcatgcca

SEQ ID NO: 1787394 - DNA, 15 bp, Homo sapiens
ccaggttcatgccat

SEQ ID NO: 1787395 - DNA, 15 bp, Homo sapiens
caggttcatgccatt

SEQ ID NO: 1787396 - DNA, 15 bp, Homo sapiens
aggttcatgccatta

SEQ ID NO: 1787397 - DNA, 15 bp, Homo sapiens
ggttcatgccattat

SEQ ID NO: 1787398 - DNA, 15 bp, Homo sapiens
gttcatgccattatc

SEQ ID NO: 1787399 - DNA, 15 bp, Homo sapiens
ttcatgccattatcc

SEQ ID NO: 1787400 - DNA, 15 bp, Homo sapiens
tcatgccattatcct

SEQ ID NO: 1787401 - DNA, 15 bp, Homo sapiens
catgccattatcctg

SEQ ID NO: 1787402 - DNA, 15 bp, Homo sapiens
atgccattatcctgc

SEQ ID NO: 1787403 - DNA, 15 bp, Homo sapiens
tatcctgcctcagct

SEQ ID NO: 1787404 - DNA, 15 bp, Homo sapiens
atcctgcctcagctt

SEQ ID NO: 1787405 - DNA, 15 bp, Homo sapiens
ctgcctcagcttcct

SEQ ID NO: 1787406 - DNA, 15 bp, Homo sapiens
tgcctcagcttcctg

SEQ ID NO: 1787407 - DNA, 15 bp, Homo sapiens
gcctcagcttcctga

SEQ ID NO: 1787408 - DNA, 15 bp, Homo sapiens
cctcagcttcctgag

SEQ ID NO: 1787409 - DNA, 15 bp, Homo sapiens
ctcagcttcctgagt

SEQ ID NO: 1787410 - DNA, 15 bp, Homo sapiens
tcagcttcctgagta

SEQ ID NO: 1787411 - DNA, 15 bp, Homo sapiens
cagcttcctgagtag

SEQ ID NO: 1787412 - DNA, 15 bp, Homo sapiens
agcttcctgagtagc

SEQ ID NO: 1787413 - DNA, 15 bp, Homo sapiens
gcttcctgagtagct

SEQ ID NO: 1787414 - DNA, 15 bp, Homo sapiens
cttcctgagtagctg

SEQ ID NO: 1787415 - DNA, 15 bp, Homo sapiens
ttcctgagtagctgg

SEQ ID NO: 1787416 - DNA, 15 bp, Homo sapiens
ctgggactgcaggcg

SEQ ID NO: 1787417 - DNA, 15 bp, Homo sapiens
tgggactgcaggcgc

SEQ ID NO: 1787418 - DNA, 15 bp, Homo sapiens
gggactgcaggcgcc

SEQ ID NO: 1787419 - DNA, 15 bp, Homo sapiens
ggactgcaggcgccg

SEQ ID NO: 1787420 - DNA, 15 bp, Homo sapiens
gactgcaggcgccgg

SEQ ID NO: 1787421 - DNA, 15 bp, Homo sapiens
actgcaggcgccggc

SEQ ID NO: 1787422 - DNA, 15 bp, Homo sapiens
ctgcaggcgccggcc

SEQ ID NO: 1787423 - DNA, 15 bp, Homo sapiens
tgcaggcgccggcca

SEQ ID NO: 1787424 - DNA, 15 bp, Homo sapiens
gcaggcgccggccac

SEQ ID NO: 1787425 - DNA, 15 bp, Homo sapiens
caggcgccggccacc

SEQ ID NO: 1787426 - DNA, 15 bp, Homo sapiens
aggcgccggccacca

SEQ ID NO: 1787427 - DNA, 15 bp, Homo sapiens
ggcgccggccaccat

SEQ ID NO: 1787428 - DNA, 15 bp, Homo sapiens
gcgccggccaccatg

SEQ ID NO: 1787429 - DNA, 15 bp, Homo sapiens
cgccggccaccatgc

SEQ ID NO: 1787430 - DNA, 15 bp, Homo sapiens
ggccaccatgcccaa

SEQ ID NO: 1787431 - DNA, 15 bp, Homo sapiens
gccaccatgcccaac

SEQ ID NO: 1787432 - DNA, 15 bp, Homo sapiens
ccaccatgcccaact

SEQ ID NO: 1787433 - DNA, 15 bp, Homo sapiens
caccatgcccaacta

SEQ ID NO: 1787434 - DNA, 15 bp, Homo sapiens
accatgcccaactaa

SEQ ID NO: 1787435 - DNA, 15 bp, Homo sapiens
ccatgcccaactaat

SEQ ID NO: 1787436 - DNA, 15 bp, Homo sapiens
catgcccaactaatt

SEQ ID NO: 1787437 - DNA, 15 bp, Homo sapiens
atgcccaactaattt

SEQ ID NO: 1787438 - DNA, 15 bp, Homo sapiens
tgcccaactaatttt

SEQ ID NO: 1787439 - DNA, 15 bp, Homo sapiens
gcccaactaattttt

SEQ ID NO: 1787440 - DNA, 15 bp, Homo sapiens
cccaactaatttttt

SEQ ID NO: 1787441 - DNA, 15 bp, Homo sapiens
ccaactaattttttt

SEQ ID NO: 1787442 - DNA, 15 bp, Homo sapiens
caactaatttttttt

SEQ ID NO: 1787443 - DNA, 15 bp, Homo sapiens
aactaattttttttg

SEQ ID NO: 1787444 - DNA, 15 bp, Homo sapiens
actaattttttttgt

SEQ ID NO: 1787445 - DNA, 15 bp, Homo sapiens
atggggtttcactgc

SEQ ID NO: 1787446 - DNA, 15 bp, Homo sapiens
tggggtttcactgca

SEQ ID NO: 1787447 - DNA, 15 bp, Homo sapiens
ggggtttcactgcat

SEQ ID NO: 1787448 - DNA, 15 bp, Homo sapiens
gggtttcactgcatt

SEQ ID NO: 1787449 - DNA, 15 bp, Homo sapiens
ggtttcactgcatta

SEQ ID NO: 1787450 - DNA, 15 bp, Homo sapiens
gtttcactgcattag

SEQ ID NO: 1787451 - DNA, 15 bp, Homo sapiens
tttcactgcattagc

SEQ ID NO: 1787452 - DNA, 15 bp, Homo sapiens
ttcactgcattagcc

SEQ ID NO: 1787453 - DNA, 15 bp, Homo sapiens
tcactgcattagcca

SEQ ID NO: 1787454 - DNA, 15 bp, Homo sapiens
cactgcattagccag

SEQ ID NO: 1787455 - DNA, 15 bp, Homo sapiens
actgcattagccagg

SEQ ID NO: 1787456 - DNA, 15 bp, Homo sapiens
ctgcattagccagga

SEQ ID NO: 1787457 - DNA, 15 bp, Homo sapiens
tgcattagccaggat

SEQ ID NO: 1787458 - DNA, 15 bp, Homo sapiens
gcattagccaggatg

SEQ ID NO: 1787459 - DNA, 15 bp, Homo sapiens
cattagccaggatgg

SEQ ID NO: 1787460 - DNA, 15 bp, Homo sapiens
attagccaggatggt

SEQ ID NO: 1787461 - DNA, 15 bp, Homo sapiens
tagccaggatggtca

SEQ ID NO: 1787462 - DNA, 15 bp, Homo sapiens
agccaggatggtcac

SEQ ID NO: 1787463 - DNA, 15 bp, Homo sapiens
gccaggatggtcaca

SEQ ID NO: 1787464 - DNA, 15 bp, Homo sapiens
ccaggatggtcacaa

SEQ ID NO: 1787465 - DNA, 15 bp, Homo sapiens
caggatggtcacaat

SEQ ID NO: 1787466 - DNA, 15 bp, Homo sapiens
aggatggtcacaatc

SEQ ID NO: 1787467 - DNA, 15 bp, Homo sapiens
ggatggtcacaatct

SEQ ID NO: 1787468 - DNA, 15 bp, Homo sapiens
gatggtcacaatctc

SEQ ID NO: 1787469 - DNA, 15 bp, Homo sapiens
atggtcacaatctcc

SEQ ID NO: 1787470 - DNA, 15 bp, Homo sapiens
tggtcacaatctcct

SEQ ID NO: 1787471 - DNA, 15 bp, Homo sapiens
ggtcacaatctcctg

SEQ ID NO: 1787472 - DNA, 15 bp, Homo sapiens
gtcacaatctcctga

SEQ ID NO: 1787473 - DNA, 15 bp, Homo sapiens
tcacaatctcctgac

SEQ ID NO: 1787474 - DNA, 15 bp, Homo sapiens
cacaatctcctgacc

SEQ ID NO: 1787475 - DNA, 15 bp, Homo sapiens
acaatctcctgacct

SEQ ID NO: 1787476 - DNA, 15 bp, Homo sapiens
caatctcctgacctc

SEQ ID NO: 1787477 - DNA, 15 bp, Homo sapiens
aatctcctgacctcg

SEQ ID NO: 1787478 - DNA, 15 bp, Homo sapiens
atctgcccgcctcaa

SEQ ID NO: 1787479 - DNA, 15 bp, Homo sapiens
tctgcccgcctcaac

SEQ ID NO: 1787480 - DNA, 15 bp, Homo sapiens
ctgcccgcctcaacc

SEQ ID NO: 1787481 - DNA, 15 bp, Homo sapiens
tgcccgcctcaacct

SEQ ID NO: 1787482 - DNA, 15 bp, Homo sapiens
gcccgcctcaacctc

SEQ ID NO: 1787483 - DNA, 15 bp, Homo sapiens
cccgcctcaacctcc

SEQ ID NO: 1787484 - DNA, 15 bp, Homo sapiens
ccgcctcaacctccc

SEQ ID NO: 1787485 - DNA, 15 bp, Homo sapiens
cgcctcaacctccca

SEQ ID NO: 1787486 - DNA, 15 bp, Homo sapiens
ggcgtgagccaccgg

SEQ ID NO: 1787487 - DNA, 15 bp, Homo sapiens
gcgtgagccaccggg

SEQ ID NO: 1787488 - DNA, 15 bp, Homo sapiens
cgtgagccaccgggc

SEQ ID NO: 1787489 - DNA, 15 bp, Homo sapiens
gtgagccaccgggcc

SEQ ID NO: 1787490 - DNA, 15 bp, Homo sapiens
tgagccaccgggccc

SEQ ID NO: 1787491 - DNA, 15 bp, Homo sapiens
gagccaccgggccca

SEQ ID NO: 1787492 - DNA, 15 bp, Homo sapiens
agccaccgggcccag

SEQ ID NO: 1787493 - DNA, 15 bp, Homo sapiens
gccaccgggcccagc

SEQ ID NO: 1787494 - DNA, 15 bp, Homo sapiens
ccaccgggcccagcc

SEQ ID NO: 1787495 - DNA, 15 bp, Homo sapiens
caccgggcccagccc

SEQ ID NO: 1787496 - DNA, 15 bp, Homo sapiens
accgggcccagccct

SEQ ID NO: 1787497 - DNA, 15 bp, Homo sapiens
ccgggcccagccctt

SEQ ID NO: 1787498 - DNA, 15 bp, Homo sapiens
cgggcccagcccttt

SEQ ID NO: 1787499 - DNA, 15 bp, Homo sapiens
gggcccagcccttta

SEQ ID NO: 1787500 - DNA, 15 bp, Homo sapiens
ggcccagccctttat

SEQ ID NO: 1787501 - DNA, 15 bp, Homo sapiens
gcccagccctttatt

SEQ ID NO: 1787502 - DNA, 15 bp, Homo sapiens
cccagccctttattt

SEQ ID NO: 1787503 - DNA, 15 bp, Homo sapiens
ccagccctttattta

SEQ ID NO: 1787504 - DNA, 15 bp, Homo sapiens
cagccctttatttat

SEQ ID NO: 1787505 - DNA, 15 bp, Homo sapiens
agccctttatttatt

SEQ ID NO: 1787506 - DNA, 15 bp, Homo sapiens
gccctttatttattt

SEQ ID NO: 1787507 - DNA, 15 bp, Homo sapiens
ccctttatttattta

SEQ ID NO: 1787508 - DNA, 15 bp, Homo sapiens
tttatttatttattg

SEQ ID NO: 1787509 - DNA, 15 bp, Homo sapiens
ttatttatttattga

SEQ ID NO: 1787510 - DNA, 15 bp, Homo sapiens
tatttatttattgag

SEQ ID NO: 1787511 - DNA, 15 bp, Homo sapiens
atttatttattgaga

SEQ ID NO: 1787512 - DNA, 15 bp, Homo sapiens
tttatttattgagat

SEQ ID NO: 1787513 - DNA, 15 bp, Homo sapiens
ttatttattgagatg

SEQ ID NO: 1787514 - DNA, 15 bp, Homo sapiens
tatttattgagatgg

SEQ ID NO: 1787515 - DNA, 15 bp, Homo sapiens
atttattgagatgga

SEQ ID NO: 1787516 - DNA, 15 bp, Homo sapiens
tttattgagatggag

SEQ ID NO: 1787517 - DNA, 15 bp, Homo sapiens
ttattgagatggagt

SEQ ID NO: 1787518 - DNA, 15 bp, Homo sapiens
tattgagatggagtc

SEQ ID NO: 1787519 - DNA, 15 bp, Homo sapiens
attgagatggagtct

SEQ ID NO: 1787520 - DNA, 15 bp, Homo sapiens
agtctcactctattg

SEQ ID NO: 1787521 - DNA, 15 bp, Homo sapiens
gtctcactctattgc

SEQ ID NO: 1787522 - DNA, 15 bp, Homo sapiens
tctcactctattgcc

SEQ ID NO: 1787523 - DNA, 15 bp, Homo sapiens
ctcactctattgccc

SEQ ID NO: 1787524 - DNA, 15 bp, Homo sapiens
tcactctattgccca

SEQ ID NO: 1787525 - DNA, 15 bp, Homo sapiens
cactctattgcccag

SEQ ID NO: 1787526 - DNA, 15 bp, Homo sapiens
actctattgcccagg

SEQ ID NO: 1787527 - DNA, 15 bp, Homo sapiens
ctctattgcccaggc

SEQ ID NO: 1787528 - DNA, 15 bp, Homo sapiens
tctattgcccaggct

SEQ ID NO: 1787529 - DNA, 15 bp, Homo sapiens
ctattgcccaggctg

SEQ ID NO: 1787530 - DNA, 15 bp, Homo sapiens
attgcccaggctgga

SEQ ID NO: 1787531 - DNA, 15 bp, Homo sapiens
ggagtacagtggcaa

SEQ ID NO: 1787532 - DNA, 15 bp, Homo sapiens
gagtacagtggcaag

SEQ ID NO: 1787533 - DNA, 15 bp, Homo sapiens
agtacagtggcaaga

SEQ ID NO: 1787534 - DNA, 15 bp, Homo sapiens
gtacagtggcaagat

SEQ ID NO: 1787535 - DNA, 15 bp, Homo sapiens
tacagtggcaagatc

SEQ ID NO: 1787536 - DNA, 15 bp, Homo sapiens
acagtggcaagatct

SEQ ID NO: 1787537 - DNA, 15 bp, Homo sapiens
cagtggcaagatctc

SEQ ID NO: 1787538 - DNA, 15 bp, Homo sapiens
agtggcaagatctca

SEQ ID NO: 1787539 - DNA, 15 bp, Homo sapiens
gtggcaagatctcag

SEQ ID NO: 1787540 - DNA, 15 bp, Homo sapiens
tggcaagatctcagc

SEQ ID NO: 1787541 - DNA, 15 bp, Homo sapiens
ggcaagatctcagct

SEQ ID NO: 1787542 - DNA, 15 bp, Homo sapiens
gcaagatctcagctc

SEQ ID NO: 1787543 - DNA, 15 bp, Homo sapiens
caagatctcagctca

SEQ ID NO: 1787544 - DNA, 15 bp, Homo sapiens
aagatctcagctcac

SEQ ID NO: 1787545 - DNA, 15 bp, Homo sapiens
agatctcagctcact

SEQ ID NO: 1787546 - DNA, 15 bp, Homo sapiens
agctcactgcaaccg

SEQ ID NO: 1787547 - DNA, 15 bp, Homo sapiens
gctcactgcaaccgc

SEQ ID NO: 1787548 - DNA, 15 bp, Homo sapiens
ctcactgcaaccgct

SEQ ID NO: 1787549 - DNA, 15 bp, Homo sapiens
tcactgcaaccgctg

SEQ ID NO: 1787550 - DNA, 15 bp, Homo sapiens
cactgcaaccgctgt

SEQ ID NO: 1787551 - DNA, 15 bp, Homo sapiens
actgcaaccgctgtc

SEQ ID NO: 1787552 - DNA, 15 bp, Homo sapiens
ctgcaaccgctgtct

SEQ ID NO: 1787553 - DNA, 15 bp, Homo sapiens
tgcaaccgctgtctc

SEQ ID NO: 1787554 - DNA, 15 bp, Homo sapiens
gcaaccgctgtctcc

SEQ ID NO: 1787555 - DNA, 15 bp, Homo sapiens
caaccgctgtctccc

SEQ ID NO: 1787556 - DNA, 15 bp, Homo sapiens
aaccgctgtctccca

SEQ ID NO: 1787557 - DNA, 15 bp, Homo sapiens
accgctgtctcccag

SEQ ID NO: 1787558 - DNA, 15 bp, Homo sapiens
ccgctgtctcccagg

SEQ ID NO: 1787559 - DNA, 15 bp, Homo sapiens
cgctgtctcccaggt

SEQ ID NO: 1787560 - DNA, 15 bp, Homo sapiens
gctgtctcccaggtt

SEQ ID NO: 1787561 - DNA, 15 bp, Homo sapiens
tctcccaggttcaaa

SEQ ID NO: 1787562 - DNA, 15 bp, Homo sapiens
tcccaggttcaaaca

SEQ ID NO: 1787563 - DNA, 15 bp, Homo sapiens
cccaggttcaaacaa

SEQ ID NO: 1787564 - DNA, 15 bp, Homo sapiens
ccaggttcaaacaat

SEQ ID NO: 1787565 - DNA, 15 bp, Homo sapiens
caggttcaaacaatt

SEQ ID NO: 1787566 - DNA, 15 bp, Homo sapiens
aggttcaaacaatta

SEQ ID NO: 1787567 - DNA, 15 bp, Homo sapiens
ggttcaaacaattat

SEQ ID NO: 1787568 - DNA, 15 bp, Homo sapiens
gttcaaacaattatc

SEQ ID NO: 1787569 - DNA, 15 bp, Homo sapiens
ttcaaacaattatct

SEQ ID NO: 1787570 - DNA, 15 bp, Homo sapiens
tcaaacaattatctt

SEQ ID NO: 1787571 - DNA, 15 bp, Homo sapiens
caaacaattatcttg

SEQ ID NO: 1787572 - DNA, 15 bp, Homo sapiens
aaacaattatcttgc

SEQ ID NO: 1787573 - DNA, 15 bp, Homo sapiens
aacaattatcttgcc

SEQ ID NO: 1787574 - DNA, 15 bp, Homo sapiens
acaattatcttgcct

SEQ ID NO: 1787575 - DNA, 15 bp, Homo sapiens
aattatcttgcctca

SEQ ID NO: 1787576 - DNA, 15 bp, Homo sapiens
attatcttgcctcag

SEQ ID NO: 1787577 - DNA, 15 bp, Homo sapiens
ttatcttgcctcagt

SEQ ID NO: 1787578 - DNA, 15 bp, Homo sapiens
tatcttgcctcagtc

SEQ ID NO: 1787579 - DNA, 15 bp, Homo sapiens
atcttgcctcagtct

SEQ ID NO: 1787580 - DNA, 15 bp, Homo sapiens
tcttgcctcagtctc

SEQ ID NO: 1787581 - DNA, 15 bp, Homo sapiens
cttgcctcagtctcc

SEQ ID NO: 1787582 - DNA, 15 bp, Homo sapiens
ttgcctcagtctccc

SEQ ID NO: 1787583 - DNA, 15 bp, Homo sapiens
tgcctcagtctcccg

SEQ ID NO: 1787584 - DNA, 15 bp, Homo sapiens
gcctcagtctcccga

SEQ ID NO: 1787585 - DNA, 15 bp, Homo sapiens
cctcagtctcccgaa

SEQ ID NO: 1787586 - DNA, 15 bp, Homo sapiens
ctcagtctcccgaat

SEQ ID NO: 1787587 - DNA, 15 bp, Homo sapiens
tcagtctcccgaata

SEQ ID NO: 1787588 - DNA, 15 bp, Homo sapiens
cagtctcccgaatag

SEQ ID NO: 1787589 - DNA, 15 bp, Homo sapiens
agtctcccgaatagc

SEQ ID NO: 1787590 - DNA, 15 bp, Homo sapiens
gtctcccgaatagct

SEQ ID NO: 1787591 - DNA, 15 bp, Homo sapiens
tctcccgaatagctg

SEQ ID NO: 1787592 - DNA, 15 bp, Homo sapiens
ccgaatagctggaat

SEQ ID NO: 1787593 - DNA, 15 bp, Homo sapiens
cgaatagctggaatt

SEQ ID NO: 1787594 - DNA, 15 bp, Homo sapiens
gaatagctggaatta

SEQ ID NO: 1787595 - DNA, 15 bp, Homo sapiens
aatagctggaattac

SEQ ID NO: 1787596 - DNA, 15 bp, Homo sapiens
atagctggaattaca

SEQ ID NO: 1787597 - DNA, 15 bp, Homo sapiens
gaattacaggcgtgt

SEQ ID NO: 1787598 - DNA, 15 bp, Homo sapiens
aattacaggcgtgtg

SEQ ID NO: 1787599 - DNA, 15 bp, Homo sapiens
tatttttgtagagac

SEQ ID NO: 1787600 - DNA, 15 bp, Homo sapiens
atttttgtagagacg

SEQ ID NO: 1787601 - DNA, 15 bp, Homo sapiens
tgtagagacggggtt

SEQ ID NO: 1787602 - DNA, 15 bp, Homo sapiens
cggggtttcaccacg

SEQ ID NO: 1787603 - DNA, 15 bp, Homo sapiens
ggggtttcaccacgt

SEQ ID NO: 1787604 - DNA, 15 bp, Homo sapiens
gggtttcaccacgtt

SEQ ID NO: 1787605 - DNA, 15 bp, Homo sapiens
ggtttcaccacgttg

SEQ ID NO: 1787606 - DNA, 15 bp, Homo sapiens
gtttcaccacgttgg

SEQ ID NO: 1787607 - DNA, 15 bp, Homo sapiens
tttcaccacgttggc

SEQ ID NO: 1787608 - DNA, 15 bp, Homo sapiens
ttcaccacgttggcc

SEQ ID NO: 1787609 - DNA, 15 bp, Homo sapiens
tcaccacgttggcca

SEQ ID NO: 1787610 - DNA, 15 bp, Homo sapiens
caccacgttggccag

SEQ ID NO: 1787611 - DNA, 15 bp, Homo sapiens
accacgttggccagg

SEQ ID NO: 1787612 - DNA, 15 bp, Homo sapiens
ccacgttggccaggc

SEQ ID NO: 1787613 - DNA, 15 bp, Homo sapiens
cacgttggccaggct

SEQ ID NO: 1787614 - DNA, 15 bp, Homo sapiens
acgttggccaggctg

SEQ ID NO: 1787615 - DNA, 15 bp, Homo sapiens
cgttggccaggctgg

SEQ ID NO: 1787616 - DNA, 15 bp, Homo sapiens
ttgaactcctgacca

SEQ ID NO: 1787617 - DNA, 15 bp, Homo sapiens
tgaactcctgaccac

SEQ ID NO: 1787618 - DNA, 15 bp, Homo sapiens
gaactcctgaccaca

SEQ ID NO: 1787619 - DNA, 15 bp, Homo sapiens
aactcctgaccacag

SEQ ID NO: 1787620 - DNA, 15 bp, Homo sapiens
actcctgaccacagg

SEQ ID NO: 1787621 - DNA, 15 bp, Homo sapiens
ctcctgaccacaggt

SEQ ID NO: 1787622 - DNA, 15 bp, Homo sapiens
tcctgaccacaggtg

SEQ ID NO: 1787623 - DNA, 15 bp, Homo sapiens
cctgaccacaggtga

SEQ ID NO: 1787624 - DNA, 15 bp, Homo sapiens
ctgaccacaggtgat

SEQ ID NO: 1787625 - DNA, 15 bp, Homo sapiens
tgaccacaggtgatc

SEQ ID NO: 1787626 - DNA, 15 bp, Homo sapiens
gaccacaggtgatcc

SEQ ID NO: 1787627 - DNA, 15 bp, Homo sapiens
accacaggtgatccg

SEQ ID NO: 1787628 - DNA, 15 bp, Homo sapiens
ccacaggtgatccgc

SEQ ID NO: 1787629 - DNA, 15 bp, Homo sapiens
cacaggtgatccgcc

SEQ ID NO: 1787630 - DNA, 15 bp, Homo sapiens
acaggtgatccgccc

SEQ ID NO: 1787631 - DNA, 15 bp, Homo sapiens
caggtgatccgcccg

SEQ ID NO: 1787632 - DNA, 15 bp, Homo sapiens
aggtgatccgcccgc

SEQ ID NO: 1787633 - DNA, 15 bp, Homo sapiens
ggtgatccgcccgcc

SEQ ID NO: 1787634 - DNA, 15 bp, Homo sapiens
ttacaggtgtgagcg

SEQ ID NO: 1787635 - DNA, 15 bp, Homo sapiens
tacaggtgtgagcga

SEQ ID NO: 1787636 - DNA, 15 bp, Homo sapiens
acaggtgtgagcgac

SEQ ID NO: 1787637 - DNA, 15 bp, Homo sapiens
caggtgtgagcgacc

SEQ ID NO: 1787638 - DNA, 15 bp, Homo sapiens
aggtgtgagcgaccg

SEQ ID NO: 1787639 - DNA, 15 bp, Homo sapiens
ggtgtgagcgaccgc

SEQ ID NO: 1787640 - DNA, 15 bp, Homo sapiens
gtgtgagcgaccgca

SEQ ID NO: 1787641 - DNA, 15 bp, Homo sapiens
tgtgagcgaccgcac

SEQ ID NO: 1787642 - DNA, 15 bp, Homo sapiens
gtgagcgaccgcacc

SEQ ID NO: 1787643 - DNA, 15 bp, Homo sapiens
tgagcgaccgcacct

SEQ ID NO: 1787644 - DNA, 15 bp, Homo sapiens
gagcgaccgcacctg

SEQ ID NO: 1787645 - DNA, 15 bp, Homo sapiens
agcgaccgcacctgg

SEQ ID NO: 1787646 - DNA, 15 bp, Homo sapiens
gcgaccgcacctggc

SEQ ID NO: 1787647 - DNA, 15 bp, Homo sapiens
cgaccgcacctggcc

SEQ ID NO: 1787648 - DNA, 15 bp, Homo sapiens
gaccgcacctggccc

SEQ ID NO: 1787649 - DNA, 15 bp, Homo sapiens
ccgcacctggccctt

SEQ ID NO: 1787650 - DNA, 15 bp, Homo sapiens
cgcacctggcccttg

SEQ ID NO: 1787651 - DNA, 15 bp, Homo sapiens
gcacctggcccttgt

SEQ ID NO: 1787652 - DNA, 15 bp, Homo sapiens
cacctggcccttgtt

SEQ ID NO: 1787653 - DNA, 15 bp, Homo sapiens
acctggcccttgttg

SEQ ID NO: 1787654 - DNA, 15 bp, Homo sapiens
cctggcccttgttga

SEQ ID NO: 1787655 - DNA, 15 bp, Homo sapiens
ctggcccttgttgaa

SEQ ID NO: 1787656 - DNA, 15 bp, Homo sapiens
tggcccttgttgaaa

SEQ ID NO: 1787657 - DNA, 15 bp, Homo sapiens
ggcccttgttgaaat

SEQ ID NO: 1787658 - DNA, 15 bp, Homo sapiens
gcccttgttgaaata

SEQ ID NO: 1787659 - DNA, 15 bp, Homo sapiens
cccttgttgaaatat

SEQ ID NO: 1787660 - DNA, 15 bp, Homo sapiens
ccttgttgaaatatt

SEQ ID NO: 1787661 - DNA, 15 bp, Homo sapiens
cttgttgaaatattt

SEQ ID NO: 1787662 - DNA, 15 bp, Homo sapiens
ttgttgaaatatttt

SEQ ID NO: 1787663 - DNA, 15 bp, Homo sapiens
tgttgaaatatttta

SEQ ID NO: 1787664 - DNA, 15 bp, Homo sapiens
gttgaaatattttaa

SEQ ID NO: 1787665 - DNA, 15 bp, Homo sapiens
ttgaaatattttaaa

SEQ ID NO: 1787666 - DNA, 15 bp, Homo sapiens
tgaaatattttaaag

SEQ ID NO: 1787667 - DNA, 15 bp, Homo sapiens
gaaatattttaaaga

SEQ ID NO: 1787668 - DNA, 15 bp, Homo sapiens
aaatattttaaagaa

SEQ ID NO: 1787669 - DNA, 15 bp, Homo sapiens
aatattttaaagaaa

SEQ ID NO: 1787670 - DNA, 15 bp, Homo sapiens
atattttaaagaaac

SEQ ID NO: 1787671 - DNA, 15 bp, Homo sapiens
tattttaaagaaact

SEQ ID NO: 1787672 - DNA, 15 bp, Homo sapiens
attttaaagaaactt

SEQ ID NO: 1787673 - DNA, 15 bp, Homo sapiens
ttttaaagaaacttg

SEQ ID NO: 1787674 - DNA, 15 bp, Homo sapiens
tttaaagaaacttgc

SEQ ID NO: 1787675 - DNA, 15 bp, Homo sapiens
ttaaagaaacttgct

SEQ ID NO: 1787676 - DNA, 15 bp, Homo sapiens
taaagaaacttgctt

SEQ ID NO: 1787677 - DNA, 15 bp, Homo sapiens
aaagaaacttgcttg

SEQ ID NO: 1787678 - DNA, 15 bp, Homo sapiens
aagaaacttgcttgt

SEQ ID NO: 1787679 - DNA, 15 bp, Homo sapiens
agaaacttgcttgtt

SEQ ID NO: 1787680 - DNA, 15 bp, Homo sapiens
gaaacttgcttgttg

SEQ ID NO: 1787681 - DNA, 15 bp, Homo sapiens
aaacttgcttgttgc

SEQ ID NO: 1787682 - DNA, 15 bp, Homo sapiens
aacttgcttgttgct

SEQ ID NO: 1787683 - DNA, 15 bp, Homo sapiens
acttgcttgttgctg

SEQ ID NO: 1787684 - DNA, 15 bp, Homo sapiens
cttgcttgttgctgt

SEQ ID NO: 1787685 - DNA, 15 bp, Homo sapiens
ttgcttgttgctgtg

SEQ ID NO: 1787686 - DNA, 15 bp, Homo sapiens
tgcttgttgctgtga

SEQ ID NO: 1787687 - DNA, 15 bp, Homo sapiens
gcttgttgctgtgag

SEQ ID NO: 1787688 - DNA, 15 bp, Homo sapiens
cttgttgctgtgaga

SEQ ID NO: 1787689 - DNA, 15 bp, Homo sapiens
ttgttgctgtgagag

SEQ ID NO: 1787690 - DNA, 15 bp, Homo sapiens
tgttgctgtgagagg

SEQ ID NO: 1787691 - DNA, 15 bp, Homo sapiens
gttgctgtgagaggt

SEQ ID NO: 1787692 - DNA, 15 bp, Homo sapiens
ttgctgtgagaggta

SEQ ID NO: 1787693 - DNA, 15 bp, Homo sapiens
tgctgtgagaggtac

SEQ ID NO: 1787694 - DNA, 15 bp, Homo sapiens
gctgtgagaggtaca

SEQ ID NO: 1787695 - DNA, 15 bp, Homo sapiens
ctgtgagaggtacaa

SEQ ID NO: 1787696 - DNA, 15 bp, Homo sapiens
tgtgagaggtacaaa

SEQ ID NO: 1787697 - DNA, 15 bp, Homo sapiens
gtgagaggtacaaag

SEQ ID NO: 1787698 - DNA, 15 bp, Homo sapiens
tgagaggtacaaaga

SEQ ID NO: 1787699 - DNA, 15 bp, Homo sapiens
gagaggtacaaagat

SEQ ID NO: 1787700 - DNA, 15 bp, Homo sapiens
agaggtacaaagatg

SEQ ID NO: 1787701 - DNA, 15 bp, Homo sapiens
gaggtacaaagatga

SEQ ID NO: 1787702 - DNA, 15 bp, Homo sapiens
aggtacaaagatgaa

SEQ ID NO: 1787703 - DNA, 15 bp, Homo sapiens
ggtacaaagatgaat

SEQ ID NO: 1787704 - DNA, 15 bp, Homo sapiens
gtacaaagatgaatc

SEQ ID NO: 1787705 - DNA, 15 bp, Homo sapiens
tacaaagatgaatca

SEQ ID NO: 1787706 - DNA, 15 bp, Homo sapiens
acaaagatgaatcaa

SEQ ID NO: 1787707 - DNA, 15 bp, Homo sapiens
caaagatgaatcaac

SEQ ID NO: 1787708 - DNA, 15 bp, Homo sapiens
aaagatgaatcaact

SEQ ID NO: 1787709 - DNA, 15 bp, Homo sapiens
aagatgaatcaactc

SEQ ID NO: 1787710 - DNA, 15 bp, Homo sapiens
agatgaatcaactcc

SEQ ID NO: 1787711 - DNA, 15 bp, Homo sapiens
gatgaatcaactccc

SEQ ID NO: 1787712 - DNA, 15 bp, Homo sapiens
atgaatcaactccct

SEQ ID NO: 1787713 - DNA, 15 bp, Homo sapiens
tgaatcaactccctt

SEQ ID NO: 1787714 - DNA, 15 bp, Homo sapiens
gaatcaactccctta

SEQ ID NO: 1787715 - DNA, 15 bp, Homo sapiens
aatcaactcccttag

SEQ ID NO: 1787716 - DNA, 15 bp, Homo sapiens
atcaactcccttagc

SEQ ID NO: 1787717 - DNA, 15 bp, Homo sapiens
tcaactcccttagca

SEQ ID NO: 1787718 - DNA, 15 bp, Homo sapiens
caactcccttagcag

SEQ ID NO: 1787719 - DNA, 15 bp, Homo sapiens
aactcccttagcagt

SEQ ID NO: 1787720 - DNA, 15 bp, Homo sapiens
actcccttagcagtt

SEQ ID NO: 1787721 - DNA, 15 bp, Homo sapiens
ctcccttagcagttg

SEQ ID NO: 1787722 - DNA, 15 bp, Homo sapiens
tcccttagcagttgt

SEQ ID NO: 1787723 - DNA, 15 bp, Homo sapiens
cccttagcagttgtc

SEQ ID NO: 1787724 - DNA, 15 bp, Homo sapiens
ccttagcagttgtct

SEQ ID NO: 1787725 - DNA, 15 bp, Homo sapiens
cttagcagttgtctt

SEQ ID NO: 1787726 - DNA, 15 bp, Homo sapiens
ttagcagttgtcttc

SEQ ID NO: 1787727 - DNA, 15 bp, Homo sapiens
tagcagttgtcttct

SEQ ID NO: 1787728 - DNA, 15 bp, Homo sapiens
agcagttgtcttctt

SEQ ID NO: 1787729 - DNA, 15 bp, Homo sapiens
gcagttgtcttcttt

SEQ ID NO: 1787730 - DNA, 15 bp, Homo sapiens
cagttgtcttctttt

SEQ ID NO: 1787731 - DNA, 15 bp, Homo sapiens
agttgtcttcttttc

SEQ ID NO: 1787732 - DNA, 15 bp, Homo sapiens
gttgtcttcttttct

SEQ ID NO: 1787733 - DNA, 15 bp, Homo sapiens
ttgtcttcttttcta

SEQ ID NO: 1787734 - DNA, 15 bp, Homo sapiens
tgtcttcttttctaa

SEQ ID NO: 1787735 - DNA, 15 bp, Homo sapiens
gtcttcttttctaat

SEQ ID NO: 1787736 - DNA, 15 bp, Homo sapiens
tcttcttttctaatg

SEQ ID NO: 1787737 - DNA, 15 bp, Homo sapiens
cttcttttctaatgc

SEQ ID NO: 1787738 - DNA, 15 bp, Homo sapiens
ttcttttctaatgca

SEQ ID NO: 1787739 - DNA, 15 bp, Homo sapiens
tcttttctaatgcat

SEQ ID NO: 1787740 - DNA, 15 bp, Homo sapiens
cttttctaatgcatc

SEQ ID NO: 1787741 - DNA, 15 bp, Homo sapiens
ttttctaatgcatca

SEQ ID NO: 1787742 - DNA, 15 bp, Homo sapiens
tttctaatgcatcat

SEQ ID NO: 1787743 - DNA, 15 bp, Homo sapiens
ttctaatgcatcatt

SEQ ID NO: 1787744 - DNA, 15 bp, Homo sapiens
tctaatgcatcattg

SEQ ID NO: 1787745 - DNA, 15 bp, Homo sapiens
ctaatgcatcattga

SEQ ID NO: 1787746 - DNA, 15 bp, Homo sapiens
taatgcatcattgac

SEQ ID NO: 1787747 - DNA, 15 bp, Homo sapiens
aatgcatcattgaca

SEQ ID NO: 1787748 - DNA, 15 bp, Homo sapiens
atgcatcattgacaa

SEQ ID NO: 1787749 - DNA, 15 bp, Homo sapiens
tgcatcattgacaaa

SEQ ID NO: 1787750 - DNA, 15 bp, Homo sapiens
gcatcattgacaaaa

SEQ ID NO: 1787751 - DNA, 15 bp, Homo sapiens
catcattgacaaaac

SEQ ID NO: 1787752 - DNA, 15 bp, Homo sapiens
atcattgacaaaact

SEQ ID NO: 1787753 - DNA, 15 bp, Homo sapiens
tcattgacaaaactc

SEQ ID NO: 1787754 - DNA, 15 bp, Homo sapiens
cattgacaaaactca

SEQ ID NO: 1787755 - DNA, 15 bp, Homo sapiens
attgacaaaactcag

SEQ ID NO: 1787756 - DNA, 15 bp, Homo sapiens
ttgacaaaactcaga

SEQ ID NO: 1787757 - DNA, 15 bp, Homo sapiens
gacaaaactcagaaa

SEQ ID NO: 1787758 - DNA, 15 bp, Homo sapiens
acaaaactcagaaat

SEQ ID NO: 1787759 - DNA, 15 bp, Homo sapiens
caaaactcagaaata

SEQ ID NO: 1787760 - DNA, 15 bp, Homo sapiens
aaaactcagaaatag

SEQ ID NO: 1787761 - DNA, 15 bp, Homo sapiens
aaactcagaaatagc

SEQ ID NO: 1787762 - DNA, 15 bp, Homo sapiens
aactcagaaatagcc

SEQ ID NO: 1787763 - DNA, 15 bp, Homo sapiens
actcagaaatagccc

SEQ ID NO: 1787764 - DNA, 15 bp, Homo sapiens
ctcagaaatagcccc

SEQ ID NO: 1787765 - DNA, 15 bp, Homo sapiens
tcagaaatagcccct

SEQ ID NO: 1787766 - DNA, 15 bp, Homo sapiens
cagaaatagcccctg

SEQ ID NO: 1787767 - DNA, 15 bp, Homo sapiens
agaaatagcccctgc

SEQ ID NO: 1787768 - DNA, 15 bp, Homo sapiens
gaaatagcccctgcg

SEQ ID NO: 1787769 - DNA, 15 bp, Homo sapiens
aaatagcccctgcgt

SEQ ID NO: 1787770 - DNA, 15 bp, Homo sapiens
aatagcccctgcgtg

SEQ ID NO: 1787771 - DNA, 15 bp, Homo sapiens
atagcccctgcgtgt

SEQ ID NO: 1787772 - DNA, 15 bp, Homo sapiens
tagcccctgcgtgtt

SEQ ID NO: 1787773 - DNA, 15 bp, Homo sapiens
agcccctgcgtgttc

SEQ ID NO: 1787774 - DNA, 15 bp, Homo sapiens
gcccctgcgtgttca

SEQ ID NO: 1787775 - DNA, 15 bp, Homo sapiens
cccctgcgtgttcag

SEQ ID NO: 1787776 - DNA, 15 bp, Homo sapiens
ccctgcgtgttcagg

SEQ ID NO: 1787777 - DNA, 15 bp, Homo sapiens
cctgcgtgttcagga

SEQ ID NO: 1787778 - DNA, 15 bp, Homo sapiens
ctgcgtgttcaggag

SEQ ID NO: 1787779 - DNA, 15 bp, Homo sapiens
tgcgtgttcaggagg

SEQ ID NO: 1787780 - DNA, 15 bp, Homo sapiens
gcgtgttcaggaggt

SEQ ID NO: 1787781 - DNA, 15 bp, Homo sapiens
cgtgttcaggaggtg

SEQ ID NO: 1787782 - DNA, 15 bp, Homo sapiens
gtgttcaggaggtgg

SEQ ID NO: 1787783 - DNA, 15 bp, Homo sapiens
tgttcaggaggtgga

SEQ ID NO: 1787784 - DNA, 15 bp, Homo sapiens
gttcaggaggtggac

SEQ ID NO: 1787785 - DNA, 15 bp, Homo sapiens
ttcaggaggtggaca

SEQ ID NO: 1787786 - DNA, 15 bp, Homo sapiens
tcaggaggtggacag

SEQ ID NO: 1787787 - DNA, 15 bp, Homo sapiens
caggaggtggacaga

SEQ ID NO: 1787788 - DNA, 15 bp, Homo sapiens
aggaggtggacagag

SEQ ID NO: 1787789 - DNA, 15 bp, Homo sapiens
ggaggtggacagagt

SEQ ID NO: 1787790 - DNA, 15 bp, Homo sapiens
gaggtggacagagtg

SEQ ID NO: 1787791 - DNA, 15 bp, Homo sapiens
aggtggacagagtgg

SEQ ID NO: 1787792 - DNA, 15 bp, Homo sapiens
ggtggacagagtggg

SEQ ID NO: 1787793 - DNA, 15 bp, Homo sapiens
gtggacagagtgggg

SEQ ID NO: 1787794 - DNA, 15 bp, Homo sapiens
tggacagagtgggga

SEQ ID NO: 1787795 - DNA, 15 bp, Homo sapiens
ggacagagtggggaa

SEQ ID NO: 1787796 - DNA, 15 bp, Homo sapiens
gacagagtggggaaa

SEQ ID NO: 1787797 - DNA, 15 bp, Homo sapiens
acagagtggggaaag

SEQ ID NO: 1787798 - DNA, 15 bp, Homo sapiens
cagagtggggaaaga

SEQ ID NO: 1787799 - DNA, 15 bp, Homo sapiens
agagtggggaaagag

SEQ ID NO: 1787800 - DNA, 15 bp, Homo sapiens
gagtggggaaagaga

SEQ ID NO: 1787801 - DNA, 15 bp, Homo sapiens
agtggggaaagagag

SEQ ID NO: 1787802 - DNA, 15 bp, Homo sapiens
gtggggaaagagagg

SEQ ID NO: 1787803 - DNA, 15 bp, Homo sapiens
tggggaaagagagga

SEQ ID NO: 1787804 - DNA, 15 bp, Homo sapiens
ggggaaagagaggaa

SEQ ID NO: 1787805 - DNA, 15 bp, Homo sapiens
gggaaagagaggaaa

SEQ ID NO: 1787806 - DNA, 15 bp, Homo sapiens
ggaaagagaggaaaa

SEQ ID NO: 1787807 - DNA, 15 bp, Homo sapiens
gaaagagaggaaaac

SEQ ID NO: 1787808 - DNA, 15 bp, Homo sapiens
aaagagaggaaaacc

SEQ ID NO: 1787809 - DNA, 15 bp, Homo sapiens
aagagaggaaaaccc

SEQ ID NO: 1787810 - DNA, 15 bp, Homo sapiens
agagaggaaaaccca

SEQ ID NO: 1787811 - DNA, 15 bp, Homo sapiens
gagaggaaaacccat

SEQ ID NO: 1787812 - DNA, 15 bp, Homo sapiens
agaggaaaacccatt

SEQ ID NO: 1787813 - DNA, 15 bp, Homo sapiens
gaggaaaacccatta

SEQ ID NO: 1787814 - DNA, 15 bp, Homo sapiens
aggaaaacccattat

SEQ ID NO: 1787815 - DNA, 15 bp, Homo sapiens
ggaaaacccattata

SEQ ID NO: 1787816 - DNA, 15 bp, Homo sapiens
gaaaacccattataa

SEQ ID NO: 1787817 - DNA, 15 bp, Homo sapiens
aaaacccattataaa

SEQ ID NO: 1787818 - DNA, 15 bp, Homo sapiens
aaacccattataaag

SEQ ID NO: 1787819 - DNA, 15 bp, Homo sapiens
aacccattataaaga

SEQ ID NO: 1787820 - DNA, 15 bp, Homo sapiens
acccattataaagaa

SEQ ID NO: 1787821 - DNA, 15 bp, Homo sapiens
cccattataaagaaa

SEQ ID NO: 1787822 - DNA, 15 bp, Homo sapiens
ccattataaagaaac

SEQ ID NO: 1787823 - DNA, 15 bp, Homo sapiens
cattataaagaaaca

SEQ ID NO: 1787824 - DNA, 15 bp, Homo sapiens
attataaagaaacaa

SEQ ID NO: 1787825 - DNA, 15 bp, Homo sapiens
ttataaagaaacaaa

SEQ ID NO: 1787826 - DNA, 15 bp, Homo sapiens
tataaagaaacaaaa

SEQ ID NO: 1787827 - DNA, 15 bp, Homo sapiens
ataaagaaacaaaat

SEQ ID NO: 1787828 - DNA, 15 bp, Homo sapiens
taaagaaacaaaatg

SEQ ID NO: 1787829 - DNA, 15 bp, Homo sapiens
aaagaaacaaaatgt

SEQ ID NO: 1787830 - DNA, 15 bp, Homo sapiens
aagaaacaaaatgtg

SEQ ID NO: 1787831 - DNA, 15 bp, Homo sapiens
agaaacaaaatgtga

SEQ ID NO: 1787832 - DNA, 15 bp, Homo sapiens
gaaacaaaatgtgac

SEQ ID NO: 1787833 - DNA, 15 bp, Homo sapiens
aaacaaaatgtgact

SEQ ID NO: 1787834 - DNA, 15 bp, Homo sapiens
aacaaaatgtgactt

SEQ ID NO: 1787835 - DNA, 15 bp, Homo sapiens
acaaaatgtgacttc

SEQ ID NO: 1787836 - DNA, 15 bp, Homo sapiens
caaaatgtgacttca

SEQ ID NO: 1787837 - DNA, 15 bp, Homo sapiens
aaaatgtgacttcat

SEQ ID NO: 1787838 - DNA, 15 bp, Homo sapiens
aaatgtgacttcatt

SEQ ID NO: 1787839 - DNA, 15 bp, Homo sapiens
aatgtgacttcattg

SEQ ID NO: 1787840 - DNA, 15 bp, Homo sapiens
atgtgacttcattgg

SEQ ID NO: 1787841 - DNA, 15 bp, Homo sapiens
tgtgacttcattggg

SEQ ID NO: 1787842 - DNA, 15 bp, Homo sapiens
gtgacttcattggga

SEQ ID NO: 1787843 - DNA, 15 bp, Homo sapiens
tgacttcattgggat

SEQ ID NO: 1787844 - DNA, 15 bp, Homo sapiens
gacttcattgggatt

SEQ ID NO: 1787845 - DNA, 15 bp, Homo sapiens
acttcattgggattg

SEQ ID NO: 1787846 - DNA, 15 bp, Homo sapiens
cttcattgggattgt

SEQ ID NO: 1787847 - DNA, 15 bp, Homo sapiens
ttcattgggattgtc

SEQ ID NO: 1787848 - DNA, 15 bp, Homo sapiens
tcattgggattgtct

SEQ ID NO: 1787849 - DNA, 15 bp, Homo sapiens
cattgggattgtctt

SEQ ID NO: 1787850 - DNA, 15 bp, Homo sapiens
attgggattgtcttt

SEQ ID NO: 1787851 - DNA, 15 bp, Homo sapiens
ttgggattgtctttc

SEQ ID NO: 1787852 - DNA, 15 bp, Homo sapiens
tgggattgtctttca

SEQ ID NO: 1787853 - DNA, 15 bp, Homo sapiens
gggattgtctttcaa

SEQ ID NO: 1787854 - DNA, 15 bp, Homo sapiens
ggattgtctttcaaa

SEQ ID NO: 1787855 - DNA, 15 bp, Homo sapiens
gattgtctttcaaaa

SEQ ID NO: 1787856 - DNA, 15 bp, Homo sapiens
attgtctttcaaaat

SEQ ID NO: 1787857 - DNA, 15 bp, Homo sapiens
ttgtctttcaaaatg

SEQ ID NO: 1787858 - DNA, 15 bp, Homo sapiens
tgtctttcaaaatgt

SEQ ID NO: 1787859 - DNA, 15 bp, Homo sapiens
gtctttcaaaatgtg

SEQ ID NO: 1787860 - DNA, 15 bp, Homo sapiens
tctttcaaaatgtgc

SEQ ID NO: 1787861 - DNA, 15 bp, Homo sapiens
ctttcaaaatgtgcc

SEQ ID NO: 1787862 - DNA, 15 bp, Homo sapiens
tttcaaaatgtgccc

SEQ ID NO: 1787863 - DNA, 15 bp, Homo sapiens
ttcaaaatgtgccct

SEQ ID NO: 1787864 - DNA, 15 bp, Homo sapiens
tcaaaatgtgccctg

SEQ ID NO: 1787865 - DNA, 15 bp, Homo sapiens
caaaatgtgccctgt

SEQ ID NO: 1787866 - DNA, 15 bp, Homo sapiens
aaaatgtgccctgta

SEQ ID NO: 1787867 - DNA, 15 bp, Homo sapiens
aaatgtgccctgtaa

SEQ ID NO: 1787868 - DNA, 15 bp, Homo sapiens
aatgtgccctgtaat

SEQ ID NO: 1787869 - DNA, 15 bp, Homo sapiens
atgtgccctgtaatt

SEQ ID NO: 1787870 - DNA, 15 bp, Homo sapiens
tgtgccctgtaattt

SEQ ID NO: 1787871 - DNA, 15 bp, Homo sapiens
gtgccctgtaatttc

SEQ ID NO: 1787872 - DNA, 15 bp, Homo sapiens
tgccctgtaatttcc

SEQ ID NO: 1787873 - DNA, 15 bp, Homo sapiens
gccctgtaatttccc

SEQ ID NO: 1787874 - DNA, 15 bp, Homo sapiens
ccctgtaatttccca

SEQ ID NO: 1787875 - DNA, 15 bp, Homo sapiens
cctgtaatttcccag

SEQ ID NO: 1787876 - DNA, 15 bp, Homo sapiens
ctgtaatttcccagt

SEQ ID NO: 1787877 - DNA, 15 bp, Homo sapiens
tgtaatttcccagtc

SEQ ID NO: 1787878 - DNA, 15 bp, Homo sapiens
gtaatttcccagtcg

SEQ ID NO: 1787879 - DNA, 15 bp, Homo sapiens
taatttcccagtcgt

SEQ ID NO: 1787880 - DNA, 15 bp, Homo sapiens
aatttcccagtcgtg

SEQ ID NO: 1787881 - DNA, 15 bp, Homo sapiens
atttcccagtcgtgt

SEQ ID NO: 1787882 - DNA, 15 bp, Homo sapiens
tttcccagtcgtgtg

SEQ ID NO: 1787883 - DNA, 15 bp, Homo sapiens
ttcccagtcgtgtgg

SEQ ID NO: 1787884 - DNA, 15 bp, Homo sapiens
tcccagtcgtgtggt

SEQ ID NO: 1787885 - DNA, 15 bp, Homo sapiens
cccagtcgtgtggtt

SEQ ID NO: 1787886 - DNA, 15 bp, Homo sapiens
ccagtcgtgtggttc

SEQ ID NO: 1787887 - DNA, 15 bp, Homo sapiens
cagtcgtgtggttct

SEQ ID NO: 1787888 - DNA, 15 bp, Homo sapiens
agtcgtgtggttctt

SEQ ID NO: 1787889 - DNA, 15 bp, Homo sapiens
gtcgtgtggttcttc

SEQ ID NO: 1787890 - DNA, 15 bp, Homo sapiens
tcgtgtggttcttct

SEQ ID NO: 1787891 - DNA, 15 bp, Homo sapiens
cgtgtggttcttcta

SEQ ID NO: 1787892 - DNA, 15 bp, Homo sapiens
gtgtggttcttctaa

SEQ ID NO: 1787893 - DNA, 15 bp, Homo sapiens
tgtggttcttctaac

SEQ ID NO: 1787894 - DNA, 15 bp, Homo sapiens
gtggttcttctaacc

SEQ ID NO: 1787895 - DNA, 15 bp, Homo sapiens
tggttcttctaacca

SEQ ID NO: 1787896 - DNA, 15 bp, Homo sapiens
ggttcttctaaccag

SEQ ID NO: 1787897 - DNA, 15 bp, Homo sapiens
gttcttctaaccaga

SEQ ID NO: 1787898 - DNA, 15 bp, Homo sapiens
ttcttctaaccagag

SEQ ID NO: 1787899 - DNA, 15 bp, Homo sapiens
tcttctaaccagagc

SEQ ID NO: 1787900 - DNA, 15 bp, Homo sapiens
cttctaaccagagcc

SEQ ID NO: 1787901 - DNA, 15 bp, Homo sapiens
ttctaaccagagcca

SEQ ID NO: 1787902 - DNA, 15 bp, Homo sapiens
tctaaccagagccat

SEQ ID NO: 1787903 - DNA, 15 bp, Homo sapiens
ctaaccagagccatc

SEQ ID NO: 1787904 - DNA, 15 bp, Homo sapiens
taaccagagccatcc

SEQ ID NO: 1787905 - DNA, 15 bp, Homo sapiens
aaccagagccatcct

SEQ ID NO: 1787906 - DNA, 15 bp, Homo sapiens
accagagccatcctg

SEQ ID NO: 1787907 - DNA, 15 bp, Homo sapiens
ccagagccatcctgg

SEQ ID NO: 1787908 - DNA, 15 bp, Homo sapiens
cagagccatcctggc

SEQ ID NO: 1787909 - DNA, 15 bp, Homo sapiens
agagccatcctggct

SEQ ID NO: 1787910 - DNA, 15 bp, Homo sapiens
gagccatcctggctt

SEQ ID NO: 1787911 - DNA, 15 bp, Homo sapiens
agccatcctggcttt

SEQ ID NO: 1787912 - DNA, 15 bp, Homo sapiens
gccatcctggcttta

SEQ ID NO: 1787913 - DNA, 15 bp, Homo sapiens
ccatcctggctttac

SEQ ID NO: 1787914 - DNA, 15 bp, Homo sapiens
catcctggctttaca

SEQ ID NO: 1787915 - DNA, 15 bp, Homo sapiens
atcctggctttacat

SEQ ID NO: 1787916 - DNA, 15 bp, Homo sapiens
tcctggctttacatt

SEQ ID NO: 1787917 - DNA, 15 bp, Homo sapiens
cctggctttacattt

SEQ ID NO: 1787918 - DNA, 15 bp, Homo sapiens
ctggctttacatttt

SEQ ID NO: 1787919 - DNA, 15 bp, Homo sapiens
tggctttacattttt

SEQ ID NO: 1787920 - DNA, 15 bp, Homo sapiens
ggctttacatttttt

SEQ ID NO: 1787921 - DNA, 15 bp, Homo sapiens
gctttacattttttg

SEQ ID NO: 1787922 - DNA, 15 bp, Homo sapiens
ctttacattttttgg

SEQ ID NO: 1787923 - DNA, 15 bp, Homo sapiens
tttacattttttgga

SEQ ID NO: 1787924 - DNA, 15 bp, Homo sapiens
ttacattttttggat

SEQ ID NO: 1787925 - DNA, 15 bp, Homo sapiens
tacattttttggatc

SEQ ID NO: 1787926 - DNA, 15 bp, Homo sapiens
acattttttggatcc

SEQ ID NO: 1787927 - DNA, 15 bp, Homo sapiens
cattttttggatcca

SEQ ID NO: 1787928 - DNA, 15 bp, Homo sapiens
attttttggatccaa

SEQ ID NO: 1787929 - DNA, 15 bp, Homo sapiens
ttttttggatccaat

SEQ ID NO: 1787930 - DNA, 15 bp, Homo sapiens
tttttggatccaatc

SEQ ID NO: 1787931 - DNA, 15 bp, Homo sapiens
ttttggatccaatct

SEQ ID NO: 1787932 - DNA, 15 bp, Homo sapiens
tttggatccaatctg

SEQ ID NO: 1787933 - DNA, 15 bp, Homo sapiens
ttggatccaatctga

SEQ ID NO: 1787934 - DNA, 15 bp, Homo sapiens
tggatccaatctgaa

SEQ ID NO: 1787935 - DNA, 15 bp, Homo sapiens
ggatccaatctgaac

SEQ ID NO: 1787936 - DNA, 15 bp, Homo sapiens
gatccaatctgaact

SEQ ID NO: 1787937 - DNA, 15 bp, Homo sapiens
atccaatctgaactc

SEQ ID NO: 1787938 - DNA, 15 bp, Homo sapiens
tccaatctgaactct

SEQ ID NO: 1787939 - DNA, 15 bp, Homo sapiens
ccaatctgaactctg

SEQ ID NO: 1787940 - DNA, 15 bp, Homo sapiens
caatctgaactctgg

SEQ ID NO: 1787941 - DNA, 15 bp, Homo sapiens
aatctgaactctggc

SEQ ID NO: 1787942 - DNA, 15 bp, Homo sapiens
atctgaactctggca

SEQ ID NO: 1787943 - DNA, 15 bp, Homo sapiens
tctgaactctggcag

SEQ ID NO: 1787944 - DNA, 15 bp, Homo sapiens
ctgaactctggcaga

SEQ ID NO: 1787945 - DNA, 15 bp, Homo sapiens
tgaactctggcagaa

SEQ ID NO: 1787946 - DNA, 15 bp, Homo sapiens
gaactctggcagaag

SEQ ID NO: 1787947 - DNA, 15 bp, Homo sapiens
aactctggcagaagc

SEQ ID NO: 1787948 - DNA, 15 bp, Homo sapiens
actctggcagaagct

SEQ ID NO: 1787949 - DNA, 15 bp, Homo sapiens
ctctggcagaagctg

SEQ ID NO: 1787950 - DNA, 15 bp, Homo sapiens
tctggcagaagctgc

SEQ ID NO: 1787951 - DNA, 15 bp, Homo sapiens
ctggcagaagctgca

SEQ ID NO: 1787952 - DNA, 15 bp, Homo sapiens
tggcagaagctgcaa

SEQ ID NO: 1787953 - DNA, 15 bp, Homo sapiens
ggcagaagctgcaaa

SEQ ID NO: 1787954 - DNA, 15 bp, Homo sapiens
gcagaagctgcaaat

SEQ ID NO: 1787955 - DNA, 15 bp, Homo sapiens
cagaagctgcaaata

SEQ ID NO: 1787956 - DNA, 15 bp, Homo sapiens
agaagctgcaaatat

SEQ ID NO: 1787957 - DNA, 15 bp, Homo sapiens
gaagctgcaaatatc

SEQ ID NO: 1787958 - DNA, 15 bp, Homo sapiens
aagctgcaaatatcc

SEQ ID NO: 1787959 - DNA, 15 bp, Homo sapiens
agctgcaaatatcct

SEQ ID NO: 1787960 - DNA, 15 bp, Homo sapiens
gctgcaaatatcctg

SEQ ID NO: 1787961 - DNA, 15 bp, Homo sapiens
ctgcaaatatcctgc

SEQ ID NO: 1787962 - DNA, 15 bp, Homo sapiens
tgcaaatatcctgca

SEQ ID NO: 1787963 - DNA, 15 bp, Homo sapiens
gcaaatatcctgcag

SEQ ID NO: 1787964 - DNA, 15 bp, Homo sapiens
caaatatcctgcagc

SEQ ID NO: 1787965 - DNA, 15 bp, Homo sapiens
aaatatcctgcagcc

SEQ ID NO: 1787966 - DNA, 15 bp, Homo sapiens
aatatcctgcagcct

SEQ ID NO: 1787967 - DNA, 15 bp, Homo sapiens
atatcctgcagcctg

SEQ ID NO: 1787968 - DNA, 15 bp, Homo sapiens
tatcctgcagcctgg

SEQ ID NO: 1787969 - DNA, 15 bp, Homo sapiens
atcctgcagcctggg

SEQ ID NO: 1787970 - DNA, 15 bp, Homo sapiens
tcctgcagcctgggt

SEQ ID NO: 1787971 - DNA, 15 bp, Homo sapiens
cctgcagcctgggtc

SEQ ID NO: 1787972 - DNA, 15 bp, Homo sapiens
ctgcagcctgggtcc

SEQ ID NO: 1787973 - DNA, 15 bp, Homo sapiens
tgcagcctgggtccc

SEQ ID NO: 1787974 - DNA, 15 bp, Homo sapiens
gcagcctgggtccca

SEQ ID NO: 1787975 - DNA, 15 bp, Homo sapiens
cagcctgggtcccag

SEQ ID NO: 1787976 - DNA, 15 bp, Homo sapiens
agcctgggtcccagc

SEQ ID NO: 1787977 - DNA, 15 bp, Homo sapiens
gcctgggtcccagcc

SEQ ID NO: 1787978 - DNA, 15 bp, Homo sapiens
cctgggtcccagccc

SEQ ID NO: 1787979 - DNA, 15 bp, Homo sapiens
ctgggtcccagcccc

SEQ ID NO: 1787980 - DNA, 15 bp, Homo sapiens
tgggtcccagcccca

SEQ ID NO: 1787981 - DNA, 15 bp, Homo sapiens
gggtcccagccccac

SEQ ID NO: 1787982 - DNA, 15 bp, Homo sapiens
ggtcccagccccacc

SEQ ID NO: 1787983 - DNA, 15 bp, Homo sapiens
cccagccccaccact

SEQ ID NO: 1787984 - DNA, 15 bp, Homo sapiens
ccagccccaccactt

SEQ ID NO: 1787985 - DNA, 15 bp, Homo sapiens
cagccccaccacttc

SEQ ID NO: 1787986 - DNA, 15 bp, Homo sapiens
agccccaccacttca

SEQ ID NO: 1787987 - DNA, 15 bp, Homo sapiens
gccccaccacttcat

SEQ ID NO: 1787988 - DNA, 15 bp, Homo sapiens
ccccaccacttcatc

SEQ ID NO: 1787989 - DNA, 15 bp, Homo sapiens
cccaccacttcatca

SEQ ID NO: 1787990 - DNA, 15 bp, Homo sapiens
ccaccacttcatcaa

SEQ ID NO: 1787991 - DNA, 15 bp, Homo sapiens
caccacttcatcaaa

SEQ ID NO: 1787992 - DNA, 15 bp, Homo sapiens
accacttcatcaaaa

SEQ ID NO: 1787993 - DNA, 15 bp, Homo sapiens
ccacttcatcaaaac

SEQ ID NO: 1787994 - DNA, 15 bp, Homo sapiens
cacttcatcaaaact

SEQ ID NO: 1787995 - DNA, 15 bp, Homo sapiens
acttcatcaaaactg

SEQ ID NO: 1787996 - DNA, 15 bp, Homo sapiens
cttcatcaaaactgg

SEQ ID NO: 1787997 - DNA, 15 bp, Homo sapiens
ttcatcaaaactggc

SEQ ID NO: 1787998 - DNA, 15 bp, Homo sapiens
tcatcaaaactggcc

SEQ ID NO: 1787999 - DNA, 15 bp, Homo sapiens
catcaaaactggcct

SEQ ID NO: 1788000 - DNA, 15 bp, Homo sapiens
atcaaaactggcctc

SEQ ID NO: 1788001 - DNA, 15 bp, Homo sapiens
tcaaaactggcctcc

SEQ ID NO: 1788002 - DNA, 15 bp, Homo sapiens
caaaactggcctccc

SEQ ID NO: 1788003 - DNA, 15 bp, Homo sapiens
aaaactggcctcccc

SEQ ID NO: 1788004 - DNA, 15 bp, Homo sapiens
aaactggcctcccca

SEQ ID NO: 1788005 - DNA, 15 bp, Homo sapiens
aactggcctccccag

SEQ ID NO: 1788006 - DNA, 15 bp, Homo sapiens
actggcctccccagg

SEQ ID NO: 1788007 - DNA, 15 bp, Homo sapiens
ctggcctccccaggg

SEQ ID NO: 1788008 - DNA, 15 bp, Homo sapiens
tggcctccccaggga

SEQ ID NO: 1788009 - DNA, 15 bp, Homo sapiens
ggcctccccagggat

SEQ ID NO: 1788010 - DNA, 15 bp, Homo sapiens
gcctccccagggata

SEQ ID NO: 1788011 - DNA, 15 bp, Homo sapiens
cctccccagggatat

SEQ ID NO: 1788012 - DNA, 15 bp, Homo sapiens
ctccccagggatatt

SEQ ID NO: 1788013 - DNA, 15 bp, Homo sapiens
tccccagggatatta

SEQ ID NO: 1788014 - DNA, 15 bp, Homo sapiens
ccccagggatattaa

SEQ ID NO: 1788015 - DNA, 15 bp, Homo sapiens
cccagggatattaaa

SEQ ID NO: 1788016 - DNA, 15 bp, Homo sapiens
ccagggatattaaag

SEQ ID NO: 1788017 - DNA, 15 bp, Homo sapiens
cagggatattaaagc

SEQ ID NO: 1788018 - DNA, 15 bp, Homo sapiens
agggatattaaagcc

SEQ ID NO: 1788019 - DNA, 15 bp, Homo sapiens
gggatattaaagcca

SEQ ID NO: 1788020 - DNA, 15 bp, Homo sapiens
ggatattaaagccac

SEQ ID NO: 1788021 - DNA, 15 bp, Homo sapiens
gatattaaagccact

SEQ ID NO: 1788022 - DNA, 15 bp, Homo sapiens
atattaaagccactt

SEQ ID NO: 1788023 - DNA, 15 bp, Homo sapiens
tattaaagccacttt

SEQ ID NO: 1788024 - DNA, 15 bp, Homo sapiens
attaaagccacttta

SEQ ID NO: 1788025 - DNA, 15 bp, Homo sapiens
ttaaagccactttat

SEQ ID NO: 1788026 - DNA, 15 bp, Homo sapiens
taaagccactttatt

SEQ ID NO: 1788027 - DNA, 15 bp, Homo sapiens
aaagccactttattg

SEQ ID NO: 1788028 - DNA, 15 bp, Homo sapiens
aagccactttattgt

SEQ ID NO: 1788029 - DNA, 15 bp, Homo sapiens
agccactttattgtt

SEQ ID NO: 1788030 - DNA, 15 bp, Homo sapiens
gccactttattgttg

SEQ ID NO: 1788031 - DNA, 15 bp, Homo sapiens
ccactttattgttgc

SEQ ID NO: 1788032 - DNA, 15 bp, Homo sapiens
cactttattgttgcc

SEQ ID NO: 1788033 - DNA, 15 bp, Homo sapiens
actttattgttgcca

SEQ ID NO: 1788034 - DNA, 15 bp, Homo sapiens
ctttattgttgccaa

SEQ ID NO: 1788035 - DNA, 15 bp, Homo sapiens
tttattgttgccaaa

SEQ ID NO: 1788036 - DNA, 15 bp, Homo sapiens
ttattgttgccaaat

SEQ ID NO: 1788037 - DNA, 15 bp, Homo sapiens
tattgttgccaaatc

SEQ ID NO: 1788038 - DNA, 15 bp, Homo sapiens
attgttgccaaatcc

SEQ ID NO: 1788039 - DNA, 15 bp, Homo sapiens
ttgttgccaaatcca

SEQ ID NO: 1788040 - DNA, 15 bp, Homo sapiens
tgttgccaaatccag

SEQ ID NO: 1788041 - DNA, 15 bp, Homo sapiens
gttgccaaatccagt

SEQ ID NO: 1788042 - DNA, 15 bp, Homo sapiens
ttgccaaatccagtg

SEQ ID NO: 1788043 - DNA, 15 bp, Homo sapiens
tgccaaatccagtgt

SEQ ID NO: 1788044 - DNA, 15 bp, Homo sapiens
gccaaatccagtgta

SEQ ID NO: 1788045 - DNA, 15 bp, Homo sapiens
ccaaatccagtgtat

SEQ ID NO: 1788046 - DNA, 15 bp, Homo sapiens
caaatccagtgtata

SEQ ID NO: 1788047 - DNA, 15 bp, Homo sapiens
aaatccagtgtatac

SEQ ID NO: 1788048 - DNA, 15 bp, Homo sapiens
aatccagtgtatact

SEQ ID NO: 1788049 - DNA, 15 bp, Homo sapiens
atccagtgtatactt

SEQ ID NO: 1788050 - DNA, 15 bp, Homo sapiens
tccagtgtatacttc

SEQ ID NO: 1788051 - DNA, 15 bp, Homo sapiens
ccagtgtatacttct

SEQ ID NO: 1788052 - DNA, 15 bp, Homo sapiens
cagtgtatacttctc

SEQ ID NO: 1788053 - DNA, 15 bp, Homo sapiens
agtgtatacttctct

SEQ ID NO: 1788054 - DNA, 15 bp, Homo sapiens
gtgtatacttctctg

SEQ ID NO: 1788055 - DNA, 15 bp, Homo sapiens
tgtatacttctctgg

SEQ ID NO: 1788056 - DNA, 15 bp, Homo sapiens
gtatacttctctggg

SEQ ID NO: 1788057 - DNA, 15 bp, Homo sapiens
tatacttctctggga

SEQ ID NO: 1788058 - DNA, 15 bp, Homo sapiens
atacttctctgggag

SEQ ID NO: 1788059 - DNA, 15 bp, Homo sapiens
tacttctctgggagg

SEQ ID NO: 1788060 - DNA, 15 bp, Homo sapiens
acttctctgggaggg

SEQ ID NO: 1788061 - DNA, 15 bp, Homo sapiens
cttctctgggaggga

SEQ ID NO: 1788062 - DNA, 15 bp, Homo sapiens
ttctctgggagggat

SEQ ID NO: 1788063 - DNA, 15 bp, Homo sapiens
tctctgggagggatc

SEQ ID NO: 1788064 - DNA, 15 bp, Homo sapiens
ctctgggagggatcc

SEQ ID NO: 1788065 - DNA, 15 bp, Homo sapiens
tctgggagggatccc

SEQ ID NO: 1788066 - DNA, 15 bp, Homo sapiens
ctgggagggatccca

SEQ ID NO: 1788067 - DNA, 15 bp, Homo sapiens
tgggagggatcccaa

SEQ ID NO: 1788068 - DNA, 15 bp, Homo sapiens
gggagggatcccaag

SEQ ID NO: 1788069 - DNA, 15 bp, Homo sapiens
ggagggatcccaaga

SEQ ID NO: 1788070 - DNA, 15 bp, Homo sapiens
gagggatcccaagac

SEQ ID NO: 1788071 - DNA, 15 bp, Homo sapiens
agggatcccaagaca

SEQ ID NO: 1788072 - DNA, 15 bp, Homo sapiens
gggatcccaagacag

SEQ ID NO: 1788073 - DNA, 15 bp, Homo sapiens
ggatcccaagacagg

SEQ ID NO: 1788074 - DNA, 15 bp, Homo sapiens
gatcccaagacagga

SEQ ID NO: 1788075 - DNA, 15 bp, Homo sapiens
atcccaagacaggac

SEQ ID NO: 1788076 - DNA, 15 bp, Homo sapiens
tcccaagacaggact

SEQ ID NO: 1788077 - DNA, 15 bp, Homo sapiens
cccaagacaggacta

SEQ ID NO: 1788078 - DNA, 15 bp, Homo sapiens
ccaagacaggactac

SEQ ID NO: 1788079 - DNA, 15 bp, Homo sapiens
caagacaggactacc

SEQ ID NO: 1788080 - DNA, 15 bp, Homo sapiens
aagacaggactaccc

SEQ ID NO: 1788081 - DNA, 15 bp, Homo sapiens
agacaggactaccca

SEQ ID NO: 1788082 - DNA, 15 bp, Homo sapiens
gacaggactacccaa

SEQ ID NO: 1788083 - DNA, 15 bp, Homo sapiens
acaggactacccaac

SEQ ID NO: 1788084 - DNA, 15 bp, Homo sapiens
caggactacccaacc

SEQ ID NO: 1788085 - DNA, 15 bp, Homo sapiens
aggactacccaacca

SEQ ID NO: 1788086 - DNA, 15 bp, Homo sapiens
ggactacccaaccaa

SEQ ID NO: 1788087 - DNA, 15 bp, Homo sapiens
gactacccaaccaag

SEQ ID NO: 1788088 - DNA, 15 bp, Homo sapiens
actacccaaccaagt

SEQ ID NO: 1788089 - DNA, 15 bp, Homo sapiens
ctacccaaccaagtc

SEQ ID NO: 1788090 - DNA, 15 bp, Homo sapiens
tacccaaccaagtca

SEQ ID NO: 1788091 - DNA, 15 bp, Homo sapiens
acccaaccaagtcac

SEQ ID NO: 1788092 - DNA, 15 bp, Homo sapiens
cccaaccaagtcact

SEQ ID NO: 1788093 - DNA, 15 bp, Homo sapiens
ccaaccaagtcactt

SEQ ID NO: 1788094 - DNA, 15 bp, Homo sapiens
caaccaagtcacttc

SEQ ID NO: 1788095 - DNA, 15 bp, Homo sapiens
aaccaagtcacttcc

SEQ ID NO: 1788096 - DNA, 15 bp, Homo sapiens
accaagtcacttcca

SEQ ID NO: 1788097 - DNA, 15 bp, Homo sapiens
ccaagtcacttccag

SEQ ID NO: 1788098 - DNA, 15 bp, Homo sapiens
caagtcacttccaga

SEQ ID NO: 1788099 - DNA, 15 bp, Homo sapiens
aagtcacttccagag

SEQ ID NO: 1788100 - DNA, 15 bp, Homo sapiens
agtcacttccagagt

SEQ ID NO: 1788101 - DNA, 15 bp, Homo sapiens
gtcacttccagagtt

SEQ ID NO: 1788102 - DNA, 15 bp, Homo sapiens
tcacttccagagttc

SEQ ID NO: 1788103 - DNA, 15 bp, Homo sapiens
cacttccagagttct

SEQ ID NO: 1788104 - DNA, 15 bp, Homo sapiens
acttccagagttctg

SEQ ID NO: 1788105 - DNA, 15 bp, Homo sapiens
cttccagagttctga

SEQ ID NO: 1788106 - DNA, 15 bp, Homo sapiens
ttccagagttctgat

SEQ ID NO: 1788107 - DNA, 15 bp, Homo sapiens
tccagagttctgatc

SEQ ID NO: 1788108 - DNA, 15 bp, Homo sapiens
ccagagttctgatcc

SEQ ID NO: 1788109 - DNA, 15 bp, Homo sapiens
cagagttctgatcca

SEQ ID NO: 1788110 - DNA, 15 bp, Homo sapiens
agagttctgatccat

SEQ ID NO: 1788111 - DNA, 15 bp, Homo sapiens
gagttctgatccata

SEQ ID NO: 1788112 - DNA, 15 bp, Homo sapiens
agttctgatccatag

SEQ ID NO: 1788113 - DNA, 15 bp, Homo sapiens
gttctgatccataga

SEQ ID NO: 1788114 - DNA, 15 bp, Homo sapiens
ttctgatccatagac

SEQ ID NO: 1788115 - DNA, 15 bp, Homo sapiens
tctgatccatagaca

SEQ ID NO: 1788116 - DNA, 15 bp, Homo sapiens
ctgatccatagacat

SEQ ID NO: 1788117 - DNA, 15 bp, Homo sapiens
tgatccatagacatt

SEQ ID NO: 1788118 - DNA, 15 bp, Homo sapiens
gatccatagacattc

SEQ ID NO: 1788119 - DNA, 15 bp, Homo sapiens
atccatagacattct

SEQ ID NO: 1788120 - DNA, 15 bp, Homo sapiens
tccatagacattctg

SEQ ID NO: 1788121 - DNA, 15 bp, Homo sapiens
ccatagacattctga

SEQ ID NO: 1788122 - DNA, 15 bp, Homo sapiens
catagacattctgag

SEQ ID NO: 1788123 - DNA, 15 bp, Homo sapiens
atagacattctgaga

SEQ ID NO: 1788124 - DNA, 15 bp, Homo sapiens
tagacattctgagag

SEQ ID NO: 1788125 - DNA, 15 bp, Homo sapiens
agacattctgagaga

SEQ ID NO: 1788126 - DNA, 15 bp, Homo sapiens
gacattctgagagat

SEQ ID NO: 1788127 - DNA, 15 bp, Homo sapiens
acattctgagagatc

SEQ ID NO: 1788128 - DNA, 15 bp, Homo sapiens
cattctgagagatca

SEQ ID NO: 1788129 - DNA, 15 bp, Homo sapiens
attctgagagatcat

SEQ ID NO: 1788130 - DNA, 15 bp, Homo sapiens
ttctgagagatcatg

SEQ ID NO: 1788131 - DNA, 15 bp, Homo sapiens
tctgagagatcatga

SEQ ID NO: 1788132 - DNA, 15 bp, Homo sapiens
ctgagagatcatgaa

SEQ ID NO: 1788133 - DNA, 15 bp, Homo sapiens
tgagagatcatgaat

SEQ ID NO: 1788134 - DNA, 15 bp, Homo sapiens
gagagatcatgaatg

SEQ ID NO: 1788135 - DNA, 15 bp, Homo sapiens
agagatcatgaatgg

SEQ ID NO: 1788136 - DNA, 15 bp, Homo sapiens
gagatcatgaatggt

SEQ ID NO: 1788137 - DNA, 15 bp, Homo sapiens
agatcatgaatggtg

SEQ ID NO: 1788138 - DNA, 15 bp, Homo sapiens
gatcatgaatggtgt

SEQ ID NO: 1788139 - DNA, 15 bp, Homo sapiens
atcatgaatggtgtt

SEQ ID NO: 1788140 - DNA, 15 bp, Homo sapiens
tcatgaatggtgttg

SEQ ID NO: 1788141 - DNA, 15 bp, Homo sapiens
catgaatggtgttgt

SEQ ID NO: 1788142 - DNA, 15 bp, Homo sapiens
atgaatggtgttgtt

SEQ ID NO: 1788143 - DNA, 15 bp, Homo sapiens
tgaatggtgttgttt

SEQ ID NO: 1788144 - DNA, 15 bp, Homo sapiens
gaatggtgttgtttt

SEQ ID NO: 1788145 - DNA, 15 bp, Homo sapiens
aatggtgttgtttta

SEQ ID NO: 1788146 - DNA, 15 bp, Homo sapiens
atggtgttgttttaa

SEQ ID NO: 1788147 - DNA, 15 bp, Homo sapiens
tggtgttgttttaag

SEQ ID NO: 1788148 - DNA, 15 bp, Homo sapiens
ggtgttgttttaagc

SEQ ID NO: 1788149 - DNA, 15 bp, Homo sapiens
gtgttgttttaagcc

SEQ ID NO: 1788150 - DNA, 15 bp, Homo sapiens
tgttgttttaagcca

SEQ ID NO: 1788151 - DNA, 15 bp, Homo sapiens
gttgttttaagccac

SEQ ID NO: 1788152 - DNA, 15 bp, Homo sapiens
ttgttttaagccact

SEQ ID NO: 1788153 - DNA, 15 bp, Homo sapiens
tgttttaagccacta

SEQ ID NO: 1788154 - DNA, 15 bp, Homo sapiens
gttttaagccactaa

SEQ ID NO: 1788155 - DNA, 15 bp, Homo sapiens
ttttaagccactaaa

SEQ ID NO: 1788156 - DNA, 15 bp, Homo sapiens
tttaagccactaaat

SEQ ID NO: 1788157 - DNA, 15 bp, Homo sapiens
ttaagccactaaatt

SEQ ID NO: 1788158 - DNA, 15 bp, Homo sapiens
taagccactaaattt

SEQ ID NO: 1788159 - DNA, 15 bp, Homo sapiens
aagccactaaatttt

SEQ ID NO: 1788160 - DNA, 15 bp, Homo sapiens
agccactaaattttg

SEQ ID NO: 1788161 - DNA, 15 bp, Homo sapiens
gccactaaattttgg

SEQ ID NO: 1788162 - DNA, 15 bp, Homo sapiens
ccactaaattttggg

SEQ ID NO: 1788163 - DNA, 15 bp, Homo sapiens
cactaaattttggga

SEQ ID NO: 1788164 - DNA, 15 bp, Homo sapiens
actaaattttgggat

SEQ ID NO: 1788165 - DNA, 15 bp, Homo sapiens
ctaaattttgggata

SEQ ID NO: 1788166 - DNA, 15 bp, Homo sapiens
taaattttgggatac

SEQ ID NO: 1788167 - DNA, 15 bp, Homo sapiens
aaattttgggatact

SEQ ID NO: 1788168 - DNA, 15 bp, Homo sapiens
aattttgggatactt

SEQ ID NO: 1788169 - DNA, 15 bp, Homo sapiens
attttgggatacttt

SEQ ID NO: 1788170 - DNA, 15 bp, Homo sapiens
ttttgggatactttt

SEQ ID NO: 1788171 - DNA, 15 bp, Homo sapiens
tttgggatacttttt

SEQ ID NO: 1788172 - DNA, 15 bp, Homo sapiens
ttgggatactttttt

SEQ ID NO: 1788173 - DNA, 15 bp, Homo sapiens
tgggatacttttttt

SEQ ID NO: 1788174 - DNA, 15 bp, Homo sapiens
gggatactttttttt

SEQ ID NO: 1788175 - DNA, 15 bp, Homo sapiens
ggatacttttttttt

SEQ ID NO: 1788176 - DNA, 15 bp, Homo sapiens
gatactttttttttt

SEQ ID NO: 1788177 - DNA, 15 bp, Homo sapiens
atactttttttttta

SEQ ID NO: 1788178 - DNA, 15 bp, Homo sapiens
tacttttttttttat

SEQ ID NO: 1788179 - DNA, 15 bp, Homo sapiens
acttttttttttata

SEQ ID NO: 1788180 - DNA, 15 bp, Homo sapiens
cttttttttttataa

SEQ ID NO: 1788181 - DNA, 15 bp, Homo sapiens
ttttttttttataat

SEQ ID NO: 1788182 - DNA, 15 bp, Homo sapiens
tttttttttataata

SEQ ID NO: 1788183 - DNA, 15 bp, Homo sapiens
ttttttttataataa

SEQ ID NO: 1788184 - DNA, 15 bp, Homo sapiens
tttttttataataat

SEQ ID NO: 1788185 - DNA, 15 bp, Homo sapiens
ttttttataataatg

SEQ ID NO: 1788186 - DNA, 15 bp, Homo sapiens
tttttataataatga

SEQ ID NO: 1788187 - DNA, 15 bp, Homo sapiens
ttttataataatgaa

SEQ ID NO: 1788188 - DNA, 15 bp, Homo sapiens
tttataataatgaat

SEQ ID NO: 1788189 - DNA, 15 bp, Homo sapiens
ttataataatgaatt

SEQ ID NO: 1788190 - DNA, 15 bp, Homo sapiens
tataataatgaattt

SEQ ID NO: 1788191 - DNA, 15 bp, Homo sapiens
ataataatgaattta

SEQ ID NO: 1788192 - DNA, 15 bp, Homo sapiens
taataatgaatttag

SEQ ID NO: 1788193 - DNA, 15 bp, Homo sapiens
aataatgaatttagt

SEQ ID NO: 1788194 - DNA, 15 bp, Homo sapiens
ataatgaatttagtt

SEQ ID NO: 1788195 - DNA, 15 bp, Homo sapiens
taatgaatttagttt

SEQ ID NO: 1788196 - DNA, 15 bp, Homo sapiens
aatgaatttagtttt

SEQ ID NO: 1788197 - DNA, 15 bp, Homo sapiens
atgaatttagttttt

SEQ ID NO: 1788198 - DNA, 15 bp, Homo sapiens
tgaatttagtttttt

SEQ ID NO: 1788199 - DNA, 15 bp, Homo sapiens
gaatttagtttttta

SEQ ID NO: 1788200 - DNA, 15 bp, Homo sapiens
aatttagttttttaa

SEQ ID NO: 1788201 - DNA, 15 bp, Homo sapiens
atttagttttttaaa

SEQ ID NO: 1788202 - DNA, 15 bp, Homo sapiens
tttagttttttaaaa

SEQ ID NO: 1788203 - DNA, 15 bp, Homo sapiens
ttagttttttaaaaa

SEQ ID NO: 1788204 - DNA, 15 bp, Homo sapiens
tagttttttaaaaaa

SEQ ID NO: 1788205 - DNA, 15 bp, Homo sapiens
agttttttaaaaaaa

SEQ ID NO: 1788206 - DNA, 15 bp, Homo sapiens
gttttttaaaaaaat

SEQ ID NO: 1788207 - DNA, 15 bp, Homo sapiens
ttttttaaaaaaatg

SEQ ID NO: 1788208 - DNA, 15 bp, Homo sapiens
tttttaaaaaaatgt

SEQ ID NO: 1788209 - DNA, 15 bp, Homo sapiens
ttttaaaaaaatgtg

SEQ ID NO: 1788210 - DNA, 15 bp, Homo sapiens
tttaaaaaaatgtgt

SEQ ID NO: 1788211 - DNA, 15 bp, Homo sapiens
ttaaaaaaatgtgtc

SEQ ID NO: 1788212 - DNA, 15 bp, Homo sapiens
taaaaaaatgtgtca

SEQ ID NO: 1788213 - DNA, 15 bp, Homo sapiens
aaaaaaatgtgtcaa

SEQ ID NO: 1788214 - DNA, 15 bp, Homo sapiens
aaaaaatgtgtcaag

SEQ ID NO: 1788215 - DNA, 15 bp, Homo sapiens
aaaaatgtgtcaagt

SEQ ID NO: 1788216 - DNA, 15 bp, Homo sapiens
aaaatgtgtcaagta

SEQ ID NO: 1788217 - DNA, 15 bp, Homo sapiens
aaatgtgtcaagtat

SEQ ID NO: 1788218 - DNA, 15 bp, Homo sapiens
aatgtgtcaagtatt

SEQ ID NO: 1788219 - DNA, 15 bp, Homo sapiens
atgtgtcaagtattt

SEQ ID NO: 1788220 - DNA, 15 bp, Homo sapiens
tgtgtcaagtatttg

SEQ ID NO: 1788221 - DNA, 15 bp, Homo sapiens
gtgtcaagtatttgt

SEQ ID NO: 1788222 - DNA, 15 bp, Homo sapiens
tgtcaagtatttgtt

SEQ ID NO: 1788223 - DNA, 15 bp, Homo sapiens
gtcaagtatttgtta

SEQ ID NO: 1788224 - DNA, 15 bp, Homo sapiens
tcaagtatttgttaa

SEQ ID NO: 1788225 - DNA, 15 bp, Homo sapiens
caagtatttgttaac

SEQ ID NO: 1788226 - DNA, 15 bp, Homo sapiens
aagtatttgttaact

SEQ ID NO: 1788227 - DNA, 15 bp, Homo sapiens
agtatttgttaactc

SEQ ID NO: 1788228 - DNA, 15 bp, Homo sapiens
gtatttgttaactca

SEQ ID NO: 1788229 - DNA, 15 bp, Homo sapiens
tatttgttaactcat

SEQ ID NO: 1788230 - DNA, 15 bp, Homo sapiens
atttgttaactcatt

SEQ ID NO: 1788231 - DNA, 15 bp, Homo sapiens
tttgttaactcatta

SEQ ID NO: 1788232 - DNA, 15 bp, Homo sapiens
ttgttaactcattaa

SEQ ID NO: 1788233 - DNA, 15 bp, Homo sapiens
tgttaactcattaat

SEQ ID NO: 1788234 - DNA, 15 bp, Homo sapiens
gttaactcattaatg

SEQ ID NO: 1788235 - DNA, 15 bp, Homo sapiens
ttaactcattaatga

SEQ ID NO: 1788236 - DNA, 15 bp, Homo sapiens
taactcattaatgag

SEQ ID NO: 1788237 - DNA, 15 bp, Homo sapiens
aactcattaatgagg

SEQ ID NO: 1788238 - DNA, 15 bp, Homo sapiens
actcattaatgaggg

SEQ ID NO: 1788239 - DNA, 15 bp, Homo sapiens
ctcattaatgaggga

SEQ ID NO: 1788240 - DNA, 15 bp, Homo sapiens
tcattaatgagggaa

SEQ ID NO: 1788241 - DNA, 15 bp, Homo sapiens
cattaatgagggaac

SEQ ID NO: 1788242 - DNA, 15 bp, Homo sapiens
attaatgagggaacc

SEQ ID NO: 1788243 - DNA, 15 bp, Homo sapiens
ttaatgagggaacca

SEQ ID NO: 1788244 - DNA, 15 bp, Homo sapiens
taatgagggaaccag

SEQ ID NO: 1788245 - DNA, 15 bp, Homo sapiens
aatgagggaaccagc

SEQ ID NO: 1788246 - DNA, 15 bp, Homo sapiens
atgagggaaccagca

SEQ ID NO: 1788247 - DNA, 15 bp, Homo sapiens
tgagggaaccagcaa

SEQ ID NO: 1788248 - DNA, 15 bp, Homo sapiens
gagggaaccagcaag

SEQ ID NO: 1788249 - DNA, 15 bp, Homo sapiens
agggaaccagcaaga

SEQ ID NO: 1788250 - DNA, 15 bp, Homo sapiens
gggaaccagcaagat

SEQ ID NO: 1788251 - DNA, 15 bp, Homo sapiens
ggaaccagcaagatg

SEQ ID NO: 1788252 - DNA, 15 bp, Homo sapiens
gaaccagcaagatga

SEQ ID NO: 1788253 - DNA, 15 bp, Homo sapiens
aaccagcaagatgac

SEQ ID NO: 1788254 - DNA, 15 bp, Homo sapiens
accagcaagatgaca

SEQ ID NO: 1788255 - DNA, 15 bp, Homo sapiens
ccagcaagatgacaa

SEQ ID NO: 1788256 - DNA, 15 bp, Homo sapiens
cagcaagatgacaaa

SEQ ID NO: 1788257 - DNA, 15 bp, Homo sapiens
agcaagatgacaaag

SEQ ID NO: 1788258 - DNA, 15 bp, Homo sapiens
gcaagatgacaaagc

SEQ ID NO: 1788259 - DNA, 15 bp, Homo sapiens
caagatgacaaagct

SEQ ID NO: 1788260 - DNA, 15 bp, Homo sapiens
aagatgacaaagctc

SEQ ID NO: 1788261 - DNA, 15 bp, Homo sapiens
agatgacaaagctca

SEQ ID NO: 1788262 - DNA, 15 bp, Homo sapiens
gatgacaaagctcat

SEQ ID NO: 1788263 - DNA, 15 bp, Homo sapiens
atgacaaagctcatt

SEQ ID NO: 1788264 - DNA, 15 bp, Homo sapiens
tgacaaagctcattc

SEQ ID NO: 1788265 - DNA, 15 bp, Homo sapiens
gacaaagctcattca

SEQ ID NO: 1788266 - DNA, 15 bp, Homo sapiens
acaaagctcattcaa

SEQ ID NO: 1788267 - DNA, 15 bp, Homo sapiens
caaagctcattcaaa

SEQ ID NO: 1788268 - DNA, 15 bp, Homo sapiens
aaagctcattcaaaa

SEQ ID NO: 1788269 - DNA, 15 bp, Homo sapiens
aagctcattcaaaag

SEQ ID NO: 1788270 - DNA, 15 bp, Homo sapiens
agctcattcaaaaga

SEQ ID NO: 1788271 - DNA, 15 bp, Homo sapiens
gctcattcaaaagag

SEQ ID NO: 1788272 - DNA, 15 bp, Homo sapiens
ctcattcaaaagagg

SEQ ID NO: 1788273 - DNA, 15 bp, Homo sapiens
tcattcaaaagagga

SEQ ID NO: 1788274 - DNA, 15 bp, Homo sapiens
cattcaaaagaggat

SEQ ID NO: 1788275 - DNA, 15 bp, Homo sapiens
attcaaaagaggata

SEQ ID NO: 1788276 - DNA, 15 bp, Homo sapiens
ttcaaaagaggatat

SEQ ID NO: 1788277 - DNA, 15 bp, Homo sapiens
tcaaaagaggatatg

SEQ ID NO: 1788278 - DNA, 15 bp, Homo sapiens
caaaagaggatatga

SEQ ID NO: 1788279 - DNA, 15 bp, Homo sapiens
aaaagaggatatgag

SEQ ID NO: 1788280 - DNA, 15 bp, Homo sapiens
aagaggatatgagag

SEQ ID NO: 1788281 - DNA, 15 bp, Homo sapiens
agaggatatgagagg

SEQ ID NO: 1788282 - DNA, 15 bp, Homo sapiens
gaggatatgagaggc

SEQ ID NO: 1788283 - DNA, 15 bp, Homo sapiens
aggatatgagaggct

SEQ ID NO: 1788284 - DNA, 15 bp, Homo sapiens
ggatatgagaggctg

SEQ ID NO: 1788285 - DNA, 15 bp, Homo sapiens
gatatgagaggctgg

SEQ ID NO: 1788286 - DNA, 15 bp, Homo sapiens
atatgagaggctggg

SEQ ID NO: 1788287 - DNA, 15 bp, Homo sapiens
tatgagaggctgggc

SEQ ID NO: 1788288 - DNA, 15 bp, Homo sapiens
atgagaggctgggcg

SEQ ID NO: 1788289 - DNA, 15 bp, Homo sapiens
tgagaggctgggcgt

SEQ ID NO: 1788290 - DNA, 15 bp, Homo sapiens
gagaggctgggcgtg

SEQ ID NO: 1788291 - DNA, 15 bp, Homo sapiens
agaggctgggcgtgg

SEQ ID NO: 1788292 - DNA, 15 bp, Homo sapiens
gaggctgggcgtggt

SEQ ID NO: 1788293 - DNA, 15 bp, Homo sapiens
aggctgggcgtggtg

SEQ ID NO: 1788294 - DNA, 15 bp, Homo sapiens
ggctgggcgtggtgg

SEQ ID NO: 1788295 - DNA, 15 bp, Homo sapiens
ctgggcgtggtggct

SEQ ID NO: 1788296 - DNA, 15 bp, Homo sapiens
tgggcgtggtggctc

SEQ ID NO: 1788297 - DNA, 15 bp, Homo sapiens
ggcgtggtggctcat

SEQ ID NO: 1788298 - DNA, 15 bp, Homo sapiens
gcgtggtggctcatg

SEQ ID NO: 1788299 - DNA, 15 bp, Homo sapiens
aggcggatggatcat

SEQ ID NO: 1788300 - DNA, 15 bp, Homo sapiens
ggcggatggatcata

SEQ ID NO: 1788301 - DNA, 15 bp, Homo sapiens
gcggatggatcataa

SEQ ID NO: 1788302 - DNA, 15 bp, Homo sapiens
cggatggatcataag

SEQ ID NO: 1788303 - DNA, 15 bp, Homo sapiens
ggatggatcataagg

SEQ ID NO: 1788304 - DNA, 15 bp, Homo sapiens
gatggatcataaggt

SEQ ID NO: 1788305 - DNA, 15 bp, Homo sapiens
atggatcataaggtt

SEQ ID NO: 1788306 - DNA, 15 bp, Homo sapiens
tggatcataaggtta

SEQ ID NO: 1788307 - DNA, 15 bp, Homo sapiens
ggatcataaggttaa

SEQ ID NO: 1788308 - DNA, 15 bp, Homo sapiens
gatcataaggttaat

SEQ ID NO: 1788309 - DNA, 15 bp, Homo sapiens
atcataaggttaatg

SEQ ID NO: 1788310 - DNA, 15 bp, Homo sapiens
tcataaggttaatgc

SEQ ID NO: 1788311 - DNA, 15 bp, Homo sapiens
cataaggttaatgcc

SEQ ID NO: 1788312 - DNA, 15 bp, Homo sapiens
ataaggttaatgccc

SEQ ID NO: 1788313 - DNA, 15 bp, Homo sapiens
taaggttaatgccct

SEQ ID NO: 1788314 - DNA, 15 bp, Homo sapiens
aaggttaatgcccta

SEQ ID NO: 1788315 - DNA, 15 bp, Homo sapiens
aggttaatgccctaa

SEQ ID NO: 1788316 - DNA, 15 bp, Homo sapiens
ggttaatgccctaaa

SEQ ID NO: 1788317 - DNA, 15 bp, Homo sapiens
gttaatgccctaaag

SEQ ID NO: 1788318 - DNA, 15 bp, Homo sapiens
ttaatgccctaaagg

SEQ ID NO: 1788319 - DNA, 15 bp, Homo sapiens
taatgccctaaaggg

SEQ ID NO: 1788320 - DNA, 15 bp, Homo sapiens
aatgccctaaagggc

SEQ ID NO: 1788321 - DNA, 15 bp, Homo sapiens
atgccctaaagggcg

SEQ ID NO: 1788322 - DNA, 15 bp, Homo sapiens
tgccctaaagggcga

SEQ ID NO: 1788323 - DNA, 15 bp, Homo sapiens
gccctaaagggcgat

SEQ ID NO: 1788324 - DNA, 15 bp, Homo sapiens
ccctaaagggcgata

SEQ ID NO: 1788325 - DNA, 15 bp, Homo sapiens
cctaaagggcgataa

SEQ ID NO: 1788326 - DNA, 15 bp, Homo sapiens
ctaaagggcgataaa

SEQ ID NO: 1788327 - DNA, 15 bp, Homo sapiens
taaagggcgataaaa

SEQ ID NO: 1788328 - DNA, 15 bp, Homo sapiens
aaagggcgataaaac

SEQ ID NO: 1788329 - DNA, 15 bp, Homo sapiens
aagggcgataaaact

SEQ ID NO: 1788330 - DNA, 15 bp, Homo sapiens
agggcgataaaacta

SEQ ID NO: 1788331 - DNA, 15 bp, Homo sapiens
gggcgataaaactat

SEQ ID NO: 1788332 - DNA, 15 bp, Homo sapiens
ggcgataaaactatg

SEQ ID NO: 1788333 - DNA, 15 bp, Homo sapiens
gcgataaaactatga

SEQ ID NO: 1788334 - DNA, 15 bp, Homo sapiens
cgataaaactatgac

SEQ ID NO: 1788335 - DNA, 15 bp, Homo sapiens
gataaaactatgaca

SEQ ID NO: 1788336 - DNA, 15 bp, Homo sapiens
ataaaactatgacat

SEQ ID NO: 1788337 - DNA, 15 bp, Homo sapiens
taaaactatgacatt

SEQ ID NO: 1788338 - DNA, 15 bp, Homo sapiens
aaaactatgacattt

SEQ ID NO: 1788339 - DNA, 15 bp, Homo sapiens
aaactatgacatttg

SEQ ID NO: 1788340 - DNA, 15 bp, Homo sapiens
aactatgacatttgc

SEQ ID NO: 1788341 - DNA, 15 bp, Homo sapiens
actatgacatttgca

SEQ ID NO: 1788342 - DNA, 15 bp, Homo sapiens
ctatgacatttgcaa

SEQ ID NO: 1788343 - DNA, 15 bp, Homo sapiens
tatgacatttgcaac

SEQ ID NO: 1788344 - DNA, 15 bp, Homo sapiens
atgacatttgcaact

SEQ ID NO: 1788345 - DNA, 15 bp, Homo sapiens
tgacatttgcaacta

SEQ ID NO: 1788346 - DNA, 15 bp, Homo sapiens
gacatttgcaactaa

SEQ ID NO: 1788347 - DNA, 15 bp, Homo sapiens
acatttgcaactaaa

SEQ ID NO: 1788348 - DNA, 15 bp, Homo sapiens
catttgcaactaaat

SEQ ID NO: 1788349 - DNA, 15 bp, Homo sapiens
atttgcaactaaata

SEQ ID NO: 1788350 - DNA, 15 bp, Homo sapiens
tttgcaactaaataa

SEQ ID NO: 1788351 - DNA, 15 bp, Homo sapiens
ttgcaactaaataat

SEQ ID NO: 1788352 - DNA, 15 bp, Homo sapiens
tgcaactaaataatc

SEQ ID NO: 1788353 - DNA, 15 bp, Homo sapiens
gcaactaaataatct

SEQ ID NO: 1788354 - DNA, 15 bp, Homo sapiens
caactaaataatctg

SEQ ID NO: 1788355 - DNA, 15 bp, Homo sapiens
aactaaataatctgc

SEQ ID NO: 1788356 - DNA, 15 bp, Homo sapiens
actaaataatctgca

SEQ ID NO: 1788357 - DNA, 15 bp, Homo sapiens
ctaaataatctgcaa

SEQ ID NO: 1788358 - DNA, 15 bp, Homo sapiens
taaataatctgcaaa

SEQ ID NO: 1788359 - DNA, 15 bp, Homo sapiens
aaataatctgcaaag

SEQ ID NO: 1788360 - DNA, 15 bp, Homo sapiens
aataatctgcaaaga

SEQ ID NO: 1788361 - DNA, 15 bp, Homo sapiens
ataatctgcaaagaa

SEQ ID NO: 1788362 - DNA, 15 bp, Homo sapiens
taatctgcaaagaag

SEQ ID NO: 1788363 - DNA, 15 bp, Homo sapiens
aatctgcaaagaagc

SEQ ID NO: 1788364 - DNA, 15 bp, Homo sapiens
atctgcaaagaagca

SEQ ID NO: 1788365 - DNA, 15 bp, Homo sapiens
tctgcaaagaagcat

SEQ ID NO: 1788366 - DNA, 15 bp, Homo sapiens
ctgcaaagaagcatc

SEQ ID NO: 1788367 - DNA, 15 bp, Homo sapiens
tgcaaagaagcatct

SEQ ID NO: 1788368 - DNA, 15 bp, Homo sapiens
gcaaagaagcatcta

SEQ ID NO: 1788369 - DNA, 15 bp, Homo sapiens
caaagaagcatctaa

SEQ ID NO: 1788370 - DNA, 15 bp, Homo sapiens
aaagaagcatctaac

SEQ ID NO: 1788371 - DNA, 15 bp, Homo sapiens
aagaagcatctaacc

SEQ ID NO: 1788372 - DNA, 15 bp, Homo sapiens
agaagcatctaaccc

SEQ ID NO: 1788373 - DNA, 15 bp, Homo sapiens
gaagcatctaaccca

SEQ ID NO: 1788374 - DNA, 15 bp, Homo sapiens
aagcatctaacccag

SEQ ID NO: 1788375 - DNA, 15 bp, Homo sapiens
agcatctaacccaga

SEQ ID NO: 1788376 - DNA, 15 bp, Homo sapiens
gcatctaacccagag

SEQ ID NO: 1788377 - DNA, 15 bp, Homo sapiens
catctaacccagagt

SEQ ID NO: 1788378 - DNA, 15 bp, Homo sapiens
atctaacccagagtc

SEQ ID NO: 1788379 - DNA, 15 bp, Homo sapiens
tctaacccagagtct

SEQ ID NO: 1788380 - DNA, 15 bp, Homo sapiens
ctaacccagagtcta

SEQ ID NO: 1788381 - DNA, 15 bp, Homo sapiens
taacccagagtctac

SEQ ID NO: 1788382 - DNA, 15 bp, Homo sapiens
aacccagagtctacg

SEQ ID NO: 1788383 - DNA, 15 bp, Homo sapiens
acccagagtctacgc

SEQ ID NO: 1788384 - DNA, 15 bp, Homo sapiens
cccagagtctacgcc

SEQ ID NO: 1788385 - DNA, 15 bp, Homo sapiens
ccagagtctacgccc

SEQ ID NO: 1788386 - DNA, 15 bp, Homo sapiens
cagagtctacgccct

SEQ ID NO: 1788387 - DNA, 15 bp, Homo sapiens
agagtctacgccctc

SEQ ID NO: 1788388 - DNA, 15 bp, Homo sapiens
gagtctacgccctcc

SEQ ID NO: 1788389 - DNA, 15 bp, Homo sapiens
agtctacgccctcct

SEQ ID NO: 1788390 - DNA, 15 bp, Homo sapiens
gtctacgccctcctc

SEQ ID NO: 1788391 - DNA, 15 bp, Homo sapiens
tctacgccctcctca

SEQ ID NO: 1788392 - DNA, 15 bp, Homo sapiens
ctacgccctcctcaa

SEQ ID NO: 1788393 - DNA, 15 bp, Homo sapiens
tacgccctcctcaac

SEQ ID NO: 1788394 - DNA, 15 bp, Homo sapiens
acgccctcctcaaca

SEQ ID NO: 1788395 - DNA, 15 bp, Homo sapiens
cgccctcctcaacag

SEQ ID NO: 1788396 - DNA, 15 bp, Homo sapiens
gccctcctcaacagc

SEQ ID NO: 1788397 - DNA, 15 bp, Homo sapiens
ccctcctcaacagca

SEQ ID NO: 1788398 - DNA, 15 bp, Homo sapiens
cctcctcaacagcaa

SEQ ID NO: 1788399 - DNA, 15 bp, Homo sapiens
ctcctcaacagcaaa

SEQ ID NO: 1788400 - DNA, 15 bp, Homo sapiens
tcctcaacagcaaat

SEQ ID NO: 1788401 - DNA, 15 bp, Homo sapiens
cctcaacagcaaata

SEQ ID NO: 1788402 - DNA, 15 bp, Homo sapiens
ctcaacagcaaataa

SEQ ID NO: 1788403 - DNA, 15 bp, Homo sapiens
tcaacagcaaataac

SEQ ID NO: 1788404 - DNA, 15 bp, Homo sapiens
caacagcaaataaca

SEQ ID NO: 1788405 - DNA, 15 bp, Homo sapiens
aacagcaaataacaa

SEQ ID NO: 1788406 - DNA, 15 bp, Homo sapiens
acagcaaataacaat

SEQ ID NO: 1788407 - DNA, 15 bp, Homo sapiens
cagcaaataacaatt

SEQ ID NO: 1788408 - DNA, 15 bp, Homo sapiens
agcaaataacaattc

SEQ ID NO: 1788409 - DNA, 15 bp, Homo sapiens
gcaaataacaattca

SEQ ID NO: 1788410 - DNA, 15 bp, Homo sapiens
caaataacaattcaa

SEQ ID NO: 1788411 - DNA, 15 bp, Homo sapiens
aaataacaattcaaa

SEQ ID NO: 1788412 - DNA, 15 bp, Homo sapiens
aataacaattcaaat

SEQ ID NO: 1788413 - DNA, 15 bp, Homo sapiens
ataacaattcaaata

SEQ ID NO: 1788414 - DNA, 15 bp, Homo sapiens
taacaattcaaataa

SEQ ID NO: 1788415 - DNA, 15 bp, Homo sapiens
aacaattcaaataag

SEQ ID NO: 1788416 - DNA, 15 bp, Homo sapiens
acaattcaaataagt

SEQ ID NO: 1788417 - DNA, 15 bp, Homo sapiens
caattcaaataagtt

SEQ ID NO: 1788418 - DNA, 15 bp, Homo sapiens
aattcaaataagttg

SEQ ID NO: 1788419 - DNA, 15 bp, Homo sapiens
attcaaataagttgg

SEQ ID NO: 1788420 - DNA, 15 bp, Homo sapiens
ttcaaataagttgga

SEQ ID NO: 1788421 - DNA, 15 bp, Homo sapiens
tcaaataagttggag

SEQ ID NO: 1788422 - DNA, 15 bp, Homo sapiens
caaataagttggagt

SEQ ID NO: 1788423 - DNA, 15 bp, Homo sapiens
aaataagttggagtt

SEQ ID NO: 1788424 - DNA, 15 bp, Homo sapiens
aataagttggagttc

SEQ ID NO: 1788425 - DNA, 15 bp, Homo sapiens
ataagttggagttcc

SEQ ID NO: 1788426 - DNA, 15 bp, Homo sapiens
taagttggagttccc

SEQ ID NO: 1788427 - DNA, 15 bp, Homo sapiens
aagttggagttcccc

SEQ ID NO: 1788428 - DNA, 15 bp, Homo sapiens
agttggagttcccct

SEQ ID NO: 1788429 - DNA, 15 bp, Homo sapiens
gttggagttcccctg

SEQ ID NO: 1788430 - DNA, 15 bp, Homo sapiens
ttggagttcccctgg

SEQ ID NO: 1788431 - DNA, 15 bp, Homo sapiens
tggagttcccctgga

SEQ ID NO: 1788432 - DNA, 15 bp, Homo sapiens
ggagttcccctggag

SEQ ID NO: 1788433 - DNA, 15 bp, Homo sapiens
gagttcccctggagt

SEQ ID NO: 1788434 - DNA, 15 bp, Homo sapiens
agttcccctggagtt

SEQ ID NO: 1788435 - DNA, 15 bp, Homo sapiens
gttcccctggagttg

SEQ ID NO: 1788436 - DNA, 15 bp, Homo sapiens
ttcccctggagttgg

SEQ ID NO: 1788437 - DNA, 15 bp, Homo sapiens
tcccctggagttgga

SEQ ID NO: 1788438 - DNA, 15 bp, Homo sapiens
cccctggagttggat

SEQ ID NO: 1788439 - DNA, 15 bp, Homo sapiens
ccctggagttggatg

SEQ ID NO: 1788440 - DNA, 15 bp, Homo sapiens
cctggagttggatgg

SEQ ID NO: 1788441 - DNA, 15 bp, Homo sapiens
ctggagttggatggc

SEQ ID NO: 1788442 - DNA, 15 bp, Homo sapiens
tggagttggatggct

SEQ ID NO: 1788443 - DNA, 15 bp, Homo sapiens
ggagttggatggctc

SEQ ID NO: 1788444 - DNA, 15 bp, Homo sapiens
gagttggatggctct

SEQ ID NO: 1788445 - DNA, 15 bp, Homo sapiens
agttggatggctctg

SEQ ID NO: 1788446 - DNA, 15 bp, Homo sapiens
gttggatggctctgt

SEQ ID NO: 1788447 - DNA, 15 bp, Homo sapiens
ttggatggctctgtg

SEQ ID NO: 1788448 - DNA, 15 bp, Homo sapiens
tggatggctctgtgc

SEQ ID NO: 1788449 - DNA, 15 bp, Homo sapiens
ggatggctctgtgca

SEQ ID NO: 1788450 - DNA, 15 bp, Homo sapiens
gatggctctgtgcag

SEQ ID NO: 1788451 - DNA, 15 bp, Homo sapiens
atggctctgtgcagg

SEQ ID NO: 1788452 - DNA, 15 bp, Homo sapiens
tggctctgtgcaggc

SEQ ID NO: 1788453 - DNA, 15 bp, Homo sapiens
ggctctgtgcaggct

SEQ ID NO: 1788454 - DNA, 15 bp, Homo sapiens
gctctgtgcaggctt

SEQ ID NO: 1788455 - DNA, 15 bp, Homo sapiens
ctctgtgcaggcttg

SEQ ID NO: 1788456 - DNA, 15 bp, Homo sapiens
tctgtgcaggcttgc

SEQ ID NO: 1788457 - DNA, 15 bp, Homo sapiens
ctgtgcaggcttgct

SEQ ID NO: 1788458 - DNA, 15 bp, Homo sapiens
tgtgcaggcttgctt

SEQ ID NO: 1788459 - DNA, 15 bp, Homo sapiens
gtgcaggcttgcttt

SEQ ID NO: 1788460 - DNA, 15 bp, Homo sapiens
tgcaggcttgcttta

SEQ ID NO: 1788461 - DNA, 15 bp, Homo sapiens
gcaggcttgctttag

SEQ ID NO: 1788462 - DNA, 15 bp, Homo sapiens
caggcttgctttaga

SEQ ID NO: 1788463 - DNA, 15 bp, Homo sapiens
aggcttgctttagac

SEQ ID NO: 1788464 - DNA, 15 bp, Homo sapiens
ggcttgctttagact

SEQ ID NO: 1788465 - DNA, 15 bp, Homo sapiens
gcttgctttagacta

SEQ ID NO: 1788466 - DNA, 15 bp, Homo sapiens
cttgctttagactat

SEQ ID NO: 1788467 - DNA, 15 bp, Homo sapiens
ttgctttagactata

SEQ ID NO: 1788468 - DNA, 15 bp, Homo sapiens
tgctttagactatac

SEQ ID NO: 1788469 - DNA, 15 bp, Homo sapiens
gctttagactatact

SEQ ID NO: 1788470 - DNA, 15 bp, Homo sapiens
ctttagactatactc

SEQ ID NO: 1788471 - DNA, 15 bp, Homo sapiens
tttagactatactct

SEQ ID NO: 1788472 - DNA, 15 bp, Homo sapiens
ttagactatactcta

SEQ ID NO: 1788473 - DNA, 15 bp, Homo sapiens
tagactatactctag

SEQ ID NO: 1788474 - DNA, 15 bp, Homo sapiens
agactatactctagt

SEQ ID NO: 1788475 - DNA, 15 bp, Homo sapiens
gactatactctagtg

SEQ ID NO: 1788476 - DNA, 15 bp, Homo sapiens
actatactctagtga

SEQ ID NO: 1788477 - DNA, 15 bp, Homo sapiens
ctatactctagtgag

SEQ ID NO: 1788478 - DNA, 15 bp, Homo sapiens
tatactctagtgaga

SEQ ID NO: 1788479 - DNA, 15 bp, Homo sapiens
atactctagtgagac

SEQ ID NO: 1788480 - DNA, 15 bp, Homo sapiens
tactctagtgagact

SEQ ID NO: 1788481 - DNA, 15 bp, Homo sapiens
actctagtgagactt

SEQ ID NO: 1788482 - DNA, 15 bp, Homo sapiens
ctctagtgagacttt

SEQ ID NO: 1788483 - DNA, 15 bp, Homo sapiens
tctagtgagactttg

SEQ ID NO: 1788484 - DNA, 15 bp, Homo sapiens
ctagtgagactttga

SEQ ID NO: 1788485 - DNA, 15 bp, Homo sapiens
tagtgagactttgaa

SEQ ID NO: 1788486 - DNA, 15 bp, Homo sapiens
agtgagactttgaac

SEQ ID NO: 1788487 - DNA, 15 bp, Homo sapiens
gtgagactttgaacg

SEQ ID NO: 1788488 - DNA, 15 bp, Homo sapiens
tgagactttgaacgt

SEQ ID NO: 1788489 - DNA, 15 bp, Homo sapiens
gagactttgaacgta

SEQ ID NO: 1788490 - DNA, 15 bp, Homo sapiens
agactttgaacgtat

SEQ ID NO: 1788491 - DNA, 15 bp, Homo sapiens
gactttgaacgtata

SEQ ID NO: 1788492 - DNA, 15 bp, Homo sapiens
actttgaacgtatat

SEQ ID NO: 1788493 - DNA, 15 bp, Homo sapiens
ctttgaacgtatatg

SEQ ID NO: 1788494 - DNA, 15 bp, Homo sapiens
tttgaacgtatatgt

SEQ ID NO: 1788495 - DNA, 15 bp, Homo sapiens
ttgaacgtatatgtc

SEQ ID NO: 1788496 - DNA, 15 bp, Homo sapiens
tgaacgtatatgtca

SEQ ID NO: 1788497 - DNA, 15 bp, Homo sapiens
gaacgtatatgtcat

SEQ ID NO: 1788498 - DNA, 15 bp, Homo sapiens
aacgtatatgtcatc

SEQ ID NO: 1788499 - DNA, 15 bp, Homo sapiens
acgtatatgtcatca

SEQ ID NO: 1788500 - DNA, 15 bp, Homo sapiens
cgtatatgtcatcat

SEQ ID NO: 1788501 - DNA, 15 bp, Homo sapiens
gtatatgtcatcatc

SEQ ID NO: 1788502 - DNA, 15 bp, Homo sapiens
tatatgtcatcatct

SEQ ID NO: 1788503 - DNA, 15 bp, Homo sapiens
atatgtcatcatctt

SEQ ID NO: 1788504 - DNA, 15 bp, Homo sapiens
tatgtcatcatcttt

SEQ ID NO: 1788505 - DNA, 15 bp, Homo sapiens
atgtcatcatctttt

SEQ ID NO: 1788506 - DNA, 15 bp, Homo sapiens
tgtcatcatcttttg

SEQ ID NO: 1788507 - DNA, 15 bp, Homo sapiens
gtcatcatcttttgc

SEQ ID NO: 1788508 - DNA, 15 bp, Homo sapiens
tcatcatcttttgcc

SEQ ID NO: 1788509 - DNA, 15 bp, Homo sapiens
catcatcttttgcct

SEQ ID NO: 1788510 - DNA, 15 bp, Homo sapiens
atcatcttttgcctc

SEQ ID NO: 1788511 - DNA, 15 bp, Homo sapiens
tcatcttttgcctcg

SEQ ID NO: 1788512 - DNA, 15 bp, Homo sapiens
catcttttgcctcgc

SEQ ID NO: 1788513 - DNA, 15 bp, Homo sapiens
atcttttgcctcgct

SEQ ID NO: 1788514 - DNA, 15 bp, Homo sapiens
tcttttgcctcgcta

SEQ ID NO: 1788515 - DNA, 15 bp, Homo sapiens
cttttgcctcgctaa

SEQ ID NO: 1788516 - DNA, 15 bp, Homo sapiens
ttttgcctcgctaat

SEQ ID NO: 1788517 - DNA, 15 bp, Homo sapiens
tttgcctcgctaatg

SEQ ID NO: 1788518 - DNA, 15 bp, Homo sapiens
ttgcctcgctaatga

SEQ ID NO: 1788519 - DNA, 15 bp, Homo sapiens
tgcctcgctaatgaa

SEQ ID NO: 1788520 - DNA, 15 bp, Homo sapiens
gcctcgctaatgaag

SEQ ID NO: 1788521 - DNA, 15 bp, Homo sapiens
cctcgctaatgaaga

SEQ ID NO: 1788522 - DNA, 15 bp, Homo sapiens
ctcgctaatgaagat

SEQ ID NO: 1788523 - DNA, 15 bp, Homo sapiens
tcgctaatgaagatt

SEQ ID NO: 1788524 - DNA, 15 bp, Homo sapiens
cgctaatgaagattt

SEQ ID NO: 1788525 - DNA, 15 bp, Homo sapiens
gctaatgaagatttg

SEQ ID NO: 1788526 - DNA, 15 bp, Homo sapiens
ctaatgaagatttga

SEQ ID NO: 1788527 - DNA, 15 bp, Homo sapiens
taatgaagatttgat

SEQ ID NO: 1788528 - DNA, 15 bp, Homo sapiens
aatgaagatttgata

SEQ ID NO: 1788529 - DNA, 15 bp, Homo sapiens
atgaagatttgatag

SEQ ID NO: 1788530 - DNA, 15 bp, Homo sapiens
tgaagatttgataga

SEQ ID NO: 1788531 - DNA, 15 bp, Homo sapiens
gaagatttgatagat

SEQ ID NO: 1788532 - DNA, 15 bp, Homo sapiens
aagatttgatagata

SEQ ID NO: 1788533 - DNA, 15 bp, Homo sapiens
agatttgatagataa

SEQ ID NO: 1788534 - DNA, 15 bp, Homo sapiens
gatttgatagataat

SEQ ID NO: 1788535 - DNA, 15 bp, Homo sapiens
atttgatagataata

SEQ ID NO: 1788536 - DNA, 15 bp, Homo sapiens
tttgatagataatac

SEQ ID NO: 1788537 - DNA, 15 bp, Homo sapiens
ttgatagataatact

SEQ ID NO: 1788538 - DNA, 15 bp, Homo sapiens
tgatagataatactg

SEQ ID NO: 1788539 - DNA, 15 bp, Homo sapiens
gatagataatactgc

SEQ ID NO: 1788540 - DNA, 15 bp, Homo sapiens
atagataatactgct

SEQ ID NO: 1788541 - DNA, 15 bp, Homo sapiens
tagataatactgctt

SEQ ID NO: 1788542 - DNA, 15 bp, Homo sapiens
agataatactgcttg

SEQ ID NO: 1788543 - DNA, 15 bp, Homo sapiens
gataatactgcttga

SEQ ID NO: 1788544 - DNA, 15 bp, Homo sapiens
ataatactgcttgag

SEQ ID NO: 1788545 - DNA, 15 bp, Homo sapiens
taatactgcttgaga

SEQ ID NO: 1788546 - DNA, 15 bp, Homo sapiens
aatactgcttgagat

SEQ ID NO: 1788547 - DNA, 15 bp, Homo sapiens
atactgcttgagata

SEQ ID NO: 1788548 - DNA, 15 bp, Homo sapiens
tactgcttgagataa

SEQ ID NO: 1788549 - DNA, 15 bp, Homo sapiens
actgcttgagataag

SEQ ID NO: 1788550 - DNA, 15 bp, Homo sapiens
ctgcttgagataaga

SEQ ID NO: 1788551 - DNA, 15 bp, Homo sapiens
tgcttgagataagac

SEQ ID NO: 1788552 - DNA, 15 bp, Homo sapiens
gcttgagataagaca

SEQ ID NO: 1788553 - DNA, 15 bp, Homo sapiens
cttgagataagacac

SEQ ID NO: 1788554 - DNA, 15 bp, Homo sapiens
ttgagataagacacc

SEQ ID NO: 1788555 - DNA, 15 bp, Homo sapiens
tgagataagacacca

SEQ ID NO: 1788556 - DNA, 15 bp, Homo sapiens
gagataagacaccaa

SEQ ID NO: 1788557 - DNA, 15 bp, Homo sapiens
agataagacaccaat

SEQ ID NO: 1788558 - DNA, 15 bp, Homo sapiens
gataagacaccaatg

SEQ ID NO: 1788559 - DNA, 15 bp, Homo sapiens
ataagacaccaatga

SEQ ID NO: 1788560 - DNA, 15 bp, Homo sapiens
taagacaccaatgaa

SEQ ID NO: 1788561 - DNA, 15 bp, Homo sapiens
aagacaccaatgaaa

SEQ ID NO: 1788562 - DNA, 15 bp, Homo sapiens
agacaccaatgaaat

SEQ ID NO: 1788563 - DNA, 15 bp, Homo sapiens
gacaccaatgaaatt

SEQ ID NO: 1788564 - DNA, 15 bp, Homo sapiens
acaccaatgaaattg

SEQ ID NO: 1788565 - DNA, 15 bp, Homo sapiens
caccaatgaaattgt

SEQ ID NO: 1788566 - DNA, 15 bp, Homo sapiens
accaatgaaattgtc

SEQ ID NO: 1788567 - DNA, 15 bp, Homo sapiens
ccaatgaaattgtca

SEQ ID NO: 1788568 - DNA, 15 bp, Homo sapiens
caatgaaattgtcat

SEQ ID NO: 1788569 - DNA, 15 bp, Homo sapiens
aatgaaattgtcatt

SEQ ID NO: 1788570 - DNA, 15 bp, Homo sapiens
atgaaattgtcattt

SEQ ID NO: 1788571 - DNA, 15 bp, Homo sapiens
tgaaattgtcatttt

SEQ ID NO: 1788572 - DNA, 15 bp, Homo sapiens
gaaattgtcatttta

SEQ ID NO: 1788573 - DNA, 15 bp, Homo sapiens
aaattgtcattttat

SEQ ID NO: 1788574 - DNA, 15 bp, Homo sapiens
aattgtcattttatg

SEQ ID NO: 1788575 - DNA, 15 bp, Homo sapiens
attgtcattttatgc

SEQ ID NO: 1788576 - DNA, 15 bp, Homo sapiens
ttgtcattttatgca

SEQ ID NO: 1788577 - DNA, 15 bp, Homo sapiens
tgtcattttatgcaa

SEQ ID NO: 1788578 - DNA, 15 bp, Homo sapiens
gtcattttatgcaat

SEQ ID NO: 1788579 - DNA, 15 bp, Homo sapiens
tcattttatgcaata

SEQ ID NO: 1788580 - DNA, 15 bp, Homo sapiens
cattttatgcaatac

SEQ ID NO: 1788581 - DNA, 15 bp, Homo sapiens
attttatgcaatact

SEQ ID NO: 1788582 - DNA, 15 bp, Homo sapiens
ttttatgcaatacta

SEQ ID NO: 1788583 - DNA, 15 bp, Homo sapiens
tttatgcaatactat

SEQ ID NO: 1788584 - DNA, 15 bp, Homo sapiens
ttatgcaatactatg

SEQ ID NO: 1788585 - DNA, 15 bp, Homo sapiens
tatgcaatactatgg

SEQ ID NO: 1788586 - DNA, 15 bp, Homo sapiens
atgcaatactatgga

SEQ ID NO: 1788587 - DNA, 15 bp, Homo sapiens
tgcaatactatggag

SEQ ID NO: 1788588 - DNA, 15 bp, Homo sapiens
gcaatactatggagt

SEQ ID NO: 1788589 - DNA, 15 bp, Homo sapiens
caatactatggagta

SEQ ID NO: 1788590 - DNA, 15 bp, Homo sapiens
aatactatggagtaa

SEQ ID NO: 1788591 - DNA, 15 bp, Homo sapiens
atactatggagtaat

SEQ ID NO: 1788592 - DNA, 15 bp, Homo sapiens
tactatggagtaatt

SEQ ID NO: 1788593 - DNA, 15 bp, Homo sapiens
actatggagtaattc

SEQ ID NO: 1788594 - DNA, 15 bp, Homo sapiens
ctatggagtaattca

SEQ ID NO: 1788595 - DNA, 15 bp, Homo sapiens
tatggagtaattcat

SEQ ID NO: 1788596 - DNA, 15 bp, Homo sapiens
atggagtaattcata

SEQ ID NO: 1788597 - DNA, 15 bp, Homo sapiens
tggagtaattcataa

SEQ ID NO: 1788598 - DNA, 15 bp, Homo sapiens
ggagtaattcataaa

SEQ ID NO: 1788599 - DNA, 15 bp, Homo sapiens
gagtaattcataaaa

SEQ ID NO: 1788600 - DNA, 15 bp, Homo sapiens
agtaattcataaaat

SEQ ID NO: 1788601 - DNA, 15 bp, Homo sapiens
gtaattcataaaatt

SEQ ID NO: 1788602 - DNA, 15 bp, Homo sapiens
taattcataaaatta

SEQ ID NO: 1788603 - DNA, 15 bp, Homo sapiens
aattcataaaattat

SEQ ID NO: 1788604 - DNA, 15 bp, Homo sapiens
attcataaaattatt

SEQ ID NO: 1788605 - DNA, 15 bp, Homo sapiens
ttcataaaattattt

SEQ ID NO: 1788606 - DNA, 15 bp, Homo sapiens
tcataaaattatttt

SEQ ID NO: 1788607 - DNA, 15 bp, Homo sapiens
cataaaattatttta

SEQ ID NO: 1788608 - DNA, 15 bp, Homo sapiens
ataaaattattttac

SEQ ID NO: 1788609 - DNA, 15 bp, Homo sapiens
taaaattattttact

SEQ ID NO: 1788610 - DNA, 15 bp, Homo sapiens
aaaattattttactc

SEQ ID NO: 1788611 - DNA, 15 bp, Homo sapiens
aaattattttactcc

SEQ ID NO: 1788612 - DNA, 15 bp, Homo sapiens
aattattttactcct

SEQ ID NO: 1788613 - DNA, 15 bp, Homo sapiens
attattttactcctt

SEQ ID NO: 1788614 - DNA, 15 bp, Homo sapiens
ttattttactccttt

SEQ ID NO: 1788615 - DNA, 15 bp, Homo sapiens
tattttactccttta

SEQ ID NO: 1788616 - DNA, 15 bp, Homo sapiens
attttactcctttat

SEQ ID NO: 1788617 - DNA, 15 bp, Homo sapiens
ttttactcctttatt

SEQ ID NO: 1788618 - DNA, 15 bp, Homo sapiens
tttactcctttattc

SEQ ID NO: 1788619 - DNA, 15 bp, Homo sapiens
ttactcctttattca

SEQ ID NO: 1788620 - DNA, 15 bp, Homo sapiens
tactcctttattcaa

SEQ ID NO: 1788621 - DNA, 15 bp, Homo sapiens
actcctttattcaac

SEQ ID NO: 1788622 - DNA, 15 bp, Homo sapiens
ctcctttattcaaca

SEQ ID NO: 1788623 - DNA, 15 bp, Homo sapiens
tcctttattcaacaa

SEQ ID NO: 1788624 - DNA, 15 bp, Homo sapiens
cctttattcaacaaa

SEQ ID NO: 1788625 - DNA, 15 bp, Homo sapiens
ctttattcaacaaat

SEQ ID NO: 1788626 - DNA, 15 bp, Homo sapiens
tttattcaacaaata

SEQ ID NO: 1788627 - DNA, 15 bp, Homo sapiens
ttcaacaaatattta

SEQ ID NO: 1788628 - DNA, 15 bp, Homo sapiens
tcaacaaatatttat

SEQ ID NO: 1788629 - DNA, 15 bp, Homo sapiens
caacaaatatttatt

SEQ ID NO: 1788630 - DNA, 15 bp, Homo sapiens
aacaaatatttatta

SEQ ID NO: 1788631 - DNA, 15 bp, Homo sapiens
acaaatatttattaa

SEQ ID NO: 1788632 - DNA, 15 bp, Homo sapiens
caaatatttattaag

SEQ ID NO: 1788633 - DNA, 15 bp, Homo sapiens
aaatatttattaagc

SEQ ID NO: 1788634 - DNA, 15 bp, Homo sapiens
aatatttattaagca

SEQ ID NO: 1788635 - DNA, 15 bp, Homo sapiens
atatttattaagcac

SEQ ID NO: 1788636 - DNA, 15 bp, Homo sapiens
tatttattaagcacc

SEQ ID NO: 1788637 - DNA, 15 bp, Homo sapiens
atttattaagcaccc

SEQ ID NO: 1788638 - DNA, 15 bp, Homo sapiens
tttattaagcaccca

SEQ ID NO: 1788639 - DNA, 15 bp, Homo sapiens
ttattaagcacccac

SEQ ID NO: 1788640 - DNA, 15 bp, Homo sapiens
tattaagcacccact

SEQ ID NO: 1788641 - DNA, 15 bp, Homo sapiens
attaagcacccacta

SEQ ID NO: 1788642 - DNA, 15 bp, Homo sapiens
ttaagcacccactac

SEQ ID NO: 1788643 - DNA, 15 bp, Homo sapiens
taagcacccactacg

SEQ ID NO: 1788644 - DNA, 15 bp, Homo sapiens
aagcacccactacgt

SEQ ID NO: 1788645 - DNA, 15 bp, Homo sapiens
agcacccactacgtg

SEQ ID NO: 1788646 - DNA, 15 bp, Homo sapiens
gcacccactacgtga

SEQ ID NO: 1788647 - DNA, 15 bp, Homo sapiens
cacccactacgtgac

SEQ ID NO: 1788648 - DNA, 15 bp, Homo sapiens
acccactacgtgacc

SEQ ID NO: 1788649 - DNA, 15 bp, Homo sapiens
cccactacgtgaccg

SEQ ID NO: 1788650 - DNA, 15 bp, Homo sapiens
ccactacgtgaccga

SEQ ID NO: 1788651 - DNA, 15 bp, Homo sapiens
cactacgtgaccgac

SEQ ID NO: 1788652 - DNA, 15 bp, Homo sapiens
actacgtgaccgacc

SEQ ID NO: 1788653 - DNA, 15 bp, Homo sapiens
ctacgtgaccgaccc

SEQ ID NO: 1788654 - DNA, 15 bp, Homo sapiens
tacgtgaccgaccct

SEQ ID NO: 1788655 - DNA, 15 bp, Homo sapiens
acgtgaccgaccctg

SEQ ID NO: 1788656 - DNA, 15 bp, Homo sapiens
cgtgaccgaccctgt

SEQ ID NO: 1788657 - DNA, 15 bp, Homo sapiens
gtgaccgaccctgtt

SEQ ID NO: 1788658 - DNA, 15 bp, Homo sapiens
tgaccgaccctgttc

SEQ ID NO: 1788659 - DNA, 15 bp, Homo sapiens
gaccgaccctgttct

SEQ ID NO: 1788660 - DNA, 15 bp, Homo sapiens
accgaccctgttcta

SEQ ID NO: 1788661 - DNA, 15 bp, Homo sapiens
ccgaccctgttctag

SEQ ID NO: 1788662 - DNA, 15 bp, Homo sapiens
cgaccctgttctagg

SEQ ID NO: 1788663 - DNA, 15 bp, Homo sapiens
ccctgttctaggtga

SEQ ID NO: 1788664 - DNA, 15 bp, Homo sapiens
cctgttctaggtgat

SEQ ID NO: 1788665 - DNA, 15 bp, Homo sapiens
ctgttctaggtgata

SEQ ID NO: 1788666 - DNA, 15 bp, Homo sapiens
tgttctaggtgataa

SEQ ID NO: 1788667 - DNA, 15 bp, Homo sapiens
gttctaggtgataag

SEQ ID NO: 1788668 - DNA, 15 bp, Homo sapiens
ttctaggtgataagg

SEQ ID NO: 1788669 - DNA, 15 bp, Homo sapiens
tctaggtgataagga

SEQ ID NO: 1788670 - DNA, 15 bp, Homo sapiens
ctaggtgataaggat

SEQ ID NO: 1788671 - DNA, 15 bp, Homo sapiens
taggtgataaggata

SEQ ID NO: 1788672 - DNA, 15 bp, Homo sapiens
aggtgataaggatac

SEQ ID NO: 1788673 - DNA, 15 bp, Homo sapiens
ggtgataaggataca

SEQ ID NO: 1788674 - DNA, 15 bp, Homo sapiens
gtgataaggatacag

SEQ ID NO: 1788675 - DNA, 15 bp, Homo sapiens
tgataaggatacagt

SEQ ID NO: 1788676 - DNA, 15 bp, Homo sapiens
gataaggatacagta

SEQ ID NO: 1788677 - DNA, 15 bp, Homo sapiens
ataaggatacagtag

SEQ ID NO: 1788678 - DNA, 15 bp, Homo sapiens
taaggatacagtaga

SEQ ID NO: 1788679 - DNA, 15 bp, Homo sapiens
aaggatacagtagaa

SEQ ID NO: 1788680 - DNA, 15 bp, Homo sapiens
aggatacagtagaat

SEQ ID NO: 1788681 - DNA, 15 bp, Homo sapiens
ggatacagtagaata

SEQ ID NO: 1788682 - DNA, 15 bp, Homo sapiens
gatacagtagaatac

SEQ ID NO: 1788683 - DNA, 15 bp, Homo sapiens
atacagtagaataca

SEQ ID NO: 1788684 - DNA, 15 bp, Homo sapiens
tacagtagaatacag

SEQ ID NO: 1788685 - DNA, 15 bp, Homo sapiens
acagtagaatacagt

SEQ ID NO: 1788686 - DNA, 15 bp, Homo sapiens
cagtagaatacagtc

SEQ ID NO: 1788687 - DNA, 15 bp, Homo sapiens
agtagaatacagtcc

SEQ ID NO: 1788688 - DNA, 15 bp, Homo sapiens
gtagaatacagtccc

SEQ ID NO: 1788689 - DNA, 15 bp, Homo sapiens
tagaatacagtccct

SEQ ID NO: 1788690 - DNA, 15 bp, Homo sapiens
agaatacagtccctg

SEQ ID NO: 1788691 - DNA, 15 bp, Homo sapiens
gaatacagtccctgc

SEQ ID NO: 1788692 - DNA, 15 bp, Homo sapiens
aatacagtccctgcc

SEQ ID NO: 1788693 - DNA, 15 bp, Homo sapiens
atacagtccctgccc

SEQ ID NO: 1788694 - DNA, 15 bp, Homo sapiens
tacagtccctgccct

SEQ ID NO: 1788695 - DNA, 15 bp, Homo sapiens
acagtccctgccctt

SEQ ID NO: 1788696 - DNA, 15 bp, Homo sapiens
cagtccctgcccttg

SEQ ID NO: 1788697 - DNA, 15 bp, Homo sapiens
agtccctgcccttgt

SEQ ID NO: 1788698 - DNA, 15 bp, Homo sapiens
gtccctgcccttgta

SEQ ID NO: 1788699 - DNA, 15 bp, Homo sapiens
tccctgcccttgtag

SEQ ID NO: 1788700 - DNA, 15 bp, Homo sapiens
ccctgcccttgtaga

SEQ ID NO: 1788701 - DNA, 15 bp, Homo sapiens
cctgcccttgtagaa

SEQ ID NO: 1788702 - DNA, 15 bp, Homo sapiens
ctgcccttgtagaac

SEQ ID NO: 1788703 - DNA, 15 bp, Homo sapiens
tgcccttgtagaact

SEQ ID NO: 1788704 - DNA, 15 bp, Homo sapiens
gcccttgtagaactt

SEQ ID NO: 1788705 - DNA, 15 bp, Homo sapiens
cccttgtagaacttg

SEQ ID NO: 1788706 - DNA, 15 bp, Homo sapiens
ccttgtagaacttgc

SEQ ID NO: 1788707 - DNA, 15 bp, Homo sapiens
cttgtagaacttgca

SEQ ID NO: 1788708 - DNA, 15 bp, Homo sapiens
ttgtagaacttgcag

SEQ ID NO: 1788709 - DNA, 15 bp, Homo sapiens
tgtagaacttgcagc

SEQ ID NO: 1788710 - DNA, 15 bp, Homo sapiens
gtagaacttgcagcc

SEQ ID NO: 1788711 - DNA, 15 bp, Homo sapiens
tagaacttgcagccc

SEQ ID NO: 1788712 - DNA, 15 bp, Homo sapiens
agaacttgcagccca

SEQ ID NO: 1788713 - DNA, 15 bp, Homo sapiens
gaacttgcagcccac

SEQ ID NO: 1788714 - DNA, 15 bp, Homo sapiens
aacttgcagcccact

SEQ ID NO: 1788715 - DNA, 15 bp, Homo sapiens
acttgcagcccactg

SEQ ID NO: 1788716 - DNA, 15 bp, Homo sapiens
cttgcagcccactgt

SEQ ID NO: 1788717 - DNA, 15 bp, Homo sapiens
ttgcagcccactgtg

SEQ ID NO: 1788718 - DNA, 15 bp, Homo sapiens
tgcagcccactgtgg

SEQ ID NO: 1788719 - DNA, 15 bp, Homo sapiens
gcagcccactgtgga

SEQ ID NO: 1788720 - DNA, 15 bp, Homo sapiens
cagcccactgtggat

SEQ ID NO: 1788721 - DNA, 15 bp, Homo sapiens
agcccactgtggatt

SEQ ID NO: 1788722 - DNA, 15 bp, Homo sapiens
gcccactgtggattc

SEQ ID NO: 1788723 - DNA, 15 bp, Homo sapiens
cccactgtggattca

SEQ ID NO: 1788724 - DNA, 15 bp, Homo sapiens
ccactgtggattcat

SEQ ID NO: 1788725 - DNA, 15 bp, Homo sapiens
cactgtggattcatt

SEQ ID NO: 1788726 - DNA, 15 bp, Homo sapiens
actgtggattcattt

SEQ ID NO: 1788727 - DNA, 15 bp, Homo sapiens
ctgtggattcatttc

SEQ ID NO: 1788728 - DNA, 15 bp, Homo sapiens
tgtggattcatttca

SEQ ID NO: 1788729 - DNA, 15 bp, Homo sapiens
gtggattcatttcag

SEQ ID NO: 1788730 - DNA, 15 bp, Homo sapiens
tggattcatttcagt

SEQ ID NO: 1788731 - DNA, 15 bp, Homo sapiens
ggattcatttcagta

SEQ ID NO: 1788732 - DNA, 15 bp, Homo sapiens
gattcatttcagtat

SEQ ID NO: 1788733 - DNA, 15 bp, Homo sapiens
attcatttcagtata

SEQ ID NO: 1788734 - DNA, 15 bp, Homo sapiens
ttcatttcagtataa

SEQ ID NO: 1788735 - DNA, 15 bp, Homo sapiens
tcatttcagtataaa

SEQ ID NO: 1788736 - DNA, 15 bp, Homo sapiens
catttcagtataaag

SEQ ID NO: 1788737 - DNA, 15 bp, Homo sapiens
atttcagtataaagt

SEQ ID NO: 1788738 - DNA, 15 bp, Homo sapiens
tttcagtataaagtg

SEQ ID NO: 1788739 - DNA, 15 bp, Homo sapiens
ttcagtataaagtgt

SEQ ID NO: 1788740 - DNA, 15 bp, Homo sapiens
tcagtataaagtgta

SEQ ID NO: 1788741 - DNA, 15 bp, Homo sapiens
cagtataaagtgtag

SEQ ID NO: 1788742 - DNA, 15 bp, Homo sapiens
agtataaagtgtagg

SEQ ID NO: 1788743 - DNA, 15 bp, Homo sapiens
gtataaagtgtaggc

SEQ ID NO: 1788744 - DNA, 15 bp, Homo sapiens
tataaagtgtaggca

SEQ ID NO: 1788745 - DNA, 15 bp, Homo sapiens
ataaagtgtaggcat

SEQ ID NO: 1788746 - DNA, 15 bp, Homo sapiens
taaagtgtaggcatt

SEQ ID NO: 1788747 - DNA, 15 bp, Homo sapiens
aaagtgtaggcattg

SEQ ID NO: 1788748 - DNA, 15 bp, Homo sapiens
aagtgtaggcattgt

SEQ ID NO: 1788749 - DNA, 15 bp, Homo sapiens
agtgtaggcattgtc

SEQ ID NO: 1788750 - DNA, 15 bp, Homo sapiens
gtgtaggcattgtcc

SEQ ID NO: 1788751 - DNA, 15 bp, Homo sapiens
tgtaggcattgtccc

SEQ ID NO: 1788752 - DNA, 15 bp, Homo sapiens
gtaggcattgtccca

SEQ ID NO: 1788753 - DNA, 15 bp, Homo sapiens
taggcattgtcccaa

SEQ ID NO: 1788754 - DNA, 15 bp, Homo sapiens
aggcattgtcccaaa

SEQ ID NO: 1788755 - DNA, 15 bp, Homo sapiens
ggcattgtcccaaag

SEQ ID NO: 1788756 - DNA, 15 bp, Homo sapiens
gcattgtcccaaagc

SEQ ID NO: 1788757 - DNA, 15 bp, Homo sapiens
cattgtcccaaagcc

SEQ ID NO: 1788758 - DNA, 15 bp, Homo sapiens
attgtcccaaagccg

SEQ ID NO: 1788759 - DNA, 15 bp, Homo sapiens
ttgtcccaaagccgt

SEQ ID NO: 1788760 - DNA, 15 bp, Homo sapiens
tgtcccaaagccgta

SEQ ID NO: 1788761 - DNA, 15 bp, Homo sapiens
gtcccaaagccgtaa

SEQ ID NO: 1788762 - DNA, 15 bp, Homo sapiens
tcccaaagccgtaat

SEQ ID NO: 1788763 - DNA, 15 bp, Homo sapiens
cccaaagccgtaatt

SEQ ID NO: 1788764 - DNA, 15 bp, Homo sapiens
ccaaagccgtaatta

SEQ ID NO: 1788765 - DNA, 15 bp, Homo sapiens
caaagccgtaattag

SEQ ID NO: 1788766 - DNA, 15 bp, Homo sapiens
aaagccgtaattagg

SEQ ID NO: 1788767 - DNA, 15 bp, Homo sapiens
aagccgtaattaggc

SEQ ID NO: 1788768 - DNA, 15 bp, Homo sapiens
agccgtaattaggca

SEQ ID NO: 1788769 - DNA, 15 bp, Homo sapiens
gccgtaattaggcat

SEQ ID NO: 1788770 - DNA, 15 bp, Homo sapiens
ccgtaattaggcatc

SEQ ID NO: 1788771 - DNA, 15 bp, Homo sapiens
cgtaattaggcatct

SEQ ID NO: 1788772 - DNA, 15 bp, Homo sapiens
gtaattaggcatctc

SEQ ID NO: 1788773 - DNA, 15 bp, Homo sapiens
taattaggcatctca

SEQ ID NO: 1788774 - DNA, 15 bp, Homo sapiens
aattaggcatctcat

SEQ ID NO: 1788775 - DNA, 15 bp, Homo sapiens
attaggcatctcatc

SEQ ID NO: 1788776 - DNA, 15 bp, Homo sapiens
ttaggcatctcatca

SEQ ID NO: 1788777 - DNA, 15 bp, Homo sapiens
taggcatctcatcag

SEQ ID NO: 1788778 - DNA, 15 bp, Homo sapiens
aggcatctcatcaga

SEQ ID NO: 1788779 - DNA, 15 bp, Homo sapiens
ggcatctcatcagaa

SEQ ID NO: 1788780 - DNA, 15 bp, Homo sapiens
gcatctcatcagaaa

SEQ ID NO: 1788781 - DNA, 15 bp, Homo sapiens
catctcatcagaaat

SEQ ID NO: 1788782 - DNA, 15 bp, Homo sapiens
atctcatcagaaatc

SEQ ID NO: 1788783 - DNA, 15 bp, Homo sapiens
tctcatcagaaatca

SEQ ID NO: 1788784 - DNA, 15 bp, Homo sapiens
ctcatcagaaatcag

SEQ ID NO: 1788785 - DNA, 15 bp, Homo sapiens
tcatcagaaatcagc

SEQ ID NO: 1788786 - DNA, 15 bp, Homo sapiens
catcagaaatcagcc

SEQ ID NO: 1788787 - DNA, 15 bp, Homo sapiens
atcagaaatcagccc

SEQ ID NO: 1788788 - DNA, 15 bp, Homo sapiens
tcagaaatcagccca

SEQ ID NO: 1788789 - DNA, 15 bp, Homo sapiens
cagaaatcagcccac

SEQ ID NO: 1788790 - DNA, 15 bp, Homo sapiens
agaaatcagcccact

SEQ ID NO: 1788791 - DNA, 15 bp, Homo sapiens
gaaatcagcccactc

SEQ ID NO: 1788792 - DNA, 15 bp, Homo sapiens
aaatcagcccactcc

SEQ ID NO: 1788793 - DNA, 15 bp, Homo sapiens
aatcagcccactccc

SEQ ID NO: 1788794 - DNA, 15 bp, Homo sapiens
atcagcccactcccc

SEQ ID NO: 1788795 - DNA, 15 bp, Homo sapiens
tcagcccactccccc

SEQ ID NO: 1788796 - DNA, 15 bp, Homo sapiens
cagcccactccccca

SEQ ID NO: 1788797 - DNA, 15 bp, Homo sapiens
agcccactcccccac

SEQ ID NO: 1788798 - DNA, 15 bp, Homo sapiens
gcccactcccccacc

SEQ ID NO: 1788799 - DNA, 15 bp, Homo sapiens
cccactcccccaccc

SEQ ID NO: 1788800 - DNA, 15 bp, Homo sapiens
ccactcccccacccc

SEQ ID NO: 1788801 - DNA, 15 bp, Homo sapiens
cactcccccacccca

SEQ ID NO: 1788802 - DNA, 15 bp, Homo sapiens
actcccccaccccaa

SEQ ID NO: 1788803 - DNA, 15 bp, Homo sapiens
ctcccccaccccaat

SEQ ID NO: 1788804 - DNA, 15 bp, Homo sapiens
tcccccaccccaatc

SEQ ID NO: 1788805 - DNA, 15 bp, Homo sapiens
cccccaccccaatca

SEQ ID NO: 1788806 - DNA, 15 bp, Homo sapiens
ccccaccccaatcaa

SEQ ID NO: 1788807 - DNA, 15 bp, Homo sapiens
cccaccccaatcaag

SEQ ID NO: 1788808 - DNA, 15 bp, Homo sapiens
ccaccccaatcaaga

SEQ ID NO: 1788809 - DNA, 15 bp, Homo sapiens
caccccaatcaagag

SEQ ID NO: 1788810 - DNA, 15 bp, Homo sapiens
accccaatcaagagc

SEQ ID NO: 1788811 - DNA, 15 bp, Homo sapiens
ccccaatcaagagcc

SEQ ID NO: 1788812 - DNA, 15 bp, Homo sapiens
cccaatcaagagccc

SEQ ID NO: 1788813 - DNA, 15 bp, Homo sapiens
ccaatcaagagcccc

SEQ ID NO: 1788814 - DNA, 15 bp, Homo sapiens
caatcaagagcccct

SEQ ID NO: 1788815 - DNA, 15 bp, Homo sapiens
aatcaagagcccctc

SEQ ID NO: 1788816 - DNA, 15 bp, Homo sapiens
atcaagagcccctcc

SEQ ID NO: 1788817 - DNA, 15 bp, Homo sapiens
tcaagagcccctcct

SEQ ID NO: 1788818 - DNA, 15 bp, Homo sapiens
caagagcccctcctg

SEQ ID NO: 1788819 - DNA, 15 bp, Homo sapiens
aagagcccctcctgc

SEQ ID NO: 1788820 - DNA, 15 bp, Homo sapiens
agagcccctcctgct

SEQ ID NO: 1788821 - DNA, 15 bp, Homo sapiens
gagcccctcctgctg

SEQ ID NO: 1788822 - DNA, 15 bp, Homo sapiens
agcccctcctgctgt

SEQ ID NO: 1788823 - DNA, 15 bp, Homo sapiens
gcccctcctgctgtc

SEQ ID NO: 1788824 - DNA, 15 bp, Homo sapiens
cccctcctgctgtcc

SEQ ID NO: 1788825 - DNA, 15 bp, Homo sapiens
ccctcctgctgtcct

SEQ ID NO: 1788826 - DNA, 15 bp, Homo sapiens
cctcctgctgtcctg

SEQ ID NO: 1788827 - DNA, 15 bp, Homo sapiens
ctcctgctgtcctgc

SEQ ID NO: 1788828 - DNA, 15 bp, Homo sapiens
tcctgctgtcctgct

SEQ ID NO: 1788829 - DNA, 15 bp, Homo sapiens
cctgctgtcctgctg

SEQ ID NO: 1788830 - DNA, 15 bp, Homo sapiens
ctgctgtcctgctgt

SEQ ID NO: 1788831 - DNA, 15 bp, Homo sapiens
tgctgtcctgctgta

SEQ ID NO: 1788832 - DNA, 15 bp, Homo sapiens
gctgtcctgctgtat

SEQ ID NO: 1788833 - DNA, 15 bp, Homo sapiens
ctgtcctgctgtatg

SEQ ID NO: 1788834 - DNA, 15 bp, Homo sapiens
tgtcctgctgtatgt

SEQ ID NO: 1788835 - DNA, 15 bp, Homo sapiens
gtcctgctgtatgtg

SEQ ID NO: 1788836 - DNA, 15 bp, Homo sapiens
tcctgctgtatgtgc

SEQ ID NO: 1788837 - DNA, 15 bp, Homo sapiens
cctgctgtatgtgca

SEQ ID NO: 1788838 - DNA, 15 bp, Homo sapiens
ctgctgtatgtgcat

SEQ ID NO: 1788839 - DNA, 15 bp, Homo sapiens
tgctgtatgtgcatg

SEQ ID NO: 1788840 - DNA, 15 bp, Homo sapiens
gctgtatgtgcatga

SEQ ID NO: 1788841 - DNA, 15 bp, Homo sapiens
ctgtatgtgcatgaa

SEQ ID NO: 1788842 - DNA, 15 bp, Homo sapiens
tgtatgtgcatgaaa

SEQ ID NO: 1788843 - DNA, 15 bp, Homo sapiens
gtatgtgcatgaaac

SEQ ID NO: 1788844 - DNA, 15 bp, Homo sapiens
atgtgcatgaaacac

SEQ ID NO: 1788845 - DNA, 15 bp, Homo sapiens
tgtgcatgaaacaca

SEQ ID NO: 1788846 - DNA, 15 bp, Homo sapiens
gtgcatgaaacacaa

SEQ ID NO: 1788847 - DNA, 15 bp, Homo sapiens
tgcatgaaacacaac

SEQ ID NO: 1788848 - DNA, 15 bp, Homo sapiens
gcatgaaacacaaca

SEQ ID NO: 1788849 - DNA, 15 bp, Homo sapiens
catgaaacacaacat

SEQ ID NO: 1788850 - DNA, 15 bp, Homo sapiens
atgaaacacaacatt

SEQ ID NO: 1788851 - DNA, 15 bp, Homo sapiens
tgaaacacaacattg

SEQ ID NO: 1788852 - DNA, 15 bp, Homo sapiens
gaaacacaacattgg

SEQ ID NO: 1788853 - DNA, 15 bp, Homo sapiens
aaacacaacattggc

SEQ ID NO: 1788854 - DNA, 15 bp, Homo sapiens
aacacaacattggcc

SEQ ID NO: 1788855 - DNA, 15 bp, Homo sapiens
acacaacattggcct

SEQ ID NO: 1788856 - DNA, 15 bp, Homo sapiens
cacaacattggcctt

SEQ ID NO: 1788857 - DNA, 15 bp, Homo sapiens
acaacattggccttt

SEQ ID NO: 1788858 - DNA, 15 bp, Homo sapiens
caacattggcctttg

SEQ ID NO: 1788859 - DNA, 15 bp, Homo sapiens
aacattggcctttgg

SEQ ID NO: 1788860 - DNA, 15 bp, Homo sapiens
acattggcctttggg

SEQ ID NO: 1788861 - DNA, 15 bp, Homo sapiens
cattggcctttgggg

SEQ ID NO: 1788862 - DNA, 15 bp, Homo sapiens
attggcctttggggt

SEQ ID NO: 1788863 - DNA, 15 bp, Homo sapiens
ttggcctttggggtg

SEQ ID NO: 1788864 - DNA, 15 bp, Homo sapiens
tggcctttggggtgc

SEQ ID NO: 1788865 - DNA, 15 bp, Homo sapiens
ggcctttggggtgca

SEQ ID NO: 1788866 - DNA, 15 bp, Homo sapiens
gcctttggggtgcac

SEQ ID NO: 1788867 - DNA, 15 bp, Homo sapiens
cctttggggtgcact

SEQ ID NO: 1788868 - DNA, 15 bp, Homo sapiens
ctttggggtgcactt

SEQ ID NO: 1788869 - DNA, 15 bp, Homo sapiens
tttggggtgcacttc

SEQ ID NO: 1788870 - DNA, 15 bp, Homo sapiens
ttggggtgcacttct

SEQ ID NO: 1788871 - DNA, 15 bp, Homo sapiens
tggggtgcacttctg

SEQ ID NO: 1788872 - DNA, 15 bp, Homo sapiens
ggggtgcacttctga

SEQ ID NO: 1788873 - DNA, 15 bp, Homo sapiens
gggtgcacttctgag

SEQ ID NO: 1788874 - DNA, 15 bp, Homo sapiens
ggtgcacttctgagc

SEQ ID NO: 1788875 - DNA, 15 bp, Homo sapiens
gtgcacttctgagca

SEQ ID NO: 1788876 - DNA, 15 bp, Homo sapiens
tgcacttctgagcat

SEQ ID NO: 1788877 - DNA, 15 bp, Homo sapiens
gcacttctgagcatt

SEQ ID NO: 1788878 - DNA, 15 bp, Homo sapiens
cacttctgagcattg

SEQ ID NO: 1788879 - DNA, 15 bp, Homo sapiens
acttctgagcattgg

SEQ ID NO: 1788880 - DNA, 15 bp, Homo sapiens
cttctgagcattggc

SEQ ID NO: 1788881 - DNA, 15 bp, Homo sapiens
ttctgagcattggcc

SEQ ID NO: 1788882 - DNA, 15 bp, Homo sapiens
tctgagcattggcct

SEQ ID NO: 1788883 - DNA, 15 bp, Homo sapiens
ctgagcattggcctt

SEQ ID NO: 1788884 - DNA, 15 bp, Homo sapiens
tgagcattggccttt

SEQ ID NO: 1788885 - DNA, 15 bp, Homo sapiens
gagcattggcctttg

SEQ ID NO: 1788886 - DNA, 15 bp, Homo sapiens
agcattggcctttgg

SEQ ID NO: 1788887 - DNA, 15 bp, Homo sapiens
gcattggcctttggg

SEQ ID NO: 1788888 - DNA, 15 bp, Homo sapiens
ggtgcacttctgaga

SEQ ID NO: 1788889 - DNA, 15 bp, Homo sapiens
gtgcacttctgagat

SEQ ID NO: 1788890 - DNA, 15 bp, Homo sapiens
tgcacttctgagatg

SEQ ID NO: 1788891 - DNA, 15 bp, Homo sapiens
gcacttctgagatgg

SEQ ID NO: 1788892 - DNA, 15 bp, Homo sapiens
cacttctgagatggg

SEQ ID NO: 1788893 - DNA, 15 bp, Homo sapiens
acttctgagatgggg

SEQ ID NO: 1788894 - DNA, 15 bp, Homo sapiens
cttctgagatggggg

SEQ ID NO: 1788895 - DNA, 15 bp, Homo sapiens
ttctgagatgggggg

SEQ ID NO: 1788896 - DNA, 15 bp, Homo sapiens
tctgagatggggggt

SEQ ID NO: 1788897 - DNA, 15 bp, Homo sapiens
ctgagatggggggtt

SEQ ID NO: 1788898 - DNA, 15 bp, Homo sapiens
tgagatggggggttc

SEQ ID NO: 1788899 - DNA, 15 bp, Homo sapiens
gagatggggggttcc

SEQ ID NO: 1788900 - DNA, 15 bp, Homo sapiens
agatggggggttcca

SEQ ID NO: 1788901 - DNA, 15 bp, Homo sapiens
gatggggggttccat

SEQ ID NO: 1788902 - DNA, 15 bp, Homo sapiens
atggggggttccatt

SEQ ID NO: 1788903 - DNA, 15 bp, Homo sapiens
tggggggttccattt

SEQ ID NO: 1788904 - DNA, 15 bp, Homo sapiens
ggggggttccatttc

SEQ ID NO: 1788905 - DNA, 15 bp, Homo sapiens
gggggttccatttct

SEQ ID NO: 1788906 - DNA, 15 bp, Homo sapiens
ggggttccatttctt

SEQ ID NO: 1788907 - DNA, 15 bp, Homo sapiens
gggttccatttcttg

SEQ ID NO: 1788908 - DNA, 15 bp, Homo sapiens
ggttccatttcttgt

SEQ ID NO: 1788909 - DNA, 15 bp, Homo sapiens
gttccatttcttgtt

SEQ ID NO: 1788910 - DNA, 15 bp, Homo sapiens
ttccatttcttgttg

SEQ ID NO: 1788911 - DNA, 15 bp, Homo sapiens
tccatttcttgttgt

SEQ ID NO: 1788912 - DNA, 15 bp, Homo sapiens
ccatttcttgttgtt

SEQ ID NO: 1788913 - DNA, 15 bp, Homo sapiens
catttcttgttgttc

SEQ ID NO: 1788914 - DNA, 15 bp, Homo sapiens
atttcttgttgttct

SEQ ID NO: 1788915 - DNA, 15 bp, Homo sapiens
tttcttgttgttctt

SEQ ID NO: 1788916 - DNA, 15 bp, Homo sapiens
ttcttgttgttctta

SEQ ID NO: 1788917 - DNA, 15 bp, Homo sapiens
tcttgttgttcttag

SEQ ID NO: 1788918 - DNA, 15 bp, Homo sapiens
cttgttgttcttaga

SEQ ID NO: 1788919 - DNA, 15 bp, Homo sapiens
ttgttgttcttagaa

SEQ ID NO: 1788920 - DNA, 15 bp, Homo sapiens
tgttgttcttagaag

SEQ ID NO: 1788921 - DNA, 15 bp, Homo sapiens
gttgttcttagaagt

SEQ ID NO: 1788922 - DNA, 15 bp, Homo sapiens
ttgttcttagaagtg

SEQ ID NO: 1788923 - DNA, 15 bp, Homo sapiens
tgttcttagaagtgg

SEQ ID NO: 1788924 - DNA, 15 bp, Homo sapiens
gttcttagaagtggg

SEQ ID NO: 1788925 - DNA, 15 bp, Homo sapiens
ttcttagaagtggga

SEQ ID NO: 1788926 - DNA, 15 bp, Homo sapiens
tcttagaagtgggac

SEQ ID NO: 1788927 - DNA, 15 bp, Homo sapiens
cttagaagtgggaca

SEQ ID NO: 1788928 - DNA, 15 bp, Homo sapiens
ttagaagtgggacac

SEQ ID NO: 1788929 - DNA, 15 bp, Homo sapiens
tagaagtgggacaca

SEQ ID NO: 1788930 - DNA, 15 bp, Homo sapiens
agaagtgggacacac

SEQ ID NO: 1788931 - DNA, 15 bp, Homo sapiens
gaagtgggacacact

SEQ ID NO: 1788932 - DNA, 15 bp, Homo sapiens
aagtgggacacactt

SEQ ID NO: 1788933 - DNA, 15 bp, Homo sapiens
agtgggacacacttc

SEQ ID NO: 1788934 - DNA, 15 bp, Homo sapiens
gtgggacacacttct

SEQ ID NO: 1788935 - DNA, 15 bp, Homo sapiens
tgggacacacttctg

SEQ ID NO: 1788936 - DNA, 15 bp, Homo sapiens
gggacacacttctga

SEQ ID NO: 1788937 - DNA, 15 bp, Homo sapiens
ggacacacttctgag

SEQ ID NO: 1788938 - DNA, 15 bp, Homo sapiens
gacacacttctgaga

SEQ ID NO: 1788939 - DNA, 15 bp, Homo sapiens
acacacttctgagaa

SEQ ID NO: 1788940 - DNA, 15 bp, Homo sapiens
cacacttctgagaag

SEQ ID NO: 1788941 - DNA, 15 bp, Homo sapiens
acacttctgagaagg

SEQ ID NO: 1788942 - DNA, 15 bp, Homo sapiens
cacttctgagaaggg

SEQ ID NO: 1788943 - DNA, 15 bp, Homo sapiens
acttctgagaagggt

SEQ ID NO: 1788944 - DNA, 15 bp, Homo sapiens
cttctgagaagggtg

SEQ ID NO: 1788945 - DNA, 15 bp, Homo sapiens
ttctgagaagggtgc

SEQ ID NO: 1788946 - DNA, 15 bp, Homo sapiens
tctgagaagggtgct

SEQ ID NO: 1788947 - DNA, 15 bp, Homo sapiens
ctgagaagggtgcta

SEQ ID NO: 1788948 - DNA, 15 bp, Homo sapiens
tgagaagggtgctaa

SEQ ID NO: 1788949 - DNA, 15 bp, Homo sapiens
gagaagggtgctaaa

SEQ ID NO: 1788950 - DNA, 15 bp, Homo sapiens
agaagggtgctaaat

SEQ ID NO: 1788951 - DNA, 15 bp, Homo sapiens
gaagggtgctaaatg

SEQ ID NO: 1788952 - DNA, 15 bp, Homo sapiens
aagggtgctaaatgc

SEQ ID NO: 1788953 - DNA, 15 bp, Homo sapiens
agggtgctaaatgcc

SEQ ID NO: 1788954 - DNA, 15 bp, Homo sapiens
gggtgctaaatgcca

SEQ ID NO: 1788955 - DNA, 15 bp, Homo sapiens
ggtgctaaatgccac

SEQ ID NO: 1788956 - DNA, 15 bp, Homo sapiens
gtgctaaatgccacc

SEQ ID NO: 1788957 - DNA, 15 bp, Homo sapiens
tgctaaatgccacct

SEQ ID NO: 1788958 - DNA, 15 bp, Homo sapiens
gctaaatgccacctt

SEQ ID NO: 1788959 - DNA, 15 bp, Homo sapiens
ctaaatgccaccttg

SEQ ID NO: 1788960 - DNA, 15 bp, Homo sapiens
taaatgccaccttgt

SEQ ID NO: 1788961 - DNA, 15 bp, Homo sapiens
aaatgccaccttgtt

SEQ ID NO: 1788962 - DNA, 15 bp, Homo sapiens
aatgccaccttgttt

SEQ ID NO: 1788963 - DNA, 15 bp, Homo sapiens
atgccaccttgttta

SEQ ID NO: 1788964 - DNA, 15 bp, Homo sapiens
tgccaccttgtttac

SEQ ID NO: 1788965 - DNA, 15 bp, Homo sapiens
gccaccttgtttact

SEQ ID NO: 1788966 - DNA, 15 bp, Homo sapiens
ccaccttgtttactt

SEQ ID NO: 1788967 - DNA, 15 bp, Homo sapiens
caccttgtttacttc

SEQ ID NO: 1788968 - DNA, 15 bp, Homo sapiens
accttgtttacttct

SEQ ID NO: 1788969 - DNA, 15 bp, Homo sapiens
ccttgtttacttctt

SEQ ID NO: 1788970 - DNA, 15 bp, Homo sapiens
cttgtttacttcttt

SEQ ID NO: 1788971 - DNA, 15 bp, Homo sapiens
ttgtttacttcttta

SEQ ID NO: 1788972 - DNA, 15 bp, Homo sapiens
tgtttacttctttat

SEQ ID NO: 1788973 - DNA, 15 bp, Homo sapiens
gtttacttctttata

SEQ ID NO: 1788974 - DNA, 15 bp, Homo sapiens
tttacttctttataa

SEQ ID NO: 1788975 - DNA, 15 bp, Homo sapiens
ttacttctttataag

SEQ ID NO: 1788976 - DNA, 15 bp, Homo sapiens
tacttctttataagg

SEQ ID NO: 1788977 - DNA, 15 bp, Homo sapiens
acttctttataagga

SEQ ID NO: 1788978 - DNA, 15 bp, Homo sapiens
cttctttataaggac

SEQ ID NO: 1788979 - DNA, 15 bp, Homo sapiens
ttctttataaggact

SEQ ID NO: 1788980 - DNA, 15 bp, Homo sapiens
tctttataaggactg

SEQ ID NO: 1788981 - DNA, 15 bp, Homo sapiens
ctttataaggactgc

SEQ ID NO: 1788982 - DNA, 15 bp, Homo sapiens
tttataaggactgca

SEQ ID NO: 1788983 - DNA, 15 bp, Homo sapiens
ttataaggactgcaa

SEQ ID NO: 1788984 - DNA, 15 bp, Homo sapiens
tataaggactgcaac

SEQ ID NO: 1788985 - DNA, 15 bp, Homo sapiens
ataaggactgcaaca

SEQ ID NO: 1788986 - DNA, 15 bp, Homo sapiens
taaggactgcaacag

SEQ ID NO: 1788987 - DNA, 15 bp, Homo sapiens
aaggactgcaacagg

SEQ ID NO: 1788988 - DNA, 15 bp, Homo sapiens
aggactgcaacaggt

SEQ ID NO: 1788989 - DNA, 15 bp, Homo sapiens
ggactgcaacaggtg

SEQ ID NO: 1788990 - DNA, 15 bp, Homo sapiens
gactgcaacaggtga

SEQ ID NO: 1788991 - DNA, 15 bp, Homo sapiens
actgcaacaggtgaa

SEQ ID NO: 1788992 - DNA, 15 bp, Homo sapiens
ctgcaacaggtgaaa

SEQ ID NO: 1788993 - DNA, 15 bp, Homo sapiens
tgcaacaggtgaaaa

SEQ ID NO: 1788994 - DNA, 15 bp, Homo sapiens
gcaacaggtgaaaat

SEQ ID NO: 1788995 - DNA, 15 bp, Homo sapiens
caacaggtgaaaatt

SEQ ID NO: 1788996 - DNA, 15 bp, Homo sapiens
aacaggtgaaaattt

SEQ ID NO: 1788997 - DNA, 15 bp, Homo sapiens
acaggtgaaaatttg

SEQ ID NO: 1788998 - DNA, 15 bp, Homo sapiens
caggtgaaaatttgt

SEQ ID NO: 1788999 - DNA, 15 bp, Homo sapiens
aggtgaaaatttgtt

SEQ ID NO: 1789000 - DNA, 15 bp, Homo sapiens
ggtgaaaatttgtta

SEQ ID NO: 1789001 - DNA, 15 bp, Homo sapiens
gtgaaaatttgttaa

SEQ ID NO: 1789002 - DNA, 15 bp, Homo sapiens
tgaaaatttgttaaa

SEQ ID NO: 1789003 - DNA, 15 bp, Homo sapiens
gaaaatttgttaaag

SEQ ID NO: 1789004 - DNA, 15 bp, Homo sapiens
aaaatttgttaaagg

SEQ ID NO: 1789005 - DNA, 15 bp, Homo sapiens
aaatttgttaaagga

SEQ ID NO: 1789006 - DNA, 15 bp, Homo sapiens
aatttgttaaaggag

SEQ ID NO: 1789007 - DNA, 15 bp, Homo sapiens
tttgttaaaggagaa

SEQ ID NO: 1789008 - DNA, 15 bp, Homo sapiens
ttgttaaaggagaag

SEQ ID NO: 1789009 - DNA, 15 bp, Homo sapiens
tgttaaaggagaaga

SEQ ID NO: 1789010 - DNA, 15 bp, Homo sapiens
gttaaaggagaagag

SEQ ID NO: 1789011 - DNA, 15 bp, Homo sapiens
ttaaaggagaagagg

SEQ ID NO: 1789012 - DNA, 15 bp, Homo sapiens
taaaggagaagaggc

SEQ ID NO: 1789013 - DNA, 15 bp, Homo sapiens
aaaggagaagaggca

SEQ ID NO: 1789014 - DNA, 15 bp, Homo sapiens
aaggagaagaggcag

SEQ ID NO: 1789015 - DNA, 15 bp, Homo sapiens
aggagaagaggcagt

SEQ ID NO: 1789016 - DNA, 15 bp, Homo sapiens
ggagaagaggcagtt

SEQ ID NO: 1789017 - DNA, 15 bp, Homo sapiens
gagaagaggcagttt

SEQ ID NO: 1789018 - DNA, 15 bp, Homo sapiens
agaagaggcagtttt

SEQ ID NO: 1789019 - DNA, 15 bp, Homo sapiens
gaagaggcagttttt

SEQ ID NO: 1789020 - DNA, 15 bp, Homo sapiens
aagaggcagtttttt

SEQ ID NO: 1789021 - DNA, 15 bp, Homo sapiens
agaggcagttttttt

SEQ ID NO: 1789022 - DNA, 15 bp, Homo sapiens
gaggcagtttttttt

SEQ ID NO: 1789023 - DNA, 15 bp, Homo sapiens
aggcagttttttttc

SEQ ID NO: 1789024 - DNA, 15 bp, Homo sapiens
ggcagttttttttct

SEQ ID NO: 1789025 - DNA, 15 bp, Homo sapiens
gcagttttttttctt

SEQ ID NO: 1789026 - DNA, 15 bp, Homo sapiens
cagttttttttcttt

SEQ ID NO: 1789027 - DNA, 15 bp, Homo sapiens
ttttttttcttttta

SEQ ID NO: 1789028 - DNA, 15 bp, Homo sapiens
tttttttctttttaa

SEQ ID NO: 1789029 - DNA, 15 bp, Homo sapiens
ttttttctttttaaa

SEQ ID NO: 1789030 - DNA, 15 bp, Homo sapiens
tttttctttttaaag

SEQ ID NO: 1789031 - DNA, 15 bp, Homo sapiens
ttttctttttaaaga

SEQ ID NO: 1789032 - DNA, 15 bp, Homo sapiens
tttctttttaaagaa

SEQ ID NO: 1789033 - DNA, 15 bp, Homo sapiens
ttctttttaaagaag

SEQ ID NO: 1789034 - DNA, 15 bp, Homo sapiens
tctttttaaagaagc

SEQ ID NO: 1789035 - DNA, 15 bp, Homo sapiens
ctttttaaagaagca

SEQ ID NO: 1789036 - DNA, 15 bp, Homo sapiens
tttttaaagaagcac

SEQ ID NO: 1789037 - DNA, 15 bp, Homo sapiens
ttttaaagaagcaca

SEQ ID NO: 1789038 - DNA, 15 bp, Homo sapiens
tttaaagaagcacac

SEQ ID NO: 1789039 - DNA, 15 bp, Homo sapiens
ttaaagaagcacact

SEQ ID NO: 1789040 - DNA, 15 bp, Homo sapiens
taaagaagcacactg

SEQ ID NO: 1789041 - DNA, 15 bp, Homo sapiens
aaagaagcacactgt

SEQ ID NO: 1789042 - DNA, 15 bp, Homo sapiens
aagaagcacactgta

SEQ ID NO: 1789043 - DNA, 15 bp, Homo sapiens
agaagcacactgtat

SEQ ID NO: 1789044 - DNA, 15 bp, Homo sapiens
gaagcacactgtatt

SEQ ID NO: 1789045 - DNA, 15 bp, Homo sapiens
aagcacactgtattt

SEQ ID NO: 1789046 - DNA, 15 bp, Homo sapiens
agcacactgtattta

SEQ ID NO: 1789047 - DNA, 15 bp, Homo sapiens
gcacactgtatttat

SEQ ID NO: 1789048 - DNA, 15 bp, Homo sapiens
cacactgtatttatc

SEQ ID NO: 1789049 - DNA, 15 bp, Homo sapiens
acactgtatttatca

SEQ ID NO: 1789050 - DNA, 15 bp, Homo sapiens
cactgtatttatcaa

SEQ ID NO: 1789051 - DNA, 15 bp, Homo sapiens
actgtatttatcaaa

SEQ ID NO: 1789052 - DNA, 15 bp, Homo sapiens
ctgtatttatcaaaa

SEQ ID NO: 1789053 - DNA, 15 bp, Homo sapiens
tgtatttatcaaaag

SEQ ID NO: 1789054 - DNA, 15 bp, Homo sapiens
gtatttatcaaaagg

SEQ ID NO: 1789055 - DNA, 15 bp, Homo sapiens
tatttatcaaaagga

SEQ ID NO: 1789056 - DNA, 15 bp, Homo sapiens
atttatcaaaaggaa

SEQ ID NO: 1789057 - DNA, 15 bp, Homo sapiens
tttatcaaaaggaag

SEQ ID NO: 1789058 - DNA, 15 bp, Homo sapiens
ttatcaaaaggaagc

SEQ ID NO: 1789059 - DNA, 15 bp, Homo sapiens
tatcaaaaggaagct

SEQ ID NO: 1789060 - DNA, 15 bp, Homo sapiens
atcaaaaggaagctg

SEQ ID NO: 1789061 - DNA, 15 bp, Homo sapiens
tcaaaaggaagctga

SEQ ID NO: 1789062 - DNA, 15 bp, Homo sapiens
caaaaggaagctgag

SEQ ID NO: 1789063 - DNA, 15 bp, Homo sapiens
aaaaggaagctgaga

SEQ ID NO: 1789064 - DNA, 15 bp, Homo sapiens
aaaggaagctgagaa

SEQ ID NO: 1789065 - DNA, 15 bp, Homo sapiens
aaggaagctgagaat

SEQ ID NO: 1789066 - DNA, 15 bp, Homo sapiens
aggaagctgagaatg

SEQ ID NO: 1789067 - DNA, 15 bp, Homo sapiens
ggaagctgagaatga

SEQ ID NO: 1789068 - DNA, 15 bp, Homo sapiens
gaagctgagaatgac

SEQ ID NO: 1789069 - DNA, 15 bp, Homo sapiens
aagctgagaatgacc

SEQ ID NO: 1789070 - DNA, 15 bp, Homo sapiens
agctgagaatgaccc

SEQ ID NO: 1789071 - DNA, 15 bp, Homo sapiens
gctgagaatgaccct

SEQ ID NO: 1789072 - DNA, 15 bp, Homo sapiens
ctgagaatgaccctg

SEQ ID NO: 1789073 - DNA, 15 bp, Homo sapiens
tgagaatgaccctgg

SEQ ID NO: 1789074 - DNA, 15 bp, Homo sapiens
gagaatgaccctgga

SEQ ID NO: 1789075 - DNA, 15 bp, Homo sapiens
agaatgaccctggat

SEQ ID NO: 1789076 - DNA, 15 bp, Homo sapiens
gaatgaccctggatg

SEQ ID NO: 1789077 - DNA, 15 bp, Homo sapiens
aatgaccctggatgt

SEQ ID NO: 1789078 - DNA, 15 bp, Homo sapiens
atgaccctggatgtt

SEQ ID NO: 1789079 - DNA, 15 bp, Homo sapiens
tgaccctggatgtta

SEQ ID NO: 1789080 - DNA, 15 bp, Homo sapiens
gaccctggatgttac

SEQ ID NO: 1789081 - DNA, 15 bp, Homo sapiens
accctggatgttacg

SEQ ID NO: 1789082 - DNA, 15 bp, Homo sapiens
ccctggatgttacgg

SEQ ID NO: 1789083 - DNA, 15 bp, Homo sapiens
cctggatgttacggt

SEQ ID NO: 1789084 - DNA, 15 bp, Homo sapiens
ctggatgttacggta

SEQ ID NO: 1789085 - DNA, 15 bp, Homo sapiens
tggatgttacggtac

SEQ ID NO: 1789086 - DNA, 15 bp, Homo sapiens
ggatgttacggtaca

SEQ ID NO: 1789087 - DNA, 15 bp, Homo sapiens
gatgttacggtacat

SEQ ID NO: 1789088 - DNA, 15 bp, Homo sapiens
atgttacggtacatg

SEQ ID NO: 1789089 - DNA, 15 bp, Homo sapiens
tgttacggtacatgt

SEQ ID NO: 1789090 - DNA, 15 bp, Homo sapiens
gttacggtacatgtg

SEQ ID NO: 1789091 - DNA, 15 bp, Homo sapiens
ttacggtacatgtgt

SEQ ID NO: 1789092 - DNA, 15 bp, Homo sapiens
tacggtacatgtgta

SEQ ID NO: 1789093 - DNA, 15 bp, Homo sapiens
acggtacatgtgtat

SEQ ID NO: 1789094 - DNA, 15 bp, Homo sapiens
cggtacatgtgtata

SEQ ID NO: 1789095 - DNA, 15 bp, Homo sapiens
ggtacatgtgtatag

SEQ ID NO: 1789096 - DNA, 15 bp, Homo sapiens
gtacatgtgtatagc

SEQ ID NO: 1789097 - DNA, 15 bp, Homo sapiens
tacatgtgtatagct

SEQ ID NO: 1789098 - DNA, 15 bp, Homo sapiens
acatgtgtatagcta

SEQ ID NO: 1789099 - DNA, 15 bp, Homo sapiens
catgtgtatagctag

SEQ ID NO: 1789100 - DNA, 15 bp, Homo sapiens
atgtgtatagctaga

SEQ ID NO: 1789101 - DNA, 15 bp, Homo sapiens
tgtgtatagctagat

SEQ ID NO: 1789102 - DNA, 15 bp, Homo sapiens
gtgtatagctagatg

SEQ ID NO: 1789103 - DNA, 15 bp, Homo sapiens
tgtatagctagatgt

SEQ ID NO: 1789104 - DNA, 15 bp, Homo sapiens
gtatagctagatgtt

SEQ ID NO: 1789105 - DNA, 15 bp, Homo sapiens
tatagctagatgttg

SEQ ID NO: 1789106 - DNA, 15 bp, Homo sapiens
atagctagatgttgg

SEQ ID NO: 1789107 - DNA, 15 bp, Homo sapiens
tagctagatgttggt

SEQ ID NO: 1789108 - DNA, 15 bp, Homo sapiens
agctagatgttggtt

SEQ ID NO: 1789109 - DNA, 15 bp, Homo sapiens
gctagatgttggtta

SEQ ID NO: 1789110 - DNA, 15 bp, Homo sapiens
ctagatgttggttaa

SEQ ID NO: 1789111 - DNA, 15 bp, Homo sapiens
tagatgttggttaaa

SEQ ID NO: 1789112 - DNA, 15 bp, Homo sapiens
agatgttggttaaaa

SEQ ID NO: 1789113 - DNA, 15 bp, Homo sapiens
gatgttggttaaaaa

SEQ ID NO: 1789114 - DNA, 15 bp, Homo sapiens
atgttggttaaaaat

SEQ ID NO: 1789115 - DNA, 15 bp, Homo sapiens
tgttggttaaaaatg

SEQ ID NO: 1789116 - DNA, 15 bp, Homo sapiens
gttggttaaaaatgg

SEQ ID NO: 1789117 - DNA, 15 bp, Homo sapiens
ttggttaaaaatgga

SEQ ID NO: 1789118 - DNA, 15 bp, Homo sapiens
tggttaaaaatggaa

SEQ ID NO: 1789119 - DNA, 15 bp, Homo sapiens
ggttaaaaatggaaa

SEQ ID NO: 1789120 - DNA, 15 bp, Homo sapiens
gttaaaaatggaaat

SEQ ID NO: 1789121 - DNA, 15 bp, Homo sapiens
ttaaaaatggaaata

SEQ ID NO: 1789122 - DNA, 15 bp, Homo sapiens
taaaaatggaaataa

SEQ ID NO: 1789123 - DNA, 15 bp, Homo sapiens
aaaaatggaaataag

SEQ ID NO: 1789124 - DNA, 15 bp, Homo sapiens
aaaatggaaataaga

SEQ ID NO: 1789125 - DNA, 15 bp, Homo sapiens
aaatggaaataagaa

SEQ ID NO: 1789126 - DNA, 15 bp, Homo sapiens
aatggaaataagaac

SEQ ID NO: 1789127 - DNA, 15 bp, Homo sapiens
atggaaataagaact

SEQ ID NO: 1789128 - DNA, 15 bp, Homo sapiens
tggaaataagaactg

SEQ ID NO: 1789129 - DNA, 15 bp, Homo sapiens
ggaaataagaactga

SEQ ID NO: 1789130 - DNA, 15 bp, Homo sapiens
gaaataagaactgac

SEQ ID NO: 1789131 - DNA, 15 bp, Homo sapiens
aaataagaactgaca

SEQ ID NO: 1789132 - DNA, 15 bp, Homo sapiens
aataagaactgacaa

SEQ ID NO: 1789133 - DNA, 15 bp, Homo sapiens
ataagaactgacaaa

SEQ ID NO: 1789134 - DNA, 15 bp, Homo sapiens
taagaactgacaaag

SEQ ID NO: 1789135 - DNA, 15 bp, Homo sapiens
aagaactgacaaagt

SEQ ID NO: 1789136 - DNA, 15 bp, Homo sapiens
agaactgacaaagtc

SEQ ID NO: 1789137 - DNA, 15 bp, Homo sapiens
gaactgacaaagtct

SEQ ID NO: 1789138 - DNA, 15 bp, Homo sapiens
aactgacaaagtctt

SEQ ID NO: 1789139 - DNA, 15 bp, Homo sapiens
actgacaaagtcttt

SEQ ID NO: 1789140 - DNA, 15 bp, Homo sapiens
ctgacaaagtctttg

SEQ ID NO: 1789141 - DNA, 15 bp, Homo sapiens
tgacaaagtctttga

SEQ ID NO: 1789142 - DNA, 15 bp, Homo sapiens
gacaaagtctttgaa

SEQ ID NO: 1789143 - DNA, 15 bp, Homo sapiens
acaaagtctttgaaa

SEQ ID NO: 1789144 - DNA, 15 bp, Homo sapiens
caaagtctttgaaaa

SEQ ID NO: 1789145 - DNA, 15 bp, Homo sapiens
aaagtctttgaaaag

SEQ ID NO: 1789146 - DNA, 15 bp, Homo sapiens
aagtctttgaaaagt

SEQ ID NO: 1789147 - DNA, 15 bp, Homo sapiens
agtctttgaaaagtg

SEQ ID NO: 1789148 - DNA, 15 bp, Homo sapiens
gtctttgaaaagtgt

SEQ ID NO: 1789149 - DNA, 15 bp, Homo sapiens
tctttgaaaagtgta

SEQ ID NO: 1789150 - DNA, 15 bp, Homo sapiens
ctttgaaaagtgtaa

SEQ ID NO: 1789151 - DNA, 15 bp, Homo sapiens
tttgaaaagtgtaac

SEQ ID NO: 1789152 - DNA, 15 bp, Homo sapiens
ttgaaaagtgtaaca

SEQ ID NO: 1789153 - DNA, 15 bp, Homo sapiens
tgaaaagtgtaacag

SEQ ID NO: 1789154 - DNA, 15 bp, Homo sapiens
gaaaagtgtaacagc

SEQ ID NO: 1789155 - DNA, 15 bp, Homo sapiens
aaaagtgtaacagct

SEQ ID NO: 1789156 - DNA, 15 bp, Homo sapiens
aaagtgtaacagctt

SEQ ID NO: 1789157 - DNA, 15 bp, Homo sapiens
aagtgtaacagcttt

SEQ ID NO: 1789158 - DNA, 15 bp, Homo sapiens
agtgtaacagcttta

SEQ ID NO: 1789159 - DNA, 15 bp, Homo sapiens
gtgtaacagctttag

SEQ ID NO: 1789160 - DNA, 15 bp, Homo sapiens
tgtaacagctttagt

SEQ ID NO: 1789161 - DNA, 15 bp, Homo sapiens
gtaacagctttagtc

SEQ ID NO: 1789162 - DNA, 15 bp, Homo sapiens
taacagctttagtca

SEQ ID NO: 1789163 - DNA, 15 bp, Homo sapiens
aacagctttagtcag

SEQ ID NO: 1789164 - DNA, 15 bp, Homo sapiens
acagctttagtcagt

SEQ ID NO: 1789165 - DNA, 15 bp, Homo sapiens
cagctttagtcagtg

SEQ ID NO: 1789166 - DNA, 15 bp, Homo sapiens
agctttagtcagtgc

SEQ ID NO: 1789167 - DNA, 15 bp, Homo sapiens
gctttagtcagtgct

SEQ ID NO: 1789168 - DNA, 15 bp, Homo sapiens
ctttagtcagtgcta

SEQ ID NO: 1789169 - DNA, 15 bp, Homo sapiens
tttagtcagtgctat

SEQ ID NO: 1789170 - DNA, 15 bp, Homo sapiens
ttagtcagtgctata

SEQ ID NO: 1789171 - DNA, 15 bp, Homo sapiens
tagtcagtgctatag

SEQ ID NO: 1789172 - DNA, 15 bp, Homo sapiens
agtcagtgctatagt

SEQ ID NO: 1789173 - DNA, 15 bp, Homo sapiens
gtcagtgctatagtc

SEQ ID NO: 1789174 - DNA, 15 bp, Homo sapiens
tcagtgctatagtct

SEQ ID NO: 1789175 - DNA, 15 bp, Homo sapiens
cagtgctatagtctc

SEQ ID NO: 1789176 - DNA, 15 bp, Homo sapiens
agtgctatagtctca

SEQ ID NO: 1789177 - DNA, 15 bp, Homo sapiens
gtgctatagtctcaa

SEQ ID NO: 1789178 - DNA, 15 bp, Homo sapiens
tgctatagtctcaat

SEQ ID NO: 1789179 - DNA, 15 bp, Homo sapiens
gctatagtctcaatg

SEQ ID NO: 1789180 - DNA, 15 bp, Homo sapiens
ctatagtctcaatgt

SEQ ID NO: 1789181 - DNA, 15 bp, Homo sapiens
tatagtctcaatgtt

SEQ ID NO: 1789182 - DNA, 15 bp, Homo sapiens
atagtctcaatgttt

SEQ ID NO: 1789183 - DNA, 15 bp, Homo sapiens
tagtctcaatgttta

SEQ ID NO: 1789184 - DNA, 15 bp, Homo sapiens
agtctcaatgtttat

SEQ ID NO: 1789185 - DNA, 15 bp, Homo sapiens
gtctcaatgtttatg

SEQ ID NO: 1789186 - DNA, 15 bp, Homo sapiens
tctcaatgtttatgt

SEQ ID NO: 1789187 - DNA, 15 bp, Homo sapiens
ctcaatgtttatgtc

SEQ ID NO: 1789188 - DNA, 15 bp, Homo sapiens
tcaatgtttatgtct

SEQ ID NO: 1789189 - DNA, 15 bp, Homo sapiens
caatgtttatgtctc

SEQ ID NO: 1789190 - DNA, 15 bp, Homo sapiens
aatgtttatgtctcc

SEQ ID NO: 1789191 - DNA, 15 bp, Homo sapiens
atgtttatgtctccc

SEQ ID NO: 1789192 - DNA, 15 bp, Homo sapiens
tgtttatgtctccct

SEQ ID NO: 1789193 - DNA, 15 bp, Homo sapiens
gtttatgtctcccta

SEQ ID NO: 1789194 - DNA, 15 bp, Homo sapiens
tttatgtctccctaa

SEQ ID NO: 1789195 - DNA, 15 bp, Homo sapiens
ttatgtctccctaaa

SEQ ID NO: 1789196 - DNA, 15 bp, Homo sapiens
tatgtctccctaaaa

SEQ ID NO: 1789197 - DNA, 15 bp, Homo sapiens
atgtctccctaaaat

SEQ ID NO: 1789198 - DNA, 15 bp, Homo sapiens
tgtctccctaaaatt

SEQ ID NO: 1789199 - DNA, 15 bp, Homo sapiens
gtctccctaaaattc

SEQ ID NO: 1789200 - DNA, 15 bp, Homo sapiens
tctccctaaaattca

SEQ ID NO: 1789201 - DNA, 15 bp, Homo sapiens
ctccctaaaattcat

SEQ ID NO: 1789202 - DNA, 15 bp, Homo sapiens
tccctaaaattcata

SEQ ID NO: 1789203 - DNA, 15 bp, Homo sapiens
ccctaaaattcatat

SEQ ID NO: 1789204 - DNA, 15 bp, Homo sapiens
cctaaaattcatatg

SEQ ID NO: 1789205 - DNA, 15 bp, Homo sapiens
ctaaaattcatatgt

SEQ ID NO: 1789206 - DNA, 15 bp, Homo sapiens
taaaattcatatgtt

SEQ ID NO: 1789207 - DNA, 15 bp, Homo sapiens
aaaattcatatgttg

SEQ ID NO: 1789208 - DNA, 15 bp, Homo sapiens
aaattcatatgttga

SEQ ID NO: 1789209 - DNA, 15 bp, Homo sapiens
aattcatatgttgaa

SEQ ID NO: 1789210 - DNA, 15 bp, Homo sapiens
attcatatgttgaaa

SEQ ID NO: 1789211 - DNA, 15 bp, Homo sapiens
ttcatatgttgaaat

SEQ ID NO: 1789212 - DNA, 15 bp, Homo sapiens
tcatatgttgaaatc

SEQ ID NO: 1789213 - DNA, 15 bp, Homo sapiens
catatgttgaaatct

SEQ ID NO: 1789214 - DNA, 15 bp, Homo sapiens
atatgttgaaatctt

SEQ ID NO: 1789215 - DNA, 15 bp, Homo sapiens
tatgttgaaatcttc

SEQ ID NO: 1789216 - DNA, 15 bp, Homo sapiens
atgttgaaatcttca

SEQ ID NO: 1789217 - DNA, 15 bp, Homo sapiens
tgttgaaatcttcac

SEQ ID NO: 1789218 - DNA, 15 bp, Homo sapiens
gttgaaatcttcaca

SEQ ID NO: 1789219 - DNA, 15 bp, Homo sapiens
ttgaaatcttcacac

SEQ ID NO: 1789220 - DNA, 15 bp, Homo sapiens
tgaaatcttcacacc

SEQ ID NO: 1789221 - DNA, 15 bp, Homo sapiens
gaaatcttcacaccc

SEQ ID NO: 1789222 - DNA, 15 bp, Homo sapiens
aaatcttcacaccca

SEQ ID NO: 1789223 - DNA, 15 bp, Homo sapiens
aatcttcacacccaa

SEQ ID NO: 1789224 - DNA, 15 bp, Homo sapiens
atcttcacacccaag

SEQ ID NO: 1789225 - DNA, 15 bp, Homo sapiens
tcttcacacccaaga

SEQ ID NO: 1789226 - DNA, 15 bp, Homo sapiens
cttcacacccaagat

SEQ ID NO: 1789227 - DNA, 15 bp, Homo sapiens
ttcacacccaagatt

SEQ ID NO: 1789228 - DNA, 15 bp, Homo sapiens
tcacacccaagatta

SEQ ID NO: 1789229 - DNA, 15 bp, Homo sapiens
cacacccaagattat

SEQ ID NO: 1789230 - DNA, 15 bp, Homo sapiens
acacccaagattatg

SEQ ID NO: 1789231 - DNA, 15 bp, Homo sapiens
cacccaagattatga

SEQ ID NO: 1789232 - DNA, 15 bp, Homo sapiens
acccaagattatgat

SEQ ID NO: 1789233 - DNA, 15 bp, Homo sapiens
cccaagattatgata

SEQ ID NO: 1789234 - DNA, 15 bp, Homo sapiens
ccaagattatgatat

SEQ ID NO: 1789235 - DNA, 15 bp, Homo sapiens
aagattatgatatta

SEQ ID NO: 1789236 - DNA, 15 bp, Homo sapiens
agattatgatattac

SEQ ID NO: 1789237 - DNA, 15 bp, Homo sapiens
gattatgatattacg

SEQ ID NO: 1789238 - DNA, 15 bp, Homo sapiens
attatgatattacga

SEQ ID NO: 1789239 - DNA, 15 bp, Homo sapiens
ttatgatattacgag

SEQ ID NO: 1789240 - DNA, 15 bp, Homo sapiens
tatgatattacgagg

SEQ ID NO: 1789241 - DNA, 15 bp, Homo sapiens
atgatattacgaggt

SEQ ID NO: 1789242 - DNA, 15 bp, Homo sapiens
tgatattacgaggtg

SEQ ID NO: 1789243 - DNA, 15 bp, Homo sapiens
gatattacgaggtgg

SEQ ID NO: 1789244 - DNA, 15 bp, Homo sapiens
atattacgaggtggg

SEQ ID NO: 1789245 - DNA, 15 bp, Homo sapiens
tattacgaggtgggg

SEQ ID NO: 1789246 - DNA, 15 bp, Homo sapiens
attacgaggtggggc

SEQ ID NO: 1789247 - DNA, 15 bp, Homo sapiens
ttacgaggtggggca

SEQ ID NO: 1789248 - DNA, 15 bp, Homo sapiens
tacgaggtggggcat

SEQ ID NO: 1789249 - DNA, 15 bp, Homo sapiens
acgaggtggggcatg

SEQ ID NO: 1789250 - DNA, 15 bp, Homo sapiens
cgaggtggggcatgc

SEQ ID NO: 1789251 - DNA, 15 bp, Homo sapiens
gaggtggggcatgca

SEQ ID NO: 1789252 - DNA, 15 bp, Homo sapiens
aggtggggcatgcaa

SEQ ID NO: 1789253 - DNA, 15 bp, Homo sapiens
ggtggggcatgcaag

SEQ ID NO: 1789254 - DNA, 15 bp, Homo sapiens
gtggggcatgcaagg

SEQ ID NO: 1789255 - DNA, 15 bp, Homo sapiens
tggggcatgcaagga

SEQ ID NO: 1789256 - DNA, 15 bp, Homo sapiens
ggggcatgcaaggag

SEQ ID NO: 1789257 - DNA, 15 bp, Homo sapiens
gggcatgcaaggagg

SEQ ID NO: 1789258 - DNA, 15 bp, Homo sapiens
ggcatgcaaggaggt

SEQ ID NO: 1789259 - DNA, 15 bp, Homo sapiens
gcatgcaaggaggtg

SEQ ID NO: 1789260 - DNA, 15 bp, Homo sapiens
catgcaaggaggtga

SEQ ID NO: 1789261 - DNA, 15 bp, Homo sapiens
atgcaaggaggtgat

SEQ ID NO: 1789262 - DNA, 15 bp, Homo sapiens
tgcaaggaggtgata

SEQ ID NO: 1789263 - DNA, 15 bp, Homo sapiens
gcaaggaggtgatat

SEQ ID NO: 1789264 - DNA, 15 bp, Homo sapiens
caaggaggtgatatt

SEQ ID NO: 1789265 - DNA, 15 bp, Homo sapiens
aaggaggtgatattg

SEQ ID NO: 1789266 - DNA, 15 bp, Homo sapiens
aggaggtgatattgg

SEQ ID NO: 1789267 - DNA, 15 bp, Homo sapiens
ggaggtgatattggg

SEQ ID NO: 1789268 - DNA, 15 bp, Homo sapiens
gaggtgatattggga

SEQ ID NO: 1789269 - DNA, 15 bp, Homo sapiens
aggtgatattgggag

SEQ ID NO: 1789270 - DNA, 15 bp, Homo sapiens
ggtgatattgggaga

SEQ ID NO: 1789271 - DNA, 15 bp, Homo sapiens
gtgatattgggagat

SEQ ID NO: 1789272 - DNA, 15 bp, Homo sapiens
tgatattgggagatg

SEQ ID NO: 1789273 - DNA, 15 bp, Homo sapiens
gatattgggagatga

SEQ ID NO: 1789274 - DNA, 15 bp, Homo sapiens
atattgggagatgat

SEQ ID NO: 1789275 - DNA, 15 bp, Homo sapiens
tattgggagatgatt

SEQ ID NO: 1789276 - DNA, 15 bp, Homo sapiens
attgggagatgatta

SEQ ID NO: 1789277 - DNA, 15 bp, Homo sapiens
ttgggagatgattag

SEQ ID NO: 1789278 - DNA, 15 bp, Homo sapiens
tgggagatgattagg

SEQ ID NO: 1789279 - DNA, 15 bp, Homo sapiens
gggagatgattaggt

SEQ ID NO: 1789280 - DNA, 15 bp, Homo sapiens
ggagatgattaggtt

SEQ ID NO: 1789281 - DNA, 15 bp, Homo sapiens
gagatgattaggtta

SEQ ID NO: 1789282 - DNA, 15 bp, Homo sapiens
agatgattaggttat

SEQ ID NO: 1789283 - DNA, 15 bp, Homo sapiens
gatgattaggttatg

SEQ ID NO: 1789284 - DNA, 15 bp, Homo sapiens
atgattaggttatgg

SEQ ID NO: 1789285 - DNA, 15 bp, Homo sapiens
tgattaggttatgga

SEQ ID NO: 1789286 - DNA, 15 bp, Homo sapiens
gattaggttatggag

SEQ ID NO: 1789287 - DNA, 15 bp, Homo sapiens
attaggttatggaga

SEQ ID NO: 1789288 - DNA, 15 bp, Homo sapiens
ttaggttatggagag

SEQ ID NO: 1789289 - DNA, 15 bp, Homo sapiens
taggttatggagagc

SEQ ID NO: 1789290 - DNA, 15 bp, Homo sapiens
aggttatggagagct

SEQ ID NO: 1789291 - DNA, 15 bp, Homo sapiens
ggttatggagagctc

SEQ ID NO: 1789292 - DNA, 15 bp, Homo sapiens
gttatggagagctct

SEQ ID NO: 1789293 - DNA, 15 bp, Homo sapiens
ttatggagagctctt

SEQ ID NO: 1789294 - DNA, 15 bp, Homo sapiens
tatggagagctctta

SEQ ID NO: 1789295 - DNA, 15 bp, Homo sapiens
atggagagctcttac

SEQ ID NO: 1789296 - DNA, 15 bp, Homo sapiens
tggagagctcttaca

SEQ ID NO: 1789297 - DNA, 15 bp, Homo sapiens
ggagagctcttacaa

SEQ ID NO: 1789298 - DNA, 15 bp, Homo sapiens
gagagctcttacaat

SEQ ID NO: 1789299 - DNA, 15 bp, Homo sapiens
agagctcttacaatt

SEQ ID NO: 1789300 - DNA, 15 bp, Homo sapiens
gagctcttacaattc

SEQ ID NO: 1789301 - DNA, 15 bp, Homo sapiens
agctcttacaattca

SEQ ID NO: 1789302 - DNA, 15 bp, Homo sapiens
gctcttacaattcag

SEQ ID NO: 1789303 - DNA, 15 bp, Homo sapiens
ctcttacaattcaga

SEQ ID NO: 1789304 - DNA, 15 bp, Homo sapiens
tcttacaattcagat

SEQ ID NO: 1789305 - DNA, 15 bp, Homo sapiens
cttacaattcagatg

SEQ ID NO: 1789306 - DNA, 15 bp, Homo sapiens
ttacaattcagatga

SEQ ID NO: 1789307 - DNA, 15 bp, Homo sapiens
tacaattcagatgaa

SEQ ID NO: 1789308 - DNA, 15 bp, Homo sapiens
acaattcagatgaat

SEQ ID NO: 1789309 - DNA, 15 bp, Homo sapiens
caattcagatgaatg

SEQ ID NO: 1789310 - DNA, 15 bp, Homo sapiens
aattcagatgaatgc

SEQ ID NO: 1789311 - DNA, 15 bp, Homo sapiens
attcagatgaatgcc

SEQ ID NO: 1789312 - DNA, 15 bp, Homo sapiens
ttcagatgaatgcct

SEQ ID NO: 1789313 - DNA, 15 bp, Homo sapiens
tcagatgaatgcctc

SEQ ID NO: 1789314 - DNA, 15 bp, Homo sapiens
cagatgaatgcctca

SEQ ID NO: 1789315 - DNA, 15 bp, Homo sapiens
agatgaatgcctcag

SEQ ID NO: 1789316 - DNA, 15 bp, Homo sapiens
gatgaatgcctcaga

SEQ ID NO: 1789317 - DNA, 15 bp, Homo sapiens
atgaatgcctcagag

SEQ ID NO: 1789318 - DNA, 15 bp, Homo sapiens
tgaatgcctcagaga

SEQ ID NO: 1789319 - DNA, 15 bp, Homo sapiens
gaatgcctcagagac

SEQ ID NO: 1789320 - DNA, 15 bp, Homo sapiens
aatgcctcagagacc

SEQ ID NO: 1789321 - DNA, 15 bp, Homo sapiens
atgcctcagagaccc

SEQ ID NO: 1789322 - DNA, 15 bp, Homo sapiens
tgcctcagagacccc

SEQ ID NO: 1789323 - DNA, 15 bp, Homo sapiens
gcctcagagacccct

SEQ ID NO: 1789324 - DNA, 15 bp, Homo sapiens
cctcagagacccctc

SEQ ID NO: 1789325 - DNA, 15 bp, Homo sapiens
ctcagagacccctcc

SEQ ID NO: 1789326 - DNA, 15 bp, Homo sapiens
tcagagacccctccc

SEQ ID NO: 1789327 - DNA, 15 bp, Homo sapiens
cagagacccctcccc

SEQ ID NO: 1789328 - DNA, 15 bp, Homo sapiens
agagacccctcccca

SEQ ID NO: 1789329 - DNA, 15 bp, Homo sapiens
gagacccctccccac

SEQ ID NO: 1789330 - DNA, 15 bp, Homo sapiens
agacccctccccact

SEQ ID NO: 1789331 - DNA, 15 bp, Homo sapiens
gacccctccccactt

SEQ ID NO: 1789332 - DNA, 15 bp, Homo sapiens
acccctccccacttc

SEQ ID NO: 1789333 - DNA, 15 bp, Homo sapiens
cccctccccacttct

SEQ ID NO: 1789334 - DNA, 15 bp, Homo sapiens
ccctccccacttctg

SEQ ID NO: 1789335 - DNA, 15 bp, Homo sapiens
cctccccacttctgc

SEQ ID NO: 1789336 - DNA, 15 bp, Homo sapiens
ctccccacttctgcc

SEQ ID NO: 1789337 - DNA, 15 bp, Homo sapiens
tccccacttctgcca

SEQ ID NO: 1789338 - DNA, 15 bp, Homo sapiens
ccccacttctgccat

SEQ ID NO: 1789339 - DNA, 15 bp, Homo sapiens
cccacttctgccatg

SEQ ID NO: 1789340 - DNA, 15 bp, Homo sapiens
ccacttctgccatgc

SEQ ID NO: 1789341 - DNA, 15 bp, Homo sapiens
cacttctgccatgca

SEQ ID NO: 1789342 - DNA, 15 bp, Homo sapiens
acttctgccatgcaa

SEQ ID NO: 1789343 - DNA, 15 bp, Homo sapiens
cttctgccatgcaag

SEQ ID NO: 1789344 - DNA, 15 bp, Homo sapiens
ttctgccatgcaagg

SEQ ID NO: 1789345 - DNA, 15 bp, Homo sapiens
tctgccatgcaaggt

SEQ ID NO: 1789346 - DNA, 15 bp, Homo sapiens
ctgccatgcaaggtt

SEQ ID NO: 1789347 - DNA, 15 bp, Homo sapiens
tgccatgcaaggtta

SEQ ID NO: 1789348 - DNA, 15 bp, Homo sapiens
gccatgcaaggttag

SEQ ID NO: 1789349 - DNA, 15 bp, Homo sapiens
ccatgcaaggttagg

SEQ ID NO: 1789350 - DNA, 15 bp, Homo sapiens
catgcaaggttaggg

SEQ ID NO: 1789351 - DNA, 15 bp, Homo sapiens
atgcaaggttagggt

SEQ ID NO: 1789352 - DNA, 15 bp, Homo sapiens
tgcaaggttagggtg

SEQ ID NO: 1789353 - DNA, 15 bp, Homo sapiens
gcaaggttagggtga

SEQ ID NO: 1789354 - DNA, 15 bp, Homo sapiens
caaggttagggtgag

SEQ ID NO: 1789355 - DNA, 15 bp, Homo sapiens
aaggttagggtgaga

SEQ ID NO: 1789356 - DNA, 15 bp, Homo sapiens
aggttagggtgagaa

SEQ ID NO: 1789357 - DNA, 15 bp, Homo sapiens
ggttagggtgagaaa

SEQ ID NO: 1789358 - DNA, 15 bp, Homo sapiens
gttagggtgagaaaa

SEQ ID NO: 1789359 - DNA, 15 bp, Homo sapiens
ttagggtgagaaaat

SEQ ID NO: 1789360 - DNA, 15 bp, Homo sapiens
tagggtgagaaaatg

SEQ ID NO: 1789361 - DNA, 15 bp, Homo sapiens
agggtgagaaaatgg

SEQ ID NO: 1789362 - DNA, 15 bp, Homo sapiens
gggtgagaaaatggc

SEQ ID NO: 1789363 - DNA, 15 bp, Homo sapiens
ggtgagaaaatggct

SEQ ID NO: 1789364 - DNA, 15 bp, Homo sapiens
gtgagaaaatggctg

SEQ ID NO: 1789365 - DNA, 15 bp, Homo sapiens
tgagaaaatggctgt

SEQ ID NO: 1789366 - DNA, 15 bp, Homo sapiens
gagaaaatggctgtc

SEQ ID NO: 1789367 - DNA, 15 bp, Homo sapiens
agaaaatggctgtct

SEQ ID NO: 1789368 - DNA, 15 bp, Homo sapiens
gaaaatggctgtcta

SEQ ID NO: 1789369 - DNA, 15 bp, Homo sapiens
aaaatggctgtctag

SEQ ID NO: 1789370 - DNA, 15 bp, Homo sapiens
aaatggctgtctagg

SEQ ID NO: 1789371 - DNA, 15 bp, Homo sapiens
aatggctgtctagga

SEQ ID NO: 1789372 - DNA, 15 bp, Homo sapiens
atggctgtctaggag

SEQ ID NO: 1789373 - DNA, 15 bp, Homo sapiens
tggctgtctaggagg

SEQ ID NO: 1789374 - DNA, 15 bp, Homo sapiens
ggctgtctaggagga

SEQ ID NO: 1789375 - DNA, 15 bp, Homo sapiens
gctgtctaggaggaa

SEQ ID NO: 1789376 - DNA, 15 bp, Homo sapiens
ctgtctaggaggaag

SEQ ID NO: 1789377 - DNA, 15 bp, Homo sapiens
tgtctaggaggaagt

SEQ ID NO: 1789378 - DNA, 15 bp, Homo sapiens
gtctaggaggaagtc

SEQ ID NO: 1789379 - DNA, 15 bp, Homo sapiens
tctaggaggaagtct

SEQ ID NO: 1789380 - DNA, 15 bp, Homo sapiens
ctaggaggaagtctc

SEQ ID NO: 1789381 - DNA, 15 bp, Homo sapiens
taggaggaagtctcc

SEQ ID NO: 1789382 - DNA, 15 bp, Homo sapiens
aggaggaagtctccc

SEQ ID NO: 1789383 - DNA, 15 bp, Homo sapiens
ggaggaagtctccct

SEQ ID NO: 1789384 - DNA, 15 bp, Homo sapiens
gaggaagtctccctc

SEQ ID NO: 1789385 - DNA, 15 bp, Homo sapiens
aggaagtctccctca

SEQ ID NO: 1789386 - DNA, 15 bp, Homo sapiens
ggaagtctccctcac

SEQ ID NO: 1789387 - DNA, 15 bp, Homo sapiens
gaagtctccctcacc

SEQ ID NO: 1789388 - DNA, 15 bp, Homo sapiens
aagtctccctcacca

SEQ ID NO: 1789389 - DNA, 15 bp, Homo sapiens
agtctccctcaccag

SEQ ID NO: 1789390 - DNA, 15 bp, Homo sapiens
gtctccctcaccaga

SEQ ID NO: 1789391 - DNA, 15 bp, Homo sapiens
tctccctcaccagac

SEQ ID NO: 1789392 - DNA, 15 bp, Homo sapiens
ctccctcaccagaca

SEQ ID NO: 1789393 - DNA, 15 bp, Homo sapiens
tccctcaccagacac

SEQ ID NO: 1789394 - DNA, 15 bp, Homo sapiens
ccctcaccagacact

SEQ ID NO: 1789395 - DNA, 15 bp, Homo sapiens
cctcaccagacactg

SEQ ID NO: 1789396 - DNA, 15 bp, Homo sapiens
ctcaccagacactga

SEQ ID NO: 1789397 - DNA, 15 bp, Homo sapiens
tcaccagacactgaa

SEQ ID NO: 1789398 - DNA, 15 bp, Homo sapiens
caccagacactgaat

SEQ ID NO: 1789399 - DNA, 15 bp, Homo sapiens
accagacactgaatc

SEQ ID NO: 1789400 - DNA, 15 bp, Homo sapiens
ccagacactgaatct

SEQ ID NO: 1789401 - DNA, 15 bp, Homo sapiens
cagacactgaatctg

SEQ ID NO: 1789402 - DNA, 15 bp, Homo sapiens
agacactgaatctgt

SEQ ID NO: 1789403 - DNA, 15 bp, Homo sapiens
gacactgaatctgtt

SEQ ID NO: 1789404 - DNA, 15 bp, Homo sapiens
acactgaatctgttg

SEQ ID NO: 1789405 - DNA, 15 bp, Homo sapiens
cactgaatctgttga

SEQ ID NO: 1789406 - DNA, 15 bp, Homo sapiens
actgaatctgttgac

SEQ ID NO: 1789407 - DNA, 15 bp, Homo sapiens
ctgaatctgttgacc

SEQ ID NO: 1789408 - DNA, 15 bp, Homo sapiens
tgaatctgttgaccc

SEQ ID NO: 1789409 - DNA, 15 bp, Homo sapiens
gaatctgttgacccc

SEQ ID NO: 1789410 - DNA, 15 bp, Homo sapiens
aatctgttgaccccc

SEQ ID NO: 1789411 - DNA, 15 bp, Homo sapiens
atctgttgaccccct

SEQ ID NO: 1789412 - DNA, 15 bp, Homo sapiens
tctgttgaccccctt

SEQ ID NO: 1789413 - DNA, 15 bp, Homo sapiens
ctgttgacccccttg

SEQ ID NO: 1789414 - DNA, 15 bp, Homo sapiens
tgttgacccccttga

SEQ ID NO: 1789415 - DNA, 15 bp, Homo sapiens
gttgacccccttgat

SEQ ID NO: 1789416 - DNA, 15 bp, Homo sapiens
ttgacccccttgatc

SEQ ID NO: 1789417 - DNA, 15 bp, Homo sapiens
tgacccccttgatct

SEQ ID NO: 1789418 - DNA, 15 bp, Homo sapiens
gacccccttgatctc

SEQ ID NO: 1789419 - DNA, 15 bp, Homo sapiens
acccccttgatctcg

SEQ ID NO: 1789420 - DNA, 15 bp, Homo sapiens
cccccttgatctcgg

SEQ ID NO: 1789421 - DNA, 15 bp, Homo sapiens
ccccttgatctcgga

SEQ ID NO: 1789422 - DNA, 15 bp, Homo sapiens
cccttgatctcggac

SEQ ID NO: 1789423 - DNA, 15 bp, Homo sapiens
ccttgatctcggact

SEQ ID NO: 1789424 - DNA, 15 bp, Homo sapiens
cttgatctcggactt

SEQ ID NO: 1789425 - DNA, 15 bp, Homo sapiens
ttgatctcggacttc

SEQ ID NO: 1789426 - DNA, 15 bp, Homo sapiens
tgatctcggacttcc

SEQ ID NO: 1789427 - DNA, 15 bp, Homo sapiens
gatctcggacttccc

SEQ ID NO: 1789428 - DNA, 15 bp, Homo sapiens
atctcggacttccca

SEQ ID NO: 1789429 - DNA, 15 bp, Homo sapiens
tctcggacttcccag

SEQ ID NO: 1789430 - DNA, 15 bp, Homo sapiens
ctcggacttcccagc

SEQ ID NO: 1789431 - DNA, 15 bp, Homo sapiens
tcggacttcccagcc

SEQ ID NO: 1789432 - DNA, 15 bp, Homo sapiens
cggacttcccagccc

SEQ ID NO: 1789433 - DNA, 15 bp, Homo sapiens
ggacttcccagcccc

SEQ ID NO: 1789434 - DNA, 15 bp, Homo sapiens
gacttcccagcccct

SEQ ID NO: 1789435 - DNA, 15 bp, Homo sapiens
acttcccagccccta

SEQ ID NO: 1789436 - DNA, 15 bp, Homo sapiens
cttcccagcccctag

SEQ ID NO: 1789437 - DNA, 15 bp, Homo sapiens
ttcccagcccctaga

SEQ ID NO: 1789438 - DNA, 15 bp, Homo sapiens
tcccagcccctagaa

SEQ ID NO: 1789439 - DNA, 15 bp, Homo sapiens
cccagcccctagaac

SEQ ID NO: 1789440 - DNA, 15 bp, Homo sapiens
ccagcccctagaact

SEQ ID NO: 1789441 - DNA, 15 bp, Homo sapiens
cagcccctagaactg

SEQ ID NO: 1789442 - DNA, 15 bp, Homo sapiens
agcccctagaactgt

SEQ ID NO: 1789443 - DNA, 15 bp, Homo sapiens
gcccctagaactgtg

SEQ ID NO: 1789444 - DNA, 15 bp, Homo sapiens
cccctagaactgtga

SEQ ID NO: 1789445 - DNA, 15 bp, Homo sapiens
ccctagaactgtgag

SEQ ID NO: 1789446 - DNA, 15 bp, Homo sapiens
cctagaactgtgaga

SEQ ID NO: 1789447 - DNA, 15 bp, Homo sapiens
ctagaactgtgagaa

SEQ ID NO: 1789448 - DNA, 15 bp, Homo sapiens
tagaactgtgagaaa

SEQ ID NO: 1789449 - DNA, 15 bp, Homo sapiens
agaactgtgagaaaa

SEQ ID NO: 1789450 - DNA, 15 bp, Homo sapiens
gaactgtgagaaaaa

SEQ ID NO: 1789451 - DNA, 15 bp, Homo sapiens
aactgtgagaaaaaa

SEQ ID NO: 1789452 - DNA, 15 bp, Homo sapiens
actgtgagaaaaaaa

SEQ ID NO: 1789453 - DNA, 15 bp, Homo sapiens
ctgtgagaaaaaaat

SEQ ID NO: 1789454 - DNA, 15 bp, Homo sapiens
tgtgagaaaaaaatt

SEQ ID NO: 1789455 - DNA, 15 bp, Homo sapiens
gtgagaaaaaaattt

SEQ ID NO: 1789456 - DNA, 15 bp, Homo sapiens
tgagaaaaaaatttc

SEQ ID NO: 1789457 - DNA, 15 bp, Homo sapiens
gagaaaaaaatttct

SEQ ID NO: 1789458 - DNA, 15 bp, Homo sapiens
agaaaaaaatttctg

SEQ ID NO: 1789459 - DNA, 15 bp, Homo sapiens
gaaaaaaatttctgc

SEQ ID NO: 1789460 - DNA, 15 bp, Homo sapiens
aaaaaaatttctgct

SEQ ID NO: 1789461 - DNA, 15 bp, Homo sapiens
aaaaaatttctgctt

SEQ ID NO: 1789462 - DNA, 15 bp, Homo sapiens
aaaaatttctgcttt

SEQ ID NO: 1789463 - DNA, 15 bp, Homo sapiens
aaaatttctgctttt

SEQ ID NO: 1789464 - DNA, 15 bp, Homo sapiens
aaatttctgcttttt

SEQ ID NO: 1789465 - DNA, 15 bp, Homo sapiens
aatttctgcttttta

SEQ ID NO: 1789466 - DNA, 15 bp, Homo sapiens
atttctgctttttat

SEQ ID NO: 1789467 - DNA, 15 bp, Homo sapiens
tttctgctttttata

SEQ ID NO: 1789468 - DNA, 15 bp, Homo sapiens
ttctgctttttataa

SEQ ID NO: 1789469 - DNA, 15 bp, Homo sapiens
tctgctttttataag

SEQ ID NO: 1789470 - DNA, 15 bp, Homo sapiens
ctgctttttataagc

SEQ ID NO: 1789471 - DNA, 15 bp, Homo sapiens
tgctttttataagcc

SEQ ID NO: 1789472 - DNA, 15 bp, Homo sapiens
gctttttataagcca

SEQ ID NO: 1789473 - DNA, 15 bp, Homo sapiens
ctttttataagccac

SEQ ID NO: 1789474 - DNA, 15 bp, Homo sapiens
tttttataagccacc

SEQ ID NO: 1789475 - DNA, 15 bp, Homo sapiens
ttttataagccaccc

SEQ ID NO: 1789476 - DNA, 15 bp, Homo sapiens
tttataagccaccca

SEQ ID NO: 1789477 - DNA, 15 bp, Homo sapiens
ttataagccacccag

SEQ ID NO: 1789478 - DNA, 15 bp, Homo sapiens
tataagccacccagt

SEQ ID NO: 1789479 - DNA, 15 bp, Homo sapiens
ataagccacccagtc

SEQ ID NO: 1789480 - DNA, 15 bp, Homo sapiens
taagccacccagtct

SEQ ID NO: 1789481 - DNA, 15 bp, Homo sapiens
aagccacccagtcta

SEQ ID NO: 1789482 - DNA, 15 bp, Homo sapiens
agccacccagtctat

SEQ ID NO: 1789483 - DNA, 15 bp, Homo sapiens
gccacccagtctatg

SEQ ID NO: 1789484 - DNA, 15 bp, Homo sapiens
ccacccagtctatgg

SEQ ID NO: 1789485 - DNA, 15 bp, Homo sapiens
cacccagtctatggt

SEQ ID NO: 1789486 - DNA, 15 bp, Homo sapiens
acccagtctatggta

SEQ ID NO: 1789487 - DNA, 15 bp, Homo sapiens
cccagtctatggtat

SEQ ID NO: 1789488 - DNA, 15 bp, Homo sapiens
ccagtctatggtatt

SEQ ID NO: 1789489 - DNA, 15 bp, Homo sapiens
cagtctatggtattt

SEQ ID NO: 1789490 - DNA, 15 bp, Homo sapiens
agtctatggtatttt

SEQ ID NO: 1789491 - DNA, 15 bp, Homo sapiens
gtctatggtattttg

SEQ ID NO: 1789492 - DNA, 15 bp, Homo sapiens
tatggtattttgttg

SEQ ID NO: 1789493 - DNA, 15 bp, Homo sapiens
atggtattttgttgt

SEQ ID NO: 1789494 - DNA, 15 bp, Homo sapiens
tggtattttgttgta

SEQ ID NO: 1789495 - DNA, 15 bp, Homo sapiens
ggtattttgttgtag

SEQ ID NO: 1789496 - DNA, 15 bp, Homo sapiens
gtattttgttgtagc

SEQ ID NO: 1789497 - DNA, 15 bp, Homo sapiens
tattttgttgtagca

SEQ ID NO: 1789498 - DNA, 15 bp, Homo sapiens
attttgttgtagcag

SEQ ID NO: 1789499 - DNA, 15 bp, Homo sapiens
ttttgttgtagcagc

SEQ ID NO: 1789500 - DNA, 15 bp, Homo sapiens
tttgttgtagcagcc

SEQ ID NO: 1789501 - DNA, 15 bp, Homo sapiens
ttgttgtagcagcct

SEQ ID NO: 1789502 - DNA, 15 bp, Homo sapiens
tgttgtagcagcctg

SEQ ID NO: 1789503 - DNA, 15 bp, Homo sapiens
gttgtagcagcctga

SEQ ID NO: 1789504 - DNA, 15 bp, Homo sapiens
ttgtagcagcctgag

SEQ ID NO: 1789505 - DNA, 15 bp, Homo sapiens
tgtagcagcctgagt

SEQ ID NO: 1789506 - DNA, 15 bp, Homo sapiens
gtagcagcctgagtg

SEQ ID NO: 1789507 - DNA, 15 bp, Homo sapiens
tagcagcctgagtgg

SEQ ID NO: 1789508 - DNA, 15 bp, Homo sapiens
agcagcctgagtgga

SEQ ID NO: 1789509 - DNA, 15 bp, Homo sapiens
gcagcctgagtggac

SEQ ID NO: 1789510 - DNA, 15 bp, Homo sapiens
cagcctgagtggact

SEQ ID NO: 1789511 - DNA, 15 bp, Homo sapiens
agcctgagtggactg

SEQ ID NO: 1789512 - DNA, 15 bp, Homo sapiens
gcctgagtggactga

SEQ ID NO: 1789513 - DNA, 15 bp, Homo sapiens
cctgagtggactgag

SEQ ID NO: 1789514 - DNA, 15 bp, Homo sapiens
ctgagtggactgaga

SEQ ID NO: 1789515 - DNA, 15 bp, Homo sapiens
tgagtggactgagac

SEQ ID NO: 1789516 - DNA, 15 bp, Homo sapiens
gagtggactgagaca

SEQ ID NO: 1789517 - DNA, 15 bp, Homo sapiens
agtggactgagacag

SEQ ID NO: 1789518 - DNA, 15 bp, Homo sapiens
gtggactgagacagt

SEQ ID NO: 1789519 - DNA, 15 bp, Homo sapiens
tggactgagacagtc

SEQ ID NO: 1789520 - DNA, 15 bp, Homo sapiens
ggactgagacagtct

SEQ ID NO: 1789521 - DNA, 15 bp, Homo sapiens
gactgagacagtctg

SEQ ID NO: 1789522 - DNA, 15 bp, Homo sapiens
actgagacagtctgg

SEQ ID NO: 1789523 - DNA, 15 bp, Homo sapiens
ctgagacagtctggg

SEQ ID NO: 1789524 - DNA, 15 bp, Homo sapiens
tgagacagtctggga

SEQ ID NO: 1789525 - DNA, 15 bp, Homo sapiens
gagacagtctgggaa

SEQ ID NO: 1789526 - DNA, 15 bp, Homo sapiens
agacagtctgggaat

SEQ ID NO: 1789527 - DNA, 15 bp, Homo sapiens
gacagtctgggaatt

SEQ ID NO: 1789528 - DNA, 15 bp, Homo sapiens
acagtctgggaattc

SEQ ID NO: 1789529 - DNA, 15 bp, Homo sapiens
cagtctgggaattcc

SEQ ID NO: 1789530 - DNA, 15 bp, Homo sapiens
agtctgggaattcct

SEQ ID NO: 1789531 - DNA, 15 bp, Homo sapiens
gtctgggaattcctc

SEQ ID NO: 1789532 - DNA, 15 bp, Homo sapiens
tctgggaattcctct

SEQ ID NO: 1789533 - DNA, 15 bp, Homo sapiens
ctgggaattcctctt

SEQ ID NO: 1789534 - DNA, 15 bp, Homo sapiens
tgggaattcctcttc

SEQ ID NO: 1789535 - DNA, 15 bp, Homo sapiens
gggaattcctcttct

SEQ ID NO: 1789536 - DNA, 15 bp, Homo sapiens
ggaattcctcttctt

SEQ ID NO: 1789537 - DNA, 15 bp, Homo sapiens
gaattcctcttcttt

SEQ ID NO: 1789538 - DNA, 15 bp, Homo sapiens
aattcctcttctttt

SEQ ID NO: 1789539 - DNA, 15 bp, Homo sapiens
attcctcttcttttt

SEQ ID NO: 1789540 - DNA, 15 bp, Homo sapiens
ttcctcttctttttt

SEQ ID NO: 1789541 - DNA, 15 bp, Homo sapiens
tcctcttcttttttt

SEQ ID NO: 1789542 - DNA, 15 bp, Homo sapiens
cctcttctttttttt

SEQ ID NO: 1789543 - DNA, 15 bp, Homo sapiens
ctcttcttttttttt

SEQ ID NO: 1789544 - DNA, 15 bp, Homo sapiens
taagatggagtctca

SEQ ID NO: 1789545 - DNA, 15 bp, Homo sapiens
aagatggagtctcac

SEQ ID NO: 1789546 - DNA, 15 bp, Homo sapiens
atggagtctcactgc

SEQ ID NO: 1789547 - DNA, 15 bp, Homo sapiens
tggagtctcactgct

SEQ ID NO: 1789548 - DNA, 15 bp, Homo sapiens
ggagtctcactgctg

SEQ ID NO: 1789549 - DNA, 15 bp, Homo sapiens
gagtctcactgctgc

SEQ ID NO: 1789550 - DNA, 15 bp, Homo sapiens
agtctcactgctgcc

SEQ ID NO: 1789551 - DNA, 15 bp, Homo sapiens
gtctcactgctgccc

SEQ ID NO: 1789552 - DNA, 15 bp, Homo sapiens
tctcactgctgccca

SEQ ID NO: 1789553 - DNA, 15 bp, Homo sapiens
ctcactgctgcccag

SEQ ID NO: 1789554 - DNA, 15 bp, Homo sapiens
tcactgctgcccagg

SEQ ID NO: 1789555 - DNA, 15 bp, Homo sapiens
cactgctgcccaggc

SEQ ID NO: 1789556 - DNA, 15 bp, Homo sapiens
actgctgcccaggct

SEQ ID NO: 1789557 - DNA, 15 bp, Homo sapiens
ctgctgcccaggcta

SEQ ID NO: 1789558 - DNA, 15 bp, Homo sapiens
gctgcccaggctaga

SEQ ID NO: 1789559 - DNA, 15 bp, Homo sapiens
ctgcccaggctagag

SEQ ID NO: 1789560 - DNA, 15 bp, Homo sapiens
ctagagtgcagtggc

SEQ ID NO: 1789561 - DNA, 15 bp, Homo sapiens
tagagtgcagtggca

SEQ ID NO: 1789562 - DNA, 15 bp, Homo sapiens
agagtgcagtggcac

SEQ ID NO: 1789563 - DNA, 15 bp, Homo sapiens
aatcttggctcacta

SEQ ID NO: 1789564 - DNA, 15 bp, Homo sapiens
atcttggctcactac

SEQ ID NO: 1789565 - DNA, 15 bp, Homo sapiens
tcttggctcactaca

SEQ ID NO: 1789566 - DNA, 15 bp, Homo sapiens
cttggctcactacaa

SEQ ID NO: 1789567 - DNA, 15 bp, Homo sapiens
ttggctcactacaac

SEQ ID NO: 1789568 - DNA, 15 bp, Homo sapiens
tggctcactacaacc

SEQ ID NO: 1789569 - DNA, 15 bp, Homo sapiens
ctcactacaacctcc

SEQ ID NO: 1789570 - DNA, 15 bp, Homo sapiens
tcactacaacctcca

SEQ ID NO: 1789571 - DNA, 15 bp, Homo sapiens
cactacaacctccac

SEQ ID NO: 1789572 - DNA, 15 bp, Homo sapiens
actacaacctccacc

SEQ ID NO: 1789573 - DNA, 15 bp, Homo sapiens
ctacaacctccacct

SEQ ID NO: 1789574 - DNA, 15 bp, Homo sapiens
tacaacctccacctc

SEQ ID NO: 1789575 - DNA, 15 bp, Homo sapiens
acaacctccacctcc

SEQ ID NO: 1789576 - DNA, 15 bp, Homo sapiens
tcccaggttcaaggg

SEQ ID NO: 1789577 - DNA, 15 bp, Homo sapiens
cccaggttcaaggga

SEQ ID NO: 1789578 - DNA, 15 bp, Homo sapiens
ccaggttcaagggat

SEQ ID NO: 1789579 - DNA, 15 bp, Homo sapiens
caggttcaagggatt

SEQ ID NO: 1789580 - DNA, 15 bp, Homo sapiens
aggttcaagggattc

SEQ ID NO: 1789581 - DNA, 15 bp, Homo sapiens
caagggattctcctg

SEQ ID NO: 1789582 - DNA, 15 bp, Homo sapiens
aagggattctcctgc

SEQ ID NO: 1789583 - DNA, 15 bp, Homo sapiens
agggattctcctgcc

SEQ ID NO: 1789584 - DNA, 15 bp, Homo sapiens
gggattctcctgcct

SEQ ID NO: 1789585 - DNA, 15 bp, Homo sapiens
ggattctcctgcctc

SEQ ID NO: 1789586 - DNA, 15 bp, Homo sapiens
ggattacaggcacct

SEQ ID NO: 1789587 - DNA, 15 bp, Homo sapiens
gattacaggcacctg

SEQ ID NO: 1789588 - DNA, 15 bp, Homo sapiens
attacaggcacctgc

SEQ ID NO: 1789589 - DNA, 15 bp, Homo sapiens
ttacaggcacctgcc

SEQ ID NO: 1789590 - DNA, 15 bp, Homo sapiens
tacaggcacctgcca

SEQ ID NO: 1789591 - DNA, 15 bp, Homo sapiens
acaggcacctgccac

SEQ ID NO: 1789592 - DNA, 15 bp, Homo sapiens
caggcacctgccacc

SEQ ID NO: 1789593 - DNA, 15 bp, Homo sapiens
aggcacctgccacca

SEQ ID NO: 1789594 - DNA, 15 bp, Homo sapiens
ggcacctgccaccag

SEQ ID NO: 1789595 - DNA, 15 bp, Homo sapiens
gcacctgccaccagg

SEQ ID NO: 1789596 - DNA, 15 bp, Homo sapiens
cacctgccaccaggc

SEQ ID NO: 1789597 - DNA, 15 bp, Homo sapiens
acctgccaccaggcc

SEQ ID NO: 1789598 - DNA, 15 bp, Homo sapiens
cctgccaccaggcct

SEQ ID NO: 1789599 - DNA, 15 bp, Homo sapiens
ctgccaccaggcctg

SEQ ID NO: 1789600 - DNA, 15 bp, Homo sapiens
tgccaccaggcctgg

SEQ ID NO: 1789601 - DNA, 15 bp, Homo sapiens
gccaccaggcctggc

SEQ ID NO: 1789602 - DNA, 15 bp, Homo sapiens
accaggcctggctaa

SEQ ID NO: 1789603 - DNA, 15 bp, Homo sapiens
ccaggcctggctaat

SEQ ID NO: 1789604 - DNA, 15 bp, Homo sapiens
caggcctggctaatt

SEQ ID NO: 1789605 - DNA, 15 bp, Homo sapiens
aggcctggctaattt

SEQ ID NO: 1789606 - DNA, 15 bp, Homo sapiens
ggcctggctaatttt

SEQ ID NO: 1789607 - DNA, 15 bp, Homo sapiens
ctggctaattttttt

SEQ ID NO: 1789608 - DNA, 15 bp, Homo sapiens
tggctaatttttttt

SEQ ID NO: 1789609 - DNA, 15 bp, Homo sapiens
ggctaattttttttt

SEQ ID NO: 1789610 - DNA, 15 bp, Homo sapiens
gctaatttttttttt

SEQ ID NO: 1789611 - DNA, 15 bp, Homo sapiens
ctaattttttttttg

SEQ ID NO: 1789612 - DNA, 15 bp, Homo sapiens
taattttttttttgc

SEQ ID NO: 1789613 - DNA, 15 bp, Homo sapiens
aattttttttttgca

SEQ ID NO: 1789614 - DNA, 15 bp, Homo sapiens
attttttttttgcat

SEQ ID NO: 1789615 - DNA, 15 bp, Homo sapiens
ttttttttttgcatt

SEQ ID NO: 1789616 - DNA, 15 bp, Homo sapiens
tttttttttgcattt

SEQ ID NO: 1789617 - DNA, 15 bp, Homo sapiens
ttttttttgcatttt

SEQ ID NO: 1789618 - DNA, 15 bp, Homo sapiens
tttttttgcattttt

SEQ ID NO: 1789619 - DNA, 15 bp, Homo sapiens
ttttttgcattttta

SEQ ID NO: 1789620 - DNA, 15 bp, Homo sapiens
tttttgcatttttag

SEQ ID NO: 1789621 - DNA, 15 bp, Homo sapiens
ttagtagagacgggt

SEQ ID NO: 1789622 - DNA, 15 bp, Homo sapiens
tagtagagacgggtt

SEQ ID NO: 1789623 - DNA, 15 bp, Homo sapiens
agtagagacgggttt

SEQ ID NO: 1789624 - DNA, 15 bp, Homo sapiens
gtagagacgggtttt

SEQ ID NO: 1789625 - DNA, 15 bp, Homo sapiens
tagagacgggttttg

SEQ ID NO: 1789626 - DNA, 15 bp, Homo sapiens
agagacgggttttgc

SEQ ID NO: 1789627 - DNA, 15 bp, Homo sapiens
gagacgggttttgcc

SEQ ID NO: 1789628 - DNA, 15 bp, Homo sapiens
agacgggttttgcca

SEQ ID NO: 1789629 - DNA, 15 bp, Homo sapiens
gacgggttttgccat

SEQ ID NO: 1789630 - DNA, 15 bp, Homo sapiens
acgggttttgccatg

SEQ ID NO: 1789631 - DNA, 15 bp, Homo sapiens
cgggttttgccatgt

SEQ ID NO: 1789632 - DNA, 15 bp, Homo sapiens
ggttttgccatgtta

SEQ ID NO: 1789633 - DNA, 15 bp, Homo sapiens
gttttgccatgttag

SEQ ID NO: 1789634 - DNA, 15 bp, Homo sapiens
ttttgccatgttagc

SEQ ID NO: 1789635 - DNA, 15 bp, Homo sapiens
tttgccatgttagcc

SEQ ID NO: 1789636 - DNA, 15 bp, Homo sapiens
ttgccatgttagcca

SEQ ID NO: 1789637 - DNA, 15 bp, Homo sapiens
tgccatgttagccag

SEQ ID NO: 1789638 - DNA, 15 bp, Homo sapiens
gccatgttagccagg

SEQ ID NO: 1789639 - DNA, 15 bp, Homo sapiens
ccatgttagccaggc

SEQ ID NO: 1789640 - DNA, 15 bp, Homo sapiens
catgttagccaggct

SEQ ID NO: 1789641 - DNA, 15 bp, Homo sapiens
agccaggctggtctc

SEQ ID NO: 1789642 - DNA, 15 bp, Homo sapiens
tctcgaattcctgac

SEQ ID NO: 1789643 - DNA, 15 bp, Homo sapiens
ctcgaattcctgacc

SEQ ID NO: 1789644 - DNA, 15 bp, Homo sapiens
tcgaattcctgacct

SEQ ID NO: 1789645 - DNA, 15 bp, Homo sapiens
cgaattcctgacctc

SEQ ID NO: 1789646 - DNA, 15 bp, Homo sapiens
gaattcctgacctca

SEQ ID NO: 1789647 - DNA, 15 bp, Homo sapiens
aattcctgacctcaa

SEQ ID NO: 1789648 - DNA, 15 bp, Homo sapiens
attcctgacctcaag

SEQ ID NO: 1789649 - DNA, 15 bp, Homo sapiens
ttcctgacctcaagt

SEQ ID NO: 1789650 - DNA, 15 bp, Homo sapiens
caagtgatccgcccg

SEQ ID NO: 1789651 - DNA, 15 bp, Homo sapiens
aagtgatccgcccgc

SEQ ID NO: 1789652 - DNA, 15 bp, Homo sapiens
agtgatccgcccgcc

SEQ ID NO: 1789653 - DNA, 15 bp, Homo sapiens
gatccgcccgcctct

SEQ ID NO: 1789654 - DNA, 15 bp, Homo sapiens
atccgcccgcctctg

SEQ ID NO: 1789655 - DNA, 15 bp, Homo sapiens
tccgcccgcctctgc

SEQ ID NO: 1789656 - DNA, 15 bp, Homo sapiens
ccgcccgcctctgcc

SEQ ID NO: 1789657 - DNA, 15 bp, Homo sapiens
cgcccgcctctgcct

SEQ ID NO: 1789658 - DNA, 15 bp, Homo sapiens
gcccgcctctgcctc

SEQ ID NO: 1789659 - DNA, 15 bp, Homo sapiens
cccgcctctgcctcc

SEQ ID NO: 1789660 - DNA, 15 bp, Homo sapiens
ccgcctctgcctccc

SEQ ID NO: 1789661 - DNA, 15 bp, Homo sapiens
cgcctctgcctccca

SEQ ID NO: 1789662 - DNA, 15 bp, Homo sapiens
gcctctgcctcccaa

SEQ ID NO: 1789663 - DNA, 15 bp, Homo sapiens
cctctgcctcccaaa

SEQ ID NO: 1789664 - DNA, 15 bp, Homo sapiens
ctctgcctcccaaag

SEQ ID NO: 1789665 - DNA, 15 bp, Homo sapiens
tctgcctcccaaagt

SEQ ID NO: 1789666 - DNA, 15 bp, Homo sapiens
ctgcctcccaaagtg

SEQ ID NO: 1789667 - DNA, 15 bp, Homo sapiens
tgcctcccaaagtgc

SEQ ID NO: 1789668 - DNA, 15 bp, Homo sapiens
caccgtgcccggcct

SEQ ID NO: 1789669 - DNA, 15 bp, Homo sapiens
accgtgcccggcctg

SEQ ID NO: 1789670 - DNA, 15 bp, Homo sapiens
ccgtgcccggcctgg

SEQ ID NO: 1789671 - DNA, 15 bp, Homo sapiens
cgtgcccggcctggg

SEQ ID NO: 1789672 - DNA, 15 bp, Homo sapiens
gtgcccggcctggga

SEQ ID NO: 1789673 - DNA, 15 bp, Homo sapiens
tgcccggcctgggaa

SEQ ID NO: 1789674 - DNA, 15 bp, Homo sapiens
gcccggcctgggaat

SEQ ID NO: 1789675 - DNA, 15 bp, Homo sapiens
cccggcctgggaatt

SEQ ID NO: 1789676 - DNA, 15 bp, Homo sapiens
ccggcctgggaattc

SEQ ID NO: 1789677 - DNA, 15 bp, Homo sapiens
cggcctgggaattcc

SEQ ID NO: 1789678 - DNA, 15 bp, Homo sapiens
ggcctgggaattcct

SEQ ID NO: 1789679 - DNA, 15 bp, Homo sapiens
gcctgggaattcctc

SEQ ID NO: 1789680 - DNA, 15 bp, Homo sapiens
cctgggaattcctct

SEQ ID NO: 1789681 - DNA, 15 bp, Homo sapiens
tgggaattcctctta

SEQ ID NO: 1789682 - DNA, 15 bp, Homo sapiens
gggaattcctcttaa

SEQ ID NO: 1789683 - DNA, 15 bp, Homo sapiens
ggaattcctcttaac

SEQ ID NO: 1789684 - DNA, 15 bp, Homo sapiens
gaattcctcttaaca

SEQ ID NO: 1789685 - DNA, 15 bp, Homo sapiens
aattcctcttaacaa

SEQ ID NO: 1789686 - DNA, 15 bp, Homo sapiens
attcctcttaacaac

SEQ ID NO: 1789687 - DNA, 15 bp, Homo sapiens
ttcctcttaacaaca

SEQ ID NO: 1789688 - DNA, 15 bp, Homo sapiens
tcctcttaacaacac

SEQ ID NO: 1789689 - DNA, 15 bp, Homo sapiens
cctcttaacaacact

SEQ ID NO: 1789690 - DNA, 15 bp, Homo sapiens
ctcttaacaacacta

SEQ ID NO: 1789691 - DNA, 15 bp, Homo sapiens
tcttaacaacactac

SEQ ID NO: 1789692 - DNA, 15 bp, Homo sapiens
cttaacaacactact

SEQ ID NO: 1789693 - DNA, 15 bp, Homo sapiens
ttaacaacactactg

SEQ ID NO: 1789694 - DNA, 15 bp, Homo sapiens
taacaacactactgt

SEQ ID NO: 1789695 - DNA, 15 bp, Homo sapiens
aacaacactactgtt

SEQ ID NO: 1789696 - DNA, 15 bp, Homo sapiens
acaacactactgttg

SEQ ID NO: 1789697 - DNA, 15 bp, Homo sapiens
caacactactgttgg

SEQ ID NO: 1789698 - DNA, 15 bp, Homo sapiens
aacactactgttggc

SEQ ID NO: 1789699 - DNA, 15 bp, Homo sapiens
acactactgttggca

SEQ ID NO: 1789700 - DNA, 15 bp, Homo sapiens
cactactgttggcat

SEQ ID NO: 1789701 - DNA, 15 bp, Homo sapiens
actactgttggcatc

SEQ ID NO: 1789702 - DNA, 15 bp, Homo sapiens
ctactgttggcatct

SEQ ID NO: 1789703 - DNA, 15 bp, Homo sapiens
tactgttggcatctg

SEQ ID NO: 1789704 - DNA, 15 bp, Homo sapiens
actgttggcatctgg

SEQ ID NO: 1789705 - DNA, 15 bp, Homo sapiens
ctgttggcatctggt

SEQ ID NO: 1789706 - DNA, 15 bp, Homo sapiens
tgttggcatctggtt

SEQ ID NO: 1789707 - DNA, 15 bp, Homo sapiens
gttggcatctggttg

SEQ ID NO: 1789708 - DNA, 15 bp, Homo sapiens
ttggcatctggttgt

SEQ ID NO: 1789709 - DNA, 15 bp, Homo sapiens
tggcatctggttgtg

SEQ ID NO: 1789710 - DNA, 15 bp, Homo sapiens
ggcatctggttgtgc

SEQ ID NO: 1789711 - DNA, 15 bp, Homo sapiens
gcatctggttgtgca

SEQ ID NO: 1789712 - DNA, 15 bp, Homo sapiens
catctggttgtgcac

SEQ ID NO: 1789713 - DNA, 15 bp, Homo sapiens
atctggttgtgcacc

SEQ ID NO: 1789714 - DNA, 15 bp, Homo sapiens
tctggttgtgcacct

SEQ ID NO: 1789715 - DNA, 15 bp, Homo sapiens
ctggttgtgcacctg

SEQ ID NO: 1789716 - DNA, 15 bp, Homo sapiens
tggttgtgcacctgc

SEQ ID NO: 1789717 - DNA, 15 bp, Homo sapiens
ggttgtgcacctgct

SEQ ID NO: 1789718 - DNA, 15 bp, Homo sapiens
gttgtgcacctgctg

SEQ ID NO: 1789719 - DNA, 15 bp, Homo sapiens
ttgtgcacctgctgt

SEQ ID NO: 1789720 - DNA, 15 bp, Homo sapiens
tgtgcacctgctgta

SEQ ID NO: 1789721 - DNA, 15 bp, Homo sapiens
gtgcacctgctgtag

SEQ ID NO: 1789722 - DNA, 15 bp, Homo sapiens
tgcacctgctgtagc

SEQ ID NO: 1789723 - DNA, 15 bp, Homo sapiens
gcacctgctgtagca

SEQ ID NO: 1789724 - DNA, 15 bp, Homo sapiens
cacctgctgtagcag

SEQ ID NO: 1789725 - DNA, 15 bp, Homo sapiens
acctgctgtagcagg

SEQ ID NO: 1789726 - DNA, 15 bp, Homo sapiens
cctgctgtagcaggt

SEQ ID NO: 1789727 - DNA, 15 bp, Homo sapiens
ctgctgtagcaggtg

SEQ ID NO: 1789728 - DNA, 15 bp, Homo sapiens
tgctgtagcaggtga

SEQ ID NO: 1789729 - DNA, 15 bp, Homo sapiens
gctgtagcaggtgaa

SEQ ID NO: 1789730 - DNA, 15 bp, Homo sapiens
ctgtagcaggtgaat

SEQ ID NO: 1789731 - DNA, 15 bp, Homo sapiens
tgtagcaggtgaata

SEQ ID NO: 1789732 - DNA, 15 bp, Homo sapiens
gtagcaggtgaatag

SEQ ID NO: 1789733 - DNA, 15 bp, Homo sapiens
tagcaggtgaatagc

SEQ ID NO: 1789734 - DNA, 15 bp, Homo sapiens
agcaggtgaatagcc

SEQ ID NO: 1789735 - DNA, 15 bp, Homo sapiens
gcaggtgaatagcca

SEQ ID NO: 1789736 - DNA, 15 bp, Homo sapiens
caggtgaatagccat

SEQ ID NO: 1789737 - DNA, 15 bp, Homo sapiens
aggtgaatagccatg

SEQ ID NO: 1789738 - DNA, 15 bp, Homo sapiens
ggtgaatagccatgg

SEQ ID NO: 1789739 - DNA, 15 bp, Homo sapiens
gtgaatagccatgga

SEQ ID NO: 1789740 - DNA, 15 bp, Homo sapiens
tgaatagccatggat

SEQ ID NO: 1789741 - DNA, 15 bp, Homo sapiens
gaatagccatggatt

SEQ ID NO: 1789742 - DNA, 15 bp, Homo sapiens
aatagccatggattc

SEQ ID NO: 1789743 - DNA, 15 bp, Homo sapiens
atagccatggattca

SEQ ID NO: 1789744 - DNA, 15 bp, Homo sapiens
tagccatggattcaa

SEQ ID NO: 1789745 - DNA, 15 bp, Homo sapiens
agccatggattcaat

SEQ ID NO: 1789746 - DNA, 15 bp, Homo sapiens
gccatggattcaatt

SEQ ID NO: 1789747 - DNA, 15 bp, Homo sapiens
ccatggattcaattc

SEQ ID NO: 1789748 - DNA, 15 bp, Homo sapiens
catggattcaattcc

SEQ ID NO: 1789749 - DNA, 15 bp, Homo sapiens
atggattcaattccc

SEQ ID NO: 1789750 - DNA, 15 bp, Homo sapiens
tggattcaattccct

SEQ ID NO: 1789751 - DNA, 15 bp, Homo sapiens
ggattcaattccctg

SEQ ID NO: 1789752 - DNA, 15 bp, Homo sapiens
gattcaattccctga

SEQ ID NO: 1789753 - DNA, 15 bp, Homo sapiens
attcaattccctgag

SEQ ID NO: 1789754 - DNA, 15 bp, Homo sapiens
ttcaattccctgagt

SEQ ID NO: 1789755 - DNA, 15 bp, Homo sapiens
tcaattccctgagtc

SEQ ID NO: 1789756 - DNA, 15 bp, Homo sapiens
caattccctgagtct

SEQ ID NO: 1789757 - DNA, 15 bp, Homo sapiens
aattccctgagtcta

SEQ ID NO: 1789758 - DNA, 15 bp, Homo sapiens
attccctgagtctaa

SEQ ID NO: 1789759 - DNA, 15 bp, Homo sapiens
ttccctgagtctaag

SEQ ID NO: 1789760 - DNA, 15 bp, Homo sapiens
tccctgagtctaagg

SEQ ID NO: 1789761 - DNA, 15 bp, Homo sapiens
ccctgagtctaagga

SEQ ID NO: 1789762 - DNA, 15 bp, Homo sapiens
cctgagtctaaggag

SEQ ID NO: 1789763 - DNA, 15 bp, Homo sapiens
ctgagtctaaggagg

SEQ ID NO: 1789764 - DNA, 15 bp, Homo sapiens
tgagtctaaggaggc

SEQ ID NO: 1789765 - DNA, 15 bp, Homo sapiens
gagtctaaggaggct

SEQ ID NO: 1789766 - DNA, 15 bp, Homo sapiens
agtctaaggaggctg

SEQ ID NO: 1789767 - DNA, 15 bp, Homo sapiens
gtctaaggaggctga

SEQ ID NO: 1789768 - DNA, 15 bp, Homo sapiens
tctaaggaggctgac

SEQ ID NO: 1789769 - DNA, 15 bp, Homo sapiens
ctaaggaggctgacc

SEQ ID NO: 1789770 - DNA, 15 bp, Homo sapiens
taaggaggctgacca

SEQ ID NO: 1789771 - DNA, 15 bp, Homo sapiens
aaggaggctgaccat

SEQ ID NO: 1789772 - DNA, 15 bp, Homo sapiens
aggaggctgaccatg

SEQ ID NO: 1789773 - DNA, 15 bp, Homo sapiens
ggaggctgaccatgc

SEQ ID NO: 1789774 - DNA, 15 bp, Homo sapiens
gaggctgaccatgcc

SEQ ID NO: 1789775 - DNA, 15 bp, Homo sapiens
aggctgaccatgcct

SEQ ID NO: 1789776 - DNA, 15 bp, Homo sapiens
ggctgaccatgccta

SEQ ID NO: 1789777 - DNA, 15 bp, Homo sapiens
gctgaccatgcctac

SEQ ID NO: 1789778 - DNA, 15 bp, Homo sapiens
ctgaccatgcctaca

SEQ ID NO: 1789779 - DNA, 15 bp, Homo sapiens
tgaccatgcctacat

SEQ ID NO: 1789780 - DNA, 15 bp, Homo sapiens
gaccatgcctacatt

SEQ ID NO: 1789781 - DNA, 15 bp, Homo sapiens
accatgcctacattt

SEQ ID NO: 1789782 - DNA, 15 bp, Homo sapiens
ccatgcctacatttg

SEQ ID NO: 1789783 - DNA, 15 bp, Homo sapiens
catgcctacatttgg

SEQ ID NO: 1789784 - DNA, 15 bp, Homo sapiens
atgcctacatttggt

SEQ ID NO: 1789785 - DNA, 15 bp, Homo sapiens
tgcctacatttggtc

SEQ ID NO: 1789786 - DNA, 15 bp, Homo sapiens
gcctacatttggtca

SEQ ID NO: 1789787 - DNA, 15 bp, Homo sapiens
cctacatttggtcat

SEQ ID NO: 1789788 - DNA, 15 bp, Homo sapiens
ctacatttggtcata

SEQ ID NO: 1789789 - DNA, 15 bp, Homo sapiens
tacatttggtcatag

SEQ ID NO: 1789790 - DNA, 15 bp, Homo sapiens
acatttggtcataga

SEQ ID NO: 1789791 - DNA, 15 bp, Homo sapiens
catttggtcatagac

SEQ ID NO: 1789792 - DNA, 15 bp, Homo sapiens
atttggtcatagact

SEQ ID NO: 1789793 - DNA, 15 bp, Homo sapiens
tttggtcatagactt

SEQ ID NO: 1789794 - DNA, 15 bp, Homo sapiens
ttggtcatagacttc

SEQ ID NO: 1789795 - DNA, 15 bp, Homo sapiens
tggtcatagacttca

SEQ ID NO: 1789796 - DNA, 15 bp, Homo sapiens
ggtcatagacttcaa

SEQ ID NO: 1789797 - DNA, 15 bp, Homo sapiens
gtcatagacttcaat

SEQ ID NO: 1789798 - DNA, 15 bp, Homo sapiens
tcatagacttcaatg

SEQ ID NO: 1789799 - DNA, 15 bp, Homo sapiens
catagacttcaatgg

SEQ ID NO: 1789800 - DNA, 15 bp, Homo sapiens
atagacttcaatgga

SEQ ID NO: 1789801 - DNA, 15 bp, Homo sapiens
tagacttcaatggag

SEQ ID NO: 1789802 - DNA, 15 bp, Homo sapiens
agacttcaatggagt

SEQ ID NO: 1789803 - DNA, 15 bp, Homo sapiens
gacttcaatggagtc

SEQ ID NO: 1789804 - DNA, 15 bp, Homo sapiens
acttcaatggagtcc

SEQ ID NO: 1789805 - DNA, 15 bp, Homo sapiens
cttcaatggagtccc

SEQ ID NO: 1789806 - DNA, 15 bp, Homo sapiens
ttcaatggagtcccc

SEQ ID NO: 1789807 - DNA, 15 bp, Homo sapiens
tcaatggagtcccca

SEQ ID NO: 1789808 - DNA, 15 bp, Homo sapiens
caatggagtccccat

SEQ ID NO: 1789809 - DNA, 15 bp, Homo sapiens
aatggagtccccatc

SEQ ID NO: 1789810 - DNA, 15 bp, Homo sapiens
atggagtccccatct

SEQ ID NO: 1789811 - DNA, 15 bp, Homo sapiens
tggagtccccatctc

SEQ ID NO: 1789812 - DNA, 15 bp, Homo sapiens
ggagtccccatctcc

SEQ ID NO: 1789813 - DNA, 15 bp, Homo sapiens
gagtccccatctcca

SEQ ID NO: 1789814 - DNA, 15 bp, Homo sapiens
agtccccatctccat

SEQ ID NO: 1789815 - DNA, 15 bp, Homo sapiens
gtccccatctccatt

SEQ ID NO: 1789816 - DNA, 15 bp, Homo sapiens
tccccatctccattg

SEQ ID NO: 1789817 - DNA, 15 bp, Homo sapiens
ccccatctccattga

SEQ ID NO: 1789818 - DNA, 15 bp, Homo sapiens
cccatctccattgaa

SEQ ID NO: 1789819 - DNA, 15 bp, Homo sapiens
ccatctccattgaag

SEQ ID NO: 1789820 - DNA, 15 bp, Homo sapiens
catctccattgaaga

SEQ ID NO: 1789821 - DNA, 15 bp, Homo sapiens
atctccattgaagag

SEQ ID NO: 1789822 - DNA, 15 bp, Homo sapiens
tctccattgaagaga

SEQ ID NO: 1789823 - DNA, 15 bp, Homo sapiens
ctccattgaagagaa

SEQ ID NO: 1789824 - DNA, 15 bp, Homo sapiens
tccattgaagagaat

SEQ ID NO: 1789825 - DNA, 15 bp, Homo sapiens
ccattgaagagaata

SEQ ID NO: 1789826 - DNA, 15 bp, Homo sapiens
cattgaagagaataa

SEQ ID NO: 1789827 - DNA, 15 bp, Homo sapiens
attgaagagaataac

SEQ ID NO: 1789828 - DNA, 15 bp, Homo sapiens
ttgaagagaataaca

SEQ ID NO: 1789829 - DNA, 15 bp, Homo sapiens
tgaagagaataacac

SEQ ID NO: 1789830 - DNA, 15 bp, Homo sapiens
gaagagaataacaca

SEQ ID NO: 1789831 - DNA, 15 bp, Homo sapiens
aagagaataacacaa

SEQ ID NO: 1789832 - DNA, 15 bp, Homo sapiens
agagaataacacaag

SEQ ID NO: 1789833 - DNA, 15 bp, Homo sapiens
gagaataacacaagt

SEQ ID NO: 1789834 - DNA, 15 bp, Homo sapiens
agaataacacaagta

SEQ ID NO: 1789835 - DNA, 15 bp, Homo sapiens
gaataacacaagtag

SEQ ID NO: 1789836 - DNA, 15 bp, Homo sapiens
aataacacaagtaga

SEQ ID NO: 1789837 - DNA, 15 bp, Homo sapiens
ataacacaagtagag

SEQ ID NO: 1789838 - DNA, 15 bp, Homo sapiens
taacacaagtagaga

SEQ ID NO: 1789839 - DNA, 15 bp, Homo sapiens
aacacaagtagagag

SEQ ID NO: 1789840 - DNA, 15 bp, Homo sapiens
acacaagtagagagt

SEQ ID NO: 1789841 - DNA, 15 bp, Homo sapiens
cacaagtagagagtg

SEQ ID NO: 1789842 - DNA, 15 bp, Homo sapiens
acaagtagagagtgg

SEQ ID NO: 1789843 - DNA, 15 bp, Homo sapiens
caagtagagagtggc

SEQ ID NO: 1789844 - DNA, 15 bp, Homo sapiens
aagtagagagtggca

SEQ ID NO: 1789845 - DNA, 15 bp, Homo sapiens
agtagagagtggcag

SEQ ID NO: 1789846 - DNA, 15 bp, Homo sapiens
gtagagagtggcagt

SEQ ID NO: 1789847 - DNA, 15 bp, Homo sapiens
tagagagtggcagtg

SEQ ID NO: 1789848 - DNA, 15 bp, Homo sapiens
agagagtggcagtga

SEQ ID NO: 1789849 - DNA, 15 bp, Homo sapiens
gagagtggcagtgaa

SEQ ID NO: 1789850 - DNA, 15 bp, Homo sapiens
agagtggcagtgaat

SEQ ID NO: 1789851 - DNA, 15 bp, Homo sapiens
gagtggcagtgaatg

SEQ ID NO: 1789852 - DNA, 15 bp, Homo sapiens
agtggcagtgaatgt

SEQ ID NO: 1789853 - DNA, 15 bp, Homo sapiens
gtggcagtgaatgtc

SEQ ID NO: 1789854 - DNA, 15 bp, Homo sapiens
tggcagtgaatgtca

SEQ ID NO: 1789855 - DNA, 15 bp, Homo sapiens
ggcagtgaatgtcaa

SEQ ID NO: 1789856 - DNA, 15 bp, Homo sapiens
gcagtgaatgtcaac

SEQ ID NO: 1789857 - DNA, 15 bp, Homo sapiens
cagtgaatgtcaaca

SEQ ID NO: 1789858 - DNA, 15 bp, Homo sapiens
agtgaatgtcaacaa

SEQ ID NO: 1789859 - DNA, 15 bp, Homo sapiens
gtgaatgtcaacaat

SEQ ID NO: 1789860 - DNA, 15 bp, Homo sapiens
tgaatgtcaacaatt

SEQ ID NO: 1789861 - DNA, 15 bp, Homo sapiens
gaatgtcaacaattt

SEQ ID NO: 1789862 - DNA, 15 bp, Homo sapiens
aatgtcaacaatttg

SEQ ID NO: 1789863 - DNA, 15 bp, Homo sapiens
atgtcaacaatttgc

SEQ ID NO: 1789864 - DNA, 15 bp, Homo sapiens
tgtcaacaatttgca

SEQ ID NO: 1789865 - DNA, 15 bp, Homo sapiens
gtcaacaatttgcaa

SEQ ID NO: 1789866 - DNA, 15 bp, Homo sapiens
tcaacaatttgcaag

SEQ ID NO: 1789867 - DNA, 15 bp, Homo sapiens
caacaatttgcaagc

SEQ ID NO: 1789868 - DNA, 15 bp, Homo sapiens
aacaatttgcaagca

SEQ ID NO: 1789869 - DNA, 15 bp, Homo sapiens
acaatttgcaagcaa

SEQ ID NO: 1789870 - DNA, 15 bp, Homo sapiens
caatttgcaagcaat

SEQ ID NO: 1789871 - DNA, 15 bp, Homo sapiens
aatttgcaagcaata

SEQ ID NO: 1789872 - DNA, 15 bp, Homo sapiens
atttgcaagcaatag

SEQ ID NO: 1789873 - DNA, 15 bp, Homo sapiens
tttgcaagcaatagc

SEQ ID NO: 1789874 - DNA, 15 bp, Homo sapiens
ttgcaagcaatagct

SEQ ID NO: 1789875 - DNA, 15 bp, Homo sapiens
tgcaagcaatagctc

SEQ ID NO: 1789876 - DNA, 15 bp, Homo sapiens
gcaagcaatagctca

SEQ ID NO: 1789877 - DNA, 15 bp, Homo sapiens
caagcaatagctcaa

SEQ ID NO: 1789878 - DNA, 15 bp, Homo sapiens
aagcaatagctcaat

SEQ ID NO: 1789879 - DNA, 15 bp, Homo sapiens
agcaatagctcaatc

SEQ ID NO: 1789880 - DNA, 15 bp, Homo sapiens
gcaatagctcaatca

SEQ ID NO: 1789881 - DNA, 15 bp, Homo sapiens
caatagctcaatcaa

SEQ ID NO: 1789882 - DNA, 15 bp, Homo sapiens
aatagctcaatcaag

SEQ ID NO: 1789883 - DNA, 15 bp, Homo sapiens
atagctcaatcaaga

SEQ ID NO: 1789884 - DNA, 15 bp, Homo sapiens
tagctcaatcaagag

SEQ ID NO: 1789885 - DNA, 15 bp, Homo sapiens
agctcaatcaagagg

SEQ ID NO: 1789886 - DNA, 15 bp, Homo sapiens
gctcaatcaagaggc

SEQ ID NO: 1789887 - DNA, 15 bp, Homo sapiens
ctcaatcaagaggct

SEQ ID NO: 1789888 - DNA, 15 bp, Homo sapiens
tcaatcaagaggctt

SEQ ID NO: 1789889 - DNA, 15 bp, Homo sapiens
caatcaagaggcttc

SEQ ID NO: 1789890 - DNA, 15 bp, Homo sapiens
aatcaagaggcttct

SEQ ID NO: 1789891 - DNA, 15 bp, Homo sapiens
atcaagaggcttctg

SEQ ID NO: 1789892 - DNA, 15 bp, Homo sapiens
tcaagaggcttctgt

SEQ ID NO: 1789893 - DNA, 15 bp, Homo sapiens
caagaggcttctgtg

SEQ ID NO: 1789894 - DNA, 15 bp, Homo sapiens
aagaggcttctgtgg

SEQ ID NO: 1789895 - DNA, 15 bp, Homo sapiens
agaggcttctgtgga

SEQ ID NO: 1789896 - DNA, 15 bp, Homo sapiens
gaggcttctgtggag

SEQ ID NO: 1789897 - DNA, 15 bp, Homo sapiens
aggcttctgtggagc

SEQ ID NO: 1789898 - DNA, 15 bp, Homo sapiens
ggcttctgtggagcc

SEQ ID NO: 1789899 - DNA, 15 bp, Homo sapiens
gcttctgtggagcca

SEQ ID NO: 1789900 - DNA, 15 bp, Homo sapiens
cttctgtggagccaa

SEQ ID NO: 1789901 - DNA, 15 bp, Homo sapiens
ttctgtggagccaat

SEQ ID NO: 1789902 - DNA, 15 bp, Homo sapiens
tctgtggagccaatt

SEQ ID NO: 1789903 - DNA, 15 bp, Homo sapiens
ctgtggagccaattt

SEQ ID NO: 1789904 - DNA, 15 bp, Homo sapiens
tgtggagccaatttg

SEQ ID NO: 1789905 - DNA, 15 bp, Homo sapiens
gtggagccaatttgt

SEQ ID NO: 1789906 - DNA, 15 bp, Homo sapiens
tggagccaatttgtc

SEQ ID NO: 1789907 - DNA, 15 bp, Homo sapiens
ggagccaatttgtca

SEQ ID NO: 1789908 - DNA, 15 bp, Homo sapiens
gagccaatttgtcag

SEQ ID NO: 1789909 - DNA, 15 bp, Homo sapiens
agccaatttgtcaga

SEQ ID NO: 1789910 - DNA, 15 bp, Homo sapiens
gccaatttgtcagaa

SEQ ID NO: 1789911 - DNA, 15 bp, Homo sapiens
ccaatttgtcagaag

SEQ ID NO: 1789912 - DNA, 15 bp, Homo sapiens
caatttgtcagaagc

SEQ ID NO: 1789913 - DNA, 15 bp, Homo sapiens
aatttgtcagaagct

SEQ ID NO: 1789914 - DNA, 15 bp, Homo sapiens
atttgtcagaagctt

SEQ ID NO: 1789915 - DNA, 15 bp, Homo sapiens
tttgtcagaagcttt

SEQ ID NO: 1789916 - DNA, 15 bp, Homo sapiens
ttgtcagaagctttt

SEQ ID NO: 1789917 - DNA, 15 bp, Homo sapiens
tgtcagaagctttta

SEQ ID NO: 1789918 - DNA, 15 bp, Homo sapiens
gtcagaagcttttaa

SEQ ID NO: 1789919 - DNA, 15 bp, Homo sapiens
tcagaagcttttaac

SEQ ID NO: 1789920 - DNA, 15 bp, Homo sapiens
cagaagcttttaacc

SEQ ID NO: 1789921 - DNA, 15 bp, Homo sapiens
agaagcttttaacct

SEQ ID NO: 1789922 - DNA, 15 bp, Homo sapiens
gaagcttttaacctt

SEQ ID NO: 1789923 - DNA, 15 bp, Homo sapiens
aagcttttaacctta

SEQ ID NO: 1789924 - DNA, 15 bp, Homo sapiens
agcttttaaccttaa

SEQ ID NO: 1789925 - DNA, 15 bp, Homo sapiens
gcttttaaccttaaa

SEQ ID NO: 1789926 - DNA, 15 bp, Homo sapiens
cttttaaccttaaaa

SEQ ID NO: 1789927 - DNA, 15 bp, Homo sapiens
ttttaaccttaaaat

SEQ ID NO: 1789928 - DNA, 15 bp, Homo sapiens
tttaaccttaaaatg

SEQ ID NO: 1789929 - DNA, 15 bp, Homo sapiens
ttaaccttaaaatgt

SEQ ID NO: 1789930 - DNA, 15 bp, Homo sapiens
taaccttaaaatgta

SEQ ID NO: 1789931 - DNA, 15 bp, Homo sapiens
aaccttaaaatgtag

SEQ ID NO: 1789932 - DNA, 15 bp, Homo sapiens
accttaaaatgtaga

SEQ ID NO: 1789933 - DNA, 15 bp, Homo sapiens
ccttaaaatgtagat

SEQ ID NO: 1789934 - DNA, 15 bp, Homo sapiens
cttaaaatgtagatg

SEQ ID NO: 1789935 - DNA, 15 bp, Homo sapiens
ttaaaatgtagatgg

SEQ ID NO: 1789936 - DNA, 15 bp, Homo sapiens
taaaatgtagatggt

SEQ ID NO: 1789937 - DNA, 15 bp, Homo sapiens
aaaatgtagatggta

SEQ ID NO: 1789938 - DNA, 15 bp, Homo sapiens
aaatgtagatggtaa

SEQ ID NO: 1789939 - DNA, 15 bp, Homo sapiens
aatgtagatggtaat

SEQ ID NO: 1789940 - DNA, 15 bp, Homo sapiens
atgtagatggtaatc

SEQ ID NO: 1789941 - DNA, 15 bp, Homo sapiens
tgtagatggtaatcc

SEQ ID NO: 1789942 - DNA, 15 bp, Homo sapiens
gtagatggtaatcca

SEQ ID NO: 1789943 - DNA, 15 bp, Homo sapiens
tagatggtaatccag

SEQ ID NO: 1789944 - DNA, 15 bp, Homo sapiens
agatggtaatccagt

SEQ ID NO: 1789945 - DNA, 15 bp, Homo sapiens
gatggtaatccagtg

SEQ ID NO: 1789946 - DNA, 15 bp, Homo sapiens
atggtaatccagtgt

SEQ ID NO: 1789947 - DNA, 15 bp, Homo sapiens
tggtaatccagtgta

SEQ ID NO: 1789948 - DNA, 15 bp, Homo sapiens
ggtaatccagtgtag

SEQ ID NO: 1789949 - DNA, 15 bp, Homo sapiens
gtaatccagtgtagc

SEQ ID NO: 1789950 - DNA, 15 bp, Homo sapiens
taatccagtgtagca

SEQ ID NO: 1789951 - DNA, 15 bp, Homo sapiens
aatccagtgtagcag

SEQ ID NO: 1789952 - DNA, 15 bp, Homo sapiens
atccagtgtagcaga

SEQ ID NO: 1789953 - DNA, 15 bp, Homo sapiens
tccagtgtagcagac

SEQ ID NO: 1789954 - DNA, 15 bp, Homo sapiens
ccagtgtagcagaca

SEQ ID NO: 1789955 - DNA, 15 bp, Homo sapiens
cagtgtagcagacac

SEQ ID NO: 1789956 - DNA, 15 bp, Homo sapiens
agtgtagcagacact

SEQ ID NO: 1789957 - DNA, 15 bp, Homo sapiens
gtgtagcagacactg

SEQ ID NO: 1789958 - DNA, 15 bp, Homo sapiens
tgtagcagacactgt

SEQ ID NO: 1789959 - DNA, 15 bp, Homo sapiens
gtagcagacactgtg

SEQ ID NO: 1789960 - DNA, 15 bp, Homo sapiens
tagcagacactgtgg

SEQ ID NO: 1789961 - DNA, 15 bp, Homo sapiens
agcagacactgtggt

SEQ ID NO: 1789962 - DNA, 15 bp, Homo sapiens
gcagacactgtggtg

SEQ ID NO: 1789963 - DNA, 15 bp, Homo sapiens
cagacactgtggtgt

SEQ ID NO: 1789964 - DNA, 15 bp, Homo sapiens
agacactgtggtgtg

SEQ ID NO: 1789965 - DNA, 15 bp, Homo sapiens
gacactgtggtgtgc

SEQ ID NO: 1789966 - DNA, 15 bp, Homo sapiens
acactgtggtgtgcc

SEQ ID NO: 1789967 - DNA, 15 bp, Homo sapiens
cactgtggtgtgcca

SEQ ID NO: 1789968 - DNA, 15 bp, Homo sapiens
actgtggtgtgccac

SEQ ID NO: 1789969 - DNA, 15 bp, Homo sapiens
ctgtggtgtgccaca

SEQ ID NO: 1789970 - DNA, 15 bp, Homo sapiens
tgtggtgtgccacac

SEQ ID NO: 1789971 - DNA, 15 bp, Homo sapiens
gtggtgtgccacaca

SEQ ID NO: 1789972 - DNA, 15 bp, Homo sapiens
tggtgtgccacacag

SEQ ID NO: 1789973 - DNA, 15 bp, Homo sapiens
ggtgtgccacacaga

SEQ ID NO: 1789974 - DNA, 15 bp, Homo sapiens
gtgtgccacacagaa

SEQ ID NO: 1789975 - DNA, 15 bp, Homo sapiens
tgtgccacacagaac

SEQ ID NO: 1789976 - DNA, 15 bp, Homo sapiens
gtgccacacagaacc

SEQ ID NO: 1789977 - DNA, 15 bp, Homo sapiens
tgccacacagaaccc

SEQ ID NO: 1789978 - DNA, 15 bp, Homo sapiens
gccacacagaacccc

SEQ ID NO: 1789979 - DNA, 15 bp, Homo sapiens
ccacacagaacccct

SEQ ID NO: 1789980 - DNA, 15 bp, Homo sapiens
cacacagaacccctc

SEQ ID NO: 1789981 - DNA, 15 bp, Homo sapiens
acacagaacccctct

SEQ ID NO: 1789982 - DNA, 15 bp, Homo sapiens
cacagaacccctctt

SEQ ID NO: 1789983 - DNA, 15 bp, Homo sapiens
acagaacccctcttc

SEQ ID NO: 1789984 - DNA, 15 bp, Homo sapiens
cagaacccctcttca

SEQ ID NO: 1789985 - DNA, 15 bp, Homo sapiens
agaacccctcttcag

SEQ ID NO: 1789986 - DNA, 15 bp, Homo sapiens
gaacccctcttcagg

SEQ ID NO: 1789987 - DNA, 15 bp, Homo sapiens
aacccctcttcaggg

SEQ ID NO: 1789988 - DNA, 15 bp, Homo sapiens
acccctcttcagggc

SEQ ID NO: 1789989 - DNA, 15 bp, Homo sapiens
cccctcttcagggcc

SEQ ID NO: 1789990 - DNA, 15 bp, Homo sapiens
ccctcttcagggcca

SEQ ID NO: 1789991 - DNA, 15 bp, Homo sapiens
cctcttcagggccaa

SEQ ID NO: 1789992 - DNA, 15 bp, Homo sapiens
ctcttcagggccaat

SEQ ID NO: 1789993 - DNA, 15 bp, Homo sapiens
tcttcagggccaatg

SEQ ID NO: 1789994 - DNA, 15 bp, Homo sapiens
cttcagggccaatgc

SEQ ID NO: 1789995 - DNA, 15 bp, Homo sapiens
ttcagggccaatgca

SEQ ID NO: 1789996 - DNA, 15 bp, Homo sapiens
tcagggccaatgcag

SEQ ID NO: 1789997 - DNA, 15 bp, Homo sapiens
cagggccaatgcagc

SEQ ID NO: 1789998 - DNA, 15 bp, Homo sapiens
agggccaatgcagcc

SEQ ID NO: 1789999 - DNA, 15 bp, Homo sapiens
gggccaatgcagcca

SEQ ID NO: 1790000 - DNA, 15 bp, Homo sapiens
ggccaatgcagccat

SEQ ID NO: 1790001 - DNA, 15 bp, Homo sapiens
gccaatgcagccatc

SEQ ID NO: 1790002 - DNA, 15 bp, Homo sapiens
ccaatgcagccatcc

SEQ ID NO: 1790003 - DNA, 15 bp, Homo sapiens
caatgcagccatccc

SEQ ID NO: 1790004 - DNA, 15 bp, Homo sapiens
aatgcagccatcccc

SEQ ID NO: 1790005 - DNA, 15 bp, Homo sapiens
atgcagccatccccc

SEQ ID NO: 1790006 - DNA, 15 bp, Homo sapiens
tgcagccatccccca

SEQ ID NO: 1790007 - DNA, 15 bp, Homo sapiens
gcagccatcccccag

SEQ ID NO: 1790008 - DNA, 15 bp, Homo sapiens
cagccatcccccagc

SEQ ID NO: 1790009 - DNA, 15 bp, Homo sapiens
agccatcccccagct

SEQ ID NO: 1790010 - DNA, 15 bp, Homo sapiens
gccatcccccagctg

SEQ ID NO: 1790011 - DNA, 15 bp, Homo sapiens
ccatcccccagctgc

SEQ ID NO: 1790012 - DNA, 15 bp, Homo sapiens
catcccccagctgct

SEQ ID NO: 1790013 - DNA, 15 bp, Homo sapiens
atcccccagctgctg

SEQ ID NO: 1790014 - DNA, 15 bp, Homo sapiens
tcccccagctgctga

SEQ ID NO: 1790015 - DNA, 15 bp, Homo sapiens
cccccagctgctgag

SEQ ID NO: 1790016 - DNA, 15 bp, Homo sapiens
ccccagctgctgaga

SEQ ID NO: 1790017 - DNA, 15 bp, Homo sapiens
cccagctgctgagaa

SEQ ID NO: 1790018 - DNA, 15 bp, Homo sapiens
ccagctgctgagaac

SEQ ID NO: 1790019 - DNA, 15 bp, Homo sapiens
cagctgctgagaacg

SEQ ID NO: 1790020 - DNA, 15 bp, Homo sapiens
agctgctgagaacgt

SEQ ID NO: 1790021 - DNA, 15 bp, Homo sapiens
gctgctgagaacgtc

SEQ ID NO: 1790022 - DNA, 15 bp, Homo sapiens
ctgctgagaacgtca

SEQ ID NO: 1790023 - DNA, 15 bp, Homo sapiens
tgctgagaacgtcag

SEQ ID NO: 1790024 - DNA, 15 bp, Homo sapiens
gctgagaacgtcagc

SEQ ID NO: 1790025 - DNA, 15 bp, Homo sapiens
ctgagaacgtcagct

SEQ ID NO: 1790026 - DNA, 15 bp, Homo sapiens
tgagaacgtcagctg

SEQ ID NO: 1790027 - DNA, 15 bp, Homo sapiens
gagaacgtcagctgc

SEQ ID NO: 1790028 - DNA, 15 bp, Homo sapiens
agaacgtcagctgca

SEQ ID NO: 1790029 - DNA, 15 bp, Homo sapiens
gaacgtcagctgcag

SEQ ID NO: 1790030 - DNA, 15 bp, Homo sapiens
aacgtcagctgcaga

SEQ ID NO: 1790031 - DNA, 15 bp, Homo sapiens
acgtcagctgcagaa

SEQ ID NO: 1790032 - DNA, 15 bp, Homo sapiens
cgtcagctgcagaag

SEQ ID NO: 1790033 - DNA, 15 bp, Homo sapiens
gtcagctgcagaaga

SEQ ID NO: 1790034 - DNA, 15 bp, Homo sapiens
tcagctgcagaagat

SEQ ID NO: 1790035 - DNA, 15 bp, Homo sapiens
cagctgcagaagatt

SEQ ID NO: 1790036 - DNA, 15 bp, Homo sapiens
agctgcagaagattc

SEQ ID NO: 1790037 - DNA, 15 bp, Homo sapiens
gctgcagaagattca

SEQ ID NO: 1790038 - DNA, 15 bp, Homo sapiens
ctgcagaagattcac

SEQ ID NO: 1790039 - DNA, 15 bp, Homo sapiens
tgcagaagattcacc

SEQ ID NO: 1790040 - DNA, 15 bp, Homo sapiens
gcagaagattcacca

SEQ ID NO: 1790041 - DNA, 15 bp, Homo sapiens
cagaagattcaccac

SEQ ID NO: 1790042 - DNA, 15 bp, Homo sapiens
agaagattcaccaca

SEQ ID NO: 1790043 - DNA, 15 bp, Homo sapiens
gaagattcaccacag

SEQ ID NO: 1790044 - DNA, 15 bp, Homo sapiens
aagattcaccacagg

SEQ ID NO: 1790045 - DNA, 15 bp, Homo sapiens
agattcaccacaggg

SEQ ID NO: 1790046 - DNA, 15 bp, Homo sapiens
gattcaccacaggga

SEQ ID NO: 1790047 - DNA, 15 bp, Homo sapiens
attcaccacagggac

SEQ ID NO: 1790048 - DNA, 15 bp, Homo sapiens
ttcaccacagggacc

SEQ ID NO: 1790049 - DNA, 15 bp, Homo sapiens
tcaccacagggaccc

SEQ ID NO: 1790050 - DNA, 15 bp, Homo sapiens
caccacagggaccct

SEQ ID NO: 1790051 - DNA, 15 bp, Homo sapiens
accacagggaccctc

SEQ ID NO: 1790052 - DNA, 15 bp, Homo sapiens
ccacagggaccctcc

SEQ ID NO: 1790053 - DNA, 15 bp, Homo sapiens
cacagggaccctccc

SEQ ID NO: 1790054 - DNA, 15 bp, Homo sapiens
acagggaccctccca

SEQ ID NO: 1790055 - DNA, 15 bp, Homo sapiens
cagggaccctcccag

SEQ ID NO: 1790056 - DNA, 15 bp, Homo sapiens
agggaccctcccagg

SEQ ID NO: 1790057 - DNA, 15 bp, Homo sapiens
gggaccctcccaggg

SEQ ID NO: 1790058 - DNA, 15 bp, Homo sapiens
ggaccctcccaggga

SEQ ID NO: 1790059 - DNA, 15 bp, Homo sapiens
gaccctcccagggaa

SEQ ID NO: 1790060 - DNA, 15 bp, Homo sapiens
accctcccagggaat

SEQ ID NO: 1790061 - DNA, 15 bp, Homo sapiens
ccctcccagggaatt

SEQ ID NO: 1790062 - DNA, 15 bp, Homo sapiens
cctcccagggaattg

SEQ ID NO: 1790063 - DNA, 15 bp, Homo sapiens
ctcccagggaattgc

SEQ ID NO: 1790064 - DNA, 15 bp, Homo sapiens
tcccagggaattgcc

SEQ ID NO: 1790065 - DNA, 15 bp, Homo sapiens
cccagggaattgccc

SEQ ID NO: 1790066 - DNA, 15 bp, Homo sapiens
ccagggaattgccct

SEQ ID NO: 1790067 - DNA, 15 bp, Homo sapiens
cagggaattgccctc

SEQ ID NO: 1790068 - DNA, 15 bp, Homo sapiens
agggaattgccctcg

SEQ ID NO: 1790069 - DNA, 15 bp, Homo sapiens
gggaattgccctcgg

SEQ ID NO: 1790070 - DNA, 15 bp, Homo sapiens
ggaattgccctcggc

SEQ ID NO: 1790071 - DNA, 15 bp, Homo sapiens
gaattgccctcggcc

SEQ ID NO: 1790072 - DNA, 15 bp, Homo sapiens
aattgccctcggcca

SEQ ID NO: 1790073 - DNA, 15 bp, Homo sapiens
attgccctcggccac

SEQ ID NO: 1790074 - DNA, 15 bp, Homo sapiens
ttgccctcggccaca

SEQ ID NO: 1790075 - DNA, 15 bp, Homo sapiens
tgccctcggccacaa

SEQ ID NO: 1790076 - DNA, 15 bp, Homo sapiens
gccctcggccacaag

SEQ ID NO: 1790077 - DNA, 15 bp, Homo sapiens
ccctcggccacaagg

SEQ ID NO: 1790078 - DNA, 15 bp, Homo sapiens
cctcggccacaagga

SEQ ID NO: 1790079 - DNA, 15 bp, Homo sapiens
ctcggccacaaggag

SEQ ID NO: 1790080 - DNA, 15 bp, Homo sapiens
tcggccacaaggagc

SEQ ID NO: 1790081 - DNA, 15 bp, Homo sapiens
cggccacaaggagct

SEQ ID NO: 1790082 - DNA, 15 bp, Homo sapiens
ggccacaaggagctg

SEQ ID NO: 1790083 - DNA, 15 bp, Homo sapiens
gccacaaggagctgt

SEQ ID NO: 1790084 - DNA, 15 bp, Homo sapiens
ccacaaggagctgtc

SEQ ID NO: 1790085 - DNA, 15 bp, Homo sapiens
cacaaggagctgtct

SEQ ID NO: 1790086 - DNA, 15 bp, Homo sapiens
acaaggagctgtctc

SEQ ID NO: 1790087 - DNA, 15 bp, Homo sapiens
caaggagctgtctca

SEQ ID NO: 1790088 - DNA, 15 bp, Homo sapiens
aaggagctgtctcac

SEQ ID NO: 1790089 - DNA, 15 bp, Homo sapiens
aggagctgtctcacc

SEQ ID NO: 1790090 - DNA, 15 bp, Homo sapiens
ggagctgtctcacca

SEQ ID NO: 1790091 - DNA, 15 bp, Homo sapiens
gagctgtctcaccaa

SEQ ID NO: 1790092 - DNA, 15 bp, Homo sapiens
agctgtctcaccaaa

SEQ ID NO: 1790093 - DNA, 15 bp, Homo sapiens
gctgtctcaccaaag

SEQ ID NO: 1790094 - DNA, 15 bp, Homo sapiens
ctgtctcaccaaagg

SEQ ID NO: 1790095 - DNA, 15 bp, Homo sapiens
tgtctcaccaaaggc

SEQ ID NO: 1790096 - DNA, 15 bp, Homo sapiens
gtctcaccaaaggct

SEQ ID NO: 1790097 - DNA, 15 bp, Homo sapiens
tctcaccaaaggcta

SEQ ID NO: 1790098 - DNA, 15 bp, Homo sapiens
ctcaccaaaggctag

SEQ ID NO: 1790099 - DNA, 15 bp, Homo sapiens
tcaccaaaggctaga

SEQ ID NO: 1790100 - DNA, 15 bp, Homo sapiens
caccaaaggctagac

SEQ ID NO: 1790101 - DNA, 15 bp, Homo sapiens
accaaaggctagact

SEQ ID NO: 1790102 - DNA, 15 bp, Homo sapiens
ccaaaggctagactc

SEQ ID NO: 1790103 - DNA, 15 bp, Homo sapiens
caaaggctagactct

SEQ ID NO: 1790104 - DNA, 15 bp, Homo sapiens
aaaggctagactctc

SEQ ID NO: 1790105 - DNA, 15 bp, Homo sapiens
aaggctagactctct

SEQ ID NO: 1790106 - DNA, 15 bp, Homo sapiens
aggctagactctctg

SEQ ID NO: 1790107 - DNA, 15 bp, Homo sapiens
ggctagactctctgg

SEQ ID NO: 1790108 - DNA, 15 bp, Homo sapiens
gctagactctctggg

SEQ ID NO: 1790109 - DNA, 15 bp, Homo sapiens
ctagactctctgggg

SEQ ID NO: 1790110 - DNA, 15 bp, Homo sapiens
tagactctctggggc

SEQ ID NO: 1790111 - DNA, 15 bp, Homo sapiens
agactctctggggca

SEQ ID NO: 1790112 - DNA, 15 bp, Homo sapiens
gactctctggggcaa

SEQ ID NO: 1790113 - DNA, 15 bp, Homo sapiens
actctctggggcaat

SEQ ID NO: 1790114 - DNA, 15 bp, Homo sapiens
ctctctggggcaatg

SEQ ID NO: 1790115 - DNA, 15 bp, Homo sapiens
tctctggggcaatga

SEQ ID NO: 1790116 - DNA, 15 bp, Homo sapiens
ctctggggcaatgac

SEQ ID NO: 1790117 - DNA, 15 bp, Homo sapiens
tctggggcaatgact

SEQ ID NO: 1790118 - DNA, 15 bp, Homo sapiens
ctggggcaatgactg

SEQ ID NO: 1790119 - DNA, 15 bp, Homo sapiens
tggggcaatgactgg

SEQ ID NO: 1790120 - DNA, 15 bp, Homo sapiens
ggggcaatgactggc

SEQ ID NO: 1790121 - DNA, 15 bp, Homo sapiens
gggcaatgactggct

SEQ ID NO: 1790122 - DNA, 15 bp, Homo sapiens
ggcaatgactggctg

SEQ ID NO: 1790123 - DNA, 15 bp, Homo sapiens
gcaatgactggctga

SEQ ID NO: 1790124 - DNA, 15 bp, Homo sapiens
caatgactggctgat

SEQ ID NO: 1790125 - DNA, 15 bp, Homo sapiens
aatgactggctgatg

SEQ ID NO: 1790126 - DNA, 15 bp, Homo sapiens
atgactggctgatgc

SEQ ID NO: 1790127 - DNA, 15 bp, Homo sapiens
tgactggctgatgca

SEQ ID NO: 1790128 - DNA, 15 bp, Homo sapiens
gactggctgatgcag

SEQ ID NO: 1790129 - DNA, 15 bp, Homo sapiens
actggctgatgcagg

SEQ ID NO: 1790130 - DNA, 15 bp, Homo sapiens
ctggctgatgcaggg

SEQ ID NO: 1790131 - DNA, 15 bp, Homo sapiens
tggctgatgcagggg

SEQ ID NO: 1790132 - DNA, 15 bp, Homo sapiens
ggctgatgcaggggc

SEQ ID NO: 1790133 - DNA, 15 bp, Homo sapiens
gctgatgcaggggca

SEQ ID NO: 1790134 - DNA, 15 bp, Homo sapiens
ctgatgcaggggcac

SEQ ID NO: 1790135 - DNA, 15 bp, Homo sapiens
tgatgcaggggcaca

SEQ ID NO: 1790136 - DNA, 15 bp, Homo sapiens
gatgcaggggcacaa

SEQ ID NO: 1790137 - DNA, 15 bp, Homo sapiens
atgcaggggcacaaa

SEQ ID NO: 1790138 - DNA, 15 bp, Homo sapiens
tgcaggggcacaaac

SEQ ID NO: 1790139 - DNA, 15 bp, Homo sapiens
gcaggggcacaaaca

SEQ ID NO: 1790140 - DNA, 15 bp, Homo sapiens
caggggcacaaacac

SEQ ID NO: 1790141 - DNA, 15 bp, Homo sapiens
aggggcacaaacacc

SEQ ID NO: 1790142 - DNA, 15 bp, Homo sapiens
ggggcacaaacaccg

SEQ ID NO: 1790143 - DNA, 15 bp, Homo sapiens
gggcacaaacaccga

SEQ ID NO: 1790144 - DNA, 15 bp, Homo sapiens
ggcacaaacaccgac

SEQ ID NO: 1790145 - DNA, 15 bp, Homo sapiens
gcacaaacaccgact

SEQ ID NO: 1790146 - DNA, 15 bp, Homo sapiens
cacaaacaccgactg

SEQ ID NO: 1790147 - DNA, 15 bp, Homo sapiens
acaaacaccgactgt

SEQ ID NO: 1790148 - DNA, 15 bp, Homo sapiens
caaacaccgactgta

SEQ ID NO: 1790149 - DNA, 15 bp, Homo sapiens
aaacaccgactgtag

SEQ ID NO: 1790150 - DNA, 15 bp, Homo sapiens
aacaccgactgtagg

SEQ ID NO: 1790151 - DNA, 15 bp, Homo sapiens
acaccgactgtaggc

SEQ ID NO: 1790152 - DNA, 15 bp, Homo sapiens
caccgactgtaggct

SEQ ID NO: 1790153 - DNA, 15 bp, Homo sapiens
accgactgtaggctc

SEQ ID NO: 1790154 - DNA, 15 bp, Homo sapiens
ccgactgtaggctca

SEQ ID NO: 1790155 - DNA, 15 bp, Homo sapiens
cgactgtaggctcaa

SEQ ID NO: 1790156 - DNA, 15 bp, Homo sapiens
gactgtaggctcaaa

SEQ ID NO: 1790157 - DNA, 15 bp, Homo sapiens
actgtaggctcaaat

SEQ ID NO: 1790158 - DNA, 15 bp, Homo sapiens
ctgtaggctcaaatg

SEQ ID NO: 1790159 - DNA, 15 bp, Homo sapiens
tgtaggctcaaatgc

SEQ ID NO: 1790160 - DNA, 15 bp, Homo sapiens
gtaggctcaaatgca

SEQ ID NO: 1790161 - DNA, 15 bp, Homo sapiens
taggctcaaatgcag

SEQ ID NO: 1790162 - DNA, 15 bp, Homo sapiens
aggctcaaatgcagc

SEQ ID NO: 1790163 - DNA, 15 bp, Homo sapiens
ggctcaaatgcagct

SEQ ID NO: 1790164 - DNA, 15 bp, Homo sapiens
gctcaaatgcagcta

SEQ ID NO: 1790165 - DNA, 15 bp, Homo sapiens
ctcaaatgcagctac

SEQ ID NO: 1790166 - DNA, 15 bp, Homo sapiens
tcaaatgcagctacc

SEQ ID NO: 1790167 - DNA, 15 bp, Homo sapiens
caaatgcagctaccc

SEQ ID NO: 1790168 - DNA, 15 bp, Homo sapiens
aaatgcagctaccct

SEQ ID NO: 1790169 - DNA, 15 bp, Homo sapiens
aatgcagctaccctg

SEQ ID NO: 1790170 - DNA, 15 bp, Homo sapiens
atgcagctaccctgg

SEQ ID NO: 1790171 - DNA, 15 bp, Homo sapiens
tgcagctaccctggg

SEQ ID NO: 1790172 - DNA, 15 bp, Homo sapiens
gcagctaccctggga

SEQ ID NO: 1790173 - DNA, 15 bp, Homo sapiens
cagctaccctgggaa

SEQ ID NO: 1790174 - DNA, 15 bp, Homo sapiens
agctaccctgggaaa

SEQ ID NO: 1790175 - DNA, 15 bp, Homo sapiens
gctaccctgggaaag

SEQ ID NO: 1790176 - DNA, 15 bp, Homo sapiens
ctaccctgggaaaga

SEQ ID NO: 1790177 - DNA, 15 bp, Homo sapiens
taccctgggaaagag

SEQ ID NO: 1790178 - DNA, 15 bp, Homo sapiens
accctgggaaagagg

SEQ ID NO: 1790179 - DNA, 15 bp, Homo sapiens
ccctgggaaagagga

SEQ ID NO: 1790180 - DNA, 15 bp, Homo sapiens
cctgggaaagaggag

SEQ ID NO: 1790181 - DNA, 15 bp, Homo sapiens
ctgggaaagaggagg

SEQ ID NO: 1790182 - DNA, 15 bp, Homo sapiens
tgggaaagaggagga

SEQ ID NO: 1790183 - DNA, 15 bp, Homo sapiens
gggaaagaggaggag

SEQ ID NO: 1790184 - DNA, 15 bp, Homo sapiens
ggaaagaggaggaga

SEQ ID NO: 1790185 - DNA, 15 bp, Homo sapiens
gaaagaggaggagaa

SEQ ID NO: 1790186 - DNA, 15 bp, Homo sapiens
aaagaggaggagaag

SEQ ID NO: 1790187 - DNA, 15 bp, Homo sapiens
aagaggaggagaagg

SEQ ID NO: 1790188 - DNA, 15 bp, Homo sapiens
agaggaggagaagga

SEQ ID NO: 1790189 - DNA, 15 bp, Homo sapiens
gaggaggagaaggat

SEQ ID NO: 1790190 - DNA, 15 bp, Homo sapiens
aggaggagaaggatg

SEQ ID NO: 1790191 - DNA, 15 bp, Homo sapiens
ggaggagaaggatga

SEQ ID NO: 1790192 - DNA, 15 bp, Homo sapiens
gaggagaaggatgat

SEQ ID NO: 1790193 - DNA, 15 bp, Homo sapiens
aggagaaggatgatg

SEQ ID NO: 1790194 - DNA, 15 bp, Homo sapiens
ggagaaggatgatgt

SEQ ID NO: 1790195 - DNA, 15 bp, Homo sapiens
gagaaggatgatgtg

SEQ ID NO: 1790196 - DNA, 15 bp, Homo sapiens
agaaggatgatgtgg

SEQ ID NO: 1790197 - DNA, 15 bp, Homo sapiens
gaaggatgatgtgga

SEQ ID NO: 1790198 - DNA, 15 bp, Homo sapiens
aaggatgatgtggag

SEQ ID NO: 1790199 - DNA, 15 bp, Homo sapiens
aggatgatgtggaga

SEQ ID NO: 1790200 - DNA, 15 bp, Homo sapiens
ggatgatgtggagaa

SEQ ID NO: 1790201 - DNA, 15 bp, Homo sapiens
gatgatgtggagaac

SEQ ID NO: 1790202 - DNA, 15 bp, Homo sapiens
atgatgtggagaacg

SEQ ID NO: 1790203 - DNA, 15 bp, Homo sapiens
tgatgtggagaacgg

SEQ ID NO: 1790204 - DNA, 15 bp, Homo sapiens
gatgtggagaacggg

SEQ ID NO: 1790205 - DNA, 15 bp, Homo sapiens
atgtggagaacgggc

SEQ ID NO: 1790206 - DNA, 15 bp, Homo sapiens
tgtggagaacgggca

SEQ ID NO: 1790207 - DNA, 15 bp, Homo sapiens
gtggagaacgggcag

SEQ ID NO: 1790208 - DNA, 15 bp, Homo sapiens
tggagaacgggcagt

SEQ ID NO: 1790209 - DNA, 15 bp, Homo sapiens
ggagaacgggcagtg

SEQ ID NO: 1790210 - DNA, 15 bp, Homo sapiens
gagaacgggcagtgg

SEQ ID NO: 1790211 - DNA, 15 bp, Homo sapiens
agaacgggcagtgga

SEQ ID NO: 1790212 - DNA, 15 bp, Homo sapiens
gaacgggcagtggat

SEQ ID NO: 1790213 - DNA, 15 bp, Homo sapiens
aacgggcagtggatg

SEQ ID NO: 1790214 - DNA, 15 bp, Homo sapiens
acgggcagtggatga

SEQ ID NO: 1790215 - DNA, 15 bp, Homo sapiens
cgggcagtggatgac

SEQ ID NO: 1790216 - DNA, 15 bp, Homo sapiens
gggcagtggatgacc

SEQ ID NO: 1790217 - DNA, 15 bp, Homo sapiens
ggcagtggatgacct

SEQ ID NO: 1790218 - DNA, 15 bp, Homo sapiens
cagtggatgacctca

SEQ ID NO: 1790219 - DNA, 15 bp, Homo sapiens
agtggatgacctcag

SEQ ID NO: 1790220 - DNA, 15 bp, Homo sapiens
gtggatgacctcagt

SEQ ID NO: 1790221 - DNA, 15 bp, Homo sapiens
tggatgacctcagtg

SEQ ID NO: 1790222 - DNA, 15 bp, Homo sapiens
ggatgacctcagtgc

SEQ ID NO: 1790223 - DNA, 15 bp, Homo sapiens
gatgacctcagtgca

SEQ ID NO: 1790224 - DNA, 15 bp, Homo sapiens
atgacctcagtgcaa

SEQ ID NO: 1790225 - DNA, 15 bp, Homo sapiens
tgacctcagtgcaat

SEQ ID NO: 1790226 - DNA, 15 bp, Homo sapiens
gacctcagtgcaatt

SEQ ID NO: 1790227 - DNA, 15 bp, Homo sapiens
acctcagtgcaattt

SEQ ID NO: 1790228 - DNA, 15 bp, Homo sapiens
cctcagtgcaatttg

SEQ ID NO: 1790229 - DNA, 15 bp, Homo sapiens
ctcagtgcaatttgt

SEQ ID NO: 1790230 - DNA, 15 bp, Homo sapiens
tcagtgcaatttgta

SEQ ID NO: 1790231 - DNA, 15 bp, Homo sapiens
cagtgcaatttgtaa

SEQ ID NO: 1790232 - DNA, 15 bp, Homo sapiens
agtgcaatttgtaat

SEQ ID NO: 1790233 - DNA, 15 bp, Homo sapiens
gtgcaatttgtaatg

SEQ ID NO: 1790234 - DNA, 15 bp, Homo sapiens
tgcaatttgtaatgt

SEQ ID NO: 1790235 - DNA, 15 bp, Homo sapiens
gcaatttgtaatgtt

SEQ ID NO: 1790236 - DNA, 15 bp, Homo sapiens
caatttgtaatgttt

SEQ ID NO: 1790237 - DNA, 15 bp, Homo sapiens
aatttgtaatgttta

SEQ ID NO: 1790238 - DNA, 15 bp, Homo sapiens
atttgtaatgtttaa

SEQ ID NO: 1790239 - DNA, 15 bp, Homo sapiens
tttgtaatgtttaat

SEQ ID NO: 1790240 - DNA, 15 bp, Homo sapiens
ttgtaatgtttaatt

SEQ ID NO: 1790241 - DNA, 15 bp, Homo sapiens
tgtaatgtttaattc

SEQ ID NO: 1790242 - DNA, 15 bp, Homo sapiens
gtaatgtttaattcc

SEQ ID NO: 1790243 - DNA, 15 bp, Homo sapiens
taatgtttaattcct

SEQ ID NO: 1790244 - DNA, 15 bp, Homo sapiens
aatgtttaattcctt

SEQ ID NO: 1790245 - DNA, 15 bp, Homo sapiens
atgtttaattcctta

SEQ ID NO: 1790246 - DNA, 15 bp, Homo sapiens
tgtttaattccttaa

SEQ ID NO: 1790247 - DNA, 15 bp, Homo sapiens
gtttaattccttaaa

SEQ ID NO: 1790248 - DNA, 15 bp, Homo sapiens
tttaattccttaaaa

SEQ ID NO: 1790249 - DNA, 15 bp, Homo sapiens
ttaattccttaaaaa

SEQ ID NO: 1790250 - DNA, 15 bp, Homo sapiens
taattccttaaaaaa

SEQ ID NO: 1790251 - DNA, 15 bp, Homo sapiens
aattccttaaaaaag

SEQ ID NO: 1790252 - DNA, 15 bp, Homo sapiens
attccttaaaaaaga

SEQ ID NO: 1790253 - DNA, 15 bp, Homo sapiens
ttccttaaaaaagaa

SEQ ID NO: 1790254 - DNA, 15 bp, Homo sapiens
tccttaaaaaagaaa

SEQ ID NO: 1790255 - DNA, 15 bp, Homo sapiens
ccttaaaaaagaaaa

SEQ ID NO: 1790256 - DNA, 15 bp, Homo sapiens
cttaaaaaagaaaaa

SEQ ID NO: 1790257 - DNA, 15 bp, Homo sapiens
ttaaaaaagaaaaag

SEQ ID NO: 1790258 - DNA, 15 bp, Homo sapiens
taaaaaagaaaaaga

SEQ ID NO: 1790259 - DNA, 15 bp, Homo sapiens
aaaaaagaaaaagag

SEQ ID NO: 1790260 - DNA, 15 bp, Homo sapiens
aaaaagaaaaagagt

SEQ ID NO: 1790261 - DNA, 15 bp, Homo sapiens
aaaagaaaaagagtc

SEQ ID NO: 1790262 - DNA, 15 bp, Homo sapiens
aaagaaaaagagtct

SEQ ID NO: 1790263 - DNA, 15 bp, Homo sapiens
aagaaaaagagtctg

SEQ ID NO: 1790264 - DNA, 15 bp, Homo sapiens
agaaaaagagtctgg

SEQ ID NO: 1790265 - DNA, 15 bp, Homo sapiens
gaaaaagagtctggg

SEQ ID NO: 1790266 - DNA, 15 bp, Homo sapiens
aaaaagagtctggga

SEQ ID NO: 1790267 - DNA, 15 bp, Homo sapiens
aaaagagtctgggaa

SEQ ID NO: 1790268 - DNA, 15 bp, Homo sapiens
aaagagtctgggaaa

SEQ ID NO: 1790269 - DNA, 15 bp, Homo sapiens
aagagtctgggaaac

SEQ ID NO: 1790270 - DNA, 15 bp, Homo sapiens
agagtctgggaaaca

SEQ ID NO: 1790271 - DNA, 15 bp, Homo sapiens
gagtctgggaaacat

SEQ ID NO: 1790272 - DNA, 15 bp, Homo sapiens
agtctgggaaacata

SEQ ID NO: 1790273 - DNA, 15 bp, Homo sapiens
gtctgggaaacatag

SEQ ID NO: 1790274 - DNA, 15 bp, Homo sapiens
tctgggaaacatagc

SEQ ID NO: 1790275 - DNA, 15 bp, Homo sapiens
ctgggaaacatagca

SEQ ID NO: 1790276 - DNA, 15 bp, Homo sapiens
tgggaaacatagcaa

SEQ ID NO: 1790277 - DNA, 15 bp, Homo sapiens
gggaaacatagcaag

SEQ ID NO: 1790278 - DNA, 15 bp, Homo sapiens
ggaaacatagcaaga

SEQ ID NO: 1790279 - DNA, 15 bp, Homo sapiens
gaaacatagcaagaa

SEQ ID NO: 1790280 - DNA, 15 bp, Homo sapiens
aaacatagcaagaac

SEQ ID NO: 1790281 - DNA, 15 bp, Homo sapiens
aacatagcaagaacg

SEQ ID NO: 1790282 - DNA, 15 bp, Homo sapiens
acatagcaagaacgc

SEQ ID NO: 1790283 - DNA, 15 bp, Homo sapiens
catagcaagaacgct

SEQ ID NO: 1790284 - DNA, 15 bp, Homo sapiens
atagcaagaacgctg

SEQ ID NO: 1790285 - DNA, 15 bp, Homo sapiens
tagcaagaacgctgt

SEQ ID NO: 1790286 - DNA, 15 bp, Homo sapiens
agcaagaacgctgtc

SEQ ID NO: 1790287 - DNA, 15 bp, Homo sapiens
gcaagaacgctgtct

SEQ ID NO: 1790288 - DNA, 15 bp, Homo sapiens
caagaacgctgtctc

SEQ ID NO: 1790289 - DNA, 15 bp, Homo sapiens
aagaacgctgtctct

SEQ ID NO: 1790290 - DNA, 15 bp, Homo sapiens
agaacgctgtctcta

SEQ ID NO: 1790291 - DNA, 15 bp, Homo sapiens
gaacgctgtctctac

SEQ ID NO: 1790292 - DNA, 15 bp, Homo sapiens
aacgctgtctctaca

SEQ ID NO: 1790293 - DNA, 15 bp, Homo sapiens
acgctgtctctacaa

SEQ ID NO: 1790294 - DNA, 15 bp, Homo sapiens
cgctgtctctacaaa

SEQ ID NO: 1790295 - DNA, 15 bp, Homo sapiens
gctgtctctacaaaa

SEQ ID NO: 1790296 - DNA, 15 bp, Homo sapiens
ctctacaaaaaaaga

SEQ ID NO: 1790297 - DNA, 15 bp, Homo sapiens
tctacaaaaaaagat

SEQ ID NO: 1790298 - DNA, 15 bp, Homo sapiens
ctacaaaaaaagata

SEQ ID NO: 1790299 - DNA, 15 bp, Homo sapiens
tacaaaaaaagataa

SEQ ID NO: 1790300 - DNA, 15 bp, Homo sapiens
acaaaaaaagataaa

SEQ ID NO: 1790301 - DNA, 15 bp, Homo sapiens
caaaaaaagataaaa

SEQ ID NO: 1790302 - DNA, 15 bp, Homo sapiens
aaaaaaagataaaaa

SEQ ID NO: 1790303 - DNA, 15 bp, Homo sapiens
aaaaaagataaaaat

SEQ ID NO: 1790304 - DNA, 15 bp, Homo sapiens
aaaaagataaaaata

SEQ ID NO: 1790305 - DNA, 15 bp, Homo sapiens
aaaagataaaaataa

SEQ ID NO: 1790306 - DNA, 15 bp, Homo sapiens
aaagataaaaataaa

SEQ ID NO: 1790307 - DNA, 15 bp, Homo sapiens
aaataaaaataaatt

SEQ ID NO: 1790308 - DNA, 15 bp, Homo sapiens
aataaaaataaatta

SEQ ID NO: 1790309 - DNA, 15 bp, Homo sapiens
ataaaaataaattag

SEQ ID NO: 1790310 - DNA, 15 bp, Homo sapiens
taaaaataaattagc

SEQ ID NO: 1790311 - DNA, 15 bp, Homo sapiens
aaaaataaattagcc

SEQ ID NO: 1790312 - DNA, 15 bp, Homo sapiens
aaaataaattagccg

SEQ ID NO: 1790313 - DNA, 15 bp, Homo sapiens
aaataaattagccgg

SEQ ID NO: 1790314 - DNA, 15 bp, Homo sapiens
aataaattagccgga

SEQ ID NO: 1790315 - DNA, 15 bp, Homo sapiens
ataaattagccggac

SEQ ID NO: 1790316 - DNA, 15 bp, Homo sapiens
taaattagccggaca

SEQ ID NO: 1790317 - DNA, 15 bp, Homo sapiens
aaattagccggacat

SEQ ID NO: 1790318 - DNA, 15 bp, Homo sapiens
aattagccggacatg

SEQ ID NO: 1790319 - DNA, 15 bp, Homo sapiens
attagccggacatgg

SEQ ID NO: 1790320 - DNA, 15 bp, Homo sapiens
ttagccggacatggt

SEQ ID NO: 1790321 - DNA, 15 bp, Homo sapiens
tagccggacatggtg

SEQ ID NO: 1790322 - DNA, 15 bp, Homo sapiens
agccggacatggtgg

SEQ ID NO: 1790323 - DNA, 15 bp, Homo sapiens
gccggacatggtggt

SEQ ID NO: 1790324 - DNA, 15 bp, Homo sapiens
ccggacatggtggtg

SEQ ID NO: 1790325 - DNA, 15 bp, Homo sapiens
cggacatggtggtgt

SEQ ID NO: 1790326 - DNA, 15 bp, Homo sapiens
ggacatggtggtgtg

SEQ ID NO: 1790327 - DNA, 15 bp, Homo sapiens
gacatggtggtgtgc

SEQ ID NO: 1790328 - DNA, 15 bp, Homo sapiens
acatggtggtgtgca

SEQ ID NO: 1790329 - DNA, 15 bp, Homo sapiens
tggtgtgcacctgta

SEQ ID NO: 1790330 - DNA, 15 bp, Homo sapiens
ggtgtgcacctgtag

SEQ ID NO: 1790331 - DNA, 15 bp, Homo sapiens
gtgtgcacctgtagt

SEQ ID NO: 1790332 - DNA, 15 bp, Homo sapiens
tgtgcacctgtagtc

SEQ ID NO: 1790333 - DNA, 15 bp, Homo sapiens
gtgcacctgtagtcc

SEQ ID NO: 1790334 - DNA, 15 bp, Homo sapiens
tgtagtcccagctga

SEQ ID NO: 1790335 - DNA, 15 bp, Homo sapiens
gtagtcccagctgag

SEQ ID NO: 1790336 - DNA, 15 bp, Homo sapiens
tagtcccagctgagg

SEQ ID NO: 1790337 - DNA, 15 bp, Homo sapiens
agtcccagctgaggt

SEQ ID NO: 1790338 - DNA, 15 bp, Homo sapiens
gtcccagctgaggtg

SEQ ID NO: 1790339 - DNA, 15 bp, Homo sapiens
tcccagctgaggtgg

SEQ ID NO: 1790340 - DNA, 15 bp, Homo sapiens
cccagctgaggtggg

SEQ ID NO: 1790341 - DNA, 15 bp, Homo sapiens
ccagctgaggtggga

SEQ ID NO: 1790342 - DNA, 15 bp, Homo sapiens
cagctgaggtgggag

SEQ ID NO: 1790343 - DNA, 15 bp, Homo sapiens
cttgagctcaggagg

SEQ ID NO: 1790344 - DNA, 15 bp, Homo sapiens
ttgagctcaggaggt

SEQ ID NO: 1790345 - DNA, 15 bp, Homo sapiens
tgagctcaggaggtt

SEQ ID NO: 1790346 - DNA, 15 bp, Homo sapiens
gagctcaggaggtta

SEQ ID NO: 1790347 - DNA, 15 bp, Homo sapiens
agctcaggaggttaa

SEQ ID NO: 1790348 - DNA, 15 bp, Homo sapiens
gctcaggaggttaag

SEQ ID NO: 1790349 - DNA, 15 bp, Homo sapiens
ctcaggaggttaagg

SEQ ID NO: 1790350 - DNA, 15 bp, Homo sapiens
tcaggaggttaagga

SEQ ID NO: 1790351 - DNA, 15 bp, Homo sapiens
caggaggttaaggat

SEQ ID NO: 1790352 - DNA, 15 bp, Homo sapiens
aggaggttaaggatg

SEQ ID NO: 1790353 - DNA, 15 bp, Homo sapiens
ggaggttaaggatgc

SEQ ID NO: 1790354 - DNA, 15 bp, Homo sapiens
gaggttaaggatgca

SEQ ID NO: 1790355 - DNA, 15 bp, Homo sapiens
aggttaaggatgcag

SEQ ID NO: 1790356 - DNA, 15 bp, Homo sapiens
ggttaaggatgcagt

SEQ ID NO: 1790357 - DNA, 15 bp, Homo sapiens
gttaaggatgcagtg

SEQ ID NO: 1790358 - DNA, 15 bp, Homo sapiens
ttaaggatgcagtga

SEQ ID NO: 1790359 - DNA, 15 bp, Homo sapiens
taaggatgcagtgag

SEQ ID NO: 1790360 - DNA, 15 bp, Homo sapiens
aaggatgcagtgagc

SEQ ID NO: 1790361 - DNA, 15 bp, Homo sapiens
aggatgcagtgagcc

SEQ ID NO: 1790362 - DNA, 15 bp, Homo sapiens
ggatgcagtgagcca

SEQ ID NO: 1790363 - DNA, 15 bp, Homo sapiens
gatgcagtgagccaa

SEQ ID NO: 1790364 - DNA, 15 bp, Homo sapiens
atgcagtgagccaag

SEQ ID NO: 1790365 - DNA, 15 bp, Homo sapiens
tgcactccagcctaa

SEQ ID NO: 1790366 - DNA, 15 bp, Homo sapiens
gcactccagcctaag

SEQ ID NO: 1790367 - DNA, 15 bp, Homo sapiens
cactccagcctaagt

SEQ ID NO: 1790368 - DNA, 15 bp, Homo sapiens
actccagcctaagtg

SEQ ID NO: 1790369 - DNA, 15 bp, Homo sapiens
ctccagcctaagtga

SEQ ID NO: 1790370 - DNA, 15 bp, Homo sapiens
tccagcctaagtgac

SEQ ID NO: 1790371 - DNA, 15 bp, Homo sapiens
ccagcctaagtgaca

SEQ ID NO: 1790372 - DNA, 15 bp, Homo sapiens
cagcctaagtgacag

SEQ ID NO: 1790373 - DNA, 15 bp, Homo sapiens
agcctaagtgacaga

SEQ ID NO: 1790374 - DNA, 15 bp, Homo sapiens
gcctaagtgacagag

SEQ ID NO: 1790375 - DNA, 15 bp, Homo sapiens
cctaagtgacagagt

SEQ ID NO: 1790376 - DNA, 15 bp, Homo sapiens
ctaagtgacagagtg

SEQ ID NO: 1790377 - DNA, 15 bp, Homo sapiens
taagtgacagagtga

SEQ ID NO: 1790378 - DNA, 15 bp, Homo sapiens
aagtgacagagtgag

SEQ ID NO: 1790379 - DNA, 15 bp, Homo sapiens
agtgacagagtgaga

SEQ ID NO: 1790380 - DNA, 15 bp, Homo sapiens
tctgtctcaaaaaag

SEQ ID NO: 1790381 - DNA, 15 bp, Homo sapiens
aaaagaaaaaaaaag

SEQ ID NO: 1790382 - DNA, 15 bp, Homo sapiens
aaagaaaaaaaaaga

SEQ ID NO: 1790383 - DNA, 15 bp, Homo sapiens
aagaaaaaaaaagaa

SEQ ID NO: 1790384 - DNA, 15 bp, Homo sapiens
agaaaaaaaaagaaa

SEQ ID NO: 1790385 - DNA, 15 bp, Homo sapiens
gaaaaaaaaagaaaa

SEQ ID NO: 1790386 - DNA, 15 bp, Homo sapiens
aaagaaaagaaaaac

SEQ ID NO: 1790387 - DNA, 15 bp, Homo sapiens
aagaaaagaaaaacg

SEQ ID NO: 1790388 - DNA, 15 bp, Homo sapiens
agaaaagaaaaacga

SEQ ID NO: 1790389 - DNA, 15 bp, Homo sapiens
gaaaagaaaaacgac

SEQ ID NO: 1790390 - DNA, 15 bp, Homo sapiens
aaaagaaaaacgacc

SEQ ID NO: 1790391 - DNA, 15 bp, Homo sapiens
aaagaaaaacgacca

SEQ ID NO: 1790392 - DNA, 15 bp, Homo sapiens
aagaaaaacgaccag

SEQ ID NO: 1790393 - DNA, 15 bp, Homo sapiens
agaaaaacgaccaga

SEQ ID NO: 1790394 - DNA, 15 bp, Homo sapiens
gaaaaacgaccagat

SEQ ID NO: 1790395 - DNA, 15 bp, Homo sapiens
aaaaacgaccagata

SEQ ID NO: 1790396 - DNA, 15 bp, Homo sapiens
aaaacgaccagataa

SEQ ID NO: 1790397 - DNA, 15 bp, Homo sapiens
aaacgaccagataag

SEQ ID NO: 1790398 - DNA, 15 bp, Homo sapiens
aacgaccagataaga

SEQ ID NO: 1790399 - DNA, 15 bp, Homo sapiens
acgaccagataagat

SEQ ID NO: 1790400 - DNA, 15 bp, Homo sapiens
cgaccagataagatc

SEQ ID NO: 1790401 - DNA, 15 bp, Homo sapiens
gaccagataagatct

SEQ ID NO: 1790402 - DNA, 15 bp, Homo sapiens
accagataagatctg

SEQ ID NO: 1790403 - DNA, 15 bp, Homo sapiens
ccagataagatctga

SEQ ID NO: 1790404 - DNA, 15 bp, Homo sapiens
cagataagatctgat

SEQ ID NO: 1790405 - DNA, 15 bp, Homo sapiens
agataagatctgata

SEQ ID NO: 1790406 - DNA, 15 bp, Homo sapiens
gataagatctgataa

SEQ ID NO: 1790407 - DNA, 15 bp, Homo sapiens
ataagatctgataag

SEQ ID NO: 1790408 - DNA, 15 bp, Homo sapiens
taagatctgataagg

SEQ ID NO: 1790409 - DNA, 15 bp, Homo sapiens
aagatctgataaggc

SEQ ID NO: 1790410 - DNA, 15 bp, Homo sapiens
agatctgataaggcc

SEQ ID NO: 1790411 - DNA, 15 bp, Homo sapiens
gatctgataaggccc

SEQ ID NO: 1790412 - DNA, 15 bp, Homo sapiens
atctgataaggcccg

SEQ ID NO: 1790413 - DNA, 15 bp, Homo sapiens
tctgataaggcccga

SEQ ID NO: 1790414 - DNA, 15 bp, Homo sapiens
ctgataaggcccgat

SEQ ID NO: 1790415 - DNA, 15 bp, Homo sapiens
tgataaggcccgatg

SEQ ID NO: 1790416 - DNA, 15 bp, Homo sapiens
gataaggcccgatgt

SEQ ID NO: 1790417 - DNA, 15 bp, Homo sapiens
ataaggcccgatgtt

SEQ ID NO: 1790418 - DNA, 15 bp, Homo sapiens
taaggcccgatgtta

SEQ ID NO: 1790419 - DNA, 15 bp, Homo sapiens
aaggcccgatgttaa

SEQ ID NO: 1790420 - DNA, 15 bp, Homo sapiens
aggcccgatgttaat

SEQ ID NO: 1790421 - DNA, 15 bp, Homo sapiens
ggcccgatgttaata

SEQ ID NO: 1790422 - DNA, 15 bp, Homo sapiens
gcccgatgttaatac

SEQ ID NO: 1790423 - DNA, 15 bp, Homo sapiens
cccgatgttaataca

SEQ ID NO: 1790424 - DNA, 15 bp, Homo sapiens
ccgatgttaatacat

SEQ ID NO: 1790425 - DNA, 15 bp, Homo sapiens
cgatgttaatacatg

SEQ ID NO: 1790426 - DNA, 15 bp, Homo sapiens
gatgttaatacatga

SEQ ID NO: 1790427 - DNA, 15 bp, Homo sapiens
atgttaatacatgaa

SEQ ID NO: 1790428 - DNA, 15 bp, Homo sapiens
tgttaatacatgaac

SEQ ID NO: 1790429 - DNA, 15 bp, Homo sapiens
gttaatacatgaact

SEQ ID NO: 1790430 - DNA, 15 bp, Homo sapiens
ttaatacatgaactt

SEQ ID NO: 1790431 - DNA, 15 bp, Homo sapiens
taatacatgaacttt

SEQ ID NO: 1790432 - DNA, 15 bp, Homo sapiens
aatacatgaactttt

SEQ ID NO: 1790433 - DNA, 15 bp, Homo sapiens
atacatgaactttta

SEQ ID NO: 1790434 - DNA, 15 bp, Homo sapiens
tacatgaacttttaa

SEQ ID NO: 1790435 - DNA, 15 bp, Homo sapiens
acatgaacttttaaa

SEQ ID NO: 1790436 - DNA, 15 bp, Homo sapiens
catgaacttttaaat

SEQ ID NO: 1790437 - DNA, 15 bp, Homo sapiens
atgaacttttaaata

SEQ ID NO: 1790438 - DNA, 15 bp, Homo sapiens
tgaacttttaaatat

SEQ ID NO: 1790439 - DNA, 15 bp, Homo sapiens
gaacttttaaatatt

SEQ ID NO: 1790440 - DNA, 15 bp, Homo sapiens
aacttttaaatatta

SEQ ID NO: 1790441 - DNA, 15 bp, Homo sapiens
acttttaaatattat

SEQ ID NO: 1790442 - DNA, 15 bp, Homo sapiens
cttttaaatattatt

SEQ ID NO: 1790443 - DNA, 15 bp, Homo sapiens
ttttaaatattattc

SEQ ID NO: 1790444 - DNA, 15 bp, Homo sapiens
tttaaatattattct

SEQ ID NO: 1790445 - DNA, 15 bp, Homo sapiens
ttaaatattattctc

SEQ ID NO: 1790446 - DNA, 15 bp, Homo sapiens
taaatattattctcc

SEQ ID NO: 1790447 - DNA, 15 bp, Homo sapiens
aaatattattctcca

SEQ ID NO: 1790448 - DNA, 15 bp, Homo sapiens
aatattattctccag

SEQ ID NO: 1790449 - DNA, 15 bp, Homo sapiens
atattattctccagt

SEQ ID NO: 1790450 - DNA, 15 bp, Homo sapiens
tattattctccagtc

SEQ ID NO: 1790451 - DNA, 15 bp, Homo sapiens
attattctccagtct

SEQ ID NO: 1790452 - DNA, 15 bp, Homo sapiens
ttattctccagtctt

SEQ ID NO: 1790453 - DNA, 15 bp, Homo sapiens
tattctccagtcttt

SEQ ID NO: 1790454 - DNA, 15 bp, Homo sapiens
attctccagtctttt

SEQ ID NO: 1790455 - DNA, 15 bp, Homo sapiens
ttctccagtcttttt

SEQ ID NO: 1790456 - DNA, 15 bp, Homo sapiens
tctccagtctttttt

SEQ ID NO: 1790457 - DNA, 15 bp, Homo sapiens
ctccagtcttttttt

SEQ ID NO: 1790458 - DNA, 15 bp, Homo sapiens
tccagtctttttttt

SEQ ID NO: 1790459 - DNA, 15 bp, Homo sapiens
ccagtcttttttttt

SEQ ID NO: 1790460 - DNA, 15 bp, Homo sapiens
cagtctttttttttt

SEQ ID NO: 1790461 - DNA, 15 bp, Homo sapiens
gggtcttgctctgtt

SEQ ID NO: 1790462 - DNA, 15 bp, Homo sapiens
ggtcttgctctgttg

SEQ ID NO: 1790463 - DNA, 15 bp, Homo sapiens
cagtggcactatctc

SEQ ID NO: 1790464 - DNA, 15 bp, Homo sapiens
agtggcactatctca

SEQ ID NO: 1790465 - DNA, 15 bp, Homo sapiens
gtggcactatctcag

SEQ ID NO: 1790466 - DNA, 15 bp, Homo sapiens
tggcactatctcagc

SEQ ID NO: 1790467 - DNA, 15 bp, Homo sapiens
ggcactatctcagct

SEQ ID NO: 1790468 - DNA, 15 bp, Homo sapiens
gcactatctcagctc

SEQ ID NO: 1790469 - DNA, 15 bp, Homo sapiens
cactatctcagctca

SEQ ID NO: 1790470 - DNA, 15 bp, Homo sapiens
actatctcagctcac

SEQ ID NO: 1790471 - DNA, 15 bp, Homo sapiens
ctatctcagctcact

SEQ ID NO: 1790472 - DNA, 15 bp, Homo sapiens
tatctcagctcactg

SEQ ID NO: 1790473 - DNA, 15 bp, Homo sapiens
atctcagctcactga

SEQ ID NO: 1790474 - DNA, 15 bp, Homo sapiens
tctcagctcactgaa

SEQ ID NO: 1790475 - DNA, 15 bp, Homo sapiens
ctcagctcactgaag

SEQ ID NO: 1790476 - DNA, 15 bp, Homo sapiens
tcagctcactgaagt

SEQ ID NO: 1790477 - DNA, 15 bp, Homo sapiens
cagctcactgaagtc

SEQ ID NO: 1790478 - DNA, 15 bp, Homo sapiens
agctcactgaagtct

SEQ ID NO: 1790479 - DNA, 15 bp, Homo sapiens
gctcactgaagtctt

SEQ ID NO: 1790480 - DNA, 15 bp, Homo sapiens
ctcactgaagtctta

SEQ ID NO: 1790481 - DNA, 15 bp, Homo sapiens
tcactgaagtcttaa

SEQ ID NO: 1790482 - DNA, 15 bp, Homo sapiens
cactgaagtcttaat

SEQ ID NO: 1790483 - DNA, 15 bp, Homo sapiens
actgaagtcttaatc

SEQ ID NO: 1790484 - DNA, 15 bp, Homo sapiens
ctgaagtcttaatct

SEQ ID NO: 1790485 - DNA, 15 bp, Homo sapiens
tgaagtcttaatctc

SEQ ID NO: 1790486 - DNA, 15 bp, Homo sapiens
gaagtcttaatctcc

SEQ ID NO: 1790487 - DNA, 15 bp, Homo sapiens
aagtcttaatctcct

SEQ ID NO: 1790488 - DNA, 15 bp, Homo sapiens
agtcttaatctcctg

SEQ ID NO: 1790489 - DNA, 15 bp, Homo sapiens
gtcttaatctcctgg

SEQ ID NO: 1790490 - DNA, 15 bp, Homo sapiens
tcttaatctcctggg

SEQ ID NO: 1790491 - DNA, 15 bp, Homo sapiens
cttaatctcctgggc

SEQ ID NO: 1790492 - DNA, 15 bp, Homo sapiens
ttaatctcctgggct

SEQ ID NO: 1790493 - DNA, 15 bp, Homo sapiens
taatctcctgggctc

SEQ ID NO: 1790494 - DNA, 15 bp, Homo sapiens
aatctcctgggctca

SEQ ID NO: 1790495 - DNA, 15 bp, Homo sapiens
caagtagctgggacc

SEQ ID NO: 1790496 - DNA, 15 bp, Homo sapiens
aagtagctgggaccg

SEQ ID NO: 1790497 - DNA, 15 bp, Homo sapiens
agtagctgggaccgc

SEQ ID NO: 1790498 - DNA, 15 bp, Homo sapiens
gtagctgggaccgca

SEQ ID NO: 1790499 - DNA, 15 bp, Homo sapiens
tagctgggaccgcag

SEQ ID NO: 1790500 - DNA, 15 bp, Homo sapiens
agctgggaccgcaga

SEQ ID NO: 1790501 - DNA, 15 bp, Homo sapiens
gctgggaccgcagac

SEQ ID NO: 1790502 - DNA, 15 bp, Homo sapiens
ctgggaccgcagaca

SEQ ID NO: 1790503 - DNA, 15 bp, Homo sapiens
tgggaccgcagacat

SEQ ID NO: 1790504 - DNA, 15 bp, Homo sapiens
gggaccgcagacatg

SEQ ID NO: 1790505 - DNA, 15 bp, Homo sapiens
ggaccgcagacatgc

SEQ ID NO: 1790506 - DNA, 15 bp, Homo sapiens
gaccgcagacatgca

SEQ ID NO: 1790507 - DNA, 15 bp, Homo sapiens
accgcagacatgcac

SEQ ID NO: 1790508 - DNA, 15 bp, Homo sapiens
ccgcagacatgcacc

SEQ ID NO: 1790509 - DNA, 15 bp, Homo sapiens
cgcagacatgcacca

SEQ ID NO: 1790510 - DNA, 15 bp, Homo sapiens
gcagacatgcaccac

SEQ ID NO: 1790511 - DNA, 15 bp, Homo sapiens
cagacatgcaccacc

SEQ ID NO: 1790512 - DNA, 15 bp, Homo sapiens
agacatgcaccacca

SEQ ID NO: 1790513 - DNA, 15 bp, Homo sapiens
gacatgcaccaccat

SEQ ID NO: 1790514 - DNA, 15 bp, Homo sapiens
acatgcaccaccatg

SEQ ID NO: 1790515 - DNA, 15 bp, Homo sapiens
gctaacttttgtatg

SEQ ID NO: 1790516 - DNA, 15 bp, Homo sapiens
ctaacttttgtatgt

SEQ ID NO: 1790517 - DNA, 15 bp, Homo sapiens
taacttttgtatgtt

SEQ ID NO: 1790518 - DNA, 15 bp, Homo sapiens
aacttttgtatgttt

SEQ ID NO: 1790519 - DNA, 15 bp, Homo sapiens
acttttgtatgtttt

SEQ ID NO: 1790520 - DNA, 15 bp, Homo sapiens
cttttgtatgttttt

SEQ ID NO: 1790521 - DNA, 15 bp, Homo sapiens
ttttgtatgtttttg

SEQ ID NO: 1790522 - DNA, 15 bp, Homo sapiens
tttgtatgtttttgt

SEQ ID NO: 1790523 - DNA, 15 bp, Homo sapiens
ttgtatgtttttgta

SEQ ID NO: 1790524 - DNA, 15 bp, Homo sapiens
tgtatgtttttgtag

SEQ ID NO: 1790525 - DNA, 15 bp, Homo sapiens
gtatgtttttgtaga

SEQ ID NO: 1790526 - DNA, 15 bp, Homo sapiens
tatgtttttgtagag

SEQ ID NO: 1790527 - DNA, 15 bp, Homo sapiens
atgtttttgtagaga

SEQ ID NO: 1790528 - DNA, 15 bp, Homo sapiens
tgtttttgtagagat

SEQ ID NO: 1790529 - DNA, 15 bp, Homo sapiens
gtttttgtagagatg

SEQ ID NO: 1790530 - DNA, 15 bp, Homo sapiens
agagatggggtccca

SEQ ID NO: 1790531 - DNA, 15 bp, Homo sapiens
gagatggggtcccac

SEQ ID NO: 1790532 - DNA, 15 bp, Homo sapiens
agatggggtcccact

SEQ ID NO: 1790533 - DNA, 15 bp, Homo sapiens
gatggggtcccacta

SEQ ID NO: 1790534 - DNA, 15 bp, Homo sapiens
atggggtcccactat

SEQ ID NO: 1790535 - DNA, 15 bp, Homo sapiens
tggggtcccactatg

SEQ ID NO: 1790536 - DNA, 15 bp, Homo sapiens
ggggtcccactatgt

SEQ ID NO: 1790537 - DNA, 15 bp, Homo sapiens
gggtcccactatgtt

SEQ ID NO: 1790538 - DNA, 15 bp, Homo sapiens
ggtcccactatgttg

SEQ ID NO: 1790539 - DNA, 15 bp, Homo sapiens
gtcccactatgttgc

SEQ ID NO: 1790540 - DNA, 15 bp, Homo sapiens
tcccactatgttgct

SEQ ID NO: 1790541 - DNA, 15 bp, Homo sapiens
cccactatgttgctt

SEQ ID NO: 1790542 - DNA, 15 bp, Homo sapiens
ccactatgttgctta

SEQ ID NO: 1790543 - DNA, 15 bp, Homo sapiens
cactatgttgcttag

SEQ ID NO: 1790544 - DNA, 15 bp, Homo sapiens
actatgttgcttagg

SEQ ID NO: 1790545 - DNA, 15 bp, Homo sapiens
ctatgttgcttaggt

SEQ ID NO: 1790546 - DNA, 15 bp, Homo sapiens
tatgttgcttaggtt

SEQ ID NO: 1790547 - DNA, 15 bp, Homo sapiens
atgttgcttaggttg

SEQ ID NO: 1790548 - DNA, 15 bp, Homo sapiens
tgttgcttaggttgc

SEQ ID NO: 1790549 - DNA, 15 bp, Homo sapiens
gttgcttaggttgct

SEQ ID NO: 1790550 - DNA, 15 bp, Homo sapiens
ttgcttaggttgctc

SEQ ID NO: 1790551 - DNA, 15 bp, Homo sapiens
tgcttaggttgctct

SEQ ID NO: 1790552 - DNA, 15 bp, Homo sapiens
gcttaggttgctctc

SEQ ID NO: 1790553 - DNA, 15 bp, Homo sapiens
cttaggttgctctcg

SEQ ID NO: 1790554 - DNA, 15 bp, Homo sapiens
ttaggttgctctcga

SEQ ID NO: 1790555 - DNA, 15 bp, Homo sapiens
taggttgctctcgaa

SEQ ID NO: 1790556 - DNA, 15 bp, Homo sapiens
aggttgctctcgaac

SEQ ID NO: 1790557 - DNA, 15 bp, Homo sapiens
ggttgctctcgaact

SEQ ID NO: 1790558 - DNA, 15 bp, Homo sapiens
gttgctctcgaactc

SEQ ID NO: 1790559 - DNA, 15 bp, Homo sapiens
ttgctctcgaactcc

SEQ ID NO: 1790560 - DNA, 15 bp, Homo sapiens
tgctctcgaactcct

SEQ ID NO: 1790561 - DNA, 15 bp, Homo sapiens
gctctcgaactcctg

SEQ ID NO: 1790562 - DNA, 15 bp, Homo sapiens
ctctcgaactcctgg

SEQ ID NO: 1790563 - DNA, 15 bp, Homo sapiens
caagcaatcctctca

SEQ ID NO: 1790564 - DNA, 15 bp, Homo sapiens
aagcaatcctctcac

SEQ ID NO: 1790565 - DNA, 15 bp, Homo sapiens
agcaatcctctcacc

SEQ ID NO: 1790566 - DNA, 15 bp, Homo sapiens
caatcctctcacctc

SEQ ID NO: 1790567 - DNA, 15 bp, Homo sapiens
aatcctctcacctca

SEQ ID NO: 1790568 - DNA, 15 bp, Homo sapiens
ctcacctcagcctct

SEQ ID NO: 1790569 - DNA, 15 bp, Homo sapiens
tcacctcagcctctc

SEQ ID NO: 1790570 - DNA, 15 bp, Homo sapiens
ctcagcctctcaagc

SEQ ID NO: 1790571 - DNA, 15 bp, Homo sapiens
tcagcctctcaagct

SEQ ID NO: 1790572 - DNA, 15 bp, Homo sapiens
cagcctctcaagctg

SEQ ID NO: 1790573 - DNA, 15 bp, Homo sapiens
agcctctcaagctgc

SEQ ID NO: 1790574 - DNA, 15 bp, Homo sapiens
gcctctcaagctgct

SEQ ID NO: 1790575 - DNA, 15 bp, Homo sapiens
cctctcaagctgctg

SEQ ID NO: 1790576 - DNA, 15 bp, Homo sapiens
ctctcaagctgctgg

SEQ ID NO: 1790577 - DNA, 15 bp, Homo sapiens
tctcaagctgctggg

SEQ ID NO: 1790578 - DNA, 15 bp, Homo sapiens
ctcaagctgctggga

SEQ ID NO: 1790579 - DNA, 15 bp, Homo sapiens
tcaagctgctgggat

SEQ ID NO: 1790580 - DNA, 15 bp, Homo sapiens
caagctgctgggatt

SEQ ID NO: 1790581 - DNA, 15 bp, Homo sapiens
aagctgctgggatta

SEQ ID NO: 1790582 - DNA, 15 bp, Homo sapiens
agctgctgggattac

SEQ ID NO: 1790583 - DNA, 15 bp, Homo sapiens
gctgctgggattaca

SEQ ID NO: 1790584 - DNA, 15 bp, Homo sapiens
gggattacagtcata

SEQ ID NO: 1790585 - DNA, 15 bp, Homo sapiens
ggattacagtcataa

SEQ ID NO: 1790586 - DNA, 15 bp, Homo sapiens
gattacagtcataag

SEQ ID NO: 1790587 - DNA, 15 bp, Homo sapiens
attacagtcataagc

SEQ ID NO: 1790588 - DNA, 15 bp, Homo sapiens
ttacagtcataagcc

SEQ ID NO: 1790589 - DNA, 15 bp, Homo sapiens
tacagtcataagcca

SEQ ID NO: 1790590 - DNA, 15 bp, Homo sapiens
acagtcataagccac

SEQ ID NO: 1790591 - DNA, 15 bp, Homo sapiens
cagtcataagccact

SEQ ID NO: 1790592 - DNA, 15 bp, Homo sapiens
agtcataagccactg

SEQ ID NO: 1790593 - DNA, 15 bp, Homo sapiens
gtcataagccactgt

SEQ ID NO: 1790594 - DNA, 15 bp, Homo sapiens
tcataagccactgtg

SEQ ID NO: 1790595 - DNA, 15 bp, Homo sapiens
cataagccactgtga

SEQ ID NO: 1790596 - DNA, 15 bp, Homo sapiens
ataagccactgtgac

SEQ ID NO: 1790597 - DNA, 15 bp, Homo sapiens
taagccactgtgacc

SEQ ID NO: 1790598 - DNA, 15 bp, Homo sapiens
aagccactgtgacca

SEQ ID NO: 1790599 - DNA, 15 bp, Homo sapiens
agccactgtgaccag

SEQ ID NO: 1790600 - DNA, 15 bp, Homo sapiens
gccactgtgaccagc

SEQ ID NO: 1790601 - DNA, 15 bp, Homo sapiens
ccactgtgaccagcc

SEQ ID NO: 1790602 - DNA, 15 bp, Homo sapiens
cactgtgaccagcct

SEQ ID NO: 1790603 - DNA, 15 bp, Homo sapiens
actgtgaccagccta

SEQ ID NO: 1790604 - DNA, 15 bp, Homo sapiens
ctgtgaccagcctat

SEQ ID NO: 1790605 - DNA, 15 bp, Homo sapiens
tgtgaccagcctatt

SEQ ID NO: 1790606 - DNA, 15 bp, Homo sapiens
gtgaccagcctattc

SEQ ID NO: 1790607 - DNA, 15 bp, Homo sapiens
tgaccagcctattct

SEQ ID NO: 1790608 - DNA, 15 bp, Homo sapiens
gaccagcctattctc

SEQ ID NO: 1790609 - DNA, 15 bp, Homo sapiens
accagcctattctct

SEQ ID NO: 1790610 - DNA, 15 bp, Homo sapiens
ccagcctattctcta

SEQ ID NO: 1790611 - DNA, 15 bp, Homo sapiens
cagcctattctctat

SEQ ID NO: 1790612 - DNA, 15 bp, Homo sapiens
agcctattctctatt

SEQ ID NO: 1790613 - DNA, 15 bp, Homo sapiens
gcctattctctattc

SEQ ID NO: 1790614 - DNA, 15 bp, Homo sapiens
cctattctctattct

SEQ ID NO: 1790615 - DNA, 15 bp, Homo sapiens
ctattctctattctt

SEQ ID NO: 1790616 - DNA, 15 bp, Homo sapiens
tattctctattcttg

SEQ ID NO: 1790617 - DNA, 15 bp, Homo sapiens
attctctattcttga

SEQ ID NO: 1790618 - DNA, 15 bp, Homo sapiens
ttctctattcttgat

SEQ ID NO: 1790619 - DNA, 15 bp, Homo sapiens
tctctattcttgatt

SEQ ID NO: 1790620 - DNA, 15 bp, Homo sapiens
ctctattcttgattg

SEQ ID NO: 1790621 - DNA, 15 bp, Homo sapiens
tctattcttgattgt

SEQ ID NO: 1790622 - DNA, 15 bp, Homo sapiens
ctattcttgattgta

SEQ ID NO: 1790623 - DNA, 15 bp, Homo sapiens
tattcttgattgtat

SEQ ID NO: 1790624 - DNA, 15 bp, Homo sapiens
attcttgattgtatg

SEQ ID NO: 1790625 - DNA, 15 bp, Homo sapiens
ttcttgattgtatgt

SEQ ID NO: 1790626 - DNA, 15 bp, Homo sapiens
tcttgattgtatgtc

SEQ ID NO: 1790627 - DNA, 15 bp, Homo sapiens
cttgattgtatgtcc

SEQ ID NO: 1790628 - DNA, 15 bp, Homo sapiens
ttgattgtatgtcca

SEQ ID NO: 1790629 - DNA, 15 bp, Homo sapiens
tgattgtatgtccaa

SEQ ID NO: 1790630 - DNA, 15 bp, Homo sapiens
gattgtatgtccaaa

SEQ ID NO: 1790631 - DNA, 15 bp, Homo sapiens
attgtatgtccaaaa

SEQ ID NO: 1790632 - DNA, 15 bp, Homo sapiens
ttgtatgtccaaaat

SEQ ID NO: 1790633 - DNA, 15 bp, Homo sapiens
tgtatgtccaaaata

SEQ ID NO: 1790634 - DNA, 15 bp, Homo sapiens
gtatgtccaaaatat

SEQ ID NO: 1790635 - DNA, 15 bp, Homo sapiens
tatgtccaaaatata

SEQ ID NO: 1790636 - DNA, 15 bp, Homo sapiens
atgtccaaaatatac

SEQ ID NO: 1790637 - DNA, 15 bp, Homo sapiens
tgtccaaaatatacc

SEQ ID NO: 1790638 - DNA, 15 bp, Homo sapiens
gtccaaaatatacca

SEQ ID NO: 1790639 - DNA, 15 bp, Homo sapiens
tccaaaatataccat

SEQ ID NO: 1790640 - DNA, 15 bp, Homo sapiens
ccaaaatataccatc

SEQ ID NO: 1790641 - DNA, 15 bp, Homo sapiens
caaaatataccatca

SEQ ID NO: 1790642 - DNA, 15 bp, Homo sapiens
aaaatataccatcat

SEQ ID NO: 1790643 - DNA, 15 bp, Homo sapiens
aaatataccatcata

SEQ ID NO: 1790644 - DNA, 15 bp, Homo sapiens
aatataccatcataa

SEQ ID NO: 1790645 - DNA, 15 bp, Homo sapiens
atataccatcataaa

SEQ ID NO: 1790646 - DNA, 15 bp, Homo sapiens
tataccatcataaaa

SEQ ID NO: 1790647 - DNA, 15 bp, Homo sapiens
ataccatcataaaaa

SEQ ID NO: 1790648 - DNA, 15 bp, Homo sapiens
taccatcataaaaaa

SEQ ID NO: 1790649 - DNA, 15 bp, Homo sapiens
accatcataaaaaag

SEQ ID NO: 1790650 - DNA, 15 bp, Homo sapiens
ccatcataaaaaagc

SEQ ID NO: 1790651 - DNA, 15 bp, Homo sapiens
catcataaaaaagca

SEQ ID NO: 1790652 - DNA, 15 bp, Homo sapiens
atcataaaaaagcac

SEQ ID NO: 1790653 - DNA, 15 bp, Homo sapiens
tcataaaaaagcacc

SEQ ID NO: 1790654 - DNA, 15 bp, Homo sapiens
cataaaaaagcacca

SEQ ID NO: 1790655 - DNA, 15 bp, Homo sapiens
ataaaaaagcaccac

SEQ ID NO: 1790656 - DNA, 15 bp, Homo sapiens
taaaaaagcaccact

SEQ ID NO: 1790657 - DNA, 15 bp, Homo sapiens
aaaaaagcaccactg

SEQ ID NO: 1790658 - DNA, 15 bp, Homo sapiens
aaaaagcaccactgg

SEQ ID NO: 1790659 - DNA, 15 bp, Homo sapiens
aaaagcaccactgga

SEQ ID NO: 1790660 - DNA, 15 bp, Homo sapiens
aaagcaccactggaa

SEQ ID NO: 1790661 - DNA, 15 bp, Homo sapiens
aagcaccactggaat

SEQ ID NO: 1790662 - DNA, 15 bp, Homo sapiens
agcaccactggaatc

SEQ ID NO: 1790663 - DNA, 15 bp, Homo sapiens
gcaccactggaatca

SEQ ID NO: 1790664 - DNA, 15 bp, Homo sapiens
caccactggaatcaa

SEQ ID NO: 1790665 - DNA, 15 bp, Homo sapiens
accactggaatcaaa

SEQ ID NO: 1790666 - DNA, 15 bp, Homo sapiens
ccactggaatcaaag

SEQ ID NO: 1790667 - DNA, 15 bp, Homo sapiens
cactggaatcaaaga

SEQ ID NO: 1790668 - DNA, 15 bp, Homo sapiens
actggaatcaaagat

SEQ ID NO: 1790669 - DNA, 15 bp, Homo sapiens
ctggaatcaaagata

SEQ ID NO: 1790670 - DNA, 15 bp, Homo sapiens
tggaatcaaagatag

SEQ ID NO: 1790671 - DNA, 15 bp, Homo sapiens
ggaatcaaagatagg

SEQ ID NO: 1790672 - DNA, 15 bp, Homo sapiens
gaatcaaagataggg

SEQ ID NO: 1790673 - DNA, 15 bp, Homo sapiens
aatcaaagatagggg

SEQ ID NO: 1790674 - DNA, 15 bp, Homo sapiens
atcaaagataggggc

SEQ ID NO: 1790675 - DNA, 15 bp, Homo sapiens
tcaaagataggggct

SEQ ID NO: 1790676 - DNA, 15 bp, Homo sapiens
caaagataggggctt

SEQ ID NO: 1790677 - DNA, 15 bp, Homo sapiens
aaagataggggctta

SEQ ID NO: 1790678 - DNA, 15 bp, Homo sapiens
aagataggggcttaa

SEQ ID NO: 1790679 - DNA, 15 bp, Homo sapiens
agataggggcttaat

SEQ ID NO: 1790680 - DNA, 15 bp, Homo sapiens
gataggggcttaatg

SEQ ID NO: 1790681 - DNA, 15 bp, Homo sapiens
ataggggcttaatgg

SEQ ID NO: 1790682 - DNA, 15 bp, Homo sapiens
taggggcttaatggg

SEQ ID NO: 1790683 - DNA, 15 bp, Homo sapiens
aggggcttaatgggc

SEQ ID NO: 1790684 - DNA, 15 bp, Homo sapiens
ggggcttaatgggca

SEQ ID NO: 1790685 - DNA, 15 bp, Homo sapiens
gggcttaatgggcat

SEQ ID NO: 1790686 - DNA, 15 bp, Homo sapiens
ggcttaatgggcatt

SEQ ID NO: 1790687 - DNA, 15 bp, Homo sapiens
gcttaatgggcattt

SEQ ID NO: 1790688 - DNA, 15 bp, Homo sapiens
cttaatgggcatttt

SEQ ID NO: 1790689 - DNA, 15 bp, Homo sapiens
ttaatgggcattttt

SEQ ID NO: 1790690 - DNA, 15 bp, Homo sapiens
taatgggcatttttg

SEQ ID NO: 1790691 - DNA, 15 bp, Homo sapiens
atgggcatttttgtg

SEQ ID NO: 1790692 - DNA, 15 bp, Homo sapiens
tgggcatttttgtgc

SEQ ID NO: 1790693 - DNA, 15 bp, Homo sapiens
gggcatttttgtgct

SEQ ID NO: 1790694 - DNA, 15 bp, Homo sapiens
ggcatttttgtgctt

SEQ ID NO: 1790695 - DNA, 15 bp, Homo sapiens
gcatttttgtgctta

SEQ ID NO: 1790696 - DNA, 15 bp, Homo sapiens
catttttgtgcttat

SEQ ID NO: 1790697 - DNA, 15 bp, Homo sapiens
atttttgtgcttatt

SEQ ID NO: 1790698 - DNA, 15 bp, Homo sapiens
tttttgtgcttattt

SEQ ID NO: 1790699 - DNA, 15 bp, Homo sapiens
ttttgtgcttattta

SEQ ID NO: 1790700 - DNA, 15 bp, Homo sapiens
tttgtgcttatttaa

SEQ ID NO: 1790701 - DNA, 15 bp, Homo sapiens
ttgtgcttatttaat

SEQ ID NO: 1790702 - DNA, 15 bp, Homo sapiens
tgtgcttatttaatc

SEQ ID NO: 1790703 - DNA, 15 bp, Homo sapiens
gtgcttatttaatcc

SEQ ID NO: 1790704 - DNA, 15 bp, Homo sapiens
tgcttatttaatcct

SEQ ID NO: 1790705 - DNA, 15 bp, Homo sapiens
gcttatttaatcctt

SEQ ID NO: 1790706 - DNA, 15 bp, Homo sapiens
cttatttaatccttt

SEQ ID NO: 1790707 - DNA, 15 bp, Homo sapiens
ttatttaatcctttt

SEQ ID NO: 1790708 - DNA, 15 bp, Homo sapiens
tatttaatccttttc

SEQ ID NO: 1790709 - DNA, 15 bp, Homo sapiens
atttaatccttttcc

SEQ ID NO: 1790710 - DNA, 15 bp, Homo sapiens
tttaatccttttcct

SEQ ID NO: 1790711 - DNA, 15 bp, Homo sapiens
ttaatccttttcctg

SEQ ID NO: 1790712 - DNA, 15 bp, Homo sapiens
taatccttttcctgt

SEQ ID NO: 1790713 - DNA, 15 bp, Homo sapiens
aatccttttcctgtc

SEQ ID NO: 1790714 - DNA, 15 bp, Homo sapiens
atccttttcctgtct

SEQ ID NO: 1790715 - DNA, 15 bp, Homo sapiens
tccttttcctgtctc

SEQ ID NO: 1790716 - DNA, 15 bp, Homo sapiens
ccttttcctgtctct

SEQ ID NO: 1790717 - DNA, 15 bp, Homo sapiens
cttttcctgtctcta

SEQ ID NO: 1790718 - DNA, 15 bp, Homo sapiens
ttttcctgtctctag

SEQ ID NO: 1790719 - DNA, 15 bp, Homo sapiens
tttcctgtctctagg

SEQ ID NO: 1790720 - DNA, 15 bp, Homo sapiens
ttcctgtctctaggc

SEQ ID NO: 1790721 - DNA, 15 bp, Homo sapiens
tcctgtctctaggca

SEQ ID NO: 1790722 - DNA, 15 bp, Homo sapiens
cctgtctctaggcag

SEQ ID NO: 1790723 - DNA, 15 bp, Homo sapiens
ctgtctctaggcagt

SEQ ID NO: 1790724 - DNA, 15 bp, Homo sapiens
tgtctctaggcagtg

SEQ ID NO: 1790725 - DNA, 15 bp, Homo sapiens
gtctctaggcagtgt

SEQ ID NO: 1790726 - DNA, 15 bp, Homo sapiens
tctctaggcagtgta

SEQ ID NO: 1790727 - DNA, 15 bp, Homo sapiens
ctctaggcagtgtac

SEQ ID NO: 1790728 - DNA, 15 bp, Homo sapiens
tctaggcagtgtaca

SEQ ID NO: 1790729 - DNA, 15 bp, Homo sapiens
ctaggcagtgtacag

SEQ ID NO: 1790730 - DNA, 15 bp, Homo sapiens
taggcagtgtacaga

SEQ ID NO: 1790731 - DNA, 15 bp, Homo sapiens
aggcagtgtacagat

SEQ ID NO: 1790732 - DNA, 15 bp, Homo sapiens
ggcagtgtacagata

SEQ ID NO: 1790733 - DNA, 15 bp, Homo sapiens
gcagtgtacagatag

SEQ ID NO: 1790734 - DNA, 15 bp, Homo sapiens
cagtgtacagatagg

SEQ ID NO: 1790735 - DNA, 15 bp, Homo sapiens
agtgtacagataggg

SEQ ID NO: 1790736 - DNA, 15 bp, Homo sapiens
gtgtacagatagggg

SEQ ID NO: 1790737 - DNA, 15 bp, Homo sapiens
tgtacagatagggga

SEQ ID NO: 1790738 - DNA, 15 bp, Homo sapiens
gtacagataggggaa

SEQ ID NO: 1790739 - DNA, 15 bp, Homo sapiens
tacagataggggaaa

SEQ ID NO: 1790740 - DNA, 15 bp, Homo sapiens
acagataggggaaat

SEQ ID NO: 1790741 - DNA, 15 bp, Homo sapiens
cagataggggaaatt

SEQ ID NO: 1790742 - DNA, 15 bp, Homo sapiens
agataggggaaattg

SEQ ID NO: 1790743 - DNA, 15 bp, Homo sapiens
gataggggaaattgt

SEQ ID NO: 1790744 - DNA, 15 bp, Homo sapiens
ataggggaaattgtg

SEQ ID NO: 1790745 - DNA, 15 bp, Homo sapiens
taggggaaattgtgt

SEQ ID NO: 1790746 - DNA, 15 bp, Homo sapiens
aggggaaattgtgtt

SEQ ID NO: 1790747 - DNA, 15 bp, Homo sapiens
ggggaaattgtgttt

SEQ ID NO: 1790748 - DNA, 15 bp, Homo sapiens
gggaaattgtgtttc

SEQ ID NO: 1790749 - DNA, 15 bp, Homo sapiens
ggaaattgtgtttcc

SEQ ID NO: 1790750 - DNA, 15 bp, Homo sapiens
gaaattgtgtttcct

SEQ ID NO: 1790751 - DNA, 15 bp, Homo sapiens
aaattgtgtttcctg

SEQ ID NO: 1790752 - DNA, 15 bp, Homo sapiens
aattgtgtttcctga

SEQ ID NO: 1790753 - DNA, 15 bp, Homo sapiens
attgtgtttcctgag

SEQ ID NO: 1790754 - DNA, 15 bp, Homo sapiens
ttgtgtttcctgagt

SEQ ID NO: 1790755 - DNA, 15 bp, Homo sapiens
tgtgtttcctgagta

SEQ ID NO: 1790756 - DNA, 15 bp, Homo sapiens
gtgtttcctgagtac

SEQ ID NO: 1790757 - DNA, 15 bp, Homo sapiens
tgtttcctgagtact

SEQ ID NO: 1790758 - DNA, 15 bp, Homo sapiens
gtttcctgagtactt

SEQ ID NO: 1790759 - DNA, 15 bp, Homo sapiens
tttcctgagtacttt

SEQ ID NO: 1790760 - DNA, 15 bp, Homo sapiens
ttcctgagtactttt

SEQ ID NO: 1790761 - DNA, 15 bp, Homo sapiens
tcctgagtactttta

SEQ ID NO: 1790762 - DNA, 15 bp, Homo sapiens
cctgagtacttttat

SEQ ID NO: 1790763 - DNA, 15 bp, Homo sapiens
ctgagtacttttata

SEQ ID NO: 1790764 - DNA, 15 bp, Homo sapiens
tgagtacttttatat

SEQ ID NO: 1790765 - DNA, 15 bp, Homo sapiens
gagtacttttatatg

SEQ ID NO: 1790766 - DNA, 15 bp, Homo sapiens
agtacttttatatgc

SEQ ID NO: 1790767 - DNA, 15 bp, Homo sapiens
gtacttttatatgcc

SEQ ID NO: 1790768 - DNA, 15 bp, Homo sapiens
tacttttatatgcca

SEQ ID NO: 1790769 - DNA, 15 bp, Homo sapiens
acttttatatgccat

SEQ ID NO: 1790770 - DNA, 15 bp, Homo sapiens
cttttatatgccatg

SEQ ID NO: 1790771 - DNA, 15 bp, Homo sapiens
ttttatatgccatgg

SEQ ID NO: 1790772 - DNA, 15 bp, Homo sapiens
tttatatgccatgga

SEQ ID NO: 1790773 - DNA, 15 bp, Homo sapiens
ttatatgccatggaa

SEQ ID NO: 1790774 - DNA, 15 bp, Homo sapiens
tatatgccatggaac

SEQ ID NO: 1790775 - DNA, 15 bp, Homo sapiens
atatgccatggaact

SEQ ID NO: 1790776 - DNA, 15 bp, Homo sapiens
tatgccatggaactg

SEQ ID NO: 1790777 - DNA, 15 bp, Homo sapiens
atgccatggaactgt

SEQ ID NO: 1790778 - DNA, 15 bp, Homo sapiens
tgccatggaactgtg

SEQ ID NO: 1790779 - DNA, 15 bp, Homo sapiens
gccatggaactgtgg

SEQ ID NO: 1790780 - DNA, 15 bp, Homo sapiens
ccatggaactgtggg

SEQ ID NO: 1790781 - DNA, 15 bp, Homo sapiens
catggaactgtgggg

SEQ ID NO: 1790782 - DNA, 15 bp, Homo sapiens
atggaactgtggggg

SEQ ID NO: 1790783 - DNA, 15 bp, Homo sapiens
tggaactgtgggggc

SEQ ID NO: 1790784 - DNA, 15 bp, Homo sapiens
ggaactgtgggggct

SEQ ID NO: 1790785 - DNA, 15 bp, Homo sapiens
gaactgtgggggctt

SEQ ID NO: 1790786 - DNA, 15 bp, Homo sapiens
aactgtgggggcttt

SEQ ID NO: 1790787 - DNA, 15 bp, Homo sapiens
actgtgggggctttt

SEQ ID NO: 1790788 - DNA, 15 bp, Homo sapiens
ctgtgggggcttttt

SEQ ID NO: 1790789 - DNA, 15 bp, Homo sapiens
tgtgggggcttttta

SEQ ID NO: 1790790 - DNA, 15 bp, Homo sapiens
gtgggggctttttat

SEQ ID NO: 1790791 - DNA, 15 bp, Homo sapiens
tgggggctttttata

SEQ ID NO: 1790792 - DNA, 15 bp, Homo sapiens
gggggctttttatat

SEQ ID NO: 1790793 - DNA, 15 bp, Homo sapiens
ggggctttttatatt

SEQ ID NO: 1790794 - DNA, 15 bp, Homo sapiens
gggctttttatattt

SEQ ID NO: 1790795 - DNA, 15 bp, Homo sapiens
ggctttttatatttt

SEQ ID NO: 1790796 - DNA, 15 bp, Homo sapiens
gctttttatattttg

SEQ ID NO: 1790797 - DNA, 15 bp, Homo sapiens
ttttatattttgaaa

SEQ ID NO: 1790798 - DNA, 15 bp, Homo sapiens
tttatattttgaaat

SEQ ID NO: 1790799 - DNA, 15 bp, Homo sapiens
ttatattttgaaata

SEQ ID NO: 1790800 - DNA, 15 bp, Homo sapiens
tatattttgaaatat

SEQ ID NO: 1790801 - DNA, 15 bp, Homo sapiens
atattttgaaatatg

SEQ ID NO: 1790802 - DNA, 15 bp, Homo sapiens
tattttgaaatatga

SEQ ID NO: 1790803 - DNA, 15 bp, Homo sapiens
attttgaaatatgaa

SEQ ID NO: 1790804 - DNA, 15 bp, Homo sapiens
ttttgaaatatgaat

SEQ ID NO: 1790805 - DNA, 15 bp, Homo sapiens
tttgaaatatgaatt

SEQ ID NO: 1790806 - DNA, 15 bp, Homo sapiens
ttgaaatatgaattc

SEQ ID NO: 1790807 - DNA, 15 bp, Homo sapiens
tgaaatatgaattca

SEQ ID NO: 1790808 - DNA, 15 bp, Homo sapiens
gaaatatgaattcac

SEQ ID NO: 1790809 - DNA, 15 bp, Homo sapiens
aaatatgaattcacg

SEQ ID NO: 1790810 - DNA, 15 bp, Homo sapiens
aatatgaattcacgt

SEQ ID NO: 1790811 - DNA, 15 bp, Homo sapiens
atatgaattcacgta

SEQ ID NO: 1790812 - DNA, 15 bp, Homo sapiens
tatgaattcacgtac

SEQ ID NO: 1790813 - DNA, 15 bp, Homo sapiens
atgaattcacgtaca

SEQ ID NO: 1790814 - DNA, 15 bp, Homo sapiens
tgaattcacgtacat

SEQ ID NO: 1790815 - DNA, 15 bp, Homo sapiens
gaattcacgtacatg

SEQ ID NO: 1790816 - DNA, 15 bp, Homo sapiens
aattcacgtacatgt

SEQ ID NO: 1790817 - DNA, 15 bp, Homo sapiens
attcacgtacatgtt

SEQ ID NO: 1790818 - DNA, 15 bp, Homo sapiens
ttcacgtacatgtta

SEQ ID NO: 1790819 - DNA, 15 bp, Homo sapiens
tcacgtacatgttag

SEQ ID NO: 1790820 - DNA, 15 bp, Homo sapiens
cacgtacatgttagg

SEQ ID NO: 1790821 - DNA, 15 bp, Homo sapiens
acgtacatgttaggc

SEQ ID NO: 1790822 - DNA, 15 bp, Homo sapiens
cgtacatgttaggca

SEQ ID NO: 1790823 - DNA, 15 bp, Homo sapiens
gtacatgttaggcag

SEQ ID NO: 1790824 - DNA, 15 bp, Homo sapiens
tacatgttaggcaga

SEQ ID NO: 1790825 - DNA, 15 bp, Homo sapiens
acatgttaggcagaa

SEQ ID NO: 1790826 - DNA, 15 bp, Homo sapiens
catgttaggcagaat

SEQ ID NO: 1790827 - DNA, 15 bp, Homo sapiens
atgttaggcagaatt

SEQ ID NO: 1790828 - DNA, 15 bp, Homo sapiens
tgttaggcagaattt

SEQ ID NO: 1790829 - DNA, 15 bp, Homo sapiens
gttaggcagaatttt

SEQ ID NO: 1790830 - DNA, 15 bp, Homo sapiens
ttaggcagaatttta

SEQ ID NO: 1790831 - DNA, 15 bp, Homo sapiens
taggcagaattttat

SEQ ID NO: 1790832 - DNA, 15 bp, Homo sapiens
aggcagaattttata

SEQ ID NO: 1790833 - DNA, 15 bp, Homo sapiens
ggcagaattttatac

SEQ ID NO: 1790834 - DNA, 15 bp, Homo sapiens
gcagaattttatact

SEQ ID NO: 1790835 - DNA, 15 bp, Homo sapiens
cagaattttatactc

SEQ ID NO: 1790836 - DNA, 15 bp, Homo sapiens
agaattttatactct

SEQ ID NO: 1790837 - DNA, 15 bp, Homo sapiens
gaattttatactctt

SEQ ID NO: 1790838 - DNA, 15 bp, Homo sapiens
aattttatactcttt

SEQ ID NO: 1790839 - DNA, 15 bp, Homo sapiens
attttatactctttc

SEQ ID NO: 1790840 - DNA, 15 bp, Homo sapiens
ttttatactctttca

SEQ ID NO: 1790841 - DNA, 15 bp, Homo sapiens
tttatactctttcaa

SEQ ID NO: 1790842 - DNA, 15 bp, Homo sapiens
ttatactctttcaag

SEQ ID NO: 1790843 - DNA, 15 bp, Homo sapiens
tatactctttcaagg

SEQ ID NO: 1790844 - DNA, 15 bp, Homo sapiens
atactctttcaagga

SEQ ID NO: 1790845 - DNA, 15 bp, Homo sapiens
tactctttcaaggat

SEQ ID NO: 1790846 - DNA, 15 bp, Homo sapiens
actctttcaaggatc

SEQ ID NO: 1790847 - DNA, 15 bp, Homo sapiens
ctctttcaaggatct

SEQ ID NO: 1790848 - DNA, 15 bp, Homo sapiens
tctttcaaggatctt

SEQ ID NO: 1790849 - DNA, 15 bp, Homo sapiens
ctttcaaggatcttt

SEQ ID NO: 1790850 - DNA, 15 bp, Homo sapiens
tttcaaggatctttc

SEQ ID NO: 1790851 - DNA, 15 bp, Homo sapiens
ttcaaggatctttct

SEQ ID NO: 1790852 - DNA, 15 bp, Homo sapiens
tcaaggatctttcta

SEQ ID NO: 1790853 - DNA, 15 bp, Homo sapiens
caaggatctttctaa

SEQ ID NO: 1790854 - DNA, 15 bp, Homo sapiens
aaggatctttctaaa

SEQ ID NO: 1790855 - DNA, 15 bp, Homo sapiens
aggatctttctaaag

SEQ ID NO: 1790856 - DNA, 15 bp, Homo sapiens
ggatctttctaaaga

SEQ ID NO: 1790857 - DNA, 15 bp, Homo sapiens
gatctttctaaagat

SEQ ID NO: 1790858 - DNA, 15 bp, Homo sapiens
atctttctaaagatt

SEQ ID NO: 1790859 - DNA, 15 bp, Homo sapiens
tctttctaaagattt

SEQ ID NO: 1790860 - DNA, 15 bp, Homo sapiens
ctttctaaagatttc

SEQ ID NO: 1790861 - DNA, 15 bp, Homo sapiens
tttctaaagatttca

SEQ ID NO: 1790862 - DNA, 15 bp, Homo sapiens
ttctaaagatttcac

SEQ ID NO: 1790863 - DNA, 15 bp, Homo sapiens
tctaaagatttcaca

SEQ ID NO: 1790864 - DNA, 15 bp, Homo sapiens
ctaaagatttcacat

SEQ ID NO: 1790865 - DNA, 15 bp, Homo sapiens
taaagatttcacatt

SEQ ID NO: 1790866 - DNA, 15 bp, Homo sapiens
aaagatttcacattg

SEQ ID NO: 1790867 - DNA, 15 bp, Homo sapiens
aagatttcacattgg

SEQ ID NO: 1790868 - DNA, 15 bp, Homo sapiens
agatttcacattggt

SEQ ID NO: 1790869 - DNA, 15 bp, Homo sapiens
gatttcacattggta

SEQ ID NO: 1790870 - DNA, 15 bp, Homo sapiens
atttcacattggtag

SEQ ID NO: 1790871 - DNA, 15 bp, Homo sapiens
tttcacattggtagc

SEQ ID NO: 1790872 - DNA, 15 bp, Homo sapiens
ttcacattggtagca

SEQ ID NO: 1790873 - DNA, 15 bp, Homo sapiens
tcacattggtagcag

SEQ ID NO: 1790874 - DNA, 15 bp, Homo sapiens
cacattggtagcagt

SEQ ID NO: 1790875 - DNA, 15 bp, Homo sapiens
acattggtagcagtt

SEQ ID NO: 1790876 - DNA, 15 bp, Homo sapiens
cattggtagcagttc

SEQ ID NO: 1790877 - DNA, 15 bp, Homo sapiens
attggtagcagttcc

SEQ ID NO: 1790878 - DNA, 15 bp, Homo sapiens
ttggtagcagttcca

SEQ ID NO: 1790879 - DNA, 15 bp, Homo sapiens
tggtagcagttccat

SEQ ID NO: 1790880 - DNA, 15 bp, Homo sapiens
ggtagcagttccatt

SEQ ID NO: 1790881 - DNA, 15 bp, Homo sapiens
gtagcagttccattc

SEQ ID NO: 1790882 - DNA, 15 bp, Homo sapiens
tagcagttccattca

SEQ ID NO: 1790883 - DNA, 15 bp, Homo sapiens
agcagttccattcac

SEQ ID NO: 1790884 - DNA, 15 bp, Homo sapiens
gcagttccattcaca

SEQ ID NO: 1790885 - DNA, 15 bp, Homo sapiens
cagttccattcacag

SEQ ID NO: 1790886 - DNA, 15 bp, Homo sapiens
agttccattcacagt

SEQ ID NO: 1790887 - DNA, 15 bp, Homo sapiens
gttccattcacagtc

SEQ ID NO: 1790888 - DNA, 15 bp, Homo sapiens
ttccattcacagtca

SEQ ID NO: 1790889 - DNA, 15 bp, Homo sapiens
tccattcacagtcag

SEQ ID NO: 1790890 - DNA, 15 bp, Homo sapiens
ccattcacagtcaga

SEQ ID NO: 1790891 - DNA, 15 bp, Homo sapiens
cattcacagtcagat

SEQ ID NO: 1790892 - DNA, 15 bp, Homo sapiens
attcacagtcagata

SEQ ID NO: 1790893 - DNA, 15 bp, Homo sapiens
ttcacagtcagatat

SEQ ID NO: 1790894 - DNA, 15 bp, Homo sapiens
tcacagtcagatatc

SEQ ID NO: 1790895 - DNA, 15 bp, Homo sapiens
cacagtcagatatca

SEQ ID NO: 1790896 - DNA, 15 bp, Homo sapiens
acagtcagatatcaa

SEQ ID NO: 1790897 - DNA, 15 bp, Homo sapiens
cagtcagatatcaat

SEQ ID NO: 1790898 - DNA, 15 bp, Homo sapiens
agtcagatatcaata

SEQ ID NO: 1790899 - DNA, 15 bp, Homo sapiens
gtcagatatcaatag

SEQ ID NO: 1790900 - DNA, 15 bp, Homo sapiens
tcagatatcaataga

SEQ ID NO: 1790901 - DNA, 15 bp, Homo sapiens
cagatatcaatagaa

SEQ ID NO: 1790902 - DNA, 15 bp, Homo sapiens
agatatcaatagaat

SEQ ID NO: 1790903 - DNA, 15 bp, Homo sapiens
gatatcaatagaatt

SEQ ID NO: 1790904 - DNA, 15 bp, Homo sapiens
atatcaatagaattc

SEQ ID NO: 1790905 - DNA, 15 bp, Homo sapiens
tatcaatagaattca

SEQ ID NO: 1790906 - DNA, 15 bp, Homo sapiens
atcaatagaattcat

SEQ ID NO: 1790907 - DNA, 15 bp, Homo sapiens
tcaatagaattcatt

SEQ ID NO: 1790908 - DNA, 15 bp, Homo sapiens
caatagaattcattc

SEQ ID NO: 1790909 - DNA, 15 bp, Homo sapiens
aatagaattcattct

SEQ ID NO: 1790910 - DNA, 15 bp, Homo sapiens
atagaattcattcta

SEQ ID NO: 1790911 - DNA, 15 bp, Homo sapiens
tagaattcattctaa

SEQ ID NO: 1790912 - DNA, 15 bp, Homo sapiens
agaattcattctaat

SEQ ID NO: 1790913 - DNA, 15 bp, Homo sapiens
gaattcattctaata

SEQ ID NO: 1790914 - DNA, 15 bp, Homo sapiens
aattcattctaatat

SEQ ID NO: 1790915 - DNA, 15 bp, Homo sapiens
attcattctaatatc

SEQ ID NO: 1790916 - DNA, 15 bp, Homo sapiens
ttcattctaatatca

SEQ ID NO: 1790917 - DNA, 15 bp, Homo sapiens
tcattctaatatcaa

SEQ ID NO: 1790918 - DNA, 15 bp, Homo sapiens
cattctaatatcaaa

SEQ ID NO: 1790919 - DNA, 15 bp, Homo sapiens
attctaatatcaaac

SEQ ID NO: 1790920 - DNA, 15 bp, Homo sapiens
ttctaatatcaaacc

SEQ ID NO: 1790921 - DNA, 15 bp, Homo sapiens
tctaatatcaaacct

SEQ ID NO: 1790922 - DNA, 15 bp, Homo sapiens
ctaatatcaaacctg

SEQ ID NO: 1790923 - DNA, 15 bp, Homo sapiens
taatatcaaacctgt

SEQ ID NO: 1790924 - DNA, 15 bp, Homo sapiens
aatatcaaacctgtg

SEQ ID NO: 1790925 - DNA, 15 bp, Homo sapiens
atatcaaacctgtgg

SEQ ID NO: 1790926 - DNA, 15 bp, Homo sapiens
tatcaaacctgtggc

SEQ ID NO: 1790927 - DNA, 15 bp, Homo sapiens
atcaaacctgtggct

SEQ ID NO: 1790928 - DNA, 15 bp, Homo sapiens
tcaaacctgtggctt

SEQ ID NO: 1790929 - DNA, 15 bp, Homo sapiens
caaacctgtggcttt

SEQ ID NO: 1790930 - DNA, 15 bp, Homo sapiens
aaacctgtggctttc

SEQ ID NO: 1790931 - DNA, 15 bp, Homo sapiens
aacctgtggctttct

SEQ ID NO: 1790932 - DNA, 15 bp, Homo sapiens
acctgtggctttctt

SEQ ID NO: 1790933 - DNA, 15 bp, Homo sapiens
cctgtggctttcttg

SEQ ID NO: 1790934 - DNA, 15 bp, Homo sapiens
ctgtggctttcttgt

SEQ ID NO: 1790935 - DNA, 15 bp, Homo sapiens
tgtggctttcttgtt

SEQ ID NO: 1790936 - DNA, 15 bp, Homo sapiens
gtggctttcttgtta

SEQ ID NO: 1790937 - DNA, 15 bp, Homo sapiens
tggctttcttgttac

SEQ ID NO: 1790938 - DNA, 15 bp, Homo sapiens
ggctttcttgttaca

SEQ ID NO: 1790939 - DNA, 15 bp, Homo sapiens
gctttcttgttacaa

SEQ ID NO: 1790940 - DNA, 15 bp, Homo sapiens
ctttcttgttacaac

SEQ ID NO: 1790941 - DNA, 15 bp, Homo sapiens
tttcttgttacaact

SEQ ID NO: 1790942 - DNA, 15 bp, Homo sapiens
ttcttgttacaactt

SEQ ID NO: 1790943 - DNA, 15 bp, Homo sapiens
tcttgttacaactta

SEQ ID NO: 1790944 - DNA, 15 bp, Homo sapiens
cttgttacaacttaa

SEQ ID NO: 1790945 - DNA, 15 bp, Homo sapiens
ttgttacaacttaat

SEQ ID NO: 1790946 - DNA, 15 bp, Homo sapiens
tgttacaacttaatc

SEQ ID NO: 1790947 - DNA, 15 bp, Homo sapiens
gttacaacttaatct

SEQ ID NO: 1790948 - DNA, 15 bp, Homo sapiens
ttacaacttaatctg

SEQ ID NO: 1790949 - DNA, 15 bp, Homo sapiens
tacaacttaatctgt

SEQ ID NO: 1790950 - DNA, 15 bp, Homo sapiens
acaacttaatctgtt

SEQ ID NO: 1790951 - DNA, 15 bp, Homo sapiens
caacttaatctgttt

SEQ ID NO: 1790952 - DNA, 15 bp, Homo sapiens
aacttaatctgtttc

SEQ ID NO: 1790953 - DNA, 15 bp, Homo sapiens
acttaatctgtttct

SEQ ID NO: 1790954 - DNA, 15 bp, Homo sapiens
ttaatctgtttcttc

SEQ ID NO: 1790955 - DNA, 15 bp, Homo sapiens
taatctgtttcttca

SEQ ID NO: 1790956 - DNA, 15 bp, Homo sapiens
aatctgtttcttcaa

SEQ ID NO: 1790957 - DNA, 15 bp, Homo sapiens
atctgtttcttcaat

SEQ ID NO: 1790958 - DNA, 15 bp, Homo sapiens
tctgtttcttcaatg

SEQ ID NO: 1790959 - DNA, 15 bp, Homo sapiens
ctgtttcttcaatgt

SEQ ID NO: 1790960 - DNA, 15 bp, Homo sapiens
tgtttcttcaatgtg

SEQ ID NO: 1790961 - DNA, 15 bp, Homo sapiens
gtttcttcaatgtgg

SEQ ID NO: 1790962 - DNA, 15 bp, Homo sapiens
tttcttcaatgtgga

SEQ ID NO: 1790963 - DNA, 15 bp, Homo sapiens
ttcttcaatgtggag

SEQ ID NO: 1790964 - DNA, 15 bp, Homo sapiens
tcttcaatgtggagt

SEQ ID NO: 1790965 - DNA, 15 bp, Homo sapiens
cttcaatgtggagtt

SEQ ID NO: 1790966 - DNA, 15 bp, Homo sapiens
ttcaatgtggagttt

SEQ ID NO: 1790967 - DNA, 15 bp, Homo sapiens
tcaatgtggagttta

SEQ ID NO: 1790968 - DNA, 15 bp, Homo sapiens
caatgtggagtttaa

SEQ ID NO: 1790969 - DNA, 15 bp, Homo sapiens
aatgtggagtttaac

SEQ ID NO: 1790970 - DNA, 15 bp, Homo sapiens
atgtggagtttaact

SEQ ID NO: 1790971 - DNA, 15 bp, Homo sapiens
tgtggagtttaactc

SEQ ID NO: 1790972 - DNA, 15 bp, Homo sapiens
gtggagtttaactca

SEQ ID NO: 1790973 - DNA, 15 bp, Homo sapiens
tggagtttaactcaa

SEQ ID NO: 1790974 - DNA, 15 bp, Homo sapiens
ggagtttaactcaag

SEQ ID NO: 1790975 - DNA, 15 bp, Homo sapiens
gagtttaactcaagc

SEQ ID NO: 1790976 - DNA, 15 bp, Homo sapiens
agtttaactcaagcc

SEQ ID NO: 1790977 - DNA, 15 bp, Homo sapiens
gtttaactcaagcca

SEQ ID NO: 1790978 - DNA, 15 bp, Homo sapiens
tttaactcaagccaa

SEQ ID NO: 1790979 - DNA, 15 bp, Homo sapiens
ttaactcaagccaaa

SEQ ID NO: 1790980 - DNA, 15 bp, Homo sapiens
taactcaagccaaat

SEQ ID NO: 1790981 - DNA, 15 bp, Homo sapiens
aactcaagccaaatc

SEQ ID NO: 1790982 - DNA, 15 bp, Homo sapiens
actcaagccaaatcc

SEQ ID NO: 1790983 - DNA, 15 bp, Homo sapiens
ctcaagccaaatcct

SEQ ID NO: 1790984 - DNA, 15 bp, Homo sapiens
tcaagccaaatcctt

SEQ ID NO: 1790985 - DNA, 15 bp, Homo sapiens
caagccaaatccttt

SEQ ID NO: 1790986 - DNA, 15 bp, Homo sapiens
aagccaaatcctttt

SEQ ID NO: 1790987 - DNA, 15 bp, Homo sapiens
agccaaatccttttt

SEQ ID NO: 1790988 - DNA, 15 bp, Homo sapiens
gccaaatccttttta

SEQ ID NO: 1790989 - DNA, 15 bp, Homo sapiens
ccaaatcctttttag

SEQ ID NO: 1790990 - DNA, 15 bp, Homo sapiens
caaatcctttttaga

SEQ ID NO: 1790991 - DNA, 15 bp, Homo sapiens
aaatcctttttagaa

SEQ ID NO: 1790992 - DNA, 15 bp, Homo sapiens
aatcctttttagaat

SEQ ID NO: 1790993 - DNA, 15 bp, Homo sapiens
atcctttttagaatc

SEQ ID NO: 1790994 - DNA, 15 bp, Homo sapiens
tcctttttagaatcc

SEQ ID NO: 1790995 - DNA, 15 bp, Homo sapiens
cctttttagaatcct

SEQ ID NO: 1790996 - DNA, 15 bp, Homo sapiens
ctttttagaatcctc

SEQ ID NO: 1790997 - DNA, 15 bp, Homo sapiens
tttttagaatcctcc

SEQ ID NO: 1790998 - DNA, 15 bp, Homo sapiens
ttttagaatcctcct

SEQ ID NO: 1790999 - DNA, 15 bp, Homo sapiens
tttagaatcctcctt

SEQ ID NO: 1791000 - DNA, 15 bp, Homo sapiens
ttagaatcctccttc

SEQ ID NO: 1791001 - DNA, 15 bp, Homo sapiens
tagaatcctccttcc

SEQ ID NO: 1791002 - DNA, 15 bp, Homo sapiens
agaatcctccttccc

SEQ ID NO: 1791003 - DNA, 15 bp, Homo sapiens
gaatcctccttccca

SEQ ID NO: 1791004 - DNA, 15 bp, Homo sapiens
aatcctccttcccaa

SEQ ID NO: 1791005 - DNA, 15 bp, Homo sapiens
atcctccttcccaag

SEQ ID NO: 1791006 - DNA, 15 bp, Homo sapiens
tcctccttcccaagc

SEQ ID NO: 1791007 - DNA, 15 bp, Homo sapiens
cctccttcccaagct

SEQ ID NO: 1791008 - DNA, 15 bp, Homo sapiens
ctccttcccaagctt

SEQ ID NO: 1791009 - DNA, 15 bp, Homo sapiens
tccttcccaagctta

SEQ ID NO: 1791010 - DNA, 15 bp, Homo sapiens
ccttcccaagcttac

SEQ ID NO: 1791011 - DNA, 15 bp, Homo sapiens
cttcccaagcttacc

SEQ ID NO: 1791012 - DNA, 15 bp, Homo sapiens
ttcccaagcttacct

SEQ ID NO: 1791013 - DNA, 15 bp, Homo sapiens
tcccaagcttacctg

SEQ ID NO: 1791014 - DNA, 15 bp, Homo sapiens
cccaagcttacctga

SEQ ID NO: 1791015 - DNA, 15 bp, Homo sapiens
ccaagcttacctgag

SEQ ID NO: 1791016 - DNA, 15 bp, Homo sapiens
caagcttacctgagc

SEQ ID NO: 1791017 - DNA, 15 bp, Homo sapiens
aagcttacctgagct

SEQ ID NO: 1791018 - DNA, 15 bp, Homo sapiens
agcttacctgagctt

SEQ ID NO: 1791019 - DNA, 15 bp, Homo sapiens
gcttacctgagcttc

SEQ ID NO: 1791020 - DNA, 15 bp, Homo sapiens
cttacctgagcttcc

SEQ ID NO: 1791021 - DNA, 15 bp, Homo sapiens
ttacctgagcttcct

SEQ ID NO: 1791022 - DNA, 15 bp, Homo sapiens
tacctgagcttccta

SEQ ID NO: 1791023 - DNA, 15 bp, Homo sapiens
acctgagcttcctag

SEQ ID NO: 1791024 - DNA, 15 bp, Homo sapiens
cctgagcttcctagg

SEQ ID NO: 1791025 - DNA, 15 bp, Homo sapiens
ctgagcttcctagga

SEQ ID NO: 1791026 - DNA, 15 bp, Homo sapiens
tgagcttcctaggat

SEQ ID NO: 1791027 - DNA, 15 bp, Homo sapiens
gagcttcctaggatg

SEQ ID NO: 1791028 - DNA, 15 bp, Homo sapiens
agcttcctaggatgc

SEQ ID NO: 1791029 - DNA, 15 bp, Homo sapiens
gcttcctaggatgca

SEQ ID NO: 1791030 - DNA, 15 bp, Homo sapiens
cttcctaggatgcac

SEQ ID NO: 1791031 - DNA, 15 bp, Homo sapiens
ttcctaggatgcaca

SEQ ID NO: 1791032 - DNA, 15 bp, Homo sapiens
tcctaggatgcacat

SEQ ID NO: 1791033 - DNA, 15 bp, Homo sapiens
cctaggatgcacatg

SEQ ID NO: 1791034 - DNA, 15 bp, Homo sapiens
ctaggatgcacatga

SEQ ID NO: 1791035 - DNA, 15 bp, Homo sapiens
taggatgcacatgat

SEQ ID NO: 1791036 - DNA, 15 bp, Homo sapiens
aggatgcacatgatc

SEQ ID NO: 1791037 - DNA, 15 bp, Homo sapiens
ggatgcacatgatct

SEQ ID NO: 1791038 - DNA, 15 bp, Homo sapiens
gatgcacatgatctg

SEQ ID NO: 1791039 - DNA, 15 bp, Homo sapiens
atgcacatgatctgc

SEQ ID NO: 1791040 - DNA, 15 bp, Homo sapiens
tgcacatgatctgcc

SEQ ID NO: 1791041 - DNA, 15 bp, Homo sapiens
gcacatgatctgccc

SEQ ID NO: 1791042 - DNA, 15 bp, Homo sapiens
cacatgatctgcccg

SEQ ID NO: 1791043 - DNA, 15 bp, Homo sapiens
acatgatctgcccgc

SEQ ID NO: 1791044 - DNA, 15 bp, Homo sapiens
catgatctgcccgct

SEQ ID NO: 1791045 - DNA, 15 bp, Homo sapiens
atgatctgcccgctc

SEQ ID NO: 1791046 - DNA, 15 bp, Homo sapiens
tgatctgcccgctct

SEQ ID NO: 1791047 - DNA, 15 bp, Homo sapiens
gatctgcccgctctc

SEQ ID NO: 1791048 - DNA, 15 bp, Homo sapiens
atctgcccgctctcc

SEQ ID NO: 1791049 - DNA, 15 bp, Homo sapiens
tctgcccgctctcca

SEQ ID NO: 1791050 - DNA, 15 bp, Homo sapiens
ctgcccgctctccac

SEQ ID NO: 1791051 - DNA, 15 bp, Homo sapiens
tgcccgctctccacg

SEQ ID NO: 1791052 - DNA, 15 bp, Homo sapiens
gcccgctctccacgt

SEQ ID NO: 1791053 - DNA, 15 bp, Homo sapiens
cccgctctccacgta

SEQ ID NO: 1791054 - DNA, 15 bp, Homo sapiens
ccgctctccacgtac

SEQ ID NO: 1791055 - DNA, 15 bp, Homo sapiens
cgctctccacgtaca

SEQ ID NO: 1791056 - DNA, 15 bp, Homo sapiens
gctctccacgtacaa

SEQ ID NO: 1791057 - DNA, 15 bp, Homo sapiens
ctctccacgtacaag

SEQ ID NO: 1791058 - DNA, 15 bp, Homo sapiens
tctccacgtacaagg

SEQ ID NO: 1791059 - DNA, 15 bp, Homo sapiens
ctccacgtacaagga

SEQ ID NO: 1791060 - DNA, 15 bp, Homo sapiens
tccacgtacaaggag

SEQ ID NO: 1791061 - DNA, 15 bp, Homo sapiens
ccacgtacaaggaga

SEQ ID NO: 1791062 - DNA, 15 bp, Homo sapiens
cacgtacaaggagac

SEQ ID NO: 1791063 - DNA, 15 bp, Homo sapiens
acgtacaaggagaca

SEQ ID NO: 1791064 - DNA, 15 bp, Homo sapiens
cgtacaaggagacat

SEQ ID NO: 1791065 - DNA, 15 bp, Homo sapiens
gtacaaggagacatc

SEQ ID NO: 1791066 - DNA, 15 bp, Homo sapiens
tacaaggagacatct

SEQ ID NO: 1791067 - DNA, 15 bp, Homo sapiens
acaaggagacatctt

SEQ ID NO: 1791068 - DNA, 15 bp, Homo sapiens
caaggagacatcttt

SEQ ID NO: 1791069 - DNA, 15 bp, Homo sapiens
aaggagacatctttg

SEQ ID NO: 1791070 - DNA, 15 bp, Homo sapiens
aggagacatctttga

SEQ ID NO: 1791071 - DNA, 15 bp, Homo sapiens
ggagacatctttgag

SEQ ID NO: 1791072 - DNA, 15 bp, Homo sapiens
gagacatctttgagg

SEQ ID NO: 1791073 - DNA, 15 bp, Homo sapiens
agacatctttgagga

SEQ ID NO: 1791074 - DNA, 15 bp, Homo sapiens
gacatctttgaggat

SEQ ID NO: 1791075 - DNA, 15 bp, Homo sapiens
acatctttgaggatc

SEQ ID NO: 1791076 - DNA, 15 bp, Homo sapiens
catctttgaggatct

SEQ ID NO: 1791077 - DNA, 15 bp, Homo sapiens
atctttgaggatctg

SEQ ID NO: 1791078 - DNA, 15 bp, Homo sapiens
tctttgaggatctgc

SEQ ID NO: 1791079 - DNA, 15 bp, Homo sapiens
ctttgaggatctgcc

SEQ ID NO: 1791080 - DNA, 15 bp, Homo sapiens
tttgaggatctgcct

SEQ ID NO: 1791081 - DNA, 15 bp, Homo sapiens
ttgaggatctgcctg

SEQ ID NO: 1791082 - DNA, 15 bp, Homo sapiens
tgaggatctgcctgg

SEQ ID NO: 1791083 - DNA, 15 bp, Homo sapiens
gaggatctgcctggt

SEQ ID NO: 1791084 - DNA, 15 bp, Homo sapiens
aggatctgcctggtc

SEQ ID NO: 1791085 - DNA, 15 bp, Homo sapiens
ggatctgcctggtcc

SEQ ID NO: 1791086 - DNA, 15 bp, Homo sapiens
gatctgcctggtcca

SEQ ID NO: 1791087 - DNA, 15 bp, Homo sapiens
atctgcctggtccac

SEQ ID NO: 1791088 - DNA, 15 bp, Homo sapiens
tctgcctggtccact

SEQ ID NO: 1791089 - DNA, 15 bp, Homo sapiens
ctgcctggtccactg

SEQ ID NO: 1791090 - DNA, 15 bp, Homo sapiens
tgcctggtccactgc

SEQ ID NO: 1791091 - DNA, 15 bp, Homo sapiens
gcctggtccactgct

SEQ ID NO: 1791092 - DNA, 15 bp, Homo sapiens
cctggtccactgctg

SEQ ID NO: 1791093 - DNA, 15 bp, Homo sapiens
ctggtccactgctgc

SEQ ID NO: 1791094 - DNA, 15 bp, Homo sapiens
tggtccactgctgcc

SEQ ID NO: 1791095 - DNA, 15 bp, Homo sapiens
ggtccactgctgccg

SEQ ID NO: 1791096 - DNA, 15 bp, Homo sapiens
gtccactgctgccgg

SEQ ID NO: 1791097 - DNA, 15 bp, Homo sapiens
tccactgctgccggc

SEQ ID NO: 1791098 - DNA, 15 bp, Homo sapiens
ccactgctgccggca

SEQ ID NO: 1791099 - DNA, 15 bp, Homo sapiens
cactgctgccggcaa

SEQ ID NO: 1791100 - DNA, 15 bp, Homo sapiens
actgctgccggcaag

SEQ ID NO: 1791101 - DNA, 15 bp, Homo sapiens
ctgctgccggcaaga

SEQ ID NO: 1791102 - DNA, 15 bp, Homo sapiens
tgctgccggcaagat

SEQ ID NO: 1791103 - DNA, 15 bp, Homo sapiens
gctgccggcaagatg

SEQ ID NO: 1791104 - DNA, 15 bp, Homo sapiens
ctgccggcaagatgt

SEQ ID NO: 1791105 - DNA, 15 bp, Homo sapiens
tgccggcaagatgtg

SEQ ID NO: 1791106 - DNA, 15 bp, Homo sapiens
gccggcaagatgtga

SEQ ID NO: 1791107 - DNA, 15 bp, Homo sapiens
ccggcaagatgtgat

SEQ ID NO: 1791108 - DNA, 15 bp, Homo sapiens
cggcaagatgtgatg

SEQ ID NO: 1791109 - DNA, 15 bp, Homo sapiens
ggcaagatgtgatgt

SEQ ID NO: 1791110 - DNA, 15 bp, Homo sapiens
gcaagatgtgatgtc

SEQ ID NO: 1791111 - DNA, 15 bp, Homo sapiens
caagatgtgatgtcc

SEQ ID NO: 1791112 - DNA, 15 bp, Homo sapiens
aagatgtgatgtccc

SEQ ID NO: 1791113 - DNA, 15 bp, Homo sapiens
agatgtgatgtccca

SEQ ID NO: 1791114 - DNA, 15 bp, Homo sapiens
gatgtgatgtcccac

SEQ ID NO: 1791115 - DNA, 15 bp, Homo sapiens
atgtgatgtcccacc

SEQ ID NO: 1791116 - DNA, 15 bp, Homo sapiens
tgtgatgtcccacca

SEQ ID NO: 1791117 - DNA, 15 bp, Homo sapiens
gtgatgtcccaccag

SEQ ID NO: 1791118 - DNA, 15 bp, Homo sapiens
tgatgtcccaccagg

SEQ ID NO: 1791119 - DNA, 15 bp, Homo sapiens
gatgtcccaccaggg

SEQ ID NO: 1791120 - DNA, 15 bp, Homo sapiens
atgtcccaccagggc

SEQ ID NO: 1791121 - DNA, 15 bp, Homo sapiens
tgtcccaccagggcc

SEQ ID NO: 1791122 - DNA, 15 bp, Homo sapiens
gtcccaccagggcct

SEQ ID NO: 1791123 - DNA, 15 bp, Homo sapiens
tcccaccagggcctc

SEQ ID NO: 1791124 - DNA, 15 bp, Homo sapiens
cccaccagggcctca

SEQ ID NO: 1791125 - DNA, 15 bp, Homo sapiens
ccaccagggcctcac

SEQ ID NO: 1791126 - DNA, 15 bp, Homo sapiens
caccagggcctcacg

SEQ ID NO: 1791127 - DNA, 15 bp, Homo sapiens
accagggcctcacgc

SEQ ID NO: 1791128 - DNA, 15 bp, Homo sapiens
ccagggcctcacgcg

SEQ ID NO: 1791129 - DNA, 15 bp, Homo sapiens
cagggcctcacgcgg

SEQ ID NO: 1791130 - DNA, 15 bp, Homo sapiens
agggcctcacgcggt

SEQ ID NO: 1791131 - DNA, 15 bp, Homo sapiens
gggcctcacgcggtg

SEQ ID NO: 1791132 - DNA, 15 bp, Homo sapiens
ggcctcacgcggtgg

SEQ ID NO: 1791133 - DNA, 15 bp, Homo sapiens
gcctcacgcggtggc

SEQ ID NO: 1791134 - DNA, 15 bp, Homo sapiens
cctcacgcggtggct

SEQ ID NO: 1791135 - DNA, 15 bp, Homo sapiens
ctcacgcggtggctt

SEQ ID NO: 1791136 - DNA, 15 bp, Homo sapiens
tcacgcggtggcttt

SEQ ID NO: 1791137 - DNA, 15 bp, Homo sapiens
cacgcggtggcttta

SEQ ID NO: 1791138 - DNA, 15 bp, Homo sapiens
acgcggtggctttaa

SEQ ID NO: 1791139 - DNA, 15 bp, Homo sapiens
cgcggtggctttaaa

SEQ ID NO: 1791140 - DNA, 15 bp, Homo sapiens
gcggtggctttaaag

SEQ ID NO: 1791141 - DNA, 15 bp, Homo sapiens
cggtggctttaaagg

SEQ ID NO: 1791142 - DNA, 15 bp, Homo sapiens
ggtggctttaaagga

SEQ ID NO: 1791143 - DNA, 15 bp, Homo sapiens
gtggctttaaaggaa

SEQ ID NO: 1791144 - DNA, 15 bp, Homo sapiens
tggctttaaaggaaa

SEQ ID NO: 1791145 - DNA, 15 bp, Homo sapiens
ggctttaaaggaaac

SEQ ID NO: 1791146 - DNA, 15 bp, Homo sapiens
gctttaaaggaaacc

SEQ ID NO: 1791147 - DNA, 15 bp, Homo sapiens
ctttaaaggaaaccc

SEQ ID NO: 1791148 - DNA, 15 bp, Homo sapiens
tttaaaggaaacccc

SEQ ID NO: 1791149 - DNA, 15 bp, Homo sapiens
ttaaaggaaacccca

SEQ ID NO: 1791150 - DNA, 15 bp, Homo sapiens
taaaggaaaccccag

SEQ ID NO: 1791151 - DNA, 15 bp, Homo sapiens
aaaggaaaccccagg

SEQ ID NO: 1791152 - DNA, 15 bp, Homo sapiens
aaggaaaccccagga

SEQ ID NO: 1791153 - DNA, 15 bp, Homo sapiens
aggaaaccccaggaa

SEQ ID NO: 1791154 - DNA, 15 bp, Homo sapiens
ggaaaccccaggaag

SEQ ID NO: 1791155 - DNA, 15 bp, Homo sapiens
gaaaccccaggaagg

SEQ ID NO: 1791156 - DNA, 15 bp, Homo sapiens
aaaccccaggaaggc

SEQ ID NO: 1791157 - DNA, 15 bp, Homo sapiens
aaccccaggaaggca

SEQ ID NO: 1791158 - DNA, 15 bp, Homo sapiens
accccaggaaggcaa

SEQ ID NO: 1791159 - DNA, 15 bp, Homo sapiens
ccccaggaaggcaaa

SEQ ID NO: 1791160 - DNA, 15 bp, Homo sapiens
cccaggaaggcaaag

SEQ ID NO: 1791161 - DNA, 15 bp, Homo sapiens
ccaggaaggcaaagg

SEQ ID NO: 1791162 - DNA, 15 bp, Homo sapiens
caggaaggcaaaggc

SEQ ID NO: 1791163 - DNA, 15 bp, Homo sapiens
aggaaggcaaaggca

SEQ ID NO: 1791164 - DNA, 15 bp, Homo sapiens
ggaaggcaaaggcag

SEQ ID NO: 1791165 - DNA, 15 bp, Homo sapiens
gaaggcaaaggcagc

SEQ ID NO: 1791166 - DNA, 15 bp, Homo sapiens
aaggcaaaggcagct

SEQ ID NO: 1791167 - DNA, 15 bp, Homo sapiens
aggcaaaggcagctt

SEQ ID NO: 1791168 - DNA, 15 bp, Homo sapiens
ggcaaaggcagcttg

SEQ ID NO: 1791169 - DNA, 15 bp, Homo sapiens
gcaaaggcagcttgg

SEQ ID NO: 1791170 - DNA, 15 bp, Homo sapiens
caaaggcagcttggg

SEQ ID NO: 1791171 - DNA, 15 bp, Homo sapiens
aaaggcagcttgggg

SEQ ID NO: 1791172 - DNA, 15 bp, Homo sapiens
aaggcagcttggggc

SEQ ID NO: 1791173 - DNA, 15 bp, Homo sapiens
aggcagcttggggcc

SEQ ID NO: 1791174 - DNA, 15 bp, Homo sapiens
ggcagcttggggccc

SEQ ID NO: 1791175 - DNA, 15 bp, Homo sapiens
gcagcttggggccct

SEQ ID NO: 1791176 - DNA, 15 bp, Homo sapiens
cagcttggggccctg

SEQ ID NO: 1791177 - DNA, 15 bp, Homo sapiens
agcttggggccctgg

SEQ ID NO: 1791178 - DNA, 15 bp, Homo sapiens
gcttggggccctgga

SEQ ID NO: 1791179 - DNA, 15 bp, Homo sapiens
cttggggccctggaa

SEQ ID NO: 1791180 - DNA, 15 bp, Homo sapiens
ttggggccctggaag

SEQ ID NO: 1791181 - DNA, 15 bp, Homo sapiens
tggggccctggaagg

SEQ ID NO: 1791182 - DNA, 15 bp, Homo sapiens
ggggccctggaaggg

SEQ ID NO: 1791183 - DNA, 15 bp, Homo sapiens
gggccctggaagggg

SEQ ID NO: 1791184 - DNA, 15 bp, Homo sapiens
ggccctggaaggggc

SEQ ID NO: 1791185 - DNA, 15 bp, Homo sapiens
gccctggaaggggcc

SEQ ID NO: 1791186 - DNA, 15 bp, Homo sapiens
ccctggaaggggcca

SEQ ID NO: 1791187 - DNA, 15 bp, Homo sapiens
cctggaaggggccac

SEQ ID NO: 1791188 - DNA, 15 bp, Homo sapiens
ctggaaggggccaca

SEQ ID NO: 1791189 - DNA, 15 bp, Homo sapiens
tggaaggggccacac

SEQ ID NO: 1791190 - DNA, 15 bp, Homo sapiens
ggaaggggccacacc

SEQ ID NO: 1791191 - DNA, 15 bp, Homo sapiens
gaaggggccacaccc

SEQ ID NO: 1791192 - DNA, 15 bp, Homo sapiens
aaggggccacaccca

SEQ ID NO: 1791193 - DNA, 15 bp, Homo sapiens
aggggccacacccag

SEQ ID NO: 1791194 - DNA, 15 bp, Homo sapiens
ggggccacacccagg

SEQ ID NO: 1791195 - DNA, 15 bp, Homo sapiens
gggccacacccaggt

SEQ ID NO: 1791196 - DNA, 15 bp, Homo sapiens
ggccacacccaggtc

SEQ ID NO: 1791197 - DNA, 15 bp, Homo sapiens
gccacacccaggtcc

SEQ ID NO: 1791198 - DNA, 15 bp, Homo sapiens
ccacacccaggtccc

SEQ ID NO: 1791199 - DNA, 15 bp, Homo sapiens
cacacccaggtcccc

SEQ ID NO: 1791200 - DNA, 15 bp, Homo sapiens
acacccaggtcccca

SEQ ID NO: 1791201 - DNA, 15 bp, Homo sapiens
cacccaggtccccag

SEQ ID NO: 1791202 - DNA, 15 bp, Homo sapiens
acccaggtccccagc

SEQ ID NO: 1791203 - DNA, 15 bp, Homo sapiens
cccaggtccccagca

SEQ ID NO: 1791204 - DNA, 15 bp, Homo sapiens
ccaggtccccagcat

SEQ ID NO: 1791205 - DNA, 15 bp, Homo sapiens
caggtccccagcatt

SEQ ID NO: 1791206 - DNA, 15 bp, Homo sapiens
aggtccccagcattg

SEQ ID NO: 1791207 - DNA, 15 bp, Homo sapiens
ggtccccagcattga

SEQ ID NO: 1791208 - DNA, 15 bp, Homo sapiens
gtccccagcattgat

SEQ ID NO: 1791209 - DNA, 15 bp, Homo sapiens
tccccagcattgatc

SEQ ID NO: 1791210 - DNA, 15 bp, Homo sapiens
ccccagcattgatcc

SEQ ID NO: 1791211 - DNA, 15 bp, Homo sapiens
cccagcattgatcct

SEQ ID NO: 1791212 - DNA, 15 bp, Homo sapiens
ccagcattgatccta

SEQ ID NO: 1791213 - DNA, 15 bp, Homo sapiens
cagcattgatcctac

SEQ ID NO: 1791214 - DNA, 15 bp, Homo sapiens
agcattgatcctacc

SEQ ID NO: 1791215 - DNA, 15 bp, Homo sapiens
gcattgatcctacct

SEQ ID NO: 1791216 - DNA, 15 bp, Homo sapiens
cattgatcctacctg

SEQ ID NO: 1791217 - DNA, 15 bp, Homo sapiens
attgatcctacctgt

SEQ ID NO: 1791218 - DNA, 15 bp, Homo sapiens
ttgatcctacctgtg

SEQ ID NO: 1791219 - DNA, 15 bp, Homo sapiens
tgatcctacctgtgc

SEQ ID NO: 1791220 - DNA, 15 bp, Homo sapiens
gatcctacctgtgcc

SEQ ID NO: 1791221 - DNA, 15 bp, Homo sapiens
atcctacctgtgccc

SEQ ID NO: 1791222 - DNA, 15 bp, Homo sapiens
tcctacctgtgcccc

SEQ ID NO: 1791223 - DNA, 15 bp, Homo sapiens
cctacctgtgcccca

SEQ ID NO: 1791224 - DNA, 15 bp, Homo sapiens
ctacctgtgccccac

SEQ ID NO: 1791225 - DNA, 15 bp, Homo sapiens
tacctgtgccccacc

SEQ ID NO: 1791226 - DNA, 15 bp, Homo sapiens
acctgtgccccaccc

SEQ ID NO: 1791227 - DNA, 15 bp, Homo sapiens
cctgtgccccacccc

SEQ ID NO: 1791228 - DNA, 15 bp, Homo sapiens
ctgtgccccacccca

SEQ ID NO: 1791229 - DNA, 15 bp, Homo sapiens
tgtgccccaccccag

SEQ ID NO: 1791230 - DNA, 15 bp, Homo sapiens
gtgccccaccccagt

SEQ ID NO: 1791231 - DNA, 15 bp, Homo sapiens
tgccccaccccagta

SEQ ID NO: 1791232 - DNA, 15 bp, Homo sapiens
gccccaccccagtag

SEQ ID NO: 1791233 - DNA, 15 bp, Homo sapiens
ccccaccccagtagt

SEQ ID NO: 1791234 - DNA, 15 bp, Homo sapiens
cccaccccagtagtc

SEQ ID NO: 1791235 - DNA, 15 bp, Homo sapiens
ccaccccagtagtct

SEQ ID NO: 1791236 - DNA, 15 bp, Homo sapiens
caccccagtagtctc

SEQ ID NO: 1791237 - DNA, 15 bp, Homo sapiens
accccagtagtctcc

SEQ ID NO: 1791238 - DNA, 15 bp, Homo sapiens
ccccagtagtctccg

SEQ ID NO: 1791239 - DNA, 15 bp, Homo sapiens
cccagtagtctccgg

SEQ ID NO: 1791240 - DNA, 15 bp, Homo sapiens
ccagtagtctccgga

SEQ ID NO: 1791241 - DNA, 15 bp, Homo sapiens
cagtagtctccggac

SEQ ID NO: 1791242 - DNA, 15 bp, Homo sapiens
agtagtctccggaca

SEQ ID NO: 1791243 - DNA, 15 bp, Homo sapiens
gtagtctccggacag

SEQ ID NO: 1791244 - DNA, 15 bp, Homo sapiens
tagtctccggacagg

SEQ ID NO: 1791245 - DNA, 15 bp, Homo sapiens
agtctccggacaggc

SEQ ID NO: 1791246 - DNA, 15 bp, Homo sapiens
gtctccggacaggct

SEQ ID NO: 1791247 - DNA, 15 bp, Homo sapiens
tctccggacaggctc

SEQ ID NO: 1791248 - DNA, 15 bp, Homo sapiens
ctccggacaggctcc

SEQ ID NO: 1791249 - DNA, 15 bp, Homo sapiens
tccggacaggctcct

SEQ ID NO: 1791250 - DNA, 15 bp, Homo sapiens
ccggacaggctccta

SEQ ID NO: 1791251 - DNA, 15 bp, Homo sapiens
cggacaggctcctaa

SEQ ID NO: 1791252 - DNA, 15 bp, Homo sapiens
ggacaggctcctaac

SEQ ID NO: 1791253 - DNA, 15 bp, Homo sapiens
gacaggctcctaacg

SEQ ID NO: 1791254 - DNA, 15 bp, Homo sapiens
acaggctcctaacgt

SEQ ID NO: 1791255 - DNA, 15 bp, Homo sapiens
caggctcctaacgtg

SEQ ID NO: 1791256 - DNA, 15 bp, Homo sapiens
aggctcctaacgtgt

SEQ ID NO: 1791257 - DNA, 15 bp, Homo sapiens
ggctcctaacgtgtt

SEQ ID NO: 1791258 - DNA, 15 bp, Homo sapiens
gctcctaacgtgttt

SEQ ID NO: 1791259 - DNA, 15 bp, Homo sapiens
ctcctaacgtgtttc

SEQ ID NO: 1791260 - DNA, 15 bp, Homo sapiens
tcctaacgtgtttca

SEQ ID NO: 1791261 - DNA, 15 bp, Homo sapiens
cctaacgtgtttcag

SEQ ID NO: 1791262 - DNA, 15 bp, Homo sapiens
ctaacgtgtttcagt

SEQ ID NO: 1791263 - DNA, 15 bp, Homo sapiens
taacgtgtttcagtc

SEQ ID NO: 1791264 - DNA, 15 bp, Homo sapiens
aacgtgtttcagtct

SEQ ID NO: 1791265 - DNA, 15 bp, Homo sapiens
acgtgtttcagtctc

SEQ ID NO: 1791266 - DNA, 15 bp, Homo sapiens
cgtgtttcagtctct

SEQ ID NO: 1791267 - DNA, 15 bp, Homo sapiens
gtgtttcagtctctg

SEQ ID NO: 1791268 - DNA, 15 bp, Homo sapiens
tgtttcagtctctgc

SEQ ID NO: 1791269 - DNA, 15 bp, Homo sapiens
gtttcagtctctgcg

SEQ ID NO: 1791270 - DNA, 15 bp, Homo sapiens
tttcagtctctgcgc

SEQ ID NO: 1791271 - DNA, 15 bp, Homo sapiens
ttcagtctctgcgcc

SEQ ID NO: 1791272 - DNA, 15 bp, Homo sapiens
tcagtctctgcgccc

SEQ ID NO: 1791273 - DNA, 15 bp, Homo sapiens
cagtctctgcgccct

SEQ ID NO: 1791274 - DNA, 15 bp, Homo sapiens
agtctctgcgccctc

SEQ ID NO: 1791275 - DNA, 15 bp, Homo sapiens
gtctctgcgccctcc

SEQ ID NO: 1791276 - DNA, 15 bp, Homo sapiens
tctctgcgccctcct

SEQ ID NO: 1791277 - DNA, 15 bp, Homo sapiens
ctctgcgccctcctc

SEQ ID NO: 1791278 - DNA, 15 bp, Homo sapiens
tctgcgccctcctct

SEQ ID NO: 1791279 - DNA, 15 bp, Homo sapiens
ctgcgccctcctctg

SEQ ID NO: 1791280 - DNA, 15 bp, Homo sapiens
tgcgccctcctctgt

SEQ ID NO: 1791281 - DNA, 15 bp, Homo sapiens
gcgccctcctctgta

SEQ ID NO: 1791282 - DNA, 15 bp, Homo sapiens
cgccctcctctgtag

SEQ ID NO: 1791283 - DNA, 15 bp, Homo sapiens
gccctcctctgtaga

SEQ ID NO: 1791284 - DNA, 15 bp, Homo sapiens
ccctcctctgtagaa

SEQ ID NO: 1791285 - DNA, 15 bp, Homo sapiens
cctcctctgtagaac

SEQ ID NO: 1791286 - DNA, 15 bp, Homo sapiens
ctcctctgtagaacc

SEQ ID NO: 1791287 - DNA, 15 bp, Homo sapiens
tcctctgtagaacct

SEQ ID NO: 1791288 - DNA, 15 bp, Homo sapiens
cctctgtagaacctg

SEQ ID NO: 1791289 - DNA, 15 bp, Homo sapiens
ctctgtagaacctgg

SEQ ID NO: 1791290 - DNA, 15 bp, Homo sapiens
tctgtagaacctggc

SEQ ID NO: 1791291 - DNA, 15 bp, Homo sapiens
ctgtagaacctggca

SEQ ID NO: 1791292 - DNA, 15 bp, Homo sapiens
tgtagaacctggcag

SEQ ID NO: 1791293 - DNA, 15 bp, Homo sapiens
gtagaacctggcaga

SEQ ID NO: 1791294 - DNA, 15 bp, Homo sapiens
tagaacctggcagat

SEQ ID NO: 1791295 - DNA, 15 bp, Homo sapiens
agaacctggcagata

SEQ ID NO: 1791296 - DNA, 15 bp, Homo sapiens
gaacctggcagatag

SEQ ID NO: 1791297 - DNA, 15 bp, Homo sapiens
aacctggcagatagc

SEQ ID NO: 1791298 - DNA, 15 bp, Homo sapiens
acctggcagatagcg

SEQ ID NO: 1791299 - DNA, 15 bp, Homo sapiens
cctggcagatagcga

SEQ ID NO: 1791300 - DNA, 15 bp, Homo sapiens
ctggcagatagcgac

SEQ ID NO: 1791301 - DNA, 15 bp, Homo sapiens
tggcagatagcgact

SEQ ID NO: 1791302 - DNA, 15 bp, Homo sapiens
ggcagatagcgactg

SEQ ID NO: 1791303 - DNA, 15 bp, Homo sapiens
gcagatagcgactga

SEQ ID NO: 1791304 - DNA, 15 bp, Homo sapiens
cagatagcgactgag

SEQ ID NO: 1791305 - DNA, 15 bp, Homo sapiens
agatagcgactgagg

SEQ ID NO: 1791306 - DNA, 15 bp, Homo sapiens
gatagcgactgaggc

SEQ ID NO: 1791307 - DNA, 15 bp, Homo sapiens
atagcgactgaggct

SEQ ID NO: 1791308 - DNA, 15 bp, Homo sapiens
tagcgactgaggctg

SEQ ID NO: 1791309 - DNA, 15 bp, Homo sapiens
agcgactgaggctgt

SEQ ID NO: 1791310 - DNA, 15 bp, Homo sapiens
gcgactgaggctgtc

SEQ ID NO: 1791311 - DNA, 15 bp, Homo sapiens
cgactgaggctgtct

SEQ ID NO: 1791312 - DNA, 15 bp, Homo sapiens
gactgaggctgtctg

SEQ ID NO: 1791313 - DNA, 15 bp, Homo sapiens
actgaggctgtctgc

SEQ ID NO: 1791314 - DNA, 15 bp, Homo sapiens
ctgaggctgtctgcc

SEQ ID NO: 1791315 - DNA, 15 bp, Homo sapiens
tgaggctgtctgcca

SEQ ID NO: 1791316 - DNA, 15 bp, Homo sapiens
gaggctgtctgccac

SEQ ID NO: 1791317 - DNA, 15 bp, Homo sapiens
aggctgtctgccacg

SEQ ID NO: 1791318 - DNA, 15 bp, Homo sapiens
ggctgtctgccacgt

SEQ ID NO: 1791319 - DNA, 15 bp, Homo sapiens
gctgtctgccacgta

SEQ ID NO: 1791320 - DNA, 15 bp, Homo sapiens
ctgtctgccacgtag

SEQ ID NO: 1791321 - DNA, 15 bp, Homo sapiens
tgtctgccacgtagg

SEQ ID NO: 1791322 - DNA, 15 bp, Homo sapiens
gtctgccacgtaggg

SEQ ID NO: 1791323 - DNA, 15 bp, Homo sapiens
tctgccacgtaggga

SEQ ID NO: 1791324 - DNA, 15 bp, Homo sapiens
ctgccacgtagggag

SEQ ID NO: 1791325 - DNA, 15 bp, Homo sapiens
tgccacgtagggagg

SEQ ID NO: 1791326 - DNA, 15 bp, Homo sapiens
gccacgtagggaggg

SEQ ID NO: 1791327 - DNA, 15 bp, Homo sapiens
ccacgtagggagggg

SEQ ID NO: 1791328 - DNA, 15 bp, Homo sapiens
cacgtagggaggggg

SEQ ID NO: 1791329 - DNA, 15 bp, Homo sapiens
acgtagggagggggc

SEQ ID NO: 1791330 - DNA, 15 bp, Homo sapiens
cgtagggagggggcc

SEQ ID NO: 1791331 - DNA, 15 bp, Homo sapiens
gtagggagggggcct

SEQ ID NO: 1791332 - DNA, 15 bp, Homo sapiens
tagggagggggcctg

SEQ ID NO: 1791333 - DNA, 15 bp, Homo sapiens
agggagggggcctgt

SEQ ID NO: 1791334 - DNA, 15 bp, Homo sapiens
gggagggggcctgtg

SEQ ID NO: 1791335 - DNA, 15 bp, Homo sapiens
ggagggggcctgtgc

SEQ ID NO: 1791336 - DNA, 15 bp, Homo sapiens
gagggggcctgtgct

SEQ ID NO: 1791337 - DNA, 15 bp, Homo sapiens
agggggcctgtgctg

SEQ ID NO: 1791338 - DNA, 15 bp, Homo sapiens
gggggcctgtgctgg

SEQ ID NO: 1791339 - DNA, 15 bp, Homo sapiens
ggggcctgtgctgga

SEQ ID NO: 1791340 - DNA, 15 bp, Homo sapiens
gggcctgtgctggag

SEQ ID NO: 1791341 - DNA, 15 bp, Homo sapiens
ggcctgtgctggagt

SEQ ID NO: 1791342 - DNA, 15 bp, Homo sapiens
gcctgtgctggagtt

SEQ ID NO: 1791343 - DNA, 15 bp, Homo sapiens
cctgtgctggagttg

SEQ ID NO: 1791344 - DNA, 15 bp, Homo sapiens
ctgtgctggagttgc

SEQ ID NO: 1791345 - DNA, 15 bp, Homo sapiens
tgtgctggagttgct

SEQ ID NO: 1791346 - DNA, 15 bp, Homo sapiens
gtgctggagttgctc

SEQ ID NO: 1791347 - DNA, 15 bp, Homo sapiens
tgctggagttgctct

SEQ ID NO: 1791348 - DNA, 15 bp, Homo sapiens
gctggagttgctctg

SEQ ID NO: 1791349 - DNA, 15 bp, Homo sapiens
ctggagttgctctga

SEQ ID NO: 1791350 - DNA, 15 bp, Homo sapiens
tggagttgctctgaa

SEQ ID NO: 1791351 - DNA, 15 bp, Homo sapiens
ggagttgctctgaat

SEQ ID NO: 1791352 - DNA, 15 bp, Homo sapiens
gagttgctctgaatg

SEQ ID NO: 1791353 - DNA, 15 bp, Homo sapiens
agttgctctgaatgt

SEQ ID NO: 1791354 - DNA, 15 bp, Homo sapiens
gttgctctgaatgtc

SEQ ID NO: 1791355 - DNA, 15 bp, Homo sapiens
ttgctctgaatgtcc

SEQ ID NO: 1791356 - DNA, 15 bp, Homo sapiens
tgctctgaatgtcct

SEQ ID NO: 1791357 - DNA, 15 bp, Homo sapiens
gctctgaatgtcctg

SEQ ID NO: 1791358 - DNA, 15 bp, Homo sapiens
ctctgaatgtcctgt

SEQ ID NO: 1791359 - DNA, 15 bp, Homo sapiens
tctgaatgtcctgtc

SEQ ID NO: 1791360 - DNA, 15 bp, Homo sapiens
ctgaatgtcctgtcc

SEQ ID NO: 1791361 - DNA, 15 bp, Homo sapiens
tgaatgtcctgtccg

SEQ ID NO: 1791362 - DNA, 15 bp, Homo sapiens
gaatgtcctgtccgt

SEQ ID NO: 1791363 - DNA, 15 bp, Homo sapiens
aatgtcctgtccgtt

SEQ ID NO: 1791364 - DNA, 15 bp, Homo sapiens
atgtcctgtccgttt

SEQ ID NO: 1791365 - DNA, 15 bp, Homo sapiens
tgtcctgtccgtttg

SEQ ID NO: 1791366 - DNA, 15 bp, Homo sapiens
gtcctgtccgtttgg

SEQ ID NO: 1791367 - DNA, 15 bp, Homo sapiens
tcctgtccgtttggc

SEQ ID NO: 1791368 - DNA, 15 bp, Homo sapiens
cctgtccgtttggct

SEQ ID NO: 1791369 - DNA, 15 bp, Homo sapiens
ctgtccgtttggctg

SEQ ID NO: 1791370 - DNA, 15 bp, Homo sapiens
tgtccgtttggctgc

SEQ ID NO: 1791371 - DNA, 15 bp, Homo sapiens
gtccgtttggctgcg

SEQ ID NO: 1791372 - DNA, 15 bp, Homo sapiens
tccgtttggctgcga

SEQ ID NO: 1791373 - DNA, 15 bp, Homo sapiens
ccgtttggctgcgag

SEQ ID NO: 1791374 - DNA, 15 bp, Homo sapiens
cgtttggctgcgagg

SEQ ID NO: 1791375 - DNA, 15 bp, Homo sapiens
gtttggctgcgaggt

SEQ ID NO: 1791376 - DNA, 15 bp, Homo sapiens
tttggctgcgaggtg

SEQ ID NO: 1791377 - DNA, 15 bp, Homo sapiens
ttggctgcgaggtgg

SEQ ID NO: 1791378 - DNA, 15 bp, Homo sapiens
tggctgcgaggtggc

SEQ ID NO: 1791379 - DNA, 15 bp, Homo sapiens
ggctgcgaggtggct

SEQ ID NO: 1791380 - DNA, 15 bp, Homo sapiens
gctgcgaggtggctg

SEQ ID NO: 1791381 - DNA, 15 bp, Homo sapiens
ctgcgaggtggctgt

SEQ ID NO: 1791382 - DNA, 15 bp, Homo sapiens
tgcgaggtggctgtc

SEQ ID NO: 1791383 - DNA, 15 bp, Homo sapiens
gcgaggtggctgtcc

SEQ ID NO: 1791384 - DNA, 15 bp, Homo sapiens
cgaggtggctgtccc

SEQ ID NO: 1791385 - DNA, 15 bp, Homo sapiens
gaggtggctgtccct

SEQ ID NO: 1791386 - DNA, 15 bp, Homo sapiens
aggtggctgtccctg

SEQ ID NO: 1791387 - DNA, 15 bp, Homo sapiens
ggtggctgtccctgc

SEQ ID NO: 1791388 - DNA, 15 bp, Homo sapiens
gtggctgtccctgca

SEQ ID NO: 1791389 - DNA, 15 bp, Homo sapiens
tggctgtccctgcat

SEQ ID NO: 1791390 - DNA, 15 bp, Homo sapiens
ggctgtccctgcatt

SEQ ID NO: 1791391 - DNA, 15 bp, Homo sapiens
gctgtccctgcattc

SEQ ID NO: 1791392 - DNA, 15 bp, Homo sapiens
ctgtccctgcattct

SEQ ID NO: 1791393 - DNA, 15 bp, Homo sapiens
tgtccctgcattctt

SEQ ID NO: 1791394 - DNA, 15 bp, Homo sapiens
gtccctgcattcttt

SEQ ID NO: 1791395 - DNA, 15 bp, Homo sapiens
tccctgcattctttc

SEQ ID NO: 1791396 - DNA, 15 bp, Homo sapiens
ccctgcattctttca

SEQ ID NO: 1791397 - DNA, 15 bp, Homo sapiens
cctgcattctttcac

SEQ ID NO: 1791398 - DNA, 15 bp, Homo sapiens
ctgcattctttcacc

SEQ ID NO: 1791399 - DNA, 15 bp, Homo sapiens
tgcattctttcacca

SEQ ID NO: 1791400 - DNA, 15 bp, Homo sapiens
gcattctttcaccag

SEQ ID NO: 1791401 - DNA, 15 bp, Homo sapiens
cattctttcaccagg

SEQ ID NO: 1791402 - DNA, 15 bp, Homo sapiens
attctttcaccaggt

SEQ ID NO: 1791403 - DNA, 15 bp, Homo sapiens
ttctttcaccaggtt

SEQ ID NO: 1791404 - DNA, 15 bp, Homo sapiens
tctttcaccaggttt

SEQ ID NO: 1791405 - DNA, 15 bp, Homo sapiens
ctttcaccaggtttc

SEQ ID NO: 1791406 - DNA, 15 bp, Homo sapiens
tttcaccaggtttca

SEQ ID NO: 1791407 - DNA, 15 bp, Homo sapiens
ttcaccaggtttcaa

SEQ ID NO: 1791408 - DNA, 15 bp, Homo sapiens
tcaccaggtttcaag

SEQ ID NO: 1791409 - DNA, 15 bp, Homo sapiens
caccaggtttcaaga

SEQ ID NO: 1791410 - DNA, 15 bp, Homo sapiens
accaggtttcaagac

SEQ ID NO: 1791411 - DNA, 15 bp, Homo sapiens
ccaggtttcaagact

SEQ ID NO: 1791412 - DNA, 15 bp, Homo sapiens
caggtttcaagactc

SEQ ID NO: 1791413 - DNA, 15 bp, Homo sapiens
aggtttcaagactcc

SEQ ID NO: 1791414 - DNA, 15 bp, Homo sapiens
ggtttcaagactcct

SEQ ID NO: 1791415 - DNA, 15 bp, Homo sapiens
gtttcaagactcctt

SEQ ID NO: 1791416 - DNA, 15 bp, Homo sapiens
tttcaagactccttg

SEQ ID NO: 1791417 - DNA, 15 bp, Homo sapiens
ttcaagactccttgc

SEQ ID NO: 1791418 - DNA, 15 bp, Homo sapiens
tcaagactccttgca

SEQ ID NO: 1791419 - DNA, 15 bp, Homo sapiens
caagactccttgcat

SEQ ID NO: 1791420 - DNA, 15 bp, Homo sapiens
aagactccttgcatt

SEQ ID NO: 1791421 - DNA, 15 bp, Homo sapiens
agactccttgcattc

SEQ ID NO: 1791422 - DNA, 15 bp, Homo sapiens
gactccttgcattcg

SEQ ID NO: 1791423 - DNA, 15 bp, Homo sapiens
actccttgcattcgc

SEQ ID NO: 1791424 - DNA, 15 bp, Homo sapiens
ctccttgcattcgca

SEQ ID NO: 1791425 - DNA, 15 bp, Homo sapiens
tccttgcattcgcag

SEQ ID NO: 1791426 - DNA, 15 bp, Homo sapiens
ccttgcattcgcagt

SEQ ID NO: 1791427 - DNA, 15 bp, Homo sapiens
cttgcattcgcagta

SEQ ID NO: 1791428 - DNA, 15 bp, Homo sapiens
ttgcattcgcagtac

SEQ ID NO: 1791429 - DNA, 15 bp, Homo sapiens
tgcattcgcagtacc

SEQ ID NO: 1791430 - DNA, 15 bp, Homo sapiens
gcattcgcagtaccc

SEQ ID NO: 1791431 - DNA, 15 bp, Homo sapiens
cattcgcagtacccc

SEQ ID NO: 1791432 - DNA, 15 bp, Homo sapiens
attcgcagtaccccc

SEQ ID NO: 1791433 - DNA, 15 bp, Homo sapiens
ttcgcagtaccccca

SEQ ID NO: 1791434 - DNA, 15 bp, Homo sapiens
tcgcagtacccccat

SEQ ID NO: 1791435 - DNA, 15 bp, Homo sapiens
cgcagtacccccatt

SEQ ID NO: 1791436 - DNA, 15 bp, Homo sapiens
gcagtacccccattc

SEQ ID NO: 1791437 - DNA, 15 bp, Homo sapiens
cagtacccccattcc

SEQ ID NO: 1791438 - DNA, 15 bp, Homo sapiens
agtacccccattccc

SEQ ID NO: 1791439 - DNA, 15 bp, Homo sapiens
gtacccccattccca

SEQ ID NO: 1791440 - DNA, 15 bp, Homo sapiens
tacccccattcccat

SEQ ID NO: 1791441 - DNA, 15 bp, Homo sapiens
acccccattcccatc

SEQ ID NO: 1791442 - DNA, 15 bp, Homo sapiens
cccccattcccatcc

SEQ ID NO: 1791443 - DNA, 15 bp, Homo sapiens
ccccattcccatcca

SEQ ID NO: 1791444 - DNA, 15 bp, Homo sapiens
cccattcccatccac

SEQ ID NO: 1791445 - DNA, 15 bp, Homo sapiens
ccattcccatccaca

SEQ ID NO: 1791446 - DNA, 15 bp, Homo sapiens
cattcccatccacag

SEQ ID NO: 1791447 - DNA, 15 bp, Homo sapiens
attcccatccacaga

SEQ ID NO: 1791448 - DNA, 15 bp, Homo sapiens
ttcccatccacagag

SEQ ID NO: 1791449 - DNA, 15 bp, Homo sapiens
tcccatccacagagg

SEQ ID NO: 1791450 - DNA, 15 bp, Homo sapiens
cccatccacagaggg

SEQ ID NO: 1791451 - DNA, 15 bp, Homo sapiens
ccatccacagagggc

SEQ ID NO: 1791452 - DNA, 15 bp, Homo sapiens
catccacagagggca

SEQ ID NO: 1791453 - DNA, 15 bp, Homo sapiens
atccacagagggcag

SEQ ID NO: 1791454 - DNA, 15 bp, Homo sapiens
tccacagagggcagg

SEQ ID NO: 1791455 - DNA, 15 bp, Homo sapiens
ccacagagggcaggc

SEQ ID NO: 1791456 - DNA, 15 bp, Homo sapiens
cacagagggcaggcc

SEQ ID NO: 1791457 - DNA, 15 bp, Homo sapiens
acagagggcaggccg

SEQ ID NO: 1791458 - DNA, 15 bp, Homo sapiens
cagagggcaggccgt

SEQ ID NO: 1791459 - DNA, 15 bp, Homo sapiens
agagggcaggccgta

SEQ ID NO: 1791460 - DNA, 15 bp, Homo sapiens
gagggcaggccgtag

SEQ ID NO: 1791461 - DNA, 15 bp, Homo sapiens
agggcaggccgtaga

SEQ ID NO: 1791462 - DNA, 15 bp, Homo sapiens
gggcaggccgtagac

SEQ ID NO: 1791463 - DNA, 15 bp, Homo sapiens
ggcaggccgtagaca

SEQ ID NO: 1791464 - DNA, 15 bp, Homo sapiens
gcaggccgtagacac

SEQ ID NO: 1791465 - DNA, 15 bp, Homo sapiens
caggccgtagacact

SEQ ID NO: 1791466 - DNA, 15 bp, Homo sapiens
aggccgtagacactg

SEQ ID NO: 1791467 - DNA, 15 bp, Homo sapiens
ggccgtagacactgg

SEQ ID NO: 1791468 - DNA, 15 bp, Homo sapiens
gccgtagacactggg

SEQ ID NO: 1791469 - DNA, 15 bp, Homo sapiens
ccgtagacactgggt

SEQ ID NO: 1791470 - DNA, 15 bp, Homo sapiens
cgtagacactgggtt

SEQ ID NO: 1791471 - DNA, 15 bp, Homo sapiens
gtagacactgggttg

SEQ ID NO: 1791472 - DNA, 15 bp, Homo sapiens
tagacactgggttgg

SEQ ID NO: 1791473 - DNA, 15 bp, Homo sapiens
agacactgggttggc

SEQ ID NO: 1791474 - DNA, 15 bp, Homo sapiens
gacactgggttggca

SEQ ID NO: 1791475 - DNA, 15 bp, Homo sapiens
acactgggttggcag

SEQ ID NO: 1791476 - DNA, 15 bp, Homo sapiens
cactgggttggcagg

SEQ ID NO: 1791477 - DNA, 15 bp, Homo sapiens
actgggttggcaggg

SEQ ID NO: 1791478 - DNA, 15 bp, Homo sapiens
ctgggttggcagggc

SEQ ID NO: 1791479 - DNA, 15 bp, Homo sapiens
tgggttggcagggca

SEQ ID NO: 1791480 - DNA, 15 bp, Homo sapiens
gggttggcagggcac

SEQ ID NO: 1791481 - DNA, 15 bp, Homo sapiens
ggttggcagggcact

SEQ ID NO: 1791482 - DNA, 15 bp, Homo sapiens
gttggcagggcactg

SEQ ID NO: 1791483 - DNA, 15 bp, Homo sapiens
ttggcagggcactgc

SEQ ID NO: 1791484 - DNA, 15 bp, Homo sapiens
tggcagggcactgct

SEQ ID NO: 1791485 - DNA, 15 bp, Homo sapiens
ggcagggcactgctg

SEQ ID NO: 1791486 - DNA, 15 bp, Homo sapiens
gcagggcactgctgc

SEQ ID NO: 1791487 - DNA, 15 bp, Homo sapiens
cagggcactgctgcc

SEQ ID NO: 1791488 - DNA, 15 bp, Homo sapiens
agggcactgctgcca

SEQ ID NO: 1791489 - DNA, 15 bp, Homo sapiens
gggcactgctgccac

SEQ ID NO: 1791490 - DNA, 15 bp, Homo sapiens
ggcactgctgccact

SEQ ID NO: 1791491 - DNA, 15 bp, Homo sapiens
gcactgctgccactt

SEQ ID NO: 1791492 - DNA, 15 bp, Homo sapiens
cactgctgccacttt

SEQ ID NO: 1791493 - DNA, 15 bp, Homo sapiens
actgctgccactttg

SEQ ID NO: 1791494 - DNA, 15 bp, Homo sapiens
ctgctgccactttgt

SEQ ID NO: 1791495 - DNA, 15 bp, Homo sapiens
tgctgccactttgtt

SEQ ID NO: 1791496 - DNA, 15 bp, Homo sapiens
gctgccactttgttt

SEQ ID NO: 1791497 - DNA, 15 bp, Homo sapiens
ctgccactttgttta

SEQ ID NO: 1791498 - DNA, 15 bp, Homo sapiens
tgccactttgtttat

SEQ ID NO: 1791499 - DNA, 15 bp, Homo sapiens
gccactttgtttatg

SEQ ID NO: 1791500 - DNA, 15 bp, Homo sapiens
ccactttgtttatgc

SEQ ID NO: 1791501 - DNA, 15 bp, Homo sapiens
cactttgtttatgcc

SEQ ID NO: 1791502 - DNA, 15 bp, Homo sapiens
actttgtttatgccc

SEQ ID NO: 1791503 - DNA, 15 bp, Homo sapiens
ctttgtttatgccca

SEQ ID NO: 1791504 - DNA, 15 bp, Homo sapiens
tttgtttatgcccag

SEQ ID NO: 1791505 - DNA, 15 bp, Homo sapiens
ttgtttatgcccagg

SEQ ID NO: 1791506 - DNA, 15 bp, Homo sapiens
tgtttatgcccaggc

SEQ ID NO: 1791507 - DNA, 15 bp, Homo sapiens
gtttatgcccaggcc

SEQ ID NO: 1791508 - DNA, 15 bp, Homo sapiens
tttatgcccaggccc

SEQ ID NO: 1791509 - DNA, 15 bp, Homo sapiens
tgaatagaatagaaa

SEQ ID NO: 1791510 - DNA, 15 bp, Homo sapiens
gaatagaatagaaag

SEQ ID NO: 1791511 - DNA, 15 bp, Homo sapiens
aatagaatagaaagt

SEQ ID NO: 1791512 - DNA, 15 bp, Homo sapiens
atagaatagaaagtc

SEQ ID NO: 1791513 - DNA, 15 bp, Homo sapiens
tagaatagaaagtca

SEQ ID NO: 1791514 - DNA, 15 bp, Homo sapiens
agaatagaaagtcag

SEQ ID NO: 1791515 - DNA, 15 bp, Homo sapiens
gaatagaaagtcagc

SEQ ID NO: 1791516 - DNA, 15 bp, Homo sapiens
aatagaaagtcagcg

SEQ ID NO: 1791517 - DNA, 15 bp, Homo sapiens
atagaaagtcagcgg

SEQ ID NO: 1791518 - DNA, 15 bp, Homo sapiens
tagaaagtcagcggg

SEQ ID NO: 1791519 - DNA, 15 bp, Homo sapiens
agaaagtcagcggga

SEQ ID NO: 1791520 - DNA, 15 bp, Homo sapiens
gaaagtcagcgggac

SEQ ID NO: 1791521 - DNA, 15 bp, Homo sapiens
aaagtcagcgggact

SEQ ID NO: 1791522 - DNA, 15 bp, Homo sapiens
aagtcagcgggactt

SEQ ID NO: 1791523 - DNA, 15 bp, Homo sapiens
agtcagcgggacttt

SEQ ID NO: 1791524 - DNA, 15 bp, Homo sapiens
gtcagcgggactttg

SEQ ID NO: 1791525 - DNA, 15 bp, Homo sapiens
tcagcgggactttgg

SEQ ID NO: 1791526 - DNA, 15 bp, Homo sapiens
cagcgggactttggg

SEQ ID NO: 1791527 - DNA, 15 bp, Homo sapiens
agcgggactttggga

SEQ ID NO: 1791528 - DNA, 15 bp, Homo sapiens
gcgggactttgggaa

SEQ ID NO: 1791529 - DNA, 15 bp, Homo sapiens
cgggactttgggaac

SEQ ID NO: 1791530 - DNA, 15 bp, Homo sapiens
gggactttgggaaca

SEQ ID NO: 1791531 - DNA, 15 bp, Homo sapiens
ggactttgggaacac

SEQ ID NO: 1791532 - DNA, 15 bp, Homo sapiens
gactttgggaacact

SEQ ID NO: 1791533 - DNA, 15 bp, Homo sapiens
actttgggaacactt

SEQ ID NO: 1791534 - DNA, 15 bp, Homo sapiens
ctttgggaacacttc

SEQ ID NO: 1791535 - DNA, 15 bp, Homo sapiens
tttgggaacacttcc

SEQ ID NO: 1791536 - DNA, 15 bp, Homo sapiens
ttgggaacacttcct

SEQ ID NO: 1791537 - DNA, 15 bp, Homo sapiens
tgggaacacttcctg

SEQ ID NO: 1791538 - DNA, 15 bp, Homo sapiens
gggaacacttcctgc

SEQ ID NO: 1791539 - DNA, 15 bp, Homo sapiens
ggaacacttcctgcc

SEQ ID NO: 1791540 - DNA, 15 bp, Homo sapiens
gaacacttcctgcct

SEQ ID NO: 1791541 - DNA, 15 bp, Homo sapiens
aacacttcctgcctg

SEQ ID NO: 1791542 - DNA, 15 bp, Homo sapiens
acacttcctgcctgg

SEQ ID NO: 1791543 - DNA, 15 bp, Homo sapiens
cacttcctgcctggg

SEQ ID NO: 1791544 - DNA, 15 bp, Homo sapiens
acttcctgcctggga

SEQ ID NO: 1791545 - DNA, 15 bp, Homo sapiens
cttcctgcctgggag

SEQ ID NO: 1791546 - DNA, 15 bp, Homo sapiens
ttcctgcctgggagg

SEQ ID NO: 1791547 - DNA, 15 bp, Homo sapiens
tcctgcctgggaggg

SEQ ID NO: 1791548 - DNA, 15 bp, Homo sapiens
cctgcctgggagggc

SEQ ID NO: 1791549 - DNA, 15 bp, Homo sapiens
ctgcctgggagggct

SEQ ID NO: 1791550 - DNA, 15 bp, Homo sapiens
tgcctgggagggctg

SEQ ID NO: 1791551 - DNA, 15 bp, Homo sapiens
gcctgggagggctga

SEQ ID NO: 1791552 - DNA, 15 bp, Homo sapiens
cctgggagggctgac

SEQ ID NO: 1791553 - DNA, 15 bp, Homo sapiens
ctgggagggctgacg

SEQ ID NO: 1791554 - DNA, 15 bp, Homo sapiens
tgggagggctgacga

SEQ ID NO: 1791555 - DNA, 15 bp, Homo sapiens
gggagggctgacgat

SEQ ID NO: 1791556 - DNA, 15 bp, Homo sapiens
ggagggctgacgatt

SEQ ID NO: 1791557 - DNA, 15 bp, Homo sapiens
gagggctgacgattc

SEQ ID NO: 1791558 - DNA, 15 bp, Homo sapiens
agggctgacgattca

SEQ ID NO: 1791559 - DNA, 15 bp, Homo sapiens
gggctgacgattcag

SEQ ID NO: 1791560 - DNA, 15 bp, Homo sapiens
ggctgacgattcagc

SEQ ID NO: 1791561 - DNA, 15 bp, Homo sapiens
gctgacgattcagcc

SEQ ID NO: 1791562 - DNA, 15 bp, Homo sapiens
ctgacgattcagcca

SEQ ID NO: 1791563 - DNA, 15 bp, Homo sapiens
tgacgattcagccac

SEQ ID NO: 1791564 - DNA, 15 bp, Homo sapiens
gacgattcagccacc

SEQ ID NO: 1791565 - DNA, 15 bp, Homo sapiens
acgattcagccacca

SEQ ID NO: 1791566 - DNA, 15 bp, Homo sapiens
cgattcagccaccac

SEQ ID NO: 1791567 - DNA, 15 bp, Homo sapiens
gattcagccaccaca

SEQ ID NO: 1791568 - DNA, 15 bp, Homo sapiens
attcagccaccacag

SEQ ID NO: 1791569 - DNA, 15 bp, Homo sapiens
ttcagccaccacagc

SEQ ID NO: 1791570 - DNA, 15 bp, Homo sapiens
tcagccaccacagct

SEQ ID NO: 1791571 - DNA, 15 bp, Homo sapiens
cagccaccacagctt

SEQ ID NO: 1791572 - DNA, 15 bp, Homo sapiens
agccaccacagcttg

SEQ ID NO: 1791573 - DNA, 15 bp, Homo sapiens
gccaccacagcttga

SEQ ID NO: 1791574 - DNA, 15 bp, Homo sapiens
ccaccacagcttgag

SEQ ID NO: 1791575 - DNA, 15 bp, Homo sapiens
caccacagcttgaga

SEQ ID NO: 1791576 - DNA, 15 bp, Homo sapiens
accacagcttgagag

SEQ ID NO: 1791577 - DNA, 15 bp, Homo sapiens
ccacagcttgagagg

SEQ ID NO: 1791578 - DNA, 15 bp, Homo sapiens
cacagcttgagaggc

SEQ ID NO: 1791579 - DNA, 15 bp, Homo sapiens
acagcttgagaggca

SEQ ID NO: 1791580 - DNA, 15 bp, Homo sapiens
cagcttgagaggcaa

SEQ ID NO: 1791581 - DNA, 15 bp, Homo sapiens
agcttgagaggcaaa

SEQ ID NO: 1791582 - DNA, 15 bp, Homo sapiens
gcttgagaggcaaag

SEQ ID NO: 1791583 - DNA, 15 bp, Homo sapiens
cttgagaggcaaaga

SEQ ID NO: 1791584 - DNA, 15 bp, Homo sapiens
ttgagaggcaaagaa

SEQ ID NO: 1791585 - DNA, 15 bp, Homo sapiens
tgagaggcaaagaaa

SEQ ID NO: 1791586 - DNA, 15 bp, Homo sapiens
gagaggcaaagaaat

SEQ ID NO: 1791587 - DNA, 15 bp, Homo sapiens
agaggcaaagaaatg

SEQ ID NO: 1791588 - DNA, 15 bp, Homo sapiens
gaggcaaagaaatgc

SEQ ID NO: 1791589 - DNA, 15 bp, Homo sapiens
aggcaaagaaatgct

SEQ ID NO: 1791590 - DNA, 15 bp, Homo sapiens
ggcaaagaaatgcta

SEQ ID NO: 1791591 - DNA, 15 bp, Homo sapiens
gcaaagaaatgctag

SEQ ID NO: 1791592 - DNA, 15 bp, Homo sapiens
caaagaaatgctagg

SEQ ID NO: 1791593 - DNA, 15 bp, Homo sapiens
aaagaaatgctagga

SEQ ID NO: 1791594 - DNA, 15 bp, Homo sapiens
aagaaatgctaggac

SEQ ID NO: 1791595 - DNA, 15 bp, Homo sapiens
agaaatgctaggacc

SEQ ID NO: 1791596 - DNA, 15 bp, Homo sapiens
gaaatgctaggacca

SEQ ID NO: 1791597 - DNA, 15 bp, Homo sapiens
aaatgctaggaccac

SEQ ID NO: 1791598 - DNA, 15 bp, Homo sapiens
aatgctaggaccaca

SEQ ID NO: 1791599 - DNA, 15 bp, Homo sapiens
atgctaggaccacac

SEQ ID NO: 1791600 - DNA, 15 bp, Homo sapiens
tgctaggaccacacc

SEQ ID NO: 1791601 - DNA, 15 bp, Homo sapiens
gctaggaccacacca

SEQ ID NO: 1791602 - DNA, 15 bp, Homo sapiens
ctaggaccacaccag

SEQ ID NO: 1791603 - DNA, 15 bp, Homo sapiens
taggaccacaccaga

SEQ ID NO: 1791604 - DNA, 15 bp, Homo sapiens
aggaccacaccagaa

SEQ ID NO: 1791605 - DNA, 15 bp, Homo sapiens
ggaccacaccagaaa

SEQ ID NO: 1791606 - DNA, 15 bp, Homo sapiens
gaccacaccagaaat

SEQ ID NO: 1791607 - DNA, 15 bp, Homo sapiens
accacaccagaaatg

SEQ ID NO: 1791608 - DNA, 15 bp, Homo sapiens
ccacaccagaaatgc

SEQ ID NO: 1791609 - DNA, 15 bp, Homo sapiens
cacaccagaaatgca

SEQ ID NO: 1791610 - DNA, 15 bp, Homo sapiens
acaccagaaatgcac

SEQ ID NO: 1791611 - DNA, 15 bp, Homo sapiens
caccagaaatgcacg

SEQ ID NO: 1791612 - DNA, 15 bp, Homo sapiens
accagaaatgcacgc

SEQ ID NO: 1791613 - DNA, 15 bp, Homo sapiens
ccagaaatgcacgca

SEQ ID NO: 1791614 - DNA, 15 bp, Homo sapiens
cagaaatgcacgcag

SEQ ID NO: 1791615 - DNA, 15 bp, Homo sapiens
agaaatgcacgcagg

SEQ ID NO: 1791616 - DNA, 15 bp, Homo sapiens
gaaatgcacgcaggc

SEQ ID NO: 1791617 - DNA, 15 bp, Homo sapiens
aaatgcacgcaggcc

SEQ ID NO: 1791618 - DNA, 15 bp, Homo sapiens
aatgcacgcaggccc

SEQ ID NO: 1791619 - DNA, 15 bp, Homo sapiens
atgcacgcaggccct

SEQ ID NO: 1791620 - DNA, 15 bp, Homo sapiens
tgcacgcaggccctg

SEQ ID NO: 1791621 - DNA, 15 bp, Homo sapiens
gcacgcaggccctgc

SEQ ID NO: 1791622 - DNA, 15 bp, Homo sapiens
cacgcaggccctgcc

SEQ ID NO: 1791623 - DNA, 15 bp, Homo sapiens
acgcaggccctgcca

SEQ ID NO: 1791624 - DNA, 15 bp, Homo sapiens
cgcaggccctgccat

SEQ ID NO: 1791625 - DNA, 15 bp, Homo sapiens
gcaggccctgccatt

SEQ ID NO: 1791626 - DNA, 15 bp, Homo sapiens
caggccctgccattt

SEQ ID NO: 1791627 - DNA, 15 bp, Homo sapiens
aggccctgccatttc

SEQ ID NO: 1791628 - DNA, 15 bp, Homo sapiens
ggccctgccatttct

SEQ ID NO: 1791629 - DNA, 15 bp, Homo sapiens
gccctgccatttctg

SEQ ID NO: 1791630 - DNA, 15 bp, Homo sapiens
ccctgccatttctgc

SEQ ID NO: 1791631 - DNA, 15 bp, Homo sapiens
cctgccatttctgct

SEQ ID NO: 1791632 - DNA, 15 bp, Homo sapiens
ctgccatttctgctt

SEQ ID NO: 1791633 - DNA, 15 bp, Homo sapiens
tgccatttctgcttc

SEQ ID NO: 1791634 - DNA, 15 bp, Homo sapiens
gccatttctgcttcc

SEQ ID NO: 1791635 - DNA, 15 bp, Homo sapiens
ccatttctgcttccc

SEQ ID NO: 1791636 - DNA, 15 bp, Homo sapiens
catttctgcttccct

SEQ ID NO: 1791637 - DNA, 15 bp, Homo sapiens
atttctgcttccctt

SEQ ID NO: 1791638 - DNA, 15 bp, Homo sapiens
tttctgcttcccttc

SEQ ID NO: 1791639 - DNA, 15 bp, Homo sapiens
ttctgcttcccttct

SEQ ID NO: 1791640 - DNA, 15 bp, Homo sapiens
tctgcttcccttctg

SEQ ID NO: 1791641 - DNA, 15 bp, Homo sapiens
ctgcttcccttctgt

SEQ ID NO: 1791642 - DNA, 15 bp, Homo sapiens
tgcttcccttctgtc

SEQ ID NO: 1791643 - DNA, 15 bp, Homo sapiens
gcttcccttctgtcc

SEQ ID NO: 1791644 - DNA, 15 bp, Homo sapiens
cttcccttctgtccg

SEQ ID NO: 1791645 - DNA, 15 bp, Homo sapiens
ttcccttctgtccga

SEQ ID NO: 1791646 - DNA, 15 bp, Homo sapiens
tcccttctgtccgat

SEQ ID NO: 1791647 - DNA, 15 bp, Homo sapiens
cccttctgtccgatc

SEQ ID NO: 1791648 - DNA, 15 bp, Homo sapiens
ccttctgtccgatcc

SEQ ID NO: 1791649 - DNA, 15 bp, Homo sapiens
cttctgtccgatcct

SEQ ID NO: 1791650 - DNA, 15 bp, Homo sapiens
ttctgtccgatcctg

SEQ ID NO: 1791651 - DNA, 15 bp, Homo sapiens
tctgtccgatcctgt

SEQ ID NO: 1791652 - DNA, 15 bp, Homo sapiens
ctgtccgatcctgtc

SEQ ID NO: 1791653 - DNA, 15 bp, Homo sapiens
tgtccgatcctgtca

SEQ ID NO: 1791654 - DNA, 15 bp, Homo sapiens
gtccgatcctgtcac

SEQ ID NO: 1791655 - DNA, 15 bp, Homo sapiens
tccgatcctgtcact

SEQ ID NO: 1791656 - DNA, 15 bp, Homo sapiens
ccgatcctgtcactc

SEQ ID NO: 1791657 - DNA, 15 bp, Homo sapiens
cgatcctgtcactcc

SEQ ID NO: 1791658 - DNA, 15 bp, Homo sapiens
gatcctgtcactcca

SEQ ID NO: 1791659 - DNA, 15 bp, Homo sapiens
atcctgtcactccag

SEQ ID NO: 1791660 - DNA, 15 bp, Homo sapiens
tcctgtcactccagg

SEQ ID NO: 1791661 - DNA, 15 bp, Homo sapiens
cctgtcactccaggt

SEQ ID NO: 1791662 - DNA, 15 bp, Homo sapiens
ctgtcactccaggtg

SEQ ID NO: 1791663 - DNA, 15 bp, Homo sapiens
tgtcactccaggtgc

SEQ ID NO: 1791664 - DNA, 15 bp, Homo sapiens
gtcactccaggtgct

SEQ ID NO: 1791665 - DNA, 15 bp, Homo sapiens
tcactccaggtgctg

SEQ ID NO: 1791666 - DNA, 15 bp, Homo sapiens
cactccaggtgctga

SEQ ID NO: 1791667 - DNA, 15 bp, Homo sapiens
actccaggtgctgag

SEQ ID NO: 1791668 - DNA, 15 bp, Homo sapiens
ctccaggtgctgagt

SEQ ID NO: 1791669 - DNA, 15 bp, Homo sapiens
tccaggtgctgagtg

SEQ ID NO: 1791670 - DNA, 15 bp, Homo sapiens
ccaggtgctgagtga

SEQ ID NO: 1791671 - DNA, 15 bp, Homo sapiens
caggtgctgagtgac

SEQ ID NO: 1791672 - DNA, 15 bp, Homo sapiens
aggtgctgagtgacg

SEQ ID NO: 1791673 - DNA, 15 bp, Homo sapiens
ggtgctgagtgacgg

SEQ ID NO: 1791674 - DNA, 15 bp, Homo sapiens
gtgctgagtgacggt

SEQ ID NO: 1791675 - DNA, 15 bp, Homo sapiens
tgctgagtgacggtc

SEQ ID NO: 1791676 - DNA, 15 bp, Homo sapiens
gctgagtgacggtct

SEQ ID NO: 1791677 - DNA, 15 bp, Homo sapiens
ctgagtgacggtctg

SEQ ID NO: 1791678 - DNA, 15 bp, Homo sapiens
tgagtgacggtctgc

SEQ ID NO: 1791679 - DNA, 15 bp, Homo sapiens
gagtgacggtctgcc

SEQ ID NO: 1791680 - DNA, 15 bp, Homo sapiens
agtgacggtctgccc

SEQ ID NO: 1791681 - DNA, 15 bp, Homo sapiens
gtgacggtctgcccg

SEQ ID NO: 1791682 - DNA, 15 bp, Homo sapiens
tgacggtctgcccgt

SEQ ID NO: 1791683 - DNA, 15 bp, Homo sapiens
gacggtctgcccgta

SEQ ID NO: 1791684 - DNA, 15 bp, Homo sapiens
acggtctgcccgtaa

SEQ ID NO: 1791685 - DNA, 15 bp, Homo sapiens
cggtctgcccgtaac

SEQ ID NO: 1791686 - DNA, 15 bp, Homo sapiens
ggtctgcccgtaaca

SEQ ID NO: 1791687 - DNA, 15 bp, Homo sapiens
gtctgcccgtaacac

SEQ ID NO: 1791688 - DNA, 15 bp, Homo sapiens
tctgcccgtaacacc

SEQ ID NO: 1791689 - DNA, 15 bp, Homo sapiens
ctgcccgtaacacct

SEQ ID NO: 1791690 - DNA, 15 bp, Homo sapiens
tgcccgtaacacctg

SEQ ID NO: 1791691 - DNA, 15 bp, Homo sapiens
gcccgtaacacctgt

SEQ ID NO: 1791692 - DNA, 15 bp, Homo sapiens
cccgtaacacctgtg

SEQ ID NO: 1791693 - DNA, 15 bp, Homo sapiens
ccgtaacacctgtgg

SEQ ID NO: 1791694 - DNA, 15 bp, Homo sapiens
cgtaacacctgtggg

SEQ ID NO: 1791695 - DNA, 15 bp, Homo sapiens
gtaacacctgtgggt

SEQ ID NO: 1791696 - DNA, 15 bp, Homo sapiens
taacacctgtgggtc

SEQ ID NO: 1791697 - DNA, 15 bp, Homo sapiens
aacacctgtgggtct

SEQ ID NO: 1791698 - DNA, 15 bp, Homo sapiens
acacctgtgggtctt

SEQ ID NO: 1791699 - DNA, 15 bp, Homo sapiens
cacctgtgggtcttg

SEQ ID NO: 1791700 - DNA, 15 bp, Homo sapiens
acctgtgggtcttgg

SEQ ID NO: 1791701 - DNA, 15 bp, Homo sapiens
cctgtgggtcttgga

SEQ ID NO: 1791702 - DNA, 15 bp, Homo sapiens
ctgtgggtcttggaa

SEQ ID NO: 1791703 - DNA, 15 bp, Homo sapiens
tgtgggtcttggaac

SEQ ID NO: 1791704 - DNA, 15 bp, Homo sapiens
gtgggtcttggaaca

SEQ ID NO: 1791705 - DNA, 15 bp, Homo sapiens
tgggtcttggaacaa

SEQ ID NO: 1791706 - DNA, 15 bp, Homo sapiens
gggtcttggaacaag

SEQ ID NO: 1791707 - DNA, 15 bp, Homo sapiens
ggtcttggaacaaga

SEQ ID NO: 1791708 - DNA, 15 bp, Homo sapiens
gtcttggaacaagag

SEQ ID NO: 1791709 - DNA, 15 bp, Homo sapiens
tcttggaacaagagg

SEQ ID NO: 1791710 - DNA, 15 bp, Homo sapiens
cttggaacaagagga

SEQ ID NO: 1791711 - DNA, 15 bp, Homo sapiens
ttggaacaagaggat

SEQ ID NO: 1791712 - DNA, 15 bp, Homo sapiens
tggaacaagaggatg

SEQ ID NO: 1791713 - DNA, 15 bp, Homo sapiens
ggaacaagaggatga

SEQ ID NO: 1791714 - DNA, 15 bp, Homo sapiens
gaacaagaggatgag

SEQ ID NO: 1791715 - DNA, 15 bp, Homo sapiens
aacaagaggatgagg

SEQ ID NO: 1791716 - DNA, 15 bp, Homo sapiens
acaagaggatgaggg

SEQ ID NO: 1791717 - DNA, 15 bp, Homo sapiens
caagaggatgagggt

SEQ ID NO: 1791718 - DNA, 15 bp, Homo sapiens
aagaggatgagggtc

SEQ ID NO: 1791719 - DNA, 15 bp, Homo sapiens
agaggatgagggtca

SEQ ID NO: 1791720 - DNA, 15 bp, Homo sapiens
gaggatgagggtcac

SEQ ID NO: 1791721 - DNA, 15 bp, Homo sapiens
aggatgagggtcaca

SEQ ID NO: 1791722 - DNA, 15 bp, Homo sapiens
ggatgagggtcacat

SEQ ID NO: 1791723 - DNA, 15 bp, Homo sapiens
gatgagggtcacatt

SEQ ID NO: 1791724 - DNA, 15 bp, Homo sapiens
atgagggtcacattt

SEQ ID NO: 1791725 - DNA, 15 bp, Homo sapiens
tgagggtcacatttc

SEQ ID NO: 1791726 - DNA, 15 bp, Homo sapiens
gagggtcacatttcc

SEQ ID NO: 1791727 - DNA, 15 bp, Homo sapiens
agggtcacatttcct

SEQ ID NO: 1791728 - DNA, 15 bp, Homo sapiens
gggtcacatttccta

SEQ ID NO: 1791729 - DNA, 15 bp, Homo sapiens
ggtcacatttcctat

SEQ ID NO: 1791730 - DNA, 15 bp, Homo sapiens
gtcacatttcctatg

SEQ ID NO: 1791731 - DNA, 15 bp, Homo sapiens
tcacatttcctatgt

SEQ ID NO: 1791732 - DNA, 15 bp, Homo sapiens
cacatttcctatgtc

SEQ ID NO: 1791733 - DNA, 15 bp, Homo sapiens
acatttcctatgtct

SEQ ID NO: 1791734 - DNA, 15 bp, Homo sapiens
catttcctatgtcta

SEQ ID NO: 1791735 - DNA, 15 bp, Homo sapiens
atttcctatgtctag

SEQ ID NO: 1791736 - DNA, 15 bp, Homo sapiens
tttcctatgtctaga

SEQ ID NO: 1791737 - DNA, 15 bp, Homo sapiens
ttcctatgtctagat

SEQ ID NO: 1791738 - DNA, 15 bp, Homo sapiens
tcctatgtctagata

SEQ ID NO: 1791739 - DNA, 15 bp, Homo sapiens
cctatgtctagatat

SEQ ID NO: 1791740 - DNA, 15 bp, Homo sapiens
ctatgtctagatata

SEQ ID NO: 1791741 - DNA, 15 bp, Homo sapiens
tatgtctagatatat

SEQ ID NO: 1791742 - DNA, 15 bp, Homo sapiens
atgtctagatatata

SEQ ID NO: 1791743 - DNA, 15 bp, Homo sapiens
tgtctagatatataa

SEQ ID NO: 1791744 - DNA, 15 bp, Homo sapiens
gtctagatatataaa

SEQ ID NO: 1791745 - DNA, 15 bp, Homo sapiens
tctagatatataaaa

SEQ ID NO: 1791746 - DNA, 15 bp, Homo sapiens
ctagatatataaaag

SEQ ID NO: 1791747 - DNA, 15 bp, Homo sapiens
tagatatataaaagt

SEQ ID NO: 1791748 - DNA, 15 bp, Homo sapiens
agatatataaaagtc

SEQ ID NO: 1791749 - DNA, 15 bp, Homo sapiens
gatatataaaagtca

SEQ ID NO: 1791750 - DNA, 15 bp, Homo sapiens
atatataaaagtcat

SEQ ID NO: 1791751 - DNA, 15 bp, Homo sapiens
tatataaaagtcatc

SEQ ID NO: 1791752 - DNA, 15 bp, Homo sapiens
atataaaagtcatca

SEQ ID NO: 1791753 - DNA, 15 bp, Homo sapiens
tataaaagtcatcag

SEQ ID NO: 1791754 - DNA, 15 bp, Homo sapiens
ataaaagtcatcagt

SEQ ID NO: 1791755 - DNA, 15 bp, Homo sapiens
taaaagtcatcagtc

SEQ ID NO: 1791756 - DNA, 15 bp, Homo sapiens
aaaagtcatcagtca

SEQ ID NO: 1791757 - DNA, 15 bp, Homo sapiens
aaagtcatcagtcaa

SEQ ID NO: 1791758 - DNA, 15 bp, Homo sapiens
aagtcatcagtcaag

SEQ ID NO: 1791759 - DNA, 15 bp, Homo sapiens
agtcatcagtcaagc

SEQ ID NO: 1791760 - DNA, 15 bp, Homo sapiens
gtcatcagtcaagct

SEQ ID NO: 1791761 - DNA, 15 bp, Homo sapiens
tcatcagtcaagcta

SEQ ID NO: 1791762 - DNA, 15 bp, Homo sapiens
catcagtcaagctat

SEQ ID NO: 1791763 - DNA, 15 bp, Homo sapiens
atcagtcaagctata

SEQ ID NO: 1791764 - DNA, 15 bp, Homo sapiens
tcagtcaagctataa

SEQ ID NO: 1791765 - DNA, 15 bp, Homo sapiens
cagtcaagctataag

SEQ ID NO: 1791766 - DNA, 15 bp, Homo sapiens
agtcaagctataaga

SEQ ID NO: 1791767 - DNA, 15 bp, Homo sapiens
gtcaagctataagaa

SEQ ID NO: 1791768 - DNA, 15 bp, Homo sapiens
tcaagctataagaac

SEQ ID NO: 1791769 - DNA, 15 bp, Homo sapiens
caagctataagaaca

SEQ ID NO: 1791770 - DNA, 15 bp, Homo sapiens
aagctataagaacag

SEQ ID NO: 1791771 - DNA, 15 bp, Homo sapiens
agctataagaacagt

SEQ ID NO: 1791772 - DNA, 15 bp, Homo sapiens
gctataagaacagtt

SEQ ID NO: 1791773 - DNA, 15 bp, Homo sapiens
ctataagaacagtta

SEQ ID NO: 1791774 - DNA, 15 bp, Homo sapiens
tataagaacagttaa

SEQ ID NO: 1791775 - DNA, 15 bp, Homo sapiens
ataagaacagttaaa

SEQ ID NO: 1791776 - DNA, 15 bp, Homo sapiens
taagaacagttaaat

SEQ ID NO: 1791777 - DNA, 15 bp, Homo sapiens
aagaacagttaaata

SEQ ID NO: 1791778 - DNA, 15 bp, Homo sapiens
agaacagttaaataa

SEQ ID NO: 1791779 - DNA, 15 bp, Homo sapiens
gaacagttaaataaa

SEQ ID NO: 1791780 - DNA, 15 bp, Homo sapiens
aacagttaaataaaa

SEQ ID NO: 1791781 - DNA, 15 bp, Homo sapiens
acagttaaataaaat

SEQ ID NO: 1791782 - DNA, 15 bp, Homo sapiens
cagttaaataaaata

SEQ ID NO: 1791783 - DNA, 15 bp, Homo sapiens
agttaaataaaatag

SEQ ID NO: 1791784 - DNA, 15 bp, Homo sapiens
gttaaataaaatagt

SEQ ID NO: 1791785 - DNA, 15 bp, Homo sapiens
ttaaataaaatagtt

SEQ ID NO: 1791786 - DNA, 15 bp, Homo sapiens
taaataaaatagttt

SEQ ID NO: 1791787 - DNA, 15 bp, Homo sapiens
aaataaaatagtttc

SEQ ID NO: 1791788 - DNA, 15 bp, Homo sapiens
aataaaatagtttct

SEQ ID NO: 1791789 - DNA, 15 bp, Homo sapiens
ataaaatagtttcta

SEQ ID NO: 1791790 - DNA, 15 bp, Homo sapiens
taaaatagtttctat

SEQ ID NO: 1791791 - DNA, 15 bp, Homo sapiens
aaaatagtttctatc

SEQ ID NO: 1791792 - DNA, 15 bp, Homo sapiens
aaatagtttctatcc

SEQ ID NO: 1791793 - DNA, 15 bp, Homo sapiens
aatagtttctatcct

SEQ ID NO: 1791794 - DNA, 15 bp, Homo sapiens
atagtttctatcctc

SEQ ID NO: 1791795 - DNA, 15 bp, Homo sapiens
tagtttctatcctct

SEQ ID NO: 1791796 - DNA, 15 bp, Homo sapiens
agtttctatcctctt

SEQ ID NO: 1791797 - DNA, 15 bp, Homo sapiens
gtttctatcctctta

SEQ ID NO: 1791798 - DNA, 15 bp, Homo sapiens
tttctatcctcttat

SEQ ID NO: 1791799 - DNA, 15 bp, Homo sapiens
ttctatcctcttatc

SEQ ID NO: 1791800 - DNA, 15 bp, Homo sapiens
tctatcctcttatct

SEQ ID NO: 1791801 - DNA, 15 bp, Homo sapiens
ctatcctcttatctt

SEQ ID NO: 1791802 - DNA, 15 bp, Homo sapiens
tatcctcttatcttg

SEQ ID NO: 1791803 - DNA, 15 bp, Homo sapiens
atcctcttatcttga

SEQ ID NO: 1791804 - DNA, 15 bp, Homo sapiens
tcctcttatcttgac

SEQ ID NO: 1791805 - DNA, 15 bp, Homo sapiens
cctcttatcttgaca

SEQ ID NO: 1791806 - DNA, 15 bp, Homo sapiens
ctcttatcttgacat

SEQ ID NO: 1791807 - DNA, 15 bp, Homo sapiens
tcttatcttgacata

SEQ ID NO: 1791808 - DNA, 15 bp, Homo sapiens
cttatcttgacatat

SEQ ID NO: 1791809 - DNA, 15 bp, Homo sapiens
ttatcttgacatatc

SEQ ID NO: 1791810 - DNA, 15 bp, Homo sapiens
tatcttgacatatct

SEQ ID NO: 1791811 - DNA, 15 bp, Homo sapiens
atcttgacatatctt

SEQ ID NO: 1791812 - DNA, 15 bp, Homo sapiens
tcttgacatatcttc

SEQ ID NO: 1791813 - DNA, 15 bp, Homo sapiens
cttgacatatcttcc

SEQ ID NO: 1791814 - DNA, 15 bp, Homo sapiens
ttgacatatcttcct

SEQ ID NO: 1791815 - DNA, 15 bp, Homo sapiens
tgacatatcttcctc

SEQ ID NO: 1791816 - DNA, 15 bp, Homo sapiens
gacatatcttcctca

SEQ ID NO: 1791817 - DNA, 15 bp, Homo sapiens
acatatcttcctcac

SEQ ID NO: 1791818 - DNA, 15 bp, Homo sapiens
catatcttcctcaca

SEQ ID NO: 1791819 - DNA, 15 bp, Homo sapiens
atatcttcctcacaa

SEQ ID NO: 1791820 - DNA, 15 bp, Homo sapiens
tatcttcctcacaac

SEQ ID NO: 1791821 - DNA, 15 bp, Homo sapiens
atcttcctcacaacc

SEQ ID NO: 1791822 - DNA, 15 bp, Homo sapiens
tcttcctcacaacct

SEQ ID NO: 1791823 - DNA, 15 bp, Homo sapiens
cttcctcacaacctg

SEQ ID NO: 1791824 - DNA, 15 bp, Homo sapiens
ttcctcacaacctga

SEQ ID NO: 1791825 - DNA, 15 bp, Homo sapiens
tcctcacaacctgaa

SEQ ID NO: 1791826 - DNA, 15 bp, Homo sapiens
cctcacaacctgaaa

SEQ ID NO: 1791827 - DNA, 15 bp, Homo sapiens
ctcacaacctgaaag

SEQ ID NO: 1791828 - DNA, 15 bp, Homo sapiens
tcacaacctgaaagg

SEQ ID NO: 1791829 - DNA, 15 bp, Homo sapiens
cacaacctgaaaggc

SEQ ID NO: 1791830 - DNA, 15 bp, Homo sapiens
acaacctgaaaggcc

SEQ ID NO: 1791831 - DNA, 15 bp, Homo sapiens
caacctgaaaggcca

SEQ ID NO: 1791832 - DNA, 15 bp, Homo sapiens
aacctgaaaggccat

SEQ ID NO: 1791833 - DNA, 15 bp, Homo sapiens
acctgaaaggccatg

SEQ ID NO: 1791834 - DNA, 15 bp, Homo sapiens
cctgaaaggccatgt

SEQ ID NO: 1791835 - DNA, 15 bp, Homo sapiens
ctgaaaggccatgtg

SEQ ID NO: 1791836 - DNA, 15 bp, Homo sapiens
tgaaaggccatgtgt

SEQ ID NO: 1791837 - DNA, 15 bp, Homo sapiens
gaaaggccatgtgta

SEQ ID NO: 1791838 - DNA, 15 bp, Homo sapiens
aaaggccatgtgtaa

SEQ ID NO: 1791839 - DNA, 15 bp, Homo sapiens
aaggccatgtgtaaa

SEQ ID NO: 1791840 - DNA, 15 bp, Homo sapiens
aggccatgtgtaaat

SEQ ID NO: 1791841 - DNA, 15 bp, Homo sapiens
ggccatgtgtaaatt

SEQ ID NO: 1791842 - DNA, 15 bp, Homo sapiens
gccatgtgtaaattg

SEQ ID NO: 1791843 - DNA, 15 bp, Homo sapiens
ccatgtgtaaattga

SEQ ID NO: 1791844 - DNA, 15 bp, Homo sapiens
catgtgtaaattgag

SEQ ID NO: 1791845 - DNA, 15 bp, Homo sapiens
atgtgtaaattgaga

SEQ ID NO: 1791846 - DNA, 15 bp, Homo sapiens
tgtgtaaattgagaa

SEQ ID NO: 1791847 - DNA, 15 bp, Homo sapiens
gtgtaaattgagaaa

SEQ ID NO: 1791848 - DNA, 15 bp, Homo sapiens
tgtaaattgagaaat

SEQ ID NO: 1791849 - DNA, 15 bp, Homo sapiens
gtaaattgagaaatt

SEQ ID NO: 1791850 - DNA, 15 bp, Homo sapiens
taaattgagaaattc

SEQ ID NO: 1791851 - DNA, 15 bp, Homo sapiens
aaattgagaaattct

SEQ ID NO: 1791852 - DNA, 15 bp, Homo sapiens
aattgagaaattcta

SEQ ID NO: 1791853 - DNA, 15 bp, Homo sapiens
attgagaaattctaa

SEQ ID NO: 1791854 - DNA, 15 bp, Homo sapiens
ttgagaaattctaag

SEQ ID NO: 1791855 - DNA, 15 bp, Homo sapiens
tgagaaattctaagg

SEQ ID NO: 1791856 - DNA, 15 bp, Homo sapiens
gagaaattctaaggc

SEQ ID NO: 1791857 - DNA, 15 bp, Homo sapiens
agaaattctaaggca

SEQ ID NO: 1791858 - DNA, 15 bp, Homo sapiens
gaaattctaaggcaa

SEQ ID NO: 1791859 - DNA, 15 bp, Homo sapiens
aaattctaaggcaac

SEQ ID NO: 1791860 - DNA, 15 bp, Homo sapiens
aattctaaggcaact

SEQ ID NO: 1791861 - DNA, 15 bp, Homo sapiens
attctaaggcaactt

SEQ ID NO: 1791862 - DNA, 15 bp, Homo sapiens
ttctaaggcaacttg

SEQ ID NO: 1791863 - DNA, 15 bp, Homo sapiens
tctaaggcaacttgg

SEQ ID NO: 1791864 - DNA, 15 bp, Homo sapiens
ctaaggcaacttggc

SEQ ID NO: 1791865 - DNA, 15 bp, Homo sapiens
taaggcaacttggct

SEQ ID NO: 1791866 - DNA, 15 bp, Homo sapiens
aaggcaacttggcta

SEQ ID NO: 1791867 - DNA, 15 bp, Homo sapiens
aggcaacttggctag

SEQ ID NO: 1791868 - DNA, 15 bp, Homo sapiens
ggcaacttggctaga

SEQ ID NO: 1791869 - DNA, 15 bp, Homo sapiens
gcaacttggctagaa

SEQ ID NO: 1791870 - DNA, 15 bp, Homo sapiens
caacttggctagaat

SEQ ID NO: 1791871 - DNA, 15 bp, Homo sapiens
aacttggctagaatg

SEQ ID NO: 1791872 - DNA, 15 bp, Homo sapiens
acttggctagaatgc

SEQ ID NO: 1791873 - DNA, 15 bp, Homo sapiens
cttggctagaatgcg

SEQ ID NO: 1791874 - DNA, 15 bp, Homo sapiens
ttggctagaatgcgc

SEQ ID NO: 1791875 - DNA, 15 bp, Homo sapiens
tggctagaatgcgct

SEQ ID NO: 1791876 - DNA, 15 bp, Homo sapiens
ggctagaatgcgctg

SEQ ID NO: 1791877 - DNA, 15 bp, Homo sapiens
gctagaatgcgctgg

SEQ ID NO: 1791878 - DNA, 15 bp, Homo sapiens
ctagaatgcgctggt

SEQ ID NO: 1791879 - DNA, 15 bp, Homo sapiens
tagaatgcgctggta

SEQ ID NO: 1791880 - DNA, 15 bp, Homo sapiens
agaatgcgctggtac

SEQ ID NO: 1791881 - DNA, 15 bp, Homo sapiens
gaatgcgctggtacg

SEQ ID NO: 1791882 - DNA, 15 bp, Homo sapiens
aatgcgctggtacgg

SEQ ID NO: 1791883 - DNA, 15 bp, Homo sapiens
atgcgctggtacggg

SEQ ID NO: 1791884 - DNA, 15 bp, Homo sapiens
tgcgctggtacgggg

SEQ ID NO: 1791885 - DNA, 15 bp, Homo sapiens
gcgctggtacggggg

SEQ ID NO: 1791886 - DNA, 15 bp, Homo sapiens
cgctggtacggggga

SEQ ID NO: 1791887 - DNA, 15 bp, Homo sapiens
gctggtacgggggag

SEQ ID NO: 1791888 - DNA, 15 bp, Homo sapiens
ctggtacgggggagc

SEQ ID NO: 1791889 - DNA, 15 bp, Homo sapiens
tggtacgggggagcc

SEQ ID NO: 1791890 - DNA, 15 bp, Homo sapiens
ggtacgggggagcca

SEQ ID NO: 1791891 - DNA, 15 bp, Homo sapiens
gtacgggggagccac

SEQ ID NO: 1791892 - DNA, 15 bp, Homo sapiens
tacgggggagccact

SEQ ID NO: 1791893 - DNA, 15 bp, Homo sapiens
acgggggagccactt

SEQ ID NO: 1791894 - DNA, 15 bp, Homo sapiens
cgggggagccacttc

SEQ ID NO: 1791895 - DNA, 15 bp, Homo sapiens
gggggagccacttcc

SEQ ID NO: 1791896 - DNA, 15 bp, Homo sapiens
ggggagccacttcca

SEQ ID NO: 1791897 - DNA, 15 bp, Homo sapiens
gggagccacttccag

SEQ ID NO: 1791898 - DNA, 15 bp, Homo sapiens
ggagccacttccagc

SEQ ID NO: 1791899 - DNA, 15 bp, Homo sapiens
gagccacttccagcc

SEQ ID NO: 1791900 - DNA, 15 bp, Homo sapiens
agccacttccagccc

SEQ ID NO: 1791901 - DNA, 15 bp, Homo sapiens
gccacttccagcccg

SEQ ID NO: 1791902 - DNA, 15 bp, Homo sapiens
ccacttccagcccga

SEQ ID NO: 1791903 - DNA, 15 bp, Homo sapiens
cacttccagcccgag

SEQ ID NO: 1791904 - DNA, 15 bp, Homo sapiens
acttccagcccgagc

SEQ ID NO: 1791905 - DNA, 15 bp, Homo sapiens
cttccagcccgagcc

SEQ ID NO: 1791906 - DNA, 15 bp, Homo sapiens
ttccagcccgagcca

SEQ ID NO: 1791907 - DNA, 15 bp, Homo sapiens
tccagcccgagccac

SEQ ID NO: 1791908 - DNA, 15 bp, Homo sapiens
ccagcccgagccaca

SEQ ID NO: 1791909 - DNA, 15 bp, Homo sapiens
cagcccgagccacaa

SEQ ID NO: 1791910 - DNA, 15 bp, Homo sapiens
agcccgagccacaac

SEQ ID NO: 1791911 - DNA, 15 bp, Homo sapiens
gcccgagccacaacc

SEQ ID NO: 1791912 - DNA, 15 bp, Homo sapiens
cccgagccacaacct

SEQ ID NO: 1791913 - DNA, 15 bp, Homo sapiens
ccgagccacaacctg

SEQ ID NO: 1791914 - DNA, 15 bp, Homo sapiens
cgagccacaacctgt

SEQ ID NO: 1791915 - DNA, 15 bp, Homo sapiens
gagccacaacctgtc

SEQ ID NO: 1791916 - DNA, 15 bp, Homo sapiens
agccacaacctgtcc

SEQ ID NO: 1791917 - DNA, 15 bp, Homo sapiens
gccacaacctgtccc

SEQ ID NO: 1791918 - DNA, 15 bp, Homo sapiens
ccacaacctgtcccc

SEQ ID NO: 1791919 - DNA, 15 bp, Homo sapiens
cacaacctgtccccc

SEQ ID NO: 1791920 - DNA, 15 bp, Homo sapiens
acaacctgtccccct

SEQ ID NO: 1791921 - DNA, 15 bp, Homo sapiens
caacctgtccccctt

SEQ ID NO: 1791922 - DNA, 15 bp, Homo sapiens
aacctgtcccccttt

SEQ ID NO: 1791923 - DNA, 15 bp, Homo sapiens
acctgtccccctttt

SEQ ID NO: 1791924 - DNA, 15 bp, Homo sapiens
cctgtcccccttttc

SEQ ID NO: 1791925 - DNA, 15 bp, Homo sapiens
ctgtcccccttttct

SEQ ID NO: 1791926 - DNA, 15 bp, Homo sapiens
tgtcccccttttctg

SEQ ID NO: 1791927 - DNA, 15 bp, Homo sapiens
gtcccccttttctgg

SEQ ID NO: 1791928 - DNA, 15 bp, Homo sapiens
tcccccttttctggc

SEQ ID NO: 1791929 - DNA, 15 bp, Homo sapiens
cccccttttctggcc

SEQ ID NO: 1791930 - DNA, 15 bp, Homo sapiens
ccccttttctggccc

SEQ ID NO: 1791931 - DNA, 15 bp, Homo sapiens
cccttttctggcccc

SEQ ID NO: 1791932 - DNA, 15 bp, Homo sapiens
cttttctggccccct

SEQ ID NO: 1791933 - DNA, 15 bp, Homo sapiens
ttttctggccccctc

SEQ ID NO: 1791934 - DNA, 15 bp, Homo sapiens
tttctggccccctca

SEQ ID NO: 1791935 - DNA, 15 bp, Homo sapiens
ttctggccccctcag

SEQ ID NO: 1791936 - DNA, 15 bp, Homo sapiens
tctggccccctcagc

SEQ ID NO: 1791937 - DNA, 15 bp, Homo sapiens
ctggccccctcagct

SEQ ID NO: 1791938 - DNA, 15 bp, Homo sapiens
tggccccctcagctc

SEQ ID NO: 1791939 - DNA, 15 bp, Homo sapiens
ggccccctcagctcc

SEQ ID NO: 1791940 - DNA, 15 bp, Homo sapiens
gccccctcagctcca

SEQ ID NO: 1791941 - DNA, 15 bp, Homo sapiens
ccccctcagctccat

SEQ ID NO: 1791942 - DNA, 15 bp, Homo sapiens
cccctcagctccatc

SEQ ID NO: 1791943 - DNA, 15 bp, Homo sapiens
ccctcagctccatcc

SEQ ID NO: 1791944 - DNA, 15 bp, Homo sapiens
cctcagctccatccc

SEQ ID NO: 1791945 - DNA, 15 bp, Homo sapiens
ctcagctccatccca

SEQ ID NO: 1791946 - DNA, 15 bp, Homo sapiens
tcagctccatcccac

SEQ ID NO: 1791947 - DNA, 15 bp, Homo sapiens
cagctccatcccact

SEQ ID NO: 1791948 - DNA, 15 bp, Homo sapiens
agctccatcccactc

SEQ ID NO: 1791949 - DNA, 15 bp, Homo sapiens
gctccatcccactcc

SEQ ID NO: 1791950 - DNA, 15 bp, Homo sapiens
ctccatcccactcca

SEQ ID NO: 1791951 - DNA, 15 bp, Homo sapiens
tccatcccactccat

SEQ ID NO: 1791952 - DNA, 15 bp, Homo sapiens
ccatcccactccatg

SEQ ID NO: 1791953 - DNA, 15 bp, Homo sapiens
catcccactccatgg

SEQ ID NO: 1791954 - DNA, 15 bp, Homo sapiens
atcccactccatggg

SEQ ID NO: 1791955 - DNA, 15 bp, Homo sapiens
tcccactccatgggg

SEQ ID NO: 1791956 - DNA, 15 bp, Homo sapiens
cccactccatggggc

SEQ ID NO: 1791957 - DNA, 15 bp, Homo sapiens
ccactccatggggcc

SEQ ID NO: 1791958 - DNA, 15 bp, Homo sapiens
cactccatggggccc

SEQ ID NO: 1791959 - DNA, 15 bp, Homo sapiens
actccatggggccct

SEQ ID NO: 1791960 - DNA, 15 bp, Homo sapiens
ctccatggggccctc

SEQ ID NO: 1791961 - DNA, 15 bp, Homo sapiens
tccatggggccctca

SEQ ID NO: 1791962 - DNA, 15 bp, Homo sapiens
ccatggggccctcaa

SEQ ID NO: 1791963 - DNA, 15 bp, Homo sapiens
catggggccctcaac

SEQ ID NO: 1791964 - DNA, 15 bp, Homo sapiens
atggggccctcaaca

SEQ ID NO: 1791965 - DNA, 15 bp, Homo sapiens
tggggccctcaacac

SEQ ID NO: 1791966 - DNA, 15 bp, Homo sapiens
ggggccctcaacacc

SEQ ID NO: 1791967 - DNA, 15 bp, Homo sapiens
gggccctcaacaccc

SEQ ID NO: 1791968 - DNA, 15 bp, Homo sapiens
ggccctcaacaccct

SEQ ID NO: 1791969 - DNA, 15 bp, Homo sapiens
gccctcaacaccctg

SEQ ID NO: 1791970 - DNA, 15 bp, Homo sapiens
ccctcaacaccctgg

SEQ ID NO: 1791971 - DNA, 15 bp, Homo sapiens
cctcaacaccctgga

SEQ ID NO: 1791972 - DNA, 15 bp, Homo sapiens
ctcaacaccctggat

SEQ ID NO: 1791973 - DNA, 15 bp, Homo sapiens
tcaacaccctggatg

SEQ ID NO: 1791974 - DNA, 15 bp, Homo sapiens
caacaccctggatgg

SEQ ID NO: 1791975 - DNA, 15 bp, Homo sapiens
aacaccctggatggt

SEQ ID NO: 1791976 - DNA, 15 bp, Homo sapiens
acaccctggatggtc

SEQ ID NO: 1791977 - DNA, 15 bp, Homo sapiens
caccctggatggtca

SEQ ID NO: 1791978 - DNA, 15 bp, Homo sapiens
accctggatggtcac

SEQ ID NO: 1791979 - DNA, 15 bp, Homo sapiens
ccctggatggtcacc

SEQ ID NO: 1791980 - DNA, 15 bp, Homo sapiens
cctggatggtcaccc

SEQ ID NO: 1791981 - DNA, 15 bp, Homo sapiens
ctggatggtcaccct

SEQ ID NO: 1791982 - DNA, 15 bp, Homo sapiens
tggatggtcaccctc

SEQ ID NO: 1791983 - DNA, 15 bp, Homo sapiens
ggatggtcaccctcc

SEQ ID NO: 1791984 - DNA, 15 bp, Homo sapiens
gatggtcaccctcct

SEQ ID NO: 1791985 - DNA, 15 bp, Homo sapiens
atggtcaccctcctg

SEQ ID NO: 1791986 - DNA, 15 bp, Homo sapiens
tggtcaccctcctgc

SEQ ID NO: 1791987 - DNA, 15 bp, Homo sapiens
ggtcaccctcctgcc

SEQ ID NO: 1791988 - DNA, 15 bp, Homo sapiens
gtcaccctcctgcct

SEQ ID NO: 1791989 - DNA, 15 bp, Homo sapiens
tcaccctcctgccta

SEQ ID NO: 1791990 - DNA, 15 bp, Homo sapiens
caccctcctgcctac

SEQ ID NO: 1791991 - DNA, 15 bp, Homo sapiens
accctcctgcctacc

SEQ ID NO: 1791992 - DNA, 15 bp, Homo sapiens
ccctcctgcctacct

SEQ ID NO: 1791993 - DNA, 15 bp, Homo sapiens
cctcctgcctacctg

SEQ ID NO: 1791994 - DNA, 15 bp, Homo sapiens
ctcctgcctacctgc

SEQ ID NO: 1791995 - DNA, 15 bp, Homo sapiens
tcctgcctacctgca

SEQ ID NO: 1791996 - DNA, 15 bp, Homo sapiens
cctgcctacctgcat

SEQ ID NO: 1791997 - DNA, 15 bp, Homo sapiens
ctgcctacctgcatt

SEQ ID NO: 1791998 - DNA, 15 bp, Homo sapiens
tgcctacctgcattg

SEQ ID NO: 1791999 - DNA, 15 bp, Homo sapiens
gcctacctgcattgc

SEQ ID NO: 1792000 - DNA, 15 bp, Homo sapiens
cctacctgcattgca

SEQ ID NO: 1792001 - DNA, 15 bp, Homo sapiens
ctacctgcattgcag

SEQ ID NO: 1792002 - DNA, 15 bp, Homo sapiens
tacctgcattgcagc

SEQ ID NO: 1792003 - DNA, 15 bp, Homo sapiens
acctgcattgcagcc

SEQ ID NO: 1792004 - DNA, 15 bp, Homo sapiens
cctgcattgcagccc

SEQ ID NO: 1792005 - DNA, 15 bp, Homo sapiens
ctgcattgcagccct

SEQ ID NO: 1792006 - DNA, 15 bp, Homo sapiens
tgcattgcagccctg

SEQ ID NO: 1792007 - DNA, 15 bp, Homo sapiens
gcattgcagccctgc

SEQ ID NO: 1792008 - DNA, 15 bp, Homo sapiens
cattgcagccctgcc

SEQ ID NO: 1792009 - DNA, 15 bp, Homo sapiens
attgcagccctgccc

SEQ ID NO: 1792010 - DNA, 15 bp, Homo sapiens
ttgcagccctgccct

SEQ ID NO: 1792011 - DNA, 15 bp, Homo sapiens
tgcagccctgccctg

SEQ ID NO: 1792012 - DNA, 15 bp, Homo sapiens
gcagccctgccctgc

SEQ ID NO: 1792013 - DNA, 15 bp, Homo sapiens
cagccctgccctgca

SEQ ID NO: 1792014 - DNA, 15 bp, Homo sapiens
agccctgccctgcac

SEQ ID NO: 1792015 - DNA, 15 bp, Homo sapiens
gccctgccctgcaca

SEQ ID NO: 1792016 - DNA, 15 bp, Homo sapiens
ccctgccctgcacag

SEQ ID NO: 1792017 - DNA, 15 bp, Homo sapiens
cctgccctgcacaga

SEQ ID NO: 1792018 - DNA, 15 bp, Homo sapiens
ctgccctgcacagac

SEQ ID NO: 1792019 - DNA, 15 bp, Homo sapiens
tgccctgcacagaca

SEQ ID NO: 1792020 - DNA, 15 bp, Homo sapiens
gccctgcacagacat

SEQ ID NO: 1792021 - DNA, 15 bp, Homo sapiens
ccctgcacagacata

SEQ ID NO: 1792022 - DNA, 15 bp, Homo sapiens
cctgcacagacatat

SEQ ID NO: 1792023 - DNA, 15 bp, Homo sapiens
ctgcacagacatata

SEQ ID NO: 1792024 - DNA, 15 bp, Homo sapiens
tgcacagacatatac

SEQ ID NO: 1792025 - DNA, 15 bp, Homo sapiens
gcacagacatatact

SEQ ID NO: 1792026 - DNA, 15 bp, Homo sapiens
cacagacatatactt

SEQ ID NO: 1792027 - DNA, 15 bp, Homo sapiens
acagacatatacttc

SEQ ID NO: 1792028 - DNA, 15 bp, Homo sapiens
cagacatatacttct

SEQ ID NO: 1792029 - DNA, 15 bp, Homo sapiens
agacatatacttctc

SEQ ID NO: 1792030 - DNA, 15 bp, Homo sapiens
gacatatacttctct

SEQ ID NO: 1792031 - DNA, 15 bp, Homo sapiens
acatatacttctctg

SEQ ID NO: 1792032 - DNA, 15 bp, Homo sapiens
catatacttctctgg

SEQ ID NO: 1792033 - DNA, 15 bp, Homo sapiens
atatacttctctggc

SEQ ID NO: 1792034 - DNA, 15 bp, Homo sapiens
tatacttctctggcc

SEQ ID NO: 1792035 - DNA, 15 bp, Homo sapiens
atacttctctggcct

SEQ ID NO: 1792036 - DNA, 15 bp, Homo sapiens
tacttctctggccta

SEQ ID NO: 1792037 - DNA, 15 bp, Homo sapiens
acttctctggcctaa

SEQ ID NO: 1792038 - DNA, 15 bp, Homo sapiens
cttctctggcctaaa

SEQ ID NO: 1792039 - DNA, 15 bp, Homo sapiens
ttctctggcctaaaa

SEQ ID NO: 1792040 - DNA, 15 bp, Homo sapiens
tctctggcctaaaag

SEQ ID NO: 1792041 - DNA, 15 bp, Homo sapiens
ctctggcctaaaagt

SEQ ID NO: 1792042 - DNA, 15 bp, Homo sapiens
tctggcctaaaagtc

SEQ ID NO: 1792043 - DNA, 15 bp, Homo sapiens
ctggcctaaaagtcc

SEQ ID NO: 1792044 - DNA, 15 bp, Homo sapiens
tggcctaaaagtcct

SEQ ID NO: 1792045 - DNA, 15 bp, Homo sapiens
ggcctaaaagtcctc

SEQ ID NO: 1792046 - DNA, 15 bp, Homo sapiens
gcctaaaagtcctca

SEQ ID NO: 1792047 - DNA, 15 bp, Homo sapiens
cctaaaagtcctcag

SEQ ID NO: 1792048 - DNA, 15 bp, Homo sapiens
ctaaaagtcctcagg

SEQ ID NO: 1792049 - DNA, 15 bp, Homo sapiens
taaaagtcctcagga

SEQ ID NO: 1792050 - DNA, 15 bp, Homo sapiens
aaaagtcctcaggag

SEQ ID NO: 1792051 - DNA, 15 bp, Homo sapiens
aaagtcctcaggagg

SEQ ID NO: 1792052 - DNA, 15 bp, Homo sapiens
aagtcctcaggaggt

SEQ ID NO: 1792053 - DNA, 15 bp, Homo sapiens
agtcctcaggaggtt

SEQ ID NO: 1792054 - DNA, 15 bp, Homo sapiens
gtcctcaggaggttg

SEQ ID NO: 1792055 - DNA, 15 bp, Homo sapiens
tcctcaggaggttgg

SEQ ID NO: 1792056 - DNA, 15 bp, Homo sapiens
cctcaggaggttggg

SEQ ID NO: 1792057 - DNA, 15 bp, Homo sapiens
ctcaggaggttgggc

SEQ ID NO: 1792058 - DNA, 15 bp, Homo sapiens
tcaggaggttgggcc

SEQ ID NO: 1792059 - DNA, 15 bp, Homo sapiens
caggaggttgggcct

SEQ ID NO: 1792060 - DNA, 15 bp, Homo sapiens
aggaggttgggcctg

SEQ ID NO: 1792061 - DNA, 15 bp, Homo sapiens
ggaggttgggcctgg

SEQ ID NO: 1792062 - DNA, 15 bp, Homo sapiens
gaggttgggcctggg

SEQ ID NO: 1792063 - DNA, 15 bp, Homo sapiens
aggttgggcctggga

SEQ ID NO: 1792064 - DNA, 15 bp, Homo sapiens
ggttgggcctgggaa

SEQ ID NO: 1792065 - DNA, 15 bp, Homo sapiens
gttgggcctgggaag

SEQ ID NO: 1792066 - DNA, 15 bp, Homo sapiens
ttgggcctgggaaga

SEQ ID NO: 1792067 - DNA, 15 bp, Homo sapiens
tgggcctgggaagag

SEQ ID NO: 1792068 - DNA, 15 bp, Homo sapiens
gggcctgggaagagg

SEQ ID NO: 1792069 - DNA, 15 bp, Homo sapiens
ggcctgggaagaggt

SEQ ID NO: 1792070 - DNA, 15 bp, Homo sapiens
gcctgggaagaggtg

SEQ ID NO: 1792071 - DNA, 15 bp, Homo sapiens
cctgggaagaggtgt

SEQ ID NO: 1792072 - DNA, 15 bp, Homo sapiens
ctgggaagaggtgta

SEQ ID NO: 1792073 - DNA, 15 bp, Homo sapiens
tgggaagaggtgtac

SEQ ID NO: 1792074 - DNA, 15 bp, Homo sapiens
gggaagaggtgtaca

SEQ ID NO: 1792075 - DNA, 15 bp, Homo sapiens
ggaagaggtgtacag

SEQ ID NO: 1792076 - DNA, 15 bp, Homo sapiens
gaagaggtgtacaga

SEQ ID NO: 1792077 - DNA, 15 bp, Homo sapiens
aagaggtgtacagac

SEQ ID NO: 1792078 - DNA, 15 bp, Homo sapiens
agaggtgtacagacc

SEQ ID NO: 1792079 - DNA, 15 bp, Homo sapiens
gaggtgtacagaccc

SEQ ID NO: 1792080 - DNA, 15 bp, Homo sapiens
aggtgtacagaccct

SEQ ID NO: 1792081 - DNA, 15 bp, Homo sapiens
ggtgtacagaccctg

SEQ ID NO: 1792082 - DNA, 15 bp, Homo sapiens
gtgtacagaccctgg

SEQ ID NO: 1792083 - DNA, 15 bp, Homo sapiens
tgtacagaccctggg

SEQ ID NO: 1792084 - DNA, 15 bp, Homo sapiens
gtacagaccctgggg

SEQ ID NO: 1792085 - DNA, 15 bp, Homo sapiens
tacagaccctgggga

SEQ ID NO: 1792086 - DNA, 15 bp, Homo sapiens
acagaccctggggat

SEQ ID NO: 1792087 - DNA, 15 bp, Homo sapiens
cagaccctggggatg

SEQ ID NO: 1792088 - DNA, 15 bp, Homo sapiens
agaccctggggatgg

SEQ ID NO: 1792089 - DNA, 15 bp, Homo sapiens
gaccctggggatgga

SEQ ID NO: 1792090 - DNA, 15 bp, Homo sapiens
accctggggatggac

SEQ ID NO: 1792091 - DNA, 15 bp, Homo sapiens
ccctggggatggact

SEQ ID NO: 1792092 - DNA, 15 bp, Homo sapiens
cctggggatggactt

SEQ ID NO: 1792093 - DNA, 15 bp, Homo sapiens
ctggggatggacttg

SEQ ID NO: 1792094 - DNA, 15 bp, Homo sapiens
tggggatggacttgg

SEQ ID NO: 1792095 - DNA, 15 bp, Homo sapiens
ggggatggacttggg

SEQ ID NO: 1792096 - DNA, 15 bp, Homo sapiens
gggatggacttgggg

SEQ ID NO: 1792097 - DNA, 15 bp, Homo sapiens
ggatggacttggggc

SEQ ID NO: 1792098 - DNA, 15 bp, Homo sapiens
gatggacttggggcc

SEQ ID NO: 1792099 - DNA, 15 bp, Homo sapiens
atggacttggggcca

SEQ ID NO: 1792100 - DNA, 15 bp, Homo sapiens
tggacttggggccat

SEQ ID NO: 1792101 - DNA, 15 bp, Homo sapiens
ggacttggggccatt

SEQ ID NO: 1792102 - DNA, 15 bp, Homo sapiens
gacttggggccattt

SEQ ID NO: 1792103 - DNA, 15 bp, Homo sapiens
acttggggccatttg

SEQ ID NO: 1792104 - DNA, 15 bp, Homo sapiens
cttggggccatttgc

SEQ ID NO: 1792105 - DNA, 15 bp, Homo sapiens
ttggggccatttgca

SEQ ID NO: 1792106 - DNA, 15 bp, Homo sapiens
tggggccatttgcac

SEQ ID NO: 1792107 - DNA, 15 bp, Homo sapiens
ggggccatttgcaca

SEQ ID NO: 1792108 - DNA, 15 bp, Homo sapiens
gggccatttgcacag

SEQ ID NO: 1792109 - DNA, 15 bp, Homo sapiens
ggccatttgcacaga

SEQ ID NO: 1792110 - DNA, 15 bp, Homo sapiens
gccatttgcacagag

SEQ ID NO: 1792111 - DNA, 15 bp, Homo sapiens
ccatttgcacagaga

SEQ ID NO: 1792112 - DNA, 15 bp, Homo sapiens
catttgcacagagaa

SEQ ID NO: 1792113 - DNA, 15 bp, Homo sapiens
atttgcacagagaat

SEQ ID NO: 1792114 - DNA, 15 bp, Homo sapiens
tttgcacagagaata

SEQ ID NO: 1792115 - DNA, 15 bp, Homo sapiens
ttgcacagagaatat

SEQ ID NO: 1792116 - DNA, 15 bp, Homo sapiens
tgcacagagaatatc

SEQ ID NO: 1792117 - DNA, 15 bp, Homo sapiens
gcacagagaatatct

SEQ ID NO: 1792118 - DNA, 15 bp, Homo sapiens
cacagagaatatctg

SEQ ID NO: 1792119 - DNA, 15 bp, Homo sapiens
acagagaatatctgg

SEQ ID NO: 1792120 - DNA, 15 bp, Homo sapiens
cagagaatatctggc

SEQ ID NO: 1792121 - DNA, 15 bp, Homo sapiens
agagaatatctggca

SEQ ID NO: 1792122 - DNA, 15 bp, Homo sapiens
gagaatatctggcat

SEQ ID NO: 1792123 - DNA, 15 bp, Homo sapiens
agaatatctggcatc

SEQ ID NO: 1792124 - DNA, 15 bp, Homo sapiens
gaatatctggcatct

SEQ ID NO: 1792125 - DNA, 15 bp, Homo sapiens
aatatctggcatctt

SEQ ID NO: 1792126 - DNA, 15 bp, Homo sapiens
atatctggcatcttg

SEQ ID NO: 1792127 - DNA, 15 bp, Homo sapiens
tatctggcatcttgg

SEQ ID NO: 1792128 - DNA, 15 bp, Homo sapiens
atctggcatcttggg

SEQ ID NO: 1792129 - DNA, 15 bp, Homo sapiens
tctggcatcttgggc

SEQ ID NO: 1792130 - DNA, 15 bp, Homo sapiens
ctggcatcttgggca

SEQ ID NO: 1792131 - DNA, 15 bp, Homo sapiens
tggcatcttgggcac

SEQ ID NO: 1792132 - DNA, 15 bp, Homo sapiens
ggcatcttgggcacc

SEQ ID NO: 1792133 - DNA, 15 bp, Homo sapiens
gcatcttgggcacct

SEQ ID NO: 1792134 - DNA, 15 bp, Homo sapiens
catcttgggcacctg

SEQ ID NO: 1792135 - DNA, 15 bp, Homo sapiens
atcttgggcacctgg

SEQ ID NO: 1792136 - DNA, 15 bp, Homo sapiens
tcttgggcacctgga

SEQ ID NO: 1792137 - DNA, 15 bp, Homo sapiens
cttgggcacctggag

SEQ ID NO: 1792138 - DNA, 15 bp, Homo sapiens
ttgggcacctggagt

SEQ ID NO: 1792139 - DNA, 15 bp, Homo sapiens
tgggcacctggagtg

SEQ ID NO: 1792140 - DNA, 15 bp, Homo sapiens
gggcacctggagtgg

SEQ ID NO: 1792141 - DNA, 15 bp, Homo sapiens
ggcacctggagtggc

SEQ ID NO: 1792142 - DNA, 15 bp, Homo sapiens
gcacctggagtggca

SEQ ID NO: 1792143 - DNA, 15 bp, Homo sapiens
cacctggagtggcaa

SEQ ID NO: 1792144 - DNA, 15 bp, Homo sapiens
acctggagtggcaag

SEQ ID NO: 1792145 - DNA, 15 bp, Homo sapiens
cctggagtggcaagt

SEQ ID NO: 1792146 - DNA, 15 bp, Homo sapiens
ctggagtggcaagtg

SEQ ID NO: 1792147 - DNA, 15 bp, Homo sapiens
tggagtggcaagtgc

SEQ ID NO: 1792148 - DNA, 15 bp, Homo sapiens
ggagtggcaagtgcc

SEQ ID NO: 1792149 - DNA, 15 bp, Homo sapiens
gagtggcaagtgccc

SEQ ID NO: 1792150 - DNA, 15 bp, Homo sapiens
agtggcaagtgccct

SEQ ID NO: 1792151 - DNA, 15 bp, Homo sapiens
gtggcaagtgccctt

SEQ ID NO: 1792152 - DNA, 15 bp, Homo sapiens
tggcaagtgccctta

SEQ ID NO: 1792153 - DNA, 15 bp, Homo sapiens
ggcaagtgcccttaa

SEQ ID NO: 1792154 - DNA, 15 bp, Homo sapiens
gcaagtgcccttaac

SEQ ID NO: 1792155 - DNA, 15 bp, Homo sapiens
caagtgcccttaacc

SEQ ID NO: 1792156 - DNA, 15 bp, Homo sapiens
aagtgcccttaaccc

SEQ ID NO: 1792157 - DNA, 15 bp, Homo sapiens
agtgcccttaaccca

SEQ ID NO: 1792158 - DNA, 15 bp, Homo sapiens
gtgcccttaacccac

SEQ ID NO: 1792159 - DNA, 15 bp, Homo sapiens
tgcccttaacccaca

SEQ ID NO: 1792160 - DNA, 15 bp, Homo sapiens
gcccttaacccacaa

SEQ ID NO: 1792161 - DNA, 15 bp, Homo sapiens
cccttaacccacaaa

SEQ ID NO: 1792162 - DNA, 15 bp, Homo sapiens
ccttaacccacaaac

SEQ ID NO: 1792163 - DNA, 15 bp, Homo sapiens
cttaacccacaaact

SEQ ID NO: 1792164 - DNA, 15 bp, Homo sapiens
ttaacccacaaactc

SEQ ID NO: 1792165 - DNA, 15 bp, Homo sapiens
taacccacaaactcc

SEQ ID NO: 1792166 - DNA, 15 bp, Homo sapiens
aacccacaaactcct

SEQ ID NO: 1792167 - DNA, 15 bp, Homo sapiens
acccacaaactcctc

SEQ ID NO: 1792168 - DNA, 15 bp, Homo sapiens
cccacaaactcctca

SEQ ID NO: 1792169 - DNA, 15 bp, Homo sapiens
ccacaaactcctcat

SEQ ID NO: 1792170 - DNA, 15 bp, Homo sapiens
cacaaactcctcatg

SEQ ID NO: 1792171 - DNA, 15 bp, Homo sapiens
acaaactcctcatgc

SEQ ID NO: 1792172 - DNA, 15 bp, Homo sapiens
caaactcctcatgcc

SEQ ID NO: 1792173 - DNA, 15 bp, Homo sapiens
aaactcctcatgcca

SEQ ID NO: 1792174 - DNA, 15 bp, Homo sapiens
aactcctcatgccat

SEQ ID NO: 1792175 - DNA, 15 bp, Homo sapiens
actcctcatgccatg

SEQ ID NO: 1792176 - DNA, 15 bp, Homo sapiens
ctcctcatgccatgg

SEQ ID NO: 1792177 - DNA, 15 bp, Homo sapiens
tcctcatgccatggg

SEQ ID NO: 1792178 - DNA, 15 bp, Homo sapiens
cctcatgccatgggc

SEQ ID NO: 1792179 - DNA, 15 bp, Homo sapiens
ctcatgccatgggca

SEQ ID NO: 1792180 - DNA, 15 bp, Homo sapiens
tcatgccatgggcag

SEQ ID NO: 1792181 - DNA, 15 bp, Homo sapiens
catgccatgggcagg

SEQ ID NO: 1792182 - DNA, 15 bp, Homo sapiens
atgccatgggcagga

SEQ ID NO: 1792183 - DNA, 15 bp, Homo sapiens
tgccatgggcaggag

SEQ ID NO: 1792184 - DNA, 15 bp, Homo sapiens
gccatgggcaggagc

SEQ ID NO: 1792185 - DNA, 15 bp, Homo sapiens
ccatgggcaggagca

SEQ ID NO: 1792186 - DNA, 15 bp, Homo sapiens
catgggcaggagcag

SEQ ID NO: 1792187 - DNA, 15 bp, Homo sapiens
atgggcaggagcagc

SEQ ID NO: 1792188 - DNA, 15 bp, Homo sapiens
tgggcaggagcagca

SEQ ID NO: 1792189 - DNA, 15 bp, Homo sapiens
gggcaggagcagcaa

SEQ ID NO: 1792190 - DNA, 15 bp, Homo sapiens
ggcaggagcagcaac

SEQ ID NO: 1792191 - DNA, 15 bp, Homo sapiens
gcaggagcagcaaca

SEQ ID NO: 1792192 - DNA, 15 bp, Homo sapiens
caggagcagcaacag

SEQ ID NO: 1792193 - DNA, 15 bp, Homo sapiens
aggagcagcaacaga

SEQ ID NO: 1792194 - DNA, 15 bp, Homo sapiens
ggagcagcaacagag

SEQ ID NO: 1792195 - DNA, 15 bp, Homo sapiens
gagcagcaacagaga

SEQ ID NO: 1792196 - DNA, 15 bp, Homo sapiens
agcagcaacagagaa

SEQ ID NO: 1792197 - DNA, 15 bp, Homo sapiens
gcagcaacagagaag

SEQ ID NO: 1792198 - DNA, 15 bp, Homo sapiens
cagcaacagagaagg

SEQ ID NO: 1792199 - DNA, 15 bp, Homo sapiens
agcaacagagaagga

SEQ ID NO: 1792200 - DNA, 15 bp, Homo sapiens
gcaacagagaaggac

SEQ ID NO: 1792201 - DNA, 15 bp, Homo sapiens
caacagagaaggaca

SEQ ID NO: 1792202 - DNA, 15 bp, Homo sapiens
aacagagaaggacaa

SEQ ID NO: 1792203 - DNA, 15 bp, Homo sapiens
acagagaaggacaag

SEQ ID NO: 1792204 - DNA, 15 bp, Homo sapiens
cagagaaggacaaga

SEQ ID NO: 1792205 - DNA, 15 bp, Homo sapiens
agagaaggacaagag

SEQ ID NO: 1792206 - DNA, 15 bp, Homo sapiens
gagaaggacaagaga

SEQ ID NO: 1792207 - DNA, 15 bp, Homo sapiens
agaaggacaagagaa

SEQ ID NO: 1792208 - DNA, 15 bp, Homo sapiens
gaaggacaagagaaa

SEQ ID NO: 1792209 - DNA, 15 bp, Homo sapiens
aaggacaagagaaac

SEQ ID NO: 1792210 - DNA, 15 bp, Homo sapiens
aggacaagagaaacc

SEQ ID NO: 1792211 - DNA, 15 bp, Homo sapiens
ggacaagagaaaccc

SEQ ID NO: 1792212 - DNA, 15 bp, Homo sapiens
gacaagagaaaccct

SEQ ID NO: 1792213 - DNA, 15 bp, Homo sapiens
acaagagaaaccctg

SEQ ID NO: 1792214 - DNA, 15 bp, Homo sapiens
caagagaaaccctgg

SEQ ID NO: 1792215 - DNA, 15 bp, Homo sapiens
aagagaaaccctggc

SEQ ID NO: 1792216 - DNA, 15 bp, Homo sapiens
agagaaaccctggca

SEQ ID NO: 1792217 - DNA, 15 bp, Homo sapiens
gagaaaccctggcag

SEQ ID NO: 1792218 - DNA, 15 bp, Homo sapiens
agaaaccctggcagc

SEQ ID NO: 1792219 - DNA, 15 bp, Homo sapiens
gaaaccctggcagca

SEQ ID NO: 1792220 - DNA, 15 bp, Homo sapiens
aaaccctggcagcag

SEQ ID NO: 1792221 - DNA, 15 bp, Homo sapiens
aaccctggcagcagg

SEQ ID NO: 1792222 - DNA, 15 bp, Homo sapiens
accctggcagcaggc

SEQ ID NO: 1792223 - DNA, 15 bp, Homo sapiens
ccctggcagcaggca

SEQ ID NO: 1792224 - DNA, 15 bp, Homo sapiens
cctggcagcaggcag

SEQ ID NO: 1792225 - DNA, 15 bp, Homo sapiens
ctggcagcaggcaga

SEQ ID NO: 1792226 - DNA, 15 bp, Homo sapiens
tggcagcaggcagag

SEQ ID NO: 1792227 - DNA, 15 bp, Homo sapiens
ggcagcaggcagagc

SEQ ID NO: 1792228 - DNA, 15 bp, Homo sapiens
gcagcaggcagagct

SEQ ID NO: 1792229 - DNA, 15 bp, Homo sapiens
cagcaggcagagctg

SEQ ID NO: 1792230 - DNA, 15 bp, Homo sapiens
agcaggcagagctgt

SEQ ID NO: 1792231 - DNA, 15 bp, Homo sapiens
gcaggcagagctgtg

SEQ ID NO: 1792232 - DNA, 15 bp, Homo sapiens
caggcagagctgtgt

SEQ ID NO: 1792233 - DNA, 15 bp, Homo sapiens
aggcagagctgtgtg

SEQ ID NO: 1792234 - DNA, 15 bp, Homo sapiens
ggcagagctgtgtgt

SEQ ID NO: 1792235 - DNA, 15 bp, Homo sapiens
gcagagctgtgtgtg

SEQ ID NO: 1792236 - DNA, 15 bp, Homo sapiens
cagagctgtgtgtga

SEQ ID NO: 1792237 - DNA, 15 bp, Homo sapiens
agagctgtgtgtgac

SEQ ID NO: 1792238 - DNA, 15 bp, Homo sapiens
gagctgtgtgtgacc

SEQ ID NO: 1792239 - DNA, 15 bp, Homo sapiens
agctgtgtgtgacct

SEQ ID NO: 1792240 - DNA, 15 bp, Homo sapiens
gctgtgtgtgaccta

SEQ ID NO: 1792241 - DNA, 15 bp, Homo sapiens
ctgtgtgtgacctag

SEQ ID NO: 1792242 - DNA, 15 bp, Homo sapiens
tgtgtgtgacctagg

SEQ ID NO: 1792243 - DNA, 15 bp, Homo sapiens
gtgtgtgacctaggc

SEQ ID NO: 1792244 - DNA, 15 bp, Homo sapiens
tgtgtgacctaggct

SEQ ID NO: 1792245 - DNA, 15 bp, Homo sapiens
gtgtgacctaggctg

SEQ ID NO: 1792246 - DNA, 15 bp, Homo sapiens
tgtgacctaggctga

SEQ ID NO: 1792247 - DNA, 15 bp, Homo sapiens
gtgacctaggctgaa

SEQ ID NO: 1792248 - DNA, 15 bp, Homo sapiens
tgacctaggctgaat

SEQ ID NO: 1792249 - DNA, 15 bp, Homo sapiens
gacctaggctgaatg

SEQ ID NO: 1792250 - DNA, 15 bp, Homo sapiens
acctaggctgaatgt

SEQ ID NO: 1792251 - DNA, 15 bp, Homo sapiens
cctaggctgaatgtt

SEQ ID NO: 1792252 - DNA, 15 bp, Homo sapiens
ctaggctgaatgttt

SEQ ID NO: 1792253 - DNA, 15 bp, Homo sapiens
taggctgaatgtttc

SEQ ID NO: 1792254 - DNA, 15 bp, Homo sapiens
aggctgaatgtttcg

SEQ ID NO: 1792255 - DNA, 15 bp, Homo sapiens
ggctgaatgtttcga

SEQ ID NO: 1792256 - DNA, 15 bp, Homo sapiens
gctgaatgtttcgat

SEQ ID NO: 1792257 - DNA, 15 bp, Homo sapiens
ctgaatgtttcgata

SEQ ID NO: 1792258 - DNA, 15 bp, Homo sapiens
tgaatgtttcgataa

SEQ ID NO: 1792259 - DNA, 15 bp, Homo sapiens
gaatgtttcgataaa

SEQ ID NO: 1792260 - DNA, 15 bp, Homo sapiens
aatgtttcgataaaa

SEQ ID NO: 1792261 - DNA, 15 bp, Homo sapiens
atgtttcgataaaat

SEQ ID NO: 1792262 - DNA, 15 bp, Homo sapiens
tgtttcgataaaatt

SEQ ID NO: 1792263 - DNA, 15 bp, Homo sapiens
gtttcgataaaattt

SEQ ID NO: 1792264 - DNA, 15 bp, Homo sapiens
tttcgataaaatttc

SEQ ID NO: 1792265 - DNA, 15 bp, Homo sapiens
ttcgataaaatttct

SEQ ID NO: 1792266 - DNA, 15 bp, Homo sapiens
tcgataaaatttctt

SEQ ID NO: 1792267 - DNA, 15 bp, Homo sapiens
cgataaaatttcttc

SEQ ID NO: 1792268 - DNA, 15 bp, Homo sapiens
gataaaatttcttca

SEQ ID NO: 1792269 - DNA, 15 bp, Homo sapiens
ataaaatttcttcag

SEQ ID NO: 1792270 - DNA, 15 bp, Homo sapiens
taaaatttcttcagc

SEQ ID NO: 1792271 - DNA, 15 bp, Homo sapiens
aaaatttcttcagcc

SEQ ID NO: 1792272 - DNA, 15 bp, Homo sapiens
aaatttcttcagcca

SEQ ID NO: 1792273 - DNA, 15 bp, Homo sapiens
aatttcttcagccag

SEQ ID NO: 1792274 - DNA, 15 bp, Homo sapiens
atttcttcagccagg

SEQ ID NO: 1792275 - DNA, 15 bp, Homo sapiens
tttcttcagccagga

SEQ ID NO: 1792276 - DNA, 15 bp, Homo sapiens
ttcttcagccaggaa

SEQ ID NO: 1792277 - DNA, 15 bp, Homo sapiens
tcttcagccaggaac

SEQ ID NO: 1792278 - DNA, 15 bp, Homo sapiens
cttcagccaggaaca

SEQ ID NO: 1792279 - DNA, 15 bp, Homo sapiens
ttcagccaggaacaa

SEQ ID NO: 1792280 - DNA, 15 bp, Homo sapiens
tcagccaggaacaag

SEQ ID NO: 1792281 - DNA, 15 bp, Homo sapiens
cagccaggaacaagt

SEQ ID NO: 1792282 - DNA, 15 bp, Homo sapiens
agccaggaacaagtc

SEQ ID NO: 1792283 - DNA, 15 bp, Homo sapiens
gccaggaacaagtcc

SEQ ID NO: 1792284 - DNA, 15 bp, Homo sapiens
ccaggaacaagtcct

SEQ ID NO: 1792285 - DNA, 15 bp, Homo sapiens
caggaacaagtcctg

SEQ ID NO: 1792286 - DNA, 15 bp, Homo sapiens
aggaacaagtcctgc

SEQ ID NO: 1792287 - DNA, 15 bp, Homo sapiens
ggaacaagtcctgcg

SEQ ID NO: 1792288 - DNA, 15 bp, Homo sapiens
gaacaagtcctgcgt

SEQ ID NO: 1792289 - DNA, 15 bp, Homo sapiens
aacaagtcctgcgtg

SEQ ID NO: 1792290 - DNA, 15 bp, Homo sapiens
acaagtcctgcgtgt

SEQ ID NO: 1792291 - DNA, 15 bp, Homo sapiens
caagtcctgcgtgtc

SEQ ID NO: 1792292 - DNA, 15 bp, Homo sapiens
aagtcctgcgtgtcc

SEQ ID NO: 1792293 - DNA, 15 bp, Homo sapiens
agtcctgcgtgtcct

SEQ ID NO: 1792294 - DNA, 15 bp, Homo sapiens
gtcctgcgtgtcctc

SEQ ID NO: 1792295 - DNA, 15 bp, Homo sapiens
tcctgcgtgtcctct

SEQ ID NO: 1792296 - DNA, 15 bp, Homo sapiens
cctgcgtgtcctctt

SEQ ID NO: 1792297 - DNA, 15 bp, Homo sapiens
ctgcgtgtcctcttg

SEQ ID NO: 1792298 - DNA, 15 bp, Homo sapiens
tgcgtgtcctcttgc

SEQ ID NO: 1792299 - DNA, 15 bp, Homo sapiens
gcgtgtcctcttgcc

SEQ ID NO: 1792300 - DNA, 15 bp, Homo sapiens
cgtgtcctcttgcca

SEQ ID NO: 1792301 - DNA, 15 bp, Homo sapiens
gtgtcctcttgccaa

SEQ ID NO: 1792302 - DNA, 15 bp, Homo sapiens
tgtcctcttgccaac

SEQ ID NO: 1792303 - DNA, 15 bp, Homo sapiens
gtcctcttgccaacc

SEQ ID NO: 1792304 - DNA, 15 bp, Homo sapiens
tcctcttgccaaccc

SEQ ID NO: 1792305 - DNA, 15 bp, Homo sapiens
cctcttgccaaccct

SEQ ID NO: 1792306 - DNA, 15 bp, Homo sapiens
ctcttgccaaccctc

SEQ ID NO: 1792307 - DNA, 15 bp, Homo sapiens
tcttgccaaccctcc

SEQ ID NO: 1792308 - DNA, 15 bp, Homo sapiens
cttgccaaccctcca

SEQ ID NO: 1792309 - DNA, 15 bp, Homo sapiens
ttgccaaccctccag

SEQ ID NO: 1792310 - DNA, 15 bp, Homo sapiens
tgccaaccctccagc

SEQ ID NO: 1792311 - DNA, 15 bp, Homo sapiens
gccaaccctccagcc

SEQ ID NO: 1792312 - DNA, 15 bp, Homo sapiens
ccaaccctccagccg

SEQ ID NO: 1792313 - DNA, 15 bp, Homo sapiens
caaccctccagccgt

SEQ ID NO: 1792314 - DNA, 15 bp, Homo sapiens
aaccctccagccgtg

SEQ ID NO: 1792315 - DNA, 15 bp, Homo sapiens
accctccagccgtga

SEQ ID NO: 1792316 - DNA, 15 bp, Homo sapiens
ccctccagccgtgag

SEQ ID NO: 1792317 - DNA, 15 bp, Homo sapiens
cctccagccgtgagt

SEQ ID NO: 1792318 - DNA, 15 bp, Homo sapiens
ctccagccgtgagtg

SEQ ID NO: 1792319 - DNA, 15 bp, Homo sapiens
tccagccgtgagtgt

SEQ ID NO: 1792320 - DNA, 15 bp, Homo sapiens
ccagccgtgagtgtc

SEQ ID NO: 1792321 - DNA, 15 bp, Homo sapiens
cagccgtgagtgtca

SEQ ID NO: 1792322 - DNA, 15 bp, Homo sapiens
agccgtgagtgtcag

SEQ ID NO: 1792323 - DNA, 15 bp, Homo sapiens
gccgtgagtgtcagc

SEQ ID NO: 1792324 - DNA, 15 bp, Homo sapiens
ccgtgagtgtcagca

SEQ ID NO: 1792325 - DNA, 15 bp, Homo sapiens
cgtgagtgtcagcac

SEQ ID NO: 1792326 - DNA, 15 bp, Homo sapiens
gtgagtgtcagcaca

SEQ ID NO: 1792327 - DNA, 15 bp, Homo sapiens
tgagtgtcagcacat

SEQ ID NO: 1792328 - DNA, 15 bp, Homo sapiens
gagtgtcagcacatc

SEQ ID NO: 1792329 - DNA, 15 bp, Homo sapiens
agtgtcagcacatca

SEQ ID NO: 1792330 - DNA, 15 bp, Homo sapiens
gtgtcagcacatcac

SEQ ID NO: 1792331 - DNA, 15 bp, Homo sapiens
tgtcagcacatcact

SEQ ID NO: 1792332 - DNA, 15 bp, Homo sapiens
gtcagcacatcactc

SEQ ID NO: 1792333 - DNA, 15 bp, Homo sapiens
tcagcacatcactcc

SEQ ID NO: 1792334 - DNA, 15 bp, Homo sapiens
cagcacatcactccc

SEQ ID NO: 1792335 - DNA, 15 bp, Homo sapiens
agcacatcactcccc

SEQ ID NO: 1792336 - DNA, 15 bp, Homo sapiens
gcacatcactccccc

SEQ ID NO: 1792337 - DNA, 15 bp, Homo sapiens
cacatcactcccccc

SEQ ID NO: 1792338 - DNA, 15 bp, Homo sapiens
acatcactccccccg

SEQ ID NO: 1792339 - DNA, 15 bp, Homo sapiens
catcactccccccgg

SEQ ID NO: 1792340 - DNA, 15 bp, Homo sapiens
atcactccccccggg

SEQ ID NO: 1792341 - DNA, 15 bp, Homo sapiens
tcactccccccgggg

SEQ ID NO: 1792342 - DNA, 15 bp, Homo sapiens
cactccccccggggc

SEQ ID NO: 1792343 - DNA, 15 bp, Homo sapiens
actccccccggggca

SEQ ID NO: 1792344 - DNA, 15 bp, Homo sapiens
ctccccccggggcat

SEQ ID NO: 1792345 - DNA, 15 bp, Homo sapiens
tccccccggggcata

SEQ ID NO: 1792346 - DNA, 15 bp, Homo sapiens
ccccccggggcatag

SEQ ID NO: 1792347 - DNA, 15 bp, Homo sapiens
cccccggggcatagg

SEQ ID NO: 1792348 - DNA, 15 bp, Homo sapiens
ccccggggcataggc

SEQ ID NO: 1792349 - DNA, 15 bp, Homo sapiens
cccggggcataggct

SEQ ID NO: 1792350 - DNA, 15 bp, Homo sapiens
ccggggcataggctc

SEQ ID NO: 1792351 - DNA, 15 bp, Homo sapiens
cggggcataggctcc

SEQ ID NO: 1792352 - DNA, 15 bp, Homo sapiens
ggggcataggctcct

SEQ ID NO: 1792353 - DNA, 15 bp, Homo sapiens
gggcataggctcctc

SEQ ID NO: 1792354 - DNA, 15 bp, Homo sapiens
ggcataggctcctca

SEQ ID NO: 1792355 - DNA, 15 bp, Homo sapiens
gcataggctcctcat

SEQ ID NO: 1792356 - DNA, 15 bp, Homo sapiens
cataggctcctcatc

SEQ ID NO: 1792357 - DNA, 15 bp, Homo sapiens
ataggctcctcatct

SEQ ID NO: 1792358 - DNA, 15 bp, Homo sapiens
taggctcctcatctc

SEQ ID NO: 1792359 - DNA, 15 bp, Homo sapiens
aggctcctcatctca

SEQ ID NO: 1792360 - DNA, 15 bp, Homo sapiens
ggctcctcatctcag

SEQ ID NO: 1792361 - DNA, 15 bp, Homo sapiens
gctcctcatctcaga

SEQ ID NO: 1792362 - DNA, 15 bp, Homo sapiens
ctcctcatctcagaa

SEQ ID NO: 1792363 - DNA, 15 bp, Homo sapiens
tcctcatctcagaac

SEQ ID NO: 1792364 - DNA, 15 bp, Homo sapiens
cctcatctcagaact

SEQ ID NO: 1792365 - DNA, 15 bp, Homo sapiens
ctcatctcagaacta

SEQ ID NO: 1792366 - DNA, 15 bp, Homo sapiens
tcatctcagaactag

SEQ ID NO: 1792367 - DNA, 15 bp, Homo sapiens
catctcagaactaga

SEQ ID NO: 1792368 - DNA, 15 bp, Homo sapiens
atctcagaactagaa

SEQ ID NO: 1792369 - DNA, 15 bp, Homo sapiens
tctcagaactagaaa

SEQ ID NO: 1792370 - DNA, 15 bp, Homo sapiens
ctcagaactagaaac

SEQ ID NO: 1792371 - DNA, 15 bp, Homo sapiens
tcagaactagaaaca

SEQ ID NO: 1792372 - DNA, 15 bp, Homo sapiens
cagaactagaaacat

SEQ ID NO: 1792373 - DNA, 15 bp, Homo sapiens
agaactagaaacatg

SEQ ID NO: 1792374 - DNA, 15 bp, Homo sapiens
gaactagaaacatgt

SEQ ID NO: 1792375 - DNA, 15 bp, Homo sapiens
aactagaaacatgtg

SEQ ID NO: 1792376 - DNA, 15 bp, Homo sapiens
actagaaacatgtgc

SEQ ID NO: 1792377 - DNA, 15 bp, Homo sapiens
ctagaaacatgtgct

SEQ ID NO: 1792378 - DNA, 15 bp, Homo sapiens
tagaaacatgtgctc

SEQ ID NO: 1792379 - DNA, 15 bp, Homo sapiens
agaaacatgtgctct

SEQ ID NO: 1792380 - DNA, 15 bp, Homo sapiens
gaaacatgtgctctg

SEQ ID NO: 1792381 - DNA, 15 bp, Homo sapiens
aaacatgtgctctgt

SEQ ID NO: 1792382 - DNA, 15 bp, Homo sapiens
aacatgtgctctgtg

SEQ ID NO: 1792383 - DNA, 15 bp, Homo sapiens
acatgtgctctgtga

SEQ ID NO: 1792384 - DNA, 15 bp, Homo sapiens
catgtgctctgtgag

SEQ ID NO: 1792385 - DNA, 15 bp, Homo sapiens
atgtgctctgtgagt

SEQ ID NO: 1792386 - DNA, 15 bp, Homo sapiens
tgtgctctgtgagtt

SEQ ID NO: 1792387 - DNA, 15 bp, Homo sapiens
gtgctctgtgagttt

SEQ ID NO: 1792388 - DNA, 15 bp, Homo sapiens
tgctctgtgagtttc

SEQ ID NO: 1792389 - DNA, 15 bp, Homo sapiens
gctctgtgagtttcc

SEQ ID NO: 1792390 - DNA, 15 bp, Homo sapiens
ctctgtgagtttcct

SEQ ID NO: 1792391 - DNA, 15 bp, Homo sapiens
tctgtgagtttcctt

SEQ ID NO: 1792392 - DNA, 15 bp, Homo sapiens
ctgtgagtttccttc

SEQ ID NO: 1792393 - DNA, 15 bp, Homo sapiens
tgtgagtttccttct

SEQ ID NO: 1792394 - DNA, 15 bp, Homo sapiens
gtgagtttccttctt

SEQ ID NO: 1792395 - DNA, 15 bp, Homo sapiens
tgagtttccttcttg

SEQ ID NO: 1792396 - DNA, 15 bp, Homo sapiens
gagtttccttcttgc

SEQ ID NO: 1792397 - DNA, 15 bp, Homo sapiens
agtttccttcttgcc

SEQ ID NO: 1792398 - DNA, 15 bp, Homo sapiens
gtttccttcttgcct

SEQ ID NO: 1792399 - DNA, 15 bp, Homo sapiens
tttccttcttgccta

SEQ ID NO: 1792400 - DNA, 15 bp, Homo sapiens
ttccttcttgcctag

SEQ ID NO: 1792401 - DNA, 15 bp, Homo sapiens
tccttcttgcctagg

SEQ ID NO: 1792402 - DNA, 15 bp, Homo sapiens
ccttcttgcctaggc

SEQ ID NO: 1792403 - DNA, 15 bp, Homo sapiens
cttcttgcctaggca

SEQ ID NO: 1792404 - DNA, 15 bp, Homo sapiens
ttcttgcctaggcat

SEQ ID NO: 1792405 - DNA, 15 bp, Homo sapiens
tcttgcctaggcatc

SEQ ID NO: 1792406 - DNA, 15 bp, Homo sapiens
cttgcctaggcatct

SEQ ID NO: 1792407 - DNA, 15 bp, Homo sapiens
ttgcctaggcatctg

SEQ ID NO: 1792408 - DNA, 15 bp, Homo sapiens
tgcctaggcatctga

SEQ ID NO: 1792409 - DNA, 15 bp, Homo sapiens
gcctaggcatctgac

SEQ ID NO: 1792410 - DNA, 15 bp, Homo sapiens
cctaggcatctgact

SEQ ID NO: 1792411 - DNA, 15 bp, Homo sapiens
ctaggcatctgactc

SEQ ID NO: 1792412 - DNA, 15 bp, Homo sapiens
taggcatctgactca

SEQ ID NO: 1792413 - DNA, 15 bp, Homo sapiens
aggcatctgactcag

SEQ ID NO: 1792414 - DNA, 15 bp, Homo sapiens
ggcatctgactcagg

SEQ ID NO: 1792415 - DNA, 15 bp, Homo sapiens
gcatctgactcagga

SEQ ID NO: 1792416 - DNA, 15 bp, Homo sapiens
catctgactcaggaa

SEQ ID NO: 1792417 - DNA, 15 bp, Homo sapiens
atctgactcaggaat

SEQ ID NO: 1792418 - DNA, 15 bp, Homo sapiens
tctgactcaggaatt

SEQ ID NO: 1792419 - DNA, 15 bp, Homo sapiens
ctgactcaggaattt

SEQ ID NO: 1792420 - DNA, 15 bp, Homo sapiens
tgactcaggaatttg

SEQ ID NO: 1792421 - DNA, 15 bp, Homo sapiens
gactcaggaatttga

SEQ ID NO: 1792422 - DNA, 15 bp, Homo sapiens
actcaggaatttgat

SEQ ID NO: 1792423 - DNA, 15 bp, Homo sapiens
ctcaggaatttgatc

SEQ ID NO: 1792424 - DNA, 15 bp, Homo sapiens
tcaggaatttgatca

SEQ ID NO: 1792425 - DNA, 15 bp, Homo sapiens
caggaatttgatcag

SEQ ID NO: 1792426 - DNA, 15 bp, Homo sapiens
aggaatttgatcaga

SEQ ID NO: 1792427 - DNA, 15 bp, Homo sapiens
ggaatttgatcagaa

SEQ ID NO: 1792428 - DNA, 15 bp, Homo sapiens
gaatttgatcagaag

SEQ ID NO: 1792429 - DNA, 15 bp, Homo sapiens
aatttgatcagaagt

SEQ ID NO: 1792430 - DNA, 15 bp, Homo sapiens
atttgatcagaagtt

SEQ ID NO: 1792431 - DNA, 15 bp, Homo sapiens
tttgatcagaagtta

SEQ ID NO: 1792432 - DNA, 15 bp, Homo sapiens
ttgatcagaagttaa

SEQ ID NO: 1792433 - DNA, 15 bp, Homo sapiens
tgatcagaagttaat

SEQ ID NO: 1792434 - DNA, 15 bp, Homo sapiens
gatcagaagttaata

SEQ ID NO: 1792435 - DNA, 15 bp, Homo sapiens
atcagaagttaatac

SEQ ID NO: 1792436 - DNA, 15 bp, Homo sapiens
tcagaagttaatacg

SEQ ID NO: 1792437 - DNA, 15 bp, Homo sapiens
cagaagttaatacga

SEQ ID NO: 1792438 - DNA, 15 bp, Homo sapiens
agaagttaatacgag

SEQ ID NO: 1792439 - DNA, 15 bp, Homo sapiens
gaagttaatacgagg

SEQ ID NO: 1792440 - DNA, 15 bp, Homo sapiens
aagttaatacgagga

SEQ ID NO: 1792441 - DNA, 15 bp, Homo sapiens
agttaatacgaggag

SEQ ID NO: 1792442 - DNA, 15 bp, Homo sapiens
gttaatacgaggaga

SEQ ID NO: 1792443 - DNA, 15 bp, Homo sapiens
ttaatacgaggagaa

SEQ ID NO: 1792444 - DNA, 15 bp, Homo sapiens
taatacgaggagaaa

SEQ ID NO: 1792445 - DNA, 15 bp, Homo sapiens
aatacgaggagaaat

SEQ ID NO: 1792446 - DNA, 15 bp, Homo sapiens
atacgaggagaaatt

SEQ ID NO: 1792447 - DNA, 15 bp, Homo sapiens
tacgaggagaaatta

SEQ ID NO: 1792448 - DNA, 15 bp, Homo sapiens
acgaggagaaattac

SEQ ID NO: 1792449 - DNA, 15 bp, Homo sapiens
cgaggagaaattaca

SEQ ID NO: 1792450 - DNA, 15 bp, Homo sapiens
gaggagaaattacaa

SEQ ID NO: 1792451 - DNA, 15 bp, Homo sapiens
aggagaaattacaat

SEQ ID NO: 1792452 - DNA, 15 bp, Homo sapiens
ggagaaattacaatg

SEQ ID NO: 1792453 - DNA, 15 bp, Homo sapiens
gagaaattacaatgt

SEQ ID NO: 1792454 - DNA, 15 bp, Homo sapiens
agaaattacaatgta

SEQ ID NO: 1792455 - DNA, 15 bp, Homo sapiens
gaaattacaatgtag

SEQ ID NO: 1792456 - DNA, 15 bp, Homo sapiens
aaattacaatgtagc

SEQ ID NO: 1792457 - DNA, 15 bp, Homo sapiens
aattacaatgtagcc

SEQ ID NO: 1792458 - DNA, 15 bp, Homo sapiens
attacaatgtagccc

SEQ ID NO: 1792459 - DNA, 15 bp, Homo sapiens
ttacaatgtagccca

SEQ ID NO: 1792460 - DNA, 15 bp, Homo sapiens
tacaatgtagcccag

SEQ ID NO: 1792461 - DNA, 15 bp, Homo sapiens
acaatgtagcccagc

SEQ ID NO: 1792462 - DNA, 15 bp, Homo sapiens
caatgtagcccagca

SEQ ID NO: 1792463 - DNA, 15 bp, Homo sapiens
aatgtagcccagcat

SEQ ID NO: 1792464 - DNA, 15 bp, Homo sapiens
atgtagcccagcatg

SEQ ID NO: 1792465 - DNA, 15 bp, Homo sapiens
tgtagcccagcatga

SEQ ID NO: 1792466 - DNA, 15 bp, Homo sapiens
gtagcccagcatgag

SEQ ID NO: 1792467 - DNA, 15 bp, Homo sapiens
tagcccagcatgagc

SEQ ID NO: 1792468 - DNA, 15 bp, Homo sapiens
agcccagcatgagca

SEQ ID NO: 1792469 - DNA, 15 bp, Homo sapiens
gcccagcatgagcag

SEQ ID NO: 1792470 - DNA, 15 bp, Homo sapiens
cccagcatgagcaga

SEQ ID NO: 1792471 - DNA, 15 bp, Homo sapiens
ccagcatgagcagag

SEQ ID NO: 1792472 - DNA, 15 bp, Homo sapiens
cagcatgagcagagc

SEQ ID NO: 1792473 - DNA, 15 bp, Homo sapiens
agcatgagcagagct

SEQ ID NO: 1792474 - DNA, 15 bp, Homo sapiens
gcatgagcagagctg

SEQ ID NO: 1792475 - DNA, 15 bp, Homo sapiens
catgagcagagctgg

SEQ ID NO: 1792476 - DNA, 15 bp, Homo sapiens
atgagcagagctggt

SEQ ID NO: 1792477 - DNA, 15 bp, Homo sapiens
tgagcagagctggtt

SEQ ID NO: 1792478 - DNA, 15 bp, Homo sapiens
gagcagagctggtta

SEQ ID NO: 1792479 - DNA, 15 bp, Homo sapiens
agcagagctggttac

SEQ ID NO: 1792480 - DNA, 15 bp, Homo sapiens
gcagagctggttacc

SEQ ID NO: 1792481 - DNA, 15 bp, Homo sapiens
cagagctggttacct

SEQ ID NO: 1792482 - DNA, 15 bp, Homo sapiens
agagctggttaccta

SEQ ID NO: 1792483 - DNA, 15 bp, Homo sapiens
gagctggttacctac

SEQ ID NO: 1792484 - DNA, 15 bp, Homo sapiens
agctggttacctaca

SEQ ID NO: 1792485 - DNA, 15 bp, Homo sapiens
gctggttacctacaa

SEQ ID NO: 1792486 - DNA, 15 bp, Homo sapiens
ctggttacctacaaa

SEQ ID NO: 1792487 - DNA, 15 bp, Homo sapiens
tggttacctacaaat

SEQ ID NO: 1792488 - DNA, 15 bp, Homo sapiens
ggttacctacaaata

SEQ ID NO: 1792489 - DNA, 15 bp, Homo sapiens
gttacctacaaataa

SEQ ID NO: 1792490 - DNA, 15 bp, Homo sapiens
ttacctacaaataaa

SEQ ID NO: 1792491 - DNA, 15 bp, Homo sapiens
tacctacaaataaac

SEQ ID NO: 1792492 - DNA, 15 bp, Homo sapiens
acctacaaataaacc

SEQ ID NO: 1792493 - DNA, 15 bp, Homo sapiens
cctacaaataaacct

SEQ ID NO: 1792494 - DNA, 15 bp, Homo sapiens
ctacaaataaacctg

SEQ ID NO: 1792495 - DNA, 15 bp, Homo sapiens
tacaaataaacctgc

SEQ ID NO: 1792496 - DNA, 15 bp, Homo sapiens
acaaataaacctgct

SEQ ID NO: 1792497 - DNA, 15 bp, Homo sapiens
caaataaacctgctt

SEQ ID NO: 1792498 - DNA, 15 bp, Homo sapiens
aaataaacctgcttt

SEQ ID NO: 1792499 - DNA, 15 bp, Homo sapiens
aataaacctgctttt

SEQ ID NO: 1792500 - DNA, 15 bp, Homo sapiens
ataaacctgcttttg

SEQ ID NO: 1792501 - DNA, 15 bp, Homo sapiens
taaacctgcttttgc

SEQ ID NO: 1792502 - DNA, 15 bp, Homo sapiens
aaacctgcttttgct

SEQ ID NO: 1792503 - DNA, 15 bp, Homo sapiens
aacctgcttttgctt

SEQ ID NO: 1792504 - DNA, 15 bp, Homo sapiens
acctgcttttgcttt

SEQ ID NO: 1792505 - DNA, 15 bp, Homo sapiens
cctgcttttgctttt

SEQ ID NO: 1792506 - DNA, 15 bp, Homo sapiens
ctgcttttgcttttt

SEQ ID NO: 1792507 - DNA, 15 bp, Homo sapiens
tgcttttgctttttt

SEQ ID NO: 1792508 - DNA, 15 bp, Homo sapiens
gcttttgcttttttg

SEQ ID NO: 1792509 - DNA, 15 bp, Homo sapiens
cttttgcttttttgg

SEQ ID NO: 1792510 - DNA, 15 bp, Homo sapiens
ttttgcttttttggg

SEQ ID NO: 1792511 - DNA, 15 bp, Homo sapiens
tttgcttttttgggt

SEQ ID NO: 1792512 - DNA, 15 bp, Homo sapiens
ttgcttttttgggtg

SEQ ID NO: 1792513 - DNA, 15 bp, Homo sapiens
tgcttttttgggtgt

SEQ ID NO: 1792514 - DNA, 15 bp, Homo sapiens
gcttttttgggtgtc

SEQ ID NO: 1792515 - DNA, 15 bp, Homo sapiens
cttttttgggtgtca

SEQ ID NO: 1792516 - DNA, 15 bp, Homo sapiens
ttttttgggtgtcac

SEQ ID NO: 1792517 - DNA, 15 bp, Homo sapiens
tttttgggtgtcacc

SEQ ID NO: 1792518 - DNA, 15 bp, Homo sapiens
ttttgggtgtcacct

SEQ ID NO: 1792519 - DNA, 15 bp, Homo sapiens
tttgggtgtcacctg

SEQ ID NO: 1792520 - DNA, 15 bp, Homo sapiens
ttgggtgtcacctgt

SEQ ID NO: 1792521 - DNA, 15 bp, Homo sapiens
tgggtgtcacctgtc

SEQ ID NO: 1792522 - DNA, 15 bp, Homo sapiens
gggtgtcacctgtca

SEQ ID NO: 1792523 - DNA, 15 bp, Homo sapiens
ggtgtcacctgtcag

SEQ ID NO: 1792524 - DNA, 15 bp, Homo sapiens
gtgtcacctgtcaga

SEQ ID NO: 1792525 - DNA, 15 bp, Homo sapiens
tgtcacctgtcagaa

SEQ ID NO: 1792526 - DNA, 15 bp, Homo sapiens
gtcacctgtcagaaa

SEQ ID NO: 1792527 - DNA, 15 bp, Homo sapiens
tcacctgtcagaaat

SEQ ID NO: 1792528 - DNA, 15 bp, Homo sapiens
cacctgtcagaaatt

SEQ ID NO: 1792529 - DNA, 15 bp, Homo sapiens
acctgtcagaaattc

SEQ ID NO: 1792530 - DNA, 15 bp, Homo sapiens
cctgtcagaaattca

SEQ ID NO: 1792531 - DNA, 15 bp, Homo sapiens
ctgtcagaaattcaa

SEQ ID NO: 1792532 - DNA, 15 bp, Homo sapiens
tgtcagaaattcaag

SEQ ID NO: 1792533 - DNA, 15 bp, Homo sapiens
gtcagaaattcaagt

SEQ ID NO: 1792534 - DNA, 15 bp, Homo sapiens
tcagaaattcaagtg

SEQ ID NO: 1792535 - DNA, 15 bp, Homo sapiens
cagaaattcaagtga

SEQ ID NO: 1792536 - DNA, 15 bp, Homo sapiens
agaaattcaagtgat

SEQ ID NO: 1792537 - DNA, 15 bp, Homo sapiens
gaaattcaagtgatg

SEQ ID NO: 1792538 - DNA, 15 bp, Homo sapiens
aaattcaagtgatgt

SEQ ID NO: 1792539 - DNA, 15 bp, Homo sapiens
aattcaagtgatgtt

SEQ ID NO: 1792540 - DNA, 15 bp, Homo sapiens
attcaagtgatgttc

SEQ ID NO: 1792541 - DNA, 15 bp, Homo sapiens
ttcaagtgatgttct

SEQ ID NO: 1792542 - DNA, 15 bp, Homo sapiens
tcaagtgatgttctg

SEQ ID NO: 1792543 - DNA, 15 bp, Homo sapiens
caagtgatgttctga

SEQ ID NO: 1792544 - DNA, 15 bp, Homo sapiens
aagtgatgttctgac

SEQ ID NO: 1792545 - DNA, 15 bp, Homo sapiens
agtgatgttctgaca

SEQ ID NO: 1792546 - DNA, 15 bp, Homo sapiens
gtgatgttctgacag

SEQ ID NO: 1792547 - DNA, 15 bp, Homo sapiens
tgatgttctgacagt

SEQ ID NO: 1792548 - DNA, 15 bp, Homo sapiens
gatgttctgacagtc

SEQ ID NO: 1792549 - DNA, 15 bp, Homo sapiens
atgttctgacagtcg

SEQ ID NO: 1792550 - DNA, 15 bp, Homo sapiens
tgttctgacagtcgt

SEQ ID NO: 1792551 - DNA, 15 bp, Homo sapiens
gttctgacagtcgta

SEQ ID NO: 1792552 - DNA, 15 bp, Homo sapiens
ttctgacagtcgtac

SEQ ID NO: 1792553 - DNA, 15 bp, Homo sapiens
tctgacagtcgtact

SEQ ID NO: 1792554 - DNA, 15 bp, Homo sapiens
ctgacagtcgtactg

SEQ ID NO: 1792555 - DNA, 15 bp, Homo sapiens
tgacagtcgtactga

SEQ ID NO: 1792556 - DNA, 15 bp, Homo sapiens
gacagtcgtactgat

SEQ ID NO: 1792557 - DNA, 15 bp, Homo sapiens
acagtcgtactgatt

SEQ ID NO: 1792558 - DNA, 15 bp, Homo sapiens
cagtcgtactgatta

SEQ ID NO: 1792559 - DNA, 15 bp, Homo sapiens
agtcgtactgattaa

SEQ ID NO: 1792560 - DNA, 15 bp, Homo sapiens
gtcgtactgattaag

SEQ ID NO: 1792561 - DNA, 15 bp, Homo sapiens
tcgtactgattaaga

SEQ ID NO: 1792562 - DNA, 15 bp, Homo sapiens
cgtactgattaagat

SEQ ID NO: 1792563 - DNA, 15 bp, Homo sapiens
gtactgattaagatg

SEQ ID NO: 1792564 - DNA, 15 bp, Homo sapiens
tactgattaagatgt

SEQ ID NO: 1792565 - DNA, 15 bp, Homo sapiens
actgattaagatgtc

SEQ ID NO: 1792566 - DNA, 15 bp, Homo sapiens
ctgattaagatgtca

SEQ ID NO: 1792567 - DNA, 15 bp, Homo sapiens
tgattaagatgtcag

SEQ ID NO: 1792568 - DNA, 15 bp, Homo sapiens
gattaagatgtcagc

SEQ ID NO: 1792569 - DNA, 15 bp, Homo sapiens
attaagatgtcagcc

SEQ ID NO: 1792570 - DNA, 15 bp, Homo sapiens
ttaagatgtcagccg

SEQ ID NO: 1792571 - DNA, 15 bp, Homo sapiens
taagatgtcagccga

SEQ ID NO: 1792572 - DNA, 15 bp, Homo sapiens
aagatgtcagccgaa

SEQ ID NO: 1792573 - DNA, 15 bp, Homo sapiens
agatgtcagccgaat

SEQ ID NO: 1792574 - DNA, 15 bp, Homo sapiens
gatgtcagccgaata

SEQ ID NO: 1792575 - DNA, 15 bp, Homo sapiens
atgtcagccgaatag

SEQ ID NO: 1792576 - DNA, 15 bp, Homo sapiens
tgtcagccgaataga

SEQ ID NO: 1792577 - DNA, 15 bp, Homo sapiens
gtcagccgaatagat

SEQ ID NO: 1792578 - DNA, 15 bp, Homo sapiens
tcagccgaatagata

SEQ ID NO: 1792579 - DNA, 15 bp, Homo sapiens
cagccgaatagatac

SEQ ID NO: 1792580 - DNA, 15 bp, Homo sapiens
agccgaatagatact

SEQ ID NO: 1792581 - DNA, 15 bp, Homo sapiens
gccgaatagatactt

SEQ ID NO: 1792582 - DNA, 15 bp, Homo sapiens
ccgaatagatactta

SEQ ID NO: 1792583 - DNA, 15 bp, Homo sapiens
cgaatagatacttaa

SEQ ID NO: 1792584 - DNA, 15 bp, Homo sapiens
gaatagatacttaag

SEQ ID NO: 1792585 - DNA, 15 bp, Homo sapiens
aatagatacttaagt

SEQ ID NO: 1792586 - DNA, 15 bp, Homo sapiens
atagatacttaagta

SEQ ID NO: 1792587 - DNA, 15 bp, Homo sapiens
tagatacttaagtat

SEQ ID NO: 1792588 - DNA, 15 bp, Homo sapiens
agatacttaagtatt

SEQ ID NO: 1792589 - DNA, 15 bp, Homo sapiens
gatacttaagtattt

SEQ ID NO: 1792590 - DNA, 15 bp, Homo sapiens
atacttaagtatttg

SEQ ID NO: 1792591 - DNA, 15 bp, Homo sapiens
tacttaagtatttga

SEQ ID NO: 1792592 - DNA, 15 bp, Homo sapiens
acttaagtatttgaa

SEQ ID NO: 1792593 - DNA, 15 bp, Homo sapiens
cttaagtatttgaaa

SEQ ID NO: 1792594 - DNA, 15 bp, Homo sapiens
ttaagtatttgaaaa

SEQ ID NO: 1792595 - DNA, 15 bp, Homo sapiens
taagtatttgaaaaa

SEQ ID NO: 1792596 - DNA, 15 bp, Homo sapiens
aagtatttgaaaaat

SEQ ID NO: 1792597 - DNA, 15 bp, Homo sapiens
agtatttgaaaaata

SEQ ID NO: 1792598 - DNA, 15 bp, Homo sapiens
gtatttgaaaaatac

SEQ ID NO: 1792599 - DNA, 15 bp, Homo sapiens
tatttgaaaaataca

SEQ ID NO: 1792600 - DNA, 15 bp, Homo sapiens
atttgaaaaatacag

SEQ ID NO: 1792601 - DNA, 15 bp, Homo sapiens
tttgaaaaatacaga

SEQ ID NO: 1792602 - DNA, 15 bp, Homo sapiens
ttgaaaaatacagag

SEQ ID NO: 1792603 - DNA, 15 bp, Homo sapiens
tgaaaaatacagaga

SEQ ID NO: 1792604 - DNA, 15 bp, Homo sapiens
gaaaaatacagagag

SEQ ID NO: 1792605 - DNA, 15 bp, Homo sapiens
aaaaatacagagagt

SEQ ID NO: 1792606 - DNA, 15 bp, Homo sapiens
aaaatacagagagtt

SEQ ID NO: 1792607 - DNA, 15 bp, Homo sapiens
aaatacagagagttt

SEQ ID NO: 1792608 - DNA, 15 bp, Homo sapiens
aatacagagagtttg

SEQ ID NO: 1792609 - DNA, 15 bp, Homo sapiens
atacagagagtttgt

SEQ ID NO: 1792610 - DNA, 15 bp, Homo sapiens
tacagagagtttgtc

SEQ ID NO: 1792611 - DNA, 15 bp, Homo sapiens
acagagagtttgtca

SEQ ID NO: 1792612 - DNA, 15 bp, Homo sapiens
cagagagtttgtcaa

SEQ ID NO: 1792613 - DNA, 15 bp, Homo sapiens
agagagtttgtcaaa

SEQ ID NO: 1792614 - DNA, 15 bp, Homo sapiens
gagagtttgtcaaaa

SEQ ID NO: 1792615 - DNA, 15 bp, Homo sapiens
agagtttgtcaaaac

SEQ ID NO: 1792616 - DNA, 15 bp, Homo sapiens
gagtttgtcaaaacc

SEQ ID NO: 1792617 - DNA, 15 bp, Homo sapiens
agtttgtcaaaacct

SEQ ID NO: 1792618 - DNA, 15 bp, Homo sapiens
gtttgtcaaaacctc

SEQ ID NO: 1792619 - DNA, 15 bp, Homo sapiens
tttgtcaaaacctca

SEQ ID NO: 1792620 - DNA, 15 bp, Homo sapiens
ttgtcaaaacctcag

SEQ ID NO: 1792621 - DNA, 15 bp, Homo sapiens
tgtcaaaacctcagg

SEQ ID NO: 1792622 - DNA, 15 bp, Homo sapiens
gtcaaaacctcagga

SEQ ID NO: 1792623 - DNA, 15 bp, Homo sapiens
tcaaaacctcaggaa

SEQ ID NO: 1792624 - DNA, 15 bp, Homo sapiens
caaaacctcaggaag

SEQ ID NO: 1792625 - DNA, 15 bp, Homo sapiens
aaaacctcaggaaga

SEQ ID NO: 1792626 - DNA, 15 bp, Homo sapiens
aaacctcaggaagag

SEQ ID NO: 1792627 - DNA, 15 bp, Homo sapiens
aacctcaggaagagt

SEQ ID NO: 1792628 - DNA, 15 bp, Homo sapiens
acctcaggaagagtc

SEQ ID NO: 1792629 - DNA, 15 bp, Homo sapiens
cctcaggaagagtct

SEQ ID NO: 1792630 - DNA, 15 bp, Homo sapiens
ctcaggaagagtcta

SEQ ID NO: 1792631 - DNA, 15 bp, Homo sapiens
tcaggaagagtctaa

SEQ ID NO: 1792632 - DNA, 15 bp, Homo sapiens
caggaagagtctaac

SEQ ID NO: 1792633 - DNA, 15 bp, Homo sapiens
aggaagagtctaaca

SEQ ID NO: 1792634 - DNA, 15 bp, Homo sapiens
ggaagagtctaacaa

SEQ ID NO: 1792635 - DNA, 15 bp, Homo sapiens
gaagagtctaacaaa

SEQ ID NO: 1792636 - DNA, 15 bp, Homo sapiens
aagagtctaacaaat

SEQ ID NO: 1792637 - DNA, 15 bp, Homo sapiens
agagtctaacaaatc

SEQ ID NO: 1792638 - DNA, 15 bp, Homo sapiens
gagtctaacaaatcc

SEQ ID NO: 1792639 - DNA, 15 bp, Homo sapiens
agtctaacaaatcct

SEQ ID NO: 1792640 - DNA, 15 bp, Homo sapiens
gtctaacaaatcctt

SEQ ID NO: 1792641 - DNA, 15 bp, Homo sapiens
tctaacaaatccttc

SEQ ID NO: 1792642 - DNA, 15 bp, Homo sapiens
ctaacaaatccttcc

SEQ ID NO: 1792643 - DNA, 15 bp, Homo sapiens
taacaaatccttcct

SEQ ID NO: 1792644 - DNA, 15 bp, Homo sapiens
aacaaatccttcctg

SEQ ID NO: 1792645 - DNA, 15 bp, Homo sapiens
acaaatccttcctgg

SEQ ID NO: 1792646 - DNA, 15 bp, Homo sapiens
caaatccttcctggg

SEQ ID NO: 1792647 - DNA, 15 bp, Homo sapiens
aaatccttcctggga

SEQ ID NO: 1792648 - DNA, 15 bp, Homo sapiens
aatccttcctgggag

SEQ ID NO: 1792649 - DNA, 15 bp, Homo sapiens
atccttcctgggagc

SEQ ID NO: 1792650 - DNA, 15 bp, Homo sapiens
tccttcctgggagcc

SEQ ID NO: 1792651 - DNA, 15 bp, Homo sapiens
ccttcctgggagcca

SEQ ID NO: 1792652 - DNA, 15 bp, Homo sapiens
cttcctgggagccaa

SEQ ID NO: 1792653 - DNA, 15 bp, Homo sapiens
ttcctgggagccaag

SEQ ID NO: 1792654 - DNA, 15 bp, Homo sapiens
tcctgggagccaagg

SEQ ID NO: 1792655 - DNA, 15 bp, Homo sapiens
cctgggagccaagga

SEQ ID NO: 1792656 - DNA, 15 bp, Homo sapiens
ctgggagccaaggaa

SEQ ID NO: 1792657 - DNA, 15 bp, Homo sapiens
tgggagccaaggaaa

SEQ ID NO: 1792658 - DNA, 15 bp, Homo sapiens
gggagccaaggaaaa

SEQ ID NO: 1792659 - DNA, 15 bp, Homo sapiens
ggagccaaggaaaat

SEQ ID NO: 1792660 - DNA, 15 bp, Homo sapiens
gagccaaggaaaata

SEQ ID NO: 1792661 - DNA, 15 bp, Homo sapiens
agccaaggaaaatat

SEQ ID NO: 1792662 - DNA, 15 bp, Homo sapiens
gccaaggaaaatatt

SEQ ID NO: 1792663 - DNA, 15 bp, Homo sapiens
ccaaggaaaatattt

SEQ ID NO: 1792664 - DNA, 15 bp, Homo sapiens
caaggaaaatatttt

SEQ ID NO: 1792665 - DNA, 15 bp, Homo sapiens
aaggaaaatatttta

SEQ ID NO: 1792666 - DNA, 15 bp, Homo sapiens
aggaaaatattttaa

SEQ ID NO: 1792667 - DNA, 15 bp, Homo sapiens
ggaaaatattttaaa

SEQ ID NO: 1792668 - DNA, 15 bp, Homo sapiens
gaaaatattttaaaa

SEQ ID NO: 1792669 - DNA, 15 bp, Homo sapiens
aaaatattttaaaat

SEQ ID NO: 1792670 - DNA, 15 bp, Homo sapiens
aaatattttaaaatg

SEQ ID NO: 1792671 - DNA, 15 bp, Homo sapiens
aatattttaaaatgg

SEQ ID NO: 1792672 - DNA, 15 bp, Homo sapiens
atattttaaaatgga

SEQ ID NO: 1792673 - DNA, 15 bp, Homo sapiens
tattttaaaatggaa

SEQ ID NO: 1792674 - DNA, 15 bp, Homo sapiens
attttaaaatggaac

SEQ ID NO: 1792675 - DNA, 15 bp, Homo sapiens
ttttaaaatggaaca

SEQ ID NO: 1792676 - DNA, 15 bp, Homo sapiens
tttaaaatggaacag

SEQ ID NO: 1792677 - DNA, 15 bp, Homo sapiens
ttaaaatggaacaga

SEQ ID NO: 1792678 - DNA, 15 bp, Homo sapiens
taaaatggaacagag

SEQ ID NO: 1792679 - DNA, 15 bp, Homo sapiens
aaaatggaacagagg

SEQ ID NO: 1792680 - DNA, 15 bp, Homo sapiens
aaatggaacagaggt

SEQ ID NO: 1792681 - DNA, 15 bp, Homo sapiens
aatggaacagaggtc

SEQ ID NO: 1792682 - DNA, 15 bp, Homo sapiens
atggaacagaggtcg

SEQ ID NO: 1792683 - DNA, 15 bp, Homo sapiens
tggaacagaggtcgt

SEQ ID NO: 1792684 - DNA, 15 bp, Homo sapiens
ggaacagaggtcgtc

SEQ ID NO: 1792685 - DNA, 15 bp, Homo sapiens
gaacagaggtcgtcc

SEQ ID NO: 1792686 - DNA, 15 bp, Homo sapiens
aacagaggtcgtccc

SEQ ID NO: 1792687 - DNA, 15 bp, Homo sapiens
acagaggtcgtcccc

SEQ ID NO: 1792688 - DNA, 15 bp, Homo sapiens
cagaggtcgtcccca

SEQ ID NO: 1792689 - DNA, 15 bp, Homo sapiens
agaggtcgtccccaa

SEQ ID NO: 1792690 - DNA, 15 bp, Homo sapiens
gaggtcgtccccaac

SEQ ID NO: 1792691 - DNA, 15 bp, Homo sapiens
aggtcgtccccaacc

SEQ ID NO: 1792692 - DNA, 15 bp, Homo sapiens
ggtcgtccccaaccc

SEQ ID NO: 1792693 - DNA, 15 bp, Homo sapiens
gtcgtccccaaccca

SEQ ID NO: 1792694 - DNA, 15 bp, Homo sapiens
tcgtccccaacccag

SEQ ID NO: 1792695 - DNA, 15 bp, Homo sapiens
cgtccccaacccagg

SEQ ID NO: 1792696 - DNA, 15 bp, Homo sapiens
gtccccaacccaggc

SEQ ID NO: 1792697 - DNA, 15 bp, Homo sapiens
tccccaacccaggca

SEQ ID NO: 1792698 - DNA, 15 bp, Homo sapiens
ccccaacccaggcac

SEQ ID NO: 1792699 - DNA, 15 bp, Homo sapiens
cccaacccaggcacg

SEQ ID NO: 1792700 - DNA, 15 bp, Homo sapiens
ccaacccaggcacga

SEQ ID NO: 1792701 - DNA, 15 bp, Homo sapiens
caacccaggcacgaa

SEQ ID NO: 1792702 - DNA, 15 bp, Homo sapiens
aacccaggcacgaat

SEQ ID NO: 1792703 - DNA, 15 bp, Homo sapiens
acccaggcacgaatt

SEQ ID NO: 1792704 - DNA, 15 bp, Homo sapiens
cccaggcacgaattt

SEQ ID NO: 1792705 - DNA, 15 bp, Homo sapiens
ccaggcacgaatttt

SEQ ID NO: 1792706 - DNA, 15 bp, Homo sapiens
caggcacgaattttc

SEQ ID NO: 1792707 - DNA, 15 bp, Homo sapiens
aggcacgaattttct

SEQ ID NO: 1792708 - DNA, 15 bp, Homo sapiens
ggcacgaattttctt

SEQ ID NO: 1792709 - DNA, 15 bp, Homo sapiens
gcacgaattttcttc

SEQ ID NO: 1792710 - DNA, 15 bp, Homo sapiens
cacgaattttcttcc

SEQ ID NO: 1792711 - DNA, 15 bp, Homo sapiens
acgaattttcttcct

SEQ ID NO: 1792712 - DNA, 15 bp, Homo sapiens
cgaattttcttcctc

SEQ ID NO: 1792713 - DNA, 15 bp, Homo sapiens
gaattttcttcctcc

SEQ ID NO: 1792714 - DNA, 15 bp, Homo sapiens
aattttcttcctccg

SEQ ID NO: 1792715 - DNA, 15 bp, Homo sapiens
attttcttcctccga

SEQ ID NO: 1792716 - DNA, 15 bp, Homo sapiens
ttttcttcctccgaa

SEQ ID NO: 1792717 - DNA, 15 bp, Homo sapiens
tttcttcctccgaaa

SEQ ID NO: 1792718 - DNA, 15 bp, Homo sapiens
ttcttcctccgaaag

SEQ ID NO: 1792719 - DNA, 15 bp, Homo sapiens
tcttcctccgaaaga

SEQ ID NO: 1792720 - DNA, 15 bp, Homo sapiens
cttcctccgaaagat

SEQ ID NO: 1792721 - DNA, 15 bp, Homo sapiens
ttcctccgaaagatg

SEQ ID NO: 1792722 - DNA, 15 bp, Homo sapiens
tcctccgaaagatga

SEQ ID NO: 1792723 - DNA, 15 bp, Homo sapiens
cctccgaaagatgag

SEQ ID NO: 1792724 - DNA, 15 bp, Homo sapiens
ctccgaaagatgagc

SEQ ID NO: 1792725 - DNA, 15 bp, Homo sapiens
tccgaaagatgagct

SEQ ID NO: 1792726 - DNA, 15 bp, Homo sapiens
ccgaaagatgagctg

SEQ ID NO: 1792727 - DNA, 15 bp, Homo sapiens
cgaaagatgagctgc

SEQ ID NO: 1792728 - DNA, 15 bp, Homo sapiens
gaaagatgagctgcc

SEQ ID NO: 1792729 - DNA, 15 bp, Homo sapiens
aaagatgagctgcct

SEQ ID NO: 1792730 - DNA, 15 bp, Homo sapiens
aagatgagctgcctg

SEQ ID NO: 1792731 - DNA, 15 bp, Homo sapiens
agatgagctgcctgt

SEQ ID NO: 1792732 - DNA, 15 bp, Homo sapiens
gatgagctgcctgtg

SEQ ID NO: 1792733 - DNA, 15 bp, Homo sapiens
atgagctgcctgtgc

SEQ ID NO: 1792734 - DNA, 15 bp, Homo sapiens
tgagctgcctgtgca

SEQ ID NO: 1792735 - DNA, 15 bp, Homo sapiens
gagctgcctgtgcaa

SEQ ID NO: 1792736 - DNA, 15 bp, Homo sapiens
agctgcctgtgcaac

SEQ ID NO: 1792737 - DNA, 15 bp, Homo sapiens
gctgcctgtgcaact

SEQ ID NO: 1792738 - DNA, 15 bp, Homo sapiens
ctgcctgtgcaactc

SEQ ID NO: 1792739 - DNA, 15 bp, Homo sapiens
tgcctgtgcaactcc

SEQ ID NO: 1792740 - DNA, 15 bp, Homo sapiens
gcctgtgcaactcct

SEQ ID NO: 1792741 - DNA, 15 bp, Homo sapiens
cctgtgcaactcctg

SEQ ID NO: 1792742 - DNA, 15 bp, Homo sapiens
ctgtgcaactcctgg

SEQ ID NO: 1792743 - DNA, 15 bp, Homo sapiens
tgtgcaactcctgga

SEQ ID NO: 1792744 - DNA, 15 bp, Homo sapiens
gtgcaactcctggaa

SEQ ID NO: 1792745 - DNA, 15 bp, Homo sapiens
tgcaactcctggaag

SEQ ID NO: 1792746 - DNA, 15 bp, Homo sapiens
gcaactcctggaagg

SEQ ID NO: 1792747 - DNA, 15 bp, Homo sapiens
caactcctggaaggc

SEQ ID NO: 1792748 - DNA, 15 bp, Homo sapiens
aactcctggaaggca

SEQ ID NO: 1792749 - DNA, 15 bp, Homo sapiens
actcctggaaggcac

SEQ ID NO: 1792750 - DNA, 15 bp, Homo sapiens
ctcctggaaggcaca

SEQ ID NO: 1792751 - DNA, 15 bp, Homo sapiens
tcctggaaggcacaa

SEQ ID NO: 1792752 - DNA, 15 bp, Homo sapiens
cctggaaggcacaat

SEQ ID NO: 1792753 - DNA, 15 bp, Homo sapiens
ctggaaggcacaatc

SEQ ID NO: 1792754 - DNA, 15 bp, Homo sapiens
tggaaggcacaatcc

SEQ ID NO: 1792755 - DNA, 15 bp, Homo sapiens
ggaaggcacaatccc

SEQ ID NO: 1792756 - DNA, 15 bp, Homo sapiens
gaaggcacaatccct

SEQ ID NO: 1792757 - DNA, 15 bp, Homo sapiens
aaggcacaatccctc

SEQ ID NO: 1792758 - DNA, 15 bp, Homo sapiens
aggcacaatccctca

SEQ ID NO: 1792759 - DNA, 15 bp, Homo sapiens
ggcacaatccctcaa

SEQ ID NO: 1792760 - DNA, 15 bp, Homo sapiens
gcacaatccctcaat

SEQ ID NO: 1792761 - DNA, 15 bp, Homo sapiens
cacaatccctcaatg

SEQ ID NO: 1792762 - DNA, 15 bp, Homo sapiens
acaatccctcaatgg

SEQ ID NO: 1792763 - DNA, 15 bp, Homo sapiens
caatccctcaatggt

SEQ ID NO: 1792764 - DNA, 15 bp, Homo sapiens
aatccctcaatggtg

SEQ ID NO: 1792765 - DNA, 15 bp, Homo sapiens
atccctcaatggtgg

SEQ ID NO: 1792766 - DNA, 15 bp, Homo sapiens
tccctcaatggtggt

SEQ ID NO: 1792767 - DNA, 15 bp, Homo sapiens
ccctcaatggtggtt

SEQ ID NO: 1792768 - DNA, 15 bp, Homo sapiens
cctcaatggtggttg

SEQ ID NO: 1792769 - DNA, 15 bp, Homo sapiens
ctcaatggtggttgg

SEQ ID NO: 1792770 - DNA, 15 bp, Homo sapiens
tcaatggtggttgga

SEQ ID NO: 1792771 - DNA, 15 bp, Homo sapiens
caatggtggttggag

SEQ ID NO: 1792772 - DNA, 15 bp, Homo sapiens
aatggtggttggagt

SEQ ID NO: 1792773 - DNA, 15 bp, Homo sapiens
atggtggttggagtc

SEQ ID NO: 1792774 - DNA, 15 bp, Homo sapiens
tggtggttggagtca

SEQ ID NO: 1792775 - DNA, 15 bp, Homo sapiens
ggtggttggagtcag

SEQ ID NO: 1792776 - DNA, 15 bp, Homo sapiens
gtggttggagtcagg

SEQ ID NO: 1792777 - DNA, 15 bp, Homo sapiens
tggttggagtcaggg

SEQ ID NO: 1792778 - DNA, 15 bp, Homo sapiens
ggttggagtcagggc

SEQ ID NO: 1792779 - DNA, 15 bp, Homo sapiens
gttggagtcagggct

SEQ ID NO: 1792780 - DNA, 15 bp, Homo sapiens
ttggagtcagggctg

SEQ ID NO: 1792781 - DNA, 15 bp, Homo sapiens
tggagtcagggctgg

SEQ ID NO: 1792782 - DNA, 15 bp, Homo sapiens
ggagtcagggctggc

SEQ ID NO: 1792783 - DNA, 15 bp, Homo sapiens
gagtcagggctggcc

SEQ ID NO: 1792784 - DNA, 15 bp, Homo sapiens
agtcagggctggccc

SEQ ID NO: 1792785 - DNA, 15 bp, Homo sapiens
gtcagggctggccca

SEQ ID NO: 1792786 - DNA, 15 bp, Homo sapiens
tcagggctggcccac

SEQ ID NO: 1792787 - DNA, 15 bp, Homo sapiens
cagggctggcccaca

SEQ ID NO: 1792788 - DNA, 15 bp, Homo sapiens
agggctggcccacac

SEQ ID NO: 1792789 - DNA, 15 bp, Homo sapiens
gggctggcccacacc

SEQ ID NO: 1792790 - DNA, 15 bp, Homo sapiens
ggctggcccacacct

SEQ ID NO: 1792791 - DNA, 15 bp, Homo sapiens
gctggcccacacctg

SEQ ID NO: 1792792 - DNA, 15 bp, Homo sapiens
ctggcccacacctgc

SEQ ID NO: 1792793 - DNA, 15 bp, Homo sapiens
tggcccacacctgcc

SEQ ID NO: 1792794 - DNA, 15 bp, Homo sapiens
ggcccacacctgcct

SEQ ID NO: 1792795 - DNA, 15 bp, Homo sapiens
gcccacacctgcctt

SEQ ID NO: 1792796 - DNA, 15 bp, Homo sapiens
cccacacctgccttc

SEQ ID NO: 1792797 - DNA, 15 bp, Homo sapiens
ccacacctgccttcc

SEQ ID NO: 1792798 - DNA, 15 bp, Homo sapiens
cacacctgccttccc

SEQ ID NO: 1792799 - DNA, 15 bp, Homo sapiens
acacctgccttccca

SEQ ID NO: 1792800 - DNA, 15 bp, Homo sapiens
cacctgccttcccag

SEQ ID NO: 1792801 - DNA, 15 bp, Homo sapiens
acctgccttcccagg

SEQ ID NO: 1792802 - DNA, 15 bp, Homo sapiens
cctgccttcccaggc

SEQ ID NO: 1792803 - DNA, 15 bp, Homo sapiens
ctgccttcccaggcc

SEQ ID NO: 1792804 - DNA, 15 bp, Homo sapiens
tgccttcccaggcca

SEQ ID NO: 1792805 - DNA, 15 bp, Homo sapiens
gccttcccaggccac

SEQ ID NO: 1792806 - DNA, 15 bp, Homo sapiens
ccttcccaggccaca

SEQ ID NO: 1792807 - DNA, 15 bp, Homo sapiens
cttcccaggccacag

SEQ ID NO: 1792808 - DNA, 15 bp, Homo sapiens
ttcccaggccacagt

SEQ ID NO: 1792809 - DNA, 15 bp, Homo sapiens
tcccaggccacagtg

SEQ ID NO: 1792810 - DNA, 15 bp, Homo sapiens
cccaggccacagtga

SEQ ID NO: 1792811 - DNA, 15 bp, Homo sapiens
ccaggccacagtgaa

SEQ ID NO: 1792812 - DNA, 15 bp, Homo sapiens
caggccacagtgaag

SEQ ID NO: 1792813 - DNA, 15 bp, Homo sapiens
aggccacagtgaagg

SEQ ID NO: 1792814 - DNA, 15 bp, Homo sapiens
ggccacagtgaaggg

SEQ ID NO: 1792815 - DNA, 15 bp, Homo sapiens
gccacagtgaagggg

SEQ ID NO: 1792816 - DNA, 15 bp, Homo sapiens
ccacagtgaaggggc

SEQ ID NO: 1792817 - DNA, 15 bp, Homo sapiens
cacagtgaaggggct

SEQ ID NO: 1792818 - DNA, 15 bp, Homo sapiens
acagtgaaggggctt

SEQ ID NO: 1792819 - DNA, 15 bp, Homo sapiens
cagtgaaggggcttg

SEQ ID NO: 1792820 - DNA, 15 bp, Homo sapiens
agtgaaggggcttgg

SEQ ID NO: 1792821 - DNA, 15 bp, Homo sapiens
gtgaaggggcttggg

SEQ ID NO: 1792822 - DNA, 15 bp, Homo sapiens
tgaaggggcttgggg

SEQ ID NO: 1792823 - DNA, 15 bp, Homo sapiens
gaaggggcttggggt

SEQ ID NO: 1792824 - DNA, 15 bp, Homo sapiens
aaggggcttggggtg

SEQ ID NO: 1792825 - DNA, 15 bp, Homo sapiens
aggggcttggggtga

SEQ ID NO: 1792826 - DNA, 15 bp, Homo sapiens
ggggcttggggtgag

SEQ ID NO: 1792827 - DNA, 15 bp, Homo sapiens
gggcttggggtgagc

SEQ ID NO: 1792828 - DNA, 15 bp, Homo sapiens
ggcttggggtgagcc

SEQ ID NO: 1792829 - DNA, 15 bp, Homo sapiens
gcttggggtgagcct

SEQ ID NO: 1792830 - DNA, 15 bp, Homo sapiens
cttggggtgagcctt

SEQ ID NO: 1792831 - DNA, 15 bp, Homo sapiens
ttggggtgagccttg

SEQ ID NO: 1792832 - DNA, 15 bp, Homo sapiens
ggggtgagccttgga

SEQ ID NO: 1792833 - DNA, 15 bp, Homo sapiens
gggtgagccttggaa

SEQ ID NO: 1792834 - DNA, 15 bp, Homo sapiens
ggtgagccttggaac

SEQ ID NO: 1792835 - DNA, 15 bp, Homo sapiens
gtgagccttggaaca

SEQ ID NO: 1792836 - DNA, 15 bp, Homo sapiens
tgagccttggaacaa

SEQ ID NO: 1792837 - DNA, 15 bp, Homo sapiens
gagccttggaacaag

SEQ ID NO: 1792838 - DNA, 15 bp, Homo sapiens
agccttggaacaagc

SEQ ID NO: 1792839 - DNA, 15 bp, Homo sapiens
gccttggaacaagca

SEQ ID NO: 1792840 - DNA, 15 bp, Homo sapiens
ccttggaacaagcaa

SEQ ID NO: 1792841 - DNA, 15 bp, Homo sapiens
cttggaacaagcaac

SEQ ID NO: 1792842 - DNA, 15 bp, Homo sapiens
ttggaacaagcaacc

SEQ ID NO: 1792843 - DNA, 15 bp, Homo sapiens
tggaacaagcaacca

SEQ ID NO: 1792844 - DNA, 15 bp, Homo sapiens
ggaacaagcaaccag

SEQ ID NO: 1792845 - DNA, 15 bp, Homo sapiens
gaacaagcaaccagg

SEQ ID NO: 1792846 - DNA, 15 bp, Homo sapiens
aacaagcaaccaggc

SEQ ID NO: 1792847 - DNA, 15 bp, Homo sapiens
acaagcaaccaggca

SEQ ID NO: 1792848 - DNA, 15 bp, Homo sapiens
caagcaaccaggcac

SEQ ID NO: 1792849 - DNA, 15 bp, Homo sapiens
aagcaaccaggcacc

SEQ ID NO: 1792850 - DNA, 15 bp, Homo sapiens
agcaaccaggcacct

SEQ ID NO: 1792851 - DNA, 15 bp, Homo sapiens
gcaaccaggcacctc

SEQ ID NO: 1792852 - DNA, 15 bp, Homo sapiens
caaccaggcacctct

SEQ ID NO: 1792853 - DNA, 15 bp, Homo sapiens
aaccaggcacctctc

SEQ ID NO: 1792854 - DNA, 15 bp, Homo sapiens
accaggcacctctcc

SEQ ID NO: 1792855 - DNA, 15 bp, Homo sapiens
ccaggcacctctccc

SEQ ID NO: 1792856 - DNA, 15 bp, Homo sapiens
caggcacctctcccc

SEQ ID NO: 1792857 - DNA, 15 bp, Homo sapiens
aggcacctctcccct

SEQ ID NO: 1792858 - DNA, 15 bp, Homo sapiens
ggcacctctcccctt

SEQ ID NO: 1792859 - DNA, 15 bp, Homo sapiens
gcacctctccccttc

SEQ ID NO: 1792860 - DNA, 15 bp, Homo sapiens
acctctccccttcct

SEQ ID NO: 1792861 - DNA, 15 bp, Homo sapiens
cctctccccttcctc

SEQ ID NO: 1792862 - DNA, 15 bp, Homo sapiens
ctctccccttcctct

SEQ ID NO: 1792863 - DNA, 15 bp, Homo sapiens
tctccccttcctctt

SEQ ID NO: 1792864 - DNA, 15 bp, Homo sapiens
ctccccttcctctta

SEQ ID NO: 1792865 - DNA, 15 bp, Homo sapiens
tccccttcctcttac

SEQ ID NO: 1792866 - DNA, 15 bp, Homo sapiens
ccccttcctcttacc

SEQ ID NO: 1792867 - DNA, 15 bp, Homo sapiens
cccttcctcttaccc

SEQ ID NO: 1792868 - DNA, 15 bp, Homo sapiens
ccttcctcttaccca

SEQ ID NO: 1792869 - DNA, 15 bp, Homo sapiens
cttcctcttacccag

SEQ ID NO: 1792870 - DNA, 15 bp, Homo sapiens
ttcctcttacccagt

SEQ ID NO: 1792871 - DNA, 15 bp, Homo sapiens
tcctcttacccagtt

SEQ ID NO: 1792872 - DNA, 15 bp, Homo sapiens
cctcttacccagttt

SEQ ID NO: 1792873 - DNA, 15 bp, Homo sapiens
ctcttacccagtttc

SEQ ID NO: 1792874 - DNA, 15 bp, Homo sapiens
tcttacccagtttct

SEQ ID NO: 1792875 - DNA, 15 bp, Homo sapiens
cttacccagtttctg

SEQ ID NO: 1792876 - DNA, 15 bp, Homo sapiens
ttacccagtttctgc

SEQ ID NO: 1792877 - DNA, 15 bp, Homo sapiens
tacccagtttctgct

SEQ ID NO: 1792878 - DNA, 15 bp, Homo sapiens
acccagtttctgctc

SEQ ID NO: 1792879 - DNA, 15 bp, Homo sapiens
cccagtttctgctct

SEQ ID NO: 1792880 - DNA, 15 bp, Homo sapiens
ccagtttctgctctg

SEQ ID NO: 1792881 - DNA, 15 bp, Homo sapiens
cagtttctgctctgc

SEQ ID NO: 1792882 - DNA, 15 bp, Homo sapiens
agtttctgctctgcc

SEQ ID NO: 1792883 - DNA, 15 bp, Homo sapiens
gtttctgctctgcct

SEQ ID NO: 1792884 - DNA, 15 bp, Homo sapiens
tttctgctctgcctc

SEQ ID NO: 1792885 - DNA, 15 bp, Homo sapiens
ttctgctctgcctcc

SEQ ID NO: 1792886 - DNA, 15 bp, Homo sapiens
tctgctctgcctcct

SEQ ID NO: 1792887 - DNA, 15 bp, Homo sapiens
ctgctctgcctcctc

SEQ ID NO: 1792888 - DNA, 15 bp, Homo sapiens
tgctctgcctcctct

SEQ ID NO: 1792889 - DNA, 15 bp, Homo sapiens
gctctgcctcctctg

SEQ ID NO: 1792890 - DNA, 15 bp, Homo sapiens
ctctgcctcctctgt

SEQ ID NO: 1792891 - DNA, 15 bp, Homo sapiens
tctgcctcctctgtc

SEQ ID NO: 1792892 - DNA, 15 bp, Homo sapiens
ctgcctcctctgtct

SEQ ID NO: 1792893 - DNA, 15 bp, Homo sapiens
tgcctcctctgtctg

SEQ ID NO: 1792894 - DNA, 15 bp, Homo sapiens
gcctcctctgtctgc

SEQ ID NO: 1792895 - DNA, 15 bp, Homo sapiens
cctcctctgtctgcc

SEQ ID NO: 1792896 - DNA, 15 bp, Homo sapiens
ctcctctgtctgcca

SEQ ID NO: 1792897 - DNA, 15 bp, Homo sapiens
tcctctgtctgccag

SEQ ID NO: 1792898 - DNA, 15 bp, Homo sapiens
cctctgtctgccagc

SEQ ID NO: 1792899 - DNA, 15 bp, Homo sapiens
ctctgtctgccagct

SEQ ID NO: 1792900 - DNA, 15 bp, Homo sapiens
tctgtctgccagctc

SEQ ID NO: 1792901 - DNA, 15 bp, Homo sapiens
ctgtctgccagctcc

SEQ ID NO: 1792902 - DNA, 15 bp, Homo sapiens
tgtctgccagctccc

SEQ ID NO: 1792903 - DNA, 15 bp, Homo sapiens
gtctgccagctccct

SEQ ID NO: 1792904 - DNA, 15 bp, Homo sapiens
tctgccagctccctc

SEQ ID NO: 1792905 - DNA, 15 bp, Homo sapiens
ctgccagctccctcc

SEQ ID NO: 1792906 - DNA, 15 bp, Homo sapiens
tgccagctccctccc

SEQ ID NO: 1792907 - DNA, 15 bp, Homo sapiens
gccagctccctcccc

SEQ ID NO: 1792908 - DNA, 15 bp, Homo sapiens
ccagctccctcccct

SEQ ID NO: 1792909 - DNA, 15 bp, Homo sapiens
cagctccctcccctt

SEQ ID NO: 1792910 - DNA, 15 bp, Homo sapiens
agctccctccccttc

SEQ ID NO: 1792911 - DNA, 15 bp, Homo sapiens
gctccctccccttct

SEQ ID NO: 1792912 - DNA, 15 bp, Homo sapiens
ctccctccccttctc

SEQ ID NO: 1792913 - DNA, 15 bp, Homo sapiens
tccctccccttctca

SEQ ID NO: 1792914 - DNA, 15 bp, Homo sapiens
ccctccccttctcaa

SEQ ID NO: 1792915 - DNA, 15 bp, Homo sapiens
cctccccttctcaaa

SEQ ID NO: 1792916 - DNA, 15 bp, Homo sapiens
ctccccttctcaaag

SEQ ID NO: 1792917 - DNA, 15 bp, Homo sapiens
tccccttctcaaagc

SEQ ID NO: 1792918 - DNA, 15 bp, Homo sapiens
ccccttctcaaagca

SEQ ID NO: 1792919 - DNA, 15 bp, Homo sapiens
cccttctcaaagcac

SEQ ID NO: 1792920 - DNA, 15 bp, Homo sapiens
ccttctcaaagcacc

SEQ ID NO: 1792921 - DNA, 15 bp, Homo sapiens
cttctcaaagcacca

SEQ ID NO: 1792922 - DNA, 15 bp, Homo sapiens
ttctcaaagcaccac

SEQ ID NO: 1792923 - DNA, 15 bp, Homo sapiens
tctcaaagcaccaca

SEQ ID NO: 1792924 - DNA, 15 bp, Homo sapiens
ctcaaagcaccacac

SEQ ID NO: 1792925 - DNA, 15 bp, Homo sapiens
tcaaagcaccacaca

SEQ ID NO: 1792926 - DNA, 15 bp, Homo sapiens
caaagcaccacacag

SEQ ID NO: 1792927 - DNA, 15 bp, Homo sapiens
aaagcaccacacagt

SEQ ID NO: 1792928 - DNA, 15 bp, Homo sapiens
aagcaccacacagtg

SEQ ID NO: 1792929 - DNA, 15 bp, Homo sapiens
agcaccacacagtgg

SEQ ID NO: 1792930 - DNA, 15 bp, Homo sapiens
gcaccacacagtgga

SEQ ID NO: 1792931 - DNA, 15 bp, Homo sapiens
caccacacagtggaa

SEQ ID NO: 1792932 - DNA, 15 bp, Homo sapiens
accacacagtggaac

SEQ ID NO: 1792933 - DNA, 15 bp, Homo sapiens
ccacacagtggaacc

SEQ ID NO: 1792934 - DNA, 15 bp, Homo sapiens
cacacagtggaaccc

SEQ ID NO: 1792935 - DNA, 15 bp, Homo sapiens
acacagtggaaccca

SEQ ID NO: 1792936 - DNA, 15 bp, Homo sapiens
cacagtggaacccag

SEQ ID NO: 1792937 - DNA, 15 bp, Homo sapiens
acagtggaacccagt

SEQ ID NO: 1792938 - DNA, 15 bp, Homo sapiens
cagtggaacccagtt

SEQ ID NO: 1792939 - DNA, 15 bp, Homo sapiens
agtggaacccagttg

SEQ ID NO: 1792940 - DNA, 15 bp, Homo sapiens
gtggaacccagttgg

SEQ ID NO: 1792941 - DNA, 15 bp, Homo sapiens
tggaacccagttggg

SEQ ID NO: 1792942 - DNA, 15 bp, Homo sapiens
ggaacccagttgggc

SEQ ID NO: 1792943 - DNA, 15 bp, Homo sapiens
gaacccagttgggct

SEQ ID NO: 1792944 - DNA, 15 bp, Homo sapiens
aacccagttgggctg

SEQ ID NO: 1792945 - DNA, 15 bp, Homo sapiens
acccagttgggctgc

SEQ ID NO: 1792946 - DNA, 15 bp, Homo sapiens
cccagttgggctgca

SEQ ID NO: 1792947 - DNA, 15 bp, Homo sapiens
ccagttgggctgcag

SEQ ID NO: 1792948 - DNA, 15 bp, Homo sapiens
cagttgggctgcagg

SEQ ID NO: 1792949 - DNA, 15 bp, Homo sapiens
agttgggctgcaggt

SEQ ID NO: 1792950 - DNA, 15 bp, Homo sapiens
gttgggctgcaggtt

SEQ ID NO: 1792951 - DNA, 15 bp, Homo sapiens
ttgggctgcaggtta

SEQ ID NO: 1792952 - DNA, 15 bp, Homo sapiens
tgggctgcaggttac

SEQ ID NO: 1792953 - DNA, 15 bp, Homo sapiens
gggctgcaggttacc

SEQ ID NO: 1792954 - DNA, 15 bp, Homo sapiens
ggctgcaggttacct

SEQ ID NO: 1792955 - DNA, 15 bp, Homo sapiens
gctgcaggttacctc

SEQ ID NO: 1792956 - DNA, 15 bp, Homo sapiens
ctgcaggttacctcc

SEQ ID NO: 1792957 - DNA, 15 bp, Homo sapiens
tgcaggttacctcca

SEQ ID NO: 1792958 - DNA, 15 bp, Homo sapiens
gcaggttacctccac

SEQ ID NO: 1792959 - DNA, 15 bp, Homo sapiens
caggttacctccaca

SEQ ID NO: 1792960 - DNA, 15 bp, Homo sapiens
aggttacctccacac

SEQ ID NO: 1792961 - DNA, 15 bp, Homo sapiens
ggttacctccacaca

SEQ ID NO: 1792962 - DNA, 15 bp, Homo sapiens
gttacctccacacat

SEQ ID NO: 1792963 - DNA, 15 bp, Homo sapiens
ttacctccacacatt

SEQ ID NO: 1792964 - DNA, 15 bp, Homo sapiens
tacctccacacattg

SEQ ID NO: 1792965 - DNA, 15 bp, Homo sapiens
acctccacacattgc

SEQ ID NO: 1792966 - DNA, 15 bp, Homo sapiens
cctccacacattgct

SEQ ID NO: 1792967 - DNA, 15 bp, Homo sapiens
ctccacacattgctc

SEQ ID NO: 1792968 - DNA, 15 bp, Homo sapiens
tccacacattgctcc

SEQ ID NO: 1792969 - DNA, 15 bp, Homo sapiens
ccacacattgctcca

SEQ ID NO: 1792970 - DNA, 15 bp, Homo sapiens
cacacattgctccag

SEQ ID NO: 1792971 - DNA, 15 bp, Homo sapiens
acacattgctccaga

SEQ ID NO: 1792972 - DNA, 15 bp, Homo sapiens
cacattgctccagac

SEQ ID NO: 1792973 - DNA, 15 bp, Homo sapiens
acattgctccagact

SEQ ID NO: 1792974 - DNA, 15 bp, Homo sapiens
cattgctccagactc

SEQ ID NO: 1792975 - DNA, 15 bp, Homo sapiens
attgctccagactcc

SEQ ID NO: 1792976 - DNA, 15 bp, Homo sapiens
ttgctccagactcca

SEQ ID NO: 1792977 - DNA, 15 bp, Homo sapiens
tgctccagactccaa

SEQ ID NO: 1792978 - DNA, 15 bp, Homo sapiens
gctccagactccaaa

SEQ ID NO: 1792979 - DNA, 15 bp, Homo sapiens
ctccagactccaaat

SEQ ID NO: 1792980 - DNA, 15 bp, Homo sapiens
tccagactccaaatg

SEQ ID NO: 1792981 - DNA, 15 bp, Homo sapiens
ccagactccaaatgt

SEQ ID NO: 1792982 - DNA, 15 bp, Homo sapiens
cagactccaaatgtc

SEQ ID NO: 1792983 - DNA, 15 bp, Homo sapiens
agactccaaatgtct

SEQ ID NO: 1792984 - DNA, 15 bp, Homo sapiens
gactccaaatgtctg

SEQ ID NO: 1792985 - DNA, 15 bp, Homo sapiens
actccaaatgtctga

SEQ ID NO: 1792986 - DNA, 15 bp, Homo sapiens
ctccaaatgtctgac

SEQ ID NO: 1792987 - DNA, 15 bp, Homo sapiens
tccaaatgtctgacc

SEQ ID NO: 1792988 - DNA, 15 bp, Homo sapiens
ccaaatgtctgacct

SEQ ID NO: 1792989 - DNA, 15 bp, Homo sapiens
caaatgtctgacctt

SEQ ID NO: 1792990 - DNA, 15 bp, Homo sapiens
aaatgtctgaccttc

SEQ ID NO: 1792991 - DNA, 15 bp, Homo sapiens
aatgtctgaccttcc

SEQ ID NO: 1792992 - DNA, 15 bp, Homo sapiens
atgtctgaccttcct

SEQ ID NO: 1792993 - DNA, 15 bp, Homo sapiens
tgtctgaccttcctt

SEQ ID NO: 1792994 - DNA, 15 bp, Homo sapiens
gtctgaccttccttc

SEQ ID NO: 1792995 - DNA, 15 bp, Homo sapiens
tctgaccttccttcc

SEQ ID NO: 1792996 - DNA, 15 bp, Homo sapiens
ctgaccttccttcct

SEQ ID NO: 1792997 - DNA, 15 bp, Homo sapiens
tgaccttccttcctc

SEQ ID NO: 1792998 - DNA, 15 bp, Homo sapiens
gaccttccttcctca

SEQ ID NO: 1792999 - DNA, 15 bp, Homo sapiens
accttccttcctcag

SEQ ID NO: 1793000 - DNA, 15 bp, Homo sapiens
ccttccttcctcagc

SEQ ID NO: 1793001 - DNA, 15 bp, Homo sapiens
cttccttcctcagcg

SEQ ID NO: 1793002 - DNA, 15 bp, Homo sapiens
ttccttcctcagcgc

SEQ ID NO: 1793003 - DNA, 15 bp, Homo sapiens
tccttcctcagcgcc

SEQ ID NO: 1793004 - DNA, 15 bp, Homo sapiens
ccttcctcagcgcct

SEQ ID NO: 1793005 - DNA, 15 bp, Homo sapiens
cttcctcagcgcctc

SEQ ID NO: 1793006 - DNA, 15 bp, Homo sapiens
ttcctcagcgcctcc

SEQ ID NO: 1793007 - DNA, 15 bp, Homo sapiens
tcctcagcgcctcct

SEQ ID NO: 1793008 - DNA, 15 bp, Homo sapiens
cctcagcgcctcctc

SEQ ID NO: 1793009 - DNA, 15 bp, Homo sapiens
ctcagcgcctcctcc

SEQ ID NO: 1793010 - DNA, 15 bp, Homo sapiens
tcagcgcctcctcca

SEQ ID NO: 1793011 - DNA, 15 bp, Homo sapiens
cagcgcctcctccat

SEQ ID NO: 1793012 - DNA, 15 bp, Homo sapiens
agcgcctcctccatg

SEQ ID NO: 1793013 - DNA, 15 bp, Homo sapiens
gcgcctcctccatgc

SEQ ID NO: 1793014 - DNA, 15 bp, Homo sapiens
cgcctcctccatgcc

SEQ ID NO: 1793015 - DNA, 15 bp, Homo sapiens
gcctcctccatgcct

SEQ ID NO: 1793016 - DNA, 15 bp, Homo sapiens
cctcctccatgccta

SEQ ID NO: 1793017 - DNA, 15 bp, Homo sapiens
ctcctccatgcctaa

SEQ ID NO: 1793018 - DNA, 15 bp, Homo sapiens
tcctccatgcctaaa

SEQ ID NO: 1793019 - DNA, 15 bp, Homo sapiens
cctccatgcctaaat

SEQ ID NO: 1793020 - DNA, 15 bp, Homo sapiens
ctccatgcctaaatc

SEQ ID NO: 1793021 - DNA, 15 bp, Homo sapiens
tccatgcctaaatcc

SEQ ID NO: 1793022 - DNA, 15 bp, Homo sapiens
ccatgcctaaatccg

SEQ ID NO: 1793023 - DNA, 15 bp, Homo sapiens
catgcctaaatccga

SEQ ID NO: 1793024 - DNA, 15 bp, Homo sapiens
atgcctaaatccgac

SEQ ID NO: 1793025 - DNA, 15 bp, Homo sapiens
tgcctaaatccgacc

SEQ ID NO: 1793026 - DNA, 15 bp, Homo sapiens
gcctaaatccgacct

SEQ ID NO: 1793027 - DNA, 15 bp, Homo sapiens
cctaaatccgacctg

SEQ ID NO: 1793028 - DNA, 15 bp, Homo sapiens
ctaaatccgacctgg

SEQ ID NO: 1793029 - DNA, 15 bp, Homo sapiens
taaatccgacctggg

SEQ ID NO: 1793030 - DNA, 15 bp, Homo sapiens
aaatccgacctgggg

SEQ ID NO: 1793031 - DNA, 15 bp, Homo sapiens
aatccgacctgggga

SEQ ID NO: 1793032 - DNA, 15 bp, Homo sapiens
atccgacctggggat

SEQ ID NO: 1793033 - DNA, 15 bp, Homo sapiens
tccgacctggggatg

SEQ ID NO: 1793034 - DNA, 15 bp, Homo sapiens
ccgacctggggatgt

SEQ ID NO: 1793035 - DNA, 15 bp, Homo sapiens
cgacctggggatgtt

SEQ ID NO: 1793036 - DNA, 15 bp, Homo sapiens
gacctggggatgttt

SEQ ID NO: 1793037 - DNA, 15 bp, Homo sapiens
acctggggatgtttt

SEQ ID NO: 1793038 - DNA, 15 bp, Homo sapiens
cctggggatgttttg

SEQ ID NO: 1793039 - DNA, 15 bp, Homo sapiens
ctggggatgttttgg

SEQ ID NO: 1793040 - DNA, 15 bp, Homo sapiens
tggggatgttttggc

SEQ ID NO: 1793041 - DNA, 15 bp, Homo sapiens
ggggatgttttggcc

SEQ ID NO: 1793042 - DNA, 15 bp, Homo sapiens
gggatgttttggcca

SEQ ID NO: 1793043 - DNA, 15 bp, Homo sapiens
ggatgttttggccag

SEQ ID NO: 1793044 - DNA, 15 bp, Homo sapiens
gatgttttggccagc

SEQ ID NO: 1793045 - DNA, 15 bp, Homo sapiens
atgttttggccagca

SEQ ID NO: 1793046 - DNA, 15 bp, Homo sapiens
tgttttggccagcag

SEQ ID NO: 1793047 - DNA, 15 bp, Homo sapiens
gttttggccagcaga

SEQ ID NO: 1793048 - DNA, 15 bp, Homo sapiens
ttttggccagcagaa

SEQ ID NO: 1793049 - DNA, 15 bp, Homo sapiens
tttggccagcagaag

SEQ ID NO: 1793050 - DNA, 15 bp, Homo sapiens
ttggccagcagaagt

SEQ ID NO: 1793051 - DNA, 15 bp, Homo sapiens
tggccagcagaagta

SEQ ID NO: 1793052 - DNA, 15 bp, Homo sapiens
ggccagcagaagtaa

SEQ ID NO: 1793053 - DNA, 15 bp, Homo sapiens
gccagcagaagtaat

SEQ ID NO: 1793054 - DNA, 15 bp, Homo sapiens
ccagcagaagtaatt

SEQ ID NO: 1793055 - DNA, 15 bp, Homo sapiens
cagcagaagtaattt

SEQ ID NO: 1793056 - DNA, 15 bp, Homo sapiens
agcagaagtaatttc

SEQ ID NO: 1793057 - DNA, 15 bp, Homo sapiens
gcagaagtaatttct

SEQ ID NO: 1793058 - DNA, 15 bp, Homo sapiens
cagaagtaatttctc

SEQ ID NO: 1793059 - DNA, 15 bp, Homo sapiens
agaagtaatttctca

SEQ ID NO: 1793060 - DNA, 15 bp, Homo sapiens
gaagtaatttctcag

SEQ ID NO: 1793061 - DNA, 15 bp, Homo sapiens
aagtaatttctcagc

SEQ ID NO: 1793062 - DNA, 15 bp, Homo sapiens
agtaatttctcagct

SEQ ID NO: 1793063 - DNA, 15 bp, Homo sapiens
gtaatttctcagctc

SEQ ID NO: 1793064 - DNA, 15 bp, Homo sapiens
taatttctcagctca

SEQ ID NO: 1793065 - DNA, 15 bp, Homo sapiens
aatttctcagctcat

SEQ ID NO: 1793066 - DNA, 15 bp, Homo sapiens
atttctcagctcatt

SEQ ID NO: 1793067 - DNA, 15 bp, Homo sapiens
tttctcagctcattt

SEQ ID NO: 1793068 - DNA, 15 bp, Homo sapiens
ttctcagctcattta

SEQ ID NO: 1793069 - DNA, 15 bp, Homo sapiens
tctcagctcatttac

SEQ ID NO: 1793070 - DNA, 15 bp, Homo sapiens
ctcagctcatttaca

SEQ ID NO: 1793071 - DNA, 15 bp, Homo sapiens
tcagctcatttacat

SEQ ID NO: 1793072 - DNA, 15 bp, Homo sapiens
cagctcatttacatt

SEQ ID NO: 1793073 - DNA, 15 bp, Homo sapiens
agctcatttacattg

SEQ ID NO: 1793074 - DNA, 15 bp, Homo sapiens
gctcatttacattgt

SEQ ID NO: 1793075 - DNA, 15 bp, Homo sapiens
ctcatttacattgtc

SEQ ID NO: 1793076 - DNA, 15 bp, Homo sapiens
tcatttacattgtct

SEQ ID NO: 1793077 - DNA, 15 bp, Homo sapiens
catttacattgtcta

SEQ ID NO: 1793078 - DNA, 15 bp, Homo sapiens
atttacattgtctaa

SEQ ID NO: 1793079 - DNA, 15 bp, Homo sapiens
tttacattgtctaat

SEQ ID NO: 1793080 - DNA, 15 bp, Homo sapiens
ttacattgtctaata

SEQ ID NO: 1793081 - DNA, 15 bp, Homo sapiens
tacattgtctaatat

SEQ ID NO: 1793082 - DNA, 15 bp, Homo sapiens
acattgtctaatatc

SEQ ID NO: 1793083 - DNA, 15 bp, Homo sapiens
cattgtctaatatcc

SEQ ID NO: 1793084 - DNA, 15 bp, Homo sapiens
attgtctaatatccc

SEQ ID NO: 1793085 - DNA, 15 bp, Homo sapiens
ttgtctaatatccct

SEQ ID NO: 1793086 - DNA, 15 bp, Homo sapiens
tgtctaatatccctc

SEQ ID NO: 1793087 - DNA, 15 bp, Homo sapiens
gtctaatatccctcc

SEQ ID NO: 1793088 - DNA, 15 bp, Homo sapiens
tctaatatccctcct

SEQ ID NO: 1793089 - DNA, 15 bp, Homo sapiens
ctaatatccctcctg

SEQ ID NO: 1793090 - DNA, 15 bp, Homo sapiens
taatatccctcctgc

SEQ ID NO: 1793091 - DNA, 15 bp, Homo sapiens
aatatccctcctgca

SEQ ID NO: 1793092 - DNA, 15 bp, Homo sapiens
atatccctcctgcag

SEQ ID NO: 1793093 - DNA, 15 bp, Homo sapiens
tatccctcctgcaga

SEQ ID NO: 1793094 - DNA, 15 bp, Homo sapiens
atccctcctgcagat

SEQ ID NO: 1793095 - DNA, 15 bp, Homo sapiens
tccctcctgcagata

SEQ ID NO: 1793096 - DNA, 15 bp, Homo sapiens
ccctcctgcagatat

SEQ ID NO: 1793097 - DNA, 15 bp, Homo sapiens
cctcctgcagatatt

SEQ ID NO: 1793098 - DNA, 15 bp, Homo sapiens
ctcctgcagatattt

SEQ ID NO: 1793099 - DNA, 15 bp, Homo sapiens
tcctgcagatatttg

SEQ ID NO: 1793100 - DNA, 15 bp, Homo sapiens
cctgcagatatttgt

SEQ ID NO: 1793101 - DNA, 15 bp, Homo sapiens
ctgcagatatttgtt

SEQ ID NO: 1793102 - DNA, 15 bp, Homo sapiens
tgcagatatttgttt

SEQ ID NO: 1793103 - DNA, 15 bp, Homo sapiens
gcagatatttgtttt

SEQ ID NO: 1793104 - DNA, 15 bp, Homo sapiens
cagatatttgtttta

SEQ ID NO: 1793105 - DNA, 15 bp, Homo sapiens
agatatttgttttaa

SEQ ID NO: 1793106 - DNA, 15 bp, Homo sapiens
gatatttgttttaaa

SEQ ID NO: 1793107 - DNA, 15 bp, Homo sapiens
atatttgttttaaaa

SEQ ID NO: 1793108 - DNA, 15 bp, Homo sapiens
tatttgttttaaaaa

SEQ ID NO: 1793109 - DNA, 15 bp, Homo sapiens
atttgttttaaaaac

SEQ ID NO: 1793110 - DNA, 15 bp, Homo sapiens
tttgttttaaaaaca

SEQ ID NO: 1793111 - DNA, 15 bp, Homo sapiens
ttgttttaaaaacaa

SEQ ID NO: 1793112 - DNA, 15 bp, Homo sapiens
tgttttaaaaacaac

SEQ ID NO: 1793113 - DNA, 15 bp, Homo sapiens
gttttaaaaacaaca

SEQ ID NO: 1793114 - DNA, 15 bp, Homo sapiens
ttttaaaaacaacaa

SEQ ID NO: 1793115 - DNA, 15 bp, Homo sapiens
tttaaaaacaacaac

SEQ ID NO: 1793116 - DNA, 15 bp, Homo sapiens
ttaaaaacaacaaca

SEQ ID NO: 1793117 - DNA, 15 bp, Homo sapiens
taaaaacaacaacag

SEQ ID NO: 1793118 - DNA, 15 bp, Homo sapiens
aaaaacaacaacagc

SEQ ID NO: 1793119 - DNA, 15 bp, Homo sapiens
aaaacaacaacagca

SEQ ID NO: 1793120 - DNA, 15 bp, Homo sapiens
aaacaacaacagcaa

SEQ ID NO: 1793121 - DNA, 15 bp, Homo sapiens
aacaacaacagcaag

SEQ ID NO: 1793122 - DNA, 15 bp, Homo sapiens
acaacaacagcaaga

SEQ ID NO: 1793123 - DNA, 15 bp, Homo sapiens
caacaacagcaagat

SEQ ID NO: 1793124 - DNA, 15 bp, Homo sapiens
aacaacagcaagatg

SEQ ID NO: 1793125 - DNA, 15 bp, Homo sapiens
acaacagcaagatgc

SEQ ID NO: 1793126 - DNA, 15 bp, Homo sapiens
caacagcaagatgca

SEQ ID NO: 1793127 - DNA, 15 bp, Homo sapiens
aacagcaagatgcat

SEQ ID NO: 1793128 - DNA, 15 bp, Homo sapiens
acagcaagatgcatg

SEQ ID NO: 1793129 - DNA, 15 bp, Homo sapiens
cagcaagatgcatgt

SEQ ID NO: 1793130 - DNA, 15 bp, Homo sapiens
agcaagatgcatgtt

SEQ ID NO: 1793131 - DNA, 15 bp, Homo sapiens
gcaagatgcatgtta

SEQ ID NO: 1793132 - DNA, 15 bp, Homo sapiens
caagatgcatgttag

SEQ ID NO: 1793133 - DNA, 15 bp, Homo sapiens
aagatgcatgttagc

SEQ ID NO: 1793134 - DNA, 15 bp, Homo sapiens
agatgcatgttagcc

SEQ ID NO: 1793135 - DNA, 15 bp, Homo sapiens
gatgcatgttagccc

SEQ ID NO: 1793136 - DNA, 15 bp, Homo sapiens
atgcatgttagccca

SEQ ID NO: 1793137 - DNA, 15 bp, Homo sapiens
tgcatgttagcccac

SEQ ID NO: 1793138 - DNA, 15 bp, Homo sapiens
gcatgttagcccaca

SEQ ID NO: 1793139 - DNA, 15 bp, Homo sapiens
catgttagcccacat

SEQ ID NO: 1793140 - DNA, 15 bp, Homo sapiens
atgttagcccacatg

SEQ ID NO: 1793141 - DNA, 15 bp, Homo sapiens
tgttagcccacatga

SEQ ID NO: 1793142 - DNA, 15 bp, Homo sapiens
gttagcccacatgag

SEQ ID NO: 1793143 - DNA, 15 bp, Homo sapiens
ttagcccacatgagt

SEQ ID NO: 1793144 - DNA, 15 bp, Homo sapiens
tagcccacatgagtc

SEQ ID NO: 1793145 - DNA, 15 bp, Homo sapiens
agcccacatgagtct

SEQ ID NO: 1793146 - DNA, 15 bp, Homo sapiens
gcccacatgagtctc

SEQ ID NO: 1793147 - DNA, 15 bp, Homo sapiens
cccacatgagtctct

SEQ ID NO: 1793148 - DNA, 15 bp, Homo sapiens
ccacatgagtctctt

SEQ ID NO: 1793149 - DNA, 15 bp, Homo sapiens
cacatgagtctctta

SEQ ID NO: 1793150 - DNA, 15 bp, Homo sapiens
acatgagtctcttag

SEQ ID NO: 1793151 - DNA, 15 bp, Homo sapiens
catgagtctcttaga

SEQ ID NO: 1793152 - DNA, 15 bp, Homo sapiens
atgagtctcttagaa

SEQ ID NO: 1793153 - DNA, 15 bp, Homo sapiens
tgagtctcttagaaa

SEQ ID NO: 1793154 - DNA, 15 bp, Homo sapiens
gagtctcttagaaat

SEQ ID NO: 1793155 - DNA, 15 bp, Homo sapiens
agtctcttagaaatg

SEQ ID NO: 1793156 - DNA, 15 bp, Homo sapiens
gtctcttagaaatgg

SEQ ID NO: 1793157 - DNA, 15 bp, Homo sapiens
tctcttagaaatgga

SEQ ID NO: 1793158 - DNA, 15 bp, Homo sapiens
ctcttagaaatggat

SEQ ID NO: 1793159 - DNA, 15 bp, Homo sapiens
tcttagaaatggata

SEQ ID NO: 1793160 - DNA, 15 bp, Homo sapiens
cttagaaatggataa

SEQ ID NO: 1793161 - DNA, 15 bp, Homo sapiens
ttagaaatggataag

SEQ ID NO: 1793162 - DNA, 15 bp, Homo sapiens
tagaaatggataaga

SEQ ID NO: 1793163 - DNA, 15 bp, Homo sapiens
agaaatggataagat

SEQ ID NO: 1793164 - DNA, 15 bp, Homo sapiens
gaaatggataagatt

SEQ ID NO: 1793165 - DNA, 15 bp, Homo sapiens
aaatggataagattt

SEQ ID NO: 1793166 - DNA, 15 bp, Homo sapiens
aatggataagatttt

SEQ ID NO: 1793167 - DNA, 15 bp, Homo sapiens
atggataagattttt

SEQ ID NO: 1793168 - DNA, 15 bp, Homo sapiens
tggataagatttttt

SEQ ID NO: 1793169 - DNA, 15 bp, Homo sapiens
ggataagattttttt

SEQ ID NO: 1793170 - DNA, 15 bp, Homo sapiens
gataagatttttttt

SEQ ID NO: 1793171 - DNA, 15 bp, Homo sapiens
ataagattttttttt

SEQ ID NO: 1793172 - DNA, 15 bp, Homo sapiens
taagatttttttttt

SEQ ID NO: 1793173 - DNA, 15 bp, Homo sapiens
aagattttttttttt

SEQ ID NO: 1793174 - DNA, 15 bp, Homo sapiens
ttttttttttttgac

SEQ ID NO: 1793175 - DNA, 15 bp, Homo sapiens
tttttttttttgaca

SEQ ID NO: 1793176 - DNA, 15 bp, Homo sapiens
ttttttttttgacag

SEQ ID NO: 1793177 - DNA, 15 bp, Homo sapiens
tttttttttgacaga

SEQ ID NO: 1793178 - DNA, 15 bp, Homo sapiens
ttttttttgacagag

SEQ ID NO: 1793179 - DNA, 15 bp, Homo sapiens
tttttttgacagagt

SEQ ID NO: 1793180 - DNA, 15 bp, Homo sapiens
ttttttgacagagtc

SEQ ID NO: 1793181 - DNA, 15 bp, Homo sapiens
tttttgacagagtct

SEQ ID NO: 1793182 - DNA, 15 bp, Homo sapiens
ttttgacagagtctc

SEQ ID NO: 1793183 - DNA, 15 bp, Homo sapiens
tttgacagagtctca

SEQ ID NO: 1793184 - DNA, 15 bp, Homo sapiens
ttgacagagtctcac

SEQ ID NO: 1793185 - DNA, 15 bp, Homo sapiens
tgacagagtctcacg

SEQ ID NO: 1793186 - DNA, 15 bp, Homo sapiens
gacagagtctcacgc

SEQ ID NO: 1793187 - DNA, 15 bp, Homo sapiens
acagagtctcacgct

SEQ ID NO: 1793188 - DNA, 15 bp, Homo sapiens
cagagtctcacgctg

SEQ ID NO: 1793189 - DNA, 15 bp, Homo sapiens
agagtctcacgctgt

SEQ ID NO: 1793190 - DNA, 15 bp, Homo sapiens
gagtctcacgctgtg

SEQ ID NO: 1793191 - DNA, 15 bp, Homo sapiens
agtctcacgctgtgg

SEQ ID NO: 1793192 - DNA, 15 bp, Homo sapiens
gtctcacgctgtggc

SEQ ID NO: 1793193 - DNA, 15 bp, Homo sapiens
tctcacgctgtggcc

SEQ ID NO: 1793194 - DNA, 15 bp, Homo sapiens
ctcacgctgtggccc

SEQ ID NO: 1793195 - DNA, 15 bp, Homo sapiens
tcacgctgtggccca

SEQ ID NO: 1793196 - DNA, 15 bp, Homo sapiens
cacgctgtggcccag

SEQ ID NO: 1793197 - DNA, 15 bp, Homo sapiens
acgctgtggcccagg

SEQ ID NO: 1793198 - DNA, 15 bp, Homo sapiens
cgctgtggcccaggc

SEQ ID NO: 1793199 - DNA, 15 bp, Homo sapiens
gctgtggcccaggct

SEQ ID NO: 1793200 - DNA, 15 bp, Homo sapiens
ctgtggcccaggctg

SEQ ID NO: 1793201 - DNA, 15 bp, Homo sapiens
tggcccaggctggag

SEQ ID NO: 1793202 - DNA, 15 bp, Homo sapiens
ggcccaggctggagt

SEQ ID NO: 1793203 - DNA, 15 bp, Homo sapiens
aggctggagtgcaga

SEQ ID NO: 1793204 - DNA, 15 bp, Homo sapiens
ggctggagtgcagag

SEQ ID NO: 1793205 - DNA, 15 bp, Homo sapiens
gctggagtgcagagg

SEQ ID NO: 1793206 - DNA, 15 bp, Homo sapiens
ctggagtgcagaggc

SEQ ID NO: 1793207 - DNA, 15 bp, Homo sapiens
tggagtgcagaggca

SEQ ID NO: 1793208 - DNA, 15 bp, Homo sapiens
ggagtgcagaggcac

SEQ ID NO: 1793209 - DNA, 15 bp, Homo sapiens
gagtgcagaggcacg

SEQ ID NO: 1793210 - DNA, 15 bp, Homo sapiens
agtgcagaggcacga

SEQ ID NO: 1793211 - DNA, 15 bp, Homo sapiens
gtgcagaggcacgat

SEQ ID NO: 1793212 - DNA, 15 bp, Homo sapiens
tgcagaggcacgatc

SEQ ID NO: 1793213 - DNA, 15 bp, Homo sapiens
gcagaggcacgatct

SEQ ID NO: 1793214 - DNA, 15 bp, Homo sapiens
cagaggcacgatctc

SEQ ID NO: 1793215 - DNA, 15 bp, Homo sapiens
agaggcacgatctcg

SEQ ID NO: 1793216 - DNA, 15 bp, Homo sapiens
gaggcacgatctcgg

SEQ ID NO: 1793217 - DNA, 15 bp, Homo sapiens
aggcacgatctcggc

SEQ ID NO: 1793218 - DNA, 15 bp, Homo sapiens
cacgatctcggctcc

SEQ ID NO: 1793219 - DNA, 15 bp, Homo sapiens
acgatctcggctccc

SEQ ID NO: 1793220 - DNA, 15 bp, Homo sapiens
cgatctcggctccct

SEQ ID NO: 1793221 - DNA, 15 bp, Homo sapiens
gatctcggctccctg

SEQ ID NO: 1793222 - DNA, 15 bp, Homo sapiens
atctcggctccctgc

SEQ ID NO: 1793223 - DNA, 15 bp, Homo sapiens
tctcggctccctgca

SEQ ID NO: 1793224 - DNA, 15 bp, Homo sapiens
ctcggctccctgcac

SEQ ID NO: 1793225 - DNA, 15 bp, Homo sapiens
tcggctccctgcacc

SEQ ID NO: 1793226 - DNA, 15 bp, Homo sapiens
cggctccctgcacct

SEQ ID NO: 1793227 - DNA, 15 bp, Homo sapiens
ggctccctgcacctc

SEQ ID NO: 1793228 - DNA, 15 bp, Homo sapiens
gctccctgcacctcc

SEQ ID NO: 1793229 - DNA, 15 bp, Homo sapiens
ctccctgcacctcca

SEQ ID NO: 1793230 - DNA, 15 bp, Homo sapiens
tccctgcacctccac

SEQ ID NO: 1793231 - DNA, 15 bp, Homo sapiens
ccctgcacctccacc

SEQ ID NO: 1793232 - DNA, 15 bp, Homo sapiens
cctgcacctccacct

SEQ ID NO: 1793233 - DNA, 15 bp, Homo sapiens
ctgcacctccacctg

SEQ ID NO: 1793234 - DNA, 15 bp, Homo sapiens
tgcacctccacctgc

SEQ ID NO: 1793235 - DNA, 15 bp, Homo sapiens
gcacctccacctgcc

SEQ ID NO: 1793236 - DNA, 15 bp, Homo sapiens
cacctccacctgccg

SEQ ID NO: 1793237 - DNA, 15 bp, Homo sapiens
acctccacctgccgg

SEQ ID NO: 1793238 - DNA, 15 bp, Homo sapiens
cctccacctgccggt

SEQ ID NO: 1793239 - DNA, 15 bp, Homo sapiens
ctccacctgccggtt

SEQ ID NO: 1793240 - DNA, 15 bp, Homo sapiens
tccacctgccggttc

SEQ ID NO: 1793241 - DNA, 15 bp, Homo sapiens
ccacctgccggttca

SEQ ID NO: 1793242 - DNA, 15 bp, Homo sapiens
cacctgccggttcaa

SEQ ID NO: 1793243 - DNA, 15 bp, Homo sapiens
acctgccggttcaag

SEQ ID NO: 1793244 - DNA, 15 bp, Homo sapiens
cctgccggttcaagt

SEQ ID NO: 1793245 - DNA, 15 bp, Homo sapiens
ctgccggttcaagtg

SEQ ID NO: 1793246 - DNA, 15 bp, Homo sapiens
tgccggttcaagtga

SEQ ID NO: 1793247 - DNA, 15 bp, Homo sapiens
gccggttcaagtgat

SEQ ID NO: 1793248 - DNA, 15 bp, Homo sapiens
ccggttcaagtgatt

SEQ ID NO: 1793249 - DNA, 15 bp, Homo sapiens
cggttcaagtgattc

SEQ ID NO: 1793250 - DNA, 15 bp, Homo sapiens
cctgcctcaacctct

SEQ ID NO: 1793251 - DNA, 15 bp, Homo sapiens
ctgcctcaacctctt

SEQ ID NO: 1793252 - DNA, 15 bp, Homo sapiens
tgcctcaacctcttg

SEQ ID NO: 1793253 - DNA, 15 bp, Homo sapiens
gcctcaacctcttga

SEQ ID NO: 1793254 - DNA, 15 bp, Homo sapiens
cctcaacctcttgag

SEQ ID NO: 1793255 - DNA, 15 bp, Homo sapiens
ctcaacctcttgagt

SEQ ID NO: 1793256 - DNA, 15 bp, Homo sapiens
tcaacctcttgagta

SEQ ID NO: 1793257 - DNA, 15 bp, Homo sapiens
caacctcttgagtag

SEQ ID NO: 1793258 - DNA, 15 bp, Homo sapiens
aacctcttgagtagg

SEQ ID NO: 1793259 - DNA, 15 bp, Homo sapiens
acctcttgagtaggg

SEQ ID NO: 1793260 - DNA, 15 bp, Homo sapiens
cctcttgagtagggt

SEQ ID NO: 1793261 - DNA, 15 bp, Homo sapiens
ctcttgagtagggta

SEQ ID NO: 1793262 - DNA, 15 bp, Homo sapiens
tcttgagtagggtag

SEQ ID NO: 1793263 - DNA, 15 bp, Homo sapiens
cttgagtagggtagc

SEQ ID NO: 1793264 - DNA, 15 bp, Homo sapiens
ttgagtagggtagct

SEQ ID NO: 1793265 - DNA, 15 bp, Homo sapiens
tgagtagggtagctg

SEQ ID NO: 1793266 - DNA, 15 bp, Homo sapiens
gagtagggtagctgg

SEQ ID NO: 1793267 - DNA, 15 bp, Homo sapiens
agtagggtagctggg

SEQ ID NO: 1793268 - DNA, 15 bp, Homo sapiens
gtagggtagctggga

SEQ ID NO: 1793269 - DNA, 15 bp, Homo sapiens
tagggtagctgggac

SEQ ID NO: 1793270 - DNA, 15 bp, Homo sapiens
agggtagctgggact

SEQ ID NO: 1793271 - DNA, 15 bp, Homo sapiens
gctgggactataggg

SEQ ID NO: 1793272 - DNA, 15 bp, Homo sapiens
ctgggactatagggg

SEQ ID NO: 1793273 - DNA, 15 bp, Homo sapiens
tgggactataggggt

SEQ ID NO: 1793274 - DNA, 15 bp, Homo sapiens
gggactataggggtg

SEQ ID NO: 1793275 - DNA, 15 bp, Homo sapiens
ggactataggggtgt

SEQ ID NO: 1793276 - DNA, 15 bp, Homo sapiens
gactataggggtgtg

SEQ ID NO: 1793277 - DNA, 15 bp, Homo sapiens
actataggggtgtgc

SEQ ID NO: 1793278 - DNA, 15 bp, Homo sapiens
ctataggggtgtgcc

SEQ ID NO: 1793279 - DNA, 15 bp, Homo sapiens
tataggggtgtgcca

SEQ ID NO: 1793280 - DNA, 15 bp, Homo sapiens
ataggggtgtgccac

SEQ ID NO: 1793281 - DNA, 15 bp, Homo sapiens
taggggtgtgccacc

SEQ ID NO: 1793282 - DNA, 15 bp, Homo sapiens
aggggtgtgccacca

SEQ ID NO: 1793283 - DNA, 15 bp, Homo sapiens
ggggtgtgccaccat

SEQ ID NO: 1793284 - DNA, 15 bp, Homo sapiens
gggtgtgccaccatg

SEQ ID NO: 1793285 - DNA, 15 bp, Homo sapiens
ggtgtgccaccatgc

SEQ ID NO: 1793286 - DNA, 15 bp, Homo sapiens
ccaccatgcccggca

SEQ ID NO: 1793287 - DNA, 15 bp, Homo sapiens
caccatgcccggcaa

SEQ ID NO: 1793288 - DNA, 15 bp, Homo sapiens
accatgcccggcaat

SEQ ID NO: 1793289 - DNA, 15 bp, Homo sapiens
ccatgcccggcaatt

SEQ ID NO: 1793290 - DNA, 15 bp, Homo sapiens
catgcccggcaattt

SEQ ID NO: 1793291 - DNA, 15 bp, Homo sapiens
atgcccggcaatttt

SEQ ID NO: 1793292 - DNA, 15 bp, Homo sapiens
tgcccggcaattttt

SEQ ID NO: 1793293 - DNA, 15 bp, Homo sapiens
gcccggcaatttttt

SEQ ID NO: 1793294 - DNA, 15 bp, Homo sapiens
cccggcaattttttt

SEQ ID NO: 1793295 - DNA, 15 bp, Homo sapiens
ccggcaatttttttt

SEQ ID NO: 1793296 - DNA, 15 bp, Homo sapiens
cggcaattttttttt

SEQ ID NO: 1793297 - DNA, 15 bp, Homo sapiens
ggcaatttttttttg

SEQ ID NO: 1793298 - DNA, 15 bp, Homo sapiens
gcaatttttttttgt

SEQ ID NO: 1793299 - DNA, 15 bp, Homo sapiens
caatttttttttgta

SEQ ID NO: 1793300 - DNA, 15 bp, Homo sapiens
aatttttttttgtat

SEQ ID NO: 1793301 - DNA, 15 bp, Homo sapiens
atttttttttgtatt

SEQ ID NO: 1793302 - DNA, 15 bp, Homo sapiens
gacagggtttcactg

SEQ ID NO: 1793303 - DNA, 15 bp, Homo sapiens
acagggtttcactgt

SEQ ID NO: 1793304 - DNA, 15 bp, Homo sapiens
cagggtttcactgtt

SEQ ID NO: 1793305 - DNA, 15 bp, Homo sapiens
agggtttcactgttt

SEQ ID NO: 1793306 - DNA, 15 bp, Homo sapiens
gggtttcactgtttt

SEQ ID NO: 1793307 - DNA, 15 bp, Homo sapiens
ggtttcactgttttg

SEQ ID NO: 1793308 - DNA, 15 bp, Homo sapiens
gtttcactgttttgg

SEQ ID NO: 1793309 - DNA, 15 bp, Homo sapiens
tttcactgttttggc

SEQ ID NO: 1793310 - DNA, 15 bp, Homo sapiens
ttcactgttttggcc

SEQ ID NO: 1793311 - DNA, 15 bp, Homo sapiens
tcactgttttggcca

SEQ ID NO: 1793312 - DNA, 15 bp, Homo sapiens
cactgttttggccaa

SEQ ID NO: 1793313 - DNA, 15 bp, Homo sapiens
actgttttggccaag

SEQ ID NO: 1793314 - DNA, 15 bp, Homo sapiens
ctgttttggccaagc

SEQ ID NO: 1793315 - DNA, 15 bp, Homo sapiens
tgttttggccaagct

SEQ ID NO: 1793316 - DNA, 15 bp, Homo sapiens
gttttggccaagctg

SEQ ID NO: 1793317 - DNA, 15 bp, Homo sapiens
ttttggccaagctgg

SEQ ID NO: 1793318 - DNA, 15 bp, Homo sapiens
tttggccaagctggt

SEQ ID NO: 1793319 - DNA, 15 bp, Homo sapiens
aactcctggcctcag

SEQ ID NO: 1793320 - DNA, 15 bp, Homo sapiens
actcctggcctcagg

SEQ ID NO: 1793321 - DNA, 15 bp, Homo sapiens
ctcctggcctcaggt

SEQ ID NO: 1793322 - DNA, 15 bp, Homo sapiens
tcctggcctcaggtg

SEQ ID NO: 1793323 - DNA, 15 bp, Homo sapiens
cctggcctcaggtga

SEQ ID NO: 1793324 - DNA, 15 bp, Homo sapiens
ctggcctcaggtgat

SEQ ID NO: 1793325 - DNA, 15 bp, Homo sapiens
tggcctcaggtgatc

SEQ ID NO: 1793326 - DNA, 15 bp, Homo sapiens
ggcctcaggtgatct

SEQ ID NO: 1793327 - DNA, 15 bp, Homo sapiens
gcctcaggtgatctg

SEQ ID NO: 1793328 - DNA, 15 bp, Homo sapiens
ctcaggtgatctgcc

SEQ ID NO: 1793329 - DNA, 15 bp, Homo sapiens
caggtgatctgccct

SEQ ID NO: 1793330 - DNA, 15 bp, Homo sapiens
aggtgatctgccctc

SEQ ID NO: 1793331 - DNA, 15 bp, Homo sapiens
ggtgatctgccctcc

SEQ ID NO: 1793332 - DNA, 15 bp, Homo sapiens
gtgatctgccctcct

SEQ ID NO: 1793333 - DNA, 15 bp, Homo sapiens
tgatctgccctcctc

SEQ ID NO: 1793334 - DNA, 15 bp, Homo sapiens
gatctgccctcctca

SEQ ID NO: 1793335 - DNA, 15 bp, Homo sapiens
atctgccctcctcag

SEQ ID NO: 1793336 - DNA, 15 bp, Homo sapiens
tctgccctcctcagc

SEQ ID NO: 1793337 - DNA, 15 bp, Homo sapiens
ctgccctcctcagct

SEQ ID NO: 1793338 - DNA, 15 bp, Homo sapiens
tgccctcctcagctt

SEQ ID NO: 1793339 - DNA, 15 bp, Homo sapiens
gccctcctcagcttc

SEQ ID NO: 1793340 - DNA, 15 bp, Homo sapiens
ccctcctcagcttcc

SEQ ID NO: 1793341 - DNA, 15 bp, Homo sapiens
ctcctcagcttccca

SEQ ID NO: 1793342 - DNA, 15 bp, Homo sapiens
tcctcagcttcccaa

SEQ ID NO: 1793343 - DNA, 15 bp, Homo sapiens
atgagccactgcgca

SEQ ID NO: 1793344 - DNA, 15 bp, Homo sapiens
tgagccactgcgcac

SEQ ID NO: 1793345 - DNA, 15 bp, Homo sapiens
gagccactgcgcaca

SEQ ID NO: 1793346 - DNA, 15 bp, Homo sapiens
agccactgcgcacag

SEQ ID NO: 1793347 - DNA, 15 bp, Homo sapiens
gccactgcgcacagc

SEQ ID NO: 1793348 - DNA, 15 bp, Homo sapiens
ccactgcgcacagct

SEQ ID NO: 1793349 - DNA, 15 bp, Homo sapiens
cactgcgcacagctg

SEQ ID NO: 1793350 - DNA, 15 bp, Homo sapiens
actgcgcacagctgg

SEQ ID NO: 1793351 - DNA, 15 bp, Homo sapiens
ctgcgcacagctggc

SEQ ID NO: 1793352 - DNA, 15 bp, Homo sapiens
tgcgcacagctggca

SEQ ID NO: 1793353 - DNA, 15 bp, Homo sapiens
gcgcacagctggcaa

SEQ ID NO: 1793354 - DNA, 15 bp, Homo sapiens
cgcacagctggcaat

SEQ ID NO: 1793355 - DNA, 15 bp, Homo sapiens
gcacagctggcaatg

SEQ ID NO: 1793356 - DNA, 15 bp, Homo sapiens
cacagctggcaatgg

SEQ ID NO: 1793357 - DNA, 15 bp, Homo sapiens
acagctggcaatggc

SEQ ID NO: 1793358 - DNA, 15 bp, Homo sapiens
cagctggcaatggct

SEQ ID NO: 1793359 - DNA, 15 bp, Homo sapiens
agctggcaatggcta

SEQ ID NO: 1793360 - DNA, 15 bp, Homo sapiens
gctggcaatggctaa

SEQ ID NO: 1793361 - DNA, 15 bp, Homo sapiens
ctggcaatggctaag

SEQ ID NO: 1793362 - DNA, 15 bp, Homo sapiens
tggcaatggctaaga

SEQ ID NO: 1793363 - DNA, 15 bp, Homo sapiens
ggcaatggctaagat

SEQ ID NO: 1793364 - DNA, 15 bp, Homo sapiens
gcaatggctaagatt

SEQ ID NO: 1793365 - DNA, 15 bp, Homo sapiens
caatggctaagattt

SEQ ID NO: 1793366 - DNA, 15 bp, Homo sapiens
aatggctaagatttt

SEQ ID NO: 1793367 - DNA, 15 bp, Homo sapiens
atggctaagattttt

SEQ ID NO: 1793368 - DNA, 15 bp, Homo sapiens
tggctaagatttttt

SEQ ID NO: 1793369 - DNA, 15 bp, Homo sapiens
ggctaagattttttg

SEQ ID NO: 1793370 - DNA, 15 bp, Homo sapiens
gctaagattttttga

SEQ ID NO: 1793371 - DNA, 15 bp, Homo sapiens
ctaagattttttgat

SEQ ID NO: 1793372 - DNA, 15 bp, Homo sapiens
taagattttttgatg

SEQ ID NO: 1793373 - DNA, 15 bp, Homo sapiens
aagattttttgatga

SEQ ID NO: 1793374 - DNA, 15 bp, Homo sapiens
agattttttgatgat

SEQ ID NO: 1793375 - DNA, 15 bp, Homo sapiens
gattttttgatgatt

SEQ ID NO: 1793376 - DNA, 15 bp, Homo sapiens
attttttgatgattc

SEQ ID NO: 1793377 - DNA, 15 bp, Homo sapiens
ttttttgatgattca

SEQ ID NO: 1793378 - DNA, 15 bp, Homo sapiens
tttttgatgattcaa

SEQ ID NO: 1793379 - DNA, 15 bp, Homo sapiens
ttttgatgattcaac

SEQ ID NO: 1793380 - DNA, 15 bp, Homo sapiens
tttgatgattcaaca

SEQ ID NO: 1793381 - DNA, 15 bp, Homo sapiens
ttgatgattcaacaa

SEQ ID NO: 1793382 - DNA, 15 bp, Homo sapiens
tgatgattcaacaac

SEQ ID NO: 1793383 - DNA, 15 bp, Homo sapiens
gatgattcaacaaca

SEQ ID NO: 1793384 - DNA, 15 bp, Homo sapiens
atgattcaacaacaa

SEQ ID NO: 1793385 - DNA, 15 bp, Homo sapiens
tgattcaacaacaac

SEQ ID NO: 1793386 - DNA, 15 bp, Homo sapiens
gattcaacaacaaca

SEQ ID NO: 1793387 - DNA, 15 bp, Homo sapiens
ttcaacaacaacaac

SEQ ID NO: 1793388 - DNA, 15 bp, Homo sapiens
tcaacaacaacaaca

SEQ ID NO: 1793389 - DNA, 15 bp, Homo sapiens
caacaacaacaacaa

SEQ ID NO: 1793390 - DNA, 15 bp, Homo sapiens
aacaacaacaaaaat

SEQ ID NO: 1793391 - DNA, 15 bp, Homo sapiens
acaacaacaaaaatg

SEQ ID NO: 1793392 - DNA, 15 bp, Homo sapiens
caacaacaaaaatgg

SEQ ID NO: 1793393 - DNA, 15 bp, Homo sapiens
aacaacaaaaatggg

SEQ ID NO: 1793394 - DNA, 15 bp, Homo sapiens
acaacaaaaatggga

SEQ ID NO: 1793395 - DNA, 15 bp, Homo sapiens
caacaaaaatgggac

SEQ ID NO: 1793396 - DNA, 15 bp, Homo sapiens
aacaaaaatgggaca

SEQ ID NO: 1793397 - DNA, 15 bp, Homo sapiens
acaaaaatgggacaa

SEQ ID NO: 1793398 - DNA, 15 bp, Homo sapiens
caaaaatgggacaat

SEQ ID NO: 1793399 - DNA, 15 bp, Homo sapiens
aaaaatgggacaatg

SEQ ID NO: 1793400 - DNA, 15 bp, Homo sapiens
aaaatgggacaatga

SEQ ID NO: 1793401 - DNA, 15 bp, Homo sapiens
aaatgggacaatgaa

SEQ ID NO: 1793402 - DNA, 15 bp, Homo sapiens
aatgggacaatgaag

SEQ ID NO: 1793403 - DNA, 15 bp, Homo sapiens
atgggacaatgaagc

SEQ ID NO: 1793404 - DNA, 15 bp, Homo sapiens
tgggacaatgaagca

SEQ ID NO: 1793405 - DNA, 15 bp, Homo sapiens
gggacaatgaagcaa

SEQ ID NO: 1793406 - DNA, 15 bp, Homo sapiens
ggacaatgaagcaat

SEQ ID NO: 1793407 - DNA, 15 bp, Homo sapiens
gacaatgaagcaatg

SEQ ID NO: 1793408 - DNA, 15 bp, Homo sapiens
acaatgaagcaatgt

SEQ ID NO: 1793409 - DNA, 15 bp, Homo sapiens
caatgaagcaatgtg

SEQ ID NO: 1793410 - DNA, 15 bp, Homo sapiens
aatgaagcaatgtgc

SEQ ID NO: 1793411 - DNA, 15 bp, Homo sapiens
atgaagcaatgtgca

SEQ ID NO: 1793412 - DNA, 15 bp, Homo sapiens
tgaagcaatgtgcac

SEQ ID NO: 1793413 - DNA, 15 bp, Homo sapiens
gaagcaatgtgcaca

SEQ ID NO: 1793414 - DNA, 15 bp, Homo sapiens
aagcaatgtgcacag

SEQ ID NO: 1793415 - DNA, 15 bp, Homo sapiens
agcaatgtgcacagt

SEQ ID NO: 1793416 - DNA, 15 bp, Homo sapiens
gcaatgtgcacagtg

SEQ ID NO: 1793417 - DNA, 15 bp, Homo sapiens
caatgtgcacagtga

SEQ ID NO: 1793418 - DNA, 15 bp, Homo sapiens
aatgtgcacagtgac

SEQ ID NO: 1793419 - DNA, 15 bp, Homo sapiens
atgtgcacagtgaca

SEQ ID NO: 1793420 - DNA, 15 bp, Homo sapiens
tgtgcacagtgacag

SEQ ID NO: 1793421 - DNA, 15 bp, Homo sapiens
gtgcacagtgacagc

SEQ ID NO: 1793422 - DNA, 15 bp, Homo sapiens
tgcacagtgacagcg

SEQ ID NO: 1793423 - DNA, 15 bp, Homo sapiens
gcacagtgacagcgg

SEQ ID NO: 1793424 - DNA, 15 bp, Homo sapiens
cacagtgacagcgga

SEQ ID NO: 1793425 - DNA, 15 bp, Homo sapiens
acagtgacagcggag

SEQ ID NO: 1793426 - DNA, 15 bp, Homo sapiens
cagtgacagcggaga

SEQ ID NO: 1793427 - DNA, 15 bp, Homo sapiens
agtgacagcggagag

SEQ ID NO: 1793428 - DNA, 15 bp, Homo sapiens
gtgacagcggagagg

SEQ ID NO: 1793429 - DNA, 15 bp, Homo sapiens
tgacagcggagaggg

SEQ ID NO: 1793430 - DNA, 15 bp, Homo sapiens
gacagcggagagggc

SEQ ID NO: 1793431 - DNA, 15 bp, Homo sapiens
acagcggagagggcg

SEQ ID NO: 1793432 - DNA, 15 bp, Homo sapiens
cagcggagagggcga

SEQ ID NO: 1793433 - DNA, 15 bp, Homo sapiens
agcggagagggcgag

SEQ ID NO: 1793434 - DNA, 15 bp, Homo sapiens
gcggagagggcgagt

SEQ ID NO: 1793435 - DNA, 15 bp, Homo sapiens
cggagagggcgagtg

SEQ ID NO: 1793436 - DNA, 15 bp, Homo sapiens
ggagagggcgagtga

SEQ ID NO: 1793437 - DNA, 15 bp, Homo sapiens
gagagggcgagtgag

SEQ ID NO: 1793438 - DNA, 15 bp, Homo sapiens
agagggcgagtgagg

SEQ ID NO: 1793439 - DNA, 15 bp, Homo sapiens
gagggcgagtgaggg

SEQ ID NO: 1793440 - DNA, 15 bp, Homo sapiens
agggcgagtgagggg

SEQ ID NO: 1793441 - DNA, 15 bp, Homo sapiens
gggcgagtgaggggc

SEQ ID NO: 1793442 - DNA, 15 bp, Homo sapiens
ggcgagtgaggggca

SEQ ID NO: 1793443 - DNA, 15 bp, Homo sapiens
gcgagtgaggggcaa

SEQ ID NO: 1793444 - DNA, 15 bp, Homo sapiens
cgagtgaggggcaag

SEQ ID NO: 1793445 - DNA, 15 bp, Homo sapiens
gagtgaggggcaagg

SEQ ID NO: 1793446 - DNA, 15 bp, Homo sapiens
agtgaggggcaaggc

SEQ ID NO: 1793447 - DNA, 15 bp, Homo sapiens
gtgaggggcaaggcc

SEQ ID NO: 1793448 - DNA, 15 bp, Homo sapiens
tgaggggcaaggccg

SEQ ID NO: 1793449 - DNA, 15 bp, Homo sapiens
gaggggcaaggccga

SEQ ID NO: 1793450 - DNA, 15 bp, Homo sapiens
aggggcaaggccgaa

SEQ ID NO: 1793451 - DNA, 15 bp, Homo sapiens
ggggcaaggccgaag

SEQ ID NO: 1793452 - DNA, 15 bp, Homo sapiens
gggcaaggccgaagg

SEQ ID NO: 1793453 - DNA, 15 bp, Homo sapiens
ggcaaggccgaaggg

SEQ ID NO: 1793454 - DNA, 15 bp, Homo sapiens
gcaaggccgaagggc

SEQ ID NO: 1793455 - DNA, 15 bp, Homo sapiens
caaggccgaagggct

SEQ ID NO: 1793456 - DNA, 15 bp, Homo sapiens
aaggccgaagggctg

SEQ ID NO: 1793457 - DNA, 15 bp, Homo sapiens
aggccgaagggctga

SEQ ID NO: 1793458 - DNA, 15 bp, Homo sapiens
ggccgaagggctgat

SEQ ID NO: 1793459 - DNA, 15 bp, Homo sapiens
gccgaagggctgatc

SEQ ID NO: 1793460 - DNA, 15 bp, Homo sapiens
ccgaagggctgatct

SEQ ID NO: 1793461 - DNA, 15 bp, Homo sapiens
cgaagggctgatctg

SEQ ID NO: 1793462 - DNA, 15 bp, Homo sapiens
gaagggctgatctgc

SEQ ID NO: 1793463 - DNA, 15 bp, Homo sapiens
aagggctgatctgcc

SEQ ID NO: 1793464 - DNA, 15 bp, Homo sapiens
agggctgatctgcca

SEQ ID NO: 1793465 - DNA, 15 bp, Homo sapiens
gggctgatctgccag

SEQ ID NO: 1793466 - DNA, 15 bp, Homo sapiens
ggctgatctgccagg

SEQ ID NO: 1793467 - DNA, 15 bp, Homo sapiens
gctgatctgccagga

SEQ ID NO: 1793468 - DNA, 15 bp, Homo sapiens
ctgatctgccaggag

SEQ ID NO: 1793469 - DNA, 15 bp, Homo sapiens
tgatctgccaggagt

SEQ ID NO: 1793470 - DNA, 15 bp, Homo sapiens
gatctgccaggagtc

SEQ ID NO: 1793471 - DNA, 15 bp, Homo sapiens
atctgccaggagtcc

SEQ ID NO: 1793472 - DNA, 15 bp, Homo sapiens
tctgccaggagtcca

SEQ ID NO: 1793473 - DNA, 15 bp, Homo sapiens
ctgccaggagtccag

SEQ ID NO: 1793474 - DNA, 15 bp, Homo sapiens
tgccaggagtccagc

SEQ ID NO: 1793475 - DNA, 15 bp, Homo sapiens
gccaggagtccagca

SEQ ID NO: 1793476 - DNA, 15 bp, Homo sapiens
ccaggagtccagcat

SEQ ID NO: 1793477 - DNA, 15 bp, Homo sapiens
caggagtccagcatc

SEQ ID NO: 1793478 - DNA, 15 bp, Homo sapiens
aggagtccagcatct

SEQ ID NO: 1793479 - DNA, 15 bp, Homo sapiens
ggagtccagcatctg

SEQ ID NO: 1793480 - DNA, 15 bp, Homo sapiens
gagtccagcatctgt

SEQ ID NO: 1793481 - DNA, 15 bp, Homo sapiens
agtccagcatctgtc

SEQ ID NO: 1793482 - DNA, 15 bp, Homo sapiens
gtccagcatctgtcc

SEQ ID NO: 1793483 - DNA, 15 bp, Homo sapiens
tccagcatctgtccg

SEQ ID NO: 1793484 - DNA, 15 bp, Homo sapiens
ccagcatctgtccga

SEQ ID NO: 1793485 - DNA, 15 bp, Homo sapiens
cagcatctgtccgag

SEQ ID NO: 1793486 - DNA, 15 bp, Homo sapiens
agcatctgtccgagc

SEQ ID NO: 1793487 - DNA, 15 bp, Homo sapiens
gcatctgtccgagct

SEQ ID NO: 1793488 - DNA, 15 bp, Homo sapiens
catctgtccgagctg

SEQ ID NO: 1793489 - DNA, 15 bp, Homo sapiens
atctgtccgagctgc

SEQ ID NO: 1793490 - DNA, 15 bp, Homo sapiens
tctgtccgagctgct

SEQ ID NO: 1793491 - DNA, 15 bp, Homo sapiens
ctgtccgagctgctt

SEQ ID NO: 1793492 - DNA, 15 bp, Homo sapiens
tgtccgagctgcttt

SEQ ID NO: 1793493 - DNA, 15 bp, Homo sapiens
gtccgagctgctttc

SEQ ID NO: 1793494 - DNA, 15 bp, Homo sapiens
tccgagctgctttca

SEQ ID NO: 1793495 - DNA, 15 bp, Homo sapiens
ccgagctgctttcaa

SEQ ID NO: 1793496 - DNA, 15 bp, Homo sapiens
cgagctgctttcaat

SEQ ID NO: 1793497 - DNA, 15 bp, Homo sapiens
gagctgctttcaatc

SEQ ID NO: 1793498 - DNA, 15 bp, Homo sapiens
agctgctttcaatct

SEQ ID NO: 1793499 - DNA, 15 bp, Homo sapiens
gctgctttcaatctc

SEQ ID NO: 1793500 - DNA, 15 bp, Homo sapiens
ctgctttcaatctcc

SEQ ID NO: 1793501 - DNA, 15 bp, Homo sapiens
tgctttcaatctcct

SEQ ID NO: 1793502 - DNA, 15 bp, Homo sapiens
gctttcaatctcctc

SEQ ID NO: 1793503 - DNA, 15 bp, Homo sapiens
ctttcaatctcctca

SEQ ID NO: 1793504 - DNA, 15 bp, Homo sapiens
tttcaatctcctcag

SEQ ID NO: 1793505 - DNA, 15 bp, Homo sapiens
ttcaatctcctcagg

SEQ ID NO: 1793506 - DNA, 15 bp, Homo sapiens
tcaatctcctcagga

SEQ ID NO: 1793507 - DNA, 15 bp, Homo sapiens
caatctcctcaggag

SEQ ID NO: 1793508 - DNA, 15 bp, Homo sapiens
aatctcctcaggagc

SEQ ID NO: 1793509 - DNA, 15 bp, Homo sapiens
atctcctcaggagct

SEQ ID NO: 1793510 - DNA, 15 bp, Homo sapiens
tctcctcaggagctt

SEQ ID NO: 1793511 - DNA, 15 bp, Homo sapiens
ctcctcaggagcttg

SEQ ID NO: 1793512 - DNA, 15 bp, Homo sapiens
tcctcaggagcttgg

SEQ ID NO: 1793513 - DNA, 15 bp, Homo sapiens
cctcaggagcttggg

SEQ ID NO: 1793514 - DNA, 15 bp, Homo sapiens
ctcaggagcttgggg

SEQ ID NO: 1793515 - DNA, 15 bp, Homo sapiens
tcaggagcttggggc

SEQ ID NO: 1793516 - DNA, 15 bp, Homo sapiens
caggagcttggggca

SEQ ID NO: 1793517 - DNA, 15 bp, Homo sapiens
aggagcttggggcac

SEQ ID NO: 1793518 - DNA, 15 bp, Homo sapiens
ggagcttggggcaca

SEQ ID NO: 1793519 - DNA, 15 bp, Homo sapiens
gagcttggggcacag

SEQ ID NO: 1793520 - DNA, 15 bp, Homo sapiens
agcttggggcacaga

SEQ ID NO: 1793521 - DNA, 15 bp, Homo sapiens
gcttggggcacagac

SEQ ID NO: 1793522 - DNA, 15 bp, Homo sapiens
cttggggcacagacc

SEQ ID NO: 1793523 - DNA, 15 bp, Homo sapiens
ttggggcacagacct

SEQ ID NO: 1793524 - DNA, 15 bp, Homo sapiens
tggggcacagacctt

SEQ ID NO: 1793525 - DNA, 15 bp, Homo sapiens
ggggcacagaccttc

SEQ ID NO: 1793526 - DNA, 15 bp, Homo sapiens
gggcacagaccttct

SEQ ID NO: 1793527 - DNA, 15 bp, Homo sapiens
ggcacagaccttctt

SEQ ID NO: 1793528 - DNA, 15 bp, Homo sapiens
gcacagaccttctta

SEQ ID NO: 1793529 - DNA, 15 bp, Homo sapiens
cacagaccttcttac

SEQ ID NO: 1793530 - DNA, 15 bp, Homo sapiens
acagaccttcttacc

SEQ ID NO: 1793531 - DNA, 15 bp, Homo sapiens
cagaccttcttacct

SEQ ID NO: 1793532 - DNA, 15 bp, Homo sapiens
agaccttcttacctc

SEQ ID NO: 1793533 - DNA, 15 bp, Homo sapiens
gaccttcttacctcc

SEQ ID NO: 1793534 - DNA, 15 bp, Homo sapiens
accttcttacctcct

SEQ ID NO: 1793535 - DNA, 15 bp, Homo sapiens
ccttcttacctcctc

SEQ ID NO: 1793536 - DNA, 15 bp, Homo sapiens
cttcttacctcctct

SEQ ID NO: 1793537 - DNA, 15 bp, Homo sapiens
ttcttacctcctctc

SEQ ID NO: 1793538 - DNA, 15 bp, Homo sapiens
tcttacctcctctcc

SEQ ID NO: 1793539 - DNA, 15 bp, Homo sapiens
cttacctcctctccc

SEQ ID NO: 1793540 - DNA, 15 bp, Homo sapiens
ttacctcctctccct

SEQ ID NO: 1793541 - DNA, 15 bp, Homo sapiens
tacctcctctccctc

SEQ ID NO: 1793542 - DNA, 15 bp, Homo sapiens
acctcctctccctca

SEQ ID NO: 1793543 - DNA, 15 bp, Homo sapiens
cctcctctccctcaa

SEQ ID NO: 1793544 - DNA, 15 bp, Homo sapiens
ctcctctccctcaac

SEQ ID NO: 1793545 - DNA, 15 bp, Homo sapiens
tcctctccctcaacc

SEQ ID NO: 1793546 - DNA, 15 bp, Homo sapiens
cctctccctcaacct

SEQ ID NO: 1793547 - DNA, 15 bp, Homo sapiens
ctctccctcaacctc

SEQ ID NO: 1793548 - DNA, 15 bp, Homo sapiens
tctccctcaacctcc

SEQ ID NO: 1793549 - DNA, 15 bp, Homo sapiens
ctccctcaacctccc

SEQ ID NO: 1793550 - DNA, 15 bp, Homo sapiens
tccctcaacctccct

SEQ ID NO: 1793551 - DNA, 15 bp, Homo sapiens
ccctcaacctccctc

SEQ ID NO: 1793552 - DNA, 15 bp, Homo sapiens
cctcaacctccctcc

SEQ ID NO: 1793553 - DNA, 15 bp, Homo sapiens
ctcaacctccctcct

SEQ ID NO: 1793554 - DNA, 15 bp, Homo sapiens
tcaacctccctcctg

SEQ ID NO: 1793555 - DNA, 15 bp, Homo sapiens
caacctccctcctgc

SEQ ID NO: 1793556 - DNA, 15 bp, Homo sapiens
aacctccctcctgct

SEQ ID NO: 1793557 - DNA, 15 bp, Homo sapiens
acctccctcctgctt

SEQ ID NO: 1793558 - DNA, 15 bp, Homo sapiens
cctccctcctgcttg

SEQ ID NO: 1793559 - DNA, 15 bp, Homo sapiens
ctccctcctgcttgg

SEQ ID NO: 1793560 - DNA, 15 bp, Homo sapiens
tccctcctgcttggg

SEQ ID NO: 1793561 - DNA, 15 bp, Homo sapiens
ccctcctgcttgggg

SEQ ID NO: 1793562 - DNA, 15 bp, Homo sapiens
cctcctgcttggggg

SEQ ID NO: 1793563 - DNA, 15 bp, Homo sapiens
ctcctgcttgggggc

SEQ ID NO: 1793564 - DNA, 15 bp, Homo sapiens
tcctgcttgggggct

SEQ ID NO: 1793565 - DNA, 15 bp, Homo sapiens
cctgcttgggggctt

SEQ ID NO: 1793566 - DNA, 15 bp, Homo sapiens
ctgcttgggggcttt

SEQ ID NO: 1793567 - DNA, 15 bp, Homo sapiens
tgcttgggggctttg

SEQ ID NO: 1793568 - DNA, 15 bp, Homo sapiens
gcttgggggctttgg

SEQ ID NO: 1793569 - DNA, 15 bp, Homo sapiens
cttgggggctttggc

SEQ ID NO: 1793570 - DNA, 15 bp, Homo sapiens
ttgggggctttggca

SEQ ID NO: 1793571 - DNA, 15 bp, Homo sapiens
tgggggctttggcaa

SEQ ID NO: 1793572 - DNA, 15 bp, Homo sapiens
gggggctttggcaac

SEQ ID NO: 1793573 - DNA, 15 bp, Homo sapiens
ggggctttggcaact

SEQ ID NO: 1793574 - DNA, 15 bp, Homo sapiens
gggctttggcaactg

SEQ ID NO: 1793575 - DNA, 15 bp, Homo sapiens
ggctttggcaactgg

SEQ ID NO: 1793576 - DNA, 15 bp, Homo sapiens
gctttggcaactggg

SEQ ID NO: 1793577 - DNA, 15 bp, Homo sapiens
ctttggcaactgggg

SEQ ID NO: 1793578 - DNA, 15 bp, Homo sapiens
tttggcaactggggt

SEQ ID NO: 1793579 - DNA, 15 bp, Homo sapiens
ttggcaactggggtt

SEQ ID NO: 1793580 - DNA, 15 bp, Homo sapiens
tggcaactggggttg

SEQ ID NO: 1793581 - DNA, 15 bp, Homo sapiens
ggcaactggggttga

SEQ ID NO: 1793582 - DNA, 15 bp, Homo sapiens
gcaactggggttgag

SEQ ID NO: 1793583 - DNA, 15 bp, Homo sapiens
caactggggttgagg

SEQ ID NO: 1793584 - DNA, 15 bp, Homo sapiens
aactggggttgaggt

SEQ ID NO: 1793585 - DNA, 15 bp, Homo sapiens
actggggttgaggtg

SEQ ID NO: 1793586 - DNA, 15 bp, Homo sapiens
ctggggttgaggtgg

SEQ ID NO: 1793587 - DNA, 15 bp, Homo sapiens
tggggttgaggtggg

SEQ ID NO: 1793588 - DNA, 15 bp, Homo sapiens
ggggttgaggtggga

SEQ ID NO: 1793589 - DNA, 15 bp, Homo sapiens
gggttgaggtgggaa

SEQ ID NO: 1793590 - DNA, 15 bp, Homo sapiens
ggttgaggtgggaat

SEQ ID NO: 1793591 - DNA, 15 bp, Homo sapiens
gttgaggtgggaatg

SEQ ID NO: 1793592 - DNA, 15 bp, Homo sapiens
ttgaggtgggaatgg

SEQ ID NO: 1793593 - DNA, 15 bp, Homo sapiens
tgaggtgggaatgga

SEQ ID NO: 1793594 - DNA, 15 bp, Homo sapiens
gaggtgggaatggaa

SEQ ID NO: 1793595 - DNA, 15 bp, Homo sapiens
aggtgggaatggaac

SEQ ID NO: 1793596 - DNA, 15 bp, Homo sapiens
ggtgggaatggaact

SEQ ID NO: 1793597 - DNA, 15 bp, Homo sapiens
gtgggaatggaactc

SEQ ID NO: 1793598 - DNA, 15 bp, Homo sapiens
tgggaatggaactct

SEQ ID NO: 1793599 - DNA, 15 bp, Homo sapiens
gggaatggaactctg

SEQ ID NO: 1793600 - DNA, 15 bp, Homo sapiens
ggaatggaactctgg

SEQ ID NO: 1793601 - DNA, 15 bp, Homo sapiens
gaatggaactctgga

SEQ ID NO: 1793602 - DNA, 15 bp, Homo sapiens
aatggaactctggag

SEQ ID NO: 1793603 - DNA, 15 bp, Homo sapiens
atggaactctggagt

SEQ ID NO: 1793604 - DNA, 15 bp, Homo sapiens
tggaactctggagtt

SEQ ID NO: 1793605 - DNA, 15 bp, Homo sapiens
ggaactctggagttc

SEQ ID NO: 1793606 - DNA, 15 bp, Homo sapiens
gaactctggagttct

SEQ ID NO: 1793607 - DNA, 15 bp, Homo sapiens
aactctggagttcta

SEQ ID NO: 1793608 - DNA, 15 bp, Homo sapiens
actctggagttctac

SEQ ID NO: 1793609 - DNA, 15 bp, Homo sapiens
ctctggagttctact

SEQ ID NO: 1793610 - DNA, 15 bp, Homo sapiens
tctggagttctactc

SEQ ID NO: 1793611 - DNA, 15 bp, Homo sapiens
ctggagttctactca

SEQ ID NO: 1793612 - DNA, 15 bp, Homo sapiens
tggagttctactcac

SEQ ID NO: 1793613 - DNA, 15 bp, Homo sapiens
ggagttctactcact

SEQ ID NO: 1793614 - DNA, 15 bp, Homo sapiens
gagttctactcactg

SEQ ID NO: 1793615 - DNA, 15 bp, Homo sapiens
agttctactcactgg

SEQ ID NO: 1793616 - DNA, 15 bp, Homo sapiens
gttctactcactggc

SEQ ID NO: 1793617 - DNA, 15 bp, Homo sapiens
ttctactcactggct

SEQ ID NO: 1793618 - DNA, 15 bp, Homo sapiens
tctactcactggctt

SEQ ID NO: 1793619 - DNA, 15 bp, Homo sapiens
ctactcactggcttg

SEQ ID NO: 1793620 - DNA, 15 bp, Homo sapiens
tactcactggcttgc

SEQ ID NO: 1793621 - DNA, 15 bp, Homo sapiens
actcactggcttgct

SEQ ID NO: 1793622 - DNA, 15 bp, Homo sapiens
ctcactggcttgctc

SEQ ID NO: 1793623 - DNA, 15 bp, Homo sapiens
tcactggcttgctct

SEQ ID NO: 1793624 - DNA, 15 bp, Homo sapiens
cactggcttgctctc

SEQ ID NO: 1793625 - DNA, 15 bp, Homo sapiens
actggcttgctctct

SEQ ID NO: 1793626 - DNA, 15 bp, Homo sapiens
ctggcttgctctctc

SEQ ID NO: 1793627 - DNA, 15 bp, Homo sapiens
tggcttgctctctca

SEQ ID NO: 1793628 - DNA, 15 bp, Homo sapiens
ggcttgctctctcaa

SEQ ID NO: 1793629 - DNA, 15 bp, Homo sapiens
gcttgctctctcaat

SEQ ID NO: 1793630 - DNA, 15 bp, Homo sapiens
cttgctctctcaatt

SEQ ID NO: 1793631 - DNA, 15 bp, Homo sapiens
ttgctctctcaattt

SEQ ID NO: 1793632 - DNA, 15 bp, Homo sapiens
tgctctctcaatttg

SEQ ID NO: 1793633 - DNA, 15 bp, Homo sapiens
gctctctcaatttga

SEQ ID NO: 1793634 - DNA, 15 bp, Homo sapiens
ctctctcaatttgac

SEQ ID NO: 1793635 - DNA, 15 bp, Homo sapiens
tctctcaatttgaca

SEQ ID NO: 1793636 - DNA, 15 bp, Homo sapiens
ctctcaatttgacaa

SEQ ID NO: 1793637 - DNA, 15 bp, Homo sapiens
tctcaatttgacaac

SEQ ID NO: 1793638 - DNA, 15 bp, Homo sapiens
ctcaatttgacaaca

SEQ ID NO: 1793639 - DNA, 15 bp, Homo sapiens
tcaatttgacaacat

SEQ ID NO: 1793640 - DNA, 15 bp, Homo sapiens
caatttgacaacata

SEQ ID NO: 1793641 - DNA, 15 bp, Homo sapiens
aatttgacaacatat

SEQ ID NO: 1793642 - DNA, 15 bp, Homo sapiens
atttgacaacatatt

SEQ ID NO: 1793643 - DNA, 15 bp, Homo sapiens
tttgacaacatattg

SEQ ID NO: 1793644 - DNA, 15 bp, Homo sapiens
ttgacaacatattgt

SEQ ID NO: 1793645 - DNA, 15 bp, Homo sapiens
tgacaacatattgtg

SEQ ID NO: 1793646 - DNA, 15 bp, Homo sapiens
gacaacatattgtga

SEQ ID NO: 1793647 - DNA, 15 bp, Homo sapiens
acaacatattgtgaa

SEQ ID NO: 1793648 - DNA, 15 bp, Homo sapiens
caacatattgtgaaa

SEQ ID NO: 1793649 - DNA, 15 bp, Homo sapiens
aacatattgtgaaat

SEQ ID NO: 1793650 - DNA, 15 bp, Homo sapiens
acatattgtgaaata

SEQ ID NO: 1793651 - DNA, 15 bp, Homo sapiens
catattgtgaaatat

SEQ ID NO: 1793652 - DNA, 15 bp, Homo sapiens
atattgtgaaatatc

SEQ ID NO: 1793653 - DNA, 15 bp, Homo sapiens
tattgtgaaatatcg

SEQ ID NO: 1793654 - DNA, 15 bp, Homo sapiens
attgtgaaatatcgt

SEQ ID NO: 1793655 - DNA, 15 bp, Homo sapiens
ttgtgaaatatcgta

SEQ ID NO: 1793656 - DNA, 15 bp, Homo sapiens
tgtgaaatatcgtac

SEQ ID NO: 1793657 - DNA, 15 bp, Homo sapiens
gtgaaatatcgtaca

SEQ ID NO: 1793658 - DNA, 15 bp, Homo sapiens
tgaaatatcgtacac

SEQ ID NO: 1793659 - DNA, 15 bp, Homo sapiens
gaaatatcgtacaca

SEQ ID NO: 1793660 - DNA, 15 bp, Homo sapiens
aaatatcgtacacaa

SEQ ID NO: 1793661 - DNA, 15 bp, Homo sapiens
aatatcgtacacaaa

SEQ ID NO: 1793662 - DNA, 15 bp, Homo sapiens
atatcgtacacaaat

SEQ ID NO: 1793663 - DNA, 15 bp, Homo sapiens
tatcgtacacaaatc

SEQ ID NO: 1793664 - DNA, 15 bp, Homo sapiens
atcgtacacaaatca

SEQ ID NO: 1793665 - DNA, 15 bp, Homo sapiens
tcgtacacaaatcag

SEQ ID NO: 1793666 - DNA, 15 bp, Homo sapiens
cgtacacaaatcagc

SEQ ID NO: 1793667 - DNA, 15 bp, Homo sapiens
gtacacaaatcagct

SEQ ID NO: 1793668 - DNA, 15 bp, Homo sapiens
tacacaaatcagctt

SEQ ID NO: 1793669 - DNA, 15 bp, Homo sapiens
acacaaatcagctta

SEQ ID NO: 1793670 - DNA, 15 bp, Homo sapiens
cacaaatcagcttaa

SEQ ID NO: 1793671 - DNA, 15 bp, Homo sapiens
acaaatcagcttaaa

SEQ ID NO: 1793672 - DNA, 15 bp, Homo sapiens
caaatcagcttaaag

SEQ ID NO: 1793673 - DNA, 15 bp, Homo sapiens
aaatcagcttaaaga

SEQ ID NO: 1793674 - DNA, 15 bp, Homo sapiens
aatcagcttaaagaa

SEQ ID NO: 1793675 - DNA, 15 bp, Homo sapiens
atcagcttaaagaac

SEQ ID NO: 1793676 - DNA, 15 bp, Homo sapiens
tcagcttaaagaact

SEQ ID NO: 1793677 - DNA, 15 bp, Homo sapiens
cagcttaaagaactc

SEQ ID NO: 1793678 - DNA, 15 bp, Homo sapiens
agcttaaagaactct

SEQ ID NO: 1793679 - DNA, 15 bp, Homo sapiens
gcttaaagaactctc

SEQ ID NO: 1793680 - DNA, 15 bp, Homo sapiens
cttaaagaactctca

SEQ ID NO: 1793681 - DNA, 15 bp, Homo sapiens
ttaaagaactctcat

SEQ ID NO: 1793682 - DNA, 15 bp, Homo sapiens
taaagaactctcatg

SEQ ID NO: 1793683 - DNA, 15 bp, Homo sapiens
aaagaactctcatgt

SEQ ID NO: 1793684 - DNA, 15 bp, Homo sapiens
aagaactctcatgta

SEQ ID NO: 1793685 - DNA, 15 bp, Homo sapiens
agaactctcatgtac

SEQ ID NO: 1793686 - DNA, 15 bp, Homo sapiens
gaactctcatgtaca

SEQ ID NO: 1793687 - DNA, 15 bp, Homo sapiens
aactctcatgtacac

SEQ ID NO: 1793688 - DNA, 15 bp, Homo sapiens
actctcatgtacaca

SEQ ID NO: 1793689 - DNA, 15 bp, Homo sapiens
ctctcatgtacacac

SEQ ID NO: 1793690 - DNA, 15 bp, Homo sapiens
tctcatgtacacacc

SEQ ID NO: 1793691 - DNA, 15 bp, Homo sapiens
ctcatgtacacacca

SEQ ID NO: 1793692 - DNA, 15 bp, Homo sapiens
tcatgtacacaccac

SEQ ID NO: 1793693 - DNA, 15 bp, Homo sapiens
catgtacacaccacc

SEQ ID NO: 1793694 - DNA, 15 bp, Homo sapiens
atgtacacaccacca

SEQ ID NO: 1793695 - DNA, 15 bp, Homo sapiens
tgtacacaccaccaa

SEQ ID NO: 1793696 - DNA, 15 bp, Homo sapiens
gtacacaccaccaat

SEQ ID NO: 1793697 - DNA, 15 bp, Homo sapiens
tacacaccaccaatt

SEQ ID NO: 1793698 - DNA, 15 bp, Homo sapiens
acacaccaccaatta

SEQ ID NO: 1793699 - DNA, 15 bp, Homo sapiens
cacaccaccaattac

SEQ ID NO: 1793700 - DNA, 15 bp, Homo sapiens
acaccaccaattacc

SEQ ID NO: 1793701 - DNA, 15 bp, Homo sapiens
caccaccaattacca

SEQ ID NO: 1793702 - DNA, 15 bp, Homo sapiens
accaccaattaccaa

SEQ ID NO: 1793703 - DNA, 15 bp, Homo sapiens
ccaccaattaccaaa

SEQ ID NO: 1793704 - DNA, 15 bp, Homo sapiens
caccaattaccaaaa

SEQ ID NO: 1793705 - DNA, 15 bp, Homo sapiens
accaattaccaaaag

SEQ ID NO: 1793706 - DNA, 15 bp, Homo sapiens
ccaattaccaaaagc

SEQ ID NO: 1793707 - DNA, 15 bp, Homo sapiens
caattaccaaaagct

SEQ ID NO: 1793708 - DNA, 15 bp, Homo sapiens
aattaccaaaagctt

SEQ ID NO: 1793709 - DNA, 15 bp, Homo sapiens
attaccaaaagcttt

SEQ ID NO: 1793710 - DNA, 15 bp, Homo sapiens
ttaccaaaagctttg

SEQ ID NO: 1793711 - DNA, 15 bp, Homo sapiens
taccaaaagctttga

SEQ ID NO: 1793712 - DNA, 15 bp, Homo sapiens
accaaaagctttgaa

SEQ ID NO: 1793713 - DNA, 15 bp, Homo sapiens
ccaaaagctttgaag

SEQ ID NO: 1793714 - DNA, 15 bp, Homo sapiens
caaaagctttgaagc

SEQ ID NO: 1793715 - DNA, 15 bp, Homo sapiens
aaaagctttgaagct

SEQ ID NO: 1793716 - DNA, 15 bp, Homo sapiens
aaagctttgaagctt

SEQ ID NO: 1793717 - DNA, 15 bp, Homo sapiens
aagctttgaagcttg

SEQ ID NO: 1793718 - DNA, 15 bp, Homo sapiens
agctttgaagcttga

SEQ ID NO: 1793719 - DNA, 15 bp, Homo sapiens
gctttgaagcttgat

SEQ ID NO: 1793720 - DNA, 15 bp, Homo sapiens
ctttgaagcttgatc

SEQ ID NO: 1793721 - DNA, 15 bp, Homo sapiens
tttgaagcttgatcc

SEQ ID NO: 1793722 - DNA, 15 bp, Homo sapiens
ttgaagcttgatccc

SEQ ID NO: 1793723 - DNA, 15 bp, Homo sapiens
tgaagcttgatcccc

SEQ ID NO: 1793724 - DNA, 15 bp, Homo sapiens
gaagcttgatccccg

SEQ ID NO: 1793725 - DNA, 15 bp, Homo sapiens
aagcttgatccccgc

SEQ ID NO: 1793726 - DNA, 15 bp, Homo sapiens
agcttgatccccgca

SEQ ID NO: 1793727 - DNA, 15 bp, Homo sapiens
gcttgatccccgcac

SEQ ID NO: 1793728 - DNA, 15 bp, Homo sapiens
cttgatccccgcact

SEQ ID NO: 1793729 - DNA, 15 bp, Homo sapiens
ttgatccccgcactc

SEQ ID NO: 1793730 - DNA, 15 bp, Homo sapiens
tgatccccgcactcc

SEQ ID NO: 1793731 - DNA, 15 bp, Homo sapiens
gatccccgcactcct

SEQ ID NO: 1793732 - DNA, 15 bp, Homo sapiens
atccccgcactccta

SEQ ID NO: 1793733 - DNA, 15 bp, Homo sapiens
tccccgcactcctac

SEQ ID NO: 1793734 - DNA, 15 bp, Homo sapiens
ccccgcactcctact

SEQ ID NO: 1793735 - DNA, 15 bp, Homo sapiens
cccgcactcctactg

SEQ ID NO: 1793736 - DNA, 15 bp, Homo sapiens
ccgcactcctactgt

SEQ ID NO: 1793737 - DNA, 15 bp, Homo sapiens
cgcactcctactgtg

SEQ ID NO: 1793738 - DNA, 15 bp, Homo sapiens
gcactcctactgtgt

SEQ ID NO: 1793739 - DNA, 15 bp, Homo sapiens
cactcctactgtgtc

SEQ ID NO: 1793740 - DNA, 15 bp, Homo sapiens
actcctactgtgtcc

SEQ ID NO: 1793741 - DNA, 15 bp, Homo sapiens
ctcctactgtgtccc

SEQ ID NO: 1793742 - DNA, 15 bp, Homo sapiens
tcctactgtgtcccc

SEQ ID NO: 1793743 - DNA, 15 bp, Homo sapiens
cctactgtgtcccct

SEQ ID NO: 1793744 - DNA, 15 bp, Homo sapiens
ctactgtgtcccctt

SEQ ID NO: 1793745 - DNA, 15 bp, Homo sapiens
tactgtgtccccttt

SEQ ID NO: 1793746 - DNA, 15 bp, Homo sapiens
actgtgtcccctttc

SEQ ID NO: 1793747 - DNA, 15 bp, Homo sapiens
ctgtgtcccctttct

SEQ ID NO: 1793748 - DNA, 15 bp, Homo sapiens
tgtgtcccctttctc

SEQ ID NO: 1793749 - DNA, 15 bp, Homo sapiens
gtgtcccctttctcc

SEQ ID NO: 1793750 - DNA, 15 bp, Homo sapiens
tgtcccctttctcct

SEQ ID NO: 1793751 - DNA, 15 bp, Homo sapiens
gtcccctttctcctt

SEQ ID NO: 1793752 - DNA, 15 bp, Homo sapiens
tcccctttctccttt

SEQ ID NO: 1793753 - DNA, 15 bp, Homo sapiens
cccctttctcctttc

SEQ ID NO: 1793754 - DNA, 15 bp, Homo sapiens
ccctttctcctttca

SEQ ID NO: 1793755 - DNA, 15 bp, Homo sapiens
cctttctcctttcat

SEQ ID NO: 1793756 - DNA, 15 bp, Homo sapiens
ctttctcctttcatc

SEQ ID NO: 1793757 - DNA, 15 bp, Homo sapiens
tttctcctttcatct

SEQ ID NO: 1793758 - DNA, 15 bp, Homo sapiens
ttctcctttcatctc

SEQ ID NO: 1793759 - DNA, 15 bp, Homo sapiens
tctcctttcatctct

SEQ ID NO: 1793760 - DNA, 15 bp, Homo sapiens
ctcctttcatctctc

SEQ ID NO: 1793761 - DNA, 15 bp, Homo sapiens
tcctttcatctctcc

SEQ ID NO: 1793762 - DNA, 15 bp, Homo sapiens
cctttcatctctccc

SEQ ID NO: 1793763 - DNA, 15 bp, Homo sapiens
ctttcatctctcccc

SEQ ID NO: 1793764 - DNA, 15 bp, Homo sapiens
tttcatctctccccg

SEQ ID NO: 1793765 - DNA, 15 bp, Homo sapiens
ttcatctctccccgc

SEQ ID NO: 1793766 - DNA, 15 bp, Homo sapiens
tcatctctccccgct

SEQ ID NO: 1793767 - DNA, 15 bp, Homo sapiens
catctctccccgctc

SEQ ID NO: 1793768 - DNA, 15 bp, Homo sapiens
atctctccccgctcc

SEQ ID NO: 1793769 - DNA, 15 bp, Homo sapiens
tctctccccgctccc

SEQ ID NO: 1793770 - DNA, 15 bp, Homo sapiens
tctccccgctcccca

SEQ ID NO: 1793771 - DNA, 15 bp, Homo sapiens
ctccccgctccccag

SEQ ID NO: 1793772 - DNA, 15 bp, Homo sapiens
tccccgctccccaga

SEQ ID NO: 1793773 - DNA, 15 bp, Homo sapiens
ccccgctccccagag

SEQ ID NO: 1793774 - DNA, 15 bp, Homo sapiens
cccgctccccagaga

SEQ ID NO: 1793775 - DNA, 15 bp, Homo sapiens
ccgctccccagagat

SEQ ID NO: 1793776 - DNA, 15 bp, Homo sapiens
cgctccccagagata

SEQ ID NO: 1793777 - DNA, 15 bp, Homo sapiens
gctccccagagataa

SEQ ID NO: 1793778 - DNA, 15 bp, Homo sapiens
ctccccagagataac

SEQ ID NO: 1793779 - DNA, 15 bp, Homo sapiens
tccccagagataacc

SEQ ID NO: 1793780 - DNA, 15 bp, Homo sapiens
ccccagagataaccc

SEQ ID NO: 1793781 - DNA, 15 bp, Homo sapiens
cccagagataacccc

SEQ ID NO: 1793782 - DNA, 15 bp, Homo sapiens
ccagagataacccct

SEQ ID NO: 1793783 - DNA, 15 bp, Homo sapiens
cagagataacccctc

SEQ ID NO: 1793784 - DNA, 15 bp, Homo sapiens
agagataacccctct

SEQ ID NO: 1793785 - DNA, 15 bp, Homo sapiens
gagataacccctctc

SEQ ID NO: 1793786 - DNA, 15 bp, Homo sapiens
agataacccctctcc

SEQ ID NO: 1793787 - DNA, 15 bp, Homo sapiens
gataacccctctcct

SEQ ID NO: 1793788 - DNA, 15 bp, Homo sapiens
ataacccctctcctg

SEQ ID NO: 1793789 - DNA, 15 bp, Homo sapiens
taacccctctcctga

SEQ ID NO: 1793790 - DNA, 15 bp, Homo sapiens
aacccctctcctgaa

SEQ ID NO: 1793791 - DNA, 15 bp, Homo sapiens
acccctctcctgaat

SEQ ID NO: 1793792 - DNA, 15 bp, Homo sapiens
cccctctcctgaatt

SEQ ID NO: 1793793 - DNA, 15 bp, Homo sapiens
ccctctcctgaatta

SEQ ID NO: 1793794 - DNA, 15 bp, Homo sapiens
cctctcctgaattag

SEQ ID NO: 1793795 - DNA, 15 bp, Homo sapiens
ctctcctgaattagg

SEQ ID NO: 1793796 - DNA, 15 bp, Homo sapiens
tctcctgaattaggt

SEQ ID NO: 1793797 - DNA, 15 bp, Homo sapiens
ctcctgaattaggtg

SEQ ID NO: 1793798 - DNA, 15 bp, Homo sapiens
tcctgaattaggtgt

SEQ ID NO: 1793799 - DNA, 15 bp, Homo sapiens
cctgaattaggtgtt

SEQ ID NO: 1793800 - DNA, 15 bp, Homo sapiens
ctgaattaggtgttt

SEQ ID NO: 1793801 - DNA, 15 bp, Homo sapiens
tgaattaggtgttta

SEQ ID NO: 1793802 - DNA, 15 bp, Homo sapiens
gaattaggtgtttat

SEQ ID NO: 1793803 - DNA, 15 bp, Homo sapiens
aattaggtgtttatc

SEQ ID NO: 1793804 - DNA, 15 bp, Homo sapiens
attaggtgtttatct

SEQ ID NO: 1793805 - DNA, 15 bp, Homo sapiens
ttaggtgtttatctt

SEQ ID NO: 1793806 - DNA, 15 bp, Homo sapiens
taggtgtttatcttt

SEQ ID NO: 1793807 - DNA, 15 bp, Homo sapiens
aggtgtttatctttc

SEQ ID NO: 1793808 - DNA, 15 bp, Homo sapiens
ggtgtttatctttcc

SEQ ID NO: 1793809 - DNA, 15 bp, Homo sapiens
gtgtttatctttccc

SEQ ID NO: 1793810 - DNA, 15 bp, Homo sapiens
tgtttatctttccca

SEQ ID NO: 1793811 - DNA, 15 bp, Homo sapiens
gtttatctttcccat

SEQ ID NO: 1793812 - DNA, 15 bp, Homo sapiens
tttatctttcccatt

SEQ ID NO: 1793813 - DNA, 15 bp, Homo sapiens
ttatctttcccattt

SEQ ID NO: 1793814 - DNA, 15 bp, Homo sapiens
tatctttcccatttt

SEQ ID NO: 1793815 - DNA, 15 bp, Homo sapiens
atctttcccattttt

SEQ ID NO: 1793816 - DNA, 15 bp, Homo sapiens
tctttcccatttttt

SEQ ID NO: 1793817 - DNA, 15 bp, Homo sapiens
ctttcccattttttt

SEQ ID NO: 1793818 - DNA, 15 bp, Homo sapiens
tttcccatttttttc

SEQ ID NO: 1793819 - DNA, 15 bp, Homo sapiens
ttcccatttttttct

SEQ ID NO: 1793820 - DNA, 15 bp, Homo sapiens
tcccatttttttctg

SEQ ID NO: 1793821 - DNA, 15 bp, Homo sapiens
cccatttttttctgt

SEQ ID NO: 1793822 - DNA, 15 bp, Homo sapiens
ccatttttttctgta

SEQ ID NO: 1793823 - DNA, 15 bp, Homo sapiens
catttttttctgtat

SEQ ID NO: 1793824 - DNA, 15 bp, Homo sapiens
atttttttctgtata

SEQ ID NO: 1793825 - DNA, 15 bp, Homo sapiens
tttttttctgtataa

SEQ ID NO: 1793826 - DNA, 15 bp, Homo sapiens
ttttttctgtataat

SEQ ID NO: 1793827 - DNA, 15 bp, Homo sapiens
tttttctgtataatt

SEQ ID NO: 1793828 - DNA, 15 bp, Homo sapiens
ttttctgtataattt

SEQ ID NO: 1793829 - DNA, 15 bp, Homo sapiens
tttctgtataatttt

SEQ ID NO: 1793830 - DNA, 15 bp, Homo sapiens
ttctgtataattttg

SEQ ID NO: 1793831 - DNA, 15 bp, Homo sapiens
tctgtataattttgg

SEQ ID NO: 1793832 - DNA, 15 bp, Homo sapiens
ctgtataattttggg

SEQ ID NO: 1793833 - DNA, 15 bp, Homo sapiens
tgtataattttgggt

SEQ ID NO: 1793834 - DNA, 15 bp, Homo sapiens
gtataattttgggtc

SEQ ID NO: 1793835 - DNA, 15 bp, Homo sapiens
tataattttgggtct

SEQ ID NO: 1793836 - DNA, 15 bp, Homo sapiens
ataattttgggtctt

SEQ ID NO: 1793837 - DNA, 15 bp, Homo sapiens
taattttgggtcttt

SEQ ID NO: 1793838 - DNA, 15 bp, Homo sapiens
aattttgggtcttta

SEQ ID NO: 1793839 - DNA, 15 bp, Homo sapiens
attttgggtctttat

SEQ ID NO: 1793840 - DNA, 15 bp, Homo sapiens
ttttgggtctttatg

SEQ ID NO: 1793841 - DNA, 15 bp, Homo sapiens
tttgggtctttatgg

SEQ ID NO: 1793842 - DNA, 15 bp, Homo sapiens
ttgggtctttatggt

SEQ ID NO: 1793843 - DNA, 15 bp, Homo sapiens
tgggtctttatggtg

SEQ ID NO: 1793844 - DNA, 15 bp, Homo sapiens
gggtctttatggtga

SEQ ID NO: 1793845 - DNA, 15 bp, Homo sapiens
ggtctttatggtgat

SEQ ID NO: 1793846 - DNA, 15 bp, Homo sapiens
gtctttatggtgata

SEQ ID NO: 1793847 - DNA, 15 bp, Homo sapiens
tctttatggtgataa

SEQ ID NO: 1793848 - DNA, 15 bp, Homo sapiens
ctttatggtgataat

SEQ ID NO: 1793849 - DNA, 15 bp, Homo sapiens
tttatggtgataatt

SEQ ID NO: 1793850 - DNA, 15 bp, Homo sapiens
ttatggtgataattc

SEQ ID NO: 1793851 - DNA, 15 bp, Homo sapiens
tatggtgataattca

SEQ ID NO: 1793852 - DNA, 15 bp, Homo sapiens
atggtgataattcaa

SEQ ID NO: 1793853 - DNA, 15 bp, Homo sapiens
tggtgataattcaaa

SEQ ID NO: 1793854 - DNA, 15 bp, Homo sapiens
ggtgataattcaaac

SEQ ID NO: 1793855 - DNA, 15 bp, Homo sapiens
gtgataattcaaaca

SEQ ID NO: 1793856 - DNA, 15 bp, Homo sapiens
tgataattcaaacat

SEQ ID NO: 1793857 - DNA, 15 bp, Homo sapiens
gataattcaaacatt

SEQ ID NO: 1793858 - DNA, 15 bp, Homo sapiens
ataattcaaacatta

SEQ ID NO: 1793859 - DNA, 15 bp, Homo sapiens
taattcaaacattaa

SEQ ID NO: 1793860 - DNA, 15 bp, Homo sapiens
aattcaaacattaag

SEQ ID NO: 1793861 - DNA, 15 bp, Homo sapiens
attcaaacattaagc

SEQ ID NO: 1793862 - DNA, 15 bp, Homo sapiens
ttcaaacattaagca

SEQ ID NO: 1793863 - DNA, 15 bp, Homo sapiens
tcaaacattaagcaa

SEQ ID NO: 1793864 - DNA, 15 bp, Homo sapiens
caaacattaagcaat

SEQ ID NO: 1793865 - DNA, 15 bp, Homo sapiens
aaacattaagcaatg

SEQ ID NO: 1793866 - DNA, 15 bp, Homo sapiens
aacattaagcaatgg

SEQ ID NO: 1793867 - DNA, 15 bp, Homo sapiens
acattaagcaatgga

SEQ ID NO: 1793868 - DNA, 15 bp, Homo sapiens
cattaagcaatggaa

SEQ ID NO: 1793869 - DNA, 15 bp, Homo sapiens
attaagcaatggaag

SEQ ID NO: 1793870 - DNA, 15 bp, Homo sapiens
ttaagcaatggaagt

SEQ ID NO: 1793871 - DNA, 15 bp, Homo sapiens
taagcaatggaagtc

SEQ ID NO: 1793872 - DNA, 15 bp, Homo sapiens
aagcaatggaagtca

SEQ ID NO: 1793873 - DNA, 15 bp, Homo sapiens
agcaatggaagtcac

SEQ ID NO: 1793874 - DNA, 15 bp, Homo sapiens
gcaatggaagtcact

SEQ ID NO: 1793875 - DNA, 15 bp, Homo sapiens
caatggaagtcactt

SEQ ID NO: 1793876 - DNA, 15 bp, Homo sapiens
aatggaagtcacttt

SEQ ID NO: 1793877 - DNA, 15 bp, Homo sapiens
atggaagtcactttc

SEQ ID NO: 1793878 - DNA, 15 bp, Homo sapiens
tggaagtcactttcg

SEQ ID NO: 1793879 - DNA, 15 bp, Homo sapiens
ggaagtcactttcgt

SEQ ID NO: 1793880 - DNA, 15 bp, Homo sapiens
gaagtcactttcgtc

SEQ ID NO: 1793881 - DNA, 15 bp, Homo sapiens
aagtcactttcgtct

SEQ ID NO: 1793882 - DNA, 15 bp, Homo sapiens
agtcactttcgtctg

SEQ ID NO: 1793883 - DNA, 15 bp, Homo sapiens
gtcactttcgtctgc

SEQ ID NO: 1793884 - DNA, 15 bp, Homo sapiens
tcactttcgtctgct

SEQ ID NO: 1793885 - DNA, 15 bp, Homo sapiens
cactttcgtctgctg

SEQ ID NO: 1793886 - DNA, 15 bp, Homo sapiens
actttcgtctgctgt

SEQ ID NO: 1793887 - DNA, 15 bp, Homo sapiens
ctttcgtctgctgtt

SEQ ID NO: 1793888 - DNA, 15 bp, Homo sapiens
tttcgtctgctgttt

SEQ ID NO: 1793889 - DNA, 15 bp, Homo sapiens
ttcgtctgctgtttt

SEQ ID NO: 1793890 - DNA, 15 bp, Homo sapiens
tcgtctgctgttttt

SEQ ID NO: 1793891 - DNA, 15 bp, Homo sapiens
cgtctgctgtttttc

SEQ ID NO: 1793892 - DNA, 15 bp, Homo sapiens
gtctgctgtttttca

SEQ ID NO: 1793893 - DNA, 15 bp, Homo sapiens
tctgctgtttttcat

SEQ ID NO: 1793894 - DNA, 15 bp, Homo sapiens
ctgctgtttttcata

SEQ ID NO: 1793895 - DNA, 15 bp, Homo sapiens
tgctgtttttcatac

SEQ ID NO: 1793896 - DNA, 15 bp, Homo sapiens
gctgtttttcatact

SEQ ID NO: 1793897 - DNA, 15 bp, Homo sapiens
ctgtttttcatactc

SEQ ID NO: 1793898 - DNA, 15 bp, Homo sapiens
tgtttttcatactct

SEQ ID NO: 1793899 - DNA, 15 bp, Homo sapiens
gtttttcatactctc

SEQ ID NO: 1793900 - DNA, 15 bp, Homo sapiens
tttttcatactctcc

SEQ ID NO: 1793901 - DNA, 15 bp, Homo sapiens
ttttcatactctccc

SEQ ID NO: 1793902 - DNA, 15 bp, Homo sapiens
tttcatactctccca

SEQ ID NO: 1793903 - DNA, 15 bp, Homo sapiens
ttcatactctcccag

SEQ ID NO: 1793904 - DNA, 15 bp, Homo sapiens
tcatactctcccaga

SEQ ID NO: 1793905 - DNA, 15 bp, Homo sapiens
catactctcccagaa

SEQ ID NO: 1793906 - DNA, 15 bp, Homo sapiens
atactctcccagaac

SEQ ID NO: 1793907 - DNA, 15 bp, Homo sapiens
tactctcccagaact

SEQ ID NO: 1793908 - DNA, 15 bp, Homo sapiens
actctcccagaactc

SEQ ID NO: 1793909 - DNA, 15 bp, Homo sapiens
ctctcccagaactct

SEQ ID NO: 1793910 - DNA, 15 bp, Homo sapiens
tctcccagaactcta

SEQ ID NO: 1793911 - DNA, 15 bp, Homo sapiens
ctcccagaactctaa

SEQ ID NO: 1793912 - DNA, 15 bp, Homo sapiens
tcccagaactctaag

SEQ ID NO: 1793913 - DNA, 15 bp, Homo sapiens
cccagaactctaagg

SEQ ID NO: 1793914 - DNA, 15 bp, Homo sapiens
ccagaactctaaggg

SEQ ID NO: 1793915 - DNA, 15 bp, Homo sapiens
cagaactctaagggt

SEQ ID NO: 1793916 - DNA, 15 bp, Homo sapiens
agaactctaagggtt

SEQ ID NO: 1793917 - DNA, 15 bp, Homo sapiens
gaactctaagggttc

SEQ ID NO: 1793918 - DNA, 15 bp, Homo sapiens
aactctaagggttcc

SEQ ID NO: 1793919 - DNA, 15 bp, Homo sapiens
actctaagggttccc

SEQ ID NO: 1793920 - DNA, 15 bp, Homo sapiens
ctctaagggttcccc

SEQ ID NO: 1793921 - DNA, 15 bp, Homo sapiens
tctaagggttcccca

SEQ ID NO: 1793922 - DNA, 15 bp, Homo sapiens
ctaagggttccccac

SEQ ID NO: 1793923 - DNA, 15 bp, Homo sapiens
taagggttccccaca

SEQ ID NO: 1793924 - DNA, 15 bp, Homo sapiens
aagggttccccacag

SEQ ID NO: 1793925 - DNA, 15 bp, Homo sapiens
agggttccccacagc

SEQ ID NO: 1793926 - DNA, 15 bp, Homo sapiens
gggttccccacagca

SEQ ID NO: 1793927 - DNA, 15 bp, Homo sapiens
ggttccccacagcac

SEQ ID NO: 1793928 - DNA, 15 bp, Homo sapiens
gttccccacagcacg

SEQ ID NO: 1793929 - DNA, 15 bp, Homo sapiens
ttccccacagcacgc

SEQ ID NO: 1793930 - DNA, 15 bp, Homo sapiens
tccccacagcacgcc

SEQ ID NO: 1793931 - DNA, 15 bp, Homo sapiens
ccccacagcacgcct

SEQ ID NO: 1793932 - DNA, 15 bp, Homo sapiens
cccacagcacgcctg

SEQ ID NO: 1793933 - DNA, 15 bp, Homo sapiens
ccacagcacgcctgc

SEQ ID NO: 1793934 - DNA, 15 bp, Homo sapiens
cacagcacgcctgcg

SEQ ID NO: 1793935 - DNA, 15 bp, Homo sapiens
acagcacgcctgcgg

SEQ ID NO: 1793936 - DNA, 15 bp, Homo sapiens
cagcacgcctgcggc

SEQ ID NO: 1793937 - DNA, 15 bp, Homo sapiens
agcacgcctgcggca

SEQ ID NO: 1793938 - DNA, 15 bp, Homo sapiens
gcacgcctgcggcat

SEQ ID NO: 1793939 - DNA, 15 bp, Homo sapiens
cacgcctgcggcata

SEQ ID NO: 1793940 - DNA, 15 bp, Homo sapiens
acgcctgcggcatac

SEQ ID NO: 1793941 - DNA, 15 bp, Homo sapiens
cgcctgcggcatact

SEQ ID NO: 1793942 - DNA, 15 bp, Homo sapiens
gcctgcggcatactg

SEQ ID NO: 1793943 - DNA, 15 bp, Homo sapiens
cctgcggcatactgt

SEQ ID NO: 1793944 - DNA, 15 bp, Homo sapiens
ctgcggcatactgtc

SEQ ID NO: 1793945 - DNA, 15 bp, Homo sapiens
tgcggcatactgtca

SEQ ID NO: 1793946 - DNA, 15 bp, Homo sapiens
gcggcatactgtcac

SEQ ID NO: 1793947 - DNA, 15 bp, Homo sapiens
cggcatactgtcacc

SEQ ID NO: 1793948 - DNA, 15 bp, Homo sapiens
ggcatactgtcaccg

SEQ ID NO: 1793949 - DNA, 15 bp, Homo sapiens
gcatactgtcaccga

SEQ ID NO: 1793950 - DNA, 15 bp, Homo sapiens
catactgtcaccgaa

SEQ ID NO: 1793951 - DNA, 15 bp, Homo sapiens
atactgtcaccgaat

SEQ ID NO: 1793952 - DNA, 15 bp, Homo sapiens
tactgtcaccgaatt

SEQ ID NO: 1793953 - DNA, 15 bp, Homo sapiens
actgtcaccgaattt

SEQ ID NO: 1793954 - DNA, 15 bp, Homo sapiens
ctgtcaccgaatttc

SEQ ID NO: 1793955 - DNA, 15 bp, Homo sapiens
tgtcaccgaatttct

SEQ ID NO: 1793956 - DNA, 15 bp, Homo sapiens
gtcaccgaatttctt

SEQ ID NO: 1793957 - DNA, 15 bp, Homo sapiens
tcaccgaatttcttt

SEQ ID NO: 1793958 - DNA, 15 bp, Homo sapiens
caccgaatttctttc

SEQ ID NO: 1793959 - DNA, 15 bp, Homo sapiens
accgaatttctttcc

SEQ ID NO: 1793960 - DNA, 15 bp, Homo sapiens
ccgaatttctttccc

SEQ ID NO: 1793961 - DNA, 15 bp, Homo sapiens
cgaatttctttccct

SEQ ID NO: 1793962 - DNA, 15 bp, Homo sapiens
gaatttctttccctc

SEQ ID NO: 1793963 - DNA, 15 bp, Homo sapiens
aatttctttccctcc

SEQ ID NO: 1793964 - DNA, 15 bp, Homo sapiens
atttctttccctcca

SEQ ID NO: 1793965 - DNA, 15 bp, Homo sapiens
tttctttccctccac

SEQ ID NO: 1793966 - DNA, 15 bp, Homo sapiens
ttctttccctccacc

SEQ ID NO: 1793967 - DNA, 15 bp, Homo sapiens
tctttccctccacct

SEQ ID NO: 1793968 - DNA, 15 bp, Homo sapiens
ctttccctccacctc

SEQ ID NO: 1793969 - DNA, 15 bp, Homo sapiens
tttccctccacctcc

SEQ ID NO: 1793970 - DNA, 15 bp, Homo sapiens
ttccctccacctcca

SEQ ID NO: 1793971 - DNA, 15 bp, Homo sapiens
tccctccacctccac

SEQ ID NO: 1793972 - DNA, 15 bp, Homo sapiens
ccctccacctccact

SEQ ID NO: 1793973 - DNA, 15 bp, Homo sapiens
cctccacctccactg

SEQ ID NO: 1793974 - DNA, 15 bp, Homo sapiens
ctccacctccactga

SEQ ID NO: 1793975 - DNA, 15 bp, Homo sapiens
tccacctccactgac

SEQ ID NO: 1793976 - DNA, 15 bp, Homo sapiens
ccacctccactgacc

SEQ ID NO: 1793977 - DNA, 15 bp, Homo sapiens
cacctccactgacct

SEQ ID NO: 1793978 - DNA, 15 bp, Homo sapiens
acctccactgacctg

SEQ ID NO: 1793979 - DNA, 15 bp, Homo sapiens
cctccactgacctgg

SEQ ID NO: 1793980 - DNA, 15 bp, Homo sapiens
ctccactgacctgga

SEQ ID NO: 1793981 - DNA, 15 bp, Homo sapiens
tccactgacctggaa

SEQ ID NO: 1793982 - DNA, 15 bp, Homo sapiens
ccactgacctggaat

SEQ ID NO: 1793983 - DNA, 15 bp, Homo sapiens
cactgacctggaatg

SEQ ID NO: 1793984 - DNA, 15 bp, Homo sapiens
actgacctggaatgt

SEQ ID NO: 1793985 - DNA, 15 bp, Homo sapiens
ctgacctggaatgtt

SEQ ID NO: 1793986 - DNA, 15 bp, Homo sapiens
tgacctggaatgttc

SEQ ID NO: 1793987 - DNA, 15 bp, Homo sapiens
gacctggaatgttct

SEQ ID NO: 1793988 - DNA, 15 bp, Homo sapiens
acctggaatgttctt

SEQ ID NO: 1793989 - DNA, 15 bp, Homo sapiens
cctggaatgttcttt

SEQ ID NO: 1793990 - DNA, 15 bp, Homo sapiens
ctggaatgttctttc

SEQ ID NO: 1793991 - DNA, 15 bp, Homo sapiens
tggaatgttctttcc

SEQ ID NO: 1793992 - DNA, 15 bp, Homo sapiens
ggaatgttctttccg

SEQ ID NO: 1793993 - DNA, 15 bp, Homo sapiens
gaatgttctttccga

SEQ ID NO: 1793994 - DNA, 15 bp, Homo sapiens
aatgttctttccgag

SEQ ID NO: 1793995 - DNA, 15 bp, Homo sapiens
atgttctttccgaga

SEQ ID NO: 1793996 - DNA, 15 bp, Homo sapiens
tgttctttccgagaa

SEQ ID NO: 1793997 - DNA, 15 bp, Homo sapiens
gttctttccgagaac

SEQ ID NO: 1793998 - DNA, 15 bp, Homo sapiens
ttctttccgagaact

SEQ ID NO: 1793999 - DNA, 15 bp, Homo sapiens
tctttccgagaactt

SEQ ID NO: 1794000 - DNA, 15 bp, Homo sapiens
ctttccgagaacttc

SEQ ID NO: 1794001 - DNA, 15 bp, Homo sapiens
tttccgagaacttct

SEQ ID NO: 1794002 - DNA, 15 bp, Homo sapiens
ttccgagaacttctg

SEQ ID NO: 1794003 - DNA, 15 bp, Homo sapiens
tccgagaacttctgg

SEQ ID NO: 1794004 - DNA, 15 bp, Homo sapiens
ccgagaacttctggc

SEQ ID NO: 1794005 - DNA, 15 bp, Homo sapiens
cgagaacttctggcc

SEQ ID NO: 1794006 - DNA, 15 bp, Homo sapiens
gagaacttctggccc

SEQ ID NO: 1794007 - DNA, 15 bp, Homo sapiens
agaacttctggcccc

SEQ ID NO: 1794008 - DNA, 15 bp, Homo sapiens
gaacttctggccccc

SEQ ID NO: 1794009 - DNA, 15 bp, Homo sapiens
aacttctggccccca

SEQ ID NO: 1794010 - DNA, 15 bp, Homo sapiens
acttctggcccccat

SEQ ID NO: 1794011 - DNA, 15 bp, Homo sapiens
cttctggcccccatc

SEQ ID NO: 1794012 - DNA, 15 bp, Homo sapiens
ttctggcccccatca

SEQ ID NO: 1794013 - DNA, 15 bp, Homo sapiens
tctggcccccatcat

SEQ ID NO: 1794014 - DNA, 15 bp, Homo sapiens
ctggcccccatcatt

SEQ ID NO: 1794015 - DNA, 15 bp, Homo sapiens
tggcccccatcattg

SEQ ID NO: 1794016 - DNA, 15 bp, Homo sapiens
ggcccccatcattgc

SEQ ID NO: 1794017 - DNA, 15 bp, Homo sapiens
gcccccatcattgca

SEQ ID NO: 1794018 - DNA, 15 bp, Homo sapiens
cccccatcattgcag

SEQ ID NO: 1794019 - DNA, 15 bp, Homo sapiens
ccccatcattgcagg

SEQ ID NO: 1794020 - DNA, 15 bp, Homo sapiens
cccatcattgcaggg

SEQ ID NO: 1794021 - DNA, 15 bp, Homo sapiens
ccatcattgcagggg

SEQ ID NO: 1794022 - DNA, 15 bp, Homo sapiens
catcattgcaggggt

SEQ ID NO: 1794023 - DNA, 15 bp, Homo sapiens
atcattgcaggggta

SEQ ID NO: 1794024 - DNA, 15 bp, Homo sapiens
tcattgcaggggtac

SEQ ID NO: 1794025 - DNA, 15 bp, Homo sapiens
cattgcaggggtact

SEQ ID NO: 1794026 - DNA, 15 bp, Homo sapiens
attgcaggggtactt

SEQ ID NO: 1794027 - DNA, 15 bp, Homo sapiens
ttgcaggggtacttt

SEQ ID NO: 1794028 - DNA, 15 bp, Homo sapiens
tgcaggggtactttg

SEQ ID NO: 1794029 - DNA, 15 bp, Homo sapiens
gcaggggtactttga

SEQ ID NO: 1794030 - DNA, 15 bp, Homo sapiens
caggggtactttgac

SEQ ID NO: 1794031 - DNA, 15 bp, Homo sapiens
aggggtactttgaca

SEQ ID NO: 1794032 - DNA, 15 bp, Homo sapiens
ggggtactttgacaa

SEQ ID NO: 1794033 - DNA, 15 bp, Homo sapiens
gggtactttgacaag

SEQ ID NO: 1794034 - DNA, 15 bp, Homo sapiens
ggtactttgacaaga

SEQ ID NO: 1794035 - DNA, 15 bp, Homo sapiens
gtactttgacaagaa

SEQ ID NO: 1794036 - DNA, 15 bp, Homo sapiens
tactttgacaagaag

SEQ ID NO: 1794037 - DNA, 15 bp, Homo sapiens
actttgacaagaaga

SEQ ID NO: 1794038 - DNA, 15 bp, Homo sapiens
ctttgacaagaagac

SEQ ID NO: 1794039 - DNA, 15 bp, Homo sapiens
tttgacaagaagact

SEQ ID NO: 1794040 - DNA, 15 bp, Homo sapiens
ttgacaagaagactg

SEQ ID NO: 1794041 - DNA, 15 bp, Homo sapiens
tgacaagaagactgc

SEQ ID NO: 1794042 - DNA, 15 bp, Homo sapiens
gacaagaagactgct

SEQ ID NO: 1794043 - DNA, 15 bp, Homo sapiens
acaagaagactgctg

SEQ ID NO: 1794044 - DNA, 15 bp, Homo sapiens
caagaagactgctgt

SEQ ID NO: 1794045 - DNA, 15 bp, Homo sapiens
aagaagactgctgta

SEQ ID NO: 1794046 - DNA, 15 bp, Homo sapiens
agaagactgctgtat

SEQ ID NO: 1794047 - DNA, 15 bp, Homo sapiens
gaagactgctgtatg

SEQ ID NO: 1794048 - DNA, 15 bp, Homo sapiens
aagactgctgtatgt

SEQ ID NO: 1794049 - DNA, 15 bp, Homo sapiens
agactgctgtatgtt

SEQ ID NO: 1794050 - DNA, 15 bp, Homo sapiens
gactgctgtatgtta

SEQ ID NO: 1794051 - DNA, 15 bp, Homo sapiens
actgctgtatgttat

SEQ ID NO: 1794052 - DNA, 15 bp, Homo sapiens
ctgctgtatgttatt

SEQ ID NO: 1794053 - DNA, 15 bp, Homo sapiens
tgctgtatgttattt

SEQ ID NO: 1794054 - DNA, 15 bp, Homo sapiens
gctgtatgttatttg

SEQ ID NO: 1794055 - DNA, 15 bp, Homo sapiens
ctgtatgttatttgt

SEQ ID NO: 1794056 - DNA, 15 bp, Homo sapiens
tgtatgttatttgtt

SEQ ID NO: 1794057 - DNA, 15 bp, Homo sapiens
gtatgttatttgtta

SEQ ID NO: 1794058 - DNA, 15 bp, Homo sapiens
tatgttatttgttat

SEQ ID NO: 1794059 - DNA, 15 bp, Homo sapiens
atgttatttgttatt

SEQ ID NO: 1794060 - DNA, 15 bp, Homo sapiens
tgttatttgttattt

SEQ ID NO: 1794061 - DNA, 15 bp, Homo sapiens
gttatttgttatttt

SEQ ID NO: 1794062 - DNA, 15 bp, Homo sapiens
ttatttgttattttc

SEQ ID NO: 1794063 - DNA, 15 bp, Homo sapiens
tatttgttattttca

SEQ ID NO: 1794064 - DNA, 15 bp, Homo sapiens
atttgttattttcac

SEQ ID NO: 1794065 - DNA, 15 bp, Homo sapiens
tttgttattttcacg

SEQ ID NO: 1794066 - DNA, 15 bp, Homo sapiens
ttgttattttcacgt

SEQ ID NO: 1794067 - DNA, 15 bp, Homo sapiens
tgttattttcacgta

SEQ ID NO: 1794068 - DNA, 15 bp, Homo sapiens
gttattttcacgtaa

SEQ ID NO: 1794069 - DNA, 15 bp, Homo sapiens
ttattttcacgtaag

SEQ ID NO: 1794070 - DNA, 15 bp, Homo sapiens
tattttcacgtaagg

SEQ ID NO: 1794071 - DNA, 15 bp, Homo sapiens
attttcacgtaaggc

SEQ ID NO: 1794072 - DNA, 15 bp, Homo sapiens
ttttcacgtaaggca

SEQ ID NO: 1794073 - DNA, 15 bp, Homo sapiens
tttcacgtaaggcat

SEQ ID NO: 1794074 - DNA, 15 bp, Homo sapiens
ttcacgtaaggcata

SEQ ID NO: 1794075 - DNA, 15 bp, Homo sapiens
tcacgtaaggcataa

SEQ ID NO: 1794076 - DNA, 15 bp, Homo sapiens
cacgtaaggcataag

SEQ ID NO: 1794077 - DNA, 15 bp, Homo sapiens
acgtaaggcataagt

SEQ ID NO: 1794078 - DNA, 15 bp, Homo sapiens
cgtaaggcataagtc

SEQ ID NO: 1794079 - DNA, 15 bp, Homo sapiens
gtaaggcataagtca

SEQ ID NO: 1794080 - DNA, 15 bp, Homo sapiens
taaggcataagtcat

SEQ ID NO: 1794081 - DNA, 15 bp, Homo sapiens
aaggcataagtcatg

SEQ ID NO: 1794082 - DNA, 15 bp, Homo sapiens
aggcataagtcatgt

SEQ ID NO: 1794083 - DNA, 15 bp, Homo sapiens
ggcataagtcatgtt

SEQ ID NO: 1794084 - DNA, 15 bp, Homo sapiens
gcataagtcatgtta

SEQ ID NO: 1794085 - DNA, 15 bp, Homo sapiens
cataagtcatgttag

SEQ ID NO: 1794086 - DNA, 15 bp, Homo sapiens
ataagtcatgttagt

SEQ ID NO: 1794087 - DNA, 15 bp, Homo sapiens
taagtcatgttagtt

SEQ ID NO: 1794088 - DNA, 15 bp, Homo sapiens
aagtcatgttagttt

SEQ ID NO: 1794089 - DNA, 15 bp, Homo sapiens
agtcatgttagtttc

SEQ ID NO: 1794090 - DNA, 15 bp, Homo sapiens
gtcatgttagtttca

SEQ ID NO: 1794091 - DNA, 15 bp, Homo sapiens
tcatgttagtttcac

SEQ ID NO: 1794092 - DNA, 15 bp, Homo sapiens
catgttagtttcacc

SEQ ID NO: 1794093 - DNA, 15 bp, Homo sapiens
atgttagtttcacct

SEQ ID NO: 1794094 - DNA, 15 bp, Homo sapiens
tgttagtttcaccta

SEQ ID NO: 1794095 - DNA, 15 bp, Homo sapiens
gttagtttcacctac

SEQ ID NO: 1794096 - DNA, 15 bp, Homo sapiens
ttagtttcacctaca

SEQ ID NO: 1794097 - DNA, 15 bp, Homo sapiens
tagtttcacctacag

SEQ ID NO: 1794098 - DNA, 15 bp, Homo sapiens
agtttcacctacagc

SEQ ID NO: 1794099 - DNA, 15 bp, Homo sapiens
gtttcacctacagca

SEQ ID NO: 1794100 - DNA, 15 bp, Homo sapiens
tttcacctacagcat

SEQ ID NO: 1794101 - DNA, 15 bp, Homo sapiens
ttcacctacagcatg

SEQ ID NO: 1794102 - DNA, 15 bp, Homo sapiens
tcacctacagcatgt

SEQ ID NO: 1794103 - DNA, 15 bp, Homo sapiens
cacctacagcatgtg

SEQ ID NO: 1794104 - DNA, 15 bp, Homo sapiens
acctacagcatgtgc

SEQ ID NO: 1794105 - DNA, 15 bp, Homo sapiens
cctacagcatgtgcg

SEQ ID NO: 1794106 - DNA, 15 bp, Homo sapiens
ctacagcatgtgcgt

SEQ ID NO: 1794107 - DNA, 15 bp, Homo sapiens
tacagcatgtgcgtg

SEQ ID NO: 1794108 - DNA, 15 bp, Homo sapiens
acagcatgtgcgtgc

SEQ ID NO: 1794109 - DNA, 15 bp, Homo sapiens
cagcatgtgcgtgca

SEQ ID NO: 1794110 - DNA, 15 bp, Homo sapiens
agcatgtgcgtgcat

SEQ ID NO: 1794111 - DNA, 15 bp, Homo sapiens
gcatgtgcgtgcatt

SEQ ID NO: 1794112 - DNA, 15 bp, Homo sapiens
catgtgcgtgcattg

SEQ ID NO: 1794113 - DNA, 15 bp, Homo sapiens
atgtgcgtgcattgt

SEQ ID NO: 1794114 - DNA, 15 bp, Homo sapiens
tgtgcgtgcattgtg

SEQ ID NO: 1794115 - DNA, 15 bp, Homo sapiens
gtgcgtgcattgtgt

SEQ ID NO: 1794116 - DNA, 15 bp, Homo sapiens
tgcgtgcattgtgta

SEQ ID NO: 1794117 - DNA, 15 bp, Homo sapiens
gcgtgcattgtgtac

SEQ ID NO: 1794118 - DNA, 15 bp, Homo sapiens
cgtgcattgtgtaca

SEQ ID NO: 1794119 - DNA, 15 bp, Homo sapiens
gtgcattgtgtacat

SEQ ID NO: 1794120 - DNA, 15 bp, Homo sapiens
tgcattgtgtacata

SEQ ID NO: 1794121 - DNA, 15 bp, Homo sapiens
gcattgtgtacatag

SEQ ID NO: 1794122 - DNA, 15 bp, Homo sapiens
cattgtgtacatagt

SEQ ID NO: 1794123 - DNA, 15 bp, Homo sapiens
attgtgtacatagtg

SEQ ID NO: 1794124 - DNA, 15 bp, Homo sapiens
ttgtgtacatagtga

SEQ ID NO: 1794125 - DNA, 15 bp, Homo sapiens
tgtgtacatagtgaa

SEQ ID NO: 1794126 - DNA, 15 bp, Homo sapiens
gtgtacatagtgaaa

SEQ ID NO: 1794127 - DNA, 15 bp, Homo sapiens
tgtacatagtgaaaa

SEQ ID NO: 1794128 - DNA, 15 bp, Homo sapiens
gtacatagtgaaaat

SEQ ID NO: 1794129 - DNA, 15 bp, Homo sapiens
tacatagtgaaaata

SEQ ID NO: 1794130 - DNA, 15 bp, Homo sapiens
acatagtgaaaataa

SEQ ID NO: 1794131 - DNA, 15 bp, Homo sapiens
catagtgaaaataaa

SEQ ID NO: 1794132 - DNA, 15 bp, Homo sapiens
atagtgaaaataaac

SEQ ID NO: 1794133 - DNA, 15 bp, Homo sapiens
tagtgaaaataaacc

SEQ ID NO: 1794134 - DNA, 15 bp, Homo sapiens
agtgaaaataaaccc

SEQ ID NO: 1794135 - DNA, 15 bp, Homo sapiens
gtgaaaataaaccct

SEQ ID NO: 1794136 - DNA, 15 bp, Homo sapiens
tgaaaataaaccctg

SEQ ID NO: 1794137 - DNA, 15 bp, Homo sapiens
gaaaataaaccctgg

SEQ ID NO: 1794138 - DNA, 15 bp, Homo sapiens
aaaataaaccctggt

SEQ ID NO: 1794139 - DNA, 15 bp, Homo sapiens
aaataaaccctggtc

SEQ ID NO: 1794140 - DNA, 15 bp, Homo sapiens
aataaaccctggtca

SEQ ID NO: 1794141 - DNA, 15 bp, Homo sapiens
ataaaccctggtcag

SEQ ID NO: 1794142 - DNA, 15 bp, Homo sapiens
taaaccctggtcaga

SEQ ID NO: 1794143 - DNA, 15 bp, Homo sapiens
aaaccctggtcagat

SEQ ID NO: 1794144 - DNA, 15 bp, Homo sapiens
aaccctggtcagatg

SEQ ID NO: 1794145 - DNA, 15 bp, Homo sapiens
accctggtcagatgc

SEQ ID NO: 1794146 - DNA, 15 bp, Homo sapiens
ccctggtcagatgct

SEQ ID NO: 1794147 - DNA, 15 bp, Homo sapiens
cctggtcagatgctt

SEQ ID NO: 1794148 - DNA, 15 bp, Homo sapiens
ctggtcagatgcttg

SEQ ID NO: 1794149 - DNA, 15 bp, Homo sapiens
tggtcagatgcttga

SEQ ID NO: 1794150 - DNA, 15 bp, Homo sapiens
ggtcagatgcttgag

SEQ ID NO: 1794151 - DNA, 15 bp, Homo sapiens
gtcagatgcttgagg

SEQ ID NO: 1794152 - DNA, 15 bp, Homo sapiens
tcagatgcttgaggt

SEQ ID NO: 1794153 - DNA, 15 bp, Homo sapiens
cagatgcttgaggtc

SEQ ID NO: 1794154 - DNA, 15 bp, Homo sapiens
agatgcttgaggtca

SEQ ID NO: 1794155 - DNA, 15 bp, Homo sapiens
gatgcttgaggtcag

SEQ ID NO: 1794156 - DNA, 15 bp, Homo sapiens
atgcttgaggtcagc

SEQ ID NO: 1794157 - DNA, 15 bp, Homo sapiens
tgcttgaggtcagcc

SEQ ID NO: 1794158 - DNA, 15 bp, Homo sapiens
gcttgaggtcagcct

SEQ ID NO: 1794159 - DNA, 15 bp, Homo sapiens
cttgaggtcagcctc

SEQ ID NO: 1794160 - DNA, 15 bp, Homo sapiens
ttgaggtcagcctcc

SEQ ID NO: 1794161 - DNA, 15 bp, Homo sapiens
tgaggtcagcctccc

SEQ ID NO: 1794162 - DNA, 15 bp, Homo sapiens
gaggtcagcctccct

SEQ ID NO: 1794163 - DNA, 15 bp, Homo sapiens
aggtcagcctccctc

SEQ ID NO: 1794164 - DNA, 15 bp, Homo sapiens
ggtcagcctccctct

SEQ ID NO: 1794165 - DNA, 15 bp, Homo sapiens
gtcagcctccctctc

SEQ ID NO: 1794166 - DNA, 15 bp, Homo sapiens
tcagcctccctctct

SEQ ID NO: 1794167 - DNA, 15 bp, Homo sapiens
cagcctccctctctg

SEQ ID NO: 1794168 - DNA, 15 bp, Homo sapiens
agcctccctctctgc

SEQ ID NO: 1794169 - DNA, 15 bp, Homo sapiens
gcctccctctctgcc

SEQ ID NO: 1794170 - DNA, 15 bp, Homo sapiens
cctccctctctgcct

SEQ ID NO: 1794171 - DNA, 15 bp, Homo sapiens
ctccctctctgcctg

SEQ ID NO: 1794172 - DNA, 15 bp, Homo sapiens
tccctctctgcctgg

SEQ ID NO: 1794173 - DNA, 15 bp, Homo sapiens
ccctctctgcctggt

SEQ ID NO: 1794174 - DNA, 15 bp, Homo sapiens
cctctctgcctggtc

SEQ ID NO: 1794175 - DNA, 15 bp, Homo sapiens
ctctctgcctggtct

SEQ ID NO: 1794176 - DNA, 15 bp, Homo sapiens
tctctgcctggtctg

SEQ ID NO: 1794177 - DNA, 15 bp, Homo sapiens
ctctgcctggtctgt

SEQ ID NO: 1794178 - DNA, 15 bp, Homo sapiens
tctgcctggtctgtc

SEQ ID NO: 1794179 - DNA, 15 bp, Homo sapiens
ctgcctggtctgtct

SEQ ID NO: 1794180 - DNA, 15 bp, Homo sapiens
tgcctggtctgtctc

SEQ ID NO: 1794181 - DNA, 15 bp, Homo sapiens
gcctggtctgtctcg

SEQ ID NO: 1794182 - DNA, 15 bp, Homo sapiens
cctggtctgtctcgc

SEQ ID NO: 1794183 - DNA, 15 bp, Homo sapiens
ctggtctgtctcgct

SEQ ID NO: 1794184 - DNA, 15 bp, Homo sapiens
tggtctgtctcgctc

SEQ ID NO: 1794185 - DNA, 15 bp, Homo sapiens
ggtctgtctcgctcc

SEQ ID NO: 1794186 - DNA, 15 bp, Homo sapiens
gtctgtctcgctcca

SEQ ID NO: 1794187 - DNA, 15 bp, Homo sapiens
tctgtctcgctccat

SEQ ID NO: 1794188 - DNA, 15 bp, Homo sapiens
ctgtctcgctccatc

SEQ ID NO: 1794189 - DNA, 15 bp, Homo sapiens
tgtctcgctccatcg

SEQ ID NO: 1794190 - DNA, 15 bp, Homo sapiens
gtctcgctccatcgt

SEQ ID NO: 1794191 - DNA, 15 bp, Homo sapiens
tctcgctccatcgta

SEQ ID NO: 1794192 - DNA, 15 bp, Homo sapiens
ctcgctccatcgtaa

SEQ ID NO: 1794193 - DNA, 15 bp, Homo sapiens
tcgctccatcgtaat

SEQ ID NO: 1794194 - DNA, 15 bp, Homo sapiens
cgctccatcgtaatc

SEQ ID NO: 1794195 - DNA, 15 bp, Homo sapiens
gctccatcgtaatca

SEQ ID NO: 1794196 - DNA, 15 bp, Homo sapiens
ctccatcgtaatcac

SEQ ID NO: 1794197 - DNA, 15 bp, Homo sapiens
tccatcgtaatcacc

SEQ ID NO: 1794198 - DNA, 15 bp, Homo sapiens
ccatcgtaatcacct

SEQ ID NO: 1794199 - DNA, 15 bp, Homo sapiens
catcgtaatcacctg

SEQ ID NO: 1794200 - DNA, 15 bp, Homo sapiens
atcgtaatcacctgt

SEQ ID NO: 1794201 - DNA, 15 bp, Homo sapiens
tcgtaatcacctgtc

SEQ ID NO: 1794202 - DNA, 15 bp, Homo sapiens
cgtaatcacctgtct

SEQ ID NO: 1794203 - DNA, 15 bp, Homo sapiens
gtaatcacctgtctc

SEQ ID NO: 1794204 - DNA, 15 bp, Homo sapiens
taatcacctgtctca

SEQ ID NO: 1794205 - DNA, 15 bp, Homo sapiens
aatcacctgtctcat

SEQ ID NO: 1794206 - DNA, 15 bp, Homo sapiens
atcacctgtctcatc

SEQ ID NO: 1794207 - DNA, 15 bp, Homo sapiens
tcacctgtctcatct

SEQ ID NO: 1794208 - DNA, 15 bp, Homo sapiens
cacctgtctcatctg

SEQ ID NO: 1794209 - DNA, 15 bp, Homo sapiens
acctgtctcatctgc

SEQ ID NO: 1794210 - DNA, 15 bp, Homo sapiens
cctgtctcatctgcc

SEQ ID NO: 1794211 - DNA, 15 bp, Homo sapiens
ctgtctcatctgcca

SEQ ID NO: 1794212 - DNA, 15 bp, Homo sapiens
tgtctcatctgccaa

SEQ ID NO: 1794213 - DNA, 15 bp, Homo sapiens
gtctcatctgccaaa

SEQ ID NO: 1794214 - DNA, 15 bp, Homo sapiens
tctcatctgccaaaa

SEQ ID NO: 1794215 - DNA, 15 bp, Homo sapiens
ctcatctgccaaaat

SEQ ID NO: 1794216 - DNA, 15 bp, Homo sapiens
tcatctgccaaaatc

SEQ ID NO: 1794217 - DNA, 15 bp, Homo sapiens
catctgccaaaatct

SEQ ID NO: 1794218 - DNA, 15 bp, Homo sapiens
atctgccaaaatcta

SEQ ID NO: 1794219 - DNA, 15 bp, Homo sapiens
tctgccaaaatctaa

SEQ ID NO: 1794220 - DNA, 15 bp, Homo sapiens
ctgccaaaatctaag

SEQ ID NO: 1794221 - DNA, 15 bp, Homo sapiens
tgccaaaatctaagc

SEQ ID NO: 1794222 - DNA, 15 bp, Homo sapiens
gccaaaatctaagct

SEQ ID NO: 1794223 - DNA, 15 bp, Homo sapiens
ccaaaatctaagctt

SEQ ID NO: 1794224 - DNA, 15 bp, Homo sapiens
caaaatctaagcttt

SEQ ID NO: 1794225 - DNA, 15 bp, Homo sapiens
aaaatctaagctttt

SEQ ID NO: 1794226 - DNA, 15 bp, Homo sapiens
aaatctaagcttttc

SEQ ID NO: 1794227 - DNA, 15 bp, Homo sapiens
aatctaagcttttca

SEQ ID NO: 1794228 - DNA, 15 bp, Homo sapiens
atctaagcttttcaa

SEQ ID NO: 1794229 - DNA, 15 bp, Homo sapiens
tctaagcttttcaac

SEQ ID NO: 1794230 - DNA, 15 bp, Homo sapiens
ctaagcttttcaacg

SEQ ID NO: 1794231 - DNA, 15 bp, Homo sapiens
taagcttttcaacgg

SEQ ID NO: 1794232 - DNA, 15 bp, Homo sapiens
aagcttttcaacggc

SEQ ID NO: 1794233 - DNA, 15 bp, Homo sapiens
agcttttcaacggcc

SEQ ID NO: 1794234 - DNA, 15 bp, Homo sapiens
gcttttcaacggcct

SEQ ID NO: 1794235 - DNA, 15 bp, Homo sapiens
cttttcaacggcctt

SEQ ID NO: 1794236 - DNA, 15 bp, Homo sapiens
ttttcaacggccttt

SEQ ID NO: 1794237 - DNA, 15 bp, Homo sapiens
tttcaacggcctttt

SEQ ID NO: 1794238 - DNA, 15 bp, Homo sapiens
ttcaacggccttttc

SEQ ID NO: 1794239 - DNA, 15 bp, Homo sapiens
tcaacggccttttca

SEQ ID NO: 1794240 - DNA, 15 bp, Homo sapiens
caacggccttttcat

SEQ ID NO: 1794241 - DNA, 15 bp, Homo sapiens
aacggccttttcatt

SEQ ID NO: 1794242 - DNA, 15 bp, Homo sapiens
acggccttttcattg

SEQ ID NO: 1794243 - DNA, 15 bp, Homo sapiens
cggccttttcattgt

SEQ ID NO: 1794244 - DNA, 15 bp, Homo sapiens
ggccttttcattgtc

SEQ ID NO: 1794245 - DNA, 15 bp, Homo sapiens
gccttttcattgtca

SEQ ID NO: 1794246 - DNA, 15 bp, Homo sapiens
ccttttcattgtcac

SEQ ID NO: 1794247 - DNA, 15 bp, Homo sapiens
cttttcattgtcaca

SEQ ID NO: 1794248 - DNA, 15 bp, Homo sapiens
ttttcattgtcacat

SEQ ID NO: 1794249 - DNA, 15 bp, Homo sapiens
tttcattgtcacatc

SEQ ID NO: 1794250 - DNA, 15 bp, Homo sapiens
ttcattgtcacatcc

SEQ ID NO: 1794251 - DNA, 15 bp, Homo sapiens
tcattgtcacatccc

SEQ ID NO: 1794252 - DNA, 15 bp, Homo sapiens
cattgtcacatccca

SEQ ID NO: 1794253 - DNA, 15 bp, Homo sapiens
attgtcacatcccaa

SEQ ID NO: 1794254 - DNA, 15 bp, Homo sapiens
ttgtcacatcccaaa

SEQ ID NO: 1794255 - DNA, 15 bp, Homo sapiens
tgtcacatcccaaat

SEQ ID NO: 1794256 - DNA, 15 bp, Homo sapiens
gtcacatcccaaatt

SEQ ID NO: 1794257 - DNA, 15 bp, Homo sapiens
tcacatcccaaattc

SEQ ID NO: 1794258 - DNA, 15 bp, Homo sapiens
cacatcccaaattcc

SEQ ID NO: 1794259 - DNA, 15 bp, Homo sapiens
acatcccaaattcca

SEQ ID NO: 1794260 - DNA, 15 bp, Homo sapiens
catcccaaattccaa

SEQ ID NO: 1794261 - DNA, 15 bp, Homo sapiens
atcccaaattccaag

SEQ ID NO: 1794262 - DNA, 15 bp, Homo sapiens
tcccaaattccaagc

SEQ ID NO: 1794263 - DNA, 15 bp, Homo sapiens
cccaaattccaagcc

SEQ ID NO: 1794264 - DNA, 15 bp, Homo sapiens
ccaaattccaagcct

SEQ ID NO: 1794265 - DNA, 15 bp, Homo sapiens
caaattccaagcctg

SEQ ID NO: 1794266 - DNA, 15 bp, Homo sapiens
aaattccaagcctga

SEQ ID NO: 1794267 - DNA, 15 bp, Homo sapiens
aattccaagcctgaa

SEQ ID NO: 1794268 - DNA, 15 bp, Homo sapiens
attccaagcctgaag

SEQ ID NO: 1794269 - DNA, 15 bp, Homo sapiens
ttccaagcctgaagg

SEQ ID NO: 1794270 - DNA, 15 bp, Homo sapiens
tccaagcctgaaggg

SEQ ID NO: 1794271 - DNA, 15 bp, Homo sapiens
ccaagcctgaagggt

SEQ ID NO: 1794272 - DNA, 15 bp, Homo sapiens
caagcctgaagggtg

SEQ ID NO: 1794273 - DNA, 15 bp, Homo sapiens
aagcctgaagggtgt

SEQ ID NO: 1794274 - DNA, 15 bp, Homo sapiens
agcctgaagggtgtt

SEQ ID NO: 1794275 - DNA, 15 bp, Homo sapiens
gcctgaagggtgttc

SEQ ID NO: 1794276 - DNA, 15 bp, Homo sapiens
cctgaagggtgttct

SEQ ID NO: 1794277 - DNA, 15 bp, Homo sapiens
ctgaagggtgttctg

SEQ ID NO: 1794278 - DNA, 15 bp, Homo sapiens
tgaagggtgttctgg

SEQ ID NO: 1794279 - DNA, 15 bp, Homo sapiens
gaagggtgttctggg

SEQ ID NO: 1794280 - DNA, 15 bp, Homo sapiens
aagggtgttctgggc

SEQ ID NO: 1794281 - DNA, 15 bp, Homo sapiens
agggtgttctgggct

SEQ ID NO: 1794282 - DNA, 15 bp, Homo sapiens
gggtgttctgggctc

SEQ ID NO: 1794283 - DNA, 15 bp, Homo sapiens
ggtgttctgggctcc

SEQ ID NO: 1794284 - DNA, 15 bp, Homo sapiens
gtgttctgggctccc

SEQ ID NO: 1794285 - DNA, 15 bp, Homo sapiens
tgttctgggctcccc

SEQ ID NO: 1794286 - DNA, 15 bp, Homo sapiens
gttctgggctcccca

SEQ ID NO: 1794287 - DNA, 15 bp, Homo sapiens
ttctgggctccccat

SEQ ID NO: 1794288 - DNA, 15 bp, Homo sapiens
tctgggctccccata

SEQ ID NO: 1794289 - DNA, 15 bp, Homo sapiens
ctgggctccccataa

SEQ ID NO: 1794290 - DNA, 15 bp, Homo sapiens
tgggctccccataag

SEQ ID NO: 1794291 - DNA, 15 bp, Homo sapiens
gggctccccataagt

SEQ ID NO: 1794292 - DNA, 15 bp, Homo sapiens
ggctccccataagtg

SEQ ID NO: 1794293 - DNA, 15 bp, Homo sapiens
gctccccataagtgt

SEQ ID NO: 1794294 - DNA, 15 bp, Homo sapiens
ctccccataagtgtt

SEQ ID NO: 1794295 - DNA, 15 bp, Homo sapiens
tccccataagtgttt

SEQ ID NO: 1794296 - DNA, 15 bp, Homo sapiens
ccccataagtgtttg

SEQ ID NO: 1794297 - DNA, 15 bp, Homo sapiens
cccataagtgtttgt

SEQ ID NO: 1794298 - DNA, 15 bp, Homo sapiens
ccataagtgtttgtt

SEQ ID NO: 1794299 - DNA, 15 bp, Homo sapiens
cataagtgtttgttg

SEQ ID NO: 1794300 - DNA, 15 bp, Homo sapiens
ataagtgtttgttgg

SEQ ID NO: 1794301 - DNA, 15 bp, Homo sapiens
taagtgtttgttggg

SEQ ID NO: 1794302 - DNA, 15 bp, Homo sapiens
aagtgtttgttgggt

SEQ ID NO: 1794303 - DNA, 15 bp, Homo sapiens
agtgtttgttgggtg

SEQ ID NO: 1794304 - DNA, 15 bp, Homo sapiens
gtgtttgttgggtgc

SEQ ID NO: 1794305 - DNA, 15 bp, Homo sapiens
tgtttgttgggtgca

SEQ ID NO: 1794306 - DNA, 15 bp, Homo sapiens
gtttgttgggtgcat

SEQ ID NO: 1794307 - DNA, 15 bp, Homo sapiens
tttgttgggtgcatg

SEQ ID NO: 1794308 - DNA, 15 bp, Homo sapiens
ttgttgggtgcatgg

SEQ ID NO: 1794309 - DNA, 15 bp, Homo sapiens
tgttgggtgcatggt

SEQ ID NO: 1794310 - DNA, 15 bp, Homo sapiens
gttgggtgcatggtt

SEQ ID NO: 1794311 - DNA, 15 bp, Homo sapiens
ttgggtgcatggttg

SEQ ID NO: 1794312 - DNA, 15 bp, Homo sapiens
tgggtgcatggttga

SEQ ID NO: 1794313 - DNA, 15 bp, Homo sapiens
gggtgcatggttgat

SEQ ID NO: 1794314 - DNA, 15 bp, Homo sapiens
ggtgcatggttgatt

SEQ ID NO: 1794315 - DNA, 15 bp, Homo sapiens
gtgcatggttgattg

SEQ ID NO: 1794316 - DNA, 15 bp, Homo sapiens
tgcatggttgattga

SEQ ID NO: 1794317 - DNA, 15 bp, Homo sapiens
gcatggttgattgaa

SEQ ID NO: 1794318 - DNA, 15 bp, Homo sapiens
catggttgattgaag

SEQ ID NO: 1794319 - DNA, 15 bp, Homo sapiens
atggttgattgaagg

SEQ ID NO: 1794320 - DNA, 15 bp, Homo sapiens
tggttgattgaagga

SEQ ID NO: 1794321 - DNA, 15 bp, Homo sapiens
ggttgattgaaggaa

SEQ ID NO: 1794322 - DNA, 15 bp, Homo sapiens
gttgattgaaggaat

SEQ ID NO: 1794323 - DNA, 15 bp, Homo sapiens
ttgattgaaggaatg

SEQ ID NO: 1794324 - DNA, 15 bp, Homo sapiens
tgattgaaggaatgt

SEQ ID NO: 1794325 - DNA, 15 bp, Homo sapiens
gattgaaggaatgta

SEQ ID NO: 1794326 - DNA, 15 bp, Homo sapiens
attgaaggaatgtat

SEQ ID NO: 1794327 - DNA, 15 bp, Homo sapiens
ttgaaggaatgtata

SEQ ID NO: 1794328 - DNA, 15 bp, Homo sapiens
tgaaggaatgtatag

SEQ ID NO: 1794329 - DNA, 15 bp, Homo sapiens
gaaggaatgtatagt

SEQ ID NO: 1794330 - DNA, 15 bp, Homo sapiens
aaggaatgtatagtg

SEQ ID NO: 1794331 - DNA, 15 bp, Homo sapiens
aggaatgtatagtgt

SEQ ID NO: 1794332 - DNA, 15 bp, Homo sapiens
ggaatgtatagtgtg

SEQ ID NO: 1794333 - DNA, 15 bp, Homo sapiens
gaatgtatagtgtga

SEQ ID NO: 1794334 - DNA, 15 bp, Homo sapiens
aatgtatagtgtgag

SEQ ID NO: 1794335 - DNA, 15 bp, Homo sapiens
atgtatagtgtgaga

SEQ ID NO: 1794336 - DNA, 15 bp, Homo sapiens
tgtatagtgtgagaa

SEQ ID NO: 1794337 - DNA, 15 bp, Homo sapiens
gtatagtgtgagaat

SEQ ID NO: 1794338 - DNA, 15 bp, Homo sapiens
tatagtgtgagaatg

SEQ ID NO: 1794339 - DNA, 15 bp, Homo sapiens
atagtgtgagaatgg

SEQ ID NO: 1794340 - DNA, 15 bp, Homo sapiens
tagtgtgagaatggt

SEQ ID NO: 1794341 - DNA, 15 bp, Homo sapiens
agtgtgagaatggta

SEQ ID NO: 1794342 - DNA, 15 bp, Homo sapiens
gtgtgagaatggtag

SEQ ID NO: 1794343 - DNA, 15 bp, Homo sapiens
tgtgagaatggtagc

SEQ ID NO: 1794344 - DNA, 15 bp, Homo sapiens
gtgagaatggtagct

SEQ ID NO: 1794345 - DNA, 15 bp, Homo sapiens
tgagaatggtagctt

SEQ ID NO: 1794346 - DNA, 15 bp, Homo sapiens
gagaatggtagcttg

SEQ ID NO: 1794347 - DNA, 15 bp, Homo sapiens
agaatggtagcttga

SEQ ID NO: 1794348 - DNA, 15 bp, Homo sapiens
gaatggtagcttgag

SEQ ID NO: 1794349 - DNA, 15 bp, Homo sapiens
aatggtagcttgagg

SEQ ID NO: 1794350 - DNA, 15 bp, Homo sapiens
atggtagcttgagga

SEQ ID NO: 1794351 - DNA, 15 bp, Homo sapiens
tggtagcttgaggag

SEQ ID NO: 1794352 - DNA, 15 bp, Homo sapiens
ggtagcttgaggagg

SEQ ID NO: 1794353 - DNA, 15 bp, Homo sapiens
gtagcttgaggagga

SEQ ID NO: 1794354 - DNA, 15 bp, Homo sapiens
tagcttgaggaggaa

SEQ ID NO: 1794355 - DNA, 15 bp, Homo sapiens
agcttgaggaggaaa

SEQ ID NO: 1794356 - DNA, 15 bp, Homo sapiens
gcttgaggaggaaag

SEQ ID NO: 1794357 - DNA, 15 bp, Homo sapiens
cttgaggaggaaagt

SEQ ID NO: 1794358 - DNA, 15 bp, Homo sapiens
ttgaggaggaaagtc

SEQ ID NO: 1794359 - DNA, 15 bp, Homo sapiens
tgaggaggaaagtct

SEQ ID NO: 1794360 - DNA, 15 bp, Homo sapiens
gaggaggaaagtcta

SEQ ID NO: 1794361 - DNA, 15 bp, Homo sapiens
aggaggaaagtctat

SEQ ID NO: 1794362 - DNA, 15 bp, Homo sapiens
ggaggaaagtctatg

SEQ ID NO: 1794363 - DNA, 15 bp, Homo sapiens
gaggaaagtctatgg

SEQ ID NO: 1794364 - DNA, 15 bp, Homo sapiens
aggaaagtctatggg

SEQ ID NO: 1794365 - DNA, 15 bp, Homo sapiens
ggaaagtctatggga

SEQ ID NO: 1794366 - DNA, 15 bp, Homo sapiens
gaaagtctatgggaa

SEQ ID NO: 1794367 - DNA, 15 bp, Homo sapiens
aaagtctatgggaac

SEQ ID NO: 1794368 - DNA, 15 bp, Homo sapiens
aagtctatgggaact

SEQ ID NO: 1794369 - DNA, 15 bp, Homo sapiens
agtctatgggaactt

SEQ ID NO: 1794370 - DNA, 15 bp, Homo sapiens
gtctatgggaacttg

SEQ ID NO: 1794371 - DNA, 15 bp, Homo sapiens
tctatgggaacttgt

SEQ ID NO: 1794372 - DNA, 15 bp, Homo sapiens
ctatgggaacttgtt

SEQ ID NO: 1794373 - DNA, 15 bp, Homo sapiens
tatgggaacttgtta

SEQ ID NO: 1794374 - DNA, 15 bp, Homo sapiens
atgggaacttgttaa

SEQ ID NO: 1794375 - DNA, 15 bp, Homo sapiens
tgggaacttgttaat

SEQ ID NO: 1794376 - DNA, 15 bp, Homo sapiens
gggaacttgttaatg

SEQ ID NO: 1794377 - DNA, 15 bp, Homo sapiens
ggaacttgttaatga

SEQ ID NO: 1794378 - DNA, 15 bp, Homo sapiens
gaacttgttaatgaa

SEQ ID NO: 1794379 - DNA, 15 bp, Homo sapiens
aacttgttaatgaaa

SEQ ID NO: 1794380 - DNA, 15 bp, Homo sapiens
acttgttaatgaaag

SEQ ID NO: 1794381 - DNA, 15 bp, Homo sapiens
cttgttaatgaaagt

SEQ ID NO: 1794382 - DNA, 15 bp, Homo sapiens
ttgttaatgaaagtg

SEQ ID NO: 1794383 - DNA, 15 bp, Homo sapiens
tgttaatgaaagtgt

SEQ ID NO: 1794384 - DNA, 15 bp, Homo sapiens
gttaatgaaagtgta

SEQ ID NO: 1794385 - DNA, 15 bp, Homo sapiens
ttaatgaaagtgtac

SEQ ID NO: 1794386 - DNA, 15 bp, Homo sapiens
taatgaaagtgtact

SEQ ID NO: 1794387 - DNA, 15 bp, Homo sapiens
aatgaaagtgtactt

SEQ ID NO: 1794388 - DNA, 15 bp, Homo sapiens
atgaaagtgtacttg

SEQ ID NO: 1794389 - DNA, 15 bp, Homo sapiens
tgaaagtgtacttgt

SEQ ID NO: 1794390 - DNA, 15 bp, Homo sapiens
gaaagtgtacttgtt

SEQ ID NO: 1794391 - DNA, 15 bp, Homo sapiens
aaagtgtacttgttc

SEQ ID NO: 1794392 - DNA, 15 bp, Homo sapiens
aagtgtacttgttcc

SEQ ID NO: 1794393 - DNA, 15 bp, Homo sapiens
agtgtacttgttcct

SEQ ID NO: 1794394 - DNA, 15 bp, Homo sapiens
gtgtacttgttcctg

SEQ ID NO: 1794395 - DNA, 15 bp, Homo sapiens
tgtacttgttcctgc

SEQ ID NO: 1794396 - DNA, 15 bp, Homo sapiens
gtacttgttcctgcc

SEQ ID NO: 1794397 - DNA, 15 bp, Homo sapiens
tacttgttcctgcct

SEQ ID NO: 1794398 - DNA, 15 bp, Homo sapiens
acttgttcctgcctg

SEQ ID NO: 1794399 - DNA, 15 bp, Homo sapiens
cttgttcctgcctga

SEQ ID NO: 1794400 - DNA, 15 bp, Homo sapiens
ttgttcctgcctgac

SEQ ID NO: 1794401 - DNA, 15 bp, Homo sapiens
tgttcctgcctgaca

SEQ ID NO: 1794402 - DNA, 15 bp, Homo sapiens
gttcctgcctgacag

SEQ ID NO: 1794403 - DNA, 15 bp, Homo sapiens
ttcctgcctgacaga

SEQ ID NO: 1794404 - DNA, 15 bp, Homo sapiens
tcctgcctgacagaa

SEQ ID NO: 1794405 - DNA, 15 bp, Homo sapiens
cctgcctgacagaaa

SEQ ID NO: 1794406 - DNA, 15 bp, Homo sapiens
ctgcctgacagaaat

SEQ ID NO: 1794407 - DNA, 15 bp, Homo sapiens
tgcctgacagaaatg

SEQ ID NO: 1794408 - DNA, 15 bp, Homo sapiens
gcctgacagaaatgt

SEQ ID NO: 1794409 - DNA, 15 bp, Homo sapiens
cctgacagaaatgta

SEQ ID NO: 1794410 - DNA, 15 bp, Homo sapiens
ctgacagaaatgtaa

SEQ ID NO: 1794411 - DNA, 15 bp, Homo sapiens
tgacagaaatgtaag

SEQ ID NO: 1794412 - DNA, 15 bp, Homo sapiens
gacagaaatgtaaga

SEQ ID NO: 1794413 - DNA, 15 bp, Homo sapiens
acagaaatgtaagaa

SEQ ID NO: 1794414 - DNA, 15 bp, Homo sapiens
cagaaatgtaagaaa

SEQ ID NO: 1794415 - DNA, 15 bp, Homo sapiens
agaaatgtaagaaaa

SEQ ID NO: 1794416 - DNA, 15 bp, Homo sapiens
gaaatgtaagaaaaa

SEQ ID NO: 1794417 - DNA, 15 bp, Homo sapiens
aaatgtaagaaaaat

SEQ ID NO: 1794418 - DNA, 15 bp, Homo sapiens
aatgtaagaaaaatt

SEQ ID NO: 1794419 - DNA, 15 bp, Homo sapiens
atgtaagaaaaattg

SEQ ID NO: 1794420 - DNA, 15 bp, Homo sapiens
tgtaagaaaaattga

SEQ ID NO: 1794421 - DNA, 15 bp, Homo sapiens
gtaagaaaaattgaa

SEQ ID NO: 1794422 - DNA, 15 bp, Homo sapiens
taagaaaaattgaat

SEQ ID NO: 1794423 - DNA, 15 bp, Homo sapiens
aagaaaaattgaatg

SEQ ID NO: 1794424 - DNA, 15 bp, Homo sapiens
agaaaaattgaatgc

SEQ ID NO: 1794425 - DNA, 15 bp, Homo sapiens
gaaaaattgaatgca

SEQ ID NO: 1794426 - DNA, 15 bp, Homo sapiens
aaaaattgaatgcag

SEQ ID NO: 1794427 - DNA, 15 bp, Homo sapiens
aaaattgaatgcagt

SEQ ID NO: 1794428 - DNA, 15 bp, Homo sapiens
aaattgaatgcagta

SEQ ID NO: 1794429 - DNA, 15 bp, Homo sapiens
aattgaatgcagtaa

SEQ ID NO: 1794430 - DNA, 15 bp, Homo sapiens
attgaatgcagtaaa

SEQ ID NO: 1794431 - DNA, 15 bp, Homo sapiens
ttgaatgcagtaaaa

SEQ ID NO: 1794432 - DNA, 15 bp, Homo sapiens
tgaatgcagtaaaaa

SEQ ID NO: 1794433 - DNA, 15 bp, Homo sapiens
gaatgcagtaaaaaa

SEQ ID NO: 1794434 - DNA, 15 bp, Homo sapiens
aatgcagtaaaaaat

SEQ ID NO: 1794435 - DNA, 15 bp, Homo sapiens
atgcagtaaaaaatg

SEQ ID NO: 1794436 - DNA, 15 bp, Homo sapiens
tgcagtaaaaaatgg

SEQ ID NO: 1794437 - DNA, 15 bp, Homo sapiens
gcagtaaaaaatgga

SEQ ID NO: 1794438 - DNA, 15 bp, Homo sapiens
cagtaaaaaatggag

SEQ ID NO: 1794439 - DNA, 15 bp, Homo sapiens
agtaaaaaatggagg

SEQ ID NO: 1794440 - DNA, 15 bp, Homo sapiens
gtaaaaaatggaggt

SEQ ID NO: 1794441 - DNA, 15 bp, Homo sapiens
taaaaaatggaggtc

SEQ ID NO: 1794442 - DNA, 15 bp, Homo sapiens
aaaaaatggaggtca

SEQ ID NO: 1794443 - DNA, 15 bp, Homo sapiens
aaaaatggaggtcag

SEQ ID NO: 1794444 - DNA, 15 bp, Homo sapiens
aaaatggaggtcaga

SEQ ID NO: 1794445 - DNA, 15 bp, Homo sapiens
aaatggaggtcagac

SEQ ID NO: 1794446 - DNA, 15 bp, Homo sapiens
aatggaggtcagacg

SEQ ID NO: 1794447 - DNA, 15 bp, Homo sapiens
atggaggtcagacga

SEQ ID NO: 1794448 - DNA, 15 bp, Homo sapiens
tggaggtcagacgag

SEQ ID NO: 1794449 - DNA, 15 bp, Homo sapiens
ggaggtcagacgagg

SEQ ID NO: 1794450 - DNA, 15 bp, Homo sapiens
gaggtcagacgaggt

SEQ ID NO: 1794451 - DNA, 15 bp, Homo sapiens
aggtcagacgaggtg

SEQ ID NO: 1794452 - DNA, 15 bp, Homo sapiens
ggtcagacgaggtgg

SEQ ID NO: 1794453 - DNA, 15 bp, Homo sapiens
gtcagacgaggtggt

SEQ ID NO: 1794454 - DNA, 15 bp, Homo sapiens
tcagacgaggtggtt

SEQ ID NO: 1794455 - DNA, 15 bp, Homo sapiens
cagacgaggtggttc

SEQ ID NO: 1794456 - DNA, 15 bp, Homo sapiens
agacgaggtggttca

SEQ ID NO: 1794457 - DNA, 15 bp, Homo sapiens
gacgaggtggttcac

SEQ ID NO: 1794458 - DNA, 15 bp, Homo sapiens
acgaggtggttcacc

SEQ ID NO: 1794459 - DNA, 15 bp, Homo sapiens
cgaggtggttcaccc

SEQ ID NO: 1794460 - DNA, 15 bp, Homo sapiens
gaggtggttcaccct

SEQ ID NO: 1794461 - DNA, 15 bp, Homo sapiens
aggtggttcaccctt

SEQ ID NO: 1794462 - DNA, 15 bp, Homo sapiens
ggtggttcacccttg

SEQ ID NO: 1794463 - DNA, 15 bp, Homo sapiens
gtggttcacccttgt

SEQ ID NO: 1794464 - DNA, 15 bp, Homo sapiens
tggttcacccttgta

SEQ ID NO: 1794465 - DNA, 15 bp, Homo sapiens
ggttcacccttgtaa

SEQ ID NO: 1794466 - DNA, 15 bp, Homo sapiens
gttcacccttgtaat

SEQ ID NO: 1794467 - DNA, 15 bp, Homo sapiens
ttcacccttgtaatc

SEQ ID NO: 1794468 - DNA, 15 bp, Homo sapiens
tcacccttgtaatca

SEQ ID NO: 1794469 - DNA, 15 bp, Homo sapiens
cacccttgtaatcac

SEQ ID NO: 1794470 - DNA, 15 bp, Homo sapiens
acccttgtaatcaca

SEQ ID NO: 1794471 - DNA, 15 bp, Homo sapiens
cccttgtaatcacag

SEQ ID NO: 1794472 - DNA, 15 bp, Homo sapiens
ccttgtaatcacagc

SEQ ID NO: 1794473 - DNA, 15 bp, Homo sapiens
cttgtaatcacagca

SEQ ID NO: 1794474 - DNA, 15 bp, Homo sapiens
ttgtaatcacagcac

SEQ ID NO: 1794475 - DNA, 15 bp, Homo sapiens
tgtaatcacagcact

SEQ ID NO: 1794476 - DNA, 15 bp, Homo sapiens
gtaatcacagcactt

SEQ ID NO: 1794477 - DNA, 15 bp, Homo sapiens
taatcacagcacttt

SEQ ID NO: 1794478 - DNA, 15 bp, Homo sapiens
aatcacagcactttg

SEQ ID NO: 1794479 - DNA, 15 bp, Homo sapiens
atcacagcactttgg

SEQ ID NO: 1794480 - DNA, 15 bp, Homo sapiens
tcacagcactttggg

SEQ ID NO: 1794481 - DNA, 15 bp, Homo sapiens
cacagcactttggga

SEQ ID NO: 1794482 - DNA, 15 bp, Homo sapiens
acagcactttgggat

SEQ ID NO: 1794483 - DNA, 15 bp, Homo sapiens
cagcactttgggatg

SEQ ID NO: 1794484 - DNA, 15 bp, Homo sapiens
agcactttgggatgc

SEQ ID NO: 1794485 - DNA, 15 bp, Homo sapiens
gcactttgggatgct

SEQ ID NO: 1794486 - DNA, 15 bp, Homo sapiens
cactttgggatgctg

SEQ ID NO: 1794487 - DNA, 15 bp, Homo sapiens
actttgggatgctga

SEQ ID NO: 1794488 - DNA, 15 bp, Homo sapiens
ctttgggatgctgag

SEQ ID NO: 1794489 - DNA, 15 bp, Homo sapiens
tttgggatgctgagg

SEQ ID NO: 1794490 - DNA, 15 bp, Homo sapiens
ttgggatgctgaggt

SEQ ID NO: 1794491 - DNA, 15 bp, Homo sapiens
tgggatgctgaggtg

SEQ ID NO: 1794492 - DNA, 15 bp, Homo sapiens
gggatgctgaggtgg

SEQ ID NO: 1794493 - DNA, 15 bp, Homo sapiens
ggatgctgaggtggg

SEQ ID NO: 1794494 - DNA, 15 bp, Homo sapiens
gatgctgaggtgggt

SEQ ID NO: 1794495 - DNA, 15 bp, Homo sapiens
atgctgaggtgggtg

SEQ ID NO: 1794496 - DNA, 15 bp, Homo sapiens
tgctgaggtgggtgg

SEQ ID NO: 1794497 - DNA, 15 bp, Homo sapiens
gtggatcacttgagc

SEQ ID NO: 1794498 - DNA, 15 bp, Homo sapiens
tggatcacttgagcc

SEQ ID NO: 1794499 - DNA, 15 bp, Homo sapiens
ggagtttgagaccaa

SEQ ID NO: 1794500 - DNA, 15 bp, Homo sapiens
gagtttgagaccaac

SEQ ID NO: 1794501 - DNA, 15 bp, Homo sapiens
agtttgagaccaaca

SEQ ID NO: 1794502 - DNA, 15 bp, Homo sapiens
gtttgagaccaacat

SEQ ID NO: 1794503 - DNA, 15 bp, Homo sapiens
tttgagaccaacatg

SEQ ID NO: 1794504 - DNA, 15 bp, Homo sapiens
ttgagaccaacatgg

SEQ ID NO: 1794505 - DNA, 15 bp, Homo sapiens
tgagaccaacatggt

SEQ ID NO: 1794506 - DNA, 15 bp, Homo sapiens
gagaccaacatggtg

SEQ ID NO: 1794507 - DNA, 15 bp, Homo sapiens
agaccaacatggtga

SEQ ID NO: 1794508 - DNA, 15 bp, Homo sapiens
aaccctgtctctaca

SEQ ID NO: 1794509 - DNA, 15 bp, Homo sapiens
gctgggtgtggtggg

SEQ ID NO: 1794510 - DNA, 15 bp, Homo sapiens
ctgggtgtggtgggg

SEQ ID NO: 1794511 - DNA, 15 bp, Homo sapiens
tgggtgtggtgggga

SEQ ID NO: 1794512 - DNA, 15 bp, Homo sapiens
gggtgtggtggggag

SEQ ID NO: 1794513 - DNA, 15 bp, Homo sapiens
ggtgtggtggggagg

SEQ ID NO: 1794514 - DNA, 15 bp, Homo sapiens
gtgtggtggggaggc

SEQ ID NO: 1794515 - DNA, 15 bp, Homo sapiens
tgtggtggggaggct

SEQ ID NO: 1794516 - DNA, 15 bp, Homo sapiens
gtggtggggaggctg

SEQ ID NO: 1794517 - DNA, 15 bp, Homo sapiens
tggtggggaggctga

SEQ ID NO: 1794518 - DNA, 15 bp, Homo sapiens
ggtggggaggctgag

SEQ ID NO: 1794519 - DNA, 15 bp, Homo sapiens
gtggggaggctgagg

SEQ ID NO: 1794520 - DNA, 15 bp, Homo sapiens
tggggaggctgaggt

SEQ ID NO: 1794521 - DNA, 15 bp, Homo sapiens
ggggaggctgaggtg

SEQ ID NO: 1794522 - DNA, 15 bp, Homo sapiens
gattgcttgagcctg

SEQ ID NO: 1794523 - DNA, 15 bp, Homo sapiens
attgcttgagcctga

SEQ ID NO: 1794524 - DNA, 15 bp, Homo sapiens
ttgcttgagcctgag

SEQ ID NO: 1794525 - DNA, 15 bp, Homo sapiens
tgcttgagcctgaga

SEQ ID NO: 1794526 - DNA, 15 bp, Homo sapiens
gcttgagcctgagag

SEQ ID NO: 1794527 - DNA, 15 bp, Homo sapiens
cttgagcctgagagg

SEQ ID NO: 1794528 - DNA, 15 bp, Homo sapiens
ttgagcctgagaggt

SEQ ID NO: 1794529 - DNA, 15 bp, Homo sapiens
tgagcctgagaggtt

SEQ ID NO: 1794530 - DNA, 15 bp, Homo sapiens
gagcctgagaggttg

SEQ ID NO: 1794531 - DNA, 15 bp, Homo sapiens
agcctgagaggttga

SEQ ID NO: 1794532 - DNA, 15 bp, Homo sapiens
gcctgagaggttgag

SEQ ID NO: 1794533 - DNA, 15 bp, Homo sapiens
cctgagaggttgagg

SEQ ID NO: 1794534 - DNA, 15 bp, Homo sapiens
ctgagaggttgagga

SEQ ID NO: 1794535 - DNA, 15 bp, Homo sapiens
tgagaggttgaggat

SEQ ID NO: 1794536 - DNA, 15 bp, Homo sapiens
gagaggttgaggatg

SEQ ID NO: 1794537 - DNA, 15 bp, Homo sapiens
agaggttgaggatgc

SEQ ID NO: 1794538 - DNA, 15 bp, Homo sapiens
gaggttgaggatgca

SEQ ID NO: 1794539 - DNA, 15 bp, Homo sapiens
aggttgaggatgcag

SEQ ID NO: 1794540 - DNA, 15 bp, Homo sapiens
ggttgaggatgcagt

SEQ ID NO: 1794541 - DNA, 15 bp, Homo sapiens
gttgaggatgcagtg

SEQ ID NO: 1794542 - DNA, 15 bp, Homo sapiens
ttgaggatgcagtga

SEQ ID NO: 1794543 - DNA, 15 bp, Homo sapiens
tgaggatgcagtgag

SEQ ID NO: 1794544 - DNA, 15 bp, Homo sapiens
gaggatgcagtgagc

SEQ ID NO: 1794545 - DNA, 15 bp, Homo sapiens
aggatgcagtgagct

SEQ ID NO: 1794546 - DNA, 15 bp, Homo sapiens
ggatgcagtgagctg

SEQ ID NO: 1794547 - DNA, 15 bp, Homo sapiens
gatgcagtgagctgt

SEQ ID NO: 1794548 - DNA, 15 bp, Homo sapiens
atgcagtgagctgtg

SEQ ID NO: 1794549 - DNA, 15 bp, Homo sapiens
gagctgtgatcatgt

SEQ ID NO: 1794550 - DNA, 15 bp, Homo sapiens
agctgtgatcatgtc

SEQ ID NO: 1794551 - DNA, 15 bp, Homo sapiens
gctgtgatcatgtca

SEQ ID NO: 1794552 - DNA, 15 bp, Homo sapiens
ctgtgatcatgtcac

SEQ ID NO: 1794553 - DNA, 15 bp, Homo sapiens
tgtgatcatgtcact

SEQ ID NO: 1794554 - DNA, 15 bp, Homo sapiens
gtgatcatgtcactg

SEQ ID NO: 1794555 - DNA, 15 bp, Homo sapiens
tgatcatgtcactgc

SEQ ID NO: 1794556 - DNA, 15 bp, Homo sapiens
catgtcactgcactc

SEQ ID NO: 1794557 - DNA, 15 bp, Homo sapiens
atgtcactgcactcc

SEQ ID NO: 1794558 - DNA, 15 bp, Homo sapiens
gtcactgcactccat

SEQ ID NO: 1794559 - DNA, 15 bp, Homo sapiens
tcactgcactccatc

SEQ ID NO: 1794560 - DNA, 15 bp, Homo sapiens
cactgcactccatcc

SEQ ID NO: 1794561 - DNA, 15 bp, Homo sapiens
actgcactccatcct

SEQ ID NO: 1794562 - DNA, 15 bp, Homo sapiens
ctgcactccatcctg

SEQ ID NO: 1794563 - DNA, 15 bp, Homo sapiens
tgcactccatcctgg

SEQ ID NO: 1794564 - DNA, 15 bp, Homo sapiens
gcactccatcctggg

SEQ ID NO: 1794565 - DNA, 15 bp, Homo sapiens
cactccatcctgggt

SEQ ID NO: 1794566 - DNA, 15 bp, Homo sapiens
actccatcctgggtg

SEQ ID NO: 1794567 - DNA, 15 bp, Homo sapiens
ctccatcctgggtga

SEQ ID NO: 1794568 - DNA, 15 bp, Homo sapiens
tccatcctgggtgat

SEQ ID NO: 1794569 - DNA, 15 bp, Homo sapiens
ccatcctgggtgata

SEQ ID NO: 1794570 - DNA, 15 bp, Homo sapiens
catcctgggtgatag

SEQ ID NO: 1794571 - DNA, 15 bp, Homo sapiens
atcctgggtgataga

SEQ ID NO: 1794572 - DNA, 15 bp, Homo sapiens
tcctgggtgatagag

SEQ ID NO: 1794573 - DNA, 15 bp, Homo sapiens
cctgggtgatagagc

SEQ ID NO: 1794574 - DNA, 15 bp, Homo sapiens
ctgggtgatagagcg

SEQ ID NO: 1794575 - DNA, 15 bp, Homo sapiens
tgggtgatagagcga

SEQ ID NO: 1794576 - DNA, 15 bp, Homo sapiens
gggtgatagagcgag

SEQ ID NO: 1794577 - DNA, 15 bp, Homo sapiens
ggtgatagagcgaga

SEQ ID NO: 1794578 - DNA, 15 bp, Homo sapiens
gtgatagagcgagac

SEQ ID NO: 1794579 - DNA, 15 bp, Homo sapiens
tgatagagcgagacc

SEQ ID NO: 1794580 - DNA, 15 bp, Homo sapiens
gatagagcgagaccc

SEQ ID NO: 1794581 - DNA, 15 bp, Homo sapiens
atagagcgagaccca

SEQ ID NO: 1794582 - DNA, 15 bp, Homo sapiens
tagagcgagacccaa

SEQ ID NO: 1794583 - DNA, 15 bp, Homo sapiens
agagcgagacccaat

SEQ ID NO: 1794584 - DNA, 15 bp, Homo sapiens
gagcgagacccaatc

SEQ ID NO: 1794585 - DNA, 15 bp, Homo sapiens
agcgagacccaatcc

SEQ ID NO: 1794586 - DNA, 15 bp, Homo sapiens
gcgagacccaatcca

SEQ ID NO: 1794587 - DNA, 15 bp, Homo sapiens
cgagacccaatccaa

SEQ ID NO: 1794588 - DNA, 15 bp, Homo sapiens
gagacccaatccaaa

SEQ ID NO: 1794589 - DNA, 15 bp, Homo sapiens
agacccaatccaaag

SEQ ID NO: 1794590 - DNA, 15 bp, Homo sapiens
gacccaatccaaaga

SEQ ID NO: 1794591 - DNA, 15 bp, Homo sapiens
acccaatccaaagaa

SEQ ID NO: 1794592 - DNA, 15 bp, Homo sapiens
cccaatccaaagaaa

SEQ ID NO: 1794593 - DNA, 15 bp, Homo sapiens
ccaatccaaagaaaa

SEQ ID NO: 1794594 - DNA, 15 bp, Homo sapiens
caatccaaagaaaaa

SEQ ID NO: 1794595 - DNA, 15 bp, Homo sapiens
aatccaaagaaaaag

SEQ ID NO: 1794596 - DNA, 15 bp, Homo sapiens
atccaaagaaaaaga

SEQ ID NO: 1794597 - DNA, 15 bp, Homo sapiens
tccaaagaaaaagaa

SEQ ID NO: 1794598 - DNA, 15 bp, Homo sapiens
ccaaagaaaaagaaa

SEQ ID NO: 1794599 - DNA, 15 bp, Homo sapiens
caaagaaaaagaaat

SEQ ID NO: 1794600 - DNA, 15 bp, Homo sapiens
aaagaaaaagaaatg

SEQ ID NO: 1794601 - DNA, 15 bp, Homo sapiens
aagaaaaagaaatga

SEQ ID NO: 1794602 - DNA, 15 bp, Homo sapiens
agaaaaagaaatgat

SEQ ID NO: 1794603 - DNA, 15 bp, Homo sapiens
gaaaaagaaatgatg

SEQ ID NO: 1794604 - DNA, 15 bp, Homo sapiens
aaaaagaaatgatgg

SEQ ID NO: 1794605 - DNA, 15 bp, Homo sapiens
aaaagaaatgatggg

SEQ ID NO: 1794606 - DNA, 15 bp, Homo sapiens
aaagaaatgatgggg

SEQ ID NO: 1794607 - DNA, 15 bp, Homo sapiens
aagaaatgatggggg

SEQ ID NO: 1794608 - DNA, 15 bp, Homo sapiens
agaaatgatggggga

SEQ ID NO: 1794609 - DNA, 15 bp, Homo sapiens
gaaatgatgggggac

SEQ ID NO: 1794610 - DNA, 15 bp, Homo sapiens
aaatgatgggggact

SEQ ID NO: 1794611 - DNA, 15 bp, Homo sapiens
aatgatgggggactt

SEQ ID NO: 1794612 - DNA, 15 bp, Homo sapiens
atgatgggggacttc

SEQ ID NO: 1794613 - DNA, 15 bp, Homo sapiens
tgatgggggacttcc

SEQ ID NO: 1794614 - DNA, 15 bp, Homo sapiens
gatgggggacttcct

SEQ ID NO: 1794615 - DNA, 15 bp, Homo sapiens
atgggggacttcctg

SEQ ID NO: 1794616 - DNA, 15 bp, Homo sapiens
tgggggacttcctgt

SEQ ID NO: 1794617 - DNA, 15 bp, Homo sapiens
gggggacttcctgtt

SEQ ID NO: 1794618 - DNA, 15 bp, Homo sapiens
ggggacttcctgttg

SEQ ID NO: 1794619 - DNA, 15 bp, Homo sapiens
gggacttcctgttgc

SEQ ID NO: 1794620 - DNA, 15 bp, Homo sapiens
ggacttcctgttgct

SEQ ID NO: 1794621 - DNA, 15 bp, Homo sapiens
gacttcctgttgctt

SEQ ID NO: 1794622 - DNA, 15 bp, Homo sapiens
acttcctgttgcttc

SEQ ID NO: 1794623 - DNA, 15 bp, Homo sapiens
cttcctgttgcttct

SEQ ID NO: 1794624 - DNA, 15 bp, Homo sapiens
ttcctgttgcttctt

SEQ ID NO: 1794625 - DNA, 15 bp, Homo sapiens
tcctgttgcttcttt

SEQ ID NO: 1794626 - DNA, 15 bp, Homo sapiens
cctgttgcttctttg

SEQ ID NO: 1794627 - DNA, 15 bp, Homo sapiens
ctgttgcttctttgt

SEQ ID NO: 1794628 - DNA, 15 bp, Homo sapiens
tgttgcttctttgtt

SEQ ID NO: 1794629 - DNA, 15 bp, Homo sapiens
gttgcttctttgttt

SEQ ID NO: 1794630 - DNA, 15 bp, Homo sapiens
ttgcttctttgtttg

SEQ ID NO: 1794631 - DNA, 15 bp, Homo sapiens
tgcttctttgtttgg

SEQ ID NO: 1794632 - DNA, 15 bp, Homo sapiens
gcttctttgtttggg

SEQ ID NO: 1794633 - DNA, 15 bp, Homo sapiens
cttctttgtttgggc

SEQ ID NO: 1794634 - DNA, 15 bp, Homo sapiens
ttctttgtttgggcc

SEQ ID NO: 1794635 - DNA, 15 bp, Homo sapiens
tctttgtttgggcct

SEQ ID NO: 1794636 - DNA, 15 bp, Homo sapiens
ctttgtttgggcctc

SEQ ID NO: 1794637 - DNA, 15 bp, Homo sapiens
tttgtttgggcctca

SEQ ID NO: 1794638 - DNA, 15 bp, Homo sapiens
ttgtttgggcctcaa

SEQ ID NO: 1794639 - DNA, 15 bp, Homo sapiens
tgtttgggcctcaat

SEQ ID NO: 1794640 - DNA, 15 bp, Homo sapiens
gtttgggcctcaatg

SEQ ID NO: 1794641 - DNA, 15 bp, Homo sapiens
tttgggcctcaatgg

SEQ ID NO: 1794642 - DNA, 15 bp, Homo sapiens
ttgggcctcaatggt

SEQ ID NO: 1794643 - DNA, 15 bp, Homo sapiens
tgggcctcaatggtt

SEQ ID NO: 1794644 - DNA, 15 bp, Homo sapiens
gggcctcaatggttt

SEQ ID NO: 1794645 - DNA, 15 bp, Homo sapiens
ggcctcaatggttta

SEQ ID NO: 1794646 - DNA, 15 bp, Homo sapiens
gcctcaatggtttaa

SEQ ID NO: 1794647 - DNA, 15 bp, Homo sapiens
cctcaatggtttaaa

SEQ ID NO: 1794648 - DNA, 15 bp, Homo sapiens
ctcaatggtttaaat

SEQ ID NO: 1794649 - DNA, 15 bp, Homo sapiens
tcaatggtttaaatg

SEQ ID NO: 1794650 - DNA, 15 bp, Homo sapiens
caatggtttaaatga

SEQ ID NO: 1794651 - DNA, 15 bp, Homo sapiens
aatggtttaaatgat

SEQ ID NO: 1794652 - DNA, 15 bp, Homo sapiens
atggtttaaatgatt

SEQ ID NO: 1794653 - DNA, 15 bp, Homo sapiens
tggtttaaatgattg

SEQ ID NO: 1794654 - DNA, 15 bp, Homo sapiens
ggtttaaatgattga

SEQ ID NO: 1794655 - DNA, 15 bp, Homo sapiens
gtttaaatgattgaa

SEQ ID NO: 1794656 - DNA, 15 bp, Homo sapiens
tttaaatgattgaat

SEQ ID NO: 1794657 - DNA, 15 bp, Homo sapiens
ttaaatgattgaatt

SEQ ID NO: 1794658 - DNA, 15 bp, Homo sapiens
taaatgattgaattg

SEQ ID NO: 1794659 - DNA, 15 bp, Homo sapiens
aaatgattgaattgt

SEQ ID NO: 1794660 - DNA, 15 bp, Homo sapiens
aatgattgaattgtc

SEQ ID NO: 1794661 - DNA, 15 bp, Homo sapiens
atgattgaattgtca

SEQ ID NO: 1794662 - DNA, 15 bp, Homo sapiens
tgattgaattgtcaa

SEQ ID NO: 1794663 - DNA, 15 bp, Homo sapiens
gattgaattgtcaaa

SEQ ID NO: 1794664 - DNA, 15 bp, Homo sapiens
attgaattgtcaaaa

SEQ ID NO: 1794665 - DNA, 15 bp, Homo sapiens
ttgaattgtcaaaat

SEQ ID NO: 1794666 - DNA, 15 bp, Homo sapiens
tgaattgtcaaaata

SEQ ID NO: 1794667 - DNA, 15 bp, Homo sapiens
gaattgtcaaaatag

SEQ ID NO: 1794668 - DNA, 15 bp, Homo sapiens
aattgtcaaaatagg

SEQ ID NO: 1794669 - DNA, 15 bp, Homo sapiens
attgtcaaaatagga

SEQ ID NO: 1794670 - DNA, 15 bp, Homo sapiens
ttgtcaaaataggag

SEQ ID NO: 1794671 - DNA, 15 bp, Homo sapiens
tgtcaaaataggagg

SEQ ID NO: 1794672 - DNA, 15 bp, Homo sapiens
gtcaaaataggagga

SEQ ID NO: 1794673 - DNA, 15 bp, Homo sapiens
tcaaaataggaggaa

SEQ ID NO: 1794674 - DNA, 15 bp, Homo sapiens
caaaataggaggaat

SEQ ID NO: 1794675 - DNA, 15 bp, Homo sapiens
aaaataggaggaatt

SEQ ID NO: 1794676 - DNA, 15 bp, Homo sapiens
aaataggaggaattg

SEQ ID NO: 1794677 - DNA, 15 bp, Homo sapiens
aataggaggaattga

SEQ ID NO: 1794678 - DNA, 15 bp, Homo sapiens
ataggaggaattgag

SEQ ID NO: 1794679 - DNA, 15 bp, Homo sapiens
taggaggaattgaga

SEQ ID NO: 1794680 - DNA, 15 bp, Homo sapiens
aggaggaattgagat

SEQ ID NO: 1794681 - DNA, 15 bp, Homo sapiens
ggaggaattgagatc

SEQ ID NO: 1794682 - DNA, 15 bp, Homo sapiens
gaggaattgagatct

SEQ ID NO: 1794683 - DNA, 15 bp, Homo sapiens
aggaattgagatctg

SEQ ID NO: 1794684 - DNA, 15 bp, Homo sapiens
ggaattgagatctgc

SEQ ID NO: 1794685 - DNA, 15 bp, Homo sapiens
gaattgagatctgca

SEQ ID NO: 1794686 - DNA, 15 bp, Homo sapiens
aattgagatctgcag

SEQ ID NO: 1794687 - DNA, 15 bp, Homo sapiens
attgagatctgcaga

SEQ ID NO: 1794688 - DNA, 15 bp, Homo sapiens
ttgagatctgcagat

SEQ ID NO: 1794689 - DNA, 15 bp, Homo sapiens
tgagatctgcagatg

SEQ ID NO: 1794690 - DNA, 15 bp, Homo sapiens
gagatctgcagatgg

SEQ ID NO: 1794691 - DNA, 15 bp, Homo sapiens
agatctgcagatggt

SEQ ID NO: 1794692 - DNA, 15 bp, Homo sapiens
gatctgcagatggtt

SEQ ID NO: 1794693 - DNA, 15 bp, Homo sapiens
atctgcagatggtta

SEQ ID NO: 1794694 - DNA, 15 bp, Homo sapiens
tctgcagatggttaa

SEQ ID NO: 1794695 - DNA, 15 bp, Homo sapiens
ctgcagatggttaat

SEQ ID NO: 1794696 - DNA, 15 bp, Homo sapiens
tgcagatggttaata

SEQ ID NO: 1794697 - DNA, 15 bp, Homo sapiens
gcagatggttaatac

SEQ ID NO: 1794698 - DNA, 15 bp, Homo sapiens
cagatggttaatacc

SEQ ID NO: 1794699 - DNA, 15 bp, Homo sapiens
agatggttaatacca

SEQ ID NO: 1794700 - DNA, 15 bp, Homo sapiens
gatggttaataccat

SEQ ID NO: 1794701 - DNA, 15 bp, Homo sapiens
atggttaataccatt

SEQ ID NO: 1794702 - DNA, 15 bp, Homo sapiens
tggttaataccattc

SEQ ID NO: 1794703 - DNA, 15 bp, Homo sapiens
ggttaataccattca

SEQ ID NO: 1794704 - DNA, 15 bp, Homo sapiens
gttaataccattcaa

SEQ ID NO: 1794705 - DNA, 15 bp, Homo sapiens
ttaataccattcaaa

SEQ ID NO: 1794706 - DNA, 15 bp, Homo sapiens
taataccattcaaag

SEQ ID NO: 1794707 - DNA, 15 bp, Homo sapiens
aataccattcaaagg

SEQ ID NO: 1794708 - DNA, 15 bp, Homo sapiens
ataccattcaaaggt

SEQ ID NO: 1794709 - DNA, 15 bp, Homo sapiens
taccattcaaaggta

SEQ ID NO: 1794710 - DNA, 15 bp, Homo sapiens
accattcaaaggtat

SEQ ID NO: 1794711 - DNA, 15 bp, Homo sapiens
ccattcaaaggtatc

SEQ ID NO: 1794712 - DNA, 15 bp, Homo sapiens
cattcaaaggtatca

SEQ ID NO: 1794713 - DNA, 15 bp, Homo sapiens
attcaaaggtatcag

SEQ ID NO: 1794714 - DNA, 15 bp, Homo sapiens
ttcaaaggtatcagc

SEQ ID NO: 1794715 - DNA, 15 bp, Homo sapiens
tcaaaggtatcagcc

SEQ ID NO: 1794716 - DNA, 15 bp, Homo sapiens
caaaggtatcagccg

SEQ ID NO: 1794717 - DNA, 15 bp, Homo sapiens
aaaggtatcagccga

SEQ ID NO: 1794718 - DNA, 15 bp, Homo sapiens
aaggtatcagccgac

SEQ ID NO: 1794719 - DNA, 15 bp, Homo sapiens
aggtatcagccgaca

SEQ ID NO: 1794720 - DNA, 15 bp, Homo sapiens
ggtatcagccgacac

SEQ ID NO: 1794721 - DNA, 15 bp, Homo sapiens
gtatcagccgacacc

SEQ ID NO: 1794722 - DNA, 15 bp, Homo sapiens
tatcagccgacacca

SEQ ID NO: 1794723 - DNA, 15 bp, Homo sapiens
atcagccgacaccat

SEQ ID NO: 1794724 - DNA, 15 bp, Homo sapiens
tcagccgacaccatg

SEQ ID NO: 1794725 - DNA, 15 bp, Homo sapiens
cagccgacaccatga

SEQ ID NO: 1794726 - DNA, 15 bp, Homo sapiens
agccgacaccatgaa

SEQ ID NO: 1794727 - DNA, 15 bp, Homo sapiens
gccgacaccatgaaa

SEQ ID NO: 1794728 - DNA, 15 bp, Homo sapiens
ccgacaccatgaaac

SEQ ID NO: 1794729 - DNA, 15 bp, Homo sapiens
cgacaccatgaaaca

SEQ ID NO: 1794730 - DNA, 15 bp, Homo sapiens
gacaccatgaaacat

SEQ ID NO: 1794731 - DNA, 15 bp, Homo sapiens
acaccatgaaacatt

SEQ ID NO: 1794732 - DNA, 15 bp, Homo sapiens
caccatgaaacattg

SEQ ID NO: 1794733 - DNA, 15 bp, Homo sapiens
accatgaaacattga

SEQ ID NO: 1794734 - DNA, 15 bp, Homo sapiens
ccatgaaacattgat

SEQ ID NO: 1794735 - DNA, 15 bp, Homo sapiens
catgaaacattgatt

SEQ ID NO: 1794736 - DNA, 15 bp, Homo sapiens
atgaaacattgattt

SEQ ID NO: 1794737 - DNA, 15 bp, Homo sapiens
tgaaacattgatttt

SEQ ID NO: 1794738 - DNA, 15 bp, Homo sapiens
gaaacattgattttt

SEQ ID NO: 1794739 - DNA, 15 bp, Homo sapiens
aaacattgatttttt

SEQ ID NO: 1794740 - DNA, 15 bp, Homo sapiens
aacattgatttttta

SEQ ID NO: 1794741 - DNA, 15 bp, Homo sapiens
acattgattttttaa

SEQ ID NO: 1794742 - DNA, 15 bp, Homo sapiens
cattgattttttaat

SEQ ID NO: 1794743 - DNA, 15 bp, Homo sapiens
attgattttttaatg

SEQ ID NO: 1794744 - DNA, 15 bp, Homo sapiens
ttgattttttaatgt

SEQ ID NO: 1794745 - DNA, 15 bp, Homo sapiens
tgattttttaatgta

SEQ ID NO: 1794746 - DNA, 15 bp, Homo sapiens
gattttttaatgtac

SEQ ID NO: 1794747 - DNA, 15 bp, Homo sapiens
attttttaatgtaca

SEQ ID NO: 1794748 - DNA, 15 bp, Homo sapiens
ttttttaatgtacat

SEQ ID NO: 1794749 - DNA, 15 bp, Homo sapiens
tttttaatgtacatt

SEQ ID NO: 1794750 - DNA, 15 bp, Homo sapiens
ttttaatgtacattc

SEQ ID NO: 1794751 - DNA, 15 bp, Homo sapiens
tttaatgtacattca

SEQ ID NO: 1794752 - DNA, 15 bp, Homo sapiens
ttaatgtacattcaa

SEQ ID NO: 1794753 - DNA, 15 bp, Homo sapiens
taatgtacattcaaa

SEQ ID NO: 1794754 - DNA, 15 bp, Homo sapiens
aatgtacattcaaat

SEQ ID NO: 1794755 - DNA, 15 bp, Homo sapiens
atgtacattcaaata

SEQ ID NO: 1794756 - DNA, 15 bp, Homo sapiens
tgtacattcaaatat

SEQ ID NO: 1794757 - DNA, 15 bp, Homo sapiens
gtacattcaaatata

SEQ ID NO: 1794758 - DNA, 15 bp, Homo sapiens
tacattcaaatatac

SEQ ID NO: 1794759 - DNA, 15 bp, Homo sapiens
acattcaaatatacc

SEQ ID NO: 1794760 - DNA, 15 bp, Homo sapiens
cattcaaatatacca

SEQ ID NO: 1794761 - DNA, 15 bp, Homo sapiens
attcaaatataccac

SEQ ID NO: 1794762 - DNA, 15 bp, Homo sapiens
ttcaaatataccacc

SEQ ID NO: 1794763 - DNA, 15 bp, Homo sapiens
tcaaatataccacca

SEQ ID NO: 1794764 - DNA, 15 bp, Homo sapiens
caaatataccaccac

SEQ ID NO: 1794765 - DNA, 15 bp, Homo sapiens
aaatataccaccact

SEQ ID NO: 1794766 - DNA, 15 bp, Homo sapiens
aatataccaccactt

SEQ ID NO: 1794767 - DNA, 15 bp, Homo sapiens
atataccaccacttc

SEQ ID NO: 1794768 - DNA, 15 bp, Homo sapiens
tataccaccacttcg

SEQ ID NO: 1794769 - DNA, 15 bp, Homo sapiens
ataccaccacttcga

SEQ ID NO: 1794770 - DNA, 15 bp, Homo sapiens
taccaccacttcgac

SEQ ID NO: 1794771 - DNA, 15 bp, Homo sapiens
accaccacttcgaca

SEQ ID NO: 1794772 - DNA, 15 bp, Homo sapiens
ccaccacttcgacaa

SEQ ID NO: 1794773 - DNA, 15 bp, Homo sapiens
caccacttcgacaat

SEQ ID NO: 1794774 - DNA, 15 bp, Homo sapiens
accacttcgacaata

SEQ ID NO: 1794775 - DNA, 15 bp, Homo sapiens
ccacttcgacaataa

SEQ ID NO: 1794776 - DNA, 15 bp, Homo sapiens
cacttcgacaataac

SEQ ID NO: 1794777 - DNA, 15 bp, Homo sapiens
acttcgacaataaca

SEQ ID NO: 1794778 - DNA, 15 bp, Homo sapiens
cttcgacaataacaa

SEQ ID NO: 1794779 - DNA, 15 bp, Homo sapiens
ttcgacaataacaac

SEQ ID NO: 1794780 - DNA, 15 bp, Homo sapiens
tcgacaataacaaca

SEQ ID NO: 1794781 - DNA, 15 bp, Homo sapiens
cgacaataacaacaa

SEQ ID NO: 1794782 - DNA, 15 bp, Homo sapiens
gacaataacaacaac

SEQ ID NO: 1794783 - DNA, 15 bp, Homo sapiens
acaataacaacaaca

SEQ ID NO: 1794784 - DNA, 15 bp, Homo sapiens
caataacaacaacat

SEQ ID NO: 1794785 - DNA, 15 bp, Homo sapiens
aataacaacaacatg

SEQ ID NO: 1794786 - DNA, 15 bp, Homo sapiens
ataacaacaacatga

SEQ ID NO: 1794787 - DNA, 15 bp, Homo sapiens
taacaacaacatgat

SEQ ID NO: 1794788 - DNA, 15 bp, Homo sapiens
aacaacaacatgatg

SEQ ID NO: 1794789 - DNA, 15 bp, Homo sapiens
acaacaacatgatga

SEQ ID NO: 1794790 - DNA, 15 bp, Homo sapiens
caacaacatgatgat

SEQ ID NO: 1794791 - DNA, 15 bp, Homo sapiens
aacaacatgatgatg

SEQ ID NO: 1794792 - DNA, 15 bp, Homo sapiens
acaacatgatgatga

SEQ ID NO: 1794793 - DNA, 15 bp, Homo sapiens
caacatgatgatgat

SEQ ID NO: 1794794 - DNA, 15 bp, Homo sapiens
aacatgatgatgatg

SEQ ID NO: 1794795 - DNA, 15 bp, Homo sapiens
acatgatgatgatga

SEQ ID NO: 1794796 - DNA, 15 bp, Homo sapiens
gatgatgatgatgag

SEQ ID NO: 1794797 - DNA, 15 bp, Homo sapiens
atgatgatgatgaga

SEQ ID NO: 1794798 - DNA, 15 bp, Homo sapiens
tgatgatgatgagag

SEQ ID NO: 1794799 - DNA, 15 bp, Homo sapiens
gatgatgatgagagg

SEQ ID NO: 1794800 - DNA, 15 bp, Homo sapiens
atgatgatgagaggg

SEQ ID NO: 1794801 - DNA, 15 bp, Homo sapiens
tgatgatgagaggga

SEQ ID NO: 1794802 - DNA, 15 bp, Homo sapiens
gatgatgagagggac

SEQ ID NO: 1794803 - DNA, 15 bp, Homo sapiens
atgatgagagggact

SEQ ID NO: 1794804 - DNA, 15 bp, Homo sapiens
tgatgagagggactt

SEQ ID NO: 1794805 - DNA, 15 bp, Homo sapiens
gatgagagggacttc

SEQ ID NO: 1794806 - DNA, 15 bp, Homo sapiens
atgagagggacttcc

SEQ ID NO: 1794807 - DNA, 15 bp, Homo sapiens
tgagagggacttcct

SEQ ID NO: 1794808 - DNA, 15 bp, Homo sapiens
gagagggacttcctc

SEQ ID NO: 1794809 - DNA, 15 bp, Homo sapiens
agagggacttcctct

SEQ ID NO: 1794810 - DNA, 15 bp, Homo sapiens
gagggacttcctctc

SEQ ID NO: 1794811 - DNA, 15 bp, Homo sapiens
agggacttcctctca

SEQ ID NO: 1794812 - DNA, 15 bp, Homo sapiens
gggacttcctctcaa

SEQ ID NO: 1794813 - DNA, 15 bp, Homo sapiens
ggacttcctctcaaa

SEQ ID NO: 1794814 - DNA, 15 bp, Homo sapiens
gacttcctctcaaag

SEQ ID NO: 1794815 - DNA, 15 bp, Homo sapiens
acttcctctcaaagc

SEQ ID NO: 1794816 - DNA, 15 bp, Homo sapiens
cttcctctcaaagct

SEQ ID NO: 1794817 - DNA, 15 bp, Homo sapiens
ttcctctcaaagctc

SEQ ID NO: 1794818 - DNA, 15 bp, Homo sapiens
tcctctcaaagctcc

SEQ ID NO: 1794819 - DNA, 15 bp, Homo sapiens
cctctcaaagctccc

SEQ ID NO: 1794820 - DNA, 15 bp, Homo sapiens
ctctcaaagctccca

SEQ ID NO: 1794821 - DNA, 15 bp, Homo sapiens
tctcaaagctcccag

SEQ ID NO: 1794822 - DNA, 15 bp, Homo sapiens
ctcaaagctcccagc

SEQ ID NO: 1794823 - DNA, 15 bp, Homo sapiens
tcaaagctcccagca

SEQ ID NO: 1794824 - DNA, 15 bp, Homo sapiens
caaagctcccagcag

SEQ ID NO: 1794825 - DNA, 15 bp, Homo sapiens
aaagctcccagcagc

SEQ ID NO: 1794826 - DNA, 15 bp, Homo sapiens
aagctcccagcagca

SEQ ID NO: 1794827 - DNA, 15 bp, Homo sapiens
agctcccagcagcat

SEQ ID NO: 1794828 - DNA, 15 bp, Homo sapiens
gctcccagcagcatt

SEQ ID NO: 1794829 - DNA, 15 bp, Homo sapiens
ctcccagcagcattt

SEQ ID NO: 1794830 - DNA, 15 bp, Homo sapiens
tcccagcagcatttt

SEQ ID NO: 1794831 - DNA, 15 bp, Homo sapiens
cccagcagcattttc

SEQ ID NO: 1794832 - DNA, 15 bp, Homo sapiens
ccagcagcattttcc

SEQ ID NO: 1794833 - DNA, 15 bp, Homo sapiens
cagcagcattttcca

SEQ ID NO: 1794834 - DNA, 15 bp, Homo sapiens
agcagcattttccat

SEQ ID NO: 1794835 - DNA, 15 bp, Homo sapiens
gcagcattttccatc

SEQ ID NO: 1794836 - DNA, 15 bp, Homo sapiens
cagcattttccatca

SEQ ID NO: 1794837 - DNA, 15 bp, Homo sapiens
agcattttccatcac

SEQ ID NO: 1794838 - DNA, 15 bp, Homo sapiens
gcattttccatcact

SEQ ID NO: 1794839 - DNA, 15 bp, Homo sapiens
cattttccatcactt

SEQ ID NO: 1794840 - DNA, 15 bp, Homo sapiens
attttccatcacttt

SEQ ID NO: 1794841 - DNA, 15 bp, Homo sapiens
ttttccatcactttg

SEQ ID NO: 1794842 - DNA, 15 bp, Homo sapiens
tttccatcactttgt

SEQ ID NO: 1794843 - DNA, 15 bp, Homo sapiens
ttccatcactttgtt

SEQ ID NO: 1794844 - DNA, 15 bp, Homo sapiens
tccatcactttgttg

SEQ ID NO: 1794845 - DNA, 15 bp, Homo sapiens
ccatcactttgttgc

SEQ ID NO: 1794846 - DNA, 15 bp, Homo sapiens
catcactttgttgca

SEQ ID NO: 1794847 - DNA, 15 bp, Homo sapiens
atcactttgttgcat

SEQ ID NO: 1794848 - DNA, 15 bp, Homo sapiens
tcactttgttgcatg

SEQ ID NO: 1794849 - DNA, 15 bp, Homo sapiens
cactttgttgcatga

SEQ ID NO: 1794850 - DNA, 15 bp, Homo sapiens
actttgttgcatgaa

SEQ ID NO: 1794851 - DNA, 15 bp, Homo sapiens
ctttgttgcatgaac

SEQ ID NO: 1794852 - DNA, 15 bp, Homo sapiens
tttgttgcatgaact

SEQ ID NO: 1794853 - DNA, 15 bp, Homo sapiens
ttgttgcatgaactc

SEQ ID NO: 1794854 - DNA, 15 bp, Homo sapiens
tgttgcatgaactct

SEQ ID NO: 1794855 - DNA, 15 bp, Homo sapiens
gttgcatgaactctt

SEQ ID NO: 1794856 - DNA, 15 bp, Homo sapiens
ttgcatgaactcttc

SEQ ID NO: 1794857 - DNA, 15 bp, Homo sapiens
tgcatgaactcttca

SEQ ID NO: 1794858 - DNA, 15 bp, Homo sapiens
gcatgaactcttcat

SEQ ID NO: 1794859 - DNA, 15 bp, Homo sapiens
catgaactcttcatc

SEQ ID NO: 1794860 - DNA, 15 bp, Homo sapiens
atgaactcttcatca

SEQ ID NO: 1794861 - DNA, 15 bp, Homo sapiens
tgaactcttcatcaa

SEQ ID NO: 1794862 - DNA, 15 bp, Homo sapiens
gaactcttcatcaaa

SEQ ID NO: 1794863 - DNA, 15 bp, Homo sapiens
aactcttcatcaaaa

SEQ ID NO: 1794864 - DNA, 15 bp, Homo sapiens
actcttcatcaaaat

SEQ ID NO: 1794865 - DNA, 15 bp, Homo sapiens
ctcttcatcaaaatc

SEQ ID NO: 1794866 - DNA, 15 bp, Homo sapiens
tcttcatcaaaatca

SEQ ID NO: 1794867 - DNA, 15 bp, Homo sapiens
cttcatcaaaatcag

SEQ ID NO: 1794868 - DNA, 15 bp, Homo sapiens
ttcatcaaaatcaga

SEQ ID NO: 1794869 - DNA, 15 bp, Homo sapiens
tcatcaaaatcagat

SEQ ID NO: 1794870 - DNA, 15 bp, Homo sapiens
catcaaaatcagata

SEQ ID NO: 1794871 - DNA, 15 bp, Homo sapiens
atcaaaatcagatat

SEQ ID NO: 1794872 - DNA, 15 bp, Homo sapiens
tcaaaatcagatatg

SEQ ID NO: 1794873 - DNA, 15 bp, Homo sapiens
caaaatcagatatga

SEQ ID NO: 1794874 - DNA, 15 bp, Homo sapiens
aaaatcagatatgag

SEQ ID NO: 1794875 - DNA, 15 bp, Homo sapiens
aaatcagatatgagg

SEQ ID NO: 1794876 - DNA, 15 bp, Homo sapiens
aatcagatatgagga

SEQ ID NO: 1794877 - DNA, 15 bp, Homo sapiens
atcagatatgaggag

SEQ ID NO: 1794878 - DNA, 15 bp, Homo sapiens
tcagatatgaggaga

SEQ ID NO: 1794879 - DNA, 15 bp, Homo sapiens
cagatatgaggagaa

SEQ ID NO: 1794880 - DNA, 15 bp, Homo sapiens
agatatgaggagaag

SEQ ID NO: 1794881 - DNA, 15 bp, Homo sapiens
gatatgaggagaagt

SEQ ID NO: 1794882 - DNA, 15 bp, Homo sapiens
atatgaggagaagta

SEQ ID NO: 1794883 - DNA, 15 bp, Homo sapiens
tatgaggagaagtat

SEQ ID NO: 1794884 - DNA, 15 bp, Homo sapiens
atgaggagaagtatg

SEQ ID NO: 1794885 - DNA, 15 bp, Homo sapiens
tgaggagaagtatgc

SEQ ID NO: 1794886 - DNA, 15 bp, Homo sapiens
gaggagaagtatgcc

SEQ ID NO: 1794887 - DNA, 15 bp, Homo sapiens
aggagaagtatgcca

SEQ ID NO: 1794888 - DNA, 15 bp, Homo sapiens
ggagaagtatgccag

SEQ ID NO: 1794889 - DNA, 15 bp, Homo sapiens
gagaagtatgccaga

SEQ ID NO: 1794890 - DNA, 15 bp, Homo sapiens
agaagtatgccagat

SEQ ID NO: 1794891 - DNA, 15 bp, Homo sapiens
gaagtatgccagatg

SEQ ID NO: 1794892 - DNA, 15 bp, Homo sapiens
aagtatgccagatgt

SEQ ID NO: 1794893 - DNA, 15 bp, Homo sapiens
agtatgccagatgtt

SEQ ID NO: 1794894 - DNA, 15 bp, Homo sapiens
gtatgccagatgtta

SEQ ID NO: 1794895 - DNA, 15 bp, Homo sapiens
tatgccagatgttag

SEQ ID NO: 1794896 - DNA, 15 bp, Homo sapiens
atgccagatgttagt

SEQ ID NO: 1794897 - DNA, 15 bp, Homo sapiens
tgccagatgttagtg

SEQ ID NO: 1794898 - DNA, 15 bp, Homo sapiens
gccagatgttagtga

SEQ ID NO: 1794899 - DNA, 15 bp, Homo sapiens
ccagatgttagtgag

SEQ ID NO: 1794900 - DNA, 15 bp, Homo sapiens
cagatgttagtgagg

SEQ ID NO: 1794901 - DNA, 15 bp, Homo sapiens
agatgttagtgagga

SEQ ID NO: 1794902 - DNA, 15 bp, Homo sapiens
gatgttagtgaggac

SEQ ID NO: 1794903 - DNA, 15 bp, Homo sapiens
atgttagtgaggact

SEQ ID NO: 1794904 - DNA, 15 bp, Homo sapiens
tgttagtgaggacta

SEQ ID NO: 1794905 - DNA, 15 bp, Homo sapiens
gttagtgaggactaa

SEQ ID NO: 1794906 - DNA, 15 bp, Homo sapiens
ttagtgaggactaag

SEQ ID NO: 1794907 - DNA, 15 bp, Homo sapiens
tagtgaggactaaga

SEQ ID NO: 1794908 - DNA, 15 bp, Homo sapiens
agtgaggactaagat

SEQ ID NO: 1794909 - DNA, 15 bp, Homo sapiens
gtgaggactaagatg

SEQ ID NO: 1794910 - DNA, 15 bp, Homo sapiens
tgaggactaagatgt

SEQ ID NO: 1794911 - DNA, 15 bp, Homo sapiens
gaggactaagatgtt

SEQ ID NO: 1794912 - DNA, 15 bp, Homo sapiens
aggactaagatgttg

SEQ ID NO: 1794913 - DNA, 15 bp, Homo sapiens
ggactaagatgttgg

SEQ ID NO: 1794914 - DNA, 15 bp, Homo sapiens
gactaagatgttggt

SEQ ID NO: 1794915 - DNA, 15 bp, Homo sapiens
actaagatgttggtt

SEQ ID NO: 1794916 - DNA, 15 bp, Homo sapiens
ctaagatgttggtta

SEQ ID NO: 1794917 - DNA, 15 bp, Homo sapiens
taagatgttggttag

SEQ ID NO: 1794918 - DNA, 15 bp, Homo sapiens
aagatgttggttaga

SEQ ID NO: 1794919 - DNA, 15 bp, Homo sapiens
agatgttggttagaa

SEQ ID NO: 1794920 - DNA, 15 bp, Homo sapiens
gatgttggttagaat

SEQ ID NO: 1794921 - DNA, 15 bp, Homo sapiens
atgttggttagaatt

SEQ ID NO: 1794922 - DNA, 15 bp, Homo sapiens
tgttggttagaattt

SEQ ID NO: 1794923 - DNA, 15 bp, Homo sapiens
gttggttagaatttt

SEQ ID NO: 1794924 - DNA, 15 bp, Homo sapiens
ttggttagaattttt

SEQ ID NO: 1794925 - DNA, 15 bp, Homo sapiens
tggttagaatttttc

SEQ ID NO: 1794926 - DNA, 15 bp, Homo sapiens
ggttagaatttttct

SEQ ID NO: 1794927 - DNA, 15 bp, Homo sapiens
gttagaatttttctc

SEQ ID NO: 1794928 - DNA, 15 bp, Homo sapiens
ttagaatttttctca

SEQ ID NO: 1794929 - DNA, 15 bp, Homo sapiens
tagaatttttctcag

SEQ ID NO: 1794930 - DNA, 15 bp, Homo sapiens
agaatttttctcagg

SEQ ID NO: 1794931 - DNA, 15 bp, Homo sapiens
gaatttttctcaggg

SEQ ID NO: 1794932 - DNA, 15 bp, Homo sapiens
aatttttctcagggt

SEQ ID NO: 1794933 - DNA, 15 bp, Homo sapiens
atttttctcagggtg

SEQ ID NO: 1794934 - DNA, 15 bp, Homo sapiens
tttttctcagggtgg

SEQ ID NO: 1794935 - DNA, 15 bp, Homo sapiens
ttttctcagggtggt

SEQ ID NO: 1794936 - DNA, 15 bp, Homo sapiens
tttctcagggtggta

SEQ ID NO: 1794937 - DNA, 15 bp, Homo sapiens
ttctcagggtggtat

SEQ ID NO: 1794938 - DNA, 15 bp, Homo sapiens
tctcagggtggtatc

SEQ ID NO: 1794939 - DNA, 15 bp, Homo sapiens
ctcagggtggtatct

SEQ ID NO: 1794940 - DNA, 15 bp, Homo sapiens
tcagggtggtatctt

SEQ ID NO: 1794941 - DNA, 15 bp, Homo sapiens
cagggtggtatcttc

SEQ ID NO: 1794942 - DNA, 15 bp, Homo sapiens
agggtggtatcttca

SEQ ID NO: 1794943 - DNA, 15 bp, Homo sapiens
gggtggtatcttcat

SEQ ID NO: 1794944 - DNA, 15 bp, Homo sapiens
ggtggtatcttcatg

SEQ ID NO: 1794945 - DNA, 15 bp, Homo sapiens
gtggtatcttcatga

SEQ ID NO: 1794946 - DNA, 15 bp, Homo sapiens
tggtatcttcatgaa

SEQ ID NO: 1794947 - DNA, 15 bp, Homo sapiens
ggtatcttcatgaat

SEQ ID NO: 1794948 - DNA, 15 bp, Homo sapiens
gtatcttcatgaata

SEQ ID NO: 1794949 - DNA, 15 bp, Homo sapiens
tatcttcatgaatat

SEQ ID NO: 1794950 - DNA, 15 bp, Homo sapiens
atcttcatgaatatt

SEQ ID NO: 1794951 - DNA, 15 bp, Homo sapiens
tcttcatgaatattg

SEQ ID NO: 1794952 - DNA, 15 bp, Homo sapiens
cttcatgaatattgg

SEQ ID NO: 1794953 - DNA, 15 bp, Homo sapiens
ttcatgaatattggg

SEQ ID NO: 1794954 - DNA, 15 bp, Homo sapiens
tcatgaatattgggc

SEQ ID NO: 1794955 - DNA, 15 bp, Homo sapiens
catgaatattgggca

SEQ ID NO: 1794956 - DNA, 15 bp, Homo sapiens
atgaatattgggcat

SEQ ID NO: 1794957 - DNA, 15 bp, Homo sapiens
tgaatattgggcatt

SEQ ID NO: 1794958 - DNA, 15 bp, Homo sapiens
gaatattgggcatta

SEQ ID NO: 1794959 - DNA, 15 bp, Homo sapiens
aatattgggcattaa

SEQ ID NO: 1794960 - DNA, 15 bp, Homo sapiens
atattgggcattaac

SEQ ID NO: 1794961 - DNA, 15 bp, Homo sapiens
tattgggcattaact

SEQ ID NO: 1794962 - DNA, 15 bp, Homo sapiens
ttgggcattaactct

SEQ ID NO: 1794963 - DNA, 15 bp, Homo sapiens
tgggcattaactctc

SEQ ID NO: 1794964 - DNA, 15 bp, Homo sapiens
gggcattaactctca

SEQ ID NO: 1794965 - DNA, 15 bp, Homo sapiens
ggcattaactctcaa

SEQ ID NO: 1794966 - DNA, 15 bp, Homo sapiens
gcattaactctcaac

SEQ ID NO: 1794967 - DNA, 15 bp, Homo sapiens
cattaactctcaaca

SEQ ID NO: 1794968 - DNA, 15 bp, Homo sapiens
attaactctcaacag

SEQ ID NO: 1794969 - DNA, 15 bp, Homo sapiens
ttaactctcaacagc

SEQ ID NO: 1794970 - DNA, 15 bp, Homo sapiens
taactctcaacagct

SEQ ID NO: 1794971 - DNA, 15 bp, Homo sapiens
aactctcaacagctg

SEQ ID NO: 1794972 - DNA, 15 bp, Homo sapiens
actctcaacagctgc

SEQ ID NO: 1794973 - DNA, 15 bp, Homo sapiens
ctctcaacagctgct

SEQ ID NO: 1794974 - DNA, 15 bp, Homo sapiens
tctcaacagctgctt

SEQ ID NO: 1794975 - DNA, 15 bp, Homo sapiens
ctcaacagctgcttc

SEQ ID NO: 1794976 - DNA, 15 bp, Homo sapiens
tcaacagctgcttcc

SEQ ID NO: 1794977 - DNA, 15 bp, Homo sapiens
caacagctgcttccc

SEQ ID NO: 1794978 - DNA, 15 bp, Homo sapiens
aacagctgcttccct

SEQ ID NO: 1794979 - DNA, 15 bp, Homo sapiens
acagctgcttccctc

SEQ ID NO: 1794980 - DNA, 15 bp, Homo sapiens
cagctgcttccctct

SEQ ID NO: 1794981 - DNA, 15 bp, Homo sapiens
agctgcttccctctc

SEQ ID NO: 1794982 - DNA, 15 bp, Homo sapiens
gctgcttccctctca

SEQ ID NO: 1794983 - DNA, 15 bp, Homo sapiens
ctgcttccctctcac

SEQ ID NO: 1794984 - DNA, 15 bp, Homo sapiens
tgcttccctctcaca

SEQ ID NO: 1794985 - DNA, 15 bp, Homo sapiens
gcttccctctcacat

SEQ ID NO: 1794986 - DNA, 15 bp, Homo sapiens
cttccctctcacatg

SEQ ID NO: 1794987 - DNA, 15 bp, Homo sapiens
ttccctctcacatgc

SEQ ID NO: 1794988 - DNA, 15 bp, Homo sapiens
tccctctcacatgct

SEQ ID NO: 1794989 - DNA, 15 bp, Homo sapiens
ccctctcacatgctg

SEQ ID NO: 1794990 - DNA, 15 bp, Homo sapiens
cctctcacatgctgc

SEQ ID NO: 1794991 - DNA, 15 bp, Homo sapiens
ctctcacatgctgca

SEQ ID NO: 1794992 - DNA, 15 bp, Homo sapiens
tctcacatgctgcaa

SEQ ID NO: 1794993 - DNA, 15 bp, Homo sapiens
ctcacatgctgcaag

SEQ ID NO: 1794994 - DNA, 15 bp, Homo sapiens
tcacatgctgcaagt

SEQ ID NO: 1794995 - DNA, 15 bp, Homo sapiens
cacatgctgcaagtg

SEQ ID NO: 1794996 - DNA, 15 bp, Homo sapiens
acatgctgcaagtgt

SEQ ID NO: 1794997 - DNA, 15 bp, Homo sapiens
catgctgcaagtgtc

SEQ ID NO: 1794998 - DNA, 15 bp, Homo sapiens
atgctgcaagtgtca

SEQ ID NO: 1794999 - DNA, 15 bp, Homo sapiens
tgctgcaagtgtcat

SEQ ID NO: 1795000 - DNA, 15 bp, Homo sapiens
gctgcaagtgtcatg

SEQ ID NO: 1795001 - DNA, 15 bp, Homo sapiens
ctgcaagtgtcatgt

SEQ ID NO: 1795002 - DNA, 15 bp, Homo sapiens
tgcaagtgtcatgtc

SEQ ID NO: 1795003 - DNA, 15 bp, Homo sapiens
gcaagtgtcatgtct

SEQ ID NO: 1795004 - DNA, 15 bp, Homo sapiens
caagtgtcatgtctg

SEQ ID NO: 1795005 - DNA, 15 bp, Homo sapiens
aagtgtcatgtctgt

SEQ ID NO: 1795006 - DNA, 15 bp, Homo sapiens
agtgtcatgtctgtt

SEQ ID NO: 1795007 - DNA, 15 bp, Homo sapiens
gtgtcatgtctgttt

SEQ ID NO: 1795008 - DNA, 15 bp, Homo sapiens
tgtcatgtctgtttg

SEQ ID NO: 1795009 - DNA, 15 bp, Homo sapiens
gtcatgtctgtttgg

SEQ ID NO: 1795010 - DNA, 15 bp, Homo sapiens
tcatgtctgtttggc

SEQ ID NO: 1795011 - DNA, 15 bp, Homo sapiens
catgtctgtttggcc

SEQ ID NO: 1795012 - DNA, 15 bp, Homo sapiens
atgtctgtttggcct

SEQ ID NO: 1795013 - DNA, 15 bp, Homo sapiens
tgtctgtttggcctc

SEQ ID NO: 1795014 - DNA, 15 bp, Homo sapiens
gtctgtttggcctca

SEQ ID NO: 1795015 - DNA, 15 bp, Homo sapiens
tctgtttggcctcag

SEQ ID NO: 1795016 - DNA, 15 bp, Homo sapiens
ctgtttggcctcagg

SEQ ID NO: 1795017 - DNA, 15 bp, Homo sapiens
tgtttggcctcagga

SEQ ID NO: 1795018 - DNA, 15 bp, Homo sapiens
gtttggcctcaggag

SEQ ID NO: 1795019 - DNA, 15 bp, Homo sapiens
tttggcctcaggaga

SEQ ID NO: 1795020 - DNA, 15 bp, Homo sapiens
ttggcctcaggagat

SEQ ID NO: 1795021 - DNA, 15 bp, Homo sapiens
tggcctcaggagata

SEQ ID NO: 1795022 - DNA, 15 bp, Homo sapiens
ggcctcaggagatat

SEQ ID NO: 1795023 - DNA, 15 bp, Homo sapiens
gcctcaggagatatt

SEQ ID NO: 1795024 - DNA, 15 bp, Homo sapiens
cctcaggagatatta

SEQ ID NO: 1795025 - DNA, 15 bp, Homo sapiens
ctcaggagatattaa

SEQ ID NO: 1795026 - DNA, 15 bp, Homo sapiens
tcaggagatattaag

SEQ ID NO: 1795027 - DNA, 15 bp, Homo sapiens
caggagatattaagc

SEQ ID NO: 1795028 - DNA, 15 bp, Homo sapiens
aggagatattaagcc

SEQ ID NO: 1795029 - DNA, 15 bp, Homo sapiens
ggagatattaagcca

SEQ ID NO: 1795030 - DNA, 15 bp, Homo sapiens
gagatattaagccag

SEQ ID NO: 1795031 - DNA, 15 bp, Homo sapiens
agatattaagccagc

SEQ ID NO: 1795032 - DNA, 15 bp, Homo sapiens
gatattaagccagct

SEQ ID NO: 1795033 - DNA, 15 bp, Homo sapiens
atattaagccagctg

SEQ ID NO: 1795034 - DNA, 15 bp, Homo sapiens
tattaagccagctgc

SEQ ID NO: 1795035 - DNA, 15 bp, Homo sapiens
attaagccagctgca

SEQ ID NO: 1795036 - DNA, 15 bp, Homo sapiens
ttaagccagctgcag

SEQ ID NO: 1795037 - DNA, 15 bp, Homo sapiens
taagccagctgcagg

SEQ ID NO: 1795038 - DNA, 15 bp, Homo sapiens
aagccagctgcaggg

SEQ ID NO: 1795039 - DNA, 15 bp, Homo sapiens
agccagctgcaggga

SEQ ID NO: 1795040 - DNA, 15 bp, Homo sapiens
gccagctgcagggaa

SEQ ID NO: 1795041 - DNA, 15 bp, Homo sapiens
ccagctgcagggaag

SEQ ID NO: 1795042 - DNA, 15 bp, Homo sapiens
cagctgcagggaaga

SEQ ID NO: 1795043 - DNA, 15 bp, Homo sapiens
agctgcagggaagag

SEQ ID NO: 1795044 - DNA, 15 bp, Homo sapiens
gctgcagggaagaga

SEQ ID NO: 1795045 - DNA, 15 bp, Homo sapiens
ctgcagggaagagaa

SEQ ID NO: 1795046 - DNA, 15 bp, Homo sapiens
tgcagggaagagaaa

SEQ ID NO: 1795047 - DNA, 15 bp, Homo sapiens
gcagggaagagaaag

SEQ ID NO: 1795048 - DNA, 15 bp, Homo sapiens
cagggaagagaaagt

SEQ ID NO: 1795049 - DNA, 15 bp, Homo sapiens
agggaagagaaagtt

SEQ ID NO: 1795050 - DNA, 15 bp, Homo sapiens
gggaagagaaagtta

SEQ ID NO: 1795051 - DNA, 15 bp, Homo sapiens
ggaagagaaagttaa

SEQ ID NO: 1795052 - DNA, 15 bp, Homo sapiens
gaagagaaagttaaa

SEQ ID NO: 1795053 - DNA, 15 bp, Homo sapiens
aagagaaagttaaag

SEQ ID NO: 1795054 - DNA, 15 bp, Homo sapiens
agagaaagttaaagg

SEQ ID NO: 1795055 - DNA, 15 bp, Homo sapiens
gagaaagttaaaggc

SEQ ID NO: 1795056 - DNA, 15 bp, Homo sapiens
agaaagttaaaggca

SEQ ID NO: 1795057 - DNA, 15 bp, Homo sapiens
gaaagttaaaggcaa

SEQ ID NO: 1795058 - DNA, 15 bp, Homo sapiens
aaagttaaaggcaaa

SEQ ID NO: 1795059 - DNA, 15 bp, Homo sapiens
aagttaaaggcaaag

SEQ ID NO: 1795060 - DNA, 15 bp, Homo sapiens
agttaaaggcaaaga

SEQ ID NO: 1795061 - DNA, 15 bp, Homo sapiens
gttaaaggcaaagag

SEQ ID NO: 1795062 - DNA, 15 bp, Homo sapiens
ttaaaggcaaagagt

SEQ ID NO: 1795063 - DNA, 15 bp, Homo sapiens
taaaggcaaagagtt

SEQ ID NO: 1795064 - DNA, 15 bp, Homo sapiens
aaaggcaaagagttt

SEQ ID NO: 1795065 - DNA, 15 bp, Homo sapiens
aaggcaaagagtttg

SEQ ID NO: 1795066 - DNA, 15 bp, Homo sapiens
aggcaaagagtttgc

SEQ ID NO: 1795067 - DNA, 15 bp, Homo sapiens
ggcaaagagtttgcc

SEQ ID NO: 1795068 - DNA, 15 bp, Homo sapiens
gcaaagagtttgccc

SEQ ID NO: 1795069 - DNA, 15 bp, Homo sapiens
caaagagtttgccca

SEQ ID NO: 1795070 - DNA, 15 bp, Homo sapiens
aaagagtttgcccac

SEQ ID NO: 1795071 - DNA, 15 bp, Homo sapiens
aagagtttgcccact

SEQ ID NO: 1795072 - DNA, 15 bp, Homo sapiens
agagtttgcccactc

SEQ ID NO: 1795073 - DNA, 15 bp, Homo sapiens
gagtttgcccactcc

SEQ ID NO: 1795074 - DNA, 15 bp, Homo sapiens
agtttgcccactcca

SEQ ID NO: 1795075 - DNA, 15 bp, Homo sapiens
gtttgcccactccag

SEQ ID NO: 1795076 - DNA, 15 bp, Homo sapiens
tttgcccactccagt

SEQ ID NO: 1795077 - DNA, 15 bp, Homo sapiens
ttgcccactccagtc

SEQ ID NO: 1795078 - DNA, 15 bp, Homo sapiens
tgcccactccagtca

SEQ ID NO: 1795079 - DNA, 15 bp, Homo sapiens
gcccactccagtcag

SEQ ID NO: 1795080 - DNA, 15 bp, Homo sapiens
cccactccagtcagg

SEQ ID NO: 1795081 - DNA, 15 bp, Homo sapiens
ccactccagtcaggt

SEQ ID NO: 1795082 - DNA, 15 bp, Homo sapiens
cactccagtcaggtc

SEQ ID NO: 1795083 - DNA, 15 bp, Homo sapiens
actccagtcaggtct

SEQ ID NO: 1795084 - DNA, 15 bp, Homo sapiens
ctccagtcaggtctt

SEQ ID NO: 1795085 - DNA, 15 bp, Homo sapiens
tccagtcaggtcttc

SEQ ID NO: 1795086 - DNA, 15 bp, Homo sapiens
ccagtcaggtcttct

SEQ ID NO: 1795087 - DNA, 15 bp, Homo sapiens
cagtcaggtcttctc

SEQ ID NO: 1795088 - DNA, 15 bp, Homo sapiens
agtcaggtcttctca

SEQ ID NO: 1795089 - DNA, 15 bp, Homo sapiens
gtcaggtcttctcag

SEQ ID NO: 1795090 - DNA, 15 bp, Homo sapiens
tcaggtcttctcaga

SEQ ID NO: 1795091 - DNA, 15 bp, Homo sapiens
caggtcttctcagag

SEQ ID NO: 1795092 - DNA, 15 bp, Homo sapiens
aggtcttctcagagc

SEQ ID NO: 1795093 - DNA, 15 bp, Homo sapiens
ggtcttctcagagca

SEQ ID NO: 1795094 - DNA, 15 bp, Homo sapiens
gtcttctcagagcac

SEQ ID NO: 1795095 - DNA, 15 bp, Homo sapiens
tcttctcagagcaca

SEQ ID NO: 1795096 - DNA, 15 bp, Homo sapiens
cttctcagagcacag

SEQ ID NO: 1795097 - DNA, 15 bp, Homo sapiens
ttctcagagcacaga

SEQ ID NO: 1795098 - DNA, 15 bp, Homo sapiens
tctcagagcacagag

SEQ ID NO: 1795099 - DNA, 15 bp, Homo sapiens
ctcagagcacagagg

SEQ ID NO: 1795100 - DNA, 15 bp, Homo sapiens
tcagagcacagaggt

SEQ ID NO: 1795101 - DNA, 15 bp, Homo sapiens
cagagcacagaggtt

SEQ ID NO: 1795102 - DNA, 15 bp, Homo sapiens
agagcacagaggttt

SEQ ID NO: 1795103 - DNA, 15 bp, Homo sapiens
gagcacagaggtttt

SEQ ID NO: 1795104 - DNA, 15 bp, Homo sapiens
agcacagaggttttt

SEQ ID NO: 1795105 - DNA, 15 bp, Homo sapiens
gcacagaggtttttt

SEQ ID NO: 1795106 - DNA, 15 bp, Homo sapiens
cacagaggttttttt

SEQ ID NO: 1795107 - DNA, 15 bp, Homo sapiens
acagaggttttttta

SEQ ID NO: 1795108 - DNA, 15 bp, Homo sapiens
cagaggtttttttat

SEQ ID NO: 1795109 - DNA, 15 bp, Homo sapiens
agaggtttttttata

SEQ ID NO: 1795110 - DNA, 15 bp, Homo sapiens
gaggtttttttatag

SEQ ID NO: 1795111 - DNA, 15 bp, Homo sapiens
aggtttttttataga

SEQ ID NO: 1795112 - DNA, 15 bp, Homo sapiens
ggtttttttatagaa

SEQ ID NO: 1795113 - DNA, 15 bp, Homo sapiens
gtttttttatagaac

SEQ ID NO: 1795114 - DNA, 15 bp, Homo sapiens
tttttttatagaact

SEQ ID NO: 1795115 - DNA, 15 bp, Homo sapiens
ttttttatagaactc

SEQ ID NO: 1795116 - DNA, 15 bp, Homo sapiens
tttttatagaactct

SEQ ID NO: 1795117 - DNA, 15 bp, Homo sapiens
ttttatagaactctc

SEQ ID NO: 1795118 - DNA, 15 bp, Homo sapiens
tttatagaactctct

SEQ ID NO: 1795119 - DNA, 15 bp, Homo sapiens
ttatagaactctctc

SEQ ID NO: 1795120 - DNA, 15 bp, Homo sapiens
tatagaactctctcc

SEQ ID NO: 1795121 - DNA, 15 bp, Homo sapiens
atagaactctctccg

SEQ ID NO: 1795122 - DNA, 15 bp, Homo sapiens
tagaactctctccgg

SEQ ID NO: 1795123 - DNA, 15 bp, Homo sapiens
agaactctctccggt

SEQ ID NO: 1795124 - DNA, 15 bp, Homo sapiens
gaactctctccggtc

SEQ ID NO: 1795125 - DNA, 15 bp, Homo sapiens
aactctctccggtcc

SEQ ID NO: 1795126 - DNA, 15 bp, Homo sapiens
actctctccggtcca

SEQ ID NO: 1795127 - DNA, 15 bp, Homo sapiens
ctctctccggtccag

SEQ ID NO: 1795128 - DNA, 15 bp, Homo sapiens
tctctccggtccaga

SEQ ID NO: 1795129 - DNA, 15 bp, Homo sapiens
ctctccggtccagag

SEQ ID NO: 1795130 - DNA, 15 bp, Homo sapiens
tctccggtccagagt

SEQ ID NO: 1795131 - DNA, 15 bp, Homo sapiens
ctccggtccagagtc

SEQ ID NO: 1795132 - DNA, 15 bp, Homo sapiens
tccggtccagagtct

SEQ ID NO: 1795133 - DNA, 15 bp, Homo sapiens
ccggtccagagtctg

SEQ ID NO: 1795134 - DNA, 15 bp, Homo sapiens
cggtccagagtctgg

SEQ ID NO: 1795135 - DNA, 15 bp, Homo sapiens
ggtccagagtctggg

SEQ ID NO: 1795136 - DNA, 15 bp, Homo sapiens
gtccagagtctgggt

SEQ ID NO: 1795137 - DNA, 15 bp, Homo sapiens
tccagagtctgggtc

SEQ ID NO: 1795138 - DNA, 15 bp, Homo sapiens
ccagagtctgggtct

SEQ ID NO: 1795139 - DNA, 15 bp, Homo sapiens
cagagtctgggtctc

SEQ ID NO: 1795140 - DNA, 15 bp, Homo sapiens
agagtctgggtctct

SEQ ID NO: 1795141 - DNA, 15 bp, Homo sapiens
gagtctgggtctctt

SEQ ID NO: 1795142 - DNA, 15 bp, Homo sapiens
agtctgggtctcttt

SEQ ID NO: 1795143 - DNA, 15 bp, Homo sapiens
gtctgggtctcttta

SEQ ID NO: 1795144 - DNA, 15 bp, Homo sapiens
tctgggtctctttac

SEQ ID NO: 1795145 - DNA, 15 bp, Homo sapiens
ctgggtctctttacc

SEQ ID NO: 1795146 - DNA, 15 bp, Homo sapiens
tgggtctctttacca

SEQ ID NO: 1795147 - DNA, 15 bp, Homo sapiens
gggtctctttaccag

SEQ ID NO: 1795148 - DNA, 15 bp, Homo sapiens
ggtctctttaccaga

SEQ ID NO: 1795149 - DNA, 15 bp, Homo sapiens
gtctctttaccagaa

SEQ ID NO: 1795150 - DNA, 15 bp, Homo sapiens
tctctttaccagaag

SEQ ID NO: 1795151 - DNA, 15 bp, Homo sapiens
ctctttaccagaagc

SEQ ID NO: 1795152 - DNA, 15 bp, Homo sapiens
tctttaccagaagct

SEQ ID NO: 1795153 - DNA, 15 bp, Homo sapiens
ctttaccagaagctg

SEQ ID NO: 1795154 - DNA, 15 bp, Homo sapiens
tttaccagaagctgc

SEQ ID NO: 1795155 - DNA, 15 bp, Homo sapiens
ttaccagaagctgct

SEQ ID NO: 1795156 - DNA, 15 bp, Homo sapiens
taccagaagctgctt

SEQ ID NO: 1795157 - DNA, 15 bp, Homo sapiens
accagaagctgcttg

SEQ ID NO: 1795158 - DNA, 15 bp, Homo sapiens
ccagaagctgcttgg

SEQ ID NO: 1795159 - DNA, 15 bp, Homo sapiens
cagaagctgcttggc

SEQ ID NO: 1795160 - DNA, 15 bp, Homo sapiens
agaagctgcttggct

SEQ ID NO: 1795161 - DNA, 15 bp, Homo sapiens
gaagctgcttggctt

SEQ ID NO: 1795162 - DNA, 15 bp, Homo sapiens
aagctgcttggcttc

SEQ ID NO: 1795163 - DNA, 15 bp, Homo sapiens
agctgcttggcttca

SEQ ID NO: 1795164 - DNA, 15 bp, Homo sapiens
gctgcttggcttcag

SEQ ID NO: 1795165 - DNA, 15 bp, Homo sapiens
ctgcttggcttcagg

SEQ ID NO: 1795166 - DNA, 15 bp, Homo sapiens
tgcttggcttcaggc

SEQ ID NO: 1795167 - DNA, 15 bp, Homo sapiens
gcttggcttcaggct

SEQ ID NO: 1795168 - DNA, 15 bp, Homo sapiens
cttggcttcaggctc

SEQ ID NO: 1795169 - DNA, 15 bp, Homo sapiens
ttggcttcaggctcc

SEQ ID NO: 1795170 - DNA, 15 bp, Homo sapiens
tggcttcaggctcca

SEQ ID NO: 1795171 - DNA, 15 bp, Homo sapiens
ggcttcaggctccac

SEQ ID NO: 1795172 - DNA, 15 bp, Homo sapiens
gcttcaggctccacc

SEQ ID NO: 1795173 - DNA, 15 bp, Homo sapiens
cttcaggctccacca

SEQ ID NO: 1795174 - DNA, 15 bp, Homo sapiens
ttcaggctccaccag

SEQ ID NO: 1795175 - DNA, 15 bp, Homo sapiens
tcaggctccaccagc

SEQ ID NO: 1795176 - DNA, 15 bp, Homo sapiens
caggctccaccagcc

SEQ ID NO: 1795177 - DNA, 15 bp, Homo sapiens
aggctccaccagcct

SEQ ID NO: 1795178 - DNA, 15 bp, Homo sapiens
ggctccaccagcctg

SEQ ID NO: 1795179 - DNA, 15 bp, Homo sapiens
gctccaccagcctga

SEQ ID NO: 1795180 - DNA, 15 bp, Homo sapiens
ctccaccagcctgag

SEQ ID NO: 1795181 - DNA, 15 bp, Homo sapiens
tccaccagcctgagg

SEQ ID NO: 1795182 - DNA, 15 bp, Homo sapiens
ccaccagcctgaggt

SEQ ID NO: 1795183 - DNA, 15 bp, Homo sapiens
caccagcctgaggtt

SEQ ID NO: 1795184 - DNA, 15 bp, Homo sapiens
accagcctgaggttg

SEQ ID NO: 1795185 - DNA, 15 bp, Homo sapiens
ccagcctgaggttga

SEQ ID NO: 1795186 - DNA, 15 bp, Homo sapiens
cagcctgaggttgag

SEQ ID NO: 1795187 - DNA, 15 bp, Homo sapiens
agcctgaggttgagg

SEQ ID NO: 1795188 - DNA, 15 bp, Homo sapiens
gcctgaggttgaggt

SEQ ID NO: 1795189 - DNA, 15 bp, Homo sapiens
cctgaggttgaggtt

SEQ ID NO: 1795190 - DNA, 15 bp, Homo sapiens
ctgaggttgaggttc

SEQ ID NO: 1795191 - DNA, 15 bp, Homo sapiens
tgaggttgaggttct

SEQ ID NO: 1795192 - DNA, 15 bp, Homo sapiens
gaggttgaggttctc

SEQ ID NO: 1795193 - DNA, 15 bp, Homo sapiens
aggttgaggttctct

SEQ ID NO: 1795194 - DNA, 15 bp, Homo sapiens
ggttgaggttctctg

SEQ ID NO: 1795195 - DNA, 15 bp, Homo sapiens
gttgaggttctctgg

SEQ ID NO: 1795196 - DNA, 15 bp, Homo sapiens
ttgaggttctctggg

SEQ ID NO: 1795197 - DNA, 15 bp, Homo sapiens
tgaggttctctggga

SEQ ID NO: 1795198 - DNA, 15 bp, Homo sapiens
gaggttctctgggaa

SEQ ID NO: 1795199 - DNA, 15 bp, Homo sapiens
aggttctctgggaag

SEQ ID NO: 1795200 - DNA, 15 bp, Homo sapiens
ggttctctgggaagg

SEQ ID NO: 1795201 - DNA, 15 bp, Homo sapiens
gttctctgggaaggt

SEQ ID NO: 1795202 - DNA, 15 bp, Homo sapiens
ttctctgggaaggtg

SEQ ID NO: 1795203 - DNA, 15 bp, Homo sapiens
tctctgggaaggtgc

SEQ ID NO: 1795204 - DNA, 15 bp, Homo sapiens
ctctgggaaggtgcc

SEQ ID NO: 1795205 - DNA, 15 bp, Homo sapiens
tctgggaaggtgccc

SEQ ID NO: 1795206 - DNA, 15 bp, Homo sapiens
ctgggaaggtgcccc

SEQ ID NO: 1795207 - DNA, 15 bp, Homo sapiens
tgggaaggtgccccg

SEQ ID NO: 1795208 - DNA, 15 bp, Homo sapiens
gggaaggtgccccgg

SEQ ID NO: 1795209 - DNA, 15 bp, Homo sapiens
ggaaggtgccccggg

SEQ ID NO: 1795210 - DNA, 15 bp, Homo sapiens
gaaggtgccccggga

SEQ ID NO: 1795211 - DNA, 15 bp, Homo sapiens
aaggtgccccgggag

SEQ ID NO: 1795212 - DNA, 15 bp, Homo sapiens
aggtgccccgggaga

SEQ ID NO: 1795213 - DNA, 15 bp, Homo sapiens
ggtgccccgggagaa

SEQ ID NO: 1795214 - DNA, 15 bp, Homo sapiens
gtgccccgggagaag

SEQ ID NO: 1795215 - DNA, 15 bp, Homo sapiens
tgccccgggagaagc

SEQ ID NO: 1795216 - DNA, 15 bp, Homo sapiens
gccccgggagaagcc

SEQ ID NO: 1795217 - DNA, 15 bp, Homo sapiens
ccccgggagaagccc

SEQ ID NO: 1795218 - DNA, 15 bp, Homo sapiens
cccgggagaagcccc

SEQ ID NO: 1795219 - DNA, 15 bp, Homo sapiens
ccgggagaagcccca

SEQ ID NO: 1795220 - DNA, 15 bp, Homo sapiens
cgggagaagccccaa

SEQ ID NO: 1795221 - DNA, 15 bp, Homo sapiens
gggagaagccccaaa

SEQ ID NO: 1795222 - DNA, 15 bp, Homo sapiens
ggagaagccccaaac

SEQ ID NO: 1795223 - DNA, 15 bp, Homo sapiens
gagaagccccaaacc

SEQ ID NO: 1795224 - DNA, 15 bp, Homo sapiens
agaagccccaaacct

SEQ ID NO: 1795225 - DNA, 15 bp, Homo sapiens
gaagccccaaacctc

SEQ ID NO: 1795226 - DNA, 15 bp, Homo sapiens
aagccccaaacctct

SEQ ID NO: 1795227 - DNA, 15 bp, Homo sapiens
agccccaaacctctc

SEQ ID NO: 1795228 - DNA, 15 bp, Homo sapiens
gccccaaacctctct

SEQ ID NO: 1795229 - DNA, 15 bp, Homo sapiens
ccccaaacctctctc

SEQ ID NO: 1795230 - DNA, 15 bp, Homo sapiens
cccaaacctctctct

SEQ ID NO: 1795231 - DNA, 15 bp, Homo sapiens
ccaaacctctctctg

SEQ ID NO: 1795232 - DNA, 15 bp, Homo sapiens
caaacctctctctga

SEQ ID NO: 1795233 - DNA, 15 bp, Homo sapiens
aaacctctctctgaa

SEQ ID NO: 1795234 - DNA, 15 bp, Homo sapiens
aacctctctctgaag

SEQ ID NO: 1795235 - DNA, 15 bp, Homo sapiens
acctctctctgaagg

SEQ ID NO: 1795236 - DNA, 15 bp, Homo sapiens
cctctctctgaaggg

SEQ ID NO: 1795237 - DNA, 15 bp, Homo sapiens
ctctctctgaaggga

SEQ ID NO: 1795238 - DNA, 15 bp, Homo sapiens
tctctctgaagggaa

SEQ ID NO: 1795239 - DNA, 15 bp, Homo sapiens
ctctctgaagggaag

SEQ ID NO: 1795240 - DNA, 15 bp, Homo sapiens
tctctgaagggaaga

SEQ ID NO: 1795241 - DNA, 15 bp, Homo sapiens
ctctgaagggaagag

SEQ ID NO: 1795242 - DNA, 15 bp, Homo sapiens
tctgaagggaagagg

SEQ ID NO: 1795243 - DNA, 15 bp, Homo sapiens
ctgaagggaagagga

SEQ ID NO: 1795244 - DNA, 15 bp, Homo sapiens
tgaagggaagaggag

SEQ ID NO: 1795245 - DNA, 15 bp, Homo sapiens
gaagggaagaggaga

SEQ ID NO: 1795246 - DNA, 15 bp, Homo sapiens
aagggaagaggagat

SEQ ID NO: 1795247 - DNA, 15 bp, Homo sapiens
agggaagaggagatg

SEQ ID NO: 1795248 - DNA, 15 bp, Homo sapiens
gggaagaggagatgg

SEQ ID NO: 1795249 - DNA, 15 bp, Homo sapiens
ggaagaggagatggg

SEQ ID NO: 1795250 - DNA, 15 bp, Homo sapiens
gaagaggagatgggc

SEQ ID NO: 1795251 - DNA, 15 bp, Homo sapiens
aagaggagatgggcc

SEQ ID NO: 1795252 - DNA, 15 bp, Homo sapiens
agaggagatgggccc

SEQ ID NO: 1795253 - DNA, 15 bp, Homo sapiens
gaggagatgggccct

SEQ ID NO: 1795254 - DNA, 15 bp, Homo sapiens
aggagatgggccctt

SEQ ID NO: 1795255 - DNA, 15 bp, Homo sapiens
ggagatgggcccttg

SEQ ID NO: 1795256 - DNA, 15 bp, Homo sapiens
gagatgggcccttgt

SEQ ID NO: 1795257 - DNA, 15 bp, Homo sapiens
agatgggcccttgtc

SEQ ID NO: 1795258 - DNA, 15 bp, Homo sapiens
gatgggcccttgtca

SEQ ID NO: 1795259 - DNA, 15 bp, Homo sapiens
atgggcccttgtcag

SEQ ID NO: 1795260 - DNA, 15 bp, Homo sapiens
tgggcccttgtcagc

SEQ ID NO: 1795261 - DNA, 15 bp, Homo sapiens
gggcccttgtcagca

SEQ ID NO: 1795262 - DNA, 15 bp, Homo sapiens
ggcccttgtcagcac

SEQ ID NO: 1795263 - DNA, 15 bp, Homo sapiens
gcccttgtcagcact

SEQ ID NO: 1795264 - DNA, 15 bp, Homo sapiens
cccttgtcagcactc

SEQ ID NO: 1795265 - DNA, 15 bp, Homo sapiens
ccttgtcagcactcc

SEQ ID NO: 1795266 - DNA, 15 bp, Homo sapiens
cttgtcagcactcct

SEQ ID NO: 1795267 - DNA, 15 bp, Homo sapiens
ttgtcagcactccta

SEQ ID NO: 1795268 - DNA, 15 bp, Homo sapiens
tgtcagcactcctat

SEQ ID NO: 1795269 - DNA, 15 bp, Homo sapiens
gtcagcactcctatt

SEQ ID NO: 1795270 - DNA, 15 bp, Homo sapiens
tcagcactcctattt

SEQ ID NO: 1795271 - DNA, 15 bp, Homo sapiens
cagcactcctatttt

SEQ ID NO: 1795272 - DNA, 15 bp, Homo sapiens
agcactcctattttc

SEQ ID NO: 1795273 - DNA, 15 bp, Homo sapiens
gcactcctattttcc

SEQ ID NO: 1795274 - DNA, 15 bp, Homo sapiens
cactcctattttccc

SEQ ID NO: 1795275 - DNA, 15 bp, Homo sapiens
actcctattttccca

SEQ ID NO: 1795276 - DNA, 15 bp, Homo sapiens
ctcctattttcccaa

SEQ ID NO: 1795277 - DNA, 15 bp, Homo sapiens
tcctattttcccaaa

SEQ ID NO: 1795278 - DNA, 15 bp, Homo sapiens
cctattttcccaaag

SEQ ID NO: 1795279 - DNA, 15 bp, Homo sapiens
ctattttcccaaagc

SEQ ID NO: 1795280 - DNA, 15 bp, Homo sapiens
tattttcccaaagcc

SEQ ID NO: 1795281 - DNA, 15 bp, Homo sapiens
attttcccaaagccc

SEQ ID NO: 1795282 - DNA, 15 bp, Homo sapiens
ttttcccaaagccct

SEQ ID NO: 1795283 - DNA, 15 bp, Homo sapiens
tttcccaaagccctg

SEQ ID NO: 1795284 - DNA, 15 bp, Homo sapiens
ttcccaaagccctga

SEQ ID NO: 1795285 - DNA, 15 bp, Homo sapiens
tcccaaagccctgag

SEQ ID NO: 1795286 - DNA, 15 bp, Homo sapiens
cccaaagccctgagg

SEQ ID NO: 1795287 - DNA, 15 bp, Homo sapiens
ccaaagccctgaggt

SEQ ID NO: 1795288 - DNA, 15 bp, Homo sapiens
caaagccctgaggtt

SEQ ID NO: 1795289 - DNA, 15 bp, Homo sapiens
aaagccctgaggttc

SEQ ID NO: 1795290 - DNA, 15 bp, Homo sapiens
aagccctgaggttcc

SEQ ID NO: 1795291 - DNA, 15 bp, Homo sapiens
agccctgaggttcca

SEQ ID NO: 1795292 - DNA, 15 bp, Homo sapiens
gccctgaggttccac

SEQ ID NO: 1795293 - DNA, 15 bp, Homo sapiens
ccctgaggttccacc

SEQ ID NO: 1795294 - DNA, 15 bp, Homo sapiens
cctgaggttccacct

SEQ ID NO: 1795295 - DNA, 15 bp, Homo sapiens
ctgaggttccacctg

SEQ ID NO: 1795296 - DNA, 15 bp, Homo sapiens
tgaggttccacctgt

SEQ ID NO: 1795297 - DNA, 15 bp, Homo sapiens
gaggttccacctgtg

SEQ ID NO: 1795298 - DNA, 15 bp, Homo sapiens
aggttccacctgtgc

SEQ ID NO: 1795299 - DNA, 15 bp, Homo sapiens
ggttccacctgtgca

SEQ ID NO: 1795300 - DNA, 15 bp, Homo sapiens
gttccacctgtgcaa

SEQ ID NO: 1795301 - DNA, 15 bp, Homo sapiens
ttccacctgtgcaat

SEQ ID NO: 1795302 - DNA, 15 bp, Homo sapiens
tccacctgtgcaatc

SEQ ID NO: 1795303 - DNA, 15 bp, Homo sapiens
ccacctgtgcaatcc

SEQ ID NO: 1795304 - DNA, 15 bp, Homo sapiens
cacctgtgcaatccc

SEQ ID NO: 1795305 - DNA, 15 bp, Homo sapiens
acctgtgcaatccca

SEQ ID NO: 1795306 - DNA, 15 bp, Homo sapiens
cctgtgcaatcccat

SEQ ID NO: 1795307 - DNA, 15 bp, Homo sapiens
ctgtgcaatcccatc

SEQ ID NO: 1795308 - DNA, 15 bp, Homo sapiens
tgtgcaatcccatct

SEQ ID NO: 1795309 - DNA, 15 bp, Homo sapiens
gtgcaatcccatctg

SEQ ID NO: 1795310 - DNA, 15 bp, Homo sapiens
tgcaatcccatctgt

SEQ ID NO: 1795311 - DNA, 15 bp, Homo sapiens
gcaatcccatctgtt

SEQ ID NO: 1795312 - DNA, 15 bp, Homo sapiens
caatcccatctgttg

SEQ ID NO: 1795313 - DNA, 15 bp, Homo sapiens
aatcccatctgttgc

SEQ ID NO: 1795314 - DNA, 15 bp, Homo sapiens
atcccatctgttgcc

SEQ ID NO: 1795315 - DNA, 15 bp, Homo sapiens
tcccatctgttgcca

SEQ ID NO: 1795316 - DNA, 15 bp, Homo sapiens
cccatctgttgccaa

SEQ ID NO: 1795317 - DNA, 15 bp, Homo sapiens
ccatctgttgccaat

SEQ ID NO: 1795318 - DNA, 15 bp, Homo sapiens
catctgttgccaatt

SEQ ID NO: 1795319 - DNA, 15 bp, Homo sapiens
atctgttgccaattt

SEQ ID NO: 1795320 - DNA, 15 bp, Homo sapiens
tctgttgccaatttg

SEQ ID NO: 1795321 - DNA, 15 bp, Homo sapiens
ctgttgccaatttga

SEQ ID NO: 1795322 - DNA, 15 bp, Homo sapiens
tgttgccaatttgag

SEQ ID NO: 1795323 - DNA, 15 bp, Homo sapiens
gttgccaatttgaga

SEQ ID NO: 1795324 - DNA, 15 bp, Homo sapiens
ttgccaatttgagat

SEQ ID NO: 1795325 - DNA, 15 bp, Homo sapiens
tgccaatttgagatt

SEQ ID NO: 1795326 - DNA, 15 bp, Homo sapiens
gccaatttgagattt

SEQ ID NO: 1795327 - DNA, 15 bp, Homo sapiens
ccaatttgagattta

SEQ ID NO: 1795328 - DNA, 15 bp, Homo sapiens
caatttgagatttaa

SEQ ID NO: 1795329 - DNA, 15 bp, Homo sapiens
aatttgagatttaac

SEQ ID NO: 1795330 - DNA, 15 bp, Homo sapiens
atttgagatttaacc

SEQ ID NO: 1795331 - DNA, 15 bp, Homo sapiens
tttgagatttaacca

SEQ ID NO: 1795332 - DNA, 15 bp, Homo sapiens
ttgagatttaaccac

SEQ ID NO: 1795333 - DNA, 15 bp, Homo sapiens
tgagatttaaccacg

SEQ ID NO: 1795334 - DNA, 15 bp, Homo sapiens
gagatttaaccacgt

SEQ ID NO: 1795335 - DNA, 15 bp, Homo sapiens
agatttaaccacgtc

SEQ ID NO: 1795336 - DNA, 15 bp, Homo sapiens
gatttaaccacgtcg

SEQ ID NO: 1795337 - DNA, 15 bp, Homo sapiens
atttaaccacgtcgg

SEQ ID NO: 1795338 - DNA, 15 bp, Homo sapiens
tttaaccacgtcggc

SEQ ID NO: 1795339 - DNA, 15 bp, Homo sapiens
ttaaccacgtcggct

SEQ ID NO: 1795340 - DNA, 15 bp, Homo sapiens
taaccacgtcggctc

SEQ ID NO: 1795341 - DNA, 15 bp, Homo sapiens
aaccacgtcggctct

SEQ ID NO: 1795342 - DNA, 15 bp, Homo sapiens
accacgtcggctcta

SEQ ID NO: 1795343 - DNA, 15 bp, Homo sapiens
ccacgtcggctctaa

SEQ ID NO: 1795344 - DNA, 15 bp, Homo sapiens
cacgtcggctctaag

SEQ ID NO: 1795345 - DNA, 15 bp, Homo sapiens
acgtcggctctaaga

SEQ ID NO: 1795346 - DNA, 15 bp, Homo sapiens
cgtcggctctaagaa

SEQ ID NO: 1795347 - DNA, 15 bp, Homo sapiens
gtggccagcccaaca

SEQ ID NO: 1795348 - DNA, 15 bp, Homo sapiens
tggccagcccaacac

SEQ ID NO: 1795349 - DNA, 15 bp, Homo sapiens
ggccagcccaacacc

SEQ ID NO: 1795350 - DNA, 15 bp, Homo sapiens
gccagcccaacaccc

SEQ ID NO: 1795351 - DNA, 15 bp, Homo sapiens
ccagcccaacaccct

SEQ ID NO: 1795352 - DNA, 15 bp, Homo sapiens
cagcccaacaccctg

SEQ ID NO: 1795353 - DNA, 15 bp, Homo sapiens
agcccaacaccctgg

SEQ ID NO: 1795354 - DNA, 15 bp, Homo sapiens
gcccaacaccctgga

SEQ ID NO: 1795355 - DNA, 15 bp, Homo sapiens
cccaacaccctggag

SEQ ID NO: 1795356 - DNA, 15 bp, Homo sapiens
ccaacaccctggagg

SEQ ID NO: 1795357 - DNA, 15 bp, Homo sapiens
caacaccctggaggt

SEQ ID NO: 1795358 - DNA, 15 bp, Homo sapiens
aacaccctggaggtc

SEQ ID NO: 1795359 - DNA, 15 bp, Homo sapiens
acaccctggaggtca

SEQ ID NO: 1795360 - DNA, 15 bp, Homo sapiens
caccctggaggtcag

SEQ ID NO: 1795361 - DNA, 15 bp, Homo sapiens
accctggaggtcaga

SEQ ID NO: 1795362 - DNA, 15 bp, Homo sapiens
ccctggaggtcagag

SEQ ID NO: 1795363 - DNA, 15 bp, Homo sapiens
cctggaggtcagaga

SEQ ID NO: 1795364 - DNA, 15 bp, Homo sapiens
ctggaggtcagagac

SEQ ID NO: 1795365 - DNA, 15 bp, Homo sapiens
tggaggtcagagacc

SEQ ID NO: 1795366 - DNA, 15 bp, Homo sapiens
ggaggtcagagacct

SEQ ID NO: 1795367 - DNA, 15 bp, Homo sapiens
gaggtcagagacctc

SEQ ID NO: 1795368 - DNA, 15 bp, Homo sapiens
aggtcagagacctca

SEQ ID NO: 1795369 - DNA, 15 bp, Homo sapiens
ggtcagagacctcaa

SEQ ID NO: 1795370 - DNA, 15 bp, Homo sapiens
gtcagagacctcaac

SEQ ID NO: 1795371 - DNA, 15 bp, Homo sapiens
tcagagacctcaact

SEQ ID NO: 1795372 - DNA, 15 bp, Homo sapiens
cagagacctcaacta

SEQ ID NO: 1795373 - DNA, 15 bp, Homo sapiens
agagacctcaactac

SEQ ID NO: 1795374 - DNA, 15 bp, Homo sapiens
gagacctcaactacc

SEQ ID NO: 1795375 - DNA, 15 bp, Homo sapiens
agacctcaactacca

SEQ ID NO: 1795376 - DNA, 15 bp, Homo sapiens
gacctcaactaccag

SEQ ID NO: 1795377 - DNA, 15 bp, Homo sapiens
acctcaactaccagg

SEQ ID NO: 1795378 - DNA, 15 bp, Homo sapiens
cctcaactaccaggt

SEQ ID NO: 1795379 - DNA, 15 bp, Homo sapiens
ctcaactaccaggta

SEQ ID NO: 1795380 - DNA, 15 bp, Homo sapiens
tcaactaccaggtag

SEQ ID NO: 1795381 - DNA, 15 bp, Homo sapiens
caactaccaggtaga

SEQ ID NO: 1795382 - DNA, 15 bp, Homo sapiens
aactaccaggtagag

SEQ ID NO: 1795383 - DNA, 15 bp, Homo sapiens
actaccaggtagagg

SEQ ID NO: 1795384 - DNA, 15 bp, Homo sapiens
ctaccaggtagaggc

SEQ ID NO: 1795385 - DNA, 15 bp, Homo sapiens
taccaggtagaggca

SEQ ID NO: 1795386 - DNA, 15 bp, Homo sapiens
accaggtagaggcac

SEQ ID NO: 1795387 - DNA, 15 bp, Homo sapiens
ccaggtagaggcacg

SEQ ID NO: 1795388 - DNA, 15 bp, Homo sapiens
caggtagaggcacgc

SEQ ID NO: 1795389 - DNA, 15 bp, Homo sapiens
aggtagaggcacgcc

SEQ ID NO: 1795390 - DNA, 15 bp, Homo sapiens
ggtagaggcacgcct

SEQ ID NO: 1795391 - DNA, 15 bp, Homo sapiens
gtagaggcacgcctg

SEQ ID NO: 1795392 - DNA, 15 bp, Homo sapiens
tagaggcacgcctgg

SEQ ID NO: 1795393 - DNA, 15 bp, Homo sapiens
agaggcacgcctggg

SEQ ID NO: 1795394 - DNA, 15 bp, Homo sapiens
gaggcacgcctgggt

SEQ ID NO: 1795395 - DNA, 15 bp, Homo sapiens
aggcacgcctgggtt

SEQ ID NO: 1795396 - DNA, 15 bp, Homo sapiens
ggcacgcctgggttc

SEQ ID NO: 1795397 - DNA, 15 bp, Homo sapiens
gcacgcctgggttca

SEQ ID NO: 1795398 - DNA, 15 bp, Homo sapiens
cacgcctgggttcaa

SEQ ID NO: 1795399 - DNA, 15 bp, Homo sapiens
acgcctgggttcaag

SEQ ID NO: 1795400 - DNA, 15 bp, Homo sapiens
cgcctgggttcaagg

SEQ ID NO: 1795401 - DNA, 15 bp, Homo sapiens
gcctgggttcaaggg

SEQ ID NO: 1795402 - DNA, 15 bp, Homo sapiens
cctgggttcaagggg

SEQ ID NO: 1795403 - DNA, 15 bp, Homo sapiens
ctgggttcaagggga

SEQ ID NO: 1795404 - DNA, 15 bp, Homo sapiens
tgggttcaaggggag

SEQ ID NO: 1795405 - DNA, 15 bp, Homo sapiens
gggttcaaggggaga

SEQ ID NO: 1795406 - DNA, 15 bp, Homo sapiens
ggttcaaggggagag

SEQ ID NO: 1795407 - DNA, 15 bp, Homo sapiens
gttcaaggggagagg

SEQ ID NO: 1795408 - DNA, 15 bp, Homo sapiens
ttcaaggggagagga

SEQ ID NO: 1795409 - DNA, 15 bp, Homo sapiens
tcaaggggagaggag

SEQ ID NO: 1795410 - DNA, 15 bp, Homo sapiens
caaggggagaggagc

SEQ ID NO: 1795411 - DNA, 15 bp, Homo sapiens
aaggggagaggagca

SEQ ID NO: 1795412 - DNA, 15 bp, Homo sapiens
aggggagaggagcag

SEQ ID NO: 1795413 - DNA, 15 bp, Homo sapiens
ggggagaggagcagg

SEQ ID NO: 1795414 - DNA, 15 bp, Homo sapiens
gggagaggagcaggc

SEQ ID NO: 1795415 - DNA, 15 bp, Homo sapiens
ggagaggagcaggca

SEQ ID NO: 1795416 - DNA, 15 bp, Homo sapiens
gagaggagcaggcag

SEQ ID NO: 1795417 - DNA, 15 bp, Homo sapiens
agaggagcaggcagg

SEQ ID NO: 1795418 - DNA, 15 bp, Homo sapiens
gaggagcaggcaggg

SEQ ID NO: 1795419 - DNA, 15 bp, Homo sapiens
aggagcaggcaggga

SEQ ID NO: 1795420 - DNA, 15 bp, Homo sapiens
ggagcaggcagggac

SEQ ID NO: 1795421 - DNA, 15 bp, Homo sapiens
gagcaggcagggaca

SEQ ID NO: 1795422 - DNA, 15 bp, Homo sapiens
agcaggcagggacag

SEQ ID NO: 1795423 - DNA, 15 bp, Homo sapiens
gcaggcagggacagc

SEQ ID NO: 1795424 - DNA, 15 bp, Homo sapiens
caggcagggacagcc

SEQ ID NO: 1795425 - DNA, 15 bp, Homo sapiens
aggcagggacagcca

SEQ ID NO: 1795426 - DNA, 15 bp, Homo sapiens
ggcagggacagccag

SEQ ID NO: 1795427 - DNA, 15 bp, Homo sapiens
gcagggacagccagg

SEQ ID NO: 1795428 - DNA, 15 bp, Homo sapiens
cagggacagccagga

SEQ ID NO: 1795429 - DNA, 15 bp, Homo sapiens
agggacagccaggaa

SEQ ID NO: 1795430 - DNA, 15 bp, Homo sapiens
gggacagccaggaaa

SEQ ID NO: 1795431 - DNA, 15 bp, Homo sapiens
ggacagccaggaaat

SEQ ID NO: 1795432 - DNA, 15 bp, Homo sapiens
gacagccaggaaatt

SEQ ID NO: 1795433 - DNA, 15 bp, Homo sapiens
acagccaggaaattc

SEQ ID NO: 1795434 - DNA, 15 bp, Homo sapiens
cagccaggaaattcc

SEQ ID NO: 1795435 - DNA, 15 bp, Homo sapiens
agccaggaaattccc

SEQ ID NO: 1795436 - DNA, 15 bp, Homo sapiens
gccaggaaattcccc

SEQ ID NO: 1795437 - DNA, 15 bp, Homo sapiens
ccaggaaattccccg

SEQ ID NO: 1795438 - DNA, 15 bp, Homo sapiens
caggaaattccccgg

SEQ ID NO: 1795439 - DNA, 15 bp, Homo sapiens
aggaaattccccggg

SEQ ID NO: 1795440 - DNA, 15 bp, Homo sapiens
ggaaattccccgggt

SEQ ID NO: 1795441 - DNA, 15 bp, Homo sapiens
gaaattccccgggtg

SEQ ID NO: 1795442 - DNA, 15 bp, Homo sapiens
aaattccccgggtgg

SEQ ID NO: 1795443 - DNA, 15 bp, Homo sapiens
aattccccgggtgga

SEQ ID NO: 1795444 - DNA, 15 bp, Homo sapiens
attccccgggtggaa

SEQ ID NO: 1795445 - DNA, 15 bp, Homo sapiens
ttccccgggtggaaa

SEQ ID NO: 1795446 - DNA, 15 bp, Homo sapiens
tccccgggtggaaat

SEQ ID NO: 1795447 - DNA, 15 bp, Homo sapiens
ccccgggtggaaata

SEQ ID NO: 1795448 - DNA, 15 bp, Homo sapiens
cccgggtggaaataa

SEQ ID NO: 1795449 - DNA, 15 bp, Homo sapiens
ccgggtggaaataaa

SEQ ID NO: 1795450 - DNA, 15 bp, Homo sapiens
cgggtggaaataaaa

SEQ ID NO: 1795451 - DNA, 15 bp, Homo sapiens
gggtggaaataaaag

SEQ ID NO: 1795452 - DNA, 15 bp, Homo sapiens
ggtggaaataaaagg

SEQ ID NO: 1795453 - DNA, 15 bp, Homo sapiens
gtggaaataaaaggg

SEQ ID NO: 1795454 - DNA, 15 bp, Homo sapiens
tggaaataaaagggt

SEQ ID NO: 1795455 - DNA, 15 bp, Homo sapiens
ggaaataaaagggtg

SEQ ID NO: 1795456 - DNA, 15 bp, Homo sapiens
gaaataaaagggtgg

SEQ ID NO: 1795457 - DNA, 15 bp, Homo sapiens
aaataaaagggtggg

SEQ ID NO: 1795458 - DNA, 15 bp, Homo sapiens
aataaaagggtgggc

SEQ ID NO: 1795459 - DNA, 15 bp, Homo sapiens
ataaaagggtgggcc

SEQ ID NO: 1795460 - DNA, 15 bp, Homo sapiens
taaaagggtgggccc

SEQ ID NO: 1795461 - DNA, 15 bp, Homo sapiens
aaaagggtgggccca

SEQ ID NO: 1795462 - DNA, 15 bp, Homo sapiens
aaagggtgggcccaa

SEQ ID NO: 1795463 - DNA, 15 bp, Homo sapiens
aagggtgggcccaac

SEQ ID NO: 1795464 - DNA, 15 bp, Homo sapiens
agggtgggcccaact

SEQ ID NO: 1795465 - DNA, 15 bp, Homo sapiens
gggtgggcccaactt

SEQ ID NO: 1795466 - DNA, 15 bp, Homo sapiens
ggtgggcccaacttg

SEQ ID NO: 1795467 - DNA, 15 bp, Homo sapiens
gtgggcccaacttgc

SEQ ID NO: 1795468 - DNA, 15 bp, Homo sapiens
tgggcccaacttgca

SEQ ID NO: 1795469 - DNA, 15 bp, Homo sapiens
gggcccaacttgcag

SEQ ID NO: 1795470 - DNA, 15 bp, Homo sapiens
ggcccaacttgcagg

SEQ ID NO: 1795471 - DNA, 15 bp, Homo sapiens
gcccaacttgcaggc

SEQ ID NO: 1795472 - DNA, 15 bp, Homo sapiens
cccaacttgcaggcc

SEQ ID NO: 1795473 - DNA, 15 bp, Homo sapiens
ccaacttgcaggccc

SEQ ID NO: 1795474 - DNA, 15 bp, Homo sapiens
caacttgcaggccct

SEQ ID NO: 1795475 - DNA, 15 bp, Homo sapiens
aacttgcaggccctc

SEQ ID NO: 1795476 - DNA, 15 bp, Homo sapiens
acttgcaggccctct

SEQ ID NO: 1795477 - DNA, 15 bp, Homo sapiens
cttgcaggccctctg

SEQ ID NO: 1795478 - DNA, 15 bp, Homo sapiens
ttgcaggccctctgc

SEQ ID NO: 1795479 - DNA, 15 bp, Homo sapiens
tgcaggccctctgcc

SEQ ID NO: 1795480 - DNA, 15 bp, Homo sapiens
gcaggccctctgccc

SEQ ID NO: 1795481 - DNA, 15 bp, Homo sapiens
caggccctctgcccg

SEQ ID NO: 1795482 - DNA, 15 bp, Homo sapiens
aggccctctgcccgc

SEQ ID NO: 1795483 - DNA, 15 bp, Homo sapiens
ggccctctgcccgca

SEQ ID NO: 1795484 - DNA, 15 bp, Homo sapiens
gccctctgcccgcaa

SEQ ID NO: 1795485 - DNA, 15 bp, Homo sapiens
ccctctgcccgcaag

SEQ ID NO: 1795486 - DNA, 15 bp, Homo sapiens
cctctgcccgcaagg

SEQ ID NO: 1795487 - DNA, 15 bp, Homo sapiens
ctctgcccgcaagga

SEQ ID NO: 1795488 - DNA, 15 bp, Homo sapiens
tctgcccgcaaggac

SEQ ID NO: 1795489 - DNA, 15 bp, Homo sapiens
ctgcccgcaaggaca

SEQ ID NO: 1795490 - DNA, 15 bp, Homo sapiens
tgcccgcaaggacag

SEQ ID NO: 1795491 - DNA, 15 bp, Homo sapiens
gcccgcaaggacaga

SEQ ID NO: 1795492 - DNA, 15 bp, Homo sapiens
cccgcaaggacagag

SEQ ID NO: 1795493 - DNA, 15 bp, Homo sapiens
ccgcaaggacagagt

SEQ ID NO: 1795494 - DNA, 15 bp, Homo sapiens
cgcaaggacagagtc

SEQ ID NO: 1795495 - DNA, 15 bp, Homo sapiens
gcaaggacagagtcc

SEQ ID NO: 1795496 - DNA, 15 bp, Homo sapiens
caaggacagagtcca

SEQ ID NO: 1795497 - DNA, 15 bp, Homo sapiens
aaggacagagtccag

SEQ ID NO: 1795498 - DNA, 15 bp, Homo sapiens
aggacagagtccagt

SEQ ID NO: 1795499 - DNA, 15 bp, Homo sapiens
ggacagagtccagtc

SEQ ID NO: 1795500 - DNA, 15 bp, Homo sapiens
gacagagtccagtcc

SEQ ID NO: 1795501 - DNA, 15 bp, Homo sapiens
acagagtccagtcca

SEQ ID NO: 1795502 - DNA, 15 bp, Homo sapiens
cagagtccagtccac

SEQ ID NO: 1795503 - DNA, 15 bp, Homo sapiens
agagtccagtccaca

SEQ ID NO: 1795504 - DNA, 15 bp, Homo sapiens
gagtccagtccacat

SEQ ID NO: 1795505 - DNA, 15 bp, Homo sapiens
agtccagtccacatt

SEQ ID NO: 1795506 - DNA, 15 bp, Homo sapiens
gtccagtccacattg

SEQ ID NO: 1795507 - DNA, 15 bp, Homo sapiens
tccagtccacattga

SEQ ID NO: 1795508 - DNA, 15 bp, Homo sapiens
ccagtccacattgat

SEQ ID NO: 1795509 - DNA, 15 bp, Homo sapiens
cagtccacattgatg

SEQ ID NO: 1795510 - DNA, 15 bp, Homo sapiens
agtccacattgatgc

SEQ ID NO: 1795511 - DNA, 15 bp, Homo sapiens
gtccacattgatgcc

SEQ ID NO: 1795512 - DNA, 15 bp, Homo sapiens
tccacattgatgcct

SEQ ID NO: 1795513 - DNA, 15 bp, Homo sapiens
ccacattgatgcctc

SEQ ID NO: 1795514 - DNA, 15 bp, Homo sapiens
cacattgatgcctca

SEQ ID NO: 1795515 - DNA, 15 bp, Homo sapiens
acattgatgcctcac

SEQ ID NO: 1795516 - DNA, 15 bp, Homo sapiens
cattgatgcctcacg

SEQ ID NO: 1795517 - DNA, 15 bp, Homo sapiens
attgatgcctcacgt

SEQ ID NO: 1795518 - DNA, 15 bp, Homo sapiens
ttgatgcctcacgtg

SEQ ID NO: 1795519 - DNA, 15 bp, Homo sapiens
tgatgcctcacgtgt

SEQ ID NO: 1795520 - DNA, 15 bp, Homo sapiens
gatgcctcacgtgtc

SEQ ID NO: 1795521 - DNA, 15 bp, Homo sapiens
atgcctcacgtgtca

SEQ ID NO: 1795522 - DNA, 15 bp, Homo sapiens
tgcctcacgtgtcag

SEQ ID NO: 1795523 - DNA, 15 bp, Homo sapiens
gcctcacgtgtcagg

SEQ ID NO: 1795524 - DNA, 15 bp, Homo sapiens
cctcacgtgtcaggt

SEQ ID NO: 1795525 - DNA, 15 bp, Homo sapiens
ctcacgtgtcaggtg

SEQ ID NO: 1795526 - DNA, 15 bp, Homo sapiens
tcacgtgtcaggtgc

SEQ ID NO: 1795527 - DNA, 15 bp, Homo sapiens
cacgtgtcaggtgca

SEQ ID NO: 1795528 - DNA, 15 bp, Homo sapiens
acgtgtcaggtgcaa

SEQ ID NO: 1795529 - DNA, 15 bp, Homo sapiens
cgtgtcaggtgcaat

SEQ ID NO: 1795530 - DNA, 15 bp, Homo sapiens
gtgtcaggtgcaata

SEQ ID NO: 1795531 - DNA, 15 bp, Homo sapiens
tgtcaggtgcaatag

SEQ ID NO: 1795532 - DNA, 15 bp, Homo sapiens
gtcaggtgcaatagg

SEQ ID NO: 1795533 - DNA, 15 bp, Homo sapiens
tcaggtgcaataggt

SEQ ID NO: 1795534 - DNA, 15 bp, Homo sapiens
caggtgcaataggtg

SEQ ID NO: 1795535 - DNA, 15 bp, Homo sapiens
aggtgcaataggtgt

SEQ ID NO: 1795536 - DNA, 15 bp, Homo sapiens
ggtgcaataggtgtc

SEQ ID NO: 1795537 - DNA, 15 bp, Homo sapiens
gtgcaataggtgtca

SEQ ID NO: 1795538 - DNA, 15 bp, Homo sapiens
tgcaataggtgtcat

SEQ ID NO: 1795539 - DNA, 15 bp, Homo sapiens
gcaataggtgtcatc

SEQ ID NO: 1795540 - DNA, 15 bp, Homo sapiens
caataggtgtcatca

SEQ ID NO: 1795541 - DNA, 15 bp, Homo sapiens
aataggtgtcatcaa

SEQ ID NO: 1795542 - DNA, 15 bp, Homo sapiens
ataggtgtcatcaat

SEQ ID NO: 1795543 - DNA, 15 bp, Homo sapiens
taggtgtcatcaatg

SEQ ID NO: 1795544 - DNA, 15 bp, Homo sapiens
aggtgtcatcaatgg

SEQ ID NO: 1795545 - DNA, 15 bp, Homo sapiens
ggtgtcatcaatggc

SEQ ID NO: 1795546 - DNA, 15 bp, Homo sapiens
gtgtcatcaatggca

SEQ ID NO: 1795547 - DNA, 15 bp, Homo sapiens
tgtcatcaatggcat

SEQ ID NO: 1795548 - DNA, 15 bp, Homo sapiens
gtcatcaatggcata

SEQ ID NO: 1795549 - DNA, 15 bp, Homo sapiens
tcatcaatggcatat

SEQ ID NO: 1795550 - DNA, 15 bp, Homo sapiens
catcaatggcatata

SEQ ID NO: 1795551 - DNA, 15 bp, Homo sapiens
atcaatggcatatat

SEQ ID NO: 1795552 - DNA, 15 bp, Homo sapiens
tcaatggcatatatc

SEQ ID NO: 1795553 - DNA, 15 bp, Homo sapiens
caatggcatatatca

SEQ ID NO: 1795554 - DNA, 15 bp, Homo sapiens
aatggcatatatcag

SEQ ID NO: 1795555 - DNA, 15 bp, Homo sapiens
atggcatatatcaga

SEQ ID NO: 1795556 - DNA, 15 bp, Homo sapiens
tggcatatatcagag

SEQ ID NO: 1795557 - DNA, 15 bp, Homo sapiens
ggcatatatcagagc

SEQ ID NO: 1795558 - DNA, 15 bp, Homo sapiens
gcatatatcagagct

SEQ ID NO: 1795559 - DNA, 15 bp, Homo sapiens
catatatcagagctg

SEQ ID NO: 1795560 - DNA, 15 bp, Homo sapiens
atatatcagagctgg

SEQ ID NO: 1795561 - DNA, 15 bp, Homo sapiens
tatatcagagctgga

SEQ ID NO: 1795562 - DNA, 15 bp, Homo sapiens
atatcagagctggag

SEQ ID NO: 1795563 - DNA, 15 bp, Homo sapiens
tatcagagctggagg

SEQ ID NO: 1795564 - DNA, 15 bp, Homo sapiens
atcagagctggaggt

SEQ ID NO: 1795565 - DNA, 15 bp, Homo sapiens
tcagagctggaggtt

SEQ ID NO: 1795566 - DNA, 15 bp, Homo sapiens
cagagctggaggttg

SEQ ID NO: 1795567 - DNA, 15 bp, Homo sapiens
agagctggaggttga

SEQ ID NO: 1795568 - DNA, 15 bp, Homo sapiens
gagctggaggttgag

SEQ ID NO: 1795569 - DNA, 15 bp, Homo sapiens
agctggaggttgaga

SEQ ID NO: 1795570 - DNA, 15 bp, Homo sapiens
gctggaggttgagag

SEQ ID NO: 1795571 - DNA, 15 bp, Homo sapiens
ctggaggttgagagg

SEQ ID NO: 1795572 - DNA, 15 bp, Homo sapiens
tggaggttgagaggc

SEQ ID NO: 1795573 - DNA, 15 bp, Homo sapiens
ggaggttgagaggct

SEQ ID NO: 1795574 - DNA, 15 bp, Homo sapiens
gaggttgagaggctt

SEQ ID NO: 1795575 - DNA, 15 bp, Homo sapiens
aggttgagaggcttg

SEQ ID NO: 1795576 - DNA, 15 bp, Homo sapiens
ggttgagaggcttga

SEQ ID NO: 1795577 - DNA, 15 bp, Homo sapiens
gttgagaggcttgaa

SEQ ID NO: 1795578 - DNA, 15 bp, Homo sapiens
ttgagaggcttgaaa

SEQ ID NO: 1795579 - DNA, 15 bp, Homo sapiens
tgagaggcttgaaaa

SEQ ID NO: 1795580 - DNA, 15 bp, Homo sapiens
gagaggcttgaaaag

SEQ ID NO: 1795581 - DNA, 15 bp, Homo sapiens
agaggcttgaaaaga

SEQ ID NO: 1795582 - DNA, 15 bp, Homo sapiens
gaggcttgaaaagag

SEQ ID NO: 1795583 - DNA, 15 bp, Homo sapiens
aggcttgaaaagaga

SEQ ID NO: 1795584 - DNA, 15 bp, Homo sapiens
ggcttgaaaagagaa

SEQ ID NO: 1795585 - DNA, 15 bp, Homo sapiens
gcttgaaaagagaat

SEQ ID NO: 1795586 - DNA, 15 bp, Homo sapiens
cttgaaaagagaata

SEQ ID NO: 1795587 - DNA, 15 bp, Homo sapiens
ttgaaaagagaataa

SEQ ID NO: 1795588 - DNA, 15 bp, Homo sapiens
tgaaaagagaataaa

SEQ ID NO: 1795589 - DNA, 15 bp, Homo sapiens
gaaaagagaataaaa

SEQ ID NO: 1795590 - DNA, 15 bp, Homo sapiens
aaaagagaataaaac

SEQ ID NO: 1795591 - DNA, 15 bp, Homo sapiens
aagagaataaaactg

SEQ ID NO: 1795592 - DNA, 15 bp, Homo sapiens
agagaataaaactgt

SEQ ID NO: 1795593 - DNA, 15 bp, Homo sapiens
gagaataaaactgtt

SEQ ID NO: 1795594 - DNA, 15 bp, Homo sapiens
agaataaaactgttg

SEQ ID NO: 1795595 - DNA, 15 bp, Homo sapiens
gaataaaactgttgt

SEQ ID NO: 1795596 - DNA, 15 bp, Homo sapiens
aataaaactgttgta

SEQ ID NO: 1795597 - DNA, 15 bp, Homo sapiens
ataaaactgttgtat

SEQ ID NO: 1795598 - DNA, 15 bp, Homo sapiens
taaaactgttgtata

SEQ ID NO: 1795599 - DNA, 15 bp, Homo sapiens
aaaactgttgtataa

SEQ ID NO: 1795600 - DNA, 15 bp, Homo sapiens
aaactgttgtataaa

SEQ ID NO: 1795601 - DNA, 15 bp, Homo sapiens
aactgttgtataaac

SEQ ID NO: 1795602 - DNA, 15 bp, Homo sapiens
actgttgtataaaca

SEQ ID NO: 1795603 - DNA, 15 bp, Homo sapiens
ctgttgtataaacat

SEQ ID NO: 1795604 - DNA, 15 bp, Homo sapiens
tgttgtataaacata

SEQ ID NO: 1795605 - DNA, 15 bp, Homo sapiens
gttgtataaacataa

SEQ ID NO: 1795606 - DNA, 15 bp, Homo sapiens
ttgtataaacataaa

SEQ ID NO: 1795607 - DNA, 15 bp, Homo sapiens
tgtataaacataaaa

SEQ ID NO: 1795608 - DNA, 15 bp, Homo sapiens
gtataaacataaaac

SEQ ID NO: 1795609 - DNA, 15 bp, Homo sapiens
tataaacataaaaca

SEQ ID NO: 1795610 - DNA, 15 bp, Homo sapiens
ataaacataaaacaa

SEQ ID NO: 1795611 - DNA, 15 bp, Homo sapiens
taaacataaaacaaa

SEQ ID NO: 1795612 - DNA, 15 bp, Homo sapiens
aaacataaaacaaaa

SEQ ID NO: 1795613 - DNA, 15 bp, Homo sapiens
aacataaaacaaaat

SEQ ID NO: 1795614 - DNA, 15 bp, Homo sapiens
acataaaacaaaatg

SEQ ID NO: 1795615 - DNA, 15 bp, Homo sapiens
cataaaacaaaatgc

SEQ ID NO: 1795616 - DNA, 15 bp, Homo sapiens
ataaaacaaaatgcg

SEQ ID NO: 1795617 - DNA, 15 bp, Homo sapiens
taaaacaaaatgcgt

SEQ ID NO: 1795618 - DNA, 15 bp, Homo sapiens
aaaacaaaatgcgtg

SEQ ID NO: 1795619 - DNA, 15 bp, Homo sapiens
aaacaaaatgcgtga

SEQ ID NO: 1795620 - DNA, 15 bp, Homo sapiens
aacaaaatgcgtgaa

SEQ ID NO: 1795621 - DNA, 15 bp, Homo sapiens
acaaaatgcgtgaac

SEQ ID NO: 1795622 - DNA, 15 bp, Homo sapiens
caaaatgcgtgaacc

SEQ ID NO: 1795623 - DNA, 15 bp, Homo sapiens
aaaatgcgtgaacct

SEQ ID NO: 1795624 - DNA, 15 bp, Homo sapiens
aaatgcgtgaaccta

SEQ ID NO: 1795625 - DNA, 15 bp, Homo sapiens
aatgcgtgaacctat

SEQ ID NO: 1795626 - DNA, 15 bp, Homo sapiens
atgcgtgaacctata

SEQ ID NO: 1795627 - DNA, 15 bp, Homo sapiens
tgcgtgaacctatag

SEQ ID NO: 1795628 - DNA, 15 bp, Homo sapiens
gcgtgaacctataga

SEQ ID NO: 1795629 - DNA, 15 bp, Homo sapiens
cgtgaacctatagaa

SEQ ID NO: 1795630 - DNA, 15 bp, Homo sapiens
gtgaacctatagaaa

SEQ ID NO: 1795631 - DNA, 15 bp, Homo sapiens
tgaacctatagaaaa

SEQ ID NO: 1795632 - DNA, 15 bp, Homo sapiens
gaacctatagaaaaa

SEQ ID NO: 1795633 - DNA, 15 bp, Homo sapiens
aacctatagaaaaat

SEQ ID NO: 1795634 - DNA, 15 bp, Homo sapiens
acctatagaaaaatg

SEQ ID NO: 1795635 - DNA, 15 bp, Homo sapiens
cctatagaaaaatgt

SEQ ID NO: 1795636 - DNA, 15 bp, Homo sapiens
ctatagaaaaatgtc

SEQ ID NO: 1795637 - DNA, 15 bp, Homo sapiens
tatagaaaaatgtct

SEQ ID NO: 1795638 - DNA, 15 bp, Homo sapiens
atagaaaaatgtctc

SEQ ID NO: 1795639 - DNA, 15 bp, Homo sapiens
tagaaaaatgtctct

SEQ ID NO: 1795640 - DNA, 15 bp, Homo sapiens
agaaaaatgtctctg

SEQ ID NO: 1795641 - DNA, 15 bp, Homo sapiens
gaaaaatgtctctgg

SEQ ID NO: 1795642 - DNA, 15 bp, Homo sapiens
aaaaatgtctctggg

SEQ ID NO: 1795643 - DNA, 15 bp, Homo sapiens
aaaatgtctctggga

SEQ ID NO: 1795644 - DNA, 15 bp, Homo sapiens
aaatgtctctgggac

SEQ ID NO: 1795645 - DNA, 15 bp, Homo sapiens
aatgtctctgggact

SEQ ID NO: 1795646 - DNA, 15 bp, Homo sapiens
atgtctctgggactc

SEQ ID NO: 1795647 - DNA, 15 bp, Homo sapiens
tgtctctgggactct

SEQ ID NO: 1795648 - DNA, 15 bp, Homo sapiens
gtctctgggactctt

SEQ ID NO: 1795649 - DNA, 15 bp, Homo sapiens
tctctgggactcttt

SEQ ID NO: 1795650 - DNA, 15 bp, Homo sapiens
ctctgggactctttt

SEQ ID NO: 1795651 - DNA, 15 bp, Homo sapiens
tctgggactcttttt

SEQ ID NO: 1795652 - DNA, 15 bp, Homo sapiens
ctgggactcttttta

SEQ ID NO: 1795653 - DNA, 15 bp, Homo sapiens
tgggactctttttaa

SEQ ID NO: 1795654 - DNA, 15 bp, Homo sapiens
gggactctttttaaa

SEQ ID NO: 1795655 - DNA, 15 bp, Homo sapiens
ggactctttttaaac

SEQ ID NO: 1795656 - DNA, 15 bp, Homo sapiens
gactctttttaaact

SEQ ID NO: 1795657 - DNA, 15 bp, Homo sapiens
actctttttaaacta

SEQ ID NO: 1795658 - DNA, 15 bp, Homo sapiens
ctctttttaaactat

SEQ ID NO: 1795659 - DNA, 15 bp, Homo sapiens
tctttttaaactata

SEQ ID NO: 1795660 - DNA, 15 bp, Homo sapiens
ctttttaaactatat

SEQ ID NO: 1795661 - DNA, 15 bp, Homo sapiens
tttttaaactatatt

SEQ ID NO: 1795662 - DNA, 15 bp, Homo sapiens
ttttaaactatattt

SEQ ID NO: 1795663 - DNA, 15 bp, Homo sapiens
tttaaactatatttt

SEQ ID NO: 1795664 - DNA, 15 bp, Homo sapiens
ttaaactatattttg

SEQ ID NO: 1795665 - DNA, 15 bp, Homo sapiens
taaactatattttga

SEQ ID NO: 1795666 - DNA, 15 bp, Homo sapiens
aaactatattttgaa

SEQ ID NO: 1795667 - DNA, 15 bp, Homo sapiens
aactatattttgaaa

SEQ ID NO: 1795668 - DNA, 15 bp, Homo sapiens
actatattttgaaat

SEQ ID NO: 1795669 - DNA, 15 bp, Homo sapiens
ctatattttgaaata

SEQ ID NO: 1795670 - DNA, 15 bp, Homo sapiens
tatattttgaaataa

SEQ ID NO: 1795671 - DNA, 15 bp, Homo sapiens
atattttgaaataac

SEQ ID NO: 1795672 - DNA, 15 bp, Homo sapiens
tattttgaaataact

SEQ ID NO: 1795673 - DNA, 15 bp, Homo sapiens
attttgaaataactt

SEQ ID NO: 1795674 - DNA, 15 bp, Homo sapiens
ttttgaaataacttt

SEQ ID NO: 1795675 - DNA, 15 bp, Homo sapiens
tttgaaataacttta

SEQ ID NO: 1795676 - DNA, 15 bp, Homo sapiens
ttgaaataactttag

SEQ ID NO: 1795677 - DNA, 15 bp, Homo sapiens
tgaaataactttaga

SEQ ID NO: 1795678 - DNA, 15 bp, Homo sapiens
gaaataactttagat

SEQ ID NO: 1795679 - DNA, 15 bp, Homo sapiens
aaataactttagatt

SEQ ID NO: 1795680 - DNA, 15 bp, Homo sapiens
aataactttagattt

SEQ ID NO: 1795681 - DNA, 15 bp, Homo sapiens
ataactttagatttt

SEQ ID NO: 1795682 - DNA, 15 bp, Homo sapiens
taactttagattttg

SEQ ID NO: 1795683 - DNA, 15 bp, Homo sapiens
aactttagattttgg

SEQ ID NO: 1795684 - DNA, 15 bp, Homo sapiens
actttagattttgga

SEQ ID NO: 1795685 - DNA, 15 bp, Homo sapiens
ctttagattttggaa

SEQ ID NO: 1795686 - DNA, 15 bp, Homo sapiens
tttagattttggaaa

SEQ ID NO: 1795687 - DNA, 15 bp, Homo sapiens
ttagattttggaaaa

SEQ ID NO: 1795688 - DNA, 15 bp, Homo sapiens
tagattttggaaaaa

SEQ ID NO: 1795689 - DNA, 15 bp, Homo sapiens
agattttggaaaaaa

SEQ ID NO: 1795690 - DNA, 15 bp, Homo sapiens
gattttggaaaaaat

SEQ ID NO: 1795691 - DNA, 15 bp, Homo sapiens
ttggaaaaaattgca

SEQ ID NO: 1795692 - DNA, 15 bp, Homo sapiens
tggaaaaaattgcaa

SEQ ID NO: 1795693 - DNA, 15 bp, Homo sapiens
ggaaaaaattgcaaa

SEQ ID NO: 1795694 - DNA, 15 bp, Homo sapiens
gaaaaaattgcaaaa

SEQ ID NO: 1795695 - DNA, 15 bp, Homo sapiens
aaaaaattgcaaaaa

SEQ ID NO: 1795696 - DNA, 15 bp, Homo sapiens
aaaaattgcaaaaat

SEQ ID NO: 1795697 - DNA, 15 bp, Homo sapiens
aaaattgcaaaaata

SEQ ID NO: 1795698 - DNA, 15 bp, Homo sapiens
aaattgcaaaaataa

SEQ ID NO: 1795699 - DNA, 15 bp, Homo sapiens
aattgcaaaaataac

SEQ ID NO: 1795700 - DNA, 15 bp, Homo sapiens
attgcaaaaataaca

SEQ ID NO: 1795701 - DNA, 15 bp, Homo sapiens
ttgcaaaaataacac

SEQ ID NO: 1795702 - DNA, 15 bp, Homo sapiens
tgcaaaaataacaca

SEQ ID NO: 1795703 - DNA, 15 bp, Homo sapiens
gcaaaaataacacag

SEQ ID NO: 1795704 - DNA, 15 bp, Homo sapiens
caaaaataacacagt

SEQ ID NO: 1795705 - DNA, 15 bp, Homo sapiens
aaaaataacacagtg

SEQ ID NO: 1795706 - DNA, 15 bp, Homo sapiens
aaaataacacagtgt

SEQ ID NO: 1795707 - DNA, 15 bp, Homo sapiens
aaataacacagtgtt

SEQ ID NO: 1795708 - DNA, 15 bp, Homo sapiens
aataacacagtgttt

SEQ ID NO: 1795709 - DNA, 15 bp, Homo sapiens
ataacacagtgtttc

SEQ ID NO: 1795710 - DNA, 15 bp, Homo sapiens
taacacagtgtttcc

SEQ ID NO: 1795711 - DNA, 15 bp, Homo sapiens
aacacagtgtttcca

SEQ ID NO: 1795712 - DNA, 15 bp, Homo sapiens
acacagtgtttccat

SEQ ID NO: 1795713 - DNA, 15 bp, Homo sapiens
cacagtgtttccata

SEQ ID NO: 1795714 - DNA, 15 bp, Homo sapiens
acagtgtttccatat

SEQ ID NO: 1795715 - DNA, 15 bp, Homo sapiens
cagtgtttccatata

SEQ ID NO: 1795716 - DNA, 15 bp, Homo sapiens
agtgtttccatatac

SEQ ID NO: 1795717 - DNA, 15 bp, Homo sapiens
gtgtttccatatacc

SEQ ID NO: 1795718 - DNA, 15 bp, Homo sapiens
tgtttccatataccc

SEQ ID NO: 1795719 - DNA, 15 bp, Homo sapiens
gtttccatataccca

SEQ ID NO: 1795720 - DNA, 15 bp, Homo sapiens
tttccatatacccat

SEQ ID NO: 1795721 - DNA, 15 bp, Homo sapiens
ttccatatacccatt

SEQ ID NO: 1795722 - DNA, 15 bp, Homo sapiens
tccatatacccattg

SEQ ID NO: 1795723 - DNA, 15 bp, Homo sapiens
ccatatacccattgt

SEQ ID NO: 1795724 - DNA, 15 bp, Homo sapiens
catatacccattgtc

SEQ ID NO: 1795725 - DNA, 15 bp, Homo sapiens
atatacccattgtcc

SEQ ID NO: 1795726 - DNA, 15 bp, Homo sapiens
tatacccattgtcca

SEQ ID NO: 1795727 - DNA, 15 bp, Homo sapiens
atacccattgtccag

SEQ ID NO: 1795728 - DNA, 15 bp, Homo sapiens
tacccattgtccagc

SEQ ID NO: 1795729 - DNA, 15 bp, Homo sapiens
acccattgtccagct

SEQ ID NO: 1795730 - DNA, 15 bp, Homo sapiens
cccattgtccagctt

SEQ ID NO: 1795731 - DNA, 15 bp, Homo sapiens
ccattgtccagcttc

SEQ ID NO: 1795732 - DNA, 15 bp, Homo sapiens
cattgtccagcttcc

SEQ ID NO: 1795733 - DNA, 15 bp, Homo sapiens
attgtccagcttccc

SEQ ID NO: 1795734 - DNA, 15 bp, Homo sapiens
ttgtccagcttcccc

SEQ ID NO: 1795735 - DNA, 15 bp, Homo sapiens
tgtccagcttcccct

SEQ ID NO: 1795736 - DNA, 15 bp, Homo sapiens
gtccagcttccccta

SEQ ID NO: 1795737 - DNA, 15 bp, Homo sapiens
tccagcttcccctaa

SEQ ID NO: 1795738 - DNA, 15 bp, Homo sapiens
ccagcttcccctaat

SEQ ID NO: 1795739 - DNA, 15 bp, Homo sapiens
cagcttcccctaatg

SEQ ID NO: 1795740 - DNA, 15 bp, Homo sapiens
agcttcccctaatgt

SEQ ID NO: 1795741 - DNA, 15 bp, Homo sapiens
gcttcccctaatgtt

SEQ ID NO: 1795742 - DNA, 15 bp, Homo sapiens
cttcccctaatgtta

SEQ ID NO: 1795743 - DNA, 15 bp, Homo sapiens
ttcccctaatgttaa

SEQ ID NO: 1795744 - DNA, 15 bp, Homo sapiens
tcccctaatgttaac

SEQ ID NO: 1795745 - DNA, 15 bp, Homo sapiens
cccctaatgttaaca

SEQ ID NO: 1795746 - DNA, 15 bp, Homo sapiens
ccctaatgttaacat

SEQ ID NO: 1795747 - DNA, 15 bp, Homo sapiens
cctaatgttaacatc

SEQ ID NO: 1795748 - DNA, 15 bp, Homo sapiens
ctaatgttaacatct

SEQ ID NO: 1795749 - DNA, 15 bp, Homo sapiens
taatgttaacatctt

SEQ ID NO: 1795750 - DNA, 15 bp, Homo sapiens
aatgttaacatcttg

SEQ ID NO: 1795751 - DNA, 15 bp, Homo sapiens
atgttaacatcttgc

SEQ ID NO: 1795752 - DNA, 15 bp, Homo sapiens
tgttaacatcttgca

SEQ ID NO: 1795753 - DNA, 15 bp, Homo sapiens
gttaacatcttgcat

SEQ ID NO: 1795754 - DNA, 15 bp, Homo sapiens
ttaacatcttgcata

SEQ ID NO: 1795755 - DNA, 15 bp, Homo sapiens
taacatcttgcatac

SEQ ID NO: 1795756 - DNA, 15 bp, Homo sapiens
aacatcttgcatacc

SEQ ID NO: 1795757 - DNA, 15 bp, Homo sapiens
acatcttgcataccc

SEQ ID NO: 1795758 - DNA, 15 bp, Homo sapiens
catcttgcataccca

SEQ ID NO: 1795759 - DNA, 15 bp, Homo sapiens
atcttgcatacccat

SEQ ID NO: 1795760 - DNA, 15 bp, Homo sapiens
tcttgcatacccata

SEQ ID NO: 1795761 - DNA, 15 bp, Homo sapiens
cttgcatacccatag

SEQ ID NO: 1795762 - DNA, 15 bp, Homo sapiens
ttgcatacccatagt

SEQ ID NO: 1795763 - DNA, 15 bp, Homo sapiens
tgcatacccatagta

SEQ ID NO: 1795764 - DNA, 15 bp, Homo sapiens
gcatacccatagtat

SEQ ID NO: 1795765 - DNA, 15 bp, Homo sapiens
catacccatagtata

SEQ ID NO: 1795766 - DNA, 15 bp, Homo sapiens
atacccatagtataa

SEQ ID NO: 1795767 - DNA, 15 bp, Homo sapiens
tacccatagtataat

SEQ ID NO: 1795768 - DNA, 15 bp, Homo sapiens
acccatagtataatt

SEQ ID NO: 1795769 - DNA, 15 bp, Homo sapiens
cccatagtataatta

SEQ ID NO: 1795770 - DNA, 15 bp, Homo sapiens
ccatagtataattat

SEQ ID NO: 1795771 - DNA, 15 bp, Homo sapiens
catagtataattatg

SEQ ID NO: 1795772 - DNA, 15 bp, Homo sapiens
atagtataattatga

SEQ ID NO: 1795773 - DNA, 15 bp, Homo sapiens
tagtataattatgaa

SEQ ID NO: 1795774 - DNA, 15 bp, Homo sapiens
agtataattatgaac

SEQ ID NO: 1795775 - DNA, 15 bp, Homo sapiens
gtataattatgaaca

SEQ ID NO: 1795776 - DNA, 15 bp, Homo sapiens
tataattatgaacac

SEQ ID NO: 1795777 - DNA, 15 bp, Homo sapiens
ataattatgaacact

SEQ ID NO: 1795778 - DNA, 15 bp, Homo sapiens
taattatgaacacta

SEQ ID NO: 1795779 - DNA, 15 bp, Homo sapiens
aattatgaacactaa

SEQ ID NO: 1795780 - DNA, 15 bp, Homo sapiens
attatgaacactaag

SEQ ID NO: 1795781 - DNA, 15 bp, Homo sapiens
ttatgaacactaaga

SEQ ID NO: 1795782 - DNA, 15 bp, Homo sapiens
tatgaacactaagaa

SEQ ID NO: 1795783 - DNA, 15 bp, Homo sapiens
atgaacactaagaaa

SEQ ID NO: 1795784 - DNA, 15 bp, Homo sapiens
tgaacactaagaaat

SEQ ID NO: 1795785 - DNA, 15 bp, Homo sapiens
gaacactaagaaatg

SEQ ID NO: 1795786 - DNA, 15 bp, Homo sapiens
aacactaagaaatga

SEQ ID NO: 1795787 - DNA, 15 bp, Homo sapiens
acactaagaaatgaa

SEQ ID NO: 1795788 - DNA, 15 bp, Homo sapiens
cactaagaaatgaac

SEQ ID NO: 1795789 - DNA, 15 bp, Homo sapiens
actaagaaatgaaca

SEQ ID NO: 1795790 - DNA, 15 bp, Homo sapiens
ctaagaaatgaacaa

SEQ ID NO: 1795791 - DNA, 15 bp, Homo sapiens
taagaaatgaacaat

SEQ ID NO: 1795792 - DNA, 15 bp, Homo sapiens
aagaaatgaacaatg

SEQ ID NO: 1795793 - DNA, 15 bp, Homo sapiens
agaaatgaacaatgt

SEQ ID NO: 1795794 - DNA, 15 bp, Homo sapiens
gaaatgaacaatgta

SEQ ID NO: 1795795 - DNA, 15 bp, Homo sapiens
aaatgaacaatgtac

SEQ ID NO: 1795796 - DNA, 15 bp, Homo sapiens
aatgaacaatgtaca

SEQ ID NO: 1795797 - DNA, 15 bp, Homo sapiens
atgaacaatgtacaa

SEQ ID NO: 1795798 - DNA, 15 bp, Homo sapiens
tgaacaatgtacaat

SEQ ID NO: 1795799 - DNA, 15 bp, Homo sapiens
gaacaatgtacaatg

SEQ ID NO: 1795800 - DNA, 15 bp, Homo sapiens
aacaatgtacaatgc

SEQ ID NO: 1795801 - DNA, 15 bp, Homo sapiens
acaatgtacaatgct

SEQ ID NO: 1795802 - DNA, 15 bp, Homo sapiens
caatgtacaatgcta

SEQ ID NO: 1795803 - DNA, 15 bp, Homo sapiens
aatgtacaatgctat

SEQ ID NO: 1795804 - DNA, 15 bp, Homo sapiens
atgtacaatgctatt

SEQ ID NO: 1795805 - DNA, 15 bp, Homo sapiens
tgtacaatgctatta

SEQ ID NO: 1795806 - DNA, 15 bp, Homo sapiens
gtacaatgctattaa

SEQ ID NO: 1795807 - DNA, 15 bp, Homo sapiens
tacaatgctattaac

SEQ ID NO: 1795808 - DNA, 15 bp, Homo sapiens
acaatgctattaact

SEQ ID NO: 1795809 - DNA, 15 bp, Homo sapiens
caatgctattaacta

SEQ ID NO: 1795810 - DNA, 15 bp, Homo sapiens
aatgctattaactac

SEQ ID NO: 1795811 - DNA, 15 bp, Homo sapiens
atgctattaactaca

SEQ ID NO: 1795812 - DNA, 15 bp, Homo sapiens
tgctattaactacag

SEQ ID NO: 1795813 - DNA, 15 bp, Homo sapiens
gctattaactacaga

SEQ ID NO: 1795814 - DNA, 15 bp, Homo sapiens
ctattaactacagac

SEQ ID NO: 1795815 - DNA, 15 bp, Homo sapiens
tattaactacagact

SEQ ID NO: 1795816 - DNA, 15 bp, Homo sapiens
attaactacagactt

SEQ ID NO: 1795817 - DNA, 15 bp, Homo sapiens
ttaactacagacttt

SEQ ID NO: 1795818 - DNA, 15 bp, Homo sapiens
taactacagacttta

SEQ ID NO: 1795819 - DNA, 15 bp, Homo sapiens
aactacagactttat

SEQ ID NO: 1795820 - DNA, 15 bp, Homo sapiens
actacagactttatt

SEQ ID NO: 1795821 - DNA, 15 bp, Homo sapiens
ctacagactttattc

SEQ ID NO: 1795822 - DNA, 15 bp, Homo sapiens
tacagactttattca

SEQ ID NO: 1795823 - DNA, 15 bp, Homo sapiens
acagactttattcag

SEQ ID NO: 1795824 - DNA, 15 bp, Homo sapiens
cagactttattcaga

SEQ ID NO: 1795825 - DNA, 15 bp, Homo sapiens
agactttattcagat

SEQ ID NO: 1795826 - DNA, 15 bp, Homo sapiens
gactttattcagatt

SEQ ID NO: 1795827 - DNA, 15 bp, Homo sapiens
actttattcagattt

SEQ ID NO: 1795828 - DNA, 15 bp, Homo sapiens
ctttattcagatttc

SEQ ID NO: 1795829 - DNA, 15 bp, Homo sapiens
tttattcagatttca

SEQ ID NO: 1795830 - DNA, 15 bp, Homo sapiens
ttattcagatttcat

SEQ ID NO: 1795831 - DNA, 15 bp, Homo sapiens
tattcagatttcatt

SEQ ID NO: 1795832 - DNA, 15 bp, Homo sapiens
attcagatttcatta

SEQ ID NO: 1795833 - DNA, 15 bp, Homo sapiens
ttcagatttcattag

SEQ ID NO: 1795834 - DNA, 15 bp, Homo sapiens
tcagatttcattagt

SEQ ID NO: 1795835 - DNA, 15 bp, Homo sapiens
cagatttcattagtt

SEQ ID NO: 1795836 - DNA, 15 bp, Homo sapiens
agatttcattagtta

SEQ ID NO: 1795837 - DNA, 15 bp, Homo sapiens
gatttcattagttat

SEQ ID NO: 1795838 - DNA, 15 bp, Homo sapiens
atttcattagttata

SEQ ID NO: 1795839 - DNA, 15 bp, Homo sapiens
tttcattagttatat

SEQ ID NO: 1795840 - DNA, 15 bp, Homo sapiens
ttcattagttatata

SEQ ID NO: 1795841 - DNA, 15 bp, Homo sapiens
tcattagttatatat

SEQ ID NO: 1795842 - DNA, 15 bp, Homo sapiens
cattagttatatata

SEQ ID NO: 1795843 - DNA, 15 bp, Homo sapiens
attagttatatatat

SEQ ID NO: 1795844 - DNA, 15 bp, Homo sapiens
ttagttatatatata

SEQ ID NO: 1795845 - DNA, 15 bp, Homo sapiens
agttatatatatatg

SEQ ID NO: 1795846 - DNA, 15 bp, Homo sapiens
gttatatatatatgt

SEQ ID NO: 1795847 - DNA, 15 bp, Homo sapiens
ttatatatatatgtg

SEQ ID NO: 1795848 - DNA, 15 bp, Homo sapiens
tatatatatatgtgt

SEQ ID NO: 1795849 - DNA, 15 bp, Homo sapiens
atatatatatgtgtg

SEQ ID NO: 1795850 - DNA, 15 bp, Homo sapiens
tatatatatgtgtgt

SEQ ID NO: 1795851 - DNA, 15 bp, Homo sapiens
atatatatgtgtgtg

SEQ ID NO: 1795852 - DNA, 15 bp, Homo sapiens
tatatatgtgtgtgt

SEQ ID NO: 1795853 - DNA, 15 bp, Homo sapiens
atatatgtgtgtgtg

SEQ ID NO: 1795854 - DNA, 15 bp, Homo sapiens
tgtgtgtgtatatat

SEQ ID NO: 1795855 - DNA, 15 bp, Homo sapiens
gtgtgtatatatata

SEQ ID NO: 1795856 - DNA, 15 bp, Homo sapiens
tgtgtatatatatat

SEQ ID NO: 1795857 - DNA, 15 bp, Homo sapiens
gtgtatatatatata

SEQ ID NO: 1795858 - DNA, 15 bp, Homo sapiens
tgtatatatatatat

SEQ ID NO: 1795859 - DNA, 15 bp, Homo sapiens
gtatatatatatata

SEQ ID NO: 1795860 - DNA, 15 bp, Homo sapiens
tatatatatatataa

SEQ ID NO: 1795861 - DNA, 15 bp, Homo sapiens
atatatatataattt

SEQ ID NO: 1795862 - DNA, 15 bp, Homo sapiens
tatatatataatttt

SEQ ID NO: 1795863 - DNA, 15 bp, Homo sapiens
atatatataattttt

SEQ ID NO: 1795864 - DNA, 15 bp, Homo sapiens
tatatataatttttt

SEQ ID NO: 1795865 - DNA, 15 bp, Homo sapiens
atatataattttttt

SEQ ID NO: 1795866 - DNA, 15 bp, Homo sapiens
tatataatttttttt

SEQ ID NO: 1795867 - DNA, 15 bp, Homo sapiens
atataattttttttt

SEQ ID NO: 1795868 - DNA, 15 bp, Homo sapiens
ataattttttttttg

SEQ ID NO: 1795869 - DNA, 15 bp, Homo sapiens
taattttttttttgt

SEQ ID NO: 1795870 - DNA, 15 bp, Homo sapiens
aattttttttttgta

SEQ ID NO: 1795871 - DNA, 15 bp, Homo sapiens
attttttttttgtaa

SEQ ID NO: 1795872 - DNA, 15 bp, Homo sapiens
ttttttttgtaaaat

SEQ ID NO: 1795873 - DNA, 15 bp, Homo sapiens
tttttttgtaaaatg

SEQ ID NO: 1795874 - DNA, 15 bp, Homo sapiens
ttttttgtaaaatgt

SEQ ID NO: 1795875 - DNA, 15 bp, Homo sapiens
tttttgtaaaatgta

SEQ ID NO: 1795876 - DNA, 15 bp, Homo sapiens
ttttgtaaaatgtac

SEQ ID NO: 1795877 - DNA, 15 bp, Homo sapiens
tttgtaaaatgtact

SEQ ID NO: 1795878 - DNA, 15 bp, Homo sapiens
ttgtaaaatgtacta

SEQ ID NO: 1795879 - DNA, 15 bp, Homo sapiens
tgtaaaatgtactat

SEQ ID NO: 1795880 - DNA, 15 bp, Homo sapiens
gtaaaatgtactatc

SEQ ID NO: 1795881 - DNA, 15 bp, Homo sapiens
taaaatgtactatcc

SEQ ID NO: 1795882 - DNA, 15 bp, Homo sapiens
aaaatgtactatccc

SEQ ID NO: 1795883 - DNA, 15 bp, Homo sapiens
aaatgtactatccct

SEQ ID NO: 1795884 - DNA, 15 bp, Homo sapiens
aatgtactatccctg

SEQ ID NO: 1795885 - DNA, 15 bp, Homo sapiens
atgtactatccctgg

SEQ ID NO: 1795886 - DNA, 15 bp, Homo sapiens
tgtactatccctgga

SEQ ID NO: 1795887 - DNA, 15 bp, Homo sapiens
gtactatccctggag

SEQ ID NO: 1795888 - DNA, 15 bp, Homo sapiens
tactatccctggagc

SEQ ID NO: 1795889 - DNA, 15 bp, Homo sapiens
actatccctggagct

SEQ ID NO: 1795890 - DNA, 15 bp, Homo sapiens
ctatccctggagctt

SEQ ID NO: 1795891 - DNA, 15 bp, Homo sapiens
tatccctggagctta

SEQ ID NO: 1795892 - DNA, 15 bp, Homo sapiens
atccctggagcttat

SEQ ID NO: 1795893 - DNA, 15 bp, Homo sapiens
tccctggagcttata

SEQ ID NO: 1795894 - DNA, 15 bp, Homo sapiens
ccctggagcttataa

SEQ ID NO: 1795895 - DNA, 15 bp, Homo sapiens
cctggagcttataaa

SEQ ID NO: 1795896 - DNA, 15 bp, Homo sapiens
ctggagcttataaaa

SEQ ID NO: 1795897 - DNA, 15 bp, Homo sapiens
tggagcttataaaac

SEQ ID NO: 1795898 - DNA, 15 bp, Homo sapiens
ggagcttataaaaca

SEQ ID NO: 1795899 - DNA, 15 bp, Homo sapiens
gagcttataaaacat

SEQ ID NO: 1795900 - DNA, 15 bp, Homo sapiens
agcttataaaacatc

SEQ ID NO: 1795901 - DNA, 15 bp, Homo sapiens
gcttataaaacatcc

SEQ ID NO: 1795902 - DNA, 15 bp, Homo sapiens
cttataaaacatcca

SEQ ID NO: 1795903 - DNA, 15 bp, Homo sapiens
ttataaaacatccag

SEQ ID NO: 1795904 - DNA, 15 bp, Homo sapiens
tataaaacatccaga

SEQ ID NO: 1795905 - DNA, 15 bp, Homo sapiens
ataaaacatccagag

SEQ ID NO: 1795906 - DNA, 15 bp, Homo sapiens
taaaacatccagagt

SEQ ID NO: 1795907 - DNA, 15 bp, Homo sapiens
aaaacatccagagtg

SEQ ID NO: 1795908 - DNA, 15 bp, Homo sapiens
aaacatccagagtgc

SEQ ID NO: 1795909 - DNA, 15 bp, Homo sapiens
aacatccagagtgca

SEQ ID NO: 1795910 - DNA, 15 bp, Homo sapiens
acatccagagtgcaa

SEQ ID NO: 1795911 - DNA, 15 bp, Homo sapiens
catccagagtgcaaa

SEQ ID NO: 1795912 - DNA, 15 bp, Homo sapiens
atccagagtgcaaag

SEQ ID NO: 1795913 - DNA, 15 bp, Homo sapiens
tccagagtgcaaaga

SEQ ID NO: 1795914 - DNA, 15 bp, Homo sapiens
ccagagtgcaaagac

SEQ ID NO: 1795915 - DNA, 15 bp, Homo sapiens
cagagtgcaaagaca

SEQ ID NO: 1795916 - DNA, 15 bp, Homo sapiens
agagtgcaaagacaa

SEQ ID NO: 1795917 - DNA, 15 bp, Homo sapiens
gagtgcaaagacaat

SEQ ID NO: 1795918 - DNA, 15 bp, Homo sapiens
agtgcaaagacaatg

SEQ ID NO: 1795919 - DNA, 15 bp, Homo sapiens
gtgcaaagacaatga

SEQ ID NO: 1795920 - DNA, 15 bp, Homo sapiens
tgcaaagacaatgac

SEQ ID NO: 1795921 - DNA, 15 bp, Homo sapiens
gcaaagacaatgact

SEQ ID NO: 1795922 - DNA, 15 bp, Homo sapiens
caaagacaatgactg

SEQ ID NO: 1795923 - DNA, 15 bp, Homo sapiens
aaagacaatgactga

SEQ ID NO: 1795924 - DNA, 15 bp, Homo sapiens
aagacaatgactgac

SEQ ID NO: 1795925 - DNA, 15 bp, Homo sapiens
agacaatgactgacc

SEQ ID NO: 1795926 - DNA, 15 bp, Homo sapiens
gacaatgactgacct

SEQ ID NO: 1795927 - DNA, 15 bp, Homo sapiens
acaatgactgacctt

SEQ ID NO: 1795928 - DNA, 15 bp, Homo sapiens
caatgactgaccttt

SEQ ID NO: 1795929 - DNA, 15 bp, Homo sapiens
aatgactgacctttc

SEQ ID NO: 1795930 - DNA, 15 bp, Homo sapiens
atgactgacctttca

SEQ ID NO: 1795931 - DNA, 15 bp, Homo sapiens
tgactgacctttcag

SEQ ID NO: 1795932 - DNA, 15 bp, Homo sapiens
gactgacctttcaga

SEQ ID NO: 1795933 - DNA, 15 bp, Homo sapiens
actgacctttcagag

SEQ ID NO: 1795934 - DNA, 15 bp, Homo sapiens
ctgacctttcagagg

SEQ ID NO: 1795935 - DNA, 15 bp, Homo sapiens
tgacctttcagaggc

SEQ ID NO: 1795936 - DNA, 15 bp, Homo sapiens
gacctttcagaggca

SEQ ID NO: 1795937 - DNA, 15 bp, Homo sapiens
acctttcagaggcac

SEQ ID NO: 1795938 - DNA, 15 bp, Homo sapiens
cctttcagaggcacc

SEQ ID NO: 1795939 - DNA, 15 bp, Homo sapiens
ctttcagaggcaccc

SEQ ID NO: 1795940 - DNA, 15 bp, Homo sapiens
tttcagaggcaccca

SEQ ID NO: 1795941 - DNA, 15 bp, Homo sapiens
ttcagaggcacccag

SEQ ID NO: 1795942 - DNA, 15 bp, Homo sapiens
tcagaggcacccagg

SEQ ID NO: 1795943 - DNA, 15 bp, Homo sapiens
cagaggcacccagga

SEQ ID NO: 1795944 - DNA, 15 bp, Homo sapiens
agaggcacccaggaa

SEQ ID NO: 1795945 - DNA, 15 bp, Homo sapiens
gaggcacccaggaac

SEQ ID NO: 1795946 - DNA, 15 bp, Homo sapiens
aggcacccaggaacc

SEQ ID NO: 1795947 - DNA, 15 bp, Homo sapiens
ggcacccaggaaccc

SEQ ID NO: 1795948 - DNA, 15 bp, Homo sapiens
gcacccaggaacccc

SEQ ID NO: 1795949 - DNA, 15 bp, Homo sapiens
cacccaggaaccccc

SEQ ID NO: 1795950 - DNA, 15 bp, Homo sapiens
acccaggaaccccct

SEQ ID NO: 1795951 - DNA, 15 bp, Homo sapiens
cccaggaaccccctg

SEQ ID NO: 1795952 - DNA, 15 bp, Homo sapiens
ccaggaaccccctgg

SEQ ID NO: 1795953 - DNA, 15 bp, Homo sapiens
caggaaccccctggt

SEQ ID NO: 1795954 - DNA, 15 bp, Homo sapiens
aggaaccccctggtc

SEQ ID NO: 1795955 - DNA, 15 bp, Homo sapiens
ggaaccccctggtca

SEQ ID NO: 1795956 - DNA, 15 bp, Homo sapiens
gaaccccctggtcag

SEQ ID NO: 1795957 - DNA, 15 bp, Homo sapiens
aaccccctggtcaga

SEQ ID NO: 1795958 - DNA, 15 bp, Homo sapiens
accccctggtcagat

SEQ ID NO: 1795959 - DNA, 15 bp, Homo sapiens
ccccctggtcagatt

SEQ ID NO: 1795960 - DNA, 15 bp, Homo sapiens
cccctggtcagattc

SEQ ID NO: 1795961 - DNA, 15 bp, Homo sapiens
ccctggtcagattca

SEQ ID NO: 1795962 - DNA, 15 bp, Homo sapiens
cctggtcagattcaa

SEQ ID NO: 1795963 - DNA, 15 bp, Homo sapiens
ctggtcagattcaag

SEQ ID NO: 1795964 - DNA, 15 bp, Homo sapiens
tggtcagattcaagg

SEQ ID NO: 1795965 - DNA, 15 bp, Homo sapiens
ggtcagattcaagga

SEQ ID NO: 1795966 - DNA, 15 bp, Homo sapiens
gtcagattcaaggat

SEQ ID NO: 1795967 - DNA, 15 bp, Homo sapiens
tcagattcaaggatc

SEQ ID NO: 1795968 - DNA, 15 bp, Homo sapiens
cagattcaaggatcc

SEQ ID NO: 1795969 - DNA, 15 bp, Homo sapiens
agattcaaggatcca

SEQ ID NO: 1795970 - DNA, 15 bp, Homo sapiens
gattcaaggatccat

SEQ ID NO: 1795971 - DNA, 15 bp, Homo sapiens
attcaaggatccata

SEQ ID NO: 1795972 - DNA, 15 bp, Homo sapiens
ttcaaggatccatat

SEQ ID NO: 1795973 - DNA, 15 bp, Homo sapiens
tcaaggatccatatt

SEQ ID NO: 1795974 - DNA, 15 bp, Homo sapiens
caaggatccatattc

SEQ ID NO: 1795975 - DNA, 15 bp, Homo sapiens
aaggatccatattcc

SEQ ID NO: 1795976 - DNA, 15 bp, Homo sapiens
aggatccatattccc

SEQ ID NO: 1795977 - DNA, 15 bp, Homo sapiens
ggatccatattccca

SEQ ID NO: 1795978 - DNA, 15 bp, Homo sapiens
gatccatattcccac

SEQ ID NO: 1795979 - DNA, 15 bp, Homo sapiens
atccatattcccaca

SEQ ID NO: 1795980 - DNA, 15 bp, Homo sapiens
tccatattcccacag

SEQ ID NO: 1795981 - DNA, 15 bp, Homo sapiens
ccatattcccacagc

SEQ ID NO: 1795982 - DNA, 15 bp, Homo sapiens
catattcccacagct

SEQ ID NO: 1795983 - DNA, 15 bp, Homo sapiens
atattcccacagctc

SEQ ID NO: 1795984 - DNA, 15 bp, Homo sapiens
tattcccacagctcc

SEQ ID NO: 1795985 - DNA, 15 bp, Homo sapiens
attcccacagctccc

SEQ ID NO: 1795986 - DNA, 15 bp, Homo sapiens
ttcccacagctcccc

SEQ ID NO: 1795987 - DNA, 15 bp, Homo sapiens
tcccacagctcccca

SEQ ID NO: 1795988 - DNA, 15 bp, Homo sapiens
cccacagctccccag

SEQ ID NO: 1795989 - DNA, 15 bp, Homo sapiens
ccacagctccccagg

SEQ ID NO: 1795990 - DNA, 15 bp, Homo sapiens
cacagctccccaggg

SEQ ID NO: 1795991 - DNA, 15 bp, Homo sapiens
acagctccccaggga

SEQ ID NO: 1795992 - DNA, 15 bp, Homo sapiens
cagctccccagggac

SEQ ID NO: 1795993 - DNA, 15 bp, Homo sapiens
agctccccagggacc

SEQ ID NO: 1795994 - DNA, 15 bp, Homo sapiens
gctccccagggaccc

SEQ ID NO: 1795995 - DNA, 15 bp, Homo sapiens
ctccccagggaccca

SEQ ID NO: 1795996 - DNA, 15 bp, Homo sapiens
tccccagggacccag

SEQ ID NO: 1795997 - DNA, 15 bp, Homo sapiens
ccccagggacccaga

SEQ ID NO: 1795998 - DNA, 15 bp, Homo sapiens
cccagggacccagat

SEQ ID NO: 1795999 - DNA, 15 bp, Homo sapiens
ccagggacccagatg

SEQ ID NO: 1796000 - DNA, 15 bp, Homo sapiens
cagggacccagatgg

SEQ ID NO: 1796001 - DNA, 15 bp, Homo sapiens
agggacccagatggg

SEQ ID NO: 1796002 - DNA, 15 bp, Homo sapiens
gggacccagatggga

SEQ ID NO: 1796003 - DNA, 15 bp, Homo sapiens
ggacccagatgggac

SEQ ID NO: 1796004 - DNA, 15 bp, Homo sapiens
gacccagatgggaca

SEQ ID NO: 1796005 - DNA, 15 bp, Homo sapiens
acccagatgggacat

SEQ ID NO: 1796006 - DNA, 15 bp, Homo sapiens
cccagatgggacatg

SEQ ID NO: 1796007 - DNA, 15 bp, Homo sapiens
ccagatgggacatgg

SEQ ID NO: 1796008 - DNA, 15 bp, Homo sapiens
cagatgggacatggt

SEQ ID NO: 1796009 - DNA, 15 bp, Homo sapiens
agatgggacatggtg

SEQ ID NO: 1796010 - DNA, 15 bp, Homo sapiens
gatgggacatggtgg

SEQ ID NO: 1796011 - DNA, 15 bp, Homo sapiens
atgggacatggtggg

SEQ ID NO: 1796012 - DNA, 15 bp, Homo sapiens
tgggacatggtgggg

SEQ ID NO: 1796013 - DNA, 15 bp, Homo sapiens
gggacatggtggggt

SEQ ID NO: 1796014 - DNA, 15 bp, Homo sapiens
ggacatggtggggtc

SEQ ID NO: 1796015 - DNA, 15 bp, Homo sapiens
gacatggtggggtct

SEQ ID NO: 1796016 - DNA, 15 bp, Homo sapiens
acatggtggggtctg

SEQ ID NO: 1796017 - DNA, 15 bp, Homo sapiens
catggtggggtctgg

SEQ ID NO: 1796018 - DNA, 15 bp, Homo sapiens
atggtggggtctggg

SEQ ID NO: 1796019 - DNA, 15 bp, Homo sapiens
tggtggggtctggga

SEQ ID NO: 1796020 - DNA, 15 bp, Homo sapiens
ggtggggtctgggat

SEQ ID NO: 1796021 - DNA, 15 bp, Homo sapiens
gtggggtctgggatg

SEQ ID NO: 1796022 - DNA, 15 bp, Homo sapiens
tggggtctgggatgg

SEQ ID NO: 1796023 - DNA, 15 bp, Homo sapiens
ggggtctgggatggt

SEQ ID NO: 1796024 - DNA, 15 bp, Homo sapiens
gggtctgggatggtg

SEQ ID NO: 1796025 - DNA, 15 bp, Homo sapiens
ggtctgggatggtga

SEQ ID NO: 1796026 - DNA, 15 bp, Homo sapiens
gtctgggatggtgaa

SEQ ID NO: 1796027 - DNA, 15 bp, Homo sapiens
tctgggatggtgaac

SEQ ID NO: 1796028 - DNA, 15 bp, Homo sapiens
ctgggatggtgaact

SEQ ID NO: 1796029 - DNA, 15 bp, Homo sapiens
tgggatggtgaactt

SEQ ID NO: 1796030 - DNA, 15 bp, Homo sapiens
gggatggtgaacttc

SEQ ID NO: 1796031 - DNA, 15 bp, Homo sapiens
ggatggtgaacttca

SEQ ID NO: 1796032 - DNA, 15 bp, Homo sapiens
gatggtgaacttcag

SEQ ID NO: 1796033 - DNA, 15 bp, Homo sapiens
atggtgaacttcaga

SEQ ID NO: 1796034 - DNA, 15 bp, Homo sapiens
tggtgaacttcagag

SEQ ID NO: 1796035 - DNA, 15 bp, Homo sapiens
ggtgaacttcagagg

SEQ ID NO: 1796036 - DNA, 15 bp, Homo sapiens
gtgaacttcagaggc

SEQ ID NO: 1796037 - DNA, 15 bp, Homo sapiens
tgaacttcagaggcc

SEQ ID NO: 1796038 - DNA, 15 bp, Homo sapiens
gaacttcagaggcct

SEQ ID NO: 1796039 - DNA, 15 bp, Homo sapiens
aacttcagaggcctg

SEQ ID NO: 1796040 - DNA, 15 bp, Homo sapiens
acttcagaggcctga

SEQ ID NO: 1796041 - DNA, 15 bp, Homo sapiens
cttcagaggcctgag

SEQ ID NO: 1796042 - DNA, 15 bp, Homo sapiens
ttcagaggcctgagt

SEQ ID NO: 1796043 - DNA, 15 bp, Homo sapiens
tcagaggcctgagtc

SEQ ID NO: 1796044 - DNA, 15 bp, Homo sapiens
cagaggcctgagtct

SEQ ID NO: 1796045 - DNA, 15 bp, Homo sapiens
agaggcctgagtctg

SEQ ID NO: 1796046 - DNA, 15 bp, Homo sapiens
gaggcctgagtctgg

SEQ ID NO: 1796047 - DNA, 15 bp, Homo sapiens
aggcctgagtctggc

SEQ ID NO: 1796048 - DNA, 15 bp, Homo sapiens
ggcctgagtctggct

SEQ ID NO: 1796049 - DNA, 15 bp, Homo sapiens
gcctgagtctggctt

SEQ ID NO: 1796050 - DNA, 15 bp, Homo sapiens
cctgagtctggcttc

SEQ ID NO: 1796051 - DNA, 15 bp, Homo sapiens
ctgagtctggcttcc

SEQ ID NO: 1796052 - DNA, 15 bp, Homo sapiens
tgagtctggcttcct

SEQ ID NO: 1796053 - DNA, 15 bp, Homo sapiens
gagtctggcttcctg

SEQ ID NO: 1796054 - DNA, 15 bp, Homo sapiens
agtctggcttcctgt

SEQ ID NO: 1796055 - DNA, 15 bp, Homo sapiens
gtctggcttcctgtg

SEQ ID NO: 1796056 - DNA, 15 bp, Homo sapiens
tctggcttcctgtgg

SEQ ID NO: 1796057 - DNA, 15 bp, Homo sapiens
ctggcttcctgtggg

SEQ ID NO: 1796058 - DNA, 15 bp, Homo sapiens
tggcttcctgtgggt

SEQ ID NO: 1796059 - DNA, 15 bp, Homo sapiens
ggcttcctgtgggtg

SEQ ID NO: 1796060 - DNA, 15 bp, Homo sapiens
gcttcctgtgggtgt

SEQ ID NO: 1796061 - DNA, 15 bp, Homo sapiens
cttcctgtgggtgtg

SEQ ID NO: 1796062 - DNA, 15 bp, Homo sapiens
ttcctgtgggtgtga

SEQ ID NO: 1796063 - DNA, 15 bp, Homo sapiens
tcctgtgggtgtgag

SEQ ID NO: 1796064 - DNA, 15 bp, Homo sapiens
cctgtgggtgtgagt

SEQ ID NO: 1796065 - DNA, 15 bp, Homo sapiens
ctgtgggtgtgagtt

SEQ ID NO: 1796066 - DNA, 15 bp, Homo sapiens
tgtgggtgtgagttg

SEQ ID NO: 1796067 - DNA, 15 bp, Homo sapiens
gtgggtgtgagttgg

SEQ ID NO: 1796068 - DNA, 15 bp, Homo sapiens
tgggtgtgagttggg

SEQ ID NO: 1796069 - DNA, 15 bp, Homo sapiens
gggtgtgagttggga

SEQ ID NO: 1796070 - DNA, 15 bp, Homo sapiens
ggtgtgagttgggac

SEQ ID NO: 1796071 - DNA, 15 bp, Homo sapiens
gtgtgagttgggaca

SEQ ID NO: 1796072 - DNA, 15 bp, Homo sapiens
tgtgagttgggacaa

SEQ ID NO: 1796073 - DNA, 15 bp, Homo sapiens
gtgagttgggacaag

SEQ ID NO: 1796074 - DNA, 15 bp, Homo sapiens
tgagttgggacaagc

SEQ ID NO: 1796075 - DNA, 15 bp, Homo sapiens
gagttgggacaagcc

SEQ ID NO: 1796076 - DNA, 15 bp, Homo sapiens
agttgggacaagcca

SEQ ID NO: 1796077 - DNA, 15 bp, Homo sapiens
gttgggacaagccaa

SEQ ID NO: 1796078 - DNA, 15 bp, Homo sapiens
ttgggacaagccaat

SEQ ID NO: 1796079 - DNA, 15 bp, Homo sapiens
tgggacaagccaatg

SEQ ID NO: 1796080 - DNA, 15 bp, Homo sapiens
gggacaagccaatga

SEQ ID NO: 1796081 - DNA, 15 bp, Homo sapiens
ggacaagccaatgag

SEQ ID NO: 1796082 - DNA, 15 bp, Homo sapiens
gacaagccaatgagc

SEQ ID NO: 1796083 - DNA, 15 bp, Homo sapiens
acaagccaatgagcc

SEQ ID NO: 1796084 - DNA, 15 bp, Homo sapiens
caagccaatgagcct

SEQ ID NO: 1796085 - DNA, 15 bp, Homo sapiens
aagccaatgagcctt

SEQ ID NO: 1796086 - DNA, 15 bp, Homo sapiens
agccaatgagccttt

SEQ ID NO: 1796087 - DNA, 15 bp, Homo sapiens
gccaatgagcctttc

SEQ ID NO: 1796088 - DNA, 15 bp, Homo sapiens
ccaatgagcctttct

SEQ ID NO: 1796089 - DNA, 15 bp, Homo sapiens
caatgagcctttctc

SEQ ID NO: 1796090 - DNA, 15 bp, Homo sapiens
aatgagcctttctct

SEQ ID NO: 1796091 - DNA, 15 bp, Homo sapiens
atgagcctttctctg

SEQ ID NO: 1796092 - DNA, 15 bp, Homo sapiens
tgagcctttctctgc

SEQ ID NO: 1796093 - DNA, 15 bp, Homo sapiens
gagcctttctctgct

SEQ ID NO: 1796094 - DNA, 15 bp, Homo sapiens
agcctttctctgctc

SEQ ID NO: 1796095 - DNA, 15 bp, Homo sapiens
gcctttctctgctct

SEQ ID NO: 1796096 - DNA, 15 bp, Homo sapiens
cctttctctgctctg

SEQ ID NO: 1796097 - DNA, 15 bp, Homo sapiens
ctttctctgctctgc

SEQ ID NO: 1796098 - DNA, 15 bp, Homo sapiens
tttctctgctctgcc

SEQ ID NO: 1796099 - DNA, 15 bp, Homo sapiens
ttctctgctctgcca

SEQ ID NO: 1796100 - DNA, 15 bp, Homo sapiens
tctctgctctgccac

SEQ ID NO: 1796101 - DNA, 15 bp, Homo sapiens
ctctgctctgccact

SEQ ID NO: 1796102 - DNA, 15 bp, Homo sapiens
tctgctctgccactt

SEQ ID NO: 1796103 - DNA, 15 bp, Homo sapiens
ctgctctgccactta

SEQ ID NO: 1796104 - DNA, 15 bp, Homo sapiens
tgctctgccacttac

SEQ ID NO: 1796105 - DNA, 15 bp, Homo sapiens
gctctgccacttacc

SEQ ID NO: 1796106 - DNA, 15 bp, Homo sapiens
ctctgccacttacca

SEQ ID NO: 1796107 - DNA, 15 bp, Homo sapiens
tctgccacttaccag

SEQ ID NO: 1796108 - DNA, 15 bp, Homo sapiens
ctgccacttaccagc

SEQ ID NO: 1796109 - DNA, 15 bp, Homo sapiens
tgccacttaccagct

SEQ ID NO: 1796110 - DNA, 15 bp, Homo sapiens
gccacttaccagctg

SEQ ID NO: 1796111 - DNA, 15 bp, Homo sapiens
ccacttaccagctgt

SEQ ID NO: 1796112 - DNA, 15 bp, Homo sapiens
cacttaccagctgtg

SEQ ID NO: 1796113 - DNA, 15 bp, Homo sapiens
acttaccagctgtgt

SEQ ID NO: 1796114 - DNA, 15 bp, Homo sapiens
cttaccagctgtgtg

SEQ ID NO: 1796115 - DNA, 15 bp, Homo sapiens
ttaccagctgtgtga

SEQ ID NO: 1796116 - DNA, 15 bp, Homo sapiens
taccagctgtgtgac

SEQ ID NO: 1796117 - DNA, 15 bp, Homo sapiens
accagctgtgtgacc

SEQ ID NO: 1796118 - DNA, 15 bp, Homo sapiens
ccagctgtgtgacct

SEQ ID NO: 1796119 - DNA, 15 bp, Homo sapiens
cagctgtgtgacctt

SEQ ID NO: 1796120 - DNA, 15 bp, Homo sapiens
tgtgtgaccttgagc

SEQ ID NO: 1796121 - DNA, 15 bp, Homo sapiens
gtgtgaccttgagca

SEQ ID NO: 1796122 - DNA, 15 bp, Homo sapiens
gaccttgagcaagtt

SEQ ID NO: 1796123 - DNA, 15 bp, Homo sapiens
accttgagcaagttg

SEQ ID NO: 1796124 - DNA, 15 bp, Homo sapiens
ccttgagcaagttgc

SEQ ID NO: 1796125 - DNA, 15 bp, Homo sapiens
cttgagcaagttgct

SEQ ID NO: 1796126 - DNA, 15 bp, Homo sapiens
ttgagcaagttgctt

SEQ ID NO: 1796127 - DNA, 15 bp, Homo sapiens
tgagcaagttgctta

SEQ ID NO: 1796128 - DNA, 15 bp, Homo sapiens
gagcaagttgcttaa

SEQ ID NO: 1796129 - DNA, 15 bp, Homo sapiens
agcaagttgcttaac

SEQ ID NO: 1796130 - DNA, 15 bp, Homo sapiens
gcaagttgcttaact

SEQ ID NO: 1796131 - DNA, 15 bp, Homo sapiens
caagttgcttaactg

SEQ ID NO: 1796132 - DNA, 15 bp, Homo sapiens
aagttgcttaactgc

SEQ ID NO: 1796133 - DNA, 15 bp, Homo sapiens
agttgcttaactgcc

SEQ ID NO: 1796134 - DNA, 15 bp, Homo sapiens
gttgcttaactgccc

SEQ ID NO: 1796135 - DNA, 15 bp, Homo sapiens
ttgcttaactgccct

SEQ ID NO: 1796136 - DNA, 15 bp, Homo sapiens
tgcttaactgccctg

SEQ ID NO: 1796137 - DNA, 15 bp, Homo sapiens
gcttaactgccctga

SEQ ID NO: 1796138 - DNA, 15 bp, Homo sapiens
cttaactgccctgag

SEQ ID NO: 1796139 - DNA, 15 bp, Homo sapiens
ttaactgccctgagc

SEQ ID NO: 1796140 - DNA, 15 bp, Homo sapiens
taactgccctgagcc

SEQ ID NO: 1796141 - DNA, 15 bp, Homo sapiens
aactgccctgagcct

SEQ ID NO: 1796142 - DNA, 15 bp, Homo sapiens
actgccctgagcctc

SEQ ID NO: 1796143 - DNA, 15 bp, Homo sapiens
ctgccctgagcctca

SEQ ID NO: 1796144 - DNA, 15 bp, Homo sapiens
tgccctgagcctcat

SEQ ID NO: 1796145 - DNA, 15 bp, Homo sapiens
gccctgagcctcatc

SEQ ID NO: 1796146 - DNA, 15 bp, Homo sapiens
ccctgagcctcatct

SEQ ID NO: 1796147 - DNA, 15 bp, Homo sapiens
cctgagcctcatctg

SEQ ID NO: 1796148 - DNA, 15 bp, Homo sapiens
ctgagcctcatctgt

SEQ ID NO: 1796149 - DNA, 15 bp, Homo sapiens
tgagcctcatctgta

SEQ ID NO: 1796150 - DNA, 15 bp, Homo sapiens
gagcctcatctgtaa

SEQ ID NO: 1796151 - DNA, 15 bp, Homo sapiens
agcctcatctgtaaa

SEQ ID NO: 1796152 - DNA, 15 bp, Homo sapiens
gcctcatctgtaaaa

SEQ ID NO: 1796153 - DNA, 15 bp, Homo sapiens
cctcatctgtaaaac

SEQ ID NO: 1796154 - DNA, 15 bp, Homo sapiens
ctcatctgtaaaaca

SEQ ID NO: 1796155 - DNA, 15 bp, Homo sapiens
tcatctgtaaaacaa

SEQ ID NO: 1796156 - DNA, 15 bp, Homo sapiens
catctgtaaaacaag

SEQ ID NO: 1796157 - DNA, 15 bp, Homo sapiens
atctgtaaaacaagg

SEQ ID NO: 1796158 - DNA, 15 bp, Homo sapiens
tctgtaaaacaagga

SEQ ID NO: 1796159 - DNA, 15 bp, Homo sapiens
ctgtaaaacaaggat

SEQ ID NO: 1796160 - DNA, 15 bp, Homo sapiens
tgtaaaacaaggatt

SEQ ID NO: 1796161 - DNA, 15 bp, Homo sapiens
gtaaaacaaggattc

SEQ ID NO: 1796162 - DNA, 15 bp, Homo sapiens
taaaacaaggattct

SEQ ID NO: 1796163 - DNA, 15 bp, Homo sapiens
aaaacaaggattctg

SEQ ID NO: 1796164 - DNA, 15 bp, Homo sapiens
aaacaaggattctga

SEQ ID NO: 1796165 - DNA, 15 bp, Homo sapiens
aacaaggattctgag

SEQ ID NO: 1796166 - DNA, 15 bp, Homo sapiens
acaaggattctgagc

SEQ ID NO: 1796167 - DNA, 15 bp, Homo sapiens
caaggattctgagca

SEQ ID NO: 1796168 - DNA, 15 bp, Homo sapiens
aaggattctgagcat

SEQ ID NO: 1796169 - DNA, 15 bp, Homo sapiens
aggattctgagcata

SEQ ID NO: 1796170 - DNA, 15 bp, Homo sapiens
ggattctgagcatat

SEQ ID NO: 1796171 - DNA, 15 bp, Homo sapiens
gattctgagcatatc

SEQ ID NO: 1796172 - DNA, 15 bp, Homo sapiens
attctgagcatatct

SEQ ID NO: 1796173 - DNA, 15 bp, Homo sapiens
ttctgagcatatcta

SEQ ID NO: 1796174 - DNA, 15 bp, Homo sapiens
tctgagcatatctat

SEQ ID NO: 1796175 - DNA, 15 bp, Homo sapiens
ctgagcatatctatg

SEQ ID NO: 1796176 - DNA, 15 bp, Homo sapiens
tgagcatatctatgt

SEQ ID NO: 1796177 - DNA, 15 bp, Homo sapiens
gagcatatctatgtt

SEQ ID NO: 1796178 - DNA, 15 bp, Homo sapiens
agcatatctatgtta

SEQ ID NO: 1796179 - DNA, 15 bp, Homo sapiens
gcatatctatgttat

SEQ ID NO: 1796180 - DNA, 15 bp, Homo sapiens
catatctatgttata

SEQ ID NO: 1796181 - DNA, 15 bp, Homo sapiens
atatctatgttatag

SEQ ID NO: 1796182 - DNA, 15 bp, Homo sapiens
tatctatgttataga

SEQ ID NO: 1796183 - DNA, 15 bp, Homo sapiens
atctatgttatagat

SEQ ID NO: 1796184 - DNA, 15 bp, Homo sapiens
tctatgttatagatt

SEQ ID NO: 1796185 - DNA, 15 bp, Homo sapiens
ctatgttatagattt

SEQ ID NO: 1796186 - DNA, 15 bp, Homo sapiens
tatgttatagatttg

SEQ ID NO: 1796187 - DNA, 15 bp, Homo sapiens
atgttatagatttgc

SEQ ID NO: 1796188 - DNA, 15 bp, Homo sapiens
tgttatagatttgca

SEQ ID NO: 1796189 - DNA, 15 bp, Homo sapiens
gttatagatttgcag

SEQ ID NO: 1796190 - DNA, 15 bp, Homo sapiens
ttatagatttgcagt

SEQ ID NO: 1796191 - DNA, 15 bp, Homo sapiens
tatagatttgcagtg

SEQ ID NO: 1796192 - DNA, 15 bp, Homo sapiens
atagatttgcagtga

SEQ ID NO: 1796193 - DNA, 15 bp, Homo sapiens
tagatttgcagtgag

SEQ ID NO: 1796194 - DNA, 15 bp, Homo sapiens
agatttgcagtgagg

SEQ ID NO: 1796195 - DNA, 15 bp, Homo sapiens
gatttgcagtgagga

SEQ ID NO: 1796196 - DNA, 15 bp, Homo sapiens
atttgcagtgaggat

SEQ ID NO: 1796197 - DNA, 15 bp, Homo sapiens
tttgcagtgaggatt

SEQ ID NO: 1796198 - DNA, 15 bp, Homo sapiens
ttgcagtgaggattg

SEQ ID NO: 1796199 - DNA, 15 bp, Homo sapiens
tgcagtgaggattga

SEQ ID NO: 1796200 - DNA, 15 bp, Homo sapiens
gcagtgaggattgaa

SEQ ID NO: 1796201 - DNA, 15 bp, Homo sapiens
cagtgaggattgaat

SEQ ID NO: 1796202 - DNA, 15 bp, Homo sapiens
agtgaggattgaata

SEQ ID NO: 1796203 - DNA, 15 bp, Homo sapiens
gtgaggattgaataa

SEQ ID NO: 1796204 - DNA, 15 bp, Homo sapiens
tgaggattgaataag

SEQ ID NO: 1796205 - DNA, 15 bp, Homo sapiens
gaggattgaataagg

SEQ ID NO: 1796206 - DNA, 15 bp, Homo sapiens
aggattgaataaggt

SEQ ID NO: 1796207 - DNA, 15 bp, Homo sapiens
ggattgaataaggtg

SEQ ID NO: 1796208 - DNA, 15 bp, Homo sapiens
gattgaataaggtga

SEQ ID NO: 1796209 - DNA, 15 bp, Homo sapiens
attgaataaggtgat

SEQ ID NO: 1796210 - DNA, 15 bp, Homo sapiens
ttgaataaggtgatg

SEQ ID NO: 1796211 - DNA, 15 bp, Homo sapiens
tgaataaggtgatgg

SEQ ID NO: 1796212 - DNA, 15 bp, Homo sapiens
gaataaggtgatgga

SEQ ID NO: 1796213 - DNA, 15 bp, Homo sapiens
aataaggtgatggat

SEQ ID NO: 1796214 - DNA, 15 bp, Homo sapiens
ataaggtgatggatg

SEQ ID NO: 1796215 - DNA, 15 bp, Homo sapiens
taaggtgatggatgt

SEQ ID NO: 1796216 - DNA, 15 bp, Homo sapiens
aaggtgatggatgtt

SEQ ID NO: 1796217 - DNA, 15 bp, Homo sapiens
aggtgatggatgtta

SEQ ID NO: 1796218 - DNA, 15 bp, Homo sapiens
ggtgatggatgttaa

SEQ ID NO: 1796219 - DNA, 15 bp, Homo sapiens
gtgatggatgttaag

SEQ ID NO: 1796220 - DNA, 15 bp, Homo sapiens
tgatggatgttaagt

SEQ ID NO: 1796221 - DNA, 15 bp, Homo sapiens
gatggatgttaagtg

SEQ ID NO: 1796222 - DNA, 15 bp, Homo sapiens
atggatgttaagtga

SEQ ID NO: 1796223 - DNA, 15 bp, Homo sapiens
tggatgttaagtgat

SEQ ID NO: 1796224 - DNA, 15 bp, Homo sapiens
ggatgttaagtgatt

SEQ ID NO: 1796225 - DNA, 15 bp, Homo sapiens
gatgttaagtgatta

SEQ ID NO: 1796226 - DNA, 15 bp, Homo sapiens
atgttaagtgattaa

SEQ ID NO: 1796227 - DNA, 15 bp, Homo sapiens
tgttaagtgattaac

SEQ ID NO: 1796228 - DNA, 15 bp, Homo sapiens
gttaagtgattaaca

SEQ ID NO: 1796229 - DNA, 15 bp, Homo sapiens
ttaagtgattaacac

SEQ ID NO: 1796230 - DNA, 15 bp, Homo sapiens
taagtgattaacaca

SEQ ID NO: 1796231 - DNA, 15 bp, Homo sapiens
aagtgattaacacaa

SEQ ID NO: 1796232 - DNA, 15 bp, Homo sapiens
agtgattaacacaat

SEQ ID NO: 1796233 - DNA, 15 bp, Homo sapiens
gtgattaacacaatg

SEQ ID NO: 1796234 - DNA, 15 bp, Homo sapiens
tgattaacacaatgt

SEQ ID NO: 1796235 - DNA, 15 bp, Homo sapiens
gattaacacaatgtc

SEQ ID NO: 1796236 - DNA, 15 bp, Homo sapiens
attaacacaatgtct

SEQ ID NO: 1796237 - DNA, 15 bp, Homo sapiens
ttaacacaatgtctt

SEQ ID NO: 1796238 - DNA, 15 bp, Homo sapiens
taacacaatgtcttg

SEQ ID NO: 1796239 - DNA, 15 bp, Homo sapiens
aacacaatgtcttgc

SEQ ID NO: 1796240 - DNA, 15 bp, Homo sapiens
acacaatgtcttgca

SEQ ID NO: 1796241 - DNA, 15 bp, Homo sapiens
cacaatgtcttgcac

SEQ ID NO: 1796242 - DNA, 15 bp, Homo sapiens
acaatgtcttgcaca

SEQ ID NO: 1796243 - DNA, 15 bp, Homo sapiens
caatgtcttgcacat

SEQ ID NO: 1796244 - DNA, 15 bp, Homo sapiens
aatgtcttgcacata

SEQ ID NO: 1796245 - DNA, 15 bp, Homo sapiens
atgtcttgcacatag

SEQ ID NO: 1796246 - DNA, 15 bp, Homo sapiens
tgtcttgcacatagt

SEQ ID NO: 1796247 - DNA, 15 bp, Homo sapiens
gtcttgcacatagta

SEQ ID NO: 1796248 - DNA, 15 bp, Homo sapiens
tcttgcacatagtaa

SEQ ID NO: 1796249 - DNA, 15 bp, Homo sapiens
cttgcacatagtaaa

SEQ ID NO: 1796250 - DNA, 15 bp, Homo sapiens
ttgcacatagtaaac

SEQ ID NO: 1796251 - DNA, 15 bp, Homo sapiens
tgcacatagtaaaca

SEQ ID NO: 1796252 - DNA, 15 bp, Homo sapiens
gcacatagtaaacat

SEQ ID NO: 1796253 - DNA, 15 bp, Homo sapiens
cacatagtaaacatc

SEQ ID NO: 1796254 - DNA, 15 bp, Homo sapiens
acatagtaaacatct

SEQ ID NO: 1796255 - DNA, 15 bp, Homo sapiens
catagtaaacatctg

SEQ ID NO: 1796256 - DNA, 15 bp, Homo sapiens
atagtaaacatctga

SEQ ID NO: 1796257 - DNA, 15 bp, Homo sapiens
tagtaaacatctgat

SEQ ID NO: 1796258 - DNA, 15 bp, Homo sapiens
agtaaacatctgata

SEQ ID NO: 1796259 - DNA, 15 bp, Homo sapiens
gtaaacatctgataa

SEQ ID NO: 1796260 - DNA, 15 bp, Homo sapiens
taaacatctgataaa

SEQ ID NO: 1796261 - DNA, 15 bp, Homo sapiens
aaacatctgataaat

SEQ ID NO: 1796262 - DNA, 15 bp, Homo sapiens
aacatctgataaatt

SEQ ID NO: 1796263 - DNA, 15 bp, Homo sapiens
acatctgataaatta

SEQ ID NO: 1796264 - DNA, 15 bp, Homo sapiens
catctgataaattat

SEQ ID NO: 1796265 - DNA, 15 bp, Homo sapiens
atctgataaattatt

SEQ ID NO: 1796266 - DNA, 15 bp, Homo sapiens
tctgataaattatta

SEQ ID NO: 1796267 - DNA, 15 bp, Homo sapiens
ctgataaattattag

SEQ ID NO: 1796268 - DNA, 15 bp, Homo sapiens
tgataaattattagt

SEQ ID NO: 1796269 - DNA, 15 bp, Homo sapiens
gataaattattagta

SEQ ID NO: 1796270 - DNA, 15 bp, Homo sapiens
ataaattattagtaa

SEQ ID NO: 1796271 - DNA, 15 bp, Homo sapiens
taaattattagtaaa

SEQ ID NO: 1796272 - DNA, 15 bp, Homo sapiens
aaattattagtaaat

SEQ ID NO: 1796273 - DNA, 15 bp, Homo sapiens
aattattagtaaatt

SEQ ID NO: 1796274 - DNA, 15 bp, Homo sapiens
attattagtaaatta

SEQ ID NO: 1796275 - DNA, 15 bp, Homo sapiens
ttattagtaaattac

SEQ ID NO: 1796276 - DNA, 15 bp, Homo sapiens
tattagtaaattact

SEQ ID NO: 1796277 - DNA, 15 bp, Homo sapiens
attagtaaattacta

SEQ ID NO: 1796278 - DNA, 15 bp, Homo sapiens
ttagtaaattactag

SEQ ID NO: 1796279 - DNA, 15 bp, Homo sapiens
tagtaaattactagt

SEQ ID NO: 1796280 - DNA, 15 bp, Homo sapiens
agtaaattactagta

SEQ ID NO: 1796281 - DNA, 15 bp, Homo sapiens
gtaaattactagtat

SEQ ID NO: 1796282 - DNA, 15 bp, Homo sapiens
taaattactagtatc

SEQ ID NO: 1796283 - DNA, 15 bp, Homo sapiens
aaattactagtatca

SEQ ID NO: 1796284 - DNA, 15 bp, Homo sapiens
aattactagtatcaa

SEQ ID NO: 1796285 - DNA, 15 bp, Homo sapiens
attactagtatcaag

SEQ ID NO: 1796286 - DNA, 15 bp, Homo sapiens
ttactagtatcaagt

SEQ ID NO: 1796287 - DNA, 15 bp, Homo sapiens
tactagtatcaagtg

SEQ ID NO: 1796288 - DNA, 15 bp, Homo sapiens
actagtatcaagtga

SEQ ID NO: 1796289 - DNA, 15 bp, Homo sapiens
ctagtatcaagtgaa

SEQ ID NO: 1796290 - DNA, 15 bp, Homo sapiens
tagtatcaagtgaag

SEQ ID NO: 1796291 - DNA, 15 bp, Homo sapiens
agtatcaagtgaaga

SEQ ID NO: 1796292 - DNA, 15 bp, Homo sapiens
gtatcaagtgaagac

SEQ ID NO: 1796293 - DNA, 15 bp, Homo sapiens
tatcaagtgaagaca

SEQ ID NO: 1796294 - DNA, 15 bp, Homo sapiens
atcaagtgaagacat

SEQ ID NO: 1796295 - DNA, 15 bp, Homo sapiens
tcaagtgaagacatt

SEQ ID NO: 1796296 - DNA, 15 bp, Homo sapiens
caagtgaagacattt

SEQ ID NO: 1796297 - DNA, 15 bp, Homo sapiens
aagtgaagacatttt

SEQ ID NO: 1796298 - DNA, 15 bp, Homo sapiens
agtgaagacattttg

SEQ ID NO: 1796299 - DNA, 15 bp, Homo sapiens
gtgaagacattttgc

SEQ ID NO: 1796300 - DNA, 15 bp, Homo sapiens
tgaagacattttgct

SEQ ID NO: 1796301 - DNA, 15 bp, Homo sapiens
gaagacattttgctt

SEQ ID NO: 1796302 - DNA, 15 bp, Homo sapiens
aagacattttgcttc

SEQ ID NO: 1796303 - DNA, 15 bp, Homo sapiens
agacattttgcttcg

SEQ ID NO: 1796304 - DNA, 15 bp, Homo sapiens
gacattttgcttcgt

SEQ ID NO: 1796305 - DNA, 15 bp, Homo sapiens
acattttgcttcgtg

SEQ ID NO: 1796306 - DNA, 15 bp, Homo sapiens
cattttgcttcgtgt

SEQ ID NO: 1796307 - DNA, 15 bp, Homo sapiens
attttgcttcgtgtt

SEQ ID NO: 1796308 - DNA, 15 bp, Homo sapiens
ttttgcttcgtgttt

SEQ ID NO: 1796309 - DNA, 15 bp, Homo sapiens
tttgcttcgtgtttt

SEQ ID NO: 1796310 - DNA, 15 bp, Homo sapiens
ttgcttcgtgtttta

SEQ ID NO: 1796311 - DNA, 15 bp, Homo sapiens
tgcttcgtgttttat

SEQ ID NO: 1796312 - DNA, 15 bp, Homo sapiens
gcttcgtgttttatt

SEQ ID NO: 1796313 - DNA, 15 bp, Homo sapiens
cttcgtgttttattt

SEQ ID NO: 1796314 - DNA, 15 bp, Homo sapiens
ttcgtgttttatttt

SEQ ID NO: 1796315 - DNA, 15 bp, Homo sapiens
tcgtgttttattttt

SEQ ID NO: 1796316 - DNA, 15 bp, Homo sapiens
cgtgttttattttta

SEQ ID NO: 1796317 - DNA, 15 bp, Homo sapiens
gtgttttatttttat

SEQ ID NO: 1796318 - DNA, 15 bp, Homo sapiens
tgttttatttttatt

SEQ ID NO: 1796319 - DNA, 15 bp, Homo sapiens
gttttatttttattt

SEQ ID NO: 1796320 - DNA, 15 bp, Homo sapiens
ttttatttttatttc

SEQ ID NO: 1796321 - DNA, 15 bp, Homo sapiens
tttatttttatttct

SEQ ID NO: 1796322 - DNA, 15 bp, Homo sapiens
ttatttttatttctg

SEQ ID NO: 1796323 - DNA, 15 bp, Homo sapiens
tatttttatttctgt

SEQ ID NO: 1796324 - DNA, 15 bp, Homo sapiens
atttttatttctgta

SEQ ID NO: 1796325 - DNA, 15 bp, Homo sapiens
tttttatttctgtac

SEQ ID NO: 1796326 - DNA, 15 bp, Homo sapiens
ttttatttctgtacc

SEQ ID NO: 1796327 - DNA, 15 bp, Homo sapiens
tttatttctgtacca

SEQ ID NO: 1796328 - DNA, 15 bp, Homo sapiens
ttatttctgtaccac

SEQ ID NO: 1796329 - DNA, 15 bp, Homo sapiens
tatttctgtaccact

SEQ ID NO: 1796330 - DNA, 15 bp, Homo sapiens
atttctgtaccacta

SEQ ID NO: 1796331 - DNA, 15 bp, Homo sapiens
tttctgtaccactat

SEQ ID NO: 1796332 - DNA, 15 bp, Homo sapiens
ttctgtaccactatt

SEQ ID NO: 1796333 - DNA, 15 bp, Homo sapiens
tctgtaccactattg

SEQ ID NO: 1796334 - DNA, 15 bp, Homo sapiens
ctgtaccactattgc

SEQ ID NO: 1796335 - DNA, 15 bp, Homo sapiens
tgtaccactattgca

SEQ ID NO: 1796336 - DNA, 15 bp, Homo sapiens
gtaccactattgcac

SEQ ID NO: 1796337 - DNA, 15 bp, Homo sapiens
taccactattgcaca

SEQ ID NO: 1796338 - DNA, 15 bp, Homo sapiens
accactattgcacat

SEQ ID NO: 1796339 - DNA, 15 bp, Homo sapiens
ccactattgcacatg

SEQ ID NO: 1796340 - DNA, 15 bp, Homo sapiens
cactattgcacatga

SEQ ID NO: 1796341 - DNA, 15 bp, Homo sapiens
actattgcacatgat

SEQ ID NO: 1796342 - DNA, 15 bp, Homo sapiens
ctattgcacatgatt

SEQ ID NO: 1796343 - DNA, 15 bp, Homo sapiens
tattgcacatgattt

SEQ ID NO: 1796344 - DNA, 15 bp, Homo sapiens
attgcacatgatttt

SEQ ID NO: 1796345 - DNA, 15 bp, Homo sapiens
ttgcacatgattttc

SEQ ID NO: 1796346 - DNA, 15 bp, Homo sapiens
tgcacatgattttct

SEQ ID NO: 1796347 - DNA, 15 bp, Homo sapiens
gcacatgattttctt

SEQ ID NO: 1796348 - DNA, 15 bp, Homo sapiens
cacatgattttcttt

SEQ ID NO: 1796349 - DNA, 15 bp, Homo sapiens
acatgattttctttt

SEQ ID NO: 1796350 - DNA, 15 bp, Homo sapiens
catgattttcttttt

SEQ ID NO: 1796351 - DNA, 15 bp, Homo sapiens
atgattttctttttt

SEQ ID NO: 1796352 - DNA, 15 bp, Homo sapiens
tgattttcttttttc

SEQ ID NO: 1796353 - DNA, 15 bp, Homo sapiens
ttttcttttttcctt

SEQ ID NO: 1796354 - DNA, 15 bp, Homo sapiens
tttcttttttcctta

SEQ ID NO: 1796355 - DNA, 15 bp, Homo sapiens
ttcttttttccttac

SEQ ID NO: 1796356 - DNA, 15 bp, Homo sapiens
tcttttttccttact

SEQ ID NO: 1796357 - DNA, 15 bp, Homo sapiens
cttttttccttactt

SEQ ID NO: 1796358 - DNA, 15 bp, Homo sapiens
ttttttccttacttt

SEQ ID NO: 1796359 - DNA, 15 bp, Homo sapiens
tttttccttactttt

SEQ ID NO: 1796360 - DNA, 15 bp, Homo sapiens
ttttccttacttttt

SEQ ID NO: 1796361 - DNA, 15 bp, Homo sapiens
tttccttactttttt

SEQ ID NO: 1796362 - DNA, 15 bp, Homo sapiens
ttccttacttttttt

SEQ ID NO: 1796363 - DNA, 15 bp, Homo sapiens
tccttactttttttt

SEQ ID NO: 1796364 - DNA, 15 bp, Homo sapiens
ccttacttttttttt

SEQ ID NO: 1796365 - DNA, 15 bp, Homo sapiens
cttactttttttttt

SEQ ID NO: 1796366 - DNA, 15 bp, Homo sapiens
ttacttttttttttg

SEQ ID NO: 1796367 - DNA, 15 bp, Homo sapiens
gagatggagtctcat

SEQ ID NO: 1796368 - DNA, 15 bp, Homo sapiens
agatggagtctcatt

SEQ ID NO: 1796369 - DNA, 15 bp, Homo sapiens
gatggagtctcattc

SEQ ID NO: 1796370 - DNA, 15 bp, Homo sapiens
atggagtctcattct

SEQ ID NO: 1796371 - DNA, 15 bp, Homo sapiens
tggagtctcattctg

SEQ ID NO: 1796372 - DNA, 15 bp, Homo sapiens
ggagtctcattctgt

SEQ ID NO: 1796373 - DNA, 15 bp, Homo sapiens
gagtctcattctgtc

SEQ ID NO: 1796374 - DNA, 15 bp, Homo sapiens
agtctcattctgtca

SEQ ID NO: 1796375 - DNA, 15 bp, Homo sapiens
tcacccaggctggga

SEQ ID NO: 1796376 - DNA, 15 bp, Homo sapiens
cacccaggctgggat

SEQ ID NO: 1796377 - DNA, 15 bp, Homo sapiens
acccaggctgggatg

SEQ ID NO: 1796378 - DNA, 15 bp, Homo sapiens
cccaggctgggatgc

SEQ ID NO: 1796379 - DNA, 15 bp, Homo sapiens
ccaggctgggatgca

SEQ ID NO: 1796380 - DNA, 15 bp, Homo sapiens
caggctgggatgcag

SEQ ID NO: 1796381 - DNA, 15 bp, Homo sapiens
aggctgggatgcagt

SEQ ID NO: 1796382 - DNA, 15 bp, Homo sapiens
ggctgggatgcagtg

SEQ ID NO: 1796383 - DNA, 15 bp, Homo sapiens
gctgggatgcagtgg

SEQ ID NO: 1796384 - DNA, 15 bp, Homo sapiens
ctgggatgcagtggt

SEQ ID NO: 1796385 - DNA, 15 bp, Homo sapiens
tgggatgcagtggtg

SEQ ID NO: 1796386 - DNA, 15 bp, Homo sapiens
gggatgcagtggtgc

SEQ ID NO: 1796387 - DNA, 15 bp, Homo sapiens
ggatgcagtggtgca

SEQ ID NO: 1796388 - DNA, 15 bp, Homo sapiens
gatgcagtggtgcaa

SEQ ID NO: 1796389 - DNA, 15 bp, Homo sapiens
atgcagtggtgcaat

SEQ ID NO: 1796390 - DNA, 15 bp, Homo sapiens
cagtggtgcaatctt

SEQ ID NO: 1796391 - DNA, 15 bp, Homo sapiens
agtggtgcaatcttg

SEQ ID NO: 1796392 - DNA, 15 bp, Homo sapiens
gtggtgcaatcttgg

SEQ ID NO: 1796393 - DNA, 15 bp, Homo sapiens
tggtgcaatcttggc

SEQ ID NO: 1796394 - DNA, 15 bp, Homo sapiens
ggtgcaatcttggct

SEQ ID NO: 1796395 - DNA, 15 bp, Homo sapiens
gtgcaatcttggctg

SEQ ID NO: 1796396 - DNA, 15 bp, Homo sapiens
tgcaatcttggctga

SEQ ID NO: 1796397 - DNA, 15 bp, Homo sapiens
gcaatcttggctgac

SEQ ID NO: 1796398 - DNA, 15 bp, Homo sapiens
caatcttggctgact

SEQ ID NO: 1796399 - DNA, 15 bp, Homo sapiens
aatcttggctgactg

SEQ ID NO: 1796400 - DNA, 15 bp, Homo sapiens
atcttggctgactgc

SEQ ID NO: 1796401 - DNA, 15 bp, Homo sapiens
tcttggctgactgca

SEQ ID NO: 1796402 - DNA, 15 bp, Homo sapiens
cttggctgactgcaa

SEQ ID NO: 1796403 - DNA, 15 bp, Homo sapiens
ttggctgactgcaat

SEQ ID NO: 1796404 - DNA, 15 bp, Homo sapiens
tggctgactgcaatc

SEQ ID NO: 1796405 - DNA, 15 bp, Homo sapiens
ggctgactgcaatct

SEQ ID NO: 1796406 - DNA, 15 bp, Homo sapiens
gctgactgcaatctc

SEQ ID NO: 1796407 - DNA, 15 bp, Homo sapiens
ctgactgcaatctct

SEQ ID NO: 1796408 - DNA, 15 bp, Homo sapiens
tgactgcaatctctg

SEQ ID NO: 1796409 - DNA, 15 bp, Homo sapiens
gactgcaatctctgc

SEQ ID NO: 1796410 - DNA, 15 bp, Homo sapiens
actgcaatctctgcc

SEQ ID NO: 1796411 - DNA, 15 bp, Homo sapiens
ctgcaatctctgcct

SEQ ID NO: 1796412 - DNA, 15 bp, Homo sapiens
tgcaatctctgcctc

SEQ ID NO: 1796413 - DNA, 15 bp, Homo sapiens
gcaatctctgcctcc

SEQ ID NO: 1796414 - DNA, 15 bp, Homo sapiens
caatctctgcctccc

SEQ ID NO: 1796415 - DNA, 15 bp, Homo sapiens
aatctctgcctccca

SEQ ID NO: 1796416 - DNA, 15 bp, Homo sapiens
atctctgcctcccaa

SEQ ID NO: 1796417 - DNA, 15 bp, Homo sapiens
tctctgcctcccaaa

SEQ ID NO: 1796418 - DNA, 15 bp, Homo sapiens
ctctgcctcccaaat

SEQ ID NO: 1796419 - DNA, 15 bp, Homo sapiens
tctgcctcccaaatt

SEQ ID NO: 1796420 - DNA, 15 bp, Homo sapiens
ctgcctcccaaattc

SEQ ID NO: 1796421 - DNA, 15 bp, Homo sapiens
tgcctcccaaattca

SEQ ID NO: 1796422 - DNA, 15 bp, Homo sapiens
gcctcccaaattcaa

SEQ ID NO: 1796423 - DNA, 15 bp, Homo sapiens
cctcccaaattcaag

SEQ ID NO: 1796424 - DNA, 15 bp, Homo sapiens
ctcccaaattcaagt

SEQ ID NO: 1796425 - DNA, 15 bp, Homo sapiens
tcccaaattcaagtg

SEQ ID NO: 1796426 - DNA, 15 bp, Homo sapiens
cccaaattcaagtga

SEQ ID NO: 1796427 - DNA, 15 bp, Homo sapiens
ccaaattcaagtgat

SEQ ID NO: 1796428 - DNA, 15 bp, Homo sapiens
caaattcaagtgatt

SEQ ID NO: 1796429 - DNA, 15 bp, Homo sapiens
aaattcaagtgattc

SEQ ID NO: 1796430 - DNA, 15 bp, Homo sapiens
aattcaagtgattct

SEQ ID NO: 1796431 - DNA, 15 bp, Homo sapiens
gggattacaggcaac

SEQ ID NO: 1796432 - DNA, 15 bp, Homo sapiens
ggattacaggcaacc

SEQ ID NO: 1796433 - DNA, 15 bp, Homo sapiens
gattacaggcaacca

SEQ ID NO: 1796434 - DNA, 15 bp, Homo sapiens
attacaggcaaccac

SEQ ID NO: 1796435 - DNA, 15 bp, Homo sapiens
ttacaggcaaccacc

SEQ ID NO: 1796436 - DNA, 15 bp, Homo sapiens
tacaggcaaccacca

SEQ ID NO: 1796437 - DNA, 15 bp, Homo sapiens
acaggcaaccaccac

SEQ ID NO: 1796438 - DNA, 15 bp, Homo sapiens
caggcaaccaccacc

SEQ ID NO: 1796439 - DNA, 15 bp, Homo sapiens
aggcaaccaccacca

SEQ ID NO: 1796440 - DNA, 15 bp, Homo sapiens
ggcaaccaccaccat

SEQ ID NO: 1796441 - DNA, 15 bp, Homo sapiens
gcaaccaccaccatg

SEQ ID NO: 1796442 - DNA, 15 bp, Homo sapiens
caaccaccaccatgc

SEQ ID NO: 1796443 - DNA, 15 bp, Homo sapiens
aaccaccaccatgcc

SEQ ID NO: 1796444 - DNA, 15 bp, Homo sapiens
accaccaccatgcct

SEQ ID NO: 1796445 - DNA, 15 bp, Homo sapiens
ttaccatgttggcca

SEQ ID NO: 1796446 - DNA, 15 bp, Homo sapiens
taccatgttggccag

SEQ ID NO: 1796447 - DNA, 15 bp, Homo sapiens
gatccacctgcctca

SEQ ID NO: 1796448 - DNA, 15 bp, Homo sapiens
atccacctgcctcag

SEQ ID NO: 1796449 - DNA, 15 bp, Homo sapiens
tccacctgcctcagc

SEQ ID NO: 1796450 - DNA, 15 bp, Homo sapiens
ccacctgcctcagcc

SEQ ID NO: 1796451 - DNA, 15 bp, Homo sapiens
cacctgcctcagcct

SEQ ID NO: 1796452 - DNA, 15 bp, Homo sapiens
acctgcctcagcctt

SEQ ID NO: 1796453 - DNA, 15 bp, Homo sapiens
agccttccaaagtgc

SEQ ID NO: 1796454 - DNA, 15 bp, Homo sapiens
cttccaaagtgctga

SEQ ID NO: 1796455 - DNA, 15 bp, Homo sapiens
ttccaaagtgctgag

SEQ ID NO: 1796456 - DNA, 15 bp, Homo sapiens
tccaaagtgctgaga

SEQ ID NO: 1796457 - DNA, 15 bp, Homo sapiens
catgcctggcctgta

SEQ ID NO: 1796458 - DNA, 15 bp, Homo sapiens
atgcctggcctgtac

SEQ ID NO: 1796459 - DNA, 15 bp, Homo sapiens
tgcctggcctgtaca

SEQ ID NO: 1796460 - DNA, 15 bp, Homo sapiens
gcctggcctgtacat

SEQ ID NO: 1796461 - DNA, 15 bp, Homo sapiens
cctggcctgtacatg

SEQ ID NO: 1796462 - DNA, 15 bp, Homo sapiens
ctggcctgtacatgc

SEQ ID NO: 1796463 - DNA, 15 bp, Homo sapiens
tggcctgtacatgct

SEQ ID NO: 1796464 - DNA, 15 bp, Homo sapiens
ggcctgtacatgctt

SEQ ID NO: 1796465 - DNA, 15 bp, Homo sapiens
gcctgtacatgcttt

SEQ ID NO: 1796466 - DNA, 15 bp, Homo sapiens
cctgtacatgctttt

SEQ ID NO: 1796467 - DNA, 15 bp, Homo sapiens
ctgtacatgcttttc

SEQ ID NO: 1796468 - DNA, 15 bp, Homo sapiens
tgtacatgcttttca

SEQ ID NO: 1796469 - DNA, 15 bp, Homo sapiens
gtacatgcttttcat

SEQ ID NO: 1796470 - DNA, 15 bp, Homo sapiens
tacatgcttttcatt

SEQ ID NO: 1796471 - DNA, 15 bp, Homo sapiens
acatgcttttcattc

SEQ ID NO: 1796472 - DNA, 15 bp, Homo sapiens
catgcttttcattct

SEQ ID NO: 1796473 - DNA, 15 bp, Homo sapiens
atgcttttcattctt

SEQ ID NO: 1796474 - DNA, 15 bp, Homo sapiens
tgcttttcattcttc

SEQ ID NO: 1796475 - DNA, 15 bp, Homo sapiens
gcttttcattcttct

SEQ ID NO: 1796476 - DNA, 15 bp, Homo sapiens
cttttcattcttctt

SEQ ID NO: 1796477 - DNA, 15 bp, Homo sapiens
ttttcattcttctta

SEQ ID NO: 1796478 - DNA, 15 bp, Homo sapiens
tttcattcttcttat

SEQ ID NO: 1796479 - DNA, 15 bp, Homo sapiens
ttcattcttcttatc

SEQ ID NO: 1796480 - DNA, 15 bp, Homo sapiens
tcattcttcttatct

SEQ ID NO: 1796481 - DNA, 15 bp, Homo sapiens
cattcttcttatctt

SEQ ID NO: 1796482 - DNA, 15 bp, Homo sapiens
attcttcttatcttc

SEQ ID NO: 1796483 - DNA, 15 bp, Homo sapiens
ttcttcttatcttca

SEQ ID NO: 1796484 - DNA, 15 bp, Homo sapiens
tcttcttatcttcag

SEQ ID NO: 1796485 - DNA, 15 bp, Homo sapiens
cttcttatcttcaga

SEQ ID NO: 1796486 - DNA, 15 bp, Homo sapiens
ttcttatcttcagac

SEQ ID NO: 1796487 - DNA, 15 bp, Homo sapiens
tcttatcttcagacc

SEQ ID NO: 1796488 - DNA, 15 bp, Homo sapiens
cttatcttcagacct

SEQ ID NO: 1796489 - DNA, 15 bp, Homo sapiens
ttatcttcagaccta

SEQ ID NO: 1796490 - DNA, 15 bp, Homo sapiens
tatcttcagacctag

SEQ ID NO: 1796491 - DNA, 15 bp, Homo sapiens
atcttcagacctaga

SEQ ID NO: 1796492 - DNA, 15 bp, Homo sapiens
tcttcagacctagaa

SEQ ID NO: 1796493 - DNA, 15 bp, Homo sapiens
cttcagacctagaaa

SEQ ID NO: 1796494 - DNA, 15 bp, Homo sapiens
ttcagacctagaaac

SEQ ID NO: 1796495 - DNA, 15 bp, Homo sapiens
tcagacctagaaaca

SEQ ID NO: 1796496 - DNA, 15 bp, Homo sapiens
cagacctagaaacag

SEQ ID NO: 1796497 - DNA, 15 bp, Homo sapiens
agacctagaaacagc

SEQ ID NO: 1796498 - DNA, 15 bp, Homo sapiens
gacctagaaacagca

SEQ ID NO: 1796499 - DNA, 15 bp, Homo sapiens
acctagaaacagcag

SEQ ID NO: 1796500 - DNA, 15 bp, Homo sapiens
cctagaaacagcagc

SEQ ID NO: 1796501 - DNA, 15 bp, Homo sapiens
ctagaaacagcagct

SEQ ID NO: 1796502 - DNA, 15 bp, Homo sapiens
tagaaacagcagcta

SEQ ID NO: 1796503 - DNA, 15 bp, Homo sapiens
agaaacagcagctac

SEQ ID NO: 1796504 - DNA, 15 bp, Homo sapiens
gaaacagcagctaca

SEQ ID NO: 1796505 - DNA, 15 bp, Homo sapiens
aaacagcagctacag

SEQ ID NO: 1796506 - DNA, 15 bp, Homo sapiens
aacagcagctacagg

SEQ ID NO: 1796507 - DNA, 15 bp, Homo sapiens
acagcagctacaggt

SEQ ID NO: 1796508 - DNA, 15 bp, Homo sapiens
cagcagctacaggtt

SEQ ID NO: 1796509 - DNA, 15 bp, Homo sapiens
agcagctacaggttc

SEQ ID NO: 1796510 - DNA, 15 bp, Homo sapiens
gcagctacaggttct

SEQ ID NO: 1796511 - DNA, 15 bp, Homo sapiens
cagctacaggttctc

SEQ ID NO: 1796512 - DNA, 15 bp, Homo sapiens
agctacaggttctca

SEQ ID NO: 1796513 - DNA, 15 bp, Homo sapiens
gctacaggttctcag

SEQ ID NO: 1796514 - DNA, 15 bp, Homo sapiens
ctacaggttctcagc

SEQ ID NO: 1796515 - DNA, 15 bp, Homo sapiens
tacaggttctcagca

SEQ ID NO: 1796516 - DNA, 15 bp, Homo sapiens
acaggttctcagcat

SEQ ID NO: 1796517 - DNA, 15 bp, Homo sapiens
caggttctcagcatg

SEQ ID NO: 1796518 - DNA, 15 bp, Homo sapiens
aggttctcagcatgg

SEQ ID NO: 1796519 - DNA, 15 bp, Homo sapiens
ggttctcagcatggg

SEQ ID NO: 1796520 - DNA, 15 bp, Homo sapiens
gttctcagcatgggt

SEQ ID NO: 1796521 - DNA, 15 bp, Homo sapiens
ttctcagcatgggtc

SEQ ID NO: 1796522 - DNA, 15 bp, Homo sapiens
tctcagcatgggtcc

SEQ ID NO: 1796523 - DNA, 15 bp, Homo sapiens
ctcagcatgggtcct

SEQ ID NO: 1796524 - DNA, 15 bp, Homo sapiens
tcagcatgggtcctg

SEQ ID NO: 1796525 - DNA, 15 bp, Homo sapiens
cagcatgggtcctgc

SEQ ID NO: 1796526 - DNA, 15 bp, Homo sapiens
agcatgggtcctgct

SEQ ID NO: 1796527 - DNA, 15 bp, Homo sapiens
gcatgggtcctgctt

SEQ ID NO: 1796528 - DNA, 15 bp, Homo sapiens
catgggtcctgcttc

SEQ ID NO: 1796529 - DNA, 15 bp, Homo sapiens
atgggtcctgcttcc

SEQ ID NO: 1796530 - DNA, 15 bp, Homo sapiens
tgggtcctgcttccg

SEQ ID NO: 1796531 - DNA, 15 bp, Homo sapiens
gggtcctgcttccgt

SEQ ID NO: 1796532 - DNA, 15 bp, Homo sapiens
ggtcctgcttccgtg

SEQ ID NO: 1796533 - DNA, 15 bp, Homo sapiens
gtcctgcttccgtgt

SEQ ID NO: 1796534 - DNA, 15 bp, Homo sapiens
tcctgcttccgtgtt

SEQ ID NO: 1796535 - DNA, 15 bp, Homo sapiens
cctgcttccgtgttt

SEQ ID NO: 1796536 - DNA, 15 bp, Homo sapiens
ctgcttccgtgtttg

SEQ ID NO: 1796537 - DNA, 15 bp, Homo sapiens
tgcttccgtgtttgg

SEQ ID NO: 1796538 - DNA, 15 bp, Homo sapiens
gcttccgtgtttggt

SEQ ID NO: 1796539 - DNA, 15 bp, Homo sapiens
cttccgtgtttggta

SEQ ID NO: 1796540 - DNA, 15 bp, Homo sapiens
ttccgtgtttggtag

SEQ ID NO: 1796541 - DNA, 15 bp, Homo sapiens
tccgtgtttggtaga

SEQ ID NO: 1796542 - DNA, 15 bp, Homo sapiens
ccgtgtttggtagaa

SEQ ID NO: 1796543 - DNA, 15 bp, Homo sapiens
cgtgtttggtagaac

SEQ ID NO: 1796544 - DNA, 15 bp, Homo sapiens
gtgtttggtagaacc

SEQ ID NO: 1796545 - DNA, 15 bp, Homo sapiens
tgtttggtagaacct

SEQ ID NO: 1796546 - DNA, 15 bp, Homo sapiens
gtttggtagaacctg

SEQ ID NO: 1796547 - DNA, 15 bp, Homo sapiens
tttggtagaacctgg

SEQ ID NO: 1796548 - DNA, 15 bp, Homo sapiens
ttggtagaacctggg

SEQ ID NO: 1796549 - DNA, 15 bp, Homo sapiens
tggtagaacctgggt

SEQ ID NO: 1796550 - DNA, 15 bp, Homo sapiens
ggtagaacctgggtt

SEQ ID NO: 1796551 - DNA, 15 bp, Homo sapiens
gtagaacctgggttg

SEQ ID NO: 1796552 - DNA, 15 bp, Homo sapiens
tagaacctgggttgg

SEQ ID NO: 1796553 - DNA, 15 bp, Homo sapiens
agaacctgggttggg

SEQ ID NO: 1796554 - DNA, 15 bp, Homo sapiens
gaacctgggttgggg

SEQ ID NO: 1796555 - DNA, 15 bp, Homo sapiens
aacctgggttggggc

SEQ ID NO: 1796556 - DNA, 15 bp, Homo sapiens
acctgggttggggcc

SEQ ID NO: 1796557 - DNA, 15 bp, Homo sapiens
cctgggttggggcct

SEQ ID NO: 1796558 - DNA, 15 bp, Homo sapiens
ctgggttggggccta

SEQ ID NO: 1796559 - DNA, 15 bp, Homo sapiens
tgggttggggcctat

SEQ ID NO: 1796560 - DNA, 15 bp, Homo sapiens
gggttggggcctatt

SEQ ID NO: 1796561 - DNA, 15 bp, Homo sapiens
ggttggggcctattg

SEQ ID NO: 1796562 - DNA, 15 bp, Homo sapiens
gttggggcctattgt

SEQ ID NO: 1796563 - DNA, 15 bp, Homo sapiens
ttggggcctattgtg

SEQ ID NO: 1796564 - DNA, 15 bp, Homo sapiens
tggggcctattgtgt

SEQ ID NO: 1796565 - DNA, 15 bp, Homo sapiens
ggggcctattgtgtg

SEQ ID NO: 1796566 - DNA, 15 bp, Homo sapiens
gggcctattgtgtgt

SEQ ID NO: 1796567 - DNA, 15 bp, Homo sapiens
ggcctattgtgtgta

SEQ ID NO: 1796568 - DNA, 15 bp, Homo sapiens
gcctattgtgtgtag

SEQ ID NO: 1796569 - DNA, 15 bp, Homo sapiens
cctattgtgtgtagg

SEQ ID NO: 1796570 - DNA, 15 bp, Homo sapiens
ctattgtgtgtaggt

SEQ ID NO: 1796571 - DNA, 15 bp, Homo sapiens
tattgtgtgtaggtg

SEQ ID NO: 1796572 - DNA, 15 bp, Homo sapiens
attgtgtgtaggtga

SEQ ID NO: 1796573 - DNA, 15 bp, Homo sapiens
ttgtgtgtaggtgag

SEQ ID NO: 1796574 - DNA, 15 bp, Homo sapiens
tgtgtgtaggtgagg

SEQ ID NO: 1796575 - DNA, 15 bp, Homo sapiens
gtgtgtaggtgagga

SEQ ID NO: 1796576 - DNA, 15 bp, Homo sapiens
tgtgtaggtgaggac

SEQ ID NO: 1796577 - DNA, 15 bp, Homo sapiens
gtgtaggtgaggaca

SEQ ID NO: 1796578 - DNA, 15 bp, Homo sapiens
tgtaggtgaggacat

SEQ ID NO: 1796579 - DNA, 15 bp, Homo sapiens
gtaggtgaggacata

SEQ ID NO: 1796580 - DNA, 15 bp, Homo sapiens
taggtgaggacatat

SEQ ID NO: 1796581 - DNA, 15 bp, Homo sapiens
aggtgaggacatatc

SEQ ID NO: 1796582 - DNA, 15 bp, Homo sapiens
ggtgaggacatatcc

SEQ ID NO: 1796583 - DNA, 15 bp, Homo sapiens
gtgaggacatatcct

SEQ ID NO: 1796584 - DNA, 15 bp, Homo sapiens
tgaggacatatcctc

SEQ ID NO: 1796585 - DNA, 15 bp, Homo sapiens
gaggacatatcctct

SEQ ID NO: 1796586 - DNA, 15 bp, Homo sapiens
aggacatatcctctg

SEQ ID NO: 1796587 - DNA, 15 bp, Homo sapiens
ggacatatcctctgt

SEQ ID NO: 1796588 - DNA, 15 bp, Homo sapiens
gacatatcctctgtg

SEQ ID NO: 1796589 - DNA, 15 bp, Homo sapiens
acatatcctctgtgg

SEQ ID NO: 1796590 - DNA, 15 bp, Homo sapiens
catatcctctgtgga

SEQ ID NO: 1796591 - DNA, 15 bp, Homo sapiens
atatcctctgtggag

SEQ ID NO: 1796592 - DNA, 15 bp, Homo sapiens
tatcctctgtggaga

SEQ ID NO: 1796593 - DNA, 15 bp, Homo sapiens
atcctctgtggagag

SEQ ID NO: 1796594 - DNA, 15 bp, Homo sapiens
tcctctgtggagagg

SEQ ID NO: 1796595 - DNA, 15 bp, Homo sapiens
cctctgtggagaggg

SEQ ID NO: 1796596 - DNA, 15 bp, Homo sapiens
ctctgtggagagggg

SEQ ID NO: 1796597 - DNA, 15 bp, Homo sapiens
tctgtggagaggggc

SEQ ID NO: 1796598 - DNA, 15 bp, Homo sapiens
ctgtggagaggggcc

SEQ ID NO: 1796599 - DNA, 15 bp, Homo sapiens
tgtggagaggggcca

SEQ ID NO: 1796600 - DNA, 15 bp, Homo sapiens
gtggagaggggccac

SEQ ID NO: 1796601 - DNA, 15 bp, Homo sapiens
tggagaggggccacc

SEQ ID NO: 1796602 - DNA, 15 bp, Homo sapiens
ggagaggggccacct

SEQ ID NO: 1796603 - DNA, 15 bp, Homo sapiens
gagaggggccacctg

SEQ ID NO: 1796604 - DNA, 15 bp, Homo sapiens
agaggggccacctgg

SEQ ID NO: 1796605 - DNA, 15 bp, Homo sapiens
gaggggccacctggg

SEQ ID NO: 1796606 - DNA, 15 bp, Homo sapiens
aggggccacctgggg

SEQ ID NO: 1796607 - DNA, 15 bp, Homo sapiens
ggggccacctgggga

SEQ ID NO: 1796608 - DNA, 15 bp, Homo sapiens
gggccacctggggaa

SEQ ID NO: 1796609 - DNA, 15 bp, Homo sapiens
ggccacctggggaac

SEQ ID NO: 1796610 - DNA, 15 bp, Homo sapiens
gccacctggggaacg

SEQ ID NO: 1796611 - DNA, 15 bp, Homo sapiens
ccacctggggaacga

SEQ ID NO: 1796612 - DNA, 15 bp, Homo sapiens
cacctggggaacgaa

SEQ ID NO: 1796613 - DNA, 15 bp, Homo sapiens
acctggggaacgaag

SEQ ID NO: 1796614 - DNA, 15 bp, Homo sapiens
cctggggaacgaaga

SEQ ID NO: 1796615 - DNA, 15 bp, Homo sapiens
ctggggaacgaagat

SEQ ID NO: 1796616 - DNA, 15 bp, Homo sapiens
tggggaacgaagatg

SEQ ID NO: 1796617 - DNA, 15 bp, Homo sapiens
ggggaacgaagatgc

SEQ ID NO: 1796618 - DNA, 15 bp, Homo sapiens
gggaacgaagatgct

SEQ ID NO: 1796619 - DNA, 15 bp, Homo sapiens
ggaacgaagatgctg

SEQ ID NO: 1796620 - DNA, 15 bp, Homo sapiens
gaacgaagatgctga

SEQ ID NO: 1796621 - DNA, 15 bp, Homo sapiens
aacgaagatgctgaa

SEQ ID NO: 1796622 - DNA, 15 bp, Homo sapiens
acgaagatgctgaac

SEQ ID NO: 1796623 - DNA, 15 bp, Homo sapiens
cgaagatgctgaaca

SEQ ID NO: 1796624 - DNA, 15 bp, Homo sapiens
gaagatgctgaacag

SEQ ID NO: 1796625 - DNA, 15 bp, Homo sapiens
aagatgctgaacaga

SEQ ID NO: 1796626 - DNA, 15 bp, Homo sapiens
agatgctgaacagaa

SEQ ID NO: 1796627 - DNA, 15 bp, Homo sapiens
gatgctgaacagaag

SEQ ID NO: 1796628 - DNA, 15 bp, Homo sapiens
atgctgaacagaagt

SEQ ID NO: 1796629 - DNA, 15 bp, Homo sapiens
tgctgaacagaagtt

SEQ ID NO: 1796630 - DNA, 15 bp, Homo sapiens
gctgaacagaagttg

SEQ ID NO: 1796631 - DNA, 15 bp, Homo sapiens
ctgaacagaagttgc

SEQ ID NO: 1796632 - DNA, 15 bp, Homo sapiens
tgaacagaagttgct

SEQ ID NO: 1796633 - DNA, 15 bp, Homo sapiens
gaacagaagttgctg

SEQ ID NO: 1796634 - DNA, 15 bp, Homo sapiens
aacagaagttgctga

SEQ ID NO: 1796635 - DNA, 15 bp, Homo sapiens
acagaagttgctgaa

SEQ ID NO: 1796636 - DNA, 15 bp, Homo sapiens
cagaagttgctgaag

SEQ ID NO: 1796637 - DNA, 15 bp, Homo sapiens
agaagttgctgaagc

SEQ ID NO: 1796638 - DNA, 15 bp, Homo sapiens
gaagttgctgaagcc

SEQ ID NO: 1796639 - DNA, 15 bp, Homo sapiens
aagttgctgaagccc

SEQ ID NO: 1796640 - DNA, 15 bp, Homo sapiens
agttgctgaagccct

SEQ ID NO: 1796641 - DNA, 15 bp, Homo sapiens
gttgctgaagccctc

SEQ ID NO: 1796642 - DNA, 15 bp, Homo sapiens
ttgctgaagccctct

SEQ ID NO: 1796643 - DNA, 15 bp, Homo sapiens
tgctgaagccctctg

SEQ ID NO: 1796644 - DNA, 15 bp, Homo sapiens
gctgaagccctctga

SEQ ID NO: 1796645 - DNA, 15 bp, Homo sapiens
ctgaagccctctgaa

SEQ ID NO: 1796646 - DNA, 15 bp, Homo sapiens
tgaagccctctgaac

SEQ ID NO: 1796647 - DNA, 15 bp, Homo sapiens
gaagccctctgaacc

SEQ ID NO: 1796648 - DNA, 15 bp, Homo sapiens
aagccctctgaacca

SEQ ID NO: 1796649 - DNA, 15 bp, Homo sapiens
agccctctgaaccat

SEQ ID NO: 1796650 - DNA, 15 bp, Homo sapiens
gccctctgaaccatt

SEQ ID NO: 1796651 - DNA, 15 bp, Homo sapiens
ccctctgaaccattc

SEQ ID NO: 1796652 - DNA, 15 bp, Homo sapiens
cctctgaaccattca

SEQ ID NO: 1796653 - DNA, 15 bp, Homo sapiens
ctctgaaccattcag

SEQ ID NO: 1796654 - DNA, 15 bp, Homo sapiens
tctgaaccattcagc

SEQ ID NO: 1796655 - DNA, 15 bp, Homo sapiens
ctgaaccattcagct

SEQ ID NO: 1796656 - DNA, 15 bp, Homo sapiens
tgaaccattcagctc

SEQ ID NO: 1796657 - DNA, 15 bp, Homo sapiens
gaaccattcagctct

SEQ ID NO: 1796658 - DNA, 15 bp, Homo sapiens
aaccattcagctctc

SEQ ID NO: 1796659 - DNA, 15 bp, Homo sapiens
accattcagctctct

SEQ ID NO: 1796660 - DNA, 15 bp, Homo sapiens
ccattcagctctcta

SEQ ID NO: 1796661 - DNA, 15 bp, Homo sapiens
cattcagctctctaa

SEQ ID NO: 1796662 - DNA, 15 bp, Homo sapiens
attcagctctctaag

SEQ ID NO: 1796663 - DNA, 15 bp, Homo sapiens
ttcagctctctaagg

SEQ ID NO: 1796664 - DNA, 15 bp, Homo sapiens
tcagctctctaagga

SEQ ID NO: 1796665 - DNA, 15 bp, Homo sapiens
cagctctctaaggaa

SEQ ID NO: 1796666 - DNA, 15 bp, Homo sapiens
agctctctaaggaac

SEQ ID NO: 1796667 - DNA, 15 bp, Homo sapiens
gctctctaaggaacc

SEQ ID NO: 1796668 - DNA, 15 bp, Homo sapiens
ctctctaaggaacct

SEQ ID NO: 1796669 - DNA, 15 bp, Homo sapiens
tctctaaggaacctt

SEQ ID NO: 1796670 - DNA, 15 bp, Homo sapiens
ctctaaggaaccttc

SEQ ID NO: 1796671 - DNA, 15 bp, Homo sapiens
tctaaggaaccttct

SEQ ID NO: 1796672 - DNA, 15 bp, Homo sapiens
ctaaggaaccttctg

SEQ ID NO: 1796673 - DNA, 15 bp, Homo sapiens
taaggaaccttctga

SEQ ID NO: 1796674 - DNA, 15 bp, Homo sapiens
aaggaaccttctgat

SEQ ID NO: 1796675 - DNA, 15 bp, Homo sapiens
aggaaccttctgata

SEQ ID NO: 1796676 - DNA, 15 bp, Homo sapiens
ggaaccttctgatat

SEQ ID NO: 1796677 - DNA, 15 bp, Homo sapiens
gaaccttctgatatc

SEQ ID NO: 1796678 - DNA, 15 bp, Homo sapiens
aaccttctgatatct

SEQ ID NO: 1796679 - DNA, 15 bp, Homo sapiens
accttctgatatctc

SEQ ID NO: 1796680 - DNA, 15 bp, Homo sapiens
ccttctgatatctcc

SEQ ID NO: 1796681 - DNA, 15 bp, Homo sapiens
cttctgatatctccc

SEQ ID NO: 1796682 - DNA, 15 bp, Homo sapiens
ttctgatatctcccc

SEQ ID NO: 1796683 - DNA, 15 bp, Homo sapiens
tctgatatctcccca

SEQ ID NO: 1796684 - DNA, 15 bp, Homo sapiens
ctgatatctccccac

SEQ ID NO: 1796685 - DNA, 15 bp, Homo sapiens
tgatatctccccaca

SEQ ID NO: 1796686 - DNA, 15 bp, Homo sapiens
gatatctccccacag

SEQ ID NO: 1796687 - DNA, 15 bp, Homo sapiens
atatctccccacagg

SEQ ID NO: 1796688 - DNA, 15 bp, Homo sapiens
tatctccccacaggt

SEQ ID NO: 1796689 - DNA, 15 bp, Homo sapiens
atctccccacaggtg

SEQ ID NO: 1796690 - DNA, 15 bp, Homo sapiens
tctccccacaggtgg

SEQ ID NO: 1796691 - DNA, 15 bp, Homo sapiens
ctccccacaggtgga

SEQ ID NO: 1796692 - DNA, 15 bp, Homo sapiens
tccccacaggtggac

SEQ ID NO: 1796693 - DNA, 15 bp, Homo sapiens
ccccacaggtggacc

SEQ ID NO: 1796694 - DNA, 15 bp, Homo sapiens
cccacaggtggacct

SEQ ID NO: 1796695 - DNA, 15 bp, Homo sapiens
ccacaggtggacctg

SEQ ID NO: 1796696 - DNA, 15 bp, Homo sapiens
cacaggtggacctgg

SEQ ID NO: 1796697 - DNA, 15 bp, Homo sapiens
acaggtggacctggc

SEQ ID NO: 1796698 - DNA, 15 bp, Homo sapiens
caggtggacctggcc

SEQ ID NO: 1796699 - DNA, 15 bp, Homo sapiens
aggtggacctggcct

SEQ ID NO: 1796700 - DNA, 15 bp, Homo sapiens
ggtggacctggcctc

SEQ ID NO: 1796701 - DNA, 15 bp, Homo sapiens
gtggacctggcctct

SEQ ID NO: 1796702 - DNA, 15 bp, Homo sapiens
tggacctggcctctc

SEQ ID NO: 1796703 - DNA, 15 bp, Homo sapiens
ggacctggcctctca

SEQ ID NO: 1796704 - DNA, 15 bp, Homo sapiens
gacctggcctctcag

SEQ ID NO: 1796705 - DNA, 15 bp, Homo sapiens
acctggcctctcagg

SEQ ID NO: 1796706 - DNA, 15 bp, Homo sapiens
cctggcctctcaggt

SEQ ID NO: 1796707 - DNA, 15 bp, Homo sapiens
ctggcctctcaggtc

SEQ ID NO: 1796708 - DNA, 15 bp, Homo sapiens
tggcctctcaggtcc

SEQ ID NO: 1796709 - DNA, 15 bp, Homo sapiens
ggcctctcaggtccc

SEQ ID NO: 1796710 - DNA, 15 bp, Homo sapiens
gcctctcaggtccct

SEQ ID NO: 1796711 - DNA, 15 bp, Homo sapiens
cctctcaggtccctt

SEQ ID NO: 1796712 - DNA, 15 bp, Homo sapiens
ctctcaggtcccttg

SEQ ID NO: 1796713 - DNA, 15 bp, Homo sapiens
tctcaggtcccttgg

SEQ ID NO: 1796714 - DNA, 15 bp, Homo sapiens
ctcaggtcccttggt

SEQ ID NO: 1796715 - DNA, 15 bp, Homo sapiens
tcaggtcccttggtt

SEQ ID NO: 1796716 - DNA, 15 bp, Homo sapiens
caggtcccttggttt

SEQ ID NO: 1796717 - DNA, 15 bp, Homo sapiens
aggtcccttggtttg

SEQ ID NO: 1796718 - DNA, 15 bp, Homo sapiens
ggtcccttggtttga

SEQ ID NO: 1796719 - DNA, 15 bp, Homo sapiens
gtcccttggtttgag

SEQ ID NO: 1796720 - DNA, 15 bp, Homo sapiens
tcccttggtttgagc

SEQ ID NO: 1796721 - DNA, 15 bp, Homo sapiens
cccttggtttgagca

SEQ ID NO: 1796722 - DNA, 15 bp, Homo sapiens
ccttggtttgagcag

SEQ ID NO: 1796723 - DNA, 15 bp, Homo sapiens
cttggtttgagcagc

SEQ ID NO: 1796724 - DNA, 15 bp, Homo sapiens
ttggtttgagcagct

SEQ ID NO: 1796725 - DNA, 15 bp, Homo sapiens
tggtttgagcagctg

SEQ ID NO: 1796726 - DNA, 15 bp, Homo sapiens
ggtttgagcagctgg

SEQ ID NO: 1796727 - DNA, 15 bp, Homo sapiens
gtttgagcagctggc

SEQ ID NO: 1796728 - DNA, 15 bp, Homo sapiens
tttgagcagctggct

SEQ ID NO: 1796729 - DNA, 15 bp, Homo sapiens
ttgagcagctggctc

SEQ ID NO: 1796730 - DNA, 15 bp, Homo sapiens
tgagcagctggctca

SEQ ID NO: 1796731 - DNA, 15 bp, Homo sapiens
gagcagctggctcag

SEQ ID NO: 1796732 - DNA, 15 bp, Homo sapiens
agcagctggctcagt

SEQ ID NO: 1796733 - DNA, 15 bp, Homo sapiens
gcagctggctcagtt

SEQ ID NO: 1796734 - DNA, 15 bp, Homo sapiens
cagctggctcagttc

SEQ ID NO: 1796735 - DNA, 15 bp, Homo sapiens
agctggctcagttca

SEQ ID NO: 1796736 - DNA, 15 bp, Homo sapiens
gctggctcagttcaa

SEQ ID NO: 1796737 - DNA, 15 bp, Homo sapiens
ctggctcagttcaag

SEQ ID NO: 1796738 - DNA, 15 bp, Homo sapiens
tggctcagttcaaga

SEQ ID NO: 1796739 - DNA, 15 bp, Homo sapiens
ggctcagttcaagat

SEQ ID NO: 1796740 - DNA, 15 bp, Homo sapiens
gctcagttcaagatg

SEQ ID NO: 1796741 - DNA, 15 bp, Homo sapiens
ctcagttcaagatgc

SEQ ID NO: 1796742 - DNA, 15 bp, Homo sapiens
tcagttcaagatgcc

SEQ ID NO: 1796743 - DNA, 15 bp, Homo sapiens
cagttcaagatgccc

SEQ ID NO: 1796744 - DNA, 15 bp, Homo sapiens
agttcaagatgccct

SEQ ID NO: 1796745 - DNA, 15 bp, Homo sapiens
gttcaagatgccctg

SEQ ID NO: 1796746 - DNA, 15 bp, Homo sapiens
ttcaagatgccctgg

SEQ ID NO: 1796747 - DNA, 15 bp, Homo sapiens
tcaagatgccctgga

SEQ ID NO: 1796748 - DNA, 15 bp, Homo sapiens
caagatgccctggac

SEQ ID NO: 1796749 - DNA, 15 bp, Homo sapiens
aagatgccctggaca

SEQ ID NO: 1796750 - DNA, 15 bp, Homo sapiens
agatgccctggacat

SEQ ID NO: 1796751 - DNA, 15 bp, Homo sapiens
gatgccctggacatc

SEQ ID NO: 1796752 - DNA, 15 bp, Homo sapiens
atgccctggacatct

SEQ ID NO: 1796753 - DNA, 15 bp, Homo sapiens
tgccctggacatctc

SEQ ID NO: 1796754 - DNA, 15 bp, Homo sapiens
gccctggacatctcc

SEQ ID NO: 1796755 - DNA, 15 bp, Homo sapiens
ccctggacatctccc

SEQ ID NO: 1796756 - DNA, 15 bp, Homo sapiens
cctggacatctccca

SEQ ID NO: 1796757 - DNA, 15 bp, Homo sapiens
ctggacatctcccag

SEQ ID NO: 1796758 - DNA, 15 bp, Homo sapiens
tggacatctcccagc

SEQ ID NO: 1796759 - DNA, 15 bp, Homo sapiens
ggacatctcccagct

SEQ ID NO: 1796760 - DNA, 15 bp, Homo sapiens
gacatctcccagctg

SEQ ID NO: 1796761 - DNA, 15 bp, Homo sapiens
acatctcccagctgc

SEQ ID NO: 1796762 - DNA, 15 bp, Homo sapiens
catctcccagctgcc

SEQ ID NO: 1796763 - DNA, 15 bp, Homo sapiens
atctcccagctgcca

SEQ ID NO: 1796764 - DNA, 15 bp, Homo sapiens
tctcccagctgccag

SEQ ID NO: 1796765 - DNA, 15 bp, Homo sapiens
ctcccagctgccaga

SEQ ID NO: 1796766 - DNA, 15 bp, Homo sapiens
tcccagctgccagaa

SEQ ID NO: 1796767 - DNA, 15 bp, Homo sapiens
cccagctgccagaat

SEQ ID NO: 1796768 - DNA, 15 bp, Homo sapiens
ccagctgccagaatt

SEQ ID NO: 1796769 - DNA, 15 bp, Homo sapiens
cagctgccagaattc

SEQ ID NO: 1796770 - DNA, 15 bp, Homo sapiens
agctgccagaattct

SEQ ID NO: 1796771 - DNA, 15 bp, Homo sapiens
gctgccagaattctt

SEQ ID NO: 1796772 - DNA, 15 bp, Homo sapiens
ctgccagaattcttg

SEQ ID NO: 1796773 - DNA, 15 bp, Homo sapiens
tgccagaattcttgt

SEQ ID NO: 1796774 - DNA, 15 bp, Homo sapiens
gccagaattcttgtg

SEQ ID NO: 1796775 - DNA, 15 bp, Homo sapiens
ccagaattcttgtga

SEQ ID NO: 1796776 - DNA, 15 bp, Homo sapiens
cagaattcttgtgag

SEQ ID NO: 1796777 - DNA, 15 bp, Homo sapiens
agaattcttgtgagc

SEQ ID NO: 1796778 - DNA, 15 bp, Homo sapiens
gaattcttgtgagct

SEQ ID NO: 1796779 - DNA, 15 bp, Homo sapiens
aattcttgtgagctg

SEQ ID NO: 1796780 - DNA, 15 bp, Homo sapiens
attcttgtgagctgg

SEQ ID NO: 1796781 - DNA, 15 bp, Homo sapiens
ttcttgtgagctggg

SEQ ID NO: 1796782 - DNA, 15 bp, Homo sapiens
tcttgtgagctgggc

SEQ ID NO: 1796783 - DNA, 15 bp, Homo sapiens
cttgtgagctgggca

SEQ ID NO: 1796784 - DNA, 15 bp, Homo sapiens
ttgtgagctgggcat

SEQ ID NO: 1796785 - DNA, 15 bp, Homo sapiens
tgtgagctgggcatc

SEQ ID NO: 1796786 - DNA, 15 bp, Homo sapiens
gtgagctgggcatcc

SEQ ID NO: 1796787 - DNA, 15 bp, Homo sapiens
tgagctgggcatcca

SEQ ID NO: 1796788 - DNA, 15 bp, Homo sapiens
gagctgggcatccag

SEQ ID NO: 1796789 - DNA, 15 bp, Homo sapiens
agctgggcatccaga

SEQ ID NO: 1796790 - DNA, 15 bp, Homo sapiens
gctgggcatccagaa

SEQ ID NO: 1796791 - DNA, 15 bp, Homo sapiens
ctgggcatccagaac

SEQ ID NO: 1796792 - DNA, 15 bp, Homo sapiens
tgggcatccagaacc

SEQ ID NO: 1796793 - DNA, 15 bp, Homo sapiens
gggcatccagaacct

SEQ ID NO: 1796794 - DNA, 15 bp, Homo sapiens
ggcatccagaaccta

SEQ ID NO: 1796795 - DNA, 15 bp, Homo sapiens
gcatccagaacctaa

SEQ ID NO: 1796796 - DNA, 15 bp, Homo sapiens
catccagaacctaag

SEQ ID NO: 1796797 - DNA, 15 bp, Homo sapiens
atccagaacctaagc

SEQ ID NO: 1796798 - DNA, 15 bp, Homo sapiens
tccagaacctaagct

SEQ ID NO: 1796799 - DNA, 15 bp, Homo sapiens
ccagaacctaagctt

SEQ ID NO: 1796800 - DNA, 15 bp, Homo sapiens
cagaacctaagcttc

SEQ ID NO: 1796801 - DNA, 15 bp, Homo sapiens
agaacctaagcttca

SEQ ID NO: 1796802 - DNA, 15 bp, Homo sapiens
gaacctaagcttcaa

SEQ ID NO: 1796803 - DNA, 15 bp, Homo sapiens
aacctaagcttcaaa

SEQ ID NO: 1796804 - DNA, 15 bp, Homo sapiens
acctaagcttcaaag

SEQ ID NO: 1796805 - DNA, 15 bp, Homo sapiens
cctaagcttcaaagt

SEQ ID NO: 1796806 - DNA, 15 bp, Homo sapiens
ctaagcttcaaagtg

SEQ ID NO: 1796807 - DNA, 15 bp, Homo sapiens
taagcttcaaagtga

SEQ ID NO: 1796808 - DNA, 15 bp, Homo sapiens
aagcttcaaagtgag

SEQ ID NO: 1796809 - DNA, 15 bp, Homo sapiens
agcttcaaagtgaga

SEQ ID NO: 1796810 - DNA, 15 bp, Homo sapiens
gcttcaaagtgagaa

SEQ ID NO: 1796811 - DNA, 15 bp, Homo sapiens
cttcaaagtgagaag

SEQ ID NO: 1796812 - DNA, 15 bp, Homo sapiens
ttcaaagtgagaagt

SEQ ID NO: 1796813 - DNA, 15 bp, Homo sapiens
tcaaagtgagaagtg

SEQ ID NO: 1796814 - DNA, 15 bp, Homo sapiens
caaagtgagaagtgg

SEQ ID NO: 1796815 - DNA, 15 bp, Homo sapiens
aaagtgagaagtggg

SEQ ID NO: 1796816 - DNA, 15 bp, Homo sapiens
aagtgagaagtgggc

SEQ ID NO: 1796817 - DNA, 15 bp, Homo sapiens
agtgagaagtgggca

SEQ ID NO: 1796818 - DNA, 15 bp, Homo sapiens
gtgagaagtgggcag

SEQ ID NO: 1796819 - DNA, 15 bp, Homo sapiens
tgagaagtgggcaga

SEQ ID NO: 1796820 - DNA, 15 bp, Homo sapiens
gagaagtgggcagat

SEQ ID NO: 1796821 - DNA, 15 bp, Homo sapiens
agaagtgggcagatg

SEQ ID NO: 1796822 - DNA, 15 bp, Homo sapiens
gaagtgggcagatgc

SEQ ID NO: 1796823 - DNA, 15 bp, Homo sapiens
aagtgggcagatgct

SEQ ID NO: 1796824 - DNA, 15 bp, Homo sapiens
agtgggcagatgctg

SEQ ID NO: 1796825 - DNA, 15 bp, Homo sapiens
gtgggcagatgctgg

SEQ ID NO: 1796826 - DNA, 15 bp, Homo sapiens
tgggcagatgctggc

SEQ ID NO: 1796827 - DNA, 15 bp, Homo sapiens
gggcagatgctggcc

SEQ ID NO: 1796828 - DNA, 15 bp, Homo sapiens
ggcagatgctggcca

SEQ ID NO: 1796829 - DNA, 15 bp, Homo sapiens
gcagatgctggccat

SEQ ID NO: 1796830 - DNA, 15 bp, Homo sapiens
cagatgctggccatc

SEQ ID NO: 1796831 - DNA, 15 bp, Homo sapiens
agatgctggccatca

SEQ ID NO: 1796832 - DNA, 15 bp, Homo sapiens
gatgctggccatcat

SEQ ID NO: 1796833 - DNA, 15 bp, Homo sapiens
atgctggccatcata

SEQ ID NO: 1796834 - DNA, 15 bp, Homo sapiens
tgctggccatcatag

SEQ ID NO: 1796835 - DNA, 15 bp, Homo sapiens
gctggccatcatagg

SEQ ID NO: 1796836 - DNA, 15 bp, Homo sapiens
ctggccatcataggg

SEQ ID NO: 1796837 - DNA, 15 bp, Homo sapiens
tggccatcataggga

SEQ ID NO: 1796838 - DNA, 15 bp, Homo sapiens
ggccatcatagggag

SEQ ID NO: 1796839 - DNA, 15 bp, Homo sapiens
gccatcatagggagc

SEQ ID NO: 1796840 - DNA, 15 bp, Homo sapiens
ccatcatagggagct

SEQ ID NO: 1796841 - DNA, 15 bp, Homo sapiens
catcatagggagctc

SEQ ID NO: 1796842 - DNA, 15 bp, Homo sapiens
atcatagggagctca

SEQ ID NO: 1796843 - DNA, 15 bp, Homo sapiens
tcatagggagctcag

SEQ ID NO: 1796844 - DNA, 15 bp, Homo sapiens
catagggagctcagg

SEQ ID NO: 1796845 - DNA, 15 bp, Homo sapiens
atagggagctcaggt

SEQ ID NO: 1796846 - DNA, 15 bp, Homo sapiens
tagggagctcaggta

SEQ ID NO: 1796847 - DNA, 15 bp, Homo sapiens
agggagctcaggtac

SEQ ID NO: 1796848 - DNA, 15 bp, Homo sapiens
gggagctcaggtacc

SEQ ID NO: 1796849 - DNA, 15 bp, Homo sapiens
ggagctcaggtaccg

SEQ ID NO: 1796850 - DNA, 15 bp, Homo sapiens
gagctcaggtaccgg

SEQ ID NO: 1796851 - DNA, 15 bp, Homo sapiens
agctcaggtaccgga

SEQ ID NO: 1796852 - DNA, 15 bp, Homo sapiens
gctcaggtaccggaa

SEQ ID NO: 1796853 - DNA, 15 bp, Homo sapiens
ctcaggtaccggaaa

SEQ ID NO: 1796854 - DNA, 15 bp, Homo sapiens
tcaggtaccggaaag

SEQ ID NO: 1796855 - DNA, 15 bp, Homo sapiens
caggtaccggaaagg

SEQ ID NO: 1796856 - DNA, 15 bp, Homo sapiens
aggtaccggaaaggc

SEQ ID NO: 1796857 - DNA, 15 bp, Homo sapiens
ggtaccggaaaggca

SEQ ID NO: 1796858 - DNA, 15 bp, Homo sapiens
gtaccggaaaggcaa

SEQ ID NO: 1796859 - DNA, 15 bp, Homo sapiens
taccggaaaggcaaa

SEQ ID NO: 1796860 - DNA, 15 bp, Homo sapiens
accggaaaggcaaat

SEQ ID NO: 1796861 - DNA, 15 bp, Homo sapiens
ccggaaaggcaaatc

SEQ ID NO: 1796862 - DNA, 15 bp, Homo sapiens
cggaaaggcaaatcg

SEQ ID NO: 1796863 - DNA, 15 bp, Homo sapiens
ggaaaggcaaatcgc

SEQ ID NO: 1796864 - DNA, 15 bp, Homo sapiens
gaaaggcaaatcgct

SEQ ID NO: 1796865 - DNA, 15 bp, Homo sapiens
aaaggcaaatcgctg

SEQ ID NO: 1796866 - DNA, 15 bp, Homo sapiens
aaggcaaatcgctgg

SEQ ID NO: 1796867 - DNA, 15 bp, Homo sapiens
aggcaaatcgctggg

SEQ ID NO: 1796868 - DNA, 15 bp, Homo sapiens
ggcaaatcgctgggc

SEQ ID NO: 1796869 - DNA, 15 bp, Homo sapiens
gcaaatcgctgggca

SEQ ID NO: 1796870 - DNA, 15 bp, Homo sapiens
caaatcgctgggcaa

SEQ ID NO: 1796871 - DNA, 15 bp, Homo sapiens
aaatcgctgggcaat

SEQ ID NO: 1796872 - DNA, 15 bp, Homo sapiens
aatcgctgggcaatg

SEQ ID NO: 1796873 - DNA, 15 bp, Homo sapiens
atcgctgggcaatgg

SEQ ID NO: 1796874 - DNA, 15 bp, Homo sapiens
tcgctgggcaatggt

SEQ ID NO: 1796875 - DNA, 15 bp, Homo sapiens
cgctgggcaatggtt

SEQ ID NO: 1796876 - DNA, 15 bp, Homo sapiens
gctgggcaatggttt

SEQ ID NO: 1796877 - DNA, 15 bp, Homo sapiens
ctgggcaatggtttc

SEQ ID NO: 1796878 - DNA, 15 bp, Homo sapiens
tgggcaatggtttct

SEQ ID NO: 1796879 - DNA, 15 bp, Homo sapiens
gggcaatggtttctc

SEQ ID NO: 1796880 - DNA, 15 bp, Homo sapiens
ggcaatggtttctct

SEQ ID NO: 1796881 - DNA, 15 bp, Homo sapiens
gcaatggtttctctc

SEQ ID NO: 1796882 - DNA, 15 bp, Homo sapiens
caatggtttctctcc

SEQ ID NO: 1796883 - DNA, 15 bp, Homo sapiens
aatggtttctctcct

SEQ ID NO: 1796884 - DNA, 15 bp, Homo sapiens
atggtttctctcctg

SEQ ID NO: 1796885 - DNA, 15 bp, Homo sapiens
tggtttctctcctgg

SEQ ID NO: 1796886 - DNA, 15 bp, Homo sapiens
ggtttctctcctggg

SEQ ID NO: 1796887 - DNA, 15 bp, Homo sapiens
gtttctctcctggga

SEQ ID NO: 1796888 - DNA, 15 bp, Homo sapiens
tttctctcctgggat

SEQ ID NO: 1796889 - DNA, 15 bp, Homo sapiens
ttctctcctgggata

SEQ ID NO: 1796890 - DNA, 15 bp, Homo sapiens
tctctcctgggatac

SEQ ID NO: 1796891 - DNA, 15 bp, Homo sapiens
ctctcctgggataca

SEQ ID NO: 1796892 - DNA, 15 bp, Homo sapiens
tctcctgggatacag

SEQ ID NO: 1796893 - DNA, 15 bp, Homo sapiens
ctcctgggatacaga

SEQ ID NO: 1796894 - DNA, 15 bp, Homo sapiens
tcctgggatacagaa

SEQ ID NO: 1796895 - DNA, 15 bp, Homo sapiens
cctgggatacagaat

SEQ ID NO: 1796896 - DNA, 15 bp, Homo sapiens
ctgggatacagaatg

SEQ ID NO: 1796897 - DNA, 15 bp, Homo sapiens
tgggatacagaatgg

SEQ ID NO: 1796898 - DNA, 15 bp, Homo sapiens
gggatacagaatggt

SEQ ID NO: 1796899 - DNA, 15 bp, Homo sapiens
ggatacagaatggtc

SEQ ID NO: 1796900 - DNA, 15 bp, Homo sapiens
gatacagaatggtcc

SEQ ID NO: 1796901 - DNA, 15 bp, Homo sapiens
atacagaatggtcct

SEQ ID NO: 1796902 - DNA, 15 bp, Homo sapiens
tacagaatggtcctt

SEQ ID NO: 1796903 - DNA, 15 bp, Homo sapiens
acagaatggtccttt

SEQ ID NO: 1796904 - DNA, 15 bp, Homo sapiens
cagaatggtcctttg

SEQ ID NO: 1796905 - DNA, 15 bp, Homo sapiens
agaatggtcctttgg

SEQ ID NO: 1796906 - DNA, 15 bp, Homo sapiens
gaatggtcctttgga

SEQ ID NO: 1796907 - DNA, 15 bp, Homo sapiens
aatggtcctttggac

SEQ ID NO: 1796908 - DNA, 15 bp, Homo sapiens
atggtcctttggaca

SEQ ID NO: 1796909 - DNA, 15 bp, Homo sapiens
tggtcctttggacaa

SEQ ID NO: 1796910 - DNA, 15 bp, Homo sapiens
ggtcctttggacaaa

SEQ ID NO: 1796911 - DNA, 15 bp, Homo sapiens
gtcctttggacaaat

SEQ ID NO: 1796912 - DNA, 15 bp, Homo sapiens
tcctttggacaaatg

SEQ ID NO: 1796913 - DNA, 15 bp, Homo sapiens
cctttggacaaatgg

SEQ ID NO: 1796914 - DNA, 15 bp, Homo sapiens
ctttggacaaatgga

SEQ ID NO: 1796915 - DNA, 15 bp, Homo sapiens
tttggacaaatggat

SEQ ID NO: 1796916 - DNA, 15 bp, Homo sapiens
ttggacaaatggatg

SEQ ID NO: 1796917 - DNA, 15 bp, Homo sapiens
tggacaaatggatgc

SEQ ID NO: 1796918 - DNA, 15 bp, Homo sapiens
ggacaaatggatgct

SEQ ID NO: 1796919 - DNA, 15 bp, Homo sapiens
gacaaatggatgctt

SEQ ID NO: 1796920 - DNA, 15 bp, Homo sapiens
acaaatggatgcttc

SEQ ID NO: 1796921 - DNA, 15 bp, Homo sapiens
caaatggatgcttct

SEQ ID NO: 1796922 - DNA, 15 bp, Homo sapiens
aaatggatgcttctt

SEQ ID NO: 1796923 - DNA, 15 bp, Homo sapiens
aatggatgcttctta

SEQ ID NO: 1796924 - DNA, 15 bp, Homo sapiens
atggatgcttcttat

SEQ ID NO: 1796925 - DNA, 15 bp, Homo sapiens
tggatgcttcttatg

SEQ ID NO: 1796926 - DNA, 15 bp, Homo sapiens
ggatgcttcttatgg

SEQ ID NO: 1796927 - DNA, 15 bp, Homo sapiens
gatgcttcttatgga

SEQ ID NO: 1796928 - DNA, 15 bp, Homo sapiens
atgcttcttatggag

SEQ ID NO: 1796929 - DNA, 15 bp, Homo sapiens
tgcttcttatggagc

SEQ ID NO: 1796930 - DNA, 15 bp, Homo sapiens
gcttcttatggagct

SEQ ID NO: 1796931 - DNA, 15 bp, Homo sapiens
cttcttatggagctc

SEQ ID NO: 1796932 - DNA, 15 bp, Homo sapiens
ttcttatggagctct

SEQ ID NO: 1796933 - DNA, 15 bp, Homo sapiens
tcttatggagctctt

SEQ ID NO: 1796934 - DNA, 15 bp, Homo sapiens
cttatggagctcttt

SEQ ID NO: 1796935 - DNA, 15 bp, Homo sapiens
ttatggagctctttg

SEQ ID NO: 1796936 - DNA, 15 bp, Homo sapiens
tatggagctctttgc

SEQ ID NO: 1796937 - DNA, 15 bp, Homo sapiens
atggagctctttgct

SEQ ID NO: 1796938 - DNA, 15 bp, Homo sapiens
tggagctctttgctg

SEQ ID NO: 1796939 - DNA, 15 bp, Homo sapiens
ggagctctttgctga

SEQ ID NO: 1796940 - DNA, 15 bp, Homo sapiens
gagctctttgctgac

SEQ ID NO: 1796941 - DNA, 15 bp, Homo sapiens
agctctttgctgact

SEQ ID NO: 1796942 - DNA, 15 bp, Homo sapiens
gctctttgctgacta

SEQ ID NO: 1796943 - DNA, 15 bp, Homo sapiens
ctctttgctgactag

SEQ ID NO: 1796944 - DNA, 15 bp, Homo sapiens
tctttgctgactagt

SEQ ID NO: 1796945 - DNA, 15 bp, Homo sapiens
ctttgctgactagta

SEQ ID NO: 1796946 - DNA, 15 bp, Homo sapiens
tttgctgactagtag

SEQ ID NO: 1796947 - DNA, 15 bp, Homo sapiens
ttgctgactagtaga

SEQ ID NO: 1796948 - DNA, 15 bp, Homo sapiens
tgctgactagtagaa

SEQ ID NO: 1796949 - DNA, 15 bp, Homo sapiens
gctgactagtagaat

SEQ ID NO: 1796950 - DNA, 15 bp, Homo sapiens
ctgactagtagaata

SEQ ID NO: 1796951 - DNA, 15 bp, Homo sapiens
tgactagtagaataa

SEQ ID NO: 1796952 - DNA, 15 bp, Homo sapiens
gactagtagaataat

SEQ ID NO: 1796953 - DNA, 15 bp, Homo sapiens
actagtagaataata

SEQ ID NO: 1796954 - DNA, 15 bp, Homo sapiens
ctagtagaataatac

SEQ ID NO: 1796955 - DNA, 15 bp, Homo sapiens
tagtagaataataca

SEQ ID NO: 1796956 - DNA, 15 bp, Homo sapiens
agtagaataatacag

SEQ ID NO: 1796957 - DNA, 15 bp, Homo sapiens
gtagaataatacagc

SEQ ID NO: 1796958 - DNA, 15 bp, Homo sapiens
tagaataatacagca

SEQ ID NO: 1796959 - DNA, 15 bp, Homo sapiens
agaataatacagcag

SEQ ID NO: 1796960 - DNA, 15 bp, Homo sapiens
gaataatacagcaga

SEQ ID NO: 1796961 - DNA, 15 bp, Homo sapiens
aataatacagcagaa

SEQ ID NO: 1796962 - DNA, 15 bp, Homo sapiens
ataatacagcagaat

SEQ ID NO: 1796963 - DNA, 15 bp, Homo sapiens
taatacagcagaatg

SEQ ID NO: 1796964 - DNA, 15 bp, Homo sapiens
aatacagcagaatgg

SEQ ID NO: 1796965 - DNA, 15 bp, Homo sapiens
atacagcagaatggc

SEQ ID NO: 1796966 - DNA, 15 bp, Homo sapiens
tacagcagaatggct

SEQ ID NO: 1796967 - DNA, 15 bp, Homo sapiens
acagcagaatggctg

SEQ ID NO: 1796968 - DNA, 15 bp, Homo sapiens
cagcagaatggctga

SEQ ID NO: 1796969 - DNA, 15 bp, Homo sapiens
agcagaatggctgag

SEQ ID NO: 1796970 - DNA, 15 bp, Homo sapiens
gcagaatggctgaga

SEQ ID NO: 1796971 - DNA, 15 bp, Homo sapiens
cagaatggctgagaa

SEQ ID NO: 1796972 - DNA, 15 bp, Homo sapiens
agaatggctgagaac

SEQ ID NO: 1796973 - DNA, 15 bp, Homo sapiens
gaatggctgagaaca

SEQ ID NO: 1796974 - DNA, 15 bp, Homo sapiens
aatggctgagaacac

SEQ ID NO: 1796975 - DNA, 15 bp, Homo sapiens
atggctgagaacaca

SEQ ID NO: 1796976 - DNA, 15 bp, Homo sapiens
tggctgagaacacag

SEQ ID NO: 1796977 - DNA, 15 bp, Homo sapiens
ggctgagaacacagg

SEQ ID NO: 1796978 - DNA, 15 bp, Homo sapiens
gctgagaacacaggt

SEQ ID NO: 1796979 - DNA, 15 bp, Homo sapiens
ctgagaacacaggtt

SEQ ID NO: 1796980 - DNA, 15 bp, Homo sapiens
tgagaacacaggttc

SEQ ID NO: 1796981 - DNA, 15 bp, Homo sapiens
gagaacacaggttct

SEQ ID NO: 1796982 - DNA, 15 bp, Homo sapiens
agaacacaggttctg

SEQ ID NO: 1796983 - DNA, 15 bp, Homo sapiens
gaacacaggttctgg

SEQ ID NO: 1796984 - DNA, 15 bp, Homo sapiens
aacacaggttctggg

SEQ ID NO: 1796985 - DNA, 15 bp, Homo sapiens
acacaggttctgggt

SEQ ID NO: 1796986 - DNA, 15 bp, Homo sapiens
cacaggttctgggtc

SEQ ID NO: 1796987 - DNA, 15 bp, Homo sapiens
acaggttctgggtca

SEQ ID NO: 1796988 - DNA, 15 bp, Homo sapiens
caggttctgggtcag

SEQ ID NO: 1796989 - DNA, 15 bp, Homo sapiens
aggttctgggtcaga

SEQ ID NO: 1796990 - DNA, 15 bp, Homo sapiens
ggttctgggtcagac

SEQ ID NO: 1796991 - DNA, 15 bp, Homo sapiens
gttctgggtcagaca

SEQ ID NO: 1796992 - DNA, 15 bp, Homo sapiens
ttctgggtcagacag

SEQ ID NO: 1796993 - DNA, 15 bp, Homo sapiens
tctgggtcagacaga

SEQ ID NO: 1796994 - DNA, 15 bp, Homo sapiens
ctgggtcagacagac

SEQ ID NO: 1796995 - DNA, 15 bp, Homo sapiens
tgggtcagacagacc

SEQ ID NO: 1796996 - DNA, 15 bp, Homo sapiens
gggtcagacagacct

SEQ ID NO: 1796997 - DNA, 15 bp, Homo sapiens
ggtcagacagacctg

SEQ ID NO: 1796998 - DNA, 15 bp, Homo sapiens
gtcagacagacctgg

SEQ ID NO: 1796999 - DNA, 15 bp, Homo sapiens
tcagacagacctggg

SEQ ID NO: 1797000 - DNA, 15 bp, Homo sapiens
cagacagacctgggc

SEQ ID NO: 1797001 - DNA, 15 bp, Homo sapiens
agacagacctgggct

SEQ ID NO: 1797002 - DNA, 15 bp, Homo sapiens
gacagacctgggctc

SEQ ID NO: 1797003 - DNA, 15 bp, Homo sapiens
acagacctgggctca

SEQ ID NO: 1797004 - DNA, 15 bp, Homo sapiens
cagacctgggctcaa

SEQ ID NO: 1797005 - DNA, 15 bp, Homo sapiens
agacctgggctcaaa

SEQ ID NO: 1797006 - DNA, 15 bp, Homo sapiens
gacctgggctcaaat

SEQ ID NO: 1797007 - DNA, 15 bp, Homo sapiens
acctgggctcaaatc

SEQ ID NO: 1797008 - DNA, 15 bp, Homo sapiens
cctgggctcaaatcc

SEQ ID NO: 1797009 - DNA, 15 bp, Homo sapiens
ctgggctcaaatcct

SEQ ID NO: 1797010 - DNA, 15 bp, Homo sapiens
tgggctcaaatcctg

SEQ ID NO: 1797011 - DNA, 15 bp, Homo sapiens
gggctcaaatcctgg

SEQ ID NO: 1797012 - DNA, 15 bp, Homo sapiens
ggctcaaatcctggc

SEQ ID NO: 1797013 - DNA, 15 bp, Homo sapiens
gctcaaatcctggct

SEQ ID NO: 1797014 - DNA, 15 bp, Homo sapiens
ctcaaatcctggctc

SEQ ID NO: 1797015 - DNA, 15 bp, Homo sapiens
tcaaatcctggctcc

SEQ ID NO: 1797016 - DNA, 15 bp, Homo sapiens
caaatcctggctcct

SEQ ID NO: 1797017 - DNA, 15 bp, Homo sapiens
aaatcctggctcctc

SEQ ID NO: 1797018 - DNA, 15 bp, Homo sapiens
aatcctggctcctcc

SEQ ID NO: 1797019 - DNA, 15 bp, Homo sapiens
atcctggctcctcca

SEQ ID NO: 1797020 - DNA, 15 bp, Homo sapiens
tcctggctcctccat

SEQ ID NO: 1797021 - DNA, 15 bp, Homo sapiens
cctggctcctccatt

SEQ ID NO: 1797022 - DNA, 15 bp, Homo sapiens
ctggctcctccattt

SEQ ID NO: 1797023 - DNA, 15 bp, Homo sapiens
tggctcctccatttg

SEQ ID NO: 1797024 - DNA, 15 bp, Homo sapiens
ggctcctccatttgc

SEQ ID NO: 1797025 - DNA, 15 bp, Homo sapiens
gctcctccatttgct

SEQ ID NO: 1797026 - DNA, 15 bp, Homo sapiens
ctcctccatttgctg

SEQ ID NO: 1797027 - DNA, 15 bp, Homo sapiens
tcctccatttgctgg

SEQ ID NO: 1797028 - DNA, 15 bp, Homo sapiens
cctccatttgctggc

SEQ ID NO: 1797029 - DNA, 15 bp, Homo sapiens
ctccatttgctggct

SEQ ID NO: 1797030 - DNA, 15 bp, Homo sapiens
tccatttgctggctt

SEQ ID NO: 1797031 - DNA, 15 bp, Homo sapiens
ccatttgctggcttg

SEQ ID NO: 1797032 - DNA, 15 bp, Homo sapiens
catttgctggcttga

SEQ ID NO: 1797033 - DNA, 15 bp, Homo sapiens
atttgctggcttgag

SEQ ID NO: 1797034 - DNA, 15 bp, Homo sapiens
tttgctggcttgagg

SEQ ID NO: 1797035 - DNA, 15 bp, Homo sapiens
ttgctggcttgaggg

SEQ ID NO: 1797036 - DNA, 15 bp, Homo sapiens
tgctggcttgagggt

SEQ ID NO: 1797037 - DNA, 15 bp, Homo sapiens
gctggcttgagggta

SEQ ID NO: 1797038 - DNA, 15 bp, Homo sapiens
ctggcttgagggtag

SEQ ID NO: 1797039 - DNA, 15 bp, Homo sapiens
tggcttgagggtagg

SEQ ID NO: 1797040 - DNA, 15 bp, Homo sapiens
ggcttgagggtaggt

SEQ ID NO: 1797041 - DNA, 15 bp, Homo sapiens
gcttgagggtaggtg

SEQ ID NO: 1797042 - DNA, 15 bp, Homo sapiens
cttgagggtaggtgc

SEQ ID NO: 1797043 - DNA, 15 bp, Homo sapiens
ttgagggtaggtgct

SEQ ID NO: 1797044 - DNA, 15 bp, Homo sapiens
tgagggtaggtgctg

SEQ ID NO: 1797045 - DNA, 15 bp, Homo sapiens
gagggtaggtgctgt

SEQ ID NO: 1797046 - DNA, 15 bp, Homo sapiens
agggtaggtgctgtt

SEQ ID NO: 1797047 - DNA, 15 bp, Homo sapiens
gggtaggtgctgttg

SEQ ID NO: 1797048 - DNA, 15 bp, Homo sapiens
ggtaggtgctgttgt

SEQ ID NO: 1797049 - DNA, 15 bp, Homo sapiens
gtaggtgctgttgtt

SEQ ID NO: 1797050 - DNA, 15 bp, Homo sapiens
taggtgctgttgtta

SEQ ID NO: 1797051 - DNA, 15 bp, Homo sapiens
aggtgctgttgttaa

SEQ ID NO: 1797052 - DNA, 15 bp, Homo sapiens
ggtgctgttgttaag

SEQ ID NO: 1797053 - DNA, 15 bp, Homo sapiens
gtgctgttgttaaga

SEQ ID NO: 1797054 - DNA, 15 bp, Homo sapiens
tgctgttgttaagag

SEQ ID NO: 1797055 - DNA, 15 bp, Homo sapiens
gctgttgttaagagt

SEQ ID NO: 1797056 - DNA, 15 bp, Homo sapiens
ctgttgttaagagtc

SEQ ID NO: 1797057 - DNA, 15 bp, Homo sapiens
tgttgttaagagtca

SEQ ID NO: 1797058 - DNA, 15 bp, Homo sapiens
gttgttaagagtcat

SEQ ID NO: 1797059 - DNA, 15 bp, Homo sapiens
ttgttaagagtcatg

SEQ ID NO: 1797060 - DNA, 15 bp, Homo sapiens
tgttaagagtcatga

SEQ ID NO: 1797061 - DNA, 15 bp, Homo sapiens
gttaagagtcatgag

SEQ ID NO: 1797062 - DNA, 15 bp, Homo sapiens
ttaagagtcatgagt

SEQ ID NO: 1797063 - DNA, 15 bp, Homo sapiens
taagagtcatgagtg

SEQ ID NO: 1797064 - DNA, 15 bp, Homo sapiens
aagagtcatgagtgc

SEQ ID NO: 1797065 - DNA, 15 bp, Homo sapiens
agagtcatgagtgcg

SEQ ID NO: 1797066 - DNA, 15 bp, Homo sapiens
gagtcatgagtgcgc

SEQ ID NO: 1797067 - DNA, 15 bp, Homo sapiens
agtcatgagtgcgcc

SEQ ID NO: 1797068 - DNA, 15 bp, Homo sapiens
gtcatgagtgcgcct

SEQ ID NO: 1797069 - DNA, 15 bp, Homo sapiens
tcatgagtgcgcctc

SEQ ID NO: 1797070 - DNA, 15 bp, Homo sapiens
catgagtgcgcctct

SEQ ID NO: 1797071 - DNA, 15 bp, Homo sapiens
atgagtgcgcctctt

SEQ ID NO: 1797072 - DNA, 15 bp, Homo sapiens
tgagtgcgcctcttg

SEQ ID NO: 1797073 - DNA, 15 bp, Homo sapiens
gagtgcgcctcttgt

SEQ ID NO: 1797074 - DNA, 15 bp, Homo sapiens
agtgcgcctcttgtc

SEQ ID NO: 1797075 - DNA, 15 bp, Homo sapiens
gtgcgcctcttgtcc

SEQ ID NO: 1797076 - DNA, 15 bp, Homo sapiens
tgcgcctcttgtcca

SEQ ID NO: 1797077 - DNA, 15 bp, Homo sapiens
gcgcctcttgtccac

SEQ ID NO: 1797078 - DNA, 15 bp, Homo sapiens
cgcctcttgtccacc

SEQ ID NO: 1797079 - DNA, 15 bp, Homo sapiens
gcctcttgtccaccc

SEQ ID NO: 1797080 - DNA, 15 bp, Homo sapiens
cctcttgtccacccg

SEQ ID NO: 1797081 - DNA, 15 bp, Homo sapiens
ctcttgtccacccga

SEQ ID NO: 1797082 - DNA, 15 bp, Homo sapiens
tcttgtccacccgag

SEQ ID NO: 1797083 - DNA, 15 bp, Homo sapiens
cttgtccacccgagg

SEQ ID NO: 1797084 - DNA, 15 bp, Homo sapiens
ttgtccacccgaggc

SEQ ID NO: 1797085 - DNA, 15 bp, Homo sapiens
tgtccacccgaggct

SEQ ID NO: 1797086 - DNA, 15 bp, Homo sapiens
gtccacccgaggctg

SEQ ID NO: 1797087 - DNA, 15 bp, Homo sapiens
tccacccgaggctgt

SEQ ID NO: 1797088 - DNA, 15 bp, Homo sapiens
ccacccgaggctgtg

SEQ ID NO: 1797089 - DNA, 15 bp, Homo sapiens
cacccgaggctgtgg

SEQ ID NO: 1797090 - DNA, 15 bp, Homo sapiens
acccgaggctgtggc

SEQ ID NO: 1797091 - DNA, 15 bp, Homo sapiens
cccgaggctgtggcc

SEQ ID NO: 1797092 - DNA, 15 bp, Homo sapiens
ccgaggctgtggcca

SEQ ID NO: 1797093 - DNA, 15 bp, Homo sapiens
cgaggctgtggccag

SEQ ID NO: 1797094 - DNA, 15 bp, Homo sapiens
gaggctgtggccaga

SEQ ID NO: 1797095 - DNA, 15 bp, Homo sapiens
aggctgtggccagag

SEQ ID NO: 1797096 - DNA, 15 bp, Homo sapiens
ggctgtggccagagc

SEQ ID NO: 1797097 - DNA, 15 bp, Homo sapiens
gctgtggccagagca

SEQ ID NO: 1797098 - DNA, 15 bp, Homo sapiens
ctgtggccagagcat

SEQ ID NO: 1797099 - DNA, 15 bp, Homo sapiens
tgtggccagagcatc

SEQ ID NO: 1797100 - DNA, 15 bp, Homo sapiens
gtggccagagcatct

SEQ ID NO: 1797101 - DNA, 15 bp, Homo sapiens
tggccagagcatctg

SEQ ID NO: 1797102 - DNA, 15 bp, Homo sapiens
ggccagagcatctga

SEQ ID NO: 1797103 - DNA, 15 bp, Homo sapiens
gccagagcatctgac

SEQ ID NO: 1797104 - DNA, 15 bp, Homo sapiens
ccagagcatctgact

SEQ ID NO: 1797105 - DNA, 15 bp, Homo sapiens
cagagcatctgactt

SEQ ID NO: 1797106 - DNA, 15 bp, Homo sapiens
agagcatctgacttt

SEQ ID NO: 1797107 - DNA, 15 bp, Homo sapiens
gagcatctgactttg

SEQ ID NO: 1797108 - DNA, 15 bp, Homo sapiens
agcatctgactttgg

SEQ ID NO: 1797109 - DNA, 15 bp, Homo sapiens
gcatctgactttggc

SEQ ID NO: 1797110 - DNA, 15 bp, Homo sapiens
catctgactttggct

SEQ ID NO: 1797111 - DNA, 15 bp, Homo sapiens
atctgactttggcta

SEQ ID NO: 1797112 - DNA, 15 bp, Homo sapiens
tctgactttggctaa

SEQ ID NO: 1797113 - DNA, 15 bp, Homo sapiens
ctgactttggctaac

SEQ ID NO: 1797114 - DNA, 15 bp, Homo sapiens
tgactttggctaaca

SEQ ID NO: 1797115 - DNA, 15 bp, Homo sapiens
gactttggctaacac

SEQ ID NO: 1797116 - DNA, 15 bp, Homo sapiens
actttggctaacacc

SEQ ID NO: 1797117 - DNA, 15 bp, Homo sapiens
ctttggctaacacct

SEQ ID NO: 1797118 - DNA, 15 bp, Homo sapiens
tttggctaacacctg

SEQ ID NO: 1797119 - DNA, 15 bp, Homo sapiens
ttggctaacacctgg

SEQ ID NO: 1797120 - DNA, 15 bp, Homo sapiens
tggctaacacctgga

SEQ ID NO: 1797121 - DNA, 15 bp, Homo sapiens
ggctaacacctggac

SEQ ID NO: 1797122 - DNA, 15 bp, Homo sapiens
gctaacacctggacg

SEQ ID NO: 1797123 - DNA, 15 bp, Homo sapiens
ctaacacctggacgg

SEQ ID NO: 1797124 - DNA, 15 bp, Homo sapiens
taacacctggacgga

SEQ ID NO: 1797125 - DNA, 15 bp, Homo sapiens
aacacctggacggag

SEQ ID NO: 1797126 - DNA, 15 bp, Homo sapiens
acacctggacggaga

SEQ ID NO: 1797127 - DNA, 15 bp, Homo sapiens
cacctggacggagag

SEQ ID NO: 1797128 - DNA, 15 bp, Homo sapiens
acctggacggagaga

SEQ ID NO: 1797129 - DNA, 15 bp, Homo sapiens
cctggacggagagat

SEQ ID NO: 1797130 - DNA, 15 bp, Homo sapiens
ctggacggagagatc

SEQ ID NO: 1797131 - DNA, 15 bp, Homo sapiens
tggacggagagatca

SEQ ID NO: 1797132 - DNA, 15 bp, Homo sapiens
ggacggagagatcag

SEQ ID NO: 1797133 - DNA, 15 bp, Homo sapiens
gacggagagatcagc

SEQ ID NO: 1797134 - DNA, 15 bp, Homo sapiens
acggagagatcagca

SEQ ID NO: 1797135 - DNA, 15 bp, Homo sapiens
cggagagatcagcaa

SEQ ID NO: 1797136 - DNA, 15 bp, Homo sapiens
ggagagatcagcaaa

SEQ ID NO: 1797137 - DNA, 15 bp, Homo sapiens
gagagatcagcaaac

SEQ ID NO: 1797138 - DNA, 15 bp, Homo sapiens
agagatcagcaaaca

SEQ ID NO: 1797139 - DNA, 15 bp, Homo sapiens
gagatcagcaaacag

SEQ ID NO: 1797140 - DNA, 15 bp, Homo sapiens
agatcagcaaacagc

SEQ ID NO: 1797141 - DNA, 15 bp, Homo sapiens
gatcagcaaacagct

SEQ ID NO: 1797142 - DNA, 15 bp, Homo sapiens
atcagcaaacagctc

SEQ ID NO: 1797143 - DNA, 15 bp, Homo sapiens
tcagcaaacagctcc

SEQ ID NO: 1797144 - DNA, 15 bp, Homo sapiens
cagcaaacagctcca

SEQ ID NO: 1797145 - DNA, 15 bp, Homo sapiens
agcaaacagctccag

SEQ ID NO: 1797146 - DNA, 15 bp, Homo sapiens
gcaaacagctccagc

SEQ ID NO: 1797147 - DNA, 15 bp, Homo sapiens
caaacagctccagca

SEQ ID NO: 1797148 - DNA, 15 bp, Homo sapiens
aaacagctccagcat

SEQ ID NO: 1797149 - DNA, 15 bp, Homo sapiens
aacagctccagcatg

SEQ ID NO: 1797150 - DNA, 15 bp, Homo sapiens
acagctccagcatgt

SEQ ID NO: 1797151 - DNA, 15 bp, Homo sapiens
cagctccagcatgta

SEQ ID NO: 1797152 - DNA, 15 bp, Homo sapiens
agctccagcatgtaa

SEQ ID NO: 1797153 - DNA, 15 bp, Homo sapiens
gctccagcatgtaat

SEQ ID NO: 1797154 - DNA, 15 bp, Homo sapiens
ctccagcatgtaatg

SEQ ID NO: 1797155 - DNA, 15 bp, Homo sapiens
tccagcatgtaatgt

SEQ ID NO: 1797156 - DNA, 15 bp, Homo sapiens
ccagcatgtaatgtt

SEQ ID NO: 1797157 - DNA, 15 bp, Homo sapiens
cagcatgtaatgttc

SEQ ID NO: 1797158 - DNA, 15 bp, Homo sapiens
agcatgtaatgttct

SEQ ID NO: 1797159 - DNA, 15 bp, Homo sapiens
gcatgtaatgttctt

SEQ ID NO: 1797160 - DNA, 15 bp, Homo sapiens
catgtaatgttcttt

SEQ ID NO: 1797161 - DNA, 15 bp, Homo sapiens
atgtaatgttctttt

SEQ ID NO: 1797162 - DNA, 15 bp, Homo sapiens
tgtaatgttcttttc

SEQ ID NO: 1797163 - DNA, 15 bp, Homo sapiens
gtaatgttcttttca

SEQ ID NO: 1797164 - DNA, 15 bp, Homo sapiens
taatgttcttttcag

SEQ ID NO: 1797165 - DNA, 15 bp, Homo sapiens
aatgttcttttcaga

SEQ ID NO: 1797166 - DNA, 15 bp, Homo sapiens
atgttcttttcagac

SEQ ID NO: 1797167 - DNA, 15 bp, Homo sapiens
tgttcttttcagact

SEQ ID NO: 1797168 - DNA, 15 bp, Homo sapiens
gttcttttcagactc

SEQ ID NO: 1797169 - DNA, 15 bp, Homo sapiens
ttcttttcagactcc

SEQ ID NO: 1797170 - DNA, 15 bp, Homo sapiens
tcttttcagactcct

SEQ ID NO: 1797171 - DNA, 15 bp, Homo sapiens
cttttcagactcctc

SEQ ID NO: 1797172 - DNA, 15 bp, Homo sapiens
ttttcagactcctcc

SEQ ID NO: 1797173 - DNA, 15 bp, Homo sapiens
tttcagactcctcca

SEQ ID NO: 1797174 - DNA, 15 bp, Homo sapiens
ttcagactcctccag

SEQ ID NO: 1797175 - DNA, 15 bp, Homo sapiens
tcagactcctccagc

SEQ ID NO: 1797176 - DNA, 15 bp, Homo sapiens
cagactcctccagcc

SEQ ID NO: 1797177 - DNA, 15 bp, Homo sapiens
agactcctccagcca

SEQ ID NO: 1797178 - DNA, 15 bp, Homo sapiens
gactcctccagccat

SEQ ID NO: 1797179 - DNA, 15 bp, Homo sapiens
actcctccagccatg

SEQ ID NO: 1797180 - DNA, 15 bp, Homo sapiens
ctcctccagccatga

SEQ ID NO: 1797181 - DNA, 15 bp, Homo sapiens
tcctccagccatgag

SEQ ID NO: 1797182 - DNA, 15 bp, Homo sapiens
cctccagccatgagg

SEQ ID NO: 1797183 - DNA, 15 bp, Homo sapiens
ctccagccatgaggg

SEQ ID NO: 1797184 - DNA, 15 bp, Homo sapiens
tccagccatgagggg

SEQ ID NO: 1797185 - DNA, 15 bp, Homo sapiens
ccagccatgaggggc

SEQ ID NO: 1797186 - DNA, 15 bp, Homo sapiens
cagccatgaggggca

SEQ ID NO: 1797187 - DNA, 15 bp, Homo sapiens
agccatgaggggcat

SEQ ID NO: 1797188 - DNA, 15 bp, Homo sapiens
gccatgaggggcatt

SEQ ID NO: 1797189 - DNA, 15 bp, Homo sapiens
ccatgaggggcattg

SEQ ID NO: 1797190 - DNA, 15 bp, Homo sapiens
catgaggggcattgg

SEQ ID NO: 1797191 - DNA, 15 bp, Homo sapiens
atgaggggcattggt

SEQ ID NO: 1797192 - DNA, 15 bp, Homo sapiens
tgaggggcattggtt

SEQ ID NO: 1797193 - DNA, 15 bp, Homo sapiens
gaggggcattggttc

SEQ ID NO: 1797194 - DNA, 15 bp, Homo sapiens
aggggcattggttca

SEQ ID NO: 1797195 - DNA, 15 bp, Homo sapiens
ggggcattggttcag

SEQ ID NO: 1797196 - DNA, 15 bp, Homo sapiens
gggcattggttcagg

SEQ ID NO: 1797197 - DNA, 15 bp, Homo sapiens
ggcattggttcaggt

SEQ ID NO: 1797198 - DNA, 15 bp, Homo sapiens
gcattggttcaggtt

SEQ ID NO: 1797199 - DNA, 15 bp, Homo sapiens
cattggttcaggttg

SEQ ID NO: 1797200 - DNA, 15 bp, Homo sapiens
attggttcaggttgt

SEQ ID NO: 1797201 - DNA, 15 bp, Homo sapiens
ttggttcaggttgtt

SEQ ID NO: 1797202 - DNA, 15 bp, Homo sapiens
tggttcaggttgttc

SEQ ID NO: 1797203 - DNA, 15 bp, Homo sapiens
ggttcaggttgttcc

SEQ ID NO: 1797204 - DNA, 15 bp, Homo sapiens
gttcaggttgttcct

SEQ ID NO: 1797205 - DNA, 15 bp, Homo sapiens
ttcaggttgttcctc

SEQ ID NO: 1797206 - DNA, 15 bp, Homo sapiens
tcaggttgttcctcc

SEQ ID NO: 1797207 - DNA, 15 bp, Homo sapiens
caggttgttcctcca

SEQ ID NO: 1797208 - DNA, 15 bp, Homo sapiens
aggttgttcctccac

SEQ ID NO: 1797209 - DNA, 15 bp, Homo sapiens
ggttgttcctccaca

SEQ ID NO: 1797210 - DNA, 15 bp, Homo sapiens
gttgttcctccacaa

SEQ ID NO: 1797211 - DNA, 15 bp, Homo sapiens
ttgttcctccacaat

SEQ ID NO: 1797212 - DNA, 15 bp, Homo sapiens
tgttcctccacaatc

SEQ ID NO: 1797213 - DNA, 15 bp, Homo sapiens
gttcctccacaatca

SEQ ID NO: 1797214 - DNA, 15 bp, Homo sapiens
ttcctccacaatcac

SEQ ID NO: 1797215 - DNA, 15 bp, Homo sapiens
tcctccacaatcaca

SEQ ID NO: 1797216 - DNA, 15 bp, Homo sapiens
cctccacaatcacat

SEQ ID NO: 1797217 - DNA, 15 bp, Homo sapiens
ctccacaatcacatt

SEQ ID NO: 1797218 - DNA, 15 bp, Homo sapiens
tccacaatcacattc

SEQ ID NO: 1797219 - DNA, 15 bp, Homo sapiens
ccacaatcacattct

SEQ ID NO: 1797220 - DNA, 15 bp, Homo sapiens
cacaatcacattctg

SEQ ID NO: 1797221 - DNA, 15 bp, Homo sapiens
acaatcacattctga

SEQ ID NO: 1797222 - DNA, 15 bp, Homo sapiens
caatcacattctgat

SEQ ID NO: 1797223 - DNA, 15 bp, Homo sapiens
aatcacattctgatt

SEQ ID NO: 1797224 - DNA, 15 bp, Homo sapiens
atcacattctgatta

SEQ ID NO: 1797225 - DNA, 15 bp, Homo sapiens
tcacattctgattat

SEQ ID NO: 1797226 - DNA, 15 bp, Homo sapiens
cacattctgattatg

SEQ ID NO: 1797227 - DNA, 15 bp, Homo sapiens
acattctgattatgg

SEQ ID NO: 1797228 - DNA, 15 bp, Homo sapiens
cattctgattatggc

SEQ ID NO: 1797229 - DNA, 15 bp, Homo sapiens
attctgattatggcc

SEQ ID NO: 1797230 - DNA, 15 bp, Homo sapiens
ttctgattatggcca

SEQ ID NO: 1797231 - DNA, 15 bp, Homo sapiens
tctgattatggccag

SEQ ID NO: 1797232 - DNA, 15 bp, Homo sapiens
ctgattatggccaga

SEQ ID NO: 1797233 - DNA, 15 bp, Homo sapiens
tgattatggccagac

SEQ ID NO: 1797234 - DNA, 15 bp, Homo sapiens
gattatggccagaca

SEQ ID NO: 1797235 - DNA, 15 bp, Homo sapiens
attatggccagacag

SEQ ID NO: 1797236 - DNA, 15 bp, Homo sapiens
ttatggccagacagc

SEQ ID NO: 1797237 - DNA, 15 bp, Homo sapiens
tatggccagacagcc

SEQ ID NO: 1797238 - DNA, 15 bp, Homo sapiens
atggccagacagccc

SEQ ID NO: 1797239 - DNA, 15 bp, Homo sapiens
tggccagacagcccc

SEQ ID NO: 1797240 - DNA, 15 bp, Homo sapiens
ggccagacagcccct

SEQ ID NO: 1797241 - DNA, 15 bp, Homo sapiens
gccagacagcccctg

SEQ ID NO: 1797242 - DNA, 15 bp, Homo sapiens
ccagacagcccctgc

SEQ ID NO: 1797243 - DNA, 15 bp, Homo sapiens
cagacagcccctgcc

SEQ ID NO: 1797244 - DNA, 15 bp, Homo sapiens
agacagcccctgcca

SEQ ID NO: 1797245 - DNA, 15 bp, Homo sapiens
gacagcccctgccac

SEQ ID NO: 1797246 - DNA, 15 bp, Homo sapiens
acagcccctgccaca

SEQ ID NO: 1797247 - DNA, 15 bp, Homo sapiens
cagcccctgccacac

SEQ ID NO: 1797248 - DNA, 15 bp, Homo sapiens
agcccctgccacact

SEQ ID NO: 1797249 - DNA, 15 bp, Homo sapiens
gcccctgccacactc

SEQ ID NO: 1797250 - DNA, 15 bp, Homo sapiens
cccctgccacactct

SEQ ID NO: 1797251 - DNA, 15 bp, Homo sapiens
ccctgccacactctc

SEQ ID NO: 1797252 - DNA, 15 bp, Homo sapiens
cctgccacactctca

SEQ ID NO: 1797253 - DNA, 15 bp, Homo sapiens
ctgccacactctcac

SEQ ID NO: 1797254 - DNA, 15 bp, Homo sapiens
tgccacactctcacc

SEQ ID NO: 1797255 - DNA, 15 bp, Homo sapiens
ccacactctcacctc

SEQ ID NO: 1797256 - DNA, 15 bp, Homo sapiens
cacactctcacctct

SEQ ID NO: 1797257 - DNA, 15 bp, Homo sapiens
acactctcacctctc

SEQ ID NO: 1797258 - DNA, 15 bp, Homo sapiens
actctcacctctcag

SEQ ID NO: 1797259 - DNA, 15 bp, Homo sapiens
ctctcacctctcaga

SEQ ID NO: 1797260 - DNA, 15 bp, Homo sapiens
tctcacctctcagac

SEQ ID NO: 1797261 - DNA, 15 bp, Homo sapiens
ctcacctctcagaca

SEQ ID NO: 1797262 - DNA, 15 bp, Homo sapiens
tcacctctcagacag

SEQ ID NO: 1797263 - DNA, 15 bp, Homo sapiens
cacctctcagacagc

SEQ ID NO: 1797264 - DNA, 15 bp, Homo sapiens
acctctcagacagcc

SEQ ID NO: 1797265 - DNA, 15 bp, Homo sapiens
cctctcagacagcct

SEQ ID NO: 1797266 - DNA, 15 bp, Homo sapiens
ctctcagacagcctc

SEQ ID NO: 1797267 - DNA, 15 bp, Homo sapiens
tctcagacagcctct

SEQ ID NO: 1797268 - DNA, 15 bp, Homo sapiens
ctcagacagcctctc

SEQ ID NO: 1797269 - DNA, 15 bp, Homo sapiens
tcagacagcctctcc

SEQ ID NO: 1797270 - DNA, 15 bp, Homo sapiens
cagacagcctctcca

SEQ ID NO: 1797271 - DNA, 15 bp, Homo sapiens
agacagcctctccag

SEQ ID NO: 1797272 - DNA, 15 bp, Homo sapiens
gacagcctctccagt

SEQ ID NO: 1797273 - DNA, 15 bp, Homo sapiens
acagcctctccagtg

SEQ ID NO: 1797274 - DNA, 15 bp, Homo sapiens
cagcctctccagtgt

SEQ ID NO: 1797275 - DNA, 15 bp, Homo sapiens
agcctctccagtgtc

SEQ ID NO: 1797276 - DNA, 15 bp, Homo sapiens
gcctctccagtgtct

SEQ ID NO: 1797277 - DNA, 15 bp, Homo sapiens
cctctccagtgtctt

SEQ ID NO: 1797278 - DNA, 15 bp, Homo sapiens
ctctccagtgtctta

SEQ ID NO: 1797279 - DNA, 15 bp, Homo sapiens
tctccagtgtcttac

SEQ ID NO: 1797280 - DNA, 15 bp, Homo sapiens
ctccagtgtcttact

SEQ ID NO: 1797281 - DNA, 15 bp, Homo sapiens
tccagtgtcttactt

SEQ ID NO: 1797282 - DNA, 15 bp, Homo sapiens
ccagtgtcttactta

SEQ ID NO: 1797283 - DNA, 15 bp, Homo sapiens
cagtgtcttacttag

SEQ ID NO: 1797284 - DNA, 15 bp, Homo sapiens
agtgtcttacttagc

SEQ ID NO: 1797285 - DNA, 15 bp, Homo sapiens
gtgtcttacttagca

SEQ ID NO: 1797286 - DNA, 15 bp, Homo sapiens
tgtcttacttagcac

SEQ ID NO: 1797287 - DNA, 15 bp, Homo sapiens
gtcttacttagcaca

SEQ ID NO: 1797288 - DNA, 15 bp, Homo sapiens
tcttacttagcacaa

SEQ ID NO: 1797289 - DNA, 15 bp, Homo sapiens
cttacttagcacaac

SEQ ID NO: 1797290 - DNA, 15 bp, Homo sapiens
ttacttagcacaact

SEQ ID NO: 1797291 - DNA, 15 bp, Homo sapiens
tacttagcacaactt

SEQ ID NO: 1797292 - DNA, 15 bp, Homo sapiens
acttagcacaacttt

SEQ ID NO: 1797293 - DNA, 15 bp, Homo sapiens
cttagcacaactttc

SEQ ID NO: 1797294 - DNA, 15 bp, Homo sapiens
ttagcacaactttca

SEQ ID NO: 1797295 - DNA, 15 bp, Homo sapiens
tagcacaactttcac

SEQ ID NO: 1797296 - DNA, 15 bp, Homo sapiens
agcacaactttcact

SEQ ID NO: 1797297 - DNA, 15 bp, Homo sapiens
gcacaactttcactc

SEQ ID NO: 1797298 - DNA, 15 bp, Homo sapiens
cacaactttcactca

SEQ ID NO: 1797299 - DNA, 15 bp, Homo sapiens
acaactttcactcat

SEQ ID NO: 1797300 - DNA, 15 bp, Homo sapiens
caactttcactcatc

SEQ ID NO: 1797301 - DNA, 15 bp, Homo sapiens
aactttcactcatct

SEQ ID NO: 1797302 - DNA, 15 bp, Homo sapiens
actttcactcatctg

SEQ ID NO: 1797303 - DNA, 15 bp, Homo sapiens
ctttcactcatctgc

SEQ ID NO: 1797304 - DNA, 15 bp, Homo sapiens
tttcactcatctgca

SEQ ID NO: 1797305 - DNA, 15 bp, Homo sapiens
ttcactcatctgcaa

SEQ ID NO: 1797306 - DNA, 15 bp, Homo sapiens
tcactcatctgcaaa

SEQ ID NO: 1797307 - DNA, 15 bp, Homo sapiens
cactcatctgcaaag

SEQ ID NO: 1797308 - DNA, 15 bp, Homo sapiens
actcatctgcaaaga

SEQ ID NO: 1797309 - DNA, 15 bp, Homo sapiens
ctcatctgcaaagag

SEQ ID NO: 1797310 - DNA, 15 bp, Homo sapiens
tcatctgcaaagagc

SEQ ID NO: 1797311 - DNA, 15 bp, Homo sapiens
catctgcaaagagcc

SEQ ID NO: 1797312 - DNA, 15 bp, Homo sapiens
atctgcaaagagcca

SEQ ID NO: 1797313 - DNA, 15 bp, Homo sapiens
tctgcaaagagccag

SEQ ID NO: 1797314 - DNA, 15 bp, Homo sapiens
ctgcaaagagccagg

SEQ ID NO: 1797315 - DNA, 15 bp, Homo sapiens
tgcaaagagccaggt

SEQ ID NO: 1797316 - DNA, 15 bp, Homo sapiens
gcaaagagccaggtt

SEQ ID NO: 1797317 - DNA, 15 bp, Homo sapiens
caaagagccaggttc

SEQ ID NO: 1797318 - DNA, 15 bp, Homo sapiens
aaagagccaggttct

SEQ ID NO: 1797319 - DNA, 15 bp, Homo sapiens
aagagccaggttctt

SEQ ID NO: 1797320 - DNA, 15 bp, Homo sapiens
agagccaggttcttg

SEQ ID NO: 1797321 - DNA, 15 bp, Homo sapiens
gagccaggttcttgg

SEQ ID NO: 1797322 - DNA, 15 bp, Homo sapiens
agccaggttcttgga

SEQ ID NO: 1797323 - DNA, 15 bp, Homo sapiens
gccaggttcttggag

SEQ ID NO: 1797324 - DNA, 15 bp, Homo sapiens
ccaggttcttggagt

SEQ ID NO: 1797325 - DNA, 15 bp, Homo sapiens
caggttcttggagtg

SEQ ID NO: 1797326 - DNA, 15 bp, Homo sapiens
aggttcttggagtgc

SEQ ID NO: 1797327 - DNA, 15 bp, Homo sapiens
ggttcttggagtgcc

SEQ ID NO: 1797328 - DNA, 15 bp, Homo sapiens
gttcttggagtgcct

SEQ ID NO: 1797329 - DNA, 15 bp, Homo sapiens
ttcttggagtgcctc

SEQ ID NO: 1797330 - DNA, 15 bp, Homo sapiens
tcttggagtgcctca

SEQ ID NO: 1797331 - DNA, 15 bp, Homo sapiens
cttggagtgcctcaa

SEQ ID NO: 1797332 - DNA, 15 bp, Homo sapiens
ttggagtgcctcaaa

SEQ ID NO: 1797333 - DNA, 15 bp, Homo sapiens
tggagtgcctcaaat

SEQ ID NO: 1797334 - DNA, 15 bp, Homo sapiens
ggagtgcctcaaatt

SEQ ID NO: 1797335 - DNA, 15 bp, Homo sapiens
gagtgcctcaaattg

SEQ ID NO: 1797336 - DNA, 15 bp, Homo sapiens
agtgcctcaaattgt

SEQ ID NO: 1797337 - DNA, 15 bp, Homo sapiens
gtgcctcaaattgtc

SEQ ID NO: 1797338 - DNA, 15 bp, Homo sapiens
tgcctcaaattgtca

SEQ ID NO: 1797339 - DNA, 15 bp, Homo sapiens
gcctcaaattgtcat

SEQ ID NO: 1797340 - DNA, 15 bp, Homo sapiens
cctcaaattgtcatt

SEQ ID NO: 1797341 - DNA, 15 bp, Homo sapiens
ctcaaattgtcattt

SEQ ID NO: 1797342 - DNA, 15 bp, Homo sapiens
caaattgtcatttcc

SEQ ID NO: 1797343 - DNA, 15 bp, Homo sapiens
aaattgtcatttcca

SEQ ID NO: 1797344 - DNA, 15 bp, Homo sapiens
aattgtcatttccat

SEQ ID NO: 1797345 - DNA, 15 bp, Homo sapiens
attgtcatttccatg

SEQ ID NO: 1797346 - DNA, 15 bp, Homo sapiens
ttgtcatttccatgg

SEQ ID NO: 1797347 - DNA, 15 bp, Homo sapiens
tgtcatttccatggc

SEQ ID NO: 1797348 - DNA, 15 bp, Homo sapiens
gtcatttccatggcc

SEQ ID NO: 1797349 - DNA, 15 bp, Homo sapiens
tcatttccatggcca

SEQ ID NO: 1797350 - DNA, 15 bp, Homo sapiens
catttccatggccaa

SEQ ID NO: 1797351 - DNA, 15 bp, Homo sapiens
atttccatggccaaa

SEQ ID NO: 1797352 - DNA, 15 bp, Homo sapiens
tttccatggccaaat

SEQ ID NO: 1797353 - DNA, 15 bp, Homo sapiens
ttccatggccaaatt

SEQ ID NO: 1797354 - DNA, 15 bp, Homo sapiens
tccatggccaaattt

SEQ ID NO: 1797355 - DNA, 15 bp, Homo sapiens
ccatggccaaattta

SEQ ID NO: 1797356 - DNA, 15 bp, Homo sapiens
catggccaaatttaa

SEQ ID NO: 1797357 - DNA, 15 bp, Homo sapiens
atggccaaatttaaa

SEQ ID NO: 1797358 - DNA, 15 bp, Homo sapiens
tggccaaatttaaaa

SEQ ID NO: 1797359 - DNA, 15 bp, Homo sapiens
ggccaaatttaaaat

SEQ ID NO: 1797360 - DNA, 15 bp, Homo sapiens
gccaaatttaaaatg

SEQ ID NO: 1797361 - DNA, 15 bp, Homo sapiens
ccaaatttaaaatga

SEQ ID NO: 1797362 - DNA, 15 bp, Homo sapiens
caaatttaaaatgag

SEQ ID NO: 1797363 - DNA, 15 bp, Homo sapiens
aaatttaaaatgaga

SEQ ID NO: 1797364 - DNA, 15 bp, Homo sapiens
aatttaaaatgagag

SEQ ID NO: 1797365 - DNA, 15 bp, Homo sapiens
atttaaaatgagaga

SEQ ID NO: 1797366 - DNA, 15 bp, Homo sapiens
tttaaaatgagagaa

SEQ ID NO: 1797367 - DNA, 15 bp, Homo sapiens
ttaaaatgagagaat

SEQ ID NO: 1797368 - DNA, 15 bp, Homo sapiens
taaaatgagagaatg

SEQ ID NO: 1797369 - DNA, 15 bp, Homo sapiens
aaaatgagagaatgt

SEQ ID NO: 1797370 - DNA, 15 bp, Homo sapiens
aaatgagagaatgtc

SEQ ID NO: 1797371 - DNA, 15 bp, Homo sapiens
aatgagagaatgtct

SEQ ID NO: 1797372 - DNA, 15 bp, Homo sapiens
atgagagaatgtctg

SEQ ID NO: 1797373 - DNA, 15 bp, Homo sapiens
tgagagaatgtctga

SEQ ID NO: 1797374 - DNA, 15 bp, Homo sapiens
gagagaatgtctgag

SEQ ID NO: 1797375 - DNA, 15 bp, Homo sapiens
agagaatgtctgagc

SEQ ID NO: 1797376 - DNA, 15 bp, Homo sapiens
gagaatgtctgagct

SEQ ID NO: 1797377 - DNA, 15 bp, Homo sapiens
agaatgtctgagctg

SEQ ID NO: 1797378 - DNA, 15 bp, Homo sapiens
gaatgtctgagctga

SEQ ID NO: 1797379 - DNA, 15 bp, Homo sapiens
aatgtctgagctgaa

SEQ ID NO: 1797380 - DNA, 15 bp, Homo sapiens
atgtctgagctgaaa

SEQ ID NO: 1797381 - DNA, 15 bp, Homo sapiens
tgtctgagctgaaag

SEQ ID NO: 1797382 - DNA, 15 bp, Homo sapiens
gtctgagctgaaagg

SEQ ID NO: 1797383 - DNA, 15 bp, Homo sapiens
tctgagctgaaaggg

SEQ ID NO: 1797384 - DNA, 15 bp, Homo sapiens
ctgagctgaaagggg

SEQ ID NO: 1797385 - DNA, 15 bp, Homo sapiens
tgagctgaaaggggg

SEQ ID NO: 1797386 - DNA, 15 bp, Homo sapiens
gagctgaaagggggc

SEQ ID NO: 1797387 - DNA, 15 bp, Homo sapiens
agctgaaagggggct

SEQ ID NO: 1797388 - DNA, 15 bp, Homo sapiens
gctgaaagggggctt

SEQ ID NO: 1797389 - DNA, 15 bp, Homo sapiens
ctgaaagggggcttg

SEQ ID NO: 1797390 - DNA, 15 bp, Homo sapiens
tgaaagggggcttgg

SEQ ID NO: 1797391 - DNA, 15 bp, Homo sapiens
gaaagggggcttggg

SEQ ID NO: 1797392 - DNA, 15 bp, Homo sapiens
aaagggggcttgggg

SEQ ID NO: 1797393 - DNA, 15 bp, Homo sapiens
aagggggcttgggga

SEQ ID NO: 1797394 - DNA, 15 bp, Homo sapiens
agggggcttggggaa

SEQ ID NO: 1797395 - DNA, 15 bp, Homo sapiens
gggggcttggggaac

SEQ ID NO: 1797396 - DNA, 15 bp, Homo sapiens
ggggcttggggaaca

SEQ ID NO: 1797397 - DNA, 15 bp, Homo sapiens
gggcttggggaacag

SEQ ID NO: 1797398 - DNA, 15 bp, Homo sapiens
ggcttggggaacaga

SEQ ID NO: 1797399 - DNA, 15 bp, Homo sapiens
gcttggggaacagag

SEQ ID NO: 1797400 - DNA, 15 bp, Homo sapiens
cttggggaacagagg

SEQ ID NO: 1797401 - DNA, 15 bp, Homo sapiens
ttggggaacagaggt

SEQ ID NO: 1797402 - DNA, 15 bp, Homo sapiens
tggggaacagaggtc

SEQ ID NO: 1797403 - DNA, 15 bp, Homo sapiens
ggggaacagaggtca

SEQ ID NO: 1797404 - DNA, 15 bp, Homo sapiens
gggaacagaggtcat

SEQ ID NO: 1797405 - DNA, 15 bp, Homo sapiens
ggaacagaggtcatt

SEQ ID NO: 1797406 - DNA, 15 bp, Homo sapiens
gaacagaggtcattc

SEQ ID NO: 1797407 - DNA, 15 bp, Homo sapiens
aacagaggtcattct

SEQ ID NO: 1797408 - DNA, 15 bp, Homo sapiens
acagaggtcattctc

SEQ ID NO: 1797409 - DNA, 15 bp, Homo sapiens
cagaggtcattctca

SEQ ID NO: 1797410 - DNA, 15 bp, Homo sapiens
agaggtcattctcat

SEQ ID NO: 1797411 - DNA, 15 bp, Homo sapiens
gaggtcattctcatc

SEQ ID NO: 1797412 - DNA, 15 bp, Homo sapiens
aggtcattctcatca

SEQ ID NO: 1797413 - DNA, 15 bp, Homo sapiens
ggtcattctcatcat

SEQ ID NO: 1797414 - DNA, 15 bp, Homo sapiens
gtcattctcatcatg

SEQ ID NO: 1797415 - DNA, 15 bp, Homo sapiens
tcattctcatcatgt

SEQ ID NO: 1797416 - DNA, 15 bp, Homo sapiens
cattctcatcatgtt

SEQ ID NO: 1797417 - DNA, 15 bp, Homo sapiens
attctcatcatgttc

SEQ ID NO: 1797418 - DNA, 15 bp, Homo sapiens
ttctcatcatgttcc

SEQ ID NO: 1797419 - DNA, 15 bp, Homo sapiens
tctcatcatgttcca

SEQ ID NO: 1797420 - DNA, 15 bp, Homo sapiens
ctcatcatgttccac

SEQ ID NO: 1797421 - DNA, 15 bp, Homo sapiens
tcatcatgttccacc

SEQ ID NO: 1797422 - DNA, 15 bp, Homo sapiens
catcatgttccacct

SEQ ID NO: 1797423 - DNA, 15 bp, Homo sapiens
atcatgttccacctt

SEQ ID NO: 1797424 - DNA, 15 bp, Homo sapiens
tcatgttccaccttt

SEQ ID NO: 1797425 - DNA, 15 bp, Homo sapiens
catgttccacctttc

SEQ ID NO: 1797426 - DNA, 15 bp, Homo sapiens
atgttccacctttct

SEQ ID NO: 1797427 - DNA, 15 bp, Homo sapiens
tgttccacctttctt

SEQ ID NO: 1797428 - DNA, 15 bp, Homo sapiens
gttccacctttcttt

SEQ ID NO: 1797429 - DNA, 15 bp, Homo sapiens
ttccacctttctttc

SEQ ID NO: 1797430 - DNA, 15 bp, Homo sapiens
tccacctttctttct

SEQ ID NO: 1797431 - DNA, 15 bp, Homo sapiens
ccacctttctttctc

SEQ ID NO: 1797432 - DNA, 15 bp, Homo sapiens
cacctttctttctcc

SEQ ID NO: 1797433 - DNA, 15 bp, Homo sapiens
acctttctttctccc

SEQ ID NO: 1797434 - DNA, 15 bp, Homo sapiens
cctttctttctccct

SEQ ID NO: 1797435 - DNA, 15 bp, Homo sapiens
ctttctttctcccta

SEQ ID NO: 1797436 - DNA, 15 bp, Homo sapiens
tttctttctccctac

SEQ ID NO: 1797437 - DNA, 15 bp, Homo sapiens
ttctttctccctacc

SEQ ID NO: 1797438 - DNA, 15 bp, Homo sapiens
tctttctccctacca

SEQ ID NO: 1797439 - DNA, 15 bp, Homo sapiens
ctttctccctaccag

SEQ ID NO: 1797440 - DNA, 15 bp, Homo sapiens
tttctccctaccagt

SEQ ID NO: 1797441 - DNA, 15 bp, Homo sapiens
ttctccctaccagtt

SEQ ID NO: 1797442 - DNA, 15 bp, Homo sapiens
tctccctaccagttt

SEQ ID NO: 1797443 - DNA, 15 bp, Homo sapiens
ctccctaccagtttg

SEQ ID NO: 1797444 - DNA, 15 bp, Homo sapiens
tccctaccagtttgg

SEQ ID NO: 1797445 - DNA, 15 bp, Homo sapiens
ccctaccagtttgga

SEQ ID NO: 1797446 - DNA, 15 bp, Homo sapiens
cctaccagtttggaa

SEQ ID NO: 1797447 - DNA, 15 bp, Homo sapiens
ctaccagtttggaag

SEQ ID NO: 1797448 - DNA, 15 bp, Homo sapiens
taccagtttggaagc

SEQ ID NO: 1797449 - DNA, 15 bp, Homo sapiens
accagtttggaagca

SEQ ID NO: 1797450 - DNA, 15 bp, Homo sapiens
ccagtttggaagcat

SEQ ID NO: 1797451 - DNA, 15 bp, Homo sapiens
cagtttggaagcatt

SEQ ID NO: 1797452 - DNA, 15 bp, Homo sapiens
agtttggaagcattt

SEQ ID NO: 1797453 - DNA, 15 bp, Homo sapiens
gtttggaagcatttt

SEQ ID NO: 1797454 - DNA, 15 bp, Homo sapiens
tttggaagcattttc

SEQ ID NO: 1797455 - DNA, 15 bp, Homo sapiens
ttggaagcattttca

SEQ ID NO: 1797456 - DNA, 15 bp, Homo sapiens
tggaagcattttcag

SEQ ID NO: 1797457 - DNA, 15 bp, Homo sapiens
ggaagcattttcaga

SEQ ID NO: 1797458 - DNA, 15 bp, Homo sapiens
gaagcattttcagag

SEQ ID NO: 1797459 - DNA, 15 bp, Homo sapiens
aagcattttcagagg

SEQ ID NO: 1797460 - DNA, 15 bp, Homo sapiens
agcattttcagagga

SEQ ID NO: 1797461 - DNA, 15 bp, Homo sapiens
gcattttcagaggaa

SEQ ID NO: 1797462 - DNA, 15 bp, Homo sapiens
cattttcagaggaag

SEQ ID NO: 1797463 - DNA, 15 bp, Homo sapiens
attttcagaggaagg

SEQ ID NO: 1797464 - DNA, 15 bp, Homo sapiens
ttttcagaggaaggt

SEQ ID NO: 1797465 - DNA, 15 bp, Homo sapiens
tttcagaggaaggtg

SEQ ID NO: 1797466 - DNA, 15 bp, Homo sapiens
ttcagaggaaggtgt

SEQ ID NO: 1797467 - DNA, 15 bp, Homo sapiens
tcagaggaaggtgtt

SEQ ID NO: 1797468 - DNA, 15 bp, Homo sapiens
cagaggaaggtgttc

SEQ ID NO: 1797469 - DNA, 15 bp, Homo sapiens
agaggaaggtgttca

SEQ ID NO: 1797470 - DNA, 15 bp, Homo sapiens
gaggaaggtgttcaa

SEQ ID NO: 1797471 - DNA, 15 bp, Homo sapiens
aggaaggtgttcaaa

SEQ ID NO: 1797472 - DNA, 15 bp, Homo sapiens
ggaaggtgttcaaac

SEQ ID NO: 1797473 - DNA, 15 bp, Homo sapiens
gaaggtgttcaaact

SEQ ID NO: 1797474 - DNA, 15 bp, Homo sapiens
aaggtgttcaaactc

SEQ ID NO: 1797475 - DNA, 15 bp, Homo sapiens
aggtgttcaaactcc

SEQ ID NO: 1797476 - DNA, 15 bp, Homo sapiens
ggtgttcaaactccc

SEQ ID NO: 1797477 - DNA, 15 bp, Homo sapiens
gtgttcaaactccct

SEQ ID NO: 1797478 - DNA, 15 bp, Homo sapiens
tgttcaaactcccta

SEQ ID NO: 1797479 - DNA, 15 bp, Homo sapiens
gttcaaactccctac

SEQ ID NO: 1797480 - DNA, 15 bp, Homo sapiens
ttcaaactccctact

SEQ ID NO: 1797481 - DNA, 15 bp, Homo sapiens
tcaaactccctactc

SEQ ID NO: 1797482 - DNA, 15 bp, Homo sapiens
caaactccctactcc

SEQ ID NO: 1797483 - DNA, 15 bp, Homo sapiens
aaactccctactcct

SEQ ID NO: 1797484 - DNA, 15 bp, Homo sapiens
aactccctactcctc

SEQ ID NO: 1797485 - DNA, 15 bp, Homo sapiens
actccctactcctca

SEQ ID NO: 1797486 - DNA, 15 bp, Homo sapiens
ctccctactcctcag

SEQ ID NO: 1797487 - DNA, 15 bp, Homo sapiens
tccctactcctcagt

SEQ ID NO: 1797488 - DNA, 15 bp, Homo sapiens
ccctactcctcagtg

SEQ ID NO: 1797489 - DNA, 15 bp, Homo sapiens
cctactcctcagtgt

SEQ ID NO: 1797490 - DNA, 15 bp, Homo sapiens
ctactcctcagtgtg

SEQ ID NO: 1797491 - DNA, 15 bp, Homo sapiens
tactcctcagtgtgt

SEQ ID NO: 1797492 - DNA, 15 bp, Homo sapiens
actcctcagtgtgtc

SEQ ID NO: 1797493 - DNA, 15 bp, Homo sapiens
ctcctcagtgtgtct

SEQ ID NO: 1797494 - DNA, 15 bp, Homo sapiens
tcctcagtgtgtcta

SEQ ID NO: 1797495 - DNA, 15 bp, Homo sapiens
cctcagtgtgtctag

SEQ ID NO: 1797496 - DNA, 15 bp, Homo sapiens
ctcagtgtgtctaga

SEQ ID NO: 1797497 - DNA, 15 bp, Homo sapiens
tcagtgtgtctagag

SEQ ID NO: 1797498 - DNA, 15 bp, Homo sapiens
cagtgtgtctagagt

SEQ ID NO: 1797499 - DNA, 15 bp, Homo sapiens
agtgtgtctagagta

SEQ ID NO: 1797500 - DNA, 15 bp, Homo sapiens
gtgtgtctagagtat

SEQ ID NO: 1797501 - DNA, 15 bp, Homo sapiens
tgtgtctagagtatc

SEQ ID NO: 1797502 - DNA, 15 bp, Homo sapiens
gtgtctagagtatcc

SEQ ID NO: 1797503 - DNA, 15 bp, Homo sapiens
tgtctagagtatcct

SEQ ID NO: 1797504 - DNA, 15 bp, Homo sapiens
gtctagagtatcctc

SEQ ID NO: 1797505 - DNA, 15 bp, Homo sapiens
tctagagtatcctcc

SEQ ID NO: 1797506 - DNA, 15 bp, Homo sapiens
ctagagtatcctcct

SEQ ID NO: 1797507 - DNA, 15 bp, Homo sapiens
tagagtatcctcctg

SEQ ID NO: 1797508 - DNA, 15 bp, Homo sapiens
agagtatcctcctgc

SEQ ID NO: 1797509 - DNA, 15 bp, Homo sapiens
gagtatcctcctgca

SEQ ID NO: 1797510 - DNA, 15 bp, Homo sapiens
agtatcctcctgcac

SEQ ID NO: 1797511 - DNA, 15 bp, Homo sapiens
gtatcctcctgcacg

SEQ ID NO: 1797512 - DNA, 15 bp, Homo sapiens
tatcctcctgcacgc

SEQ ID NO: 1797513 - DNA, 15 bp, Homo sapiens
atcctcctgcacgcg

SEQ ID NO: 1797514 - DNA, 15 bp, Homo sapiens
tcctcctgcacgcgc

SEQ ID NO: 1797515 - DNA, 15 bp, Homo sapiens
cctcctgcacgcgcg

SEQ ID NO: 1797516 - DNA, 15 bp, Homo sapiens
ctcctgcacgcgcgc

SEQ ID NO: 1797517 - DNA, 15 bp, Homo sapiens
tcctgcacgcgcgcg

SEQ ID NO: 1797518 - DNA, 15 bp, Homo sapiens
cctgcacgcgcgcgt

SEQ ID NO: 1797519 - DNA, 15 bp, Homo sapiens
ctgcacgcgcgcgtg

SEQ ID NO: 1797520 - DNA, 15 bp, Homo sapiens
cacgcgcgcgtgcac

SEQ ID NO: 1797521 - DNA, 15 bp, Homo sapiens
acgcgcgcgtgcaca

SEQ ID NO: 1797522 - DNA, 15 bp, Homo sapiens
cgcgcgcgtgcacac

SEQ ID NO: 1797523 - DNA, 15 bp, Homo sapiens
gcgcgcgtgcacaca

SEQ ID NO: 1797524 - DNA, 15 bp, Homo sapiens
acacacacactcccc

SEQ ID NO: 1797525 - DNA, 15 bp, Homo sapiens
cacacacactcccct

SEQ ID NO: 1797526 - DNA, 15 bp, Homo sapiens
acacacactcccctc

SEQ ID NO: 1797527 - DNA, 15 bp, Homo sapiens
cacacactcccctcc

SEQ ID NO: 1797528 - DNA, 15 bp, Homo sapiens
acacactcccctcca

SEQ ID NO: 1797529 - DNA, 15 bp, Homo sapiens
cacactcccctccat

SEQ ID NO: 1797530 - DNA, 15 bp, Homo sapiens
acactcccctccatt

SEQ ID NO: 1797531 - DNA, 15 bp, Homo sapiens
cactcccctccattt

SEQ ID NO: 1797532 - DNA, 15 bp, Homo sapiens
actcccctccatttg

SEQ ID NO: 1797533 - DNA, 15 bp, Homo sapiens
ctcccctccatttga

SEQ ID NO: 1797534 - DNA, 15 bp, Homo sapiens
tcccctccatttgac

SEQ ID NO: 1797535 - DNA, 15 bp, Homo sapiens
cccctccatttgaca

SEQ ID NO: 1797536 - DNA, 15 bp, Homo sapiens
ccctccatttgacag

SEQ ID NO: 1797537 - DNA, 15 bp, Homo sapiens
cctccatttgacaga

SEQ ID NO: 1797538 - DNA, 15 bp, Homo sapiens
ctccatttgacagat

SEQ ID NO: 1797539 - DNA, 15 bp, Homo sapiens
tccatttgacagatg

SEQ ID NO: 1797540 - DNA, 15 bp, Homo sapiens
ttgacagatgaggag

SEQ ID NO: 1797541 - DNA, 15 bp, Homo sapiens
tgacagatgaggaga

SEQ ID NO: 1797542 - DNA, 15 bp, Homo sapiens
gacagatgaggagac

SEQ ID NO: 1797543 - DNA, 15 bp, Homo sapiens
acagatgaggagact

SEQ ID NO: 1797544 - DNA, 15 bp, Homo sapiens
cagatgaggagactc

SEQ ID NO: 1797545 - DNA, 15 bp, Homo sapiens
agatgaggagactca

SEQ ID NO: 1797546 - DNA, 15 bp, Homo sapiens
gatgaggagactcaa

SEQ ID NO: 1797547 - DNA, 15 bp, Homo sapiens
atgaggagactcaaa

SEQ ID NO: 1797548 - DNA, 15 bp, Homo sapiens
tgaggagactcaaat

SEQ ID NO: 1797549 - DNA, 15 bp, Homo sapiens
gaggagactcaaatc

SEQ ID NO: 1797550 - DNA, 15 bp, Homo sapiens
aggagactcaaatcc

SEQ ID NO: 1797551 - DNA, 15 bp, Homo sapiens
ggagactcaaatcca

SEQ ID NO: 1797552 - DNA, 15 bp, Homo sapiens
gagactcaaatccaa

SEQ ID NO: 1797553 - DNA, 15 bp, Homo sapiens
agactcaaatccaaa

SEQ ID NO: 1797554 - DNA, 15 bp, Homo sapiens
gactcaaatccaaag

SEQ ID NO: 1797555 - DNA, 15 bp, Homo sapiens
actcaaatccaaaga

SEQ ID NO: 1797556 - DNA, 15 bp, Homo sapiens
ctcaaatccaaagaa

SEQ ID NO: 1797557 - DNA, 15 bp, Homo sapiens
tcaaatccaaagaaa

SEQ ID NO: 1797558 - DNA, 15 bp, Homo sapiens
caaatccaaagaaat

SEQ ID NO: 1797559 - DNA, 15 bp, Homo sapiens
aaatccaaagaaatt

SEQ ID NO: 1797560 - DNA, 15 bp, Homo sapiens
aatccaaagaaattg

SEQ ID NO: 1797561 - DNA, 15 bp, Homo sapiens
atccaaagaaattga

SEQ ID NO: 1797562 - DNA, 15 bp, Homo sapiens
tccaaagaaattgag

SEQ ID NO: 1797563 - DNA, 15 bp, Homo sapiens
ccaaagaaattgagg

SEQ ID NO: 1797564 - DNA, 15 bp, Homo sapiens
caaagaaattgaggg

SEQ ID NO: 1797565 - DNA, 15 bp, Homo sapiens
aaagaaattgaggga

SEQ ID NO: 1797566 - DNA, 15 bp, Homo sapiens
aagaaattgagggat

SEQ ID NO: 1797567 - DNA, 15 bp, Homo sapiens
agaaattgagggatt

SEQ ID NO: 1797568 - DNA, 15 bp, Homo sapiens
gaaattgagggattc

SEQ ID NO: 1797569 - DNA, 15 bp, Homo sapiens
aaattgagggattct

SEQ ID NO: 1797570 - DNA, 15 bp, Homo sapiens
aattgagggattctc

SEQ ID NO: 1797571 - DNA, 15 bp, Homo sapiens
attgagggattctcg

SEQ ID NO: 1797572 - DNA, 15 bp, Homo sapiens
ttgagggattctcgt

SEQ ID NO: 1797573 - DNA, 15 bp, Homo sapiens
tgagggattctcgta

SEQ ID NO: 1797574 - DNA, 15 bp, Homo sapiens
gagggattctcgtaa

SEQ ID NO: 1797575 - DNA, 15 bp, Homo sapiens
agggattctcgtaag

SEQ ID NO: 1797576 - DNA, 15 bp, Homo sapiens
gggattctcgtaagg

SEQ ID NO: 1797577 - DNA, 15 bp, Homo sapiens
ggattctcgtaagga

SEQ ID NO: 1797578 - DNA, 15 bp, Homo sapiens
gattctcgtaaggac

SEQ ID NO: 1797579 - DNA, 15 bp, Homo sapiens
attctcgtaaggaca

SEQ ID NO: 1797580 - DNA, 15 bp, Homo sapiens
ttctcgtaaggacac

SEQ ID NO: 1797581 - DNA, 15 bp, Homo sapiens
tctcgtaaggacaca

SEQ ID NO: 1797582 - DNA, 15 bp, Homo sapiens
ctcgtaaggacacat

SEQ ID NO: 1797583 - DNA, 15 bp, Homo sapiens
tcgtaaggacacata

SEQ ID NO: 1797584 - DNA, 15 bp, Homo sapiens
cgtaaggacacatat

SEQ ID NO: 1797585 - DNA, 15 bp, Homo sapiens
gtaaggacacatatt

SEQ ID NO: 1797586 - DNA, 15 bp, Homo sapiens
taaggacacatattt

SEQ ID NO: 1797587 - DNA, 15 bp, Homo sapiens
aaggacacatattta

SEQ ID NO: 1797588 - DNA, 15 bp, Homo sapiens
aggacacatatttaa

SEQ ID NO: 1797589 - DNA, 15 bp, Homo sapiens
ggacacatatttaat

SEQ ID NO: 1797590 - DNA, 15 bp, Homo sapiens
gacacatatttaatg

SEQ ID NO: 1797591 - DNA, 15 bp, Homo sapiens
acacatatttaatgc

SEQ ID NO: 1797592 - DNA, 15 bp, Homo sapiens
cacatatttaatgca

SEQ ID NO: 1797593 - DNA, 15 bp, Homo sapiens
acatatttaatgcag

SEQ ID NO: 1797594 - DNA, 15 bp, Homo sapiens
catatttaatgcaga

SEQ ID NO: 1797595 - DNA, 15 bp, Homo sapiens
atatttaatgcagag

SEQ ID NO: 1797596 - DNA, 15 bp, Homo sapiens
tatttaatgcagagc

SEQ ID NO: 1797597 - DNA, 15 bp, Homo sapiens
atttaatgcagagct

SEQ ID NO: 1797598 - DNA, 15 bp, Homo sapiens
tttaatgcagagcta

SEQ ID NO: 1797599 - DNA, 15 bp, Homo sapiens
ttaatgcagagctag

SEQ ID NO: 1797600 - DNA, 15 bp, Homo sapiens
taatgcagagctaga

SEQ ID NO: 1797601 - DNA, 15 bp, Homo sapiens
aatgcagagctagaa

SEQ ID NO: 1797602 - DNA, 15 bp, Homo sapiens
atgcagagctagaac

SEQ ID NO: 1797603 - DNA, 15 bp, Homo sapiens
tgcagagctagaact

SEQ ID NO: 1797604 - DNA, 15 bp, Homo sapiens
gcagagctagaacta

SEQ ID NO: 1797605 - DNA, 15 bp, Homo sapiens
cagagctagaactag

SEQ ID NO: 1797606 - DNA, 15 bp, Homo sapiens
agagctagaactaga

SEQ ID NO: 1797607 - DNA, 15 bp, Homo sapiens
gagctagaactagaa

SEQ ID NO: 1797608 - DNA, 15 bp, Homo sapiens
agctagaactagaac

SEQ ID NO: 1797609 - DNA, 15 bp, Homo sapiens
gctagaactagaact

SEQ ID NO: 1797610 - DNA, 15 bp, Homo sapiens
ctagaactagaactt

SEQ ID NO: 1797611 - DNA, 15 bp, Homo sapiens
tagaactagaacttt

SEQ ID NO: 1797612 - DNA, 15 bp, Homo sapiens
agaactagaactttg

SEQ ID NO: 1797613 - DNA, 15 bp, Homo sapiens
gaactagaactttgg

SEQ ID NO: 1797614 - DNA, 15 bp, Homo sapiens
aactagaactttggt

SEQ ID NO: 1797615 - DNA, 15 bp, Homo sapiens
actagaactttggtt

SEQ ID NO: 1797616 - DNA, 15 bp, Homo sapiens
ctagaactttggttt

SEQ ID NO: 1797617 - DNA, 15 bp, Homo sapiens
tagaactttggtttc

SEQ ID NO: 1797618 - DNA, 15 bp, Homo sapiens
agaactttggtttca

SEQ ID NO: 1797619 - DNA, 15 bp, Homo sapiens
gaactttggtttcat

SEQ ID NO: 1797620 - DNA, 15 bp, Homo sapiens
aactttggtttcatc

SEQ ID NO: 1797621 - DNA, 15 bp, Homo sapiens
actttggtttcatca

SEQ ID NO: 1797622 - DNA, 15 bp, Homo sapiens
ctttggtttcatcat

SEQ ID NO: 1797623 - DNA, 15 bp, Homo sapiens
tttggtttcatcatt

SEQ ID NO: 1797624 - DNA, 15 bp, Homo sapiens
ttggtttcatcattc

SEQ ID NO: 1797625 - DNA, 15 bp, Homo sapiens
tggtttcatcattct

SEQ ID NO: 1797626 - DNA, 15 bp, Homo sapiens
ggtttcatcattctc

SEQ ID NO: 1797627 - DNA, 15 bp, Homo sapiens
gtttcatcattctcg

SEQ ID NO: 1797628 - DNA, 15 bp, Homo sapiens
tttcatcattctcgg

SEQ ID NO: 1797629 - DNA, 15 bp, Homo sapiens
ttcatcattctcgga

SEQ ID NO: 1797630 - DNA, 15 bp, Homo sapiens
tcatcattctcggat

SEQ ID NO: 1797631 - DNA, 15 bp, Homo sapiens
catcattctcggatc

SEQ ID NO: 1797632 - DNA, 15 bp, Homo sapiens
atcattctcggatca

SEQ ID NO: 1797633 - DNA, 15 bp, Homo sapiens
tcattctcggatcaa

SEQ ID NO: 1797634 - DNA, 15 bp, Homo sapiens
cattctcggatcaag

SEQ ID NO: 1797635 - DNA, 15 bp, Homo sapiens
attctcggatcaaga

SEQ ID NO: 1797636 - DNA, 15 bp, Homo sapiens
ttctcggatcaagac

SEQ ID NO: 1797637 - DNA, 15 bp, Homo sapiens
tctcggatcaagaca

SEQ ID NO: 1797638 - DNA, 15 bp, Homo sapiens
ctcggatcaagacat

SEQ ID NO: 1797639 - DNA, 15 bp, Homo sapiens
tcggatcaagacatt

SEQ ID NO: 1797640 - DNA, 15 bp, Homo sapiens
cggatcaagacattt

SEQ ID NO: 1797641 - DNA, 15 bp, Homo sapiens
ggatcaagacatttc

SEQ ID NO: 1797642 - DNA, 15 bp, Homo sapiens
gatcaagacatttct

SEQ ID NO: 1797643 - DNA, 15 bp, Homo sapiens
atcaagacatttctc

SEQ ID NO: 1797644 - DNA, 15 bp, Homo sapiens
tcaagacatttctcc

SEQ ID NO: 1797645 - DNA, 15 bp, Homo sapiens
caagacatttctccc

SEQ ID NO: 1797646 - DNA, 15 bp, Homo sapiens
aagacatttctccct

SEQ ID NO: 1797647 - DNA, 15 bp, Homo sapiens
agacatttctccctg

SEQ ID NO: 1797648 - DNA, 15 bp, Homo sapiens
gacatttctccctgg

SEQ ID NO: 1797649 - DNA, 15 bp, Homo sapiens
acatttctccctggg

SEQ ID NO: 1797650 - DNA, 15 bp, Homo sapiens
catttctccctggga

SEQ ID NO: 1797651 - DNA, 15 bp, Homo sapiens
atttctccctgggac

SEQ ID NO: 1797652 - DNA, 15 bp, Homo sapiens
tttctccctgggaca

SEQ ID NO: 1797653 - DNA, 15 bp, Homo sapiens
ttctccctgggacac

SEQ ID NO: 1797654 - DNA, 15 bp, Homo sapiens
tctccctgggacacc

SEQ ID NO: 1797655 - DNA, 15 bp, Homo sapiens
ctccctgggacaccc

SEQ ID NO: 1797656 - DNA, 15 bp, Homo sapiens
tccctgggacaccct

SEQ ID NO: 1797657 - DNA, 15 bp, Homo sapiens
ccctgggacaccctt

SEQ ID NO: 1797658 - DNA, 15 bp, Homo sapiens
cctgggacaccctta

SEQ ID NO: 1797659 - DNA, 15 bp, Homo sapiens
ctgggacacccttac

SEQ ID NO: 1797660 - DNA, 15 bp, Homo sapiens
tgggacacccttaca

SEQ ID NO: 1797661 - DNA, 15 bp, Homo sapiens
gggacacccttacat

SEQ ID NO: 1797662 - DNA, 15 bp, Homo sapiens
ggacacccttacata

SEQ ID NO: 1797663 - DNA, 15 bp, Homo sapiens
gacacccttacatag

SEQ ID NO: 1797664 - DNA, 15 bp, Homo sapiens
acacccttacatagt

SEQ ID NO: 1797665 - DNA, 15 bp, Homo sapiens
cacccttacatagtg

SEQ ID NO: 1797666 - DNA, 15 bp, Homo sapiens
acccttacatagtgc

SEQ ID NO: 1797667 - DNA, 15 bp, Homo sapiens
cccttacatagtgct

SEQ ID NO: 1797668 - DNA, 15 bp, Homo sapiens
ccttacatagtgctg

SEQ ID NO: 1797669 - DNA, 15 bp, Homo sapiens
cttacatagtgctgg

SEQ ID NO: 1797670 - DNA, 15 bp, Homo sapiens
ttacatagtgctgga

SEQ ID NO: 1797671 - DNA, 15 bp, Homo sapiens
tacatagtgctggag

SEQ ID NO: 1797672 - DNA, 15 bp, Homo sapiens
acatagtgctggaga

SEQ ID NO: 1797673 - DNA, 15 bp, Homo sapiens
catagtgctggagag

SEQ ID NO: 1797674 - DNA, 15 bp, Homo sapiens
atagtgctggagaga

SEQ ID NO: 1797675 - DNA, 15 bp, Homo sapiens
tagtgctggagagag

SEQ ID NO: 1797676 - DNA, 15 bp, Homo sapiens
agtgctggagagagc

SEQ ID NO: 1797677 - DNA, 15 bp, Homo sapiens
gtgctggagagagca

SEQ ID NO: 1797678 - DNA, 15 bp, Homo sapiens
tgctggagagagcat

SEQ ID NO: 1797679 - DNA, 15 bp, Homo sapiens
gctggagagagcatt

SEQ ID NO: 1797680 - DNA, 15 bp, Homo sapiens
ctggagagagcattt

SEQ ID NO: 1797681 - DNA, 15 bp, Homo sapiens
tggagagagcatttt

SEQ ID NO: 1797682 - DNA, 15 bp, Homo sapiens
ggagagagcatttta

SEQ ID NO: 1797683 - DNA, 15 bp, Homo sapiens
gagagagcattttat

SEQ ID NO: 1797684 - DNA, 15 bp, Homo sapiens
agagagcattttata

SEQ ID NO: 1797685 - DNA, 15 bp, Homo sapiens
gagagcattttatat

SEQ ID NO: 1797686 - DNA, 15 bp, Homo sapiens
agagcattttatatc

SEQ ID NO: 1797687 - DNA, 15 bp, Homo sapiens
gagcattttatatct

SEQ ID NO: 1797688 - DNA, 15 bp, Homo sapiens
agcattttatatctt

SEQ ID NO: 1797689 - DNA, 15 bp, Homo sapiens
gcattttatatcttt

SEQ ID NO: 1797690 - DNA, 15 bp, Homo sapiens
cattttatatctttt

SEQ ID NO: 1797691 - DNA, 15 bp, Homo sapiens
attttatatctttta

SEQ ID NO: 1797692 - DNA, 15 bp, Homo sapiens
ttttatatcttttaa

SEQ ID NO: 1797693 - DNA, 15 bp, Homo sapiens
tttatatcttttaat

SEQ ID NO: 1797694 - DNA, 15 bp, Homo sapiens
ttatatcttttaatt

SEQ ID NO: 1797695 - DNA, 15 bp, Homo sapiens
tatatcttttaatta

SEQ ID NO: 1797696 - DNA, 15 bp, Homo sapiens
atatcttttaattaa

SEQ ID NO: 1797697 - DNA, 15 bp, Homo sapiens
tatcttttaattaat

SEQ ID NO: 1797698 - DNA, 15 bp, Homo sapiens
atcttttaattaatc

SEQ ID NO: 1797699 - DNA, 15 bp, Homo sapiens
tcttttaattaatca

SEQ ID NO: 1797700 - DNA, 15 bp, Homo sapiens
cttttaattaatcat

SEQ ID NO: 1797701 - DNA, 15 bp, Homo sapiens
ttttaattaatcatt

SEQ ID NO: 1797702 - DNA, 15 bp, Homo sapiens
tttaattaatcattt

SEQ ID NO: 1797703 - DNA, 15 bp, Homo sapiens
ttaattaatcatttc

SEQ ID NO: 1797704 - DNA, 15 bp, Homo sapiens
taattaatcatttcc

SEQ ID NO: 1797705 - DNA, 15 bp, Homo sapiens
aattaatcatttcca

SEQ ID NO: 1797706 - DNA, 15 bp, Homo sapiens
attaatcatttccag

SEQ ID NO: 1797707 - DNA, 15 bp, Homo sapiens
ttaatcatttccaga

SEQ ID NO: 1797708 - DNA, 15 bp, Homo sapiens
taatcatttccagag

SEQ ID NO: 1797709 - DNA, 15 bp, Homo sapiens
aatcatttccagagg

SEQ ID NO: 1797710 - DNA, 15 bp, Homo sapiens
atcatttccagaggt

SEQ ID NO: 1797711 - DNA, 15 bp, Homo sapiens
tcatttccagaggta

SEQ ID NO: 1797712 - DNA, 15 bp, Homo sapiens
catttccagaggtag

SEQ ID NO: 1797713 - DNA, 15 bp, Homo sapiens
atttccagaggtaga

SEQ ID NO: 1797714 - DNA, 15 bp, Homo sapiens
tttccagaggtagag

SEQ ID NO: 1797715 - DNA, 15 bp, Homo sapiens
ttccagaggtagaga

SEQ ID NO: 1797716 - DNA, 15 bp, Homo sapiens
tccagaggtagagat

SEQ ID NO: 1797717 - DNA, 15 bp, Homo sapiens
ccagaggtagagatt

SEQ ID NO: 1797718 - DNA, 15 bp, Homo sapiens
cagaggtagagatta

SEQ ID NO: 1797719 - DNA, 15 bp, Homo sapiens
agaggtagagattac

SEQ ID NO: 1797720 - DNA, 15 bp, Homo sapiens
gaggtagagattact

SEQ ID NO: 1797721 - DNA, 15 bp, Homo sapiens
aggtagagattactc

SEQ ID NO: 1797722 - DNA, 15 bp, Homo sapiens
ggtagagattactca

SEQ ID NO: 1797723 - DNA, 15 bp, Homo sapiens
gtagagattactcaa

SEQ ID NO: 1797724 - DNA, 15 bp, Homo sapiens
tagagattactcaat

SEQ ID NO: 1797725 - DNA, 15 bp, Homo sapiens
agagattactcaatt

SEQ ID NO: 1797726 - DNA, 15 bp, Homo sapiens
gagattactcaattt

SEQ ID NO: 1797727 - DNA, 15 bp, Homo sapiens
agattactcaatttt

SEQ ID NO: 1797728 - DNA, 15 bp, Homo sapiens
gattactcaattttt

SEQ ID NO: 1797729 - DNA, 15 bp, Homo sapiens
attactcaatttttt

SEQ ID NO: 1797730 - DNA, 15 bp, Homo sapiens
ttactcaatttttta

SEQ ID NO: 1797731 - DNA, 15 bp, Homo sapiens
tactcaattttttaa

SEQ ID NO: 1797732 - DNA, 15 bp, Homo sapiens
actcaattttttaaa

SEQ ID NO: 1797733 - DNA, 15 bp, Homo sapiens
ctcaattttttaaac

SEQ ID NO: 1797734 - DNA, 15 bp, Homo sapiens
tcaattttttaaaca

SEQ ID NO: 1797735 - DNA, 15 bp, Homo sapiens
caattttttaaacat

SEQ ID NO: 1797736 - DNA, 15 bp, Homo sapiens
aattttttaaacatt

SEQ ID NO: 1797737 - DNA, 15 bp, Homo sapiens
attttttaaacattc

SEQ ID NO: 1797738 - DNA, 15 bp, Homo sapiens
ttttttaaacattct

SEQ ID NO: 1797739 - DNA, 15 bp, Homo sapiens
tttttaaacattctg

SEQ ID NO: 1797740 - DNA, 15 bp, Homo sapiens
ttttaaacattctgc

SEQ ID NO: 1797741 - DNA, 15 bp, Homo sapiens
tttaaacattctgct

SEQ ID NO: 1797742 - DNA, 15 bp, Homo sapiens
ttaaacattctgctc

SEQ ID NO: 1797743 - DNA, 15 bp, Homo sapiens
taaacattctgctcc

SEQ ID NO: 1797744 - DNA, 15 bp, Homo sapiens
aaacattctgctcca

SEQ ID NO: 1797745 - DNA, 15 bp, Homo sapiens
aacattctgctccaa

SEQ ID NO: 1797746 - DNA, 15 bp, Homo sapiens
acattctgctccaaa

SEQ ID NO: 1797747 - DNA, 15 bp, Homo sapiens
cattctgctccaaac

SEQ ID NO: 1797748 - DNA, 15 bp, Homo sapiens
attctgctccaaact

SEQ ID NO: 1797749 - DNA, 15 bp, Homo sapiens
ttctgctccaaactt

SEQ ID NO: 1797750 - DNA, 15 bp, Homo sapiens
tctgctccaaacttt

SEQ ID NO: 1797751 - DNA, 15 bp, Homo sapiens
ctgctccaaactttt

SEQ ID NO: 1797752 - DNA, 15 bp, Homo sapiens
tgctccaaactttta

SEQ ID NO: 1797753 - DNA, 15 bp, Homo sapiens
gctccaaacttttac

SEQ ID NO: 1797754 - DNA, 15 bp, Homo sapiens
ctccaaacttttaca

SEQ ID NO: 1797755 - DNA, 15 bp, Homo sapiens
tccaaacttttacac

SEQ ID NO: 1797756 - DNA, 15 bp, Homo sapiens
ccaaacttttacacc

SEQ ID NO: 1797757 - DNA, 15 bp, Homo sapiens
caaacttttacaccc

SEQ ID NO: 1797758 - DNA, 15 bp, Homo sapiens
aaacttttacacccg

SEQ ID NO: 1797759 - DNA, 15 bp, Homo sapiens
aacttttacacccgt

SEQ ID NO: 1797760 - DNA, 15 bp, Homo sapiens
acttttacacccgtc

SEQ ID NO: 1797761 - DNA, 15 bp, Homo sapiens
cttttacacccgtct

SEQ ID NO: 1797762 - DNA, 15 bp, Homo sapiens
ttttacacccgtctg

SEQ ID NO: 1797763 - DNA, 15 bp, Homo sapiens
tttacacccgtctgg

SEQ ID NO: 1797764 - DNA, 15 bp, Homo sapiens
ttacacccgtctggt

SEQ ID NO: 1797765 - DNA, 15 bp, Homo sapiens
tacacccgtctggta

SEQ ID NO: 1797766 - DNA, 15 bp, Homo sapiens
acacccgtctggtag

SEQ ID NO: 1797767 - DNA, 15 bp, Homo sapiens
cacccgtctggtaga

SEQ ID NO: 1797768 - DNA, 15 bp, Homo sapiens
acccgtctggtagat

SEQ ID NO: 1797769 - DNA, 15 bp, Homo sapiens
cccgtctggtagata

SEQ ID NO: 1797770 - DNA, 15 bp, Homo sapiens
ccgtctggtagataa

SEQ ID NO: 1797771 - DNA, 15 bp, Homo sapiens
cgtctggtagataag

SEQ ID NO: 1797772 - DNA, 15 bp, Homo sapiens
gtctggtagataagt

SEQ ID NO: 1797773 - DNA, 15 bp, Homo sapiens
tctggtagataagtt

SEQ ID NO: 1797774 - DNA, 15 bp, Homo sapiens
ctggtagataagttc

SEQ ID NO: 1797775 - DNA, 15 bp, Homo sapiens
tggtagataagttct

SEQ ID NO: 1797776 - DNA, 15 bp, Homo sapiens
ggtagataagttctg

SEQ ID NO: 1797777 - DNA, 15 bp, Homo sapiens
gtagataagttctgt

SEQ ID NO: 1797778 - DNA, 15 bp, Homo sapiens
tagataagttctgtt

SEQ ID NO: 1797779 - DNA, 15 bp, Homo sapiens
agataagttctgttt

SEQ ID NO: 1797780 - DNA, 15 bp, Homo sapiens
gataagttctgttta

SEQ ID NO: 1797781 - DNA, 15 bp, Homo sapiens
ataagttctgtttac

SEQ ID NO: 1797782 - DNA, 15 bp, Homo sapiens
taagttctgtttacc

SEQ ID NO: 1797783 - DNA, 15 bp, Homo sapiens
aagttctgtttaccg

SEQ ID NO: 1797784 - DNA, 15 bp, Homo sapiens
agttctgtttaccgt

SEQ ID NO: 1797785 - DNA, 15 bp, Homo sapiens
gttctgtttaccgta

SEQ ID NO: 1797786 - DNA, 15 bp, Homo sapiens
ttctgtttaccgtat

SEQ ID NO: 1797787 - DNA, 15 bp, Homo sapiens
tctgtttaccgtata

SEQ ID NO: 1797788 - DNA, 15 bp, Homo sapiens
ctgtttaccgtataa

SEQ ID NO: 1797789 - DNA, 15 bp, Homo sapiens
tgtttaccgtataac

SEQ ID NO: 1797790 - DNA, 15 bp, Homo sapiens
gtttaccgtataacc

SEQ ID NO: 1797791 - DNA, 15 bp, Homo sapiens
tttaccgtataacca

SEQ ID NO: 1797792 - DNA, 15 bp, Homo sapiens
ttaccgtataaccaa

SEQ ID NO: 1797793 - DNA, 15 bp, Homo sapiens
taccgtataaccaaa

SEQ ID NO: 1797794 - DNA, 15 bp, Homo sapiens
accgtataaccaaag

SEQ ID NO: 1797795 - DNA, 15 bp, Homo sapiens
ccgtataaccaaaga

SEQ ID NO: 1797796 - DNA, 15 bp, Homo sapiens
cgtataaccaaagat

SEQ ID NO: 1797797 - DNA, 15 bp, Homo sapiens
gtataaccaaagatc

SEQ ID NO: 1797798 - DNA, 15 bp, Homo sapiens
tataaccaaagatca

SEQ ID NO: 1797799 - DNA, 15 bp, Homo sapiens
ataaccaaagatcaa

SEQ ID NO: 1797800 - DNA, 15 bp, Homo sapiens
taaccaaagatcaaa

SEQ ID NO: 1797801 - DNA, 15 bp, Homo sapiens
aaccaaagatcaaat

SEQ ID NO: 1797802 - DNA, 15 bp, Homo sapiens
accaaagatcaaatg

SEQ ID NO: 1797803 - DNA, 15 bp, Homo sapiens
ccaaagatcaaatga

SEQ ID NO: 1797804 - DNA, 15 bp, Homo sapiens
caaagatcaaatgaa

SEQ ID NO: 1797805 - DNA, 15 bp, Homo sapiens
aaagatcaaatgaaa

SEQ ID NO: 1797806 - DNA, 15 bp, Homo sapiens
aagatcaaatgaaat

SEQ ID NO: 1797807 - DNA, 15 bp, Homo sapiens
agatcaaatgaaatc

SEQ ID NO: 1797808 - DNA, 15 bp, Homo sapiens
gatcaaatgaaatct

SEQ ID NO: 1797809 - DNA, 15 bp, Homo sapiens
atcaaatgaaatctt

SEQ ID NO: 1797810 - DNA, 15 bp, Homo sapiens
tcaaatgaaatctta

SEQ ID NO: 1797811 - DNA, 15 bp, Homo sapiens
caaatgaaatcttat

SEQ ID NO: 1797812 - DNA, 15 bp, Homo sapiens
aaatgaaatcttatg

SEQ ID NO: 1797813 - DNA, 15 bp, Homo sapiens
aatgaaatcttatgt

SEQ ID NO: 1797814 - DNA, 15 bp, Homo sapiens
atgaaatcttatgta

SEQ ID NO: 1797815 - DNA, 15 bp, Homo sapiens
tgaaatcttatgtat

SEQ ID NO: 1797816 - DNA, 15 bp, Homo sapiens
gaaatcttatgtata

SEQ ID NO: 1797817 - DNA, 15 bp, Homo sapiens
aaatcttatgtataa

SEQ ID NO: 1797818 - DNA, 15 bp, Homo sapiens
aatcttatgtataaa

SEQ ID NO: 1797819 - DNA, 15 bp, Homo sapiens
atcttatgtataaat

SEQ ID NO: 1797820 - DNA, 15 bp, Homo sapiens
tcttatgtataaatg

SEQ ID NO: 1797821 - DNA, 15 bp, Homo sapiens
cttatgtataaatgc

SEQ ID NO: 1797822 - DNA, 15 bp, Homo sapiens
ttatgtataaatgca

SEQ ID NO: 1797823 - DNA, 15 bp, Homo sapiens
tatgtataaatgcac

SEQ ID NO: 1797824 - DNA, 15 bp, Homo sapiens
atgtataaatgcact

SEQ ID NO: 1797825 - DNA, 15 bp, Homo sapiens
tgtataaatgcactt

SEQ ID NO: 1797826 - DNA, 15 bp, Homo sapiens
gtataaatgcacttt

SEQ ID NO: 1797827 - DNA, 15 bp, Homo sapiens
tataaatgcactttg

SEQ ID NO: 1797828 - DNA, 15 bp, Homo sapiens
ataaatgcactttgt

SEQ ID NO: 1797829 - DNA, 15 bp, Homo sapiens
taaatgcactttgta

SEQ ID NO: 1797830 - DNA, 15 bp, Homo sapiens
aaatgcactttgtaa

SEQ ID NO: 1797831 - DNA, 15 bp, Homo sapiens
aatgcactttgtaac

SEQ ID NO: 1797832 - DNA, 15 bp, Homo sapiens
atgcactttgtaact

SEQ ID NO: 1797833 - DNA, 15 bp, Homo sapiens
tgcactttgtaactg

SEQ ID NO: 1797834 - DNA, 15 bp, Homo sapiens
gcactttgtaactga

SEQ ID NO: 1797835 - DNA, 15 bp, Homo sapiens
cactttgtaactgaa

SEQ ID NO: 1797836 - DNA, 15 bp, Homo sapiens
actttgtaactgaaa

SEQ ID NO: 1797837 - DNA, 15 bp, Homo sapiens
ctttgtaactgaaac

SEQ ID NO: 1797838 - DNA, 15 bp, Homo sapiens
tttgtaactgaaaca

SEQ ID NO: 1797839 - DNA, 15 bp, Homo sapiens
ttgtaactgaaacag

SEQ ID NO: 1797840 - DNA, 15 bp, Homo sapiens
tgtaactgaaacagc

SEQ ID NO: 1797841 - DNA, 15 bp, Homo sapiens
gtaactgaaacagca

SEQ ID NO: 1797842 - DNA, 15 bp, Homo sapiens
taactgaaacagcat

SEQ ID NO: 1797843 - DNA, 15 bp, Homo sapiens
aactgaaacagcatc

SEQ ID NO: 1797844 - DNA, 15 bp, Homo sapiens
actgaaacagcatca

SEQ ID NO: 1797845 - DNA, 15 bp, Homo sapiens
ctgaaacagcatcac

SEQ ID NO: 1797846 - DNA, 15 bp, Homo sapiens
tgaaacagcatcaca

SEQ ID NO: 1797847 - DNA, 15 bp, Homo sapiens
gaaacagcatcacag

SEQ ID NO: 1797848 - DNA, 15 bp, Homo sapiens
aaacagcatcacagt

SEQ ID NO: 1797849 - DNA, 15 bp, Homo sapiens
aacagcatcacagtc

SEQ ID NO: 1797850 - DNA, 15 bp, Homo sapiens
acagcatcacagtca

SEQ ID NO: 1797851 - DNA, 15 bp, Homo sapiens
cagcatcacagtcat

SEQ ID NO: 1797852 - DNA, 15 bp, Homo sapiens
agcatcacagtcatg

SEQ ID NO: 1797853 - DNA, 15 bp, Homo sapiens
gcatcacagtcatga

SEQ ID NO: 1797854 - DNA, 15 bp, Homo sapiens
catcacagtcatgaa

SEQ ID NO: 1797855 - DNA, 15 bp, Homo sapiens
atcacagtcatgaag

SEQ ID NO: 1797856 - DNA, 15 bp, Homo sapiens
tcacagtcatgaagt

SEQ ID NO: 1797857 - DNA, 15 bp, Homo sapiens
cacagtcatgaagtc

SEQ ID NO: 1797858 - DNA, 15 bp, Homo sapiens
acagtcatgaagtcc

SEQ ID NO: 1797859 - DNA, 15 bp, Homo sapiens
cagtcatgaagtccc

SEQ ID NO: 1797860 - DNA, 15 bp, Homo sapiens
agtcatgaagtccct

SEQ ID NO: 1797861 - DNA, 15 bp, Homo sapiens
gtcatgaagtccctc

SEQ ID NO: 1797862 - DNA, 15 bp, Homo sapiens
tcatgaagtccctct

SEQ ID NO: 1797863 - DNA, 15 bp, Homo sapiens
catgaagtccctctc

SEQ ID NO: 1797864 - DNA, 15 bp, Homo sapiens
atgaagtccctctca

SEQ ID NO: 1797865 - DNA, 15 bp, Homo sapiens
tgaagtccctctcac

SEQ ID NO: 1797866 - DNA, 15 bp, Homo sapiens
gaagtccctctcact

SEQ ID NO: 1797867 - DNA, 15 bp, Homo sapiens
aagtccctctcactc

SEQ ID NO: 1797868 - DNA, 15 bp, Homo sapiens
agtccctctcactct

SEQ ID NO: 1797869 - DNA, 15 bp, Homo sapiens
gtccctctcactctg

SEQ ID NO: 1797870 - DNA, 15 bp, Homo sapiens
tccctctcactctgt

SEQ ID NO: 1797871 - DNA, 15 bp, Homo sapiens
ccctctcactctgtc

SEQ ID NO: 1797872 - DNA, 15 bp, Homo sapiens
cctctcactctgtcc

SEQ ID NO: 1797873 - DNA, 15 bp, Homo sapiens
ctctcactctgtccc

SEQ ID NO: 1797874 - DNA, 15 bp, Homo sapiens
ctcactctgtccctg

SEQ ID NO: 1797875 - DNA, 15 bp, Homo sapiens
tcactctgtccctgt

SEQ ID NO: 1797876 - DNA, 15 bp, Homo sapiens
cactctgtccctgtc

SEQ ID NO: 1797877 - DNA, 15 bp, Homo sapiens
actctgtccctgtcc

SEQ ID NO: 1797878 - DNA, 15 bp, Homo sapiens
ctctgtccctgtccc

SEQ ID NO: 1797879 - DNA, 15 bp, Homo sapiens
tctgtccctgtccct

SEQ ID NO: 1797880 - DNA, 15 bp, Homo sapiens
ctgtccctgtccctg

SEQ ID NO: 1797881 - DNA, 15 bp, Homo sapiens
tgtccctgtccctgc

SEQ ID NO: 1797882 - DNA, 15 bp, Homo sapiens
gtccctgtccctgca

SEQ ID NO: 1797883 - DNA, 15 bp, Homo sapiens
tccctgtccctgcaa

SEQ ID NO: 1797884 - DNA, 15 bp, Homo sapiens
ccctgtccctgcaat

SEQ ID NO: 1797885 - DNA, 15 bp, Homo sapiens
cctgtccctgcaatc

SEQ ID NO: 1797886 - DNA, 15 bp, Homo sapiens
ctgtccctgcaatcc

SEQ ID NO: 1797887 - DNA, 15 bp, Homo sapiens
tgtccctgcaatcct

SEQ ID NO: 1797888 - DNA, 15 bp, Homo sapiens
gtccctgcaatcctg

SEQ ID NO: 1797889 - DNA, 15 bp, Homo sapiens
tccctgcaatcctga

SEQ ID NO: 1797890 - DNA, 15 bp, Homo sapiens
ccctgcaatcctgac

SEQ ID NO: 1797891 - DNA, 15 bp, Homo sapiens
cctgcaatcctgacc

SEQ ID NO: 1797892 - DNA, 15 bp, Homo sapiens
ctgcaatcctgacct

SEQ ID NO: 1797893 - DNA, 15 bp, Homo sapiens
tgcaatcctgaccta

SEQ ID NO: 1797894 - DNA, 15 bp, Homo sapiens
gcaatcctgacctaa

SEQ ID NO: 1797895 - DNA, 15 bp, Homo sapiens
caatcctgacctaaa

SEQ ID NO: 1797896 - DNA, 15 bp, Homo sapiens
aatcctgacctaaat

SEQ ID NO: 1797897 - DNA, 15 bp, Homo sapiens
atcctgacctaaata

SEQ ID NO: 1797898 - DNA, 15 bp, Homo sapiens
tcctgacctaaataa

SEQ ID NO: 1797899 - DNA, 15 bp, Homo sapiens
cctgacctaaataag

SEQ ID NO: 1797900 - DNA, 15 bp, Homo sapiens
ctgacctaaataaga

SEQ ID NO: 1797901 - DNA, 15 bp, Homo sapiens
tgacctaaataagaa

SEQ ID NO: 1797902 - DNA, 15 bp, Homo sapiens
gacctaaataagaaa

SEQ ID NO: 1797903 - DNA, 15 bp, Homo sapiens
acctaaataagaaaa

SEQ ID NO: 1797904 - DNA, 15 bp, Homo sapiens
cctaaataagaaaaa

SEQ ID NO: 1797905 - DNA, 15 bp, Homo sapiens
ctaaataagaaaaaa

SEQ ID NO: 1797906 - DNA, 15 bp, Homo sapiens
taaataagaaaaaag

SEQ ID NO: 1797907 - DNA, 15 bp, Homo sapiens
aaataagaaaaaagt

SEQ ID NO: 1797908 - DNA, 15 bp, Homo sapiens
aataagaaaaaagta

SEQ ID NO: 1797909 - DNA, 15 bp, Homo sapiens
ataagaaaaaagtag

SEQ ID NO: 1797910 - DNA, 15 bp, Homo sapiens
taagaaaaaagtaga

SEQ ID NO: 1797911 - DNA, 15 bp, Homo sapiens
aagaaaaaagtagat

SEQ ID NO: 1797912 - DNA, 15 bp, Homo sapiens
agaaaaaagtagatc

SEQ ID NO: 1797913 - DNA, 15 bp, Homo sapiens
gaaaaaagtagatcc

SEQ ID NO: 1797914 - DNA, 15 bp, Homo sapiens
aaaaaagtagatccc

SEQ ID NO: 1797915 - DNA, 15 bp, Homo sapiens
aaaaagtagatcccg

SEQ ID NO: 1797916 - DNA, 15 bp, Homo sapiens
aaaagtagatcccgg

SEQ ID NO: 1797917 - DNA, 15 bp, Homo sapiens
aaagtagatcccggc

SEQ ID NO: 1797918 - DNA, 15 bp, Homo sapiens
aagtagatcccggcc

SEQ ID NO: 1797919 - DNA, 15 bp, Homo sapiens
agtagatcccggcca

SEQ ID NO: 1797920 - DNA, 15 bp, Homo sapiens
gtagatcccggccag

SEQ ID NO: 1797921 - DNA, 15 bp, Homo sapiens
tagatcccggccagg

SEQ ID NO: 1797922 - DNA, 15 bp, Homo sapiens
agatcccggccaggc

SEQ ID NO: 1797923 - DNA, 15 bp, Homo sapiens
gatcccggccaggca

SEQ ID NO: 1797924 - DNA, 15 bp, Homo sapiens
atcccggccaggcac

SEQ ID NO: 1797925 - DNA, 15 bp, Homo sapiens
tcccggccaggcaca

SEQ ID NO: 1797926 - DNA, 15 bp, Homo sapiens
gcacagtggctcata

SEQ ID NO: 1797927 - DNA, 15 bp, Homo sapiens
cacagtggctcatac

SEQ ID NO: 1797928 - DNA, 15 bp, Homo sapiens
acagtggctcatacc

SEQ ID NO: 1797929 - DNA, 15 bp, Homo sapiens
cagtggctcatacct

SEQ ID NO: 1797930 - DNA, 15 bp, Homo sapiens
agtggctcatacctg

SEQ ID NO: 1797931 - DNA, 15 bp, Homo sapiens
catacctgtaatcct

SEQ ID NO: 1797932 - DNA, 15 bp, Homo sapiens
atacctgtaatccta

SEQ ID NO: 1797933 - DNA, 15 bp, Homo sapiens
tacctgtaatcctag

SEQ ID NO: 1797934 - DNA, 15 bp, Homo sapiens
acctgtaatcctagc

SEQ ID NO: 1797935 - DNA, 15 bp, Homo sapiens
cctagcactttggga

SEQ ID NO: 1797936 - DNA, 15 bp, Homo sapiens
ctagcactttgggag

SEQ ID NO: 1797937 - DNA, 15 bp, Homo sapiens
tagcactttgggagg

SEQ ID NO: 1797938 - DNA, 15 bp, Homo sapiens
gcgggcagatcacga

SEQ ID NO: 1797939 - DNA, 15 bp, Homo sapiens
cgggcagatcacgag

SEQ ID NO: 1797940 - DNA, 15 bp, Homo sapiens
ggcagatcacgaggt

SEQ ID NO: 1797941 - DNA, 15 bp, Homo sapiens
gcagatcacgaggtc

SEQ ID NO: 1797942 - DNA, 15 bp, Homo sapiens
cagatcacgaggtca

SEQ ID NO: 1797943 - DNA, 15 bp, Homo sapiens
aggagatcgagaccg

SEQ ID NO: 1797944 - DNA, 15 bp, Homo sapiens
ggagatcgagaccgt

SEQ ID NO: 1797945 - DNA, 15 bp, Homo sapiens
gagatcgagaccgtc

SEQ ID NO: 1797946 - DNA, 15 bp, Homo sapiens
agatcgagaccgtcc

SEQ ID NO: 1797947 - DNA, 15 bp, Homo sapiens
gatcgagaccgtcct

SEQ ID NO: 1797948 - DNA, 15 bp, Homo sapiens
atcgagaccgtcctg

SEQ ID NO: 1797949 - DNA, 15 bp, Homo sapiens
tcgagaccgtcctgg

SEQ ID NO: 1797950 - DNA, 15 bp, Homo sapiens
cgagaccgtcctggc

SEQ ID NO: 1797951 - DNA, 15 bp, Homo sapiens
gagaccgtcctggct

SEQ ID NO: 1797952 - DNA, 15 bp, Homo sapiens
agaccgtcctggcta

SEQ ID NO: 1797953 - DNA, 15 bp, Homo sapiens
gaccgtcctggctat

SEQ ID NO: 1797954 - DNA, 15 bp, Homo sapiens
accgtcctggctatc

SEQ ID NO: 1797955 - DNA, 15 bp, Homo sapiens
ccgtcctggctatca

SEQ ID NO: 1797956 - DNA, 15 bp, Homo sapiens
cgtcctggctatcac

SEQ ID NO: 1797957 - DNA, 15 bp, Homo sapiens
gtcctggctatcacg

SEQ ID NO: 1797958 - DNA, 15 bp, Homo sapiens
tcctggctatcacgg

SEQ ID NO: 1797959 - DNA, 15 bp, Homo sapiens
cctggctatcacggt

SEQ ID NO: 1797960 - DNA, 15 bp, Homo sapiens
ctggctatcacggtg

SEQ ID NO: 1797961 - DNA, 15 bp, Homo sapiens
tggctatcacggtga

SEQ ID NO: 1797962 - DNA, 15 bp, Homo sapiens
ggctatcacggtgaa

SEQ ID NO: 1797963 - DNA, 15 bp, Homo sapiens
gctatcacggtgaaa

SEQ ID NO: 1797964 - DNA, 15 bp, Homo sapiens
ctatcacggtgaaac

SEQ ID NO: 1797965 - DNA, 15 bp, Homo sapiens
tatcacggtgaaacc

SEQ ID NO: 1797966 - DNA, 15 bp, Homo sapiens
atcacggtgaaaccc

SEQ ID NO: 1797967 - DNA, 15 bp, Homo sapiens
tcacggtgaaacccc

SEQ ID NO: 1797968 - DNA, 15 bp, Homo sapiens
aattagctgggtgtc

SEQ ID NO: 1797969 - DNA, 15 bp, Homo sapiens
attagctgggtgtcg

SEQ ID NO: 1797970 - DNA, 15 bp, Homo sapiens
ttagctgggtgtcgt

SEQ ID NO: 1797971 - DNA, 15 bp, Homo sapiens
tagctgggtgtcgtg

SEQ ID NO: 1797972 - DNA, 15 bp, Homo sapiens
agctgggtgtcgtgg

SEQ ID NO: 1797973 - DNA, 15 bp, Homo sapiens
gctgggtgtcgtggt

SEQ ID NO: 1797974 - DNA, 15 bp, Homo sapiens
ctgggtgtcgtggtg

SEQ ID NO: 1797975 - DNA, 15 bp, Homo sapiens
tgggtgtcgtggtgg

SEQ ID NO: 1797976 - DNA, 15 bp, Homo sapiens
gggtgtcgtggtggg

SEQ ID NO: 1797977 - DNA, 15 bp, Homo sapiens
ggtgtcgtggtgggt

SEQ ID NO: 1797978 - DNA, 15 bp, Homo sapiens
gtgtcgtggtgggtg

SEQ ID NO: 1797979 - DNA, 15 bp, Homo sapiens
tgtcgtggtgggtgc

SEQ ID NO: 1797980 - DNA, 15 bp, Homo sapiens
gtcgtggtgggtgcc

SEQ ID NO: 1797981 - DNA, 15 bp, Homo sapiens
tcgtggtgggtgcct

SEQ ID NO: 1797982 - DNA, 15 bp, Homo sapiens
cgtggtgggtgcctg

SEQ ID NO: 1797983 - DNA, 15 bp, Homo sapiens
agctacttgggaggt

SEQ ID NO: 1797984 - DNA, 15 bp, Homo sapiens
gctacttgggaggtt

SEQ ID NO: 1797985 - DNA, 15 bp, Homo sapiens
ctacttgggaggttg

SEQ ID NO: 1797986 - DNA, 15 bp, Homo sapiens
tacttgggaggttga

SEQ ID NO: 1797987 - DNA, 15 bp, Homo sapiens
acttgggaggttgag

SEQ ID NO: 1797988 - DNA, 15 bp, Homo sapiens
cttgggaggttgagg

SEQ ID NO: 1797989 - DNA, 15 bp, Homo sapiens
tgggaggttgaggca

SEQ ID NO: 1797990 - DNA, 15 bp, Homo sapiens
gttgaggcaggagaa

SEQ ID NO: 1797991 - DNA, 15 bp, Homo sapiens
gtgaacctgggaggt

SEQ ID NO: 1797992 - DNA, 15 bp, Homo sapiens
cctgggaggtggagc

SEQ ID NO: 1797993 - DNA, 15 bp, Homo sapiens
ctgggaggtggagct

SEQ ID NO: 1797994 - DNA, 15 bp, Homo sapiens
tgggaggtggagctt

SEQ ID NO: 1797995 - DNA, 15 bp, Homo sapiens
gggaggtggagcttg

SEQ ID NO: 1797996 - DNA, 15 bp, Homo sapiens
ggaggtggagcttgc

SEQ ID NO: 1797997 - DNA, 15 bp, Homo sapiens
gaggtggagcttgca

SEQ ID NO: 1797998 - DNA, 15 bp, Homo sapiens
gagcttgcagtgagt

SEQ ID NO: 1797999 - DNA, 15 bp, Homo sapiens
agcttgcagtgagtc

SEQ ID NO: 1798000 - DNA, 15 bp, Homo sapiens
gcttgcagtgagtcg

SEQ ID NO: 1798001 - DNA, 15 bp, Homo sapiens
cttgcagtgagtcga

SEQ ID NO: 1798002 - DNA, 15 bp, Homo sapiens
ttgcagtgagtcgag

SEQ ID NO: 1798003 - DNA, 15 bp, Homo sapiens
tgcagtgagtcgaga

SEQ ID NO: 1798004 - DNA, 15 bp, Homo sapiens
gcagtgagtcgagat

SEQ ID NO: 1798005 - DNA, 15 bp, Homo sapiens
cagtgagtcgagatc

SEQ ID NO: 1798006 - DNA, 15 bp, Homo sapiens
agtgagtcgagatcg

SEQ ID NO: 1798007 - DNA, 15 bp, Homo sapiens
gtgagtcgagatcgc

SEQ ID NO: 1798008 - DNA, 15 bp, Homo sapiens
tgagtcgagatcgcg

SEQ ID NO: 1798009 - DNA, 15 bp, Homo sapiens
gagtcgagatcgcgc

SEQ ID NO: 1798010 - DNA, 15 bp, Homo sapiens
agtcgagatcgcgcc

SEQ ID NO: 1798011 - DNA, 15 bp, Homo sapiens
gtcgagatcgcgcca

SEQ ID NO: 1798012 - DNA, 15 bp, Homo sapiens
tcgagatcgcgccac

SEQ ID NO: 1798013 - DNA, 15 bp, Homo sapiens
gagatcgcgccactg

SEQ ID NO: 1798014 - DNA, 15 bp, Homo sapiens
agatcgcgccactgc

SEQ ID NO: 1798015 - DNA, 15 bp, Homo sapiens
gatcgcgccactgca

SEQ ID NO: 1798016 - DNA, 15 bp, Homo sapiens
atcgcgccactgcac

SEQ ID NO: 1798017 - DNA, 15 bp, Homo sapiens
tcgcgccactgcact

SEQ ID NO: 1798018 - DNA, 15 bp, Homo sapiens
cgcgccactgcactc

SEQ ID NO: 1798019 - DNA, 15 bp, Homo sapiens
tgggcaacagagcac

SEQ ID NO: 1798020 - DNA, 15 bp, Homo sapiens
gggcaacagagcacg

SEQ ID NO: 1798021 - DNA, 15 bp, Homo sapiens
ggcaacagagcacga

SEQ ID NO: 1798022 - DNA, 15 bp, Homo sapiens
gcaacagagcacgat

SEQ ID NO: 1798023 - DNA, 15 bp, Homo sapiens
caacagagcacgatc

SEQ ID NO: 1798024 - DNA, 15 bp, Homo sapiens
aacagagcacgatcc

SEQ ID NO: 1798025 - DNA, 15 bp, Homo sapiens
acagagcacgatccc

SEQ ID NO: 1798026 - DNA, 15 bp, Homo sapiens
cagagcacgatcccg

SEQ ID NO: 1798027 - DNA, 15 bp, Homo sapiens
agagcacgatcccgt

SEQ ID NO: 1798028 - DNA, 15 bp, Homo sapiens
gagcacgatcccgtc

SEQ ID NO: 1798029 - DNA, 15 bp, Homo sapiens
agcacgatcccgtct

SEQ ID NO: 1798030 - DNA, 15 bp, Homo sapiens
gcacgatcccgtctc

SEQ ID NO: 1798031 - DNA, 15 bp, Homo sapiens
cacgatcccgtctct

SEQ ID NO: 1798032 - DNA, 15 bp, Homo sapiens
acgatcccgtctctt

SEQ ID NO: 1798033 - DNA, 15 bp, Homo sapiens
cgatcccgtctctta

SEQ ID NO: 1798034 - DNA, 15 bp, Homo sapiens
gatcccgtctcttag

SEQ ID NO: 1798035 - DNA, 15 bp, Homo sapiens
atcccgtctcttaga

SEQ ID NO: 1798036 - DNA, 15 bp, Homo sapiens
tcccgtctcttagaa

SEQ ID NO: 1798037 - DNA, 15 bp, Homo sapiens
cccgtctcttagaaa

SEQ ID NO: 1798038 - DNA, 15 bp, Homo sapiens
ccgtctcttagaaag

SEQ ID NO: 1798039 - DNA, 15 bp, Homo sapiens
cgtctcttagaaagg

SEQ ID NO: 1798040 - DNA, 15 bp, Homo sapiens
gtctcttagaaagga

SEQ ID NO: 1798041 - DNA, 15 bp, Homo sapiens
tctcttagaaaggaa

SEQ ID NO: 1798042 - DNA, 15 bp, Homo sapiens
ctcttagaaaggaat

SEQ ID NO: 1798043 - DNA, 15 bp, Homo sapiens
tcttagaaaggaatg

SEQ ID NO: 1798044 - DNA, 15 bp, Homo sapiens
cttagaaaggaatga

SEQ ID NO: 1798045 - DNA, 15 bp, Homo sapiens
ttagaaaggaatgaa

SEQ ID NO: 1798046 - DNA, 15 bp, Homo sapiens
tagaaaggaatgaat

SEQ ID NO: 1798047 - DNA, 15 bp, Homo sapiens
agaaaggaatgaata

SEQ ID NO: 1798048 - DNA, 15 bp, Homo sapiens
gaaaggaatgaataa

SEQ ID NO: 1798049 - DNA, 15 bp, Homo sapiens
aaaggaatgaataaa

SEQ ID NO: 1798050 - DNA, 15 bp, Homo sapiens
aaggaatgaataaat

SEQ ID NO: 1798051 - DNA, 15 bp, Homo sapiens
aggaatgaataaatt

SEQ ID NO: 1798052 - DNA, 15 bp, Homo sapiens
ggaatgaataaatta

SEQ ID NO: 1798053 - DNA, 15 bp, Homo sapiens
gaatgaataaattac

SEQ ID NO: 1798054 - DNA, 15 bp, Homo sapiens
aatgaataaattaca

SEQ ID NO: 1798055 - DNA, 15 bp, Homo sapiens
atgaataaattacac

SEQ ID NO: 1798056 - DNA, 15 bp, Homo sapiens
tgaataaattacact

SEQ ID NO: 1798057 - DNA, 15 bp, Homo sapiens
gaataaattacactg

SEQ ID NO: 1798058 - DNA, 15 bp, Homo sapiens
aataaattacactga

SEQ ID NO: 1798059 - DNA, 15 bp, Homo sapiens
ataaattacactgaa

SEQ ID NO: 1798060 - DNA, 15 bp, Homo sapiens
taaattacactgaat

SEQ ID NO: 1798061 - DNA, 15 bp, Homo sapiens
aaattacactgaata

SEQ ID NO: 1798062 - DNA, 15 bp, Homo sapiens
aattacactgaatag

SEQ ID NO: 1798063 - DNA, 15 bp, Homo sapiens
attacactgaatagt

SEQ ID NO: 1798064 - DNA, 15 bp, Homo sapiens
ttacactgaatagtc

SEQ ID NO: 1798065 - DNA, 15 bp, Homo sapiens
tacactgaatagtct

SEQ ID NO: 1798066 - DNA, 15 bp, Homo sapiens
acactgaatagtctc

SEQ ID NO: 1798067 - DNA, 15 bp, Homo sapiens
cactgaatagtctcc

SEQ ID NO: 1798068 - DNA, 15 bp, Homo sapiens
actgaatagtctcct

SEQ ID NO: 1798069 - DNA, 15 bp, Homo sapiens
ctgaatagtctcctg

SEQ ID NO: 1798070 - DNA, 15 bp, Homo sapiens
tgaatagtctcctgt

SEQ ID NO: 1798071 - DNA, 15 bp, Homo sapiens
gaatagtctcctgtt

SEQ ID NO: 1798072 - DNA, 15 bp, Homo sapiens
aatagtctcctgttt

SEQ ID NO: 1798073 - DNA, 15 bp, Homo sapiens
atagtctcctgtttt

SEQ ID NO: 1798074 - DNA, 15 bp, Homo sapiens
tagtctcctgttttg

SEQ ID NO: 1798075 - DNA, 15 bp, Homo sapiens
agtctcctgttttgt

SEQ ID NO: 1798076 - DNA, 15 bp, Homo sapiens
gtctcctgttttgtt

SEQ ID NO: 1798077 - DNA, 15 bp, Homo sapiens
tctcctgttttgttt

SEQ ID NO: 1798078 - DNA, 15 bp, Homo sapiens
ctcctgttttgtttt

SEQ ID NO: 1798079 - DNA, 15 bp, Homo sapiens
tcctgttttgttttt

SEQ ID NO: 1798080 - DNA, 15 bp, Homo sapiens
gttttgttttttttg

SEQ ID NO: 1798081 - DNA, 15 bp, Homo sapiens
ttttgttttttttgt

SEQ ID NO: 1798082 - DNA, 15 bp, Homo sapiens
tttgttttttttgtt

SEQ ID NO: 1798083 - DNA, 15 bp, Homo sapiens
ttgttttttttgttg

SEQ ID NO: 1798084 - DNA, 15 bp, Homo sapiens
tgttttttttgttgt

SEQ ID NO: 1798085 - DNA, 15 bp, Homo sapiens
gttttttttgttgtt

SEQ ID NO: 1798086 - DNA, 15 bp, Homo sapiens
ttttttttgttgttg

SEQ ID NO: 1798087 - DNA, 15 bp, Homo sapiens
tttttttgttgttgt

SEQ ID NO: 1798088 - DNA, 15 bp, Homo sapiens
ttgttgttgttgttt

SEQ ID NO: 1798089 - DNA, 15 bp, Homo sapiens
gttgttgttgttttg

SEQ ID NO: 1798090 - DNA, 15 bp, Homo sapiens
tgttttgtttttttg

SEQ ID NO: 1798091 - DNA, 15 bp, Homo sapiens
gttttgtttttttga

SEQ ID NO: 1798092 - DNA, 15 bp, Homo sapiens
ttttgtttttttgag

SEQ ID NO: 1798093 - DNA, 15 bp, Homo sapiens
tttgtttttttgagg

SEQ ID NO: 1798094 - DNA, 15 bp, Homo sapiens
ttgtttttttgaggc

SEQ ID NO: 1798095 - DNA, 15 bp, Homo sapiens
tgtttttttgaggca

SEQ ID NO: 1798096 - DNA, 15 bp, Homo sapiens
gtttttttgaggcag

SEQ ID NO: 1798097 - DNA, 15 bp, Homo sapiens
tttttttgaggcagt

SEQ ID NO: 1798098 - DNA, 15 bp, Homo sapiens
ttttttgaggcagtc

SEQ ID NO: 1798099 - DNA, 15 bp, Homo sapiens
tttttgaggcagtct

SEQ ID NO: 1798100 - DNA, 15 bp, Homo sapiens
ttttgaggcagtctc

SEQ ID NO: 1798101 - DNA, 15 bp, Homo sapiens
tttgaggcagtctct

SEQ ID NO: 1798102 - DNA, 15 bp, Homo sapiens
ttgaggcagtctctc

SEQ ID NO: 1798103 - DNA, 15 bp, Homo sapiens
tgaggcagtctctct

SEQ ID NO: 1798104 - DNA, 15 bp, Homo sapiens
gaggcagtctctctc

SEQ ID NO: 1798105 - DNA, 15 bp, Homo sapiens
aggcagtctctctct

SEQ ID NO: 1798106 - DNA, 15 bp, Homo sapiens
ggcagtctctctctg

SEQ ID NO: 1798107 - DNA, 15 bp, Homo sapiens
gcagtctctctctgt

SEQ ID NO: 1798108 - DNA, 15 bp, Homo sapiens
cagtctctctctgtt

SEQ ID NO: 1798109 - DNA, 15 bp, Homo sapiens
gtctctctctgttgc

SEQ ID NO: 1798110 - DNA, 15 bp, Homo sapiens
tctctctctgttgcc

SEQ ID NO: 1798111 - DNA, 15 bp, Homo sapiens
ctctctctgttgcct

SEQ ID NO: 1798112 - DNA, 15 bp, Homo sapiens
tctctctgttgccta

SEQ ID NO: 1798113 - DNA, 15 bp, Homo sapiens
ctctctgttgcctag

SEQ ID NO: 1798114 - DNA, 15 bp, Homo sapiens
tctctgttgcctagg

SEQ ID NO: 1798115 - DNA, 15 bp, Homo sapiens
ctctgttgcctaggc

SEQ ID NO: 1798116 - DNA, 15 bp, Homo sapiens
tctgttgcctaggct

SEQ ID NO: 1798117 - DNA, 15 bp, Homo sapiens
ctgttgcctaggctg

SEQ ID NO: 1798118 - DNA, 15 bp, Homo sapiens
tgttgcctaggctgg

SEQ ID NO: 1798119 - DNA, 15 bp, Homo sapiens
gttgcctaggctgga

SEQ ID NO: 1798120 - DNA, 15 bp, Homo sapiens
ttgcctaggctggat

SEQ ID NO: 1798121 - DNA, 15 bp, Homo sapiens
tgcctaggctggatt

SEQ ID NO: 1798122 - DNA, 15 bp, Homo sapiens
gcctaggctggattg

SEQ ID NO: 1798123 - DNA, 15 bp, Homo sapiens
cctaggctggattgc

SEQ ID NO: 1798124 - DNA, 15 bp, Homo sapiens
ctaggctggattgca

SEQ ID NO: 1798125 - DNA, 15 bp, Homo sapiens
taggctggattgcag

SEQ ID NO: 1798126 - DNA, 15 bp, Homo sapiens
aggctggattgcagt

SEQ ID NO: 1798127 - DNA, 15 bp, Homo sapiens
ggctggattgcagtg

SEQ ID NO: 1798128 - DNA, 15 bp, Homo sapiens
gctggattgcagtgg

SEQ ID NO: 1798129 - DNA, 15 bp, Homo sapiens
ctggattgcagtggt

SEQ ID NO: 1798130 - DNA, 15 bp, Homo sapiens
tggattgcagtggtg

SEQ ID NO: 1798131 - DNA, 15 bp, Homo sapiens
ggattgcagtggtgt

SEQ ID NO: 1798132 - DNA, 15 bp, Homo sapiens
gctcactgcaacccg

SEQ ID NO: 1798133 - DNA, 15 bp, Homo sapiens
ctcactgcaacccgc

SEQ ID NO: 1798134 - DNA, 15 bp, Homo sapiens
tcactgcaacccgct

SEQ ID NO: 1798135 - DNA, 15 bp, Homo sapiens
cactgcaacccgctc

SEQ ID NO: 1798136 - DNA, 15 bp, Homo sapiens
actgcaacccgctcc

SEQ ID NO: 1798137 - DNA, 15 bp, Homo sapiens
ctgcaacccgctcct

SEQ ID NO: 1798138 - DNA, 15 bp, Homo sapiens
tgcaacccgctcctc

SEQ ID NO: 1798139 - DNA, 15 bp, Homo sapiens
gcaacccgctcctcc

SEQ ID NO: 1798140 - DNA, 15 bp, Homo sapiens
caacccgctcctcct

SEQ ID NO: 1798141 - DNA, 15 bp, Homo sapiens
aacccgctcctcctg

SEQ ID NO: 1798142 - DNA, 15 bp, Homo sapiens
acccgctcctcctgg

SEQ ID NO: 1798143 - DNA, 15 bp, Homo sapiens
cccgctcctcctggg

SEQ ID NO: 1798144 - DNA, 15 bp, Homo sapiens
ccgctcctcctgggt

SEQ ID NO: 1798145 - DNA, 15 bp, Homo sapiens
cgctcctcctgggtt

SEQ ID NO: 1798146 - DNA, 15 bp, Homo sapiens
gctcctcctgggttc

SEQ ID NO: 1798147 - DNA, 15 bp, Homo sapiens
ctcctcctgggttca

SEQ ID NO: 1798148 - DNA, 15 bp, Homo sapiens
tcctcctgggttcaa

SEQ ID NO: 1798149 - DNA, 15 bp, Homo sapiens
ctgggttcaagcgag

SEQ ID NO: 1798150 - DNA, 15 bp, Homo sapiens
tgggttcaagcgagt

SEQ ID NO: 1798151 - DNA, 15 bp, Homo sapiens
gggttcaagcgagtc

SEQ ID NO: 1798152 - DNA, 15 bp, Homo sapiens
ggttcaagcgagtct

SEQ ID NO: 1798153 - DNA, 15 bp, Homo sapiens
gttcaagcgagtctc

SEQ ID NO: 1798154 - DNA, 15 bp, Homo sapiens
ttcaagcgagtctca

SEQ ID NO: 1798155 - DNA, 15 bp, Homo sapiens
tcaagcgagtctcat

SEQ ID NO: 1798156 - DNA, 15 bp, Homo sapiens
caagcgagtctcatg

SEQ ID NO: 1798157 - DNA, 15 bp, Homo sapiens
aagcgagtctcatgt

SEQ ID NO: 1798158 - DNA, 15 bp, Homo sapiens
agcgagtctcatgtc

SEQ ID NO: 1798159 - DNA, 15 bp, Homo sapiens
gcgagtctcatgtct

SEQ ID NO: 1798160 - DNA, 15 bp, Homo sapiens
cgagtctcatgtctc

SEQ ID NO: 1798161 - DNA, 15 bp, Homo sapiens
gagtctcatgtctca

SEQ ID NO: 1798162 - DNA, 15 bp, Homo sapiens
agtctcatgtctcag

SEQ ID NO: 1798163 - DNA, 15 bp, Homo sapiens
gtctcatgtctcagc

SEQ ID NO: 1798164 - DNA, 15 bp, Homo sapiens
tctcatgtctcagcc

SEQ ID NO: 1798165 - DNA, 15 bp, Homo sapiens
ctcatgtctcagcct

SEQ ID NO: 1798166 - DNA, 15 bp, Homo sapiens
tcatgtctcagcctc

SEQ ID NO: 1798167 - DNA, 15 bp, Homo sapiens
catgtctcagcctcc

SEQ ID NO: 1798168 - DNA, 15 bp, Homo sapiens
atgtctcagcctccc

SEQ ID NO: 1798169 - DNA, 15 bp, Homo sapiens
tgtctcagcctccca

SEQ ID NO: 1798170 - DNA, 15 bp, Homo sapiens
gtctcagcctcccaa

SEQ ID NO: 1798171 - DNA, 15 bp, Homo sapiens
tgggattacaggtgg

SEQ ID NO: 1798172 - DNA, 15 bp, Homo sapiens
gggattacaggtggg

SEQ ID NO: 1798173 - DNA, 15 bp, Homo sapiens
ggattacaggtgggt

SEQ ID NO: 1798174 - DNA, 15 bp, Homo sapiens
gattacaggtgggtg

SEQ ID NO: 1798175 - DNA, 15 bp, Homo sapiens
attacaggtgggtgc

SEQ ID NO: 1798176 - DNA, 15 bp, Homo sapiens
ttacaggtgggtgcc

SEQ ID NO: 1798177 - DNA, 15 bp, Homo sapiens
tacaggtgggtgcca

SEQ ID NO: 1798178 - DNA, 15 bp, Homo sapiens
acaggtgggtgccac

SEQ ID NO: 1798179 - DNA, 15 bp, Homo sapiens
caggtgggtgccact

SEQ ID NO: 1798180 - DNA, 15 bp, Homo sapiens
aggtgggtgccacta

SEQ ID NO: 1798181 - DNA, 15 bp, Homo sapiens
ggtgggtgccactat

SEQ ID NO: 1798182 - DNA, 15 bp, Homo sapiens
gtgggtgccactatg

SEQ ID NO: 1798183 - DNA, 15 bp, Homo sapiens
tgggtgccactatgc

SEQ ID NO: 1798184 - DNA, 15 bp, Homo sapiens
gggtgccactatgcc

SEQ ID NO: 1798185 - DNA, 15 bp, Homo sapiens
ggtgccactatgcct

SEQ ID NO: 1798186 - DNA, 15 bp, Homo sapiens
gtgccactatgcctg

SEQ ID NO: 1798187 - DNA, 15 bp, Homo sapiens
tgccactatgcctgg

SEQ ID NO: 1798188 - DNA, 15 bp, Homo sapiens
gccactatgcctggc

SEQ ID NO: 1798189 - DNA, 15 bp, Homo sapiens
ccactatgcctggct

SEQ ID NO: 1798190 - DNA, 15 bp, Homo sapiens
cactatgcctggctc

SEQ ID NO: 1798191 - DNA, 15 bp, Homo sapiens
actatgcctggctca

SEQ ID NO: 1798192 - DNA, 15 bp, Homo sapiens
ctatgcctggctcat

SEQ ID NO: 1798193 - DNA, 15 bp, Homo sapiens
tatgcctggctcatt

SEQ ID NO: 1798194 - DNA, 15 bp, Homo sapiens
atgcctggctcattt

SEQ ID NO: 1798195 - DNA, 15 bp, Homo sapiens
tgcctggctcatttt

SEQ ID NO: 1798196 - DNA, 15 bp, Homo sapiens
gcctggctcattttt

SEQ ID NO: 1798197 - DNA, 15 bp, Homo sapiens
cctggctcatttttt

SEQ ID NO: 1798198 - DNA, 15 bp, Homo sapiens
ctggctcattttttt

SEQ ID NO: 1798199 - DNA, 15 bp, Homo sapiens
tggctcatttttttt

SEQ ID NO: 1798200 - DNA, 15 bp, Homo sapiens
ggctcattttttttt

SEQ ID NO: 1798201 - DNA, 15 bp, Homo sapiens
gctcatttttttttg

SEQ ID NO: 1798202 - DNA, 15 bp, Homo sapiens
ctcatttttttttgt

SEQ ID NO: 1798203 - DNA, 15 bp, Homo sapiens
tcatttttttttgta

SEQ ID NO: 1798204 - DNA, 15 bp, Homo sapiens
catttttttttgtat

SEQ ID NO: 1798205 - DNA, 15 bp, Homo sapiens
ttgtattttttgtag

SEQ ID NO: 1798206 - DNA, 15 bp, Homo sapiens
tgtattttttgtaga

SEQ ID NO: 1798207 - DNA, 15 bp, Homo sapiens
gtattttttgtagag

SEQ ID NO: 1798208 - DNA, 15 bp, Homo sapiens
tgtagagatatggtt

SEQ ID NO: 1798209 - DNA, 15 bp, Homo sapiens
gtagagatatggttt

SEQ ID NO: 1798210 - DNA, 15 bp, Homo sapiens
tagagatatggtttt

SEQ ID NO: 1798211 - DNA, 15 bp, Homo sapiens
agagatatggttttg

SEQ ID NO: 1798212 - DNA, 15 bp, Homo sapiens
gagatatggttttgc

SEQ ID NO: 1798213 - DNA, 15 bp, Homo sapiens
agatatggttttgcc

SEQ ID NO: 1798214 - DNA, 15 bp, Homo sapiens
gatatggttttgcca

SEQ ID NO: 1798215 - DNA, 15 bp, Homo sapiens
atatggttttgccat

SEQ ID NO: 1798216 - DNA, 15 bp, Homo sapiens
tatggttttgccatg

SEQ ID NO: 1798217 - DNA, 15 bp, Homo sapiens
atggttttgccatgg

SEQ ID NO: 1798218 - DNA, 15 bp, Homo sapiens
tggttttgccatggt

SEQ ID NO: 1798219 - DNA, 15 bp, Homo sapiens
ggttttgccatggtg

SEQ ID NO: 1798220 - DNA, 15 bp, Homo sapiens
gttttgccatggtgg

SEQ ID NO: 1798221 - DNA, 15 bp, Homo sapiens
ttttgccatggtggc

SEQ ID NO: 1798222 - DNA, 15 bp, Homo sapiens
tttgccatggtggcc

SEQ ID NO: 1798223 - DNA, 15 bp, Homo sapiens
ttgccatggtggcca

SEQ ID NO: 1798224 - DNA, 15 bp, Homo sapiens
tgccatggtggccag

SEQ ID NO: 1798225 - DNA, 15 bp, Homo sapiens
gccatggtggccagg

SEQ ID NO: 1798226 - DNA, 15 bp, Homo sapiens
ccatggtggccaggc

SEQ ID NO: 1798227 - DNA, 15 bp, Homo sapiens
catggtggccaggct

SEQ ID NO: 1798228 - DNA, 15 bp, Homo sapiens
atggtggccaggctg

SEQ ID NO: 1798229 - DNA, 15 bp, Homo sapiens
tggtggccaggctga

SEQ ID NO: 1798230 - DNA, 15 bp, Homo sapiens
ggtggccaggctgat

SEQ ID NO: 1798231 - DNA, 15 bp, Homo sapiens
gtggccaggctgatc

SEQ ID NO: 1798232 - DNA, 15 bp, Homo sapiens
tggccaggctgatct

SEQ ID NO: 1798233 - DNA, 15 bp, Homo sapiens
ggccaggctgatctc

SEQ ID NO: 1798234 - DNA, 15 bp, Homo sapiens
gccaggctgatctcc

SEQ ID NO: 1798235 - DNA, 15 bp, Homo sapiens
ccaggctgatctcca

SEQ ID NO: 1798236 - DNA, 15 bp, Homo sapiens
caggctgatctccaa

SEQ ID NO: 1798237 - DNA, 15 bp, Homo sapiens
aggctgatctccaac

SEQ ID NO: 1798238 - DNA, 15 bp, Homo sapiens
ggctgatctccaact

SEQ ID NO: 1798239 - DNA, 15 bp, Homo sapiens
gctgatctccaactc

SEQ ID NO: 1798240 - DNA, 15 bp, Homo sapiens
ctgatctccaactcc

SEQ ID NO: 1798241 - DNA, 15 bp, Homo sapiens
tgatctccaactcct

SEQ ID NO: 1798242 - DNA, 15 bp, Homo sapiens
gatctccaactcctg

SEQ ID NO: 1798243 - DNA, 15 bp, Homo sapiens
atctccaactcctgg

SEQ ID NO: 1798244 - DNA, 15 bp, Homo sapiens
tctccaactcctggc

SEQ ID NO: 1798245 - DNA, 15 bp, Homo sapiens
ctccaactcctggcc

SEQ ID NO: 1798246 - DNA, 15 bp, Homo sapiens
tccaactcctggcct

SEQ ID NO: 1798247 - DNA, 15 bp, Homo sapiens
ccaactcctggcctc

SEQ ID NO: 1798248 - DNA, 15 bp, Homo sapiens
caactcctggcctca

SEQ ID NO: 1798249 - DNA, 15 bp, Homo sapiens
cttgccttggcctct

SEQ ID NO: 1798250 - DNA, 15 bp, Homo sapiens
ttgccttggcctctc

SEQ ID NO: 1798251 - DNA, 15 bp, Homo sapiens
tgccttggcctctca

SEQ ID NO: 1798252 - DNA, 15 bp, Homo sapiens
gccttggcctctcaa

SEQ ID NO: 1798253 - DNA, 15 bp, Homo sapiens
ccttggcctctcaaa

SEQ ID NO: 1798254 - DNA, 15 bp, Homo sapiens
cttggcctctcaaag

SEQ ID NO: 1798255 - DNA, 15 bp, Homo sapiens
ttggcctctcaaagt

SEQ ID NO: 1798256 - DNA, 15 bp, Homo sapiens
tggcctctcaaagtg

SEQ ID NO: 1798257 - DNA, 15 bp, Homo sapiens
caggcatgagtcact

SEQ ID NO: 1798258 - DNA, 15 bp, Homo sapiens
aggcatgagtcactg

SEQ ID NO: 1798259 - DNA, 15 bp, Homo sapiens
ggcatgagtcactgc

SEQ ID NO: 1798260 - DNA, 15 bp, Homo sapiens
gcatgagtcactgca

SEQ ID NO: 1798261 - DNA, 15 bp, Homo sapiens
catgagtcactgcac

SEQ ID NO: 1798262 - DNA, 15 bp, Homo sapiens
atgagtcactgcacc

SEQ ID NO: 1798263 - DNA, 15 bp, Homo sapiens
tgagtcactgcaccg

SEQ ID NO: 1798264 - DNA, 15 bp, Homo sapiens
gagtcactgcaccga

SEQ ID NO: 1798265 - DNA, 15 bp, Homo sapiens
agtcactgcaccgag

SEQ ID NO: 1798266 - DNA, 15 bp, Homo sapiens
gtcactgcaccgagc

SEQ ID NO: 1798267 - DNA, 15 bp, Homo sapiens
tcactgcaccgagca

SEQ ID NO: 1798268 - DNA, 15 bp, Homo sapiens
cactgcaccgagcat

SEQ ID NO: 1798269 - DNA, 15 bp, Homo sapiens
actgcaccgagcatc

SEQ ID NO: 1798270 - DNA, 15 bp, Homo sapiens
ctgcaccgagcatct

SEQ ID NO: 1798271 - DNA, 15 bp, Homo sapiens
tgcaccgagcatctc

SEQ ID NO: 1798272 - DNA, 15 bp, Homo sapiens
gcaccgagcatctcc

SEQ ID NO: 1798273 - DNA, 15 bp, Homo sapiens
caccgagcatctcct

SEQ ID NO: 1798274 - DNA, 15 bp, Homo sapiens
accgagcatctcctg

SEQ ID NO: 1798275 - DNA, 15 bp, Homo sapiens
ccgagcatctcctgg

SEQ ID NO: 1798276 - DNA, 15 bp, Homo sapiens
cgagcatctcctggt

SEQ ID NO: 1798277 - DNA, 15 bp, Homo sapiens
gagcatctcctggtt

SEQ ID NO: 1798278 - DNA, 15 bp, Homo sapiens
agcatctcctggttg

SEQ ID NO: 1798279 - DNA, 15 bp, Homo sapiens
gcatctcctggttgt

SEQ ID NO: 1798280 - DNA, 15 bp, Homo sapiens
catctcctggttgtt

SEQ ID NO: 1798281 - DNA, 15 bp, Homo sapiens
atctcctggttgttt

SEQ ID NO: 1798282 - DNA, 15 bp, Homo sapiens
tctcctggttgttta

SEQ ID NO: 1798283 - DNA, 15 bp, Homo sapiens
ctcctggttgtttat

SEQ ID NO: 1798284 - DNA, 15 bp, Homo sapiens
tcctggttgtttata

SEQ ID NO: 1798285 - DNA, 15 bp, Homo sapiens
cctggttgtttatag

SEQ ID NO: 1798286 - DNA, 15 bp, Homo sapiens
ctggttgtttataga

SEQ ID NO: 1798287 - DNA, 15 bp, Homo sapiens
tggttgtttatagat

SEQ ID NO: 1798288 - DNA, 15 bp, Homo sapiens
ggttgtttatagatt

SEQ ID NO: 1798289 - DNA, 15 bp, Homo sapiens
gttgtttatagattc

SEQ ID NO: 1798290 - DNA, 15 bp, Homo sapiens
ttgtttatagattca

SEQ ID NO: 1798291 - DNA, 15 bp, Homo sapiens
tgtttatagattcag

SEQ ID NO: 1798292 - DNA, 15 bp, Homo sapiens
gtttatagattcagt

SEQ ID NO: 1798293 - DNA, 15 bp, Homo sapiens
tttatagattcagtg

SEQ ID NO: 1798294 - DNA, 15 bp, Homo sapiens
ttatagattcagtgt

SEQ ID NO: 1798295 - DNA, 15 bp, Homo sapiens
tatagattcagtgtt

SEQ ID NO: 1798296 - DNA, 15 bp, Homo sapiens
atagattcagtgttg

SEQ ID NO: 1798297 - DNA, 15 bp, Homo sapiens
tagattcagtgttgt

SEQ ID NO: 1798298 - DNA, 15 bp, Homo sapiens
agattcagtgttgtt

SEQ ID NO: 1798299 - DNA, 15 bp, Homo sapiens
gattcagtgttgttt

SEQ ID NO: 1798300 - DNA, 15 bp, Homo sapiens
attcagtgttgtttg

SEQ ID NO: 1798301 - DNA, 15 bp, Homo sapiens
ttcagtgttgtttgg

SEQ ID NO: 1798302 - DNA, 15 bp, Homo sapiens
tcagtgttgtttggc

SEQ ID NO: 1798303 - DNA, 15 bp, Homo sapiens
cagtgttgtttggct

SEQ ID NO: 1798304 - DNA, 15 bp, Homo sapiens
agtgttgtttggctt

SEQ ID NO: 1798305 - DNA, 15 bp, Homo sapiens
gtgttgtttggcttc

SEQ ID NO: 1798306 - DNA, 15 bp, Homo sapiens
tgttgtttggcttca

SEQ ID NO: 1798307 - DNA, 15 bp, Homo sapiens
gttgtttggcttcag

SEQ ID NO: 1798308 - DNA, 15 bp, Homo sapiens
ttgtttggcttcagg

SEQ ID NO: 1798309 - DNA, 15 bp, Homo sapiens
tgtttggcttcaggt

SEQ ID NO: 1798310 - DNA, 15 bp, Homo sapiens
gtttggcttcaggtt

SEQ ID NO: 1798311 - DNA, 15 bp, Homo sapiens
tttggcttcaggttt

SEQ ID NO: 1798312 - DNA, 15 bp, Homo sapiens
ttggcttcaggttta

SEQ ID NO: 1798313 - DNA, 15 bp, Homo sapiens
tggcttcaggtttac

SEQ ID NO: 1798314 - DNA, 15 bp, Homo sapiens
ggcttcaggtttact

SEQ ID NO: 1798315 - DNA, 15 bp, Homo sapiens
gcttcaggtttactt

SEQ ID NO: 1798316 - DNA, 15 bp, Homo sapiens
cttcaggtttacttg

SEQ ID NO: 1798317 - DNA, 15 bp, Homo sapiens
ttcaggtttacttgc

SEQ ID NO: 1798318 - DNA, 15 bp, Homo sapiens
tcaggtttacttgcc

SEQ ID NO: 1798319 - DNA, 15 bp, Homo sapiens
caggtttacttgcct

SEQ ID NO: 1798320 - DNA, 15 bp, Homo sapiens
aggtttacttgcctg

SEQ ID NO: 1798321 - DNA, 15 bp, Homo sapiens
ggtttacttgcctgt

SEQ ID NO: 1798322 - DNA, 15 bp, Homo sapiens
gtttacttgcctgtg

SEQ ID NO: 1798323 - DNA, 15 bp, Homo sapiens
tttacttgcctgtgt

SEQ ID NO: 1798324 - DNA, 15 bp, Homo sapiens
ttacttgcctgtgta

SEQ ID NO: 1798325 - DNA, 15 bp, Homo sapiens
tacttgcctgtgtaa

SEQ ID NO: 1798326 - DNA, 15 bp, Homo sapiens
acttgcctgtgtaaa

SEQ ID NO: 1798327 - DNA, 15 bp, Homo sapiens
cttgcctgtgtaaaa

SEQ ID NO: 1798328 - DNA, 15 bp, Homo sapiens
ttgcctgtgtaaaaa

SEQ ID NO: 1798329 - DNA, 15 bp, Homo sapiens
tgcctgtgtaaaaaa

SEQ ID NO: 1798330 - DNA, 15 bp, Homo sapiens
gcctgtgtaaaaaaa

SEQ ID NO: 1798331 - DNA, 15 bp, Homo sapiens
cctgtgtaaaaaaaa

SEQ ID NO: 1798332 - DNA, 15 bp, Homo sapiens
ctgtgtaaaaaaaac

SEQ ID NO: 1798333 - DNA, 15 bp, Homo sapiens
tgtgtaaaaaaaaca

SEQ ID NO: 1798334 - DNA, 15 bp, Homo sapiens
gtgtaaaaaaaacaa

SEQ ID NO: 1798335 - DNA, 15 bp, Homo sapiens
tgtaaaaaaaacaaa

SEQ ID NO: 1798336 - DNA, 15 bp, Homo sapiens
gtaaaaaaaacaaaa

SEQ ID NO: 1798337 - DNA, 15 bp, Homo sapiens
taaaaaaaacaaaaa

SEQ ID NO: 1798338 - DNA, 15 bp, Homo sapiens
acaaaaacaaaaaac

SEQ ID NO: 1798339 - DNA, 15 bp, Homo sapiens
caaaaacaaaaaaca

SEQ ID NO: 1798340 - DNA, 15 bp, Homo sapiens
aacaaaaaacaaaac

SEQ ID NO: 1798341 - DNA, 15 bp, Homo sapiens
acaaaaaacaaaaca

SEQ ID NO: 1798342 - DNA, 15 bp, Homo sapiens
caaaaaacaaaacaa

SEQ ID NO: 1798343 - DNA, 15 bp, Homo sapiens
caaaacaacaacaaa

SEQ ID NO: 1798344 - DNA, 15 bp, Homo sapiens
aaaacaacaacaaac

SEQ ID NO: 1798345 - DNA, 15 bp, Homo sapiens
aaacaacaacaaaca

SEQ ID NO: 1798346 - DNA, 15 bp, Homo sapiens
caacaacaaacaact

SEQ ID NO: 1798347 - DNA, 15 bp, Homo sapiens
aacaacaaacaactt

SEQ ID NO: 1798348 - DNA, 15 bp, Homo sapiens
acaacaaacaacttt

SEQ ID NO: 1798349 - DNA, 15 bp, Homo sapiens
caacaaacaacttta

SEQ ID NO: 1798350 - DNA, 15 bp, Homo sapiens
aacaaacaactttag

SEQ ID NO: 1798351 - DNA, 15 bp, Homo sapiens
acaaacaactttaga

SEQ ID NO: 1798352 - DNA, 15 bp, Homo sapiens
caaacaactttagac

SEQ ID NO: 1798353 - DNA, 15 bp, Homo sapiens
aaacaactttagaca

SEQ ID NO: 1798354 - DNA, 15 bp, Homo sapiens
aacaactttagacaa

SEQ ID NO: 1798355 - DNA, 15 bp, Homo sapiens
acaactttagacaaa

SEQ ID NO: 1798356 - DNA, 15 bp, Homo sapiens
caactttagacaaat

SEQ ID NO: 1798357 - DNA, 15 bp, Homo sapiens
aactttagacaaata

SEQ ID NO: 1798358 - DNA, 15 bp, Homo sapiens
actttagacaaataa

SEQ ID NO: 1798359 - DNA, 15 bp, Homo sapiens
ctttagacaaataaa

SEQ ID NO: 1798360 - DNA, 15 bp, Homo sapiens
tttagacaaataaat

SEQ ID NO: 1798361 - DNA, 15 bp, Homo sapiens
ttagacaaataaata

SEQ ID NO: 1798362 - DNA, 15 bp, Homo sapiens
tagacaaataaatag

SEQ ID NO: 1798363 - DNA, 15 bp, Homo sapiens
agacaaataaatagt

SEQ ID NO: 1798364 - DNA, 15 bp, Homo sapiens
gacaaataaatagta

SEQ ID NO: 1798365 - DNA, 15 bp, Homo sapiens
acaaataaatagtag

SEQ ID NO: 1798366 - DNA, 15 bp, Homo sapiens
caaataaatagtaga

SEQ ID NO: 1798367 - DNA, 15 bp, Homo sapiens
aaataaatagtagag

SEQ ID NO: 1798368 - DNA, 15 bp, Homo sapiens
aataaatagtagagt

SEQ ID NO: 1798369 - DNA, 15 bp, Homo sapiens
ataaatagtagagtt

SEQ ID NO: 1798370 - DNA, 15 bp, Homo sapiens
taaatagtagagttg

SEQ ID NO: 1798371 - DNA, 15 bp, Homo sapiens
aaatagtagagttgt

SEQ ID NO: 1798372 - DNA, 15 bp, Homo sapiens
aatagtagagttgtc

SEQ ID NO: 1798373 - DNA, 15 bp, Homo sapiens
atagtagagttgtct

SEQ ID NO: 1798374 - DNA, 15 bp, Homo sapiens
tagtagagttgtctg

SEQ ID NO: 1798375 - DNA, 15 bp, Homo sapiens
agtagagttgtctga

SEQ ID NO: 1798376 - DNA, 15 bp, Homo sapiens
gtagagttgtctgag

SEQ ID NO: 1798377 - DNA, 15 bp, Homo sapiens
tagagttgtctgagc

SEQ ID NO: 1798378 - DNA, 15 bp, Homo sapiens
agagttgtctgagca

SEQ ID NO: 1798379 - DNA, 15 bp, Homo sapiens
gagttgtctgagcaa

SEQ ID NO: 1798380 - DNA, 15 bp, Homo sapiens
agttgtctgagcaaa

SEQ ID NO: 1798381 - DNA, 15 bp, Homo sapiens
gttgtctgagcaaat

SEQ ID NO: 1798382 - DNA, 15 bp, Homo sapiens
ttgtctgagcaaata

SEQ ID NO: 1798383 - DNA, 15 bp, Homo sapiens
tgtctgagcaaatag

SEQ ID NO: 1798384 - DNA, 15 bp, Homo sapiens
gtctgagcaaatagt

SEQ ID NO: 1798385 - DNA, 15 bp, Homo sapiens
tctgagcaaatagtg

SEQ ID NO: 1798386 - DNA, 15 bp, Homo sapiens
ctgagcaaatagtga

SEQ ID NO: 1798387 - DNA, 15 bp, Homo sapiens
tgagcaaatagtgat

SEQ ID NO: 1798388 - DNA, 15 bp, Homo sapiens
gagcaaatagtgatt

SEQ ID NO: 1798389 - DNA, 15 bp, Homo sapiens
agcaaatagtgatta

SEQ ID NO: 1798390 - DNA, 15 bp, Homo sapiens
gcaaatagtgattaa

SEQ ID NO: 1798391 - DNA, 15 bp, Homo sapiens
caaatagtgattaat

SEQ ID NO: 1798392 - DNA, 15 bp, Homo sapiens
aaatagtgattaatg

SEQ ID NO: 1798393 - DNA, 15 bp, Homo sapiens
aatagtgattaatga

SEQ ID NO: 1798394 - DNA, 15 bp, Homo sapiens
atagtgattaatgaa

SEQ ID NO: 1798395 - DNA, 15 bp, Homo sapiens
tagtgattaatgaat

SEQ ID NO: 1798396 - DNA, 15 bp, Homo sapiens
agtgattaatgaatc

SEQ ID NO: 1798397 - DNA, 15 bp, Homo sapiens
gtgattaatgaatct

SEQ ID NO: 1798398 - DNA, 15 bp, Homo sapiens
tgattaatgaatctg

SEQ ID NO: 1798399 - DNA, 15 bp, Homo sapiens
gattaatgaatctgg

SEQ ID NO: 1798400 - DNA, 15 bp, Homo sapiens
attaatgaatctggc

SEQ ID NO: 1798401 - DNA, 15 bp, Homo sapiens
ttaatgaatctggca

SEQ ID NO: 1798402 - DNA, 15 bp, Homo sapiens
taatgaatctggcag

SEQ ID NO: 1798403 - DNA, 15 bp, Homo sapiens
aatgaatctggcagc

SEQ ID NO: 1798404 - DNA, 15 bp, Homo sapiens
atgaatctggcagca

SEQ ID NO: 1798405 - DNA, 15 bp, Homo sapiens
tgaatctggcagcac

SEQ ID NO: 1798406 - DNA, 15 bp, Homo sapiens
gaatctggcagcact

SEQ ID NO: 1798407 - DNA, 15 bp, Homo sapiens
aatctggcagcactc

SEQ ID NO: 1798408 - DNA, 15 bp, Homo sapiens
atctggcagcactca

SEQ ID NO: 1798409 - DNA, 15 bp, Homo sapiens
ctggcagcactcaaa

SEQ ID NO: 1798410 - DNA, 15 bp, Homo sapiens
tggcagcactcaaaa

SEQ ID NO: 1798411 - DNA, 15 bp, Homo sapiens
ggcagcactcaaaaa

SEQ ID NO: 1798412 - DNA, 15 bp, Homo sapiens
gcagcactcaaaaac

SEQ ID NO: 1798413 - DNA, 15 bp, Homo sapiens
cagcactcaaaaaca

SEQ ID NO: 1798414 - DNA, 15 bp, Homo sapiens
agcactcaaaaacag

SEQ ID NO: 1798415 - DNA, 15 bp, Homo sapiens
gcactcaaaaacagg

SEQ ID NO: 1798416 - DNA, 15 bp, Homo sapiens
cactcaaaaacagga

SEQ ID NO: 1798417 - DNA, 15 bp, Homo sapiens
actcaaaaacaggac

SEQ ID NO: 1798418 - DNA, 15 bp, Homo sapiens
ctcaaaaacaggacc

SEQ ID NO: 1798419 - DNA, 15 bp, Homo sapiens
tcaaaaacaggacca

SEQ ID NO: 1798420 - DNA, 15 bp, Homo sapiens
caaaaacaggaccag

SEQ ID NO: 1798421 - DNA, 15 bp, Homo sapiens
aaaaacaggaccagt

SEQ ID NO: 1798422 - DNA, 15 bp, Homo sapiens
aaaacaggaccagtt

SEQ ID NO: 1798423 - DNA, 15 bp, Homo sapiens
aaacaggaccagttc

SEQ ID NO: 1798424 - DNA, 15 bp, Homo sapiens
aacaggaccagttca

SEQ ID NO: 1798425 - DNA, 15 bp, Homo sapiens
acaggaccagttcag

SEQ ID NO: 1798426 - DNA, 15 bp, Homo sapiens
caggaccagttcaga

SEQ ID NO: 1798427 - DNA, 15 bp, Homo sapiens
aggaccagttcagag

SEQ ID NO: 1798428 - DNA, 15 bp, Homo sapiens
ggaccagttcagagg

SEQ ID NO: 1798429 - DNA, 15 bp, Homo sapiens
gaccagttcagaggc

SEQ ID NO: 1798430 - DNA, 15 bp, Homo sapiens
accagttcagaggct

SEQ ID NO: 1798431 - DNA, 15 bp, Homo sapiens
ccagttcagaggctc

SEQ ID NO: 1798432 - DNA, 15 bp, Homo sapiens
cagttcagaggctcc

SEQ ID NO: 1798433 - DNA, 15 bp, Homo sapiens
agttcagaggctccc

SEQ ID NO: 1798434 - DNA, 15 bp, Homo sapiens
gttcagaggctcccc

SEQ ID NO: 1798435 - DNA, 15 bp, Homo sapiens
ttcagaggctccccc

SEQ ID NO: 1798436 - DNA, 15 bp, Homo sapiens
tcagaggctccccca

SEQ ID NO: 1798437 - DNA, 15 bp, Homo sapiens
cagaggctcccccaa

SEQ ID NO: 1798438 - DNA, 15 bp, Homo sapiens
agaggctcccccaag

SEQ ID NO: 1798439 - DNA, 15 bp, Homo sapiens
gaggctcccccaagc

SEQ ID NO: 1798440 - DNA, 15 bp, Homo sapiens
aggctcccccaagca

SEQ ID NO: 1798441 - DNA, 15 bp, Homo sapiens
gctcccccaagcaat

SEQ ID NO: 1798442 - DNA, 15 bp, Homo sapiens
ctcccccaagcaatt

SEQ ID NO: 1798443 - DNA, 15 bp, Homo sapiens
tcccccaagcaattt

SEQ ID NO: 1798444 - DNA, 15 bp, Homo sapiens
cccccaagcaatttg

SEQ ID NO: 1798445 - DNA, 15 bp, Homo sapiens
ccccaagcaatttgg

SEQ ID NO: 1798446 - DNA, 15 bp, Homo sapiens
cccaagcaatttggt

SEQ ID NO: 1798447 - DNA, 15 bp, Homo sapiens
ccaagcaatttggtc

SEQ ID NO: 1798448 - DNA, 15 bp, Homo sapiens
caagcaatttggtca

SEQ ID NO: 1798449 - DNA, 15 bp, Homo sapiens
aagcaatttggtcag

SEQ ID NO: 1798450 - DNA, 15 bp, Homo sapiens
agcaatttggtcagg

SEQ ID NO: 1798451 - DNA, 15 bp, Homo sapiens
gcaatttggtcaggc

SEQ ID NO: 1798452 - DNA, 15 bp, Homo sapiens
caatttggtcaggca

SEQ ID NO: 1798453 - DNA, 15 bp, Homo sapiens
aatttggtcaggcag

SEQ ID NO: 1798454 - DNA, 15 bp, Homo sapiens
atttggtcaggcagt

SEQ ID NO: 1798455 - DNA, 15 bp, Homo sapiens
tttggtcaggcagta

SEQ ID NO: 1798456 - DNA, 15 bp, Homo sapiens
ttggtcaggcagtat

SEQ ID NO: 1798457 - DNA, 15 bp, Homo sapiens
tggtcaggcagtatt

SEQ ID NO: 1798458 - DNA, 15 bp, Homo sapiens
ggtcaggcagtattt

SEQ ID NO: 1798459 - DNA, 15 bp, Homo sapiens
gtcaggcagtattta

SEQ ID NO: 1798460 - DNA, 15 bp, Homo sapiens
tcaggcagtatttat

SEQ ID NO: 1798461 - DNA, 15 bp, Homo sapiens
caggcagtatttata

SEQ ID NO: 1798462 - DNA, 15 bp, Homo sapiens
aggcagtatttatag

SEQ ID NO: 1798463 - DNA, 15 bp, Homo sapiens
ggcagtatttataga

SEQ ID NO: 1798464 - DNA, 15 bp, Homo sapiens
gcagtatttatagac

SEQ ID NO: 1798465 - DNA, 15 bp, Homo sapiens
cagtatttatagaca

SEQ ID NO: 1798466 - DNA, 15 bp, Homo sapiens
agtatttatagacag

SEQ ID NO: 1798467 - DNA, 15 bp, Homo sapiens
gtatttatagacaga

SEQ ID NO: 1798468 - DNA, 15 bp, Homo sapiens
tatttatagacagaa

SEQ ID NO: 1798469 - DNA, 15 bp, Homo sapiens
atttatagacagaaa

SEQ ID NO: 1798470 - DNA, 15 bp, Homo sapiens
tttatagacagaaaa

SEQ ID NO: 1798471 - DNA, 15 bp, Homo sapiens
ttatagacagaaaaa

SEQ ID NO: 1798472 - DNA, 15 bp, Homo sapiens
tatagacagaaaaag

SEQ ID NO: 1798473 - DNA, 15 bp, Homo sapiens
atagacagaaaaagg

SEQ ID NO: 1798474 - DNA, 15 bp, Homo sapiens
tagacagaaaaagga

SEQ ID NO: 1798475 - DNA, 15 bp, Homo sapiens
agacagaaaaaggaa

SEQ ID NO: 1798476 - DNA, 15 bp, Homo sapiens
gacagaaaaaggaag

SEQ ID NO: 1798477 - DNA, 15 bp, Homo sapiens
acagaaaaaggaagt

SEQ ID NO: 1798478 - DNA, 15 bp, Homo sapiens
cagaaaaaggaagtg

SEQ ID NO: 1798479 - DNA, 15 bp, Homo sapiens
agaaaaaggaagtgc

SEQ ID NO: 1798480 - DNA, 15 bp, Homo sapiens
gaaaaaggaagtgcc

SEQ ID NO: 1798481 - DNA, 15 bp, Homo sapiens
aaaaaggaagtgccc

SEQ ID NO: 1798482 - DNA, 15 bp, Homo sapiens
aaaaggaagtgccct

SEQ ID NO: 1798483 - DNA, 15 bp, Homo sapiens
aaaggaagtgcccta

SEQ ID NO: 1798484 - DNA, 15 bp, Homo sapiens
aaggaagtgccctac

SEQ ID NO: 1798485 - DNA, 15 bp, Homo sapiens
aggaagtgccctaca

SEQ ID NO: 1798486 - DNA, 15 bp, Homo sapiens
ggaagtgccctacag

SEQ ID NO: 1798487 - DNA, 15 bp, Homo sapiens
gaagtgccctacaga

SEQ ID NO: 1798488 - DNA, 15 bp, Homo sapiens
aagtgccctacagaa

SEQ ID NO: 1798489 - DNA, 15 bp, Homo sapiens
agtgccctacagaaa

SEQ ID NO: 1798490 - DNA, 15 bp, Homo sapiens
gtgccctacagaaat

SEQ ID NO: 1798491 - DNA, 15 bp, Homo sapiens
tgccctacagaaata

SEQ ID NO: 1798492 - DNA, 15 bp, Homo sapiens
gccctacagaaatag

SEQ ID NO: 1798493 - DNA, 15 bp, Homo sapiens
ccctacagaaatagc

SEQ ID NO: 1798494 - DNA, 15 bp, Homo sapiens
cctacagaaatagct

SEQ ID NO: 1798495 - DNA, 15 bp, Homo sapiens
ctacagaaatagctg

SEQ ID NO: 1798496 - DNA, 15 bp, Homo sapiens
tacagaaatagctga

SEQ ID NO: 1798497 - DNA, 15 bp, Homo sapiens
acagaaatagctgat

SEQ ID NO: 1798498 - DNA, 15 bp, Homo sapiens
cagaaatagctgatt

SEQ ID NO: 1798499 - DNA, 15 bp, Homo sapiens
agaaatagctgattg

SEQ ID NO: 1798500 - DNA, 15 bp, Homo sapiens
gaaatagctgattgg

SEQ ID NO: 1798501 - DNA, 15 bp, Homo sapiens
aaatagctgattggt

SEQ ID NO: 1798502 - DNA, 15 bp, Homo sapiens
aatagctgattggtt

SEQ ID NO: 1798503 - DNA, 15 bp, Homo sapiens
atagctgattggtta

SEQ ID NO: 1798504 - DNA, 15 bp, Homo sapiens
tagctgattggttac

SEQ ID NO: 1798505 - DNA, 15 bp, Homo sapiens
agctgattggttaca

SEQ ID NO: 1798506 - DNA, 15 bp, Homo sapiens
gctgattggttacag

SEQ ID NO: 1798507 - DNA, 15 bp, Homo sapiens
ctgattggttacagt

SEQ ID NO: 1798508 - DNA, 15 bp, Homo sapiens
tgattggttacagtt

SEQ ID NO: 1798509 - DNA, 15 bp, Homo sapiens
gattggttacagttg

SEQ ID NO: 1798510 - DNA, 15 bp, Homo sapiens
attggttacagttgg

SEQ ID NO: 1798511 - DNA, 15 bp, Homo sapiens
ttggttacagttggg

SEQ ID NO: 1798512 - DNA, 15 bp, Homo sapiens
tggttacagttgggt

SEQ ID NO: 1798513 - DNA, 15 bp, Homo sapiens
ggttacagttgggtg

SEQ ID NO: 1798514 - DNA, 15 bp, Homo sapiens
gttacagttgggtgt

SEQ ID NO: 1798515 - DNA, 15 bp, Homo sapiens
ttacagttgggtgtt

SEQ ID NO: 1798516 - DNA, 15 bp, Homo sapiens
tacagttgggtgttc

SEQ ID NO: 1798517 - DNA, 15 bp, Homo sapiens
acagttgggtgttca

SEQ ID NO: 1798518 - DNA, 15 bp, Homo sapiens
cagttgggtgttcac

SEQ ID NO: 1798519 - DNA, 15 bp, Homo sapiens
agttgggtgttcacc

SEQ ID NO: 1798520 - DNA, 15 bp, Homo sapiens
gttgggtgttcacct

SEQ ID NO: 1798521 - DNA, 15 bp, Homo sapiens
ttgggtgttcacctt

SEQ ID NO: 1798522 - DNA, 15 bp, Homo sapiens
tgggtgttcacctta

SEQ ID NO: 1798523 - DNA, 15 bp, Homo sapiens
gggtgttcaccttat

SEQ ID NO: 1798524 - DNA, 15 bp, Homo sapiens
ggtgttcaccttatt

SEQ ID NO: 1798525 - DNA, 15 bp, Homo sapiens
gtgttcaccttattt

SEQ ID NO: 1798526 - DNA, 15 bp, Homo sapiens
tgttcaccttattta

SEQ ID NO: 1798527 - DNA, 15 bp, Homo sapiens
gttcaccttatttat

SEQ ID NO: 1798528 - DNA, 15 bp, Homo sapiens
ttcaccttatttatt

SEQ ID NO: 1798529 - DNA, 15 bp, Homo sapiens
tcaccttatttattt

SEQ ID NO: 1798530 - DNA, 15 bp, Homo sapiens
caccttatttatttg

SEQ ID NO: 1798531 - DNA, 15 bp, Homo sapiens
accttatttatttga

SEQ ID NO: 1798532 - DNA, 15 bp, Homo sapiens
ccttatttatttgag

SEQ ID NO: 1798533 - DNA, 15 bp, Homo sapiens
cttatttatttgagg

SEQ ID NO: 1798534 - DNA, 15 bp, Homo sapiens
ttatttatttgaggg

SEQ ID NO: 1798535 - DNA, 15 bp, Homo sapiens
tatttatttgagggt

SEQ ID NO: 1798536 - DNA, 15 bp, Homo sapiens
atttatttgagggtg

SEQ ID NO: 1798537 - DNA, 15 bp, Homo sapiens
tttatttgagggtga

SEQ ID NO: 1798538 - DNA, 15 bp, Homo sapiens
ttatttgagggtgat

SEQ ID NO: 1798539 - DNA, 15 bp, Homo sapiens
tatttgagggtgatg

SEQ ID NO: 1798540 - DNA, 15 bp, Homo sapiens
atttgagggtgatgt

SEQ ID NO: 1798541 - DNA, 15 bp, Homo sapiens
tttgagggtgatgtg

SEQ ID NO: 1798542 - DNA, 15 bp, Homo sapiens
ttgagggtgatgtga

SEQ ID NO: 1798543 - DNA, 15 bp, Homo sapiens
tgagggtgatgtgat

SEQ ID NO: 1798544 - DNA, 15 bp, Homo sapiens
gagggtgatgtgatc

SEQ ID NO: 1798545 - DNA, 15 bp, Homo sapiens
agggtgatgtgatca

SEQ ID NO: 1798546 - DNA, 15 bp, Homo sapiens
gggtgatgtgatcag

SEQ ID NO: 1798547 - DNA, 15 bp, Homo sapiens
ggtgatgtgatcagg

SEQ ID NO: 1798548 - DNA, 15 bp, Homo sapiens
gtgatgtgatcaggt

SEQ ID NO: 1798549 - DNA, 15 bp, Homo sapiens
tgatgtgatcaggtg

SEQ ID NO: 1798550 - DNA, 15 bp, Homo sapiens
gatgtgatcaggtgt

SEQ ID NO: 1798551 - DNA, 15 bp, Homo sapiens
atgtgatcaggtgtt

SEQ ID NO: 1798552 - DNA, 15 bp, Homo sapiens
tgtgatcaggtgttg

SEQ ID NO: 1798553 - DNA, 15 bp, Homo sapiens
gtgatcaggtgttgg

SEQ ID NO: 1798554 - DNA, 15 bp, Homo sapiens
tgatcaggtgttggg

SEQ ID NO: 1798555 - DNA, 15 bp, Homo sapiens
gatcaggtgttgggt

SEQ ID NO: 1798556 - DNA, 15 bp, Homo sapiens
atcaggtgttgggta

SEQ ID NO: 1798557 - DNA, 15 bp, Homo sapiens
tcaggtgttgggtat

SEQ ID NO: 1798558 - DNA, 15 bp, Homo sapiens
caggtgttgggtatg

SEQ ID NO: 1798559 - DNA, 15 bp, Homo sapiens
aggtgttgggtatgg

SEQ ID NO: 1798560 - DNA, 15 bp, Homo sapiens
ggtgttgggtatgga

SEQ ID NO: 1798561 - DNA, 15 bp, Homo sapiens
gtgttgggtatggac

SEQ ID NO: 1798562 - DNA, 15 bp, Homo sapiens
tgttgggtatggaca

SEQ ID NO: 1798563 - DNA, 15 bp, Homo sapiens
gttgggtatggacag

SEQ ID NO: 1798564 - DNA, 15 bp, Homo sapiens
ttgggtatggacagg

SEQ ID NO: 1798565 - DNA, 15 bp, Homo sapiens
tgggtatggacagga

SEQ ID NO: 1798566 - DNA, 15 bp, Homo sapiens
gggtatggacaggag

SEQ ID NO: 1798567 - DNA, 15 bp, Homo sapiens
ggtatggacaggagc

SEQ ID NO: 1798568 - DNA, 15 bp, Homo sapiens
gtatggacaggagct

SEQ ID NO: 1798569 - DNA, 15 bp, Homo sapiens
tatggacaggagctc

SEQ ID NO: 1798570 - DNA, 15 bp, Homo sapiens
atggacaggagctca

SEQ ID NO: 1798571 - DNA, 15 bp, Homo sapiens
tggacaggagctcat

SEQ ID NO: 1798572 - DNA, 15 bp, Homo sapiens
ggacaggagctcatc

SEQ ID NO: 1798573 - DNA, 15 bp, Homo sapiens
gacaggagctcatca

SEQ ID NO: 1798574 - DNA, 15 bp, Homo sapiens
acaggagctcatcag

SEQ ID NO: 1798575 - DNA, 15 bp, Homo sapiens
caggagctcatcagt

SEQ ID NO: 1798576 - DNA, 15 bp, Homo sapiens
aggagctcatcagtc

SEQ ID NO: 1798577 - DNA, 15 bp, Homo sapiens
ggagctcatcagtcg

SEQ ID NO: 1798578 - DNA, 15 bp, Homo sapiens
gagctcatcagtcgg

SEQ ID NO: 1798579 - DNA, 15 bp, Homo sapiens
agctcatcagtcggt

SEQ ID NO: 1798580 - DNA, 15 bp, Homo sapiens
gctcatcagtcggta

SEQ ID NO: 1798581 - DNA, 15 bp, Homo sapiens
ctcatcagtcggtag

SEQ ID NO: 1798582 - DNA, 15 bp, Homo sapiens
tcatcagtcggtagc

SEQ ID NO: 1798583 - DNA, 15 bp, Homo sapiens
catcagtcggtagcc

SEQ ID NO: 1798584 - DNA, 15 bp, Homo sapiens
atcagtcggtagcct

SEQ ID NO: 1798585 - DNA, 15 bp, Homo sapiens
tcagtcggtagcctg

SEQ ID NO: 1798586 - DNA, 15 bp, Homo sapiens
cagtcggtagcctgt

SEQ ID NO: 1798587 - DNA, 15 bp, Homo sapiens
agtcggtagcctgtg

SEQ ID NO: 1798588 - DNA, 15 bp, Homo sapiens
gtcggtagcctgtga

SEQ ID NO: 1798589 - DNA, 15 bp, Homo sapiens
tcggtagcctgtgat

SEQ ID NO: 1798590 - DNA, 15 bp, Homo sapiens
cggtagcctgtgatt

SEQ ID NO: 1798591 - DNA, 15 bp, Homo sapiens
ggtagcctgtgattg

SEQ ID NO: 1798592 - DNA, 15 bp, Homo sapiens
gtagcctgtgattgg

SEQ ID NO: 1798593 - DNA, 15 bp, Homo sapiens
tagcctgtgattggc

SEQ ID NO: 1798594 - DNA, 15 bp, Homo sapiens
agcctgtgattggct

SEQ ID NO: 1798595 - DNA, 15 bp, Homo sapiens
gcctgtgattggctg

SEQ ID NO: 1798596 - DNA, 15 bp, Homo sapiens
cctgtgattggctga

SEQ ID NO: 1798597 - DNA, 15 bp, Homo sapiens
ctgtgattggctgat

SEQ ID NO: 1798598 - DNA, 15 bp, Homo sapiens
tgtgattggctgatg

SEQ ID NO: 1798599 - DNA, 15 bp, Homo sapiens
gtgattggctgatgc

SEQ ID NO: 1798600 - DNA, 15 bp, Homo sapiens
tgattggctgatgct

SEQ ID NO: 1798601 - DNA, 15 bp, Homo sapiens
gattggctgatgctt

SEQ ID NO: 1798602 - DNA, 15 bp, Homo sapiens
attggctgatgcttg

SEQ ID NO: 1798603 - DNA, 15 bp, Homo sapiens
ttggctgatgcttgg

SEQ ID NO: 1798604 - DNA, 15 bp, Homo sapiens
tggctgatgcttggc

SEQ ID NO: 1798605 - DNA, 15 bp, Homo sapiens
ggctgatgcttggct

SEQ ID NO: 1798606 - DNA, 15 bp, Homo sapiens
gctgatgcttggctg

SEQ ID NO: 1798607 - DNA, 15 bp, Homo sapiens
ctgatgcttggctgc

SEQ ID NO: 1798608 - DNA, 15 bp, Homo sapiens
tgatgcttggctgcc

SEQ ID NO: 1798609 - DNA, 15 bp, Homo sapiens
gatgcttggctgcca

SEQ ID NO: 1798610 - DNA, 15 bp, Homo sapiens
atgcttggctgccat

SEQ ID NO: 1798611 - DNA, 15 bp, Homo sapiens
tgcttggctgccatg

SEQ ID NO: 1798612 - DNA, 15 bp, Homo sapiens
gcttggctgccatga

SEQ ID NO: 1798613 - DNA, 15 bp, Homo sapiens
cttggctgccatgat

SEQ ID NO: 1798614 - DNA, 15 bp, Homo sapiens
ttggctgccatgatt

SEQ ID NO: 1798615 - DNA, 15 bp, Homo sapiens
tggctgccatgattg

SEQ ID NO: 1798616 - DNA, 15 bp, Homo sapiens
ggctgccatgattgg

SEQ ID NO: 1798617 - DNA, 15 bp, Homo sapiens
gctgccatgattggc

SEQ ID NO: 1798618 - DNA, 15 bp, Homo sapiens
ctgccatgattggct

SEQ ID NO: 1798619 - DNA, 15 bp, Homo sapiens
tgccatgattggctg

SEQ ID NO: 1798620 - DNA, 15 bp, Homo sapiens
gccatgattggctga

SEQ ID NO: 1798621 - DNA, 15 bp, Homo sapiens
ccatgattggctgag

SEQ ID NO: 1798622 - DNA, 15 bp, Homo sapiens
catgattggctgaga

SEQ ID NO: 1798623 - DNA, 15 bp, Homo sapiens
atgattggctgagac

SEQ ID NO: 1798624 - DNA, 15 bp, Homo sapiens
tgattggctgagact

SEQ ID NO: 1798625 - DNA, 15 bp, Homo sapiens
gattggctgagactc

SEQ ID NO: 1798626 - DNA, 15 bp, Homo sapiens
attggctgagactca

SEQ ID NO: 1798627 - DNA, 15 bp, Homo sapiens
ttggctgagactcag

SEQ ID NO: 1798628 - DNA, 15 bp, Homo sapiens
tggctgagactcagc

SEQ ID NO: 1798629 - DNA, 15 bp, Homo sapiens
ggctgagactcagca

SEQ ID NO: 1798630 - DNA, 15 bp, Homo sapiens
gctgagactcagcaa

SEQ ID NO: 1798631 - DNA, 15 bp, Homo sapiens
ctgagactcagcaac

SEQ ID NO: 1798632 - DNA, 15 bp, Homo sapiens
tgagactcagcaact

SEQ ID NO: 1798633 - DNA, 15 bp, Homo sapiens
gagactcagcaactt

SEQ ID NO: 1798634 - DNA, 15 bp, Homo sapiens
agactcagcaacttg

SEQ ID NO: 1798635 - DNA, 15 bp, Homo sapiens
gactcagcaacttgt

SEQ ID NO: 1798636 - DNA, 15 bp, Homo sapiens
actcagcaacttgtc

SEQ ID NO: 1798637 - DNA, 15 bp, Homo sapiens
ctcagcaacttgtct

SEQ ID NO: 1798638 - DNA, 15 bp, Homo sapiens
tcagcaacttgtctc

SEQ ID NO: 1798639 - DNA, 15 bp, Homo sapiens
cagcaacttgtctca

SEQ ID NO: 1798640 - DNA, 15 bp, Homo sapiens
agcaacttgtctcag

SEQ ID NO: 1798641 - DNA, 15 bp, Homo sapiens
gcaacttgtctcagc

SEQ ID NO: 1798642 - DNA, 15 bp, Homo sapiens
caacttgtctcagcc

SEQ ID NO: 1798643 - DNA, 15 bp, Homo sapiens
aacttgtctcagcca

SEQ ID NO: 1798644 - DNA, 15 bp, Homo sapiens
acttgtctcagccag

SEQ ID NO: 1798645 - DNA, 15 bp, Homo sapiens
cttgtctcagccagt

SEQ ID NO: 1798646 - DNA, 15 bp, Homo sapiens
ttgtctcagccagtc

SEQ ID NO: 1798647 - DNA, 15 bp, Homo sapiens
tgtctcagccagtct

SEQ ID NO: 1798648 - DNA, 15 bp, Homo sapiens
gtctcagccagtctc

SEQ ID NO: 1798649 - DNA, 15 bp, Homo sapiens
tctcagccagtctct

SEQ ID NO: 1798650 - DNA, 15 bp, Homo sapiens
ctcagccagtctctg

SEQ ID NO: 1798651 - DNA, 15 bp, Homo sapiens
tcagccagtctctgt

SEQ ID NO: 1798652 - DNA, 15 bp, Homo sapiens
cagccagtctctgtc

SEQ ID NO: 1798653 - DNA, 15 bp, Homo sapiens
agccagtctctgtct

SEQ ID NO: 1798654 - DNA, 15 bp, Homo sapiens
gccagtctctgtctt

SEQ ID NO: 1798655 - DNA, 15 bp, Homo sapiens
ccagtctctgtctta

SEQ ID NO: 1798656 - DNA, 15 bp, Homo sapiens
cagtctctgtcttaa

SEQ ID NO: 1798657 - DNA, 15 bp, Homo sapiens
agtctctgtcttaag

SEQ ID NO: 1798658 - DNA, 15 bp, Homo sapiens
gtctctgtcttaaga

SEQ ID NO: 1798659 - DNA, 15 bp, Homo sapiens
tctctgtcttaagag

SEQ ID NO: 1798660 - DNA, 15 bp, Homo sapiens
ctctgtcttaagaga

SEQ ID NO: 1798661 - DNA, 15 bp, Homo sapiens
tctgtcttaagagaa

SEQ ID NO: 1798662 - DNA, 15 bp, Homo sapiens
ctgtcttaagagaat

SEQ ID NO: 1798663 - DNA, 15 bp, Homo sapiens
tgtcttaagagaata

SEQ ID NO: 1798664 - DNA, 15 bp, Homo sapiens
gtcttaagagaatat

SEQ ID NO: 1798665 - DNA, 15 bp, Homo sapiens
tcttaagagaatata

SEQ ID NO: 1798666 - DNA, 15 bp, Homo sapiens
cttaagagaatatac

SEQ ID NO: 1798667 - DNA, 15 bp, Homo sapiens
ttaagagaatatact

SEQ ID NO: 1798668 - DNA, 15 bp, Homo sapiens
taagagaatatactg

SEQ ID NO: 1798669 - DNA, 15 bp, Homo sapiens
aagagaatatactgc

SEQ ID NO: 1798670 - DNA, 15 bp, Homo sapiens
agagaatatactgct

SEQ ID NO: 1798671 - DNA, 15 bp, Homo sapiens
gagaatatactgcta

SEQ ID NO: 1798672 - DNA, 15 bp, Homo sapiens
agaatatactgctaa

SEQ ID NO: 1798673 - DNA, 15 bp, Homo sapiens
gaatatactgctaag

SEQ ID NO: 1798674 - DNA, 15 bp, Homo sapiens
aatatactgctaaga

SEQ ID NO: 1798675 - DNA, 15 bp, Homo sapiens
atatactgctaagat

SEQ ID NO: 1798676 - DNA, 15 bp, Homo sapiens
tatactgctaagata

SEQ ID NO: 1798677 - DNA, 15 bp, Homo sapiens
atactgctaagataa

SEQ ID NO: 1798678 - DNA, 15 bp, Homo sapiens
tactgctaagataag

SEQ ID NO: 1798679 - DNA, 15 bp, Homo sapiens
actgctaagataagt

SEQ ID NO: 1798680 - DNA, 15 bp, Homo sapiens
ctgctaagataagtt

SEQ ID NO: 1798681 - DNA, 15 bp, Homo sapiens
tgctaagataagttg

SEQ ID NO: 1798682 - DNA, 15 bp, Homo sapiens
gctaagataagttgc

SEQ ID NO: 1798683 - DNA, 15 bp, Homo sapiens
ctaagataagttgca

SEQ ID NO: 1798684 - DNA, 15 bp, Homo sapiens
taagataagttgcag

SEQ ID NO: 1798685 - DNA, 15 bp, Homo sapiens
aagataagttgcagt

SEQ ID NO: 1798686 - DNA, 15 bp, Homo sapiens
agataagttgcagtt

SEQ ID NO: 1798687 - DNA, 15 bp, Homo sapiens
gataagttgcagttt

SEQ ID NO: 1798688 - DNA, 15 bp, Homo sapiens
ataagttgcagtttg

SEQ ID NO: 1798689 - DNA, 15 bp, Homo sapiens
taagttgcagtttgt

SEQ ID NO: 1798690 - DNA, 15 bp, Homo sapiens
aagttgcagtttgtt

SEQ ID NO: 1798691 - DNA, 15 bp, Homo sapiens
agttgcagtttgttt

SEQ ID NO: 1798692 - DNA, 15 bp, Homo sapiens
gttgcagtttgttta

SEQ ID NO: 1798693 - DNA, 15 bp, Homo sapiens
ttgcagtttgtttac

SEQ ID NO: 1798694 - DNA, 15 bp, Homo sapiens
tgcagtttgtttaca

SEQ ID NO: 1798695 - DNA, 15 bp, Homo sapiens
gcagtttgtttacat

SEQ ID NO: 1798696 - DNA, 15 bp, Homo sapiens
cagtttgtttacata

SEQ ID NO: 1798697 - DNA, 15 bp, Homo sapiens
agtttgtttacatac

SEQ ID NO: 1798698 - DNA, 15 bp, Homo sapiens
gtttgtttacatact

SEQ ID NO: 1798699 - DNA, 15 bp, Homo sapiens
tttgtttacatacta

SEQ ID NO: 1798700 - DNA, 15 bp, Homo sapiens
ttgtttacatactaa

SEQ ID NO: 1798701 - DNA, 15 bp, Homo sapiens
tgtttacatactaag

SEQ ID NO: 1798702 - DNA, 15 bp, Homo sapiens
gtttacatactaagt

SEQ ID NO: 1798703 - DNA, 15 bp, Homo sapiens
tttacatactaagtt

SEQ ID NO: 1798704 - DNA, 15 bp, Homo sapiens
ttacatactaagttt

SEQ ID NO: 1798705 - DNA, 15 bp, Homo sapiens
tacatactaagtttg

SEQ ID NO: 1798706 - DNA, 15 bp, Homo sapiens
acatactaagtttgc

SEQ ID NO: 1798707 - DNA, 15 bp, Homo sapiens
catactaagtttgct

SEQ ID NO: 1798708 - DNA, 15 bp, Homo sapiens
atactaagtttgctt

SEQ ID NO: 1798709 - DNA, 15 bp, Homo sapiens
tactaagtttgcttg

SEQ ID NO: 1798710 - DNA, 15 bp, Homo sapiens
actaagtttgcttgc

SEQ ID NO: 1798711 - DNA, 15 bp, Homo sapiens
ctaagtttgcttgca

SEQ ID NO: 1798712 - DNA, 15 bp, Homo sapiens
taagtttgcttgcag

SEQ ID NO: 1798713 - DNA, 15 bp, Homo sapiens
aagtttgcttgcagt

SEQ ID NO: 1798714 - DNA, 15 bp, Homo sapiens
agtttgcttgcagtt

SEQ ID NO: 1798715 - DNA, 15 bp, Homo sapiens
gtttgcttgcagttt

SEQ ID NO: 1798716 - DNA, 15 bp, Homo sapiens
tttgcttgcagtttg

SEQ ID NO: 1798717 - DNA, 15 bp, Homo sapiens
ttgcttgcagtttgc

SEQ ID NO: 1798718 - DNA, 15 bp, Homo sapiens
tgcttgcagtttgct

SEQ ID NO: 1798719 - DNA, 15 bp, Homo sapiens
gcttgcagtttgctc

SEQ ID NO: 1798720 - DNA, 15 bp, Homo sapiens
cttgcagtttgctct

SEQ ID NO: 1798721 - DNA, 15 bp, Homo sapiens
ttgcagtttgctctg

SEQ ID NO: 1798722 - DNA, 15 bp, Homo sapiens
tgcagtttgctctgt

SEQ ID NO: 1798723 - DNA, 15 bp, Homo sapiens
gcagtttgctctgtg

SEQ ID NO: 1798724 - DNA, 15 bp, Homo sapiens
cagtttgctctgtgg

SEQ ID NO: 1798725 - DNA, 15 bp, Homo sapiens
agtttgctctgtggg

SEQ ID NO: 1798726 - DNA, 15 bp, Homo sapiens
gtttgctctgtggga

SEQ ID NO: 1798727 - DNA, 15 bp, Homo sapiens
tttgctctgtgggaa

SEQ ID NO: 1798728 - DNA, 15 bp, Homo sapiens
ttgctctgtgggaac

SEQ ID NO: 1798729 - DNA, 15 bp, Homo sapiens
tgctctgtgggaact

SEQ ID NO: 1798730 - DNA, 15 bp, Homo sapiens
gctctgtgggaactc

SEQ ID NO: 1798731 - DNA, 15 bp, Homo sapiens
ctctgtgggaactca

SEQ ID NO: 1798732 - DNA, 15 bp, Homo sapiens
tctgtgggaactcaa

SEQ ID NO: 1798733 - DNA, 15 bp, Homo sapiens
ctgtgggaactcaaa

SEQ ID NO: 1798734 - DNA, 15 bp, Homo sapiens
tgtgggaactcaaag

SEQ ID NO: 1798735 - DNA, 15 bp, Homo sapiens
gtgggaactcaaagt

SEQ ID NO: 1798736 - DNA, 15 bp, Homo sapiens
tgggaactcaaagta

SEQ ID NO: 1798737 - DNA, 15 bp, Homo sapiens
gggaactcaaagtat

SEQ ID NO: 1798738 - DNA, 15 bp, Homo sapiens
ggaactcaaagtatg

SEQ ID NO: 1798739 - DNA, 15 bp, Homo sapiens
gaactcaaagtatgc

SEQ ID NO: 1798740 - DNA, 15 bp, Homo sapiens
aactcaaagtatgca

SEQ ID NO: 1798741 - DNA, 15 bp, Homo sapiens
actcaaagtatgcag

SEQ ID NO: 1798742 - DNA, 15 bp, Homo sapiens
ctcaaagtatgcagg

SEQ ID NO: 1798743 - DNA, 15 bp, Homo sapiens
tcaaagtatgcaggc

SEQ ID NO: 1798744 - DNA, 15 bp, Homo sapiens
caaagtatgcaggca

SEQ ID NO: 1798745 - DNA, 15 bp, Homo sapiens
aaagtatgcaggcag

SEQ ID NO: 1798746 - DNA, 15 bp, Homo sapiens
aagtatgcaggcagc

SEQ ID NO: 1798747 - DNA, 15 bp, Homo sapiens
agtatgcaggcagcc

SEQ ID NO: 1798748 - DNA, 15 bp, Homo sapiens
gtatgcaggcagcct

SEQ ID NO: 1798749 - DNA, 15 bp, Homo sapiens
tatgcaggcagcctc

SEQ ID NO: 1798750 - DNA, 15 bp, Homo sapiens
atgcaggcagcctca

SEQ ID NO: 1798751 - DNA, 15 bp, Homo sapiens
tgcaggcagcctcag

SEQ ID NO: 1798752 - DNA, 15 bp, Homo sapiens
gcaggcagcctcagg

SEQ ID NO: 1798753 - DNA, 15 bp, Homo sapiens
caggcagcctcaggc

SEQ ID NO: 1798754 - DNA, 15 bp, Homo sapiens
aggcagcctcaggcc

SEQ ID NO: 1798755 - DNA, 15 bp, Homo sapiens
ggcagcctcaggcca

SEQ ID NO: 1798756 - DNA, 15 bp, Homo sapiens
gcagcctcaggccaa

SEQ ID NO: 1798757 - DNA, 15 bp, Homo sapiens
cagcctcaggccaaa

SEQ ID NO: 1798758 - DNA, 15 bp, Homo sapiens
agcctcaggccaaat

SEQ ID NO: 1798759 - DNA, 15 bp, Homo sapiens
gcctcaggccaaatt

SEQ ID NO: 1798760 - DNA, 15 bp, Homo sapiens
cctcaggccaaattt

SEQ ID NO: 1798761 - DNA, 15 bp, Homo sapiens
ctcaggccaaattta

SEQ ID NO: 1798762 - DNA, 15 bp, Homo sapiens
tcaggccaaatttag

SEQ ID NO: 1798763 - DNA, 15 bp, Homo sapiens
caggccaaatttagt

SEQ ID NO: 1798764 - DNA, 15 bp, Homo sapiens
aggccaaatttagtt

SEQ ID NO: 1798765 - DNA, 15 bp, Homo sapiens
ggccaaatttagttt

SEQ ID NO: 1798766 - DNA, 15 bp, Homo sapiens
gccaaatttagttta

SEQ ID NO: 1798767 - DNA, 15 bp, Homo sapiens
ccaaatttagtttaa

SEQ ID NO: 1798768 - DNA, 15 bp, Homo sapiens
caaatttagtttaac

SEQ ID NO: 1798769 - DNA, 15 bp, Homo sapiens
aaatttagtttaact

SEQ ID NO: 1798770 - DNA, 15 bp, Homo sapiens
aatttagtttaactg

SEQ ID NO: 1798771 - DNA, 15 bp, Homo sapiens
atttagtttaactga

SEQ ID NO: 1798772 - DNA, 15 bp, Homo sapiens
tttagtttaactgag

SEQ ID NO: 1798773 - DNA, 15 bp, Homo sapiens
ttagtttaactgagc

SEQ ID NO: 1798774 - DNA, 15 bp, Homo sapiens
tagtttaactgagca

SEQ ID NO: 1798775 - DNA, 15 bp, Homo sapiens
agtttaactgagcag

SEQ ID NO: 1798776 - DNA, 15 bp, Homo sapiens
gtttaactgagcagc

SEQ ID NO: 1798777 - DNA, 15 bp, Homo sapiens
tttaactgagcagct

SEQ ID NO: 1798778 - DNA, 15 bp, Homo sapiens
ttaactgagcagctg

SEQ ID NO: 1798779 - DNA, 15 bp, Homo sapiens
taactgagcagctga

SEQ ID NO: 1798780 - DNA, 15 bp, Homo sapiens
aactgagcagctgaa

SEQ ID NO: 1798781 - DNA, 15 bp, Homo sapiens
actgagcagctgaaa

SEQ ID NO: 1798782 - DNA, 15 bp, Homo sapiens
ctgagcagctgaaat

SEQ ID NO: 1798783 - DNA, 15 bp, Homo sapiens
tgagcagctgaaatt

SEQ ID NO: 1798784 - DNA, 15 bp, Homo sapiens
gagcagctgaaatta

SEQ ID NO: 1798785 - DNA, 15 bp, Homo sapiens
agcagctgaaattat

SEQ ID NO: 1798786 - DNA, 15 bp, Homo sapiens
gcagctgaaattatt

SEQ ID NO: 1798787 - DNA, 15 bp, Homo sapiens
cagctgaaattatta

SEQ ID NO: 1798788 - DNA, 15 bp, Homo sapiens
agctgaaattattaa

SEQ ID NO: 1798789 - DNA, 15 bp, Homo sapiens
gctgaaattattaaa

SEQ ID NO: 1798790 - DNA, 15 bp, Homo sapiens
ctgaaattattaaaa

SEQ ID NO: 1798791 - DNA, 15 bp, Homo sapiens
tgaaattattaaaat

SEQ ID NO: 1798792 - DNA, 15 bp, Homo sapiens
gaaattattaaaatg

SEQ ID NO: 1798793 - DNA, 15 bp, Homo sapiens
aaattattaaaatga

SEQ ID NO: 1798794 - DNA, 15 bp, Homo sapiens
aattattaaaatgat

SEQ ID NO: 1798795 - DNA, 15 bp, Homo sapiens
attattaaaatgatt

SEQ ID NO: 1798796 - DNA, 15 bp, Homo sapiens
ttattaaaatgattt

SEQ ID NO: 1798797 - DNA, 15 bp, Homo sapiens
tattaaaatgattta

SEQ ID NO: 1798798 - DNA, 15 bp, Homo sapiens
attaaaatgatttat

SEQ ID NO: 1798799 - DNA, 15 bp, Homo sapiens
ttaaaatgatttatt

SEQ ID NO: 1798800 - DNA, 15 bp, Homo sapiens
taaaatgatttatta

SEQ ID NO: 1798801 - DNA, 15 bp, Homo sapiens
aaaatgatttattag

SEQ ID NO: 1798802 - DNA, 15 bp, Homo sapiens
aaatgatttattaga

SEQ ID NO: 1798803 - DNA, 15 bp, Homo sapiens
aatgatttattagaa

SEQ ID NO: 1798804 - DNA, 15 bp, Homo sapiens
atgatttattagaaa

SEQ ID NO: 1798805 - DNA, 15 bp, Homo sapiens
tgatttattagaaag

SEQ ID NO: 1798806 - DNA, 15 bp, Homo sapiens
gatttattagaaagg

SEQ ID NO: 1798807 - DNA, 15 bp, Homo sapiens
atttattagaaaggt

SEQ ID NO: 1798808 - DNA, 15 bp, Homo sapiens
tttattagaaaggtt

SEQ ID NO: 1798809 - DNA, 15 bp, Homo sapiens
ttattagaaaggttc

SEQ ID NO: 1798810 - DNA, 15 bp, Homo sapiens
tattagaaaggttca

SEQ ID NO: 1798811 - DNA, 15 bp, Homo sapiens
attagaaaggttcat

SEQ ID NO: 1798812 - DNA, 15 bp, Homo sapiens
ttagaaaggttcatc

SEQ ID NO: 1798813 - DNA, 15 bp, Homo sapiens
tagaaaggttcatca

SEQ ID NO: 1798814 - DNA, 15 bp, Homo sapiens
agaaaggttcatcaa

SEQ ID NO: 1798815 - DNA, 15 bp, Homo sapiens
gaaaggttcatcaac

SEQ ID NO: 1798816 - DNA, 15 bp, Homo sapiens
aaaggttcatcaact

SEQ ID NO: 1798817 - DNA, 15 bp, Homo sapiens
aaggttcatcaacta

SEQ ID NO: 1798818 - DNA, 15 bp, Homo sapiens
aggttcatcaactac

SEQ ID NO: 1798819 - DNA, 15 bp, Homo sapiens
atgttctcagggatc

SEQ ID NO: 1798820 - DNA, 15 bp, Homo sapiens
tgttctcagggatct

SEQ ID NO: 1798821 - DNA, 15 bp, Homo sapiens
gttctcagggatctt

SEQ ID NO: 1798822 - DNA, 15 bp, Homo sapiens
ttctcagggatctta

SEQ ID NO: 1798823 - DNA, 15 bp, Homo sapiens
tctcagggatcttaa

SEQ ID NO: 1798824 - DNA, 15 bp, Homo sapiens
ctcagggatcttaaa

SEQ ID NO: 1798825 - DNA, 15 bp, Homo sapiens
tcagggatcttaaat

SEQ ID NO: 1798826 - DNA, 15 bp, Homo sapiens
cagggatcttaaatg

SEQ ID NO: 1798827 - DNA, 15 bp, Homo sapiens
agggatcttaaatga

SEQ ID NO: 1798828 - DNA, 15 bp, Homo sapiens
gggatcttaaatgag

SEQ ID NO: 1798829 - DNA, 15 bp, Homo sapiens
ggatcttaaatgagg

SEQ ID NO: 1798830 - DNA, 15 bp, Homo sapiens
gatcttaaatgaggt

SEQ ID NO: 1798831 - DNA, 15 bp, Homo sapiens
atcttaaatgaggta

SEQ ID NO: 1798832 - DNA, 15 bp, Homo sapiens
tcttaaatgaggtac

SEQ ID NO: 1798833 - DNA, 15 bp, Homo sapiens
cttaaatgaggtaca

SEQ ID NO: 1798834 - DNA, 15 bp, Homo sapiens
ttaaatgaggtacac

SEQ ID NO: 1798835 - DNA, 15 bp, Homo sapiens
taaatgaggtacacc

SEQ ID NO: 1798836 - DNA, 15 bp, Homo sapiens
aaatgaggtacaccc

SEQ ID NO: 1798837 - DNA, 15 bp, Homo sapiens
aatgaggtacaccca

SEQ ID NO: 1798838 - DNA, 15 bp, Homo sapiens
atgaggtacacccag

SEQ ID NO: 1798839 - DNA, 15 bp, Homo sapiens
tgaggtacacccaga

SEQ ID NO: 1798840 - DNA, 15 bp, Homo sapiens
gaggtacacccagag

SEQ ID NO: 1798841 - DNA, 15 bp, Homo sapiens
aggtacacccagagg

SEQ ID NO: 1798842 - DNA, 15 bp, Homo sapiens
ggtacacccagaggt

SEQ ID NO: 1798843 - DNA, 15 bp, Homo sapiens
gtacacccagaggtg

SEQ ID NO: 1798844 - DNA, 15 bp, Homo sapiens
tacacccagaggtgg

SEQ ID NO: 1798845 - DNA, 15 bp, Homo sapiens
acacccagaggtggt

SEQ ID NO: 1798846 - DNA, 15 bp, Homo sapiens
cacccagaggtggtg

SEQ ID NO: 1798847 - DNA, 15 bp, Homo sapiens
acccagaggtggtgc

SEQ ID NO: 1798848 - DNA, 15 bp, Homo sapiens
cccagaggtggtgca

SEQ ID NO: 1798849 - DNA, 15 bp, Homo sapiens
ccagaggtggtgcac

SEQ ID NO: 1798850 - DNA, 15 bp, Homo sapiens
cagaggtggtgcaca

SEQ ID NO: 1798851 - DNA, 15 bp, Homo sapiens
agaggtggtgcacag

SEQ ID NO: 1798852 - DNA, 15 bp, Homo sapiens
gaggtggtgcacagg

SEQ ID NO: 1798853 - DNA, 15 bp, Homo sapiens
aggtggtgcacaggc

SEQ ID NO: 1798854 - DNA, 15 bp, Homo sapiens
ggtggtgcacaggcc

SEQ ID NO: 1798855 - DNA, 15 bp, Homo sapiens
gtggtgcacaggccc

SEQ ID NO: 1798856 - DNA, 15 bp, Homo sapiens
tggtgcacaggcccc

SEQ ID NO: 1798857 - DNA, 15 bp, Homo sapiens
ggtgcacaggcccct

SEQ ID NO: 1798858 - DNA, 15 bp, Homo sapiens
gtgcacaggcccctt

SEQ ID NO: 1798859 - DNA, 15 bp, Homo sapiens
tgcacaggccccttc

SEQ ID NO: 1798860 - DNA, 15 bp, Homo sapiens
gcacaggccccttct

SEQ ID NO: 1798861 - DNA, 15 bp, Homo sapiens
cacaggccccttcta

SEQ ID NO: 1798862 - DNA, 15 bp, Homo sapiens
acaggccccttctac

SEQ ID NO: 1798863 - DNA, 15 bp, Homo sapiens
caggccccttctacc

SEQ ID NO: 1798864 - DNA, 15 bp, Homo sapiens
aggccccttctaccc

SEQ ID NO: 1798865 - DNA, 15 bp, Homo sapiens
ggccccttctaccct

SEQ ID NO: 1798866 - DNA, 15 bp, Homo sapiens
gccccttctaccctg

SEQ ID NO: 1798867 - DNA, 15 bp, Homo sapiens
ccccttctaccctga

SEQ ID NO: 1798868 - DNA, 15 bp, Homo sapiens
cccttctaccctgag

SEQ ID NO: 1798869 - DNA, 15 bp, Homo sapiens
ccttctaccctgaga

SEQ ID NO: 1798870 - DNA, 15 bp, Homo sapiens
cttctaccctgagag

SEQ ID NO: 1798871 - DNA, 15 bp, Homo sapiens
ttctaccctgagagc

SEQ ID NO: 1798872 - DNA, 15 bp, Homo sapiens
tctaccctgagagcc

SEQ ID NO: 1798873 - DNA, 15 bp, Homo sapiens
ctaccctgagagcct

SEQ ID NO: 1798874 - DNA, 15 bp, Homo sapiens
taccctgagagcctc

SEQ ID NO: 1798875 - DNA, 15 bp, Homo sapiens
accctgagagcctct

SEQ ID NO: 1798876 - DNA, 15 bp, Homo sapiens
ccctgagagcctctg

SEQ ID NO: 1798877 - DNA, 15 bp, Homo sapiens
cctgagagcctctgc

SEQ ID NO: 1798878 - DNA, 15 bp, Homo sapiens
ctgagagcctctgca

SEQ ID NO: 1798879 - DNA, 15 bp, Homo sapiens
tgagagcctctgcac

SEQ ID NO: 1798880 - DNA, 15 bp, Homo sapiens
gagagcctctgcaca

SEQ ID NO: 1798881 - DNA, 15 bp, Homo sapiens
agagcctctgcacag

SEQ ID NO: 1798882 - DNA, 15 bp, Homo sapiens
gagcctctgcacagt

SEQ ID NO: 1798883 - DNA, 15 bp, Homo sapiens
agcctctgcacagta

SEQ ID NO: 1798884 - DNA, 15 bp, Homo sapiens
gcctctgcacagtaa

SEQ ID NO: 1798885 - DNA, 15 bp, Homo sapiens
cctctgcacagtaac

SEQ ID NO: 1798886 - DNA, 15 bp, Homo sapiens
ctctgcacagtaacc

SEQ ID NO: 1798887 - DNA, 15 bp, Homo sapiens
tctgcacagtaacca

SEQ ID NO: 1798888 - DNA, 15 bp, Homo sapiens
ctgcacagtaaccag

SEQ ID NO: 1798889 - DNA, 15 bp, Homo sapiens
tgcacagtaaccaga

SEQ ID NO: 1798890 - DNA, 15 bp, Homo sapiens
gcacagtaaccagaa

SEQ ID NO: 1798891 - DNA, 15 bp, Homo sapiens
cacagtaaccagaaa

SEQ ID NO: 1798892 - DNA, 15 bp, Homo sapiens
acagtaaccagaaag

SEQ ID NO: 1798893 - DNA, 15 bp, Homo sapiens
cagtaaccagaaaga

SEQ ID NO: 1798894 - DNA, 15 bp, Homo sapiens
agtaaccagaaagat

SEQ ID NO: 1798895 - DNA, 15 bp, Homo sapiens
gtaaccagaaagatc

SEQ ID NO: 1798896 - DNA, 15 bp, Homo sapiens
taaccagaaagatca

SEQ ID NO: 1798897 - DNA, 15 bp, Homo sapiens
aaccagaaagatcat

SEQ ID NO: 1798898 - DNA, 15 bp, Homo sapiens
accagaaagatcatg

SEQ ID NO: 1798899 - DNA, 15 bp, Homo sapiens
ccagaaagatcatgt

SEQ ID NO: 1798900 - DNA, 15 bp, Homo sapiens
cagaaagatcatgtg

SEQ ID NO: 1798901 - DNA, 15 bp, Homo sapiens
agaaagatcatgtga

SEQ ID NO: 1798902 - DNA, 15 bp, Homo sapiens
gaaagatcatgtgaa

SEQ ID NO: 1798903 - DNA, 15 bp, Homo sapiens
aaagatcatgtgaag

SEQ ID NO: 1798904 - DNA, 15 bp, Homo sapiens
aagatcatgtgaaga

SEQ ID NO: 1798905 - DNA, 15 bp, Homo sapiens
agatcatgtgaagaa

SEQ ID NO: 1798906 - DNA, 15 bp, Homo sapiens
gatcatgtgaagaag

SEQ ID NO: 1798907 - DNA, 15 bp, Homo sapiens
atcatgtgaagaagc

SEQ ID NO: 1798908 - DNA, 15 bp, Homo sapiens
tcatgtgaagaagct

SEQ ID NO: 1798909 - DNA, 15 bp, Homo sapiens
catgtgaagaagctt

SEQ ID NO: 1798910 - DNA, 15 bp, Homo sapiens
atgtgaagaagcttc

SEQ ID NO: 1798911 - DNA, 15 bp, Homo sapiens
tgtgaagaagcttct

SEQ ID NO: 1798912 - DNA, 15 bp, Homo sapiens
gtgaagaagcttctt

SEQ ID NO: 1798913 - DNA, 15 bp, Homo sapiens
tgaagaagcttcttg

SEQ ID NO: 1798914 - DNA, 15 bp, Homo sapiens
gaagaagcttcttgg

SEQ ID NO: 1798915 - DNA, 15 bp, Homo sapiens
aagaagcttcttggt

SEQ ID NO: 1798916 - DNA, 15 bp, Homo sapiens
agaagcttcttggtt

SEQ ID NO: 1798917 - DNA, 15 bp, Homo sapiens
gaagcttcttggttt

SEQ ID NO: 1798918 - DNA, 15 bp, Homo sapiens
aagcttcttggtttt

SEQ ID NO: 1798919 - DNA, 15 bp, Homo sapiens
agcttcttggttttt

SEQ ID NO: 1798920 - DNA, 15 bp, Homo sapiens
gcttcttggtttttg

SEQ ID NO: 1798921 - DNA, 15 bp, Homo sapiens
cttcttggtttttgg

SEQ ID NO: 1798922 - DNA, 15 bp, Homo sapiens
ttcttggtttttgga

SEQ ID NO: 1798923 - DNA, 15 bp, Homo sapiens
tcttggtttttggag

SEQ ID NO: 1798924 - DNA, 15 bp, Homo sapiens
cttggtttttggaga

SEQ ID NO: 1798925 - DNA, 15 bp, Homo sapiens
ttggtttttggagat

SEQ ID NO: 1798926 - DNA, 15 bp, Homo sapiens
tggtttttggagatc

SEQ ID NO: 1798927 - DNA, 15 bp, Homo sapiens
ggtttttggagatca

SEQ ID NO: 1798928 - DNA, 15 bp, Homo sapiens
gtttttggagatcaa

SEQ ID NO: 1798929 - DNA, 15 bp, Homo sapiens
tttttggagatcaaa

SEQ ID NO: 1798930 - DNA, 15 bp, Homo sapiens
ttttggagatcaaaa

SEQ ID NO: 1798931 - DNA, 15 bp, Homo sapiens
tttggagatcaaaac

SEQ ID NO: 1798932 - DNA, 15 bp, Homo sapiens
ttggagatcaaaact

SEQ ID NO: 1798933 - DNA, 15 bp, Homo sapiens
tggagatcaaaactc

SEQ ID NO: 1798934 - DNA, 15 bp, Homo sapiens
ggagatcaaaactcc

SEQ ID NO: 1798935 - DNA, 15 bp, Homo sapiens
gagatcaaaactcca

SEQ ID NO: 1798936 - DNA, 15 bp, Homo sapiens
agatcaaaactccat

SEQ ID NO: 1798937 - DNA, 15 bp, Homo sapiens
gatcaaaactccatc

SEQ ID NO: 1798938 - DNA, 15 bp, Homo sapiens
atcaaaactccatct

SEQ ID NO: 1798939 - DNA, 15 bp, Homo sapiens
tcaaaactccatctg

SEQ ID NO: 1798940 - DNA, 15 bp, Homo sapiens
caaaactccatctgg

SEQ ID NO: 1798941 - DNA, 15 bp, Homo sapiens
aaaactccatctggg

SEQ ID NO: 1798942 - DNA, 15 bp, Homo sapiens
aaactccatctgggg

SEQ ID NO: 1798943 - DNA, 15 bp, Homo sapiens
aactccatctggggc

SEQ ID NO: 1798944 - DNA, 15 bp, Homo sapiens
actccatctggggcc

SEQ ID NO: 1798945 - DNA, 15 bp, Homo sapiens
ctccatctggggccg

SEQ ID NO: 1798946 - DNA, 15 bp, Homo sapiens
tccatctggggccgg

SEQ ID NO: 1798947 - DNA, 15 bp, Homo sapiens
ccatctggggccggg

SEQ ID NO: 1798948 - DNA, 15 bp, Homo sapiens
catctggggccgggc

SEQ ID NO: 1798949 - DNA, 15 bp, Homo sapiens
atctggggccgggca

SEQ ID NO: 1798950 - DNA, 15 bp, Homo sapiens
tctggggccgggcac

SEQ ID NO: 1798951 - DNA, 15 bp, Homo sapiens
ctggggccgggcacg

SEQ ID NO: 1798952 - DNA, 15 bp, Homo sapiens
tggggccgggcacgg

SEQ ID NO: 1798953 - DNA, 15 bp, Homo sapiens
ggggccgggcacggt

SEQ ID NO: 1798954 - DNA, 15 bp, Homo sapiens
gggccgggcacggtg

SEQ ID NO: 1798955 - DNA, 15 bp, Homo sapiens
ggccgggcacggtgg

SEQ ID NO: 1798956 - DNA, 15 bp, Homo sapiens
gccgggcacggtggc

SEQ ID NO: 1798957 - DNA, 15 bp, Homo sapiens
ccgggcacggtggct

SEQ ID NO: 1798958 - DNA, 15 bp, Homo sapiens
cgggcacggtggctc

SEQ ID NO: 1798959 - DNA, 15 bp, Homo sapiens
acggtggctcacgtc

SEQ ID NO: 1798960 - DNA, 15 bp, Homo sapiens
gtggctcacgtctgt

SEQ ID NO: 1798961 - DNA, 15 bp, Homo sapiens
tggctcacgtctgtc

SEQ ID NO: 1798962 - DNA, 15 bp, Homo sapiens
ggctcacgtctgtca

SEQ ID NO: 1798963 - DNA, 15 bp, Homo sapiens
gctcacgtctgtcat

SEQ ID NO: 1798964 - DNA, 15 bp, Homo sapiens
ctcacgtctgtcatc

SEQ ID NO: 1798965 - DNA, 15 bp, Homo sapiens
tcacgtctgtcatcc

SEQ ID NO: 1798966 - DNA, 15 bp, Homo sapiens
cacgtctgtcatccc

SEQ ID NO: 1798967 - DNA, 15 bp, Homo sapiens
acgtctgtcatccca

SEQ ID NO: 1798968 - DNA, 15 bp, Homo sapiens
cgtctgtcatcccag

SEQ ID NO: 1798969 - DNA, 15 bp, Homo sapiens
gtctgtcatcccagc

SEQ ID NO: 1798970 - DNA, 15 bp, Homo sapiens
tctgtcatcccagca

SEQ ID NO: 1798971 - DNA, 15 bp, Homo sapiens
catcccagcactttg

SEQ ID NO: 1798972 - DNA, 15 bp, Homo sapiens
aggccgaggcaggcg

SEQ ID NO: 1798973 - DNA, 15 bp, Homo sapiens
ggccgaggcaggcgg

SEQ ID NO: 1798974 - DNA, 15 bp, Homo sapiens
cacctgaggtcaggg

SEQ ID NO: 1798975 - DNA, 15 bp, Homo sapiens
acctgaggtcagggg

SEQ ID NO: 1798976 - DNA, 15 bp, Homo sapiens
cctgaggtcaggggt

SEQ ID NO: 1798977 - DNA, 15 bp, Homo sapiens
ctgaggtcaggggtt

SEQ ID NO: 1798978 - DNA, 15 bp, Homo sapiens
tgaggtcaggggttc

SEQ ID NO: 1798979 - DNA, 15 bp, Homo sapiens
gaggtcaggggttcg

SEQ ID NO: 1798980 - DNA, 15 bp, Homo sapiens
aggtcaggggttcga

SEQ ID NO: 1798981 - DNA, 15 bp, Homo sapiens
ggtcaggggttcgag

SEQ ID NO: 1798982 - DNA, 15 bp, Homo sapiens
ggtgaaaccccgtcg

SEQ ID NO: 1798983 - DNA, 15 bp, Homo sapiens
gtgaaaccccgtcgc

SEQ ID NO: 1798984 - DNA, 15 bp, Homo sapiens
tgaaaccccgtcgct

SEQ ID NO: 1798985 - DNA, 15 bp, Homo sapiens
gaaaccccgtcgctg

SEQ ID NO: 1798986 - DNA, 15 bp, Homo sapiens
aaaccccgtcgctgc

SEQ ID NO: 1798987 - DNA, 15 bp, Homo sapiens
aaccccgtcgctgct

SEQ ID NO: 1798988 - DNA, 15 bp, Homo sapiens
accccgtcgctgcta

SEQ ID NO: 1798989 - DNA, 15 bp, Homo sapiens
ccccgtcgctgctaa

SEQ ID NO: 1798990 - DNA, 15 bp, Homo sapiens
cccgtcgctgctaaa

SEQ ID NO: 1798991 - DNA, 15 bp, Homo sapiens
ccgtcgctgctaaaa

SEQ ID NO: 1798992 - DNA, 15 bp, Homo sapiens
cgtcgctgctaaaaa

SEQ ID NO: 1798993 - DNA, 15 bp, Homo sapiens
gtcgctgctaaaaat

SEQ ID NO: 1798994 - DNA, 15 bp, Homo sapiens
tcgctgctaaaaata

SEQ ID NO: 1798995 - DNA, 15 bp, Homo sapiens
cgctgctaaaaatac

SEQ ID NO: 1798996 - DNA, 15 bp, Homo sapiens
gctgctaaaaataca

SEQ ID NO: 1798997 - DNA, 15 bp, Homo sapiens
ctgctaaaaatacaa

SEQ ID NO: 1798998 - DNA, 15 bp, Homo sapiens
tgctaaaaatacaaa

SEQ ID NO: 1798999 - DNA, 15 bp, Homo sapiens
gctaaaaatacaaaa

SEQ ID NO: 1799000 - DNA, 15 bp, Homo sapiens
ggtgtggtggcgggt

SEQ ID NO: 1799001 - DNA, 15 bp, Homo sapiens
gtgtggtggcgggtg

SEQ ID NO: 1799002 - DNA, 15 bp, Homo sapiens
tgtggtggcgggtgt

SEQ ID NO: 1799003 - DNA, 15 bp, Homo sapiens
gtggtggcgggtgtg

SEQ ID NO: 1799004 - DNA, 15 bp, Homo sapiens
tggtggcgggtgtgg

SEQ ID NO: 1799005 - DNA, 15 bp, Homo sapiens
ggtggcgggtgtggt

SEQ ID NO: 1799006 - DNA, 15 bp, Homo sapiens
gtggcgggtgtggtg

SEQ ID NO: 1799007 - DNA, 15 bp, Homo sapiens
tggcgggtgtggtgg

SEQ ID NO: 1799008 - DNA, 15 bp, Homo sapiens
ggcgggtgtggtggc

SEQ ID NO: 1799009 - DNA, 15 bp, Homo sapiens
gcgggtgtggtggca

SEQ ID NO: 1799010 - DNA, 15 bp, Homo sapiens
tgtggtggcaggcat

SEQ ID NO: 1799011 - DNA, 15 bp, Homo sapiens
gtggtggcaggcatg

SEQ ID NO: 1799012 - DNA, 15 bp, Homo sapiens
tggtggcaggcatgg

SEQ ID NO: 1799013 - DNA, 15 bp, Homo sapiens
ggtggcaggcatggt

SEQ ID NO: 1799014 - DNA, 15 bp, Homo sapiens
gtggcaggcatggtg

SEQ ID NO: 1799015 - DNA, 15 bp, Homo sapiens
tggcaggcatggtgg

SEQ ID NO: 1799016 - DNA, 15 bp, Homo sapiens
gcaggcatggtggca

SEQ ID NO: 1799017 - DNA, 15 bp, Homo sapiens
gaggcaggggaatct

SEQ ID NO: 1799018 - DNA, 15 bp, Homo sapiens
aggcaggggaatctc

SEQ ID NO: 1799019 - DNA, 15 bp, Homo sapiens
ggcaggggaatctct

SEQ ID NO: 1799020 - DNA, 15 bp, Homo sapiens
gcaggggaatctctt

SEQ ID NO: 1799021 - DNA, 15 bp, Homo sapiens
caggggaatctcttg

SEQ ID NO: 1799022 - DNA, 15 bp, Homo sapiens
aggggaatctcttga

SEQ ID NO: 1799023 - DNA, 15 bp, Homo sapiens
ggggaatctcttgaa

SEQ ID NO: 1799024 - DNA, 15 bp, Homo sapiens
gggaatctcttgaac

SEQ ID NO: 1799025 - DNA, 15 bp, Homo sapiens
ggaatctcttgaacc

SEQ ID NO: 1799026 - DNA, 15 bp, Homo sapiens
gaatctcttgaacct

SEQ ID NO: 1799027 - DNA, 15 bp, Homo sapiens
tctcttgaacctgga

SEQ ID NO: 1799028 - DNA, 15 bp, Homo sapiens
ctcttgaacctggat

SEQ ID NO: 1799029 - DNA, 15 bp, Homo sapiens
tcttgaacctggatg

SEQ ID NO: 1799030 - DNA, 15 bp, Homo sapiens
cttgaacctggatgg

SEQ ID NO: 1799031 - DNA, 15 bp, Homo sapiens
ttgaacctggatggt

SEQ ID NO: 1799032 - DNA, 15 bp, Homo sapiens
tgaacctggatggta

SEQ ID NO: 1799033 - DNA, 15 bp, Homo sapiens
gaacctggatggtag

SEQ ID NO: 1799034 - DNA, 15 bp, Homo sapiens
aacctggatggtaga

SEQ ID NO: 1799035 - DNA, 15 bp, Homo sapiens
acctggatggtagag

SEQ ID NO: 1799036 - DNA, 15 bp, Homo sapiens
cctggatggtagagg

SEQ ID NO: 1799037 - DNA, 15 bp, Homo sapiens
ctggatggtagaggc

SEQ ID NO: 1799038 - DNA, 15 bp, Homo sapiens
tggatggtagaggct

SEQ ID NO: 1799039 - DNA, 15 bp, Homo sapiens
ggatggtagaggctg

SEQ ID NO: 1799040 - DNA, 15 bp, Homo sapiens
gatggtagaggctgc

SEQ ID NO: 1799041 - DNA, 15 bp, Homo sapiens
atggtagaggctgca

SEQ ID NO: 1799042 - DNA, 15 bp, Homo sapiens
tggtagaggctgcag

SEQ ID NO: 1799043 - DNA, 15 bp, Homo sapiens
ggtagaggctgcagt

SEQ ID NO: 1799044 - DNA, 15 bp, Homo sapiens
gtagaggctgcagtg

SEQ ID NO: 1799045 - DNA, 15 bp, Homo sapiens
tagaggctgcagtgc

SEQ ID NO: 1799046 - DNA, 15 bp, Homo sapiens
agaggctgcagtgct

SEQ ID NO: 1799047 - DNA, 15 bp, Homo sapiens
gaggctgcagtgctc

SEQ ID NO: 1799048 - DNA, 15 bp, Homo sapiens
aggctgcagtgctcc

SEQ ID NO: 1799049 - DNA, 15 bp, Homo sapiens
ggctgcagtgctcca

SEQ ID NO: 1799050 - DNA, 15 bp, Homo sapiens
gctgcagtgctccag

SEQ ID NO: 1799051 - DNA, 15 bp, Homo sapiens
ctgcagtgctccagc

SEQ ID NO: 1799052 - DNA, 15 bp, Homo sapiens
tgcagtgctccagcc

SEQ ID NO: 1799053 - DNA, 15 bp, Homo sapiens
gcagtgctccagcct

SEQ ID NO: 1799054 - DNA, 15 bp, Homo sapiens
cagtgctccagcctg

SEQ ID NO: 1799055 - DNA, 15 bp, Homo sapiens
agtgctccagcctgg

SEQ ID NO: 1799056 - DNA, 15 bp, Homo sapiens
gtgctccagcctggg

SEQ ID NO: 1799057 - DNA, 15 bp, Homo sapiens
gctccagcctgggcc

SEQ ID NO: 1799058 - DNA, 15 bp, Homo sapiens
cctgggccacagagg

SEQ ID NO: 1799059 - DNA, 15 bp, Homo sapiens
ctgggccacagaggg

SEQ ID NO: 1799060 - DNA, 15 bp, Homo sapiens
tgggccacagaggga

SEQ ID NO: 1799061 - DNA, 15 bp, Homo sapiens
gggccacagagggag

SEQ ID NO: 1799062 - DNA, 15 bp, Homo sapiens
ggccacagagggaga

SEQ ID NO: 1799063 - DNA, 15 bp, Homo sapiens
gccacagagggagac

SEQ ID NO: 1799064 - DNA, 15 bp, Homo sapiens
ccacagagggagacc

SEQ ID NO: 1799065 - DNA, 15 bp, Homo sapiens
cacagagggagaccc

SEQ ID NO: 1799066 - DNA, 15 bp, Homo sapiens
acagagggagacccc

SEQ ID NO: 1799067 - DNA, 15 bp, Homo sapiens
cagagggagacccca

SEQ ID NO: 1799068 - DNA, 15 bp, Homo sapiens
agagggagaccccat

SEQ ID NO: 1799069 - DNA, 15 bp, Homo sapiens
gagggagaccccatc

SEQ ID NO: 1799070 - DNA, 15 bp, Homo sapiens
agggagaccccatct

SEQ ID NO: 1799071 - DNA, 15 bp, Homo sapiens
gggagaccccatctc

SEQ ID NO: 1799072 - DNA, 15 bp, Homo sapiens
ggagaccccatctcc

SEQ ID NO: 1799073 - DNA, 15 bp, Homo sapiens
gagaccccatctcca

SEQ ID NO: 1799074 - DNA, 15 bp, Homo sapiens
agaccccatctccaa

SEQ ID NO: 1799075 - DNA, 15 bp, Homo sapiens
gaccccatctccaaa

SEQ ID NO: 1799076 - DNA, 15 bp, Homo sapiens
accccatctccaaaa

SEQ ID NO: 1799077 - DNA, 15 bp, Homo sapiens
ccccatctccaaaac

SEQ ID NO: 1799078 - DNA, 15 bp, Homo sapiens
cccatctccaaaaca

SEQ ID NO: 1799079 - DNA, 15 bp, Homo sapiens
ccatctccaaaacaa

SEQ ID NO: 1799080 - DNA, 15 bp, Homo sapiens
catctccaaaacaaa

SEQ ID NO: 1799081 - DNA, 15 bp, Homo sapiens
atctccaaaacaaac

SEQ ID NO: 1799082 - DNA, 15 bp, Homo sapiens
tctccaaaacaaaca

SEQ ID NO: 1799083 - DNA, 15 bp, Homo sapiens
ctccaaaacaaacaa

SEQ ID NO: 1799084 - DNA, 15 bp, Homo sapiens
tccaaaacaaacaag

SEQ ID NO: 1799085 - DNA, 15 bp, Homo sapiens
ccaaaacaaacaagc

SEQ ID NO: 1799086 - DNA, 15 bp, Homo sapiens
caaaacaaacaagca

SEQ ID NO: 1799087 - DNA, 15 bp, Homo sapiens
aaaacaaacaagcaa

SEQ ID NO: 1799088 - DNA, 15 bp, Homo sapiens
aaacaaacaagcaaa

SEQ ID NO: 1799089 - DNA, 15 bp, Homo sapiens
aacaaacaagcaaac

SEQ ID NO: 1799090 - DNA, 15 bp, Homo sapiens
acaaacaagcaaaca

SEQ ID NO: 1799091 - DNA, 15 bp, Homo sapiens
caaacaagcaaacaa

SEQ ID NO: 1799092 - DNA, 15 bp, Homo sapiens
aaacaagcaaacaag

SEQ ID NO: 1799093 - DNA, 15 bp, Homo sapiens
aacaagcaaacaagc

SEQ ID NO: 1799094 - DNA, 15 bp, Homo sapiens
acaagcaaacaagca

SEQ ID NO: 1799095 - DNA, 15 bp, Homo sapiens
caagcaaacaagcag

SEQ ID NO: 1799096 - DNA, 15 bp, Homo sapiens
aagcaaacaagcaga

SEQ ID NO: 1799097 - DNA, 15 bp, Homo sapiens
agcaaacaagcagaa

SEQ ID NO: 1799098 - DNA, 15 bp, Homo sapiens
gcaaacaagcagaaa

SEQ ID NO: 1799099 - DNA, 15 bp, Homo sapiens
caaacaagcagaaaa

SEQ ID NO: 1799100 - DNA, 15 bp, Homo sapiens
aaacaagcagaaaac

SEQ ID NO: 1799101 - DNA, 15 bp, Homo sapiens
aacaagcagaaaaca

SEQ ID NO: 1799102 - DNA, 15 bp, Homo sapiens
acaagcagaaaacac

SEQ ID NO: 1799103 - DNA, 15 bp, Homo sapiens
caagcagaaaacact

SEQ ID NO: 1799104 - DNA, 15 bp, Homo sapiens
aagcagaaaacactc

SEQ ID NO: 1799105 - DNA, 15 bp, Homo sapiens
agcagaaaacactcc

SEQ ID NO: 1799106 - DNA, 15 bp, Homo sapiens
gcagaaaacactcca

SEQ ID NO: 1799107 - DNA, 15 bp, Homo sapiens
cagaaaacactccat

SEQ ID NO: 1799108 - DNA, 15 bp, Homo sapiens
agaaaacactccatc

SEQ ID NO: 1799109 - DNA, 15 bp, Homo sapiens
gaaaacactccatct

SEQ ID NO: 1799110 - DNA, 15 bp, Homo sapiens
aaaacactccatctg

SEQ ID NO: 1799111 - DNA, 15 bp, Homo sapiens
aaacactccatctgc

SEQ ID NO: 1799112 - DNA, 15 bp, Homo sapiens
aacactccatctgcg

SEQ ID NO: 1799113 - DNA, 15 bp, Homo sapiens
acactccatctgcgg

SEQ ID NO: 1799114 - DNA, 15 bp, Homo sapiens
cactccatctgcggg

SEQ ID NO: 1799115 - DNA, 15 bp, Homo sapiens
actccatctgcggga

SEQ ID NO: 1799116 - DNA, 15 bp, Homo sapiens
ctccatctgcgggag

SEQ ID NO: 1799117 - DNA, 15 bp, Homo sapiens
tccatctgcgggagt

SEQ ID NO: 1799118 - DNA, 15 bp, Homo sapiens
ccatctgcgggagtg

SEQ ID NO: 1799119 - DNA, 15 bp, Homo sapiens
catctgcgggagtgg

SEQ ID NO: 1799120 - DNA, 15 bp, Homo sapiens
atctgcgggagtgga

SEQ ID NO: 1799121 - DNA, 15 bp, Homo sapiens
tctgcgggagtggaa

SEQ ID NO: 1799122 - DNA, 15 bp, Homo sapiens
ctgcgggagtggaaa

SEQ ID NO: 1799123 - DNA, 15 bp, Homo sapiens
tgcgggagtggaaag

SEQ ID NO: 1799124 - DNA, 15 bp, Homo sapiens
gcgggagtggaaaga

SEQ ID NO: 1799125 - DNA, 15 bp, Homo sapiens
cgggagtggaaagag

SEQ ID NO: 1799126 - DNA, 15 bp, Homo sapiens
gggagtggaaagagc

SEQ ID NO: 1799127 - DNA, 15 bp, Homo sapiens
ggagtggaaagagct

SEQ ID NO: 1799128 - DNA, 15 bp, Homo sapiens
gagtggaaagagctc

SEQ ID NO: 1799129 - DNA, 15 bp, Homo sapiens
agtggaaagagctca

SEQ ID NO: 1799130 - DNA, 15 bp, Homo sapiens
gtggaaagagctcat

SEQ ID NO: 1799131 - DNA, 15 bp, Homo sapiens
tggaaagagctcatt

SEQ ID NO: 1799132 - DNA, 15 bp, Homo sapiens
ggaaagagctcattc

SEQ ID NO: 1799133 - DNA, 15 bp, Homo sapiens
gaaagagctcattcc

SEQ ID NO: 1799134 - DNA, 15 bp, Homo sapiens
aaagagctcattcct

SEQ ID NO: 1799135 - DNA, 15 bp, Homo sapiens
aagagctcattccta

SEQ ID NO: 1799136 - DNA, 15 bp, Homo sapiens
agagctcattcctag

SEQ ID NO: 1799137 - DNA, 15 bp, Homo sapiens
gagctcattcctagc

SEQ ID NO: 1799138 - DNA, 15 bp, Homo sapiens
agctcattcctagct

SEQ ID NO: 1799139 - DNA, 15 bp, Homo sapiens
gctcattcctagctc

SEQ ID NO: 1799140 - DNA, 15 bp, Homo sapiens
ctcattcctagctcc

SEQ ID NO: 1799141 - DNA, 15 bp, Homo sapiens
tcattcctagctcca

SEQ ID NO: 1799142 - DNA, 15 bp, Homo sapiens
cattcctagctccac

SEQ ID NO: 1799143 - DNA, 15 bp, Homo sapiens
attcctagctccacg

SEQ ID NO: 1799144 - DNA, 15 bp, Homo sapiens
ttcctagctccacgg

SEQ ID NO: 1799145 - DNA, 15 bp, Homo sapiens
tcctagctccacggt

SEQ ID NO: 1799146 - DNA, 15 bp, Homo sapiens
cctagctccacggta

SEQ ID NO: 1799147 - DNA, 15 bp, Homo sapiens
ctagctccacggtag

SEQ ID NO: 1799148 - DNA, 15 bp, Homo sapiens
tagctccacggtagg

SEQ ID NO: 1799149 - DNA, 15 bp, Homo sapiens
agctccacggtagga

SEQ ID NO: 1799150 - DNA, 15 bp, Homo sapiens
gctccacggtaggaa

SEQ ID NO: 1799151 - DNA, 15 bp, Homo sapiens
ctccacggtaggaag

SEQ ID NO: 1799152 - DNA, 15 bp, Homo sapiens
tccacggtaggaaga

SEQ ID NO: 1799153 - DNA, 15 bp, Homo sapiens
ccacggtaggaagat

SEQ ID NO: 1799154 - DNA, 15 bp, Homo sapiens
cacggtaggaagatg

SEQ ID NO: 1799155 - DNA, 15 bp, Homo sapiens
acggtaggaagatgt

SEQ ID NO: 1799156 - DNA, 15 bp, Homo sapiens
cggtaggaagatgtt

SEQ ID NO: 1799157 - DNA, 15 bp, Homo sapiens
ggtaggaagatgttc

SEQ ID NO: 1799158 - DNA, 15 bp, Homo sapiens
gtaggaagatgttct

SEQ ID NO: 1799159 - DNA, 15 bp, Homo sapiens
taggaagatgttctg

SEQ ID NO: 1799160 - DNA, 15 bp, Homo sapiens
aggaagatgttctga

SEQ ID NO: 1799161 - DNA, 15 bp, Homo sapiens
ggaagatgttctgag

SEQ ID NO: 1799162 - DNA, 15 bp, Homo sapiens
gaagatgttctgagc

SEQ ID NO: 1799163 - DNA, 15 bp, Homo sapiens
aagatgttctgagcc

SEQ ID NO: 1799164 - DNA, 15 bp, Homo sapiens
agatgttctgagcct

SEQ ID NO: 1799165 - DNA, 15 bp, Homo sapiens
gatgttctgagcctg

SEQ ID NO: 1799166 - DNA, 15 bp, Homo sapiens
atgttctgagcctga

SEQ ID NO: 1799167 - DNA, 15 bp, Homo sapiens
tgttctgagcctgag

SEQ ID NO: 1799168 - DNA, 15 bp, Homo sapiens
gttctgagcctgagc

SEQ ID NO: 1799169 - DNA, 15 bp, Homo sapiens
ttctgagcctgagcc

SEQ ID NO: 1799170 - DNA, 15 bp, Homo sapiens
tctgagcctgagccc

SEQ ID NO: 1799171 - DNA, 15 bp, Homo sapiens
ctgagcctgagccca

SEQ ID NO: 1799172 - DNA, 15 bp, Homo sapiens
tgagcctgagcccaa

SEQ ID NO: 1799173 - DNA, 15 bp, Homo sapiens
gagcctgagcccaat

SEQ ID NO: 1799174 - DNA, 15 bp, Homo sapiens
agcctgagcccaatc

SEQ ID NO: 1799175 - DNA, 15 bp, Homo sapiens
gcctgagcccaatcc

SEQ ID NO: 1799176 - DNA, 15 bp, Homo sapiens
cctgagcccaatccg

SEQ ID NO: 1799177 - DNA, 15 bp, Homo sapiens
ctgagcccaatccgc

SEQ ID NO: 1799178 - DNA, 15 bp, Homo sapiens
tgagcccaatccgca

SEQ ID NO: 1799179 - DNA, 15 bp, Homo sapiens
gagcccaatccgcat

SEQ ID NO: 1799180 - DNA, 15 bp, Homo sapiens
agcccaatccgcatt

SEQ ID NO: 1799181 - DNA, 15 bp, Homo sapiens
gcccaatccgcattc

SEQ ID NO: 1799182 - DNA, 15 bp, Homo sapiens
cccaatccgcattca

SEQ ID NO: 1799183 - DNA, 15 bp, Homo sapiens
ccaatccgcattcat

SEQ ID NO: 1799184 - DNA, 15 bp, Homo sapiens
caatccgcattcata

SEQ ID NO: 1799185 - DNA, 15 bp, Homo sapiens
aatccgcattcatag

SEQ ID NO: 1799186 - DNA, 15 bp, Homo sapiens
atccgcattcatagc

SEQ ID NO: 1799187 - DNA, 15 bp, Homo sapiens
tccgcattcatagct

SEQ ID NO: 1799188 - DNA, 15 bp, Homo sapiens
ccgcattcatagctt

SEQ ID NO: 1799189 - DNA, 15 bp, Homo sapiens
cgcattcatagcttg

SEQ ID NO: 1799190 - DNA, 15 bp, Homo sapiens
gcattcatagcttga

SEQ ID NO: 1799191 - DNA, 15 bp, Homo sapiens
cattcatagcttgaa

SEQ ID NO: 1799192 - DNA, 15 bp, Homo sapiens
attcatagcttgaac

SEQ ID NO: 1799193 - DNA, 15 bp, Homo sapiens
ttcatagcttgaaca

SEQ ID NO: 1799194 - DNA, 15 bp, Homo sapiens
tcatagcttgaacag

SEQ ID NO: 1799195 - DNA, 15 bp, Homo sapiens
catagcttgaacagc

SEQ ID NO: 1799196 - DNA, 15 bp, Homo sapiens
atagcttgaacagct

SEQ ID NO: 1799197 - DNA, 15 bp, Homo sapiens
tagcttgaacagctg

SEQ ID NO: 1799198 - DNA, 15 bp, Homo sapiens
agcttgaacagctgt

SEQ ID NO: 1799199 - DNA, 15 bp, Homo sapiens
gcttgaacagctgtc

SEQ ID NO: 1799200 - DNA, 15 bp, Homo sapiens
cttgaacagctgtca

SEQ ID NO: 1799201 - DNA, 15 bp, Homo sapiens
ttgaacagctgtcac

SEQ ID NO: 1799202 - DNA, 15 bp, Homo sapiens
tgaacagctgtcaca

SEQ ID NO: 1799203 - DNA, 15 bp, Homo sapiens
gaacagctgtcacag

SEQ ID NO: 1799204 - DNA, 15 bp, Homo sapiens
aacagctgtcacaga

SEQ ID NO: 1799205 - DNA, 15 bp, Homo sapiens
acagctgtcacagac

SEQ ID NO: 1799206 - DNA, 15 bp, Homo sapiens
cagctgtcacagaca

SEQ ID NO: 1799207 - DNA, 15 bp, Homo sapiens
agctgtcacagacag

SEQ ID NO: 1799208 - DNA, 15 bp, Homo sapiens
gctgtcacagacaga

SEQ ID NO: 1799209 - DNA, 15 bp, Homo sapiens
ctgtcacagacagag

SEQ ID NO: 1799210 - DNA, 15 bp, Homo sapiens
tgtcacagacagagg

SEQ ID NO: 1799211 - DNA, 15 bp, Homo sapiens
gtcacagacagaggc

SEQ ID NO: 1799212 - DNA, 15 bp, Homo sapiens
tcacagacagaggct

SEQ ID NO: 1799213 - DNA, 15 bp, Homo sapiens
cacagacagaggctc

SEQ ID NO: 1799214 - DNA, 15 bp, Homo sapiens
acagacagaggctca

SEQ ID NO: 1799215 - DNA, 15 bp, Homo sapiens
cagacagaggctcac

SEQ ID NO: 1799216 - DNA, 15 bp, Homo sapiens
agacagaggctcacc

SEQ ID NO: 1799217 - DNA, 15 bp, Homo sapiens
gacagaggctcaccg

SEQ ID NO: 1799218 - DNA, 15 bp, Homo sapiens
acagaggctcaccga

SEQ ID NO: 1799219 - DNA, 15 bp, Homo sapiens
cagaggctcaccgaa

SEQ ID NO: 1799220 - DNA, 15 bp, Homo sapiens
agaggctcaccgaaa

SEQ ID NO: 1799221 - DNA, 15 bp, Homo sapiens
gaggctcaccgaaag

SEQ ID NO: 1799222 - DNA, 15 bp, Homo sapiens
aggctcaccgaaagt

SEQ ID NO: 1799223 - DNA, 15 bp, Homo sapiens
ggctcaccgaaagtt

SEQ ID NO: 1799224 - DNA, 15 bp, Homo sapiens
gctcaccgaaagttt

SEQ ID NO: 1799225 - DNA, 15 bp, Homo sapiens
ctcaccgaaagtttt

SEQ ID NO: 1799226 - DNA, 15 bp, Homo sapiens
tcaccgaaagttttt

SEQ ID NO: 1799227 - DNA, 15 bp, Homo sapiens
caccgaaagtttttg

SEQ ID NO: 1799228 - DNA, 15 bp, Homo sapiens
accgaaagtttttgg

SEQ ID NO: 1799229 - DNA, 15 bp, Homo sapiens
ccgaaagtttttgga

SEQ ID NO: 1799230 - DNA, 15 bp, Homo sapiens
cgaaagtttttggaa

SEQ ID NO: 1799231 - DNA, 15 bp, Homo sapiens
gaaagtttttggaaa

SEQ ID NO: 1799232 - DNA, 15 bp, Homo sapiens
aaagtttttggaaac

SEQ ID NO: 1799233 - DNA, 15 bp, Homo sapiens
aagtttttggaaact

SEQ ID NO: 1799234 - DNA, 15 bp, Homo sapiens
agtttttggaaactg

SEQ ID NO: 1799235 - DNA, 15 bp, Homo sapiens
gtttttggaaactgg

SEQ ID NO: 1799236 - DNA, 15 bp, Homo sapiens
tttttggaaactgga

SEQ ID NO: 1799237 - DNA, 15 bp, Homo sapiens
ttttggaaactggat

SEQ ID NO: 1799238 - DNA, 15 bp, Homo sapiens
tttggaaactggatc

SEQ ID NO: 1799239 - DNA, 15 bp, Homo sapiens
ttggaaactggatcc

SEQ ID NO: 1799240 - DNA, 15 bp, Homo sapiens
tggaaactggatcca

SEQ ID NO: 1799241 - DNA, 15 bp, Homo sapiens
ggaaactggatccaa

SEQ ID NO: 1799242 - DNA, 15 bp, Homo sapiens
gaaactggatccaat

SEQ ID NO: 1799243 - DNA, 15 bp, Homo sapiens
aaactggatccaatc

SEQ ID NO: 1799244 - DNA, 15 bp, Homo sapiens
aactggatccaatct

SEQ ID NO: 1799245 - DNA, 15 bp, Homo sapiens
actggatccaatctg

SEQ ID NO: 1799246 - DNA, 15 bp, Homo sapiens
ctggatccaatctga

SEQ ID NO: 1799247 - DNA, 15 bp, Homo sapiens
tggatccaatctgat

SEQ ID NO: 1799248 - DNA, 15 bp, Homo sapiens
ggatccaatctgatg

SEQ ID NO: 1799249 - DNA, 15 bp, Homo sapiens
gatccaatctgatgc

SEQ ID NO: 1799250 - DNA, 15 bp, Homo sapiens
atccaatctgatgct

SEQ ID NO: 1799251 - DNA, 15 bp, Homo sapiens
tccaatctgatgctt

SEQ ID NO: 1799252 - DNA, 15 bp, Homo sapiens
ccaatctgatgctta

SEQ ID NO: 1799253 - DNA, 15 bp, Homo sapiens
caatctgatgcttac

SEQ ID NO: 1799254 - DNA, 15 bp, Homo sapiens
aatctgatgcttact

SEQ ID NO: 1799255 - DNA, 15 bp, Homo sapiens
atctgatgcttactt

SEQ ID NO: 1799256 - DNA, 15 bp, Homo sapiens
tctgatgcttacttt

SEQ ID NO: 1799257 - DNA, 15 bp, Homo sapiens
ctgatgcttactttc

SEQ ID NO: 1799258 - DNA, 15 bp, Homo sapiens
tgatgcttactttct

SEQ ID NO: 1799259 - DNA, 15 bp, Homo sapiens
gatgcttactttctc

SEQ ID NO: 1799260 - DNA, 15 bp, Homo sapiens
atgcttactttctca

SEQ ID NO: 1799261 - DNA, 15 bp, Homo sapiens
tgcttactttctcaa

SEQ ID NO: 1799262 - DNA, 15 bp, Homo sapiens
gcttactttctcaaa

SEQ ID NO: 1799263 - DNA, 15 bp, Homo sapiens
cttactttctcaaat

SEQ ID NO: 1799264 - DNA, 15 bp, Homo sapiens
ttactttctcaaatc

SEQ ID NO: 1799265 - DNA, 15 bp, Homo sapiens
tactttctcaaatca

SEQ ID NO: 1799266 - DNA, 15 bp, Homo sapiens
actttctcaaatcaa

SEQ ID NO: 1799267 - DNA, 15 bp, Homo sapiens
ctttctcaaatcaat

SEQ ID NO: 1799268 - DNA, 15 bp, Homo sapiens
tttctcaaatcaata

SEQ ID NO: 1799269 - DNA, 15 bp, Homo sapiens
ttctcaaatcaataa

SEQ ID NO: 1799270 - DNA, 15 bp, Homo sapiens
tctcaaatcaataat

SEQ ID NO: 1799271 - DNA, 15 bp, Homo sapiens
ctcaaatcaataata

SEQ ID NO: 1799272 - DNA, 15 bp, Homo sapiens
tcaaatcaataataa

SEQ ID NO: 1799273 - DNA, 15 bp, Homo sapiens
caaatcaataataat

SEQ ID NO: 1799274 - DNA, 15 bp, Homo sapiens
aaatcaataataatt

SEQ ID NO: 1799275 - DNA, 15 bp, Homo sapiens
aatcaataataatta

SEQ ID NO: 1799276 - DNA, 15 bp, Homo sapiens
atcaataataattag

SEQ ID NO: 1799277 - DNA, 15 bp, Homo sapiens
tcaataataattagt

SEQ ID NO: 1799278 - DNA, 15 bp, Homo sapiens
caataataattagta

SEQ ID NO: 1799279 - DNA, 15 bp, Homo sapiens
aataataattagtac

SEQ ID NO: 1799280 - DNA, 15 bp, Homo sapiens
ataataattagtaca

SEQ ID NO: 1799281 - DNA, 15 bp, Homo sapiens
taataattagtacat

SEQ ID NO: 1799282 - DNA, 15 bp, Homo sapiens
aataattagtacatc

SEQ ID NO: 1799283 - DNA, 15 bp, Homo sapiens
ataattagtacatca

SEQ ID NO: 1799284 - DNA, 15 bp, Homo sapiens
taattagtacatcat

SEQ ID NO: 1799285 - DNA, 15 bp, Homo sapiens
aattagtacatcatt

SEQ ID NO: 1799286 - DNA, 15 bp, Homo sapiens
attagtacatcattc

SEQ ID NO: 1799287 - DNA, 15 bp, Homo sapiens
ttagtacatcattca

SEQ ID NO: 1799288 - DNA, 15 bp, Homo sapiens
tagtacatcattcag

SEQ ID NO: 1799289 - DNA, 15 bp, Homo sapiens
agtacatcattcaga

SEQ ID NO: 1799290 - DNA, 15 bp, Homo sapiens
gtacatcattcagaa

SEQ ID NO: 1799291 - DNA, 15 bp, Homo sapiens
tacatcattcagaag

SEQ ID NO: 1799292 - DNA, 15 bp, Homo sapiens
acatcattcagaaga

SEQ ID NO: 1799293 - DNA, 15 bp, Homo sapiens
catcattcagaagag

SEQ ID NO: 1799294 - DNA, 15 bp, Homo sapiens
atcattcagaagagg

SEQ ID NO: 1799295 - DNA, 15 bp, Homo sapiens
tcattcagaagaggg

SEQ ID NO: 1799296 - DNA, 15 bp, Homo sapiens
cattcagaagagggt

SEQ ID NO: 1799297 - DNA, 15 bp, Homo sapiens
attcagaagagggtg

SEQ ID NO: 1799298 - DNA, 15 bp, Homo sapiens
ttcagaagagggtgc

SEQ ID NO: 1799299 - DNA, 15 bp, Homo sapiens
tcagaagagggtgct

SEQ ID NO: 1799300 - DNA, 15 bp, Homo sapiens
cagaagagggtgctg

SEQ ID NO: 1799301 - DNA, 15 bp, Homo sapiens
agaagagggtgctgt

SEQ ID NO: 1799302 - DNA, 15 bp, Homo sapiens
gaagagggtgctgtt

SEQ ID NO: 1799303 - DNA, 15 bp, Homo sapiens
aagagggtgctgtta

SEQ ID NO: 1799304 - DNA, 15 bp, Homo sapiens
agagggtgctgttaa

SEQ ID NO: 1799305 - DNA, 15 bp, Homo sapiens
gagggtgctgttaac

SEQ ID NO: 1799306 - DNA, 15 bp, Homo sapiens
agggtgctgttaact

SEQ ID NO: 1799307 - DNA, 15 bp, Homo sapiens
gggtgctgttaactt

SEQ ID NO: 1799308 - DNA, 15 bp, Homo sapiens
ggtgctgttaacttg

SEQ ID NO: 1799309 - DNA, 15 bp, Homo sapiens
gtgctgttaacttga

SEQ ID NO: 1799310 - DNA, 15 bp, Homo sapiens
tgctgttaacttgag

SEQ ID NO: 1799311 - DNA, 15 bp, Homo sapiens
gctgttaacttgagt

SEQ ID NO: 1799312 - DNA, 15 bp, Homo sapiens
ctgttaacttgagtg

SEQ ID NO: 1799313 - DNA, 15 bp, Homo sapiens
tgttaacttgagtgc

SEQ ID NO: 1799314 - DNA, 15 bp, Homo sapiens
gttaacttgagtgca

SEQ ID NO: 1799315 - DNA, 15 bp, Homo sapiens
ttaacttgagtgcaa

SEQ ID NO: 1799316 - DNA, 15 bp, Homo sapiens
taacttgagtgcaat

SEQ ID NO: 1799317 - DNA, 15 bp, Homo sapiens
aacttgagtgcaatg

SEQ ID NO: 1799318 - DNA, 15 bp, Homo sapiens
acttgagtgcaatga

SEQ ID NO: 1799319 - DNA, 15 bp, Homo sapiens
cttgagtgcaatgaa

SEQ ID NO: 1799320 - DNA, 15 bp, Homo sapiens
ttgagtgcaatgaat

SEQ ID NO: 1799321 - DNA, 15 bp, Homo sapiens
tgagtgcaatgaatc

SEQ ID NO: 1799322 - DNA, 15 bp, Homo sapiens
gagtgcaatgaatct

SEQ ID NO: 1799323 - DNA, 15 bp, Homo sapiens
agtgcaatgaatctt

SEQ ID NO: 1799324 - DNA, 15 bp, Homo sapiens
gtgcaatgaatcttt

SEQ ID NO: 1799325 - DNA, 15 bp, Homo sapiens
tgcaatgaatctttt

SEQ ID NO: 1799326 - DNA, 15 bp, Homo sapiens
gcaatgaatcttttt

SEQ ID NO: 1799327 - DNA, 15 bp, Homo sapiens
caatgaatctttttt

SEQ ID NO: 1799328 - DNA, 15 bp, Homo sapiens
aatgaatcttttttt

SEQ ID NO: 1799329 - DNA, 15 bp, Homo sapiens
atgaatcttttttta

SEQ ID NO: 1799330 - DNA, 15 bp, Homo sapiens
tgaatctttttttaa

SEQ ID NO: 1799331 - DNA, 15 bp, Homo sapiens
gaatctttttttaac

SEQ ID NO: 1799332 - DNA, 15 bp, Homo sapiens
aatctttttttaact

SEQ ID NO: 1799333 - DNA, 15 bp, Homo sapiens
atctttttttaactt

SEQ ID NO: 1799334 - DNA, 15 bp, Homo sapiens
tctttttttaacttt

SEQ ID NO: 1799335 - DNA, 15 bp, Homo sapiens
ctttttttaactttt

SEQ ID NO: 1799336 - DNA, 15 bp, Homo sapiens
tttttttaactttta

SEQ ID NO: 1799337 - DNA, 15 bp, Homo sapiens
ttttttaacttttat

SEQ ID NO: 1799338 - DNA, 15 bp, Homo sapiens
tttttaacttttatt

SEQ ID NO: 1799339 - DNA, 15 bp, Homo sapiens
ttttaacttttattt

SEQ ID NO: 1799340 - DNA, 15 bp, Homo sapiens
tttaacttttatttt

SEQ ID NO: 1799341 - DNA, 15 bp, Homo sapiens
ttaacttttatttta

SEQ ID NO: 1799342 - DNA, 15 bp, Homo sapiens
taacttttattttag

SEQ ID NO: 1799343 - DNA, 15 bp, Homo sapiens
aacttttattttagg

SEQ ID NO: 1799344 - DNA, 15 bp, Homo sapiens
acttttattttaggt

SEQ ID NO: 1799345 - DNA, 15 bp, Homo sapiens
cttttattttaggtt

SEQ ID NO: 1799346 - DNA, 15 bp, Homo sapiens
ttttattttaggttt

SEQ ID NO: 1799347 - DNA, 15 bp, Homo sapiens
tttattttaggtttg

SEQ ID NO: 1799348 - DNA, 15 bp, Homo sapiens
ttattttaggtttgg

SEQ ID NO: 1799349 - DNA, 15 bp, Homo sapiens
tattttaggtttggg

SEQ ID NO: 1799350 - DNA, 15 bp, Homo sapiens
attttaggtttgggg

SEQ ID NO: 1799351 - DNA, 15 bp, Homo sapiens
ttttaggtttgggga

SEQ ID NO: 1799352 - DNA, 15 bp, Homo sapiens
tttaggtttggggat

SEQ ID NO: 1799353 - DNA, 15 bp, Homo sapiens
ttaggtttggggatg

SEQ ID NO: 1799354 - DNA, 15 bp, Homo sapiens
taggtttggggatgc

SEQ ID NO: 1799355 - DNA, 15 bp, Homo sapiens
aggtttggggatgca

SEQ ID NO: 1799356 - DNA, 15 bp, Homo sapiens
ggtttggggatgcac

SEQ ID NO: 1799357 - DNA, 15 bp, Homo sapiens
gtttggggatgcaca

SEQ ID NO: 1799358 - DNA, 15 bp, Homo sapiens
tttggggatgcacaa

SEQ ID NO: 1799359 - DNA, 15 bp, Homo sapiens
ttggggatgcacaag

SEQ ID NO: 1799360 - DNA, 15 bp, Homo sapiens
tggggatgcacaagt

SEQ ID NO: 1799361 - DNA, 15 bp, Homo sapiens
ggggatgcacaagta

SEQ ID NO: 1799362 - DNA, 15 bp, Homo sapiens
gggatgcacaagtag

SEQ ID NO: 1799363 - DNA, 15 bp, Homo sapiens
ggatgcacaagtagg

SEQ ID NO: 1799364 - DNA, 15 bp, Homo sapiens
gatgcacaagtaggt

SEQ ID NO: 1799365 - DNA, 15 bp, Homo sapiens
atgcacaagtaggtt

SEQ ID NO: 1799366 - DNA, 15 bp, Homo sapiens
tgcacaagtaggttt

SEQ ID NO: 1799367 - DNA, 15 bp, Homo sapiens
gcacaagtaggtttg

SEQ ID NO: 1799368 - DNA, 15 bp, Homo sapiens
cacaagtaggtttgt

SEQ ID NO: 1799369 - DNA, 15 bp, Homo sapiens
acaagtaggtttgtt

SEQ ID NO: 1799370 - DNA, 15 bp, Homo sapiens
caagtaggtttgtta

SEQ ID NO: 1799371 - DNA, 15 bp, Homo sapiens
aagtaggtttgttat

SEQ ID NO: 1799372 - DNA, 15 bp, Homo sapiens
agtaggtttgttata

SEQ ID NO: 1799373 - DNA, 15 bp, Homo sapiens
gtaggtttgttatat

SEQ ID NO: 1799374 - DNA, 15 bp, Homo sapiens
taggtttgttatata

SEQ ID NO: 1799375 - DNA, 15 bp, Homo sapiens
ggtttgttatatagg

SEQ ID NO: 1799376 - DNA, 15 bp, Homo sapiens
gtttgttatataggt

SEQ ID NO: 1799377 - DNA, 15 bp, Homo sapiens
tttgttatataggta

SEQ ID NO: 1799378 - DNA, 15 bp, Homo sapiens
ttgttatataggtaa

SEQ ID NO: 1799379 - DNA, 15 bp, Homo sapiens
tgttatataggtaaa

SEQ ID NO: 1799380 - DNA, 15 bp, Homo sapiens
gttatataggtaaac

SEQ ID NO: 1799381 - DNA, 15 bp, Homo sapiens
ttatataggtaaact

SEQ ID NO: 1799382 - DNA, 15 bp, Homo sapiens
tatataggtaaacta

SEQ ID NO: 1799383 - DNA, 15 bp, Homo sapiens
atataggtaaactag

SEQ ID NO: 1799384 - DNA, 15 bp, Homo sapiens
tataggtaaactagt

SEQ ID NO: 1799385 - DNA, 15 bp, Homo sapiens
ataggtaaactagtg

SEQ ID NO: 1799386 - DNA, 15 bp, Homo sapiens
taggtaaactagtgt

SEQ ID NO: 1799387 - DNA, 15 bp, Homo sapiens
aggtaaactagtgtc

SEQ ID NO: 1799388 - DNA, 15 bp, Homo sapiens
ggtaaactagtgtca

SEQ ID NO: 1799389 - DNA, 15 bp, Homo sapiens
gtaaactagtgtcac

SEQ ID NO: 1799390 - DNA, 15 bp, Homo sapiens
taaactagtgtcacg

SEQ ID NO: 1799391 - DNA, 15 bp, Homo sapiens
aaactagtgtcacgg

SEQ ID NO: 1799392 - DNA, 15 bp, Homo sapiens
aactagtgtcacggg

SEQ ID NO: 1799393 - DNA, 15 bp, Homo sapiens
actagtgtcacgggg

SEQ ID NO: 1799394 - DNA, 15 bp, Homo sapiens
ctagtgtcacggggt

SEQ ID NO: 1799395 - DNA, 15 bp, Homo sapiens
tagtgtcacggggtt

SEQ ID NO: 1799396 - DNA, 15 bp, Homo sapiens
agtgtcacggggttt

SEQ ID NO: 1799397 - DNA, 15 bp, Homo sapiens
gtgtcacggggtttt

SEQ ID NO: 1799398 - DNA, 15 bp, Homo sapiens
tgtcacggggttttg

SEQ ID NO: 1799399 - DNA, 15 bp, Homo sapiens
gtcacggggttttgt

SEQ ID NO: 1799400 - DNA, 15 bp, Homo sapiens
tcacggggttttgtt

SEQ ID NO: 1799401 - DNA, 15 bp, Homo sapiens
cacggggttttgttg

SEQ ID NO: 1799402 - DNA, 15 bp, Homo sapiens
acggggttttgttgt

SEQ ID NO: 1799403 - DNA, 15 bp, Homo sapiens
cggggttttgttgta

SEQ ID NO: 1799404 - DNA, 15 bp, Homo sapiens
ggggttttgttgtac

SEQ ID NO: 1799405 - DNA, 15 bp, Homo sapiens
gggttttgttgtaca

SEQ ID NO: 1799406 - DNA, 15 bp, Homo sapiens
ggttttgttgtacag

SEQ ID NO: 1799407 - DNA, 15 bp, Homo sapiens
gttttgttgtacaga

SEQ ID NO: 1799408 - DNA, 15 bp, Homo sapiens
ttttgttgtacagat

SEQ ID NO: 1799409 - DNA, 15 bp, Homo sapiens
tttgttgtacagatt

SEQ ID NO: 1799410 - DNA, 15 bp, Homo sapiens
ttgttgtacagatta

SEQ ID NO: 1799411 - DNA, 15 bp, Homo sapiens
tgttgtacagattat

SEQ ID NO: 1799412 - DNA, 15 bp, Homo sapiens
gttgtacagattatt

SEQ ID NO: 1799413 - DNA, 15 bp, Homo sapiens
ttgtacagattattt

SEQ ID NO: 1799414 - DNA, 15 bp, Homo sapiens
tgtacagattattta

SEQ ID NO: 1799415 - DNA, 15 bp, Homo sapiens
gtacagattatttaa

SEQ ID NO: 1799416 - DNA, 15 bp, Homo sapiens
tacagattatttaat

SEQ ID NO: 1799417 - DNA, 15 bp, Homo sapiens
acagattatttaatc

SEQ ID NO: 1799418 - DNA, 15 bp, Homo sapiens
cagattatttaatca

SEQ ID NO: 1799419 - DNA, 15 bp, Homo sapiens
agattatttaatcac

SEQ ID NO: 1799420 - DNA, 15 bp, Homo sapiens
gattatttaatcacc

SEQ ID NO: 1799421 - DNA, 15 bp, Homo sapiens
attatttaatcaccc

SEQ ID NO: 1799422 - DNA, 15 bp, Homo sapiens
ttatttaatcaccca

SEQ ID NO: 1799423 - DNA, 15 bp, Homo sapiens
tatttaatcacccag

SEQ ID NO: 1799424 - DNA, 15 bp, Homo sapiens
atttaatcacccagg

SEQ ID NO: 1799425 - DNA, 15 bp, Homo sapiens
tttaatcacccaggt

SEQ ID NO: 1799426 - DNA, 15 bp, Homo sapiens
ttaatcacccaggta

SEQ ID NO: 1799427 - DNA, 15 bp, Homo sapiens
taatcacccaggtag

SEQ ID NO: 1799428 - DNA, 15 bp, Homo sapiens
aatcacccaggtagt

SEQ ID NO: 1799429 - DNA, 15 bp, Homo sapiens
atcacccaggtagta

SEQ ID NO: 1799430 - DNA, 15 bp, Homo sapiens
tcacccaggtagtaa

SEQ ID NO: 1799431 - DNA, 15 bp, Homo sapiens
cacccaggtagtaag

SEQ ID NO: 1799432 - DNA, 15 bp, Homo sapiens
acccaggtagtaagc

SEQ ID NO: 1799433 - DNA, 15 bp, Homo sapiens
cccaggtagtaagct

SEQ ID NO: 1799434 - DNA, 15 bp, Homo sapiens
ccaggtagtaagctt

SEQ ID NO: 1799435 - DNA, 15 bp, Homo sapiens
caggtagtaagcttt

SEQ ID NO: 1799436 - DNA, 15 bp, Homo sapiens
aggtagtaagctttg

SEQ ID NO: 1799437 - DNA, 15 bp, Homo sapiens
ggtagtaagctttgt

SEQ ID NO: 1799438 - DNA, 15 bp, Homo sapiens
gtagtaagctttgta

SEQ ID NO: 1799439 - DNA, 15 bp, Homo sapiens
tagtaagctttgtac

SEQ ID NO: 1799440 - DNA, 15 bp, Homo sapiens
agtaagctttgtacc

SEQ ID NO: 1799441 - DNA, 15 bp, Homo sapiens
gtaagctttgtaccc

SEQ ID NO: 1799442 - DNA, 15 bp, Homo sapiens
taagctttgtaccca

SEQ ID NO: 1799443 - DNA, 15 bp, Homo sapiens
aagctttgtacccaa

SEQ ID NO: 1799444 - DNA, 15 bp, Homo sapiens
agctttgtacccaag

SEQ ID NO: 1799445 - DNA, 15 bp, Homo sapiens
gctttgtacccaagt

SEQ ID NO: 1799446 - DNA, 15 bp, Homo sapiens
ctttgtacccaagtg

SEQ ID NO: 1799447 - DNA, 15 bp, Homo sapiens
tttgtacccaagtgt

SEQ ID NO: 1799448 - DNA, 15 bp, Homo sapiens
ttgtacccaagtgtt

SEQ ID NO: 1799449 - DNA, 15 bp, Homo sapiens
tgtacccaagtgttt

SEQ ID NO: 1799450 - DNA, 15 bp, Homo sapiens
gtacccaagtgtttt

SEQ ID NO: 1799451 - DNA, 15 bp, Homo sapiens
tacccaagtgttttt

SEQ ID NO: 1799452 - DNA, 15 bp, Homo sapiens
acccaagtgtttttt

SEQ ID NO: 1799453 - DNA, 15 bp, Homo sapiens
cccaagtgttttttc

SEQ ID NO: 1799454 - DNA, 15 bp, Homo sapiens
ccaagtgttttttcc

SEQ ID NO: 1799455 - DNA, 15 bp, Homo sapiens
caagtgttttttcct

SEQ ID NO: 1799456 - DNA, 15 bp, Homo sapiens
aagtgttttttcctg

SEQ ID NO: 1799457 - DNA, 15 bp, Homo sapiens
agtgttttttcctgc

SEQ ID NO: 1799458 - DNA, 15 bp, Homo sapiens
gtgttttttcctgct

SEQ ID NO: 1799459 - DNA, 15 bp, Homo sapiens
tgttttttcctgctc

SEQ ID NO: 1799460 - DNA, 15 bp, Homo sapiens
gttttttcctgctct

SEQ ID NO: 1799461 - DNA, 15 bp, Homo sapiens
ttttttcctgctctc

SEQ ID NO: 1799462 - DNA, 15 bp, Homo sapiens
tttttcctgctctcc

SEQ ID NO: 1799463 - DNA, 15 bp, Homo sapiens
ttttcctgctctccc

SEQ ID NO: 1799464 - DNA, 15 bp, Homo sapiens
tttcctgctctccct

SEQ ID NO: 1799465 - DNA, 15 bp, Homo sapiens
ttcctgctctccctc

SEQ ID NO: 1799466 - DNA, 15 bp, Homo sapiens
tcctgctctccctcc

SEQ ID NO: 1799467 - DNA, 15 bp, Homo sapiens
cctgctctccctcct

SEQ ID NO: 1799468 - DNA, 15 bp, Homo sapiens
ctgctctccctcctc

SEQ ID NO: 1799469 - DNA, 15 bp, Homo sapiens
tgctctccctcctcc

SEQ ID NO: 1799470 - DNA, 15 bp, Homo sapiens
gctctccctcctccc

SEQ ID NO: 1799471 - DNA, 15 bp, Homo sapiens
ctctccctcctccca

SEQ ID NO: 1799472 - DNA, 15 bp, Homo sapiens
tctccctcctcccat

SEQ ID NO: 1799473 - DNA, 15 bp, Homo sapiens
ctccctcctcccatc

SEQ ID NO: 1799474 - DNA, 15 bp, Homo sapiens
tccctcctcccatcc

SEQ ID NO: 1799475 - DNA, 15 bp, Homo sapiens
cctcctcccatcctc

SEQ ID NO: 1799476 - DNA, 15 bp, Homo sapiens
ctcctcccatcctcc

SEQ ID NO: 1799477 - DNA, 15 bp, Homo sapiens
tcctcccatcctcca

SEQ ID NO: 1799478 - DNA, 15 bp, Homo sapiens
cctcccatcctccac

SEQ ID NO: 1799479 - DNA, 15 bp, Homo sapiens
ctcccatcctccacc

SEQ ID NO: 1799480 - DNA, 15 bp, Homo sapiens
tcccatcctccaccc

SEQ ID NO: 1799481 - DNA, 15 bp, Homo sapiens
cccatcctccaccct

SEQ ID NO: 1799482 - DNA, 15 bp, Homo sapiens
ccatcctccaccctc

SEQ ID NO: 1799483 - DNA, 15 bp, Homo sapiens
catcctccaccctca

SEQ ID NO: 1799484 - DNA, 15 bp, Homo sapiens
atcctccaccctcag

SEQ ID NO: 1799485 - DNA, 15 bp, Homo sapiens
tcctccaccctcagt

SEQ ID NO: 1799486 - DNA, 15 bp, Homo sapiens
cctccaccctcagtt

SEQ ID NO: 1799487 - DNA, 15 bp, Homo sapiens
ctccaccctcagtta

SEQ ID NO: 1799488 - DNA, 15 bp, Homo sapiens
tccaccctcagttag

SEQ ID NO: 1799489 - DNA, 15 bp, Homo sapiens
ccaccctcagttagg

SEQ ID NO: 1799490 - DNA, 15 bp, Homo sapiens
caccctcagttaggt

SEQ ID NO: 1799491 - DNA, 15 bp, Homo sapiens
accctcagttaggtg

SEQ ID NO: 1799492 - DNA, 15 bp, Homo sapiens
ccctcagttaggtga

SEQ ID NO: 1799493 - DNA, 15 bp, Homo sapiens
cctcagttaggtgaa

SEQ ID NO: 1799494 - DNA, 15 bp, Homo sapiens
ctcagttaggtgaat

SEQ ID NO: 1799495 - DNA, 15 bp, Homo sapiens
tcagttaggtgaatc

SEQ ID NO: 1799496 - DNA, 15 bp, Homo sapiens
cagttaggtgaatcc

SEQ ID NO: 1799497 - DNA, 15 bp, Homo sapiens
agttaggtgaatcct

SEQ ID NO: 1799498 - DNA, 15 bp, Homo sapiens
gttaggtgaatcctt

SEQ ID NO: 1799499 - DNA, 15 bp, Homo sapiens
ttaggtgaatccttt

SEQ ID NO: 1799500 - DNA, 15 bp, Homo sapiens
taggtgaatcctttt

SEQ ID NO: 1799501 - DNA, 15 bp, Homo sapiens
aggtgaatccttttt

SEQ ID NO: 1799502 - DNA, 15 bp, Homo sapiens
ggtgaatcctttttt

SEQ ID NO: 1799503 - DNA, 15 bp, Homo sapiens
gtgaatcctttttta

SEQ ID NO: 1799504 - DNA, 15 bp, Homo sapiens
tgaatccttttttaa

SEQ ID NO: 1799505 - DNA, 15 bp, Homo sapiens
gaatccttttttaaa

SEQ ID NO: 1799506 - DNA, 15 bp, Homo sapiens
aatccttttttaaaa

SEQ ID NO: 1799507 - DNA, 15 bp, Homo sapiens
atccttttttaaaaa

SEQ ID NO: 1799508 - DNA, 15 bp, Homo sapiens
tccttttttaaaaaa

SEQ ID NO: 1799509 - DNA, 15 bp, Homo sapiens
ccttttttaaaaaag

SEQ ID NO: 1799510 - DNA, 15 bp, Homo sapiens
cttttttaaaaaaga

SEQ ID NO: 1799511 - DNA, 15 bp, Homo sapiens
ttttttaaaaaagag

SEQ ID NO: 1799512 - DNA, 15 bp, Homo sapiens
tttttaaaaaagagt

SEQ ID NO: 1799513 - DNA, 15 bp, Homo sapiens
ttttaaaaaagagta

SEQ ID NO: 1799514 - DNA, 15 bp, Homo sapiens
tttaaaaaagagtat

SEQ ID NO: 1799515 - DNA, 15 bp, Homo sapiens
ttaaaaaagagtatt

SEQ ID NO: 1799516 - DNA, 15 bp, Homo sapiens
taaaaaagagtatta

SEQ ID NO: 1799517 - DNA, 15 bp, Homo sapiens
aaaaaagagtattaa

SEQ ID NO: 1799518 - DNA, 15 bp, Homo sapiens
aaaaagagtattaaa

SEQ ID NO: 1799519 - DNA, 15 bp, Homo sapiens
aaaagagtattaaaa

SEQ ID NO: 1799520 - DNA, 15 bp, Homo sapiens
aaagagtattaaaaa

SEQ ID NO: 1799521 - DNA, 15 bp, Homo sapiens
aagagtattaaaaat

SEQ ID NO: 1799522 - DNA, 15 bp, Homo sapiens
agagtattaaaaata

SEQ ID NO: 1799523 - DNA, 15 bp, Homo sapiens
gagtattaaaaatac

SEQ ID NO: 1799524 - DNA, 15 bp, Homo sapiens
agtattaaaaatacc

SEQ ID NO: 1799525 - DNA, 15 bp, Homo sapiens
gtattaaaaatacca

SEQ ID NO: 1799526 - DNA, 15 bp, Homo sapiens
tattaaaaataccac

SEQ ID NO: 1799527 - DNA, 15 bp, Homo sapiens
attaaaaataccact

SEQ ID NO: 1799528 - DNA, 15 bp, Homo sapiens
ttaaaaataccactg

SEQ ID NO: 1799529 - DNA, 15 bp, Homo sapiens
taaaaataccactga

SEQ ID NO: 1799530 - DNA, 15 bp, Homo sapiens
aaaaataccactgat

SEQ ID NO: 1799531 - DNA, 15 bp, Homo sapiens
aaaataccactgatg

SEQ ID NO: 1799532 - DNA, 15 bp, Homo sapiens
aaataccactgatgc

SEQ ID NO: 1799533 - DNA, 15 bp, Homo sapiens
aataccactgatgca

SEQ ID NO: 1799534 - DNA, 15 bp, Homo sapiens
ataccactgatgcac

SEQ ID NO: 1799535 - DNA, 15 bp, Homo sapiens
taccactgatgcact

SEQ ID NO: 1799536 - DNA, 15 bp, Homo sapiens
accactgatgcactt

SEQ ID NO: 1799537 - DNA, 15 bp, Homo sapiens
ccactgatgcacttt

SEQ ID NO: 1799538 - DNA, 15 bp, Homo sapiens
cactgatgcactttg

SEQ ID NO: 1799539 - DNA, 15 bp, Homo sapiens
actgatgcactttgg

SEQ ID NO: 1799540 - DNA, 15 bp, Homo sapiens
ctgatgcactttggg

SEQ ID NO: 1799541 - DNA, 15 bp, Homo sapiens
tgatgcactttggga

SEQ ID NO: 1799542 - DNA, 15 bp, Homo sapiens
gatgcactttgggag

SEQ ID NO: 1799543 - DNA, 15 bp, Homo sapiens
atgcactttgggagg

SEQ ID NO: 1799544 - DNA, 15 bp, Homo sapiens
tgcactttgggaggc

SEQ ID NO: 1799545 - DNA, 15 bp, Homo sapiens
tgggaggcccaggcg

SEQ ID NO: 1799546 - DNA, 15 bp, Homo sapiens
gggaggcccaggcgg

SEQ ID NO: 1799547 - DNA, 15 bp, Homo sapiens
ggaggcccaggcggg

SEQ ID NO: 1799548 - DNA, 15 bp, Homo sapiens
gaggcccaggcgggt

SEQ ID NO: 1799549 - DNA, 15 bp, Homo sapiens
aggcccaggcgggta

SEQ ID NO: 1799550 - DNA, 15 bp, Homo sapiens
ggcccaggcgggtag

SEQ ID NO: 1799551 - DNA, 15 bp, Homo sapiens
gcccaggcgggtaga

SEQ ID NO: 1799552 - DNA, 15 bp, Homo sapiens
cccaggcgggtagat

SEQ ID NO: 1799553 - DNA, 15 bp, Homo sapiens
ccaggcgggtagatc

SEQ ID NO: 1799554 - DNA, 15 bp, Homo sapiens
caggcgggtagatca

SEQ ID NO: 1799555 - DNA, 15 bp, Homo sapiens
ttcaagaccagcctc

SEQ ID NO: 1799556 - DNA, 15 bp, Homo sapiens
tcaagaccagcctcg

SEQ ID NO: 1799557 - DNA, 15 bp, Homo sapiens
caagaccagcctcgc

SEQ ID NO: 1799558 - DNA, 15 bp, Homo sapiens
aagaccagcctcgcc

SEQ ID NO: 1799559 - DNA, 15 bp, Homo sapiens
agaccagcctcgcca

SEQ ID NO: 1799560 - DNA, 15 bp, Homo sapiens
gaccagcctcgccaa

SEQ ID NO: 1799561 - DNA, 15 bp, Homo sapiens
accagcctcgccaac

SEQ ID NO: 1799562 - DNA, 15 bp, Homo sapiens
ccagcctcgccaaca

SEQ ID NO: 1799563 - DNA, 15 bp, Homo sapiens
cagcctcgccaacat

SEQ ID NO: 1799564 - DNA, 15 bp, Homo sapiens
agcctcgccaacatg

SEQ ID NO: 1799565 - DNA, 15 bp, Homo sapiens
gcctcgccaacatgg

SEQ ID NO: 1799566 - DNA, 15 bp, Homo sapiens
cctcgccaacatggc

SEQ ID NO: 1799567 - DNA, 15 bp, Homo sapiens
ctcgccaacatggcg

SEQ ID NO: 1799568 - DNA, 15 bp, Homo sapiens
tcgccaacatggcga

SEQ ID NO: 1799569 - DNA, 15 bp, Homo sapiens
cgccaacatggcgaa

SEQ ID NO: 1799570 - DNA, 15 bp, Homo sapiens
acatggcgaaaccct

SEQ ID NO: 1799571 - DNA, 15 bp, Homo sapiens
catggcgaaaccctg

SEQ ID NO: 1799572 - DNA, 15 bp, Homo sapiens
atggcgaaaccctgt

SEQ ID NO: 1799573 - DNA, 15 bp, Homo sapiens
tggcgaaaccctgtc

SEQ ID NO: 1799574 - DNA, 15 bp, Homo sapiens
ggcgaaaccctgtct

SEQ ID NO: 1799575 - DNA, 15 bp, Homo sapiens
gcgaaaccctgtctc

SEQ ID NO: 1799576 - DNA, 15 bp, Homo sapiens
cgaaaccctgtctct

SEQ ID NO: 1799577 - DNA, 15 bp, Homo sapiens
tagccgggcatggta

SEQ ID NO: 1799578 - DNA, 15 bp, Homo sapiens
agccgggcatggtag

SEQ ID NO: 1799579 - DNA, 15 bp, Homo sapiens
gccgggcatggtagc

SEQ ID NO: 1799580 - DNA, 15 bp, Homo sapiens
ccgggcatggtagcg

SEQ ID NO: 1799581 - DNA, 15 bp, Homo sapiens
cgggcatggtagcgc

SEQ ID NO: 1799582 - DNA, 15 bp, Homo sapiens
gggcatggtagcgcc

SEQ ID NO: 1799583 - DNA, 15 bp, Homo sapiens
ggcatggtagcgcct

SEQ ID NO: 1799584 - DNA, 15 bp, Homo sapiens
gcatggtagcgcctg

SEQ ID NO: 1799585 - DNA, 15 bp, Homo sapiens
catggtagcgcctgt

SEQ ID NO: 1799586 - DNA, 15 bp, Homo sapiens
atggtagcgcctgta

SEQ ID NO: 1799587 - DNA, 15 bp, Homo sapiens
tggtagcgcctgtaa

SEQ ID NO: 1799588 - DNA, 15 bp, Homo sapiens
ggtagcgcctgtaat

SEQ ID NO: 1799589 - DNA, 15 bp, Homo sapiens
gtagcgcctgtaatc

SEQ ID NO: 1799590 - DNA, 15 bp, Homo sapiens
tagcgcctgtaatcc

SEQ ID NO: 1799591 - DNA, 15 bp, Homo sapiens
agcgcctgtaatccc

SEQ ID NO: 1799592 - DNA, 15 bp, Homo sapiens
aggctgaggcaggga

SEQ ID NO: 1799593 - DNA, 15 bp, Homo sapiens
ggctgaggcagggag

SEQ ID NO: 1799594 - DNA, 15 bp, Homo sapiens
gctgaggcagggaga

SEQ ID NO: 1799595 - DNA, 15 bp, Homo sapiens
ctgaggcagggagaa

SEQ ID NO: 1799596 - DNA, 15 bp, Homo sapiens
tgaggcagggagaat

SEQ ID NO: 1799597 - DNA, 15 bp, Homo sapiens
gaggcagggagaatt

SEQ ID NO: 1799598 - DNA, 15 bp, Homo sapiens
aggcagggagaattg

SEQ ID NO: 1799599 - DNA, 15 bp, Homo sapiens
ggcagggagaattgc

SEQ ID NO: 1799600 - DNA, 15 bp, Homo sapiens
gcagggagaattgct

SEQ ID NO: 1799601 - DNA, 15 bp, Homo sapiens
cagggagaattgctt

SEQ ID NO: 1799602 - DNA, 15 bp, Homo sapiens
gaattgcttgaactc

SEQ ID NO: 1799603 - DNA, 15 bp, Homo sapiens
aattgcttgaactcg

SEQ ID NO: 1799604 - DNA, 15 bp, Homo sapiens
attgcttgaactcgg

SEQ ID NO: 1799605 - DNA, 15 bp, Homo sapiens
ttgcttgaactcggg

SEQ ID NO: 1799606 - DNA, 15 bp, Homo sapiens
tgcttgaactcggga

SEQ ID NO: 1799607 - DNA, 15 bp, Homo sapiens
ctcgggaggcagaga

SEQ ID NO: 1799608 - DNA, 15 bp, Homo sapiens
tcgggaggcagagat

SEQ ID NO: 1799609 - DNA, 15 bp, Homo sapiens
cgggaggcagagatt

SEQ ID NO: 1799610 - DNA, 15 bp, Homo sapiens
cagcctgggcagcag

SEQ ID NO: 1799611 - DNA, 15 bp, Homo sapiens
agcctgggcagcaga

SEQ ID NO: 1799612 - DNA, 15 bp, Homo sapiens
gcctgggcagcagag

SEQ ID NO: 1799613 - DNA, 15 bp, Homo sapiens
cctgggcagcagagt

SEQ ID NO: 1799614 - DNA, 15 bp, Homo sapiens
ctgggcagcagagtg

SEQ ID NO: 1799615 - DNA, 15 bp, Homo sapiens
tgggcagcagagtgg

SEQ ID NO: 1799616 - DNA, 15 bp, Homo sapiens
gggcagcagagtggg

SEQ ID NO: 1799617 - DNA, 15 bp, Homo sapiens
ggcagcagagtggga

SEQ ID NO: 1799618 - DNA, 15 bp, Homo sapiens
gcagcagagtgggac

SEQ ID NO: 1799619 - DNA, 15 bp, Homo sapiens
cagcagagtgggact

SEQ ID NO: 1799620 - DNA, 15 bp, Homo sapiens
agcagagtgggactc

SEQ ID NO: 1799621 - DNA, 15 bp, Homo sapiens
gcagagtgggactct

SEQ ID NO: 1799622 - DNA, 15 bp, Homo sapiens
cagagtgggactctg

SEQ ID NO: 1799623 - DNA, 15 bp, Homo sapiens
agagtgggactctgt

SEQ ID NO: 1799624 - DNA, 15 bp, Homo sapiens
gagtgggactctgtc

SEQ ID NO: 1799625 - DNA, 15 bp, Homo sapiens
agtgggactctgtct

SEQ ID NO: 1799626 - DNA, 15 bp, Homo sapiens
gtgggactctgtctc

SEQ ID NO: 1799627 - DNA, 15 bp, Homo sapiens
tgggactctgtctca

SEQ ID NO: 1799628 - DNA, 15 bp, Homo sapiens
gggactctgtctcaa

SEQ ID NO: 1799629 - DNA, 15 bp, Homo sapiens
ggactctgtctcaaa

SEQ ID NO: 1799630 - DNA, 15 bp, Homo sapiens
aaaaagaaaaagtaa

SEQ ID NO: 1799631 - DNA, 15 bp, Homo sapiens
aaaagaaaaagtaaa

SEQ ID NO: 1799632 - DNA, 15 bp, Homo sapiens
aaagaaaaagtaaaa

SEQ ID NO: 1799633 - DNA, 15 bp, Homo sapiens
aagaaaaagtaaaag

SEQ ID NO: 1799634 - DNA, 15 bp, Homo sapiens
agaaaaagtaaaagt

SEQ ID NO: 1799635 - DNA, 15 bp, Homo sapiens
gaaaaagtaaaagta

SEQ ID NO: 1799636 - DNA, 15 bp, Homo sapiens
aaaaagtaaaagtac

SEQ ID NO: 1799637 - DNA, 15 bp, Homo sapiens
aaaagtaaaagtacc

SEQ ID NO: 1799638 - DNA, 15 bp, Homo sapiens
aaagtaaaagtacca

SEQ ID NO: 1799639 - DNA, 15 bp, Homo sapiens
aagtaaaagtaccac

SEQ ID NO: 1799640 - DNA, 15 bp, Homo sapiens
agtaaaagtaccact

SEQ ID NO: 1799641 - DNA, 15 bp, Homo sapiens
gtaaaagtaccactg

SEQ ID NO: 1799642 - DNA, 15 bp, Homo sapiens
taaaagtaccactga

SEQ ID NO: 1799643 - DNA, 15 bp, Homo sapiens
aaaagtaccactgat

SEQ ID NO: 1799644 - DNA, 15 bp, Homo sapiens
aaagtaccactgatg

SEQ ID NO: 1799645 - DNA, 15 bp, Homo sapiens
aagtaccactgatga

SEQ ID NO: 1799646 - DNA, 15 bp, Homo sapiens
agtaccactgatgaa

SEQ ID NO: 1799647 - DNA, 15 bp, Homo sapiens
gtaccactgatgaaa

SEQ ID NO: 1799648 - DNA, 15 bp, Homo sapiens
taccactgatgaaaa

SEQ ID NO: 1799649 - DNA, 15 bp, Homo sapiens
accactgatgaaaag

SEQ ID NO: 1799650 - DNA, 15 bp, Homo sapiens
ccactgatgaaaaga

SEQ ID NO: 1799651 - DNA, 15 bp, Homo sapiens
cactgatgaaaagaa

SEQ ID NO: 1799652 - DNA, 15 bp, Homo sapiens
actgatgaaaagaag

SEQ ID NO: 1799653 - DNA, 15 bp, Homo sapiens
ctgatgaaaagaaga

SEQ ID NO: 1799654 - DNA, 15 bp, Homo sapiens
tgatgaaaagaagag

SEQ ID NO: 1799655 - DNA, 15 bp, Homo sapiens
gatgaaaagaagaga

SEQ ID NO: 1799656 - DNA, 15 bp, Homo sapiens
atgaaaagaagagag

SEQ ID NO: 1799657 - DNA, 15 bp, Homo sapiens
tgaaaagaagagaga

SEQ ID NO: 1799658 - DNA, 15 bp, Homo sapiens
gaaaagaagagagat

SEQ ID NO: 1799659 - DNA, 15 bp, Homo sapiens
aaaagaagagagatg

SEQ ID NO: 1799660 - DNA, 15 bp, Homo sapiens
aaagaagagagatgg

SEQ ID NO: 1799661 - DNA, 15 bp, Homo sapiens
aagaagagagatggg

SEQ ID NO: 1799662 - DNA, 15 bp, Homo sapiens
agaagagagatgggt

SEQ ID NO: 1799663 - DNA, 15 bp, Homo sapiens
gaagagagatgggtg

SEQ ID NO: 1799664 - DNA, 15 bp, Homo sapiens
aagagagatgggtgt

SEQ ID NO: 1799665 - DNA, 15 bp, Homo sapiens
agagagatgggtgta

SEQ ID NO: 1799666 - DNA, 15 bp, Homo sapiens
gagagatgggtgtag

SEQ ID NO: 1799667 - DNA, 15 bp, Homo sapiens
agagatgggtgtaga

SEQ ID NO: 1799668 - DNA, 15 bp, Homo sapiens
gagatgggtgtagat

SEQ ID NO: 1799669 - DNA, 15 bp, Homo sapiens
agatgggtgtagata

SEQ ID NO: 1799670 - DNA, 15 bp, Homo sapiens
gatgggtgtagatac

SEQ ID NO: 1799671 - DNA, 15 bp, Homo sapiens
atgggtgtagataca

SEQ ID NO: 1799672 - DNA, 15 bp, Homo sapiens
tgggtgtagatacag

SEQ ID NO: 1799673 - DNA, 15 bp, Homo sapiens
gggtgtagatacagt

SEQ ID NO: 1799674 - DNA, 15 bp, Homo sapiens
ggtgtagatacagtc

SEQ ID NO: 1799675 - DNA, 15 bp, Homo sapiens
gtgtagatacagtca

SEQ ID NO: 1799676 - DNA, 15 bp, Homo sapiens
tgtagatacagtcag

SEQ ID NO: 1799677 - DNA, 15 bp, Homo sapiens
gtagatacagtcaga

SEQ ID NO: 1799678 - DNA, 15 bp, Homo sapiens
tagatacagtcagaa

SEQ ID NO: 1799679 - DNA, 15 bp, Homo sapiens
agatacagtcagaac

SEQ ID NO: 1799680 - DNA, 15 bp, Homo sapiens
gatacagtcagaaca

SEQ ID NO: 1799681 - DNA, 15 bp, Homo sapiens
atacagtcagaacat

SEQ ID NO: 1799682 - DNA, 15 bp, Homo sapiens
tacagtcagaacata

SEQ ID NO: 1799683 - DNA, 15 bp, Homo sapiens
acagtcagaacatat

SEQ ID NO: 1799684 - DNA, 15 bp, Homo sapiens
cagtcagaacatata

SEQ ID NO: 1799685 - DNA, 15 bp, Homo sapiens
agtcagaacatatat

SEQ ID NO: 1799686 - DNA, 15 bp, Homo sapiens
gtcagaacatatatg

SEQ ID NO: 1799687 - DNA, 15 bp, Homo sapiens
tcagaacatatatgt

SEQ ID NO: 1799688 - DNA, 15 bp, Homo sapiens
cagaacatatatgta

SEQ ID NO: 1799689 - DNA, 15 bp, Homo sapiens
agaacatatatgtac

SEQ ID NO: 1799690 - DNA, 15 bp, Homo sapiens
gaacatatatgtaca

SEQ ID NO: 1799691 - DNA, 15 bp, Homo sapiens
aacatatatgtacac

SEQ ID NO: 1799692 - DNA, 15 bp, Homo sapiens
acatatatgtacact

SEQ ID NO: 1799693 - DNA, 15 bp, Homo sapiens
catatatgtacactg

SEQ ID NO: 1799694 - DNA, 15 bp, Homo sapiens
atatatgtacactgt

SEQ ID NO: 1799695 - DNA, 15 bp, Homo sapiens
tatatgtacactgtg

SEQ ID NO: 1799696 - DNA, 15 bp, Homo sapiens
atatgtacactgtgc

SEQ ID NO: 1799697 - DNA, 15 bp, Homo sapiens
tatgtacactgtgct

SEQ ID NO: 1799698 - DNA, 15 bp, Homo sapiens
atgtacactgtgctg

SEQ ID NO: 1799699 - DNA, 15 bp, Homo sapiens
tgtacactgtgctgt

SEQ ID NO: 1799700 - DNA, 15 bp, Homo sapiens
gtacactgtgctgta

SEQ ID NO: 1799701 - DNA, 15 bp, Homo sapiens
tacactgtgctgtag

SEQ ID NO: 1799702 - DNA, 15 bp, Homo sapiens
acactgtgctgtagt

SEQ ID NO: 1799703 - DNA, 15 bp, Homo sapiens
cactgtgctgtagtt

SEQ ID NO: 1799704 - DNA, 15 bp, Homo sapiens
actgtgctgtagttt

SEQ ID NO: 1799705 - DNA, 15 bp, Homo sapiens
ctgtgctgtagtttt

SEQ ID NO: 1799706 - DNA, 15 bp, Homo sapiens
tgtgctgtagtttta

SEQ ID NO: 1799707 - DNA, 15 bp, Homo sapiens
gtgctgtagttttaa

SEQ ID NO: 1799708 - DNA, 15 bp, Homo sapiens
tgctgtagttttaaa

SEQ ID NO: 1799709 - DNA, 15 bp, Homo sapiens
gctgtagttttaaat

SEQ ID NO: 1799710 - DNA, 15 bp, Homo sapiens
ctgtagttttaaatt

SEQ ID NO: 1799711 - DNA, 15 bp, Homo sapiens
tgtagttttaaattg

SEQ ID NO: 1799712 - DNA, 15 bp, Homo sapiens
gtagttttaaattgt

SEQ ID NO: 1799713 - DNA, 15 bp, Homo sapiens
tagttttaaattgtt

SEQ ID NO: 1799714 - DNA, 15 bp, Homo sapiens
agttttaaattgttt

SEQ ID NO: 1799715 - DNA, 15 bp, Homo sapiens
gttttaaattgtttc

SEQ ID NO: 1799716 - DNA, 15 bp, Homo sapiens
ttttaaattgtttcc

SEQ ID NO: 1799717 - DNA, 15 bp, Homo sapiens
tttaaattgtttcca

SEQ ID NO: 1799718 - DNA, 15 bp, Homo sapiens
ttaaattgtttccac

SEQ ID NO: 1799719 - DNA, 15 bp, Homo sapiens
taaattgtttccact

SEQ ID NO: 1799720 - DNA, 15 bp, Homo sapiens
aaattgtttccactt

SEQ ID NO: 1799721 - DNA, 15 bp, Homo sapiens
aattgtttccacttc

SEQ ID NO: 1799722 - DNA, 15 bp, Homo sapiens
attgtttccacttct

SEQ ID NO: 1799723 - DNA, 15 bp, Homo sapiens
ttgtttccacttcta

SEQ ID NO: 1799724 - DNA, 15 bp, Homo sapiens
tgtttccacttctat

SEQ ID NO: 1799725 - DNA, 15 bp, Homo sapiens
gtttccacttctatt

SEQ ID NO: 1799726 - DNA, 15 bp, Homo sapiens
tttccacttctatta

SEQ ID NO: 1799727 - DNA, 15 bp, Homo sapiens
ttccacttctattat

SEQ ID NO: 1799728 - DNA, 15 bp, Homo sapiens
tccacttctattatt

SEQ ID NO: 1799729 - DNA, 15 bp, Homo sapiens
ccacttctattattt

SEQ ID NO: 1799730 - DNA, 15 bp, Homo sapiens
cacttctattatttc

SEQ ID NO: 1799731 - DNA, 15 bp, Homo sapiens
acttctattatttct

SEQ ID NO: 1799732 - DNA, 15 bp, Homo sapiens
cttctattatttctc

SEQ ID NO: 1799733 - DNA, 15 bp, Homo sapiens
ttctattatttctct

SEQ ID NO: 1799734 - DNA, 15 bp, Homo sapiens
tctattatttctcta

SEQ ID NO: 1799735 - DNA, 15 bp, Homo sapiens
ctattatttctctat

SEQ ID NO: 1799736 - DNA, 15 bp, Homo sapiens
tattatttctctatt

SEQ ID NO: 1799737 - DNA, 15 bp, Homo sapiens
attatttctctattt

SEQ ID NO: 1799738 - DNA, 15 bp, Homo sapiens
ttatttctctatttt

SEQ ID NO: 1799739 - DNA, 15 bp, Homo sapiens
tatttctctattttt

SEQ ID NO: 1799740 - DNA, 15 bp, Homo sapiens
atttctctatttttt

SEQ ID NO: 1799741 - DNA, 15 bp, Homo sapiens
tttctctattttttt

SEQ ID NO: 1799742 - DNA, 15 bp, Homo sapiens
ttctctatttttttc

SEQ ID NO: 1799743 - DNA, 15 bp, Homo sapiens
tctctatttttttct

SEQ ID NO: 1799744 - DNA, 15 bp, Homo sapiens
ctctatttttttctc

SEQ ID NO: 1799745 - DNA, 15 bp, Homo sapiens
tctatttttttctcc

SEQ ID NO: 1799746 - DNA, 15 bp, Homo sapiens
ctatttttttctcca

SEQ ID NO: 1799747 - DNA, 15 bp, Homo sapiens
tatttttttctccat

SEQ ID NO: 1799748 - DNA, 15 bp, Homo sapiens
atttttttctccatt

SEQ ID NO: 1799749 - DNA, 15 bp, Homo sapiens
tttttttctccatta

SEQ ID NO: 1799750 - DNA, 15 bp, Homo sapiens
ttttttctccattat

SEQ ID NO: 1799751 - DNA, 15 bp, Homo sapiens
tttttctccattatt

SEQ ID NO: 1799752 - DNA, 15 bp, Homo sapiens
ttttctccattattt

SEQ ID NO: 1799753 - DNA, 15 bp, Homo sapiens
tttctccattatttc

SEQ ID NO: 1799754 - DNA, 15 bp, Homo sapiens
ttctccattatttct

SEQ ID NO: 1799755 - DNA, 15 bp, Homo sapiens
tctccattatttctc

SEQ ID NO: 1799756 - DNA, 15 bp, Homo sapiens
ctccattatttctca

SEQ ID NO: 1799757 - DNA, 15 bp, Homo sapiens
tccattatttctcaa

SEQ ID NO: 1799758 - DNA, 15 bp, Homo sapiens
ccattatttctcaaa

SEQ ID NO: 1799759 - DNA, 15 bp, Homo sapiens
cattatttctcaaaa

SEQ ID NO: 1799760 - DNA, 15 bp, Homo sapiens
attatttctcaaaat

SEQ ID NO: 1799761 - DNA, 15 bp, Homo sapiens
ttatttctcaaaata

SEQ ID NO: 1799762 - DNA, 15 bp, Homo sapiens
tatttctcaaaatag

SEQ ID NO: 1799763 - DNA, 15 bp, Homo sapiens
atttctcaaaataga

SEQ ID NO: 1799764 - DNA, 15 bp, Homo sapiens
tttctcaaaatagat

SEQ ID NO: 1799765 - DNA, 15 bp, Homo sapiens
ttctcaaaatagatt

SEQ ID NO: 1799766 - DNA, 15 bp, Homo sapiens
tctcaaaatagattt

SEQ ID NO: 1799767 - DNA, 15 bp, Homo sapiens
ctcaaaatagatttg

SEQ ID NO: 1799768 - DNA, 15 bp, Homo sapiens
tcaaaatagatttgg

SEQ ID NO: 1799769 - DNA, 15 bp, Homo sapiens
caaaatagatttggt

SEQ ID NO: 1799770 - DNA, 15 bp, Homo sapiens
aaaatagatttggtt

SEQ ID NO: 1799771 - DNA, 15 bp, Homo sapiens
aaatagatttggttt

SEQ ID NO: 1799772 - DNA, 15 bp, Homo sapiens
aatagatttggtttt

SEQ ID NO: 1799773 - DNA, 15 bp, Homo sapiens
atagatttggttttg

SEQ ID NO: 1799774 - DNA, 15 bp, Homo sapiens
tagatttggttttgc

SEQ ID NO: 1799775 - DNA, 15 bp, Homo sapiens
agatttggttttgca

SEQ ID NO: 1799776 - DNA, 15 bp, Homo sapiens
gatttggttttgcat

SEQ ID NO: 1799777 - DNA, 15 bp, Homo sapiens
atttggttttgcatg

SEQ ID NO: 1799778 - DNA, 15 bp, Homo sapiens
tttggttttgcatgt

SEQ ID NO: 1799779 - DNA, 15 bp, Homo sapiens
ttggttttgcatgtt

SEQ ID NO: 1799780 - DNA, 15 bp, Homo sapiens
tggttttgcatgttt

SEQ ID NO: 1799781 - DNA, 15 bp, Homo sapiens
ggttttgcatgttta

SEQ ID NO: 1799782 - DNA, 15 bp, Homo sapiens
gttttgcatgtttaa

SEQ ID NO: 1799783 - DNA, 15 bp, Homo sapiens
ttttgcatgtttaaa

SEQ ID NO: 1799784 - DNA, 15 bp, Homo sapiens
tttgcatgtttaaaa

SEQ ID NO: 1799785 - DNA, 15 bp, Homo sapiens
ttgcatgtttaaaag

SEQ ID NO: 1799786 - DNA, 15 bp, Homo sapiens
tgcatgtttaaaaga

SEQ ID NO: 1799787 - DNA, 15 bp, Homo sapiens
gcatgtttaaaagac

SEQ ID NO: 1799788 - DNA, 15 bp, Homo sapiens
catgtttaaaagacg

SEQ ID NO: 1799789 - DNA, 15 bp, Homo sapiens
atgtttaaaagacgc

SEQ ID NO: 1799790 - DNA, 15 bp, Homo sapiens
tgtttaaaagacgct

SEQ ID NO: 1799791 - DNA, 15 bp, Homo sapiens
gtttaaaagacgctc

SEQ ID NO: 1799792 - DNA, 15 bp, Homo sapiens
tttaaaagacgctct

SEQ ID NO: 1799793 - DNA, 15 bp, Homo sapiens
ttaaaagacgctcta

SEQ ID NO: 1799794 - DNA, 15 bp, Homo sapiens
taaaagacgctctat

SEQ ID NO: 1799795 - DNA, 15 bp, Homo sapiens
aaaagacgctctata

SEQ ID NO: 1799796 - DNA, 15 bp, Homo sapiens
aaagacgctctataa

SEQ ID NO: 1799797 - DNA, 15 bp, Homo sapiens
aagacgctctataaa

SEQ ID NO: 1799798 - DNA, 15 bp, Homo sapiens
agacgctctataaat

SEQ ID NO: 1799799 - DNA, 15 bp, Homo sapiens
gacgctctataaatg

SEQ ID NO: 1799800 - DNA, 15 bp, Homo sapiens
acgctctataaatgc

SEQ ID NO: 1799801 - DNA, 15 bp, Homo sapiens
cgctctataaatgct

SEQ ID NO: 1799802 - DNA, 15 bp, Homo sapiens
gctctataaatgctc

SEQ ID NO: 1799803 - DNA, 15 bp, Homo sapiens
ctctataaatgctcc

SEQ ID NO: 1799804 - DNA, 15 bp, Homo sapiens
tctataaatgctcca

SEQ ID NO: 1799805 - DNA, 15 bp, Homo sapiens
ctataaatgctccaa

SEQ ID NO: 1799806 - DNA, 15 bp, Homo sapiens
tataaatgctccaaa

SEQ ID NO: 1799807 - DNA, 15 bp, Homo sapiens
ataaatgctccaaat

SEQ ID NO: 1799808 - DNA, 15 bp, Homo sapiens
taaatgctccaaatt

SEQ ID NO: 1799809 - DNA, 15 bp, Homo sapiens
aaatgctccaaatta

SEQ ID NO: 1799810 - DNA, 15 bp, Homo sapiens
aatgctccaaattag

SEQ ID NO: 1799811 - DNA, 15 bp, Homo sapiens
atgctccaaattagt

SEQ ID NO: 1799812 - DNA, 15 bp, Homo sapiens
tgctccaaattagtc

SEQ ID NO: 1799813 - DNA, 15 bp, Homo sapiens
gctccaaattagtcc

SEQ ID NO: 1799814 - DNA, 15 bp, Homo sapiens
ctccaaattagtcct

SEQ ID NO: 1799815 - DNA, 15 bp, Homo sapiens
tccaaattagtcctc

SEQ ID NO: 1799816 - DNA, 15 bp, Homo sapiens
ccaaattagtcctca

SEQ ID NO: 1799817 - DNA, 15 bp, Homo sapiens
caaattagtcctcac

SEQ ID NO: 1799818 - DNA, 15 bp, Homo sapiens
aaattagtcctcaca

SEQ ID NO: 1799819 - DNA, 15 bp, Homo sapiens
aattagtcctcacaa

SEQ ID NO: 1799820 - DNA, 15 bp, Homo sapiens
attagtcctcacaaa

SEQ ID NO: 1799821 - DNA, 15 bp, Homo sapiens
ttagtcctcacaaag

SEQ ID NO: 1799822 - DNA, 15 bp, Homo sapiens
tagtcctcacaaagc

SEQ ID NO: 1799823 - DNA, 15 bp, Homo sapiens
agtcctcacaaagcc

SEQ ID NO: 1799824 - DNA, 15 bp, Homo sapiens
gtcctcacaaagcca

SEQ ID NO: 1799825 - DNA, 15 bp, Homo sapiens
tcctcacaaagccag

SEQ ID NO: 1799826 - DNA, 15 bp, Homo sapiens
cctcacaaagccagc

SEQ ID NO: 1799827 - DNA, 15 bp, Homo sapiens
ctcacaaagccagct

SEQ ID NO: 1799828 - DNA, 15 bp, Homo sapiens
tcacaaagccagctt

SEQ ID NO: 1799829 - DNA, 15 bp, Homo sapiens
cacaaagccagcttc

SEQ ID NO: 1799830 - DNA, 15 bp, Homo sapiens
acaaagccagcttct

SEQ ID NO: 1799831 - DNA, 15 bp, Homo sapiens
caaagccagcttctg

SEQ ID NO: 1799832 - DNA, 15 bp, Homo sapiens
aaagccagcttctga

SEQ ID NO: 1799833 - DNA, 15 bp, Homo sapiens
aagccagcttctgag

SEQ ID NO: 1799834 - DNA, 15 bp, Homo sapiens
agccagcttctgagc

SEQ ID NO: 1799835 - DNA, 15 bp, Homo sapiens
gccagcttctgagcc

SEQ ID NO: 1799836 - DNA, 15 bp, Homo sapiens
ccagcttctgagcca

SEQ ID NO: 1799837 - DNA, 15 bp, Homo sapiens
cagcttctgagccaa

SEQ ID NO: 1799838 - DNA, 15 bp, Homo sapiens
agcttctgagccaac

SEQ ID NO: 1799839 - DNA, 15 bp, Homo sapiens
gcttctgagccaacc

SEQ ID NO: 1799840 - DNA, 15 bp, Homo sapiens
cttctgagccaaccg

SEQ ID NO: 1799841 - DNA, 15 bp, Homo sapiens
ttctgagccaaccga

SEQ ID NO: 1799842 - DNA, 15 bp, Homo sapiens
tctgagccaaccgac

SEQ ID NO: 1799843 - DNA, 15 bp, Homo sapiens
ctgagccaaccgaca

SEQ ID NO: 1799844 - DNA, 15 bp, Homo sapiens
tgagccaaccgacat

SEQ ID NO: 1799845 - DNA, 15 bp, Homo sapiens
gagccaaccgacatt

SEQ ID NO: 1799846 - DNA, 15 bp, Homo sapiens
agccaaccgacattg

SEQ ID NO: 1799847 - DNA, 15 bp, Homo sapiens
gccaaccgacattga

SEQ ID NO: 1799848 - DNA, 15 bp, Homo sapiens
ccaaccgacattgaa

SEQ ID NO: 1799849 - DNA, 15 bp, Homo sapiens
caaccgacattgaat

SEQ ID NO: 1799850 - DNA, 15 bp, Homo sapiens
aaccgacattgaata

SEQ ID NO: 1799851 - DNA, 15 bp, Homo sapiens
accgacattgaataa

SEQ ID NO: 1799852 - DNA, 15 bp, Homo sapiens
ccgacattgaataat

SEQ ID NO: 1799853 - DNA, 15 bp, Homo sapiens
cgacattgaataatg

SEQ ID NO: 1799854 - DNA, 15 bp, Homo sapiens
gacattgaataatga

SEQ ID NO: 1799855 - DNA, 15 bp, Homo sapiens
acattgaataatgag

SEQ ID NO: 1799856 - DNA, 15 bp, Homo sapiens
cattgaataatgaga

SEQ ID NO: 1799857 - DNA, 15 bp, Homo sapiens
attgaataatgagac

SEQ ID NO: 1799858 - DNA, 15 bp, Homo sapiens
ttgaataatgagaca

SEQ ID NO: 1799859 - DNA, 15 bp, Homo sapiens
tgaataatgagacat

SEQ ID NO: 1799860 - DNA, 15 bp, Homo sapiens
gaataatgagacatt

SEQ ID NO: 1799861 - DNA, 15 bp, Homo sapiens
aataatgagacattg

SEQ ID NO: 1799862 - DNA, 15 bp, Homo sapiens
ataatgagacattgc

SEQ ID NO: 1799863 - DNA, 15 bp, Homo sapiens
taatgagacattgct

SEQ ID NO: 1799864 - DNA, 15 bp, Homo sapiens
aatgagacattgctg

SEQ ID NO: 1799865 - DNA, 15 bp, Homo sapiens
atgagacattgctgg

SEQ ID NO: 1799866 - DNA, 15 bp, Homo sapiens
tgagacattgctggc

SEQ ID NO: 1799867 - DNA, 15 bp, Homo sapiens
gagacattgctggca

SEQ ID NO: 1799868 - DNA, 15 bp, Homo sapiens
agacattgctggcat

SEQ ID NO: 1799869 - DNA, 15 bp, Homo sapiens
gacattgctggcatg

SEQ ID NO: 1799870 - DNA, 15 bp, Homo sapiens
acattgctggcatgt

SEQ ID NO: 1799871 - DNA, 15 bp, Homo sapiens
cattgctggcatgtt

SEQ ID NO: 1799872 - DNA, 15 bp, Homo sapiens
attgctggcatgttt

SEQ ID NO: 1799873 - DNA, 15 bp, Homo sapiens
ttgctggcatgtttg

SEQ ID NO: 1799874 - DNA, 15 bp, Homo sapiens
tgctggcatgtttgc

SEQ ID NO: 1799875 - DNA, 15 bp, Homo sapiens
gctggcatgtttgcc

SEQ ID NO: 1799876 - DNA, 15 bp, Homo sapiens
ctggcatgtttgcca

SEQ ID NO: 1799877 - DNA, 15 bp, Homo sapiens
tggcatgtttgccag

SEQ ID NO: 1799878 - DNA, 15 bp, Homo sapiens
ggcatgtttgccagc

SEQ ID NO: 1799879 - DNA, 15 bp, Homo sapiens
gcatgtttgccagcc

SEQ ID NO: 1799880 - DNA, 15 bp, Homo sapiens
catgtttgccagcca

SEQ ID NO: 1799881 - DNA, 15 bp, Homo sapiens
atgtttgccagccaa

SEQ ID NO: 1799882 - DNA, 15 bp, Homo sapiens
tgtttgccagccaaa

SEQ ID NO: 1799883 - DNA, 15 bp, Homo sapiens
gtttgccagccaaaa

SEQ ID NO: 1799884 - DNA, 15 bp, Homo sapiens
tttgccagccaaaaa

SEQ ID NO: 1799885 - DNA, 15 bp, Homo sapiens
ttgccagccaaaaat

SEQ ID NO: 1799886 - DNA, 15 bp, Homo sapiens
tgccagccaaaaata

SEQ ID NO: 1799887 - DNA, 15 bp, Homo sapiens
gccagccaaaaatag

SEQ ID NO: 1799888 - DNA, 15 bp, Homo sapiens
ccagccaaaaatagt

SEQ ID NO: 1799889 - DNA, 15 bp, Homo sapiens
cagccaaaaatagtt

SEQ ID NO: 1799890 - DNA, 15 bp, Homo sapiens
agccaaaaatagtta

SEQ ID NO: 1799891 - DNA, 15 bp, Homo sapiens
gccaaaaatagttat

SEQ ID NO: 1799892 - DNA, 15 bp, Homo sapiens
ccaaaaatagttatg

SEQ ID NO: 1799893 - DNA, 15 bp, Homo sapiens
caaaaatagttatgt

SEQ ID NO: 1799894 - DNA, 15 bp, Homo sapiens
aaaaatagttatgtt

SEQ ID NO: 1799895 - DNA, 15 bp, Homo sapiens
aaaatagttatgtta

SEQ ID NO: 1799896 - DNA, 15 bp, Homo sapiens
aaatagttatgttaa

SEQ ID NO: 1799897 - DNA, 15 bp, Homo sapiens
aatagttatgttaac

SEQ ID NO: 1799898 - DNA, 15 bp, Homo sapiens
atagttatgttaaca

SEQ ID NO: 1799899 - DNA, 15 bp, Homo sapiens
tagttatgttaacac

SEQ ID NO: 1799900 - DNA, 15 bp, Homo sapiens
agttatgttaacacc

SEQ ID NO: 1799901 - DNA, 15 bp, Homo sapiens
gttatgttaacacca

SEQ ID NO: 1799902 - DNA, 15 bp, Homo sapiens
ttatgttaacaccag

SEQ ID NO: 1799903 - DNA, 15 bp, Homo sapiens
tatgttaacaccagc

SEQ ID NO: 1799904 - DNA, 15 bp, Homo sapiens
atgttaacaccagcc

SEQ ID NO: 1799905 - DNA, 15 bp, Homo sapiens
tgttaacaccagcct

SEQ ID NO: 1799906 - DNA, 15 bp, Homo sapiens
gttaacaccagcctg

SEQ ID NO: 1799907 - DNA, 15 bp, Homo sapiens
ttaacaccagcctgc

SEQ ID NO: 1799908 - DNA, 15 bp, Homo sapiens
taacaccagcctgcc

SEQ ID NO: 1799909 - DNA, 15 bp, Homo sapiens
aacaccagcctgcct

SEQ ID NO: 1799910 - DNA, 15 bp, Homo sapiens
acaccagcctgcctt

SEQ ID NO: 1799911 - DNA, 15 bp, Homo sapiens
caccagcctgccttg

SEQ ID NO: 1799912 - DNA, 15 bp, Homo sapiens
accagcctgccttgg

SEQ ID NO: 1799913 - DNA, 15 bp, Homo sapiens
ccagcctgccttggg

SEQ ID NO: 1799914 - DNA, 15 bp, Homo sapiens
cagcctgccttgggg

SEQ ID NO: 1799915 - DNA, 15 bp, Homo sapiens
agcctgccttgggga

SEQ ID NO: 1799916 - DNA, 15 bp, Homo sapiens
gcctgccttggggag

SEQ ID NO: 1799917 - DNA, 15 bp, Homo sapiens
cctgccttggggaga

SEQ ID NO: 1799918 - DNA, 15 bp, Homo sapiens
ctgccttggggagaa

SEQ ID NO: 1799919 - DNA, 15 bp, Homo sapiens
tgccttggggagaaa

SEQ ID NO: 1799920 - DNA, 15 bp, Homo sapiens
gccttggggagaaag

SEQ ID NO: 1799921 - DNA, 15 bp, Homo sapiens
ccttggggagaaagg

SEQ ID NO: 1799922 - DNA, 15 bp, Homo sapiens
cttggggagaaaggg

SEQ ID NO: 1799923 - DNA, 15 bp, Homo sapiens
ttggggagaaagggc

SEQ ID NO: 1799924 - DNA, 15 bp, Homo sapiens
tggggagaaagggcc

SEQ ID NO: 1799925 - DNA, 15 bp, Homo sapiens
ggggagaaagggcct

SEQ ID NO: 1799926 - DNA, 15 bp, Homo sapiens
gggagaaagggcctt

SEQ ID NO: 1799927 - DNA, 15 bp, Homo sapiens
ggagaaagggccttg

SEQ ID NO: 1799928 - DNA, 15 bp, Homo sapiens
gagaaagggccttgg

SEQ ID NO: 1799929 - DNA, 15 bp, Homo sapiens
agaaagggccttggt

SEQ ID NO: 1799930 - DNA, 15 bp, Homo sapiens
gaaagggccttggtg

SEQ ID NO: 1799931 - DNA, 15 bp, Homo sapiens
aaagggccttggtgg

SEQ ID NO: 1799932 - DNA, 15 bp, Homo sapiens
aagggccttggtggg

SEQ ID NO: 1799933 - DNA, 15 bp, Homo sapiens
agggccttggtgggt

SEQ ID NO: 1799934 - DNA, 15 bp, Homo sapiens
gggccttggtgggtg

SEQ ID NO: 1799935 - DNA, 15 bp, Homo sapiens
ggccttggtgggtgg

SEQ ID NO: 1799936 - DNA, 15 bp, Homo sapiens
gccttggtgggtggc

SEQ ID NO: 1799937 - DNA, 15 bp, Homo sapiens
ccttggtgggtggca

SEQ ID NO: 1799938 - DNA, 15 bp, Homo sapiens
cttggtgggtggcag

SEQ ID NO: 1799939 - DNA, 15 bp, Homo sapiens
ttggtgggtggcagg

SEQ ID NO: 1799940 - DNA, 15 bp, Homo sapiens
tggtgggtggcagga

SEQ ID NO: 1799941 - DNA, 15 bp, Homo sapiens
gtgggtggcaggagg

SEQ ID NO: 1799942 - DNA, 15 bp, Homo sapiens
tgggtggcaggaggg

SEQ ID NO: 1799943 - DNA, 15 bp, Homo sapiens
gggtggcaggagggg

SEQ ID NO: 1799944 - DNA, 15 bp, Homo sapiens
ggtggcaggagggga

SEQ ID NO: 1799945 - DNA, 15 bp, Homo sapiens
gtggcaggaggggac

SEQ ID NO: 1799946 - DNA, 15 bp, Homo sapiens
tggcaggaggggaca

SEQ ID NO: 1799947 - DNA, 15 bp, Homo sapiens
ggcaggaggggacaa

SEQ ID NO: 1799948 - DNA, 15 bp, Homo sapiens
gcaggaggggacaaa

SEQ ID NO: 1799949 - DNA, 15 bp, Homo sapiens
caggaggggacaaat

SEQ ID NO: 1799950 - DNA, 15 bp, Homo sapiens
aggaggggacaaatg

SEQ ID NO: 1799951 - DNA, 15 bp, Homo sapiens
ggaggggacaaatgc

SEQ ID NO: 1799952 - DNA, 15 bp, Homo sapiens
gaggggacaaatgct

SEQ ID NO: 1799953 - DNA, 15 bp, Homo sapiens
aggggacaaatgctc

SEQ ID NO: 1799954 - DNA, 15 bp, Homo sapiens
ggggacaaatgctcc

SEQ ID NO: 1799955 - DNA, 15 bp, Homo sapiens
gggacaaatgctcca

SEQ ID NO: 1799956 - DNA, 15 bp, Homo sapiens
ggacaaatgctccag

SEQ ID NO: 1799957 - DNA, 15 bp, Homo sapiens
gacaaatgctccagg

SEQ ID NO: 1799958 - DNA, 15 bp, Homo sapiens
acaaatgctccaggc

SEQ ID NO: 1799959 - DNA, 15 bp, Homo sapiens
caaatgctccaggca

SEQ ID NO: 1799960 - DNA, 15 bp, Homo sapiens
aaatgctccaggcac

SEQ ID NO: 1799961 - DNA, 15 bp, Homo sapiens
aatgctccaggcacc

SEQ ID NO: 1799962 - DNA, 15 bp, Homo sapiens
atgctccaggcacca

SEQ ID NO: 1799963 - DNA, 15 bp, Homo sapiens
tgctccaggcaccag

SEQ ID NO: 1799964 - DNA, 15 bp, Homo sapiens
gctccaggcaccagc

SEQ ID NO: 1799965 - DNA, 15 bp, Homo sapiens
ctccaggcaccagct

SEQ ID NO: 1799966 - DNA, 15 bp, Homo sapiens
tccaggcaccagctg

SEQ ID NO: 1799967 - DNA, 15 bp, Homo sapiens
ccaggcaccagctgg

SEQ ID NO: 1799968 - DNA, 15 bp, Homo sapiens
caggcaccagctggc

SEQ ID NO: 1799969 - DNA, 15 bp, Homo sapiens
aggcaccagctggcc

SEQ ID NO: 1799970 - DNA, 15 bp, Homo sapiens
ggcaccagctggccc

SEQ ID NO: 1799971 - DNA, 15 bp, Homo sapiens
gcaccagctggccct

SEQ ID NO: 1799972 - DNA, 15 bp, Homo sapiens
caccagctggccctg

SEQ ID NO: 1799973 - DNA, 15 bp, Homo sapiens
accagctggccctgt

SEQ ID NO: 1799974 - DNA, 15 bp, Homo sapiens
ccagctggccctgtg

SEQ ID NO: 1799975 - DNA, 15 bp, Homo sapiens
cagctggccctgtgg

SEQ ID NO: 1799976 - DNA, 15 bp, Homo sapiens
agctggccctgtggc

SEQ ID NO: 1799977 - DNA, 15 bp, Homo sapiens
gctggccctgtggca

SEQ ID NO: 1799978 - DNA, 15 bp, Homo sapiens
ctggccctgtggcat

SEQ ID NO: 1799979 - DNA, 15 bp, Homo sapiens
tggccctgtggcatc

SEQ ID NO: 1799980 - DNA, 15 bp, Homo sapiens
ggccctgtggcatct

SEQ ID NO: 1799981 - DNA, 15 bp, Homo sapiens
gccctgtggcatcta

SEQ ID NO: 1799982 - DNA, 15 bp, Homo sapiens
ccctgtggcatctag

SEQ ID NO: 1799983 - DNA, 15 bp, Homo sapiens
cctgtggcatctagg

SEQ ID NO: 1799984 - DNA, 15 bp, Homo sapiens
ctgtggcatctagga

SEQ ID NO: 1799985 - DNA, 15 bp, Homo sapiens
tgtggcatctaggac

SEQ ID NO: 1799986 - DNA, 15 bp, Homo sapiens
gtggcatctaggact

SEQ ID NO: 1799987 - DNA, 15 bp, Homo sapiens
tggcatctaggactc

SEQ ID NO: 1799988 - DNA, 15 bp, Homo sapiens
ggcatctaggactct

SEQ ID NO: 1799989 - DNA, 15 bp, Homo sapiens
gcatctaggactcta

SEQ ID NO: 1799990 - DNA, 15 bp, Homo sapiens
catctaggactctag

SEQ ID NO: 1799991 - DNA, 15 bp, Homo sapiens
atctaggactctagc

SEQ ID NO: 1799992 - DNA, 15 bp, Homo sapiens
tctaggactctagct

SEQ ID NO: 1799993 - DNA, 15 bp, Homo sapiens
ctaggactctagctt

SEQ ID NO: 1799994 - DNA, 15 bp, Homo sapiens
taggactctagcttt

SEQ ID NO: 1799995 - DNA, 15 bp, Homo sapiens
aggactctagctttc

SEQ ID NO: 1799996 - DNA, 15 bp, Homo sapiens
ggactctagctttct

SEQ ID NO: 1799997 - DNA, 15 bp, Homo sapiens
gactctagctttctc

SEQ ID NO: 1799998 - DNA, 15 bp, Homo sapiens
actctagctttctcc

SEQ ID NO: 1799999 - DNA, 15 bp, Homo sapiens
ctctagctttctcct

SEQ ID NO: 1800000 - DNA, 15 bp, Homo sapiens
tctagctttctcctg

SEQ ID NO: 1800001 - DNA, 15 bp, Homo sapiens
ctagctttctcctgt

SEQ ID NO: 1800002 - DNA, 15 bp, Homo sapiens
tagctttctcctgtc

SEQ ID NO: 1800003 - DNA, 15 bp, Homo sapiens
agctttctcctgtca

SEQ ID NO: 1800004 - DNA, 15 bp, Homo sapiens
gctttctcctgtcag

SEQ ID NO: 1800005 - DNA, 15 bp, Homo sapiens
ctttctcctgtcagg

SEQ ID NO: 1800006 - DNA, 15 bp, Homo sapiens
tttctcctgtcaggc

SEQ ID NO: 1800007 - DNA, 15 bp, Homo sapiens
ttctcctgtcaggcc

SEQ ID NO: 1800008 - DNA, 15 bp, Homo sapiens
tctcctgtcaggcca

SEQ ID NO: 1800009 - DNA, 15 bp, Homo sapiens
ctcctgtcaggccac

SEQ ID NO: 1800010 - DNA, 15 bp, Homo sapiens
tcctgtcaggccacc

SEQ ID NO: 1800011 - DNA, 15 bp, Homo sapiens
cctgtcaggccacca

SEQ ID NO: 1800012 - DNA, 15 bp, Homo sapiens
ctgtcaggccaccac

SEQ ID NO: 1800013 - DNA, 15 bp, Homo sapiens
tgtcaggccaccact

SEQ ID NO: 1800014 - DNA, 15 bp, Homo sapiens
gtcaggccaccactg

SEQ ID NO: 1800015 - DNA, 15 bp, Homo sapiens
tcaggccaccactgg

SEQ ID NO: 1800016 - DNA, 15 bp, Homo sapiens
caggccaccactggc

SEQ ID NO: 1800017 - DNA, 15 bp, Homo sapiens
aggccaccactggct

SEQ ID NO: 1800018 - DNA, 15 bp, Homo sapiens
ggccaccactggctg

SEQ ID NO: 1800019 - DNA, 15 bp, Homo sapiens
gccaccactggctgg

SEQ ID NO: 1800020 - DNA, 15 bp, Homo sapiens
ccaccactggctggc

SEQ ID NO: 1800021 - DNA, 15 bp, Homo sapiens
caccactggctggcc

SEQ ID NO: 1800022 - DNA, 15 bp, Homo sapiens
accactggctggcct

SEQ ID NO: 1800023 - DNA, 15 bp, Homo sapiens
ccactggctggcctg

SEQ ID NO: 1800024 - DNA, 15 bp, Homo sapiens
cactggctggcctgg

SEQ ID NO: 1800025 - DNA, 15 bp, Homo sapiens
actggctggcctggc

SEQ ID NO: 1800026 - DNA, 15 bp, Homo sapiens
ctggctggcctggcc

SEQ ID NO: 1800027 - DNA, 15 bp, Homo sapiens
tggctggcctggcct

SEQ ID NO: 1800028 - DNA, 15 bp, Homo sapiens
ggctggcctggcctg

SEQ ID NO: 1800029 - DNA, 15 bp, Homo sapiens
gctggcctggcctga

SEQ ID NO: 1800030 - DNA, 15 bp, Homo sapiens
ctggcctggcctgaa

SEQ ID NO: 1800031 - DNA, 15 bp, Homo sapiens
tggcctggcctgaac

SEQ ID NO: 1800032 - DNA, 15 bp, Homo sapiens
ggcctggcctgaacc

SEQ ID NO: 1800033 - DNA, 15 bp, Homo sapiens
gcctggcctgaaccc

SEQ ID NO: 1800034 - DNA, 15 bp, Homo sapiens
cctggcctgaacccc

SEQ ID NO: 1800035 - DNA, 15 bp, Homo sapiens
ctggcctgaaccccc

SEQ ID NO: 1800036 - DNA, 15 bp, Homo sapiens
tggcctgaaccccca

SEQ ID NO: 1800037 - DNA, 15 bp, Homo sapiens
ggcctgaacccccag

SEQ ID NO: 1800038 - DNA, 15 bp, Homo sapiens
gcctgaacccccagc

SEQ ID NO: 1800039 - DNA, 15 bp, Homo sapiens
cctgaacccccagcg

SEQ ID NO: 1800040 - DNA, 15 bp, Homo sapiens
ctgaacccccagcgc

SEQ ID NO: 1800041 - DNA, 15 bp, Homo sapiens
tgaacccccagcgcc

SEQ ID NO: 1800042 - DNA, 15 bp, Homo sapiens
gaacccccagcgcca

SEQ ID NO: 1800043 - DNA, 15 bp, Homo sapiens
aacccccagcgccat

SEQ ID NO: 1800044 - DNA, 15 bp, Homo sapiens
acccccagcgccatc

SEQ ID NO: 1800045 - DNA, 15 bp, Homo sapiens
cccccagcgccatca

SEQ ID NO: 1800046 - DNA, 15 bp, Homo sapiens
ccccagcgccatcat

SEQ ID NO: 1800047 - DNA, 15 bp, Homo sapiens
cccagcgccatcatg

SEQ ID NO: 1800048 - DNA, 15 bp, Homo sapiens
ccagcgccatcatgc

SEQ ID NO: 1800049 - DNA, 15 bp, Homo sapiens
cagcgccatcatgcc

SEQ ID NO: 1800050 - DNA, 15 bp, Homo sapiens
agcgccatcatgcct

SEQ ID NO: 1800051 - DNA, 15 bp, Homo sapiens
gcgccatcatgcctt

SEQ ID NO: 1800052 - DNA, 15 bp, Homo sapiens
cgccatcatgccttg

SEQ ID NO: 1800053 - DNA, 15 bp, Homo sapiens
gccatcatgccttgc

SEQ ID NO: 1800054 - DNA, 15 bp, Homo sapiens
ccatcatgccttgca

SEQ ID NO: 1800055 - DNA, 15 bp, Homo sapiens
catcatgccttgcag

SEQ ID NO: 1800056 - DNA, 15 bp, Homo sapiens
atcatgccttgcagc

SEQ ID NO: 1800057 - DNA, 15 bp, Homo sapiens
tcatgccttgcagcc

SEQ ID NO: 1800058 - DNA, 15 bp, Homo sapiens
catgccttgcagccc

SEQ ID NO: 1800059 - DNA, 15 bp, Homo sapiens
atgccttgcagcccc

SEQ ID NO: 1800060 - DNA, 15 bp, Homo sapiens
tgccttgcagcccca

SEQ ID NO: 1800061 - DNA, 15 bp, Homo sapiens
gccttgcagccccac

SEQ ID NO: 1800062 - DNA, 15 bp, Homo sapiens
ccttgcagccccaca

SEQ ID NO: 1800063 - DNA, 15 bp, Homo sapiens
cttgcagccccacag

SEQ ID NO: 1800064 - DNA, 15 bp, Homo sapiens
ttgcagccccacagg

SEQ ID NO: 1800065 - DNA, 15 bp, Homo sapiens
tgcagccccacaggg

SEQ ID NO: 1800066 - DNA, 15 bp, Homo sapiens
gcagccccacagggg

SEQ ID NO: 1800067 - DNA, 15 bp, Homo sapiens
cagccccacaggggt

SEQ ID NO: 1800068 - DNA, 15 bp, Homo sapiens
agccccacaggggtg

SEQ ID NO: 1800069 - DNA, 15 bp, Homo sapiens
gccccacaggggtgc

SEQ ID NO: 1800070 - DNA, 15 bp, Homo sapiens
ccccacaggggtgct

SEQ ID NO: 1800071 - DNA, 15 bp, Homo sapiens
cccacaggggtgctc

SEQ ID NO: 1800072 - DNA, 15 bp, Homo sapiens
ccacaggggtgctca

SEQ ID NO: 1800073 - DNA, 15 bp, Homo sapiens
cacaggggtgctcac

SEQ ID NO: 1800074 - DNA, 15 bp, Homo sapiens
acaggggtgctcacg

SEQ ID NO: 1800075 - DNA, 15 bp, Homo sapiens
caggggtgctcacgt

SEQ ID NO: 1800076 - DNA, 15 bp, Homo sapiens
aggggtgctcacgtt

SEQ ID NO: 1800077 - DNA, 15 bp, Homo sapiens
ggggtgctcacgttg

SEQ ID NO: 1800078 - DNA, 15 bp, Homo sapiens
gggtgctcacgttgg

SEQ ID NO: 1800079 - DNA, 15 bp, Homo sapiens
ggtgctcacgttggc

SEQ ID NO: 1800080 - DNA, 15 bp, Homo sapiens
gtgctcacgttggct

SEQ ID NO: 1800081 - DNA, 15 bp, Homo sapiens
tgctcacgttggctg

SEQ ID NO: 1800082 - DNA, 15 bp, Homo sapiens
gctcacgttggctgc

SEQ ID NO: 1800083 - DNA, 15 bp, Homo sapiens
ctcacgttggctgca

SEQ ID NO: 1800084 - DNA, 15 bp, Homo sapiens
tcacgttggctgcag

SEQ ID NO: 1800085 - DNA, 15 bp, Homo sapiens
cacgttggctgcaga

SEQ ID NO: 1800086 - DNA, 15 bp, Homo sapiens
acgttggctgcagac

SEQ ID NO: 1800087 - DNA, 15 bp, Homo sapiens
cgttggctgcagaca

SEQ ID NO: 1800088 - DNA, 15 bp, Homo sapiens
gttggctgcagacag

SEQ ID NO: 1800089 - DNA, 15 bp, Homo sapiens
ttggctgcagacaga

SEQ ID NO: 1800090 - DNA, 15 bp, Homo sapiens
tggctgcagacagaa

SEQ ID NO: 1800091 - DNA, 15 bp, Homo sapiens
ggctgcagacagaag

SEQ ID NO: 1800092 - DNA, 15 bp, Homo sapiens
gctgcagacagaagg

SEQ ID NO: 1800093 - DNA, 15 bp, Homo sapiens
ctgcagacagaaggc

SEQ ID NO: 1800094 - DNA, 15 bp, Homo sapiens
tgcagacagaaggct

SEQ ID NO: 1800095 - DNA, 15 bp, Homo sapiens
gcagacagaaggctt

SEQ ID NO: 1800096 - DNA, 15 bp, Homo sapiens
cagacagaaggcttg

SEQ ID NO: 1800097 - DNA, 15 bp, Homo sapiens
agacagaaggcttgg

SEQ ID NO: 1800098 - DNA, 15 bp, Homo sapiens
gacagaaggcttgga

SEQ ID NO: 1800099 - DNA, 15 bp, Homo sapiens
acagaaggcttggag

SEQ ID NO: 1800100 - DNA, 15 bp, Homo sapiens
cagaaggcttggagc

SEQ ID NO: 1800101 - DNA, 15 bp, Homo sapiens
agaaggcttggagct

SEQ ID NO: 1800102 - DNA, 15 bp, Homo sapiens
gaaggcttggagctc

SEQ ID NO: 1800103 - DNA, 15 bp, Homo sapiens
aaggcttggagctcc

SEQ ID NO: 1800104 - DNA, 15 bp, Homo sapiens
aggcttggagctcca

SEQ ID NO: 1800105 - DNA, 15 bp, Homo sapiens
ggcttggagctccat

SEQ ID NO: 1800106 - DNA, 15 bp, Homo sapiens
gcttggagctccatg

SEQ ID NO: 1800107 - DNA, 15 bp, Homo sapiens
cttggagctccatgt

SEQ ID NO: 1800108 - DNA, 15 bp, Homo sapiens
ttggagctccatgtc

SEQ ID NO: 1800109 - DNA, 15 bp, Homo sapiens
tggagctccatgtcc

SEQ ID NO: 1800110 - DNA, 15 bp, Homo sapiens
ggagctccatgtcct

SEQ ID NO: 1800111 - DNA, 15 bp, Homo sapiens
gagctccatgtcctg

SEQ ID NO: 1800112 - DNA, 15 bp, Homo sapiens
agctccatgtcctgg

SEQ ID NO: 1800113 - DNA, 15 bp, Homo sapiens
gctccatgtcctggg

SEQ ID NO: 1800114 - DNA, 15 bp, Homo sapiens
ctccatgtcctgggc

SEQ ID NO: 1800115 - DNA, 15 bp, Homo sapiens
tccatgtcctgggcc

SEQ ID NO: 1800116 - DNA, 15 bp, Homo sapiens
ccatgtcctgggccc

SEQ ID NO: 1800117 - DNA, 15 bp, Homo sapiens
catgtcctgggccca

SEQ ID NO: 1800118 - DNA, 15 bp, Homo sapiens
atgtcctgggcccac

SEQ ID NO: 1800119 - DNA, 15 bp, Homo sapiens
tgtcctgggcccacc

SEQ ID NO: 1800120 - DNA, 15 bp, Homo sapiens
gtcctgggcccaccc

SEQ ID NO: 1800121 - DNA, 15 bp, Homo sapiens
tcctgggcccacccc

SEQ ID NO: 1800122 - DNA, 15 bp, Homo sapiens
cctgggcccacccca

SEQ ID NO: 1800123 - DNA, 15 bp, Homo sapiens
ctgggcccaccccat

SEQ ID NO: 1800124 - DNA, 15 bp, Homo sapiens
tgggcccaccccatc

SEQ ID NO: 1800125 - DNA, 15 bp, Homo sapiens
gggcccaccccatct

SEQ ID NO: 1800126 - DNA, 15 bp, Homo sapiens
ggcccaccccatcta

SEQ ID NO: 1800127 - DNA, 15 bp, Homo sapiens
gcccaccccatctag

SEQ ID NO: 1800128 - DNA, 15 bp, Homo sapiens
cccaccccatctagg

SEQ ID NO: 1800129 - DNA, 15 bp, Homo sapiens
ccaccccatctaggt

SEQ ID NO: 1800130 - DNA, 15 bp, Homo sapiens
caccccatctaggtc

SEQ ID NO: 1800131 - DNA, 15 bp, Homo sapiens
accccatctaggtcc

SEQ ID NO: 1800132 - DNA, 15 bp, Homo sapiens
ccccatctaggtcca

SEQ ID NO: 1800133 - DNA, 15 bp, Homo sapiens
cccatctaggtccag

SEQ ID NO: 1800134 - DNA, 15 bp, Homo sapiens
ccatctaggtccagg

SEQ ID NO: 1800135 - DNA, 15 bp, Homo sapiens
catctaggtccaggg

SEQ ID NO: 1800136 - DNA, 15 bp, Homo sapiens
atctaggtccaggga

SEQ ID NO: 1800137 - DNA, 15 bp, Homo sapiens
tctaggtccagggac

SEQ ID NO: 1800138 - DNA, 15 bp, Homo sapiens
ctaggtccagggact

SEQ ID NO: 1800139 - DNA, 15 bp, Homo sapiens
taggtccagggacta

SEQ ID NO: 1800140 - DNA, 15 bp, Homo sapiens
aggtccagggactat

SEQ ID NO: 1800141 - DNA, 15 bp, Homo sapiens
ggtccagggactatg

SEQ ID NO: 1800142 - DNA, 15 bp, Homo sapiens
gtccagggactatgc

SEQ ID NO: 1800143 - DNA, 15 bp, Homo sapiens
tccagggactatgcc

SEQ ID NO: 1800144 - DNA, 15 bp, Homo sapiens
ccagggactatgcca

SEQ ID NO: 1800145 - DNA, 15 bp, Homo sapiens
cagggactatgccac

SEQ ID NO: 1800146 - DNA, 15 bp, Homo sapiens
agggactatgccacc

SEQ ID NO: 1800147 - DNA, 15 bp, Homo sapiens
gggactatgccacct

SEQ ID NO: 1800148 - DNA, 15 bp, Homo sapiens
ggactatgccacctc

SEQ ID NO: 1800149 - DNA, 15 bp, Homo sapiens
gactatgccacctct

SEQ ID NO: 1800150 - DNA, 15 bp, Homo sapiens
actatgccacctctc

SEQ ID NO: 1800151 - DNA, 15 bp, Homo sapiens
ctatgccacctctct

SEQ ID NO: 1800152 - DNA, 15 bp, Homo sapiens
tatgccacctctcta

SEQ ID NO: 1800153 - DNA, 15 bp, Homo sapiens
atgccacctctctag

SEQ ID NO: 1800154 - DNA, 15 bp, Homo sapiens
tgccacctctctagg

SEQ ID NO: 1800155 - DNA, 15 bp, Homo sapiens
gccacctctctaggg

SEQ ID NO: 1800156 - DNA, 15 bp, Homo sapiens
ccacctctctagggg

SEQ ID NO: 1800157 - DNA, 15 bp, Homo sapiens
cacctctctaggggc

SEQ ID NO: 1800158 - DNA, 15 bp, Homo sapiens
acctctctaggggct

SEQ ID NO: 1800159 - DNA, 15 bp, Homo sapiens
cctctctaggggctg

SEQ ID NO: 1800160 - DNA, 15 bp, Homo sapiens
ctctctaggggctgg

SEQ ID NO: 1800161 - DNA, 15 bp, Homo sapiens
tctctaggggctggt

SEQ ID NO: 1800162 - DNA, 15 bp, Homo sapiens
ctctaggggctggtc

SEQ ID NO: 1800163 - DNA, 15 bp, Homo sapiens
tctaggggctggtca

SEQ ID NO: 1800164 - DNA, 15 bp, Homo sapiens
ctaggggctggtcac

SEQ ID NO: 1800165 - DNA, 15 bp, Homo sapiens
taggggctggtcaca

SEQ ID NO: 1800166 - DNA, 15 bp, Homo sapiens
aggggctggtcacat

SEQ ID NO: 1800167 - DNA, 15 bp, Homo sapiens
ggggctggtcacatc

SEQ ID NO: 1800168 - DNA, 15 bp, Homo sapiens
gggctggtcacatct

SEQ ID NO: 1800169 - DNA, 15 bp, Homo sapiens
ggctggtcacatctg

SEQ ID NO: 1800170 - DNA, 15 bp, Homo sapiens
gctggtcacatctgc

SEQ ID NO: 1800171 - DNA, 15 bp, Homo sapiens
ctggtcacatctgca

SEQ ID NO: 1800172 - DNA, 15 bp, Homo sapiens
tggtcacatctgcac

SEQ ID NO: 1800173 - DNA, 15 bp, Homo sapiens
ggtcacatctgcacg

SEQ ID NO: 1800174 - DNA, 15 bp, Homo sapiens
gtcacatctgcacgg

SEQ ID NO: 1800175 - DNA, 15 bp, Homo sapiens
tcacatctgcacgga

SEQ ID NO: 1800176 - DNA, 15 bp, Homo sapiens
cacatctgcacggac

SEQ ID NO: 1800177 - DNA, 15 bp, Homo sapiens
acatctgcacggaca

SEQ ID NO: 1800178 - DNA, 15 bp, Homo sapiens
catctgcacggacag

SEQ ID NO: 1800179 - DNA, 15 bp, Homo sapiens
atctgcacggacaga

SEQ ID NO: 1800180 - DNA, 15 bp, Homo sapiens
tctgcacggacagag

SEQ ID NO: 1800181 - DNA, 15 bp, Homo sapiens
ctgcacggacagagt

SEQ ID NO: 1800182 - DNA, 15 bp, Homo sapiens
tgcacggacagagta

SEQ ID NO: 1800183 - DNA, 15 bp, Homo sapiens
gcacggacagagtag

SEQ ID NO: 1800184 - DNA, 15 bp, Homo sapiens
cacggacagagtagt

SEQ ID NO: 1800185 - DNA, 15 bp, Homo sapiens
acggacagagtagtc

SEQ ID NO: 1800186 - DNA, 15 bp, Homo sapiens
cggacagagtagtcc

SEQ ID NO: 1800187 - DNA, 15 bp, Homo sapiens
ggacagagtagtccg

SEQ ID NO: 1800188 - DNA, 15 bp, Homo sapiens
gacagagtagtccgg

SEQ ID NO: 1800189 - DNA, 15 bp, Homo sapiens
acagagtagtccggg

SEQ ID NO: 1800190 - DNA, 15 bp, Homo sapiens
cagagtagtccgggg

SEQ ID NO: 1800191 - DNA, 15 bp, Homo sapiens
agagtagtccggggt

SEQ ID NO: 1800192 - DNA, 15 bp, Homo sapiens
gagtagtccggggtc

SEQ ID NO: 1800193 - DNA, 15 bp, Homo sapiens
agtagtccggggtcc

SEQ ID NO: 1800194 - DNA, 15 bp, Homo sapiens
gtagtccggggtcct

SEQ ID NO: 1800195 - DNA, 15 bp, Homo sapiens
tagtccggggtcctg

SEQ ID NO: 1800196 - DNA, 15 bp, Homo sapiens
agtccggggtcctgg

SEQ ID NO: 1800197 - DNA, 15 bp, Homo sapiens
gtccggggtcctgga

SEQ ID NO: 1800198 - DNA, 15 bp, Homo sapiens
tccggggtcctggag

SEQ ID NO: 1800199 - DNA, 15 bp, Homo sapiens
ccggggtcctggaga

SEQ ID NO: 1800200 - DNA, 15 bp, Homo sapiens
cggggtcctggagag

SEQ ID NO: 1800201 - DNA, 15 bp, Homo sapiens
ggggtcctggagagt

SEQ ID NO: 1800202 - DNA, 15 bp, Homo sapiens
gggtcctggagagtg

SEQ ID NO: 1800203 - DNA, 15 bp, Homo sapiens
ggtcctggagagtgt

SEQ ID NO: 1800204 - DNA, 15 bp, Homo sapiens
gtcctggagagtgta

SEQ ID NO: 1800205 - DNA, 15 bp, Homo sapiens
tcctggagagtgtat

SEQ ID NO: 1800206 - DNA, 15 bp, Homo sapiens
cctggagagtgtatg

SEQ ID NO: 1800207 - DNA, 15 bp, Homo sapiens
ctggagagtgtatgg

SEQ ID NO: 1800208 - DNA, 15 bp, Homo sapiens
tggagagtgtatggg

SEQ ID NO: 1800209 - DNA, 15 bp, Homo sapiens
ggagagtgtatgggg

SEQ ID NO: 1800210 - DNA, 15 bp, Homo sapiens
gagagtgtatgggga

SEQ ID NO: 1800211 - DNA, 15 bp, Homo sapiens
agagtgtatggggag

SEQ ID NO: 1800212 - DNA, 15 bp, Homo sapiens
gagtgtatggggagc

SEQ ID NO: 1800213 - DNA, 15 bp, Homo sapiens
agtgtatggggagca

SEQ ID NO: 1800214 - DNA, 15 bp, Homo sapiens
gtgtatggggagcag

SEQ ID NO: 1800215 - DNA, 15 bp, Homo sapiens
tgtatggggagcagt

SEQ ID NO: 1800216 - DNA, 15 bp, Homo sapiens
gtatggggagcagtg

SEQ ID NO: 1800217 - DNA, 15 bp, Homo sapiens
tatggggagcagtgg

SEQ ID NO: 1800218 - DNA, 15 bp, Homo sapiens
atggggagcagtggc

SEQ ID NO: 1800219 - DNA, 15 bp, Homo sapiens
tggggagcagtggct

SEQ ID NO: 1800220 - DNA, 15 bp, Homo sapiens
ggggagcagtggctg

SEQ ID NO: 1800221 - DNA, 15 bp, Homo sapiens
gggagcagtggctga

SEQ ID NO: 1800222 - DNA, 15 bp, Homo sapiens
ggagcagtggctgac

SEQ ID NO: 1800223 - DNA, 15 bp, Homo sapiens
gagcagtggctgaca

SEQ ID NO: 1800224 - DNA, 15 bp, Homo sapiens
agcagtggctgacag

SEQ ID NO: 1800225 - DNA, 15 bp, Homo sapiens
gcagtggctgacagc

SEQ ID NO: 1800226 - DNA, 15 bp, Homo sapiens
cagtggctgacagcc

SEQ ID NO: 1800227 - DNA, 15 bp, Homo sapiens
agtggctgacagcct

SEQ ID NO: 1800228 - DNA, 15 bp, Homo sapiens
gtggctgacagcctg

SEQ ID NO: 1800229 - DNA, 15 bp, Homo sapiens
tggctgacagcctgg

SEQ ID NO: 1800230 - DNA, 15 bp, Homo sapiens
ggctgacagcctggc

SEQ ID NO: 1800231 - DNA, 15 bp, Homo sapiens
gctgacagcctggcc

SEQ ID NO: 1800232 - DNA, 15 bp, Homo sapiens
ctgacagcctggccc

SEQ ID NO: 1800233 - DNA, 15 bp, Homo sapiens
tgacagcctggcccc

SEQ ID NO: 1800234 - DNA, 15 bp, Homo sapiens
gacagcctggccccc

SEQ ID NO: 1800235 - DNA, 15 bp, Homo sapiens
acagcctggccccca

SEQ ID NO: 1800236 - DNA, 15 bp, Homo sapiens
cagcctggcccccac

SEQ ID NO: 1800237 - DNA, 15 bp, Homo sapiens
agcctggcccccaca

SEQ ID NO: 1800238 - DNA, 15 bp, Homo sapiens
gcctggcccccacag

SEQ ID NO: 1800239 - DNA, 15 bp, Homo sapiens
cctggcccccacaga

SEQ ID NO: 1800240 - DNA, 15 bp, Homo sapiens
ctggcccccacagaa

SEQ ID NO: 1800241 - DNA, 15 bp, Homo sapiens
tggcccccacagaag

SEQ ID NO: 1800242 - DNA, 15 bp, Homo sapiens
ggcccccacagaagc

SEQ ID NO: 1800243 - DNA, 15 bp, Homo sapiens
gcccccacagaagct

SEQ ID NO: 1800244 - DNA, 15 bp, Homo sapiens
cccccacagaagctc

SEQ ID NO: 1800245 - DNA, 15 bp, Homo sapiens
ccccacagaagctcc

SEQ ID NO: 1800246 - DNA, 15 bp, Homo sapiens
cccacagaagctccg

SEQ ID NO: 1800247 - DNA, 15 bp, Homo sapiens
ccacagaagctccgc

SEQ ID NO: 1800248 - DNA, 15 bp, Homo sapiens
cacagaagctccgct

SEQ ID NO: 1800249 - DNA, 15 bp, Homo sapiens
acagaagctccgctc

SEQ ID NO: 1800250 - DNA, 15 bp, Homo sapiens
cagaagctccgctct

SEQ ID NO: 1800251 - DNA, 15 bp, Homo sapiens
agaagctccgctctc

SEQ ID NO: 1800252 - DNA, 15 bp, Homo sapiens
gaagctccgctctca

SEQ ID NO: 1800253 - DNA, 15 bp, Homo sapiens
aagctccgctctcag

SEQ ID NO: 1800254 - DNA, 15 bp, Homo sapiens
agctccgctctcagg

SEQ ID NO: 1800255 - DNA, 15 bp, Homo sapiens
gctccgctctcaggg

SEQ ID NO: 1800256 - DNA, 15 bp, Homo sapiens
ctccgctctcaggga

SEQ ID NO: 1800257 - DNA, 15 bp, Homo sapiens
tccgctctcagggat

SEQ ID NO: 1800258 - DNA, 15 bp, Homo sapiens
ccgctctcagggata

SEQ ID NO: 1800259 - DNA, 15 bp, Homo sapiens
cgctctcagggatat

SEQ ID NO: 1800260 - DNA, 15 bp, Homo sapiens
gctctcagggatatc

SEQ ID NO: 1800261 - DNA, 15 bp, Homo sapiens
ctctcagggatatcc

SEQ ID NO: 1800262 - DNA, 15 bp, Homo sapiens
tctcagggatatccc

SEQ ID NO: 1800263 - DNA, 15 bp, Homo sapiens
ctcagggatatccct

SEQ ID NO: 1800264 - DNA, 15 bp, Homo sapiens
tcagggatatccctg

SEQ ID NO: 1800265 - DNA, 15 bp, Homo sapiens
cagggatatccctgg

SEQ ID NO: 1800266 - DNA, 15 bp, Homo sapiens
agggatatccctggt

SEQ ID NO: 1800267 - DNA, 15 bp, Homo sapiens
gggatatccctggtg

SEQ ID NO: 1800268 - DNA, 15 bp, Homo sapiens
ggatatccctggtgg

SEQ ID NO: 1800269 - DNA, 15 bp, Homo sapiens
gatatccctggtggc

SEQ ID NO: 1800270 - DNA, 15 bp, Homo sapiens
atatccctggtggct

SEQ ID NO: 1800271 - DNA, 15 bp, Homo sapiens
tatccctggtggctt

SEQ ID NO: 1800272 - DNA, 15 bp, Homo sapiens
atccctggtggcttt

SEQ ID NO: 1800273 - DNA, 15 bp, Homo sapiens
tccctggtggctttg

SEQ ID NO: 1800274 - DNA, 15 bp, Homo sapiens
ccctggtggctttgc

SEQ ID NO: 1800275 - DNA, 15 bp, Homo sapiens
cctggtggctttgca

SEQ ID NO: 1800276 - DNA, 15 bp, Homo sapiens
ctggtggctttgcag

SEQ ID NO: 1800277 - DNA, 15 bp, Homo sapiens
tggtggctttgcagg

SEQ ID NO: 1800278 - DNA, 15 bp, Homo sapiens
ggtggctttgcaggt

SEQ ID NO: 1800279 - DNA, 15 bp, Homo sapiens
gtggctttgcaggtt

SEQ ID NO: 1800280 - DNA, 15 bp, Homo sapiens
tggctttgcaggttg

SEQ ID NO: 1800281 - DNA, 15 bp, Homo sapiens
ggctttgcaggttgt

SEQ ID NO: 1800282 - DNA, 15 bp, Homo sapiens
gctttgcaggttgtg

SEQ ID NO: 1800283 - DNA, 15 bp, Homo sapiens
ctttgcaggttgtgg

SEQ ID NO: 1800284 - DNA, 15 bp, Homo sapiens
tttgcaggttgtggg

SEQ ID NO: 1800285 - DNA, 15 bp, Homo sapiens
ttgcaggttgtggga

SEQ ID NO: 1800286 - DNA, 15 bp, Homo sapiens
tgcaggttgtgggag

SEQ ID NO: 1800287 - DNA, 15 bp, Homo sapiens
gcaggttgtgggaga

SEQ ID NO: 1800288 - DNA, 15 bp, Homo sapiens
caggttgtgggagag

SEQ ID NO: 1800289 - DNA, 15 bp, Homo sapiens
aggttgtgggagagc

SEQ ID NO: 1800290 - DNA, 15 bp, Homo sapiens
ggttgtgggagagcc

SEQ ID NO: 1800291 - DNA, 15 bp, Homo sapiens
gttgtgggagagcct

SEQ ID NO: 1800292 - DNA, 15 bp, Homo sapiens
ttgtgggagagcctc

SEQ ID NO: 1800293 - DNA, 15 bp, Homo sapiens
tgtgggagagcctcc

SEQ ID NO: 1800294 - DNA, 15 bp, Homo sapiens
gtgggagagcctcct

SEQ ID NO: 1800295 - DNA, 15 bp, Homo sapiens
tgggagagcctcctt

SEQ ID NO: 1800296 - DNA, 15 bp, Homo sapiens
gggagagcctccttg

SEQ ID NO: 1800297 - DNA, 15 bp, Homo sapiens
ggagagcctccttgc

SEQ ID NO: 1800298 - DNA, 15 bp, Homo sapiens
gagagcctccttgct

SEQ ID NO: 1800299 - DNA, 15 bp, Homo sapiens
agagcctccttgcta

SEQ ID NO: 1800300 - DNA, 15 bp, Homo sapiens
gagcctccttgctag

SEQ ID NO: 1800301 - DNA, 15 bp, Homo sapiens
agcctccttgctaga

SEQ ID NO: 1800302 - DNA, 15 bp, Homo sapiens
gcctccttgctagat

SEQ ID NO: 1800303 - DNA, 15 bp, Homo sapiens
cctccttgctagatg

SEQ ID NO: 1800304 - DNA, 15 bp, Homo sapiens
ctccttgctagatgt

SEQ ID NO: 1800305 - DNA, 15 bp, Homo sapiens
tccttgctagatgtg

SEQ ID NO: 1800306 - DNA, 15 bp, Homo sapiens
ccttgctagatgtga

SEQ ID NO: 1800307 - DNA, 15 bp, Homo sapiens
cttgctagatgtgat

SEQ ID NO: 1800308 - DNA, 15 bp, Homo sapiens
ttgctagatgtgatc

SEQ ID NO: 1800309 - DNA, 15 bp, Homo sapiens
tgctagatgtgatca

SEQ ID NO: 1800310 - DNA, 15 bp, Homo sapiens
gctagatgtgatcac

SEQ ID NO: 1800311 - DNA, 15 bp, Homo sapiens
ctagatgtgatcact

SEQ ID NO: 1800312 - DNA, 15 bp, Homo sapiens
tagatgtgatcactg

SEQ ID NO: 1800313 - DNA, 15 bp, Homo sapiens
agatgtgatcactgg

SEQ ID NO: 1800314 - DNA, 15 bp, Homo sapiens
gatgtgatcactggc

SEQ ID NO: 1800315 - DNA, 15 bp, Homo sapiens
atgtgatcactggcc

SEQ ID NO: 1800316 - DNA, 15 bp, Homo sapiens
tgtgatcactggccg

SEQ ID NO: 1800317 - DNA, 15 bp, Homo sapiens
gtgatcactggccga

SEQ ID NO: 1800318 - DNA, 15 bp, Homo sapiens
tgatcactggccgag

SEQ ID NO: 1800319 - DNA, 15 bp, Homo sapiens
gatcactggccgagg

SEQ ID NO: 1800320 - DNA, 15 bp, Homo sapiens
atcactggccgaggt

SEQ ID NO: 1800321 - DNA, 15 bp, Homo sapiens
tcactggccgaggtc

SEQ ID NO: 1800322 - DNA, 15 bp, Homo sapiens
cactggccgaggtca

SEQ ID NO: 1800323 - DNA, 15 bp, Homo sapiens
actggccgaggtcac

SEQ ID NO: 1800324 - DNA, 15 bp, Homo sapiens
ctggccgaggtcacg

SEQ ID NO: 1800325 - DNA, 15 bp, Homo sapiens
tggccgaggtcacgg

SEQ ID NO: 1800326 - DNA, 15 bp, Homo sapiens
ggccgaggtcacggc

SEQ ID NO: 1800327 - DNA, 15 bp, Homo sapiens
gccgaggtcacggcg

SEQ ID NO: 1800328 - DNA, 15 bp, Homo sapiens
ccgaggtcacggcgg

SEQ ID NO: 1800329 - DNA, 15 bp, Homo sapiens
cgaggtcacggcggc

SEQ ID NO: 1800330 - DNA, 15 bp, Homo sapiens
gaggtcacggcggca

SEQ ID NO: 1800331 - DNA, 15 bp, Homo sapiens
aggtcacggcggcaa

SEQ ID NO: 1800332 - DNA, 15 bp, Homo sapiens
ggtcacggcggcaag

SEQ ID NO: 1800333 - DNA, 15 bp, Homo sapiens
gtcacggcggcaaga

SEQ ID NO: 1800334 - DNA, 15 bp, Homo sapiens
tcacggcggcaagat

SEQ ID NO: 1800335 - DNA, 15 bp, Homo sapiens
cacggcggcaagatc

SEQ ID NO: 1800336 - DNA, 15 bp, Homo sapiens
acggcggcaagatca

SEQ ID NO: 1800337 - DNA, 15 bp, Homo sapiens
cggcggcaagatcaa

SEQ ID NO: 1800338 - DNA, 15 bp, Homo sapiens
ggcggcaagatcaag

SEQ ID NO: 1800339 - DNA, 15 bp, Homo sapiens
gcggcaagatcaagt

SEQ ID NO: 1800340 - DNA, 15 bp, Homo sapiens
cggcaagatcaagtc

SEQ ID NO: 1800341 - DNA, 15 bp, Homo sapiens
ggcaagatcaagtca

SEQ ID NO: 1800342 - DNA, 15 bp, Homo sapiens
gcaagatcaagtcag

SEQ ID NO: 1800343 - DNA, 15 bp, Homo sapiens
caagatcaagtcagg

SEQ ID NO: 1800344 - DNA, 15 bp, Homo sapiens
aagatcaagtcaggc

SEQ ID NO: 1800345 - DNA, 15 bp, Homo sapiens
agatcaagtcaggcc

SEQ ID NO: 1800346 - DNA, 15 bp, Homo sapiens
gatcaagtcaggcca

SEQ ID NO: 1800347 - DNA, 15 bp, Homo sapiens
atcaagtcaggccag

SEQ ID NO: 1800348 - DNA, 15 bp, Homo sapiens
tcaagtcaggccaga

SEQ ID NO: 1800349 - DNA, 15 bp, Homo sapiens
caagtcaggccagat

SEQ ID NO: 1800350 - DNA, 15 bp, Homo sapiens
aagtcaggccagatc

SEQ ID NO: 1800351 - DNA, 15 bp, Homo sapiens
agtcaggccagatct

SEQ ID NO: 1800352 - DNA, 15 bp, Homo sapiens
gtcaggccagatctg

SEQ ID NO: 1800353 - DNA, 15 bp, Homo sapiens
tcaggccagatctgg

SEQ ID NO: 1800354 - DNA, 15 bp, Homo sapiens
caggccagatctgga

SEQ ID NO: 1800355 - DNA, 15 bp, Homo sapiens
aggccagatctggat

SEQ ID NO: 1800356 - DNA, 15 bp, Homo sapiens
ggccagatctggatc

SEQ ID NO: 1800357 - DNA, 15 bp, Homo sapiens
gccagatctggatca

SEQ ID NO: 1800358 - DNA, 15 bp, Homo sapiens
ccagatctggatcaa

SEQ ID NO: 1800359 - DNA, 15 bp, Homo sapiens
cagatctggatcaat

SEQ ID NO: 1800360 - DNA, 15 bp, Homo sapiens
agatctggatcaatg

SEQ ID NO: 1800361 - DNA, 15 bp, Homo sapiens
gatctggatcaatgg

SEQ ID NO: 1800362 - DNA, 15 bp, Homo sapiens
atctggatcaatggg

SEQ ID NO: 1800363 - DNA, 15 bp, Homo sapiens
tctggatcaatgggc

SEQ ID NO: 1800364 - DNA, 15 bp, Homo sapiens
ctggatcaatgggca

SEQ ID NO: 1800365 - DNA, 15 bp, Homo sapiens
tggatcaatgggcag

SEQ ID NO: 1800366 - DNA, 15 bp, Homo sapiens
ggatcaatgggcagc

SEQ ID NO: 1800367 - DNA, 15 bp, Homo sapiens
gatcaatgggcagcc

SEQ ID NO: 1800368 - DNA, 15 bp, Homo sapiens
atcaatgggcagccc

SEQ ID NO: 1800369 - DNA, 15 bp, Homo sapiens
tcaatgggcagccca

SEQ ID NO: 1800370 - DNA, 15 bp, Homo sapiens
caatgggcagcccag

SEQ ID NO: 1800371 - DNA, 15 bp, Homo sapiens
aatgggcagcccagc

SEQ ID NO: 1800372 - DNA, 15 bp, Homo sapiens
atgggcagcccagct

SEQ ID NO: 1800373 - DNA, 15 bp, Homo sapiens
tgggcagcccagctc

SEQ ID NO: 1800374 - DNA, 15 bp, Homo sapiens
gggcagcccagctcg

SEQ ID NO: 1800375 - DNA, 15 bp, Homo sapiens
ggcagcccagctcgc

SEQ ID NO: 1800376 - DNA, 15 bp, Homo sapiens
gcagcccagctcgcc

SEQ ID NO: 1800377 - DNA, 15 bp, Homo sapiens
cagcccagctcgcct

SEQ ID NO: 1800378 - DNA, 15 bp, Homo sapiens
agcccagctcgcctc

SEQ ID NO: 1800379 - DNA, 15 bp, Homo sapiens
gcccagctcgcctca

SEQ ID NO: 1800380 - DNA, 15 bp, Homo sapiens
cccagctcgcctcag

SEQ ID NO: 1800381 - DNA, 15 bp, Homo sapiens
ccagctcgcctcagc

SEQ ID NO: 1800382 - DNA, 15 bp, Homo sapiens
cagctcgcctcagct

SEQ ID NO: 1800383 - DNA, 15 bp, Homo sapiens
agctcgcctcagctg

SEQ ID NO: 1800384 - DNA, 15 bp, Homo sapiens
gctcgcctcagctgg

SEQ ID NO: 1800385 - DNA, 15 bp, Homo sapiens
ctcgcctcagctggt

SEQ ID NO: 1800386 - DNA, 15 bp, Homo sapiens
tcgcctcagctggtg

SEQ ID NO: 1800387 - DNA, 15 bp, Homo sapiens
cgcctcagctggtga

SEQ ID NO: 1800388 - DNA, 15 bp, Homo sapiens
gcctcagctggtgag

SEQ ID NO: 1800389 - DNA, 15 bp, Homo sapiens
cctcagctggtgagg

SEQ ID NO: 1800390 - DNA, 15 bp, Homo sapiens
ctcagctggtgagga

SEQ ID NO: 1800391 - DNA, 15 bp, Homo sapiens
tcagctggtgaggaa

SEQ ID NO: 1800392 - DNA, 15 bp, Homo sapiens
cagctggtgaggaag

SEQ ID NO: 1800393 - DNA, 15 bp, Homo sapiens
agctggtgaggaagt

SEQ ID NO: 1800394 - DNA, 15 bp, Homo sapiens
gctggtgaggaagtg

SEQ ID NO: 1800395 - DNA, 15 bp, Homo sapiens
ctggtgaggaagtgt

SEQ ID NO: 1800396 - DNA, 15 bp, Homo sapiens
tggtgaggaagtgtg

SEQ ID NO: 1800397 - DNA, 15 bp, Homo sapiens
ggtgaggaagtgtgt

SEQ ID NO: 1800398 - DNA, 15 bp, Homo sapiens
gtgaggaagtgtgtg

SEQ ID NO: 1800399 - DNA, 15 bp, Homo sapiens
tgaggaagtgtgtgg

SEQ ID NO: 1800400 - DNA, 15 bp, Homo sapiens
gaggaagtgtgtggc

SEQ ID NO: 1800401 - DNA, 15 bp, Homo sapiens
aggaagtgtgtggcc

SEQ ID NO: 1800402 - DNA, 15 bp, Homo sapiens
ggaagtgtgtggccc

SEQ ID NO: 1800403 - DNA, 15 bp, Homo sapiens
gaagtgtgtggccca

SEQ ID NO: 1800404 - DNA, 15 bp, Homo sapiens
aagtgtgtggcccac

SEQ ID NO: 1800405 - DNA, 15 bp, Homo sapiens
agtgtgtggcccacg

SEQ ID NO: 1800406 - DNA, 15 bp, Homo sapiens
gtgtgtggcccacgt

SEQ ID NO: 1800407 - DNA, 15 bp, Homo sapiens
tgtgtggcccacgtg

SEQ ID NO: 1800408 - DNA, 15 bp, Homo sapiens
gtgtggcccacgtgc

SEQ ID NO: 1800409 - DNA, 15 bp, Homo sapiens
tgtggcccacgtgcg

SEQ ID NO: 1800410 - DNA, 15 bp, Homo sapiens
gtggcccacgtgcgc

SEQ ID NO: 1800411 - DNA, 15 bp, Homo sapiens
tggcccacgtgcgcc

SEQ ID NO: 1800412 - DNA, 15 bp, Homo sapiens
ggcccacgtgcgcca

SEQ ID NO: 1800413 - DNA, 15 bp, Homo sapiens
gcccacgtgcgccag

SEQ ID NO: 1800414 - DNA, 15 bp, Homo sapiens
cccacgtgcgccagc

SEQ ID NO: 1800415 - DNA, 15 bp, Homo sapiens
ccacgtgcgccagca

SEQ ID NO: 1800416 - DNA, 15 bp, Homo sapiens
cacgtgcgccagcac

SEQ ID NO: 1800417 - DNA, 15 bp, Homo sapiens
acgtgcgccagcaca

SEQ ID NO: 1800418 - DNA, 15 bp, Homo sapiens
cgtgcgccagcacaa

SEQ ID NO: 1800419 - DNA, 15 bp, Homo sapiens
gtgcgccagcacaac

SEQ ID NO: 1800420 - DNA, 15 bp, Homo sapiens
tgcgccagcacaacc

SEQ ID NO: 1800421 - DNA, 15 bp, Homo sapiens
gcgccagcacaacca

SEQ ID NO: 1800422 - DNA, 15 bp, Homo sapiens
cgccagcacaaccag

SEQ ID NO: 1800423 - DNA, 15 bp, Homo sapiens
gccagcacaaccagc

SEQ ID NO: 1800424 - DNA, 15 bp, Homo sapiens
ccagcacaaccagct

SEQ ID NO: 1800425 - DNA, 15 bp, Homo sapiens
cagcacaaccagctg

SEQ ID NO: 1800426 - DNA, 15 bp, Homo sapiens
agcacaaccagctgc

SEQ ID NO: 1800427 - DNA, 15 bp, Homo sapiens
gcacaaccagctgct

SEQ ID NO: 1800428 - DNA, 15 bp, Homo sapiens
cacaaccagctgctc

SEQ ID NO: 1800429 - DNA, 15 bp, Homo sapiens
acaaccagctgctcc

SEQ ID NO: 1800430 - DNA, 15 bp, Homo sapiens
caaccagctgctccc

SEQ ID NO: 1800431 - DNA, 15 bp, Homo sapiens
aaccagctgctcccc

SEQ ID NO: 1800432 - DNA, 15 bp, Homo sapiens
accagctgctcccca

SEQ ID NO: 1800433 - DNA, 15 bp, Homo sapiens
ccagctgctccccaa

SEQ ID NO: 1800434 - DNA, 15 bp, Homo sapiens
cagctgctccccaac

SEQ ID NO: 1800435 - DNA, 15 bp, Homo sapiens
agctgctccccaact

SEQ ID NO: 1800436 - DNA, 15 bp, Homo sapiens
gctgctccccaactt

SEQ ID NO: 1800437 - DNA, 15 bp, Homo sapiens
ctgctccccaacttg

SEQ ID NO: 1800438 - DNA, 15 bp, Homo sapiens
tgctccccaacttga

SEQ ID NO: 1800439 - DNA, 15 bp, Homo sapiens
gctccccaacttgac

SEQ ID NO: 1800440 - DNA, 15 bp, Homo sapiens
ctccccaacttgact

SEQ ID NO: 1800441 - DNA, 15 bp, Homo sapiens
tccccaacttgactg

SEQ ID NO: 1800442 - DNA, 15 bp, Homo sapiens
ccccaacttgactgt

SEQ ID NO: 1800443 - DNA, 15 bp, Homo sapiens
cccaacttgactgtg

SEQ ID NO: 1800444 - DNA, 15 bp, Homo sapiens
ccaacttgactgtgc

SEQ ID NO: 1800445 - DNA, 15 bp, Homo sapiens
caacttgactgtgcg

SEQ ID NO: 1800446 - DNA, 15 bp, Homo sapiens
aacttgactgtgcga

SEQ ID NO: 1800447 - DNA, 15 bp, Homo sapiens
acttgactgtgcgag

SEQ ID NO: 1800448 - DNA, 15 bp, Homo sapiens
cttgactgtgcgaga

SEQ ID NO: 1800449 - DNA, 15 bp, Homo sapiens
ttgactgtgcgagag

SEQ ID NO: 1800450 - DNA, 15 bp, Homo sapiens
tgactgtgcgagaga

SEQ ID NO: 1800451 - DNA, 15 bp, Homo sapiens
gactgtgcgagagac

SEQ ID NO: 1800452 - DNA, 15 bp, Homo sapiens
actgtgcgagagacc

SEQ ID NO: 1800453 - DNA, 15 bp, Homo sapiens
ctgtgcgagagacct

SEQ ID NO: 1800454 - DNA, 15 bp, Homo sapiens
tgtgcgagagacctt

SEQ ID NO: 1800455 - DNA, 15 bp, Homo sapiens
gtgcgagagaccttg

SEQ ID NO: 1800456 - DNA, 15 bp, Homo sapiens
tgcgagagaccttgg

SEQ ID NO: 1800457 - DNA, 15 bp, Homo sapiens
gcgagagaccttggc

SEQ ID NO: 1800458 - DNA, 15 bp, Homo sapiens
cgagagaccttggcc

SEQ ID NO: 1800459 - DNA, 15 bp, Homo sapiens
gagagaccttggcct

SEQ ID NO: 1800460 - DNA, 15 bp, Homo sapiens
agagaccttggcctt

SEQ ID NO: 1800461 - DNA, 15 bp, Homo sapiens
gagaccttggccttc

SEQ ID NO: 1800462 - DNA, 15 bp, Homo sapiens
agaccttggccttca

SEQ ID NO: 1800463 - DNA, 15 bp, Homo sapiens
gaccttggccttcat

SEQ ID NO: 1800464 - DNA, 15 bp, Homo sapiens
accttggccttcatt

SEQ ID NO: 1800465 - DNA, 15 bp, Homo sapiens
ccttggccttcattg

SEQ ID NO: 1800466 - DNA, 15 bp, Homo sapiens
cttggccttcattgc

SEQ ID NO: 1800467 - DNA, 15 bp, Homo sapiens
ttggccttcattgcc

SEQ ID NO: 1800468 - DNA, 15 bp, Homo sapiens
tggccttcattgccc

SEQ ID NO: 1800469 - DNA, 15 bp, Homo sapiens
ggccttcattgccca

SEQ ID NO: 1800470 - DNA, 15 bp, Homo sapiens
gccttcattgcccag

SEQ ID NO: 1800471 - DNA, 15 bp, Homo sapiens
ccttcattgcccaga

SEQ ID NO: 1800472 - DNA, 15 bp, Homo sapiens
cttcattgcccagat

SEQ ID NO: 1800473 - DNA, 15 bp, Homo sapiens
ttcattgcccagatg

SEQ ID NO: 1800474 - DNA, 15 bp, Homo sapiens
tcattgcccagatgc

SEQ ID NO: 1800475 - DNA, 15 bp, Homo sapiens
cattgcccagatgcg

SEQ ID NO: 1800476 - DNA, 15 bp, Homo sapiens
attgcccagatgcgg

SEQ ID NO: 1800477 - DNA, 15 bp, Homo sapiens
ttgcccagatgcggc

SEQ ID NO: 1800478 - DNA, 15 bp, Homo sapiens
tgcccagatgcggct

SEQ ID NO: 1800479 - DNA, 15 bp, Homo sapiens
gcccagatgcggctg

SEQ ID NO: 1800480 - DNA, 15 bp, Homo sapiens
cccagatgcggctgc

SEQ ID NO: 1800481 - DNA, 15 bp, Homo sapiens
ccagatgcggctgcc

SEQ ID NO: 1800482 - DNA, 15 bp, Homo sapiens
cagatgcggctgccc

SEQ ID NO: 1800483 - DNA, 15 bp, Homo sapiens
agatgcggctgccca

SEQ ID NO: 1800484 - DNA, 15 bp, Homo sapiens
gatgcggctgcccag

SEQ ID NO: 1800485 - DNA, 15 bp, Homo sapiens
atgcggctgcccaga

SEQ ID NO: 1800486 - DNA, 15 bp, Homo sapiens
tgcggctgcccagaa

SEQ ID NO: 1800487 - DNA, 15 bp, Homo sapiens
gcggctgcccagaac

SEQ ID NO: 1800488 - DNA, 15 bp, Homo sapiens
cggctgcccagaacc

SEQ ID NO: 1800489 - DNA, 15 bp, Homo sapiens
ggctgcccagaacct

SEQ ID NO: 1800490 - DNA, 15 bp, Homo sapiens
gctgcccagaacctt

SEQ ID NO: 1800491 - DNA, 15 bp, Homo sapiens
ctgcccagaaccttc

SEQ ID NO: 1800492 - DNA, 15 bp, Homo sapiens
tgcccagaaccttct

SEQ ID NO: 1800493 - DNA, 15 bp, Homo sapiens
gcccagaaccttctc

SEQ ID NO: 1800494 - DNA, 15 bp, Homo sapiens
cccagaaccttctcc

SEQ ID NO: 1800495 - DNA, 15 bp, Homo sapiens
ccagaaccttctccc

SEQ ID NO: 1800496 - DNA, 15 bp, Homo sapiens
cagaaccttctccca

SEQ ID NO: 1800497 - DNA, 15 bp, Homo sapiens
agaaccttctcccag

SEQ ID NO: 1800498 - DNA, 15 bp, Homo sapiens
gaaccttctcccagg

SEQ ID NO: 1800499 - DNA, 15 bp, Homo sapiens
aaccttctcccaggc

SEQ ID NO: 1800500 - DNA, 15 bp, Homo sapiens
accttctcccaggcc

SEQ ID NO: 1800501 - DNA, 15 bp, Homo sapiens
ccttctcccaggccc

SEQ ID NO: 1800502 - DNA, 15 bp, Homo sapiens
cttctcccaggccca

SEQ ID NO: 1800503 - DNA, 15 bp, Homo sapiens
ttctcccaggcccag

SEQ ID NO: 1800504 - DNA, 15 bp, Homo sapiens
tctcccaggcccagc

SEQ ID NO: 1800505 - DNA, 15 bp, Homo sapiens
ctcccaggcccagcg

SEQ ID NO: 1800506 - DNA, 15 bp, Homo sapiens
tcccaggcccagcgt

SEQ ID NO: 1800507 - DNA, 15 bp, Homo sapiens
cccaggcccagcgtg

SEQ ID NO: 1800508 - DNA, 15 bp, Homo sapiens
ccaggcccagcgtga

SEQ ID NO: 1800509 - DNA, 15 bp, Homo sapiens
caggcccagcgtgac

SEQ ID NO: 1800510 - DNA, 15 bp, Homo sapiens
aggcccagcgtgaca

SEQ ID NO: 1800511 - DNA, 15 bp, Homo sapiens
ggcccagcgtgacaa

SEQ ID NO: 1800512 - DNA, 15 bp, Homo sapiens
gcccagcgtgacaaa

SEQ ID NO: 1800513 - DNA, 15 bp, Homo sapiens
cccagcgtgacaaaa

SEQ ID NO: 1800514 - DNA, 15 bp, Homo sapiens
ccagcgtgacaaaag

SEQ ID NO: 1800515 - DNA, 15 bp, Homo sapiens
cagcgtgacaaaagg

SEQ ID NO: 1800516 - DNA, 15 bp, Homo sapiens
agcgtgacaaaaggg

SEQ ID NO: 1800517 - DNA, 15 bp, Homo sapiens
gcgtgacaaaagggt

SEQ ID NO: 1800518 - DNA, 15 bp, Homo sapiens
cgtgacaaaagggta

SEQ ID NO: 1800519 - DNA, 15 bp, Homo sapiens
gtgacaaaagggtaa

SEQ ID NO: 1800520 - DNA, 15 bp, Homo sapiens
tgacaaaagggtaac

SEQ ID NO: 1800521 - DNA, 15 bp, Homo sapiens
gacaaaagggtaact

SEQ ID NO: 1800522 - DNA, 15 bp, Homo sapiens
acaaaagggtaacta

SEQ ID NO: 1800523 - DNA, 15 bp, Homo sapiens
caaaagggtaactaa

SEQ ID NO: 1800524 - DNA, 15 bp, Homo sapiens
aaaagggtaactaac

SEQ ID NO: 1800525 - DNA, 15 bp, Homo sapiens
aaagggtaactaact

SEQ ID NO: 1800526 - DNA, 15 bp, Homo sapiens
aagggtaactaactg

SEQ ID NO: 1800527 - DNA, 15 bp, Homo sapiens
agggtaactaactgg

SEQ ID NO: 1800528 - DNA, 15 bp, Homo sapiens
gggtaactaactggc

SEQ ID NO: 1800529 - DNA, 15 bp, Homo sapiens
ggtaactaactggcc

SEQ ID NO: 1800530 - DNA, 15 bp, Homo sapiens
gtaactaactggccc

SEQ ID NO: 1800531 - DNA, 15 bp, Homo sapiens
taactaactggcccc

SEQ ID NO: 1800532 - DNA, 15 bp, Homo sapiens
aactaactggcccca

SEQ ID NO: 1800533 - DNA, 15 bp, Homo sapiens
actaactggccccag

SEQ ID NO: 1800534 - DNA, 15 bp, Homo sapiens
ctaactggccccagt

SEQ ID NO: 1800535 - DNA, 15 bp, Homo sapiens
taactggccccagtg

SEQ ID NO: 1800536 - DNA, 15 bp, Homo sapiens
aactggccccagtgg

SEQ ID NO: 1800537 - DNA, 15 bp, Homo sapiens
actggccccagtggt

SEQ ID NO: 1800538 - DNA, 15 bp, Homo sapiens
ctggccccagtggtg

SEQ ID NO: 1800539 - DNA, 15 bp, Homo sapiens
tggccccagtggtga

SEQ ID NO: 1800540 - DNA, 15 bp, Homo sapiens
ggccccagtggtgac

SEQ ID NO: 1800541 - DNA, 15 bp, Homo sapiens
gccccagtggtgacc

SEQ ID NO: 1800542 - DNA, 15 bp, Homo sapiens
ccccagtggtgaccc

SEQ ID NO: 1800543 - DNA, 15 bp, Homo sapiens
cccagtggtgacccc

SEQ ID NO: 1800544 - DNA, 15 bp, Homo sapiens
ccagtggtgaccccc

SEQ ID NO: 1800545 - DNA, 15 bp, Homo sapiens
cagtggtgaccccca

SEQ ID NO: 1800546 - DNA, 15 bp, Homo sapiens
agtggtgacccccag

SEQ ID NO: 1800547 - DNA, 15 bp, Homo sapiens
gtggtgacccccagg

SEQ ID NO: 1800548 - DNA, 15 bp, Homo sapiens
tggtgacccccaggt

SEQ ID NO: 1800549 - DNA, 15 bp, Homo sapiens
ggtgacccccaggtc

SEQ ID NO: 1800550 - DNA, 15 bp, Homo sapiens
gtgacccccaggtcc

SEQ ID NO: 1800551 - DNA, 15 bp, Homo sapiens
tgacccccaggtcca

SEQ ID NO: 1800552 - DNA, 15 bp, Homo sapiens
gacccccaggtccaa

SEQ ID NO: 1800553 - DNA, 15 bp, Homo sapiens
acccccaggtccaag

SEQ ID NO: 1800554 - DNA, 15 bp, Homo sapiens
cccccaggtccaaga

SEQ ID NO: 1800555 - DNA, 15 bp, Homo sapiens
ccccaggtccaagaa

SEQ ID NO: 1800556 - DNA, 15 bp, Homo sapiens
cccaggtccaagaag

SEQ ID NO: 1800557 - DNA, 15 bp, Homo sapiens
ccaggtccaagaagc

SEQ ID NO: 1800558 - DNA, 15 bp, Homo sapiens
caggtccaagaagct

SEQ ID NO: 1800559 - DNA, 15 bp, Homo sapiens
aggtccaagaagcta

SEQ ID NO: 1800560 - DNA, 15 bp, Homo sapiens
ggtccaagaagctac

SEQ ID NO: 1800561 - DNA, 15 bp, Homo sapiens
gtccaagaagctaca

SEQ ID NO: 1800562 - DNA, 15 bp, Homo sapiens
tccaagaagctacag

SEQ ID NO: 1800563 - DNA, 15 bp, Homo sapiens
ccaagaagctacagt

SEQ ID NO: 1800564 - DNA, 15 bp, Homo sapiens
caagaagctacagtg

SEQ ID NO: 1800565 - DNA, 15 bp, Homo sapiens
aagaagctacagtgt

SEQ ID NO: 1800566 - DNA, 15 bp, Homo sapiens
agaagctacagtgtc

SEQ ID NO: 1800567 - DNA, 15 bp, Homo sapiens
gaagctacagtgtcc

SEQ ID NO: 1800568 - DNA, 15 bp, Homo sapiens
aagctacagtgtcca

SEQ ID NO: 1800569 - DNA, 15 bp, Homo sapiens
agctacagtgtccat

SEQ ID NO: 1800570 - DNA, 15 bp, Homo sapiens
gctacagtgtccatg

SEQ ID NO: 1800571 - DNA, 15 bp, Homo sapiens
ctacagtgtccatgc

SEQ ID NO: 1800572 - DNA, 15 bp, Homo sapiens
tacagtgtccatgcc

SEQ ID NO: 1800573 - DNA, 15 bp, Homo sapiens
acagtgtccatgccc

SEQ ID NO: 1800574 - DNA, 15 bp, Homo sapiens
cagtgtccatgcccc

SEQ ID NO: 1800575 - DNA, 15 bp, Homo sapiens
agtgtccatgccccg

SEQ ID NO: 1800576 - DNA, 15 bp, Homo sapiens
gtgtccatgccccgc

SEQ ID NO: 1800577 - DNA, 15 bp, Homo sapiens
tgtccatgccccgct

SEQ ID NO: 1800578 - DNA, 15 bp, Homo sapiens
gtccatgccccgctc

SEQ ID NO: 1800579 - DNA, 15 bp, Homo sapiens
tccatgccccgctcc

SEQ ID NO: 1800580 - DNA, 15 bp, Homo sapiens
ccatgccccgctcct

SEQ ID NO: 1800581 - DNA, 15 bp, Homo sapiens
catgccccgctcctc

SEQ ID NO: 1800582 - DNA, 15 bp, Homo sapiens
atgccccgctcctcc

SEQ ID NO: 1800583 - DNA, 15 bp, Homo sapiens
tgccccgctcctccc

SEQ ID NO: 1800584 - DNA, 15 bp, Homo sapiens
gccccgctcctcccc

SEQ ID NO: 1800585 - DNA, 15 bp, Homo sapiens
ccccgctcctcccct

SEQ ID NO: 1800586 - DNA, 15 bp, Homo sapiens
cccgctcctcccctg

SEQ ID NO: 1800587 - DNA, 15 bp, Homo sapiens
ccgctcctcccctgc

SEQ ID NO: 1800588 - DNA, 15 bp, Homo sapiens
cgctcctcccctgct

SEQ ID NO: 1800589 - DNA, 15 bp, Homo sapiens
gctcctcccctgctg

SEQ ID NO: 1800590 - DNA, 15 bp, Homo sapiens
ctcctcccctgctgc

SEQ ID NO: 1800591 - DNA, 15 bp, Homo sapiens
tcctcccctgctgcc

SEQ ID NO: 1800592 - DNA, 15 bp, Homo sapiens
cctcccctgctgcct

SEQ ID NO: 1800593 - DNA, 15 bp, Homo sapiens
ctcccctgctgcctt

SEQ ID NO: 1800594 - DNA, 15 bp, Homo sapiens
tcccctgctgccttg

SEQ ID NO: 1800595 - DNA, 15 bp, Homo sapiens
cccctgctgccttgc

SEQ ID NO: 1800596 - DNA, 15 bp, Homo sapiens
ccctgctgccttgcc

SEQ ID NO: 1800597 - DNA, 15 bp, Homo sapiens
cctgctgccttgcct

SEQ ID NO: 1800598 - DNA, 15 bp, Homo sapiens
ctgctgccttgcctc

SEQ ID NO: 1800599 - DNA, 15 bp, Homo sapiens
tgctgccttgcctca

SEQ ID NO: 1800600 - DNA, 15 bp, Homo sapiens
gctgccttgcctcag

SEQ ID NO: 1800601 - DNA, 15 bp, Homo sapiens
ctgccttgcctcagg

SEQ ID NO: 1800602 - DNA, 15 bp, Homo sapiens
tgccttgcctcagga

SEQ ID NO: 1800603 - DNA, 15 bp, Homo sapiens
gccttgcctcaggac

SEQ ID NO: 1800604 - DNA, 15 bp, Homo sapiens
ccttgcctcaggacc

SEQ ID NO: 1800605 - DNA, 15 bp, Homo sapiens
cttgcctcaggaccc

SEQ ID NO: 1800606 - DNA, 15 bp, Homo sapiens
ttgcctcaggaccca

SEQ ID NO: 1800607 - DNA, 15 bp, Homo sapiens
tgcctcaggacccag

SEQ ID NO: 1800608 - DNA, 15 bp, Homo sapiens
gcctcaggacccagc

SEQ ID NO: 1800609 - DNA, 15 bp, Homo sapiens
cctcaggacccagcc

SEQ ID NO: 1800610 - DNA, 15 bp, Homo sapiens
ctcaggacccagccg

SEQ ID NO: 1800611 - DNA, 15 bp, Homo sapiens
tcaggacccagccgc

SEQ ID NO: 1800612 - DNA, 15 bp, Homo sapiens
caggacccagccgca

SEQ ID NO: 1800613 - DNA, 15 bp, Homo sapiens
aggacccagccgcag

SEQ ID NO: 1800614 - DNA, 15 bp, Homo sapiens
ggacccagccgcagg

SEQ ID NO: 1800615 - DNA, 15 bp, Homo sapiens
gacccagccgcaggt

SEQ ID NO: 1800616 - DNA, 15 bp, Homo sapiens
acccagccgcaggtc

SEQ ID NO: 1800617 - DNA, 15 bp, Homo sapiens
cccagccgcaggtcg

SEQ ID NO: 1800618 - DNA, 15 bp, Homo sapiens
ccagccgcaggtcga

SEQ ID NO: 1800619 - DNA, 15 bp, Homo sapiens
cagccgcaggtcgag

SEQ ID NO: 1800620 - DNA, 15 bp, Homo sapiens
agccgcaggtcgagt

SEQ ID NO: 1800621 - DNA, 15 bp, Homo sapiens
gccgcaggtcgagtt

SEQ ID NO: 1800622 - DNA, 15 bp, Homo sapiens
ccgcaggtcgagttt

SEQ ID NO: 1800623 - DNA, 15 bp, Homo sapiens
cgcaggtcgagtttg

SEQ ID NO: 1800624 - DNA, 15 bp, Homo sapiens
gcaggtcgagtttga

SEQ ID NO: 1800625 - DNA, 15 bp, Homo sapiens
caggtcgagtttgaa

SEQ ID NO: 1800626 - DNA, 15 bp, Homo sapiens
aggtcgagtttgaac

SEQ ID NO: 1800627 - DNA, 15 bp, Homo sapiens
ggtcgagtttgaaca

SEQ ID NO: 1800628 - DNA, 15 bp, Homo sapiens
gtcgagtttgaacaa

SEQ ID NO: 1800629 - DNA, 15 bp, Homo sapiens
tcgagtttgaacaac

SEQ ID NO: 1800630 - DNA, 15 bp, Homo sapiens
cgagtttgaacaact

SEQ ID NO: 1800631 - DNA, 15 bp, Homo sapiens
gagtttgaacaactc

SEQ ID NO: 1800632 - DNA, 15 bp, Homo sapiens
agtttgaacaactca

SEQ ID NO: 1800633 - DNA, 15 bp, Homo sapiens
gtttgaacaactcag

SEQ ID NO: 1800634 - DNA, 15 bp, Homo sapiens
tttgaacaactcagc

SEQ ID NO: 1800635 - DNA, 15 bp, Homo sapiens
ttgaacaactcagct

SEQ ID NO: 1800636 - DNA, 15 bp, Homo sapiens
tgaacaactcagctt

SEQ ID NO: 1800637 - DNA, 15 bp, Homo sapiens
gaacaactcagcttg

SEQ ID NO: 1800638 - DNA, 15 bp, Homo sapiens
aacaactcagcttgc

SEQ ID NO: 1800639 - DNA, 15 bp, Homo sapiens
acaactcagcttgcc

SEQ ID NO: 1800640 - DNA, 15 bp, Homo sapiens
caactcagcttgcct

SEQ ID NO: 1800641 - DNA, 15 bp, Homo sapiens
aactcagcttgcctt

SEQ ID NO: 1800642 - DNA, 15 bp, Homo sapiens
actcagcttgccttc

SEQ ID NO: 1800643 - DNA, 15 bp, Homo sapiens
ctcagcttgccttcc

SEQ ID NO: 1800644 - DNA, 15 bp, Homo sapiens
tcagcttgccttccg

SEQ ID NO: 1800645 - DNA, 15 bp, Homo sapiens
cagcttgccttccgc

SEQ ID NO: 1800646 - DNA, 15 bp, Homo sapiens
agcttgccttccgcc

SEQ ID NO: 1800647 - DNA, 15 bp, Homo sapiens
gcttgccttccgcca

SEQ ID NO: 1800648 - DNA, 15 bp, Homo sapiens
cttgccttccgccag

SEQ ID NO: 1800649 - DNA, 15 bp, Homo sapiens
ttgccttccgccagc

SEQ ID NO: 1800650 - DNA, 15 bp, Homo sapiens
tgccttccgccagcc

SEQ ID NO: 1800651 - DNA, 15 bp, Homo sapiens
gccttccgccagccc

SEQ ID NO: 1800652 - DNA, 15 bp, Homo sapiens
ccttccgccagccct

SEQ ID NO: 1800653 - DNA, 15 bp, Homo sapiens
cttccgccagccctg

SEQ ID NO: 1800654 - DNA, 15 bp, Homo sapiens
ttccgccagccctgg

SEQ ID NO: 1800655 - DNA, 15 bp, Homo sapiens
tccgccagccctggg

SEQ ID NO: 1800656 - DNA, 15 bp, Homo sapiens
ccgccagccctgggc

SEQ ID NO: 1800657 - DNA, 15 bp, Homo sapiens
cgccagccctgggct

SEQ ID NO: 1800658 - DNA, 15 bp, Homo sapiens
gccagccctgggctg

SEQ ID NO: 1800659 - DNA, 15 bp, Homo sapiens
ccagccctgggctgc

SEQ ID NO: 1800660 - DNA, 15 bp, Homo sapiens
cagccctgggctgca

SEQ ID NO: 1800661 - DNA, 15 bp, Homo sapiens
agccctgggctgcag

SEQ ID NO: 1800662 - DNA, 15 bp, Homo sapiens
gccctgggctgcagc

SEQ ID NO: 1800663 - DNA, 15 bp, Homo sapiens
ccctgggctgcagcc

SEQ ID NO: 1800664 - DNA, 15 bp, Homo sapiens
cctgggctgcagccc

SEQ ID NO: 1800665 - DNA, 15 bp, Homo sapiens
ctgggctgcagccca

SEQ ID NO: 1800666 - DNA, 15 bp, Homo sapiens
tgggctgcagcccac

SEQ ID NO: 1800667 - DNA, 15 bp, Homo sapiens
gggctgcagcccacc

SEQ ID NO: 1800668 - DNA, 15 bp, Homo sapiens
ggctgcagcccaccc

SEQ ID NO: 1800669 - DNA, 15 bp, Homo sapiens
gctgcagcccaccct

SEQ ID NO: 1800670 - DNA, 15 bp, Homo sapiens
ctgcagcccaccctc

SEQ ID NO: 1800671 - DNA, 15 bp, Homo sapiens
tgcagcccaccctcc

SEQ ID NO: 1800672 - DNA, 15 bp, Homo sapiens
gcagcccaccctcca

SEQ ID NO: 1800673 - DNA, 15 bp, Homo sapiens
cagcccaccctccac

SEQ ID NO: 1800674 - DNA, 15 bp, Homo sapiens
agcccaccctccacc

SEQ ID NO: 1800675 - DNA, 15 bp, Homo sapiens
gcccaccctccaccc

SEQ ID NO: 1800676 - DNA, 15 bp, Homo sapiens
cccaccctccaccct

SEQ ID NO: 1800677 - DNA, 15 bp, Homo sapiens
ccaccctccaccctc

SEQ ID NO: 1800678 - DNA, 15 bp, Homo sapiens
caccctccaccctcc

SEQ ID NO: 1800679 - DNA, 15 bp, Homo sapiens
accctccaccctcct

SEQ ID NO: 1800680 - DNA, 15 bp, Homo sapiens
ccctccaccctcctt

SEQ ID NO: 1800681 - DNA, 15 bp, Homo sapiens
cctccaccctccttt

SEQ ID NO: 1800682 - DNA, 15 bp, Homo sapiens
ctccaccctcctttc

SEQ ID NO: 1800683 - DNA, 15 bp, Homo sapiens
tccaccctcctttca

SEQ ID NO: 1800684 - DNA, 15 bp, Homo sapiens
ccaccctcctttcaa

SEQ ID NO: 1800685 - DNA, 15 bp, Homo sapiens
caccctcctttcaaa

SEQ ID NO: 1800686 - DNA, 15 bp, Homo sapiens
accctcctttcaaac

SEQ ID NO: 1800687 - DNA, 15 bp, Homo sapiens
ccctcctttcaaacc

SEQ ID NO: 1800688 - DNA, 15 bp, Homo sapiens
cctcctttcaaaccc

SEQ ID NO: 1800689 - DNA, 15 bp, Homo sapiens
ctcctttcaaacccc

SEQ ID NO: 1800690 - DNA, 15 bp, Homo sapiens
tcctttcaaacccca

SEQ ID NO: 1800691 - DNA, 15 bp, Homo sapiens
cctttcaaaccccac

SEQ ID NO: 1800692 - DNA, 15 bp, Homo sapiens
ctttcaaaccccaca

SEQ ID NO: 1800693 - DNA, 15 bp, Homo sapiens
tttcaaaccccacag

SEQ ID NO: 1800694 - DNA, 15 bp, Homo sapiens
ttcaaaccccacagc

SEQ ID NO: 1800695 - DNA, 15 bp, Homo sapiens
tcaaaccccacagcc

SEQ ID NO: 1800696 - DNA, 15 bp, Homo sapiens
caaaccccacagccc

SEQ ID NO: 1800697 - DNA, 15 bp, Homo sapiens
aaaccccacagcccg

SEQ ID NO: 1800698 - DNA, 15 bp, Homo sapiens
aaccccacagcccgc

SEQ ID NO: 1800699 - DNA, 15 bp, Homo sapiens
accccacagcccgcc

SEQ ID NO: 1800700 - DNA, 15 bp, Homo sapiens
ccccacagcccgcca

SEQ ID NO: 1800701 - DNA, 15 bp, Homo sapiens
cccacagcccgccag

SEQ ID NO: 1800702 - DNA, 15 bp, Homo sapiens
ccacagcccgccaga

SEQ ID NO: 1800703 - DNA, 15 bp, Homo sapiens
cacagcccgccagaa

SEQ ID NO: 1800704 - DNA, 15 bp, Homo sapiens
acagcccgccagaag

SEQ ID NO: 1800705 - DNA, 15 bp, Homo sapiens
cagcccgccagaagc

SEQ ID NO: 1800706 - DNA, 15 bp, Homo sapiens
agcccgccagaagct

SEQ ID NO: 1800707 - DNA, 15 bp, Homo sapiens
gcccgccagaagcta

SEQ ID NO: 1800708 - DNA, 15 bp, Homo sapiens
cccgccagaagctag

SEQ ID NO: 1800709 - DNA, 15 bp, Homo sapiens
ccgccagaagctagc

SEQ ID NO: 1800710 - DNA, 15 bp, Homo sapiens
cgccagaagctagct

SEQ ID NO: 1800711 - DNA, 15 bp, Homo sapiens
gccagaagctagctc

SEQ ID NO: 1800712 - DNA, 15 bp, Homo sapiens
ccagaagctagctca

SEQ ID NO: 1800713 - DNA, 15 bp, Homo sapiens
cagaagctagctcag

SEQ ID NO: 1800714 - DNA, 15 bp, Homo sapiens
agaagctagctcagc

SEQ ID NO: 1800715 - DNA, 15 bp, Homo sapiens
gaagctagctcagcc

SEQ ID NO: 1800716 - DNA, 15 bp, Homo sapiens
aagctagctcagccc

SEQ ID NO: 1800717 - DNA, 15 bp, Homo sapiens
agctagctcagccca

SEQ ID NO: 1800718 - DNA, 15 bp, Homo sapiens
gctagctcagcccat

SEQ ID NO: 1800719 - DNA, 15 bp, Homo sapiens
ctagctcagcccatt

SEQ ID NO: 1800720 - DNA, 15 bp, Homo sapiens
tagctcagcccattg

SEQ ID NO: 1800721 - DNA, 15 bp, Homo sapiens
agctcagcccattgg

SEQ ID NO: 1800722 - DNA, 15 bp, Homo sapiens
gctcagcccattggt

SEQ ID NO: 1800723 - DNA, 15 bp, Homo sapiens
ctcagcccattggtt

SEQ ID NO: 1800724 - DNA, 15 bp, Homo sapiens
tcagcccattggttc

SEQ ID NO: 1800725 - DNA, 15 bp, Homo sapiens
cagcccattggttcc

SEQ ID NO: 1800726 - DNA, 15 bp, Homo sapiens
agcccattggttccc

SEQ ID NO: 1800727 - DNA, 15 bp, Homo sapiens
gcccattggttccct

SEQ ID NO: 1800728 - DNA, 15 bp, Homo sapiens
cccattggttccctt

SEQ ID NO: 1800729 - DNA, 15 bp, Homo sapiens
ccattggttcccttc

SEQ ID NO: 1800730 - DNA, 15 bp, Homo sapiens
cattggttcccttca

SEQ ID NO: 1800731 - DNA, 15 bp, Homo sapiens
attggttcccttcac

SEQ ID NO: 1800732 - DNA, 15 bp, Homo sapiens
ttggttcccttcact

SEQ ID NO: 1800733 - DNA, 15 bp, Homo sapiens
tggttcccttcactg

SEQ ID NO: 1800734 - DNA, 15 bp, Homo sapiens
ggttcccttcactgc

SEQ ID NO: 1800735 - DNA, 15 bp, Homo sapiens
gttcccttcactgca

SEQ ID NO: 1800736 - DNA, 15 bp, Homo sapiens
ttcccttcactgcac

SEQ ID NO: 1800737 - DNA, 15 bp, Homo sapiens
tcccttcactgcact

SEQ ID NO: 1800738 - DNA, 15 bp, Homo sapiens
cccttcactgcactt

SEQ ID NO: 1800739 - DNA, 15 bp, Homo sapiens
ccttcactgcacttg

SEQ ID NO: 1800740 - DNA, 15 bp, Homo sapiens
cttcactgcacttgt

SEQ ID NO: 1800741 - DNA, 15 bp, Homo sapiens
ttcactgcacttgtc

SEQ ID NO: 1800742 - DNA, 15 bp, Homo sapiens
tcactgcacttgtca

SEQ ID NO: 1800743 - DNA, 15 bp, Homo sapiens
cactgcacttgtcaa

SEQ ID NO: 1800744 - DNA, 15 bp, Homo sapiens
actgcacttgtcaag

SEQ ID NO: 1800745 - DNA, 15 bp, Homo sapiens
ctgcacttgtcaaga

SEQ ID NO: 1800746 - DNA, 15 bp, Homo sapiens
tgcacttgtcaagat

SEQ ID NO: 1800747 - DNA, 15 bp, Homo sapiens
gcacttgtcaagatg

SEQ ID NO: 1800748 - DNA, 15 bp, Homo sapiens
cacttgtcaagatgt

SEQ ID NO: 1800749 - DNA, 15 bp, Homo sapiens
acttgtcaagatgtg

SEQ ID NO: 1800750 - DNA, 15 bp, Homo sapiens
cttgtcaagatgtgg

SEQ ID NO: 1800751 - DNA, 15 bp, Homo sapiens
ttgtcaagatgtggg

SEQ ID NO: 1800752 - DNA, 15 bp, Homo sapiens
tgtcaagatgtggga

SEQ ID NO: 1800753 - DNA, 15 bp, Homo sapiens
gtcaagatgtgggat

SEQ ID NO: 1800754 - DNA, 15 bp, Homo sapiens
tcaagatgtgggatg

SEQ ID NO: 1800755 - DNA, 15 bp, Homo sapiens
caagatgtgggatga

SEQ ID NO: 1800756 - DNA, 15 bp, Homo sapiens
aagatgtgggatgag

SEQ ID NO: 1800757 - DNA, 15 bp, Homo sapiens
agatgtgggatgagt

SEQ ID NO: 1800758 - DNA, 15 bp, Homo sapiens
gatgtgggatgagtg

SEQ ID NO: 1800759 - DNA, 15 bp, Homo sapiens
atgtgggatgagtgt

SEQ ID NO: 1800760 - DNA, 15 bp, Homo sapiens
tgtgggatgagtgta

SEQ ID NO: 1800761 - DNA, 15 bp, Homo sapiens
gtgggatgagtgtat

SEQ ID NO: 1800762 - DNA, 15 bp, Homo sapiens
tgggatgagtgtatt

SEQ ID NO: 1800763 - DNA, 15 bp, Homo sapiens
gggatgagtgtattt

SEQ ID NO: 1800764 - DNA, 15 bp, Homo sapiens
ggatgagtgtatttg

SEQ ID NO: 1800765 - DNA, 15 bp, Homo sapiens
gatgagtgtatttgt

SEQ ID NO: 1800766 - DNA, 15 bp, Homo sapiens
atgagtgtatttgtt

SEQ ID NO: 1800767 - DNA, 15 bp, Homo sapiens
tgagtgtatttgttt

SEQ ID NO: 1800768 - DNA, 15 bp, Homo sapiens
gagtgtatttgtttg

SEQ ID NO: 1800769 - DNA, 15 bp, Homo sapiens
agtgtatttgtttgt

SEQ ID NO: 1800770 - DNA, 15 bp, Homo sapiens
gtgtatttgtttgtg

SEQ ID NO: 1800771 - DNA, 15 bp, Homo sapiens
tgtatttgtttgtgt

SEQ ID NO: 1800772 - DNA, 15 bp, Homo sapiens
gtatttgtttgtgtg

SEQ ID NO: 1800773 - DNA, 15 bp, Homo sapiens
tatttgtttgtgtgt

SEQ ID NO: 1800774 - DNA, 15 bp, Homo sapiens
atttgtttgtgtgtt

SEQ ID NO: 1800775 - DNA, 15 bp, Homo sapiens
tttgtttgtgtgttt

SEQ ID NO: 1800776 - DNA, 15 bp, Homo sapiens
ttgtttgtgtgtttt

SEQ ID NO: 1800777 - DNA, 15 bp, Homo sapiens
tgtttgtgtgttttc

SEQ ID NO: 1800778 - DNA, 15 bp, Homo sapiens
gtttgtgtgttttct

SEQ ID NO: 1800779 - DNA, 15 bp, Homo sapiens
tttgtgtgttttctg

SEQ ID NO: 1800780 - DNA, 15 bp, Homo sapiens
ttgtgtgttttctgg

SEQ ID NO: 1800781 - DNA, 15 bp, Homo sapiens
tgtgtgttttctggg

SEQ ID NO: 1800782 - DNA, 15 bp, Homo sapiens
gtgtgttttctgggc

SEQ ID NO: 1800783 - DNA, 15 bp, Homo sapiens
tgtgttttctgggcc

SEQ ID NO: 1800784 - DNA, 15 bp, Homo sapiens
gtgttttctgggcct

SEQ ID NO: 1800785 - DNA, 15 bp, Homo sapiens
tgttttctgggcctc

SEQ ID NO: 1800786 - DNA, 15 bp, Homo sapiens
gttttctgggcctcc

SEQ ID NO: 1800787 - DNA, 15 bp, Homo sapiens
ttttctgggcctcca

SEQ ID NO: 1800788 - DNA, 15 bp, Homo sapiens
tttctgggcctccat

SEQ ID NO: 1800789 - DNA, 15 bp, Homo sapiens
ttctgggcctccatg

SEQ ID NO: 1800790 - DNA, 15 bp, Homo sapiens
tctgggcctccatgt

SEQ ID NO: 1800791 - DNA, 15 bp, Homo sapiens
ctgggcctccatgtg

SEQ ID NO: 1800792 - DNA, 15 bp, Homo sapiens
tgggcctccatgtgg

SEQ ID NO: 1800793 - DNA, 15 bp, Homo sapiens
gggcctccatgtggg

SEQ ID NO: 1800794 - DNA, 15 bp, Homo sapiens
ggcctccatgtgggt

SEQ ID NO: 1800795 - DNA, 15 bp, Homo sapiens
gcctccatgtgggta

SEQ ID NO: 1800796 - DNA, 15 bp, Homo sapiens
cctccatgtgggtag

SEQ ID NO: 1800797 - DNA, 15 bp, Homo sapiens
ctccatgtgggtaga

SEQ ID NO: 1800798 - DNA, 15 bp, Homo sapiens
tccatgtgggtagag

SEQ ID NO: 1800799 - DNA, 15 bp, Homo sapiens
ccatgtgggtagaga

SEQ ID NO: 1800800 - DNA, 15 bp, Homo sapiens
catgtgggtagagag

SEQ ID NO: 1800801 - DNA, 15 bp, Homo sapiens
atgtgggtagagagc

SEQ ID NO: 1800802 - DNA, 15 bp, Homo sapiens
tgtgggtagagagcc

SEQ ID NO: 1800803 - DNA, 15 bp, Homo sapiens
gtgggtagagagcca

SEQ ID NO: 1800804 - DNA, 15 bp, Homo sapiens
tgggtagagagccat

SEQ ID NO: 1800805 - DNA, 15 bp, Homo sapiens
gggtagagagccatg

SEQ ID NO: 1800806 - DNA, 15 bp, Homo sapiens
ggtagagagccatgg

SEQ ID NO: 1800807 - DNA, 15 bp, Homo sapiens
gtagagagccatggt

SEQ ID NO: 1800808 - DNA, 15 bp, Homo sapiens
tagagagccatggtc

SEQ ID NO: 1800809 - DNA, 15 bp, Homo sapiens
agagagccatggtcc

SEQ ID NO: 1800810 - DNA, 15 bp, Homo sapiens
gagagccatggtccc

SEQ ID NO: 1800811 - DNA, 15 bp, Homo sapiens
agagccatggtcccc

SEQ ID NO: 1800812 - DNA, 15 bp, Homo sapiens
gagccatggtcccca

SEQ ID NO: 1800813 - DNA, 15 bp, Homo sapiens
agccatggtccccaa

SEQ ID NO: 1800814 - DNA, 15 bp, Homo sapiens
gccatggtccccaat

SEQ ID NO: 1800815 - DNA, 15 bp, Homo sapiens
ccatggtccccaata

SEQ ID NO: 1800816 - DNA, 15 bp, Homo sapiens
catggtccccaatac

SEQ ID NO: 1800817 - DNA, 15 bp, Homo sapiens
atggtccccaataca

SEQ ID NO: 1800818 - DNA, 15 bp, Homo sapiens
tggtccccaatacac

SEQ ID NO: 1800819 - DNA, 15 bp, Homo sapiens
ggtccccaatacact

SEQ ID NO: 1800820 - DNA, 15 bp, Homo sapiens
gtccccaatacactg

SEQ ID NO: 1800821 - DNA, 15 bp, Homo sapiens
tccccaatacactgc

SEQ ID NO: 1800822 - DNA, 15 bp, Homo sapiens
ccccaatacactgcc

SEQ ID NO: 1800823 - DNA, 15 bp, Homo sapiens
cccaatacactgcca

SEQ ID NO: 1800824 - DNA, 15 bp, Homo sapiens
ccaatacactgccac

SEQ ID NO: 1800825 - DNA, 15 bp, Homo sapiens
caatacactgccacg

SEQ ID NO: 1800826 - DNA, 15 bp, Homo sapiens
aatacactgccacgt

SEQ ID NO: 1800827 - DNA, 15 bp, Homo sapiens
atacactgccacgtt

SEQ ID NO: 1800828 - DNA, 15 bp, Homo sapiens
tacactgccacgttc

SEQ ID NO: 1800829 - DNA, 15 bp, Homo sapiens
acactgccacgttcc

SEQ ID NO: 1800830 - DNA, 15 bp, Homo sapiens
cactgccacgttcct

SEQ ID NO: 1800831 - DNA, 15 bp, Homo sapiens
actgccacgttccta

SEQ ID NO: 1800832 - DNA, 15 bp, Homo sapiens
ctgccacgttcctaa

SEQ ID NO: 1800833 - DNA, 15 bp, Homo sapiens
tgccacgttcctaac

SEQ ID NO: 1800834 - DNA, 15 bp, Homo sapiens
gccacgttcctaaca

SEQ ID NO: 1800835 - DNA, 15 bp, Homo sapiens
ccacgttcctaacac

SEQ ID NO: 1800836 - DNA, 15 bp, Homo sapiens
cacgttcctaacaca

SEQ ID NO: 1800837 - DNA, 15 bp, Homo sapiens
acgttcctaacacag

SEQ ID NO: 1800838 - DNA, 15 bp, Homo sapiens
cgttcctaacacagg

SEQ ID NO: 1800839 - DNA, 15 bp, Homo sapiens
gttcctaacacaggg

SEQ ID NO: 1800840 - DNA, 15 bp, Homo sapiens
ttcctaacacagggc

SEQ ID NO: 1800841 - DNA, 15 bp, Homo sapiens
tcctaacacagggca

SEQ ID NO: 1800842 - DNA, 15 bp, Homo sapiens
cctaacacagggcac

SEQ ID NO: 1800843 - DNA, 15 bp, Homo sapiens
ctaacacagggcacc

SEQ ID NO: 1800844 - DNA, 15 bp, Homo sapiens
taacacagggcacca

SEQ ID NO: 1800845 - DNA, 15 bp, Homo sapiens
aacacagggcaccat

SEQ ID NO: 1800846 - DNA, 15 bp, Homo sapiens
acacagggcaccatg

SEQ ID NO: 1800847 - DNA, 15 bp, Homo sapiens
cacagggcaccatgc

SEQ ID NO: 1800848 - DNA, 15 bp, Homo sapiens
acagggcaccatgcc

SEQ ID NO: 1800849 - DNA, 15 bp, Homo sapiens
cagggcaccatgccc

SEQ ID NO: 1800850 - DNA, 15 bp, Homo sapiens
agggcaccatgccca

SEQ ID NO: 1800851 - DNA, 15 bp, Homo sapiens
gggcaccatgcccag

SEQ ID NO: 1800852 - DNA, 15 bp, Homo sapiens
ggcaccatgcccagc

SEQ ID NO: 1800853 - DNA, 15 bp, Homo sapiens
gcaccatgcccagca

SEQ ID NO: 1800854 - DNA, 15 bp, Homo sapiens
caccatgcccagcac

SEQ ID NO: 1800855 - DNA, 15 bp, Homo sapiens
accatgcccagcacg

SEQ ID NO: 1800856 - DNA, 15 bp, Homo sapiens
ccatgcccagcacgt

SEQ ID NO: 1800857 - DNA, 15 bp, Homo sapiens
catgcccagcacgtc

SEQ ID NO: 1800858 - DNA, 15 bp, Homo sapiens
atgcccagcacgtcg

SEQ ID NO: 1800859 - DNA, 15 bp, Homo sapiens
tgcccagcacgtcga

SEQ ID NO: 1800860 - DNA, 15 bp, Homo sapiens
gcccagcacgtcgag

SEQ ID NO: 1800861 - DNA, 15 bp, Homo sapiens
cccagcacgtcgagg

SEQ ID NO: 1800862 - DNA, 15 bp, Homo sapiens
ccagcacgtcgaggc

SEQ ID NO: 1800863 - DNA, 15 bp, Homo sapiens
cagcacgtcgaggcc

SEQ ID NO: 1800864 - DNA, 15 bp, Homo sapiens
agcacgtcgaggccc

SEQ ID NO: 1800865 - DNA, 15 bp, Homo sapiens
gcacgtcgaggcccc

SEQ ID NO: 1800866 - DNA, 15 bp, Homo sapiens
cacgtcgaggcccct

SEQ ID NO: 1800867 - DNA, 15 bp, Homo sapiens
acgtcgaggcccctc

SEQ ID NO: 1800868 - DNA, 15 bp, Homo sapiens
cgtcgaggcccctcg

SEQ ID NO: 1800869 - DNA, 15 bp, Homo sapiens
gtcgaggcccctcgg

SEQ ID NO: 1800870 - DNA, 15 bp, Homo sapiens
tcgaggcccctcggg

SEQ ID NO: 1800871 - DNA, 15 bp, Homo sapiens
cgaggcccctcggga

SEQ ID NO: 1800872 - DNA, 15 bp, Homo sapiens
gaggcccctcgggac

SEQ ID NO: 1800873 - DNA, 15 bp, Homo sapiens
aggcccctcgggacc

SEQ ID NO: 1800874 - DNA, 15 bp, Homo sapiens
ggcccctcgggacct

SEQ ID NO: 1800875 - DNA, 15 bp, Homo sapiens
gcccctcgggacctg

SEQ ID NO: 1800876 - DNA, 15 bp, Homo sapiens
cccctcgggacctgt

SEQ ID NO: 1800877 - DNA, 15 bp, Homo sapiens
ccctcgggacctgtg

SEQ ID NO: 1800878 - DNA, 15 bp, Homo sapiens
cctcgggacctgtgg

SEQ ID NO: 1800879 - DNA, 15 bp, Homo sapiens
ctcgggacctgtgga

SEQ ID NO: 1800880 - DNA, 15 bp, Homo sapiens
tcgggacctgtggaa

SEQ ID NO: 1800881 - DNA, 15 bp, Homo sapiens
cgggacctgtggaaa

SEQ ID NO: 1800882 - DNA, 15 bp, Homo sapiens
gggacctgtggaaag

SEQ ID NO: 1800883 - DNA, 15 bp, Homo sapiens
ggacctgtggaaaga

SEQ ID NO: 1800884 - DNA, 15 bp, Homo sapiens
gacctgtggaaagaa

SEQ ID NO: 1800885 - DNA, 15 bp, Homo sapiens
acctgtggaaagaat

SEQ ID NO: 1800886 - DNA, 15 bp, Homo sapiens
cctgtggaaagaatc

SEQ ID NO: 1800887 - DNA, 15 bp, Homo sapiens
ctgtggaaagaatca

SEQ ID NO: 1800888 - DNA, 15 bp, Homo sapiens
tgtggaaagaatcag

SEQ ID NO: 1800889 - DNA, 15 bp, Homo sapiens
gtggaaagaatcagg

SEQ ID NO: 1800890 - DNA, 15 bp, Homo sapiens
tggaaagaatcaggg

SEQ ID NO: 1800891 - DNA, 15 bp, Homo sapiens
ggaaagaatcagggg

SEQ ID NO: 1800892 - DNA, 15 bp, Homo sapiens
gaaagaatcagggga

SEQ ID NO: 1800893 - DNA, 15 bp, Homo sapiens
aaagaatcaggggaa

SEQ ID NO: 1800894 - DNA, 15 bp, Homo sapiens
aagaatcaggggaac

SEQ ID NO: 1800895 - DNA, 15 bp, Homo sapiens
agaatcaggggaacc

SEQ ID NO: 1800896 - DNA, 15 bp, Homo sapiens
gaatcaggggaacca

SEQ ID NO: 1800897 - DNA, 15 bp, Homo sapiens
aatcaggggaaccaa

SEQ ID NO: 1800898 - DNA, 15 bp, Homo sapiens
atcaggggaaccaat

SEQ ID NO: 1800899 - DNA, 15 bp, Homo sapiens
tcaggggaaccaatg

SEQ ID NO: 1800900 - DNA, 15 bp, Homo sapiens
caggggaaccaatgt

SEQ ID NO: 1800901 - DNA, 15 bp, Homo sapiens
aggggaaccaatgtt

SEQ ID NO: 1800902 - DNA, 15 bp, Homo sapiens
ggggaaccaatgttg

SEQ ID NO: 1800903 - DNA, 15 bp, Homo sapiens
gggaaccaatgttgc

SEQ ID NO: 1800904 - DNA, 15 bp, Homo sapiens
ggaaccaatgttgca

SEQ ID NO: 1800905 - DNA, 15 bp, Homo sapiens
gaaccaatgttgcag

SEQ ID NO: 1800906 - DNA, 15 bp, Homo sapiens
aaccaatgttgcagc

SEQ ID NO: 1800907 - DNA, 15 bp, Homo sapiens
accaatgttgcagct

SEQ ID NO: 1800908 - DNA, 15 bp, Homo sapiens
ccaatgttgcagctt

SEQ ID NO: 1800909 - DNA, 15 bp, Homo sapiens
caatgttgcagcttg

SEQ ID NO: 1800910 - DNA, 15 bp, Homo sapiens
aatgttgcagcttgg

SEQ ID NO: 1800911 - DNA, 15 bp, Homo sapiens
atgttgcagcttgga

SEQ ID NO: 1800912 - DNA, 15 bp, Homo sapiens
tgttgcagcttggaa

SEQ ID NO: 1800913 - DNA, 15 bp, Homo sapiens
gttgcagcttggaac

SEQ ID NO: 1800914 - DNA, 15 bp, Homo sapiens
ttgcagcttggaact

SEQ ID NO: 1800915 - DNA, 15 bp, Homo sapiens
tgcagcttggaactc

SEQ ID NO: 1800916 - DNA, 15 bp, Homo sapiens
gcagcttggaactca

SEQ ID NO: 1800917 - DNA, 15 bp, Homo sapiens
cagcttggaactcaa

SEQ ID NO: 1800918 - DNA, 15 bp, Homo sapiens
agcttggaactcaag

SEQ ID NO: 1800919 - DNA, 15 bp, Homo sapiens
gcttggaactcaagt

SEQ ID NO: 1800920 - DNA, 15 bp, Homo sapiens
cttggaactcaagtg

SEQ ID NO: 1800921 - DNA, 15 bp, Homo sapiens
ttggaactcaagtgc

SEQ ID NO: 1800922 - DNA, 15 bp, Homo sapiens
tggaactcaagtgct

SEQ ID NO: 1800923 - DNA, 15 bp, Homo sapiens
ggaactcaagtgctg

SEQ ID NO: 1800924 - DNA, 15 bp, Homo sapiens
gaactcaagtgctgg

SEQ ID NO: 1800925 - DNA, 15 bp, Homo sapiens
aactcaagtgctgga

SEQ ID NO: 1800926 - DNA, 15 bp, Homo sapiens
actcaagtgctggag

SEQ ID NO: 1800927 - DNA, 15 bp, Homo sapiens
ctcaagtgctggagc

SEQ ID NO: 1800928 - DNA, 15 bp, Homo sapiens
tcaagtgctggagct

SEQ ID NO: 1800929 - DNA, 15 bp, Homo sapiens
caagtgctggagctg

SEQ ID NO: 1800930 - DNA, 15 bp, Homo sapiens
aagtgctggagctgt

SEQ ID NO: 1800931 - DNA, 15 bp, Homo sapiens
agtgctggagctgtc

SEQ ID NO: 1800932 - DNA, 15 bp, Homo sapiens
gtgctggagctgtct

SEQ ID NO: 1800933 - DNA, 15 bp, Homo sapiens
tgctggagctgtctc

SEQ ID NO: 1800934 - DNA, 15 bp, Homo sapiens
gctggagctgtctcc

SEQ ID NO: 1800935 - DNA, 15 bp, Homo sapiens
ctggagctgtctccc

SEQ ID NO: 1800936 - DNA, 15 bp, Homo sapiens
tggagctgtctccct

SEQ ID NO: 1800937 - DNA, 15 bp, Homo sapiens
ggagctgtctccctt

SEQ ID NO: 1800938 - DNA, 15 bp, Homo sapiens
gagctgtctcccttc

SEQ ID NO: 1800939 - DNA, 15 bp, Homo sapiens
agctgtctcccttca

SEQ ID NO: 1800940 - DNA, 15 bp, Homo sapiens
gctgtctcccttcac

SEQ ID NO: 1800941 - DNA, 15 bp, Homo sapiens
ctgtctcccttcact

SEQ ID NO: 1800942 - DNA, 15 bp, Homo sapiens
tgtctcccttcactt

SEQ ID NO: 1800943 - DNA, 15 bp, Homo sapiens
gtctcccttcacttt

SEQ ID NO: 1800944 - DNA, 15 bp, Homo sapiens
tctcccttcactttc

SEQ ID NO: 1800945 - DNA, 15 bp, Homo sapiens
ctcccttcactttca

SEQ ID NO: 1800946 - DNA, 15 bp, Homo sapiens
tcccttcactttcaa

SEQ ID NO: 1800947 - DNA, 15 bp, Homo sapiens
cccttcactttcaaa

SEQ ID NO: 1800948 - DNA, 15 bp, Homo sapiens
ccttcactttcaaac

SEQ ID NO: 1800949 - DNA, 15 bp, Homo sapiens
cttcactttcaaacc

SEQ ID NO: 1800950 - DNA, 15 bp, Homo sapiens
ttcactttcaaaccc

SEQ ID NO: 1800951 - DNA, 15 bp, Homo sapiens
tcactttcaaaccca

SEQ ID NO: 1800952 - DNA, 15 bp, Homo sapiens
cactttcaaacccag

SEQ ID NO: 1800953 - DNA, 15 bp, Homo sapiens
actttcaaacccagc

SEQ ID NO: 1800954 - DNA, 15 bp, Homo sapiens
ctttcaaacccagcc

SEQ ID NO: 1800955 - DNA, 15 bp, Homo sapiens
tttcaaacccagccg

SEQ ID NO: 1800956 - DNA, 15 bp, Homo sapiens
ttcaaacccagccgg

SEQ ID NO: 1800957 - DNA, 15 bp, Homo sapiens
tcaaacccagccgga

SEQ ID NO: 1800958 - DNA, 15 bp, Homo sapiens
caaacccagccggag

SEQ ID NO: 1800959 - DNA, 15 bp, Homo sapiens
aaacccagccggagg

SEQ ID NO: 1800960 - DNA, 15 bp, Homo sapiens
aacccagccggagga

SEQ ID NO: 1800961 - DNA, 15 bp, Homo sapiens
acccagccggaggag

SEQ ID NO: 1800962 - DNA, 15 bp, Homo sapiens
cccagccggaggagc

SEQ ID NO: 1800963 - DNA, 15 bp, Homo sapiens
ccagccggaggagcg

SEQ ID NO: 1800964 - DNA, 15 bp, Homo sapiens
cagccggaggagcgg

SEQ ID NO: 1800965 - DNA, 15 bp, Homo sapiens
agccggaggagcggg

SEQ ID NO: 1800966 - DNA, 15 bp, Homo sapiens
gccggaggagcgggc

SEQ ID NO: 1800967 - DNA, 15 bp, Homo sapiens
ccggaggagcgggcg

SEQ ID NO: 1800968 - DNA, 15 bp, Homo sapiens
cggaggagcgggcgc

SEQ ID NO: 1800969 - DNA, 15 bp, Homo sapiens
ggaggagcgggcgcc

SEQ ID NO: 1800970 - DNA, 15 bp, Homo sapiens
gaggagcgggcgcct

SEQ ID NO: 1800971 - DNA, 15 bp, Homo sapiens
aggagcgggcgcctt

SEQ ID NO: 1800972 - DNA, 15 bp, Homo sapiens
ggagcgggcgccttt

SEQ ID NO: 1800973 - DNA, 15 bp, Homo sapiens
gagcgggcgccttta

SEQ ID NO: 1800974 - DNA, 15 bp, Homo sapiens
agcgggcgcctttat

SEQ ID NO: 1800975 - DNA, 15 bp, Homo sapiens
gcgggcgcctttatc

SEQ ID NO: 1800976 - DNA, 15 bp, Homo sapiens
cgggcgcctttatcc

SEQ ID NO: 1800977 - DNA, 15 bp, Homo sapiens
gggcgcctttatcct

SEQ ID NO: 1800978 - DNA, 15 bp, Homo sapiens
ggcgcctttatcctt

SEQ ID NO: 1800979 - DNA, 15 bp, Homo sapiens
gcgcctttatccttg

SEQ ID NO: 1800980 - DNA, 15 bp, Homo sapiens
cgcctttatccttgg

SEQ ID NO: 1800981 - DNA, 15 bp, Homo sapiens
gcctttatccttggg

SEQ ID NO: 1800982 - DNA, 15 bp, Homo sapiens
cctttatccttgggg

SEQ ID NO: 1800983 - DNA, 15 bp, Homo sapiens
ctttatccttggggt

SEQ ID NO: 1800984 - DNA, 15 bp, Homo sapiens
tttatccttggggtc

SEQ ID NO: 1800985 - DNA, 15 bp, Homo sapiens
ttatccttggggtca

SEQ ID NO: 1800986 - DNA, 15 bp, Homo sapiens
tatccttggggtcac

SEQ ID NO: 1800987 - DNA, 15 bp, Homo sapiens
atccttggggtcaca

SEQ ID NO: 1800988 - DNA, 15 bp, Homo sapiens
tccttggggtcacaa

SEQ ID NO: 1800989 - DNA, 15 bp, Homo sapiens
ccttggggtcacaat

SEQ ID NO: 1800990 - DNA, 15 bp, Homo sapiens
cttggggtcacaatg

SEQ ID NO: 1800991 - DNA, 15 bp, Homo sapiens
ttggggtcacaatgt

SEQ ID NO: 1800992 - DNA, 15 bp, Homo sapiens
tggggtcacaatgtg

SEQ ID NO: 1800993 - DNA, 15 bp, Homo sapiens
ggggtcacaatgtgt

SEQ ID NO: 1800994 - DNA, 15 bp, Homo sapiens
gggtcacaatgtgtc

SEQ ID NO: 1800995 - DNA, 15 bp, Homo sapiens
ggtcacaatgtgtcc

SEQ ID NO: 1800996 - DNA, 15 bp, Homo sapiens
gtcacaatgtgtcca

SEQ ID NO: 1800997 - DNA, 15 bp, Homo sapiens
tcacaatgtgtccag

SEQ ID NO: 1800998 - DNA, 15 bp, Homo sapiens
cacaatgtgtccagc

SEQ ID NO: 1800999 - DNA, 15 bp, Homo sapiens
acaatgtgtccagcc

SEQ ID NO: 1801000 - DNA, 15 bp, Homo sapiens
caatgtgtccagccc

SEQ ID NO: 1801001 - DNA, 15 bp, Homo sapiens
aatgtgtccagccct

SEQ ID NO: 1801002 - DNA, 15 bp, Homo sapiens
atgtgtccagccctg

SEQ ID NO: 1801003 - DNA, 15 bp, Homo sapiens
tgtgtccagccctga

SEQ ID NO: 1801004 - DNA, 15 bp, Homo sapiens
gtgtccagccctgaa

SEQ ID NO: 1801005 - DNA, 15 bp, Homo sapiens
tgtccagccctgaag

SEQ ID NO: 1801006 - DNA, 15 bp, Homo sapiens
gtccagccctgaagg

SEQ ID NO: 1801007 - DNA, 15 bp, Homo sapiens
tccagccctgaagga

SEQ ID NO: 1801008 - DNA, 15 bp, Homo sapiens
ccagccctgaaggag

SEQ ID NO: 1801009 - DNA, 15 bp, Homo sapiens
cagccctgaaggagg

SEQ ID NO: 1801010 - DNA, 15 bp, Homo sapiens
agccctgaaggaggc

SEQ ID NO: 1801011 - DNA, 15 bp, Homo sapiens
gccctgaaggaggcc

SEQ ID NO: 1801012 - DNA, 15 bp, Homo sapiens
ccctgaaggaggccc

SEQ ID NO: 1801013 - DNA, 15 bp, Homo sapiens
cctgaaggaggcccc

SEQ ID NO: 1801014 - DNA, 15 bp, Homo sapiens
ctgaaggaggcccct

SEQ ID NO: 1801015 - DNA, 15 bp, Homo sapiens
tgaaggaggcccctg

SEQ ID NO: 1801016 - DNA, 15 bp, Homo sapiens
gaaggaggcccctga

SEQ ID NO: 1801017 - DNA, 15 bp, Homo sapiens
aaggaggcccctgag

SEQ ID NO: 1801018 - DNA, 15 bp, Homo sapiens
aggaggcccctgagg

SEQ ID NO: 1801019 - DNA, 15 bp, Homo sapiens
ggaggcccctgaggt

SEQ ID NO: 1801020 - DNA, 15 bp, Homo sapiens
gaggcccctgaggtg

SEQ ID NO: 1801021 - DNA, 15 bp, Homo sapiens
aggcccctgaggtgg

SEQ ID NO: 1801022 - DNA, 15 bp, Homo sapiens
ggcccctgaggtggc

SEQ ID NO: 1801023 - DNA, 15 bp, Homo sapiens
gcccctgaggtggcc

SEQ ID NO: 1801024 - DNA, 15 bp, Homo sapiens
cccctgaggtggcct

SEQ ID NO: 1801025 - DNA, 15 bp, Homo sapiens
ccctgaggtggcctc

SEQ ID NO: 1801026 - DNA, 15 bp, Homo sapiens
cctgaggtggcctca

SEQ ID NO: 1801027 - DNA, 15 bp, Homo sapiens
ctgaggtggcctcaa

SEQ ID NO: 1801028 - DNA, 15 bp, Homo sapiens
tgaggtggcctcaaa

SEQ ID NO: 1801029 - DNA, 15 bp, Homo sapiens
gaggtggcctcaaag

SEQ ID NO: 1801030 - DNA, 15 bp, Homo sapiens
aggtggcctcaaagc

SEQ ID NO: 1801031 - DNA, 15 bp, Homo sapiens
ggtggcctcaaagct

SEQ ID NO: 1801032 - DNA, 15 bp, Homo sapiens
gtggcctcaaagctc

SEQ ID NO: 1801033 - DNA, 15 bp, Homo sapiens
tggcctcaaagctcc

SEQ ID NO: 1801034 - DNA, 15 bp, Homo sapiens
ggcctcaaagctcct

SEQ ID NO: 1801035 - DNA, 15 bp, Homo sapiens
gcctcaaagctcctt

SEQ ID NO: 1801036 - DNA, 15 bp, Homo sapiens
cctcaaagctccttc

SEQ ID NO: 1801037 - DNA, 15 bp, Homo sapiens
ctcaaagctccttct

SEQ ID NO: 1801038 - DNA, 15 bp, Homo sapiens
tcaaagctccttctg

SEQ ID NO: 1801039 - DNA, 15 bp, Homo sapiens
caaagctccttctgg

SEQ ID NO: 1801040 - DNA, 15 bp, Homo sapiens
aaagctccttctggc

SEQ ID NO: 1801041 - DNA, 15 bp, Homo sapiens
aagctccttctggcc

SEQ ID NO: 1801042 - DNA, 15 bp, Homo sapiens
agctccttctggccc

SEQ ID NO: 1801043 - DNA, 15 bp, Homo sapiens
gctccttctggccca

SEQ ID NO: 1801044 - DNA, 15 bp, Homo sapiens
ctccttctggcccac

SEQ ID NO: 1801045 - DNA, 15 bp, Homo sapiens
tccttctggcccaca

SEQ ID NO: 1801046 - DNA, 15 bp, Homo sapiens
ccttctggcccacag

SEQ ID NO: 1801047 - DNA, 15 bp, Homo sapiens
cttctggcccacagg

SEQ ID NO: 1801048 - DNA, 15 bp, Homo sapiens
ttctggcccacaggt

SEQ ID NO: 1801049 - DNA, 15 bp, Homo sapiens
tctggcccacaggtg

SEQ ID NO: 1801050 - DNA, 15 bp, Homo sapiens
ctggcccacaggtgg

SEQ ID NO: 1801051 - DNA, 15 bp, Homo sapiens
tggcccacaggtgga

SEQ ID NO: 1801052 - DNA, 15 bp, Homo sapiens
ggcccacaggtggag

SEQ ID NO: 1801053 - DNA, 15 bp, Homo sapiens
gcccacaggtggagg

SEQ ID NO: 1801054 - DNA, 15 bp, Homo sapiens
cccacaggtggagga

SEQ ID NO: 1801055 - DNA, 15 bp, Homo sapiens
ccacaggtggaggac

SEQ ID NO: 1801056 - DNA, 15 bp, Homo sapiens
cacaggtggaggacg

SEQ ID NO: 1801057 - DNA, 15 bp, Homo sapiens
acaggtggaggacgt

SEQ ID NO: 1801058 - DNA, 15 bp, Homo sapiens
caggtggaggacgtg

SEQ ID NO: 1801059 - DNA, 15 bp, Homo sapiens
aggtggaggacgtga

SEQ ID NO: 1801060 - DNA, 15 bp, Homo sapiens
ggtggaggacgtgat

SEQ ID NO: 1801061 - DNA, 15 bp, Homo sapiens
gtggaggacgtgatc

SEQ ID NO: 1801062 - DNA, 15 bp, Homo sapiens
tggaggacgtgatcg

SEQ ID NO: 1801063 - DNA, 15 bp, Homo sapiens
ggaggacgtgatcgc

SEQ ID NO: 1801064 - DNA, 15 bp, Homo sapiens
gaggacgtgatcgcg

SEQ ID NO: 1801065 - DNA, 15 bp, Homo sapiens
aggacgtgatcgcgg

SEQ ID NO: 1801066 - DNA, 15 bp, Homo sapiens
ggacgtgatcgcgga

SEQ ID NO: 1801067 - DNA, 15 bp, Homo sapiens
gacgtgatcgcggag

SEQ ID NO: 1801068 - DNA, 15 bp, Homo sapiens
acgtgatcgcggagc

SEQ ID NO: 1801069 - DNA, 15 bp, Homo sapiens
cgtgatcgcggagct

SEQ ID NO: 1801070 - DNA, 15 bp, Homo sapiens
gtgatcgcggagctg

SEQ ID NO: 1801071 - DNA, 15 bp, Homo sapiens
tgatcgcggagctgc

SEQ ID NO: 1801072 - DNA, 15 bp, Homo sapiens
gatcgcggagctgcg

SEQ ID NO: 1801073 - DNA, 15 bp, Homo sapiens
atcgcggagctgcgg

SEQ ID NO: 1801074 - DNA, 15 bp, Homo sapiens
tcgcggagctgcggc

SEQ ID NO: 1801075 - DNA, 15 bp, Homo sapiens
cgcggagctgcggct

SEQ ID NO: 1801076 - DNA, 15 bp, Homo sapiens
gcggagctgcggctt

SEQ ID NO: 1801077 - DNA, 15 bp, Homo sapiens
cggagctgcggctta

SEQ ID NO: 1801078 - DNA, 15 bp, Homo sapiens
ggagctgcggcttag

SEQ ID NO: 1801079 - DNA, 15 bp, Homo sapiens
gagctgcggcttagg

SEQ ID NO: 1801080 - DNA, 15 bp, Homo sapiens
agctgcggcttaggc

SEQ ID NO: 1801081 - DNA, 15 bp, Homo sapiens
gctgcggcttaggca

SEQ ID NO: 1801082 - DNA, 15 bp, Homo sapiens
ctgcggcttaggcag

SEQ ID NO: 1801083 - DNA, 15 bp, Homo sapiens
tgcggcttaggcagt

SEQ ID NO: 1801084 - DNA, 15 bp, Homo sapiens
gcggcttaggcagtg

SEQ ID NO: 1801085 - DNA, 15 bp, Homo sapiens
cggcttaggcagtgc

SEQ ID NO: 1801086 - DNA, 15 bp, Homo sapiens
ggcttaggcagtgcg

SEQ ID NO: 1801087 - DNA, 15 bp, Homo sapiens
gcttaggcagtgcgc

SEQ ID NO: 1801088 - DNA, 15 bp, Homo sapiens
cttaggcagtgcgct

SEQ ID NO: 1801089 - DNA, 15 bp, Homo sapiens
ttaggcagtgcgctg

SEQ ID NO: 1801090 - DNA, 15 bp, Homo sapiens
taggcagtgcgctga

SEQ ID NO: 1801091 - DNA, 15 bp, Homo sapiens
aggcagtgcgctgac

SEQ ID NO: 1801092 - DNA, 15 bp, Homo sapiens
ggcagtgcgctgaca

SEQ ID NO: 1801093 - DNA, 15 bp, Homo sapiens
gcagtgcgctgacac

SEQ ID NO: 1801094 - DNA, 15 bp, Homo sapiens
cagtgcgctgacacc

SEQ ID NO: 1801095 - DNA, 15 bp, Homo sapiens
agtgcgctgacaccc

SEQ ID NO: 1801096 - DNA, 15 bp, Homo sapiens
gtgcgctgacacccg

SEQ ID NO: 1801097 - DNA, 15 bp, Homo sapiens
tgcgctgacacccgc

SEQ ID NO: 1801098 - DNA, 15 bp, Homo sapiens
gcgctgacacccgcg

SEQ ID NO: 1801099 - DNA, 15 bp, Homo sapiens
cgctgacacccgcgt

SEQ ID NO: 1801100 - DNA, 15 bp, Homo sapiens
gctgacacccgcgtg

SEQ ID NO: 1801101 - DNA, 15 bp, Homo sapiens
ctgacacccgcgtgg

SEQ ID NO: 1801102 - DNA, 15 bp, Homo sapiens
tgacacccgcgtggg

SEQ ID NO: 1801103 - DNA, 15 bp, Homo sapiens
gacacccgcgtgggc

SEQ ID NO: 1801104 - DNA, 15 bp, Homo sapiens
acacccgcgtgggca

SEQ ID NO: 1801105 - DNA, 15 bp, Homo sapiens
cacccgcgtgggcaa

SEQ ID NO: 1801106 - DNA, 15 bp, Homo sapiens
acccgcgtgggcaac

SEQ ID NO: 1801107 - DNA, 15 bp, Homo sapiens
cccgcgtgggcaaca

SEQ ID NO: 1801108 - DNA, 15 bp, Homo sapiens
ccgcgtgggcaacat

SEQ ID NO: 1801109 - DNA, 15 bp, Homo sapiens
cgcgtgggcaacatg

SEQ ID NO: 1801110 - DNA, 15 bp, Homo sapiens
gcgtgggcaacatgt

SEQ ID NO: 1801111 - DNA, 15 bp, Homo sapiens
cgtgggcaacatgta

SEQ ID NO: 1801112 - DNA, 15 bp, Homo sapiens
gtgggcaacatgtac

SEQ ID NO: 1801113 - DNA, 15 bp, Homo sapiens
tgggcaacatgtacg

SEQ ID NO: 1801114 - DNA, 15 bp, Homo sapiens
gggcaacatgtacgt

SEQ ID NO: 1801115 - DNA, 15 bp, Homo sapiens
ggcaacatgtacgtg

SEQ ID NO: 1801116 - DNA, 15 bp, Homo sapiens
gcaacatgtacgtgc

SEQ ID NO: 1801117 - DNA, 15 bp, Homo sapiens
caacatgtacgtgcg

SEQ ID NO: 1801118 - DNA, 15 bp, Homo sapiens
aacatgtacgtgcgg

SEQ ID NO: 1801119 - DNA, 15 bp, Homo sapiens
acatgtacgtgcggg

SEQ ID NO: 1801120 - DNA, 15 bp, Homo sapiens
catgtacgtgcgggg

SEQ ID NO: 1801121 - DNA, 15 bp, Homo sapiens
atgtacgtgcggggg

SEQ ID NO: 1801122 - DNA, 15 bp, Homo sapiens
tgtacgtgcgggggt

SEQ ID NO: 1801123 - DNA, 15 bp, Homo sapiens
gtacgtgcgggggtt

SEQ ID NO: 1801124 - DNA, 15 bp, Homo sapiens
tacgtgcgggggttg

SEQ ID NO: 1801125 - DNA, 15 bp, Homo sapiens
acgtgcgggggttgt

SEQ ID NO: 1801126 - DNA, 15 bp, Homo sapiens
cgtgcgggggttgtc

SEQ ID NO: 1801127 - DNA, 15 bp, Homo sapiens
gtgcgggggttgtcg

SEQ ID NO: 1801128 - DNA, 15 bp, Homo sapiens
tgcgggggttgtcgg

SEQ ID NO: 1801129 - DNA, 15 bp, Homo sapiens
gcgggggttgtcggg

SEQ ID NO: 1801130 - DNA, 15 bp, Homo sapiens
cgggggttgtcgggg

SEQ ID NO: 1801131 - DNA, 15 bp, Homo sapiens
gggggttgtcggggg

SEQ ID NO: 1801132 - DNA, 15 bp, Homo sapiens
ggggttgtcgggggg

SEQ ID NO: 1801133 - DNA, 15 bp, Homo sapiens
gggttgtcggggggt

SEQ ID NO: 1801134 - DNA, 15 bp, Homo sapiens
ggttgtcggggggtg

SEQ ID NO: 1801135 - DNA, 15 bp, Homo sapiens
gttgtcggggggtga

SEQ ID NO: 1801136 - DNA, 15 bp, Homo sapiens
ttgtcggggggtgag

SEQ ID NO: 1801137 - DNA, 15 bp, Homo sapiens
tgtcggggggtgagc

SEQ ID NO: 1801138 - DNA, 15 bp, Homo sapiens
gtcggggggtgagcg

SEQ ID NO: 1801139 - DNA, 15 bp, Homo sapiens
tcggggggtgagcgc

SEQ ID NO: 1801140 - DNA, 15 bp, Homo sapiens
cggggggtgagcgca

SEQ ID NO: 1801141 - DNA, 15 bp, Homo sapiens
ggggggtgagcgcag

SEQ ID NO: 1801142 - DNA, 15 bp, Homo sapiens
gggggtgagcgcagg

SEQ ID NO: 1801143 - DNA, 15 bp, Homo sapiens
ggggtgagcgcagga

SEQ ID NO: 1801144 - DNA, 15 bp, Homo sapiens
gggtgagcgcaggag

SEQ ID NO: 1801145 - DNA, 15 bp, Homo sapiens
ggtgagcgcaggaga

SEQ ID NO: 1801146 - DNA, 15 bp, Homo sapiens
gtgagcgcaggagag

SEQ ID NO: 1801147 - DNA, 15 bp, Homo sapiens
tgagcgcaggagagt

SEQ ID NO: 1801148 - DNA, 15 bp, Homo sapiens
gagcgcaggagagtc

SEQ ID NO: 1801149 - DNA, 15 bp, Homo sapiens
agcgcaggagagtca

SEQ ID NO: 1801150 - DNA, 15 bp, Homo sapiens
gcgcaggagagtcag

SEQ ID NO: 1801151 - DNA, 15 bp, Homo sapiens
cgcaggagagtcagc

SEQ ID NO: 1801152 - DNA, 15 bp, Homo sapiens
gcaggagagtcagca

SEQ ID NO: 1801153 - DNA, 15 bp, Homo sapiens
caggagagtcagcat

SEQ ID NO: 1801154 - DNA, 15 bp, Homo sapiens
aggagagtcagcatt

SEQ ID NO: 1801155 - DNA, 15 bp, Homo sapiens
ggagagtcagcattg

SEQ ID NO: 1801156 - DNA, 15 bp, Homo sapiens
gagagtcagcattgg

SEQ ID NO: 1801157 - DNA, 15 bp, Homo sapiens
agagtcagcattggg

SEQ ID NO: 1801158 - DNA, 15 bp, Homo sapiens
gagtcagcattgggg

SEQ ID NO: 1801159 - DNA, 15 bp, Homo sapiens
agtcagcattggggt

SEQ ID NO: 1801160 - DNA, 15 bp, Homo sapiens
gtcagcattggggtg

SEQ ID NO: 1801161 - DNA, 15 bp, Homo sapiens
tcagcattggggtgc

SEQ ID NO: 1801162 - DNA, 15 bp, Homo sapiens
cagcattggggtgca

SEQ ID NO: 1801163 - DNA, 15 bp, Homo sapiens
agcattggggtgcag

SEQ ID NO: 1801164 - DNA, 15 bp, Homo sapiens
gcattggggtgcagc

SEQ ID NO: 1801165 - DNA, 15 bp, Homo sapiens
cattggggtgcagct

SEQ ID NO: 1801166 - DNA, 15 bp, Homo sapiens
attggggtgcagctc

SEQ ID NO: 1801167 - DNA, 15 bp, Homo sapiens
ttggggtgcagctcc

SEQ ID NO: 1801168 - DNA, 15 bp, Homo sapiens
tggggtgcagctcct

SEQ ID NO: 1801169 - DNA, 15 bp, Homo sapiens
ggggtgcagctcctg

SEQ ID NO: 1801170 - DNA, 15 bp, Homo sapiens
gggtgcagctcctgt

SEQ ID NO: 1801171 - DNA, 15 bp, Homo sapiens
ggtgcagctcctgtg

SEQ ID NO: 1801172 - DNA, 15 bp, Homo sapiens
gtgcagctcctgtgg

SEQ ID NO: 1801173 - DNA, 15 bp, Homo sapiens
tgcagctcctgtgga

SEQ ID NO: 1801174 - DNA, 15 bp, Homo sapiens
gcagctcctgtggaa

SEQ ID NO: 1801175 - DNA, 15 bp, Homo sapiens
cagctcctgtggaac

SEQ ID NO: 1801176 - DNA, 15 bp, Homo sapiens
agctcctgtggaacc

SEQ ID NO: 1801177 - DNA, 15 bp, Homo sapiens
gctcctgtggaaccc

SEQ ID NO: 1801178 - DNA, 15 bp, Homo sapiens
ctcctgtggaaccca

SEQ ID NO: 1801179 - DNA, 15 bp, Homo sapiens
tcctgtggaacccag

SEQ ID NO: 1801180 - DNA, 15 bp, Homo sapiens
cctgtggaacccagg

SEQ ID NO: 1801181 - DNA, 15 bp, Homo sapiens
ctgtggaacccaggt

SEQ ID NO: 1801182 - DNA, 15 bp, Homo sapiens
tgtggaacccaggtg

SEQ ID NO: 1801183 - DNA, 15 bp, Homo sapiens
gtggaacccaggtga

SEQ ID NO: 1801184 - DNA, 15 bp, Homo sapiens
tggaacccaggtgag

SEQ ID NO: 1801185 - DNA, 15 bp, Homo sapiens
ggaacccaggtgagg

SEQ ID NO: 1801186 - DNA, 15 bp, Homo sapiens
gaacccaggtgaggg

SEQ ID NO: 1801187 - DNA, 15 bp, Homo sapiens
aacccaggtgagggc

SEQ ID NO: 1801188 - DNA, 15 bp, Homo sapiens
acccaggtgagggcc

SEQ ID NO: 1801189 - DNA, 15 bp, Homo sapiens
cccaggtgagggcct

SEQ ID NO: 1801190 - DNA, 15 bp, Homo sapiens
ccaggtgagggcctg

SEQ ID NO: 1801191 - DNA, 15 bp, Homo sapiens
caggtgagggcctgg

SEQ ID NO: 1801192 - DNA, 15 bp, Homo sapiens
aggtgagggcctggg

SEQ ID NO: 1801193 - DNA, 15 bp, Homo sapiens
ggtgagggcctgggg

SEQ ID NO: 1801194 - DNA, 15 bp, Homo sapiens
gtgagggcctggggg

SEQ ID NO: 1801195 - DNA, 15 bp, Homo sapiens
tgagggcctgggggg

SEQ ID NO: 1801196 - DNA, 15 bp, Homo sapiens
gagggcctggggggc

SEQ ID NO: 1801197 - DNA, 15 bp, Homo sapiens
agggcctggggggca

SEQ ID NO: 1801198 - DNA, 15 bp, Homo sapiens
gggcctggggggcag

SEQ ID NO: 1801199 - DNA, 15 bp, Homo sapiens
ggcctggggggcaga

SEQ ID NO: 1801200 - DNA, 15 bp, Homo sapiens
gcctggggggcagat

SEQ ID NO: 1801201 - DNA, 15 bp, Homo sapiens
cctggggggcagatg

SEQ ID NO: 1801202 - DNA, 15 bp, Homo sapiens
ctggggggcagatgg

SEQ ID NO: 1801203 - DNA, 15 bp, Homo sapiens
tggggggcagatggg

SEQ ID NO: 1801204 - DNA, 15 bp, Homo sapiens
ggggggcagatgggg

SEQ ID NO: 1801205 - DNA, 15 bp, Homo sapiens
gggggcagatggggg

SEQ ID NO: 1801206 - DNA, 15 bp, Homo sapiens
ggggcagatgggggc

SEQ ID NO: 1801207 - DNA, 15 bp, Homo sapiens
gggcagatgggggca

SEQ ID NO: 1801208 - DNA, 15 bp, Homo sapiens
ggcagatgggggcag

SEQ ID NO: 1801209 - DNA, 15 bp, Homo sapiens
gcagatgggggcaga

SEQ ID NO: 1801210 - DNA, 15 bp, Homo sapiens
cagatgggggcagag

SEQ ID NO: 1801211 - DNA, 15 bp, Homo sapiens
agatgggggcagagg

SEQ ID NO: 1801212 - DNA, 15 bp, Homo sapiens
gatgggggcagaggg

SEQ ID NO: 1801213 - DNA, 15 bp, Homo sapiens
atgggggcagaggga

SEQ ID NO: 1801214 - DNA, 15 bp, Homo sapiens
tgggggcagagggac

SEQ ID NO: 1801215 - DNA, 15 bp, Homo sapiens
gggggcagagggacc

SEQ ID NO: 1801216 - DNA, 15 bp, Homo sapiens
ggggcagagggacct

SEQ ID NO: 1801217 - DNA, 15 bp, Homo sapiens
gggcagagggacctg

SEQ ID NO: 1801218 - DNA, 15 bp, Homo sapiens
ggcagagggacctgt

SEQ ID NO: 1801219 - DNA, 15 bp, Homo sapiens
gcagagggacctgtg

SEQ ID NO: 1801220 - DNA, 15 bp, Homo sapiens
cagagggacctgtgc

SEQ ID NO: 1801221 - DNA, 15 bp, Homo sapiens
agagggacctgtgcg

SEQ ID NO: 1801222 - DNA, 15 bp, Homo sapiens
gagggacctgtgcgg

SEQ ID NO: 1801223 - DNA, 15 bp, Homo sapiens
agggacctgtgcggt

SEQ ID NO: 1801224 - DNA, 15 bp, Homo sapiens
gggacctgtgcggtc

SEQ ID NO: 1801225 - DNA, 15 bp, Homo sapiens
ggacctgtgcggtcc

SEQ ID NO: 1801226 - DNA, 15 bp, Homo sapiens
gacctgtgcggtccc

SEQ ID NO: 1801227 - DNA, 15 bp, Homo sapiens
acctgtgcggtcccc

SEQ ID NO: 1801228 - DNA, 15 bp, Homo sapiens
cctgtgcggtcccct

SEQ ID NO: 1801229 - DNA, 15 bp, Homo sapiens
ctgtgcggtcccctc

SEQ ID NO: 1801230 - DNA, 15 bp, Homo sapiens
tgtgcggtcccctca

SEQ ID NO: 1801231 - DNA, 15 bp, Homo sapiens
gtgcggtcccctcag

SEQ ID NO: 1801232 - DNA, 15 bp, Homo sapiens
tgcggtcccctcagg

SEQ ID NO: 1801233 - DNA, 15 bp, Homo sapiens
gcggtcccctcaggc

SEQ ID NO: 1801234 - DNA, 15 bp, Homo sapiens
cggtcccctcaggct

SEQ ID NO: 1801235 - DNA, 15 bp, Homo sapiens
ggtcccctcaggctt

SEQ ID NO: 1801236 - DNA, 15 bp, Homo sapiens
gtcccctcaggcttg

SEQ ID NO: 1801237 - DNA, 15 bp, Homo sapiens
tcccctcaggcttgg

SEQ ID NO: 1801238 - DNA, 15 bp, Homo sapiens
cccctcaggcttggc

SEQ ID NO: 1801239 - DNA, 15 bp, Homo sapiens
ccctcaggcttggct

SEQ ID NO: 1801240 - DNA, 15 bp, Homo sapiens
cctcaggcttggctt

SEQ ID NO: 1801241 - DNA, 15 bp, Homo sapiens
ctcaggcttggcttg

SEQ ID NO: 1801242 - DNA, 15 bp, Homo sapiens
tcaggcttggcttgg

SEQ ID NO: 1801243 - DNA, 15 bp, Homo sapiens
caggcttggcttggt

SEQ ID NO: 1801244 - DNA, 15 bp, Homo sapiens
aggcttggcttggtc

SEQ ID NO: 1801245 - DNA, 15 bp, Homo sapiens
ggcttggcttggtct

SEQ ID NO: 1801246 - DNA, 15 bp, Homo sapiens
gcttggcttggtctg

SEQ ID NO: 1801247 - DNA, 15 bp, Homo sapiens
cttggcttggtctgg

SEQ ID NO: 1801248 - DNA, 15 bp, Homo sapiens
ttggcttggtctggc

SEQ ID NO: 1801249 - DNA, 15 bp, Homo sapiens
tggcttggtctggcc

SEQ ID NO: 1801250 - DNA, 15 bp, Homo sapiens
ggcttggtctggcca

SEQ ID NO: 1801251 - DNA, 15 bp, Homo sapiens
gcttggtctggccag

SEQ ID NO: 1801252 - DNA, 15 bp, Homo sapiens
cttggtctggccaga

SEQ ID NO: 1801253 - DNA, 15 bp, Homo sapiens
ttggtctggccagag

SEQ ID NO: 1801254 - DNA, 15 bp, Homo sapiens
tggtctggccagagc

SEQ ID NO: 1801255 - DNA, 15 bp, Homo sapiens
ggtctggccagagcc

SEQ ID NO: 1801256 - DNA, 15 bp, Homo sapiens
gtctggccagagccc

SEQ ID NO: 1801257 - DNA, 15 bp, Homo sapiens
tctggccagagcccc

SEQ ID NO: 1801258 - DNA, 15 bp, Homo sapiens
ctggccagagcccca

SEQ ID NO: 1801259 - DNA, 15 bp, Homo sapiens
tggccagagccccac

SEQ ID NO: 1801260 - DNA, 15 bp, Homo sapiens
ggccagagccccacc

SEQ ID NO: 1801261 - DNA, 15 bp, Homo sapiens
gccagagccccaccg

SEQ ID NO: 1801262 - DNA, 15 bp, Homo sapiens
ccagagccccaccga

SEQ ID NO: 1801263 - DNA, 15 bp, Homo sapiens
cagagccccaccgac

SEQ ID NO: 1801264 - DNA, 15 bp, Homo sapiens
agagccccaccgact

SEQ ID NO: 1801265 - DNA, 15 bp, Homo sapiens
gagccccaccgactc

SEQ ID NO: 1801266 - DNA, 15 bp, Homo sapiens
agccccaccgactca

SEQ ID NO: 1801267 - DNA, 15 bp, Homo sapiens
gccccaccgactcac

SEQ ID NO: 1801268 - DNA, 15 bp, Homo sapiens
ccccaccgactcacc

SEQ ID NO: 1801269 - DNA, 15 bp, Homo sapiens
cccaccgactcacca

SEQ ID NO: 1801270 - DNA, 15 bp, Homo sapiens
ccaccgactcaccag

SEQ ID NO: 1801271 - DNA, 15 bp, Homo sapiens
caccgactcaccagg

SEQ ID NO: 1801272 - DNA, 15 bp, Homo sapiens
accgactcaccaggc

SEQ ID NO: 1801273 - DNA, 15 bp, Homo sapiens
ccgactcaccaggct

SEQ ID NO: 1801274 - DNA, 15 bp, Homo sapiens
cgactcaccaggctc

SEQ ID NO: 1801275 - DNA, 15 bp, Homo sapiens
gactcaccaggctcc

SEQ ID NO: 1801276 - DNA, 15 bp, Homo sapiens
actcaccaggctcct

SEQ ID NO: 1801277 - DNA, 15 bp, Homo sapiens
ctcaccaggctcctc

SEQ ID NO: 1801278 - DNA, 15 bp, Homo sapiens
tcaccaggctcctct

SEQ ID NO: 1801279 - DNA, 15 bp, Homo sapiens
caccaggctcctctc

SEQ ID NO: 1801280 - DNA, 15 bp, Homo sapiens
accaggctcctctct

SEQ ID NO: 1801281 - DNA, 15 bp, Homo sapiens
ccaggctcctctctg

SEQ ID NO: 1801282 - DNA, 15 bp, Homo sapiens
caggctcctctctgt

SEQ ID NO: 1801283 - DNA, 15 bp, Homo sapiens
aggctcctctctgtg

SEQ ID NO: 1801284 - DNA, 15 bp, Homo sapiens
ggctcctctctgtgt

SEQ ID NO: 1801285 - DNA, 15 bp, Homo sapiens
gctcctctctgtgtt

SEQ ID NO: 1801286 - DNA, 15 bp, Homo sapiens
ctcctctctgtgttg

SEQ ID NO: 1801287 - DNA, 15 bp, Homo sapiens
tcctctctgtgttgg

SEQ ID NO: 1801288 - DNA, 15 bp, Homo sapiens
cctctctgtgttgga

SEQ ID NO: 1801289 - DNA, 15 bp, Homo sapiens
ctctctgtgttggaa

SEQ ID NO: 1801290 - DNA, 15 bp, Homo sapiens
tctctgtgttggaaa

SEQ ID NO: 1801291 - DNA, 15 bp, Homo sapiens
ctctgtgttggaaag

SEQ ID NO: 1801292 - DNA, 15 bp, Homo sapiens
tctgtgttggaaagg

SEQ ID NO: 1801293 - DNA, 15 bp, Homo sapiens
ctgtgttggaaagga

SEQ ID NO: 1801294 - DNA, 15 bp, Homo sapiens
tgtgttggaaaggaa

SEQ ID NO: 1801295 - DNA, 15 bp, Homo sapiens
gtgttggaaaggaat

SEQ ID NO: 1801296 - DNA, 15 bp, Homo sapiens
tgttggaaaggaatc

SEQ ID NO: 1801297 - DNA, 15 bp, Homo sapiens
gttggaaaggaatcc

SEQ ID NO: 1801298 - DNA, 15 bp, Homo sapiens
ttggaaaggaatcct

SEQ ID NO: 1801299 - DNA, 15 bp, Homo sapiens
tggaaaggaatcctt

SEQ ID NO: 1801300 - DNA, 15 bp, Homo sapiens
ggaaaggaatcctta

SEQ ID NO: 1801301 - DNA, 15 bp, Homo sapiens
gaaaggaatccttat

SEQ ID NO: 1801302 - DNA, 15 bp, Homo sapiens
aaaggaatccttatt

SEQ ID NO: 1801303 - DNA, 15 bp, Homo sapiens
aaggaatccttattc

SEQ ID NO: 1801304 - DNA, 15 bp, Homo sapiens
aggaatccttattct

SEQ ID NO: 1801305 - DNA, 15 bp, Homo sapiens
ggaatccttattctc

SEQ ID NO: 1801306 - DNA, 15 bp, Homo sapiens
gaatccttattctcg

SEQ ID NO: 1801307 - DNA, 15 bp, Homo sapiens
aatccttattctcga

SEQ ID NO: 1801308 - DNA, 15 bp, Homo sapiens
atccttattctcgac

SEQ ID NO: 1801309 - DNA, 15 bp, Homo sapiens
tccttattctcgacg

SEQ ID NO: 1801310 - DNA, 15 bp, Homo sapiens
ccttattctcgacga

SEQ ID NO: 1801311 - DNA, 15 bp, Homo sapiens
cttattctcgacgaa

SEQ ID NO: 1801312 - DNA, 15 bp, Homo sapiens
ttattctcgacgaac

SEQ ID NO: 1801313 - DNA, 15 bp, Homo sapiens
tattctcgacgaacc

SEQ ID NO: 1801314 - DNA, 15 bp, Homo sapiens
attctcgacgaaccc

SEQ ID NO: 1801315 - DNA, 15 bp, Homo sapiens
ttctcgacgaaccca

SEQ ID NO: 1801316 - DNA, 15 bp, Homo sapiens
tctcgacgaacccac

SEQ ID NO: 1801317 - DNA, 15 bp, Homo sapiens
ctcgacgaacccacc

SEQ ID NO: 1801318 - DNA, 15 bp, Homo sapiens
tcgacgaacccacct

SEQ ID NO: 1801319 - DNA, 15 bp, Homo sapiens
cgacgaacccacctc

SEQ ID NO: 1801320 - DNA, 15 bp, Homo sapiens
gacgaacccacctct

SEQ ID NO: 1801321 - DNA, 15 bp, Homo sapiens
acgaacccacctctg

SEQ ID NO: 1801322 - DNA, 15 bp, Homo sapiens
cgaacccacctctgg

SEQ ID NO: 1801323 - DNA, 15 bp, Homo sapiens
gaacccacctctggg

SEQ ID NO: 1801324 - DNA, 15 bp, Homo sapiens
aacccacctctgggc

SEQ ID NO: 1801325 - DNA, 15 bp, Homo sapiens
acccacctctgggct

SEQ ID NO: 1801326 - DNA, 15 bp, Homo sapiens
cccacctctgggctc

SEQ ID NO: 1801327 - DNA, 15 bp, Homo sapiens
ccacctctgggctcg

SEQ ID NO: 1801328 - DNA, 15 bp, Homo sapiens
cacctctgggctcga

SEQ ID NO: 1801329 - DNA, 15 bp, Homo sapiens
acctctgggctcgac

SEQ ID NO: 1801330 - DNA, 15 bp, Homo sapiens
cctctgggctcgaca

SEQ ID NO: 1801331 - DNA, 15 bp, Homo sapiens
ctctgggctcgacag

SEQ ID NO: 1801332 - DNA, 15 bp, Homo sapiens
tctgggctcgacagc

SEQ ID NO: 1801333 - DNA, 15 bp, Homo sapiens
ctgggctcgacagct

SEQ ID NO: 1801334 - DNA, 15 bp, Homo sapiens
tgggctcgacagctt

SEQ ID NO: 1801335 - DNA, 15 bp, Homo sapiens
gggctcgacagcttc

SEQ ID NO: 1801336 - DNA, 15 bp, Homo sapiens
ggctcgacagcttca

SEQ ID NO: 1801337 - DNA, 15 bp, Homo sapiens
gctcgacagcttcac

SEQ ID NO: 1801338 - DNA, 15 bp, Homo sapiens
ctcgacagcttcaca

SEQ ID NO: 1801339 - DNA, 15 bp, Homo sapiens
tcgacagcttcacag

SEQ ID NO: 1801340 - DNA, 15 bp, Homo sapiens
cgacagcttcacagc

SEQ ID NO: 1801341 - DNA, 15 bp, Homo sapiens
gacagcttcacagcc

SEQ ID NO: 1801342 - DNA, 15 bp, Homo sapiens
acagcttcacagccc

SEQ ID NO: 1801343 - DNA, 15 bp, Homo sapiens
cagcttcacagccca

SEQ ID NO: 1801344 - DNA, 15 bp, Homo sapiens
agcttcacagcccac

SEQ ID NO: 1801345 - DNA, 15 bp, Homo sapiens
gcttcacagcccaca

SEQ ID NO: 1801346 - DNA, 15 bp, Homo sapiens
cttcacagcccacaa

SEQ ID NO: 1801347 - DNA, 15 bp, Homo sapiens
ttcacagcccacaac

SEQ ID NO: 1801348 - DNA, 15 bp, Homo sapiens
tcacagcccacaacc

SEQ ID NO: 1801349 - DNA, 15 bp, Homo sapiens
cacagcccacaacct

SEQ ID NO: 1801350 - DNA, 15 bp, Homo sapiens
acagcccacaacctg

SEQ ID NO: 1801351 - DNA, 15 bp, Homo sapiens
cagcccacaacctgg

SEQ ID NO: 1801352 - DNA, 15 bp, Homo sapiens
agcccacaacctggt

SEQ ID NO: 1801353 - DNA, 15 bp, Homo sapiens
gcccacaacctggtg

SEQ ID NO: 1801354 - DNA, 15 bp, Homo sapiens
cccacaacctggtga

SEQ ID NO: 1801355 - DNA, 15 bp, Homo sapiens
ccacaacctggtgaa

SEQ ID NO: 1801356 - DNA, 15 bp, Homo sapiens
cacaacctggtgaag

SEQ ID NO: 1801357 - DNA, 15 bp, Homo sapiens
acaacctggtgaaga

SEQ ID NO: 1801358 - DNA, 15 bp, Homo sapiens
caacctggtgaagac

SEQ ID NO: 1801359 - DNA, 15 bp, Homo sapiens
aacctggtgaagacc

SEQ ID NO: 1801360 - DNA, 15 bp, Homo sapiens
acctggtgaagacct

SEQ ID NO: 1801361 - DNA, 15 bp, Homo sapiens
cctggtgaagacctt

SEQ ID NO: 1801362 - DNA, 15 bp, Homo sapiens
ctggtgaagaccttg

SEQ ID NO: 1801363 - DNA, 15 bp, Homo sapiens
tggtgaagaccttgt

SEQ ID NO: 1801364 - DNA, 15 bp, Homo sapiens
ggtgaagaccttgtc

SEQ ID NO: 1801365 - DNA, 15 bp, Homo sapiens
gtgaagaccttgtcc

SEQ ID NO: 1801366 - DNA, 15 bp, Homo sapiens
tgaagaccttgtcca

SEQ ID NO: 1801367 - DNA, 15 bp, Homo sapiens
gaagaccttgtccag

SEQ ID NO: 1801368 - DNA, 15 bp, Homo sapiens
aagaccttgtccagg

SEQ ID NO: 1801369 - DNA, 15 bp, Homo sapiens
agaccttgtccaggc

SEQ ID NO: 1801370 - DNA, 15 bp, Homo sapiens
gaccttgtccaggct

SEQ ID NO: 1801371 - DNA, 15 bp, Homo sapiens
accttgtccaggctg

SEQ ID NO: 1801372 - DNA, 15 bp, Homo sapiens
ccttgtccaggctgg

SEQ ID NO: 1801373 - DNA, 15 bp, Homo sapiens
cttgtccaggctggc

SEQ ID NO: 1801374 - DNA, 15 bp, Homo sapiens
ttgtccaggctggcc

SEQ ID NO: 1801375 - DNA, 15 bp, Homo sapiens
tgtccaggctggcca

SEQ ID NO: 1801376 - DNA, 15 bp, Homo sapiens
gtccaggctggccaa

SEQ ID NO: 1801377 - DNA, 15 bp, Homo sapiens
tccaggctggccaaa

SEQ ID NO: 1801378 - DNA, 15 bp, Homo sapiens
ccaggctggccaaag

SEQ ID NO: 1801379 - DNA, 15 bp, Homo sapiens
caggctggccaaagg

SEQ ID NO: 1801380 - DNA, 15 bp, Homo sapiens
aggctggccaaaggc

SEQ ID NO: 1801381 - DNA, 15 bp, Homo sapiens
ggctggccaaaggca

SEQ ID NO: 1801382 - DNA, 15 bp, Homo sapiens
gctggccaaaggcaa

SEQ ID NO: 1801383 - DNA, 15 bp, Homo sapiens
ctggccaaaggcaac

SEQ ID NO: 1801384 - DNA, 15 bp, Homo sapiens
tggccaaaggcaacc

SEQ ID NO: 1801385 - DNA, 15 bp, Homo sapiens
ggccaaaggcaaccg

SEQ ID NO: 1801386 - DNA, 15 bp, Homo sapiens
gccaaaggcaaccgg

SEQ ID NO: 1801387 - DNA, 15 bp, Homo sapiens
ccaaaggcaaccggc

SEQ ID NO: 1801388 - DNA, 15 bp, Homo sapiens
caaaggcaaccggct

SEQ ID NO: 1801389 - DNA, 15 bp, Homo sapiens
aaaggcaaccggctg

SEQ ID NO: 1801390 - DNA, 15 bp, Homo sapiens
aaggcaaccggctgg

SEQ ID NO: 1801391 - DNA, 15 bp, Homo sapiens
aggcaaccggctggt

SEQ ID NO: 1801392 - DNA, 15 bp, Homo sapiens
ggcaaccggctggtg

SEQ ID NO: 1801393 - DNA, 15 bp, Homo sapiens
gcaaccggctggtgc

SEQ ID NO: 1801394 - DNA, 15 bp, Homo sapiens
caaccggctggtgct

SEQ ID NO: 1801395 - DNA, 15 bp, Homo sapiens
aaccggctggtgctc

SEQ ID NO: 1801396 - DNA, 15 bp, Homo sapiens
accggctggtgctca

SEQ ID NO: 1801397 - DNA, 15 bp, Homo sapiens
ccggctggtgctcat

SEQ ID NO: 1801398 - DNA, 15 bp, Homo sapiens
cggctggtgctcatc

SEQ ID NO: 1801399 - DNA, 15 bp, Homo sapiens
ggctggtgctcatct

SEQ ID NO: 1801400 - DNA, 15 bp, Homo sapiens
gctggtgctcatctc

SEQ ID NO: 1801401 - DNA, 15 bp, Homo sapiens
ctggtgctcatctcc

SEQ ID NO: 1801402 - DNA, 15 bp, Homo sapiens
tggtgctcatctccc

SEQ ID NO: 1801403 - DNA, 15 bp, Homo sapiens
ggtgctcatctccct

SEQ ID NO: 1801404 - DNA, 15 bp, Homo sapiens
gtgctcatctccctc

SEQ ID NO: 1801405 - DNA, 15 bp, Homo sapiens
tgctcatctccctcc

SEQ ID NO: 1801406 - DNA, 15 bp, Homo sapiens
gctcatctccctcca

SEQ ID NO: 1801407 - DNA, 15 bp, Homo sapiens
ctcatctccctccac

SEQ ID NO: 1801408 - DNA, 15 bp, Homo sapiens
tcatctccctccacc

SEQ ID NO: 1801409 - DNA, 15 bp, Homo sapiens
catctccctccacca

SEQ ID NO: 1801410 - DNA, 15 bp, Homo sapiens
atctccctccaccag

SEQ ID NO: 1801411 - DNA, 15 bp, Homo sapiens
tctccctccaccagc

SEQ ID NO: 1801412 - DNA, 15 bp, Homo sapiens
ctccctccaccagcc

SEQ ID NO: 1801413 - DNA, 15 bp, Homo sapiens
tccctccaccagcct

SEQ ID NO: 1801414 - DNA, 15 bp, Homo sapiens
ccctccaccagcctc

SEQ ID NO: 1801415 - DNA, 15 bp, Homo sapiens
cctccaccagcctcg

SEQ ID NO: 1801416 - DNA, 15 bp, Homo sapiens
ctccaccagcctcgc

SEQ ID NO: 1801417 - DNA, 15 bp, Homo sapiens
tccaccagcctcgct

SEQ ID NO: 1801418 - DNA, 15 bp, Homo sapiens
ccaccagcctcgctc

SEQ ID NO: 1801419 - DNA, 15 bp, Homo sapiens
caccagcctcgctct

SEQ ID NO: 1801420 - DNA, 15 bp, Homo sapiens
accagcctcgctctg

SEQ ID NO: 1801421 - DNA, 15 bp, Homo sapiens
ccagcctcgctctga

SEQ ID NO: 1801422 - DNA, 15 bp, Homo sapiens
cagcctcgctctgac

SEQ ID NO: 1801423 - DNA, 15 bp, Homo sapiens
agcctcgctctgaca

SEQ ID NO: 1801424 - DNA, 15 bp, Homo sapiens
gcctcgctctgacat

SEQ ID NO: 1801425 - DNA, 15 bp, Homo sapiens
cctcgctctgacatc

SEQ ID NO: 1801426 - DNA, 15 bp, Homo sapiens
ctcgctctgacatct

SEQ ID NO: 1801427 - DNA, 15 bp, Homo sapiens
tcgctctgacatctt

SEQ ID NO: 1801428 - DNA, 15 bp, Homo sapiens
cgctctgacatcttc

SEQ ID NO: 1801429 - DNA, 15 bp, Homo sapiens
gctctgacatcttca

SEQ ID NO: 1801430 - DNA, 15 bp, Homo sapiens
ctctgacatcttcag

SEQ ID NO: 1801431 - DNA, 15 bp, Homo sapiens
tctgacatcttcagg

SEQ ID NO: 1801432 - DNA, 15 bp, Homo sapiens
tgacatcttcaggct

SEQ ID NO: 1801433 - DNA, 15 bp, Homo sapiens
gacatcttcaggctg

SEQ ID NO: 1801434 - DNA, 15 bp, Homo sapiens
acatcttcaggctgt

SEQ ID NO: 1801435 - DNA, 15 bp, Homo sapiens
catcttcaggctgtt

SEQ ID NO: 1801436 - DNA, 15 bp, Homo sapiens
atcttcaggctgttt

SEQ ID NO: 1801437 - DNA, 15 bp, Homo sapiens
tcttcaggctgtttg

SEQ ID NO: 1801438 - DNA, 15 bp, Homo sapiens
cttcaggctgtttga

SEQ ID NO: 1801439 - DNA, 15 bp, Homo sapiens
ttcaggctgtttgat

SEQ ID NO: 1801440 - DNA, 15 bp, Homo sapiens
tcaggctgtttgatc

SEQ ID NO: 1801441 - DNA, 15 bp, Homo sapiens
caggctgtttgatct

SEQ ID NO: 1801442 - DNA, 15 bp, Homo sapiens
aggctgtttgatctg

SEQ ID NO: 1801443 - DNA, 15 bp, Homo sapiens
ggctgtttgatctgg

SEQ ID NO: 1801444 - DNA, 15 bp, Homo sapiens
gctgtttgatctggt

SEQ ID NO: 1801445 - DNA, 15 bp, Homo sapiens
ctgtttgatctggtc

SEQ ID NO: 1801446 - DNA, 15 bp, Homo sapiens
tgtttgatctggtcc

SEQ ID NO: 1801447 - DNA, 15 bp, Homo sapiens
gtttgatctggtcct

SEQ ID NO: 1801448 - DNA, 15 bp, Homo sapiens
tttgatctggtcctc

SEQ ID NO: 1801449 - DNA, 15 bp, Homo sapiens
ttgatctggtcctcc

SEQ ID NO: 1801450 - DNA, 15 bp, Homo sapiens
tgatctggtcctcct

SEQ ID NO: 1801451 - DNA, 15 bp, Homo sapiens
gatctggtcctcctg

SEQ ID NO: 1801452 - DNA, 15 bp, Homo sapiens
atctggtcctcctga

SEQ ID NO: 1801453 - DNA, 15 bp, Homo sapiens
tctggtcctcctgat

SEQ ID NO: 1801454 - DNA, 15 bp, Homo sapiens
ctggtcctcctgatg

SEQ ID NO: 1801455 - DNA, 15 bp, Homo sapiens
tggtcctcctgatga

SEQ ID NO: 1801456 - DNA, 15 bp, Homo sapiens
ggtcctcctgatgac

SEQ ID NO: 1801457 - DNA, 15 bp, Homo sapiens
gtcctcctgatgacg

SEQ ID NO: 1801458 - DNA, 15 bp, Homo sapiens
tcctcctgatgacgt

SEQ ID NO: 1801459 - DNA, 15 bp, Homo sapiens
cctcctgatgacgtc

SEQ ID NO: 1801460 - DNA, 15 bp, Homo sapiens
ctcctgatgacgtct

SEQ ID NO: 1801461 - DNA, 15 bp, Homo sapiens
tcctgatgacgtctg

SEQ ID NO: 1801462 - DNA, 15 bp, Homo sapiens
cctgatgacgtctgg

SEQ ID NO: 1801463 - DNA, 15 bp, Homo sapiens
ctgatgacgtctggc

SEQ ID NO: 1801464 - DNA, 15 bp, Homo sapiens
tgatgacgtctggca

SEQ ID NO: 1801465 - DNA, 15 bp, Homo sapiens
gatgacgtctggcac

SEQ ID NO: 1801466 - DNA, 15 bp, Homo sapiens
atgacgtctggcacc

SEQ ID NO: 1801467 - DNA, 15 bp, Homo sapiens
tgacgtctggcaccc

SEQ ID NO: 1801468 - DNA, 15 bp, Homo sapiens
gacgtctggcacccc

SEQ ID NO: 1801469 - DNA, 15 bp, Homo sapiens
acgtctggcaccccc

SEQ ID NO: 1801470 - DNA, 15 bp, Homo sapiens
cgtctggcaccccca

SEQ ID NO: 1801471 - DNA, 15 bp, Homo sapiens
gtctggcacccccat

SEQ ID NO: 1801472 - DNA, 15 bp, Homo sapiens
tctggcacccccatc

SEQ ID NO: 1801473 - DNA, 15 bp, Homo sapiens
ctggcacccccatct

SEQ ID NO: 1801474 - DNA, 15 bp, Homo sapiens
tggcacccccatcta

SEQ ID NO: 1801475 - DNA, 15 bp, Homo sapiens
ggcacccccatctac

SEQ ID NO: 1801476 - DNA, 15 bp, Homo sapiens
gcacccccatctact

SEQ ID NO: 1801477 - DNA, 15 bp, Homo sapiens
cacccccatctactt

SEQ ID NO: 1801478 - DNA, 15 bp, Homo sapiens
acccccatctactta

SEQ ID NO: 1801479 - DNA, 15 bp, Homo sapiens
cccccatctacttag

SEQ ID NO: 1801480 - DNA, 15 bp, Homo sapiens
ccccatctacttagg

SEQ ID NO: 1801481 - DNA, 15 bp, Homo sapiens
cccatctacttaggg

SEQ ID NO: 1801482 - DNA, 15 bp, Homo sapiens
ccatctacttagggg

SEQ ID NO: 1801483 - DNA, 15 bp, Homo sapiens
catctacttaggggc

SEQ ID NO: 1801484 - DNA, 15 bp, Homo sapiens
atctacttaggggcg

SEQ ID NO: 1801485 - DNA, 15 bp, Homo sapiens
tctacttaggggcgg

SEQ ID NO: 1801486 - DNA, 15 bp, Homo sapiens
ctacttaggggcggc

SEQ ID NO: 1801487 - DNA, 15 bp, Homo sapiens
tacttaggggcggcc

SEQ ID NO: 1801488 - DNA, 15 bp, Homo sapiens
acttaggggcggccc

SEQ ID NO: 1801489 - DNA, 15 bp, Homo sapiens
cttaggggcggccca

SEQ ID NO: 1801490 - DNA, 15 bp, Homo sapiens
ttaggggcggcccag

SEQ ID NO: 1801491 - DNA, 15 bp, Homo sapiens
taggggcggcccagc

SEQ ID NO: 1801492 - DNA, 15 bp, Homo sapiens
aggggcggcccagca

SEQ ID NO: 1801493 - DNA, 15 bp, Homo sapiens
ggggcggcccagcac

SEQ ID NO: 1801494 - DNA, 15 bp, Homo sapiens
gggcggcccagcaca

SEQ ID NO: 1801495 - DNA, 15 bp, Homo sapiens
ggcggcccagcacat

SEQ ID NO: 1801496 - DNA, 15 bp, Homo sapiens
gcggcccagcacatg

SEQ ID NO: 1801497 - DNA, 15 bp, Homo sapiens
cggcccagcacatgg

SEQ ID NO: 1801498 - DNA, 15 bp, Homo sapiens
ggcccagcacatggt

SEQ ID NO: 1801499 - DNA, 15 bp, Homo sapiens
gcccagcacatggtc

SEQ ID NO: 1801500 - DNA, 15 bp, Homo sapiens
cccagcacatggtcc

SEQ ID NO: 1801501 - DNA, 15 bp, Homo sapiens
ccagcacatggtcca

SEQ ID NO: 1801502 - DNA, 15 bp, Homo sapiens
cagcacatggtccag

SEQ ID NO: 1801503 - DNA, 15 bp, Homo sapiens
agcacatggtccagt

SEQ ID NO: 1801504 - DNA, 15 bp, Homo sapiens
gcacatggtccagta

SEQ ID NO: 1801505 - DNA, 15 bp, Homo sapiens
cacatggtccagtat

SEQ ID NO: 1801506 - DNA, 15 bp, Homo sapiens
acatggtccagtatt

SEQ ID NO: 1801507 - DNA, 15 bp, Homo sapiens
catggtccagtattt

SEQ ID NO: 1801508 - DNA, 15 bp, Homo sapiens
atggtccagtatttc

SEQ ID NO: 1801509 - DNA, 15 bp, Homo sapiens
tggtccagtatttca

SEQ ID NO: 1801510 - DNA, 15 bp, Homo sapiens
ggtccagtatttcac

SEQ ID NO: 1801511 - DNA, 15 bp, Homo sapiens
gtccagtatttcaca

SEQ ID NO: 1801512 - DNA, 15 bp, Homo sapiens
tccagtatttcacag

SEQ ID NO: 1801513 - DNA, 15 bp, Homo sapiens
ccagtatttcacagc

SEQ ID NO: 1801514 - DNA, 15 bp, Homo sapiens
cagtatttcacagcc

SEQ ID NO: 1801515 - DNA, 15 bp, Homo sapiens
agtatttcacagcca

SEQ ID NO: 1801516 - DNA, 15 bp, Homo sapiens
gtatttcacagccat

SEQ ID NO: 1801517 - DNA, 15 bp, Homo sapiens
tatttcacagccatc

SEQ ID NO: 1801518 - DNA, 15 bp, Homo sapiens
atttcacagccatcg

SEQ ID NO: 1801519 - DNA, 15 bp, Homo sapiens
tttcacagccatcgg

SEQ ID NO: 1801520 - DNA, 15 bp, Homo sapiens
ttcacagccatcggc

SEQ ID NO: 1801521 - DNA, 15 bp, Homo sapiens
tcacagccatcggct

SEQ ID NO: 1801522 - DNA, 15 bp, Homo sapiens
cacagccatcggcta

SEQ ID NO: 1801523 - DNA, 15 bp, Homo sapiens
acagccatcggctac

SEQ ID NO: 1801524 - DNA, 15 bp, Homo sapiens
cagccatcggctacc

SEQ ID NO: 1801525 - DNA, 15 bp, Homo sapiens
agccatcggctaccc

SEQ ID NO: 1801526 - DNA, 15 bp, Homo sapiens
gccatcggctacccc

SEQ ID NO: 1801527 - DNA, 15 bp, Homo sapiens
ccatcggctacccct

SEQ ID NO: 1801528 - DNA, 15 bp, Homo sapiens
catcggctacccctg

SEQ ID NO: 1801529 - DNA, 15 bp, Homo sapiens
atcggctacccctgt

SEQ ID NO: 1801530 - DNA, 15 bp, Homo sapiens
tcggctacccctgtc

SEQ ID NO: 1801531 - DNA, 15 bp, Homo sapiens
cggctacccctgtcc

SEQ ID NO: 1801532 - DNA, 15 bp, Homo sapiens
ggctacccctgtcct

SEQ ID NO: 1801533 - DNA, 15 bp, Homo sapiens
gctacccctgtcctc

SEQ ID NO: 1801534 - DNA, 15 bp, Homo sapiens
ctacccctgtcctcg

SEQ ID NO: 1801535 - DNA, 15 bp, Homo sapiens
tacccctgtcctcgc

SEQ ID NO: 1801536 - DNA, 15 bp, Homo sapiens
acccctgtcctcgct

SEQ ID NO: 1801537 - DNA, 15 bp, Homo sapiens
cccctgtcctcgcta

SEQ ID NO: 1801538 - DNA, 15 bp, Homo sapiens
ccctgtcctcgctac

SEQ ID NO: 1801539 - DNA, 15 bp, Homo sapiens
cctgtcctcgctaca

SEQ ID NO: 1801540 - DNA, 15 bp, Homo sapiens
ctgtcctcgctacag

SEQ ID NO: 1801541 - DNA, 15 bp, Homo sapiens
tgtcctcgctacagc

SEQ ID NO: 1801542 - DNA, 15 bp, Homo sapiens
gtcctcgctacagca

SEQ ID NO: 1801543 - DNA, 15 bp, Homo sapiens
tcctcgctacagcaa

SEQ ID NO: 1801544 - DNA, 15 bp, Homo sapiens
cctcgctacagcaat

SEQ ID NO: 1801545 - DNA, 15 bp, Homo sapiens
ctcgctacagcaatc

SEQ ID NO: 1801546 - DNA, 15 bp, Homo sapiens
tcgctacagcaatcc

SEQ ID NO: 1801547 - DNA, 15 bp, Homo sapiens
cgctacagcaatcct

SEQ ID NO: 1801548 - DNA, 15 bp, Homo sapiens
gctacagcaatcctg

SEQ ID NO: 1801549 - DNA, 15 bp, Homo sapiens
ctacagcaatcctgc

SEQ ID NO: 1801550 - DNA, 15 bp, Homo sapiens
tacagcaatcctgct

SEQ ID NO: 1801551 - DNA, 15 bp, Homo sapiens
acagcaatcctgctg

SEQ ID NO: 1801552 - DNA, 15 bp, Homo sapiens
cagcaatcctgctga

SEQ ID NO: 1801553 - DNA, 15 bp, Homo sapiens
agcaatcctgctgac

SEQ ID NO: 1801554 - DNA, 15 bp, Homo sapiens
gcaatcctgctgact

SEQ ID NO: 1801555 - DNA, 15 bp, Homo sapiens
caatcctgctgactt

SEQ ID NO: 1801556 - DNA, 15 bp, Homo sapiens
aatcctgctgacttc

SEQ ID NO: 1801557 - DNA, 15 bp, Homo sapiens
atcctgctgacttct

SEQ ID NO: 1801558 - DNA, 15 bp, Homo sapiens
tcctgctgacttcta

SEQ ID NO: 1801559 - DNA, 15 bp, Homo sapiens
cctgctgacttctat

SEQ ID NO: 1801560 - DNA, 15 bp, Homo sapiens
ctgctgacttctatg

SEQ ID NO: 1801561 - DNA, 15 bp, Homo sapiens
tgctgacttctatgg

SEQ ID NO: 1801562 - DNA, 15 bp, Homo sapiens
gctgacttctatggt

SEQ ID NO: 1801563 - DNA, 15 bp, Homo sapiens
ctgacttctatggtg

SEQ ID NO: 1801564 - DNA, 15 bp, Homo sapiens
tgacttctatggtga

SEQ ID NO: 1801565 - DNA, 15 bp, Homo sapiens
gacttctatggtgag

SEQ ID NO: 1801566 - DNA, 15 bp, Homo sapiens
acttctatggtgagt

SEQ ID NO: 1801567 - DNA, 15 bp, Homo sapiens
cttctatggtgagtc

SEQ ID NO: 1801568 - DNA, 15 bp, Homo sapiens
ttctatggtgagtcc

SEQ ID NO: 1801569 - DNA, 15 bp, Homo sapiens
tctatggtgagtccc

SEQ ID NO: 1801570 - DNA, 15 bp, Homo sapiens
ctatggtgagtcccc

SEQ ID NO: 1801571 - DNA, 15 bp, Homo sapiens
tatggtgagtcccca

SEQ ID NO: 1801572 - DNA, 15 bp, Homo sapiens
atggtgagtccccaa

SEQ ID NO: 1801573 - DNA, 15 bp, Homo sapiens
tggtgagtccccaag

SEQ ID NO: 1801574 - DNA, 15 bp, Homo sapiens
ggtgagtccccaagg

SEQ ID NO: 1801575 - DNA, 15 bp, Homo sapiens
gtgagtccccaaggc

SEQ ID NO: 1801576 - DNA, 15 bp, Homo sapiens
tgagtccccaaggcc

SEQ ID NO: 1801577 - DNA, 15 bp, Homo sapiens
gagtccccaaggcca

SEQ ID NO: 1801578 - DNA, 15 bp, Homo sapiens
agtccccaaggccag

SEQ ID NO: 1801579 - DNA, 15 bp, Homo sapiens
gtccccaaggccagc

SEQ ID NO: 1801580 - DNA, 15 bp, Homo sapiens
tccccaaggccagca

SEQ ID NO: 1801581 - DNA, 15 bp, Homo sapiens
ccccaaggccagcag

SEQ ID NO: 1801582 - DNA, 15 bp, Homo sapiens
cccaaggccagcagc

SEQ ID NO: 1801583 - DNA, 15 bp, Homo sapiens
ccaaggccagcagcc

SEQ ID NO: 1801584 - DNA, 15 bp, Homo sapiens
caaggccagcagcca

SEQ ID NO: 1801585 - DNA, 15 bp, Homo sapiens
aaggccagcagccag

SEQ ID NO: 1801586 - DNA, 15 bp, Homo sapiens
aggccagcagccagg

SEQ ID NO: 1801587 - DNA, 15 bp, Homo sapiens
ggccagcagccaggg

SEQ ID NO: 1801588 - DNA, 15 bp, Homo sapiens
gccagcagccagggc

SEQ ID NO: 1801589 - DNA, 15 bp, Homo sapiens
ccagcagccagggcc

SEQ ID NO: 1801590 - DNA, 15 bp, Homo sapiens
cagcagccagggccc

SEQ ID NO: 1801591 - DNA, 15 bp, Homo sapiens
agcagccagggccct

SEQ ID NO: 1801592 - DNA, 15 bp, Homo sapiens
gcagccagggccctg

SEQ ID NO: 1801593 - DNA, 15 bp, Homo sapiens
cagccagggccctgg

SEQ ID NO: 1801594 - DNA, 15 bp, Homo sapiens
agccagggccctggc

SEQ ID NO: 1801595 - DNA, 15 bp, Homo sapiens
gccagggccctggca

SEQ ID NO: 1801596 - DNA, 15 bp, Homo sapiens
ccagggccctggcac

SEQ ID NO: 1801597 - DNA, 15 bp, Homo sapiens
cagggccctggcaca

SEQ ID NO: 1801598 - DNA, 15 bp, Homo sapiens
agggccctggcacac

SEQ ID NO: 1801599 - DNA, 15 bp, Homo sapiens
gggccctggcacaca

SEQ ID NO: 1801600 - DNA, 15 bp, Homo sapiens
ggccctggcacacag

SEQ ID NO: 1801601 - DNA, 15 bp, Homo sapiens
gccctggcacacagg

SEQ ID NO: 1801602 - DNA, 15 bp, Homo sapiens
ccctggcacacaggg

SEQ ID NO: 1801603 - DNA, 15 bp, Homo sapiens
cctggcacacagggc

SEQ ID NO: 1801604 - DNA, 15 bp, Homo sapiens
ctggcacacagggcc

SEQ ID NO: 1801605 - DNA, 15 bp, Homo sapiens
tggcacacagggcct

SEQ ID NO: 1801606 - DNA, 15 bp, Homo sapiens
ggcacacagggcctc

SEQ ID NO: 1801607 - DNA, 15 bp, Homo sapiens
gcacacagggcctcc

SEQ ID NO: 1801608 - DNA, 15 bp, Homo sapiens
cacacagggcctccc

SEQ ID NO: 1801609 - DNA, 15 bp, Homo sapiens
acacagggcctcccc

SEQ ID NO: 1801610 - DNA, 15 bp, Homo sapiens
cacagggcctccccg

SEQ ID NO: 1801611 - DNA, 15 bp, Homo sapiens
acagggcctccccga

SEQ ID NO: 1801612 - DNA, 15 bp, Homo sapiens
cagggcctccccgat

SEQ ID NO: 1801613 - DNA, 15 bp, Homo sapiens
agggcctccccgatg

SEQ ID NO: 1801614 - DNA, 15 bp, Homo sapiens
gggcctccccgatgc

SEQ ID NO: 1801615 - DNA, 15 bp, Homo sapiens
ggcctccccgatgct

SEQ ID NO: 1801616 - DNA, 15 bp, Homo sapiens
gcctccccgatgctt

SEQ ID NO: 1801617 - DNA, 15 bp, Homo sapiens
cctccccgatgctta

SEQ ID NO: 1801618 - DNA, 15 bp, Homo sapiens
ctccccgatgcttaa

SEQ ID NO: 1801619 - DNA, 15 bp, Homo sapiens
tccccgatgcttaaa

SEQ ID NO: 1801620 - DNA, 15 bp, Homo sapiens
ccccgatgcttaaac

SEQ ID NO: 1801621 - DNA, 15 bp, Homo sapiens
cccgatgcttaaacc

SEQ ID NO: 1801622 - DNA, 15 bp, Homo sapiens
ccgatgcttaaaccc

SEQ ID NO: 1801623 - DNA, 15 bp, Homo sapiens
cgatgcttaaaccct

SEQ ID NO: 1801624 - DNA, 15 bp, Homo sapiens
gatgcttaaaccctg

SEQ ID NO: 1801625 - DNA, 15 bp, Homo sapiens
atgcttaaaccctgc

SEQ ID NO: 1801626 - DNA, 15 bp, Homo sapiens
tgcttaaaccctgcc

SEQ ID NO: 1801627 - DNA, 15 bp, Homo sapiens
gcttaaaccctgccc

SEQ ID NO: 1801628 - DNA, 15 bp, Homo sapiens
cttaaaccctgccca

SEQ ID NO: 1801629 - DNA, 15 bp, Homo sapiens
ttaaaccctgcccaa

SEQ ID NO: 1801630 - DNA, 15 bp, Homo sapiens
taaaccctgcccaag

SEQ ID NO: 1801631 - DNA, 15 bp, Homo sapiens
aaaccctgcccaagc

SEQ ID NO: 1801632 - DNA, 15 bp, Homo sapiens
aaccctgcccaagct

SEQ ID NO: 1801633 - DNA, 15 bp, Homo sapiens
accctgcccaagctt

SEQ ID NO: 1801634 - DNA, 15 bp, Homo sapiens
ccctgcccaagcttg

SEQ ID NO: 1801635 - DNA, 15 bp, Homo sapiens
cctgcccaagcttgc

SEQ ID NO: 1801636 - DNA, 15 bp, Homo sapiens
ctgcccaagcttgct

SEQ ID NO: 1801637 - DNA, 15 bp, Homo sapiens
tgcccaagcttgctg

SEQ ID NO: 1801638 - DNA, 15 bp, Homo sapiens
gcccaagcttgctgg

SEQ ID NO: 1801639 - DNA, 15 bp, Homo sapiens
cccaagcttgctgga

SEQ ID NO: 1801640 - DNA, 15 bp, Homo sapiens
ccaagcttgctggaa

SEQ ID NO: 1801641 - DNA, 15 bp, Homo sapiens
caagcttgctggaaa

SEQ ID NO: 1801642 - DNA, 15 bp, Homo sapiens
aagcttgctggaaag

SEQ ID NO: 1801643 - DNA, 15 bp, Homo sapiens
agcttgctggaaaga

SEQ ID NO: 1801644 - DNA, 15 bp, Homo sapiens
gcttgctggaaagat

SEQ ID NO: 1801645 - DNA, 15 bp, Homo sapiens
cttgctggaaagatt

SEQ ID NO: 1801646 - DNA, 15 bp, Homo sapiens
ttgctggaaagattc

SEQ ID NO: 1801647 - DNA, 15 bp, Homo sapiens
tgctggaaagattca

SEQ ID NO: 1801648 - DNA, 15 bp, Homo sapiens
gctggaaagattcag

SEQ ID NO: 1801649 - DNA, 15 bp, Homo sapiens
ctggaaagattcagg

SEQ ID NO: 1801650 - DNA, 15 bp, Homo sapiens
tggaaagattcaggg

SEQ ID NO: 1801651 - DNA, 15 bp, Homo sapiens
ggaaagattcagggg

SEQ ID NO: 1801652 - DNA, 15 bp, Homo sapiens
gaaagattcagggga

SEQ ID NO: 1801653 - DNA, 15 bp, Homo sapiens
aaagattcaggggag

SEQ ID NO: 1801654 - DNA, 15 bp, Homo sapiens
aagattcaggggaga

SEQ ID NO: 1801655 - DNA, 15 bp, Homo sapiens
agattcaggggagaa

SEQ ID NO: 1801656 - DNA, 15 bp, Homo sapiens
gattcaggggagaaa

SEQ ID NO: 1801657 - DNA, 15 bp, Homo sapiens
attcaggggagaaac

SEQ ID NO: 1801658 - DNA, 15 bp, Homo sapiens
ttcaggggagaaact

SEQ ID NO: 1801659 - DNA, 15 bp, Homo sapiens
tcaggggagaaactc

SEQ ID NO: 1801660 - DNA, 15 bp, Homo sapiens
caggggagaaactcc

SEQ ID NO: 1801661 - DNA, 15 bp, Homo sapiens
aggggagaaactccc

SEQ ID NO: 1801662 - DNA, 15 bp, Homo sapiens
ggggagaaactccca

SEQ ID NO: 1801663 - DNA, 15 bp, Homo sapiens
gggagaaactcccag

SEQ ID NO: 1801664 - DNA, 15 bp, Homo sapiens
ggagaaactcccaga

SEQ ID NO: 1801665 - DNA, 15 bp, Homo sapiens
gagaaactcccagag

SEQ ID NO: 1801666 - DNA, 15 bp, Homo sapiens
agaaactcccagagg

SEQ ID NO: 1801667 - DNA, 15 bp, Homo sapiens
gaaactcccagaggt

SEQ ID NO: 1801668 - DNA, 15 bp, Homo sapiens
aaactcccagaggtt

SEQ ID NO: 1801669 - DNA, 15 bp, Homo sapiens
aactcccagaggttt

SEQ ID NO: 1801670 - DNA, 15 bp, Homo sapiens
actcccagaggtttc

SEQ ID NO: 1801671 - DNA, 15 bp, Homo sapiens
ctcccagaggtttca

SEQ ID NO: 1801672 - DNA, 15 bp, Homo sapiens
tcccagaggtttcag

SEQ ID NO: 1801673 - DNA, 15 bp, Homo sapiens
cccagaggtttcagg

SEQ ID NO: 1801674 - DNA, 15 bp, Homo sapiens
ccagaggtttcagga

SEQ ID NO: 1801675 - DNA, 15 bp, Homo sapiens
cagaggtttcaggag

SEQ ID NO: 1801676 - DNA, 15 bp, Homo sapiens
agaggtttcaggaga

SEQ ID NO: 1801677 - DNA, 15 bp, Homo sapiens
gaggtttcaggagag

SEQ ID NO: 1801678 - DNA, 15 bp, Homo sapiens
aggtttcaggagagg

SEQ ID NO: 1801679 - DNA, 15 bp, Homo sapiens
ggtttcaggagagga

SEQ ID NO: 1801680 - DNA, 15 bp, Homo sapiens
gtttcaggagaggag

SEQ ID NO: 1801681 - DNA, 15 bp, Homo sapiens
tttcaggagaggagg

SEQ ID NO: 1801682 - DNA, 15 bp, Homo sapiens
ttcaggagaggagga

SEQ ID NO: 1801683 - DNA, 15 bp, Homo sapiens
tcaggagaggaggag

SEQ ID NO: 1801684 - DNA, 15 bp, Homo sapiens
caggagaggaggagc

SEQ ID NO: 1801685 - DNA, 15 bp, Homo sapiens
aggagaggaggagca

SEQ ID NO: 1801686 - DNA, 15 bp, Homo sapiens
ggagaggaggagcaa

SEQ ID NO: 1801687 - DNA, 15 bp, Homo sapiens
gagaggaggagcaat

SEQ ID NO: 1801688 - DNA, 15 bp, Homo sapiens
agaggaggagcaatg

SEQ ID NO: 1801689 - DNA, 15 bp, Homo sapiens
gaggaggagcaatga

SEQ ID NO: 1801690 - DNA, 15 bp, Homo sapiens
aggaggagcaatgat

SEQ ID NO: 1801691 - DNA, 15 bp, Homo sapiens
ggaggagcaatgatg

SEQ ID NO: 1801692 - DNA, 15 bp, Homo sapiens
gaggagcaatgatgg

SEQ ID NO: 1801693 - DNA, 15 bp, Homo sapiens
aggagcaatgatggg

SEQ ID NO: 1801694 - DNA, 15 bp, Homo sapiens
ggagcaatgatgggg

SEQ ID NO: 1801695 - DNA, 15 bp, Homo sapiens
gagcaatgatgggga

SEQ ID NO: 1801696 - DNA, 15 bp, Homo sapiens
agcaatgatggggaa

SEQ ID NO: 1801697 - DNA, 15 bp, Homo sapiens
gcaatgatggggaag

SEQ ID NO: 1801698 - DNA, 15 bp, Homo sapiens
caatgatggggaaga

SEQ ID NO: 1801699 - DNA, 15 bp, Homo sapiens
aatgatggggaagaa

SEQ ID NO: 1801700 - DNA, 15 bp, Homo sapiens
atgatggggaagaac

SEQ ID NO: 1801701 - DNA, 15 bp, Homo sapiens
tgatggggaagaaca

SEQ ID NO: 1801702 - DNA, 15 bp, Homo sapiens
gatggggaagaacat

SEQ ID NO: 1801703 - DNA, 15 bp, Homo sapiens
atggggaagaacatg

SEQ ID NO: 1801704 - DNA, 15 bp, Homo sapiens
tggggaagaacatgg

SEQ ID NO: 1801705 - DNA, 15 bp, Homo sapiens
ggggaagaacatggg

SEQ ID NO: 1801706 - DNA, 15 bp, Homo sapiens
gggaagaacatgggg

SEQ ID NO: 1801707 - DNA, 15 bp, Homo sapiens
ggaagaacatggggt

SEQ ID NO: 1801708 - DNA, 15 bp, Homo sapiens
gaagaacatggggtg

SEQ ID NO: 1801709 - DNA, 15 bp, Homo sapiens
aagaacatggggtgg

SEQ ID NO: 1801710 - DNA, 15 bp, Homo sapiens
agaacatggggtggt

SEQ ID NO: 1801711 - DNA, 15 bp, Homo sapiens
gaacatggggtggtt

SEQ ID NO: 1801712 - DNA, 15 bp, Homo sapiens
aacatggggtggttt

SEQ ID NO: 1801713 - DNA, 15 bp, Homo sapiens
acatggggtggtttg

SEQ ID NO: 1801714 - DNA, 15 bp, Homo sapiens
catggggtggtttgc

SEQ ID NO: 1801715 - DNA, 15 bp, Homo sapiens
atggggtggtttgcc

SEQ ID NO: 1801716 - DNA, 15 bp, Homo sapiens
tggggtggtttgcca

SEQ ID NO: 1801717 - DNA, 15 bp, Homo sapiens
ggggtggtttgccag

SEQ ID NO: 1801718 - DNA, 15 bp, Homo sapiens
gggtggtttgccagg

SEQ ID NO: 1801719 - DNA, 15 bp, Homo sapiens
ggtggtttgccaggt

SEQ ID NO: 1801720 - DNA, 15 bp, Homo sapiens
gtggtttgccaggta

SEQ ID NO: 1801721 - DNA, 15 bp, Homo sapiens
tggtttgccaggtat

SEQ ID NO: 1801722 - DNA, 15 bp, Homo sapiens
ggtttgccaggtatc

SEQ ID NO: 1801723 - DNA, 15 bp, Homo sapiens
gtttgccaggtatca

SEQ ID NO: 1801724 - DNA, 15 bp, Homo sapiens
tttgccaggtatcaa

SEQ ID NO: 1801725 - DNA, 15 bp, Homo sapiens
ttgccaggtatcaaa

SEQ ID NO: 1801726 - DNA, 15 bp, Homo sapiens
tgccaggtatcaaat

SEQ ID NO: 1801727 - DNA, 15 bp, Homo sapiens
gccaggtatcaaatg

SEQ ID NO: 1801728 - DNA, 15 bp, Homo sapiens
ccaggtatcaaatgc

SEQ ID NO: 1801729 - DNA, 15 bp, Homo sapiens
caggtatcaaatgct

SEQ ID NO: 1801730 - DNA, 15 bp, Homo sapiens
aggtatcaaatgcta

SEQ ID NO: 1801731 - DNA, 15 bp, Homo sapiens
ggtatcaaatgctag

SEQ ID NO: 1801732 - DNA, 15 bp, Homo sapiens
gtatcaaatgctaga

SEQ ID NO: 1801733 - DNA, 15 bp, Homo sapiens
tatcaaatgctagaa

SEQ ID NO: 1801734 - DNA, 15 bp, Homo sapiens
atcaaatgctagaaa

SEQ ID NO: 1801735 - DNA, 15 bp, Homo sapiens
tcaaatgctagaaat

SEQ ID NO: 1801736 - DNA, 15 bp, Homo sapiens
caaatgctagaaatg

SEQ ID NO: 1801737 - DNA, 15 bp, Homo sapiens
aaatgctagaaatga

SEQ ID NO: 1801738 - DNA, 15 bp, Homo sapiens
aatgctagaaatgag

SEQ ID NO: 1801739 - DNA, 15 bp, Homo sapiens
atgctagaaatgagg

SEQ ID NO: 1801740 - DNA, 15 bp, Homo sapiens
tgctagaaatgaggg

SEQ ID NO: 1801741 - DNA, 15 bp, Homo sapiens
gctagaaatgagggc

SEQ ID NO: 1801742 - DNA, 15 bp, Homo sapiens
ctagaaatgagggcc

SEQ ID NO: 1801743 - DNA, 15 bp, Homo sapiens
tagaaatgagggcct

SEQ ID NO: 1801744 - DNA, 15 bp, Homo sapiens
agaaatgagggcctg

SEQ ID NO: 1801745 - DNA, 15 bp, Homo sapiens
gaaatgagggcctgg

SEQ ID NO: 1801746 - DNA, 15 bp, Homo sapiens
aaatgagggcctgga

SEQ ID NO: 1801747 - DNA, 15 bp, Homo sapiens
aatgagggcctggaa

SEQ ID NO: 1801748 - DNA, 15 bp, Homo sapiens
atgagggcctggaaa

SEQ ID NO: 1801749 - DNA, 15 bp, Homo sapiens
tgagggcctggaaat

SEQ ID NO: 1801750 - DNA, 15 bp, Homo sapiens
gagggcctggaaata

SEQ ID NO: 1801751 - DNA, 15 bp, Homo sapiens
agggcctggaaatag

SEQ ID NO: 1801752 - DNA, 15 bp, Homo sapiens
gggcctggaaataga

SEQ ID NO: 1801753 - DNA, 15 bp, Homo sapiens
ggcctggaaatagaa

SEQ ID NO: 1801754 - DNA, 15 bp, Homo sapiens
gcctggaaatagaag

SEQ ID NO: 1801755 - DNA, 15 bp, Homo sapiens
cctggaaatagaagc

SEQ ID NO: 1801756 - DNA, 15 bp, Homo sapiens
ctggaaatagaagct

SEQ ID NO: 1801757 - DNA, 15 bp, Homo sapiens
tggaaatagaagctt

SEQ ID NO: 1801758 - DNA, 15 bp, Homo sapiens
ggaaatagaagcttc

SEQ ID NO: 1801759 - DNA, 15 bp, Homo sapiens
gaaatagaagcttct

SEQ ID NO: 1801760 - DNA, 15 bp, Homo sapiens
aaatagaagcttctg

SEQ ID NO: 1801761 - DNA, 15 bp, Homo sapiens
aatagaagcttctga

SEQ ID NO: 1801762 - DNA, 15 bp, Homo sapiens
atagaagcttctgac

SEQ ID NO: 1801763 - DNA, 15 bp, Homo sapiens
tagaagcttctgaca

SEQ ID NO: 1801764 - DNA, 15 bp, Homo sapiens
agaagcttctgacaa

SEQ ID NO: 1801765 - DNA, 15 bp, Homo sapiens
gaagcttctgacaaa

SEQ ID NO: 1801766 - DNA, 15 bp, Homo sapiens
aagcttctgacaaag

SEQ ID NO: 1801767 - DNA, 15 bp, Homo sapiens
agcttctgacaaaga

SEQ ID NO: 1801768 - DNA, 15 bp, Homo sapiens
gcttctgacaaagag

SEQ ID NO: 1801769 - DNA, 15 bp, Homo sapiens
cttctgacaaagagc

SEQ ID NO: 1801770 - DNA, 15 bp, Homo sapiens
ttctgacaaagagct

SEQ ID NO: 1801771 - DNA, 15 bp, Homo sapiens
tctgacaaagagcta

SEQ ID NO: 1801772 - DNA, 15 bp, Homo sapiens
ctgacaaagagctac

SEQ ID NO: 1801773 - DNA, 15 bp, Homo sapiens
tgacaaagagctacc

SEQ ID NO: 1801774 - DNA, 15 bp, Homo sapiens
gacaaagagctaccc

SEQ ID NO: 1801775 - DNA, 15 bp, Homo sapiens
acaaagagctaccct

SEQ ID NO: 1801776 - DNA, 15 bp, Homo sapiens
caaagagctaccctt

SEQ ID NO: 1801777 - DNA, 15 bp, Homo sapiens
aaagagctacccttc

SEQ ID NO: 1801778 - DNA, 15 bp, Homo sapiens
aagagctacccttct

SEQ ID NO: 1801779 - DNA, 15 bp, Homo sapiens
agagctacccttctg

SEQ ID NO: 1801780 - DNA, 15 bp, Homo sapiens
gagctacccttctgt

SEQ ID NO: 1801781 - DNA, 15 bp, Homo sapiens
agctacccttctgtg

SEQ ID NO: 1801782 - DNA, 15 bp, Homo sapiens
gctacccttctgtgc

SEQ ID NO: 1801783 - DNA, 15 bp, Homo sapiens
ctacccttctgtgca

SEQ ID NO: 1801784 - DNA, 15 bp, Homo sapiens
tacccttctgtgcat

SEQ ID NO: 1801785 - DNA, 15 bp, Homo sapiens
acccttctgtgcatg

SEQ ID NO: 1801786 - DNA, 15 bp, Homo sapiens
cccttctgtgcatga

SEQ ID NO: 1801787 - DNA, 15 bp, Homo sapiens
ccttctgtgcatgat

SEQ ID NO: 1801788 - DNA, 15 bp, Homo sapiens
cttctgtgcatgata

SEQ ID NO: 1801789 - DNA, 15 bp, Homo sapiens
ttctgtgcatgatag

SEQ ID NO: 1801790 - DNA, 15 bp, Homo sapiens
tctgtgcatgataga

SEQ ID NO: 1801791 - DNA, 15 bp, Homo sapiens
ctgtgcatgatagat

SEQ ID NO: 1801792 - DNA, 15 bp, Homo sapiens
tgtgcatgatagatt

SEQ ID NO: 1801793 - DNA, 15 bp, Homo sapiens
gtgcatgatagatta

SEQ ID NO: 1801794 - DNA, 15 bp, Homo sapiens
tgcatgatagattag

SEQ ID NO: 1801795 - DNA, 15 bp, Homo sapiens
gcatgatagattaga

SEQ ID NO: 1801796 - DNA, 15 bp, Homo sapiens
catgatagattagaa

SEQ ID NO: 1801797 - DNA, 15 bp, Homo sapiens
atgatagattagaaa

SEQ ID NO: 1801798 - DNA, 15 bp, Homo sapiens
tgatagattagaaac

SEQ ID NO: 1801799 - DNA, 15 bp, Homo sapiens
gatagattagaaact

SEQ ID NO: 1801800 - DNA, 15 bp, Homo sapiens
atagattagaaactt

SEQ ID NO: 1801801 - DNA, 15 bp, Homo sapiens
tagattagaaacttg

SEQ ID NO: 1801802 - DNA, 15 bp, Homo sapiens
agattagaaacttgc

SEQ ID NO: 1801803 - DNA, 15 bp, Homo sapiens
gattagaaacttgca

SEQ ID NO: 1801804 - DNA, 15 bp, Homo sapiens
attagaaacttgcaa

SEQ ID NO: 1801805 - DNA, 15 bp, Homo sapiens
ttagaaacttgcaaa

SEQ ID NO: 1801806 - DNA, 15 bp, Homo sapiens
tagaaacttgcaaac

SEQ ID NO: 1801807 - DNA, 15 bp, Homo sapiens
agaaacttgcaaact

SEQ ID NO: 1801808 - DNA, 15 bp, Homo sapiens
gaaacttgcaaactc

SEQ ID NO: 1801809 - DNA, 15 bp, Homo sapiens
aaacttgcaaactcc

SEQ ID NO: 1801810 - DNA, 15 bp, Homo sapiens
aacttgcaaactcca

SEQ ID NO: 1801811 - DNA, 15 bp, Homo sapiens
acttgcaaactccaa

SEQ ID NO: 1801812 - DNA, 15 bp, Homo sapiens
cttgcaaactccaaa

SEQ ID NO: 1801813 - DNA, 15 bp, Homo sapiens
ttgcaaactccaaag

SEQ ID NO: 1801814 - DNA, 15 bp, Homo sapiens
tgcaaactccaaaga

SEQ ID NO: 1801815 - DNA, 15 bp, Homo sapiens
gcaaactccaaagat

SEQ ID NO: 1801816 - DNA, 15 bp, Homo sapiens
caaactccaaagatg

SEQ ID NO: 1801817 - DNA, 15 bp, Homo sapiens
aaactccaaagatgg

SEQ ID NO: 1801818 - DNA, 15 bp, Homo sapiens
aactccaaagatggg

SEQ ID NO: 1801819 - DNA, 15 bp, Homo sapiens
actccaaagatggga

SEQ ID NO: 1801820 - DNA, 15 bp, Homo sapiens
ctccaaagatgggag

SEQ ID NO: 1801821 - DNA, 15 bp, Homo sapiens
tccaaagatgggagg

SEQ ID NO: 1801822 - DNA, 15 bp, Homo sapiens
ccaaagatgggaggg

SEQ ID NO: 1801823 - DNA, 15 bp, Homo sapiens
caaagatgggagggc

SEQ ID NO: 1801824 - DNA, 15 bp, Homo sapiens
aaagatgggagggca

SEQ ID NO: 1801825 - DNA, 15 bp, Homo sapiens
aagatgggagggcat

SEQ ID NO: 1801826 - DNA, 15 bp, Homo sapiens
agatgggagggcatg

SEQ ID NO: 1801827 - DNA, 15 bp, Homo sapiens
gatgggagggcatgg

SEQ ID NO: 1801828 - DNA, 15 bp, Homo sapiens
atgggagggcatgga

SEQ ID NO: 1801829 - DNA, 15 bp, Homo sapiens
tgggagggcatggaa

SEQ ID NO: 1801830 - DNA, 15 bp, Homo sapiens
gggagggcatggaat

SEQ ID NO: 1801831 - DNA, 15 bp, Homo sapiens
ggagggcatggaatt

SEQ ID NO: 1801832 - DNA, 15 bp, Homo sapiens
gagggcatggaattc

SEQ ID NO: 1801833 - DNA, 15 bp, Homo sapiens
agggcatggaattca

SEQ ID NO: 1801834 - DNA, 15 bp, Homo sapiens
gggcatggaattcaa

SEQ ID NO: 1801835 - DNA, 15 bp, Homo sapiens
ggcatggaattcaag

SEQ ID NO: 1801836 - DNA, 15 bp, Homo sapiens
gcatggaattcaaga

SEQ ID NO: 1801837 - DNA, 15 bp, Homo sapiens
catggaattcaagag

SEQ ID NO: 1801838 - DNA, 15 bp, Homo sapiens
atggaattcaagagg

SEQ ID NO: 1801839 - DNA, 15 bp, Homo sapiens
tggaattcaagaggg

SEQ ID NO: 1801840 - DNA, 15 bp, Homo sapiens
ggaattcaagagggt

SEQ ID NO: 1801841 - DNA, 15 bp, Homo sapiens
gaattcaagagggtg

SEQ ID NO: 1801842 - DNA, 15 bp, Homo sapiens
aattcaagagggtgg

SEQ ID NO: 1801843 - DNA, 15 bp, Homo sapiens
attcaagagggtggg

SEQ ID NO: 1801844 - DNA, 15 bp, Homo sapiens
ttcaagagggtgggg

SEQ ID NO: 1801845 - DNA, 15 bp, Homo sapiens
tcaagagggtgggga

SEQ ID NO: 1801846 - DNA, 15 bp, Homo sapiens
caagagggtggggat

SEQ ID NO: 1801847 - DNA, 15 bp, Homo sapiens
aagagggtggggatc

SEQ ID NO: 1801848 - DNA, 15 bp, Homo sapiens
agagggtggggatca

SEQ ID NO: 1801849 - DNA, 15 bp, Homo sapiens
gagggtggggatcaa

SEQ ID NO: 1801850 - DNA, 15 bp, Homo sapiens
agggtggggatcaat

SEQ ID NO: 1801851 - DNA, 15 bp, Homo sapiens
gggtggggatcaata

SEQ ID NO: 1801852 - DNA, 15 bp, Homo sapiens
ggtggggatcaataa

SEQ ID NO: 1801853 - DNA, 15 bp, Homo sapiens
gtggggatcaataaa

SEQ ID NO: 1801854 - DNA, 15 bp, Homo sapiens
tggggatcaataaat

SEQ ID NO: 1801855 - DNA, 15 bp, Homo sapiens
ggggatcaataaata

SEQ ID NO: 1801856 - DNA, 15 bp, Homo sapiens
gggatcaataaatat

SEQ ID NO: 1801857 - DNA, 15 bp, Homo sapiens
ggatcaataaatatc

SEQ ID NO: 1801858 - DNA, 15 bp, Homo sapiens
gatcaataaatatca

SEQ ID NO: 1801859 - DNA, 15 bp, Homo sapiens
atcaataaatatcag

SEQ ID NO: 1801860 - DNA, 15 bp, Homo sapiens
tcaataaatatcaga

SEQ ID NO: 1801861 - DNA, 15 bp, Homo sapiens
caataaatatcagag

SEQ ID NO: 1801862 - DNA, 15 bp, Homo sapiens
aataaatatcagagt

SEQ ID NO: 1801863 - DNA, 15 bp, Homo sapiens
ataaatatcagagtc

SEQ ID NO: 1801864 - DNA, 15 bp, Homo sapiens
taaatatcagagtct

SEQ ID NO: 1801865 - DNA, 15 bp, Homo sapiens
aaatatcagagtctt

SEQ ID NO: 1801866 - DNA, 15 bp, Homo sapiens
aatatcagagtcttt

SEQ ID NO: 1801867 - DNA, 15 bp, Homo sapiens
atatcagagtcttta

SEQ ID NO: 1801868 - DNA, 15 bp, Homo sapiens
tatcagagtctttat

SEQ ID NO: 1801869 - DNA, 15 bp, Homo sapiens
atcagagtctttatt

SEQ ID NO: 1801870 - DNA, 15 bp, Homo sapiens
tcagagtctttattc

SEQ ID NO: 1801871 - DNA, 15 bp, Homo sapiens
cagagtctttattca

SEQ ID NO: 1801872 - DNA, 15 bp, Homo sapiens
agagtctttattcag

SEQ ID NO: 1801873 - DNA, 15 bp, Homo sapiens
gagtctttattcaga

SEQ ID NO: 1801874 - DNA, 15 bp, Homo sapiens
agtctttattcagac

SEQ ID NO: 1801875 - DNA, 15 bp, Homo sapiens
gtctttattcagact

SEQ ID NO: 1801876 - DNA, 15 bp, Homo sapiens
tctttattcagactc

SEQ ID NO: 1801877 - DNA, 15 bp, Homo sapiens
ctttattcagactca

SEQ ID NO: 1801878 - DNA, 15 bp, Homo sapiens
tttattcagactcag

SEQ ID NO: 1801879 - DNA, 15 bp, Homo sapiens
ttattcagactcagt

SEQ ID NO: 1801880 - DNA, 15 bp, Homo sapiens
tattcagactcagta

SEQ ID NO: 1801881 - DNA, 15 bp, Homo sapiens
attcagactcagtag

SEQ ID NO: 1801882 - DNA, 15 bp, Homo sapiens
ttcagactcagtagg

SEQ ID NO: 1801883 - DNA, 15 bp, Homo sapiens
tcagactcagtaggg

SEQ ID NO: 1801884 - DNA, 15 bp, Homo sapiens
cagactcagtaggga

SEQ ID NO: 1801885 - DNA, 15 bp, Homo sapiens
agactcagtagggaa

SEQ ID NO: 1801886 - DNA, 15 bp, Homo sapiens
gactcagtagggaaa

SEQ ID NO: 1801887 - DNA, 15 bp, Homo sapiens
actcagtagggaaac

SEQ ID NO: 1801888 - DNA, 15 bp, Homo sapiens
ctcagtagggaaaca

SEQ ID NO: 1801889 - DNA, 15 bp, Homo sapiens
tcagtagggaaacaa

SEQ ID NO: 1801890 - DNA, 15 bp, Homo sapiens
cagtagggaaacaac

SEQ ID NO: 1801891 - DNA, 15 bp, Homo sapiens
agtagggaaacaacc

SEQ ID NO: 1801892 - DNA, 15 bp, Homo sapiens
gtagggaaacaacct

SEQ ID NO: 1801893 - DNA, 15 bp, Homo sapiens
tagggaaacaacctt

SEQ ID NO: 1801894 - DNA, 15 bp, Homo sapiens
agggaaacaaccttt

SEQ ID NO: 1801895 - DNA, 15 bp, Homo sapiens
gggaaacaaccttta

SEQ ID NO: 1801896 - DNA, 15 bp, Homo sapiens
ggaaacaacctttaa

SEQ ID NO: 1801897 - DNA, 15 bp, Homo sapiens
gaaacaacctttaag

SEQ ID NO: 1801898 - DNA, 15 bp, Homo sapiens
aaacaacctttaagg

SEQ ID NO: 1801899 - DNA, 15 bp, Homo sapiens
aacaacctttaaggt

SEQ ID NO: 1801900 - DNA, 15 bp, Homo sapiens
acaacctttaaggtc

SEQ ID NO: 1801901 - DNA, 15 bp, Homo sapiens
caacctttaaggtca

SEQ ID NO: 1801902 - DNA, 15 bp, Homo sapiens
aacctttaaggtcaa

SEQ ID NO: 1801903 - DNA, 15 bp, Homo sapiens
acctttaaggtcaag

SEQ ID NO: 1801904 - DNA, 15 bp, Homo sapiens
cctttaaggtcaaga

SEQ ID NO: 1801905 - DNA, 15 bp, Homo sapiens
ctttaaggtcaagaa

SEQ ID NO: 1801906 - DNA, 15 bp, Homo sapiens
tttaaggtcaagaag

SEQ ID NO: 1801907 - DNA, 15 bp, Homo sapiens
ttaaggtcaagaagt

SEQ ID NO: 1801908 - DNA, 15 bp, Homo sapiens
taaggtcaagaagtc

SEQ ID NO: 1801909 - DNA, 15 bp, Homo sapiens
aaggtcaagaagtca

SEQ ID NO: 1801910 - DNA, 15 bp, Homo sapiens
aggtcaagaagtcac

SEQ ID NO: 1801911 - DNA, 15 bp, Homo sapiens
ggtcaagaagtcacc

SEQ ID NO: 1801912 - DNA, 15 bp, Homo sapiens
gtcaagaagtcacca

SEQ ID NO: 1801913 - DNA, 15 bp, Homo sapiens
tcaagaagtcaccag

SEQ ID NO: 1801914 - DNA, 15 bp, Homo sapiens
caagaagtcaccaga

SEQ ID NO: 1801915 - DNA, 15 bp, Homo sapiens
aagaagtcaccagat

SEQ ID NO: 1801916 - DNA, 15 bp, Homo sapiens
agaagtcaccagatc

SEQ ID NO: 1801917 - DNA, 15 bp, Homo sapiens
gaagtcaccagatct

SEQ ID NO: 1801918 - DNA, 15 bp, Homo sapiens
aagtcaccagatctt

SEQ ID NO: 1801919 - DNA, 15 bp, Homo sapiens
agtcaccagatctta

SEQ ID NO: 1801920 - DNA, 15 bp, Homo sapiens
gtcaccagatcttaa

SEQ ID NO: 1801921 - DNA, 15 bp, Homo sapiens
tcaccagatcttaaa

SEQ ID NO: 1801922 - DNA, 15 bp, Homo sapiens
caccagatcttaaaa

SEQ ID NO: 1801923 - DNA, 15 bp, Homo sapiens
accagatcttaaaac

SEQ ID NO: 1801924 - DNA, 15 bp, Homo sapiens
ccagatcttaaaaca

SEQ ID NO: 1801925 - DNA, 15 bp, Homo sapiens
cagatcttaaaacat

SEQ ID NO: 1801926 - DNA, 15 bp, Homo sapiens
agatcttaaaacatg

SEQ ID NO: 1801927 - DNA, 15 bp, Homo sapiens
gatcttaaaacatgc

SEQ ID NO: 1801928 - DNA, 15 bp, Homo sapiens
atcttaaaacatgcc

SEQ ID NO: 1801929 - DNA, 15 bp, Homo sapiens
tcttaaaacatgccc

SEQ ID NO: 1801930 - DNA, 15 bp, Homo sapiens
cttaaaacatgccct

SEQ ID NO: 1801931 - DNA, 15 bp, Homo sapiens
ttaaaacatgccctg

SEQ ID NO: 1801932 - DNA, 15 bp, Homo sapiens
taaaacatgccctgg

SEQ ID NO: 1801933 - DNA, 15 bp, Homo sapiens
aaaacatgccctggt

SEQ ID NO: 1801934 - DNA, 15 bp, Homo sapiens
aaacatgccctggtg

SEQ ID NO: 1801935 - DNA, 15 bp, Homo sapiens
aacatgccctggtgt

SEQ ID NO: 1801936 - DNA, 15 bp, Homo sapiens
acatgccctggtgtt

SEQ ID NO: 1801937 - DNA, 15 bp, Homo sapiens
catgccctggtgttc

SEQ ID NO: 1801938 - DNA, 15 bp, Homo sapiens
atgccctggtgttcc

SEQ ID NO: 1801939 - DNA, 15 bp, Homo sapiens
tgccctggtgttccc

SEQ ID NO: 1801940 - DNA, 15 bp, Homo sapiens
gccctggtgttccca

SEQ ID NO: 1801941 - DNA, 15 bp, Homo sapiens
ccctggtgttcccac

SEQ ID NO: 1801942 - DNA, 15 bp, Homo sapiens
cctggtgttcccaca

SEQ ID NO: 1801943 - DNA, 15 bp, Homo sapiens
ctggtgttcccacag

SEQ ID NO: 1801944 - DNA, 15 bp, Homo sapiens
tggtgttcccacagt

SEQ ID NO: 1801945 - DNA, 15 bp, Homo sapiens
ggtgttcccacagtg

SEQ ID NO: 1801946 - DNA, 15 bp, Homo sapiens
gtgttcccacagtgg

SEQ ID NO: 1801947 - DNA, 15 bp, Homo sapiens
tgttcccacagtggc

SEQ ID NO: 1801948 - DNA, 15 bp, Homo sapiens
gttcccacagtggca

SEQ ID NO: 1801949 - DNA, 15 bp, Homo sapiens
ttcccacagtggcag

SEQ ID NO: 1801950 - DNA, 15 bp, Homo sapiens
tcccacagtggcagg

SEQ ID NO: 1801951 - DNA, 15 bp, Homo sapiens
cccacagtggcaggg

SEQ ID NO: 1801952 - DNA, 15 bp, Homo sapiens
ccacagtggcaggga

SEQ ID NO: 1801953 - DNA, 15 bp, Homo sapiens
cacagtggcagggag

SEQ ID NO: 1801954 - DNA, 15 bp, Homo sapiens
acagtggcagggagc

SEQ ID NO: 1801955 - DNA, 15 bp, Homo sapiens
cagtggcagggagcc

SEQ ID NO: 1801956 - DNA, 15 bp, Homo sapiens
agtggcagggagcct

SEQ ID NO: 1801957 - DNA, 15 bp, Homo sapiens
gtggcagggagcctg

SEQ ID NO: 1801958 - DNA, 15 bp, Homo sapiens
tggcagggagcctga

SEQ ID NO: 1801959 - DNA, 15 bp, Homo sapiens
ggcagggagcctgaa

SEQ ID NO: 1801960 - DNA, 15 bp, Homo sapiens
gcagggagcctgaag

SEQ ID NO: 1801961 - DNA, 15 bp, Homo sapiens
cagggagcctgaagg

SEQ ID NO: 1801962 - DNA, 15 bp, Homo sapiens
agggagcctgaaggt

SEQ ID NO: 1801963 - DNA, 15 bp, Homo sapiens
gggagcctgaaggtg

SEQ ID NO: 1801964 - DNA, 15 bp, Homo sapiens
ggagcctgaaggtgc

SEQ ID NO: 1801965 - DNA, 15 bp, Homo sapiens
gagcctgaaggtgca

SEQ ID NO: 1801966 - DNA, 15 bp, Homo sapiens
agcctgaaggtgcag

SEQ ID NO: 1801967 - DNA, 15 bp, Homo sapiens
gcctgaaggtgcagg

SEQ ID NO: 1801968 - DNA, 15 bp, Homo sapiens
cctgaaggtgcaggg

SEQ ID NO: 1801969 - DNA, 15 bp, Homo sapiens
ctgaaggtgcagggt

SEQ ID NO: 1801970 - DNA, 15 bp, Homo sapiens
tgaaggtgcagggtg

SEQ ID NO: 1801971 - DNA, 15 bp, Homo sapiens
gaaggtgcagggtgg

SEQ ID NO: 1801972 - DNA, 15 bp, Homo sapiens
aaggtgcagggtggc

SEQ ID NO: 1801973 - DNA, 15 bp, Homo sapiens
aggtgcagggtggca

SEQ ID NO: 1801974 - DNA, 15 bp, Homo sapiens
ggtgcagggtggcag

SEQ ID NO: 1801975 - DNA, 15 bp, Homo sapiens
gtgcagggtggcaga

SEQ ID NO: 1801976 - DNA, 15 bp, Homo sapiens
tgcagggtggcagag

SEQ ID NO: 1801977 - DNA, 15 bp, Homo sapiens
gcagggtggcagagg

SEQ ID NO: 1801978 - DNA, 15 bp, Homo sapiens
cagggtggcagaggg

SEQ ID NO: 1801979 - DNA, 15 bp, Homo sapiens
agggtggcagagggg

SEQ ID NO: 1801980 - DNA, 15 bp, Homo sapiens
gggtggcagaggggg

SEQ ID NO: 1801981 - DNA, 15 bp, Homo sapiens
ggtggcagagggggg

SEQ ID NO: 1801982 - DNA, 15 bp, Homo sapiens
gtggcagaggggggc

SEQ ID NO: 1801983 - DNA, 15 bp, Homo sapiens
tggcagaggggggcc

SEQ ID NO: 1801984 - DNA, 15 bp, Homo sapiens
ggcagaggggggccc

SEQ ID NO: 1801985 - DNA, 15 bp, Homo sapiens
gcagaggggggccca

SEQ ID NO: 1801986 - DNA, 15 bp, Homo sapiens
cagaggggggcccag

SEQ ID NO: 1801987 - DNA, 15 bp, Homo sapiens
agaggggggcccagg

SEQ ID NO: 1801988 - DNA, 15 bp, Homo sapiens
gaggggggcccaggg

SEQ ID NO: 1801989 - DNA, 15 bp, Homo sapiens
aggggggcccagggt

SEQ ID NO: 1801990 - DNA, 15 bp, Homo sapiens
ggggggcccagggtg

SEQ ID NO: 1801991 - DNA, 15 bp, Homo sapiens
gggggcccagggtgg

SEQ ID NO: 1801992 - DNA, 15 bp, Homo sapiens
ggggcccagggtggt

SEQ ID NO: 1801993 - DNA, 15 bp, Homo sapiens
gggcccagggtggtg

SEQ ID NO: 1801994 - DNA, 15 bp, Homo sapiens
ggcccagggtggtgg

SEQ ID NO: 1801995 - DNA, 15 bp, Homo sapiens
gcccagggtggtggc

SEQ ID NO: 1801996 - DNA, 15 bp, Homo sapiens
cccagggtggtggcc

SEQ ID NO: 1801997 - DNA, 15 bp, Homo sapiens
ccagggtggtggcct

SEQ ID NO: 1801998 - DNA, 15 bp, Homo sapiens
cagggtggtggcctt

SEQ ID NO: 1801999 - DNA, 15 bp, Homo sapiens
agggtggtggccttg

SEQ ID NO: 1802000 - DNA, 15 bp, Homo sapiens
gggtggtggccttgg

SEQ ID NO: 1802001 - DNA, 15 bp, Homo sapiens
ggtggtggccttggc

SEQ ID NO: 1802002 - DNA, 15 bp, Homo sapiens
gtggtggccttggcc

SEQ ID NO: 1802003 - DNA, 15 bp, Homo sapiens
tggtggccttggcca

SEQ ID NO: 1802004 - DNA, 15 bp, Homo sapiens
ggtggccttggccag

SEQ ID NO: 1802005 - DNA, 15 bp, Homo sapiens
gtggccttggccagg

SEQ ID NO: 1802006 - DNA, 15 bp, Homo sapiens
tggccttggccaggg

SEQ ID NO: 1802007 - DNA, 15 bp, Homo sapiens
ggccttggccaggga

SEQ ID NO: 1802008 - DNA, 15 bp, Homo sapiens
gccttggccagggaa

SEQ ID NO: 1802009 - DNA, 15 bp, Homo sapiens
ccttggccagggaat

SEQ ID NO: 1802010 - DNA, 15 bp, Homo sapiens
cttggccagggaatc

SEQ ID NO: 1802011 - DNA, 15 bp, Homo sapiens
ttggccagggaatct

SEQ ID NO: 1802012 - DNA, 15 bp, Homo sapiens
tggccagggaatctc

SEQ ID NO: 1802013 - DNA, 15 bp, Homo sapiens
ggccagggaatctct

SEQ ID NO: 1802014 - DNA, 15 bp, Homo sapiens
gccagggaatctcta

SEQ ID NO: 1802015 - DNA, 15 bp, Homo sapiens
ccagggaatctctag

SEQ ID NO: 1802016 - DNA, 15 bp, Homo sapiens
cagggaatctctaga

SEQ ID NO: 1802017 - DNA, 15 bp, Homo sapiens
agggaatctctagat

SEQ ID NO: 1802018 - DNA, 15 bp, Homo sapiens
gggaatctctagatg

SEQ ID NO: 1802019 - DNA, 15 bp, Homo sapiens
ggaatctctagatgt

SEQ ID NO: 1802020 - DNA, 15 bp, Homo sapiens
gaatctctagatgtg

SEQ ID NO: 1802021 - DNA, 15 bp, Homo sapiens
aatctctagatgtga

SEQ ID NO: 1802022 - DNA, 15 bp, Homo sapiens
atctctagatgtgaa

SEQ ID NO: 1802023 - DNA, 15 bp, Homo sapiens
tctctagatgtgaaa

SEQ ID NO: 1802024 - DNA, 15 bp, Homo sapiens
ctctagatgtgaaaa

SEQ ID NO: 1802025 - DNA, 15 bp, Homo sapiens
tctagatgtgaaaat

SEQ ID NO: 1802026 - DNA, 15 bp, Homo sapiens
ctagatgtgaaaatt

SEQ ID NO: 1802027 - DNA, 15 bp, Homo sapiens
tagatgtgaaaattg

SEQ ID NO: 1802028 - DNA, 15 bp, Homo sapiens
agatgtgaaaattgc

SEQ ID NO: 1802029 - DNA, 15 bp, Homo sapiens
gatgtgaaaattgct

SEQ ID NO: 1802030 - DNA, 15 bp, Homo sapiens
atgtgaaaattgctc

SEQ ID NO: 1802031 - DNA, 15 bp, Homo sapiens
tgtgaaaattgctct

SEQ ID NO: 1802032 - DNA, 15 bp, Homo sapiens
gtgaaaattgctctg

SEQ ID NO: 1802033 - DNA, 15 bp, Homo sapiens
tgaaaattgctctgg

SEQ ID NO: 1802034 - DNA, 15 bp, Homo sapiens
gaaaattgctctggc

SEQ ID NO: 1802035 - DNA, 15 bp, Homo sapiens
aaaattgctctggca

SEQ ID NO: 1802036 - DNA, 15 bp, Homo sapiens
aaattgctctggcag

SEQ ID NO: 1802037 - DNA, 15 bp, Homo sapiens
aattgctctggcagc

SEQ ID NO: 1802038 - DNA, 15 bp, Homo sapiens
attgctctggcagcc

SEQ ID NO: 1802039 - DNA, 15 bp, Homo sapiens
ttgctctggcagccc

SEQ ID NO: 1802040 - DNA, 15 bp, Homo sapiens
tgctctggcagcccc

SEQ ID NO: 1802041 - DNA, 15 bp, Homo sapiens
gctctggcagcccca

SEQ ID NO: 1802042 - DNA, 15 bp, Homo sapiens
ctctggcagccccag

SEQ ID NO: 1802043 - DNA, 15 bp, Homo sapiens
tctggcagccccagg

SEQ ID NO: 1802044 - DNA, 15 bp, Homo sapiens
ctggcagccccaggc

SEQ ID NO: 1802045 - DNA, 15 bp, Homo sapiens
tggcagccccaggct

SEQ ID NO: 1802046 - DNA, 15 bp, Homo sapiens
ggcagccccaggctt

SEQ ID NO: 1802047 - DNA, 15 bp, Homo sapiens
gcagccccaggcttg

SEQ ID NO: 1802048 - DNA, 15 bp, Homo sapiens
cagccccaggcttgc

SEQ ID NO: 1802049 - DNA, 15 bp, Homo sapiens
agccccaggcttgcc

SEQ ID NO: 1802050 - DNA, 15 bp, Homo sapiens
gccccaggcttgccc

SEQ ID NO: 1802051 - DNA, 15 bp, Homo sapiens
ccccaggcttgccct

SEQ ID NO: 1802052 - DNA, 15 bp, Homo sapiens
cccaggcttgccctt

SEQ ID NO: 1802053 - DNA, 15 bp, Homo sapiens
ccaggcttgcccttt

SEQ ID NO: 1802054 - DNA, 15 bp, Homo sapiens
caggcttgccctttg

SEQ ID NO: 1802055 - DNA, 15 bp, Homo sapiens
aggcttgccctttgc

SEQ ID NO: 1802056 - DNA, 15 bp, Homo sapiens
ggcttgccctttgct

SEQ ID NO: 1802057 - DNA, 15 bp, Homo sapiens
gcttgccctttgctt

SEQ ID NO: 1802058 - DNA, 15 bp, Homo sapiens
cttgccctttgcttg

SEQ ID NO: 1802059 - DNA, 15 bp, Homo sapiens
ttgccctttgcttgg

SEQ ID NO: 1802060 - DNA, 15 bp, Homo sapiens
tgccctttgcttggg

SEQ ID NO: 1802061 - DNA, 15 bp, Homo sapiens
gccctttgcttgggt

SEQ ID NO: 1802062 - DNA, 15 bp, Homo sapiens
ccctttgcttgggtc

SEQ ID NO: 1802063 - DNA, 15 bp, Homo sapiens
cctttgcttgggtcc

SEQ ID NO: 1802064 - DNA, 15 bp, Homo sapiens
ctttgcttgggtcct

SEQ ID NO: 1802065 - DNA, 15 bp, Homo sapiens
tttgcttgggtcctg

SEQ ID NO: 1802066 - DNA, 15 bp, Homo sapiens
ttgcttgggtcctga

SEQ ID NO: 1802067 - DNA, 15 bp, Homo sapiens
tgcttgggtcctgaa

SEQ ID NO: 1802068 - DNA, 15 bp, Homo sapiens
gcttgggtcctgaac

SEQ ID NO: 1802069 - DNA, 15 bp, Homo sapiens
cttgggtcctgaaca

SEQ ID NO: 1802070 - DNA, 15 bp, Homo sapiens
ttgggtcctgaacac

SEQ ID NO: 1802071 - DNA, 15 bp, Homo sapiens
tgggtcctgaacact

SEQ ID NO: 1802072 - DNA, 15 bp, Homo sapiens
gggtcctgaacactc

SEQ ID NO: 1802073 - DNA, 15 bp, Homo sapiens
ggtcctgaacactca

SEQ ID NO: 1802074 - DNA, 15 bp, Homo sapiens
gtcctgaacactcag

SEQ ID NO: 1802075 - DNA, 15 bp, Homo sapiens
tcctgaacactcagc

SEQ ID NO: 1802076 - DNA, 15 bp, Homo sapiens
cctgaacactcagca

SEQ ID NO: 1802077 - DNA, 15 bp, Homo sapiens
ctgaacactcagcat

SEQ ID NO: 1802078 - DNA, 15 bp, Homo sapiens
tgaacactcagcata

SEQ ID NO: 1802079 - DNA, 15 bp, Homo sapiens
gaacactcagcatat

SEQ ID NO: 1802080 - DNA, 15 bp, Homo sapiens
aacactcagcatatt

SEQ ID NO: 1802081 - DNA, 15 bp, Homo sapiens
acactcagcatatta

SEQ ID NO: 1802082 - DNA, 15 bp, Homo sapiens
cactcagcatattac

SEQ ID NO: 1802083 - DNA, 15 bp, Homo sapiens
actcagcatattaca

SEQ ID NO: 1802084 - DNA, 15 bp, Homo sapiens
ctcagcatattacac

SEQ ID NO: 1802085 - DNA, 15 bp, Homo sapiens
tcagcatattacact

SEQ ID NO: 1802086 - DNA, 15 bp, Homo sapiens
cagcatattacactc

SEQ ID NO: 1802087 - DNA, 15 bp, Homo sapiens
agcatattacactca

SEQ ID NO: 1802088 - DNA, 15 bp, Homo sapiens
gcatattacactcag

SEQ ID NO: 1802089 - DNA, 15 bp, Homo sapiens
catattacactcagg

SEQ ID NO: 1802090 - DNA, 15 bp, Homo sapiens
atattacactcaggg

SEQ ID NO: 1802091 - DNA, 15 bp, Homo sapiens
tattacactcaggga

SEQ ID NO: 1802092 - DNA, 15 bp, Homo sapiens
attacactcagggag

SEQ ID NO: 1802093 - DNA, 15 bp, Homo sapiens
ttacactcagggagc

SEQ ID NO: 1802094 - DNA, 15 bp, Homo sapiens
tacactcagggagca

SEQ ID NO: 1802095 - DNA, 15 bp, Homo sapiens
acactcagggagcat

SEQ ID NO: 1802096 - DNA, 15 bp, Homo sapiens
cactcagggagcatg

SEQ ID NO: 1802097 - DNA, 15 bp, Homo sapiens
actcagggagcatga

SEQ ID NO: 1802098 - DNA, 15 bp, Homo sapiens
ctcagggagcatgag

SEQ ID NO: 1802099 - DNA, 15 bp, Homo sapiens
tcagggagcatgagc

SEQ ID NO: 1802100 - DNA, 15 bp, Homo sapiens
cagggagcatgagcc

SEQ ID NO: 1802101 - DNA, 15 bp, Homo sapiens
agggagcatgagccg

SEQ ID NO: 1802102 - DNA, 15 bp, Homo sapiens
gggagcatgagccgc

SEQ ID NO: 1802103 - DNA, 15 bp, Homo sapiens
ggagcatgagccgct

SEQ ID NO: 1802104 - DNA, 15 bp, Homo sapiens
gagcatgagccgctt

SEQ ID NO: 1802105 - DNA, 15 bp, Homo sapiens
agcatgagccgcttc

SEQ ID NO: 1802106 - DNA, 15 bp, Homo sapiens
gcatgagccgcttcc

SEQ ID NO: 1802107 - DNA, 15 bp, Homo sapiens
catgagccgcttcct

SEQ ID NO: 1802108 - DNA, 15 bp, Homo sapiens
atgagccgcttcctt

SEQ ID NO: 1802109 - DNA, 15 bp, Homo sapiens
tgagccgcttccttc

SEQ ID NO: 1802110 - DNA, 15 bp, Homo sapiens
gagccgcttccttca

SEQ ID NO: 1802111 - DNA, 15 bp, Homo sapiens
agccgcttccttcat

SEQ ID NO: 1802112 - DNA, 15 bp, Homo sapiens
gccgcttccttcatt

SEQ ID NO: 1802113 - DNA, 15 bp, Homo sapiens
ccgcttccttcattc

SEQ ID NO: 1802114 - DNA, 15 bp, Homo sapiens
cgcttccttcattct

SEQ ID NO: 1802115 - DNA, 15 bp, Homo sapiens
gcttccttcattctg

SEQ ID NO: 1802116 - DNA, 15 bp, Homo sapiens
cttccttcattctgc

SEQ ID NO: 1802117 - DNA, 15 bp, Homo sapiens
ttccttcattctgca

SEQ ID NO: 1802118 - DNA, 15 bp, Homo sapiens
tccttcattctgcag

SEQ ID NO: 1802119 - DNA, 15 bp, Homo sapiens
ccttcattctgcagg

SEQ ID NO: 1802120 - DNA, 15 bp, Homo sapiens
cttcattctgcaggg

SEQ ID NO: 1802121 - DNA, 15 bp, Homo sapiens
ttcattctgcagggg

SEQ ID NO: 1802122 - DNA, 15 bp, Homo sapiens
tcattctgcagggga

SEQ ID NO: 1802123 - DNA, 15 bp, Homo sapiens
cattctgcaggggac

SEQ ID NO: 1802124 - DNA, 15 bp, Homo sapiens
attctgcaggggaca

SEQ ID NO: 1802125 - DNA, 15 bp, Homo sapiens
ttctgcaggggacag

SEQ ID NO: 1802126 - DNA, 15 bp, Homo sapiens
tctgcaggggacagt

SEQ ID NO: 1802127 - DNA, 15 bp, Homo sapiens
ctgcaggggacagtt

SEQ ID NO: 1802128 - DNA, 15 bp, Homo sapiens
tgcaggggacagttg

SEQ ID NO: 1802129 - DNA, 15 bp, Homo sapiens
gcaggggacagttgc

SEQ ID NO: 1802130 - DNA, 15 bp, Homo sapiens
caggggacagttgcc

SEQ ID NO: 1802131 - DNA, 15 bp, Homo sapiens
aggggacagttgcct

SEQ ID NO: 1802132 - DNA, 15 bp, Homo sapiens
ggggacagttgcctt

SEQ ID NO: 1802133 - DNA, 15 bp, Homo sapiens
gggacagttgccttc

SEQ ID NO: 1802134 - DNA, 15 bp, Homo sapiens
ggacagttgccttcc

SEQ ID NO: 1802135 - DNA, 15 bp, Homo sapiens
gacagttgccttccc

SEQ ID NO: 1802136 - DNA, 15 bp, Homo sapiens
acagttgccttccca

SEQ ID NO: 1802137 - DNA, 15 bp, Homo sapiens
cagttgccttcccag

SEQ ID NO: 1802138 - DNA, 15 bp, Homo sapiens
agttgccttcccagg

SEQ ID NO: 1802139 - DNA, 15 bp, Homo sapiens
gttgccttcccaggt

SEQ ID NO: 1802140 - DNA, 15 bp, Homo sapiens
ttgccttcccaggta

SEQ ID NO: 1802141 - DNA, 15 bp, Homo sapiens
tgccttcccaggtac

SEQ ID NO: 1802142 - DNA, 15 bp, Homo sapiens
gccttcccaggtacc

SEQ ID NO: 1802143 - DNA, 15 bp, Homo sapiens
ccttcccaggtacct

SEQ ID NO: 1802144 - DNA, 15 bp, Homo sapiens
cttcccaggtacctg

SEQ ID NO: 1802145 - DNA, 15 bp, Homo sapiens
ttcccaggtacctgg

SEQ ID NO: 1802146 - DNA, 15 bp, Homo sapiens
tcccaggtacctggc

SEQ ID NO: 1802147 - DNA, 15 bp, Homo sapiens
cccaggtacctggcc

SEQ ID NO: 1802148 - DNA, 15 bp, Homo sapiens
ccaggtacctggcct

SEQ ID NO: 1802149 - DNA, 15 bp, Homo sapiens
caggtacctggcctg

SEQ ID NO: 1802150 - DNA, 15 bp, Homo sapiens
aggtacctggcctga

SEQ ID NO: 1802151 - DNA, 15 bp, Homo sapiens
ggtacctggcctgaa

SEQ ID NO: 1802152 - DNA, 15 bp, Homo sapiens
gtacctggcctgaaa

SEQ ID NO: 1802153 - DNA, 15 bp, Homo sapiens
tacctggcctgaaat

SEQ ID NO: 1802154 - DNA, 15 bp, Homo sapiens
acctggcctgaaatc

SEQ ID NO: 1802155 - DNA, 15 bp, Homo sapiens
cctggcctgaaatcc

SEQ ID NO: 1802156 - DNA, 15 bp, Homo sapiens
ctggcctgaaatcct

SEQ ID NO: 1802157 - DNA, 15 bp, Homo sapiens
tggcctgaaatcctg

SEQ ID NO: 1802158 - DNA, 15 bp, Homo sapiens
ggcctgaaatcctga

SEQ ID NO: 1802159 - DNA, 15 bp, Homo sapiens
gcctgaaatcctgag

SEQ ID NO: 1802160 - DNA, 15 bp, Homo sapiens
cctgaaatcctgagt

SEQ ID NO: 1802161 - DNA, 15 bp, Homo sapiens
ctgaaatcctgagtg

SEQ ID NO: 1802162 - DNA, 15 bp, Homo sapiens
tgaaatcctgagtgc

SEQ ID NO: 1802163 - DNA, 15 bp, Homo sapiens
gaaatcctgagtgct

SEQ ID NO: 1802164 - DNA, 15 bp, Homo sapiens
aaatcctgagtgctg

SEQ ID NO: 1802165 - DNA, 15 bp, Homo sapiens
aatcctgagtgctga

SEQ ID NO: 1802166 - DNA, 15 bp, Homo sapiens
atcctgagtgctgag

SEQ ID NO: 1802167 - DNA, 15 bp, Homo sapiens
tcctgagtgctgagg

SEQ ID NO: 1802168 - DNA, 15 bp, Homo sapiens
cctgagtgctgagga

SEQ ID NO: 1802169 - DNA, 15 bp, Homo sapiens
ctgagtgctgaggaa

SEQ ID NO: 1802170 - DNA, 15 bp, Homo sapiens
tgagtgctgaggaag

SEQ ID NO: 1802171 - DNA, 15 bp, Homo sapiens
gagtgctgaggaagg

SEQ ID NO: 1802172 - DNA, 15 bp, Homo sapiens
agtgctgaggaaggg

SEQ ID NO: 1802173 - DNA, 15 bp, Homo sapiens
gtgctgaggaagggc

SEQ ID NO: 1802174 - DNA, 15 bp, Homo sapiens
tgctgaggaagggca

SEQ ID NO: 1802175 - DNA, 15 bp, Homo sapiens
gctgaggaagggcat

SEQ ID NO: 1802176 - DNA, 15 bp, Homo sapiens
ctgaggaagggcatg

SEQ ID NO: 1802177 - DNA, 15 bp, Homo sapiens
tgaggaagggcatgg

SEQ ID NO: 1802178 - DNA, 15 bp, Homo sapiens
gaggaagggcatggc

SEQ ID NO: 1802179 - DNA, 15 bp, Homo sapiens
aggaagggcatggct

SEQ ID NO: 1802180 - DNA, 15 bp, Homo sapiens
ggaagggcatggctg

SEQ ID NO: 1802181 - DNA, 15 bp, Homo sapiens
gaagggcatggctgc

SEQ ID NO: 1802182 - DNA, 15 bp, Homo sapiens
aagggcatggctgct

SEQ ID NO: 1802183 - DNA, 15 bp, Homo sapiens
agggcatggctgctg

SEQ ID NO: 1802184 - DNA, 15 bp, Homo sapiens
ggcatggctgctgga

SEQ ID NO: 1802185 - DNA, 15 bp, Homo sapiens
gcatggctgctggac

SEQ ID NO: 1802186 - DNA, 15 bp, Homo sapiens
catggctgctggaca

SEQ ID NO: 1802187 - DNA, 15 bp, Homo sapiens
atggctgctggacag

SEQ ID NO: 1802188 - DNA, 15 bp, Homo sapiens
tggctgctggacagg

SEQ ID NO: 1802189 - DNA, 15 bp, Homo sapiens
ggctgctggacaggc

SEQ ID NO: 1802190 - DNA, 15 bp, Homo sapiens
gctgctggacaggcg

SEQ ID NO: 1802191 - DNA, 15 bp, Homo sapiens
ctgctggacaggcgt

SEQ ID NO: 1802192 - DNA, 15 bp, Homo sapiens
tgctggacaggcgtc

SEQ ID NO: 1802193 - DNA, 15 bp, Homo sapiens
gctggacaggcgtca

SEQ ID NO: 1802194 - DNA, 15 bp, Homo sapiens
ctggacaggcgtcat

SEQ ID NO: 1802195 - DNA, 15 bp, Homo sapiens
tggacaggcgtcatg

SEQ ID NO: 1802196 - DNA, 15 bp, Homo sapiens
ggacaggcgtcatgg

SEQ ID NO: 1802197 - DNA, 15 bp, Homo sapiens
gacaggcgtcatggt

SEQ ID NO: 1802198 - DNA, 15 bp, Homo sapiens
acaggcgtcatggtt

SEQ ID NO: 1802199 - DNA, 15 bp, Homo sapiens
caggcgtcatggttg

SEQ ID NO: 1802200 - DNA, 15 bp, Homo sapiens
aggcgtcatggttgt

SEQ ID NO: 1802201 - DNA, 15 bp, Homo sapiens
ggcgtcatggttgta

SEQ ID NO: 1802202 - DNA, 15 bp, Homo sapiens
gcgtcatggttgtac

SEQ ID NO: 1802203 - DNA, 15 bp, Homo sapiens
cgtcatggttgtacc

SEQ ID NO: 1802204 - DNA, 15 bp, Homo sapiens
gtcatggttgtacca

SEQ ID NO: 1802205 - DNA, 15 bp, Homo sapiens
tcatggttgtaccag

SEQ ID NO: 1802206 - DNA, 15 bp, Homo sapiens
catggttgtaccagg

SEQ ID NO: 1802207 - DNA, 15 bp, Homo sapiens
atggttgtaccaggt

SEQ ID NO: 1802208 - DNA, 15 bp, Homo sapiens
tggttgtaccaggtc

SEQ ID NO: 1802209 - DNA, 15 bp, Homo sapiens
ggttgtaccaggtcc

SEQ ID NO: 1802210 - DNA, 15 bp, Homo sapiens
gttgtaccaggtccc

SEQ ID NO: 1802211 - DNA, 15 bp, Homo sapiens
ttgtaccaggtccca

SEQ ID NO: 1802212 - DNA, 15 bp, Homo sapiens
tgtaccaggtcccag

SEQ ID NO: 1802213 - DNA, 15 bp, Homo sapiens
gtaccaggtcccagg

SEQ ID NO: 1802214 - DNA, 15 bp, Homo sapiens
taccaggtcccaggg

SEQ ID NO: 1802215 - DNA, 15 bp, Homo sapiens
accaggtcccaggga

SEQ ID NO: 1802216 - DNA, 15 bp, Homo sapiens
ccaggtcccagggag

SEQ ID NO: 1802217 - DNA, 15 bp, Homo sapiens
caggtcccagggaga

SEQ ID NO: 1802218 - DNA, 15 bp, Homo sapiens
aggtcccagggagac

SEQ ID NO: 1802219 - DNA, 15 bp, Homo sapiens
ggtcccagggagaca

SEQ ID NO: 1802220 - DNA, 15 bp, Homo sapiens
gtcccagggagacag

SEQ ID NO: 1802221 - DNA, 15 bp, Homo sapiens
tcccagggagacagc

SEQ ID NO: 1802222 - DNA, 15 bp, Homo sapiens
cccagggagacagct

SEQ ID NO: 1802223 - DNA, 15 bp, Homo sapiens
ccagggagacagctg

SEQ ID NO: 1802224 - DNA, 15 bp, Homo sapiens
cagggagacagctgt

SEQ ID NO: 1802225 - DNA, 15 bp, Homo sapiens
agggagacagctgtc

SEQ ID NO: 1802226 - DNA, 15 bp, Homo sapiens
gggagacagctgtca

SEQ ID NO: 1802227 - DNA, 15 bp, Homo sapiens
ggagacagctgtcat

SEQ ID NO: 1802228 - DNA, 15 bp, Homo sapiens
gagacagctgtcatg

SEQ ID NO: 1802229 - DNA, 15 bp, Homo sapiens
agacagctgtcatgg

SEQ ID NO: 1802230 - DNA, 15 bp, Homo sapiens
gacagctgtcatggc

SEQ ID NO: 1802231 - DNA, 15 bp, Homo sapiens
acagctgtcatggct

SEQ ID NO: 1802232 - DNA, 15 bp, Homo sapiens
cagctgtcatggctt

SEQ ID NO: 1802233 - DNA, 15 bp, Homo sapiens
agctgtcatggctta

SEQ ID NO: 1802234 - DNA, 15 bp, Homo sapiens
gctgtcatggcttat

SEQ ID NO: 1802235 - DNA, 15 bp, Homo sapiens
ctgtcatggcttatg

SEQ ID NO: 1802236 - DNA, 15 bp, Homo sapiens
tgtcatggcttatgc

SEQ ID NO: 1802237 - DNA, 15 bp, Homo sapiens
gtcatggcttatgct

SEQ ID NO: 1802238 - DNA, 15 bp, Homo sapiens
tcatggcttatgcta

SEQ ID NO: 1802239 - DNA, 15 bp, Homo sapiens
catggcttatgctat

SEQ ID NO: 1802240 - DNA, 15 bp, Homo sapiens
atggcttatgctata

SEQ ID NO: 1802241 - DNA, 15 bp, Homo sapiens
tggcttatgctatag

SEQ ID NO: 1802242 - DNA, 15 bp, Homo sapiens
ggcttatgctatagg

SEQ ID NO: 1802243 - DNA, 15 bp, Homo sapiens
gcttatgctataggt

SEQ ID NO: 1802244 - DNA, 15 bp, Homo sapiens
cttatgctataggtc

SEQ ID NO: 1802245 - DNA, 15 bp, Homo sapiens
ttatgctataggtcg

SEQ ID NO: 1802246 - DNA, 15 bp, Homo sapiens
tatgctataggtcgc

SEQ ID NO: 1802247 - DNA, 15 bp, Homo sapiens
atgctataggtcgcc

SEQ ID NO: 1802248 - DNA, 15 bp, Homo sapiens
tgctataggtcgcct

SEQ ID NO: 1802249 - DNA, 15 bp, Homo sapiens
gctataggtcgcctg

SEQ ID NO: 1802250 - DNA, 15 bp, Homo sapiens
ctataggtcgcctga

SEQ ID NO: 1802251 - DNA, 15 bp, Homo sapiens
tataggtcgcctgag

SEQ ID NO: 1802252 - DNA, 15 bp, Homo sapiens
ataggtcgcctgagc

SEQ ID NO: 1802253 - DNA, 15 bp, Homo sapiens
taggtcgcctgagcc

SEQ ID NO: 1802254 - DNA, 15 bp, Homo sapiens
aggtcgcctgagccc

SEQ ID NO: 1802255 - DNA, 15 bp, Homo sapiens
ggtcgcctgagcccc

SEQ ID NO: 1802256 - DNA, 15 bp, Homo sapiens
gtcgcctgagccccc

SEQ ID NO: 1802257 - DNA, 15 bp, Homo sapiens
tcgcctgagccccca

SEQ ID NO: 1802258 - DNA, 15 bp, Homo sapiens
cgcctgagcccccag

SEQ ID NO: 1802259 - DNA, 15 bp, Homo sapiens
gcctgagcccccagc

SEQ ID NO: 1802260 - DNA, 15 bp, Homo sapiens
cctgagcccccagct

SEQ ID NO: 1802261 - DNA, 15 bp, Homo sapiens
ctgagcccccagctt

SEQ ID NO: 1802262 - DNA, 15 bp, Homo sapiens
tgagcccccagcttc

SEQ ID NO: 1802263 - DNA, 15 bp, Homo sapiens
gagcccccagcttcc

SEQ ID NO: 1802264 - DNA, 15 bp, Homo sapiens
agcccccagcttcca

SEQ ID NO: 1802265 - DNA, 15 bp, Homo sapiens
gcccccagcttccac

SEQ ID NO: 1802266 - DNA, 15 bp, Homo sapiens
cccccagcttccacc

SEQ ID NO: 1802267 - DNA, 15 bp, Homo sapiens
ccccagcttccaccc

SEQ ID NO: 1802268 - DNA, 15 bp, Homo sapiens
cccagcttccaccca

SEQ ID NO: 1802269 - DNA, 15 bp, Homo sapiens
ccagcttccacccag

SEQ ID NO: 1802270 - DNA, 15 bp, Homo sapiens
cagcttccacccagg

SEQ ID NO: 1802271 - DNA, 15 bp, Homo sapiens
agcttccacccagga

SEQ ID NO: 1802272 - DNA, 15 bp, Homo sapiens
gcttccacccaggat

SEQ ID NO: 1802273 - DNA, 15 bp, Homo sapiens
cttccacccaggatg

SEQ ID NO: 1802274 - DNA, 15 bp, Homo sapiens
ttccacccaggatgg

SEQ ID NO: 1802275 - DNA, 15 bp, Homo sapiens
tccacccaggatggc

SEQ ID NO: 1802276 - DNA, 15 bp, Homo sapiens
ccacccaggatggca

SEQ ID NO: 1802277 - DNA, 15 bp, Homo sapiens
cacccaggatggcaa

SEQ ID NO: 1802278 - DNA, 15 bp, Homo sapiens
acccaggatggcaaa

SEQ ID NO: 1802279 - DNA, 15 bp, Homo sapiens
cccaggatggcaaac

SEQ ID NO: 1802280 - DNA, 15 bp, Homo sapiens
ccaggatggcaaact

SEQ ID NO: 1802281 - DNA, 15 bp, Homo sapiens
caggatggcaaactg

SEQ ID NO: 1802282 - DNA, 15 bp, Homo sapiens
aggatggcaaactgt

SEQ ID NO: 1802283 - DNA, 15 bp, Homo sapiens
ggatggcaaactgta

SEQ ID NO: 1802284 - DNA, 15 bp, Homo sapiens
gatggcaaactgtag

SEQ ID NO: 1802285 - DNA, 15 bp, Homo sapiens
atggcaaactgtagc

SEQ ID NO: 1802286 - DNA, 15 bp, Homo sapiens
tggcaaactgtagca

SEQ ID NO: 1802287 - DNA, 15 bp, Homo sapiens
ggcaaactgtagcaa

SEQ ID NO: 1802288 - DNA, 15 bp, Homo sapiens
gcaaactgtagcaag

SEQ ID NO: 1802289 - DNA, 15 bp, Homo sapiens
caaactgtagcaagg

SEQ ID NO: 1802290 - DNA, 15 bp, Homo sapiens
aaactgtagcaagga

SEQ ID NO: 1802291 - DNA, 15 bp, Homo sapiens
aactgtagcaaggac

SEQ ID NO: 1802292 - DNA, 15 bp, Homo sapiens
actgtagcaaggacc

SEQ ID NO: 1802293 - DNA, 15 bp, Homo sapiens
ctgtagcaaggaccc

SEQ ID NO: 1802294 - DNA, 15 bp, Homo sapiens
tgtagcaaggacccc

SEQ ID NO: 1802295 - DNA, 15 bp, Homo sapiens
gtagcaaggacccca

SEQ ID NO: 1802296 - DNA, 15 bp, Homo sapiens
tagcaaggaccccac

SEQ ID NO: 1802297 - DNA, 15 bp, Homo sapiens
agcaaggaccccacc

SEQ ID NO: 1802298 - DNA, 15 bp, Homo sapiens
gcaaggaccccacca

SEQ ID NO: 1802299 - DNA, 15 bp, Homo sapiens
caaggaccccaccag

SEQ ID NO: 1802300 - DNA, 15 bp, Homo sapiens
aaggaccccaccagt

SEQ ID NO: 1802301 - DNA, 15 bp, Homo sapiens
aggaccccaccagta

SEQ ID NO: 1802302 - DNA, 15 bp, Homo sapiens
ggaccccaccagtaa

SEQ ID NO: 1802303 - DNA, 15 bp, Homo sapiens
gaccccaccagtaaa

SEQ ID NO: 1802304 - DNA, 15 bp, Homo sapiens
accccaccagtaaac

SEQ ID NO: 1802305 - DNA, 15 bp, Homo sapiens
ccccaccagtaaaca

SEQ ID NO: 1802306 - DNA, 15 bp, Homo sapiens
cccaccagtaaacag

SEQ ID NO: 1802307 - DNA, 15 bp, Homo sapiens
ccaccagtaaacagg

SEQ ID NO: 1802308 - DNA, 15 bp, Homo sapiens
caccagtaaacagga

SEQ ID NO: 1802309 - DNA, 15 bp, Homo sapiens
accagtaaacaggac

SEQ ID NO: 1802310 - DNA, 15 bp, Homo sapiens
ccagtaaacaggaca

SEQ ID NO: 1802311 - DNA, 15 bp, Homo sapiens
cagtaaacaggacaa

SEQ ID NO: 1802312 - DNA, 15 bp, Homo sapiens
agtaaacaggacaac

SEQ ID NO: 1802313 - DNA, 15 bp, Homo sapiens
gtaaacaggacaaca

SEQ ID NO: 1802314 - DNA, 15 bp, Homo sapiens
taaacaggacaacag

SEQ ID NO: 1802315 - DNA, 15 bp, Homo sapiens
aaacaggacaacagc

SEQ ID NO: 1802316 - DNA, 15 bp, Homo sapiens
aacaggacaacagcg

SEQ ID NO: 1802317 - DNA, 15 bp, Homo sapiens
acaggacaacagcga

SEQ ID NO: 1802318 - DNA, 15 bp, Homo sapiens
caggacaacagcgat

SEQ ID NO: 1802319 - DNA, 15 bp, Homo sapiens
aggacaacagcgatc

SEQ ID NO: 1802320 - DNA, 15 bp, Homo sapiens
ggacaacagcgatca

SEQ ID NO: 1802321 - DNA, 15 bp, Homo sapiens
gacaacagcgatcat

SEQ ID NO: 1802322 - DNA, 15 bp, Homo sapiens
acaacagcgatcatc

SEQ ID NO: 1802323 - DNA, 15 bp, Homo sapiens
caacagcgatcatct

SEQ ID NO: 1802324 - DNA, 15 bp, Homo sapiens
aacagcgatcatctc

SEQ ID NO: 1802325 - DNA, 15 bp, Homo sapiens
acagcgatcatctcc

SEQ ID NO: 1802326 - DNA, 15 bp, Homo sapiens
cagcgatcatctcct

SEQ ID NO: 1802327 - DNA, 15 bp, Homo sapiens
agcgatcatctcctt

SEQ ID NO: 1802328 - DNA, 15 bp, Homo sapiens
gcgatcatctccttg

SEQ ID NO: 1802329 - DNA, 15 bp, Homo sapiens
cgatcatctccttga

SEQ ID NO: 1802330 - DNA, 15 bp, Homo sapiens
gatcatctccttgaa

SEQ ID NO: 1802331 - DNA, 15 bp, Homo sapiens
atcatctccttgaag

SEQ ID NO: 1802332 - DNA, 15 bp, Homo sapiens
tcatctccttgaagg

SEQ ID NO: 1802333 - DNA, 15 bp, Homo sapiens
catctccttgaaggc

SEQ ID NO: 1802334 - DNA, 15 bp, Homo sapiens
atctccttgaaggca

SEQ ID NO: 1802335 - DNA, 15 bp, Homo sapiens
tctccttgaaggcaa

SEQ ID NO: 1802336 - DNA, 15 bp, Homo sapiens
ctccttgaaggcaaa

SEQ ID NO: 1802337 - DNA, 15 bp, Homo sapiens
tccttgaaggcaaac

SEQ ID NO: 1802338 - DNA, 15 bp, Homo sapiens
ccttgaaggcaaaca

SEQ ID NO: 1802339 - DNA, 15 bp, Homo sapiens
cttgaaggcaaacat

SEQ ID NO: 1802340 - DNA, 15 bp, Homo sapiens
ttgaaggcaaacatg

SEQ ID NO: 1802341 - DNA, 15 bp, Homo sapiens
tgaaggcaaacatgg

SEQ ID NO: 1802342 - DNA, 15 bp, Homo sapiens
gaaggcaaacatggg

SEQ ID NO: 1802343 - DNA, 15 bp, Homo sapiens
aaggcaaacatgggg

SEQ ID NO: 1802344 - DNA, 15 bp, Homo sapiens
aggcaaacatggggc

SEQ ID NO: 1802345 - DNA, 15 bp, Homo sapiens
ggcaaacatggggcc

SEQ ID NO: 1802346 - DNA, 15 bp, Homo sapiens
gcaaacatggggccc

SEQ ID NO: 1802347 - DNA, 15 bp, Homo sapiens
caaacatggggccca

SEQ ID NO: 1802348 - DNA, 15 bp, Homo sapiens
aaacatggggcccaa

SEQ ID NO: 1802349 - DNA, 15 bp, Homo sapiens
aacatggggcccaaa

SEQ ID NO: 1802350 - DNA, 15 bp, Homo sapiens
acatggggcccaaac

SEQ ID NO: 1802351 - DNA, 15 bp, Homo sapiens
catggggcccaaaca

SEQ ID NO: 1802352 - DNA, 15 bp, Homo sapiens
atggggcccaaacat

SEQ ID NO: 1802353 - DNA, 15 bp, Homo sapiens
tggggcccaaacatg

SEQ ID NO: 1802354 - DNA, 15 bp, Homo sapiens
ggggcccaaacatgc

SEQ ID NO: 1802355 - DNA, 15 bp, Homo sapiens
gggcccaaacatgcc

SEQ ID NO: 1802356 - DNA, 15 bp, Homo sapiens
ggcccaaacatgcca

SEQ ID NO: 1802357 - DNA, 15 bp, Homo sapiens
gcccaaacatgccag

SEQ ID NO: 1802358 - DNA, 15 bp, Homo sapiens
cccaaacatgccagg

SEQ ID NO: 1802359 - DNA, 15 bp, Homo sapiens
ccaaacatgccaggc

SEQ ID NO: 1802360 - DNA, 15 bp, Homo sapiens
caaacatgccaggct

SEQ ID NO: 1802361 - DNA, 15 bp, Homo sapiens
aaacatgccaggctc

SEQ ID NO: 1802362 - DNA, 15 bp, Homo sapiens
aacatgccaggctca

SEQ ID NO: 1802363 - DNA, 15 bp, Homo sapiens
acatgccaggctcaa

SEQ ID NO: 1802364 - DNA, 15 bp, Homo sapiens
catgccaggctcaaa

SEQ ID NO: 1802365 - DNA, 15 bp, Homo sapiens
atgccaggctcaaag

SEQ ID NO: 1802366 - DNA, 15 bp, Homo sapiens
tgccaggctcaaagg

SEQ ID NO: 1802367 - DNA, 15 bp, Homo sapiens
gccaggctcaaaggg

SEQ ID NO: 1802368 - DNA, 15 bp, Homo sapiens
ccaggctcaaagggt

SEQ ID NO: 1802369 - DNA, 15 bp, Homo sapiens
caggctcaaagggtc

SEQ ID NO: 1802370 - DNA, 15 bp, Homo sapiens
aggctcaaagggtct

SEQ ID NO: 1802371 - DNA, 15 bp, Homo sapiens
ggctcaaagggtctc

SEQ ID NO: 1802372 - DNA, 15 bp, Homo sapiens
gctcaaagggtctcc

SEQ ID NO: 1802373 - DNA, 15 bp, Homo sapiens
ctcaaagggtctcct

SEQ ID NO: 1802374 - DNA, 15 bp, Homo sapiens
tcaaagggtctcctg

SEQ ID NO: 1802375 - DNA, 15 bp, Homo sapiens
caaagggtctcctgt

SEQ ID NO: 1802376 - DNA, 15 bp, Homo sapiens
aaagggtctcctgtt

SEQ ID NO: 1802377 - DNA, 15 bp, Homo sapiens
aagggtctcctgttt

SEQ ID NO: 1802378 - DNA, 15 bp, Homo sapiens
agggtctcctgtttg

SEQ ID NO: 1802379 - DNA, 15 bp, Homo sapiens
gggtctcctgtttga

SEQ ID NO: 1802380 - DNA, 15 bp, Homo sapiens
ggtctcctgtttgac

SEQ ID NO: 1802381 - DNA, 15 bp, Homo sapiens
gtctcctgtttgact

SEQ ID NO: 1802382 - DNA, 15 bp, Homo sapiens
tctcctgtttgactc

SEQ ID NO: 1802383 - DNA, 15 bp, Homo sapiens
ctcctgtttgactct

SEQ ID NO: 1802384 - DNA, 15 bp, Homo sapiens
tcctgtttgactctc

SEQ ID NO: 1802385 - DNA, 15 bp, Homo sapiens
cctgtttgactctca

SEQ ID NO: 1802386 - DNA, 15 bp, Homo sapiens
ctgtttgactctcaa

SEQ ID NO: 1802387 - DNA, 15 bp, Homo sapiens
tgtttgactctcaag

SEQ ID NO: 1802388 - DNA, 15 bp, Homo sapiens
gtttgactctcaagc

SEQ ID NO: 1802389 - DNA, 15 bp, Homo sapiens
tttgactctcaagcc

SEQ ID NO: 1802390 - DNA, 15 bp, Homo sapiens
ttgactctcaagccc

SEQ ID NO: 1802391 - DNA, 15 bp, Homo sapiens
tgactctcaagcccc

SEQ ID NO: 1802392 - DNA, 15 bp, Homo sapiens
gactctcaagccccg

SEQ ID NO: 1802393 - DNA, 15 bp, Homo sapiens
actctcaagccccgg

SEQ ID NO: 1802394 - DNA, 15 bp, Homo sapiens
ctctcaagccccggc

SEQ ID NO: 1802395 - DNA, 15 bp, Homo sapiens
tctcaagccccggcc

SEQ ID NO: 1802396 - DNA, 15 bp, Homo sapiens
ctcaagccccggcca

SEQ ID NO: 1802397 - DNA, 15 bp, Homo sapiens
tcaagccccggccag

SEQ ID NO: 1802398 - DNA, 15 bp, Homo sapiens
caagccccggccagg

SEQ ID NO: 1802399 - DNA, 15 bp, Homo sapiens
aagccccggccaggc

SEQ ID NO: 1802400 - DNA, 15 bp, Homo sapiens
agccccggccaggcc

SEQ ID NO: 1802401 - DNA, 15 bp, Homo sapiens
gccccggccaggcca

SEQ ID NO: 1802402 - DNA, 15 bp, Homo sapiens
ccccggccaggccaa

SEQ ID NO: 1802403 - DNA, 15 bp, Homo sapiens
cccggccaggccaag

SEQ ID NO: 1802404 - DNA, 15 bp, Homo sapiens
ccggccaggccaagg

SEQ ID NO: 1802405 - DNA, 15 bp, Homo sapiens
cggccaggccaaggc

SEQ ID NO: 1802406 - DNA, 15 bp, Homo sapiens
ggccaggccaaggcc

SEQ ID NO: 1802407 - DNA, 15 bp, Homo sapiens
gccaggccaaggcca

SEQ ID NO: 1802408 - DNA, 15 bp, Homo sapiens
ccaggccaaggccat

SEQ ID NO: 1802409 - DNA, 15 bp, Homo sapiens
caggccaaggccatc

SEQ ID NO: 1802410 - DNA, 15 bp, Homo sapiens
aggccaaggccatct

SEQ ID NO: 1802411 - DNA, 15 bp, Homo sapiens
ggccaaggccatctc

SEQ ID NO: 1802412 - DNA, 15 bp, Homo sapiens
gccaaggccatctcc

SEQ ID NO: 1802413 - DNA, 15 bp, Homo sapiens
ccaaggccatctcca

SEQ ID NO: 1802414 - DNA, 15 bp, Homo sapiens
caaggccatctccat

SEQ ID NO: 1802415 - DNA, 15 bp, Homo sapiens
aaggccatctccatc

SEQ ID NO: 1802416 - DNA, 15 bp, Homo sapiens
aggccatctccatct

SEQ ID NO: 1802417 - DNA, 15 bp, Homo sapiens
ggccatctccatctt

SEQ ID NO: 1802418 - DNA, 15 bp, Homo sapiens
gccatctccatcttt

SEQ ID NO: 1802419 - DNA, 15 bp, Homo sapiens
ccatctccatcttta

SEQ ID NO: 1802420 - DNA, 15 bp, Homo sapiens
catctccatctttac

SEQ ID NO: 1802421 - DNA, 15 bp, Homo sapiens
atctccatctttaca

SEQ ID NO: 1802422 - DNA, 15 bp, Homo sapiens
tctccatctttacag

SEQ ID NO: 1802423 - DNA, 15 bp, Homo sapiens
ctccatctttacaga

SEQ ID NO: 1802424 - DNA, 15 bp, Homo sapiens
tccatctttacagat

SEQ ID NO: 1802425 - DNA, 15 bp, Homo sapiens
ccatctttacagatg

SEQ ID NO: 1802426 - DNA, 15 bp, Homo sapiens
catctttacagatga

SEQ ID NO: 1802427 - DNA, 15 bp, Homo sapiens
atctttacagatgag

SEQ ID NO: 1802428 - DNA, 15 bp, Homo sapiens
tctttacagatgaga

SEQ ID NO: 1802429 - DNA, 15 bp, Homo sapiens
ctttacagatgagaa

SEQ ID NO: 1802430 - DNA, 15 bp, Homo sapiens
ttacagatgagaagc

SEQ ID NO: 1802431 - DNA, 15 bp, Homo sapiens
tacagatgagaagcc

SEQ ID NO: 1802432 - DNA, 15 bp, Homo sapiens
acagatgagaagcct

SEQ ID NO: 1802433 - DNA, 15 bp, Homo sapiens
cagatgagaagcctg

SEQ ID NO: 1802434 - DNA, 15 bp, Homo sapiens
agatgagaagcctgg

SEQ ID NO: 1802435 - DNA, 15 bp, Homo sapiens
gatgagaagcctgga

SEQ ID NO: 1802436 - DNA, 15 bp, Homo sapiens
atgagaagcctggag

SEQ ID NO: 1802437 - DNA, 15 bp, Homo sapiens
tgagaagcctggagc

SEQ ID NO: 1802438 - DNA, 15 bp, Homo sapiens
gagaagcctggagct

SEQ ID NO: 1802439 - DNA, 15 bp, Homo sapiens
agaagcctggagctt

SEQ ID NO: 1802440 - DNA, 15 bp, Homo sapiens
gaagcctggagcttg

SEQ ID NO: 1802441 - DNA, 15 bp, Homo sapiens
aagcctggagcttgc

SEQ ID NO: 1802442 - DNA, 15 bp, Homo sapiens
agcctggagcttgca

SEQ ID NO: 1802443 - DNA, 15 bp, Homo sapiens
gcctggagcttgcag

SEQ ID NO: 1802444 - DNA, 15 bp, Homo sapiens
cctggagcttgcaga

SEQ ID NO: 1802445 - DNA, 15 bp, Homo sapiens
ctggagcttgcagag

SEQ ID NO: 1802446 - DNA, 15 bp, Homo sapiens
tggagcttgcagagc

SEQ ID NO: 1802447 - DNA, 15 bp, Homo sapiens
ggagcttgcagagct

SEQ ID NO: 1802448 - DNA, 15 bp, Homo sapiens
gagcttgcagagcta

SEQ ID NO: 1802449 - DNA, 15 bp, Homo sapiens
agcttgcagagctaa

SEQ ID NO: 1802450 - DNA, 15 bp, Homo sapiens
gcttgcagagctaaa

SEQ ID NO: 1802451 - DNA, 15 bp, Homo sapiens
cttgcagagctaaac

SEQ ID NO: 1802452 - DNA, 15 bp, Homo sapiens
ttgcagagctaaaca

SEQ ID NO: 1802453 - DNA, 15 bp, Homo sapiens
tgcagagctaaacac

SEQ ID NO: 1802454 - DNA, 15 bp, Homo sapiens
gcagagctaaacacc

SEQ ID NO: 1802455 - DNA, 15 bp, Homo sapiens
cagagctaaacacct

SEQ ID NO: 1802456 - DNA, 15 bp, Homo sapiens
agagctaaacacctg

SEQ ID NO: 1802457 - DNA, 15 bp, Homo sapiens
gagctaaacacctgt

SEQ ID NO: 1802458 - DNA, 15 bp, Homo sapiens
agctaaacacctgtt

SEQ ID NO: 1802459 - DNA, 15 bp, Homo sapiens
gctaaacacctgttc

SEQ ID NO: 1802460 - DNA, 15 bp, Homo sapiens
ctaaacacctgttcc

SEQ ID NO: 1802461 - DNA, 15 bp, Homo sapiens
taaacacctgttcca

SEQ ID NO: 1802462 - DNA, 15 bp, Homo sapiens
aaacacctgttccag

SEQ ID NO: 1802463 - DNA, 15 bp, Homo sapiens
aacacctgttccagc

SEQ ID NO: 1802464 - DNA, 15 bp, Homo sapiens
acacctgttccagca

SEQ ID NO: 1802465 - DNA, 15 bp, Homo sapiens
cacctgttccagcac

SEQ ID NO: 1802466 - DNA, 15 bp, Homo sapiens
acctgttccagcaca

SEQ ID NO: 1802467 - DNA, 15 bp, Homo sapiens
cctgttccagcacag

SEQ ID NO: 1802468 - DNA, 15 bp, Homo sapiens
ctgttccagcacagt

SEQ ID NO: 1802469 - DNA, 15 bp, Homo sapiens
tgttccagcacagtt

SEQ ID NO: 1802470 - DNA, 15 bp, Homo sapiens
gttccagcacagttg

SEQ ID NO: 1802471 - DNA, 15 bp, Homo sapiens
ttccagcacagttgt

SEQ ID NO: 1802472 - DNA, 15 bp, Homo sapiens
tccagcacagttgta

SEQ ID NO: 1802473 - DNA, 15 bp, Homo sapiens
ccagcacagttgtaa

SEQ ID NO: 1802474 - DNA, 15 bp, Homo sapiens
cagcacagttgtaag

SEQ ID NO: 1802475 - DNA, 15 bp, Homo sapiens
agcacagttgtaagg

SEQ ID NO: 1802476 - DNA, 15 bp, Homo sapiens
gcacagttgtaaggc

SEQ ID NO: 1802477 - DNA, 15 bp, Homo sapiens
cacagttgtaaggca

SEQ ID NO: 1802478 - DNA, 15 bp, Homo sapiens
acagttgtaaggcac

SEQ ID NO: 1802479 - DNA, 15 bp, Homo sapiens
cagttgtaaggcaca

SEQ ID NO: 1802480 - DNA, 15 bp, Homo sapiens
agttgtaaggcacag

SEQ ID NO: 1802481 - DNA, 15 bp, Homo sapiens
gttgtaaggcacaga

SEQ ID NO: 1802482 - DNA, 15 bp, Homo sapiens
ttgtaaggcacagaa

SEQ ID NO: 1802483 - DNA, 15 bp, Homo sapiens
tgtaaggcacagaac

SEQ ID NO: 1802484 - DNA, 15 bp, Homo sapiens
gtaaggcacagaact

SEQ ID NO: 1802485 - DNA, 15 bp, Homo sapiens
taaggcacagaactg

SEQ ID NO: 1802486 - DNA, 15 bp, Homo sapiens
aaggcacagaactgg

SEQ ID NO: 1802487 - DNA, 15 bp, Homo sapiens
aggcacagaactggg

SEQ ID NO: 1802488 - DNA, 15 bp, Homo sapiens
ggcacagaactggga

SEQ ID NO: 1802489 - DNA, 15 bp, Homo sapiens
gcacagaactgggac

SEQ ID NO: 1802490 - DNA, 15 bp, Homo sapiens
cacagaactgggact

SEQ ID NO: 1802491 - DNA, 15 bp, Homo sapiens
acagaactgggactg

SEQ ID NO: 1802492 - DNA, 15 bp, Homo sapiens
cagaactgggactgg

SEQ ID NO: 1802493 - DNA, 15 bp, Homo sapiens
agaactgggactggt

SEQ ID NO: 1802494 - DNA, 15 bp, Homo sapiens
gaactgggactggtg

SEQ ID NO: 1802495 - DNA, 15 bp, Homo sapiens
aactgggactggtgc

SEQ ID NO: 1802496 - DNA, 15 bp, Homo sapiens
actgggactggtgcc

SEQ ID NO: 1802497 - DNA, 15 bp, Homo sapiens
ctgggactggtgccc

SEQ ID NO: 1802498 - DNA, 15 bp, Homo sapiens
tgggactggtgccca

SEQ ID NO: 1802499 - DNA, 15 bp, Homo sapiens
gggactggtgcccag

SEQ ID NO: 1802500 - DNA, 15 bp, Homo sapiens
ggactggtgcccagc

SEQ ID NO: 1802501 - DNA, 15 bp, Homo sapiens
gactggtgcccagcc

SEQ ID NO: 1802502 - DNA, 15 bp, Homo sapiens
actggtgcccagccc

SEQ ID NO: 1802503 - DNA, 15 bp, Homo sapiens
ctggtgcccagccct

SEQ ID NO: 1802504 - DNA, 15 bp, Homo sapiens
tggtgcccagccctg

SEQ ID NO: 1802505 - DNA, 15 bp, Homo sapiens
ggtgcccagccctgg

SEQ ID NO: 1802506 - DNA, 15 bp, Homo sapiens
gtgcccagccctggc

SEQ ID NO: 1802507 - DNA, 15 bp, Homo sapiens
tgcccagccctggct

SEQ ID NO: 1802508 - DNA, 15 bp, Homo sapiens
gcccagccctggctg

SEQ ID NO: 1802509 - DNA, 15 bp, Homo sapiens
cccagccctggctgt

SEQ ID NO: 1802510 - DNA, 15 bp, Homo sapiens
ccagccctggctgtg

SEQ ID NO: 1802511 - DNA, 15 bp, Homo sapiens
cagccctggctgtga

SEQ ID NO: 1802512 - DNA, 15 bp, Homo sapiens
agccctggctgtgac

SEQ ID NO: 1802513 - DNA, 15 bp, Homo sapiens
gccctggctgtgact

SEQ ID NO: 1802514 - DNA, 15 bp, Homo sapiens
ccctggctgtgactc

SEQ ID NO: 1802515 - DNA, 15 bp, Homo sapiens
tggctgtgactcctc

SEQ ID NO: 1802516 - DNA, 15 bp, Homo sapiens
ggctgtgactcctcg

SEQ ID NO: 1802517 - DNA, 15 bp, Homo sapiens
gctgtgactcctcgt

SEQ ID NO: 1802518 - DNA, 15 bp, Homo sapiens
ctgtgactcctcgtc

SEQ ID NO: 1802519 - DNA, 15 bp, Homo sapiens
tgtgactcctcgtcc

SEQ ID NO: 1802520 - DNA, 15 bp, Homo sapiens
gtgactcctcgtcca

SEQ ID NO: 1802521 - DNA, 15 bp, Homo sapiens
tgactcctcgtccag

SEQ ID NO: 1802522 - DNA, 15 bp, Homo sapiens
gactcctcgtccagc

SEQ ID NO: 1802523 - DNA, 15 bp, Homo sapiens
actcctcgtccagca

SEQ ID NO: 1802524 - DNA, 15 bp, Homo sapiens
ctcctcgtccagcag

SEQ ID NO: 1802525 - DNA, 15 bp, Homo sapiens
tcctcgtccagcagc

SEQ ID NO: 1802526 - DNA, 15 bp, Homo sapiens
cctcgtccagcagcc

SEQ ID NO: 1802527 - DNA, 15 bp, Homo sapiens
ctcgtccagcagccc

SEQ ID NO: 1802528 - DNA, 15 bp, Homo sapiens
tcgtccagcagccca

SEQ ID NO: 1802529 - DNA, 15 bp, Homo sapiens
cgtccagcagcccac

SEQ ID NO: 1802530 - DNA, 15 bp, Homo sapiens
gtccagcagcccaca

SEQ ID NO: 1802531 - DNA, 15 bp, Homo sapiens
tccagcagcccacac

SEQ ID NO: 1802532 - DNA, 15 bp, Homo sapiens
ccagcagcccacacc

SEQ ID NO: 1802533 - DNA, 15 bp, Homo sapiens
cagcagcccacaccc

SEQ ID NO: 1802534 - DNA, 15 bp, Homo sapiens
agcagcccacaccct

SEQ ID NO: 1802535 - DNA, 15 bp, Homo sapiens
gcagcccacaccctc

SEQ ID NO: 1802536 - DNA, 15 bp, Homo sapiens
cagcccacaccctcc

SEQ ID NO: 1802537 - DNA, 15 bp, Homo sapiens
agcccacaccctcct

SEQ ID NO: 1802538 - DNA, 15 bp, Homo sapiens
gcccacaccctcctc

SEQ ID NO: 1802539 - DNA, 15 bp, Homo sapiens
cccacaccctcctcc

SEQ ID NO: 1802540 - DNA, 15 bp, Homo sapiens
ccacaccctcctcct

SEQ ID NO: 1802541 - DNA, 15 bp, Homo sapiens
cacaccctcctccta

SEQ ID NO: 1802542 - DNA, 15 bp, Homo sapiens
acaccctcctcctag

SEQ ID NO: 1802543 - DNA, 15 bp, Homo sapiens
caccctcctcctagt

SEQ ID NO: 1802544 - DNA, 15 bp, Homo sapiens
accctcctcctagtg

SEQ ID NO: 1802545 - DNA, 15 bp, Homo sapiens
ccctcctcctagtgt

SEQ ID NO: 1802546 - DNA, 15 bp, Homo sapiens
cctcctcctagtgtc

SEQ ID NO: 1802547 - DNA, 15 bp, Homo sapiens
ctcctcctagtgtcc

SEQ ID NO: 1802548 - DNA, 15 bp, Homo sapiens
tcctcctagtgtccc

SEQ ID NO: 1802549 - DNA, 15 bp, Homo sapiens
cctcctagtgtccca

SEQ ID NO: 1802550 - DNA, 15 bp, Homo sapiens
ctcctagtgtcccaa

SEQ ID NO: 1802551 - DNA, 15 bp, Homo sapiens
tcctagtgtcccaag

SEQ ID NO: 1802552 - DNA, 15 bp, Homo sapiens
cctagtgtcccaagt

SEQ ID NO: 1802553 - DNA, 15 bp, Homo sapiens
ctagtgtcccaagtt

SEQ ID NO: 1802554 - DNA, 15 bp, Homo sapiens
tagtgtcccaagttc

SEQ ID NO: 1802555 - DNA, 15 bp, Homo sapiens
agtgtcccaagttct

SEQ ID NO: 1802556 - DNA, 15 bp, Homo sapiens
gtgtcccaagttctc

SEQ ID NO: 1802557 - DNA, 15 bp, Homo sapiens
tgtcccaagttctcc

SEQ ID NO: 1802558 - DNA, 15 bp, Homo sapiens
gtcccaagttctcca

SEQ ID NO: 1802559 - DNA, 15 bp, Homo sapiens
tcccaagttctccac

SEQ ID NO: 1802560 - DNA, 15 bp, Homo sapiens
cccaagttctccacc

SEQ ID NO: 1802561 - DNA, 15 bp, Homo sapiens
ccaagttctccacca

SEQ ID NO: 1802562 - DNA, 15 bp, Homo sapiens
caagttctccaccat

SEQ ID NO: 1802563 - DNA, 15 bp, Homo sapiens
aagttctccaccatc

SEQ ID NO: 1802564 - DNA, 15 bp, Homo sapiens
agttctccaccatcc

SEQ ID NO: 1802565 - DNA, 15 bp, Homo sapiens
gttctccaccatcct

SEQ ID NO: 1802566 - DNA, 15 bp, Homo sapiens
ttctccaccatcctt

SEQ ID NO: 1802567 - DNA, 15 bp, Homo sapiens
tctccaccatccttc

SEQ ID NO: 1802568 - DNA, 15 bp, Homo sapiens
ctccaccatccttcc

SEQ ID NO: 1802569 - DNA, 15 bp, Homo sapiens
tccaccatccttccc

SEQ ID NO: 1802570 - DNA, 15 bp, Homo sapiens
ccaccatccttcccc

SEQ ID NO: 1802571 - DNA, 15 bp, Homo sapiens
caccatccttccccc

SEQ ID NO: 1802572 - DNA, 15 bp, Homo sapiens
accatccttccccca

SEQ ID NO: 1802573 - DNA, 15 bp, Homo sapiens
ccatccttcccccag

SEQ ID NO: 1802574 - DNA, 15 bp, Homo sapiens
catccttcccccagg

SEQ ID NO: 1802575 - DNA, 15 bp, Homo sapiens
atccttcccccagga

SEQ ID NO: 1802576 - DNA, 15 bp, Homo sapiens
tccttcccccaggag

SEQ ID NO: 1802577 - DNA, 15 bp, Homo sapiens
ccttcccccaggagg

SEQ ID NO: 1802578 - DNA, 15 bp, Homo sapiens
cttcccccaggagga

SEQ ID NO: 1802579 - DNA, 15 bp, Homo sapiens
ttcccccaggaggac

SEQ ID NO: 1802580 - DNA, 15 bp, Homo sapiens
tcccccaggaggaca

SEQ ID NO: 1802581 - DNA, 15 bp, Homo sapiens
cccccaggaggacag

SEQ ID NO: 1802582 - DNA, 15 bp, Homo sapiens
ccccaggaggacagg

SEQ ID NO: 1802583 - DNA, 15 bp, Homo sapiens
cccaggaggacaggc

SEQ ID NO: 1802584 - DNA, 15 bp, Homo sapiens
ccaggaggacaggcc

SEQ ID NO: 1802585 - DNA, 15 bp, Homo sapiens
caggaggacaggccg

SEQ ID NO: 1802586 - DNA, 15 bp, Homo sapiens
aggaggacaggccgc

SEQ ID NO: 1802587 - DNA, 15 bp, Homo sapiens
ggaggacaggccgcc

SEQ ID NO: 1802588 - DNA, 15 bp, Homo sapiens
gaggacaggccgccc

SEQ ID NO: 1802589 - DNA, 15 bp, Homo sapiens
aggacaggccgcccc

SEQ ID NO: 1802590 - DNA, 15 bp, Homo sapiens
ggacaggccgcccct

SEQ ID NO: 1802591 - DNA, 15 bp, Homo sapiens
gacaggccgcccctt

SEQ ID NO: 1802592 - DNA, 15 bp, Homo sapiens
acaggccgccccttg

SEQ ID NO: 1802593 - DNA, 15 bp, Homo sapiens
caggccgccccttgc

SEQ ID NO: 1802594 - DNA, 15 bp, Homo sapiens
aggccgccccttgcc

SEQ ID NO: 1802595 - DNA, 15 bp, Homo sapiens
ggccgccccttgccc

SEQ ID NO: 1802596 - DNA, 15 bp, Homo sapiens
gccgccccttgccct

SEQ ID NO: 1802597 - DNA, 15 bp, Homo sapiens
ccgccccttgccctc

SEQ ID NO: 1802598 - DNA, 15 bp, Homo sapiens
cgccccttgccctct

SEQ ID NO: 1802599 - DNA, 15 bp, Homo sapiens
gccccttgccctctg

SEQ ID NO: 1802600 - DNA, 15 bp, Homo sapiens
ccccttgccctctgt

SEQ ID NO: 1802601 - DNA, 15 bp, Homo sapiens
cccttgccctctgta

SEQ ID NO: 1802602 - DNA, 15 bp, Homo sapiens
ccttgccctctgtac

SEQ ID NO: 1802603 - DNA, 15 bp, Homo sapiens
cttgccctctgtact

SEQ ID NO: 1802604 - DNA, 15 bp, Homo sapiens
ttgccctctgtactc

SEQ ID NO: 1802605 - DNA, 15 bp, Homo sapiens
tgccctctgtactca

SEQ ID NO: 1802606 - DNA, 15 bp, Homo sapiens
gccctctgtactcac

SEQ ID NO: 1802607 - DNA, 15 bp, Homo sapiens
ccctctgtactcaca

SEQ ID NO: 1802608 - DNA, 15 bp, Homo sapiens
cctctgtactcacat

SEQ ID NO: 1802609 - DNA, 15 bp, Homo sapiens
ctctgtactcacatt

SEQ ID NO: 1802610 - DNA, 15 bp, Homo sapiens
tctgtactcacattc

SEQ ID NO: 1802611 - DNA, 15 bp, Homo sapiens
ctgtactcacattct

SEQ ID NO: 1802612 - DNA, 15 bp, Homo sapiens
tgtactcacattctg

SEQ ID NO: 1802613 - DNA, 15 bp, Homo sapiens
gtactcacattctgc

SEQ ID NO: 1802614 - DNA, 15 bp, Homo sapiens
tactcacattctgca

SEQ ID NO: 1802615 - DNA, 15 bp, Homo sapiens
actcacattctgcat

SEQ ID NO: 1802616 - DNA, 15 bp, Homo sapiens
ctcacattctgcatg

SEQ ID NO: 1802617 - DNA, 15 bp, Homo sapiens
tcacattctgcatga

SEQ ID NO: 1802618 - DNA, 15 bp, Homo sapiens
acattctgcatgaac

SEQ ID NO: 1802619 - DNA, 15 bp, Homo sapiens
cattctgcatgaact

SEQ ID NO: 1802620 - DNA, 15 bp, Homo sapiens
attctgcatgaactc

SEQ ID NO: 1802621 - DNA, 15 bp, Homo sapiens
ttctgcatgaactca

SEQ ID NO: 1802622 - DNA, 15 bp, Homo sapiens
tctgcatgaactcac

SEQ ID NO: 1802623 - DNA, 15 bp, Homo sapiens
ctgcatgaactcaca

SEQ ID NO: 1802624 - DNA, 15 bp, Homo sapiens
tgcatgaactcacag

SEQ ID NO: 1802625 - DNA, 15 bp, Homo sapiens
gcatgaactcacaga

SEQ ID NO: 1802626 - DNA, 15 bp, Homo sapiens
catgaactcacagaa

SEQ ID NO: 1802627 - DNA, 15 bp, Homo sapiens
atgaactcacagaaa

SEQ ID NO: 1802628 - DNA, 15 bp, Homo sapiens
tgaactcacagaaag

SEQ ID NO: 1802629 - DNA, 15 bp, Homo sapiens
gaactcacagaaagg

SEQ ID NO: 1802630 - DNA, 15 bp, Homo sapiens
aactcacagaaaggt

SEQ ID NO: 1802631 - DNA, 15 bp, Homo sapiens
actcacagaaaggtc

SEQ ID NO: 1802632 - DNA, 15 bp, Homo sapiens
ctcacagaaaggtca

SEQ ID NO: 1802633 - DNA, 15 bp, Homo sapiens
tcacagaaaggtcac

SEQ ID NO: 1802634 - DNA, 15 bp, Homo sapiens
cacagaaaggtcacc

SEQ ID NO: 1802635 - DNA, 15 bp, Homo sapiens
acagaaaggtcacct

SEQ ID NO: 1802636 - DNA, 15 bp, Homo sapiens
cagaaaggtcacctc

SEQ ID NO: 1802637 - DNA, 15 bp, Homo sapiens
agaaaggtcacctcc

SEQ ID NO: 1802638 - DNA, 15 bp, Homo sapiens
gaaaggtcacctccc

SEQ ID NO: 1802639 - DNA, 15 bp, Homo sapiens
aaaggtcacctccct

SEQ ID NO: 1802640 - DNA, 15 bp, Homo sapiens
aaggtcacctccctc

SEQ ID NO: 1802641 - DNA, 15 bp, Homo sapiens
aggtcacctccctcc

SEQ ID NO: 1802642 - DNA, 15 bp, Homo sapiens
ggtcacctccctccc

SEQ ID NO: 1802643 - DNA, 15 bp, Homo sapiens
cacctccctccctgt

SEQ ID NO: 1802644 - DNA, 15 bp, Homo sapiens
acctccctccctgtg

SEQ ID NO: 1802645 - DNA, 15 bp, Homo sapiens
cctccctccctgtgc

SEQ ID NO: 1802646 - DNA, 15 bp, Homo sapiens
ctccctccctgtgct

SEQ ID NO: 1802647 - DNA, 15 bp, Homo sapiens
tccctccctgtgctc

SEQ ID NO: 1802648 - DNA, 15 bp, Homo sapiens
ccctccctgtgctca

SEQ ID NO: 1802649 - DNA, 15 bp, Homo sapiens
cctccctgtgctcag

SEQ ID NO: 1802650 - DNA, 15 bp, Homo sapiens
ctccctgtgctcagg

SEQ ID NO: 1802651 - DNA, 15 bp, Homo sapiens
tccctgtgctcaggt

SEQ ID NO: 1802652 - DNA, 15 bp, Homo sapiens
ccctgtgctcaggtg

SEQ ID NO: 1802653 - DNA, 15 bp, Homo sapiens
cctgtgctcaggtgg

SEQ ID NO: 1802654 - DNA, 15 bp, Homo sapiens
ctgtgctcaggtggc

SEQ ID NO: 1802655 - DNA, 15 bp, Homo sapiens
tgtgctcaggtggca

SEQ ID NO: 1802656 - DNA, 15 bp, Homo sapiens
gtgctcaggtggcag

SEQ ID NO: 1802657 - DNA, 15 bp, Homo sapiens
tgctcaggtggcagc

SEQ ID NO: 1802658 - DNA, 15 bp, Homo sapiens
gctcaggtggcagcc

SEQ ID NO: 1802659 - DNA, 15 bp, Homo sapiens
ctcaggtggcagcct

SEQ ID NO: 1802660 - DNA, 15 bp, Homo sapiens
tcaggtggcagcctg

SEQ ID NO: 1802661 - DNA, 15 bp, Homo sapiens
caggtggcagcctgg

SEQ ID NO: 1802662 - DNA, 15 bp, Homo sapiens
aggtggcagcctggc

SEQ ID NO: 1802663 - DNA, 15 bp, Homo sapiens
ggtggcagcctggct

SEQ ID NO: 1802664 - DNA, 15 bp, Homo sapiens
gtggcagcctggctt

SEQ ID NO: 1802665 - DNA, 15 bp, Homo sapiens
tggcagcctggcttc

SEQ ID NO: 1802666 - DNA, 15 bp, Homo sapiens
ggcagcctggcttcc

SEQ ID NO: 1802667 - DNA, 15 bp, Homo sapiens
gcagcctggcttcct

SEQ ID NO: 1802668 - DNA, 15 bp, Homo sapiens
cagcctggcttcctg

SEQ ID NO: 1802669 - DNA, 15 bp, Homo sapiens
agcctggcttcctga

SEQ ID NO: 1802670 - DNA, 15 bp, Homo sapiens
gcctggcttcctgac

SEQ ID NO: 1802671 - DNA, 15 bp, Homo sapiens
cctggcttcctgacg

SEQ ID NO: 1802672 - DNA, 15 bp, Homo sapiens
ctggcttcctgacgg

SEQ ID NO: 1802673 - DNA, 15 bp, Homo sapiens
tggcttcctgacggt

SEQ ID NO: 1802674 - DNA, 15 bp, Homo sapiens
ggcttcctgacggtg

SEQ ID NO: 1802675 - DNA, 15 bp, Homo sapiens
gcttcctgacggtgt

SEQ ID NO: 1802676 - DNA, 15 bp, Homo sapiens
cttcctgacggtgtg

SEQ ID NO: 1802677 - DNA, 15 bp, Homo sapiens
ttcctgacggtgtgt

SEQ ID NO: 1802678 - DNA, 15 bp, Homo sapiens
tcctgacggtgtgtc

SEQ ID NO: 1802679 - DNA, 15 bp, Homo sapiens
cctgacggtgtgtca

SEQ ID NO: 1802680 - DNA, 15 bp, Homo sapiens
ctgacggtgtgtcat

SEQ ID NO: 1802681 - DNA, 15 bp, Homo sapiens
tgacggtgtgtcatc

SEQ ID NO: 1802682 - DNA, 15 bp, Homo sapiens
gacggtgtgtcatcc

SEQ ID NO: 1802683 - DNA, 15 bp, Homo sapiens
acggtgtgtcatcct

SEQ ID NO: 1802684 - DNA, 15 bp, Homo sapiens
cggtgtgtcatcctc

SEQ ID NO: 1802685 - DNA, 15 bp, Homo sapiens
ggtgtgtcatcctca

SEQ ID NO: 1802686 - DNA, 15 bp, Homo sapiens
gtgtgtcatcctcag

SEQ ID NO: 1802687 - DNA, 15 bp, Homo sapiens
tgtgtcatcctcagg

SEQ ID NO: 1802688 - DNA, 15 bp, Homo sapiens
gtgtcatcctcaggc

SEQ ID NO: 1802689 - DNA, 15 bp, Homo sapiens
tgtcatcctcaggcc

SEQ ID NO: 1802690 - DNA, 15 bp, Homo sapiens
gtcatcctcaggcca

SEQ ID NO: 1802691 - DNA, 15 bp, Homo sapiens
tcatcctcaggccag

SEQ ID NO: 1802692 - DNA, 15 bp, Homo sapiens
catcctcaggccagc

SEQ ID NO: 1802693 - DNA, 15 bp, Homo sapiens
atcctcaggccagcc

SEQ ID NO: 1802694 - DNA, 15 bp, Homo sapiens
tcctcaggccagcca

SEQ ID NO: 1802695 - DNA, 15 bp, Homo sapiens
cctcaggccagccat

SEQ ID NO: 1802696 - DNA, 15 bp, Homo sapiens
ctcaggccagccatc

SEQ ID NO: 1802697 - DNA, 15 bp, Homo sapiens
tcaggccagccatcc

SEQ ID NO: 1802698 - DNA, 15 bp, Homo sapiens
caggccagccatccc

SEQ ID NO: 1802699 - DNA, 15 bp, Homo sapiens
aggccagccatcccc

SEQ ID NO: 1802700 - DNA, 15 bp, Homo sapiens
ggccagccatcccca

SEQ ID NO: 1802701 - DNA, 15 bp, Homo sapiens
gccagccatccccag

SEQ ID NO: 1802702 - DNA, 15 bp, Homo sapiens
ccagccatccccaga

SEQ ID NO: 1802703 - DNA, 15 bp, Homo sapiens
cagccatccccagaa

SEQ ID NO: 1802704 - DNA, 15 bp, Homo sapiens
agccatccccagaat

SEQ ID NO: 1802705 - DNA, 15 bp, Homo sapiens
gccatccccagaata

SEQ ID NO: 1802706 - DNA, 15 bp, Homo sapiens
ccatccccagaatag

SEQ ID NO: 1802707 - DNA, 15 bp, Homo sapiens
catccccagaatagg

SEQ ID NO: 1802708 - DNA, 15 bp, Homo sapiens
atccccagaataggg

SEQ ID NO: 1802709 - DNA, 15 bp, Homo sapiens
tccccagaatagggg

SEQ ID NO: 1802710 - DNA, 15 bp, Homo sapiens
ccccagaataggggc

SEQ ID NO: 1802711 - DNA, 15 bp, Homo sapiens
cccagaataggggcc

SEQ ID NO: 1802712 - DNA, 15 bp, Homo sapiens
ccagaataggggcca

SEQ ID NO: 1802713 - DNA, 15 bp, Homo sapiens
cagaataggggccaa

SEQ ID NO: 1802714 - DNA, 15 bp, Homo sapiens
agaataggggccaaa

SEQ ID NO: 1802715 - DNA, 15 bp, Homo sapiens
gaataggggccaaaa

SEQ ID NO: 1802716 - DNA, 15 bp, Homo sapiens
aataggggccaaaag

SEQ ID NO: 1802717 - DNA, 15 bp, Homo sapiens
ataggggccaaaagg

SEQ ID NO: 1802718 - DNA, 15 bp, Homo sapiens
taggggccaaaaggc

SEQ ID NO: 1802719 - DNA, 15 bp, Homo sapiens
aggggccaaaaggca

SEQ ID NO: 1802720 - DNA, 15 bp, Homo sapiens
ggggccaaaaggcac

SEQ ID NO: 1802721 - DNA, 15 bp, Homo sapiens
gggccaaaaggcacc

SEQ ID NO: 1802722 - DNA, 15 bp, Homo sapiens
ggccaaaaggcacct

SEQ ID NO: 1802723 - DNA, 15 bp, Homo sapiens
gccaaaaggcacctg

SEQ ID NO: 1802724 - DNA, 15 bp, Homo sapiens
ccaaaaggcacctgc

SEQ ID NO: 1802725 - DNA, 15 bp, Homo sapiens
caaaaggcacctgcc

SEQ ID NO: 1802726 - DNA, 15 bp, Homo sapiens
aaaaggcacctgccg

SEQ ID NO: 1802727 - DNA, 15 bp, Homo sapiens
aaaggcacctgccga

SEQ ID NO: 1802728 - DNA, 15 bp, Homo sapiens
aaggcacctgccgac

SEQ ID NO: 1802729 - DNA, 15 bp, Homo sapiens
aggcacctgccgacc

SEQ ID NO: 1802730 - DNA, 15 bp, Homo sapiens
ggcacctgccgacct

SEQ ID NO: 1802731 - DNA, 15 bp, Homo sapiens
gcacctgccgacctg

SEQ ID NO: 1802732 - DNA, 15 bp, Homo sapiens
cacctgccgacctgg

SEQ ID NO: 1802733 - DNA, 15 bp, Homo sapiens
acctgccgacctggc

SEQ ID NO: 1802734 - DNA, 15 bp, Homo sapiens
cctgccgacctggcc

SEQ ID NO: 1802735 - DNA, 15 bp, Homo sapiens
ctgccgacctggcca

SEQ ID NO: 1802736 - DNA, 15 bp, Homo sapiens
tgccgacctggccat

SEQ ID NO: 1802737 - DNA, 15 bp, Homo sapiens
gccgacctggccatc

SEQ ID NO: 1802738 - DNA, 15 bp, Homo sapiens
ccgacctggccatcg

SEQ ID NO: 1802739 - DNA, 15 bp, Homo sapiens
cgacctggccatcgg

SEQ ID NO: 1802740 - DNA, 15 bp, Homo sapiens
gacctggccatcggg

SEQ ID NO: 1802741 - DNA, 15 bp, Homo sapiens
acctggccatcgggg

SEQ ID NO: 1802742 - DNA, 15 bp, Homo sapiens
cctggccatcgggga

SEQ ID NO: 1802743 - DNA, 15 bp, Homo sapiens
ctggccatcggggaa

SEQ ID NO: 1802744 - DNA, 15 bp, Homo sapiens
tggccatcggggaat

SEQ ID NO: 1802745 - DNA, 15 bp, Homo sapiens
ggccatcggggaata

SEQ ID NO: 1802746 - DNA, 15 bp, Homo sapiens
gccatcggggaataa

SEQ ID NO: 1802747 - DNA, 15 bp, Homo sapiens
ccatcggggaataat

SEQ ID NO: 1802748 - DNA, 15 bp, Homo sapiens
catcggggaataatt

SEQ ID NO: 1802749 - DNA, 15 bp, Homo sapiens
atcggggaataattt

SEQ ID NO: 1802750 - DNA, 15 bp, Homo sapiens
tcggggaataattta

SEQ ID NO: 1802751 - DNA, 15 bp, Homo sapiens
cggggaataatttaa

SEQ ID NO: 1802752 - DNA, 15 bp, Homo sapiens
ggggaataatttaaa

SEQ ID NO: 1802753 - DNA, 15 bp, Homo sapiens
gggaataatttaaag

SEQ ID NO: 1802754 - DNA, 15 bp, Homo sapiens
ggaataatttaaagt

SEQ ID NO: 1802755 - DNA, 15 bp, Homo sapiens
gaataatttaaagta

SEQ ID NO: 1802756 - DNA, 15 bp, Homo sapiens
aataatttaaagtaa

SEQ ID NO: 1802757 - DNA, 15 bp, Homo sapiens
ataatttaaagtaac

SEQ ID NO: 1802758 - DNA, 15 bp, Homo sapiens
taatttaaagtaacc

SEQ ID NO: 1802759 - DNA, 15 bp, Homo sapiens
aatttaaagtaaccc

SEQ ID NO: 1802760 - DNA, 15 bp, Homo sapiens
atttaaagtaacccc

SEQ ID NO: 1802761 - DNA, 15 bp, Homo sapiens
tttaaagtaacccca

SEQ ID NO: 1802762 - DNA, 15 bp, Homo sapiens
ttaaagtaaccccag

SEQ ID NO: 1802763 - DNA, 15 bp, Homo sapiens
taaagtaaccccaga

SEQ ID NO: 1802764 - DNA, 15 bp, Homo sapiens
aaagtaaccccagag

SEQ ID NO: 1802765 - DNA, 15 bp, Homo sapiens
aagtaaccccagaga

SEQ ID NO: 1802766 - DNA, 15 bp, Homo sapiens
agtaaccccagagag

SEQ ID NO: 1802767 - DNA, 15 bp, Homo sapiens
gtaaccccagagagg

SEQ ID NO: 1802768 - DNA, 15 bp, Homo sapiens
taaccccagagaggg

SEQ ID NO: 1802769 - DNA, 15 bp, Homo sapiens
aaccccagagagggg

SEQ ID NO: 1802770 - DNA, 15 bp, Homo sapiens
accccagagaggggt

SEQ ID NO: 1802771 - DNA, 15 bp, Homo sapiens
ccccagagaggggtt

SEQ ID NO: 1802772 - DNA, 15 bp, Homo sapiens
cccagagaggggtta

SEQ ID NO: 1802773 - DNA, 15 bp, Homo sapiens
ccagagaggggttac

SEQ ID NO: 1802774 - DNA, 15 bp, Homo sapiens
cagagaggggttacc

SEQ ID NO: 1802775 - DNA, 15 bp, Homo sapiens
agagaggggttacca

SEQ ID NO: 1802776 - DNA, 15 bp, Homo sapiens
gagaggggttaccag

SEQ ID NO: 1802777 - DNA, 15 bp, Homo sapiens
agaggggttaccaga

SEQ ID NO: 1802778 - DNA, 15 bp, Homo sapiens
gaggggttaccagaa

SEQ ID NO: 1802779 - DNA, 15 bp, Homo sapiens
aggggttaccagaag

SEQ ID NO: 1802780 - DNA, 15 bp, Homo sapiens
ggggttaccagaagt

SEQ ID NO: 1802781 - DNA, 15 bp, Homo sapiens
gggttaccagaagtc

SEQ ID NO: 1802782 - DNA, 15 bp, Homo sapiens
ggttaccagaagtca

SEQ ID NO: 1802783 - DNA, 15 bp, Homo sapiens
gttaccagaagtcaa

SEQ ID NO: 1802784 - DNA, 15 bp, Homo sapiens
ttaccagaagtcaag

SEQ ID NO: 1802785 - DNA, 15 bp, Homo sapiens
taccagaagtcaagt

SEQ ID NO: 1802786 - DNA, 15 bp, Homo sapiens
accagaagtcaagtg

SEQ ID NO: 1802787 - DNA, 15 bp, Homo sapiens
ccagaagtcaagtgt

SEQ ID NO: 1802788 - DNA, 15 bp, Homo sapiens
cagaagtcaagtgtc

SEQ ID NO: 1802789 - DNA, 15 bp, Homo sapiens
agaagtcaagtgtcc

SEQ ID NO: 1802790 - DNA, 15 bp, Homo sapiens
gaagtcaagtgtcca

SEQ ID NO: 1802791 - DNA, 15 bp, Homo sapiens
aagtcaagtgtccac

SEQ ID NO: 1802792 - DNA, 15 bp, Homo sapiens
agtcaagtgtccaca

SEQ ID NO: 1802793 - DNA, 15 bp, Homo sapiens
gtcaagtgtccacag

SEQ ID NO: 1802794 - DNA, 15 bp, Homo sapiens
tcaagtgtccacagc

SEQ ID NO: 1802795 - DNA, 15 bp, Homo sapiens
caagtgtccacagca

SEQ ID NO: 1802796 - DNA, 15 bp, Homo sapiens
aagtgtccacagcaa

SEQ ID NO: 1802797 - DNA, 15 bp, Homo sapiens
agtgtccacagcaaa

SEQ ID NO: 1802798 - DNA, 15 bp, Homo sapiens
gtgtccacagcaaac

SEQ ID NO: 1802799 - DNA, 15 bp, Homo sapiens
tgtccacagcaaacc

SEQ ID NO: 1802800 - DNA, 15 bp, Homo sapiens
gtccacagcaaacct

SEQ ID NO: 1802801 - DNA, 15 bp, Homo sapiens
tccacagcaaacctg

SEQ ID NO: 1802802 - DNA, 15 bp, Homo sapiens
ccacagcaaacctga

SEQ ID NO: 1802803 - DNA, 15 bp, Homo sapiens
cacagcaaacctgaa

SEQ ID NO: 1802804 - DNA, 15 bp, Homo sapiens
acagcaaacctgaaa

SEQ ID NO: 1802805 - DNA, 15 bp, Homo sapiens
cagcaaacctgaaaa

SEQ ID NO: 1802806 - DNA, 15 bp, Homo sapiens
agcaaacctgaaaac

SEQ ID NO: 1802807 - DNA, 15 bp, Homo sapiens
gcaaacctgaaaact

SEQ ID NO: 1802808 - DNA, 15 bp, Homo sapiens
caaacctgaaaactc

SEQ ID NO: 1802809 - DNA, 15 bp, Homo sapiens
aaacctgaaaactct

SEQ ID NO: 1802810 - DNA, 15 bp, Homo sapiens
aacctgaaaactctt

SEQ ID NO: 1802811 - DNA, 15 bp, Homo sapiens
acctgaaaactcttt

SEQ ID NO: 1802812 - DNA, 15 bp, Homo sapiens
cctgaaaactctttt

SEQ ID NO: 1802813 - DNA, 15 bp, Homo sapiens
ctgaaaactcttttt

SEQ ID NO: 1802814 - DNA, 15 bp, Homo sapiens
tgaaaactctttttt

SEQ ID NO: 1802815 - DNA, 15 bp, Homo sapiens
gaaaactctttttta

SEQ ID NO: 1802816 - DNA, 15 bp, Homo sapiens
aaaactcttttttac

SEQ ID NO: 1802817 - DNA, 15 bp, Homo sapiens
aaactcttttttaca

SEQ ID NO: 1802818 - DNA, 15 bp, Homo sapiens
aactcttttttacat

SEQ ID NO: 1802819 - DNA, 15 bp, Homo sapiens
actcttttttacatt

SEQ ID NO: 1802820 - DNA, 15 bp, Homo sapiens
ctcttttttacattt

SEQ ID NO: 1802821 - DNA, 15 bp, Homo sapiens
tcttttttacatttt

SEQ ID NO: 1802822 - DNA, 15 bp, Homo sapiens
cttttttacatttta

SEQ ID NO: 1802823 - DNA, 15 bp, Homo sapiens
ttttttacattttat

SEQ ID NO: 1802824 - DNA, 15 bp, Homo sapiens
tttttacattttata

SEQ ID NO: 1802825 - DNA, 15 bp, Homo sapiens
ttttacattttatat

SEQ ID NO: 1802826 - DNA, 15 bp, Homo sapiens
tttacattttatatt

SEQ ID NO: 1802827 - DNA, 15 bp, Homo sapiens
ttacattttatattg

SEQ ID NO: 1802828 - DNA, 15 bp, Homo sapiens
tacattttatattgt

SEQ ID NO: 1802829 - DNA, 15 bp, Homo sapiens
acattttatattgtt

SEQ ID NO: 1802830 - DNA, 15 bp, Homo sapiens
cattttatattgtta

SEQ ID NO: 1802831 - DNA, 15 bp, Homo sapiens
attttatattgttac

SEQ ID NO: 1802832 - DNA, 15 bp, Homo sapiens
ttttatattgttact

SEQ ID NO: 1802833 - DNA, 15 bp, Homo sapiens
tttatattgttactg

SEQ ID NO: 1802834 - DNA, 15 bp, Homo sapiens
ttatattgttactgg

SEQ ID NO: 1802835 - DNA, 15 bp, Homo sapiens
tatattgttactgga

SEQ ID NO: 1802836 - DNA, 15 bp, Homo sapiens
atattgttactggaa

SEQ ID NO: 1802837 - DNA, 15 bp, Homo sapiens
tattgttactggaag

SEQ ID NO: 1802838 - DNA, 15 bp, Homo sapiens
attgttactggaagg

SEQ ID NO: 1802839 - DNA, 15 bp, Homo sapiens
ttgttactggaaggg

SEQ ID NO: 1802840 - DNA, 15 bp, Homo sapiens
tgttactggaagggg

SEQ ID NO: 1802841 - DNA, 15 bp, Homo sapiens
gttactggaaggggc

SEQ ID NO: 1802842 - DNA, 15 bp, Homo sapiens
ttactggaaggggct

SEQ ID NO: 1802843 - DNA, 15 bp, Homo sapiens
tactggaaggggctc

SEQ ID NO: 1802844 - DNA, 15 bp, Homo sapiens
actggaaggggctct

SEQ ID NO: 1802845 - DNA, 15 bp, Homo sapiens
ctggaaggggctctg

SEQ ID NO: 1802846 - DNA, 15 bp, Homo sapiens
tggaaggggctctgg

SEQ ID NO: 1802847 - DNA, 15 bp, Homo sapiens
ggaaggggctctggc

SEQ ID NO: 1802848 - DNA, 15 bp, Homo sapiens
gaaggggctctggcc

SEQ ID NO: 1802849 - DNA, 15 bp, Homo sapiens
aaggggctctggcct

SEQ ID NO: 1802850 - DNA, 15 bp, Homo sapiens
aggggctctggcctg

SEQ ID NO: 1802851 - DNA, 15 bp, Homo sapiens
ggggctctggcctgc

SEQ ID NO: 1802852 - DNA, 15 bp, Homo sapiens
gggctctggcctgca

SEQ ID NO: 1802853 - DNA, 15 bp, Homo sapiens
ggctctggcctgcaa

SEQ ID NO: 1802854 - DNA, 15 bp, Homo sapiens
gctctggcctgcaag

SEQ ID NO: 1802855 - DNA, 15 bp, Homo sapiens
ctctggcctgcaagc

SEQ ID NO: 1802856 - DNA, 15 bp, Homo sapiens
tctggcctgcaagcc

SEQ ID NO: 1802857 - DNA, 15 bp, Homo sapiens
ctggcctgcaagccc

SEQ ID NO: 1802858 - DNA, 15 bp, Homo sapiens
tggcctgcaagccct

SEQ ID NO: 1802859 - DNA, 15 bp, Homo sapiens
ggcctgcaagccctg

SEQ ID NO: 1802860 - DNA, 15 bp, Homo sapiens
gcctgcaagccctgg

SEQ ID NO: 1802861 - DNA, 15 bp, Homo sapiens
cctgcaagccctggg

SEQ ID NO: 1802862 - DNA, 15 bp, Homo sapiens
ctgcaagccctgggg

SEQ ID NO: 1802863 - DNA, 15 bp, Homo sapiens
tgcaagccctggggc

SEQ ID NO: 1802864 - DNA, 15 bp, Homo sapiens
gcaagccctggggca

SEQ ID NO: 1802865 - DNA, 15 bp, Homo sapiens
caagccctggggcag

SEQ ID NO: 1802866 - DNA, 15 bp, Homo sapiens
aagccctggggcagg

SEQ ID NO: 1802867 - DNA, 15 bp, Homo sapiens
agccctggggcagga

SEQ ID NO: 1802868 - DNA, 15 bp, Homo sapiens
gccctggggcaggaa

SEQ ID NO: 1802869 - DNA, 15 bp, Homo sapiens
ccctggggcaggaac

SEQ ID NO: 1802870 - DNA, 15 bp, Homo sapiens
cctggggcaggaacc

SEQ ID NO: 1802871 - DNA, 15 bp, Homo sapiens
ctggggcaggaacct

SEQ ID NO: 1802872 - DNA, 15 bp, Homo sapiens
tggggcaggaacctc

SEQ ID NO: 1802873 - DNA, 15 bp, Homo sapiens
ggggcaggaacctct

SEQ ID NO: 1802874 - DNA, 15 bp, Homo sapiens
gggcaggaacctctc

SEQ ID NO: 1802875 - DNA, 15 bp, Homo sapiens
ggcaggaacctctca

SEQ ID NO: 1802876 - DNA, 15 bp, Homo sapiens
gcaggaacctctcac

SEQ ID NO: 1802877 - DNA, 15 bp, Homo sapiens
caggaacctctcacc

SEQ ID NO: 1802878 - DNA, 15 bp, Homo sapiens
aggaacctctcacca

SEQ ID NO: 1802879 - DNA, 15 bp, Homo sapiens
ggaacctctcaccaa

SEQ ID NO: 1802880 - DNA, 15 bp, Homo sapiens
gaacctctcaccaac

SEQ ID NO: 1802881 - DNA, 15 bp, Homo sapiens
aacctctcaccaacc

SEQ ID NO: 1802882 - DNA, 15 bp, Homo sapiens
acctctcaccaacct

SEQ ID NO: 1802883 - DNA, 15 bp, Homo sapiens
cctctcaccaacctg

SEQ ID NO: 1802884 - DNA, 15 bp, Homo sapiens
ctctcaccaacctgg

SEQ ID NO: 1802885 - DNA, 15 bp, Homo sapiens
tctcaccaacctggg

SEQ ID NO: 1802886 - DNA, 15 bp, Homo sapiens
ctcaccaacctggga

SEQ ID NO: 1802887 - DNA, 15 bp, Homo sapiens
tcaccaacctgggat

SEQ ID NO: 1802888 - DNA, 15 bp, Homo sapiens
caccaacctgggatg

SEQ ID NO: 1802889 - DNA, 15 bp, Homo sapiens
accaacctgggatgc

SEQ ID NO: 1802890 - DNA, 15 bp, Homo sapiens
ccaacctgggatgca

SEQ ID NO: 1802891 - DNA, 15 bp, Homo sapiens
caacctgggatgcaa

SEQ ID NO: 1802892 - DNA, 15 bp, Homo sapiens
aacctgggatgcaag

SEQ ID NO: 1802893 - DNA, 15 bp, Homo sapiens
acctgggatgcaaga

SEQ ID NO: 1802894 - DNA, 15 bp, Homo sapiens
cctgggatgcaagag

SEQ ID NO: 1802895 - DNA, 15 bp, Homo sapiens
ctgggatgcaagagc

SEQ ID NO: 1802896 - DNA, 15 bp, Homo sapiens
tgggatgcaagagct

SEQ ID NO: 1802897 - DNA, 15 bp, Homo sapiens
gggatgcaagagcta

SEQ ID NO: 1802898 - DNA, 15 bp, Homo sapiens
ggatgcaagagctac

SEQ ID NO: 1802899 - DNA, 15 bp, Homo sapiens
gatgcaagagctaca

SEQ ID NO: 1802900 - DNA, 15 bp, Homo sapiens
atgcaagagctacac

SEQ ID NO: 1802901 - DNA, 15 bp, Homo sapiens
tgcaagagctacacg

SEQ ID NO: 1802902 - DNA, 15 bp, Homo sapiens
gcaagagctacacgg

SEQ ID NO: 1802903 - DNA, 15 bp, Homo sapiens
caagagctacacggg

SEQ ID NO: 1802904 - DNA, 15 bp, Homo sapiens
aagagctacacgggg

SEQ ID NO: 1802905 - DNA, 15 bp, Homo sapiens
agagctacacggggc

SEQ ID NO: 1802906 - DNA, 15 bp, Homo sapiens
gagctacacggggcc

SEQ ID NO: 1802907 - DNA, 15 bp, Homo sapiens
agctacacggggcct

SEQ ID NO: 1802908 - DNA, 15 bp, Homo sapiens
gctacacggggcctg

SEQ ID NO: 1802909 - DNA, 15 bp, Homo sapiens
ctacacggggcctgg

SEQ ID NO: 1802910 - DNA, 15 bp, Homo sapiens
tacacggggcctggg

SEQ ID NO: 1802911 - DNA, 15 bp, Homo sapiens
acacggggcctgggt

SEQ ID NO: 1802912 - DNA, 15 bp, Homo sapiens
cacggggcctgggtt

SEQ ID NO: 1802913 - DNA, 15 bp, Homo sapiens
acggggcctgggtta

SEQ ID NO: 1802914 - DNA, 15 bp, Homo sapiens
cggggcctgggttac

SEQ ID NO: 1802915 - DNA, 15 bp, Homo sapiens
ggggcctgggttacc

SEQ ID NO: 1802916 - DNA, 15 bp, Homo sapiens
gggcctgggttaccc

SEQ ID NO: 1802917 - DNA, 15 bp, Homo sapiens
ggcctgggttaccca

SEQ ID NO: 1802918 - DNA, 15 bp, Homo sapiens
gcctgggttacccaa

SEQ ID NO: 1802919 - DNA, 15 bp, Homo sapiens
cctgggttacccaaa

SEQ ID NO: 1802920 - DNA, 15 bp, Homo sapiens
ctgggttacccaaaa

SEQ ID NO: 1802921 - DNA, 15 bp, Homo sapiens
tgggttacccaaaaa

SEQ ID NO: 1802922 - DNA, 15 bp, Homo sapiens
gggttacccaaaaat

SEQ ID NO: 1802923 - DNA, 15 bp, Homo sapiens
ggttacccaaaaatc

SEQ ID NO: 1802924 - DNA, 15 bp, Homo sapiens
gttacccaaaaatct

SEQ ID NO: 1802925 - DNA, 15 bp, Homo sapiens
ttacccaaaaatctg

SEQ ID NO: 1802926 - DNA, 15 bp, Homo sapiens
tacccaaaaatctga

SEQ ID NO: 1802927 - DNA, 15 bp, Homo sapiens
acccaaaaatctgat

SEQ ID NO: 1802928 - DNA, 15 bp, Homo sapiens
cccaaaaatctgatg

SEQ ID NO: 1802929 - DNA, 15 bp, Homo sapiens
ccaaaaatctgatgt

SEQ ID NO: 1802930 - DNA, 15 bp, Homo sapiens
caaaaatctgatgtt

SEQ ID NO: 1802931 - DNA, 15 bp, Homo sapiens
aaaaatctgatgttt

SEQ ID NO: 1802932 - DNA, 15 bp, Homo sapiens
aaaatctgatgtttt

SEQ ID NO: 1802933 - DNA, 15 bp, Homo sapiens
aaatctgatgttttg

SEQ ID NO: 1802934 - DNA, 15 bp, Homo sapiens
aatctgatgttttga

SEQ ID NO: 1802935 - DNA, 15 bp, Homo sapiens
atctgatgttttgag

SEQ ID NO: 1802936 - DNA, 15 bp, Homo sapiens
tctgatgttttgagc

SEQ ID NO: 1802937 - DNA, 15 bp, Homo sapiens
ctgatgttttgagct

SEQ ID NO: 1802938 - DNA, 15 bp, Homo sapiens
tgatgttttgagcta

SEQ ID NO: 1802939 - DNA, 15 bp, Homo sapiens
gatgttttgagctac

SEQ ID NO: 1802940 - DNA, 15 bp, Homo sapiens
atgttttgagctaca

SEQ ID NO: 1802941 - DNA, 15 bp, Homo sapiens
tgttttgagctacag

SEQ ID NO: 1802942 - DNA, 15 bp, Homo sapiens
gttttgagctacagt

SEQ ID NO: 1802943 - DNA, 15 bp, Homo sapiens
ttttgagctacagtg

SEQ ID NO: 1802944 - DNA, 15 bp, Homo sapiens
tttgagctacagtgc

SEQ ID NO: 1802945 - DNA, 15 bp, Homo sapiens
ttgagctacagtgct

SEQ ID NO: 1802946 - DNA, 15 bp, Homo sapiens
tgagctacagtgctg

SEQ ID NO: 1802947 - DNA, 15 bp, Homo sapiens
gagctacagtgctgc

SEQ ID NO: 1802948 - DNA, 15 bp, Homo sapiens
agctacagtgctgca

SEQ ID NO: 1802949 - DNA, 15 bp, Homo sapiens
gctacagtgctgcac

SEQ ID NO: 1802950 - DNA, 15 bp, Homo sapiens
ctacagtgctgcaca

SEQ ID NO: 1802951 - DNA, 15 bp, Homo sapiens
tacagtgctgcacac

SEQ ID NO: 1802952 - DNA, 15 bp, Homo sapiens
acagtgctgcacact

SEQ ID NO: 1802953 - DNA, 15 bp, Homo sapiens
cagtgctgcacacta

SEQ ID NO: 1802954 - DNA, 15 bp, Homo sapiens
agtgctgcacactag

SEQ ID NO: 1802955 - DNA, 15 bp, Homo sapiens
gtgctgcacactagg

SEQ ID NO: 1802956 - DNA, 15 bp, Homo sapiens
tgctgcacactaggg

SEQ ID NO: 1802957 - DNA, 15 bp, Homo sapiens
gctgcacactagggg

SEQ ID NO: 1802958 - DNA, 15 bp, Homo sapiens
ctgcacactaggggg

SEQ ID NO: 1802959 - DNA, 15 bp, Homo sapiens
tgcacactagggggc

SEQ ID NO: 1802960 - DNA, 15 bp, Homo sapiens
gcacactagggggcc

SEQ ID NO: 1802961 - DNA, 15 bp, Homo sapiens
cacactagggggcca

SEQ ID NO: 1802962 - DNA, 15 bp, Homo sapiens
acactagggggccac

SEQ ID NO: 1802963 - DNA, 15 bp, Homo sapiens
cactagggggccaca

SEQ ID NO: 1802964 - DNA, 15 bp, Homo sapiens
actagggggccacat

SEQ ID NO: 1802965 - DNA, 15 bp, Homo sapiens
ctagggggccacatc

SEQ ID NO: 1802966 - DNA, 15 bp, Homo sapiens
tagggggccacatca

SEQ ID NO: 1802967 - DNA, 15 bp, Homo sapiens
agggggccacatcat

SEQ ID NO: 1802968 - DNA, 15 bp, Homo sapiens
gggggccacatcatg

SEQ ID NO: 1802969 - DNA, 15 bp, Homo sapiens
ggggccacatcatgg

SEQ ID NO: 1802970 - DNA, 15 bp, Homo sapiens
gggccacatcatggt

SEQ ID NO: 1802971 - DNA, 15 bp, Homo sapiens
ggccacatcatggtt

SEQ ID NO: 1802972 - DNA, 15 bp, Homo sapiens
gccacatcatggttt

SEQ ID NO: 1802973 - DNA, 15 bp, Homo sapiens
ccacatcatggttta

SEQ ID NO: 1802974 - DNA, 15 bp, Homo sapiens
cacatcatggtttat

SEQ ID NO: 1802975 - DNA, 15 bp, Homo sapiens
acatcatggtttata

SEQ ID NO: 1802976 - DNA, 15 bp, Homo sapiens
catcatggtttataa

SEQ ID NO: 1802977 - DNA, 15 bp, Homo sapiens
atcatggtttataag

SEQ ID NO: 1802978 - DNA, 15 bp, Homo sapiens
tcatggtttataaga

SEQ ID NO: 1802979 - DNA, 15 bp, Homo sapiens
catggtttataagac

SEQ ID NO: 1802980 - DNA, 15 bp, Homo sapiens
atggtttataagacc

SEQ ID NO: 1802981 - DNA, 15 bp, Homo sapiens
tggtttataagaccc

SEQ ID NO: 1802982 - DNA, 15 bp, Homo sapiens
ggtttataagacccc

SEQ ID NO: 1802983 - DNA, 15 bp, Homo sapiens
gtttataagacccca

SEQ ID NO: 1802984 - DNA, 15 bp, Homo sapiens
tttataagaccccac

SEQ ID NO: 1802985 - DNA, 15 bp, Homo sapiens
ttataagaccccacc

SEQ ID NO: 1802986 - DNA, 15 bp, Homo sapiens
tataagaccccacct

SEQ ID NO: 1802987 - DNA, 15 bp, Homo sapiens
ataagaccccaccta

SEQ ID NO: 1802988 - DNA, 15 bp, Homo sapiens
taagaccccacctag

SEQ ID NO: 1802989 - DNA, 15 bp, Homo sapiens
aagaccccacctaga

SEQ ID NO: 1802990 - DNA, 15 bp, Homo sapiens
agaccccacctagac

SEQ ID NO: 1802991 - DNA, 15 bp, Homo sapiens
gaccccacctagaca

SEQ ID NO: 1802992 - DNA, 15 bp, Homo sapiens
accccacctagacat

SEQ ID NO: 1802993 - DNA, 15 bp, Homo sapiens
ccccacctagacatt

SEQ ID NO: 1802994 - DNA, 15 bp, Homo sapiens
cccacctagacatta

SEQ ID NO: 1802995 - DNA, 15 bp, Homo sapiens
ccacctagacattat

SEQ ID NO: 1802996 - DNA, 15 bp, Homo sapiens
cacctagacattatc

SEQ ID NO: 1802997 - DNA, 15 bp, Homo sapiens
acctagacattatct

SEQ ID NO: 1802998 - DNA, 15 bp, Homo sapiens
cctagacattatctt

SEQ ID NO: 1802999 - DNA, 15 bp, Homo sapiens
ctagacattatcttg

SEQ ID NO: 1803000 - DNA, 15 bp, Homo sapiens
tagacattatcttgt

SEQ ID NO: 1803001 - DNA, 15 bp, Homo sapiens
agacattatcttgtc

SEQ ID NO: 1803002 - DNA, 15 bp, Homo sapiens
gacattatcttgtct

SEQ ID NO: 1803003 - DNA, 15 bp, Homo sapiens
acattatcttgtctt

SEQ ID NO: 1803004 - DNA, 15 bp, Homo sapiens
cattatcttgtcttg

SEQ ID NO: 1803005 - DNA, 15 bp, Homo sapiens
attatcttgtcttga

SEQ ID NO: 1803006 - DNA, 15 bp, Homo sapiens
ttatcttgtcttgag

SEQ ID NO: 1803007 - DNA, 15 bp, Homo sapiens
tatcttgtcttgaga

SEQ ID NO: 1803008 - DNA, 15 bp, Homo sapiens
atcttgtcttgagat

SEQ ID NO: 1803009 - DNA, 15 bp, Homo sapiens
tcttgtcttgagatg

SEQ ID NO: 1803010 - DNA, 15 bp, Homo sapiens
cttgtcttgagatgt

SEQ ID NO: 1803011 - DNA, 15 bp, Homo sapiens
ttgtcttgagatgtg

SEQ ID NO: 1803012 - DNA, 15 bp, Homo sapiens
tgtcttgagatgtgt

SEQ ID NO: 1803013 - DNA, 15 bp, Homo sapiens
gtcttgagatgtgtt

SEQ ID NO: 1803014 - DNA, 15 bp, Homo sapiens
tcttgagatgtgtta

SEQ ID NO: 1803015 - DNA, 15 bp, Homo sapiens
cttgagatgtgttat

SEQ ID NO: 1803016 - DNA, 15 bp, Homo sapiens
ttgagatgtgttatg

SEQ ID NO: 1803017 - DNA, 15 bp, Homo sapiens
tgagatgtgttatga

SEQ ID NO: 1803018 - DNA, 15 bp, Homo sapiens
gagatgtgttatgaa

SEQ ID NO: 1803019 - DNA, 15 bp, Homo sapiens
agatgtgttatgaaa

SEQ ID NO: 1803020 - DNA, 15 bp, Homo sapiens
gatgtgttatgaaaa

SEQ ID NO: 1803021 - DNA, 15 bp, Homo sapiens
atgtgttatgaaaat

SEQ ID NO: 1803022 - DNA, 15 bp, Homo sapiens
tgtgttatgaaaatg

SEQ ID NO: 1803023 - DNA, 15 bp, Homo sapiens
tgttatgaaaatggg

SEQ ID NO: 1803024 - DNA, 15 bp, Homo sapiens
gttatgaaaatggga

SEQ ID NO: 1803025 - DNA, 15 bp, Homo sapiens
ttatgaaaatgggag

SEQ ID NO: 1803026 - DNA, 15 bp, Homo sapiens
tatgaaaatgggagg

SEQ ID NO: 1803027 - DNA, 15 bp, Homo sapiens
atgaaaatgggagga

SEQ ID NO: 1803028 - DNA, 15 bp, Homo sapiens
tgaaaatgggaggaa

SEQ ID NO: 1803029 - DNA, 15 bp, Homo sapiens
gaaaatgggaggaag

SEQ ID NO: 1803030 - DNA, 15 bp, Homo sapiens
aaaatgggaggaagg

SEQ ID NO: 1803031 - DNA, 15 bp, Homo sapiens
aaatgggaggaaggg

SEQ ID NO: 1803032 - DNA, 15 bp, Homo sapiens
aatgggaggaagggc

SEQ ID NO: 1803033 - DNA, 15 bp, Homo sapiens
atgggaggaagggcc

SEQ ID NO: 1803034 - DNA, 15 bp, Homo sapiens
tgggaggaagggccg

SEQ ID NO: 1803035 - DNA, 15 bp, Homo sapiens
gggaggaagggccgg

SEQ ID NO: 1803036 - DNA, 15 bp, Homo sapiens
ggaggaagggccggg

SEQ ID NO: 1803037 - DNA, 15 bp, Homo sapiens
gaggaagggccgggt

SEQ ID NO: 1803038 - DNA, 15 bp, Homo sapiens
aggaagggccgggtg

SEQ ID NO: 1803039 - DNA, 15 bp, Homo sapiens
ggaagggccgggtgc

SEQ ID NO: 1803040 - DNA, 15 bp, Homo sapiens
gaagggccgggtgca

SEQ ID NO: 1803041 - DNA, 15 bp, Homo sapiens
aagggccgggtgcag

SEQ ID NO: 1803042 - DNA, 15 bp, Homo sapiens
agggccgggtgcagt

SEQ ID NO: 1803043 - DNA, 15 bp, Homo sapiens
gggccgggtgcagtg

SEQ ID NO: 1803044 - DNA, 15 bp, Homo sapiens
aatcccagcactttc

SEQ ID NO: 1803045 - DNA, 15 bp, Homo sapiens
atcccagcactttca

SEQ ID NO: 1803046 - DNA, 15 bp, Homo sapiens
tcccagcactttcag

SEQ ID NO: 1803047 - DNA, 15 bp, Homo sapiens
cccagcactttcaga

SEQ ID NO: 1803048 - DNA, 15 bp, Homo sapiens
ccagcactttcagag

SEQ ID NO: 1803049 - DNA, 15 bp, Homo sapiens
cagcactttcagagg

SEQ ID NO: 1803050 - DNA, 15 bp, Homo sapiens
agcactttcagaggc

SEQ ID NO: 1803051 - DNA, 15 bp, Homo sapiens
gcactttcagaggct

SEQ ID NO: 1803052 - DNA, 15 bp, Homo sapiens
cactttcagaggctg

SEQ ID NO: 1803053 - DNA, 15 bp, Homo sapiens
actttcagaggctga

SEQ ID NO: 1803054 - DNA, 15 bp, Homo sapiens
ctttcagaggctgag

SEQ ID NO: 1803055 - DNA, 15 bp, Homo sapiens
tttcagaggctgagg

SEQ ID NO: 1803056 - DNA, 15 bp, Homo sapiens
ttcagaggctgaggc

SEQ ID NO: 1803057 - DNA, 15 bp, Homo sapiens
tcagaggctgaggca

SEQ ID NO: 1803058 - DNA, 15 bp, Homo sapiens
agaggctgaggcagg

SEQ ID NO: 1803059 - DNA, 15 bp, Homo sapiens
gcaggcagatcacat

SEQ ID NO: 1803060 - DNA, 15 bp, Homo sapiens
caggcagatcacatg

SEQ ID NO: 1803061 - DNA, 15 bp, Homo sapiens
aggcagatcacatga

SEQ ID NO: 1803062 - DNA, 15 bp, Homo sapiens
ggcagatcacatgag

SEQ ID NO: 1803063 - DNA, 15 bp, Homo sapiens
gcagatcacatgagg

SEQ ID NO: 1803064 - DNA, 15 bp, Homo sapiens
cagatcacatgaggt

SEQ ID NO: 1803065 - DNA, 15 bp, Homo sapiens
agatcacatgaggtc

SEQ ID NO: 1803066 - DNA, 15 bp, Homo sapiens
gatcacatgaggtca

SEQ ID NO: 1803067 - DNA, 15 bp, Homo sapiens
atcacatgaggtcag

SEQ ID NO: 1803068 - DNA, 15 bp, Homo sapiens
tcacatgaggtcagg

SEQ ID NO: 1803069 - DNA, 15 bp, Homo sapiens
cacatgaggtcagga

SEQ ID NO: 1803070 - DNA, 15 bp, Homo sapiens
acatgaggtcaggag

SEQ ID NO: 1803071 - DNA, 15 bp, Homo sapiens
acatggtgaaactct

SEQ ID NO: 1803072 - DNA, 15 bp, Homo sapiens
catggtgaaactctg

SEQ ID NO: 1803073 - DNA, 15 bp, Homo sapiens
atggtgaaactctgt

SEQ ID NO: 1803074 - DNA, 15 bp, Homo sapiens
tggtgaaactctgtc

SEQ ID NO: 1803075 - DNA, 15 bp, Homo sapiens
ggtgaaactctgtct

SEQ ID NO: 1803076 - DNA, 15 bp, Homo sapiens
gtgaaactctgtctc

SEQ ID NO: 1803077 - DNA, 15 bp, Homo sapiens
tgaaactctgtctct

SEQ ID NO: 1803078 - DNA, 15 bp, Homo sapiens
tctgtctctaataaa

SEQ ID NO: 1803079 - DNA, 15 bp, Homo sapiens
ctgtctctaataaaa

SEQ ID NO: 1803080 - DNA, 15 bp, Homo sapiens
tgtctctaataaaaa

SEQ ID NO: 1803081 - DNA, 15 bp, Homo sapiens
gtctctaataaaaat

SEQ ID NO: 1803082 - DNA, 15 bp, Homo sapiens
tctctaataaaaata

SEQ ID NO: 1803083 - DNA, 15 bp, Homo sapiens
ctctaataaaaatat

SEQ ID NO: 1803084 - DNA, 15 bp, Homo sapiens
tctaataaaaatata

SEQ ID NO: 1803085 - DNA, 15 bp, Homo sapiens
ctaataaaaatatat

SEQ ID NO: 1803086 - DNA, 15 bp, Homo sapiens
taataaaaatatatg

SEQ ID NO: 1803087 - DNA, 15 bp, Homo sapiens
aataaaaatatatga

SEQ ID NO: 1803088 - DNA, 15 bp, Homo sapiens
ataaaaatatatgaa

SEQ ID NO: 1803089 - DNA, 15 bp, Homo sapiens
taaaaatatatgaat

SEQ ID NO: 1803090 - DNA, 15 bp, Homo sapiens
aaaaatatatgaatt

SEQ ID NO: 1803091 - DNA, 15 bp, Homo sapiens
aaaatatatgaatta

SEQ ID NO: 1803092 - DNA, 15 bp, Homo sapiens
aaatatatgaattag

SEQ ID NO: 1803093 - DNA, 15 bp, Homo sapiens
aatatatgaattagc

SEQ ID NO: 1803094 - DNA, 15 bp, Homo sapiens
atatatgaattagct

SEQ ID NO: 1803095 - DNA, 15 bp, Homo sapiens
tatatgaattagctg

SEQ ID NO: 1803096 - DNA, 15 bp, Homo sapiens
atatgaattagctgg

SEQ ID NO: 1803097 - DNA, 15 bp, Homo sapiens
tatgaattagctggg

SEQ ID NO: 1803098 - DNA, 15 bp, Homo sapiens
atgaattagctgggt

SEQ ID NO: 1803099 - DNA, 15 bp, Homo sapiens
tgaattagctgggtg

SEQ ID NO: 1803100 - DNA, 15 bp, Homo sapiens
gaattagctgggtgc

SEQ ID NO: 1803101 - DNA, 15 bp, Homo sapiens
aattagctgggtgcg

SEQ ID NO: 1803102 - DNA, 15 bp, Homo sapiens
attagctgggtgcgt

SEQ ID NO: 1803103 - DNA, 15 bp, Homo sapiens
ttagctgggtgcgtg

SEQ ID NO: 1803104 - DNA, 15 bp, Homo sapiens
tagctgggtgcgtga

SEQ ID NO: 1803105 - DNA, 15 bp, Homo sapiens
agctgggtgcgtgac

SEQ ID NO: 1803106 - DNA, 15 bp, Homo sapiens
gctgggtgcgtgacg

SEQ ID NO: 1803107 - DNA, 15 bp, Homo sapiens
ctgggtgcgtgacgc

SEQ ID NO: 1803108 - DNA, 15 bp, Homo sapiens
tgggtgcgtgacgct

SEQ ID NO: 1803109 - DNA, 15 bp, Homo sapiens
gggtgcgtgacgctt

SEQ ID NO: 1803110 - DNA, 15 bp, Homo sapiens
ggtgcgtgacgcttg

SEQ ID NO: 1803111 - DNA, 15 bp, Homo sapiens
gtgcgtgacgcttgc

SEQ ID NO: 1803112 - DNA, 15 bp, Homo sapiens
tgcgtgacgcttgcc

SEQ ID NO: 1803113 - DNA, 15 bp, Homo sapiens
gcgtgacgcttgcct

SEQ ID NO: 1803114 - DNA, 15 bp, Homo sapiens
cgtgacgcttgccta

SEQ ID NO: 1803115 - DNA, 15 bp, Homo sapiens
gtgacgcttgcctat

SEQ ID NO: 1803116 - DNA, 15 bp, Homo sapiens
tgacgcttgcctata

SEQ ID NO: 1803117 - DNA, 15 bp, Homo sapiens
gacgcttgcctatag

SEQ ID NO: 1803118 - DNA, 15 bp, Homo sapiens
acgcttgcctatagt

SEQ ID NO: 1803119 - DNA, 15 bp, Homo sapiens
cgcttgcctatagta

SEQ ID NO: 1803120 - DNA, 15 bp, Homo sapiens
gcttgcctatagtac

SEQ ID NO: 1803121 - DNA, 15 bp, Homo sapiens
cttgcctatagtacc

SEQ ID NO: 1803122 - DNA, 15 bp, Homo sapiens
ttgcctatagtacca

SEQ ID NO: 1803123 - DNA, 15 bp, Homo sapiens
tgcctatagtaccag

SEQ ID NO: 1803124 - DNA, 15 bp, Homo sapiens
gcctatagtaccagc

SEQ ID NO: 1803125 - DNA, 15 bp, Homo sapiens
cctatagtaccagct

SEQ ID NO: 1803126 - DNA, 15 bp, Homo sapiens
ctatagtaccagcta

SEQ ID NO: 1803127 - DNA, 15 bp, Homo sapiens
tatagtaccagctac

SEQ ID NO: 1803128 - DNA, 15 bp, Homo sapiens
atagtaccagctact

SEQ ID NO: 1803129 - DNA, 15 bp, Homo sapiens
tagtaccagctactt

SEQ ID NO: 1803130 - DNA, 15 bp, Homo sapiens
agtaccagctacttg

SEQ ID NO: 1803131 - DNA, 15 bp, Homo sapiens
gtaccagctacttgg

SEQ ID NO: 1803132 - DNA, 15 bp, Homo sapiens
gggaggctgaggcac

SEQ ID NO: 1803133 - DNA, 15 bp, Homo sapiens
ggaggctgaggcacg

SEQ ID NO: 1803134 - DNA, 15 bp, Homo sapiens
gaggctgaggcacga

SEQ ID NO: 1803135 - DNA, 15 bp, Homo sapiens
aggctgaggcacgag

SEQ ID NO: 1803136 - DNA, 15 bp, Homo sapiens
ggctgaggcacgaga

SEQ ID NO: 1803137 - DNA, 15 bp, Homo sapiens
gctgaggcacgagaa

SEQ ID NO: 1803138 - DNA, 15 bp, Homo sapiens
ctgaggcacgagaat

SEQ ID NO: 1803139 - DNA, 15 bp, Homo sapiens
tgaggcacgagaatt

SEQ ID NO: 1803140 - DNA, 15 bp, Homo sapiens
gaggcacgagaattg

SEQ ID NO: 1803141 - DNA, 15 bp, Homo sapiens
aggcacgagaattgc

SEQ ID NO: 1803142 - DNA, 15 bp, Homo sapiens
ggcacgagaattgct

SEQ ID NO: 1803143 - DNA, 15 bp, Homo sapiens
gcacgagaattgctt

SEQ ID NO: 1803144 - DNA, 15 bp, Homo sapiens
cacgagaattgcttg

SEQ ID NO: 1803145 - DNA, 15 bp, Homo sapiens
acgagaattgcttga

SEQ ID NO: 1803146 - DNA, 15 bp, Homo sapiens
cgagaattgcttgaa

SEQ ID NO: 1803147 - DNA, 15 bp, Homo sapiens
aattgcttgaacctg

SEQ ID NO: 1803148 - DNA, 15 bp, Homo sapiens
attgcttgaacctga

SEQ ID NO: 1803149 - DNA, 15 bp, Homo sapiens
ttgcttgaacctgag

SEQ ID NO: 1803150 - DNA, 15 bp, Homo sapiens
tgcttgaacctgaga

SEQ ID NO: 1803151 - DNA, 15 bp, Homo sapiens
gcttgaacctgagag

SEQ ID NO: 1803152 - DNA, 15 bp, Homo sapiens
tgaacctgagaggcg

SEQ ID NO: 1803153 - DNA, 15 bp, Homo sapiens
gaacctgagaggcgg

SEQ ID NO: 1803154 - DNA, 15 bp, Homo sapiens
aacctgagaggcgga

SEQ ID NO: 1803155 - DNA, 15 bp, Homo sapiens
acctgagaggcggag

SEQ ID NO: 1803156 - DNA, 15 bp, Homo sapiens
cctgagaggcggagg

SEQ ID NO: 1803157 - DNA, 15 bp, Homo sapiens
ctgagaggcggaggt

SEQ ID NO: 1803158 - DNA, 15 bp, Homo sapiens
tgagaggcggaggtt

SEQ ID NO: 1803159 - DNA, 15 bp, Homo sapiens
agaggcggaggttgc

SEQ ID NO: 1803160 - DNA, 15 bp, Homo sapiens
ttgtgccactgcacc

SEQ ID NO: 1803161 - DNA, 15 bp, Homo sapiens
tgtgccactgcaccc

SEQ ID NO: 1803162 - DNA, 15 bp, Homo sapiens
gtgccactgcacccc

SEQ ID NO: 1803163 - DNA, 15 bp, Homo sapiens
tgccactgcacccca

SEQ ID NO: 1803164 - DNA, 15 bp, Homo sapiens
gccactgcaccccag

SEQ ID NO: 1803165 - DNA, 15 bp, Homo sapiens
ccactgcaccccagt

SEQ ID NO: 1803166 - DNA, 15 bp, Homo sapiens
cactgcaccccagtc

SEQ ID NO: 1803167 - DNA, 15 bp, Homo sapiens
actgcaccccagtct

SEQ ID NO: 1803168 - DNA, 15 bp, Homo sapiens
ctgcaccccagtctg

SEQ ID NO: 1803169 - DNA, 15 bp, Homo sapiens
tgcaccccagtctgg

SEQ ID NO: 1803170 - DNA, 15 bp, Homo sapiens
gcaccccagtctggg

SEQ ID NO: 1803171 - DNA, 15 bp, Homo sapiens
caccccagtctgggc

SEQ ID NO: 1803172 - DNA, 15 bp, Homo sapiens
accccagtctgggcg

SEQ ID NO: 1803173 - DNA, 15 bp, Homo sapiens
ccccagtctgggcga

SEQ ID NO: 1803174 - DNA, 15 bp, Homo sapiens
cccagtctgggcgat

SEQ ID NO: 1803175 - DNA, 15 bp, Homo sapiens
ccagtctgggcgata

SEQ ID NO: 1803176 - DNA, 15 bp, Homo sapiens
cagtctgggcgatag

SEQ ID NO: 1803177 - DNA, 15 bp, Homo sapiens
agtctgggcgataga

SEQ ID NO: 1803178 - DNA, 15 bp, Homo sapiens
gtctgggcgatagag

SEQ ID NO: 1803179 - DNA, 15 bp, Homo sapiens
tctgggcgatagagt

SEQ ID NO: 1803180 - DNA, 15 bp, Homo sapiens
ctgggcgatagagtg

SEQ ID NO: 1803181 - DNA, 15 bp, Homo sapiens
tgggcgatagagtga

SEQ ID NO: 1803182 - DNA, 15 bp, Homo sapiens
gggcgatagagtgag

SEQ ID NO: 1803183 - DNA, 15 bp, Homo sapiens
ggcgatagagtgaga

SEQ ID NO: 1803184 - DNA, 15 bp, Homo sapiens
gcgatagagtgagac

SEQ ID NO: 1803185 - DNA, 15 bp, Homo sapiens
cgatagagtgagact

SEQ ID NO: 1803186 - DNA, 15 bp, Homo sapiens
gatagagtgagactc

SEQ ID NO: 1803187 - DNA, 15 bp, Homo sapiens
atagagtgagactcc

SEQ ID NO: 1803188 - DNA, 15 bp, Homo sapiens
tagagtgagactcca

SEQ ID NO: 1803189 - DNA, 15 bp, Homo sapiens
aaaaaaaaaaggata

SEQ ID NO: 1803190 - DNA, 15 bp, Homo sapiens
aaaaaaaaaggatat

SEQ ID NO: 1803191 - DNA, 15 bp, Homo sapiens
aaaaaaaaggatatg

SEQ ID NO: 1803192 - DNA, 15 bp, Homo sapiens
aaaaaaaggatatgg

SEQ ID NO: 1803193 - DNA, 15 bp, Homo sapiens
aaaaaaggatatggg

SEQ ID NO: 1803194 - DNA, 15 bp, Homo sapiens
aaaaaggatatggga

SEQ ID NO: 1803195 - DNA, 15 bp, Homo sapiens
aaaaggatatgggag

SEQ ID NO: 1803196 - DNA, 15 bp, Homo sapiens
aaaggatatgggagg

SEQ ID NO: 1803197 - DNA, 15 bp, Homo sapiens
aaggatatgggagga

SEQ ID NO: 1803198 - DNA, 15 bp, Homo sapiens
aggatatgggaggag

SEQ ID NO: 1803199 - DNA, 15 bp, Homo sapiens
ggatatgggaggagg

SEQ ID NO: 1803200 - DNA, 15 bp, Homo sapiens
gatatgggaggaggg

SEQ ID NO: 1803201 - DNA, 15 bp, Homo sapiens
atatgggaggaggga

SEQ ID NO: 1803202 - DNA, 15 bp, Homo sapiens
tatgggaggagggaa

SEQ ID NO: 1803203 - DNA, 15 bp, Homo sapiens
atgggaggagggaag

SEQ ID NO: 1803204 - DNA, 15 bp, Homo sapiens
tgggaggagggaagg

SEQ ID NO: 1803205 - DNA, 15 bp, Homo sapiens
gggaggagggaaggg

SEQ ID NO: 1803206 - DNA, 15 bp, Homo sapiens
ggaggagggaagggg

SEQ ID NO: 1803207 - DNA, 15 bp, Homo sapiens
gaggagggaagggga

SEQ ID NO: 1803208 - DNA, 15 bp, Homo sapiens
aggagggaaggggaa

SEQ ID NO: 1803209 - DNA, 15 bp, Homo sapiens
ggagggaaggggaag

SEQ ID NO: 1803210 - DNA, 15 bp, Homo sapiens
gagggaaggggaaga

SEQ ID NO: 1803211 - DNA, 15 bp, Homo sapiens
agggaaggggaagag

SEQ ID NO: 1803212 - DNA, 15 bp, Homo sapiens
gggaaggggaagaga

SEQ ID NO: 1803213 - DNA, 15 bp, Homo sapiens
ggaaggggaagagag

SEQ ID NO: 1803214 - DNA, 15 bp, Homo sapiens
gaaggggaagagaga

SEQ ID NO: 1803215 - DNA, 15 bp, Homo sapiens
aaggggaagagagag

SEQ ID NO: 1803216 - DNA, 15 bp, Homo sapiens
aggggaagagagagg

SEQ ID NO: 1803217 - DNA, 15 bp, Homo sapiens
ggggaagagagagga

SEQ ID NO: 1803218 - DNA, 15 bp, Homo sapiens
gggaagagagaggag

SEQ ID NO: 1803219 - DNA, 15 bp, Homo sapiens
ggaagagagaggagt

SEQ ID NO: 1803220 - DNA, 15 bp, Homo sapiens
gaagagagaggagtg

SEQ ID NO: 1803221 - DNA, 15 bp, Homo sapiens
aagagagaggagtgg

SEQ ID NO: 1803222 - DNA, 15 bp, Homo sapiens
agagagaggagtggg

SEQ ID NO: 1803223 - DNA, 15 bp, Homo sapiens
gagagaggagtgggg

SEQ ID NO: 1803224 - DNA, 15 bp, Homo sapiens
agagaggagtgggga

SEQ ID NO: 1803225 - DNA, 15 bp, Homo sapiens
agaggagtggggaac

SEQ ID NO: 1803226 - DNA, 15 bp, Homo sapiens
gaggagtggggaacc

SEQ ID NO: 1803227 - DNA, 15 bp, Homo sapiens
aggagtggggaacct

SEQ ID NO: 1803228 - DNA, 15 bp, Homo sapiens
ggagtggggaacctc

SEQ ID NO: 1803229 - DNA, 15 bp, Homo sapiens
gagtggggaacctct

SEQ ID NO: 1803230 - DNA, 15 bp, Homo sapiens
agtggggaacctcta

SEQ ID NO: 1803231 - DNA, 15 bp, Homo sapiens
gtggggaacctctag

SEQ ID NO: 1803232 - DNA, 15 bp, Homo sapiens
tggggaacctctagc

SEQ ID NO: 1803233 - DNA, 15 bp, Homo sapiens
ggggaacctctagcc

SEQ ID NO: 1803234 - DNA, 15 bp, Homo sapiens
gggaacctctagcca

SEQ ID NO: 1803235 - DNA, 15 bp, Homo sapiens
gaacctctagccaag

SEQ ID NO: 1803236 - DNA, 15 bp, Homo sapiens
aacctctagccaagc

SEQ ID NO: 1803237 - DNA, 15 bp, Homo sapiens
acctctagccaagcc

SEQ ID NO: 1803238 - DNA, 15 bp, Homo sapiens
cctctagccaagcca

SEQ ID NO: 1803239 - DNA, 15 bp, Homo sapiens
ctctagccaagccaa

SEQ ID NO: 1803240 - DNA, 15 bp, Homo sapiens
tctagccaagccaag

SEQ ID NO: 1803241 - DNA, 15 bp, Homo sapiens
ctagccaagccaagg

SEQ ID NO: 1803242 - DNA, 15 bp, Homo sapiens
tagccaagccaaggt

SEQ ID NO: 1803243 - DNA, 15 bp, Homo sapiens
agccaagccaaggtt

SEQ ID NO: 1803244 - DNA, 15 bp, Homo sapiens
gccaagccaaggttc

SEQ ID NO: 1803245 - DNA, 15 bp, Homo sapiens
ccaagccaaggttct

SEQ ID NO: 1803246 - DNA, 15 bp, Homo sapiens
caagccaaggttctg

SEQ ID NO: 1803247 - DNA, 15 bp, Homo sapiens
aagccaaggttctgg

SEQ ID NO: 1803248 - DNA, 15 bp, Homo sapiens
agccaaggttctggg

SEQ ID NO: 1803249 - DNA, 15 bp, Homo sapiens
gccaaggttctgggg

SEQ ID NO: 1803250 - DNA, 15 bp, Homo sapiens
ccaaggttctgggga

SEQ ID NO: 1803251 - DNA, 15 bp, Homo sapiens
caaggttctggggaa

SEQ ID NO: 1803252 - DNA, 15 bp, Homo sapiens
aaggttctggggaag

SEQ ID NO: 1803253 - DNA, 15 bp, Homo sapiens
aggttctggggaagg

SEQ ID NO: 1803254 - DNA, 15 bp, Homo sapiens
ggttctggggaagga

SEQ ID NO: 1803255 - DNA, 15 bp, Homo sapiens
gttctggggaaggaa

SEQ ID NO: 1803256 - DNA, 15 bp, Homo sapiens
ttctggggaaggaat

SEQ ID NO: 1803257 - DNA, 15 bp, Homo sapiens
tctggggaaggaatg

SEQ ID NO: 1803258 - DNA, 15 bp, Homo sapiens
ctggggaaggaatga

SEQ ID NO: 1803259 - DNA, 15 bp, Homo sapiens
tggggaaggaatgaa

SEQ ID NO: 1803260 - DNA, 15 bp, Homo sapiens
ggggaaggaatgaag

SEQ ID NO: 1803261 - DNA, 15 bp, Homo sapiens
gggaaggaatgaagg

SEQ ID NO: 1803262 - DNA, 15 bp, Homo sapiens
ggaaggaatgaaggg

SEQ ID NO: 1803263 - DNA, 15 bp, Homo sapiens
gaaggaatgaaggga

SEQ ID NO: 1803264 - DNA, 15 bp, Homo sapiens
aaggaatgaagggag

SEQ ID NO: 1803265 - DNA, 15 bp, Homo sapiens
aggaatgaagggagg

SEQ ID NO: 1803266 - DNA, 15 bp, Homo sapiens
ggaatgaagggaggg

SEQ ID NO: 1803267 - DNA, 15 bp, Homo sapiens
gaatgaagggagggt

SEQ ID NO: 1803268 - DNA, 15 bp, Homo sapiens
aatgaagggagggtg

SEQ ID NO: 1803269 - DNA, 15 bp, Homo sapiens
atgaagggagggtgg

SEQ ID NO: 1803270 - DNA, 15 bp, Homo sapiens
tgaagggagggtggg

SEQ ID NO: 1803271 - DNA, 15 bp, Homo sapiens
gaagggagggtgggc

SEQ ID NO: 1803272 - DNA, 15 bp, Homo sapiens
aagggagggtgggca

SEQ ID NO: 1803273 - DNA, 15 bp, Homo sapiens
agggagggtgggcag

SEQ ID NO: 1803274 - DNA, 15 bp, Homo sapiens
gggagggtgggcagg

SEQ ID NO: 1803275 - DNA, 15 bp, Homo sapiens
ggagggtgggcaggc

SEQ ID NO: 1803276 - DNA, 15 bp, Homo sapiens
gagggtgggcaggca

SEQ ID NO: 1803277 - DNA, 15 bp, Homo sapiens
agggtgggcaggcat

SEQ ID NO: 1803278 - DNA, 15 bp, Homo sapiens
gggtgggcaggcatg

SEQ ID NO: 1803279 - DNA, 15 bp, Homo sapiens
ggtgggcaggcatgc

SEQ ID NO: 1803280 - DNA, 15 bp, Homo sapiens
gtgggcaggcatgca

SEQ ID NO: 1803281 - DNA, 15 bp, Homo sapiens
tgggcaggcatgcat

SEQ ID NO: 1803282 - DNA, 15 bp, Homo sapiens
gggcaggcatgcatg

SEQ ID NO: 1803283 - DNA, 15 bp, Homo sapiens
ggcaggcatgcatgg

SEQ ID NO: 1803284 - DNA, 15 bp, Homo sapiens
gcaggcatgcatggt

SEQ ID NO: 1803285 - DNA, 15 bp, Homo sapiens
caggcatgcatggtc

SEQ ID NO: 1803286 - DNA, 15 bp, Homo sapiens
aggcatgcatggtcc

SEQ ID NO: 1803287 - DNA, 15 bp, Homo sapiens
ggcatgcatggtcct

SEQ ID NO: 1803288 - DNA, 15 bp, Homo sapiens
gcatgcatggtccta

SEQ ID NO: 1803289 - DNA, 15 bp, Homo sapiens
catgcatggtcctag

SEQ ID NO: 1803290 - DNA, 15 bp, Homo sapiens
atgcatggtcctaga

SEQ ID NO: 1803291 - DNA, 15 bp, Homo sapiens
tgcatggtcctagac

SEQ ID NO: 1803292 - DNA, 15 bp, Homo sapiens
gcatggtcctagact

SEQ ID NO: 1803293 - DNA, 15 bp, Homo sapiens
catggtcctagactg

SEQ ID NO: 1803294 - DNA, 15 bp, Homo sapiens
atggtcctagactga

SEQ ID NO: 1803295 - DNA, 15 bp, Homo sapiens
tggtcctagactgag

SEQ ID NO: 1803296 - DNA, 15 bp, Homo sapiens
ggtcctagactgagc

SEQ ID NO: 1803297 - DNA, 15 bp, Homo sapiens
gtcctagactgagct

SEQ ID NO: 1803298 - DNA, 15 bp, Homo sapiens
tcctagactgagctg

SEQ ID NO: 1803299 - DNA, 15 bp, Homo sapiens
cctagactgagctgg

SEQ ID NO: 1803300 - DNA, 15 bp, Homo sapiens
ctagactgagctggg

SEQ ID NO: 1803301 - DNA, 15 bp, Homo sapiens
tagactgagctgggt

SEQ ID NO: 1803302 - DNA, 15 bp, Homo sapiens
agactgagctgggta

SEQ ID NO: 1803303 - DNA, 15 bp, Homo sapiens
gactgagctgggtat

SEQ ID NO: 1803304 - DNA, 15 bp, Homo sapiens
actgagctgggtata

SEQ ID NO: 1803305 - DNA, 15 bp, Homo sapiens
ctgagctgggtatag

SEQ ID NO: 1803306 - DNA, 15 bp, Homo sapiens
tgagctgggtatagg

SEQ ID NO: 1803307 - DNA, 15 bp, Homo sapiens
gagctgggtataggg

SEQ ID NO: 1803308 - DNA, 15 bp, Homo sapiens
agctgggtataggga

SEQ ID NO: 1803309 - DNA, 15 bp, Homo sapiens
gctgggtatagggag

SEQ ID NO: 1803310 - DNA, 15 bp, Homo sapiens
ctgggtatagggaga

SEQ ID NO: 1803311 - DNA, 15 bp, Homo sapiens
tgggtatagggagat

SEQ ID NO: 1803312 - DNA, 15 bp, Homo sapiens
gggtatagggagatc

SEQ ID NO: 1803313 - DNA, 15 bp, Homo sapiens
ggtatagggagatcc

SEQ ID NO: 1803314 - DNA, 15 bp, Homo sapiens
gtatagggagatcct

SEQ ID NO: 1803315 - DNA, 15 bp, Homo sapiens
tatagggagatcctg

SEQ ID NO: 1803316 - DNA, 15 bp, Homo sapiens
atagggagatcctgg

SEQ ID NO: 1803317 - DNA, 15 bp, Homo sapiens
tagggagatcctggc

SEQ ID NO: 1803318 - DNA, 15 bp, Homo sapiens
agggagatcctggct

SEQ ID NO: 1803319 - DNA, 15 bp, Homo sapiens
gggagatcctggctg

SEQ ID NO: 1803320 - DNA, 15 bp, Homo sapiens
ggagatcctggctgt

SEQ ID NO: 1803321 - DNA, 15 bp, Homo sapiens
gagatcctggctgtg

SEQ ID NO: 1803322 - DNA, 15 bp, Homo sapiens
agatcctggctgtgg

SEQ ID NO: 1803323 - DNA, 15 bp, Homo sapiens
gatcctggctgtggc

SEQ ID NO: 1803324 - DNA, 15 bp, Homo sapiens
atcctggctgtggct

SEQ ID NO: 1803325 - DNA, 15 bp, Homo sapiens
tcctggctgtggctg

SEQ ID NO: 1803326 - DNA, 15 bp, Homo sapiens
cctggctgtggctgg

SEQ ID NO: 1803327 - DNA, 15 bp, Homo sapiens
ctggctgtggctggg

SEQ ID NO: 1803328 - DNA, 15 bp, Homo sapiens
tggctgtggctgggc

SEQ ID NO: 1803329 - DNA, 15 bp, Homo sapiens
ggctgtggctgggct

SEQ ID NO: 1803330 - DNA, 15 bp, Homo sapiens
gctgtggctgggctc

SEQ ID NO: 1803331 - DNA, 15 bp, Homo sapiens
ctgtggctgggctca

SEQ ID NO: 1803332 - DNA, 15 bp, Homo sapiens
tgtggctgggctcag

SEQ ID NO: 1803333 - DNA, 15 bp, Homo sapiens
gtggctgggctcagt

SEQ ID NO: 1803334 - DNA, 15 bp, Homo sapiens
tggctgggctcagtt

SEQ ID NO: 1803335 - DNA, 15 bp, Homo sapiens
ggctgggctcagttt

SEQ ID NO: 1803336 - DNA, 15 bp, Homo sapiens
gctgggctcagtttg

SEQ ID NO: 1803337 - DNA, 15 bp, Homo sapiens
ctgggctcagtttgc

SEQ ID NO: 1803338 - DNA, 15 bp, Homo sapiens
tgggctcagtttgcc

SEQ ID NO: 1803339 - DNA, 15 bp, Homo sapiens
gggctcagtttgcct

SEQ ID NO: 1803340 - DNA, 15 bp, Homo sapiens
ggctcagtttgcctt

SEQ ID NO: 1803341 - DNA, 15 bp, Homo sapiens
gctcagtttgccttt

SEQ ID NO: 1803342 - DNA, 15 bp, Homo sapiens
ctcagtttgcctttt

SEQ ID NO: 1803343 - DNA, 15 bp, Homo sapiens
tcagtttgccttttc

SEQ ID NO: 1803344 - DNA, 15 bp, Homo sapiens
cagtttgccttttct

SEQ ID NO: 1803345 - DNA, 15 bp, Homo sapiens
agtttgccttttctg

SEQ ID NO: 1803346 - DNA, 15 bp, Homo sapiens
gtttgccttttctgg

SEQ ID NO: 1803347 - DNA, 15 bp, Homo sapiens
tttgccttttctggc

SEQ ID NO: 1803348 - DNA, 15 bp, Homo sapiens
ttgccttttctggca

SEQ ID NO: 1803349 - DNA, 15 bp, Homo sapiens
tgccttttctggcat

SEQ ID NO: 1803350 - DNA, 15 bp, Homo sapiens
gccttttctggcatt

SEQ ID NO: 1803351 - DNA, 15 bp, Homo sapiens
ccttttctggcattg

SEQ ID NO: 1803352 - DNA, 15 bp, Homo sapiens
cttttctggcattgc

SEQ ID NO: 1803353 - DNA, 15 bp, Homo sapiens
ttttctggcattgcc

SEQ ID NO: 1803354 - DNA, 15 bp, Homo sapiens
tttctggcattgcca

SEQ ID NO: 1803355 - DNA, 15 bp, Homo sapiens
ttctggcattgccag

SEQ ID NO: 1803356 - DNA, 15 bp, Homo sapiens
tctggcattgccagg

SEQ ID NO: 1803357 - DNA, 15 bp, Homo sapiens
ctggcattgccaggg

SEQ ID NO: 1803358 - DNA, 15 bp, Homo sapiens
tggcattgccagggc

SEQ ID NO: 1803359 - DNA, 15 bp, Homo sapiens
ggcattgccagggcc

SEQ ID NO: 1803360 - DNA, 15 bp, Homo sapiens
gcattgccagggcct

SEQ ID NO: 1803361 - DNA, 15 bp, Homo sapiens
cattgccagggcctt

SEQ ID NO: 1803362 - DNA, 15 bp, Homo sapiens
attgccagggccttg

SEQ ID NO: 1803363 - DNA, 15 bp, Homo sapiens
ttgccagggccttgg

SEQ ID NO: 1803364 - DNA, 15 bp, Homo sapiens
tgccagggccttgga

SEQ ID NO: 1803365 - DNA, 15 bp, Homo sapiens
gccagggccttggag

SEQ ID NO: 1803366 - DNA, 15 bp, Homo sapiens
ccagggccttggagg

SEQ ID NO: 1803367 - DNA, 15 bp, Homo sapiens
cagggccttggaggt

SEQ ID NO: 1803368 - DNA, 15 bp, Homo sapiens
agggccttggaggta

SEQ ID NO: 1803369 - DNA, 15 bp, Homo sapiens
gggccttggaggtag

SEQ ID NO: 1803370 - DNA, 15 bp, Homo sapiens
ggccttggaggtaga

SEQ ID NO: 1803371 - DNA, 15 bp, Homo sapiens
gccttggaggtagaa

SEQ ID NO: 1803372 - DNA, 15 bp, Homo sapiens
ccttggaggtagaag

SEQ ID NO: 1803373 - DNA, 15 bp, Homo sapiens
cttggaggtagaagg

SEQ ID NO: 1803374 - DNA, 15 bp, Homo sapiens
ttggaggtagaaggc

SEQ ID NO: 1803375 - DNA, 15 bp, Homo sapiens
tggaggtagaaggca

SEQ ID NO: 1803376 - DNA, 15 bp, Homo sapiens
ggaggtagaaggcag

SEQ ID NO: 1803377 - DNA, 15 bp, Homo sapiens
gaggtagaaggcaga

SEQ ID NO: 1803378 - DNA, 15 bp, Homo sapiens
aggtagaaggcagag

SEQ ID NO: 1803379 - DNA, 15 bp, Homo sapiens
ggtagaaggcagagg

SEQ ID NO: 1803380 - DNA, 15 bp, Homo sapiens
gtagaaggcagaggc

SEQ ID NO: 1803381 - DNA, 15 bp, Homo sapiens
tagaaggcagaggca

SEQ ID NO: 1803382 - DNA, 15 bp, Homo sapiens
agaaggcagaggcac

SEQ ID NO: 1803383 - DNA, 15 bp, Homo sapiens
gaaggcagaggcact

SEQ ID NO: 1803384 - DNA, 15 bp, Homo sapiens
aaggcagaggcactg

SEQ ID NO: 1803385 - DNA, 15 bp, Homo sapiens
aggcagaggcactgc

SEQ ID NO: 1803386 - DNA, 15 bp, Homo sapiens
ggcagaggcactgca

SEQ ID NO: 1803387 - DNA, 15 bp, Homo sapiens
gcagaggcactgcaa

SEQ ID NO: 1803388 - DNA, 15 bp, Homo sapiens
cagaggcactgcaag

SEQ ID NO: 1803389 - DNA, 15 bp, Homo sapiens
agaggcactgcaaga

SEQ ID NO: 1803390 - DNA, 15 bp, Homo sapiens
gaggcactgcaagag

SEQ ID NO: 1803391 - DNA, 15 bp, Homo sapiens
aggcactgcaagagg

SEQ ID NO: 1803392 - DNA, 15 bp, Homo sapiens
ggcactgcaagagga

SEQ ID NO: 1803393 - DNA, 15 bp, Homo sapiens
gcactgcaagaggac

SEQ ID NO: 1803394 - DNA, 15 bp, Homo sapiens
cactgcaagaggaca

SEQ ID NO: 1803395 - DNA, 15 bp, Homo sapiens
actgcaagaggacag

SEQ ID NO: 1803396 - DNA, 15 bp, Homo sapiens
ctgcaagaggacagc

SEQ ID NO: 1803397 - DNA, 15 bp, Homo sapiens
tgcaagaggacagct

SEQ ID NO: 1803398 - DNA, 15 bp, Homo sapiens
gcaagaggacagctg

SEQ ID NO: 1803399 - DNA, 15 bp, Homo sapiens
caagaggacagctgt

SEQ ID NO: 1803400 - DNA, 15 bp, Homo sapiens
aagaggacagctgtg

SEQ ID NO: 1803401 - DNA, 15 bp, Homo sapiens
agaggacagctgtgg

SEQ ID NO: 1803402 - DNA, 15 bp, Homo sapiens
gaggacagctgtggt

SEQ ID NO: 1803403 - DNA, 15 bp, Homo sapiens
aggacagctgtggtg

SEQ ID NO: 1803404 - DNA, 15 bp, Homo sapiens
ggacagctgtggtgt

SEQ ID NO: 1803405 - DNA, 15 bp, Homo sapiens
gacagctgtggtgtg

SEQ ID NO: 1803406 - DNA, 15 bp, Homo sapiens
acagctgtggtgtgg

SEQ ID NO: 1803407 - DNA, 15 bp, Homo sapiens
cagctgtggtgtggg

SEQ ID NO: 1803408 - DNA, 15 bp, Homo sapiens
agctgtggtgtgggg

SEQ ID NO: 1803409 - DNA, 15 bp, Homo sapiens
gctgtggtgtggggt

SEQ ID NO: 1803410 - DNA, 15 bp, Homo sapiens
ctgtggtgtggggtt

SEQ ID NO: 1803411 - DNA, 15 bp, Homo sapiens
tgtggtgtggggttg

SEQ ID NO: 1803412 - DNA, 15 bp, Homo sapiens
gtggtgtggggttgc

SEQ ID NO: 1803413 - DNA, 15 bp, Homo sapiens
tggtgtggggttgcc

SEQ ID NO: 1803414 - DNA, 15 bp, Homo sapiens
ggtgtggggttgcct

SEQ ID NO: 1803415 - DNA, 15 bp, Homo sapiens
gtgtggggttgcctg

SEQ ID NO: 1803416 - DNA, 15 bp, Homo sapiens
tgtggggttgcctgg

SEQ ID NO: 1803417 - DNA, 15 bp, Homo sapiens
gtggggttgcctggt

SEQ ID NO: 1803418 - DNA, 15 bp, Homo sapiens
tggggttgcctggtg

SEQ ID NO: 1803419 - DNA, 15 bp, Homo sapiens
ggggttgcctggtgc

SEQ ID NO: 1803420 - DNA, 15 bp, Homo sapiens
gggttgcctggtgct

SEQ ID NO: 1803421 - DNA, 15 bp, Homo sapiens
ggttgcctggtgctc

SEQ ID NO: 1803422 - DNA, 15 bp, Homo sapiens
gttgcctggtgctcc

SEQ ID NO: 1803423 - DNA, 15 bp, Homo sapiens
ttgcctggtgctccc

SEQ ID NO: 1803424 - DNA, 15 bp, Homo sapiens
tgcctggtgctccct

SEQ ID NO: 1803425 - DNA, 15 bp, Homo sapiens
gcctggtgctcccta

SEQ ID NO: 1803426 - DNA, 15 bp, Homo sapiens
cctggtgctccctac

SEQ ID NO: 1803427 - DNA, 15 bp, Homo sapiens
ctggtgctccctaca

SEQ ID NO: 1803428 - DNA, 15 bp, Homo sapiens
tggtgctccctacag

SEQ ID NO: 1803429 - DNA, 15 bp, Homo sapiens
ggtgctccctacagg

SEQ ID NO: 1803430 - DNA, 15 bp, Homo sapiens
gtgctccctacaggt

SEQ ID NO: 1803431 - DNA, 15 bp, Homo sapiens
tgctccctacaggtt

SEQ ID NO: 1803432 - DNA, 15 bp, Homo sapiens
gctccctacaggtta

SEQ ID NO: 1803433 - DNA, 15 bp, Homo sapiens
ctccctacaggttag

SEQ ID NO: 1803434 - DNA, 15 bp, Homo sapiens
tccctacaggttagc

SEQ ID NO: 1803435 - DNA, 15 bp, Homo sapiens
ccctacaggttagca

SEQ ID NO: 1803436 - DNA, 15 bp, Homo sapiens
cctacaggttagcat

SEQ ID NO: 1803437 - DNA, 15 bp, Homo sapiens
ctacaggttagcatc

SEQ ID NO: 1803438 - DNA, 15 bp, Homo sapiens
tacaggttagcatcc

SEQ ID NO: 1803439 - DNA, 15 bp, Homo sapiens
acaggttagcatccc

SEQ ID NO: 1803440 - DNA, 15 bp, Homo sapiens
caggttagcatccct

SEQ ID NO: 1803441 - DNA, 15 bp, Homo sapiens
aggttagcatccctg

SEQ ID NO: 1803442 - DNA, 15 bp, Homo sapiens
ggttagcatccctgg

SEQ ID NO: 1803443 - DNA, 15 bp, Homo sapiens
gttagcatccctggg

SEQ ID NO: 1803444 - DNA, 15 bp, Homo sapiens
ttagcatccctggga

SEQ ID NO: 1803445 - DNA, 15 bp, Homo sapiens
tagcatccctgggat

SEQ ID NO: 1803446 - DNA, 15 bp, Homo sapiens
agcatccctgggatt

SEQ ID NO: 1803447 - DNA, 15 bp, Homo sapiens
gcatccctgggattt

SEQ ID NO: 1803448 - DNA, 15 bp, Homo sapiens
catccctgggattta

SEQ ID NO: 1803449 - DNA, 15 bp, Homo sapiens
atccctgggatttag

SEQ ID NO: 1803450 - DNA, 15 bp, Homo sapiens
tccctgggatttagg

SEQ ID NO: 1803451 - DNA, 15 bp, Homo sapiens
ccctgggatttagga

SEQ ID NO: 1803452 - DNA, 15 bp, Homo sapiens
cctgggatttaggag

SEQ ID NO: 1803453 - DNA, 15 bp, Homo sapiens
ctgggatttaggagg

SEQ ID NO: 1803454 - DNA, 15 bp, Homo sapiens
tgggatttaggaggc

SEQ ID NO: 1803455 - DNA, 15 bp, Homo sapiens
gggatttaggaggca

SEQ ID NO: 1803456 - DNA, 15 bp, Homo sapiens
ggatttaggaggcag

SEQ ID NO: 1803457 - DNA, 15 bp, Homo sapiens
gatttaggaggcagg

SEQ ID NO: 1803458 - DNA, 15 bp, Homo sapiens
atttaggaggcaggg

SEQ ID NO: 1803459 - DNA, 15 bp, Homo sapiens
tttaggaggcagggg

SEQ ID NO: 1803460 - DNA, 15 bp, Homo sapiens
ttaggaggcaggggc

SEQ ID NO: 1803461 - DNA, 15 bp, Homo sapiens
taggaggcaggggct

SEQ ID NO: 1803462 - DNA, 15 bp, Homo sapiens
aggaggcaggggctg

SEQ ID NO: 1803463 - DNA, 15 bp, Homo sapiens
ggaggcaggggctga

SEQ ID NO: 1803464 - DNA, 15 bp, Homo sapiens
gaggcaggggctgat

SEQ ID NO: 1803465 - DNA, 15 bp, Homo sapiens
aggcaggggctgatc

SEQ ID NO: 1803466 - DNA, 15 bp, Homo sapiens
ggcaggggctgatca

SEQ ID NO: 1803467 - DNA, 15 bp, Homo sapiens
gcaggggctgatcag

SEQ ID NO: 1803468 - DNA, 15 bp, Homo sapiens
caggggctgatcaga

SEQ ID NO: 1803469 - DNA, 15 bp, Homo sapiens
aggggctgatcagat

SEQ ID NO: 1803470 - DNA, 15 bp, Homo sapiens
ggggctgatcagatt

SEQ ID NO: 1803471 - DNA, 15 bp, Homo sapiens
gggctgatcagattg

SEQ ID NO: 1803472 - DNA, 15 bp, Homo sapiens
ggctgatcagattgg

SEQ ID NO: 1803473 - DNA, 15 bp, Homo sapiens
gctgatcagattggg

SEQ ID NO: 1803474 - DNA, 15 bp, Homo sapiens
ctgatcagattgggt

SEQ ID NO: 1803475 - DNA, 15 bp, Homo sapiens
tgatcagattgggtc

SEQ ID NO: 1803476 - DNA, 15 bp, Homo sapiens
gatcagattgggtct

SEQ ID NO: 1803477 - DNA, 15 bp, Homo sapiens
atcagattgggtcta

SEQ ID NO: 1803478 - DNA, 15 bp, Homo sapiens
tcagattgggtctac

SEQ ID NO: 1803479 - DNA, 15 bp, Homo sapiens
cagattgggtctaca

SEQ ID NO: 1803480 - DNA, 15 bp, Homo sapiens
agattgggtctacag

SEQ ID NO: 1803481 - DNA, 15 bp, Homo sapiens
gattgggtctacagc

SEQ ID NO: 1803482 - DNA, 15 bp, Homo sapiens
tgggtctacagccaa

SEQ ID NO: 1803483 - DNA, 15 bp, Homo sapiens
gggtctacagccaag

SEQ ID NO: 1803484 - DNA, 15 bp, Homo sapiens
ggtctacagccaagt

SEQ ID NO: 1803485 - DNA, 15 bp, Homo sapiens
gtctacagccaagtg

SEQ ID NO: 1803486 - DNA, 15 bp, Homo sapiens
tctacagccaagtgt

SEQ ID NO: 1803487 - DNA, 15 bp, Homo sapiens
ctacagccaagtgtg

SEQ ID NO: 1803488 - DNA, 15 bp, Homo sapiens
tacagccaagtgtgc

SEQ ID NO: 1803489 - DNA, 15 bp, Homo sapiens
acagccaagtgtgct

SEQ ID NO: 1803490 - DNA, 15 bp, Homo sapiens
cagccaagtgtgctg

SEQ ID NO: 1803491 - DNA, 15 bp, Homo sapiens
agccaagtgtgctgt

SEQ ID NO: 1803492 - DNA, 15 bp, Homo sapiens
gccaagtgtgctgtc

SEQ ID NO: 1803493 - DNA, 15 bp, Homo sapiens
ccaagtgtgctgtct

SEQ ID NO: 1803494 - DNA, 15 bp, Homo sapiens
caagtgtgctgtctc

SEQ ID NO: 1803495 - DNA, 15 bp, Homo sapiens
aagtgtgctgtctcc

SEQ ID NO: 1803496 - DNA, 15 bp, Homo sapiens
agtgtgctgtctccc

SEQ ID NO: 1803497 - DNA, 15 bp, Homo sapiens
gtgtgctgtctccct

SEQ ID NO: 1803498 - DNA, 15 bp, Homo sapiens
tgtgctgtctccctc

SEQ ID NO: 1803499 - DNA, 15 bp, Homo sapiens
tgctgtctccctcct

SEQ ID NO: 1803500 - DNA, 15 bp, Homo sapiens
gctgtctccctcctg

SEQ ID NO: 1803501 - DNA, 15 bp, Homo sapiens
ctgtctccctcctgg

SEQ ID NO: 1803502 - DNA, 15 bp, Homo sapiens
tgtctccctcctggg

SEQ ID NO: 1803503 - DNA, 15 bp, Homo sapiens
gtctccctcctgggg

SEQ ID NO: 1803504 - DNA, 15 bp, Homo sapiens
tctccctcctggggc

SEQ ID NO: 1803505 - DNA, 15 bp, Homo sapiens
ctccctcctggggca

SEQ ID NO: 1803506 - DNA, 15 bp, Homo sapiens
tccctcctggggcag

SEQ ID NO: 1803507 - DNA, 15 bp, Homo sapiens
ccctcctggggcaga

SEQ ID NO: 1803508 - DNA, 15 bp, Homo sapiens
cctcctggggcagag

SEQ ID NO: 1803509 - DNA, 15 bp, Homo sapiens
ctcctggggcagagc

SEQ ID NO: 1803510 - DNA, 15 bp, Homo sapiens
tcctggggcagagca

SEQ ID NO: 1803511 - DNA, 15 bp, Homo sapiens
cctggggcagagcag

SEQ ID NO: 1803512 - DNA, 15 bp, Homo sapiens
ctggggcagagcagc

SEQ ID NO: 1803513 - DNA, 15 bp, Homo sapiens
tggggcagagcagcc

SEQ ID NO: 1803514 - DNA, 15 bp, Homo sapiens
ggggcagagcagccg

SEQ ID NO: 1803515 - DNA, 15 bp, Homo sapiens
gggcagagcagccga

SEQ ID NO: 1803516 - DNA, 15 bp, Homo sapiens
ggcagagcagccgac

SEQ ID NO: 1803517 - DNA, 15 bp, Homo sapiens
gcagagcagccgacc

SEQ ID NO: 1803518 - DNA, 15 bp, Homo sapiens
cagagcagccgacca

SEQ ID NO: 1803519 - DNA, 15 bp, Homo sapiens
agagcagccgaccaa

SEQ ID NO: 1803520 - DNA, 15 bp, Homo sapiens
gagcagccgaccaag

SEQ ID NO: 1803521 - DNA, 15 bp, Homo sapiens
agcagccgaccaagg

SEQ ID NO: 1803522 - DNA, 15 bp, Homo sapiens
gcagccgaccaaggg

SEQ ID NO: 1803523 - DNA, 15 bp, Homo sapiens
cagccgaccaagggg

SEQ ID NO: 1803524 - DNA, 15 bp, Homo sapiens
agccgaccaaggggt

SEQ ID NO: 1803525 - DNA, 15 bp, Homo sapiens
gccgaccaaggggtc

SEQ ID NO: 1803526 - DNA, 15 bp, Homo sapiens
ccgaccaaggggtca

SEQ ID NO: 1803527 - DNA, 15 bp, Homo sapiens
cgaccaaggggtcag

SEQ ID NO: 1803528 - DNA, 15 bp, Homo sapiens
gaccaaggggtcagt

SEQ ID NO: 1803529 - DNA, 15 bp, Homo sapiens
accaaggggtcagtg

SEQ ID NO: 1803530 - DNA, 15 bp, Homo sapiens
ccaaggggtcagtga

SEQ ID NO: 1803531 - DNA, 15 bp, Homo sapiens
caaggggtcagtgag

SEQ ID NO: 1803532 - DNA, 15 bp, Homo sapiens
aaggggtcagtgaga

SEQ ID NO: 1803533 - DNA, 15 bp, Homo sapiens
aggggtcagtgagaa

SEQ ID NO: 1803534 - DNA, 15 bp, Homo sapiens
ggggtcagtgagaaa

SEQ ID NO: 1803535 - DNA, 15 bp, Homo sapiens
gggtcagtgagaaat

SEQ ID NO: 1803536 - DNA, 15 bp, Homo sapiens
ggtcagtgagaaatc

SEQ ID NO: 1803537 - DNA, 15 bp, Homo sapiens
gtcagtgagaaatct

SEQ ID NO: 1803538 - DNA, 15 bp, Homo sapiens
tcagtgagaaatcta

SEQ ID NO: 1803539 - DNA, 15 bp, Homo sapiens
cagtgagaaatctac

SEQ ID NO: 1803540 - DNA, 15 bp, Homo sapiens
agtgagaaatctacc

SEQ ID NO: 1803541 - DNA, 15 bp, Homo sapiens
gtgagaaatctacct

SEQ ID NO: 1803542 - DNA, 15 bp, Homo sapiens
tgagaaatctacctg

SEQ ID NO: 1803543 - DNA, 15 bp, Homo sapiens
gagaaatctacctga

SEQ ID NO: 1803544 - DNA, 15 bp, Homo sapiens
agaaatctacctgaa

SEQ ID NO: 1803545 - DNA, 15 bp, Homo sapiens
gaaatctacctgaag

SEQ ID NO: 1803546 - DNA, 15 bp, Homo sapiens
aaatctacctgaagt

SEQ ID NO: 1803547 - DNA, 15 bp, Homo sapiens
aatctacctgaagtt

SEQ ID NO: 1803548 - DNA, 15 bp, Homo sapiens
atctacctgaagttg

SEQ ID NO: 1803549 - DNA, 15 bp, Homo sapiens
tctacctgaagttgg

SEQ ID NO: 1803550 - DNA, 15 bp, Homo sapiens
ctacctgaagttggc

SEQ ID NO: 1803551 - DNA, 15 bp, Homo sapiens
tacctgaagttggcc

SEQ ID NO: 1803552 - DNA, 15 bp, Homo sapiens
acctgaagttggccg

SEQ ID NO: 1803553 - DNA, 15 bp, Homo sapiens
cctgaagttggccgg

SEQ ID NO: 1803554 - DNA, 15 bp, Homo sapiens
ctgaagttggccggt

SEQ ID NO: 1803555 - DNA, 15 bp, Homo sapiens
tgaagttggccggtc

SEQ ID NO: 1803556 - DNA, 15 bp, Homo sapiens
gaagttggccggtcc

SEQ ID NO: 1803557 - DNA, 15 bp, Homo sapiens
aagttggccggtccc

SEQ ID NO: 1803558 - DNA, 15 bp, Homo sapiens
agttggccggtccct

SEQ ID NO: 1803559 - DNA, 15 bp, Homo sapiens
gttggccggtcccta

SEQ ID NO: 1803560 - DNA, 15 bp, Homo sapiens
ttggccggtccctag

SEQ ID NO: 1803561 - DNA, 15 bp, Homo sapiens
tggccggtccctaga

SEQ ID NO: 1803562 - DNA, 15 bp, Homo sapiens
ggccggtccctagaa

SEQ ID NO: 1803563 - DNA, 15 bp, Homo sapiens
gccggtccctagaac

SEQ ID NO: 1803564 - DNA, 15 bp, Homo sapiens
ccggtccctagaacc

SEQ ID NO: 1803565 - DNA, 15 bp, Homo sapiens
cggtccctagaaccc

SEQ ID NO: 1803566 - DNA, 15 bp, Homo sapiens
ggtccctagaaccct

SEQ ID NO: 1803567 - DNA, 15 bp, Homo sapiens
gtccctagaaccctc

SEQ ID NO: 1803568 - DNA, 15 bp, Homo sapiens
tccctagaaccctcc

SEQ ID NO: 1803569 - DNA, 15 bp, Homo sapiens
ccctagaaccctcca

SEQ ID NO: 1803570 - DNA, 15 bp, Homo sapiens
cctagaaccctccag

SEQ ID NO: 1803571 - DNA, 15 bp, Homo sapiens
ctagaaccctccagc

SEQ ID NO: 1803572 - DNA, 15 bp, Homo sapiens
tagaaccctccagcc

SEQ ID NO: 1803573 - DNA, 15 bp, Homo sapiens
agaaccctccagcca

SEQ ID NO: 1803574 - DNA, 15 bp, Homo sapiens
gaaccctccagccag

SEQ ID NO: 1803575 - DNA, 15 bp, Homo sapiens
aaccctccagccaga

SEQ ID NO: 1803576 - DNA, 15 bp, Homo sapiens
accctccagccagac

SEQ ID NO: 1803577 - DNA, 15 bp, Homo sapiens
ccctccagccagaca

SEQ ID NO: 1803578 - DNA, 15 bp, Homo sapiens
cctccagccagacat

SEQ ID NO: 1803579 - DNA, 15 bp, Homo sapiens
ctccagccagacatt

SEQ ID NO: 1803580 - DNA, 15 bp, Homo sapiens
tccagccagacattc

SEQ ID NO: 1803581 - DNA, 15 bp, Homo sapiens
ccagccagacattct

SEQ ID NO: 1803582 - DNA, 15 bp, Homo sapiens
cagccagacattctc

SEQ ID NO: 1803583 - DNA, 15 bp, Homo sapiens
agccagacattctcc

SEQ ID NO: 1803584 - DNA, 15 bp, Homo sapiens
gccagacattctcct

SEQ ID NO: 1803585 - DNA, 15 bp, Homo sapiens
ccagacattctcctg

SEQ ID NO: 1803586 - DNA, 15 bp, Homo sapiens
cagacattctcctgc

SEQ ID NO: 1803587 - DNA, 15 bp, Homo sapiens
agacattctcctgct

SEQ ID NO: 1803588 - DNA, 15 bp, Homo sapiens
gacattctcctgctt

SEQ ID NO: 1803589 - DNA, 15 bp, Homo sapiens
acattctcctgcttt

SEQ ID NO: 1803590 - DNA, 15 bp, Homo sapiens
cattctcctgctttc

SEQ ID NO: 1803591 - DNA, 15 bp, Homo sapiens
attctcctgctttcg

SEQ ID NO: 1803592 - DNA, 15 bp, Homo sapiens
ttctcctgctttcgg

SEQ ID NO: 1803593 - DNA, 15 bp, Homo sapiens
tctcctgctttcggc

SEQ ID NO: 1803594 - DNA, 15 bp, Homo sapiens
ctcctgctttcggca

SEQ ID NO: 1803595 - DNA, 15 bp, Homo sapiens
tcctgctttcggcag

SEQ ID NO: 1803596 - DNA, 15 bp, Homo sapiens
cctgctttcggcagg

SEQ ID NO: 1803597 - DNA, 15 bp, Homo sapiens
ctgctttcggcaggg

SEQ ID NO: 1803598 - DNA, 15 bp, Homo sapiens
tgctttcggcagggt

SEQ ID NO: 1803599 - DNA, 15 bp, Homo sapiens
gctttcggcagggtg

SEQ ID NO: 1803600 - DNA, 15 bp, Homo sapiens
ctttcggcagggtgc

SEQ ID NO: 1803601 - DNA, 15 bp, Homo sapiens
tttcggcagggtgcc

SEQ ID NO: 1803602 - DNA, 15 bp, Homo sapiens
ttcggcagggtgcct

SEQ ID NO: 1803603 - DNA, 15 bp, Homo sapiens
tcggcagggtgcctg

SEQ ID NO: 1803604 - DNA, 15 bp, Homo sapiens
cggcagggtgcctgg

SEQ ID NO: 1803605 - DNA, 15 bp, Homo sapiens
cagggtgcctgggag

SEQ ID NO: 1803606 - DNA, 15 bp, Homo sapiens
agggtgcctgggagg

SEQ ID NO: 1803607 - DNA, 15 bp, Homo sapiens
gggtgcctgggaggc

SEQ ID NO: 1803608 - DNA, 15 bp, Homo sapiens
ggtgcctgggaggcc

SEQ ID NO: 1803609 - DNA, 15 bp, Homo sapiens
gtgcctgggaggcca

SEQ ID NO: 1803610 - DNA, 15 bp, Homo sapiens
tgcctgggaggccaa

SEQ ID NO: 1803611 - DNA, 15 bp, Homo sapiens
gcctgggaggccaag

SEQ ID NO: 1803612 - DNA, 15 bp, Homo sapiens
cctgggaggccaagt

SEQ ID NO: 1803613 - DNA, 15 bp, Homo sapiens
ctgggaggccaagtt

SEQ ID NO: 1803614 - DNA, 15 bp, Homo sapiens
tgggaggccaagtta

SEQ ID NO: 1803615 - DNA, 15 bp, Homo sapiens
gggaggccaagttat

SEQ ID NO: 1803616 - DNA, 15 bp, Homo sapiens
ggaggccaagttatt

SEQ ID NO: 1803617 - DNA, 15 bp, Homo sapiens
gaggccaagttatta

SEQ ID NO: 1803618 - DNA, 15 bp, Homo sapiens
aggccaagttattaa

SEQ ID NO: 1803619 - DNA, 15 bp, Homo sapiens
ggccaagttattaat

SEQ ID NO: 1803620 - DNA, 15 bp, Homo sapiens
gccaagttattaatt

SEQ ID NO: 1803621 - DNA, 15 bp, Homo sapiens
ccaagttattaattt

SEQ ID NO: 1803622 - DNA, 15 bp, Homo sapiens
caagttattaatttt

SEQ ID NO: 1803623 - DNA, 15 bp, Homo sapiens
aagttattaattttc

SEQ ID NO: 1803624 - DNA, 15 bp, Homo sapiens
agttattaattttca

SEQ ID NO: 1803625 - DNA, 15 bp, Homo sapiens
gttattaattttcag

SEQ ID NO: 1803626 - DNA, 15 bp, Homo sapiens
ttattaattttcagt

SEQ ID NO: 1803627 - DNA, 15 bp, Homo sapiens
tattaattttcagtg

SEQ ID NO: 1803628 - DNA, 15 bp, Homo sapiens
attaattttcagtga

SEQ ID NO: 1803629 - DNA, 15 bp, Homo sapiens
ttaattttcagtgag

SEQ ID NO: 1803630 - DNA, 15 bp, Homo sapiens
taattttcagtgaga

SEQ ID NO: 1803631 - DNA, 15 bp, Homo sapiens
aattttcagtgagaa

SEQ ID NO: 1803632 - DNA, 15 bp, Homo sapiens
attttcagtgagaat

SEQ ID NO: 1803633 - DNA, 15 bp, Homo sapiens
ttttcagtgagaatt

SEQ ID NO: 1803634 - DNA, 15 bp, Homo sapiens
tttcagtgagaattc

SEQ ID NO: 1803635 - DNA, 15 bp, Homo sapiens
ttcagtgagaattct

SEQ ID NO: 1803636 - DNA, 15 bp, Homo sapiens
tcagtgagaattctc

SEQ ID NO: 1803637 - DNA, 15 bp, Homo sapiens
cagtgagaattctca

SEQ ID NO: 1803638 - DNA, 15 bp, Homo sapiens
agtgagaattctcac

SEQ ID NO: 1803639 - DNA, 15 bp, Homo sapiens
gtgagaattctcacc

SEQ ID NO: 1803640 - DNA, 15 bp, Homo sapiens
tgagaattctcacca

SEQ ID NO: 1803641 - DNA, 15 bp, Homo sapiens
gagaattctcaccat

SEQ ID NO: 1803642 - DNA, 15 bp, Homo sapiens
agaattctcaccatc

SEQ ID NO: 1803643 - DNA, 15 bp, Homo sapiens
gaattctcaccatct

SEQ ID NO: 1803644 - DNA, 15 bp, Homo sapiens
aattctcaccatctg

SEQ ID NO: 1803645 - DNA, 15 bp, Homo sapiens
attctcaccatctgg

SEQ ID NO: 1803646 - DNA, 15 bp, Homo sapiens
ttctcaccatctgga

SEQ ID NO: 1803647 - DNA, 15 bp, Homo sapiens
tctcaccatctggat

SEQ ID NO: 1803648 - DNA, 15 bp, Homo sapiens
ctcaccatctggata

SEQ ID NO: 1803649 - DNA, 15 bp, Homo sapiens
tcaccatctggatag

SEQ ID NO: 1803650 - DNA, 15 bp, Homo sapiens
caccatctggataga

SEQ ID NO: 1803651 - DNA, 15 bp, Homo sapiens
accatctggatagaa

SEQ ID NO: 1803652 - DNA, 15 bp, Homo sapiens
ccatctggatagaac

SEQ ID NO: 1803653 - DNA, 15 bp, Homo sapiens
catctggatagaact

SEQ ID NO: 1803654 - DNA, 15 bp, Homo sapiens
atctggatagaactc

SEQ ID NO: 1803655 - DNA, 15 bp, Homo sapiens
tctggatagaactct

SEQ ID NO: 1803656 - DNA, 15 bp, Homo sapiens
ctggatagaactctc

SEQ ID NO: 1803657 - DNA, 15 bp, Homo sapiens
tggatagaactctca

SEQ ID NO: 1803658 - DNA, 15 bp, Homo sapiens
ggatagaactctcac

SEQ ID NO: 1803659 - DNA, 15 bp, Homo sapiens
gatagaactctcaca

SEQ ID NO: 1803660 - DNA, 15 bp, Homo sapiens
atagaactctcacaa

SEQ ID NO: 1803661 - DNA, 15 bp, Homo sapiens
tagaactctcacaat

SEQ ID NO: 1803662 - DNA, 15 bp, Homo sapiens
agaactctcacaatc

SEQ ID NO: 1803663 - DNA, 15 bp, Homo sapiens
gaactctcacaatct

SEQ ID NO: 1803664 - DNA, 15 bp, Homo sapiens
aactctcacaatctg

SEQ ID NO: 1803665 - DNA, 15 bp, Homo sapiens
actctcacaatctgg

SEQ ID NO: 1803666 - DNA, 15 bp, Homo sapiens
ctctcacaatctgga

SEQ ID NO: 1803667 - DNA, 15 bp, Homo sapiens
tctcacaatctggat

SEQ ID NO: 1803668 - DNA, 15 bp, Homo sapiens
ctcacaatctggata

SEQ ID NO: 1803669 - DNA, 15 bp, Homo sapiens
tcacaatctggatag

SEQ ID NO: 1803670 - DNA, 15 bp, Homo sapiens
cacaatctggataga

SEQ ID NO: 1803671 - DNA, 15 bp, Homo sapiens
acaatctggatagaa

SEQ ID NO: 1803672 - DNA, 15 bp, Homo sapiens
caatctggatagaat

SEQ ID NO: 1803673 - DNA, 15 bp, Homo sapiens
aatctggatagaatt

SEQ ID NO: 1803674 - DNA, 15 bp, Homo sapiens
atctggatagaattc

SEQ ID NO: 1803675 - DNA, 15 bp, Homo sapiens
tctggatagaattct

SEQ ID NO: 1803676 - DNA, 15 bp, Homo sapiens
ctggatagaattctc

SEQ ID NO: 1803677 - DNA, 15 bp, Homo sapiens
tggatagaattctca

SEQ ID NO: 1803678 - DNA, 15 bp, Homo sapiens
ggatagaattctcat

SEQ ID NO: 1803679 - DNA, 15 bp, Homo sapiens
gatagaattctcatt

SEQ ID NO: 1803680 - DNA, 15 bp, Homo sapiens
atagaattctcattc

SEQ ID NO: 1803681 - DNA, 15 bp, Homo sapiens
tagaattctcattct

SEQ ID NO: 1803682 - DNA, 15 bp, Homo sapiens
agaattctcattctc

SEQ ID NO: 1803683 - DNA, 15 bp, Homo sapiens
gaattctcattctct

SEQ ID NO: 1803684 - DNA, 15 bp, Homo sapiens
aattctcattctctg

SEQ ID NO: 1803685 - DNA, 15 bp, Homo sapiens
attctcattctctgg

SEQ ID NO: 1803686 - DNA, 15 bp, Homo sapiens
ttctcattctctgga

SEQ ID NO: 1803687 - DNA, 15 bp, Homo sapiens
tctcattctctggat

SEQ ID NO: 1803688 - DNA, 15 bp, Homo sapiens
ctcattctctggata

SEQ ID NO: 1803689 - DNA, 15 bp, Homo sapiens
tcattctctggatag

SEQ ID NO: 1803690 - DNA, 15 bp, Homo sapiens
cattctctggataga

SEQ ID NO: 1803691 - DNA, 15 bp, Homo sapiens
attctctggatagaa

SEQ ID NO: 1803692 - DNA, 15 bp, Homo sapiens
ttctctggatagaac

SEQ ID NO: 1803693 - DNA, 15 bp, Homo sapiens
tctctggatagaact

SEQ ID NO: 1803694 - DNA, 15 bp, Homo sapiens
ctctggatagaactc

SEQ ID NO: 1803695 - DNA, 15 bp, Homo sapiens
ggatagaactctcaa

SEQ ID NO: 1803696 - DNA, 15 bp, Homo sapiens
gatagaactctcaat

SEQ ID NO: 1803697 - DNA, 15 bp, Homo sapiens
atagaactctcaata

SEQ ID NO: 1803698 - DNA, 15 bp, Homo sapiens
tagaactctcaatat

SEQ ID NO: 1803699 - DNA, 15 bp, Homo sapiens
agaactctcaatatc

SEQ ID NO: 1803700 - DNA, 15 bp, Homo sapiens
gaactctcaatatct

SEQ ID NO: 1803701 - DNA, 15 bp, Homo sapiens
aactctcaatatcta

SEQ ID NO: 1803702 - DNA, 15 bp, Homo sapiens
actctcaatatctat

SEQ ID NO: 1803703 - DNA, 15 bp, Homo sapiens
ctctcaatatctatc

SEQ ID NO: 1803704 - DNA, 15 bp, Homo sapiens
tctcaatatctatct

SEQ ID NO: 1803705 - DNA, 15 bp, Homo sapiens
ctcaatatctatctg

SEQ ID NO: 1803706 - DNA, 15 bp, Homo sapiens
tcaatatctatctgg

SEQ ID NO: 1803707 - DNA, 15 bp, Homo sapiens
caatatctatctgga

SEQ ID NO: 1803708 - DNA, 15 bp, Homo sapiens
aatatctatctggat

SEQ ID NO: 1803709 - DNA, 15 bp, Homo sapiens
atatctatctggata

SEQ ID NO: 1803710 - DNA, 15 bp, Homo sapiens
tatctatctggatat

SEQ ID NO: 1803711 - DNA, 15 bp, Homo sapiens
atctatctggatata

SEQ ID NO: 1803712 - DNA, 15 bp, Homo sapiens
tctatctggatataa

SEQ ID NO: 1803713 - DNA, 15 bp, Homo sapiens
ctatctggatataat

SEQ ID NO: 1803714 - DNA, 15 bp, Homo sapiens
tatctggatataatt

SEQ ID NO: 1803715 - DNA, 15 bp, Homo sapiens
atctggatataattg

SEQ ID NO: 1803716 - DNA, 15 bp, Homo sapiens
tctggatataattgt

SEQ ID NO: 1803717 - DNA, 15 bp, Homo sapiens
ctggatataattgtc

SEQ ID NO: 1803718 - DNA, 15 bp, Homo sapiens
tggatataattgtcg

SEQ ID NO: 1803719 - DNA, 15 bp, Homo sapiens
ggatataattgtcgc

SEQ ID NO: 1803720 - DNA, 15 bp, Homo sapiens
gatataattgtcgcc

SEQ ID NO: 1803721 - DNA, 15 bp, Homo sapiens
atataattgtcgccc

SEQ ID NO: 1803722 - DNA, 15 bp, Homo sapiens
tataattgtcgccct

SEQ ID NO: 1803723 - DNA, 15 bp, Homo sapiens
ataattgtcgccctc

SEQ ID NO: 1803724 - DNA, 15 bp, Homo sapiens
taattgtcgccctct

SEQ ID NO: 1803725 - DNA, 15 bp, Homo sapiens
aattgtcgccctctg

SEQ ID NO: 1803726 - DNA, 15 bp, Homo sapiens
attgtcgccctctga

SEQ ID NO: 1803727 - DNA, 15 bp, Homo sapiens
ttgtcgccctctgaa

SEQ ID NO: 1803728 - DNA, 15 bp, Homo sapiens
tgtcgccctctgaat

SEQ ID NO: 1803729 - DNA, 15 bp, Homo sapiens
gtcgccctctgaata

SEQ ID NO: 1803730 - DNA, 15 bp, Homo sapiens
tcgccctctgaatag

SEQ ID NO: 1803731 - DNA, 15 bp, Homo sapiens
cgccctctgaataga

SEQ ID NO: 1803732 - DNA, 15 bp, Homo sapiens
gccctctgaatagaa

SEQ ID NO: 1803733 - DNA, 15 bp, Homo sapiens
ccctctgaatagaac

SEQ ID NO: 1803734 - DNA, 15 bp, Homo sapiens
cctctgaatagaact

SEQ ID NO: 1803735 - DNA, 15 bp, Homo sapiens
ctctgaatagaactc

SEQ ID NO: 1803736 - DNA, 15 bp, Homo sapiens
tctgaatagaactct

SEQ ID NO: 1803737 - DNA, 15 bp, Homo sapiens
ctgaatagaactctc

SEQ ID NO: 1803738 - DNA, 15 bp, Homo sapiens
tgaatagaactctca

SEQ ID NO: 1803739 - DNA, 15 bp, Homo sapiens
gaatagaactctcac

SEQ ID NO: 1803740 - DNA, 15 bp, Homo sapiens
aatagaactctcact

SEQ ID NO: 1803741 - DNA, 15 bp, Homo sapiens
atagaactctcacta

SEQ ID NO: 1803742 - DNA, 15 bp, Homo sapiens
tagaactctcactat

SEQ ID NO: 1803743 - DNA, 15 bp, Homo sapiens
agaactctcactatc

SEQ ID NO: 1803744 - DNA, 15 bp, Homo sapiens
gaactctcactatct

SEQ ID NO: 1803745 - DNA, 15 bp, Homo sapiens
aactctcactatctc

SEQ ID NO: 1803746 - DNA, 15 bp, Homo sapiens
actctcactatctca

SEQ ID NO: 1803747 - DNA, 15 bp, Homo sapiens
ctctcactatctcaa

SEQ ID NO: 1803748 - DNA, 15 bp, Homo sapiens
tctcactatctcaat

SEQ ID NO: 1803749 - DNA, 15 bp, Homo sapiens
ctcactatctcaata

SEQ ID NO: 1803750 - DNA, 15 bp, Homo sapiens
tcactatctcaatac

SEQ ID NO: 1803751 - DNA, 15 bp, Homo sapiens
cactatctcaataca

SEQ ID NO: 1803752 - DNA, 15 bp, Homo sapiens
actatctcaatacaa

SEQ ID NO: 1803753 - DNA, 15 bp, Homo sapiens
ctatctcaatacaat

SEQ ID NO: 1803754 - DNA, 15 bp, Homo sapiens
tatctcaatacaatt

SEQ ID NO: 1803755 - DNA, 15 bp, Homo sapiens
atctcaatacaattc

SEQ ID NO: 1803756 - DNA, 15 bp, Homo sapiens
tctcaatacaattct

SEQ ID NO: 1803757 - DNA, 15 bp, Homo sapiens
ctcaatacaattctc

SEQ ID NO: 1803758 - DNA, 15 bp, Homo sapiens
tcaatacaattctca

SEQ ID NO: 1803759 - DNA, 15 bp, Homo sapiens
caatacaattctcac

SEQ ID NO: 1803760 - DNA, 15 bp, Homo sapiens
aatacaattctcacc

SEQ ID NO: 1803761 - DNA, 15 bp, Homo sapiens
atacaattctcacca

SEQ ID NO: 1803762 - DNA, 15 bp, Homo sapiens
tacaattctcaccat

SEQ ID NO: 1803763 - DNA, 15 bp, Homo sapiens
acaattctcaccatc

SEQ ID NO: 1803764 - DNA, 15 bp, Homo sapiens
caattctcaccatct

SEQ ID NO: 1803765 - DNA, 15 bp, Homo sapiens
aattctcaccatcta

SEQ ID NO: 1803766 - DNA, 15 bp, Homo sapiens
attctcaccatctag

SEQ ID NO: 1803767 - DNA, 15 bp, Homo sapiens
ttctcaccatctaga

SEQ ID NO: 1803768 - DNA, 15 bp, Homo sapiens
tctcaccatctagat

SEQ ID NO: 1803769 - DNA, 15 bp, Homo sapiens
ctcaccatctagata

SEQ ID NO: 1803770 - DNA, 15 bp, Homo sapiens
tcaccatctagatag

SEQ ID NO: 1803771 - DNA, 15 bp, Homo sapiens
caccatctagataga

SEQ ID NO: 1803772 - DNA, 15 bp, Homo sapiens
accatctagatagaa

SEQ ID NO: 1803773 - DNA, 15 bp, Homo sapiens
ccatctagatagaac

SEQ ID NO: 1803774 - DNA, 15 bp, Homo sapiens
catctagatagaact

SEQ ID NO: 1803775 - DNA, 15 bp, Homo sapiens
atctagatagaactc

SEQ ID NO: 1803776 - DNA, 15 bp, Homo sapiens
tctagatagaactct

SEQ ID NO: 1803777 - DNA, 15 bp, Homo sapiens
ctagatagaactctc

SEQ ID NO: 1803778 - DNA, 15 bp, Homo sapiens
tagatagaactctca

SEQ ID NO: 1803779 - DNA, 15 bp, Homo sapiens
agatagaactctcac

SEQ ID NO: 1803780 - DNA, 15 bp, Homo sapiens
gatagaactctcact

SEQ ID NO: 1803781 - DNA, 15 bp, Homo sapiens
aactctcactatctg

SEQ ID NO: 1803782 - DNA, 15 bp, Homo sapiens
actctcactatctgc

SEQ ID NO: 1803783 - DNA, 15 bp, Homo sapiens
ctctcactatctgca

SEQ ID NO: 1803784 - DNA, 15 bp, Homo sapiens
tctcactatctgcat

SEQ ID NO: 1803785 - DNA, 15 bp, Homo sapiens
ctcactatctgcata

SEQ ID NO: 1803786 - DNA, 15 bp, Homo sapiens
tcactatctgcatag

SEQ ID NO: 1803787 - DNA, 15 bp, Homo sapiens
cactatctgcataga

SEQ ID NO: 1803788 - DNA, 15 bp, Homo sapiens
actatctgcatagaa

SEQ ID NO: 1803789 - DNA, 15 bp, Homo sapiens
ctatctgcatagaat

SEQ ID NO: 1803790 - DNA, 15 bp, Homo sapiens
tatctgcatagaatt

SEQ ID NO: 1803791 - DNA, 15 bp, Homo sapiens
atctgcatagaattc

SEQ ID NO: 1803792 - DNA, 15 bp, Homo sapiens
tctgcatagaattct

SEQ ID NO: 1803793 - DNA, 15 bp, Homo sapiens
ctgcatagaattctc

SEQ ID NO: 1803794 - DNA, 15 bp, Homo sapiens
tgcatagaattctca

SEQ ID NO: 1803795 - DNA, 15 bp, Homo sapiens
gcatagaattctcac

SEQ ID NO: 1803796 - DNA, 15 bp, Homo sapiens
catagaattctcact

SEQ ID NO: 1803797 - DNA, 15 bp, Homo sapiens
atagaattctcactc

SEQ ID NO: 1803798 - DNA, 15 bp, Homo sapiens
tagaattctcactct

SEQ ID NO: 1803799 - DNA, 15 bp, Homo sapiens
agaattctcactctc

SEQ ID NO: 1803800 - DNA, 15 bp, Homo sapiens
gaattctcactctct

SEQ ID NO: 1803801 - DNA, 15 bp, Homo sapiens
aattctcactctctg

SEQ ID NO: 1803802 - DNA, 15 bp, Homo sapiens
attctcactctctgt

SEQ ID NO: 1803803 - DNA, 15 bp, Homo sapiens
ttctcactctctgta

SEQ ID NO: 1803804 - DNA, 15 bp, Homo sapiens
tctcactctctgtat

SEQ ID NO: 1803805 - DNA, 15 bp, Homo sapiens
ctcactctctgtata

SEQ ID NO: 1803806 - DNA, 15 bp, Homo sapiens
tcactctctgtatat

SEQ ID NO: 1803807 - DNA, 15 bp, Homo sapiens
cactctctgtatata

SEQ ID NO: 1803808 - DNA, 15 bp, Homo sapiens
actctctgtatataa

SEQ ID NO: 1803809 - DNA, 15 bp, Homo sapiens
ctctctgtatataac

SEQ ID NO: 1803810 - DNA, 15 bp, Homo sapiens
tctctgtatataact

SEQ ID NO: 1803811 - DNA, 15 bp, Homo sapiens
ctctgtatataactc

SEQ ID NO: 1803812 - DNA, 15 bp, Homo sapiens
tctgtatataactct

SEQ ID NO: 1803813 - DNA, 15 bp, Homo sapiens
ctgtatataactctc

SEQ ID NO: 1803814 - DNA, 15 bp, Homo sapiens
tgtatataactctca

SEQ ID NO: 1803815 - DNA, 15 bp, Homo sapiens
gtatataactctcac

SEQ ID NO: 1803816 - DNA, 15 bp, Homo sapiens
tatataactctcact

SEQ ID NO: 1803817 - DNA, 15 bp, Homo sapiens
atataactctcacta

SEQ ID NO: 1803818 - DNA, 15 bp, Homo sapiens
tataactctcactat

SEQ ID NO: 1803819 - DNA, 15 bp, Homo sapiens
ataactctcactatc

SEQ ID NO: 1803820 - DNA, 15 bp, Homo sapiens
taactctcactatct

SEQ ID NO: 1803821 - DNA, 15 bp, Homo sapiens
aactctcactatcta

SEQ ID NO: 1803822 - DNA, 15 bp, Homo sapiens
actctcactatctat

SEQ ID NO: 1803823 - DNA, 15 bp, Homo sapiens
ctctcactatctatc

SEQ ID NO: 1803824 - DNA, 15 bp, Homo sapiens
tctcactatctatcg

SEQ ID NO: 1803825 - DNA, 15 bp, Homo sapiens
ctcactatctatcga

SEQ ID NO: 1803826 - DNA, 15 bp, Homo sapiens
tcactatctatcgag

SEQ ID NO: 1803827 - DNA, 15 bp, Homo sapiens
cactatctatcgaga

SEQ ID NO: 1803828 - DNA, 15 bp, Homo sapiens
actatctatcgagat

SEQ ID NO: 1803829 - DNA, 15 bp, Homo sapiens
ctatctatcgagata

SEQ ID NO: 1803830 - DNA, 15 bp, Homo sapiens
tatctatcgagatag

SEQ ID NO: 1803831 - DNA, 15 bp, Homo sapiens
atctatcgagataga

SEQ ID NO: 1803832 - DNA, 15 bp, Homo sapiens
tctatcgagatagaa

SEQ ID NO: 1803833 - DNA, 15 bp, Homo sapiens
ctatcgagatagaat

SEQ ID NO: 1803834 - DNA, 15 bp, Homo sapiens
tatcgagatagaata

SEQ ID NO: 1803835 - DNA, 15 bp, Homo sapiens
atcgagatagaatac

SEQ ID NO: 1803836 - DNA, 15 bp, Homo sapiens
tcgagatagaatact

SEQ ID NO: 1803837 - DNA, 15 bp, Homo sapiens
cgagatagaatactc

SEQ ID NO: 1803838 - DNA, 15 bp, Homo sapiens
gagatagaatactca

SEQ ID NO: 1803839 - DNA, 15 bp, Homo sapiens
agatagaatactcac

SEQ ID NO: 1803840 - DNA, 15 bp, Homo sapiens
gatagaatactcact

SEQ ID NO: 1803841 - DNA, 15 bp, Homo sapiens
atagaatactcactc

SEQ ID NO: 1803842 - DNA, 15 bp, Homo sapiens
tagaatactcactct

SEQ ID NO: 1803843 - DNA, 15 bp, Homo sapiens
agaatactcactctc

SEQ ID NO: 1803844 - DNA, 15 bp, Homo sapiens
gaatactcactctct

SEQ ID NO: 1803845 - DNA, 15 bp, Homo sapiens
aatactcactctctg

SEQ ID NO: 1803846 - DNA, 15 bp, Homo sapiens
atactcactctctgg

SEQ ID NO: 1803847 - DNA, 15 bp, Homo sapiens
tactcactctctgga

SEQ ID NO: 1803848 - DNA, 15 bp, Homo sapiens
actcactctctggat

SEQ ID NO: 1803849 - DNA, 15 bp, Homo sapiens
ctcactctctggata

SEQ ID NO: 1803850 - DNA, 15 bp, Homo sapiens
tcactctctggatag

SEQ ID NO: 1803851 - DNA, 15 bp, Homo sapiens
cactctctggataga

SEQ ID NO: 1803852 - DNA, 15 bp, Homo sapiens
actctctggatagaa

SEQ ID NO: 1803853 - DNA, 15 bp, Homo sapiens
ctctctggatagaac

SEQ ID NO: 1803854 - DNA, 15 bp, Homo sapiens
actctcactatctgg

SEQ ID NO: 1803855 - DNA, 15 bp, Homo sapiens
ctctcactatctgga

SEQ ID NO: 1803856 - DNA, 15 bp, Homo sapiens
tctcactatctggat

SEQ ID NO: 1803857 - DNA, 15 bp, Homo sapiens
ctcactatctggata

SEQ ID NO: 1803858 - DNA, 15 bp, Homo sapiens
tcactatctggatag

SEQ ID NO: 1803859 - DNA, 15 bp, Homo sapiens
cactatctggataga

SEQ ID NO: 1803860 - DNA, 15 bp, Homo sapiens
actatctggatagaa

SEQ ID NO: 1803861 - DNA, 15 bp, Homo sapiens
ctatctggatagaat

SEQ ID NO: 1803862 - DNA, 15 bp, Homo sapiens
tatctggatagaatt

SEQ ID NO: 1803863 - DNA, 15 bp, Homo sapiens
ggatagaattctcac

SEQ ID NO: 1803864 - DNA, 15 bp, Homo sapiens
gatagaattctcact

SEQ ID NO: 1803865 - DNA, 15 bp, Homo sapiens
attctcactctctgg

SEQ ID NO: 1803866 - DNA, 15 bp, Homo sapiens
ttctcactctctgga

SEQ ID NO: 1803867 - DNA, 15 bp, Homo sapiens
tctcactctctggat

SEQ ID NO: 1803868 - DNA, 15 bp, Homo sapiens
actctctggatagat

SEQ ID NO: 1803869 - DNA, 15 bp, Homo sapiens
ctctctggatagatc

SEQ ID NO: 1803870 - DNA, 15 bp, Homo sapiens
tctctggatagatct

SEQ ID NO: 1803871 - DNA, 15 bp, Homo sapiens
ctctggatagatctc

SEQ ID NO: 1803872 - DNA, 15 bp, Homo sapiens
tctggatagatctct

SEQ ID NO: 1803873 - DNA, 15 bp, Homo sapiens
ctggatagatctctt

SEQ ID NO: 1803874 - DNA, 15 bp, Homo sapiens
tggatagatctctta

SEQ ID NO: 1803875 - DNA, 15 bp, Homo sapiens
ggatagatctcttac

SEQ ID NO: 1803876 - DNA, 15 bp, Homo sapiens
gatagatctcttact

SEQ ID NO: 1803877 - DNA, 15 bp, Homo sapiens
atagatctcttactg

SEQ ID NO: 1803878 - DNA, 15 bp, Homo sapiens
tagatctcttactgt

SEQ ID NO: 1803879 - DNA, 15 bp, Homo sapiens
agatctcttactgtc

SEQ ID NO: 1803880 - DNA, 15 bp, Homo sapiens
gatctcttactgtct

SEQ ID NO: 1803881 - DNA, 15 bp, Homo sapiens
atctcttactgtcta

SEQ ID NO: 1803882 - DNA, 15 bp, Homo sapiens
tctcttactgtctat

SEQ ID NO: 1803883 - DNA, 15 bp, Homo sapiens
ctcttactgtctatc

SEQ ID NO: 1803884 - DNA, 15 bp, Homo sapiens
tcttactgtctatct

SEQ ID NO: 1803885 - DNA, 15 bp, Homo sapiens
cttactgtctatctg

SEQ ID NO: 1803886 - DNA, 15 bp, Homo sapiens
ttactgtctatctgg

SEQ ID NO: 1803887 - DNA, 15 bp, Homo sapiens
tactgtctatctgga

SEQ ID NO: 1803888 - DNA, 15 bp, Homo sapiens
actgtctatctggat

SEQ ID NO: 1803889 - DNA, 15 bp, Homo sapiens
ctgtctatctggata

SEQ ID NO: 1803890 - DNA, 15 bp, Homo sapiens
tgtctatctggatag

SEQ ID NO: 1803891 - DNA, 15 bp, Homo sapiens
gtctatctggataga

SEQ ID NO: 1803892 - DNA, 15 bp, Homo sapiens
tctatctggatagaa

SEQ ID NO: 1803893 - DNA, 15 bp, Homo sapiens
agaattctcactctg

SEQ ID NO: 1803894 - DNA, 15 bp, Homo sapiens
gaattctcactctgg

SEQ ID NO: 1803895 - DNA, 15 bp, Homo sapiens
aattctcactctggg

SEQ ID NO: 1803896 - DNA, 15 bp, Homo sapiens
attctcactctgggg

SEQ ID NO: 1803897 - DNA, 15 bp, Homo sapiens
ttctcactctgggga

SEQ ID NO: 1803898 - DNA, 15 bp, Homo sapiens
tctcactctggggac

SEQ ID NO: 1803899 - DNA, 15 bp, Homo sapiens
ctcactctggggaca

SEQ ID NO: 1803900 - DNA, 15 bp, Homo sapiens
tcactctggggacag

SEQ ID NO: 1803901 - DNA, 15 bp, Homo sapiens
cactctggggacaga

SEQ ID NO: 1803902 - DNA, 15 bp, Homo sapiens
actctggggacagaa

SEQ ID NO: 1803903 - DNA, 15 bp, Homo sapiens
ctctggggacagaac

SEQ ID NO: 1803904 - DNA, 15 bp, Homo sapiens
tctggggacagaact

SEQ ID NO: 1803905 - DNA, 15 bp, Homo sapiens
ctggggacagaactc

SEQ ID NO: 1803906 - DNA, 15 bp, Homo sapiens
tggggacagaactct

SEQ ID NO: 1803907 - DNA, 15 bp, Homo sapiens
ggggacagaactctc

SEQ ID NO: 1803908 - DNA, 15 bp, Homo sapiens
gggacagaactctca

SEQ ID NO: 1803909 - DNA, 15 bp, Homo sapiens
ggacagaactctcac

SEQ ID NO: 1803910 - DNA, 15 bp, Homo sapiens
gacagaactctcact

SEQ ID NO: 1803911 - DNA, 15 bp, Homo sapiens
acagaactctcacta

SEQ ID NO: 1803912 - DNA, 15 bp, Homo sapiens
cagaactctcactat

SEQ ID NO: 1803913 - DNA, 15 bp, Homo sapiens
tctcactatctatct

SEQ ID NO: 1803914 - DNA, 15 bp, Homo sapiens
ctcactatctatctg

SEQ ID NO: 1803915 - DNA, 15 bp, Homo sapiens
tcactatctatctgg

SEQ ID NO: 1803916 - DNA, 15 bp, Homo sapiens
cactatctatctgga

SEQ ID NO: 1803917 - DNA, 15 bp, Homo sapiens
actatctatctggat

SEQ ID NO: 1803918 - DNA, 15 bp, Homo sapiens
ctatctatctggatg

SEQ ID NO: 1803919 - DNA, 15 bp, Homo sapiens
tatctatctggatgg

SEQ ID NO: 1803920 - DNA, 15 bp, Homo sapiens
atctatctggatgga

SEQ ID NO: 1803921 - DNA, 15 bp, Homo sapiens
tctatctggatggaa

SEQ ID NO: 1803922 - DNA, 15 bp, Homo sapiens
ctatctggatggaat

SEQ ID NO: 1803923 - DNA, 15 bp, Homo sapiens
tatctggatggaatt

SEQ ID NO: 1803924 - DNA, 15 bp, Homo sapiens
atctggatggaattc

SEQ ID NO: 1803925 - DNA, 15 bp, Homo sapiens
tctggatggaattct

SEQ ID NO: 1803926 - DNA, 15 bp, Homo sapiens
ctggatggaattctc

SEQ ID NO: 1803927 - DNA, 15 bp, Homo sapiens
tggatggaattctct

SEQ ID NO: 1803928 - DNA, 15 bp, Homo sapiens
ggatggaattctctc

SEQ ID NO: 1803929 - DNA, 15 bp, Homo sapiens
gatggaattctctcc

SEQ ID NO: 1803930 - DNA, 15 bp, Homo sapiens
atggaattctctccc

SEQ ID NO: 1803931 - DNA, 15 bp, Homo sapiens
tggaattctctccct

SEQ ID NO: 1803932 - DNA, 15 bp, Homo sapiens
ggaattctctccctc

SEQ ID NO: 1803933 - DNA, 15 bp, Homo sapiens
gaattctctccctct

SEQ ID NO: 1803934 - DNA, 15 bp, Homo sapiens
aattctctccctctg

SEQ ID NO: 1803935 - DNA, 15 bp, Homo sapiens
attctctccctctgc

SEQ ID NO: 1803936 - DNA, 15 bp, Homo sapiens
ttctctccctctgca

SEQ ID NO: 1803937 - DNA, 15 bp, Homo sapiens
tctctccctctgcat

SEQ ID NO: 1803938 - DNA, 15 bp, Homo sapiens
ctctccctctgcata

SEQ ID NO: 1803939 - DNA, 15 bp, Homo sapiens
tctccctctgcatag

SEQ ID NO: 1803940 - DNA, 15 bp, Homo sapiens
ctccctctgcatagg

SEQ ID NO: 1803941 - DNA, 15 bp, Homo sapiens
tccctctgcatagga

SEQ ID NO: 1803942 - DNA, 15 bp, Homo sapiens
ccctctgcataggac

SEQ ID NO: 1803943 - DNA, 15 bp, Homo sapiens
cctctgcataggact

SEQ ID NO: 1803944 - DNA, 15 bp, Homo sapiens
ctctgcataggactg

SEQ ID NO: 1803945 - DNA, 15 bp, Homo sapiens
tctgcataggactgt

SEQ ID NO: 1803946 - DNA, 15 bp, Homo sapiens
ctgcataggactgtc

SEQ ID NO: 1803947 - DNA, 15 bp, Homo sapiens
tgcataggactgtca

SEQ ID NO: 1803948 - DNA, 15 bp, Homo sapiens
gcataggactgtcac

SEQ ID NO: 1803949 - DNA, 15 bp, Homo sapiens
cataggactgtcact

SEQ ID NO: 1803950 - DNA, 15 bp, Homo sapiens
ataggactgtcactc

SEQ ID NO: 1803951 - DNA, 15 bp, Homo sapiens
taggactgtcactct

SEQ ID NO: 1803952 - DNA, 15 bp, Homo sapiens
aggactgtcactctc

SEQ ID NO: 1803953 - DNA, 15 bp, Homo sapiens
ggactgtcactctct

SEQ ID NO: 1803954 - DNA, 15 bp, Homo sapiens
gactgtcactctctg

SEQ ID NO: 1803955 - DNA, 15 bp, Homo sapiens
actgtcactctctgg

SEQ ID NO: 1803956 - DNA, 15 bp, Homo sapiens
ctgtcactctctgga

SEQ ID NO: 1803957 - DNA, 15 bp, Homo sapiens
tgtcactctctggat

SEQ ID NO: 1803958 - DNA, 15 bp, Homo sapiens
gtcactctctggata

SEQ ID NO: 1803959 - DNA, 15 bp, Homo sapiens
ctctctggatagaat

SEQ ID NO: 1803960 - DNA, 15 bp, Homo sapiens
tctctggatagaatt

SEQ ID NO: 1803961 - DNA, 15 bp, Homo sapiens
ctctggatagaattc

SEQ ID NO: 1803962 - DNA, 15 bp, Homo sapiens
gatagaattctcacc

SEQ ID NO: 1803963 - DNA, 15 bp, Homo sapiens
atagaattctcacca

SEQ ID NO: 1803964 - DNA, 15 bp, Homo sapiens
tagaattctcaccat

SEQ ID NO: 1803965 - DNA, 15 bp, Homo sapiens
tctggatagaactcc

SEQ ID NO: 1803966 - DNA, 15 bp, Homo sapiens
ctggatagaactccc

SEQ ID NO: 1803967 - DNA, 15 bp, Homo sapiens
tggatagaactccca

SEQ ID NO: 1803968 - DNA, 15 bp, Homo sapiens
ggatagaactcccac

SEQ ID NO: 1803969 - DNA, 15 bp, Homo sapiens
gatagaactcccact

SEQ ID NO: 1803970 - DNA, 15 bp, Homo sapiens
atagaactcccacta

SEQ ID NO: 1803971 - DNA, 15 bp, Homo sapiens
tagaactcccactat

SEQ ID NO: 1803972 - DNA, 15 bp, Homo sapiens
agaactcccactatc

SEQ ID NO: 1803973 - DNA, 15 bp, Homo sapiens
gaactcccactatct

SEQ ID NO: 1803974 - DNA, 15 bp, Homo sapiens
aactcccactatctg

SEQ ID NO: 1803975 - DNA, 15 bp, Homo sapiens
actcccactatctgg

SEQ ID NO: 1803976 - DNA, 15 bp, Homo sapiens
ctcccactatctgga

SEQ ID NO: 1803977 - DNA, 15 bp, Homo sapiens
tcccactatctggaa

SEQ ID NO: 1803978 - DNA, 15 bp, Homo sapiens
cccactatctggaaa

SEQ ID NO: 1803979 - DNA, 15 bp, Homo sapiens
ccactatctggaaag

SEQ ID NO: 1803980 - DNA, 15 bp, Homo sapiens
cactatctggaaaga

SEQ ID NO: 1803981 - DNA, 15 bp, Homo sapiens
actatctggaaagaa

SEQ ID NO: 1803982 - DNA, 15 bp, Homo sapiens
ctatctggaaagaat

SEQ ID NO: 1803983 - DNA, 15 bp, Homo sapiens
tatctggaaagaatt

SEQ ID NO: 1803984 - DNA, 15 bp, Homo sapiens
atctggaaagaattc

SEQ ID NO: 1803985 - DNA, 15 bp, Homo sapiens
tctggaaagaattct

SEQ ID NO: 1803986 - DNA, 15 bp, Homo sapiens
ctggaaagaattctc

SEQ ID NO: 1803987 - DNA, 15 bp, Homo sapiens
tggaaagaattctca

SEQ ID NO: 1803988 - DNA, 15 bp, Homo sapiens
ggaaagaattctcag

SEQ ID NO: 1803989 - DNA, 15 bp, Homo sapiens
gaaagaattctcagt

SEQ ID NO: 1803990 - DNA, 15 bp, Homo sapiens
aaagaattctcagtc

SEQ ID NO: 1803991 - DNA, 15 bp, Homo sapiens
aagaattctcagtct

SEQ ID NO: 1803992 - DNA, 15 bp, Homo sapiens
agaattctcagtctt

SEQ ID NO: 1803993 - DNA, 15 bp, Homo sapiens
gaattctcagtcttt

SEQ ID NO: 1803994 - DNA, 15 bp, Homo sapiens
aattctcagtcttta

SEQ ID NO: 1803995 - DNA, 15 bp, Homo sapiens
attctcagtctttag

SEQ ID NO: 1803996 - DNA, 15 bp, Homo sapiens
ttctcagtctttagt

SEQ ID NO: 1803997 - DNA, 15 bp, Homo sapiens
tctcagtctttagtt

SEQ ID NO: 1803998 - DNA, 15 bp, Homo sapiens
ctcagtctttagtta

SEQ ID NO: 1803999 - DNA, 15 bp, Homo sapiens
tcagtctttagttag

SEQ ID NO: 1804000 - DNA, 15 bp, Homo sapiens
cagtctttagttaga

SEQ ID NO: 1804001 - DNA, 15 bp, Homo sapiens
agtctttagttagaa

SEQ ID NO: 1804002 - DNA, 15 bp, Homo sapiens
gtctttagttagaac

SEQ ID NO: 1804003 - DNA, 15 bp, Homo sapiens
tctttagttagaact

SEQ ID NO: 1804004 - DNA, 15 bp, Homo sapiens
ctttagttagaactc

SEQ ID NO: 1804005 - DNA, 15 bp, Homo sapiens
tttagttagaactct

SEQ ID NO: 1804006 - DNA, 15 bp, Homo sapiens
ttagttagaactctc

SEQ ID NO: 1804007 - DNA, 15 bp, Homo sapiens
tagttagaactctcg

SEQ ID NO: 1804008 - DNA, 15 bp, Homo sapiens
agttagaactctcgc

SEQ ID NO: 1804009 - DNA, 15 bp, Homo sapiens
gttagaactctcgct

SEQ ID NO: 1804010 - DNA, 15 bp, Homo sapiens
ttagaactctcgcta

SEQ ID NO: 1804011 - DNA, 15 bp, Homo sapiens
tagaactctcgctat

SEQ ID NO: 1804012 - DNA, 15 bp, Homo sapiens
agaactctcgctatc

SEQ ID NO: 1804013 - DNA, 15 bp, Homo sapiens
gaactctcgctatct

SEQ ID NO: 1804014 - DNA, 15 bp, Homo sapiens
aactctcgctatctt

SEQ ID NO: 1804015 - DNA, 15 bp, Homo sapiens
actctcgctatcttt

SEQ ID NO: 1804016 - DNA, 15 bp, Homo sapiens
ctctcgctatctttg

SEQ ID NO: 1804017 - DNA, 15 bp, Homo sapiens
tctcgctatctttgt

SEQ ID NO: 1804018 - DNA, 15 bp, Homo sapiens
ctcgctatctttgtg

SEQ ID NO: 1804019 - DNA, 15 bp, Homo sapiens
tcgctatctttgtgg

SEQ ID NO: 1804020 - DNA, 15 bp, Homo sapiens
cgctatctttgtgga

SEQ ID NO: 1804021 - DNA, 15 bp, Homo sapiens
gctatctttgtggat

SEQ ID NO: 1804022 - DNA, 15 bp, Homo sapiens
ctatctttgtggata

SEQ ID NO: 1804023 - DNA, 15 bp, Homo sapiens
tatctttgtggatac

SEQ ID NO: 1804024 - DNA, 15 bp, Homo sapiens
atctttgtggataca

SEQ ID NO: 1804025 - DNA, 15 bp, Homo sapiens
tctttgtggatacag

SEQ ID NO: 1804026 - DNA, 15 bp, Homo sapiens
ctttgtggatacagt

SEQ ID NO: 1804027 - DNA, 15 bp, Homo sapiens
tttgtggatacagtt

SEQ ID NO: 1804028 - DNA, 15 bp, Homo sapiens
ttgtggatacagttc

SEQ ID NO: 1804029 - DNA, 15 bp, Homo sapiens
tgtggatacagttct

SEQ ID NO: 1804030 - DNA, 15 bp, Homo sapiens
gtggatacagttctc

SEQ ID NO: 1804031 - DNA, 15 bp, Homo sapiens
tggatacagttctca

SEQ ID NO: 1804032 - DNA, 15 bp, Homo sapiens
ggatacagttctcac

SEQ ID NO: 1804033 - DNA, 15 bp, Homo sapiens
gatacagttctcacc

SEQ ID NO: 1804034 - DNA, 15 bp, Homo sapiens
atacagttctcaccc

SEQ ID NO: 1804035 - DNA, 15 bp, Homo sapiens
tacagttctcaccct

SEQ ID NO: 1804036 - DNA, 15 bp, Homo sapiens
acagttctcaccctc

SEQ ID NO: 1804037 - DNA, 15 bp, Homo sapiens
cagttctcaccctcc

SEQ ID NO: 1804038 - DNA, 15 bp, Homo sapiens
agttctcaccctcca

SEQ ID NO: 1804039 - DNA, 15 bp, Homo sapiens
gttctcaccctccag

SEQ ID NO: 1804040 - DNA, 15 bp, Homo sapiens
ttctcaccctccaga

SEQ ID NO: 1804041 - DNA, 15 bp, Homo sapiens
tctcaccctccagag

SEQ ID NO: 1804042 - DNA, 15 bp, Homo sapiens
ctcaccctccagaga

SEQ ID NO: 1804043 - DNA, 15 bp, Homo sapiens
tcaccctccagagag

SEQ ID NO: 1804044 - DNA, 15 bp, Homo sapiens
caccctccagagaga

SEQ ID NO: 1804045 - DNA, 15 bp, Homo sapiens
accctccagagagaa

SEQ ID NO: 1804046 - DNA, 15 bp, Homo sapiens
ccctccagagagaac

SEQ ID NO: 1804047 - DNA, 15 bp, Homo sapiens
cctccagagagaact

SEQ ID NO: 1804048 - DNA, 15 bp, Homo sapiens
ctccagagagaactc

SEQ ID NO: 1804049 - DNA, 15 bp, Homo sapiens
tccagagagaactct

SEQ ID NO: 1804050 - DNA, 15 bp, Homo sapiens
ccagagagaactctc

SEQ ID NO: 1804051 - DNA, 15 bp, Homo sapiens
cagagagaactctca

SEQ ID NO: 1804052 - DNA, 15 bp, Homo sapiens
agagagaactctcac

SEQ ID NO: 1804053 - DNA, 15 bp, Homo sapiens
gagagaactctcact

SEQ ID NO: 1804054 - DNA, 15 bp, Homo sapiens
agagaactctcacta

SEQ ID NO: 1804055 - DNA, 15 bp, Homo sapiens
gagaactctcactat

SEQ ID NO: 1804056 - DNA, 15 bp, Homo sapiens
ctcactatctatcta

SEQ ID NO: 1804057 - DNA, 15 bp, Homo sapiens
tcactatctatctag

SEQ ID NO: 1804058 - DNA, 15 bp, Homo sapiens
cactatctatctaga

SEQ ID NO: 1804059 - DNA, 15 bp, Homo sapiens
actatctatctagat

SEQ ID NO: 1804060 - DNA, 15 bp, Homo sapiens
ctatctatctagata

SEQ ID NO: 1804061 - DNA, 15 bp, Homo sapiens
tatctatctagatag

SEQ ID NO: 1804062 - DNA, 15 bp, Homo sapiens
atctatctagataga

SEQ ID NO: 1804063 - DNA, 15 bp, Homo sapiens
tctatctagatagaa

SEQ ID NO: 1804064 - DNA, 15 bp, Homo sapiens
ctatctagatagaat

SEQ ID NO: 1804065 - DNA, 15 bp, Homo sapiens
tatctagatagaatt

SEQ ID NO: 1804066 - DNA, 15 bp, Homo sapiens
atctagatagaatta

SEQ ID NO: 1804067 - DNA, 15 bp, Homo sapiens
tctagatagaattat

SEQ ID NO: 1804068 - DNA, 15 bp, Homo sapiens
ctagatagaattatc

SEQ ID NO: 1804069 - DNA, 15 bp, Homo sapiens
tagatagaattatca

SEQ ID NO: 1804070 - DNA, 15 bp, Homo sapiens
agatagaattatcac

SEQ ID NO: 1804071 - DNA, 15 bp, Homo sapiens
gatagaattatcact

SEQ ID NO: 1804072 - DNA, 15 bp, Homo sapiens
atagaattatcactc

SEQ ID NO: 1804073 - DNA, 15 bp, Homo sapiens
tagaattatcactct

SEQ ID NO: 1804074 - DNA, 15 bp, Homo sapiens
agaattatcactctc

SEQ ID NO: 1804075 - DNA, 15 bp, Homo sapiens
gaattatcactctct

SEQ ID NO: 1804076 - DNA, 15 bp, Homo sapiens
aattatcactctctg

SEQ ID NO: 1804077 - DNA, 15 bp, Homo sapiens
attatcactctctgg

SEQ ID NO: 1804078 - DNA, 15 bp, Homo sapiens
ttatcactctctgga

SEQ ID NO: 1804079 - DNA, 15 bp, Homo sapiens
tatcactctctggat

SEQ ID NO: 1804080 - DNA, 15 bp, Homo sapiens
atcactctctggata

SEQ ID NO: 1804081 - DNA, 15 bp, Homo sapiens
ctctctggatagaaa

SEQ ID NO: 1804082 - DNA, 15 bp, Homo sapiens
tctctggatagaaat

SEQ ID NO: 1804083 - DNA, 15 bp, Homo sapiens
ctctggatagaaatc

SEQ ID NO: 1804084 - DNA, 15 bp, Homo sapiens
tctggatagaaatct

SEQ ID NO: 1804085 - DNA, 15 bp, Homo sapiens
ctggatagaaatctc

SEQ ID NO: 1804086 - DNA, 15 bp, Homo sapiens
tggatagaaatctca

SEQ ID NO: 1804087 - DNA, 15 bp, Homo sapiens
ggatagaaatctcac

SEQ ID NO: 1804088 - DNA, 15 bp, Homo sapiens
gatagaaatctcact

SEQ ID NO: 1804089 - DNA, 15 bp, Homo sapiens
atagaaatctcacta

SEQ ID NO: 1804090 - DNA, 15 bp, Homo sapiens
tagaaatctcactat

SEQ ID NO: 1804091 - DNA, 15 bp, Homo sapiens
agaaatctcactatc

SEQ ID NO: 1804092 - DNA, 15 bp, Homo sapiens
gaaatctcactatct

SEQ ID NO: 1804093 - DNA, 15 bp, Homo sapiens
aaatctcactatctg

SEQ ID NO: 1804094 - DNA, 15 bp, Homo sapiens
aatctcactatctgt

SEQ ID NO: 1804095 - DNA, 15 bp, Homo sapiens
atctcactatctgtc

SEQ ID NO: 1804096 - DNA, 15 bp, Homo sapiens
tctcactatctgtct

SEQ ID NO: 1804097 - DNA, 15 bp, Homo sapiens
ctcactatctgtctg

SEQ ID NO: 1804098 - DNA, 15 bp, Homo sapiens
tcactatctgtctgg

SEQ ID NO: 1804099 - DNA, 15 bp, Homo sapiens
cactatctgtctgga

SEQ ID NO: 1804100 - DNA, 15 bp, Homo sapiens
actatctgtctggat

SEQ ID NO: 1804101 - DNA, 15 bp, Homo sapiens
ctatctgtctggata

SEQ ID NO: 1804102 - DNA, 15 bp, Homo sapiens
tatctgtctggatag

SEQ ID NO: 1804103 - DNA, 15 bp, Homo sapiens
atctgtctggataga

SEQ ID NO: 1804104 - DNA, 15 bp, Homo sapiens
tctgtctggatagaa

SEQ ID NO: 1804105 - DNA, 15 bp, Homo sapiens
ctgtctggatagaat

SEQ ID NO: 1804106 - DNA, 15 bp, Homo sapiens
tgtctggatagaatt

SEQ ID NO: 1804107 - DNA, 15 bp, Homo sapiens
gtctggatagaattc

SEQ ID NO: 1804108 - DNA, 15 bp, Homo sapiens
gaattctcaccatca

SEQ ID NO: 1804109 - DNA, 15 bp, Homo sapiens
aattctcaccatcag

SEQ ID NO: 1804110 - DNA, 15 bp, Homo sapiens
attctcaccatcagg

SEQ ID NO: 1804111 - DNA, 15 bp, Homo sapiens
ttctcaccatcagga

SEQ ID NO: 1804112 - DNA, 15 bp, Homo sapiens
tctcaccatcaggat

SEQ ID NO: 1804113 - DNA, 15 bp, Homo sapiens
ctcaccatcaggata

SEQ ID NO: 1804114 - DNA, 15 bp, Homo sapiens
tcaccatcaggatag

SEQ ID NO: 1804115 - DNA, 15 bp, Homo sapiens
caccatcaggataga

SEQ ID NO: 1804116 - DNA, 15 bp, Homo sapiens
accatcaggatagaa

SEQ ID NO: 1804117 - DNA, 15 bp, Homo sapiens
ccatcaggatagaac

SEQ ID NO: 1804118 - DNA, 15 bp, Homo sapiens
catcaggatagaact

SEQ ID NO: 1804119 - DNA, 15 bp, Homo sapiens
atcaggatagaactc

SEQ ID NO: 1804120 - DNA, 15 bp, Homo sapiens
tcaggatagaactct

SEQ ID NO: 1804121 - DNA, 15 bp, Homo sapiens
caggatagaactctc

SEQ ID NO: 1804122 - DNA, 15 bp, Homo sapiens
aggatagaactctca

SEQ ID NO: 1804123 - DNA, 15 bp, Homo sapiens
atagaactctcactg

SEQ ID NO: 1804124 - DNA, 15 bp, Homo sapiens
tagaactctcactgt

SEQ ID NO: 1804125 - DNA, 15 bp, Homo sapiens
agaactctcactgtc

SEQ ID NO: 1804126 - DNA, 15 bp, Homo sapiens
gaactctcactgtct

SEQ ID NO: 1804127 - DNA, 15 bp, Homo sapiens
aactctcactgtctg

SEQ ID NO: 1804128 - DNA, 15 bp, Homo sapiens
actctcactgtctgg

SEQ ID NO: 1804129 - DNA, 15 bp, Homo sapiens
ctctcactgtctgga

SEQ ID NO: 1804130 - DNA, 15 bp, Homo sapiens
tctcactgtctggat

SEQ ID NO: 1804131 - DNA, 15 bp, Homo sapiens
ctcactgtctggata

SEQ ID NO: 1804132 - DNA, 15 bp, Homo sapiens
tcactgtctggataa

SEQ ID NO: 1804133 - DNA, 15 bp, Homo sapiens
cactgtctggataaa

SEQ ID NO: 1804134 - DNA, 15 bp, Homo sapiens
actgtctggataaaa

SEQ ID NO: 1804135 - DNA, 15 bp, Homo sapiens
ctgtctggataaaat

SEQ ID NO: 1804136 - DNA, 15 bp, Homo sapiens
tgtctggataaaatt

SEQ ID NO: 1804137 - DNA, 15 bp, Homo sapiens
gtctggataaaattc

SEQ ID NO: 1804138 - DNA, 15 bp, Homo sapiens
tctggataaaattct

SEQ ID NO: 1804139 - DNA, 15 bp, Homo sapiens
ctggataaaattctc

SEQ ID NO: 1804140 - DNA, 15 bp, Homo sapiens
tggataaaattctca

SEQ ID NO: 1804141 - DNA, 15 bp, Homo sapiens
ggataaaattctcac

SEQ ID NO: 1804142 - DNA, 15 bp, Homo sapiens
gataaaattctcacc

SEQ ID NO: 1804143 - DNA, 15 bp, Homo sapiens
ataaaattctcacca

SEQ ID NO: 1804144 - DNA, 15 bp, Homo sapiens
taaaattctcaccat

SEQ ID NO: 1804145 - DNA, 15 bp, Homo sapiens
aaaattctcaccatc

SEQ ID NO: 1804146 - DNA, 15 bp, Homo sapiens
aaattctcaccatcg

SEQ ID NO: 1804147 - DNA, 15 bp, Homo sapiens
aattctcaccatcgg

SEQ ID NO: 1804148 - DNA, 15 bp, Homo sapiens
attctcaccatcggg

SEQ ID NO: 1804149 - DNA, 15 bp, Homo sapiens
ttctcaccatcggga

SEQ ID NO: 1804150 - DNA, 15 bp, Homo sapiens
tctcaccatcgggat

SEQ ID NO: 1804151 - DNA, 15 bp, Homo sapiens
ctcaccatcgggata

SEQ ID NO: 1804152 - DNA, 15 bp, Homo sapiens
tcaccatcgggatag

SEQ ID NO: 1804153 - DNA, 15 bp, Homo sapiens
caccatcgggataga

SEQ ID NO: 1804154 - DNA, 15 bp, Homo sapiens
accatcgggatagaa

SEQ ID NO: 1804155 - DNA, 15 bp, Homo sapiens
ccatcgggatagaac

SEQ ID NO: 1804156 - DNA, 15 bp, Homo sapiens
catcgggatagaact

SEQ ID NO: 1804157 - DNA, 15 bp, Homo sapiens
atcgggatagaactc

SEQ ID NO: 1804158 - DNA, 15 bp, Homo sapiens
tcgggatagaactct

SEQ ID NO: 1804159 - DNA, 15 bp, Homo sapiens
cgggatagaactctc

SEQ ID NO: 1804160 - DNA, 15 bp, Homo sapiens
gggatagaactctca

SEQ ID NO: 1804161 - DNA, 15 bp, Homo sapiens
actctcactatctag

SEQ ID NO: 1804162 - DNA, 15 bp, Homo sapiens
ctctcactatctaga

SEQ ID NO: 1804163 - DNA, 15 bp, Homo sapiens
tctcactatctagat

SEQ ID NO: 1804164 - DNA, 15 bp, Homo sapiens
ctcactatctagata

SEQ ID NO: 1804165 - DNA, 15 bp, Homo sapiens
tcactatctagatag

SEQ ID NO: 1804166 - DNA, 15 bp, Homo sapiens
cactatctagataga

SEQ ID NO: 1804167 - DNA, 15 bp, Homo sapiens
actatctagatagaa

SEQ ID NO: 1804168 - DNA, 15 bp, Homo sapiens
atctagatagaattc

SEQ ID NO: 1804169 - DNA, 15 bp, Homo sapiens
tctagatagaattct

SEQ ID NO: 1804170 - DNA, 15 bp, Homo sapiens
ctagatagaattctc

SEQ ID NO: 1804171 - DNA, 15 bp, Homo sapiens
tagatagaattctca

SEQ ID NO: 1804172 - DNA, 15 bp, Homo sapiens
agatagaattctcac

SEQ ID NO: 1804173 - DNA, 15 bp, Homo sapiens
gatagaactctcacc

SEQ ID NO: 1804174 - DNA, 15 bp, Homo sapiens
atagaactctcacca

SEQ ID NO: 1804175 - DNA, 15 bp, Homo sapiens
tagaactctcaccat

SEQ ID NO: 1804176 - DNA, 15 bp, Homo sapiens
agaactctcaccatc

SEQ ID NO: 1804177 - DNA, 15 bp, Homo sapiens
gaactctcaccatct

SEQ ID NO: 1804178 - DNA, 15 bp, Homo sapiens
aactctcaccatcta

SEQ ID NO: 1804179 - DNA, 15 bp, Homo sapiens
actctcaccatctaa

SEQ ID NO: 1804180 - DNA, 15 bp, Homo sapiens
ctctcaccatctaaa

SEQ ID NO: 1804181 - DNA, 15 bp, Homo sapiens
tctcaccatctaaat

SEQ ID NO: 1804182 - DNA, 15 bp, Homo sapiens
ctcaccatctaaata

SEQ ID NO: 1804183 - DNA, 15 bp, Homo sapiens
tcaccatctaaatat

SEQ ID NO: 1804184 - DNA, 15 bp, Homo sapiens
caccatctaaatata

SEQ ID NO: 1804185 - DNA, 15 bp, Homo sapiens
accatctaaatataa

SEQ ID NO: 1804186 - DNA, 15 bp, Homo sapiens
ccatctaaatataat

SEQ ID NO: 1804187 - DNA, 15 bp, Homo sapiens
catctaaatataatt

SEQ ID NO: 1804188 - DNA, 15 bp, Homo sapiens
atctaaatataattc

SEQ ID NO: 1804189 - DNA, 15 bp, Homo sapiens
tctaaatataattct

SEQ ID NO: 1804190 - DNA, 15 bp, Homo sapiens
ctaaatataattctc

SEQ ID NO: 1804191 - DNA, 15 bp, Homo sapiens
taaatataattctca

SEQ ID NO: 1804192 - DNA, 15 bp, Homo sapiens
aaatataattctcac

SEQ ID NO: 1804193 - DNA, 15 bp, Homo sapiens
aatataattctcact

SEQ ID NO: 1804194 - DNA, 15 bp, Homo sapiens
atataattctcactc

SEQ ID NO: 1804195 - DNA, 15 bp, Homo sapiens
tataattctcactct

SEQ ID NO: 1804196 - DNA, 15 bp, Homo sapiens
ataattctcactctc

SEQ ID NO: 1804197 - DNA, 15 bp, Homo sapiens
taattctcactctca

SEQ ID NO: 1804198 - DNA, 15 bp, Homo sapiens
aattctcactctcag

SEQ ID NO: 1804199 - DNA, 15 bp, Homo sapiens
attctcactctcagg

SEQ ID NO: 1804200 - DNA, 15 bp, Homo sapiens
ttctcactctcagga

SEQ ID NO: 1804201 - DNA, 15 bp, Homo sapiens
tctcactctcaggat

SEQ ID NO: 1804202 - DNA, 15 bp, Homo sapiens
ctcactctcaggata

SEQ ID NO: 1804203 - DNA, 15 bp, Homo sapiens
tcactctcaggatag

SEQ ID NO: 1804204 - DNA, 15 bp, Homo sapiens
cactctcaggataga

SEQ ID NO: 1804205 - DNA, 15 bp, Homo sapiens
actctcaggatagaa

SEQ ID NO: 1804206 - DNA, 15 bp, Homo sapiens
ctctcaggatagaac

SEQ ID NO: 1804207 - DNA, 15 bp, Homo sapiens
tctcaggatagaact

SEQ ID NO: 1804208 - DNA, 15 bp, Homo sapiens
ctcaggatagaactc

SEQ ID NO: 1804209 - DNA, 15 bp, Homo sapiens
atctatctggatggg

SEQ ID NO: 1804210 - DNA, 15 bp, Homo sapiens
tctatctggatggga

SEQ ID NO: 1804211 - DNA, 15 bp, Homo sapiens
ctatctggatgggat

SEQ ID NO: 1804212 - DNA, 15 bp, Homo sapiens
tatctggatgggatt

SEQ ID NO: 1804213 - DNA, 15 bp, Homo sapiens
atctggatgggattc

SEQ ID NO: 1804214 - DNA, 15 bp, Homo sapiens
tctggatgggattct

SEQ ID NO: 1804215 - DNA, 15 bp, Homo sapiens
ctggatgggattctc

SEQ ID NO: 1804216 - DNA, 15 bp, Homo sapiens
tggatgggattctcc

SEQ ID NO: 1804217 - DNA, 15 bp, Homo sapiens
ggatgggattctccc

SEQ ID NO: 1804218 - DNA, 15 bp, Homo sapiens
gatgggattctccct

SEQ ID NO: 1804219 - DNA, 15 bp, Homo sapiens
atgggattctccctc

SEQ ID NO: 1804220 - DNA, 15 bp, Homo sapiens
tgggattctccctct

SEQ ID NO: 1804221 - DNA, 15 bp, Homo sapiens
gggattctccctcta

SEQ ID NO: 1804222 - DNA, 15 bp, Homo sapiens
ggattctccctctat

SEQ ID NO: 1804223 - DNA, 15 bp, Homo sapiens
gattctccctctatg

SEQ ID NO: 1804224 - DNA, 15 bp, Homo sapiens
attctccctctatgg

SEQ ID NO: 1804225 - DNA, 15 bp, Homo sapiens
ttctccctctatgga

SEQ ID NO: 1804226 - DNA, 15 bp, Homo sapiens
tctccctctatggat

SEQ ID NO: 1804227 - DNA, 15 bp, Homo sapiens
ctccctctatggata

SEQ ID NO: 1804228 - DNA, 15 bp, Homo sapiens
tccctctatggatag

SEQ ID NO: 1804229 - DNA, 15 bp, Homo sapiens
ccctctatggataga

SEQ ID NO: 1804230 - DNA, 15 bp, Homo sapiens
cctctatggatagaa

SEQ ID NO: 1804231 - DNA, 15 bp, Homo sapiens
ctctatggatagaac

SEQ ID NO: 1804232 - DNA, 15 bp, Homo sapiens
tctatggatagaact

SEQ ID NO: 1804233 - DNA, 15 bp, Homo sapiens
ctatggatagaactc

SEQ ID NO: 1804234 - DNA, 15 bp, Homo sapiens
tatggatagaactct

SEQ ID NO: 1804235 - DNA, 15 bp, Homo sapiens
atggatagaactctc

SEQ ID NO: 1804236 - DNA, 15 bp, Homo sapiens
ggatagaactctcag

SEQ ID NO: 1804237 - DNA, 15 bp, Homo sapiens
gatagaactctcagt

SEQ ID NO: 1804238 - DNA, 15 bp, Homo sapiens
atagaactctcagtg

SEQ ID NO: 1804239 - DNA, 15 bp, Homo sapiens
tagaactctcagtgt

SEQ ID NO: 1804240 - DNA, 15 bp, Homo sapiens
agaactctcagtgta

SEQ ID NO: 1804241 - DNA, 15 bp, Homo sapiens
gaactctcagtgtat

SEQ ID NO: 1804242 - DNA, 15 bp, Homo sapiens
aactctcagtgtata

SEQ ID NO: 1804243 - DNA, 15 bp, Homo sapiens
actctcagtgtatat

SEQ ID NO: 1804244 - DNA, 15 bp, Homo sapiens
ctctcagtgtatatc

SEQ ID NO: 1804245 - DNA, 15 bp, Homo sapiens
tctcagtgtatatct

SEQ ID NO: 1804246 - DNA, 15 bp, Homo sapiens
ctcagtgtatatctg

SEQ ID NO: 1804247 - DNA, 15 bp, Homo sapiens
tcagtgtatatctgg

SEQ ID NO: 1804248 - DNA, 15 bp, Homo sapiens
cagtgtatatctgga

SEQ ID NO: 1804249 - DNA, 15 bp, Homo sapiens
agtgtatatctggat

SEQ ID NO: 1804250 - DNA, 15 bp, Homo sapiens
gtgtatatctggata

SEQ ID NO: 1804251 - DNA, 15 bp, Homo sapiens
tgtatatctggatag

SEQ ID NO: 1804252 - DNA, 15 bp, Homo sapiens
gtatatctggataga

SEQ ID NO: 1804253 - DNA, 15 bp, Homo sapiens
tatatctggatagaa

SEQ ID NO: 1804254 - DNA, 15 bp, Homo sapiens
atatctggatagaat

SEQ ID NO: 1804255 - DNA, 15 bp, Homo sapiens
tagaattctcactca

SEQ ID NO: 1804256 - DNA, 15 bp, Homo sapiens
agaattctcactcac

SEQ ID NO: 1804257 - DNA, 15 bp, Homo sapiens
gaattctcactcact

SEQ ID NO: 1804258 - DNA, 15 bp, Homo sapiens
aattctcactcactg

SEQ ID NO: 1804259 - DNA, 15 bp, Homo sapiens
attctcactcactgt

SEQ ID NO: 1804260 - DNA, 15 bp, Homo sapiens
ttctcactcactgta

SEQ ID NO: 1804261 - DNA, 15 bp, Homo sapiens
tctcactcactgtat

SEQ ID NO: 1804262 - DNA, 15 bp, Homo sapiens
ctcactcactgtata

SEQ ID NO: 1804263 - DNA, 15 bp, Homo sapiens
tcactcactgtatag

SEQ ID NO: 1804264 - DNA, 15 bp, Homo sapiens
cactcactgtataga

SEQ ID NO: 1804265 - DNA, 15 bp, Homo sapiens
actcactgtatagaa

SEQ ID NO: 1804266 - DNA, 15 bp, Homo sapiens
ctcactgtatagaac

SEQ ID NO: 1804267 - DNA, 15 bp, Homo sapiens
tcactgtatagaact

SEQ ID NO: 1804268 - DNA, 15 bp, Homo sapiens
cactgtatagaactc

SEQ ID NO: 1804269 - DNA, 15 bp, Homo sapiens
actgtatagaactct

SEQ ID NO: 1804270 - DNA, 15 bp, Homo sapiens
ctgtatagaactctc

SEQ ID NO: 1804271 - DNA, 15 bp, Homo sapiens
tgtatagaactctca

SEQ ID NO: 1804272 - DNA, 15 bp, Homo sapiens
gtatagaactctcac

SEQ ID NO: 1804273 - DNA, 15 bp, Homo sapiens
tatagaactctcact

SEQ ID NO: 1804274 - DNA, 15 bp, Homo sapiens
actctcactatctgt

SEQ ID NO: 1804275 - DNA, 15 bp, Homo sapiens
ctctcactatctgtc

SEQ ID NO: 1804276 - DNA, 15 bp, Homo sapiens
agaattctcaccatg

SEQ ID NO: 1804277 - DNA, 15 bp, Homo sapiens
gaattctcaccatgt

SEQ ID NO: 1804278 - DNA, 15 bp, Homo sapiens
aattctcaccatgtg

SEQ ID NO: 1804279 - DNA, 15 bp, Homo sapiens
attctcaccatgtgt

SEQ ID NO: 1804280 - DNA, 15 bp, Homo sapiens
ttctcaccatgtgta

SEQ ID NO: 1804281 - DNA, 15 bp, Homo sapiens
tctcaccatgtgtat

SEQ ID NO: 1804282 - DNA, 15 bp, Homo sapiens
ctcaccatgtgtatt

SEQ ID NO: 1804283 - DNA, 15 bp, Homo sapiens
tcaccatgtgtattg

SEQ ID NO: 1804284 - DNA, 15 bp, Homo sapiens
caccatgtgtattga

SEQ ID NO: 1804285 - DNA, 15 bp, Homo sapiens
accatgtgtattgat

SEQ ID NO: 1804286 - DNA, 15 bp, Homo sapiens
ccatgtgtattgatc

SEQ ID NO: 1804287 - DNA, 15 bp, Homo sapiens
catgtgtattgatct

SEQ ID NO: 1804288 - DNA, 15 bp, Homo sapiens
atgtgtattgatctc
